United States Patent Application Publication US 2014/0004565 A1 - sequence listing, part 45

SEQ ID NO: 1044943 - RNA, 19 nt, Artificial Sequence
  Description of Artificial Sequence: Synthetic oligonucleotide
gggauaaugcuggcuuacc

SEQ ID NO: 1044944 - RNA, 19 nt, Artificial Sequence
  Description of Artificial Sequence: Synthetic oligonucleotide
gaacucgaacugggccggg

SEQ ID NO: 1044945 - RNA, 19 nt, Artificial Sequence
  Description of Artificial Sequence: Synthetic oligonucleotide
aucgcuggucucgcugcuc

SEQ ID NO: 1044946 - RNA, 19 nt, Artificial Sequence
  Description of Artificial Sequence: Synthetic oligonucleotide
cacugcuaggcugggauaa

SEQ ID NO: 1044947 - RNA, 19 nt, Artificial Sequence
  Description of Artificial Sequence: Synthetic oligonucleotide
cccagaggaacgaguuuag

SEQ ID NO: 1044948 - RNA, 19 nt, Artificial Sequence
  Description of Artificial Sequence: Synthetic oligonucleotide
cuacaacaccaugaggucu

SEQ ID NO: 1044949 - RNA, 19 nt, Artificial Sequence
  Description of Artificial Sequence: Synthetic oligonucleotide
ggcaguuauggauuccccu

SEQ ID NO: 1044950 - RNA, 19 nt, Artificial Sequence
  Description of Artificial Sequence: Synthetic oligonucleotide
agauccugguucacaccca

SEQ ID NO: 1044951 - RNA, 19 nt, Artificial Sequence
  Description of Artificial Sequence: Synthetic oligonucleotide
uggauuccccuggcacaag

SEQ ID NO: 1044952 - RNA, 19 nt, Artificial Sequence
  Description of Artificial Sequence: Synthetic oligonucleotide
ccucuaguggugguacagg

SEQ ID NO: 1044953 - RNA, 19 nt, Artificial Sequence
  Description of Artificial Sequence: Synthetic oligonucleotide
ggccuugaaacugggguuc

SEQ ID NO: 1044954 - RNA, 19 nt, Artificial Sequence
  Description of Artificial Sequence: Synthetic oligonucleotide
cccugugauaggcaaucug

SEQ ID NO: 1044955 - RNA, 19 nt, Artificial Sequence
  Description of Artificial Sequence: Synthetic oligonucleotide
cugugggaccucuccucuc

SEQ ID NO: 1044956 - RNA, 19 nt, Artificial Sequence
  Description of Artificial Sequence: Synthetic oligonucleotide
ugccccggccuuguuuuga

SEQ ID NO: 1044957 - RNA, 19 nt, Artificial Sequence
  Description of Artificial Sequence: Synthetic oligonucleotide
cggcacaacuccaggacag

SEQ ID NO: 1044958 - RNA, 19 nt, Artificial Sequence
  Description of Artificial Sequence: Synthetic oligonucleotide
cacacccagaggaacgagu

SEQ ID NO: 1044959 - RNA, 19 nt, Artificial Sequence
  Description of Artificial Sequence: Synthetic oligonucleotide
guaguugggcucugacagu

SEQ ID NO: 1044960 - RNA, 19 nt, Artificial Sequence
  Description of Artificial Sequence: Synthetic oligonucleotide
cacccaacuuccccugaga

SEQ ID NO: 1044961 - RNA, 19 nt, Artificial Sequence
  Description of Artificial Sequence: Synthetic oligonucleotide
uguuggacuugcggcccuc

SEQ ID NO: 1044962 - RNA, 19 nt, Artificial Sequence
  Description of Artificial Sequence: Synthetic oligonucleotide
cagucacuaucgcuggucu

SEQ ID NO: 1044963 - RNA, 19 nt, Artificial Sequence
  Description of Artificial Sequence: Synthetic oligonucleotide
cugcggcacugucugucug

SEQ ID NO: 1044964 - RNA, 19 nt, Artificial Sequence
  Description of Artificial Sequence: Synthetic oligonucleotide
gcuaggcugggauaaugcu

SEQ ID NO: 1044965 - RNA, 19 nt, Artificial Sequence
  Description of Artificial Sequence: Synthetic oligonucleotide
gacucuggcgcgacccgga

SEQ ID NO: 1044966 - RNA, 19 nt, Artificial Sequence
  Description of Artificial Sequence: Synthetic oligonucleotide
cccaugguggaacauaccu

SEQ ID NO: 1044967 - RNA, 19 nt, Artificial Sequence
  Description of Artificial Sequence: Synthetic oligonucleotide
ccuagagaaggagggcuug

SEQ ID NO: 1044968 - RNA, 19 nt, Artificial Sequence
  Description of Artificial Sequence: Synthetic oligonucleotide
caggccucuaggcaguuau

SEQ ID NO: 1044969 - RNA, 19 nt, Artificial Sequence
  Description of Artificial Sequence: Synthetic oligonucleotide
ugggcccuuggaguguuuu

SEQ ID NO: 1044970 - RNA, 19 nt, Artificial Sequence
  Description of Artificial Sequence: Synthetic oligonucleotide
gacgcagggagcccaugau

SEQ ID NO: 1044971 - RNA, 19 nt, Artificial Sequence
  Description of Artificial Sequence: Synthetic oligonucleotide
ggccucaggccucuaggca

SEQ ID NO: 1044972 - RNA, 19 nt, Artificial Sequence
  Description of Artificial Sequence: Synthetic oligonucleotide
caggcuagacagacaucaa

SEQ ID NO: 1044973 - RNA, 19 nt, Artificial Sequence
  Description of Artificial Sequence: Synthetic oligonucleotide
gcggcacaacuccaggaca

SEQ ID NO: 1044974 - RNA, 19 nt, Artificial Sequence
  Description of Artificial Sequence: Synthetic oligonucleotide
acugcuaggcugggauaau

SEQ ID NO: 1044975 - RNA, 19 nt, Artificial Sequence
  Description of Artificial Sequence: Synthetic oligonucleotide
acucuggcgcgacccggaa

SEQ ID NO: 1044976 - RNA, 19 nt, Artificial Sequence
  Description of Artificial Sequence: Synthetic oligonucleotide
cuuugucuagauccugguu

SEQ ID NO: 1044977 - RNA, 19 nt, Artificial Sequence
  Description of Artificial Sequence: Synthetic oligonucleotide
ccuuguuuugaggguguug

SEQ ID NO: 1044978 - RNA, 19 nt, Artificial Sequence
  Description of Artificial Sequence: Synthetic oligonucleotide
cuggcgcgacccggaaacg

SEQ ID NO: 1044979 - RNA, 19 nt, Artificial Sequence
  Description of Artificial Sequence: Synthetic oligonucleotide
cggcauuuggcccacacaa

SEQ ID NO: 1044980 - RNA, 19 nt, Artificial Sequence
  Description of Artificial Sequence: Synthetic oligonucleotide
gcuuaccuuaccaccugca

SEQ ID NO: 1044981 - RNA, 19 nt, Artificial Sequence
  Description of Artificial Sequence: Synthetic oligonucleotide
acgccgcggccagugcccc

SEQ ID NO: 1044982 - RNA, 19 nt, Artificial Sequence
  Description of Artificial Sequence: Synthetic oligonucleotide
uugggcgguccagcugucu

SEQ ID NO: 1044983 - RNA, 19 nt, Artificial Sequence
  Description of Artificial Sequence: Synthetic oligonucleotide
cuugggcgguccagcuguc

SEQ ID NO: 1044984 - RNA, 19 nt, Artificial Sequence
  Description of Artificial Sequence: Synthetic oligonucleotide
uguugggacccaggccuuu

SEQ ID NO: 1044985 - RNA, 19 nt, Artificial Sequence
  Description of Artificial Sequence: Synthetic oligonucleotide
cagguucguuuguugucaa

SEQ ID NO: 1044986 - RNA, 19 nt, Artificial Sequence
  Description of Artificial Sequence: Synthetic oligonucleotide
gucaucuggcucucccggu

SEQ ID NO: 1044987 - RNA, 19 nt, Artificial Sequence
  Description of Artificial Sequence: Synthetic oligonucleotide
ccucgacccagacucuuuc

SEQ ID NO: 1044988 - RNA, 19 nt, Artificial Sequence
  Description of Artificial Sequence: Synthetic oligonucleotide
gugccccacggaguaggcc

SEQ ID NO: 1044989 - RNA, 19 nt, Artificial Sequence
  Description of Artificial Sequence: Synthetic oligonucleotide
gggaaggagaucggucaca

SEQ ID NO: 1044990 - RNA, 19 nt, Artificial Sequence
  Description of Artificial Sequence: Synthetic oligonucleotide
gggcggcacaacuccagga

SEQ ID NO: 1044991 - RNA, 19 nt, Artificial Sequence
  Description of Artificial Sequence: Synthetic oligonucleotide
cuccuaccccucuugcgcu

SEQ ID NO: 1044992 - RNA, 19 nt, Artificial Sequence
  Description of Artificial Sequence: Synthetic oligonucleotide
ucaggccucuaggcaguua

SEQ ID NO: 1044993 - RNA, 19 nt, Artificial Sequence
  Description of Artificial Sequence: Synthetic oligonucleotide
gccccggccuuguuuugag

SEQ ID NO: 1044994 - RNA, 19 nt, Artificial Sequence
  Description of Artificial Sequence: Synthetic oligonucleotide
gccucuugggcgguccagc

SEQ ID NO: 1044995 - RNA, 19 nt, Artificial Sequence
  Description of Artificial Sequence: Synthetic oligonucleotide
acaacaccaugaggucuua

SEQ ID NO: 1044996 - RNA, 19 nt, Artificial Sequence
  Description of Artificial Sequence: Synthetic oligonucleotide
cgguacaccaagaaacucu

SEQ ID NO: 1044997 - RNA, 19 nt, Artificial Sequence
  Description of Artificial Sequence: Synthetic oligonucleotide
gggcgguccagcugucuuc

SEQ ID NO: 1044998 - RNA, 19 nt, Artificial Sequence
  Description of Artificial Sequence: Synthetic oligonucleotide
acccugcaccuugcuucgg

SEQ ID NO: 1044999 - RNA, 19 nt, Artificial Sequence
  Description of Artificial Sequence: Synthetic oligonucleotide
gggaugggaaccccauggu

SEQ ID NO: 1045000 - RNA, 19 nt, Artificial Sequence
  Description of Artificial Sequence: Synthetic oligonucleotide
ccacgccgcggccagugcc

SEQ ID NO: 1045001 - RNA, 19 nt, Artificial Sequence
  Description of Artificial Sequence: Synthetic oligonucleotide
ccaaaugacucuggcgcga

SEQ ID NO: 1045002 - RNA, 19 nt, Artificial Sequence
  Description of Artificial Sequence: Synthetic oligonucleotide
ggcccuuggaguguuuugu

SEQ ID NO: 1045003 - RNA, 19 nt, Artificial Sequence
  Description of Artificial Sequence: Synthetic oligonucleotide
gccggcccggccucuuggg

SEQ ID NO: 1045004 - RNA, 19 nt, Artificial Sequence
  Description of Artificial Sequence: Synthetic oligonucleotide
ggucugaggcggcacuacu

SEQ ID NO: 1045005 - RNA, 19 nt, Artificial Sequence
  Description of Artificial Sequence: Synthetic oligonucleotide
cccuggcacaagcagguaa

SEQ ID NO: 1045006 - RNA, 19 nt, Artificial Sequence
  Description of Artificial Sequence: Synthetic oligonucleotide
guccggucugaggcggcac

SEQ ID NO: 1045007 - RNA, 19 nt, Artificial Sequence
  Description of Artificial Sequence: Synthetic oligonucleotide
gacccaccauccugcccua

SEQ ID NO: 1045008 - RNA, 19 nt, Artificial Sequence
  Description of Artificial Sequence: Synthetic oligonucleotide
cucuggcgcgacccggaaa

SEQ ID NO: 1045009 - RNA, 19 nt, Artificial Sequence
  Description of Artificial Sequence: Synthetic oligonucleotide
caacaccaugaggucuuaa

SEQ ID NO: 1045010 - RNA, 19 nt, Artificial Sequence
  Description of Artificial Sequence: Synthetic oligonucleotide
gcccuuggaguguuuugua

SEQ ID NO: 1045011 - RNA, 19 nt, Artificial Sequence
  Description of Artificial Sequence: Synthetic oligonucleotide
ggcauguuuuaugcaguau

SEQ ID NO: 1045012 - RNA, 19 nt, Artificial Sequence
  Description of Artificial Sequence: Synthetic oligonucleotide
gagcccugugauaggcaau

SEQ ID NO: 1045013 - RNA, 19 nt, Artificial Sequence
  Description of Artificial Sequence: Synthetic oligonucleotide
gaaccccaugguggaacau

SEQ ID NO: 1045014 - RNA, 19 nt, Artificial Sequence
  Description of Artificial Sequence: Synthetic oligonucleotide
cugaguggccaugggcccu

SEQ ID NO: 1045015 - RNA, 19 nt, Artificial Sequence
  Description of Artificial Sequence: Synthetic oligonucleotide
gcggcacugucugucuguc

SEQ ID NO: 1045016 - RNA, 19 nt, Artificial Sequence
  Description of Artificial Sequence: Synthetic oligonucleotide
cacuaucgcuggucucgcu

SEQ ID NO: 1045017 - RNA, 19 nt, Artificial Sequence
  Description of Artificial Sequence: Synthetic oligonucleotide
ccggcccggccucuugggc

SEQ ID NO: 1045018 - RNA, 19 nt, Artificial Sequence
  Description of Artificial Sequence: Synthetic oligonucleotide
ggcugggauaaugcuggcu

SEQ ID NO: 1045019 - RNA, 19 nt, Artificial Sequence
  Description of Artificial Sequence: Synthetic oligonucleotide
cuucugcggcacugucugu

SEQ ID NO: 1045020 - RNA, 19 nt, Artificial Sequence
  Description of Artificial Sequence: Synthetic oligonucleotide
cacccagaggaacgaguuu

SEQ ID NO: 1045021 - RNA, 19 nt, Artificial Sequence
  Description of Artificial Sequence: Synthetic oligonucleotide
cagcuccucgacccagacu

SEQ ID NO: 1045022 - RNA, 19 nt, Artificial Sequence
  Description of Artificial Sequence: Synthetic oligonucleotide
ccacugcuaggcugggaua

SEQ ID NO: 1045023 - RNA, 19 nt, Artificial Sequence
  Description of Artificial Sequence: Synthetic oligonucleotide
gcaggggaggggucaccua

SEQ ID NO: 1045024 - RNA, 19 nt, Artificial Sequence
  Description of Artificial Sequence: Synthetic oligonucleotide
ccggccuuguuuugagggu

SEQ ID NO: 1045025 - RNA, 19 nt, Artificial Sequence
  Description of Artificial Sequence: Synthetic oligonucleotide
ccuugcacugaguggccau

SEQ ID NO: 1045026 - RNA, 19 nt, Artificial Sequence
  Description of Artificial Sequence: Synthetic oligonucleotide
cccacgccgcggccagugc

SEQ ID NO: 1045027 - RNA, 19 nt, Artificial Sequence
  Description of Artificial Sequence: Synthetic oligonucleotide
cccuagagaaggagggcuu

SEQ ID NO: 1045028 - RNA, 19 nt, Artificial Sequence
  Description of Artificial Sequence: Synthetic oligonucleotide
ccccaagaccaggaauuaa

SEQ ID NO: 1045029 - RNA, 19 nt, Artificial Sequence
  Description of Artificial Sequence: Synthetic oligonucleotide
ccuaccccucuugcgcuga

SEQ ID NO: 1045030 - RNA, 19 nt, Artificial Sequence
  Description of Artificial Sequence: Synthetic oligonucleotide
gcgcugacgcagggagccc

SEQ ID NO: 1045031 - RNA, 19 nt, Artificial Sequence
  Description of Artificial Sequence: Synthetic oligonucleotide
cuccucgacccagacucuu

SEQ ID NO: 1045032 - RNA, 19 nt, Artificial Sequence
  Description of Artificial Sequence: Synthetic oligonucleotide
gcgacccggaaacgcaguu

SEQ ID NO: 1045033 - RNA, 19 nt, Artificial Sequence
  Description of Artificial Sequence: Synthetic oligonucleotide
ccagaggaacgaguuuagu

SEQ ID NO: 1045034 - RNA, 19 nt, Artificial Sequence
  Description of Artificial Sequence: Synthetic oligonucleotide
gguggugguauggcauguu

SEQ ID NO: 1045035 - RNA, 19 nt, Artificial Sequence
  Description of Artificial Sequence: Synthetic oligonucleotide
augggcccuuggaguguuu

SEQ ID NO: 1045036 - RNA, 19 nt, Artificial Sequence
  Description of Artificial Sequence: Synthetic oligonucleotide
ccgcggccagugccccacg

SEQ ID NO: 1045037 - RNA, 19 nt, Artificial Sequence
  Description of Artificial Sequence: Synthetic oligonucleotide
gcuccucgacccagacucu

SEQ ID NO: 1045038 - RNA, 19 nt, Artificial Sequence
  Description of Artificial Sequence: Synthetic oligonucleotide
cucaggccucuaggcaguu

SEQ ID NO: 1045039 - RNA, 19 nt, Artificial Sequence
  Description of Artificial Sequence: Synthetic oligonucleotide
cgacccggaaacgcaguua

SEQ ID NO: 1045040 - RNA, 19 nt, Artificial Sequence
  Description of Artificial Sequence: Synthetic oligonucleotide
ccggucugaggcggcacua

SEQ ID NO: 1045041 - RNA, 19 nt, Artificial Sequence
  Description of Artificial Sequence: Synthetic oligonucleotide
gccccucuuccaggcuaga

SEQ ID NO: 1045042 - RNA, 19 nt, Artificial Sequence
  Description of Artificial Sequence: Synthetic oligonucleotide
gggcuugccccggccuugu

SEQ ID NO: 1045043 - RNA, 19 nt, Artificial Sequence
  Description of Artificial Sequence: Synthetic oligonucleotide
ccccacggaguaggccuca

SEQ ID NO: 1045044 - RNA, 19 nt, Artificial Sequence
  Description of Artificial Sequence: Synthetic oligonucleotide
cccacaggacugccuccgu

SEQ ID NO: 1045045 - RNA, 19 nt, Artificial Sequence
  Description of Artificial Sequence: Synthetic oligonucleotide
ccccugagacuggccccaa

SEQ ID NO: 1045046 - RNA, 19 nt, Artificial Sequence
  Description of Artificial Sequence: Synthetic oligonucleotide
aaaacgaggacuaagacac

SEQ ID NO: 1045047 - RNA, 19 nt, Artificial Sequence
  Description of Artificial Sequence: Synthetic oligonucleotide
aauucaauuugccccaucc

SEQ ID NO: 1045048 - RNA, 19 nt, Artificial Sequence
  Description of Artificial Sequence: Synthetic oligonucleotide
aaaguauccccucuuauac

SEQ ID NO: 1045049 - RNA, 19 nt, Artificial Sequence
  Description of Artificial Sequence: Synthetic oligonucleotide
aaacauacgucguugacac

SEQ ID NO: 1045050 - RNA, 19 nt, Artificial Sequence
  Description of Artificial Sequence: Synthetic oligonucleotide
aggauuuuggcauagcugc

SEQ ID NO: 1045051 - RNA, 19 nt, Artificial Sequence
  Description of Artificial Sequence: Synthetic oligonucleotide
acuacuggaauuuuauugc

SEQ ID NO: 1045052 - RNA, 19 nt, Artificial Sequence
  Description of Artificial Sequence: Synthetic oligonucleotide
aguuacagaaaauugauca

SEQ ID NO: 1045053 - RNA, 19 nt, Artificial Sequence
  Description of Artificial Sequence: Synthetic oligonucleotide
aagucuaaaaguuuauugu

SEQ ID NO: 1045054 - RNA, 19 nt, Artificial Sequence
  Description of Artificial Sequence: Synthetic oligonucleotide
acuaagggaaacuugggac

SEQ ID NO: 1045055 - RNA, 19 nt, Artificial Sequence
  Description of Artificial Sequence: Synthetic oligonucleotide
ucaacuaugaccacucgcc

SEQ ID NO: 1045056 - RNA, 19 nt, Artificial Sequence
  Description of Artificial Sequence: Synthetic oligonucleotide
cauuaguugagccaaaagc

SEQ ID NO: 1045057 - RNA, 19 nt, Artificial Sequence
  Description of Artificial Sequence: Synthetic oligonucleotide
aguaauaccaaaccaaaca

SEQ ID NO: 1045058 - RNA, 19 nt, Artificial Sequence
  Description of Artificial Sequence: Synthetic oligonucleotide
aagaguauauggguaauac

SEQ ID NO: 1045059 - RNA, 19 nt, Artificial Sequence
  Description of Artificial Sequence: Synthetic oligonucleotide
aauccguuuaaucucuauc

SEQ ID NO: 1045060 - RNA, 19 nt, Artificial Sequence
  Description of Artificial Sequence: Synthetic oligonucleotide
uguucuaccgcuauacugc

SEQ ID NO: 1045061 - RNA, 19 nt, Artificial Sequence
  Description of Artificial Sequence: Synthetic oligonucleotide
acaaucuauguucucaaac

SEQ ID NO: 1045062 - RNA, 19 nt, Artificial Sequence
  Description of Artificial Sequence: Synthetic oligonucleotide
aaucucuaucuccaagccc

SEQ ID NO: 1045063 - RNA, 19 nt, Artificial Sequence
  Description of Artificial Sequence: Synthetic oligonucleotide
uuaaucucuaucuccaagc

SEQ ID NO: 1045064 - RNA, 19 nt, Artificial Sequence
  Description of Artificial Sequence: Synthetic oligonucleotide
uuuuauugcggcuacgucu

SEQ ID NO: 1045065 - RNA, 19 nt, Artificial Sequence
  Description of Artificial Sequence: Synthetic oligonucleotide
aguguaacuauuuagguua

SEQ ID NO: 1045066 - RNA, 19 nt, Artificial Sequence
  Description of Artificial Sequence: Synthetic oligonucleotide
uggaacaaagagaugaugu

SEQ ID NO: 1045067 - RNA, 19 nt, Artificial Sequence
  Description of Artificial Sequence: Synthetic oligonucleotide
aacuaugaccacucgccgc

SEQ ID NO: 1045068 - RNA, 19 nt, Artificial Sequence
  Description of Artificial Sequence: Synthetic oligonucleotide
agaaauaacaaaacgagga

SEQ ID NO: 1045069 - RNA, 19 nt, Artificial Sequence
  Description of Artificial Sequence: Synthetic oligonucleotide
gguaauacaaucuauguuc

SEQ ID NO: 1045070 - RNA, 19 nt, Artificial Sequence
  Description of Artificial Sequence: Synthetic oligonucleotide
uuauacgccaugucaaccg

SEQ ID NO: 1045071 - RNA, 19 nt, Artificial Sequence
  Description of Artificial Sequence: Synthetic oligonucleotide
uuuaaucucuaucuccaag

SEQ ID NO: 1045072 - RNA, 19 nt, Artificial Sequence
  Description of Artificial Sequence: Synthetic oligonucleotide
aaauugaucaaaacagaag

SEQ ID NO: 1045073 - RNA, 19 nt, Artificial Sequence
  Description of Artificial Sequence: Synthetic oligonucleotide
uaauauagaaaguguaacu

SEQ ID NO: 1045074 - RNA, 19 nt, Artificial Sequence
  Description of Artificial Sequence: Synthetic oligonucleotide
uauacugcaagcaccaggu

SEQ ID NO: 1045075 - RNA, 19 nt, Artificial Sequence
  Description of Artificial Sequence: Synthetic oligonucleotide
aagcacacuacauuaguug

SEQ ID NO: 1045076 - RNA, 19 nt, Artificial Sequence
  Description of Artificial Sequence: Synthetic oligonucleotide
uguucucaaacuaagggaa

SEQ ID NO: 1045077 - RNA, 19 nt, Artificial Sequence
  Description of Artificial Sequence: Synthetic oligonucleotide
uuuggaucgaugaugccgc

SEQ ID NO: 1045078 - RNA, 19 nt, Artificial Sequence
  Description of Artificial Sequence: Synthetic oligonucleotide
ucuccuaauauagaaagug

SEQ ID NO: 1045079 - RNA, 19 nt, Artificial Sequence
  Description of Artificial Sequence: Synthetic oligonucleotide
uaagacaccagcaauccgu

SEQ ID NO: 1045080 - RNA, 19 nt, Artificial Sequence
  Description of Artificial Sequence: Synthetic oligonucleotide
cuugcuuacggauucgugc

SEQ ID NO: 1045081 - RNA, 19 nt, Artificial Sequence
  Description of Artificial Sequence: Synthetic oligonucleotide
ugacuaacaaagagcaaag

SEQ ID NO: 1045082 - RNA, 19 nt, Artificial Sequence
  Description of Artificial Sequence: Synthetic oligonucleotide
uauacccagugacagcucg

SEQ ID NO: 1045083 - RNA, 19 nt, Artificial Sequence
  Description of Artificial Sequence: Synthetic oligonucleotide
uucauugcuuggaacaaag

SEQ ID NO: 1045084 - RNA, 19 nt, Artificial Sequence
  Description of Artificial Sequence: Synthetic oligonucleotide
aguuuauugucagaacagc

SEQ ID NO: 1045085 - RNA, 19 nt, Artificial Sequence
  Description of Artificial Sequence: Synthetic oligonucleotide
ucuauaccuucugugaugg

SEQ ID NO: 1045086 - RNA, 19 nt, Artificial Sequence
  Description of Artificial Sequence: Synthetic oligonucleotide
acaaaacgaggacuaagac

SEQ ID NO: 1045087 - RNA, 19 nt, Artificial Sequence
  Description of Artificial Sequence: Synthetic oligonucleotide
agcuagagaagccaaauga

SEQ ID NO: 1045088 - RNA, 19 nt, Artificial Sequence
  Description of Artificial Sequence: Synthetic oligonucleotide
aagcaucgaauguucuacc

SEQ ID NO: 1045089 - RNA, 19 nt, Artificial Sequence
  Description of Artificial Sequence: Synthetic oligonucleotide
aaaacauacgucguugaca

SEQ ID NO: 1045090 - RNA, 19 nt, Artificial Sequence
  Description of Artificial Sequence: Synthetic oligonucleotide
uugacuaacaaagagcaaa

SEQ ID NO: 1045091 - RNA, 19 nt, Artificial Sequence
  Description of Artificial Sequence: Synthetic oligonucleotide
acauacgucguugacaccg

SEQ ID NO: 1045092 - RNA, 19 nt, Artificial Sequence
  Description of Artificial Sequence: Synthetic oligonucleotide
uuaaauuucuaacgcugga

SEQ ID NO: 1045093 - RNA, 19 nt, Artificial Sequence
  Description of Artificial Sequence: Synthetic oligonucleotide
uuaauuugguuuuggggca

SEQ ID NO: 1045094 - RNA, 19 nt, Artificial Sequence
  Description of Artificial Sequence: Synthetic oligonucleotide
uauaccuucugugauggag

SEQ ID NO: 1045095 - RNA, 19 nt, Artificial Sequence
  Description of Artificial Sequence: Synthetic oligonucleotide
uucacuacguggaagcaca

SEQ ID NO: 1045096 - RNA, 19 nt, Artificial Sequence
  Description of Artificial Sequence: Synthetic oligonucleotide
uguaagaguauauggguaa

SEQ ID NO: 1045097 - RNA, 19 nt, Artificial Sequence
  Description of Artificial Sequence: Synthetic oligonucleotide
aaguauccccucuuauacg

SEQ ID NO: 1045098 - RNA, 19 nt, Artificial Sequence
  Description of Artificial Sequence: Synthetic oligonucleotide
cuuuggaucgaugaugccg

SEQ ID NO: 1045099 - RNA, 19 nt, Artificial Sequence
  Description of Artificial Sequence: Synthetic oligonucleotide
aauggggcucgacuccucc

SEQ ID NO: 1045100 - RNA, 19 nt, Artificial Sequence
  Description of Artificial Sequence: Synthetic oligonucleotide
gucgaugaaacccuuucgg

SEQ ID NO: 1045101 - RNA, 19 nt, Artificial Sequence
  Description of Artificial Sequence: Synthetic oligonucleotide
caucgggucaacuaugacc

SEQ ID NO: 1045102 - RNA, 19 nt, Artificial Sequence
  Description of Artificial Sequence: Synthetic oligonucleotide
auccguuuaaucucuaucu

SEQ ID NO: 1045103 - RNA, 19 nt, Artificial Sequence
  Description of Artificial Sequence: Synthetic oligonucleotide
uuucggauggcuucuucgg

SEQ ID NO: 1045104 - RNA, 19 nt, Artificial Sequence
  Description of Artificial Sequence: Synthetic oligonucleotide
uaucuugcaaccucugagc

SEQ ID NO: 1045105 - RNA, 19 nt, Artificial Sequence
  Description of Artificial Sequence: Synthetic oligonucleotide
uuuauugcggcuacgucuc

SEQ ID NO: 1045106 - RNA, 19 nt, Artificial Sequence
  Description of Artificial Sequence: Synthetic oligonucleotide
acacuacauuaguugagcc

SEQ ID NO: 1045107 - RNA, 19 nt, Artificial Sequence
  Description of Artificial Sequence: Synthetic oligonucleotide
ucaguugcagauagguaag

SEQ ID NO: 1045108 - RNA, 19 nt, Artificial Sequence
  Description of Artificial Sequence: Synthetic oligonucleotide
aacaaaacgaggacuaaga

SEQ ID NO: 1045109 - RNA, 19 nt, Artificial Sequence
  Description of Artificial Sequence: Synthetic oligonucleotide
auguucucaaacuaaggga

SEQ ID NO: 1045110 - RNA, 19 nt, Artificial Sequence
  Description of Artificial Sequence: Synthetic oligonucleotide
aaucuauguucucaaacua

SEQ ID NO: 1045111 - RNA, 19 nt, Artificial Sequence
  Description of Artificial Sequence: Synthetic oligonucleotide
aaugagccuuuacuacugg

SEQ ID NO: 1045112 - RNA, 19 nt, Artificial Sequence
  Description of Artificial Sequence: Synthetic oligonucleotide
aaguguaacuauuuagguu

SEQ ID NO: 1045113 - RNA, 19 nt, Artificial Sequence
  Description of Artificial Sequence: Synthetic oligonucleotide
accgcuauacugcaagcac

SEQ ID NO: 1045114 - RNA, 19 nt, Artificial Sequence
  Description of Artificial Sequence: Synthetic oligonucleotide
auuuuauugcggcuacguc

SEQ ID NO: 1045115 - RNA, 19 nt, Artificial Sequence
  Description of Artificial Sequence: Synthetic oligonucleotide
cuauacugcaagcaccagg

SEQ ID NO: 1045116 - RNA, 19 nt, Artificial Sequence
  Description of Artificial Sequence: Synthetic oligonucleotide
uggguaauacaaucuaugu

SEQ ID NO: 1045117 - RNA, 19 nt, Artificial Sequence
  Description of Artificial Sequence: Synthetic oligonucleotide
auucuuuugcgacgucugc

SEQ ID NO: 1045118 - RNA, 19 nt, Artificial Sequence
  Description of Artificial Sequence: Synthetic oligonucleotide
uauacgccaugucaaccgg

SEQ ID NO: 1045119 - RNA, 19 nt, Artificial Sequence
  Description of Artificial Sequence: Synthetic oligonucleotide
uauugucagaacagcaaac

SEQ ID NO: 1045120 - RNA, 19 nt, Artificial Sequence
  Description of Artificial Sequence: Synthetic oligonucleotide
guauauggguaauacaauc

SEQ ID NO: 1045121 - RNA, 19 nt, Artificial Sequence
  Description of Artificial Sequence: Synthetic oligonucleotide
uuucagggucguuauaccc

SEQ ID NO: 1045122 - RNA, 19 nt, Artificial Sequence
  Description of Artificial Sequence: Synthetic oligonucleotide
ugcuauuguggacauaguc

SEQ ID NO: 1045123 - RNA, 19 nt, Artificial Sequence
  Description of Artificial Sequence: Synthetic oligonucleotide
aaugccccucucuauaccu

SEQ ID NO: 1045124 - RNA, 19 nt, Artificial Sequence
  Description of Artificial Sequence: Synthetic oligonucleotide
cuucggaugguuaaauuuc

SEQ ID NO: 1045125 - RNA, 19 nt, Artificial Sequence
  Description of Artificial Sequence: Synthetic oligonucleotide
agcaucgaauguucuaccg

SEQ ID NO: 1045126 - RNA, 19 nt, Artificial Sequence
  Description of Artificial Sequence: Synthetic oligonucleotide
uaacaaaacgaggacuaag

SEQ ID NO: 1045127 - RNA, 19 nt, Artificial Sequence
  Description of Artificial Sequence: Synthetic oligonucleotide
uugcuuacggauucgugcc

SEQ ID NO: 1045128 - RNA, 19 nt, Artificial Sequence
  Description of Artificial Sequence: Synthetic oligonucleotide
gaauguucuaccgcuauac

SEQ ID NO: 1045129 - RNA, 19 nt, Artificial Sequence
  Description of Artificial Sequence: Synthetic oligonucleotide
ucguuauacccagugacag

SEQ ID NO: 1045130 - RNA, 19 nt, Artificial Sequence
  Description of Artificial Sequence: Synthetic oligonucleotide
uacaccuucaaagccaaug

SEQ ID NO: 1045131 - RNA, 19 nt, Artificial Sequence
  Description of Artificial Sequence: Synthetic oligonucleotide
agauagguaagguuuuccu

SEQ ID NO: 1045132 - RNA, 19 nt, Artificial Sequence
  Description of Artificial Sequence: Synthetic oligonucleotide
acggccgucgaugaaaccc

SEQ ID NO: 1045133 - RNA, 19 nt, Artificial Sequence
  Description of Artificial Sequence: Synthetic oligonucleotide
ugguuaaauuucuaacgcu

SEQ ID NO: 1045134 - RNA, 19 nt, Artificial Sequence
  Description of Artificial Sequence: Synthetic oligonucleotide
acauuaguugagccaaaag

SEQ ID NO: 1045135 - RNA, 19 nt, Artificial Sequence
  Description of Artificial Sequence: Synthetic oligonucleotide
ucuugcaaccucugagccg

SEQ ID NO: 1045136 - RNA, 19 nt, Artificial Sequence
  Description of Artificial Sequence: Synthetic oligonucleotide
uauggguaauacaaucuau

SEQ ID NO: 1045137 - RNA, 19 nt, Artificial Sequence
  Description of Artificial Sequence: Synthetic oligonucleotide
agcacacuacauuaguuga

SEQ ID NO: 1045138 - RNA, 19 nt, Artificial Sequence
  Description of Artificial Sequence: Synthetic oligonucleotide
acuacauuaguugagccaa

SEQ ID NO: 1045139 - RNA, 19 nt, Artificial Sequence
  Description of Artificial Sequence: Synthetic oligonucleotide
uagaaaguguaacuauuua

SEQ ID NO: 1045140 - RNA, 19 nt, Artificial Sequence
  Description of Artificial Sequence: Synthetic oligonucleotide
acuaugaccacucgccgcu

SEQ ID NO: 1045141 - RNA, 19 nt, Artificial Sequence
  Description of Artificial Sequence: Synthetic oligonucleotide
aucucuaucuccaagccca

SEQ ID NO: 1045142 - RNA, 19 nt, Artificial Sequence
  Description of Artificial Sequence: Synthetic oligonucleotide
aacauacgucguugacacc

SEQ ID NO: 1045143 - RNA, 19 nt, Artificial Sequence
  Description of Artificial Sequence: Synthetic oligonucleotide
ucgaugaaacccuuucgga

SEQ ID NO: 1045144 - RNA, 19 nt, Artificial Sequence
  Description of Artificial Sequence: Synthetic oligonucleotide
uacggauucgugccgggag

SEQ ID NO: 1045145 - RNA, 19 nt, Artificial Sequence
  Description of Artificial Sequence: Synthetic oligonucleotide
ugucaaccggcaaacgaug

SEQ ID NO: 1045146 - RNA, 19 nt, Artificial Sequence
  Description of Artificial Sequence: Synthetic oligonucleotide
ucuuuugcgacgucugcac

SEQ ID NO: 1045147 - RNA, 19 nt, Artificial Sequence
  Description of Artificial Sequence: Synthetic oligonucleotide
uucggaugguuaaauuucu

SEQ ID NO: 1045148 - RNA, 19 nt, Artificial Sequence
  Description of Artificial Sequence: Synthetic oligonucleotide
aucgggucaacuaugacca

SEQ ID NO: 1045149 - RNA, 19 nt, Artificial Sequence
  Description of Artificial Sequence: Synthetic oligonucleotide
ucuuauacgccaugucaac

SEQ ID NO: 1045150 - RNA, 19 nt, Artificial Sequence
  Description of Artificial Sequence: Synthetic oligonucleotide
gguuaaauuucuaacgcug

SEQ ID NO: 1045151 - RNA, 19 nt, Artificial Sequence
  Description of Artificial Sequence: Synthetic oligonucleotide
aauaaacaggaaacccuug

SEQ ID NO: 1045152 - RNA, 19 nt, Artificial Sequence
  Description of Artificial Sequence: Synthetic oligonucleotide
uacgucguugacaccgccg

SEQ ID NO: 1045153 - RNA, 19 nt, Artificial Sequence
  Description of Artificial Sequence: Synthetic oligonucleotide
agaucaucgggucaacuau

SEQ ID NO: 1045154 - RNA, 19 nt, Artificial Sequence
  Description of Artificial Sequence: Synthetic oligonucleotide
gaggauuuuggcauagcug

SEQ ID NO: 1045155 - RNA, 19 nt, Artificial Sequence
  Description of Artificial Sequence: Synthetic oligonucleotide
uuuugcgacgucugcaccu

SEQ ID NO: 1045156 - RNA, 19 nt, Artificial Sequence
  Description of Artificial Sequence: Synthetic oligonucleotide
gucaacuaugaccacucgc

SEQ ID NO: 1045157 - RNA, 19 nt, Artificial Sequence
  Description of Artificial Sequence: Synthetic oligonucleotide
ucuucggugcugauccucc

SEQ ID NO: 1045158 - RNA, 19 nt, Artificial Sequence
  Description of Artificial Sequence: Synthetic oligonucleotide
uacgucucaagcaucgaau

SEQ ID NO: 1045159 - RNA, 19 nt, Artificial Sequence
  Description of Artificial Sequence: Synthetic oligonucleotide
ucucaagcaucgaauguuc

SEQ ID NO: 1045160 - RNA, 19 nt, Artificial Sequence
  Description of Artificial Sequence: Synthetic oligonucleotide
ggaugguuaaauuucuaac

SEQ ID NO: 1045161 - RNA, 19 nt, Artificial Sequence
  Description of Artificial Sequence: Synthetic oligonucleotide
caagcaucgaauguucuac

SEQ ID NO: 1045162 - RNA, 19 nt, Artificial Sequence
  Description of Artificial Sequence: Synthetic oligonucleotide
ucauagggaagccacuuuu

SEQ ID NO: 1045163 - RNA, 19 nt, Artificial Sequence
  Description of Artificial Sequence: Synthetic oligonucleotide
auucacuacguggaagcac

SEQ ID NO: 1045164 - RNA, 19 nt, Artificial Sequence
  Description of Artificial Sequence: Synthetic oligonucleotide
uccggugagguacuggaac

SEQ ID NO: 1045165 - RNA, 19 nt, Artificial Sequence
  Description of Artificial Sequence: Synthetic oligonucleotide
uccuuacaaaugauugcca

SEQ ID NO: 1045166 - RNA, 19 nt, Artificial Sequence
  Description of Artificial Sequence: Synthetic oligonucleotide
acggauucgugccgggagc

SEQ ID NO: 1045167 - RNA, 19 nt, Artificial Sequence
  Description of Artificial Sequence: Synthetic oligonucleotide
ugcaauggggcucgacucc

SEQ ID NO: 1045168 - RNA, 19 nt, Artificial Sequence
  Description of Artificial Sequence: Synthetic oligonucleotide
gccaacgccguuuucaagg

SEQ ID NO: 1045169 - RNA, 19 nt, Artificial Sequence
  Description of Artificial Sequence: Synthetic oligonucleotide
caaugaaggccuucugggc

SEQ ID NO: 1045170 - RNA, 19 nt, Artificial Sequence
  Description of Artificial Sequence: Synthetic oligonucleotide
ucaaccggcaaacgauggc

SEQ ID NO: 1045171 - RNA, 19 nt, Artificial Sequence
  Description of Artificial Sequence: Synthetic oligonucleotide
ucuugcuuacggauucgug

SEQ ID NO: 1045172 - RNA, 19 nt, Artificial Sequence
  Description of Artificial Sequence: Synthetic oligonucleotide
uccguuuaaucucuaucuc

SEQ ID NO: 1045173 - RNA, 19 nt, Artificial Sequence
  Description of Artificial Sequence: Synthetic oligonucleotide
gcugcuauuguggacauag

SEQ ID NO: 1045174 - RNA, 19 nt, Artificial Sequence
  Description of Artificial Sequence: Synthetic oligonucleotide
cacacuacauuaguugagc

SEQ ID NO: 1045175 - RNA, 19 nt, Artificial Sequence
  Description of Artificial Sequence: Synthetic oligonucleotide
ugauggagauuuucuccag

SEQ ID NO: 1045176 - RNA, 19 nt, Artificial Sequence
  Description of Artificial Sequence: Synthetic oligonucleotide
auggguaauacaaucuaug

SEQ ID NO: 1045177 - RNA, 19 nt, Artificial Sequence
  Description of Artificial Sequence: Synthetic oligonucleotide
uccuaaagucuaaaaguuu

SEQ ID NO: 1045178 - RNA, 19 nt, Artificial Sequence
  Description of Artificial Sequence: Synthetic oligonucleotide
cuuauacgccaugucaacc

SEQ ID NO: 1045179 - RNA, 19 nt, Artificial Sequence
  Description of Artificial Sequence: Synthetic oligonucleotide
uggaauuuuauugcggcua

SEQ ID NO: 1045180 - RNA, 19 nt, Artificial Sequence
  Description of Artificial Sequence: Synthetic oligonucleotide
auuugccccauccuuacaa

SEQ ID NO: 1045181 - RNA, 19 nt, Artificial Sequence
  Description of Artificial Sequence: Synthetic oligonucleotide
uuggaacaaagagaugaug

SEQ ID NO: 1045182 - RNA, 19 nt, Artificial Sequence
  Description of Artificial Sequence: Synthetic oligonucleotide
caacuaugaccacucgccg

SEQ ID NO: 1045183 - RNA, 19 nt, Artificial Sequence
  Description of Artificial Sequence: Synthetic oligonucleotide
caaaaugcuuggaggcggg

SEQ ID NO: 1045184 - RNA, 19 nt, Artificial Sequence
  Description of Artificial Sequence: Synthetic oligonucleotide
ggucguuauacccagugac

SEQ ID NO: 1045185 - RNA, 19 nt, Artificial Sequence
  Description of Artificial Sequence: Synthetic oligonucleotide
cucgaugagcucuuuguuc

SEQ ID NO: 1045186 - RNA, 19 nt, Artificial Sequence
  Description of Artificial Sequence: Synthetic oligonucleotide
ugcuuacggauucgugccg

SEQ ID NO: 1045187 - RNA, 19 nt, Artificial Sequence
  Description of Artificial Sequence: Synthetic oligonucleotide
acgucucaagcaucgaaug

SEQ ID NO: 1045188 - RNA, 19 nt, Artificial Sequence
  Description of Artificial Sequence: Synthetic oligonucleotide
ucauugcuuggaacaaaga

SEQ ID NO: 1045189 - RNA, 19 nt, Artificial Sequence
  Description of Artificial Sequence: Synthetic oligonucleotide
aauuugguuuuggggcagg

SEQ ID NO: 1045190 - RNA, 19 nt, Artificial Sequence
  Description of Artificial Sequence: Synthetic oligonucleotide
agggucguuauacccagug

SEQ ID NO: 1045191 - RNA, 19 nt, Artificial Sequence
  Description of Artificial Sequence: Synthetic oligonucleotide
ggaucgaugaugccgccgg

SEQ ID NO: 1045192 - RNA, 19 nt, Artificial Sequence
  Description of Artificial Sequence: Synthetic oligonucleotide
aacgccguuuucaaggaga

SEQ ID NO: 1045193 - RNA, 19 nt, Artificial Sequence
  Description of Artificial Sequence: Synthetic oligonucleotide
ucaagcaucgaauguucua

SEQ ID NO: 1045194 - RNA, 19 nt, Artificial Sequence
  Description of Artificial Sequence: Synthetic oligonucleotide
gaauuuuauugcggcuacg

SEQ ID NO: 1045195 - RNA, 19 nt, Artificial Sequence
  Description of Artificial Sequence: Synthetic oligonucleotide
ugcggcuacgucucaagca

SEQ ID NO: 1045196 - RNA, 19 nt, Artificial Sequence
  Description of Artificial Sequence: Synthetic oligonucleotide
guuucagggucguuauacc

SEQ ID NO: 1045197 - RNA, 19 nt, Artificial Sequence
  Description of Artificial Sequence: Synthetic oligonucleotide
ccaaacaagugcauguaag

SEQ ID NO: 1045198 - RNA, 19 nt, Artificial Sequence
  Description of Artificial Sequence: Synthetic oligonucleotide
ccuugacuaacaaagagca

SEQ ID NO: 1045199 - RNA, 19 nt, Artificial Sequence
  Description of Artificial Sequence: Synthetic oligonucleotide
auugcggcuacgucucaag

SEQ ID NO: 1045200 - RNA, 19 nt, Artificial Sequence
  Description of Artificial Sequence: Synthetic oligonucleotide
caaccucugagccgcacgg

SEQ ID NO: 1045201 - RNA, 19 nt, Artificial Sequence
  Description of Artificial Sequence: Synthetic oligonucleotide
auacgucguugacaccgcc

SEQ ID NO: 1045202 - RNA, 19 nt, Artificial Sequence
  Description of Artificial Sequence: Synthetic oligonucleotide
uaacgcuggauaugguaga

SEQ ID NO: 1045203 - RNA, 19 nt, Artificial Sequence
  Description of Artificial Sequence: Synthetic oligonucleotide
uucuuuugcgacgucugca

SEQ ID NO: 1045204 - RNA, 19 nt, Artificial Sequence
  Description of Artificial Sequence: Synthetic oligonucleotide
ugagcucuuuguucauugc

SEQ ID NO: 1045205 - RNA, 19 nt, Artificial Sequence
  Description of Artificial Sequence: Synthetic oligonucleotide
ucgaauguucuaccgcuau

SEQ ID NO: 1045206 - RNA, 19 nt, Artificial Sequence
  Description of Artificial Sequence: Synthetic oligonucleotide
uuuccuccguguuuggauc

SEQ ID NO: 1045207 - RNA, 19 nt, Artificial Sequence
  Description of Artificial Sequence: Synthetic oligonucleotide
aagugcauguaagaguaua

SEQ ID NO: 1045208 - RNA, 19 nt, Artificial Sequence
  Description of Artificial Sequence: Synthetic oligonucleotide
uaauuugguuuuggggcag

SEQ ID NO: 1045209 - RNA, 19 nt, Artificial Sequence
  Description of Artificial Sequence: Synthetic oligonucleotide
aaacgaggacuaagacacc

SEQ ID NO: 1045210 - RNA, 19 nt, Artificial Sequence
  Description of Artificial Sequence: Synthetic oligonucleotide
ugcgaucugugcuuccagc

SEQ ID NO: 1045211 - RNA, 19 nt, Artificial Sequence
  Description of Artificial Sequence: Synthetic oligonucleotide
gccguuuucaaggagauca

SEQ ID NO: 1045212 - RNA, 19 nt, Artificial Sequence
  Description of Artificial Sequence: Synthetic oligonucleotide
caugucaaccggcaaacga

SEQ ID NO: 1045213 - RNA, 19 nt, Artificial Sequence
  Description of Artificial Sequence: Synthetic oligonucleotide
gagaggaucucgcuaagcu

SEQ ID NO: 1045214 - RNA, 19 nt, Artificial Sequence
  Description of Artificial Sequence: Synthetic oligonucleotide
uggggcucgacuccuccag

SEQ ID NO: 1045215 - RNA, 19 nt, Artificial Sequence
  Description of Artificial Sequence: Synthetic oligonucleotide
cacuacauuaguugagcca

SEQ ID NO: 1045216 - RNA, 19 nt, Artificial Sequence
  Description of Artificial Sequence: Synthetic oligonucleotide
gaucaucgggucaacuaug

SEQ ID NO: 1045217 - RNA, 19 nt, Artificial Sequence
  Description of Artificial Sequence: Synthetic oligonucleotide
ucucuaucuccaagcccag

SEQ ID NO: 1045218 - RNA, 19 nt, Artificial Sequence
  Description of Artificial Sequence: Synthetic oligonucleotide
aguauauggguaauacaau

SEQ ID NO: 1045219 - RNA, 19 nt, Artificial Sequence
  Description of Artificial Sequence: Synthetic oligonucleotide
ccguuuaaucucuaucucc

SEQ ID NO: 1045220 - RNA, 19 nt, Artificial Sequence
  Description of Artificial Sequence: Synthetic oligonucleotide
cucaaugcccaccaucuga

SEQ ID NO: 1045221 - RNA, 19 nt, Artificial Sequence
  Description of Artificial Sequence: Synthetic oligonucleotide
cagauagguaagguuuucc

SEQ ID NO: 1045222 - RNA, 19 nt, Artificial Sequence
  Description of Artificial Sequence: Synthetic oligonucleotide
aaccucugagccgcacggc

SEQ ID NO: 1045223 - RNA, 19 nt, Artificial Sequence
  Description of Artificial Sequence: Synthetic oligonucleotide
ggaauuuuauugcggcuac

SEQ ID NO: 1045224 - RNA, 19 nt, Artificial Sequence
  Description of Artificial Sequence: Synthetic oligonucleotide
aaccggcaaacgauggcuc

SEQ ID NO: 1045225 - RNA, 19 nt, Artificial Sequence
  Description of Artificial Sequence: Synthetic oligonucleotide
guugccaacgccguuuuca

SEQ ID NO: 1045226 - RNA, 19 nt, Artificial Sequence
  Description of Artificial Sequence: Synthetic oligonucleotide
gauucgugccgggagcugc

SEQ ID NO: 1045227 - RNA, 19 nt, Artificial Sequence
  Description of Artificial Sequence: Synthetic oligonucleotide
ccuuacaaaugauugccac

SEQ ID NO: 1045228 - RNA, 19 nt, Artificial Sequence
  Description of Artificial Sequence: Synthetic oligonucleotide
uacauuaguugagccaaaa

SEQ ID NO: 1045229 - RNA, 19 nt, Artificial Sequence
  Description of Artificial Sequence: Synthetic oligonucleotide
cuuuugcgacgucugcacc

SEQ ID NO: 1045230 - RNA, 19 nt, Artificial Sequence
  Description of Artificial Sequence: Synthetic oligonucleotide
cuuacggauucgugccggg

SEQ ID NO: 1045231 - RNA, 19 nt, Artificial Sequence
  Description of Artificial Sequence: Synthetic oligonucleotide
auaccuucugugauggaga

SEQ ID NO: 1045232 - RNA, 19 nt, Artificial Sequence
  Description of Artificial Sequence: Synthetic oligonucleotide
cuaccgcuauacugcaagc

SEQ ID NO: 1045233 - RNA, 19 nt, Artificial Sequence
  Description of Artificial Sequence: Synthetic oligonucleotide
uaagaguauauggguaaua

SEQ ID NO: 1045234 - RNA, 19 nt, Artificial Sequence
  Description of Artificial Sequence: Synthetic oligonucleotide
uggaucgaugaugccgccg

SEQ ID NO: 1045235 - RNA, 19 nt, Artificial Sequence
  Description of Artificial Sequence: Synthetic oligonucleotide
agguuuccguuguuaggag

SEQ ID NO: 1045236 - RNA, 19 nt, Artificial Sequence
  Description of Artificial Sequence: Synthetic oligonucleotide
uuugccccauccuuacaaa

SEQ ID NO: 1045237 - RNA, 19 nt, Artificial Sequence
  Description of Artificial Sequence: Synthetic oligonucleotide
aucuauguucucaaacuaa

SEQ ID NO: 1045238 - RNA, 19 nt, Artificial Sequence
  Description of Artificial Sequence: Synthetic oligonucleotide
cucgcuaagcuccucauua

SEQ ID NO: 1045239 - RNA, 19 nt, Artificial Sequence
  Description of Artificial Sequence: Synthetic oligonucleotide
gucaaccggcaaacgaugg

SEQ ID NO: 1045240 - RNA, 19 nt, Artificial Sequence
  Description of Artificial Sequence: Synthetic oligonucleotide
uuugcgacgucugcaccug

SEQ ID NO: 1045241 - RNA, 19 nt, Artificial Sequence
  Description of Artificial Sequence: Synthetic oligonucleotide
ucaucgggucaacuaugac

SEQ ID NO: 1045242 - RNA, 19 nt, Artificial Sequence
  Description of Artificial Sequence: Synthetic oligonucleotide
cuuggaggcggggaggggc

SEQ ID NO: 1045243 - RNA, 19 nt, Artificial Sequence
  Description of Artificial Sequence: Synthetic oligonucleotide
aacccuugacuaacaaaga

SEQ ID NO: 1045244 - RNA, 19 nt, Artificial Sequence
  Description of Artificial Sequence: Synthetic oligonucleotide
uugacaccgccgcccaagc

SEQ ID NO: 1045245 - RNA, 19 nt, Artificial Sequence
  Description of Artificial Sequence: Synthetic oligonucleotide
cagguuuccguuguuagga

SEQ ID NO: 1045246 - RNA, 19 nt, Artificial Sequence
  Description of Artificial Sequence: Synthetic oligonucleotide
auacgccaugucaaccggc

SEQ ID NO: 1045247 - RNA, 19 nt, Artificial Sequence
  Description of Artificial Sequence: Synthetic oligonucleotide
gaccacucgccgcuuccgg

SEQ ID NO: 1045248 - RNA, 19 nt, Artificial Sequence
  Description of Artificial Sequence: Synthetic oligonucleotide
aguuuucuccuaauauaga

SEQ ID NO: 1045249 - RNA, 19 nt, Artificial Sequence
  Description of Artificial Sequence: Synthetic oligonucleotide
ccuaaagucuaaaaguuua

SEQ ID NO: 1045250 - RNA, 19 nt, Artificial Sequence
  Description of Artificial Sequence: Synthetic oligonucleotide
caucgaauguucuaccgcu

SEQ ID NO: 1045251 - RNA, 19 nt, Artificial Sequence
  Description of Artificial Sequence: Synthetic oligonucleotide
guaggguggaugaugccac

SEQ ID NO: 1045252 - RNA, 19 nt, Artificial Sequence
  Description of Artificial Sequence: Synthetic oligonucleotide
uugccaacgccguuuucaa

SEQ ID NO: 1045253 - RNA, 19 nt, Artificial Sequence
  Description of Artificial Sequence: Synthetic oligonucleotide
uccggaggguauucuuuug

SEQ ID NO: 1045254 - RNA, 19 nt, Artificial Sequence
  Description of Artificial Sequence: Synthetic oligonucleotide
gaugccgccgguugcgauc

SEQ ID NO: 1045255 - RNA, 19 nt, Artificial Sequence
  Description of Artificial Sequence: Synthetic oligonucleotide
ggcuacgucucaagcaucg

SEQ ID NO: 1045256 - RNA, 19 nt, Artificial Sequence
  Description of Artificial Sequence: Synthetic oligonucleotide
uccguuguuaggagauuuu

SEQ ID NO: 1045257 - RNA, 19 nt, Artificial Sequence
  Description of Artificial Sequence: Synthetic oligonucleotide
uuauacccagugacagcuc

SEQ ID NO: 1045258 - RNA, 19 nt, Artificial Sequence
  Description of Artificial Sequence: Synthetic oligonucleotide
cuccuaauauagaaagugu

SEQ ID NO: 1045259 - RNA, 19 nt, Artificial Sequence
  Description of Artificial Sequence: Synthetic oligonucleotide
ucggaugguuaaauuucua

SEQ ID NO: 1045260 - RNA, 19 nt, Artificial Sequence
  Description of Artificial Sequence: Synthetic oligonucleotide
ucguugacaccgccgccca

SEQ ID NO: 1045261 - RNA, 19 nt, Artificial Sequence
  Description of Artificial Sequence: Synthetic oligonucleotide
ugaccacucgccgcuuccg

SEQ ID NO: 1045262 - RNA, 19 nt, Artificial Sequence
  Description of Artificial Sequence: Synthetic oligonucleotide
uaugaccacucgccgcuuc

SEQ ID NO: 1045263 - RNA, 19 nt, Artificial Sequence
  Description of Artificial Sequence: Synthetic oligonucleotide
gucguuauacccagugaca

SEQ ID NO: 1045264 - RNA, 19 nt, Artificial Sequence
  Description of Artificial Sequence: Synthetic oligonucleotide
ugccaacgccguuuucaag

SEQ ID NO: 1045265 - RNA, 19 nt, Artificial Sequence
  Description of Artificial Sequence: Synthetic oligonucleotide
uuccguuguuaggagauuu

SEQ ID NO: 1045266 - RNA, 19 nt, Artificial Sequence
  Description of Artificial Sequence: Synthetic oligonucleotide
uugccccauccuuacaaau

SEQ ID NO: 1045267 - RNA, 19 nt, Artificial Sequence
  Description of Artificial Sequence: Synthetic oligonucleotide
accggcaaacgauggcucu

SEQ ID NO: 1045268 - RNA, 19 nt, Artificial Sequence
  Description of Artificial Sequence: Synthetic oligonucleotide
agggaaacuugggacaaaa

SEQ ID NO: 1045269 - RNA, 19 nt, Artificial Sequence
  Description of Artificial Sequence: Synthetic oligonucleotide
guucuaccgcuauacugca

SEQ ID NO: 1045270 - RNA, 19 nt, Artificial Sequence
  Description of Artificial Sequence: Synthetic oligonucleotide
aucaucgggucaacuauga

SEQ ID NO: 1045271 - RNA, 19 nt, Artificial Sequence
  Description of Artificial Sequence: Synthetic oligonucleotide
guaagguuuuccuccgugu

SEQ ID NO: 1045272 - RNA, 19 nt, Artificial Sequence
  Description of Artificial Sequence: Synthetic oligonucleotide
ugcaagcaccagguuuccg

SEQ ID NO: 1045273 - RNA, 19 nt, Artificial Sequence
  Description of Artificial Sequence: Synthetic oligonucleotide
uccccucuuauacgccaug

SEQ ID NO: 1045274 - RNA, 19 nt, Artificial Sequence
  Description of Artificial Sequence: Synthetic oligonucleotide
ccucuuauacgccauguca

SEQ ID NO: 1045275 - RNA, 19 nt, Artificial Sequence
  Description of Artificial Sequence: Synthetic oligonucleotide
ucacuacguggaagcacac

SEQ ID NO: 1045276 - RNA, 19 nt, Artificial Sequence
  Description of Artificial Sequence: Synthetic oligonucleotide
gggucaaccaggccuccgg

SEQ ID NO: 1045277 - RNA, 19 nt, Artificial Sequence
  Description of Artificial Sequence: Synthetic oligonucleotide
ugcuucggaugguuaaauu

SEQ ID NO: 1045278 - RNA, 19 nt, Artificial Sequence
  Description of Artificial Sequence: Synthetic oligonucleotide
ugacaccgccgcccaagcc

SEQ ID NO: 1045279 - RNA, 19 nt, Artificial Sequence
  Description of Artificial Sequence: Synthetic oligonucleotide
ggucaacuaugaccacucg

SEQ ID NO: 1045280 - RNA, 19 nt, Artificial Sequence
  Description of Artificial Sequence: Synthetic oligonucleotide
uuauugcggcuacgucuca

SEQ ID NO: 1045281 - RNA, 19 nt, Artificial Sequence
  Description of Artificial Sequence: Synthetic oligonucleotide
gguaggguggaugaugcca

SEQ ID NO: 1045282 - RNA, 19 nt, Artificial Sequence
  Description of Artificial Sequence: Synthetic oligonucleotide
gcaaccucugagccgcacg

SEQ ID NO: 1045283 - RNA, 19 nt, Artificial Sequence
  Description of Artificial Sequence: Synthetic oligonucleotide
ugccccucucuauaccuuc

SEQ ID NO: 1045284 - RNA, 19 nt, Artificial Sequence
  Description of Artificial Sequence: Synthetic oligonucleotide
ucucgcuaagcuccucauu

SEQ ID NO: 1045285 - RNA, 19 nt, Artificial Sequence
  Description of Artificial Sequence: Synthetic oligonucleotide
uugggacaaaaugcuugga

SEQ ID NO: 1045286 - RNA, 19 nt, Artificial Sequence
  Description of Artificial Sequence: Synthetic oligonucleotide
cuugacuaacaaagagcaa

SEQ ID NO: 1045287 - RNA, 19 nt, Artificial Sequence
  Description of Artificial Sequence: Synthetic oligonucleotide
uuacggauucgugccggga

SEQ ID NO: 1045288 - RNA, 19 nt, Artificial Sequence
  Description of Artificial Sequence: Synthetic oligonucleotide
ccgcuauacugcaagcacc

SEQ ID NO: 1045289 - RNA, 19 nt, Artificial Sequence
  Description of Artificial Sequence: Synthetic oligonucleotide
aucucgcuaagcuccucau

SEQ ID NO: 1045290 - RNA, 19 nt, Artificial Sequence
  Description of Artificial Sequence: Synthetic oligonucleotide
cuacgucucaagcaucgaa

SEQ ID NO: 1045291 - RNA, 19 nt, Artificial Sequence
  Description of Artificial Sequence: Synthetic oligonucleotide
guauucuuuugcgacgucu

SEQ ID NO: 1045292 - RNA, 19 nt, Artificial Sequence
  Description of Artificial Sequence: Synthetic oligonucleotide
uauugcggcuacgucucaa

SEQ ID NO: 1045293 - RNA, 19 nt, Artificial Sequence
  Description of Artificial Sequence: Synthetic oligonucleotide
guugcgaucugugcuucca

SEQ ID NO: 1045294 - RNA, 19 nt, Artificial Sequence
  Description of Artificial Sequence: Synthetic oligonucleotide
gggcucgacuccuccaggg

SEQ ID NO: 1045295 - RNA, 19 nt, Artificial Sequence
  Description of Artificial Sequence: Synthetic oligonucleotide
gcuuacggauucgugccgg

SEQ ID NO: 1045296 - RNA, 19 nt, Artificial Sequence
  Description of Artificial Sequence: Synthetic oligonucleotide
cacaaugccccucucuaua

SEQ ID NO: 1045297 - RNA, 19 nt, Artificial Sequence
  Description of Artificial Sequence: Synthetic oligonucleotide
caacgccguuuucaaggag

SEQ ID NO: 1045298 - RNA, 19 nt, Artificial Sequence
  Description of Artificial Sequence: Synthetic oligonucleotide
augccguggcccuucucga

SEQ ID NO: 1045299 - RNA, 19 nt, Artificial Sequence
  Description of Artificial Sequence: Synthetic oligonucleotide
guuuccguuguuaggagau

SEQ ID NO: 1045300 - RNA, 19 nt, Artificial Sequence
  Description of Artificial Sequence: Synthetic oligonucleotide
gguuuccguuguuaggaga

SEQ ID NO: 1045301 - RNA, 19 nt, Artificial Sequence
  Description of Artificial Sequence: Synthetic oligonucleotide
ggaagcacacuacauuagu

SEQ ID NO: 1045302 - RNA, 19 nt, Artificial Sequence
  Description of Artificial Sequence: Synthetic oligonucleotide
gggaagaaauacauucuaa

SEQ ID NO: 1045303 - RNA, 19 nt, Artificial Sequence
  Description of Artificial Sequence: Synthetic oligonucleotide
ugcgacgucugcaccuguu

SEQ ID NO: 1045304 - RNA, 19 nt, Artificial Sequence
  Description of Artificial Sequence: Synthetic oligonucleotide
cgaggacuaagacaccagc

SEQ ID NO: 1045305 - RNA, 19 nt, Artificial Sequence
  Description of Artificial Sequence: Synthetic oligonucleotide
ccggaggguauucuuuugc

SEQ ID NO: 1045306 - RNA, 19 nt, Artificial Sequence
  Description of Artificial Sequence: Synthetic oligonucleotide
ggaacaaagagaugauguu

SEQ ID NO: 1045307 - RNA, 19 nt, Artificial Sequence
  Description of Artificial Sequence: Synthetic oligonucleotide
cgucgaugaaacccuuucg

SEQ ID NO: 1045308 - RNA, 19 nt, Artificial Sequence
  Description of Artificial Sequence: Synthetic oligonucleotide
cuggaauuuuauugcggcu

SEQ ID NO: 1045309 - RNA, 19 nt, Artificial Sequence
  Description of Artificial Sequence: Synthetic oligonucleotide
cacucgccgcuuccggagg

SEQ ID NO: 1045310 - RNA, 19 nt, Artificial Sequence
  Description of Artificial Sequence: Synthetic oligonucleotide
gcgaucugugcuuccagca

SEQ ID NO: 1045311 - RNA, 19 nt, Artificial Sequence
  Description of Artificial Sequence: Synthetic oligonucleotide
uguugccaacgccguuuuc

SEQ ID NO: 1045312 - RNA, 19 nt, Artificial Sequence
  Description of Artificial Sequence: Synthetic oligonucleotide
cauucacuacguggaagca

SEQ ID NO: 1045313 - RNA, 19 nt, Artificial Sequence
  Description of Artificial Sequence: Synthetic oligonucleotide
gcuucggaugguuaaauuu

SEQ ID NO: 1045314 - RNA, 19 nt, Artificial Sequence
  Description of Artificial Sequence: Synthetic oligonucleotide
cauuaaaguauccccucuu

SEQ ID NO: 1045315 - RNA, 19 nt, Artificial Sequence
  Description of Artificial Sequence: Synthetic oligonucleotide
uuuccguuguuaggagauu

SEQ ID NO: 1045316 - RNA, 19 nt, Artificial Sequence
  Description of Artificial Sequence: Synthetic oligonucleotide
ggaaacccuugacuaacaa

SEQ ID NO: 1045317 - RNA, 19 nt, Artificial Sequence
  Description of Artificial Sequence: Synthetic oligonucleotide
cuacauuaguugagccaaa

SEQ ID NO: 1045318 - RNA, 19 nt, Artificial Sequence
  Description of Artificial Sequence: Synthetic oligonucleotide
gucucaagcaucgaauguu

SEQ ID NO: 1045319 - RNA, 19 nt, Artificial Sequence
  Description of Artificial Sequence: Synthetic oligonucleotide
ucgugccgggagcugcuaa

SEQ ID NO: 1045320 - RNA, 19 nt, Artificial Sequence
  Description of Artificial Sequence: Synthetic oligonucleotide
cucaaacuaagggaaacuu

SEQ ID NO: 1045321 - RNA, 19 nt, Artificial Sequence
  Description of Artificial Sequence: Synthetic oligonucleotide
ccgucgaugaaacccuuuc

SEQ ID NO: 1045322 - RNA, 19 nt, Artificial Sequence
  Description of Artificial Sequence: Synthetic oligonucleotide
cugcaagcaccagguuucc

SEQ ID NO: 1045323 - RNA, 19 nt, Artificial Sequence
  Description of Artificial Sequence: Synthetic oligonucleotide
ugaugccgccgguugcgau

SEQ ID NO: 1045324 - RNA, 19 nt, Artificial Sequence
  Description of Artificial Sequence: Synthetic oligonucleotide
ucgggucaacuaugaccac

SEQ ID NO: 1045325 - RNA, 19 nt, Artificial Sequence
  Description of Artificial Sequence: Synthetic oligonucleotide
gggucguuauacccaguga

SEQ ID NO: 1045326 - RNA, 19 nt, Artificial Sequence
  Description of Artificial Sequence: Synthetic oligonucleotide
guaagaguauauggguaau

SEQ ID NO: 1045327 - RNA, 19 nt, Artificial Sequence
  Description of Artificial Sequence: Synthetic oligonucleotide
uugcgacgucugcaccugu

SEQ ID NO: 1045328 - RNA, 19 nt, Artificial Sequence
  Description of Artificial Sequence: Synthetic oligonucleotide
ugcaaccucugagccgcac

SEQ ID NO: 1045329 - RNA, 19 nt, Artificial Sequence
  Description of Artificial Sequence: Synthetic oligonucleotide
uggaccuucuaggcccaaa

SEQ ID NO: 1045330 - RNA, 19 nt, Artificial Sequence
  Description of Artificial Sequence: Synthetic oligonucleotide
ggaagccacuuuuccuuca

SEQ ID NO: 1045331 - RNA, 19 nt, Artificial Sequence
  Description of Artificial Sequence: Synthetic oligonucleotide
gguugcgaucugugcuucc

SEQ ID NO: 1045332 - RNA, 19 nt, Artificial Sequence
  Description of Artificial Sequence: Synthetic oligonucleotide
cacggccgucgaugaaacc

SEQ ID NO: 1045333 - RNA, 19 nt, Artificial Sequence
  Description of Artificial Sequence: Synthetic oligonucleotide
ggggcucgacuccuccagg

SEQ ID NO: 1045334 - RNA, 19 nt, Artificial Sequence
  Description of Artificial Sequence: Synthetic oligonucleotide
acgccguuuucaaggagau

SEQ ID NO: 1045335 - RNA, 19 nt, Artificial Sequence
  Description of Artificial Sequence: Synthetic oligonucleotide
cuauaccuucugugaugga

SEQ ID NO: 1045336 - RNA, 19 nt, Artificial Sequence
  Description of Artificial Sequence: Synthetic oligonucleotide
aucgaauguucuaccgcua

SEQ ID NO: 1045337 - RNA, 19 nt, Artificial Sequence
  Description of Artificial Sequence: Synthetic oligonucleotide
ccacucgccgcuuccggag

SEQ ID NO: 1045338 - RNA, 19 nt, Artificial Sequence
  Description of Artificial Sequence: Synthetic oligonucleotide
uccuccguguuuggaucaa

SEQ ID NO: 1045339 - RNA, 19 nt, Artificial Sequence
  Description of Artificial Sequence: Synthetic oligonucleotide
auucgugccgggagcugcu

SEQ ID NO: 1045340 - RNA, 19 nt, Artificial Sequence
  Description of Artificial Sequence: Synthetic oligonucleotide
gccguggcccuucucgaug

SEQ ID NO: 1045341 - RNA, 19 nt, Artificial Sequence
  Description of Artificial Sequence: Synthetic oligonucleotide
cggaugguuaaauuucuaa

SEQ ID NO: 1045342 - RNA, 19 nt, Artificial Sequence
  Description of Artificial Sequence: Synthetic oligonucleotide
gcccagugaugcuauccac

SEQ ID NO: 1045343 - RNA, 19 nt, Artificial Sequence
  Description of Artificial Sequence: Synthetic oligonucleotide
caauccguuuaaucucuau

SEQ ID NO: 1045344 - RNA, 19 nt, Artificial Sequence
  Description of Artificial Sequence: Synthetic oligonucleotide
gaucgaugaugccgccggu

SEQ ID NO: 1045345 - RNA, 19 nt, Artificial Sequence
  Description of Artificial Sequence: Synthetic oligonucleotide
cccucuuauacgccauguc

SEQ ID NO: 1045346 - RNA, 19 nt, Artificial Sequence
  Description of Artificial Sequence: Synthetic oligonucleotide
ccaugucaaccggcaaacg

SEQ ID NO: 1045347 - RNA, 19 nt, Artificial Sequence
  Description of Artificial Sequence: Synthetic oligonucleotide
gcggcuacgucucaagcau

SEQ ID NO: 1045348 - RNA, 19 nt, Artificial Sequence
  Description of Artificial Sequence: Synthetic oligonucleotide
ccugccucauagggaagcc

SEQ ID NO: 1045349 - RNA, 19 nt, Artificial Sequence
  Description of Artificial Sequence: Synthetic oligonucleotide
ccaacgccguuuucaagga

SEQ ID NO: 1045350 - RNA, 19 nt, Artificial Sequence
  Description of Artificial Sequence: Synthetic oligonucleotide
cucgcuccgcagaccagaa

SEQ ID NO: 1045351 - RNA, 19 nt, Artificial Sequence
  Description of Artificial Sequence: Synthetic oligonucleotide
cucauagggaagccacuuu

SEQ ID NO: 1045352 - RNA, 19 nt, Artificial Sequence
  Description of Artificial Sequence: Synthetic oligonucleotide
gccuccggugagguacugg

SEQ ID NO: 1045353 - RNA, 19 nt, Artificial Sequence
  Description of Artificial Sequence: Synthetic oligonucleotide
ggauucgugccgggagcug

SEQ ID NO: 1045354 - RNA, 19 nt, Artificial Sequence
  Description of Artificial Sequence: Synthetic oligonucleotide
gcugcuucggaugguuaaa

SEQ ID NO: 1045355 - RNA, 19 nt, Artificial Sequence
  Description of Artificial Sequence: Synthetic oligonucleotide
agcucgcuccgcagaccag

SEQ ID NO: 1045356 - RNA, 19 nt, Artificial Sequence
  Description of Artificial Sequence: Synthetic oligonucleotide
gcucgcuccgcagaccaga

SEQ ID NO: 1045357 - RNA, 19 nt, Artificial Sequence
  Description of Artificial Sequence: Synthetic oligonucleotide
uuggaccuucuaggcccaa

SEQ ID NO: 1045358 - RNA, 19 nt, Artificial Sequence
  Description of Artificial Sequence: Synthetic oligonucleotide
gcacggccgucgaugaaac

SEQ ID NO: 1045359 - RNA, 19 nt, Artificial Sequence
  Description of Artificial Sequence: Synthetic oligonucleotide
augccccucucuauaccuu

SEQ ID NO: 1045360 - RNA, 19 nt, Artificial Sequence
  Description of Artificial Sequence: Synthetic oligonucleotide
uucgugccgggagcugcua

SEQ ID NO: 1045361 - RNA, 19 nt, Artificial Sequence
  Description of Artificial Sequence: Synthetic oligonucleotide
ggucaaccaggccuccggu

SEQ ID NO: 1045362 - RNA, 19 nt, Artificial Sequence
  Description of Artificial Sequence: Synthetic oligonucleotide
cacuacguggaagcacacu

SEQ ID NO: 1045363 - RNA, 19 nt, Artificial Sequence
  Description of Artificial Sequence: Synthetic oligonucleotide
gcuacgucucaagcaucga

SEQ ID NO: 1045364 - RNA, 19 nt, Artificial Sequence
  Description of Artificial Sequence: Synthetic oligonucleotide
cugcuucggaugguuaaau

SEQ ID NO: 1045365 - RNA, 19 nt, Artificial Sequence
  Description of Artificial Sequence: Synthetic oligonucleotide
ccggcaaacgauggcucuc

SEQ ID NO: 1045366 - RNA, 19 nt, Artificial Sequence
  Description of Artificial Sequence: Synthetic oligonucleotide
ccguggcccuucucgauga

SEQ ID NO: 1045367 - RNA, 19 nt, Artificial Sequence
  Description of Artificial Sequence: Synthetic oligonucleotide
cgccaugucaaccggcaaa

SEQ ID NO: 1045368 - RNA, 19 nt, Artificial Sequence
  Description of Artificial Sequence: Synthetic oligonucleotide
cgcuaagcuccucauuaaa

SEQ ID NO: 1045369 - RNA, 19 nt, Artificial Sequence
  Description of Artificial Sequence: Synthetic oligonucleotide
cuguugccaacgccguuuu

SEQ ID NO: 1045370 - RNA, 19 nt, Artificial Sequence
  Description of Artificial Sequence: Synthetic oligonucleotide
cgucucaagcaucgaaugu

SEQ ID NO: 1045371 - RNA, 19 nt, Artificial Sequence
  Description of Artificial Sequence: Synthetic oligonucleotide
ccgcagaccagaagcuucu

SEQ ID NO: 1045372 - RNA, 19 nt, Artificial Sequence
  Description of Artificial Sequence: Synthetic oligonucleotide
gcaauccguuuaaucucua

SEQ ID NO: 1045373 - RNA, 19 nt, Artificial Sequence
  Description of Artificial Sequence: Synthetic oligonucleotide
cagggucguuauacccagu

SEQ ID NO: 1045374 - RNA, 19 nt, Artificial Sequence
  Description of Artificial Sequence: Synthetic oligonucleotide
cggcuacgucucaagcauc

SEQ ID NO: 1045375 - RNA, 19 nt, Artificial Sequence
  Description of Artificial Sequence: Synthetic oligonucleotide
gcgacgucugcaccuguuu

SEQ ID NO: 1045376 - RNA, 19 nt, Artificial Sequence
  Description of Artificial Sequence: Synthetic oligonucleotide
ccguuuucaaggagaucau

SEQ ID NO: 1045377 - RNA, 19 nt, Artificial Sequence
  Description of Artificial Sequence: Synthetic oligonucleotide
gccucauagggaagccacu

SEQ ID NO: 1045378 - RNA, 19 nt, Artificial Sequence
  Description of Artificial Sequence: Synthetic oligonucleotide
cgugccgggagcugcuaaa

SEQ ID NO: 1045379 - RNA, 19 nt, Artificial Sequence
  Description of Artificial Sequence: Synthetic oligonucleotide
gccgcccaagccgcugcug

SEQ ID NO: 1045380 - RNA, 19 nt, Artificial Sequence
  Description of Artificial Sequence: Synthetic oligonucleotide
cgcacggccgucgaugaaa

SEQ ID NO: 1045381 - RNA, 19 nt, Artificial Sequence
  Description of Artificial Sequence: Synthetic oligonucleotide
cgguugcgaucugugcuuc

SEQ ID NO: 1045382 - RNA, 19 nt, Artificial Sequence
  Description of Artificial Sequence: Synthetic oligonucleotide
ccccucuuauacgccaugu

SEQ ID NO: 1045383 - RNA, 19 nt, Artificial Sequence
  Description of Artificial Sequence: Synthetic oligonucleotide
cggccgucgaugaaacccu

SEQ ID NO: 1045384 - RNA, 19 nt, Artificial Sequence
  Description of Artificial Sequence: Synthetic oligonucleotide
cgggucaacuaugaccacu

SEQ ID NO: 1045385 - RNA, 19 nt, Artificial Sequence
  Description of Artificial Sequence: Synthetic oligonucleotide
cuaugaccacucgccgcuu

SEQ ID NO: 1045386 - RNA, 19 nt, Artificial Sequence
  Description of Artificial Sequence: Synthetic oligonucleotide
gccccucucuauaccuucu

SEQ ID NO: 1045387 - RNA, 19 nt, Artificial Sequence
  Description of Artificial Sequence: Synthetic oligonucleotide
ccgcccaagccgcugcugu

SEQ ID NO: 1045388 - RNA, 19 nt, Artificial Sequence
  Description of Artificial Sequence: Synthetic oligonucleotide
gacccgugguaggguggau

SEQ ID NO: 1045389 - RNA, 19 nt, Artificial Sequence
  Description of Artificial Sequence: Synthetic oligonucleotide
cgccguuuucaaggagauc

SEQ ID NO: 1045390 - RNA, 19 nt, Artificial Sequence
  Description of Artificial Sequence: Synthetic oligonucleotide
gccgcuuccggaggguauu

SEQ ID NO: 1045391 - RNA, 19 nt, Artificial Sequence
  Description of Artificial Sequence: Synthetic oligonucleotide
gccgccgguugcgaucugu

SEQ ID NO: 1045392 - RNA, 19 nt, Artificial Sequence
  Description of Artificial Sequence: Synthetic oligonucleotide
gccgucgaugaaacccuuu

SEQ ID NO: 1045393 - RNA, 19 nt, Artificial Sequence
  Description of Artificial Sequence: Synthetic oligonucleotide
cggauucgugccgggagcu

SEQ ID NO: 1045394 - RNA, 19 nt, Artificial Sequence
  Description of Artificial Sequence: Synthetic oligonucleotide
ggccgucgaugaaacccuu

SEQ ID NO: 1045395 - RNA, 19 nt, Artificial Sequence
  Description of Artificial Sequence: Synthetic oligonucleotide
cguugacaccgccgcccaa

SEQ ID NO: 1045396 - RNA, 19 nt, Artificial Sequence
  Description of Artificial Sequence: Synthetic oligonucleotide
cgccgcuuccggaggguau

SEQ ID NO: 1045397 - RNA, 19 nt, Artificial Sequence
  Description of Artificial Sequence: Synthetic oligonucleotide
aaaaggacuguuuaggacc

SEQ ID NO: 1045398 - RNA, 19 nt, Artificial Sequence
  Description of Artificial Sequence: Synthetic oligonucleotide
uguauaaauugaaugaugg

SEQ ID NO: 1045399 - RNA, 19 nt, Artificial Sequence
  Description of Artificial Sequence: Synthetic oligonucleotide
aauauccuuaaccuaaugg

SEQ ID NO: 1045400 - RNA, 19 nt, Artificial Sequence
  Description of Artificial Sequence: Synthetic oligonucleotide
aaccagaauauccuuaacc

SEQ ID NO: 1045401 - RNA, 19 nt, Artificial Sequence
  Description of Artificial Sequence: Synthetic oligonucleotide
uggauuuacaugaugaccg

SEQ ID NO: 1045402 - RNA, 19 nt, Artificial Sequence
  Description of Artificial Sequence: Synthetic oligonucleotide
agauauaauggucacacac

SEQ ID NO: 1045403 - RNA, 19 nt, Artificial Sequence
  Description of Artificial Sequence: Synthetic oligonucleotide
ucauauacaagaauguuca

SEQ ID NO: 1045404 - RNA, 19 nt, Artificial Sequence
  Description of Artificial Sequence: Synthetic oligonucleotide
auauccuuaaccuaauggg

SEQ ID NO: 1045405 - RNA, 19 nt, Artificial Sequence
  Description of Artificial Sequence: Synthetic oligonucleotide
uuaucaaacauucaagaac

SEQ ID NO: 1045406 - RNA, 19 nt, Artificial Sequence
  Description of Artificial Sequence: Synthetic oligonucleotide
aguacaugccccuuuaacc

SEQ ID NO: 1045407 - RNA, 19 nt, Artificial Sequence
  Description of Artificial Sequence: Synthetic oligonucleotide
uucagaagccaauaaaugg

SEQ ID NO: 1045408 - RNA, 19 nt, Artificial Sequence
  Description of Artificial Sequence: Synthetic oligonucleotide
auaacacucacuuuugagg

SEQ ID NO: 1045409 - RNA, 19 nt, Artificial Sequence
  Description of Artificial Sequence: Synthetic oligonucleotide
auuuauaguacauauuucu

SEQ ID NO: 1045410 - RNA, 19 nt, Artificial Sequence
  Description of Artificial Sequence: Synthetic oligonucleotide
aguacauauuucuuuauag

SEQ ID NO: 1045411 - RNA, 19 nt, Artificial Sequence
  Description of Artificial Sequence: Synthetic oligonucleotide
uauaaauugaaugaugggu

SEQ ID NO: 1045412 - RNA, 19 nt, Artificial Sequence
  Description of Artificial Sequence: Synthetic oligonucleotide
auuucaauaugauguaaac

SEQ ID NO: 1045413 - RNA, 19 nt, Artificial Sequence
  Description of Artificial Sequence: Synthetic oligonucleotide
ugaguuuuaucaaacauuc

SEQ ID NO: 1045414 - RNA, 19 nt, Artificial Sequence
  Description of Artificial Sequence: Synthetic oligonucleotide
aguaaugggugauaccucc

SEQ ID NO: 1045415 - RNA, 19 nt, Artificial Sequence
  Description of Artificial Sequence: Synthetic oligonucleotide
ucuuucauaaaguaagaca

SEQ ID NO: 1045416 - RNA, 19 nt, Artificial Sequence
  Description of Artificial Sequence: Synthetic oligonucleotide
ggaacuuugaaguacaugc

SEQ ID NO: 1045417 - RNA, 19 nt, Artificial Sequence
  Description of Artificial Sequence: Synthetic oligonucleotide
uuauucaauaggugaaugg

SEQ ID NO: 1045418 - RNA, 19 nt, Artificial Sequence
  Description of Artificial Sequence: Synthetic oligonucleotide
gaugauuguacauuaggug

SEQ ID NO: 1045419 - RNA, 19 nt, Artificial Sequence
  Description of Artificial Sequence: Synthetic oligonucleotide
acagugguuaccucuaagc

SEQ ID NO: 1045420 - RNA, 19 nt, Artificial Sequence
  Description of Artificial Sequence: Synthetic oligonucleotide
uccaaacuaaggaugauug

SEQ ID NO: 1045421 - RNA, 19 nt, Artificial Sequence
  Description of Artificial Sequence: Synthetic oligonucleotide
aaguacaugccccuuuaac

SEQ ID NO: 1045422 - RNA, 19 nt, Artificial Sequence
  Description of Artificial Sequence: Synthetic oligonucleotide
aacugaucaagucucaccu

SEQ ID NO: 1045423 - RNA, 19 nt, Artificial Sequence
  Description of Artificial Sequence: Synthetic oligonucleotide
aaaguaagacaauaggcaa

SEQ ID NO: 1045424 - RNA, 19 nt, Artificial Sequence
  Description of Artificial Sequence: Synthetic oligonucleotide
uuucuggacucucagaacc

SEQ ID NO: 1045425 - RNA, 19 nt, Artificial Sequence
  Description of Artificial Sequence: Synthetic oligonucleotide
aaggcacucauauacaaga

SEQ ID NO: 1045426 - RNA, 19 nt, Artificial Sequence
  Description of Artificial Sequence: Synthetic oligonucleotide
aguuuuaucaaacauucaa

SEQ ID NO: 1045427 - RNA, 19 nt, Artificial Sequence
  Description of Artificial Sequence: Synthetic oligonucleotide
guuaccucuaagcagaggc

SEQ ID NO: 1045428 - RNA, 19 nt, Artificial Sequence
  Description of Artificial Sequence: Synthetic oligonucleotide
ucagaggguacauagacca

SEQ ID NO: 1045429 - RNA, 19 nt, Artificial Sequence
  Description of Artificial Sequence: Synthetic oligonucleotide
auaaauugaaugauggguc

SEQ ID NO: 1045430 - RNA, 19 nt, Artificial Sequence
  Description of Artificial Sequence: Synthetic oligonucleotide
augauuguacauuagguga

SEQ ID NO: 1045431 - RNA, 19 nt, Artificial Sequence
  Description of Artificial Sequence: Synthetic oligonucleotide
aaauuaaagacagugguua

SEQ ID NO: 1045432 - RNA, 19 nt, Artificial Sequence
  Description of Artificial Sequence: Synthetic oligonucleotide
ucugcuuagauauaauggu

SEQ ID NO: 1045433 - RNA, 19 nt, Artificial Sequence
  Description of Artificial Sequence: Synthetic oligonucleotide
aacccuuuuaggucaaguc

SEQ ID NO: 1045434 - RNA, 19 nt, Artificial Sequence
  Description of Artificial Sequence: Synthetic oligonucleotide
gauaacacucacuuuugag

SEQ ID NO: 1045435 - RNA, 19 nt, Artificial Sequence
  Description of Artificial Sequence: Synthetic oligonucleotide
aauaaguggaguaaugggu

SEQ ID NO: 1045436 - RNA, 19 nt, Artificial Sequence
  Description of Artificial Sequence: Synthetic oligonucleotide
agcagugagaaacauacug

SEQ ID NO: 1045437 - RNA, 19 nt, Artificial Sequence
  Description of Artificial Sequence: Synthetic oligonucleotide
uauucaauaggugaauggc

SEQ ID NO: 1045438 - RNA, 19 nt, Artificial Sequence
  Description of Artificial Sequence: Synthetic oligonucleotide
gaugagaggaauuuuaucu

SEQ ID NO: 1045439 - RNA, 19 nt, Artificial Sequence
  Description of Artificial Sequence: Synthetic oligonucleotide
uuaaucuuaagugugacuu

SEQ ID NO: 1045440 - RNA, 19 nt, Artificial Sequence
  Description of Artificial Sequence: Synthetic oligonucleotide
agaaaauuaaagacagugg

SEQ ID NO: 1045441 - RNA, 19 nt, Artificial Sequence
  Description of Artificial Sequence: Synthetic oligonucleotide
auaugauguaaacucuuuc

SEQ ID NO: 1045442 - RNA, 19 nt, Artificial Sequence
  Description of Artificial Sequence: Synthetic oligonucleotide
uaggcauaaacauauuugu

SEQ ID NO: 1045443 - RNA, 19 nt, Artificial Sequence
  Description of Artificial Sequence: Synthetic oligonucleotide
accagaauauccuuaaccu

SEQ ID NO: 1045444 - RNA, 19 nt, Artificial Sequence
  Description of Artificial Sequence: Synthetic oligonucleotide
ggugauaccucccugaaag

SEQ ID NO: 1045445 - RNA, 19 nt, Artificial Sequence
  Description of Artificial Sequence: Synthetic oligonucleotide
uguaauacccuuucuuucu

SEQ ID NO: 1045446 - RNA, 19 nt, Artificial Sequence
  Description of Artificial Sequence: Synthetic oligonucleotide
uauaguacauauuucuuua

SEQ ID NO: 1045447 - RNA, 19 nt, Artificial Sequence
  Description of Artificial Sequence: Synthetic oligonucleotide
aauucugcccuugauaaca

SEQ ID NO: 1045448 - RNA, 19 nt, Artificial Sequence
  Description of Artificial Sequence: Synthetic oligonucleotide
aaacagcccaauguuauuc

SEQ ID NO: 1045449 - RNA, 19 nt, Artificial Sequence
  Description of Artificial Sequence: Synthetic oligonucleotide
uucacuuacgguagggcag

SEQ ID NO: 1045450 - RNA, 19 nt, Artificial Sequence
  Description of Artificial Sequence: Synthetic oligonucleotide
uaaauugaaugauggguca

SEQ ID NO: 1045451 - RNA, 19 nt, Artificial Sequence
  Description of Artificial Sequence: Synthetic oligonucleotide
ggguacauagaccaaaagg

SEQ ID NO: 1045452 - RNA, 19 nt, Artificial Sequence
  Description of Artificial Sequence: Synthetic oligonucleotide
uuuaggucaaguccaggca

SEQ ID NO: 1045453 - RNA, 19 nt, Artificial Sequence
  Description of Artificial Sequence: Synthetic oligonucleotide
auagguacucauuacauuu

SEQ ID NO: 1045454 - RNA, 19 nt, Artificial Sequence
  Description of Artificial Sequence: Synthetic oligonucleotide
agcacagucucucugaccu

SEQ ID NO: 1045455 - RNA, 19 nt, Artificial Sequence
  Description of Artificial Sequence: Synthetic oligonucleotide
auagugaaucuuuugggcu

SEQ ID NO: 1045456 - RNA, 19 nt, Artificial Sequence
  Description of Artificial Sequence: Synthetic oligonucleotide
uuaaagacagugguuaccu

SEQ ID NO: 1045457 - RNA, 19 nt, Artificial Sequence
  Description of Artificial Sequence: Synthetic oligonucleotide
ucuuuaugcucauagguua

SEQ ID NO: 1045458 - RNA, 19 nt, Artificial Sequence
  Description of Artificial Sequence: Synthetic oligonucleotide
uuuuguagccccaugucuc

SEQ ID NO: 1045459 - RNA, 19 nt, Artificial Sequence
  Description of Artificial Sequence: Synthetic oligonucleotide
uuucgcuucacuuacggua

SEQ ID NO: 1045460 - RNA, 19 nt, Artificial Sequence
  Description of Artificial Sequence: Synthetic oligonucleotide
aagauucccugacaagaag

SEQ ID NO: 1045461 - RNA, 19 nt, Artificial Sequence
  Description of Artificial Sequence: Synthetic oligonucleotide
auaggcaacaguccccaac

SEQ ID NO: 1045462 - RNA, 19 nt, Artificial Sequence
  Description of Artificial Sequence: Synthetic oligonucleotide
uucgcuucacuuacgguag

SEQ ID NO: 1045463 - RNA, 19 nt, Artificial Sequence
  Description of Artificial Sequence: Synthetic oligonucleotide
cugaucaagucucaccugg

SEQ ID NO: 1045464 - RNA, 19 nt, Artificial Sequence
  Description of Artificial Sequence: Synthetic oligonucleotide
aauacccuuucuuucugcu

SEQ ID NO: 1045465 - RNA, 19 nt, Artificial Sequence
  Description of Artificial Sequence: Synthetic oligonucleotide
auacaagaauguucauagc

SEQ ID NO: 1045466 - RNA, 19 nt, Artificial Sequence
  Description of Artificial Sequence: Synthetic oligonucleotide
acagaguaggcauaaacau

SEQ ID NO: 1045467 - RNA, 19 nt, Artificial Sequence
  Description of Artificial Sequence: Synthetic oligonucleotide
guacaugccccuuuaaccc

SEQ ID NO: 1045468 - RNA, 19 nt, Artificial Sequence
  Description of Artificial Sequence: Synthetic oligonucleotide
uaccaguucaucccgaggu

SEQ ID NO: 1045469 - RNA, 19 nt, Artificial Sequence
  Description of Artificial Sequence: Synthetic oligonucleotide
uuucaauaugauguaaacu

SEQ ID NO: 1045470 - RNA, 19 nt, Artificial Sequence
  Description of Artificial Sequence: Synthetic oligonucleotide
agaguaaccuuggaguucg

SEQ ID NO: 1045471 - RNA, 19 nt, Artificial Sequence
  Description of Artificial Sequence: Synthetic oligonucleotide
guaggcauaaacauauuug

SEQ ID NO: 1045472 - RNA, 19 nt, Artificial Sequence
  Description of Artificial Sequence: Synthetic oligonucleotide
uuaccaauuggaaguaagu

SEQ ID NO: 1045473 - RNA, 19 nt, Artificial Sequence
  Description of Artificial Sequence: Synthetic oligonucleotide
caugagcaugugcagaucg

SEQ ID NO: 1045474 - RNA, 19 nt, Artificial Sequence
  Description of Artificial Sequence: Synthetic oligonucleotide
agauucccugacaagaagc

SEQ ID NO: 1045475 - RNA, 19 nt, Artificial Sequence
  Description of Artificial Sequence: Synthetic oligonucleotide
uucaauaggugaauggcua

SEQ ID NO: 1045476 - RNA, 19 nt, Artificial Sequence
  Description of Artificial Sequence: Synthetic oligonucleotide
uugauaacacucacuuuug

SEQ ID NO: 1045477 - RNA, 19 nt, Artificial Sequence
  Description of Artificial Sequence: Synthetic oligonucleotide
ugcucuuguggaaauaagu

SEQ ID NO: 1045478 - RNA, 19 nt, Artificial Sequence
  Description of Artificial Sequence: Synthetic oligonucleotide
uuuaaucuuaagugugacu

SEQ ID NO: 1045479 - RNA, 19 nt, Artificial Sequence
  Description of Artificial Sequence: Synthetic oligonucleotide
auaaacauauuuguagcca

SEQ ID NO: 1045480 - RNA, 19 nt, Artificial Sequence
  Description of Artificial Sequence: Synthetic oligonucleotide
cuguuuaggaccaucuuuc

SEQ ID NO: 1045481 - RNA, 19 nt, Artificial Sequence
  Description of Artificial Sequence: Synthetic oligonucleotide
agguuagggaacuuugaag

SEQ ID NO: 1045482 - RNA, 19 nt, Artificial Sequence
  Description of Artificial Sequence: Synthetic oligonucleotide
uguggaaauaaguggagua

SEQ ID NO: 1045483 - RNA, 19 nt, Artificial Sequence
  Description of Artificial Sequence: Synthetic oligonucleotide
aagugaguuuuaucaaaca

SEQ ID NO: 1045484 - RNA, 19 nt, Artificial Sequence
  Description of Artificial Sequence: Synthetic oligonucleotide
cuuuucgcuucacuuacgg

SEQ ID NO: 1045485 - RNA, 19 nt, Artificial Sequence
  Description of Artificial Sequence: Synthetic oligonucleotide
auaagugaguuuuaucaaa

SEQ ID NO: 1045486 - RNA, 19 nt, Artificial Sequence
  Description of Artificial Sequence: Synthetic oligonucleotide
uaaccuuggaguucgggga

SEQ ID NO: 1045487 - RNA, 19 nt, Artificial Sequence
  Description of Artificial Sequence: Synthetic oligonucleotide
ugauuguacauuaggugaa

SEQ ID NO: 1045488 - RNA, 19 nt, Artificial Sequence
  Description of Artificial Sequence: Synthetic oligonucleotide
  modified_base (5)..(5): a, c, u, g, unknown or other
ucucnccuuuaccaauugg

SEQ ID NO: 1045489 - RNA, 19 nt, Artificial Sequence
  Description of Artificial Sequence: Synthetic oligonucleotide
uuaugcucauagguuaggg

SEQ ID NO: 1045490 - RNA, 19 nt, Artificial Sequence
  Description of Artificial Sequence: Synthetic oligonucleotide
ucggggagaguucacagca

SEQ ID NO: 1045491 - RNA, 19 nt, Artificial Sequence
  Description of Artificial Sequence: Synthetic oligonucleotide
aguuggucaaggauagacc

SEQ ID NO: 1045492 - RNA, 19 nt, Artificial Sequence
  Description of Artificial Sequence: Synthetic oligonucleotide
ugaugaccguucucgaggg

SEQ ID NO: 1045493 - RNA, 19 nt, Artificial Sequence
  Description of Artificial Sequence: Synthetic oligonucleotide
auuguacauuaggugaagc

SEQ ID NO: 1045494 - RNA, 19 nt, Artificial Sequence
  Description of Artificial Sequence: Synthetic oligonucleotide
uggcuuuaaucuuaagugu

SEQ ID NO: 1045495 - RNA, 19 nt, Artificial Sequence
  Description of Artificial Sequence: Synthetic oligonucleotide
uuaggaccaucuuucuuag

SEQ ID NO: 1045496 - RNA, 19 nt, Artificial Sequence
  Description of Artificial Sequence: Synthetic oligonucleotide
acauagaccaaaaggacug

SEQ ID NO: 1045497 - RNA, 19 nt, Artificial Sequence
  Description of Artificial Sequence: Synthetic oligonucleotide
  modified_base (3)..(3): a, c, u, g, unknown or other
ucnccuuuaccaauuggaa

SEQ ID NO: 1045498 - RNA, 19 nt, Artificial Sequence
  Description of Artificial Sequence: Synthetic oligonucleotide
cuuuguuacccuguguugc

SEQ ID NO: 1045499 - RNA, 19 nt, Artificial Sequence
  Description of Artificial Sequence: Synthetic oligonucleotide
ucuaagcagaggcagggaa

SEQ ID NO: 1045500 - RNA, 19 nt, Artificial Sequence
  Description of Artificial Sequence: Synthetic oligonucleotide
uaaggaugauuguacauua

SEQ ID NO: 1045501 - RNA, 19 nt, Artificial Sequence
  Description of Artificial Sequence: Synthetic oligonucleotide
aaguaagucucccuuugaa

SEQ ID NO: 1045502 - RNA, 19 nt, Artificial Sequence
  Description of Artificial Sequence: Synthetic oligonucleotide
acuguaauacccuuucuuu

SEQ ID NO: 1045503 - RNA, 19 nt, Artificial Sequence
  Description of Artificial Sequence: Synthetic oligonucleotide
ucccagaguaaccuuggag

SEQ ID NO: 1045504 - RNA, 19 nt, Artificial Sequence
  Description of Artificial Sequence: Synthetic oligonucleotide
ucacuuuugaggugaugag

SEQ ID NO: 1045505 - RNA, 19 nt, Artificial Sequence
  Description of Artificial Sequence: Synthetic oligonucleotide
auuucagaagccaauaaau

SEQ ID NO: 1045506 - RNA, 19 nt, Artificial Sequence
  Description of Artificial Sequence: Synthetic oligonucleotide
ugagaggaauuuuaucuuc

SEQ ID NO: 1045507 - RNA, 19 nt, Artificial Sequence
  Description of Artificial Sequence: Synthetic oligonucleotide
cuuuaugcucauagguuag

SEQ ID NO: 1045508 - RNA, 19 nt, Artificial Sequence
  Description of Artificial Sequence: Synthetic oligonucleotide
ccagucacaagucagggcg

SEQ ID NO: 1045509 - RNA, 19 nt, Artificial Sequence
  Description of Artificial Sequence: Synthetic oligonucleotide
ugguccaaacuaaggauga

SEQ ID NO: 1045510 - RNA, 19 nt, Artificial Sequence
  Description of Artificial Sequence: Synthetic oligonucleotide
uuagggaacuuugaaguac

SEQ ID NO: 1045511 - RNA, 19 nt, Artificial Sequence
  Description of Artificial Sequence: Synthetic oligonucleotide
aauaggugaauggcuaaga

SEQ ID NO: 1045512 - RNA, 19 nt, Artificial Sequence
  Description of Artificial Sequence: Synthetic oligonucleotide
cuugaguaggcacugcuuc

SEQ ID NO: 1045513 - RNA, 19 nt, Artificial Sequence
  Description of Artificial Sequence: Synthetic oligonucleotide
  modified_base (2)..(2): a, c, u, g, unknown or other
cnccuuuaccaauuggaag

SEQ ID NO: 1045514 - RNA, 19 nt, Artificial Sequence
  Description of Artificial Sequence: Synthetic oligonucleotide
  modified_base (4)..(4): a, c, u, g, unknown or other
cucnccuuuaccaauugga

SEQ ID NO: 1045515 - RNA, 19 nt, Artificial Sequence
  Description of Artificial Sequence: Synthetic oligonucleotide
aacagcccaauguuauuca

SEQ ID NO: 1045516 - RNA, 19 nt, Artificial Sequence
  Description of Artificial Sequence: Synthetic oligonucleotide
augaccguucucgaggggc

SEQ ID NO: 1045517 - RNA, 19 nt, Artificial Sequence
  Description of Artificial Sequence: Synthetic oligonucleotide
uuuaugcucauagguuagg

SEQ ID NO: 1045518 - RNA, 19 nt, Artificial Sequence
  Description of Artificial Sequence: Synthetic oligonucleotide
cagaauauccuuaaccuaa

SEQ ID NO: 1045519 - RNA, 19 nt, Artificial Sequence
  Description of Artificial Sequence: Synthetic oligonucleotide
agaguaggcauaaacauau

SEQ ID NO: 1045520 - RNA, 19 nt, Artificial Sequence
  Description of Artificial Sequence: Synthetic oligonucleotide
caacugaucaagucucacc

SEQ ID NO: 1045521 - RNA, 19 nt, Artificial Sequence
  Description of Artificial Sequence: Synthetic oligonucleotide
ugauaacacucacuuuuga

SEQ ID NO: 1045522 - RNA, 19 nt, Artificial Sequence
  Description of Artificial Sequence: Synthetic oligonucleotide
uaugcucauagguuaggga

SEQ ID NO: 1045523 - RNA, 19 nt, Artificial Sequence
  Description of Artificial Sequence: Synthetic oligonucleotide
ugauguaaacucuuucaua

SEQ ID NO: 1045524 - RNA, 19 nt, Artificial Sequence
  Description of Artificial Sequence: Synthetic oligonucleotide
uuaacccuuuguuacccug

SEQ ID NO: 1045525 - RNA, 19 nt, Artificial Sequence
  Description of Artificial Sequence: Synthetic oligonucleotide
uucauuucaauaugaugua

SEQ ID NO: 1045526 - RNA, 19 nt, Artificial Sequence
  Description of Artificial Sequence: Synthetic oligonucleotide
cucucagaacccuuuuagg

SEQ ID NO: 1045527 - RNA, 19 nt, Artificial Sequence
  Description of Artificial Sequence: Synthetic oligonucleotide
acugaaggaccguuucagg

SEQ ID NO: 1045528 - RNA, 19 nt, Artificial Sequence
  Description of Artificial Sequence: Synthetic oligonucleotide
cuaagcagaggcagggaag

SEQ ID NO: 1045529 - RNA, 19 nt, Artificial Sequence
  Description of Artificial Sequence: Synthetic oligonucleotide
uacccuguguugcagugcc

SEQ ID NO: 1045530 - RNA, 19 nt, Artificial Sequence
  Description of Artificial Sequence: Synthetic oligonucleotide
ugcccagucacaagucagg

SEQ ID NO: 1045531 - RNA, 19 nt, Artificial Sequence
  Description of Artificial Sequence: Synthetic oligonucleotide
gauucccugacaagaagcc

SEQ ID NO: 1045532 - RNA, 19 nt, Artificial Sequence
  Description of Artificial Sequence: Synthetic oligonucleotide
uuuguagccccaugucucc

SEQ ID NO: 1045533 - RNA, 19 nt, Artificial Sequence
  Description of Artificial Sequence: Synthetic oligonucleotide
aauccuaggagugcuggca

SEQ ID NO: 1045534 - RNA, 19 nt, Artificial Sequence
  Description of Artificial Sequence: Synthetic oligonucleotide
uagguuagggaacuuugaa

SEQ ID NO: 1045535 - RNA, 19 nt, Artificial Sequence
  Description of Artificial Sequence: Synthetic oligonucleotide
aauggcuaagaaaauuaaa

SEQ ID NO: 1045536 - RNA, 19 nt, Artificial Sequence
  Description of Artificial Sequence: Synthetic oligonucleotide
uuaccucuaagcagaggca

SEQ ID NO: 1045537 - RNA, 19 nt, Artificial Sequence
  Description of Artificial Sequence: Synthetic oligonucleotide
ucuaccaguucaucccgag

SEQ ID NO: 1045538 - RNA, 19 nt, Artificial Sequence
  Description of Artificial Sequence: Synthetic oligonucleotide
cuuuaacccuuuguuaccc

SEQ ID NO: 1045539 - RNA, 19 nt, Artificial Sequence
  Description of Artificial Sequence: Synthetic oligonucleotide
uugaguaggcacugcuucc

SEQ ID NO: 1045540 - RNA, 19 nt, Artificial Sequence
  Description of Artificial Sequence: Synthetic oligonucleotide
ucuuucugcuuagauauaa

SEQ ID NO: 1045541 - RNA, 19 nt, Artificial Sequence
  Description of Artificial Sequence: Synthetic oligonucleotide
auguauaaauugaaugaug

SEQ ID NO: 1045542 - RNA, 19 nt, Artificial Sequence
  Description of Artificial Sequence: Synthetic oligonucleotide
gacaagaagccauccugug

SEQ ID NO: 1045543 - RNA, 19 nt, Artificial Sequence
  Description of Artificial Sequence: Synthetic oligonucleotide
gucauagguacucauuaca

SEQ ID NO: 1045544 - RNA, 19 nt, Artificial Sequence
  Description of Artificial Sequence: Synthetic oligonucleotide
uaccucuaagcagaggcag

SEQ ID NO: 1045545 - RNA, 19 nt, Artificial Sequence
  Description of Artificial Sequence: Synthetic oligonucleotide
cuugauaacacucacuuuu

SEQ ID NO: 1045546 - RNA, 19 nt, Artificial Sequence
  Description of Artificial Sequence: Synthetic oligonucleotide
uaccaauuggaaguaaguc

SEQ ID NO: 1045547 - RNA, 19 nt, Artificial Sequence
  Description of Artificial Sequence: Synthetic oligonucleotide
agaucgggcagagaugagg

SEQ ID NO: 1045548 - RNA, 19 nt, Artificial Sequence
  Description of Artificial Sequence: Synthetic oligonucleotide
ugaaggaccguuucaggau

SEQ ID NO: 1045549 - RNA, 19 nt, Artificial Sequence
  Description of Artificial Sequence: Synthetic oligonucleotide
auccgcucugcccagucac

SEQ ID NO: 1045550 - RNA, 19 nt, Artificial Sequence
  Description of Artificial Sequence: Synthetic oligonucleotide
uaauacccuuucuuucugc

SEQ ID NO: 1045551 - RNA, 19 nt, Artificial Sequence
  Description of Artificial Sequence: Synthetic oligonucleotide
cucagaggguacauagacc

SEQ ID NO: 1045552 - RNA, 19 nt, Artificial Sequence
  Description of Artificial Sequence: Synthetic oligonucleotide
uaaucuuaagugugacuuc

SEQ ID NO: 1045553 - RNA, 19 nt, Artificial Sequence
  Description of Artificial Sequence: Synthetic oligonucleotide
ucacuuacgguagggcagg

SEQ ID NO: 1045554 - RNA, 19 nt, Artificial Sequence
  Description of Artificial Sequence: Synthetic oligonucleotide
cauuucuggacucucagaa

SEQ ID NO: 1045555 - RNA, 19 nt, Artificial Sequence
  Description of Artificial Sequence: Synthetic oligonucleotide
gauuguacauuaggugaag

SEQ ID NO: 1045556 - RNA, 19 nt, Artificial Sequence
  Description of Artificial Sequence: Synthetic oligonucleotide
cucucugaccuugaguagg

SEQ ID NO: 1045557 - RNA, 19 nt, Artificial Sequence
  Description of Artificial Sequence: Synthetic oligonucleotide
accucccugaaagaaaauc

SEQ ID NO: 1045558 - RNA, 19 nt, Artificial Sequence
  Description of Artificial Sequence: Synthetic oligonucleotide
ucgggcagagaugaggugc

SEQ ID NO: 1045559 - RNA, 19 nt, Artificial Sequence
  Description of Artificial Sequence: Synthetic oligonucleotide
caauuggaaguaagucucc

SEQ ID NO: 1045560 - RNA, 19 nt, Artificial Sequence
  Description of Artificial Sequence: Synthetic oligonucleotide
ucaauaggugaauggcuaa

SEQ ID NO: 1045561 - RNA, 19 nt, Artificial Sequence
  Description of Artificial Sequence: Synthetic oligonucleotide
uuggucaaggauagaccug

SEQ ID NO: 1045562 - RNA, 19 nt, Artificial Sequence
  Description of Artificial Sequence: Synthetic oligonucleotide
caugaugaccguucucgag

SEQ ID NO: 1045563 - RNA, 19 nt, Artificial Sequence
  Description of Artificial Sequence: Synthetic oligonucleotide
auauacaagaauguucaua

SEQ ID NO: 1045564 - RNA, 19 nt, Artificial Sequence
  Description of Artificial Sequence: Synthetic oligonucleotide
aaggaccguuucaggaucc

SEQ ID NO: 1045565 - RNA, 19 nt, Artificial Sequence
  Description of Artificial Sequence: Synthetic oligonucleotide
caagucagggcgcaggcug

SEQ ID NO: 1045566 - RNA, 19 nt, Artificial Sequence
  Description of Artificial Sequence: Synthetic oligonucleotide
aaaggacuguuuaggacca

SEQ ID NO: 1045567 - RNA, 19 nt, Artificial Sequence
  Description of Artificial Sequence: Synthetic oligonucleotide
uggucuuuauaagugaguu

SEQ ID NO: 1045568 - RNA, 19 nt, Artificial Sequence
  Description of Artificial Sequence: Synthetic oligonucleotide
agguacucauuacauuuca

SEQ ID NO: 1045569 - RNA, 19 nt, Artificial Sequence
  Description of Artificial Sequence: Synthetic oligonucleotide
accguuucaggauccgcuc

SEQ ID NO: 1045570 - RNA, 19 nt, Artificial Sequence
  Description of Artificial Sequence: Synthetic oligonucleotide
ucuacaccauucuuggauu

SEQ ID NO: 1045571 - RNA, 19 nt, Artificial Sequence
  Description of Artificial Sequence: Synthetic oligonucleotide
uguuauucaauaggugaau

SEQ ID NO: 1045572 - RNA, 19 nt, Artificial Sequence
  Description of Artificial Sequence: Synthetic oligonucleotide
augagaggaauuuuaucuu

SEQ ID NO: 1045573 - RNA, 19 nt, Artificial Sequence
  Description of Artificial Sequence: Synthetic oligonucleotide
uguuuaggaccaucuuucu

SEQ ID NO: 1045574 - RNA, 19 nt, Artificial Sequence
  Description of Artificial Sequence: Synthetic oligonucleotide
ucucuggucucccaacuau

SEQ ID NO: 1045575 - RNA, 19 nt, Artificial Sequence
  Description of Artificial Sequence: Synthetic oligonucleotide
aaaacuggaaacagcccaa

SEQ ID NO: 1045576 - RNA, 19 nt, Artificial Sequence
  Description of Artificial Sequence: Synthetic oligonucleotide
guuggucaaggauagaccu

SEQ ID NO: 1045577 - RNA, 19 nt, Artificial Sequence
  Description of Artificial Sequence: Synthetic oligonucleotide
ggauagaccugacccaggg

SEQ ID NO: 1045578 - RNA, 19 nt, Artificial Sequence
  Description of Artificial Sequence: Synthetic oligonucleotide
guaauacccuuucuuucug

SEQ ID NO: 1045579 - RNA, 19 nt, Artificial Sequence
  Description of Artificial Sequence: Synthetic oligonucleotide
cauuguguauaauaacaaa

SEQ ID NO: 1045580 - RNA, 19 nt, Artificial Sequence
  Description of Artificial Sequence: Synthetic oligonucleotide
gguuagggaacuuugaagu

SEQ ID NO: 1045581 - RNA, 19 nt, Artificial Sequence
  Description of Artificial Sequence: Synthetic oligonucleotide
cuucacuuacgguagggca

SEQ ID NO: 1045582 - RNA, 19 nt, Artificial Sequence
  Description of Artificial Sequence: Synthetic oligonucleotide
gaaggaccguuucaggauc

SEQ ID NO: 1045583 - RNA, 19 nt, Artificial Sequence
  Description of Artificial Sequence: Synthetic oligonucleotide
uguagccacacuaguuggu

SEQ ID NO: 1045584 - RNA, 19 nt, Artificial Sequence
  Description of Artificial Sequence: Synthetic oligonucleotide
ugaucaagucucaccugga

SEQ ID NO: 1045585 - RNA, 19 nt, Artificial Sequence
  Description of Artificial Sequence: Synthetic oligonucleotide
acacuaguuggucaaggau

SEQ ID NO: 1045586 - RNA, 19 nt, Artificial Sequence
  Description of Artificial Sequence: Synthetic oligonucleotide
aaggaugauuguacauuag

SEQ ID NO: 1045587 - RNA, 19 nt, Artificial Sequence
  Description of Artificial Sequence: Synthetic oligonucleotide
ugauaccucccugaaagaa

SEQ ID NO: 1045588 - RNA, 19 nt, Artificial Sequence
  Description of Artificial Sequence: Synthetic oligonucleotide
uggaguaaugggugauacc

SEQ ID NO: 1045589 - RNA, 19 nt, Artificial Sequence
  Description of Artificial Sequence: Synthetic oligonucleotide
agccccaugucucccagag

SEQ ID NO: 1045590 - RNA, 19 nt, Artificial Sequence
  Description of Artificial Sequence: Synthetic oligonucleotide
uuuucgagggcguccccgc

SEQ ID NO: 1045591 - RNA, 19 nt, Artificial Sequence
  Description of Artificial Sequence: Synthetic oligonucleotide
ugcagaucgggcagagaug

SEQ ID NO: 1045592 - RNA, 19 nt, Artificial Sequence
  Description of Artificial Sequence: Synthetic oligonucleotide
aggguacauagaccaaaag

SEQ ID NO: 1045593 - RNA, 19 nt, Artificial Sequence
  Description of Artificial Sequence: Synthetic oligonucleotide
uagugaaucuuuugggcuu

SEQ ID NO: 1045594 - RNA, 19 nt, Artificial Sequence
  Description of Artificial Sequence: Synthetic oligonucleotide
ucccaauuucagaagccaa

SEQ ID NO: 1045595 - RNA, 19 nt, Artificial Sequence
  Description of Artificial Sequence: Synthetic oligonucleotide
uagaccugacccagggucu

SEQ ID NO: 1045596 - RNA, 19 nt, Artificial Sequence
  Description of Artificial Sequence: Synthetic oligonucleotide
aguaaccuuggaguucggg

SEQ ID NO: 1045597 - RNA, 19 nt, Artificial Sequence
  Description of Artificial Sequence: Synthetic oligonucleotide
guuacccuguguugcagug

SEQ ID NO: 1045598 - RNA, 19 nt, Artificial Sequence
  Description of Artificial Sequence: Synthetic oligonucleotide
acugaucaagucucaccug

SEQ ID NO: 1045599 - RNA, 19 nt, Artificial Sequence
  Description of Artificial Sequence: Synthetic oligonucleotide
uucucgaggggcucuuuca

SEQ ID NO: 1045600 - RNA, 19 nt, Artificial Sequence
  Description of Artificial Sequence: Synthetic oligonucleotide
cugaaggaccguuucagga

SEQ ID NO: 1045601 - RNA, 19 nt, Artificial Sequence
  Description of Artificial Sequence: Synthetic oligonucleotide
uuuucgcuucacuuacggu

SEQ ID NO: 1045602 - RNA, 19 nt, Artificial Sequence
  Description of Artificial Sequence: Synthetic oligonucleotide
cccuuuaacccuuuguuac

SEQ ID NO: 1045603 - RNA, 19 nt, Artificial Sequence
  Description of Artificial Sequence: Synthetic oligonucleotide
gagcaacugaucaagucuc

SEQ ID NO: 1045604 - RNA, 19 nt, Artificial Sequence
  Description of Artificial Sequence: Synthetic oligonucleotide
uuuaacccuuuguuacccu

SEQ ID NO: 1045605 - RNA, 19 nt, Artificial Sequence
  Description of Artificial Sequence: Synthetic oligonucleotide
ggacagaguaggcauaaac

SEQ ID NO: 1045606 - RNA, 19 nt, Artificial Sequence
  Description of Artificial Sequence: Synthetic oligonucleotide
caauaggugaauggcuaag

SEQ ID NO: 1045607 - RNA, 19 nt, Artificial Sequence
  Description of Artificial Sequence: Synthetic oligonucleotide
ggcuuuaaucuuaagugug

SEQ ID NO: 1045608 - RNA, 19 nt, Artificial Sequence
  Description of Artificial Sequence: Synthetic oligonucleotide
gaauggcuaagaaaauuaa

SEQ ID NO: 1045609 - RNA, 19 nt, Artificial Sequence
  Description of Artificial Sequence: Synthetic oligonucleotide
gucuuuauaagugaguuuu

SEQ ID NO: 1045610 - RNA, 19 nt, Artificial Sequence
  Description of Artificial Sequence: Synthetic oligonucleotide
cuaccaguucaucccgagg

SEQ ID NO: 1045611 - RNA, 19 nt, Artificial Sequence
  Description of Artificial Sequence: Synthetic oligonucleotide
guagcgggccaccugaaca

SEQ ID NO: 1045612 - RNA, 19 nt, Artificial Sequence
  Description of Artificial Sequence: Synthetic oligonucleotide
cacacaauccuaggagugc

SEQ ID NO: 1045613 - RNA, 19 nt, Artificial Sequence
  Description of Artificial Sequence: Synthetic oligonucleotide
aagccaauaaauggcuuua

SEQ ID NO: 1045614 - RNA, 19 nt, Artificial Sequence
  Description of Artificial Sequence: Synthetic oligonucleotide
guaagucucccuuugaauu

SEQ ID NO: 1045615 - RNA, 19 nt, Artificial Sequence
  Description of Artificial Sequence: Synthetic oligonucleotide
auacugagcaacugaucaa

SEQ ID NO: 1045616 - RNA, 19 nt, Artificial Sequence
  Description of Artificial Sequence: Synthetic oligonucleotide
uguuacccuguguugcagu

SEQ ID NO: 1045617 - RNA, 19 nt, Artificial Sequence
  Description of Artificial Sequence: Synthetic oligonucleotide
agcaccgccucuugacuuc

SEQ ID NO: 1045618 - RNA, 19 nt, Artificial Sequence
  Description of Artificial Sequence: Synthetic oligonucleotide
gaguagugugucucucccc

SEQ ID NO: 1045619 - RNA, 19 nt, Artificial Sequence
  Description of Artificial Sequence: Synthetic oligonucleotide
acucauauacaagaauguu

SEQ ID NO: 1045620 - RNA, 19 nt, Artificial Sequence
  Description of Artificial Sequence: Synthetic oligonucleotide
gggucuuuaugcucauagg

SEQ ID NO: 1045621 - RNA, 19 nt, Artificial Sequence
  Description of Artificial Sequence: Synthetic oligonucleotide
cugcccagucacaagucag

SEQ ID NO: 1045622 - RNA, 19 nt, Artificial Sequence
  Description of Artificial Sequence: Synthetic oligonucleotide
cuuacgguagggcaggucu

SEQ ID NO: 1045623 - RNA, 19 nt, Artificial Sequence
  Description of Artificial Sequence: Synthetic oligonucleotide
uuagggccggccaccuucc

SEQ ID NO: 1045624 - RNA, 19 nt, Artificial Sequence
  Description of Artificial Sequence: Synthetic oligonucleotide
caauccuaggagugcuggc

SEQ ID NO: 1045625 - RNA, 19 nt, Artificial Sequence
  Description of Artificial Sequence: Synthetic oligonucleotide
gauaccucccugaaagaaa

SEQ ID NO: 1045626 - RNA, 19 nt, Artificial Sequence
  Description of Artificial Sequence: Synthetic oligonucleotide
ugaccguucucgaggggcu

SEQ ID NO: 1045627 - RNA, 19 nt, Artificial Sequence
  Description of Artificial Sequence: Synthetic oligonucleotide
ugguuaccucuaagcagag

SEQ ID NO: 1045628 - RNA, 19 nt, Artificial Sequence
  Description of Artificial Sequence: Synthetic oligonucleotide
gccucuaccaguucauccc

SEQ ID NO: 1045629 - RNA, 19 nt, Artificial Sequence
  Description of Artificial Sequence: Synthetic oligonucleotide
ggucuuuaugcucauaggu

SEQ ID NO: 1045630 - RNA, 19 nt, Artificial Sequence
  Description of Artificial Sequence: Synthetic oligonucleotide
gaugaccguucucgagggg

SEQ ID NO: 1045631 - RNA, 19 nt, Artificial Sequence
  Description of Artificial Sequence: Synthetic oligonucleotide
gaagccaauaaauggcuuu

SEQ ID NO: 1045632 - RNA, 19 nt, Artificial Sequence
  Description of Artificial Sequence: Synthetic oligonucleotide
auucugcccuugauaacac

SEQ ID NO: 1045633 - RNA, 19 nt, Artificial Sequence
  Description of Artificial Sequence: Synthetic oligonucleotide
guggaguaaugggugauac

SEQ ID NO: 1045634 - RNA, 19 nt, Artificial Sequence
  Description of Artificial Sequence: Synthetic oligonucleotide
aacucagaggguacauaga

SEQ ID NO: 1045635 - RNA, 19 nt, Artificial Sequence
  Description of Artificial Sequence: Synthetic oligonucleotide
aggccccagccuuaagcac

SEQ ID NO: 1045636 - RNA, 19 nt, Artificial Sequence
  Description of Artificial Sequence: Synthetic oligonucleotide
cucuggucucccaacuaug

SEQ ID NO: 1045637 - RNA, 19 nt, Artificial Sequence
  Description of Artificial Sequence: Synthetic oligonucleotide
ucgcuucacuuacgguagg

SEQ ID NO: 1045638 - RNA, 19 nt, Artificial Sequence
  Description of Artificial Sequence: Synthetic oligonucleotide
augagcaugugcagaucgg

SEQ ID NO: 1045639 - RNA, 19 nt, Artificial Sequence
  Description of Artificial Sequence: Synthetic oligonucleotide
cuggcccuagucucucugg

SEQ ID NO: 1045640 - RNA, 19 nt, Artificial Sequence
  Description of Artificial Sequence: Synthetic oligonucleotide
uggaguucggggagaguuc

SEQ ID NO: 1045641 - RNA, 19 nt, Artificial Sequence
  Description of Artificial Sequence: Synthetic oligonucleotide
ggcacuguaauacccuuuc

SEQ ID NO: 1045642 - RNA, 19 nt, Artificial Sequence
  Description of Artificial Sequence: Synthetic oligonucleotide
acucuuucauaaaguaaga

SEQ ID NO: 1045643 - RNA, 19 nt, Artificial Sequence
  Description of Artificial Sequence: Synthetic oligonucleotide
auaccucccugaaagaaaa

SEQ ID NO: 1045644 - RNA, 19 nt, Artificial Sequence
  Description of Artificial Sequence: Synthetic oligonucleotide
ccuuuaacccuuuguuacc

SEQ ID NO: 1045645 - RNA, 19 nt, Artificial Sequence
  Description of Artificial Sequence: Synthetic oligonucleotide
aaacuggaaacagcccaau

SEQ ID NO: 1045646 - RNA, 19 nt, Artificial Sequence
  Description of Artificial Sequence: Synthetic oligonucleotide
aaguggaguaaugggugau

SEQ ID NO: 1045647 - RNA, 19 nt, Artificial Sequence
  Description of Artificial Sequence: Synthetic oligonucleotide
gcugggguuacuucugggc

SEQ ID NO: 1045648 - RNA, 19 nt, Artificial Sequence
  Description of Artificial Sequence: Synthetic oligonucleotide
ggucauagguacucauuac

SEQ ID NO: 1045649 - RNA, 19 nt, Artificial Sequence
  Description of Artificial Sequence: Synthetic oligonucleotide
ucucuacaccauucuugga

SEQ ID NO: 1045650 - RNA, 19 nt, Artificial Sequence
  Description of Artificial Sequence: Synthetic oligonucleotide
cacacuaguuggucaagga

SEQ ID NO: 1045651 - RNA, 19 nt, Artificial Sequence
  Description of Artificial Sequence: Synthetic oligonucleotide
cuucuuagggccggccacc

SEQ ID NO: 1045652 - RNA, 19 nt, Artificial Sequence
  Description of Artificial Sequence: Synthetic oligonucleotide
uggcccuagucucucuggu

SEQ ID NO: 1045653 - RNA, 19 nt, Artificial Sequence
  Description of Artificial Sequence: Synthetic oligonucleotide
aauaggcaacaguccccaa

SEQ ID NO: 1045654 - RNA, 19 nt, Artificial Sequence
  Description of Artificial Sequence: Synthetic oligonucleotide
guaagacaauaggcaacag

SEQ ID NO: 1045655 - RNA, 19 nt, Artificial Sequence
  Description of Artificial Sequence: Synthetic oligonucleotide
aguucggggagaguucaca

SEQ ID NO: 1045656 - RNA, 19 nt, Artificial Sequence
  Description of Artificial Sequence: Synthetic oligonucleotide
cucuggaguagugugucuc

SEQ ID NO: 1045657 - RNA, 19 nt, Artificial Sequence
  Description of Artificial Sequence: Synthetic oligonucleotide
gaguaaugggugauaccuc

SEQ ID NO: 1045658 - RNA, 19 nt, Artificial Sequence
  Description of Artificial Sequence: Synthetic oligonucleotide
caauaggcaacagucccca

SEQ ID NO: 1045659 - RNA, 19 nt, Artificial Sequence
  Description of Artificial Sequence: Synthetic oligonucleotide
ggggcauaaaccuaauagu

SEQ ID NO: 1045660 - RNA, 19 nt, Artificial Sequence
  Description of Artificial Sequence: Synthetic oligonucleotide
cacuuuugaggugaugaga

SEQ ID NO: 1045661 - RNA, 19 nt, Artificial Sequence
  Description of Artificial Sequence: Synthetic oligonucleotide
cugcccuugauaacacuca

SEQ ID NO: 1045662 - RNA, 19 nt, Artificial Sequence
  Description of Artificial Sequence: Synthetic oligonucleotide
  modified_base (6)..(6): a, c, u, g, unknown or other
cucucnccuuuaccaauug

SEQ ID NO: 1045663 - RNA, 19 nt, Artificial Sequence
  Description of Artificial Sequence: Synthetic oligonucleotide
gcccaauguuauucaauag

SEQ ID NO: 1045664 - RNA, 19 nt, Artificial Sequence
  Description of Artificial Sequence: Synthetic oligonucleotide
guagccacacuaguugguc

SEQ ID NO: 1045665 - RNA, 19 nt, Artificial Sequence
  Description of Artificial Sequence: Synthetic oligonucleotide
uucuuucugcuuagauaua

SEQ ID NO: 1045666 - RNA, 19 nt, Artificial Sequence
  Description of Artificial Sequence: Synthetic oligonucleotide
uuuggcuugcugggaacuc

SEQ ID NO: 1045667 - RNA, 19 nt, Artificial Sequence
  Description of Artificial Sequence: Synthetic oligonucleotide
acuuacgguagggcagguc

SEQ ID NO: 1045668 - RNA, 19 nt, Artificial Sequence
  Description of Artificial Sequence: Synthetic oligonucleotide
uucugcccuugauaacacu

SEQ ID NO: 1045669 - RNA, 19 nt, Artificial Sequence
  Description of Artificial Sequence: Synthetic oligonucleotide
  modified_base (9)..(9): a, c, u, g, unknown or other
agccucucnccuuuaccaa

SEQ ID NO: 1045670 - RNA, 19 nt, Artificial Sequence
  Description of Artificial Sequence: Synthetic oligonucleotide
aagcagugagaaacauacu

SEQ ID NO: 1045671 - RNA, 19 nt, Artificial Sequence
  Description of Artificial Sequence: Synthetic oligonucleotide
ccaagauucccugacaaga

SEQ ID NO: 1045672 - RNA, 19 nt, Artificial Sequence
  Description of Artificial Sequence: Synthetic oligonucleotide
cacacacaauccuaggagu

SEQ ID NO: 1045673 - RNA, 19 nt, Artificial Sequence
  Description of Artificial Sequence: Synthetic oligonucleotide
ggaugauuguacauuaggu

SEQ ID NO: 1045674 - RNA, 19 nt, Artificial Sequence
  Description of Artificial Sequence: Synthetic oligonucleotide
gaucgggcagagaugaggu

SEQ ID NO: 1045675 - RNA, 19 nt, Artificial Sequence
  Description of Artificial Sequence: Synthetic oligonucleotide
uggcacuguaauacccuuu

SEQ ID NO: 1045676 - RNA, 19 nt, Artificial Sequence
  Description of Artificial Sequence: Synthetic oligonucleotide
caucccgagguugcugggg

SEQ ID NO: 1045677 - RNA, 19 nt, Artificial Sequence
  Description of Artificial Sequence: Synthetic oligonucleotide
uuucgagggcguccccgcu

SEQ ID NO: 1045678 - RNA, 19 nt, Artificial Sequence
  Description of Artificial Sequence: Synthetic oligonucleotide
gggcauaaaccuaauagua

SEQ ID NO: 1045679 - RNA, 19 nt, Artificial Sequence
  Description of Artificial Sequence: Synthetic oligonucleotide
cuaaggaugauuguacauu

SEQ ID NO: 1045680 - RNA, 19 nt, Artificial Sequence
  Description of Artificial Sequence: Synthetic oligonucleotide
ccucuaagcagaggcaggg

SEQ ID NO: 1045681 - RNA, 19 nt, Artificial Sequence
  Description of Artificial Sequence: Synthetic oligonucleotide
ucgagggcguccccgcuuc

SEQ ID NO: 1045682 - RNA, 19 nt, Artificial Sequence
  Description of Artificial Sequence: Synthetic oligonucleotide
agaagccauccuguggaga

SEQ ID NO: 1045683 - RNA, 19 nt, Artificial Sequence
  Description of Artificial Sequence: Synthetic oligonucleotide
aggauagaccugacccagg

SEQ ID NO: 1045684 - RNA, 19 nt, Artificial Sequence
  Description of Artificial Sequence: Synthetic oligonucleotide
agucacaagucagggcgca

SEQ ID NO: 1045685 - RNA, 19 nt, Artificial Sequence
  Description of Artificial Sequence: Synthetic oligonucleotide
aggcauaaacauauuugua

SEQ ID NO: 1045686 - RNA, 19 nt, Artificial Sequence
  Description of Artificial Sequence: Synthetic oligonucleotide
gcauuguguauaauaacaa

SEQ ID NO: 1045687 - RNA, 19 nt, Artificial Sequence
  Description of Artificial Sequence: Synthetic oligonucleotide
gugauaccucccugaaaga

SEQ ID NO: 1045688 - RNA, 19 nt, Artificial Sequence
  Description of Artificial Sequence: Synthetic oligonucleotide
accaguucaucccgagguu

SEQ ID NO: 1045689 - RNA, 19 nt, Artificial Sequence
  Description of Artificial Sequence: Synthetic oligonucleotide
aggucaaguccaggcaaug

SEQ ID NO: 1045690 - RNA, 19 nt, Artificial Sequence
  Description of Artificial Sequence: Synthetic oligonucleotide
uaggaccaucuuucuuaga

SEQ ID NO: 1045691 - RNA, 19 nt, Artificial Sequence
  Description of Artificial Sequence: Synthetic oligonucleotide
guucaucccgagguugcug

SEQ ID NO: 1045692 - RNA, 19 nt, Artificial Sequence
  Description of Artificial Sequence: Synthetic oligonucleotide
aguagguagcgggccaccu

SEQ ID NO: 1045693 - RNA, 19 nt, Artificial Sequence
  Description of Artificial Sequence: Synthetic oligonucleotide
gcuaggauuccuggcacug

SEQ ID NO: 1045694 - RNA, 19 nt, Artificial Sequence
  Description of Artificial Sequence: Synthetic oligonucleotide
gaccguuucaggauccgcu

SEQ ID NO: 1045695 - RNA, 19 nt, Artificial Sequence
  Description of Artificial Sequence: Synthetic oligonucleotide
gaggugaugagaggaauuu

SEQ ID NO: 1045696 - RNA, 19 nt, Artificial Sequence
  Description of Artificial Sequence: Synthetic oligonucleotide
cccagaguaaccuuggagu

SEQ ID NO: 1045697 - RNA, 19 nt, Artificial Sequence
  Description of Artificial Sequence: Synthetic oligonucleotide
agacagugguuaccucuaa

SEQ ID NO: 1045698 - RNA, 19 nt, Artificial Sequence
  Description of Artificial Sequence: Synthetic oligonucleotide
gauagaccugacccagggu

SEQ ID NO: 1045699 - RNA, 19 nt, Artificial Sequence
  Description of Artificial Sequence: Synthetic oligonucleotide
aguggaguaaugggugaua

SEQ ID NO: 1045700 - RNA, 19 nt, Artificial Sequence
  Description of Artificial Sequence: Synthetic oligonucleotide
auggaacugaaggaccguu

SEQ ID NO: 1045701 - RNA, 19 nt, Artificial Sequence
  Description of Artificial Sequence: Synthetic oligonucleotide
agaagccaauaaauggcuu

SEQ ID NO: 1045702 - RNA, 19 nt, Artificial Sequence
  Description of Artificial Sequence: Synthetic oligonucleotide
gucuuuaugcucauagguu

SEQ ID NO: 1045703 - RNA, 19 nt, Artificial Sequence
  Description of Artificial Sequence: Synthetic oligonucleotide
ggugaagcagugagaaaca

SEQ ID NO: 1045704 - RNA, 19 nt, Artificial Sequence
  Description of Artificial Sequence: Synthetic oligonucleotide
aguucaucccgagguugcu

SEQ ID NO: 1045705 - RNA, 19 nt, Artificial Sequence
  Description of Artificial Sequence: Synthetic oligonucleotide
gaacccuuuuaggucaagu

SEQ ID NO: 1045706 - RNA, 19 nt, Artificial Sequence
  Description of Artificial Sequence: Synthetic oligonucleotide
agccaauaaauggcuuuaa

SEQ ID NO: 1045707 - RNA, 19 nt, Artificial Sequence
  Description of Artificial Sequence: Synthetic oligonucleotide
ggaccaucuuucuuagaaa

SEQ ID NO: 1045708 - RNA, 19 nt, Artificial Sequence
  Description of Artificial Sequence: Synthetic oligonucleotide
uucgagggcguccccgcuu

SEQ ID NO: 1045709 - RNA, 19 nt, Artificial Sequence
  Description of Artificial Sequence: Synthetic oligonucleotide
gguuaccucuaagcagagg

SEQ ID NO: 1045710 - RNA, 19 nt, Artificial Sequence
  Description of Artificial Sequence: Synthetic oligonucleotide
ccuuuucgcuucacuuacg

SEQ ID NO: 1045711 - RNA, 19 nt, Artificial Sequence
  Description of Artificial Sequence: Synthetic oligonucleotide
gaccugacccagggucugg

SEQ ID NO: 1045712 - RNA, 19 nt, Artificial Sequence
  Description of Artificial Sequence: Synthetic oligonucleotide
gaccuugaguaggcacugc

SEQ ID NO: 1045713 - RNA, 19 nt, Artificial Sequence
  Description of Artificial Sequence: Synthetic oligonucleotide
caacaguccccaacucaga

SEQ ID NO: 1045714 - RNA, 19 nt, Artificial Sequence
  Description of Artificial Sequence: Synthetic oligonucleotide
gcccagucacaagucaggg

SEQ ID NO: 1045715 - RNA, 19 nt, Artificial Sequence
  Description of Artificial Sequence: Synthetic oligonucleotide
ugugcagaucgggcagaga

SEQ ID NO: 1045716 - RNA, 19 nt, Artificial Sequence
  Description of Artificial Sequence: Synthetic oligonucleotide
cagaucgggcagagaugag

SEQ ID NO: 1045717 - RNA, 19 nt, Artificial Sequence
  Description of Artificial Sequence: Synthetic oligonucleotide
cugugaagugguccaaacu

SEQ ID NO: 1045718 - RNA, 19 nt, Artificial Sequence
  Description of Artificial Sequence: Synthetic oligonucleotide
cccagucacaagucagggc

SEQ ID NO: 1045719 - RNA, 19 nt, Artificial Sequence
  Description of Artificial Sequence: Synthetic oligonucleotide
aggcacucauauacaagaa

SEQ ID NO: 1045720 - RNA, 19 nt, Artificial Sequence
  Description of Artificial Sequence: Synthetic oligonucleotide
cucuaccaguucaucccga

SEQ ID NO: 1045721 - RNA, 19 nt, Artificial Sequence
  Description of Artificial Sequence: Synthetic oligonucleotide
gaguaaccuuggaguucgg

SEQ ID NO: 1045722 - RNA, 19 nt, Artificial Sequence
  Description of Artificial Sequence: Synthetic oligonucleotide
gucacaagucagggcgcag

SEQ ID NO: 1045723 - RNA, 19 nt, Artificial Sequence
  Description of Artificial Sequence: Synthetic oligonucleotide
cuuuaccaauuggaaguaa

SEQ ID NO: 1045724 - RNA, 19 nt, Artificial Sequence
  Description of Artificial Sequence: Synthetic oligonucleotide
ggaguucggggagaguuca

SEQ ID NO: 1045725 - RNA, 19 nt, Artificial Sequence
  Description of Artificial Sequence: Synthetic oligonucleotide
gauuuacaugaugaccguu

SEQ ID NO: 1045726 - RNA, 19 nt, Artificial Sequence
  Description of Artificial Sequence: Synthetic oligonucleotide
caguagguagcgggccacc

SEQ ID NO: 1045727 - RNA, 19 nt, Artificial Sequence
  Description of Artificial Sequence: Synthetic oligonucleotide
cccgcuuccuuuucgcuuc

SEQ ID NO: 1045728 - RNA, 19 nt, Artificial Sequence
  Description of Artificial Sequence: Synthetic oligonucleotide
ggauuuacaugaugaccgu

SEQ ID NO: 1045729 - RNA, 19 nt, Artificial Sequence
  Description of Artificial Sequence: Synthetic oligonucleotide
ccagaauauccuuaaccua

SEQ ID NO: 1045730 - RNA, 19 nt, Artificial Sequence
  Description of Artificial Sequence: Synthetic oligonucleotide
ggcgcaggcugccucuacc

SEQ ID NO: 1045731 - RNA, 19 nt, Artificial Sequence
  Description of Artificial Sequence: Synthetic oligonucleotide
ggcacucauauacaagaau

SEQ ID NO: 1045732 - RNA, 19 nt, Artificial Sequence
  Description of Artificial Sequence: Synthetic oligonucleotide
ggggcguugcuuugggguc

SEQ ID NO: 1045733 - RNA, 19 nt, Artificial Sequence
  Description of Artificial Sequence: Synthetic oligonucleotide
cccuguguugcagugccag

SEQ ID NO: 1045734 - RNA, 19 nt, Artificial Sequence
  Description of Artificial Sequence: Synthetic oligonucleotide
ucuuagggccggccaccuu

SEQ ID NO: 1045735 - RNA, 19 nt, Artificial Sequence
  Description of Artificial Sequence: Synthetic oligonucleotide
gcccuagucucucuggucu

SEQ ID NO: 1045736 - RNA, 19 nt, Artificial Sequence
  Description of Artificial Sequence: Synthetic oligonucleotide
cagaggguacauagaccaa

SEQ ID NO: 1045737 - RNA, 19 nt, Artificial Sequence
  Description of Artificial Sequence: Synthetic oligonucleotide
caagucucaccuggagcca

SEQ ID NO: 1045738 - RNA, 19 nt, Artificial Sequence
  Description of Artificial Sequence: Synthetic oligonucleotide
ggacuguuuaggaccaucu

SEQ ID NO: 1045739 - RNA, 19 nt, Artificial Sequence
  Description of Artificial Sequence: Synthetic oligonucleotide
gaguucggggagaguucac

SEQ ID NO: 1045740 - RNA, 19 nt, Artificial Sequence
  Description of Artificial Sequence: Synthetic oligonucleotide
ggaccguuucaggauccgc

SEQ ID NO: 1045741 - RNA, 19 nt, Artificial Sequence
  Description of Artificial Sequence: Synthetic oligonucleotide
agcaaggccccagccuuaa

SEQ ID NO: 1045742 - RNA, 19 nt, Artificial Sequence
  Description of Artificial Sequence: Synthetic oligonucleotide
gccaauaaauggcuuuaau

SEQ ID NO: 1045743 - RNA, 19 nt, Artificial Sequence
  Description of Artificial Sequence: Synthetic oligonucleotide
ccaauuucagaagccaaua

SEQ ID NO: 1045744 - RNA, 19 nt, Artificial Sequence
  Description of Artificial Sequence: Synthetic oligonucleotide
cucucuggucucccaacua

SEQ ID NO: 1045745 - RNA, 19 nt, Artificial Sequence
  Description of Artificial Sequence: Synthetic oligonucleotide
ggccaccugaacaauggaa

SEQ ID NO: 1045746 - RNA, 19 nt, Artificial Sequence
  Description of Artificial Sequence: Synthetic oligonucleotide
uagggccggccaccuucca

SEQ ID NO: 1045747 - RNA, 19 nt, Artificial Sequence
  Description of Artificial Sequence: Synthetic oligonucleotide
cauagaccaaaaggacugu

SEQ ID NO: 1045748 - RNA, 19 nt, Artificial Sequence
  Description of Artificial Sequence: Synthetic oligonucleotide
cacccacuggcccuagucu

SEQ ID NO: 1045749 - RNA, 19 nt, Artificial Sequence
  Description of Artificial Sequence: Synthetic oligonucleotide
acaugccccuuuaacccuu

SEQ ID NO: 1045750 - RNA, 19 nt, Artificial Sequence
  Description of Artificial Sequence: Synthetic oligonucleotide
aggacagaguaggcauaaa

SEQ ID NO: 1045751 - RNA, 19 nt, Artificial Sequence
  Description of Artificial Sequence: Synthetic oligonucleotide
gccccuuuaacccuuuguu

SEQ ID NO: 1045752 - RNA, 19 nt, Artificial Sequence
  Description of Artificial Sequence: Synthetic oligonucleotide
gugaagcagugagaaacau

SEQ ID NO: 1045753 - RNA, 19 nt, Artificial Sequence
  Description of Artificial Sequence: Synthetic oligonucleotide
cccugacaagaagccaucc

SEQ ID NO: 1045754 - RNA, 19 nt, Artificial Sequence
  Description of Artificial Sequence: Synthetic oligonucleotide
gaccguucucgaggggcuc

SEQ ID NO: 1045755 - RNA, 19 nt, Artificial Sequence
  Description of Artificial Sequence: Synthetic oligonucleotide
gcucauagguuagggaacu

SEQ ID NO: 1045756 - RNA, 19 nt, Artificial Sequence
  Description of Artificial Sequence: Synthetic oligonucleotide
ccccuuuaacccuuuguua

SEQ ID NO: 1045757 - RNA, 19 nt, Artificial Sequence
  Description of Artificial Sequence: Synthetic oligonucleotide
gcaguagguagcgggccac

SEQ ID NO: 1045758 - RNA, 19 nt, Artificial Sequence
  Description of Artificial Sequence: Synthetic oligonucleotide
gggugauaccucccugaaa

SEQ ID NO: 1045759 - RNA, 19 nt, Artificial Sequence
  Description of Artificial Sequence: Synthetic oligonucleotide
cgcuucacuuacgguaggg

SEQ ID NO: 1045760 - RNA, 19 nt, Artificial Sequence
  Description of Artificial Sequence: Synthetic oligonucleotide
ggucaaggauagaccugac

SEQ ID NO: 1045761 - RNA, 19 nt, Artificial Sequence
  Description of Artificial Sequence: Synthetic oligonucleotide
cccuuuuguagccccaugu

SEQ ID NO: 1045762 - RNA, 19 nt, Artificial Sequence
  Description of Artificial Sequence: Synthetic oligonucleotide
gguacucauuacauuucau

SEQ ID NO: 1045763 - RNA, 19 nt, Artificial Sequence
  Description of Artificial Sequence: Synthetic oligonucleotide
ccugacaagaagccauccu

SEQ ID NO: 1045764 - RNA, 19 nt, Artificial Sequence
  Description of Artificial Sequence: Synthetic oligonucleotide
ccccuuuuguagccccaug

SEQ ID NO: 1045765 - RNA, 19 nt, Artificial Sequence
  Description of Artificial Sequence: Synthetic oligonucleotide
  modified_base (8)..(8): a, c, u, g, unknown or other
gccucucnccuuuaccaau

SEQ ID NO: 1045766 - RNA, 19 nt, Artificial Sequence
  Description of Artificial Sequence: Synthetic oligonucleotide
cagcaccgccucuugacuu

SEQ ID NO: 1045767 - RNA, 19 nt, Artificial Sequence
  Description of Artificial Sequence: Synthetic oligonucleotide
  modified_base (7)..(7): a, c, u, g, unknown or other
ccucucnccuuuaccaauu

SEQ ID NO: 1045768 - RNA, 19 nt, Artificial Sequence
  Description of Artificial Sequence: Synthetic oligonucleotide
cuuggaguucggggagagu

SEQ ID NO: 1045769 - RNA, 19 nt, Artificial Sequence
  Description of Artificial Sequence: Synthetic oligonucleotide
ccgccucuugacuucccaa

SEQ ID NO: 1045770 - RNA, 19 nt, Artificial Sequence
  Description of Artificial Sequence: Synthetic oligonucleotide
cucauagguuagggaacuu

SEQ ID NO: 1045771 - RNA, 19 nt, Artificial Sequence
  Description of Artificial Sequence: Synthetic oligonucleotide
gggcguugcuuuggggucu

SEQ ID NO: 1045772 - RNA, 19 nt, Artificial Sequence
  Description of Artificial Sequence: Synthetic oligonucleotide
cacuuacgguagggcaggu

SEQ ID NO: 1045773 - RNA, 19 nt, Artificial Sequence
  Description of Artificial Sequence: Synthetic oligonucleotide
ccgcucugcccagucacaa

SEQ ID NO: 1045774 - RNA, 19 nt, Artificial Sequence
  Description of Artificial Sequence: Synthetic oligonucleotide
ccccgcuuccuuuucgcuu

SEQ ID NO: 1045775 - RNA, 19 nt, Artificial Sequence
  Description of Artificial Sequence: Synthetic oligonucleotide
cgagggcguccccgcuucc

SEQ ID NO: 1045776 - RNA, 19 nt, Artificial Sequence
  Description of Artificial Sequence: Synthetic oligonucleotide
ggcguugcuuuggggucuu

SEQ ID NO: 1045777 - RNA, 19 nt, Artificial Sequence
  Description of Artificial Sequence: Synthetic oligonucleotide
aaagcaguagauuaugcac

SEQ ID NO: 1045778 - RNA, 19 nt, Artificial Sequence
  Description of Artificial Sequence: Synthetic oligonucleotide
auaucaaauacauugacag

SEQ ID NO: 1045779 - RNA, 19 nt, Artificial Sequence
  Description of Artificial Sequence: Synthetic oligonucleotide
caagauauguccaugaacc

SEQ ID NO: 1045780 - RNA, 19 nt, Artificial Sequence
  Description of Artificial Sequence: Synthetic oligonucleotide
aguggauuuauucuuaggg

SEQ ID NO: 1045781 - RNA, 19 nt, Artificial Sequence
  Description of Artificial Sequence: Synthetic oligonucleotide
uagucaaugggcuucaugg

SEQ ID NO: 1045782 - RNA, 19 nt, Artificial Sequence
  Description of Artificial Sequence: Synthetic oligonucleotide
aauacauugacagcauagc

SEQ ID NO: 1045783 - RNA, 19 nt, Artificial Sequence
  Description of Artificial Sequence: Synthetic oligonucleotide
gaagggaaauguuuuaugg

SEQ ID NO: 1045784 - RNA, 19 nt, Artificial Sequence
  Description of Artificial Sequence: Synthetic oligonucleotide
uggauuaucaaacccuugg

SEQ ID NO: 1045785 - RNA, 19 nt, Artificial Sequence
  Description of Artificial Sequence: Synthetic oligonucleotide
accuauaaagaacugcacc

SEQ ID NO: 1045786 - RNA, 19 nt, Artificial Sequence
  Description of Artificial Sequence: Synthetic oligonucleotide
ucuagcugcaucaauuagg

SEQ ID NO: 1045787 - RNA, 19 nt, Artificial Sequence
  Description of Artificial Sequence: Synthetic oligonucleotide
gauuaucaaacccuuggcg

SEQ ID NO: 1045788 - RNA, 19 nt, Artificial Sequence
  Description of Artificial Sequence: Synthetic oligonucleotide
uucuacucaaacaucaggc

SEQ ID NO: 1045789 - RNA, 19 nt, Artificial Sequence
  Description of Artificial Sequence: Synthetic oligonucleotide
aguaguggaacguaccggc

SEQ ID NO: 1045790 - RNA, 19 nt, Artificial Sequence
  Description of Artificial Sequence: Synthetic oligonucleotide
gaacuuagaauucuucagg

SEQ ID NO: 1045791 - RNA, 19 nt, Artificial Sequence
  Description of Artificial Sequence: Synthetic oligonucleotide
aaugcaaguaaggauauug

SEQ ID NO: 1045792 - RNA, 19 nt, Artificial Sequence
  Description of Artificial Sequence: Synthetic oligonucleotide
uauugguucaucagaagag

SEQ ID NO: 1045793 - RNA, 19 nt, Artificial Sequence
  Description of Artificial Sequence: Synthetic oligonucleotide
gcgaauaucaaauacauug

SEQ ID NO: 1045794 - RNA, 19 nt, Artificial Sequence
  Description of Artificial Sequence: Synthetic oligonucleotide
aaaacuuauuggugagggc

SEQ ID NO: 1045795 - RNA, 19 nt, Artificial Sequence
  Description of Artificial Sequence: Synthetic oligonucleotide
aagaacuuagaauucuuca

SEQ ID NO: 1045796 - RNA, 19 nt, Artificial Sequence
  Description of Artificial Sequence: Synthetic oligonucleotide
aaguaugcaaggcagcaag

SEQ ID NO: 1045797 - RNA, 19 nt, Artificial Sequence
  Description of Artificial Sequence: Synthetic oligonucleotide
acacuagauuguuagaugg

SEQ ID NO: 1045798 - RNA, 19 nt, Artificial Sequence
  Description of Artificial Sequence: Synthetic oligonucleotide
uuucuacucaaacaucagg

SEQ ID NO: 1045799 - RNA, 19 nt, Artificial Sequence
  Description of Artificial Sequence: Synthetic oligonucleotide
uguuguuacuggauggugg

SEQ ID NO: 1045800 - RNA, 19 nt, Artificial Sequence
  Description of Artificial Sequence: Synthetic oligonucleotide
cuacugacaacuaaagacc

SEQ ID NO: 1045801 - RNA, 19 nt, Artificial Sequence
  Description of Artificial Sequence: Synthetic oligonucleotide
uguaucacuacugacaacu

SEQ ID NO: 1045802 - RNA, 19 nt, Artificial Sequence
  Description of Artificial Sequence: Synthetic oligonucleotide
gcagagaucaccuauaaag

SEQ ID NO: 1045803 - RNA, 19 nt, Artificial Sequence
  Description of Artificial Sequence: Synthetic oligonucleotide
gaagaaaacuuauugguga

SEQ ID NO: 1045804 - RNA, 19 nt, Artificial Sequence
  Description of Artificial Sequence: Synthetic oligonucleotide
uauucuuagggauugggga

SEQ ID NO: 1045805 - RNA, 19 nt, Artificial Sequence
  Description of Artificial Sequence: Synthetic oligonucleotide
aagaaaacuuauuggugag

SEQ ID NO: 1045806 - RNA, 19 nt, Artificial Sequence
  Description of Artificial Sequence: Synthetic oligonucleotide
auaauugaggccugucagc

SEQ ID NO: 1045807 - RNA, 19 nt, Artificial Sequence
  Description of Artificial Sequence: Synthetic oligonucleotide
aaauacauugacagcauag

SEQ ID NO: 1045808 - RNA, 19 nt, Artificial Sequence
  Description of Artificial Sequence: Synthetic oligonucleotide
aagaaaugcaaguaaggau

SEQ ID NO: 1045809 - RNA, 19 nt, Artificial Sequence
  Description of Artificial Sequence: Synthetic oligonucleotide
uagauuaugcaccugccug

SEQ ID NO: 1045810 - RNA, 19 nt, Artificial Sequence
  Description of Artificial Sequence: Synthetic oligonucleotide
uaguaggcuacccaguagg

SEQ ID NO: 1045811 - RNA, 19 nt, Artificial Sequence
  Description of Artificial Sequence: Synthetic oligonucleotide
uuaggauagggacuaacug

SEQ ID NO: 1045812 - RNA, 19 nt, Artificial Sequence
  Description of Artificial Sequence: Synthetic oligonucleotide
ugugcuuacaccuuucaga

SEQ ID NO: 1045813 - RNA, 19 nt, Artificial Sequence
  Description of Artificial Sequence: Synthetic oligonucleotide
agauuaugcaccugccugc

SEQ ID NO: 1045814 - RNA, 19 nt, Artificial Sequence
  Description of Artificial Sequence: Synthetic oligonucleotide
auuaucaaacccuuggcga

SEQ ID NO: 1045815 - RNA, 19 nt, Artificial Sequence
  Description of Artificial Sequence: Synthetic oligonucleotide
uuuaaggccaaugcuaucc

SEQ ID NO: 1045816 - RNA, 19 nt, Artificial Sequence
  Description of Artificial Sequence: Synthetic oligonucleotide
caucaauuaggauagggac

SEQ ID NO: 1045817 - RNA, 19 nt, Artificial Sequence
  Description of Artificial Sequence: Synthetic oligonucleotide
aacacuagauuguuagaug

SEQ ID NO: 1045818 - RNA, 19 nt, Artificial Sequence
  Description of Artificial Sequence: Synthetic oligonucleotide
uacaauauuagcacucacu

SEQ ID NO: 1045819 - RNA, 19 nt, Artificial Sequence
  Description of Artificial Sequence: Synthetic oligonucleotide
acuagauuguuagaugggc

SEQ ID NO: 1045820 - RNA, 19 nt, Artificial Sequence
  Description of Artificial Sequence: Synthetic oligonucleotide
uacauugacagcauagccu

SEQ ID NO: 1045821 - RNA, 19 nt, Artificial Sequence
  Description of Artificial Sequence: Synthetic oligonucleotide
ucaacacccucaaagacga

SEQ ID NO: 1045822 - RNA, 19 nt, Artificial Sequence
  Description of Artificial Sequence: Synthetic oligonucleotide
gaaauucacucuauaaaag

SEQ ID NO: 1045823 - RNA, 19 nt, Artificial Sequence
  Description of Artificial Sequence: Synthetic oligonucleotide
auauugguucaucagaaga

SEQ ID NO: 1045824 - RNA, 19 nt, Artificial Sequence
  Description of Artificial Sequence: Synthetic oligonucleotide
uuuauucuuagggauuggg

SEQ ID NO: 1045825 - RNA, 19 nt, Artificial Sequence
  Description of Artificial Sequence: Synthetic oligonucleotide
aauuaggauagggacuaac

SEQ ID NO: 1045826 - RNA, 19 nt, Artificial Sequence
  Description of Artificial Sequence: Synthetic oligonucleotide
aaguacaauauuagcacuc

SEQ ID NO: 1045827 - RNA, 19 nt, Artificial Sequence
  Description of Artificial Sequence: Synthetic oligonucleotide
auaauguuguucugugagg

SEQ ID NO: 1045828 - RNA, 19 nt, Artificial Sequence
  Description of Artificial Sequence: Synthetic oligonucleotide
uggaugagaggacugacca

SEQ ID NO: 1045829 - RNA, 19 nt, Artificial Sequence
  Description of Artificial Sequence: Synthetic oligonucleotide
uuagaauucuucaggaaua

SEQ ID NO: 1045830 - RNA, 19 nt, Artificial Sequence
  Description of Artificial Sequence: Synthetic oligonucleotide
uuggcgaauaucaaauaca

SEQ ID NO: 1045831 - RNA, 19 nt, Artificial Sequence
  Description of Artificial Sequence: Synthetic oligonucleotide
uaccaucuaaccagcaagg

SEQ ID NO: 1045832 - RNA, 19 nt, Artificial Sequence
  Description of Artificial Sequence: Synthetic oligonucleotide
uugguaaugugaaaugccu

SEQ ID NO: 1045833 - RNA, 19 nt, Artificial Sequence
  Description of Artificial Sequence: Synthetic oligonucleotide
aaugugaaaugccuuccca

SEQ ID NO: 1045834 - RNA, 19 nt, Artificial Sequence
  Description of Artificial Sequence: Synthetic oligonucleotide
aagggaaauguuuuaugga

SEQ ID NO: 1045835 - RNA, 19 nt, Artificial Sequence
  Description of Artificial Sequence: Synthetic oligonucleotide
gaacguaccggccagugcc

SEQ ID NO: 1045836 - RNA, 19 nt, Artificial Sequence
  Description of Artificial Sequence: Synthetic oligonucleotide
ugugaaaugccuucccacc

SEQ ID NO: 1045837 - RNA, 19 nt, Artificial Sequence
  Description of Artificial Sequence: Synthetic oligonucleotide
uagauuguuagaugggcug

SEQ ID NO: 1045838 - RNA, 19 nt, Artificial Sequence
  Description of Artificial Sequence: Synthetic oligonucleotide
guaguaguggaacguaccg

SEQ ID NO: 1045839 - RNA, 19 nt, Artificial Sequence
  Description of Artificial Sequence: Synthetic oligonucleotide
accaggaguggauuuauuc

SEQ ID NO: 1045840 - RNA, 19 nt, Artificial Sequence
  Description of Artificial Sequence: Synthetic oligonucleotide
gacagcauagccucgugcc

SEQ ID NO: 1045841 - RNA, 19 nt, Artificial Sequence
  Description of Artificial Sequence: Synthetic oligonucleotide
aaacacuagauuguuagau

SEQ ID NO: 1045842 - RNA, 19 nt, Artificial Sequence
  Description of Artificial Sequence: Synthetic oligonucleotide
uguguuauaaggagcugac

SEQ ID NO: 1045843 - RNA, 19 nt, Artificial Sequence
  Description of Artificial Sequence: Synthetic oligonucleotide
aguuccuuguuguuacugg

SEQ ID NO: 1045844 - RNA, 19 nt, Artificial Sequence
  Description of Artificial Sequence: Synthetic oligonucleotide
aaagaacugcaccugugga

SEQ ID NO: 1045845 - RNA, 19 nt, Artificial Sequence
  Description of Artificial Sequence: Synthetic oligonucleotide
aaacccuuggcgaauauca

SEQ ID NO: 1045846 - RNA, 19 nt, Artificial Sequence
  Description of Artificial Sequence: Synthetic oligonucleotide
auagccucgugccagcaac

SEQ ID NO: 1045847 - RNA, 19 nt, Artificial Sequence
  Description of Artificial Sequence: Synthetic oligonucleotide
agaagaaaugcaaguaagg

SEQ ID NO: 1045848 - RNA, 19 nt, Artificial Sequence
  Description of Artificial Sequence: Synthetic oligonucleotide
ucuacucaaacaucaggca

SEQ ID NO: 1045849 - RNA, 19 nt, Artificial Sequence
  Description of Artificial Sequence: Synthetic oligonucleotide
gaagaaaugcaaguaagga

SEQ ID NO: 1045850 - RNA, 19 nt, Artificial Sequence
  Description of Artificial Sequence: Synthetic oligonucleotide
gugcuuacaccuuucagag

SEQ ID NO: 1045851 - RNA, 19 nt, Artificial Sequence
  Description of Artificial Sequence: Synthetic oligonucleotide
ugcaucaauuaggauaggg

SEQ ID NO: 1045852 - RNA, 19 nt, Artificial Sequence
  Description of Artificial Sequence: Synthetic oligonucleotide
ugguguaaaaguuggcuga

SEQ ID NO: 1045853 - RNA, 19 nt, Artificial Sequence
  Description of Artificial Sequence: Synthetic oligonucleotide
gauauugguucaucagaag

SEQ ID NO: 1045854 - RNA, 19 nt, Artificial Sequence
  Description of Artificial Sequence: Synthetic oligonucleotide
ugcuuuaaggccaaugcua

SEQ ID NO: 1045855 - RNA, 19 nt, Artificial Sequence
  Description of Artificial Sequence: Synthetic oligonucleotide
accagcaaggggcacauag

SEQ ID NO: 1045856 - RNA, 19 nt, Artificial Sequence
  Description of Artificial Sequence: Synthetic oligonucleotide
aaagacgacacuggcacug

SEQ ID NO: 1045857 - RNA, 19 nt, Artificial Sequence
  Description of Artificial Sequence: Synthetic oligonucleotide
uacugacaacuaaagacca

SEQ ID NO: 1045858 - RNA, 19 nt, Artificial Sequence
  Description of Artificial Sequence: Synthetic oligonucleotide
ugaaaacucugcacugucc

SEQ ID NO: 1045859 - RNA, 19 nt, Artificial Sequence
  Description of Artificial Sequence: Synthetic oligonucleotide
agggaaauguuuuauggaa

SEQ ID NO: 1045860 - RNA, 19 nt, Artificial Sequence
  Description of Artificial Sequence: Synthetic oligonucleotide
uaaaagagacgcugaaagu

SEQ ID NO: 1045861 - RNA, 19 nt, Artificial Sequence
  Description of Artificial Sequence: Synthetic oligonucleotide
agaaaugcaaguaaggaua

SEQ ID NO: 1045862 - RNA, 19 nt, Artificial Sequence
  Description of Artificial Sequence: Synthetic oligonucleotide
gaaaaugccaugaggacga

SEQ ID NO: 1045863 - RNA, 19 nt, Artificial Sequence
  Description of Artificial Sequence: Synthetic oligonucleotide
gagaaguagggguuaggag

SEQ ID NO: 1045864 - RNA, 19 nt, Artificial Sequence
  Description of Artificial Sequence: Synthetic oligonucleotide
accuguggauuaucaaacc

SEQ ID NO: 1045865 - RNA, 19 nt, Artificial Sequence
  Description of Artificial Sequence: Synthetic oligonucleotide
uccuuguuguuacuggaug

SEQ ID NO: 1045866 - RNA, 19 nt, Artificial Sequence
  Description of Artificial Sequence: Synthetic oligonucleotide
aauguuguucugugaggug

SEQ ID NO: 1045867 - RNA, 19 nt, Artificial Sequence
  Description of Artificial Sequence: Synthetic oligonucleotide
uaggcuacccaguagggga

SEQ ID NO: 1045868 - RNA, 19 nt, Artificial Sequence
  Description of Artificial Sequence: Synthetic oligonucleotide
uggcgaauaucaaauacau

SEQ ID NO: 1045869 - RNA, 19 nt, Artificial Sequence
  Description of Artificial Sequence: Synthetic oligonucleotide
ucaauuaggauagggacua

SEQ ID NO: 1045870 - RNA, 19 nt, Artificial Sequence
  Description of Artificial Sequence: Synthetic oligonucleotide
acuaaagaccaccacuaga

SEQ ID NO: 1045871 - RNA, 19 nt, Artificial Sequence
  Description of Artificial Sequence: Synthetic oligonucleotide
uaauguuguucugugaggu

SEQ ID NO: 1045872 - RNA, 19 nt, Artificial Sequence
  Description of Artificial Sequence: Synthetic oligonucleotide
aguagauuaugcaccugcc

SEQ ID NO: 1045873 - RNA, 19 nt, Artificial Sequence
  Description of Artificial Sequence: Synthetic oligonucleotide
uucuagcugcaucaauuag

SEQ ID NO: 1045874 - RNA, 19 nt, Artificial Sequence
  Description of Artificial Sequence: Synthetic oligonucleotide
uuaucaaacccuuggcgaa

SEQ ID NO: 1045875 - RNA, 19 nt, Artificial Sequence
  Description of Artificial Sequence: Synthetic oligonucleotide
aagggauuggcucaucguu

SEQ ID NO: 1045876 - RNA, 19 nt, Artificial Sequence
  Description of Artificial Sequence: Synthetic oligonucleotide
cugauaauguuguucugug

SEQ ID NO: 1045877 - RNA, 19 nt, Artificial Sequence
  Description of Artificial Sequence: Synthetic oligonucleotide
aucaccgugcacuucuuag

SEQ ID NO: 1045878 - RNA, 19 nt, Artificial Sequence
  Description of Artificial Sequence: Synthetic oligonucleotide
cucacaacuguaguagugg

SEQ ID NO: 1045879 - RNA, 19 nt, Artificial Sequence
  Description of Artificial Sequence: Synthetic oligonucleotide
ugacaacuaaagaccacca

SEQ ID NO: 1045880 - RNA, 19 nt, Artificial Sequence
  Description of Artificial Sequence: Synthetic oligonucleotide
cacggcaucauccauggug

SEQ ID NO: 1045881 - RNA, 19 nt, Artificial Sequence
  Description of Artificial Sequence: Synthetic oligonucleotide
uaaggagcugaccagucaa

SEQ ID NO: 1045882 - RNA, 19 nt, Artificial Sequence
  Description of Artificial Sequence: Synthetic oligonucleotide
uggaugaagggaaauguuu

SEQ ID NO: 1045883 - RNA, 19 nt, Artificial Sequence
  Description of Artificial Sequence: Synthetic oligonucleotide
cauuaaggaguuucuacuc

SEQ ID NO: 1045884 - RNA, 19 nt, Artificial Sequence
  Description of Artificial Sequence: Synthetic oligonucleotide
uugggauaggugcucagcu

SEQ ID NO: 1045885 - RNA, 19 nt, Artificial Sequence
  Description of Artificial Sequence: Synthetic oligonucleotide
uguccaugaaccacauucu

SEQ ID NO: 1045886 - RNA, 19 nt, Artificial Sequence
  Description of Artificial Sequence: Synthetic oligonucleotide
auaagggaggucuucaguu

SEQ ID NO: 1045887 - RNA, 19 nt, Artificial Sequence
  Description of Artificial Sequence: Synthetic oligonucleotide
aaaacaaugcaggcagaca

SEQ ID NO: 1045888 - RNA, 19 nt, Artificial Sequence
  Description of Artificial Sequence: Synthetic oligonucleotide
aaaugccuccuguuguugu

SEQ ID NO: 1045889 - RNA, 19 nt, Artificial Sequence
  Description of Artificial Sequence: Synthetic oligonucleotide
uguggauuaucaaacccuu

SEQ ID NO: 1045890 - RNA, 19 nt, Artificial Sequence
  Description of Artificial Sequence: Synthetic oligonucleotide
guugguaaugugaaaugcc

SEQ ID NO: 1045891 - RNA, 19 nt, Artificial Sequence
  Description of Artificial Sequence: Synthetic oligonucleotide
guuaggagagagaaagacc

SEQ ID NO: 1045892 - RNA, 19 nt, Artificial Sequence
  Description of Artificial Sequence: Synthetic oligonucleotide
aacacccucaaagacgaca

SEQ ID NO: 1045893 - RNA, 19 nt, Artificial Sequence
  Description of Artificial Sequence: Synthetic oligonucleotide
ucguugguaaugugaaaug

SEQ ID NO: 1045894 - RNA, 19 nt, Artificial Sequence
  Description of Artificial Sequence: Synthetic oligonucleotide
cacuagauuguuagauggg

SEQ ID NO: 1045895 - RNA, 19 nt, Artificial Sequence
  Description of Artificial Sequence: Synthetic oligonucleotide
agagacgcugaaaguaugc

SEQ ID NO: 1045896 - RNA, 19 nt, Artificial Sequence
  Description of Artificial Sequence: Synthetic oligonucleotide
uaguaguggaacguaccgg

SEQ ID NO: 1045897 - RNA, 19 nt, Artificial Sequence
  Description of Artificial Sequence: Synthetic oligonucleotide
uuauaaggagcugaccagu

SEQ ID NO: 1045898 - RNA, 19 nt, Artificial Sequence
  Description of Artificial Sequence: Synthetic oligonucleotide
acgcugaaaguaugcaagg

SEQ ID NO: 1045899 - RNA, 19 nt, Artificial Sequence
  Description of Artificial Sequence: Synthetic oligonucleotide
cagcuuacugcaaaccagc

SEQ ID NO: 1045900 - RNA, 19 nt, Artificial Sequence
  Description of Artificial Sequence: Synthetic oligonucleotide
caccuguggauuaucaaac

SEQ ID NO: 1045901 - RNA, 19 nt, Artificial Sequence
  Description of Artificial Sequence: Synthetic oligonucleotide
cucccaauugccuuccuac

SEQ ID NO: 1045902 - RNA, 19 nt, Artificial Sequence
  Description of Artificial Sequence: Synthetic oligonucleotide
guggauuuauucuuaggga

SEQ ID NO: 1045903 - RNA, 19 nt, Artificial Sequence
  Description of Artificial Sequence: Synthetic oligonucleotide
cugaagcccauuaagcauc

SEQ ID NO: 1045904 - RNA, 19 nt, Artificial Sequence
  Description of Artificial Sequence: Synthetic oligonucleotide
aauuuggaugagaggacug

SEQ ID NO: 1045905 - RNA, 19 nt, Artificial Sequence
  Description of Artificial Sequence: Synthetic oligonucleotide
gcugcaucaauuaggauag

SEQ ID NO: 1045906 - RNA, 19 nt, Artificial Sequence
  Description of Artificial Sequence: Synthetic oligonucleotide
ucccuugggccgaaaaugc

SEQ ID NO: 1045907 - RNA, 19 nt, Artificial Sequence
  Description of Artificial Sequence: Synthetic oligonucleotide
aaagagacgcugaaaguau

SEQ ID NO: 1045908 - RNA, 19 nt, Artificial Sequence
  Description of Artificial Sequence: Synthetic oligonucleotide
aacaucaggcagaaggcca

SEQ ID NO: 1045909 - RNA, 19 nt, Artificial Sequence
  Description of Artificial Sequence: Synthetic oligonucleotide
augcaaguaaggauauugg

SEQ ID NO: 1045910 - RNA, 19 nt, Artificial Sequence
  Description of Artificial Sequence: Synthetic oligonucleotide
agucaggcaugcuaccauc

SEQ ID NO: 1045911 - RNA, 19 nt, Artificial Sequence
  Description of Artificial Sequence: Synthetic oligonucleotide
gacaacuaaagaccaccac

SEQ ID NO: 1045912 - RNA, 19 nt, Artificial Sequence
  Description of Artificial Sequence: Synthetic oligonucleotide
aagcaagguaguaggcuac

SEQ ID NO: 1045913 - RNA, 19 nt, Artificial Sequence
  Description of Artificial Sequence: Synthetic oligonucleotide
auuaggauagggacuaacu

SEQ ID NO: 1045914 - RNA, 19 nt, Artificial Sequence
  Description of Artificial Sequence: Synthetic oligonucleotide
uuauuggugagggcuuggg

SEQ ID NO: 1045915 - RNA, 19 nt, Artificial Sequence
  Description of Artificial Sequence: Synthetic oligonucleotide
aaguuggcugaauuuggau

SEQ ID NO: 1045916 - RNA, 19 nt, Artificial Sequence
  Description of Artificial Sequence: Synthetic oligonucleotide
gguaaugugaaaugccuuc

SEQ ID NO: 1045917 - RNA, 19 nt, Artificial Sequence
  Description of Artificial Sequence: Synthetic oligonucleotide
uaguggaacguaccggcca

SEQ ID NO: 1045918 - RNA, 19 nt, Artificial Sequence
  Description of Artificial Sequence: Synthetic oligonucleotide
ugacagcauagccucgugc

SEQ ID NO: 1045919 - RNA, 19 nt, Artificial Sequence
  Description of Artificial Sequence: Synthetic oligonucleotide
gaagaagaacuuagaauuc

SEQ ID NO: 1045920 - RNA, 19 nt, Artificial Sequence
  Description of Artificial Sequence: Synthetic oligonucleotide
ugccaaugaaauucacucu

SEQ ID NO: 1045921 - RNA, 19 nt, Artificial Sequence
  Description of Artificial Sequence: Synthetic oligonucleotide
auuggcucaucguugguaa

SEQ ID NO: 1045922 - RNA, 19 nt, Artificial Sequence
  Description of Artificial Sequence: Synthetic oligonucleotide
ucacaacuguaguagugga

SEQ ID NO: 1045923 - RNA, 19 nt, Artificial Sequence
  Description of Artificial Sequence: Synthetic oligonucleotide
ugcaaaccagccuauuauc

SEQ ID NO: 1045924 - RNA, 19 nt, Artificial Sequence
  Description of Artificial Sequence: Synthetic oligonucleotide
aguacaauauuagcacuca

SEQ ID NO: 1045925 - RNA, 19 nt, Artificial Sequence
  Description of Artificial Sequence: Synthetic oligonucleotide
guaaugugaaaugccuucc

SEQ ID NO: 1045926 - RNA, 19 nt, Artificial Sequence
  Description of Artificial Sequence: Synthetic oligonucleotide
auuguuagaugggcuguac

SEQ ID NO: 1045927 - RNA, 19 nt, Artificial Sequence
  Description of Artificial Sequence: Synthetic oligonucleotide
uuguuagaugggcuguacu

SEQ ID NO: 1045928 - RNA, 19 nt, Artificial Sequence
  Description of Artificial Sequence: Synthetic oligonucleotide
aagauggccugauaauguu

SEQ ID NO: 1045929 - RNA, 19 nt, Artificial Sequence
  Description of Artificial Sequence: Synthetic oligonucleotide
uuggucucuguguaguagu

SEQ ID NO: 1045930 - RNA, 19 nt, Artificial Sequence
  Description of Artificial Sequence: Synthetic oligonucleotide
cagagaucaccuauaaaga

SEQ ID NO: 1045931 - RNA, 19 nt, Artificial Sequence
  Description of Artificial Sequence: Synthetic oligonucleotide
auuaagcaucaucucauua

SEQ ID NO: 1045932 - RNA, 19 nt, Artificial Sequence
  Description of Artificial Sequence: Synthetic oligonucleotide
cucaucguugguaauguga

SEQ ID NO: 1045933 - RNA, 19 nt, Artificial Sequence
  Description of Artificial Sequence: Synthetic oligonucleotide
aucguugguaaugugaaau

SEQ ID NO: 1045934 - RNA, 19 nt, Artificial Sequence
  Description of Artificial Sequence: Synthetic oligonucleotide
aguggaacguaccggccag

SEQ ID NO: 1045935 - RNA, 19 nt, Artificial Sequence
  Description of Artificial Sequence: Synthetic oligonucleotide
aacguccagaaagggauug

SEQ ID NO: 1045936 - RNA, 19 nt, Artificial Sequence
  Description of Artificial Sequence: Synthetic oligonucleotide
gagcugaccagucaacaca

SEQ ID NO: 1045937 - RNA, 19 nt, Artificial Sequence
  Description of Artificial Sequence: Synthetic oligonucleotide
acgucacuugcccuuccgc

SEQ ID NO: 1045938 - RNA, 19 nt, Artificial Sequence
  Description of Artificial Sequence: Synthetic oligonucleotide
cuaaagaccaccacuagau

SEQ ID NO: 1045939 - RNA, 19 nt, Artificial Sequence
  Description of Artificial Sequence: Synthetic oligonucleotide
caaaccagccuauuaucuc

SEQ ID NO: 1045940 - RNA, 19 nt, Artificial Sequence
  Description of Artificial Sequence: Synthetic oligonucleotide
agggagucaggcaugcuac

SEQ ID NO: 1045941 - RNA, 19 nt, Artificial Sequence
  Description of Artificial Sequence: Synthetic oligonucleotide
auguuguucugugagguga

SEQ ID NO: 1045942 - RNA, 19 nt, Artificial Sequence
  Description of Artificial Sequence: Synthetic oligonucleotide
ggauuaucaaacccuuggc

SEQ ID NO: 1045943 - RNA, 19 nt, Artificial Sequence
  Description of Artificial Sequence: Synthetic oligonucleotide
ccugcuuuaaggccaaugc

SEQ ID NO: 1045944 - RNA, 19 nt, Artificial Sequence
  Description of Artificial Sequence: Synthetic oligonucleotide
agcauagccucgugccagc

SEQ ID NO: 1045945 - RNA, 19 nt, Artificial Sequence
  Description of Artificial Sequence: Synthetic oligonucleotide
uuagggauuggggauugga

SEQ ID NO: 1045946 - RNA, 19 nt, Artificial Sequence
  Description of Artificial Sequence: Synthetic oligonucleotide
uggggauuggagagagaag

SEQ ID NO: 1045947 - RNA, 19 nt, Artificial Sequence
  Description of Artificial Sequence: Synthetic oligonucleotide
ucccaauugccuuccuacc

SEQ ID NO: 1045948 - RNA, 19 nt, Artificial Sequence
  Description of Artificial Sequence: Synthetic oligonucleotide
aaggagcugaccagucaac

SEQ ID NO: 1045949 - RNA, 19 nt, Artificial Sequence
  Description of Artificial Sequence: Synthetic oligonucleotide
uaaacuucauuuugcccuu

SEQ ID NO: 1045950 - RNA, 19 nt, Artificial Sequence
  Description of Artificial Sequence: Synthetic oligonucleotide
caacuaaagaccaccacua

SEQ ID NO: 1045951 - RNA, 19 nt, Artificial Sequence
  Description of Artificial Sequence: Synthetic oligonucleotide
cuuggggcacgucacuugc

SEQ ID NO: 1045952 - RNA, 19 nt, Artificial Sequence
  Description of Artificial Sequence: Synthetic oligonucleotide
aggcaugcuaccaucuaac

SEQ ID NO: 1045953 - RNA, 19 nt, Artificial Sequence
  Description of Artificial Sequence: Synthetic oligonucleotide
aucacuacugacaacuaaa

SEQ ID NO: 1045954 - RNA, 19 nt, Artificial Sequence
  Description of Artificial Sequence: Synthetic oligonucleotide
gucacuugcccuuccgcag

SEQ ID NO: 1045955 - RNA, 19 nt, Artificial Sequence
  Description of Artificial Sequence: Synthetic oligonucleotide
agcaagguaguaggcuacc

SEQ ID NO: 1045956 - RNA, 19 nt, Artificial Sequence
  Description of Artificial Sequence: Synthetic oligonucleotide
augcgggacaggaacgucc

SEQ ID NO: 1045957 - RNA, 19 nt, Artificial Sequence
  Description of Artificial Sequence: Synthetic oligonucleotide
uuuggaugagaggacugac

SEQ ID NO: 1045958 - RNA, 19 nt, Artificial Sequence
  Description of Artificial Sequence: Synthetic oligonucleotide
cagcugccaagauaugucc

SEQ ID NO: 1045959 - RNA, 19 nt, Artificial Sequence
  Description of Artificial Sequence: Synthetic oligonucleotide
guaguaggcuacccaguag

SEQ ID NO: 1045960 - RNA, 19 nt, Artificial Sequence
  Description of Artificial Sequence: Synthetic oligonucleotide
ugguaaugugaaaugccuu

SEQ ID NO: 1045961 - RNA, 19 nt, Artificial Sequence
  Description of Artificial Sequence: Synthetic oligonucleotide
accaucuaaccagcaaggg

SEQ ID NO: 1045962 - RNA, 19 nt, Artificial Sequence
  Description of Artificial Sequence: Synthetic oligonucleotide
guaguagucaaugggcuuc

SEQ ID NO: 1045963 - RNA, 19 nt, Artificial Sequence
  Description of Artificial Sequence: Synthetic oligonucleotide
ccuuguuguuacuggaugg

SEQ ID NO: 1045964 - RNA, 19 nt, Artificial Sequence
  Description of Artificial Sequence: Synthetic oligonucleotide
uuguuguuacuggauggug

SEQ ID NO: 1045965 - RNA, 19 nt, Artificial Sequence
  Description of Artificial Sequence: Synthetic oligonucleotide
aaaguaugcaaggcagcaa

SEQ ID NO: 1045966 - RNA, 19 nt, Artificial Sequence
  Description of Artificial Sequence: Synthetic oligonucleotide
uggugaugcacaguggaaa

SEQ ID NO: 1045967 - RNA, 19 nt, Artificial Sequence
  Description of Artificial Sequence: Synthetic oligonucleotide
aguaugcaaggcagcaagg

SEQ ID NO: 1045968 - RNA, 19 nt, Artificial Sequence
  Description of Artificial Sequence: Synthetic oligonucleotide
ggaagauggccugauaaug

SEQ ID NO: 1045969 - RNA, 19 nt, Artificial Sequence
  Description of Artificial Sequence: Synthetic oligonucleotide
aaaacugugcuuacaccuu

SEQ ID NO: 1045970 - RNA, 19 nt, Artificial Sequence
  Description of Artificial Sequence: Synthetic oligonucleotide
ugccaugaggacgaauggc

SEQ ID NO: 1045971 - RNA, 19 nt, Artificial Sequence
  Description of Artificial Sequence: Synthetic oligonucleotide
ccaucuaaccagcaagggg

SEQ ID NO: 1045972 - RNA, 19 nt, Artificial Sequence
  Description of Artificial Sequence: Synthetic oligonucleotide
gggauuggcucaucguugg

SEQ ID NO: 1045973 - RNA, 19 nt, Artificial Sequence
  Description of Artificial Sequence: Synthetic oligonucleotide
aagagacgcugaaaguaug

SEQ ID NO: 1045974 - RNA, 19 nt, Artificial Sequence
  Description of Artificial Sequence: Synthetic oligonucleotide
ugaccaguggccgguaccc

SEQ ID NO: 1045975 - RNA, 19 nt, Artificial Sequence
  Description of Artificial Sequence: Synthetic oligonucleotide
gcaaggggcacauagcuca

SEQ ID NO: 1045976 - RNA, 19 nt, Artificial Sequence
  Description of Artificial Sequence: Synthetic oligonucleotide
agguggugaaaacucugca

SEQ ID NO: 1045977 - RNA, 19 nt, Artificial Sequence
  Description of Artificial Sequence: Synthetic oligonucleotide
gguggugaaaacucugcac

SEQ ID NO: 1045978 - RNA, 19 nt, Artificial Sequence
  Description of Artificial Sequence: Synthetic oligonucleotide
ggcugaauuuggaugagag

SEQ ID NO: 1045979 - RNA, 19 nt, Artificial Sequence
  Description of Artificial Sequence: Synthetic oligonucleotide
ugcgggacaggaacgucca

SEQ ID NO: 1045980 - RNA, 19 nt, Artificial Sequence
  Description of Artificial Sequence: Synthetic oligonucleotide
agauuguuagaugggcugu

SEQ ID NO: 1045981 - RNA, 19 nt, Artificial Sequence
  Description of Artificial Sequence: Synthetic oligonucleotide
agccuauuaucuccugugu

SEQ ID NO: 1045982 - RNA, 19 nt, Artificial Sequence
  Description of Artificial Sequence: Synthetic oligonucleotide
ucuugggauaggugcucag

SEQ ID NO: 1045983 - RNA, 19 nt, Artificial Sequence
  Description of Artificial Sequence: Synthetic oligonucleotide
aauugaggccugucagcau

SEQ ID NO: 1045984 - RNA, 19 nt, Artificial Sequence
  Description of Artificial Sequence: Synthetic oligonucleotide
aguaggcuacccaguaggg

SEQ ID NO: 1045985 - RNA, 19 nt, Artificial Sequence
  Description of Artificial Sequence: Synthetic oligonucleotide
gaggccugucagcaugcgg

SEQ ID NO: 1045986 - RNA, 19 nt, Artificial Sequence
  Description of Artificial Sequence: Synthetic oligonucleotide
uggcucaucguugguaaug

SEQ ID NO: 1045987 - RNA, 19 nt, Artificial Sequence
  Description of Artificial Sequence: Synthetic oligonucleotide
ggccgaaaaugccaugagg

SEQ ID NO: 1045988 - RNA, 19 nt, Artificial Sequence
  Description of Artificial Sequence: Synthetic oligonucleotide
cuuucucacaacuguagua

SEQ ID NO: 1045989 - RNA, 19 nt, Artificial Sequence
  Description of Artificial Sequence: Synthetic oligonucleotide
gucccuugggccgaaaaug

SEQ ID NO: 1045990 - RNA, 19 nt, Artificial Sequence
  Description of Artificial Sequence: Synthetic oligonucleotide
ccuguggauuaucaaaccc

SEQ ID NO: 1045991 - RNA, 19 nt, Artificial Sequence
  Description of Artificial Sequence: Synthetic oligonucleotide
caccugccugcuuuaaggc

SEQ ID NO: 1045992 - RNA, 19 nt, Artificial Sequence
  Description of Artificial Sequence: Synthetic oligonucleotide
gaaagcaagguaguaggcu

SEQ ID NO: 1045993 - RNA, 19 nt, Artificial Sequence
  Description of Artificial Sequence: Synthetic oligonucleotide
ccaagauauguccaugaac

SEQ ID NO: 1045994 - RNA, 19 nt, Artificial Sequence
  Description of Artificial Sequence: Synthetic oligonucleotide
agugccacacgcauuggug

SEQ ID NO: 1045995 - RNA, 19 nt, Artificial Sequence
  Description of Artificial Sequence: Synthetic oligonucleotide
cacgcauugguguaaaagu

SEQ ID NO: 1045996 - RNA, 19 nt, Artificial Sequence
  Description of Artificial Sequence: Synthetic oligonucleotide
agaacugcaccuguggauu

SEQ ID NO: 1045997 - RNA, 19 nt, Artificial Sequence
  Description of Artificial Sequence: Synthetic oligonucleotide
augcuaccaucuaaccagc

SEQ ID NO: 1045998 - RNA, 19 nt, Artificial Sequence
  Description of Artificial Sequence: Synthetic oligonucleotide
ugcuuacaccuuucagagc

SEQ ID NO: 1045999 - RNA, 19 nt, Artificial Sequence
  Description of Artificial Sequence: Synthetic oligonucleotide
ugcaccuguggauuaucaa

SEQ ID NO: 1046000 - RNA, 19 nt, Artificial Sequence
  Description of Artificial Sequence: Synthetic oligonucleotide
cuuauuggugagggcuugg

SEQ ID NO: 1046001 - RNA, 19 nt, Artificial Sequence
  Description of Artificial Sequence: Synthetic oligonucleotide
uagcacucacuguaucacu

SEQ ID NO: 1046002 - RNA, 19 nt, Artificial Sequence
  Description of Artificial Sequence: Synthetic oligonucleotide
uggccugauaauguuguuc

SEQ ID NO: 1046003 - RNA, 19 nt, Artificial Sequence
  Description of Artificial Sequence: Synthetic oligonucleotide
ugaggacgaauggcugugg

SEQ ID NO: 1046004 - RNA, 19 nt, Artificial Sequence
  Description of Artificial Sequence: Synthetic oligonucleotide
gaagauggccugauaaugu

SEQ ID NO: 1046005 - RNA, 19 nt, Artificial Sequence
  Description of Artificial Sequence: Synthetic oligonucleotide
cuguggauuaucaaacccu

SEQ ID NO: 1046006 - RNA, 19 nt, Artificial Sequence
  Description of Artificial Sequence: Synthetic oligonucleotide
ccagcuuacugcaaaccag

SEQ ID NO: 1046007 - RNA, 19 nt, Artificial Sequence
  Description of Artificial Sequence: Synthetic oligonucleotide
cuguguuauaaggagcuga

SEQ ID NO: 1046008 - RNA, 19 nt, Artificial Sequence
  Description of Artificial Sequence: Synthetic oligonucleotide
acggcaucauccaugguga

SEQ ID NO: 1046009 - RNA, 19 nt, Artificial Sequence
  Description of Artificial Sequence: Synthetic oligonucleotide
cgaaaaugccaugaggacg

SEQ ID NO: 1046010 - RNA, 19 nt, Artificial Sequence
  Description of Artificial Sequence: Synthetic oligonucleotide
cauggcauaagggaggucu

SEQ ID NO: 1046011 - RNA, 19 nt, Artificial Sequence
  Description of Artificial Sequence: Synthetic oligonucleotide
aacuuauuggugagggcuu

SEQ ID NO: 1046012 - RNA, 19 nt, Artificial Sequence
  Description of Artificial Sequence: Synthetic oligonucleotide
guuguuacuggaugguggu

SEQ ID NO: 1046013 - RNA, 19 nt, Artificial Sequence
  Description of Artificial Sequence: Synthetic oligonucleotide
aaucaccgugcacuucuua

SEQ ID NO: 1046014 - RNA, 19 nt, Artificial Sequence
  Description of Artificial Sequence: Synthetic oligonucleotide
acugcugguuaaaaugagu

SEQ ID NO: 1046015 - RNA, 19 nt, Artificial Sequence
  Description of Artificial Sequence: Synthetic oligonucleotide
agggauuggcucaucguug

SEQ ID NO: 1046016 - RNA, 19 nt, Artificial Sequence
  Description of Artificial Sequence: Synthetic oligonucleotide
guggccgguacccgaagag

SEQ ID NO: 1046017 - RNA, 19 nt, Artificial Sequence
  Description of Artificial Sequence: Synthetic oligonucleotide
auaggugcucagcugccaa

SEQ ID NO: 1046018 - RNA, 19 nt, Artificial Sequence
  Description of Artificial Sequence: Synthetic oligonucleotide
agcaugcgggacaggaacg

SEQ ID NO: 1046019 - RNA, 19 nt, Artificial Sequence
  Description of Artificial Sequence: Synthetic oligonucleotide
agcaaggaaccaggagugg

SEQ ID NO: 1046020 - RNA, 19 nt, Artificial Sequence
  Description of Artificial Sequence: Synthetic oligonucleotide
guccaugaaccacauucuc

SEQ ID NO: 1046021 - RNA, 19 nt, Artificial Sequence
  Description of Artificial Sequence: Synthetic oligonucleotide
uggaacguaccggccagug

SEQ ID NO: 1046022 - RNA, 19 nt, Artificial Sequence
  Description of Artificial Sequence: Synthetic oligonucleotide
agcaaggggcacauagcuc

SEQ ID NO: 1046023 - RNA, 19 nt, Artificial Sequence
  Description of Artificial Sequence: Synthetic oligonucleotide
gugaccaguggccgguacc

SEQ ID NO: 1046024 - RNA, 19 nt, Artificial Sequence
  Description of Artificial Sequence: Synthetic oligonucleotide
guguuauaaggagcugacc

SEQ ID NO: 1046025 - RNA, 19 nt, Artificial Sequence
  Description of Artificial Sequence: Synthetic oligonucleotide
gcaucaauuaggauaggga

SEQ ID NO: 1046026 - RNA, 19 nt, Artificial Sequence
  Description of Artificial Sequence: Synthetic oligonucleotide
gccaaugaaauucacucua

SEQ ID NO: 1046027 - RNA, 19 nt, Artificial Sequence
  Description of Artificial Sequence: Synthetic oligonucleotide
aaccagccuauuaucuccu

SEQ ID NO: 1046028 - RNA, 19 nt, Artificial Sequence
  Description of Artificial Sequence: Synthetic oligonucleotide
ggauauugguucaucagaa

SEQ ID NO: 1046029 - RNA, 19 nt, Artificial Sequence
  Description of Artificial Sequence: Synthetic oligonucleotide
ggcaugcuaccaucuaacc

SEQ ID NO: 1046030 - RNA, 19 nt, Artificial Sequence
  Description of Artificial Sequence: Synthetic oligonucleotide
acuguaguaguggaacgua

SEQ ID NO: 1046031 - RNA, 19 nt, Artificial Sequence
  Description of Artificial Sequence: Synthetic oligonucleotide
gcaugcuaccaucuaacca

SEQ ID NO: 1046032 - RNA, 19 nt, Artificial Sequence
  Description of Artificial Sequence: Synthetic oligonucleotide
cacgucacuugcccuuccg

SEQ ID NO: 1046033 - RNA, 19 nt, Artificial Sequence
  Description of Artificial Sequence: Synthetic oligonucleotide
aggagcugaccagucaaca

SEQ ID NO: 1046034 - RNA, 19 nt, Artificial Sequence
  Description of Artificial Sequence: Synthetic oligonucleotide
uucuuagggauuggggauu

SEQ ID NO: 1046035 - RNA, 19 nt, Artificial Sequence
  Description of Artificial Sequence: Synthetic oligonucleotide
uuggggcacgucacuugcc

SEQ ID NO: 1046036 - RNA, 19 nt, Artificial Sequence
  Description of Artificial Sequence: Synthetic oligonucleotide
aaaugcaaguaaggauauu

SEQ ID NO: 1046037 - RNA, 19 nt, Artificial Sequence
  Description of Artificial Sequence: Synthetic oligonucleotide
gauuggcucaucguuggua

SEQ ID NO: 1046038 - RNA, 19 nt, Artificial Sequence
  Description of Artificial Sequence: Synthetic oligonucleotide
ucaaacccuuggcgaauau

SEQ ID NO: 1046039 - RNA, 19 nt, Artificial Sequence
  Description of Artificial Sequence: Synthetic oligonucleotide
guaguggaacguaccggcc

SEQ ID NO: 1046040 - RNA, 19 nt, Artificial Sequence
  Description of Artificial Sequence: Synthetic oligonucleotide
ccgaaaaugccaugaggac

SEQ ID NO: 1046041 - RNA, 19 nt, Artificial Sequence
  Description of Artificial Sequence: Synthetic oligonucleotide
aaaugccaugaggacgaau

SEQ ID NO: 1046042 - RNA, 19 nt, Artificial Sequence
  Description of Artificial Sequence: Synthetic oligonucleotide
cugucagcaugcgggacag

SEQ ID NO: 1046043 - RNA, 19 nt, Artificial Sequence
  Description of Artificial Sequence: Synthetic oligonucleotide
uaugcaccugccugcuuua

SEQ ID NO: 1046044 - RNA, 19 nt, Artificial Sequence
  Description of Artificial Sequence: Synthetic oligonucleotide
uggccgguacccgaagagc

SEQ ID NO: 1046045 - RNA, 19 nt, Artificial Sequence
  Description of Artificial Sequence: Synthetic oligonucleotide
agcgcugcaucuugggaua

SEQ ID NO: 1046046 - RNA, 19 nt, Artificial Sequence
  Description of Artificial Sequence: Synthetic oligonucleotide
caguggaaaacugugcuua

SEQ ID NO: 1046047 - RNA, 19 nt, Artificial Sequence
  Description of Artificial Sequence: Synthetic oligonucleotide
aguggccgguacccgaaga

SEQ ID NO: 1046048 - RNA, 19 nt, Artificial Sequence
  Description of Artificial Sequence: Synthetic oligonucleotide
gcaccuguggauuaucaaa

SEQ ID NO: 1046049 - RNA, 19 nt, Artificial Sequence
  Description of Artificial Sequence: Synthetic oligonucleotide
cgaauaucaaauacauuga

SEQ ID NO: 1046050 - RNA, 19 nt, Artificial Sequence
  Description of Artificial Sequence: Synthetic oligonucleotide
ugaggccugucagcaugcg

SEQ ID NO: 1046051 - RNA, 19 nt, Artificial Sequence
  Description of Artificial Sequence: Synthetic oligonucleotide
gccuuccuaccuuugaaca

SEQ ID NO: 1046052 - RNA, 19 nt, Artificial Sequence
  Description of Artificial Sequence: Synthetic oligonucleotide
ggugaugcacaguggaaaa

SEQ ID NO: 1046053 - RNA, 19 nt, Artificial Sequence
  Description of Artificial Sequence: Synthetic oligonucleotide
caaacccuuggcgaauauc

SEQ ID NO: 1046054 - RNA, 19 nt, Artificial Sequence
  Description of Artificial Sequence: Synthetic oligonucleotide
aggacgaauggcugugguu

SEQ ID NO: 1046055 - RNA, 19 nt, Artificial Sequence
  Description of Artificial Sequence: Synthetic oligonucleotide
gacgaauggcugugguuaa

SEQ ID NO: 1046056 - RNA, 19 nt, Artificial Sequence
  Description of Artificial Sequence: Synthetic oligonucleotide
cguugguaaugugaaaugc

SEQ ID NO: 1046057 - RNA, 19 nt, Artificial Sequence
  Description of Artificial Sequence: Synthetic oligonucleotide
uagccucgugccagcaacu

SEQ ID NO: 1046058 - RNA, 19 nt, Artificial Sequence
  Description of Artificial Sequence: Synthetic oligonucleotide
agaaagggauuggcucauc

SEQ ID NO: 1046059 - RNA, 19 nt, Artificial Sequence
  Description of Artificial Sequence: Synthetic oligonucleotide
uggcugaauuuggaugaga

SEQ ID NO: 1046060 - RNA, 19 nt, Artificial Sequence
  Description of Artificial Sequence: Synthetic oligonucleotide
acgcauugguguaaaaguu

SEQ ID NO: 1046061 - RNA, 19 nt, Artificial Sequence
  Description of Artificial Sequence: Synthetic oligonucleotide
uugggccgaaaaugccaug

SEQ ID NO: 1046062 - RNA, 19 nt, Artificial Sequence
  Description of Artificial Sequence: Synthetic oligonucleotide
gguaguaggcuacccagua

SEQ ID NO: 1046063 - RNA, 19 nt, Artificial Sequence
  Description of Artificial Sequence: Synthetic oligonucleotide
accagccuauuaucuccug

SEQ ID NO: 1046064 - RNA, 19 nt, Artificial Sequence
  Description of Artificial Sequence: Synthetic oligonucleotide
cuguuguugucaccuccuc

SEQ ID NO: 1046065 - RNA, 19 nt, Artificial Sequence
  Description of Artificial Sequence: Synthetic oligonucleotide
guaccggccagugccacac

SEQ ID NO: 1046066 - RNA, 19 nt, Artificial Sequence
  Description of Artificial Sequence: Synthetic oligonucleotide
ggacgaauggcugugguua

SEQ ID NO: 1046067 - RNA, 19 nt, Artificial Sequence
  Description of Artificial Sequence: Synthetic oligonucleotide
ccagcaaggggcacauagc

SEQ ID NO: 1046068 - RNA, 19 nt, Artificial Sequence
  Description of Artificial Sequence: Synthetic oligonucleotide
aacguaccggccagugcca

SEQ ID NO: 1046069 - RNA, 19 nt, Artificial Sequence
  Description of Artificial Sequence: Synthetic oligonucleotide
agcacucacuguaucacua

SEQ ID NO: 1046070 - RNA, 19 nt, Artificial Sequence
  Description of Artificial Sequence: Synthetic oligonucleotide
cugcaaaccagccuauuau

SEQ ID NO: 1046071 - RNA, 19 nt, Artificial Sequence
  Description of Artificial Sequence: Synthetic oligonucleotide
ggaacguaccggccagugc

SEQ ID NO: 1046072 - RNA, 19 nt, Artificial Sequence
  Description of Artificial Sequence: Synthetic oligonucleotide
cuuagggauuggggauugg

SEQ ID NO: 1046073 - RNA, 19 nt, Artificial Sequence
  Description of Artificial Sequence: Synthetic oligonucleotide
acgaauggcugugguuaag

SEQ ID NO: 1046074 - RNA, 19 nt, Artificial Sequence
  Description of Artificial Sequence: Synthetic oligonucleotide
uggcauaagggaggucuuc

SEQ ID NO: 1046075 - RNA, 19 nt, Artificial Sequence
  Description of Artificial Sequence: Synthetic oligonucleotide
ggauagggacuaacugggg

SEQ ID NO: 1046076 - RNA, 19 nt, Artificial Sequence
  Description of Artificial Sequence: Synthetic oligonucleotide
cugcaccuguggauuauca

SEQ ID NO: 1046077 - RNA, 19 nt, Artificial Sequence
  Description of Artificial Sequence: Synthetic oligonucleotide
ccaguaggggaugugguac

SEQ ID NO: 1046078 - RNA, 19 nt, Artificial Sequence
  Description of Artificial Sequence: Synthetic oligonucleotide
gaccaguggccgguacccg

SEQ ID NO: 1046079 - RNA, 19 nt, Artificial Sequence
  Description of Artificial Sequence: Synthetic oligonucleotide
agcugccaagauaugucca

SEQ ID NO: 1046080 - RNA, 19 nt, Artificial Sequence
  Description of Artificial Sequence: Synthetic oligonucleotide
gggaaauguuuuauggaaa

SEQ ID NO: 1046081 - RNA, 19 nt, Artificial Sequence
  Description of Artificial Sequence: Synthetic oligonucleotide
agguaguaggcuacccagu

SEQ ID NO: 1046082 - RNA, 19 nt, Artificial Sequence
  Description of Artificial Sequence: Synthetic oligonucleotide
auauguccaugaaccacau

SEQ ID NO: 1046083 - RNA, 19 nt, Artificial Sequence
  Description of Artificial Sequence: Synthetic oligonucleotide
gggccgaaaaugccaugag

SEQ ID NO: 1046084 - RNA, 19 nt, Artificial Sequence
  Description of Artificial Sequence: Synthetic oligonucleotide
augagaggacugaccacca

SEQ ID NO: 1046085 - RNA, 19 nt, Artificial Sequence
  Description of Artificial Sequence: Synthetic oligonucleotide
aaaaugccaugaggacgaa

SEQ ID NO: 1046086 - RNA, 19 nt, Artificial Sequence
  Description of Artificial Sequence: Synthetic oligonucleotide
gugccacacgcauuggugu

SEQ ID NO: 1046087 - RNA, 19 nt, Artificial Sequence
  Description of Artificial Sequence: Synthetic oligonucleotide
gaggacgaauggcuguggu

SEQ ID NO: 1046088 - RNA, 19 nt, Artificial Sequence
  Description of Artificial Sequence: Synthetic oligonucleotide
gagucaggcaugcuaccau

SEQ ID NO: 1046089 - RNA, 19 nt, Artificial Sequence
  Description of Artificial Sequence: Synthetic oligonucleotide
uccaaucaccgugcacuuc

SEQ ID NO: 1046090 - RNA, 19 nt, Artificial Sequence
  Description of Artificial Sequence: Synthetic oligonucleotide
acguaccggccagugccac

SEQ ID NO: 1046091 - RNA, 19 nt, Artificial Sequence
  Description of Artificial Sequence: Synthetic oligonucleotide
caucguugguaaugugaaa

SEQ ID NO: 1046092 - RNA, 19 nt, Artificial Sequence
  Description of Artificial Sequence: Synthetic oligonucleotide
cuccuguuguugucaccuc

SEQ ID NO: 1046093 - RNA, 19 nt, Artificial Sequence
  Description of Artificial Sequence: Synthetic oligonucleotide
guagggguuaggagagaga

SEQ ID NO: 1046094 - RNA, 19 nt, Artificial Sequence
  Description of Artificial Sequence: Synthetic oligonucleotide
caaugcuauccugggaaaa

SEQ ID NO: 1046095 - RNA, 19 nt, Artificial Sequence
  Description of Artificial Sequence: Synthetic oligonucleotide
cuugggccgaaaaugccau

SEQ ID NO: 1046096 - RNA, 19 nt, Artificial Sequence
  Description of Artificial Sequence: Synthetic oligonucleotide
caucaccaguagagagaac

SEQ ID NO: 1046097 - RNA, 19 nt, Artificial Sequence
  Description of Artificial Sequence: Synthetic oligonucleotide
caccgugcacuucuuagcu

SEQ ID NO: 1046098 - RNA, 19 nt, Artificial Sequence
  Description of Artificial Sequence: Synthetic oligonucleotide
ccauuaagcaucaucucau

SEQ ID NO: 1046099 - RNA, 19 nt, Artificial Sequence
  Description of Artificial Sequence: Synthetic oligonucleotide
cugcaucaauuaggauagg

SEQ ID NO: 1046100 - RNA, 19 nt, Artificial Sequence
  Description of Artificial Sequence: Synthetic oligonucleotide
gccaagauauguccaugaa

SEQ ID NO: 1046101 - RNA, 19 nt, Artificial Sequence
  Description of Artificial Sequence: Synthetic oligonucleotide
gcacauagcucagaagaaa

SEQ ID NO: 1046102 - RNA, 19 nt, Artificial Sequence
  Description of Artificial Sequence: Synthetic oligonucleotide
ggagucaggcaugcuacca

SEQ ID NO: 1046103 - RNA, 19 nt, Artificial Sequence
  Description of Artificial Sequence: Synthetic oligonucleotide
caugcgggacaggaacguc

SEQ ID NO: 1046104 - RNA, 19 nt, Artificial Sequence
  Description of Artificial Sequence: Synthetic oligonucleotide
guaucacuacugacaacua

SEQ ID NO: 1046105 - RNA, 19 nt, Artificial Sequence
  Description of Artificial Sequence: Synthetic oligonucleotide
cauuaagcaucaucucauu

SEQ ID NO: 1046106 - RNA, 19 nt, Artificial Sequence
  Description of Artificial Sequence: Synthetic oligonucleotide
gcuuacugcaaaccagccu

SEQ ID NO: 1046107 - RNA, 19 nt, Artificial Sequence
  Description of Artificial Sequence: Synthetic oligonucleotide
cagcgcugcaucuugggau

SEQ ID NO: 1046108 - RNA, 19 nt, Artificial Sequence
  Description of Artificial Sequence: Synthetic oligonucleotide
acuguccuuuccacggcau

SEQ ID NO: 1046109 - RNA, 19 nt, Artificial Sequence
  Description of Artificial Sequence: Synthetic oligonucleotide
cccagcgcugcaucuuggg

SEQ ID NO: 1046110 - RNA, 19 nt, Artificial Sequence
  Description of Artificial Sequence: Synthetic oligonucleotide
ccaaucaccgugcacuucu

SEQ ID NO: 1046111 - RNA, 19 nt, Artificial Sequence
  Description of Artificial Sequence: Synthetic oligonucleotide
caguggccgguacccgaag

SEQ ID NO: 1046112 - RNA, 19 nt, Artificial Sequence
  Description of Artificial Sequence: Synthetic oligonucleotide
cgcugaaaguaugcaaggc

SEQ ID NO: 1046113 - RNA, 19 nt, Artificial Sequence
  Description of Artificial Sequence: Synthetic oligonucleotide
cguccagaaagggauuggc

SEQ ID NO: 1046114 - RNA, 19 nt, Artificial Sequence
  Description of Artificial Sequence: Synthetic oligonucleotide
cauagccucgugccagcaa

SEQ ID NO: 1046115 - RNA, 19 nt, Artificial Sequence
  Description of Artificial Sequence: Synthetic oligonucleotide
auggcauaagggaggucuu

SEQ ID NO: 1046116 - RNA, 19 nt, Artificial Sequence
  Description of Artificial Sequence: Synthetic oligonucleotide
ccugauaauguuguucugu

SEQ ID NO: 1046117 - RNA, 19 nt, Artificial Sequence
  Description of Artificial Sequence: Synthetic oligonucleotide
caaugggcuucauggcaua

SEQ ID NO: 1046118 - RNA, 19 nt, Artificial Sequence
  Description of Artificial Sequence: Synthetic oligonucleotide
gcacacaaaguacaauauu

SEQ ID NO: 1046119 - RNA, 19 nt, Artificial Sequence
  Description of Artificial Sequence: Synthetic oligonucleotide
auuggggauuggagagaga

SEQ ID NO: 1046120 - RNA, 19 nt, Artificial Sequence
  Description of Artificial Sequence: Synthetic oligonucleotide
ccuguuggcugcagagauc

SEQ ID NO: 1046121 - RNA, 19 nt, Artificial Sequence
  Description of Artificial Sequence: Synthetic oligonucleotide
caguaggggaugugguacu

SEQ ID NO: 1046122 - RNA, 19 nt, Artificial Sequence
  Description of Artificial Sequence: Synthetic oligonucleotide
guggaugaagggaaauguu

SEQ ID NO: 1046123 - RNA, 19 nt, Artificial Sequence
  Description of Artificial Sequence: Synthetic oligonucleotide
aggcuacccaguaggggau

SEQ ID NO: 1046124 - RNA, 19 nt, Artificial Sequence
  Description of Artificial Sequence: Synthetic oligonucleotide
gcaguagauuaugcaccug

SEQ ID NO: 1046125 - RNA, 19 nt, Artificial Sequence
  Description of Artificial Sequence: Synthetic oligonucleotide
cccuuggcgaauaucaaau

SEQ ID NO: 1046126 - RNA, 19 nt, Artificial Sequence
  Description of Artificial Sequence: Synthetic oligonucleotide
caauugccuuccuaccuuu

SEQ ID NO: 1046127 - RNA, 19 nt, Artificial Sequence
  Description of Artificial Sequence: Synthetic oligonucleotide
cgucacuugcccuuccgca

SEQ ID NO: 1046128 - RNA, 19 nt, Artificial Sequence
  Description of Artificial Sequence: Synthetic oligonucleotide
gcugcaucuugggauaggu

SEQ ID NO: 1046129 - RNA, 19 nt, Artificial Sequence
  Description of Artificial Sequence: Synthetic oligonucleotide
gccuccaaucaccgugcac

SEQ ID NO: 1046130 - RNA, 19 nt, Artificial Sequence
  Description of Artificial Sequence: Synthetic oligonucleotide
cagugccacacgcauuggu

SEQ ID NO: 1046131 - RNA, 19 nt, Artificial Sequence
  Description of Artificial Sequence: Synthetic oligonucleotide
ccaaugaaauucacucuau

SEQ ID NO: 1046132 - RNA, 19 nt, Artificial Sequence
  Description of Artificial Sequence: Synthetic oligonucleotide
cccaauugccuuccuaccu

SEQ ID NO: 1046133 - RNA, 19 nt, Artificial Sequence
  Description of Artificial Sequence: Synthetic oligonucleotide
augcaccugccugcuuuaa

SEQ ID NO: 1046134 - RNA, 19 nt, Artificial Sequence
  Description of Artificial Sequence: Synthetic oligonucleotide
cuccaaucaccgugcacuu

SEQ ID NO: 1046135 - RNA, 19 nt, Artificial Sequence
  Description of Artificial Sequence: Synthetic oligonucleotide
ggcacgucacuugcccuuc

SEQ ID NO: 1046136 - RNA, 19 nt, Artificial Sequence
  Description of Artificial Sequence: Synthetic oligonucleotide
gcgggacaggaacguccag

SEQ ID NO: 1046137 - RNA, 19 nt, Artificial Sequence
  Description of Artificial Sequence: Synthetic oligonucleotide
gggucccuugggccgaaaa

SEQ ID NO: 1046138 - RNA, 19 nt, Artificial Sequence
  Description of Artificial Sequence: Synthetic oligonucleotide
ccagccuauuaucuccugu

SEQ ID NO: 1046139 - RNA, 19 nt, Artificial Sequence
  Description of Artificial Sequence: Synthetic oligonucleotide
gcgcugcaucuugggauag

SEQ ID NO: 1046140 - RNA, 19 nt, Artificial Sequence
  Description of Artificial Sequence: Synthetic oligonucleotide
ggcgaauaucaaauacauu

SEQ ID NO: 1046141 - RNA, 19 nt, Artificial Sequence
  Description of Artificial Sequence: Synthetic oligonucleotide
gccacacgcauugguguaa

SEQ ID NO: 1046142 - RNA, 19 nt, Artificial Sequence
  Description of Artificial Sequence: Synthetic oligonucleotide
gggcacgucacuugcccuu

SEQ ID NO: 1046143 - RNA, 19 nt, Artificial Sequence
  Description of Artificial Sequence: Synthetic oligonucleotide
ggggcacgucacuugcccu

SEQ ID NO: 1046144 - RNA, 19 nt, Artificial Sequence
  Description of Artificial Sequence: Synthetic oligonucleotide
ugccugcuuuaaggccaau

SEQ ID NO: 1046145 - RNA, 19 nt, Artificial Sequence
  Description of Artificial Sequence: Synthetic oligonucleotide
guggaacguaccggccagu

SEQ ID NO: 1046146 - RNA, 19 nt, Artificial Sequence
  Description of Artificial Sequence: Synthetic oligonucleotide
ccacacgcauugguguaaa

SEQ ID NO: 1046147 - RNA, 19 nt, Artificial Sequence
  Description of Artificial Sequence: Synthetic oligonucleotide
cccuuucuagcugcaucaa

SEQ ID NO: 1046148 - RNA, 19 nt, Artificial Sequence
  Description of Artificial Sequence: Synthetic oligonucleotide
gccgguacccgaagagcuu

SEQ ID NO: 1046149 - RNA, 19 nt, Artificial Sequence
  Description of Artificial Sequence: Synthetic oligonucleotide
ccgguacccgaagagcuuu

SEQ ID NO: 1046150 - RNA, 19 nt, Artificial Sequence
  Description of Artificial Sequence: Synthetic oligonucleotide
ggccaaccuccagcuuacu

SEQ ID NO: 1046151 - RNA, 19 nt, Artificial Sequence
  Description of Artificial Sequence: Synthetic oligonucleotide
aauuaauguaccuuaguuc

SEQ ID NO: 1046152 - RNA, 19 nt, Artificial Sequence
  Description of Artificial Sequence: Synthetic oligonucleotide
uuaaauuaaaccaccaucu

SEQ ID NO: 1046153 - RNA, 19 nt, Artificial Sequence
  Description of Artificial Sequence: Synthetic oligonucleotide
ugauuguccauuuaguugg

SEQ ID NO: 1046154 - RNA, 19 nt, Artificial Sequence
  Description of Artificial Sequence: Synthetic oligonucleotide
auuuaguuggcucuggccc

SEQ ID NO: 1046155 - RNA, 19 nt, Artificial Sequence
  Description of Artificial Sequence: Synthetic oligonucleotide
ugcauaauaauacaggcac

SEQ ID NO: 1046156 - RNA, 19 nt, Artificial Sequence
  Description of Artificial Sequence: Synthetic oligonucleotide
acggaagaaacuuucagcc

SEQ ID NO: 1046157 - RNA, 19 nt, Artificial Sequence
  Description of Artificial Sequence: Synthetic oligonucleotide
uguuagguaagucaaaaca

SEQ ID NO: 1046158 - RNA, 19 nt, Artificial Sequence
  Description of Artificial Sequence: Synthetic oligonucleotide
aauauuugcggugauauug

SEQ ID NO: 1046159 - RNA, 19 nt, Artificial Sequence
  Description of Artificial Sequence: Synthetic oligonucleotide
uaauaauacaggcacaggu

SEQ ID NO: 1046160 - RNA, 19 nt, Artificial Sequence
  Description of Artificial Sequence: Synthetic oligonucleotide
uuuauaguauugaaggcug

SEQ ID NO: 1046161 - RNA, 19 nt, Artificial Sequence
  Description of Artificial Sequence: Synthetic oligonucleotide
caugacaaaauauuugcgg

SEQ ID NO: 1046162 - RNA, 19 nt, Artificial Sequence
  Description of Artificial Sequence: Synthetic oligonucleotide
aacauguggggacacaggg

SEQ ID NO: 1046163 - RNA, 19 nt, Artificial Sequence
  Description of Artificial Sequence: Synthetic oligonucleotide
auuggggagccguagaucc

SEQ ID NO: 1046164 - RNA, 19 nt, Artificial Sequence
  Description of Artificial Sequence: Synthetic oligonucleotide
aauuaaaccaccaucuucu

SEQ ID NO: 1046165 - RNA, 19 nt, Artificial Sequence
  Description of Artificial Sequence: Synthetic oligonucleotide
gaaacuuucagccaccaac

SEQ ID NO: 1046166 - RNA, 19 nt, Artificial Sequence
  Description of Artificial Sequence: Synthetic oligonucleotide
acagcaaaaggauuaaaag

SEQ ID NO: 1046167 - RNA, 19 nt, Artificial Sequence
  Description of Artificial Sequence: Synthetic oligonucleotide
uuuguuagcaccaucgaaa

SEQ ID NO: 1046168 - RNA, 19 nt, Artificial Sequence
  Description of Artificial Sequence: Synthetic oligonucleotide
aaauagagcuaucgccucc

SEQ ID NO: 1046169 - RNA, 19 nt, Artificial Sequence
  Description of Artificial Sequence: Synthetic oligonucleotide
gugauauugaguaaaaccc

SEQ ID NO: 1046170 - RNA, 19 nt, Artificial Sequence
  Description of Artificial Sequence: Synthetic oligonucleotide
agagggaaaauucacagca

SEQ ID NO: 1046171 - RNA, 19 nt, Artificial Sequence
  Description of Artificial Sequence: Synthetic oligonucleotide
aaaauagagcuaucgccuc

SEQ ID NO: 1046172 - RNA, 19 nt, Artificial Sequence
  Description of Artificial Sequence: Synthetic oligonucleotide
ucgaaauccauguagggug

SEQ ID NO: 1046173 - RNA, 19 nt, Artificial Sequence
  Description of Artificial Sequence: Synthetic oligonucleotide
ugauauugaguaaaacccc

SEQ ID NO: 1046174 - RNA, 19 nt, Artificial Sequence
  Description of Artificial Sequence: Synthetic oligonucleotide
uacgcugugggacaaagag

SEQ ID NO: 1046175 - RNA, 19 nt, Artificial Sequence
  Description of Artificial Sequence: Synthetic oligonucleotide
uuugcggugauauugagua

SEQ ID NO: 1046176 - RNA, 19 nt, Artificial Sequence
  Description of Artificial Sequence: Synthetic oligonucleotide
ggugauauugaguaaaacc

SEQ ID NO: 1046177 - RNA, 19 nt, Artificial Sequence
  Description of Artificial Sequence: Synthetic oligonucleotide
aacaccugcaauuggggag

SEQ ID NO: 1046178 - RNA, 19 nt, Artificial Sequence
  Description of Artificial Sequence: Synthetic oligonucleotide
gauaacaccugcaauuggg

SEQ ID NO: 1046179 - RNA, 19 nt, Artificial Sequence
  Description of Artificial Sequence: Synthetic oligonucleotide
ucugugccagacaacaccg

SEQ ID NO: 1046180 - RNA, 19 nt, Artificial Sequence
  Description of Artificial Sequence: Synthetic oligonucleotide
ugugcaaaagaguuugagc

SEQ ID NO: 1046181 - RNA, 19 nt, Artificial Sequence
  Description of Artificial Sequence: Synthetic oligonucleotide
agucaaaacauuuacugaa

SEQ ID NO: 1046182 - RNA, 19 nt, Artificial Sequence
  Description of Artificial Sequence: Synthetic oligonucleotide
aaaguuacuuugcauaaua

SEQ ID NO: 1046183 - RNA, 19 nt, Artificial Sequence
  Description of Artificial Sequence: Synthetic oligonucleotide
ggauuagguacccugaugg

SEQ ID NO: 1046184 - RNA, 19 nt, Artificial Sequence
  Description of Artificial Sequence: Synthetic oligonucleotide
gugcaaaagaguuugagca

SEQ ID NO: 1046185 - RNA, 19 nt, Artificial Sequence
  Description of Artificial Sequence: Synthetic oligonucleotide
uucagaugaugccacgggg

SEQ ID NO: 1046186 - RNA, 19 nt, Artificial Sequence
  Description of Artificial Sequence: Synthetic oligonucleotide
ugagacuuccaguuuacgc

SEQ ID NO: 1046187 - RNA, 19 nt, Artificial Sequence
  Description of Artificial Sequence: Synthetic oligonucleotide
uacggaagaaacuuucagc

SEQ ID NO: 1046188 - RNA, 19 nt, Artificial Sequence
  Description of Artificial Sequence: Synthetic oligonucleotide
aauuuggccuuguacaaau

SEQ ID NO: 1046189 - RNA, 19 nt, Artificial Sequence
  Description of Artificial Sequence: Synthetic oligonucleotide
ugugugugugugcacaugc

SEQ ID NO: 1046190 - RNA, 19 nt, Artificial Sequence
  Description of Artificial Sequence: Synthetic oligonucleotide
ugugguuugggaaagugua

SEQ ID NO: 1046191 - RNA, 19 nt, Artificial Sequence
  Description of Artificial Sequence: Synthetic oligonucleotide
ugcaacagcaaaaggauua

SEQ ID NO: 1046192 - RNA, 19 nt, Artificial Sequence
  Description of Artificial Sequence: Synthetic oligonucleotide
acugggaaccuuuaggugu

SEQ ID NO: 1046193 - RNA, 19 nt, Artificial Sequence
  Description of Artificial Sequence: Synthetic oligonucleotide
uuuggauccaguagcauua

SEQ ID NO: 1046194 - RNA, 19 nt, Artificial Sequence
  Description of Artificial Sequence: Synthetic oligonucleotide
agaacugcggcaucugggg

SEQ ID NO: 1046195 - RNA, 19 nt, Artificial Sequence
  Description of Artificial Sequence: Synthetic oligonucleotide
uaugucuacaucaucucau

SEQ ID NO: 1046196 - RNA, 19 nt, Artificial Sequence
  Description of Artificial Sequence: Synthetic oligonucleotide
ucaaaggugucacaugaaa

SEQ ID NO: 1046197 - RNA, 19 nt, Artificial Sequence
  Description of Artificial Sequence: Synthetic oligonucleotide
uguaccuuaguucaacauu

SEQ ID NO: 1046198 - RNA, 19 nt, Artificial Sequence
  Description of Artificial Sequence: Synthetic oligonucleotide
aaaugugugugugugugug

SEQ ID NO: 1046199 - RNA, 19 nt, Artificial Sequence
  Description of Artificial Sequence: Synthetic oligonucleotide
ugcuguguuagguaaguca

SEQ ID NO: 1046200 - RNA, 19 nt, Artificial Sequence
  Description of Artificial Sequence: Synthetic oligonucleotide
agcauuugggcuugggcgg

SEQ ID NO: 1046201 - RNA, 19 nt, Artificial Sequence
  Description of Artificial Sequence: Synthetic oligonucleotide
aauguaccuuaguucaaca

SEQ ID NO: 1046202 - RNA, 19 nt, Artificial Sequence
  Description of Artificial Sequence: Synthetic oligonucleotide
guagcauuagaggaguggg

SEQ ID NO: 1046203 - RNA, 19 nt, Artificial Sequence
  Description of Artificial Sequence: Synthetic oligonucleotide
aucugcuucaacauguggg

SEQ ID NO: 1046204 - RNA, 19 nt, Artificial Sequence
  Description of Artificial Sequence: Synthetic oligonucleotide
uuagguacccugaugggaa

SEQ ID NO: 1046205 - RNA, 19 nt, Artificial Sequence
  Description of Artificial Sequence: Synthetic oligonucleotide
auaggauuggcccgagggg

SEQ ID NO: 1046206 - RNA, 19 nt, Artificial Sequence
  Description of Artificial Sequence: Synthetic oligonucleotide
gauuagguacccugauggg

SEQ ID NO: 1046207 - RNA, 19 nt, Artificial Sequence
  Description of Artificial Sequence: Synthetic oligonucleotide
uuagguaagucaaaacauu

SEQ ID NO: 1046208 - RNA, 19 nt, Artificial Sequence
  Description of Artificial Sequence: Synthetic oligonucleotide
gguaagucaaaacauuuac

SEQ ID NO: 1046209 - RNA, 19 nt, Artificial Sequence
  Description of Artificial Sequence: Synthetic oligonucleotide
aguuacuuugcauaauaau

SEQ ID NO: 1046210 - RNA, 19 nt, Artificial Sequence
  Description of Artificial Sequence: Synthetic oligonucleotide
ucaguugagacuuccaguu

SEQ ID NO: 1046211 - RNA, 19 nt, Artificial Sequence
  Description of Artificial Sequence: Synthetic oligonucleotide
uuuaggugucacaggaaca

SEQ ID NO: 1046212 - RNA, 19 nt, Artificial Sequence
  Description of Artificial Sequence: Synthetic oligonucleotide
uguccauuuaguuggcucu

SEQ ID NO: 1046213 - RNA, 19 nt, Artificial Sequence
  Description of Artificial Sequence: Synthetic oligonucleotide
ugcaggguaaaguuuacaa

SEQ ID NO: 1046214 - RNA, 19 nt, Artificial Sequence
  Description of Artificial Sequence: Synthetic oligonucleotide
agcucaaguuaucugcuuc

SEQ ID NO: 1046215 - RNA, 19 nt, Artificial Sequence
  Description of Artificial Sequence: Synthetic oligonucleotide
cagacuguuggacucaggc

SEQ ID NO: 1046216 - RNA, 19 nt, Artificial Sequence
  Description of Artificial Sequence: Synthetic oligonucleotide
agagggauuagguacccug

SEQ ID NO: 1046217 - RNA, 19 nt, Artificial Sequence
  Description of Artificial Sequence: Synthetic oligonucleotide
ucaguggacauccucaguu

SEQ ID NO: 1046218 - RNA, 19 nt, Artificial Sequence
  Description of Artificial Sequence: Synthetic oligonucleotide
aacugggaaccuuuaggug

SEQ ID NO: 1046219 - RNA, 19 nt, Artificial Sequence
  Description of Artificial Sequence: Synthetic oligonucleotide
cucaagggcuuucaggucc

SEQ ID NO: 1046220 - RNA, 19 nt, Artificial Sequence
  Description of Artificial Sequence: Synthetic oligonucleotide
uauugaguaaaaccccaaa

SEQ ID NO: 1046221 - RNA, 19 nt, Artificial Sequence
  Description of Artificial Sequence: Synthetic oligonucleotide
ucaauauguaugucuacau

SEQ ID NO: 1046222 - RNA, 19 nt, Artificial Sequence
  Description of Artificial Sequence: Synthetic oligonucleotide
aguagcauuagaggagugg

SEQ ID NO: 1046223 - RNA, 19 nt, Artificial Sequence
  Description of Artificial Sequence: Synthetic oligonucleotide
aaaggugguauccucucaa

SEQ ID NO: 1046224 - RNA, 19 nt, Artificial Sequence
  Description of Artificial Sequence: Synthetic oligonucleotide
aagggaaguaaacuuuaau

SEQ ID NO: 1046225 - RNA, 19 nt, Artificial Sequence
  Description of Artificial Sequence: Synthetic oligonucleotide
aauacaggcacagguagaa

SEQ ID NO: 1046226 - RNA, 19 nt, Artificial Sequence
  Description of Artificial Sequence: Synthetic oligonucleotide
ucaacauguggggacacag

SEQ ID NO: 1046227 - RNA, 19 nt, Artificial Sequence
  Description of Artificial Sequence: Synthetic oligonucleotide
cauuuaguuggcucuggcc

SEQ ID NO: 1046228 - RNA, 19 nt, Artificial Sequence
  Description of Artificial Sequence: Synthetic oligonucleotide
aguuaucugcuucaacaug

SEQ ID NO: 1046229 - RNA, 19 nt, Artificial Sequence
  Description of Artificial Sequence: Synthetic oligonucleotide
acuuugcauaauaauacag

SEQ ID NO: 1046230 - RNA, 19 nt, Artificial Sequence
  Description of Artificial Sequence: Synthetic oligonucleotide
caucgaaauccauguaggg

SEQ ID NO: 1046231 - RNA, 19 nt, Artificial Sequence
  Description of Artificial Sequence: Synthetic oligonucleotide
aggguuguaaacucuacaa

SEQ ID NO: 1046232 - RNA, 19 nt, Artificial Sequence
  Description of Artificial Sequence: Synthetic oligonucleotide
guacggaagaaacuuucag

SEQ ID NO: 1046233 - RNA, 19 nt, Artificial Sequence
  Description of Artificial Sequence: Synthetic oligonucleotide
acaaaugugugugugugug

SEQ ID NO: 1046234 - RNA, 19 nt, Artificial Sequence
  Description of Artificial Sequence: Synthetic oligonucleotide
uuuaguuggcucuggccca

SEQ ID NO: 1046235 - RNA, 19 nt, Artificial Sequence
  Description of Artificial Sequence: Synthetic oligonucleotide
gugucacaugaaaagaggg

SEQ ID NO: 1046236 - RNA, 19 nt, Artificial Sequence
  Description of Artificial Sequence: Synthetic oligonucleotide
uuauaguauugaaggcuga

SEQ ID NO: 1046237 - RNA, 19 nt, Artificial Sequence
  Description of Artificial Sequence: Synthetic oligonucleotide
agagcuaucgccucccuau

SEQ ID NO: 1046238 - RNA, 19 nt, Artificial Sequence
  Description of Artificial Sequence: Synthetic oligonucleotide
uguguuagguaagucaaaa

SEQ ID NO: 1046239 - RNA, 19 nt, Artificial Sequence
  Description of Artificial Sequence: Synthetic oligonucleotide
ugugggacaaagaggguuc

SEQ ID NO: 1046240 - RNA, 19 nt, Artificial Sequence
  Description of Artificial Sequence: Synthetic oligonucleotide
ugguauccucucaauaugu

SEQ ID NO: 1046241 - RNA, 19 nt, Artificial Sequence
  Description of Artificial Sequence: Synthetic oligonucleotide
cagacaacaccgauucugc

SEQ ID NO: 1046242 - RNA, 19 nt, Artificial Sequence
  Description of Artificial Sequence: Synthetic oligonucleotide
aaaggagguuuuguuagca

SEQ ID NO: 1046243 - RNA, 19 nt, Artificial Sequence
  Description of Artificial Sequence: Synthetic oligonucleotide
uaauacaggcacagguaga

SEQ ID NO: 1046244 - RNA, 19 nt, Artificial Sequence
  Description of Artificial Sequence: Synthetic oligonucleotide
uuaucugcuucaacaugug

SEQ ID NO: 1046245 - RNA, 19 nt, Artificial Sequence
  Description of Artificial Sequence: Synthetic oligonucleotide
uuuacgcugugggacaaag

SEQ ID NO: 1046246 - RNA, 19 nt, Artificial Sequence
  Description of Artificial Sequence: Synthetic oligonucleotide
aguuuacaauggcugagcu

SEQ ID NO: 1046247 - RNA, 19 nt, Artificial Sequence
  Description of Artificial Sequence: Synthetic oligonucleotide
acaccugcaauuggggagc

SEQ ID NO: 1046248 - RNA, 19 nt, Artificial Sequence
  Description of Artificial Sequence: Synthetic oligonucleotide
ucaacaacuuaugauuaaa

SEQ ID NO: 1046249 - RNA, 19 nt, Artificial Sequence
  Description of Artificial Sequence: Synthetic oligonucleotide
uugaggaggguuguaaacu

SEQ ID NO: 1046250 - RNA, 19 nt, Artificial Sequence
  Description of Artificial Sequence: Synthetic oligonucleotide
gaugagucccaagugcugc

SEQ ID NO: 1046251 - RNA, 19 nt, Artificial Sequence
  Description of Artificial Sequence: Synthetic oligonucleotide
ugcuucaacauguggggac

SEQ ID NO: 1046252 - RNA, 19 nt, Artificial Sequence
  Description of Artificial Sequence: Synthetic oligonucleotide
aacagagucguugggacau

SEQ ID NO: 1046253 - RNA, 19 nt, Artificial Sequence
  Description of Artificial Sequence: Synthetic oligonucleotide
auaacaccugcaauugggg

SEQ ID NO: 1046254 - RNA, 19 nt, Artificial Sequence
  Description of Artificial Sequence: Synthetic oligonucleotide
guacaaaugugugugugug

SEQ ID NO: 1046255 - RNA, 19 nt, Artificial Sequence
  Description of Artificial Sequence: Synthetic oligonucleotide
uaccugaguuuucugugcc

SEQ ID NO: 1046256 - RNA, 19 nt, Artificial Sequence
  Description of Artificial Sequence: Synthetic oligonucleotide
aauguguguguguguguga

SEQ ID NO: 1046257 - RNA, 19 nt, Artificial Sequence
  Description of Artificial Sequence: Synthetic oligonucleotide
acauuuacugaaagggaag

SEQ ID NO: 1046258 - RNA, 19 nt, Artificial Sequence
  Description of Artificial Sequence: Synthetic oligonucleotide
ugucgagagcucaaguuau

SEQ ID NO: 1046259 - RNA, 19 nt, Artificial Sequence
  Description of Artificial Sequence: Synthetic oligonucleotide
guuucaaaggugucacaug

SEQ ID NO: 1046260 - RNA, 19 nt, Artificial Sequence
  Description of Artificial Sequence: Synthetic oligonucleotide
uauuugcggugauauugag

SEQ ID NO: 1046261 - RNA, 19 nt, Artificial Sequence
  Description of Artificial Sequence: Synthetic oligonucleotide
uucaacaacuuaugauuaa

SEQ ID NO: 1046262 - RNA, 19 nt, Artificial Sequence
  Description of Artificial Sequence: Synthetic oligonucleotide
ugggugagagggauuaggu

SEQ ID NO: 1046263 - RNA, 19 nt, Artificial Sequence
  Description of Artificial Sequence: Synthetic oligonucleotide
uuaauguaccuuaguucaa

SEQ ID NO: 1046264 - RNA, 19 nt, Artificial Sequence
  Description of Artificial Sequence: Synthetic oligonucleotide
aggacuggcgagucauggc

SEQ ID NO: 1046265 - RNA, 19 nt, Artificial Sequence
  Description of Artificial Sequence: Synthetic oligonucleotide
aaguguaccugaguuuucu

SEQ ID NO: 1046266 - RNA, 19 nt, Artificial Sequence
  Description of Artificial Sequence: Synthetic oligonucleotide
aguuucaaaggugucacau

SEQ ID NO: 1046267 - RNA, 19 nt, Artificial Sequence
  Description of Artificial Sequence: Synthetic oligonucleotide
ugccacggggauaacaccu

SEQ ID NO: 1046268 - RNA, 19 nt, Artificial Sequence
  Description of Artificial Sequence: Synthetic oligonucleotide
aaaccaccaucuucuguca

SEQ ID NO: 1046269 - RNA, 19 nt, Artificial Sequence
  Description of Artificial Sequence: Synthetic oligonucleotide
cauaaguuucaaagguguc

SEQ ID NO: 1046270 - RNA, 19 nt, Artificial Sequence
  Description of Artificial Sequence: Synthetic oligonucleotide
ugaggaggguuguaaacuc

SEQ ID NO: 1046271 - RNA, 19 nt, Artificial Sequence
  Description of Artificial Sequence: Synthetic oligonucleotide
gugguauccucucaauaug

SEQ ID NO: 1046272 - RNA, 19 nt, Artificial Sequence
  Description of Artificial Sequence: Synthetic oligonucleotide
auuaaaccaccaucuucug

SEQ ID NO: 1046273 - RNA, 19 nt, Artificial Sequence
  Description of Artificial Sequence: Synthetic oligonucleotide
uauaguauugaaggcugaa

SEQ ID NO: 1046274 - RNA, 19 nt, Artificial Sequence
  Description of Artificial Sequence: Synthetic oligonucleotide
aucgaaauccauguagggu

SEQ ID NO: 1046275 - RNA, 19 nt, Artificial Sequence
  Description of Artificial Sequence: Synthetic oligonucleotide
auuagguacccugauggga

SEQ ID NO: 1046276 - RNA, 19 nt, Artificial Sequence
  Description of Artificial Sequence: Synthetic oligonucleotide
gaugaugccacggggauaa

SEQ ID NO: 1046277 - RNA, 19 nt, Artificial Sequence
  Description of Artificial Sequence: Synthetic oligonucleotide
gucuacaucaucucauuaa

SEQ ID NO: 1046278 - RNA, 19 nt, Artificial Sequence
  Description of Artificial Sequence: Synthetic oligonucleotide
caaaggagguuuuguuagc

SEQ ID NO: 1046279 - RNA, 19 nt, Artificial Sequence
  Description of Artificial Sequence: Synthetic oligonucleotide
ggugucacaugaaaagagg

SEQ ID NO: 1046280 - RNA, 19 nt, Artificial Sequence
  Description of Artificial Sequence: Synthetic oligonucleotide
agauccugugguuugggaa

SEQ ID NO: 1046281 - RNA, 19 nt, Artificial Sequence
  Description of Artificial Sequence: Synthetic oligonucleotide
ccaucgaaauccauguagg

SEQ ID NO: 1046282 - RNA, 19 nt, Artificial Sequence
  Description of Artificial Sequence: Synthetic oligonucleotide
gaagaaacuuucagccacc

SEQ ID NO: 1046283 - RNA, 19 nt, Artificial Sequence
  Description of Artificial Sequence: Synthetic oligonucleotide
uugggcggguugcagguag

SEQ ID NO: 1046284 - RNA, 19 nt, Artificial Sequence
  Description of Artificial Sequence: Synthetic oligonucleotide
guaccugaguuuucugugc

SEQ ID NO: 1046285 - RNA, 19 nt, Artificial Sequence
  Description of Artificial Sequence: Synthetic oligonucleotide
augccacggggauaacacc

SEQ ID NO: 1046286 - RNA, 19 nt, Artificial Sequence
  Description of Artificial Sequence: Synthetic oligonucleotide
aggugucacaugaaaagag

SEQ ID NO: 1046287 - RNA, 19 nt, Artificial Sequence
  Description of Artificial Sequence: Synthetic oligonucleotide
acuugauugaggaggguug

SEQ ID NO: 1046288 - RNA, 19 nt, Artificial Sequence
  Description of Artificial Sequence: Synthetic oligonucleotide
ugugccagacaacaccgau

SEQ ID NO: 1046289 - RNA, 19 nt, Artificial Sequence
  Description of Artificial Sequence: Synthetic oligonucleotide
gugugugugagugugugug

SEQ ID NO: 1046290 - RNA, 19 nt, Artificial Sequence
  Description of Artificial Sequence: Synthetic oligonucleotide
uguuggacucaggccaugg

SEQ ID NO: 1046291 - RNA, 19 nt, Artificial Sequence
  Description of Artificial Sequence: Synthetic oligonucleotide
gaguucagaugaugccacg

SEQ ID NO: 1046292 - RNA, 19 nt, Artificial Sequence
  Description of Artificial Sequence: Synthetic oligonucleotide
gugugugugugugugagug

SEQ ID NO: 1046293 - RNA, 19 nt, Artificial Sequence
  Description of Artificial Sequence: Synthetic oligonucleotide
gaggguuguaaacucuaca

SEQ ID NO: 1046294 - RNA, 19 nt, Artificial Sequence
  Description of Artificial Sequence: Synthetic oligonucleotide
aagugcugcaggguaaagu

SEQ ID NO: 1046295 - RNA, 19 nt, Artificial Sequence
  Description of Artificial Sequence: Synthetic oligonucleotide
uacaaaugugugugugugu

SEQ ID NO: 1046296 - RNA, 19 nt, Artificial Sequence
  Description of Artificial Sequence: Synthetic oligonucleotide
agcaccaucgaaauccaug

SEQ ID NO: 1046297 - RNA, 19 nt, Artificial Sequence
  Description of Artificial Sequence: Synthetic oligonucleotide
agaucuugcuagcuuuacu

SEQ ID NO: 1046298 - RNA, 19 nt, Artificial Sequence
  Description of Artificial Sequence: Synthetic oligonucleotide
aaaguguaccugaguuuuc

SEQ ID NO: 1046299 - RNA, 19 nt, Artificial Sequence
  Description of Artificial Sequence: Synthetic oligonucleotide
accauaaguuucaaaggug

SEQ ID NO: 1046300 - RNA, 19 nt, Artificial Sequence
  Description of Artificial Sequence: Synthetic oligonucleotide
uugcagguagauggcauag

SEQ ID NO: 1046301 - RNA, 19 nt, Artificial Sequence
  Description of Artificial Sequence: Synthetic oligonucleotide
ugauugaggaggguuguaa

SEQ ID NO: 1046302 - RNA, 19 nt, Artificial Sequence
  Description of Artificial Sequence: Synthetic oligonucleotide
ugugcacaugcguaggcau

SEQ ID NO: 1046303 - RNA, 19 nt, Artificial Sequence
  Description of Artificial Sequence: Synthetic oligonucleotide
gagucguugggacauucuc

SEQ ID NO: 1046304 - RNA, 19 nt, Artificial Sequence
  Description of Artificial Sequence: Synthetic oligonucleotide
gaucuugcuagcuuuacuu

SEQ ID NO: 1046305 - RNA, 19 nt, Artificial Sequence
  Description of Artificial Sequence: Synthetic oligonucleotide
uccauuuaguuggcucugg

SEQ ID NO: 1046306 - RNA, 19 nt, Artificial Sequence
  Description of Artificial Sequence: Synthetic oligonucleotide
ugucuacaucaucucauua

SEQ ID NO: 1046307 - RNA, 19 nt, Artificial Sequence
  Description of Artificial Sequence: Synthetic oligonucleotide
auacaucacacagcauuuc

SEQ ID NO: 1046308 - RNA, 19 nt, Artificial Sequence
  Description of Artificial Sequence: Synthetic oligonucleotide
uugagacuuccaguuuacg

SEQ ID NO: 1046309 - RNA, 19 nt, Artificial Sequence
  Description of Artificial Sequence: Synthetic oligonucleotide
aaguuacuuugcauaauaa

SEQ ID NO: 1046310 - RNA, 19 nt, Artificial Sequence
  Description of Artificial Sequence: Synthetic oligonucleotide
augugugugugugugugag

SEQ ID NO: 1046311 - RNA, 19 nt, Artificial Sequence
  Description of Artificial Sequence: Synthetic oligonucleotide
gauugaggaggguuguaaa

SEQ ID NO: 1046312 - RNA, 19 nt, Artificial Sequence
  Description of Artificial Sequence: Synthetic oligonucleotide
ugcguaggcaugacaaaau

SEQ ID NO: 1046313 - RNA, 19 nt, Artificial Sequence
  Description of Artificial Sequence: Synthetic oligonucleotide
caaaggugucacaugaaaa

SEQ ID NO: 1046314 - RNA, 19 nt, Artificial Sequence
  Description of Artificial Sequence: Synthetic oligonucleotide
auauuugcggugauauuga

SEQ ID NO: 1046315 - RNA, 19 nt, Artificial Sequence
  Description of Artificial Sequence: Synthetic oligonucleotide
ggagccguagauccugugg

SEQ ID NO: 1046316 - RNA, 19 nt, Artificial Sequence
  Description of Artificial Sequence: Synthetic oligonucleotide
ugugugugugugugugugc

SEQ ID NO: 1046317 - RNA, 19 nt, Artificial Sequence
  Description of Artificial Sequence: Synthetic oligonucleotide
gagugugugugugugugug

SEQ ID NO: 1046318 - RNA, 19 nt, Artificial Sequence
  Description of Artificial Sequence: Synthetic oligonucleotide
guguuagguaagucaaaac

SEQ ID NO: 1046319 - RNA, 19 nt, Artificial Sequence
  Description of Artificial Sequence: Synthetic oligonucleotide
cucucaauauguaugucua

SEQ ID NO: 1046320 - RNA, 19 nt, Artificial Sequence
  Description of Artificial Sequence: Synthetic oligonucleotide
auguaccuuaguucaacau

SEQ ID NO: 1046321 - RNA, 19 nt, Artificial Sequence
  Description of Artificial Sequence: Synthetic oligonucleotide
acaugcguaggcaugacaa

SEQ ID NO: 1046322 - RNA, 19 nt, Artificial Sequence
  Description of Artificial Sequence: Synthetic oligonucleotide
ccuuguacaaaugugugug

SEQ ID NO: 1046323 - RNA, 19 nt, Artificial Sequence
  Description of Artificial Sequence: Synthetic oligonucleotide
ggcacugcagaugacaaug

SEQ ID NO: 1046324 - RNA, 19 nt, Artificial Sequence
  Description of Artificial Sequence: Synthetic oligonucleotide
uaucgccucccuauguaaa

SEQ ID NO: 1046325 - RNA, 19 nt, Artificial Sequence
  Description of Artificial Sequence: Synthetic oligonucleotide
ugugugagugugugugugu

SEQ ID NO: 1046326 - RNA, 19 nt, Artificial Sequence
  Description of Artificial Sequence: Synthetic oligonucleotide
ugcacaugcguaggcauga

SEQ ID NO: 1046327 - RNA, 19 nt, Artificial Sequence
  Description of Artificial Sequence: Synthetic oligonucleotide
guuugggaaaguguaccug

SEQ ID NO: 1046328 - RNA, 19 nt, Artificial Sequence
  Description of Artificial Sequence: Synthetic oligonucleotide
caacaacuuaugauuaaaa

SEQ ID NO: 1046329 - RNA, 19 nt, Artificial Sequence
  Description of Artificial Sequence: Synthetic oligonucleotide
ggauaacaccugcaauugg

SEQ ID NO: 1046330 - RNA, 19 nt, Artificial Sequence
  Description of Artificial Sequence: Synthetic oligonucleotide
ugugugugagugugugugu

SEQ ID NO: 1046331 - RNA, 19 nt, Artificial Sequence
  Description of Artificial Sequence: Synthetic oligonucleotide
guuagguaagucaaaacau

SEQ ID NO: 1046332 - RNA, 19 nt, Artificial Sequence
  Description of Artificial Sequence: Synthetic oligonucleotide
gcaucuguagggucuuugg

SEQ ID NO: 1046333 - RNA, 19 nt, Artificial Sequence
  Description of Artificial Sequence: Synthetic oligonucleotide
aaagggaaguaaacuuuaa

SEQ ID NO: 1046334 - RNA, 19 nt, Artificial Sequence
  Description of Artificial Sequence: Synthetic oligonucleotide
cauucucaagggcuuucag

SEQ ID NO: 1046335 - RNA, 19 nt, Artificial Sequence
  Description of Artificial Sequence: Synthetic oligonucleotide
ucucauuaaauagcucuuu

SEQ ID NO: 1046336 - RNA, 19 nt, Artificial Sequence
  Description of Artificial Sequence: Synthetic oligonucleotide
gugagugugugugugugug

SEQ ID NO: 1046337 - RNA, 19 nt, Artificial Sequence
  Description of Artificial Sequence: Synthetic oligonucleotide
gugagagggauuagguacc

SEQ ID NO: 1046338 - RNA, 19 nt, Artificial Sequence
  Description of Artificial Sequence: Synthetic oligonucleotide
uuacgcugugggacaaaga

SEQ ID NO: 1046339 - RNA, 19 nt, Artificial Sequence
  Description of Artificial Sequence: Synthetic oligonucleotide
gugugugugugugagugug

SEQ ID NO: 1046340 - RNA, 19 nt, Artificial Sequence
  Description of Artificial Sequence: Synthetic oligonucleotide
auuagaggagugggugggg

SEQ ID NO: 1046341 - RNA, 19 nt, Artificial Sequence
  Description of Artificial Sequence: Synthetic oligonucleotide
ugugagugugugugugugu

SEQ ID NO: 1046342 - RNA, 19 nt, Artificial Sequence
  Description of Artificial Sequence: Synthetic oligonucleotide
uagauccugugguuuggga

SEQ ID NO: 1046343 - RNA, 19 nt, Artificial Sequence
  Description of Artificial Sequence: Synthetic oligonucleotide
gggugguccucucaguggg

SEQ ID NO: 1046344 - RNA, 19 nt, Artificial Sequence
  Description of Artificial Sequence: Synthetic oligonucleotide
uggggcagacuguuggacu

SEQ ID NO: 1046345 - RNA, 19 nt, Artificial Sequence
  Description of Artificial Sequence: Synthetic oligonucleotide
gaguaaaaccccaaaguau

SEQ ID NO: 1046346 - RNA, 19 nt, Artificial Sequence
  Description of Artificial Sequence: Synthetic oligonucleotide
ugugugugugugagugugu

SEQ ID NO: 1046347 - RNA, 19 nt, Artificial Sequence
  Description of Artificial Sequence: Synthetic oligonucleotide
gaacagagucguugggaca

SEQ ID NO: 1046348 - RNA, 19 nt, Artificial Sequence
  Description of Artificial Sequence: Synthetic oligonucleotide
acggggauaacaccugcaa

SEQ ID NO: 1046349 - RNA, 19 nt, Artificial Sequence
  Description of Artificial Sequence: Synthetic oligonucleotide
accuuaguucaacauuuua

SEQ ID NO: 1046350 - RNA, 19 nt, Artificial Sequence
  Description of Artificial Sequence: Synthetic oligonucleotide
ccuggguucacuugacugc

SEQ ID NO: 1046351 - RNA, 19 nt, Artificial Sequence
  Description of Artificial Sequence: Synthetic oligonucleotide
ugugugugugagugugugu

SEQ ID NO: 1046352 - RNA, 19 nt, Artificial Sequence
  Description of Artificial Sequence: Synthetic oligonucleotide
uuugggcuugggcggguug

SEQ ID NO: 1046353 - RNA, 19 nt, Artificial Sequence
  Description of Artificial Sequence: Synthetic oligonucleotide
ugugugugugugugugugu

SEQ ID NO: 1046354 - RNA, 19 nt, Artificial Sequence
  Description of Artificial Sequence: Synthetic oligonucleotide
ugugugugugugugagugu

SEQ ID NO: 1046355 - RNA, 19 nt, Artificial Sequence
  Description of Artificial Sequence: Synthetic oligonucleotide
uuaguuggcucuggcccag

SEQ ID NO: 1046356 - RNA, 19 nt, Artificial Sequence
  Description of Artificial Sequence: Synthetic oligonucleotide
gcagaugacaaugggcuag

SEQ ID NO: 1046357 - RNA, 19 nt, Artificial Sequence
  Description of Artificial Sequence: Synthetic oligonucleotide
aaggcugaauuuggccuug

SEQ ID NO: 1046358 - RNA, 19 nt, Artificial Sequence
  Description of Artificial Sequence: Synthetic oligonucleotide
ugcuagcuuuacuuucacu

SEQ ID NO: 1046359 - RNA, 19 nt, Artificial Sequence
  Description of Artificial Sequence: Synthetic oligonucleotide
auagcucuuuagaaaauua

SEQ ID NO: 1046360 - RNA, 19 nt, Artificial Sequence
  Description of Artificial Sequence: Synthetic oligonucleotide
ugagugugugugugugugu

SEQ ID NO: 1046361 - RNA, 19 nt, Artificial Sequence
  Description of Artificial Sequence: Synthetic oligonucleotide
agagcucaaguuaucugcu

SEQ ID NO: 1046362 - RNA, 19 nt, Artificial Sequence
  Description of Artificial Sequence: Synthetic oligonucleotide
cugaaagggaaguaaacuu

SEQ ID NO: 1046363 - RNA, 19 nt, Artificial Sequence
  Description of Artificial Sequence: Synthetic oligonucleotide
ugugugugugugugcacau

SEQ ID NO: 1046364 - RNA, 19 nt, Artificial Sequence
  Description of Artificial Sequence: Synthetic oligonucleotide
uuggauccaguagcauuag

SEQ ID NO: 1046365 - RNA, 19 nt, Artificial Sequence
  Description of Artificial Sequence: Synthetic oligonucleotide
gugugugugugugugugug

SEQ ID NO: 1046366 - RNA, 19 nt, Artificial Sequence
  Description of Artificial Sequence: Synthetic oligonucleotide
agugugugugugugugugu

SEQ ID NO: 1046367 - RNA, 19 nt, Artificial Sequence
  Description of Artificial Sequence: Synthetic oligonucleotide
auuugcggugauauugagu

SEQ ID NO: 1046368 - RNA, 19 nt, Artificial Sequence
  Description of Artificial Sequence: Synthetic oligonucleotide
acgcugugggacaaagagg

SEQ ID NO: 1046369 - RNA, 19 nt, Artificial Sequence
  Description of Artificial Sequence: Synthetic oligonucleotide
ugugugugugugugugagu

SEQ ID NO: 1046370 - RNA, 19 nt, Artificial Sequence
  Description of Artificial Sequence: Synthetic oligonucleotide
agggauuagguacccugau

SEQ ID NO: 1046371 - RNA, 19 nt, Artificial Sequence
  Description of Artificial Sequence: Synthetic oligonucleotide
gucaaaacauuuacugaaa

SEQ ID NO: 1046372 - RNA, 19 nt, Artificial Sequence
  Description of Artificial Sequence: Synthetic oligonucleotide
ccagacaacaccgauucug

SEQ ID NO: 1046373 - RNA, 19 nt, Artificial Sequence
  Description of Artificial Sequence: Synthetic oligonucleotide
ugugugugugugugugcac

SEQ ID NO: 1046374 - RNA, 19 nt, Artificial Sequence
  Description of Artificial Sequence: Synthetic oligonucleotide
gugugagugugugugugug

SEQ ID NO: 1046375 - RNA, 19 nt, Artificial Sequence
  Description of Artificial Sequence: Synthetic oligonucleotide
gugugugugugagugugug

SEQ ID NO: 1046376 - RNA, 19 nt, Artificial Sequence
  Description of Artificial Sequence: Synthetic oligonucleotide
augcguaggcaugacaaaa

SEQ ID NO: 1046377 - RNA, 19 nt, Artificial Sequence
  Description of Artificial Sequence: Synthetic oligonucleotide
uucaacauguggggacaca

SEQ ID NO: 1046378 - RNA, 19 nt, Artificial Sequence
  Description of Artificial Sequence: Synthetic oligonucleotide
aggugguauccucucaaua

SEQ ID NO: 1046379 - RNA, 19 nt, Artificial Sequence
  Description of Artificial Sequence: Synthetic oligonucleotide
acaggguggcuugaguuga

SEQ ID NO: 1046380 - RNA, 19 nt, Artificial Sequence
  Description of Artificial Sequence: Synthetic oligonucleotide
gagggauuagguacccuga

SEQ ID NO: 1046381 - RNA, 19 nt, Artificial Sequence
  Description of Artificial Sequence: Synthetic oligonucleotide
aucgccucccuauguaaaa

SEQ ID NO: 1046382 - RNA, 19 nt, Artificial Sequence
  Description of Artificial Sequence: Synthetic oligonucleotide
uggggagccguagauccug

SEQ ID NO: 1046383 - RNA, 19 nt, Artificial Sequence
  Description of Artificial Sequence: Synthetic oligonucleotide
guggacauccucaguugag

SEQ ID NO: 1046384 - RNA, 19 nt, Artificial Sequence
  Description of Artificial Sequence: Synthetic oligonucleotide
cuguucccaacagguacgg

SEQ ID NO: 1046385 - RNA, 19 nt, Artificial Sequence
  Description of Artificial Sequence: Synthetic oligonucleotide
auauugaguaaaaccccaa

SEQ ID NO: 1046386 - RNA, 19 nt, Artificial Sequence
  Description of Artificial Sequence: Synthetic oligonucleotide
gcuguucccaacagguacg

SEQ ID NO: 1046387 - RNA, 19 nt, Artificial Sequence
  Description of Artificial Sequence: Synthetic oligonucleotide
gagcuaucgccucccuaug

SEQ ID NO: 1046388 - RNA, 19 nt, Artificial Sequence
  Description of Artificial Sequence: Synthetic oligonucleotide
ggugguauccucucaauau

SEQ ID NO: 1046389 - RNA, 19 nt, Artificial Sequence
  Description of Artificial Sequence: Synthetic oligonucleotide
gggauuagguacccugaug

SEQ ID NO: 1046390 - RNA, 19 nt, Artificial Sequence
  Description of Artificial Sequence: Synthetic oligonucleotide
agguaagucaaaacauuua

SEQ ID NO: 1046391 - RNA, 19 nt, Artificial Sequence
  Description of Artificial Sequence: Synthetic oligonucleotide
gugugugagugugugugug

SEQ ID NO: 1046392 - RNA, 19 nt, Artificial Sequence
  Description of Artificial Sequence: Synthetic oligonucleotide
ccugagguaggaucacagg

SEQ ID NO: 1046393 - RNA, 19 nt, Artificial Sequence
  Description of Artificial Sequence: Synthetic oligonucleotide
gaacaggguggcuugaguu

SEQ ID NO: 1046394 - RNA, 19 nt, Artificial Sequence
  Description of Artificial Sequence: Synthetic oligonucleotide
guauccucucaauauguau

SEQ ID NO: 1046395 - RNA, 19 nt, Artificial Sequence
  Description of Artificial Sequence: Synthetic oligonucleotide
uagagcuaucgccucccua

SEQ ID NO: 1046396 - RNA, 19 nt, Artificial Sequence
  Description of Artificial Sequence: Synthetic oligonucleotide
ggagguuuuguuagcacca

SEQ ID NO: 1046397 - RNA, 19 nt, Artificial Sequence
  Description of Artificial Sequence: Synthetic oligonucleotide
uagguacccugaugggaac

SEQ ID NO: 1046398 - RNA, 19 nt, Artificial Sequence
  Description of Artificial Sequence: Synthetic oligonucleotide
cucaguugagacuuccagu

SEQ ID NO: 1046399 - RNA, 19 nt, Artificial Sequence
  Description of Artificial Sequence: Synthetic oligonucleotide
ucuuuggauccaguagcau

SEQ ID NO: 1046400 - RNA, 19 nt, Artificial Sequence
  Description of Artificial Sequence: Synthetic oligonucleotide
agcacugggugagagggau

SEQ ID NO: 1046401 - RNA, 19 nt, Artificial Sequence
  Description of Artificial Sequence: Synthetic oligonucleotide
cuuuggauccaguagcauu

SEQ ID NO: 1046402 - RNA, 19 nt, Artificial Sequence
  Description of Artificial Sequence: Synthetic oligonucleotide
ggguuguaaacucuacaaa

SEQ ID NO: 1046403 - RNA, 19 nt, Artificial Sequence
  Description of Artificial Sequence: Synthetic oligonucleotide
gugugugugugugugugca

SEQ ID NO: 1046404 - RNA, 19 nt, Artificial Sequence
  Description of Artificial Sequence: Synthetic oligonucleotide
auagagcuaucgccucccu

SEQ ID NO: 1046405 - RNA, 19 nt, Artificial Sequence
  Description of Artificial Sequence: Synthetic oligonucleotide
gugugugugugugugcaca

SEQ ID NO: 1046406 - RNA, 19 nt, Artificial Sequence
  Description of Artificial Sequence: Synthetic oligonucleotide
cuugucgagagcucaaguu

SEQ ID NO: 1046407 - RNA, 19 nt, Artificial Sequence
  Description of Artificial Sequence: Synthetic oligonucleotide
gaaggcugaauuuggccuu

SEQ ID NO: 1046408 - RNA, 19 nt, Artificial Sequence
  Description of Artificial Sequence: Synthetic oligonucleotide
ucccuugucgagagcucaa

SEQ ID NO: 1046409 - RNA, 19 nt, Artificial Sequence
  Description of Artificial Sequence: Synthetic oligonucleotide
caaaggugguauccucuca

SEQ ID NO: 1046410 - RNA, 19 nt, Artificial Sequence
  Description of Artificial Sequence: Synthetic oligonucleotide
uggggacacagggacugug

SEQ ID NO: 1046411 - RNA, 19 nt, Artificial Sequence
  Description of Artificial Sequence: Synthetic oligonucleotide
cuaucgccucccuauguaa

SEQ ID NO: 1046412 - RNA, 19 nt, Artificial Sequence
  Description of Artificial Sequence: Synthetic oligonucleotide
ccauaaguuucaaaggugu

SEQ ID NO: 1046413 - RNA, 19 nt, Artificial Sequence
  Description of Artificial Sequence: Synthetic oligonucleotide
gguacccugaugggaacag

SEQ ID NO: 1046414 - RNA, 19 nt, Artificial Sequence
  Description of Artificial Sequence: Synthetic oligonucleotide
uugcggugauauugaguaa

SEQ ID NO: 1046415 - RNA, 19 nt, Artificial Sequence
  Description of Artificial Sequence: Synthetic oligonucleotide
ggggauaacaccugcaauu

SEQ ID NO: 1046416 - RNA, 19 nt, Artificial Sequence
  Description of Artificial Sequence: Synthetic oligonucleotide
uguucccaacagguacggc

SEQ ID NO: 1046417 - RNA, 19 nt, Artificial Sequence
  Description of Artificial Sequence: Synthetic oligonucleotide
gguuggggagaccauaagu

SEQ ID NO: 1046418 - RNA, 19 nt, Artificial Sequence
  Description of Artificial Sequence: Synthetic oligonucleotide
caugcguaggcaugacaaa

SEQ ID NO: 1046419 - RNA, 19 nt, Artificial Sequence
  Description of Artificial Sequence: Synthetic oligonucleotide
guacggcugccacagaggu

SEQ ID NO: 1046420 - RNA, 19 nt, Artificial Sequence
  Description of Artificial Sequence: Synthetic oligonucleotide
gcuggcagacaucugcaca

SEQ ID NO: 1046421 - RNA, 19 nt, Artificial Sequence
  Description of Artificial Sequence: Synthetic oligonucleotide
guaggaucacaggcacugc

SEQ ID NO: 1046422 - RNA, 19 nt, Artificial Sequence
  Description of Artificial Sequence: Synthetic oligonucleotide
gugcacaugcguaggcaug

SEQ ID NO: 1046423 - RNA, 19 nt, Artificial Sequence
  Description of Artificial Sequence: Synthetic oligonucleotide
agccgggcuguucccaaca

SEQ ID NO: 1046424 - RNA, 19 nt, Artificial Sequence
  Description of Artificial Sequence: Synthetic oligonucleotide
gguacggaagaaacuuuca

SEQ ID NO: 1046425 - RNA, 19 nt, Artificial Sequence
  Description of Artificial Sequence: Synthetic oligonucleotide
cagcauuuccuuugugcaa

SEQ ID NO: 1046426 - RNA, 19 nt, Artificial Sequence
  Description of Artificial Sequence: Synthetic oligonucleotide
cuguguuagguaagucaaa

SEQ ID NO: 1046427 - RNA, 19 nt, Artificial Sequence
  Description of Artificial Sequence: Synthetic oligonucleotide
aucuggggugguccucuca

SEQ ID NO: 1046428 - RNA, 19 nt, Artificial Sequence
  Description of Artificial Sequence: Synthetic oligonucleotide
ggggcagacuguuggacuc

SEQ ID NO: 1046429 - RNA, 19 nt, Artificial Sequence
  Description of Artificial Sequence: Synthetic oligonucleotide
ggguacggaagaaacuuuc

SEQ ID NO: 1046430 - RNA, 19 nt, Artificial Sequence
  Description of Artificial Sequence: Synthetic oligonucleotide
agagucguugggacauucu

SEQ ID NO: 1046431 - RNA, 19 nt, Artificial Sequence
  Description of Artificial Sequence: Synthetic oligonucleotide
aggugcuguguuagguaag

SEQ ID NO: 1046432 - RNA, 19 nt, Artificial Sequence
  Description of Artificial Sequence: Synthetic oligonucleotide
uggguucacuugacugcuc

SEQ ID NO: 1046433 - RNA, 19 nt, Artificial Sequence
  Description of Artificial Sequence: Synthetic oligonucleotide
aguuuacgcugugggacaa

SEQ ID NO: 1046434 - RNA, 19 nt, Artificial Sequence
  Description of Artificial Sequence: Synthetic oligonucleotide
cacaugcguaggcaugaca

SEQ ID NO: 1046435 - RNA, 19 nt, Artificial Sequence
  Description of Artificial Sequence: Synthetic oligonucleotide
agccguagauccugugguu

SEQ ID NO: 1046436 - RNA, 19 nt, Artificial Sequence
  Description of Artificial Sequence: Synthetic oligonucleotide
ccccuuagaaauuaaugua

SEQ ID NO: 1046437 - RNA, 19 nt, Artificial Sequence
  Description of Artificial Sequence: Synthetic oligonucleotide
cacggggauaacaccugca

SEQ ID NO: 1046438 - RNA, 19 nt, Artificial Sequence
  Description of Artificial Sequence: Synthetic oligonucleotide
uagcaccaucgaaauccau

SEQ ID NO: 1046439 - RNA, 19 nt, Artificial Sequence
  Description of Artificial Sequence: Synthetic oligonucleotide
uggcccucccuugucgaga

SEQ ID NO: 1046440 - RNA, 19 nt, Artificial Sequence
  Description of Artificial Sequence: Synthetic oligonucleotide
ugggcggguugcagguaga

SEQ ID NO: 1046441 - RNA, 19 nt, Artificial Sequence
  Description of Artificial Sequence: Synthetic oligonucleotide
gugugugugugugcacaug

SEQ ID NO: 1046442 - RNA, 19 nt, Artificial Sequence
  Description of Artificial Sequence: Synthetic oligonucleotide
ggacuggcgagucauggcu

SEQ ID NO: 1046443 - RNA, 19 nt, Artificial Sequence
  Description of Artificial Sequence: Synthetic oligonucleotide
gcaauuggggagccguaga

SEQ ID NO: 1046444 - RNA, 19 nt, Artificial Sequence
  Description of Artificial Sequence: Synthetic oligonucleotide
ggugucagcauuugggcuu

SEQ ID NO: 1046445 - RNA, 19 nt, Artificial Sequence
  Description of Artificial Sequence: Synthetic oligonucleotide
cagagucguugggacauuc

SEQ ID NO: 1046446 - RNA, 19 nt, Artificial Sequence
  Description of Artificial Sequence: Synthetic oligonucleotide
cuugauugaggaggguugu

SEQ ID NO: 1046447 - RNA, 19 nt, Artificial Sequence
  Description of Artificial Sequence: Synthetic oligonucleotide
ccguagauccugugguuug

SEQ ID NO: 1046448 - RNA, 19 nt, Artificial Sequence
  Description of Artificial Sequence: Synthetic oligonucleotide
caaaugugugugugugugu

SEQ ID NO: 1046449 - RNA, 19 nt, Artificial Sequence
  Description of Artificial Sequence: Synthetic oligonucleotide
gcuugaguugagagccggg

SEQ ID NO: 1046450 - RNA, 19 nt, Artificial Sequence
  Description of Artificial Sequence: Synthetic oligonucleotide
ugucagcauuugggcuugg

SEQ ID NO: 1046451 - RNA, 19 nt, Artificial Sequence
  Description of Artificial Sequence: Synthetic oligonucleotide
cauccucaguugagacuuc

SEQ ID NO: 1046452 - RNA, 19 nt, Artificial Sequence
  Description of Artificial Sequence: Synthetic oligonucleotide
gcaggguaaaguuuacaau

SEQ ID NO: 1046453 - RNA, 19 nt, Artificial Sequence
  Description of Artificial Sequence: Synthetic oligonucleotide
ggaaaguguaccugaguuu

SEQ ID NO: 1046454 - RNA, 19 nt, Artificial Sequence
  Description of Artificial Sequence: Synthetic oligonucleotide
ggcccucccuugucgagag

SEQ ID NO: 1046455 - RNA, 19 nt, Artificial Sequence
  Description of Artificial Sequence: Synthetic oligonucleotide
ccugugguuugggaaagug

SEQ ID NO: 1046456 - RNA, 19 nt, Artificial Sequence
  Description of Artificial Sequence: Synthetic oligonucleotide
accugcaauuggggagccg

SEQ ID NO: 1046457 - RNA, 19 nt, Artificial Sequence
  Description of Artificial Sequence: Synthetic oligonucleotide
gucgagagcucaaguuauc

SEQ ID NO: 1046458 - RNA, 19 nt, Artificial Sequence
  Description of Artificial Sequence: Synthetic oligonucleotide
cuggaugagggagggugca

SEQ ID NO: 1046459 - RNA, 19 nt, Artificial Sequence
  Description of Artificial Sequence: Synthetic oligonucleotide
ggcuugguugguccaccug

SEQ ID NO: 1046460 - RNA, 19 nt, Artificial Sequence
  Description of Artificial Sequence: Synthetic oligonucleotide
gagccgggcuguucccaac

SEQ ID NO: 1046461 - RNA, 19 nt, Artificial Sequence
  Description of Artificial Sequence: Synthetic oligonucleotide
ccaucuucugucaaucagu

SEQ ID NO: 1046462 - RNA, 19 nt, Artificial Sequence
  Description of Artificial Sequence: Synthetic oligonucleotide
gcuaucgccucccuaugua

SEQ ID NO: 1046463 - RNA, 19 nt, Artificial Sequence
  Description of Artificial Sequence: Synthetic oligonucleotide
gcguaggcaugacaaaaua

SEQ ID NO: 1046464 - RNA, 19 nt, Artificial Sequence
  Description of Artificial Sequence: Synthetic oligonucleotide
agguaggaucacaggcacu

SEQ ID NO: 1046465 - RNA, 19 nt, Artificial Sequence
  Description of Artificial Sequence: Synthetic oligonucleotide
ggcagacuguuggacucag

SEQ ID NO: 1046466 - RNA, 19 nt, Artificial Sequence
  Description of Artificial Sequence: Synthetic oligonucleotide
ggguucacuugacugcucu

SEQ ID NO: 1046467 - RNA, 19 nt, Artificial Sequence
  Description of Artificial Sequence: Synthetic oligonucleotide
gcgagucauggcugguggc

SEQ ID NO: 1046468 - RNA, 19 nt, Artificial Sequence
  Description of Artificial Sequence: Synthetic oligonucleotide
ggccaugggguggugucag

SEQ ID NO: 1046469 - RNA, 19 nt, Artificial Sequence
  Description of Artificial Sequence: Synthetic oligonucleotide
gguauccucucaauaugua

SEQ ID NO: 1046470 - RNA, 19 nt, Artificial Sequence
  Description of Artificial Sequence: Synthetic oligonucleotide
cguagauccugugguuugg

SEQ ID NO: 1046471 - RNA, 19 nt, Artificial Sequence
  Description of Artificial Sequence: Synthetic oligonucleotide
gagcucaaguuaucugcuu

SEQ ID NO: 1046472 - RNA, 19 nt, Artificial Sequence
  Description of Artificial Sequence: Synthetic oligonucleotide
caccugcaauuggggagcc

SEQ ID NO: 1046473 - RNA, 19 nt, Artificial Sequence
  Description of Artificial Sequence: Synthetic oligonucleotide
cugugggacaaagaggguu

SEQ ID NO: 1046474 - RNA, 19 nt, Artificial Sequence
  Description of Artificial Sequence: Synthetic oligonucleotide
caucuggggugguccucuc

SEQ ID NO: 1046475 - RNA, 19 nt, Artificial Sequence
  Description of Artificial Sequence: Synthetic oligonucleotide
ggcggguugcagguagaug

SEQ ID NO: 1046476 - RNA, 19 nt, Artificial Sequence
  Description of Artificial Sequence: Synthetic oligonucleotide
gccacggggauaacaccug

SEQ ID NO: 1046477 - RNA, 19 nt, Artificial Sequence
  Description of Artificial Sequence: Synthetic oligonucleotide
caccaucgaaauccaugua

SEQ ID NO: 1046478 - RNA, 19 nt, Artificial Sequence
  Description of Artificial Sequence: Synthetic oligonucleotide
caccaacugggaaccuuua

SEQ ID NO: 1046479 - RNA, 19 nt, Artificial Sequence
  Description of Artificial Sequence: Synthetic oligonucleotide
aggcugaauuuggccuugu

SEQ ID NO: 1046480 - RNA, 19 nt, Artificial Sequence
  Description of Artificial Sequence: Synthetic oligonucleotide
ccuuuaggugucacaggaa

SEQ ID NO: 1046481 - RNA, 19 nt, Artificial Sequence
  Description of Artificial Sequence: Synthetic oligonucleotide
cggugauauugaguaaaac

SEQ ID NO: 1046482 - RNA, 19 nt, Artificial Sequence
  Description of Artificial Sequence: Synthetic oligonucleotide
gcuugggcggguugcaggu

SEQ ID NO: 1046483 - RNA, 19 nt, Artificial Sequence
  Description of Artificial Sequence: Synthetic oligonucleotide
ggguugcagguagauggca

SEQ ID NO: 1046484 - RNA, 19 nt, Artificial Sequence
  Description of Artificial Sequence: Synthetic oligonucleotide
guuuacgcugugggacaaa

SEQ ID NO: 1046485 - RNA, 19 nt, Artificial Sequence
  Description of Artificial Sequence: Synthetic oligonucleotide
cccuugucgagagcucaag

SEQ ID NO: 1046486 - RNA, 19 nt, Artificial Sequence
  Description of Artificial Sequence: Synthetic oligonucleotide
gcggugauauugaguaaaa

SEQ ID NO: 1046487 - RNA, 19 nt, Artificial Sequence
  Description of Artificial Sequence: Synthetic oligonucleotide
cccaacagguacggcugcc

SEQ ID NO: 1046488 - RNA, 19 nt, Artificial Sequence
  Description of Artificial Sequence: Synthetic oligonucleotide
acagagucguugggacauu

SEQ ID NO: 1046489 - RNA, 19 nt, Artificial Sequence
  Description of Artificial Sequence: Synthetic oligonucleotide
cguaggcaugacaaaauau

SEQ ID NO: 1046490 - RNA, 19 nt, Artificial Sequence
  Description of Artificial Sequence: Synthetic oligonucleotide
ccugcaauuggggagccgu

SEQ ID NO: 1046491 - RNA, 19 nt, Artificial Sequence
  Description of Artificial Sequence: Synthetic oligonucleotide
cccaagugcugcaggguaa

SEQ ID NO: 1046492 - RNA, 19 nt, Artificial Sequence
  Description of Artificial Sequence: Synthetic oligonucleotide
gucccaagugcugcagggu

SEQ ID NO: 1046493 - RNA, 19 nt, Artificial Sequence
  Description of Artificial Sequence: Synthetic oligonucleotide
gccaugggguggugucagc

SEQ ID NO: 1046494 - RNA, 19 nt, Artificial Sequence
  Description of Artificial Sequence: Synthetic oligonucleotide
ccaacagguacggcugcca

SEQ ID NO: 1046495 - RNA, 19 nt, Artificial Sequence
  Description of Artificial Sequence: Synthetic oligonucleotide
gcacaugcguaggcaugac

SEQ ID NO: 1046496 - RNA, 19 nt, Artificial Sequence
  Description of Artificial Sequence: Synthetic oligonucleotide
ccagcaacugauuguccau

SEQ ID NO: 1046497 - RNA, 19 nt, Artificial Sequence
  Description of Artificial Sequence: Synthetic oligonucleotide
gaggggccagugguuugua

SEQ ID NO: 1046498 - RNA, 19 nt, Artificial Sequence
  Description of Artificial Sequence: Synthetic oligonucleotide
gggccugagguaggaucac

SEQ ID NO: 1046499 - RNA, 19 nt, Artificial Sequence
  Description of Artificial Sequence: Synthetic oligonucleotide
ggcccaggacuggcgaguc

SEQ ID NO: 1046500 - RNA, 19 nt, Artificial Sequence
  Description of Artificial Sequence: Synthetic oligonucleotide
gccguagauccugugguuu

SEQ ID NO: 1046501 - RNA, 19 nt, Artificial Sequence
  Description of Artificial Sequence: Synthetic oligonucleotide
gggguacggaagaaacuuu

SEQ ID NO: 1046502 - RNA, 19 nt, Artificial Sequence
  Description of Artificial Sequence: Synthetic oligonucleotide
gccagacaacaccgauucu

SEQ ID NO: 1046503 - RNA, 19 nt, Artificial Sequence
  Description of Artificial Sequence: Synthetic oligonucleotide
cggggauaacaccugcaau

SEQ ID NO: 1046504 - RNA, 19 nt, Artificial Sequence
  Description of Artificial Sequence: Synthetic oligonucleotide
ggggagccguagauccugu

SEQ ID NO: 1046505 - RNA, 19 nt, Artificial Sequence
  Description of Artificial Sequence: Synthetic oligonucleotide
auucuaauaauucaaugcc

SEQ ID NO: 1046506 - RNA, 19 nt, Artificial Sequence
  Description of Artificial Sequence: Synthetic oligonucleotide
aauucaauaccccucuuuc

SEQ ID NO: 1046507 - RNA, 19 nt, Artificial Sequence
  Description of Artificial Sequence: Synthetic oligonucleotide
uguggcauauucuaaagcg

SEQ ID NO: 1046508 - RNA, 19 nt, Artificial Sequence
  Description of Artificial Sequence: Synthetic oligonucleotide
uguaguaagaaguacauaa

SEQ ID NO: 1046509 - RNA, 19 nt, Artificial Sequence
  Description of Artificial Sequence: Synthetic oligonucleotide
aaucauuaccuacuuaguc

SEQ ID NO: 1046510 - RNA, 19 nt, Artificial Sequence
  Description of Artificial Sequence: Synthetic oligonucleotide
uucuaauuaaugcacaaug

SEQ ID NO: 1046511 - RNA, 19 nt, Artificial Sequence
  Description of Artificial Sequence: Synthetic oligonucleotide
ugugaaaucagguagugca

SEQ ID NO: 1046512 - RNA, 19 nt, Artificial Sequence
  Description of Artificial Sequence: Synthetic oligonucleotide
cauucuaauaauucaaugc

SEQ ID NO: 1046513 - RNA, 19 nt, Artificial Sequence
  Description of Artificial Sequence: Synthetic oligonucleotide
aauaauucaaugcccaaga

SEQ ID NO: 1046514 - RNA, 19 nt, Artificial Sequence
  Description of Artificial Sequence: Synthetic oligonucleotide
ugaugaauauuuuaacagg

SEQ ID NO: 1046515 - RNA, 19 nt, Artificial Sequence
  Description of Artificial Sequence: Synthetic oligonucleotide
ugaaugaagguucaacagg

SEQ ID NO: 1046516 - RNA, 19 nt, Artificial Sequence
  Description of Artificial Sequence: Synthetic oligonucleotide
agaaguacauaaaaguucc

SEQ ID NO: 1046517 - RNA, 19 nt, Artificial Sequence
  Description of Artificial Sequence: Synthetic oligonucleotide
aaugaauagguuauuaaug

SEQ ID NO: 1046518 - RNA, 19 nt, Artificial Sequence
  Description of Artificial Sequence: Synthetic oligonucleotide
ccaguuuugacuaagaugc

SEQ ID NO: 1046519 - RNA, 19 nt, Artificial Sequence
  Description of Artificial Sequence: Synthetic oligonucleotide
uuuaacuauaaaauuucca

SEQ ID NO: 1046520 - RNA, 19 nt, Artificial Sequence
  Description of Artificial Sequence: Synthetic oligonucleotide
uacaacuguaguaagaagu

SEQ ID NO: 1046521 - RNA, 19 nt, Artificial Sequence
  Description of Artificial Sequence: Synthetic oligonucleotide
aaauuagucaucucuggcu

SEQ ID NO: 1046522 - RNA, 19 nt, Artificial Sequence
  Description of Artificial Sequence: Synthetic oligonucleotide
augaugcacaauuacauuc

SEQ ID NO: 1046523 - RNA, 19 nt, Artificial Sequence
  Description of Artificial Sequence: Synthetic oligonucleotide
guggauagcuaucagaggg

SEQ ID NO: 1046524 - RNA, 19 nt, Artificial Sequence
  Description of Artificial Sequence: Synthetic oligonucleotide
ucuaauuaaugcacaauga

SEQ ID NO: 1046525 - RNA, 19 nt, Artificial Sequence
  Description of Artificial Sequence: Synthetic oligonucleotide
ucuaauuaaaacaucugua

SEQ ID NO: 1046526 - RNA, 19 nt, Artificial Sequence
  Description of Artificial Sequence: Synthetic oligonucleotide
uggguuuaacauaagaaga

SEQ ID NO: 1046527 - RNA, 19 nt, Artificial Sequence
  Description of Artificial Sequence: Synthetic oligonucleotide
aagugagaaccucugcuac

SEQ ID NO: 1046528 - RNA, 19 nt, Artificial Sequence
  Description of Artificial Sequence: Synthetic oligonucleotide
aaguuaaguagggaggugg

SEQ ID NO: 1046529 - RNA, 19 nt, Artificial Sequence
  Description of Artificial Sequence: Synthetic oligonucleotide
ucuaaagcgguuacaaaug

SEQ ID NO: 1046530 - RNA, 19 nt, Artificial Sequence
  Description of Artificial Sequence: Synthetic oligonucleotide
auuuuaacaggaauggcac

SEQ ID NO: 1046531 - RNA, 19 nt, Artificial Sequence
  Description of Artificial Sequence: Synthetic oligonucleotide
uucuaaauuuaaauuaguc

SEQ ID NO: 1046532 - RNA, 19 nt, Artificial Sequence
  Description of Artificial Sequence: Synthetic oligonucleotide
uguaauucaauaccccucu

SEQ ID NO: 1046533 - RNA, 19 nt, Artificial Sequence
  Description of Artificial Sequence: Synthetic oligonucleotide
aaucagguagugcacgguc

SEQ ID NO: 1046534 - RNA, 19 nt, Artificial Sequence
  Description of Artificial Sequence: Synthetic oligonucleotide
aauaggucuugcuugcucu

SEQ ID NO: 1046535 - RNA, 19 nt, Artificial Sequence
  Description of Artificial Sequence: Synthetic oligonucleotide
uccaagacggagcugaucu

SEQ ID NO: 1046536 - RNA, 19 nt, Artificial Sequence
  Description of Artificial Sequence: Synthetic oligonucleotide
ugugaagugugccauugag

SEQ ID NO: 1046537 - RNA, 19 nt, Artificial Sequence
  Description of Artificial Sequence: Synthetic oligonucleotide
ugcucuacuaaguuucggg

SEQ ID NO: 1046538 - RNA, 19 nt, Artificial Sequence
  Description of Artificial Sequence: Synthetic oligonucleotide
agcucauuaacauuagugu

SEQ ID NO: 1046539 - RNA, 19 nt, Artificial Sequence
  Description of Artificial Sequence: Synthetic oligonucleotide
augaaugaagguucaacag

SEQ ID NO: 1046540 - RNA, 19 nt, Artificial Sequence
  Description of Artificial Sequence: Synthetic oligonucleotide
ucuacuaaguuucgggcug

SEQ ID NO: 1046541 - RNA, 19 nt, Artificial Sequence
  Description of Artificial Sequence: Synthetic oligonucleotide
uuuuacaacuguaguaaga

SEQ ID NO: 1046542 - RNA, 19 nt, Artificial Sequence
  Description of Artificial Sequence: Synthetic oligonucleotide
aguaagaaguacauaaaag

SEQ ID NO: 1046543 - RNA, 19 nt, Artificial Sequence
  Description of Artificial Sequence: Synthetic oligonucleotide
ucucuaaacaagcaucaga

SEQ ID NO: 1046544 - RNA, 19 nt, Artificial Sequence
  Description of Artificial Sequence: Synthetic oligonucleotide
uauuaauggaaauauuauu

SEQ ID NO: 1046545 - RNA, 19 nt, Artificial Sequence
  Description of Artificial Sequence: Synthetic oligonucleotide
ugucuaauuaaaacaucug

SEQ ID NO: 1046546 - RNA, 19 nt, Artificial Sequence
  Description of Artificial Sequence: Synthetic oligonucleotide
aguuuugacuaagaugccc

SEQ ID NO: 1046547 - RNA, 19 nt, Artificial Sequence
  Description of Artificial Sequence: Synthetic oligonucleotide
ugaacugggcaucucacug

SEQ ID NO: 1046548 - RNA, 19 nt, Artificial Sequence
  Description of Artificial Sequence: Synthetic oligonucleotide
cuggcuguaauucaauacc

SEQ ID NO: 1046549 - RNA, 19 nt, Artificial Sequence
  Description of Artificial Sequence: Synthetic oligonucleotide
uagugcacggucaucaacc

SEQ ID NO: 1046550 - RNA, 19 nt, Artificial Sequence
  Description of Artificial Sequence: Synthetic oligonucleotide
aaauucggguucuaaauuu

SEQ ID NO: 1046551 - RNA, 19 nt, Artificial Sequence
  Description of Artificial Sequence: Synthetic oligonucleotide
ucgcaaguuaaguagggag

SEQ ID NO: 1046552 - RNA, 19 nt, Artificial Sequence
  Description of Artificial Sequence: Synthetic oligonucleotide
aauuagucaucucuggcua

SEQ ID NO: 1046553 - RNA, 19 nt, Artificial Sequence
  Description of Artificial Sequence: Synthetic oligonucleotide
ucuuucuaauuaaugcaca

SEQ ID NO: 1046554 - RNA, 19 nt, Artificial Sequence
  Description of Artificial Sequence: Synthetic oligonucleotide
ugcaaugaugcacaauuac

SEQ ID NO: 1046555 - RNA, 19 nt, Artificial Sequence
  Description of Artificial Sequence: Synthetic oligonucleotide
guaagaaguacauaaaagu

SEQ ID NO: 1046556 - RNA, 19 nt, Artificial Sequence
  Description of Artificial Sequence: Synthetic oligonucleotide
aagcgguuacaaauggucc

SEQ ID NO: 1046557 - RNA, 19 nt, Artificial Sequence
  Description of Artificial Sequence: Synthetic oligonucleotide
aaagagaagugagaaccuc

SEQ ID NO: 1046558 - RNA, 19 nt, Artificial Sequence
  Description of Artificial Sequence: Synthetic oligonucleotide
gguaaugaaaauguucugg

SEQ ID NO: 1046559 - RNA, 19 nt, Artificial Sequence
  Description of Artificial Sequence: Synthetic oligonucleotide
ugugccucaauaaggugag

SEQ ID NO: 1046560 - RNA, 19 nt, Artificial Sequence
  Description of Artificial Sequence: Synthetic oligonucleotide
acauaagaagaauaaucca

SEQ ID NO: 1046561 - RNA, 19 nt, Artificial Sequence
  Description of Artificial Sequence: Synthetic oligonucleotide
ugagaucuaccaaaacagc

SEQ ID NO: 1046562 - RNA, 19 nt, Artificial Sequence
  Description of Artificial Sequence: Synthetic oligonucleotide
ucauugaauaucagcagaa

SEQ ID NO: 1046563 - RNA, 19 nt, Artificial Sequence
  Description of Artificial Sequence: Synthetic oligonucleotide
ugaugcacaauuacauucu

SEQ ID NO: 1046564 - RNA, 19 nt, Artificial Sequence
  Description of Artificial Sequence: Synthetic oligonucleotide
gaagguucaacaggguugg

SEQ ID NO: 1046565 - RNA, 19 nt, Artificial Sequence
  Description of Artificial Sequence: Synthetic oligonucleotide
cuaaagcgguuacaaaugg

SEQ ID NO: 1046566 - RNA, 19 nt, Artificial Sequence
  Description of Artificial Sequence: Synthetic oligonucleotide
uaaugaaaauguucuggug

SEQ ID NO: 1046567 - RNA, 19 nt, Artificial Sequence
  Description of Artificial Sequence: Synthetic oligonucleotide
ugcacggucaucaaccaac

SEQ ID NO: 1046568 - RNA, 19 nt, Artificial Sequence
  Description of Artificial Sequence: Synthetic oligonucleotide
uggauagcuaucagagggg

SEQ ID NO: 1046569 - RNA, 19 nt, Artificial Sequence
  Description of Artificial Sequence: Synthetic oligonucleotide
uaucagaggggcuccaucc

SEQ ID NO: 1046570 - RNA, 19 nt, Artificial Sequence
  Description of Artificial Sequence: Synthetic oligonucleotide
acaaaagagauuagccagc

SEQ ID NO: 1046571 - RNA, 19 nt, Artificial Sequence
  Description of Artificial Sequence: Synthetic oligonucleotide
uucaaugugaagugugcca

SEQ ID NO: 1046572 - RNA, 19 nt, Artificial Sequence
  Description of Artificial Sequence: Synthetic oligonucleotide
cagcuuuuaaugcacggcg

SEQ ID NO: 1046573 - RNA, 19 nt, Artificial Sequence
  Description of Artificial Sequence: Synthetic oligonucleotide
gcaaagagaagugagaacc

SEQ ID NO: 1046574 - RNA, 19 nt, Artificial Sequence
  Description of Artificial Sequence: Synthetic oligonucleotide
aaugugaagugugccauug

SEQ ID NO: 1046575 - RNA, 19 nt, Artificial Sequence
  Description of Artificial Sequence: Synthetic oligonucleotide
ucucgcaaguuaaguaggg

SEQ ID NO: 1046576 - RNA, 19 nt, Artificial Sequence
  Description of Artificial Sequence: Synthetic oligonucleotide
aaaagagauuagccagcuc

SEQ ID NO: 1046577 - RNA, 19 nt, Artificial Sequence
  Description of Artificial Sequence: Synthetic oligonucleotide
auaauccaggcgccgagac

SEQ ID NO: 1046578 - RNA, 19 nt, Artificial Sequence
  Description of Artificial Sequence: Synthetic oligonucleotide
uggcuguaauucaauaccc

SEQ ID NO: 1046579 - RNA, 19 nt, Artificial Sequence
  Description of Artificial Sequence: Synthetic oligonucleotide
uaauaccuggccuugugga

SEQ ID NO: 1046580 - RNA, 19 nt, Artificial Sequence
  Description of Artificial Sequence: Synthetic oligonucleotide
uuuccaauaggucuugcuu

SEQ ID NO: 1046581 - RNA, 19 nt, Artificial Sequence
  Description of Artificial Sequence: Synthetic oligonucleotide
uguggauagcuaucagagg

SEQ ID NO: 1046582 - RNA, 19 nt, Artificial Sequence
  Description of Artificial Sequence: Synthetic oligonucleotide
uggcauauucuaaagcggu

SEQ ID NO: 1046583 - RNA, 19 nt, Artificial Sequence
  Description of Artificial Sequence: Synthetic oligonucleotide
aaaaucucggcucucccuu

SEQ ID NO: 1046584 - RNA, 19 nt, Artificial Sequence
  Description of Artificial Sequence: Synthetic oligonucleotide
aauccaggcgccgagacga

SEQ ID NO: 1046585 - RNA, 19 nt, Artificial Sequence
  Description of Artificial Sequence: Synthetic oligonucleotide
aaacaacuguuacacagua

SEQ ID NO: 1046586 - RNA, 19 nt, Artificial Sequence
  Description of Artificial Sequence: Synthetic oligonucleotide
aagaauaauccaggcgccg

SEQ ID NO: 1046587 - RNA, 19 nt, Artificial Sequence
  Description of Artificial Sequence: Synthetic oligonucleotide
uguaauaccuggccuugug

SEQ ID NO: 1046588 - RNA, 19 nt, Artificial Sequence
  Description of Artificial Sequence: Synthetic oligonucleotide
ucggguucuaaauuuaaau

SEQ ID NO: 1046589 - RNA, 19 nt, Artificial Sequence
  Description of Artificial Sequence: Synthetic oligonucleotide
ucugcuacuccacucccgc

SEQ ID NO: 1046590 - RNA, 19 nt, Artificial Sequence
  Description of Artificial Sequence: Synthetic oligonucleotide
uaccaaaacagcuuuuaau

SEQ ID NO: 1046591 - RNA, 19 nt, Artificial Sequence
  Description of Artificial Sequence: Synthetic oligonucleotide
ucggauuagcacagcaugc

SEQ ID NO: 1046592 - RNA, 19 nt, Artificial Sequence
  Description of Artificial Sequence: Synthetic oligonucleotide
uuggguggguuuaacauaa

SEQ ID NO: 1046593 - RNA, 19 nt, Artificial Sequence
  Description of Artificial Sequence: Synthetic oligonucleotide
agugugugccucaauaagg

SEQ ID NO: 1046594 - RNA, 19 nt, Artificial Sequence
  Description of Artificial Sequence: Synthetic oligonucleotide
augucuaauuaaaacaucu

SEQ ID NO: 1046595 - RNA, 19 nt, Artificial Sequence
  Description of Artificial Sequence: Synthetic oligonucleotide
gaaaauguucuggugccag

SEQ ID NO: 1046596 - RNA, 19 nt, Artificial Sequence
  Description of Artificial Sequence: Synthetic oligonucleotide
aacauuagugugugccuca

SEQ ID NO: 1046597 - RNA, 19 nt, Artificial Sequence
  Description of Artificial Sequence: Synthetic oligonucleotide
acggagcugaucucuaaac

SEQ ID NO: 1046598 - RNA, 19 nt, Artificial Sequence
  Description of Artificial Sequence: Synthetic oligonucleotide
uccaauaggucuugcuugc

SEQ ID NO: 1046599 - RNA, 19 nt, Artificial Sequence
  Description of Artificial Sequence: Synthetic oligonucleotide
agcugaucucuaaacaagc

SEQ ID NO: 1046600 - RNA, 19 nt, Artificial Sequence
  Description of Artificial Sequence: Synthetic oligonucleotide
aaacaagcaucagagccug

SEQ ID NO: 1046601 - RNA, 19 nt, Artificial Sequence
  Description of Artificial Sequence: Synthetic oligonucleotide
ucugcucuacuaaguuucg

SEQ ID NO: 1046602 - RNA, 19 nt, Artificial Sequence
  Description of Artificial Sequence: Synthetic oligonucleotide
cuaauuaaugcacaaugaa

SEQ ID NO: 1046603 - RNA, 19 nt, Artificial Sequence
  Description of Artificial Sequence: Synthetic oligonucleotide
uuuugacuaagaugcccag

SEQ ID NO: 1046604 - RNA, 19 nt, Artificial Sequence
  Description of Artificial Sequence: Synthetic oligonucleotide
uuguacuccugugaaauca

SEQ ID NO: 1046605 - RNA, 19 nt, Artificial Sequence
  Description of Artificial Sequence: Synthetic oligonucleotide
uugcauucuacuuggcucu

SEQ ID NO: 1046606 - RNA, 19 nt, Artificial Sequence
  Description of Artificial Sequence: Synthetic oligonucleotide
aucaaccaacagcaugggc

SEQ ID NO: 1046607 - RNA, 19 nt, Artificial Sequence
  Description of Artificial Sequence: Synthetic oligonucleotide
cucggauuagcacagcaug

SEQ ID NO: 1046608 - RNA, 19 nt, Artificial Sequence
  Description of Artificial Sequence: Synthetic oligonucleotide
gacgagaucucauuuuaca

SEQ ID NO: 1046609 - RNA, 19 nt, Artificial Sequence
  Description of Artificial Sequence: Synthetic oligonucleotide
uucagccuuuccaauaggu

SEQ ID NO: 1046610 - RNA, 19 nt, Artificial Sequence
  Description of Artificial Sequence: Synthetic oligonucleotide
gaauaauccaggcgccgag

SEQ ID NO: 1046611 - RNA, 19 nt, Artificial Sequence
  Description of Artificial Sequence: Synthetic oligonucleotide
aauagguaucugcaaugaa

SEQ ID NO: 1046612 - RNA, 19 nt, Artificial Sequence
  Description of Artificial Sequence: Synthetic oligonucleotide
uuagugugugccucaauaa

SEQ ID NO: 1046613 - RNA, 19 nt, Artificial Sequence
  Description of Artificial Sequence: Synthetic oligonucleotide
cauauucuaaagcgguuac

SEQ ID NO: 1046614 - RNA, 19 nt, Artificial Sequence
  Description of Artificial Sequence: Synthetic oligonucleotide
uaauucaauaccccucuuu

SEQ ID NO: 1046615 - RNA, 19 nt, Artificial Sequence
  Description of Artificial Sequence: Synthetic oligonucleotide
ucuuguaauaccuggccuu

SEQ ID NO: 1046616 - RNA, 19 nt, Artificial Sequence
  Description of Artificial Sequence: Synthetic oligonucleotide
uaaguagggagguggauua

SEQ ID NO: 1046617 - RNA, 19 nt, Artificial Sequence
  Description of Artificial Sequence: Synthetic oligonucleotide
aagucaucugugcugggaa

SEQ ID NO: 1046618 - RNA, 19 nt, Artificial Sequence
  Description of Artificial Sequence: Synthetic oligonucleotide
caccaggaaaaucauuacc

SEQ ID NO: 1046619 - RNA, 19 nt, Artificial Sequence
  Description of Artificial Sequence: Synthetic oligonucleotide
acaaaccuaaucaccacag

SEQ ID NO: 1046620 - RNA, 19 nt, Artificial Sequence
  Description of Artificial Sequence: Synthetic oligonucleotide
uaauccaggcgccgagacg

SEQ ID NO: 1046621 - RNA, 19 nt, Artificial Sequence
  Description of Artificial Sequence: Synthetic oligonucleotide
uuccccacgacuauggcuu

SEQ ID NO: 1046622 - RNA, 19 nt, Artificial Sequence
  Description of Artificial Sequence: Synthetic oligonucleotide
aaucucggcucucccuuuc

SEQ ID NO: 1046623 - RNA, 19 nt, Artificial Sequence
  Description of Artificial Sequence: Synthetic oligonucleotide
ugugaguucacaggagaug

SEQ ID NO: 1046624 - RNA, 19 nt, Artificial Sequence
  Description of Artificial Sequence: Synthetic oligonucleotide
ugagggaagcucucgcaag

SEQ ID NO: 1046625 - RNA, 19 nt, Artificial Sequence
  Description of Artificial Sequence: Synthetic oligonucleotide
uaaagcgguuacaaauggu

SEQ ID NO: 1046626 - RNA, 19 nt, Artificial Sequence
  Description of Artificial Sequence: Synthetic oligonucleotide
uuaaugcacaaugaaugaa

SEQ ID NO: 1046627 - RNA, 19 nt, Artificial Sequence
  Description of Artificial Sequence: Synthetic oligonucleotide
gagcugaucucuaaacaag

SEQ ID NO: 1046628 - RNA, 19 nt, Artificial Sequence
  Description of Artificial Sequence: Synthetic oligonucleotide
aauaccuggccuuguggau

SEQ ID NO: 1046629 - RNA, 19 nt, Artificial Sequence
  Description of Artificial Sequence: Synthetic oligonucleotide
ugauucagaagcugguaau

SEQ ID NO: 1046630 - RNA, 19 nt, Artificial Sequence
  Description of Artificial Sequence: Synthetic oligonucleotide
caugcuacuucugucuugc

SEQ ID NO: 1046631 - RNA, 19 nt, Artificial Sequence
  Description of Artificial Sequence: Synthetic oligonucleotide
auaaggugagcacugcaau

SEQ ID NO: 1046632 - RNA, 19 nt, Artificial Sequence
  Description of Artificial Sequence: Synthetic oligonucleotide
aagagaagugagaaccucu

SEQ ID NO: 1046633 - RNA, 19 nt, Artificial Sequence
  Description of Artificial Sequence: Synthetic oligonucleotide
uccugugaaaucagguagu

SEQ ID NO: 1046634 - RNA, 19 nt, Artificial Sequence
  Description of Artificial Sequence: Synthetic oligonucleotide
agguaucugcaaugaauag

SEQ ID NO: 1046635 - RNA, 19 nt, Artificial Sequence
  Description of Artificial Sequence: Synthetic oligonucleotide
agcuuuuaaugcacggcgc

SEQ ID NO: 1046636 - RNA, 19 nt, Artificial Sequence
  Description of Artificial Sequence: Synthetic oligonucleotide
ucaggucucaucuucuuuu

SEQ ID NO: 1046637 - RNA, 19 nt, Artificial Sequence
  Description of Artificial Sequence: Synthetic oligonucleotide
uucaaugcccaagagcccu

SEQ ID NO: 1046638 - RNA, 19 nt, Artificial Sequence
  Description of Artificial Sequence: Synthetic oligonucleotide
gcucauuaacauuagugug

SEQ ID NO: 1046639 - RNA, 19 nt, Artificial Sequence
  Description of Artificial Sequence: Synthetic oligonucleotide
uuuuaaugcacggcgcgcu

SEQ ID NO: 1046640 - RNA, 19 nt, Artificial Sequence
  Description of Artificial Sequence: Synthetic oligonucleotide
uaacaggaauggcacaaaa

SEQ ID NO: 1046641 - RNA, 19 nt, Artificial Sequence
  Description of Artificial Sequence: Synthetic oligonucleotide
auagguaucugcaaugaau

SEQ ID NO: 1046642 - RNA, 19 nt, Artificial Sequence
  Description of Artificial Sequence: Synthetic oligonucleotide
uuuaaugcacggcgcgcug

SEQ ID NO: 1046643 - RNA, 19 nt, Artificial Sequence
  Description of Artificial Sequence: Synthetic oligonucleotide
guggcauauucuaaagcgg

SEQ ID NO: 1046644 - RNA, 19 nt, Artificial Sequence
  Description of Artificial Sequence: Synthetic oligonucleotide
ugaugccaccacaugugag

SEQ ID NO: 1046645 - RNA, 19 nt, Artificial Sequence
  Description of Artificial Sequence: Synthetic oligonucleotide
agcgguuacaaaugguccu

SEQ ID NO: 1046646 - RNA, 19 nt, Artificial Sequence
  Description of Artificial Sequence: Synthetic oligonucleotide
uuuggguggguuuaacaua

SEQ ID NO: 1046647 - RNA, 19 nt, Artificial Sequence
  Description of Artificial Sequence: Synthetic oligonucleotide
ucaaugugaagugugccau

SEQ ID NO: 1046648 - RNA, 19 nt, Artificial Sequence
  Description of Artificial Sequence: Synthetic oligonucleotide
cagcccguaaccuuuuaag

SEQ ID NO: 1046649 - RNA, 19 nt, Artificial Sequence
  Description of Artificial Sequence: Synthetic oligonucleotide
gcuuuuaaugcacggcgcg

SEQ ID NO: 1046650 - RNA, 19 nt, Artificial Sequence
  Description of Artificial Sequence: Synthetic oligonucleotide
uuugacuaagaugcccagc

SEQ ID NO: 1046651 - RNA, 19 nt, Artificial Sequence
  Description of Artificial Sequence: Synthetic oligonucleotide
uuaaguagggagguggauu

SEQ ID NO: 1046652 - RNA, 19 nt, Artificial Sequence
  Description of Artificial Sequence: Synthetic oligonucleotide
acgagaucucauuuuacaa

SEQ ID NO: 1046653 - RNA, 19 nt, Artificial Sequence
  Description of Artificial Sequence: Synthetic oligonucleotide
ggaguaaccgaaaagccug

SEQ ID NO: 1046654 - RNA, 19 nt, Artificial Sequence
  Description of Artificial Sequence: Synthetic oligonucleotide
uuuccccacgacuauggcu

SEQ ID NO: 1046655 - RNA, 19 nt, Artificial Sequence
  Description of Artificial Sequence: Synthetic oligonucleotide
aaggacuugccaugcuacu

SEQ ID NO: 1046656 - RNA, 19 nt, Artificial Sequence
  Description of Artificial Sequence: Synthetic oligonucleotide
gcucucgcaaguuaaguag

SEQ ID NO: 1046657 - RNA, 19 nt, Artificial Sequence
  Description of Artificial Sequence: Synthetic oligonucleotide
agucaucucuggcuaauga

SEQ ID NO: 1046658 - RNA, 19 nt, Artificial Sequence
  Description of Artificial Sequence: Synthetic oligonucleotide
cuguggcauauucuaaagc

SEQ ID NO: 1046659 - RNA, 19 nt, Artificial Sequence
  Description of Artificial Sequence: Synthetic oligonucleotide
cauugaauaucagcagaag

SEQ ID NO: 1046660 - RNA, 19 nt, Artificial Sequence
  Description of Artificial Sequence: Synthetic oligonucleotide
ucaauaccccucuuucuaa

SEQ ID NO: 1046661 - RNA, 19 nt, Artificial Sequence
  Description of Artificial Sequence: Synthetic oligonucleotide
acuuagucuccuucauuug

SEQ ID NO: 1046662 - RNA, 19 nt, Artificial Sequence
  Description of Artificial Sequence: Synthetic oligonucleotide
gaauacaguggaagguuug

SEQ ID NO: 1046663 - RNA, 19 nt, Artificial Sequence
  Description of Artificial Sequence: Synthetic oligonucleotide
uucggguucuaaauuuaaa

SEQ ID NO: 1046664 - RNA, 19 nt, Artificial Sequence
  Description of Artificial Sequence: Synthetic oligonucleotide
ggguucuaaauuuaaauua

SEQ ID NO: 1046665 - RNA, 19 nt, Artificial Sequence
  Description of Artificial Sequence: Synthetic oligonucleotide
guuuugacuaagaugccca

SEQ ID NO: 1046666 - RNA, 19 nt, Artificial Sequence
  Description of Artificial Sequence: Synthetic oligonucleotide
ucacaaaccuaaucaccac

SEQ ID NO: 1046667 - RNA, 19 nt, Artificial Sequence
  Description of Artificial Sequence: Synthetic oligonucleotide
cucauuaacauuagugugu

SEQ ID NO: 1046668 - RNA, 19 nt, Artificial Sequence
  Description of Artificial Sequence: Synthetic oligonucleotide
ugcuacuucugucuugcau

SEQ ID NO: 1046669 - RNA, 19 nt, Artificial Sequence
  Description of Artificial Sequence: Synthetic oligonucleotide
aauaccccucuuucuaauu

SEQ ID NO: 1046670 - RNA, 19 nt, Artificial Sequence
  Description of Artificial Sequence: Synthetic oligonucleotide
ugaaccugaugaauauuuu

SEQ ID NO: 1046671 - RNA, 19 nt, Artificial Sequence
  Description of Artificial Sequence: Synthetic oligonucleotide
guuuaacauaagaagaaua

SEQ ID NO: 1046672 - RNA, 19 nt, Artificial Sequence
  Description of Artificial Sequence: Synthetic oligonucleotide
agcccguaaccuuuuaaga

SEQ ID NO: 1046673 - RNA, 19 nt, Artificial Sequence
  Description of Artificial Sequence: Synthetic oligonucleotide
uaaguuucgggcugcuguc

SEQ ID NO: 1046674 - RNA, 19 nt, Artificial Sequence
  Description of Artificial Sequence: Synthetic oligonucleotide
guaucugcaaugaauaggu

SEQ ID NO: 1046675 - RNA, 19 nt, Artificial Sequence
  Description of Artificial Sequence: Synthetic oligonucleotide
ucgguauuucccaguuuug

SEQ ID NO: 1046676 - RNA, 19 nt, Artificial Sequence
  Description of Artificial Sequence: Synthetic oligonucleotide
ugcaaugaauagguuauua

SEQ ID NO: 1046677 - RNA, 19 nt, Artificial Sequence
  Description of Artificial Sequence: Synthetic oligonucleotide
cuuuuaaugcacggcgcgc

SEQ ID NO: 1046678 - RNA, 19 nt, Artificial Sequence
  Description of Artificial Sequence: Synthetic oligonucleotide
aaagccugauucagaagcu

SEQ ID NO: 1046679 - RNA, 19 nt, Artificial Sequence
  Description of Artificial Sequence: Synthetic oligonucleotide
uaacauuagugugugccuc

SEQ ID NO: 1046680 - RNA, 19 nt, Artificial Sequence
  Description of Artificial Sequence: Synthetic oligonucleotide
uaaugcacggcgcgcugcc

SEQ ID NO: 1046681 - RNA, 19 nt, Artificial Sequence
  Description of Artificial Sequence: Synthetic oligonucleotide
ugccauugagaucuaccaa

SEQ ID NO: 1046682 - RNA, 19 nt, Artificial Sequence
  Description of Artificial Sequence: Synthetic oligonucleotide
uuuguacuccugugaaauc

SEQ ID NO: 1046683 - RNA, 19 nt, Artificial Sequence
  Description of Artificial Sequence: Synthetic oligonucleotide
cuuguaauaccuggccuug

SEQ ID NO: 1046684 - RNA, 19 nt, Artificial Sequence
  Description of Artificial Sequence: Synthetic oligonucleotide
acuguaguaagaaguacau

SEQ ID NO: 1046685 - RNA, 19 nt, Artificial Sequence
  Description of Artificial Sequence: Synthetic oligonucleotide
gaugccaccacaugugagu

SEQ ID NO: 1046686 - RNA, 19 nt, Artificial Sequence
  Description of Artificial Sequence: Synthetic oligonucleotide
caugugaguucacaggaga

SEQ ID NO: 1046687 - RNA, 19 nt, Artificial Sequence
  Description of Artificial Sequence: Synthetic oligonucleotide
ugagaaccucugcuacucc

SEQ ID NO: 1046688 - RNA, 19 nt, Artificial Sequence
  Description of Artificial Sequence: Synthetic oligonucleotide
agagaagugagaaccucug

SEQ ID NO: 1046689 - RNA, 19 nt, Artificial Sequence
  Description of Artificial Sequence: Synthetic oligonucleotide
aaaucagguagugcacggu

SEQ ID NO: 1046690 - RNA, 19 nt, Artificial Sequence
  Description of Artificial Sequence: Synthetic oligonucleotide
gcccguaaccuuuuaagag

SEQ ID NO: 1046691 - RNA, 19 nt, Artificial Sequence
  Description of Artificial Sequence: Synthetic oligonucleotide
gagacgagaucucauuuua

SEQ ID NO: 1046692 - RNA, 19 nt, Artificial Sequence
  Description of Artificial Sequence: Synthetic oligonucleotide
cauugagaucuaccaaaac

SEQ ID NO: 1046693 - RNA, 19 nt, Artificial Sequence
  Description of Artificial Sequence: Synthetic oligonucleotide
auuaccuacuuagucuccu

SEQ ID NO: 1046694 - RNA, 19 nt, Artificial Sequence
  Description of Artificial Sequence: Synthetic oligonucleotide
caaugaugcacaauuacau

SEQ ID NO: 1046695 - RNA, 19 nt, Artificial Sequence
  Description of Artificial Sequence: Synthetic oligonucleotide
agccugauucagaagcugg

SEQ ID NO: 1046696 - RNA, 19 nt, Artificial Sequence
  Description of Artificial Sequence: Synthetic oligonucleotide
aaugaagguucaacagggu

SEQ ID NO: 1046697 - RNA, 19 nt, Artificial Sequence
  Description of Artificial Sequence: Synthetic oligonucleotide
cccguaaccuuuuaagagc

SEQ ID NO: 1046698 - RNA, 19 nt, Artificial Sequence
  Description of Artificial Sequence: Synthetic oligonucleotide
cucuggcuaaugaagagaa

SEQ ID NO: 1046699 - RNA, 19 nt, Artificial Sequence
  Description of Artificial Sequence: Synthetic oligonucleotide
aagccugauucagaagcug

SEQ ID NO: 1046700 - RNA, 19 nt, Artificial Sequence
  Description of Artificial Sequence: Synthetic oligonucleotide
ccugaugaauauuuuaaca

SEQ ID NO: 1046701 - RNA, 19 nt, Artificial Sequence
  Description of Artificial Sequence: Synthetic oligonucleotide
uggaagguuuggcuuucca

SEQ ID NO: 1046702 - RNA, 19 nt, Artificial Sequence
  Description of Artificial Sequence: Synthetic oligonucleotide
gcucuacuaaguuucgggc

SEQ ID NO: 1046703 - RNA, 19 nt, Artificial Sequence
  Description of Artificial Sequence: Synthetic oligonucleotide
uggccuuguggauagcuau

SEQ ID NO: 1046704 - RNA, 19 nt, Artificial Sequence
  Description of Artificial Sequence: Synthetic oligonucleotide
agaauaauccaggcgccga

SEQ ID NO: 1046705 - RNA, 19 nt, Artificial Sequence
  Description of Artificial Sequence: Synthetic oligonucleotide
aauucggguucuaaauuua

SEQ ID NO: 1046706 - RNA, 19 nt, Artificial Sequence
  Description of Artificial Sequence: Synthetic oligonucleotide
agacgagaucucauuuuac

SEQ ID NO: 1046707 - RNA, 19 nt, Artificial Sequence
  Description of Artificial Sequence: Synthetic oligonucleotide
cagccagugucccucaaug

SEQ ID NO: 1046708 - RNA, 19 nt, Artificial Sequence
  Description of Artificial Sequence: Synthetic oligonucleotide
acagcguuggggucacuug

SEQ ID NO: 1046709 - RNA, 19 nt, Artificial Sequence
  Description of Artificial Sequence: Synthetic oligonucleotide
uuaaugcacggcgcgcugc

SEQ ID NO: 1046710 - RNA, 19 nt, Artificial Sequence
  Description of Artificial Sequence: Synthetic oligonucleotide
cucaaugcuuccagaaaga

SEQ ID NO: 1046711 - RNA, 19 nt, Artificial Sequence
  Description of Artificial Sequence: Synthetic oligonucleotide
auaccccucuuucuaauua

SEQ ID NO: 1046712 - RNA, 19 nt, Artificial Sequence
  Description of Artificial Sequence: Synthetic oligonucleotide
caauaggucuugcuugcuc

SEQ ID NO: 1046713 - RNA, 19 nt, Artificial Sequence
  Description of Artificial Sequence: Synthetic oligonucleotide
cacaaaccuaaucaccaca

SEQ ID NO: 1046714 - RNA, 19 nt, Artificial Sequence
  Description of Artificial Sequence: Synthetic oligonucleotide
cgcaaguuaaguagggagg

SEQ ID NO: 1046715 - RNA, 19 nt, Artificial Sequence
  Description of Artificial Sequence: Synthetic oligonucleotide
caguuuugacuaagaugcc

SEQ ID NO: 1046716 - RNA, 19 nt, Artificial Sequence
  Description of Artificial Sequence: Synthetic oligonucleotide
auauucuaaagcgguuaca

SEQ ID NO: 1046717 - RNA, 19 nt, Artificial Sequence
  Description of Artificial Sequence: Synthetic oligonucleotide
ggaagguuuggcuuuccac

SEQ ID NO: 1046718 - RNA, 19 nt, Artificial Sequence
  Description of Artificial Sequence: Synthetic oligonucleotide
cucugcuacuccacucccg

SEQ ID NO: 1046719 - RNA, 19 nt, Artificial Sequence
  Description of Artificial Sequence: Synthetic oligonucleotide
agguuuggcuuuccacauc

SEQ ID NO: 1046720 - RNA, 19 nt, Artificial Sequence
  Description of Artificial Sequence: Synthetic oligonucleotide
caacuguaguaagaaguac

SEQ ID NO: 1046721 - RNA, 19 nt, Artificial Sequence
  Description of Artificial Sequence: Synthetic oligonucleotide
agcucucgcaaguuaagua

SEQ ID NO: 1046722 - RNA, 19 nt, Artificial Sequence
  Description of Artificial Sequence: Synthetic oligonucleotide
aucucuaaacaagcaucag

SEQ ID NO: 1046723 - RNA, 19 nt, Artificial Sequence
  Description of Artificial Sequence: Synthetic oligonucleotide
cacaguauaauagguaucu

SEQ ID NO: 1046724 - RNA, 19 nt, Artificial Sequence
  Description of Artificial Sequence: Synthetic oligonucleotide
agugcacggucaucaacca

SEQ ID NO: 1046725 - RNA, 19 nt, Artificial Sequence
  Description of Artificial Sequence: Synthetic oligonucleotide
gguggguuuaacauaagaa

SEQ ID NO: 1046726 - RNA, 19 nt, Artificial Sequence
  Description of Artificial Sequence: Synthetic oligonucleotide
guagugcacggucaucaac

SEQ ID NO: 1046727 - RNA, 19 nt, Artificial Sequence
  Description of Artificial Sequence: Synthetic oligonucleotide
agaagcagcccguaaccuu

SEQ ID NO: 1046728 - RNA, 19 nt, Artificial Sequence
  Description of Artificial Sequence: Synthetic oligonucleotide
guguuggucacaaaccuaa

SEQ ID NO: 1046729 - RNA, 19 nt, Artificial Sequence
  Description of Artificial Sequence: Synthetic oligonucleotide
gaagucaucugugcuggga

SEQ ID NO: 1046730 - RNA, 19 nt, Artificial Sequence
  Description of Artificial Sequence: Synthetic oligonucleotide
uuugguuguguuggucaca

SEQ ID NO: 1046731 - RNA, 19 nt, Artificial Sequence
  Description of Artificial Sequence: Synthetic oligonucleotide
agcaauugccacggccucg

SEQ ID NO: 1046732 - RNA, 19 nt, Artificial Sequence
  Description of Artificial Sequence: Synthetic oligonucleotide
ugucagagaggugaagauu

SEQ ID NO: 1046733 - RNA, 19 nt, Artificial Sequence
  Description of Artificial Sequence: Synthetic oligonucleotide
ugacuaagaugcccagcau

SEQ ID NO: 1046734 - RNA, 19 nt, Artificial Sequence
  Description of Artificial Sequence: Synthetic oligonucleotide
ugcaaucaucuccuaucau

SEQ ID NO: 1046735 - RNA, 19 nt, Artificial Sequence
  Description of Artificial Sequence: Synthetic oligonucleotide
gcaaugaauagguuauuaa

SEQ ID NO: 1046736 - RNA, 19 nt, Artificial Sequence
  Description of Artificial Sequence: Synthetic oligonucleotide
cuacuuggcucuugugcug

SEQ ID NO: 1046737 - RNA, 19 nt, Artificial Sequence
  Description of Artificial Sequence: Synthetic oligonucleotide
cugugaaaucagguagugc

SEQ ID NO: 1046738 - RNA, 19 nt, Artificial Sequence
  Description of Artificial Sequence: Synthetic oligonucleotide
guuuguacuccugugaaau

SEQ ID NO: 1046739 - RNA, 19 nt, Artificial Sequence
  Description of Artificial Sequence: Synthetic oligonucleotide
cuaucagaggggcuccauc

SEQ ID NO: 1046740 - RNA, 19 nt, Artificial Sequence
  Description of Artificial Sequence: Synthetic oligonucleotide
gguuuccccacgacuaugg

SEQ ID NO: 1046741 - RNA, 19 nt, Artificial Sequence
  Description of Artificial Sequence: Synthetic oligonucleotide
guacuccugugaaaucagg

SEQ ID NO: 1046742 - RNA, 19 nt, Artificial Sequence
  Description of Artificial Sequence: Synthetic oligonucleotide
augggccugacuuguuucu

SEQ ID NO: 1046743 - RNA, 19 nt, Artificial Sequence
  Description of Artificial Sequence: Synthetic oligonucleotide
aagguucaacaggguuggc

SEQ ID NO: 1046744 - RNA, 19 nt, Artificial Sequence
  Description of Artificial Sequence: Synthetic oligonucleotide
gugaaaucagguagugcac

SEQ ID NO: 1046745 - RNA, 19 nt, Artificial Sequence
  Description of Artificial Sequence: Synthetic oligonucleotide
acaugugaguucacaggag

SEQ ID NO: 1046746 - RNA, 19 nt, Artificial Sequence
  Description of Artificial Sequence: Synthetic oligonucleotide
caucaaccaacagcauggg

SEQ ID NO: 1046747 - RNA, 19 nt, Artificial Sequence
  Description of Artificial Sequence: Synthetic oligonucleotide
aaaucucggcucucccuuu

SEQ ID NO: 1046748 - RNA, 19 nt, Artificial Sequence
  Description of Artificial Sequence: Synthetic oligonucleotide
gcaaugaugcacaauuaca

SEQ ID NO: 1046749 - RNA, 19 nt, Artificial Sequence
  Description of Artificial Sequence: Synthetic oligonucleotide
uuguucccuccccuccaag

SEQ ID NO: 1046750 - RNA, 19 nt, Artificial Sequence
  Description of Artificial Sequence: Synthetic oligonucleotide
uggggucacuuguuuguac

SEQ ID NO: 1046751 - RNA, 19 nt, Artificial Sequence
  Description of Artificial Sequence: Synthetic oligonucleotide
guuggggucacuuguuugu

SEQ ID NO: 1046752 - RNA, 19 nt, Artificial Sequence
  Description of Artificial Sequence: Synthetic oligonucleotide
cacaguugaacugggcauc

SEQ ID NO: 1046753 - RNA, 19 nt, Artificial Sequence
  Description of Artificial Sequence: Synthetic oligonucleotide
acagcgugagggaagcucu

SEQ ID NO: 1046754 - RNA, 19 nt, Artificial Sequence
  Description of Artificial Sequence: Synthetic oligonucleotide
gugagaaccucugcuacuc

SEQ ID NO: 1046755 - RNA, 19 nt, Artificial Sequence
  Description of Artificial Sequence: Synthetic oligonucleotide
aaguuucgggcugcuguca

SEQ ID NO: 1046756 - RNA, 19 nt, Artificial Sequence
  Description of Artificial Sequence: Synthetic oligonucleotide
agucaucugugcugggaau

SEQ ID NO: 1046757 - RNA, 19 nt, Artificial Sequence
  Description of Artificial Sequence: Synthetic oligonucleotide
agcgugagggaagcucucg

SEQ ID NO: 1046758 - RNA, 19 nt, Artificial Sequence
  Description of Artificial Sequence: Synthetic oligonucleotide
ggauagcuaucagaggggc

SEQ ID NO: 1046759 - RNA, 19 nt, Artificial Sequence
  Description of Artificial Sequence: Synthetic oligonucleotide
aaauuaaauucggguucua

SEQ ID NO: 1046760 - RNA, 19 nt, Artificial Sequence
  Description of Artificial Sequence: Synthetic oligonucleotide
augugaagugugccauuga

SEQ ID NO: 1046761 - RNA, 19 nt, Artificial Sequence
  Description of Artificial Sequence: Synthetic oligonucleotide
caaguuaaguagggaggug

SEQ ID NO: 1046762 - RNA, 19 nt, Artificial Sequence
  Description of Artificial Sequence: Synthetic oligonucleotide
caucuccuaucaugauggc

SEQ ID NO: 1046763 - RNA, 19 nt, Artificial Sequence
  Description of Artificial Sequence: Synthetic oligonucleotide
uggguggguuuaacauaag

SEQ ID NO: 1046764 - RNA, 19 nt, Artificial Sequence
  Description of Artificial Sequence: Synthetic oligonucleotide
gacggagcugaucucuaaa

SEQ ID NO: 1046765 - RNA, 19 nt, Artificial Sequence
  Description of Artificial Sequence: Synthetic oligonucleotide
cuaccaaaacagcuuuuaa

SEQ ID NO: 1046766 - RNA, 19 nt, Artificial Sequence
  Description of Artificial Sequence: Synthetic oligonucleotide
acaguugaacugggcaucu

SEQ ID NO: 1046767 - RNA, 19 nt, Artificial Sequence
  Description of Artificial Sequence: Synthetic oligonucleotide
cucuggugcacagccagug

SEQ ID NO: 1046768 - RNA, 19 nt, Artificial Sequence
  Description of Artificial Sequence: Synthetic oligonucleotide
gcuuuguucccuccccucc

SEQ ID NO: 1046769 - RNA, 19 nt, Artificial Sequence
  Description of Artificial Sequence: Synthetic oligonucleotide
ugucugcugaugccaccac

SEQ ID NO: 1046770 - RNA, 19 nt, Artificial Sequence
  Description of Artificial Sequence: Synthetic oligonucleotide
uuaccuacuuagucuccuu

SEQ ID NO: 1046771 - RNA, 19 nt, Artificial Sequence
  Description of Artificial Sequence: Synthetic oligonucleotide
uagcuaucagaggggcucc

SEQ ID NO: 1046772 - RNA, 19 nt, Artificial Sequence
  Description of Artificial Sequence: Synthetic oligonucleotide
cuugccaugcuacuucugu

SEQ ID NO: 1046773 - RNA, 19 nt, Artificial Sequence
  Description of Artificial Sequence: Synthetic oligonucleotide
gcugaugccaccacaugug

SEQ ID NO: 1046774 - RNA, 19 nt, Artificial Sequence
  Description of Artificial Sequence: Synthetic oligonucleotide
cugcucuacuaaguuucgg

SEQ ID NO: 1046775 - RNA, 19 nt, Artificial Sequence
  Description of Artificial Sequence: Synthetic oligonucleotide
guaaagcaauugccacggc

SEQ ID NO: 1046776 - RNA, 19 nt, Artificial Sequence
  Description of Artificial Sequence: Synthetic oligonucleotide
cacagcgugagggaagcuc

SEQ ID NO: 1046777 - RNA, 19 nt, Artificial Sequence
  Description of Artificial Sequence: Synthetic oligonucleotide
caaagagaagugagaaccu

SEQ ID NO: 1046778 - RNA, 19 nt, Artificial Sequence
  Description of Artificial Sequence: Synthetic oligonucleotide
cacggccucggauuagcac

SEQ ID NO: 1046779 - RNA, 19 nt, Artificial Sequence
  Description of Artificial Sequence: Synthetic oligonucleotide
uuguaauaccuggccuugu

SEQ ID NO: 1046780 - RNA, 19 nt, Artificial Sequence
  Description of Artificial Sequence: Synthetic oligonucleotide
gucagagaggugaagauuu

SEQ ID NO: 1046781 - RNA, 19 nt, Artificial Sequence
  Description of Artificial Sequence: Synthetic oligonucleotide
cugaucucuaaacaagcau

SEQ ID NO: 1046782 - RNA, 19 nt, Artificial Sequence
  Description of Artificial Sequence: Synthetic oligonucleotide
cuuuguucccuccccucca

SEQ ID NO: 1046783 - RNA, 19 nt, Artificial Sequence
  Description of Artificial Sequence: Synthetic oligonucleotide
agaaugugguccacagcgu

SEQ ID NO: 1046784 - RNA, 19 nt, Artificial Sequence
  Description of Artificial Sequence: Synthetic oligonucleotide
auucggguucuaaauuuaa

SEQ ID NO: 1046785 - RNA, 19 nt, Artificial Sequence
  Description of Artificial Sequence: Synthetic oligonucleotide
ugcugggaauacaguggaa

SEQ ID NO: 1046786 - RNA, 19 nt, Artificial Sequence
  Description of Artificial Sequence: Synthetic oligonucleotide
ggguggguuuaacauaaga

SEQ ID NO: 1046787 - RNA, 19 nt, Artificial Sequence
  Description of Artificial Sequence: Synthetic oligonucleotide
augugaguucacaggagau

SEQ ID NO: 1046788 - RNA, 19 nt, Artificial Sequence
  Description of Artificial Sequence: Synthetic oligonucleotide
gagggaagcucucgcaagu

SEQ ID NO: 1046789 - RNA, 19 nt, Artificial Sequence
  Description of Artificial Sequence: Synthetic oligonucleotide
gcaguucgguauuucccag

SEQ ID NO: 1046790 - RNA, 19 nt, Artificial Sequence
  Description of Artificial Sequence: Synthetic oligonucleotide
cacggucaucaaccaacag

SEQ ID NO: 1046791 - RNA, 19 nt, Artificial Sequence
  Description of Artificial Sequence: Synthetic oligonucleotide
agugaaccugaugaauauu

SEQ ID NO: 1046792 - RNA, 19 nt, Artificial Sequence
  Description of Artificial Sequence: Synthetic oligonucleotide
cugaugccaccacauguga

SEQ ID NO: 1046793 - RNA, 19 nt, Artificial Sequence
  Description of Artificial Sequence: Synthetic oligonucleotide
cucuuguaauaccuggccu

SEQ ID NO: 1046794 - RNA, 19 nt, Artificial Sequence
  Description of Artificial Sequence: Synthetic oligonucleotide
gugaaccugaugaauauuu

SEQ ID NO: 1046795 - RNA, 19 nt, Artificial Sequence
  Description of Artificial Sequence: Synthetic oligonucleotide
augcacaauuacauucuaa

SEQ ID NO: 1046796 - RNA, 19 nt, Artificial Sequence
  Description of Artificial Sequence: Synthetic oligonucleotide
accacagcguuggggucac

SEQ ID NO: 1046797 - RNA, 19 nt, Artificial Sequence
  Description of Artificial Sequence: Synthetic oligonucleotide
agacggagcugaucucuaa

SEQ ID NO: 1046798 - RNA, 19 nt, Artificial Sequence
  Description of Artificial Sequence: Synthetic oligonucleotide
cuaucaugauggccuccuc

SEQ ID NO: 1046799 - RNA, 19 nt, Artificial Sequence
  Description of Artificial Sequence: Synthetic oligonucleotide
cucuuugguuguguugguc

SEQ ID NO: 1046800 - RNA, 19 nt, Artificial Sequence
  Description of Artificial Sequence: Synthetic oligonucleotide
aaguagggagguggauuaa

SEQ ID NO: 1046801 - RNA, 19 nt, Artificial Sequence
  Description of Artificial Sequence: Synthetic oligonucleotide
acaaaugguccugguccca

SEQ ID NO: 1046802 - RNA, 19 nt, Artificial Sequence
  Description of Artificial Sequence: Synthetic oligonucleotide
ugggcaucucacugagcau

SEQ ID NO: 1046803 - RNA, 19 nt, Artificial Sequence
  Description of Artificial Sequence: Synthetic oligonucleotide
uugccacggccucggauua

SEQ ID NO: 1046804 - RNA, 19 nt, Artificial Sequence
  Description of Artificial Sequence: Synthetic oligonucleotide
ugcgccuggcacagcugca

SEQ ID NO: 1046805 - RNA, 19 nt, Artificial Sequence
  Description of Artificial Sequence: Synthetic oligonucleotide
ccccucuuucuaauuaaug

SEQ ID NO: 1046806 - RNA, 19 nt, Artificial Sequence
  Description of Artificial Sequence: Synthetic oligonucleotide
gugugugccucaauaaggu

SEQ ID NO: 1046807 - RNA, 19 nt, Artificial Sequence
  Description of Artificial Sequence: Synthetic oligonucleotide
uacuaaguuucgggcugcu

SEQ ID NO: 1046808 - RNA, 19 nt, Artificial Sequence
  Description of Artificial Sequence: Synthetic oligonucleotide
uacuucugucuugcauucu

SEQ ID NO: 1046809 - RNA, 19 nt, Artificial Sequence
  Description of Artificial Sequence: Synthetic oligonucleotide
ggauuagcacagcaugcaa

SEQ ID NO: 1046810 - RNA, 19 nt, Artificial Sequence
  Description of Artificial Sequence: Synthetic oligonucleotide
ggcgcugucugcugaugcc

SEQ ID NO: 1046811 - RNA, 19 nt, Artificial Sequence
  Description of Artificial Sequence: Synthetic oligonucleotide
aguaaccgaaaagccugau

SEQ ID NO: 1046812 - RNA, 19 nt, Artificial Sequence
  Description of Artificial Sequence: Synthetic oligonucleotide
cugcaaugaugcacaauua

SEQ ID NO: 1046813 - RNA, 19 nt, Artificial Sequence
  Description of Artificial Sequence: Synthetic oligonucleotide
aggcgccgagacgagaucu

SEQ ID NO: 1046814 - RNA, 19 nt, Artificial Sequence
  Description of Artificial Sequence: Synthetic oligonucleotide
acauuagugugugccucaa

SEQ ID NO: 1046815 - RNA, 19 nt, Artificial Sequence
  Description of Artificial Sequence: Synthetic oligonucleotide
aagacggagcugaucucua

SEQ ID NO: 1046816 - RNA, 19 nt, Artificial Sequence
  Description of Artificial Sequence: Synthetic oligonucleotide
cucgcaaguuaaguaggga

SEQ ID NO: 1046817 - RNA, 19 nt, Artificial Sequence
  Description of Artificial Sequence: Synthetic oligonucleotide
gauagcuaucagaggggcu

SEQ ID NO: 1046818 - RNA, 19 nt, Artificial Sequence
  Description of Artificial Sequence: Synthetic oligonucleotide
cauccaggaguaaccgaaa

SEQ ID NO: 1046819 - RNA, 19 nt, Artificial Sequence
  Description of Artificial Sequence: Synthetic oligonucleotide
gguuuaacauaagaagaau

SEQ ID NO: 1046820 - RNA, 19 nt, Artificial Sequence
  Description of Artificial Sequence: Synthetic oligonucleotide
augcacggcgcgcugccau

SEQ ID NO: 1046821 - RNA, 19 nt, Artificial Sequence
  Description of Artificial Sequence: Synthetic oligonucleotide
gcgguuacaaaugguccug

SEQ ID NO: 1046822 - RNA, 19 nt, Artificial Sequence
  Description of Artificial Sequence: Synthetic oligonucleotide
guaaccgaaaagccugauu

SEQ ID NO: 1046823 - RNA, 19 nt, Artificial Sequence
  Description of Artificial Sequence: Synthetic oligonucleotide
cagugaaccugaugaauau

SEQ ID NO: 1046824 - RNA, 19 nt, Artificial Sequence
  Description of Artificial Sequence: Synthetic oligonucleotide
gcaaguuaaguagggaggu

SEQ ID NO: 1046825 - RNA, 19 nt, Artificial Sequence
  Description of Artificial Sequence: Synthetic oligonucleotide
caagacggagcugaucucu

SEQ ID NO: 1046826 - RNA, 19 nt, Artificial Sequence
  Description of Artificial Sequence: Synthetic oligonucleotide
cugucagagaggugaagau

SEQ ID NO: 1046827 - RNA, 19 nt, Artificial Sequence
  Description of Artificial Sequence: Synthetic oligonucleotide
gcgugagggaagcucucgc

SEQ ID NO: 1046828 - RNA, 19 nt, Artificial Sequence
  Description of Artificial Sequence: Synthetic oligonucleotide
ccaugcuacuucugucuug

SEQ ID NO: 1046829 - RNA, 19 nt, Artificial Sequence
  Description of Artificial Sequence: Synthetic oligonucleotide
cuguaguaagaaguacaua

SEQ ID NO: 1046830 - RNA, 19 nt, Artificial Sequence
  Description of Artificial Sequence: Synthetic oligonucleotide
ccugacuuguuucugcucu

SEQ ID NO: 1046831 - RNA, 19 nt, Artificial Sequence
  Description of Artificial Sequence: Synthetic oligonucleotide
ugcacggcgcgcugccauc

SEQ ID NO: 1046832 - RNA, 19 nt, Artificial Sequence
  Description of Artificial Sequence: Synthetic oligonucleotide
cucuugugcuggguuucac

SEQ ID NO: 1046833 - RNA, 19 nt, Artificial Sequence
  Description of Artificial Sequence: Synthetic oligonucleotide
cuccaagacggagcugauc

SEQ ID NO: 1046834 - RNA, 19 nt, Artificial Sequence
  Description of Artificial Sequence: Synthetic oligonucleotide
accccucuuucuaauuaau

SEQ ID NO: 1046835 - RNA, 19 nt, Artificial Sequence
  Description of Artificial Sequence: Synthetic oligonucleotide
ccucugcuacuccacuccc

SEQ ID NO: 1046836 - RNA, 19 nt, Artificial Sequence
  Description of Artificial Sequence: Synthetic oligonucleotide
uucuggugccaggccgaug

SEQ ID NO: 1046837 - RNA, 19 nt, Artificial Sequence
  Description of Artificial Sequence: Synthetic oligonucleotide
ccaaaacaacuguuacaca

SEQ ID NO: 1046838 - RNA, 19 nt, Artificial Sequence
  Description of Artificial Sequence: Synthetic oligonucleotide
cagcgugagggaagcucuc

SEQ ID NO: 1046839 - RNA, 19 nt, Artificial Sequence
  Description of Artificial Sequence: Synthetic oligonucleotide
gcuuucaugucuguggcau

SEQ ID NO: 1046840 - RNA, 19 nt, Artificial Sequence
  Description of Artificial Sequence: Synthetic oligonucleotide
ugcauucuacuuggcucuu

SEQ ID NO: 1046841 - RNA, 19 nt, Artificial Sequence
  Description of Artificial Sequence: Synthetic oligonucleotide
guuaaguagggagguggau

SEQ ID NO: 1046842 - RNA, 19 nt, Artificial Sequence
  Description of Artificial Sequence: Synthetic oligonucleotide
caauaccccucuuucuaau

SEQ ID NO: 1046843 - RNA, 19 nt, Artificial Sequence
  Description of Artificial Sequence: Synthetic oligonucleotide
ccgaaaagccugauucaga

SEQ ID NO: 1046844 - RNA, 19 nt, Artificial Sequence
  Description of Artificial Sequence: Synthetic oligonucleotide
gguuacaaaugguccuggu

SEQ ID NO: 1046845 - RNA, 19 nt, Artificial Sequence
  Description of Artificial Sequence: Synthetic oligonucleotide
ugccacggccucggauuag

SEQ ID NO: 1046846 - RNA, 19 nt, Artificial Sequence
  Description of Artificial Sequence: Synthetic oligonucleotide
agggaagcucucgcaaguu

SEQ ID NO: 1046847 - RNA, 19 nt, Artificial Sequence
  Description of Artificial Sequence: Synthetic oligonucleotide
cagcguuggggucacuugu

SEQ ID NO: 1046848 - RNA, 19 nt, Artificial Sequence
  Description of Artificial Sequence: Synthetic oligonucleotide
ggauggcgcugucugcuga

SEQ ID NO: 1046849 - RNA, 19 nt, Artificial Sequence
  Description of Artificial Sequence: Synthetic oligonucleotide
cuacuuagucuccuucauu

SEQ ID NO: 1046850 - RNA, 19 nt, Artificial Sequence
  Description of Artificial Sequence: Synthetic oligonucleotide
gggaagcucucgcaaguua

SEQ ID NO: 1046851 - RNA, 19 nt, Artificial Sequence
  Description of Artificial Sequence: Synthetic oligonucleotide
cagggcuaagccaucuuuu

SEQ ID NO: 1046852 - RNA, 19 nt, Artificial Sequence
  Description of Artificial Sequence: Synthetic oligonucleotide
gugcacggucaucaaccaa

SEQ ID NO: 1046853 - RNA, 19 nt, Artificial Sequence
  Description of Artificial Sequence: Synthetic oligonucleotide
gggaauacaguggaagguu

SEQ ID NO: 1046854 - RNA, 19 nt, Artificial Sequence
  Description of Artificial Sequence: Synthetic oligonucleotide
cugcuacuccacucccgca

SEQ ID NO: 1046855 - RNA, 19 nt, Artificial Sequence
  Description of Artificial Sequence: Synthetic oligonucleotide
ccguaaccuuuuaagagcu

SEQ ID NO: 1046856 - RNA, 19 nt, Artificial Sequence
  Description of Artificial Sequence: Synthetic oligonucleotide
cugugcgccuggcacagcu

SEQ ID NO: 1046857 - RNA, 19 nt, Artificial Sequence
  Description of Artificial Sequence: Synthetic oligonucleotide
agcguuggggucacuuguu

SEQ ID NO: 1046858 - RNA, 19 nt, Artificial Sequence
  Description of Artificial Sequence: Synthetic oligonucleotide
ccaagacggagcugaucuc

SEQ ID NO: 1046859 - RNA, 19 nt, Artificial Sequence
  Description of Artificial Sequence: Synthetic oligonucleotide
gcagcccguaaccuuuuaa

SEQ ID NO: 1046860 - RNA, 19 nt, Artificial Sequence
  Description of Artificial Sequence: Synthetic oligonucleotide
gcauucuacuuggcucuug

SEQ ID NO: 1046861 - RNA, 19 nt, Artificial Sequence
  Description of Artificial Sequence: Synthetic oligonucleotide
cuucaggucucaucuucuu

SEQ ID NO: 1046862 - RNA, 19 nt, Artificial Sequence
  Description of Artificial Sequence: Synthetic oligonucleotide
gugccucaauaaggugagc

SEQ ID NO: 1046863 - RNA, 19 nt, Artificial Sequence
  Description of Artificial Sequence: Synthetic oligonucleotide
gccugacuuguuucugcuc

SEQ ID NO: 1046864 - RNA, 19 nt, Artificial Sequence
  Description of Artificial Sequence: Synthetic oligonucleotide
uccccacgacuauggcuuu

SEQ ID NO: 1046865 - RNA, 19 nt, Artificial Sequence
  Description of Artificial Sequence: Synthetic oligonucleotide
gccacggccucggauuagc

SEQ ID NO: 1046866 - RNA, 19 nt, Artificial Sequence
  Description of Artificial Sequence: Synthetic oligonucleotide
gcacggucaucaaccaaca

SEQ ID NO: 1046867 - RNA, 19 nt, Artificial Sequence
  Description of Artificial Sequence: Synthetic oligonucleotide
cggauuagcacagcaugca

SEQ ID NO: 1046868 - RNA, 19 nt, Artificial Sequence
  Description of Artificial Sequence: Synthetic oligonucleotide
acggcgcgcugccauccuu

SEQ ID NO: 1046869 - RNA, 19 nt, Artificial Sequence
  Description of Artificial Sequence: Synthetic oligonucleotide
cagcaugggccugacuugu

SEQ ID NO: 1046870 - RNA, 19 nt, Artificial Sequence
  Description of Artificial Sequence: Synthetic oligonucleotide
gcgcugucugcugaugcca

SEQ ID NO: 1046871 - RNA, 19 nt, Artificial Sequence
  Description of Artificial Sequence: Synthetic oligonucleotide
ccuaucaugauggccuccu

SEQ ID NO: 1046872 - RNA, 19 nt, Artificial Sequence
  Description of Artificial Sequence: Synthetic oligonucleotide
ccuacuuagucuccuucau

SEQ ID NO: 1046873 - RNA, 19 nt, Artificial Sequence
  Description of Artificial Sequence: Synthetic oligonucleotide
caauugccacggccucgga

SEQ ID NO: 1046874 - RNA, 19 nt, Artificial Sequence
  Description of Artificial Sequence: Synthetic oligonucleotide
ggcauauucuaaagcgguu

SEQ ID NO: 1046875 - RNA, 19 nt, Artificial Sequence
  Description of Artificial Sequence: Synthetic oligonucleotide
gcacggcgcgcugccaucc

SEQ ID NO: 1046876 - RNA, 19 nt, Artificial Sequence
  Description of Artificial Sequence: Synthetic oligonucleotide
gccgagacgagaucucauu

SEQ ID NO: 1046877 - RNA, 19 nt, Artificial Sequence
  Description of Artificial Sequence: Synthetic oligonucleotide
gcacugcaaugaugcacaa

SEQ ID NO: 1046878 - RNA, 19 nt, Artificial Sequence
  Description of Artificial Sequence: Synthetic oligonucleotide
gcucuugugcuggguuuca

SEQ ID NO: 1046879 - RNA, 19 nt, Artificial Sequence
  Description of Artificial Sequence: Synthetic oligonucleotide
agcaugggccugacuuguu

SEQ ID NO: 1046880 - RNA, 19 nt, Artificial Sequence
  Description of Artificial Sequence: Synthetic oligonucleotide
ggcgccgagacgagaucuc

SEQ ID NO: 1046881 - RNA, 19 nt, Artificial Sequence
  Description of Artificial Sequence: Synthetic oligonucleotide
cacagcguuggggucacuu

SEQ ID NO: 1046882 - RNA, 19 nt, Artificial Sequence
  Description of Artificial Sequence: Synthetic oligonucleotide
ccagugucccucaaugcuu

SEQ ID NO: 1046883 - RNA, 19 nt, Artificial Sequence
  Description of Artificial Sequence: Synthetic oligonucleotide
gccaugcuacuucugucuu

SEQ ID NO: 1046884 - RNA, 19 nt, Artificial Sequence
  Description of Artificial Sequence: Synthetic oligonucleotide
gcaugggccugacuuguuu

SEQ ID NO: 1046885 - RNA, 19 nt, Artificial Sequence
  Description of Artificial Sequence: Synthetic oligonucleotide
gcgccgagacgagaucuca

SEQ ID NO: 1046886 - RNA, 19 nt, Artificial Sequence
  Description of Artificial Sequence: Synthetic oligonucleotide
ggccgaugaccacagcguu

SEQ ID NO: 1046887 - RNA, 19 nt, Artificial Sequence
  Description of Artificial Sequence: Synthetic oligonucleotide
ccaccacaugugaguucac

SEQ ID NO: 1046888 - RNA, 19 nt, Artificial Sequence
  Description of Artificial Sequence: Synthetic oligonucleotide
cacugcaaugaugcacaau

SEQ ID NO: 1046889 - RNA, 19 nt, Artificial Sequence
  Description of Artificial Sequence: Synthetic oligonucleotide
cacucccgcaggagcgucu

SEQ ID NO: 1046890 - RNA, 19 nt, Artificial Sequence
  Description of Artificial Sequence: Synthetic oligonucleotide
ccgagacgagaucucauuu

SEQ ID NO: 1046891 - RNA, 19 nt, Artificial Sequence
  Description of Artificial Sequence: Synthetic oligonucleotide
guucuggugccaggccgau

SEQ ID NO: 1046892 - RNA, 19 nt, Artificial Sequence
  Description of Artificial Sequence: Synthetic oligonucleotide
ccacggccucggauuagca

SEQ ID NO: 1046893 - RNA, 19 nt, Artificial Sequence
  Description of Artificial Sequence: Synthetic oligonucleotide
gcguuggggucacuuguuu

SEQ ID NO: 1046894 - RNA, 19 nt, Artificial Sequence
  Description of Artificial Sequence: Synthetic oligonucleotide
cggcgcgcugccauccuuc

SEQ ID NO: 1046895 - RNA, 19 nt, Artificial Sequence
  Description of Artificial Sequence: Synthetic oligonucleotide
ccacucccgcaggagcguc

SEQ ID NO: 1046896 - RNA, 19 nt, Artificial Sequence
  Description of Artificial Sequence: Synthetic oligonucleotide
ccccacgacuauggcuuuc

SEQ ID NO: 1046897 - RNA, 19 nt, Artificial Sequence
  Description of Artificial Sequence: Synthetic oligonucleotide
cacggcgcgcugccauccu

SEQ ID NO: 1046898 - RNA, 19 nt, Artificial Sequence
  Description of Artificial Sequence: Synthetic oligonucleotide
cgccgagacgagaucucau

SEQ ID NO: 1046899 - RNA, 19 nt, Artificial Sequence
  Description of Artificial Sequence: Synthetic oligonucleotide
ccagcccagugaaccugau

SEQ ID NO: 1046900 - RNA, 19 nt, Artificial Sequence
  Description of Artificial Sequence: Synthetic oligonucleotide
cccagggcuaagccaucuu

SEQ ID NO: 1046901 - RNA, 19 nt, Artificial Sequence
  Description of Artificial Sequence: Synthetic oligonucleotide
ccacagcguuggggucacu

SEQ ID NO: 1046902 - RNA, 19 nt, Artificial Sequence
  Description of Artificial Sequence: Synthetic oligonucleotide
auaaaugacagaaaagucc

SEQ ID NO: 1046903 - RNA, 19 nt, Artificial Sequence
  Description of Artificial Sequence: Synthetic oligonucleotide
aaauguagcuccuguaugg

SEQ ID NO: 1046904 - RNA, 19 nt, Artificial Sequence
  Description of Artificial Sequence: Synthetic oligonucleotide
cuucuauauaucuugaggc

SEQ ID NO: 1046905 - RNA, 19 nt, Artificial Sequence
  Description of Artificial Sequence: Synthetic oligonucleotide
aauaaaugacagaaaaguc

SEQ ID NO: 1046906 - RNA, 19 nt, Artificial Sequence
  Description of Artificial Sequence: Synthetic oligonucleotide
  modified_base (16)..(16): a, c, u, g, unknown or other
auaucuugaggccuanguc

SEQ ID NO: 1046907 - RNA, 19 nt, Artificial Sequence
  Description of Artificial Sequence: Synthetic oligonucleotide
cuagccacaagcuggaugc

SEQ ID NO: 1046908 - RNA, 19 nt, Artificial Sequence
  Description of Artificial Sequence: Synthetic oligonucleotide
uacaaagucccucugcacc

SEQ ID NO: 1046909 - RNA, 19 nt, Artificial Sequence
  Description of Artificial Sequence: Synthetic oligonucleotide
auugcuccgucucaguccc

SEQ ID NO: 1046910 - RNA, 19 nt, Artificial Sequence
  Description of Artificial Sequence: Synthetic oligonucleotide
acgauuucaaugcgcaggc

SEQ ID NO: 1046911 - RNA, 19 nt, Artificial Sequence
  Description of Artificial Sequence: Synthetic oligonucleotide
uucuauauaucuugaggcc

SEQ ID NO: 1046912 - RNA, 19 nt, Artificial Sequence
  Description of Artificial Sequence: Synthetic oligonucleotide
gauuucaaugcgcaggcgc

SEQ ID NO: 1046913 - RNA, 19 nt, Artificial Sequence
  Description of Artificial Sequence: Synthetic oligonucleotide
agucgcagugcuuuggccc

SEQ ID NO: 1046914 - RNA, 19 nt, Artificial Sequence
  Description of Artificial Sequence: Synthetic oligonucleotide
ugucucuauccucagacug

SEQ ID NO: 1046915 - RNA, 19 nt, Artificial Sequence
  Description of Artificial Sequence: Synthetic oligonucleotide
uguagcuccuguauggagc

SEQ ID NO: 1046916 - RNA, 19 nt, Artificial Sequence
  Description of Artificial Sequence: Synthetic oligonucleotide
uucacgauuucaaugcgca

SEQ ID NO: 1046917 - RNA, 19 nt, Artificial Sequence
  Description of Artificial Sequence: Synthetic oligonucleotide
uccuguauggagcagggca

SEQ ID NO: 1046918 - RNA, 19 nt, Artificial Sequence
  Description of Artificial Sequence: Synthetic oligonucleotide
aguucugguagagaaaggg

SEQ ID NO: 1046919 - RNA, 19 nt, Artificial Sequence
  Description of Artificial Sequence: Synthetic oligonucleotide
  modified_base (10)..(10): a, c, u, g, unknown or other
ugaggccuangucuggugc

SEQ ID NO: 1046920 - RNA, 19 nt, Artificial Sequence
  Description of Artificial Sequence: Synthetic oligonucleotide
aauaagcugguacccagga

SEQ ID NO: 1046921 - RNA, 19 nt, Artificial Sequence
  Description of Artificial Sequence: Synthetic oligonucleotide
ucuuuuaaccucguugugc

SEQ ID NO: 1046922 - RNA, 19 nt, Artificial Sequence
  Description of Artificial Sequence: Synthetic oligonucleotide
gcuucuauauaucuugagg

SEQ ID NO: 1046923 - RNA, 19 nt, Artificial Sequence
  Description of Artificial Sequence: Synthetic oligonucleotide
ucuauauaucuugaggccu

SEQ ID NO: 1046924 - RNA, 19 nt, Artificial Sequence
  Description of Artificial Sequence: Synthetic oligonucleotide
  modified_base (2)..(2): a, c, u, g, unknown or other
angucuggugccuguggac

SEQ ID NO: 1046925 - RNA, 19 nt, Artificial Sequence
  Description of Artificial Sequence: Synthetic oligonucleotide
uguuagcuagagcuggcag

SEQ ID NO: 1046926 - RNA, 19 nt, Artificial Sequence
  Description of Artificial Sequence: Synthetic oligonucleotide
cauggguaccacaauuucc

SEQ ID NO: 1046927 - RNA, 19 nt, Artificial Sequence
  Description of Artificial Sequence: Synthetic oligonucleotide
ucuagccacaagcuggaug

SEQ ID NO: 1046928 - RNA, 19 nt, Artificial Sequence
  Description of Artificial Sequence: Synthetic oligonucleotide
uuguagaguucgaaguagc

SEQ ID NO: 1046929 - RNA, 19 nt, Artificial Sequence
  Description of Artificial Sequence: Synthetic oligonucleotide
aguaguggcuuggugacac

SEQ ID NO: 1046930 - RNA, 19 nt, Artificial Sequence
  Description of Artificial Sequence: Synthetic oligonucleotide
acuacuggcugccccaccg

SEQ ID NO: 1046931 - RNA, 19 nt, Artificial Sequence
  Description of Artificial Sequence: Synthetic oligonucleotide
uugugcaggcauuugugag

SEQ ID NO: 1046932 - RNA, 19 nt, Artificial Sequence
  Description of Artificial Sequence: Synthetic oligonucleotide
cacgauuucaaugcgcagg

SEQ ID NO: 1046933 - RNA, 19 nt, Artificial Sequence
  Description of Artificial Sequence: Synthetic oligonucleotide
uguagaguucgaaguagcu

SEQ ID NO: 1046934 - RNA, 19 nt, Artificial Sequence
  Description of Artificial Sequence: Synthetic oligonucleotide
gugggcuccauucugagac

SEQ ID NO: 1046935 - RNA, 19 nt, Artificial Sequence
  Description of Artificial Sequence: Synthetic oligonucleotide
cuaugugugaggcauccac

SEQ ID NO: 1046936 - RNA, 19 nt, Artificial Sequence
  Description of Artificial Sequence: Synthetic oligonucleotide
cuauccucagacugcacag

SEQ ID NO: 1046937 - RNA, 19 nt, Artificial Sequence
  Description of Artificial Sequence: Synthetic oligonucleotide
ucugcacacguucuugcgc

SEQ ID NO: 1046938 - RNA, 19 nt, Artificial Sequence
  Description of Artificial Sequence: Synthetic oligonucleotide
cuuuuaaccucguugugca

SEQ ID NO: 1046939 - RNA, 19 nt, Artificial Sequence
  Description of Artificial Sequence: Synthetic oligonucleotide
ucauccagguaucaucccu

SEQ ID NO: 1046940 - RNA, 19 nt, Artificial Sequence
  Description of Artificial Sequence: Synthetic oligonucleotide
ucuaccugaagcugcuccc

SEQ ID NO: 1046941 - RNA, 19 nt, Artificial Sequence
  Description of Artificial Sequence: Synthetic oligonucleotide
  modified_base (3)..(3): a, c, u, g, unknown or other
uangucuggugccugugga

SEQ ID NO: 1046942 - RNA, 19 nt, Artificial Sequence
  Description of Artificial Sequence: Synthetic oligonucleotide
uguggacaaauacuuuagu

SEQ ID NO: 1046943 - RNA, 19 nt, Artificial Sequence
  Description of Artificial Sequence: Synthetic oligonucleotide
ugugucuguugccuggccc

SEQ ID NO: 1046944 - RNA, 19 nt, Artificial Sequence
  Description of Artificial Sequence: Synthetic oligonucleotide
cuguggacaaauacuuuag

SEQ ID NO: 1046945 - RNA, 19 nt, Artificial Sequence
  Description of Artificial Sequence: Synthetic oligonucleotide
ugcuucuauauaucuugag

SEQ ID NO: 1046946 - RNA, 19 nt, Artificial Sequence
  Description of Artificial Sequence: Synthetic oligonucleotide
acugucgucgcaguugugg

SEQ ID NO: 1046947 - RNA, 19 nt, Artificial Sequence
  Description of Artificial Sequence: Synthetic oligonucleotide
ucuugcgccuggcucaaag

SEQ ID NO: 1046948 - RNA, 19 nt, Artificial Sequence
  Description of Artificial Sequence: Synthetic oligonucleotide
cuucacgauuucaaugcgc

SEQ ID NO: 1046949 - RNA, 19 nt, Artificial Sequence
  Description of Artificial Sequence: Synthetic oligonucleotide
cucgcuguuagcuagagcu

SEQ ID NO: 1046950 - RNA, 19 nt, Artificial Sequence
  Description of Artificial Sequence: Synthetic oligonucleotide
cauugcuccgucucagucc

SEQ ID NO: 1046951 - RNA, 19 nt, Artificial Sequence
  Description of Artificial Sequence: Synthetic oligonucleotide
uuagugucauacaguccag

SEQ ID NO: 1046952 - RNA, 19 nt, Artificial Sequence
  Description of Artificial Sequence: Synthetic oligonucleotide
uccuugguggaaguagugg

SEQ ID NO: 1046953 - RNA, 19 nt, Artificial Sequence
  Description of Artificial Sequence: Synthetic oligonucleotide
caaagguuccagcggaggc

SEQ ID NO: 1046954 - RNA, 19 nt, Artificial Sequence
  Description of Artificial Sequence: Synthetic oligonucleotide
aggcauuugugagaagugg

SEQ ID NO: 1046955 - RNA, 19 nt, Artificial Sequence
  Description of Artificial Sequence: Synthetic oligonucleotide
  modified_base (4)..(4): a, c, u, g, unknown or other
cuangucuggugccugugg

SEQ ID NO: 1046956 - RNA, 19 nt, Artificial Sequence
  Description of Artificial Sequence: Synthetic oligonucleotide
cucuaccugaagcugcucc

SEQ ID NO: 1046957 - RNA, 19 nt, Artificial Sequence
  Description of Artificial Sequence: Synthetic oligonucleotide
ggaaguaguggcuugguga

SEQ ID NO: 1046958 - RNA, 19 nt, Artificial Sequence
  Description of Artificial Sequence: Synthetic oligonucleotide
auucugagaccugcagucc

SEQ ID NO: 1046959 - RNA, 19 nt, Artificial Sequence
  Description of Artificial Sequence: Synthetic oligonucleotide
ugccuguggacaaauacuu

SEQ ID NO: 1046960 - RNA, 19 nt, Artificial Sequence
  Description of Artificial Sequence: Synthetic oligonucleotide
  modified_base (9)..(9): a, c, u, g, unknown or other
gaggccuangucuggugcc

SEQ ID NO: 1046961 - RNA, 19 nt, Artificial Sequence
  Description of Artificial Sequence: Synthetic oligonucleotide
ugaggcauccacugacacc

SEQ ID NO: 1046962 - RNA, 19 nt, Artificial Sequence
  Description of Artificial Sequence: Synthetic oligonucleotide
cugaaagcuacagggcucg

SEQ ID NO: 1046963 - RNA, 19 nt, Artificial Sequence
  Description of Artificial Sequence: Synthetic oligonucleotide
aucugcacacguucuugcg

SEQ ID NO: 1046964 - RNA, 19 nt, Artificial Sequence
  Description of Artificial Sequence: Synthetic oligonucleotide
aauguagcuccuguaugga

SEQ ID NO: 1046965 - RNA, 19 nt, Artificial Sequence
  Description of Artificial Sequence: Synthetic oligonucleotide
ugggcuaggagcaccugca

SEQ ID NO: 1046966 - RNA, 19 nt, Artificial Sequence
  Description of Artificial Sequence: Synthetic oligonucleotide
guagaguucgaaguagcug

SEQ ID NO: 1046967 - RNA, 19 nt, Artificial Sequence
  Description of Artificial Sequence: Synthetic oligonucleotide
ugugaggcauccacugaca

SEQ ID NO: 1046968 - RNA, 19 nt, Artificial Sequence
  Description of Artificial Sequence: Synthetic oligonucleotide
ucguugugcaggcauuugu

SEQ ID NO: 1046969 - RNA, 19 nt, Artificial Sequence
  Description of Artificial Sequence: Synthetic oligonucleotide
ucauugcuccgucucaguc

SEQ ID NO: 1046970 - RNA, 19 nt, Artificial Sequence
  Description of Artificial Sequence: Synthetic oligonucleotide
uaccuguagggccugggac

SEQ ID NO: 1046971 - RNA, 19 nt, Artificial Sequence
  Description of Artificial Sequence: Synthetic oligonucleotide
cuacuguccaggcuuggag

SEQ ID NO: 1046972 - RNA, 19 nt, Artificial Sequence
  Description of Artificial Sequence: Synthetic oligonucleotide
cuggaauaagcugguaccc

SEQ ID NO: 1046973 - RNA, 19 nt, Artificial Sequence
  Description of Artificial Sequence: Synthetic oligonucleotide
caggcguaccuguagggcc

SEQ ID NO: 1046974 - RNA, 19 nt, Artificial Sequence
  Description of Artificial Sequence: Synthetic oligonucleotide
aaccucguugugcaggcau

SEQ ID NO: 1046975 - RNA, 19 nt, Artificial Sequence
  Description of Artificial Sequence: Synthetic oligonucleotide
uuuuaaccucguugugcag

SEQ ID NO: 1046976 - RNA, 19 nt, Artificial Sequence
  Description of Artificial Sequence: Synthetic oligonucleotide
caucugcacacguucuugc

SEQ ID NO: 1046977 - RNA, 19 nt, Artificial Sequence
  Description of Artificial Sequence: Synthetic oligonucleotide
aggcacuacuggcugcccc

SEQ ID NO: 1046978 - RNA, 19 nt, Artificial Sequence
  Description of Artificial Sequence: Synthetic oligonucleotide
auguagcuccuguauggag

SEQ ID NO: 1046979 - RNA, 19 nt, Artificial Sequence
  Description of Artificial Sequence: Synthetic oligonucleotide
uccaaagguuccagcggag

SEQ ID NO: 1046980 - RNA, 19 nt, Artificial Sequence
  Description of Artificial Sequence: Synthetic oligonucleotide
ucacgauuucaaugcgcag

SEQ ID NO: 1046981 - RNA, 19 nt, Artificial Sequence
  Description of Artificial Sequence: Synthetic oligonucleotide
agguaucaucccugagagc

SEQ ID NO: 1046982 - RNA, 19 nt, Artificial Sequence
  Description of Artificial Sequence: Synthetic oligonucleotide
cugucgucgcaguuguggg

SEQ ID NO: 1046983 - RNA, 19 nt, Artificial Sequence
  Description of Artificial Sequence: Synthetic oligonucleotide
ucucuauccucagacugca

SEQ ID NO: 1046984 - RNA, 19 nt, Artificial Sequence
  Description of Artificial Sequence: Synthetic oligonucleotide
cauccagguaucaucccug

SEQ ID NO: 1046985 - RNA, 19 nt, Artificial Sequence
  Description of Artificial Sequence: Synthetic oligonucleotide
gcucccacugguuaucugg

SEQ ID NO: 1046986 - RNA, 19 nt, Artificial Sequence
  Description of Artificial Sequence: Synthetic oligonucleotide
uguauggagcagggcaggg

SEQ ID NO: 1046987 - RNA, 19 nt, Artificial Sequence
  Description of Artificial Sequence: Synthetic oligonucleotide
agugccaguggacaccaga

SEQ ID NO: 1046988 - RNA, 19 nt, Artificial Sequence
  Description of Artificial Sequence: Synthetic oligonucleotide
gaagcuuccccagaaggga

SEQ ID NO: 1046989 - RNA, 19 nt, Artificial Sequence
  Description of Artificial Sequence: Synthetic oligonucleotide
uggacaccagagaagccgu

SEQ ID NO: 1046990 - RNA, 19 nt, Artificial Sequence
  Description of Artificial Sequence: Synthetic oligonucleotide
uugaugucccugaggggug

SEQ ID NO: 1046991 - RNA, 19 nt, Artificial Sequence
  Description of Artificial Sequence: Synthetic oligonucleotide
gacagccguacaaaguccc

SEQ ID NO: 1046992 - RNA, 19 nt, Artificial Sequence
  Description of Artificial Sequence: Synthetic oligonucleotide
ggauccauggggcagcaug

SEQ ID NO: 1046993 - RNA, 19 nt, Artificial Sequence
  Description of Artificial Sequence: Synthetic oligonucleotide
acucgcuguuagcuagagc

SEQ ID NO: 1046994 - RNA, 19 nt, Artificial Sequence
  Description of Artificial Sequence: Synthetic oligonucleotide
cuucaugaguccuuuucca

SEQ ID NO: 1046995 - RNA, 19 nt, Artificial Sequence
  Description of Artificial Sequence: Synthetic oligonucleotide
gacacuacuguccaggcuu

SEQ ID NO: 1046996 - RNA, 19 nt, Artificial Sequence
  Description of Artificial Sequence: Synthetic oligonucleotide
gguuuuggaaggcggcugg

SEQ ID NO: 1046997 - RNA, 19 nt, Artificial Sequence
  Description of Artificial Sequence: Synthetic oligonucleotide
cuacgcacuugcuccagag

SEQ ID NO: 1046998 - RNA, 19 nt, Artificial Sequence
  Description of Artificial Sequence: Synthetic oligonucleotide
uugcgccuggcucaaaguc

SEQ ID NO: 1046999 - RNA, 19 nt, Artificial Sequence
  Description of Artificial Sequence: Synthetic oligonucleotide
cucacccucauucucccac

SEQ ID NO: 1047000 - RNA, 19 nt, Artificial Sequence
  Description of Artificial Sequence: Synthetic oligonucleotide
gaagggaagcuucuugucu

SEQ ID NO: 1047001 - RNA, 19 nt, Artificial Sequence
  Description of Artificial Sequence: Synthetic oligonucleotide
ugccgcaccagcaaaugua

SEQ ID NO: 1047002 - RNA, 19 nt, Artificial Sequence
  Description of Artificial Sequence: Synthetic oligonucleotide
gguaccacaauuucccgga

SEQ ID NO: 1047003 - RNA, 19 nt, Artificial Sequence
  Description of Artificial Sequence: Synthetic oligonucleotide
ucgagugccucccgcagcu

SEQ ID NO: 1047004 - RNA, 19 nt, Artificial Sequence
  Description of Artificial Sequence: Synthetic oligonucleotide
gcuagggaggcacuacugg

SEQ ID NO: 1047005 - RNA, 19 nt, Artificial Sequence
  Description of Artificial Sequence: Synthetic oligonucleotide
gagaccugcaguccguguc

SEQ ID NO: 1047006 - RNA, 19 nt, Artificial Sequence
  Description of Artificial Sequence: Synthetic oligonucleotide
agaaaaguccggccuugcu

SEQ ID NO: 1047007 - RNA, 19 nt, Artificial Sequence
  Description of Artificial Sequence: Synthetic oligonucleotide
auuucaaugcgcaggcgcu

SEQ ID NO: 1047008 - RNA, 19 nt, Artificial Sequence
  Description of Artificial Sequence: Synthetic oligonucleotide
ucgcuguuagcuagagcug

SEQ ID NO: 1047009 - RNA, 19 nt, Artificial Sequence
  Description of Artificial Sequence: Synthetic oligonucleotide
caggcauuugugagaagug

SEQ ID NO: 1047010 - RNA, 19 nt, Artificial Sequence
  Description of Artificial Sequence: Synthetic oligonucleotide
uccgucucagucccucuug

SEQ ID NO: 1047011 - RNA, 19 nt, Artificial Sequence
  Description of Artificial Sequence: Synthetic oligonucleotide
ugacacuacuguccaggcu

SEQ ID NO: 1047012 - RNA, 19 nt, Artificial Sequence
  Description of Artificial Sequence: Synthetic oligonucleotide
ggaagcuuccccagaaggg

SEQ ID NO: 1047013 - RNA, 19 nt, Artificial Sequence
  Description of Artificial Sequence: Synthetic oligonucleotide
ucguugcacccucagcugu

SEQ ID NO: 1047014 - RNA, 19 nt, Artificial Sequence
  Description of Artificial Sequence: Synthetic oligonucleotide
ccuugguggaaguaguggc

SEQ ID NO: 1047015 - RNA, 19 nt, Artificial Sequence
  Description of Artificial Sequence: Synthetic oligonucleotide
aauccgcuccaggcguacc

SEQ ID NO: 1047016 - RNA, 19 nt, Artificial Sequence
  Description of Artificial Sequence: Synthetic oligonucleotide
aagguuccagcggaggcga

SEQ ID NO: 1047017 - RNA, 19 nt, Artificial Sequence
  Description of Artificial Sequence: Synthetic oligonucleotide
gucuuuuaaccucguugug

SEQ ID NO: 1047018 - RNA, 19 nt, Artificial Sequence
  Description of Artificial Sequence: Synthetic oligonucleotide
ugucgucgcaguugugggc

SEQ ID NO: 1047019 - RNA, 19 nt, Artificial Sequence
  Description of Artificial Sequence: Synthetic oligonucleotide
guuccagcggaggcgaggg

SEQ ID NO: 1047020 - RNA, 19 nt, Artificial Sequence
  Description of Artificial Sequence: Synthetic oligonucleotide
cauucucccacugcuccgg

SEQ ID NO: 1047021 - RNA, 19 nt, Artificial Sequence
  Description of Artificial Sequence: Synthetic oligonucleotide
gugacacuacuguccaggc

SEQ ID NO: 1047022 - RNA, 19 nt, Artificial Sequence
  Description of Artificial Sequence: Synthetic oligonucleotide
aaaguccggccuugcuucu

SEQ ID NO: 1047023 - RNA, 19 nt, Artificial Sequence
  Description of Artificial Sequence: Synthetic oligonucleotide
gagccggacucgcuguuag

SEQ ID NO: 1047024 - RNA, 19 nt, Artificial Sequence
  Description of Artificial Sequence: Synthetic oligonucleotide
aguggacaccagagaagcc

SEQ ID NO: 1047025 - RNA, 19 nt, Artificial Sequence
  Description of Artificial Sequence: Synthetic oligonucleotide
  modified_base (19)..(19): a, c, u, g, unknown or other
uauauaucuugaggccuan

SEQ ID NO: 1047026 - RNA, 19 nt, Artificial Sequence
  Description of Artificial Sequence: Synthetic oligonucleotide
ggcauuugugagaaguggc

SEQ ID NO: 1047027 - RNA, 19 nt, Artificial Sequence
  Description of Artificial Sequence: Synthetic oligonucleotide
cucauccagguaucauccc

SEQ ID NO: 1047028 - RNA, 19 nt, Artificial Sequence
  Description of Artificial Sequence: Synthetic oligonucleotide
ugugccgcaccagcaaaug

SEQ ID NO: 1047029 - RNA, 19 nt, Artificial Sequence
  Description of Artificial Sequence: Synthetic oligonucleotide
gaaaaguccggccuugcuu

SEQ ID NO: 1047030 - RNA, 19 nt, Artificial Sequence
  Description of Artificial Sequence: Synthetic oligonucleotide
cucguugcacccucagcug

SEQ ID NO: 1047031 - RNA, 19 nt, Artificial Sequence
  Description of Artificial Sequence: Synthetic oligonucleotide
gcauuugugagaaguggcc

SEQ ID NO: 1047032 - RNA, 19 nt, Artificial Sequence
  Description of Artificial Sequence: Synthetic oligonucleotide
cuucuagccacaagcugga

SEQ ID NO: 1047033 - RNA, 19 nt, Artificial Sequence
  Description of Artificial Sequence: Synthetic oligonucleotide
cuucucguugcacccucag

SEQ ID NO: 1047034 - RNA, 19 nt, Artificial Sequence
  Description of Artificial Sequence: Synthetic oligonucleotide
uagugucauacaguccaga

SEQ ID NO: 1047035 - RNA, 19 nt, Artificial Sequence
  Description of Artificial Sequence: Synthetic oligonucleotide
gugaggcauccacugacac

SEQ ID NO: 1047036 - RNA, 19 nt, Artificial Sequence
  Description of Artificial Sequence: Synthetic oligonucleotide
agccggacucgcuguuagc

SEQ ID NO: 1047037 - RNA, 19 nt, Artificial Sequence
  Description of Artificial Sequence: Synthetic oligonucleotide
uccggccuugcuucuauau

SEQ ID NO: 1047038 - RNA, 19 nt, Artificial Sequence
  Description of Artificial Sequence: Synthetic oligonucleotide
cagagugccaguggacacc

SEQ ID NO: 1047039 - RNA, 19 nt, Artificial Sequence
  Description of Artificial Sequence: Synthetic oligonucleotide
agggcuagggaggcacuac

SEQ ID NO: 1047040 - RNA, 19 nt, Artificial Sequence
  Description of Artificial Sequence: Synthetic oligonucleotide
ugagaccugcaguccgugu

SEQ ID NO: 1047041 - RNA, 19 nt, Artificial Sequence
  Description of Artificial Sequence: Synthetic oligonucleotide
gacucgcuguuagcuagag

SEQ ID NO: 1047042 - RNA, 19 nt, Artificial Sequence
  Description of Artificial Sequence: Synthetic oligonucleotide
uuucaaugcgcaggcgcuc

SEQ ID NO: 1047043 - RNA, 19 nt, Artificial Sequence
  Description of Artificial Sequence: Synthetic oligonucleotide
cagcuguuugagguggccc

SEQ ID NO: 1047044 - RNA, 19 nt, Artificial Sequence
  Description of Artificial Sequence: Synthetic oligonucleotide
uccgugucucacaguucug

SEQ ID NO: 1047045 - RNA, 19 nt, Artificial Sequence
  Description of Artificial Sequence: Synthetic oligonucleotide
ccaccgagggagaaggaag

SEQ ID NO: 1047046 - RNA, 19 nt, Artificial Sequence
  Description of Artificial Sequence: Synthetic oligonucleotide
uggugacacuacuguccag

SEQ ID NO: 1047047 - RNA, 19 nt, Artificial Sequence
  Description of Artificial Sequence: Synthetic oligonucleotide
ccagguaucaucccugaga

SEQ ID NO: 1047048 - RNA, 19 nt, Artificial Sequence
  Description of Artificial Sequence: Synthetic oligonucleotide
cuugguggaaguaguggcu

SEQ ID NO: 1047049 - RNA, 19 nt, Artificial Sequence
  Description of Artificial Sequence: Synthetic oligonucleotide
cucaggaguccuugauguc

SEQ ID NO: 1047050 - RNA, 19 nt, Artificial Sequence
  Description of Artificial Sequence: Synthetic oligonucleotide
gucgcaguugugggcaaag

SEQ ID NO: 1047051 - RNA, 19 nt, Artificial Sequence
  Description of Artificial Sequence: Synthetic oligonucleotide
aagcuggaugcgccuugga

SEQ ID NO: 1047052 - RNA, 19 nt, Artificial Sequence
  Description of Artificial Sequence: Synthetic oligonucleotide
cuaggagcaccugcauuug

SEQ ID NO: 1047053 - RNA, 19 nt, Artificial Sequence
  Description of Artificial Sequence: Synthetic oligonucleotide
gucgucgcaguugugggca

SEQ ID NO: 1047054 - RNA, 19 nt, Artificial Sequence
  Description of Artificial Sequence: Synthetic oligonucleotide
guaccuguagggccuggga

SEQ ID NO: 1047055 - RNA, 19 nt, Artificial Sequence
  Description of Artificial Sequence: Synthetic oligonucleotide
aguccagaaagcagccgca

SEQ ID NO: 1047056 - RNA, 19 nt, Artificial Sequence
  Description of Artificial Sequence: Synthetic oligonucleotide
ugcuacgcacuugcuccag

SEQ ID NO: 1047057 - RNA, 19 nt, Artificial Sequence
  Description of Artificial Sequence: Synthetic oligonucleotide
guugcacccucagcugucc

SEQ ID NO: 1047058 - RNA, 19 nt, Artificial Sequence
  Description of Artificial Sequence: Synthetic oligonucleotide
cucccacugguuaucugga

SEQ ID NO: 1047059 - RNA, 19 nt, Artificial Sequence
  Description of Artificial Sequence: Synthetic oligonucleotide
aguccgugucucacaguuc

SEQ ID NO: 1047060 - RNA, 19 nt, Artificial Sequence
  Description of Artificial Sequence: Synthetic oligonucleotide
cuccugugucuguugccug

SEQ ID NO: 1047061 - RNA, 19 nt, Artificial Sequence
  Description of Artificial Sequence: Synthetic oligonucleotide
agggccuaugugugaggca

SEQ ID NO: 1047062 - RNA, 19 nt, Artificial Sequence
  Description of Artificial Sequence: Synthetic oligonucleotide
auccuugguggaaguagug

SEQ ID NO: 1047063 - RNA, 19 nt, Artificial Sequence
  Description of Artificial Sequence: Synthetic oligonucleotide
aguccggccuugcuucuau

SEQ ID NO: 1047064 - RNA, 19 nt, Artificial Sequence
  Description of Artificial Sequence: Synthetic oligonucleotide
gcuccuguauggagcaggg

SEQ ID NO: 1047065 - RNA, 19 nt, Artificial Sequence
  Description of Artificial Sequence: Synthetic oligonucleotide
caggcccagccauccuugg

SEQ ID NO: 1047066 - RNA, 19 nt, Artificial Sequence
  Description of Artificial Sequence: Synthetic oligonucleotide
cauccuugguggaaguagu

SEQ ID NO: 1047067 - RNA, 19 nt, Artificial Sequence
  Description of Artificial Sequence: Synthetic oligonucleotide
cuuggcgaauccgcuccag

SEQ ID NO: 1047068 - RNA, 19 nt, Artificial Sequence
  Description of Artificial Sequence: Synthetic oligonucleotide
ucagcccggagcccuugau

SEQ ID NO: 1047069 - RNA, 19 nt, Artificial Sequence
  Description of Artificial Sequence: Synthetic oligonucleotide
cguugugcaggcauuugug

SEQ ID NO: 1047070 - RNA, 19 nt, Artificial Sequence
  Description of Artificial Sequence: Synthetic oligonucleotide
ccauggguaccacaauuuc

SEQ ID NO: 1047071 - RNA, 19 nt, Artificial Sequence
  Description of Artificial Sequence: Synthetic oligonucleotide
ccaaagguuccagcggagg

SEQ ID NO: 1047072 - RNA, 19 nt, Artificial Sequence
  Description of Artificial Sequence: Synthetic oligonucleotide
ugcguugcucuugcuggac

SEQ ID NO: 1047073 - RNA, 19 nt, Artificial Sequence
  Description of Artificial Sequence: Synthetic oligonucleotide
cucuauccucagacugcac

SEQ ID NO: 1047074 - RNA, 19 nt, Artificial Sequence
  Description of Artificial Sequence: Synthetic oligonucleotide
gccgcaccagcaaauguag

SEQ ID NO: 1047075 - RNA, 19 nt, Artificial Sequence
  Description of Artificial Sequence: Synthetic oligonucleotide
gaguucgaaguagcugcuc

SEQ ID NO: 1047076 - RNA, 19 nt, Artificial Sequence
  Description of Artificial Sequence: Synthetic oligonucleotide
  modified_base (8)..(8): a, c, u, g, unknown or other
aggccuangucuggugccu

SEQ ID NO: 1047077 - RNA, 19 nt, Artificial Sequence
  Description of Artificial Sequence: Synthetic oligonucleotide
gaauccgcuccaggcguac

SEQ ID NO: 1047078 - RNA, 19 nt, Artificial Sequence
  Description of Artificial Sequence: Synthetic oligonucleotide
caaugcgcaggcgcucagc

SEQ ID NO: 1047079 - RNA, 19 nt, Artificial Sequence
  Description of Artificial Sequence: Synthetic oligonucleotide
gcuaggagcaccugcauuu

SEQ ID NO: 1047080 - RNA, 19 nt, Artificial Sequence
  Description of Artificial Sequence: Synthetic oligonucleotide
cucguugugcaggcauuug

SEQ ID NO: 1047081 - RNA, 19 nt, Artificial Sequence
  Description of Artificial Sequence: Synthetic oligonucleotide
cguacaaagucccucugca

SEQ ID NO: 1047082 - RNA, 19 nt, Artificial Sequence
  Description of Artificial Sequence: Synthetic oligonucleotide
gggacccucauccagguau

SEQ ID NO: 1047083 - RNA, 19 nt, Artificial Sequence
  Description of Artificial Sequence: Synthetic oligonucleotide
uuccagcggaggcgagggc

SEQ ID NO: 1047084 - RNA, 19 nt, Artificial Sequence
  Description of Artificial Sequence: Synthetic oligonucleotide
ggcacuacuggcugcccca

SEQ ID NO: 1047085 - RNA, 19 nt, Artificial Sequence
  Description of Artificial Sequence: Synthetic oligonucleotide
ccccucuaccugaagcugc

SEQ ID NO: 1047086 - RNA, 19 nt, Artificial Sequence
  Description of Artificial Sequence: Synthetic oligonucleotide
aggcguaccuguagggccu

SEQ ID NO: 1047087 - RNA, 19 nt, Artificial Sequence
  Description of Artificial Sequence: Synthetic oligonucleotide
cggacucgcuguuagcuag

SEQ ID NO: 1047088 - RNA, 19 nt, Artificial Sequence
  Description of Artificial Sequence: Synthetic oligonucleotide
ccucuagcacaucugucuc

SEQ ID NO: 1047089 - RNA, 19 nt, Artificial Sequence
  Description of Artificial Sequence: Synthetic oligonucleotide
cugagaccugcaguccgug

SEQ ID NO: 1047090 - RNA, 19 nt, Artificial Sequence
  Description of Artificial Sequence: Synthetic oligonucleotide
ggccuugcguugcucuugc

SEQ ID NO: 1047091 - RNA, 19 nt, Artificial Sequence
  Description of Artificial Sequence: Synthetic oligonucleotide
acagccguacaaagucccu

SEQ ID NO: 1047092 - RNA, 19 nt, Artificial Sequence
  Description of Artificial Sequence: Synthetic oligonucleotide
uggugccuguggacaaaua

SEQ ID NO: 1047093 - RNA, 19 nt, Artificial Sequence
  Description of Artificial Sequence: Synthetic oligonucleotide
cugcagucgcagugcuuug

SEQ ID NO: 1047094 - RNA, 19 nt, Artificial Sequence
  Description of Artificial Sequence: Synthetic oligonucleotide
gucgcagugcuuuggcccu

SEQ ID NO: 1047095 - RNA, 19 nt, Artificial Sequence
  Description of Artificial Sequence: Synthetic oligonucleotide
ugggccuugcguugcucuu

SEQ ID NO: 1047096 - RNA, 19 nt, Artificial Sequence
  Description of Artificial Sequence: Synthetic oligonucleotide
caguccgugucucacaguu

SEQ ID NO: 1047097 - RNA, 19 nt, Artificial Sequence
  Description of Artificial Sequence: Synthetic oligonucleotide
cuguugccuggcccuugcc

SEQ ID NO: 1047098 - RNA, 19 nt, Artificial Sequence
  Description of Artificial Sequence: Synthetic oligonucleotide
uaaccucguugugcaggca

SEQ ID NO: 1047099 - RNA, 19 nt, Artificial Sequence
  Description of Artificial Sequence: Synthetic oligonucleotide
gguggcccagcucucgauc

SEQ ID NO: 1047100 - RNA, 19 nt, Artificial Sequence
  Description of Artificial Sequence: Synthetic oligonucleotide
cccucaggaguccuugaug

SEQ ID NO: 1047101 - RNA, 19 nt, Artificial Sequence
  Description of Artificial Sequence: Synthetic oligonucleotide
gcgccuuggagccggacuc

SEQ ID NO: 1047102 - RNA, 19 nt, Artificial Sequence
  Description of Artificial Sequence: Synthetic oligonucleotide
ccgccccucuaccugaagc

SEQ ID NO: 1047103 - RNA, 19 nt, Artificial Sequence
  Description of Artificial Sequence: Synthetic oligonucleotide
gccguacaaagucccucug

SEQ ID NO: 1047104 - RNA, 19 nt, Artificial Sequence
  Description of Artificial Sequence: Synthetic oligonucleotide
ccagcggaggcgagggccc

SEQ ID NO: 1047105 - RNA, 19 nt, Artificial Sequence
  Description of Artificial Sequence: Synthetic oligonucleotide
gucccugaggggugccuca

SEQ ID NO: 1047106 - RNA, 19 nt, Artificial Sequence
  Description of Artificial Sequence: Synthetic oligonucleotide
ccucagggaccagagugcc

SEQ ID NO: 1047107 - RNA, 19 nt, Artificial Sequence
  Description of Artificial Sequence: Synthetic oligonucleotide
agucccuuguagaguucga

SEQ ID NO: 1047108 - RNA, 19 nt, Artificial Sequence
  Description of Artificial Sequence: Synthetic oligonucleotide
gaaggcggcugggacccuc

SEQ ID NO: 1047109 - RNA, 19 nt, Artificial Sequence
  Description of Artificial Sequence: Synthetic oligonucleotide
ccgucucagucccucuugc

SEQ ID NO: 1047110 - RNA, 19 nt, Artificial Sequence
  Description of Artificial Sequence: Synthetic oligonucleotide
cuugcgccuggcucaaagu

SEQ ID NO: 1047111 - RNA, 19 nt, Artificial Sequence
  Description of Artificial Sequence: Synthetic oligonucleotide
ggugugccgcaccagcaaa

SEQ ID NO: 1047112 - RNA, 19 nt, Artificial Sequence
  Description of Artificial Sequence: Synthetic oligonucleotide
  modified_base (5)..(5): a, c, u, g, unknown or other
ccuangucuggugccugug

SEQ ID NO: 1047113 - RNA, 19 nt, Artificial Sequence
  Description of Artificial Sequence: Synthetic oligonucleotide
gucuguugccuggcccuug

SEQ ID NO: 1047114 - RNA, 19 nt, Artificial Sequence
  Description of Artificial Sequence: Synthetic oligonucleotide
gggcucggccuguacuuug

SEQ ID NO: 1047115 - RNA, 19 nt, Artificial Sequence
  Description of Artificial Sequence: Synthetic oligonucleotide
cugcaucugcacacguucu

SEQ ID NO: 1047116 - RNA, 19 nt, Artificial Sequence
  Description of Artificial Sequence: Synthetic oligonucleotide
ccgggugugccgcaccagc

SEQ ID NO: 1047117 - RNA, 19 nt, Artificial Sequence
  Description of Artificial Sequence: Synthetic oligonucleotide
ccagcaaauguagcuccug

SEQ ID NO: 1047118 - RNA, 19 nt, Artificial Sequence
  Description of Artificial Sequence: Synthetic oligonucleotide
cugccgggugugccgcacc

SEQ ID NO: 1047119 - RNA, 19 nt, Artificial Sequence
  Description of Artificial Sequence: Synthetic oligonucleotide
augcgccuuggagccggac

SEQ ID NO: 1047120 - RNA, 19 nt, Artificial Sequence
  Description of Artificial Sequence: Synthetic oligonucleotide
aaguccggccuugcuucua

SEQ ID NO: 1047121 - RNA, 19 nt, Artificial Sequence
  Description of Artificial Sequence: Synthetic oligonucleotide
cugccgccccucuaccuga

SEQ ID NO: 1047122 - RNA, 19 nt, Artificial Sequence
  Description of Artificial Sequence: Synthetic oligonucleotide
cucauugcuccgucucagu

SEQ ID NO: 1047123 - RNA, 19 nt, Artificial Sequence
  Description of Artificial Sequence: Synthetic oligonucleotide
cacugucgucgcaguugug

SEQ ID NO: 1047124 - RNA, 19 nt, Artificial Sequence
  Description of Artificial Sequence: Synthetic oligonucleotide
  modified_base (7)..(7): a, c, u, g, unknown or other
ggccuangucuggugccug

SEQ ID NO: 1047125 - RNA, 19 nt, Artificial Sequence
  Description of Artificial Sequence: Synthetic oligonucleotide
ccgcaccagcaaauguagc

SEQ ID NO: 1047126 - RNA, 19 nt, Artificial Sequence
  Description of Artificial Sequence: Synthetic oligonucleotide
gcgaauccgcuccaggcgu

SEQ ID NO: 1047127 - RNA, 19 nt, Artificial Sequence
  Description of Artificial Sequence: Synthetic oligonucleotide
accucguugugcaggcauu

SEQ ID NO: 1047128 - RNA, 19 nt, Artificial Sequence
  Description of Artificial Sequence: Synthetic oligonucleotide
gugccgcaccagcaaaugu

SEQ ID NO: 1047129 - RNA, 19 nt, Artificial Sequence
  Description of Artificial Sequence: Synthetic oligonucleotide
gccugggacagccguacaa

SEQ ID NO: 1047130 - RNA, 19 nt, Artificial Sequence
  Description of Artificial Sequence: Synthetic oligonucleotide
gggccuaugugugaggcau

SEQ ID NO: 1047131 - RNA, 19 nt, Artificial Sequence
  Description of Artificial Sequence: Synthetic oligonucleotide
gcuacgcacuugcuccaga

SEQ ID NO: 1047132 - RNA, 19 nt, Artificial Sequence
  Description of Artificial Sequence: Synthetic oligonucleotide
guucuugcgccuggcucaa

SEQ ID NO: 1047133 - RNA, 19 nt, Artificial Sequence
  Description of Artificial Sequence: Synthetic oligonucleotide
guaguggcuuggugacacu

SEQ ID NO: 1047134 - RNA, 19 nt, Artificial Sequence
  Description of Artificial Sequence: Synthetic oligonucleotide
cgauuucaaugcgcaggcg

SEQ ID NO: 1047135 - RNA, 19 nt, Artificial Sequence
  Description of Artificial Sequence: Synthetic oligonucleotide
cucagcccggagcccuuga

SEQ ID NO: 1047136 - RNA, 19 nt, Artificial Sequence
  Description of Artificial Sequence: Synthetic oligonucleotide
gucccucuugcagcucauc

SEQ ID NO: 1047137 - RNA, 19 nt, Artificial Sequence
  Description of Artificial Sequence: Synthetic oligonucleotide
agucccucuugcagcucau

SEQ ID NO: 1047138 - RNA, 19 nt, Artificial Sequence
  Description of Artificial Sequence: Synthetic oligonucleotide
agguuccagcggaggcgag

SEQ ID NO: 1047139 - RNA, 19 nt, Artificial Sequence
  Description of Artificial Sequence: Synthetic oligonucleotide
cguugcacccucagcuguc

SEQ ID NO: 1047140 - RNA, 19 nt, Artificial Sequence
  Description of Artificial Sequence: Synthetic oligonucleotide
ccgcucugucucuauccuc

SEQ ID NO: 1047141 - RNA, 19 nt, Artificial Sequence
  Description of Artificial Sequence: Synthetic oligonucleotide
gccggacucgcuguuagcu

SEQ ID NO: 1047142 - RNA, 19 nt, Artificial Sequence
  Description of Artificial Sequence: Synthetic oligonucleotide
cucggccuguacuuugguu

SEQ ID NO: 1047143 - RNA, 19 nt, Artificial Sequence
  Description of Artificial Sequence: Synthetic oligonucleotide
ccuccucgagugccucccg

SEQ ID NO: 1047144 - RNA, 19 nt, Artificial Sequence
  Description of Artificial Sequence: Synthetic oligonucleotide
cgaaguagcugcucugagu

SEQ ID NO: 1047145 - RNA, 19 nt, Artificial Sequence
  Description of Artificial Sequence: Synthetic oligonucleotide
  modified_base (6)..(6): a, c, u, g, unknown or other
gccuangucuggugccugu

SEQ ID NO: 1047146 - RNA, 19 nt, Artificial Sequence
  Description of Artificial Sequence: Synthetic oligonucleotide
ccgucucuuccugcucagg

SEQ ID NO: 1047147 - RNA, 19 nt, Artificial Sequence
  Description of Artificial Sequence: Synthetic oligonucleotide
ggcguaccuguagggccug

SEQ ID NO: 1047148 - RNA, 19 nt, Artificial Sequence
  Description of Artificial Sequence: Synthetic oligonucleotide
cggccuugcuucuauauau

SEQ ID NO: 1047149 - RNA, 19 nt, Artificial Sequence
  Description of Artificial Sequence: Synthetic oligonucleotide
cccacugguuaucuggaau

SEQ ID NO: 1047150 - RNA, 19 nt, Artificial Sequence
  Description of Artificial Sequence: Synthetic oligonucleotide
ggccuaugugugaggcauc

SEQ ID NO: 1047151 - RNA, 19 nt, Artificial Sequence
  Description of Artificial Sequence: Synthetic oligonucleotide
guccggccuugcuucuaua

SEQ ID NO: 1047152 - RNA, 19 nt, Artificial Sequence
  Description of Artificial Sequence: Synthetic oligonucleotide
ccggccuugcuucuauaua

SEQ ID NO: 1047153 - RNA, 19 nt, Artificial Sequence
  Description of Artificial Sequence: Synthetic oligonucleotide
gccgccccucuaccugaag

SEQ ID NO: 1047154 - RNA, 19 nt, Artificial Sequence
  Description of Artificial Sequence: Synthetic oligonucleotide
gccccucaggaguccuuga

SEQ ID NO: 1047155 - RNA, 19 nt, Artificial Sequence
  Description of Artificial Sequence: Synthetic oligonucleotide
cuccgucucagucccucuu

SEQ ID NO: 1047156 - RNA, 19 nt, Artificial Sequence
  Description of Artificial Sequence: Synthetic oligonucleotide
ccuaugugugaggcaucca

SEQ ID NO: 1047157 - RNA, 19 nt, Artificial Sequence
  Description of Artificial Sequence: Synthetic oligonucleotide
cugcucccacugguuaucu

SEQ ID NO: 1047158 - RNA, 19 nt, Artificial Sequence
  Description of Artificial Sequence: Synthetic oligonucleotide
ccggacucgcuguuagcua

SEQ ID NO: 1047159 - RNA, 19 nt, Artificial Sequence
  Description of Artificial Sequence: Synthetic oligonucleotide
cagcccggagcccuugauu

SEQ ID NO: 1047160 - RNA, 19 nt, Artificial Sequence
  Description of Artificial Sequence: Synthetic oligonucleotide
gccgggugugccgcaccag

SEQ ID NO: 1047161 - RNA, 19 nt, Artificial Sequence
  Description of Artificial Sequence: Synthetic oligonucleotide
ggagccggacucgcuguua

SEQ ID NO: 1047162 - RNA, 19 nt, Artificial Sequence
  Description of Artificial Sequence: Synthetic oligonucleotide
cccugaggggugccucauc

SEQ ID NO: 1047163 - RNA, 19 nt, Artificial Sequence
  Description of Artificial Sequence: Synthetic oligonucleotide
gcggaggcgagggcccuca

SEQ ID NO: 1047164 - RNA, 19 nt, Artificial Sequence
  Description of Artificial Sequence: Synthetic oligonucleotide
gcaguccgugucucacagu

SEQ ID NO: 1047165 - RNA, 19 nt, Artificial Sequence
  Description of Artificial Sequence: Synthetic oligonucleotide
ggagugggugggcuccauu

SEQ ID NO: 1047166 - RNA, 19 nt, Artificial Sequence
  Description of Artificial Sequence: Synthetic oligonucleotide
ccgcucacggcugacacuu

SEQ ID NO: 1047167 - RNA, 19 nt, Artificial Sequence
  Description of Artificial Sequence: Synthetic oligonucleotide
ccgcagcuucacgauuuca

SEQ ID NO: 1047168 - RNA, 19 nt, Artificial Sequence
  Description of Artificial Sequence: Synthetic oligonucleotide
cgaauccgcuccaggcgua

SEQ ID NO: 1047169 - RNA, 19 nt, Artificial Sequence
  Description of Artificial Sequence: Synthetic oligonucleotide
gggaggccucuagcacauc

SEQ ID NO: 1047170 - RNA, 19 nt, Artificial Sequence
  Description of Artificial Sequence: Synthetic oligonucleotide
cccgcucacggcugacacu

SEQ ID NO: 1047171 - RNA, 19 nt, Artificial Sequence
  Description of Artificial Sequence: Synthetic oligonucleotide
cggccuguacuuugguuuu

SEQ ID NO: 1047172 - RNA, 19 nt, Artificial Sequence
  Description of Artificial Sequence: Synthetic oligonucleotide
ccgcaugucccagggccua

SEQ ID NO: 1047173 - RNA, 19 nt, Artificial Sequence
  Description of Artificial Sequence: Synthetic oligonucleotide
cgcucacggcugacacuuu

SEQ ID NO: 1047174 - RNA, 19 nt, Artificial Sequence
  Description of Artificial Sequence: Synthetic oligonucleotide
cgagggcccucagcagcuu

SEQ ID NO: 1047175 - RNA, 19 nt, Artificial Sequence
  Description of Artificial Sequence: Synthetic oligonucleotide
aaauguaucuccuccacgc

SEQ ID NO: 1047176 - RNA, 19 nt, Artificial Sequence
  Description of Artificial Sequence: Synthetic oligonucleotide
agucauaucuuucuccacc

SEQ ID NO: 1047177 - RNA, 19 nt, Artificial Sequence
  Description of Artificial Sequence: Synthetic oligonucleotide
ugcuauuugugucagagcu

SEQ ID NO: 1047178 - RNA, 19 nt, Artificial Sequence
  Description of Artificial Sequence: Synthetic oligonucleotide
uguuguugagaauacugcg

SEQ ID NO: 1047179 - RNA, 19 nt, Artificial Sequence
  Description of Artificial Sequence: Synthetic oligonucleotide
uuguugagaauacugcggg

SEQ ID NO: 1047180 - RNA, 19 nt, Artificial Sequence
  Description of Artificial Sequence: Synthetic oligonucleotide
gaucagaccaucaaggucc

SEQ ID NO: 1047181 - RNA, 19 nt, Artificial Sequence
  Description of Artificial Sequence: Synthetic oligonucleotide
ugauccauagucuugagau

SEQ ID NO: 1047182 - RNA, 19 nt, Artificial Sequence
  Description of Artificial Sequence: Synthetic oligonucleotide
aauacugcgggccaccaug

SEQ ID NO: 1047183 - RNA, 19 nt, Artificial Sequence
  Description of Artificial Sequence: Synthetic oligonucleotide
uuuggaugauuccaaacug

SEQ ID NO: 1047184 - RNA, 19 nt, Artificial Sequence
  Description of Artificial Sequence: Synthetic oligonucleotide
gaacaugccauacucgggg

SEQ ID NO: 1047185 - RNA, 19 nt, Artificial Sequence
  Description of Artificial Sequence: Synthetic oligonucleotide
uggaacaugccauacucgg

SEQ ID NO: 1047186 - RNA, 19 nt, Artificial Sequence
  Description of Artificial Sequence: Synthetic oligonucleotide
caaauccgaagccaaaucg

SEQ ID NO: 1047187 - RNA, 19 nt, Artificial Sequence
  Description of Artificial Sequence: Synthetic oligonucleotide
uuguuguugagaauacugc

SEQ ID NO: 1047188 - RNA, 19 nt, Artificial Sequence
  Description of Artificial Sequence: Synthetic oligonucleotide
cuuguuguugagaauacug

SEQ ID NO: 1047189 - RNA, 19 nt, Artificial Sequence
  Description of Artificial Sequence: Synthetic oligonucleotide
ucucguucacucaggaugg

SEQ ID NO: 1047190 - RNA, 19 nt, Artificial Sequence
  Description of Artificial Sequence: Synthetic oligonucleotide
uagccauuucccaaguacg

SEQ ID NO: 1047191 - RNA, 19 nt, Artificial Sequence
  Description of Artificial Sequence: Synthetic oligonucleotide
cuggaucagaccaucaagg

SEQ ID NO: 1047192 - RNA, 19 nt, Artificial Sequence
  Description of Artificial Sequence: Synthetic oligonucleotide
aaauccgaagccaaaucgg

SEQ ID NO: 1047193 - RNA, 19 nt, Artificial Sequence
  Description of Artificial Sequence: Synthetic oligonucleotide
uggauaaacggaaucggca

SEQ ID NO: 1047194 - RNA, 19 nt, Artificial Sequence
  Description of Artificial Sequence: Synthetic oligonucleotide
uacauauuugaaguguucc

SEQ ID NO: 1047195 - RNA, 19 nt, Artificial Sequence
  Description of Artificial Sequence: Synthetic oligonucleotide
aaugcuccauagcaauuuc

SEQ ID NO: 1047196 - RNA, 19 nt, Artificial Sequence
  Description of Artificial Sequence: Synthetic oligonucleotide
acggaaucggcacuggcgc

SEQ ID NO: 1047197 - RNA, 19 nt, Artificial Sequence
  Description of Artificial Sequence: Synthetic oligonucleotide
ugcggcaucauaucuaagc

SEQ ID NO: 1047198 - RNA, 19 nt, Artificial Sequence
  Description of Artificial Sequence: Synthetic oligonucleotide
gucucguucacucaggaug

SEQ ID NO: 1047199 - RNA, 19 nt, Artificial Sequence
  Description of Artificial Sequence: Synthetic oligonucleotide
uccaacuucuugcuaauga

SEQ ID NO: 1047200 - RNA, 19 nt, Artificial Sequence
  Description of Artificial Sequence: Synthetic oligonucleotide
ucuggauaaacggaaucgg

SEQ ID NO: 1047201 - RNA, 19 nt, Artificial Sequence
  Description of Artificial Sequence: Synthetic oligonucleotide
aaacggaaucggcacuggc

SEQ ID NO: 1047202 - RNA, 19 nt, Artificial Sequence
  Description of Artificial Sequence: Synthetic oligonucleotide
gaaggugcgguauuugcag

SEQ ID NO: 1047203 - RNA, 19 nt, Artificial Sequence
  Description of Artificial Sequence: Synthetic oligonucleotide
auauuugaaguguuccuug

SEQ ID NO: 1047204 - RNA, 19 nt, Artificial Sequence
  Description of Artificial Sequence: Synthetic oligonucleotide
gaccaaauguaucuccucc

SEQ ID NO: 1047205 - RNA, 19 nt, Artificial Sequence
  Description of Artificial Sequence: Synthetic oligonucleotide
aauccgaagccaaaucggg

SEQ ID NO: 1047206 - RNA, 19 nt, Artificial Sequence
  Description of Artificial Sequence: Synthetic oligonucleotide
guggcuacccaucucaucc

SEQ ID NO: 1047207 - RNA, 19 nt, Artificial Sequence
  Description of Artificial Sequence: Synthetic oligonucleotide
aagguggcuacccaucuca

SEQ ID NO: 1047208 - RNA, 19 nt, Artificial Sequence
  Description of Artificial Sequence: Synthetic oligonucleotide
ucauauuggcccucauagg

SEQ ID NO: 1047209 - RNA, 19 nt, Artificial Sequence
  Description of Artificial Sequence: Synthetic oligonucleotide
aggguuugcuauuuguguc

SEQ ID NO: 1047210 - RNA, 19 nt, Artificial Sequence
  Description of Artificial Sequence: Synthetic oligonucleotide
ucgaaacuggucacgguag

SEQ ID NO: 1047211 - RNA, 19 nt, Artificial Sequence
  Description of Artificial Sequence: Synthetic oligonucleotide
ucgccauagucauagcccg

SEQ ID NO: 1047212 - RNA, 19 nt, Artificial Sequence
  Description of Artificial Sequence: Synthetic oligonucleotide
aacggaaucggcacuggcg

SEQ ID NO: 1047213 - RNA, 19 nt, Artificial Sequence
  Description of Artificial Sequence: Synthetic oligonucleotide
uuugugucagagcuagcca

SEQ ID NO: 1047214 - RNA, 19 nt, Artificial Sequence
  Description of Artificial Sequence: Synthetic oligonucleotide
acgcauucgaaacugguca

SEQ ID NO: 1047215 - RNA, 19 nt, Artificial Sequence
  Description of Artificial Sequence: Synthetic oligonucleotide
aagcucgccauagucauag

SEQ ID NO: 1047216 - RNA, 19 nt, Artificial Sequence
  Description of Artificial Sequence: Synthetic oligonucleotide
gguuaauucuggauaaacg

SEQ ID NO: 1047217 - RNA, 19 nt, Artificial Sequence
  Description of Artificial Sequence: Synthetic oligonucleotide
agucacaggccucauagga

SEQ ID NO: 1047218 - RNA, 19 nt, Artificial Sequence
  Description of Artificial Sequence: Synthetic oligonucleotide
uccaagugcggcaucauau

SEQ ID NO: 1047219 - RNA, 19 nt, Artificial Sequence
  Description of Artificial Sequence: Synthetic oligonucleotide
uaggguuugcuauuugugu

SEQ ID NO: 1047220 - RNA, 19 nt, Artificial Sequence
  Description of Artificial Sequence: Synthetic oligonucleotide
aauguaucuccuccacgca

SEQ ID NO: 1047221 - RNA, 19 nt, Artificial Sequence
  Description of Artificial Sequence: Synthetic oligonucleotide
uucgaaacuggucacggua

SEQ ID NO: 1047222 - RNA, 19 nt, Artificial Sequence
  Description of Artificial Sequence: Synthetic oligonucleotide
cacgguaggcaucauauug

SEQ ID NO: 1047223 - RNA, 19 nt, Artificial Sequence
  Description of Artificial Sequence: Synthetic oligonucleotide
cuuuuggaugauuccaaac

SEQ ID NO: 1047224 - RNA, 19 nt, Artificial Sequence
  Description of Artificial Sequence: Synthetic oligonucleotide
cuggauaaacggaaucggc

SEQ ID NO: 1047225 - RNA, 19 nt, Artificial Sequence
  Description of Artificial Sequence: Synthetic oligonucleotide
caucauaucuaagcgcugg

SEQ ID NO: 1047226 - RNA, 19 nt, Artificial Sequence
  Description of Artificial Sequence: Synthetic oligonucleotide
auauuggcccucauaggcc

SEQ ID NO: 1047227 - RNA, 19 nt, Artificial Sequence
  Description of Artificial Sequence: Synthetic oligonucleotide
aucaugagccugcgguucc

SEQ ID NO: 1047228 - RNA, 19 nt, Artificial Sequence
  Description of Artificial Sequence: Synthetic oligonucleotide
uauggguuauggagcaccc

SEQ ID NO: 1047229 - RNA, 19 nt, Artificial Sequence
  Description of Artificial Sequence: Synthetic oligonucleotide
caugcgaucucgcugucgc

SEQ ID NO: 1047230 - RNA, 19 nt, Artificial Sequence
  Description of Artificial Sequence: Synthetic oligonucleotide
uugagaauacugcgggcca

SEQ ID NO: 1047231 - RNA, 19 nt, Artificial Sequence
  Description of Artificial Sequence: Synthetic oligonucleotide
aaaucgggagccaccagag

SEQ ID NO: 1047232 - RNA, 19 nt, Artificial Sequence
  Description of Artificial Sequence: Synthetic oligonucleotide
auagcccgaggccauuggc

SEQ ID NO: 1047233 - RNA, 19 nt, Artificial Sequence
  Description of Artificial Sequence: Synthetic oligonucleotide
ugguccggaagucagcugu

SEQ ID NO: 1047234 - RNA, 19 nt, Artificial Sequence
  Description of Artificial Sequence: Synthetic oligonucleotide
ugggcugucggugaaagga

SEQ ID NO: 1047235 - RNA, 19 nt, Artificial Sequence
  Description of Artificial Sequence: Synthetic oligonucleotide
uugcuugccugcaacuugc

SEQ ID NO: 1047236 - RNA, 19 nt, Artificial Sequence
  Description of Artificial Sequence: Synthetic oligonucleotide
uagcgcuccaacuucuugc

SEQ ID NO: 1047237 - RNA, 19 nt, Artificial Sequence
  Description of Artificial Sequence: Synthetic oligonucleotide
ucaagcucgccauagucau

SEQ ID NO: 1047238 - RNA, 19 nt, Artificial Sequence
  Description of Artificial Sequence: Synthetic oligonucleotide
gaucaagcucgccauaguc

SEQ ID NO: 1047239 - RNA, 19 nt, Artificial Sequence
  Description of Artificial Sequence: Synthetic oligonucleotide
auaucuaagcgcugguuaa

SEQ ID NO: 1047240 - RNA, 19 nt, Artificial Sequence
  Description of Artificial Sequence: Synthetic oligonucleotide
cauagcccgaccuguagag

SEQ ID NO: 1047241 - RNA, 19 nt, Artificial Sequence
  Description of Artificial Sequence: Synthetic oligonucleotide
aucaagguccuccacaguu

SEQ ID NO: 1047242 - RNA, 19 nt, Artificial Sequence
  Description of Artificial Sequence: Synthetic oligonucleotide
uccuccacgcauucgaaac

SEQ ID NO: 1047243 - RNA, 19 nt, Artificial Sequence
  Description of Artificial Sequence: Synthetic oligonucleotide
ugguuaauucuggauaaac

SEQ ID NO: 1047244 - RNA, 19 nt, Artificial Sequence
  Description of Artificial Sequence: Synthetic oligonucleotide
cagaccaucaagguccucc

SEQ ID NO: 1047245 - RNA, 19 nt, Artificial Sequence
  Description of Artificial Sequence: Synthetic oligonucleotide
uaucgcagucucuggggcg

SEQ ID NO: 1047246 - RNA, 19 nt, Artificial Sequence
  Description of Artificial Sequence: Synthetic oligonucleotide
uuccgguugugauccauag

SEQ ID NO: 1047247 - RNA, 19 nt, Artificial Sequence
  Description of Artificial Sequence: Synthetic oligonucleotide
ugcuuuuggaugauuccaa

SEQ ID NO: 1047248 - RNA, 19 nt, Artificial Sequence
  Description of Artificial Sequence: Synthetic oligonucleotide
ucauagcccgaccuguaga

SEQ ID NO: 1047249 - RNA, 19 nt, Artificial Sequence
  Description of Artificial Sequence: Synthetic oligonucleotide
uuggugccuacauauuuga

SEQ ID NO: 1047250 - RNA, 19 nt, Artificial Sequence
  Description of Artificial Sequence: Synthetic oligonucleotide
uguugagaauacugcgggc

SEQ ID NO: 1047251 - RNA, 19 nt, Artificial Sequence
  Description of Artificial Sequence: Synthetic oligonucleotide
uccacuccgggcaucccgg

SEQ ID NO: 1047252 - RNA, 19 nt, Artificial Sequence
  Description of Artificial Sequence: Synthetic oligonucleotide
accugagccguacacaccu

SEQ ID NO: 1047253 - RNA, 19 nt, Artificial Sequence
  Description of Artificial Sequence: Synthetic oligonucleotide
uucugcuuaucuuggcucu

SEQ ID NO: 1047254 - RNA, 19 nt, Artificial Sequence
  Description of Artificial Sequence: Synthetic oligonucleotide
uguugucugagcagucugu

SEQ ID NO: 1047255 - RNA, 19 nt, Artificial Sequence
  Description of Artificial Sequence: Synthetic oligonucleotide
aagccaaaucgggagccac

SEQ ID NO: 1047256 - RNA, 19 nt, Artificial Sequence
  Description of Artificial Sequence: Synthetic oligonucleotide
uugugucagagcuagccau

SEQ ID NO: 1047257 - RNA, 19 nt, Artificial Sequence
  Description of Artificial Sequence: Synthetic oligonucleotide
auaaacggaaucggcacug

SEQ ID NO: 1047258 - RNA, 19 nt, Artificial Sequence
  Description of Artificial Sequence: Synthetic oligonucleotide
uuuugguccggaagucagc

SEQ ID NO: 1047259 - RNA, 19 nt, Artificial Sequence
  Description of Artificial Sequence: Synthetic oligonucleotide
ugcuccauagcaauuucuu

SEQ ID NO: 1047260 - RNA, 19 nt, Artificial Sequence
  Description of Artificial Sequence: Synthetic oligonucleotide
ggauaaacggaaucggcac

SEQ ID NO: 1047261 - RNA, 19 nt, Artificial Sequence
  Description of Artificial Sequence: Synthetic oligonucleotide
aucgggagccaccagagaa

SEQ ID NO: 1047262 - RNA, 19 nt, Artificial Sequence
  Description of Artificial Sequence: Synthetic oligonucleotide
accacgcaugcccuggaac

SEQ ID NO: 1047263 - RNA, 19 nt, Artificial Sequence
  Description of Artificial Sequence: Synthetic oligonucleotide
ucggugaaaggauucucac

SEQ ID NO: 1047264 - RNA, 19 nt, Artificial Sequence
  Description of Artificial Sequence: Synthetic oligonucleotide
uucccaaguacgugugaag

SEQ ID NO: 1047265 - RNA, 19 nt, Artificial Sequence
  Description of Artificial Sequence: Synthetic oligonucleotide
ugcagagagaacacacaaa

SEQ ID NO: 1047266 - RNA, 19 nt, Artificial Sequence
  Description of Artificial Sequence: Synthetic oligonucleotide
uccacgcauucgaaacugg

SEQ ID NO: 1047267 - RNA, 19 nt, Artificial Sequence
  Description of Artificial Sequence: Synthetic oligonucleotide
guauggguuauggagcacc

SEQ ID NO: 1047268 - RNA, 19 nt, Artificial Sequence
  Description of Artificial Sequence: Synthetic oligonucleotide
ucggauccggcacugcagc

SEQ ID NO: 1047269 - RNA, 19 nt, Artificial Sequence
  Description of Artificial Sequence: Synthetic oligonucleotide
ugcucgggagccuuucucc

SEQ ID NO: 1047270 - RNA, 19 nt, Artificial Sequence
  Description of Artificial Sequence: Synthetic oligonucleotide
uuugguccggaagucagcu

SEQ ID NO: 1047271 - RNA, 19 nt, Artificial Sequence
  Description of Artificial Sequence: Synthetic oligonucleotide
cuugggucagaucuugguc

SEQ ID NO: 1047272 - RNA, 19 nt, Artificial Sequence
  Description of Artificial Sequence: Synthetic oligonucleotide
cuugcuugccugcaacuug

SEQ ID NO: 1047273 - RNA, 19 nt, Artificial Sequence
  Description of Artificial Sequence: Synthetic oligonucleotide
caaguacgugugaaguggc

SEQ ID NO: 1047274 - RNA, 19 nt, Artificial Sequence
  Description of Artificial Sequence: Synthetic oligonucleotide
gguaucgcagucucugggg

SEQ ID NO: 1047275 - RNA, 19 nt, Artificial Sequence
  Description of Artificial Sequence: Synthetic oligonucleotide
ucuaagcgcugguuaauuc

SEQ ID NO: 1047276 - RNA, 19 nt, Artificial Sequence
  Description of Artificial Sequence: Synthetic oligonucleotide
gcggcaucauaucuaagcg

SEQ ID NO: 1047277 - RNA, 19 nt, Artificial Sequence
  Description of Artificial Sequence: Synthetic oligonucleotide
uugcuauuugugucagagc

SEQ ID NO: 1047278 - RNA, 19 nt, Artificial Sequence
  Description of Artificial Sequence: Synthetic oligonucleotide
uagcccgaggccauuggcc

SEQ ID NO: 1047279 - RNA, 19 nt, Artificial Sequence
  Description of Artificial Sequence: Synthetic oligonucleotide
agagaacacacaaacugga

SEQ ID NO: 1047280 - RNA, 19 nt, Artificial Sequence
  Description of Artificial Sequence: Synthetic oligonucleotide
uguaucuccuccacgcauu

SEQ ID NO: 1047281 - RNA, 19 nt, Artificial Sequence
  Description of Artificial Sequence: Synthetic oligonucleotide
ucccaaguacgugugaagu

SEQ ID NO: 1047282 - RNA, 19 nt, Artificial Sequence
  Description of Artificial Sequence: Synthetic oligonucleotide
guaggguuugcuauuugug

SEQ ID NO: 1047283 - RNA, 19 nt, Artificial Sequence
  Description of Artificial Sequence: Synthetic oligonucleotide
ugccuacauauuugaagug

SEQ ID NO: 1047284 - RNA, 19 nt, Artificial Sequence
  Description of Artificial Sequence: Synthetic oligonucleotide
ugucugucuccaagugcgg

SEQ ID NO: 1047285 - RNA, 19 nt, Artificial Sequence
  Description of Artificial Sequence: Synthetic oligonucleotide
uugccaaauccgaagccaa

SEQ ID NO: 1047286 - RNA, 19 nt, Artificial Sequence
  Description of Artificial Sequence: Synthetic oligonucleotide
uuucgcagcuccucugucu

SEQ ID NO: 1047287 - RNA, 19 nt, Artificial Sequence
  Description of Artificial Sequence: Synthetic oligonucleotide
gugccuacauauuugaagu

SEQ ID NO: 1047288 - RNA, 19 nt, Artificial Sequence
  Description of Artificial Sequence: Synthetic oligonucleotide
ugcgguauuugcagagaga

SEQ ID NO: 1047289 - RNA, 19 nt, Artificial Sequence
  Description of Artificial Sequence: Synthetic oligonucleotide
aggugcgguauuugcagag

SEQ ID NO: 1047290 - RNA, 19 nt, Artificial Sequence
  Description of Artificial Sequence: Synthetic oligonucleotide
uagcccgaccuguagaggu

SEQ ID NO: 1047291 - RNA, 19 nt, Artificial Sequence
  Description of Artificial Sequence: Synthetic oligonucleotide
caucucauccucguagaag

SEQ ID NO: 1047292 - RNA, 19 nt, Artificial Sequence
  Description of Artificial Sequence: Synthetic oligonucleotide
guaucgcagucucuggggc

SEQ ID NO: 1047293 - RNA, 19 nt, Artificial Sequence
  Description of Artificial Sequence: Synthetic oligonucleotide
aaggugcgguauuugcaga

SEQ ID NO: 1047294 - RNA, 19 nt, Artificial Sequence
  Description of Artificial Sequence: Synthetic oligonucleotide
uaggcaucauauuggcccu

SEQ ID NO: 1047295 - RNA, 19 nt, Artificial Sequence
  Description of Artificial Sequence: Synthetic oligonucleotide
cuacccgaggcacguaggg

SEQ ID NO: 1047296 - RNA, 19 nt, Artificial Sequence
  Description of Artificial Sequence: Synthetic oligonucleotide
ugcgcccauagcccgaggc

SEQ ID NO: 1047297 - RNA, 19 nt, Artificial Sequence
  Description of Artificial Sequence: Synthetic oligonucleotide
gaucccucggauccggcac

SEQ ID NO: 1047298 - RNA, 19 nt, Artificial Sequence
  Description of Artificial Sequence: Synthetic oligonucleotide
acgucgaggcccgggaucc

SEQ ID NO: 1047299 - RNA, 19 nt, Artificial Sequence
  Description of Artificial Sequence: Synthetic oligonucleotide
ccaaguacgugugaagugg

SEQ ID NO: 1047300 - RNA, 19 nt, Artificial Sequence
  Description of Artificial Sequence: Synthetic oligonucleotide
aguacgugugaaguggcca

SEQ ID NO: 1047301 - RNA, 19 nt, Artificial Sequence
  Description of Artificial Sequence: Synthetic oligonucleotide
cacgcauucgaaacugguc

SEQ ID NO: 1047302 - RNA, 19 nt, Artificial Sequence
  Description of Artificial Sequence: Synthetic oligonucleotide
cacaccuccuuguaucaug

SEQ ID NO: 1047303 - RNA, 19 nt, Artificial Sequence
  Description of Artificial Sequence: Synthetic oligonucleotide
agccguacacaccuccuug

SEQ ID NO: 1047304 - RNA, 19 nt, Artificial Sequence
  Description of Artificial Sequence: Synthetic oligonucleotide
ucuuugccgucuucucucc

SEQ ID NO: 1047305 - RNA, 19 nt, Artificial Sequence
  Description of Artificial Sequence: Synthetic oligonucleotide
uccaccaugcgaucucgcu

SEQ ID NO: 1047306 - RNA, 19 nt, Artificial Sequence
  Description of Artificial Sequence: Synthetic oligonucleotide
gccauugccaaauccgaag

SEQ ID NO: 1047307 - RNA, 19 nt, Artificial Sequence
  Description of Artificial Sequence: Synthetic oligonucleotide
ccgguugugauccauaguc

SEQ ID NO: 1047308 - RNA, 19 nt, Artificial Sequence
  Description of Artificial Sequence: Synthetic oligonucleotide
acaaaaugcuccauagcaa

SEQ ID NO: 1047309 - RNA, 19 nt, Artificial Sequence
  Description of Artificial Sequence: Synthetic oligonucleotide
caaaucgggagccaccaga

SEQ ID NO: 1047310 - RNA, 19 nt, Artificial Sequence
  Description of Artificial Sequence: Synthetic oligonucleotide
ugucaagguggcuacccau

SEQ ID NO: 1047311 - RNA, 19 nt, Artificial Sequence
  Description of Artificial Sequence: Synthetic oligonucleotide
auguaucuccuccacgcau

SEQ ID NO: 1047312 - RNA, 19 nt, Artificial Sequence
  Description of Artificial Sequence: Synthetic oligonucleotide
gauaaacggaaucggcacu

SEQ ID NO: 1047313 - RNA, 19 nt, Artificial Sequence
  Description of Artificial Sequence: Synthetic oligonucleotide
cuugccugcaacuugcgcu

SEQ ID NO: 1047314 - RNA, 19 nt, Artificial Sequence
  Description of Artificial Sequence: Synthetic oligonucleotide
cugagccguacacaccucc

SEQ ID NO: 1047315 - RNA, 19 nt, Artificial Sequence
  Description of Artificial Sequence: Synthetic oligonucleotide
ugagccguacacaccuccu

SEQ ID NO: 1047316 - RNA, 19 nt, Artificial Sequence
  Description of Artificial Sequence: Synthetic oligonucleotide
cuguugucugagcagucug

SEQ ID NO: 1047317 - RNA, 19 nt, Artificial Sequence
  Description of Artificial Sequence: Synthetic oligonucleotide
uucccacaugcgcccauag

SEQ ID NO: 1047318 - RNA, 19 nt, Artificial Sequence
  Description of Artificial Sequence: Synthetic oligonucleotide
auggguuauggagcacccc

SEQ ID NO: 1047319 - RNA, 19 nt, Artificial Sequence
  Description of Artificial Sequence: Synthetic oligonucleotide
gcuaaugagcuuguuguug

SEQ ID NO: 1047320 - RNA, 19 nt, Artificial Sequence
  Description of Artificial Sequence: Synthetic oligonucleotide
ugccauugccaaauccgaa

SEQ ID NO: 1047321 - RNA, 19 nt, Artificial Sequence
  Description of Artificial Sequence: Synthetic oligonucleotide
agccaaaucgggagccacc

SEQ ID NO: 1047322 - RNA, 19 nt, Artificial Sequence
  Description of Artificial Sequence: Synthetic oligonucleotide
cucggauccggcacugcag

SEQ ID NO: 1047323 - RNA, 19 nt, Artificial Sequence
  Description of Artificial Sequence: Synthetic oligonucleotide
acugcgggccaccaugaga

SEQ ID NO: 1047324 - RNA, 19 nt, Artificial Sequence
  Description of Artificial Sequence: Synthetic oligonucleotide
guccacuccgggcaucccg

SEQ ID NO: 1047325 - RNA, 19 nt, Artificial Sequence
  Description of Artificial Sequence: Synthetic oligonucleotide
auucgaaacuggucacggu

SEQ ID NO: 1047326 - RNA, 19 nt, Artificial Sequence
  Description of Artificial Sequence: Synthetic oligonucleotide
agaaggugcgguauuugca

SEQ ID NO: 1047327 - RNA, 19 nt, Artificial Sequence
  Description of Artificial Sequence: Synthetic oligonucleotide
ucucauccucguagaaggu

SEQ ID NO: 1047328 - RNA, 19 nt, Artificial Sequence
  Description of Artificial Sequence: Synthetic oligonucleotide
gcaacuugcgcuuggccug

SEQ ID NO: 1047329 - RNA, 19 nt, Artificial Sequence
  Description of Artificial Sequence: Synthetic oligonucleotide
ucccacaugcgcccauagc

SEQ ID NO: 1047330 - RNA, 19 nt, Artificial Sequence
  Description of Artificial Sequence: Synthetic oligonucleotide
ugugccggcacgcccucug

SEQ ID NO: 1047331 - RNA, 19 nt, Artificial Sequence
  Description of Artificial Sequence: Synthetic oligonucleotide
cauagcccgaggccauugg

SEQ ID NO: 1047332 - RNA, 19 nt, Artificial Sequence
  Description of Artificial Sequence: Synthetic oligonucleotide
ggaucagaccaucaagguc

SEQ ID NO: 1047333 - RNA, 19 nt, Artificial Sequence
  Description of Artificial Sequence: Synthetic oligonucleotide
uacugcgcccuccuccucu

SEQ ID NO: 1047334 - RNA, 19 nt, Artificial Sequence
  Description of Artificial Sequence: Synthetic oligonucleotide
ccuggaacaugccauacuc

SEQ ID NO: 1047335 - RNA, 19 nt, Artificial Sequence
  Description of Artificial Sequence: Synthetic oligonucleotide
caugccauacucggggaug

SEQ ID NO: 1047336 - RNA, 19 nt, Artificial Sequence
  Description of Artificial Sequence: Synthetic oligonucleotide
gguagcuuugcugucuggc

SEQ ID NO: 1047337 - RNA, 19 nt, Artificial Sequence
  Description of Artificial Sequence: Synthetic oligonucleotide
ucguucacucaggauggcc

SEQ ID NO: 1047338 - RNA, 19 nt, Artificial Sequence
  Description of Artificial Sequence: Synthetic oligonucleotide
uguagaggucucguucacu

SEQ ID NO: 1047339 - RNA, 19 nt, Artificial Sequence
  Description of Artificial Sequence: Synthetic oligonucleotide
ugcgguuccgguugugauc

SEQ ID NO: 1047340 - RNA, 19 nt, Artificial Sequence
  Description of Artificial Sequence: Synthetic oligonucleotide
cuaagcgcugguuaauucu

SEQ ID NO: 1047341 - RNA, 19 nt, Artificial Sequence
  Description of Artificial Sequence: Synthetic oligonucleotide
gcugguuaauucuggauaa

SEQ ID NO: 1047342 - RNA, 19 nt, Artificial Sequence
  Description of Artificial Sequence: Synthetic oligonucleotide
agcgcugguuaauucugga

SEQ ID NO: 1047343 - RNA, 19 nt, Artificial Sequence
  Description of Artificial Sequence: Synthetic oligonucleotide
ugccaaauccgaagccaaa

SEQ ID NO: 1047344 - RNA, 19 nt, Artificial Sequence
  Description of Artificial Sequence: Synthetic oligonucleotide
uccaaacugcauggggaug

SEQ ID NO: 1047345 - RNA, 19 nt, Artificial Sequence
  Description of Artificial Sequence: Synthetic oligonucleotide
cauccugggcagucagggg

SEQ ID NO: 1047346 - RNA, 19 nt, Artificial Sequence
  Description of Artificial Sequence: Synthetic oligonucleotide
ggaacaugccauacucggg

SEQ ID NO: 1047347 - RNA, 19 nt, Artificial Sequence
  Description of Artificial Sequence: Synthetic oligonucleotide
auuggccguccacuccggg

SEQ ID NO: 1047348 - RNA, 19 nt, Artificial Sequence
  Description of Artificial Sequence: Synthetic oligonucleotide
ccucauaggagucauaucu

SEQ ID NO: 1047349 - RNA, 19 nt, Artificial Sequence
  Description of Artificial Sequence: Synthetic oligonucleotide
ucaugagccugcgguuccg

SEQ ID NO: 1047350 - RNA, 19 nt, Artificial Sequence
  Description of Artificial Sequence: Synthetic oligonucleotide
ugucagagcuagccauuuc

SEQ ID NO: 1047351 - RNA, 19 nt, Artificial Sequence
  Description of Artificial Sequence: Synthetic oligonucleotide
ugccggcacgcccucugcg

SEQ ID NO: 1047352 - RNA, 19 nt, Artificial Sequence
  Description of Artificial Sequence: Synthetic oligonucleotide
acuggcgcuacccgaggca

SEQ ID NO: 1047353 - RNA, 19 nt, Artificial Sequence
  Description of Artificial Sequence: Synthetic oligonucleotide
ggggucuucccacaugcgc

SEQ ID NO: 1047354 - RNA, 19 nt, Artificial Sequence
  Description of Artificial Sequence: Synthetic oligonucleotide
auagcccgaccuguagagg

SEQ ID NO: 1047355 - RNA, 19 nt, Artificial Sequence
  Description of Artificial Sequence: Synthetic oligonucleotide
gccgucuucucucccaucc

SEQ ID NO: 1047356 - RNA, 19 nt, Artificial Sequence
  Description of Artificial Sequence: Synthetic oligonucleotide
cauagucauagcccgaccu

SEQ ID NO: 1047357 - RNA, 19 nt, Artificial Sequence
  Description of Artificial Sequence: Synthetic oligonucleotide
uaucuaagcgcugguuaau

SEQ ID NO: 1047358 - RNA, 19 nt, Artificial Sequence
  Description of Artificial Sequence: Synthetic oligonucleotide
ccaccuucuuuacaaaaug

SEQ ID NO: 1047359 - RNA, 19 nt, Artificial Sequence
  Description of Artificial Sequence: Synthetic oligonucleotide
gucggugaaaggauucuca

SEQ ID NO: 1047360 - RNA, 19 nt, Artificial Sequence
  Description of Artificial Sequence: Synthetic oligonucleotide
acccgaggcacguaggguu

SEQ ID NO: 1047361 - RNA, 19 nt, Artificial Sequence
  Description of Artificial Sequence: Synthetic oligonucleotide
cuccacgcauucgaaacug

SEQ ID NO: 1047362 - RNA, 19 nt, Artificial Sequence
  Description of Artificial Sequence: Synthetic oligonucleotide
caucaugagccugcgguuc

SEQ ID NO: 1047363 - RNA, 19 nt, Artificial Sequence
  Description of Artificial Sequence: Synthetic oligonucleotide
cguucacucaggauggccc

SEQ ID NO: 1047364 - RNA, 19 nt, Artificial Sequence
  Description of Artificial Sequence: Synthetic oligonucleotide
ugucggugaaaggauucuc

SEQ ID NO: 1047365 - RNA, 19 nt, Artificial Sequence
  Description of Artificial Sequence: Synthetic oligonucleotide
ccauuggccguccacuccg

SEQ ID NO: 1047366 - RNA, 19 nt, Artificial Sequence
  Description of Artificial Sequence: Synthetic oligonucleotide
agccauuucccaaguacgu

SEQ ID NO: 1047367 - RNA, 19 nt, Artificial Sequence
  Description of Artificial Sequence: Synthetic oligonucleotide
augccauugccaaauccga

SEQ ID NO: 1047368 - RNA, 19 nt, Artificial Sequence
  Description of Artificial Sequence: Synthetic oligonucleotide
uggcgcuacccgaggcacg

SEQ ID NO: 1047369 - RNA, 19 nt, Artificial Sequence
  Description of Artificial Sequence: Synthetic oligonucleotide
ucguagaaggugcgguauu

SEQ ID NO: 1047370 - RNA, 19 nt, Artificial Sequence
  Description of Artificial Sequence: Synthetic oligonucleotide
acuggucacgguaggcauc

SEQ ID NO: 1047371 - RNA, 19 nt, Artificial Sequence
  Description of Artificial Sequence: Synthetic oligonucleotide
caggcaugcacuggccccg

SEQ ID NO: 1047372 - RNA, 19 nt, Artificial Sequence
  Description of Artificial Sequence: Synthetic oligonucleotide
acaugccauacucggggau

SEQ ID NO: 1047373 - RNA, 19 nt, Artificial Sequence
  Description of Artificial Sequence: Synthetic oligonucleotide
guggcgguaucgcagucuc

SEQ ID NO: 1047374 - RNA, 19 nt, Artificial Sequence
  Description of Artificial Sequence: Synthetic oligonucleotide
ggcaucauaucuaagcgcu

SEQ ID NO: 1047375 - RNA, 19 nt, Artificial Sequence
  Description of Artificial Sequence: Synthetic oligonucleotide
uugguccggaagucagcug

SEQ ID NO: 1047376 - RNA, 19 nt, Artificial Sequence
  Description of Artificial Sequence: Synthetic oligonucleotide
ggucuucccacaugcgccc

SEQ ID NO: 1047377 - RNA, 19 nt, Artificial Sequence
  Description of Artificial Sequence: Synthetic oligonucleotide
ccacaugcgcccauagccc

SEQ ID NO: 1047378 - RNA, 19 nt, Artificial Sequence
  Description of Artificial Sequence: Synthetic oligonucleotide
cauuggccguccacuccgg

SEQ ID NO: 1047379 - RNA, 19 nt, Artificial Sequence
  Description of Artificial Sequence: Synthetic oligonucleotide
ggcgguaucgcagucucug

SEQ ID NO: 1047380 - RNA, 19 nt, Artificial Sequence
  Description of Artificial Sequence: Synthetic oligonucleotide
guagcuuugcugucuggcu

SEQ ID NO: 1047381 - RNA, 19 nt, Artificial Sequence
  Description of Artificial Sequence: Synthetic oligonucleotide
ggacugcuccaucaugagc

SEQ ID NO: 1047382 - RNA, 19 nt, Artificial Sequence
  Description of Artificial Sequence: Synthetic oligonucleotide
acaccuccuuguaucaugu

SEQ ID NO: 1047383 - RNA, 19 nt, Artificial Sequence
  Description of Artificial Sequence: Synthetic oligonucleotide
gcagcgcccgcccagcagg

SEQ ID NO: 1047384 - RNA, 19 nt, Artificial Sequence
  Description of Artificial Sequence: Synthetic oligonucleotide
gucaagguggcuacccauc

SEQ ID NO: 1047385 - RNA, 19 nt, Artificial Sequence
  Description of Artificial Sequence: Synthetic oligonucleotide
uugccgucuucucucccau

SEQ ID NO: 1047386 - RNA, 19 nt, Artificial Sequence
  Description of Artificial Sequence: Synthetic oligonucleotide
ugcgaucucgcugucgcuu

SEQ ID NO: 1047387 - RNA, 19 nt, Artificial Sequence
  Description of Artificial Sequence: Synthetic oligonucleotide
ccagcagggguacugcgcc

SEQ ID NO: 1047388 - RNA, 19 nt, Artificial Sequence
  Description of Artificial Sequence: Synthetic oligonucleotide
ucugcgagcccugucgcuu

SEQ ID NO: 1047389 - RNA, 19 nt, Artificial Sequence
  Description of Artificial Sequence: Synthetic oligonucleotide
aggccauuggccguccacu

SEQ ID NO: 1047390 - RNA, 19 nt, Artificial Sequence
  Description of Artificial Sequence: Synthetic oligonucleotide
ccaaauccgaagccaaauc

SEQ ID NO: 1047391 - RNA, 19 nt, Artificial Sequence
  Description of Artificial Sequence: Synthetic oligonucleotide
augccauacucggggauga

SEQ ID NO: 1047392 - RNA, 19 nt, Artificial Sequence
  Description of Artificial Sequence: Synthetic oligonucleotide
aucuaagcgcugguuaauu

SEQ ID NO: 1047393 - RNA, 19 nt, Artificial Sequence
  Description of Artificial Sequence: Synthetic oligonucleotide
cccaaguacgugugaagug

SEQ ID NO: 1047394 - RNA, 19 nt, Artificial Sequence
  Description of Artificial Sequence: Synthetic oligonucleotide
gucgcuucuccuggugucc

SEQ ID NO: 1047395 - RNA, 19 nt, Artificial Sequence
  Description of Artificial Sequence: Synthetic oligonucleotide
cacuguugucugagcaguc

SEQ ID NO: 1047396 - RNA, 19 nt, Artificial Sequence
  Description of Artificial Sequence: Synthetic oligonucleotide
ggaccaaauguaucuccuc

SEQ ID NO: 1047397 - RNA, 19 nt, Artificial Sequence
  Description of Artificial Sequence: Synthetic oligonucleotide
cacaggccucauaggaguc

SEQ ID NO: 1047398 - RNA, 19 nt, Artificial Sequence
  Description of Artificial Sequence: Synthetic oligonucleotide
aucccucggauccggcacu

SEQ ID NO: 1047399 - RNA, 19 nt, Artificial Sequence
  Description of Artificial Sequence: Synthetic oligonucleotide
gcugucaagguggcuaccc

SEQ ID NO: 1047400 - RNA, 19 nt, Artificial Sequence
  Description of Artificial Sequence: Synthetic oligonucleotide
accaugcgaucucgcuguc

SEQ ID NO: 1047401 - RNA, 19 nt, Artificial Sequence
  Description of Artificial Sequence: Synthetic oligonucleotide
aggcacguaggguuugcua

SEQ ID NO: 1047402 - RNA, 19 nt, Artificial Sequence
  Description of Artificial Sequence: Synthetic oligonucleotide
augcccuggaacaugccau

SEQ ID NO: 1047403 - RNA, 19 nt, Artificial Sequence
  Description of Artificial Sequence: Synthetic oligonucleotide
gaaucggcacuggcgcuac

SEQ ID NO: 1047404 - RNA, 19 nt, Artificial Sequence
  Description of Artificial Sequence: Synthetic oligonucleotide
cacuggcgcuacccgaggc

SEQ ID NO: 1047405 - RNA, 19 nt, Artificial Sequence
  Description of Artificial Sequence: Synthetic oligonucleotide
agguggcgguaucgcaguc

SEQ ID NO: 1047406 - RNA, 19 nt, Artificial Sequence
  Description of Artificial Sequence: Synthetic oligonucleotide
gguaggcaucauauuggcc

SEQ ID NO: 1047407 - RNA, 19 nt, Artificial Sequence
  Description of Artificial Sequence: Synthetic oligonucleotide
caccaugcgaucucgcugu

SEQ ID NO: 1047408 - RNA, 19 nt, Artificial Sequence
  Description of Artificial Sequence: Synthetic oligonucleotide
cuggucacgguaggcauca

SEQ ID NO: 1047409 - RNA, 19 nt, Artificial Sequence
  Description of Artificial Sequence: Synthetic oligonucleotide
guacccucugcgguuuccc

SEQ ID NO: 1047410 - RNA, 19 nt, Artificial Sequence
  Description of Artificial Sequence: Synthetic oligonucleotide
uacccgaggcacguagggu

SEQ ID NO: 1047411 - RNA, 19 nt, Artificial Sequence
  Description of Artificial Sequence: Synthetic oligonucleotide
cugcucgggagccuuucuc

SEQ ID NO: 1047412 - RNA, 19 nt, Artificial Sequence
  Description of Artificial Sequence: Synthetic oligonucleotide
ugcgcuuggccugggugcu

SEQ ID NO: 1047413 - RNA, 19 nt, Artificial Sequence
  Description of Artificial Sequence: Synthetic oligonucleotide
ccaagugcggcaucauauc

SEQ ID NO: 1047414 - RNA, 19 nt, Artificial Sequence
  Description of Artificial Sequence: Synthetic oligonucleotide
cugucaagguggcuaccca

SEQ ID NO: 1047415 - RNA, 19 nt, Artificial Sequence
  Description of Artificial Sequence: Synthetic oligonucleotide
gcgguaucgcagucucugg

SEQ ID NO: 1047416 - RNA, 19 nt, Artificial Sequence
  Description of Artificial Sequence: Synthetic oligonucleotide
agcagggguacugcgcccu

SEQ ID NO: 1047417 - RNA, 19 nt, Artificial Sequence
  Description of Artificial Sequence: Synthetic oligonucleotide
gccauuucccaaguacgug

SEQ ID NO: 1047418 - RNA, 19 nt, Artificial Sequence
  Description of Artificial Sequence: Synthetic oligonucleotide
guacgugugaaguggccau

SEQ ID NO: 1047419 - RNA, 19 nt, Artificial Sequence
  Description of Artificial Sequence: Synthetic oligonucleotide
caugcgcccauagcccgag

SEQ ID NO: 1047420 - RNA, 19 nt, Artificial Sequence
  Description of Artificial Sequence: Synthetic oligonucleotide
auacugcgggccaccauga

SEQ ID NO: 1047421 - RNA, 19 nt, Artificial Sequence
  Description of Artificial Sequence: Synthetic oligonucleotide
ggcacguaggguuugcuau

SEQ ID NO: 1047422 - RNA, 19 nt, Artificial Sequence
  Description of Artificial Sequence: Synthetic oligonucleotide
caccaugagagaggacuuc

SEQ ID NO: 1047423 - RNA, 19 nt, Artificial Sequence
  Description of Artificial Sequence: Synthetic oligonucleotide
gagguggcgguaucgcagu

SEQ ID NO: 1047424 - RNA, 19 nt, Artificial Sequence
  Description of Artificial Sequence: Synthetic oligonucleotide
caaugggcugccuccaccu

SEQ ID NO: 1047425 - RNA, 19 nt, Artificial Sequence
  Description of Artificial Sequence: Synthetic oligonucleotide
agcccgaccuguagagguc

SEQ ID NO: 1047426 - RNA, 19 nt, Artificial Sequence
  Description of Artificial Sequence: Synthetic oligonucleotide
uacgugugaaguggccaua

SEQ ID NO: 1047427 - RNA, 19 nt, Artificial Sequence
  Description of Artificial Sequence: Synthetic oligonucleotide
uucugcucgggagccuuuc

SEQ ID NO: 1047428 - RNA, 19 nt, Artificial Sequence
  Description of Artificial Sequence: Synthetic oligonucleotide
cucauaggagucauaucuu

SEQ ID NO: 1047429 - RNA, 19 nt, Artificial Sequence
  Description of Artificial Sequence: Synthetic oligonucleotide
gccauagucauagcccgac

SEQ ID NO: 1047430 - RNA, 19 nt, Artificial Sequence
  Description of Artificial Sequence: Synthetic oligonucleotide
cgguaggcaucauauuggc

SEQ ID NO: 1047431 - RNA, 19 nt, Artificial Sequence
  Description of Artificial Sequence: Synthetic oligonucleotide
ugcgagcccugucgcuucu

SEQ ID NO: 1047432 - RNA, 19 nt, Artificial Sequence
  Description of Artificial Sequence: Synthetic oligonucleotide
guaucaugucugucuccaa

SEQ ID NO: 1047433 - RNA, 19 nt, Artificial Sequence
  Description of Artificial Sequence: Synthetic oligonucleotide
augcgaucucgcugucgcu

SEQ ID NO: 1047434 - RNA, 19 nt, Artificial Sequence
  Description of Artificial Sequence: Synthetic oligonucleotide
gguugugauccauagucuu

SEQ ID NO: 1047435 - RNA, 19 nt, Artificial Sequence
  Description of Artificial Sequence: Synthetic oligonucleotide
ccaaacugcauggggauga

SEQ ID NO: 1047436 - RNA, 19 nt, Artificial Sequence
  Description of Artificial Sequence: Synthetic oligonucleotide
uggcgguaucgcagucucu

SEQ ID NO: 1047437 - RNA, 19 nt, Artificial Sequence
  Description of Artificial Sequence: Synthetic oligonucleotide
cucguucacucaggauggc

SEQ ID NO: 1047438 - RNA, 19 nt, Artificial Sequence
  Description of Artificial Sequence: Synthetic oligonucleotide
gccuacauauuugaagugu

SEQ ID NO: 1047439 - RNA, 19 nt, Artificial Sequence
  Description of Artificial Sequence: Synthetic oligonucleotide
gcugucggugaaaggauuc

SEQ ID NO: 1047440 - RNA, 19 nt, Artificial Sequence
  Description of Artificial Sequence: Synthetic oligonucleotide
gcuacccgaggcacguagg

SEQ ID NO: 1047441 - RNA, 19 nt, Artificial Sequence
  Description of Artificial Sequence: Synthetic oligonucleotide
cgguaucgcagucucuggg

SEQ ID NO: 1047442 - RNA, 19 nt, Artificial Sequence
  Description of Artificial Sequence: Synthetic oligonucleotide
cugcgagcccugucgcuuc

SEQ ID NO: 1047443 - RNA, 19 nt, Artificial Sequence
  Description of Artificial Sequence: Synthetic oligonucleotide
agguccgccucaucugcuu

SEQ ID NO: 1047444 - RNA, 19 nt, Artificial Sequence
  Description of Artificial Sequence: Synthetic oligonucleotide
gcgcccauagcccgaggcc

SEQ ID NO: 1047445 - RNA, 19 nt, Artificial Sequence
  Description of Artificial Sequence: Synthetic oligonucleotide
ugcgggccaccaugagaga

SEQ ID NO: 1047446 - RNA, 19 nt, Artificial Sequence
  Description of Artificial Sequence: Synthetic oligonucleotide
gccaaaucgggagccacca

SEQ ID NO: 1047447 - RNA, 19 nt, Artificial Sequence
  Description of Artificial Sequence: Synthetic oligonucleotide
ucccucggauccggcacug

SEQ ID NO: 1047448 - RNA, 19 nt, Artificial Sequence
  Description of Artificial Sequence: Synthetic oligonucleotide
ucgcagucucuggggcggg

SEQ ID NO: 1047449 - RNA, 19 nt, Artificial Sequence
  Description of Artificial Sequence: Synthetic oligonucleotide
ggaucccucggauccggca

SEQ ID NO: 1047450 - RNA, 19 nt, Artificial Sequence
  Description of Artificial Sequence: Synthetic oligonucleotide
gcaucauaucuaagcgcug

SEQ ID NO: 1047451 - RNA, 19 nt, Artificial Sequence
  Description of Artificial Sequence: Synthetic oligonucleotide
gcgggccaccaugagagag

SEQ ID NO: 1047452 - RNA, 19 nt, Artificial Sequence
  Description of Artificial Sequence: Synthetic oligonucleotide
cagggguacugcgcccucc

SEQ ID NO: 1047453 - RNA, 19 nt, Artificial Sequence
  Description of Artificial Sequence: Synthetic oligonucleotide
cugguuaauucuggauaaa

SEQ ID NO: 1047454 - RNA, 19 nt, Artificial Sequence
  Description of Artificial Sequence: Synthetic oligonucleotide
cgcauucgaaacuggucac

SEQ ID NO: 1047455 - RNA, 19 nt, Artificial Sequence
  Description of Artificial Sequence: Synthetic oligonucleotide
augcgcccauagcccgagg

SEQ ID NO: 1047456 - RNA, 19 nt, Artificial Sequence
  Description of Artificial Sequence: Synthetic oligonucleotide
gccucauaggagucauauc

SEQ ID NO: 1047457 - RNA, 19 nt, Artificial Sequence
  Description of Artificial Sequence: Synthetic oligonucleotide
ugccgucuucucucccauc

SEQ ID NO: 1047458 - RNA, 19 nt, Artificial Sequence
  Description of Artificial Sequence: Synthetic oligonucleotide
ggcacgcccucugcgagcc

SEQ ID NO: 1047459 - RNA, 19 nt, Artificial Sequence
  Description of Artificial Sequence: Synthetic oligonucleotide
aggcaugcacuggccccgg

SEQ ID NO: 1047460 - RNA, 19 nt, Artificial Sequence
  Description of Artificial Sequence: Synthetic oligonucleotide
ggccauuggccguccacuc

SEQ ID NO: 1047461 - RNA, 19 nt, Artificial Sequence
  Description of Artificial Sequence: Synthetic oligonucleotide
ggcaucauauuggcccuca

SEQ ID NO: 1047462 - RNA, 19 nt, Artificial Sequence
  Description of Artificial Sequence: Synthetic oligonucleotide
ggugcgguauuugcagaga

SEQ ID NO: 1047463 - RNA, 19 nt, Artificial Sequence
  Description of Artificial Sequence: Synthetic oligonucleotide
ccucugcgagcccugucgc

SEQ ID NO: 1047464 - RNA, 19 nt, Artificial Sequence
  Description of Artificial Sequence: Synthetic oligonucleotide
gugccggcacgcccucugc

SEQ ID NO: 1047465 - RNA, 19 nt, Artificial Sequence
  Description of Artificial Sequence: Synthetic oligonucleotide
ccugcaacuugcgcuuggc

SEQ ID NO: 1047466 - RNA, 19 nt, Artificial Sequence
  Description of Artificial Sequence: Synthetic oligonucleotide
cgcugguuaauucuggaua

SEQ ID NO: 1047467 - RNA, 19 nt, Artificial Sequence
  Description of Artificial Sequence: Synthetic oligonucleotide
guugucugagcagucuguu

SEQ ID NO: 1047468 - RNA, 19 nt, Artificial Sequence
  Description of Artificial Sequence: Synthetic oligonucleotide
acaugcgcccauagcccga

SEQ ID NO: 1047469 - RNA, 19 nt, Artificial Sequence
  Description of Artificial Sequence: Synthetic oligonucleotide
ccuacauauuugaaguguu

SEQ ID NO: 1047470 - RNA, 19 nt, Artificial Sequence
  Description of Artificial Sequence: Synthetic oligonucleotide
gguauggguuauggagcac

SEQ ID NO: 1047471 - RNA, 19 nt, Artificial Sequence
  Description of Artificial Sequence: Synthetic oligonucleotide
ccuugagucacaggccuca

SEQ ID NO: 1047472 - RNA, 19 nt, Artificial Sequence
  Description of Artificial Sequence: Synthetic oligonucleotide
cgcuccaacuucuugcuaa

SEQ ID NO: 1047473 - RNA, 19 nt, Artificial Sequence
  Description of Artificial Sequence: Synthetic oligonucleotide
ccgaccuguagaggucucg

SEQ ID NO: 1047474 - RNA, 19 nt, Artificial Sequence
  Description of Artificial Sequence: Synthetic oligonucleotide
cucguagaaggugcgguau

SEQ ID NO: 1047475 - RNA, 19 nt, Artificial Sequence
  Description of Artificial Sequence: Synthetic oligonucleotide
ccaugcgaucucgcugucg

SEQ ID NO: 1047476 - RNA, 19 nt, Artificial Sequence
  Description of Artificial Sequence: Synthetic oligonucleotide
cugucggugaaaggauucu

SEQ ID NO: 1047477 - RNA, 19 nt, Artificial Sequence
  Description of Artificial Sequence: Synthetic oligonucleotide
agccugcgguuccgguugu

SEQ ID NO: 1047478 - RNA, 19 nt, Artificial Sequence
  Description of Artificial Sequence: Synthetic oligonucleotide
gggcugugccggcacgccc

SEQ ID NO: 1047479 - RNA, 19 nt, Artificial Sequence
  Description of Artificial Sequence: Synthetic oligonucleotide
ggaucaagcucgccauagu

SEQ ID NO: 1047480 - RNA, 19 nt, Artificial Sequence
  Description of Artificial Sequence: Synthetic oligonucleotide
ugccauacucggggaugau

SEQ ID NO: 1047481 - RNA, 19 nt, Artificial Sequence
  Description of Artificial Sequence: Synthetic oligonucleotide
caagcucgccauagucaua

SEQ ID NO: 1047482 - RNA, 19 nt, Artificial Sequence
  Description of Artificial Sequence: Synthetic oligonucleotide
ggaaucggcacuggcgcua

SEQ ID NO: 1047483 - RNA, 19 nt, Artificial Sequence
  Description of Artificial Sequence: Synthetic oligonucleotide
gggcccuuucucugaaucu

SEQ ID NO: 1047484 - RNA, 19 nt, Artificial Sequence
  Description of Artificial Sequence: Synthetic oligonucleotide
caguacccucugcgguuuc

SEQ ID NO: 1047485 - RNA, 19 nt, Artificial Sequence
  Description of Artificial Sequence: Synthetic oligonucleotide
cguaggguuugcuauuugu

SEQ ID NO: 1047486 - RNA, 19 nt, Artificial Sequence
  Description of Artificial Sequence: Synthetic oligonucleotide
gccaaauccgaagccaaau

SEQ ID NO: 1047487 - RNA, 19 nt, Artificial Sequence
  Description of Artificial Sequence: Synthetic oligonucleotide
ccucggauccggcacugca

SEQ ID NO: 1047488 - RNA, 19 nt, Artificial Sequence
  Description of Artificial Sequence: Synthetic oligonucleotide
gccguacacaccuccuugu

SEQ ID NO: 1047489 - RNA, 19 nt, Artificial Sequence
  Description of Artificial Sequence: Synthetic oligonucleotide
cauacucggggaugauguu

SEQ ID NO: 1047490 - RNA, 19 nt, Artificial Sequence
  Description of Artificial Sequence: Synthetic oligonucleotide
ccggcacgcccucugcgag

SEQ ID NO: 1047491 - RNA, 19 nt, Artificial Sequence
  Description of Artificial Sequence: Synthetic oligonucleotide
cugcgguuccgguugugau

SEQ ID NO: 1047492 - RNA, 19 nt, Artificial Sequence
  Description of Artificial Sequence: Synthetic oligonucleotide
gcuagccauuucccaagua

SEQ ID NO: 1047493 - RNA, 19 nt, Artificial Sequence
  Description of Artificial Sequence: Synthetic oligonucleotide
cggauccggcacugcagcg

SEQ ID NO: 1047494 - RNA, 19 nt, Artificial Sequence
  Description of Artificial Sequence: Synthetic oligonucleotide
gaggcacguaggguuugcu

SEQ ID NO: 1047495 - RNA, 19 nt, Artificial Sequence
  Description of Artificial Sequence: Synthetic oligonucleotide
cccuugagucacaggccuc

SEQ ID NO: 1047496 - RNA, 19 nt, Artificial Sequence
  Description of Artificial Sequence: Synthetic oligonucleotide
gccggcacgcccucugcga

SEQ ID NO: 1047497 - RNA, 19 nt, Artificial Sequence
  Description of Artificial Sequence: Synthetic oligonucleotide
ccauagcccgaggccauug

SEQ ID NO: 1047498 - RNA, 19 nt, Artificial Sequence
  Description of Artificial Sequence: Synthetic oligonucleotide
ccacuccgggcaucccggg

SEQ ID NO: 1047499 - RNA, 19 nt, Artificial Sequence
  Description of Artificial Sequence: Synthetic oligonucleotide
gcccuggaacaugccauac

SEQ ID NO: 1047500 - RNA, 19 nt, Artificial Sequence
  Description of Artificial Sequence: Synthetic oligonucleotide
ggggcugugccggcacgcc

SEQ ID NO: 1047501 - RNA, 19 nt, Artificial Sequence
  Description of Artificial Sequence: Synthetic oligonucleotide
cuucccacaugcgcccaua

SEQ ID NO: 1047502 - RNA, 19 nt, Artificial Sequence
  Description of Artificial Sequence: Synthetic oligonucleotide
ccacgcauucgaaacuggu

SEQ ID NO: 1047503 - RNA, 19 nt, Artificial Sequence
  Description of Artificial Sequence: Synthetic oligonucleotide
ccugagccguacacaccuc

SEQ ID NO: 1047504 - RNA, 19 nt, Artificial Sequence
  Description of Artificial Sequence: Synthetic oligonucleotide
gcgcugguuaauucuggau

SEQ ID NO: 1047505 - RNA, 19 nt, Artificial Sequence
  Description of Artificial Sequence: Synthetic oligonucleotide
gguggcgguaucgcagucu

SEQ ID NO: 1047506 - RNA, 19 nt, Artificial Sequence
  Description of Artificial Sequence: Synthetic oligonucleotide
cacguaggguuugcuauuu

SEQ ID NO: 1047507 - RNA, 19 nt, Artificial Sequence
  Description of Artificial Sequence: Synthetic oligonucleotide
ggcccuuucucugaaucuu

SEQ ID NO: 1047508 - RNA, 19 nt, Artificial Sequence
  Description of Artificial Sequence: Synthetic oligonucleotide
cagguccgccucaucugcu

SEQ ID NO: 1047509 - RNA, 19 nt, Artificial Sequence
  Description of Artificial Sequence: Synthetic oligonucleotide
gggguacugcgcccuccuc

SEQ ID NO: 1047510 - RNA, 19 nt, Artificial Sequence
  Description of Artificial Sequence: Synthetic oligonucleotide
gggaucccucggauccggc

SEQ ID NO: 1047511 - RNA, 19 nt, Artificial Sequence
  Description of Artificial Sequence: Synthetic oligonucleotide
ccgggaucccucggauccg

SEQ ID NO: 1047512 - RNA, 19 nt, Artificial Sequence
  Description of Artificial Sequence: Synthetic oligonucleotide
gcacguaggguuugcuauu

SEQ ID NO: 1047513 - RNA, 19 nt, Artificial Sequence
  Description of Artificial Sequence: Synthetic oligonucleotide
acgcccucugcgagcccug

SEQ ID NO: 1047514 - RNA, 19 nt, Artificial Sequence
  Description of Artificial Sequence: Synthetic oligonucleotide
cacgcccucugcgagcccu

SEQ ID NO: 1047515 - RNA, 19 nt, Artificial Sequence
  Description of Artificial Sequence: Synthetic oligonucleotide
uggucacgguaggcaucau

SEQ ID NO: 1047516 - RNA, 19 nt, Artificial Sequence
  Description of Artificial Sequence: Synthetic oligonucleotide
ggcgcuacccgaggcacgu

SEQ ID NO: 1047517 - RNA, 19 nt, Artificial Sequence
  Description of Artificial Sequence: Synthetic oligonucleotide
ccuccacgcauucgaaacu

SEQ ID NO: 1047518 - RNA, 19 nt, Artificial Sequence
  Description of Artificial Sequence: Synthetic oligonucleotide
gcagggguacugcgcccuc

SEQ ID NO: 1047519 - RNA, 19 nt, Artificial Sequence
  Description of Artificial Sequence: Synthetic oligonucleotide
cgggaucccucggauccgg

SEQ ID NO: 1047520 - RNA, 19 nt, Artificial Sequence
  Description of Artificial Sequence: Synthetic oligonucleotide
cuugagucacaggccucau

SEQ ID NO: 1047521 - RNA, 19 nt, Artificial Sequence
  Description of Artificial Sequence: Synthetic oligonucleotide
ggcugugccggcacgcccu

SEQ ID NO: 1047522 - RNA, 19 nt, Artificial Sequence
  Description of Artificial Sequence: Synthetic oligonucleotide
cgaggcacguaggguuugc

SEQ ID NO: 1047523 - RNA, 19 nt, Artificial Sequence
  Description of Artificial Sequence: Synthetic oligonucleotide
cccgaggccauuggccguc

SEQ ID NO: 1047524 - RNA, 19 nt, Artificial Sequence
  Description of Artificial Sequence: Synthetic oligonucleotide
ccguacacaccuccuugua

SEQ ID NO: 1047525 - RNA, 19 nt, Artificial Sequence
  Description of Artificial Sequence: Synthetic oligonucleotide
ccaucaugagccugcgguu

SEQ ID NO: 1047526 - RNA, 19 nt, Artificial Sequence
  Description of Artificial Sequence: Synthetic oligonucleotide
aggccucauaggagucaua

SEQ ID NO: 1047527 - RNA, 19 nt, Artificial Sequence
  Description of Artificial Sequence: Synthetic oligonucleotide
gguuccgguugugauccau

SEQ ID NO: 1047528 - RNA, 19 nt, Artificial Sequence
  Description of Artificial Sequence: Synthetic oligonucleotide
ccaccaugagagaggacuu

SEQ ID NO: 1047529 - RNA, 19 nt, Artificial Sequence
  Description of Artificial Sequence: Synthetic oligonucleotide
cggcacgcccucugcgagc

SEQ ID NO: 1047530 - RNA, 19 nt, Artificial Sequence
  Description of Artificial Sequence: Synthetic oligonucleotide
caccgcccuccucgucguc

SEQ ID NO: 1047531 - RNA, 19 nt, Artificial Sequence
  Description of Artificial Sequence: Synthetic oligonucleotide
ggcugucggugaaaggauu

SEQ ID NO: 1047532 - RNA, 19 nt, Artificial Sequence
  Description of Artificial Sequence: Synthetic oligonucleotide
cgccauagucauagcccga

SEQ ID NO: 1047533 - RNA, 19 nt, Artificial Sequence
  Description of Artificial Sequence: Synthetic oligonucleotide
cccucggauccggcacugc

SEQ ID NO: 1047534 - RNA, 19 nt, Artificial Sequence
  Description of Artificial Sequence: Synthetic oligonucleotide
ccaccacgcaugcccugga

SEQ ID NO: 1047535 - RNA, 19 nt, Artificial Sequence
  Description of Artificial Sequence: Synthetic oligonucleotide
ccgaggccauuggccgucc

SEQ ID NO: 1047536 - RNA, 19 nt, Artificial Sequence
  Description of Artificial Sequence: Synthetic oligonucleotide
gcacgcccucugcgagccc

SEQ ID NO: 1047537 - RNA, 19 nt, Artificial Sequence
  Description of Artificial Sequence: Synthetic oligonucleotide
gcccgcccagcagggguac

SEQ ID NO: 1047538 - RNA, 19 nt, Artificial Sequence
  Description of Artificial Sequence: Synthetic oligonucleotide
gcccauagcccgaggccau

SEQ ID NO: 1047539 - RNA, 19 nt, Artificial Sequence
  Description of Artificial Sequence: Synthetic oligonucleotide
cgucgaggcccgggauccc

SEQ ID NO: 1047540 - RNA, 19 nt, Artificial Sequence
  Description of Artificial Sequence: Synthetic oligonucleotide
ccccaccgcccuccucguc

SEQ ID NO: 1047541 - RNA, 19 nt, Artificial Sequence
  Description of Artificial Sequence: Synthetic oligonucleotide
ccaccgcccuccucgucgu

SEQ ID NO: 1047542 - RNA, 19 nt, Artificial Sequence
  Description of Artificial Sequence: Synthetic oligonucleotide
gcgcuuggccugggugcuc

SEQ ID NO: 1047543 - RNA, 19 nt, Artificial Sequence
  Description of Artificial Sequence: Synthetic oligonucleotide
cugugccggcacgcccucu

SEQ ID NO: 1047544 - RNA, 19 nt, Artificial Sequence
  Description of Artificial Sequence: Synthetic oligonucleotide
uugaauucaaagaagaugg

SEQ ID NO: 1047545 - RNA, 19 nt, Artificial Sequence
  Description of Artificial Sequence: Synthetic oligonucleotide
aauucuauuacaauuggcc

SEQ ID NO: 1047546 - RNA, 19 nt, Artificial Sequence
  Description of Artificial Sequence: Synthetic oligonucleotide
aaugaugcaauuuaaaaga

SEQ ID NO: 1047547 - RNA, 19 nt, Artificial Sequence
  Description of Artificial Sequence: Synthetic oligonucleotide
aaggcaaaacacuuggugc

SEQ ID NO: 1047548 - RNA, 19 nt, Artificial Sequence
  Description of Artificial Sequence: Synthetic oligonucleotide
uauaauucuauuacaauug

SEQ ID NO: 1047549 - RNA, 19 nt, Artificial Sequence
  Description of Artificial Sequence: Synthetic oligonucleotide
cuaaaauccgucuuaaugg

SEQ ID NO: 1047550 - RNA, 19 nt, Artificial Sequence
  Description of Artificial Sequence: Synthetic oligonucleotide
uguaagaauauucuucagg

SEQ ID NO: 1047551 - RNA, 19 nt, Artificial Sequence
  Description of Artificial Sequence: Synthetic oligonucleotide
aaauccuucacgcugacug

SEQ ID NO: 1047552 - RNA, 19 nt, Artificial Sequence
  Description of Artificial Sequence: Synthetic oligonucleotide
aagaauagcagugugacag

SEQ ID NO: 1047553 - RNA, 19 nt, Artificial Sequence
  Description of Artificial Sequence: Synthetic oligonucleotide
ugauaugcuacacagagcu

SEQ ID NO: 1047554 - RNA, 19 nt, Artificial Sequence
  Description of Artificial Sequence: Synthetic oligonucleotide
auucuauuacaauuggccc

SEQ ID NO: 1047555 - RNA, 19 nt, Artificial Sequence
  Description of Artificial Sequence: Synthetic oligonucleotide
agugauaugcuacacagag

SEQ ID NO: 1047556 - RNA, 19 nt, Artificial Sequence
  Description of Artificial Sequence: Synthetic oligonucleotide
uuauauguaagaauauucu

SEQ ID NO: 1047557 - RNA, 19 nt, Artificial Sequence
  Description of Artificial Sequence: Synthetic oligonucleotide
uguauaucuaaauaggaaa

SEQ ID NO: 1047558 - RNA, 19 nt, Artificial Sequence
  Description of Artificial Sequence: Synthetic oligonucleotide
ugacuguauaucuaaauag

SEQ ID NO: 1047559 - RNA, 19 nt, Artificial Sequence
  Description of Artificial Sequence: Synthetic oligonucleotide
uguuugaauucaaagaaga

SEQ ID NO: 1047560 - RNA, 19 nt, Artificial Sequence
  Description of Artificial Sequence: Synthetic oligonucleotide
auuuguaucaggaucauuc

SEQ ID NO: 1047561 - RNA, 19 nt, Artificial Sequence
  Description of Artificial Sequence: Synthetic oligonucleotide
cauauuuugcauacuaagg

SEQ ID NO: 1047562 - RNA, 19 nt, Artificial Sequence
  Description of Artificial Sequence: Synthetic oligonucleotide
auauuuuccaaaggaaugc

SEQ ID NO: 1047563 - RNA, 19 nt, Artificial Sequence
  Description of Artificial Sequence: Synthetic oligonucleotide
aguauuuuaacaucugacu

SEQ ID NO: 1047564 - RNA, 19 nt, Artificial Sequence
  Description of Artificial Sequence: Synthetic oligonucleotide
uuuugcauacuaaggagag

SEQ ID NO: 1047565 - RNA, 19 nt, Artificial Sequence
  Description of Artificial Sequence: Synthetic oligonucleotide
uauuuugcauacuaaggag

SEQ ID NO: 1047566 - RNA, 19 nt, Artificial Sequence
  Description of Artificial Sequence: Synthetic oligonucleotide
gagaagaacagauaacccc

SEQ ID NO: 1047567 - RNA, 19 nt, Artificial Sequence
  Description of Artificial Sequence: Synthetic oligonucleotide
uaaaauucacauagguucc

SEQ ID NO: 1047568 - RNA, 19 nt, Artificial Sequence
  Description of Artificial Sequence: Synthetic oligonucleotide
uaaaauccgucuuaauggg

SEQ ID NO: 1047569 - RNA, 19 nt, Artificial Sequence
  Description of Artificial Sequence: Synthetic oligonucleotide
auaauucuauuacaauugg

SEQ ID NO: 1047570 - RNA, 19 nt, Artificial Sequence
  Description of Artificial Sequence: Synthetic oligonucleotide
ugggcugaacaucaaaugg

SEQ ID NO: 1047571 - RNA, 19 nt, Artificial Sequence
  Description of Artificial Sequence: Synthetic oligonucleotide
ugaguaacgucauuccugg

SEQ ID NO: 1047572 - RNA, 19 nt, Artificial Sequence
  Description of Artificial Sequence: Synthetic oligonucleotide
aaucuaugccauucaaauc

SEQ ID NO: 1047573 - RNA, 19 nt, Artificial Sequence
  Description of Artificial Sequence: Synthetic oligonucleotide
ucucaauucugauagugag

SEQ ID NO: 1047574 - RNA, 19 nt, Artificial Sequence
  Description of Artificial Sequence: Synthetic oligonucleotide
aacauguggcgauuuugcc

SEQ ID NO: 1047575 - RNA, 19 nt, Artificial Sequence
  Description of Artificial Sequence: Synthetic oligonucleotide
uaauaucugauacucgucu

SEQ ID NO: 1047576 - RNA, 19 nt, Artificial Sequence
  Description of Artificial Sequence: Synthetic oligonucleotide
ucuugcuaauaucugauac

SEQ ID NO: 1047577 - RNA, 19 nt, Artificial Sequence
  Description of Artificial Sequence: Synthetic oligonucleotide
ucaauguccauauuaaaau

SEQ ID NO: 1047578 - RNA, 19 nt, Artificial Sequence
  Description of Artificial Sequence: Synthetic oligonucleotide
guaagaauauucuucagga

SEQ ID NO: 1047579 - RNA, 19 nt, Artificial Sequence
  Description of Artificial Sequence: Synthetic oligonucleotide
acaucaaagguaaauaguc

SEQ ID NO: 1047580 - RNA, 19 nt, Artificial Sequence
  Description of Artificial Sequence: Synthetic oligonucleotide
gacuguauaucuaaauagg

SEQ ID NO: 1047581 - RNA, 19 nt, Artificial Sequence
  Description of Artificial Sequence: Synthetic oligonucleotide
uuguauaauucuauuacaa

SEQ ID NO: 1047582 - RNA, 19 nt, Artificial Sequence
  Description of Artificial Sequence: Synthetic oligonucleotide
uaacuaaugaccugcauau

SEQ ID NO: 1047583 - RNA, 19 nt, Artificial Sequence
  Description of Artificial Sequence: Synthetic oligonucleotide
uuacaauuggcccagguuu

SEQ ID NO: 1047584 - RNA, 19 nt, Artificial Sequence
  Description of Artificial Sequence: Synthetic oligonucleotide
gaugguuccagcguuaacc

SEQ ID NO: 1047585 - RNA, 19 nt, Artificial Sequence
  Description of Artificial Sequence: Synthetic oligonucleotide
cuuaaggucucacaauggg

SEQ ID NO: 1047586 - RNA, 19 nt, Artificial Sequence
  Description of Artificial Sequence: Synthetic oligonucleotide
gagguaugcggucuuaagg

SEQ ID NO: 1047587 - RNA, 19 nt, Artificial Sequence
  Description of Artificial Sequence: Synthetic oligonucleotide
ucuuaaggucucacaaugg

SEQ ID NO: 1047588 - RNA, 19 nt, Artificial Sequence
  Description of Artificial Sequence: Synthetic oligonucleotide
ugugcuaugugaaaguuuu

SEQ ID NO: 1047589 - RNA, 19 nt, Artificial Sequence
  Description of Artificial Sequence: Synthetic oligonucleotide
uucuauuacaauuggccca

SEQ ID NO: 1047590 - RNA, 19 nt, Artificial Sequence
  Description of Artificial Sequence: Synthetic oligonucleotide
uaaagugguuucuugguca

SEQ ID NO: 1047591 - RNA, 19 nt, Artificial Sequence
  Description of Artificial Sequence: Synthetic oligonucleotide
uaauucuauuacaauuggc

SEQ ID NO: 1047592 - RNA, 19 nt, Artificial Sequence
  Description of Artificial Sequence: Synthetic oligonucleotide
cagagaagaacagauaacc

SEQ ID NO: 1047593 - RNA, 19 nt, Artificial Sequence
  Description of Artificial Sequence: Synthetic oligonucleotide
aggaguaucuuguacagga

SEQ ID NO: 1047594 - RNA, 19 nt, Artificial Sequence
  Description of Artificial Sequence: Synthetic oligonucleotide
guauuuuaacaucugacuc

SEQ ID NO: 1047595 - RNA, 19 nt, Artificial Sequence
  Description of Artificial Sequence: Synthetic oligonucleotide
agaacagauaaccccuugg

SEQ ID NO: 1047596 - RNA, 19 nt, Artificial Sequence
  Description of Artificial Sequence: Synthetic oligonucleotide
aagagucgaagucggcgcc

SEQ ID NO: 1047597 - RNA, 19 nt, Artificial Sequence
  Description of Artificial Sequence: Synthetic oligonucleotide
ugcaccacaugucuaaccc

SEQ ID NO: 1047598 - RNA, 19 nt, Artificial Sequence
  Description of Artificial Sequence: Synthetic oligonucleotide
cuguugaagagugauaugc

SEQ ID NO: 1047599 - RNA, 19 nt, Artificial Sequence
  Description of Artificial Sequence: Synthetic oligonucleotide
uucugagugguaaaauuca

SEQ ID NO: 1047600 - RNA, 19 nt, Artificial Sequence
  Description of Artificial Sequence: Synthetic oligonucleotide
uuuaggcuuguaauguuug

SEQ ID NO: 1047601 - RNA, 19 nt, Artificial Sequence
  Description of Artificial Sequence: Synthetic oligonucleotide
ucaaaugggaauucuuugu

SEQ ID NO: 1047602 - RNA, 19 nt, Artificial Sequence
  Description of Artificial Sequence: Synthetic oligonucleotide
uuuguaucaggaucauucc

SEQ ID NO: 1047603 - RNA, 19 nt, Artificial Sequence
  Description of Artificial Sequence: Synthetic oligonucleotide
auacuaaggagagguaugc

SEQ ID NO: 1047604 - RNA, 19 nt, Artificial Sequence
  Description of Artificial Sequence: Synthetic oligonucleotide
aaagguaaauagucaauuu

SEQ ID NO: 1047605 - RNA, 19 nt, Artificial Sequence
  Description of Artificial Sequence: Synthetic oligonucleotide
uggacuguaaugcugcacu

SEQ ID NO: 1047606 - RNA, 19 nt, Artificial Sequence
  Description of Artificial Sequence: Synthetic oligonucleotide
guuauauguaagaauauuc

SEQ ID NO: 1047607 - RNA, 19 nt, Artificial Sequence
  Description of Artificial Sequence: Synthetic oligonucleotide
auuuaugccucguuacauc

SEQ ID NO: 1047608 - RNA, 19 nt, Artificial Sequence
  Description of Artificial Sequence: Synthetic oligonucleotide
ucuauuacaauuggcccag

SEQ ID NO: 1047609 - RNA, 19 nt, Artificial Sequence
  Description of Artificial Sequence: Synthetic oligonucleotide
uguauaauucuauuacaau

SEQ ID NO: 1047610 - RNA, 19 nt, Artificial Sequence
  Description of Artificial Sequence: Synthetic oligonucleotide
caguauuuuaacaucugac

SEQ ID NO: 1047611 - RNA, 19 nt, Artificial Sequence
  Description of Artificial Sequence: Synthetic oligonucleotide
aaugggaugggcugaacau

SEQ ID NO: 1047612 - RNA, 19 nt, Artificial Sequence
  Description of Artificial Sequence: Synthetic oligonucleotide
guaauguaggggucgaugc

SEQ ID NO: 1047613 - RNA, 19 nt, Artificial Sequence
  Description of Artificial Sequence: Synthetic oligonucleotide
ucgucuaucgccuccacca

SEQ ID NO: 1047614 - RNA, 19 nt, Artificial Sequence
  Description of Artificial Sequence: Synthetic oligonucleotide
uggcgauuuugccuuaugg

SEQ ID NO: 1047615 - RNA, 19 nt, Artificial Sequence
  Description of Artificial Sequence: Synthetic oligonucleotide
auaacuaaugaccugcaua

SEQ ID NO: 1047616 - RNA, 19 nt, Artificial Sequence
  Description of Artificial Sequence: Synthetic oligonucleotide
ugcauauuuuccaaaggaa

SEQ ID NO: 1047617 - RNA, 19 nt, Artificial Sequence
  Description of Artificial Sequence: Synthetic oligonucleotide
auguguucaugucaggaag

SEQ ID NO: 1047618 - RNA, 19 nt, Artificial Sequence
  Description of Artificial Sequence: Synthetic oligonucleotide
gcuaaaauccgucuuaaug

SEQ ID NO: 1047619 - RNA, 19 nt, Artificial Sequence
  Description of Artificial Sequence: Synthetic oligonucleotide
ucaggaucauuccuugugc

SEQ ID NO: 1047620 - RNA, 19 nt, Artificial Sequence
  Description of Artificial Sequence: Synthetic oligonucleotide
aguaacgucauuccuggcu

SEQ ID NO: 1047621 - RNA, 19 nt, Artificial Sequence
  Description of Artificial Sequence: Synthetic oligonucleotide
ucaauucugauagugagua

SEQ ID NO: 1047622 - RNA, 19 nt, Artificial Sequence
  Description of Artificial Sequence: Synthetic oligonucleotide
uauauguaagaauauucuu

SEQ ID NO: 1047623 - RNA, 19 nt, Artificial Sequence
  Description of Artificial Sequence: Synthetic oligonucleotide
uuaaaucuaugccauucaa

SEQ ID NO: 1047624 - RNA, 19 nt, Artificial Sequence
  Description of Artificial Sequence: Synthetic oligonucleotide
ugcuaauaucugauacucg

SEQ ID NO: 1047625 - RNA, 19 nt, Artificial Sequence
  Description of Artificial Sequence: Synthetic oligonucleotide
acaugucuaacccacagaa

SEQ ID NO: 1047626 - RNA, 19 nt, Artificial Sequence
  Description of Artificial Sequence: Synthetic oligonucleotide
uugcauacuaaggagaggu

SEQ ID NO: 1047627 - RNA, 19 nt, Artificial Sequence
  Description of Artificial Sequence: Synthetic oligonucleotide
agaccgauuuucucaauuc

SEQ ID NO: 1047628 - RNA, 19 nt, Artificial Sequence
  Description of Artificial Sequence: Synthetic oligonucleotide
aagagugauaugcuacaca

SEQ ID NO: 1047629 - RNA, 19 nt, Artificial Sequence
  Description of Artificial Sequence: Synthetic oligonucleotide
caggaguuaaaucuaugcc

SEQ ID NO: 1047630 - RNA, 19 nt, Artificial Sequence
  Description of Artificial Sequence: Synthetic oligonucleotide
cuaugaugguuucugagug

SEQ ID NO: 1047631 - RNA, 19 nt, Artificial Sequence
  Description of Artificial Sequence: Synthetic oligonucleotide
uggucaauaauuguaauuu

SEQ ID NO: 1047632 - RNA, 19 nt, Artificial Sequence
  Description of Artificial Sequence: Synthetic oligonucleotide
uccaaaggaaugcaugacu

SEQ ID NO: 1047633 - RNA, 19 nt, Artificial Sequence
  Description of Artificial Sequence: Synthetic oligonucleotide
uucuuggucaauaauugua

SEQ ID NO: 1047634 - RNA, 19 nt, Artificial Sequence
  Description of Artificial Sequence: Synthetic oligonucleotide
gucuuaaggucucacaaug

SEQ ID NO: 1047635 - RNA, 19 nt, Artificial Sequence
  Description of Artificial Sequence: Synthetic oligonucleotide
guuauuuguaucaggauca

SEQ ID NO: 1047636 - RNA, 19 nt, Artificial Sequence
  Description of Artificial Sequence: Synthetic oligonucleotide
uguguaacaacuagccauc

SEQ ID NO: 1047637 - RNA, 19 nt, Artificial Sequence
  Description of Artificial Sequence: Synthetic oligonucleotide
uaaggucucacaauggguu

SEQ ID NO: 1047638 - RNA, 19 nt, Artificial Sequence
  Description of Artificial Sequence: Synthetic oligonucleotide
ugucuaacccacagaaagc

SEQ ID NO: 1047639 - RNA, 19 nt, Artificial Sequence
  Description of Artificial Sequence: Synthetic oligonucleotide
ugccucguuacaucaaagg

SEQ ID NO: 1047640 - RNA, 19 nt, Artificial Sequence
  Description of Artificial Sequence: Synthetic oligonucleotide
uuaaggucucacaaugggu

SEQ ID NO: 1047641 - RNA, 19 nt, Artificial Sequence
  Description of Artificial Sequence: Synthetic oligonucleotide
uuggcuauacauguguuca

SEQ ID NO: 1047642 - RNA, 19 nt, Artificial Sequence
  Description of Artificial Sequence: Synthetic oligonucleotide
ugaauucaaagaagauggc

SEQ ID NO: 1047643 - RNA, 19 nt, Artificial Sequence
  Description of Artificial Sequence: Synthetic oligonucleotide
uguguggacuguaaugcug

SEQ ID NO: 1047644 - RNA, 19 nt, Artificial Sequence
  Description of Artificial Sequence: Synthetic oligonucleotide
uucaggauuggcucuagcu

SEQ ID NO: 1047645 - RNA, 19 nt, Artificial Sequence
  Description of Artificial Sequence: Synthetic oligonucleotide
cugauacucgucuaucgcc

SEQ ID NO: 1047646 - RNA, 19 nt, Artificial Sequence
  Description of Artificial Sequence: Synthetic oligonucleotide
uguacaggaguuaaaucua

SEQ ID NO: 1047647 - RNA, 19 nt, Artificial Sequence
  Description of Artificial Sequence: Synthetic oligonucleotide
agguaugcggucuuaaggu

SEQ ID NO: 1047648 - RNA, 19 nt, Artificial Sequence
  Description of Artificial Sequence: Synthetic oligonucleotide
cauuaacagggccagcagg

SEQ ID NO: 1047649 - RNA, 19 nt, Artificial Sequence
  Description of Artificial Sequence: Synthetic oligonucleotide
ucucacaauggguugucag

SEQ ID NO: 1047650 - RNA, 19 nt, Artificial Sequence
  Description of Artificial Sequence: Synthetic oligonucleotide
uguugaagagugauaugcu

SEQ ID NO: 1047651 - RNA, 19 nt, Artificial Sequence
  Description of Artificial Sequence: Synthetic oligonucleotide
aacaacuagccaucaugug

SEQ ID NO: 1047652 - RNA, 19 nt, Artificial Sequence
  Description of Artificial Sequence: Synthetic oligonucleotide
ugauacucgucuaucgccu

SEQ ID NO: 1047653 - RNA, 19 nt, Artificial Sequence
  Description of Artificial Sequence: Synthetic oligonucleotide
ucugauagugaguaacguc

SEQ ID NO: 1047654 - RNA, 19 nt, Artificial Sequence
  Description of Artificial Sequence: Synthetic oligonucleotide
cauacuaaggagagguaug

SEQ ID NO: 1047655 - RNA, 19 nt, Artificial Sequence
  Description of Artificial Sequence: Synthetic oligonucleotide
uguaauguaggggucgaug

SEQ ID NO: 1047656 - RNA, 19 nt, Artificial Sequence
  Description of Artificial Sequence: Synthetic oligonucleotide
gguuauuuguaucaggauc

SEQ ID NO: 1047657 - RNA, 19 nt, Artificial Sequence
  Description of Artificial Sequence: Synthetic oligonucleotide
accugcauauuuuccaaag

SEQ ID NO: 1047658 - RNA, 19 nt, Artificial Sequence
  Description of Artificial Sequence: Synthetic oligonucleotide
augacuguauaucuaaaua

SEQ ID NO: 1047659 - RNA, 19 nt, Artificial Sequence
  Description of Artificial Sequence: Synthetic oligonucleotide
ugcaugacuguauaucuaa

SEQ ID NO: 1047660 - RNA, 19 nt, Artificial Sequence
  Description of Artificial Sequence: Synthetic oligonucleotide
uugcuaauaucugauacuc

SEQ ID NO: 1047661 - RNA, 19 nt, Artificial Sequence
  Description of Artificial Sequence: Synthetic oligonucleotide
aucaugugcuaugugaaag

SEQ ID NO: 1047662 - RNA, 19 nt, Artificial Sequence
  Description of Artificial Sequence: Synthetic oligonucleotide
uuauccgcaguauuuuaac

SEQ ID NO: 1047663 - RNA, 19 nt, Artificial Sequence
  Description of Artificial Sequence: Synthetic oligonucleotide
aauaucugauacucgucua

SEQ ID NO: 1047664 - RNA, 19 nt, Artificial Sequence
  Description of Artificial Sequence: Synthetic oligonucleotide
uggcaauagagucccagga

SEQ ID NO: 1047665 - RNA, 19 nt, Artificial Sequence
  Description of Artificial Sequence: Synthetic oligonucleotide
ucuaucgccuccaccagcu

SEQ ID NO: 1047666 - RNA, 19 nt, Artificial Sequence
  Description of Artificial Sequence: Synthetic oligonucleotide
cucaacucuuccuaaauga

SEQ ID NO: 1047667 - RNA, 19 nt, Artificial Sequence
  Description of Artificial Sequence: Synthetic oligonucleotide
accguggcaauagaguccc

SEQ ID NO: 1047668 - RNA, 19 nt, Artificial Sequence
  Description of Artificial Sequence: Synthetic oligonucleotide
aaauucacauagguuccag

SEQ ID NO: 1047669 - RNA, 19 nt, Artificial Sequence
  Description of Artificial Sequence: Synthetic oligonucleotide
ucaauguucuguguaacaa

SEQ ID NO: 1047670 - RNA, 19 nt, Artificial Sequence
  Description of Artificial Sequence: Synthetic oligonucleotide
cucaauguccauauuaaaa

SEQ ID NO: 1047671 - RNA, 19 nt, Artificial Sequence
  Description of Artificial Sequence: Synthetic oligonucleotide
caagagucgaagucggcgc

SEQ ID NO: 1047672 - RNA, 19 nt, Artificial Sequence
  Description of Artificial Sequence: Synthetic oligonucleotide
ucugagugguaaaauucac

SEQ ID NO: 1047673 - RNA, 19 nt, Artificial Sequence
  Description of Artificial Sequence: Synthetic oligonucleotide
aaggucucacaauggguug

SEQ ID NO: 1047674 - RNA, 19 nt, Artificial Sequence
  Description of Artificial Sequence: Synthetic oligonucleotide
ugagacuggcgccccagcg

SEQ ID NO: 1047675 - RNA, 19 nt, Artificial Sequence
  Description of Artificial Sequence: Synthetic oligonucleotide
cacgcugacuguaauguag

SEQ ID NO: 1047676 - RNA, 19 nt, Artificial Sequence
  Description of Artificial Sequence: Synthetic oligonucleotide
uuaaccccagaaucuacca

SEQ ID NO: 1047677 - RNA, 19 nt, Artificial Sequence
  Description of Artificial Sequence: Synthetic oligonucleotide
uuguaucaggaucauuccu

SEQ ID NO: 1047678 - RNA, 19 nt, Artificial Sequence
  Description of Artificial Sequence: Synthetic oligonucleotide
gacuguaauguaggggucg

SEQ ID NO: 1047679 - RNA, 19 nt, Artificial Sequence
  Description of Artificial Sequence: Synthetic oligonucleotide
aggcaaaacacuuggugcu

SEQ ID NO: 1047680 - RNA, 19 nt, Artificial Sequence
  Description of Artificial Sequence: Synthetic oligonucleotide
uauuacaauuggcccaggu

SEQ ID NO: 1047681 - RNA, 19 nt, Artificial Sequence
  Description of Artificial Sequence: Synthetic oligonucleotide
uucuaucuaccuauauuaa

SEQ ID NO: 1047682 - RNA, 19 nt, Artificial Sequence
  Description of Artificial Sequence: Synthetic oligonucleotide
ucuaacccacagaaagccc

SEQ ID NO: 1047683 - RNA, 19 nt, Artificial Sequence
  Description of Artificial Sequence: Synthetic oligonucleotide
uagggcgccauccuccccg

SEQ ID NO: 1047684 - RNA, 19 nt, Artificial Sequence
  Description of Artificial Sequence: Synthetic oligonucleotide
uuucuuggucaauaauugu

SEQ ID NO: 1047685 - RNA, 19 nt, Artificial Sequence
  Description of Artificial Sequence: Synthetic oligonucleotide
acucaacucuuccuaaaug

SEQ ID NO: 1047686 - RNA, 19 nt, Artificial Sequence
  Description of Artificial Sequence: Synthetic oligonucleotide
uaauguaggggucgaugca

SEQ ID NO: 1047687 - RNA, 19 nt, Artificial Sequence
  Description of Artificial Sequence: Synthetic oligonucleotide
cucguuacaucaaagguaa

SEQ ID NO: 1047688 - RNA, 19 nt, Artificial Sequence
  Description of Artificial Sequence: Synthetic oligonucleotide
aauccgucuuaaugggaug

SEQ ID NO: 1047689 - RNA, 19 nt, Artificial Sequence
  Description of Artificial Sequence: Synthetic oligonucleotide
gucuuaaugggaugggcug

SEQ ID NO: 1047690 - RNA, 19 nt, Artificial Sequence
  Description of Artificial Sequence: Synthetic oligonucleotide
uuugcauacuaaggagagg

SEQ ID NO: 1047691 - RNA, 19 nt, Artificial Sequence
  Description of Artificial Sequence: Synthetic oligonucleotide
acauguggcgauuuugccu

SEQ ID NO: 1047692 - RNA, 19 nt, Artificial Sequence
  Description of Artificial Sequence: Synthetic oligonucleotide
caauguucuguguaacaac

SEQ ID NO: 1047693 - RNA, 19 nt, Artificial Sequence
  Description of Artificial Sequence: Synthetic oligonucleotide
ucaugugcuaugugaaagu

SEQ ID NO: 1047694 - RNA, 19 nt, Artificial Sequence
  Description of Artificial Sequence: Synthetic oligonucleotide
auucuaaacauguggcgau

SEQ ID NO: 1047695 - RNA, 19 nt, Artificial Sequence
  Description of Artificial Sequence: Synthetic oligonucleotide
auuacaauuggcccagguu

SEQ ID NO: 1047696 - RNA, 19 nt, Artificial Sequence
  Description of Artificial Sequence: Synthetic oligonucleotide
uuggucaauaauuguaauu

SEQ ID NO: 1047697 - RNA, 19 nt, Artificial Sequence
  Description of Artificial Sequence: Synthetic oligonucleotide
aaauccgucuuaaugggau

SEQ ID NO: 1047698 - RNA, 19 nt, Artificial Sequence
  Description of Artificial Sequence: Synthetic oligonucleotide
gaggccgggcucuagggcg

SEQ ID NO: 1047699 - RNA, 19 nt, Artificial Sequence
  Description of Artificial Sequence: Synthetic oligonucleotide
cuaauaucugauacucguc

SEQ ID NO: 1047700 - RNA, 19 nt, Artificial Sequence
  Description of Artificial Sequence: Synthetic oligonucleotide
acuguauaucuaaauagga

SEQ ID NO: 1047701 - RNA, 19 nt, Artificial Sequence
  Description of Artificial Sequence: Synthetic oligonucleotide
aaagugguuucuuggucaa

SEQ ID NO: 1047702 - RNA, 19 nt, Artificial Sequence
  Description of Artificial Sequence: Synthetic oligonucleotide
ugccuuaugguuuucuuuu

SEQ ID NO: 1047703 - RNA, 19 nt, Artificial Sequence
  Description of Artificial Sequence: Synthetic oligonucleotide
ugugacagagaagaacaga

SEQ ID NO: 1047704 - RNA, 19 nt, Artificial Sequence
  Description of Artificial Sequence: Synthetic oligonucleotide
uauccgcaguauuuuaaca

SEQ ID NO: 1047705 - RNA, 19 nt, Artificial Sequence
  Description of Artificial Sequence: Synthetic oligonucleotide
ucacaauggguugucagga

SEQ ID NO: 1047706 - RNA, 19 nt, Artificial Sequence
  Description of Artificial Sequence: Synthetic oligonucleotide
uacaggaguuaaaucuaug

SEQ ID NO: 1047707 - RNA, 19 nt, Artificial Sequence
  Description of Artificial Sequence: Synthetic oligonucleotide
ucuaugccauucaaauccu

SEQ ID NO: 1047708 - RNA, 19 nt, Artificial Sequence
  Description of Artificial Sequence: Synthetic oligonucleotide
auuuugcauacuaaggaga

SEQ ID NO: 1047709 - RNA, 19 nt, Artificial Sequence
  Description of Artificial Sequence: Synthetic oligonucleotide
uaugccucguuacaucaaa

SEQ ID NO: 1047710 - RNA, 19 nt, Artificial Sequence
  Description of Artificial Sequence: Synthetic oligonucleotide
cuucagaccgauuuucuca

SEQ ID NO: 1047711 - RNA, 19 nt, Artificial Sequence
  Description of Artificial Sequence: Synthetic oligonucleotide
aaaauucacauagguucca

SEQ ID NO: 1047712 - RNA, 19 nt, Artificial Sequence
  Description of Artificial Sequence: Synthetic oligonucleotide
ggcccugacauuaacaggg

SEQ ID NO: 1047713 - RNA, 19 nt, Artificial Sequence
  Description of Artificial Sequence: Synthetic oligonucleotide
cuagccaucaugugcuaug

SEQ ID NO: 1047714 - RNA, 19 nt, Artificial Sequence
  Description of Artificial Sequence: Synthetic oligonucleotide
ugcuaugugaaaguuuuau

SEQ ID NO: 1047715 - RNA, 19 nt, Artificial Sequence
  Description of Artificial Sequence: Synthetic oligonucleotide
agagguaugcggucuuaag

SEQ ID NO: 1047716 - RNA, 19 nt, Artificial Sequence
  Description of Artificial Sequence: Synthetic oligonucleotide
uccagcguuaaccccagaa

SEQ ID NO: 1047717 - RNA, 19 nt, Artificial Sequence
  Description of Artificial Sequence: Synthetic oligonucleotide
cuguauaucuaaauaggaa

SEQ ID NO: 1047718 - RNA, 19 nt, Artificial Sequence
  Description of Artificial Sequence: Synthetic oligonucleotide
uccgcaguauuuuaacauc

SEQ ID NO: 1047719 - RNA, 19 nt, Artificial Sequence
  Description of Artificial Sequence: Synthetic oligonucleotide
auccgcaguauuuuaacau

SEQ ID NO: 1047720 - RNA, 19 nt, Artificial Sequence
  Description of Artificial Sequence: Synthetic oligonucleotide
aauggguugucaggaagca

SEQ ID NO: 1047721 - RNA, 19 nt, Artificial Sequence
  Description of Artificial Sequence: Synthetic oligonucleotide
uuaggcuuguaauguuuga

SEQ ID NO: 1047722 - RNA, 19 nt, Artificial Sequence
  Description of Artificial Sequence: Synthetic oligonucleotide
auaucugauacucgucuau

SEQ ID NO: 1047723 - RNA, 19 nt, Artificial Sequence
  Description of Artificial Sequence: Synthetic oligonucleotide
auuuuaacaucugacucaa

SEQ ID NO: 1047724 - RNA, 19 nt, Artificial Sequence
  Description of Artificial Sequence: Synthetic oligonucleotide
uccugccuguugaagagug

SEQ ID NO: 1047725 - RNA, 19 nt, Artificial Sequence
  Description of Artificial Sequence: Synthetic oligonucleotide
uauuuaugccucguuacau

SEQ ID NO: 1047726 - RNA, 19 nt, Artificial Sequence
  Description of Artificial Sequence: Synthetic oligonucleotide
guaacgucauuccuggcuc

SEQ ID NO: 1047727 - RNA, 19 nt, Artificial Sequence
  Description of Artificial Sequence: Synthetic oligonucleotide
uucagaccgauuuucucaa

SEQ ID NO: 1047728 - RNA, 19 nt, Artificial Sequence
  Description of Artificial Sequence: Synthetic oligonucleotide
cuugugcaaaguuugaugu

SEQ ID NO: 1047729 - RNA, 19 nt, Artificial Sequence
  Description of Artificial Sequence: Synthetic oligonucleotide
cugacauuaacagggccag

SEQ ID NO: 1047730 - RNA, 19 nt, Artificial Sequence
  Description of Artificial Sequence: Synthetic oligonucleotide
ggaagaauagcagugugac

SEQ ID NO: 1047731 - RNA, 19 nt, Artificial Sequence
  Description of Artificial Sequence: Synthetic oligonucleotide
accccuuggcuauacaugu

SEQ ID NO: 1047732 - RNA, 19 nt, Artificial Sequence
  Description of Artificial Sequence: Synthetic oligonucleotide
uacuaaggagagguaugcg

SEQ ID NO: 1047733 - RNA, 19 nt, Artificial Sequence
  Description of Artificial Sequence: Synthetic oligonucleotide
uacucugagaugguuccag

SEQ ID NO: 1047734 - RNA, 19 nt, Artificial Sequence
  Description of Artificial Sequence: Synthetic oligonucleotide
guuaaccccagaaucuacc

SEQ ID NO: 1047735 - RNA, 19 nt, Artificial Sequence
  Description of Artificial Sequence: Synthetic oligonucleotide
caccacaugucuaacccac

SEQ ID NO: 1047736 - RNA, 19 nt, Artificial Sequence
  Description of Artificial Sequence: Synthetic oligonucleotide
cagcguuaaccccagaauc

SEQ ID NO: 1047737 - RNA, 19 nt, Artificial Sequence
  Description of Artificial Sequence: Synthetic oligonucleotide
auccgucuuaaugggaugg

SEQ ID NO: 1047738 - RNA, 19 nt, Artificial Sequence
  Description of Artificial Sequence: Synthetic oligonucleotide
ugauagugaguaacgucau

SEQ ID NO: 1047739 - RNA, 19 nt, Artificial Sequence
  Description of Artificial Sequence: Synthetic oligonucleotide
ucuuaaugggaugggcuga

SEQ ID NO: 1047740 - RNA, 19 nt, Artificial Sequence
  Description of Artificial Sequence: Synthetic oligonucleotide
aggcuuguaauguuugaau

SEQ ID NO: 1047741 - RNA, 19 nt, Artificial Sequence
  Description of Artificial Sequence: Synthetic oligonucleotide
ugucaggaagccagucuug

SEQ ID NO: 1047742 - RNA, 19 nt, Artificial Sequence
  Description of Artificial Sequence: Synthetic oligonucleotide
uguaacaacuagccaucau

SEQ ID NO: 1047743 - RNA, 19 nt, Artificial Sequence
  Description of Artificial Sequence: Synthetic oligonucleotide
acagagcuaugaugguuuc

SEQ ID NO: 1047744 - RNA, 19 nt, Artificial Sequence
  Description of Artificial Sequence: Synthetic oligonucleotide
ugaccugcauauuuuccaa

SEQ ID NO: 1047745 - RNA, 19 nt, Artificial Sequence
  Description of Artificial Sequence: Synthetic oligonucleotide
gaagcagcaguuauccgca

SEQ ID NO: 1047746 - RNA, 19 nt, Artificial Sequence
  Description of Artificial Sequence: Synthetic oligonucleotide
aagucggcgccucuccuga

SEQ ID NO: 1047747 - RNA, 19 nt, Artificial Sequence
  Description of Artificial Sequence: Synthetic oligonucleotide
gugguaaaauucacauagg

SEQ ID NO: 1047748 - RNA, 19 nt, Artificial Sequence
  Description of Artificial Sequence: Synthetic oligonucleotide
gucgaugcacugcccagcg

SEQ ID NO: 1047749 - RNA, 19 nt, Artificial Sequence
  Description of Artificial Sequence: Synthetic oligonucleotide
gaagaauagcagugugaca

SEQ ID NO: 1047750 - RNA, 19 nt, Artificial Sequence
  Description of Artificial Sequence: Synthetic oligonucleotide
uaugcggucuuaaggucuc

SEQ ID NO: 1047751 - RNA, 19 nt, Artificial Sequence
  Description of Artificial Sequence: Synthetic oligonucleotide
cuucacgcugacuguaaug

SEQ ID NO: 1047752 - RNA, 19 nt, Artificial Sequence
  Description of Artificial Sequence: Synthetic oligonucleotide
uuugccuuaugguuuucuu

SEQ ID NO: 1047753 - RNA, 19 nt, Artificial Sequence
  Description of Artificial Sequence: Synthetic oligonucleotide
agaugguuccagcguuaac

SEQ ID NO: 1047754 - RNA, 19 nt, Artificial Sequence
  Description of Artificial Sequence: Synthetic oligonucleotide
ucucaauguucuguguaac

SEQ ID NO: 1047755 - RNA, 19 nt, Artificial Sequence
  Description of Artificial Sequence: Synthetic oligonucleotide
uuccuugugcaaaguuuga

SEQ ID NO: 1047756 - RNA, 19 nt, Artificial Sequence
  Description of Artificial Sequence: Synthetic oligonucleotide
gaagagugauaugcuacac

SEQ ID NO: 1047757 - RNA, 19 nt, Artificial Sequence
  Description of Artificial Sequence: Synthetic oligonucleotide
gagacuggcgccccagcgc

SEQ ID NO: 1047758 - RNA, 19 nt, Artificial Sequence
  Description of Artificial Sequence: Synthetic oligonucleotide
gucauuccuggcuccgacg

SEQ ID NO: 1047759 - RNA, 19 nt, Artificial Sequence
  Description of Artificial Sequence: Synthetic oligonucleotide
aguuuuauuuaugccucgu

SEQ ID NO: 1047760 - RNA, 19 nt, Artificial Sequence
  Description of Artificial Sequence: Synthetic oligonucleotide
uggcaauucuaucuaccua

SEQ ID NO: 1047761 - RNA, 19 nt, Artificial Sequence
  Description of Artificial Sequence: Synthetic oligonucleotide
accgauuuucucaauucug

SEQ ID NO: 1047762 - RNA, 19 nt, Artificial Sequence
  Description of Artificial Sequence: Synthetic oligonucleotide
agguuauuuguaucaggau

SEQ ID NO: 1047763 - RNA, 19 nt, Artificial Sequence
  Description of Artificial Sequence: Synthetic oligonucleotide
aguaucuuguacaggaguu

SEQ ID NO: 1047764 - RNA, 19 nt, Artificial Sequence
  Description of Artificial Sequence: Synthetic oligonucleotide
gcuaauaucugauacucgu

SEQ ID NO: 1047765 - RNA, 19 nt, Artificial Sequence
  Description of Artificial Sequence: Synthetic oligonucleotide
uaggcuuguaauguuugaa

SEQ ID NO: 1047766 - RNA, 19 nt, Artificial Sequence
  Description of Artificial Sequence: Synthetic oligonucleotide
uccgucuuaaugggauggg

SEQ ID NO: 1047767 - RNA, 19 nt, Artificial Sequence
  Description of Artificial Sequence: Synthetic oligonucleotide
aucauuguguugagcuugg

SEQ ID NO: 1047768 - RNA, 19 nt, Artificial Sequence
  Description of Artificial Sequence: Synthetic oligonucleotide
aggaagcagcaguuauccg

SEQ ID NO: 1047769 - RNA, 19 nt, Artificial Sequence
  Description of Artificial Sequence: Synthetic oligonucleotide
ggaauucuuuguuauaugu

SEQ ID NO: 1047770 - RNA, 19 nt, Artificial Sequence
  Description of Artificial Sequence: Synthetic oligonucleotide
uugccuuaugguuuucuuu

SEQ ID NO: 1047771 - RNA, 19 nt, Artificial Sequence
  Description of Artificial Sequence: Synthetic oligonucleotide
ugacucaacucuuccuaaa

SEQ ID NO: 1047772 - RNA, 19 nt, Artificial Sequence
  Description of Artificial Sequence: Synthetic oligonucleotide
uuggcccagguuuaauuuc

SEQ ID NO: 1047773 - RNA, 19 nt, Artificial Sequence
  Description of Artificial Sequence: Synthetic oligonucleotide
ugacuguaauguagggguc

SEQ ID NO: 1047774 - RNA, 19 nt, Artificial Sequence
  Description of Artificial Sequence: Synthetic oligonucleotide
uaacgucauuccuggcucc

SEQ ID NO: 1047775 - RNA, 19 nt, Artificial Sequence
  Description of Artificial Sequence: Synthetic oligonucleotide
uguaggggucgaugcacug

SEQ ID NO: 1047776 - RNA, 19 nt, Artificial Sequence
  Description of Artificial Sequence: Synthetic oligonucleotide
guuccagguuauuuguauc

SEQ ID NO: 1047777 - RNA, 19 nt, Artificial Sequence
  Description of Artificial Sequence: Synthetic oligonucleotide
uuaugccucguuacaucaa

SEQ ID NO: 1047778 - RNA, 19 nt, Artificial Sequence
  Description of Artificial Sequence: Synthetic oligonucleotide
acgcugacuguaauguagg

SEQ ID NO: 1047779 - RNA, 19 nt, Artificial Sequence
  Description of Artificial Sequence: Synthetic oligonucleotide
ccuugugcaaaguuugaug

SEQ ID NO: 1047780 - RNA, 19 nt, Artificial Sequence
  Description of Artificial Sequence: Synthetic oligonucleotide
agcaguuauccgcaguauu

SEQ ID NO: 1047781 - RNA, 19 nt, Artificial Sequence
  Description of Artificial Sequence: Synthetic oligonucleotide
aggaucauuccuugugcaa

SEQ ID NO: 1047782 - RNA, 19 nt, Artificial Sequence
  Description of Artificial Sequence: Synthetic oligonucleotide
uccgacggcaaccguggca

SEQ ID NO: 1047783 - RNA, 19 nt, Artificial Sequence
  Description of Artificial Sequence: Synthetic oligonucleotide
agugguuucuuggucaaua

SEQ ID NO: 1047784 - RNA, 19 nt, Artificial Sequence
  Description of Artificial Sequence: Synthetic oligonucleotide
acggcaaccguggcaauag

SEQ ID NO: 1047785 - RNA, 19 nt, Artificial Sequence
  Description of Artificial Sequence: Synthetic oligonucleotide
ugagaugguuccagcguua

SEQ ID NO: 1047786 - RNA, 19 nt, Artificial Sequence
  Description of Artificial Sequence: Synthetic oligonucleotide
ucuaaacauguggcgauuu

SEQ ID NO: 1047787 - RNA, 19 nt, Artificial Sequence
  Description of Artificial Sequence: Synthetic oligonucleotide
ccagguuauuuguaucagg

SEQ ID NO: 1047788 - RNA, 19 nt, Artificial Sequence
  Description of Artificial Sequence: Synthetic oligonucleotide
gggaauucuuuguuauaug

SEQ ID NO: 1047789 - RNA, 19 nt, Artificial Sequence
  Description of Artificial Sequence: Synthetic oligonucleotide
aacaucugacucaacucuu

SEQ ID NO: 1047790 - RNA, 19 nt, Artificial Sequence
  Description of Artificial Sequence: Synthetic oligonucleotide
ugcauacuaaggagaggua

SEQ ID NO: 1047791 - RNA, 19 nt, Artificial Sequence
  Description of Artificial Sequence: Synthetic oligonucleotide
ugggccuccuucuguaggu

SEQ ID NO: 1047792 - RNA, 19 nt, Artificial Sequence
  Description of Artificial Sequence: Synthetic oligonucleotide
gugauaugcuacacagagc

SEQ ID NO: 1047793 - RNA, 19 nt, Artificial Sequence
  Description of Artificial Sequence: Synthetic oligonucleotide
guaggugucuugcuaauau

SEQ ID NO: 1047794 - RNA, 19 nt, Artificial Sequence
  Description of Artificial Sequence: Synthetic oligonucleotide
gauaaccccuuggcuauac

SEQ ID NO: 1047795 - RNA, 19 nt, Artificial Sequence
  Description of Artificial Sequence: Synthetic oligonucleotide
aggugcuaaaauccgucuu

SEQ ID NO: 1047796 - RNA, 19 nt, Artificial Sequence
  Description of Artificial Sequence: Synthetic oligonucleotide
cucgucuaucgccuccacc

SEQ ID NO: 1047797 - RNA, 19 nt, Artificial Sequence
  Description of Artificial Sequence: Synthetic oligonucleotide
acuggcgccccagcgcugc

SEQ ID NO: 1047798 - RNA, 19 nt, Artificial Sequence
  Description of Artificial Sequence: Synthetic oligonucleotide
gucuaucgccuccaccagc

SEQ ID NO: 1047799 - RNA, 19 nt, Artificial Sequence
  Description of Artificial Sequence: Synthetic oligonucleotide
ucggcgccucuccugagac

SEQ ID NO: 1047800 - RNA, 19 nt, Artificial Sequence
  Description of Artificial Sequence: Synthetic oligonucleotide
guuauccgcaguauuuuaa

SEQ ID NO: 1047801 - RNA, 19 nt, Artificial Sequence
  Description of Artificial Sequence: Synthetic oligonucleotide
gagcuaugaugguuucuga

SEQ ID NO: 1047802 - RNA, 19 nt, Artificial Sequence
  Description of Artificial Sequence: Synthetic oligonucleotide
acucgucuaucgccuccac

SEQ ID NO: 1047803 - RNA, 19 nt, Artificial Sequence
  Description of Artificial Sequence: Synthetic oligonucleotide
caugacuguauaucuaaau

SEQ ID NO: 1047804 - RNA, 19 nt, Artificial Sequence
  Description of Artificial Sequence: Synthetic oligonucleotide
caggaucauuccuugugca

SEQ ID NO: 1047805 - RNA, 19 nt, Artificial Sequence
  Description of Artificial Sequence: Synthetic oligonucleotide
gaguaacgucauuccuggc

SEQ ID NO: 1047806 - RNA, 19 nt, Artificial Sequence
  Description of Artificial Sequence: Synthetic oligonucleotide
uggcuauacauguguucau

SEQ ID NO: 1047807 - RNA, 19 nt, Artificial Sequence
  Description of Artificial Sequence: Synthetic oligonucleotide
uacucgucuaucgccucca

SEQ ID NO: 1047808 - RNA, 19 nt, Artificial Sequence
  Description of Artificial Sequence: Synthetic oligonucleotide
uuacucugagaugguucca

SEQ ID NO: 1047809 - RNA, 19 nt, Artificial Sequence
  Description of Artificial Sequence: Synthetic oligonucleotide
ggcuauacauguguucaug

SEQ ID NO: 1047810 - RNA, 19 nt, Artificial Sequence
  Description of Artificial Sequence: Synthetic oligonucleotide
auaaccccuuggcuauaca

SEQ ID NO: 1047811 - RNA, 19 nt, Artificial Sequence
  Description of Artificial Sequence: Synthetic oligonucleotide
gguaugcggucuuaagguc

SEQ ID NO: 1047812 - RNA, 19 nt, Artificial Sequence
  Description of Artificial Sequence: Synthetic oligonucleotide
gacucaacucuuccuaaau

SEQ ID NO: 1047813 - RNA, 19 nt, Artificial Sequence
  Description of Artificial Sequence: Synthetic oligonucleotide
uguaggugucuugcuaaua

SEQ ID NO: 1047814 - RNA, 19 nt, Artificial Sequence
  Description of Artificial Sequence: Synthetic oligonucleotide
gggcccugacauuaacagg

SEQ ID NO: 1047815 - RNA, 19 nt, Artificial Sequence
  Description of Artificial Sequence: Synthetic oligonucleotide
gagugauaugcuacacaga

SEQ ID NO: 1047816 - RNA, 19 nt, Artificial Sequence
  Description of Artificial Sequence: Synthetic oligonucleotide
ccacaugucuaacccacag

SEQ ID NO: 1047817 - RNA, 19 nt, Artificial Sequence
  Description of Artificial Sequence: Synthetic oligonucleotide
ccgauuuucucaauucuga

SEQ ID NO: 1047818 - RNA, 19 nt, Artificial Sequence
  Description of Artificial Sequence: Synthetic oligonucleotide
cucaauucugauagugagu

SEQ ID NO: 1047819 - RNA, 19 nt, Artificial Sequence
  Description of Artificial Sequence: Synthetic oligonucleotide
gguuccagcguuaacccca

SEQ ID NO: 1047820 - RNA, 19 nt, Artificial Sequence
  Description of Artificial Sequence: Synthetic oligonucleotide
ugacauuaacagggccagc

SEQ ID NO: 1047821 - RNA, 19 nt, Artificial Sequence
  Description of Artificial Sequence: Synthetic oligonucleotide
cauguggcgauuuugccuu

SEQ ID NO: 1047822 - RNA, 19 nt, Artificial Sequence
  Description of Artificial Sequence: Synthetic oligonucleotide
cacaugucuaacccacaga

SEQ ID NO: 1047823 - RNA, 19 nt, Artificial Sequence
  Description of Artificial Sequence: Synthetic oligonucleotide
uucuaaacauguggcgauu

SEQ ID NO: 1047824 - RNA, 19 nt, Artificial Sequence
  Description of Artificial Sequence: Synthetic oligonucleotide
ggcaaccguggcaauagag

SEQ ID NO: 1047825 - RNA, 19 nt, Artificial Sequence
  Description of Artificial Sequence: Synthetic oligonucleotide
aggucucacaauggguugu

SEQ ID NO: 1047826 - RNA, 19 nt, Artificial Sequence
  Description of Artificial Sequence: Synthetic oligonucleotide
cugacucaacucuuccuaa

SEQ ID NO: 1047827 - RNA, 19 nt, Artificial Sequence
  Description of Artificial Sequence: Synthetic oligonucleotide
ggaguaucuuguacaggag

SEQ ID NO: 1047828 - RNA, 19 nt, Artificial Sequence
  Description of Artificial Sequence: Synthetic oligonucleotide
ucacgcugacuguaaugua

SEQ ID NO: 1047829 - RNA, 19 nt, Artificial Sequence
  Description of Artificial Sequence: Synthetic oligonucleotide
aguggguuucuuguauaau

SEQ ID NO: 1047830 - RNA, 19 nt, Artificial Sequence
  Description of Artificial Sequence: Synthetic oligonucleotide
cagcuggccccaagagucg

SEQ ID NO: 1047831 - RNA, 19 nt, Artificial Sequence
  Description of Artificial Sequence: Synthetic oligonucleotide
ggcgauuuugccuuauggu

SEQ ID NO: 1047832 - RNA, 19 nt, Artificial Sequence
  Description of Artificial Sequence: Synthetic oligonucleotide
uuaaugggaugggcugaac

SEQ ID NO: 1047833 - RNA, 19 nt, Artificial Sequence
  Description of Artificial Sequence: Synthetic oligonucleotide
ggcaauagagucccaggaa

SEQ ID NO: 1047834 - RNA, 19 nt, Artificial Sequence
  Description of Artificial Sequence: Synthetic oligonucleotide
ggcugaacaucaaauggga

SEQ ID NO: 1047835 - RNA, 19 nt, Artificial Sequence
  Description of Artificial Sequence: Synthetic oligonucleotide
augccucguuacaucaaag

SEQ ID NO: 1047836 - RNA, 19 nt, Artificial Sequence
  Description of Artificial Sequence: Synthetic oligonucleotide
ugcggucuuaaggucucac

SEQ ID NO: 1047837 - RNA, 19 nt, Artificial Sequence
  Description of Artificial Sequence: Synthetic oligonucleotide
uugaagccacaggaguauc

SEQ ID NO: 1047838 - RNA, 19 nt, Artificial Sequence
  Description of Artificial Sequence: Synthetic oligonucleotide
guggcgauuuugccuuaug

SEQ ID NO: 1047839 - RNA, 19 nt, Artificial Sequence
  Description of Artificial Sequence: Synthetic oligonucleotide
ggaucauuccuugugcaaa

SEQ ID NO: 1047840 - RNA, 19 nt, Artificial Sequence
  Description of Artificial Sequence: Synthetic oligonucleotide
ccucguuacaucaaaggua

SEQ ID NO: 1047841 - RNA, 19 nt, Artificial Sequence
  Description of Artificial Sequence: Synthetic oligonucleotide
ucguuacaucaaagguaaa

SEQ ID NO: 1047842 - RNA, 19 nt, Artificial Sequence
  Description of Artificial Sequence: Synthetic oligonucleotide
ggaguuaaaucuaugccau

SEQ ID NO: 1047843 - RNA, 19 nt, Artificial Sequence
  Description of Artificial Sequence: Synthetic oligonucleotide
guuccagcguuaaccccag

SEQ ID NO: 1047844 - RNA, 19 nt, Artificial Sequence
  Description of Artificial Sequence: Synthetic oligonucleotide
ucagaccgauuuucucaau

SEQ ID NO: 1047845 - RNA, 19 nt, Artificial Sequence
  Description of Artificial Sequence: Synthetic oligonucleotide
cagauaaccccuuggcuau

SEQ ID NO: 1047846 - RNA, 19 nt, Artificial Sequence
  Description of Artificial Sequence: Synthetic oligonucleotide
guaugcggucuuaaggucu

SEQ ID NO: 1047847 - RNA, 19 nt, Artificial Sequence
  Description of Artificial Sequence: Synthetic oligonucleotide
gcuccgacggcaaccgugg

SEQ ID NO: 1047848 - RNA, 19 nt, Artificial Sequence
  Description of Artificial Sequence: Synthetic oligonucleotide
gugcuaaaauccgucuuaa

SEQ ID NO: 1047849 - RNA, 19 nt, Artificial Sequence
  Description of Artificial Sequence: Synthetic oligonucleotide
gagaugguuccagcguuaa

SEQ ID NO: 1047850 - RNA, 19 nt, Artificial Sequence
  Description of Artificial Sequence: Synthetic oligonucleotide
agagucgaagucggcgccu

SEQ ID NO: 1047851 - RNA, 19 nt, Artificial Sequence
  Description of Artificial Sequence: Synthetic oligonucleotide
gcagcaguuauccgcagua

SEQ ID NO: 1047852 - RNA, 19 nt, Artificial Sequence
  Description of Artificial Sequence: Synthetic oligonucleotide
gccucguuacaucaaaggu

SEQ ID NO: 1047853 - RNA, 19 nt, Artificial Sequence
  Description of Artificial Sequence: Synthetic oligonucleotide
gagagguaugcggucuuaa

SEQ ID NO: 1047854 - RNA, 19 nt, Artificial Sequence
  Description of Artificial Sequence: Synthetic oligonucleotide
gauagugaguaacgucauu

SEQ ID NO: 1047855 - RNA, 19 nt, Artificial Sequence
  Description of Artificial Sequence: Synthetic oligonucleotide
cuuaaugggaugggcugaa

SEQ ID NO: 1047856 - RNA, 19 nt, Artificial Sequence
  Description of Artificial Sequence: Synthetic oligonucleotide
caauucugauagugaguaa

SEQ ID NO: 1047857 - RNA, 19 nt, Artificial Sequence
  Description of Artificial Sequence: Synthetic oligonucleotide
gauaugcuacacagagcua

SEQ ID NO: 1047858 - RNA, 19 nt, Artificial Sequence
  Description of Artificial Sequence: Synthetic oligonucleotide
cuuuaaagucaguggguuu

SEQ ID NO: 1047859 - RNA, 19 nt, Artificial Sequence
  Description of Artificial Sequence: Synthetic oligonucleotide
ggcgccauccuccccgggc

SEQ ID NO: 1047860 - RNA, 19 nt, Artificial Sequence
  Description of Artificial Sequence: Synthetic oligonucleotide
augcaugacuguauaucua

SEQ ID NO: 1047861 - RNA, 19 nt, Artificial Sequence
  Description of Artificial Sequence: Synthetic oligonucleotide
uguggcgauuuugccuuau

SEQ ID NO: 1047862 - RNA, 19 nt, Artificial Sequence
  Description of Artificial Sequence: Synthetic oligonucleotide
gcgaggccgggcucuaggg

SEQ ID NO: 1047863 - RNA, 19 nt, Artificial Sequence
  Description of Artificial Sequence: Synthetic oligonucleotide
cauagguuccagguuauuu

SEQ ID NO: 1047864 - RNA, 19 nt, Artificial Sequence
  Description of Artificial Sequence: Synthetic oligonucleotide
ggaugggcugaacaucaaa

SEQ ID NO: 1047865 - RNA, 19 nt, Artificial Sequence
  Description of Artificial Sequence: Synthetic oligonucleotide
caggugcuaaaauccgucu

SEQ ID NO: 1047866 - RNA, 19 nt, Artificial Sequence
  Description of Artificial Sequence: Synthetic oligonucleotide
cgcaguauuuuaacaucug

SEQ ID NO: 1047867 - RNA, 19 nt, Artificial Sequence
  Description of Artificial Sequence: Synthetic oligonucleotide
caacaugcuucuggagcuc

SEQ ID NO: 1047868 - RNA, 19 nt, Artificial Sequence
  Description of Artificial Sequence: Synthetic oligonucleotide
cuaucgccuccaccagcug

SEQ ID NO: 1047869 - RNA, 19 nt, Artificial Sequence
  Description of Artificial Sequence: Synthetic oligonucleotide
cuagggcgccauccucccc

SEQ ID NO: 1047870 - RNA, 19 nt, Artificial Sequence
  Description of Artificial Sequence: Synthetic oligonucleotide
gagucgaagucggcgccuc

SEQ ID NO: 1047871 - RNA, 19 nt, Artificial Sequence
  Description of Artificial Sequence: Synthetic oligonucleotide
agucggcgccucuccugag

SEQ ID NO: 1047872 - RNA, 19 nt, Artificial Sequence
  Description of Artificial Sequence: Synthetic oligonucleotide
gcuaugugaaaguuuuauu

SEQ ID NO: 1047873 - RNA, 19 nt, Artificial Sequence
  Description of Artificial Sequence: Synthetic oligonucleotide
ugggacuguguggacugua

SEQ ID NO: 1047874 - RNA, 19 nt, Artificial Sequence
  Description of Artificial Sequence: Synthetic oligonucleotide
ggucuuaaggucucacaau

SEQ ID NO: 1047875 - RNA, 19 nt, Artificial Sequence
  Description of Artificial Sequence: Synthetic oligonucleotide
ggcuccgacggcaaccgug

SEQ ID NO: 1047876 - RNA, 19 nt, Artificial Sequence
  Description of Artificial Sequence: Synthetic oligonucleotide
cagaaucuaccaggaagaa

SEQ ID NO: 1047877 - RNA, 19 nt, Artificial Sequence
  Description of Artificial Sequence: Synthetic oligonucleotide
gucgaagucggcgccucuc

SEQ ID NO: 1047878 - RNA, 19 nt, Artificial Sequence
  Description of Artificial Sequence: Synthetic oligonucleotide
gcauacuaaggagagguau

SEQ ID NO: 1047879 - RNA, 19 nt, Artificial Sequence
  Description of Artificial Sequence: Synthetic oligonucleotide
gcggucuuaaggucucaca

SEQ ID NO: 1047880 - RNA, 19 nt, Artificial Sequence
  Description of Artificial Sequence: Synthetic oligonucleotide
gccuguugaagagugauau

SEQ ID NO: 1047881 - RNA, 19 nt, Artificial Sequence
  Description of Artificial Sequence: Synthetic oligonucleotide
gcaccacaugucuaaccca

SEQ ID NO: 1047882 - RNA, 19 nt, Artificial Sequence
  Description of Artificial Sequence: Synthetic oligonucleotide
guacaggaguuaaaucuau

SEQ ID NO: 1047883 - RNA, 19 nt, Artificial Sequence
  Description of Artificial Sequence: Synthetic oligonucleotide
cguuaaccccagaaucuac

SEQ ID NO: 1047884 - RNA, 19 nt, Artificial Sequence
  Description of Artificial Sequence: Synthetic oligonucleotide
cugagaugguuccagcguu

SEQ ID NO: 1047885 - RNA, 19 nt, Artificial Sequence
  Description of Artificial Sequence: Synthetic oligonucleotide
ccgucuuaaugggaugggc

SEQ ID NO: 1047886 - RNA, 19 nt, Artificial Sequence
  Description of Artificial Sequence: Synthetic oligonucleotide
cuaaacauguggcgauuuu

SEQ ID NO: 1047887 - RNA, 19 nt, Artificial Sequence
  Description of Artificial Sequence: Synthetic oligonucleotide
gcaaccguggcaauagagu

SEQ ID NO: 1047888 - RNA, 19 nt, Artificial Sequence
  Description of Artificial Sequence: Synthetic oligonucleotide
cgcugacuguaauguaggg

SEQ ID NO: 1047889 - RNA, 19 nt, Artificial Sequence
  Description of Artificial Sequence: Synthetic oligonucleotide
gucggcgccucuccugaga

SEQ ID NO: 1047890 - RNA, 19 nt, Artificial Sequence
  Description of Artificial Sequence: Synthetic oligonucleotide
ccuggcuccgacggcaacc

SEQ ID NO: 1047891 - RNA, 19 nt, Artificial Sequence
  Description of Artificial Sequence: Synthetic oligonucleotide
gggcucuagggcgccaucc

SEQ ID NO: 1047892 - RNA, 19 nt, Artificial Sequence
  Description of Artificial Sequence: Synthetic oligonucleotide
gcguccuucagaccgauuu

SEQ ID NO: 1047893 - RNA, 19 nt, Artificial Sequence
  Description of Artificial Sequence: Synthetic oligonucleotide
gucucacaauggguuguca

SEQ ID NO: 1047894 - RNA, 19 nt, Artificial Sequence
  Description of Artificial Sequence: Synthetic oligonucleotide
cagaccgauuuucucaauu

SEQ ID NO: 1047895 - RNA, 19 nt, Artificial Sequence
  Description of Artificial Sequence: Synthetic oligonucleotide
acgucauuccuggcuccga

SEQ ID NO: 1047896 - RNA, 19 nt, Artificial Sequence
  Description of Artificial Sequence: Synthetic oligonucleotide
ucccggcccugcgccagcg

SEQ ID NO: 1047897 - RNA, 19 nt, Artificial Sequence
  Description of Artificial Sequence: Synthetic oligonucleotide
gcugaacaucaaaugggaa

SEQ ID NO: 1047898 - RNA, 19 nt, Artificial Sequence
  Description of Artificial Sequence: Synthetic oligonucleotide
agguuccagguuauuugua

SEQ ID NO: 1047899 - RNA, 19 nt, Artificial Sequence
  Description of Artificial Sequence: Synthetic oligonucleotide
cuccgacggcaaccguggc

SEQ ID NO: 1047900 - RNA, 19 nt, Artificial Sequence
  Description of Artificial Sequence: Synthetic oligonucleotide
acauagguuccagguuauu

SEQ ID NO: 1047901 - RNA, 19 nt, Artificial Sequence
  Description of Artificial Sequence: Synthetic oligonucleotide
cggucuuaaggucucacaa

SEQ ID NO: 1047902 - RNA, 19 nt, Artificial Sequence
  Description of Artificial Sequence: Synthetic oligonucleotide
gcucuagggcgccauccuc

SEQ ID NO: 1047903 - RNA, 19 nt, Artificial Sequence
  Description of Artificial Sequence: Synthetic oligonucleotide
ggacucauuuccugccugu

SEQ ID NO: 1047904 - RNA, 19 nt, Artificial Sequence
  Description of Artificial Sequence: Synthetic oligonucleotide
ggucucacaauggguuguc

SEQ ID NO: 1047905 - RNA, 19 nt, Artificial Sequence
  Description of Artificial Sequence: Synthetic oligonucleotide
ccgcaguauuuuaacaucu

SEQ ID NO: 1047906 - RNA, 19 nt, Artificial Sequence
  Description of Artificial Sequence: Synthetic oligonucleotide
gcugcagcagacuccgggu

SEQ ID NO: 1047907 - RNA, 19 nt, Artificial Sequence
  Description of Artificial Sequence: Synthetic oligonucleotide
uggcuccgacggcaaccgu

SEQ ID NO: 1047908 - RNA, 19 nt, Artificial Sequence
  Description of Artificial Sequence: Synthetic oligonucleotide
agauaaccccuuggcuaua

SEQ ID NO: 1047909 - RNA, 19 nt, Artificial Sequence
  Description of Artificial Sequence: Synthetic oligonucleotide
auguggcgauuuugccuua

SEQ ID NO: 1047910 - RNA, 19 nt, Artificial Sequence
  Description of Artificial Sequence: Synthetic oligonucleotide
gcaauucuaucuaccuaua

SEQ ID NO: 1047911 - RNA, 19 nt, Artificial Sequence
  Description of Artificial Sequence: Synthetic oligonucleotide
gcguuaaccccagaaucua

SEQ ID NO: 1047912 - RNA, 19 nt, Artificial Sequence
  Description of Artificial Sequence: Synthetic oligonucleotide
ccccuuggcuauacaugug

SEQ ID NO: 1047913 - RNA, 19 nt, Artificial Sequence
  Description of Artificial Sequence: Synthetic oligonucleotide
augcggucuuaaggucuca

SEQ ID NO: 1047914 - RNA, 19 nt, Artificial Sequence
  Description of Artificial Sequence: Synthetic oligonucleotide
gugcuaugugaaaguuuua

SEQ ID NO: 1047915 - RNA, 19 nt, Artificial Sequence
  Description of Artificial Sequence: Synthetic oligonucleotide
gcugcacuucucaauucua

SEQ ID NO: 1047916 - RNA, 19 nt, Artificial Sequence
  Description of Artificial Sequence: Synthetic oligonucleotide
ccgacggcaaccguggcaa

SEQ ID NO: 1047917 - RNA, 19 nt, Artificial Sequence
  Description of Artificial Sequence: Synthetic oligonucleotide
ccagcguuaaccccagaau

SEQ ID NO: 1047918 - RNA, 19 nt, Artificial Sequence
  Description of Artificial Sequence: Synthetic oligonucleotide
ggacuguaaugcugcacuu

SEQ ID NO: 1047919 - RNA, 19 nt, Artificial Sequence
  Description of Artificial Sequence: Synthetic oligonucleotide
ggcucuagggcgccauccu

SEQ ID NO: 1047920 - RNA, 19 nt, Artificial Sequence
  Description of Artificial Sequence: Synthetic oligonucleotide
ccugccuguugaagaguga

SEQ ID NO: 1047921 - RNA, 19 nt, Artificial Sequence
  Description of Artificial Sequence: Synthetic oligonucleotide
gcagugugacagagaagaa

SEQ ID NO: 1047922 - RNA, 19 nt, Artificial Sequence
  Description of Artificial Sequence: Synthetic oligonucleotide
ggaguuacucugagauggu

SEQ ID NO: 1047923 - RNA, 19 nt, Artificial Sequence
  Description of Artificial Sequence: Synthetic oligonucleotide
ggggaaggacucauuuccu

SEQ ID NO: 1047924 - RNA, 19 nt, Artificial Sequence
  Description of Artificial Sequence: Synthetic oligonucleotide
ggagagguaugcggucuua

SEQ ID NO: 1047925 - RNA, 19 nt, Artificial Sequence
  Description of Artificial Sequence: Synthetic oligonucleotide
ccaggggaaggacucauuu

SEQ ID NO: 1047926 - RNA, 19 nt, Artificial Sequence
  Description of Artificial Sequence: Synthetic oligonucleotide
caauuggcccagguuuaau

SEQ ID NO: 1047927 - RNA, 19 nt, Artificial Sequence
  Description of Artificial Sequence: Synthetic oligonucleotide
cagcgaggccgggcucuag

SEQ ID NO: 1047928 - RNA, 19 nt, Artificial Sequence
  Description of Artificial Sequence: Synthetic oligonucleotide
cagcaguuauccgcaguau

SEQ ID NO: 1047929 - RNA, 19 nt, Artificial Sequence
  Description of Artificial Sequence: Synthetic oligonucleotide
gggcgccauccuccccggg

SEQ ID NO: 1047930 - RNA, 19 nt, Artificial Sequence
  Description of Artificial Sequence: Synthetic oligonucleotide
cuguaauguaggggucgau

SEQ ID NO: 1047931 - RNA, 19 nt, Artificial Sequence
  Description of Artificial Sequence: Synthetic oligonucleotide
ccuuggcuauacauguguu

SEQ ID NO: 1047932 - RNA, 19 nt, Artificial Sequence
  Description of Artificial Sequence: Synthetic oligonucleotide
ggagcucaauguccauauu

SEQ ID NO: 1047933 - RNA, 19 nt, Artificial Sequence
  Description of Artificial Sequence: Synthetic oligonucleotide
gcgccagcgaggccgggcu

SEQ ID NO: 1047934 - RNA, 19 nt, Artificial Sequence
  Description of Artificial Sequence: Synthetic oligonucleotide
gccccucaaucucaauguu

SEQ ID NO: 1047935 - RNA, 19 nt, Artificial Sequence
  Description of Artificial Sequence: Synthetic oligonucleotide
gccagcgaggccgggcucu

SEQ ID NO: 1047936 - RNA, 19 nt, Artificial Sequence
  Description of Artificial Sequence: Synthetic oligonucleotide
ggccgggcccugacauuaa

SEQ ID NO: 1047937 - RNA, 19 nt, Artificial Sequence
  Description of Artificial Sequence: Synthetic oligonucleotide
cggcaaccguggcaauaga

SEQ ID NO: 1047938 - RNA, 19 nt, Artificial Sequence
  Description of Artificial Sequence: Synthetic oligonucleotide
ccguggcaauagaguccca

SEQ ID NO: 1047939 - RNA, 19 nt, Artificial Sequence
  Description of Artificial Sequence: Synthetic oligonucleotide
cgccagcgaggccgggcuc

SEQ ID NO: 1047940 - RNA, 19 nt, Artificial Sequence
  Description of Artificial Sequence: Synthetic oligonucleotide
gccgggcucuagggcgcca

SEQ ID NO: 1047941 - RNA, 19 nt, Artificial Sequence
  Description of Artificial Sequence: Synthetic oligonucleotide
cgacggcaaccguggcaau

SEQ ID NO: 1047942 - RNA, 19 nt, Artificial Sequence
  Description of Artificial Sequence: Synthetic oligonucleotide
cgggccgggcccugacauu

SEQ ID NO: 1047943 - RNA, 19 nt, Artificial Sequence
  Description of Artificial Sequence: Synthetic oligonucleotide
aauugauuaggcuaggucu

SEQ ID NO: 1047944 - RNA, 19 nt, Artificial Sequence
  Description of Artificial Sequence: Synthetic oligonucleotide
uguucuacauggaagaggg

SEQ ID NO: 1047945 - RNA, 19 nt, Artificial Sequence
  Description of Artificial Sequence: Synthetic oligonucleotide
aaguuuuccaugucuaguc

SEQ ID NO: 1047946 - RNA, 19 nt, Artificial Sequence
  Description of Artificial Sequence: Synthetic oligonucleotide
aauaccuagacauguguug

SEQ ID NO: 1047947 - RNA, 19 nt, Artificial Sequence
  Description of Artificial Sequence: Synthetic oligonucleotide
uuguugaccaagaugaggc

SEQ ID NO: 1047948 - RNA, 19 nt, Artificial Sequence
  Description of Artificial Sequence: Synthetic oligonucleotide
gauacuagcauccaucuca

SEQ ID NO: 1047949 - RNA, 19 nt, Artificial Sequence
  Description of Artificial Sequence: Synthetic oligonucleotide
aacauuuugagcaucaccu

SEQ ID NO: 1047950 - RNA, 19 nt, Artificial Sequence
  Description of Artificial Sequence: Synthetic oligonucleotide
ucagaaugaacucuguaac

SEQ ID NO: 1047951 - RNA, 19 nt, Artificial Sequence
  Description of Artificial Sequence: Synthetic oligonucleotide
ugugaucaaaaucuagcag

SEQ ID NO: 1047952 - RNA, 19 nt, Artificial Sequence
  Description of Artificial Sequence: Synthetic oligonucleotide
cucuguaacauuuugagca

SEQ ID NO: 1047953 - RNA, 19 nt, Artificial Sequence
  Description of Artificial Sequence: Synthetic oligonucleotide
uucuacaggaaucuguggc

SEQ ID NO: 1047954 - RNA, 19 nt, Artificial Sequence
  Description of Artificial Sequence: Synthetic oligonucleotide
acgagauucacgucgacgg

SEQ ID NO: 1047955 - RNA, 19 nt, Artificial Sequence
  Description of Artificial Sequence: Synthetic oligonucleotide
aauucaaugccaacucagc

SEQ ID NO: 1047956 - RNA, 19 nt, Artificial Sequence
  Description of Artificial Sequence: Synthetic oligonucleotide
aagccgugcaaguuuaacg

SEQ ID NO: 1047957 - RNA, 19 nt, Artificial Sequence
  Description of Artificial Sequence: Synthetic oligonucleotide
gaacguucgauucagugug

SEQ ID NO: 1047958 - RNA, 19 nt, Artificial Sequence
  Description of Artificial Sequence: Synthetic oligonucleotide
uguaauucaaugccaacuc

SEQ ID NO: 1047959 - RNA, 19 nt, Artificial Sequence
  Description of Artificial Sequence: Synthetic oligonucleotide
agcgagacucuucaaauac

SEQ ID NO: 1047960 - RNA, 19 nt, Artificial Sequence
  Description of Artificial Sequence: Synthetic oligonucleotide
ugaaacggcuccaagguca

SEQ ID NO: 1047961 - RNA, 19 nt, Artificial Sequence
  Description of Artificial Sequence: Synthetic oligonucleotide
augcucgcuaccuugaacg

SEQ ID NO: 1047962 - RNA, 19 nt, Artificial Sequence
  Description of Artificial Sequence: Synthetic oligonucleotide
caugugaagacaacagggg

SEQ ID NO: 1047963 - RNA, 19 nt, Artificial Sequence
  Description of Artificial Sequence: Synthetic oligonucleotide
acucuguaacauuuugagc

SEQ ID NO: 1047964 - RNA, 19 nt, Artificial Sequence
  Description of Artificial Sequence: Synthetic oligonucleotide
ucguuuuccaggauaacca

SEQ ID NO: 1047965 - RNA, 19 nt, Artificial Sequence
  Description of Artificial Sequence: Synthetic oligonucleotide
ucggcugagauguugcugg

SEQ ID NO: 1047966 - RNA, 19 nt, Artificial Sequence
  Description of Artificial Sequence: Synthetic oligonucleotide
aaaggucaugagcccaagc

SEQ ID NO: 1047967 - RNA, 19 nt, Artificial Sequence
  Description of Artificial Sequence: Synthetic oligonucleotide
aaggugagucuccaacucg

SEQ ID NO: 1047968 - RNA, 19 nt, Artificial Sequence
  Description of Artificial Sequence: Synthetic oligonucleotide
agccgugcaaguuuaacgg

SEQ ID NO: 1047969 - RNA, 19 nt, Artificial Sequence
  Description of Artificial Sequence: Synthetic oligonucleotide
aauugcuguucucccaguc

SEQ ID NO: 1047970 - RNA, 19 nt, Artificial Sequence
  Description of Artificial Sequence: Synthetic oligonucleotide
ugucuagucuaauugauua

SEQ ID NO: 1047971 - RNA, 19 nt, Artificial Sequence
  Description of Artificial Sequence: Synthetic oligonucleotide
cucaaccaaacauucauug

SEQ ID NO: 1047972 - RNA, 19 nt, Artificial Sequence
  Description of Artificial Sequence: Synthetic oligonucleotide
uaauugauuaggcuagguc

SEQ ID NO: 1047973 - RNA, 19 nt, Artificial Sequence
  Description of Artificial Sequence: Synthetic oligonucleotide
ugcauugaacuccgggucg

SEQ ID NO: 1047974 - RNA, 19 nt, Artificial Sequence
  Description of Artificial Sequence: Synthetic oligonucleotide
agucuaauugauuaggcua

SEQ ID NO: 1047975 - RNA, 19 nt, Artificial Sequence
  Description of Artificial Sequence: Synthetic oligonucleotide
aguaucaccucuccagccg

SEQ ID NO: 1047976 - RNA, 19 nt, Artificial Sequence
  Description of Artificial Sequence: Synthetic oligonucleotide
uuuaacgggauuuucgaua

SEQ ID NO: 1047977 - RNA, 19 nt, Artificial Sequence
  Description of Artificial Sequence: Synthetic oligonucleotide
aaaucuagcagcucccuua

SEQ ID NO: 1047978 - RNA, 19 nt, Artificial Sequence
  Description of Artificial Sequence: Synthetic oligonucleotide
uuuucgauacagcgcacag

SEQ ID NO: 1047979 - RNA, 19 nt, Artificial Sequence
  Description of Artificial Sequence: Synthetic oligonucleotide
caugauacuagcauccauc

SEQ ID NO: 1047980 - RNA, 19 nt, Artificial Sequence
  Description of Artificial Sequence: Synthetic oligonucleotide
cucucaucgcuccagaacc

SEQ ID NO: 1047981 - RNA, 19 nt, Artificial Sequence
  Description of Artificial Sequence: Synthetic oligonucleotide
aacgggauuuucgauacag

SEQ ID NO: 1047982 - RNA, 19 nt, Artificial Sequence
  Description of Artificial Sequence: Synthetic oligonucleotide
ucggccaaccauuuuauug

SEQ ID NO: 1047983 - RNA, 19 nt, Artificial Sequence
  Description of Artificial Sequence: Synthetic oligonucleotide
gacuuauugacuaaggcaa

SEQ ID NO: 1047984 - RNA, 19 nt, Artificial Sequence
  Description of Artificial Sequence: Synthetic oligonucleotide
uugaacguucgauucagug

SEQ ID NO: 1047985 - RNA, 19 nt, Artificial Sequence
  Description of Artificial Sequence: Synthetic oligonucleotide
ugaacguucgauucagugu

SEQ ID NO: 1047986 - RNA, 19 nt, Artificial Sequence
  Description of Artificial Sequence: Synthetic oligonucleotide
ucauguaauucaaugccaa

SEQ ID NO: 1047987 - RNA, 19 nt, Artificial Sequence
  Description of Artificial Sequence: Synthetic oligonucleotide
aguuuaacgggauuuucga

SEQ ID NO: 1047988 - RNA, 19 nt, Artificial Sequence
  Description of Artificial Sequence: Synthetic oligonucleotide
uuguucuacauggaagagg

SEQ ID NO: 1047989 - RNA, 19 nt, Artificial Sequence
  Description of Artificial Sequence: Synthetic oligonucleotide
cuaaggcaacaaaaggagg

SEQ ID NO: 1047990 - RNA, 19 nt, Artificial Sequence
  Description of Artificial Sequence: Synthetic oligonucleotide
ucaguaucaccucuccagc

SEQ ID NO: 1047991 - RNA, 19 nt, Artificial Sequence
  Description of Artificial Sequence: Synthetic oligonucleotide
ugugcaauggagacuggga

SEQ ID NO: 1047992 - RNA, 19 nt, Artificial Sequence
  Description of Artificial Sequence: Synthetic oligonucleotide
auaccuagacauguguugg

SEQ ID NO: 1047993 - RNA, 19 nt, Artificial Sequence
  Description of Artificial Sequence: Synthetic oligonucleotide
gucuaauugauuaggcuag

SEQ ID NO: 1047994 - RNA, 19 nt, Artificial Sequence
  Description of Artificial Sequence: Synthetic oligonucleotide
ugaggugucuuuuccauaa

SEQ ID NO: 1047995 - RNA, 19 nt, Artificial Sequence
  Description of Artificial Sequence: Synthetic oligonucleotide
agauucacuuucaggauac

SEQ ID NO: 1047996 - RNA, 19 nt, Artificial Sequence
  Description of Artificial Sequence: Synthetic oligonucleotide
auugauuaggcuaggucuc

SEQ ID NO: 1047997 - RNA, 19 nt, Artificial Sequence
  Description of Artificial Sequence: Synthetic oligonucleotide
augauacuagcauccaucu

SEQ ID NO: 1047998 - RNA, 19 nt, Artificial Sequence
  Description of Artificial Sequence: Synthetic oligonucleotide
cuuauagccugugcaaugg

SEQ ID NO: 1047999 - RNA, 19 nt, Artificial Sequence
  Description of Artificial Sequence: Synthetic oligonucleotide
caccacgagauucacgucg

SEQ ID NO: 1048000 - RNA, 19 nt, Artificial Sequence
  Description of Artificial Sequence: Synthetic oligonucleotide
cugcaaauuucucugcacc

SEQ ID NO: 1048001 - RNA, 19 nt, Artificial Sequence
  Description of Artificial Sequence: Synthetic oligonucleotide
uagucuaauugauuaggcu

SEQ ID NO: 1048002 - RNA, 19 nt, Artificial Sequence
  Description of Artificial Sequence: Synthetic oligonucleotide
auguaauucaaugccaacu

SEQ ID NO: 1048003 - RNA, 19 nt, Artificial Sequence
  Description of Artificial Sequence: Synthetic oligonucleotide
acugcguaaguuuuccaug

SEQ ID NO: 1048004 - RNA, 19 nt, Artificial Sequence
  Description of Artificial Sequence: Synthetic oligonucleotide
auugacuuauugacuaagg

SEQ ID NO: 1048005 - RNA, 19 nt, Artificial Sequence
  Description of Artificial Sequence: Synthetic oligonucleotide
aacucggccaaccauuuua

SEQ ID NO: 1048006 - RNA, 19 nt, Artificial Sequence
  Description of Artificial Sequence: Synthetic oligonucleotide
aacccucaaccaaacauuc

SEQ ID NO: 1048007 - RNA, 19 nt, Artificial Sequence
  Description of Artificial Sequence: Synthetic oligonucleotide
uuuccccucacugaugaag

SEQ ID NO: 1048008 - RNA, 19 nt, Artificial Sequence
  Description of Artificial Sequence: Synthetic oligonucleotide
uauugacuaaggcaacaaa

SEQ ID NO: 1048009 - RNA, 19 nt, Artificial Sequence
  Description of Artificial Sequence: Synthetic oligonucleotide
acaggcaucucucaucgcu

SEQ ID NO: 1048010 - RNA, 19 nt, Artificial Sequence
  Description of Artificial Sequence: Synthetic oligonucleotide
agugagucaguaucaccuc

SEQ ID NO: 1048011 - RNA, 19 nt, Artificial Sequence
  Description of Artificial Sequence: Synthetic oligonucleotide
auugacuaaggcaacaaaa

SEQ ID NO: 1048012 - RNA, 19 nt, Artificial Sequence
  Description of Artificial Sequence: Synthetic oligonucleotide
uccauaacaagccgugcaa

SEQ ID NO: 1048013 - RNA, 19 nt, Artificial Sequence
  Description of Artificial Sequence: Synthetic oligonucleotide
ucuccgguuuuguugacca

SEQ ID NO: 1048014 - RNA, 19 nt, Artificial Sequence
  Description of Artificial Sequence: Synthetic oligonucleotide
ucuaauugauuaggcuagg

SEQ ID NO: 1048015 - RNA, 19 nt, Artificial Sequence
  Description of Artificial Sequence: Synthetic oligonucleotide
gccagauucacuuucagga

SEQ ID NO: 1048016 - RNA, 19 nt, Artificial Sequence
  Description of Artificial Sequence: Synthetic oligonucleotide
gauucagugugugugggac

SEQ ID NO: 1048017 - RNA, 19 nt, Artificial Sequence
  Description of Artificial Sequence: Synthetic oligonucleotide
cugcguaaccuccagcucc

SEQ ID NO: 1048018 - RNA, 19 nt, Artificial Sequence
  Description of Artificial Sequence: Synthetic oligonucleotide
gauaaccacggcuccuucc

SEQ ID NO: 1048019 - RNA, 19 nt, Artificial Sequence
  Description of Artificial Sequence: Synthetic oligonucleotide
ggcauuaccagcccagagg

SEQ ID NO: 1048020 - RNA, 19 nt, Artificial Sequence
  Description of Artificial Sequence: Synthetic oligonucleotide
gaaagauccguuuccccuc

SEQ ID NO: 1048021 - RNA, 19 nt, Artificial Sequence
  Description of Artificial Sequence: Synthetic oligonucleotide
aaucuagcagcucccuuau

SEQ ID NO: 1048022 - RNA, 19 nt, Artificial Sequence
  Description of Artificial Sequence: Synthetic oligonucleotide
ucaccucgaggcuagcaag

SEQ ID NO: 1048023 - RNA, 19 nt, Artificial Sequence
  Description of Artificial Sequence: Synthetic oligonucleotide
gucguuuuccaggauaacc

SEQ ID NO: 1048024 - RNA, 19 nt, Artificial Sequence
  Description of Artificial Sequence: Synthetic oligonucleotide
aaagauccguuuccccuca

SEQ ID NO: 1048025 - RNA, 19 nt, Artificial Sequence
  Description of Artificial Sequence: Synthetic oligonucleotide
caguccacaaggcauuacc

SEQ ID NO: 1048026 - RNA, 19 nt, Artificial Sequence
  Description of Artificial Sequence: Synthetic oligonucleotide
agacaccuuucuucagacc

SEQ ID NO: 1048027 - RNA, 19 nt, Artificial Sequence
  Description of Artificial Sequence: Synthetic oligonucleotide
cuagacauguguuggagaa

SEQ ID NO: 1048028 - RNA, 19 nt, Artificial Sequence
  Description of Artificial Sequence: Synthetic oligonucleotide
cugugaucaaaaucuagca

SEQ ID NO: 1048029 - RNA, 19 nt, Artificial Sequence
  Description of Artificial Sequence: Synthetic oligonucleotide
uucaccucgaggcuagcaa

SEQ ID NO: 1048030 - RNA, 19 nt, Artificial Sequence
  Description of Artificial Sequence: Synthetic oligonucleotide
ucuguaacauuuugagcau

SEQ ID NO: 1048031 - RNA, 19 nt, Artificial Sequence
  Description of Artificial Sequence: Synthetic oligonucleotide
cugugguugaaacggcucc

SEQ ID NO: 1048032 - RNA, 19 nt, Artificial Sequence
  Description of Artificial Sequence: Synthetic oligonucleotide
aaaaucuagcagcucccuu

SEQ ID NO: 1048033 - RNA, 19 nt, Artificial Sequence
  Description of Artificial Sequence: Synthetic oligonucleotide
cucgcuaccuugaacguuc

SEQ ID NO: 1048034 - RNA, 19 nt, Artificial Sequence
  Description of Artificial Sequence: Synthetic oligonucleotide
ucgcauaagccaaguuucc

SEQ ID NO: 1048035 - RNA, 19 nt, Artificial Sequence
  Description of Artificial Sequence: Synthetic oligonucleotide
uuauugacuaaggcaacaa

SEQ ID NO: 1048036 - RNA, 19 nt, Artificial Sequence
  Description of Artificial Sequence: Synthetic oligonucleotide
uuccggucggcugagaugu

SEQ ID NO: 1048037 - RNA, 19 nt, Artificial Sequence
  Description of Artificial Sequence: Synthetic oligonucleotide
auuaggcuaggucuccaca

SEQ ID NO: 1048038 - RNA, 19 nt, Artificial Sequence
  Description of Artificial Sequence: Synthetic oligonucleotide
uucucucagacaccuuucu

SEQ ID NO: 1048039 - RNA, 19 nt, Artificial Sequence
  Description of Artificial Sequence: Synthetic oligonucleotide
acuuauugacuaaggcaac

SEQ ID NO: 1048040 - RNA, 19 nt, Artificial Sequence
  Description of Artificial Sequence: Synthetic oligonucleotide
gcauuaccagcccagaggc

SEQ ID NO: 1048041 - RNA, 19 nt, Artificial Sequence
  Description of Artificial Sequence: Synthetic oligonucleotide
cuaugcaaggugagucucc

SEQ ID NO: 1048042 - RNA, 19 nt, Artificial Sequence
  Description of Artificial Sequence: Synthetic oligonucleotide
uccuaugcaaggugagucu

SEQ ID NO: 1048043 - RNA, 19 nt, Artificial Sequence
  Description of Artificial Sequence: Synthetic oligonucleotide
aucaacggcgcucccuccg

SEQ ID NO: 1048044 - RNA, 19 nt, Artificial Sequence
  Description of Artificial Sequence: Synthetic oligonucleotide
aaauaccuagacauguguu

SEQ ID NO: 1048045 - RNA, 19 nt, Artificial Sequence
  Description of Artificial Sequence: Synthetic oligonucleotide
gucgcauaagccaaguuuc

SEQ ID NO: 1048046 - RNA, 19 nt, Artificial Sequence
  Description of Artificial Sequence: Synthetic oligonucleotide
uccaacucggccaaccauu

SEQ ID NO: 1048047 - RNA, 19 nt, Artificial Sequence
  Description of Artificial Sequence: Synthetic oligonucleotide
uuuagggcagucagguuuu

SEQ ID NO: 1048048 - RNA, 19 nt, Artificial Sequence
  Description of Artificial Sequence: Synthetic oligonucleotide
guugaaacggcuccaaggu

SEQ ID NO: 1048049 - RNA, 19 nt, Artificial Sequence
  Description of Artificial Sequence: Synthetic oligonucleotide
aggacagacccacaaccug

SEQ ID NO: 1048050 - RNA, 19 nt, Artificial Sequence
  Description of Artificial Sequence: Synthetic oligonucleotide
uuauagccugugcaaugga

SEQ ID NO: 1048051 - RNA, 19 nt, Artificial Sequence
  Description of Artificial Sequence: Synthetic oligonucleotide
auggacuaccaccacgaga

SEQ ID NO: 1048052 - RNA, 19 nt, Artificial Sequence
  Description of Artificial Sequence: Synthetic oligonucleotide
acauggaagagggccaguc

SEQ ID NO: 1048053 - RNA, 19 nt, Artificial Sequence
  Description of Artificial Sequence: Synthetic oligonucleotide
ucaacggcgcucccuccgg

SEQ ID NO: 1048054 - RNA, 19 nt, Artificial Sequence
  Description of Artificial Sequence: Synthetic oligonucleotide
ucccuuauagccugugcaa

SEQ ID NO: 1048055 - RNA, 19 nt, Artificial Sequence
  Description of Artificial Sequence: Synthetic oligonucleotide
cacugaugaagauccuccc

SEQ ID NO: 1048056 - RNA, 19 nt, Artificial Sequence
  Description of Artificial Sequence: Synthetic oligonucleotide
ucugcgucaugcucgcuac

SEQ ID NO: 1048057 - RNA, 19 nt, Artificial Sequence
  Description of Artificial Sequence: Synthetic oligonucleotide
uaugcaaggugagucucca

SEQ ID NO: 1048058 - RNA, 19 nt, Artificial Sequence
  Description of Artificial Sequence: Synthetic oligonucleotide
uucaggauacuuucuccau

SEQ ID NO: 1048059 - RNA, 19 nt, Artificial Sequence
  Description of Artificial Sequence: Synthetic oligonucleotide
caguaucaccucuccagcc

SEQ ID NO: 1048060 - RNA, 19 nt, Artificial Sequence
  Description of Artificial Sequence: Synthetic oligonucleotide
ucaaugccggccugcagcu

SEQ ID NO: 1048061 - RNA, 19 nt, Artificial Sequence
  Description of Artificial Sequence: Synthetic oligonucleotide
uccgccaccauggacuacc

SEQ ID NO: 1048062 - RNA, 19 nt, Artificial Sequence
  Description of Artificial Sequence: Synthetic oligonucleotide
gauuaggcuaggucuccac

SEQ ID NO: 1048063 - RNA, 19 nt, Artificial Sequence
  Description of Artificial Sequence: Synthetic oligonucleotide
uucacgucgacggagccuc

SEQ ID NO: 1048064 - RNA, 19 nt, Artificial Sequence
  Description of Artificial Sequence: Synthetic oligonucleotide
gagaagugugagcuuucug

SEQ ID NO: 1048065 - RNA, 19 nt, Artificial Sequence
  Description of Artificial Sequence: Synthetic oligonucleotide
cacgagauucacgucgacg

SEQ ID NO: 1048066 - RNA, 19 nt, Artificial Sequence
  Description of Artificial Sequence: Synthetic oligonucleotide
uuuccauaacaagccgugc

SEQ ID NO: 1048067 - RNA, 19 nt, Artificial Sequence
  Description of Artificial Sequence: Synthetic oligonucleotide
uugaaacggcuccaagguc

SEQ ID NO: 1048068 - RNA, 19 nt, Artificial Sequence
  Description of Artificial Sequence: Synthetic oligonucleotide
cauucugcgucaugcucgc

SEQ ID NO: 1048069 - RNA, 19 nt, Artificial Sequence
  Description of Artificial Sequence: Synthetic oligonucleotide
cagaaugaacucuguaaca

SEQ ID NO: 1048070 - RNA, 19 nt, Artificial Sequence
  Description of Artificial Sequence: Synthetic oligonucleotide
uucugcgucaugcucgcua

SEQ ID NO: 1048071 - RNA, 19 nt, Artificial Sequence
  Description of Artificial Sequence: Synthetic oligonucleotide
cuuugcuacccagucuccg

SEQ ID NO: 1048072 - RNA, 19 nt, Artificial Sequence
  Description of Artificial Sequence: Synthetic oligonucleotide
gauucacgucgacggagcc

SEQ ID NO: 1048073 - RNA, 19 nt, Artificial Sequence
  Description of Artificial Sequence: Synthetic oligonucleotide
ugauacuagcauccaucuc

SEQ ID NO: 1048074 - RNA, 19 nt, Artificial Sequence
  Description of Artificial Sequence: Synthetic oligonucleotide
caucuacagucuuuccuug

SEQ ID NO: 1048075 - RNA, 19 nt, Artificial Sequence
  Description of Artificial Sequence: Synthetic oligonucleotide
cuuguucuacauggaagag

SEQ ID NO: 1048076 - RNA, 19 nt, Artificial Sequence
  Description of Artificial Sequence: Synthetic oligonucleotide
uggaaaggucaugagccca

SEQ ID NO: 1048077 - RNA, 19 nt, Artificial Sequence
  Description of Artificial Sequence: Synthetic oligonucleotide
auuuucgauacagcgcaca

SEQ ID NO: 1048078 - RNA, 19 nt, Artificial Sequence
  Description of Artificial Sequence: Synthetic oligonucleotide
gcauucugcgucaugcucg

SEQ ID NO: 1048079 - RNA, 19 nt, Artificial Sequence
  Description of Artificial Sequence: Synthetic oligonucleotide
aggcauuaccagcccagag

SEQ ID NO: 1048080 - RNA, 19 nt, Artificial Sequence
  Description of Artificial Sequence: Synthetic oligonucleotide
aggauacuuucuccauguc

SEQ ID NO: 1048081 - RNA, 19 nt, Artificial Sequence
  Description of Artificial Sequence: Synthetic oligonucleotide
accuugaacguucgauuca

SEQ ID NO: 1048082 - RNA, 19 nt, Artificial Sequence
  Description of Artificial Sequence: Synthetic oligonucleotide
aagauccguuuccccucac

SEQ ID NO: 1048083 - RNA, 19 nt, Artificial Sequence
  Description of Artificial Sequence: Synthetic oligonucleotide
ugugguugaaacggcucca

SEQ ID NO: 1048084 - RNA, 19 nt, Artificial Sequence
  Description of Artificial Sequence: Synthetic oligonucleotide
ugcguaaccuccagcuccu

SEQ ID NO: 1048085 - RNA, 19 nt, Artificial Sequence
  Description of Artificial Sequence: Synthetic oligonucleotide
cagacugcguaaguuuucc

SEQ ID NO: 1048086 - RNA, 19 nt, Artificial Sequence
  Description of Artificial Sequence: Synthetic oligonucleotide
acgggauuuucgauacagc

SEQ ID NO: 1048087 - RNA, 19 nt, Artificial Sequence
  Description of Artificial Sequence: Synthetic oligonucleotide
cucgaggcuagcaagaggu

SEQ ID NO: 1048088 - RNA, 19 nt, Artificial Sequence
  Description of Artificial Sequence: Synthetic oligonucleotide
ucugcguaaccuccagcuc

SEQ ID NO: 1048089 - RNA, 19 nt, Artificial Sequence
  Description of Artificial Sequence: Synthetic oligonucleotide
caugaccucgcgcacccgc

SEQ ID NO: 1048090 - RNA, 19 nt, Artificial Sequence
  Description of Artificial Sequence: Synthetic oligonucleotide
cacaaagaucaaugccggc

SEQ ID NO: 1048091 - RNA, 19 nt, Artificial Sequence
  Description of Artificial Sequence: Synthetic oligonucleotide
aagcccaugugaagacaac

SEQ ID NO: 1048092 - RNA, 19 nt, Artificial Sequence
  Description of Artificial Sequence: Synthetic oligonucleotide
uccgggucguuuuccagga

SEQ ID NO: 1048093 - RNA, 19 nt, Artificial Sequence
  Description of Artificial Sequence: Synthetic oligonucleotide
cugugcaauggagacuggg

SEQ ID NO: 1048094 - RNA, 19 nt, Artificial Sequence
  Description of Artificial Sequence: Synthetic oligonucleotide
cucccuuauagccugugca

SEQ ID NO: 1048095 - RNA, 19 nt, Artificial Sequence
  Description of Artificial Sequence: Synthetic oligonucleotide
uugcuacccagucuccggu

SEQ ID NO: 1048096 - RNA, 19 nt, Artificial Sequence
  Description of Artificial Sequence: Synthetic oligonucleotide
uaccuagacauguguugga

SEQ ID NO: 1048097 - RNA, 19 nt, Artificial Sequence
  Description of Artificial Sequence: Synthetic oligonucleotide
ugaacuccgggucguuuuc

SEQ ID NO: 1048098 - RNA, 19 nt, Artificial Sequence
  Description of Artificial Sequence: Synthetic oligonucleotide
ccuaaccucugcaaauugc

SEQ ID NO: 1048099 - RNA, 19 nt, Artificial Sequence
  Description of Artificial Sequence: Synthetic oligonucleotide
ccaaccauuuuauugacaa

SEQ ID NO: 1048100 - RNA, 19 nt, Artificial Sequence
  Description of Artificial Sequence: Synthetic oligonucleotide
uugaacuccgggucguuuu

SEQ ID NO: 1048101 - RNA, 19 nt, Artificial Sequence
  Description of Artificial Sequence: Synthetic oligonucleotide
gggauuuucgauacagcgc

SEQ ID NO: 1048102 - RNA, 19 nt, Artificial Sequence
  Description of Artificial Sequence: Synthetic oligonucleotide
cagacacgucauuuccagg

SEQ ID NO: 1048103 - RNA, 19 nt, Artificial Sequence
  Description of Artificial Sequence: Synthetic oligonucleotide
auucagugugugugggacu

SEQ ID NO: 1048104 - RNA, 19 nt, Artificial Sequence
  Description of Artificial Sequence: Synthetic oligonucleotide
gcuaggucuccacaccagg

SEQ ID NO: 1048105 - RNA, 19 nt, Artificial Sequence
  Description of Artificial Sequence: Synthetic oligonucleotide
ugcgucaugcucgcuaccu

SEQ ID NO: 1048106 - RNA, 19 nt, Artificial Sequence
  Description of Artificial Sequence: Synthetic oligonucleotide
guagagguccacuuugcua

SEQ ID NO: 1048107 - RNA, 19 nt, Artificial Sequence
  Description of Artificial Sequence: Synthetic oligonucleotide
ggagccugcauucugcguc

SEQ ID NO: 1048108 - RNA, 19 nt, Artificial Sequence
  Description of Artificial Sequence: Synthetic oligonucleotide
ccaagaugaggccaccuag

SEQ ID NO: 1048109 - RNA, 19 nt, Artificial Sequence
  Description of Artificial Sequence: Synthetic oligonucleotide
ucgcuaccuugaacguucg

SEQ ID NO: 1048110 - RNA, 19 nt, Artificial Sequence
  Description of Artificial Sequence: Synthetic oligonucleotide
ugguuucacaaagaucaau

SEQ ID NO: 1048111 - RNA, 19 nt, Artificial Sequence
  Description of Artificial Sequence: Synthetic oligonucleotide
caugcucgcuaccuugaac

SEQ ID NO: 1048112 - RNA, 19 nt, Artificial Sequence
  Description of Artificial Sequence: Synthetic oligonucleotide
guccaaggcaacagcaccc

SEQ ID NO: 1048113 - RNA, 19 nt, Artificial Sequence
  Description of Artificial Sequence: Synthetic oligonucleotide
ucucucagacaccuuucuu

SEQ ID NO: 1048114 - RNA, 19 nt, Artificial Sequence
  Description of Artificial Sequence: Synthetic oligonucleotide
acagacugcguaaguuuuc

SEQ ID NO: 1048115 - RNA, 19 nt, Artificial Sequence
  Description of Artificial Sequence: Synthetic oligonucleotide
gaaaggucaugagcccaag

SEQ ID NO: 1048116 - RNA, 19 nt, Artificial Sequence
  Description of Artificial Sequence: Synthetic oligonucleotide
aggcuaggucuccacacca

SEQ ID NO: 1048117 - RNA, 19 nt, Artificial Sequence
  Description of Artificial Sequence: Synthetic oligonucleotide
caucgcuccagaacccaac

SEQ ID NO: 1048118 - RNA, 19 nt, Artificial Sequence
  Description of Artificial Sequence: Synthetic oligonucleotide
cagucuccgguuuuguuga

SEQ ID NO: 1048119 - RNA, 19 nt, Artificial Sequence
  Description of Artificial Sequence: Synthetic oligonucleotide
aacaagccgugcaaguuua

SEQ ID NO: 1048120 - RNA, 19 nt, Artificial Sequence
  Description of Artificial Sequence: Synthetic oligonucleotide
ggugacggcaggugcacag

SEQ ID NO: 1048121 - RNA, 19 nt, Artificial Sequence
  Description of Artificial Sequence: Synthetic oligonucleotide
gagggacagacugcguaag

SEQ ID NO: 1048122 - RNA, 19 nt, Artificial Sequence
  Description of Artificial Sequence: Synthetic oligonucleotide
ucaucgcuccagaacccaa

SEQ ID NO: 1048123 - RNA, 19 nt, Artificial Sequence
  Description of Artificial Sequence: Synthetic oligonucleotide
gacugcguaaguuuuccau

SEQ ID NO: 1048124 - RNA, 19 nt, Artificial Sequence
  Description of Artificial Sequence: Synthetic oligonucleotide
agauccguuuccccucacu

SEQ ID NO: 1048125 - RNA, 19 nt, Artificial Sequence
  Description of Artificial Sequence: Synthetic oligonucleotide
acgucgacggagccucggg

SEQ ID NO: 1048126 - RNA, 19 nt, Artificial Sequence
  Description of Artificial Sequence: Synthetic oligonucleotide
cuucccauccaugauacua

SEQ ID NO: 1048127 - RNA, 19 nt, Artificial Sequence
  Description of Artificial Sequence: Synthetic oligonucleotide
ugauuaggcuaggucucca

SEQ ID NO: 1048128 - RNA, 19 nt, Artificial Sequence
  Description of Artificial Sequence: Synthetic oligonucleotide
ggaaagauccguuuccccu

SEQ ID NO: 1048129 - RNA, 19 nt, Artificial Sequence
  Description of Artificial Sequence: Synthetic oligonucleotide
gccugugcaauggagacug

SEQ ID NO: 1048130 - RNA, 19 nt, Artificial Sequence
  Description of Artificial Sequence: Synthetic oligonucleotide
ugcucgcuaccuugaacgu

SEQ ID NO: 1048131 - RNA, 19 nt, Artificial Sequence
  Description of Artificial Sequence: Synthetic oligonucleotide
ggccagucuggccagauuc

SEQ ID NO: 1048132 - RNA, 19 nt, Artificial Sequence
  Description of Artificial Sequence: Synthetic oligonucleotide
ucccaguccacaaggcauu

SEQ ID NO: 1048133 - RNA, 19 nt, Artificial Sequence
  Description of Artificial Sequence: Synthetic oligonucleotide
cacagcaucaacggcgcuc

SEQ ID NO: 1048134 - RNA, 19 nt, Artificial Sequence
  Description of Artificial Sequence: Synthetic oligonucleotide
ccuuauagccugugcaaug

SEQ ID NO: 1048135 - RNA, 19 nt, Artificial Sequence
  Description of Artificial Sequence: Synthetic oligonucleotide
cauggacuaccaccacgag

SEQ ID NO: 1048136 - RNA, 19 nt, Artificial Sequence
  Description of Artificial Sequence: Synthetic oligonucleotide
agucuccgguuuuguugac

SEQ ID NO: 1048137 - RNA, 19 nt, Artificial Sequence
  Description of Artificial Sequence: Synthetic oligonucleotide
gccgugcaaguuuaacggg

SEQ ID NO: 1048138 - RNA, 19 nt, Artificial Sequence
  Description of Artificial Sequence: Synthetic oligonucleotide
agggugacggcaggugcac

SEQ ID NO: 1048139 - RNA, 19 nt, Artificial Sequence
  Description of Artificial Sequence: Synthetic oligonucleotide
caagccgugcaaguuuaac

SEQ ID NO: 1048140 - RNA, 19 nt, Artificial Sequence
  Description of Artificial Sequence: Synthetic oligonucleotide
caugucuagucuaauugau

SEQ ID NO: 1048141 - RNA, 19 nt, Artificial Sequence
  Description of Artificial Sequence: Synthetic oligonucleotide
ggugucuuuuccauaacaa

SEQ ID NO: 1048142 - RNA, 19 nt, Artificial Sequence
  Description of Artificial Sequence: Synthetic oligonucleotide
agggacagacugcguaagu

SEQ ID NO: 1048143 - RNA, 19 nt, Artificial Sequence
  Description of Artificial Sequence: Synthetic oligonucleotide
agacugcguaaguuuucca

SEQ ID NO: 1048144 - RNA, 19 nt, Artificial Sequence
  Description of Artificial Sequence: Synthetic oligonucleotide
cagccgucugccaacccac

SEQ ID NO: 1048145 - RNA, 19 nt, Artificial Sequence
  Description of Artificial Sequence: Synthetic oligonucleotide
gauuuucgauacagcgcac

SEQ ID NO: 1048146 - RNA, 19 nt, Artificial Sequence
  Description of Artificial Sequence: Synthetic oligonucleotide
auugucugcguaaccucca

SEQ ID NO: 1048147 - RNA, 19 nt, Artificial Sequence
  Description of Artificial Sequence: Synthetic oligonucleotide
ucgcgcacccgcucuuucc

SEQ ID NO: 1048148 - RNA, 19 nt, Artificial Sequence
  Description of Artificial Sequence: Synthetic oligonucleotide
gaacuccgggucguuuucc

SEQ ID NO: 1048149 - RNA, 19 nt, Artificial Sequence
  Description of Artificial Sequence: Synthetic oligonucleotide
gagcgagacucuucaaaua

SEQ ID NO: 1048150 - RNA, 19 nt, Artificial Sequence
  Description of Artificial Sequence: Synthetic oligonucleotide
ucgaggcuagcaagagguc

SEQ ID NO: 1048151 - RNA, 19 nt, Artificial Sequence
  Description of Artificial Sequence: Synthetic oligonucleotide
acccacaaccugcauugaa

SEQ ID NO: 1048152 - RNA, 19 nt, Artificial Sequence
  Description of Artificial Sequence: Synthetic oligonucleotide
guggcauccccacgucugc

SEQ ID NO: 1048153 - RNA, 19 nt, Artificial Sequence
  Description of Artificial Sequence: Synthetic oligonucleotide
cuguaacauuuugagcauc

SEQ ID NO: 1048154 - RNA, 19 nt, Artificial Sequence
  Description of Artificial Sequence: Synthetic oligonucleotide
gacagacccacaaccugca

SEQ ID NO: 1048155 - RNA, 19 nt, Artificial Sequence
  Description of Artificial Sequence: Synthetic oligonucleotide
gcccaugugaagacaacag

SEQ ID NO: 1048156 - RNA, 19 nt, Artificial Sequence
  Description of Artificial Sequence: Synthetic oligonucleotide
gcaaauugcuguucuccca

SEQ ID NO: 1048157 - RNA, 19 nt, Artificial Sequence
  Description of Artificial Sequence: Synthetic oligonucleotide
auucacgucgacggagccu

SEQ ID NO: 1048158 - RNA, 19 nt, Artificial Sequence
  Description of Artificial Sequence: Synthetic oligonucleotide
ggucauugucugcguaacc

SEQ ID NO: 1048159 - RNA, 19 nt, Artificial Sequence
  Description of Artificial Sequence: Synthetic oligonucleotide
aacguucgauucagugugu

SEQ ID NO: 1048160 - RNA, 19 nt, Artificial Sequence
  Description of Artificial Sequence: Synthetic oligonucleotide
ccaugucuagucuaauuga

SEQ ID NO: 1048161 - RNA, 19 nt, Artificial Sequence
  Description of Artificial Sequence: Synthetic oligonucleotide
ccuugaacguucgauucag

SEQ ID NO: 1048162 - RNA, 19 nt, Artificial Sequence
  Description of Artificial Sequence: Synthetic oligonucleotide
gucggcugagauguugcug

SEQ ID NO: 1048163 - RNA, 19 nt, Artificial Sequence
  Description of Artificial Sequence: Synthetic oligonucleotide
acguucgauucagugugug

SEQ ID NO: 1048164 - RNA, 19 nt, Artificial Sequence
  Description of Artificial Sequence: Synthetic oligonucleotide
cuggaccugggucuuucuc

SEQ ID NO: 1048165 - RNA, 19 nt, Artificial Sequence
  Description of Artificial Sequence: Synthetic oligonucleotide
ucacgucgacggagccucg

SEQ ID NO: 1048166 - RNA, 19 nt, Artificial Sequence
  Description of Artificial Sequence: Synthetic oligonucleotide
gugacggcaggugcacagg

SEQ ID NO: 1048167 - RNA, 19 nt, Artificial Sequence
  Description of Artificial Sequence: Synthetic oligonucleotide
ugccgcccagggcauggag

SEQ ID NO: 1048168 - RNA, 19 nt, Artificial Sequence
  Description of Artificial Sequence: Synthetic oligonucleotide
augucuagucuaauugauu

SEQ ID NO: 1048169 - RNA, 19 nt, Artificial Sequence
  Description of Artificial Sequence: Synthetic oligonucleotide
ggucgcauaagccaaguuu

SEQ ID NO: 1048170 - RNA, 19 nt, Artificial Sequence
  Description of Artificial Sequence: Synthetic oligonucleotide
ccauggacuaccaccacga

SEQ ID NO: 1048171 - RNA, 19 nt, Artificial Sequence
  Description of Artificial Sequence: Synthetic oligonucleotide
ggucuuaccacaggcaucu

SEQ ID NO: 1048172 - RNA, 19 nt, Artificial Sequence
  Description of Artificial Sequence: Synthetic oligonucleotide
accacgagauucacgucga

SEQ ID NO: 1048173 - RNA, 19 nt, Artificial Sequence
  Description of Artificial Sequence: Synthetic oligonucleotide
gccuaaccucugcaaauug

SEQ ID NO: 1048174 - RNA, 19 nt, Artificial Sequence
  Description of Artificial Sequence: Synthetic oligonucleotide
ugugugggacugucccaaa

SEQ ID NO: 1048175 - RNA, 19 nt, Artificial Sequence
  Description of Artificial Sequence: Synthetic oligonucleotide
ccauaacaagccgugcaag

SEQ ID NO: 1048176 - RNA, 19 nt, Artificial Sequence
  Description of Artificial Sequence: Synthetic oligonucleotide
caccucgaggcuagcaaga

SEQ ID NO: 1048177 - RNA, 19 nt, Artificial Sequence
  Description of Artificial Sequence: Synthetic oligonucleotide
auugaacuccgggucguuu

SEQ ID NO: 1048178 - RNA, 19 nt, Artificial Sequence
  Description of Artificial Sequence: Synthetic oligonucleotide
gggagcgagacucuucaaa

SEQ ID NO: 1048179 - RNA, 19 nt, Artificial Sequence
  Description of Artificial Sequence: Synthetic oligonucleotide
cuggucuuaccacaggcau

SEQ ID NO: 1048180 - RNA, 19 nt, Artificial Sequence
  Description of Artificial Sequence: Synthetic oligonucleotide
ccaagcaagcccaugugaa

SEQ ID NO: 1048181 - RNA, 19 nt, Artificial Sequence
  Description of Artificial Sequence: Synthetic oligonucleotide
ggagcgagacucuucaaau

SEQ ID NO: 1048182 - RNA, 19 nt, Artificial Sequence
  Description of Artificial Sequence: Synthetic oligonucleotide
cugucccaaagcacuggca

SEQ ID NO: 1048183 - RNA, 19 nt, Artificial Sequence
  Description of Artificial Sequence: Synthetic oligonucleotide
uccccucacugaugaagau

SEQ ID NO: 1048184 - RNA, 19 nt, Artificial Sequence
  Description of Artificial Sequence: Synthetic oligonucleotide
cagcuugccauucuucacu

SEQ ID NO: 1048185 - RNA, 19 nt, Artificial Sequence
  Description of Artificial Sequence: Synthetic oligonucleotide
ggagggacagacugcguaa

SEQ ID NO: 1048186 - RNA, 19 nt, Artificial Sequence
  Description of Artificial Sequence: Synthetic oligonucleotide
guccugguuucacaaagau

SEQ ID NO: 1048187 - RNA, 19 nt, Artificial Sequence
  Description of Artificial Sequence: Synthetic oligonucleotide
ccgucugccaacccacugc

SEQ ID NO: 1048188 - RNA, 19 nt, Artificial Sequence
  Description of Artificial Sequence: Synthetic oligonucleotide
uacauggaagagggccagu

SEQ ID NO: 1048189 - RNA, 19 nt, Artificial Sequence
  Description of Artificial Sequence: Synthetic oligonucleotide
cugcacaccuugccaggug

SEQ ID NO: 1048190 - RNA, 19 nt, Artificial Sequence
  Description of Artificial Sequence: Synthetic oligonucleotide
cauucaggacagacccaca

SEQ ID NO: 1048191 - RNA, 19 nt, Artificial Sequence
  Description of Artificial Sequence: Synthetic oligonucleotide
cauuaccagcccagaggca

SEQ ID NO: 1048192 - RNA, 19 nt, Artificial Sequence
  Description of Artificial Sequence: Synthetic oligonucleotide
guaucaccucuccagccgu

SEQ ID NO: 1048193 - RNA, 19 nt, Artificial Sequence
  Description of Artificial Sequence: Synthetic oligonucleotide
gcucccuaaggcuuccauc

SEQ ID NO: 1048194 - RNA, 19 nt, Artificial Sequence
  Description of Artificial Sequence: Synthetic oligonucleotide
aaccugcauugaacuccgg

SEQ ID NO: 1048195 - RNA, 19 nt, Artificial Sequence
  Description of Artificial Sequence: Synthetic oligonucleotide
cuaauugauuaggcuaggu

SEQ ID NO: 1048196 - RNA, 19 nt, Artificial Sequence
  Description of Artificial Sequence: Synthetic oligonucleotide
ugcuacccagucuccgguu

SEQ ID NO: 1048197 - RNA, 19 nt, Artificial Sequence
  Description of Artificial Sequence: Synthetic oligonucleotide
ccucgaggcuagcaagagg

SEQ ID NO: 1048198 - RNA, 19 nt, Artificial Sequence
  Description of Artificial Sequence: Synthetic oligonucleotide
gcguaaguuuuccaugucu

SEQ ID NO: 1048199 - RNA, 19 nt, Artificial Sequence
  Description of Artificial Sequence: Synthetic oligonucleotide
aggucgcauaagccaaguu

SEQ ID NO: 1048200 - RNA, 19 nt, Artificial Sequence
  Description of Artificial Sequence: Synthetic oligonucleotide
cacgucgacggagccucgg

SEQ ID NO: 1048201 - RNA, 19 nt, Artificial Sequence
  Description of Artificial Sequence: Synthetic oligonucleotide
ugggagcgagacucuucaa

SEQ ID NO: 1048202 - RNA, 19 nt, Artificial Sequence
  Description of Artificial Sequence: Synthetic oligonucleotide
gucgacggagccucgggcu

SEQ ID NO: 1048203 - RNA, 19 nt, Artificial Sequence
  Description of Artificial Sequence: Synthetic oligonucleotide
cugccaacccacugcugga

SEQ ID NO: 1048204 - RNA, 19 nt, Artificial Sequence
  Description of Artificial Sequence: Synthetic oligonucleotide
cgucaugcucgcuaccuug

SEQ ID NO: 1048205 - RNA, 19 nt, Artificial Sequence
  Description of Artificial Sequence: Synthetic oligonucleotide
caaggucauugucugcgua

SEQ ID NO: 1048206 - RNA, 19 nt, Artificial Sequence
  Description of Artificial Sequence: Synthetic oligonucleotide
ccgugcaaguuuaacggga

SEQ ID NO: 1048207 - RNA, 19 nt, Artificial Sequence
  Description of Artificial Sequence: Synthetic oligonucleotide
caacggcgcucccuccggc

SEQ ID NO: 1048208 - RNA, 19 nt, Artificial Sequence
  Description of Artificial Sequence: Synthetic oligonucleotide
ccuaugcaaggugagucuc

SEQ ID NO: 1048209 - RNA, 19 nt, Artificial Sequence
  Description of Artificial Sequence: Synthetic oligonucleotide
ccaacccucaaccaaacau

SEQ ID NO: 1048210 - RNA, 19 nt, Artificial Sequence
  Description of Artificial Sequence: Synthetic oligonucleotide
caaaaucuagcagcucccu

SEQ ID NO: 1048211 - RNA, 19 nt, Artificial Sequence
  Description of Artificial Sequence: Synthetic oligonucleotide
ggacagacugcguaaguuu

SEQ ID NO: 1048212 - RNA, 19 nt, Artificial Sequence
  Description of Artificial Sequence: Synthetic oligonucleotide
augaccucgcgcacccgcu

SEQ ID NO: 1048213 - RNA, 19 nt, Artificial Sequence
  Description of Artificial Sequence: Synthetic oligonucleotide
ggauaaccacggcuccuuc

SEQ ID NO: 1048214 - RNA, 19 nt, Artificial Sequence
  Description of Artificial Sequence: Synthetic oligonucleotide
cagccuaaccucugcaaau

SEQ ID NO: 1048215 - RNA, 19 nt, Artificial Sequence
  Description of Artificial Sequence: Synthetic oligonucleotide
gugguugaaacggcuccaa

SEQ ID NO: 1048216 - RNA, 19 nt, Artificial Sequence
  Description of Artificial Sequence: Synthetic oligonucleotide
ccgguuuuguugaccaaga

SEQ ID NO: 1048217 - RNA, 19 nt, Artificial Sequence
  Description of Artificial Sequence: Synthetic oligonucleotide
gccgcccagggcauggagg

SEQ ID NO: 1048218 - RNA, 19 nt, Artificial Sequence
  Description of Artificial Sequence: Synthetic oligonucleotide
cccaagcaagcccauguga

SEQ ID NO: 1048219 - RNA, 19 nt, Artificial Sequence
  Description of Artificial Sequence: Synthetic oligonucleotide
cuuuccggucggcugagau

SEQ ID NO: 1048220 - RNA, 19 nt, Artificial Sequence
  Description of Artificial Sequence: Synthetic oligonucleotide
cuacuccuucagugaguca

SEQ ID NO: 1048221 - RNA, 19 nt, Artificial Sequence
  Description of Artificial Sequence: Synthetic oligonucleotide
cuugaacguucgauucagu

SEQ ID NO: 1048222 - RNA, 19 nt, Artificial Sequence
  Description of Artificial Sequence: Synthetic oligonucleotide
uccccacgucugcugcaaa

SEQ ID NO: 1048223 - RNA, 19 nt, Artificial Sequence
  Description of Artificial Sequence: Synthetic oligonucleotide
gccgucugccaacccacug

SEQ ID NO: 1048224 - RNA, 19 nt, Artificial Sequence
  Description of Artificial Sequence: Synthetic oligonucleotide
ccuuugcaguccaaggcaa

SEQ ID NO: 1048225 - RNA, 19 nt, Artificial Sequence
  Description of Artificial Sequence: Synthetic oligonucleotide
ucuuuccggucggcugaga

SEQ ID NO: 1048226 - RNA, 19 nt, Artificial Sequence
  Description of Artificial Sequence: Synthetic oligonucleotide
cucgcgcacccgcucuuuc

SEQ ID NO: 1048227 - RNA, 19 nt, Artificial Sequence
  Description of Artificial Sequence: Synthetic oligonucleotide
cauccccacgucugcugca

SEQ ID NO: 1048228 - RNA, 19 nt, Artificial Sequence
  Description of Artificial Sequence: Synthetic oligonucleotide
ccagccuaaccucugcaaa

SEQ ID NO: 1048229 - RNA, 19 nt, Artificial Sequence
  Description of Artificial Sequence: Synthetic oligonucleotide
cggucggcugagauguugc

SEQ ID NO: 1048230 - RNA, 19 nt, Artificial Sequence
  Description of Artificial Sequence: Synthetic oligonucleotide
cugcauucugcgucaugcu

SEQ ID NO: 1048231 - RNA, 19 nt, Artificial Sequence
  Description of Artificial Sequence: Synthetic oligonucleotide
ggccaugaccucgcgcacc

SEQ ID NO: 1048232 - RNA, 19 nt, Artificial Sequence
  Description of Artificial Sequence: Synthetic oligonucleotide
ccugugcaauggagacugg

SEQ ID NO: 1048233 - RNA, 19 nt, Artificial Sequence
  Description of Artificial Sequence: Synthetic oligonucleotide
guuguagcccucgguggcu

SEQ ID NO: 1048234 - RNA, 19 nt, Artificial Sequence
  Description of Artificial Sequence: Synthetic oligonucleotide
gccaaccauuuuauugaca

SEQ ID NO: 1048235 - RNA, 19 nt, Artificial Sequence
  Description of Artificial Sequence: Synthetic oligonucleotide
gcaagcccaugugaagaca

SEQ ID NO: 1048236 - RNA, 19 nt, Artificial Sequence
  Description of Artificial Sequence: Synthetic oligonucleotide
acaagccgugcaaguuuaa

SEQ ID NO: 1048237 - RNA, 19 nt, Artificial Sequence
  Description of Artificial Sequence: Synthetic oligonucleotide
caccaugggcagucagaaa

SEQ ID NO: 1048238 - RNA, 19 nt, Artificial Sequence
  Description of Artificial Sequence: Synthetic oligonucleotide
cgucgacggagccucgggc

SEQ ID NO: 1048239 - RNA, 19 nt, Artificial Sequence
  Description of Artificial Sequence: Synthetic oligonucleotide
acggagccucgggcugucg

SEQ ID NO: 1048240 - RNA, 19 nt, Artificial Sequence
  Description of Artificial Sequence: Synthetic oligonucleotide
ucccuccggccuugaggau

SEQ ID NO: 1048241 - RNA, 19 nt, Artificial Sequence
  Description of Artificial Sequence: Synthetic oligonucleotide
gacggagccucgggcuguc

SEQ ID NO: 1048242 - RNA, 19 nt, Artificial Sequence
  Description of Artificial Sequence: Synthetic oligonucleotide
agccgucugccaacccacu

SEQ ID NO: 1048243 - RNA, 19 nt, Artificial Sequence
  Description of Artificial Sequence: Synthetic oligonucleotide
cucgggcugucggcggcac

SEQ ID NO: 1048244 - RNA, 19 nt, Artificial Sequence
  Description of Artificial Sequence: Synthetic oligonucleotide
gggacagacugcguaaguu

SEQ ID NO: 1048245 - RNA, 19 nt, Artificial Sequence
  Description of Artificial Sequence: Synthetic oligonucleotide
ccaguccacaaggcauuac

SEQ ID NO: 1048246 - RNA, 19 nt, Artificial Sequence
  Description of Artificial Sequence: Synthetic oligonucleotide
ccggucggcugagauguug

SEQ ID NO: 1048247 - RNA, 19 nt, Artificial Sequence
  Description of Artificial Sequence: Synthetic oligonucleotide
ccacgagauucacgucgac

SEQ ID NO: 1048248 - RNA, 19 nt, Artificial Sequence
  Description of Artificial Sequence: Synthetic oligonucleotide
cgauucaguguguguggga

SEQ ID NO: 1048249 - RNA, 19 nt, Artificial Sequence
  Description of Artificial Sequence: Synthetic oligonucleotide
cuacccagucuccgguuuu

SEQ ID NO: 1048250 - RNA, 19 nt, Artificial Sequence
  Description of Artificial Sequence: Synthetic oligonucleotide
ccucaaccaaacauucauu

SEQ ID NO: 1048251 - RNA, 19 nt, Artificial Sequence
  Description of Artificial Sequence: Synthetic oligonucleotide
ccaugauacuagcauccau

SEQ ID NO: 1048252 - RNA, 19 nt, Artificial Sequence
  Description of Artificial Sequence: Synthetic oligonucleotide
gcuacccagucuccgguuu

SEQ ID NO: 1048253 - RNA, 19 nt, Artificial Sequence
  Description of Artificial Sequence: Synthetic oligonucleotide
cucggccaaccauuuuauu

SEQ ID NO: 1048254 - RNA, 19 nt, Artificial Sequence
  Description of Artificial Sequence: Synthetic oligonucleotide
cacugccgcccagggcaug

SEQ ID NO: 1048255 - RNA, 19 nt, Artificial Sequence
  Description of Artificial Sequence: Synthetic oligonucleotide
cgugcaaguuuaacgggau

SEQ ID NO: 1048256 - RNA, 19 nt, Artificial Sequence
  Description of Artificial Sequence: Synthetic oligonucleotide
ggcgcucccuccggccuug

SEQ ID NO: 1048257 - RNA, 19 nt, Artificial Sequence
  Description of Artificial Sequence: Synthetic oligonucleotide
gccggccugcagcuugcca

SEQ ID NO: 1048258 - RNA, 19 nt, Artificial Sequence
  Description of Artificial Sequence: Synthetic oligonucleotide
cguucgauucagugugugu

SEQ ID NO: 1048259 - RNA, 19 nt, Artificial Sequence
  Description of Artificial Sequence: Synthetic oligonucleotide
ccaacucggccaaccauuu

SEQ ID NO: 1048260 - RNA, 19 nt, Artificial Sequence
  Description of Artificial Sequence: Synthetic oligonucleotide
caacucggccaaccauuuu

SEQ ID NO: 1048261 - RNA, 19 nt, Artificial Sequence
  Description of Artificial Sequence: Synthetic oligonucleotide
cccuuauagccugugcaau

SEQ ID NO: 1048262 - RNA, 19 nt, Artificial Sequence
  Description of Artificial Sequence: Synthetic oligonucleotide
cgucugccaacccacugcu

SEQ ID NO: 1048263 - RNA, 19 nt, Artificial Sequence
  Description of Artificial Sequence: Synthetic oligonucleotide
gcucgcuaccuugaacguu

SEQ ID NO: 1048264 - RNA, 19 nt, Artificial Sequence
  Description of Artificial Sequence: Synthetic oligonucleotide
gcgucaugcucgcuaccuu

SEQ ID NO: 1048265 - RNA, 19 nt, Artificial Sequence
  Description of Artificial Sequence: Synthetic oligonucleotide
ccacaccuucccagccuaa

SEQ ID NO: 1048266 - RNA, 19 nt, Artificial Sequence
  Description of Artificial Sequence: Synthetic oligonucleotide
ccgccaccauggacuacca

SEQ ID NO: 1048267 - RNA, 19 nt, Artificial Sequence
  Description of Artificial Sequence: Synthetic oligonucleotide
ccccacgucugcugcaaau

SEQ ID NO: 1048268 - RNA, 19 nt, Artificial Sequence
  Description of Artificial Sequence: Synthetic oligonucleotide
cccaaagcacuggcagucu

SEQ ID NO: 1048269 - RNA, 19 nt, Artificial Sequence
  Description of Artificial Sequence: Synthetic oligonucleotide
cgcuaccuugaacguucga

SEQ ID NO: 1048270 - RNA, 19 nt, Artificial Sequence
  Description of Artificial Sequence: Synthetic oligonucleotide
gcguaaccuccagcuccua

SEQ ID NO: 1048271 - RNA, 19 nt, Artificial Sequence
  Description of Artificial Sequence: Synthetic oligonucleotide
gggcugucggcggcacggu

SEQ ID NO: 1048272 - RNA, 19 nt, Artificial Sequence
  Description of Artificial Sequence: Synthetic oligonucleotide
ccacagcaucaacggcgcu

SEQ ID NO: 1048273 - RNA, 19 nt, Artificial Sequence
  Description of Artificial Sequence: Synthetic oligonucleotide
ccgggucguuuuccaggau

SEQ ID NO: 1048274 - RNA, 19 nt, Artificial Sequence
  Description of Artificial Sequence: Synthetic oligonucleotide
gcgcucccuccggccuuga

SEQ ID NO: 1048275 - RNA, 19 nt, Artificial Sequence
  Description of Artificial Sequence: Synthetic oligonucleotide
cggcgcucccuccggccuu

SEQ ID NO: 1048276 - RNA, 19 nt, Artificial Sequence
  Description of Artificial Sequence: Synthetic oligonucleotide
uguauaaauacuauacagg

SEQ ID NO: 1048277 - RNA, 19 nt, Artificial Sequence
  Description of Artificial Sequence: Synthetic oligonucleotide
auagcaauacaguugagcc

SEQ ID NO: 1048278 - RNA, 19 nt, Artificial Sequence
  Description of Artificial Sequence: Synthetic oligonucleotide
aaacauuugagccaucgac

SEQ ID NO: 1048279 - RNA, 19 nt, Artificial Sequence
  Description of Artificial Sequence: Synthetic oligonucleotide
ucaauauuuaauuugggug

SEQ ID NO: 1048280 - RNA, 19 nt, Artificial Sequence
  Description of Artificial Sequence: Synthetic oligonucleotide
accauuaacuuccacaacc

SEQ ID NO: 1048281 - RNA, 19 nt, Artificial Sequence
  Description of Artificial Sequence: Synthetic oligonucleotide
acaauaaccauuaacuucc

SEQ ID NO: 1048282 - RNA, 19 nt, Artificial Sequence
  Description of Artificial Sequence: Synthetic oligonucleotide
uuuauaggaauuuagcacu

SEQ ID NO: 1048283 - RNA, 19 nt, Artificial Sequence
  Description of Artificial Sequence: Synthetic oligonucleotide
uuuuauaggaauuuagcac

SEQ ID NO: 1048284 - RNA, 19 nt, Artificial Sequence
  Description of Artificial Sequence: Synthetic oligonucleotide
uuaacagagaauaugcugu

SEQ ID NO: 1048285 - RNA, 19 nt, Artificial Sequence
  Description of Artificial Sequence: Synthetic oligonucleotide
ugaugcuccaacaauaacc

SEQ ID NO: 1048286 - RNA, 19 nt, Artificial Sequence
  Description of Artificial Sequence: Synthetic oligonucleotide
acuucaaguacccauacag

SEQ ID NO: 1048287 - RNA, 19 nt, Artificial Sequence
  Description of Artificial Sequence: Synthetic oligonucleotide
uuuaacagagaauaugcug

SEQ ID NO: 1048288 - RNA, 19 nt, Artificial Sequence
  Description of Artificial Sequence: Synthetic oligonucleotide
aguaagaagaggcaacaac

SEQ ID NO: 1048289 - RNA, 19 nt, Artificial Sequence
  Description of Artificial Sequence: Synthetic oligonucleotide
uccacaaccauauuggagc

SEQ ID NO: 1048290 - RNA, 19 nt, Artificial Sequence
  Description of Artificial Sequence: Synthetic oligonucleotide
auauugaggauuccgugcc

SEQ ID NO: 1048291 - RNA, 19 nt, Artificial Sequence
  Description of Artificial Sequence: Synthetic oligonucleotide
accauauuggagcaaagac

SEQ ID NO: 1048292 - RNA, 19 nt, Artificial Sequence
  Description of Artificial Sequence: Synthetic oligonucleotide
uuuagcacuagaaaaucug

SEQ ID NO: 1048293 - RNA, 19 nt, Artificial Sequence
  Description of Artificial Sequence: Synthetic oligonucleotide
ucaauucugucacagacca

SEQ ID NO: 1048294 - RNA, 19 nt, Artificial Sequence
  Description of Artificial Sequence: Synthetic oligonucleotide
acaguugagccacaaaugg

SEQ ID NO: 1048295 - RNA, 19 nt, Artificial Sequence
  Description of Artificial Sequence: Synthetic oligonucleotide
aauuuagcacuagaaaauc

SEQ ID NO: 1048296 - RNA, 19 nt, Artificial Sequence
  Description of Artificial Sequence: Synthetic oligonucleotide
gagaacuucaccgaggcgg

SEQ ID NO: 1048297 - RNA, 19 nt, Artificial Sequence
  Description of Artificial Sequence: Synthetic oligonucleotide
uuuucgaauaccaaaccac

SEQ ID NO: 1048298 - RNA, 19 nt, Artificial Sequence
  Description of Artificial Sequence: Synthetic oligonucleotide
agaacuucaaacaugagca

SEQ ID NO: 1048299 - RNA, 19 nt, Artificial Sequence
  Description of Artificial Sequence: Synthetic oligonucleotide
auaaccauuaacuuccaca

SEQ ID NO: 1048300 - RNA, 19 nt, Artificial Sequence
  Description of Artificial Sequence: Synthetic oligonucleotide
acuuuuauaggaauuuagc

SEQ ID NO: 1048301 - RNA, 19 nt, Artificial Sequence
  Description of Artificial Sequence: Synthetic oligonucleotide
auaguuauauguguccugc

SEQ ID NO: 1048302 - RNA, 19 nt, Artificial Sequence
  Description of Artificial Sequence: Synthetic oligonucleotide
ucuaaagcgaaauuucugu

SEQ ID NO: 1048303 - RNA, 19 nt, Artificial Sequence
  Description of Artificial Sequence: Synthetic oligonucleotide
aaucuuuucgaauaccaaa

SEQ ID NO: 1048304 - RNA, 19 nt, Artificial Sequence
  Description of Artificial Sequence: Synthetic oligonucleotide
uacuuuuauaggaauuuag

SEQ ID NO: 1048305 - RNA, 19 nt, Artificial Sequence
  Description of Artificial Sequence: Synthetic oligonucleotide
caaauauuggaauacagga

SEQ ID NO: 1048306 - RNA, 19 nt, Artificial Sequence
  Description of Artificial Sequence: Synthetic oligonucleotide
uucaauauuuaauuugggu

SEQ ID NO: 1048307 - RNA, 19 nt, Artificial Sequence
  Description of Artificial Sequence: Synthetic oligonucleotide
gauauugaggauuccgugc

SEQ ID NO: 1048308 - RNA, 19 nt, Artificial Sequence
  Description of Artificial Sequence: Synthetic oligonucleotide
uccacguuccaacugaugc

SEQ ID NO: 1048309 - RNA, 19 nt, Artificial Sequence
  Description of Artificial Sequence: Synthetic oligonucleotide
uuucgaauaccaaaccacc

SEQ ID NO: 1048310 - RNA, 19 nt, Artificial Sequence
  Description of Artificial Sequence: Synthetic oligonucleotide
uauuggagcaaagacagcc

SEQ ID NO: 1048311 - RNA, 19 nt, Artificial Sequence
  Description of Artificial Sequence: Synthetic oligonucleotide
aaauauuggaauacaggag

SEQ ID NO: 1048312 - RNA, 19 nt, Artificial Sequence
  Description of Artificial Sequence: Synthetic oligonucleotide
ugagguuucagauggaggu

SEQ ID NO: 1048313 - RNA, 19 nt, Artificial Sequence
  Description of Artificial Sequence: Synthetic oligonucleotide
uaaucaaugagagccacag

SEQ ID NO: 1048314 - RNA, 19 nt, Artificial Sequence
  Description of Artificial Sequence: Synthetic oligonucleotide
aggaguauguguuucagug

SEQ ID NO: 1048315 - RNA, 19 nt, Artificial Sequence
  Description of Artificial Sequence: Synthetic oligonucleotide
aacagguguguccagaccu

SEQ ID NO: 1048316 - RNA, 19 nt, Artificial Sequence
  Description of Artificial Sequence: Synthetic oligonucleotide
uuagcacuagaaaaucugc

SEQ ID NO: 1048317 - RNA, 19 nt, Artificial Sequence
  Description of Artificial Sequence: Synthetic oligonucleotide
acacacaaccucuagugac

SEQ ID NO: 1048318 - RNA, 19 nt, Artificial Sequence
  Description of Artificial Sequence: Synthetic oligonucleotide
gaugccauccaaacgaagg

SEQ ID NO: 1048319 - RNA, 19 nt, Artificial Sequence
  Description of Artificial Sequence: Synthetic oligonucleotide
ugagccaucgacuuuuacc

SEQ ID NO: 1048320 - RNA, 19 nt, Artificial Sequence
  Description of Artificial Sequence: Synthetic oligonucleotide
acaagcaggaucuacaaaa

SEQ ID NO: 1048321 - RNA, 19 nt, Artificial Sequence
  Description of Artificial Sequence: Synthetic oligonucleotide
acaaugcuaaaauagcugu

SEQ ID NO: 1048322 - RNA, 19 nt, Artificial Sequence
  Description of Artificial Sequence: Synthetic oligonucleotide
uuaauuuggguggagggag

SEQ ID NO: 1048323 - RNA, 19 nt, Artificial Sequence
  Description of Artificial Sequence: Synthetic oligonucleotide
ugaacaagcaggaucuaca

SEQ ID NO: 1048324 - RNA, 19 nt, Artificial Sequence
  Description of Artificial Sequence: Synthetic oligonucleotide
caaucacauccauagagcg

SEQ ID NO: 1048325 - RNA, 19 nt, Artificial Sequence
  Description of Artificial Sequence: Synthetic oligonucleotide
uaaccauuaacuuccacaa

SEQ ID NO: 1048326 - RNA, 19 nt, Artificial Sequence
  Description of Artificial Sequence: Synthetic oligonucleotide
auccauagagcgcaggaac

SEQ ID NO: 1048327 - RNA, 19 nt, Artificial Sequence
  Description of Artificial Sequence: Synthetic oligonucleotide
auuuacucggguugaaguc

SEQ ID NO: 1048328 - RNA, 19 nt, Artificial Sequence
  Description of Artificial Sequence: Synthetic oligonucleotide
aguggacucacacuccagc

SEQ ID NO: 1048329 - RNA, 19 nt, Artificial Sequence
  Description of Artificial Sequence: Synthetic oligonucleotide
gagaauaugcuguacagaa

SEQ ID NO: 1048330 - RNA, 19 nt, Artificial Sequence
  Description of Artificial Sequence: Synthetic oligonucleotide
auuguggccauccaauuug

SEQ ID NO: 1048331 - RNA, 19 nt, Artificial Sequence
  Description of Artificial Sequence: Synthetic oligonucleotide
gaggaauuuacucggguug

SEQ ID NO: 1048332 - RNA, 19 nt, Artificial Sequence
  Description of Artificial Sequence: Synthetic oligonucleotide
augggugcaauuuuaggag

SEQ ID NO: 1048333 - RNA, 19 nt, Artificial Sequence
  Description of Artificial Sequence: Synthetic oligonucleotide
uguuaugaguggcugguug

SEQ ID NO: 1048334 - RNA, 19 nt, Artificial Sequence
  Description of Artificial Sequence: Synthetic oligonucleotide
ucgacuuuuaccauggcuu

SEQ ID NO: 1048335 - RNA, 19 nt, Artificial Sequence
  Description of Artificial Sequence: Synthetic oligonucleotide
uacuauacaggcauguaau

SEQ ID NO: 1048336 - RNA, 19 nt, Artificial Sequence
  Description of Artificial Sequence: Synthetic oligonucleotide
uuauauguguccugcguug

SEQ ID NO: 1048337 - RNA, 19 nt, Artificial Sequence
  Description of Artificial Sequence: Synthetic oligonucleotide
acagcaaucaacauggccu

SEQ ID NO: 1048338 - RNA, 19 nt, Artificial Sequence
  Description of Artificial Sequence: Synthetic oligonucleotide
aaugcuaaaauagcuguau

SEQ ID NO: 1048339 - RNA, 19 nt, Artificial Sequence
  Description of Artificial Sequence: Synthetic oligonucleotide
uaggaauuuagcacuagaa

SEQ ID NO: 1048340 - RNA, 19 nt, Artificial Sequence
  Description of Artificial Sequence: Synthetic oligonucleotide
ugcuaaaauagcuguauaa

SEQ ID NO: 1048341 - RNA, 19 nt, Artificial Sequence
  Description of Artificial Sequence: Synthetic oligonucleotide
cagagggacacacacaacc

SEQ ID NO: 1048342 - RNA, 19 nt, Artificial Sequence
  Description of Artificial Sequence: Synthetic oligonucleotide
ugucuaaagcgaaauuucu

SEQ ID NO: 1048343 - RNA, 19 nt, Artificial Sequence
  Description of Artificial Sequence: Synthetic oligonucleotide
gaauaugcuguacagaacu

SEQ ID NO: 1048344 - RNA, 19 nt, Artificial Sequence
  Description of Artificial Sequence: Synthetic oligonucleotide
aaauacuauacaggcaugu

SEQ ID NO: 1048345 - RNA, 19 nt, Artificial Sequence
  Description of Artificial Sequence: Synthetic oligonucleotide
aaccacaucuuccaauacu

SEQ ID NO: 1048346 - RNA, 19 nt, Artificial Sequence
  Description of Artificial Sequence: Synthetic oligonucleotide
agaacuaggauuugacacu

SEQ ID NO: 1048347 - RNA, 19 nt, Artificial Sequence
  Description of Artificial Sequence: Synthetic oligonucleotide
aaccauuaacuuccacaac

SEQ ID NO: 1048348 - RNA, 19 nt, Artificial Sequence
  Description of Artificial Sequence: Synthetic oligonucleotide
uggaaugggaguuucuucu

SEQ ID NO: 1048349 - RNA, 19 nt, Artificial Sequence
  Description of Artificial Sequence: Synthetic oligonucleotide
uguccagaccuacuuacag

SEQ ID NO: 1048350 - RNA, 19 nt, Artificial Sequence
  Description of Artificial Sequence: Synthetic oligonucleotide
gaagggcucacugauaaag

SEQ ID NO: 1048351 - RNA, 19 nt, Artificial Sequence
  Description of Artificial Sequence: Synthetic oligonucleotide
ucuugcgaaacaugggugc

SEQ ID NO: 1048352 - RNA, 19 nt, Artificial Sequence
  Description of Artificial Sequence: Synthetic oligonucleotide
gauauccuuaguucuggcc

SEQ ID NO: 1048353 - RNA, 19 nt, Artificial Sequence
  Description of Artificial Sequence: Synthetic oligonucleotide
aacacaacaggugugucca

SEQ ID NO: 1048354 - RNA, 19 nt, Artificial Sequence
  Description of Artificial Sequence: Synthetic oligonucleotide
aaucaaugagagccacagg

SEQ ID NO: 1048355 - RNA, 19 nt, Artificial Sequence
  Description of Artificial Sequence: Synthetic oligonucleotide
acuauacaggcauguaauc

SEQ ID NO: 1048356 - RNA, 19 nt, Artificial Sequence
  Description of Artificial Sequence: Synthetic oligonucleotide
cagacgauguaauagagga

SEQ ID NO: 1048357 - RNA, 19 nt, Artificial Sequence
  Description of Artificial Sequence: Synthetic oligonucleotide
guuaugaguggcugguugg

SEQ ID NO: 1048358 - RNA, 19 nt, Artificial Sequence
  Description of Artificial Sequence: Synthetic oligonucleotide
caaaugaaugcccacagca

SEQ ID NO: 1048359 - RNA, 19 nt, Artificial Sequence
  Description of Artificial Sequence: Synthetic oligonucleotide
gagccaucgacuuuuacca

SEQ ID NO: 1048360 - RNA, 19 nt, Artificial Sequence
  Description of Artificial Sequence: Synthetic oligonucleotide
agggagaacauauuugcca

SEQ ID NO: 1048361 - RNA, 19 nt, Artificial Sequence
  Description of Artificial Sequence: Synthetic oligonucleotide
caugguaaguaaagguggg

SEQ ID NO: 1048362 - RNA, 19 nt, Artificial Sequence
  Description of Artificial Sequence: Synthetic oligonucleotide
uagcacuagaaaaucugcc

SEQ ID NO: 1048363 - RNA, 19 nt, Artificial Sequence
  Description of Artificial Sequence: Synthetic oligonucleotide
gaaguggucccauaagaac

SEQ ID NO: 1048364 - RNA, 19 nt, Artificial Sequence
  Description of Artificial Sequence: Synthetic oligonucleotide
agaacauauuugccagggc

SEQ ID NO: 1048365 - RNA, 19 nt, Artificial Sequence
  Description of Artificial Sequence: Synthetic oligonucleotide
ucgauauugaggauuccgu

SEQ ID NO: 1048366 - RNA, 19 nt, Artificial Sequence
  Description of Artificial Sequence: Synthetic oligonucleotide
ucaagcagaaacuggcaga

SEQ ID NO: 1048367 - RNA, 19 nt, Artificial Sequence
  Description of Artificial Sequence: Synthetic oligonucleotide
aacuccacguuccaacuga

SEQ ID NO: 1048368 - RNA, 19 nt, Artificial Sequence
  Description of Artificial Sequence: Synthetic oligonucleotide
aggaauuuagcacuagaaa

SEQ ID NO: 1048369 - RNA, 19 nt, Artificial Sequence
  Description of Artificial Sequence: Synthetic oligonucleotide
aacauuugagccaucgacu

SEQ ID NO: 1048370 - RNA, 19 nt, Artificial Sequence
  Description of Artificial Sequence: Synthetic oligonucleotide
agcgaaauuucuguacagc

SEQ ID NO: 1048371 - RNA, 19 nt, Artificial Sequence
  Description of Artificial Sequence: Synthetic oligonucleotide
gaacacaacaggugugucc

SEQ ID NO: 1048372 - RNA, 19 nt, Artificial Sequence
  Description of Artificial Sequence: Synthetic oligonucleotide
agcacuagaaaaucugcca

SEQ ID NO: 1048373 - RNA, 19 nt, Artificial Sequence
  Description of Artificial Sequence: Synthetic oligonucleotide
ugguagauauccuuaguuc

SEQ ID NO: 1048374 - RNA, 19 nt, Artificial Sequence
  Description of Artificial Sequence: Synthetic oligonucleotide
aaguaggaguauguguuuc

SEQ ID NO: 1048375 - RNA, 19 nt, Artificial Sequence
  Description of Artificial Sequence: Synthetic oligonucleotide
aguuauauguguccugcgu

SEQ ID NO: 1048376 - RNA, 19 nt, Artificial Sequence
  Description of Artificial Sequence: Synthetic oligonucleotide
aagggcucacugauaaagc

SEQ ID NO: 1048377 - RNA, 19 nt, Artificial Sequence
  Description of Artificial Sequence: Synthetic oligonucleotide
uucuguuaugaguggcugg

SEQ ID NO: 1048378 - RNA, 19 nt, Artificial Sequence
  Description of Artificial Sequence: Synthetic oligonucleotide
auacuauacaggcauguaa

SEQ ID NO: 1048379 - RNA, 19 nt, Artificial Sequence
  Description of Artificial Sequence: Synthetic oligonucleotide
ugguaaguaaagguggggc

SEQ ID NO: 1048380 - RNA, 19 nt, Artificial Sequence
  Description of Artificial Sequence: Synthetic oligonucleotide
ugauaaagcccugcaaacc

SEQ ID NO: 1048381 - RNA, 19 nt, Artificial Sequence
  Description of Artificial Sequence: Synthetic oligonucleotide
gaugcuccaacaauaacca

SEQ ID NO: 1048382 - RNA, 19 nt, Artificial Sequence
  Description of Artificial Sequence: Synthetic oligonucleotide
uucuugcgaaacaugggug

SEQ ID NO: 1048383 - RNA, 19 nt, Artificial Sequence
  Description of Artificial Sequence: Synthetic oligonucleotide
ugggugcaauuuuaggagg

SEQ ID NO: 1048384 - RNA, 19 nt, Artificial Sequence
  Description of Artificial Sequence: Synthetic oligonucleotide
cugucuaaagcgaaauuuc

SEQ ID NO: 1048385 - RNA, 19 nt, Artificial Sequence
  Description of Artificial Sequence: Synthetic oligonucleotide
uggaagggcucacugauaa

SEQ ID NO: 1048386 - RNA, 19 nt, Artificial Sequence
  Description of Artificial Sequence: Synthetic oligonucleotide
uagugccauaguuauaugu

SEQ ID NO: 1048387 - RNA, 19 nt, Artificial Sequence
  Description of Artificial Sequence: Synthetic oligonucleotide
cagauguacuuucugcagg

SEQ ID NO: 1048388 - RNA, 19 nt, Artificial Sequence
  Description of Artificial Sequence: Synthetic oligonucleotide
acuuuuaccauggcuuaac

SEQ ID NO: 1048389 - RNA, 19 nt, Artificial Sequence
  Description of Artificial Sequence: Synthetic oligonucleotide
accggagaaacaaagaaca

SEQ ID NO: 1048390 - RNA, 19 nt, Artificial Sequence
  Description of Artificial Sequence: Synthetic oligonucleotide
gauuccgugcccaaacucc

SEQ ID NO: 1048391 - RNA, 19 nt, Artificial Sequence
  Description of Artificial Sequence: Synthetic oligonucleotide
acacuucaaguacccauac

SEQ ID NO: 1048392 - RNA, 19 nt, Artificial Sequence
  Description of Artificial Sequence: Synthetic oligonucleotide
gaacauauuugccagggcu

SEQ ID NO: 1048393 - RNA, 19 nt, Artificial Sequence
  Description of Artificial Sequence: Synthetic oligonucleotide
auaggaauuuagcacuaga

SEQ ID NO: 1048394 - RNA, 19 nt, Artificial Sequence
  Description of Artificial Sequence: Synthetic oligonucleotide
cucgauauugaggauuccg

SEQ ID NO: 1048395 - RNA, 19 nt, Artificial Sequence
  Description of Artificial Sequence: Synthetic oligonucleotide
uccauagagcgcaggaaca

SEQ ID NO: 1048396 - RNA, 19 nt, Artificial Sequence
  Description of Artificial Sequence: Synthetic oligonucleotide
gcaacaacaauggucaucc

SEQ ID NO: 1048397 - RNA, 19 nt, Artificial Sequence
  Description of Artificial Sequence: Synthetic oligonucleotide
uaguuauauguguccugcg

SEQ ID NO: 1048398 - RNA, 19 nt, Artificial Sequence
  Description of Artificial Sequence: Synthetic oligonucleotide
gcuaccuauagcaauacag

SEQ ID NO: 1048399 - RNA, 19 nt, Artificial Sequence
  Description of Artificial Sequence: Synthetic oligonucleotide
agugccauaguuauaugug

SEQ ID NO: 1048400 - RNA, 19 nt, Artificial Sequence
  Description of Artificial Sequence: Synthetic oligonucleotide
gaugcaaaugagguuucag

SEQ ID NO: 1048401 - RNA, 19 nt, Artificial Sequence
  Description of Artificial Sequence: Synthetic oligonucleotide
caagcaggaucuacaaaag

SEQ ID NO: 1048402 - RNA, 19 nt, Artificial Sequence
  Description of Artificial Sequence: Synthetic oligonucleotide
aaccauauuggagcaaaga

SEQ ID NO: 1048403 - RNA, 19 nt, Artificial Sequence
  Description of Artificial Sequence: Synthetic oligonucleotide
cagaccuacuuacaguccc

SEQ ID NO: 1048404 - RNA, 19 nt, Artificial Sequence
  Description of Artificial Sequence: Synthetic oligonucleotide
ucuggcauuucaauauuua

SEQ ID NO: 1048405 - RNA, 19 nt, Artificial Sequence
  Description of Artificial Sequence: Synthetic oligonucleotide
ucuguuaugaguggcuggu

SEQ ID NO: 1048406 - RNA, 19 nt, Artificial Sequence
  Description of Artificial Sequence: Synthetic oligonucleotide
ugcccaaacuccacguucc

SEQ ID NO: 1048407 - RNA, 19 nt, Artificial Sequence
  Description of Artificial Sequence: Synthetic oligonucleotide
aucgacuuuuaccauggcu

SEQ ID NO: 1048408 - RNA, 19 nt, Artificial Sequence
  Description of Artificial Sequence: Synthetic oligonucleotide
acaccggagaaacaaagaa

SEQ ID NO: 1048409 - RNA, 19 nt, Artificial Sequence
  Description of Artificial Sequence: Synthetic oligonucleotide
uggacucacacuccagccc

SEQ ID NO: 1048410 - RNA, 19 nt, Artificial Sequence
  Description of Artificial Sequence: Synthetic oligonucleotide
ucaguggacucacacucca

SEQ ID NO: 1048411 - RNA, 19 nt, Artificial Sequence
  Description of Artificial Sequence: Synthetic oligonucleotide
gguuaaaacauuugagcca

SEQ ID NO: 1048412 - RNA, 19 nt, Artificial Sequence
  Description of Artificial Sequence: Synthetic oligonucleotide
cuuuucgaauaccaaacca

SEQ ID NO: 1048413 - RNA, 19 nt, Artificial Sequence
  Description of Artificial Sequence: Synthetic oligonucleotide
aucauaugaaauguuucca

SEQ ID NO: 1048414 - RNA, 19 nt, Artificial Sequence
  Description of Artificial Sequence: Synthetic oligonucleotide
ugcucgauauugaggauuc

SEQ ID NO: 1048415 - RNA, 19 nt, Artificial Sequence
  Description of Artificial Sequence: Synthetic oligonucleotide
agguucauggcggagaacu

SEQ ID NO: 1048416 - RNA, 19 nt, Artificial Sequence
  Description of Artificial Sequence: Synthetic oligonucleotide
cacagcaaucaacauggcc

SEQ ID NO: 1048417 - RNA, 19 nt, Artificial Sequence
  Description of Artificial Sequence: Synthetic oligonucleotide
cuuuuaccauggcuuaacc

SEQ ID NO: 1048418 - RNA, 19 nt, Artificial Sequence
  Description of Artificial Sequence: Synthetic oligonucleotide
ucauucugucuaaagcgaa

SEQ ID NO: 1048419 - RNA, 19 nt, Artificial Sequence
  Description of Artificial Sequence: Synthetic oligonucleotide
agaauaugcuguacagaac

SEQ ID NO: 1048420 - RNA, 19 nt, Artificial Sequence
  Description of Artificial Sequence: Synthetic oligonucleotide
uaaagguggggcaucuguc

SEQ ID NO: 1048421 - RNA, 19 nt, Artificial Sequence
  Description of Artificial Sequence: Synthetic oligonucleotide
uccgugcccaaacuccacg

SEQ ID NO: 1048422 - RNA, 19 nt, Artificial Sequence
  Description of Artificial Sequence: Synthetic oligonucleotide
uaccuauagcaauacaguu

SEQ ID NO: 1048423 - RNA, 19 nt, Artificial Sequence
  Description of Artificial Sequence: Synthetic oligonucleotide
accuauagcaauacaguug

SEQ ID NO: 1048424 - RNA, 19 nt, Artificial Sequence
  Description of Artificial Sequence: Synthetic oligonucleotide
gaccagacgauguaauaga

SEQ ID NO: 1048425 - RNA, 19 nt, Artificial Sequence
  Description of Artificial Sequence: Synthetic oligonucleotide
acaaaaguaagaagaggca

SEQ ID NO: 1048426 - RNA, 19 nt, Artificial Sequence
  Description of Artificial Sequence: Synthetic oligonucleotide
aaugggaguuucuucuguu

SEQ ID NO: 1048427 - RNA, 19 nt, Artificial Sequence
  Description of Artificial Sequence: Synthetic oligonucleotide
uauaggaauuuagcacuag

SEQ ID NO: 1048428 - RNA, 19 nt, Artificial Sequence
  Description of Artificial Sequence: Synthetic oligonucleotide
aaaucuuuucgaauaccaa

SEQ ID NO: 1048429 - RNA, 19 nt, Artificial Sequence
  Description of Artificial Sequence: Synthetic oligonucleotide
acauccauagagcgcagga

SEQ ID NO: 1048430 - RNA, 19 nt, Artificial Sequence
  Description of Artificial Sequence: Synthetic oligonucleotide
caccggagaaacaaagaac

SEQ ID NO: 1048431 - RNA, 19 nt, Artificial Sequence
  Description of Artificial Sequence: Synthetic oligonucleotide
uggagcaaagacagcccag

SEQ ID NO: 1048432 - RNA, 19 nt, Artificial Sequence
  Description of Artificial Sequence: Synthetic oligonucleotide
ggaguauguguuucagugg

SEQ ID NO: 1048433 - RNA, 19 nt, Artificial Sequence
  Description of Artificial Sequence: Synthetic oligonucleotide
ugaugccauccaaacgaag

SEQ ID NO: 1048434 - RNA, 19 nt, Artificial Sequence
  Description of Artificial Sequence: Synthetic oligonucleotide
aaaugaaugcccacagcaa

SEQ ID NO: 1048435 - RNA, 19 nt, Artificial Sequence
  Description of Artificial Sequence: Synthetic oligonucleotide
acauuugagccaucgacuu

SEQ ID NO: 1048436 - RNA, 19 nt, Artificial Sequence
  Description of Artificial Sequence: Synthetic oligonucleotide
uauugaggauuccgugccc

SEQ ID NO: 1048437 - RNA, 19 nt, Artificial Sequence
  Description of Artificial Sequence: Synthetic oligonucleotide
uguguuucaguggacucac

SEQ ID NO: 1048438 - RNA, 19 nt, Artificial Sequence
  Description of Artificial Sequence: Synthetic oligonucleotide
agcacggcuggacuguauc

SEQ ID NO: 1048439 - RNA, 19 nt, Artificial Sequence
  Description of Artificial Sequence: Synthetic oligonucleotide
ugguggugcgcuuuagucu

SEQ ID NO: 1048440 - RNA, 19 nt, Artificial Sequence
  Description of Artificial Sequence: Synthetic oligonucleotide
aguugagccacaaauggaa

SEQ ID NO: 1048441 - RNA, 19 nt, Artificial Sequence
  Description of Artificial Sequence: Synthetic oligonucleotide
acuggcuaccuauagcaau

SEQ ID NO: 1048442 - RNA, 19 nt, Artificial Sequence
  Description of Artificial Sequence: Synthetic oligonucleotide
acaaccucuagugaccugu

SEQ ID NO: 1048443 - RNA, 19 nt, Artificial Sequence
  Description of Artificial Sequence: Synthetic oligonucleotide
aagcauuguggccauccaa

SEQ ID NO: 1048444 - RNA, 19 nt, Artificial Sequence
  Description of Artificial Sequence: Synthetic oligonucleotide
uggagguccacaguuccag

SEQ ID NO: 1048445 - RNA, 19 nt, Artificial Sequence
  Description of Artificial Sequence: Synthetic oligonucleotide
caacagacaccggagaaac

SEQ ID NO: 1048446 - RNA, 19 nt, Artificial Sequence
  Description of Artificial Sequence: Synthetic oligonucleotide
gcuuaacccauccaucucc

SEQ ID NO: 1048447 - RNA, 19 nt, Artificial Sequence
  Description of Artificial Sequence: Synthetic oligonucleotide
aggcacaagaaggacauga

SEQ ID NO: 1048448 - RNA, 19 nt, Artificial Sequence
  Description of Artificial Sequence: Synthetic oligonucleotide
acuaggauuugacacugua

SEQ ID NO: 1048449 - RNA, 19 nt, Artificial Sequence
  Description of Artificial Sequence: Synthetic oligonucleotide
aguacccauacagaaagaa

SEQ ID NO: 1048450 - RNA, 19 nt, Artificial Sequence
  Description of Artificial Sequence: Synthetic oligonucleotide
augguaaguaaaggugggg

SEQ ID NO: 1048451 - RNA, 19 nt, Artificial Sequence
  Description of Artificial Sequence: Synthetic oligonucleotide
cuauacaggcauguaauca

SEQ ID NO: 1048452 - RNA, 19 nt, Artificial Sequence
  Description of Artificial Sequence: Synthetic oligonucleotide
gaacaagcaggaucuacaa

SEQ ID NO: 1048453 - RNA, 19 nt, Artificial Sequence
  Description of Artificial Sequence: Synthetic oligonucleotide
ugguggagaucauaugaaa

SEQ ID NO: 1048454 - RNA, 19 nt, Artificial Sequence
  Description of Artificial Sequence: Synthetic oligonucleotide
caugccauuggaagggcuc

SEQ ID NO: 1048455 - RNA, 19 nt, Artificial Sequence
  Description of Artificial Sequence: Synthetic oligonucleotide
aagggaaguaggaguaugu

SEQ ID NO: 1048456 - RNA, 19 nt, Artificial Sequence
  Description of Artificial Sequence: Synthetic oligonucleotide
ugggucggggacaagggaa

SEQ ID NO: 1048457 - RNA, 19 nt, Artificial Sequence
  Description of Artificial Sequence: Synthetic oligonucleotide
ugcguuguucugcaaucac

SEQ ID NO: 1048458 - RNA, 19 nt, Artificial Sequence
  Description of Artificial Sequence: Synthetic oligonucleotide
uaguucuggccaccuaugu

SEQ ID NO: 1048459 - RNA, 19 nt, Artificial Sequence
  Description of Artificial Sequence: Synthetic oligonucleotide
gcuguauaaauacuauaca

SEQ ID NO: 1048460 - RNA, 19 nt, Artificial Sequence
  Description of Artificial Sequence: Synthetic oligonucleotide
guggacucacacuccagcc

SEQ ID NO: 1048461 - RNA, 19 nt, Artificial Sequence
  Description of Artificial Sequence: Synthetic oligonucleotide
auuugagccaucgacuuuu

SEQ ID NO: 1048462 - RNA, 19 nt, Artificial Sequence
  Description of Artificial Sequence: Synthetic oligonucleotide
agcaggaucuacaaaagua

SEQ ID NO: 1048463 - RNA, 19 nt, Artificial Sequence
  Description of Artificial Sequence: Synthetic oligonucleotide
gacagggaaagcacggcug

SEQ ID NO: 1048464 - RNA, 19 nt, Artificial Sequence
  Description of Artificial Sequence: Synthetic oligonucleotide
cuucaaguacccauacaga

SEQ ID NO: 1048465 - RNA, 19 nt, Artificial Sequence
  Description of Artificial Sequence: Synthetic oligonucleotide
aacagaccagacgauguaa

SEQ ID NO: 1048466 - RNA, 19 nt, Artificial Sequence
  Description of Artificial Sequence: Synthetic oligonucleotide
acaaccauauuggagcaaa

SEQ ID NO: 1048467 - RNA, 19 nt, Artificial Sequence
  Description of Artificial Sequence: Synthetic oligonucleotide
caguguaaucaaugagagc

SEQ ID NO: 1048468 - RNA, 19 nt, Artificial Sequence
  Description of Artificial Sequence: Synthetic oligonucleotide
auggcuuaacccauccauc

SEQ ID NO: 1048469 - RNA, 19 nt, Artificial Sequence
  Description of Artificial Sequence: Synthetic oligonucleotide
accuacuuacaguccccac

SEQ ID NO: 1048470 - RNA, 19 nt, Artificial Sequence
  Description of Artificial Sequence: Synthetic oligonucleotide
accucuagugaccugucau

SEQ ID NO: 1048471 - RNA, 19 nt, Artificial Sequence
  Description of Artificial Sequence: Synthetic oligonucleotide
uaggaguauguguuucagu

SEQ ID NO: 1048472 - RNA, 19 nt, Artificial Sequence
  Description of Artificial Sequence: Synthetic oligonucleotide
uuagugccauaguuauaug

SEQ ID NO: 1048473 - RNA, 19 nt, Artificial Sequence
  Description of Artificial Sequence: Synthetic oligonucleotide
uguccugcguuguucugca

SEQ ID NO: 1048474 - RNA, 19 nt, Artificial Sequence
  Description of Artificial Sequence: Synthetic oligonucleotide
guaggaguauguguuucag

SEQ ID NO: 1048475 - RNA, 19 nt, Artificial Sequence
  Description of Artificial Sequence: Synthetic oligonucleotide
agacgauguaauagaggac

SEQ ID NO: 1048476 - RNA, 19 nt, Artificial Sequence
  Description of Artificial Sequence: Synthetic oligonucleotide
aggauccacagagggacac

SEQ ID NO: 1048477 - RNA, 19 nt, Artificial Sequence
  Description of Artificial Sequence: Synthetic oligonucleotide
gguaaguaaagguggggca

SEQ ID NO: 1048478 - RNA, 19 nt, Artificial Sequence
  Description of Artificial Sequence: Synthetic oligonucleotide
uuaacccauccaucuccag

SEQ ID NO: 1048479 - RNA, 19 nt, Artificial Sequence
  Description of Artificial Sequence: Synthetic oligonucleotide
agaccuacuuacagucccc

SEQ ID NO: 1048480 - RNA, 19 nt, Artificial Sequence
  Description of Artificial Sequence: Synthetic oligonucleotide
guuaaaacauuugagccau

SEQ ID NO: 1048481 - RNA, 19 nt, Artificial Sequence
  Description of Artificial Sequence: Synthetic oligonucleotide
auauuggagcaaagacagc

SEQ ID NO: 1048482 - RNA, 19 nt, Artificial Sequence
  Description of Artificial Sequence: Synthetic oligonucleotide
uccugcguuguucugcaau

SEQ ID NO: 1048483 - RNA, 19 nt, Artificial Sequence
  Description of Artificial Sequence: Synthetic oligonucleotide
ccaucgacuuuuaccaugg

SEQ ID NO: 1048484 - RNA, 19 nt, Artificial Sequence
  Description of Artificial Sequence: Synthetic oligonucleotide
uauguguccugcguuguuc

SEQ ID NO: 1048485 - RNA, 19 nt, Artificial Sequence
  Description of Artificial Sequence: Synthetic oligonucleotide
uucugucuaaagcgaaauu

SEQ ID NO: 1048486 - RNA, 19 nt, Artificial Sequence
  Description of Artificial Sequence: Synthetic oligonucleotide
ugcgcuuuagucuggcauu

SEQ ID NO: 1048487 - RNA, 19 nt, Artificial Sequence
  Description of Artificial Sequence: Synthetic oligonucleotide
caggcauguaaucaugcca

SEQ ID NO: 1048488 - RNA, 19 nt, Artificial Sequence
  Description of Artificial Sequence: Synthetic oligonucleotide
gcgaaauuucuguacagca

SEQ ID NO: 1048489 - RNA, 19 nt, Artificial Sequence
  Description of Artificial Sequence: Synthetic oligonucleotide
cuuagugccauaguuauau

SEQ ID NO: 1048490 - RNA, 19 nt, Artificial Sequence
  Description of Artificial Sequence: Synthetic oligonucleotide
ccauauuggagcaaagaca

SEQ ID NO: 1048491 - RNA, 19 nt, Artificial Sequence
  Description of Artificial Sequence: Synthetic oligonucleotide
aauuuggguggagggagaa

SEQ ID NO: 1048492 - RNA, 19 nt, Artificial Sequence
  Description of Artificial Sequence: Synthetic oligonucleotide
gacuguaucugaacacaac

SEQ ID NO: 1048493 - RNA, 19 nt, Artificial Sequence
  Description of Artificial Sequence: Synthetic oligonucleotide
aacuucaccgaggcggccu

SEQ ID NO: 1048494 - RNA, 19 nt, Artificial Sequence
  Description of Artificial Sequence: Synthetic oligonucleotide
gcaaucacauccauagagc

SEQ ID NO: 1048495 - RNA, 19 nt, Artificial Sequence
  Description of Artificial Sequence: Synthetic oligonucleotide
uuguggccauccaauuugu

SEQ ID NO: 1048496 - RNA, 19 nt, Artificial Sequence
  Description of Artificial Sequence: Synthetic oligonucleotide
aggcauguaaucaugccau

SEQ ID NO: 1048497 - RNA, 19 nt, Artificial Sequence
  Description of Artificial Sequence: Synthetic oligonucleotide
ucaugccauuggaagggcu

SEQ ID NO: 1048498 - RNA, 19 nt, Artificial Sequence
  Description of Artificial Sequence: Synthetic oligonucleotide
accagacgauguaauagag

SEQ ID NO: 1048499 - RNA, 19 nt, Artificial Sequence
  Description of Artificial Sequence: Synthetic oligonucleotide
caaccauauuggagcaaag

SEQ ID NO: 1048500 - RNA, 19 nt, Artificial Sequence
  Description of Artificial Sequence: Synthetic oligonucleotide
gccaagaccacagauguac

SEQ ID NO: 1048501 - RNA, 19 nt, Artificial Sequence
  Description of Artificial Sequence: Synthetic oligonucleotide
aauaugcuguacagaacua

SEQ ID NO: 1048502 - RNA, 19 nt, Artificial Sequence
  Description of Artificial Sequence: Synthetic oligonucleotide
ugaguggcugguuggcacu

SEQ ID NO: 1048503 - RNA, 19 nt, Artificial Sequence
  Description of Artificial Sequence: Synthetic oligonucleotide
acaaauggaagugguccca

SEQ ID NO: 1048504 - RNA, 19 nt, Artificial Sequence
  Description of Artificial Sequence: Synthetic oligonucleotide
uccagcuuagugccauagu

SEQ ID NO: 1048505 - RNA, 19 nt, Artificial Sequence
  Description of Artificial Sequence: Synthetic oligonucleotide
augagcaggagcaaaugaa

SEQ ID NO: 1048506 - RNA, 19 nt, Artificial Sequence
  Description of Artificial Sequence: Synthetic oligonucleotide
gucauucugucuaaagcga

SEQ ID NO: 1048507 - RNA, 19 nt, Artificial Sequence
  Description of Artificial Sequence: Synthetic oligonucleotide
cagaacagaccagacgaug

SEQ ID NO: 1048508 - RNA, 19 nt, Artificial Sequence
  Description of Artificial Sequence: Synthetic oligonucleotide
cuaaagcgaaauuucugua

SEQ ID NO: 1048509 - RNA, 19 nt, Artificial Sequence
  Description of Artificial Sequence: Synthetic oligonucleotide
auugaggauuccgugccca

SEQ ID NO: 1048510 - RNA, 19 nt, Artificial Sequence
  Description of Artificial Sequence: Synthetic oligonucleotide
cuuuaacagagaauaugcu

SEQ ID NO: 1048511 - RNA, 19 nt, Artificial Sequence
  Description of Artificial Sequence: Synthetic oligonucleotide
ggaaagcacggcuggacug

SEQ ID NO: 1048512 - RNA, 19 nt, Artificial Sequence
  Description of Artificial Sequence: Synthetic oligonucleotide
caacagguguguccagacc

SEQ ID NO: 1048513 - RNA, 19 nt, Artificial Sequence
  Description of Artificial Sequence: Synthetic oligonucleotide
agcauuguggccauccaau

SEQ ID NO: 1048514 - RNA, 19 nt, Artificial Sequence
  Description of Artificial Sequence: Synthetic oligonucleotide
uggaugcaaaugagguuuc

SEQ ID NO: 1048515 - RNA, 19 nt, Artificial Sequence
  Description of Artificial Sequence: Synthetic oligonucleotide
cauuggaagggcucacuga

SEQ ID NO: 1048516 - RNA, 19 nt, Artificial Sequence
  Description of Artificial Sequence: Synthetic oligonucleotide
uggcggagaacuucaccga

SEQ ID NO: 1048517 - RNA, 19 nt, Artificial Sequence
  Description of Artificial Sequence: Synthetic oligonucleotide
auccuuaguucuggccacc

SEQ ID NO: 1048518 - RNA, 19 nt, Artificial Sequence
  Description of Artificial Sequence: Synthetic oligonucleotide
aguggucccauaagaacca

SEQ ID NO: 1048519 - RNA, 19 nt, Artificial Sequence
  Description of Artificial Sequence: Synthetic oligonucleotide
aguucuggccaccuauguu

SEQ ID NO: 1048520 - RNA, 19 nt, Artificial Sequence
  Description of Artificial Sequence: Synthetic oligonucleotide
aggauuccgugcccaaacu

SEQ ID NO: 1048521 - RNA, 19 nt, Artificial Sequence
  Description of Artificial Sequence: Synthetic oligonucleotide
cacguuccaacugaugcuc

SEQ ID NO: 1048522 - RNA, 19 nt, Artificial Sequence
  Description of Artificial Sequence: Synthetic oligonucleotide
gacaccggagaaacaaaga

SEQ ID NO: 1048523 - RNA, 19 nt, Artificial Sequence
  Description of Artificial Sequence: Synthetic oligonucleotide
auagagcgcaggaacagaa

SEQ ID NO: 1048524 - RNA, 19 nt, Artificial Sequence
  Description of Artificial Sequence: Synthetic oligonucleotide
cacuguauauuacaaugcu

SEQ ID NO: 1048525 - RNA, 19 nt, Artificial Sequence
  Description of Artificial Sequence: Synthetic oligonucleotide
acggcuggacuguaucuga

SEQ ID NO: 1048526 - RNA, 19 nt, Artificial Sequence
  Description of Artificial Sequence: Synthetic oligonucleotide
guuauauguguccugcguu

SEQ ID NO: 1048527 - RNA, 19 nt, Artificial Sequence
  Description of Artificial Sequence: Synthetic oligonucleotide
gugcccaaacuccacguuc

SEQ ID NO: 1048528 - RNA, 19 nt, Artificial Sequence
  Description of Artificial Sequence: Synthetic oligonucleotide
caguugagccacaaaugga

SEQ ID NO: 1048529 - RNA, 19 nt, Artificial Sequence
  Description of Artificial Sequence: Synthetic oligonucleotide
acguuccaacugaugcucc

SEQ ID NO: 1048530 - RNA, 19 nt, Artificial Sequence
  Description of Artificial Sequence: Synthetic oligonucleotide
cccauacagaaagaagugg

SEQ ID NO: 1048531 - RNA, 19 nt, Artificial Sequence
  Description of Artificial Sequence: Synthetic oligonucleotide
ggaaugggaguuucuucug

SEQ ID NO: 1048532 - RNA, 19 nt, Artificial Sequence
  Description of Artificial Sequence: Synthetic oligonucleotide
gaaugggaguuucuucugu

SEQ ID NO: 1048533 - RNA, 19 nt, Artificial Sequence
  Description of Artificial Sequence: Synthetic oligonucleotide
cauucugucuaaagcgaaa

SEQ ID NO: 1048534 - RNA, 19 nt, Artificial Sequence
  Description of Artificial Sequence: Synthetic oligonucleotide
gcaaaugaaugcccacagc

SEQ ID NO: 1048535 - RNA, 19 nt, Artificial Sequence
  Description of Artificial Sequence: Synthetic oligonucleotide
cuuacaguccccacuggcu

SEQ ID NO: 1048536 - RNA, 19 nt, Artificial Sequence
  Description of Artificial Sequence: Synthetic oligonucleotide
cauggcuuaacccauccau

SEQ ID NO: 1048537 - RNA, 19 nt, Artificial Sequence
  Description of Artificial Sequence: Synthetic oligonucleotide
gccaucgacuuuuaccaug

SEQ ID NO: 1048538 - RNA, 19 nt, Artificial Sequence
  Description of Artificial Sequence: Synthetic oligonucleotide
ccuucugcucgauauugag

SEQ ID NO: 1048539 - RNA, 19 nt, Artificial Sequence
  Description of Artificial Sequence: Synthetic oligonucleotide
gugcaauuuuaggagguuc

SEQ ID NO: 1048540 - RNA, 19 nt, Artificial Sequence
  Description of Artificial Sequence: Synthetic oligonucleotide
ugcgaaacaugggugcaau

SEQ ID NO: 1048541 - RNA, 19 nt, Artificial Sequence
  Description of Artificial Sequence: Synthetic oligonucleotide
cauuaucuucaugguggag

SEQ ID NO: 1048542 - RNA, 19 nt, Artificial Sequence
  Description of Artificial Sequence: Synthetic oligonucleotide
acagacaggcauagaugag

SEQ ID NO: 1048543 - RNA, 19 nt, Artificial Sequence
  Description of Artificial Sequence: Synthetic oligonucleotide
gcauguaaucaugccauug

SEQ ID NO: 1048544 - RNA, 19 nt, Artificial Sequence
  Description of Artificial Sequence: Synthetic oligonucleotide
cuggcuaccuauagcaaua

SEQ ID NO: 1048545 - RNA, 19 nt, Artificial Sequence
  Description of Artificial Sequence: Synthetic oligonucleotide
gcacuagaaaaucugccaa

SEQ ID NO: 1048546 - RNA, 19 nt, Artificial Sequence
  Description of Artificial Sequence: Synthetic oligonucleotide
uuggaagggcucacugaua

SEQ ID NO: 1048547 - RNA, 19 nt, Artificial Sequence
  Description of Artificial Sequence: Synthetic oligonucleotide
ccacuggcuaccuauagca

SEQ ID NO: 1048548 - RNA, 19 nt, Artificial Sequence
  Description of Artificial Sequence: Synthetic oligonucleotide
cacacacaaccucuaguga

SEQ ID NO: 1048549 - RNA, 19 nt, Artificial Sequence
  Description of Artificial Sequence: Synthetic oligonucleotide
acacaaccucuagugaccu

SEQ ID NO: 1048550 - RNA, 19 nt, Artificial Sequence
  Description of Artificial Sequence: Synthetic oligonucleotide
uugaggauuccgugcccaa

SEQ ID NO: 1048551 - RNA, 19 nt, Artificial Sequence
  Description of Artificial Sequence: Synthetic oligonucleotide
ggagaacuucaccgaggcg

SEQ ID NO: 1048552 - RNA, 19 nt, Artificial Sequence
  Description of Artificial Sequence: Synthetic oligonucleotide
ggcacaagaaggacaugag

SEQ ID NO: 1048553 - RNA, 19 nt, Artificial Sequence
  Description of Artificial Sequence: Synthetic oligonucleotide
uuugagccaucgacuuuua

SEQ ID NO: 1048554 - RNA, 19 nt, Artificial Sequence
  Description of Artificial Sequence: Synthetic oligonucleotide
uacuuucugcaggccuagg

SEQ ID NO: 1048555 - RNA, 19 nt, Artificial Sequence
  Description of Artificial Sequence: Synthetic oligonucleotide
guaaucaaugagagccaca

SEQ ID NO: 1048556 - RNA, 19 nt, Artificial Sequence
  Description of Artificial Sequence: Synthetic oligonucleotide
cacauccauagagcgcagg

SEQ ID NO: 1048557 - RNA, 19 nt, Artificial Sequence
  Description of Artificial Sequence: Synthetic oligonucleotide
auuccgugcccaaacucca

SEQ ID NO: 1048558 - RNA, 19 nt, Artificial Sequence
  Description of Artificial Sequence: Synthetic oligonucleotide
uuccgugcccaaacuccac

SEQ ID NO: 1048559 - RNA, 19 nt, Artificial Sequence
  Description of Artificial Sequence: Synthetic oligonucleotide
uggcuaccuauagcaauac

SEQ ID NO: 1048560 - RNA, 19 nt, Artificial Sequence
  Description of Artificial Sequence: Synthetic oligonucleotide
acagaccagacgauguaau

SEQ ID NO: 1048561 - RNA, 19 nt, Artificial Sequence
  Description of Artificial Sequence: Synthetic oligonucleotide
ugaggauuccgugcccaaa

SEQ ID NO: 1048562 - RNA, 19 nt, Artificial Sequence
  Description of Artificial Sequence: Synthetic oligonucleotide
caguggacucacacuccag

SEQ ID NO: 1048563 - RNA, 19 nt, Artificial Sequence
  Description of Artificial Sequence: Synthetic oligonucleotide
gccccucagguucauggcg

SEQ ID NO: 1048564 - RNA, 19 nt, Artificial Sequence
  Description of Artificial Sequence: Synthetic oligonucleotide
cuccacguuccaacugaug

SEQ ID NO: 1048565 - RNA, 19 nt, Artificial Sequence
  Description of Artificial Sequence: Synthetic oligonucleotide
uccuuaguucuggccaccu

SEQ ID NO: 1048566 - RNA, 19 nt, Artificial Sequence
  Description of Artificial Sequence: Synthetic oligonucleotide
auauguguccugcguuguu

SEQ ID NO: 1048567 - RNA, 19 nt, Artificial Sequence
  Description of Artificial Sequence: Synthetic oligonucleotide
cugguagauauccuuaguu

SEQ ID NO: 1048568 - RNA, 19 nt, Artificial Sequence
  Description of Artificial Sequence: Synthetic oligonucleotide
acacugguagauauccuua

SEQ ID NO: 1048569 - RNA, 19 nt, Artificial Sequence
  Description of Artificial Sequence: Synthetic oligonucleotide
gaccacccuggccuucuug

SEQ ID NO: 1048570 - RNA, 19 nt, Artificial Sequence
  Description of Artificial Sequence: Synthetic oligonucleotide
agugaccugucaugucgaa

SEQ ID NO: 1048571 - RNA, 19 nt, Artificial Sequence
  Description of Artificial Sequence: Synthetic oligonucleotide
guccaaauguuguugccau

SEQ ID NO: 1048572 - RNA, 19 nt, Artificial Sequence
  Description of Artificial Sequence: Synthetic oligonucleotide
guaaguaaagguggggcau

SEQ ID NO: 1048573 - RNA, 19 nt, Artificial Sequence
  Description of Artificial Sequence: Synthetic oligonucleotide
ucugcaggccuaggcagaa

SEQ ID NO: 1048574 - RNA, 19 nt, Artificial Sequence
  Description of Artificial Sequence: Synthetic oligonucleotide
aguaaagguggggcaucug

SEQ ID NO: 1048575 - RNA, 19 nt, Artificial Sequence
  Description of Artificial Sequence: Synthetic oligonucleotide
accagugguuuccuccuuu

SEQ ID NO: 1048576 - RNA, 19 nt, Artificial Sequence
  Description of Artificial Sequence: Synthetic oligonucleotide
ggauuccgugcccaaacuc

SEQ ID NO: 1048577 - RNA, 19 nt, Artificial Sequence
  Description of Artificial Sequence: Synthetic oligonucleotide
caucgacuuuuaccauggc

SEQ ID NO: 1048578 - RNA, 19 nt, Artificial Sequence
  Description of Artificial Sequence: Synthetic oligonucleotide
cuugcgaaacaugggugca

SEQ ID NO: 1048579 - RNA, 19 nt, Artificial Sequence
  Description of Artificial Sequence: Synthetic oligonucleotide
uugcgaaacaugggugcaa

SEQ ID NO: 1048580 - RNA, 19 nt, Artificial Sequence
  Description of Artificial Sequence: Synthetic oligonucleotide
gaccuacuuacagucccca

SEQ ID NO: 1048581 - RNA, 19 nt, Artificial Sequence
  Description of Artificial Sequence: Synthetic oligonucleotide
caaacuccacguuccaacu

SEQ ID NO: 1048582 - RNA, 19 nt, Artificial Sequence
  Description of Artificial Sequence: Synthetic oligonucleotide
caccuauguucuguuauga

SEQ ID NO: 1048583 - RNA, 19 nt, Artificial Sequence
  Description of Artificial Sequence: Synthetic oligonucleotide
gaaagcacggcuggacugu

SEQ ID NO: 1048584 - RNA, 19 nt, Artificial Sequence
  Description of Artificial Sequence: Synthetic oligonucleotide
caaccucuagugaccuguc

SEQ ID NO: 1048585 - RNA, 19 nt, Artificial Sequence
  Description of Artificial Sequence: Synthetic oligonucleotide
ggaaguggucccauaagaa

SEQ ID NO: 1048586 - RNA, 19 nt, Artificial Sequence
  Description of Artificial Sequence: Synthetic oligonucleotide
ccaccuauguucuguuaug

SEQ ID NO: 1048587 - RNA, 19 nt, Artificial Sequence
  Description of Artificial Sequence: Synthetic oligonucleotide
gacuuuuaccauggcuuaa

SEQ ID NO: 1048588 - RNA, 19 nt, Artificial Sequence
  Description of Artificial Sequence: Synthetic oligonucleotide
ccugcguuguucugcaauc

SEQ ID NO: 1048589 - RNA, 19 nt, Artificial Sequence
  Description of Artificial Sequence: Synthetic oligonucleotide
cacuucaaguacccauaca

SEQ ID NO: 1048590 - RNA, 19 nt, Artificial Sequence
  Description of Artificial Sequence: Synthetic oligonucleotide
ccagaccuacuuacagucc

SEQ ID NO: 1048591 - RNA, 19 nt, Artificial Sequence
  Description of Artificial Sequence: Synthetic oligonucleotide
auccaaacgaagggccagu

SEQ ID NO: 1048592 - RNA, 19 nt, Artificial Sequence
  Description of Artificial Sequence: Synthetic oligonucleotide
guuggcacuggaugcaaau

SEQ ID NO: 1048593 - RNA, 19 nt, Artificial Sequence
  Description of Artificial Sequence: Synthetic oligonucleotide
uccaaacgaagggccagua

SEQ ID NO: 1048594 - RNA, 19 nt, Artificial Sequence
  Description of Artificial Sequence: Synthetic oligonucleotide
ggcaacaacaauggucauc

SEQ ID NO: 1048595 - RNA, 19 nt, Artificial Sequence
  Description of Artificial Sequence: Synthetic oligonucleotide
cauagagcgcaggaacaga

SEQ ID NO: 1048596 - RNA, 19 nt, Artificial Sequence
  Description of Artificial Sequence: Synthetic oligonucleotide
ccaaacgaagggccaguag

SEQ ID NO: 1048597 - RNA, 19 nt, Artificial Sequence
  Description of Artificial Sequence: Synthetic oligonucleotide
agccaucgacuuuuaccau

SEQ ID NO: 1048598 - RNA, 19 nt, Artificial Sequence
  Description of Artificial Sequence: Synthetic oligonucleotide
cacaaccucuagugaccug

SEQ ID NO: 1048599 - RNA, 19 nt, Artificial Sequence
  Description of Artificial Sequence: Synthetic oligonucleotide
cccacuggcuaccuauagc

SEQ ID NO: 1048600 - RNA, 19 nt, Artificial Sequence
  Description of Artificial Sequence: Synthetic oligonucleotide
cacacugguagauauccuu

SEQ ID NO: 1048601 - RNA, 19 nt, Artificial Sequence
  Description of Artificial Sequence: Synthetic oligonucleotide
ggccauccaauuugugaac

SEQ ID NO: 1048602 - RNA, 19 nt, Artificial Sequence
  Description of Artificial Sequence: Synthetic oligonucleotide
ccauagagcgcaggaacag

SEQ ID NO: 1048603 - RNA, 19 nt, Artificial Sequence
  Description of Artificial Sequence: Synthetic oligonucleotide
cagaccagacgauguaaua

SEQ ID NO: 1048604 - RNA, 19 nt, Artificial Sequence
  Description of Artificial Sequence: Synthetic oligonucleotide
gugcgcuuuagucuggcau

SEQ ID NO: 1048605 - RNA, 19 nt, Artificial Sequence
  Description of Artificial Sequence: Synthetic oligonucleotide
caucuuccaauacuuuuau

SEQ ID NO: 1048606 - RNA, 19 nt, Artificial Sequence
  Description of Artificial Sequence: Synthetic oligonucleotide
ugugaacaagcaggaucua

SEQ ID NO: 1048607 - RNA, 19 nt, Artificial Sequence
  Description of Artificial Sequence: Synthetic oligonucleotide
uaucuucaugguggagauc

SEQ ID NO: 1048608 - RNA, 19 nt, Artificial Sequence
  Description of Artificial Sequence: Synthetic oligonucleotide
aucccuggguggguaccac

SEQ ID NO: 1048609 - RNA, 19 nt, Artificial Sequence
  Description of Artificial Sequence: Synthetic oligonucleotide
cagguguguccagaccuac

SEQ ID NO: 1048610 - RNA, 19 nt, Artificial Sequence
  Description of Artificial Sequence: Synthetic oligonucleotide
ugccauuggaagggcucac

SEQ ID NO: 1048611 - RNA, 19 nt, Artificial Sequence
  Description of Artificial Sequence: Synthetic oligonucleotide
aaagcacggcuggacugua

SEQ ID NO: 1048612 - RNA, 19 nt, Artificial Sequence
  Description of Artificial Sequence: Synthetic oligonucleotide
caacugaugcuccaacaau

SEQ ID NO: 1048613 - RNA, 19 nt, Artificial Sequence
  Description of Artificial Sequence: Synthetic oligonucleotide
gaacuucaccgaggcggcc

SEQ ID NO: 1048614 - RNA, 19 nt, Artificial Sequence
  Description of Artificial Sequence: Synthetic oligonucleotide
ggacucacacuccagcccu

SEQ ID NO: 1048615 - RNA, 19 nt, Artificial Sequence
  Description of Artificial Sequence: Synthetic oligonucleotide
uggccaccuauguucuguu

SEQ ID NO: 1048616 - RNA, 19 nt, Artificial Sequence
  Description of Artificial Sequence: Synthetic oligonucleotide
gccauccaauuugugaaca

SEQ ID NO: 1048617 - RNA, 19 nt, Artificial Sequence
  Description of Artificial Sequence: Synthetic oligonucleotide
ggauuugacacuguauauu

SEQ ID NO: 1048618 - RNA, 19 nt, Artificial Sequence
  Description of Artificial Sequence: Synthetic oligonucleotide
cacccuggccuucuugcga

SEQ ID NO: 1048619 - RNA, 19 nt, Artificial Sequence
  Description of Artificial Sequence: Synthetic oligonucleotide
cuccacugaaugaugccau

SEQ ID NO: 1048620 - RNA, 19 nt, Artificial Sequence
  Description of Artificial Sequence: Synthetic oligonucleotide
cauuguggccauccaauuu

SEQ ID NO: 1048621 - RNA, 19 nt, Artificial Sequence
  Description of Artificial Sequence: Synthetic oligonucleotide
cugcguuguucugcaauca

SEQ ID NO: 1048622 - RNA, 19 nt, Artificial Sequence
  Description of Artificial Sequence: Synthetic oligonucleotide
gguguguccagaccuacuu

SEQ ID NO: 1048623 - RNA, 19 nt, Artificial Sequence
  Description of Artificial Sequence: Synthetic oligonucleotide
ggcuaccuauagcaauaca

SEQ ID NO: 1048624 - RNA, 19 nt, Artificial Sequence
  Description of Artificial Sequence: Synthetic oligonucleotide
ggacagggaaagcacggcu

SEQ ID NO: 1048625 - RNA, 19 nt, Artificial Sequence
  Description of Artificial Sequence: Synthetic oligonucleotide
gcguuguucugcaaucaca

SEQ ID NO: 1048626 - RNA, 19 nt, Artificial Sequence
  Description of Artificial Sequence: Synthetic oligonucleotide
gcaacagacaccggagaaa

SEQ ID NO: 1048627 - RNA, 19 nt, Artificial Sequence
  Description of Artificial Sequence: Synthetic oligonucleotide
ccacaaccauauuggagca

SEQ ID NO: 1048628 - RNA, 19 nt, Artificial Sequence
  Description of Artificial Sequence: Synthetic oligonucleotide
gccaccuauguucuguuau

SEQ ID NO: 1048629 - RNA, 19 nt, Artificial Sequence
  Description of Artificial Sequence: Synthetic oligonucleotide
cagcaaucaacauggccuu

SEQ ID NO: 1048630 - RNA, 19 nt, Artificial Sequence
  Description of Artificial Sequence: Synthetic oligonucleotide
acuccacguuccaacugau

SEQ ID NO: 1048631 - RNA, 19 nt, Artificial Sequence
  Description of Artificial Sequence: Synthetic oligonucleotide
aagcacggcuggacuguau

SEQ ID NO: 1048632 - RNA, 19 nt, Artificial Sequence
  Description of Artificial Sequence: Synthetic oligonucleotide
gcgcaggaacagaacagac

SEQ ID NO: 1048633 - RNA, 19 nt, Artificial Sequence
  Description of Artificial Sequence: Synthetic oligonucleotide
cuggccaccuauguucugu

SEQ ID NO: 1048634 - RNA, 19 nt, Artificial Sequence
  Description of Artificial Sequence: Synthetic oligonucleotide
ggaauacaggagaaagcau

SEQ ID NO: 1048635 - RNA, 19 nt, Artificial Sequence
  Description of Artificial Sequence: Synthetic oligonucleotide
cugcucgauauugaggauu

SEQ ID NO: 1048636 - RNA, 19 nt, Artificial Sequence
  Description of Artificial Sequence: Synthetic oligonucleotide
ggugcgcuuuagucuggca

SEQ ID NO: 1048637 - RNA, 19 nt, Artificial Sequence
  Description of Artificial Sequence: Synthetic oligonucleotide
cacaaccauauuggagcaa

SEQ ID NO: 1048638 - RNA, 19 nt, Artificial Sequence
  Description of Artificial Sequence: Synthetic oligonucleotide
ccggagaaacaaagaacaa

SEQ ID NO: 1048639 - RNA, 19 nt, Artificial Sequence
  Description of Artificial Sequence: Synthetic oligonucleotide
ggaagggcucacugauaaa

SEQ ID NO: 1048640 - RNA, 19 nt, Artificial Sequence
  Description of Artificial Sequence: Synthetic oligonucleotide
gucggggacaagggaagua

SEQ ID NO: 1048641 - RNA, 19 nt, Artificial Sequence
  Description of Artificial Sequence: Synthetic oligonucleotide
ggguggagggagaacauau

SEQ ID NO: 1048642 - RNA, 19 nt, Artificial Sequence
  Description of Artificial Sequence: Synthetic oligonucleotide
gcucgauauugaggauucc

SEQ ID NO: 1048643 - RNA, 19 nt, Artificial Sequence
  Description of Artificial Sequence: Synthetic oligonucleotide
gggugcaauuuuaggaggu

SEQ ID NO: 1048644 - RNA, 19 nt, Artificial Sequence
  Description of Artificial Sequence: Synthetic oligonucleotide
ggagaucauaugaaauguu

SEQ ID NO: 1048645 - RNA, 19 nt, Artificial Sequence
  Description of Artificial Sequence: Synthetic oligonucleotide
gucuggcauuucaauauuu

SEQ ID NO: 1048646 - RNA, 19 nt, Artificial Sequence
  Description of Artificial Sequence: Synthetic oligonucleotide
ccacguuccaacugaugcu

SEQ ID NO: 1048647 - RNA, 19 nt, Artificial Sequence
  Description of Artificial Sequence: Synthetic oligonucleotide
cgacuuuuaccauggcuua

SEQ ID NO: 1048648 - RNA, 19 nt, Artificial Sequence
  Description of Artificial Sequence: Synthetic oligonucleotide
cccauaagaaccacaucuu

SEQ ID NO: 1048649 - RNA, 19 nt, Artificial Sequence
  Description of Artificial Sequence: Synthetic oligonucleotide
agcccugguggugcgcuuu

SEQ ID NO: 1048650 - RNA, 19 nt, Artificial Sequence
  Description of Artificial Sequence: Synthetic oligonucleotide
ggugcaauuuuaggagguu

SEQ ID NO: 1048651 - RNA, 19 nt, Artificial Sequence
  Description of Artificial Sequence: Synthetic oligonucleotide
gcccugcaaaccugcuguc

SEQ ID NO: 1048652 - RNA, 19 nt, Artificial Sequence
  Description of Artificial Sequence: Synthetic oligonucleotide
ggcauguaaucaugccauu

SEQ ID NO: 1048653 - RNA, 19 nt, Artificial Sequence
  Description of Artificial Sequence: Synthetic oligonucleotide
gcaauacaguugagccaca

SEQ ID NO: 1048654 - RNA, 19 nt, Artificial Sequence
  Description of Artificial Sequence: Synthetic oligonucleotide
ggccaccuauguucuguua

SEQ ID NO: 1048655 - RNA, 19 nt, Artificial Sequence
  Description of Artificial Sequence: Synthetic oligonucleotide
guccugcguuguucugcaa

SEQ ID NO: 1048656 - RNA, 19 nt, Artificial Sequence
  Description of Artificial Sequence: Synthetic oligonucleotide
gguggagggagaacauauu

SEQ ID NO: 1048657 - RNA, 19 nt, Artificial Sequence
  Description of Artificial Sequence: Synthetic oligonucleotide
gccauuggaagggcucacu

SEQ ID NO: 1048658 - RNA, 19 nt, Artificial Sequence
  Description of Artificial Sequence: Synthetic oligonucleotide
ccgugcccaaacuccacgu

SEQ ID NO: 1048659 - RNA, 19 nt, Artificial Sequence
  Description of Artificial Sequence: Synthetic oligonucleotide
gcgaaacaugggugcaauu

SEQ ID NO: 1048660 - RNA, 19 nt, Artificial Sequence
  Description of Artificial Sequence: Synthetic oligonucleotide
gcgcuuuagucuggcauuu

SEQ ID NO: 1048661 - RNA, 19 nt, Artificial Sequence
  Description of Artificial Sequence: Synthetic oligonucleotide
caccagugguuuccuccuu

SEQ ID NO: 1048662 - RNA, 19 nt, Artificial Sequence
  Description of Artificial Sequence: Synthetic oligonucleotide
aauuugugucaucaaagac

SEQ ID NO: 1048663 - RNA, 19 nt, Artificial Sequence
  Description of Artificial Sequence: Synthetic oligonucleotide
ucagugaaaacauacccgg

SEQ ID NO: 1048664 - RNA, 19 nt, Artificial Sequence
  Description of Artificial Sequence: Synthetic oligonucleotide
aagaguuccuugcauuucc

SEQ ID NO: 1048665 - RNA, 19 nt, Artificial Sequence
  Description of Artificial Sequence: Synthetic oligonucleotide
gagaauauagcuccucugg

SEQ ID NO: 1048666 - RNA, 19 nt, Artificial Sequence
  Description of Artificial Sequence: Synthetic oligonucleotide
auuuuaacgagccuuucuc

SEQ ID NO: 1048667 - RNA, 19 nt, Artificial Sequence
  Description of Artificial Sequence: Synthetic oligonucleotide
cuugcuaccuccaacacag

SEQ ID NO: 1048668 - RNA, 19 nt, Artificial Sequence
  Description of Artificial Sequence: Synthetic oligonucleotide
auuggcuuaaggcauacag

SEQ ID NO: 1048669 - RNA, 19 nt, Artificial Sequence
  Description of Artificial Sequence: Synthetic oligonucleotide
aguaaauauuggcuuaagg

SEQ ID NO: 1048670 - RNA, 19 nt, Artificial Sequence
  Description of Artificial Sequence: Synthetic oligonucleotide
aauauagcuccucugggcu

SEQ ID NO: 1048671 - RNA, 19 nt, Artificial Sequence
  Description of Artificial Sequence: Synthetic oligonucleotide
aaugagcugugacaguccg

SEQ ID NO: 1048672 - RNA, 19 nt, Artificial Sequence
  Description of Artificial Sequence: Synthetic oligonucleotide
auaagcaccaucgucaguc

SEQ ID NO: 1048673 - RNA, 19 nt, Artificial Sequence
  Description of Artificial Sequence: Synthetic oligonucleotide
uaaguacucucacaggaag

SEQ ID NO: 1048674 - RNA, 19 nt, Artificial Sequence
  Description of Artificial Sequence: Synthetic oligonucleotide
aaaugugaaaugcuggcaa

SEQ ID NO: 1048675 - RNA, 19 nt, Artificial Sequence
  Description of Artificial Sequence: Synthetic oligonucleotide
ucaaauuugugucaucaaa

SEQ ID NO: 1048676 - RNA, 19 nt, Artificial Sequence
  Description of Artificial Sequence: Synthetic oligonucleotide
agagucauaagcaccaucg

SEQ ID NO: 1048677 - RNA, 19 nt, Artificial Sequence
  Description of Artificial Sequence: Synthetic oligonucleotide
ucuugacucaugcuguccg

SEQ ID NO: 1048678 - RNA, 19 nt, Artificial Sequence
  Description of Artificial Sequence: Synthetic oligonucleotide
gucuuaaguacucucacag

SEQ ID NO: 1048679 - RNA, 19 nt, Artificial Sequence
  Description of Artificial Sequence: Synthetic oligonucleotide
aaacauacccgguagcaga

SEQ ID NO: 1048680 - RNA, 19 nt, Artificial Sequence
  Description of Artificial Sequence: Synthetic oligonucleotide
uggcuuaaggcauacagca

SEQ ID NO: 1048681 - RNA, 19 nt, Artificial Sequence
  Description of Artificial Sequence: Synthetic oligonucleotide
aaaugcaggaucucccgag

SEQ ID NO: 1048682 - RNA, 19 nt, Artificial Sequence
  Description of Artificial Sequence: Synthetic oligonucleotide
uuuuguggccaauacuggg

SEQ ID NO: 1048683 - RNA, 19 nt, Artificial Sequence
  Description of Artificial Sequence: Synthetic oligonucleotide
aagaguggcacaccucugg

SEQ ID NO: 1048684 - RNA, 19 nt, Artificial Sequence
  Description of Artificial Sequence: Synthetic oligonucleotide
cacuacuacagacacagcc

SEQ ID NO: 1048685 - RNA, 19 nt, Artificial Sequence
  Description of Artificial Sequence: Synthetic oligonucleotide
ucaagaguggcacaccucu

SEQ ID NO: 1048686 - RNA, 19 nt, Artificial Sequence
  Description of Artificial Sequence: Synthetic oligonucleotide
agugcuucccacaagcugc

SEQ ID NO: 1048687 - RNA, 19 nt, Artificial Sequence
  Description of Artificial Sequence: Synthetic oligonucleotide
aauguggaggucuuaagua

SEQ ID NO: 1048688 - RNA, 19 nt, Artificial Sequence
  Description of Artificial Sequence: Synthetic oligonucleotide
acuacuacagacacagccc

SEQ ID NO: 1048689 - RNA, 19 nt, Artificial Sequence
  Description of Artificial Sequence: Synthetic oligonucleotide
gaauauagcuccucugggc

SEQ ID NO: 1048690 - RNA, 19 nt, Artificial Sequence
  Description of Artificial Sequence: Synthetic oligonucleotide
agagugugcacuuggaaug

SEQ ID NO: 1048691 - RNA, 19 nt, Artificial Sequence
  Description of Artificial Sequence: Synthetic oligonucleotide
ucuuaaguacucucacagg

SEQ ID NO: 1048692 - RNA, 19 nt, Artificial Sequence
  Description of Artificial Sequence: Synthetic oligonucleotide
agagguaugcaccggucgc

SEQ ID NO: 1048693 - RNA, 19 nt, Artificial Sequence
  Description of Artificial Sequence: Synthetic oligonucleotide
uacugggcacauuuuaacg

SEQ ID NO: 1048694 - RNA, 19 nt, Artificial Sequence
  Description of Artificial Sequence: Synthetic oligonucleotide
uuuguggccaauacugggc

SEQ ID NO: 1048695 - RNA, 19 nt, Artificial Sequence
  Description of Artificial Sequence: Synthetic oligonucleotide
uuuuaacgagccuuucucc

SEQ ID NO: 1048696 - RNA, 19 nt, Artificial Sequence
  Description of Artificial Sequence: Synthetic oligonucleotide
uuuaacgagccuuucucca

SEQ ID NO: 1048697 - RNA, 19 nt, Artificial Sequence
  Description of Artificial Sequence: Synthetic oligonucleotide
agcaugaccacaccccggc

SEQ ID NO: 1048698 - RNA, 19 nt, Artificial Sequence
  Description of Artificial Sequence: Synthetic oligonucleotide
uuuuaucaaacuggcauug

SEQ ID NO: 1048699 - RNA, 19 nt, Artificial Sequence
  Description of Artificial Sequence: Synthetic oligonucleotide
ucgaucacagccagguagg

SEQ ID NO: 1048700 - RNA, 19 nt, Artificial Sequence
  Description of Artificial Sequence: Synthetic oligonucleotide
uccgucagugaaaacauac

SEQ ID NO: 1048701 - RNA, 19 nt, Artificial Sequence
  Description of Artificial Sequence: Synthetic oligonucleotide
aaauauuggcuuaaggcau

SEQ ID NO: 1048702 - RNA, 19 nt, Artificial Sequence
  Description of Artificial Sequence: Synthetic oligonucleotide
aaaacauacccgguagcag

SEQ ID NO: 1048703 - RNA, 19 nt, Artificial Sequence
  Description of Artificial Sequence: Synthetic oligonucleotide
uuggcuuaaggcauacagc

SEQ ID NO: 1048704 - RNA, 19 nt, Artificial Sequence
  Description of Artificial Sequence: Synthetic oligonucleotide
uucaauccuggcuugcucc

SEQ ID NO: 1048705 - RNA, 19 nt, Artificial Sequence
  Description of Artificial Sequence: Synthetic oligonucleotide
gagagugcuucccacaagc

SEQ ID NO: 1048706 - RNA, 19 nt, Artificial Sequence
  Description of Artificial Sequence: Synthetic oligonucleotide
aggucuuaaguacucucac

SEQ ID NO: 1048707 - RNA, 19 nt, Artificial Sequence
  Description of Artificial Sequence: Synthetic oligonucleotide
ugaaaacauacccgguagc

SEQ ID NO: 1048708 - RNA, 19 nt, Artificial Sequence
  Description of Artificial Sequence: Synthetic oligonucleotide
ugcauuucccauugugagg

SEQ ID NO: 1048709 - RNA, 19 nt, Artificial Sequence
  Description of Artificial Sequence: Synthetic oligonucleotide
acagccagguaggagaagc

SEQ ID NO: 1048710 - RNA, 19 nt, Artificial Sequence
  Description of Artificial Sequence: Synthetic oligonucleotide
aaaaugugaaaugcuggca

SEQ ID NO: 1048711 - RNA, 19 nt, Artificial Sequence
  Description of Artificial Sequence: Synthetic oligonucleotide
ugagaauauagcuccucug

SEQ ID NO: 1048712 - RNA, 19 nt, Artificial Sequence
  Description of Artificial Sequence: Synthetic oligonucleotide
ucagagaucagugucaauu

SEQ ID NO: 1048713 - RNA, 19 nt, Artificial Sequence
  Description of Artificial Sequence: Synthetic oligonucleotide
aauggagggacugauucca

SEQ ID NO: 1048714 - RNA, 19 nt, Artificial Sequence
  Description of Artificial Sequence: Synthetic oligonucleotide
agagaucagugucaauuuc

SEQ ID NO: 1048715 - RNA, 19 nt, Artificial Sequence
  Description of Artificial Sequence: Synthetic oligonucleotide
ucuggaugagccccaugcg

SEQ ID NO: 1048716 - RNA, 19 nt, Artificial Sequence
  Description of Artificial Sequence: Synthetic oligonucleotide
aacuucgcucccucgauca

SEQ ID NO: 1048717 - RNA, 19 nt, Artificial Sequence
  Description of Artificial Sequence: Synthetic oligonucleotide
uccaggauacguuucggug

SEQ ID NO: 1048718 - RNA, 19 nt, Artificial Sequence
  Description of Artificial Sequence: Synthetic oligonucleotide
aacacaggcaacggggcgg

SEQ ID NO: 1048719 - RNA, 19 nt, Artificial Sequence
  Description of Artificial Sequence: Synthetic oligonucleotide
agugaguuggccagugugc

SEQ ID NO: 1048720 - RNA, 19 nt, Artificial Sequence
  Description of Artificial Sequence: Synthetic oligonucleotide
aaacuucgcucccucgauc

SEQ ID NO: 1048721 - RNA, 19 nt, Artificial Sequence
  Description of Artificial Sequence: Synthetic oligonucleotide
acuguacacaccccacuac

SEQ ID NO: 1048722 - RNA, 19 nt, Artificial Sequence
  Description of Artificial Sequence: Synthetic oligonucleotide
auaaacuucgcucccucga

SEQ ID NO: 1048723 - RNA, 19 nt, Artificial Sequence
  Description of Artificial Sequence: Synthetic oligonucleotide
uuaaguacucucacaggaa

SEQ ID NO: 1048724 - RNA, 19 nt, Artificial Sequence
  Description of Artificial Sequence: Synthetic oligonucleotide
gacucucggacuuugaaaa

SEQ ID NO: 1048725 - RNA, 19 nt, Artificial Sequence
  Description of Artificial Sequence: Synthetic oligonucleotide
cacgauggggccaugcucc

SEQ ID NO: 1048726 - RNA, 19 nt, Artificial Sequence
  Description of Artificial Sequence: Synthetic oligonucleotide
ucucggacuuugaaaagga

SEQ ID NO: 1048727 - RNA, 19 nt, Artificial Sequence
  Description of Artificial Sequence: Synthetic oligonucleotide
auuucaaauuugugucauc

SEQ ID NO: 1048728 - RNA, 19 nt, Artificial Sequence
  Description of Artificial Sequence: Synthetic oligonucleotide
gauacguuucgguggccgg

SEQ ID NO: 1048729 - RNA, 19 nt, Artificial Sequence
  Description of Artificial Sequence: Synthetic oligonucleotide
gucauaagcaccaucguca

SEQ ID NO: 1048730 - RNA, 19 nt, Artificial Sequence
  Description of Artificial Sequence: Synthetic oligonucleotide
aagccacccaauguggagg

SEQ ID NO: 1048731 - RNA, 19 nt, Artificial Sequence
  Description of Artificial Sequence: Synthetic oligonucleotide
agggacugauuccagaggu

SEQ ID NO: 1048732 - RNA, 19 nt, Artificial Sequence
  Description of Artificial Sequence: Synthetic oligonucleotide
aguguaccacgauggggcc

SEQ ID NO: 1048733 - RNA, 19 nt, Artificial Sequence
  Description of Artificial Sequence: Synthetic oligonucleotide
agcugugacaguccgucag

SEQ ID NO: 1048734 - RNA, 19 nt, Artificial Sequence
  Description of Artificial Sequence: Synthetic oligonucleotide
gauggggccaugcuccgag

SEQ ID NO: 1048735 - RNA, 19 nt, Artificial Sequence
  Description of Artificial Sequence: Synthetic oligonucleotide
agaguggcacaccucuggg

SEQ ID NO: 1048736 - RNA, 19 nt, Artificial Sequence
  Description of Artificial Sequence: Synthetic oligonucleotide
caggaagagucauaagcac

SEQ ID NO: 1048737 - RNA, 19 nt, Artificial Sequence
  Description of Artificial Sequence: Synthetic oligonucleotide
auugugaggcuccaggaua

SEQ ID NO: 1048738 - RNA, 19 nt, Artificial Sequence
  Description of Artificial Sequence: Synthetic oligonucleotide
cucucggacuuugaaaagg

SEQ ID NO: 1048739 - RNA, 19 nt, Artificial Sequence
  Description of Artificial Sequence: Synthetic oligonucleotide
uucaaauuugugucaucaa

SEQ ID NO: 1048740 - RNA, 19 nt, Artificial Sequence
  Description of Artificial Sequence: Synthetic oligonucleotide
ugagcugugacaguccguc

SEQ ID NO: 1048741 - RNA, 19 nt, Artificial Sequence
  Description of Artificial Sequence: Synthetic oligonucleotide
accuagaaggcuacuguac

SEQ ID NO: 1048742 - RNA, 19 nt, Artificial Sequence
  Description of Artificial Sequence: Synthetic oligonucleotide
aacauacccgguagcagag

SEQ ID NO: 1048743 - RNA, 19 nt, Artificial Sequence
  Description of Artificial Sequence: Synthetic oligonucleotide
cagagguaugcaccggucg

SEQ ID NO: 1048744 - RNA, 19 nt, Artificial Sequence
  Description of Artificial Sequence: Synthetic oligonucleotide
ugaguaaauauuggcuuaa

SEQ ID NO: 1048745 - RNA, 19 nt, Artificial Sequence
  Description of Artificial Sequence: Synthetic oligonucleotide
uaaacuucgcucccucgau

SEQ ID NO: 1048746 - RNA, 19 nt, Artificial Sequence
  Description of Artificial Sequence: Synthetic oligonucleotide
ugacucucggacuuugaaa

SEQ ID NO: 1048747 - RNA, 19 nt, Artificial Sequence
  Description of Artificial Sequence: Synthetic oligonucleotide
ggagaagcgcagcuggucg

SEQ ID NO: 1048748 - RNA, 19 nt, Artificial Sequence
  Description of Artificial Sequence: Synthetic oligonucleotide
agucauuauccuccuggug

SEQ ID NO: 1048749 - RNA, 19 nt, Artificial Sequence
  Description of Artificial Sequence: Synthetic oligonucleotide
agaccaucucuuucucuuc

SEQ ID NO: 1048750 - RNA, 19 nt, Artificial Sequence
  Description of Artificial Sequence: Synthetic oligonucleotide
uacuguacacaccccacua

SEQ ID NO: 1048751 - RNA, 19 nt, Artificial Sequence
  Description of Artificial Sequence: Synthetic oligonucleotide
ugcaccggucgccaggacc

SEQ ID NO: 1048752 - RNA, 19 nt, Artificial Sequence
  Description of Artificial Sequence: Synthetic oligonucleotide
agcuugcuaccuccaacac

SEQ ID NO: 1048753 - RNA, 19 nt, Artificial Sequence
  Description of Artificial Sequence: Synthetic oligonucleotide
cagcuaacugcucccagcc

SEQ ID NO: 1048754 - RNA, 19 nt, Artificial Sequence
  Description of Artificial Sequence: Synthetic oligonucleotide
aagucaggccauguggugu

SEQ ID NO: 1048755 - RNA, 19 nt, Artificial Sequence
  Description of Artificial Sequence: Synthetic oligonucleotide
gagugagccugacucucgg

SEQ ID NO: 1048756 - RNA, 19 nt, Artificial Sequence
  Description of Artificial Sequence: Synthetic oligonucleotide
ugccgucuuucaauccugg

SEQ ID NO: 1048757 - RNA, 19 nt, Artificial Sequence
  Description of Artificial Sequence: Synthetic oligonucleotide
aauccuggcuugcuccaga

SEQ ID NO: 1048758 - RNA, 19 nt, Artificial Sequence
  Description of Artificial Sequence: Synthetic oligonucleotide
auauuggcuuaaggcauac

SEQ ID NO: 1048759 - RNA, 19 nt, Artificial Sequence
  Description of Artificial Sequence: Synthetic oligonucleotide
ugggcacauuuuaacgagc

SEQ ID NO: 1048760 - RNA, 19 nt, Artificial Sequence
  Description of Artificial Sequence: Synthetic oligonucleotide
caggauacguuucgguggc

SEQ ID NO: 1048761 - RNA, 19 nt, Artificial Sequence
  Description of Artificial Sequence: Synthetic oligonucleotide
gagugugcacuuggaaugg

SEQ ID NO: 1048762 - RNA, 19 nt, Artificial Sequence
  Description of Artificial Sequence: Synthetic oligonucleotide
ccaggauacguuucggugg

SEQ ID NO: 1048763 - RNA, 19 nt, Artificial Sequence
  Description of Artificial Sequence: Synthetic oligonucleotide
ggacugauuccagaggugg

SEQ ID NO: 1048764 - RNA, 19 nt, Artificial Sequence
  Description of Artificial Sequence: Synthetic oligonucleotide
ugcaggaucucccgagacu

SEQ ID NO: 1048765 - RNA, 19 nt, Artificial Sequence
  Description of Artificial Sequence: Synthetic oligonucleotide
uuaacgagccuuucuccau

SEQ ID NO: 1048766 - RNA, 19 nt, Artificial Sequence
  Description of Artificial Sequence: Synthetic oligonucleotide
uguacacaccccacuacua

SEQ ID NO: 1048767 - RNA, 19 nt, Artificial Sequence
  Description of Artificial Sequence: Synthetic oligonucleotide
aacgagccuuucuccauga

SEQ ID NO: 1048768 - RNA, 19 nt, Artificial Sequence
  Description of Artificial Sequence: Synthetic oligonucleotide
ucucccgagacuccugggu

SEQ ID NO: 1048769 - RNA, 19 nt, Artificial Sequence
  Description of Artificial Sequence: Synthetic oligonucleotide
cagugaguuggccagugug

SEQ ID NO: 1048770 - RNA, 19 nt, Artificial Sequence
  Description of Artificial Sequence: Synthetic oligonucleotide
ucaauccuggcuugcucca

SEQ ID NO: 1048771 - RNA, 19 nt, Artificial Sequence
  Description of Artificial Sequence: Synthetic oligonucleotide
guaugcaccggucgccagg

SEQ ID NO: 1048772 - RNA, 19 nt, Artificial Sequence
  Description of Artificial Sequence: Synthetic oligonucleotide
gaguaaauauuggcuuaag

SEQ ID NO: 1048773 - RNA, 19 nt, Artificial Sequence
  Description of Artificial Sequence: Synthetic oligonucleotide
cauccguuuucuaacuuca

SEQ ID NO: 1048774 - RNA, 19 nt, Artificial Sequence
  Description of Artificial Sequence: Synthetic oligonucleotide
acuguguaauaugacuuga

SEQ ID NO: 1048775 - RNA, 19 nt, Artificial Sequence
  Description of Artificial Sequence: Synthetic oligonucleotide
uggugcaauuuaauccgac

SEQ ID NO: 1048776 - RNA, 19 nt, Artificial Sequence
  Description of Artificial Sequence: Synthetic oligonucleotide
gaaaugcaggaucucccga

SEQ ID NO: 1048777 - RNA, 19 nt, Artificial Sequence
  Description of Artificial Sequence: Synthetic oligonucleotide
acucucggacuuugaaaag

SEQ ID NO: 1048778 - RNA, 19 nt, Artificial Sequence
  Description of Artificial Sequence: Synthetic oligonucleotide
ccugcugaguaaauauugg

SEQ ID NO: 1048779 - RNA, 19 nt, Artificial Sequence
  Description of Artificial Sequence: Synthetic oligonucleotide
acauuuuaacgagccuuuc

SEQ ID NO: 1048780 - RNA, 19 nt, Artificial Sequence
  Description of Artificial Sequence: Synthetic oligonucleotide
gaggucuuaaguacucuca

SEQ ID NO: 1048781 - RNA, 19 nt, Artificial Sequence
  Description of Artificial Sequence: Synthetic oligonucleotide
uccgagcugagugagccug

SEQ ID NO: 1048782 - RNA, 19 nt, Artificial Sequence
  Description of Artificial Sequence: Synthetic oligonucleotide
cacgucuccucgcucaccc

SEQ ID NO: 1048783 - RNA, 19 nt, Artificial Sequence
  Description of Artificial Sequence: Synthetic oligonucleotide
guuucgguggccggggagg

SEQ ID NO: 1048784 - RNA, 19 nt, Artificial Sequence
  Description of Artificial Sequence: Synthetic oligonucleotide
aauauuggcuuaaggcaua

SEQ ID NO: 1048785 - RNA, 19 nt, Artificial Sequence
  Description of Artificial Sequence: Synthetic oligonucleotide
gugacaguccgucagugaa

SEQ ID NO: 1048786 - RNA, 19 nt, Artificial Sequence
  Description of Artificial Sequence: Synthetic oligonucleotide
aguguccagggaaugagcu

SEQ ID NO: 1048787 - RNA, 19 nt, Artificial Sequence
  Description of Artificial Sequence: Synthetic oligonucleotide
agcagagguaugcaccggu

SEQ ID NO: 1048788 - RNA, 19 nt, Artificial Sequence
  Description of Artificial Sequence: Synthetic oligonucleotide
ucuuucaauccuggcuugc

SEQ ID NO: 1048789 - RNA, 19 nt, Artificial Sequence
  Description of Artificial Sequence: Synthetic oligonucleotide
uccuccuggugcaauuuaa

SEQ ID NO: 1048790 - RNA, 19 nt, Artificial Sequence
  Description of Artificial Sequence: Synthetic oligonucleotide
aguggaaaugcaggaucuc

SEQ ID NO: 1048791 - RNA, 19 nt, Artificial Sequence
  Description of Artificial Sequence: Synthetic oligonucleotide
cagggaaugagcugugaca

SEQ ID NO: 1048792 - RNA, 19 nt, Artificial Sequence
  Description of Artificial Sequence: Synthetic oligonucleotide
cgucagugaaaacauaccc

SEQ ID NO: 1048793 - RNA, 19 nt, Artificial Sequence
  Description of Artificial Sequence: Synthetic oligonucleotide
caggcaacggggcggagag

SEQ ID NO: 1048794 - RNA, 19 nt, Artificial Sequence
  Description of Artificial Sequence: Synthetic oligonucleotide
auacguuucgguggccggg

SEQ ID NO: 1048795 - RNA, 19 nt, Artificial Sequence
  Description of Artificial Sequence: Synthetic oligonucleotide
agaggggucuuuccucuug

SEQ ID NO: 1048796 - RNA, 19 nt, Artificial Sequence
  Description of Artificial Sequence: Synthetic oligonucleotide
uacguuucgguggccgggg

SEQ ID NO: 1048797 - RNA, 19 nt, Artificial Sequence
  Description of Artificial Sequence: Synthetic oligonucleotide
ugggaacagaugccugggc

SEQ ID NO: 1048798 - RNA, 19 nt, Artificial Sequence
  Description of Artificial Sequence: Synthetic oligonucleotide
aaccugcgcaucuccagaa

SEQ ID NO: 1048799 - RNA, 19 nt, Artificial Sequence
  Description of Artificial Sequence: Synthetic oligonucleotide
gaagguccccgaccugccg

SEQ ID NO: 1048800 - RNA, 19 nt, Artificial Sequence
  Description of Artificial Sequence: Synthetic oligonucleotide
aucgucagucucugccagg

SEQ ID NO: 1048801 - RNA, 19 nt, Artificial Sequence
  Description of Artificial Sequence: Synthetic oligonucleotide
uacccgguagcagagguau

SEQ ID NO: 1048802 - RNA, 19 nt, Artificial Sequence
  Description of Artificial Sequence: Synthetic oligonucleotide
aggagagugcuucccacaa

SEQ ID NO: 1048803 - RNA, 19 nt, Artificial Sequence
  Description of Artificial Sequence: Synthetic oligonucleotide
gaaccugcgcaucuccaga

SEQ ID NO: 1048804 - RNA, 19 nt, Artificial Sequence
  Description of Artificial Sequence: Synthetic oligonucleotide
uauagcuccucugggcuuc

SEQ ID NO: 1048805 - RNA, 19 nt, Artificial Sequence
  Description of Artificial Sequence: Synthetic oligonucleotide
acaccucugggcaagguga

SEQ ID NO: 1048806 - RNA, 19 nt, Artificial Sequence
  Description of Artificial Sequence: Synthetic oligonucleotide
uaagcaccaucgucagucu

SEQ ID NO: 1048807 - RNA, 19 nt, Artificial Sequence
  Description of Artificial Sequence: Synthetic oligonucleotide
aggugauucagggacucca

SEQ ID NO: 1048808 - RNA, 19 nt, Artificial Sequence
  Description of Artificial Sequence: Synthetic oligonucleotide
gugaguuggccagugugcc

SEQ ID NO: 1048809 - RNA, 19 nt, Artificial Sequence
  Description of Artificial Sequence: Synthetic oligonucleotide
caugaccacaccccggcuc

SEQ ID NO: 1048810 - RNA, 19 nt, Artificial Sequence
  Description of Artificial Sequence: Synthetic oligonucleotide
gucgcacuguguaauauga

SEQ ID NO: 1048811 - RNA, 19 nt, Artificial Sequence
  Description of Artificial Sequence: Synthetic oligonucleotide
ggaaugagcugugacaguc

SEQ ID NO: 1048812 - RNA, 19 nt, Artificial Sequence
  Description of Artificial Sequence: Synthetic oligonucleotide
uguaccacgauggggccau

SEQ ID NO: 1048813 - RNA, 19 nt, Artificial Sequence
  Description of Artificial Sequence: Synthetic oligonucleotide
caggccaugugguguagug

SEQ ID NO: 1048814 - RNA, 19 nt, Artificial Sequence
  Description of Artificial Sequence: Synthetic oligonucleotide
gagguaugcaccggucgcc

SEQ ID NO: 1048815 - RNA, 19 nt, Artificial Sequence
  Description of Artificial Sequence: Synthetic oligonucleotide
cacaccccggcucuucugc

SEQ ID NO: 1048816 - RNA, 19 nt, Artificial Sequence
  Description of Artificial Sequence: Synthetic oligonucleotide
agaucagugucaauuucaa

SEQ ID NO: 1048817 - RNA, 19 nt, Artificial Sequence
  Description of Artificial Sequence: Synthetic oligonucleotide
ggauacguuucgguggccg

SEQ ID NO: 1048818 - RNA, 19 nt, Artificial Sequence
  Description of Artificial Sequence: Synthetic oligonucleotide
ggaaccugcgcaucuccag

SEQ ID NO: 1048819 - RNA, 19 nt, Artificial Sequence
  Description of Artificial Sequence: Synthetic oligonucleotide
gugagaauauagcuccucu

SEQ ID NO: 1048820 - RNA, 19 nt, Artificial Sequence
  Description of Artificial Sequence: Synthetic oligonucleotide
ugcgggcaaggccaccacc

SEQ ID NO: 1048821 - RNA, 19 nt, Artificial Sequence
  Description of Artificial Sequence: Synthetic oligonucleotide
ucugcgggcaaggccacca

SEQ ID NO: 1048822 - RNA, 19 nt, Artificial Sequence
  Description of Artificial Sequence: Synthetic oligonucleotide
acaguccgucagugaaaac

SEQ ID NO: 1048823 - RNA, 19 nt, Artificial Sequence
  Description of Artificial Sequence: Synthetic oligonucleotide
ugugaggcuccaggauacg

SEQ ID NO: 1048824 - RNA, 19 nt, Artificial Sequence
  Description of Artificial Sequence: Synthetic oligonucleotide
cucaagaguggcacaccuc

SEQ ID NO: 1048825 - RNA, 19 nt, Artificial Sequence
  Description of Artificial Sequence: Synthetic oligonucleotide
gacaguccgucagugaaaa

SEQ ID NO: 1048826 - RNA, 19 nt, Artificial Sequence
  Description of Artificial Sequence: Synthetic oligonucleotide
cuuaaggcauacagcagcu

SEQ ID NO: 1048827 - RNA, 19 nt, Artificial Sequence
  Description of Artificial Sequence: Synthetic oligonucleotide
uggggccaugcuccgagcu

SEQ ID NO: 1048828 - RNA, 19 nt, Artificial Sequence
  Description of Artificial Sequence: Synthetic oligonucleotide
cagacagaagguccccgac

SEQ ID NO: 1048829 - RNA, 19 nt, Artificial Sequence
  Description of Artificial Sequence: Synthetic oligonucleotide
gucgccaggaccguggcca

SEQ ID NO: 1048830 - RNA, 19 nt, Artificial Sequence
  Description of Artificial Sequence: Synthetic oligonucleotide
cacagcuaacugcucccag

SEQ ID NO: 1048831 - RNA, 19 nt, Artificial Sequence
  Description of Artificial Sequence: Synthetic oligonucleotide
caagaguggcacaccucug

SEQ ID NO: 1048832 - RNA, 19 nt, Artificial Sequence
  Description of Artificial Sequence: Synthetic oligonucleotide
acgauggggccaugcuccg

SEQ ID NO: 1048833 - RNA, 19 nt, Artificial Sequence
  Description of Artificial Sequence: Synthetic oligonucleotide
cugccaggcucaagagugg

SEQ ID NO: 1048834 - RNA, 19 nt, Artificial Sequence
  Description of Artificial Sequence: Synthetic oligonucleotide
cauuuuaacgagccuuucu

SEQ ID NO: 1048835 - RNA, 19 nt, Artificial Sequence
  Description of Artificial Sequence: Synthetic oligonucleotide
gagaagaguuccuugcauu

SEQ ID NO: 1048836 - RNA, 19 nt, Artificial Sequence
  Description of Artificial Sequence: Synthetic oligonucleotide
auauagcuccucugggcuu

SEQ ID NO: 1048837 - RNA, 19 nt, Artificial Sequence
  Description of Artificial Sequence: Synthetic oligonucleotide
agccacccaauguggaggu

SEQ ID NO: 1048838 - RNA, 19 nt, Artificial Sequence
  Description of Artificial Sequence: Synthetic oligonucleotide
ccgucagugaaaacauacc

SEQ ID NO: 1048839 - RNA, 19 nt, Artificial Sequence
  Description of Artificial Sequence: Synthetic oligonucleotide
agaagagugugcacuugga

SEQ ID NO: 1048840 - RNA, 19 nt, Artificial Sequence
  Description of Artificial Sequence: Synthetic oligonucleotide
ggucuuaaguacucucaca

SEQ ID NO: 1048841 - RNA, 19 nt, Artificial Sequence
  Description of Artificial Sequence: Synthetic oligonucleotide
augugguguaguggaaaug

SEQ ID NO: 1048842 - RNA, 19 nt, Artificial Sequence
  Description of Artificial Sequence: Synthetic oligonucleotide
acccugggugagaauauag

SEQ ID NO: 1048843 - RNA, 19 nt, Artificial Sequence
  Description of Artificial Sequence: Synthetic oligonucleotide
uagcagagguaugcaccgg

SEQ ID NO: 1048844 - RNA, 19 nt, Artificial Sequence
  Description of Artificial Sequence: Synthetic oligonucleotide
ggacuccaaagucaggcca

SEQ ID NO: 1048845 - RNA, 19 nt, Artificial Sequence
  Description of Artificial Sequence: Synthetic oligonucleotide
uggaggucuuaaguacucu

SEQ ID NO: 1048846 - RNA, 19 nt, Artificial Sequence
  Description of Artificial Sequence: Synthetic oligonucleotide
ccgggugaaaggcaaaaug

SEQ ID NO: 1048847 - RNA, 19 nt, Artificial Sequence
  Description of Artificial Sequence: Synthetic oligonucleotide
uccacugauccugcacuga

SEQ ID NO: 1048848 - RNA, 19 nt, Artificial Sequence
  Description of Artificial Sequence: Synthetic oligonucleotide
cacauguguuuggcaaagg

SEQ ID NO: 1048849 - RNA, 19 nt, Artificial Sequence
  Description of Artificial Sequence: Synthetic oligonucleotide
ggagucgcccaugauaaac

SEQ ID NO: 1048850 - RNA, 19 nt, Artificial Sequence
  Description of Artificial Sequence: Synthetic oligonucleotide
aggcugauucuaaggacug

SEQ ID NO: 1048851 - RNA, 19 nt, Artificial Sequence
  Description of Artificial Sequence: Synthetic oligonucleotide
gucgccaaguuuuccaacu

SEQ ID NO: 1048852 - RNA, 19 nt, Artificial Sequence
  Description of Artificial Sequence: Synthetic oligonucleotide
agucgcccaugauaaacuu

SEQ ID NO: 1048853 - RNA, 19 nt, Artificial Sequence
  Description of Artificial Sequence: Synthetic oligonucleotide
uauuggcuuaaggcauaca

SEQ ID NO: 1048854 - RNA, 19 nt, Artificial Sequence
  Description of Artificial Sequence: Synthetic oligonucleotide
ugcccacauguguuuggca

SEQ ID NO: 1048855 - RNA, 19 nt, Artificial Sequence
  Description of Artificial Sequence: Synthetic oligonucleotide
gcaggcugauucuaaggac

SEQ ID NO: 1048856 - RNA, 19 nt, Artificial Sequence
  Description of Artificial Sequence: Synthetic oligonucleotide
ggcaacggggcggagagug

SEQ ID NO: 1048857 - RNA, 19 nt, Artificial Sequence
  Description of Artificial Sequence: Synthetic oligonucleotide
caacggggcggagagugcc

SEQ ID NO: 1048858 - RNA, 19 nt, Artificial Sequence
  Description of Artificial Sequence: Synthetic oligonucleotide
agcuaacugcucccagccu

SEQ ID NO: 1048859 - RNA, 19 nt, Artificial Sequence
  Description of Artificial Sequence: Synthetic oligonucleotide
gcaccggucgccaggaccg

SEQ ID NO: 1048860 - RNA, 19 nt, Artificial Sequence
  Description of Artificial Sequence: Synthetic oligonucleotide
uuucgguggccggggaggc

SEQ ID NO: 1048861 - RNA, 19 nt, Artificial Sequence
  Description of Artificial Sequence: Synthetic oligonucleotide
ccauccguuuucuaacuuc

SEQ ID NO: 1048862 - RNA, 19 nt, Artificial Sequence
  Description of Artificial Sequence: Synthetic oligonucleotide
agugugccuuuuguuccuc

SEQ ID NO: 1048863 - RNA, 19 nt, Artificial Sequence
  Description of Artificial Sequence: Synthetic oligonucleotide
auagcuccucugggcuucc

SEQ ID NO: 1048864 - RNA, 19 nt, Artificial Sequence
  Description of Artificial Sequence: Synthetic oligonucleotide
gcuugccuaaguguccagg

SEQ ID NO: 1048865 - RNA, 19 nt, Artificial Sequence
  Description of Artificial Sequence: Synthetic oligonucleotide
guccccgaccugccgaugc

SEQ ID NO: 1048866 - RNA, 19 nt, Artificial Sequence
  Description of Artificial Sequence: Synthetic oligonucleotide
cugugacaguccgucagug

SEQ ID NO: 1048867 - RNA, 19 nt, Artificial Sequence
  Description of Artificial Sequence: Synthetic oligonucleotide
cacucucacacgucuccuc

SEQ ID NO: 1048868 - RNA, 19 nt, Artificial Sequence
  Description of Artificial Sequence: Synthetic oligonucleotide
uccccgaccugccgaugcc

SEQ ID NO: 1048869 - RNA, 19 nt, Artificial Sequence
  Description of Artificial Sequence: Synthetic oligonucleotide
augcuccgagcugagugag

SEQ ID NO: 1048870 - RNA, 19 nt, Artificial Sequence
  Description of Artificial Sequence: Synthetic oligonucleotide
aggauacguuucgguggcc

SEQ ID NO: 1048871 - RNA, 19 nt, Artificial Sequence
  Description of Artificial Sequence: Synthetic oligonucleotide
cugacucucggacuuugaa

SEQ ID NO: 1048872 - RNA, 19 nt, Artificial Sequence
  Description of Artificial Sequence: Synthetic oligonucleotide
gcuccgagcugagugagcc

SEQ ID NO: 1048873 - RNA, 19 nt, Artificial Sequence
  Description of Artificial Sequence: Synthetic oligonucleotide
agcugucgcacuguguaau

SEQ ID NO: 1048874 - RNA, 19 nt, Artificial Sequence
  Description of Artificial Sequence: Synthetic oligonucleotide
ugcacacauugaccaggaa

SEQ ID NO: 1048875 - RNA, 19 nt, Artificial Sequence
  Description of Artificial Sequence: Synthetic oligonucleotide
uucagagaucagugucaau

SEQ ID NO: 1048876 - RNA, 19 nt, Artificial Sequence
  Description of Artificial Sequence: Synthetic oligonucleotide
accauccguuuucuaacuu

SEQ ID NO: 1048877 - RNA, 19 nt, Artificial Sequence
  Description of Artificial Sequence: Synthetic oligonucleotide
agcagcuugcuaccuccaa

SEQ ID NO: 1048878 - RNA, 19 nt, Artificial Sequence
  Description of Artificial Sequence: Synthetic oligonucleotide
cuggugcaauuuaauccga

SEQ ID NO: 1048879 - RNA, 19 nt, Artificial Sequence
  Description of Artificial Sequence: Synthetic oligonucleotide
cuguacacaccccacuacu

SEQ ID NO: 1048880 - RNA, 19 nt, Artificial Sequence
  Description of Artificial Sequence: Synthetic oligonucleotide
ggcccugcuugccuaagug

SEQ ID NO: 1048881 - RNA, 19 nt, Artificial Sequence
  Description of Artificial Sequence: Synthetic oligonucleotide
cacccaccuagaaggcuac

SEQ ID NO: 1048882 - RNA, 19 nt, Artificial Sequence
  Description of Artificial Sequence: Synthetic oligonucleotide
uccgggugaaaggcaaaau

SEQ ID NO: 1048883 - RNA, 19 nt, Artificial Sequence
  Description of Artificial Sequence: Synthetic oligonucleotide
cucgugggagagcuccuuc

SEQ ID NO: 1048884 - RNA, 19 nt, Artificial Sequence
  Description of Artificial Sequence: Synthetic oligonucleotide
acaggcaacggggcggaga

SEQ ID NO: 1048885 - RNA, 19 nt, Artificial Sequence
  Description of Artificial Sequence: Synthetic oligonucleotide
agguaugcaccggucgcca

SEQ ID NO: 1048886 - RNA, 19 nt, Artificial Sequence
  Description of Artificial Sequence: Synthetic oligonucleotide
ggugagaauauagcuccuc

SEQ ID NO: 1048887 - RNA, 19 nt, Artificial Sequence
  Description of Artificial Sequence: Synthetic oligonucleotide
cagaagaggggucuuuccu

SEQ ID NO: 1048888 - RNA, 19 nt, Artificial Sequence
  Description of Artificial Sequence: Synthetic oligonucleotide
ggcucugcgggcaaggcca

SEQ ID NO: 1048889 - RNA, 19 nt, Artificial Sequence
  Description of Artificial Sequence: Synthetic oligonucleotide
cuucuccgggugaaaggca

SEQ ID NO: 1048890 - RNA, 19 nt, Artificial Sequence
  Description of Artificial Sequence: Synthetic oligonucleotide
gagucgcccaugauaaacu

SEQ ID NO: 1048891 - RNA, 19 nt, Artificial Sequence
  Description of Artificial Sequence: Synthetic oligonucleotide
uccucgugggagagcuccu

SEQ ID NO: 1048892 - RNA, 19 nt, Artificial Sequence
  Description of Artificial Sequence: Synthetic oligonucleotide
ugccuucgcuucuuauuuu

SEQ ID NO: 1048893 - RNA, 19 nt, Artificial Sequence
  Description of Artificial Sequence: Synthetic oligonucleotide
cauacccgguagcagaggu

SEQ ID NO: 1048894 - RNA, 19 nt, Artificial Sequence
  Description of Artificial Sequence: Synthetic oligonucleotide
cucggacuuugaaaaggaa

SEQ ID NO: 1048895 - RNA, 19 nt, Artificial Sequence
  Description of Artificial Sequence: Synthetic oligonucleotide
cccgguagcagagguaugc

SEQ ID NO: 1048896 - RNA, 19 nt, Artificial Sequence
  Description of Artificial Sequence: Synthetic oligonucleotide
gcccacauguguuuggcaa

SEQ ID NO: 1048897 - RNA, 19 nt, Artificial Sequence
  Description of Artificial Sequence: Synthetic oligonucleotide
caugugguguaguggaaau

SEQ ID NO: 1048898 - RNA, 19 nt, Artificial Sequence
  Description of Artificial Sequence: Synthetic oligonucleotide
auacagcagcuugcuaccu

SEQ ID NO: 1048899 - RNA, 19 nt, Artificial Sequence
  Description of Artificial Sequence: Synthetic oligonucleotide
cacacgucuccucgcucac

SEQ ID NO: 1048900 - RNA, 19 nt, Artificial Sequence
  Description of Artificial Sequence: Synthetic oligonucleotide
ucaggccaugugguguagu

SEQ ID NO: 1048901 - RNA, 19 nt, Artificial Sequence
  Description of Artificial Sequence: Synthetic oligonucleotide
cugggucgccaaguuuucc

SEQ ID NO: 1048902 - RNA, 19 nt, Artificial Sequence
  Description of Artificial Sequence: Synthetic oligonucleotide
gguaugcaccggucgccag

SEQ ID NO: 1048903 - RNA, 19 nt, Artificial Sequence
  Description of Artificial Sequence: Synthetic oligonucleotide
caggugauucagggacucc

SEQ ID NO: 1048904 - RNA, 19 nt, Artificial Sequence
  Description of Artificial Sequence: Synthetic oligonucleotide
ccacauguguuuggcaaag

SEQ ID NO: 1048905 - RNA, 19 nt, Artificial Sequence
  Description of Artificial Sequence: Synthetic oligonucleotide
cagagaucagugucaauuu

SEQ ID NO: 1048906 - RNA, 19 nt, Artificial Sequence
  Description of Artificial Sequence: Synthetic oligonucleotide
ccugggugagaauauagcu

SEQ ID NO: 1048907 - RNA, 19 nt, Artificial Sequence
  Description of Artificial Sequence: Synthetic oligonucleotide
acaccccggcucuucugcu

SEQ ID NO: 1048908 - RNA, 19 nt, Artificial Sequence
  Description of Artificial Sequence: Synthetic oligonucleotide
cacaagcugccgucuuuca

SEQ ID NO: 1048909 - RNA, 19 nt, Artificial Sequence
  Description of Artificial Sequence: Synthetic oligonucleotide
cauugugaggcuccaggau

SEQ ID NO: 1048910 - RNA, 19 nt, Artificial Sequence
  Description of Artificial Sequence: Synthetic oligonucleotide
aacggggcggagagugccu

SEQ ID NO: 1048911 - RNA, 19 nt, Artificial Sequence
  Description of Artificial Sequence: Synthetic oligonucleotide
ugcggaaccugcgcaucuc

SEQ ID NO: 1048912 - RNA, 19 nt, Artificial Sequence
  Description of Artificial Sequence: Synthetic oligonucleotide
cagugucaauuucaaauuu

SEQ ID NO: 1048913 - RNA, 19 nt, Artificial Sequence
  Description of Artificial Sequence: Synthetic oligonucleotide
augcaccggucgccaggac

SEQ ID NO: 1048914 - RNA, 19 nt, Artificial Sequence
  Description of Artificial Sequence: Synthetic oligonucleotide
ccauugugaggcuccagga

SEQ ID NO: 1048915 - RNA, 19 nt, Artificial Sequence
  Description of Artificial Sequence: Synthetic oligonucleotide
gccgucuuucaauccuggc

SEQ ID NO: 1048916 - RNA, 19 nt, Artificial Sequence
  Description of Artificial Sequence: Synthetic oligonucleotide
cagugaaaacauacccggu

SEQ ID NO: 1048917 - RNA, 19 nt, Artificial Sequence
  Description of Artificial Sequence: Synthetic oligonucleotide
cugccuucgcuucuuauuu

SEQ ID NO: 1048918 - RNA, 19 nt, Artificial Sequence
  Description of Artificial Sequence: Synthetic oligonucleotide
ggcugauucuaaggacugc

SEQ ID NO: 1048919 - RNA, 19 nt, Artificial Sequence
  Description of Artificial Sequence: Synthetic oligonucleotide
cuugacucaugcuguccgu

SEQ ID NO: 1048920 - RNA, 19 nt, Artificial Sequence
  Description of Artificial Sequence: Synthetic oligonucleotide
ggagaagaguuccuugcau

SEQ ID NO: 1048921 - RNA, 19 nt, Artificial Sequence
  Description of Artificial Sequence: Synthetic oligonucleotide
ggaccguggccaugcacac

SEQ ID NO: 1048922 - RNA, 19 nt, Artificial Sequence
  Description of Artificial Sequence: Synthetic oligonucleotide
cgguugagcaugaccacac

SEQ ID NO: 1048923 - RNA, 19 nt, Artificial Sequence
  Description of Artificial Sequence: Synthetic oligonucleotide
caccaucgucagucucugc

SEQ ID NO: 1048924 - RNA, 19 nt, Artificial Sequence
  Description of Artificial Sequence: Synthetic oligonucleotide
ggggccaugcuccgagcug

SEQ ID NO: 1048925 - RNA, 19 nt, Artificial Sequence
  Description of Artificial Sequence: Synthetic oligonucleotide
aggagucgcccaugauaaa

SEQ ID NO: 1048926 - RNA, 19 nt, Artificial Sequence
  Description of Artificial Sequence: Synthetic oligonucleotide
ugcuguccgugcugugcau

SEQ ID NO: 1048927 - RNA, 19 nt, Artificial Sequence
  Description of Artificial Sequence: Synthetic oligonucleotide
gcucaagaguggcacaccu

SEQ ID NO: 1048928 - RNA, 19 nt, Artificial Sequence
  Description of Artificial Sequence: Synthetic oligonucleotide
ccggucgccaggaccgugg

SEQ ID NO: 1048929 - RNA, 19 nt, Artificial Sequence
  Description of Artificial Sequence: Synthetic oligonucleotide
cguuguggacagcucuucc

SEQ ID NO: 1048930 - RNA, 19 nt, Artificial Sequence
  Description of Artificial Sequence: Synthetic oligonucleotide
acgagccuuucuccaugau

SEQ ID NO: 1048931 - RNA, 19 nt, Artificial Sequence
  Description of Artificial Sequence: Synthetic oligonucleotide
cccaccuagaaggcuacug

SEQ ID NO: 1048932 - RNA, 19 nt, Artificial Sequence
  Description of Artificial Sequence: Synthetic oligonucleotide
gugcugugcauggcacuug

SEQ ID NO: 1048933 - RNA, 19 nt, Artificial Sequence
  Description of Artificial Sequence: Synthetic oligonucleotide
acguuucgguggccgggga

SEQ ID NO: 1048934 - RNA, 19 nt, Artificial Sequence
  Description of Artificial Sequence: Synthetic oligonucleotide
ggugaccugggccagugau

SEQ ID NO: 1048935 - RNA, 19 nt, Artificial Sequence
  Description of Artificial Sequence: Synthetic oligonucleotide
acgucuccucgcucaccca

SEQ ID NO: 1048936 - RNA, 19 nt, Artificial Sequence
  Description of Artificial Sequence: Synthetic oligonucleotide
ccuccuccguuguggacag

SEQ ID NO: 1048937 - RNA, 19 nt, Artificial Sequence
  Description of Artificial Sequence: Synthetic oligonucleotide
cacugaggagucgcccaug

SEQ ID NO: 1048938 - RNA, 19 nt, Artificial Sequence
  Description of Artificial Sequence: Synthetic oligonucleotide
gaccugggccagugaugac

SEQ ID NO: 1048939 - RNA, 19 nt, Artificial Sequence
  Description of Artificial Sequence: Synthetic oligonucleotide
gcaccaucgucagucucug

SEQ ID NO: 1048940 - RNA, 19 nt, Artificial Sequence
  Description of Artificial Sequence: Synthetic oligonucleotide
ggcucaagaguggcacacc

SEQ ID NO: 1048941 - RNA, 19 nt, Artificial Sequence
  Description of Artificial Sequence: Synthetic oligonucleotide
gcccaugauaaacuucgcu

SEQ ID NO: 1048942 - RNA, 19 nt, Artificial Sequence
  Description of Artificial Sequence: Synthetic oligonucleotide
cguuuucuaacuucagugu

SEQ ID NO: 1048943 - RNA, 19 nt, Artificial Sequence
  Description of Artificial Sequence: Synthetic oligonucleotide
acggggcggagagugccug

SEQ ID NO: 1048944 - RNA, 19 nt, Artificial Sequence
  Description of Artificial Sequence: Synthetic oligonucleotide
caucagcaagaggcaggug

SEQ ID NO: 1048945 - RNA, 19 nt, Artificial Sequence
  Description of Artificial Sequence: Synthetic oligonucleotide
gggucgccaaguuuuccaa

SEQ ID NO: 1048946 - RNA, 19 nt, Artificial Sequence
  Description of Artificial Sequence: Synthetic oligonucleotide
cuccgggugaaaggcaaaa

SEQ ID NO: 1048947 - RNA, 19 nt, Artificial Sequence
  Description of Artificial Sequence: Synthetic oligonucleotide
guguaccacgauggggcca

SEQ ID NO: 1048948 - RNA, 19 nt, Artificial Sequence
  Description of Artificial Sequence: Synthetic oligonucleotide
gacccugggugagaauaua

SEQ ID NO: 1048949 - RNA, 19 nt, Artificial Sequence
  Description of Artificial Sequence: Synthetic oligonucleotide
ccgucuuucaauccuggcu

SEQ ID NO: 1048950 - RNA, 19 nt, Artificial Sequence
  Description of Artificial Sequence: Synthetic oligonucleotide
cagcagcuugcuaccucca

SEQ ID NO: 1048951 - RNA, 19 nt, Artificial Sequence
  Description of Artificial Sequence: Synthetic oligonucleotide
ccccaugcggaaccugcgc

SEQ ID NO: 1048952 - RNA, 19 nt, Artificial Sequence
  Description of Artificial Sequence: Synthetic oligonucleotide
auacccgguagcagaggua

SEQ ID NO: 1048953 - RNA, 19 nt, Artificial Sequence
  Description of Artificial Sequence: Synthetic oligonucleotide
ucgccaggaccguggccau

SEQ ID NO: 1048954 - RNA, 19 nt, Artificial Sequence
  Description of Artificial Sequence: Synthetic oligonucleotide
cagugugccuuuuguuccu

SEQ ID NO: 1048955 - RNA, 19 nt, Artificial Sequence
  Description of Artificial Sequence: Synthetic oligonucleotide
gcgggcaaggccaccacca

SEQ ID NO: 1048956 - RNA, 19 nt, Artificial Sequence
  Description of Artificial Sequence: Synthetic oligonucleotide
gcgguugagcaugaccaca

SEQ ID NO: 1048957 - RNA, 19 nt, Artificial Sequence
  Description of Artificial Sequence: Synthetic oligonucleotide
gcagagguaugcaccgguc

SEQ ID NO: 1048958 - RNA, 19 nt, Artificial Sequence
  Description of Artificial Sequence: Synthetic oligonucleotide
cccgaccugccgaugccag

SEQ ID NO: 1048959 - RNA, 19 nt, Artificial Sequence
  Description of Artificial Sequence: Synthetic oligonucleotide
ccugggucgccaaguuuuc

SEQ ID NO: 1048960 - RNA, 19 nt, Artificial Sequence
  Description of Artificial Sequence: Synthetic oligonucleotide
gugaggcuccaggauacgu

SEQ ID NO: 1048961 - RNA, 19 nt, Artificial Sequence
  Description of Artificial Sequence: Synthetic oligonucleotide
gccccaugcggaaccugcg

SEQ ID NO: 1048962 - RNA, 19 nt, Artificial Sequence
  Description of Artificial Sequence: Synthetic oligonucleotide
caucuccagaagcacuuuu

SEQ ID NO: 1048963 - RNA, 19 nt, Artificial Sequence
  Description of Artificial Sequence: Synthetic oligonucleotide
gcggagagugccuguucuc

SEQ ID NO: 1048964 - RNA, 19 nt, Artificial Sequence
  Description of Artificial Sequence: Synthetic oligonucleotide
ggaagggcccugcuugccu

SEQ ID NO: 1048965 - RNA, 19 nt, Artificial Sequence
  Description of Artificial Sequence: Synthetic oligonucleotide
gcugucgcacuguguaaua

SEQ ID NO: 1048966 - RNA, 19 nt, Artificial Sequence
  Description of Artificial Sequence: Synthetic oligonucleotide
accggucgccaggaccgug

SEQ ID NO: 1048967 - RNA, 19 nt, Artificial Sequence
  Description of Artificial Sequence: Synthetic oligonucleotide
cucugcgggcaaggccacc

SEQ ID NO: 1048968 - RNA, 19 nt, Artificial Sequence
  Description of Artificial Sequence: Synthetic oligonucleotide
ccgcccaccauccguuuuc

SEQ ID NO: 1048969 - RNA, 19 nt, Artificial Sequence
  Description of Artificial Sequence: Synthetic oligonucleotide
cguuucgguggccggggag

SEQ ID NO: 1048970 - RNA, 19 nt, Artificial Sequence
  Description of Artificial Sequence: Synthetic oligonucleotide
acccgguagcagagguaug

SEQ ID NO: 1048971 - RNA, 19 nt, Artificial Sequence
  Description of Artificial Sequence: Synthetic oligonucleotide
ccgaccugccgaugccagc

SEQ ID NO: 1048972 - RNA, 19 nt, Artificial Sequence
  Description of Artificial Sequence: Synthetic oligonucleotide
ccaugugguguaguggaaa

SEQ ID NO: 1048973 - RNA, 19 nt, Artificial Sequence
  Description of Artificial Sequence: Synthetic oligonucleotide
guccgucagugaaaacaua

SEQ ID NO: 1048974 - RNA, 19 nt, Artificial Sequence
  Description of Artificial Sequence: Synthetic oligonucleotide
gcaacggggcggagagugc

SEQ ID NO: 1048975 - RNA, 19 nt, Artificial Sequence
  Description of Artificial Sequence: Synthetic oligonucleotide
cgcccaugauaaacuucgc

SEQ ID NO: 1048976 - RNA, 19 nt, Artificial Sequence
  Description of Artificial Sequence: Synthetic oligonucleotide
cugucgcacuguguaauau

SEQ ID NO: 1048977 - RNA, 19 nt, Artificial Sequence
  Description of Artificial Sequence: Synthetic oligonucleotide
acccaauguggaggucuua

SEQ ID NO: 1048978 - RNA, 19 nt, Artificial Sequence
  Description of Artificial Sequence: Synthetic oligonucleotide
cacccaauguggaggucuu

SEQ ID NO: 1048979 - RNA, 19 nt, Artificial Sequence
  Description of Artificial Sequence: Synthetic oligonucleotide
cacaggcaacggggcggag

SEQ ID NO: 1048980 - RNA, 19 nt, Artificial Sequence
  Description of Artificial Sequence: Synthetic oligonucleotide
aggcaacggggcggagagu

SEQ ID NO: 1048981 - RNA, 19 nt, Artificial Sequence
  Description of Artificial Sequence: Synthetic oligonucleotide
ggccagugugccuuuuguu

SEQ ID NO: 1048982 - RNA, 19 nt, Artificial Sequence
  Description of Artificial Sequence: Synthetic oligonucleotide
guaccacgauggggccaug

SEQ ID NO: 1048983 - RNA, 19 nt, Artificial Sequence
  Description of Artificial Sequence: Synthetic oligonucleotide
gccaugugguguaguggaa

SEQ ID NO: 1048984 - RNA, 19 nt, Artificial Sequence
  Description of Artificial Sequence: Synthetic oligonucleotide
gcacugaggagucgcccau

SEQ ID NO: 1048985 - RNA, 19 nt, Artificial Sequence
  Description of Artificial Sequence: Synthetic oligonucleotide
ccgguagcagagguaugca

SEQ ID NO: 1048986 - RNA, 19 nt, Artificial Sequence
  Description of Artificial Sequence: Synthetic oligonucleotide
cuccuccguuguggacagc

SEQ ID NO: 1048987 - RNA, 19 nt, Artificial Sequence
  Description of Artificial Sequence: Synthetic oligonucleotide
cggaaccugcgcaucucca

SEQ ID NO: 1048988 - RNA, 19 nt, Artificial Sequence
  Description of Artificial Sequence: Synthetic oligonucleotide
ccgagcugagugagccuga

SEQ ID NO: 1048989 - RNA, 19 nt, Artificial Sequence
  Description of Artificial Sequence: Synthetic oligonucleotide
gcgcaucuccagaagcacu

SEQ ID NO: 1048990 - RNA, 19 nt, Artificial Sequence
  Description of Artificial Sequence: Synthetic oligonucleotide
ggacccugggugagaauau

SEQ ID NO: 1048991 - RNA, 19 nt, Artificial Sequence
  Description of Artificial Sequence: Synthetic oligonucleotide
gcucugcgggcaaggccac

SEQ ID NO: 1048992 - RNA, 19 nt, Artificial Sequence
  Description of Artificial Sequence: Synthetic oligonucleotide
ccaugcggaaccugcgcau

SEQ ID NO: 1048993 - RNA, 19 nt, Artificial Sequence
  Description of Artificial Sequence: Synthetic oligonucleotide
gccacccaauguggagguc

SEQ ID NO: 1048994 - RNA, 19 nt, Artificial Sequence
  Description of Artificial Sequence: Synthetic oligonucleotide
ccagugaguuggccagugu

SEQ ID NO: 1048995 - RNA, 19 nt, Artificial Sequence
  Description of Artificial Sequence: Synthetic oligonucleotide
ggacugccacccaggcugu

SEQ ID NO: 1048996 - RNA, 19 nt, Artificial Sequence
  Description of Artificial Sequence: Synthetic oligonucleotide
ccaggaccguggccaugca

SEQ ID NO: 1048997 - RNA, 19 nt, Artificial Sequence
  Description of Artificial Sequence: Synthetic oligonucleotide
ccccgaccugccgaugcca

SEQ ID NO: 1048998 - RNA, 19 nt, Artificial Sequence
  Description of Artificial Sequence: Synthetic oligonucleotide
caccggucgccaggaccgu

SEQ ID NO: 1048999 - RNA, 19 nt, Artificial Sequence
  Description of Artificial Sequence: Synthetic oligonucleotide
cgauggggccaugcuccga

SEQ ID NO: 1049000 - RNA, 19 nt, Artificial Sequence
  Description of Artificial Sequence: Synthetic oligonucleotide
cccgcccaccauccguuuu

SEQ ID NO: 1049001 - RNA, 19 nt, Artificial Sequence
  Description of Artificial Sequence: Synthetic oligonucleotide
ccguggccaugcacacauu

SEQ ID NO: 1049002 - RNA, 19 nt, Artificial Sequence
  Description of Artificial Sequence: Synthetic oligonucleotide
aacuuuaacaauuuauuag

SEQ ID NO: 1049003 - RNA, 19 nt, Artificial Sequence
  Description of Artificial Sequence: Synthetic oligonucleotide
ucaaucauaaagcacacag

SEQ ID NO: 1049004 - RNA, 19 nt, Artificial Sequence
  Description of Artificial Sequence: Synthetic oligonucleotide
aaucauaaagcacacagcu

SEQ ID NO: 1049005 - RNA, 19 nt, Artificial Sequence
  Description of Artificial Sequence: Synthetic oligonucleotide
uuauaaacaauuaaaugga

SEQ ID NO: 1049006 - RNA, 19 nt, Artificial Sequence
  Description of Artificial Sequence: Synthetic oligonucleotide
aaugauauuaagcugacua

SEQ ID NO: 1049007 - RNA, 19 nt, Artificial Sequence
  Description of Artificial Sequence: Synthetic oligonucleotide
aaaauuuuggggaaucugc

SEQ ID NO: 1049008 - RNA, 19 nt, Artificial Sequence
  Description of Artificial Sequence: Synthetic oligonucleotide
uaaaauacccacauaaugu

SEQ ID NO: 1049009 - RNA, 19 nt, Artificial Sequence
  Description of Artificial Sequence: Synthetic oligonucleotide
uaaacaauuaaauggagcu

SEQ ID NO: 1049010 - RNA, 19 nt, Artificial Sequence
  Description of Artificial Sequence: Synthetic oligonucleotide
uauuugacuacacuuaggc

SEQ ID NO: 1049011 - RNA, 19 nt, Artificial Sequence
  Description of Artificial Sequence: Synthetic oligonucleotide
aauugcuucacauaaucca

SEQ ID NO: 1049012 - RNA, 19 nt, Artificial Sequence
  Description of Artificial Sequence: Synthetic oligonucleotide
cuucauuagaucuggaugg

SEQ ID NO: 1049013 - RNA, 19 nt, Artificial Sequence
  Description of Artificial Sequence: Synthetic oligonucleotide
auauuauugaacugugugg

SEQ ID NO: 1049014 - RNA, 19 nt, Artificial Sequence
  Description of Artificial Sequence: Synthetic oligonucleotide
auugcuuuacuauugucac

SEQ ID NO: 1049015 - RNA, 19 nt, Artificial Sequence
  Description of Artificial Sequence: Synthetic oligonucleotide
uuccgaacaaccaugauca

SEQ ID NO: 1049016 - RNA, 19 nt, Artificial Sequence
  Description of Artificial Sequence: Synthetic oligonucleotide
uuacuauugucacuaaucc

SEQ ID NO: 1049017 - RNA, 19 nt, Artificial Sequence
  Description of Artificial Sequence: Synthetic oligonucleotide
aguggugagauauuuguac

SEQ ID NO: 1049018 - RNA, 19 nt, Artificial Sequence
  Description of Artificial Sequence: Synthetic oligonucleotide
uaucaaguaggucacauga

SEQ ID NO: 1049019 - RNA, 19 nt, Artificial Sequence
  Description of Artificial Sequence: Synthetic oligonucleotide
aguguugaagauuaccugg

SEQ ID NO: 1049020 - RNA, 19 nt, Artificial Sequence
  Description of Artificial Sequence: Synthetic oligonucleotide
uggaaugauauuaagcuga

SEQ ID NO: 1049021 - RNA, 19 nt, Artificial Sequence
  Description of Artificial Sequence: Synthetic oligonucleotide
gaucauuaagguucaaggg

SEQ ID NO: 1049022 - RNA, 19 nt, Artificial Sequence
  Description of Artificial Sequence: Synthetic oligonucleotide
aaaauaucaaguaggucac

SEQ ID NO: 1049023 - RNA, 19 nt, Artificial Sequence
  Description of Artificial Sequence: Synthetic oligonucleotide
uuuacuauugucacuaauc

SEQ ID NO: 1049024 - RNA, 19 nt, Artificial Sequence
  Description of Artificial Sequence: Synthetic oligonucleotide
uucuggaucauuaagguuc

SEQ ID NO: 1049025 - RNA, 19 nt, Artificial Sequence
  Description of Artificial Sequence: Synthetic oligonucleotide
ucuuccauaguguugaaga

SEQ ID NO: 1049026 - RNA, 19 nt, Artificial Sequence
  Description of Artificial Sequence: Synthetic oligonucleotide
uuccauucuguuaauaaag

SEQ ID NO: 1049027 - RNA, 19 nt, Artificial Sequence
  Description of Artificial Sequence: Synthetic oligonucleotide
gaugauaggauuccgaaca

SEQ ID NO: 1049028 - RNA, 19 nt, Artificial Sequence
  Description of Artificial Sequence: Synthetic oligonucleotide
agcacuguaagcuggggcc

SEQ ID NO: 1049029 - RNA, 19 nt, Artificial Sequence
  Description of Artificial Sequence: Synthetic oligonucleotide
auaaacaauuaaauggagc

SEQ ID NO: 1049030 - RNA, 19 nt, Artificial Sequence
  Description of Artificial Sequence: Synthetic oligonucleotide
accaugaucauccagaaau

SEQ ID NO: 1049031 - RNA, 19 nt, Artificial Sequence
  Description of Artificial Sequence: Synthetic oligonucleotide
caugcuauagcacugcugc

SEQ ID NO: 1049032 - RNA, 19 nt, Artificial Sequence
  Description of Artificial Sequence: Synthetic oligonucleotide
aacaauuaaauggagcucu

SEQ ID NO: 1049033 - RNA, 19 nt, Artificial Sequence
  Description of Artificial Sequence: Synthetic oligonucleotide
uauuauugaacuguguggc

SEQ ID NO: 1049034 - RNA, 19 nt, Artificial Sequence
  Description of Artificial Sequence: Synthetic oligonucleotide
uagaugaacuuaaacuggg

SEQ ID NO: 1049035 - RNA, 19 nt, Artificial Sequence
  Description of Artificial Sequence: Synthetic oligonucleotide
augauauuaagcugacuac

SEQ ID NO: 1049036 - RNA, 19 nt, Artificial Sequence
  Description of Artificial Sequence: Synthetic oligonucleotide
uuugacuacacuuaggcuu

SEQ ID NO: 1049037 - RNA, 19 nt, Artificial Sequence
  Description of Artificial Sequence: Synthetic oligonucleotide
uguauguaaagauuuugca

SEQ ID NO: 1049038 - RNA, 19 nt, Artificial Sequence
  Description of Artificial Sequence: Synthetic oligonucleotide
acuauugucacuaauccag

SEQ ID NO: 1049039 - RNA, 19 nt, Artificial Sequence
  Description of Artificial Sequence: Synthetic oligonucleotide
gucaugaccaguuaaguug

SEQ ID NO: 1049040 - RNA, 19 nt, Artificial Sequence
  Description of Artificial Sequence: Synthetic oligonucleotide
ggaucauuaagguucaagg

SEQ ID NO: 1049041 - RNA, 19 nt, Artificial Sequence
  Description of Artificial Sequence: Synthetic oligonucleotide
cuugguauuccacaauugg

SEQ ID NO: 1049042 - RNA, 19 nt, Artificial Sequence
  Description of Artificial Sequence: Synthetic oligonucleotide
aucauuaagguucaagggu

SEQ ID NO: 1049043 - RNA, 19 nt, Artificial Sequence
  Description of Artificial Sequence: Synthetic oligonucleotide
aauggagcucuucauaagu

SEQ ID NO: 1049044 - RNA, 19 nt, Artificial Sequence
  Description of Artificial Sequence: Synthetic oligonucleotide
agcuuauacaugcuauagc

SEQ ID NO: 1049045 - RNA, 19 nt, Artificial Sequence
  Description of Artificial Sequence: Synthetic oligonucleotide
ugaauuguacuuuucucug

SEQ ID NO: 1049046 - RNA, 19 nt, Artificial Sequence
  Description of Artificial Sequence: Synthetic oligonucleotide
auuagaucuggauggacag

SEQ ID NO: 1049047 - RNA, 19 nt, Artificial Sequence
  Description of Artificial Sequence: Synthetic oligonucleotide
uaaguuguaaugguaaaca

SEQ ID NO: 1049048 - RNA, 19 nt, Artificial Sequence
  Description of Artificial Sequence: Synthetic oligonucleotide
aaacaauuaaauggagcuc

SEQ ID NO: 1049049 - RNA, 19 nt, Artificial Sequence
  Description of Artificial Sequence: Synthetic oligonucleotide
aagauuaccuggcauuucu

SEQ ID NO: 1049050 - RNA, 19 nt, Artificial Sequence
  Description of Artificial Sequence: Synthetic oligonucleotide
uugacuucgaucagguuug

SEQ ID NO: 1049051 - RNA, 19 nt, Artificial Sequence
  Description of Artificial Sequence: Synthetic oligonucleotide
uuuggaugauaaaacaaaa

SEQ ID NO: 1049052 - RNA, 19 nt, Artificial Sequence
  Description of Artificial Sequence: Synthetic oligonucleotide
ugauauuaagcugacuacc

SEQ ID NO: 1049053 - RNA, 19 nt, Artificial Sequence
  Description of Artificial Sequence: Synthetic oligonucleotide
gauaggauuccgaacaacc

SEQ ID NO: 1049054 - RNA, 19 nt, Artificial Sequence
  Description of Artificial Sequence: Synthetic oligonucleotide
cauuuuauccaaugggaag

SEQ ID NO: 1049055 - RNA, 19 nt, Artificial Sequence
  Description of Artificial Sequence: Synthetic oligonucleotide
ucaaguaggucacaugacu

SEQ ID NO: 1049056 - RNA, 19 nt, Artificial Sequence
  Description of Artificial Sequence: Synthetic oligonucleotide
aaugucaugaccaguuaag

SEQ ID NO: 1049057 - RNA, 19 nt, Artificial Sequence
  Description of Artificial Sequence: Synthetic oligonucleotide
uauacaugcuauagcacug

SEQ ID NO: 1049058 - RNA, 19 nt, Artificial Sequence
  Description of Artificial Sequence: Synthetic oligonucleotide
auaagugucaucuguauuu

SEQ ID NO: 1049059 - RNA, 19 nt, Artificial Sequence
  Description of Artificial Sequence: Synthetic oligonucleotide
accaguuaaguuguaaugg

SEQ ID NO: 1049060 - RNA, 19 nt, Artificial Sequence
  Description of Artificial Sequence: Synthetic oligonucleotide
uugguauuccacaauuggc

SEQ ID NO: 1049061 - RNA, 19 nt, Artificial Sequence
  Description of Artificial Sequence: Synthetic oligonucleotide
uuacuuugcuuuucgauga

SEQ ID NO: 1049062 - RNA, 19 nt, Artificial Sequence
  Description of Artificial Sequence: Synthetic oligonucleotide
aauacccacauaaugucag

SEQ ID NO: 1049063 - RNA, 19 nt, Artificial Sequence
  Description of Artificial Sequence: Synthetic oligonucleotide
aaauguagggucugcaaau

SEQ ID NO: 1049064 - RNA, 19 nt, Artificial Sequence
  Description of Artificial Sequence: Synthetic oligonucleotide
uuauuagucuuauuuccca

SEQ ID NO: 1049065 - RNA, 19 nt, Artificial Sequence
  Description of Artificial Sequence: Synthetic oligonucleotide
uccauaguguugaagauua

SEQ ID NO: 1049066 - RNA, 19 nt, Artificial Sequence
  Description of Artificial Sequence: Synthetic oligonucleotide
ucuguuaauaaaggacugg

SEQ ID NO: 1049067 - RNA, 19 nt, Artificial Sequence
  Description of Artificial Sequence: Synthetic oligonucleotide
uauuagucuuauuucccag

SEQ ID NO: 1049068 - RNA, 19 nt, Artificial Sequence
  Description of Artificial Sequence: Synthetic oligonucleotide
ucguuguagaggaacgcgg

SEQ ID NO: 1049069 - RNA, 19 nt, Artificial Sequence
  Description of Artificial Sequence: Synthetic oligonucleotide
uucuguuaauaaaggacug

SEQ ID NO: 1049070 - RNA, 19 nt, Artificial Sequence
  Description of Artificial Sequence: Synthetic oligonucleotide
uugauauuaaacugcucac

SEQ ID NO: 1049071 - RNA, 19 nt, Artificial Sequence
  Description of Artificial Sequence: Synthetic oligonucleotide
augcuguccaaucuucggc

SEQ ID NO: 1049072 - RNA, 19 nt, Artificial Sequence
  Description of Artificial Sequence: Synthetic oligonucleotide
aacgcgguauauuugacua

SEQ ID NO: 1049073 - RNA, 19 nt, Artificial Sequence
  Description of Artificial Sequence: Synthetic oligonucleotide
uuugcuuuucgaugauagg

SEQ ID NO: 1049074 - RNA, 19 nt, Artificial Sequence
  Description of Artificial Sequence: Synthetic oligonucleotide
ucagaaacgucccauuaaa

SEQ ID NO: 1049075 - RNA, 19 nt, Artificial Sequence
  Description of Artificial Sequence: Synthetic oligonucleotide
uccaguaagaaaucuucca

SEQ ID NO: 1049076 - RNA, 19 nt, Artificial Sequence
  Description of Artificial Sequence: Synthetic oligonucleotide
uugcuuuucgaugauagga

SEQ ID NO: 1049077 - RNA, 19 nt, Artificial Sequence
  Description of Artificial Sequence: Synthetic oligonucleotide
auuuuauccaaugggaaga

SEQ ID NO: 1049078 - RNA, 19 nt, Artificial Sequence
  Description of Artificial Sequence: Synthetic oligonucleotide
gugagugacacacugggug

SEQ ID NO: 1049079 - RNA, 19 nt, Artificial Sequence
  Description of Artificial Sequence: Synthetic oligonucleotide
gaccaguuaaguuguaaug

SEQ ID NO: 1049080 - RNA, 19 nt, Artificial Sequence
  Description of Artificial Sequence: Synthetic oligonucleotide
gaagaauggaaugauauua

SEQ ID NO: 1049081 - RNA, 19 nt, Artificial Sequence
  Description of Artificial Sequence: Synthetic oligonucleotide
ugaacuuaaacugggguuc

SEQ ID NO: 1049082 - RNA, 19 nt, Artificial Sequence
  Description of Artificial Sequence: Synthetic oligonucleotide
aaaagcuuauacaugcuau

SEQ ID NO: 1049083 - RNA, 19 nt, Artificial Sequence
  Description of Artificial Sequence: Synthetic oligonucleotide
uguaagcuggggcccaacg

SEQ ID NO: 1049084 - RNA, 19 nt, Artificial Sequence
  Description of Artificial Sequence: Synthetic oligonucleotide
guagggucugcaaauaccg

SEQ ID NO: 1049085 - RNA, 19 nt, Artificial Sequence
  Description of Artificial Sequence: Synthetic oligonucleotide
ugcaaauaccgauggaaga

SEQ ID NO: 1049086 - RNA, 19 nt, Artificial Sequence
  Description of Artificial Sequence: Synthetic oligonucleotide
uucccaguaaaauacccac

SEQ ID NO: 1049087 - RNA, 19 nt, Artificial Sequence
  Description of Artificial Sequence: Synthetic oligonucleotide
agucuuauuucccaguaaa

SEQ ID NO: 1049088 - RNA, 19 nt, Artificial Sequence
  Description of Artificial Sequence: Synthetic oligonucleotide
aagcguggguuguagauga

SEQ ID NO: 1049089 - RNA, 19 nt, Artificial Sequence
  Description of Artificial Sequence: Synthetic oligonucleotide
uuaaguuguaaugguaaac

SEQ ID NO: 1049090 - RNA, 19 nt, Artificial Sequence
  Description of Artificial Sequence: Synthetic oligonucleotide
uaguguugaagauuaccug

SEQ ID NO: 1049091 - RNA, 19 nt, Artificial Sequence
  Description of Artificial Sequence: Synthetic oligonucleotide
auaguguugaagauuaccu

SEQ ID NO: 1049092 - RNA, 19 nt, Artificial Sequence
  Description of Artificial Sequence: Synthetic oligonucleotide
uguacaauugcuucacaua

SEQ ID NO: 1049093 - RNA, 19 nt, Artificial Sequence
  Description of Artificial Sequence: Synthetic oligonucleotide
aaagcuuauacaugcuaua

SEQ ID NO: 1049094 - RNA, 19 nt, Artificial Sequence
  Description of Artificial Sequence: Synthetic oligonucleotide
cauaguguugaagauuacc

SEQ ID NO: 1049095 - RNA, 19 nt, Artificial Sequence
  Description of Artificial Sequence: Synthetic oligonucleotide
cuuauacaugcuauagcac

SEQ ID NO: 1049096 - RNA, 19 nt, Artificial Sequence
  Description of Artificial Sequence: Synthetic oligonucleotide
aauuuuggggaaucugcau

SEQ ID NO: 1049097 - RNA, 19 nt, Artificial Sequence
  Description of Artificial Sequence: Synthetic oligonucleotide
uauuaagcugacuaccuuu

SEQ ID NO: 1049098 - RNA, 19 nt, Artificial Sequence
  Description of Artificial Sequence: Synthetic oligonucleotide
gagucaauccaagaagaag

SEQ ID NO: 1049099 - RNA, 19 nt, Artificial Sequence
  Description of Artificial Sequence: Synthetic oligonucleotide
aguccuuguaaacuguaca

SEQ ID NO: 1049100 - RNA, 19 nt, Artificial Sequence
  Description of Artificial Sequence: Synthetic oligonucleotide
acauaaauauuuagcaucu

SEQ ID NO: 1049101 - RNA, 19 nt, Artificial Sequence
  Description of Artificial Sequence: Synthetic oligonucleotide
uccagcgucagcugcgugg

SEQ ID NO: 1049102 - RNA, 19 nt, Artificial Sequence
  Description of Artificial Sequence: Synthetic oligonucleotide
guacaauugcuucacauaa

SEQ ID NO: 1049103 - RNA, 19 nt, Artificial Sequence
  Description of Artificial Sequence: Synthetic oligonucleotide
aaucgcucauggcuuucac

SEQ ID NO: 1049104 - RNA, 19 nt, Artificial Sequence
  Description of Artificial Sequence: Synthetic oligonucleotide
uuagucuuauuucccagua

SEQ ID NO: 1049105 - RNA, 19 nt, Artificial Sequence
  Description of Artificial Sequence: Synthetic oligonucleotide
gguucaaggguccaguaag

SEQ ID NO: 1049106 - RNA, 19 nt, Artificial Sequence
  Description of Artificial Sequence: Synthetic oligonucleotide
uacuauugucacuaaucca

SEQ ID NO: 1049107 - RNA, 19 nt, Artificial Sequence
  Description of Artificial Sequence: Synthetic oligonucleotide
aacagugaaguggugagau

SEQ ID NO: 1049108 - RNA, 19 nt, Artificial Sequence
  Description of Artificial Sequence: Synthetic oligonucleotide
auguagggucugcaaauac

SEQ ID NO: 1049109 - RNA, 19 nt, Artificial Sequence
  Description of Artificial Sequence: Synthetic oligonucleotide
uucgaugauaggauuccga

SEQ ID NO: 1049110 - RNA, 19 nt, Artificial Sequence
  Description of Artificial Sequence: Synthetic oligonucleotide
augaacuuaaacugggguu

SEQ ID NO: 1049111 - RNA, 19 nt, Artificial Sequence
  Description of Artificial Sequence: Synthetic oligonucleotide
cuagaaucuucauuagauc

SEQ ID NO: 1049112 - RNA, 19 nt, Artificial Sequence
  Description of Artificial Sequence: Synthetic oligonucleotide
uucagaaacgucccauuaa

SEQ ID NO: 1049113 - RNA, 19 nt, Artificial Sequence
  Description of Artificial Sequence: Synthetic oligonucleotide
auacaugcuauagcacugc

SEQ ID NO: 1049114 - RNA, 19 nt, Artificial Sequence
  Description of Artificial Sequence: Synthetic oligonucleotide
uucauaagugucaucugua

SEQ ID NO: 1049115 - RNA, 19 nt, Artificial Sequence
  Description of Artificial Sequence: Synthetic oligonucleotide
uggccuuauaaacaauuaa

SEQ ID NO: 1049116 - RNA, 19 nt, Artificial Sequence
  Description of Artificial Sequence: Synthetic oligonucleotide
ugcuauagcacugcugcag

SEQ ID NO: 1049117 - RNA, 19 nt, Artificial Sequence
  Description of Artificial Sequence: Synthetic oligonucleotide
ucgaugauaggauuccgaa

SEQ ID NO: 1049118 - RNA, 19 nt, Artificial Sequence
  Description of Artificial Sequence: Synthetic oligonucleotide
ugcuuuacuauugucacua

SEQ ID NO: 1049119 - RNA, 19 nt, Artificial Sequence
  Description of Artificial Sequence: Synthetic oligonucleotide
cacuaauccagucaauguc

SEQ ID NO: 1049120 - RNA, 19 nt, Artificial Sequence
  Description of Artificial Sequence: Synthetic oligonucleotide
uuugauucagaaucacaua

SEQ ID NO: 1049121 - RNA, 19 nt, Artificial Sequence
  Description of Artificial Sequence: Synthetic oligonucleotide
aaauccagcgucagcugcg

SEQ ID NO: 1049122 - RNA, 19 nt, Artificial Sequence
  Description of Artificial Sequence: Synthetic oligonucleotide
uauugaacuguguggcgca

SEQ ID NO: 1049123 - RNA, 19 nt, Artificial Sequence
  Description of Artificial Sequence: Synthetic oligonucleotide
auuugacuacacuuaggcu

SEQ ID NO: 1049124 - RNA, 19 nt, Artificial Sequence
  Description of Artificial Sequence: Synthetic oligonucleotide
uuucagaaacgucccauua

SEQ ID NO: 1049125 - RNA, 19 nt, Artificial Sequence
  Description of Artificial Sequence: Synthetic oligonucleotide
auaucaaguaggucacaug

SEQ ID NO: 1049126 - RNA, 19 nt, Artificial Sequence
  Description of Artificial Sequence: Synthetic oligonucleotide
ugaccaguuaaguuguaau

SEQ ID NO: 1049127 - RNA, 19 nt, Artificial Sequence
  Description of Artificial Sequence: Synthetic oligonucleotide
gaugugagugacacacugg

SEQ ID NO: 1049128 - RNA, 19 nt, Artificial Sequence
  Description of Artificial Sequence: Synthetic oligonucleotide
acauaaugucagaagaaug

SEQ ID NO: 1049129 - RNA, 19 nt, Artificial Sequence
  Description of Artificial Sequence: Synthetic oligonucleotide
agaaucacauacagcuccc

SEQ ID NO: 1049130 - RNA, 19 nt, Artificial Sequence
  Description of Artificial Sequence: Synthetic oligonucleotide
aagaagcucaacagcgcgg

SEQ ID NO: 1049131 - RNA, 19 nt, Artificial Sequence
  Description of Artificial Sequence: Synthetic oligonucleotide
aggaacgcgguauauuuga

SEQ ID NO: 1049132 - RNA, 19 nt, Artificial Sequence
  Description of Artificial Sequence: Synthetic oligonucleotide
gaugaacuuaaacuggggu

SEQ ID NO: 1049133 - RNA, 19 nt, Artificial Sequence
  Description of Artificial Sequence: Synthetic oligonucleotide
aguuaaguuguaaugguaa

SEQ ID NO: 1049134 - RNA, 19 nt, Artificial Sequence
  Description of Artificial Sequence: Synthetic oligonucleotide
ucauaagugucaucuguau

SEQ ID NO: 1049135 - RNA, 19 nt, Artificial Sequence
  Description of Artificial Sequence: Synthetic oligonucleotide
uccgcucugguaaagucac

SEQ ID NO: 1049136 - RNA, 19 nt, Artificial Sequence
  Description of Artificial Sequence: Synthetic oligonucleotide
acccacauaaugucagaag

SEQ ID NO: 1049137 - RNA, 19 nt, Artificial Sequence
  Description of Artificial Sequence: Synthetic oligonucleotide
uccucaugugaauuguacu

SEQ ID NO: 1049138 - RNA, 19 nt, Artificial Sequence
  Description of Artificial Sequence: Synthetic oligonucleotide
aacgaugcuguccaaucuu

SEQ ID NO: 1049139 - RNA, 19 nt, Artificial Sequence
  Description of Artificial Sequence: Synthetic oligonucleotide
uaccgauggaagaacuucu

SEQ ID NO: 1049140 - RNA, 19 nt, Artificial Sequence
  Description of Artificial Sequence: Synthetic oligonucleotide
uaagcuggggcccaacgau

SEQ ID NO: 1049141 - RNA, 19 nt, Artificial Sequence
  Description of Artificial Sequence: Synthetic oligonucleotide
gucacuaauccagucaaug

SEQ ID NO: 1049142 - RNA, 19 nt, Artificial Sequence
  Description of Artificial Sequence: Synthetic oligonucleotide
aacaacccaguaaucgcuc

SEQ ID NO: 1049143 - RNA, 19 nt, Artificial Sequence
  Description of Artificial Sequence: Synthetic oligonucleotide
agccauuggagucaaucca

SEQ ID NO: 1049144 - RNA, 19 nt, Artificial Sequence
  Description of Artificial Sequence: Synthetic oligonucleotide
uugacuacacuuaggcuuu

SEQ ID NO: 1049145 - RNA, 19 nt, Artificial Sequence
  Description of Artificial Sequence: Synthetic oligonucleotide
uucagacccagauauucuc

SEQ ID NO: 1049146 - RNA, 19 nt, Artificial Sequence
  Description of Artificial Sequence: Synthetic oligonucleotide
ucagaaucacauacagcuc

SEQ ID NO: 1049147 - RNA, 19 nt, Artificial Sequence
  Description of Artificial Sequence: Synthetic oligonucleotide
caucaaucauaaagcacac

SEQ ID NO: 1049148 - RNA, 19 nt, Artificial Sequence
  Description of Artificial Sequence: Synthetic oligonucleotide
aucuucauuagaucuggau

SEQ ID NO: 1049149 - RNA, 19 nt, Artificial Sequence
  Description of Artificial Sequence: Synthetic oligonucleotide
ugcguggaggcaucaauca

SEQ ID NO: 1049150 - RNA, 19 nt, Artificial Sequence
  Description of Artificial Sequence: Synthetic oligonucleotide
cucuuguugauauuaaacu

SEQ ID NO: 1049151 - RNA, 19 nt, Artificial Sequence
  Description of Artificial Sequence: Synthetic oligonucleotide
aaaaccucagggacucauc

SEQ ID NO: 1049152 - RNA, 19 nt, Artificial Sequence
  Description of Artificial Sequence: Synthetic oligonucleotide
uuggggaaucccuuccugc

SEQ ID NO: 1049153 - RNA, 19 nt, Artificial Sequence
  Description of Artificial Sequence: Synthetic oligonucleotide
acugcuuuucuugggccgc

SEQ ID NO: 1049154 - RNA, 19 nt, Artificial Sequence
  Description of Artificial Sequence: Synthetic oligonucleotide
uuggcuugccaucuuuacu

SEQ ID NO: 1049155 - RNA, 19 nt, Artificial Sequence
  Description of Artificial Sequence: Synthetic oligonucleotide
agcucaacagcgcgggcgg

SEQ ID NO: 1049156 - RNA, 19 nt, Artificial Sequence
  Description of Artificial Sequence: Synthetic oligonucleotide
ugucaugaccaguuaaguu

SEQ ID NO: 1049157 - RNA, 19 nt, Artificial Sequence
  Description of Artificial Sequence: Synthetic oligonucleotide
augaguuggucguuguaga

SEQ ID NO: 1049158 - RNA, 19 nt, Artificial Sequence
  Description of Artificial Sequence: Synthetic oligonucleotide
gcuaaauucaugugguuga

SEQ ID NO: 1049159 - RNA, 19 nt, Artificial Sequence
  Description of Artificial Sequence: Synthetic oligonucleotide
uauugucacuaauccaguc

SEQ ID NO: 1049160 - RNA, 19 nt, Artificial Sequence
  Description of Artificial Sequence: Synthetic oligonucleotide
uggugagauauuuguacaa

SEQ ID NO: 1049161 - RNA, 19 nt, Artificial Sequence
  Description of Artificial Sequence: Synthetic oligonucleotide
ugacugcaaauguaggguc

SEQ ID NO: 1049162 - RNA, 19 nt, Artificial Sequence
  Description of Artificial Sequence: Synthetic oligonucleotide
ucccaguaaaauacccaca

SEQ ID NO: 1049163 - RNA, 19 nt, Artificial Sequence
  Description of Artificial Sequence: Synthetic oligonucleotide
cacugaacuguacaccuug

SEQ ID NO: 1049164 - RNA, 19 nt, Artificial Sequence
  Description of Artificial Sequence: Synthetic oligonucleotide
uauuggggaaucccuuccu

SEQ ID NO: 1049165 - RNA, 19 nt, Artificial Sequence
  Description of Artificial Sequence: Synthetic oligonucleotide
uaggucacaugacugcaaa

SEQ ID NO: 1049166 - RNA, 19 nt, Artificial Sequence
  Description of Artificial Sequence: Synthetic oligonucleotide
aucaaguaggucacaugac

SEQ ID NO: 1049167 - RNA, 19 nt, Artificial Sequence
  Description of Artificial Sequence: Synthetic oligonucleotide
gaugucaccuagaaucuuc

SEQ ID NO: 1049168 - RNA, 19 nt, Artificial Sequence
  Description of Artificial Sequence: Synthetic oligonucleotide
ugguucauugaagaacugu

SEQ ID NO: 1049169 - RNA, 19 nt, Artificial Sequence
  Description of Artificial Sequence: Synthetic oligonucleotide
guauauuugacuacacuua

SEQ ID NO: 1049170 - RNA, 19 nt, Artificial Sequence
  Description of Artificial Sequence: Synthetic oligonucleotide
ggauggacagaugugagug

SEQ ID NO: 1049171 - RNA, 19 nt, Artificial Sequence
  Description of Artificial Sequence: Synthetic oligonucleotide
acugucuauucuucugugu

SEQ ID NO: 1049172 - RNA, 19 nt, Artificial Sequence
  Description of Artificial Sequence: Synthetic oligonucleotide
gaagcuugacaccuccauc

SEQ ID NO: 1049173 - RNA, 19 nt, Artificial Sequence
  Description of Artificial Sequence: Synthetic oligonucleotide
aguuguaaugguaaacaaa

SEQ ID NO: 1049174 - RNA, 19 nt, Artificial Sequence
  Description of Artificial Sequence: Synthetic oligonucleotide
guuaaguuguaaugguaaa

SEQ ID NO: 1049175 - RNA, 19 nt, Artificial Sequence
  Description of Artificial Sequence: Synthetic oligonucleotide
caaggguccaguaagaaau

SEQ ID NO: 1049176 - RNA, 19 nt, Artificial Sequence
  Description of Artificial Sequence: Synthetic oligonucleotide
auuggggaaucccuuccug

SEQ ID NO: 1049177 - RNA, 19 nt, Artificial Sequence
  Description of Artificial Sequence: Synthetic oligonucleotide
uaagguucaaggguccagu

SEQ ID NO: 1049178 - RNA, 19 nt, Artificial Sequence
  Description of Artificial Sequence: Synthetic oligonucleotide
uguugaugucaccuagaau

SEQ ID NO: 1049179 - RNA, 19 nt, Artificial Sequence
  Description of Artificial Sequence: Synthetic oligonucleotide
gauauuaagcugacuaccu

SEQ ID NO: 1049180 - RNA, 19 nt, Artificial Sequence
  Description of Artificial Sequence: Synthetic oligonucleotide
cugguaaagucacuguuga

SEQ ID NO: 1049181 - RNA, 19 nt, Artificial Sequence
  Description of Artificial Sequence: Synthetic oligonucleotide
aagcagguauugcuuuacu

SEQ ID NO: 1049182 - RNA, 19 nt, Artificial Sequence
  Description of Artificial Sequence: Synthetic oligonucleotide
uguagaggaacgcgguaua

SEQ ID NO: 1049183 - RNA, 19 nt, Artificial Sequence
  Description of Artificial Sequence: Synthetic oligonucleotide
auauuaagcugacuaccuu

SEQ ID NO: 1049184 - RNA, 19 nt, Artificial Sequence
  Description of Artificial Sequence: Synthetic oligonucleotide
gcuaaaaguccuuguaaac

SEQ ID NO: 1049185 - RNA, 19 nt, Artificial Sequence
  Description of Artificial Sequence: Synthetic oligonucleotide
uggauggacagaugugagu

SEQ ID NO: 1049186 - RNA, 19 nt, Artificial Sequence
  Description of Artificial Sequence: Synthetic oligonucleotide
uauagcacugcugcagcac

SEQ ID NO: 1049187 - RNA, 19 nt, Artificial Sequence
  Description of Artificial Sequence: Synthetic oligonucleotide
agggucugcaaauaccgau

SEQ ID NO: 1049188 - RNA, 19 nt, Artificial Sequence
  Description of Artificial Sequence: Synthetic oligonucleotide
gguauauuugacuacacuu

SEQ ID NO: 1049189 - RNA, 19 nt, Artificial Sequence
  Description of Artificial Sequence: Synthetic oligonucleotide
uacaugcuauagcacugcu

SEQ ID NO: 1049190 - RNA, 19 nt, Artificial Sequence
  Description of Artificial Sequence: Synthetic oligonucleotide
guggugagauauuuguaca

SEQ ID NO: 1049191 - RNA, 19 nt, Artificial Sequence
  Description of Artificial Sequence: Synthetic oligonucleotide
gaagcguggguuguagaug

SEQ ID NO: 1049192 - RNA, 19 nt, Artificial Sequence
  Description of Artificial Sequence: Synthetic oligonucleotide
aacccaguaaucgcucaug

SEQ ID NO: 1049193 - RNA, 19 nt, Artificial Sequence
  Description of Artificial Sequence: Synthetic oligonucleotide
acgcgguauauuugacuac

SEQ ID NO: 1049194 - RNA, 19 nt, Artificial Sequence
  Description of Artificial Sequence: Synthetic oligonucleotide
cuguuaauaaaggacugga

SEQ ID NO: 1049195 - RNA, 19 nt, Artificial Sequence
  Description of Artificial Sequence: Synthetic oligonucleotide
agguauugcuuuacuauug

SEQ ID NO: 1049196 - RNA, 19 nt, Artificial Sequence
  Description of Artificial Sequence: Synthetic oligonucleotide
uaauccagucaaugucaug

SEQ ID NO: 1049197 - RNA, 19 nt, Artificial Sequence
  Description of Artificial Sequence: Synthetic oligonucleotide
uucauuagaucuggaugga

SEQ ID NO: 1049198 - RNA, 19 nt, Artificial Sequence
  Description of Artificial Sequence: Synthetic oligonucleotide
ugcaaauguagggucugca

SEQ ID NO: 1049199 - RNA, 19 nt, Artificial Sequence
  Description of Artificial Sequence: Synthetic oligonucleotide
caaauguagggucugcaaa

SEQ ID NO: 1049200 - RNA, 19 nt, Artificial Sequence
  Description of Artificial Sequence: Synthetic oligonucleotide
ccaacaacccaguaaucgc

SEQ ID NO: 1049201 - RNA, 19 nt, Artificial Sequence
  Description of Artificial Sequence: Synthetic oligonucleotide
agaagcugauuccaccaaa

SEQ ID NO: 1049202 - RNA, 19 nt, Artificial Sequence
  Description of Artificial Sequence: Synthetic oligonucleotide
aaauaucaaguaggucaca

SEQ ID NO: 1049203 - RNA, 19 nt, Artificial Sequence
  Description of Artificial Sequence: Synthetic oligonucleotide
uucgaucagguuugcauuu

SEQ ID NO: 1049204 - RNA, 19 nt, Artificial Sequence
  Description of Artificial Sequence: Synthetic oligonucleotide
aggauuccgaacaaccaug

SEQ ID NO: 1049205 - RNA, 19 nt, Artificial Sequence
  Description of Artificial Sequence: Synthetic oligonucleotide
aauguagggucugcaaaua

SEQ ID NO: 1049206 - RNA, 19 nt, Artificial Sequence
  Description of Artificial Sequence: Synthetic oligonucleotide
uugcuuuacuauugucacu

SEQ ID NO: 1049207 - RNA, 19 nt, Artificial Sequence
  Description of Artificial Sequence: Synthetic oligonucleotide
acacuuaggcuuucuucca

SEQ ID NO: 1049208 - RNA, 19 nt, Artificial Sequence
  Description of Artificial Sequence: Synthetic oligonucleotide
ugauaggauuccgaacaac

SEQ ID NO: 1049209 - RNA, 19 nt, Artificial Sequence
  Description of Artificial Sequence: Synthetic oligonucleotide
aauaccgauggaagaacuu

SEQ ID NO: 1049210 - RNA, 19 nt, Artificial Sequence
  Description of Artificial Sequence: Synthetic oligonucleotide
uaagugucaucuguauuua

SEQ ID NO: 1049211 - RNA, 19 nt, Artificial Sequence
  Description of Artificial Sequence: Synthetic oligonucleotide
uagggucugcaaauaccga

SEQ ID NO: 1049212 - RNA, 19 nt, Artificial Sequence
  Description of Artificial Sequence: Synthetic oligonucleotide
augggcuaaaaguccuugu

SEQ ID NO: 1049213 - RNA, 19 nt, Artificial Sequence
  Description of Artificial Sequence: Synthetic oligonucleotide
agcgucagcugcguggagg

SEQ ID NO: 1049214 - RNA, 19 nt, Artificial Sequence
  Description of Artificial Sequence: Synthetic oligonucleotide
ucauuagaucuggauggac

SEQ ID NO: 1049215 - RNA, 19 nt, Artificial Sequence
  Description of Artificial Sequence: Synthetic oligonucleotide
uggguguuuuccucaugug

SEQ ID NO: 1049216 - RNA, 19 nt, Artificial Sequence
  Description of Artificial Sequence: Synthetic oligonucleotide
aaccaugaucauccagaaa

SEQ ID NO: 1049217 - RNA, 19 nt, Artificial Sequence
  Description of Artificial Sequence: Synthetic oligonucleotide
aacagcgcgggcgggaacu

SEQ ID NO: 1049218 - RNA, 19 nt, Artificial Sequence
  Description of Artificial Sequence: Synthetic oligonucleotide
acuguacaccuuguccaac

SEQ ID NO: 1049219 - RNA, 19 nt, Artificial Sequence
  Description of Artificial Sequence: Synthetic oligonucleotide
augucaugaccaguuaagu

SEQ ID NO: 1049220 - RNA, 19 nt, Artificial Sequence
  Description of Artificial Sequence: Synthetic oligonucleotide
aagguucaaggguccagua

SEQ ID NO: 1049221 - RNA, 19 nt, Artificial Sequence
  Description of Artificial Sequence: Synthetic oligonucleotide
ucaucagaccaaguagaaa

SEQ ID NO: 1049222 - RNA, 19 nt, Artificial Sequence
  Description of Artificial Sequence: Synthetic oligonucleotide
acaacccaguaaucgcuca

SEQ ID NO: 1049223 - RNA, 19 nt, Artificial Sequence
  Description of Artificial Sequence: Synthetic oligonucleotide
auccaaugggaagaagcug

SEQ ID NO: 1049224 - RNA, 19 nt, Artificial Sequence
  Description of Artificial Sequence: Synthetic oligonucleotide
uucaaggguccaguaagaa

SEQ ID NO: 1049225 - RNA, 19 nt, Artificial Sequence
  Description of Artificial Sequence: Synthetic oligonucleotide
ggcuaaaaguccuuguaaa

SEQ ID NO: 1049226 - RNA, 19 nt, Artificial Sequence
  Description of Artificial Sequence: Synthetic oligonucleotide
cugcguggaggcaucaauc

SEQ ID NO: 1049227 - RNA, 19 nt, Artificial Sequence
  Description of Artificial Sequence: Synthetic oligonucleotide
acaauuuauuagucuuauu

SEQ ID NO: 1049228 - RNA, 19 nt, Artificial Sequence
  Description of Artificial Sequence: Synthetic oligonucleotide
auacccacauaaugucaga

SEQ ID NO: 1049229 - RNA, 19 nt, Artificial Sequence
  Description of Artificial Sequence: Synthetic oligonucleotide
acgaugcuguccaaucuuc

SEQ ID NO: 1049230 - RNA, 19 nt, Artificial Sequence
  Description of Artificial Sequence: Synthetic oligonucleotide
auggagcucuucauaagug

SEQ ID NO: 1049231 - RNA, 19 nt, Artificial Sequence
  Description of Artificial Sequence: Synthetic oligonucleotide
ucuacuucauuuggaugau

SEQ ID NO: 1049232 - RNA, 19 nt, Artificial Sequence
  Description of Artificial Sequence: Synthetic oligonucleotide
cauccgcucugguaaaguc

SEQ ID NO: 1049233 - RNA, 19 nt, Artificial Sequence
  Description of Artificial Sequence: Synthetic oligonucleotide
ggacagaugugagugacac

SEQ ID NO: 1049234 - RNA, 19 nt, Artificial Sequence
  Description of Artificial Sequence: Synthetic oligonucleotide
gaaucugcauuuugcuucu

SEQ ID NO: 1049235 - RNA, 19 nt, Artificial Sequence
  Description of Artificial Sequence: Synthetic oligonucleotide
aguaaucgcucauggcuuu

SEQ ID NO: 1049236 - RNA, 19 nt, Artificial Sequence
  Description of Artificial Sequence: Synthetic oligonucleotide
uacccacauaaugucagaa

SEQ ID NO: 1049237 - RNA, 19 nt, Artificial Sequence
  Description of Artificial Sequence: Synthetic oligonucleotide
guaagcuggggcccaacga

SEQ ID NO: 1049238 - RNA, 19 nt, Artificial Sequence
  Description of Artificial Sequence: Synthetic oligonucleotide
auuaagguucaagggucca

SEQ ID NO: 1049239 - RNA, 19 nt, Artificial Sequence
  Description of Artificial Sequence: Synthetic oligonucleotide
gaggaacgcgguauauuug

SEQ ID NO: 1049240 - RNA, 19 nt, Artificial Sequence
  Description of Artificial Sequence: Synthetic oligonucleotide
caauuaaauggagcucuuc

SEQ ID NO: 1049241 - RNA, 19 nt, Artificial Sequence
  Description of Artificial Sequence: Synthetic oligonucleotide
uaaucgcucauggcuuuca

SEQ ID NO: 1049242 - RNA, 19 nt, Artificial Sequence
  Description of Artificial Sequence: Synthetic oligonucleotide
agauauucucuuguugaua

SEQ ID NO: 1049243 - RNA, 19 nt, Artificial Sequence
  Description of Artificial Sequence: Synthetic oligonucleotide
cuguacaccuuguccaaca

SEQ ID NO: 1049244 - RNA, 19 nt, Artificial Sequence
  Description of Artificial Sequence: Synthetic oligonucleotide
ugucagaugccagcacugu

SEQ ID NO: 1049245 - RNA, 19 nt, Artificial Sequence
  Description of Artificial Sequence: Synthetic oligonucleotide
gaagauuaccuggcauuuc

SEQ ID NO: 1049246 - RNA, 19 nt, Artificial Sequence
  Description of Artificial Sequence: Synthetic oligonucleotide
gcgggaacugcuuuucuug

SEQ ID NO: 1049247 - RNA, 19 nt, Artificial Sequence
  Description of Artificial Sequence: Synthetic oligonucleotide
gaacgcgguauauuugacu

SEQ ID NO: 1049248 - RNA, 19 nt, Artificial Sequence
  Description of Artificial Sequence: Synthetic oligonucleotide
guggguuguagaugaagaa

SEQ ID NO: 1049249 - RNA, 19 nt, Artificial Sequence
  Description of Artificial Sequence: Synthetic oligonucleotide
cuucuguguauguaaagau

SEQ ID NO: 1049250 - RNA, 19 nt, Artificial Sequence
  Description of Artificial Sequence: Synthetic oligonucleotide
uucauccgcucugguaaag

SEQ ID NO: 1049251 - RNA, 19 nt, Artificial Sequence
  Description of Artificial Sequence: Synthetic oligonucleotide
aucaaucauaaagcacaca

SEQ ID NO: 1049252 - RNA, 19 nt, Artificial Sequence
  Description of Artificial Sequence: Synthetic oligonucleotide
ggcaucaaucauaaagcac

SEQ ID NO: 1049253 - RNA, 19 nt, Artificial Sequence
  Description of Artificial Sequence: Synthetic oligonucleotide
guugaagauuaccuggcau

SEQ ID NO: 1049254 - RNA, 19 nt, Artificial Sequence
  Description of Artificial Sequence: Synthetic oligonucleotide
aauccagcgucagcugcgu

SEQ ID NO: 1049255 - RNA, 19 nt, Artificial Sequence
  Description of Artificial Sequence: Synthetic oligonucleotide
ucauccgcucugguaaagu

SEQ ID NO: 1049256 - RNA, 19 nt, Artificial Sequence
  Description of Artificial Sequence: Synthetic oligonucleotide
ugcagguuuugaugggcua

SEQ ID NO: 1049257 - RNA, 19 nt, Artificial Sequence
  Description of Artificial Sequence: Synthetic oligonucleotide
caguuaaguuguaauggua

SEQ ID NO: 1049258 - RNA, 19 nt, Artificial Sequence
  Description of Artificial Sequence: Synthetic oligonucleotide
ugguaaagucacuguugau

SEQ ID NO: 1049259 - RNA, 19 nt, Artificial Sequence
  Description of Artificial Sequence: Synthetic oligonucleotide
ccucaugucaucuuguucu

SEQ ID NO: 1049260 - RNA, 19 nt, Artificial Sequence
  Description of Artificial Sequence: Synthetic oligonucleotide
gaagcucaacagcgcgggc

SEQ ID NO: 1049261 - RNA, 19 nt, Artificial Sequence
  Description of Artificial Sequence: Synthetic oligonucleotide
ucagcugcguggaggcauc

SEQ ID NO: 1049262 - RNA, 19 nt, Artificial Sequence
  Description of Artificial Sequence: Synthetic oligonucleotide
gcaaauaccgauggaagaa

SEQ ID NO: 1049263 - RNA, 19 nt, Artificial Sequence
  Description of Artificial Sequence: Synthetic oligonucleotide
ggaaugauauuaagcugac

SEQ ID NO: 1049264 - RNA, 19 nt, Artificial Sequence
  Description of Artificial Sequence: Synthetic oligonucleotide
cugguucauugaagaacug

SEQ ID NO: 1049265 - RNA, 19 nt, Artificial Sequence
  Description of Artificial Sequence: Synthetic oligonucleotide
agauuaccuggcauuucug

SEQ ID NO: 1049266 - RNA, 19 nt, Artificial Sequence
  Description of Artificial Sequence: Synthetic oligonucleotide
augaccaguuaaguuguaa

SEQ ID NO: 1049267 - RNA, 19 nt, Artificial Sequence
  Description of Artificial Sequence: Synthetic oligonucleotide
ccuagaaucuucauuagau

SEQ ID NO: 1049268 - RNA, 19 nt, Artificial Sequence
  Description of Artificial Sequence: Synthetic oligonucleotide
aggguccaguaagaaaucu

SEQ ID NO: 1049269 - RNA, 19 nt, Artificial Sequence
  Description of Artificial Sequence: Synthetic oligonucleotide
caacaacccaguaaucgcu

SEQ ID NO: 1049270 - RNA, 19 nt, Artificial Sequence
  Description of Artificial Sequence: Synthetic oligonucleotide
auccgcucugguaaaguca

SEQ ID NO: 1049271 - RNA, 19 nt, Artificial Sequence
  Description of Artificial Sequence: Synthetic oligonucleotide
ccaacgaugcuguccaauc

SEQ ID NO: 1049272 - RNA, 19 nt, Artificial Sequence
  Description of Artificial Sequence: Synthetic oligonucleotide
uagaggaacgcgguauauu

SEQ ID NO: 1049273 - RNA, 19 nt, Artificial Sequence
  Description of Artificial Sequence: Synthetic oligonucleotide
cagaaacgucccauuaaaa

SEQ ID NO: 1049274 - RNA, 19 nt, Artificial Sequence
  Description of Artificial Sequence: Synthetic oligonucleotide
cauggccuuauaaacaauu

SEQ ID NO: 1049275 - RNA, 19 nt, Artificial Sequence
  Description of Artificial Sequence: Synthetic oligonucleotide
auggccuuauaaacaauua

SEQ ID NO: 1049276 - RNA, 19 nt, Artificial Sequence
  Description of Artificial Sequence: Synthetic oligonucleotide
cuguacaauugcuucacau

SEQ ID NO: 1049277 - RNA, 19 nt, Artificial Sequence
  Description of Artificial Sequence: Synthetic oligonucleotide
aggucacaugacugcaaau

SEQ ID NO: 1049278 - RNA, 19 nt, Artificial Sequence
  Description of Artificial Sequence: Synthetic oligonucleotide
cugcaaauguagggucugc

SEQ ID NO: 1049279 - RNA, 19 nt, Artificial Sequence
  Description of Artificial Sequence: Synthetic oligonucleotide
guucaaggguccaguaaga

SEQ ID NO: 1049280 - RNA, 19 nt, Artificial Sequence
  Description of Artificial Sequence: Synthetic oligonucleotide
cacauaaugucagaagaau

SEQ ID NO: 1049281 - RNA, 19 nt, Artificial Sequence
  Description of Artificial Sequence: Synthetic oligonucleotide
acugaacuguacaccuugu

SEQ ID NO: 1049282 - RNA, 19 nt, Artificial Sequence
  Description of Artificial Sequence: Synthetic oligonucleotide
gcaaauguagggucugcaa

SEQ ID NO: 1049283 - RNA, 19 nt, Artificial Sequence
  Description of Artificial Sequence: Synthetic oligonucleotide
acagugaaguggugagaua

SEQ ID NO: 1049284 - RNA, 19 nt, Artificial Sequence
  Description of Artificial Sequence: Synthetic oligonucleotide
cuuaaacugggguucuuuu

SEQ ID NO: 1049285 - RNA, 19 nt, Artificial Sequence
  Description of Artificial Sequence: Synthetic oligonucleotide
ucgcgcggcccgaagcgug

SEQ ID NO: 1049286 - RNA, 19 nt, Artificial Sequence
  Description of Artificial Sequence: Synthetic oligonucleotide
ucaacagcgcgggcgggaa

SEQ ID NO: 1049287 - RNA, 19 nt, Artificial Sequence
  Description of Artificial Sequence: Synthetic oligonucleotide
acaauuaaauggagcucuu

SEQ ID NO: 1049288 - RNA, 19 nt, Artificial Sequence
  Description of Artificial Sequence: Synthetic oligonucleotide
ggucguuguagaggaacgc

SEQ ID NO: 1049289 - RNA, 19 nt, Artificial Sequence
  Description of Artificial Sequence: Synthetic oligonucleotide
cccaguaaucgcucauggc

SEQ ID NO: 1049290 - RNA, 19 nt, Artificial Sequence
  Description of Artificial Sequence: Synthetic oligonucleotide
gaacuuaaacugggguucu

SEQ ID NO: 1049291 - RNA, 19 nt, Artificial Sequence
  Description of Artificial Sequence: Synthetic oligonucleotide
cuuuucuugggccgcccaa

SEQ ID NO: 1049292 - RNA, 19 nt, Artificial Sequence
  Description of Artificial Sequence: Synthetic oligonucleotide
ucccgcugaucagacuucu

SEQ ID NO: 1049293 - RNA, 19 nt, Artificial Sequence
  Description of Artificial Sequence: Synthetic oligonucleotide
cuuccauaguguugaagau

SEQ ID NO: 1049294 - RNA, 19 nt, Artificial Sequence
  Description of Artificial Sequence: Synthetic oligonucleotide
cucucccucgcgcggcccg

SEQ ID NO: 1049295 - RNA, 19 nt, Artificial Sequence
  Description of Artificial Sequence: Synthetic oligonucleotide
cacuccagaugaguugguc

SEQ ID NO: 1049296 - RNA, 19 nt, Artificial Sequence
  Description of Artificial Sequence: Synthetic oligonucleotide
gaaugauauuaagcugacu

SEQ ID NO: 1049297 - RNA, 19 nt, Artificial Sequence
  Description of Artificial Sequence: Synthetic oligonucleotide
cagguauugcuuuacuauu

SEQ ID NO: 1049298 - RNA, 19 nt, Artificial Sequence
  Description of Artificial Sequence: Synthetic oligonucleotide
ccacaauuggcuugccauc

SEQ ID NO: 1049299 - RNA, 19 nt, Artificial Sequence
  Description of Artificial Sequence: Synthetic oligonucleotide
ugacuucgaucagguuugc

SEQ ID NO: 1049300 - RNA, 19 nt, Artificial Sequence
  Description of Artificial Sequence: Synthetic oligonucleotide
ccacauaaugucagaagaa

SEQ ID NO: 1049301 - RNA, 19 nt, Artificial Sequence
  Description of Artificial Sequence: Synthetic oligonucleotide
cagauauucucuuguugau

SEQ ID NO: 1049302 - RNA, 19 nt, Artificial Sequence
  Description of Artificial Sequence: Synthetic oligonucleotide
cauaagugucaucuguauu

SEQ ID NO: 1049303 - RNA, 19 nt, Artificial Sequence
  Description of Artificial Sequence: Synthetic oligonucleotide
ucgaucagguuugcauuuu

SEQ ID NO: 1049304 - RNA, 19 nt, Artificial Sequence
  Description of Artificial Sequence: Synthetic oligonucleotide
agugaaguggugagauauu

SEQ ID NO: 1049305 - RNA, 19 nt, Artificial Sequence
  Description of Artificial Sequence: Synthetic oligonucleotide
uccgaacaaccaugaucau

SEQ ID NO: 1049306 - RNA, 19 nt, Artificial Sequence
  Description of Artificial Sequence: Synthetic oligonucleotide
caguaaucgcucauggcuu

SEQ ID NO: 1049307 - RNA, 19 nt, Artificial Sequence
  Description of Artificial Sequence: Synthetic oligonucleotide
gauuccgaacaaccaugau

SEQ ID NO: 1049308 - RNA, 19 nt, Artificial Sequence
  Description of Artificial Sequence: Synthetic oligonucleotide
guaaucgcucauggcuuuc

SEQ ID NO: 1049309 - RNA, 19 nt, Artificial Sequence
  Description of Artificial Sequence: Synthetic oligonucleotide
uccagaugaguuggucguu

SEQ ID NO: 1049310 - RNA, 19 nt, Artificial Sequence
  Description of Artificial Sequence: Synthetic oligonucleotide
gacuucgaucagguuugca

SEQ ID NO: 1049311 - RNA, 19 nt, Artificial Sequence
  Description of Artificial Sequence: Synthetic oligonucleotide
gugaaguggugagauauuu

SEQ ID NO: 1049312 - RNA, 19 nt, Artificial Sequence
  Description of Artificial Sequence: Synthetic oligonucleotide
ccaguuaaguuguaauggu

SEQ ID NO: 1049313 - RNA, 19 nt, Artificial Sequence
  Description of Artificial Sequence: Synthetic oligonucleotide
ccgaacaaccaugaucauc

SEQ ID NO: 1049314 - RNA, 19 nt, Artificial Sequence
  Description of Artificial Sequence: Synthetic oligonucleotide
ccuuguaaacuguacaauu

SEQ ID NO: 1049315 - RNA, 19 nt, Artificial Sequence
  Description of Artificial Sequence: Synthetic oligonucleotide
gcacuguaagcuggggccc

SEQ ID NO: 1049316 - RNA, 19 nt, Artificial Sequence
  Description of Artificial Sequence: Synthetic oligonucleotide
auccagcgucagcugcgug

SEQ ID NO: 1049317 - RNA, 19 nt, Artificial Sequence
  Description of Artificial Sequence: Synthetic oligonucleotide
cucaugugaauuguacuuu

SEQ ID NO: 1049318 - RNA, 19 nt, Artificial Sequence
  Description of Artificial Sequence: Synthetic oligonucleotide
ggaacgcgguauauuugac

SEQ ID NO: 1049319 - RNA, 19 nt, Artificial Sequence
  Description of Artificial Sequence: Synthetic oligonucleotide
ccucgcgcggcccgaagcg

SEQ ID NO: 1049320 - RNA, 19 nt, Artificial Sequence
  Description of Artificial Sequence: Synthetic oligonucleotide
ccauaguguugaagauuac

SEQ ID NO: 1049321 - RNA, 19 nt, Artificial Sequence
  Description of Artificial Sequence: Synthetic oligonucleotide
ccucaugugaauuguacuu

SEQ ID NO: 1049322 - RNA, 19 nt, Artificial Sequence
  Description of Artificial Sequence: Synthetic oligonucleotide
gcagguuuugaugggcuaa

SEQ ID NO: 1049323 - RNA, 19 nt, Artificial Sequence
  Description of Artificial Sequence: Synthetic oligonucleotide
ggaaucccuuccugccaac

SEQ ID NO: 1049324 - RNA, 19 nt, Artificial Sequence
  Description of Artificial Sequence: Synthetic oligonucleotide
agcgcgggcgggaacugcu

SEQ ID NO: 1049325 - RNA, 19 nt, Artificial Sequence
  Description of Artificial Sequence: Synthetic oligonucleotide
cuguaagcuggggcccaac

SEQ ID NO: 1049326 - RNA, 19 nt, Artificial Sequence
  Description of Artificial Sequence: Synthetic oligonucleotide
cucaacagcgcgggcggga

SEQ ID NO: 1049327 - RNA, 19 nt, Artificial Sequence
  Description of Artificial Sequence: Synthetic oligonucleotide
gcgguauauuugacuacac

SEQ ID NO: 1049328 - RNA, 19 nt, Artificial Sequence
  Description of Artificial Sequence: Synthetic oligonucleotide
caacagcgcgggcgggaac

SEQ ID NO: 1049329 - RNA, 19 nt, Artificial Sequence
  Description of Artificial Sequence: Synthetic oligonucleotide
guagaggaacgcgguauau

SEQ ID NO: 1049330 - RNA, 19 nt, Artificial Sequence
  Description of Artificial Sequence: Synthetic oligonucleotide
cagaugugagugacacacu

SEQ ID NO: 1049331 - RNA, 19 nt, Artificial Sequence
  Description of Artificial Sequence: Synthetic oligonucleotide
acuguguggcgcagaguuu

SEQ ID NO: 1049332 - RNA, 19 nt, Artificial Sequence
  Description of Artificial Sequence: Synthetic oligonucleotide
cacuguaagcuggggccca

SEQ ID NO: 1049333 - RNA, 19 nt, Artificial Sequence
  Description of Artificial Sequence: Synthetic oligonucleotide
cacuuaggcuuucuuccau

SEQ ID NO: 1049334 - RNA, 19 nt, Artificial Sequence
  Description of Artificial Sequence: Synthetic oligonucleotide
ucucccucgcgcggcccga

SEQ ID NO: 1049335 - RNA, 19 nt, Artificial Sequence
  Description of Artificial Sequence: Synthetic oligonucleotide
acagcgcgggcgggaacug

SEQ ID NO: 1049336 - RNA, 19 nt, Artificial Sequence
  Description of Artificial Sequence: Synthetic oligonucleotide
cgcgguauauuugacuaca

SEQ ID NO: 1049337 - RNA, 19 nt, Artificial Sequence
  Description of Artificial Sequence: Synthetic oligonucleotide
cccuuauuggggaaucccu

SEQ ID NO: 1049338 - RNA, 19 nt, Artificial Sequence
  Description of Artificial Sequence: Synthetic oligonucleotide
cccgaagcguggguuguag

SEQ ID NO: 1049339 - RNA, 19 nt, Artificial Sequence
  Description of Artificial Sequence: Synthetic oligonucleotide
cagcgucagcugcguggag

SEQ ID NO: 1049340 - RNA, 19 nt, Artificial Sequence
  Description of Artificial Sequence: Synthetic oligonucleotide
guuggucguuguagaggaa

SEQ ID NO: 1049341 - RNA, 19 nt, Artificial Sequence
  Description of Artificial Sequence: Synthetic oligonucleotide
ccuuccugccaacucaggu

SEQ ID NO: 1049342 - RNA, 19 nt, Artificial Sequence
  Description of Artificial Sequence: Synthetic oligonucleotide
agcugcguggaggcaucaa

SEQ ID NO: 1049343 - RNA, 19 nt, Artificial Sequence
  Description of Artificial Sequence: Synthetic oligonucleotide
cccucgcgcggcccgaagc

SEQ ID NO: 1049344 - RNA, 19 nt, Artificial Sequence
  Description of Artificial Sequence: Synthetic oligonucleotide
cagcgcgggcgggaacugc

SEQ ID NO: 1049345 - RNA, 19 nt, Artificial Sequence
  Description of Artificial Sequence: Synthetic oligonucleotide
cgguauauuugacuacacu

SEQ ID NO: 1049346 - RNA, 19 nt, Artificial Sequence
  Description of Artificial Sequence: Synthetic oligonucleotide
agcguggguuguagaugaa

SEQ ID NO: 1049347 - RNA, 19 nt, Artificial Sequence
  Description of Artificial Sequence: Synthetic oligonucleotide
ccgaagcguggguuguaga

SEQ ID NO: 1049348 - RNA, 19 nt, Artificial Sequence
  Description of Artificial Sequence: Synthetic oligonucleotide
caugugccuggggaacagu

SEQ ID NO: 1049349 - RNA, 19 nt, Artificial Sequence
  Description of Artificial Sequence: Synthetic oligonucleotide
cggcccgaagcguggguug

SEQ ID NO: 1049350 - RNA, 19 nt, Artificial Sequence
  Description of Artificial Sequence: Synthetic oligonucleotide
cagcugcguggaggcauca

SEQ ID NO: 1049351 - RNA, 19 nt, Artificial Sequence
  Description of Artificial Sequence: Synthetic oligonucleotide
gcgcggcccgaagcguggg

SEQ ID NO: 1049352 - RNA, 19 nt, Artificial Sequence
  Description of Artificial Sequence: Synthetic oligonucleotide
cgggcgggaacugcuuuuc

SEQ ID NO: 1049353 - RNA, 19 nt, Artificial Sequence
  Description of Artificial Sequence: Synthetic oligonucleotide
cucgcgcggcccgaagcgu

SEQ ID NO: 1049354 - RNA, 19 nt, Artificial Sequence
  Description of Artificial Sequence: Synthetic oligonucleotide
ggcccgaagcguggguugu

SEQ ID NO: 1049355 - RNA, 19 nt, Artificial Sequence
  Description of Artificial Sequence: Synthetic oligonucleotide
cccaacgaugcuguccaau

SEQ ID NO: 1049356 - RNA, 19 nt, Artificial Sequence
  Description of Artificial Sequence: Synthetic oligonucleotide
gcgggcgggaacugcuuuu

SEQ ID NO: 1049357 - RNA, 19 nt, Artificial Sequence
  Description of Artificial Sequence: Synthetic oligonucleotide
ccacuccagaugaguuggu

SEQ ID NO: 1049358 - RNA, 19 nt, Artificial Sequence
  Description of Artificial Sequence: Synthetic oligonucleotide
cucccucgcgcggcccgaa

SEQ ID NO: 1049359 - RNA, 19 nt, Artificial Sequence
  Description of Artificial Sequence: Synthetic oligonucleotide
gcggcccgaagcguggguu

SEQ ID NO: 1049360 - RNA, 19 nt, Artificial Sequence
  Description of Artificial Sequence: Synthetic oligonucleotide
gcccgaagcguggguugua

SEQ ID NO: 1049361 - RNA, 19 nt, Artificial Sequence
  Description of Artificial Sequence: Synthetic oligonucleotide
cgucccggccgccgcugca

SEQ ID NO: 1049362 - RNA, 19 nt, Artificial Sequence
  Description of Artificial Sequence: Synthetic oligonucleotide
cgcgggcgggaacugcuuu

SEQ ID NO: 1049363 - RNA, 19 nt, Artificial Sequence
  Description of Artificial Sequence: Synthetic oligonucleotide
gcgcgggcgggaacugcuu

SEQ ID NO: 1049364 - RNA, 19 nt, Artificial Sequence
  Description of Artificial Sequence: Synthetic oligonucleotide
ccccgucccggccgccgcu

SEQ ID NO: 1049365 - RNA, 19 nt, Artificial Sequence
  Description of Artificial Sequence: Synthetic oligonucleotide
cgcggcccgaagcgugggu

SEQ ID NO: 1049366 - RNA, 19 nt, Artificial Sequence
  Description of Artificial Sequence: Synthetic oligonucleotide
aguugauugacucuggagc

SEQ ID NO: 1049367 - RNA, 19 nt, Artificial Sequence
  Description of Artificial Sequence: Synthetic oligonucleotide
ucuguaaugacuccaauca

SEQ ID NO: 1049368 - RNA, 19 nt, Artificial Sequence
  Description of Artificial Sequence: Synthetic oligonucleotide
cauauaggaucaaagaugc

SEQ ID NO: 1049369 - RNA, 19 nt, Artificial Sequence
  Description of Artificial Sequence: Synthetic oligonucleotide
aguuguagcauuccuuucc

SEQ ID NO: 1049370 - RNA, 19 nt, Artificial Sequence
  Description of Artificial Sequence: Synthetic oligonucleotide
auaaugaaggauugugucg

SEQ ID NO: 1049371 - RNA, 19 nt, Artificial Sequence
  Description of Artificial Sequence: Synthetic oligonucleotide
uuacacaaucauuugauga

SEQ ID NO: 1049372 - RNA, 19 nt, Artificial Sequence
  Description of Artificial Sequence: Synthetic oligonucleotide
guaugugucuuccucaucg

SEQ ID NO: 1049373 - RNA, 19 nt, Artificial Sequence
  Description of Artificial Sequence: Synthetic oligonucleotide
aaacgucgaaaguugauug

SEQ ID NO: 1049374 - RNA, 19 nt, Artificial Sequence
  Description of Artificial Sequence: Synthetic oligonucleotide
cacaacuccaugauuaucc

SEQ ID NO: 1049375 - RNA, 19 nt, Artificial Sequence
  Description of Artificial Sequence: Synthetic oligonucleotide
aauuuggaggcauugguaa

SEQ ID NO: 1049376 - RNA, 19 nt, Artificial Sequence
  Description of Artificial Sequence: Synthetic oligonucleotide
uuuuacacaaucauuugau

SEQ ID NO: 1049377 - RNA, 19 nt, Artificial Sequence
  Description of Artificial Sequence: Synthetic oligonucleotide
aaaaugaccucagcucucc

SEQ ID NO: 1049378 - RNA, 19 nt, Artificial Sequence
  Description of Artificial Sequence: Synthetic oligonucleotide
acaccaaacauccacacgu

SEQ ID NO: 1049379 - RNA, 19 nt, Artificial Sequence
  Description of Artificial Sequence: Synthetic oligonucleotide
auuugaugacaccagaaca

SEQ ID NO: 1049380 - RNA, 19 nt, Artificial Sequence
  Description of Artificial Sequence: Synthetic oligonucleotide
uguacuaagcugauaggca

SEQ ID NO: 1049381 - RNA, 19 nt, Artificial Sequence
  Description of Artificial Sequence: Synthetic oligonucleotide
ugggauaaaauccuucacu

SEQ ID NO: 1049382 - RNA, 19 nt, Artificial Sequence
  Description of Artificial Sequence: Synthetic oligonucleotide
ugauaaugaaggauugugu

SEQ ID NO: 1049383 - RNA, 19 nt, Artificial Sequence
  Description of Artificial Sequence: Synthetic oligonucleotide
guauccgucgaucagauca

SEQ ID NO: 1049384 - RNA, 19 nt, Artificial Sequence
  Description of Artificial Sequence: Synthetic oligonucleotide
auugugucgcuccauuuac

SEQ ID NO: 1049385 - RNA, 19 nt, Artificial Sequence
  Description of Artificial Sequence: Synthetic oligonucleotide
uaaugaaggauugugucgc

SEQ ID NO: 1049386 - RNA, 19 nt, Artificial Sequence
  Description of Artificial Sequence: Synthetic oligonucleotide
aaaauccuucacuggaucu

SEQ ID NO: 1049387 - RNA, 19 nt, Artificial Sequence
  Description of Artificial Sequence: Synthetic oligonucleotide
ugagcuuuaaguucaguaa

SEQ ID NO: 1049388 - RNA, 19 nt, Artificial Sequence
  Description of Artificial Sequence: Synthetic oligonucleotide
uucgucauaaggcuguaga

SEQ ID NO: 1049389 - RNA, 19 nt, Artificial Sequence
  Description of Artificial Sequence: Synthetic oligonucleotide
aaacugaccuucuccaaug

SEQ ID NO: 1049390 - RNA, 19 nt, Artificial Sequence
  Description of Artificial Sequence: Synthetic oligonucleotide
aaguucuauucuuucucuc

SEQ ID NO: 1049391 - RNA, 19 nt, Artificial Sequence
  Description of Artificial Sequence: Synthetic oligonucleotide
aaacguacgucuccaaacu

SEQ ID NO: 1049392 - RNA, 19 nt, Artificial Sequence
  Description of Artificial Sequence: Synthetic oligonucleotide
uucaauucgaccgaucaca

SEQ ID NO: 1049393 - RNA, 19 nt, Artificial Sequence
  Description of Artificial Sequence: Synthetic oligonucleotide
guagugauuggucuggacc

SEQ ID NO: 1049394 - RNA, 19 nt, Artificial Sequence
  Description of Artificial Sequence: Synthetic oligonucleotide
cagacuaugcugcacaggc

SEQ ID NO: 1049395 - RNA, 19 nt, Artificial Sequence
  Description of Artificial Sequence: Synthetic oligonucleotide
uguauuuccuuacuugcaa

SEQ ID NO: 1049396 - RNA, 19 nt, Artificial Sequence
  Description of Artificial Sequence: Synthetic oligonucleotide
ugugaggauggucaaacgu

SEQ ID NO: 1049397 - RNA, 19 nt, Artificial Sequence
  Description of Artificial Sequence: Synthetic oligonucleotide
uccuaauuuuacacaauca

SEQ ID NO: 1049398 - RNA, 19 nt, Artificial Sequence
  Description of Artificial Sequence: Synthetic oligonucleotide
guugauugacucuggagcc

SEQ ID NO: 1049399 - RNA, 19 nt, Artificial Sequence
  Description of Artificial Sequence: Synthetic oligonucleotide
ccauauaucgggauaaucc

SEQ ID NO: 1049400 - RNA, 19 nt, Artificial Sequence
  Description of Artificial Sequence: Synthetic oligonucleotide
ucggaacagacuaugcugc

SEQ ID NO: 1049401 - RNA, 19 nt, Artificial Sequence
  Description of Artificial Sequence: Synthetic oligonucleotide
uuggaagcuuuauaguaag

SEQ ID NO: 1049402 - RNA, 19 nt, Artificial Sequence
  Description of Artificial Sequence: Synthetic oligonucleotide
cacuagcugagguaaaacg

SEQ ID NO: 1049403 - RNA, 19 nt, Artificial Sequence
  Description of Artificial Sequence: Synthetic oligonucleotide
aucggaacagacuaugcug

SEQ ID NO: 1049404 - RNA, 19 nt, Artificial Sequence
  Description of Artificial Sequence: Synthetic oligonucleotide
uucgcuauuugaauacuga

SEQ ID NO: 1049405 - RNA, 19 nt, Artificial Sequence
  Description of Artificial Sequence: Synthetic oligonucleotide
ugaaggauugugucgcucc

SEQ ID NO: 1049406 - RNA, 19 nt, Artificial Sequence
  Description of Artificial Sequence: Synthetic oligonucleotide
ucugaaucucauaaucccu

SEQ ID NO: 1049407 - RNA, 19 nt, Artificial Sequence
  Description of Artificial Sequence: Synthetic oligonucleotide
ugucgcuccauuuaccagc

SEQ ID NO: 1049408 - RNA, 19 nt, Artificial Sequence
  Description of Artificial Sequence: Synthetic oligonucleotide
uagugauuggucuggacca

SEQ ID NO: 1049409 - RNA, 19 nt, Artificial Sequence
  Description of Artificial Sequence: Synthetic oligonucleotide
aaucauuugaugacaccag

SEQ ID NO: 1049410 - RNA, 19 nt, Artificial Sequence
  Description of Artificial Sequence: Synthetic oligonucleotide
ucuccaagcgugcacaacu

SEQ ID NO: 1049411 - RNA, 19 nt, Artificial Sequence
  Description of Artificial Sequence: Synthetic oligonucleotide
uauaucgggauaauccaaa

SEQ ID NO: 1049412 - RNA, 19 nt, Artificial Sequence
  Description of Artificial Sequence: Synthetic oligonucleotide
agcauuucgucauaaggcu

SEQ ID NO: 1049413 - RNA, 19 nt, Artificial Sequence
  Description of Artificial Sequence: Synthetic oligonucleotide
ucccauuccucgaaggucc

SEQ ID NO: 1049414 - RNA, 19 nt, Artificial Sequence
  Description of Artificial Sequence: Synthetic oligonucleotide
guugauuuccagucggacc

SEQ ID NO: 1049415 - RNA, 19 nt, Artificial Sequence
  Description of Artificial Sequence: Synthetic oligonucleotide
acaauuuggaggcauuggu

SEQ ID NO: 1049416 - RNA, 19 nt, Artificial Sequence
  Description of Artificial Sequence: Synthetic oligonucleotide
uccgcaaugguuagggaug

SEQ ID NO: 1049417 - RNA, 19 nt, Artificial Sequence
  Description of Artificial Sequence: Synthetic oligonucleotide
aaucuuuccccauuuucaa

SEQ ID NO: 1049418 - RNA, 19 nt, Artificial Sequence
  Description of Artificial Sequence: Synthetic oligonucleotide
aaaguugauugacucugga

SEQ ID NO: 1049419 - RNA, 19 nt, Artificial Sequence
  Description of Artificial Sequence: Synthetic oligonucleotide
auugacucuggagccaucc

SEQ ID NO: 1049420 - RNA, 19 nt, Artificial Sequence
  Description of Artificial Sequence: Synthetic oligonucleotide
uauaguaaguacugucuuc

SEQ ID NO: 1049421 - RNA, 19 nt, Artificial Sequence
  Description of Artificial Sequence: Synthetic oligonucleotide
cauaaucccuggucgaggg

SEQ ID NO: 1049422 - RNA, 19 nt, Artificial Sequence
  Description of Artificial Sequence: Synthetic oligonucleotide
ugaggauggucaaacguac

SEQ ID NO: 1049423 - RNA, 19 nt, Artificial Sequence
  Description of Artificial Sequence: Synthetic oligonucleotide
caaacguacgucuccaaac

SEQ ID NO: 1049424 - RNA, 19 nt, Artificial Sequence
  Description of Artificial Sequence: Synthetic oligonucleotide
ugggcuaggauaaccaggu

SEQ ID NO: 1049425 - RNA, 19 nt, Artificial Sequence
  Description of Artificial Sequence: Synthetic oligonucleotide
ucuugggcuaggauaacca

SEQ ID NO: 1049426 - RNA, 19 nt, Artificial Sequence
  Description of Artificial Sequence: Synthetic oligonucleotide
uuaccagccggcaguaucc

SEQ ID NO: 1049427 - RNA, 19 nt, Artificial Sequence
  Description of Artificial Sequence: Synthetic oligonucleotide
gaucacaucauuguucuuc

SEQ ID NO: 1049428 - RNA, 19 nt, Artificial Sequence
  Description of Artificial Sequence: Synthetic oligonucleotide
cuguacuaagcugauaggc

SEQ ID NO: 1049429 - RNA, 19 nt, Artificial Sequence
  Description of Artificial Sequence: Synthetic oligonucleotide
cugauaaugaaggauugug

SEQ ID NO: 1049430 - RNA, 19 nt, Artificial Sequence
  Description of Artificial Sequence: Synthetic oligonucleotide
gggauaaaauccuucacug

SEQ ID NO: 1049431 - RNA, 19 nt, Artificial Sequence
  Description of Artificial Sequence: Synthetic oligonucleotide
cugaaucucauaaucccug

SEQ ID NO: 1049432 - RNA, 19 nt, Artificial Sequence
  Description of Artificial Sequence: Synthetic oligonucleotide
ucgucauaaggcuguagag

SEQ ID NO: 1049433 - RNA, 19 nt, Artificial Sequence
  Description of Artificial Sequence: Synthetic oligonucleotide
cauauaucgggauaaucca

SEQ ID NO: 1049434 - RNA, 19 nt, Artificial Sequence
  Description of Artificial Sequence: Synthetic oligonucleotide
caucagacccuccagaguc

SEQ ID NO: 1049435 - RNA, 19 nt, Artificial Sequence
  Description of Artificial Sequence: Synthetic oligonucleotide
aggcauauaggaucaaaga

SEQ ID NO: 1049436 - RNA, 19 nt, Artificial Sequence
  Description of Artificial Sequence: Synthetic oligonucleotide
auaggaucaaagaugccag

SEQ ID NO: 1049437 - RNA, 19 nt, Artificial Sequence
  Description of Artificial Sequence: Synthetic oligonucleotide
caugauuauccagacgggg

SEQ ID NO: 1049438 - RNA, 19 nt, Artificial Sequence
  Description of Artificial Sequence: Synthetic oligonucleotide
uuuaccagccggcaguauc

SEQ ID NO: 1049439 - RNA, 19 nt, Artificial Sequence
  Description of Artificial Sequence: Synthetic oligonucleotide
gaugugaggauggucaaac

SEQ ID NO: 1049440 - RNA, 19 nt, Artificial Sequence
  Description of Artificial Sequence: Synthetic oligonucleotide
ugugucgcuccauuuacca

SEQ ID NO: 1049441 - RNA, 19 nt, Artificial Sequence
  Description of Artificial Sequence: Synthetic oligonucleotide
aacgucgaaaguugauuga

SEQ ID NO: 1049442 - RNA, 19 nt, Artificial Sequence
  Description of Artificial Sequence: Synthetic oligonucleotide
aaaacgucgaaaguugauu

SEQ ID NO: 1049443 - RNA, 19 nt, Artificial Sequence
  Description of Artificial Sequence: Synthetic oligonucleotide
uguuggccaacuuugguau

SEQ ID NO: 1049444 - RNA, 19 nt, Artificial Sequence
  Description of Artificial Sequence: Synthetic oligonucleotide
uucgccuucuuucuguggu

SEQ ID NO: 1049445 - RNA, 19 nt, Artificial Sequence
  Description of Artificial Sequence: Synthetic oligonucleotide
ggauaaaauccuucacugg

SEQ ID NO: 1049446 - RNA, 19 nt, Artificial Sequence
  Description of Artificial Sequence: Synthetic oligonucleotide
uaucgggauaauccaaagu

SEQ ID NO: 1049447 - RNA, 19 nt, Artificial Sequence
  Description of Artificial Sequence: Synthetic oligonucleotide
aacguacgucuccaaacug

SEQ ID NO: 1049448 - RNA, 19 nt, Artificial Sequence
  Description of Artificial Sequence: Synthetic oligonucleotide
auaucgggauaauccaaag

SEQ ID NO: 1049449 - RNA, 19 nt, Artificial Sequence
  Description of Artificial Sequence: Synthetic oligonucleotide
uauccgucgaucagaucag

SEQ ID NO: 1049450 - RNA, 19 nt, Artificial Sequence
  Description of Artificial Sequence: Synthetic oligonucleotide
ucaaacguacgucuccaaa

SEQ ID NO: 1049451 - RNA, 19 nt, Artificial Sequence
  Description of Artificial Sequence: Synthetic oligonucleotide
ugaucggaacagacuaugc

SEQ ID NO: 1049452 - RNA, 19 nt, Artificial Sequence
  Description of Artificial Sequence: Synthetic oligonucleotide
gucgaaaguugauugacuc

SEQ ID NO: 1049453 - RNA, 19 nt, Artificial Sequence
  Description of Artificial Sequence: Synthetic oligonucleotide
ucauaaucccuggucgagg

SEQ ID NO: 1049454 - RNA, 19 nt, Artificial Sequence
  Description of Artificial Sequence: Synthetic oligonucleotide
uuuccagauacgcgagugc

SEQ ID NO: 1049455 - RNA, 19 nt, Artificial Sequence
  Description of Artificial Sequence: Synthetic oligonucleotide
uggucaaacguacgucucc

SEQ ID NO: 1049456 - RNA, 19 nt, Artificial Sequence
  Description of Artificial Sequence: Synthetic oligonucleotide
uaaaacgucgaaaguugau

SEQ ID NO: 1049457 - RNA, 19 nt, Artificial Sequence
  Description of Artificial Sequence: Synthetic oligonucleotide
uaaguacugucuuccauau

SEQ ID NO: 1049458 - RNA, 19 nt, Artificial Sequence
  Description of Artificial Sequence: Synthetic oligonucleotide
cucgaagguccaaagcugc

SEQ ID NO: 1049459 - RNA, 19 nt, Artificial Sequence
  Description of Artificial Sequence: Synthetic oligonucleotide
ucuuccauauaucgggaua

SEQ ID NO: 1049460 - RNA, 19 nt, Artificial Sequence
  Description of Artificial Sequence: Synthetic oligonucleotide
aaugaccucagcucuccaa

SEQ ID NO: 1049461 - RNA, 19 nt, Artificial Sequence
  Description of Artificial Sequence: Synthetic oligonucleotide
gaaaguugauugacucugg

SEQ ID NO: 1049462 - RNA, 19 nt, Artificial Sequence
  Description of Artificial Sequence: Synthetic oligonucleotide
cucuguaaugacuccaauc

SEQ ID NO: 1049463 - RNA, 19 nt, Artificial Sequence
  Description of Artificial Sequence: Synthetic oligonucleotide
gcugcugucggauuagccg

SEQ ID NO: 1049464 - RNA, 19 nt, Artificial Sequence
  Description of Artificial Sequence: Synthetic oligonucleotide
ugauuauccagacgggguu

SEQ ID NO: 1049465 - RNA, 19 nt, Artificial Sequence
  Description of Artificial Sequence: Synthetic oligonucleotide
aucauuugaugacaccaga

SEQ ID NO: 1049466 - RNA, 19 nt, Artificial Sequence
  Description of Artificial Sequence: Synthetic oligonucleotide
ucuguggucugauaaugaa

SEQ ID NO: 1049467 - RNA, 19 nt, Artificial Sequence
  Description of Artificial Sequence: Synthetic oligonucleotide
ugauagauguguugauuuc

SEQ ID NO: 1049468 - RNA, 19 nt, Artificial Sequence
  Description of Artificial Sequence: Synthetic oligonucleotide
ucgaaaguugauugacucu

SEQ ID NO: 1049469 - RNA, 19 nt, Artificial Sequence
  Description of Artificial Sequence: Synthetic oligonucleotide
acgucgaaaguugauugac

SEQ ID NO: 1049470 - RNA, 19 nt, Artificial Sequence
  Description of Artificial Sequence: Synthetic oligonucleotide
cacaaucauuugaugacac

SEQ ID NO: 1049471 - RNA, 19 nt, Artificial Sequence
  Description of Artificial Sequence: Synthetic oligonucleotide
cuguggucugauaaugaag

SEQ ID NO: 1049472 - RNA, 19 nt, Artificial Sequence
  Description of Artificial Sequence: Synthetic oligonucleotide
agagaccugguagugauug

SEQ ID NO: 1049473 - RNA, 19 nt, Artificial Sequence
  Description of Artificial Sequence: Synthetic oligonucleotide
ugccgucacugucagaggc

SEQ ID NO: 1049474 - RNA, 19 nt, Artificial Sequence
  Description of Artificial Sequence: Synthetic oligonucleotide
gauacggucgccugucuuc

SEQ ID NO: 1049475 - RNA, 19 nt, Artificial Sequence
  Description of Artificial Sequence: Synthetic oligonucleotide
uacugaauggucuguacuu

SEQ ID NO: 1049476 - RNA, 19 nt, Artificial Sequence
  Description of Artificial Sequence: Synthetic oligonucleotide
augaucucagcguagucau

SEQ ID NO: 1049477 - RNA, 19 nt, Artificial Sequence
  Description of Artificial Sequence: Synthetic oligonucleotide
agauacgcgagugcuguac

SEQ ID NO: 1049478 - RNA, 19 nt, Artificial Sequence
  Description of Artificial Sequence: Synthetic oligonucleotide
uguccgaaugccuuguuuu

SEQ ID NO: 1049479 - RNA, 19 nt, Artificial Sequence
  Description of Artificial Sequence: Synthetic oligonucleotide
uuuugaguuguagcauucc

SEQ ID NO: 1049480 - RNA, 19 nt, Artificial Sequence
  Description of Artificial Sequence: Synthetic oligonucleotide
aaugaaggauugugucgcu

SEQ ID NO: 1049481 - RNA, 19 nt, Artificial Sequence
  Description of Artificial Sequence: Synthetic oligonucleotide
uucacuccuugaaaaggcu

SEQ ID NO: 1049482 - RNA, 19 nt, Artificial Sequence
  Description of Artificial Sequence: Synthetic oligonucleotide
guaaaugcugccugccaug

SEQ ID NO: 1049483 - RNA, 19 nt, Artificial Sequence
  Description of Artificial Sequence: Synthetic oligonucleotide
gauggucaaacguacgucu

SEQ ID NO: 1049484 - RNA, 19 nt, Artificial Sequence
  Description of Artificial Sequence: Synthetic oligonucleotide
ugucuucgcuauuugaaua

SEQ ID NO: 1049485 - RNA, 19 nt, Artificial Sequence
  Description of Artificial Sequence: Synthetic oligonucleotide
accgaucacaucauuguuc

SEQ ID NO: 1049486 - RNA, 19 nt, Artificial Sequence
  Description of Artificial Sequence: Synthetic oligonucleotide
cuugggcuaggauaaccag

SEQ ID NO: 1049487 - RNA, 19 nt, Artificial Sequence
  Description of Artificial Sequence: Synthetic oligonucleotide
uguucuccgcaaugguuag

SEQ ID NO: 1049488 - RNA, 19 nt, Artificial Sequence
  Description of Artificial Sequence: Synthetic oligonucleotide
ucgcuauuugaauacugaa

SEQ ID NO: 1049489 - RNA, 19 nt, Artificial Sequence
  Description of Artificial Sequence: Synthetic oligonucleotide
ucaauucgaccgaucacau

SEQ ID NO: 1049490 - RNA, 19 nt, Artificial Sequence
  Description of Artificial Sequence: Synthetic oligonucleotide
guaaguacugucuuccaua

SEQ ID NO: 1049491 - RNA, 19 nt, Artificial Sequence
  Description of Artificial Sequence: Synthetic oligonucleotide
uucaguaaaccugggccgc

SEQ ID NO: 1049492 - RNA, 19 nt, Artificial Sequence
  Description of Artificial Sequence: Synthetic oligonucleotide
cagguuucagaaaucgcuc

SEQ ID NO: 1049493 - RNA, 19 nt, Artificial Sequence
  Description of Artificial Sequence: Synthetic oligonucleotide
acaggcuuagaugcccacc

SEQ ID NO: 1049494 - RNA, 19 nt, Artificial Sequence
  Description of Artificial Sequence: Synthetic oligonucleotide
augugaggauggucaaacg

SEQ ID NO: 1049495 - RNA, 19 nt, Artificial Sequence
  Description of Artificial Sequence: Synthetic oligonucleotide
uccgucgaucagaucagcc

SEQ ID NO: 1049496 - RNA, 19 nt, Artificial Sequence
  Description of Artificial Sequence: Synthetic oligonucleotide
uccaagcgugcacaacucc

SEQ ID NO: 1049497 - RNA, 19 nt, Artificial Sequence
  Description of Artificial Sequence: Synthetic oligonucleotide
auuagccgcucuuccauca

SEQ ID NO: 1049498 - RNA, 19 nt, Artificial Sequence
  Description of Artificial Sequence: Synthetic oligonucleotide
gucuccuaauuuuacacaa

SEQ ID NO: 1049499 - RNA, 19 nt, Artificial Sequence
  Description of Artificial Sequence: Synthetic oligonucleotide
uguugauuuccagucggac

SEQ ID NO: 1049500 - RNA, 19 nt, Artificial Sequence
  Description of Artificial Sequence: Synthetic oligonucleotide
uuuggaggcauugguaauc

SEQ ID NO: 1049501 - RNA, 19 nt, Artificial Sequence
  Description of Artificial Sequence: Synthetic oligonucleotide
agagccucacgucagguuu

SEQ ID NO: 1049502 - RNA, 19 nt, Artificial Sequence
  Description of Artificial Sequence: Synthetic oligonucleotide
uggucugauaaugaaggau

SEQ ID NO: 1049503 - RNA, 19 nt, Artificial Sequence
  Description of Artificial Sequence: Synthetic oligonucleotide
aaauccuucacuggaucuu

SEQ ID NO: 1049504 - RNA, 19 nt, Artificial Sequence
  Description of Artificial Sequence: Synthetic oligonucleotide
aagcgugcacaacuccaug

SEQ ID NO: 1049505 - RNA, 19 nt, Artificial Sequence
  Description of Artificial Sequence: Synthetic oligonucleotide
gauugugucgcuccauuua

SEQ ID NO: 1049506 - RNA, 19 nt, Artificial Sequence
  Description of Artificial Sequence: Synthetic oligonucleotide
cuuuccagauacgcgagug

SEQ ID NO: 1049507 - RNA, 19 nt, Artificial Sequence
  Description of Artificial Sequence: Synthetic oligonucleotide
augaucggaacagacuaug

SEQ ID NO: 1049508 - RNA, 19 nt, Artificial Sequence
  Description of Artificial Sequence: Synthetic oligonucleotide
uugugucgcuccauuuacc

SEQ ID NO: 1049509 - RNA, 19 nt, Artificial Sequence
  Description of Artificial Sequence: Synthetic oligonucleotide
ugucgaugcugccucgaga

SEQ ID NO: 1049510 - RNA, 19 nt, Artificial Sequence
  Description of Artificial Sequence: Synthetic oligonucleotide
auauaggaucaaagaugcc

SEQ ID NO: 1049511 - RNA, 19 nt, Artificial Sequence
  Description of Artificial Sequence: Synthetic oligonucleotide
caagauugugcugagcuga

SEQ ID NO: 1049512 - RNA, 19 nt, Artificial Sequence
  Description of Artificial Sequence: Synthetic oligonucleotide
agcgugcacaacuccauga

SEQ ID NO: 1049513 - RNA, 19 nt, Artificial Sequence
  Description of Artificial Sequence: Synthetic oligonucleotide
augauuauccagacggggu

SEQ ID NO: 1049514 - RNA, 19 nt, Artificial Sequence
  Description of Artificial Sequence: Synthetic oligonucleotide
auagauguguugauuucca

SEQ ID NO: 1049515 - RNA, 19 nt, Artificial Sequence
  Description of Artificial Sequence: Synthetic oligonucleotide
aaucagcuucacgauguga

SEQ ID NO: 1049516 - RNA, 19 nt, Artificial Sequence
  Description of Artificial Sequence: Synthetic oligonucleotide
uuagccgcucuuccaucag

SEQ ID NO: 1049517 - RNA, 19 nt, Artificial Sequence
  Description of Artificial Sequence: Synthetic oligonucleotide
acccucauuguagcugucc

SEQ ID NO: 1049518 - RNA, 19 nt, Artificial Sequence
  Description of Artificial Sequence: Synthetic oligonucleotide
cacgcggacaccuccuggg

SEQ ID NO: 1049519 - RNA, 19 nt, Artificial Sequence
  Description of Artificial Sequence: Synthetic oligonucleotide
uggaagcuuuauaguaagu

SEQ ID NO: 1049520 - RNA, 19 nt, Artificial Sequence
  Description of Artificial Sequence: Synthetic oligonucleotide
aagauugugcugagcugag

SEQ ID NO: 1049521 - RNA, 19 nt, Artificial Sequence
  Description of Artificial Sequence: Synthetic oligonucleotide
ugaccucagcucuccaagc

SEQ ID NO: 1049522 - RNA, 19 nt, Artificial Sequence
  Description of Artificial Sequence: Synthetic oligonucleotide
uccauauaucgggauaauc

SEQ ID NO: 1049523 - RNA, 19 nt, Artificial Sequence
  Description of Artificial Sequence: Synthetic oligonucleotide
gaucggaacagacuaugcu

SEQ ID NO: 1049524 - RNA, 19 nt, Artificial Sequence
  Description of Artificial Sequence: Synthetic oligonucleotide
cacuguuggccaacuuugg

SEQ ID NO: 1049525 - RNA, 19 nt, Artificial Sequence
  Description of Artificial Sequence: Synthetic oligonucleotide
caggcugauagauguguug

SEQ ID NO: 1049526 - RNA, 19 nt, Artificial Sequence
  Description of Artificial Sequence: Synthetic oligonucleotide
uucacuggaucuugggcua

SEQ ID NO: 1049527 - RNA, 19 nt, Artificial Sequence
  Description of Artificial Sequence: Synthetic oligonucleotide
gaggauggucaaacguacg

SEQ ID NO: 1049528 - RNA, 19 nt, Artificial Sequence
  Description of Artificial Sequence: Synthetic oligonucleotide
cauugguaaucuuucccca

SEQ ID NO: 1049529 - RNA, 19 nt, Artificial Sequence
  Description of Artificial Sequence: Synthetic oligonucleotide
auuuucaauucgaccgauc

SEQ ID NO: 1049530 - RNA, 19 nt, Artificial Sequence
  Description of Artificial Sequence: Synthetic oligonucleotide
acggucgccugucuucugg

SEQ ID NO: 1049531 - RNA, 19 nt, Artificial Sequence
  Description of Artificial Sequence: Synthetic oligonucleotide
ugguaaucuuuccccauuu

SEQ ID NO: 1049532 - RNA, 19 nt, Artificial Sequence
  Description of Artificial Sequence: Synthetic oligonucleotide
ugcccguucgccuucuuuc

SEQ ID NO: 1049533 - RNA, 19 nt, Artificial Sequence
  Description of Artificial Sequence: Synthetic oligonucleotide
aggcugauagauguguuga

SEQ ID NO: 1049534 - RNA, 19 nt, Artificial Sequence
  Description of Artificial Sequence: Synthetic oligonucleotide
gagucccaggauacggucg

SEQ ID NO: 1049535 - RNA, 19 nt, Artificial Sequence
  Description of Artificial Sequence: Synthetic oligonucleotide
gauuggucuggaccaugug

SEQ ID NO: 1049536 - RNA, 19 nt, Artificial Sequence
  Description of Artificial Sequence: Synthetic oligonucleotide
cuuagaugcccaccuugac

SEQ ID NO: 1049537 - RNA, 19 nt, Artificial Sequence
  Description of Artificial Sequence: Synthetic oligonucleotide
ucucucugaaucucauaau

SEQ ID NO: 1049538 - RNA, 19 nt, Artificial Sequence
  Description of Artificial Sequence: Synthetic oligonucleotide
ucacuccuugaaaaggcuu

SEQ ID NO: 1049539 - RNA, 19 nt, Artificial Sequence
  Description of Artificial Sequence: Synthetic oligonucleotide
uacuaagcugauaggcaua

SEQ ID NO: 1049540 - RNA, 19 nt, Artificial Sequence
  Description of Artificial Sequence: Synthetic oligonucleotide
gacccugaaaacucccauc

SEQ ID NO: 1049541 - RNA, 19 nt, Artificial Sequence
  Description of Artificial Sequence: Synthetic oligonucleotide
gcuaggauaaccaggucug

SEQ ID NO: 1049542 - RNA, 19 nt, Artificial Sequence
  Description of Artificial Sequence: Synthetic oligonucleotide
auuuggaggcauugguaau

SEQ ID NO: 1049543 - RNA, 19 nt, Artificial Sequence
  Description of Artificial Sequence: Synthetic oligonucleotide
ucggacccugaaaacuccc

SEQ ID NO: 1049544 - RNA, 19 nt, Artificial Sequence
  Description of Artificial Sequence: Synthetic oligonucleotide
gacgggguucucuguaaug

SEQ ID NO: 1049545 - RNA, 19 nt, Artificial Sequence
  Description of Artificial Sequence: Synthetic oligonucleotide
agauugugcugagcugagc

SEQ ID NO: 1049546 - RNA, 19 nt, Artificial Sequence
  Description of Artificial Sequence: Synthetic oligonucleotide
uggguaaaugcugccugcc

SEQ ID NO: 1049547 - RNA, 19 nt, Artificial Sequence
  Description of Artificial Sequence: Synthetic oligonucleotide
guaaugacuccaaucagcu

SEQ ID NO: 1049548 - RNA, 19 nt, Artificial Sequence
  Description of Artificial Sequence: Synthetic oligonucleotide
caggcugccacgcggacac

SEQ ID NO: 1049549 - RNA, 19 nt, Artificial Sequence
  Description of Artificial Sequence: Synthetic oligonucleotide
ugcacaacuccaugauuau

SEQ ID NO: 1049550 - RNA, 19 nt, Artificial Sequence
  Description of Artificial Sequence: Synthetic oligonucleotide
augaaggauugugucgcuc

SEQ ID NO: 1049551 - RNA, 19 nt, Artificial Sequence
  Description of Artificial Sequence: Synthetic oligonucleotide
acuaagcugauaggcauau

SEQ ID NO: 1049552 - RNA, 19 nt, Artificial Sequence
  Description of Artificial Sequence: Synthetic oligonucleotide
auccagacgggguucucug

SEQ ID NO: 1049553 - RNA, 19 nt, Artificial Sequence
  Description of Artificial Sequence: Synthetic oligonucleotide
gaaggauugugucgcucca

SEQ ID NO: 1049554 - RNA, 19 nt, Artificial Sequence
  Description of Artificial Sequence: Synthetic oligonucleotide
ucuucgcuauuugaauacu

SEQ ID NO: 1049555 - RNA, 19 nt, Artificial Sequence
  Description of Artificial Sequence: Synthetic oligonucleotide
uauugauggcaaugcccgu

SEQ ID NO: 1049556 - RNA, 19 nt, Artificial Sequence
  Description of Artificial Sequence: Synthetic oligonucleotide
gaccaugugcugugggcug

SEQ ID NO: 1049557 - RNA, 19 nt, Artificial Sequence
  Description of Artificial Sequence: Synthetic oligonucleotide
gauuauccagacgggguuc

SEQ ID NO: 1049558 - RNA, 19 nt, Artificial Sequence
  Description of Artificial Sequence: Synthetic oligonucleotide
acgggguucucuguaauga

SEQ ID NO: 1049559 - RNA, 19 nt, Artificial Sequence
  Description of Artificial Sequence: Synthetic oligonucleotide
gauuagccgcucuuccauc

SEQ ID NO: 1049560 - RNA, 19 nt, Artificial Sequence
  Description of Artificial Sequence: Synthetic oligonucleotide
gaguuguagcauuccuuuc

SEQ ID NO: 1049561 - RNA, 19 nt, Artificial Sequence
  Description of Artificial Sequence: Synthetic oligonucleotide
agcaugaucggaacagacu

SEQ ID NO: 1049562 - RNA, 19 nt, Artificial Sequence
  Description of Artificial Sequence: Synthetic oligonucleotide
cuuccauauaucgggauaa

SEQ ID NO: 1049563 - RNA, 19 nt, Artificial Sequence
  Description of Artificial Sequence: Synthetic oligonucleotide
aguauccgucgaucagauc

SEQ ID NO: 1049564 - RNA, 19 nt, Artificial Sequence
  Description of Artificial Sequence: Synthetic oligonucleotide
acgcgagugcuguacuaag

SEQ ID NO: 1049565 - RNA, 19 nt, Artificial Sequence
  Description of Artificial Sequence: Synthetic oligonucleotide
gcaugaucggaacagacua

SEQ ID NO: 1049566 - RNA, 19 nt, Artificial Sequence
  Description of Artificial Sequence: Synthetic oligonucleotide
guucgccuucuuucugugg

SEQ ID NO: 1049567 - RNA, 19 nt, Artificial Sequence
  Description of Artificial Sequence: Synthetic oligonucleotide
cagcaauuuugaguuguag

SEQ ID NO: 1049568 - RNA, 19 nt, Artificial Sequence
  Description of Artificial Sequence: Synthetic oligonucleotide
agcguccaaguucuauucu

SEQ ID NO: 1049569 - RNA, 19 nt, Artificial Sequence
  Description of Artificial Sequence: Synthetic oligonucleotide
ggcauauaggaucaaagau

SEQ ID NO: 1049570 - RNA, 19 nt, Artificial Sequence
  Description of Artificial Sequence: Synthetic oligonucleotide
guaaaacgucgaaaguuga

SEQ ID NO: 1049571 - RNA, 19 nt, Artificial Sequence
  Description of Artificial Sequence: Synthetic oligonucleotide
caauuuggaggcauuggua

SEQ ID NO: 1049572 - RNA, 19 nt, Artificial Sequence
  Description of Artificial Sequence: Synthetic oligonucleotide
auauaucgggauaauccaa

SEQ ID NO: 1049573 - RNA, 19 nt, Artificial Sequence
  Description of Artificial Sequence: Synthetic oligonucleotide
cagcguccaaguucuauuc

SEQ ID NO: 1049574 - RNA, 19 nt, Artificial Sequence
  Description of Artificial Sequence: Synthetic oligonucleotide
uugcuuagguggccaggug

SEQ ID NO: 1049575 - RNA, 19 nt, Artificial Sequence
  Description of Artificial Sequence: Synthetic oligonucleotide
gugucgcuccauuuaccag

SEQ ID NO: 1049576 - RNA, 19 nt, Artificial Sequence
  Description of Artificial Sequence: Synthetic oligonucleotide
cucgagagagccucacguc

SEQ ID NO: 1049577 - RNA, 19 nt, Artificial Sequence
  Description of Artificial Sequence: Synthetic oligonucleotide
acgucacuagcugagguaa

SEQ ID NO: 1049578 - RNA, 19 nt, Artificial Sequence
  Description of Artificial Sequence: Synthetic oligonucleotide
auuauccagacgggguucu

SEQ ID NO: 1049579 - RNA, 19 nt, Artificial Sequence
  Description of Artificial Sequence: Synthetic oligonucleotide
cuaggauaaccaggucugc

SEQ ID NO: 1049580 - RNA, 19 nt, Artificial Sequence
  Description of Artificial Sequence: Synthetic oligonucleotide
uuccagucggacccugaaa

SEQ ID NO: 1049581 - RNA, 19 nt, Artificial Sequence
  Description of Artificial Sequence: Synthetic oligonucleotide
acguacgucuccaaacuga

SEQ ID NO: 1049582 - RNA, 19 nt, Artificial Sequence
  Description of Artificial Sequence: Synthetic oligonucleotide
ucaguaaaccugggccgcc

SEQ ID NO: 1049583 - RNA, 19 nt, Artificial Sequence
  Description of Artificial Sequence: Synthetic oligonucleotide
aggauugugucgcuccauu

SEQ ID NO: 1049584 - RNA, 19 nt, Artificial Sequence
  Description of Artificial Sequence: Synthetic oligonucleotide
cagccggcaguauccgucg

SEQ ID NO: 1049585 - RNA, 19 nt, Artificial Sequence
  Description of Artificial Sequence: Synthetic oligonucleotide
ggcaguauccgucgaucag

SEQ ID NO: 1049586 - RNA, 19 nt, Artificial Sequence
  Description of Artificial Sequence: Synthetic oligonucleotide
acaauucugucugguccag

SEQ ID NO: 1049587 - RNA, 19 nt, Artificial Sequence
  Description of Artificial Sequence: Synthetic oligonucleotide
ucccuggucgagggcaugg

SEQ ID NO: 1049588 - RNA, 19 nt, Artificial Sequence
  Description of Artificial Sequence: Synthetic oligonucleotide
cauuccgagcagcaauguc

SEQ ID NO: 1049589 - RNA, 19 nt, Artificial Sequence
  Description of Artificial Sequence: Synthetic oligonucleotide
uacgcgagugcuguacuaa

SEQ ID NO: 1049590 - RNA, 19 nt, Artificial Sequence
  Description of Artificial Sequence: Synthetic oligonucleotide
ccaugauuauccagacggg

SEQ ID NO: 1049591 - RNA, 19 nt, Artificial Sequence
  Description of Artificial Sequence: Synthetic oligonucleotide
cuguuggccaacuuuggua

SEQ ID NO: 1049592 - RNA, 19 nt, Artificial Sequence
  Description of Artificial Sequence: Synthetic oligonucleotide
uggcaaugcccguucgccu

SEQ ID NO: 1049593 - RNA, 19 nt, Artificial Sequence
  Description of Artificial Sequence: Synthetic oligonucleotide
cgaaaguugauugacucug

SEQ ID NO: 1049594 - RNA, 19 nt, Artificial Sequence
  Description of Artificial Sequence: Synthetic oligonucleotide
auugauggcaaugcccguu

SEQ ID NO: 1049595 - RNA, 19 nt, Artificial Sequence
  Description of Artificial Sequence: Synthetic oligonucleotide
ucgagggcaugguguaugu

SEQ ID NO: 1049596 - RNA, 19 nt, Artificial Sequence
  Description of Artificial Sequence: Synthetic oligonucleotide
gugaggauggucaaacgua

SEQ ID NO: 1049597 - RNA, 19 nt, Artificial Sequence
  Description of Artificial Sequence: Synthetic oligonucleotide
aucucagcguagucaucug

SEQ ID NO: 1049598 - RNA, 19 nt, Artificial Sequence
  Description of Artificial Sequence: Synthetic oligonucleotide
ugguugccagguugcuuag

SEQ ID NO: 1049599 - RNA, 19 nt, Artificial Sequence
  Description of Artificial Sequence: Synthetic oligonucleotide
auccgucgaucagaucagc

SEQ ID NO: 1049600 - RNA, 19 nt, Artificial Sequence
  Description of Artificial Sequence: Synthetic oligonucleotide
gcaaugguuagggauggug

SEQ ID NO: 1049601 - RNA, 19 nt, Artificial Sequence
  Description of Artificial Sequence: Synthetic oligonucleotide
acgcggacaccuccugggg

SEQ ID NO: 1049602 - RNA, 19 nt, Artificial Sequence
  Description of Artificial Sequence: Synthetic oligonucleotide
ugcugucggauuagccgcu

SEQ ID NO: 1049603 - RNA, 19 nt, Artificial Sequence
  Description of Artificial Sequence: Synthetic oligonucleotide
ugacacccucauuguagcu

SEQ ID NO: 1049604 - RNA, 19 nt, Artificial Sequence
  Description of Artificial Sequence: Synthetic oligonucleotide
agguugcuuagguggccag

SEQ ID NO: 1049605 - RNA, 19 nt, Artificial Sequence
  Description of Artificial Sequence: Synthetic oligonucleotide
caauucgaccgaucacauc

SEQ ID NO: 1049606 - RNA, 19 nt, Artificial Sequence
  Description of Artificial Sequence: Synthetic oligonucleotide
augcugcacaggcuuagau

SEQ ID NO: 1049607 - RNA, 19 nt, Artificial Sequence
  Description of Artificial Sequence: Synthetic oligonucleotide
gucgagggcaugguguaug

SEQ ID NO: 1049608 - RNA, 19 nt, Artificial Sequence
  Description of Artificial Sequence: Synthetic oligonucleotide
uaccagccggcaguauccg

SEQ ID NO: 1049609 - RNA, 19 nt, Artificial Sequence
  Description of Artificial Sequence: Synthetic oligonucleotide
ggacaauuuggaggcauug

SEQ ID NO: 1049610 - RNA, 19 nt, Artificial Sequence
  Description of Artificial Sequence: Synthetic oligonucleotide
gucgcuccauuuaccagcc

SEQ ID NO: 1049611 - RNA, 19 nt, Artificial Sequence
  Description of Artificial Sequence: Synthetic oligonucleotide
ccauccauuuaauaggcaa

SEQ ID NO: 1049612 - RNA, 19 nt, Artificial Sequence
  Description of Artificial Sequence: Synthetic oligonucleotide
cugucgaugcugccucgag

SEQ ID NO: 1049613 - RNA, 19 nt, Artificial Sequence
  Description of Artificial Sequence: Synthetic oligonucleotide
cacgucagguuucagaaau

SEQ ID NO: 1049614 - RNA, 19 nt, Artificial Sequence
  Description of Artificial Sequence: Synthetic oligonucleotide
gauacgcgagugcuguacu

SEQ ID NO: 1049615 - RNA, 19 nt, Artificial Sequence
  Description of Artificial Sequence: Synthetic oligonucleotide
acccggguagccagagacc

SEQ ID NO: 1049616 - RNA, 19 nt, Artificial Sequence
  Description of Artificial Sequence: Synthetic oligonucleotide
uccagacgggguucucugu

SEQ ID NO: 1049617 - RNA, 19 nt, Artificial Sequence
  Description of Artificial Sequence: Synthetic oligonucleotide
ugcagcguccaaguucuau

SEQ ID NO: 1049618 - RNA, 19 nt, Artificial Sequence
  Description of Artificial Sequence: Synthetic oligonucleotide
auacggucgccugucuucu

SEQ ID NO: 1049619 - RNA, 19 nt, Artificial Sequence
  Description of Artificial Sequence: Synthetic oligonucleotide
gagaugccugaccugggua

SEQ ID NO: 1049620 - RNA, 19 nt, Artificial Sequence
  Description of Artificial Sequence: Synthetic oligonucleotide
ccaagauugugcugagcug

SEQ ID NO: 1049621 - RNA, 19 nt, Artificial Sequence
  Description of Artificial Sequence: Synthetic oligonucleotide
agacgggguucucuguaau

SEQ ID NO: 1049622 - RNA, 19 nt, Artificial Sequence
  Description of Artificial Sequence: Synthetic oligonucleotide
agagagccucacgucaggu

SEQ ID NO: 1049623 - RNA, 19 nt, Artificial Sequence
  Description of Artificial Sequence: Synthetic oligonucleotide
auacgcgagugcuguacua

SEQ ID NO: 1049624 - RNA, 19 nt, Artificial Sequence
  Description of Artificial Sequence: Synthetic oligonucleotide
ccucauccguucuucuugc

SEQ ID NO: 1049625 - RNA, 19 nt, Artificial Sequence
  Description of Artificial Sequence: Synthetic oligonucleotide
ucccaggauacggucgccu

SEQ ID NO: 1049626 - RNA, 19 nt, Artificial Sequence
  Description of Artificial Sequence: Synthetic oligonucleotide
ggauggucaaacguacguc

SEQ ID NO: 1049627 - RNA, 19 nt, Artificial Sequence
  Description of Artificial Sequence: Synthetic oligonucleotide
agcugagguaaaacgucga

SEQ ID NO: 1049628 - RNA, 19 nt, Artificial Sequence
  Description of Artificial Sequence: Synthetic oligonucleotide
gucacuagcugagguaaaa

SEQ ID NO: 1049629 - RNA, 19 nt, Artificial Sequence
  Description of Artificial Sequence: Synthetic oligonucleotide
gucggauuagccgcucuuc

SEQ ID NO: 1049630 - RNA, 19 nt, Artificial Sequence
  Description of Artificial Sequence: Synthetic oligonucleotide
cauaggcccagcauuucgu

SEQ ID NO: 1049631 - RNA, 19 nt, Artificial Sequence
  Description of Artificial Sequence: Synthetic oligonucleotide
uguguccgaaugccuuguu

SEQ ID NO: 1049632 - RNA, 19 nt, Artificial Sequence
  Description of Artificial Sequence: Synthetic oligonucleotide
ggucugauaaugaaggauu

SEQ ID NO: 1049633 - RNA, 19 nt, Artificial Sequence
  Description of Artificial Sequence: Synthetic oligonucleotide
ccgcucuuccaucagauga

SEQ ID NO: 1049634 - RNA, 19 nt, Artificial Sequence
  Description of Artificial Sequence: Synthetic oligonucleotide
gguaaaugcugccugccau

SEQ ID NO: 1049635 - RNA, 19 nt, Artificial Sequence
  Description of Artificial Sequence: Synthetic oligonucleotide
cuccgcaaugguuagggau

SEQ ID NO: 1049636 - RNA, 19 nt, Artificial Sequence
  Description of Artificial Sequence: Synthetic oligonucleotide
ggucaaacguacgucucca

SEQ ID NO: 1049637 - RNA, 19 nt, Artificial Sequence
  Description of Artificial Sequence: Synthetic oligonucleotide
ggguaaaugcugccugcca

SEQ ID NO: 1049638 - RNA, 19 nt, Artificial Sequence
  Description of Artificial Sequence: Synthetic oligonucleotide
gcuuagaugcccaccuuga

SEQ ID NO: 1049639 - RNA, 19 nt, Artificial Sequence
  Description of Artificial Sequence: Synthetic oligonucleotide
ggauuccaugggaacccgg

SEQ ID NO: 1049640 - RNA, 19 nt, Artificial Sequence
  Description of Artificial Sequence: Synthetic oligonucleotide
gaugccugaccuggguaaa

SEQ ID NO: 1049641 - RNA, 19 nt, Artificial Sequence
  Description of Artificial Sequence: Synthetic oligonucleotide
guguugauuuccagucgga

SEQ ID NO: 1049642 - RNA, 19 nt, Artificial Sequence
  Description of Artificial Sequence: Synthetic oligonucleotide
ccaagcgugcacaacucca

SEQ ID NO: 1049643 - RNA, 19 nt, Artificial Sequence
  Description of Artificial Sequence: Synthetic oligonucleotide
gucaaacguacgucuccaa

SEQ ID NO: 1049644 - RNA, 19 nt, Artificial Sequence
  Description of Artificial Sequence: Synthetic oligonucleotide
gaggacaauuuggaggcau

SEQ ID NO: 1049645 - RNA, 19 nt, Artificial Sequence
  Description of Artificial Sequence: Synthetic oligonucleotide
ccagccggcaguauccguc

SEQ ID NO: 1049646 - RNA, 19 nt, Artificial Sequence
  Description of Artificial Sequence: Synthetic oligonucleotide
uacggucgccugucuucug

SEQ ID NO: 1049647 - RNA, 19 nt, Artificial Sequence
  Description of Artificial Sequence: Synthetic oligonucleotide
cuccauuuaccagccggca

SEQ ID NO: 1049648 - RNA, 19 nt, Artificial Sequence
  Description of Artificial Sequence: Synthetic oligonucleotide
gggauuccaugggaacccg

SEQ ID NO: 1049649 - RNA, 19 nt, Artificial Sequence
  Description of Artificial Sequence: Synthetic oligonucleotide
gcgagugcuguacuaagcu

SEQ ID NO: 1049650 - RNA, 19 nt, Artificial Sequence
  Description of Artificial Sequence: Synthetic oligonucleotide
gccucgagagagccucacg

SEQ ID NO: 1049651 - RNA, 19 nt, Artificial Sequence
  Description of Artificial Sequence: Synthetic oligonucleotide
gcgccagcaauuuugaguu

SEQ ID NO: 1049652 - RNA, 19 nt, Artificial Sequence
  Description of Artificial Sequence: Synthetic oligonucleotide
cuguagagggugggaggac

SEQ ID NO: 1049653 - RNA, 19 nt, Artificial Sequence
  Description of Artificial Sequence: Synthetic oligonucleotide
accagccggcaguauccgu

SEQ ID NO: 1049654 - RNA, 19 nt, Artificial Sequence
  Description of Artificial Sequence: Synthetic oligonucleotide
aggacaauuuggaggcauu

SEQ ID NO: 1049655 - RNA, 19 nt, Artificial Sequence
  Description of Artificial Sequence: Synthetic oligonucleotide
ggauuagccgcucuuccau

SEQ ID NO: 1049656 - RNA, 19 nt, Artificial Sequence
  Description of Artificial Sequence: Synthetic oligonucleotide
gcuuggguggugcuucauc

SEQ ID NO: 1049657 - RNA, 19 nt, Artificial Sequence
  Description of Artificial Sequence: Synthetic oligonucleotide
gucauaggcccagcauuuc

SEQ ID NO: 1049658 - RNA, 19 nt, Artificial Sequence
  Description of Artificial Sequence: Synthetic oligonucleotide
caugaucggaacagacuau

SEQ ID NO: 1049659 - RNA, 19 nt, Artificial Sequence
  Description of Artificial Sequence: Synthetic oligonucleotide
auucgaccgaucacaucau

SEQ ID NO: 1049660 - RNA, 19 nt, Artificial Sequence
  Description of Artificial Sequence: Synthetic oligonucleotide
ugccucgagagagccucac

SEQ ID NO: 1049661 - RNA, 19 nt, Artificial Sequence
  Description of Artificial Sequence: Synthetic oligonucleotide
gauugacucuggagccauc

SEQ ID NO: 1049662 - RNA, 19 nt, Artificial Sequence
  Description of Artificial Sequence: Synthetic oligonucleotide
ccgcaaugguuagggaugg

SEQ ID NO: 1049663 - RNA, 19 nt, Artificial Sequence
  Description of Artificial Sequence: Synthetic oligonucleotide
cgcgagugcuguacuaagc

SEQ ID NO: 1049664 - RNA, 19 nt, Artificial Sequence
  Description of Artificial Sequence: Synthetic oligonucleotide
agccucacgucagguuuca

SEQ ID NO: 1049665 - RNA, 19 nt, Artificial Sequence
  Description of Artificial Sequence: Synthetic oligonucleotide
cccaggauacggucgccug

SEQ ID NO: 1049666 - RNA, 19 nt, Artificial Sequence
  Description of Artificial Sequence: Synthetic oligonucleotide
caguauccgucgaucagau

SEQ ID NO: 1049667 - RNA, 19 nt, Artificial Sequence
  Description of Artificial Sequence: Synthetic oligonucleotide
auuuaccagccggcaguau

SEQ ID NO: 1049668 - RNA, 19 nt, Artificial Sequence
  Description of Artificial Sequence: Synthetic oligonucleotide
ggaggcauugguaaucuuu

SEQ ID NO: 1049669 - RNA, 19 nt, Artificial Sequence
  Description of Artificial Sequence: Synthetic oligonucleotide
ugacuccaaucagcuucac

SEQ ID NO: 1049670 - RNA, 19 nt, Artificial Sequence
  Description of Artificial Sequence: Synthetic oligonucleotide
gcuuuauaguaaguacugu

SEQ ID NO: 1049671 - RNA, 19 nt, Artificial Sequence
  Description of Artificial Sequence: Synthetic oligonucleotide
gaugguugccagguugcuu

SEQ ID NO: 1049672 - RNA, 19 nt, Artificial Sequence
  Description of Artificial Sequence: Synthetic oligonucleotide
gccgcucuuccaucagaug

SEQ ID NO: 1049673 - RNA, 19 nt, Artificial Sequence
  Description of Artificial Sequence: Synthetic oligonucleotide
cauuuucaauucgaccgau

SEQ ID NO: 1049674 - RNA, 19 nt, Artificial Sequence
  Description of Artificial Sequence: Synthetic oligonucleotide
guguccgaaugccuuguuu

SEQ ID NO: 1049675 - RNA, 19 nt, Artificial Sequence
  Description of Artificial Sequence: Synthetic oligonucleotide
ccucgagagagccucacgu

SEQ ID NO: 1049676 - RNA, 19 nt, Artificial Sequence
  Description of Artificial Sequence: Synthetic oligonucleotide
aggcuccagcaugaucgga

SEQ ID NO: 1049677 - RNA, 19 nt, Artificial Sequence
  Description of Artificial Sequence: Synthetic oligonucleotide
uggugccgucacugucaga

SEQ ID NO: 1049678 - RNA, 19 nt, Artificial Sequence
  Description of Artificial Sequence: Synthetic oligonucleotide
gcagcguccaaguucuauu

SEQ ID NO: 1049679 - RNA, 19 nt, Artificial Sequence
  Description of Artificial Sequence: Synthetic oligonucleotide
gcuuagguggccaggugcu

SEQ ID NO: 1049680 - RNA, 19 nt, Artificial Sequence
  Description of Artificial Sequence: Synthetic oligonucleotide
ggauugugucgcuccauuu

SEQ ID NO: 1049681 - RNA, 19 nt, Artificial Sequence
  Description of Artificial Sequence: Synthetic oligonucleotide
ccggcaguauccgucgauc

SEQ ID NO: 1049682 - RNA, 19 nt, Artificial Sequence
  Description of Artificial Sequence: Synthetic oligonucleotide
ggcugauagauguguugau

SEQ ID NO: 1049683 - RNA, 19 nt, Artificial Sequence
  Description of Artificial Sequence: Synthetic oligonucleotide
cgaccgaucacaucauugu

SEQ ID NO: 1049684 - RNA, 19 nt, Artificial Sequence
  Description of Artificial Sequence: Synthetic oligonucleotide
ccagauccaagcuguauuu

SEQ ID NO: 1049685 - RNA, 19 nt, Artificial Sequence
  Description of Artificial Sequence: Synthetic oligonucleotide
gccauccauuuaauaggca

SEQ ID NO: 1049686 - RNA, 19 nt, Artificial Sequence
  Description of Artificial Sequence: Synthetic oligonucleotide
ggcaaugcccguucgccuu

SEQ ID NO: 1049687 - RNA, 19 nt, Artificial Sequence
  Description of Artificial Sequence: Synthetic oligonucleotide
cucauccguucuucuugcu

SEQ ID NO: 1049688 - RNA, 19 nt, Artificial Sequence
  Description of Artificial Sequence: Synthetic oligonucleotide
cugccucgagagagccuca

SEQ ID NO: 1049689 - RNA, 19 nt, Artificial Sequence
  Description of Artificial Sequence: Synthetic oligonucleotide
cagauacgcgagugcugua

SEQ ID NO: 1049690 - RNA, 19 nt, Artificial Sequence
  Description of Artificial Sequence: Synthetic oligonucleotide
gcuuuccagauacgcgagu

SEQ ID NO: 1049691 - RNA, 19 nt, Artificial Sequence
  Description of Artificial Sequence: Synthetic oligonucleotide
ccagacgggguucucugua

SEQ ID NO: 1049692 - RNA, 19 nt, Artificial Sequence
  Description of Artificial Sequence: Synthetic oligonucleotide
ggauacggucgccugucuu

SEQ ID NO: 1049693 - RNA, 19 nt, Artificial Sequence
  Description of Artificial Sequence: Synthetic oligonucleotide
cgucgaaaguugauugacu

SEQ ID NO: 1049694 - RNA, 19 nt, Artificial Sequence
  Description of Artificial Sequence: Synthetic oligonucleotide
cggcaguauccgucgauca

SEQ ID NO: 1049695 - RNA, 19 nt, Artificial Sequence
  Description of Artificial Sequence: Synthetic oligonucleotide
gcugccacgcggacaccuc

SEQ ID NO: 1049696 - RNA, 19 nt, Artificial Sequence
  Description of Artificial Sequence: Synthetic oligonucleotide
ggccaacuuugguauugau

SEQ ID NO: 1049697 - RNA, 19 nt, Artificial Sequence
  Description of Artificial Sequence: Synthetic oligonucleotide
cccggguagccagagaccu

SEQ ID NO: 1049698 - RNA, 19 nt, Artificial Sequence
  Description of Artificial Sequence: Synthetic oligonucleotide
ccaggauacggucgccugu

SEQ ID NO: 1049699 - RNA, 19 nt, Artificial Sequence
  Description of Artificial Sequence: Synthetic oligonucleotide
cagagaccugguagugauu

SEQ ID NO: 1049700 - RNA, 19 nt, Artificial Sequence
  Description of Artificial Sequence: Synthetic oligonucleotide
gccucacgucagguuucag

SEQ ID NO: 1049701 - RNA, 19 nt, Artificial Sequence
  Description of Artificial Sequence: Synthetic oligonucleotide
ggggaagcaccugucccau

SEQ ID NO: 1049702 - RNA, 19 nt, Artificial Sequence
  Description of Artificial Sequence: Synthetic oligonucleotide
caaugcccguucgccuucu

SEQ ID NO: 1049703 - RNA, 19 nt, Artificial Sequence
  Description of Artificial Sequence: Synthetic oligonucleotide
gccauggaugggauuccau

SEQ ID NO: 1049704 - RNA, 19 nt, Artificial Sequence
  Description of Artificial Sequence: Synthetic oligonucleotide
cgaugugaggauggucaaa

SEQ ID NO: 1049705 - RNA, 19 nt, Artificial Sequence
  Description of Artificial Sequence: Synthetic oligonucleotide
augcagcguccaaguucua

SEQ ID NO: 1049706 - RNA, 19 nt, Artificial Sequence
  Description of Artificial Sequence: Synthetic oligonucleotide
ggucgagggcaugguguau

SEQ ID NO: 1049707 - RNA, 19 nt, Artificial Sequence
  Description of Artificial Sequence: Synthetic oligonucleotide
gggaagcaccugucccauu

SEQ ID NO: 1049708 - RNA, 19 nt, Artificial Sequence
  Description of Artificial Sequence: Synthetic oligonucleotide
ccaccuugacacccucauu

SEQ ID NO: 1049709 - RNA, 19 nt, Artificial Sequence
  Description of Artificial Sequence: Synthetic oligonucleotide
cccuggucgagggcauggu

SEQ ID NO: 1049710 - RNA, 19 nt, Artificial Sequence
  Description of Artificial Sequence: Synthetic oligonucleotide
aauauauugacccaaaggg

SEQ ID NO: 1049711 - RNA, 19 nt, Artificial Sequence
  Description of Artificial Sequence: Synthetic oligonucleotide
aaauaucgcacacaucuuc

SEQ ID NO: 1049712 - RNA, 19 nt, Artificial Sequence
  Description of Artificial Sequence: Synthetic oligonucleotide
uguguuuugacuagcaggc

SEQ ID NO: 1049713 - RNA, 19 nt, Artificial Sequence
  Description of Artificial Sequence: Synthetic oligonucleotide
aaaggagcaauaaccaucc

SEQ ID NO: 1049714 - RNA, 19 nt, Artificial Sequence
  Description of Artificial Sequence: Synthetic oligonucleotide
cacgugaucaccuucaucc

SEQ ID NO: 1049715 - RNA, 19 nt, Artificial Sequence
  Description of Artificial Sequence: Synthetic oligonucleotide
auggauguuagacacauag

SEQ ID NO: 1049716 - RNA, 19 nt, Artificial Sequence
  Description of Artificial Sequence: Synthetic oligonucleotide
uagacacauagccaaaugg

SEQ ID NO: 1049717 - RNA, 19 nt, Artificial Sequence
  Description of Artificial Sequence: Synthetic oligonucleotide
cuaagaucuccccagaugg

SEQ ID NO: 1049718 - RNA, 19 nt, Artificial Sequence
  Description of Artificial Sequence: Synthetic oligonucleotide
aacggcguuaaguuuauuc

SEQ ID NO: 1049719 - RNA, 19 nt, Artificial Sequence
  Description of Artificial Sequence: Synthetic oligonucleotide
uuguguuuugacuagcagg

SEQ ID NO: 1049720 - RNA, 19 nt, Artificial Sequence
  Description of Artificial Sequence: Synthetic oligonucleotide
uuaucauucauccuccaca

SEQ ID NO: 1049721 - RNA, 19 nt, Artificial Sequence
  Description of Artificial Sequence: Synthetic oligonucleotide
uuugaaauguugaaagcca

SEQ ID NO: 1049722 - RNA, 19 nt, Artificial Sequence
  Description of Artificial Sequence: Synthetic oligonucleotide
uuguacguagcuuuuaugc

SEQ ID NO: 1049723 - RNA, 19 nt, Artificial Sequence
  Description of Artificial Sequence: Synthetic oligonucleotide
uauauugacccaaaggguc

SEQ ID NO: 1049724 - RNA, 19 nt, Artificial Sequence
  Description of Artificial Sequence: Synthetic oligonucleotide
gaugcuaagaucuccccag

SEQ ID NO: 1049725 - RNA, 19 nt, Artificial Sequence
  Description of Artificial Sequence: Synthetic oligonucleotide
aacaccauacgguagggca

SEQ ID NO: 1049726 - RNA, 19 nt, Artificial Sequence
  Description of Artificial Sequence: Synthetic oligonucleotide
uucuggagaacacauacgu

SEQ ID NO: 1049727 - RNA, 19 nt, Artificial Sequence
  Description of Artificial Sequence: Synthetic oligonucleotide
ucuuauguucaaaaccggc

SEQ ID NO: 1049728 - RNA, 19 nt, Artificial Sequence
  Description of Artificial Sequence: Synthetic oligonucleotide
gagugagaagcaaagaucc

SEQ ID NO: 1049729 - RNA, 19 nt, Artificial Sequence
  Description of Artificial Sequence: Synthetic oligonucleotide
uuuaacggcguuaaguuua

SEQ ID NO: 1049730 - RNA, 19 nt, Artificial Sequence
  Description of Artificial Sequence: Synthetic oligonucleotide
uacguagcuuuuaugcucg

SEQ ID NO: 1049731 - RNA, 19 nt, Artificial Sequence
  Description of Artificial Sequence: Synthetic oligonucleotide
cuggagaacacauacguug

SEQ ID NO: 1049732 - RNA, 19 nt, Artificial Sequence
  Description of Artificial Sequence: Synthetic oligonucleotide
uguuuugacuagcaggcug

SEQ ID NO: 1049733 - RNA, 19 nt, Artificial Sequence
  Description of Artificial Sequence: Synthetic oligonucleotide
ucugucgcaacucaggguc

SEQ ID NO: 1049734 - RNA, 19 nt, Artificial Sequence
  Description of Artificial Sequence: Synthetic oligonucleotide
aaaacugagucuacggaag

SEQ ID NO: 1049735 - RNA, 19 nt, Artificial Sequence
  Description of Artificial Sequence: Synthetic oligonucleotide
uaaaacugagucuacggaa

SEQ ID NO: 1049736 - RNA, 19 nt, Artificial Sequence
  Description of Artificial Sequence: Synthetic oligonucleotide
agcguguugagugucaccc

SEQ ID NO: 1049737 - RNA, 19 nt, Artificial Sequence
  Description of Artificial Sequence: Synthetic oligonucleotide
gucaucgugaaacauccgg

SEQ ID NO: 1049738 - RNA, 19 nt, Artificial Sequence
  Description of Artificial Sequence: Synthetic oligonucleotide
ucgugaaacauccggaaac

SEQ ID NO: 1049739 - RNA, 19 nt, Artificial Sequence
  Description of Artificial Sequence: Synthetic oligonucleotide
cauacagcaccacagaguc

SEQ ID NO: 1049740 - RNA, 19 nt, Artificial Sequence
  Description of Artificial Sequence: Synthetic oligonucleotide
uuguuaucauucauccucc

SEQ ID NO: 1049741 - RNA, 19 nt, Artificial Sequence
  Description of Artificial Sequence: Synthetic oligonucleotide
cauacguuguguuugucac

SEQ ID NO: 1049742 - RNA, 19 nt, Artificial Sequence
  Description of Artificial Sequence: Synthetic oligonucleotide
uuccacaacggcuuucccg

SEQ ID NO: 1049743 - RNA, 19 nt, Artificial Sequence
  Description of Artificial Sequence: Synthetic oligonucleotide
agacacauagccaaauggg

SEQ ID NO: 1049744 - RNA, 19 nt, Artificial Sequence
  Description of Artificial Sequence: Synthetic oligonucleotide
ggucgcaauauauugaccc

SEQ ID NO: 1049745 - RNA, 19 nt, Artificial Sequence
  Description of Artificial Sequence: Synthetic oligonucleotide
ucaucgugaaacauccgga

SEQ ID NO: 1049746 - RNA, 19 nt, Artificial Sequence
  Description of Artificial Sequence: Synthetic oligonucleotide
ucauuugcccagcaaauau

SEQ ID NO: 1049747 - RNA, 19 nt, Artificial Sequence
  Description of Artificial Sequence: Synthetic oligonucleotide
cuccacaagagaacgacag

SEQ ID NO: 1049748 - RNA, 19 nt, Artificial Sequence
  Description of Artificial Sequence: Synthetic oligonucleotide
uguacguagcuuuuaugcu

SEQ ID NO: 1049749 - RNA, 19 nt, Artificial Sequence
  Description of Artificial Sequence: Synthetic oligonucleotide
ugagucuacggaagaauga

SEQ ID NO: 1049750 - RNA, 19 nt, Artificial Sequence
  Description of Artificial Sequence: Synthetic oligonucleotide
accggcuucucuuucagag

SEQ ID NO: 1049751 - RNA, 19 nt, Artificial Sequence
  Description of Artificial Sequence: Synthetic oligonucleotide
gagaacgacagcaucauca

SEQ ID NO: 1049752 - RNA, 19 nt, Artificial Sequence
  Description of Artificial Sequence: Synthetic oligonucleotide
aaggugaucggcucuggcu

SEQ ID NO: 1049753 - RNA, 19 nt, Artificial Sequence
  Description of Artificial Sequence: Synthetic oligonucleotide
aacucaaaguagacgggac

SEQ ID NO: 1049754 - RNA, 19 nt, Artificial Sequence
  Description of Artificial Sequence: Synthetic oligonucleotide
guguuauccacagaggcag

SEQ ID NO: 1049755 - RNA, 19 nt, Artificial Sequence
  Description of Artificial Sequence: Synthetic oligonucleotide
aggugaucggcucuggcuc

SEQ ID NO: 1049756 - RNA, 19 nt, Artificial Sequence
  Description of Artificial Sequence: Synthetic oligonucleotide
cacggcaaacaccauacgg

SEQ ID NO: 1049757 - RNA, 19 nt, Artificial Sequence
  Description of Artificial Sequence: Synthetic oligonucleotide
ggagaggaauuccacaacg

SEQ ID NO: 1049758 - RNA, 19 nt, Artificial Sequence
  Description of Artificial Sequence: Synthetic oligonucleotide
cuccuuguucaacugagcc

SEQ ID NO: 1049759 - RNA, 19 nt, Artificial Sequence
  Description of Artificial Sequence: Synthetic oligonucleotide
aauaaccauccguggagga

SEQ ID NO: 1049760 - RNA, 19 nt, Artificial Sequence
  Description of Artificial Sequence: Synthetic oligonucleotide
aaacaccauacgguagggc

SEQ ID NO: 1049761 - RNA, 19 nt, Artificial Sequence
  Description of Artificial Sequence: Synthetic oligonucleotide
uggauguuagacacauagc

SEQ ID NO: 1049762 - RNA, 19 nt, Artificial Sequence
  Description of Artificial Sequence: Synthetic oligonucleotide
acggcguuaaguuuauucu

SEQ ID NO: 1049763 - RNA, 19 nt, Artificial Sequence
  Description of Artificial Sequence: Synthetic oligonucleotide
aacgcacaacauugacagc

SEQ ID NO: 1049764 - RNA, 19 nt, Artificial Sequence
  Description of Artificial Sequence: Synthetic oligonucleotide
aauaucgcacacaucuucu

SEQ ID NO: 1049765 - RNA, 19 nt, Artificial Sequence
  Description of Artificial Sequence: Synthetic oligonucleotide
ugauaacuguguuauccac

SEQ ID NO: 1049766 - RNA, 19 nt, Artificial Sequence
  Description of Artificial Sequence: Synthetic oligonucleotide
uuucccgggacacgguagg

SEQ ID NO: 1049767 - RNA, 19 nt, Artificial Sequence
  Description of Artificial Sequence: Synthetic oligonucleotide
uaauggauguuagacacau

SEQ ID NO: 1049768 - RNA, 19 nt, Artificial Sequence
  Description of Artificial Sequence: Synthetic oligonucleotide
agcaauaaccauccgugga

SEQ ID NO: 1049769 - RNA, 19 nt, Artificial Sequence
  Description of Artificial Sequence: Synthetic oligonucleotide
uugcuggcaucccauauga

SEQ ID NO: 1049770 - RNA, 19 nt, Artificial Sequence
  Description of Artificial Sequence: Synthetic oligonucleotide
uaugguaauggauguuaga

SEQ ID NO: 1049771 - RNA, 19 nt, Artificial Sequence
  Description of Artificial Sequence: Synthetic oligonucleotide
guaaaacugagucuacgga

SEQ ID NO: 1049772 - RNA, 19 nt, Artificial Sequence
  Description of Artificial Sequence: Synthetic oligonucleotide
aggagcaauaaccauccgu

SEQ ID NO: 1049773 - RNA, 19 nt, Artificial Sequence
  Description of Artificial Sequence: Synthetic oligonucleotide
gguaacuccuuguacguag

SEQ ID NO: 1049774 - RNA, 19 nt, Artificial Sequence
  Description of Artificial Sequence: Synthetic oligonucleotide
accuccagaugcuaagauc

SEQ ID NO: 1049775 - RNA, 19 nt, Artificial Sequence
  Description of Artificial Sequence: Synthetic oligonucleotide
cucaaaguagacgggacag

SEQ ID NO: 1049776 - RNA, 19 nt, Artificial Sequence
  Description of Artificial Sequence: Synthetic oligonucleotide
gauguuagacacauagcca

SEQ ID NO: 1049777 - RNA, 19 nt, Artificial Sequence
  Description of Artificial Sequence: Synthetic oligonucleotide
auauauugacccaaagggu

SEQ ID NO: 1049778 - RNA, 19 nt, Artificial Sequence
  Description of Artificial Sequence: Synthetic oligonucleotide
cacaaaggagcaauaacca

SEQ ID NO: 1049779 - RNA, 19 nt, Artificial Sequence
  Description of Artificial Sequence: Synthetic oligonucleotide
ggagcaauaaccauccgug

SEQ ID NO: 1049780 - RNA, 19 nt, Artificial Sequence
  Description of Artificial Sequence: Synthetic oligonucleotide
caagagaacgacagcauca

SEQ ID NO: 1049781 - RNA, 19 nt, Artificial Sequence
  Description of Artificial Sequence: Synthetic oligonucleotide
ugccgagcaagauuggaga

SEQ ID NO: 1049782 - RNA, 19 nt, Artificial Sequence
  Description of Artificial Sequence: Synthetic oligonucleotide
ucaggguaugguaauggau

SEQ ID NO: 1049783 - RNA, 19 nt, Artificial Sequence
  Description of Artificial Sequence: Synthetic oligonucleotide
agccaaaugggaaaggcug

SEQ ID NO: 1049784 - RNA, 19 nt, Artificial Sequence
  Description of Artificial Sequence: Synthetic oligonucleotide
acgcacaacauugacagcu

SEQ ID NO: 1049785 - RNA, 19 nt, Artificial Sequence
  Description of Artificial Sequence: Synthetic oligonucleotide
aaucggccuuuucaggugu

SEQ ID NO: 1049786 - RNA, 19 nt, Artificial Sequence
  Description of Artificial Sequence: Synthetic oligonucleotide
acggcuuucccguccggcc

SEQ ID NO: 1049787 - RNA, 19 nt, Artificial Sequence
  Description of Artificial Sequence: Synthetic oligonucleotide
gcaauaaccauccguggag

SEQ ID NO: 1049788 - RNA, 19 nt, Artificial Sequence
  Description of Artificial Sequence: Synthetic oligonucleotide
uccacaagagaacgacagc

SEQ ID NO: 1049789 - RNA, 19 nt, Artificial Sequence
  Description of Artificial Sequence: Synthetic oligonucleotide
auaugauaacuguguuauc

SEQ ID NO: 1049790 - RNA, 19 nt, Artificial Sequence
  Description of Artificial Sequence: Synthetic oligonucleotide
acucaaaguagacgggaca

SEQ ID NO: 1049791 - RNA, 19 nt, Artificial Sequence
  Description of Artificial Sequence: Synthetic oligonucleotide
gacccgaagcacucugucg

SEQ ID NO: 1049792 - RNA, 19 nt, Artificial Sequence
  Description of Artificial Sequence: Synthetic oligonucleotide
agaugcuaagaucucccca

SEQ ID NO: 1049793 - RNA, 19 nt, Artificial Sequence
  Description of Artificial Sequence: Synthetic oligonucleotide
gauaacuguguuauccaca

SEQ ID NO: 1049794 - RNA, 19 nt, Artificial Sequence
  Description of Artificial Sequence: Synthetic oligonucleotide
ugccaggcgauuucacacg

SEQ ID NO: 1049795 - RNA, 19 nt, Artificial Sequence
  Description of Artificial Sequence: Synthetic oligonucleotide
acucaggguaugguaaugg

SEQ ID NO: 1049796 - RNA, 19 nt, Artificial Sequence
  Description of Artificial Sequence: Synthetic oligonucleotide
gagucuacggaagaaugac

SEQ ID NO: 1049797 - RNA, 19 nt, Artificial Sequence
  Description of Artificial Sequence: Synthetic oligonucleotide
cuuguacguagcuuuuaug

SEQ ID NO: 1049798 - RNA, 19 nt, Artificial Sequence
  Description of Artificial Sequence: Synthetic oligonucleotide
acaaaggagcaauaaccau

SEQ ID NO: 1049799 - RNA, 19 nt, Artificial Sequence
  Description of Artificial Sequence: Synthetic oligonucleotide
guuaucauucauccuccac

SEQ ID NO: 1049800 - RNA, 19 nt, Artificial Sequence
  Description of Artificial Sequence: Synthetic oligonucleotide
uucaacugagccucauccu

SEQ ID NO: 1049801 - RNA, 19 nt, Artificial Sequence
  Description of Artificial Sequence: Synthetic oligonucleotide
aggguaugguaauggaugu

SEQ ID NO: 1049802 - RNA, 19 nt, Artificial Sequence
  Description of Artificial Sequence: Synthetic oligonucleotide
uaugcucguugaaaaugga

SEQ ID NO: 1049803 - RNA, 19 nt, Artificial Sequence
  Description of Artificial Sequence: Synthetic oligonucleotide
agacccgaagcacucuguc

SEQ ID NO: 1049804 - RNA, 19 nt, Artificial Sequence
  Description of Artificial Sequence: Synthetic oligonucleotide
caauaaccauccguggagg

SEQ ID NO: 1049805 - RNA, 19 nt, Artificial Sequence
  Description of Artificial Sequence: Synthetic oligonucleotide
ugcuauagacccgaagcac

SEQ ID NO: 1049806 - RNA, 19 nt, Artificial Sequence
  Description of Artificial Sequence: Synthetic oligonucleotide
ugugucuggcucuugguuu

SEQ ID NO: 1049807 - RNA, 19 nt, Artificial Sequence
  Description of Artificial Sequence: Synthetic oligonucleotide
acaacggcuuucccguccg

SEQ ID NO: 1049808 - RNA, 19 nt, Artificial Sequence
  Description of Artificial Sequence: Synthetic oligonucleotide
cauuugcccagcaaauauc

SEQ ID NO: 1049809 - RNA, 19 nt, Artificial Sequence
  Description of Artificial Sequence: Synthetic oligonucleotide
agagguaugccaaguucac

SEQ ID NO: 1049810 - RNA, 19 nt, Artificial Sequence
  Description of Artificial Sequence: Synthetic oligonucleotide
aaggagcaauaaccauccg

SEQ ID NO: 1049811 - RNA, 19 nt, Artificial Sequence
  Description of Artificial Sequence: Synthetic oligonucleotide
cauaugauaacuguguuau

SEQ ID NO: 1049812 - RNA, 19 nt, Artificial Sequence
  Description of Artificial Sequence: Synthetic oligonucleotide
cagagguaugccaaguuca

SEQ ID NO: 1049813 - RNA, 19 nt, Artificial Sequence
  Description of Artificial Sequence: Synthetic oligonucleotide
agcaagauuggagaggaau

SEQ ID NO: 1049814 - RNA, 19 nt, Artificial Sequence
  Description of Artificial Sequence: Synthetic oligonucleotide
cuauagacccgaagcacuc

SEQ ID NO: 1049815 - RNA, 19 nt, Artificial Sequence
  Description of Artificial Sequence: Synthetic oligonucleotide
uggugguuccaccgguggg

SEQ ID NO: 1049816 - RNA, 19 nt, Artificial Sequence
  Description of Artificial Sequence: Synthetic oligonucleotide
aagagaacgacagcaucau

SEQ ID NO: 1049817 - RNA, 19 nt, Artificial Sequence
  Description of Artificial Sequence: Synthetic oligonucleotide
uacguuguguuugucacau

SEQ ID NO: 1049818 - RNA, 19 nt, Artificial Sequence
  Description of Artificial Sequence: Synthetic oligonucleotide
ucuacggaagaaugacuuc

SEQ ID NO: 1049819 - RNA, 19 nt, Artificial Sequence
  Description of Artificial Sequence: Synthetic oligonucleotide
auaaccauccguggaggag

SEQ ID NO: 1049820 - RNA, 19 nt, Artificial Sequence
  Description of Artificial Sequence: Synthetic oligonucleotide
ucgcacacaucuucuaagu

SEQ ID NO: 1049821 - RNA, 19 nt, Artificial Sequence
  Description of Artificial Sequence: Synthetic oligonucleotide
gaagucggggccucuucag

SEQ ID NO: 1049822 - RNA, 19 nt, Artificial Sequence
  Description of Artificial Sequence: Synthetic oligonucleotide
uggcgaagaccccuggugu

SEQ ID NO: 1049823 - RNA, 19 nt, Artificial Sequence
  Description of Artificial Sequence: Synthetic oligonucleotide
agcaaagauccaucuggug

SEQ ID NO: 1049824 - RNA, 19 nt, Artificial Sequence
  Description of Artificial Sequence: Synthetic oligonucleotide
ggugugccgagcaagauug

SEQ ID NO: 1049825 - RNA, 19 nt, Artificial Sequence
  Description of Artificial Sequence: Synthetic oligonucleotide
uggcaaggggcuuuugcca

SEQ ID NO: 1049826 - RNA, 19 nt, Artificial Sequence
  Description of Artificial Sequence: Synthetic oligonucleotide
aagcaaagauccaucuggu

SEQ ID NO: 1049827 - RNA, 19 nt, Artificial Sequence
  Description of Artificial Sequence: Synthetic oligonucleotide
guaucagggguucuuaugu

SEQ ID NO: 1049828 - RNA, 19 nt, Artificial Sequence
  Description of Artificial Sequence: Synthetic oligonucleotide
acacgugaucaccuucauc

SEQ ID NO: 1049829 - RNA, 19 nt, Artificial Sequence
  Description of Artificial Sequence: Synthetic oligonucleotide
agagaacgacagcaucauc

SEQ ID NO: 1049830 - RNA, 19 nt, Artificial Sequence
  Description of Artificial Sequence: Synthetic oligonucleotide
uguucaacugagccucauc

SEQ ID NO: 1049831 - RNA, 19 nt, Artificial Sequence
  Description of Artificial Sequence: Synthetic oligonucleotide
acggcaaacaccauacggu

SEQ ID NO: 1049832 - RNA, 19 nt, Artificial Sequence
  Description of Artificial Sequence: Synthetic oligonucleotide
acgacagcaucaucaccuc

SEQ ID NO: 1049833 - RNA, 19 nt, Artificial Sequence
  Description of Artificial Sequence: Synthetic oligonucleotide
ucuggagaacacauacguu

SEQ ID NO: 1049834 - RNA, 19 nt, Artificial Sequence
  Description of Artificial Sequence: Synthetic oligonucleotide
uagacgggacagcagcgga

SEQ ID NO: 1049835 - RNA, 19 nt, Artificial Sequence
  Description of Artificial Sequence: Synthetic oligonucleotide
uuaacggcguuaaguuuau

SEQ ID NO: 1049836 - RNA, 19 nt, Artificial Sequence
  Description of Artificial Sequence: Synthetic oligonucleotide
uucagagguaugccaaguu

SEQ ID NO: 1049837 - RNA, 19 nt, Artificial Sequence
  Description of Artificial Sequence: Synthetic oligonucleotide
cuacggaagaaugacuuca

SEQ ID NO: 1049838 - RNA, 19 nt, Artificial Sequence
  Description of Artificial Sequence: Synthetic oligonucleotide
uacggaagaaugacuucau

SEQ ID NO: 1049839 - RNA, 19 nt, Artificial Sequence
  Description of Artificial Sequence: Synthetic oligonucleotide
uaacuccuuguacguagcu

SEQ ID NO: 1049840 - RNA, 19 nt, Artificial Sequence
  Description of Artificial Sequence: Synthetic oligonucleotide
gugcuauagacccgaagca

SEQ ID NO: 1049841 - RNA, 19 nt, Artificial Sequence
  Description of Artificial Sequence: Synthetic oligonucleotide
cuuucccgggacacgguag

SEQ ID NO: 1049842 - RNA, 19 nt, Artificial Sequence
  Description of Artificial Sequence: Synthetic oligonucleotide
ggcguuaaguuuauucucc

SEQ ID NO: 1049843 - RNA, 19 nt, Artificial Sequence
  Description of Artificial Sequence: Synthetic oligonucleotide
aucgugaaacauccggaaa

SEQ ID NO: 1049844 - RNA, 19 nt, Artificial Sequence
  Description of Artificial Sequence: Synthetic oligonucleotide
cuggcgaagaccccuggug

SEQ ID NO: 1049845 - RNA, 19 nt, Artificial Sequence
  Description of Artificial Sequence: Synthetic oligonucleotide
aagucggggccucuucagu

SEQ ID NO: 1049846 - RNA, 19 nt, Artificial Sequence
  Description of Artificial Sequence: Synthetic oligonucleotide
acacauacguuguguuugu

SEQ ID NO: 1049847 - RNA, 19 nt, Artificial Sequence
  Description of Artificial Sequence: Synthetic oligonucleotide
uguuauccacagaggcaga

SEQ ID NO: 1049848 - RNA, 19 nt, Artificial Sequence
  Description of Artificial Sequence: Synthetic oligonucleotide
caaacaccauacgguaggg

SEQ ID NO: 1049849 - RNA, 19 nt, Artificial Sequence
  Description of Artificial Sequence: Synthetic oligonucleotide
cugacggcgguguccacgc

SEQ ID NO: 1049850 - RNA, 19 nt, Artificial Sequence
  Description of Artificial Sequence: Synthetic oligonucleotide
acgguaggugggcaaucgg

SEQ ID NO: 1049851 - RNA, 19 nt, Artificial Sequence
  Description of Artificial Sequence: Synthetic oligonucleotide
auacguuguguuugucaca

SEQ ID NO: 1049852 - RNA, 19 nt, Artificial Sequence
  Description of Artificial Sequence: Synthetic oligonucleotide
gcaaagauccaucuggugu

SEQ ID NO: 1049853 - RNA, 19 nt, Artificial Sequence
  Description of Artificial Sequence: Synthetic oligonucleotide
ucaagcagacuuggaggcc

SEQ ID NO: 1049854 - RNA, 19 nt, Artificial Sequence
  Description of Artificial Sequence: Synthetic oligonucleotide
caaucggccuuuucaggug

SEQ ID NO: 1049855 - RNA, 19 nt, Artificial Sequence
  Description of Artificial Sequence: Synthetic oligonucleotide
gcguuaaguuuauucuccg

SEQ ID NO: 1049856 - RNA, 19 nt, Artificial Sequence
  Description of Artificial Sequence: Synthetic oligonucleotide
cuucggcggaucugggucc

SEQ ID NO: 1049857 - RNA, 19 nt, Artificial Sequence
  Description of Artificial Sequence: Synthetic oligonucleotide
ugugccgagcaagauugga

SEQ ID NO: 1049858 - RNA, 19 nt, Artificial Sequence
  Description of Artificial Sequence: Synthetic oligonucleotide
gauccugacggcggugucc

SEQ ID NO: 1049859 - RNA, 19 nt, Artificial Sequence
  Description of Artificial Sequence: Synthetic oligonucleotide
cacaacggcuuucccgucc

SEQ ID NO: 1049860 - RNA, 19 nt, Artificial Sequence
  Description of Artificial Sequence: Synthetic oligonucleotide
ggcaaucggccuuuucagg

SEQ ID NO: 1049861 - RNA, 19 nt, Artificial Sequence
  Description of Artificial Sequence: Synthetic oligonucleotide
gagguaugccaaguucacc

SEQ ID NO: 1049862 - RNA, 19 nt, Artificial Sequence
  Description of Artificial Sequence: Synthetic oligonucleotide
uggugugccgagcaagauu

SEQ ID NO: 1049863 - RNA, 19 nt, Artificial Sequence
  Description of Artificial Sequence: Synthetic oligonucleotide
caggcgauuucacacguga

SEQ ID NO: 1049864 - RNA, 19 nt, Artificial Sequence
  Description of Artificial Sequence: Synthetic oligonucleotide
cuuuugccagcaggggugg

SEQ ID NO: 1049865 - RNA, 19 nt, Artificial Sequence
  Description of Artificial Sequence: Synthetic oligonucleotide
uagacccgaagcacucugu

SEQ ID NO: 1049866 - RNA, 19 nt, Artificial Sequence
  Description of Artificial Sequence: Synthetic oligonucleotide
ucugccuuuaacggcguua

SEQ ID NO: 1049867 - RNA, 19 nt, Artificial Sequence
  Description of Artificial Sequence: Synthetic oligonucleotide
gggcaaucggccuuuucag

SEQ ID NO: 1049868 - RNA, 19 nt, Artificial Sequence
  Description of Artificial Sequence: Synthetic oligonucleotide
uucaguucgggaggcuccc

SEQ ID NO: 1049869 - RNA, 19 nt, Artificial Sequence
  Description of Artificial Sequence: Synthetic oligonucleotide
ggcgauuucacacgugauc

SEQ ID NO: 1049870 - RNA, 19 nt, Artificial Sequence
  Description of Artificial Sequence: Synthetic oligonucleotide
caccauacgguagggcagg

SEQ ID NO: 1049871 - RNA, 19 nt, Artificial Sequence
  Description of Artificial Sequence: Synthetic oligonucleotide
caucgugaaacauccggaa

SEQ ID NO: 1049872 - RNA, 19 nt, Artificial Sequence
  Description of Artificial Sequence: Synthetic oligonucleotide
uauagacccgaagcacucu

SEQ ID NO: 1049873 - RNA, 19 nt, Artificial Sequence
  Description of Artificial Sequence: Synthetic oligonucleotide
cugucgcaacucagggucg

SEQ ID NO: 1049874 - RNA, 19 nt, Artificial Sequence
  Description of Artificial Sequence: Synthetic oligonucleotide
gugccgagcaagauuggag

SEQ ID NO: 1049875 - RNA, 19 nt, Artificial Sequence
  Description of Artificial Sequence: Synthetic oligonucleotide
cacgguaggugggcaaucg

SEQ ID NO: 1049876 - RNA, 19 nt, Artificial Sequence
  Description of Artificial Sequence: Synthetic oligonucleotide
gcgauuucacacgugauca

SEQ ID NO: 1049877 - RNA, 19 nt, Artificial Sequence
  Description of Artificial Sequence: Synthetic oligonucleotide
agauccugacggcgguguc

SEQ ID NO: 1049878 - RNA, 19 nt, Artificial Sequence
  Description of Artificial Sequence: Synthetic oligonucleotide
auaucgcacacaucuucua

SEQ ID NO: 1049879 - RNA, 19 nt, Artificial Sequence
  Description of Artificial Sequence: Synthetic oligonucleotide
ugccuuuaacggcguuaag

SEQ ID NO: 1049880 - RNA, 19 nt, Artificial Sequence
  Description of Artificial Sequence: Synthetic oligonucleotide
acgugaucaccuucauccu

SEQ ID NO: 1049881 - RNA, 19 nt, Artificial Sequence
  Description of Artificial Sequence: Synthetic oligonucleotide
cauccguggaggagaugcc

SEQ ID NO: 1049882 - RNA, 19 nt, Artificial Sequence
  Description of Artificial Sequence: Synthetic oligonucleotide
uagcguguugagugucacc

SEQ ID NO: 1049883 - RNA, 19 nt, Artificial Sequence
  Description of Artificial Sequence: Synthetic oligonucleotide
cucaggguaugguaaugga

SEQ ID NO: 1049884 - RNA, 19 nt, Artificial Sequence
  Description of Artificial Sequence: Synthetic oligonucleotide
augcuaagaucuccccaga

SEQ ID NO: 1049885 - RNA, 19 nt, Artificial Sequence
  Description of Artificial Sequence: Synthetic oligonucleotide
agucuacggaagaaugacu

SEQ ID NO: 1049886 - RNA, 19 nt, Artificial Sequence
  Description of Artificial Sequence: Synthetic oligonucleotide
ugucgcaacucagggucgc

SEQ ID NO: 1049887 - RNA, 19 nt, Artificial Sequence
  Description of Artificial Sequence: Synthetic oligonucleotide
gggacuguccuuaauggca

SEQ ID NO: 1049888 - RNA, 19 nt, Artificial Sequence
  Description of Artificial Sequence: Synthetic oligonucleotide
gcuuuugccagcaggggug

SEQ ID NO: 1049889 - RNA, 19 nt, Artificial Sequence
  Description of Artificial Sequence: Synthetic oligonucleotide
ggacuguccuuaauggcag

SEQ ID NO: 1049890 - RNA, 19 nt, Artificial Sequence
  Description of Artificial Sequence: Synthetic oligonucleotide
gguuugggcgccuccuucc

SEQ ID NO: 1049891 - RNA, 19 nt, Artificial Sequence
  Description of Artificial Sequence: Synthetic oligonucleotide
gguaugguaauggauguua

SEQ ID NO: 1049892 - RNA, 19 nt, Artificial Sequence
  Description of Artificial Sequence: Synthetic oligonucleotide
guuccgucacuggaccagg

SEQ ID NO: 1049893 - RNA, 19 nt, Artificial Sequence
  Description of Artificial Sequence: Synthetic oligonucleotide
caaaugggaaaggcugcug

SEQ ID NO: 1049894 - RNA, 19 nt, Artificial Sequence
  Description of Artificial Sequence: Synthetic oligonucleotide
gagucccaucauuugccca

SEQ ID NO: 1049895 - RNA, 19 nt, Artificial Sequence
  Description of Artificial Sequence: Synthetic oligonucleotide
gugucuugccccagaacug

SEQ ID NO: 1049896 - RNA, 19 nt, Artificial Sequence
  Description of Artificial Sequence: Synthetic oligonucleotide
gacagcucuggugugccga

SEQ ID NO: 1049897 - RNA, 19 nt, Artificial Sequence
  Description of Artificial Sequence: Synthetic oligonucleotide
agugagaagcaaagaucca

SEQ ID NO: 1049898 - RNA, 19 nt, Artificial Sequence
  Description of Artificial Sequence: Synthetic oligonucleotide
uaggugggcaaucggccuu

SEQ ID NO: 1049899 - RNA, 19 nt, Artificial Sequence
  Description of Artificial Sequence: Synthetic oligonucleotide
agucggggccucuucaguu

SEQ ID NO: 1049900 - RNA, 19 nt, Artificial Sequence
  Description of Artificial Sequence: Synthetic oligonucleotide
aucaucaccuccagaugcu

SEQ ID NO: 1049901 - RNA, 19 nt, Artificial Sequence
  Description of Artificial Sequence: Synthetic oligonucleotide
cccgggacacgguaggugg

SEQ ID NO: 1049902 - RNA, 19 nt, Artificial Sequence
  Description of Artificial Sequence: Synthetic oligonucleotide
gaacacauacguuguguuu

SEQ ID NO: 1049903 - RNA, 19 nt, Artificial Sequence
  Description of Artificial Sequence: Synthetic oligonucleotide
uccuucggcggaucugggu

SEQ ID NO: 1049904 - RNA, 19 nt, Artificial Sequence
  Description of Artificial Sequence: Synthetic oligonucleotide
gccgagcaagauuggagag

SEQ ID NO: 1049905 - RNA, 19 nt, Artificial Sequence
  Description of Artificial Sequence: Synthetic oligonucleotide
gaucggcucuggcuccuug

SEQ ID NO: 1049906 - RNA, 19 nt, Artificial Sequence
  Description of Artificial Sequence: Synthetic oligonucleotide
uuccgucacuggaccagga

SEQ ID NO: 1049907 - RNA, 19 nt, Artificial Sequence
  Description of Artificial Sequence: Synthetic oligonucleotide
ugucugccuuuaacggcgu

SEQ ID NO: 1049908 - RNA, 19 nt, Artificial Sequence
  Description of Artificial Sequence: Synthetic oligonucleotide
gguuccgucacuggaccag

SEQ ID NO: 1049909 - RNA, 19 nt, Artificial Sequence
  Description of Artificial Sequence: Synthetic oligonucleotide
augucacucaggguauggu

SEQ ID NO: 1049910 - RNA, 19 nt, Artificial Sequence
  Description of Artificial Sequence: Synthetic oligonucleotide
auccugacggcggugucca

SEQ ID NO: 1049911 - RNA, 19 nt, Artificial Sequence
  Description of Artificial Sequence: Synthetic oligonucleotide
caucagagcccaggguuug

SEQ ID NO: 1049912 - RNA, 19 nt, Artificial Sequence
  Description of Artificial Sequence: Synthetic oligonucleotide
guucacccuucucaaaggu

SEQ ID NO: 1049913 - RNA, 19 nt, Artificial Sequence
  Description of Artificial Sequence: Synthetic oligonucleotide
uuucccguccggccccuuc

SEQ ID NO: 1049914 - RNA, 19 nt, Artificial Sequence
  Description of Artificial Sequence: Synthetic oligonucleotide
gccacacgcuucuucuggg

SEQ ID NO: 1049915 - RNA, 19 nt, Artificial Sequence
  Description of Artificial Sequence: Synthetic oligonucleotide
gccaaaugggaaaggcugc

SEQ ID NO: 1049916 - RNA, 19 nt, Artificial Sequence
  Description of Artificial Sequence: Synthetic oligonucleotide
agcggacagccaggguugc

SEQ ID NO: 1049917 - RNA, 19 nt, Artificial Sequence
  Description of Artificial Sequence: Synthetic oligonucleotide
ggcgaagaccccuggugug

SEQ ID NO: 1049918 - RNA, 19 nt, Artificial Sequence
  Description of Artificial Sequence: Synthetic oligonucleotide
gucuacggaagaaugacuu

SEQ ID NO: 1049919 - RNA, 19 nt, Artificial Sequence
  Description of Artificial Sequence: Synthetic oligonucleotide
caucagagucccaucauuu

SEQ ID NO: 1049920 - RNA, 19 nt, Artificial Sequence
  Description of Artificial Sequence: Synthetic oligonucleotide
ggacuuggcgcagugucug

SEQ ID NO: 1049921 - RNA, 19 nt, Artificial Sequence
  Description of Artificial Sequence: Synthetic oligonucleotide
agguuccgucacuggacca

SEQ ID NO: 1049922 - RNA, 19 nt, Artificial Sequence
  Description of Artificial Sequence: Synthetic oligonucleotide
gguguaaaacugagucuac

SEQ ID NO: 1049923 - RNA, 19 nt, Artificial Sequence
  Description of Artificial Sequence: Synthetic oligonucleotide
ccuucggcggaucuggguc

SEQ ID NO: 1049924 - RNA, 19 nt, Artificial Sequence
  Description of Artificial Sequence: Synthetic oligonucleotide
uucggaggccacggcaaac

SEQ ID NO: 1049925 - RNA, 19 nt, Artificial Sequence
  Description of Artificial Sequence: Synthetic oligonucleotide
aauggauguuagacacaua

SEQ ID NO: 1049926 - RNA, 19 nt, Artificial Sequence
  Description of Artificial Sequence: Synthetic oligonucleotide
uccuuguacguagcuuuua

SEQ ID NO: 1049927 - RNA, 19 nt, Artificial Sequence
  Description of Artificial Sequence: Synthetic oligonucleotide
gcaaucggccuuuucaggu

SEQ ID NO: 1049928 - RNA, 19 nt, Artificial Sequence
  Description of Artificial Sequence: Synthetic oligonucleotide
gucggggccucuucaguuc

SEQ ID NO: 1049929 - RNA, 19 nt, Artificial Sequence
  Description of Artificial Sequence: Synthetic oligonucleotide
ccgagcaagauuggagagg

SEQ ID NO: 1049930 - RNA, 19 nt, Artificial Sequence
  Description of Artificial Sequence: Synthetic oligonucleotide
gguugcuuucccgggacac

SEQ ID NO: 1049931 - RNA, 19 nt, Artificial Sequence
  Description of Artificial Sequence: Synthetic oligonucleotide
cuaaguggccccucagggu

SEQ ID NO: 1049932 - RNA, 19 nt, Artificial Sequence
  Description of Artificial Sequence: Synthetic oligonucleotide
ggccucaacucaaaguaga

SEQ ID NO: 1049933 - RNA, 19 nt, Artificial Sequence
  Description of Artificial Sequence: Synthetic oligonucleotide
ugcuggcaucccauaugau

SEQ ID NO: 1049934 - RNA, 19 nt, Artificial Sequence
  Description of Artificial Sequence: Synthetic oligonucleotide
ucgcaacucagggucgcaa

SEQ ID NO: 1049935 - RNA, 19 nt, Artificial Sequence
  Description of Artificial Sequence: Synthetic oligonucleotide
cugccuuuaacggcguuaa

SEQ ID NO: 1049936 - RNA, 19 nt, Artificial Sequence
  Description of Artificial Sequence: Synthetic oligonucleotide
cuuuaacggcguuaaguuu

SEQ ID NO: 1049937 - RNA, 19 nt, Artificial Sequence
  Description of Artificial Sequence: Synthetic oligonucleotide
agggguucuuauguucaaa

SEQ ID NO: 1049938 - RNA, 19 nt, Artificial Sequence
  Description of Artificial Sequence: Synthetic oligonucleotide
ccauaugauaacuguguua

SEQ ID NO: 1049939 - RNA, 19 nt, Artificial Sequence
  Description of Artificial Sequence: Synthetic oligonucleotide
uccacgccggcggacgcca

SEQ ID NO: 1049940 - RNA, 19 nt, Artificial Sequence
  Description of Artificial Sequence: Synthetic oligonucleotide
cucagggucgcaauauauu

SEQ ID NO: 1049941 - RNA, 19 nt, Artificial Sequence
  Description of Artificial Sequence: Synthetic oligonucleotide
ccuuuaacggcguuaaguu

SEQ ID NO: 1049942 - RNA, 19 nt, Artificial Sequence
  Description of Artificial Sequence: Synthetic oligonucleotide
gcuauagacccgaagcacu

SEQ ID NO: 1049943 - RNA, 19 nt, Artificial Sequence
  Description of Artificial Sequence: Synthetic oligonucleotide
caaauaucgcacacaucuu

SEQ ID NO: 1049944 - RNA, 19 nt, Artificial Sequence
  Description of Artificial Sequence: Synthetic oligonucleotide
gugugccgagcaagauugg

SEQ ID NO: 1049945 - RNA, 19 nt, Artificial Sequence
  Description of Artificial Sequence: Synthetic oligonucleotide
ugggugcuauagacccgaa

SEQ ID NO: 1049946 - RNA, 19 nt, Artificial Sequence
  Description of Artificial Sequence: Synthetic oligonucleotide
gggucgcaauauauugacc

SEQ ID NO: 1049947 - RNA, 19 nt, Artificial Sequence
  Description of Artificial Sequence: Synthetic oligonucleotide
caggguugcuuucccggga

SEQ ID NO: 1049948 - RNA, 19 nt, Artificial Sequence
  Description of Artificial Sequence: Synthetic oligonucleotide
gccucaacucaaaguagac

SEQ ID NO: 1049949 - RNA, 19 nt, Artificial Sequence
  Description of Artificial Sequence: Synthetic oligonucleotide
ccugacggcgguguccacg

SEQ ID NO: 1049950 - RNA, 19 nt, Artificial Sequence
  Description of Artificial Sequence: Synthetic oligonucleotide
auacagcaccacagagucu

SEQ ID NO: 1049951 - RNA, 19 nt, Artificial Sequence
  Description of Artificial Sequence: Synthetic oligonucleotide
cggcguuaaguuuauucuc

SEQ ID NO: 1049952 - RNA, 19 nt, Artificial Sequence
  Description of Artificial Sequence: Synthetic oligonucleotide
agguaacuccuuguacgua

SEQ ID NO: 1049953 - RNA, 19 nt, Artificial Sequence
  Description of Artificial Sequence: Synthetic oligonucleotide
aggguuugggcgccuccuu

SEQ ID NO: 1049954 - RNA, 19 nt, Artificial Sequence
  Description of Artificial Sequence: Synthetic oligonucleotide
ccaaagggucccagguaac

SEQ ID NO: 1049955 - RNA, 19 nt, Artificial Sequence
  Description of Artificial Sequence: Synthetic oligonucleotide
uugcuguaucagggguucu

SEQ ID NO: 1049956 - RNA, 19 nt, Artificial Sequence
  Description of Artificial Sequence: Synthetic oligonucleotide
ggcuuuugccagcaggggu

SEQ ID NO: 1049957 - RNA, 19 nt, Artificial Sequence
  Description of Artificial Sequence: Synthetic oligonucleotide
cacauacguuguguuuguc

SEQ ID NO: 1049958 - RNA, 19 nt, Artificial Sequence
  Description of Artificial Sequence: Synthetic oligonucleotide
ggaggccguggcaaggggc

SEQ ID NO: 1049959 - RNA, 19 nt, Artificial Sequence
  Description of Artificial Sequence: Synthetic oligonucleotide
guuguguuugucacauuuu

SEQ ID NO: 1049960 - RNA, 19 nt, Artificial Sequence
  Description of Artificial Sequence: Synthetic oligonucleotide
agauggagcuggagacugu

SEQ ID NO: 1049961 - RNA, 19 nt, Artificial Sequence
  Description of Artificial Sequence: Synthetic oligonucleotide
gaagaccccuggugugucu

SEQ ID NO: 1049962 - RNA, 19 nt, Artificial Sequence
  Description of Artificial Sequence: Synthetic oligonucleotide
ggguuugggcgccuccuuc

SEQ ID NO: 1049963 - RNA, 19 nt, Artificial Sequence
  Description of Artificial Sequence: Synthetic oligonucleotide
gcagcggacagccaggguu

SEQ ID NO: 1049964 - RNA, 19 nt, Artificial Sequence
  Description of Artificial Sequence: Synthetic oligonucleotide
cucugucgcaacucagggu

SEQ ID NO: 1049965 - RNA, 19 nt, Artificial Sequence
  Description of Artificial Sequence: Synthetic oligonucleotide
cagggguucuuauguucaa

SEQ ID NO: 1049966 - RNA, 19 nt, Artificial Sequence
  Description of Artificial Sequence: Synthetic oligonucleotide
gcaacucagggucgcaaua

SEQ ID NO: 1049967 - RNA, 19 nt, Artificial Sequence
  Description of Artificial Sequence: Synthetic oligonucleotide
ccacggcaaacaccauacg

SEQ ID NO: 1049968 - RNA, 19 nt, Artificial Sequence
  Description of Artificial Sequence: Synthetic oligonucleotide
aggcgauuucacacgugau

SEQ ID NO: 1049969 - RNA, 19 nt, Artificial Sequence
  Description of Artificial Sequence: Synthetic oligonucleotide
ucccguccggccccuucuc

SEQ ID NO: 1049970 - RNA, 19 nt, Artificial Sequence
  Description of Artificial Sequence: Synthetic oligonucleotide
cgauuucacacgugaucac

SEQ ID NO: 1049971 - RNA, 19 nt, Artificial Sequence
  Description of Artificial Sequence: Synthetic oligonucleotide
cuguaucagggguucuuau

SEQ ID NO: 1049972 - RNA, 19 nt, Artificial Sequence
  Description of Artificial Sequence: Synthetic oligonucleotide
guuugggcgccuccuuccu

SEQ ID NO: 1049973 - RNA, 19 nt, Artificial Sequence
  Description of Artificial Sequence: Synthetic oligonucleotide
cuucggaggccacggcaaa

SEQ ID NO: 1049974 - RNA, 19 nt, Artificial Sequence
  Description of Artificial Sequence: Synthetic oligonucleotide
gcaagauuggagaggaauu

SEQ ID NO: 1049975 - RNA, 19 nt, Artificial Sequence
  Description of Artificial Sequence: Synthetic oligonucleotide
acguuguguuugucacauu

SEQ ID NO: 1049976 - RNA, 19 nt, Artificial Sequence
  Description of Artificial Sequence: Synthetic oligonucleotide
guguuuugacuagcaggcu

SEQ ID NO: 1049977 - RNA, 19 nt, Artificial Sequence
  Description of Artificial Sequence: Synthetic oligonucleotide
gcuguaucagggguucuua

SEQ ID NO: 1049978 - RNA, 19 nt, Artificial Sequence
  Description of Artificial Sequence: Synthetic oligonucleotide
gccgcaugcuggaagucca

SEQ ID NO: 1049979 - RNA, 19 nt, Artificial Sequence
  Description of Artificial Sequence: Synthetic oligonucleotide
ccaggcgauuucacacgug

SEQ ID NO: 1049980 - RNA, 19 nt, Artificial Sequence
  Description of Artificial Sequence: Synthetic oligonucleotide
gugaaacauccggaaacuu

SEQ ID NO: 1049981 - RNA, 19 nt, Artificial Sequence
  Description of Artificial Sequence: Synthetic oligonucleotide
gagcaagauuggagaggaa

SEQ ID NO: 1049982 - RNA, 19 nt, Artificial Sequence
  Description of Artificial Sequence: Synthetic oligonucleotide
gucgcaacucagggucgca

SEQ ID NO: 1049983 - RNA, 19 nt, Artificial Sequence
  Description of Artificial Sequence: Synthetic oligonucleotide
accauccguggaggagaug

SEQ ID NO: 1049984 - RNA, 19 nt, Artificial Sequence
  Description of Artificial Sequence: Synthetic oligonucleotide
ggguugcuuucccgggaca

SEQ ID NO: 1049985 - RNA, 19 nt, Artificial Sequence
  Description of Artificial Sequence: Synthetic oligonucleotide
uaacggcguuaaguuuauu

SEQ ID NO: 1049986 - RNA, 19 nt, Artificial Sequence
  Description of Artificial Sequence: Synthetic oligonucleotide
ccgcaugcuggaaguccag

SEQ ID NO: 1049987 - RNA, 19 nt, Artificial Sequence
  Description of Artificial Sequence: Synthetic oligonucleotide
agcaggccucaagcagacu

SEQ ID NO: 1049988 - RNA, 19 nt, Artificial Sequence
  Description of Artificial Sequence: Synthetic oligonucleotide
gccaggcgauuucacacgu

SEQ ID NO: 1049989 - RNA, 19 nt, Artificial Sequence
  Description of Artificial Sequence: Synthetic oligonucleotide
gcugagggacuguccuuaa

SEQ ID NO: 1049990 - RNA, 19 nt, Artificial Sequence
  Description of Artificial Sequence: Synthetic oligonucleotide
cggcaaacaccauacggua

SEQ ID NO: 1049991 - RNA, 19 nt, Artificial Sequence
  Description of Artificial Sequence: Synthetic oligonucleotide
ucggcggaucuggguccug

SEQ ID NO: 1049992 - RNA, 19 nt, Artificial Sequence
  Description of Artificial Sequence: Synthetic oligonucleotide
cacacgugaucaccuucau

SEQ ID NO: 1049993 - RNA, 19 nt, Artificial Sequence
  Description of Artificial Sequence: Synthetic oligonucleotide
caggguuugggcgccuccu

SEQ ID NO: 1049994 - RNA, 19 nt, Artificial Sequence
  Description of Artificial Sequence: Synthetic oligonucleotide
cugagggacuguccuuaau

SEQ ID NO: 1049995 - RNA, 19 nt, Artificial Sequence
  Description of Artificial Sequence: Synthetic oligonucleotide
ccggaaacuucuugccucu

SEQ ID NO: 1049996 - RNA, 19 nt, Artificial Sequence
  Description of Artificial Sequence: Synthetic oligonucleotide
ggcgcagugucugccuuua

SEQ ID NO: 1049997 - RNA, 19 nt, Artificial Sequence
  Description of Artificial Sequence: Synthetic oligonucleotide
ccacaacggcuuucccguc

SEQ ID NO: 1049998 - RNA, 19 nt, Artificial Sequence
  Description of Artificial Sequence: Synthetic oligonucleotide
ccaucagagucccaucauu

SEQ ID NO: 1049999 - RNA, 19 nt, Artificial Sequence
  Description of Artificial Sequence: Synthetic oligonucleotide
gcgaagaccccuggugugu

SEQ ID NO: 1050000 - RNA, 19 nt, Artificial Sequence
  Description of Artificial Sequence: Synthetic oligonucleotide
cggcggaucuggguccugg

SEQ ID NO: 1050001 - RNA, 19 nt, Artificial Sequence
  Description of Artificial Sequence: Synthetic oligonucleotide
gucugccuuuaacggcguu

SEQ ID NO: 1050002 - RNA, 19 nt, Artificial Sequence
  Description of Artificial Sequence: Synthetic oligonucleotide
ggguaugguaauggauguu

SEQ ID NO: 1050003 - RNA, 19 nt, Artificial Sequence
  Description of Artificial Sequence: Synthetic oligonucleotide
gggguuccuucggcggauc

SEQ ID NO: 1050004 - RNA, 19 nt, Artificial Sequence
  Description of Artificial Sequence: Synthetic oligonucleotide
gcgcagugucugccuuuaa

SEQ ID NO: 1050005 - RNA, 19 nt, Artificial Sequence
  Description of Artificial Sequence: Synthetic oligonucleotide
cgcaacucagggucgcaau

SEQ ID NO: 1050006 - RNA, 19 nt, Artificial Sequence
  Description of Artificial Sequence: Synthetic oligonucleotide
cccagaacuguagcguguu

SEQ ID NO: 1050007 - RNA, 19 nt, Artificial Sequence
  Description of Artificial Sequence: Synthetic oligonucleotide
ccgccgcaugcuggaaguc

SEQ ID NO: 1050008 - RNA, 19 nt, Artificial Sequence
  Description of Artificial Sequence: Synthetic oligonucleotide
ccauacgguagggcaggcu

SEQ ID NO: 1050009 - RNA, 19 nt, Artificial Sequence
  Description of Artificial Sequence: Synthetic oligonucleotide
ccggcggacgccagccugu

SEQ ID NO: 1050010 - RNA, 19 nt, Artificial Sequence
  Description of Artificial Sequence: Synthetic oligonucleotide
cggcgguguccacgccggc

SEQ ID NO: 1050011 - RNA, 19 nt, Artificial Sequence
  Description of Artificial Sequence: Synthetic oligonucleotide
cggcggacgccagccugug

SEQ ID NO: 1050012 - RNA, 19 nt, Artificial Sequence
  Description of Artificial Sequence: Synthetic oligonucleotide
gggucccagguaacuccuu

SEQ ID NO: 1050013 - RNA, 19 nt, Artificial Sequence
  Description of Artificial Sequence: Synthetic oligonucleotide
aauaauaugagguaucgau

SEQ ID NO: 1050014 - RNA, 19 nt, Artificial Sequence
  Description of Artificial Sequence: Synthetic oligonucleotide
ugagaagaagcucauagcg

SEQ ID NO: 1050015 - RNA, 19 nt, Artificial Sequence
  Description of Artificial Sequence: Synthetic oligonucleotide
uuuaugagcucuuuggugg

SEQ ID NO: 1050016 - RNA, 19 nt, Artificial Sequence
  Description of Artificial Sequence: Synthetic oligonucleotide
ucauugaauaauaugaggu

SEQ ID NO: 1050017 - RNA, 19 nt, Artificial Sequence
  Description of Artificial Sequence: Synthetic oligonucleotide
uuuccugacaccaggaagg

SEQ ID NO: 1050018 - RNA, 19 nt, Artificial Sequence
  Description of Artificial Sequence: Synthetic oligonucleotide
gaugucaccaauucguggg

SEQ ID NO: 1050019 - RNA, 19 nt, Artificial Sequence
  Description of Artificial Sequence: Synthetic oligonucleotide
ugaaguaccagcuuaggug

SEQ ID NO: 1050020 - RNA, 19 nt, Artificial Sequence
  Description of Artificial Sequence: Synthetic oligonucleotide
aaaccacaugcccacaggc

SEQ ID NO: 1050021 - RNA, 19 nt, Artificial Sequence
  Description of Artificial Sequence: Synthetic oligonucleotide
gagguaucgaucuugagug

SEQ ID NO: 1050022 - RNA, 19 nt, Artificial Sequence
  Description of Artificial Sequence: Synthetic oligonucleotide
augacuuuaaacuggguag

SEQ ID NO: 1050023 - RNA, 19 nt, Artificial Sequence
  Description of Artificial Sequence: Synthetic oligonucleotide
agcacagccauccagcgcc

SEQ ID NO: 1050024 - RNA, 19 nt, Artificial Sequence
  Description of Artificial Sequence: Synthetic oligonucleotide
ucaaguauugacugcauug

SEQ ID NO: 1050025 - RNA, 19 nt, Artificial Sequence
  Description of Artificial Sequence: Synthetic oligonucleotide
uaauaugagguaucgaucu

SEQ ID NO: 1050026 - RNA, 19 nt, Artificial Sequence
  Description of Artificial Sequence: Synthetic oligonucleotide
uagauguacagcaccaagg

SEQ ID NO: 1050027 - RNA, 19 nt, Artificial Sequence
  Description of Artificial Sequence: Synthetic oligonucleotide
aacagauaguccuugagaa

SEQ ID NO: 1050028 - RNA, 19 nt, Artificial Sequence
  Description of Artificial Sequence: Synthetic oligonucleotide
cuugagaagaagcucauag

SEQ ID NO: 1050029 - RNA, 19 nt, Artificial Sequence
  Description of Artificial Sequence: Synthetic oligonucleotide
ugaauaauaugagguaucg

SEQ ID NO: 1050030 - RNA, 19 nt, Artificial Sequence
  Description of Artificial Sequence: Synthetic oligonucleotide
auugaacaugggcagaugg

SEQ ID NO: 1050031 - RNA, 19 nt, Artificial Sequence
  Description of Artificial Sequence: Synthetic oligonucleotide
auggccuucuuuuaugagc

SEQ ID NO: 1050032 - RNA, 19 nt, Artificial Sequence
  Description of Artificial Sequence: Synthetic oligonucleotide
agauguacagcaccaaggg

SEQ ID NO: 1050033 - RNA, 19 nt, Artificial Sequence
  Description of Artificial Sequence: Synthetic oligonucleotide
ucuaggauggaccuccugc

SEQ ID NO: 1050034 - RNA, 19 nt, Artificial Sequence
  Description of Artificial Sequence: Synthetic oligonucleotide
ugagguaucgaucuugagu

SEQ ID NO: 1050035 - RNA, 19 nt, Artificial Sequence
  Description of Artificial Sequence: Synthetic oligonucleotide
aaggauauggccuucuuuu

SEQ ID NO: 1050036 - RNA, 19 nt, Artificial Sequence
  Description of Artificial Sequence: Synthetic oligonucleotide
uuaacagauaguccuugag

SEQ ID NO: 1050037 - RNA, 19 nt, Artificial Sequence
  Description of Artificial Sequence: Synthetic oligonucleotide
aucuacaucaaugcgugcc

SEQ ID NO: 1050038 - RNA, 19 nt, Artificial Sequence
  Description of Artificial Sequence: Synthetic oligonucleotide
aacaugggcagauggagug

SEQ ID NO: 1050039 - RNA, 19 nt, Artificial Sequence
  Description of Artificial Sequence: Synthetic oligonucleotide
aaguauugacugcauuggg

SEQ ID NO: 1050040 - RNA, 19 nt, Artificial Sequence
  Description of Artificial Sequence: Synthetic oligonucleotide
aacucagagcauuucccac

SEQ ID NO: 1050041 - RNA, 19 nt, Artificial Sequence
  Description of Artificial Sequence: Synthetic oligonucleotide
cauuagaaugcucugcugc

SEQ ID NO: 1050042 - RNA, 19 nt, Artificial Sequence
  Description of Artificial Sequence: Synthetic oligonucleotide
uuuggugggacugacaaug

SEQ ID NO: 1050043 - RNA, 19 nt, Artificial Sequence
  Description of Artificial Sequence: Synthetic oligonucleotide
aauucguggguagcggucc

SEQ ID NO: 1050044 - RNA, 19 nt, Artificial Sequence
  Description of Artificial Sequence: Synthetic oligonucleotide
uucucaggaaccacaaacc

SEQ ID NO: 1050045 - RNA, 19 nt, Artificial Sequence
  Description of Artificial Sequence: Synthetic oligonucleotide
ugacaacuuaaggauaugg

SEQ ID NO: 1050046 - RNA, 19 nt, Artificial Sequence
  Description of Artificial Sequence: Synthetic oligonucleotide
ugggaauucaaguauugac

SEQ ID NO: 1050047 - RNA, 19 nt, Artificial Sequence
  Description of Artificial Sequence: Synthetic oligonucleotide
guguuaaccagcucuacag

SEQ ID NO: 1050048 - RNA, 19 nt, Artificial Sequence
  Description of Artificial Sequence: Synthetic oligonucleotide
aauugaagggcuccuggca

SEQ ID NO: 1050049 - RNA, 19 nt, Artificial Sequence
  Description of Artificial Sequence: Synthetic oligonucleotide
ucuuuggugggacugacaa

SEQ ID NO: 1050050 - RNA, 19 nt, Artificial Sequence
  Description of Artificial Sequence: Synthetic oligonucleotide
gaaggaugucaccaauucg

SEQ ID NO: 1050051 - RNA, 19 nt, Artificial Sequence
  Description of Artificial Sequence: Synthetic oligonucleotide
agaacguguccccacggcc

SEQ ID NO: 1050052 - RNA, 19 nt, Artificial Sequence
  Description of Artificial Sequence: Synthetic oligonucleotide
ugcauacacgguuggaacg

SEQ ID NO: 1050053 - RNA, 19 nt, Artificial Sequence
  Description of Artificial Sequence: Synthetic oligonucleotide
uucaacaguuugaaggucu

SEQ ID NO: 1050054 - RNA, 19 nt, Artificial Sequence
  Description of Artificial Sequence: Synthetic oligonucleotide
ucgccauacaucuugagaa

SEQ ID NO: 1050055 - RNA, 19 nt, Artificial Sequence
  Description of Artificial Sequence: Synthetic oligonucleotide
aaagcccacauuuugugaa

SEQ ID NO: 1050056 - RNA, 19 nt, Artificial Sequence
  Description of Artificial Sequence: Synthetic oligonucleotide
ucuacaucaaugcgugccc

SEQ ID NO: 1050057 - RNA, 19 nt, Artificial Sequence
  Description of Artificial Sequence: Synthetic oligonucleotide
uuaaccagcucuacagccc

SEQ ID NO: 1050058 - RNA, 19 nt, Artificial Sequence
  Description of Artificial Sequence: Synthetic oligonucleotide
uugaauaauaugagguauc

SEQ ID NO: 1050059 - RNA, 19 nt, Artificial Sequence
  Description of Artificial Sequence: Synthetic oligonucleotide
ucgggauugaaagugcccg

SEQ ID NO: 1050060 - RNA, 19 nt, Artificial Sequence
  Description of Artificial Sequence: Synthetic oligonucleotide
agcgcugcuuuccugacac

SEQ ID NO: 1050061 - RNA, 19 nt, Artificial Sequence
  Description of Artificial Sequence: Synthetic oligonucleotide
aaucagugcauacacgguu

SEQ ID NO: 1050062 - RNA, 19 nt, Artificial Sequence
  Description of Artificial Sequence: Synthetic oligonucleotide
ggaauucaaguauugacug

SEQ ID NO: 1050063 - RNA, 19 nt, Artificial Sequence
  Description of Artificial Sequence: Synthetic oligonucleotide
ucuccuuuagcuccaugcc

SEQ ID NO: 1050064 - RNA, 19 nt, Artificial Sequence
  Description of Artificial Sequence: Synthetic oligonucleotide
caaguauugacugcauugg

SEQ ID NO: 1050065 - RNA, 19 nt, Artificial Sequence
  Description of Artificial Sequence: Synthetic oligonucleotide
gaauucaaguauugacugc

SEQ ID NO: 1050066 - RNA, 19 nt, Artificial Sequence
  Description of Artificial Sequence: Synthetic oligonucleotide
ugcccucuucccaagaucc

SEQ ID NO: 1050067 - RNA, 19 nt, Artificial Sequence
  Description of Artificial Sequence: Synthetic oligonucleotide
uguuaaccagcucuacagc

SEQ ID NO: 1050068 - RNA, 19 nt, Artificial Sequence
  Description of Artificial Sequence: Synthetic oligonucleotide
ugggugaucuugaagacau

SEQ ID NO: 1050069 - RNA, 19 nt, Artificial Sequence
  Description of Artificial Sequence: Synthetic oligonucleotide
gacaacuuaaggauauggc

SEQ ID NO: 1050070 - RNA, 19 nt, Artificial Sequence
  Description of Artificial Sequence: Synthetic oligonucleotide
uugcugacaacuuaaggau

SEQ ID NO: 1050071 - RNA, 19 nt, Artificial Sequence
  Description of Artificial Sequence: Synthetic oligonucleotide
aacgguuguugucauagau

SEQ ID NO: 1050072 - RNA, 19 nt, Artificial Sequence
  Description of Artificial Sequence: Synthetic oligonucleotide
cuaggauggaccuccugcg

SEQ ID NO: 1050073 - RNA, 19 nt, Artificial Sequence
  Description of Artificial Sequence: Synthetic oligonucleotide
ggcuuucacauccugaggg

SEQ ID NO: 1050074 - RNA, 19 nt, Artificial Sequence
  Description of Artificial Sequence: Synthetic oligonucleotide
ugccaucuacaucaaugcg

SEQ ID NO: 1050075 - RNA, 19 nt, Artificial Sequence
  Description of Artificial Sequence: Synthetic oligonucleotide
uuaugagcucuuugguggg

SEQ ID NO: 1050076 - RNA, 19 nt, Artificial Sequence
  Description of Artificial Sequence: Synthetic oligonucleotide
uggccuucuuuuaugagcu

SEQ ID NO: 1050077 - RNA, 19 nt, Artificial Sequence
  Description of Artificial Sequence: Synthetic oligonucleotide
gaugacgcuguucucagca

SEQ ID NO: 1050078 - RNA, 19 nt, Artificial Sequence
  Description of Artificial Sequence: Synthetic oligonucleotide
ugcaaggucagguugccac

SEQ ID NO: 1050079 - RNA, 19 nt, Artificial Sequence
  Description of Artificial Sequence: Synthetic oligonucleotide
gaauugaagggcuccuggc

SEQ ID NO: 1050080 - RNA, 19 nt, Artificial Sequence
  Description of Artificial Sequence: Synthetic oligonucleotide
cucaaagccgaugaggggc

SEQ ID NO: 1050081 - RNA, 19 nt, Artificial Sequence
  Description of Artificial Sequence: Synthetic oligonucleotide
ugaguggucccauucuuug

SEQ ID NO: 1050082 - RNA, 19 nt, Artificial Sequence
  Description of Artificial Sequence: Synthetic oligonucleotide
cacguuuggagaguuaggg

SEQ ID NO: 1050083 - RNA, 19 nt, Artificial Sequence
  Description of Artificial Sequence: Synthetic oligonucleotide
aaacccucuaggucuuguc

SEQ ID NO: 1050084 - RNA, 19 nt, Artificial Sequence
  Description of Artificial Sequence: Synthetic oligonucleotide
aaaggaggcggucauugaa

SEQ ID NO: 1050085 - RNA, 19 nt, Artificial Sequence
  Description of Artificial Sequence: Synthetic oligonucleotide
aggguucauucucaggaac

SEQ ID NO: 1050086 - RNA, 19 nt, Artificial Sequence
  Description of Artificial Sequence: Synthetic oligonucleotide
caaggguucauucucagga

SEQ ID NO: 1050087 - RNA, 19 nt, Artificial Sequence
  Description of Artificial Sequence: Synthetic oligonucleotide
uccacguuuggagaguuag

SEQ ID NO: 1050088 - RNA, 19 nt, Artificial Sequence
  Description of Artificial Sequence: Synthetic oligonucleotide
ucagugcauacacgguugg

SEQ ID NO: 1050089 - RNA, 19 nt, Artificial Sequence
  Description of Artificial Sequence: Synthetic oligonucleotide
auugacugcauugggagug

SEQ ID NO: 1050090 - RNA, 19 nt, Artificial Sequence
  Description of Artificial Sequence: Synthetic oligonucleotide
ucucuguuuguugaguuca

SEQ ID NO: 1050091 - RNA, 19 nt, Artificial Sequence
  Description of Artificial Sequence: Synthetic oligonucleotide
uacacgguuggaacgguug

SEQ ID NO: 1050092 - RNA, 19 nt, Artificial Sequence
  Description of Artificial Sequence: Synthetic oligonucleotide
acagauaguccuugagaag

SEQ ID NO: 1050093 - RNA, 19 nt, Artificial Sequence
  Description of Artificial Sequence: Synthetic oligonucleotide
ugggcacgcaguaaaggag

SEQ ID NO: 1050094 - RNA, 19 nt, Artificial Sequence
  Description of Artificial Sequence: Synthetic oligonucleotide
uuaaacuggguagaacgcu

SEQ ID NO: 1050095 - RNA, 19 nt, Artificial Sequence
  Description of Artificial Sequence: Synthetic oligonucleotide
auugaaagugcccguggug

SEQ ID NO: 1050096 - RNA, 19 nt, Artificial Sequence
  Description of Artificial Sequence: Synthetic oligonucleotide
cuggcuacaggcuggacug

SEQ ID NO: 1050097 - RNA, 19 nt, Artificial Sequence
  Description of Artificial Sequence: Synthetic oligonucleotide
acguuuggagaguuagggg

SEQ ID NO: 1050098 - RNA, 19 nt, Artificial Sequence
  Description of Artificial Sequence: Synthetic oligonucleotide
aucgaucuugagugguccc

SEQ ID NO: 1050099 - RNA, 19 nt, Artificial Sequence
  Description of Artificial Sequence: Synthetic oligonucleotide
aucucuguuuguugaguuc

SEQ ID NO: 1050100 - RNA, 19 nt, Artificial Sequence
  Description of Artificial Sequence: Synthetic oligonucleotide
acaaaccacaugcccacag

SEQ ID NO: 1050101 - RNA, 19 nt, Artificial Sequence
  Description of Artificial Sequence: Synthetic oligonucleotide
uccuuuagcuccaugccau

SEQ ID NO: 1050102 - RNA, 19 nt, Artificial Sequence
  Description of Artificial Sequence: Synthetic oligonucleotide
aacguguccccacggcccg

SEQ ID NO: 1050103 - RNA, 19 nt, Artificial Sequence
  Description of Artificial Sequence: Synthetic oligonucleotide
ugaggccuguuucucuagg

SEQ ID NO: 1050104 - RNA, 19 nt, Artificial Sequence
  Description of Artificial Sequence: Synthetic oligonucleotide
ggaauugaagggcuccugg

SEQ ID NO: 1050105 - RNA, 19 nt, Artificial Sequence
  Description of Artificial Sequence: Synthetic oligonucleotide
uucgggauugaaagugccc

SEQ ID NO: 1050106 - RNA, 19 nt, Artificial Sequence
  Description of Artificial Sequence: Synthetic oligonucleotide
uucccaagauccacguuug

SEQ ID NO: 1050107 - RNA, 19 nt, Artificial Sequence
  Description of Artificial Sequence: Synthetic oligonucleotide
cauucgggauugaaagugc

SEQ ID NO: 1050108 - RNA, 19 nt, Artificial Sequence
  Description of Artificial Sequence: Synthetic oligonucleotide
aaccacaaaccaugccuug

SEQ ID NO: 1050109 - RNA, 19 nt, Artificial Sequence
  Description of Artificial Sequence: Synthetic oligonucleotide
uggcuaucagcuccaaaga

SEQ ID NO: 1050110 - RNA, 19 nt, Artificial Sequence
  Description of Artificial Sequence: Synthetic oligonucleotide
auaugagguaucgaucuug

SEQ ID NO: 1050111 - RNA, 19 nt, Artificial Sequence
  Description of Artificial Sequence: Synthetic oligonucleotide
auauggccuucuuuuauga

SEQ ID NO: 1050112 - RNA, 19 nt, Artificial Sequence
  Description of Artificial Sequence: Synthetic oligonucleotide
auucgggauugaaagugcc

SEQ ID NO: 1050113 - RNA, 19 nt, Artificial Sequence
  Description of Artificial Sequence: Synthetic oligonucleotide
aauaugagguaucgaucuu

SEQ ID NO: 1050114 - RNA, 19 nt, Artificial Sequence
  Description of Artificial Sequence: Synthetic oligonucleotide
uaucgaucuugaguggucc

SEQ ID NO: 1050115 - RNA, 19 nt, Artificial Sequence
  Description of Artificial Sequence: Synthetic oligonucleotide
uaaggauauggccuucuuu

SEQ ID NO: 1050116 - RNA, 19 nt, Artificial Sequence
  Description of Artificial Sequence: Synthetic oligonucleotide
ucaaagccgaugaggggca

SEQ ID NO: 1050117 - RNA, 19 nt, Artificial Sequence
  Description of Artificial Sequence: Synthetic oligonucleotide
acugcauugggagugggcu

SEQ ID NO: 1050118 - RNA, 19 nt, Artificial Sequence
  Description of Artificial Sequence: Synthetic oligonucleotide
cagcuuuaacagauagucc

SEQ ID NO: 1050119 - RNA, 19 nt, Artificial Sequence
  Description of Artificial Sequence: Synthetic oligonucleotide
uuucggauggcagcauuag

SEQ ID NO: 1050120 - RNA, 19 nt, Artificial Sequence
  Description of Artificial Sequence: Synthetic oligonucleotide
caaaccacaugcccacagg

SEQ ID NO: 1050121 - RNA, 19 nt, Artificial Sequence
  Description of Artificial Sequence: Synthetic oligonucleotide
ggaacgguuguugucauag

SEQ ID NO: 1050122 - RNA, 19 nt, Artificial Sequence
  Description of Artificial Sequence: Synthetic oligonucleotide
cauugaauaauaugaggua

SEQ ID NO: 1050123 - RNA, 19 nt, Artificial Sequence
  Description of Artificial Sequence: Synthetic oligonucleotide
ugcauugggagugggcuag

SEQ ID NO: 1050124 - RNA, 19 nt, Artificial Sequence
  Description of Artificial Sequence: Synthetic oligonucleotide
auagaccuucagcagcuug

SEQ ID NO: 1050125 - RNA, 19 nt, Artificial Sequence
  Description of Artificial Sequence: Synthetic oligonucleotide
cuuuaacagauaguccuug

SEQ ID NO: 1050126 - RNA, 19 nt, Artificial Sequence
  Description of Artificial Sequence: Synthetic oligonucleotide
cagauaguccuugagaaga

SEQ ID NO: 1050127 - RNA, 19 nt, Artificial Sequence
  Description of Artificial Sequence: Synthetic oligonucleotide
gacaccaggaagguucgag

SEQ ID NO: 1050128 - RNA, 19 nt, Artificial Sequence
  Description of Artificial Sequence: Synthetic oligonucleotide
guaugcuggcuacaggcug

SEQ ID NO: 1050129 - RNA, 19 nt, Artificial Sequence
  Description of Artificial Sequence: Synthetic oligonucleotide
gucaccaauucguggguag

SEQ ID NO: 1050130 - RNA, 19 nt, Artificial Sequence
  Description of Artificial Sequence: Synthetic oligonucleotide
guuggaacgguuguuguca

SEQ ID NO: 1050131 - RNA, 19 nt, Artificial Sequence
  Description of Artificial Sequence: Synthetic oligonucleotide
gcuccauagauguacagca

SEQ ID NO: 1050132 - RNA, 19 nt, Artificial Sequence
  Description of Artificial Sequence: Synthetic oligonucleotide
aacuggguagaacgcucug

SEQ ID NO: 1050133 - RNA, 19 nt, Artificial Sequence
  Description of Artificial Sequence: Synthetic oligonucleotide
uacaucaaugcgugcccgc

SEQ ID NO: 1050134 - RNA, 19 nt, Artificial Sequence
  Description of Artificial Sequence: Synthetic oligonucleotide
guugaguucaacaguuuga

SEQ ID NO: 1050135 - RNA, 19 nt, Artificial Sequence
  Description of Artificial Sequence: Synthetic oligonucleotide
cacaaaccaugccuugugc

SEQ ID NO: 1050136 - RNA, 19 nt, Artificial Sequence
  Description of Artificial Sequence: Synthetic oligonucleotide
uucggcaguggcuccugcg

SEQ ID NO: 1050137 - RNA, 19 nt, Artificial Sequence
  Description of Artificial Sequence: Synthetic oligonucleotide
auucguggguagcgguccc

SEQ ID NO: 1050138 - RNA, 19 nt, Artificial Sequence
  Description of Artificial Sequence: Synthetic oligonucleotide
cacauacucgccauacauc

SEQ ID NO: 1050139 - RNA, 19 nt, Artificial Sequence
  Description of Artificial Sequence: Synthetic oligonucleotide
ggaugucaccaauucgugg

SEQ ID NO: 1050140 - RNA, 19 nt, Artificial Sequence
  Description of Artificial Sequence: Synthetic oligonucleotide
agguaucgaucuugagugg

SEQ ID NO: 1050141 - RNA, 19 nt, Artificial Sequence
  Description of Artificial Sequence: Synthetic oligonucleotide
cacgcuaaacuucuggcca

SEQ ID NO: 1050142 - RNA, 19 nt, Artificial Sequence
  Description of Artificial Sequence: Synthetic oligonucleotide
uggguagaacgcucugucc

SEQ ID NO: 1050143 - RNA, 19 nt, Artificial Sequence
  Description of Artificial Sequence: Synthetic oligonucleotide
uggguagcggucccauucc

SEQ ID NO: 1050144 - RNA, 19 nt, Artificial Sequence
  Description of Artificial Sequence: Synthetic oligonucleotide
aaguaccagcuuagguggc

SEQ ID NO: 1050145 - RNA, 19 nt, Artificial Sequence
  Description of Artificial Sequence: Synthetic oligonucleotide
gugcauacacgguuggaac

SEQ ID NO: 1050146 - RNA, 19 nt, Artificial Sequence
  Description of Artificial Sequence: Synthetic oligonucleotide
ccaucuacaucaaugcgug

SEQ ID NO: 1050147 - RNA, 19 nt, Artificial Sequence
  Description of Artificial Sequence: Synthetic oligonucleotide
agugcauacacgguuggaa

SEQ ID NO: 1050148 - RNA, 19 nt, Artificial Sequence
  Description of Artificial Sequence: Synthetic oligonucleotide
accaauucguggguagcgg

SEQ ID NO: 1050149 - RNA, 19 nt, Artificial Sequence
  Description of Artificial Sequence: Synthetic oligonucleotide
cuaaacuucuggccaagga

SEQ ID NO: 1050150 - RNA, 19 nt, Artificial Sequence
  Description of Artificial Sequence: Synthetic oligonucleotide
cccaauugaacaugggcag

SEQ ID NO: 1050151 - RNA, 19 nt, Artificial Sequence
  Description of Artificial Sequence: Synthetic oligonucleotide
ucaaugcgugcccgcacgc

SEQ ID NO: 1050152 - RNA, 19 nt, Artificial Sequence
  Description of Artificial Sequence: Synthetic oligonucleotide
guagcggucccauuccuca

SEQ ID NO: 1050153 - RNA, 19 nt, Artificial Sequence
  Description of Artificial Sequence: Synthetic oligonucleotide
guucgaggcauguugaggu

SEQ ID NO: 1050154 - RNA, 19 nt, Artificial Sequence
  Description of Artificial Sequence: Synthetic oligonucleotide
aagguucgaggcauguuga

SEQ ID NO: 1050155 - RNA, 19 nt, Artificial Sequence
  Description of Artificial Sequence: Synthetic oligonucleotide
cuggguagaacgcucuguc

SEQ ID NO: 1050156 - RNA, 19 nt, Artificial Sequence
  Description of Artificial Sequence: Synthetic oligonucleotide
gacgcuguucucagcagcc

SEQ ID NO: 1050157 - RNA, 19 nt, Artificial Sequence
  Description of Artificial Sequence: Synthetic oligonucleotide
uagaacgcucuguccaugu

SEQ ID NO: 1050158 - RNA, 19 nt, Artificial Sequence
  Description of Artificial Sequence: Synthetic oligonucleotide
agagcgcugcuuuccugac

SEQ ID NO: 1050159 - RNA, 19 nt, Artificial Sequence
  Description of Artificial Sequence: Synthetic oligonucleotide
guuuguugaguucaacagu

SEQ ID NO: 1050160 - RNA, 19 nt, Artificial Sequence
  Description of Artificial Sequence: Synthetic oligonucleotide
uuaaggauauggccuucuu

SEQ ID NO: 1050161 - RNA, 19 nt, Artificial Sequence
  Description of Artificial Sequence: Synthetic oligonucleotide
cggucauugaauaauauga

SEQ ID NO: 1050162 - RNA, 19 nt, Artificial Sequence
  Description of Artificial Sequence: Synthetic oligonucleotide
auguguuaaccagcucuac

SEQ ID NO: 1050163 - RNA, 19 nt, Artificial Sequence
  Description of Artificial Sequence: Synthetic oligonucleotide
aaacuggguagaacgcucu

SEQ ID NO: 1050164 - RNA, 19 nt, Artificial Sequence
  Description of Artificial Sequence: Synthetic oligonucleotide
augagcucuuuggugggac

SEQ ID NO: 1050165 - RNA, 19 nt, Artificial Sequence
  Description of Artificial Sequence: Synthetic oligonucleotide
ggcaggaguuuccaguucc

SEQ ID NO: 1050166 - RNA, 19 nt, Artificial Sequence
  Description of Artificial Sequence: Synthetic oligonucleotide
ggccacauagcaaucagug

SEQ ID NO: 1050167 - RNA, 19 nt, Artificial Sequence
  Description of Artificial Sequence: Synthetic oligonucleotide
ugaugacuuuaaacugggu

SEQ ID NO: 1050168 - RNA, 19 nt, Artificial Sequence
  Description of Artificial Sequence: Synthetic oligonucleotide
ccaagcacagccauccagc

SEQ ID NO: 1050169 - RNA, 19 nt, Artificial Sequence
  Description of Artificial Sequence: Synthetic oligonucleotide
ugggguguaugcuggcuac

SEQ ID NO: 1050170 - RNA, 19 nt, Artificial Sequence
  Description of Artificial Sequence: Synthetic oligonucleotide
aagcccacauuuugugaaa

SEQ ID NO: 1050171 - RNA, 19 nt, Artificial Sequence
  Description of Artificial Sequence: Synthetic oligonucleotide
cuacaucaaugcgugcccg

SEQ ID NO: 1050172 - RNA, 19 nt, Artificial Sequence
  Description of Artificial Sequence: Synthetic oligonucleotide
uggugccugcguuugguga

SEQ ID NO: 1050173 - RNA, 19 nt, Artificial Sequence
  Description of Artificial Sequence: Synthetic oligonucleotide
gcggucauugaauaauaug

SEQ ID NO: 1050174 - RNA, 19 nt, Artificial Sequence
  Description of Artificial Sequence: Synthetic oligonucleotide
guggguagcggucccauuc

SEQ ID NO: 1050175 - RNA, 19 nt, Artificial Sequence
  Description of Artificial Sequence: Synthetic oligonucleotide
caccaauucguggguagcg

SEQ ID NO: 1050176 - RNA, 19 nt, Artificial Sequence
  Description of Artificial Sequence: Synthetic oligonucleotide
uacucgccauacaucuuga

SEQ ID NO: 1050177 - RNA, 19 nt, Artificial Sequence
  Description of Artificial Sequence: Synthetic oligonucleotide
uaggauggaccuccugcgu

SEQ ID NO: 1050178 - RNA, 19 nt, Artificial Sequence
  Description of Artificial Sequence: Synthetic oligonucleotide
ucgaucuugagugguccca

SEQ ID NO: 1050179 - RNA, 19 nt, Artificial Sequence
  Description of Artificial Sequence: Synthetic oligonucleotide
caauucguggguagcgguc

SEQ ID NO: 1050180 - RNA, 19 nt, Artificial Sequence
  Description of Artificial Sequence: Synthetic oligonucleotide
uugggguguaugcuggcua

SEQ ID NO: 1050181 - RNA, 19 nt, Artificial Sequence
  Description of Artificial Sequence: Synthetic oligonucleotide
ugcguuuggugauggaauu

SEQ ID NO: 1050182 - RNA, 19 nt, Artificial Sequence
  Description of Artificial Sequence: Synthetic oligonucleotide
uggaauugaagggcuccug

SEQ ID NO: 1050183 - RNA, 19 nt, Artificial Sequence
  Description of Artificial Sequence: Synthetic oligonucleotide
agguucgaggcauguugag

SEQ ID NO: 1050184 - RNA, 19 nt, Artificial Sequence
  Description of Artificial Sequence: Synthetic oligonucleotide
uuuucccggauaggcguag

SEQ ID NO: 1050185 - RNA, 19 nt, Artificial Sequence
  Description of Artificial Sequence: Synthetic oligonucleotide
acacgguuggaacgguugu

SEQ ID NO: 1050186 - RNA, 19 nt, Artificial Sequence
  Description of Artificial Sequence: Synthetic oligonucleotide
cugggcacgcaguaaagga

SEQ ID NO: 1050187 - RNA, 19 nt, Artificial Sequence
  Description of Artificial Sequence: Synthetic oligonucleotide
cccggauaggcguaggugc

SEQ ID NO: 1050188 - RNA, 19 nt, Artificial Sequence
  Description of Artificial Sequence: Synthetic oligonucleotide
gcauacacgguuggaacgg

SEQ ID NO: 1050189 - RNA, 19 nt, Artificial Sequence
  Description of Artificial Sequence: Synthetic oligonucleotide
cuuuuaugagcucuuuggu

SEQ ID NO: 1050190 - RNA, 19 nt, Artificial Sequence
  Description of Artificial Sequence: Synthetic oligonucleotide
ggcaucuuugcuguccggg

SEQ ID NO: 1050191 - RNA, 19 nt, Artificial Sequence
  Description of Artificial Sequence: Synthetic oligonucleotide
cagaacguguccccacggc

SEQ ID NO: 1050192 - RNA, 19 nt, Artificial Sequence
  Description of Artificial Sequence: Synthetic oligonucleotide
ucccggauaggcguaggug

SEQ ID NO: 1050193 - RNA, 19 nt, Artificial Sequence
  Description of Artificial Sequence: Synthetic oligonucleotide
gguucgaggcauguugagg

SEQ ID NO: 1050194 - RNA, 19 nt, Artificial Sequence
  Description of Artificial Sequence: Synthetic oligonucleotide
ggccuguuucucuaggaug

SEQ ID NO: 1050195 - RNA, 19 nt, Artificial Sequence
  Description of Artificial Sequence: Synthetic oligonucleotide
gcacgcuaaacuucuggcc

SEQ ID NO: 1050196 - RNA, 19 nt, Artificial Sequence
  Description of Artificial Sequence: Synthetic oligonucleotide
cagcgcaugcacaugguga

SEQ ID NO: 1050197 - RNA, 19 nt, Artificial Sequence
  Description of Artificial Sequence: Synthetic oligonucleotide
gauacgcugcacgggcucc

SEQ ID NO: 1050198 - RNA, 19 nt, Artificial Sequence
  Description of Artificial Sequence: Synthetic oligonucleotide
cauguguuaaccagcucua

SEQ ID NO: 1050199 - RNA, 19 nt, Artificial Sequence
  Description of Artificial Sequence: Synthetic oligonucleotide
accaugccuugugccaucc

SEQ ID NO: 1050200 - RNA, 19 nt, Artificial Sequence
  Description of Artificial Sequence: Synthetic oligonucleotide
gucucugggcugaaguacc

SEQ ID NO: 1050201 - RNA, 19 nt, Artificial Sequence
  Description of Artificial Sequence: Synthetic oligonucleotide
ugcacauggugacuuccuu

SEQ ID NO: 1050202 - RNA, 19 nt, Artificial Sequence
  Description of Artificial Sequence: Synthetic oligonucleotide
gaacgcucuguccaugugu

SEQ ID NO: 1050203 - RNA, 19 nt, Artificial Sequence
  Description of Artificial Sequence: Synthetic oligonucleotide
ggggauacgcugcacgggc

SEQ ID NO: 1050204 - RNA, 19 nt, Artificial Sequence
  Description of Artificial Sequence: Synthetic oligonucleotide
ccccaauugaacaugggca

SEQ ID NO: 1050205 - RNA, 19 nt, Artificial Sequence
  Description of Artificial Sequence: Synthetic oligonucleotide
guugagguuggagcucucc

SEQ ID NO: 1050206 - RNA, 19 nt, Artificial Sequence
  Description of Artificial Sequence: Synthetic oligonucleotide
aggauauggccuucuuuua

SEQ ID NO: 1050207 - RNA, 19 nt, Artificial Sequence
  Description of Artificial Sequence: Synthetic oligonucleotide
ggcagaacguguccccacg

SEQ ID NO: 1050208 - RNA, 19 nt, Artificial Sequence
  Description of Artificial Sequence: Synthetic oligonucleotide
aggaugucaccaauucgug

SEQ ID NO: 1050209 - RNA, 19 nt, Artificial Sequence
  Description of Artificial Sequence: Synthetic oligonucleotide
aaagugcccguggugggaa

SEQ ID NO: 1050210 - RNA, 19 nt, Artificial Sequence
  Description of Artificial Sequence: Synthetic oligonucleotide
uucccggauaggcguaggu

SEQ ID NO: 1050211 - RNA, 19 nt, Artificial Sequence
  Description of Artificial Sequence: Synthetic oligonucleotide
caucuacaucaaugcgugc

SEQ ID NO: 1050212 - RNA, 19 nt, Artificial Sequence
  Description of Artificial Sequence: Synthetic oligonucleotide
caagacccagcauucggga

SEQ ID NO: 1050213 - RNA, 19 nt, Artificial Sequence
  Description of Artificial Sequence: Synthetic oligonucleotide
gggcacgcaguaaaggagg

SEQ ID NO: 1050214 - RNA, 19 nt, Artificial Sequence
  Description of Artificial Sequence: Synthetic oligonucleotide
acaucaaugcgugcccgca

SEQ ID NO: 1050215 - RNA, 19 nt, Artificial Sequence
  Description of Artificial Sequence: Synthetic oligonucleotide
ugcccgcacgcuaaacuuc

SEQ ID NO: 1050216 - RNA, 19 nt, Artificial Sequence
  Description of Artificial Sequence: Synthetic oligonucleotide
auggaauugaagggcuccu

SEQ ID NO: 1050217 - RNA, 19 nt, Artificial Sequence
  Description of Artificial Sequence: Synthetic oligonucleotide
accacaaaccaugccuugu

SEQ ID NO: 1050218 - RNA, 19 nt, Artificial Sequence
  Description of Artificial Sequence: Synthetic oligonucleotide
ccugcguugggguguaugc

SEQ ID NO: 1050219 - RNA, 19 nt, Artificial Sequence
  Description of Artificial Sequence: Synthetic oligonucleotide
cacgggcuccagcaugugg

SEQ ID NO: 1050220 - RNA, 19 nt, Artificial Sequence
  Description of Artificial Sequence: Synthetic oligonucleotide
ggugggaauucaaguauug

SEQ ID NO: 1050221 - RNA, 19 nt, Artificial Sequence
  Description of Artificial Sequence: Synthetic oligonucleotide
aggauggaccuccugcguu

SEQ ID NO: 1050222 - RNA, 19 nt, Artificial Sequence
  Description of Artificial Sequence: Synthetic oligonucleotide
guaggugcccucuucccaa

SEQ ID NO: 1050223 - RNA, 19 nt, Artificial Sequence
  Description of Artificial Sequence: Synthetic oligonucleotide
uccauguguuaaccagcuc

SEQ ID NO: 1050224 - RNA, 19 nt, Artificial Sequence
  Description of Artificial Sequence: Synthetic oligonucleotide
uuucccggauaggcguagg

SEQ ID NO: 1050225 - RNA, 19 nt, Artificial Sequence
  Description of Artificial Sequence: Synthetic oligonucleotide
aggaggcggucauugaaua

SEQ ID NO: 1050226 - RNA, 19 nt, Artificial Sequence
  Description of Artificial Sequence: Synthetic oligonucleotide
augaggcgggcccggaacu

SEQ ID NO: 1050227 - RNA, 19 nt, Artificial Sequence
  Description of Artificial Sequence: Synthetic oligonucleotide
gaacgguuguugucauaga

SEQ ID NO: 1050228 - RNA, 19 nt, Artificial Sequence
  Description of Artificial Sequence: Synthetic oligonucleotide
cauugggagugggcuaggg

SEQ ID NO: 1050229 - RNA, 19 nt, Artificial Sequence
  Description of Artificial Sequence: Synthetic oligonucleotide
acgcuaaacuucuggccaa

SEQ ID NO: 1050230 - RNA, 19 nt, Artificial Sequence
  Description of Artificial Sequence: Synthetic oligonucleotide
uuggaacgguuguugucau

SEQ ID NO: 1050231 - RNA, 19 nt, Artificial Sequence
  Description of Artificial Sequence: Synthetic oligonucleotide
cugaggccuguuucucuag

SEQ ID NO: 1050232 - RNA, 19 nt, Artificial Sequence
  Description of Artificial Sequence: Synthetic oligonucleotide
gugggaauucaaguauuga

SEQ ID NO: 1050233 - RNA, 19 nt, Artificial Sequence
  Description of Artificial Sequence: Synthetic oligonucleotide
gcauuagaaugcucugcug

SEQ ID NO: 1050234 - RNA, 19 nt, Artificial Sequence
  Description of Artificial Sequence: Synthetic oligonucleotide
ugcaguggugccugcguuu

SEQ ID NO: 1050235 - RNA, 19 nt, Artificial Sequence
  Description of Artificial Sequence: Synthetic oligonucleotide
ugggcccugggcagaacgu

SEQ ID NO: 1050236 - RNA, 19 nt, Artificial Sequence
  Description of Artificial Sequence: Synthetic oligonucleotide
guucaacaguuugaagguc

SEQ ID NO: 1050237 - RNA, 19 nt, Artificial Sequence
  Description of Artificial Sequence: Synthetic oligonucleotide
guggugggaauucaaguau

SEQ ID NO: 1050238 - RNA, 19 nt, Artificial Sequence
  Description of Artificial Sequence: Synthetic oligonucleotide
gagguucggcaguggcucc

SEQ ID NO: 1050239 - RNA, 19 nt, Artificial Sequence
  Description of Artificial Sequence: Synthetic oligonucleotide
uuagguggcucugggugau

SEQ ID NO: 1050240 - RNA, 19 nt, Artificial Sequence
  Description of Artificial Sequence: Synthetic oligonucleotide
gguuggaacgguuguuguc

SEQ ID NO: 1050241 - RNA, 19 nt, Artificial Sequence
  Description of Artificial Sequence: Synthetic oligonucleotide
cacuucauggaugaugacu

SEQ ID NO: 1050242 - RNA, 19 nt, Artificial Sequence
  Description of Artificial Sequence: Synthetic oligonucleotide
acccaagacccagcauucg

SEQ ID NO: 1050243 - RNA, 19 nt, Artificial Sequence
  Description of Artificial Sequence: Synthetic oligonucleotide
ccuccugucaggccgcucc

SEQ ID NO: 1050244 - RNA, 19 nt, Artificial Sequence
  Description of Artificial Sequence: Synthetic oligonucleotide
cugacaacuuaaggauaug

SEQ ID NO: 1050245 - RNA, 19 nt, Artificial Sequence
  Description of Artificial Sequence: Synthetic oligonucleotide
ggagguucggcaguggcuc

SEQ ID NO: 1050246 - RNA, 19 nt, Artificial Sequence
  Description of Artificial Sequence: Synthetic oligonucleotide
caccaaggguucauucuca

SEQ ID NO: 1050247 - RNA, 19 nt, Artificial Sequence
  Description of Artificial Sequence: Synthetic oligonucleotide
agauaguccuugagaagaa

SEQ ID NO: 1050248 - RNA, 19 nt, Artificial Sequence
  Description of Artificial Sequence: Synthetic oligonucleotide
gaccuccugcguuggggug

SEQ ID NO: 1050249 - RNA, 19 nt, Artificial Sequence
  Description of Artificial Sequence: Synthetic oligonucleotide
uucgaggcauguugagguu

SEQ ID NO: 1050250 - RNA, 19 nt, Artificial Sequence
  Description of Artificial Sequence: Synthetic oligonucleotide
gaggcggucauugaauaau

SEQ ID NO: 1050251 - RNA, 19 nt, Artificial Sequence
  Description of Artificial Sequence: Synthetic oligonucleotide
ggagccaugaggcagcuuu

SEQ ID NO: 1050252 - RNA, 19 nt, Artificial Sequence
  Description of Artificial Sequence: Synthetic oligonucleotide
gcccacauuuugugaaaag

SEQ ID NO: 1050253 - RNA, 19 nt, Artificial Sequence
  Description of Artificial Sequence: Synthetic oligonucleotide
ucagagcauuucccacaaa

SEQ ID NO: 1050254 - RNA, 19 nt, Artificial Sequence
  Description of Artificial Sequence: Synthetic oligonucleotide
ugucaccaauucgugggua

SEQ ID NO: 1050255 - RNA, 19 nt, Artificial Sequence
  Description of Artificial Sequence: Synthetic oligonucleotide
ggguguaugcuggcuacag

SEQ ID NO: 1050256 - RNA, 19 nt, Artificial Sequence
  Description of Artificial Sequence: Synthetic oligonucleotide
gucagguugccacaggcuu

SEQ ID NO: 1050257 - RNA, 19 nt, Artificial Sequence
  Description of Artificial Sequence: Synthetic oligonucleotide
ccacguuuggagaguuagg

SEQ ID NO: 1050258 - RNA, 19 nt, Artificial Sequence
  Description of Artificial Sequence: Synthetic oligonucleotide
cucuaggauggaccuccug

SEQ ID NO: 1050259 - RNA, 19 nt, Artificial Sequence
  Description of Artificial Sequence: Synthetic oligonucleotide
gugcccucuucccaagauc

SEQ ID NO: 1050260 - RNA, 19 nt, Artificial Sequence
  Description of Artificial Sequence: Synthetic oligonucleotide
cgcacgcuaaacuucuggc

SEQ ID NO: 1050261 - RNA, 19 nt, Artificial Sequence
  Description of Artificial Sequence: Synthetic oligonucleotide
gugauggaauugaagggcu

SEQ ID NO: 1050262 - RNA, 19 nt, Artificial Sequence
  Description of Artificial Sequence: Synthetic oligonucleotide
cucugggcugaaguaccag

SEQ ID NO: 1050263 - RNA, 19 nt, Artificial Sequence
  Description of Artificial Sequence: Synthetic oligonucleotide
caaucagugcauacacggu

SEQ ID NO: 1050264 - RNA, 19 nt, Artificial Sequence
  Description of Artificial Sequence: Synthetic oligonucleotide
gauaggcguaggugcccuc

SEQ ID NO: 1050265 - RNA, 19 nt, Artificial Sequence
  Description of Artificial Sequence: Synthetic oligonucleotide
gaaccacaaaccaugccuu

SEQ ID NO: 1050266 - RNA, 19 nt, Artificial Sequence
  Description of Artificial Sequence: Synthetic oligonucleotide
augcacauggugacuuccu

SEQ ID NO: 1050267 - RNA, 19 nt, Artificial Sequence
  Description of Artificial Sequence: Synthetic oligonucleotide
cacauagcaaucagugcau

SEQ ID NO: 1050268 - RNA, 19 nt, Artificial Sequence
  Description of Artificial Sequence: Synthetic oligonucleotide
caggaagguucgaggcaug

SEQ ID NO: 1050269 - RNA, 19 nt, Artificial Sequence
  Description of Artificial Sequence: Synthetic oligonucleotide
ccggauaggcguaggugcc

SEQ ID NO: 1050270 - RNA, 19 nt, Artificial Sequence
  Description of Artificial Sequence: Synthetic oligonucleotide
ccgcacgcuaaacuucugg

SEQ ID NO: 1050271 - RNA, 19 nt, Artificial Sequence
  Description of Artificial Sequence: Synthetic oligonucleotide
ggggaguaucuucaucauc

SEQ ID NO: 1050272 - RNA, 19 nt, Artificial Sequence
  Description of Artificial Sequence: Synthetic oligonucleotide
cccguggugggaauucaag

SEQ ID NO: 1050273 - RNA, 19 nt, Artificial Sequence
  Description of Artificial Sequence: Synthetic oligonucleotide
gcagcgcaugcacauggug

SEQ ID NO: 1050274 - RNA, 19 nt, Artificial Sequence
  Description of Artificial Sequence: Synthetic oligonucleotide
cugcguuuggugauggaau

SEQ ID NO: 1050275 - RNA, 19 nt, Artificial Sequence
  Description of Artificial Sequence: Synthetic oligonucleotide
agcccacauuuugugaaaa

SEQ ID NO: 1050276 - RNA, 19 nt, Artificial Sequence
  Description of Artificial Sequence: Synthetic oligonucleotide
gccaucuacaucaaugcgu

SEQ ID NO: 1050277 - RNA, 19 nt, Artificial Sequence
  Description of Artificial Sequence: Synthetic oligonucleotide
ccugggcacgcaguaaagg

SEQ ID NO: 1050278 - RNA, 19 nt, Artificial Sequence
  Description of Artificial Sequence: Synthetic oligonucleotide
uccagcgccgcuggaguuc

SEQ ID NO: 1050279 - RNA, 19 nt, Artificial Sequence
  Description of Artificial Sequence: Synthetic oligonucleotide
uggaacgguuguugucaua

SEQ ID NO: 1050280 - RNA, 19 nt, Artificial Sequence
  Description of Artificial Sequence: Synthetic oligonucleotide
uucguggguagcgguccca

SEQ ID NO: 1050281 - RNA, 19 nt, Artificial Sequence
  Description of Artificial Sequence: Synthetic oligonucleotide
ggauacgcugcacgggcuc

SEQ ID NO: 1050282 - RNA, 19 nt, Artificial Sequence
  Description of Artificial Sequence: Synthetic oligonucleotide
ugccauccuuucccacccu

SEQ ID NO: 1050283 - RNA, 19 nt, Artificial Sequence
  Description of Artificial Sequence: Synthetic oligonucleotide
cuuuucccggauaggcgua

SEQ ID NO: 1050284 - RNA, 19 nt, Artificial Sequence
  Description of Artificial Sequence: Synthetic oligonucleotide
caucucuguuuguugaguu

SEQ ID NO: 1050285 - RNA, 19 nt, Artificial Sequence
  Description of Artificial Sequence: Synthetic oligonucleotide
gccaugaggcagcuuuaac

SEQ ID NO: 1050286 - RNA, 19 nt, Artificial Sequence
  Description of Artificial Sequence: Synthetic oligonucleotide
cugaaggaugucaccaauu

SEQ ID NO: 1050287 - RNA, 19 nt, Artificial Sequence
  Description of Artificial Sequence: Synthetic oligonucleotide
cuugcaguggugccugcgu

SEQ ID NO: 1050288 - RNA, 19 nt, Artificial Sequence
  Description of Artificial Sequence: Synthetic oligonucleotide
ggcacgcaguaaaggaggc

SEQ ID NO: 1050289 - RNA, 19 nt, Artificial Sequence
  Description of Artificial Sequence: Synthetic oligonucleotide
cuuuagcuccaugccaucu

SEQ ID NO: 1050290 - RNA, 19 nt, Artificial Sequence
  Description of Artificial Sequence: Synthetic oligonucleotide
ucgggucugggaggcuuca

SEQ ID NO: 1050291 - RNA, 19 nt, Artificial Sequence
  Description of Artificial Sequence: Synthetic oligonucleotide
gcaguggugccugcguuug

SEQ ID NO: 1050292 - RNA, 19 nt, Artificial Sequence
  Description of Artificial Sequence: Synthetic oligonucleotide
gcugacaacuuaaggauau

SEQ ID NO: 1050293 - RNA, 19 nt, Artificial Sequence
  Description of Artificial Sequence: Synthetic oligonucleotide
gcguuuggugauggaauug

SEQ ID NO: 1050294 - RNA, 19 nt, Artificial Sequence
  Description of Artificial Sequence: Synthetic oligonucleotide
gccuugugccauccuuucc

SEQ ID NO: 1050295 - RNA, 19 nt, Artificial Sequence
  Description of Artificial Sequence: Synthetic oligonucleotide
caaagccgaugaggggcag

SEQ ID NO: 1050296 - RNA, 19 nt, Artificial Sequence
  Description of Artificial Sequence: Synthetic oligonucleotide
aggcggucauugaauaaua

SEQ ID NO: 1050297 - RNA, 19 nt, Artificial Sequence
  Description of Artificial Sequence: Synthetic oligonucleotide
ugaggcgggcccggaacuc

SEQ ID NO: 1050298 - RNA, 19 nt, Artificial Sequence
  Description of Artificial Sequence: Synthetic oligonucleotide
ugcgugcccgcacgcuaaa

SEQ ID NO: 1050299 - RNA, 19 nt, Artificial Sequence
  Description of Artificial Sequence: Synthetic oligonucleotide
gccaacuucugaaggaugu

SEQ ID NO: 1050300 - RNA, 19 nt, Artificial Sequence
  Description of Artificial Sequence: Synthetic oligonucleotide
gcaggaguuuccaguuccc

SEQ ID NO: 1050301 - RNA, 19 nt, Artificial Sequence
  Description of Artificial Sequence: Synthetic oligonucleotide
acgcuguucucagcagcca

SEQ ID NO: 1050302 - RNA, 19 nt, Artificial Sequence
  Description of Artificial Sequence: Synthetic oligonucleotide
ggaggcggucauugaauaa

SEQ ID NO: 1050303 - RNA, 19 nt, Artificial Sequence
  Description of Artificial Sequence: Synthetic oligonucleotide
agguucggcaguggcuccu

SEQ ID NO: 1050304 - RNA, 19 nt, Artificial Sequence
  Description of Artificial Sequence: Synthetic oligonucleotide
cuggcagcgcaugcacaug

SEQ ID NO: 1050305 - RNA, 19 nt, Artificial Sequence
  Description of Artificial Sequence: Synthetic oligonucleotide
ggccccaccucaaagccga

SEQ ID NO: 1050306 - RNA, 19 nt, Artificial Sequence
  Description of Artificial Sequence: Synthetic oligonucleotide
auccagcgccgcuggaguu

SEQ ID NO: 1050307 - RNA, 19 nt, Artificial Sequence
  Description of Artificial Sequence: Synthetic oligonucleotide
cauccagcgccgcuggagu

SEQ ID NO: 1050308 - RNA, 19 nt, Artificial Sequence
  Description of Artificial Sequence: Synthetic oligonucleotide
auacacgguuggaacgguu

SEQ ID NO: 1050309 - RNA, 19 nt, Artificial Sequence
  Description of Artificial Sequence: Synthetic oligonucleotide
augcuggcuacaggcugga

SEQ ID NO: 1050310 - RNA, 19 nt, Artificial Sequence
  Description of Artificial Sequence: Synthetic oligonucleotide
gguagcggucccauuccuc

SEQ ID NO: 1050311 - RNA, 19 nt, Artificial Sequence
  Description of Artificial Sequence: Synthetic oligonucleotide
guugggguguaugcuggcu

SEQ ID NO: 1050312 - RNA, 19 nt, Artificial Sequence
  Description of Artificial Sequence: Synthetic oligonucleotide
gugcccgcacgcuaaacuu

SEQ ID NO: 1050313 - RNA, 19 nt, Artificial Sequence
  Description of Artificial Sequence: Synthetic oligonucleotide
ggaguuccagagagcgcug

SEQ ID NO: 1050314 - RNA, 19 nt, Artificial Sequence
  Description of Artificial Sequence: Synthetic oligonucleotide
gauccacguuuggagaguu

SEQ ID NO: 1050315 - RNA, 19 nt, Artificial Sequence
  Description of Artificial Sequence: Synthetic oligonucleotide
guacagcaccaaggguuca

SEQ ID NO: 1050316 - RNA, 19 nt, Artificial Sequence
  Description of Artificial Sequence: Synthetic oligonucleotide
augcgugcccgcacgcuaa

SEQ ID NO: 1050317 - RNA, 19 nt, Artificial Sequence
  Description of Artificial Sequence: Synthetic oligonucleotide
ccaauugaacaugggcaga

SEQ ID NO: 1050318 - RNA, 19 nt, Artificial Sequence
  Description of Artificial Sequence: Synthetic oligonucleotide
gccgcuggaguucuucugu

SEQ ID NO: 1050319 - RNA, 19 nt, Artificial Sequence
  Description of Artificial Sequence: Synthetic oligonucleotide
gcauugggagugggcuagg

SEQ ID NO: 1050320 - RNA, 19 nt, Artificial Sequence
  Description of Artificial Sequence: Synthetic oligonucleotide
caaacccucuaggucuugu

SEQ ID NO: 1050321 - RNA, 19 nt, Artificial Sequence
  Description of Artificial Sequence: Synthetic oligonucleotide
gguucggcaguggcuccug

SEQ ID NO: 1050322 - RNA, 19 nt, Artificial Sequence
  Description of Artificial Sequence: Synthetic oligonucleotide
cccgcccugccaagcacag

SEQ ID NO: 1050323 - RNA, 19 nt, Artificial Sequence
  Description of Artificial Sequence: Synthetic oligonucleotide
cauacacgguuggaacggu

SEQ ID NO: 1050324 - RNA, 19 nt, Artificial Sequence
  Description of Artificial Sequence: Synthetic oligonucleotide
ccaauucguggguagcggu

SEQ ID NO: 1050325 - RNA, 19 nt, Artificial Sequence
  Description of Artificial Sequence: Synthetic oligonucleotide
ccacugaggccuguuucuc

SEQ ID NO: 1050326 - RNA, 19 nt, Artificial Sequence
  Description of Artificial Sequence: Synthetic oligonucleotide
cugcguugggguguaugcu

SEQ ID NO: 1050327 - RNA, 19 nt, Artificial Sequence
  Description of Artificial Sequence: Synthetic oligonucleotide
ccggaacucagagcauuuc

SEQ ID NO: 1050328 - RNA, 19 nt, Artificial Sequence
  Description of Artificial Sequence: Synthetic oligonucleotide
ugccuccugucaggccgcu

SEQ ID NO: 1050329 - RNA, 19 nt, Artificial Sequence
  Description of Artificial Sequence: Synthetic oligonucleotide
auccacguuuggagaguua

SEQ ID NO: 1050330 - RNA, 19 nt, Artificial Sequence
  Description of Artificial Sequence: Synthetic oligonucleotide
ggauaggcguaggugcccu

SEQ ID NO: 1050331 - RNA, 19 nt, Artificial Sequence
  Description of Artificial Sequence: Synthetic oligonucleotide
cgcuaaacuucuggccaag

SEQ ID NO: 1050332 - RNA, 19 nt, Artificial Sequence
  Description of Artificial Sequence: Synthetic oligonucleotide
ggcccgcccugccaagcac

SEQ ID NO: 1050333 - RNA, 19 nt, Artificial Sequence
  Description of Artificial Sequence: Synthetic oligonucleotide
gggguguaugcuggcuaca

SEQ ID NO: 1050334 - RNA, 19 nt, Artificial Sequence
  Description of Artificial Sequence: Synthetic oligonucleotide
ggccuggacccagucuuuc

SEQ ID NO: 1050335 - RNA, 19 nt, Artificial Sequence
  Description of Artificial Sequence: Synthetic oligonucleotide
ggcggucauugaauaauau

SEQ ID NO: 1050336 - RNA, 19 nt, Artificial Sequence
  Description of Artificial Sequence: Synthetic oligonucleotide
caaugcgugcccgcacgcu

SEQ ID NO: 1050337 - RNA, 19 nt, Artificial Sequence
  Description of Artificial Sequence: Synthetic oligonucleotide
cggauaggcguaggugccc

SEQ ID NO: 1050338 - RNA, 19 nt, Artificial Sequence
  Description of Artificial Sequence: Synthetic oligonucleotide
cccgcacgcuaaacuucug

SEQ ID NO: 1050339 - RNA, 19 nt, Artificial Sequence
  Description of Artificial Sequence: Synthetic oligonucleotide
gccuggacccagucuuucu

SEQ ID NO: 1050340 - RNA, 19 nt, Artificial Sequence
  Description of Artificial Sequence: Synthetic oligonucleotide
gcccgcacgcuaaacuucu

SEQ ID NO: 1050341 - RNA, 19 nt, Artificial Sequence
  Description of Artificial Sequence: Synthetic oligonucleotide
ggaagguucgaggcauguu

SEQ ID NO: 1050342 - RNA, 19 nt, Artificial Sequence
  Description of Artificial Sequence: Synthetic oligonucleotide
gggauacgcugcacgggcu

SEQ ID NO: 1050343 - RNA, 19 nt, Artificial Sequence
  Description of Artificial Sequence: Synthetic oligonucleotide
cgugcccgcacgcuaaacu

SEQ ID NO: 1050344 - RNA, 19 nt, Artificial Sequence
  Description of Artificial Sequence: Synthetic oligonucleotide
cauagaccuucagcagcuu

SEQ ID NO: 1050345 - RNA, 19 nt, Artificial Sequence
  Description of Artificial Sequence: Synthetic oligonucleotide
gcgugcccgcacgcuaaac

SEQ ID NO: 1050346 - RNA, 19 nt, Artificial Sequence
  Description of Artificial Sequence: Synthetic oligonucleotide
ggcagcgcaugcacauggu

SEQ ID NO: 1050347 - RNA, 19 nt, Artificial Sequence
  Description of Artificial Sequence: Synthetic oligonucleotide
ccgcuccccugccucagga

SEQ ID NO: 1050348 - RNA, 19 nt, Artificial Sequence
  Description of Artificial Sequence: Synthetic oligonucleotide
ccacggcccgcccugccaa

SEQ ID NO: 1050349 - RNA, 19 nt, Artificial Sequence
  Description of Artificial Sequence: Synthetic oligonucleotide
gcccggaacucagagcauu

SEQ ID NO: 1050350 - RNA, 19 nt, Artificial Sequence
  Description of Artificial Sequence: Synthetic oligonucleotide
cccggaacucagagcauuu

SEQ ID NO: 1050351 - RNA, 19 nt, Artificial Sequence
  Description of Artificial Sequence: Synthetic oligonucleotide
ggcgggcccggaacucaga

SEQ ID NO: 1050352 - RNA, 19 nt, Artificial Sequence
  Description of Artificial Sequence: Synthetic oligonucleotide
ccaugccaucuacaucaau

SEQ ID NO: 1050353 - RNA, 19 nt, Artificial Sequence
  Description of Artificial Sequence: Synthetic oligonucleotide
cgaucuugaguggucccau

SEQ ID NO: 1050354 - RNA, 19 nt, Artificial Sequence
  Description of Artificial Sequence: Synthetic oligonucleotide
gccuccugucaggccgcuc

SEQ ID NO: 1050355 - RNA, 19 nt, Artificial Sequence
  Description of Artificial Sequence: Synthetic oligonucleotide
ccaugccuugugccauccu

SEQ ID NO: 1050356 - RNA, 19 nt, Artificial Sequence
  Description of Artificial Sequence: Synthetic oligonucleotide
ccuccugcguuggggugua

SEQ ID NO: 1050357 - RNA, 19 nt, Artificial Sequence
  Description of Artificial Sequence: Synthetic oligonucleotide
cggcccgcccugccaagca

SEQ ID NO: 1050358 - RNA, 19 nt, Artificial Sequence
  Description of Artificial Sequence: Synthetic oligonucleotide
cgcugggcuuucacauccu

SEQ ID NO: 1050359 - RNA, 19 nt, Artificial Sequence
  Description of Artificial Sequence: Synthetic oligonucleotide
cguggguagcggucccauu

SEQ ID NO: 1050360 - RNA, 19 nt, Artificial Sequence
  Description of Artificial Sequence: Synthetic oligonucleotide
cuccugcguugggguguau

SEQ ID NO: 1050361 - RNA, 19 nt, Artificial Sequence
  Description of Artificial Sequence: Synthetic oligonucleotide
aaaacuacccaucagagcu

SEQ ID NO: 1050362 - RNA, 19 nt, Artificial Sequence
  Description of Artificial Sequence: Synthetic oligonucleotide
guagucuuaaaacagacgg

SEQ ID NO: 1050363 - RNA, 19 nt, Artificial Sequence
  Description of Artificial Sequence: Synthetic oligonucleotide
aagucuugcaaaccgauac

SEQ ID NO: 1050364 - RNA, 19 nt, Artificial Sequence
  Description of Artificial Sequence: Synthetic oligonucleotide
aaaccgauacugcagagag

SEQ ID NO: 1050365 - RNA, 19 nt, Artificial Sequence
  Description of Artificial Sequence: Synthetic oligonucleotide
uaugcguacacuccaaggg

SEQ ID NO: 1050366 - RNA, 19 nt, Artificial Sequence
  Description of Artificial Sequence: Synthetic oligonucleotide
uuccuaagaacacagagcu

SEQ ID NO: 1050367 - RNA, 19 nt, Artificial Sequence
  Description of Artificial Sequence: Synthetic oligonucleotide
aaccuauucaucuccauug

SEQ ID NO: 1050368 - RNA, 19 nt, Artificial Sequence
  Description of Artificial Sequence: Synthetic oligonucleotide
uuuaaauccugacuccggg

SEQ ID NO: 1050369 - RNA, 19 nt, Artificial Sequence
  Description of Artificial Sequence: Synthetic oligonucleotide
uguguuuagauucccgggg

SEQ ID NO: 1050370 - RNA, 19 nt, Artificial Sequence
  Description of Artificial Sequence: Synthetic oligonucleotide
acagccaacagacauagag

SEQ ID NO: 1050371 - RNA, 19 nt, Artificial Sequence
  Description of Artificial Sequence: Synthetic oligonucleotide
ucggaugggacacagauca

SEQ ID NO: 1050372 - RNA, 19 nt, Artificial Sequence
  Description of Artificial Sequence: Synthetic oligonucleotide
ugcuggaucaaaaggauag

SEQ ID NO: 1050373 - RNA, 19 nt, Artificial Sequence
  Description of Artificial Sequence: Synthetic oligonucleotide
uaacuagucaaucccagcc

SEQ ID NO: 1050374 - RNA, 19 nt, Artificial Sequence
  Description of Artificial Sequence: Synthetic oligonucleotide
ucaucuauguccaaccaug

SEQ ID NO: 1050375 - RNA, 19 nt, Artificial Sequence
  Description of Artificial Sequence: Synthetic oligonucleotide
accgauacugcagagaggc

SEQ ID NO: 1050376 - RNA, 19 nt, Artificial Sequence
  Description of Artificial Sequence: Synthetic oligonucleotide
aaugaaggaaaacuaccca

SEQ ID NO: 1050377 - RNA, 19 nt, Artificial Sequence
  Description of Artificial Sequence: Synthetic oligonucleotide
acacuaacaaacccuaggg

SEQ ID NO: 1050378 - RNA, 19 nt, Artificial Sequence
  Description of Artificial Sequence: Synthetic oligonucleotide
uuccagauaaagcuaugcg

SEQ ID NO: 1050379 - RNA, 19 nt, Artificial Sequence
  Description of Artificial Sequence: Synthetic oligonucleotide
uguagucuuaaaacagacg

SEQ ID NO: 1050380 - RNA, 19 nt, Artificial Sequence
  Description of Artificial Sequence: Synthetic oligonucleotide
uuaauucuuguuucuaagc

SEQ ID NO: 1050381 - RNA, 19 nt, Artificial Sequence
  Description of Artificial Sequence: Synthetic oligonucleotide
auucacgaggcccuaaaac

SEQ ID NO: 1050382 - RNA, 19 nt, Artificial Sequence
  Description of Artificial Sequence: Synthetic oligonucleotide
aucccuaacuagucaaucc

SEQ ID NO: 1050383 - RNA, 19 nt, Artificial Sequence
  Description of Artificial Sequence: Synthetic oligonucleotide
acacuaggcacuucgaguc

SEQ ID NO: 1050384 - RNA, 19 nt, Artificial Sequence
  Description of Artificial Sequence: Synthetic oligonucleotide
auuccuaagaacacagagc

SEQ ID NO: 1050385 - RNA, 19 nt, Artificial Sequence
  Description of Artificial Sequence: Synthetic oligonucleotide
uucacgaggcccuaaaaca

SEQ ID NO: 1050386 - RNA, 19 nt, Artificial Sequence
  Description of Artificial Sequence: Synthetic oligonucleotide
aauucguccagaauggaca

SEQ ID NO: 1050387 - RNA, 19 nt, Artificial Sequence
  Description of Artificial Sequence: Synthetic oligonucleotide
aggaaaacuacccaucaga

SEQ ID NO: 1050388 - RNA, 19 nt, Artificial Sequence
  Description of Artificial Sequence: Synthetic oligonucleotide
ucuuaaaugggucgcugug

SEQ ID NO: 1050389 - RNA, 19 nt, Artificial Sequence
  Description of Artificial Sequence: Synthetic oligonucleotide
uccauugucaaaucacuga

SEQ ID NO: 1050390 - RNA, 19 nt, Artificial Sequence
  Description of Artificial Sequence: Synthetic oligonucleotide
augcguacacuccaagggc

SEQ ID NO: 1050391 - RNA, 19 nt, Artificial Sequence
  Description of Artificial Sequence: Synthetic oligonucleotide
uguccaaccaugcugugac

SEQ ID NO: 1050392 - RNA, 19 nt, Artificial Sequence
  Description of Artificial Sequence: Synthetic oligonucleotide
gauacagugggaaagggga

SEQ ID NO: 1050393 - RNA, 19 nt, Artificial Sequence
  Description of Artificial Sequence: Synthetic oligonucleotide
ucccuaacuagucaauccc

SEQ ID NO: 1050394 - RNA, 19 nt, Artificial Sequence
  Description of Artificial Sequence: Synthetic oligonucleotide
cacacuaacaaacccuagg

SEQ ID NO: 1050395 - RNA, 19 nt, Artificial Sequence
  Description of Artificial Sequence: Synthetic oligonucleotide
ugucuuuugaaugaaggaa

SEQ ID NO: 1050396 - RNA, 19 nt, Artificial Sequence
  Description of Artificial Sequence: Synthetic oligonucleotide
gauaaagcuaugcguacac

SEQ ID NO: 1050397 - RNA, 19 nt, Artificial Sequence
  Description of Artificial Sequence: Synthetic oligonucleotide
ucuuaguucguugagcacu

SEQ ID NO: 1050398 - RNA, 19 nt, Artificial Sequence
  Description of Artificial Sequence: Synthetic oligonucleotide
uucagauaugccugccucg

SEQ ID NO: 1050399 - RNA, 19 nt, Artificial Sequence
  Description of Artificial Sequence: Synthetic oligonucleotide
  modified_base (6)..(6): a, c, u, g, unknown or other
auccunuuccccugugugc

SEQ ID NO: 1050400 - RNA, 19 nt, Artificial Sequence
  Description of Artificial Sequence: Synthetic oligonucleotide
uucgagucgucuugggucg

SEQ ID NO: 1050401 - RNA, 19 nt, Artificial Sequence
  Description of Artificial Sequence: Synthetic oligonucleotide
aaucagccggaaccuauuc

SEQ ID NO: 1050402 - RNA, 19 nt, Artificial Sequence
  Description of Artificial Sequence: Synthetic oligonucleotide
acuagucaaucccagccuc

SEQ ID NO: 1050403 - RNA, 19 nt, Artificial Sequence
  Description of Artificial Sequence: Synthetic oligonucleotide
caugguuugaggcuccggg

SEQ ID NO: 1050404 - RNA, 19 nt, Artificial Sequence
  Description of Artificial Sequence: Synthetic oligonucleotide
auagguaucuuggauucac

SEQ ID NO: 1050405 - RNA, 19 nt, Artificial Sequence
  Description of Artificial Sequence: Synthetic oligonucleotide
aaggauagguaucuuggau

SEQ ID NO: 1050406 - RNA, 19 nt, Artificial Sequence
  Description of Artificial Sequence: Synthetic oligonucleotide
cucaguaauuuccuauucc

SEQ ID NO: 1050407 - RNA, 19 nt, Artificial Sequence
  Description of Artificial Sequence: Synthetic oligonucleotide
aagccggucacacuaacaa

SEQ ID NO: 1050408 - RNA, 19 nt, Artificial Sequence
  Description of Artificial Sequence: Synthetic oligonucleotide
uugcaaaccgauacugcag

SEQ ID NO: 1050409 - RNA, 19 nt, Artificial Sequence
  Description of Artificial Sequence: Synthetic oligonucleotide
acgaacguggcugacacgg

SEQ ID NO: 1050410 - RNA, 19 nt, Artificial Sequence
  Description of Artificial Sequence: Synthetic oligonucleotide
ucuugcaaaccgauacugc

SEQ ID NO: 1050411 - RNA, 19 nt, Artificial Sequence
  Description of Artificial Sequence: Synthetic oligonucleotide
uccgguuuaaauccugacu

SEQ ID NO: 1050412 - RNA, 19 nt, Artificial Sequence
  Description of Artificial Sequence: Synthetic oligonucleotide
augguuugaggcuccgggc

SEQ ID NO: 1050413 - RNA, 19 nt, Artificial Sequence
  Description of Artificial Sequence: Synthetic oligonucleotide
cuaugcguacacuccaagg

SEQ ID NO: 1050414 - RNA, 19 nt, Artificial Sequence
  Description of Artificial Sequence: Synthetic oligonucleotide
aaaagcucuggaccgcugu

SEQ ID NO: 1050415 - RNA, 19 nt, Artificial Sequence
  Description of Artificial Sequence: Synthetic oligonucleotide
uggguugguuuucagauau

SEQ ID NO: 1050416 - RNA, 19 nt, Artificial Sequence
  Description of Artificial Sequence: Synthetic oligonucleotide
ucucggaucccuaacuagu

SEQ ID NO: 1050417 - RNA, 19 nt, Artificial Sequence
  Description of Artificial Sequence: Synthetic oligonucleotide
cucguuagauggcugacag

SEQ ID NO: 1050418 - RNA, 19 nt, Artificial Sequence
  Description of Artificial Sequence: Synthetic oligonucleotide
agccaacagacauagagaa

SEQ ID NO: 1050419 - RNA, 19 nt, Artificial Sequence
  Description of Artificial Sequence: Synthetic oligonucleotide
  modified_base (7)..(7): a, c, u, g, unknown or other
cauccunuuccccugugug

SEQ ID NO: 1050420 - RNA, 19 nt, Artificial Sequence
  Description of Artificial Sequence: Synthetic oligonucleotide
agcaccaguccucucgugg

SEQ ID NO: 1050421 - RNA, 19 nt, Artificial Sequence
  Description of Artificial Sequence: Synthetic oligonucleotide
cacacuauaugggacuugg

SEQ ID NO: 1050422 - RNA, 19 nt, Artificial Sequence
  Description of Artificial Sequence: Synthetic oligonucleotide
uagguaucuuggauucacg

SEQ ID NO: 1050423 - RNA, 19 nt, Artificial Sequence
  Description of Artificial Sequence: Synthetic oligonucleotide
gagagacccacgaacgugg

SEQ ID NO: 1050424 - RNA, 19 nt, Artificial Sequence
  Description of Artificial Sequence: Synthetic oligonucleotide
gacuacuucagucccugug

SEQ ID NO: 1050425 - RNA, 19 nt, Artificial Sequence
  Description of Artificial Sequence: Synthetic oligonucleotide
aagcuaugcguacacucca

SEQ ID NO: 1050426 - RNA, 19 nt, Artificial Sequence
  Description of Artificial Sequence: Synthetic oligonucleotide
caggcucuuaaaugggucg

SEQ ID NO: 1050427 - RNA, 19 nt, Artificial Sequence
  Description of Artificial Sequence: Synthetic oligonucleotide
aaagcugccucaguaauuu

SEQ ID NO: 1050428 - RNA, 19 nt, Artificial Sequence
  Description of Artificial Sequence: Synthetic oligonucleotide
ugugaccccgaauucacac

SEQ ID NO: 1050429 - RNA, 19 nt, Artificial Sequence
  Description of Artificial Sequence: Synthetic oligonucleotide
ugagcaccucggaagauga

SEQ ID NO: 1050430 - RNA, 19 nt, Artificial Sequence
  Description of Artificial Sequence: Synthetic oligonucleotide
ucguccagaauggacaagc

SEQ ID NO: 1050431 - RNA, 19 nt, Artificial Sequence
  Description of Artificial Sequence: Synthetic oligonucleotide
uuaaaugggucgcuguguu

SEQ ID NO: 1050432 - RNA, 19 nt, Artificial Sequence
  Description of Artificial Sequence: Synthetic oligonucleotide
cacuaacaaacccuagggc

SEQ ID NO: 1050433 - RNA, 19 nt, Artificial Sequence
  Description of Artificial Sequence: Synthetic oligonucleotide
agugccgaggucaggauac

SEQ ID NO: 1050434 - RNA, 19 nt, Artificial Sequence
  Description of Artificial Sequence: Synthetic oligonucleotide
ugcguacacuccaagggca

SEQ ID NO: 1050435 - RNA, 19 nt, Artificial Sequence
  Description of Artificial Sequence: Synthetic oligonucleotide
cuugcaaaccgauacugca

SEQ ID NO: 1050436 - RNA, 19 nt, Artificial Sequence
  Description of Artificial Sequence: Synthetic oligonucleotide
ugugguaggagagacccac

SEQ ID NO: 1050437 - RNA, 19 nt, Artificial Sequence
  Description of Artificial Sequence: Synthetic oligonucleotide
aauaguuuucuuaguucgu

SEQ ID NO: 1050438 - RNA, 19 nt, Artificial Sequence
  Description of Artificial Sequence: Synthetic oligonucleotide
auccgguuuaaauccugac

SEQ ID NO: 1050439 - RNA, 19 nt, Artificial Sequence
  Description of Artificial Sequence: Synthetic oligonucleotide
ucgauggcaagucuugcaa

SEQ ID NO: 1050440 - RNA, 19 nt, Artificial Sequence
  Description of Artificial Sequence: Synthetic oligonucleotide
ugacacgggucucuagucc

SEQ ID NO: 1050441 - RNA, 19 nt, Artificial Sequence
  Description of Artificial Sequence: Synthetic oligonucleotide
aaugggucgcuguguuuag

SEQ ID NO: 1050442 - RNA, 19 nt, Artificial Sequence
  Description of Artificial Sequence: Synthetic oligonucleotide
aaaugggucgcuguguuua

SEQ ID NO: 1050443 - RNA, 19 nt, Artificial Sequence
  Description of Artificial Sequence: Synthetic oligonucleotide
gaauucacaccucgauggc

SEQ ID NO: 1050444 - RNA, 19 nt, Artificial Sequence
  Description of Artificial Sequence: Synthetic oligonucleotide
caucuauguccaaccaugc

SEQ ID NO: 1050445 - RNA, 19 nt, Artificial Sequence
  Description of Artificial Sequence: Synthetic oligonucleotide
gacacgggucucuaguccc

SEQ ID NO: 1050446 - RNA, 19 nt, Artificial Sequence
  Description of Artificial Sequence: Synthetic oligonucleotide
aggauagguaucuuggauu

SEQ ID NO: 1050447 - RNA, 19 nt, Artificial Sequence
  Description of Artificial Sequence: Synthetic oligonucleotide
auucuuguuucuaagcagu

SEQ ID NO: 1050448 - RNA, 19 nt, Artificial Sequence
  Description of Artificial Sequence: Synthetic oligonucleotide
ucacacuaacaaacccuag

SEQ ID NO: 1050449 - RNA, 19 nt, Artificial Sequence
  Description of Artificial Sequence: Synthetic oligonucleotide
gucaguccaccagugaugg

SEQ ID NO: 1050450 - RNA, 19 nt, Artificial Sequence
  Description of Artificial Sequence: Synthetic oligonucleotide
uccaaccaugcugugaccc

SEQ ID NO: 1050451 - RNA, 19 nt, Artificial Sequence
  Description of Artificial Sequence: Synthetic oligonucleotide
gacggcaaagacaaccagc

SEQ ID NO: 1050452 - RNA, 19 nt, Artificial Sequence
  Description of Artificial Sequence: Synthetic oligonucleotide
  modified_base (5)..(5): a, c, u, g, unknown or other
uccunuuccccugugugca

SEQ ID NO: 1050453 - RNA, 19 nt, Artificial Sequence
  Description of Artificial Sequence: Synthetic oligonucleotide
aauucacaccucgauggca

SEQ ID NO: 1050454 - RNA, 19 nt, Artificial Sequence
  Description of Artificial Sequence: Synthetic oligonucleotide
gguuuaaauccugacuccg

SEQ ID NO: 1050455 - RNA, 19 nt, Artificial Sequence
  Description of Artificial Sequence: Synthetic oligonucleotide
accccgaauucacaccucg

SEQ ID NO: 1050456 - RNA, 19 nt, Artificial Sequence
  Description of Artificial Sequence: Synthetic oligonucleotide
uguuucuaagcaguuucac

SEQ ID NO: 1050457 - RNA, 19 nt, Artificial Sequence
  Description of Artificial Sequence: Synthetic oligonucleotide
ggaagugucaguccaccag

SEQ ID NO: 1050458 - RNA, 19 nt, Artificial Sequence
  Description of Artificial Sequence: Synthetic oligonucleotide
aucuuggauucacgaggcc

SEQ ID NO: 1050459 - RNA, 19 nt, Artificial Sequence
  Description of Artificial Sequence: Synthetic oligonucleotide
gaauucguccagaauggac

SEQ ID NO: 1050460 - RNA, 19 nt, Artificial Sequence
  Description of Artificial Sequence: Synthetic oligonucleotide
acuccggguauuuuauucu

SEQ ID NO: 1050461 - RNA, 19 nt, Artificial Sequence
  Description of Artificial Sequence: Synthetic oligonucleotide
ucgucuugggucguccugg

SEQ ID NO: 1050462 - RNA, 19 nt, Artificial Sequence
  Description of Artificial Sequence: Synthetic oligonucleotide
aggcucuuaaaugggucgc

SEQ ID NO: 1050463 - RNA, 19 nt, Artificial Sequence
  Description of Artificial Sequence: Synthetic oligonucleotide
guccagaauggacaagcag

SEQ ID NO: 1050464 - RNA, 19 nt, Artificial Sequence
  Description of Artificial Sequence: Synthetic oligonucleotide
guuuagauucccggggucc

SEQ ID NO: 1050465 - RNA, 19 nt, Artificial Sequence
  Description of Artificial Sequence: Synthetic oligonucleotide
gacacugcuacaguauuuc

SEQ ID NO: 1050466 - RNA, 19 nt, Artificial Sequence
  Description of Artificial Sequence: Synthetic oligonucleotide
caccucggaagaugaaugg

SEQ ID NO: 1050467 - RNA, 19 nt, Artificial Sequence
  Description of Artificial Sequence: Synthetic oligonucleotide
caagggcacacccuccugg

SEQ ID NO: 1050468 - RNA, 19 nt, Artificial Sequence
  Description of Artificial Sequence: Synthetic oligonucleotide
agacccacgaacguggcug

SEQ ID NO: 1050469 - RNA, 19 nt, Artificial Sequence
  Description of Artificial Sequence: Synthetic oligonucleotide
aaacuacccaucagagcuc

SEQ ID NO: 1050470 - RNA, 19 nt, Artificial Sequence
  Description of Artificial Sequence: Synthetic oligonucleotide
uucccgggguccaugauaa

SEQ ID NO: 1050471 - RNA, 19 nt, Artificial Sequence
  Description of Artificial Sequence: Synthetic oligonucleotide
uguuuagauucccgggguc

SEQ ID NO: 1050472 - RNA, 19 nt, Artificial Sequence
  Description of Artificial Sequence: Synthetic oligonucleotide
ggauagguaucuuggauuc

SEQ ID NO: 1050473 - RNA, 19 nt, Artificial Sequence
  Description of Artificial Sequence: Synthetic oligonucleotide
ucguuagauggcugacagg

SEQ ID NO: 1050474 - RNA, 19 nt, Artificial Sequence
  Description of Artificial Sequence: Synthetic oligonucleotide
aacccuugggaagcaggac

SEQ ID NO: 1050475 - RNA, 19 nt, Artificial Sequence
  Description of Artificial Sequence: Synthetic oligonucleotide
uuuagauucccggggucca

SEQ ID NO: 1050476 - RNA, 19 nt, Artificial Sequence
  Description of Artificial Sequence: Synthetic oligonucleotide
cuauaugggacuuggcaaa

SEQ ID NO: 1050477 - RNA, 19 nt, Artificial Sequence
  Description of Artificial Sequence: Synthetic oligonucleotide
gggaauucguccagaaugg

SEQ ID NO: 1050478 - RNA, 19 nt, Artificial Sequence
  Description of Artificial Sequence: Synthetic oligonucleotide
  modified_base (2)..(2): a, c, u, g, unknown or other
unuuccccugugugcagag

SEQ ID NO: 1050479 - RNA, 19 nt, Artificial Sequence
  Description of Artificial Sequence: Synthetic oligonucleotide
ucacuucucauccgguuua

SEQ ID NO: 1050480 - RNA, 19 nt, Artificial Sequence
  Description of Artificial Sequence: Synthetic oligonucleotide
uccuaagaacacagagcug

SEQ ID NO: 1050481 - RNA, 19 nt, Artificial Sequence
  Description of Artificial Sequence: Synthetic oligonucleotide
ccgguuuaaauccugacuc

SEQ ID NO: 1050482 - RNA, 19 nt, Artificial Sequence
  Description of Artificial Sequence: Synthetic oligonucleotide
uccggguauuuuauucucu

SEQ ID NO: 1050483 - RNA, 19 nt, Artificial Sequence
  Description of Artificial Sequence: Synthetic oligonucleotide
gucuugcaaaccgauacug

SEQ ID NO: 1050484 - RNA, 19 nt, Artificial Sequence
  Description of Artificial Sequence: Synthetic oligonucleotide
aacccggcccacaccaagc

SEQ ID NO: 1050485 - RNA, 19 nt, Artificial Sequence
  Description of Artificial Sequence: Synthetic oligonucleotide
uugagcaccucggaagaug

SEQ ID NO: 1050486 - RNA, 19 nt, Artificial Sequence
  Description of Artificial Sequence: Synthetic oligonucleotide
aauugacucucggaucccu

SEQ ID NO: 1050487 - RNA, 19 nt, Artificial Sequence
  Description of Artificial Sequence: Synthetic oligonucleotide
agauaaagcuaugcguaca

SEQ ID NO: 1050488 - RNA, 19 nt, Artificial Sequence
  Description of Artificial Sequence: Synthetic oligonucleotide
aacuacccaucagagcucu

SEQ ID NO: 1050489 - RNA, 19 nt, Artificial Sequence
  Description of Artificial Sequence: Synthetic oligonucleotide
agacggcaaagacaaccag

SEQ ID NO: 1050490 - RNA, 19 nt, Artificial Sequence
  Description of Artificial Sequence: Synthetic oligonucleotide
gacacuaggcacuucgagu

SEQ ID NO: 1050491 - RNA, 19 nt, Artificial Sequence
  Description of Artificial Sequence: Synthetic oligonucleotide
aagggcacacccuccugga

SEQ ID NO: 1050492 - RNA, 19 nt, Artificial Sequence
  Description of Artificial Sequence: Synthetic oligonucleotide
acuucgagucgucuugggu

SEQ ID NO: 1050493 - RNA, 19 nt, Artificial Sequence
  Description of Artificial Sequence: Synthetic oligonucleotide
uucuuaguucguugagcac

SEQ ID NO: 1050494 - RNA, 19 nt, Artificial Sequence
  Description of Artificial Sequence: Synthetic oligonucleotide
uccaagggcacacccuccu

SEQ ID NO: 1050495 - RNA, 19 nt, Artificial Sequence
  Description of Artificial Sequence: Synthetic oligonucleotide
ucguggguugguuuucaga

SEQ ID NO: 1050496 - RNA, 19 nt, Artificial Sequence
  Description of Artificial Sequence: Synthetic oligonucleotide
ccaauaguuuucuuaguuc

SEQ ID NO: 1050497 - RNA, 19 nt, Artificial Sequence
  Description of Artificial Sequence: Synthetic oligonucleotide
uaugccugccucguuagau

SEQ ID NO: 1050498 - RNA, 19 nt, Artificial Sequence
  Description of Artificial Sequence: Synthetic oligonucleotide
gaacccggcccacaccaag

SEQ ID NO: 1050499 - RNA, 19 nt, Artificial Sequence
  Description of Artificial Sequence: Synthetic oligonucleotide
ugccucguuagauggcuga

SEQ ID NO: 1050500 - RNA, 19 nt, Artificial Sequence
  Description of Artificial Sequence: Synthetic oligonucleotide
cugccgacuggcuggacag

SEQ ID NO: 1050501 - RNA, 19 nt, Artificial Sequence
  Description of Artificial Sequence: Synthetic oligonucleotide
cccuaaaacaagcugugac

SEQ ID NO: 1050502 - RNA, 19 nt, Artificial Sequence
  Description of Artificial Sequence: Synthetic oligonucleotide
uaguucguugagcacuuuu

SEQ ID NO: 1050503 - RNA, 19 nt, Artificial Sequence
  Description of Artificial Sequence: Synthetic oligonucleotide
aaccgauacugcagagagg

SEQ ID NO: 1050504 - RNA, 19 nt, Artificial Sequence
  Description of Artificial Sequence: Synthetic oligonucleotide
ugacucucggaucccuaac

SEQ ID NO: 1050505 - RNA, 19 nt, Artificial Sequence
  Description of Artificial Sequence: Synthetic oligonucleotide
ucuggaccgcuguggaggc

SEQ ID NO: 1050506 - RNA, 19 nt, Artificial Sequence
  Description of Artificial Sequence: Synthetic oligonucleotide
augauaacccugauccuga

SEQ ID NO: 1050507 - RNA, 19 nt, Artificial Sequence
  Description of Artificial Sequence: Synthetic oligonucleotide
gucgcagcagcaccagucc

SEQ ID NO: 1050508 - RNA, 19 nt, Artificial Sequence
  Description of Artificial Sequence: Synthetic oligonucleotide
cuacccaucagagcucuug

SEQ ID NO: 1050509 - RNA, 19 nt, Artificial Sequence
  Description of Artificial Sequence: Synthetic oligonucleotide
cucggaucccuaacuaguc

SEQ ID NO: 1050510 - RNA, 19 nt, Artificial Sequence
  Description of Artificial Sequence: Synthetic oligonucleotide
gucucuagucccaucacca

SEQ ID NO: 1050511 - RNA, 19 nt, Artificial Sequence
  Description of Artificial Sequence: Synthetic oligonucleotide
ucucuagucccaucaccaa

SEQ ID NO: 1050512 - RNA, 19 nt, Artificial Sequence
  Description of Artificial Sequence: Synthetic oligonucleotide
ggacacuaggcacuucgag

SEQ ID NO: 1050513 - RNA, 19 nt, Artificial Sequence
  Description of Artificial Sequence: Synthetic oligonucleotide
gagucgggagcagugugag

SEQ ID NO: 1050514 - RNA, 19 nt, Artificial Sequence
  Description of Artificial Sequence: Synthetic oligonucleotide
uauaugggacuuggcaaaa

SEQ ID NO: 1050515 - RNA, 19 nt, Artificial Sequence
  Description of Artificial Sequence: Synthetic oligonucleotide
cacuaggcacuucgagucg

SEQ ID NO: 1050516 - RNA, 19 nt, Artificial Sequence
  Description of Artificial Sequence: Synthetic oligonucleotide
ugggucgcuguguuuagau

SEQ ID NO: 1050517 - RNA, 19 nt, Artificial Sequence
  Description of Artificial Sequence: Synthetic oligonucleotide
acacuauaugggacuuggc

SEQ ID NO: 1050518 - RNA, 19 nt, Artificial Sequence
  Description of Artificial Sequence: Synthetic oligonucleotide
  modified_base (9)..(9): a, c, u, g, unknown or other
ugcauccunuuccccugug

SEQ ID NO: 1050519 - RNA, 19 nt, Artificial Sequence
  Description of Artificial Sequence: Synthetic oligonucleotide
aggacuacuucagucccug

SEQ ID NO: 1050520 - RNA, 19 nt, Artificial Sequence
  Description of Artificial Sequence: Synthetic oligonucleotide
gcaauucacuucucauccg

SEQ ID NO: 1050521 - RNA, 19 nt, Artificial Sequence
  Description of Artificial Sequence: Synthetic oligonucleotide
gugaccccgaauucacacc

SEQ ID NO: 1050522 - RNA, 19 nt, Artificial Sequence
  Description of Artificial Sequence: Synthetic oligonucleotide
ggucucuagucccaucacc

SEQ ID NO: 1050523 - RNA, 19 nt, Artificial Sequence
  Description of Artificial Sequence: Synthetic oligonucleotide
ugccucacagccugugacu

SEQ ID NO: 1050524 - RNA, 19 nt, Artificial Sequence
  Description of Artificial Sequence: Synthetic oligonucleotide
cucagaacccggcccacac

SEQ ID NO: 1050525 - RNA, 19 nt, Artificial Sequence
  Description of Artificial Sequence: Synthetic oligonucleotide
ugauaacccugauccugac

SEQ ID NO: 1050526 - RNA, 19 nt, Artificial Sequence
  Description of Artificial Sequence: Synthetic oligonucleotide
cuccggguauuuuauucuc

SEQ ID NO: 1050527 - RNA, 19 nt, Artificial Sequence
  Description of Artificial Sequence: Synthetic oligonucleotide
ggcaaauugacucucggau

SEQ ID NO: 1050528 - RNA, 19 nt, Artificial Sequence
  Description of Artificial Sequence: Synthetic oligonucleotide
gauucacgaggcccuaaaa

SEQ ID NO: 1050529 - RNA, 19 nt, Artificial Sequence
  Description of Artificial Sequence: Synthetic oligonucleotide
gaucaugguuugaggcucc

SEQ ID NO: 1050530 - RNA, 19 nt, Artificial Sequence
  Description of Artificial Sequence: Synthetic oligonucleotide
cugacacgggucucuaguc

SEQ ID NO: 1050531 - RNA, 19 nt, Artificial Sequence
  Description of Artificial Sequence: Synthetic oligonucleotide
caccaagcagaaagcugcc

SEQ ID NO: 1050532 - RNA, 19 nt, Artificial Sequence
  Description of Artificial Sequence: Synthetic oligonucleotide
auucacaccucgauggcaa

SEQ ID NO: 1050533 - RNA, 19 nt, Artificial Sequence
  Description of Artificial Sequence: Synthetic oligonucleotide
ccgaggucaggauacagug

SEQ ID NO: 1050534 - RNA, 19 nt, Artificial Sequence
  Description of Artificial Sequence: Synthetic oligonucleotide
agauucccgggguccauga

SEQ ID NO: 1050535 - RNA, 19 nt, Artificial Sequence
  Description of Artificial Sequence: Synthetic oligonucleotide
ugauggggugucuccucug

SEQ ID NO: 1050536 - RNA, 19 nt, Artificial Sequence
  Description of Artificial Sequence: Synthetic oligonucleotide
uuuccugguuccagauaaa

SEQ ID NO: 1050537 - RNA, 19 nt, Artificial Sequence
  Description of Artificial Sequence: Synthetic oligonucleotide
gucugacuugcucaucauc

SEQ ID NO: 1050538 - RNA, 19 nt, Artificial Sequence
  Description of Artificial Sequence: Synthetic oligonucleotide
acucucggaucccuaacua

SEQ ID NO: 1050539 - RNA, 19 nt, Artificial Sequence
  Description of Artificial Sequence: Synthetic oligonucleotide
cacuucgagucgucuuggg

SEQ ID NO: 1050540 - RNA, 19 nt, Artificial Sequence
  Description of Artificial Sequence: Synthetic oligonucleotide
agagacccacgaacguggc

SEQ ID NO: 1050541 - RNA, 19 nt, Artificial Sequence
  Description of Artificial Sequence: Synthetic oligonucleotide
uagucccaucaccaauagu

SEQ ID NO: 1050542 - RNA, 19 nt, Artificial Sequence
  Description of Artificial Sequence: Synthetic oligonucleotide
ucccaacaacugaaacacu

SEQ ID NO: 1050543 - RNA, 19 nt, Artificial Sequence
  Description of Artificial Sequence: Synthetic oligonucleotide
ucccugugguaggagagac

SEQ ID NO: 1050544 - RNA, 19 nt, Artificial Sequence
  Description of Artificial Sequence: Synthetic oligonucleotide
cuccggggacacuaggcac

SEQ ID NO: 1050545 - RNA, 19 nt, Artificial Sequence
  Description of Artificial Sequence: Synthetic oligonucleotide
cucgauggcaagucuugca

SEQ ID NO: 1050546 - RNA, 19 nt, Artificial Sequence
  Description of Artificial Sequence: Synthetic oligonucleotide
agcaccucggaagaugaau

SEQ ID NO: 1050547 - RNA, 19 nt, Artificial Sequence
  Description of Artificial Sequence: Synthetic oligonucleotide
ccgggguccaugauaaccc

SEQ ID NO: 1050548 - RNA, 19 nt, Artificial Sequence
  Description of Artificial Sequence: Synthetic oligonucleotide
caugccccaacccuuggga

SEQ ID NO: 1050549 - RNA, 19 nt, Artificial Sequence
  Description of Artificial Sequence: Synthetic oligonucleotide
cucggaugggacacagauc

SEQ ID NO: 1050550 - RNA, 19 nt, Artificial Sequence
  Description of Artificial Sequence: Synthetic oligonucleotide
acccugauccugacugagc

SEQ ID NO: 1050551 - RNA, 19 nt, Artificial Sequence
  Description of Artificial Sequence: Synthetic oligonucleotide
gauagguaucuuggauuca

SEQ ID NO: 1050552 - RNA, 19 nt, Artificial Sequence
  Description of Artificial Sequence: Synthetic oligonucleotide
caucagagcucuuggaagu

SEQ ID NO: 1050553 - RNA, 19 nt, Artificial Sequence
  Description of Artificial Sequence: Synthetic oligonucleotide
gcuaugcguacacuccaag

SEQ ID NO: 1050554 - RNA, 19 nt, Artificial Sequence
  Description of Artificial Sequence: Synthetic oligonucleotide
gucaggauacagugggaaa

SEQ ID NO: 1050555 - RNA, 19 nt, Artificial Sequence
  Description of Artificial Sequence: Synthetic oligonucleotide
cuaacaaacccuagggcuu

SEQ ID NO: 1050556 - RNA, 19 nt, Artificial Sequence
  Description of Artificial Sequence: Synthetic oligonucleotide
acuaggcacuucgagucgu

SEQ ID NO: 1050557 - RNA, 19 nt, Artificial Sequence
  Description of Artificial Sequence: Synthetic oligonucleotide
ucaaaaggauagguaucuu

SEQ ID NO: 1050558 - RNA, 19 nt, Artificial Sequence
  Description of Artificial Sequence: Synthetic oligonucleotide
gucgucuugggucguccug

SEQ ID NO: 1050559 - RNA, 19 nt, Artificial Sequence
  Description of Artificial Sequence: Synthetic oligonucleotide
agucaaucccagccuccca

SEQ ID NO: 1050560 - RNA, 19 nt, Artificial Sequence
  Description of Artificial Sequence: Synthetic oligonucleotide
ccaggacuacuucaguccc

SEQ ID NO: 1050561 - RNA, 19 nt, Artificial Sequence
  Description of Artificial Sequence: Synthetic oligonucleotide
aucaugguuugaggcuccg

SEQ ID NO: 1050562 - RNA, 19 nt, Artificial Sequence
  Description of Artificial Sequence: Synthetic oligonucleotide
cccaucaccaauaguuuuc

SEQ ID NO: 1050563 - RNA, 19 nt, Artificial Sequence
  Description of Artificial Sequence: Synthetic oligonucleotide
uagauucccgggguccaug

SEQ ID NO: 1050564 - RNA, 19 nt, Artificial Sequence
  Description of Artificial Sequence: Synthetic oligonucleotide
caaaccgauacugcagaga

SEQ ID NO: 1050565 - RNA, 19 nt, Artificial Sequence
  Description of Artificial Sequence: Synthetic oligonucleotide
gucgggagcagugugaggu

SEQ ID NO: 1050566 - RNA, 19 nt, Artificial Sequence
  Description of Artificial Sequence: Synthetic oligonucleotide
cugcgugacaaagcccagg

SEQ ID NO: 1050567 - RNA, 19 nt, Artificial Sequence
  Description of Artificial Sequence: Synthetic oligonucleotide
ucacaccucgauggcaagu

SEQ ID NO: 1050568 - RNA, 19 nt, Artificial Sequence
  Description of Artificial Sequence: Synthetic oligonucleotide
ugccgaggucaggauacag

SEQ ID NO: 1050569 - RNA, 19 nt, Artificial Sequence
  Description of Artificial Sequence: Synthetic oligonucleotide
ccgaauucacaccucgaug

SEQ ID NO: 1050570 - RNA, 19 nt, Artificial Sequence
  Description of Artificial Sequence: Synthetic oligonucleotide
ccaacagacauagagaagu

SEQ ID NO: 1050571 - RNA, 19 nt, Artificial Sequence
  Description of Artificial Sequence: Synthetic oligonucleotide
ccggucacacuaacaaacc

SEQ ID NO: 1050572 - RNA, 19 nt, Artificial Sequence
  Description of Artificial Sequence: Synthetic oligonucleotide
gguuugaggcuccgggcug

SEQ ID NO: 1050573 - RNA, 19 nt, Artificial Sequence
  Description of Artificial Sequence: Synthetic oligonucleotide
ggcgaucuuugccaguuca

SEQ ID NO: 1050574 - RNA, 19 nt, Artificial Sequence
  Description of Artificial Sequence: Synthetic oligonucleotide
agccggucacacuaacaaa

SEQ ID NO: 1050575 - RNA, 19 nt, Artificial Sequence
  Description of Artificial Sequence: Synthetic oligonucleotide
guguuuagauucccggggu

SEQ ID NO: 1050576 - RNA, 19 nt, Artificial Sequence
  Description of Artificial Sequence: Synthetic oligonucleotide
cacgaacguggcugacacg

SEQ ID NO: 1050577 - RNA, 19 nt, Artificial Sequence
  Description of Artificial Sequence: Synthetic oligonucleotide
auaugccugccucguuaga

SEQ ID NO: 1050578 - RNA, 19 nt, Artificial Sequence
  Description of Artificial Sequence: Synthetic oligonucleotide
gugucaguccaccagugau

SEQ ID NO: 1050579 - RNA, 19 nt, Artificial Sequence
  Description of Artificial Sequence: Synthetic oligonucleotide
acgggucucuagucccauc

SEQ ID NO: 1050580 - RNA, 19 nt, Artificial Sequence
  Description of Artificial Sequence: Synthetic oligonucleotide
acaaacccuagggcuucuc

SEQ ID NO: 1050581 - RNA, 19 nt, Artificial Sequence
  Description of Artificial Sequence: Synthetic oligonucleotide
cuggcuaccgguggcagca

SEQ ID NO: 1050582 - RNA, 19 nt, Artificial Sequence
  Description of Artificial Sequence: Synthetic oligonucleotide
ccacgaacguggcugacac

SEQ ID NO: 1050583 - RNA, 19 nt, Artificial Sequence
  Description of Artificial Sequence: Synthetic oligonucleotide
aauggacaagcaggccuuu

SEQ ID NO: 1050584 - RNA, 19 nt, Artificial Sequence
  Description of Artificial Sequence: Synthetic oligonucleotide
acccuagggcuucuccaca

SEQ ID NO: 1050585 - RNA, 19 nt, Artificial Sequence
  Description of Artificial Sequence: Synthetic oligonucleotide
cuaggcacuucgagucguc

SEQ ID NO: 1050586 - RNA, 19 nt, Artificial Sequence
  Description of Artificial Sequence: Synthetic oligonucleotide
cuuaaaugggucgcugugu

SEQ ID NO: 1050587 - RNA, 19 nt, Artificial Sequence
  Description of Artificial Sequence: Synthetic oligonucleotide
caagucuugcaaaccgaua

SEQ ID NO: 1050588 - RNA, 19 nt, Artificial Sequence
  Description of Artificial Sequence: Synthetic oligonucleotide
cucuuaaaugggucgcugu

SEQ ID NO: 1050589 - RNA, 19 nt, Artificial Sequence
  Description of Artificial Sequence: Synthetic oligonucleotide
cgguuuaaauccugacucc

SEQ ID NO: 1050590 - RNA, 19 nt, Artificial Sequence
  Description of Artificial Sequence: Synthetic oligonucleotide
gcuaccgguggcagcagcg

SEQ ID NO: 1050591 - RNA, 19 nt, Artificial Sequence
  Description of Artificial Sequence: Synthetic oligonucleotide
uccucggaugggacacaga

SEQ ID NO: 1050592 - RNA, 19 nt, Artificial Sequence
  Description of Artificial Sequence: Synthetic oligonucleotide
agcacacuauaugggacuu

SEQ ID NO: 1050593 - RNA, 19 nt, Artificial Sequence
  Description of Artificial Sequence: Synthetic oligonucleotide
gacccacgaacguggcuga

SEQ ID NO: 1050594 - RNA, 19 nt, Artificial Sequence
  Description of Artificial Sequence: Synthetic oligonucleotide
gaauggacaagcaggccuu

SEQ ID NO: 1050595 - RNA, 19 nt, Artificial Sequence
  Description of Artificial Sequence: Synthetic oligonucleotide
cuccucggaugggacacag

SEQ ID NO: 1050596 - RNA, 19 nt, Artificial Sequence
  Description of Artificial Sequence: Synthetic oligonucleotide
cugccucguuagauggcug

SEQ ID NO: 1050597 - RNA, 19 nt, Artificial Sequence
  Description of Artificial Sequence: Synthetic oligonucleotide
cacagagcuggcuaccggu

SEQ ID NO: 1050598 - RNA, 19 nt, Artificial Sequence
  Description of Artificial Sequence: Synthetic oligonucleotide
ccgcuguggaggcaaauug

SEQ ID NO: 1050599 - RNA, 19 nt, Artificial Sequence
  Description of Artificial Sequence: Synthetic oligonucleotide
cgaggucaggauacagugg

SEQ ID NO: 1050600 - RNA, 19 nt, Artificial Sequence
  Description of Artificial Sequence: Synthetic oligonucleotide
cuuaguucguugagcacuu

SEQ ID NO: 1050601 - RNA, 19 nt, Artificial Sequence
  Description of Artificial Sequence: Synthetic oligonucleotide
gcucuuaaaugggucgcug

SEQ ID NO: 1050602 - RNA, 19 nt, Artificial Sequence
  Description of Artificial Sequence: Synthetic oligonucleotide
cccgggguccaugauaacc

SEQ ID NO: 1050603 - RNA, 19 nt, Artificial Sequence
  Description of Artificial Sequence: Synthetic oligonucleotide
gcucuggggaauucgucca

SEQ ID NO: 1050604 - RNA, 19 nt, Artificial Sequence
  Description of Artificial Sequence: Synthetic oligonucleotide
uggcuucguggguugguuu

SEQ ID NO: 1050605 - RNA, 19 nt, Artificial Sequence
  Description of Artificial Sequence: Synthetic oligonucleotide
auugagcaccucggaagau

SEQ ID NO: 1050606 - RNA, 19 nt, Artificial Sequence
  Description of Artificial Sequence: Synthetic oligonucleotide
guggguugguuuucagaua

SEQ ID NO: 1050607 - RNA, 19 nt, Artificial Sequence
  Description of Artificial Sequence: Synthetic oligonucleotide
cggucacacuaacaaaccc

SEQ ID NO: 1050608 - RNA, 19 nt, Artificial Sequence
  Description of Artificial Sequence: Synthetic oligonucleotide
ggauucacgaggcccuaaa

SEQ ID NO: 1050609 - RNA, 19 nt, Artificial Sequence
  Description of Artificial Sequence: Synthetic oligonucleotide
gcacuucgagucgucuugg

SEQ ID NO: 1050610 - RNA, 19 nt, Artificial Sequence
  Description of Artificial Sequence: Synthetic oligonucleotide
gggaccaaucagccggaac

SEQ ID NO: 1050611 - RNA, 19 nt, Artificial Sequence
  Description of Artificial Sequence: Synthetic oligonucleotide
cuguggaggcaaauugacu

SEQ ID NO: 1050612 - RNA, 19 nt, Artificial Sequence
  Description of Artificial Sequence: Synthetic oligonucleotide
uggauucacgaggcccuaa

SEQ ID NO: 1050613 - RNA, 19 nt, Artificial Sequence
  Description of Artificial Sequence: Synthetic oligonucleotide
gcugacacgggucucuagu

SEQ ID NO: 1050614 - RNA, 19 nt, Artificial Sequence
  Description of Artificial Sequence: Synthetic oligonucleotide
ccccaggacuacuucaguc

SEQ ID NO: 1050615 - RNA, 19 nt, Artificial Sequence
  Description of Artificial Sequence: Synthetic oligonucleotide
  modified_base (4)..(4): a, c, u, g, unknown or other
ccunuuccccugugugcag

SEQ ID NO: 1050616 - RNA, 19 nt, Artificial Sequence
  Description of Artificial Sequence: Synthetic oligonucleotide
gugauggggugucuccucu

SEQ ID NO: 1050617 - RNA, 19 nt, Artificial Sequence
  Description of Artificial Sequence: Synthetic oligonucleotide
cugugaccccgaauucaca

SEQ ID NO: 1050618 - RNA, 19 nt, Artificial Sequence
  Description of Artificial Sequence: Synthetic oligonucleotide
ggcaagucuugcaaaccga

SEQ ID NO: 1050619 - RNA, 19 nt, Artificial Sequence
  Description of Artificial Sequence: Synthetic oligonucleotide
ccugugacuucuggcuucg

SEQ ID NO: 1050620 - RNA, 19 nt, Artificial Sequence
  Description of Artificial Sequence: Synthetic oligonucleotide
uuggauucacgaggcccua

SEQ ID NO: 1050621 - RNA, 19 nt, Artificial Sequence
  Description of Artificial Sequence: Synthetic oligonucleotide
agcuaugcguacacuccaa

SEQ ID NO: 1050622 - RNA, 19 nt, Artificial Sequence
  Description of Artificial Sequence: Synthetic oligonucleotide
agcccgccuggccucagaa

SEQ ID NO: 1050623 - RNA, 19 nt, Artificial Sequence
  Description of Artificial Sequence: Synthetic oligonucleotide
cucauccgguuuaaauccu

SEQ ID NO: 1050624 - RNA, 19 nt, Artificial Sequence
  Description of Artificial Sequence: Synthetic oligonucleotide
gccggaaccuauucaucuc

SEQ ID NO: 1050625 - RNA, 19 nt, Artificial Sequence
  Description of Artificial Sequence: Synthetic oligonucleotide
gggucucuagucccaucac

SEQ ID NO: 1050626 - RNA, 19 nt, Artificial Sequence
  Description of Artificial Sequence: Synthetic oligonucleotide
acccacgaacguggcugac

SEQ ID NO: 1050627 - RNA, 19 nt, Artificial Sequence
  Description of Artificial Sequence: Synthetic oligonucleotide
cugugguaggagagaccca

SEQ ID NO: 1050628 - RNA, 19 nt, Artificial Sequence
  Description of Artificial Sequence: Synthetic oligonucleotide
ggaauucguccagaaugga

SEQ ID NO: 1050629 - RNA, 19 nt, Artificial Sequence
  Description of Artificial Sequence: Synthetic oligonucleotide
ugccgacuggcuggacagc

SEQ ID NO: 1050630 - RNA, 19 nt, Artificial Sequence
  Description of Artificial Sequence: Synthetic oligonucleotide
augggucgcuguguuuaga

SEQ ID NO: 1050631 - RNA, 19 nt, Artificial Sequence
  Description of Artificial Sequence: Synthetic oligonucleotide
gagacccacgaacguggcu

SEQ ID NO: 1050632 - RNA, 19 nt, Artificial Sequence
  Description of Artificial Sequence: Synthetic oligonucleotide
uuaguucguugagcacuuu

SEQ ID NO: 1050633 - RNA, 19 nt, Artificial Sequence
  Description of Artificial Sequence: Synthetic oligonucleotide
acacgggucucuaguccca

SEQ ID NO: 1050634 - RNA, 19 nt, Artificial Sequence
  Description of Artificial Sequence: Synthetic oligonucleotide
cagcaccaguccucucgug

SEQ ID NO: 1050635 - RNA, 19 nt, Artificial Sequence
  Description of Artificial Sequence: Synthetic oligonucleotide
gggguccaugauaacccug

SEQ ID NO: 1050636 - RNA, 19 nt, Artificial Sequence
  Description of Artificial Sequence: Synthetic oligonucleotide
ggcuaccgguggcagcagc

SEQ ID NO: 1050637 - RNA, 19 nt, Artificial Sequence
  Description of Artificial Sequence: Synthetic oligonucleotide
ccucgauggcaagucuugc

SEQ ID NO: 1050638 - RNA, 19 nt, Artificial Sequence
  Description of Artificial Sequence: Synthetic oligonucleotide
uggcuaccgguggcagcag

SEQ ID NO: 1050639 - RNA, 19 nt, Artificial Sequence
  Description of Artificial Sequence: Synthetic oligonucleotide
aggggaccaaucagccgga

SEQ ID NO: 1050640 - RNA, 19 nt, Artificial Sequence
  Description of Artificial Sequence: Synthetic oligonucleotide
ucgagucgucuugggucgu

SEQ ID NO: 1050641 - RNA, 19 nt, Artificial Sequence
  Description of Artificial Sequence: Synthetic oligonucleotide
ccugcgugacaaagcccag

SEQ ID NO: 1050642 - RNA, 19 nt, Artificial Sequence
  Description of Artificial Sequence: Synthetic oligonucleotide
cagugccgaggucaggaua

SEQ ID NO: 1050643 - RNA, 19 nt, Artificial Sequence
  Description of Artificial Sequence: Synthetic oligonucleotide
cguggguugguuuucagau

SEQ ID NO: 1050644 - RNA, 19 nt, Artificial Sequence
  Description of Artificial Sequence: Synthetic oligonucleotide
caaucagccggaaccuauu

SEQ ID NO: 1050645 - RNA, 19 nt, Artificial Sequence
  Description of Artificial Sequence: Synthetic oligonucleotide
uccugacuccggguauuuu

SEQ ID NO: 1050646 - RNA, 19 nt, Artificial Sequence
  Description of Artificial Sequence: Synthetic oligonucleotide
auccugacuccggguauuu

SEQ ID NO: 1050647 - RNA, 19 nt, Artificial Sequence
  Description of Artificial Sequence: Synthetic oligonucleotide
ccucggaugggacacagau

SEQ ID NO: 1050648 - RNA, 19 nt, Artificial Sequence
  Description of Artificial Sequence: Synthetic oligonucleotide
gccucaguaauuuccuauu

SEQ ID NO: 1050649 - RNA, 19 nt, Artificial Sequence
  Description of Artificial Sequence: Synthetic oligonucleotide
caggacuacuucagucccu

SEQ ID NO: 1050650 - RNA, 19 nt, Artificial Sequence
  Description of Artificial Sequence: Synthetic oligonucleotide
gcguacacuccaagggcac

SEQ ID NO: 1050651 - RNA, 19 nt, Artificial Sequence
  Description of Artificial Sequence: Synthetic oligonucleotide
gauucccgggguccaugau

SEQ ID NO: 1050652 - RNA, 19 nt, Artificial Sequence
  Description of Artificial Sequence: Synthetic oligonucleotide
cgcuguggaggcaaauuga

SEQ ID NO: 1050653 - RNA, 19 nt, Artificial Sequence
  Description of Artificial Sequence: Synthetic oligonucleotide
  modified_base (8)..(8): a, c, u, g, unknown or other
gcauccunuuccccugugu

SEQ ID NO: 1050654 - RNA, 19 nt, Artificial Sequence
  Description of Artificial Sequence: Synthetic oligonucleotide
cacagccaacagacauaga

SEQ ID NO: 1050655 - RNA, 19 nt, Artificial Sequence
  Description of Artificial Sequence: Synthetic oligonucleotide
caccucgauggcaagucuu

SEQ ID NO: 1050656 - RNA, 19 nt, Artificial Sequence
  Description of Artificial Sequence: Synthetic oligonucleotide
gccucguuagauggcugac

SEQ ID NO: 1050657 - RNA, 19 nt, Artificial Sequence
  Description of Artificial Sequence: Synthetic oligonucleotide
gagcaccucggaagaugaa

SEQ ID NO: 1050658 - RNA, 19 nt, Artificial Sequence
  Description of Artificial Sequence: Synthetic oligonucleotide
agaacccggcccacaccaa

SEQ ID NO: 1050659 - RNA, 19 nt, Artificial Sequence
  Description of Artificial Sequence: Synthetic oligonucleotide
ccaaucagccggaaccuau

SEQ ID NO: 1050660 - RNA, 19 nt, Artificial Sequence
  Description of Artificial Sequence: Synthetic oligonucleotide
ccucguuagauggcugaca

SEQ ID NO: 1050661 - RNA, 19 nt, Artificial Sequence
  Description of Artificial Sequence: Synthetic oligonucleotide
cccuugggaagcaggacgu

SEQ ID NO: 1050662 - RNA, 19 nt, Artificial Sequence
  Description of Artificial Sequence: Synthetic oligonucleotide
ggcucuuaaaugggucgcu

SEQ ID NO: 1050663 - RNA, 19 nt, Artificial Sequence
  Description of Artificial Sequence: Synthetic oligonucleotide
cccgaauucacaccucgau

SEQ ID NO: 1050664 - RNA, 19 nt, Artificial Sequence
  Description of Artificial Sequence: Synthetic oligonucleotide
gccgaggucaggauacagu

SEQ ID NO: 1050665 - RNA, 19 nt, Artificial Sequence
  Description of Artificial Sequence: Synthetic oligonucleotide
gugccgaggucaggauaca

SEQ ID NO: 1050666 - RNA, 19 nt, Artificial Sequence
  Description of Artificial Sequence: Synthetic oligonucleotide
ccccgaauucacaccucga

SEQ ID NO: 1050667 - RNA, 19 nt, Artificial Sequence
  Description of Artificial Sequence: Synthetic oligonucleotide
ccucagugccgaggucagg

SEQ ID NO: 1050668 - RNA, 19 nt, Artificial Sequence
  Description of Artificial Sequence: Synthetic oligonucleotide
ccacaccaagcagaaagcu

SEQ ID NO: 1050669 - RNA, 19 nt, Artificial Sequence
  Description of Artificial Sequence: Synthetic oligonucleotide
ccgauacugcagagaggca

SEQ ID NO: 1050670 - RNA, 19 nt, Artificial Sequence
  Description of Artificial Sequence: Synthetic oligonucleotide
acuacccaucagagcucuu

SEQ ID NO: 1050671 - RNA, 19 nt, Artificial Sequence
  Description of Artificial Sequence: Synthetic oligonucleotide
cccacgaacguggcugaca

SEQ ID NO: 1050672 - RNA, 19 nt, Artificial Sequence
  Description of Artificial Sequence: Synthetic oligonucleotide
ccugccucguuagauggcu

SEQ ID NO: 1050673 - RNA, 19 nt, Artificial Sequence
  Description of Artificial Sequence: Synthetic oligonucleotide
ggacuacuucagucccugu

SEQ ID NO: 1050674 - RNA, 19 nt, Artificial Sequence
  Description of Artificial Sequence: Synthetic oligonucleotide
gcacccugccccaggacua

SEQ ID NO: 1050675 - RNA, 19 nt, Artificial Sequence
  Description of Artificial Sequence: Synthetic oligonucleotide
cagauaugccugccucguu

SEQ ID NO: 1050676 - RNA, 19 nt, Artificial Sequence
  Description of Artificial Sequence: Synthetic oligonucleotide
cagugggaaaggggaccaa

SEQ ID NO: 1050677 - RNA, 19 nt, Artificial Sequence
  Description of Artificial Sequence: Synthetic oligonucleotide
cuggaccgcuguggaggca

SEQ ID NO: 1050678 - RNA, 19 nt, Artificial Sequence
  Description of Artificial Sequence: Synthetic oligonucleotide
cagcagcgugguucucacu

SEQ ID NO: 1050679 - RNA, 19 nt, Artificial Sequence
  Description of Artificial Sequence: Synthetic oligonucleotide
cacgggucucuagucccau

SEQ ID NO: 1050680 - RNA, 19 nt, Artificial Sequence
  Description of Artificial Sequence: Synthetic oligonucleotide
caccagugauggggugucu

SEQ ID NO: 1050681 - RNA, 19 nt, Artificial Sequence
  Description of Artificial Sequence: Synthetic oligonucleotide
cgagucgucuugggucguc

SEQ ID NO: 1050682 - RNA, 19 nt, Artificial Sequence
  Description of Artificial Sequence: Synthetic oligonucleotide
ccaugcugugaccccgaau

SEQ ID NO: 1050683 - RNA, 19 nt, Artificial Sequence
  Description of Artificial Sequence: Synthetic oligonucleotide
ggcccugaccacagccccu

SEQ ID NO: 1050684 - RNA, 19 nt, Artificial Sequence
  Description of Artificial Sequence: Synthetic oligonucleotide
ggcccacaccaagcagaaa

SEQ ID NO: 1050685 - RNA, 19 nt, Artificial Sequence
  Description of Artificial Sequence: Synthetic oligonucleotide
gcccugaccacagccccuu

SEQ ID NO: 1050686 - RNA, 19 nt, Artificial Sequence
  Description of Artificial Sequence: Synthetic oligonucleotide
ccccuuggucagagcuuuu

SEQ ID NO: 1050687 - RNA, 19 nt, Artificial Sequence
  Description of Artificial Sequence: Synthetic oligonucleotide
aauaugaguggauuaaggc

SEQ ID NO: 1050688 - RNA, 19 nt, Artificial Sequence
  Description of Artificial Sequence: Synthetic oligonucleotide
uuaaccaagacauauaaac

SEQ ID NO: 1050689 - RNA, 19 nt, Artificial Sequence
  Description of Artificial Sequence: Synthetic oligonucleotide
uuaaccgugaacaugaucu

SEQ ID NO: 1050690 - RNA, 19 nt, Artificial Sequence
  Description of Artificial Sequence: Synthetic oligonucleotide
aaaauaauagcucaggguu

SEQ ID NO: 1050691 - RNA, 19 nt, Artificial Sequence
  Description of Artificial Sequence: Synthetic oligonucleotide
gagauuacaaucuuggugc

SEQ ID NO: 1050692 - RNA, 19 nt, Artificial Sequence
  Description of Artificial Sequence: Synthetic oligonucleotide
aauauauggccuuaacauc

SEQ ID NO: 1050693 - RNA, 19 nt, Artificial Sequence
  Description of Artificial Sequence: Synthetic oligonucleotide
aauauaguuuuauuaacca

SEQ ID NO: 1050694 - RNA, 19 nt, Artificial Sequence
  Description of Artificial Sequence: Synthetic oligonucleotide
gagacuaauaguuugucgg

SEQ ID NO: 1050695 - RNA, 19 nt, Artificial Sequence
  Description of Artificial Sequence: Synthetic oligonucleotide
aguggauuaaggcaaaagg

SEQ ID NO: 1050696 - RNA, 19 nt, Artificial Sequence
  Description of Artificial Sequence: Synthetic oligonucleotide
aaagacuuaaccgugaaca

SEQ ID NO: 1050697 - RNA, 19 nt, Artificial Sequence
  Description of Artificial Sequence: Synthetic oligonucleotide
aacgauacuacacuaacga

SEQ ID NO: 1050698 - RNA, 19 nt, Artificial Sequence
  Description of Artificial Sequence: Synthetic oligonucleotide
uuauuaaccagccauuaug

SEQ ID NO: 1050699 - RNA, 19 nt, Artificial Sequence
  Description of Artificial Sequence: Synthetic oligonucleotide
aguauuguuaagcacaaug

SEQ ID NO: 1050700 - RNA, 19 nt, Artificial Sequence
  Description of Artificial Sequence: Synthetic oligonucleotide
ugagauuacaaucuuggug

SEQ ID NO: 1050701 - RNA, 19 nt, Artificial Sequence
  Description of Artificial Sequence: Synthetic oligonucleotide
aauaauugggcaauaaucu

SEQ ID NO: 1050702 - RNA, 19 nt, Artificial Sequence
  Description of Artificial Sequence: Synthetic oligonucleotide
caugagauuacaaucuugg

SEQ ID NO: 1050703 - RNA, 19 nt, Artificial Sequence
  Description of Artificial Sequence: Synthetic oligonucleotide
aaccaagacauauaaaccu

SEQ ID NO: 1050704 - RNA, 19 nt, Artificial Sequence
  Description of Artificial Sequence: Synthetic oligonucleotide
augguagggauacuuaucc

SEQ ID NO: 1050705 - RNA, 19 nt, Artificial Sequence
  Description of Artificial Sequence: Synthetic oligonucleotide
aauaugaugcggcuuaugu

SEQ ID NO: 1050706 - RNA, 19 nt, Artificial Sequence
  Description of Artificial Sequence: Synthetic oligonucleotide
uacacuaacgaugagauga

SEQ ID NO: 1050707 - RNA, 19 nt, Artificial Sequence
  Description of Artificial Sequence: Synthetic oligonucleotide
uguagaacagucuauggug

SEQ ID NO: 1050708 - RNA, 19 nt, Artificial Sequence
  Description of Artificial Sequence: Synthetic oligonucleotide
agaaucuuuaaacaaucuc

SEQ ID NO: 1050709 - RNA, 19 nt, Artificial Sequence
  Description of Artificial Sequence: Synthetic oligonucleotide
ucgugaauagaaauggucc

SEQ ID NO: 1050710 - RNA, 19 nt, Artificial Sequence
  Description of Artificial Sequence: Synthetic oligonucleotide
uauacauagccacucaugu

SEQ ID NO: 1050711 - RNA, 19 nt, Artificial Sequence
  Description of Artificial Sequence: Synthetic oligonucleotide
uuauuaaaaccugauaaug

SEQ ID NO: 1050712 - RNA, 19 nt, Artificial Sequence
  Description of Artificial Sequence: Synthetic oligonucleotide
auuaguauuucuuggcuag

SEQ ID NO: 1050713 - RNA, 19 nt, Artificial Sequence
  Description of Artificial Sequence: Synthetic oligonucleotide
uccuaugucaucauagagc

SEQ ID NO: 1050714 - RNA, 19 nt, Artificial Sequence
  Description of Artificial Sequence: Synthetic oligonucleotide
aaaacaggaacgauacuac

SEQ ID NO: 1050715 - RNA, 19 nt, Artificial Sequence
  Description of Artificial Sequence: Synthetic oligonucleotide
uaugaguggauuaaggcaa

SEQ ID NO: 1050716 - RNA, 19 nt, Artificial Sequence
  Description of Artificial Sequence: Synthetic oligonucleotide
gacccauuaauauauggcc

SEQ ID NO: 1050717 - RNA, 19 nt, Artificial Sequence
  Description of Artificial Sequence: Synthetic oligonucleotide
uggauuaaggcaaaaggac

SEQ ID NO: 1050718 - RNA, 19 nt, Artificial Sequence
  Description of Artificial Sequence: Synthetic oligonucleotide
uauuguuaagcacaaugga

SEQ ID NO: 1050719 - RNA, 19 nt, Artificial Sequence
  Description of Artificial Sequence: Synthetic oligonucleotide
agacauauaaaccuaagua

SEQ ID NO: 1050720 - RNA, 19 nt, Artificial Sequence
  Description of Artificial Sequence: Synthetic oligonucleotide
uguauaagaagauaauaua

SEQ ID NO: 1050721 - RNA, 19 nt, Artificial Sequence
  Description of Artificial Sequence: Synthetic oligonucleotide
uauuaaccagccauuaugu

SEQ ID NO: 1050722 - RNA, 19 nt, Artificial Sequence
  Description of Artificial Sequence: Synthetic oligonucleotide
uacaaguugucccuggacc

SEQ ID NO: 1050723 - RNA, 19 nt, Artificial Sequence
  Description of Artificial Sequence: Synthetic oligonucleotide
aauagaaaugguccagaca

SEQ ID NO: 1050724 - RNA, 19 nt, Artificial Sequence
  Description of Artificial Sequence: Synthetic oligonucleotide
ggaacaaugaaaugguagg

SEQ ID NO: 1050725 - RNA, 19 nt, Artificial Sequence
  Description of Artificial Sequence: Synthetic oligonucleotide
ugacccauuaauauauggc

SEQ ID NO: 1050726 - RNA, 19 nt, Artificial Sequence
  Description of Artificial Sequence: Synthetic oligonucleotide
gaugcuucauuaaugaaug

SEQ ID NO: 1050727 - RNA, 19 nt, Artificial Sequence
  Description of Artificial Sequence: Synthetic oligonucleotide
guauuguuaagcacaaugg

SEQ ID NO: 1050728 - RNA, 19 nt, Artificial Sequence
  Description of Artificial Sequence: Synthetic oligonucleotide
uuuguaaacucuccauugc

SEQ ID NO: 1050729 - RNA, 19 nt, Artificial Sequence
  Description of Artificial Sequence: Synthetic oligonucleotide
ugaucggcaacauugagaa

SEQ ID NO: 1050730 - RNA, 19 nt, Artificial Sequence
  Description of Artificial Sequence: Synthetic oligonucleotide
uaauugggcaauaaucuac

SEQ ID NO: 1050731 - RNA, 19 nt, Artificial Sequence
  Description of Artificial Sequence: Synthetic oligonucleotide
auaugaguggauuaaggca

SEQ ID NO: 1050732 - RNA, 19 nt, Artificial Sequence
  Description of Artificial Sequence: Synthetic oligonucleotide
uggaaagucuccuauguca

SEQ ID NO: 1050733 - RNA, 19 nt, Artificial Sequence
  Description of Artificial Sequence: Synthetic oligonucleotide
ucuacuuagucuuuguaaa

SEQ ID NO: 1050734 - RNA, 19 nt, Artificial Sequence
  Description of Artificial Sequence: Synthetic oligonucleotide
acuaauaguuugucggacg

SEQ ID NO: 1050735 - RNA, 19 nt, Artificial Sequence
  Description of Artificial Sequence: Synthetic oligonucleotide
uaaaagagccuccaauucu

SEQ ID NO: 1050736 - RNA, 19 nt, Artificial Sequence
  Description of Artificial Sequence: Synthetic oligonucleotide
uuuaaaagagccuccaauu

SEQ ID NO: 1050737 - RNA, 19 nt, Artificial Sequence
  Description of Artificial Sequence: Synthetic oligonucleotide
ucauauucuggauugaaua

SEQ ID NO: 1050738 - RNA, 19 nt, Artificial Sequence
  Description of Artificial Sequence: Synthetic oligonucleotide
aaugacacgcaucaagaau

SEQ ID NO: 1050739 - RNA, 19 nt, Artificial Sequence
  Description of Artificial Sequence: Synthetic oligonucleotide
cuguguguagauuauuucc

SEQ ID NO: 1050740 - RNA, 19 nt, Artificial Sequence
  Description of Artificial Sequence: Synthetic oligonucleotide
aaaguguacaggcugcaga

SEQ ID NO: 1050741 - RNA, 19 nt, Artificial Sequence
  Description of Artificial Sequence: Synthetic oligonucleotide
aaaaucaccgucgugaaua

SEQ ID NO: 1050742 - RNA, 19 nt, Artificial Sequence
  Description of Artificial Sequence: Synthetic oligonucleotide
gaauaugaguggauuaagg

SEQ ID NO: 1050743 - RNA, 19 nt, Artificial Sequence
  Description of Artificial Sequence: Synthetic oligonucleotide
uucgugacaaucaggagac

SEQ ID NO: 1050744 - RNA, 19 nt, Artificial Sequence
  Description of Artificial Sequence: Synthetic oligonucleotide
cacaaugugaaauacuguc

SEQ ID NO: 1050745 - RNA, 19 nt, Artificial Sequence
  Description of Artificial Sequence: Synthetic oligonucleotide
uuaaccagccauuauguaa

SEQ ID NO: 1050746 - RNA, 19 nt, Artificial Sequence
  Description of Artificial Sequence: Synthetic oligonucleotide
gucacuuggagucaggagc

SEQ ID NO: 1050747 - RNA, 19 nt, Artificial Sequence
  Description of Artificial Sequence: Synthetic oligonucleotide
aauaguuugucggacgaug

SEQ ID NO: 1050748 - RNA, 19 nt, Artificial Sequence
  Description of Artificial Sequence: Synthetic oligonucleotide
aacagucuauggugcaggc

SEQ ID NO: 1050749 - RNA, 19 nt, Artificial Sequence
  Description of Artificial Sequence: Synthetic oligonucleotide
ugugaauccaguagaucag

SEQ ID NO: 1050750 - RNA, 19 nt, Artificial Sequence
  Description of Artificial Sequence: Synthetic oligonucleotide
uaaagaaguagugaucggc

SEQ ID NO: 1050751 - RNA, 19 nt, Artificial Sequence
  Description of Artificial Sequence: Synthetic oligonucleotide
uugaauaugaagagcugac

SEQ ID NO: 1050752 - RNA, 19 nt, Artificial Sequence
  Description of Artificial Sequence: Synthetic oligonucleotide
gacacgaaaaucaccgucg

SEQ ID NO: 1050753 - RNA, 19 nt, Artificial Sequence
  Description of Artificial Sequence: Synthetic oligonucleotide
cauauaaaccuaaguagac

SEQ ID NO: 1050754 - RNA, 19 nt, Artificial Sequence
  Description of Artificial Sequence: Synthetic oligonucleotide
uucauuauuaaaaccugau

SEQ ID NO: 1050755 - RNA, 19 nt, Artificial Sequence
  Description of Artificial Sequence: Synthetic oligonucleotide
gauacuacacuaacgauga

SEQ ID NO: 1050756 - RNA, 19 nt, Artificial Sequence
  Description of Artificial Sequence: Synthetic oligonucleotide
uuguagaacagucuauggu

SEQ ID NO: 1050757 - RNA, 19 nt, Artificial Sequence
  Description of Artificial Sequence: Synthetic oligonucleotide
uuguuaagcacaauggauu

SEQ ID NO: 1050758 - RNA, 19 nt, Artificial Sequence
  Description of Artificial Sequence: Synthetic oligonucleotide
ugguauguuacccaagaaa

SEQ ID NO: 1050759 - RNA, 19 nt, Artificial Sequence
  Description of Artificial Sequence: Synthetic oligonucleotide
uuagccaugagauuacaau

SEQ ID NO: 1050760 - RNA, 19 nt, Artificial Sequence
  Description of Artificial Sequence: Synthetic oligonucleotide
gaggauauaagcacccagg

SEQ ID NO: 1050761 - RNA, 19 nt, Artificial Sequence
  Description of Artificial Sequence: Synthetic oligonucleotide
auauuaguauuucuuggcu

SEQ ID NO: 1050762 - RNA, 19 nt, Artificial Sequence
  Description of Artificial Sequence: Synthetic oligonucleotide
auguauuagauuguucagg

SEQ ID NO: 1050763 - RNA, 19 nt, Artificial Sequence
  Description of Artificial Sequence: Synthetic oligonucleotide
cccuuaaugaauaugagug

SEQ ID NO: 1050764 - RNA, 19 nt, Artificial Sequence
  Description of Artificial Sequence: Synthetic oligonucleotide
uaaccagccauuauguaaa

SEQ ID NO: 1050765 - RNA, 19 nt, Artificial Sequence
  Description of Artificial Sequence: Synthetic oligonucleotide
uguaaacucuccauugcac

SEQ ID NO: 1050766 - RNA, 19 nt, Artificial Sequence
  Description of Artificial Sequence: Synthetic oligonucleotide
cuuguagaacagucuaugg

SEQ ID NO: 1050767 - RNA, 19 nt, Artificial Sequence
  Description of Artificial Sequence: Synthetic oligonucleotide
uauuucuuggcuagucuca

SEQ ID NO: 1050768 - RNA, 19 nt, Artificial Sequence
  Description of Artificial Sequence: Synthetic oligonucleotide
aacgaugagaugaauccag

SEQ ID NO: 1050769 - RNA, 19 nt, Artificial Sequence
  Description of Artificial Sequence: Synthetic oligonucleotide
uauguauaagaagauaaua

SEQ ID NO: 1050770 - RNA, 19 nt, Artificial Sequence
  Description of Artificial Sequence: Synthetic oligonucleotide
aucauauacauagccacuc

SEQ ID NO: 1050771 - RNA, 19 nt, Artificial Sequence
  Description of Artificial Sequence: Synthetic oligonucleotide
cucucgagagacuugauuc

SEQ ID NO: 1050772 - RNA, 19 nt, Artificial Sequence
  Description of Artificial Sequence: Synthetic oligonucleotide
ugagcugacccauuaauau

SEQ ID NO: 1050773 - RNA, 19 nt, Artificial Sequence
  Description of Artificial Sequence: Synthetic oligonucleotide
acgauguuguccucuggcc

SEQ ID NO: 1050774 - RNA, 19 nt, Artificial Sequence
  Description of Artificial Sequence: Synthetic oligonucleotide
uugcuauguaucuuggcug

SEQ ID NO: 1050775 - RNA, 19 nt, Artificial Sequence
  Description of Artificial Sequence: Synthetic oligonucleotide
uauuuaauaauugggcaau

SEQ ID NO: 1050776 - RNA, 19 nt, Artificial Sequence
  Description of Artificial Sequence: Synthetic oligonucleotide
acgaaaaucaccgucguga

SEQ ID NO: 1050777 - RNA, 19 nt, Artificial Sequence
  Description of Artificial Sequence: Synthetic oligonucleotide
acuaacgaugagaugaauc

SEQ ID NO: 1050778 - RNA, 19 nt, Artificial Sequence
  Description of Artificial Sequence: Synthetic oligonucleotide
cuuacuguagccucucaac

SEQ ID NO: 1050779 - RNA, 19 nt, Artificial Sequence
  Description of Artificial Sequence: Synthetic oligonucleotide
aagaaguagaggauauaag

SEQ ID NO: 1050780 - RNA, 19 nt, Artificial Sequence
  Description of Artificial Sequence: Synthetic oligonucleotide
auauggaguaaagaaguag

SEQ ID NO: 1050781 - RNA, 19 nt, Artificial Sequence
  Description of Artificial Sequence: Synthetic oligonucleotide
auuuucccucaguuuaucg

SEQ ID NO: 1050782 - RNA, 19 nt, Artificial Sequence
  Description of Artificial Sequence: Synthetic oligonucleotide
agaggauauaagcacccag

SEQ ID NO: 1050783 - RNA, 19 nt, Artificial Sequence
  Description of Artificial Sequence: Synthetic oligonucleotide
aaaucaccgucgugaauag

SEQ ID NO: 1050784 - RNA, 19 nt, Artificial Sequence
  Description of Artificial Sequence: Synthetic oligonucleotide
cuuauguaugcgcuuguag

SEQ ID NO: 1050785 - RNA, 19 nt, Artificial Sequence
  Description of Artificial Sequence: Synthetic oligonucleotide
gguauauaugguaagggag

SEQ ID NO: 1050786 - RNA, 19 nt, Artificial Sequence
  Description of Artificial Sequence: Synthetic oligonucleotide
accacuauugcagagccag

SEQ ID NO: 1050787 - RNA, 19 nt, Artificial Sequence
  Description of Artificial Sequence: Synthetic oligonucleotide
auguauaagaagauaauau

SEQ ID NO: 1050788 - RNA, 19 nt, Artificial Sequence
  Description of Artificial Sequence: Synthetic oligonucleotide
uuaucgucaggacuacucu

SEQ ID NO: 1050789 - RNA, 19 nt, Artificial Sequence
  Description of Artificial Sequence: Synthetic oligonucleotide
aggaacaaugaaaugguag

SEQ ID NO: 1050790 - RNA, 19 nt, Artificial Sequence
  Description of Artificial Sequence: Synthetic oligonucleotide
uuuucccucaguuuaucgu

SEQ ID NO: 1050791 - RNA, 19 nt, Artificial Sequence
  Description of Artificial Sequence: Synthetic oligonucleotide
ugaauaugaguggauuaag

SEQ ID NO: 1050792 - RNA, 19 nt, Artificial Sequence
  Description of Artificial Sequence: Synthetic oligonucleotide
gaauagaaaugguccagac

SEQ ID NO: 1050793 - RNA, 19 nt, Artificial Sequence
  Description of Artificial Sequence: Synthetic oligonucleotide
uaugguaagggagacucug

SEQ ID NO: 1050794 - RNA, 19 nt, Artificial Sequence
  Description of Artificial Sequence: Synthetic oligonucleotide
acuuaguugcuauguaucu

SEQ ID NO: 1050795 - RNA, 19 nt, Artificial Sequence
  Description of Artificial Sequence: Synthetic oligonucleotide
aucuacuuagucuuuguaa

SEQ ID NO: 1050796 - RNA, 19 nt, Artificial Sequence
  Description of Artificial Sequence: Synthetic oligonucleotide
gaacgauacuacacuaacg

SEQ ID NO: 1050797 - RNA, 19 nt, Artificial Sequence
  Description of Artificial Sequence: Synthetic oligonucleotide
gacuuaaccgugaacauga

SEQ ID NO: 1050798 - RNA, 19 nt, Artificial Sequence
  Description of Artificial Sequence: Synthetic oligonucleotide
ucauauacauagccacuca

SEQ ID NO: 1050799 - RNA, 19 nt, Artificial Sequence
  Description of Artificial Sequence: Synthetic oligonucleotide
cauagagcuuacuguagcc

SEQ ID NO: 1050800 - RNA, 19 nt, Artificial Sequence
  Description of Artificial Sequence: Synthetic oligonucleotide
gacgauguuguccucuggc

SEQ ID NO: 1050801 - RNA, 19 nt, Artificial Sequence
  Description of Artificial Sequence: Synthetic oligonucleotide
gauaaugccccagagagua

SEQ ID NO: 1050802 - RNA, 19 nt, Artificial Sequence
  Description of Artificial Sequence: Synthetic oligonucleotide
gguagggauacuuauccag

SEQ ID NO: 1050803 - RNA, 19 nt, Artificial Sequence
  Description of Artificial Sequence: Synthetic oligonucleotide
aaggcgccuauguauaaga

SEQ ID NO: 1050804 - RNA, 19 nt, Artificial Sequence
  Description of Artificial Sequence: Synthetic oligonucleotide
aagacuuaaccgugaacau

SEQ ID NO: 1050805 - RNA, 19 nt, Artificial Sequence
  Description of Artificial Sequence: Synthetic oligonucleotide
aguugaacaaaguccugca

SEQ ID NO: 1050806 - RNA, 19 nt, Artificial Sequence
  Description of Artificial Sequence: Synthetic oligonucleotide
uuggcuagucucaguauug

SEQ ID NO: 1050807 - RNA, 19 nt, Artificial Sequence
  Description of Artificial Sequence: Synthetic oligonucleotide
ugaauucuccuucugccau

SEQ ID NO: 1050808 - RNA, 19 nt, Artificial Sequence
  Description of Artificial Sequence: Synthetic oligonucleotide
uaagggagacucuggagga

SEQ ID NO: 1050809 - RNA, 19 nt, Artificial Sequence
  Description of Artificial Sequence: Synthetic oligonucleotide
ccacucauguauuagauug

SEQ ID NO: 1050810 - RNA, 19 nt, Artificial Sequence
  Description of Artificial Sequence: Synthetic oligonucleotide
aaagggguauauaugguaa

SEQ ID NO: 1050811 - RNA, 19 nt, Artificial Sequence
  Description of Artificial Sequence: Synthetic oligonucleotide
gaaacaacagguguauguc

SEQ ID NO: 1050812 - RNA, 19 nt, Artificial Sequence
  Description of Artificial Sequence: Synthetic oligonucleotide
ugaagagcugacauuuaaa

SEQ ID NO: 1050813 - RNA, 19 nt, Artificial Sequence
  Description of Artificial Sequence: Synthetic oligonucleotide
guauacaaguugucccugg

SEQ ID NO: 1050814 - RNA, 19 nt, Artificial Sequence
  Description of Artificial Sequence: Synthetic oligonucleotide
ugucggacgauguuguccu

SEQ ID NO: 1050815 - RNA, 19 nt, Artificial Sequence
  Description of Artificial Sequence: Synthetic oligonucleotide
uuucccucaguuuaucguc

SEQ ID NO: 1050816 - RNA, 19 nt, Artificial Sequence
  Description of Artificial Sequence: Synthetic oligonucleotide
uguuaagcacaauggauuu

SEQ ID NO: 1050817 - RNA, 19 nt, Artificial Sequence
  Description of Artificial Sequence: Synthetic oligonucleotide
aaucauauacauagccacu

SEQ ID NO: 1050818 - RNA, 19 nt, Artificial Sequence
  Description of Artificial Sequence: Synthetic oligonucleotide
guagggauacuuauccagg

SEQ ID NO: 1050819 - RNA, 19 nt, Artificial Sequence
  Description of Artificial Sequence: Synthetic oligonucleotide
ucuccuaugucaucauaga

SEQ ID NO: 1050820 - RNA, 19 nt, Artificial Sequence
  Description of Artificial Sequence: Synthetic oligonucleotide
auauaaaccuaaguagaca

SEQ ID NO: 1050821 - RNA, 19 nt, Artificial Sequence
  Description of Artificial Sequence: Synthetic oligonucleotide
acuacacuaacgaugagau

SEQ ID NO: 1050822 - RNA, 19 nt, Artificial Sequence
  Description of Artificial Sequence: Synthetic oligonucleotide
uguaucuuggcugugugua

SEQ ID NO: 1050823 - RNA, 19 nt, Artificial Sequence
  Description of Artificial Sequence: Synthetic oligonucleotide
ggagacuaauaguuugucg

SEQ ID NO: 1050824 - RNA, 19 nt, Artificial Sequence
  Description of Artificial Sequence: Synthetic oligonucleotide
ugcuauguaucuuggcugu

SEQ ID NO: 1050825 - RNA, 19 nt, Artificial Sequence
  Description of Artificial Sequence: Synthetic oligonucleotide
uucuuggcuagucucagua

SEQ ID NO: 1050826 - RNA, 19 nt, Artificial Sequence
  Description of Artificial Sequence: Synthetic oligonucleotide
aguagaucagcaugucugu

SEQ ID NO: 1050827 - RNA, 19 nt, Artificial Sequence
  Description of Artificial Sequence: Synthetic oligonucleotide
cuuaaugaauaugagugga

SEQ ID NO: 1050828 - RNA, 19 nt, Artificial Sequence
  Description of Artificial Sequence: Synthetic oligonucleotide
agacuaauaguuugucgga

SEQ ID NO: 1050829 - RNA, 19 nt, Artificial Sequence
  Description of Artificial Sequence: Synthetic oligonucleotide
uugggcaauaaucuacuua

SEQ ID NO: 1050830 - RNA, 19 nt, Artificial Sequence
  Description of Artificial Sequence: Synthetic oligonucleotide
uaagcacccagguucguga

SEQ ID NO: 1050831 - RNA, 19 nt, Artificial Sequence
  Description of Artificial Sequence: Synthetic oligonucleotide
ucucaguauuguuaagcac

SEQ ID NO: 1050832 - RNA, 19 nt, Artificial Sequence
  Description of Artificial Sequence: Synthetic oligonucleotide
auuguuaagcacaauggau

SEQ ID NO: 1050833 - RNA, 19 nt, Artificial Sequence
  Description of Artificial Sequence: Synthetic oligonucleotide
guauauaugguaagggaga

SEQ ID NO: 1050834 - RNA, 19 nt, Artificial Sequence
  Description of Artificial Sequence: Synthetic oligonucleotide
uccccuuaaugaauaugag

SEQ ID NO: 1050835 - RNA, 19 nt, Artificial Sequence
  Description of Artificial Sequence: Synthetic oligonucleotide
guaaacucuccauugcaca

SEQ ID NO: 1050836 - RNA, 19 nt, Artificial Sequence
  Description of Artificial Sequence: Synthetic oligonucleotide
aaccuaaguagacaaccuu

SEQ ID NO: 1050837 - RNA, 19 nt, Artificial Sequence
  Description of Artificial Sequence: Synthetic oligonucleotide
gacacauuagccaugagau

SEQ ID NO: 1050838 - RNA, 19 nt, Artificial Sequence
  Description of Artificial Sequence: Synthetic oligonucleotide
gaaguagugaucggcaaca

SEQ ID NO: 1050839 - RNA, 19 nt, Artificial Sequence
  Description of Artificial Sequence: Synthetic oligonucleotide
agggguauauaugguaagg

SEQ ID NO: 1050840 - RNA, 19 nt, Artificial Sequence
  Description of Artificial Sequence: Synthetic oligonucleotide
aaaccuaaguagacaaccu

SEQ ID NO: 1050841 - RNA, 19 nt, Artificial Sequence
  Description of Artificial Sequence: Synthetic oligonucleotide
gauugaauaugaagagcug

SEQ ID NO: 1050842 - RNA, 19 nt, Artificial Sequence
  Description of Artificial Sequence: Synthetic oligonucleotide
auaauugggcaauaaucua

SEQ ID NO: 1050843 - RNA, 19 nt, Artificial Sequence
  Description of Artificial Sequence: Synthetic oligonucleotide
augcggcuuauguaugcgc

SEQ ID NO: 1050844 - RNA, 19 nt, Artificial Sequence
  Description of Artificial Sequence: Synthetic oligonucleotide
gucuccuaugucaucauag

SEQ ID NO: 1050845 - RNA, 19 nt, Artificial Sequence
  Description of Artificial Sequence: Synthetic oligonucleotide
aguuugucggacgauguug

SEQ ID NO: 1050846 - RNA, 19 nt, Artificial Sequence
  Description of Artificial Sequence: Synthetic oligonucleotide
aaccugauaaugccccaga

SEQ ID NO: 1050847 - RNA, 19 nt, Artificial Sequence
  Description of Artificial Sequence: Synthetic oligonucleotide
uggauacacauauggagua

SEQ ID NO: 1050848 - RNA, 19 nt, Artificial Sequence
  Description of Artificial Sequence: Synthetic oligonucleotide
acuuggaaagucuccuaug

SEQ ID NO: 1050849 - RNA, 19 nt, Artificial Sequence
  Description of Artificial Sequence: Synthetic oligonucleotide
uaaugccccagagaguaag

SEQ ID NO: 1050850 - RNA, 19 nt, Artificial Sequence
  Description of Artificial Sequence: Synthetic oligonucleotide
uguagauuauuuccuuauu

SEQ ID NO: 1050851 - RNA, 19 nt, Artificial Sequence
  Description of Artificial Sequence: Synthetic oligonucleotide
uggggaucuuccaaauaug

SEQ ID NO: 1050852 - RNA, 19 nt, Artificial Sequence
  Description of Artificial Sequence: Synthetic oligonucleotide
ugcggcuuauguaugcgcu

SEQ ID NO: 1050853 - RNA, 19 nt, Artificial Sequence
  Description of Artificial Sequence: Synthetic oligonucleotide
ccuuaaugaauaugagugg

SEQ ID NO: 1050854 - RNA, 19 nt, Artificial Sequence
  Description of Artificial Sequence: Synthetic oligonucleotide
cuccuaugucaucauagag

SEQ ID NO: 1050855 - RNA, 19 nt, Artificial Sequence
  Description of Artificial Sequence: Synthetic oligonucleotide
ugcgcuuguagaacagucu

SEQ ID NO: 1050856 - RNA, 19 nt, Artificial Sequence
  Description of Artificial Sequence: Synthetic oligonucleotide
augaauaugaguggauuaa

SEQ ID NO: 1050857 - RNA, 19 nt, Artificial Sequence
  Description of Artificial Sequence: Synthetic oligonucleotide
uguguaguggaaagacaaa

SEQ ID NO: 1050858 - RNA, 19 nt, Artificial Sequence
  Description of Artificial Sequence: Synthetic oligonucleotide
ugaugcggcuuauguaugc

SEQ ID NO: 1050859 - RNA, 19 nt, Artificial Sequence
  Description of Artificial Sequence: Synthetic oligonucleotide
acugagugggccuuucccu

SEQ ID NO: 1050860 - RNA, 19 nt, Artificial Sequence
  Description of Artificial Sequence: Synthetic oligonucleotide
ugcaaguauacaaguuguc

SEQ ID NO: 1050861 - RNA, 19 nt, Artificial Sequence
  Description of Artificial Sequence: Synthetic oligonucleotide
cuaauaguuugucggacga

SEQ ID NO: 1050862 - RNA, 19 nt, Artificial Sequence
  Description of Artificial Sequence: Synthetic oligonucleotide
ugacacgcaucaagaaucu

SEQ ID NO: 1050863 - RNA, 19 nt, Artificial Sequence
  Description of Artificial Sequence: Synthetic oligonucleotide
cacuauugcagagccagcc

SEQ ID NO: 1050864 - RNA, 19 nt, Artificial Sequence
  Description of Artificial Sequence: Synthetic oligonucleotide
ggcaauaaucuacuuaguc

SEQ ID NO: 1050865 - RNA, 19 nt, Artificial Sequence
  Description of Artificial Sequence: Synthetic oligonucleotide
ucugcugguugcaaguaua

SEQ ID NO: 1050866 - RNA, 19 nt, Artificial Sequence
  Description of Artificial Sequence: Synthetic oligonucleotide
aaauaugaugcggcuuaug

SEQ ID NO: 1050867 - RNA, 19 nt, Artificial Sequence
  Description of Artificial Sequence: Synthetic oligonucleotide
ggaacgauacuacacuaac

SEQ ID NO: 1050868 - RNA, 19 nt, Artificial Sequence
  Description of Artificial Sequence: Synthetic oligonucleotide
auuagauuguucaggcuga

SEQ ID NO: 1050869 - RNA, 19 nt, Artificial Sequence
  Description of Artificial Sequence: Synthetic oligonucleotide
acuacucuucagcaugaca

SEQ ID NO: 1050870 - RNA, 19 nt, Artificial Sequence
  Description of Artificial Sequence: Synthetic oligonucleotide
aggcugauguuccuaguug

SEQ ID NO: 1050871 - RNA, 19 nt, Artificial Sequence
  Description of Artificial Sequence: Synthetic oligonucleotide
uugucggacgauguugucc

SEQ ID NO: 1050872 - RNA, 19 nt, Artificial Sequence
  Description of Artificial Sequence: Synthetic oligonucleotide
uuggaaagucuccuauguc

SEQ ID NO: 1050873 - RNA, 19 nt, Artificial Sequence
  Description of Artificial Sequence: Synthetic oligonucleotide
gaugcggcuuauguaugcg

SEQ ID NO: 1050874 - RNA, 19 nt, Artificial Sequence
  Description of Artificial Sequence: Synthetic oligonucleotide
auacuuauccagggcaaag

SEQ ID NO: 1050875 - RNA, 19 nt, Artificial Sequence
  Description of Artificial Sequence: Synthetic oligonucleotide
uagccacucauguauuaga

SEQ ID NO: 1050876 - RNA, 19 nt, Artificial Sequence
  Description of Artificial Sequence: Synthetic oligonucleotide
uaaaguguacaggcugcag

SEQ ID NO: 1050877 - RNA, 19 nt, Artificial Sequence
  Description of Artificial Sequence: Synthetic oligonucleotide
ccuauguauaagaagauaa

SEQ ID NO: 1050878 - RNA, 19 nt, Artificial Sequence
  Description of Artificial Sequence: Synthetic oligonucleotide
cuaggcuguugaauucucc

SEQ ID NO: 1050879 - RNA, 19 nt, Artificial Sequence
  Description of Artificial Sequence: Synthetic oligonucleotide
aggagacuaauaguuuguc

SEQ ID NO: 1050880 - RNA, 19 nt, Artificial Sequence
  Description of Artificial Sequence: Synthetic oligonucleotide
gacuaauaguuugucggac

SEQ ID NO: 1050881 - RNA, 19 nt, Artificial Sequence
  Description of Artificial Sequence: Synthetic oligonucleotide
cauagcuuaucuucuaucu

SEQ ID NO: 1050882 - RNA, 19 nt, Artificial Sequence
  Description of Artificial Sequence: Synthetic oligonucleotide
aucgucaggacuacucuuc

SEQ ID NO: 1050883 - RNA, 19 nt, Artificial Sequence
  Description of Artificial Sequence: Synthetic oligonucleotide
acagucuauggugcaggcc

SEQ ID NO: 1050884 - RNA, 19 nt, Artificial Sequence
  Description of Artificial Sequence: Synthetic oligonucleotide
auaugaugcggcuuaugua

SEQ ID NO: 1050885 - RNA, 19 nt, Artificial Sequence
  Description of Artificial Sequence: Synthetic oligonucleotide
gaguaaagaaguagugauc

SEQ ID NO: 1050886 - RNA, 19 nt, Artificial Sequence
  Description of Artificial Sequence: Synthetic oligonucleotide
guuacccaagaaacaacag

SEQ ID NO: 1050887 - RNA, 19 nt, Artificial Sequence
  Description of Artificial Sequence: Synthetic oligonucleotide
auagcuuaucuucuaucuu

SEQ ID NO: 1050888 - RNA, 19 nt, Artificial Sequence
  Description of Artificial Sequence: Synthetic oligonucleotide
agacaaagggguauauaug

SEQ ID NO: 1050889 - RNA, 19 nt, Artificial Sequence
  Description of Artificial Sequence: Synthetic oligonucleotide
gguccagacauuaaccaag

SEQ ID NO: 1050890 - RNA, 19 nt, Artificial Sequence
  Description of Artificial Sequence: Synthetic oligonucleotide
gggguauauaugguaaggg

SEQ ID NO: 1050891 - RNA, 19 nt, Artificial Sequence
  Description of Artificial Sequence: Synthetic oligonucleotide
ucucucgagagacuugauu

SEQ ID NO: 1050892 - RNA, 19 nt, Artificial Sequence
  Description of Artificial Sequence: Synthetic oligonucleotide
caaagacuuaaccgugaac

SEQ ID NO: 1050893 - RNA, 19 nt, Artificial Sequence
  Description of Artificial Sequence: Synthetic oligonucleotide
ucuuggugcucccagcauu

SEQ ID NO: 1050894 - RNA, 19 nt, Artificial Sequence
  Description of Artificial Sequence: Synthetic oligonucleotide
auagagcuuacuguagccu

SEQ ID NO: 1050895 - RNA, 19 nt, Artificial Sequence
  Description of Artificial Sequence: Synthetic oligonucleotide
agauuacaaucuuggugcu

SEQ ID NO: 1050896 - RNA, 19 nt, Artificial Sequence
  Description of Artificial Sequence: Synthetic oligonucleotide
caugacacacaaugcugac

SEQ ID NO: 1050897 - RNA, 19 nt, Artificial Sequence
  Description of Artificial Sequence: Synthetic oligonucleotide
gucgugaauagaaaugguc

SEQ ID NO: 1050898 - RNA, 19 nt, Artificial Sequence
  Description of Artificial Sequence: Synthetic oligonucleotide
uggaccaaugucugacaca

SEQ ID NO: 1050899 - RNA, 19 nt, Artificial Sequence
  Description of Artificial Sequence: Synthetic oligonucleotide
augccccagagaguaaggc

SEQ ID NO: 1050900 - RNA, 19 nt, Artificial Sequence
  Description of Artificial Sequence: Synthetic oligonucleotide
cgauacuacacuaacgaug

SEQ ID NO: 1050901 - RNA, 19 nt, Artificial Sequence
  Description of Artificial Sequence: Synthetic oligonucleotide
accgugaacaugaucucuc

SEQ ID NO: 1050902 - RNA, 19 nt, Artificial Sequence
  Description of Artificial Sequence: Synthetic oligonucleotide
cagguucgugacaaucagg

SEQ ID NO: 1050903 - RNA, 19 nt, Artificial Sequence
  Description of Artificial Sequence: Synthetic oligonucleotide
gagaguaaggcgccuaugu

SEQ ID NO: 1050904 - RNA, 19 nt, Artificial Sequence
  Description of Artificial Sequence: Synthetic oligonucleotide
ugguccagacauuaaccaa

SEQ ID NO: 1050905 - RNA, 19 nt, Artificial Sequence
  Description of Artificial Sequence: Synthetic oligonucleotide
uaaggcgccuauguauaag

SEQ ID NO: 1050906 - RNA, 19 nt, Artificial Sequence
  Description of Artificial Sequence: Synthetic oligonucleotide
cuuaaccgugaacaugauc

SEQ ID NO: 1050907 - RNA, 19 nt, Artificial Sequence
  Description of Artificial Sequence: Synthetic oligonucleotide
agccccugguauguuaccc

SEQ ID NO: 1050908 - RNA, 19 nt, Artificial Sequence
  Description of Artificial Sequence: Synthetic oligonucleotide
ucgucaggacuacucuuca

SEQ ID NO: 1050909 - RNA, 19 nt, Artificial Sequence
  Description of Artificial Sequence: Synthetic oligonucleotide
ggguauauaugguaaggga

SEQ ID NO: 1050910 - RNA, 19 nt, Artificial Sequence
  Description of Artificial Sequence: Synthetic oligonucleotide
gggauacuuauccagggca

SEQ ID NO: 1050911 - RNA, 19 nt, Artificial Sequence
  Description of Artificial Sequence: Synthetic oligonucleotide
acacgaaaaucaccgucgu

SEQ ID NO: 1050912 - RNA, 19 nt, Artificial Sequence
  Description of Artificial Sequence: Synthetic oligonucleotide
ggauugaauaugaagagcu

SEQ ID NO: 1050913 - RNA, 19 nt, Artificial Sequence
  Description of Artificial Sequence: Synthetic oligonucleotide
cuggauacacauauggagu

SEQ ID NO: 1050914 - RNA, 19 nt, Artificial Sequence
  Description of Artificial Sequence: Synthetic oligonucleotide
cuggaccaaugucugacac

SEQ ID NO: 1050915 - RNA, 19 nt, Artificial Sequence
  Description of Artificial Sequence: Synthetic oligonucleotide
ggaguaaagaaguagugau

SEQ ID NO: 1050916 - RNA, 19 nt, Artificial Sequence
  Description of Artificial Sequence: Synthetic oligonucleotide
acgauacuacacuaacgau

SEQ ID NO: 1050917 - RNA, 19 nt, Artificial Sequence
  Description of Artificial Sequence: Synthetic oligonucleotide
acccauuaauauauggccu

SEQ ID NO: 1050918 - RNA, 19 nt, Artificial Sequence
  Description of Artificial Sequence: Synthetic oligonucleotide
augcgcuuguagaacaguc

SEQ ID NO: 1050919 - RNA, 19 nt, Artificial Sequence
  Description of Artificial Sequence: Synthetic oligonucleotide
accgucgugaauagaaaug

SEQ ID NO: 1050920 - RNA, 19 nt, Artificial Sequence
  Description of Artificial Sequence: Synthetic oligonucleotide
ggcgccuauguauaagaag

SEQ ID NO: 1050921 - RNA, 19 nt, Artificial Sequence
  Description of Artificial Sequence: Synthetic oligonucleotide
ucugugaauccaguagauc

SEQ ID NO: 1050922 - RNA, 19 nt, Artificial Sequence
  Description of Artificial Sequence: Synthetic oligonucleotide
ccagaaaggagccaucuuc

SEQ ID NO: 1050923 - RNA, 19 nt, Artificial Sequence
  Description of Artificial Sequence: Synthetic oligonucleotide
ggauuaaggcaaaaggaca

SEQ ID NO: 1050924 - RNA, 19 nt, Artificial Sequence
  Description of Artificial Sequence: Synthetic oligonucleotide
gaguaaggcgccuauguau

SEQ ID NO: 1050925 - RNA, 19 nt, Artificial Sequence
  Description of Artificial Sequence: Synthetic oligonucleotide
uuacaaucuuggugcuccc

SEQ ID NO: 1050926 - RNA, 19 nt, Artificial Sequence
  Description of Artificial Sequence: Synthetic oligonucleotide
ucaccgucgugaauagaaa

SEQ ID NO: 1050927 - RNA, 19 nt, Artificial Sequence
  Description of Artificial Sequence: Synthetic oligonucleotide
guauguuacccaagaaaca

SEQ ID NO: 1050928 - RNA, 19 nt, Artificial Sequence
  Description of Artificial Sequence: Synthetic oligonucleotide
caaagggguauauauggua

SEQ ID NO: 1050929 - RNA, 19 nt, Artificial Sequence
  Description of Artificial Sequence: Synthetic oligonucleotide
cugauguuccuaguugaac

SEQ ID NO: 1050930 - RNA, 19 nt, Artificial Sequence
  Description of Artificial Sequence: Synthetic oligonucleotide
auguaucuuggcugugugu

SEQ ID NO: 1050931 - RNA, 19 nt, Artificial Sequence
  Description of Artificial Sequence: Synthetic oligonucleotide
uccagacauuaaccaagac

SEQ ID NO: 1050932 - RNA, 19 nt, Artificial Sequence
  Description of Artificial Sequence: Synthetic oligonucleotide
auaguuugucggacgaugu

SEQ ID NO: 1050933 - RNA, 19 nt, Artificial Sequence
  Description of Artificial Sequence: Synthetic oligonucleotide
ugcuaggcuguugaauucu

SEQ ID NO: 1050934 - RNA, 19 nt, Artificial Sequence
  Description of Artificial Sequence: Synthetic oligonucleotide
uaucgucaggacuacucuu

SEQ ID NO: 1050935 - RNA, 19 nt, Artificial Sequence
  Description of Artificial Sequence: Synthetic oligonucleotide
cuuggaaagucuccuaugu

SEQ ID NO: 1050936 - RNA, 19 nt, Artificial Sequence
  Description of Artificial Sequence: Synthetic oligonucleotide
auaagcacccagguucgug

SEQ ID NO: 1050937 - RNA, 19 nt, Artificial Sequence
  Description of Artificial Sequence: Synthetic oligonucleotide
uagaggauauaagcaccca

SEQ ID NO: 1050938 - RNA, 19 nt, Artificial Sequence
  Description of Artificial Sequence: Synthetic oligonucleotide
auuaaccaagacauauaaa

SEQ ID NO: 1050939 - RNA, 19 nt, Artificial Sequence
  Description of Artificial Sequence: Synthetic oligonucleotide
ucccagaaaggagccaucu

SEQ ID NO: 1050940 - RNA, 19 nt, Artificial Sequence
  Description of Artificial Sequence: Synthetic oligonucleotide
cuacacuaacgaugagaug

SEQ ID NO: 1050941 - RNA, 19 nt, Artificial Sequence
  Description of Artificial Sequence: Synthetic oligonucleotide
ggacacgaaaaucaccguc

SEQ ID NO: 1050942 - RNA, 19 nt, Artificial Sequence
  Description of Artificial Sequence: Synthetic oligonucleotide
uaugcgcuuguagaacagu

SEQ ID NO: 1050943 - RNA, 19 nt, Artificial Sequence
  Description of Artificial Sequence: Synthetic oligonucleotide
gcgccuauguauaagaaga

SEQ ID NO: 1050944 - RNA, 19 nt, Artificial Sequence
  Description of Artificial Sequence: Synthetic oligonucleotide
agggagacucuggaggaag

SEQ ID NO: 1050945 - RNA, 19 nt, Artificial Sequence
  Description of Artificial Sequence: Synthetic oligonucleotide
guggggaucuuccaaauau

SEQ ID NO: 1050946 - RNA, 19 nt, Artificial Sequence
  Description of Artificial Sequence: Synthetic oligonucleotide
uccaaauaugaugcggcuu

SEQ ID NO: 1050947 - RNA, 19 nt, Artificial Sequence
  Description of Artificial Sequence: Synthetic oligonucleotide
gugaucggcaacauugaga

SEQ ID NO: 1050948 - RNA, 19 nt, Artificial Sequence
  Description of Artificial Sequence: Synthetic oligonucleotide
cacgcaucaagaaucuuua

SEQ ID NO: 1050949 - RNA, 19 nt, Artificial Sequence
  Description of Artificial Sequence: Synthetic oligonucleotide
acaaagggguauauauggu

SEQ ID NO: 1050950 - RNA, 19 nt, Artificial Sequence
  Description of Artificial Sequence: Synthetic oligonucleotide
acacgcaucaagaaucuuu

SEQ ID NO: 1050951 - RNA, 19 nt, Artificial Sequence
  Description of Artificial Sequence: Synthetic oligonucleotide
uaguuugucggacgauguu

SEQ ID NO: 1050952 - RNA, 19 nt, Artificial Sequence
  Description of Artificial Sequence: Synthetic oligonucleotide
auauaugguaagggagacu

SEQ ID NO: 1050953 - RNA, 19 nt, Artificial Sequence
  Description of Artificial Sequence: Synthetic oligonucleotide
guacaggcugcagaucugc

SEQ ID NO: 1050954 - RNA, 19 nt, Artificial Sequence
  Description of Artificial Sequence: Synthetic oligonucleotide
gauuacaaucuuggugcuc

SEQ ID NO: 1050955 - RNA, 19 nt, Artificial Sequence
  Description of Artificial Sequence: Synthetic oligonucleotide
aguaaggcgccuauguaua

SEQ ID NO: 1050956 - RNA, 19 nt, Artificial Sequence
  Description of Artificial Sequence: Synthetic oligonucleotide
auacuacacuaacgaugag

SEQ ID NO: 1050957 - RNA, 19 nt, Artificial Sequence
  Description of Artificial Sequence: Synthetic oligonucleotide
guguagauuauuuccuuau

SEQ ID NO: 1050958 - RNA, 19 nt, Artificial Sequence
  Description of Artificial Sequence: Synthetic oligonucleotide
gauacuuauccagggcaaa

SEQ ID NO: 1050959 - RNA, 19 nt, Artificial Sequence
  Description of Artificial Sequence: Synthetic oligonucleotide
ccuaguugaacaaaguccu

SEQ ID NO: 1050960 - RNA, 19 nt, Artificial Sequence
  Description of Artificial Sequence: Synthetic oligonucleotide
uaauaguuugucggacgau

SEQ ID NO: 1050961 - RNA, 19 nt, Artificial Sequence
  Description of Artificial Sequence: Synthetic oligonucleotide
acucauguauuagauuguu

SEQ ID NO: 1050962 - RNA, 19 nt, Artificial Sequence
  Description of Artificial Sequence: Synthetic oligonucleotide
ugcugguugcaaguauaca

SEQ ID NO: 1050963 - RNA, 19 nt, Artificial Sequence
  Description of Artificial Sequence: Synthetic oligonucleotide
ucaggcugauguuccuagu

SEQ ID NO: 1050964 - RNA, 19 nt, Artificial Sequence
  Description of Artificial Sequence: Synthetic oligonucleotide
ucuaucccacaaugugaaa

SEQ ID NO: 1050965 - RNA, 19 nt, Artificial Sequence
  Description of Artificial Sequence: Synthetic oligonucleotide
acccaagaaacaacaggug

SEQ ID NO: 1050966 - RNA, 19 nt, Artificial Sequence
  Description of Artificial Sequence: Synthetic oligonucleotide
uggcuagucucaguauugu

SEQ ID NO: 1050967 - RNA, 19 nt, Artificial Sequence
  Description of Artificial Sequence: Synthetic oligonucleotide
uccaucgcagccccuggua

SEQ ID NO: 1050968 - RNA, 19 nt, Artificial Sequence
  Description of Artificial Sequence: Synthetic oligonucleotide
acauuaaccaagacauaua

SEQ ID NO: 1050969 - RNA, 19 nt, Artificial Sequence
  Description of Artificial Sequence: Synthetic oligonucleotide
cacgaaaaucaccgucgug

SEQ ID NO: 1050970 - RNA, 19 nt, Artificial Sequence
  Description of Artificial Sequence: Synthetic oligonucleotide
agagcuuacuguagccucu

SEQ ID NO: 1050971 - RNA, 19 nt, Artificial Sequence
  Description of Artificial Sequence: Synthetic oligonucleotide
ucggacgauguuguccucu

SEQ ID NO: 1050972 - RNA, 19 nt, Artificial Sequence
  Description of Artificial Sequence: Synthetic oligonucleotide
caucgcagccccugguaug

SEQ ID NO: 1050973 - RNA, 19 nt, Artificial Sequence
  Description of Artificial Sequence: Synthetic oligonucleotide
agagaguaaggcgccuaug

SEQ ID NO: 1050974 - RNA, 19 nt, Artificial Sequence
  Description of Artificial Sequence: Synthetic oligonucleotide
cugcuaggcuguugaauuc

SEQ ID NO: 1050975 - RNA, 19 nt, Artificial Sequence
  Description of Artificial Sequence: Synthetic oligonucleotide
uuugucggacgauguuguc

SEQ ID NO: 1050976 - RNA, 19 nt, Artificial Sequence
  Description of Artificial Sequence: Synthetic oligonucleotide
uuucugcuaggcuguugaa

SEQ ID NO: 1050977 - RNA, 19 nt, Artificial Sequence
  Description of Artificial Sequence: Synthetic oligonucleotide
gaaaugguccagacauuaa

SEQ ID NO: 1050978 - RNA, 19 nt, Artificial Sequence
  Description of Artificial Sequence: Synthetic oligonucleotide
aaguagugaucggcaacau

SEQ ID NO: 1050979 - RNA, 19 nt, Artificial Sequence
  Description of Artificial Sequence: Synthetic oligonucleotide
aggaacgauacuacacuaa

SEQ ID NO: 1050980 - RNA, 19 nt, Artificial Sequence
  Description of Artificial Sequence: Synthetic oligonucleotide
aaguugucccuggaccaau

SEQ ID NO: 1050981 - RNA, 19 nt, Artificial Sequence
  Description of Artificial Sequence: Synthetic oligonucleotide
uuagauuguucaggcugau

SEQ ID NO: 1050982 - RNA, 19 nt, Artificial Sequence
  Description of Artificial Sequence: Synthetic oligonucleotide
aucaggagacuaauaguuu

SEQ ID NO: 1050983 - RNA, 19 nt, Artificial Sequence
  Description of Artificial Sequence: Synthetic oligonucleotide
aaucaccgucgugaauaga

SEQ ID NO: 1050984 - RNA, 19 nt, Artificial Sequence
  Description of Artificial Sequence: Synthetic oligonucleotide
ccaaauaugaugcggcuua

SEQ ID NO: 1050985 - RNA, 19 nt, Artificial Sequence
  Description of Artificial Sequence: Synthetic oligonucleotide
ccagguucgugacaaucag

SEQ ID NO: 1050986 - RNA, 19 nt, Artificial Sequence
  Description of Artificial Sequence: Synthetic oligonucleotide
agccacucauguauuagau

SEQ ID NO: 1050987 - RNA, 19 nt, Artificial Sequence
  Description of Artificial Sequence: Synthetic oligonucleotide
aucgcagccccugguaugu

SEQ ID NO: 1050988 - RNA, 19 nt, Artificial Sequence
  Description of Artificial Sequence: Synthetic oligonucleotide
agccuccaauucuauccca

SEQ ID NO: 1050989 - RNA, 19 nt, Artificial Sequence
  Description of Artificial Sequence: Synthetic oligonucleotide
augaugcggcuuauguaug

SEQ ID NO: 1050990 - RNA, 19 nt, Artificial Sequence
  Description of Artificial Sequence: Synthetic oligonucleotide
caggaacgauacuacacua

SEQ ID NO: 1050991 - RNA, 19 nt, Artificial Sequence
  Description of Artificial Sequence: Synthetic oligonucleotide
gguguaugucagucacuug

SEQ ID NO: 1050992 - RNA, 19 nt, Artificial Sequence
  Description of Artificial Sequence: Synthetic oligonucleotide
auaugguaagggagacucu

SEQ ID NO: 1050993 - RNA, 19 nt, Artificial Sequence
  Description of Artificial Sequence: Synthetic oligonucleotide
uauaagcacccagguucgu

SEQ ID NO: 1050994 - RNA, 19 nt, Artificial Sequence
  Description of Artificial Sequence: Synthetic oligonucleotide
acacuaacgaugagaugaa

SEQ ID NO: 1050995 - RNA, 19 nt, Artificial Sequence
  Description of Artificial Sequence: Synthetic oligonucleotide
guuugucggacgauguugu

SEQ ID NO: 1050996 - RNA, 19 nt, Artificial Sequence
  Description of Artificial Sequence: Synthetic oligonucleotide
agcuuacuguagccucuca

SEQ ID NO: 1050997 - RNA, 19 nt, Artificial Sequence
  Description of Artificial Sequence: Synthetic oligonucleotide
acgcaucaagaaucuuuaa

SEQ ID NO: 1050998 - RNA, 19 nt, Artificial Sequence
  Description of Artificial Sequence: Synthetic oligonucleotide
ggacgauguuguccucugg

SEQ ID NO: 1050999 - RNA, 19 nt, Artificial Sequence
  Description of Artificial Sequence: Synthetic oligonucleotide
guaaggcgccuauguauaa

SEQ ID NO: 1051000 - RNA, 19 nt, Artificial Sequence
  Description of Artificial Sequence: Synthetic oligonucleotide
gacuacucuucagcaugac

SEQ ID NO: 1051001 - RNA, 19 nt, Artificial Sequence
  Description of Artificial Sequence: Synthetic oligonucleotide
cuuggcuagucucaguauu

SEQ ID NO: 1051002 - RNA, 19 nt, Artificial Sequence
  Description of Artificial Sequence: Synthetic oligonucleotide
gguccaucgcagccccugg

SEQ ID NO: 1051003 - RNA, 19 nt, Artificial Sequence
  Description of Artificial Sequence: Synthetic oligonucleotide
cuuccucacauaacugagu

SEQ ID NO: 1051004 - RNA, 19 nt, Artificial Sequence
  Description of Artificial Sequence: Synthetic oligonucleotide
agccaucuucauauuagua

SEQ ID NO: 1051005 - RNA, 19 nt, Artificial Sequence
  Description of Artificial Sequence: Synthetic oligonucleotide
gcaaagacuuaaccgugaa

SEQ ID NO: 1051006 - RNA, 19 nt, Artificial Sequence
  Description of Artificial Sequence: Synthetic oligonucleotide
gcuuacuguagccucucaa

SEQ ID NO: 1051007 - RNA, 19 nt, Artificial Sequence
  Description of Artificial Sequence: Synthetic oligonucleotide
gagcuuacuguagccucuc

SEQ ID NO: 1051008 - RNA, 19 nt, Artificial Sequence
  Description of Artificial Sequence: Synthetic oligonucleotide
ggaccaaugucugacacau

SEQ ID NO: 1051009 - RNA, 19 nt, Artificial Sequence
  Description of Artificial Sequence: Synthetic oligonucleotide
guggcuggauacacauaug

SEQ ID NO: 1051010 - RNA, 19 nt, Artificial Sequence
  Description of Artificial Sequence: Synthetic oligonucleotide
ggauacuuauccagggcaa

SEQ ID NO: 1051011 - RNA, 19 nt, Artificial Sequence
  Description of Artificial Sequence: Synthetic oligonucleotide
augaguggauuaaggcaaa

SEQ ID NO: 1051012 - RNA, 19 nt, Artificial Sequence
  Description of Artificial Sequence: Synthetic oligonucleotide
uguuguccucuggccacgu

SEQ ID NO: 1051013 - RNA, 19 nt, Artificial Sequence
  Description of Artificial Sequence: Synthetic oligonucleotide
cacguggcuggauacacau

SEQ ID NO: 1051014 - RNA, 19 nt, Artificial Sequence
  Description of Artificial Sequence: Synthetic oligonucleotide
gcgcuuguagaacagucua

SEQ ID NO: 1051015 - RNA, 19 nt, Artificial Sequence
  Description of Artificial Sequence: Synthetic oligonucleotide
ugacaccacuuaguugcua

SEQ ID NO: 1051016 - RNA, 19 nt, Artificial Sequence
  Description of Artificial Sequence: Synthetic oligonucleotide
caugaucucucgagagacu

SEQ ID NO: 1051017 - RNA, 19 nt, Artificial Sequence
  Description of Artificial Sequence: Synthetic oligonucleotide
cgcaucaagaaucuuuaaa

SEQ ID NO: 1051018 - RNA, 19 nt, Artificial Sequence
  Description of Artificial Sequence: Synthetic oligonucleotide
ggauacacauauggaguaa

SEQ ID NO: 1051019 - RNA, 19 nt, Artificial Sequence
  Description of Artificial Sequence: Synthetic oligonucleotide
caccacuuaguugcuaugu

SEQ ID NO: 1051020 - RNA, 19 nt, Artificial Sequence
  Description of Artificial Sequence: Synthetic oligonucleotide
caccgucgugaauagaaau

SEQ ID NO: 1051021 - RNA, 19 nt, Artificial Sequence
  Description of Artificial Sequence: Synthetic oligonucleotide
ggauauaagcacccagguu

SEQ ID NO: 1051022 - RNA, 19 nt, Artificial Sequence
  Description of Artificial Sequence: Synthetic oligonucleotide
uggcuguguguagauuauu

SEQ ID NO: 1051023 - RNA, 19 nt, Artificial Sequence
  Description of Artificial Sequence: Synthetic oligonucleotide
gcugacccauuaauauaug

SEQ ID NO: 1051024 - RNA, 19 nt, Artificial Sequence
  Description of Artificial Sequence: Synthetic oligonucleotide
ggacuacucuucagcauga

SEQ ID NO: 1051025 - RNA, 19 nt, Artificial Sequence
  Description of Artificial Sequence: Synthetic oligonucleotide
gccuauguauaagaagaua

SEQ ID NO: 1051026 - RNA, 19 nt, Artificial Sequence
  Description of Artificial Sequence: Synthetic oligonucleotide
aggcgccuauguauaagaa

SEQ ID NO: 1051027 - RNA, 19 nt, Artificial Sequence
  Description of Artificial Sequence: Synthetic oligonucleotide
acuuaaccgugaacaugau

SEQ ID NO: 1051028 - RNA, 19 nt, Artificial Sequence
  Description of Artificial Sequence: Synthetic oligonucleotide
ucgugacaaucaggagacu

SEQ ID NO: 1051029 - RNA, 19 nt, Artificial Sequence
  Description of Artificial Sequence: Synthetic oligonucleotide
cccugguauguuacccaag

SEQ ID NO: 1051030 - RNA, 19 nt, Artificial Sequence
  Description of Artificial Sequence: Synthetic oligonucleotide
auaaugccccagagaguaa

SEQ ID NO: 1051031 - RNA, 19 nt, Artificial Sequence
  Description of Artificial Sequence: Synthetic oligonucleotide
agugggccuuucccuucaa

SEQ ID NO: 1051032 - RNA, 19 nt, Artificial Sequence
  Description of Artificial Sequence: Synthetic oligonucleotide
cugagugggccuuucccuu

SEQ ID NO: 1051033 - RNA, 19 nt, Artificial Sequence
  Description of Artificial Sequence: Synthetic oligonucleotide
gcuaggcuguugaauucuc

SEQ ID NO: 1051034 - RNA, 19 nt, Artificial Sequence
  Description of Artificial Sequence: Synthetic oligonucleotide
cagagaguaaggcgccuau

SEQ ID NO: 1051035 - RNA, 19 nt, Artificial Sequence
  Description of Artificial Sequence: Synthetic oligonucleotide
cccauuaauauauggccuu

SEQ ID NO: 1051036 - RNA, 19 nt, Artificial Sequence
  Description of Artificial Sequence: Synthetic oligonucleotide
ccuggaccaaugucugaca

SEQ ID NO: 1051037 - RNA, 19 nt, Artificial Sequence
  Description of Artificial Sequence: Synthetic oligonucleotide
cguggcuggauacacauau

SEQ ID NO: 1051038 - RNA, 19 nt, Artificial Sequence
  Description of Artificial Sequence: Synthetic oligonucleotide
gucggacgauguuguccuc

SEQ ID NO: 1051039 - RNA, 19 nt, Artificial Sequence
  Description of Artificial Sequence: Synthetic oligonucleotide
aucucucgagagacuugau

SEQ ID NO: 1051040 - RNA, 19 nt, Artificial Sequence
  Description of Artificial Sequence: Synthetic oligonucleotide
cggacgauguuguccucug

SEQ ID NO: 1051041 - RNA, 19 nt, Artificial Sequence
  Description of Artificial Sequence: Synthetic oligonucleotide
gcuuauguaugcgcuugua

SEQ ID NO: 1051042 - RNA, 19 nt, Artificial Sequence
  Description of Artificial Sequence: Synthetic oligonucleotide
cggcuuauguaugcgcuug

SEQ ID NO: 1051043 - RNA, 19 nt, Artificial Sequence
  Description of Artificial Sequence: Synthetic oligonucleotide
gggacacgaaaaucaccgu

SEQ ID NO: 1051044 - RNA, 19 nt, Artificial Sequence
  Description of Artificial Sequence: Synthetic oligonucleotide
ccauuaauauauggccuua

SEQ ID NO: 1051045 - RNA, 19 nt, Artificial Sequence
  Description of Artificial Sequence: Synthetic oligonucleotide
cucgagagacuugauucuu

SEQ ID NO: 1051046 - RNA, 19 nt, Artificial Sequence
  Description of Artificial Sequence: Synthetic oligonucleotide
cgugacaaucaggagacua

SEQ ID NO: 1051047 - RNA, 19 nt, Artificial Sequence
  Description of Artificial Sequence: Synthetic oligonucleotide
gccacucauguauuagauu

SEQ ID NO: 1051048 - RNA, 19 nt, Artificial Sequence
  Description of Artificial Sequence: Synthetic oligonucleotide
gacacgcaucaagaaucuu

SEQ ID NO: 1051049 - RNA, 19 nt, Artificial Sequence
  Description of Artificial Sequence: Synthetic oligonucleotide
acguggcuggauacacaua

SEQ ID NO: 1051050 - RNA, 19 nt, Artificial Sequence
  Description of Artificial Sequence: Synthetic oligonucleotide
ccacguggcuggauacaca

SEQ ID NO: 1051051 - RNA, 19 nt, Artificial Sequence
  Description of Artificial Sequence: Synthetic oligonucleotide
ggccacguggcuggauaca

SEQ ID NO: 1051052 - RNA, 19 nt, Artificial Sequence
  Description of Artificial Sequence: Synthetic oligonucleotide
cauaacugagugggccuuu

SEQ ID NO: 1051053 - RNA, 19 nt, Artificial Sequence
  Description of Artificial Sequence: Synthetic oligonucleotide
cacuaacgaugagaugaau

SEQ ID NO: 1051054 - RNA, 19 nt, Artificial Sequence
  Description of Artificial Sequence: Synthetic oligonucleotide
caguauuguuaagcacaau

SEQ ID NO: 1051055 - RNA, 19 nt, Artificial Sequence
  Description of Artificial Sequence: Synthetic oligonucleotide
cgucgugaauagaaauggu

SEQ ID NO: 1051056 - RNA, 19 nt, Artificial Sequence
  Description of Artificial Sequence: Synthetic oligonucleotide
ucgcagccccugguauguu

SEQ ID NO: 1051057 - RNA, 19 nt, Artificial Sequence
  Description of Artificial Sequence: Synthetic oligonucleotide
gcggcuuauguaugcgcuu

SEQ ID NO: 1051058 - RNA, 19 nt, Artificial Sequence
  Description of Artificial Sequence: Synthetic oligonucleotide
ccagagaguaaggcgccua

SEQ ID NO: 1051059 - RNA, 19 nt, Artificial Sequence
  Description of Artificial Sequence: Synthetic oligonucleotide
cauuuucugcuaggcuguu

SEQ ID NO: 1051060 - RNA, 19 nt, Artificial Sequence
  Description of Artificial Sequence: Synthetic oligonucleotide
gaccaaugucugacacauu

SEQ ID NO: 1051061 - RNA, 19 nt, Artificial Sequence
  Description of Artificial Sequence: Synthetic oligonucleotide
cgccuauguauaagaagau

SEQ ID NO: 1051062 - RNA, 19 nt, Artificial Sequence
  Description of Artificial Sequence: Synthetic oligonucleotide
cacccagguucgugacaau

SEQ ID NO: 1051063 - RNA, 19 nt, Artificial Sequence
  Description of Artificial Sequence: Synthetic oligonucleotide
cccagagaguaaggcgccu

SEQ ID NO: 1051064 - RNA, 19 nt, Artificial Sequence
  Description of Artificial Sequence: Synthetic oligonucleotide
uaaagcaagagucugaugc

SEQ ID NO: 1051065 - RNA, 19 nt, Artificial Sequence
  Description of Artificial Sequence: Synthetic oligonucleotide
aguacaguaucccacaucg

SEQ ID NO: 1051066 - RNA, 19 nt, Artificial Sequence
  Description of Artificial Sequence: Synthetic oligonucleotide
aaaauuuggcuugaccugc

SEQ ID NO: 1051067 - RNA, 19 nt, Artificial Sequence
  Description of Artificial Sequence: Synthetic oligonucleotide
uggaaaggaaccuucagag

SEQ ID NO: 1051068 - RNA, 19 nt, Artificial Sequence
  Description of Artificial Sequence: Synthetic oligonucleotide
aagcuuugggucaugaugc

SEQ ID NO: 1051069 - RNA, 19 nt, Artificial Sequence
  Description of Artificial Sequence: Synthetic oligonucleotide
aaauuggucaggcagucug

SEQ ID NO: 1051070 - RNA, 19 nt, Artificial Sequence
  Description of Artificial Sequence: Synthetic oligonucleotide
ugggaaauuggucaggcag

SEQ ID NO: 1051071 - RNA, 19 nt, Artificial Sequence
  Description of Artificial Sequence: Synthetic oligonucleotide
uuaucugucaggcuguugu

SEQ ID NO: 1051072 - RNA, 19 nt, Artificial Sequence
  Description of Artificial Sequence: Synthetic oligonucleotide
aagagucugaugcaacccg

SEQ ID NO: 1051073 - RNA, 19 nt, Artificial Sequence
  Description of Artificial Sequence: Synthetic oligonucleotide
aauaagggguuggagaguc

SEQ ID NO: 1051074 - RNA, 19 nt, Artificial Sequence
  Description of Artificial Sequence: Synthetic oligonucleotide
ucuagugugguccugguuc

SEQ ID NO: 1051075 - RNA, 19 nt, Artificial Sequence
  Description of Artificial Sequence: Synthetic oligonucleotide
aacauugagcggcugaugu

SEQ ID NO: 1051076 - RNA, 19 nt, Artificial Sequence
  Description of Artificial Sequence: Synthetic oligonucleotide
uugacaucugggaaauugg

SEQ ID NO: 1051077 - RNA, 19 nt, Artificial Sequence
  Description of Artificial Sequence: Synthetic oligonucleotide
uuucgguagaugaugacac

SEQ ID NO: 1051078 - RNA, 19 nt, Artificial Sequence
  Description of Artificial Sequence: Synthetic oligonucleotide
aguggucccaaugaaaucg

SEQ ID NO: 1051079 - RNA, 19 nt, Artificial Sequence
  Description of Artificial Sequence: Synthetic oligonucleotide
gucccaaugaaaucgaccc

SEQ ID NO: 1051080 - RNA, 19 nt, Artificial Sequence
  Description of Artificial Sequence: Synthetic oligonucleotide
aggaggaacguucaagggg

SEQ ID NO: 1051081 - RNA, 19 nt, Artificial Sequence
  Description of Artificial Sequence: Synthetic oligonucleotide
gaugcuacaccaauggggc

SEQ ID NO: 1051082 - RNA, 19 nt, Artificial Sequence
  Description of Artificial Sequence: Synthetic oligonucleotide
uacaguaucccacaucggu

SEQ ID NO: 1051083 - RNA, 19 nt, Artificial Sequence
  Description of Artificial Sequence: Synthetic oligonucleotide
cacgaaugccucuaggucg

SEQ ID NO: 1051084 - RNA, 19 nt, Artificial Sequence
  Description of Artificial Sequence: Synthetic oligonucleotide
ucuguauggggcuucacca

SEQ ID NO: 1051085 - RNA, 19 nt, Artificial Sequence
  Description of Artificial Sequence: Synthetic oligonucleotide
ucucagaucuauacacacg

SEQ ID NO: 1051086 - RNA, 19 nt, Artificial Sequence
  Description of Artificial Sequence: Synthetic oligonucleotide
ucuauacacacggaggucc

SEQ ID NO: 1051087 - RNA, 19 nt, Artificial Sequence
  Description of Artificial Sequence: Synthetic oligonucleotide
uguauggggcuucaccacg

SEQ ID NO: 1051088 - RNA, 19 nt, Artificial Sequence
  Description of Artificial Sequence: Synthetic oligonucleotide
ucuggggcgacacagcuca

SEQ ID NO: 1051089 - RNA, 19 nt, Artificial Sequence
  Description of Artificial Sequence: Synthetic oligonucleotide
gguauaaacuggaacaggg

SEQ ID NO: 1051090 - RNA, 19 nt, Artificial Sequence
  Description of Artificial Sequence: Synthetic oligonucleotide
uugcacguugucauguggg

SEQ ID NO: 1051091 - RNA, 19 nt, Artificial Sequence
  Description of Artificial Sequence: Synthetic oligonucleotide
caaaauuuggcuugaccug

SEQ ID NO: 1051092 - RNA, 19 nt, Artificial Sequence
  Description of Artificial Sequence: Synthetic oligonucleotide
ucauaggcaccauuguugc

SEQ ID NO: 1051093 - RNA, 19 nt, Artificial Sequence
  Description of Artificial Sequence: Synthetic oligonucleotide
caagcuuugggucaugaug

SEQ ID NO: 1051094 - RNA, 19 nt, Artificial Sequence
  Description of Artificial Sequence: Synthetic oligonucleotide
uguaacauugagcggcuga

SEQ ID NO: 1051095 - RNA, 19 nt, Artificial Sequence
  Description of Artificial Sequence: Synthetic oligonucleotide
ugugauugcauaccccaug

SEQ ID NO: 1051096 - RNA, 19 nt, Artificial Sequence
  Description of Artificial Sequence: Synthetic oligonucleotide
cuggguauaaacuggaaca

SEQ ID NO: 1051097 - RNA, 19 nt, Artificial Sequence
  Description of Artificial Sequence: Synthetic oligonucleotide
ugguacauuugcuagccgc

SEQ ID NO: 1051098 - RNA, 19 nt, Artificial Sequence
  Description of Artificial Sequence: Synthetic oligonucleotide
agaucuauacacacggagg

SEQ ID NO: 1051099 - RNA, 19 nt, Artificial Sequence
  Description of Artificial Sequence: Synthetic oligonucleotide
ucuaagcagauuugguacc

SEQ ID NO: 1051100 - RNA, 19 nt, Artificial Sequence
  Description of Artificial Sequence: Synthetic oligonucleotide
ucugagucacuccaggcac

SEQ ID NO: 1051101 - RNA, 19 nt, Artificial Sequence
  Description of Artificial Sequence: Synthetic oligonucleotide
caguguaacauugagcggc

SEQ ID NO: 1051102 - RNA, 19 nt, Artificial Sequence
  Description of Artificial Sequence: Synthetic oligonucleotide
augguuguugcacuuagca

SEQ ID NO: 1051103 - RNA, 19 nt, Artificial Sequence
  Description of Artificial Sequence: Synthetic oligonucleotide
gucuaagcagauuugguac

SEQ ID NO: 1051104 - RNA, 19 nt, Artificial Sequence
  Description of Artificial Sequence: Synthetic oligonucleotide
caaacuuccacaagccuac

SEQ ID NO: 1051105 - RNA, 19 nt, Artificial Sequence
  Description of Artificial Sequence: Synthetic oligonucleotide
cauucuguuggaaagcauc

SEQ ID NO: 1051106 - RNA, 19 nt, Artificial Sequence
  Description of Artificial Sequence: Synthetic oligonucleotide
aggacaguagcauccuugg

SEQ ID NO: 1051107 - RNA, 19 nt, Artificial Sequence
  Description of Artificial Sequence: Synthetic oligonucleotide
cagaucuauacacacggag

SEQ ID NO: 1051108 - RNA, 19 nt, Artificial Sequence
  Description of Artificial Sequence: Synthetic oligonucleotide
ucuacaaauuuguuuccac

SEQ ID NO: 1051109 - RNA, 19 nt, Artificial Sequence
  Description of Artificial Sequence: Synthetic oligonucleotide
ucaauaaguucuccagugu

SEQ ID NO: 1051110 - RNA, 19 nt, Artificial Sequence
  Description of Artificial Sequence: Synthetic oligonucleotide
uucucagaucuauacacac

SEQ ID NO: 1051111 - RNA, 19 nt, Artificial Sequence
  Description of Artificial Sequence: Synthetic oligonucleotide
ucuaggucgaccuggcuac

SEQ ID NO: 1051112 - RNA, 19 nt, Artificial Sequence
  Description of Artificial Sequence: Synthetic oligonucleotide
uuaucugguacauuugcua

SEQ ID NO: 1051113 - RNA, 19 nt, Artificial Sequence
  Description of Artificial Sequence: Synthetic oligonucleotide
agagcccaagcuuuggguc

SEQ ID NO: 1051114 - RNA, 19 nt, Artificial Sequence
  Description of Artificial Sequence: Synthetic oligonucleotide
ucacaguacaguaucccac

SEQ ID NO: 1051115 - RNA, 19 nt, Artificial Sequence
  Description of Artificial Sequence: Synthetic oligonucleotide
gaugcuaaagguaaagcaa

SEQ ID NO: 1051116 - RNA, 19 nt, Artificial Sequence
  Description of Artificial Sequence: Synthetic oligonucleotide
guugacaucugggaaauug

SEQ ID NO: 1051117 - RNA, 19 nt, Artificial Sequence
  Description of Artificial Sequence: Synthetic oligonucleotide
uugguagaaaccacuucug

SEQ ID NO: 1051118 - RNA, 19 nt, Artificial Sequence
  Description of Artificial Sequence: Synthetic oligonucleotide
auugcauaccccaugguug

SEQ ID NO: 1051119 - RNA, 19 nt, Artificial Sequence
  Description of Artificial Sequence: Synthetic oligonucleotide
uggguauaaacuggaacag

SEQ ID NO: 1051120 - RNA, 19 nt, Artificial Sequence
  Description of Artificial Sequence: Synthetic oligonucleotide
cugagugccgggaacacag

SEQ ID NO: 1051121 - RNA, 19 nt, Artificial Sequence
  Description of Artificial Sequence: Synthetic oligonucleotide
uggaugcuacaccaauggg

SEQ ID NO: 1051122 - RNA, 19 nt, Artificial Sequence
  Description of Artificial Sequence: Synthetic oligonucleotide
cuugugauugcauacccca

SEQ ID NO: 1051123 - RNA, 19 nt, Artificial Sequence
  Description of Artificial Sequence: Synthetic oligonucleotide
cuuagccaguccaacagug

SEQ ID NO: 1051124 - RNA, 19 nt, Artificial Sequence
  Description of Artificial Sequence: Synthetic oligonucleotide
gauaaguugcacguuguca

SEQ ID NO: 1051125 - RNA, 19 nt, Artificial Sequence
  Description of Artificial Sequence: Synthetic oligonucleotide
gguuguugcacuuagcaga

SEQ ID NO: 1051126 - RNA, 19 nt, Artificial Sequence
  Description of Artificial Sequence: Synthetic oligonucleotide
uuugguaccugcuggguau

SEQ ID NO: 1051127 - RNA, 19 nt, Artificial Sequence
  Description of Artificial Sequence: Synthetic oligonucleotide
ucugucaggcuguuguccc

SEQ ID NO: 1051128 - RNA, 19 nt, Artificial Sequence
  Description of Artificial Sequence: Synthetic oligonucleotide
gauguagcagcuguaggug

SEQ ID NO: 1051129 - RNA, 19 nt, Artificial Sequence
  Description of Artificial Sequence: Synthetic oligonucleotide
cauucaugcaaaccuuccc

SEQ ID NO: 1051130 - RNA, 19 nt, Artificial Sequence
  Description of Artificial Sequence: Synthetic oligonucleotide
ugcaccuaugacagcaggc

SEQ ID NO: 1051131 - RNA, 19 nt, Artificial Sequence
  Description of Artificial Sequence: Synthetic oligonucleotide
guaacuccaaacuuccaca

SEQ ID NO: 1051132 - RNA, 19 nt, Artificial Sequence
  Description of Artificial Sequence: Synthetic oligonucleotide
gaucuauacacacggaggu

SEQ ID NO: 1051133 - RNA, 19 nt, Artificial Sequence
  Description of Artificial Sequence: Synthetic oligonucleotide
uucaugcaaaccuuccccu

SEQ ID NO: 1051134 - RNA, 19 nt, Artificial Sequence
  Description of Artificial Sequence: Synthetic oligonucleotide
uugcaccuaugacagcagg

SEQ ID NO: 1051135 - RNA, 19 nt, Artificial Sequence
  Description of Artificial Sequence: Synthetic oligonucleotide
ucgcuuaucugguacauuu

SEQ ID NO: 1051136 - RNA, 19 nt, Artificial Sequence
  Description of Artificial Sequence: Synthetic oligonucleotide
uucaaggggcuucuggccu

SEQ ID NO: 1051137 - RNA, 19 nt, Artificial Sequence
  Description of Artificial Sequence: Synthetic oligonucleotide
uccacgcucuacaaauuug

SEQ ID NO: 1051138 - RNA, 19 nt, Artificial Sequence
  Description of Artificial Sequence: Synthetic oligonucleotide
cauugagcggcugauguag

SEQ ID NO: 1051139 - RNA, 19 nt, Artificial Sequence
  Description of Artificial Sequence: Synthetic oligonucleotide
gcaggaggaacguucaagg

SEQ ID NO: 1051140 - RNA, 19 nt, Artificial Sequence
  Description of Artificial Sequence: Synthetic oligonucleotide
uuucuggggcgacacagcu

SEQ ID NO: 1051141 - RNA, 19 nt, Artificial Sequence
  Description of Artificial Sequence: Synthetic oligonucleotide
cucacgugggacaggacag

SEQ ID NO: 1051142 - RNA, 19 nt, Artificial Sequence
  Description of Artificial Sequence: Synthetic oligonucleotide
acguucaaggggcuucugg

SEQ ID NO: 1051143 - RNA, 19 nt, Artificial Sequence
  Description of Artificial Sequence: Synthetic oligonucleotide
cauccguuggaccaccagc

SEQ ID NO: 1051144 - RNA, 19 nt, Artificial Sequence
  Description of Artificial Sequence: Synthetic oligonucleotide
aucccacaucgguucaucc

SEQ ID NO: 1051145 - RNA, 19 nt, Artificial Sequence
  Description of Artificial Sequence: Synthetic oligonucleotide
gguaacuccaaacuuccac

SEQ ID NO: 1051146 - RNA, 19 nt, Artificial Sequence
  Description of Artificial Sequence: Synthetic oligonucleotide
cuacaaauuuguuuccaca

SEQ ID NO: 1051147 - RNA, 19 nt, Artificial Sequence
  Description of Artificial Sequence: Synthetic oligonucleotide
guaccugcuggguauaaac

SEQ ID NO: 1051148 - RNA, 19 nt, Artificial Sequence
  Description of Artificial Sequence: Synthetic oligonucleotide
guugcacguugucaugugg

SEQ ID NO: 1051149 - RNA, 19 nt, Artificial Sequence
  Description of Artificial Sequence: Synthetic oligonucleotide
ucgaccuggcuacaucugc

SEQ ID NO: 1051150 - RNA, 19 nt, Artificial Sequence
  Description of Artificial Sequence: Synthetic oligonucleotide
gucuguauggggcuucacc

SEQ ID NO: 1051151 - RNA, 19 nt, Artificial Sequence
  Description of Artificial Sequence: Synthetic oligonucleotide
cuuccacaagccuacgaug

SEQ ID NO: 1051152 - RNA, 19 nt, Artificial Sequence
  Description of Artificial Sequence: Synthetic oligonucleotide
uuugcuagccgcugugcac

SEQ ID NO: 1051153 - RNA, 19 nt, Artificial Sequence
  Description of Artificial Sequence: Synthetic oligonucleotide
uggagaguccugugguagg

SEQ ID NO: 1051154 - RNA, 19 nt, Artificial Sequence
  Description of Artificial Sequence: Synthetic oligonucleotide
aacuuccacaagccuacga

SEQ ID NO: 1051155 - RNA, 19 nt, Artificial Sequence
  Description of Artificial Sequence: Synthetic oligonucleotide
cacaagccuacgauggccc

SEQ ID NO: 1051156 - RNA, 19 nt, Artificial Sequence
  Description of Artificial Sequence: Synthetic oligonucleotide
gcacuuauccuugugauug

SEQ ID NO: 1051157 - RNA, 19 nt, Artificial Sequence
  Description of Artificial Sequence: Synthetic oligonucleotide
acaagccuacgauggcccc

SEQ ID NO: 1051158 - RNA, 19 nt, Artificial Sequence
  Description of Artificial Sequence: Synthetic oligonucleotide
guagaauaagggguuggag

SEQ ID NO: 1051159 - RNA, 19 nt, Artificial Sequence
  Description of Artificial Sequence: Synthetic oligonucleotide
auguagaauaagggguugg

SEQ ID NO: 1051160 - RNA, 19 nt, Artificial Sequence
  Description of Artificial Sequence: Synthetic oligonucleotide
caugguggaugcuacacca

SEQ ID NO: 1051161 - RNA, 19 nt, Artificial Sequence
  Description of Artificial Sequence: Synthetic oligonucleotide
caggacaguagcauccuug

SEQ ID NO: 1051162 - RNA, 19 nt, Artificial Sequence
  Description of Artificial Sequence: Synthetic oligonucleotide
acaguagcauccuuggaua

SEQ ID NO: 1051163 - RNA, 19 nt, Artificial Sequence
  Description of Artificial Sequence: Synthetic oligonucleotide
ucagaucuauacacacgga

SEQ ID NO: 1051164 - RNA, 19 nt, Artificial Sequence
  Description of Artificial Sequence: Synthetic oligonucleotide
guauccauucaugcaaacc

SEQ ID NO: 1051165 - RNA, 19 nt, Artificial Sequence
  Description of Artificial Sequence: Synthetic oligonucleotide
gucugaugcaacccgagca

SEQ ID NO: 1051166 - RNA, 19 nt, Artificial Sequence
  Description of Artificial Sequence: Synthetic oligonucleotide
uaccugcuggguauaaacu

SEQ ID NO: 1051167 - RNA, 19 nt, Artificial Sequence
  Description of Artificial Sequence: Synthetic oligonucleotide
agacaccuuagccagucca

SEQ ID NO: 1051168 - RNA, 19 nt, Artificial Sequence
  Description of Artificial Sequence: Synthetic oligonucleotide
ucgguagaugaugacaccu

SEQ ID NO: 1051169 - RNA, 19 nt, Artificial Sequence
  Description of Artificial Sequence: Synthetic oligonucleotide
ucccaaugaaaucgacccc

SEQ ID NO: 1051170 - RNA, 19 nt, Artificial Sequence
  Description of Artificial Sequence: Synthetic oligonucleotide
auuugcuagccgcugugca

SEQ ID NO: 1051171 - RNA, 19 nt, Artificial Sequence
  Description of Artificial Sequence: Synthetic oligonucleotide
caucugggaaauuggucag

SEQ ID NO: 1051172 - RNA, 19 nt, Artificial Sequence
  Description of Artificial Sequence: Synthetic oligonucleotide
aaguugcacguugucaugu

SEQ ID NO: 1051173 - RNA, 19 nt, Artificial Sequence
  Description of Artificial Sequence: Synthetic oligonucleotide
caggucuaagcagauuugg

SEQ ID NO: 1051174 - RNA, 19 nt, Artificial Sequence
  Description of Artificial Sequence: Synthetic oligonucleotide
aguccugagguguaccgca

SEQ ID NO: 1051175 - RNA, 19 nt, Artificial Sequence
  Description of Artificial Sequence: Synthetic oligonucleotide
auacacacggagguccugg

SEQ ID NO: 1051176 - RNA, 19 nt, Artificial Sequence
  Description of Artificial Sequence: Synthetic oligonucleotide
ugaugcaacccgagcaccu

SEQ ID NO: 1051177 - RNA, 19 nt, Artificial Sequence
  Description of Artificial Sequence: Synthetic oligonucleotide
guucaaggggcuucuggcc

SEQ ID NO: 1051178 - RNA, 19 nt, Artificial Sequence
  Description of Artificial Sequence: Synthetic oligonucleotide
ggaguaccaucucauaggc

SEQ ID NO: 1051179 - RNA, 19 nt, Artificial Sequence
  Description of Artificial Sequence: Synthetic oligonucleotide
uguucuuaucugucaggcu

SEQ ID NO: 1051180 - RNA, 19 nt, Artificial Sequence
  Description of Artificial Sequence: Synthetic oligonucleotide
ugagucacuccaggcacgg

SEQ ID NO: 1051181 - RNA, 19 nt, Artificial Sequence
  Description of Artificial Sequence: Synthetic oligonucleotide
gacaguagcauccuuggau

SEQ ID NO: 1051182 - RNA, 19 nt, Artificial Sequence
  Description of Artificial Sequence: Synthetic oligonucleotide
caguaucccacaucgguuc

SEQ ID NO: 1051183 - RNA, 19 nt, Artificial Sequence
  Description of Artificial Sequence: Synthetic oligonucleotide
ugcgccuuggggccuuucg

SEQ ID NO: 1051184 - RNA, 19 nt, Artificial Sequence
  Description of Artificial Sequence: Synthetic oligonucleotide
uuguugguagaaaccacuu

SEQ ID NO: 1051185 - RNA, 19 nt, Artificial Sequence
  Description of Artificial Sequence: Synthetic oligonucleotide
acauuugcuagccgcugug

SEQ ID NO: 1051186 - RNA, 19 nt, Artificial Sequence
  Description of Artificial Sequence: Synthetic oligonucleotide
uggcacuuauccuugugau

SEQ ID NO: 1051187 - RNA, 19 nt, Artificial Sequence
  Description of Artificial Sequence: Synthetic oligonucleotide
ugccacacuccuccucugg

SEQ ID NO: 1051188 - RNA, 19 nt, Artificial Sequence
  Description of Artificial Sequence: Synthetic oligonucleotide
uccacaagccuacgauggc

SEQ ID NO: 1051189 - RNA, 19 nt, Artificial Sequence
  Description of Artificial Sequence: Synthetic oligonucleotide
aucuauacacacggagguc

SEQ ID NO: 1051190 - RNA, 19 nt, Artificial Sequence
  Description of Artificial Sequence: Synthetic oligonucleotide
acaguggucccaaugaaau

SEQ ID NO: 1051191 - RNA, 19 nt, Artificial Sequence
  Description of Artificial Sequence: Synthetic oligonucleotide
cuuucuggggcgacacagc

SEQ ID NO: 1051192 - RNA, 19 nt, Artificial Sequence
  Description of Artificial Sequence: Synthetic oligonucleotide
cuuucgguagaugaugaca

SEQ ID NO: 1051193 - RNA, 19 nt, Artificial Sequence
  Description of Artificial Sequence: Synthetic oligonucleotide
guagaugaugacaccugcc

SEQ ID NO: 1051194 - RNA, 19 nt, Artificial Sequence
  Description of Artificial Sequence: Synthetic oligonucleotide
ugcugcgccaguguggggc

SEQ ID NO: 1051195 - RNA, 19 nt, Artificial Sequence
  Description of Artificial Sequence: Synthetic oligonucleotide
acaccuuagccaguccaac

SEQ ID NO: 1051196 - RNA, 19 nt, Artificial Sequence
  Description of Artificial Sequence: Synthetic oligonucleotide
acgcucuacaaauuuguuu

SEQ ID NO: 1051197 - RNA, 19 nt, Artificial Sequence
  Description of Artificial Sequence: Synthetic oligonucleotide
ggaaaggaaccuucagagc

SEQ ID NO: 1051198 - RNA, 19 nt, Artificial Sequence
  Description of Artificial Sequence: Synthetic oligonucleotide
gauugcauaccccaugguu

SEQ ID NO: 1051199 - RNA, 19 nt, Artificial Sequence
  Description of Artificial Sequence: Synthetic oligonucleotide
agagcauccguuggaccac

SEQ ID NO: 1051200 - RNA, 19 nt, Artificial Sequence
  Description of Artificial Sequence: Synthetic oligonucleotide
acacagcucaccagcuugc

SEQ ID NO: 1051201 - RNA, 19 nt, Artificial Sequence
  Description of Artificial Sequence: Synthetic oligonucleotide
guucgugcaguccugaggu

SEQ ID NO: 1051202 - RNA, 19 nt, Artificial Sequence
  Description of Artificial Sequence: Synthetic oligonucleotide
uccugugguaggcuugggu

SEQ ID NO: 1051203 - RNA, 19 nt, Artificial Sequence
  Description of Artificial Sequence: Synthetic oligonucleotide
ugauugcauaccccauggu

SEQ ID NO: 1051204 - RNA, 19 nt, Artificial Sequence
  Description of Artificial Sequence: Synthetic oligonucleotide
uaccccaugguuguugcac

SEQ ID NO: 1051205 - RNA, 19 nt, Artificial Sequence
  Description of Artificial Sequence: Synthetic oligonucleotide
gcuggguauaaacuggaac

SEQ ID NO: 1051206 - RNA, 19 nt, Artificial Sequence
  Description of Artificial Sequence: Synthetic oligonucleotide
aaaggaaccuucagagcau

SEQ ID NO: 1051207 - RNA, 19 nt, Artificial Sequence
  Description of Artificial Sequence: Synthetic oligonucleotide
cuacgauggccccugggug

SEQ ID NO: 1051208 - RNA, 19 nt, Artificial Sequence
  Description of Artificial Sequence: Synthetic oligonucleotide
cuugcaccuaugacagcag

SEQ ID NO: 1051209 - RNA, 19 nt, Artificial Sequence
  Description of Artificial Sequence: Synthetic oligonucleotide
ggcgacacagcucaccagc

SEQ ID NO: 1051210 - RNA, 19 nt, Artificial Sequence
  Description of Artificial Sequence: Synthetic oligonucleotide
aguugcacguugucaugug

SEQ ID NO: 1051211 - RNA, 19 nt, Artificial Sequence
  Description of Artificial Sequence: Synthetic oligonucleotide
uugcuagccgcugugcaca

SEQ ID NO: 1051212 - RNA, 19 nt, Artificial Sequence
  Description of Artificial Sequence: Synthetic oligonucleotide
caacccgagcaccuggccc

SEQ ID NO: 1051213 - RNA, 19 nt, Artificial Sequence
  Description of Artificial Sequence: Synthetic oligonucleotide
aggcuuaaccggugguguc

SEQ ID NO: 1051214 - RNA, 19 nt, Artificial Sequence
  Description of Artificial Sequence: Synthetic oligonucleotide
gccaucacagaacuccucc

SEQ ID NO: 1051215 - RNA, 19 nt, Artificial Sequence
  Description of Artificial Sequence: Synthetic oligonucleotide
cacuuauccuugugauugc

SEQ ID NO: 1051216 - RNA, 19 nt, Artificial Sequence
  Description of Artificial Sequence: Synthetic oligonucleotide
cuuguugguagaaaccacu

SEQ ID NO: 1051217 - RNA, 19 nt, Artificial Sequence
  Description of Artificial Sequence: Synthetic oligonucleotide
ugcucgcuuaucugguaca

SEQ ID NO: 1051218 - RNA, 19 nt, Artificial Sequence
  Description of Artificial Sequence: Synthetic oligonucleotide
cuguauggggcuucaccac

SEQ ID NO: 1051219 - RNA, 19 nt, Artificial Sequence
  Description of Artificial Sequence: Synthetic oligonucleotide
aggucgaccuggcuacauc

SEQ ID NO: 1051220 - RNA, 19 nt, Artificial Sequence
  Description of Artificial Sequence: Synthetic oligonucleotide
ugcacuuagcagagcaguu

SEQ ID NO: 1051221 - RNA, 19 nt, Artificial Sequence
  Description of Artificial Sequence: Synthetic oligonucleotide
guauaaacuggaacaggga

SEQ ID NO: 1051222 - RNA, 19 nt, Artificial Sequence
  Description of Artificial Sequence: Synthetic oligonucleotide
uaacauugagcggcugaug

SEQ ID NO: 1051223 - RNA, 19 nt, Artificial Sequence
  Description of Artificial Sequence: Synthetic oligonucleotide
aguaucccacaucgguuca

SEQ ID NO: 1051224 - RNA, 19 nt, Artificial Sequence
  Description of Artificial Sequence: Synthetic oligonucleotide
cacugcugcgccagugugg

SEQ ID NO: 1051225 - RNA, 19 nt, Artificial Sequence
  Description of Artificial Sequence: Synthetic oligonucleotide
ugccggccuagcaaguucu

SEQ ID NO: 1051226 - RNA, 19 nt, Artificial Sequence
  Description of Artificial Sequence: Synthetic oligonucleotide
ggguauaaacuggaacagg

SEQ ID NO: 1051227 - RNA, 19 nt, Artificial Sequence
  Description of Artificial Sequence: Synthetic oligonucleotide
ucccuguuccagaucucca

SEQ ID NO: 1051228 - RNA, 19 nt, Artificial Sequence
  Description of Artificial Sequence: Synthetic oligonucleotide
guagaacuugucccuguuc

SEQ ID NO: 1051229 - RNA, 19 nt, Artificial Sequence
  Description of Artificial Sequence: Synthetic oligonucleotide
ggauacaucuugccacugc

SEQ ID NO: 1051230 - RNA, 19 nt, Artificial Sequence
  Description of Artificial Sequence: Synthetic oligonucleotide
uaagcagauuugguaccug

SEQ ID NO: 1051231 - RNA, 19 nt, Artificial Sequence
  Description of Artificial Sequence: Synthetic oligonucleotide
caucauggcucaugcccag

SEQ ID NO: 1051232 - RNA, 19 nt, Artificial Sequence
  Description of Artificial Sequence: Synthetic oligonucleotide
ggucuaagcagauuuggua

SEQ ID NO: 1051233 - RNA, 19 nt, Artificial Sequence
  Description of Artificial Sequence: Synthetic oligonucleotide
ucgcacuugguacccugga

SEQ ID NO: 1051234 - RNA, 19 nt, Artificial Sequence
  Description of Artificial Sequence: Synthetic oligonucleotide
cuggcacuuauccuuguga

SEQ ID NO: 1051235 - RNA, 19 nt, Artificial Sequence
  Description of Artificial Sequence: Synthetic oligonucleotide
ggcaguauccauucaugca

SEQ ID NO: 1051236 - RNA, 19 nt, Artificial Sequence
  Description of Artificial Sequence: Synthetic oligonucleotide
auccguuggaccaccagcu

SEQ ID NO: 1051237 - RNA, 19 nt, Artificial Sequence
  Description of Artificial Sequence: Synthetic oligonucleotide
acaucgguucauccugcca

SEQ ID NO: 1051238 - RNA, 19 nt, Artificial Sequence
  Description of Artificial Sequence: Synthetic oligonucleotide
ugcuacaccaauggggcuu

SEQ ID NO: 1051239 - RNA, 19 nt, Artificial Sequence
  Description of Artificial Sequence: Synthetic oligonucleotide
gcacggucccuccagaccc

SEQ ID NO: 1051240 - RNA, 19 nt, Artificial Sequence
  Description of Artificial Sequence: Synthetic oligonucleotide
caccuaugacagcaggcac

SEQ ID NO: 1051241 - RNA, 19 nt, Artificial Sequence
  Description of Artificial Sequence: Synthetic oligonucleotide
cugcucgcuuaucugguac

SEQ ID NO: 1051242 - RNA, 19 nt, Artificial Sequence
  Description of Artificial Sequence: Synthetic oligonucleotide
uugagcggcugauguagaa

SEQ ID NO: 1051243 - RNA, 19 nt, Artificial Sequence
  Description of Artificial Sequence: Synthetic oligonucleotide
cugaugcaacccgagcacc

SEQ ID NO: 1051244 - RNA, 19 nt, Artificial Sequence
  Description of Artificial Sequence: Synthetic oligonucleotide
uggucccaaugaaaucgac

SEQ ID NO: 1051245 - RNA, 19 nt, Artificial Sequence
  Description of Artificial Sequence: Synthetic oligonucleotide
uugggucaugaugcagccg

SEQ ID NO: 1051246 - RNA, 19 nt, Artificial Sequence
  Description of Artificial Sequence: Synthetic oligonucleotide
guucucagaucuauacaca

SEQ ID NO: 1051247 - RNA, 19 nt, Artificial Sequence
  Description of Artificial Sequence: Synthetic oligonucleotide
caguucucagaucuauaca

SEQ ID NO: 1051248 - RNA, 19 nt, Artificial Sequence
  Description of Artificial Sequence: Synthetic oligonucleotide
gacuccguaguaggaggag

SEQ ID NO: 1051249 - RNA, 19 nt, Artificial Sequence
  Description of Artificial Sequence: Synthetic oligonucleotide
ggucccaaugaaaucgacc

SEQ ID NO: 1051250 - RNA, 19 nt, Artificial Sequence
  Description of Artificial Sequence: Synthetic oligonucleotide
ugggugcccuagcugguca

SEQ ID NO: 1051251 - RNA, 19 nt, Artificial Sequence
  Description of Artificial Sequence: Synthetic oligonucleotide
agcagggguucgugcaguc

SEQ ID NO: 1051252 - RNA, 19 nt, Artificial Sequence
  Description of Artificial Sequence: Synthetic oligonucleotide
guacauuugcuagccgcug

SEQ ID NO: 1051253 - RNA, 19 nt, Artificial Sequence
  Description of Artificial Sequence: Synthetic oligonucleotide
acuuauccuugugauugca

SEQ ID NO: 1051254 - RNA, 19 nt, Artificial Sequence
  Description of Artificial Sequence: Synthetic oligonucleotide
guacaguaucccacaucgg

SEQ ID NO: 1051255 - RNA, 19 nt, Artificial Sequence
  Description of Artificial Sequence: Synthetic oligonucleotide
caguacaguaucccacauc

SEQ ID NO: 1051256 - RNA, 19 nt, Artificial Sequence
  Description of Artificial Sequence: Synthetic oligonucleotide
cacaucgguucauccugcc

SEQ ID NO: 1051257 - RNA, 19 nt, Artificial Sequence
  Description of Artificial Sequence: Synthetic oligonucleotide
gggaugcuaaagguaaagc

SEQ ID NO: 1051258 - RNA, 19 nt, Artificial Sequence
  Description of Artificial Sequence: Synthetic oligonucleotide
ggcuuaaccgguggugucg

SEQ ID NO: 1051259 - RNA, 19 nt, Artificial Sequence
  Description of Artificial Sequence: Synthetic oligonucleotide
aguguaacauugagcggcu

SEQ ID NO: 1051260 - RNA, 19 nt, Artificial Sequence
  Description of Artificial Sequence: Synthetic oligonucleotide
uccugagguguaccgcagu

SEQ ID NO: 1051261 - RNA, 19 nt, Artificial Sequence
  Description of Artificial Sequence: Synthetic oligonucleotide
acuuagcagagcaguucuc

SEQ ID NO: 1051262 - RNA, 19 nt, Artificial Sequence
  Description of Artificial Sequence: Synthetic oligonucleotide
cucuaggucgaccuggcua

SEQ ID NO: 1051263 - RNA, 19 nt, Artificial Sequence
  Description of Artificial Sequence: Synthetic oligonucleotide
cguucaaggggcuucuggc

SEQ ID NO: 1051264 - RNA, 19 nt, Artificial Sequence
  Description of Artificial Sequence: Synthetic oligonucleotide
guaccaucucauaggcacc

SEQ ID NO: 1051265 - RNA, 19 nt, Artificial Sequence
  Description of Artificial Sequence: Synthetic oligonucleotide
aggucuaagcagauuuggu

SEQ ID NO: 1051266 - RNA, 19 nt, Artificial Sequence
  Description of Artificial Sequence: Synthetic oligonucleotide
uucuagugugguccugguu

SEQ ID NO: 1051267 - RNA, 19 nt, Artificial Sequence
  Description of Artificial Sequence: Synthetic oligonucleotide
ggaggagaaagugcaggag

SEQ ID NO: 1051268 - RNA, 19 nt, Artificial Sequence
  Description of Artificial Sequence: Synthetic oligonucleotide
acauugagcggcugaugua

SEQ ID NO: 1051269 - RNA, 19 nt, Artificial Sequence
  Description of Artificial Sequence: Synthetic oligonucleotide
cuucaccuugcaccuauga

SEQ ID NO: 1051270 - RNA, 19 nt, Artificial Sequence
  Description of Artificial Sequence: Synthetic oligonucleotide
ccccgugauaaguugcacg

SEQ ID NO: 1051271 - RNA, 19 nt, Artificial Sequence
  Description of Artificial Sequence: Synthetic oligonucleotide
caguggucccaaugaaauc

SEQ ID NO: 1051272 - RNA, 19 nt, Artificial Sequence
  Description of Artificial Sequence: Synthetic oligonucleotide
ccuagcaaguucuguuccc

SEQ ID NO: 1051273 - RNA, 19 nt, Artificial Sequence
  Description of Artificial Sequence: Synthetic oligonucleotide
uaucccacaucgguucauc

SEQ ID NO: 1051274 - RNA, 19 nt, Artificial Sequence
  Description of Artificial Sequence: Synthetic oligonucleotide
ucuccacgcucuacaaauu

SEQ ID NO: 1051275 - RNA, 19 nt, Artificial Sequence
  Description of Artificial Sequence: Synthetic oligonucleotide
uucgugcaguccugaggug

SEQ ID NO: 1051276 - RNA, 19 nt, Artificial Sequence
  Description of Artificial Sequence: Synthetic oligonucleotide
acaguaucccacaucgguu

SEQ ID NO: 1051277 - RNA, 19 nt, Artificial Sequence
  Description of Artificial Sequence: Synthetic oligonucleotide
aaccuucagagcauccguu

SEQ ID NO: 1051278 - RNA, 19 nt, Artificial Sequence
  Description of Artificial Sequence: Synthetic oligonucleotide
gcagacuccguaguaggag

SEQ ID NO: 1051279 - RNA, 19 nt, Artificial Sequence
  Description of Artificial Sequence: Synthetic oligonucleotide
acacacggagguccuggca

SEQ ID NO: 1051280 - RNA, 19 nt, Artificial Sequence
  Description of Artificial Sequence: Synthetic oligonucleotide
cuccguaguaggaggagaa

SEQ ID NO: 1051281 - RNA, 19 nt, Artificial Sequence
  Description of Artificial Sequence: Synthetic oligonucleotide
uccguuggaccaccagcuc

SEQ ID NO: 1051282 - RNA, 19 nt, Artificial Sequence
  Description of Artificial Sequence: Synthetic oligonucleotide
gccaggauacaucuugcca

SEQ ID NO: 1051283 - RNA, 19 nt, Artificial Sequence
  Description of Artificial Sequence: Synthetic oligonucleotide
gguggaugcuacaccaaug

SEQ ID NO: 1051284 - RNA, 19 nt, Artificial Sequence
  Description of Artificial Sequence: Synthetic oligonucleotide
cccacaucgguucauccug

SEQ ID NO: 1051285 - RNA, 19 nt, Artificial Sequence
  Description of Artificial Sequence: Synthetic oligonucleotide
acgaaugccucuaggucga

SEQ ID NO: 1051286 - RNA, 19 nt, Artificial Sequence
  Description of Artificial Sequence: Synthetic oligonucleotide
ccguaguaggaggagaaag

SEQ ID NO: 1051287 - RNA, 19 nt, Artificial Sequence
  Description of Artificial Sequence: Synthetic oligonucleotide
ugcuagccgcugugcacag

SEQ ID NO: 1051288 - RNA, 19 nt, Artificial Sequence
  Description of Artificial Sequence: Synthetic oligonucleotide
uccuuucuggggcgacaca

SEQ ID NO: 1051289 - RNA, 19 nt, Artificial Sequence
  Description of Artificial Sequence: Synthetic oligonucleotide
aagggguuggagaguccug

SEQ ID NO: 1051290 - RNA, 19 nt, Artificial Sequence
  Description of Artificial Sequence: Synthetic oligonucleotide
uacccuggaguaccaucuc

SEQ ID NO: 1051291 - RNA, 19 nt, Artificial Sequence
  Description of Artificial Sequence: Synthetic oligonucleotide
gacaccuuagccaguccaa

SEQ ID NO: 1051292 - RNA, 19 nt, Artificial Sequence
  Description of Artificial Sequence: Synthetic oligonucleotide
agacccaggcuuaaccggu

SEQ ID NO: 1051293 - RNA, 19 nt, Artificial Sequence
  Description of Artificial Sequence: Synthetic oligonucleotide
gggaacgcagagcccaagc

SEQ ID NO: 1051294 - RNA, 19 nt, Artificial Sequence
  Description of Artificial Sequence: Synthetic oligonucleotide
cccauguagaauaaggggu

SEQ ID NO: 1051295 - RNA, 19 nt, Artificial Sequence
  Description of Artificial Sequence: Synthetic oligonucleotide
ccuuucuggggcgacacag

SEQ ID NO: 1051296 - RNA, 19 nt, Artificial Sequence
  Description of Artificial Sequence: Synthetic oligonucleotide
acaccugccugcucgcuua

SEQ ID NO: 1051297 - RNA, 19 nt, Artificial Sequence
  Description of Artificial Sequence: Synthetic oligonucleotide
cacuugguacccuggagua

SEQ ID NO: 1051298 - RNA, 19 nt, Artificial Sequence
  Description of Artificial Sequence: Synthetic oligonucleotide
ccaaacuuccacaagccua

SEQ ID NO: 1051299 - RNA, 19 nt, Artificial Sequence
  Description of Artificial Sequence: Synthetic oligonucleotide
caguccugagguguaccgc

SEQ ID NO: 1051300 - RNA, 19 nt, Artificial Sequence
  Description of Artificial Sequence: Synthetic oligonucleotide
ggaacguucaaggggcuuc

SEQ ID NO: 1051301 - RNA, 19 nt, Artificial Sequence
  Description of Artificial Sequence: Synthetic oligonucleotide
aacguucaaggggcuucug

SEQ ID NO: 1051302 - RNA, 19 nt, Artificial Sequence
  Description of Artificial Sequence: Synthetic oligonucleotide
agucuguauggggcuucac

SEQ ID NO: 1051303 - RNA, 19 nt, Artificial Sequence
  Description of Artificial Sequence: Synthetic oligonucleotide
uccguaguaggaggagaaa

SEQ ID NO: 1051304 - RNA, 19 nt, Artificial Sequence
  Description of Artificial Sequence: Synthetic oligonucleotide
ggccuagcaaguucuguuc

SEQ ID NO: 1051305 - RNA, 19 nt, Artificial Sequence
  Description of Artificial Sequence: Synthetic oligonucleotide
cauucucacgugggacagg

SEQ ID NO: 1051306 - RNA, 19 nt, Artificial Sequence
  Description of Artificial Sequence: Synthetic oligonucleotide
aggauacaucuugccacug

SEQ ID NO: 1051307 - RNA, 19 nt, Artificial Sequence
  Description of Artificial Sequence: Synthetic oligonucleotide
augccucuaggucgaccug

SEQ ID NO: 1051308 - RNA, 19 nt, Artificial Sequence
  Description of Artificial Sequence: Synthetic oligonucleotide
cuugaccugcuugggguuc

SEQ ID NO: 1051309 - RNA, 19 nt, Artificial Sequence
  Description of Artificial Sequence: Synthetic oligonucleotide
gcuuaaccgguggugucgg

SEQ ID NO: 1051310 - RNA, 19 nt, Artificial Sequence
  Description of Artificial Sequence: Synthetic oligonucleotide
cagacaccuuagccagucc

SEQ ID NO: 1051311 - RNA, 19 nt, Artificial Sequence
  Description of Artificial Sequence: Synthetic oligonucleotide
ucgguucauccugccagga

SEQ ID NO: 1051312 - RNA, 19 nt, Artificial Sequence
  Description of Artificial Sequence: Synthetic oligonucleotide
guaacauugagcggcugau

SEQ ID NO: 1051313 - RNA, 19 nt, Artificial Sequence
  Description of Artificial Sequence: Synthetic oligonucleotide
cugggaaauuggucaggca

SEQ ID NO: 1051314 - RNA, 19 nt, Artificial Sequence
  Description of Artificial Sequence: Synthetic oligonucleotide
caggauacaucuugccacu

SEQ ID NO: 1051315 - RNA, 19 nt, Artificial Sequence
  Description of Artificial Sequence: Synthetic oligonucleotide
uaccgcagucacacugcuc

SEQ ID NO: 1051316 - RNA, 19 nt, Artificial Sequence
  Description of Artificial Sequence: Synthetic oligonucleotide
cuuggcagacuccguagua

SEQ ID NO: 1051317 - RNA, 19 nt, Artificial Sequence
  Description of Artificial Sequence: Synthetic oligonucleotide
cagggccacccacgaaccg

SEQ ID NO: 1051318 - RNA, 19 nt, Artificial Sequence
  Description of Artificial Sequence: Synthetic oligonucleotide
uggggaacgcagagcccaa

SEQ ID NO: 1051319 - RNA, 19 nt, Artificial Sequence
  Description of Artificial Sequence: Synthetic oligonucleotide
gagcauccguuggaccacc

SEQ ID NO: 1051320 - RNA, 19 nt, Artificial Sequence
  Description of Artificial Sequence: Synthetic oligonucleotide
auugagcggcugauguaga

SEQ ID NO: 1051321 - RNA, 19 nt, Artificial Sequence
  Description of Artificial Sequence: Synthetic oligonucleotide
cuuggggccuuucgguaga

SEQ ID NO: 1051322 - RNA, 19 nt, Artificial Sequence
  Description of Artificial Sequence: Synthetic oligonucleotide
ccacaagccuacgauggcc

SEQ ID NO: 1051323 - RNA, 19 nt, Artificial Sequence
  Description of Artificial Sequence: Synthetic oligonucleotide
acaggacaguagcauccuu

SEQ ID NO: 1051324 - RNA, 19 nt, Artificial Sequence
  Description of Artificial Sequence: Synthetic oligonucleotide
gcgccuuggggccuuucgg

SEQ ID NO: 1051325 - RNA, 19 nt, Artificial Sequence
  Description of Artificial Sequence: Synthetic oligonucleotide
ucuuaucugucaggcuguu

SEQ ID NO: 1051326 - RNA, 19 nt, Artificial Sequence
  Description of Artificial Sequence: Synthetic oligonucleotide
cuccucgcacuugguaccc

SEQ ID NO: 1051327 - RNA, 19 nt, Artificial Sequence
  Description of Artificial Sequence: Synthetic oligonucleotide
cuuauccuugugauugcau

SEQ ID NO: 1051328 - RNA, 19 nt, Artificial Sequence
  Description of Artificial Sequence: Synthetic oligonucleotide
cgagggaugcuaaagguaa

SEQ ID NO: 1051329 - RNA, 19 nt, Artificial Sequence
  Description of Artificial Sequence: Synthetic oligonucleotide
gacccaggcuuaaccggug

SEQ ID NO: 1051330 - RNA, 19 nt, Artificial Sequence
  Description of Artificial Sequence: Synthetic oligonucleotide
cugagguguaccgcaguca

SEQ ID NO: 1051331 - RNA, 19 nt, Artificial Sequence
  Description of Artificial Sequence: Synthetic oligonucleotide
cuauacacacggagguccu

SEQ ID NO: 1051332 - RNA, 19 nt, Artificial Sequence
  Description of Artificial Sequence: Synthetic oligonucleotide
gguaaagcaagagucugau

SEQ ID NO: 1051333 - RNA, 19 nt, Artificial Sequence
  Description of Artificial Sequence: Synthetic oligonucleotide
gcuuguugguagaaaccac

SEQ ID NO: 1051334 - RNA, 19 nt, Artificial Sequence
  Description of Artificial Sequence: Synthetic oligonucleotide
cuaagcagauuugguaccu

SEQ ID NO: 1051335 - RNA, 19 nt, Artificial Sequence
  Description of Artificial Sequence: Synthetic oligonucleotide
gcauccguuggaccaccag

SEQ ID NO: 1051336 - RNA, 19 nt, Artificial Sequence
  Description of Artificial Sequence: Synthetic oligonucleotide
cacgaaccgguugacaucu

SEQ ID NO: 1051337 - RNA, 19 nt, Artificial Sequence
  Description of Artificial Sequence: Synthetic oligonucleotide
guccugagguguaccgcag

SEQ ID NO: 1051338 - RNA, 19 nt, Artificial Sequence
  Description of Artificial Sequence: Synthetic oligonucleotide
ccacaucgguucauccugc

SEQ ID NO: 1051339 - RNA, 19 nt, Artificial Sequence
  Description of Artificial Sequence: Synthetic oligonucleotide
gugccggccuagcaaguuc

SEQ ID NO: 1051340 - RNA, 19 nt, Artificial Sequence
  Description of Artificial Sequence: Synthetic oligonucleotide
gaaauuggucaggcagucu

SEQ ID NO: 1051341 - RNA, 19 nt, Artificial Sequence
  Description of Artificial Sequence: Synthetic oligonucleotide
gcacuuagcagagcaguuc

SEQ ID NO: 1051342 - RNA, 19 nt, Artificial Sequence
  Description of Artificial Sequence: Synthetic oligonucleotide
uacaccaauggggcuucua

SEQ ID NO: 1051343 - RNA, 19 nt, Artificial Sequence
  Description of Artificial Sequence: Synthetic oligonucleotide
ccauucucacgugggacag

SEQ ID NO: 1051344 - RNA, 19 nt, Artificial Sequence
  Description of Artificial Sequence: Synthetic oligonucleotide
gagggaugcuaaagguaaa

SEQ ID NO: 1051345 - RNA, 19 nt, Artificial Sequence
  Description of Artificial Sequence: Synthetic oligonucleotide
ccugagguguaccgcaguc

SEQ ID NO: 1051346 - RNA, 19 nt, Artificial Sequence
  Description of Artificial Sequence: Synthetic oligonucleotide
ggaacgcagagcccaagcu

SEQ ID NO: 1051347 - RNA, 19 nt, Artificial Sequence
  Description of Artificial Sequence: Synthetic oligonucleotide
caguccaacagugguccca

SEQ ID NO: 1051348 - RNA, 19 nt, Artificial Sequence
  Description of Artificial Sequence: Synthetic oligonucleotide
gaacguucaaggggcuucu

SEQ ID NO: 1051349 - RNA, 19 nt, Artificial Sequence
  Description of Artificial Sequence: Synthetic oligonucleotide
gagguguaccgcagucaca

SEQ ID NO: 1051350 - RNA, 19 nt, Artificial Sequence
  Description of Artificial Sequence: Synthetic oligonucleotide
uaggucgaccuggcuacau

SEQ ID NO: 1051351 - RNA, 19 nt, Artificial Sequence
  Description of Artificial Sequence: Synthetic oligonucleotide
guguaacauugagcggcug

SEQ ID NO: 1051352 - RNA, 19 nt, Artificial Sequence
  Description of Artificial Sequence: Synthetic oligonucleotide
ccuaugacagcaggcacca

SEQ ID NO: 1051353 - RNA, 19 nt, Artificial Sequence
  Description of Artificial Sequence: Synthetic oligonucleotide
gccuacgauggccccuggg

SEQ ID NO: 1051354 - RNA, 19 nt, Artificial Sequence
  Description of Artificial Sequence: Synthetic oligonucleotide
gccgcugugcacagugggg

SEQ ID NO: 1051355 - RNA, 19 nt, Artificial Sequence
  Description of Artificial Sequence: Synthetic oligonucleotide
agccuacgauggccccugg

SEQ ID NO: 1051356 - RNA, 19 nt, Artificial Sequence
  Description of Artificial Sequence: Synthetic oligonucleotide
uccguccuuucuggggcga

SEQ ID NO: 1051357 - RNA, 19 nt, Artificial Sequence
  Description of Artificial Sequence: Synthetic oligonucleotide
ggcuacaucugcugaauuu

SEQ ID NO: 1051358 - RNA, 19 nt, Artificial Sequence
  Description of Artificial Sequence: Synthetic oligonucleotide
gucaugaugcagccgccau

SEQ ID NO: 1051359 - RNA, 19 nt, Artificial Sequence
  Description of Artificial Sequence: Synthetic oligonucleotide
ggucacauccguccuuucu

SEQ ID NO: 1051360 - RNA, 19 nt, Artificial Sequence
  Description of Artificial Sequence: Synthetic oligonucleotide
ccaggcuuaaccgguggug

SEQ ID NO: 1051361 - RNA, 19 nt, Artificial Sequence
  Description of Artificial Sequence: Synthetic oligonucleotide
uagugugguccugguucac

SEQ ID NO: 1051362 - RNA, 19 nt, Artificial Sequence
  Description of Artificial Sequence: Synthetic oligonucleotide
ggacaguagcauccuugga

SEQ ID NO: 1051363 - RNA, 19 nt, Artificial Sequence
  Description of Artificial Sequence: Synthetic oligonucleotide
auggggcuucuaguguggu

SEQ ID NO: 1051364 - RNA, 19 nt, Artificial Sequence
  Description of Artificial Sequence: Synthetic oligonucleotide
gugcaaaauuuggcuugac

SEQ ID NO: 1051365 - RNA, 19 nt, Artificial Sequence
  Description of Artificial Sequence: Synthetic oligonucleotide
cccgugauaaguugcacgu

SEQ ID NO: 1051366 - RNA, 19 nt, Artificial Sequence
  Description of Artificial Sequence: Synthetic oligonucleotide
cguuggaccaccagcucuc

SEQ ID NO: 1051367 - RNA, 19 nt, Artificial Sequence
  Description of Artificial Sequence: Synthetic oligonucleotide
uugguaccugcuggguaua

SEQ ID NO: 1051368 - RNA, 19 nt, Artificial Sequence
  Description of Artificial Sequence: Synthetic oligonucleotide
cauguuggcuucuggccau

SEQ ID NO: 1051369 - RNA, 19 nt, Artificial Sequence
  Description of Artificial Sequence: Synthetic oligonucleotide
agggguucgugcaguccug

SEQ ID NO: 1051370 - RNA, 19 nt, Artificial Sequence
  Description of Artificial Sequence: Synthetic oligonucleotide
ccacgaaccgguugacauc

SEQ ID NO: 1051371 - RNA, 19 nt, Artificial Sequence
  Description of Artificial Sequence: Synthetic oligonucleotide
aggaacguucaaggggcuu

SEQ ID NO: 1051372 - RNA, 19 nt, Artificial Sequence
  Description of Artificial Sequence: Synthetic oligonucleotide
acccacgaaccgguugaca

SEQ ID NO: 1051373 - RNA, 19 nt, Artificial Sequence
  Description of Artificial Sequence: Synthetic oligonucleotide
gccuuucgguagaugauga

SEQ ID NO: 1051374 - RNA, 19 nt, Artificial Sequence
  Description of Artificial Sequence: Synthetic oligonucleotide
caggcuuaaccgguggugu

SEQ ID NO: 1051375 - RNA, 19 nt, Artificial Sequence
  Description of Artificial Sequence: Synthetic oligonucleotide
cuucuagugugguccuggu

SEQ ID NO: 1051376 - RNA, 19 nt, Artificial Sequence
  Description of Artificial Sequence: Synthetic oligonucleotide
gccccgagggaugcuaaag

SEQ ID NO: 1051377 - RNA, 19 nt, Artificial Sequence
  Description of Artificial Sequence: Synthetic oligonucleotide
cuugaccagcuggcaggug

SEQ ID NO: 1051378 - RNA, 19 nt, Artificial Sequence
  Description of Artificial Sequence: Synthetic oligonucleotide
agcccaagcuuugggucau

SEQ ID NO: 1051379 - RNA, 19 nt, Artificial Sequence
  Description of Artificial Sequence: Synthetic oligonucleotide
ggucaugaugcagccgcca

SEQ ID NO: 1051380 - RNA, 19 nt, Artificial Sequence
  Description of Artificial Sequence: Synthetic oligonucleotide
ggugcccuagcuggucacc

SEQ ID NO: 1051381 - RNA, 19 nt, Artificial Sequence
  Description of Artificial Sequence: Synthetic oligonucleotide
cugggugcccuagcugguc

SEQ ID NO: 1051382 - RNA, 19 nt, Artificial Sequence
  Description of Artificial Sequence: Synthetic oligonucleotide
acggucccuccagacccag

SEQ ID NO: 1051383 - RNA, 19 nt, Artificial Sequence
  Description of Artificial Sequence: Synthetic oligonucleotide
ggggugcaaaauuuggcuu

SEQ ID NO: 1051384 - RNA, 19 nt, Artificial Sequence
  Description of Artificial Sequence: Synthetic oligonucleotide
guccugugguaggcuuggg

SEQ ID NO: 1051385 - RNA, 19 nt, Artificial Sequence
  Description of Artificial Sequence: Synthetic oligonucleotide
ccacgcucuacaaauuugu

SEQ ID NO: 1051386 - RNA, 19 nt, Artificial Sequence
  Description of Artificial Sequence: Synthetic oligonucleotide
ugcauggcacuggcacuua

SEQ ID NO: 1051387 - RNA, 19 nt, Artificial Sequence
  Description of Artificial Sequence: Synthetic oligonucleotide
cuccacgcucuacaaauuu

SEQ ID NO: 1051388 - RNA, 19 nt, Artificial Sequence
  Description of Artificial Sequence: Synthetic oligonucleotide
gacaccugccugcucgcuu

SEQ ID NO: 1051389 - RNA, 19 nt, Artificial Sequence
  Description of Artificial Sequence: Synthetic oligonucleotide
gcuugggugccacacuccu

SEQ ID NO: 1051390 - RNA, 19 nt, Artificial Sequence
  Description of Artificial Sequence: Synthetic oligonucleotide
cgcacuugguacccuggag

SEQ ID NO: 1051391 - RNA, 19 nt, Artificial Sequence
  Description of Artificial Sequence: Synthetic oligonucleotide
ggcagacuccguaguagga

SEQ ID NO: 1051392 - RNA, 19 nt, Artificial Sequence
  Description of Artificial Sequence: Synthetic oligonucleotide
ccuacgauggccccugggu

SEQ ID NO: 1051393 - RNA, 19 nt, Artificial Sequence
  Description of Artificial Sequence: Synthetic oligonucleotide
gugcaggaggaacguucaa

SEQ ID NO: 1051394 - RNA, 19 nt, Artificial Sequence
  Description of Artificial Sequence: Synthetic oligonucleotide
ccaguccaacagugguccc

SEQ ID NO: 1051395 - RNA, 19 nt, Artificial Sequence
  Description of Artificial Sequence: Synthetic oligonucleotide
cacgcucuacaaauuuguu

SEQ ID NO: 1051396 - RNA, 19 nt, Artificial Sequence
  Description of Artificial Sequence: Synthetic oligonucleotide
ccgagggaugcuaaaggua

SEQ ID NO: 1051397 - RNA, 19 nt, Artificial Sequence
  Description of Artificial Sequence: Synthetic oligonucleotide
cacccacgaaccgguugac

SEQ ID NO: 1051398 - RNA, 19 nt, Artificial Sequence
  Description of Artificial Sequence: Synthetic oligonucleotide
cacggucccuccagaccca

SEQ ID NO: 1051399 - RNA, 19 nt, Artificial Sequence
  Description of Artificial Sequence: Synthetic oligonucleotide
gggugcccuagcuggucac

SEQ ID NO: 1051400 - RNA, 19 nt, Artificial Sequence
  Description of Artificial Sequence: Synthetic oligonucleotide
cccacgaaccgguugacau

SEQ ID NO: 1051401 - RNA, 19 nt, Artificial Sequence
  Description of Artificial Sequence: Synthetic oligonucleotide
gcuuggcagacuccguagu

SEQ ID NO: 1051402 - RNA, 19 nt, Artificial Sequence
  Description of Artificial Sequence: Synthetic oligonucleotide
cuggggcgacacagcucac

SEQ ID NO: 1051403 - RNA, 19 nt, Artificial Sequence
  Description of Artificial Sequence: Synthetic oligonucleotide
gcugcgccaguguggggca

SEQ ID NO: 1051404 - RNA, 19 nt, Artificial Sequence
  Description of Artificial Sequence: Synthetic oligonucleotide
cccgagggaugcuaaaggu

SEQ ID NO: 1051405 - RNA, 19 nt, Artificial Sequence
  Description of Artificial Sequence: Synthetic oligonucleotide
ggcuucuagugugguccug

SEQ ID NO: 1051406 - RNA, 19 nt, Artificial Sequence
  Description of Artificial Sequence: Synthetic oligonucleotide
ggcucaugcccagguugug

SEQ ID NO: 1051407 - RNA, 19 nt, Artificial Sequence
  Description of Artificial Sequence: Synthetic oligonucleotide
cuaggucgaccuggcuaca

SEQ ID NO: 1051408 - RNA, 19 nt, Artificial Sequence
  Description of Artificial Sequence: Synthetic oligonucleotide
gguccuggcaguauccauu

SEQ ID NO: 1051409 - RNA, 19 nt, Artificial Sequence
  Description of Artificial Sequence: Synthetic oligonucleotide
acgaaccgguugacaucug

SEQ ID NO: 1051410 - RNA, 19 nt, Artificial Sequence
  Description of Artificial Sequence: Synthetic oligonucleotide
gugcccuagcuggucaccu

SEQ ID NO: 1051411 - RNA, 19 nt, Artificial Sequence
  Description of Artificial Sequence: Synthetic oligonucleotide
cugcauggcacuggcacuu

SEQ ID NO: 1051412 - RNA, 19 nt, Artificial Sequence
  Description of Artificial Sequence: Synthetic oligonucleotide
agcucccaucaaagcagua

SEQ ID NO: 1051413 - RNA, 19 nt, Artificial Sequence
  Description of Artificial Sequence: Synthetic oligonucleotide
guaucccacaucgguucau

SEQ ID NO: 1051414 - RNA, 19 nt, Artificial Sequence
  Description of Artificial Sequence: Synthetic oligonucleotide
cugcgccaguguggggcag

SEQ ID NO: 1051415 - RNA, 19 nt, Artificial Sequence
  Description of Artificial Sequence: Synthetic oligonucleotide
gggguucgugcaguccuga

SEQ ID NO: 1051416 - RNA, 19 nt, Artificial Sequence
  Description of Artificial Sequence: Synthetic oligonucleotide
ccguuggaccaccagcucu

SEQ ID NO: 1051417 - RNA, 19 nt, Artificial Sequence
  Description of Artificial Sequence: Synthetic oligonucleotide
cacggagguccuggcagua

SEQ ID NO: 1051418 - RNA, 19 nt, Artificial Sequence
  Description of Artificial Sequence: Synthetic oligonucleotide
ccgcagucacacugcucuc

SEQ ID NO: 1051419 - RNA, 19 nt, Artificial Sequence
  Description of Artificial Sequence: Synthetic oligonucleotide
gccggccuagcaaguucug

SEQ ID NO: 1051420 - RNA, 19 nt, Artificial Sequence
  Description of Artificial Sequence: Synthetic oligonucleotide
cucgcuuaucugguacauu

SEQ ID NO: 1051421 - RNA, 19 nt, Artificial Sequence
  Description of Artificial Sequence: Synthetic oligonucleotide
gcucgcuuaucugguacau

SEQ ID NO: 1051422 - RNA, 19 nt, Artificial Sequence
  Description of Artificial Sequence: Synthetic oligonucleotide
ccaagcuuugggucaugau

SEQ ID NO: 1051423 - RNA, 19 nt, Artificial Sequence
  Description of Artificial Sequence: Synthetic oligonucleotide
ccugcucgcuuaucuggua

SEQ ID NO: 1051424 - RNA, 19 nt, Artificial Sequence
  Description of Artificial Sequence: Synthetic oligonucleotide
gggccuuucgguagaugau

SEQ ID NO: 1051425 - RNA, 19 nt, Artificial Sequence
  Description of Artificial Sequence: Synthetic oligonucleotide
ccacacuccuccucuggau

SEQ ID NO: 1051426 - RNA, 19 nt, Artificial Sequence
  Description of Artificial Sequence: Synthetic oligonucleotide
cccaugguuguugcacuua

SEQ ID NO: 1051427 - RNA, 19 nt, Artificial Sequence
  Description of Artificial Sequence: Synthetic oligonucleotide
ccguccuuucuggggcgac

SEQ ID NO: 1051428 - RNA, 19 nt, Artificial Sequence
  Description of Artificial Sequence: Synthetic oligonucleotide
cacuccaggcacggucccu

SEQ ID NO: 1051429 - RNA, 19 nt, Artificial Sequence
  Description of Artificial Sequence: Synthetic oligonucleotide
cccaggcuuaaccgguggu

SEQ ID NO: 1051430 - RNA, 19 nt, Artificial Sequence
  Description of Artificial Sequence: Synthetic oligonucleotide
caccugccugcucgcuuau

SEQ ID NO: 1051431 - RNA, 19 nt, Artificial Sequence
  Description of Artificial Sequence: Synthetic oligonucleotide
ccaggucacauccguccuu

SEQ ID NO: 1051432 - RNA, 19 nt, Artificial Sequence
  Description of Artificial Sequence: Synthetic oligonucleotide
ccggccuagcaaguucugu

SEQ ID NO: 1051433 - RNA, 19 nt, Artificial Sequence
  Description of Artificial Sequence: Synthetic oligonucleotide
gguugacaucugggaaauu

SEQ ID NO: 1051434 - RNA, 19 nt, Artificial Sequence
  Description of Artificial Sequence: Synthetic oligonucleotide
cgguucauccugccaggau

SEQ ID NO: 1051435 - RNA, 19 nt, Artificial Sequence
  Description of Artificial Sequence: Synthetic oligonucleotide
ccgugauaaguugcacguu

SEQ ID NO: 1051436 - RNA, 19 nt, Artificial Sequence
  Description of Artificial Sequence: Synthetic oligonucleotide
aaguacaugagccaagacc

SEQ ID NO: 1051437 - RNA, 19 nt, Artificial Sequence
  Description of Artificial Sequence: Synthetic oligonucleotide
agagacuacaggcaaagcc

SEQ ID NO: 1051438 - RNA, 19 nt, Artificial Sequence
  Description of Artificial Sequence: Synthetic oligonucleotide
aauccaagggccuaaucac

SEQ ID NO: 1051439 - RNA, 19 nt, Artificial Sequence
  Description of Artificial Sequence: Synthetic oligonucleotide
cucauuaaguacaugagcc

SEQ ID NO: 1051440 - RNA, 19 nt, Artificial Sequence
  Description of Artificial Sequence: Synthetic oligonucleotide
acucucagcacuuagcgcc

SEQ ID NO: 1051441 - RNA, 19 nt, Artificial Sequence
  Description of Artificial Sequence: Synthetic oligonucleotide
aguugcaaaggcuacaccg

SEQ ID NO: 1051442 - RNA, 19 nt, Artificial Sequence
  Description of Artificial Sequence: Synthetic oligonucleotide
uuuaggcugguccauauag

SEQ ID NO: 1051443 - RNA, 19 nt, Artificial Sequence
  Description of Artificial Sequence: Synthetic oligonucleotide
agguaaaagaaccuaguuc

SEQ ID NO: 1051444 - RNA, 19 nt, Artificial Sequence
  Description of Artificial Sequence: Synthetic oligonucleotide
uaugucgcagcauaugacg

SEQ ID NO: 1051445 - RNA, 19 nt, Artificial Sequence
  Description of Artificial Sequence: Synthetic oligonucleotide
aacacggccccucaccugc

SEQ ID NO: 1051446 - RNA, 19 nt, Artificial Sequence
  Description of Artificial Sequence: Synthetic oligonucleotide
gguaaaagaaccuaguuca

SEQ ID NO: 1051447 - RNA, 19 nt, Artificial Sequence
  Description of Artificial Sequence: Synthetic oligonucleotide
gacacgaaggcgcagaggc

SEQ ID NO: 1051448 - RNA, 19 nt, Artificial Sequence
  Description of Artificial Sequence: Synthetic oligonucleotide
uguucaaaacagagggugg

SEQ ID NO: 1051449 - RNA, 19 nt, Artificial Sequence
  Description of Artificial Sequence: Synthetic oligonucleotide
uccauuuguauaaaaugca

SEQ ID NO: 1051450 - RNA, 19 nt, Artificial Sequence
  Description of Artificial Sequence: Synthetic oligonucleotide
ugacguuugagguucauac

SEQ ID NO: 1051451 - RNA, 19 nt, Artificial Sequence
  Description of Artificial Sequence: Synthetic oligonucleotide
gagguucauacucugauug

SEQ ID NO: 1051452 - RNA, 19 nt, Artificial Sequence
  Description of Artificial Sequence: Synthetic oligonucleotide
acguuugagguucauacuc

SEQ ID NO: 1051453 - RNA, 19 nt, Artificial Sequence
  Description of Artificial Sequence: Synthetic oligonucleotide
agggcuaauuccuaaggac

SEQ ID NO: 1051454 - RNA, 19 nt, Artificial Sequence
  Description of Artificial Sequence: Synthetic oligonucleotide
aagaaccuaguucaaggug

SEQ ID NO: 1051455 - RNA, 19 nt, Artificial Sequence
  Description of Artificial Sequence: Synthetic oligonucleotide
uuccuaaggacccagguaa

SEQ ID NO: 1051456 - RNA, 19 nt, Artificial Sequence
  Description of Artificial Sequence: Synthetic oligonucleotide
aaagaaccuaguucaaggu

SEQ ID NO: 1051457 - RNA, 19 nt, Artificial Sequence
  Description of Artificial Sequence: Synthetic oligonucleotide
caggcauacggacagagcg

SEQ ID NO: 1051458 - RNA, 19 nt, Artificial Sequence
  Description of Artificial Sequence: Synthetic oligonucleotide
aauuccuaaggacccaggu

SEQ ID NO: 1051459 - RNA, 19 nt, Artificial Sequence
  Description of Artificial Sequence: Synthetic oligonucleotide
aaacccuccccuucauccc

SEQ ID NO: 1051460 - RNA, 19 nt, Artificial Sequence
  Description of Artificial Sequence: Synthetic oligonucleotide
accgaaaagguuugucacc

SEQ ID NO: 1051461 - RNA, 19 nt, Artificial Sequence
  Description of Artificial Sequence: Synthetic oligonucleotide
cauauagugccuagguuag

SEQ ID NO: 1051462 - RNA, 19 nt, Artificial Sequence
  Description of Artificial Sequence: Synthetic oligonucleotide
uucuaguccauuuguauaa

SEQ ID NO: 1051463 - RNA, 19 nt, Artificial Sequence
  Description of Artificial Sequence: Synthetic oligonucleotide
ugucgcgucagguugacga

SEQ ID NO: 1051464 - RNA, 19 nt, Artificial Sequence
  Description of Artificial Sequence: Synthetic oligonucleotide
acaggcaaagccuuuguca

SEQ ID NO: 1051465 - RNA, 19 nt, Artificial Sequence
  Description of Artificial Sequence: Synthetic oligonucleotide
aagguuugucacccgagug

SEQ ID NO: 1051466 - RNA, 19 nt, Artificial Sequence
  Description of Artificial Sequence: Synthetic oligonucleotide
agguucauacucugauugc

SEQ ID NO: 1051467 - RNA, 19 nt, Artificial Sequence
  Description of Artificial Sequence: Synthetic oligonucleotide
gugguggugaauccaaggg

SEQ ID NO: 1051468 - RNA, 19 nt, Artificial Sequence
  Description of Artificial Sequence: Synthetic oligonucleotide
uuggucguggagcacagca

SEQ ID NO: 1051469 - RNA, 19 nt, Artificial Sequence
  Description of Artificial Sequence: Synthetic oligonucleotide
uucacucucagcacuuagc

SEQ ID NO: 1051470 - RNA, 19 nt, Artificial Sequence
  Description of Artificial Sequence: Synthetic oligonucleotide
gaggcguacggacagcggg

SEQ ID NO: 1051471 - RNA, 19 nt, Artificial Sequence
  Description of Artificial Sequence: Synthetic oligonucleotide
ugguggugaauccaagggc

SEQ ID NO: 1051472 - RNA, 19 nt, Artificial Sequence
  Description of Artificial Sequence: Synthetic oligonucleotide
aaggcuacaccgaaaaggu

SEQ ID NO: 1051473 - RNA, 19 nt, Artificial Sequence
  Description of Artificial Sequence: Synthetic oligonucleotide
agucuucaugugccgagcc

SEQ ID NO: 1051474 - RNA, 19 nt, Artificial Sequence
  Description of Artificial Sequence: Synthetic oligonucleotide
uuaaguacaugagccaaga

SEQ ID NO: 1051475 - RNA, 19 nt, Artificial Sequence
  Description of Artificial Sequence: Synthetic oligonucleotide
acggacagcgggcacaacg

SEQ ID NO: 1051476 - RNA, 19 nt, Artificial Sequence
  Description of Artificial Sequence: Synthetic oligonucleotide
agcaucggaagccacaggu

SEQ ID NO: 1051477 - RNA, 19 nt, Artificial Sequence
  Description of Artificial Sequence: Synthetic oligonucleotide
cauaugacguuugagguuc

SEQ ID NO: 1051478 - RNA, 19 nt, Artificial Sequence
  Description of Artificial Sequence: Synthetic oligonucleotide
uuucuaguccauuuguaua

SEQ ID NO: 1051479 - RNA, 19 nt, Artificial Sequence
  Description of Artificial Sequence: Synthetic oligonucleotide
ugacgcuugagguuggcca

SEQ ID NO: 1051480 - RNA, 19 nt, Artificial Sequence
  Description of Artificial Sequence: Synthetic oligonucleotide
cuucugauggcgcuuguag

SEQ ID NO: 1051481 - RNA, 19 nt, Artificial Sequence
  Description of Artificial Sequence: Synthetic oligonucleotide
ugugugucugcaugugccg

SEQ ID NO: 1051482 - RNA, 19 nt, Artificial Sequence
  Description of Artificial Sequence: Synthetic oligonucleotide
uaauuccuaaggacccagg

SEQ ID NO: 1051483 - RNA, 19 nt, Artificial Sequence
  Description of Artificial Sequence: Synthetic oligonucleotide
guuaguguggagccccugg

SEQ ID NO: 1051484 - RNA, 19 nt, Artificial Sequence
  Description of Artificial Sequence: Synthetic oligonucleotide
acaugagccaagaccaggc

SEQ ID NO: 1051485 - RNA, 19 nt, Artificial Sequence
  Description of Artificial Sequence: Synthetic oligonucleotide
guggaugcgaccgugacgc

SEQ ID NO: 1051486 - RNA, 19 nt, Artificial Sequence
  Description of Artificial Sequence: Synthetic oligonucleotide
gacucgucgucacucagcc

SEQ ID NO: 1051487 - RNA, 19 nt, Artificial Sequence
  Description of Artificial Sequence: Synthetic oligonucleotide
ugccguuucagguugucca

SEQ ID NO: 1051488 - RNA, 19 nt, Artificial Sequence
  Description of Artificial Sequence: Synthetic oligonucleotide
ugguuucuaguccauuugu

SEQ ID NO: 1051489 - RNA, 19 nt, Artificial Sequence
  Description of Artificial Sequence: Synthetic oligonucleotide
uacaugagccaagaccagg

SEQ ID NO: 1051490 - RNA, 19 nt, Artificial Sequence
  Description of Artificial Sequence: Synthetic oligonucleotide
gaugagcagaggcguacgg

SEQ ID NO: 1051491 - RNA, 19 nt, Artificial Sequence
  Description of Artificial Sequence: Synthetic oligonucleotide
agcacuuagcgcccggccg

SEQ ID NO: 1051492 - RNA, 19 nt, Artificial Sequence
  Description of Artificial Sequence: Synthetic oligonucleotide
aacccuccccuucaucccg

SEQ ID NO: 1051493 - RNA, 19 nt, Artificial Sequence
  Description of Artificial Sequence: Synthetic oligonucleotide
guauggagagcccugcuac

SEQ ID NO: 1051494 - RNA, 19 nt, Artificial Sequence
  Description of Artificial Sequence: Synthetic oligonucleotide
augaguacaguagccgugg

SEQ ID NO: 1051495 - RNA, 19 nt, Artificial Sequence
  Description of Artificial Sequence: Synthetic oligonucleotide
agggccuaaucacugagcu

SEQ ID NO: 1051496 - RNA, 19 nt, Artificial Sequence
  Description of Artificial Sequence: Synthetic oligonucleotide
ucuccucgcaugcagcgcc

SEQ ID NO: 1051497 - RNA, 19 nt, Artificial Sequence
  Description of Artificial Sequence: Synthetic oligonucleotide
ucacucagcccauagggaa

SEQ ID NO: 1051498 - RNA, 19 nt, Artificial Sequence
  Description of Artificial Sequence: Synthetic oligonucleotide
aagggccuaaucacugagc

SEQ ID NO: 1051499 - RNA, 19 nt, Artificial Sequence
  Description of Artificial Sequence: Synthetic oligonucleotide
gguaugucgcgucagguug

SEQ ID NO: 1051500 - RNA, 19 nt, Artificial Sequence
  Description of Artificial Sequence: Synthetic oligonucleotide
caccgaaaagguuugucac

SEQ ID NO: 1051501 - RNA, 19 nt, Artificial Sequence
  Description of Artificial Sequence: Synthetic oligonucleotide
agcagagcaucuucugauc

SEQ ID NO: 1051502 - RNA, 19 nt, Artificial Sequence
  Description of Artificial Sequence: Synthetic oligonucleotide
caugaguacaguagccgug

SEQ ID NO: 1051503 - RNA, 19 nt, Artificial Sequence
  Description of Artificial Sequence: Synthetic oligonucleotide
ucugauggcgcuuguaguu

SEQ ID NO: 1051504 - RNA, 19 nt, Artificial Sequence
  Description of Artificial Sequence: Synthetic oligonucleotide
auuaaguacaugagccaag

SEQ ID NO: 1051505 - RNA, 19 nt, Artificial Sequence
  Description of Artificial Sequence: Synthetic oligonucleotide
uuaggcugguccauauagu

SEQ ID NO: 1051506 - RNA, 19 nt, Artificial Sequence
  Description of Artificial Sequence: Synthetic oligonucleotide
agugguuucuaguccauuu

SEQ ID NO: 1051507 - RNA, 19 nt, Artificial Sequence
  Description of Artificial Sequence: Synthetic oligonucleotide
auacggacagagcgggcac

SEQ ID NO: 1051508 - RNA, 19 nt, Artificial Sequence
  Description of Artificial Sequence: Synthetic oligonucleotide
uguaguugcaaaggcuaca

SEQ ID NO: 1051509 - RNA, 19 nt, Artificial Sequence
  Description of Artificial Sequence: Synthetic oligonucleotide
uguauggagagcccugcua

SEQ ID NO: 1051510 - RNA, 19 nt, Artificial Sequence
  Description of Artificial Sequence: Synthetic oligonucleotide
agcucauuaaguacaugag

SEQ ID NO: 1051511 - RNA, 19 nt, Artificial Sequence
  Description of Artificial Sequence: Synthetic oligonucleotide
uccagaugagcagaggcgu

SEQ ID NO: 1051512 - RNA, 19 nt, Artificial Sequence
  Description of Artificial Sequence: Synthetic oligonucleotide
agguggcucgaguaguggg

SEQ ID NO: 1051513 - RNA, 19 nt, Artificial Sequence
  Description of Artificial Sequence: Synthetic oligonucleotide
cacugagcucauuaaguac

SEQ ID NO: 1051514 - RNA, 19 nt, Artificial Sequence
  Description of Artificial Sequence: Synthetic oligonucleotide
uaaguacaugagccaagac

SEQ ID NO: 1051515 - RNA, 19 nt, Artificial Sequence
  Description of Artificial Sequence: Synthetic oligonucleotide
accccgaguguucaaaaca

SEQ ID NO: 1051516 - RNA, 19 nt, Artificial Sequence
  Description of Artificial Sequence: Synthetic oligonucleotide
uccauauagugccuagguu

SEQ ID NO: 1051517 - RNA, 19 nt, Artificial Sequence
  Description of Artificial Sequence: Synthetic oligonucleotide
agugccuagguuagugugg

SEQ ID NO: 1051518 - RNA, 19 nt, Artificial Sequence
  Description of Artificial Sequence: Synthetic oligonucleotide
ucagguuguccagaugagc

SEQ ID NO: 1051519 - RNA, 19 nt, Artificial Sequence
  Description of Artificial Sequence: Synthetic oligonucleotide
cuaauuccuaaggacccag

SEQ ID NO: 1051520 - RNA, 19 nt, Artificial Sequence
  Description of Artificial Sequence: Synthetic oligonucleotide
guccagaugagcagaggcg

SEQ ID NO: 1051521 - RNA, 19 nt, Artificial Sequence
  Description of Artificial Sequence: Synthetic oligonucleotide
gaugcgaccgugacgcuug

SEQ ID NO: 1051522 - RNA, 19 nt, Artificial Sequence
  Description of Artificial Sequence: Synthetic oligonucleotide
uugcaaaggcuacaccgaa

SEQ ID NO: 1051523 - RNA, 19 nt, Artificial Sequence
  Description of Artificial Sequence: Synthetic oligonucleotide
gagacuacaggcaaagccu

SEQ ID NO: 1051524 - RNA, 19 nt, Artificial Sequence
  Description of Artificial Sequence: Synthetic oligonucleotide
agugaguggcaaaagggca

SEQ ID NO: 1051525 - RNA, 19 nt, Artificial Sequence
  Description of Artificial Sequence: Synthetic oligonucleotide
cccaccauggccaugcacc

SEQ ID NO: 1051526 - RNA, 19 nt, Artificial Sequence
  Description of Artificial Sequence: Synthetic oligonucleotide
auuccuaaggacccaggua

SEQ ID NO: 1051527 - RNA, 19 nt, Artificial Sequence
  Description of Artificial Sequence: Synthetic oligonucleotide
ggacccagguaaaagaacc

SEQ ID NO: 1051528 - RNA, 19 nt, Artificial Sequence
  Description of Artificial Sequence: Synthetic oligonucleotide
guaguugcaaaggcuacac

SEQ ID NO: 1051529 - RNA, 19 nt, Artificial Sequence
  Description of Artificial Sequence: Synthetic oligonucleotide
cuguaguugcaaaggcuac

SEQ ID NO: 1051530 - RNA, 19 nt, Artificial Sequence
  Description of Artificial Sequence: Synthetic oligonucleotide
caagggccuaaucacugag

SEQ ID NO: 1051531 - RNA, 19 nt, Artificial Sequence
  Description of Artificial Sequence: Synthetic oligonucleotide
acuacaggcaaagccuuug

SEQ ID NO: 1051532 - RNA, 19 nt, Artificial Sequence
  Description of Artificial Sequence: Synthetic oligonucleotide
acauggcaguucccaaccg

SEQ ID NO: 1051533 - RNA, 19 nt, Artificial Sequence
  Description of Artificial Sequence: Synthetic oligonucleotide
auggcgcuuguaguugucc

SEQ ID NO: 1051534 - RNA, 19 nt, Artificial Sequence
  Description of Artificial Sequence: Synthetic oligonucleotide
gguccaagggaaaaguagc

SEQ ID NO: 1051535 - RNA, 19 nt, Artificial Sequence
  Description of Artificial Sequence: Synthetic oligonucleotide
ggccuaaucacugagcuca

SEQ ID NO: 1051536 - RNA, 19 nt, Artificial Sequence
  Description of Artificial Sequence: Synthetic oligonucleotide
accgugacgcuugagguug

SEQ ID NO: 1051537 - RNA, 19 nt, Artificial Sequence
  Description of Artificial Sequence: Synthetic oligonucleotide
gacgagcugggcugaggcg

SEQ ID NO: 1051538 - RNA, 19 nt, Artificial Sequence
  Description of Artificial Sequence: Synthetic oligonucleotide
ccgaguguucaaaacagag

SEQ ID NO: 1051539 - RNA, 19 nt, Artificial Sequence
  Description of Artificial Sequence: Synthetic oligonucleotide
uguccacaaccccggcagg

SEQ ID NO: 1051540 - RNA, 19 nt, Artificial Sequence
  Description of Artificial Sequence: Synthetic oligonucleotide
agacucgucgucacucagc

SEQ ID NO: 1051541 - RNA, 19 nt, Artificial Sequence
  Description of Artificial Sequence: Synthetic oligonucleotide
uggcgcuuguaguuguccc

SEQ ID NO: 1051542 - RNA, 19 nt, Artificial Sequence
  Description of Artificial Sequence: Synthetic oligonucleotide
acaggcauacggacagagc

SEQ ID NO: 1051543 - RNA, 19 nt, Artificial Sequence
  Description of Artificial Sequence: Synthetic oligonucleotide
caaaggcuacaccgaaaag

SEQ ID NO: 1051544 - RNA, 19 nt, Artificial Sequence
  Description of Artificial Sequence: Synthetic oligonucleotide
ugcaaaggcuacaccgaaa

SEQ ID NO: 1051545 - RNA, 19 nt, Artificial Sequence
  Description of Artificial Sequence: Synthetic oligonucleotide
cauuaaguacaugagccaa

SEQ ID NO: 1051546 - RNA, 19 nt, Artificial Sequence
  Description of Artificial Sequence: Synthetic oligonucleotide
ggaagugguuucuagucca

SEQ ID NO: 1051547 - RNA, 19 nt, Artificial Sequence
  Description of Artificial Sequence: Synthetic oligonucleotide
ucagcccauagggaagucc

SEQ ID NO: 1051548 - RNA, 19 nt, Artificial Sequence
  Description of Artificial Sequence: Synthetic oligonucleotide
agaugagcagaggcguacg

SEQ ID NO: 1051549 - RNA, 19 nt, Artificial Sequence
  Description of Artificial Sequence: Synthetic oligonucleotide
gaaaaguagcucuggcagu

SEQ ID NO: 1051550 - RNA, 19 nt, Artificial Sequence
  Description of Artificial Sequence: Synthetic oligonucleotide
cagcggaacggcuucuccc

SEQ ID NO: 1051551 - RNA, 19 nt, Artificial Sequence
  Description of Artificial Sequence: Synthetic oligonucleotide
gggaagugguuucuagucc

SEQ ID NO: 1051552 - RNA, 19 nt, Artificial Sequence
  Description of Artificial Sequence: Synthetic oligonucleotide
ggcuaauuccuaaggaccc

SEQ ID NO: 1051553 - RNA, 19 nt, Artificial Sequence
  Description of Artificial Sequence: Synthetic oligonucleotide
gcgaccgugacgcuugagg

SEQ ID NO: 1051554 - RNA, 19 nt, Artificial Sequence
  Description of Artificial Sequence: Synthetic oligonucleotide
cccagguaaaagaaccuag

SEQ ID NO: 1051555 - RNA, 19 nt, Artificial Sequence
  Description of Artificial Sequence: Synthetic oligonucleotide
gguugggauagugaguggc

SEQ ID NO: 1051556 - RNA, 19 nt, Artificial Sequence
  Description of Artificial Sequence: Synthetic oligonucleotide
caaaagggcagagacuaca

SEQ ID NO: 1051557 - RNA, 19 nt, Artificial Sequence
  Description of Artificial Sequence: Synthetic oligonucleotide
ugggauagugaguggcaaa

SEQ ID NO: 1051558 - RNA, 19 nt, Artificial Sequence
  Description of Artificial Sequence: Synthetic oligonucleotide
acucgucgucacucagccc

SEQ ID NO: 1051559 - RNA, 19 nt, Artificial Sequence
  Description of Artificial Sequence: Synthetic oligonucleotide
uugagguggcucgaguagu

SEQ ID NO: 1051560 - RNA, 19 nt, Artificial Sequence
  Description of Artificial Sequence: Synthetic oligonucleotide
gucguggagcacagcaucg

SEQ ID NO: 1051561 - RNA, 19 nt, Artificial Sequence
  Description of Artificial Sequence: Synthetic oligonucleotide
ggggaagugguuucuaguc

SEQ ID NO: 1051562 - RNA, 19 nt, Artificial Sequence
  Description of Artificial Sequence: Synthetic oligonucleotide
aggcauacggacagagcgg

SEQ ID NO: 1051563 - RNA, 19 nt, Artificial Sequence
  Description of Artificial Sequence: Synthetic oligonucleotide
ccauauagugccuagguua

SEQ ID NO: 1051564 - RNA, 19 nt, Artificial Sequence
  Description of Artificial Sequence: Synthetic oligonucleotide
caccugguggcacauagga

SEQ ID NO: 1051565 - RNA, 19 nt, Artificial Sequence
  Description of Artificial Sequence: Synthetic oligonucleotide
ggcauacggacagagcggg

SEQ ID NO: 1051566 - RNA, 19 nt, Artificial Sequence
  Description of Artificial Sequence: Synthetic oligonucleotide
guaugucgcagcauaugac

SEQ ID NO: 1051567 - RNA, 19 nt, Artificial Sequence
  Description of Artificial Sequence: Synthetic oligonucleotide
uugggauagugaguggcaa

SEQ ID NO: 1051568 - RNA, 19 nt, Artificial Sequence
  Description of Artificial Sequence: Synthetic oligonucleotide
gaccccgaguguucaaaac

SEQ ID NO: 1051569 - RNA, 19 nt, Artificial Sequence
  Description of Artificial Sequence: Synthetic oligonucleotide
cuagguuaguguggagccc

SEQ ID NO: 1051570 - RNA, 19 nt, Artificial Sequence
  Description of Artificial Sequence: Synthetic oligonucleotide
uguaggcgcagguggcaca

SEQ ID NO: 1051571 - RNA, 19 nt, Artificial Sequence
  Description of Artificial Sequence: Synthetic oligonucleotide
aggcguacggacagcgggc

SEQ ID NO: 1051572 - RNA, 19 nt, Artificial Sequence
  Description of Artificial Sequence: Synthetic oligonucleotide
gagucuucaugugccgagc

SEQ ID NO: 1051573 - RNA, 19 nt, Artificial Sequence
  Description of Artificial Sequence: Synthetic oligonucleotide
ugugcgcugaugccgccuc

SEQ ID NO: 1051574 - RNA, 19 nt, Artificial Sequence
  Description of Artificial Sequence: Synthetic oligonucleotide
gaaacuggcaccaccuggu

SEQ ID NO: 1051575 - RNA, 19 nt, Artificial Sequence
  Description of Artificial Sequence: Synthetic oligonucleotide
gcagagacuacaggcaaag

SEQ ID NO: 1051576 - RNA, 19 nt, Artificial Sequence
  Description of Artificial Sequence: Synthetic oligonucleotide
aucggaagccacaggucgg

SEQ ID NO: 1051577 - RNA, 19 nt, Artificial Sequence
  Description of Artificial Sequence: Synthetic oligonucleotide
ccgaaaagguuugucaccc

SEQ ID NO: 1051578 - RNA, 19 nt, Artificial Sequence
  Description of Artificial Sequence: Synthetic oligonucleotide
ugggacacgaaggcgcaga

SEQ ID NO: 1051579 - RNA, 19 nt, Artificial Sequence
  Description of Artificial Sequence: Synthetic oligonucleotide
uaguugucccaguggccug

SEQ ID NO: 1051580 - RNA, 19 nt, Artificial Sequence
  Description of Artificial Sequence: Synthetic oligonucleotide
uucccaaccgacugcccuc

SEQ ID NO: 1051581 - RNA, 19 nt, Artificial Sequence
  Description of Artificial Sequence: Synthetic oligonucleotide
ugaggcguaggggcagcgg

SEQ ID NO: 1051582 - RNA, 19 nt, Artificial Sequence
  Description of Artificial Sequence: Synthetic oligonucleotide
gucgcgucagguugacgag

SEQ ID NO: 1051583 - RNA, 19 nt, Artificial Sequence
  Description of Artificial Sequence: Synthetic oligonucleotide
ucgcccguaugucgcagca

SEQ ID NO: 1051584 - RNA, 19 nt, Artificial Sequence
  Description of Artificial Sequence: Synthetic oligonucleotide
ucgaguagugggacacgaa

SEQ ID NO: 1051585 - RNA, 19 nt, Artificial Sequence
  Description of Artificial Sequence: Synthetic oligonucleotide
guccauauagugccuaggu

SEQ ID NO: 1051586 - RNA, 19 nt, Artificial Sequence
  Description of Artificial Sequence: Synthetic oligonucleotide
cauacggacagagcgggca

SEQ ID NO: 1051587 - RNA, 19 nt, Artificial Sequence
  Description of Artificial Sequence: Synthetic oligonucleotide
cagggcuaauuccuaagga

SEQ ID NO: 1051588 - RNA, 19 nt, Artificial Sequence
  Description of Artificial Sequence: Synthetic oligonucleotide
ugucgcagcauaugacguu

SEQ ID NO: 1051589 - RNA, 19 nt, Artificial Sequence
  Description of Artificial Sequence: Synthetic oligonucleotide
ucgcagcauaugacguuug

SEQ ID NO: 1051590 - RNA, 19 nt, Artificial Sequence
  Description of Artificial Sequence: Synthetic oligonucleotide
agaggcggcaugaguacag

SEQ ID NO: 1051591 - RNA, 19 nt, Artificial Sequence
  Description of Artificial Sequence: Synthetic oligonucleotide
gcuaccaguagcacccagg

SEQ ID NO: 1051592 - RNA, 19 nt, Artificial Sequence
  Description of Artificial Sequence: Synthetic oligonucleotide
cagaugagcagaggcguac

SEQ ID NO: 1051593 - RNA, 19 nt, Artificial Sequence
  Description of Artificial Sequence: Synthetic oligonucleotide
cugauggcgcuuguaguug

SEQ ID NO: 1051594 - RNA, 19 nt, Artificial Sequence
  Description of Artificial Sequence: Synthetic oligonucleotide
ucagcacuuagcgcccggc

SEQ ID NO: 1051595 - RNA, 19 nt, Artificial Sequence
  Description of Artificial Sequence: Synthetic oligonucleotide
gacguuugagguucauacu

SEQ ID NO: 1051596 - RNA, 19 nt, Artificial Sequence
  Description of Artificial Sequence: Synthetic oligonucleotide
auuuaggcugguccauaua

SEQ ID NO: 1051597 - RNA, 19 nt, Artificial Sequence
  Description of Artificial Sequence: Synthetic oligonucleotide
gauuuaggcugguccauau

SEQ ID NO: 1051598 - RNA, 19 nt, Artificial Sequence
  Description of Artificial Sequence: Synthetic oligonucleotide
ccccgaguguucaaaacag

SEQ ID NO: 1051599 - RNA, 19 nt, Artificial Sequence
  Description of Artificial Sequence: Synthetic oligonucleotide
guaguugucccaguggccu

SEQ ID NO: 1051600 - RNA, 19 nt, Artificial Sequence
  Description of Artificial Sequence: Synthetic oligonucleotide
gguccauauagugccuagg

SEQ ID NO: 1051601 - RNA, 19 nt, Artificial Sequence
  Description of Artificial Sequence: Synthetic oligonucleotide
augcaccuucugauggcgc

SEQ ID NO: 1051602 - RNA, 19 nt, Artificial Sequence
  Description of Artificial Sequence: Synthetic oligonucleotide
augucgcagcauaugacgu

SEQ ID NO: 1051603 - RNA, 19 nt, Artificial Sequence
  Description of Artificial Sequence: Synthetic oligonucleotide
augagcagaggcguacgga

SEQ ID NO: 1051604 - RNA, 19 nt, Artificial Sequence
  Description of Artificial Sequence: Synthetic oligonucleotide
aaaggggaagugguuucua

SEQ ID NO: 1051605 - RNA, 19 nt, Artificial Sequence
  Description of Artificial Sequence: Synthetic oligonucleotide
guugggauagugaguggca

SEQ ID NO: 1051606 - RNA, 19 nt, Artificial Sequence
  Description of Artificial Sequence: Synthetic oligonucleotide
cauggcaguucccaaccga

SEQ ID NO: 1051607 - RNA, 19 nt, Artificial Sequence
  Description of Artificial Sequence: Synthetic oligonucleotide
cagcacuuagcgcccggcc

SEQ ID NO: 1051608 - RNA, 19 nt, Artificial Sequence
  Description of Artificial Sequence: Synthetic oligonucleotide
ggucguggagcacagcauc

SEQ ID NO: 1051609 - RNA, 19 nt, Artificial Sequence
  Description of Artificial Sequence: Synthetic oligonucleotide
cgaguagugggacacgaag

SEQ ID NO: 1051610 - RNA, 19 nt, Artificial Sequence
  Description of Artificial Sequence: Synthetic oligonucleotide
cagacucgucgucacucag

SEQ ID NO: 1051611 - RNA, 19 nt, Artificial Sequence
  Description of Artificial Sequence: Synthetic oligonucleotide
aguaugggugcggguaugu

SEQ ID NO: 1051612 - RNA, 19 nt, Artificial Sequence
  Description of Artificial Sequence: Synthetic oligonucleotide
guaggcgcagguggcacag

SEQ ID NO: 1051613 - RNA, 19 nt, Artificial Sequence
  Description of Artificial Sequence: Synthetic oligonucleotide
cuuagcgcccggccgcccc

SEQ ID NO: 1051614 - RNA, 19 nt, Artificial Sequence
  Description of Artificial Sequence: Synthetic oligonucleotide
ugcggguaugucgcgucag

SEQ ID NO: 1051615 - RNA, 19 nt, Artificial Sequence
  Description of Artificial Sequence: Synthetic oligonucleotide
agcgcccacacauggcagu

SEQ ID NO: 1051616 - RNA, 19 nt, Artificial Sequence
  Description of Artificial Sequence: Synthetic oligonucleotide
agcccugcuaccaguagca

SEQ ID NO: 1051617 - RNA, 19 nt, Artificial Sequence
  Description of Artificial Sequence: Synthetic oligonucleotide
ucgcgucagguugacgagc

SEQ ID NO: 1051618 - RNA, 19 nt, Artificial Sequence
  Description of Artificial Sequence: Synthetic oligonucleotide
ugcgcugaugccgccucag

SEQ ID NO: 1051619 - RNA, 19 nt, Artificial Sequence
  Description of Artificial Sequence: Synthetic oligonucleotide
ggcacaacgaaaggguuuc

SEQ ID NO: 1051620 - RNA, 19 nt, Artificial Sequence
  Description of Artificial Sequence: Synthetic oligonucleotide
ggauagugaguggcaaaag

SEQ ID NO: 1051621 - RNA, 19 nt, Artificial Sequence
  Description of Artificial Sequence: Synthetic oligonucleotide
gcuacaccgaaaagguuug

SEQ ID NO: 1051622 - RNA, 19 nt, Artificial Sequence
  Description of Artificial Sequence: Synthetic oligonucleotide
ugggugcggguaugucgcg

SEQ ID NO: 1051623 - RNA, 19 nt, Artificial Sequence
  Description of Artificial Sequence: Synthetic oligonucleotide
aaccuaguucaaggugagu

SEQ ID NO: 1051624 - RNA, 19 nt, Artificial Sequence
  Description of Artificial Sequence: Synthetic oligonucleotide
gaugccgccucagguugcc

SEQ ID NO: 1051625 - RNA, 19 nt, Artificial Sequence
  Description of Artificial Sequence: Synthetic oligonucleotide
caggugguugggauaguga

SEQ ID NO: 1051626 - RNA, 19 nt, Artificial Sequence
  Description of Artificial Sequence: Synthetic oligonucleotide
acacgaaggcgcagaggcg

SEQ ID NO: 1051627 - RNA, 19 nt, Artificial Sequence
  Description of Artificial Sequence: Synthetic oligonucleotide
acgaaggcgcagaggcggc

SEQ ID NO: 1051628 - RNA, 19 nt, Artificial Sequence
  Description of Artificial Sequence: Synthetic oligonucleotide
aagugguuucuaguccauu

SEQ ID NO: 1051629 - RNA, 19 nt, Artificial Sequence
  Description of Artificial Sequence: Synthetic oligonucleotide
aacagagggugggcuguga

SEQ ID NO: 1051630 - RNA, 19 nt, Artificial Sequence
  Description of Artificial Sequence: Synthetic oligonucleotide
gccguuucagguuguccag

SEQ ID NO: 1051631 - RNA, 19 nt, Artificial Sequence
  Description of Artificial Sequence: Synthetic oligonucleotide
ucugaucgccggggcauug

SEQ ID NO: 1051632 - RNA, 19 nt, Artificial Sequence
  Description of Artificial Sequence: Synthetic oligonucleotide
cagagacuacaggcaaagc

SEQ ID NO: 1051633 - RNA, 19 nt, Artificial Sequence
  Description of Artificial Sequence: Synthetic oligonucleotide
guucccaaccgacugcccu

SEQ ID NO: 1051634 - RNA, 19 nt, Artificial Sequence
  Description of Artificial Sequence: Synthetic oligonucleotide
agaggcguacggacagcgg

SEQ ID NO: 1051635 - RNA, 19 nt, Artificial Sequence
  Description of Artificial Sequence: Synthetic oligonucleotide
acccagguaaaagaaccua

SEQ ID NO: 1051636 - RNA, 19 nt, Artificial Sequence
  Description of Artificial Sequence: Synthetic oligonucleotide
gcacuuagcgcccggccgc

SEQ ID NO: 1051637 - RNA, 19 nt, Artificial Sequence
  Description of Artificial Sequence: Synthetic oligonucleotide
gucacucagcccauaggga

SEQ ID NO: 1051638 - RNA, 19 nt, Artificial Sequence
  Description of Artificial Sequence: Synthetic oligonucleotide
aguugucccaguggccugu

SEQ ID NO: 1051639 - RNA, 19 nt, Artificial Sequence
  Description of Artificial Sequence: Synthetic oligonucleotide
uggcucgaguagugggaca

SEQ ID NO: 1051640 - RNA, 19 nt, Artificial Sequence
  Description of Artificial Sequence: Synthetic oligonucleotide
uggaccccgaguguucaaa

SEQ ID NO: 1051641 - RNA, 19 nt, Artificial Sequence
  Description of Artificial Sequence: Synthetic oligonucleotide
cccugcuaccaguagcacc

SEQ ID NO: 1051642 - RNA, 19 nt, Artificial Sequence
  Description of Artificial Sequence: Synthetic oligonucleotide
agacuacaggcaaagccuu

SEQ ID NO: 1051643 - RNA, 19 nt, Artificial Sequence
  Description of Artificial Sequence: Synthetic oligonucleotide
ucucgcccguaugucgcag

SEQ ID NO: 1051644 - RNA, 19 nt, Artificial Sequence
  Description of Artificial Sequence: Synthetic oligonucleotide
gcccauagggaaguccagg

SEQ ID NO: 1051645 - RNA, 19 nt, Artificial Sequence
  Description of Artificial Sequence: Synthetic oligonucleotide
cucgaguagugggacacga

SEQ ID NO: 1051646 - RNA, 19 nt, Artificial Sequence
  Description of Artificial Sequence: Synthetic oligonucleotide
ucccaaccgacugcccuca

SEQ ID NO: 1051647 - RNA, 19 nt, Artificial Sequence
  Description of Artificial Sequence: Synthetic oligonucleotide
caacacggccccucaccug

SEQ ID NO: 1051648 - RNA, 19 nt, Artificial Sequence
  Description of Artificial Sequence: Synthetic oligonucleotide
uaugacguuugagguucau

SEQ ID NO: 1051649 - RNA, 19 nt, Artificial Sequence
  Description of Artificial Sequence: Synthetic oligonucleotide
gugagucuguauggagagc

SEQ ID NO: 1051650 - RNA, 19 nt, Artificial Sequence
  Description of Artificial Sequence: Synthetic oligonucleotide
gugacgcuugagguuggcc

SEQ ID NO: 1051651 - RNA, 19 nt, Artificial Sequence
  Description of Artificial Sequence: Synthetic oligonucleotide
guggcucgaguagugggac

SEQ ID NO: 1051652 - RNA, 19 nt, Artificial Sequence
  Description of Artificial Sequence: Synthetic oligonucleotide
augacguuugagguucaua

SEQ ID NO: 1051653 - RNA, 19 nt, Artificial Sequence
  Description of Artificial Sequence: Synthetic oligonucleotide
gagcagaggcguacggaca

SEQ ID NO: 1051654 - RNA, 19 nt, Artificial Sequence
  Description of Artificial Sequence: Synthetic oligonucleotide
caugggauuuaggcugguc

SEQ ID NO: 1051655 - RNA, 19 nt, Artificial Sequence
  Description of Artificial Sequence: Synthetic oligonucleotide
cuccucgcaugcagcgccc

SEQ ID NO: 1051656 - RNA, 19 nt, Artificial Sequence
  Description of Artificial Sequence: Synthetic oligonucleotide
cagguaaaagaaccuaguu

SEQ ID NO: 1051657 - RNA, 19 nt, Artificial Sequence
  Description of Artificial Sequence: Synthetic oligonucleotide
gacgcgcuggugccguuuc

SEQ ID NO: 1051658 - RNA, 19 nt, Artificial Sequence
  Description of Artificial Sequence: Synthetic oligonucleotide
guaugucgcgucagguuga

SEQ ID NO: 1051659 - RNA, 19 nt, Artificial Sequence
  Description of Artificial Sequence: Synthetic oligonucleotide
gcggguaugucgcgucagg

SEQ ID NO: 1051660 - RNA, 19 nt, Artificial Sequence
  Description of Artificial Sequence: Synthetic oligonucleotide
aguagcacccagggcugcu

SEQ ID NO: 1051661 - RNA, 19 nt, Artificial Sequence
  Description of Artificial Sequence: Synthetic oligonucleotide
ucgucgucacucagcccau

SEQ ID NO: 1051662 - RNA, 19 nt, Artificial Sequence
  Description of Artificial Sequence: Synthetic oligonucleotide
acuuagcgcccggccgccc

SEQ ID NO: 1051663 - RNA, 19 nt, Artificial Sequence
  Description of Artificial Sequence: Synthetic oligonucleotide
ggacacgaaggcgcagagg

SEQ ID NO: 1051664 - RNA, 19 nt, Artificial Sequence
  Description of Artificial Sequence: Synthetic oligonucleotide
gacccagguaaaagaaccu

SEQ ID NO: 1051665 - RNA, 19 nt, Artificial Sequence
  Description of Artificial Sequence: Synthetic oligonucleotide
gcgcuuguaguugucccag

SEQ ID NO: 1051666 - RNA, 19 nt, Artificial Sequence
  Description of Artificial Sequence: Synthetic oligonucleotide
guugacgagcugggcugag

SEQ ID NO: 1051667 - RNA, 19 nt, Artificial Sequence
  Description of Artificial Sequence: Synthetic oligonucleotide
guguaggcgcagguggcac

SEQ ID NO: 1051668 - RNA, 19 nt, Artificial Sequence
  Description of Artificial Sequence: Synthetic oligonucleotide
ggugcggguaugucgcguc

SEQ ID NO: 1051669 - RNA, 19 nt, Artificial Sequence
  Description of Artificial Sequence: Synthetic oligonucleotide
ggcuacaccgaaaagguuu

SEQ ID NO: 1051670 - RNA, 19 nt, Artificial Sequence
  Description of Artificial Sequence: Synthetic oligonucleotide
ccauagggaaguccagguc

SEQ ID NO: 1051671 - RNA, 19 nt, Artificial Sequence
  Description of Artificial Sequence: Synthetic oligonucleotide
ucccgcagcugcccacagu

SEQ ID NO: 1051672 - RNA, 19 nt, Artificial Sequence
  Description of Artificial Sequence: Synthetic oligonucleotide
aucccgcagcugcccacag

SEQ ID NO: 1051673 - RNA, 19 nt, Artificial Sequence
  Description of Artificial Sequence: Synthetic oligonucleotide
gguuucuaguccauuugua

SEQ ID NO: 1051674 - RNA, 19 nt, Artificial Sequence
  Description of Artificial Sequence: Synthetic oligonucleotide
caguaugggugcggguaug

SEQ ID NO: 1051675 - RNA, 19 nt, Artificial Sequence
  Description of Artificial Sequence: Synthetic oligonucleotide
gacagagcgggcacuugua

SEQ ID NO: 1051676 - RNA, 19 nt, Artificial Sequence
  Description of Artificial Sequence: Synthetic oligonucleotide
gguggcucgaguaguggga

SEQ ID NO: 1051677 - RNA, 19 nt, Artificial Sequence
  Description of Artificial Sequence: Synthetic oligonucleotide
cacuggggcccuggggucc

SEQ ID NO: 1051678 - RNA, 19 nt, Artificial Sequence
  Description of Artificial Sequence: Synthetic oligonucleotide
gcuaauuccuaaggaccca

SEQ ID NO: 1051679 - RNA, 19 nt, Artificial Sequence
  Description of Artificial Sequence: Synthetic oligonucleotide
guaugggugcggguauguc

SEQ ID NO: 1051680 - RNA, 19 nt, Artificial Sequence
  Description of Artificial Sequence: Synthetic oligonucleotide
augucgcgucagguugacg

SEQ ID NO: 1051681 - RNA, 19 nt, Artificial Sequence
  Description of Artificial Sequence: Synthetic oligonucleotide
ccugccccacaacacggcc

SEQ ID NO: 1051682 - RNA, 19 nt, Artificial Sequence
  Description of Artificial Sequence: Synthetic oligonucleotide
ucgccggggcauugucccc

SEQ ID NO: 1051683 - RNA, 19 nt, Artificial Sequence
  Description of Artificial Sequence: Synthetic oligonucleotide
cacuuagcgcccggccgcc

SEQ ID NO: 1051684 - RNA, 19 nt, Artificial Sequence
  Description of Artificial Sequence: Synthetic oligonucleotide
cggcaugaguacaguagcc

SEQ ID NO: 1051685 - RNA, 19 nt, Artificial Sequence
  Description of Artificial Sequence: Synthetic oligonucleotide
auaugacguuugagguuca

SEQ ID NO: 1051686 - RNA, 19 nt, Artificial Sequence
  Description of Artificial Sequence: Synthetic oligonucleotide
gcggaacggcuucuccccg

SEQ ID NO: 1051687 - RNA, 19 nt, Artificial Sequence
  Description of Artificial Sequence: Synthetic oligonucleotide
cagcggccacagcggaacg

SEQ ID NO: 1051688 - RNA, 19 nt, Artificial Sequence
  Description of Artificial Sequence: Synthetic oligonucleotide
aggcgcagaggcggcauga

SEQ ID NO: 1051689 - RNA, 19 nt, Artificial Sequence
  Description of Artificial Sequence: Synthetic oligonucleotide
ggguuggucguggagcaca

SEQ ID NO: 1051690 - RNA, 19 nt, Artificial Sequence
  Description of Artificial Sequence: Synthetic oligonucleotide
ggugaauccaagggccuaa

SEQ ID NO: 1051691 - RNA, 19 nt, Artificial Sequence
  Description of Artificial Sequence: Synthetic oligonucleotide
ugcgaccgugacgcuugag

SEQ ID NO: 1051692 - RNA, 19 nt, Artificial Sequence
  Description of Artificial Sequence: Synthetic oligonucleotide
guuggucguggagcacagc

SEQ ID NO: 1051693 - RNA, 19 nt, Artificial Sequence
  Description of Artificial Sequence: Synthetic oligonucleotide
cagugguucugauccagau

SEQ ID NO: 1051694 - RNA, 19 nt, Artificial Sequence
  Description of Artificial Sequence: Synthetic oligonucleotide
uccucgcaugcagcgccca

SEQ ID NO: 1051695 - RNA, 19 nt, Artificial Sequence
  Description of Artificial Sequence: Synthetic oligonucleotide
uggaugcgaccgugacgcu

SEQ ID NO: 1051696 - RNA, 19 nt, Artificial Sequence
  Description of Artificial Sequence: Synthetic oligonucleotide
gaccgugacgcuugagguu

SEQ ID NO: 1051697 - RNA, 19 nt, Artificial Sequence
  Description of Artificial Sequence: Synthetic oligonucleotide
gugcggguaugucgcguca

SEQ ID NO: 1051698 - RNA, 19 nt, Artificial Sequence
  Description of Artificial Sequence: Synthetic oligonucleotide
gggccuaaucacugagcuc

SEQ ID NO: 1051699 - RNA, 19 nt, Artificial Sequence
  Description of Artificial Sequence: Synthetic oligonucleotide
ggacagagcgggcacuugu

SEQ ID NO: 1051700 - RNA, 19 nt, Artificial Sequence
  Description of Artificial Sequence: Synthetic oligonucleotide
gcccguaugucgcagcaua

SEQ ID NO: 1051701 - RNA, 19 nt, Artificial Sequence
  Description of Artificial Sequence: Synthetic oligonucleotide
gaagugguuucuaguccau

SEQ ID NO: 1051702 - RNA, 19 nt, Artificial Sequence
  Description of Artificial Sequence: Synthetic oligonucleotide
gcucgaguagugggacacg

SEQ ID NO: 1051703 - RNA, 19 nt, Artificial Sequence
  Description of Artificial Sequence: Synthetic oligonucleotide
ggucgggcagggaggagug

SEQ ID NO: 1051704 - RNA, 19 nt, Artificial Sequence
  Description of Artificial Sequence: Synthetic oligonucleotide
cccagacucgucgucacuc

SEQ ID NO: 1051705 - RNA, 19 nt, Artificial Sequence
  Description of Artificial Sequence: Synthetic oligonucleotide
guacggacagcgggcacaa

SEQ ID NO: 1051706 - RNA, 19 nt, Artificial Sequence
  Description of Artificial Sequence: Synthetic oligonucleotide
gcgcugaugccgccucagg

SEQ ID NO: 1051707 - RNA, 19 nt, Artificial Sequence
  Description of Artificial Sequence: Synthetic oligonucleotide
gcauaugacguuugagguu

SEQ ID NO: 1051708 - RNA, 19 nt, Artificial Sequence
  Description of Artificial Sequence: Synthetic oligonucleotide
gguuaguguggagccccug

SEQ ID NO: 1051709 - RNA, 19 nt, Artificial Sequence
  Description of Artificial Sequence: Synthetic oligonucleotide
ccguaugucgcagcauaug

SEQ ID NO: 1051710 - RNA, 19 nt, Artificial Sequence
  Description of Artificial Sequence: Synthetic oligonucleotide
gucgcagcauaugacguuu

SEQ ID NO: 1051711 - RNA, 19 nt, Artificial Sequence
  Description of Artificial Sequence: Synthetic oligonucleotide
acggacagagcgggcacuu

SEQ ID NO: 1051712 - RNA, 19 nt, Artificial Sequence
  Description of Artificial Sequence: Synthetic oligonucleotide
ggaccccgaguguucaaaa

SEQ ID NO: 1051713 - RNA, 19 nt, Artificial Sequence
  Description of Artificial Sequence: Synthetic oligonucleotide
agguugccacaggcauacg

SEQ ID NO: 1051714 - RNA, 19 nt, Artificial Sequence
  Description of Artificial Sequence: Synthetic oligonucleotide
guggugaauccaagggccu

SEQ ID NO: 1051715 - RNA, 19 nt, Artificial Sequence
  Description of Artificial Sequence: Synthetic oligonucleotide
acgcgcuggugccguuuca

SEQ ID NO: 1051716 - RNA, 19 nt, Artificial Sequence
  Description of Artificial Sequence: Synthetic oligonucleotide
ccaagggccuaaucacuga

SEQ ID NO: 1051717 - RNA, 19 nt, Artificial Sequence
  Description of Artificial Sequence: Synthetic oligonucleotide
ggauuuaggcugguccaua

SEQ ID NO: 1051718 - RNA, 19 nt, Artificial Sequence
  Description of Artificial Sequence: Synthetic oligonucleotide
augcgaccgugacgcuuga

SEQ ID NO: 1051719 - RNA, 19 nt, Artificial Sequence
  Description of Artificial Sequence: Synthetic oligonucleotide
cccgaguguucaaaacaga

SEQ ID NO: 1051720 - RNA, 19 nt, Artificial Sequence
  Description of Artificial Sequence: Synthetic oligonucleotide
aggcuacaccgaaaagguu

SEQ ID NO: 1051721 - RNA, 19 nt, Artificial Sequence
  Description of Artificial Sequence: Synthetic oligonucleotide
gcgggcacaacgaaagggu

SEQ ID NO: 1051722 - RNA, 19 nt, Artificial Sequence
  Description of Artificial Sequence: Synthetic oligonucleotide
cauaggagcagagcaucuu

SEQ ID NO: 1051723 - RNA, 19 nt, Artificial Sequence
  Description of Artificial Sequence: Synthetic oligonucleotide
ggcagagacuacaggcaaa

SEQ ID NO: 1051724 - RNA, 19 nt, Artificial Sequence
  Description of Artificial Sequence: Synthetic oligonucleotide
ggguaugucgcgucagguu

SEQ ID NO: 1051725 - RNA, 19 nt, Artificial Sequence
  Description of Artificial Sequence: Synthetic oligonucleotide
gaaggcgcagaggcggcau

SEQ ID NO: 1051726 - RNA, 19 nt, Artificial Sequence
  Description of Artificial Sequence: Synthetic oligonucleotide
gacuacaggcaaagccuuu

SEQ ID NO: 1051727 - RNA, 19 nt, Artificial Sequence
  Description of Artificial Sequence: Synthetic oligonucleotide
gcuggaccccgaguguuca

SEQ ID NO: 1051728 - RNA, 19 nt, Artificial Sequence
  Description of Artificial Sequence: Synthetic oligonucleotide
ggcguacggacagcgggca

SEQ ID NO: 1051729 - RNA, 19 nt, Artificial Sequence
  Description of Artificial Sequence: Synthetic oligonucleotide
gcauacggacagagcgggc

SEQ ID NO: 1051730 - RNA, 19 nt, Artificial Sequence
  Description of Artificial Sequence: Synthetic oligonucleotide
gugccgcuugagguggcuc

SEQ ID NO: 1051731 - RNA, 19 nt, Artificial Sequence
  Description of Artificial Sequence: Synthetic oligonucleotide
gugcgcugaugccgccuca

SEQ ID NO: 1051732 - RNA, 19 nt, Artificial Sequence
  Description of Artificial Sequence: Synthetic oligonucleotide
uacggacagcgggcacaac

SEQ ID NO: 1051733 - RNA, 19 nt, Artificial Sequence
  Description of Artificial Sequence: Synthetic oligonucleotide
ggcaggaaacuggcaccac

SEQ ID NO: 1051734 - RNA, 19 nt, Artificial Sequence
  Description of Artificial Sequence: Synthetic oligonucleotide
caaccccggcagguccaag

SEQ ID NO: 1051735 - RNA, 19 nt, Artificial Sequence
  Description of Artificial Sequence: Synthetic oligonucleotide
ccacaacacggccccucac

SEQ ID NO: 1051736 - RNA, 19 nt, Artificial Sequence
  Description of Artificial Sequence: Synthetic oligonucleotide
gcgucagguugacgagcug

SEQ ID NO: 1051737 - RNA, 19 nt, Artificial Sequence
  Description of Artificial Sequence: Synthetic oligonucleotide
cuggaccccgaguguucaa

SEQ ID NO: 1051738 - RNA, 19 nt, Artificial Sequence
  Description of Artificial Sequence: Synthetic oligonucleotide
cccacaacacggccccuca

SEQ ID NO: 1051739 - RNA, 19 nt, Artificial Sequence
  Description of Artificial Sequence: Synthetic oligonucleotide
ccagaugagcagaggcgua

SEQ ID NO: 1051740 - RNA, 19 nt, Artificial Sequence
  Description of Artificial Sequence: Synthetic oligonucleotide
gggauuuaggcugguccau

SEQ ID NO: 1051741 - RNA, 19 nt, Artificial Sequence
  Description of Artificial Sequence: Synthetic oligonucleotide
gcguacggacagcgggcac

SEQ ID NO: 1051742 - RNA, 19 nt, Artificial Sequence
  Description of Artificial Sequence: Synthetic oligonucleotide
cuacaccgaaaagguuugu

SEQ ID NO: 1051743 - RNA, 19 nt, Artificial Sequence
  Description of Artificial Sequence: Synthetic oligonucleotide
ccucgcaugcagcgcccac

SEQ ID NO: 1051744 - RNA, 19 nt, Artificial Sequence
  Description of Artificial Sequence: Synthetic oligonucleotide
cguacggacagcgggcaca

SEQ ID NO: 1051745 - RNA, 19 nt, Artificial Sequence
  Description of Artificial Sequence: Synthetic oligonucleotide
cgaccgugacgcuugaggu

SEQ ID NO: 1051746 - RNA, 19 nt, Artificial Sequence
  Description of Artificial Sequence: Synthetic oligonucleotide
cgaguggaugcgaccguga

SEQ ID NO: 1051747 - RNA, 19 nt, Artificial Sequence
  Description of Artificial Sequence: Synthetic oligonucleotide
gggcacaacgaaaggguuu

SEQ ID NO: 1051748 - RNA, 19 nt, Artificial Sequence
  Description of Artificial Sequence: Synthetic oligonucleotide
gugugcgcugaugccgccu

SEQ ID NO: 1051749 - RNA, 19 nt, Artificial Sequence
  Description of Artificial Sequence: Synthetic oligonucleotide
ggaugcgaccgugacgcuu

SEQ ID NO: 1051750 - RNA, 19 nt, Artificial Sequence
  Description of Artificial Sequence: Synthetic oligonucleotide
ccaguaugggugcggguau

SEQ ID NO: 1051751 - RNA, 19 nt, Artificial Sequence
  Description of Artificial Sequence: Synthetic oligonucleotide
gcgcagaggcggcaugagu

SEQ ID NO: 1051752 - RNA, 19 nt, Artificial Sequence
  Description of Artificial Sequence: Synthetic oligonucleotide
cgugacgcuugagguuggc

SEQ ID NO: 1051753 - RNA, 19 nt, Artificial Sequence
  Description of Artificial Sequence: Synthetic oligonucleotide
gccggggcauuguccccuc

SEQ ID NO: 1051754 - RNA, 19 nt, Artificial Sequence
  Description of Artificial Sequence: Synthetic oligonucleotide
cgcgucagguugacgagcu

SEQ ID NO: 1051755 - RNA, 19 nt, Artificial Sequence
  Description of Artificial Sequence: Synthetic oligonucleotide
ccggggcauuguccccucc

SEQ ID NO: 1051756 - RNA, 19 nt, Artificial Sequence
  Description of Artificial Sequence: Synthetic oligonucleotide
ccccggcagguccaaggga

SEQ ID NO: 1051757 - RNA, 19 nt, Artificial Sequence
  Description of Artificial Sequence: Synthetic oligonucleotide
cccguaugucgcagcauau

SEQ ID NO: 1051758 - RNA, 19 nt, Artificial Sequence
  Description of Artificial Sequence: Synthetic oligonucleotide
ccgcugugugucugcaugu

SEQ ID NO: 1051759 - RNA, 19 nt, Artificial Sequence
  Description of Artificial Sequence: Synthetic oligonucleotide
ggccacagcggaacggcuu

SEQ ID NO: 1051760 - RNA, 19 nt, Artificial Sequence
  Description of Artificial Sequence: Synthetic oligonucleotide
gcacaacgaaaggguuucu

SEQ ID NO: 1051761 - RNA, 19 nt, Artificial Sequence
  Description of Artificial Sequence: Synthetic oligonucleotide
gggugcggguaugucgcgu

SEQ ID NO: 1051762 - RNA, 19 nt, Artificial Sequence
  Description of Artificial Sequence: Synthetic oligonucleotide
ccgagccaggugguuggga

SEQ ID NO: 1051763 - RNA, 19 nt, Artificial Sequence
  Description of Artificial Sequence: Synthetic oligonucleotide
caccaccugguggcacaua

SEQ ID NO: 1051764 - RNA, 19 nt, Artificial Sequence
  Description of Artificial Sequence: Synthetic oligonucleotide
gccuaaucacugagcucau

SEQ ID NO: 1051765 - RNA, 19 nt, Artificial Sequence
  Description of Artificial Sequence: Synthetic oligonucleotide
gccccaccauggccaugca

SEQ ID NO: 1051766 - RNA, 19 nt, Artificial Sequence
  Description of Artificial Sequence: Synthetic oligonucleotide
caccauggccaugcaccuu

SEQ ID NO: 1051767 - RNA, 19 nt, Artificial Sequence
  Description of Artificial Sequence: Synthetic oligonucleotide
cccgaguggaugcgaccgu

SEQ ID NO: 1051768 - RNA, 19 nt, Artificial Sequence
  Description of Artificial Sequence: Synthetic oligonucleotide
cgaaggcgcagaggcggca

SEQ ID NO: 1051769 - RNA, 19 nt, Artificial Sequence
  Description of Artificial Sequence: Synthetic oligonucleotide
cggguaugucgcgucaggu

SEQ ID NO: 1051770 - RNA, 19 nt, Artificial Sequence
  Description of Artificial Sequence: Synthetic oligonucleotide
ccuaaucacugagcucauu

SEQ ID NO: 1051771 - RNA, 19 nt, Artificial Sequence
  Description of Artificial Sequence: Synthetic oligonucleotide
ggacgcgcuggugccguuu

SEQ ID NO: 1051772 - RNA, 19 nt, Artificial Sequence
  Description of Artificial Sequence: Synthetic oligonucleotide
cgccggggcauuguccccu

SEQ ID NO: 1051773 - RNA, 19 nt, Artificial Sequence
  Description of Artificial Sequence: Synthetic oligonucleotide
cgucgucacucagcccaua

SEQ ID NO: 1051774 - RNA, 19 nt, Artificial Sequence
  Description of Artificial Sequence: Synthetic oligonucleotide
cgcccguaugucgcagcau

SEQ ID NO: 1051775 - RNA, 19 nt, Artificial Sequence
  Description of Artificial Sequence: Synthetic oligonucleotide
guauauaugagccaggaag

SEQ ID NO: 1051776 - RNA, 19 nt, Artificial Sequence
  Description of Artificial Sequence: Synthetic oligonucleotide
cuaggauucaacuuuaggg

SEQ ID NO: 1051777 - RNA, 19 nt, Artificial Sequence
  Description of Artificial Sequence: Synthetic oligonucleotide
uuaagcuucagcauauagg

SEQ ID NO: 1051778 - RNA, 19 nt, Artificial Sequence
  Description of Artificial Sequence: Synthetic oligonucleotide
aggaagaauucuuucaucc

SEQ ID NO: 1051779 - RNA, 19 nt, Artificial Sequence
  Description of Artificial Sequence: Synthetic oligonucleotide
aaguucgacagacaguggc

SEQ ID NO: 1051780 - RNA, 19 nt, Artificial Sequence
  Description of Artificial Sequence: Synthetic oligonucleotide
aauucagacuucaugcucc

SEQ ID NO: 1051781 - RNA, 19 nt, Artificial Sequence
  Description of Artificial Sequence: Synthetic oligonucleotide
ugagcuacaaaauaacaug

SEQ ID NO: 1051782 - RNA, 19 nt, Artificial Sequence
  Description of Artificial Sequence: Synthetic oligonucleotide
aagauuggagaaugugucc

SEQ ID NO: 1051783 - RNA, 19 nt, Artificial Sequence
  Description of Artificial Sequence: Synthetic oligonucleotide
uaaggcuuaauacuggucu

SEQ ID NO: 1051784 - RNA, 19 nt, Artificial Sequence
  Description of Artificial Sequence: Synthetic oligonucleotide
agaguugucaacuacggug

SEQ ID NO: 1051785 - RNA, 19 nt, Artificial Sequence
  Description of Artificial Sequence: Synthetic oligonucleotide
augcuagugaaacuggacc

SEQ ID NO: 1051786 - RNA, 19 nt, Artificial Sequence
  Description of Artificial Sequence: Synthetic oligonucleotide
uauauaugagccaggaaga

SEQ ID NO: 1051787 - RNA, 19 nt, Artificial Sequence
  Description of Artificial Sequence: Synthetic oligonucleotide
auaguacugggccagauag

SEQ ID NO: 1051788 - RNA, 19 nt, Artificial Sequence
  Description of Artificial Sequence: Synthetic oligonucleotide
uaggauucaacuuuagggc

SEQ ID NO: 1051789 - RNA, 19 nt, Artificial Sequence
  Description of Artificial Sequence: Synthetic oligonucleotide
aauauaaggcugcuuucuc

SEQ ID NO: 1051790 - RNA, 19 nt, Artificial Sequence
  Description of Artificial Sequence: Synthetic oligonucleotide
uugagaguugucaacuacg

SEQ ID NO: 1051791 - RNA, 19 nt, Artificial Sequence
  Description of Artificial Sequence: Synthetic oligonucleotide
acauaaagaagauuggaga

SEQ ID NO: 1051792 - RNA, 19 nt, Artificial Sequence
  Description of Artificial Sequence: Synthetic oligonucleotide
uuauacacggaucuugcgc

SEQ ID NO: 1051793 - RNA, 19 nt, Artificial Sequence
  Description of Artificial Sequence: Synthetic oligonucleotide
ugucucuuaagcuucagca

SEQ ID NO: 1051794 - RNA, 19 nt, Artificial Sequence
  Description of Artificial Sequence: Synthetic oligonucleotide
ugaaaaugcaugcuugaug

SEQ ID NO: 1051795 - RNA, 19 nt, Artificial Sequence
  Description of Artificial Sequence: Synthetic oligonucleotide
ugagaguugucaacuacgg

SEQ ID NO: 1051796 - RNA, 19 nt, Artificial Sequence
  Description of Artificial Sequence: Synthetic oligonucleotide
aaacuuacuuccccgaaca

SEQ ID NO: 1051797 - RNA, 19 nt, Artificial Sequence
  Description of Artificial Sequence: Synthetic oligonucleotide
uugucgauaucucugauau

SEQ ID NO: 1051798 - RNA, 19 nt, Artificial Sequence
  Description of Artificial Sequence: Synthetic oligonucleotide
ucuuaaggauuucauaagu

SEQ ID NO: 1051799 - RNA, 19 nt, Artificial Sequence
  Description of Artificial Sequence: Synthetic oligonucleotide
auacgugaaucauugggac

SEQ ID NO: 1051800 - RNA, 19 nt, Artificial Sequence
  Description of Artificial Sequence: Synthetic oligonucleotide
uucuacucgguauuuauca

SEQ ID NO: 1051801 - RNA, 19 nt, Artificial Sequence
  Description of Artificial Sequence: Synthetic oligonucleotide
gacauaaagaagauuggag

SEQ ID NO: 1051802 - RNA, 19 nt, Artificial Sequence
  Description of Artificial Sequence: Synthetic oligonucleotide
aaugcacaacacuucuggg

SEQ ID NO: 1051803 - RNA, 19 nt, Artificial Sequence
  Description of Artificial Sequence: Synthetic oligonucleotide
uuucacagagguuaugcgc

SEQ ID NO: 1051804 - RNA, 19 nt, Artificial Sequence
  Description of Artificial Sequence: Synthetic oligonucleotide
guuguuggcagacagugag

SEQ ID NO: 1051805 - RNA, 19 nt, Artificial Sequence
  Description of Artificial Sequence: Synthetic oligonucleotide
auaucuuggauguauuuga

SEQ ID NO: 1051806 - RNA, 19 nt, Artificial Sequence
  Description of Artificial Sequence: Synthetic oligonucleotide
uucgaaacuuacuuccccg

SEQ ID NO: 1051807 - RNA, 19 nt, Artificial Sequence
  Description of Artificial Sequence: Synthetic oligonucleotide
ucaugcuccugacauaaag

SEQ ID NO: 1051808 - RNA, 19 nt, Artificial Sequence
  Description of Artificial Sequence: Synthetic oligonucleotide
uguaggaucugacggagca

SEQ ID NO: 1051809 - RNA, 19 nt, Artificial Sequence
  Description of Artificial Sequence: Synthetic oligonucleotide
caaaguucgacagacagug

SEQ ID NO: 1051810 - RNA, 19 nt, Artificial Sequence
  Description of Artificial Sequence: Synthetic oligonucleotide
ugcacaacacuucugggca

SEQ ID NO: 1051811 - RNA, 19 nt, Artificial Sequence
  Description of Artificial Sequence: Synthetic oligonucleotide
gucgauaucucugauauug

SEQ ID NO: 1051812 - RNA, 19 nt, Artificial Sequence
  Description of Artificial Sequence: Synthetic oligonucleotide
aaauauaaggcugcuuucu

SEQ ID NO: 1051813 - RNA, 19 nt, Artificial Sequence
  Description of Artificial Sequence: Synthetic oligonucleotide
uuaauacuggucuagcaau

SEQ ID NO: 1051814 - RNA, 19 nt, Artificial Sequence
  Description of Artificial Sequence: Synthetic oligonucleotide
ugcaauucuguguauauau

SEQ ID NO: 1051815 - RNA, 19 nt, Artificial Sequence
  Description of Artificial Sequence: Synthetic oligonucleotide
uuaugcgccagauaacuca

SEQ ID NO: 1051816 - RNA, 19 nt, Artificial Sequence
  Description of Artificial Sequence: Synthetic oligonucleotide
gagguuaugcgccagauaa

SEQ ID NO: 1051817 - RNA, 19 nt, Artificial Sequence
  Description of Artificial Sequence: Synthetic oligonucleotide
ugucgguaagcuuggauag

SEQ ID NO: 1051818 - RNA, 19 nt, Artificial Sequence
  Description of Artificial Sequence: Synthetic oligonucleotide
gauaucuuggauguauuug

SEQ ID NO: 1051819 - RNA, 19 nt, Artificial Sequence
  Description of Artificial Sequence: Synthetic oligonucleotide
uacuggucuagcaaugugc

SEQ ID NO: 1051820 - RNA, 19 nt, Artificial Sequence
  Description of Artificial Sequence: Synthetic oligonucleotide
uauacacggaucuugcgcu

SEQ ID NO: 1051821 - RNA, 19 nt, Artificial Sequence
  Description of Artificial Sequence: Synthetic oligonucleotide
uguguauauaugagccagg

SEQ ID NO: 1051822 - RNA, 19 nt, Artificial Sequence
  Description of Artificial Sequence: Synthetic oligonucleotide
ggaauagauaucuuggaug

SEQ ID NO: 1051823 - RNA, 19 nt, Artificial Sequence
  Description of Artificial Sequence: Synthetic oligonucleotide
aacucugcguguuggagug

SEQ ID NO: 1051824 - RNA, 19 nt, Artificial Sequence
  Description of Artificial Sequence: Synthetic oligonucleotide
ucauugaaugcacaacacu

SEQ ID NO: 1051825 - RNA, 19 nt, Artificial Sequence
  Description of Artificial Sequence: Synthetic oligonucleotide
aguacugggccagauagcg

SEQ ID NO: 1051826 - RNA, 19 nt, Artificial Sequence
  Description of Artificial Sequence: Synthetic oligonucleotide
cugacauaaagaagauugg

SEQ ID NO: 1051827 - RNA, 19 nt, Artificial Sequence
  Description of Artificial Sequence: Synthetic oligonucleotide
uggagguaaggcuuaauac

SEQ ID NO: 1051828 - RNA, 19 nt, Artificial Sequence
  Description of Artificial Sequence: Synthetic oligonucleotide
agcuauaauaauuuccaau

SEQ ID NO: 1051829 - RNA, 19 nt, Artificial Sequence
  Description of Artificial Sequence: Synthetic oligonucleotide
aaagcggcugggaacaaac

SEQ ID NO: 1051830 - RNA, 19 nt, Artificial Sequence
  Description of Artificial Sequence: Synthetic oligonucleotide
uacucaugccccaucaaug

SEQ ID NO: 1051831 - RNA, 19 nt, Artificial Sequence
  Description of Artificial Sequence: Synthetic oligonucleotide
aaguugaagcuucauccca

SEQ ID NO: 1051832 - RNA, 19 nt, Artificial Sequence
  Description of Artificial Sequence: Synthetic oligonucleotide
caucuuaaggauuucauaa

SEQ ID NO: 1051833 - RNA, 19 nt, Artificial Sequence
  Description of Artificial Sequence: Synthetic oligonucleotide
cacaggaauagauaucuug

SEQ ID NO: 1051834 - RNA, 19 nt, Artificial Sequence
  Description of Artificial Sequence: Synthetic oligonucleotide
cuaaagcuccaaaaccagg

SEQ ID NO: 1051835 - RNA, 19 nt, Artificial Sequence
  Description of Artificial Sequence: Synthetic oligonucleotide
auuccuucgaaacuuacuu

SEQ ID NO: 1051836 - RNA, 19 nt, Artificial Sequence
  Description of Artificial Sequence: Synthetic oligonucleotide
aauggcaugucgguaagcu

SEQ ID NO: 1051837 - RNA, 19 nt, Artificial Sequence
  Description of Artificial Sequence: Synthetic oligonucleotide
aacuuacuuccccgaacac

SEQ ID NO: 1051838 - RNA, 19 nt, Artificial Sequence
  Description of Artificial Sequence: Synthetic oligonucleotide
ucucuuaagcuucagcaua

SEQ ID NO: 1051839 - RNA, 19 nt, Artificial Sequence
  Description of Artificial Sequence: Synthetic oligonucleotide
uacgugaaucauugggacg

SEQ ID NO: 1051840 - RNA, 19 nt, Artificial Sequence
  Description of Artificial Sequence: Synthetic oligonucleotide
uucuccuaaggcaaccagc

SEQ ID NO: 1051841 - RNA, 19 nt, Artificial Sequence
  Description of Artificial Sequence: Synthetic oligonucleotide
gcauacgugaaucauuggg

SEQ ID NO: 1051842 - RNA, 19 nt, Artificial Sequence
  Description of Artificial Sequence: Synthetic oligonucleotide
auaccuaggauucaacuuu

SEQ ID NO: 1051843 - RNA, 19 nt, Artificial Sequence
  Description of Artificial Sequence: Synthetic oligonucleotide
ugcuagugaaacuggaccu

SEQ ID NO: 1051844 - RNA, 19 nt, Artificial Sequence
  Description of Artificial Sequence: Synthetic oligonucleotide
ugaguagccuccacaaaca

SEQ ID NO: 1051845 - RNA, 19 nt, Artificial Sequence
  Description of Artificial Sequence: Synthetic oligonucleotide
agauaccuaggauucaacu

SEQ ID NO: 1051846 - RNA, 19 nt, Artificial Sequence
  Description of Artificial Sequence: Synthetic oligonucleotide
gaucugacggagcaaggcc

SEQ ID NO: 1051847 - RNA, 19 nt, Artificial Sequence
  Description of Artificial Sequence: Synthetic oligonucleotide
cuugguuccgcaacuguag

SEQ ID NO: 1051848 - RNA, 19 nt, Artificial Sequence
  Description of Artificial Sequence: Synthetic oligonucleotide
gaaacaauguaugagcucu

SEQ ID NO: 1051849 - RNA, 19 nt, Artificial Sequence
  Description of Artificial Sequence: Synthetic oligonucleotide
aggauuucauaagucugcc

SEQ ID NO: 1051850 - RNA, 19 nt, Artificial Sequence
  Description of Artificial Sequence: Synthetic oligonucleotide
gaugaaaaugcaugcuuga

SEQ ID NO: 1051851 - RNA, 19 nt, Artificial Sequence
  Description of Artificial Sequence: Synthetic oligonucleotide
aggcaaaacaugaguagcc

SEQ ID NO: 1051852 - RNA, 19 nt, Artificial Sequence
  Description of Artificial Sequence: Synthetic oligonucleotide
gaaacuuacuuccccgaac

SEQ ID NO: 1051853 - RNA, 19 nt, Artificial Sequence
  Description of Artificial Sequence: Synthetic oligonucleotide
uccucuaucagcugcaauu

SEQ ID NO: 1051854 - RNA, 19 nt, Artificial Sequence
  Description of Artificial Sequence: Synthetic oligonucleotide
cuuauacacggaucuugcg

SEQ ID NO: 1051855 - RNA, 19 nt, Artificial Sequence
  Description of Artificial Sequence: Synthetic oligonucleotide
uugauguaacacugggcag

SEQ ID NO: 1051856 - RNA, 19 nt, Artificial Sequence
  Description of Artificial Sequence: Synthetic oligonucleotide
gcauauagguccuugggag

SEQ ID NO: 1051857 - RNA, 19 nt, Artificial Sequence
  Description of Artificial Sequence: Synthetic oligonucleotide
ucaacuacggugugacuga

SEQ ID NO: 1051858 - RNA, 19 nt, Artificial Sequence
  Description of Artificial Sequence: Synthetic oligonucleotide
agcauauagguccuuggga

SEQ ID NO: 1051859 - RNA, 19 nt, Artificial Sequence
  Description of Artificial Sequence: Synthetic oligonucleotide
auauaaggcugcuuucuca

SEQ ID NO: 1051860 - RNA, 19 nt, Artificial Sequence
  Description of Artificial Sequence: Synthetic oligonucleotide
cagcauacgugaaucauug

SEQ ID NO: 1051861 - RNA, 19 nt, Artificial Sequence
  Description of Artificial Sequence: Synthetic oligonucleotide
cuguguauauaugagccag

SEQ ID NO: 1051862 - RNA, 19 nt, Artificial Sequence
  Description of Artificial Sequence: Synthetic oligonucleotide
aaauaacaugaugcuagug

SEQ ID NO: 1051863 - RNA, 19 nt, Artificial Sequence
  Description of Artificial Sequence: Synthetic oligonucleotide
cauaugcucuccaauaaca

SEQ ID NO: 1051864 - RNA, 19 nt, Artificial Sequence
  Description of Artificial Sequence: Synthetic oligonucleotide
auaugcucuccaauaacac

SEQ ID NO: 1051865 - RNA, 19 nt, Artificial Sequence
  Description of Artificial Sequence: Synthetic oligonucleotide
cauacgugaaucauuggga

SEQ ID NO: 1051866 - RNA, 19 nt, Artificial Sequence
  Description of Artificial Sequence: Synthetic oligonucleotide
uugguuccgcaacuguagg

SEQ ID NO: 1051867 - RNA, 19 nt, Artificial Sequence
  Description of Artificial Sequence: Synthetic oligonucleotide
caacuuuagggcucucugg

SEQ ID NO: 1051868 - RNA, 19 nt, Artificial Sequence
  Description of Artificial Sequence: Synthetic oligonucleotide
gucaacuacggugugacug

SEQ ID NO: 1051869 - RNA, 19 nt, Artificial Sequence
  Description of Artificial Sequence: Synthetic oligonucleotide
agauguggcuguucuuuac

SEQ ID NO: 1051870 - RNA, 19 nt, Artificial Sequence
  Description of Artificial Sequence: Synthetic oligonucleotide
aggaauagauaucuuggau

SEQ ID NO: 1051871 - RNA, 19 nt, Artificial Sequence
  Description of Artificial Sequence: Synthetic oligonucleotide
ugaugcuagugaaacugga

SEQ ID NO: 1051872 - RNA, 19 nt, Artificial Sequence
  Description of Artificial Sequence: Synthetic oligonucleotide
aguucgacagacaguggcc

SEQ ID NO: 1051873 - RNA, 19 nt, Artificial Sequence
  Description of Artificial Sequence: Synthetic oligonucleotide
caauguaugagcucuugga

SEQ ID NO: 1051874 - RNA, 19 nt, Artificial Sequence
  Description of Artificial Sequence: Synthetic oligonucleotide
ucucugauauugugauagg

SEQ ID NO: 1051875 - RNA, 19 nt, Artificial Sequence
  Description of Artificial Sequence: Synthetic oligonucleotide
aagauaccuaggauucaac

SEQ ID NO: 1051876 - RNA, 19 nt, Artificial Sequence
  Description of Artificial Sequence: Synthetic oligonucleotide
uggcugagcuacaaaauaa

SEQ ID NO: 1051877 - RNA, 19 nt, Artificial Sequence
  Description of Artificial Sequence: Synthetic oligonucleotide
uuggauguauuugauguaa

SEQ ID NO: 1051878 - RNA, 19 nt, Artificial Sequence
  Description of Artificial Sequence: Synthetic oligonucleotide
cuugagaguugucaacuac

SEQ ID NO: 1051879 - RNA, 19 nt, Artificial Sequence
  Description of Artificial Sequence: Synthetic oligonucleotide
uuccaauuacacagcacgu

SEQ ID NO: 1051880 - RNA, 19 nt, Artificial Sequence
  Description of Artificial Sequence: Synthetic oligonucleotide
cuagcaaugugcugacuug

SEQ ID NO: 1051881 - RNA, 19 nt, Artificial Sequence
  Description of Artificial Sequence: Synthetic oligonucleotide
uucaauccuguaagggucu

SEQ ID NO: 1051882 - RNA, 19 nt, Artificial Sequence
  Description of Artificial Sequence: Synthetic oligonucleotide
uugaagcuucaucccacag

SEQ ID NO: 1051883 - RNA, 19 nt, Artificial Sequence
  Description of Artificial Sequence: Synthetic oligonucleotide
uacucgguauuuaucaauu

SEQ ID NO: 1051884 - RNA, 19 nt, Artificial Sequence
  Description of Artificial Sequence: Synthetic oligonucleotide
aguugaagcuucaucccac

SEQ ID NO: 1051885 - RNA, 19 nt, Artificial Sequence
  Description of Artificial Sequence: Synthetic oligonucleotide
uuccgcaacuguaggaucu

SEQ ID NO: 1051886 - RNA, 19 nt, Artificial Sequence
  Description of Artificial Sequence: Synthetic oligonucleotide
uucaugaagcuuugccagc

SEQ ID NO: 1051887 - RNA, 19 nt, Artificial Sequence
  Description of Artificial Sequence: Synthetic oligonucleotide
gaaacucugcguguuggag

SEQ ID NO: 1051888 - RNA, 19 nt, Artificial Sequence
  Description of Artificial Sequence: Synthetic oligonucleotide
cuucacgagagccauuuuc

SEQ ID NO: 1051889 - RNA, 19 nt, Artificial Sequence
  Description of Artificial Sequence: Synthetic oligonucleotide
uugucaacuacggugugac

SEQ ID NO: 1051890 - RNA, 19 nt, Artificial Sequence
  Description of Artificial Sequence: Synthetic oligonucleotide
acucaugccccaucaaugu

SEQ ID NO: 1051891 - RNA, 19 nt, Artificial Sequence
  Description of Artificial Sequence: Synthetic oligonucleotide
gaccucaauggcaugucgg

SEQ ID NO: 1051892 - RNA, 19 nt, Artificial Sequence
  Description of Artificial Sequence: Synthetic oligonucleotide
aaaagguaccaggcguguc

SEQ ID NO: 1051893 - RNA, 19 nt, Artificial Sequence
  Description of Artificial Sequence: Synthetic oligonucleotide
acgugaaucauugggacga

SEQ ID NO: 1051894 - RNA, 19 nt, Artificial Sequence
  Description of Artificial Sequence: Synthetic oligonucleotide
cucugauauugugauaggc

SEQ ID NO: 1051895 - RNA, 19 nt, Artificial Sequence
  Description of Artificial Sequence: Synthetic oligonucleotide
ugggagaacagauguggcu

SEQ ID NO: 1051896 - RNA, 19 nt, Artificial Sequence
  Description of Artificial Sequence: Synthetic oligonucleotide
agauuggagaaugugucca

SEQ ID NO: 1051897 - RNA, 19 nt, Artificial Sequence
  Description of Artificial Sequence: Synthetic oligonucleotide
accugccaaaguucgacag

SEQ ID NO: 1051898 - RNA, 19 nt, Artificial Sequence
  Description of Artificial Sequence: Synthetic oligonucleotide
uggauguauuugauguaac

SEQ ID NO: 1051899 - RNA, 19 nt, Artificial Sequence
  Description of Artificial Sequence: Synthetic oligonucleotide
ucgaaacuuacuuccccga

SEQ ID NO: 1051900 - RNA, 19 nt, Artificial Sequence
  Description of Artificial Sequence: Synthetic oligonucleotide
agcauaugcucuccaauaa

SEQ ID NO: 1051901 - RNA, 19 nt, Artificial Sequence
  Description of Artificial Sequence: Synthetic oligonucleotide
gaugcuagugaaacuggac

SEQ ID NO: 1051902 - RNA, 19 nt, Artificial Sequence
  Description of Artificial Sequence: Synthetic oligonucleotide
ugcccaaguccauaccaag

SEQ ID NO: 1051903 - RNA, 19 nt, Artificial Sequence
  Description of Artificial Sequence: Synthetic oligonucleotide
auaagucugcccaagucca

SEQ ID NO: 1051904 - RNA, 19 nt, Artificial Sequence
  Description of Artificial Sequence: Synthetic oligonucleotide
aaggcuuaauacuggucua

SEQ ID NO: 1051905 - RNA, 19 nt, Artificial Sequence
  Description of Artificial Sequence: Synthetic oligonucleotide
aaccagcauacgugaauca

SEQ ID NO: 1051906 - RNA, 19 nt, Artificial Sequence
  Description of Artificial Sequence: Synthetic oligonucleotide
guaucauugaaugcacaac

SEQ ID NO: 1051907 - RNA, 19 nt, Artificial Sequence
  Description of Artificial Sequence: Synthetic oligonucleotide
ucgguaagcuuggauagca

SEQ ID NO: 1051908 - RNA, 19 nt, Artificial Sequence
  Description of Artificial Sequence: Synthetic oligonucleotide
gaaucauugggacgaagcu

SEQ ID NO: 1051909 - RNA, 19 nt, Artificial Sequence
  Description of Artificial Sequence: Synthetic oligonucleotide
ucuacucgguauuuaucaa

SEQ ID NO: 1051910 - RNA, 19 nt, Artificial Sequence
  Description of Artificial Sequence: Synthetic oligonucleotide
uguuggaguguuguuggca

SEQ ID NO: 1051911 - RNA, 19 nt, Artificial Sequence
  Description of Artificial Sequence: Synthetic oligonucleotide
aucugggaaacaauguaug

SEQ ID NO: 1051912 - RNA, 19 nt, Artificial Sequence
  Description of Artificial Sequence: Synthetic oligonucleotide
acagcauaugcucuccaau

SEQ ID NO: 1051913 - RNA, 19 nt, Artificial Sequence
  Description of Artificial Sequence: Synthetic oligonucleotide
cuaagugcuccacuacuuc

SEQ ID NO: 1051914 - RNA, 19 nt, Artificial Sequence
  Description of Artificial Sequence: Synthetic oligonucleotide
agcauacgugaaucauugg

SEQ ID NO: 1051915 - RNA, 19 nt, Artificial Sequence
  Description of Artificial Sequence: Synthetic oligonucleotide
agauaucuuggauguauuu

SEQ ID NO: 1051916 - RNA, 19 nt, Artificial Sequence
  Description of Artificial Sequence: Synthetic oligonucleotide
acggcacucuccuuugcuc

SEQ ID NO: 1051917 - RNA, 19 nt, Artificial Sequence
  Description of Artificial Sequence: Synthetic oligonucleotide
uuccuucgaaacuuacuuc

SEQ ID NO: 1051918 - RNA, 19 nt, Artificial Sequence
  Description of Artificial Sequence: Synthetic oligonucleotide
auaccaagcucuguagucu

SEQ ID NO: 1051919 - RNA, 19 nt, Artificial Sequence
  Description of Artificial Sequence: Synthetic oligonucleotide
gauaccuaggauucaacuu

SEQ ID NO: 1051920 - RNA, 19 nt, Artificial Sequence
  Description of Artificial Sequence: Synthetic oligonucleotide
uaguacugggccagauagc

SEQ ID NO: 1051921 - RNA, 19 nt, Artificial Sequence
  Description of Artificial Sequence: Synthetic oligonucleotide
aagcggcugggaacaaacc

SEQ ID NO: 1051922 - RNA, 19 nt, Artificial Sequence
  Description of Artificial Sequence: Synthetic oligonucleotide
cugccaaaguucgacagac

SEQ ID NO: 1051923 - RNA, 19 nt, Artificial Sequence
  Description of Artificial Sequence: Synthetic oligonucleotide
ugcgccagauaacucaauu

SEQ ID NO: 1051924 - RNA, 19 nt, Artificial Sequence
  Description of Artificial Sequence: Synthetic oligonucleotide
caaccaagcuccccagugc

SEQ ID NO: 1051925 - RNA, 19 nt, Artificial Sequence
  Description of Artificial Sequence: Synthetic oligonucleotide
auacacggaucuugcgcuc

SEQ ID NO: 1051926 - RNA, 19 nt, Artificial Sequence
  Description of Artificial Sequence: Synthetic oligonucleotide
cucagaucuccuuuuggca

SEQ ID NO: 1051927 - RNA, 19 nt, Artificial Sequence
  Description of Artificial Sequence: Synthetic oligonucleotide
cuuggauagcagcagaugu

SEQ ID NO: 1051928 - RNA, 19 nt, Artificial Sequence
  Description of Artificial Sequence: Synthetic oligonucleotide
ccuuauacacggaucuugc

SEQ ID NO: 1051929 - RNA, 19 nt, Artificial Sequence
  Description of Artificial Sequence: Synthetic oligonucleotide
aaaauaguacugggccaga

SEQ ID NO: 1051930 - RNA, 19 nt, Artificial Sequence
  Description of Artificial Sequence: Synthetic oligonucleotide
ggaucuugcgcucacggca

SEQ ID NO: 1051931 - RNA, 19 nt, Artificial Sequence
  Description of Artificial Sequence: Synthetic oligonucleotide
uagcaaugugcugacuuga

SEQ ID NO: 1051932 - RNA, 19 nt, Artificial Sequence
  Description of Artificial Sequence: Synthetic oligonucleotide
agcguaagcuauaauaauu

SEQ ID NO: 1051933 - RNA, 19 nt, Artificial Sequence
  Description of Artificial Sequence: Synthetic oligonucleotide
aaauaguacugggccagau

SEQ ID NO: 1051934 - RNA, 19 nt, Artificial Sequence
  Description of Artificial Sequence: Synthetic oligonucleotide
ugcugggagcguaagcuau

SEQ ID NO: 1051935 - RNA, 19 nt, Artificial Sequence
  Description of Artificial Sequence: Synthetic oligonucleotide
caggaauagauaucuugga

SEQ ID NO: 1051936 - RNA, 19 nt, Artificial Sequence
  Description of Artificial Sequence: Synthetic oligonucleotide
uggaguguuguuggcagac

SEQ ID NO: 1051937 - RNA, 19 nt, Artificial Sequence
  Description of Artificial Sequence: Synthetic oligonucleotide
aggcaaccagcauacguga

SEQ ID NO: 1051938 - RNA, 19 nt, Artificial Sequence
  Description of Artificial Sequence: Synthetic oligonucleotide
ccuaggauucaacuuuagg

SEQ ID NO: 1051939 - RNA, 19 nt, Artificial Sequence
  Description of Artificial Sequence: Synthetic oligonucleotide
ggagguaaggcuuaauacu

SEQ ID NO: 1051940 - RNA, 19 nt, Artificial Sequence
  Description of Artificial Sequence: Synthetic oligonucleotide
aggcuuaauacuggucuag

SEQ ID NO: 1051941 - RNA, 19 nt, Artificial Sequence
  Description of Artificial Sequence: Synthetic oligonucleotide
guucgacagacaguggccc

SEQ ID NO: 1051942 - RNA, 19 nt, Artificial Sequence
  Description of Artificial Sequence: Synthetic oligonucleotide
uaccuaggauucaacuuua

SEQ ID NO: 1051943 - RNA, 19 nt, Artificial Sequence
  Description of Artificial Sequence: Synthetic oligonucleotide
gggagcguaagcuauaaua

SEQ ID NO: 1051944 - RNA, 19 nt, Artificial Sequence
  Description of Artificial Sequence: Synthetic oligonucleotide
auauagguccuugggagaa

SEQ ID NO: 1051945 - RNA, 19 nt, Artificial Sequence
  Description of Artificial Sequence: Synthetic oligonucleotide
uccaauuacacagcacguu

SEQ ID NO: 1051946 - RNA, 19 nt, Artificial Sequence
  Description of Artificial Sequence: Synthetic oligonucleotide
cugagcuacaaaauaacau

SEQ ID NO: 1051947 - RNA, 19 nt, Artificial Sequence
  Description of Artificial Sequence: Synthetic oligonucleotide
uuacuggagguaaggcuua

SEQ ID NO: 1051948 - RNA, 19 nt, Artificial Sequence
  Description of Artificial Sequence: Synthetic oligonucleotide
gacggagcaaggccuuacc

SEQ ID NO: 1051949 - RNA, 19 nt, Artificial Sequence
  Description of Artificial Sequence: Synthetic oligonucleotide
aacacccaccugccaaagu

SEQ ID NO: 1051950 - RNA, 19 nt, Artificial Sequence
  Description of Artificial Sequence: Synthetic oligonucleotide
cauauagguccuugggaga

SEQ ID NO: 1051951 - RNA, 19 nt, Artificial Sequence
  Description of Artificial Sequence: Synthetic oligonucleotide
ucacagagguuaugcgcca

SEQ ID NO: 1051952 - RNA, 19 nt, Artificial Sequence
  Description of Artificial Sequence: Synthetic oligonucleotide
gggagaacagauguggcug

SEQ ID NO: 1051953 - RNA, 19 nt, Artificial Sequence
  Description of Artificial Sequence: Synthetic oligonucleotide
uaccaagcucuguagucuc

SEQ ID NO: 1051954 - RNA, 19 nt, Artificial Sequence
  Description of Artificial Sequence: Synthetic oligonucleotide
ggaaacaauguaugagcuc

SEQ ID NO: 1051955 - RNA, 19 nt, Artificial Sequence
  Description of Artificial Sequence: Synthetic oligonucleotide
aguugucaacuacggugug

SEQ ID NO: 1051956 - RNA, 19 nt, Artificial Sequence
  Description of Artificial Sequence: Synthetic oligonucleotide
uucuaaaguuguggagaug

SEQ ID NO: 1051957 - RNA, 19 nt, Artificial Sequence
  Description of Artificial Sequence: Synthetic oligonucleotide
acggagcaaggccuuaccu

SEQ ID NO: 1051958 - RNA, 19 nt, Artificial Sequence
  Description of Artificial Sequence: Synthetic oligonucleotide
gcuaaagcuccaaaaccag

SEQ ID NO: 1051959 - RNA, 19 nt, Artificial Sequence
  Description of Artificial Sequence: Synthetic oligonucleotide
ggagcguaagcuauaauaa

SEQ ID NO: 1051960 - RNA, 19 nt, Artificial Sequence
  Description of Artificial Sequence: Synthetic oligonucleotide
gauguggcuguucuuuacu

SEQ ID NO: 1051961 - RNA, 19 nt, Artificial Sequence
  Description of Artificial Sequence: Synthetic oligonucleotide
uggcccuuauacacggauc

SEQ ID NO: 1051962 - RNA, 19 nt, Artificial Sequence
  Description of Artificial Sequence: Synthetic oligonucleotide
caaguccauaccaagcucu

SEQ ID NO: 1051963 - RNA, 19 nt, Artificial Sequence
  Description of Artificial Sequence: Synthetic oligonucleotide
agguaccaggcgugucacc

SEQ ID NO: 1051964 - RNA, 19 nt, Artificial Sequence
  Description of Artificial Sequence: Synthetic oligonucleotide
agguuaugcgccagauaac

SEQ ID NO: 1051965 - RNA, 19 nt, Artificial Sequence
  Description of Artificial Sequence: Synthetic oligonucleotide
ugccaaaguucgacagaca

SEQ ID NO: 1051966 - RNA, 19 nt, Artificial Sequence
  Description of Artificial Sequence: Synthetic oligonucleotide
uuggaguguuguuggcaga

SEQ ID NO: 1051967 - RNA, 19 nt, Artificial Sequence
  Description of Artificial Sequence: Synthetic oligonucleotide
acagagguuaugcgccaga

SEQ ID NO: 1051968 - RNA, 19 nt, Artificial Sequence
  Description of Artificial Sequence: Synthetic oligonucleotide
auauugugauaggcaacug

SEQ ID NO: 1051969 - RNA, 19 nt, Artificial Sequence
  Description of Artificial Sequence: Synthetic oligonucleotide
cuuaccuucuucccgggua

SEQ ID NO: 1051970 - RNA, 19 nt, Artificial Sequence
  Description of Artificial Sequence: Synthetic oligonucleotide
ucugcguguuggaguguug

SEQ ID NO: 1051971 - RNA, 19 nt, Artificial Sequence
  Description of Artificial Sequence: Synthetic oligonucleotide
uagaaagggcuuugucgau

SEQ ID NO: 1051972 - RNA, 19 nt, Artificial Sequence
  Description of Artificial Sequence: Synthetic oligonucleotide
gcugacuugagaguuguca

SEQ ID NO: 1051973 - RNA, 19 nt, Artificial Sequence
  Description of Artificial Sequence: Synthetic oligonucleotide
acucgguauuuaucaauuu

SEQ ID NO: 1051974 - RNA, 19 nt, Artificial Sequence
  Description of Artificial Sequence: Synthetic oligonucleotide
gcauaugcucuccaauaac

SEQ ID NO: 1051975 - RNA, 19 nt, Artificial Sequence
  Description of Artificial Sequence: Synthetic oligonucleotide
guaaggcuuaauacugguc

SEQ ID NO: 1051976 - RNA, 19 nt, Artificial Sequence
  Description of Artificial Sequence: Synthetic oligonucleotide
augugcugacuugagaguu

SEQ ID NO: 1051977 - RNA, 19 nt, Artificial Sequence
  Description of Artificial Sequence: Synthetic oligonucleotide
cuccccuugguuccgcaac

SEQ ID NO: 1051978 - RNA, 19 nt, Artificial Sequence
  Description of Artificial Sequence: Synthetic oligonucleotide
gcuuugucgauaucucuga

SEQ ID NO: 1051979 - RNA, 19 nt, Artificial Sequence
  Description of Artificial Sequence: Synthetic oligonucleotide
uggagaaacucugcguguu

SEQ ID NO: 1051980 - RNA, 19 nt, Artificial Sequence
  Description of Artificial Sequence: Synthetic oligonucleotide
ccuucgaaacuuacuuccc

SEQ ID NO: 1051981 - RNA, 19 nt, Artificial Sequence
  Description of Artificial Sequence: Synthetic oligonucleotide
gaacacccaccugccaaag

SEQ ID NO: 1051982 - RNA, 19 nt, Artificial Sequence
  Description of Artificial Sequence: Synthetic oligonucleotide
uggaaauauaaggcugcuu

SEQ ID NO: 1051983 - RNA, 19 nt, Artificial Sequence
  Description of Artificial Sequence: Synthetic oligonucleotide
caagauaccuaggauucaa

SEQ ID NO: 1051984 - RNA, 19 nt, Artificial Sequence
  Description of Artificial Sequence: Synthetic oligonucleotide
gagcguaagcuauaauaau

SEQ ID NO: 1051985 - RNA, 19 nt, Artificial Sequence
  Description of Artificial Sequence: Synthetic oligonucleotide
agagguuaugcgccagaua

SEQ ID NO: 1051986 - RNA, 19 nt, Artificial Sequence
  Description of Artificial Sequence: Synthetic oligonucleotide
gagcaguaucacacugugc

SEQ ID NO: 1051987 - RNA, 19 nt, Artificial Sequence
  Description of Artificial Sequence: Synthetic oligonucleotide
ugucaacuacggugugacu

SEQ ID NO: 1051988 - RNA, 19 nt, Artificial Sequence
  Description of Artificial Sequence: Synthetic oligonucleotide
ucacggcacucuccuuugc

SEQ ID NO: 1051989 - RNA, 19 nt, Artificial Sequence
  Description of Artificial Sequence: Synthetic oligonucleotide
ggagaauguguccauauuu

SEQ ID NO: 1051990 - RNA, 19 nt, Artificial Sequence
  Description of Artificial Sequence: Synthetic oligonucleotide
guuccgcaacuguaggauc

SEQ ID NO: 1051991 - RNA, 19 nt, Artificial Sequence
  Description of Artificial Sequence: Synthetic oligonucleotide
guguuggaguguuguuggc

SEQ ID NO: 1051992 - RNA, 19 nt, Artificial Sequence
  Description of Artificial Sequence: Synthetic oligonucleotide
gaaccagacccuggcugag

SEQ ID NO: 1051993 - RNA, 19 nt, Artificial Sequence
  Description of Artificial Sequence: Synthetic oligonucleotide
ggcugagcuacaaaauaac

SEQ ID NO: 1051994 - RNA, 19 nt, Artificial Sequence
  Description of Artificial Sequence: Synthetic oligonucleotide
aagucugcccaaguccaua

SEQ ID NO: 1051995 - RNA, 19 nt, Artificial Sequence
  Description of Artificial Sequence: Synthetic oligonucleotide
guuaugcgccagauaacuc

SEQ ID NO: 1051996 - RNA, 19 nt, Artificial Sequence
  Description of Artificial Sequence: Synthetic oligonucleotide
agaaagggcuuugucgaua

SEQ ID NO: 1051997 - RNA, 19 nt, Artificial Sequence
  Description of Artificial Sequence: Synthetic oligonucleotide
gagaguugucaacuacggu

SEQ ID NO: 1051998 - RNA, 19 nt, Artificial Sequence
  Description of Artificial Sequence: Synthetic oligonucleotide
guacucaugccccaucaau

SEQ ID NO: 1051999 - RNA, 19 nt, Artificial Sequence
  Description of Artificial Sequence: Synthetic oligonucleotide
ggcucucuggaaauauaag

SEQ ID NO: 1052000 - RNA, 19 nt, Artificial Sequence
  Description of Artificial Sequence: Synthetic oligonucleotide
guaccaggcgugucaccgc

SEQ ID NO: 1052001 - RNA, 19 nt, Artificial Sequence
  Description of Artificial Sequence: Synthetic oligonucleotide
gucucuuaagcuucagcau

SEQ ID NO: 1052002 - RNA, 19 nt, Artificial Sequence
  Description of Artificial Sequence: Synthetic oligonucleotide
ggcaugucgguaagcuugg

SEQ ID NO: 1052003 - RNA, 19 nt, Artificial Sequence
  Description of Artificial Sequence: Synthetic oligonucleotide
augcaugcuugaugcucug

SEQ ID NO: 1052004 - RNA, 19 nt, Artificial Sequence
  Description of Artificial Sequence: Synthetic oligonucleotide
gcggcugggaacaaaccag

SEQ ID NO: 1052005 - RNA, 19 nt, Artificial Sequence
  Description of Artificial Sequence: Synthetic oligonucleotide
gguuaugcgccagauaacu

SEQ ID NO: 1052006 - RNA, 19 nt, Artificial Sequence
  Description of Artificial Sequence: Synthetic oligonucleotide
cauugggacgaagcuggug

SEQ ID NO: 1052007 - RNA, 19 nt, Artificial Sequence
  Description of Artificial Sequence: Synthetic oligonucleotide
gucgguaagcuuggauagc

SEQ ID NO: 1052008 - RNA, 19 nt, Artificial Sequence
  Description of Artificial Sequence: Synthetic oligonucleotide
ugcaugcuugaugcucuga

SEQ ID NO: 1052009 - RNA, 19 nt, Artificial Sequence
  Description of Artificial Sequence: Synthetic oligonucleotide
ggauucaacuuuagggcuc

SEQ ID NO: 1052010 - RNA, 19 nt, Artificial Sequence
  Description of Artificial Sequence: Synthetic oligonucleotide
uggugggcccgucuauaau

SEQ ID NO: 1052011 - RNA, 19 nt, Artificial Sequence
  Description of Artificial Sequence: Synthetic oligonucleotide
ugggcgucuccccuugguu

SEQ ID NO: 1052012 - RNA, 19 nt, Artificial Sequence
  Description of Artificial Sequence: Synthetic oligonucleotide
ugucgauaucucugauauu

SEQ ID NO: 1052013 - RNA, 19 nt, Artificial Sequence
  Description of Artificial Sequence: Synthetic oligonucleotide
cacagcauaugcucuccaa

SEQ ID NO: 1052014 - RNA, 19 nt, Artificial Sequence
  Description of Artificial Sequence: Synthetic oligonucleotide
gcguguuggaguguuguug

SEQ ID NO: 1052015 - RNA, 19 nt, Artificial Sequence
  Description of Artificial Sequence: Synthetic oligonucleotide
accuaggauucaacuuuag

SEQ ID NO: 1052016 - RNA, 19 nt, Artificial Sequence
  Description of Artificial Sequence: Synthetic oligonucleotide
caauggcaugucgguaagc

SEQ ID NO: 1052017 - RNA, 19 nt, Artificial Sequence
  Description of Artificial Sequence: Synthetic oligonucleotide
gcgccagauaacucaauuc

SEQ ID NO: 1052018 - RNA, 19 nt, Artificial Sequence
  Description of Artificial Sequence: Synthetic oligonucleotide
cucugagauuggucagcug

SEQ ID NO: 1052019 - RNA, 19 nt, Artificial Sequence
  Description of Artificial Sequence: Synthetic oligonucleotide
cucuuaagcuucagcauau

SEQ ID NO: 1052020 - RNA, 19 nt, Artificial Sequence
  Description of Artificial Sequence: Synthetic oligonucleotide
ugcguguuggaguguuguu

SEQ ID NO: 1052021 - RNA, 19 nt, Artificial Sequence
  Description of Artificial Sequence: Synthetic oligonucleotide
ugggagcguaagcuauaau

SEQ ID NO: 1052022 - RNA, 19 nt, Artificial Sequence
  Description of Artificial Sequence: Synthetic oligonucleotide
cuacucgguauuuaucaau

SEQ ID NO: 1052023 - RNA, 19 nt, Artificial Sequence
  Description of Artificial Sequence: Synthetic oligonucleotide
ccggguaucauugaaugca

SEQ ID NO: 1052024 - RNA, 19 nt, Artificial Sequence
  Description of Artificial Sequence: Synthetic oligonucleotide
ucaccgcugggcgucuccc

SEQ ID NO: 1052025 - RNA, 19 nt, Artificial Sequence
  Description of Artificial Sequence: Synthetic oligonucleotide
cgccagauaacucaauuca

SEQ ID NO: 1052026 - RNA, 19 nt, Artificial Sequence
  Description of Artificial Sequence: Synthetic oligonucleotide
ggugggcccgucuauaaua

SEQ ID NO: 1052027 - RNA, 19 nt, Artificial Sequence
  Description of Artificial Sequence: Synthetic oligonucleotide
uugcgcucacggcacucuc

SEQ ID NO: 1052028 - RNA, 19 nt, Artificial Sequence
  Description of Artificial Sequence: Synthetic oligonucleotide
ccaggcgugucaccgcugg

SEQ ID NO: 1052029 - RNA, 19 nt, Artificial Sequence
  Description of Artificial Sequence: Synthetic oligonucleotide
cccggguaucauugaaugc

SEQ ID NO: 1052030 - RNA, 19 nt, Artificial Sequence
  Description of Artificial Sequence: Synthetic oligonucleotide
ggcccgucuauaauaauaa

SEQ ID NO: 1052031 - RNA, 19 nt, Artificial Sequence
  Description of Artificial Sequence: Synthetic oligonucleotide
caccugccaaaguucgaca

SEQ ID NO: 1052032 - RNA, 19 nt, Artificial Sequence
  Description of Artificial Sequence: Synthetic oligonucleotide
gggcgucuccccuugguuc

SEQ ID NO: 1052033 - RNA, 19 nt, Artificial Sequence
  Description of Artificial Sequence: Synthetic oligonucleotide
aucuugcgcucacggcacu

SEQ ID NO: 1052034 - RNA, 19 nt, Artificial Sequence
  Description of Artificial Sequence: Synthetic oligonucleotide
ugggcccgucuauaauaau

SEQ ID NO: 1052035 - RNA, 19 nt, Artificial Sequence
  Description of Artificial Sequence: Synthetic oligonucleotide
ccaccugccaaaguucgac

SEQ ID NO: 1052036 - RNA, 19 nt, Artificial Sequence
  Description of Artificial Sequence: Synthetic oligonucleotide
guggcccuuauacacggau

SEQ ID NO: 1052037 - RNA, 19 nt, Artificial Sequence
  Description of Artificial Sequence: Synthetic oligonucleotide
cggguaucauugaaugcac

SEQ ID NO: 1052038 - RNA, 19 nt, Artificial Sequence
  Description of Artificial Sequence: Synthetic oligonucleotide
acguuucuacucgguauuu

SEQ ID NO: 1052039 - RNA, 19 nt, Artificial Sequence
  Description of Artificial Sequence: Synthetic oligonucleotide
gugggcccgucuauaauaa

SEQ ID NO: 1052040 - RNA, 19 nt, Artificial Sequence
  Description of Artificial Sequence: Synthetic oligonucleotide
acuggagguaaggcuuaau

SEQ ID NO: 1052041 - RNA, 19 nt, Artificial Sequence
  Description of Artificial Sequence: Synthetic oligonucleotide
cgcaacuguaggaucugac

SEQ ID NO: 1052042 - RNA, 19 nt, Artificial Sequence
  Description of Artificial Sequence: Synthetic oligonucleotide
cacguuucuacucgguauu

SEQ ID NO: 1052043 - RNA, 19 nt, Artificial Sequence
  Description of Artificial Sequence: Synthetic oligonucleotide
gcacguuucuacucgguau

SEQ ID NO: 1052044 - RNA, 19 nt, Artificial Sequence
  Description of Artificial Sequence: Synthetic oligonucleotide
gggccagauagcggaaggc

SEQ ID NO: 1052045 - RNA, 19 nt, Artificial Sequence
  Description of Artificial Sequence: Synthetic oligonucleotide
gcguaagcuauaauaauuu

SEQ ID NO: 1052046 - RNA, 19 nt, Artificial Sequence
  Description of Artificial Sequence: Synthetic oligonucleotide
gguccuugggagaacagau

SEQ ID NO: 1052047 - RNA, 19 nt, Artificial Sequence
  Description of Artificial Sequence: Synthetic oligonucleotide
cagcuccaaccaagcuccc

SEQ ID NO: 1052048 - RNA, 19 nt, Artificial Sequence
  Description of Artificial Sequence: Synthetic oligonucleotide
gguuccgcaacuguaggau

SEQ ID NO: 1052049 - RNA, 19 nt, Artificial Sequence
  Description of Artificial Sequence: Synthetic oligonucleotide
gggcccgucuauaauaaua

SEQ ID NO: 1052050 - RNA, 19 nt, Artificial Sequence
  Description of Artificial Sequence: Synthetic oligonucleotide
cugggagcguaagcuauaa

SEQ ID NO: 1052051 - RNA, 19 nt, Artificial Sequence
  Description of Artificial Sequence: Synthetic oligonucleotide
cuuccccgaacacccaccu

SEQ ID NO: 1052052 - RNA, 19 nt, Artificial Sequence
  Description of Artificial Sequence: Synthetic oligonucleotide
ccaauuacacagcacguuu

SEQ ID NO: 1052053 - RNA, 19 nt, Artificial Sequence
  Description of Artificial Sequence: Synthetic oligonucleotide
ccugccaaaguucgacaga

SEQ ID NO: 1052054 - RNA, 19 nt, Artificial Sequence
  Description of Artificial Sequence: Synthetic oligonucleotide
ccgaacacccaccugccaa

SEQ ID NO: 1052055 - RNA, 19 nt, Artificial Sequence
  Description of Artificial Sequence: Synthetic oligonucleotide
ggaguguuguuggcagaca

SEQ ID NO: 1052056 - RNA, 19 nt, Artificial Sequence
  Description of Artificial Sequence: Synthetic oligonucleotide
cugcguguuggaguguugu

SEQ ID NO: 1052057 - RNA, 19 nt, Artificial Sequence
  Description of Artificial Sequence: Synthetic oligonucleotide
cacggcacucuccuuugcu

SEQ ID NO: 1052058 - RNA, 19 nt, Artificial Sequence
  Description of Artificial Sequence: Synthetic oligonucleotide
aguggcccuuauacacgga

SEQ ID NO: 1052059 - RNA, 19 nt, Artificial Sequence
  Description of Artificial Sequence: Synthetic oligonucleotide
ggccagauagcggaaggcu

SEQ ID NO: 1052060 - RNA, 19 nt, Artificial Sequence
  Description of Artificial Sequence: Synthetic oligonucleotide
acucugcguguuggagugu

SEQ ID NO: 1052061 - RNA, 19 nt, Artificial Sequence
  Description of Artificial Sequence: Synthetic oligonucleotide
caacuacggugugacugaa

SEQ ID NO: 1052062 - RNA, 19 nt, Artificial Sequence
  Description of Artificial Sequence: Synthetic oligonucleotide
gcugggcgucuccccuugg

SEQ ID NO: 1052063 - RNA, 19 nt, Artificial Sequence
  Description of Artificial Sequence: Synthetic oligonucleotide
cuugcgcucacggcacucu

SEQ ID NO: 1052064 - RNA, 19 nt, Artificial Sequence
  Description of Artificial Sequence: Synthetic oligonucleotide
cagagguuaugcgccagau

SEQ ID NO: 1052065 - RNA, 19 nt, Artificial Sequence
  Description of Artificial Sequence: Synthetic oligonucleotide
augcgccagauaacucaau

SEQ ID NO: 1052066 - RNA, 19 nt, Artificial Sequence
  Description of Artificial Sequence: Synthetic oligonucleotide
gcggaaggcugugcucucc

SEQ ID NO: 1052067 - RNA, 19 nt, Artificial Sequence
  Description of Artificial Sequence: Synthetic oligonucleotide
ccagcauacgugaaucauu

SEQ ID NO: 1052068 - RNA, 19 nt, Artificial Sequence
  Description of Artificial Sequence: Synthetic oligonucleotide
gcucugagauuggucagcu

SEQ ID NO: 1052069 - RNA, 19 nt, Artificial Sequence
  Description of Artificial Sequence: Synthetic oligonucleotide
gcuagugaaacuggaccuu

SEQ ID NO: 1052070 - RNA, 19 nt, Artificial Sequence
  Description of Artificial Sequence: Synthetic oligonucleotide
ugucaccgcugggcgucuc

SEQ ID NO: 1052071 - RNA, 19 nt, Artificial Sequence
  Description of Artificial Sequence: Synthetic oligonucleotide
cugggcgucuccccuuggu

SEQ ID NO: 1052072 - RNA, 19 nt, Artificial Sequence
  Description of Artificial Sequence: Synthetic oligonucleotide
gcgucuccccuugguuccg

SEQ ID NO: 1052073 - RNA, 19 nt, Artificial Sequence
  Description of Artificial Sequence: Synthetic oligonucleotide
cucugcguguuggaguguu

SEQ ID NO: 1052074 - RNA, 19 nt, Artificial Sequence
  Description of Artificial Sequence: Synthetic oligonucleotide
gucuagcaaugugcugacu

SEQ ID NO: 1052075 - RNA, 19 nt, Artificial Sequence
  Description of Artificial Sequence: Synthetic oligonucleotide
cugacggagcaaggccuua

SEQ ID NO: 1052076 - RNA, 19 nt, Artificial Sequence
  Description of Artificial Sequence: Synthetic oligonucleotide
ccaggccccaagauaccua

SEQ ID NO: 1052077 - RNA, 19 nt, Artificial Sequence
  Description of Artificial Sequence: Synthetic oligonucleotide
gcaugucgguaagcuugga

SEQ ID NO: 1052078 - RNA, 19 nt, Artificial Sequence
  Description of Artificial Sequence: Synthetic oligonucleotide
cccgaacacccaccugcca

SEQ ID NO: 1052079 - RNA, 19 nt, Artificial Sequence
  Description of Artificial Sequence: Synthetic oligonucleotide
cgcugggcgucuccccuug

SEQ ID NO: 1052080 - RNA, 19 nt, Artificial Sequence
  Description of Artificial Sequence: Synthetic oligonucleotide
gcgugucaccgcugggcgu

SEQ ID NO: 1052081 - RNA, 19 nt, Artificial Sequence
  Description of Artificial Sequence: Synthetic oligonucleotide
gcuucacgagagccauuuu

SEQ ID NO: 1052082 - RNA, 19 nt, Artificial Sequence
  Description of Artificial Sequence: Synthetic oligonucleotide
gugucaccgcugggcgucu

SEQ ID NO: 1052083 - RNA, 19 nt, Artificial Sequence
  Description of Artificial Sequence: Synthetic oligonucleotide
gcccuuauacacggaucuu

SEQ ID NO: 1052084 - RNA, 19 nt, Artificial Sequence
  Description of Artificial Sequence: Synthetic oligonucleotide
auuacuuuugacuuccgcc

SEQ ID NO: 1052085 - RNA, 19 nt, Artificial Sequence
  Description of Artificial Sequence: Synthetic oligonucleotide
uguuccacggcuuugaagg

SEQ ID NO: 1052086 - RNA, 19 nt, Artificial Sequence
  Description of Artificial Sequence: Synthetic oligonucleotide
acaugugggacauucaacc

SEQ ID NO: 1052087 - RNA, 19 nt, Artificial Sequence
  Description of Artificial Sequence: Synthetic oligonucleotide
ugaagaccuguucugagcg

SEQ ID NO: 1052088 - RNA, 19 nt, Artificial Sequence
  Description of Artificial Sequence: Synthetic oligonucleotide
guaguuuuccacucuaucg

SEQ ID NO: 1052089 - RNA, 19 nt, Artificial Sequence
  Description of Artificial Sequence: Synthetic oligonucleotide
agaacucgcagacauaagg

SEQ ID NO: 1052090 - RNA, 19 nt, Artificial Sequence
  Description of Artificial Sequence: Synthetic oligonucleotide
aggucuuucauuccugugc

SEQ ID NO: 1052091 - RNA, 19 nt, Artificial Sequence
  Description of Artificial Sequence: Synthetic oligonucleotide
ucguccucaaccuugaacc

SEQ ID NO: 1052092 - RNA, 19 nt, Artificial Sequence
  Description of Artificial Sequence: Synthetic oligonucleotide
uuuuagguaguauuugcug

SEQ ID NO: 1052093 - RNA, 19 nt, Artificial Sequence
  Description of Artificial Sequence: Synthetic oligonucleotide
auacuuuguccucugacgg

SEQ ID NO: 1052094 - RNA, 19 nt, Artificial Sequence
  Description of Artificial Sequence: Synthetic oligonucleotide
uuuagguaguauuugcuga

SEQ ID NO: 1052095 - RNA, 19 nt, Artificial Sequence
  Description of Artificial Sequence: Synthetic oligonucleotide
acuacuucccacucguuac

SEQ ID NO: 1052096 - RNA, 19 nt, Artificial Sequence
  Description of Artificial Sequence: Synthetic oligonucleotide
gaaaguaacacuucccaca

SEQ ID NO: 1052097 - RNA, 19 nt, Artificial Sequence
  Description of Artificial Sequence: Synthetic oligonucleotide
gacauaaggucuuucauuc

SEQ ID NO: 1052098 - RNA, 19 nt, Artificial Sequence
  Description of Artificial Sequence: Synthetic oligonucleotide
uuuuaugacaugugggaca

SEQ ID NO: 1052099 - RNA, 19 nt, Artificial Sequence
  Description of Artificial Sequence: Synthetic oligonucleotide
guuguggacuuuuagguag

SEQ ID NO: 1052100 - RNA, 19 nt, Artificial Sequence
  Description of Artificial Sequence: Synthetic oligonucleotide
gaugggacuaacuugggca

SEQ ID NO: 1052101 - RNA, 19 nt, Artificial Sequence
  Description of Artificial Sequence: Synthetic oligonucleotide
acauucggugcauucaaac

SEQ ID NO: 1052102 - RNA, 19 nt, Artificial Sequence
  Description of Artificial Sequence: Synthetic oligonucleotide
ucuaucguggaucuccaug

SEQ ID NO: 1052103 - RNA, 19 nt, Artificial Sequence
  Description of Artificial Sequence: Synthetic oligonucleotide
ugugcgaaggugcauguug

SEQ ID NO: 1052104 - RNA, 19 nt, Artificial Sequence
  Description of Artificial Sequence: Synthetic oligonucleotide
guugagauuugccuucugg

SEQ ID NO: 1052105 - RNA, 19 nt, Artificial Sequence
  Description of Artificial Sequence: Synthetic oligonucleotide
ugcauguugagauuugccu

SEQ ID NO: 1052106 - RNA, 19 nt, Artificial Sequence
  Description of Artificial Sequence: Synthetic oligonucleotide
uguucugagcgguucaugc

SEQ ID NO: 1052107 - RNA, 19 nt, Artificial Sequence
  Description of Artificial Sequence: Synthetic oligonucleotide
auucaaccggcacugcagc

SEQ ID NO: 1052108 - RNA, 19 nt, Artificial Sequence
  Description of Artificial Sequence: Synthetic oligonucleotide
acggacaaggcuucagagc

SEQ ID NO: 1052109 - RNA, 19 nt, Artificial Sequence
  Description of Artificial Sequence: Synthetic oligonucleotide
ugugggacauucaaccggc

SEQ ID NO: 1052110 - RNA, 19 nt, Artificial Sequence
  Description of Artificial Sequence: Synthetic oligonucleotide
acauaaggucuuucauucc

SEQ ID NO: 1052111 - RNA, 19 nt, Artificial Sequence
  Description of Artificial Sequence: Synthetic oligonucleotide
augugggacauucaaccgg

SEQ ID NO: 1052112 - RNA, 19 nt, Artificial Sequence
  Description of Artificial Sequence: Synthetic oligonucleotide
ucguggaucuccaugugcc

SEQ ID NO: 1052113 - RNA, 19 nt, Artificial Sequence
  Description of Artificial Sequence: Synthetic oligonucleotide
ucaggggccaggcuuagag

SEQ ID NO: 1052114 - RNA, 19 nt, Artificial Sequence
  Description of Artificial Sequence: Synthetic oligonucleotide
gugcuuaaaagccucgugc

SEQ ID NO: 1052115 - RNA, 19 nt, Artificial Sequence
  Description of Artificial Sequence: Synthetic oligonucleotide
ugccgagugaacuuguagc

SEQ ID NO: 1052116 - RNA, 19 nt, Artificial Sequence
  Description of Artificial Sequence: Synthetic oligonucleotide
gaccguugcggcuugaggc

SEQ ID NO: 1052117 - RNA, 19 nt, Artificial Sequence
  Description of Artificial Sequence: Synthetic oligonucleotide
uugcgaaaguaacacuucc

SEQ ID NO: 1052118 - RNA, 19 nt, Artificial Sequence
  Description of Artificial Sequence: Synthetic oligonucleotide
guggaugggacuaacuugg

SEQ ID NO: 1052119 - RNA, 19 nt, Artificial Sequence
  Description of Artificial Sequence: Synthetic oligonucleotide
uguaguuuuccacucuauc

SEQ ID NO: 1052120 - RNA, 19 nt, Artificial Sequence
  Description of Artificial Sequence: Synthetic oligonucleotide
uuaaaagccucgugcagcu

SEQ ID NO: 1052121 - RNA, 19 nt, Artificial Sequence
  Description of Artificial Sequence: Synthetic oligonucleotide
ggucguaugagucacaguc

SEQ ID NO: 1052122 - RNA, 19 nt, Artificial Sequence
  Description of Artificial Sequence: Synthetic oligonucleotide
uuuauugguggaugggacu

SEQ ID NO: 1052123 - RNA, 19 nt, Artificial Sequence
  Description of Artificial Sequence: Synthetic oligonucleotide
ugcgaaaguaacacuuccc

SEQ ID NO: 1052124 - RNA, 19 nt, Artificial Sequence
  Description of Artificial Sequence: Synthetic oligonucleotide
uucuccuugcgaaaguaac

SEQ ID NO: 1052125 - RNA, 19 nt, Artificial Sequence
  Description of Artificial Sequence: Synthetic oligonucleotide
ugugaagaccuguucugag

SEQ ID NO: 1052126 - RNA, 19 nt, Artificial Sequence
  Description of Artificial Sequence: Synthetic oligonucleotide
ucguaugagucacaguccu

SEQ ID NO: 1052127 - RNA, 19 nt, Artificial Sequence
  Description of Artificial Sequence: Synthetic oligonucleotide
acggcuuugaaggucuugc

SEQ ID NO: 1052128 - RNA, 19 nt, Artificial Sequence
  Description of Artificial Sequence: Synthetic oligonucleotide
ucuguccuggacaggaagc

SEQ ID NO: 1052129 - RNA, 19 nt, Artificial Sequence
  Description of Artificial Sequence: Synthetic oligonucleotide
uacgaugaccucugcagag

SEQ ID NO: 1052130 - RNA, 19 nt, Artificial Sequence
  Description of Artificial Sequence: Synthetic oligonucleotide
caauggggcaccucuagcc

SEQ ID NO: 1052131 - RNA, 19 nt, Artificial Sequence
  Description of Artificial Sequence: Synthetic oligonucleotide
acacguagcuguuccacgg

SEQ ID NO: 1052132 - RNA, 19 nt, Artificial Sequence
  Description of Artificial Sequence: Synthetic oligonucleotide
caaaucuggcagaagugag

SEQ ID NO: 1052133 - RNA, 19 nt, Artificial Sequence
  Description of Artificial Sequence: Synthetic oligonucleotide
ugcaauuccgggcuucaug

SEQ ID NO: 1052134 - RNA, 19 nt, Artificial Sequence
  Description of Artificial Sequence: Synthetic oligonucleotide
ucuccuugcgaaaguaaca

SEQ ID NO: 1052135 - RNA, 19 nt, Artificial Sequence
  Description of Artificial Sequence: Synthetic oligonucleotide
acacggagcaugugaagac

SEQ ID NO: 1052136 - RNA, 19 nt, Artificial Sequence
  Description of Artificial Sequence: Synthetic oligonucleotide
cauucaaccggcacugcag

SEQ ID NO: 1052137 - RNA, 19 nt, Artificial Sequence
  Description of Artificial Sequence: Synthetic oligonucleotide
accguugcggcuugaggcc

SEQ ID NO: 1052138 - RNA, 19 nt, Artificial Sequence
  Description of Artificial Sequence: Synthetic oligonucleotide
gacggacaaggcuucagag

SEQ ID NO: 1052139 - RNA, 19 nt, Artificial Sequence
  Description of Artificial Sequence: Synthetic oligonucleotide
agcaugugaagaccuguuc

SEQ ID NO: 1052140 - RNA, 19 nt, Artificial Sequence
  Description of Artificial Sequence: Synthetic oligonucleotide
ugagugaaggcuccaggac

SEQ ID NO: 1052141 - RNA, 19 nt, Artificial Sequence
  Description of Artificial Sequence: Synthetic oligonucleotide
ucugacgugcacacguagc

SEQ ID NO: 1052142 - RNA, 19 nt, Artificial Sequence
  Description of Artificial Sequence: Synthetic oligonucleotide
uucuccacggugcuuaaaa

SEQ ID NO: 1052143 - RNA, 19 nt, Artificial Sequence
  Description of Artificial Sequence: Synthetic oligonucleotide
caugugggacauucaaccg

SEQ ID NO: 1052144 - RNA, 19 nt, Artificial Sequence
  Description of Artificial Sequence: Synthetic oligonucleotide
aagucuguuggcuccuuga

SEQ ID NO: 1052145 - RNA, 19 nt, Artificial Sequence
  Description of Artificial Sequence: Synthetic oligonucleotide
gagcgguucaugcaauucc

SEQ ID NO: 1052146 - RNA, 19 nt, Artificial Sequence
  Description of Artificial Sequence: Synthetic oligonucleotide
ucaaacuuccucacacccu

SEQ ID NO: 1052147 - RNA, 19 nt, Artificial Sequence
  Description of Artificial Sequence: Synthetic oligonucleotide
ucgucugacgugcacacgu

SEQ ID NO: 1052148 - RNA, 19 nt, Artificial Sequence
  Description of Artificial Sequence: Synthetic oligonucleotide
cauguugagauuugccuuc

SEQ ID NO: 1052149 - RNA, 19 nt, Artificial Sequence
  Description of Artificial Sequence: Synthetic oligonucleotide
cuccacggugcuuaaaagc

SEQ ID NO: 1052150 - RNA, 19 nt, Artificial Sequence
  Description of Artificial Sequence: Synthetic oligonucleotide
caugugacucugcaagucc

SEQ ID NO: 1052151 - RNA, 19 nt, Artificial Sequence
  Description of Artificial Sequence: Synthetic oligonucleotide
augggacuaacuugggcag

SEQ ID NO: 1052152 - RNA, 19 nt, Artificial Sequence
  Description of Artificial Sequence: Synthetic oligonucleotide
guggcgacuggccacaugc

SEQ ID NO: 1052153 - RNA, 19 nt, Artificial Sequence
  Description of Artificial Sequence: Synthetic oligonucleotide
augagugaaggcuccagga

SEQ ID NO: 1052154 - RNA, 19 nt, Artificial Sequence
  Description of Artificial Sequence: Synthetic oligonucleotide
cacucuaucguggaucucc

SEQ ID NO: 1052155 - RNA, 19 nt, Artificial Sequence
  Description of Artificial Sequence: Synthetic oligonucleotide
agacauaaggucuuucauu

SEQ ID NO: 1052156 - RNA, 19 nt, Artificial Sequence
  Description of Artificial Sequence: Synthetic oligonucleotide
acacguggggcaugcaugg

SEQ ID NO: 1052157 - RNA, 19 nt, Artificial Sequence
  Description of Artificial Sequence: Synthetic oligonucleotide
uuuaugacaugugggacau

SEQ ID NO: 1052158 - RNA, 19 nt, Artificial Sequence
  Description of Artificial Sequence: Synthetic oligonucleotide
uucugagcgguucaugcaa

SEQ ID NO: 1052159 - RNA, 19 nt, Artificial Sequence
  Description of Artificial Sequence: Synthetic oligonucleotide
cagcuuuucuccacggugc

SEQ ID NO: 1052160 - RNA, 19 nt, Artificial Sequence
  Description of Artificial Sequence: Synthetic oligonucleotide
uucggugcauucaaacuuc

SEQ ID NO: 1052161 - RNA, 19 nt, Artificial Sequence
  Description of Artificial Sequence: Synthetic oligonucleotide
cuugugucgucugacgugc

SEQ ID NO: 1052162 - RNA, 19 nt, Artificial Sequence
  Description of Artificial Sequence: Synthetic oligonucleotide
uacuuuugacuuccgccug

SEQ ID NO: 1052163 - RNA, 19 nt, Artificial Sequence
  Description of Artificial Sequence: Synthetic oligonucleotide
aacuuccucacacccuugu

SEQ ID NO: 1052164 - RNA, 19 nt, Artificial Sequence
  Description of Artificial Sequence: Synthetic oligonucleotide
accacuacuucccacucgu

SEQ ID NO: 1052165 - RNA, 19 nt, Artificial Sequence
  Description of Artificial Sequence: Synthetic oligonucleotide
uccacucuaucguggaucu

SEQ ID NO: 1052166 - RNA, 19 nt, Artificial Sequence
  Description of Artificial Sequence: Synthetic oligonucleotide
cuugcgaaaguaacacuuc

SEQ ID NO: 1052167 - RNA, 19 nt, Artificial Sequence
  Description of Artificial Sequence: Synthetic oligonucleotide
aacagcuuuucuccacggu

SEQ ID NO: 1052168 - RNA, 19 nt, Artificial Sequence
  Description of Artificial Sequence: Synthetic oligonucleotide
ucuccacggugcuuaaaag

SEQ ID NO: 1052169 - RNA, 19 nt, Artificial Sequence
  Description of Artificial Sequence: Synthetic oligonucleotide
uccacggcuuugaaggucu

SEQ ID NO: 1052170 - RNA, 19 nt, Artificial Sequence
  Description of Artificial Sequence: Synthetic oligonucleotide
ugacggacaaggcuucaga

SEQ ID NO: 1052171 - RNA, 19 nt, Artificial Sequence
  Description of Artificial Sequence: Synthetic oligonucleotide
uuacucucgcccugcaaug

SEQ ID NO: 1052172 - RNA, 19 nt, Artificial Sequence
  Description of Artificial Sequence: Synthetic oligonucleotide
gguucaugcaauuccgggc

SEQ ID NO: 1052173 - RNA, 19 nt, Artificial Sequence
  Description of Artificial Sequence: Synthetic oligonucleotide
ucugaccugaucccuguuc

SEQ ID NO: 1052174 - RNA, 19 nt, Artificial Sequence
  Description of Artificial Sequence: Synthetic oligonucleotide
gcaauuccgggcuucaugc

SEQ ID NO: 1052175 - RNA, 19 nt, Artificial Sequence
  Description of Artificial Sequence: Synthetic oligonucleotide
uaugagucacaguccucag

SEQ ID NO: 1052176 - RNA, 19 nt, Artificial Sequence
  Description of Artificial Sequence: Synthetic oligonucleotide
ugugagacaccaugugcac

SEQ ID NO: 1052177 - RNA, 19 nt, Artificial Sequence
  Description of Artificial Sequence: Synthetic oligonucleotide
uguuguggacuuuuaggua

SEQ ID NO: 1052178 - RNA, 19 nt, Artificial Sequence
  Description of Artificial Sequence: Synthetic oligonucleotide
ugggucagggacucuacga

SEQ ID NO: 1052179 - RNA, 19 nt, Artificial Sequence
  Description of Artificial Sequence: Synthetic oligonucleotide
cuccccgucguccucaacc

SEQ ID NO: 1052180 - RNA, 19 nt, Artificial Sequence
  Description of Artificial Sequence: Synthetic oligonucleotide
guaugagucacaguccuca

SEQ ID NO: 1052181 - RNA, 19 nt, Artificial Sequence
  Description of Artificial Sequence: Synthetic oligonucleotide
aagaccuguucugagcggu

SEQ ID NO: 1052182 - RNA, 19 nt, Artificial Sequence
  Description of Artificial Sequence: Synthetic oligonucleotide
cacacguagcuguuccacg

SEQ ID NO: 1052183 - RNA, 19 nt, Artificial Sequence
  Description of Artificial Sequence: Synthetic oligonucleotide
acguggggcaugcaugggg

SEQ ID NO: 1052184 - RNA, 19 nt, Artificial Sequence
  Description of Artificial Sequence: Synthetic oligonucleotide
uuauugguggaugggacua

SEQ ID NO: 1052185 - RNA, 19 nt, Artificial Sequence
  Description of Artificial Sequence: Synthetic oligonucleotide
guuuauugguggaugggac

SEQ ID NO: 1052186 - RNA, 19 nt, Artificial Sequence
  Description of Artificial Sequence: Synthetic oligonucleotide
agaccguugcggcuugagg

SEQ ID NO: 1052187 - RNA, 19 nt, Artificial Sequence
  Description of Artificial Sequence: Synthetic oligonucleotide
aucuggcagaagugaggcc

SEQ ID NO: 1052188 - RNA, 19 nt, Artificial Sequence
  Description of Artificial Sequence: Synthetic oligonucleotide
cuccuugcgaaaguaacac

SEQ ID NO: 1052189 - RNA, 19 nt, Artificial Sequence
  Description of Artificial Sequence: Synthetic oligonucleotide
uggaugggacuaacuuggg

SEQ ID NO: 1052190 - RNA, 19 nt, Artificial Sequence
  Description of Artificial Sequence: Synthetic oligonucleotide
ugucgucugacgugcacac

SEQ ID NO: 1052191 - RNA, 19 nt, Artificial Sequence
  Description of Artificial Sequence: Synthetic oligonucleotide
ugaugagugaaggcuccag

SEQ ID NO: 1052192 - RNA, 19 nt, Artificial Sequence
  Description of Artificial Sequence: Synthetic oligonucleotide
gacucuacgaugaccucug

SEQ ID NO: 1052193 - RNA, 19 nt, Artificial Sequence
  Description of Artificial Sequence: Synthetic oligonucleotide
uaucguggaucuccaugug

SEQ ID NO: 1052194 - RNA, 19 nt, Artificial Sequence
  Description of Artificial Sequence: Synthetic oligonucleotide
ugagccugccgagugaacu

SEQ ID NO: 1052195 - RNA, 19 nt, Artificial Sequence
  Description of Artificial Sequence: Synthetic oligonucleotide
cacacguggggcaugcaug

SEQ ID NO: 1052196 - RNA, 19 nt, Artificial Sequence
  Description of Artificial Sequence: Synthetic oligonucleotide
uuguaguuuuccacucuau

SEQ ID NO: 1052197 - RNA, 19 nt, Artificial Sequence
  Description of Artificial Sequence: Synthetic oligonucleotide
uugaaccacuacuucccac

SEQ ID NO: 1052198 - RNA, 19 nt, Artificial Sequence
  Description of Artificial Sequence: Synthetic oligonucleotide
acucucgcccugcaauggg

SEQ ID NO: 1052199 - RNA, 19 nt, Artificial Sequence
  Description of Artificial Sequence: Synthetic oligonucleotide
gugugagacaccaugugca

SEQ ID NO: 1052200 - RNA, 19 nt, Artificial Sequence
  Description of Artificial Sequence: Synthetic oligonucleotide
agagcccaucuccaggucu

SEQ ID NO: 1052201 - RNA, 19 nt, Artificial Sequence
  Description of Artificial Sequence: Synthetic oligonucleotide
uguccagacuggcuugggu

SEQ ID NO: 1052202 - RNA, 19 nt, Artificial Sequence
  Description of Artificial Sequence: Synthetic oligonucleotide
uugggacacucaaaggguu

SEQ ID NO: 1052203 - RNA, 19 nt, Artificial Sequence
  Description of Artificial Sequence: Synthetic oligonucleotide
uguugagauuugccuucug

SEQ ID NO: 1052204 - RNA, 19 nt, Artificial Sequence
  Description of Artificial Sequence: Synthetic oligonucleotide
uccaugugccuccgcaggu

SEQ ID NO: 1052205 - RNA, 19 nt, Artificial Sequence
  Description of Artificial Sequence: Synthetic oligonucleotide
uccuugcgaaaguaacacu

SEQ ID NO: 1052206 - RNA, 19 nt, Artificial Sequence
  Description of Artificial Sequence: Synthetic oligonucleotide
acucuacgaugaccucugc

SEQ ID NO: 1052207 - RNA, 19 nt, Artificial Sequence
  Description of Artificial Sequence: Synthetic oligonucleotide
cugccgagugaacuuguag

SEQ ID NO: 1052208 - RNA, 19 nt, Artificial Sequence
  Description of Artificial Sequence: Synthetic oligonucleotide
cucucgcccugcaaugggg

SEQ ID NO: 1052209 - RNA, 19 nt, Artificial Sequence
  Description of Artificial Sequence: Synthetic oligonucleotide
gucguaugagucacagucc

SEQ ID NO: 1052210 - RNA, 19 nt, Artificial Sequence
  Description of Artificial Sequence: Synthetic oligonucleotide
ugcggcuugaggcccggug

SEQ ID NO: 1052211 - RNA, 19 nt, Artificial Sequence
  Description of Artificial Sequence: Synthetic oligonucleotide
ucguccaagucuguuggcu

SEQ ID NO: 1052212 - RNA, 19 nt, Artificial Sequence
  Description of Artificial Sequence: Synthetic oligonucleotide
ugaccugaucccuguuccc

SEQ ID NO: 1052213 - RNA, 19 nt, Artificial Sequence
  Description of Artificial Sequence: Synthetic oligonucleotide
cacuucccacauuugggac

SEQ ID NO: 1052214 - RNA, 19 nt, Artificial Sequence
  Description of Artificial Sequence: Synthetic oligonucleotide
gucugacgugcacacguag

SEQ ID NO: 1052215 - RNA, 19 nt, Artificial Sequence
  Description of Artificial Sequence: Synthetic oligonucleotide
caucugcagaccguugcgg

SEQ ID NO: 1052216 - RNA, 19 nt, Artificial Sequence
  Description of Artificial Sequence: Synthetic oligonucleotide
ugggacuaacuugggcagg

SEQ ID NO: 1052217 - RNA, 19 nt, Artificial Sequence
  Description of Artificial Sequence: Synthetic oligonucleotide
uucaaccggcacugcagca

SEQ ID NO: 1052218 - RNA, 19 nt, Artificial Sequence
  Description of Artificial Sequence: Synthetic oligonucleotide
uuccgccuggucagcacag

SEQ ID NO: 1052219 - RNA, 19 nt, Artificial Sequence
  Description of Artificial Sequence: Synthetic oligonucleotide
gaucccuguucccugaggu

SEQ ID NO: 1052220 - RNA, 19 nt, Artificial Sequence
  Description of Artificial Sequence: Synthetic oligonucleotide
gaagugaggccugcccucc

SEQ ID NO: 1052221 - RNA, 19 nt, Artificial Sequence
  Description of Artificial Sequence: Synthetic oligonucleotide
uccgcaggugagccugccg

SEQ ID NO: 1052222 - RNA, 19 nt, Artificial Sequence
  Description of Artificial Sequence: Synthetic oligonucleotide
ugugcaucugcagaccguu

SEQ ID NO: 1052223 - RNA, 19 nt, Artificial Sequence
  Description of Artificial Sequence: Synthetic oligonucleotide
guuacucucgcccugcaau

SEQ ID NO: 1052224 - RNA, 19 nt, Artificial Sequence
  Description of Artificial Sequence: Synthetic oligonucleotide
ugagguggcuuuucacauc

SEQ ID NO: 1052225 - RNA, 19 nt, Artificial Sequence
  Description of Artificial Sequence: Synthetic oligonucleotide
ggacauucaaccggcacug

SEQ ID NO: 1052226 - RNA, 19 nt, Artificial Sequence
  Description of Artificial Sequence: Synthetic oligonucleotide
gugcauguugagauuugcc

SEQ ID NO: 1052227 - RNA, 19 nt, Artificial Sequence
  Description of Artificial Sequence: Synthetic oligonucleotide
acucguuacucucgcccug

SEQ ID NO: 1052228 - RNA, 19 nt, Artificial Sequence
  Description of Artificial Sequence: Synthetic oligonucleotide
gacgugcacacguagcugu

SEQ ID NO: 1052229 - RNA, 19 nt, Artificial Sequence
  Description of Artificial Sequence: Synthetic oligonucleotide
cacggagcaugugaagacc

SEQ ID NO: 1052230 - RNA, 19 nt, Artificial Sequence
  Description of Artificial Sequence: Synthetic oligonucleotide
acguagcuguuccacggcu

SEQ ID NO: 1052231 - RNA, 19 nt, Artificial Sequence
  Description of Artificial Sequence: Synthetic oligonucleotide
uuuccacucuaucguggau

SEQ ID NO: 1052232 - RNA, 19 nt, Artificial Sequence
  Description of Artificial Sequence: Synthetic oligonucleotide
ccucguccaagucuguugg

SEQ ID NO: 1052233 - RNA, 19 nt, Artificial Sequence
  Description of Artificial Sequence: Synthetic oligonucleotide
gaacucgcagacauaaggu

SEQ ID NO: 1052234 - RNA, 19 nt, Artificial Sequence
  Description of Artificial Sequence: Synthetic oligonucleotide
cagucucgggcucuccccg

SEQ ID NO: 1052235 - RNA, 19 nt, Artificial Sequence
  Description of Artificial Sequence: Synthetic oligonucleotide
ugcuugaguuucccacaga

SEQ ID NO: 1052236 - RNA, 19 nt, Artificial Sequence
  Description of Artificial Sequence: Synthetic oligonucleotide
uguuuccuguuguggacuu

SEQ ID NO: 1052237 - RNA, 19 nt, Artificial Sequence
  Description of Artificial Sequence: Synthetic oligonucleotide
caggucugcaggcggcugg

SEQ ID NO: 1052238 - RNA, 19 nt, Artificial Sequence
  Description of Artificial Sequence: Synthetic oligonucleotide
cagaacucgcagacauaag

SEQ ID NO: 1052239 - RNA, 19 nt, Artificial Sequence
  Description of Artificial Sequence: Synthetic oligonucleotide
uccccgguguguuuccugu

SEQ ID NO: 1052240 - RNA, 19 nt, Artificial Sequence
  Description of Artificial Sequence: Synthetic oligonucleotide
cacucugaccugaucccug

SEQ ID NO: 1052241 - RNA, 19 nt, Artificial Sequence
  Description of Artificial Sequence: Synthetic oligonucleotide
gguaguauuugcugaggaa

SEQ ID NO: 1052242 - RNA, 19 nt, Artificial Sequence
  Description of Artificial Sequence: Synthetic oligonucleotide
gaugaccucugcagagccc

SEQ ID NO: 1052243 - RNA, 19 nt, Artificial Sequence
  Description of Artificial Sequence: Synthetic oligonucleotide
uccccgucguccucaaccu

SEQ ID NO: 1052244 - RNA, 19 nt, Artificial Sequence
  Description of Artificial Sequence: Synthetic oligonucleotide
ccacucguuacucucgccc

SEQ ID NO: 1052245 - RNA, 19 nt, Artificial Sequence
  Description of Artificial Sequence: Synthetic oligonucleotide
cuacgaugaccucugcaga

SEQ ID NO: 1052246 - RNA, 19 nt, Artificial Sequence
  Description of Artificial Sequence: Synthetic oligonucleotide
ugaggcccuuugcaguccu

SEQ ID NO: 1052247 - RNA, 19 nt, Artificial Sequence
  Description of Artificial Sequence: Synthetic oligonucleotide
ggucagggacucuacgaug

SEQ ID NO: 1052248 - RNA, 19 nt, Artificial Sequence
  Description of Artificial Sequence: Synthetic oligonucleotide
cacacggagcaugugaaga

SEQ ID NO: 1052249 - RNA, 19 nt, Artificial Sequence
  Description of Artificial Sequence: Synthetic oligonucleotide
augugacucugcaaguccu

SEQ ID NO: 1052250 - RNA, 19 nt, Artificial Sequence
  Description of Artificial Sequence: Synthetic oligonucleotide
cucguuacucucgcccugc

SEQ ID NO: 1052251 - RNA, 19 nt, Artificial Sequence
  Description of Artificial Sequence: Synthetic oligonucleotide
ucuggcuagggagcuggga

SEQ ID NO: 1052252 - RNA, 19 nt, Artificial Sequence
  Description of Artificial Sequence: Synthetic oligonucleotide
accuuuccuucccuccgug

SEQ ID NO: 1052253 - RNA, 19 nt, Artificial Sequence
  Description of Artificial Sequence: Synthetic oligonucleotide
caagucuguuggcuccuug

SEQ ID NO: 1052254 - RNA, 19 nt, Artificial Sequence
  Description of Artificial Sequence: Synthetic oligonucleotide
agugaacuuguagccacau

SEQ ID NO: 1052255 - RNA, 19 nt, Artificial Sequence
  Description of Artificial Sequence: Synthetic oligonucleotide
gcucgcagaacucacaccu

SEQ ID NO: 1052256 - RNA, 19 nt, Artificial Sequence
  Description of Artificial Sequence: Synthetic oligonucleotide
ucgugcagcugcaguucug

SEQ ID NO: 1052257 - RNA, 19 nt, Artificial Sequence
  Description of Artificial Sequence: Synthetic oligonucleotide
cgugugagacaccaugugc

SEQ ID NO: 1052258 - RNA, 19 nt, Artificial Sequence
  Description of Artificial Sequence: Synthetic oligonucleotide
ggugcauguugagauuugc

SEQ ID NO: 1052259 - RNA, 19 nt, Artificial Sequence
  Description of Artificial Sequence: Synthetic oligonucleotide
cucuacgaugaccucugca

SEQ ID NO: 1052260 - RNA, 19 nt, Artificial Sequence
  Description of Artificial Sequence: Synthetic oligonucleotide
cucguccaagucuguuggc

SEQ ID NO: 1052261 - RNA, 19 nt, Artificial Sequence
  Description of Artificial Sequence: Synthetic oligonucleotide
gagacaccaugugcacccg

SEQ ID NO: 1052262 - RNA, 19 nt, Artificial Sequence
  Description of Artificial Sequence: Synthetic oligonucleotide
ggugcggaaggucuugcca

SEQ ID NO: 1052263 - RNA, 19 nt, Artificial Sequence
  Description of Artificial Sequence: Synthetic oligonucleotide
aagugaggccugcccuccu

SEQ ID NO: 1052264 - RNA, 19 nt, Artificial Sequence
  Description of Artificial Sequence: Synthetic oligonucleotide
acggagcaugugaagaccu

SEQ ID NO: 1052265 - RNA, 19 nt, Artificial Sequence
  Description of Artificial Sequence: Synthetic oligonucleotide
ucguuacucucgcccugca

SEQ ID NO: 1052266 - RNA, 19 nt, Artificial Sequence
  Description of Artificial Sequence: Synthetic oligonucleotide
cacuacuucccacucguua

SEQ ID NO: 1052267 - RNA, 19 nt, Artificial Sequence
  Description of Artificial Sequence: Synthetic oligonucleotide
uucaugcaauuccgggcuu

SEQ ID NO: 1052268 - RNA, 19 nt, Artificial Sequence
  Description of Artificial Sequence: Synthetic oligonucleotide
cgaaaguaacacuucccac

SEQ ID NO: 1052269 - RNA, 19 nt, Artificial Sequence
  Description of Artificial Sequence: Synthetic oligonucleotide
gccucgaagggccucugag

SEQ ID NO: 1052270 - RNA, 19 nt, Artificial Sequence
  Description of Artificial Sequence: Synthetic oligonucleotide
acggugcuuaaaagccucg

SEQ ID NO: 1052271 - RNA, 19 nt, Artificial Sequence
  Description of Artificial Sequence: Synthetic oligonucleotide
auguugagauuugccuucu

SEQ ID NO: 1052272 - RNA, 19 nt, Artificial Sequence
  Description of Artificial Sequence: Synthetic oligonucleotide
cugacggacaaggcuucag

SEQ ID NO: 1052273 - RNA, 19 nt, Artificial Sequence
  Description of Artificial Sequence: Synthetic oligonucleotide
cgguucaugcaauuccggg

SEQ ID NO: 1052274 - RNA, 19 nt, Artificial Sequence
  Description of Artificial Sequence: Synthetic oligonucleotide
gacauucaaccggcacugc

SEQ ID NO: 1052275 - RNA, 19 nt, Artificial Sequence
  Description of Artificial Sequence: Synthetic oligonucleotide
agccucgugcagcugcagu

SEQ ID NO: 1052276 - RNA, 19 nt, Artificial Sequence
  Description of Artificial Sequence: Synthetic oligonucleotide
ccuugugucgucugacgug

SEQ ID NO: 1052277 - RNA, 19 nt, Artificial Sequence
  Description of Artificial Sequence: Synthetic oligonucleotide
ucugacggacaaggcuuca

SEQ ID NO: 1052278 - RNA, 19 nt, Artificial Sequence
  Description of Artificial Sequence: Synthetic oligonucleotide
aggacgcuggggcuggcaa

SEQ ID NO: 1052279 - RNA, 19 nt, Artificial Sequence
  Description of Artificial Sequence: Synthetic oligonucleotide
gggacauucaaccggcacu

SEQ ID NO: 1052280 - RNA, 19 nt, Artificial Sequence
  Description of Artificial Sequence: Synthetic oligonucleotide
ggggucguaugagucacag

SEQ ID NO: 1052281 - RNA, 19 nt, Artificial Sequence
  Description of Artificial Sequence: Synthetic oligonucleotide
gcaauggggcaccucuagc

SEQ ID NO: 1052282 - RNA, 19 nt, Artificial Sequence
  Description of Artificial Sequence: Synthetic oligonucleotide
gagccugcuugaguuuccc

SEQ ID NO: 1052283 - RNA, 19 nt, Artificial Sequence
  Description of Artificial Sequence: Synthetic oligonucleotide
cugacgugcacacguagcu

SEQ ID NO: 1052284 - RNA, 19 nt, Artificial Sequence
  Description of Artificial Sequence: Synthetic oligonucleotide
ggaggagcacuuguagggc

SEQ ID NO: 1052285 - RNA, 19 nt, Artificial Sequence
  Description of Artificial Sequence: Synthetic oligonucleotide
gaccuguucugagcgguuc

SEQ ID NO: 1052286 - RNA, 19 nt, Artificial Sequence
  Description of Artificial Sequence: Synthetic oligonucleotide
gugcgaaggugcauguuga

SEQ ID NO: 1052287 - RNA, 19 nt, Artificial Sequence
  Description of Artificial Sequence: Synthetic oligonucleotide
acucuaucguggaucucca

SEQ ID NO: 1052288 - RNA, 19 nt, Artificial Sequence
  Description of Artificial Sequence: Synthetic oligonucleotide
ucuagccucgaagggccuc

SEQ ID NO: 1052289 - RNA, 19 nt, Artificial Sequence
  Description of Artificial Sequence: Synthetic oligonucleotide
uguggacuuuuagguagua

SEQ ID NO: 1052290 - RNA, 19 nt, Artificial Sequence
  Description of Artificial Sequence: Synthetic oligonucleotide
gagugaacuuguagccaca

SEQ ID NO: 1052291 - RNA, 19 nt, Artificial Sequence
  Description of Artificial Sequence: Synthetic oligonucleotide
agccugccgagugaacuug

SEQ ID NO: 1052292 - RNA, 19 nt, Artificial Sequence
  Description of Artificial Sequence: Synthetic oligonucleotide
gugucgucugacgugcaca

SEQ ID NO: 1052293 - RNA, 19 nt, Artificial Sequence
  Description of Artificial Sequence: Synthetic oligonucleotide
cuuccgccuggucagcaca

SEQ ID NO: 1052294 - RNA, 19 nt, Artificial Sequence
  Description of Artificial Sequence: Synthetic oligonucleotide
cuguccuggacaggaagca

SEQ ID NO: 1052295 - RNA, 19 nt, Artificial Sequence
  Description of Artificial Sequence: Synthetic oligonucleotide
gcggcuugaggcccggugc

SEQ ID NO: 1052296 - RNA, 19 nt, Artificial Sequence
  Description of Artificial Sequence: Synthetic oligonucleotide
ggcuuuucacauccuggga

SEQ ID NO: 1052297 - RNA, 19 nt, Artificial Sequence
  Description of Artificial Sequence: Synthetic oligonucleotide
gucgucugacgugcacacg

SEQ ID NO: 1052298 - RNA, 19 nt, Artificial Sequence
  Description of Artificial Sequence: Synthetic oligonucleotide
aggugcauguugagauuug

SEQ ID NO: 1052299 - RNA, 19 nt, Artificial Sequence
  Description of Artificial Sequence: Synthetic oligonucleotide
cagaagcgggcccuucuca

SEQ ID NO: 1052300 - RNA, 19 nt, Artificial Sequence
  Description of Artificial Sequence: Synthetic oligonucleotide
gcacacggagcaugugaag

SEQ ID NO: 1052301 - RNA, 19 nt, Artificial Sequence
  Description of Artificial Sequence: Synthetic oligonucleotide
caugcaauuccgggcuuca

SEQ ID NO: 1052302 - RNA, 19 nt, Artificial Sequence
  Description of Artificial Sequence: Synthetic oligonucleotide
ccccgugugagacaccaug

SEQ ID NO: 1052303 - RNA, 19 nt, Artificial Sequence
  Description of Artificial Sequence: Synthetic oligonucleotide
agucucgggcucuccccgu

SEQ ID NO: 1052304 - RNA, 19 nt, Artificial Sequence
  Description of Artificial Sequence: Synthetic oligonucleotide
gcugacugucucugaacuc

SEQ ID NO: 1052305 - RNA, 19 nt, Artificial Sequence
  Description of Artificial Sequence: Synthetic oligonucleotide
cacauucggugcauucaaa

SEQ ID NO: 1052306 - RNA, 19 nt, Artificial Sequence
  Description of Artificial Sequence: Synthetic oligonucleotide
cagaccguugcggcuugag

SEQ ID NO: 1052307 - RNA, 19 nt, Artificial Sequence
  Description of Artificial Sequence: Synthetic oligonucleotide
cuccccgguguguuuccug

SEQ ID NO: 1052308 - RNA, 19 nt, Artificial Sequence
  Description of Artificial Sequence: Synthetic oligonucleotide
cagauacuuuguccucuga

SEQ ID NO: 1052309 - RNA, 19 nt, Artificial Sequence
  Description of Artificial Sequence: Synthetic oligonucleotide
cgaugaccucugcagagcc

SEQ ID NO: 1052310 - RNA, 19 nt, Artificial Sequence
  Description of Artificial Sequence: Synthetic oligonucleotide
gcgguucaugcaauuccgg

SEQ ID NO: 1052311 - RNA, 19 nt, Artificial Sequence
  Description of Artificial Sequence: Synthetic oligonucleotide
ugacuuccgccuggucagc

SEQ ID NO: 1052312 - RNA, 19 nt, Artificial Sequence
  Description of Artificial Sequence: Synthetic oligonucleotide
uuucuccacggugcuuaaa

SEQ ID NO: 1052313 - RNA, 19 nt, Artificial Sequence
  Description of Artificial Sequence: Synthetic oligonucleotide
gcauguugagauuugccuu

SEQ ID NO: 1052314 - RNA, 19 nt, Artificial Sequence
  Description of Artificial Sequence: Synthetic oligonucleotide
ggacuaacuugggcagggg

SEQ ID NO: 1052315 - RNA, 19 nt, Artificial Sequence
  Description of Artificial Sequence: Synthetic oligonucleotide
gcacacguagcuguuccac

SEQ ID NO: 1052316 - RNA, 19 nt, Artificial Sequence
  Description of Artificial Sequence: Synthetic oligonucleotide
cucacacccuugugucguc

SEQ ID NO: 1052317 - RNA, 19 nt, Artificial Sequence
  Description of Artificial Sequence: Synthetic oligonucleotide
cacucguuacucucgcccu

SEQ ID NO: 1052318 - RNA, 19 nt, Artificial Sequence
  Description of Artificial Sequence: Synthetic oligonucleotide
ccuugcgaaaguaacacuu

SEQ ID NO: 1052319 - RNA, 19 nt, Artificial Sequence
  Description of Artificial Sequence: Synthetic oligonucleotide
guugcggcuugaggcccgg

SEQ ID NO: 1052320 - RNA, 19 nt, Artificial Sequence
  Description of Artificial Sequence: Synthetic oligonucleotide
ccgugugagacaccaugug

SEQ ID NO: 1052321 - RNA, 19 nt, Artificial Sequence
  Description of Artificial Sequence: Synthetic oligonucleotide
cacguggggcaugcauggg

SEQ ID NO: 1052322 - RNA, 19 nt, Artificial Sequence
  Description of Artificial Sequence: Synthetic oligonucleotide
cucgcagacauaaggucuu

SEQ ID NO: 1052323 - RNA, 19 nt, Artificial Sequence
  Description of Artificial Sequence: Synthetic oligonucleotide
cagugaagcgcugcucgca

SEQ ID NO: 1052324 - RNA, 19 nt, Artificial Sequence
  Description of Artificial Sequence: Synthetic oligonucleotide
aaccggcacugcagcaccu

SEQ ID NO: 1052325 - RNA, 19 nt, Artificial Sequence
  Description of Artificial Sequence: Synthetic oligonucleotide
cagagcccaucuccagguc

SEQ ID NO: 1052326 - RNA, 19 nt, Artificial Sequence
  Description of Artificial Sequence: Synthetic oligonucleotide
cuccgugggcuccgcugcc

SEQ ID NO: 1052327 - RNA, 19 nt, Artificial Sequence
  Description of Artificial Sequence: Synthetic oligonucleotide
uccgugggcuccgcugcca

SEQ ID NO: 1052328 - RNA, 19 nt, Artificial Sequence
  Description of Artificial Sequence: Synthetic oligonucleotide
guuccacggcuuugaaggu

SEQ ID NO: 1052329 - RNA, 19 nt, Artificial Sequence
  Description of Artificial Sequence: Synthetic oligonucleotide
ggacucuacgaugaccucu

SEQ ID NO: 1052330 - RNA, 19 nt, Artificial Sequence
  Description of Artificial Sequence: Synthetic oligonucleotide
ggcuccgugcagcuugauc

SEQ ID NO: 1052331 - RNA, 19 nt, Artificial Sequence
  Description of Artificial Sequence: Synthetic oligonucleotide
ccguggguuguaguuuucc

SEQ ID NO: 1052332 - RNA, 19 nt, Artificial Sequence
  Description of Artificial Sequence: Synthetic oligonucleotide
ccagacuggcuugggugcg

SEQ ID NO: 1052333 - RNA, 19 nt, Artificial Sequence
  Description of Artificial Sequence: Synthetic oligonucleotide
uccgccuggucagcacagu

SEQ ID NO: 1052334 - RNA, 19 nt, Artificial Sequence
  Description of Artificial Sequence: Synthetic oligonucleotide
cagcacagggcuuucccau

SEQ ID NO: 1052335 - RNA, 19 nt, Artificial Sequence
  Description of Artificial Sequence: Synthetic oligonucleotide
gagccugccgagugaacuu

SEQ ID NO: 1052336 - RNA, 19 nt, Artificial Sequence
  Description of Artificial Sequence: Synthetic oligonucleotide
ggcuggagugccaccacca

SEQ ID NO: 1052337 - RNA, 19 nt, Artificial Sequence
  Description of Artificial Sequence: Synthetic oligonucleotide
gcgacuggccacaugccuc

SEQ ID NO: 1052338 - RNA, 19 nt, Artificial Sequence
  Description of Artificial Sequence: Synthetic oligonucleotide
ggaccccgcacccagggcu

SEQ ID NO: 1052339 - RNA, 19 nt, Artificial Sequence
  Description of Artificial Sequence: Synthetic oligonucleotide
uagccucgaagggccucug

SEQ ID NO: 1052340 - RNA, 19 nt, Artificial Sequence
  Description of Artificial Sequence: Synthetic oligonucleotide
ccacauucggugcauucaa

SEQ ID NO: 1052341 - RNA, 19 nt, Artificial Sequence
  Description of Artificial Sequence: Synthetic oligonucleotide
caauuccgggcuucaugcu

SEQ ID NO: 1052342 - RNA, 19 nt, Artificial Sequence
  Description of Artificial Sequence: Synthetic oligonucleotide
gggucagggacucuacgau

SEQ ID NO: 1052343 - RNA, 19 nt, Artificial Sequence
  Description of Artificial Sequence: Synthetic oligonucleotide
cugguggcgacuggccaca

SEQ ID NO: 1052344 - RNA, 19 nt, Artificial Sequence
  Description of Artificial Sequence: Synthetic oligonucleotide
gggacucuacgaugaccuc

SEQ ID NO: 1052345 - RNA, 19 nt, Artificial Sequence
  Description of Artificial Sequence: Synthetic oligonucleotide
augcaauuccgggcuucau

SEQ ID NO: 1052346 - RNA, 19 nt, Artificial Sequence
  Description of Artificial Sequence: Synthetic oligonucleotide
ccuucucagugaagcgcug

SEQ ID NO: 1052347 - RNA, 19 nt, Artificial Sequence
  Description of Artificial Sequence: Synthetic oligonucleotide
uuaugacaugugggacauu

SEQ ID NO: 1052348 - RNA, 19 nt, Artificial Sequence
  Description of Artificial Sequence: Synthetic oligonucleotide
gguggcgacuggccacaug

SEQ ID NO: 1052349 - RNA, 19 nt, Artificial Sequence
  Description of Artificial Sequence: Synthetic oligonucleotide
cuuuugacuuccgccuggu

SEQ ID NO: 1052350 - RNA, 19 nt, Artificial Sequence
  Description of Artificial Sequence: Synthetic oligonucleotide
cccacucguuacucucgcc

SEQ ID NO: 1052351 - RNA, 19 nt, Artificial Sequence
  Description of Artificial Sequence: Synthetic oligonucleotide
guucuguccuggacaggaa

SEQ ID NO: 1052352 - RNA, 19 nt, Artificial Sequence
  Description of Artificial Sequence: Synthetic oligonucleotide
ugcgcugccguggguugua

SEQ ID NO: 1052353 - RNA, 19 nt, Artificial Sequence
  Description of Artificial Sequence: Synthetic oligonucleotide
ccucugacggacaaggcuu

SEQ ID NO: 1052354 - RNA, 19 nt, Artificial Sequence
  Description of Artificial Sequence: Synthetic oligonucleotide
gcgguugugcuuguccaga

SEQ ID NO: 1052355 - RNA, 19 nt, Artificial Sequence
  Description of Artificial Sequence: Synthetic oligonucleotide
cguaugagucacaguccuc

SEQ ID NO: 1052356 - RNA, 19 nt, Artificial Sequence
  Description of Artificial Sequence: Synthetic oligonucleotide
agaccuguucugagcgguu

SEQ ID NO: 1052357 - RNA, 19 nt, Artificial Sequence
  Description of Artificial Sequence: Synthetic oligonucleotide
cuugggugcggaaggucuu

SEQ ID NO: 1052358 - RNA, 19 nt, Artificial Sequence
  Description of Artificial Sequence: Synthetic oligonucleotide
cuagccucgaagggccucu

SEQ ID NO: 1052359 - RNA, 19 nt, Artificial Sequence
  Description of Artificial Sequence: Synthetic oligonucleotide
ccaugugccuccgcaggug

SEQ ID NO: 1052360 - RNA, 19 nt, Artificial Sequence
  Description of Artificial Sequence: Synthetic oligonucleotide
cggagcaugugaagaccug

SEQ ID NO: 1052361 - RNA, 19 nt, Artificial Sequence
  Description of Artificial Sequence: Synthetic oligonucleotide
gcuccgcugccagggaccc

SEQ ID NO: 1052362 - RNA, 19 nt, Artificial Sequence
  Description of Artificial Sequence: Synthetic oligonucleotide
gccaggcuuagaguccuga

SEQ ID NO: 1052363 - RNA, 19 nt, Artificial Sequence
  Description of Artificial Sequence: Synthetic oligonucleotide
gggcaugcauggggcuugg

SEQ ID NO: 1052364 - RNA, 19 nt, Artificial Sequence
  Description of Artificial Sequence: Synthetic oligonucleotide
cguugcggcuugaggcccg

SEQ ID NO: 1052365 - RNA, 19 nt, Artificial Sequence
  Description of Artificial Sequence: Synthetic oligonucleotide
uucccuccgugggcuccgc

SEQ ID NO: 1052366 - RNA, 19 nt, Artificial Sequence
  Description of Artificial Sequence: Synthetic oligonucleotide
guggggcaugcauggggcu

SEQ ID NO: 1052367 - RNA, 19 nt, Artificial Sequence
  Description of Artificial Sequence: Synthetic oligonucleotide
cuccgugcagcuugaucau

SEQ ID NO: 1052368 - RNA, 19 nt, Artificial Sequence
  Description of Artificial Sequence: Synthetic oligonucleotide
ggccugcccuccugguggc

SEQ ID NO: 1052369 - RNA, 19 nt, Artificial Sequence
  Description of Artificial Sequence: Synthetic oligonucleotide
gcuugaggcccggugccca

SEQ ID NO: 1052370 - RNA, 19 nt, Artificial Sequence
  Description of Artificial Sequence: Synthetic oligonucleotide
ccgccuggucagcacaguc

SEQ ID NO: 1052371 - RNA, 19 nt, Artificial Sequence
  Description of Artificial Sequence: Synthetic oligonucleotide
acgugcacacguagcuguu

SEQ ID NO: 1052372 - RNA, 19 nt, Artificial Sequence
  Description of Artificial Sequence: Synthetic oligonucleotide
cugagcgguucaugcaauu

SEQ ID NO: 1052373 - RNA, 19 nt, Artificial Sequence
  Description of Artificial Sequence: Synthetic oligonucleotide
gcacacguggggcaugcau

SEQ ID NO: 1052374 - RNA, 19 nt, Artificial Sequence
  Description of Artificial Sequence: Synthetic oligonucleotide
ccguugcggcuugaggccc

SEQ ID NO: 1052375 - RNA, 19 nt, Artificial Sequence
  Description of Artificial Sequence: Synthetic oligonucleotide
cgcugcucgcagaacucac

SEQ ID NO: 1052376 - RNA, 19 nt, Artificial Sequence
  Description of Artificial Sequence: Synthetic oligonucleotide
cccgugugagacaccaugu

SEQ ID NO: 1052377 - RNA, 19 nt, Artificial Sequence
  Description of Artificial Sequence: Synthetic oligonucleotide
gcggcuggagugccaccac

SEQ ID NO: 1052378 - RNA, 19 nt, Artificial Sequence
  Description of Artificial Sequence: Synthetic oligonucleotide
caccuguuuauugguggau

SEQ ID NO: 1052379 - RNA, 19 nt, Artificial Sequence
  Description of Artificial Sequence: Synthetic oligonucleotide
cucuaucguggaucuccau

SEQ ID NO: 1052380 - RNA, 19 nt, Artificial Sequence
  Description of Artificial Sequence: Synthetic oligonucleotide
cccuugugucgucugacgu

SEQ ID NO: 1052381 - RNA, 19 nt, Artificial Sequence
  Description of Artificial Sequence: Synthetic oligonucleotide
ccacggugcuuaaaagccu

SEQ ID NO: 1052382 - RNA, 19 nt, Artificial Sequence
  Description of Artificial Sequence: Synthetic oligonucleotide
cucuagccucgaagggccu

SEQ ID NO: 1052383 - RNA, 19 nt, Artificial Sequence
  Description of Artificial Sequence: Synthetic oligonucleotide
gggucguaugagucacagu

SEQ ID NO: 1052384 - RNA, 19 nt, Artificial Sequence
  Description of Artificial Sequence: Synthetic oligonucleotide
gcgggcccuucucagugaa

SEQ ID NO: 1052385 - RNA, 19 nt, Artificial Sequence
  Description of Artificial Sequence: Synthetic oligonucleotide
ugguggcgacuggccacau

SEQ ID NO: 1052386 - RNA, 19 nt, Artificial Sequence
  Description of Artificial Sequence: Synthetic oligonucleotide
cucgggcucuccccgucgu

SEQ ID NO: 1052387 - RNA, 19 nt, Artificial Sequence
  Description of Artificial Sequence: Synthetic oligonucleotide
ccucacacccuugugucgu

SEQ ID NO: 1052388 - RNA, 19 nt, Artificial Sequence
  Description of Artificial Sequence: Synthetic oligonucleotide
cgugcacacguagcuguuc

SEQ ID NO: 1052389 - RNA, 19 nt, Artificial Sequence
  Description of Artificial Sequence: Synthetic oligonucleotide
cgcccugcaauggggcacc

SEQ ID NO: 1052390 - RNA, 19 nt, Artificial Sequence
  Description of Artificial Sequence: Synthetic oligonucleotide
gggccaggcuuagaguccu

SEQ ID NO: 1052391 - RNA, 19 nt, Artificial Sequence
  Description of Artificial Sequence: Synthetic oligonucleotide
ccucaaccuugaaccacua

SEQ ID NO: 1052392 - RNA, 19 nt, Artificial Sequence
  Description of Artificial Sequence: Synthetic oligonucleotide
ccugccgagugaacuugua

SEQ ID NO: 1052393 - RNA, 19 nt, Artificial Sequence
  Description of Artificial Sequence: Synthetic oligonucleotide
ccgcacagagucucuggcu

SEQ ID NO: 1052394 - RNA, 19 nt, Artificial Sequence
  Description of Artificial Sequence: Synthetic oligonucleotide
ccugcccuccugguggcga

SEQ ID NO: 1052395 - RNA, 19 nt, Artificial Sequence
  Description of Artificial Sequence: Synthetic oligonucleotide
gccugcccuccugguggcg

SEQ ID NO: 1052396 - RNA, 19 nt, Artificial Sequence
  Description of Artificial Sequence: Synthetic oligonucleotide
cucugaccugaucccuguu

SEQ ID NO: 1052397 - RNA, 19 nt, Artificial Sequence
  Description of Artificial Sequence: Synthetic oligonucleotide
cgggcccuucucagugaag

SEQ ID NO: 1052398 - RNA, 19 nt, Artificial Sequence
  Description of Artificial Sequence: Synthetic oligonucleotide
gccguggguuguaguuuuc

SEQ ID NO: 1052399 - RNA, 19 nt, Artificial Sequence
  Description of Artificial Sequence: Synthetic oligonucleotide
ccacucuaucguggaucuc

SEQ ID NO: 1052400 - RNA, 19 nt, Artificial Sequence
  Description of Artificial Sequence: Synthetic oligonucleotide
cgucugacgugcacacgua

SEQ ID NO: 1052401 - RNA, 19 nt, Artificial Sequence
  Description of Artificial Sequence: Synthetic oligonucleotide
gggcaccucuagccucgaa

SEQ ID NO: 1052402 - RNA, 19 nt, Artificial Sequence
  Description of Artificial Sequence: Synthetic oligonucleotide
gggugcgguugugcuuguc

SEQ ID NO: 1052403 - RNA, 19 nt, Artificial Sequence
  Description of Artificial Sequence: Synthetic oligonucleotide
cggugcccacacucuucac

SEQ ID NO: 1052404 - RNA, 19 nt, Artificial Sequence
  Description of Artificial Sequence: Synthetic oligonucleotide
ggcccggugcccacacucu

SEQ ID NO: 1052405 - RNA, 19 nt, Artificial Sequence
  Description of Artificial Sequence: Synthetic oligonucleotide
gcagaccguugcggcuuga

SEQ ID NO: 1052406 - RNA, 19 nt, Artificial Sequence
  Description of Artificial Sequence: Synthetic oligonucleotide
gcccggugcccacacucuu

SEQ ID NO: 1052407 - RNA, 19 nt, Artificial Sequence
  Description of Artificial Sequence: Synthetic oligonucleotide
cggugcuuaaaagccucgu

SEQ ID NO: 1052408 - RNA, 19 nt, Artificial Sequence
  Description of Artificial Sequence: Synthetic oligonucleotide
ccacuacuucccacucguu

SEQ ID NO: 1052409 - RNA, 19 nt, Artificial Sequence
  Description of Artificial Sequence: Synthetic oligonucleotide
ccccgguguguuuccuguu

SEQ ID NO: 1052410 - RNA, 19 nt, Artificial Sequence
  Description of Artificial Sequence: Synthetic oligonucleotide
gcccugcaauggggcaccu

SEQ ID NO: 1052411 - RNA, 19 nt, Artificial Sequence
  Description of Artificial Sequence: Synthetic oligonucleotide
ccccgucguccucaaccuu

SEQ ID NO: 1052412 - RNA, 19 nt, Artificial Sequence
  Description of Artificial Sequence: Synthetic oligonucleotide
uguuugugauccaagaggg

SEQ ID NO: 1052413 - RNA, 19 nt, Artificial Sequence
  Description of Artificial Sequence: Synthetic oligonucleotide
uuuccuaucugcuugaaca

SEQ ID NO: 1052414 - RNA, 19 nt, Artificial Sequence
  Description of Artificial Sequence: Synthetic oligonucleotide
ugcuuuauaacuaccaucu

SEQ ID NO: 1052415 - RNA, 19 nt, Artificial Sequence
  Description of Artificial Sequence: Synthetic oligonucleotide
aauuaacagggucaaguuc

SEQ ID NO: 1052416 - RNA, 19 nt, Artificial Sequence
  Description of Artificial Sequence: Synthetic oligonucleotide
uuaguaauggggauuaaga

SEQ ID NO: 1052417 - RNA, 19 nt, Artificial Sequence
  Description of Artificial Sequence: Synthetic oligonucleotide
aaugucacggaccucaccu

SEQ ID NO: 1052418 - RNA, 19 nt, Artificial Sequence
  Description of Artificial Sequence: Synthetic oligonucleotide
uuauucucguguuuguugg

SEQ ID NO: 1052419 - RNA, 19 nt, Artificial Sequence
  Description of Artificial Sequence: Synthetic oligonucleotide
uuuccuuccgacauggugc

SEQ ID NO: 1052420 - RNA, 19 nt, Artificial Sequence
  Description of Artificial Sequence: Synthetic oligonucleotide
uuaagucucaaacucuacc

SEQ ID NO: 1052421 - RNA, 19 nt, Artificial Sequence
  Description of Artificial Sequence: Synthetic oligonucleotide
uaaauuaacagggucaagu

SEQ ID NO: 1052422 - RNA, 19 nt, Artificial Sequence
  Description of Artificial Sequence: Synthetic oligonucleotide
gauagaaugggacuggauc

SEQ ID NO: 1052423 - RNA, 19 nt, Artificial Sequence
  Description of Artificial Sequence: Synthetic oligonucleotide
uauaacuaccaucugucca

SEQ ID NO: 1052424 - RNA, 19 nt, Artificial Sequence
  Description of Artificial Sequence: Synthetic oligonucleotide
aaaggcuuaacaucuggcu

SEQ ID NO: 1052425 - RNA, 19 nt, Artificial Sequence
  Description of Artificial Sequence: Synthetic oligonucleotide
gaugauaugagaagguccc

SEQ ID NO: 1052426 - RNA, 19 nt, Artificial Sequence
  Description of Artificial Sequence: Synthetic oligonucleotide
aguaauggggauuaagaca

SEQ ID NO: 1052427 - RNA, 19 nt, Artificial Sequence
  Description of Artificial Sequence: Synthetic oligonucleotide
auauaauggaugcuggucu

SEQ ID NO: 1052428 - RNA, 19 nt, Artificial Sequence
  Description of Artificial Sequence: Synthetic oligonucleotide
ucaucauuucugcagggcc

SEQ ID NO: 1052429 - RNA, 19 nt, Artificial Sequence
  Description of Artificial Sequence: Synthetic oligonucleotide
auuauucucguguuuguug

SEQ ID NO: 1052430 - RNA, 19 nt, Artificial Sequence
  Description of Artificial Sequence: Synthetic oligonucleotide
aagucugcguggcagggac

SEQ ID NO: 1052431 - RNA, 19 nt, Artificial Sequence
  Description of Artificial Sequence: Synthetic oligonucleotide
aaaggcucaacucccugag

SEQ ID NO: 1052432 - RNA, 19 nt, Artificial Sequence
  Description of Artificial Sequence: Synthetic oligonucleotide
uggggauuaagacauaaau

SEQ ID NO: 1052433 - RNA, 19 nt, Artificial Sequence
  Description of Artificial Sequence: Synthetic oligonucleotide
aaugggacuggaucacuuc

SEQ ID NO: 1052434 - RNA, 19 nt, Artificial Sequence
  Description of Artificial Sequence: Synthetic oligonucleotide
cuugacuccgccaagggug

SEQ ID NO: 1052435 - RNA, 19 nt, Artificial Sequence
  Description of Artificial Sequence: Synthetic oligonucleotide
ucccauguccgacauaucc

SEQ ID NO: 1052436 - RNA, 19 nt, Artificial Sequence
  Description of Artificial Sequence: Synthetic oligonucleotide
ugagaaggucccauguccg

SEQ ID NO: 1052437 - RNA, 19 nt, Artificial Sequence
  Description of Artificial Sequence: Synthetic oligonucleotide
cuucgaaaggcucaacucc

SEQ ID NO: 1052438 - RNA, 19 nt, Artificial Sequence
  Description of Artificial Sequence: Synthetic oligonucleotide
aaauuaacagggucaaguu

SEQ ID NO: 1052439 - RNA, 19 nt, Artificial Sequence
  Description of Artificial Sequence: Synthetic oligonucleotide
gggauuaagacauaaauaa

SEQ ID NO: 1052440 - RNA, 19 nt, Artificial Sequence
  Description of Artificial Sequence: Synthetic oligonucleotide
agaaggcacguccacuucc

SEQ ID NO: 1052441 - RNA, 19 nt, Artificial Sequence
  Description of Artificial Sequence: Synthetic oligonucleotide
ucacuuuuacagaaggcac

SEQ ID NO: 1052442 - RNA, 19 nt, Artificial Sequence
  Description of Artificial Sequence: Synthetic oligonucleotide
uaguaauggggauuaagac

SEQ ID NO: 1052443 - RNA, 19 nt, Artificial Sequence
  Description of Artificial Sequence: Synthetic oligonucleotide
uucgaaaggcucaacuccc

SEQ ID NO: 1052444 - RNA, 19 nt, Artificial Sequence
  Description of Artificial Sequence: Synthetic oligonucleotide
gaggauguaucuuccauac

SEQ ID NO: 1052445 - RNA, 19 nt, Artificial Sequence
  Description of Artificial Sequence: Synthetic oligonucleotide
aagccugucccauccuacc

SEQ ID NO: 1052446 - RNA, 19 nt, Artificial Sequence
  Description of Artificial Sequence: Synthetic oligonucleotide
agcuguaccggcauguucc

SEQ ID NO: 1052447 - RNA, 19 nt, Artificial Sequence
  Description of Artificial Sequence: Synthetic oligonucleotide
gaggguaucaggcagcuga

SEQ ID NO: 1052448 - RNA, 19 nt, Artificial Sequence
  Description of Artificial Sequence: Synthetic oligonucleotide
cacuuuuacagaaggcacg

SEQ ID NO: 1052449 - RNA, 19 nt, Artificial Sequence
  Description of Artificial Sequence: Synthetic oligonucleotide
aagucucaaacucuacccu

SEQ ID NO: 1052450 - RNA, 19 nt, Artificial Sequence
  Description of Artificial Sequence: Synthetic oligonucleotide
ucagccaagguacaagcgu

SEQ ID NO: 1052451 - RNA, 19 nt, Artificial Sequence
  Description of Artificial Sequence: Synthetic oligonucleotide
aaaguuuagaguaguuugu

SEQ ID NO: 1052452 - RNA, 19 nt, Artificial Sequence
  Description of Artificial Sequence: Synthetic oligonucleotide
ugauguugaugauaugaga

SEQ ID NO: 1052453 - RNA, 19 nt, Artificial Sequence
  Description of Artificial Sequence: Synthetic oligonucleotide
cucgaagauagaaugggac

SEQ ID NO: 1052454 - RNA, 19 nt, Artificial Sequence
  Description of Artificial Sequence: Synthetic oligonucleotide
cuauccauguagcccaugg

SEQ ID NO: 1052455 - RNA, 19 nt, Artificial Sequence
  Description of Artificial Sequence: Synthetic oligonucleotide
gauaugagaaggucccaug

SEQ ID NO: 1052456 - RNA, 19 nt, Artificial Sequence
  Description of Artificial Sequence: Synthetic oligonucleotide
gaagauagaaugggacugg

SEQ ID NO: 1052457 - RNA, 19 nt, Artificial Sequence
  Description of Artificial Sequence: Synthetic oligonucleotide
acauacaaguuugugcuuc

SEQ ID NO: 1052458 - RNA, 19 nt, Artificial Sequence
  Description of Artificial Sequence: Synthetic oligonucleotide
ucuacccuuauucuuuccu

SEQ ID NO: 1052459 - RNA, 19 nt, Artificial Sequence
  Description of Artificial Sequence: Synthetic oligonucleotide
uccugcuuuauaacuacca

SEQ ID NO: 1052460 - RNA, 19 nt, Artificial Sequence
  Description of Artificial Sequence: Synthetic oligonucleotide
uaccaucuguccauccucg

SEQ ID NO: 1052461 - RNA, 19 nt, Artificial Sequence
  Description of Artificial Sequence: Synthetic oligonucleotide
uugugcaaggaauucccag

SEQ ID NO: 1052462 - RNA, 19 nt, Artificial Sequence
  Description of Artificial Sequence: Synthetic oligonucleotide
ugucuugauaggcuugaug

SEQ ID NO: 1052463 - RNA, 19 nt, Artificial Sequence
  Description of Artificial Sequence: Synthetic oligonucleotide
auaugagaaggucccaugu

SEQ ID NO: 1052464 - RNA, 19 nt, Artificial Sequence
  Description of Artificial Sequence: Synthetic oligonucleotide
ucuguuuauuucaccggug

SEQ ID NO: 1052465 - RNA, 19 nt, Artificial Sequence
  Description of Artificial Sequence: Synthetic oligonucleotide
ugccaaacgggcuucccgg

SEQ ID NO: 1052466 - RNA, 19 nt, Artificial Sequence
  Description of Artificial Sequence: Synthetic oligonucleotide
uacaaguuugugcuucaca

SEQ ID NO: 1052467 - RNA, 19 nt, Artificial Sequence
  Description of Artificial Sequence: Synthetic oligonucleotide
aucuguuuauuucaccggu

SEQ ID NO: 1052468 - RNA, 19 nt, Artificial Sequence
  Description of Artificial Sequence: Synthetic oligonucleotide
gagaccaggagucuuccug

SEQ ID NO: 1052469 - RNA, 19 nt, Artificial Sequence
  Description of Artificial Sequence: Synthetic oligonucleotide
ucucguguuuguuggauga

SEQ ID NO: 1052470 - RNA, 19 nt, Artificial Sequence
  Description of Artificial Sequence: Synthetic oligonucleotide
auacgcaggaucugcuugg

SEQ ID NO: 1052471 - RNA, 19 nt, Artificial Sequence
  Description of Artificial Sequence: Synthetic oligonucleotide
uucuugacuccgccaaggg

SEQ ID NO: 1052472 - RNA, 19 nt, Artificial Sequence
  Description of Artificial Sequence: Synthetic oligonucleotide
guagguauuauucucgugu

SEQ ID NO: 1052473 - RNA, 19 nt, Artificial Sequence
  Description of Artificial Sequence: Synthetic oligonucleotide
ucaccgguguuugugaucc

SEQ ID NO: 1052474 - RNA, 19 nt, Artificial Sequence
  Description of Artificial Sequence: Synthetic oligonucleotide
uguaccggcauguuccgug

SEQ ID NO: 1052475 - RNA, 19 nt, Artificial Sequence
  Description of Artificial Sequence: Synthetic oligonucleotide
uauuucaccgguguuugug

SEQ ID NO: 1052476 - RNA, 19 nt, Artificial Sequence
  Description of Artificial Sequence: Synthetic oligonucleotide
auaggcuugauguccugag

SEQ ID NO: 1052477 - RNA, 19 nt, Artificial Sequence
  Description of Artificial Sequence: Synthetic oligonucleotide
aaggcucaacucccugagc

SEQ ID NO: 1052478 - RNA, 19 nt, Artificial Sequence
  Description of Artificial Sequence: Synthetic oligonucleotide
ucuuugaucuuccgacuga

SEQ ID NO: 1052479 - RNA, 19 nt, Artificial Sequence
  Description of Artificial Sequence: Synthetic oligonucleotide
aauaugaggcucagaaagu

SEQ ID NO: 1052480 - RNA, 19 nt, Artificial Sequence
  Description of Artificial Sequence: Synthetic oligonucleotide
uuaacaucuggcucuucac

SEQ ID NO: 1052481 - RNA, 19 nt, Artificial Sequence
  Description of Artificial Sequence: Synthetic oligonucleotide
guuaguaauggggauuaag

SEQ ID NO: 1052482 - RNA, 19 nt, Artificial Sequence
  Description of Artificial Sequence: Synthetic oligonucleotide
cagcuugcccacuugaccc

SEQ ID NO: 1052483 - RNA, 19 nt, Artificial Sequence
  Description of Artificial Sequence: Synthetic oligonucleotide
aggagaacauacaaguuug

SEQ ID NO: 1052484 - RNA, 19 nt, Artificial Sequence
  Description of Artificial Sequence: Synthetic oligonucleotide
gguacaagcguucucugcc

SEQ ID NO: 1052485 - RNA, 19 nt, Artificial Sequence
  Description of Artificial Sequence: Synthetic oligonucleotide
uuaacagggucaaguuccc

SEQ ID NO: 1052486 - RNA, 19 nt, Artificial Sequence
  Description of Artificial Sequence: Synthetic oligonucleotide
uaugagaaggucccauguc

SEQ ID NO: 1052487 - RNA, 19 nt, Artificial Sequence
  Description of Artificial Sequence: Synthetic oligonucleotide
uccgccaagggugaggucc

SEQ ID NO: 1052488 - RNA, 19 nt, Artificial Sequence
  Description of Artificial Sequence: Synthetic oligonucleotide
aagcguucucugccaaacg

SEQ ID NO: 1052489 - RNA, 19 nt, Artificial Sequence
  Description of Artificial Sequence: Synthetic oligonucleotide
acgcuggcggucucuaucc

SEQ ID NO: 1052490 - RNA, 19 nt, Artificial Sequence
  Description of Artificial Sequence: Synthetic oligonucleotide
uccacgccgaaugucacgg

SEQ ID NO: 1052491 - RNA, 19 nt, Artificial Sequence
  Description of Artificial Sequence: Synthetic oligonucleotide
ugggacugagucuuaaguc

SEQ ID NO: 1052492 - RNA, 19 nt, Artificial Sequence
  Description of Artificial Sequence: Synthetic oligonucleotide
uccauuugauccucacacc

SEQ ID NO: 1052493 - RNA, 19 nt, Artificial Sequence
  Description of Artificial Sequence: Synthetic oligonucleotide
aggcucaacucccugagca

SEQ ID NO: 1052494 - RNA, 19 nt, Artificial Sequence
  Description of Artificial Sequence: Synthetic oligonucleotide
gaucuuccgacugaugaug

SEQ ID NO: 1052495 - RNA, 19 nt, Artificial Sequence
  Description of Artificial Sequence: Synthetic oligonucleotide
uugauaggcuugauguccu

SEQ ID NO: 1052496 - RNA, 19 nt, Artificial Sequence
  Description of Artificial Sequence: Synthetic oligonucleotide
uccuccaucuguuuauuuc

SEQ ID NO: 1052497 - RNA, 19 nt, Artificial Sequence
  Description of Artificial Sequence: Synthetic oligonucleotide
uugaugauaugagaagguc

SEQ ID NO: 1052498 - RNA, 19 nt, Artificial Sequence
  Description of Artificial Sequence: Synthetic oligonucleotide
agguuguucccauggucac

SEQ ID NO: 1052499 - RNA, 19 nt, Artificial Sequence
  Description of Artificial Sequence: Synthetic oligonucleotide
cugcucgaagauagaaugg

SEQ ID NO: 1052500 - RNA, 19 nt, Artificial Sequence
  Description of Artificial Sequence: Synthetic oligonucleotide
uuuggggugaagguuuucu

SEQ ID NO: 1052501 - RNA, 19 nt, Artificial Sequence
  Description of Artificial Sequence: Synthetic oligonucleotide
agcgaauggagggaaggcg

SEQ ID NO: 1052502 - RNA, 19 nt, Artificial Sequence
  Description of Artificial Sequence: Synthetic oligonucleotide
cuuaagucucaaacucuac

SEQ ID NO: 1052503 - RNA, 19 nt, Artificial Sequence
  Description of Artificial Sequence: Synthetic oligonucleotide
cuuuauaacuaccaucugu

SEQ ID NO: 1052504 - RNA, 19 nt, Artificial Sequence
  Description of Artificial Sequence: Synthetic oligonucleotide
agagaaggggucgcggccc

SEQ ID NO: 1052505 - RNA, 19 nt, Artificial Sequence
  Description of Artificial Sequence: Synthetic oligonucleotide
gacacgacccgccaccggc

SEQ ID NO: 1052506 - RNA, 19 nt, Artificial Sequence
  Description of Artificial Sequence: Synthetic oligonucleotide
cauacgcaggaucugcuug

SEQ ID NO: 1052507 - RNA, 19 nt, Artificial Sequence
  Description of Artificial Sequence: Synthetic oligonucleotide
agaaaguuuagaguaguuu

SEQ ID NO: 1052508 - RNA, 19 nt, Artificial Sequence
  Description of Artificial Sequence: Synthetic oligonucleotide
aagagggauucaaaaucag

SEQ ID NO: 1052509 - RNA, 19 nt, Artificial Sequence
  Description of Artificial Sequence: Synthetic oligonucleotide
uuccuaucugcuugaacac

SEQ ID NO: 1052510 - RNA, 19 nt, Artificial Sequence
  Description of Artificial Sequence: Synthetic oligonucleotide
uucaucauuucugcagggc

SEQ ID NO: 1052511 - RNA, 19 nt, Artificial Sequence
  Description of Artificial Sequence: Synthetic oligonucleotide
uuugaucuuccgacugaug

SEQ ID NO: 1052512 - RNA, 19 nt, Artificial Sequence
  Description of Artificial Sequence: Synthetic oligonucleotide
auuucaccgguguuuguga

SEQ ID NO: 1052513 - RNA, 19 nt, Artificial Sequence
  Description of Artificial Sequence: Synthetic oligonucleotide
ucuugacuccgccaagggu

SEQ ID NO: 1052514 - RNA, 19 nt, Artificial Sequence
  Description of Artificial Sequence: Synthetic oligonucleotide
ugugauccaagagggauuc

SEQ ID NO: 1052515 - RNA, 19 nt, Artificial Sequence
  Description of Artificial Sequence: Synthetic oligonucleotide
gaaaggcucaacucccuga

SEQ ID NO: 1052516 - RNA, 19 nt, Artificial Sequence
  Description of Artificial Sequence: Synthetic oligonucleotide
aucacuucugggcggccac

SEQ ID NO: 1052517 - RNA, 19 nt, Artificial Sequence
  Description of Artificial Sequence: Synthetic oligonucleotide
acucuacccuuauucuuuc

SEQ ID NO: 1052518 - RNA, 19 nt, Artificial Sequence
  Description of Artificial Sequence: Synthetic oligonucleotide
gacacauccuuugggagac

SEQ ID NO: 1052519 - RNA, 19 nt, Artificial Sequence
  Description of Artificial Sequence: Synthetic oligonucleotide
aacucuacccuuauucuuu

SEQ ID NO: 1052520 - RNA, 19 nt, Artificial Sequence
  Description of Artificial Sequence: Synthetic oligonucleotide
guaauggggauuaagacau

SEQ ID NO: 1052521 - RNA, 19 nt, Artificial Sequence
  Description of Artificial Sequence: Synthetic oligonucleotide
aacaagaagccugucccau

SEQ ID NO: 1052522 - RNA, 19 nt, Artificial Sequence
  Description of Artificial Sequence: Synthetic oligonucleotide
guaccuuccccgauuuucg

SEQ ID NO: 1052523 - RNA, 19 nt, Artificial Sequence
  Description of Artificial Sequence: Synthetic oligonucleotide
cagacggaagucugcgugg

SEQ ID NO: 1052524 - RNA, 19 nt, Artificial Sequence
  Description of Artificial Sequence: Synthetic oligonucleotide
ugaucuuccgacugaugau

SEQ ID NO: 1052525 - RNA, 19 nt, Artificial Sequence
  Description of Artificial Sequence: Synthetic oligonucleotide
augggacuggaucacuucu

SEQ ID NO: 1052526 - RNA, 19 nt, Artificial Sequence
  Description of Artificial Sequence: Synthetic oligonucleotide
aacauacaaguuugugcuu

SEQ ID NO: 1052527 - RNA, 19 nt, Artificial Sequence
  Description of Artificial Sequence: Synthetic oligonucleotide
aagauagaaugggacugga

SEQ ID NO: 1052528 - RNA, 19 nt, Artificial Sequence
  Description of Artificial Sequence: Synthetic oligonucleotide
uagguauuauucucguguu

SEQ ID NO: 1052529 - RNA, 19 nt, Artificial Sequence
  Description of Artificial Sequence: Synthetic oligonucleotide
ugauaugagaaggucccau

SEQ ID NO: 1052530 - RNA, 19 nt, Artificial Sequence
  Description of Artificial Sequence: Synthetic oligonucleotide
uccuaccuugggaggaugc

SEQ ID NO: 1052531 - RNA, 19 nt, Artificial Sequence
  Description of Artificial Sequence: Synthetic oligonucleotide
agguagguauuauucucgu

SEQ ID NO: 1052532 - RNA, 19 nt, Artificial Sequence
  Description of Artificial Sequence: Synthetic oligonucleotide
cuuccuuagggccagccga

SEQ ID NO: 1052533 - RNA, 19 nt, Artificial Sequence
  Description of Artificial Sequence: Synthetic oligonucleotide
aauucccagcuacaauauu

SEQ ID NO: 1052534 - RNA, 19 nt, Artificial Sequence
  Description of Artificial Sequence: Synthetic oligonucleotide
uuccccgauuuucggauga

SEQ ID NO: 1052535 - RNA, 19 nt, Artificial Sequence
  Description of Artificial Sequence: Synthetic oligonucleotide
agacggaagucugcguggc

SEQ ID NO: 1052536 - RNA, 19 nt, Artificial Sequence
  Description of Artificial Sequence: Synthetic oligonucleotide
gcaaggaauucccagcuac

SEQ ID NO: 1052537 - RNA, 19 nt, Artificial Sequence
  Description of Artificial Sequence: Synthetic oligonucleotide
uugugauccaagagggauu

SEQ ID NO: 1052538 - RNA, 19 nt, Artificial Sequence
  Description of Artificial Sequence: Synthetic oligonucleotide
uaccuuccccgauuuucgg

SEQ ID NO: 1052539 - RNA, 19 nt, Artificial Sequence
  Description of Artificial Sequence: Synthetic oligonucleotide
agucucaaacucuacccuu

SEQ ID NO: 1052540 - RNA, 19 nt, Artificial Sequence
  Description of Artificial Sequence: Synthetic oligonucleotide
cuggcggucucuaucccgc

SEQ ID NO: 1052541 - RNA, 19 nt, Artificial Sequence
  Description of Artificial Sequence: Synthetic oligonucleotide
ugagugagccaguggcagc

SEQ ID NO: 1052542 - RNA, 19 nt, Artificial Sequence
  Description of Artificial Sequence: Synthetic oligonucleotide
cuaccaucuguccauccuc

SEQ ID NO: 1052543 - RNA, 19 nt, Artificial Sequence
  Description of Artificial Sequence: Synthetic oligonucleotide
ggucagccaagguacaagc

SEQ ID NO: 1052544 - RNA, 19 nt, Artificial Sequence
  Description of Artificial Sequence: Synthetic oligonucleotide
augucacggaccucaccuc

SEQ ID NO: 1052545 - RNA, 19 nt, Artificial Sequence
  Description of Artificial Sequence: Synthetic oligonucleotide
uauucucguguuuguugga

SEQ ID NO: 1052546 - RNA, 19 nt, Artificial Sequence
  Description of Artificial Sequence: Synthetic oligonucleotide
gugggaaggucgucguggg

SEQ ID NO: 1052547 - RNA, 19 nt, Artificial Sequence
  Description of Artificial Sequence: Synthetic oligonucleotide
ucgaaaggcucaacucccu

SEQ ID NO: 1052548 - RNA, 19 nt, Artificial Sequence
  Description of Artificial Sequence: Synthetic oligonucleotide
ugcagggcccugcucgaag

SEQ ID NO: 1052549 - RNA, 19 nt, Artificial Sequence
  Description of Artificial Sequence: Synthetic oligonucleotide
uccgugugucauucuuuag

SEQ ID NO: 1052550 - RNA, 19 nt, Artificial Sequence
  Description of Artificial Sequence: Synthetic oligonucleotide
auggagggaaggcggcccg

SEQ ID NO: 1052551 - RNA, 19 nt, Artificial Sequence
  Description of Artificial Sequence: Synthetic oligonucleotide
agccagacggaagucugcg

SEQ ID NO: 1052552 - RNA, 19 nt, Artificial Sequence
  Description of Artificial Sequence: Synthetic oligonucleotide
gucugcguggcagggaccg

SEQ ID NO: 1052553 - RNA, 19 nt, Artificial Sequence
  Description of Artificial Sequence: Synthetic oligonucleotide
aaggcggcccggaguaagc

SEQ ID NO: 1052554 - RNA, 19 nt, Artificial Sequence
  Description of Artificial Sequence: Synthetic oligonucleotide
aagcuccacgccgaauguc

SEQ ID NO: 1052555 - RNA, 19 nt, Artificial Sequence
  Description of Artificial Sequence: Synthetic oligonucleotide
acgccgaaugucacggacc

SEQ ID NO: 1052556 - RNA, 19 nt, Artificial Sequence
  Description of Artificial Sequence: Synthetic oligonucleotide
cagggucaaguucccagcc

SEQ ID NO: 1052557 - RNA, 19 nt, Artificial Sequence
  Description of Artificial Sequence: Synthetic oligonucleotide
auaauggaugcuggucuug

SEQ ID NO: 1052558 - RNA, 19 nt, Artificial Sequence
  Description of Artificial Sequence: Synthetic oligonucleotide
cauguuccgugugucauuc

SEQ ID NO: 1052559 - RNA, 19 nt, Artificial Sequence
  Description of Artificial Sequence: Synthetic oligonucleotide
uuccuuagggccagccgaa

SEQ ID NO: 1052560 - RNA, 19 nt, Artificial Sequence
  Description of Artificial Sequence: Synthetic oligonucleotide
ggagcgaauggagggaagg

SEQ ID NO: 1052561 - RNA, 19 nt, Artificial Sequence
  Description of Artificial Sequence: Synthetic oligonucleotide
uacaagcguucucugccaa

SEQ ID NO: 1052562 - RNA, 19 nt, Artificial Sequence
  Description of Artificial Sequence: Synthetic oligonucleotide
uccuaucugcuugaacacu

SEQ ID NO: 1052563 - RNA, 19 nt, Artificial Sequence
  Description of Artificial Sequence: Synthetic oligonucleotide
gaccucaccuccgacacga

SEQ ID NO: 1052564 - RNA, 19 nt, Artificial Sequence
  Description of Artificial Sequence: Synthetic oligonucleotide
caaacucuacccuuauucu

SEQ ID NO: 1052565 - RNA, 19 nt, Artificial Sequence
  Description of Artificial Sequence: Synthetic oligonucleotide
gagcgaauggagggaaggc

SEQ ID NO: 1052566 - RNA, 19 nt, Artificial Sequence
  Description of Artificial Sequence: Synthetic oligonucleotide
uuguuggaugaggaauaug

SEQ ID NO: 1052567 - RNA, 19 nt, Artificial Sequence
  Description of Artificial Sequence: Synthetic oligonucleotide
cauacaaguuugugcuuca

SEQ ID NO: 1052568 - RNA, 19 nt, Artificial Sequence
  Description of Artificial Sequence: Synthetic oligonucleotide
gcgaauggagggaaggcgg

SEQ ID NO: 1052569 - RNA, 19 nt, Artificial Sequence
  Description of Artificial Sequence: Synthetic oligonucleotide
acggaccucaccuccgaca

SEQ ID NO: 1052570 - RNA, 19 nt, Artificial Sequence
  Description of Artificial Sequence: Synthetic oligonucleotide
uuucaccgguguuugugau

SEQ ID NO: 1052571 - RNA, 19 nt, Artificial Sequence
  Description of Artificial Sequence: Synthetic oligonucleotide
gaaggcggcccggaguaag

SEQ ID NO: 1052572 - RNA, 19 nt, Artificial Sequence
  Description of Artificial Sequence: Synthetic oligonucleotide
cagcauacgcaggaucugc

SEQ ID NO: 1052573 - RNA, 19 nt, Artificial Sequence
  Description of Artificial Sequence: Synthetic oligonucleotide
caaggaauucccagcuaca

SEQ ID NO: 1052574 - RNA, 19 nt, Artificial Sequence
  Description of Artificial Sequence: Synthetic oligonucleotide
cacgccgaaugucacggac

SEQ ID NO: 1052575 - RNA, 19 nt, Artificial Sequence
  Description of Artificial Sequence: Synthetic oligonucleotide
agagcagguuguucccaug

SEQ ID NO: 1052576 - RNA, 19 nt, Artificial Sequence
  Description of Artificial Sequence: Synthetic oligonucleotide
cuccacgccgaaugucacg

SEQ ID NO: 1052577 - RNA, 19 nt, Artificial Sequence
  Description of Artificial Sequence: Synthetic oligonucleotide
gguagguauuauucucgug

SEQ ID NO: 1052578 - RNA, 19 nt, Artificial Sequence
  Description of Artificial Sequence: Synthetic oligonucleotide
uucaccgguguuugugauc

SEQ ID NO: 1052579 - RNA, 19 nt, Artificial Sequence
  Description of Artificial Sequence: Synthetic oligonucleotide
aggauguaucuuccauacu

SEQ ID NO: 1052580 - RNA, 19 nt, Artificial Sequence
  Description of Artificial Sequence: Synthetic oligonucleotide
agcagguuguucccauggu

SEQ ID NO: 1052581 - RNA, 19 nt, Artificial Sequence
  Description of Artificial Sequence: Synthetic oligonucleotide
agguauuauucucguguuu

SEQ ID NO: 1052582 - RNA, 19 nt, Artificial Sequence
  Description of Artificial Sequence: Synthetic oligonucleotide
ucacggaccucaccuccga

SEQ ID NO: 1052583 - RNA, 19 nt, Artificial Sequence
  Description of Artificial Sequence: Synthetic oligonucleotide
cucuacccuuauucuuucc

SEQ ID NO: 1052584 - RNA, 19 nt, Artificial Sequence
  Description of Artificial Sequence: Synthetic oligonucleotide
gucgugggcagucaccguc

SEQ ID NO: 1052585 - RNA, 19 nt, Artificial Sequence
  Description of Artificial Sequence: Synthetic oligonucleotide
acccugagugagccagugg

SEQ ID NO: 1052586 - RNA, 19 nt, Artificial Sequence
  Description of Artificial Sequence: Synthetic oligonucleotide
ggaggaugcaguuaguaau

SEQ ID NO: 1052587 - RNA, 19 nt, Artificial Sequence
  Description of Artificial Sequence: Synthetic oligonucleotide
guacaagcguucucugcca

SEQ ID NO: 1052588 - RNA, 19 nt, Artificial Sequence
  Description of Artificial Sequence: Synthetic oligonucleotide
gacuccgccaagggugagg

SEQ ID NO: 1052589 - RNA, 19 nt, Artificial Sequence
  Description of Artificial Sequence: Synthetic oligonucleotide
ccgauuuucggaugagcag

SEQ ID NO: 1052590 - RNA, 19 nt, Artificial Sequence
  Description of Artificial Sequence: Synthetic oligonucleotide
accggcauguuccgugugu

SEQ ID NO: 1052591 - RNA, 19 nt, Artificial Sequence
  Description of Artificial Sequence: Synthetic oligonucleotide
accuuccccgauuuucgga

SEQ ID NO: 1052592 - RNA, 19 nt, Artificial Sequence
  Description of Artificial Sequence: Synthetic oligonucleotide
guauuauucucguguuugu

SEQ ID NO: 1052593 - RNA, 19 nt, Artificial Sequence
  Description of Artificial Sequence: Synthetic oligonucleotide
ucuaucccgcucacgcuuu

SEQ ID NO: 1052594 - RNA, 19 nt, Artificial Sequence
  Description of Artificial Sequence: Synthetic oligonucleotide
gcacugaggauguaucuuc

SEQ ID NO: 1052595 - RNA, 19 nt, Artificial Sequence
  Description of Artificial Sequence: Synthetic oligonucleotide
cgauuuucggaugagcagc

SEQ ID NO: 1052596 - RNA, 19 nt, Artificial Sequence
  Description of Artificial Sequence: Synthetic oligonucleotide
caggagaacauacaaguuu

SEQ ID NO: 1052597 - RNA, 19 nt, Artificial Sequence
  Description of Artificial Sequence: Synthetic oligonucleotide
uuuagcccugggucaucga

SEQ ID NO: 1052598 - RNA, 19 nt, Artificial Sequence
  Description of Artificial Sequence: Synthetic oligonucleotide
ggggauuaagacauaaaua

SEQ ID NO: 1052599 - RNA, 19 nt, Artificial Sequence
  Description of Artificial Sequence: Synthetic oligonucleotide
cgaagauagaaugggacug

SEQ ID NO: 1052600 - RNA, 19 nt, Artificial Sequence
  Description of Artificial Sequence: Synthetic oligonucleotide
gauguuuggggugaagguu

SEQ ID NO: 1052601 - RNA, 19 nt, Artificial Sequence
  Description of Artificial Sequence: Synthetic oligonucleotide
gguuccccaacaagaagcc

SEQ ID NO: 1052602 - RNA, 19 nt, Artificial Sequence
  Description of Artificial Sequence: Synthetic oligonucleotide
ccagacggaagucugcgug

SEQ ID NO: 1052603 - RNA, 19 nt, Artificial Sequence
  Description of Artificial Sequence: Synthetic oligonucleotide
cuacccuuauucuuuccua

SEQ ID NO: 1052604 - RNA, 19 nt, Artificial Sequence
  Description of Artificial Sequence: Synthetic oligonucleotide
ugacccucacgcuggcggu

SEQ ID NO: 1052605 - RNA, 19 nt, Artificial Sequence
  Description of Artificial Sequence: Synthetic oligonucleotide
agcacugaggauguaucuu

SEQ ID NO: 1052606 - RNA, 19 nt, Artificial Sequence
  Description of Artificial Sequence: Synthetic oligonucleotide
cccgggagcgaauggaggg

SEQ ID NO: 1052607 - RNA, 19 nt, Artificial Sequence
  Description of Artificial Sequence: Synthetic oligonucleotide
gucacggaccucaccuccg

SEQ ID NO: 1052608 - RNA, 19 nt, Artificial Sequence
  Description of Artificial Sequence: Synthetic oligonucleotide
agcuugcccacuugacccu

SEQ ID NO: 1052609 - RNA, 19 nt, Artificial Sequence
  Description of Artificial Sequence: Synthetic oligonucleotide
ggcucagaaaguuuagagu

SEQ ID NO: 1052610 - RNA, 19 nt, Artificial Sequence
  Description of Artificial Sequence: Synthetic oligonucleotide
cuuccccgauuuucggaug

SEQ ID NO: 1052611 - RNA, 19 nt, Artificial Sequence
  Description of Artificial Sequence: Synthetic oligonucleotide
acuccgccaagggugaggu

SEQ ID NO: 1052612 - RNA, 19 nt, Artificial Sequence
  Description of Artificial Sequence: Synthetic oligonucleotide
ggaagucugcguggcaggg

SEQ ID NO: 1052613 - RNA, 19 nt, Artificial Sequence
  Description of Artificial Sequence: Synthetic oligonucleotide
caguuaguaauggggauua

SEQ ID NO: 1052614 - RNA, 19 nt, Artificial Sequence
  Description of Artificial Sequence: Synthetic oligonucleotide
aaggcacguccacuuccau

SEQ ID NO: 1052615 - RNA, 19 nt, Artificial Sequence
  Description of Artificial Sequence: Synthetic oligonucleotide
cccgauuuucggaugagca

SEQ ID NO: 1052616 - RNA, 19 nt, Artificial Sequence
  Description of Artificial Sequence: Synthetic oligonucleotide
gggcccugcucgaagauag

SEQ ID NO: 1052617 - RNA, 19 nt, Artificial Sequence
  Description of Artificial Sequence: Synthetic oligonucleotide
uaacuaccaucuguccauc

SEQ ID NO: 1052618 - RNA, 19 nt, Artificial Sequence
  Description of Artificial Sequence: Synthetic oligonucleotide
gcuguaccggcauguuccg

SEQ ID NO: 1052619 - RNA, 19 nt, Artificial Sequence
  Description of Artificial Sequence: Synthetic oligonucleotide
ggagcuguaccuuccccga

SEQ ID NO: 1052620 - RNA, 19 nt, Artificial Sequence
  Description of Artificial Sequence: Synthetic oligonucleotide
uaccggcauguuccgugug

SEQ ID NO: 1052621 - RNA, 19 nt, Artificial Sequence
  Description of Artificial Sequence: Synthetic oligonucleotide
gugaacugggacugagucu

SEQ ID NO: 1052622 - RNA, 19 nt, Artificial Sequence
  Description of Artificial Sequence: Synthetic oligonucleotide
agcauacgcaggaucugcu

SEQ ID NO: 1052623 - RNA, 19 nt, Artificial Sequence
  Description of Artificial Sequence: Synthetic oligonucleotide
ucuuuccuaucugcuugaa

SEQ ID NO: 1052624 - RNA, 19 nt, Artificial Sequence
  Description of Artificial Sequence: Synthetic oligonucleotide
gaggucccgggagcgaaug

SEQ ID NO: 1052625 - RNA, 19 nt, Artificial Sequence
  Description of Artificial Sequence: Synthetic oligonucleotide
uccccgauuuucggaugag

SEQ ID NO: 1052626 - RNA, 19 nt, Artificial Sequence
  Description of Artificial Sequence: Synthetic oligonucleotide
acacauccuuugggagacc

SEQ ID NO: 1052627 - RNA, 19 nt, Artificial Sequence
  Description of Artificial Sequence: Synthetic oligonucleotide
gucccgggagcgaauggag

SEQ ID NO: 1052628 - RNA, 19 nt, Artificial Sequence
  Description of Artificial Sequence: Synthetic oligonucleotide
auggggauuaagacauaaa

SEQ ID NO: 1052629 - RNA, 19 nt, Artificial Sequence
  Description of Artificial Sequence: Synthetic oligonucleotide
gcucaacucccugagcagc

SEQ ID NO: 1052630 - RNA, 19 nt, Artificial Sequence
  Description of Artificial Sequence: Synthetic oligonucleotide
caucgaugaaaucauccuu

SEQ ID NO: 1052631 - RNA, 19 nt, Artificial Sequence
  Description of Artificial Sequence: Synthetic oligonucleotide
uccuauccauguagcccau

SEQ ID NO: 1052632 - RNA, 19 nt, Artificial Sequence
  Description of Artificial Sequence: Synthetic oligonucleotide
cacauccuuugggagacca

SEQ ID NO: 1052633 - RNA, 19 nt, Artificial Sequence
  Description of Artificial Sequence: Synthetic oligonucleotide
cccauccuaccuugggagg

SEQ ID NO: 1052634 - RNA, 19 nt, Artificial Sequence
  Description of Artificial Sequence: Synthetic oligonucleotide
gucgucgugggcagucacc

SEQ ID NO: 1052635 - RNA, 19 nt, Artificial Sequence
  Description of Artificial Sequence: Synthetic oligonucleotide
aggcggcccggaguaagcg

SEQ ID NO: 1052636 - RNA, 19 nt, Artificial Sequence
  Description of Artificial Sequence: Synthetic oligonucleotide
accgguguuugugauccaa

SEQ ID NO: 1052637 - RNA, 19 nt, Artificial Sequence
  Description of Artificial Sequence: Synthetic oligonucleotide
ggcggcccggaguaagcgg

SEQ ID NO: 1052638 - RNA, 19 nt, Artificial Sequence
  Description of Artificial Sequence: Synthetic oligonucleotide
ccgguguuugugauccaag

SEQ ID NO: 1052639 - RNA, 19 nt, Artificial Sequence
  Description of Artificial Sequence: Synthetic oligonucleotide
caagggugaggucccggga

SEQ ID NO: 1052640 - RNA, 19 nt, Artificial Sequence
  Description of Artificial Sequence: Synthetic oligonucleotide
aguuaguaauggggauuaa

SEQ ID NO: 1052641 - RNA, 19 nt, Artificial Sequence
  Description of Artificial Sequence: Synthetic oligonucleotide
auguuccgugugucauucu

SEQ ID NO: 1052642 - RNA, 19 nt, Artificial Sequence
  Description of Artificial Sequence: Synthetic oligonucleotide
cacccugagugagccagug

SEQ ID NO: 1052643 - RNA, 19 nt, Artificial Sequence
  Description of Artificial Sequence: Synthetic oligonucleotide
caaacgggcuucccggucu

SEQ ID NO: 1052644 - RNA, 19 nt, Artificial Sequence
  Description of Artificial Sequence: Synthetic oligonucleotide
auccuaccuugggaggaug

SEQ ID NO: 1052645 - RNA, 19 nt, Artificial Sequence
  Description of Artificial Sequence: Synthetic oligonucleotide
gcggcccggaguaagcggg

SEQ ID NO: 1052646 - RNA, 19 nt, Artificial Sequence
  Description of Artificial Sequence: Synthetic oligonucleotide
ccuuccgacauggugccug

SEQ ID NO: 1052647 - RNA, 19 nt, Artificial Sequence
  Description of Artificial Sequence: Synthetic oligonucleotide
ccucaccuccgacacgacc

SEQ ID NO: 1052648 - RNA, 19 nt, Artificial Sequence
  Description of Artificial Sequence: Synthetic oligonucleotide
gcucgaagauagaauggga

SEQ ID NO: 1052649 - RNA, 19 nt, Artificial Sequence
  Description of Artificial Sequence: Synthetic oligonucleotide
gaaugggacuggaucacuu

SEQ ID NO: 1052650 - RNA, 19 nt, Artificial Sequence
  Description of Artificial Sequence: Synthetic oligonucleotide
cacggaccucaccuccgac

SEQ ID NO: 1052651 - RNA, 19 nt, Artificial Sequence
  Description of Artificial Sequence: Synthetic oligonucleotide
uggcggucucuaucccgcu

SEQ ID NO: 1052652 - RNA, 19 nt, Artificial Sequence
  Description of Artificial Sequence: Synthetic oligonucleotide
gaggggccuucaccuuggc

SEQ ID NO: 1052653 - RNA, 19 nt, Artificial Sequence
  Description of Artificial Sequence: Synthetic oligonucleotide
uccuuagggccagccgaaa

SEQ ID NO: 1052654 - RNA, 19 nt, Artificial Sequence
  Description of Artificial Sequence: Synthetic oligonucleotide
caggccgccggccgaucag

SEQ ID NO: 1052655 - RNA, 19 nt, Artificial Sequence
  Description of Artificial Sequence: Synthetic oligonucleotide
gacccucugucaggucagc

SEQ ID NO: 1052656 - RNA, 19 nt, Artificial Sequence
  Description of Artificial Sequence: Synthetic oligonucleotide
gggucgcggcccuccaggg

SEQ ID NO: 1052657 - RNA, 19 nt, Artificial Sequence
  Description of Artificial Sequence: Synthetic oligonucleotide
auuuucggaugagcagcuu

SEQ ID NO: 1052658 - RNA, 19 nt, Artificial Sequence
  Description of Artificial Sequence: Synthetic oligonucleotide
guaccggcauguuccgugu

SEQ ID NO: 1052659 - RNA, 19 nt, Artificial Sequence
  Description of Artificial Sequence: Synthetic oligonucleotide
cucuaucccgcucacgcuu

SEQ ID NO: 1052660 - RNA, 19 nt, Artificial Sequence
  Description of Artificial Sequence: Synthetic oligonucleotide
cccgcugcguuuccuuccg

SEQ ID NO: 1052661 - RNA, 19 nt, Artificial Sequence
  Description of Artificial Sequence: Synthetic oligonucleotide
ccgccggccgaucagcccc

SEQ ID NO: 1052662 - RNA, 19 nt, Artificial Sequence
  Description of Artificial Sequence: Synthetic oligonucleotide
cauguccgacauauccacu

SEQ ID NO: 1052663 - RNA, 19 nt, Artificial Sequence
  Description of Artificial Sequence: Synthetic oligonucleotide
ggucgucgugggcagucac

SEQ ID NO: 1052664 - RNA, 19 nt, Artificial Sequence
  Description of Artificial Sequence: Synthetic oligonucleotide
cccuuauucuuuccuaucu

SEQ ID NO: 1052665 - RNA, 19 nt, Artificial Sequence
  Description of Artificial Sequence: Synthetic oligonucleotide
ccgcucacgcuuuuccuuc

SEQ ID NO: 1052666 - RNA, 19 nt, Artificial Sequence
  Description of Artificial Sequence: Synthetic oligonucleotide
acccucacgcuggcggucu

SEQ ID NO: 1052667 - RNA, 19 nt, Artificial Sequence
  Description of Artificial Sequence: Synthetic oligonucleotide
gguuguucccauggucaca

SEQ ID NO: 1052668 - RNA, 19 nt, Artificial Sequence
  Description of Artificial Sequence: Synthetic oligonucleotide
ggucccgggagcgaaugga

SEQ ID NO: 1052669 - RNA, 19 nt, Artificial Sequence
  Description of Artificial Sequence: Synthetic oligonucleotide
gcccgcugcguuuccuucc

SEQ ID NO: 1052670 - RNA, 19 nt, Artificial Sequence
  Description of Artificial Sequence: Synthetic oligonucleotide
ccagggaggguaucaggca

SEQ ID NO: 1052671 - RNA, 19 nt, Artificial Sequence
  Description of Artificial Sequence: Synthetic oligonucleotide
acacgacccgccaccggca

SEQ ID NO: 1052672 - RNA, 19 nt, Artificial Sequence
  Description of Artificial Sequence: Synthetic oligonucleotide
gggagcgaauggagggaag

SEQ ID NO: 1052673 - RNA, 19 nt, Artificial Sequence
  Description of Artificial Sequence: Synthetic oligonucleotide
gagaaggggucgcggcccu

SEQ ID NO: 1052674 - RNA, 19 nt, Artificial Sequence
  Description of Artificial Sequence: Synthetic oligonucleotide
accucaccuccgacacgac

SEQ ID NO: 1052675 - RNA, 19 nt, Artificial Sequence
  Description of Artificial Sequence: Synthetic oligonucleotide
ccaaacgggcuucccgguc

SEQ ID NO: 1052676 - RNA, 19 nt, Artificial Sequence
  Description of Artificial Sequence: Synthetic oligonucleotide
ccccgauuuucggaugagc

SEQ ID NO: 1052677 - RNA, 19 nt, Artificial Sequence
  Description of Artificial Sequence: Synthetic oligonucleotide
ggagaacauacaaguuugu

SEQ ID NO: 1052678 - RNA, 19 nt, Artificial Sequence
  Description of Artificial Sequence: Synthetic oligonucleotide
caggucagccaagguacaa

SEQ ID NO: 1052679 - RNA, 19 nt, Artificial Sequence
  Description of Artificial Sequence: Synthetic oligonucleotide
ccauccuaccuugggagga

SEQ ID NO: 1052680 - RNA, 19 nt, Artificial Sequence
  Description of Artificial Sequence: Synthetic oligonucleotide
ggcggucucuaucccgcuc

SEQ ID NO: 1052681 - RNA, 19 nt, Artificial Sequence
  Description of Artificial Sequence: Synthetic oligonucleotide
gcaguuaguaauggggauu

SEQ ID NO: 1052682 - RNA, 19 nt, Artificial Sequence
  Description of Artificial Sequence: Synthetic oligonucleotide
caggacugucaucuccccu

SEQ ID NO: 1052683 - RNA, 19 nt, Artificial Sequence
  Description of Artificial Sequence: Synthetic oligonucleotide
ggcauguuccgugugucau

SEQ ID NO: 1052684 - RNA, 19 nt, Artificial Sequence
  Description of Artificial Sequence: Synthetic oligonucleotide
cgacauauccacugucuua

SEQ ID NO: 1052685 - RNA, 19 nt, Artificial Sequence
  Description of Artificial Sequence: Synthetic oligonucleotide
gcccuccaggguugcuggg

SEQ ID NO: 1052686 - RNA, 19 nt, Artificial Sequence
  Description of Artificial Sequence: Synthetic oligonucleotide
aggucccauguccgacaua

SEQ ID NO: 1052687 - RNA, 19 nt, Artificial Sequence
  Description of Artificial Sequence: Synthetic oligonucleotide
cuccgccaagggugagguc

SEQ ID NO: 1052688 - RNA, 19 nt, Artificial Sequence
  Description of Artificial Sequence: Synthetic oligonucleotide
ccgacacgacccgccaccg

SEQ ID NO: 1052689 - RNA, 19 nt, Artificial Sequence
  Description of Artificial Sequence: Synthetic oligonucleotide
ccuuagggccagccgaaaa

SEQ ID NO: 1052690 - RNA, 19 nt, Artificial Sequence
  Description of Artificial Sequence: Synthetic oligonucleotide
gcugaagcuccacgccgaa

SEQ ID NO: 1052691 - RNA, 19 nt, Artificial Sequence
  Description of Artificial Sequence: Synthetic oligonucleotide
gcuguaccuuccccgauuu

SEQ ID NO: 1052692 - RNA, 19 nt, Artificial Sequence
  Description of Artificial Sequence: Synthetic oligonucleotide
cccguccaugacccucacg

SEQ ID NO: 1052693 - RNA, 19 nt, Artificial Sequence
  Description of Artificial Sequence: Synthetic oligonucleotide
gucccauguccgacauauc

SEQ ID NO: 1052694 - RNA, 19 nt, Artificial Sequence
  Description of Artificial Sequence: Synthetic oligonucleotide
ccggcauguuccguguguc

SEQ ID NO: 1052695 - RNA, 19 nt, Artificial Sequence
  Description of Artificial Sequence: Synthetic oligonucleotide
cucacgcuggcggucucua

SEQ ID NO: 1052696 - RNA, 19 nt, Artificial Sequence
  Description of Artificial Sequence: Synthetic oligonucleotide
ccuauccauguagcccaug

SEQ ID NO: 1052697 - RNA, 19 nt, Artificial Sequence
  Description of Artificial Sequence: Synthetic oligonucleotide
ggagaccaggagucuuccu

SEQ ID NO: 1052698 - RNA, 19 nt, Artificial Sequence
  Description of Artificial Sequence: Synthetic oligonucleotide
gcaggccgccggccgauca

SEQ ID NO: 1052699 - RNA, 19 nt, Artificial Sequence
  Description of Artificial Sequence: Synthetic oligonucleotide
caccgguguuugugaucca

SEQ ID NO: 1052700 - RNA, 19 nt, Artificial Sequence
  Description of Artificial Sequence: Synthetic oligonucleotide
caucccgcggcuccucuuu

SEQ ID NO: 1052701 - RNA, 19 nt, Artificial Sequence
  Description of Artificial Sequence: Synthetic oligonucleotide
cauccuaccuugggaggau

SEQ ID NO: 1052702 - RNA, 19 nt, Artificial Sequence
  Description of Artificial Sequence: Synthetic oligonucleotide
gccaaacgggcuucccggu

SEQ ID NO: 1052703 - RNA, 19 nt, Artificial Sequence
  Description of Artificial Sequence: Synthetic oligonucleotide
gcauguuccgugugucauu

SEQ ID NO: 1052704 - RNA, 19 nt, Artificial Sequence
  Description of Artificial Sequence: Synthetic oligonucleotide
caggaaagagcagguuguu

SEQ ID NO: 1052705 - RNA, 19 nt, Artificial Sequence
  Description of Artificial Sequence: Synthetic oligonucleotide
ggcucgcccgcugcguuuc

SEQ ID NO: 1052706 - RNA, 19 nt, Artificial Sequence
  Description of Artificial Sequence: Synthetic oligonucleotide
cgacacgacccgccaccgg

SEQ ID NO: 1052707 - RNA, 19 nt, Artificial Sequence
  Description of Artificial Sequence: Synthetic oligonucleotide
gccagacggaagucugcgu

SEQ ID NO: 1052708 - RNA, 19 nt, Artificial Sequence
  Description of Artificial Sequence: Synthetic oligonucleotide
ccgacauauccacugucuu

SEQ ID NO: 1052709 - RNA, 19 nt, Artificial Sequence
  Description of Artificial Sequence: Synthetic oligonucleotide
cggcccggaguaagcgggg

SEQ ID NO: 1052710 - RNA, 19 nt, Artificial Sequence
  Description of Artificial Sequence: Synthetic oligonucleotide
cgccgaaugucacggaccu

SEQ ID NO: 1052711 - RNA, 19 nt, Artificial Sequence
  Description of Artificial Sequence: Synthetic oligonucleotide
ccgggagcgaauggaggga

SEQ ID NO: 1052712 - RNA, 19 nt, Artificial Sequence
  Description of Artificial Sequence: Synthetic oligonucleotide
gcucgcccgcugcguuucc

SEQ ID NO: 1052713 - RNA, 19 nt, Artificial Sequence
  Description of Artificial Sequence: Synthetic oligonucleotide
cuguaccggcauguuccgu

SEQ ID NO: 1052714 - RNA, 19 nt, Artificial Sequence
  Description of Artificial Sequence: Synthetic oligonucleotide
gccgaaugucacggaccuc

SEQ ID NO: 1052715 - RNA, 19 nt, Artificial Sequence
  Description of Artificial Sequence: Synthetic oligonucleotide
cuguaccuuccccgauuuu

SEQ ID NO: 1052716 - RNA, 19 nt, Artificial Sequence
  Description of Artificial Sequence: Synthetic oligonucleotide
gcucucccagccagacgga

SEQ ID NO: 1052717 - RNA, 19 nt, Artificial Sequence
  Description of Artificial Sequence: Synthetic oligonucleotide
cuaucccgcucacgcuuuu

SEQ ID NO: 1052718 - RNA, 19 nt, Artificial Sequence
  Description of Artificial Sequence: Synthetic oligonucleotide
cgcggcuccucuuucacuu

SEQ ID NO: 1052719 - RNA, 19 nt, Artificial Sequence
  Description of Artificial Sequence: Synthetic oligonucleotide
cccgcucacgcuuuuccuu

SEQ ID NO: 1052720 - RNA, 19 nt, Artificial Sequence
  Description of Artificial Sequence: Synthetic oligonucleotide
cucgcccgcugcguuuccu

SEQ ID NO: 1052721 - RNA, 19 nt, Artificial Sequence
  Description of Artificial Sequence: Synthetic oligonucleotide
cgggagcgaauggagggaa

SEQ ID NO: 1052722 - RNA, 19 nt, Artificial Sequence
  Description of Artificial Sequence: Synthetic oligonucleotide
gugcaggccgccggccgau

SEQ ID NO: 1052723 - RNA, 19 nt, Artificial Sequence
  Description of Artificial Sequence: Synthetic oligonucleotide
gcccugggucaucgaugaa

SEQ ID NO: 1052724 - RNA, 19 nt, Artificial Sequence
  Description of Artificial Sequence: Synthetic oligonucleotide
cccucacgcuggcggucuc

SEQ ID NO: 1052725 - RNA, 19 nt, Artificial Sequence
  Description of Artificial Sequence: Synthetic oligonucleotide
gggcucgcccgcugcguuu

SEQ ID NO: 1052726 - RNA, 19 nt, Artificial Sequence
  Description of Artificial Sequence: Synthetic oligonucleotide
ccgcggcuccucuuucacu

SEQ ID NO: 1052727 - RNA, 19 nt, Artificial Sequence
  Description of Artificial Sequence: Synthetic oligonucleotide
cgugggcagucaccguccu

SEQ ID NO: 1052728 - RNA, 19 nt, Artificial Sequence
  Description of Artificial Sequence: Synthetic oligonucleotide
ccucacgcuggcggucucu

SEQ ID NO: 1052729 - RNA, 19 nt, Artificial Sequence
  Description of Artificial Sequence: Synthetic oligonucleotide
cggccacguccccguccau

SEQ ID NO: 1052730 - RNA, 19 nt, Artificial Sequence
  Description of Artificial Sequence: Synthetic oligonucleotide
auacuuucggacuugaacc

SEQ ID NO: 1052731 - RNA, 19 nt, Artificial Sequence
  Description of Artificial Sequence: Synthetic oligonucleotide
aaaaggaccaggaaguugc

SEQ ID NO: 1052732 - RNA, 19 nt, Artificial Sequence
  Description of Artificial Sequence: Synthetic oligonucleotide
aauggauacugcccgaucg

SEQ ID NO: 1052733 - RNA, 19 nt, Artificial Sequence
  Description of Artificial Sequence: Synthetic oligonucleotide
aagugugugauauagugca

SEQ ID NO: 1052734 - RNA, 19 nt, Artificial Sequence
  Description of Artificial Sequence: Synthetic oligonucleotide
aucaaugaggaaaaggacc

SEQ ID NO: 1052735 - RNA, 19 nt, Artificial Sequence
  Description of Artificial Sequence: Synthetic oligonucleotide
ucggacuugaaccugcagg

SEQ ID NO: 1052736 - RNA, 19 nt, Artificial Sequence
  Description of Artificial Sequence: Synthetic oligonucleotide
acaagugugugauauagug

SEQ ID NO: 1052737 - RNA, 19 nt, Artificial Sequence
  Description of Artificial Sequence: Synthetic oligonucleotide
uguaugccacauuagacag

SEQ ID NO: 1052738 - RNA, 19 nt, Artificial Sequence
  Description of Artificial Sequence: Synthetic oligonucleotide
gauauagugcaugacggcg

SEQ ID NO: 1052739 - RNA, 19 nt, Artificial Sequence
  Description of Artificial Sequence: Synthetic oligonucleotide
aagaaggccaguguggaac

SEQ ID NO: 1052740 - RNA, 19 nt, Artificial Sequence
  Description of Artificial Sequence: Synthetic oligonucleotide
aguuguaugaguuguugag

SEQ ID NO: 1052741 - RNA, 19 nt, Artificial Sequence
  Description of Artificial Sequence: Synthetic oligonucleotide
uccgaagcuguucaguugg

SEQ ID NO: 1052742 - RNA, 19 nt, Artificial Sequence
  Description of Artificial Sequence: Synthetic oligonucleotide
gaaccauugguguagaauc

SEQ ID NO: 1052743 - RNA, 19 nt, Artificial Sequence
  Description of Artificial Sequence: Synthetic oligonucleotide
ucgaacucgacucaagcug

SEQ ID NO: 1052744 - RNA, 19 nt, Artificial Sequence
  Description of Artificial Sequence: Synthetic oligonucleotide
aaggguuguccccagcugg

SEQ ID NO: 1052745 - RNA, 19 nt, Artificial Sequence
  Description of Artificial Sequence: Synthetic oligonucleotide
agcacggacacccagaaga

SEQ ID NO: 1052746 - RNA, 19 nt, Artificial Sequence
  Description of Artificial Sequence: Synthetic oligonucleotide
uguauguauucuugcagag

SEQ ID NO: 1052747 - RNA, 19 nt, Artificial Sequence
  Description of Artificial Sequence: Synthetic oligonucleotide
auuagacaggaccugcagg

SEQ ID NO: 1052748 - RNA, 19 nt, Artificial Sequence
  Description of Artificial Sequence: Synthetic oligonucleotide
cauacuuucggacuugaac

SEQ ID NO: 1052749 - RNA, 19 nt, Artificial Sequence
  Description of Artificial Sequence: Synthetic oligonucleotide
guaugaguuguugaggugg

SEQ ID NO: 1052750 - RNA, 19 nt, Artificial Sequence
  Description of Artificial Sequence: Synthetic oligonucleotide
auguaugccacauuagaca

SEQ ID NO: 1052751 - RNA, 19 nt, Artificial Sequence
  Description of Artificial Sequence: Synthetic oligonucleotide
aaacugaaguuguaugagu

SEQ ID NO: 1052752 - RNA, 19 nt, Artificial Sequence
  Description of Artificial Sequence: Synthetic oligonucleotide
ucuuaaagacacuguaugu

SEQ ID NO: 1052753 - RNA, 19 nt, Artificial Sequence
  Description of Artificial Sequence: Synthetic oligonucleotide
acucgacucaagcugaauc

SEQ ID NO: 1052754 - RNA, 19 nt, Artificial Sequence
  Description of Artificial Sequence: Synthetic oligonucleotide
uaacaguuguggaaguuca

SEQ ID NO: 1052755 - RNA, 19 nt, Artificial Sequence
  Description of Artificial Sequence: Synthetic oligonucleotide
agcagcgacaagcaucccc

SEQ ID NO: 1052756 - RNA, 19 nt, Artificial Sequence
  Description of Artificial Sequence: Synthetic oligonucleotide
aaccauugguguagaaucc

SEQ ID NO: 1052757 - RNA, 19 nt, Artificial Sequence
  Description of Artificial Sequence: Synthetic oligonucleotide
uugucugacagcauauacu

SEQ ID NO: 1052758 - RNA, 19 nt, Artificial Sequence
  Description of Artificial Sequence: Synthetic oligonucleotide
gacuugaaccugcaggucc

SEQ ID NO: 1052759 - RNA, 19 nt, Artificial Sequence
  Description of Artificial Sequence: Synthetic oligonucleotide
aucaaggcaauagugauga

SEQ ID NO: 1052760 - RNA, 19 nt, Artificial Sequence
  Description of Artificial Sequence: Synthetic oligonucleotide
cucgacucaagcugaaucc

SEQ ID NO: 1052761 - RNA, 19 nt, Artificial Sequence
  Description of Artificial Sequence: Synthetic oligonucleotide
gacaauguaugccacauua

SEQ ID NO: 1052762 - RNA, 19 nt, Artificial Sequence
  Description of Artificial Sequence: Synthetic oligonucleotide
guagauguagcagaugacc

SEQ ID NO: 1052763 - RNA, 19 nt, Artificial Sequence
  Description of Artificial Sequence: Synthetic oligonucleotide
ugugugauauagugcauga

SEQ ID NO: 1052764 - RNA, 19 nt, Artificial Sequence
  Description of Artificial Sequence: Synthetic oligonucleotide
ggauggaccacacaacugg

SEQ ID NO: 1052765 - RNA, 19 nt, Artificial Sequence
  Description of Artificial Sequence: Synthetic oligonucleotide
uuggugaaugccagggcgg

SEQ ID NO: 1052766 - RNA, 19 nt, Artificial Sequence
  Description of Artificial Sequence: Synthetic oligonucleotide
uccgaguuguaacaguugu

SEQ ID NO: 1052767 - RNA, 19 nt, Artificial Sequence
  Description of Artificial Sequence: Synthetic oligonucleotide
gaucgaacucgacucaagc

SEQ ID NO: 1052768 - RNA, 19 nt, Artificial Sequence
  Description of Artificial Sequence: Synthetic oligonucleotide
acgggauucaaugacaaug

SEQ ID NO: 1052769 - RNA, 19 nt, Artificial Sequence
  Description of Artificial Sequence: Synthetic oligonucleotide
guaaugucggaacagcuuc

SEQ ID NO: 1052770 - RNA, 19 nt, Artificial Sequence
  Description of Artificial Sequence: Synthetic oligonucleotide
caagugugugauauagugc

SEQ ID NO: 1052771 - RNA, 19 nt, Artificial Sequence
  Description of Artificial Sequence: Synthetic oligonucleotide
uccauagucacuggcaccc

SEQ ID NO: 1052772 - RNA, 19 nt, Artificial Sequence
  Description of Artificial Sequence: Synthetic oligonucleotide
ugauauagugcaugacggc

SEQ ID NO: 1052773 - RNA, 19 nt, Artificial Sequence
  Description of Artificial Sequence: Synthetic oligonucleotide
cagcauauacuucacgaag

SEQ ID NO: 1052774 - RNA, 19 nt, Artificial Sequence
  Description of Artificial Sequence: Synthetic oligonucleotide
acaaguguaggugugcgag

SEQ ID NO: 1052775 - RNA, 19 nt, Artificial Sequence
  Description of Artificial Sequence: Synthetic oligonucleotide
caacaagugugugauauag

SEQ ID NO: 1052776 - RNA, 19 nt, Artificial Sequence
  Description of Artificial Sequence: Synthetic oligonucleotide
cuucccggaacccagaguc

SEQ ID NO: 1052777 - RNA, 19 nt, Artificial Sequence
  Description of Artificial Sequence: Synthetic oligonucleotide
agaagggcgccuuucaaca

SEQ ID NO: 1052778 - RNA, 19 nt, Artificial Sequence
  Description of Artificial Sequence: Synthetic oligonucleotide
gaaguuguaugaguuguug

SEQ ID NO: 1052779 - RNA, 19 nt, Artificial Sequence
  Description of Artificial Sequence: Synthetic oligonucleotide
ccggugagcacaaagaagg

SEQ ID NO: 1052780 - RNA, 19 nt, Artificial Sequence
  Description of Artificial Sequence: Synthetic oligonucleotide
uccaccaagagcugguaca

SEQ ID NO: 1052781 - RNA, 19 nt, Artificial Sequence
  Description of Artificial Sequence: Synthetic oligonucleotide
ugggaagucacaacaguuc

SEQ ID NO: 1052782 - RNA, 19 nt, Artificial Sequence
  Description of Artificial Sequence: Synthetic oligonucleotide
gacacuguauguauucuug

SEQ ID NO: 1052783 - RNA, 19 nt, Artificial Sequence
  Description of Artificial Sequence: Synthetic oligonucleotide
acggcgaggccuucgaugg

SEQ ID NO: 1052784 - RNA, 19 nt, Artificial Sequence
  Description of Artificial Sequence: Synthetic oligonucleotide
acagcagauaagauccacc

SEQ ID NO: 1052785 - RNA, 19 nt, Artificial Sequence
  Description of Artificial Sequence: Synthetic oligonucleotide
uaguaaugucggaacagcu

SEQ ID NO: 1052786 - RNA, 19 nt, Artificial Sequence
  Description of Artificial Sequence: Synthetic oligonucleotide
caaggcaauagugaugaag

SEQ ID NO: 1052787 - RNA, 19 nt, Artificial Sequence
  Description of Artificial Sequence: Synthetic oligonucleotide
aagggcgccuuucaacaag

SEQ ID NO: 1052788 - RNA, 19 nt, Artificial Sequence
  Description of Artificial Sequence: Synthetic oligonucleotide
agccaguggaucuuaaaga

SEQ ID NO: 1052789 - RNA, 19 nt, Artificial Sequence
  Description of Artificial Sequence: Synthetic oligonucleotide
ugauguaguaaugucggaa

SEQ ID NO: 1052790 - RNA, 19 nt, Artificial Sequence
  Description of Artificial Sequence: Synthetic oligonucleotide
aaguguaggugugcgagug

SEQ ID NO: 1052791 - RNA, 19 nt, Artificial Sequence
  Description of Artificial Sequence: Synthetic oligonucleotide
ugccggauggaccacacaa

SEQ ID NO: 1052792 - RNA, 19 nt, Artificial Sequence
  Description of Artificial Sequence: Synthetic oligonucleotide
cuuucggacuugaaccugc

SEQ ID NO: 1052793 - RNA, 19 nt, Artificial Sequence
  Description of Artificial Sequence: Synthetic oligonucleotide
ugaacaacuuccucugcuc

SEQ ID NO: 1052794 - RNA, 19 nt, Artificial Sequence
  Description of Artificial Sequence: Synthetic oligonucleotide
gagugaaguagauguagca

SEQ ID NO: 1052795 - RNA, 19 nt, Artificial Sequence
  Description of Artificial Sequence: Synthetic oligonucleotide
ugcagaugccggauggacc

SEQ ID NO: 1052796 - RNA, 19 nt, Artificial Sequence
  Description of Artificial Sequence: Synthetic oligonucleotide
cucggaucaucacagugag

SEQ ID NO: 1052797 - RNA, 19 nt, Artificial Sequence
  Description of Artificial Sequence: Synthetic oligonucleotide
aguguaggugugcgagugc

SEQ ID NO: 1052798 - RNA, 19 nt, Artificial Sequence
  Description of Artificial Sequence: Synthetic oligonucleotide
aacuuguagccggugagca

SEQ ID NO: 1052799 - RNA, 19 nt, Artificial Sequence
  Description of Artificial Sequence: Synthetic oligonucleotide
gaaaaggaccaggaaguug

SEQ ID NO: 1052800 - RNA, 19 nt, Artificial Sequence
  Description of Artificial Sequence: Synthetic oligonucleotide
uacuuucggacuugaaccu

SEQ ID NO: 1052801 - RNA, 19 nt, Artificial Sequence
  Description of Artificial Sequence: Synthetic oligonucleotide
gauacugcccgaucgaacu

SEQ ID NO: 1052802 - RNA, 19 nt, Artificial Sequence
  Description of Artificial Sequence: Synthetic oligonucleotide
uaaggguuguccccagcug

SEQ ID NO: 1052803 - RNA, 19 nt, Artificial Sequence
  Description of Artificial Sequence: Synthetic oligonucleotide
caguguggaacucuccacc

SEQ ID NO: 1052804 - RNA, 19 nt, Artificial Sequence
  Description of Artificial Sequence: Synthetic oligonucleotide
cugcuauuccucuccagag

SEQ ID NO: 1052805 - RNA, 19 nt, Artificial Sequence
  Description of Artificial Sequence: Synthetic oligonucleotide
uaaugucggaacagcuuca

SEQ ID NO: 1052806 - RNA, 19 nt, Artificial Sequence
  Description of Artificial Sequence: Synthetic oligonucleotide
uugggacaaguguaggugu

SEQ ID NO: 1052807 - RNA, 19 nt, Artificial Sequence
  Description of Artificial Sequence: Synthetic oligonucleotide
ugcccgaucgaacucgacu

SEQ ID NO: 1052808 - RNA, 19 nt, Artificial Sequence
  Description of Artificial Sequence: Synthetic oligonucleotide
gagccgaucaaggcaauag

SEQ ID NO: 1052809 - RNA, 19 nt, Artificial Sequence
  Description of Artificial Sequence: Synthetic oligonucleotide
gagaagggcgccuuucaac

SEQ ID NO: 1052810 - RNA, 19 nt, Artificial Sequence
  Description of Artificial Sequence: Synthetic oligonucleotide
gauggaccacacaacuggg

SEQ ID NO: 1052811 - RNA, 19 nt, Artificial Sequence
  Description of Artificial Sequence: Synthetic oligonucleotide
ucacgggauucaaugacaa

SEQ ID NO: 1052812 - RNA, 19 nt, Artificial Sequence
  Description of Artificial Sequence: Synthetic oligonucleotide
gcaauagugaugaagagaa

SEQ ID NO: 1052813 - RNA, 19 nt, Artificial Sequence
  Description of Artificial Sequence: Synthetic oligonucleotide
aguaguaguugaugcugug

SEQ ID NO: 1052814 - RNA, 19 nt, Artificial Sequence
  Description of Artificial Sequence: Synthetic oligonucleotide
aagacacuguauguauucu

SEQ ID NO: 1052815 - RNA, 19 nt, Artificial Sequence
  Description of Artificial Sequence: Synthetic oligonucleotide
gaggccuucgauggggugg

SEQ ID NO: 1052816 - RNA, 19 nt, Artificial Sequence
  Description of Artificial Sequence: Synthetic oligonucleotide
uucuugcagagcacggaca

SEQ ID NO: 1052817 - RNA, 19 nt, Artificial Sequence
  Description of Artificial Sequence: Synthetic oligonucleotide
aguguggaacucuccacca

SEQ ID NO: 1052818 - RNA, 19 nt, Artificial Sequence
  Description of Artificial Sequence: Synthetic oligonucleotide
gcgaaguaggcucagcucc

SEQ ID NO: 1052819 - RNA, 19 nt, Artificial Sequence
  Description of Artificial Sequence: Synthetic oligonucleotide
aggcaauagugaugaagag

SEQ ID NO: 1052820 - RNA, 19 nt, Artificial Sequence
  Description of Artificial Sequence: Synthetic oligonucleotide
gaugcgagugaaguagaug

SEQ ID NO: 1052821 - RNA, 19 nt, Artificial Sequence
  Description of Artificial Sequence: Synthetic oligonucleotide
gggaagucacaacaguucc

SEQ ID NO: 1052822 - RNA, 19 nt, Artificial Sequence
  Description of Artificial Sequence: Synthetic oligonucleotide
ugcgagugcagaaggucug

SEQ ID NO: 1052823 - RNA, 19 nt, Artificial Sequence
  Description of Artificial Sequence: Synthetic oligonucleotide
aaguaguaguugaugcugu

SEQ ID NO: 1052824 - RNA, 19 nt, Artificial Sequence
  Description of Artificial Sequence: Synthetic oligonucleotide
cauuccugggaguuccggc

SEQ ID NO: 1052825 - RNA, 19 nt, Artificial Sequence
  Description of Artificial Sequence: Synthetic oligonucleotide
gauggcgaugaugcgagug

SEQ ID NO: 1052826 - RNA, 19 nt, Artificial Sequence
  Description of Artificial Sequence: Synthetic oligonucleotide
gacaagcauccccaucugc

SEQ ID NO: 1052827 - RNA, 19 nt, Artificial Sequence
  Description of Artificial Sequence: Synthetic oligonucleotide
guauucuugcagagcacgg

SEQ ID NO: 1052828 - RNA, 19 nt, Artificial Sequence
  Description of Artificial Sequence: Synthetic oligonucleotide
gacacugggaagucacaac

SEQ ID NO: 1052829 - RNA, 19 nt, Artificial Sequence
  Description of Artificial Sequence: Synthetic oligonucleotide
uguaggugugcgagugcag

SEQ ID NO: 1052830 - RNA, 19 nt, Artificial Sequence
  Description of Artificial Sequence: Synthetic oligonucleotide
ucgacucaagcugaauccc

SEQ ID NO: 1052831 - RNA, 19 nt, Artificial Sequence
  Description of Artificial Sequence: Synthetic oligonucleotide
cagcagauaagauccacca

SEQ ID NO: 1052832 - RNA, 19 nt, Artificial Sequence
  Description of Artificial Sequence: Synthetic oligonucleotide
aaagcagggagaugcucuu

SEQ ID NO: 1052833 - RNA, 19 nt, Artificial Sequence
  Description of Artificial Sequence: Synthetic oligonucleotide
aaucccaccuuccgcugcu

SEQ ID NO: 1052834 - RNA, 19 nt, Artificial Sequence
  Description of Artificial Sequence: Synthetic oligonucleotide
cagccugagccgaucaagg

SEQ ID NO: 1052835 - RNA, 19 nt, Artificial Sequence
  Description of Artificial Sequence: Synthetic oligonucleotide
gacggcgaggccuucgaug

SEQ ID NO: 1052836 - RNA, 19 nt, Artificial Sequence
  Description of Artificial Sequence: Synthetic oligonucleotide
guaacaguuguggaaguuc

SEQ ID NO: 1052837 - RNA, 19 nt, Artificial Sequence
  Description of Artificial Sequence: Synthetic oligonucleotide
cacauuagacaggaccugc

SEQ ID NO: 1052838 - RNA, 19 nt, Artificial Sequence
  Description of Artificial Sequence: Synthetic oligonucleotide
caccacgugaaaacugaag

SEQ ID NO: 1052839 - RNA, 19 nt, Artificial Sequence
  Description of Artificial Sequence: Synthetic oligonucleotide
cucucggaucaucacagug

SEQ ID NO: 1052840 - RNA, 19 nt, Artificial Sequence
  Description of Artificial Sequence: Synthetic oligonucleotide
ggugugcgagugcagaagg

SEQ ID NO: 1052841 - RNA, 19 nt, Artificial Sequence
  Description of Artificial Sequence: Synthetic oligonucleotide
gaccacacaacugggaaga

SEQ ID NO: 1052842 - RNA, 19 nt, Artificial Sequence
  Description of Artificial Sequence: Synthetic oligonucleotide
cacaacugggaagaggaug

SEQ ID NO: 1052843 - RNA, 19 nt, Artificial Sequence
  Description of Artificial Sequence: Synthetic oligonucleotide
agaauccgaagcuguucag

SEQ ID NO: 1052844 - RNA, 19 nt, Artificial Sequence
  Description of Artificial Sequence: Synthetic oligonucleotide
ugugagcgccagacggugg

SEQ ID NO: 1052845 - RNA, 19 nt, Artificial Sequence
  Description of Artificial Sequence: Synthetic oligonucleotide
auggcgaugaugcgaguga

SEQ ID NO: 1052846 - RNA, 19 nt, Artificial Sequence
  Description of Artificial Sequence: Synthetic oligonucleotide
acuuugggacaaguguagg

SEQ ID NO: 1052847 - RNA, 19 nt, Artificial Sequence
  Description of Artificial Sequence: Synthetic oligonucleotide
uucugccgcugacaggaag

SEQ ID NO: 1052848 - RNA, 19 nt, Artificial Sequence
  Description of Artificial Sequence: Synthetic oligonucleotide
ucccggaacccagaguccg

SEQ ID NO: 1052849 - RNA, 19 nt, Artificial Sequence
  Description of Artificial Sequence: Synthetic oligonucleotide
gucccuaggacucucugca

SEQ ID NO: 1052850 - RNA, 19 nt, Artificial Sequence
  Description of Artificial Sequence: Synthetic oligonucleotide
uccucacgggauucaauga

SEQ ID NO: 1052851 - RNA, 19 nt, Artificial Sequence
  Description of Artificial Sequence: Synthetic oligonucleotide
aggcgaaguaggcucagcu

SEQ ID NO: 1052852 - RNA, 19 nt, Artificial Sequence
  Description of Artificial Sequence: Synthetic oligonucleotide
agcgacaagcauccccauc

SEQ ID NO: 1052853 - RNA, 19 nt, Artificial Sequence
  Description of Artificial Sequence: Synthetic oligonucleotide
aacaagugugugauauagu

SEQ ID NO: 1052854 - RNA, 19 nt, Artificial Sequence
  Description of Artificial Sequence: Synthetic oligonucleotide
agccagaaagcaggcagac

SEQ ID NO: 1052855 - RNA, 19 nt, Artificial Sequence
  Description of Artificial Sequence: Synthetic oligonucleotide
uccuugucugacagcauau

SEQ ID NO: 1052856 - RNA, 19 nt, Artificial Sequence
  Description of Artificial Sequence: Synthetic oligonucleotide
uucggacuugaaccugcag

SEQ ID NO: 1052857 - RNA, 19 nt, Artificial Sequence
  Description of Artificial Sequence: Synthetic oligonucleotide
ugaaguuguaugaguuguu

SEQ ID NO: 1052858 - RNA, 19 nt, Artificial Sequence
  Description of Artificial Sequence: Synthetic oligonucleotide
aggauggcgaugaugcgag

SEQ ID NO: 1052859 - RNA, 19 nt, Artificial Sequence
  Description of Artificial Sequence: Synthetic oligonucleotide
ugugcgagugcagaagguc

SEQ ID NO: 1052860 - RNA, 19 nt, Artificial Sequence
  Description of Artificial Sequence: Synthetic oligonucleotide
auggauacugcccgaucga

SEQ ID NO: 1052861 - RNA, 19 nt, Artificial Sequence
  Description of Artificial Sequence: Synthetic oligonucleotide
ggggcgaucagggaggagg

SEQ ID NO: 1052862 - RNA, 19 nt, Artificial Sequence
  Description of Artificial Sequence: Synthetic oligonucleotide
ucaagcugaaucccaccuu

SEQ ID NO: 1052863 - RNA, 19 nt, Artificial Sequence
  Description of Artificial Sequence: Synthetic oligonucleotide
ucggaucaucacagugagg

SEQ ID NO: 1052864 - RNA, 19 nt, Artificial Sequence
  Description of Artificial Sequence: Synthetic oligonucleotide
aucaccacgugaaaacuga

SEQ ID NO: 1052865 - RNA, 19 nt, Artificial Sequence
  Description of Artificial Sequence: Synthetic oligonucleotide
ugaaucccaccuuccgcug

SEQ ID NO: 1052866 - RNA, 19 nt, Artificial Sequence
  Description of Artificial Sequence: Synthetic oligonucleotide
cucggugccuuguuggcac

SEQ ID NO: 1052867 - RNA, 19 nt, Artificial Sequence
  Description of Artificial Sequence: Synthetic oligonucleotide
guggaugcggccugagcag

SEQ ID NO: 1052868 - RNA, 19 nt, Artificial Sequence
  Description of Artificial Sequence: Synthetic oligonucleotide
cgaguuguaacaguugugg

SEQ ID NO: 1052869 - RNA, 19 nt, Artificial Sequence
  Description of Artificial Sequence: Synthetic oligonucleotide
agaaggucugagggguggc

SEQ ID NO: 1052870 - RNA, 19 nt, Artificial Sequence
  Description of Artificial Sequence: Synthetic oligonucleotide
auauagugcaugacggcga

SEQ ID NO: 1052871 - RNA, 19 nt, Artificial Sequence
  Description of Artificial Sequence: Synthetic oligonucleotide
cacuguauguauucuugca

SEQ ID NO: 1052872 - RNA, 19 nt, Artificial Sequence
  Description of Artificial Sequence: Synthetic oligonucleotide
cagggaaccauugguguag

SEQ ID NO: 1052873 - RNA, 19 nt, Artificial Sequence
  Description of Artificial Sequence: Synthetic oligonucleotide
uuucggacuugaaccugca

SEQ ID NO: 1052874 - RNA, 19 nt, Artificial Sequence
  Description of Artificial Sequence: Synthetic oligonucleotide
agacauggucagguagagc

SEQ ID NO: 1052875 - RNA, 19 nt, Artificial Sequence
  Description of Artificial Sequence: Synthetic oligonucleotide
uguagcagaugaccaugau

SEQ ID NO: 1052876 - RNA, 19 nt, Artificial Sequence
  Description of Artificial Sequence: Synthetic oligonucleotide
guuggcacggggucccuag

SEQ ID NO: 1052877 - RNA, 19 nt, Artificial Sequence
  Description of Artificial Sequence: Synthetic oligonucleotide
ggaucuuaaagacacugua

SEQ ID NO: 1052878 - RNA, 19 nt, Artificial Sequence
  Description of Artificial Sequence: Synthetic oligonucleotide
gaauggauacugcccgauc

SEQ ID NO: 1052879 - RNA, 19 nt, Artificial Sequence
  Description of Artificial Sequence: Synthetic oligonucleotide
cuuguagccggugagcaca

SEQ ID NO: 1052880 - RNA, 19 nt, Artificial Sequence
  Description of Artificial Sequence: Synthetic oligonucleotide
ucaacaagugugugauaua

SEQ ID NO: 1052881 - RNA, 19 nt, Artificial Sequence
  Description of Artificial Sequence: Synthetic oligonucleotide
cuugccgggauccgaguug

SEQ ID NO: 1052882 - RNA, 19 nt, Artificial Sequence
  Description of Artificial Sequence: Synthetic oligonucleotide
acgugaaaacugaaguugu

SEQ ID NO: 1052883 - RNA, 19 nt, Artificial Sequence
  Description of Artificial Sequence: Synthetic oligonucleotide
gcgccuuucaacaagugug

SEQ ID NO: 1052884 - RNA, 19 nt, Artificial Sequence
  Description of Artificial Sequence: Synthetic oligonucleotide
ugggaguuccggcucgagu

SEQ ID NO: 1052885 - RNA, 19 nt, Artificial Sequence
  Description of Artificial Sequence: Synthetic oligonucleotide
ggcaggggcgaucagggag

SEQ ID NO: 1052886 - RNA, 19 nt, Artificial Sequence
  Description of Artificial Sequence: Synthetic oligonucleotide
aguaaugucggaacagcuu

SEQ ID NO: 1052887 - RNA, 19 nt, Artificial Sequence
  Description of Artificial Sequence: Synthetic oligonucleotide
caggaaguugcugcuauuc

SEQ ID NO: 1052888 - RNA, 19 nt, Artificial Sequence
  Description of Artificial Sequence: Synthetic oligonucleotide
agauaagauccaccaggaa

SEQ ID NO: 1052889 - RNA, 19 nt, Artificial Sequence
  Description of Artificial Sequence: Synthetic oligonucleotide
ugcugcuauuccucuccag

SEQ ID NO: 1052890 - RNA, 19 nt, Artificial Sequence
  Description of Artificial Sequence: Synthetic oligonucleotide
gaguaggaauggauacugc

SEQ ID NO: 1052891 - RNA, 19 nt, Artificial Sequence
  Description of Artificial Sequence: Synthetic oligonucleotide
cucacgggauucaaugaca

SEQ ID NO: 1052892 - RNA, 19 nt, Artificial Sequence
  Description of Artificial Sequence: Synthetic oligonucleotide
uccccagcuggcuggaacu

SEQ ID NO: 1052893 - RNA, 19 nt, Artificial Sequence
  Description of Artificial Sequence: Synthetic oligonucleotide
ugucucuugguggcccagg

SEQ ID NO: 1052894 - RNA, 19 nt, Artificial Sequence
  Description of Artificial Sequence: Synthetic oligonucleotide
cuuucaacaagugugugau

SEQ ID NO: 1052895 - RNA, 19 nt, Artificial Sequence
  Description of Artificial Sequence: Synthetic oligonucleotide
uggacacugggaagucaca

SEQ ID NO: 1052896 - RNA, 19 nt, Artificial Sequence
  Description of Artificial Sequence: Synthetic oligonucleotide
aggguuguccccagcuggc

SEQ ID NO: 1052897 - RNA, 19 nt, Artificial Sequence
  Description of Artificial Sequence: Synthetic oligonucleotide
uucccggaacccagagucc

SEQ ID NO: 1052898 - RNA, 19 nt, Artificial Sequence
  Description of Artificial Sequence: Synthetic oligonucleotide
gacaaguguaggugugcga

SEQ ID NO: 1052899 - RNA, 19 nt, Artificial Sequence
  Description of Artificial Sequence: Synthetic oligonucleotide
guagaauccgaagcuguuc

SEQ ID NO: 1052900 - RNA, 19 nt, Artificial Sequence
  Description of Artificial Sequence: Synthetic oligonucleotide
uccccauacuuucggacuu

SEQ ID NO: 1052901 - RNA, 19 nt, Artificial Sequence
  Description of Artificial Sequence: Synthetic oligonucleotide
aggccuucgaugggguggc

SEQ ID NO: 1052902 - RNA, 19 nt, Artificial Sequence
  Description of Artificial Sequence: Synthetic oligonucleotide
uggcuggaacuuguagccg

SEQ ID NO: 1052903 - RNA, 19 nt, Artificial Sequence
  Description of Artificial Sequence: Synthetic oligonucleotide
ugcgagugaaguagaugua

SEQ ID NO: 1052904 - RNA, 19 nt, Artificial Sequence
  Description of Artificial Sequence: Synthetic oligonucleotide
ucaccacgugaaaacugaa

SEQ ID NO: 1052905 - RNA, 19 nt, Artificial Sequence
  Description of Artificial Sequence: Synthetic oligonucleotide
uggugaaugccagggcggc

SEQ ID NO: 1052906 - RNA, 19 nt, Artificial Sequence
  Description of Artificial Sequence: Synthetic oligonucleotide
ggacaaguguaggugugcg

SEQ ID NO: 1052907 - RNA, 19 nt, Artificial Sequence
  Description of Artificial Sequence: Synthetic oligonucleotide
ggcaauagugaugaagaga

SEQ ID NO: 1052908 - RNA, 19 nt, Artificial Sequence
  Description of Artificial Sequence: Synthetic oligonucleotide
gaugcguccugcagaugcc

SEQ ID NO: 1052909 - RNA, 19 nt, Artificial Sequence
  Description of Artificial Sequence: Synthetic oligonucleotide
aggaauggauacugcccga

SEQ ID NO: 1052910 - RNA, 19 nt, Artificial Sequence
  Description of Artificial Sequence: Synthetic oligonucleotide
acacuuugggacaagugua

SEQ ID NO: 1052911 - RNA, 19 nt, Artificial Sequence
  Description of Artificial Sequence: Synthetic oligonucleotide
gcgagugaaguagauguag

SEQ ID NO: 1052912 - RNA, 19 nt, Artificial Sequence
  Description of Artificial Sequence: Synthetic oligonucleotide
gaugcggccugagcagccg

SEQ ID NO: 1052913 - RNA, 19 nt, Artificial Sequence
  Description of Artificial Sequence: Synthetic oligonucleotide
uaggugugcgagugcagaa

SEQ ID NO: 1052914 - RNA, 19 nt, Artificial Sequence
  Description of Artificial Sequence: Synthetic oligonucleotide
gcagaugccggauggacca

SEQ ID NO: 1052915 - RNA, 19 nt, Artificial Sequence
  Description of Artificial Sequence: Synthetic oligonucleotide
gcugcuauuccucuccaga

SEQ ID NO: 1052916 - RNA, 19 nt, Artificial Sequence
  Description of Artificial Sequence: Synthetic oligonucleotide
cacggggucccuaggacuc

SEQ ID NO: 1052917 - RNA, 19 nt, Artificial Sequence
  Description of Artificial Sequence: Synthetic oligonucleotide
aggugugcgagugcagaag

SEQ ID NO: 1052918 - RNA, 19 nt, Artificial Sequence
  Description of Artificial Sequence: Synthetic oligonucleotide
cauugguguagaauccgaa

SEQ ID NO: 1052919 - RNA, 19 nt, Artificial Sequence
  Description of Artificial Sequence: Synthetic oligonucleotide
ccgaucaccacgugaaaac

SEQ ID NO: 1052920 - RNA, 19 nt, Artificial Sequence
  Description of Artificial Sequence: Synthetic oligonucleotide
ugacuuuggacaggccuuc

SEQ ID NO: 1052921 - RNA, 19 nt, Artificial Sequence
  Description of Artificial Sequence: Synthetic oligonucleotide
guaaggguuguccccagcu

SEQ ID NO: 1052922 - RNA, 19 nt, Artificial Sequence
  Description of Artificial Sequence: Synthetic oligonucleotide
cugaaucccaccuuccgcu

SEQ ID NO: 1052923 - RNA, 19 nt, Artificial Sequence
  Description of Artificial Sequence: Synthetic oligonucleotide
uaagauccaccaggaacaa

SEQ ID NO: 1052924 - RNA, 19 nt, Artificial Sequence
  Description of Artificial Sequence: Synthetic oligonucleotide
acauuagacaggaccugca

SEQ ID NO: 1052925 - RNA, 19 nt, Artificial Sequence
  Description of Artificial Sequence: Synthetic oligonucleotide
aguuggaugucagcucgcu

SEQ ID NO: 1052926 - RNA, 19 nt, Artificial Sequence
  Description of Artificial Sequence: Synthetic oligonucleotide
gauggcaccacagcagaua

SEQ ID NO: 1052927 - RNA, 19 nt, Artificial Sequence
  Description of Artificial Sequence: Synthetic oligonucleotide
cugaaguuguaugaguugu

SEQ ID NO: 1052928 - RNA, 19 nt, Artificial Sequence
  Description of Artificial Sequence: Synthetic oligonucleotide
ugcuccccauacuuucgga

SEQ ID NO: 1052929 - RNA, 19 nt, Artificial Sequence
  Description of Artificial Sequence: Synthetic oligonucleotide
uggauacugcccgaucgaa

SEQ ID NO: 1052930 - RNA, 19 nt, Artificial Sequence
  Description of Artificial Sequence: Synthetic oligonucleotide
ggucccuaggacucucugc

SEQ ID NO: 1052931 - RNA, 19 nt, Artificial Sequence
  Description of Artificial Sequence: Synthetic oligonucleotide
cugguacagccacugccac

SEQ ID NO: 1052932 - RNA, 19 nt, Artificial Sequence
  Description of Artificial Sequence: Synthetic oligonucleotide
ucucucggaucaucacagu

SEQ ID NO: 1052933 - RNA, 19 nt, Artificial Sequence
  Description of Artificial Sequence: Synthetic oligonucleotide
gccgaucaaggcaauagug

SEQ ID NO: 1052934 - RNA, 19 nt, Artificial Sequence
  Description of Artificial Sequence: Synthetic oligonucleotide
ucggugccuuguuggcacg

SEQ ID NO: 1052935 - RNA, 19 nt, Artificial Sequence
  Description of Artificial Sequence: Synthetic oligonucleotide
ggaagucacaacaguuccc

SEQ ID NO: 1052936 - RNA, 19 nt, Artificial Sequence
  Description of Artificial Sequence: Synthetic oligonucleotide
cauugcgcugggcucccgc

SEQ ID NO: 1052937 - RNA, 19 nt, Artificial Sequence
  Description of Artificial Sequence: Synthetic oligonucleotide
cgagugaaguagauguagc

SEQ ID NO: 1052938 - RNA, 19 nt, Artificial Sequence
  Description of Artificial Sequence: Synthetic oligonucleotide
aaggcccagccugagccga

SEQ ID NO: 1052939 - RNA, 19 nt, Artificial Sequence
  Description of Artificial Sequence: Synthetic oligonucleotide
cauccucggugccuuguug

SEQ ID NO: 1052940 - RNA, 19 nt, Artificial Sequence
  Description of Artificial Sequence: Synthetic oligonucleotide
augacggcgaggccuucga

SEQ ID NO: 1052941 - RNA, 19 nt, Artificial Sequence
  Description of Artificial Sequence: Synthetic oligonucleotide
cagaguccgucaucacuug

SEQ ID NO: 1052942 - RNA, 19 nt, Artificial Sequence
  Description of Artificial Sequence: Synthetic oligonucleotide
agacgguggaugcggccug

SEQ ID NO: 1052943 - RNA, 19 nt, Artificial Sequence
  Description of Artificial Sequence: Synthetic oligonucleotide
uugccgggauccgaguugu

SEQ ID NO: 1052944 - RNA, 19 nt, Artificial Sequence
  Description of Artificial Sequence: Synthetic oligonucleotide
ccgaucaaggcaauaguga

SEQ ID NO: 1052945 - RNA, 19 nt, Artificial Sequence
  Description of Artificial Sequence: Synthetic oligonucleotide
gugugauauagugcaugac

SEQ ID NO: 1052946 - RNA, 19 nt, Artificial Sequence
  Description of Artificial Sequence: Synthetic oligonucleotide
gaauccgaagcuguucagu

SEQ ID NO: 1052947 - RNA, 19 nt, Artificial Sequence
  Description of Artificial Sequence: Synthetic oligonucleotide
gggacccacauccucggug

SEQ ID NO: 1052948 - RNA, 19 nt, Artificial Sequence
  Description of Artificial Sequence: Synthetic oligonucleotide
gggaguuccggcucgagua

SEQ ID NO: 1052949 - RNA, 19 nt, Artificial Sequence
  Description of Artificial Sequence: Synthetic oligonucleotide
gaugccggauggaccacac

SEQ ID NO: 1052950 - RNA, 19 nt, Artificial Sequence
  Description of Artificial Sequence: Synthetic oligonucleotide
gaaguaggcucagcuccac

SEQ ID NO: 1052951 - RNA, 19 nt, Artificial Sequence
  Description of Artificial Sequence: Synthetic oligonucleotide
aacucgacucaagcugaau

SEQ ID NO: 1052952 - RNA, 19 nt, Artificial Sequence
  Description of Artificial Sequence: Synthetic oligonucleotide
ccucacgggauucaaugac

SEQ ID NO: 1052953 - RNA, 19 nt, Artificial Sequence
  Description of Artificial Sequence: Synthetic oligonucleotide
gcccgaucgaacucgacuc

SEQ ID NO: 1052954 - RNA, 19 nt, Artificial Sequence
  Description of Artificial Sequence: Synthetic oligonucleotide
ccuaggacucucugcacac

SEQ ID NO: 1052955 - RNA, 19 nt, Artificial Sequence
  Description of Artificial Sequence: Synthetic oligonucleotide
gcgacaagcauccccaucu

SEQ ID NO: 1052956 - RNA, 19 nt, Artificial Sequence
  Description of Artificial Sequence: Synthetic oligonucleotide
cugugagcgccagacggug

SEQ ID NO: 1052957 - RNA, 19 nt, Artificial Sequence
  Description of Artificial Sequence: Synthetic oligonucleotide
gugagcgccagacggugga

SEQ ID NO: 1052958 - RNA, 19 nt, Artificial Sequence
  Description of Artificial Sequence: Synthetic oligonucleotide
gccaguguggaacucucca

SEQ ID NO: 1052959 - RNA, 19 nt, Artificial Sequence
  Description of Artificial Sequence: Synthetic oligonucleotide
agagggcauuccugggagu

SEQ ID NO: 1052960 - RNA, 19 nt, Artificial Sequence
  Description of Artificial Sequence: Synthetic oligonucleotide
gcaggggcgaucagggagg

SEQ ID NO: 1052961 - RNA, 19 nt, Artificial Sequence
  Description of Artificial Sequence: Synthetic oligonucleotide
gauccgaguuguaacaguu

SEQ ID NO: 1052962 - RNA, 19 nt, Artificial Sequence
  Description of Artificial Sequence: Synthetic oligonucleotide
gaagggcgccuuucaacaa

SEQ ID NO: 1052963 - RNA, 19 nt, Artificial Sequence
  Description of Artificial Sequence: Synthetic oligonucleotide
ucgaugggguggccuuggc

SEQ ID NO: 1052964 - RNA, 19 nt, Artificial Sequence
  Description of Artificial Sequence: Synthetic oligonucleotide
ggcgaaguaggcucagcuc

SEQ ID NO: 1052965 - RNA, 19 nt, Artificial Sequence
  Description of Artificial Sequence: Synthetic oligonucleotide
uggcgaugaugcgagugaa

SEQ ID NO: 1052966 - RNA, 19 nt, Artificial Sequence
  Description of Artificial Sequence: Synthetic oligonucleotide
cccaucagugccagaugcg

SEQ ID NO: 1052967 - RNA, 19 nt, Artificial Sequence
  Description of Artificial Sequence: Synthetic oligonucleotide
ggagccgaucaccacguga

SEQ ID NO: 1052968 - RNA, 19 nt, Artificial Sequence
  Description of Artificial Sequence: Synthetic oligonucleotide
gguucacugccaccuuccc

SEQ ID NO: 1052969 - RNA, 19 nt, Artificial Sequence
  Description of Artificial Sequence: Synthetic oligonucleotide
gguaaggguuguccccagc

SEQ ID NO: 1052970 - RNA, 19 nt, Artificial Sequence
  Description of Artificial Sequence: Synthetic oligonucleotide
gagcgccagacgguggaug

SEQ ID NO: 1052971 - RNA, 19 nt, Artificial Sequence
  Description of Artificial Sequence: Synthetic oligonucleotide
cugggaagucacaacaguu

SEQ ID NO: 1052972 - RNA, 19 nt, Artificial Sequence
  Description of Artificial Sequence: Synthetic oligonucleotide
ccgggauccgaguuguaac

SEQ ID NO: 1052973 - RNA, 19 nt, Artificial Sequence
  Description of Artificial Sequence: Synthetic oligonucleotide
ggcugucuuguugacuuug

SEQ ID NO: 1052974 - RNA, 19 nt, Artificial Sequence
  Description of Artificial Sequence: Synthetic oligonucleotide
uccuugccgggauccgagu

SEQ ID NO: 1052975 - RNA, 19 nt, Artificial Sequence
  Description of Artificial Sequence: Synthetic oligonucleotide
gcccaggcgaaguaggcuc

SEQ ID NO: 1052976 - RNA, 19 nt, Artificial Sequence
  Description of Artificial Sequence: Synthetic oligonucleotide
ccgaguuguaacaguugug

SEQ ID NO: 1052977 - RNA, 19 nt, Artificial Sequence
  Description of Artificial Sequence: Synthetic oligonucleotide
acauccucggugccuuguu

SEQ ID NO: 1052978 - RNA, 19 nt, Artificial Sequence
  Description of Artificial Sequence: Synthetic oligonucleotide
ggaucaucacagugagguc

SEQ ID NO: 1052979 - RNA, 19 nt, Artificial Sequence
  Description of Artificial Sequence: Synthetic oligonucleotide
cagggcggccaugagccag

SEQ ID NO: 1052980 - RNA, 19 nt, Artificial Sequence
  Description of Artificial Sequence: Synthetic oligonucleotide
ccugagccgaucaaggcaa

SEQ ID NO: 1052981 - RNA, 19 nt, Artificial Sequence
  Description of Artificial Sequence: Synthetic oligonucleotide
gccacauuagacaggaccu

SEQ ID NO: 1052982 - RNA, 19 nt, Artificial Sequence
  Description of Artificial Sequence: Synthetic oligonucleotide
cuucgaugggguggccuug

SEQ ID NO: 1052983 - RNA, 19 nt, Artificial Sequence
  Description of Artificial Sequence: Synthetic oligonucleotide
ugagccgaucaaggcaaua

SEQ ID NO: 1052984 - RNA, 19 nt, Artificial Sequence
  Description of Artificial Sequence: Synthetic oligonucleotide
ggauacugcccgaucgaac

SEQ ID NO: 1052985 - RNA, 19 nt, Artificial Sequence
  Description of Artificial Sequence: Synthetic oligonucleotide
agggcgccuuucaacaagu

SEQ ID NO: 1052986 - RNA, 19 nt, Artificial Sequence
  Description of Artificial Sequence: Synthetic oligonucleotide
guguggaacucuccaccaa

SEQ ID NO: 1052987 - RNA, 19 nt, Artificial Sequence
  Description of Artificial Sequence: Synthetic oligonucleotide
ugacggcgaggccuucgau

SEQ ID NO: 1052988 - RNA, 19 nt, Artificial Sequence
  Description of Artificial Sequence: Synthetic oligonucleotide
gccuuccucagcccuggag

SEQ ID NO: 1052989 - RNA, 19 nt, Artificial Sequence
  Description of Artificial Sequence: Synthetic oligonucleotide
ggacaggccuucccggaac

SEQ ID NO: 1052990 - RNA, 19 nt, Artificial Sequence
  Description of Artificial Sequence: Synthetic oligonucleotide
ggaaccauugguguagaau

SEQ ID NO: 1052991 - RNA, 19 nt, Artificial Sequence
  Description of Artificial Sequence: Synthetic oligonucleotide
ggcgaugaugcgagugaag

SEQ ID NO: 1052992 - RNA, 19 nt, Artificial Sequence
  Description of Artificial Sequence: Synthetic oligonucleotide
caagcauccccaucugcau

SEQ ID NO: 1052993 - RNA, 19 nt, Artificial Sequence
  Description of Artificial Sequence: Synthetic oligonucleotide
ucuuucccgcugggguccc

SEQ ID NO: 1052994 - RNA, 19 nt, Artificial Sequence
  Description of Artificial Sequence: Synthetic oligonucleotide
gaaagcaggcagacauggu

SEQ ID NO: 1052995 - RNA, 19 nt, Artificial Sequence
  Description of Artificial Sequence: Synthetic oligonucleotide
gugcgagugcagaaggucu

SEQ ID NO: 1052996 - RNA, 19 nt, Artificial Sequence
  Description of Artificial Sequence: Synthetic oligonucleotide
ccauugguguagaauccga

SEQ ID NO: 1052997 - RNA, 19 nt, Artificial Sequence
  Description of Artificial Sequence: Synthetic oligonucleotide
cccgcuggggucccgagug

SEQ ID NO: 1052998 - RNA, 19 nt, Artificial Sequence
  Description of Artificial Sequence: Synthetic oligonucleotide
cagcccuggagccgaucac

SEQ ID NO: 1052999 - RNA, 19 nt, Artificial Sequence
  Description of Artificial Sequence: Synthetic oligonucleotide
caaguguaggugugcgagu

SEQ ID NO: 1053000 - RNA, 19 nt, Artificial Sequence
  Description of Artificial Sequence: Synthetic oligonucleotide
gaacucgacucaagcugaa

SEQ ID NO: 1053001 - RNA, 19 nt, Artificial Sequence
  Description of Artificial Sequence: Synthetic oligonucleotide
gcgaucagggaggaggcca

SEQ ID NO: 1053002 - RNA, 19 nt, Artificial Sequence
  Description of Artificial Sequence: Synthetic oligonucleotide
cuggagccgaucaccacgu

SEQ ID NO: 1053003 - RNA, 19 nt, Artificial Sequence
  Description of Artificial Sequence: Synthetic oligonucleotide
ccacauuagacaggaccug

SEQ ID NO: 1053004 - RNA, 19 nt, Artificial Sequence
  Description of Artificial Sequence: Synthetic oligonucleotide
cgaacucgacucaagcuga

SEQ ID NO: 1053005 - RNA, 19 nt, Artificial Sequence
  Description of Artificial Sequence: Synthetic oligonucleotide
gccugcagccagaaagcag

SEQ ID NO: 1053006 - RNA, 19 nt, Artificial Sequence
  Description of Artificial Sequence: Synthetic oligonucleotide
ggauccgaguuguaacagu

SEQ ID NO: 1053007 - RNA, 19 nt, Artificial Sequence
  Description of Artificial Sequence: Synthetic oligonucleotide
cgaucgaacucgacucaag

SEQ ID NO: 1053008 - RNA, 19 nt, Artificial Sequence
  Description of Artificial Sequence: Synthetic oligonucleotide
ccagacgguggaugcggcc

SEQ ID NO: 1053009 - RNA, 19 nt, Artificial Sequence
  Description of Artificial Sequence: Synthetic oligonucleotide
uggggucccgagugggcuu

SEQ ID NO: 1053010 - RNA, 19 nt, Artificial Sequence
  Description of Artificial Sequence: Synthetic oligonucleotide
acugcccgaucgaacucga

SEQ ID NO: 1053011 - RNA, 19 nt, Artificial Sequence
  Description of Artificial Sequence: Synthetic oligonucleotide
cugcccgaucgaacucgac

SEQ ID NO: 1053012 - RNA, 19 nt, Artificial Sequence
  Description of Artificial Sequence: Synthetic oligonucleotide
cuucacgaaggcccagccu

SEQ ID NO: 1053013 - RNA, 19 nt, Artificial Sequence
  Description of Artificial Sequence: Synthetic oligonucleotide
cugggaguuccggcucgag

SEQ ID NO: 1053014 - RNA, 19 nt, Artificial Sequence
  Description of Artificial Sequence: Synthetic oligonucleotide
ggcauuccugggaguuccg

SEQ ID NO: 1053015 - RNA, 19 nt, Artificial Sequence
  Description of Artificial Sequence: Synthetic oligonucleotide
gaccaggaaguugcugcua

SEQ ID NO: 1053016 - RNA, 19 nt, Artificial Sequence
  Description of Artificial Sequence: Synthetic oligonucleotide
uguuggcacggggucccua

SEQ ID NO: 1053017 - RNA, 19 nt, Artificial Sequence
  Description of Artificial Sequence: Synthetic oligonucleotide
gccgaucaccacgugaaaa

SEQ ID NO: 1053018 - RNA, 19 nt, Artificial Sequence
  Description of Artificial Sequence: Synthetic oligonucleotide
ggaugcggccugagcagcc

SEQ ID NO: 1053019 - RNA, 19 nt, Artificial Sequence
  Description of Artificial Sequence: Synthetic oligonucleotide
guuggaugucagcucgcuu

SEQ ID NO: 1053020 - RNA, 19 nt, Artificial Sequence
  Description of Artificial Sequence: Synthetic oligonucleotide
ccagaguccgucaucacuu

SEQ ID NO: 1053021 - RNA, 19 nt, Artificial Sequence
  Description of Artificial Sequence: Synthetic oligonucleotide
augagccaguggaucuuaa

SEQ ID NO: 1053022 - RNA, 19 nt, Artificial Sequence
  Description of Artificial Sequence: Synthetic oligonucleotide
ggcggccaugagccagugg

SEQ ID NO: 1053023 - RNA, 19 nt, Artificial Sequence
  Description of Artificial Sequence: Synthetic oligonucleotide
cagaugccggauggaccac

SEQ ID NO: 1053024 - RNA, 19 nt, Artificial Sequence
  Description of Artificial Sequence: Synthetic oligonucleotide
agggcggccaugagccagu

SEQ ID NO: 1053025 - RNA, 19 nt, Artificial Sequence
  Description of Artificial Sequence: Synthetic oligonucleotide
cgaucaaggcaauagugau

SEQ ID NO: 1053026 - RNA, 19 nt, Artificial Sequence
  Description of Artificial Sequence: Synthetic oligonucleotide
cgggauccgaguuguaaca

SEQ ID NO: 1053027 - RNA, 19 nt, Artificial Sequence
  Description of Artificial Sequence: Synthetic oligonucleotide
ccggcucgaguaggaaugg

SEQ ID NO: 1053028 - RNA, 19 nt, Artificial Sequence
  Description of Artificial Sequence: Synthetic oligonucleotide
ccggauggaccacacaacu

SEQ ID NO: 1053029 - RNA, 19 nt, Artificial Sequence
  Description of Artificial Sequence: Synthetic oligonucleotide
gcguccugcagaugccgga

SEQ ID NO: 1053030 - RNA, 19 nt, Artificial Sequence
  Description of Artificial Sequence: Synthetic oligonucleotide
cagaugcguccugcagaug

SEQ ID NO: 1053031 - RNA, 19 nt, Artificial Sequence
  Description of Artificial Sequence: Synthetic oligonucleotide
cgacucaagcugaauccca

SEQ ID NO: 1053032 - RNA, 19 nt, Artificial Sequence
  Description of Artificial Sequence: Synthetic oligonucleotide
ccagggaaccauuggugua

SEQ ID NO: 1053033 - RNA, 19 nt, Artificial Sequence
  Description of Artificial Sequence: Synthetic oligonucleotide
ggaauggauacugcccgau

SEQ ID NO: 1053034 - RNA, 19 nt, Artificial Sequence
  Description of Artificial Sequence: Synthetic oligonucleotide
cacgggauucaaugacaau

SEQ ID NO: 1053035 - RNA, 19 nt, Artificial Sequence
  Description of Artificial Sequence: Synthetic oligonucleotide
aggggcgaucagggaggag

SEQ ID NO: 1053036 - RNA, 19 nt, Artificial Sequence
  Description of Artificial Sequence: Synthetic oligonucleotide
gcgccagacgguggaugcg

SEQ ID NO: 1053037 - RNA, 19 nt, Artificial Sequence
  Description of Artificial Sequence: Synthetic oligonucleotide
gcacggggucccuaggacu

SEQ ID NO: 1053038 - RNA, 19 nt, Artificial Sequence
  Description of Artificial Sequence: Synthetic oligonucleotide
gugugcgagugcagaaggu

SEQ ID NO: 1053039 - RNA, 19 nt, Artificial Sequence
  Description of Artificial Sequence: Synthetic oligonucleotide
ggucccgagugggcuuggg

SEQ ID NO: 1053040 - RNA, 19 nt, Artificial Sequence
  Description of Artificial Sequence: Synthetic oligonucleotide
ugccgggauccgaguugua

SEQ ID NO: 1053041 - RNA, 19 nt, Artificial Sequence
  Description of Artificial Sequence: Synthetic oligonucleotide
cgugaaaacugaaguugua

SEQ ID NO: 1053042 - RNA, 19 nt, Artificial Sequence
  Description of Artificial Sequence: Synthetic oligonucleotide
cccgaucgaacucgacuca

SEQ ID NO: 1053043 - RNA, 19 nt, Artificial Sequence
  Description of Artificial Sequence: Synthetic oligonucleotide
gcgagugcagaaggucuga

SEQ ID NO: 1053044 - RNA, 19 nt, Artificial Sequence
  Description of Artificial Sequence: Synthetic oligonucleotide
gccagacgguggaugcggc

SEQ ID NO: 1053045 - RNA, 19 nt, Artificial Sequence
  Description of Artificial Sequence: Synthetic oligonucleotide
caguucccggccacuggcu

SEQ ID NO: 1053046 - RNA, 19 nt, Artificial Sequence
  Description of Artificial Sequence: Synthetic oligonucleotide
ccauacuuucggacuugaa

SEQ ID NO: 1053047 - RNA, 19 nt, Artificial Sequence
  Description of Artificial Sequence: Synthetic oligonucleotide
ggccuuggcuguugaugaa

SEQ ID NO: 1053048 - RNA, 19 nt, Artificial Sequence
  Description of Artificial Sequence: Synthetic oligonucleotide
cagcagcgacaagcauccc

SEQ ID NO: 1053049 - RNA, 19 nt, Artificial Sequence
  Description of Artificial Sequence: Synthetic oligonucleotide
cacauccucggugccuugu

SEQ ID NO: 1053050 - RNA, 19 nt, Artificial Sequence
  Description of Artificial Sequence: Synthetic oligonucleotide
caggggcgaucagggagga

SEQ ID NO: 1053051 - RNA, 19 nt, Artificial Sequence
  Description of Artificial Sequence: Synthetic oligonucleotide
ccuugucugacagcauaua

SEQ ID NO: 1053052 - RNA, 19 nt, Artificial Sequence
  Description of Artificial Sequence: Synthetic oligonucleotide
ccacauccucggugccuug

SEQ ID NO: 1053053 - RNA, 19 nt, Artificial Sequence
  Description of Artificial Sequence: Synthetic oligonucleotide
cugagccgaucaaggcaau

SEQ ID NO: 1053054 - RNA, 19 nt, Artificial Sequence
  Description of Artificial Sequence: Synthetic oligonucleotide
ccgaucgaacucgacucaa

SEQ ID NO: 1053055 - RNA, 19 nt, Artificial Sequence
  Description of Artificial Sequence: Synthetic oligonucleotide
gcauugcgcugggcucccg

SEQ ID NO: 1053056 - RNA, 19 nt, Artificial Sequence
  Description of Artificial Sequence: Synthetic oligonucleotide
ccuucgaugggguggccuu

SEQ ID NO: 1053057 - RNA, 19 nt, Artificial Sequence
  Description of Artificial Sequence: Synthetic oligonucleotide
ggauggcgaugaugcgagu

SEQ ID NO: 1053058 - RNA, 19 nt, Artificial Sequence
  Description of Artificial Sequence: Synthetic oligonucleotide
ggggugccuucagggucug

SEQ ID NO: 1053059 - RNA, 19 nt, Artificial Sequence
  Description of Artificial Sequence: Synthetic oligonucleotide
ggguuguccccagcuggcu

SEQ ID NO: 1053060 - RNA, 19 nt, Artificial Sequence
  Description of Artificial Sequence: Synthetic oligonucleotide
cggcgaggccuucgauggg

SEQ ID NO: 1053061 - RNA, 19 nt, Artificial Sequence
  Description of Artificial Sequence: Synthetic oligonucleotide
ggcacccuccucacgggau

SEQ ID NO: 1053062 - RNA, 19 nt, Artificial Sequence
  Description of Artificial Sequence: Synthetic oligonucleotide
gcacccuccucacgggauu

SEQ ID NO: 1053063 - RNA, 19 nt, Artificial Sequence
  Description of Artificial Sequence: Synthetic oligonucleotide
ccuugccgggauccgaguu

SEQ ID NO: 1053064 - RNA, 19 nt, Artificial Sequence
  Description of Artificial Sequence: Synthetic oligonucleotide
cggcucgaguaggaaugga

SEQ ID NO: 1053065 - RNA, 19 nt, Artificial Sequence
  Description of Artificial Sequence: Synthetic oligonucleotide
cuaacaacucauuagaccg

SEQ ID NO: 1053066 - RNA, 19 nt, Artificial Sequence
  Description of Artificial Sequence: Synthetic oligonucleotide
caacgaaggacauagaggg

SEQ ID NO: 1053067 - RNA, 19 nt, Artificial Sequence
  Description of Artificial Sequence: Synthetic oligonucleotide
cugacuuagggaaagaggg

SEQ ID NO: 1053068 - RNA, 19 nt, Artificial Sequence
  Description of Artificial Sequence: Synthetic oligonucleotide
ucuauccugaucuugcucg

SEQ ID NO: 1053069 - RNA, 19 nt, Artificial Sequence
  Description of Artificial Sequence: Synthetic oligonucleotide
ucaacgaaggacauagagg

SEQ ID NO: 1053070 - RNA, 19 nt, Artificial Sequence
  Description of Artificial Sequence: Synthetic oligonucleotide
ucaccaaaacgcaaggugg

SEQ ID NO: 1053071 - RNA, 19 nt, Artificial Sequence
  Description of Artificial Sequence: Synthetic oligonucleotide
uuuaagacuggccgaaggg

SEQ ID NO: 1053072 - RNA, 19 nt, Artificial Sequence
  Description of Artificial Sequence: Synthetic oligonucleotide
ucuucaacgaaggacauag

SEQ ID NO: 1053073 - RNA, 19 nt, Artificial Sequence
  Description of Artificial Sequence: Synthetic oligonucleotide
uucaacgaaggacauagag

SEQ ID NO: 1053074 - RNA, 19 nt, Artificial Sequence
  Description of Artificial Sequence: Synthetic oligonucleotide
uguaagucacuacugauaa

SEQ ID NO: 1053075 - RNA, 19 nt, Artificial Sequence
  Description of Artificial Sequence: Synthetic oligonucleotide
uuaacuuguggcuugggca

SEQ ID NO: 1053076 - RNA, 19 nt, Artificial Sequence
  Description of Artificial Sequence: Synthetic oligonucleotide
agacauccauauuucaacc

SEQ ID NO: 1053077 - RNA, 19 nt, Artificial Sequence
  Description of Artificial Sequence: Synthetic oligonucleotide
agucgaacaaguuuccuuc

SEQ ID NO: 1053078 - RNA, 19 nt, Artificial Sequence
  Description of Artificial Sequence: Synthetic oligonucleotide
uuaagauucccauggagac

SEQ ID NO: 1053079 - RNA, 19 nt, Artificial Sequence
  Description of Artificial Sequence: Synthetic oligonucleotide
ucacaccaaauccauaucc

SEQ ID NO: 1053080 - RNA, 19 nt, Artificial Sequence
  Description of Artificial Sequence: Synthetic oligonucleotide
ugggcuuucaaagucauag

SEQ ID NO: 1053081 - RNA, 19 nt, Artificial Sequence
  Description of Artificial Sequence: Synthetic oligonucleotide
ugaccuaacaacucauuag

SEQ ID NO: 1053082 - RNA, 19 nt, Artificial Sequence
  Description of Artificial Sequence: Synthetic oligonucleotide
ucugcaauccagaggaacc

SEQ ID NO: 1053083 - RNA, 19 nt, Artificial Sequence
  Description of Artificial Sequence: Synthetic oligonucleotide
uguguguuaauuuaaucau

SEQ ID NO: 1053084 - RNA, 19 nt, Artificial Sequence
  Description of Artificial Sequence: Synthetic oligonucleotide
augagcuaccuuuucaagg

SEQ ID NO: 1053085 - RNA, 19 nt, Artificial Sequence
  Description of Artificial Sequence: Synthetic oligonucleotide
aguaucaggagguauagau

SEQ ID NO: 1053086 - RNA, 19 nt, Artificial Sequence
  Description of Artificial Sequence: Synthetic oligonucleotide
ugaauuccguuucaaagga

SEQ ID NO: 1053087 - RNA, 19 nt, Artificial Sequence
  Description of Artificial Sequence: Synthetic oligonucleotide
aaugagcuaccuuuucaag

SEQ ID NO: 1053088 - RNA, 19 nt, Artificial Sequence
  Description of Artificial Sequence: Synthetic oligonucleotide
auaucuuguaucuuuggca

SEQ ID NO: 1053089 - RNA, 19 nt, Artificial Sequence
  Description of Artificial Sequence: Synthetic oligonucleotide
acuuaagacaaaccccugg

SEQ ID NO: 1053090 - RNA, 19 nt, Artificial Sequence
  Description of Artificial Sequence: Synthetic oligonucleotide
auauccccggcucucaagc

SEQ ID NO: 1053091 - RNA, 19 nt, Artificial Sequence
  Description of Artificial Sequence: Synthetic oligonucleotide
auagagggcacacugauau

SEQ ID NO: 1053092 - RNA, 19 nt, Artificial Sequence
  Description of Artificial Sequence: Synthetic oligonucleotide
acccguuuaagacuggccg

SEQ ID NO: 1053093 - RNA, 19 nt, Artificial Sequence
  Description of Artificial Sequence: Synthetic oligonucleotide
uugcauauaucuuguaucu

SEQ ID NO: 1053094 - RNA, 19 nt, Artificial Sequence
  Description of Artificial Sequence: Synthetic oligonucleotide
uuguuugcgugacugcugg

SEQ ID NO: 1053095 - RNA, 19 nt, Artificial Sequence
  Description of Artificial Sequence: Synthetic oligonucleotide
ugagcuaccuuuucaagga

SEQ ID NO: 1053096 - RNA, 19 nt, Artificial Sequence
  Description of Artificial Sequence: Synthetic oligonucleotide
gagacauccauauuucaac

SEQ ID NO: 1053097 - RNA, 19 nt, Artificial Sequence
  Description of Artificial Sequence: Synthetic oligonucleotide
uuaagacaaaccccuggag

SEQ ID NO: 1053098 - RNA, 19 nt, Artificial Sequence
  Description of Artificial Sequence: Synthetic oligonucleotide
ugauauuugggcuuucaaa

SEQ ID NO: 1053099 - RNA, 19 nt, Artificial Sequence
  Description of Artificial Sequence: Synthetic oligonucleotide
ugcguuacuccuaaaaguc

SEQ ID NO: 1053100 - RNA, 19 nt, Artificial Sequence
  Description of Artificial Sequence: Synthetic oligonucleotide
aacucauuagaccgacguc

SEQ ID NO: 1053101 - RNA, 19 nt, Artificial Sequence
  Description of Artificial Sequence: Synthetic oligonucleotide
agauuuacagaguucugug

SEQ ID NO: 1053102 - RNA, 19 nt, Artificial Sequence
  Description of Artificial Sequence: Synthetic oligonucleotide
uuguaucuuuggcagacag

SEQ ID NO: 1053103 - RNA, 19 nt, Artificial Sequence
  Description of Artificial Sequence: Synthetic oligonucleotide
guugcguuacuccuaaaag

SEQ ID NO: 1053104 - RNA, 19 nt, Artificial Sequence
  Description of Artificial Sequence: Synthetic oligonucleotide
aacaacucauuagaccgac

SEQ ID NO: 1053105 - RNA, 19 nt, Artificial Sequence
  Description of Artificial Sequence: Synthetic oligonucleotide
aauuccguuucaaaggaug

SEQ ID NO: 1053106 - RNA, 19 nt, Artificial Sequence
  Description of Artificial Sequence: Synthetic oligonucleotide
ccuaagaagaccuucagac

SEQ ID NO: 1053107 - RNA, 19 nt, Artificial Sequence
  Description of Artificial Sequence: Synthetic oligonucleotide
uguagcagugcacauccgc

SEQ ID NO: 1053108 - RNA, 19 nt, Artificial Sequence
  Description of Artificial Sequence: Synthetic oligonucleotide
uagaccgacgucaucacca

SEQ ID NO: 1053109 - RNA, 19 nt, Artificial Sequence
  Description of Artificial Sequence: Synthetic oligonucleotide
aucgagucgaacaaguuuc

SEQ ID NO: 1053110 - RNA, 19 nt, Artificial Sequence
  Description of Artificial Sequence: Synthetic oligonucleotide
uuacuguaagucacuacug

SEQ ID NO: 1053111 - RNA, 19 nt, Artificial Sequence
  Description of Artificial Sequence: Synthetic oligonucleotide
gaacaaguuuccuucuacc

SEQ ID NO: 1053112 - RNA, 19 nt, Artificial Sequence
  Description of Artificial Sequence: Synthetic oligonucleotide
cuaggcaccacaaggcucc

SEQ ID NO: 1053113 - RNA, 19 nt, Artificial Sequence
  Description of Artificial Sequence: Synthetic oligonucleotide
guauagauuccccuucucc

SEQ ID NO: 1053114 - RNA, 19 nt, Artificial Sequence
  Description of Artificial Sequence: Synthetic oligonucleotide
acagaguucugugacaguc

SEQ ID NO: 1053115 - RNA, 19 nt, Artificial Sequence
  Description of Artificial Sequence: Synthetic oligonucleotide
uugcguuacuccuaaaagu

SEQ ID NO: 1053116 - RNA, 19 nt, Artificial Sequence
  Description of Artificial Sequence: Synthetic oligonucleotide
uacuccuaaaaguccaccc

SEQ ID NO: 1053117 - RNA, 19 nt, Artificial Sequence
  Description of Artificial Sequence: Synthetic oligonucleotide
gaccuaacaacucauuaga

SEQ ID NO: 1053118 - RNA, 19 nt, Artificial Sequence
  Description of Artificial Sequence: Synthetic oligonucleotide
uguugcguuacuccuaaaa

SEQ ID NO: 1053119 - RNA, 19 nt, Artificial Sequence
  Description of Artificial Sequence: Synthetic oligonucleotide
aguagaguccuguagcagu

SEQ ID NO: 1053120 - RNA, 19 nt, Artificial Sequence
  Description of Artificial Sequence: Synthetic oligonucleotide
agucacuacugauaaguug

SEQ ID NO: 1053121 - RNA, 19 nt, Artificial Sequence
  Description of Artificial Sequence: Synthetic oligonucleotide
cuuaacuuguggcuugggc

SEQ ID NO: 1053122 - RNA, 19 nt, Artificial Sequence
  Description of Artificial Sequence: Synthetic oligonucleotide
uacuagugggcacugcacc

SEQ ID NO: 1053123 - RNA, 19 nt, Artificial Sequence
  Description of Artificial Sequence: Synthetic oligonucleotide
ugacacccguuuaagacug

SEQ ID NO: 1053124 - RNA, 19 nt, Artificial Sequence
  Description of Artificial Sequence: Synthetic oligonucleotide
uuccuaggcaccacaaggc

SEQ ID NO: 1053125 - RNA, 19 nt, Artificial Sequence
  Description of Artificial Sequence: Synthetic oligonucleotide
acucauuagaccgacguca

SEQ ID NO: 1053126 - RNA, 19 nt, Artificial Sequence
  Description of Artificial Sequence: Synthetic oligonucleotide
auuagaccgacgucaucac

SEQ ID NO: 1053127 - RNA, 19 nt, Artificial Sequence
  Description of Artificial Sequence: Synthetic oligonucleotide
gauacuagugggcacugca

SEQ ID NO: 1053128 - RNA, 19 nt, Artificial Sequence
  Description of Artificial Sequence: Synthetic oligonucleotide
uaacuuguggcuugggcac

SEQ ID NO: 1053129 - RNA, 19 nt, Artificial Sequence
  Description of Artificial Sequence: Synthetic oligonucleotide
uugcugaucgagucgaaca

SEQ ID NO: 1053130 - RNA, 19 nt, Artificial Sequence
  Description of Artificial Sequence: Synthetic oligonucleotide
ugacaucuccauaguagag

SEQ ID NO: 1053131 - RNA, 19 nt, Artificial Sequence
  Description of Artificial Sequence: Synthetic oligonucleotide
ucuggauccgccauguuuu

SEQ ID NO: 1053132 - RNA, 19 nt, Artificial Sequence
  Description of Artificial Sequence: Synthetic oligonucleotide
ccauauuucaaccugcuug

SEQ ID NO: 1053133 - RNA, 19 nt, Artificial Sequence
  Description of Artificial Sequence: Synthetic oligonucleotide
acugacuuagggaaagagg

SEQ ID NO: 1053134 - RNA, 19 nt, Artificial Sequence
  Description of Artificial Sequence: Synthetic oligonucleotide
aaucacccagaugacaucu

SEQ ID NO: 1053135 - RNA, 19 nt, Artificial Sequence
  Description of Artificial Sequence: Synthetic oligonucleotide
caaaacgcaagguggcugc

SEQ ID NO: 1053136 - RNA, 19 nt, Artificial Sequence
  Description of Artificial Sequence: Synthetic oligonucleotide
gaagggguaaggcccgugg

SEQ ID NO: 1053137 - RNA, 19 nt, Artificial Sequence
  Description of Artificial Sequence: Synthetic oligonucleotide
ucaaggacgcacagacagg

SEQ ID NO: 1053138 - RNA, 19 nt, Artificial Sequence
  Description of Artificial Sequence: Synthetic oligonucleotide
ugaguaucaggagguauag

SEQ ID NO: 1053139 - RNA, 19 nt, Artificial Sequence
  Description of Artificial Sequence: Synthetic oligonucleotide
aauccagaggaaccccuug

SEQ ID NO: 1053140 - RNA, 19 nt, Artificial Sequence
  Description of Artificial Sequence: Synthetic oligonucleotide
uccuaaaaguccacccacc

SEQ ID NO: 1053141 - RNA, 19 nt, Artificial Sequence
  Description of Artificial Sequence: Synthetic oligonucleotide
auaguaagcgccaauugcu

SEQ ID NO: 1053142 - RNA, 19 nt, Artificial Sequence
  Description of Artificial Sequence: Synthetic oligonucleotide
ucacccagaugacaucucc

SEQ ID NO: 1053143 - RNA, 19 nt, Artificial Sequence
  Description of Artificial Sequence: Synthetic oligonucleotide
gacgcugacaucugcaauc

SEQ ID NO: 1053144 - RNA, 19 nt, Artificial Sequence
  Description of Artificial Sequence: Synthetic oligonucleotide
gauuccccuucuccuaugg

SEQ ID NO: 1053145 - RNA, 19 nt, Artificial Sequence
  Description of Artificial Sequence: Synthetic oligonucleotide
cuuacuguaagucacuacu

SEQ ID NO: 1053146 - RNA, 19 nt, Artificial Sequence
  Description of Artificial Sequence: Synthetic oligonucleotide
ucuuacagccacucauacc

SEQ ID NO: 1053147 - RNA, 19 nt, Artificial Sequence
  Description of Artificial Sequence: Synthetic oligonucleotide
ccuaacaacucauuagacc

SEQ ID NO: 1053148 - RNA, 19 nt, Artificial Sequence
  Description of Artificial Sequence: Synthetic oligonucleotide
aauccauauccccggcucu

SEQ ID NO: 1053149 - RNA, 19 nt, Artificial Sequence
  Description of Artificial Sequence: Synthetic oligonucleotide
cugagcguaccuaguaggg

SEQ ID NO: 1053150 - RNA, 19 nt, Artificial Sequence
  Description of Artificial Sequence: Synthetic oligonucleotide
uucucgguagccuccacac

SEQ ID NO: 1053151 - RNA, 19 nt, Artificial Sequence
  Description of Artificial Sequence: Synthetic oligonucleotide
uccagaggaaccccuugcc

SEQ ID NO: 1053152 - RNA, 19 nt, Artificial Sequence
  Description of Artificial Sequence: Synthetic oligonucleotide
acuguaagucacuacugau

SEQ ID NO: 1053153 - RNA, 19 nt, Artificial Sequence
  Description of Artificial Sequence: Synthetic oligonucleotide
acucauacccuggucuccc

SEQ ID NO: 1053154 - RNA, 19 nt, Artificial Sequence
  Description of Artificial Sequence: Synthetic oligonucleotide
aggauugaagucucucaug

SEQ ID NO: 1053155 - RNA, 19 nt, Artificial Sequence
  Description of Artificial Sequence: Synthetic oligonucleotide
ugcugaucgagucgaacaa

SEQ ID NO: 1053156 - RNA, 19 nt, Artificial Sequence
  Description of Artificial Sequence: Synthetic oligonucleotide
caccaaaacgcaagguggc

SEQ ID NO: 1053157 - RNA, 19 nt, Artificial Sequence
  Description of Artificial Sequence: Synthetic oligonucleotide
uguuguguguguguguuaa

SEQ ID NO: 1053158 - RNA, 19 nt, Artificial Sequence
  Description of Artificial Sequence: Synthetic oligonucleotide
uucuggauccgccauguuu

SEQ ID NO: 1053159 - RNA, 19 nt, Artificial Sequence
  Description of Artificial Sequence: Synthetic oligonucleotide
uuagaccgacgucaucacc

SEQ ID NO: 1053160 - RNA, 19 nt, Artificial Sequence
  Description of Artificial Sequence: Synthetic oligonucleotide
gaaguaagggcaccagaga

SEQ ID NO: 1053161 - RNA, 19 nt, Artificial Sequence
  Description of Artificial Sequence: Synthetic oligonucleotide
uguguguguguguuaauuu

SEQ ID NO: 1053162 - RNA, 19 nt, Artificial Sequence
  Description of Artificial Sequence: Synthetic oligonucleotide
ucuagccugguuuaagauu

SEQ ID NO: 1053163 - RNA, 19 nt, Artificial Sequence
  Description of Artificial Sequence: Synthetic oligonucleotide
ucuaggguggcaguguccu

SEQ ID NO: 1053164 - RNA, 19 nt, Artificial Sequence
  Description of Artificial Sequence: Synthetic oligonucleotide
guuugcgugacugcugggg

SEQ ID NO: 1053165 - RNA, 19 nt, Artificial Sequence
  Description of Artificial Sequence: Synthetic oligonucleotide
cuugcgauguggcugugug

SEQ ID NO: 1053166 - RNA, 19 nt, Artificial Sequence
  Description of Artificial Sequence: Synthetic oligonucleotide
ggauugaagucucucauga

SEQ ID NO: 1053167 - RNA, 19 nt, Artificial Sequence
  Description of Artificial Sequence: Synthetic oligonucleotide
agacaaaccccuggaggcc

SEQ ID NO: 1053168 - RNA, 19 nt, Artificial Sequence
  Description of Artificial Sequence: Synthetic oligonucleotide
gguaccugagcguaccuag

SEQ ID NO: 1053169 - RNA, 19 nt, Artificial Sequence
  Description of Artificial Sequence: Synthetic oligonucleotide
cagacacccaccacugucc

SEQ ID NO: 1053170 - RNA, 19 nt, Artificial Sequence
  Description of Artificial Sequence: Synthetic oligonucleotide
uuuuguugugugugugugu

SEQ ID NO: 1053171 - RNA, 19 nt, Artificial Sequence
  Description of Artificial Sequence: Synthetic oligonucleotide
ucgagucgaacaaguuucc

SEQ ID NO: 1053172 - RNA, 19 nt, Artificial Sequence
  Description of Artificial Sequence: Synthetic oligonucleotide
uuuguuguguguguguguu

SEQ ID NO: 1053173 - RNA, 19 nt, Artificial Sequence
  Description of Artificial Sequence: Synthetic oligonucleotide
gcaugcaugugcucuaggg

SEQ ID NO: 1053174 - RNA, 19 nt, Artificial Sequence
  Description of Artificial Sequence: Synthetic oligonucleotide
ggcacacugauauuugggc

SEQ ID NO: 1053175 - RNA, 19 nt, Artificial Sequence
  Description of Artificial Sequence: Synthetic oligonucleotide
uuacuccuaaaaguccacc

SEQ ID NO: 1053176 - RNA, 19 nt, Artificial Sequence
  Description of Artificial Sequence: Synthetic oligonucleotide
uguggcuguguguugaauu

SEQ ID NO: 1053177 - RNA, 19 nt, Artificial Sequence
  Description of Artificial Sequence: Synthetic oligonucleotide
aguuguuugcgugacugcu

SEQ ID NO: 1053178 - RNA, 19 nt, Artificial Sequence
  Description of Artificial Sequence: Synthetic oligonucleotide
ucacauguccaaacugguc

SEQ ID NO: 1053179 - RNA, 19 nt, Artificial Sequence
  Description of Artificial Sequence: Synthetic oligonucleotide
aguaagggcaccagagaag

SEQ ID NO: 1053180 - RNA, 19 nt, Artificial Sequence
  Description of Artificial Sequence: Synthetic oligonucleotide
aaaacgcaagguggcugcg

SEQ ID NO: 1053181 - RNA, 19 nt, Artificial Sequence
  Description of Artificial Sequence: Synthetic oligonucleotide
cauacccuggucucccugc

SEQ ID NO: 1053182 - RNA, 19 nt, Artificial Sequence
  Description of Artificial Sequence: Synthetic oligonucleotide
uagcgaucucaccaucacc

SEQ ID NO: 1053183 - RNA, 19 nt, Artificial Sequence
  Description of Artificial Sequence: Synthetic oligonucleotide
auacuagugggcacugcac

SEQ ID NO: 1053184 - RNA, 19 nt, Artificial Sequence
  Description of Artificial Sequence: Synthetic oligonucleotide
aagggguaaggcccgugga

SEQ ID NO: 1053185 - RNA, 19 nt, Artificial Sequence
  Description of Artificial Sequence: Synthetic oligonucleotide
cuaaaaguccacccaccuc

SEQ ID NO: 1053186 - RNA, 19 nt, Artificial Sequence
  Description of Artificial Sequence: Synthetic oligonucleotide
gccaauugcugcuuguaag

SEQ ID NO: 1053187 - RNA, 19 nt, Artificial Sequence
  Description of Artificial Sequence: Synthetic oligonucleotide
uguuaggggcugccucugg

SEQ ID NO: 1053188 - RNA, 19 nt, Artificial Sequence
  Description of Artificial Sequence: Synthetic oligonucleotide
cucuuacagccacucauac

SEQ ID NO: 1053189 - RNA, 19 nt, Artificial Sequence
  Description of Artificial Sequence: Synthetic oligonucleotide
uguccaaacuggucucccc

SEQ ID NO: 1053190 - RNA, 19 nt, Artificial Sequence
  Description of Artificial Sequence: Synthetic oligonucleotide
uucuagccugguuuaagau

SEQ ID NO: 1053191 - RNA, 19 nt, Artificial Sequence
  Description of Artificial Sequence: Synthetic oligonucleotide
guagcagugcacauccgcc

SEQ ID NO: 1053192 - RNA, 19 nt, Artificial Sequence
  Description of Artificial Sequence: Synthetic oligonucleotide
cuaccuugcgauguggcug

SEQ ID NO: 1053193 - RNA, 19 nt, Artificial Sequence
  Description of Artificial Sequence: Synthetic oligonucleotide
aagugugcagaggaaguaa

SEQ ID NO: 1053194 - RNA, 19 nt, Artificial Sequence
  Description of Artificial Sequence: Synthetic oligonucleotide
ugcucacaacccuggagca

SEQ ID NO: 1053195 - RNA, 19 nt, Artificial Sequence
  Description of Artificial Sequence: Synthetic oligonucleotide
guucuagccugguuuaaga

SEQ ID NO: 1053196 - RNA, 19 nt, Artificial Sequence
  Description of Artificial Sequence: Synthetic oligonucleotide
uggagccccuuacuguaag

SEQ ID NO: 1053197 - RNA, 19 nt, Artificial Sequence
  Description of Artificial Sequence: Synthetic oligonucleotide
ugggauacuagugggcacu

SEQ ID NO: 1053198 - RNA, 19 nt, Artificial Sequence
  Description of Artificial Sequence: Synthetic oligonucleotide
ucacacgugcauacugagu

SEQ ID NO: 1053199 - RNA, 19 nt, Artificial Sequence
  Description of Artificial Sequence: Synthetic oligonucleotide
agccccuuacuguaaguca

SEQ ID NO: 1053200 - RNA, 19 nt, Artificial Sequence
  Description of Artificial Sequence: Synthetic oligonucleotide
acagucuauccugaucuug

SEQ ID NO: 1053201 - RNA, 19 nt, Artificial Sequence
  Description of Artificial Sequence: Synthetic oligonucleotide
ugcgauguggcuguguguu

SEQ ID NO: 1053202 - RNA, 19 nt, Artificial Sequence
  Description of Artificial Sequence: Synthetic oligonucleotide
agccugguuuaagauuccc

SEQ ID NO: 1053203 - RNA, 19 nt, Artificial Sequence
  Description of Artificial Sequence: Synthetic oligonucleotide
ccugagcguaccuaguagg

SEQ ID NO: 1053204 - RNA, 19 nt, Artificial Sequence
  Description of Artificial Sequence: Synthetic oligonucleotide
uuguguguguguguuaauu

SEQ ID NO: 1053205 - RNA, 19 nt, Artificial Sequence
  Description of Artificial Sequence: Synthetic oligonucleotide
gaaucacccagaugacauc

SEQ ID NO: 1053206 - RNA, 19 nt, Artificial Sequence
  Description of Artificial Sequence: Synthetic oligonucleotide
uccuauggugacgucuuca

SEQ ID NO: 1053207 - RNA, 19 nt, Artificial Sequence
  Description of Artificial Sequence: Synthetic oligonucleotide
uuguaaguuccaguugguc

SEQ ID NO: 1053208 - RNA, 19 nt, Artificial Sequence
  Description of Artificial Sequence: Synthetic oligonucleotide
gugaccuaacaacucauua

SEQ ID NO: 1053209 - RNA, 19 nt, Artificial Sequence
  Description of Artificial Sequence: Synthetic oligonucleotide
ugaucgagucgaacaaguu

SEQ ID NO: 1053210 - RNA, 19 nt, Artificial Sequence
  Description of Artificial Sequence: Synthetic oligonucleotide
ggacuuguuucugggaagg

SEQ ID NO: 1053211 - RNA, 19 nt, Artificial Sequence
  Description of Artificial Sequence: Synthetic oligonucleotide
ugcugcuuguaaguuccag

SEQ ID NO: 1053212 - RNA, 19 nt, Artificial Sequence
  Description of Artificial Sequence: Synthetic oligonucleotide
uaccuaguaggggacagau

SEQ ID NO: 1053213 - RNA, 19 nt, Artificial Sequence
  Description of Artificial Sequence: Synthetic oligonucleotide
uccauaguagaguccugua

SEQ ID NO: 1053214 - RNA, 19 nt, Artificial Sequence
  Description of Artificial Sequence: Synthetic oligonucleotide
ugugcucuaggguggcagu

SEQ ID NO: 1053215 - RNA, 19 nt, Artificial Sequence
  Description of Artificial Sequence: Synthetic oligonucleotide
uaccugagcguaccuagua

SEQ ID NO: 1053216 - RNA, 19 nt, Artificial Sequence
  Description of Artificial Sequence: Synthetic oligonucleotide
ccguuucaaaggaugacag

SEQ ID NO: 1053217 - RNA, 19 nt, Artificial Sequence
  Description of Artificial Sequence: Synthetic oligonucleotide
uuccguuucaaaggaugac

SEQ ID NO: 1053218 - RNA, 19 nt, Artificial Sequence
  Description of Artificial Sequence: Synthetic oligonucleotide
gaucgagucgaacaaguuu

SEQ ID NO: 1053219 - RNA, 19 nt, Artificial Sequence
  Description of Artificial Sequence: Synthetic oligonucleotide
uggggcucuagcgaucuca

SEQ ID NO: 1053220 - RNA, 19 nt, Artificial Sequence
  Description of Artificial Sequence: Synthetic oligonucleotide
uccccgacgugaccuaaca

SEQ ID NO: 1053221 - RNA, 19 nt, Artificial Sequence
  Description of Artificial Sequence: Synthetic oligonucleotide
gcucgguuuggucaggagc

SEQ ID NO: 1053222 - RNA, 19 nt, Artificial Sequence
  Description of Artificial Sequence: Synthetic oligonucleotide
cuugcugacacccguuuaa

SEQ ID NO: 1053223 - RNA, 19 nt, Artificial Sequence
  Description of Artificial Sequence: Synthetic oligonucleotide
gacuuagggaaagaggggu

SEQ ID NO: 1053224 - RNA, 19 nt, Artificial Sequence
  Description of Artificial Sequence: Synthetic oligonucleotide
guguguguguguuaauuua

SEQ ID NO: 1053225 - RNA, 19 nt, Artificial Sequence
  Description of Artificial Sequence: Synthetic oligonucleotide
uuccuucuaccuugcgaug

SEQ ID NO: 1053226 - RNA, 19 nt, Artificial Sequence
  Description of Artificial Sequence: Synthetic oligonucleotide
cuucuaccuugcgaugugg

SEQ ID NO: 1053227 - RNA, 19 nt, Artificial Sequence
  Description of Artificial Sequence: Synthetic oligonucleotide
ucuugcugacacccguuua

SEQ ID NO: 1053228 - RNA, 19 nt, Artificial Sequence
  Description of Artificial Sequence: Synthetic oligonucleotide
guuguuugcgugacugcug

SEQ ID NO: 1053229 - RNA, 19 nt, Artificial Sequence
  Description of Artificial Sequence: Synthetic oligonucleotide
caacucauuagaccgacgu

SEQ ID NO: 1053230 - RNA, 19 nt, Artificial Sequence
  Description of Artificial Sequence: Synthetic oligonucleotide
uauccccggcucucaagcc

SEQ ID NO: 1053231 - RNA, 19 nt, Artificial Sequence
  Description of Artificial Sequence: Synthetic oligonucleotide
ucauuagaccgacgucauc

SEQ ID NO: 1053232 - RNA, 19 nt, Artificial Sequence
  Description of Artificial Sequence: Synthetic oligonucleotide
auccauauccccggcucuc

SEQ ID NO: 1053233 - RNA, 19 nt, Artificial Sequence
  Description of Artificial Sequence: Synthetic oligonucleotide
cccgacgugaccuaacaac

SEQ ID NO: 1053234 - RNA, 19 nt, Artificial Sequence
  Description of Artificial Sequence: Synthetic oligonucleotide
cucuaggguggcagugucc

SEQ ID NO: 1053235 - RNA, 19 nt, Artificial Sequence
  Description of Artificial Sequence: Synthetic oligonucleotide
agcguaccuaguaggggac

SEQ ID NO: 1053236 - RNA, 19 nt, Artificial Sequence
  Description of Artificial Sequence: Synthetic oligonucleotide
cccgacauacuuaagacaa

SEQ ID NO: 1053237 - RNA, 19 nt, Artificial Sequence
  Description of Artificial Sequence: Synthetic oligonucleotide
uagccugguuuaagauucc

SEQ ID NO: 1053238 - RNA, 19 nt, Artificial Sequence
  Description of Artificial Sequence: Synthetic oligonucleotide
accgacgucaucaccaaaa

SEQ ID NO: 1053239 - RNA, 19 nt, Artificial Sequence
  Description of Artificial Sequence: Synthetic oligonucleotide
acgcaagguggcugcgugg

SEQ ID NO: 1053240 - RNA, 19 nt, Artificial Sequence
  Description of Artificial Sequence: Synthetic oligonucleotide
guuacuccuaaaaguccac

SEQ ID NO: 1053241 - RNA, 19 nt, Artificial Sequence
  Description of Artificial Sequence: Synthetic oligonucleotide
caaggacgcacagacagga

SEQ ID NO: 1053242 - RNA, 19 nt, Artificial Sequence
  Description of Artificial Sequence: Synthetic oligonucleotide
accuuuucaaggacgcaca

SEQ ID NO: 1053243 - RNA, 19 nt, Artificial Sequence
  Description of Artificial Sequence: Synthetic oligonucleotide
uuuugcugaucgagucgaa

SEQ ID NO: 1053244 - RNA, 19 nt, Artificial Sequence
  Description of Artificial Sequence: Synthetic oligonucleotide
ugcucgguuuggucaggag

SEQ ID NO: 1053245 - RNA, 19 nt, Artificial Sequence
  Description of Artificial Sequence: Synthetic oligonucleotide
cucacaacccuggagcaca

SEQ ID NO: 1053246 - RNA, 19 nt, Artificial Sequence
  Description of Artificial Sequence: Synthetic oligonucleotide
gagccccuuacuguaaguc

SEQ ID NO: 1053247 - RNA, 19 nt, Artificial Sequence
  Description of Artificial Sequence: Synthetic oligonucleotide
ucuuggggcucuagcgauc

SEQ ID NO: 1053248 - RNA, 19 nt, Artificial Sequence
  Description of Artificial Sequence: Synthetic oligonucleotide
agauuccccuucuccuaug

SEQ ID NO: 1053249 - RNA, 19 nt, Artificial Sequence
  Description of Artificial Sequence: Synthetic oligonucleotide
gagucgaacaaguuuccuu

SEQ ID NO: 1053250 - RNA, 19 nt, Artificial Sequence
  Description of Artificial Sequence: Synthetic oligonucleotide
uagaguccuguagcagugc

SEQ ID NO: 1053251 - RNA, 19 nt, Artificial Sequence
  Description of Artificial Sequence: Synthetic oligonucleotide
accaaaacgcaagguggcu

SEQ ID NO: 1053252 - RNA, 19 nt, Artificial Sequence
  Description of Artificial Sequence: Synthetic oligonucleotide
caggguaccugagcguacc

SEQ ID NO: 1053253 - RNA, 19 nt, Artificial Sequence
  Description of Artificial Sequence: Synthetic oligonucleotide
uugcgauguggcugugugu

SEQ ID NO: 1053254 - RNA, 19 nt, Artificial Sequence
  Description of Artificial Sequence: Synthetic oligonucleotide
cacucauacccuggucucc

SEQ ID NO: 1053255 - RNA, 19 nt, Artificial Sequence
  Description of Artificial Sequence: Synthetic oligonucleotide
cacgcugcuccaaggccag

SEQ ID NO: 1053256 - RNA, 19 nt, Artificial Sequence
  Description of Artificial Sequence: Synthetic oligonucleotide
cugacacccguuuaagacu

SEQ ID NO: 1053257 - RNA, 19 nt, Artificial Sequence
  Description of Artificial Sequence: Synthetic oligonucleotide
guaaggcccguggagcccc

SEQ ID NO: 1053258 - RNA, 19 nt, Artificial Sequence
  Description of Artificial Sequence: Synthetic oligonucleotide
agcgccaauugcugcuugu

SEQ ID NO: 1053259 - RNA, 19 nt, Artificial Sequence
  Description of Artificial Sequence: Synthetic oligonucleotide
auacccuggucucccugcu

SEQ ID NO: 1053260 - RNA, 19 nt, Artificial Sequence
  Description of Artificial Sequence: Synthetic oligonucleotide
cuuuucaaggacgcacaga

SEQ ID NO: 1053261 - RNA, 19 nt, Artificial Sequence
  Description of Artificial Sequence: Synthetic oligonucleotide
uggcccuaagaagaccuuc

SEQ ID NO: 1053262 - RNA, 19 nt, Artificial Sequence
  Description of Artificial Sequence: Synthetic oligonucleotide
acgcugacaucugcaaucu

SEQ ID NO: 1053263 - RNA, 19 nt, Artificial Sequence
  Description of Artificial Sequence: Synthetic oligonucleotide
agaccgacgucaucaccaa

SEQ ID NO: 1053264 - RNA, 19 nt, Artificial Sequence
  Description of Artificial Sequence: Synthetic oligonucleotide
cacgugcauacugaguuca

SEQ ID NO: 1053265 - RNA, 19 nt, Artificial Sequence
  Description of Artificial Sequence: Synthetic oligonucleotide
ucgguagccuccacaccau

SEQ ID NO: 1053266 - RNA, 19 nt, Artificial Sequence
  Description of Artificial Sequence: Synthetic oligonucleotide
aucacccagaugacaucuc

SEQ ID NO: 1053267 - RNA, 19 nt, Artificial Sequence
  Description of Artificial Sequence: Synthetic oligonucleotide
uuguuguguguguguguua

SEQ ID NO: 1053268 - RNA, 19 nt, Artificial Sequence
  Description of Artificial Sequence: Synthetic oligonucleotide
gcucaaggguccaagugug

SEQ ID NO: 1053269 - RNA, 19 nt, Artificial Sequence
  Description of Artificial Sequence: Synthetic oligonucleotide
ucacaacccuggagcacaa

SEQ ID NO: 1053270 - RNA, 19 nt, Artificial Sequence
  Description of Artificial Sequence: Synthetic oligonucleotide
gauguggcuguguguugaa

SEQ ID NO: 1053271 - RNA, 19 nt, Artificial Sequence
  Description of Artificial Sequence: Synthetic oligonucleotide
acgugcauacugaguucac

SEQ ID NO: 1053272 - RNA, 19 nt, Artificial Sequence
  Description of Artificial Sequence: Synthetic oligonucleotide
uugggcuuucaaagucaua

SEQ ID NO: 1053273 - RNA, 19 nt, Artificial Sequence
  Description of Artificial Sequence: Synthetic oligonucleotide
gcaggggaccuucagucac

SEQ ID NO: 1053274 - RNA, 19 nt, Artificial Sequence
  Description of Artificial Sequence: Synthetic oligonucleotide
uuccccgacgugaccuaac

SEQ ID NO: 1053275 - RNA, 19 nt, Artificial Sequence
  Description of Artificial Sequence: Synthetic oligonucleotide
cucuagcgaucucaccauc

SEQ ID NO: 1053276 - RNA, 19 nt, Artificial Sequence
  Description of Artificial Sequence: Synthetic oligonucleotide
cacccagaugacaucucca

SEQ ID NO: 1053277 - RNA, 19 nt, Artificial Sequence
  Description of Artificial Sequence: Synthetic oligonucleotide
cagugcacauccgccacug

SEQ ID NO: 1053278 - RNA, 19 nt, Artificial Sequence
  Description of Artificial Sequence: Synthetic oligonucleotide
cugcacaucuggacgcuga

SEQ ID NO: 1053279 - RNA, 19 nt, Artificial Sequence
  Description of Artificial Sequence: Synthetic oligonucleotide
gcguuacuccuaaaagucc

SEQ ID NO: 1053280 - RNA, 19 nt, Artificial Sequence
  Description of Artificial Sequence: Synthetic oligonucleotide
gcugaucgagucgaacaag

SEQ ID NO: 1053281 - RNA, 19 nt, Artificial Sequence
  Description of Artificial Sequence: Synthetic oligonucleotide
cguuucaaaggaugacagc

SEQ ID NO: 1053282 - RNA, 19 nt, Artificial Sequence
  Description of Artificial Sequence: Synthetic oligonucleotide
ggcucaaggguccaagugu

SEQ ID NO: 1053283 - RNA, 19 nt, Artificial Sequence
  Description of Artificial Sequence: Synthetic oligonucleotide
gaguaucaggagguauaga

SEQ ID NO: 1053284 - RNA, 19 nt, Artificial Sequence
  Description of Artificial Sequence: Synthetic oligonucleotide
acacugauauuugggcuuu

SEQ ID NO: 1053285 - RNA, 19 nt, Artificial Sequence
  Description of Artificial Sequence: Synthetic oligonucleotide
ccugaucuugcucgguuug

SEQ ID NO: 1053286 - RNA, 19 nt, Artificial Sequence
  Description of Artificial Sequence: Synthetic oligonucleotide
agccucuuacagccacuca

SEQ ID NO: 1053287 - RNA, 19 nt, Artificial Sequence
  Description of Artificial Sequence: Synthetic oligonucleotide
cacacugauauuugggcuu

SEQ ID NO: 1053288 - RNA, 19 nt, Artificial Sequence
  Description of Artificial Sequence: Synthetic oligonucleotide
gacuugcauauaucuugua

SEQ ID NO: 1053289 - RNA, 19 nt, Artificial Sequence
  Description of Artificial Sequence: Synthetic oligonucleotide
cuugcucgguuuggucagg

SEQ ID NO: 1053290 - RNA, 19 nt, Artificial Sequence
  Description of Artificial Sequence: Synthetic oligonucleotide
cguuacuccuaaaagucca

SEQ ID NO: 1053291 - RNA, 19 nt, Artificial Sequence
  Description of Artificial Sequence: Synthetic oligonucleotide
cuuguaaguuccaguuggu

SEQ ID NO: 1053292 - RNA, 19 nt, Artificial Sequence
  Description of Artificial Sequence: Synthetic oligonucleotide
cuucaacgaaggacauaga

SEQ ID NO: 1053293 - RNA, 19 nt, Artificial Sequence
  Description of Artificial Sequence: Synthetic oligonucleotide
cauagagggcacacugaua

SEQ ID NO: 1053294 - RNA, 19 nt, Artificial Sequence
  Description of Artificial Sequence: Synthetic oligonucleotide
guaagaggagggacuugca

SEQ ID NO: 1053295 - RNA, 19 nt, Artificial Sequence
  Description of Artificial Sequence: Synthetic oligonucleotide
aggaaccccuugcccucuc

SEQ ID NO: 1053296 - RNA, 19 nt, Artificial Sequence
  Description of Artificial Sequence: Synthetic oligonucleotide
ugacagcuguugcguuacu

SEQ ID NO: 1053297 - RNA, 19 nt, Artificial Sequence
  Description of Artificial Sequence: Synthetic oligonucleotide
aggguaccugagcguaccu

SEQ ID NO: 1053298 - RNA, 19 nt, Artificial Sequence
  Description of Artificial Sequence: Synthetic oligonucleotide
agugcacauccgccacugu

SEQ ID NO: 1053299 - RNA, 19 nt, Artificial Sequence
  Description of Artificial Sequence: Synthetic oligonucleotide
ccaaaacgcaagguggcug

SEQ ID NO: 1053300 - RNA, 19 nt, Artificial Sequence
  Description of Artificial Sequence: Synthetic oligonucleotide
gucgaacaaguuuccuucu

SEQ ID NO: 1053301 - RNA, 19 nt, Artificial Sequence
  Description of Artificial Sequence: Synthetic oligonucleotide
gcuguugcguuacuccuaa

SEQ ID NO: 1053302 - RNA, 19 nt, Artificial Sequence
  Description of Artificial Sequence: Synthetic oligonucleotide
ccacaaggcuccaccagac

SEQ ID NO: 1053303 - RNA, 19 nt, Artificial Sequence
  Description of Artificial Sequence: Synthetic oligonucleotide
caucucuuccuaggcacca

SEQ ID NO: 1053304 - RNA, 19 nt, Artificial Sequence
  Description of Artificial Sequence: Synthetic oligonucleotide
gccccuuacuguaagucac

SEQ ID NO: 1053305 - RNA, 19 nt, Artificial Sequence
  Description of Artificial Sequence: Synthetic oligonucleotide
uuuccccgacgugaccuaa

SEQ ID NO: 1053306 - RNA, 19 nt, Artificial Sequence
  Description of Artificial Sequence: Synthetic oligonucleotide
cuuguaucuuuggcagaca

SEQ ID NO: 1053307 - RNA, 19 nt, Artificial Sequence
  Description of Artificial Sequence: Synthetic oligonucleotide
gacuggccgaagggguaag

SEQ ID NO: 1053308 - RNA, 19 nt, Artificial Sequence
  Description of Artificial Sequence: Synthetic oligonucleotide
cuguuaggggcugccucug

SEQ ID NO: 1053309 - RNA, 19 nt, Artificial Sequence
  Description of Artificial Sequence: Synthetic oligonucleotide
caagugugcagaggaagua

SEQ ID NO: 1053310 - RNA, 19 nt, Artificial Sequence
  Description of Artificial Sequence: Synthetic oligonucleotide
cagaguucugugacagucu

SEQ ID NO: 1053311 - RNA, 19 nt, Artificial Sequence
  Description of Artificial Sequence: Synthetic oligonucleotide
cucauuagaccgacgucau

SEQ ID NO: 1053312 - RNA, 19 nt, Artificial Sequence
  Description of Artificial Sequence: Synthetic oligonucleotide
ccacucauacccuggucuc

SEQ ID NO: 1053313 - RNA, 19 nt, Artificial Sequence
  Description of Artificial Sequence: Synthetic oligonucleotide
agacuggccgaagggguaa

SEQ ID NO: 1053314 - RNA, 19 nt, Artificial Sequence
  Description of Artificial Sequence: Synthetic oligonucleotide
guaucaggagguauagauu

SEQ ID NO: 1053315 - RNA, 19 nt, Artificial Sequence
  Description of Artificial Sequence: Synthetic oligonucleotide
acgcacagacaggacuugu

SEQ ID NO: 1053316 - RNA, 19 nt, Artificial Sequence
  Description of Artificial Sequence: Synthetic oligonucleotide
cacaaggcuccaccagaca

SEQ ID NO: 1053317 - RNA, 19 nt, Artificial Sequence
  Description of Artificial Sequence: Synthetic oligonucleotide
ggcccuaagaagaccuuca

SEQ ID NO: 1053318 - RNA, 19 nt, Artificial Sequence
  Description of Artificial Sequence: Synthetic oligonucleotide
ccuucuaccuugcgaugug

SEQ ID NO: 1053319 - RNA, 19 nt, Artificial Sequence
  Description of Artificial Sequence: Synthetic oligonucleotide
cuccuauggugacgucuuc

SEQ ID NO: 1053320 - RNA, 19 nt, Artificial Sequence
  Description of Artificial Sequence: Synthetic oligonucleotide
guaccuaguaggggacaga

SEQ ID NO: 1053321 - RNA, 19 nt, Artificial Sequence
  Description of Artificial Sequence: Synthetic oligonucleotide
gccucuuacagccacucau

SEQ ID NO: 1053322 - RNA, 19 nt, Artificial Sequence
  Description of Artificial Sequence: Synthetic oligonucleotide
cuaccuuuucaaggacgca

SEQ ID NO: 1053323 - RNA, 19 nt, Artificial Sequence
  Description of Artificial Sequence: Synthetic oligonucleotide
cccguggagccccuuacug

SEQ ID NO: 1053324 - RNA, 19 nt, Artificial Sequence
  Description of Artificial Sequence: Synthetic oligonucleotide
ggauacuagugggcacugc

SEQ ID NO: 1053325 - RNA, 19 nt, Artificial Sequence
  Description of Artificial Sequence: Synthetic oligonucleotide
cugcauucacacgugcaua

SEQ ID NO: 1053326 - RNA, 19 nt, Artificial Sequence
  Description of Artificial Sequence: Synthetic oligonucleotide
ggaaccccuugcccucucc

SEQ ID NO: 1053327 - RNA, 19 nt, Artificial Sequence
  Description of Artificial Sequence: Synthetic oligonucleotide
gggauacuagugggcacug

SEQ ID NO: 1053328 - RNA, 19 nt, Artificial Sequence
  Description of Artificial Sequence: Synthetic oligonucleotide
cccguuuaagacuggccga

SEQ ID NO: 1053329 - RNA, 19 nt, Artificial Sequence
  Description of Artificial Sequence: Synthetic oligonucleotide
agauucccauggagacauc

SEQ ID NO: 1053330 - RNA, 19 nt, Artificial Sequence
  Description of Artificial Sequence: Synthetic oligonucleotide
cgaucucaccaucaccaug

SEQ ID NO: 1053331 - RNA, 19 nt, Artificial Sequence
  Description of Artificial Sequence: Synthetic oligonucleotide
gccugguuuaagauuccca

SEQ ID NO: 1053332 - RNA, 19 nt, Artificial Sequence
  Description of Artificial Sequence: Synthetic oligonucleotide
ccccgacauacuuaagaca

SEQ ID NO: 1053333 - RNA, 19 nt, Artificial Sequence
  Description of Artificial Sequence: Synthetic oligonucleotide
gaccgacgucaucaccaaa

SEQ ID NO: 1053334 - RNA, 19 nt, Artificial Sequence
  Description of Artificial Sequence: Synthetic oligonucleotide
ccgacgugaccuaacaacu

SEQ ID NO: 1053335 - RNA, 19 nt, Artificial Sequence
  Description of Artificial Sequence: Synthetic oligonucleotide
caccacuguccaggugggg

SEQ ID NO: 1053336 - RNA, 19 nt, Artificial Sequence
  Description of Artificial Sequence: Synthetic oligonucleotide
cccuuaacuuguggcuugg

SEQ ID NO: 1053337 - RNA, 19 nt, Artificial Sequence
  Description of Artificial Sequence: Synthetic oligonucleotide
gcgauguggcuguguguug

SEQ ID NO: 1053338 - RNA, 19 nt, Artificial Sequence
  Description of Artificial Sequence: Synthetic oligonucleotide
cuuggggcucuagcgaucu

SEQ ID NO: 1053339 - RNA, 19 nt, Artificial Sequence
  Description of Artificial Sequence: Synthetic oligonucleotide
gucuucaacgaaggacaua

SEQ ID NO: 1053340 - RNA, 19 nt, Artificial Sequence
  Description of Artificial Sequence: Synthetic oligonucleotide
guuguguguguguguuaau

SEQ ID NO: 1053341 - RNA, 19 nt, Artificial Sequence
  Description of Artificial Sequence: Synthetic oligonucleotide
cgacgugaccuaacaacuc

SEQ ID NO: 1053342 - RNA, 19 nt, Artificial Sequence
  Description of Artificial Sequence: Synthetic oligonucleotide
ggaccuucagucacaccaa

SEQ ID NO: 1053343 - RNA, 19 nt, Artificial Sequence
  Description of Artificial Sequence: Synthetic oligonucleotide
ccaggguaccugagcguac

SEQ ID NO: 1053344 - RNA, 19 nt, Artificial Sequence
  Description of Artificial Sequence: Synthetic oligonucleotide
ccaccagacacccaccacu

SEQ ID NO: 1053345 - RNA, 19 nt, Artificial Sequence
  Description of Artificial Sequence: Synthetic oligonucleotide
guaccugagcguaccuagu

SEQ ID NO: 1053346 - RNA, 19 nt, Artificial Sequence
  Description of Artificial Sequence: Synthetic oligonucleotide
ccuguuaggggcugccucu

SEQ ID NO: 1053347 - RNA, 19 nt, Artificial Sequence
  Description of Artificial Sequence: Synthetic oligonucleotide
auccgccacugucccugau

SEQ ID NO: 1053348 - RNA, 19 nt, Artificial Sequence
  Description of Artificial Sequence: Synthetic oligonucleotide
ccguuuaagacuggccgaa

SEQ ID NO: 1053349 - RNA, 19 nt, Artificial Sequence
  Description of Artificial Sequence: Synthetic oligonucleotide
ccgacauacuuaagacaaa

SEQ ID NO: 1053350 - RNA, 19 nt, Artificial Sequence
  Description of Artificial Sequence: Synthetic oligonucleotide
ggacgcacagacaggacuu

SEQ ID NO: 1053351 - RNA, 19 nt, Artificial Sequence
  Description of Artificial Sequence: Synthetic oligonucleotide
ggagccccuuacuguaagu

SEQ ID NO: 1053352 - RNA, 19 nt, Artificial Sequence
  Description of Artificial Sequence: Synthetic oligonucleotide
cuguugcguuacuccuaaa

SEQ ID NO: 1053353 - RNA, 19 nt, Artificial Sequence
  Description of Artificial Sequence: Synthetic oligonucleotide
ggguaccugagcguaccua

SEQ ID NO: 1053354 - RNA, 19 nt, Artificial Sequence
  Description of Artificial Sequence: Synthetic oligonucleotide
gcguaccuaguaggggaca

SEQ ID NO: 1053355 - RNA, 19 nt, Artificial Sequence
  Description of Artificial Sequence: Synthetic oligonucleotide
gcagugcacauccgccacu

SEQ ID NO: 1053356 - RNA, 19 nt, Artificial Sequence
  Description of Artificial Sequence: Synthetic oligonucleotide
cuggcccuaagaagaccuu

SEQ ID NO: 1053357 - RNA, 19 nt, Artificial Sequence
  Description of Artificial Sequence: Synthetic oligonucleotide
gcgaucucaccaucaccau

SEQ ID NO: 1053358 - RNA, 19 nt, Artificial Sequence
  Description of Artificial Sequence: Synthetic oligonucleotide
gcgccaauugcugcuugua

SEQ ID NO: 1053359 - RNA, 19 nt, Artificial Sequence
  Description of Artificial Sequence: Synthetic oligonucleotide
ccauauccccggcucucaa

SEQ ID NO: 1053360 - RNA, 19 nt, Artificial Sequence
  Description of Artificial Sequence: Synthetic oligonucleotide
caaccugcuuggaguccau

SEQ ID NO: 1053361 - RNA, 19 nt, Artificial Sequence
  Description of Artificial Sequence: Synthetic oligonucleotide
caccuguuaggggcugccu

SEQ ID NO: 1053362 - RNA, 19 nt, Artificial Sequence
  Description of Artificial Sequence: Synthetic oligonucleotide
cgaagggguaaggcccgug

SEQ ID NO: 1053363 - RNA, 19 nt, Artificial Sequence
  Description of Artificial Sequence: Synthetic oligonucleotide
cgugcauacugaguucacu

SEQ ID NO: 1053364 - RNA, 19 nt, Artificial Sequence
  Description of Artificial Sequence: Synthetic oligonucleotide
ccccgacgugaccuaacaa

SEQ ID NO: 1053365 - RNA, 19 nt, Artificial Sequence
  Description of Artificial Sequence: Synthetic oligonucleotide
gcccguggagccccuuacu

SEQ ID NO: 1053366 - RNA, 19 nt, Artificial Sequence
  Description of Artificial Sequence: Synthetic oligonucleotide
cgagucgaacaaguuuccu

SEQ ID NO: 1053367 - RNA, 19 nt, Artificial Sequence
  Description of Artificial Sequence: Synthetic oligonucleotide
ccuugcgauguggcugugu

SEQ ID NO: 1053368 - RNA, 19 nt, Artificial Sequence
  Description of Artificial Sequence: Synthetic oligonucleotide
ccgugccauguggucugca

SEQ ID NO: 1053369 - RNA, 19 nt, Artificial Sequence
  Description of Artificial Sequence: Synthetic oligonucleotide
ccccggcucucaagccacu

SEQ ID NO: 1053370 - RNA, 19 nt, Artificial Sequence
  Description of Artificial Sequence: Synthetic oligonucleotide
ccgaagggguaaggcccgu

SEQ ID NO: 1053371 - RNA, 19 nt, Artificial Sequence
  Description of Artificial Sequence: Synthetic oligonucleotide
uaucuuaacacacagcugg

SEQ ID NO: 1053372 - RNA, 19 nt, Artificial Sequence
  Description of Artificial Sequence: Synthetic oligonucleotide
acuacuguuaucuuaacac

SEQ ID NO: 1053373 - RNA, 19 nt, Artificial Sequence
  Description of Artificial Sequence: Synthetic oligonucleotide
uucaguaaccccuugagag

SEQ ID NO: 1053374 - RNA, 19 nt, Artificial Sequence
  Description of Artificial Sequence: Synthetic oligonucleotide
uuauuaauuuaaaagcuac

SEQ ID NO: 1053375 - RNA, 19 nt, Artificial Sequence
  Description of Artificial Sequence: Synthetic oligonucleotide
aaaggauccguuaagguag

SEQ ID NO: 1053376 - RNA, 19 nt, Artificial Sequence
  Description of Artificial Sequence: Synthetic oligonucleotide
uuuaaaagcuacagucugg

SEQ ID NO: 1053377 - RNA, 19 nt, Artificial Sequence
  Description of Artificial Sequence: Synthetic oligonucleotide
uccaaggugaaccaguacc

SEQ ID NO: 1053378 - RNA, 19 nt, Artificial Sequence
  Description of Artificial Sequence: Synthetic oligonucleotide
aucgucccuacccagaucc

SEQ ID NO: 1053379 - RNA, 19 nt, Artificial Sequence
  Description of Artificial Sequence: Synthetic oligonucleotide
acaagcugcccauagaauc

SEQ ID NO: 1053380 - RNA, 19 nt, Artificial Sequence
  Description of Artificial Sequence: Synthetic oligonucleotide
aaugucuuggcauucugga

SEQ ID NO: 1053381 - RNA, 19 nt, Artificial Sequence
  Description of Artificial Sequence: Synthetic oligonucleotide
gaaucggccacacaugggg

SEQ ID NO: 1053382 - RNA, 19 nt, Artificial Sequence
  Description of Artificial Sequence: Synthetic oligonucleotide
aguacauaccaggaaaagc

SEQ ID NO: 1053383 - RNA, 19 nt, Artificial Sequence
  Description of Artificial Sequence: Synthetic oligonucleotide
uagaaucggccacacaugg

SEQ ID NO: 1053384 - RNA, 19 nt, Artificial Sequence
  Description of Artificial Sequence: Synthetic oligonucleotide
guacauaccaggaaaagcc

SEQ ID NO: 1053385 - RNA, 19 nt, Artificial Sequence
  Description of Artificial Sequence: Synthetic oligonucleotide
guuaucuuaacacacagcu

SEQ ID NO: 1053386 - RNA, 19 nt, Artificial Sequence
  Description of Artificial Sequence: Synthetic oligonucleotide
acccuagucagguaggugg

SEQ ID NO: 1053387 - RNA, 19 nt, Artificial Sequence
  Description of Artificial Sequence: Synthetic oligonucleotide
uuagaguugucuauuuacu

SEQ ID NO: 1053388 - RNA, 19 nt, Artificial Sequence
  Description of Artificial Sequence: Synthetic oligonucleotide
ucaaaagccuuccggaaca

SEQ ID NO: 1053389 - RNA, 19 nt, Artificial Sequence
  Description of Artificial Sequence: Synthetic oligonucleotide
uacuguuaucuuaacacac

SEQ ID NO: 1053390 - RNA, 19 nt, Artificial Sequence
  Description of Artificial Sequence: Synthetic oligonucleotide
aagagcuuaggauuggcau

SEQ ID NO: 1053391 - RNA, 19 nt, Artificial Sequence
  Description of Artificial Sequence: Synthetic oligonucleotide
uaucaguccaaggugaacc

SEQ ID NO: 1053392 - RNA, 19 nt, Artificial Sequence
  Description of Artificial Sequence: Synthetic oligonucleotide
ugaaugucguuccacguga

SEQ ID NO: 1053393 - RNA, 19 nt, Artificial Sequence
  Description of Artificial Sequence: Synthetic oligonucleotide
gagcacaguacauaccagg

SEQ ID NO: 1053394 - RNA, 19 nt, Artificial Sequence
  Description of Artificial Sequence: Synthetic oligonucleotide
gacgaacgacauuugaucc

SEQ ID NO: 1053395 - RNA, 19 nt, Artificial Sequence
  Description of Artificial Sequence: Synthetic oligonucleotide
cacgugaugacauuggguc

SEQ ID NO: 1053396 - RNA, 19 nt, Artificial Sequence
  Description of Artificial Sequence: Synthetic oligonucleotide
gagacagucacuuuguucu

SEQ ID NO: 1053397 - RNA, 19 nt, Artificial Sequence
  Description of Artificial Sequence: Synthetic oligonucleotide
ucuguuggaucccaguaga

SEQ ID NO: 1053398 - RNA, 19 nt, Artificial Sequence
  Description of Artificial Sequence: Synthetic oligonucleotide
uguuaucuuaacacacagc

SEQ ID NO: 1053399 - RNA, 19 nt, Artificial Sequence
  Description of Artificial Sequence: Synthetic oligonucleotide
ugucuauuuacuuuauuuu

SEQ ID NO: 1053400 - RNA, 19 nt, Artificial Sequence
  Description of Artificial Sequence: Synthetic oligonucleotide
uuaucuuaacacacagcug

SEQ ID NO: 1053401 - RNA, 19 nt, Artificial Sequence
  Description of Artificial Sequence: Synthetic oligonucleotide
cuuggagacagucacuuug

SEQ ID NO: 1053402 - RNA, 19 nt, Artificial Sequence
  Description of Artificial Sequence: Synthetic oligonucleotide
uggugaaugucguuccacg

SEQ ID NO: 1053403 - RNA, 19 nt, Artificial Sequence
  Description of Artificial Sequence: Synthetic oligonucleotide
agagaaaggauccguuaag

SEQ ID NO: 1053404 - RNA, 19 nt, Artificial Sequence
  Description of Artificial Sequence: Synthetic oligonucleotide
caggauaccgaacuccugg

SEQ ID NO: 1053405 - RNA, 19 nt, Artificial Sequence
  Description of Artificial Sequence: Synthetic oligonucleotide
auaggggcagagaagagcg

SEQ ID NO: 1053406 - RNA, 19 nt, Artificial Sequence
  Description of Artificial Sequence: Synthetic oligonucleotide
ucuaugaggauggacacuc

SEQ ID NO: 1053407 - RNA, 19 nt, Artificial Sequence
  Description of Artificial Sequence: Synthetic oligonucleotide
cucauaucaguccaaggug

SEQ ID NO: 1053408 - RNA, 19 nt, Artificial Sequence
  Description of Artificial Sequence: Synthetic oligonucleotide
cucauagcuggguagcagg

SEQ ID NO: 1053409 - RNA, 19 nt, Artificial Sequence
  Description of Artificial Sequence: Synthetic oligonucleotide
ugccguacuucucauagcu

SEQ ID NO: 1053410 - RNA, 19 nt, Artificial Sequence
  Description of Artificial Sequence: Synthetic oligonucleotide
cuuaacacacagcuggcug

SEQ ID NO: 1053411 - RNA, 19 nt, Artificial Sequence
  Description of Artificial Sequence: Synthetic oligonucleotide
acgacauuugauccggaag

SEQ ID NO: 1053412 - RNA, 19 nt, Artificial Sequence
  Description of Artificial Sequence: Synthetic oligonucleotide
uggucaaaagccuuccgga

SEQ ID NO: 1053413 - RNA, 19 nt, Artificial Sequence
  Description of Artificial Sequence: Synthetic oligonucleotide
gaaccaguaccguauucag

SEQ ID NO: 1053414 - RNA, 19 nt, Artificial Sequence
  Description of Artificial Sequence: Synthetic oligonucleotide
acgaacgacauuugauccg

SEQ ID NO: 1053415 - RNA, 19 nt, Artificial Sequence
  Description of Artificial Sequence: Synthetic oligonucleotide
cuguuaucuuaacacacag

SEQ ID NO: 1053416 - RNA, 19 nt, Artificial Sequence
  Description of Artificial Sequence: Synthetic oligonucleotide
augacauugggucucccug

SEQ ID NO: 1053417 - RNA, 19 nt, Artificial Sequence
  Description of Artificial Sequence: Synthetic oligonucleotide
ucaguaaccccuugagagc

SEQ ID NO: 1053418 - RNA, 19 nt, Artificial Sequence
  Description of Artificial Sequence: Synthetic oligonucleotide
uauaggggcagagaagagc

SEQ ID NO: 1053419 - RNA, 19 nt, Artificial Sequence
  Description of Artificial Sequence: Synthetic oligonucleotide
uuaagguaggacuacuguu

SEQ ID NO: 1053420 - RNA, 19 nt, Artificial Sequence
  Description of Artificial Sequence: Synthetic oligonucleotide
ucccaguagaagaggacag

SEQ ID NO: 1053421 - RNA, 19 nt, Artificial Sequence
  Description of Artificial Sequence: Synthetic oligonucleotide
caaugucuuggcauucugg

SEQ ID NO: 1053422 - RNA, 19 nt, Artificial Sequence
  Description of Artificial Sequence: Synthetic oligonucleotide
gucauggacgugccgaugg

SEQ ID NO: 1053423 - RNA, 19 nt, Artificial Sequence
  Description of Artificial Sequence: Synthetic oligonucleotide
uguuggaucccaguagaag

SEQ ID NO: 1053424 - RNA, 19 nt, Artificial Sequence
  Description of Artificial Sequence: Synthetic oligonucleotide
ucagacgaggaggaagugg

SEQ ID NO: 1053425 - RNA, 19 nt, Artificial Sequence
  Description of Artificial Sequence: Synthetic oligonucleotide
agaccguuggccugaaaag

SEQ ID NO: 1053426 - RNA, 19 nt, Artificial Sequence
  Description of Artificial Sequence: Synthetic oligonucleotide
cuucagucaucugugauac

SEQ ID NO: 1053427 - RNA, 19 nt, Artificial Sequence
  Description of Artificial Sequence: Synthetic oligonucleotide
uggagcacguagaugucag

SEQ ID NO: 1053428 - RNA, 19 nt, Artificial Sequence
  Description of Artificial Sequence: Synthetic oligonucleotide
ugaagagaccuccaucguc

SEQ ID NO: 1053429 - RNA, 19 nt, Artificial Sequence
  Description of Artificial Sequence: Synthetic oligonucleotide
acaauggugccguacuucu

SEQ ID NO: 1053430 - RNA, 19 nt, Artificial Sequence
  Description of Artificial Sequence: Synthetic oligonucleotide
gauccguuaagguaggacu

SEQ ID NO: 1053431 - RNA, 19 nt, Artificial Sequence
  Description of Artificial Sequence: Synthetic oligonucleotide
ucagacaaauccccucgug

SEQ ID NO: 1053432 - RNA, 19 nt, Artificial Sequence
  Description of Artificial Sequence: Synthetic oligonucleotide
uccggaagagcuuaggauu

SEQ ID NO: 1053433 - RNA, 19 nt, Artificial Sequence
  Description of Artificial Sequence: Synthetic oligonucleotide
aaugucguuccacgugaug

SEQ ID NO: 1053434 - RNA, 19 nt, Artificial Sequence
  Description of Artificial Sequence: Synthetic oligonucleotide
gcuacuuggagaccguugg

SEQ ID NO: 1053435 - RNA, 19 nt, Artificial Sequence
  Description of Artificial Sequence: Synthetic oligonucleotide
caucuaugaggauggacac

SEQ ID NO: 1053436 - RNA, 19 nt, Artificial Sequence
  Description of Artificial Sequence: Synthetic oligonucleotide
uuguggugaaugucguucc

SEQ ID NO: 1053437 - RNA, 19 nt, Artificial Sequence
  Description of Artificial Sequence: Synthetic oligonucleotide
agucagguagguggggucc

SEQ ID NO: 1053438 - RNA, 19 nt, Artificial Sequence
  Description of Artificial Sequence: Synthetic oligonucleotide
agcucauaucaguccaagg

SEQ ID NO: 1053439 - RNA, 19 nt, Artificial Sequence
  Description of Artificial Sequence: Synthetic oligonucleotide
gagcuuaggauuggcaugc

SEQ ID NO: 1053440 - RNA, 19 nt, Artificial Sequence
  Description of Artificial Sequence: Synthetic oligonucleotide
uacuuggagaccguuggcc

SEQ ID NO: 1053441 - RNA, 19 nt, Artificial Sequence
  Description of Artificial Sequence: Synthetic oligonucleotide
aggauaccgaacuccuggg

SEQ ID NO: 1053442 - RNA, 19 nt, Artificial Sequence
  Description of Artificial Sequence: Synthetic oligonucleotide
gagaccguuggccugaaaa

SEQ ID NO: 1053443 - RNA, 19 nt, Artificial Sequence
  Description of Artificial Sequence: Synthetic oligonucleotide
aacgacauuugauccggaa

SEQ ID NO: 1053444 - RNA, 19 nt, Artificial Sequence
  Description of Artificial Sequence: Synthetic oligonucleotide
gaguugucuauuuacuuua

SEQ ID NO: 1053445 - RNA, 19 nt, Artificial Sequence
  Description of Artificial Sequence: Synthetic oligonucleotide
ugcuacuuggagaccguug

SEQ ID NO: 1053446 - RNA, 19 nt, Artificial Sequence
  Description of Artificial Sequence: Synthetic oligonucleotide
cauagaaucggccacacau

SEQ ID NO: 1053447 - RNA, 19 nt, Artificial Sequence
  Description of Artificial Sequence: Synthetic oligonucleotide
aaccaguaccguauucagg

SEQ ID NO: 1053448 - RNA, 19 nt, Artificial Sequence
  Description of Artificial Sequence: Synthetic oligonucleotide
gauggugaaggugagacgu

SEQ ID NO: 1053449 - RNA, 19 nt, Artificial Sequence
  Description of Artificial Sequence: Synthetic oligonucleotide
uagaguugucuauuuacuu

SEQ ID NO: 1053450 - RNA, 19 nt, Artificial Sequence
  Description of Artificial Sequence: Synthetic oligonucleotide
gacgugccgauggugaagg

SEQ ID NO: 1053451 - RNA, 19 nt, Artificial Sequence
  Description of Artificial Sequence: Synthetic oligonucleotide
augucguuccacgugauga

SEQ ID NO: 1053452 - RNA, 19 nt, Artificial Sequence
  Description of Artificial Sequence: Synthetic oligonucleotide
ucuugcacccuagucaggu

SEQ ID NO: 1053453 - RNA, 19 nt, Artificial Sequence
  Description of Artificial Sequence: Synthetic oligonucleotide
agccuuccggaacaggguc

SEQ ID NO: 1053454 - RNA, 19 nt, Artificial Sequence
  Description of Artificial Sequence: Synthetic oligonucleotide
caccuuguugcccucgggg

SEQ ID NO: 1053455 - RNA, 19 nt, Artificial Sequence
  Description of Artificial Sequence: Synthetic oligonucleotide
aaggugaaccaguaccgua

SEQ ID NO: 1053456 - RNA, 19 nt, Artificial Sequence
  Description of Artificial Sequence: Synthetic oligonucleotide
guaggugggguccggauac

SEQ ID NO: 1053457 - RNA, 19 nt, Artificial Sequence
  Description of Artificial Sequence: Synthetic oligonucleotide
ccguacuucucauagcugg

SEQ ID NO: 1053458 - RNA, 19 nt, Artificial Sequence
  Description of Artificial Sequence: Synthetic oligonucleotide
uuugauccggaagagcuua

SEQ ID NO: 1053459 - RNA, 19 nt, Artificial Sequence
  Description of Artificial Sequence: Synthetic oligonucleotide
caguaccguauucaggggc

SEQ ID NO: 1053460 - RNA, 19 nt, Artificial Sequence
  Description of Artificial Sequence: Synthetic oligonucleotide
auaucaguccaaggugaac

SEQ ID NO: 1053461 - RNA, 19 nt, Artificial Sequence
  Description of Artificial Sequence: Synthetic oligonucleotide
gguagagcccaguugggag

SEQ ID NO: 1053462 - RNA, 19 nt, Artificial Sequence
  Description of Artificial Sequence: Synthetic oligonucleotide
ugacauugggucucccugu

SEQ ID NO: 1053463 - RNA, 19 nt, Artificial Sequence
  Description of Artificial Sequence: Synthetic oligonucleotide
aguggggcugcucgaagag

SEQ ID NO: 1053464 - RNA, 19 nt, Artificial Sequence
  Description of Artificial Sequence: Synthetic oligonucleotide
uggguucggguguucagcc

SEQ ID NO: 1053465 - RNA, 19 nt, Artificial Sequence
  Description of Artificial Sequence: Synthetic oligonucleotide
ccaaggugaaccaguaccg

SEQ ID NO: 1053466 - RNA, 19 nt, Artificial Sequence
  Description of Artificial Sequence: Synthetic oligonucleotide
acguagaugucagaagucu

SEQ ID NO: 1053467 - RNA, 19 nt, Artificial Sequence
  Description of Artificial Sequence: Synthetic oligonucleotide
accguuggccugaaaagac

SEQ ID NO: 1053468 - RNA, 19 nt, Artificial Sequence
  Description of Artificial Sequence: Synthetic oligonucleotide
ugucguuccacgugaugac

SEQ ID NO: 1053469 - RNA, 19 nt, Artificial Sequence
  Description of Artificial Sequence: Synthetic oligonucleotide
ggacgaacgacauuugauc

SEQ ID NO: 1053470 - RNA, 19 nt, Artificial Sequence
  Description of Artificial Sequence: Synthetic oligonucleotide
uguggugaaugucguucca

SEQ ID NO: 1053471 - RNA, 19 nt, Artificial Sequence
  Description of Artificial Sequence: Synthetic oligonucleotide
gaugguguccuucagucau

SEQ ID NO: 1053472 - RNA, 19 nt, Artificial Sequence
  Description of Artificial Sequence: Synthetic oligonucleotide
ucuuaacacacagcuggcu

SEQ ID NO: 1053473 - RNA, 19 nt, Artificial Sequence
  Description of Artificial Sequence: Synthetic oligonucleotide
guuaagguaggacuacugu

SEQ ID NO: 1053474 - RNA, 19 nt, Artificial Sequence
  Description of Artificial Sequence: Synthetic oligonucleotide
caaauccccucgugggugg

SEQ ID NO: 1053475 - RNA, 19 nt, Artificial Sequence
  Description of Artificial Sequence: Synthetic oligonucleotide
auagaaucggccacacaug

SEQ ID NO: 1053476 - RNA, 19 nt, Artificial Sequence
  Description of Artificial Sequence: Synthetic oligonucleotide
uccuucagucaucugugau

SEQ ID NO: 1053477 - RNA, 19 nt, Artificial Sequence
  Description of Artificial Sequence: Synthetic oligonucleotide
cuaugaggauggacacucg

SEQ ID NO: 1053478 - RNA, 19 nt, Artificial Sequence
  Description of Artificial Sequence: Synthetic oligonucleotide
aaggauccguuaagguagg

SEQ ID NO: 1053479 - RNA, 19 nt, Artificial Sequence
  Description of Artificial Sequence: Synthetic oligonucleotide
uuccucuugcacccuaguc

SEQ ID NO: 1053480 - RNA, 19 nt, Artificial Sequence
  Description of Artificial Sequence: Synthetic oligonucleotide
uggcaugcaggcucacucc

SEQ ID NO: 1053481 - RNA, 19 nt, Artificial Sequence
  Description of Artificial Sequence: Synthetic oligonucleotide
uugauccggaagagcuuag

SEQ ID NO: 1053482 - RNA, 19 nt, Artificial Sequence
  Description of Artificial Sequence: Synthetic oligonucleotide
caguacauaccaggaaaag

SEQ ID NO: 1053483 - RNA, 19 nt, Artificial Sequence
  Description of Artificial Sequence: Synthetic oligonucleotide
ucaguccaaggugaaccag

SEQ ID NO: 1053484 - RNA, 19 nt, Artificial Sequence
  Description of Artificial Sequence: Synthetic oligonucleotide
ucguuccacgugaugacau

SEQ ID NO: 1053485 - RNA, 19 nt, Artificial Sequence
  Description of Artificial Sequence: Synthetic oligonucleotide
gacaggacgaacgacauuu

SEQ ID NO: 1053486 - RNA, 19 nt, Artificial Sequence
  Description of Artificial Sequence: Synthetic oligonucleotide
agguaggacuacuguuauc

SEQ ID NO: 1053487 - RNA, 19 nt, Artificial Sequence
  Description of Artificial Sequence: Synthetic oligonucleotide
gacaauggugccguacuuc

SEQ ID NO: 1053488 - RNA, 19 nt, Artificial Sequence
  Description of Artificial Sequence: Synthetic oligonucleotide
caggcucacuccuuuuccc

SEQ ID NO: 1053489 - RNA, 19 nt, Artificial Sequence
  Description of Artificial Sequence: Synthetic oligonucleotide
cacguagaugucagaaguc

SEQ ID NO: 1053490 - RNA, 19 nt, Artificial Sequence
  Description of Artificial Sequence: Synthetic oligonucleotide
agcacaguacauaccagga

SEQ ID NO: 1053491 - RNA, 19 nt, Artificial Sequence
  Description of Artificial Sequence: Synthetic oligonucleotide
acgugaugacauugggucu

SEQ ID NO: 1053492 - RNA, 19 nt, Artificial Sequence
  Description of Artificial Sequence: Synthetic oligonucleotide
gaagagcuuaggauuggca

SEQ ID NO: 1053493 - RNA, 19 nt, Artificial Sequence
  Description of Artificial Sequence: Synthetic oligonucleotide
aggggcagagaagagcgag

SEQ ID NO: 1053494 - RNA, 19 nt, Artificial Sequence
  Description of Artificial Sequence: Synthetic oligonucleotide
aggaggcggaccugggcgg

SEQ ID NO: 1053495 - RNA, 19 nt, Artificial Sequence
  Description of Artificial Sequence: Synthetic oligonucleotide
guuccacgugaugacauug

SEQ ID NO: 1053496 - RNA, 19 nt, Artificial Sequence
  Description of Artificial Sequence: Synthetic oligonucleotide
gguucggguguucagcccc

SEQ ID NO: 1053497 - RNA, 19 nt, Artificial Sequence
  Description of Artificial Sequence: Synthetic oligonucleotide
uaccguauucaggggcugg

SEQ ID NO: 1053498 - RNA, 19 nt, Artificial Sequence
  Description of Artificial Sequence: Synthetic oligonucleotide
cugaacucccaccccaguc

SEQ ID NO: 1053499 - RNA, 19 nt, Artificial Sequence
  Description of Artificial Sequence: Synthetic oligonucleotide
cuacuuggagaccguuggc

SEQ ID NO: 1053500 - RNA, 19 nt, Artificial Sequence
  Description of Artificial Sequence: Synthetic oligonucleotide
gcucauaucaguccaaggu

SEQ ID NO: 1053501 - RNA, 19 nt, Artificial Sequence
  Description of Artificial Sequence: Synthetic oligonucleotide
gagcgagagaaagacugac

SEQ ID NO: 1053502 - RNA, 19 nt, Artificial Sequence
  Description of Artificial Sequence: Synthetic oligonucleotide
uccguuaagguaggacuac

SEQ ID NO: 1053503 - RNA, 19 nt, Artificial Sequence
  Description of Artificial Sequence: Synthetic oligonucleotide
ggcgggaagacauacugga

SEQ ID NO: 1053504 - RNA, 19 nt, Artificial Sequence
  Description of Artificial Sequence: Synthetic oligonucleotide
acguuggucaaaagccuuc

SEQ ID NO: 1053505 - RNA, 19 nt, Artificial Sequence
  Description of Artificial Sequence: Synthetic oligonucleotide
ugauacccuuggcucucag

SEQ ID NO: 1053506 - RNA, 19 nt, Artificial Sequence
  Description of Artificial Sequence: Synthetic oligonucleotide
cagguagagcccaguuggg

SEQ ID NO: 1053507 - RNA, 19 nt, Artificial Sequence
  Description of Artificial Sequence: Synthetic oligonucleotide
agcccucgcagaaugagug

SEQ ID NO: 1053508 - RNA, 19 nt, Artificial Sequence
  Description of Artificial Sequence: Synthetic oligonucleotide
agaaagacugacagacaga

SEQ ID NO: 1053509 - RNA, 19 nt, Artificial Sequence
  Description of Artificial Sequence: Synthetic oligonucleotide
cccagucagacaaaucccc

SEQ ID NO: 1053510 - RNA, 19 nt, Artificial Sequence
  Description of Artificial Sequence: Synthetic oligonucleotide
ucauggacgugccgauggu

SEQ ID NO: 1053511 - RNA, 19 nt, Artificial Sequence
  Description of Artificial Sequence: Synthetic oligonucleotide
gaccguuggccugaaaaga

SEQ ID NO: 1053512 - RNA, 19 nt, Artificial Sequence
  Description of Artificial Sequence: Synthetic oligonucleotide
gaugacauugggucucccu

SEQ ID NO: 1053513 - RNA, 19 nt, Artificial Sequence
  Description of Artificial Sequence: Synthetic oligonucleotide
agacguuggucaaaagccu

SEQ ID NO: 1053514 - RNA, 19 nt, Artificial Sequence
  Description of Artificial Sequence: Synthetic oligonucleotide
agaaucggccacacauggg

SEQ ID NO: 1053515 - RNA, 19 nt, Artificial Sequence
  Description of Artificial Sequence: Synthetic oligonucleotide
aggacgaacgacauuugau

SEQ ID NO: 1053516 - RNA, 19 nt, Artificial Sequence
  Description of Artificial Sequence: Synthetic oligonucleotide
gagcacguagaugucagaa

SEQ ID NO: 1053517 - RNA, 19 nt, Artificial Sequence
  Description of Artificial Sequence: Synthetic oligonucleotide
ugacuggagcacaguacau

SEQ ID NO: 1053518 - RNA, 19 nt, Artificial Sequence
  Description of Artificial Sequence: Synthetic oligonucleotide
accccuugagagccuugcg

SEQ ID NO: 1053519 - RNA, 19 nt, Artificial Sequence
  Description of Artificial Sequence: Synthetic oligonucleotide
augagugccggcacuucuc

SEQ ID NO: 1053520 - RNA, 19 nt, Artificial Sequence
  Description of Artificial Sequence: Synthetic oligonucleotide
accgggcgggaagacauac

SEQ ID NO: 1053521 - RNA, 19 nt, Artificial Sequence
  Description of Artificial Sequence: Synthetic oligonucleotide
augaggauggacacucggu

SEQ ID NO: 1053522 - RNA, 19 nt, Artificial Sequence
  Description of Artificial Sequence: Synthetic oligonucleotide
gcugguugcccacaagcug

SEQ ID NO: 1053523 - RNA, 19 nt, Artificial Sequence
  Description of Artificial Sequence: Synthetic oligonucleotide
uagucauggacgugccgau

SEQ ID NO: 1053524 - RNA, 19 nt, Artificial Sequence
  Description of Artificial Sequence: Synthetic oligonucleotide
aggugaaccaguaccguau

SEQ ID NO: 1053525 - RNA, 19 nt, Artificial Sequence
  Description of Artificial Sequence: Synthetic oligonucleotide
caucugugauacccuuggc

SEQ ID NO: 1053526 - RNA, 19 nt, Artificial Sequence
  Description of Artificial Sequence: Synthetic oligonucleotide
cuucuguuggaucccagua

SEQ ID NO: 1053527 - RNA, 19 nt, Artificial Sequence
  Description of Artificial Sequence: Synthetic oligonucleotide
cucgaagaggaggcggacc

SEQ ID NO: 1053528 - RNA, 19 nt, Artificial Sequence
  Description of Artificial Sequence: Synthetic oligonucleotide
agggugcuccccaccaccc

SEQ ID NO: 1053529 - RNA, 19 nt, Artificial Sequence
  Description of Artificial Sequence: Synthetic oligonucleotide
acugaacucccaccccagu

SEQ ID NO: 1053530 - RNA, 19 nt, Artificial Sequence
  Description of Artificial Sequence: Synthetic oligonucleotide
cuugcucaggaagucccac

SEQ ID NO: 1053531 - RNA, 19 nt, Artificial Sequence
  Description of Artificial Sequence: Synthetic oligonucleotide
gacaaauccccucgugggu

SEQ ID NO: 1053532 - RNA, 19 nt, Artificial Sequence
  Description of Artificial Sequence: Synthetic oligonucleotide
cuccaucgucccuacccag

SEQ ID NO: 1053533 - RNA, 19 nt, Artificial Sequence
  Description of Artificial Sequence: Synthetic oligonucleotide
agcgagagaaagacugaca

SEQ ID NO: 1053534 - RNA, 19 nt, Artificial Sequence
  Description of Artificial Sequence: Synthetic oligonucleotide
ucgcagaaugagugccggc

SEQ ID NO: 1053535 - RNA, 19 nt, Artificial Sequence
  Description of Artificial Sequence: Synthetic oligonucleotide
guauucaggggcuggaguu

SEQ ID NO: 1053536 - RNA, 19 nt, Artificial Sequence
  Description of Artificial Sequence: Synthetic oligonucleotide
ccgugugguaccaggauac

SEQ ID NO: 1053537 - RNA, 19 nt, Artificial Sequence
  Description of Artificial Sequence: Synthetic oligonucleotide
ggacacucggugcuccucc

SEQ ID NO: 1053538 - RNA, 19 nt, Artificial Sequence
  Description of Artificial Sequence: Synthetic oligonucleotide
cucuugcacccuagucagg

SEQ ID NO: 1053539 - RNA, 19 nt, Artificial Sequence
  Description of Artificial Sequence: Synthetic oligonucleotide
gcacguagaugucagaagu

SEQ ID NO: 1053540 - RNA, 19 nt, Artificial Sequence
  Description of Artificial Sequence: Synthetic oligonucleotide
gugaaccaguaccguauuc

SEQ ID NO: 1053541 - RNA, 19 nt, Artificial Sequence
  Description of Artificial Sequence: Synthetic oligonucleotide
gagaccuccaucgucccua

SEQ ID NO: 1053542 - RNA, 19 nt, Artificial Sequence
  Description of Artificial Sequence: Synthetic oligonucleotide
agguagagcccaguuggga

SEQ ID NO: 1053543 - RNA, 19 nt, Artificial Sequence
  Description of Artificial Sequence: Synthetic oligonucleotide
gugagacguuggucaaaag

SEQ ID NO: 1053544 - RNA, 19 nt, Artificial Sequence
  Description of Artificial Sequence: Synthetic oligonucleotide
gugccguacuucucauagc

SEQ ID NO: 1053545 - RNA, 19 nt, Artificial Sequence
  Description of Artificial Sequence: Synthetic oligonucleotide
auccguuaagguaggacua

SEQ ID NO: 1053546 - RNA, 19 nt, Artificial Sequence
  Description of Artificial Sequence: Synthetic oligonucleotide
caggacgaacgacauuuga

SEQ ID NO: 1053547 - RNA, 19 nt, Artificial Sequence
  Description of Artificial Sequence: Synthetic oligonucleotide
cgaacgacauuugauccgg

SEQ ID NO: 1053548 - RNA, 19 nt, Artificial Sequence
  Description of Artificial Sequence: Synthetic oligonucleotide
ggauccguuaagguaggac

SEQ ID NO: 1053549 - RNA, 19 nt, Artificial Sequence
  Description of Artificial Sequence: Synthetic oligonucleotide
guccaaggugaaccaguac

SEQ ID NO: 1053550 - RNA, 19 nt, Artificial Sequence
  Description of Artificial Sequence: Synthetic oligonucleotide
ggggagcccgucuuggccc

SEQ ID NO: 1053551 - RNA, 19 nt, Artificial Sequence
  Description of Artificial Sequence: Synthetic oligonucleotide
cccuagucagguagguggg

SEQ ID NO: 1053552 - RNA, 19 nt, Artificial Sequence
  Description of Artificial Sequence: Synthetic oligonucleotide
cauugggucucccuguagu

SEQ ID NO: 1053553 - RNA, 19 nt, Artificial Sequence
  Description of Artificial Sequence: Synthetic oligonucleotide
gauacccuuggcucucagu

SEQ ID NO: 1053554 - RNA, 19 nt, Artificial Sequence
  Description of Artificial Sequence: Synthetic oligonucleotide
gaaugagugccggcacuuc

SEQ ID NO: 1053555 - RNA, 19 nt, Artificial Sequence
  Description of Artificial Sequence: Synthetic oligonucleotide
aauccccucguggguggug

SEQ ID NO: 1053556 - RNA, 19 nt, Artificial Sequence
  Description of Artificial Sequence: Synthetic oligonucleotide
gugggguccggauacccaa

SEQ ID NO: 1053557 - RNA, 19 nt, Artificial Sequence
  Description of Artificial Sequence: Synthetic oligonucleotide
cagcauccguccguucugg

SEQ ID NO: 1053558 - RNA, 19 nt, Artificial Sequence
  Description of Artificial Sequence: Synthetic oligonucleotide
aggcggaccugggcggugc

SEQ ID NO: 1053559 - RNA, 19 nt, Artificial Sequence
  Description of Artificial Sequence: Synthetic oligonucleotide
acaccgggcgggaagacau

SEQ ID NO: 1053560 - RNA, 19 nt, Artificial Sequence
  Description of Artificial Sequence: Synthetic oligonucleotide
ccucgcagaaugagugccg

SEQ ID NO: 1053561 - RNA, 19 nt, Artificial Sequence
  Description of Artificial Sequence: Synthetic oligonucleotide
ggaagucccacacaggcuu

SEQ ID NO: 1053562 - RNA, 19 nt, Artificial Sequence
  Description of Artificial Sequence: Synthetic oligonucleotide
ccguuggccugaaaagacc

SEQ ID NO: 1053563 - RNA, 19 nt, Artificial Sequence
  Description of Artificial Sequence: Synthetic oligonucleotide
ggggcaguccgggagguag

SEQ ID NO: 1053564 - RNA, 19 nt, Artificial Sequence
  Description of Artificial Sequence: Synthetic oligonucleotide
ugggguccggauacccaaa

SEQ ID NO: 1053565 - RNA, 19 nt, Artificial Sequence
  Description of Artificial Sequence: Synthetic oligonucleotide
accguauucaggggcugga

SEQ ID NO: 1053566 - RNA, 19 nt, Artificial Sequence
  Description of Artificial Sequence: Synthetic oligonucleotide
cguuaagguaggacuacug

SEQ ID NO: 1053567 - RNA, 19 nt, Artificial Sequence
  Description of Artificial Sequence: Synthetic oligonucleotide
ccaguaccguauucagggg

SEQ ID NO: 1053568 - RNA, 19 nt, Artificial Sequence
  Description of Artificial Sequence: Synthetic oligonucleotide
aguccaaggugaaccagua

SEQ ID NO: 1053569 - RNA, 19 nt, Artificial Sequence
  Description of Artificial Sequence: Synthetic oligonucleotide
uccgggagguaggccaccc

SEQ ID NO: 1053570 - RNA, 19 nt, Artificial Sequence
  Description of Artificial Sequence: Synthetic oligonucleotide
auggugccguacuucucau

SEQ ID NO: 1053571 - RNA, 19 nt, Artificial Sequence
  Description of Artificial Sequence: Synthetic oligonucleotide
ucgucccuacccagauccu

SEQ ID NO: 1053572 - RNA, 19 nt, Artificial Sequence
  Description of Artificial Sequence: Synthetic oligonucleotide
aaauccccucguggguggu

SEQ ID NO: 1053573 - RNA, 19 nt, Artificial Sequence
  Description of Artificial Sequence: Synthetic oligonucleotide
ggugagacguuggucaaaa

SEQ ID NO: 1053574 - RNA, 19 nt, Artificial Sequence
  Description of Artificial Sequence: Synthetic oligonucleotide
caguccaaggugaaccagu

SEQ ID NO: 1053575 - RNA, 19 nt, Artificial Sequence
  Description of Artificial Sequence: Synthetic oligonucleotide
gggcgggaagacauacugg

SEQ ID NO: 1053576 - RNA, 19 nt, Artificial Sequence
  Description of Artificial Sequence: Synthetic oligonucleotide
ccacccgugugguaccagg

SEQ ID NO: 1053577 - RNA, 19 nt, Artificial Sequence
  Description of Artificial Sequence: Synthetic oligonucleotide
cuguuggaucccaguagaa

SEQ ID NO: 1053578 - RNA, 19 nt, Artificial Sequence
  Description of Artificial Sequence: Synthetic oligonucleotide
ggugaaugucguuccacgu

SEQ ID NO: 1053579 - RNA, 19 nt, Artificial Sequence
  Description of Artificial Sequence: Synthetic oligonucleotide
cucagacgaggaggaagug

SEQ ID NO: 1053580 - RNA, 19 nt, Artificial Sequence
  Description of Artificial Sequence: Synthetic oligonucleotide
ggacuacuguuaucuuaac

SEQ ID NO: 1053581 - RNA, 19 nt, Artificial Sequence
  Description of Artificial Sequence: Synthetic oligonucleotide
gccauucuggacaggacga

SEQ ID NO: 1053582 - RNA, 19 nt, Artificial Sequence
  Description of Artificial Sequence: Synthetic oligonucleotide
cuccuuauaggggcagaga

SEQ ID NO: 1053583 - RNA, 19 nt, Artificial Sequence
  Description of Artificial Sequence: Synthetic oligonucleotide
cccucgcagaaugagugcc

SEQ ID NO: 1053584 - RNA, 19 nt, Artificial Sequence
  Description of Artificial Sequence: Synthetic oligonucleotide
cacccuagucagguaggug

SEQ ID NO: 1053585 - RNA, 19 nt, Artificial Sequence
  Description of Artificial Sequence: Synthetic oligonucleotide
caucgucccuacccagauc

SEQ ID NO: 1053586 - RNA, 19 nt, Artificial Sequence
  Description of Artificial Sequence: Synthetic oligonucleotide
cacccgugugguaccagga

SEQ ID NO: 1053587 - RNA, 19 nt, Artificial Sequence
  Description of Artificial Sequence: Synthetic oligonucleotide
uaggugggguccggauacc

SEQ ID NO: 1053588 - RNA, 19 nt, Artificial Sequence
  Description of Artificial Sequence: Synthetic oligonucleotide
gcaccuuguugcccucggg

SEQ ID NO: 1053589 - RNA, 19 nt, Artificial Sequence
  Description of Artificial Sequence: Synthetic oligonucleotide
guccccuuccccacugaac

SEQ ID NO: 1053590 - RNA, 19 nt, Artificial Sequence
  Description of Artificial Sequence: Synthetic oligonucleotide
cgggcgggaagacauacug

SEQ ID NO: 1053591 - RNA, 19 nt, Artificial Sequence
  Description of Artificial Sequence: Synthetic oligonucleotide
ccguucuggggcugguugc

SEQ ID NO: 1053592 - RNA, 19 nt, Artificial Sequence
  Description of Artificial Sequence: Synthetic oligonucleotide
ggacgugccgauggugaag

SEQ ID NO: 1053593 - RNA, 19 nt, Artificial Sequence
  Description of Artificial Sequence: Synthetic oligonucleotide
agaccagcauccguccguu

SEQ ID NO: 1053594 - RNA, 19 nt, Artificial Sequence
  Description of Artificial Sequence: Synthetic oligonucleotide
gaacgacauuugauccgga

SEQ ID NO: 1053595 - RNA, 19 nt, Artificial Sequence
  Description of Artificial Sequence: Synthetic oligonucleotide
ggguucggguguucagccc

SEQ ID NO: 1053596 - RNA, 19 nt, Artificial Sequence
  Description of Artificial Sequence: Synthetic oligonucleotide
gacguuggucaaaagccuu

SEQ ID NO: 1053597 - RNA, 19 nt, Artificial Sequence
  Description of Artificial Sequence: Synthetic oligonucleotide
cguuggccugaaaagacca

SEQ ID NO: 1053598 - RNA, 19 nt, Artificial Sequence
  Description of Artificial Sequence: Synthetic oligonucleotide
gggguccggauacccaaac

SEQ ID NO: 1053599 - RNA, 19 nt, Artificial Sequence
  Description of Artificial Sequence: Synthetic oligonucleotide
cgugaugacauugggucuc

SEQ ID NO: 1053600 - RNA, 19 nt, Artificial Sequence
  Description of Artificial Sequence: Synthetic oligonucleotide
cccaucuaugaggauggac

SEQ ID NO: 1053601 - RNA, 19 nt, Artificial Sequence
  Description of Artificial Sequence: Synthetic oligonucleotide
accgaacuccuggguucgg

SEQ ID NO: 1053602 - RNA, 19 nt, Artificial Sequence
  Description of Artificial Sequence: Synthetic oligonucleotide
gcccucgcagaaugagugc

SEQ ID NO: 1053603 - RNA, 19 nt, Artificial Sequence
  Description of Artificial Sequence: Synthetic oligonucleotide
aggugagacguuggucaaa

SEQ ID NO: 1053604 - RNA, 19 nt, Artificial Sequence
  Description of Artificial Sequence: Synthetic oligonucleotide
ucggggcaguccgggaggu

SEQ ID NO: 1053605 - RNA, 19 nt, Artificial Sequence
  Description of Artificial Sequence: Synthetic oligonucleotide
ggguccggauacccaaaca

SEQ ID NO: 1053606 - RNA, 19 nt, Artificial Sequence
  Description of Artificial Sequence: Synthetic oligonucleotide
agcuuaggauuggcaugca

SEQ ID NO: 1053607 - RNA, 19 nt, Artificial Sequence
  Description of Artificial Sequence: Synthetic oligonucleotide
ggauuggcaugcaggcuca

SEQ ID NO: 1053608 - RNA, 19 nt, Artificial Sequence
  Description of Artificial Sequence: Synthetic oligonucleotide
gcuucuguuggaucccagu

SEQ ID NO: 1053609 - RNA, 19 nt, Artificial Sequence
  Description of Artificial Sequence: Synthetic oligonucleotide
cuugcacccuagucaggua

SEQ ID NO: 1053610 - RNA, 19 nt, Artificial Sequence
  Description of Artificial Sequence: Synthetic oligonucleotide
gcccgugugaugcagcccu

SEQ ID NO: 1053611 - RNA, 19 nt, Artificial Sequence
  Description of Artificial Sequence: Synthetic oligonucleotide
caaggugaaccaguaccgu

SEQ ID NO: 1053612 - RNA, 19 nt, Artificial Sequence
  Description of Artificial Sequence: Synthetic oligonucleotide
guaggacuacuguuaucuu

SEQ ID NO: 1053613 - RNA, 19 nt, Artificial Sequence
  Description of Artificial Sequence: Synthetic oligonucleotide
gagccuugcgggccaggua

SEQ ID NO: 1053614 - RNA, 19 nt, Artificial Sequence
  Description of Artificial Sequence: Synthetic oligonucleotide
aggauccguuaagguagga

SEQ ID NO: 1053615 - RNA, 19 nt, Artificial Sequence
  Description of Artificial Sequence: Synthetic oligonucleotide
acgugccgauggugaaggu

SEQ ID NO: 1053616 - RNA, 19 nt, Artificial Sequence
  Description of Artificial Sequence: Synthetic oligonucleotide
gccguacuucucauagcug

SEQ ID NO: 1053617 - RNA, 19 nt, Artificial Sequence
  Description of Artificial Sequence: Synthetic oligonucleotide
gggagcccgucuuggcccc

SEQ ID NO: 1053618 - RNA, 19 nt, Artificial Sequence
  Description of Artificial Sequence: Synthetic oligonucleotide
gcgggaggcagcucauauc

SEQ ID NO: 1053619 - RNA, 19 nt, Artificial Sequence
  Description of Artificial Sequence: Synthetic oligonucleotide
ccuccaucgucccuaccca

SEQ ID NO: 1053620 - RNA, 19 nt, Artificial Sequence
  Description of Artificial Sequence: Synthetic oligonucleotide
gaaugucguuccacgugau

SEQ ID NO: 1053621 - RNA, 19 nt, Artificial Sequence
  Description of Artificial Sequence: Synthetic oligonucleotide
ccguauucaggggcuggag

SEQ ID NO: 1053622 - RNA, 19 nt, Artificial Sequence
  Description of Artificial Sequence: Synthetic oligonucleotide
cagcccucgcagaaugagu

SEQ ID NO: 1053623 - RNA, 19 nt, Artificial Sequence
  Description of Artificial Sequence: Synthetic oligonucleotide
gccggcacuucuccaaugu

SEQ ID NO: 1053624 - RNA, 19 nt, Artificial Sequence
  Description of Artificial Sequence: Synthetic oligonucleotide
guccgggagguaggccacc

SEQ ID NO: 1053625 - RNA, 19 nt, Artificial Sequence
  Description of Artificial Sequence: Synthetic oligonucleotide
gcucgaagaggaggcggac

SEQ ID NO: 1053626 - RNA, 19 nt, Artificial Sequence
  Description of Artificial Sequence: Synthetic oligonucleotide
ccacgugaugacauugggu

SEQ ID NO: 1053627 - RNA, 19 nt, Artificial Sequence
  Description of Artificial Sequence: Synthetic oligonucleotide
ggugaaccaguaccguauu

SEQ ID NO: 1053628 - RNA, 19 nt, Artificial Sequence
  Description of Artificial Sequence: Synthetic oligonucleotide
ccuugcgggccagguagag

SEQ ID NO: 1053629 - RNA, 19 nt, Artificial Sequence
  Description of Artificial Sequence: Synthetic oligonucleotide
cccagauccuuucccagcu

SEQ ID NO: 1053630 - RNA, 19 nt, Artificial Sequence
  Description of Artificial Sequence: Synthetic oligonucleotide
ccgggagguaggccacccg

SEQ ID NO: 1053631 - RNA, 19 nt, Artificial Sequence
  Description of Artificial Sequence: Synthetic oligonucleotide
cgugugguaccaggauacc

SEQ ID NO: 1053632 - RNA, 19 nt, Artificial Sequence
  Description of Artificial Sequence: Synthetic oligonucleotide
guaaccccuugagagccuu

SEQ ID NO: 1053633 - RNA, 19 nt, Artificial Sequence
  Description of Artificial Sequence: Synthetic oligonucleotide
cccgugugguaccaggaua

SEQ ID NO: 1053634 - RNA, 19 nt, Artificial Sequence
  Description of Artificial Sequence: Synthetic oligonucleotide
gggucucccuguagucaug

SEQ ID NO: 1053635 - RNA, 19 nt, Artificial Sequence
  Description of Artificial Sequence: Synthetic oligonucleotide
ggcccgugugaugcagccc

SEQ ID NO: 1053636 - RNA, 19 nt, Artificial Sequence
  Description of Artificial Sequence: Synthetic oligonucleotide
gccgauggugaaggugaga

SEQ ID NO: 1053637 - RNA, 19 nt, Artificial Sequence
  Description of Artificial Sequence: Synthetic oligonucleotide
gcggaccugggcggugcag

SEQ ID NO: 1053638 - RNA, 19 nt, Artificial Sequence
  Description of Artificial Sequence: Synthetic oligonucleotide
cccgugugaugcagcccuc

SEQ ID NO: 1053639 - RNA, 19 nt, Artificial Sequence
  Description of Artificial Sequence: Synthetic oligonucleotide
ggcagcccaugagcucccc

SEQ ID NO: 1053640 - RNA, 19 nt, Artificial Sequence
  Description of Artificial Sequence: Synthetic oligonucleotide
caccgggcgggaagacaua

SEQ ID NO: 1053641 - RNA, 19 nt, Artificial Sequence
  Description of Artificial Sequence: Synthetic oligonucleotide
ccaucgucccuacccagau

SEQ ID NO: 1053642 - RNA, 19 nt, Artificial Sequence
  Description of Artificial Sequence: Synthetic oligonucleotide
ggacaggacgaacgacauu

SEQ ID NO: 1053643 - RNA, 19 nt, Artificial Sequence
  Description of Artificial Sequence: Synthetic oligonucleotide
ccucuuucaguaaccccuu

SEQ ID NO: 1053644 - RNA, 19 nt, Artificial Sequence
  Description of Artificial Sequence: Synthetic oligonucleotide
ggcggaccugggcggugca

SEQ ID NO: 1053645 - RNA, 19 nt, Artificial Sequence
  Description of Artificial Sequence: Synthetic oligonucleotide
gcccgucuuggccccugga

SEQ ID NO: 1053646 - RNA, 19 nt, Artificial Sequence
  Description of Artificial Sequence: Synthetic oligonucleotide
ccguuaagguaggacuacu

SEQ ID NO: 1053647 - RNA, 19 nt, Artificial Sequence
  Description of Artificial Sequence: Synthetic oligonucleotide
ggccacccgugugguacca

SEQ ID NO: 1053648 - RNA, 19 nt, Artificial Sequence
  Description of Artificial Sequence: Synthetic oligonucleotide
cgggagguaggccacccgu

SEQ ID NO: 1053649 - RNA, 19 nt, Artificial Sequence
  Description of Artificial Sequence: Synthetic oligonucleotide
gcccaguugggaggggcgu

SEQ ID NO: 1053650 - RNA, 19 nt, Artificial Sequence
  Description of Artificial Sequence: Synthetic oligonucleotide
guccguucuggggcugguu

SEQ ID NO: 1053651 - RNA, 19 nt, Artificial Sequence
  Description of Artificial Sequence: Synthetic oligonucleotide
gcaugcaggcucacuccuu

SEQ ID NO: 1053652 - RNA, 19 nt, Artificial Sequence
  Description of Artificial Sequence: Synthetic oligonucleotide
ccaccccagucagacaaau

SEQ ID NO: 1053653 - RNA, 19 nt, Artificial Sequence
  Description of Artificial Sequence: Synthetic oligonucleotide
cguuccacgugaugacauu

SEQ ID NO: 1053654 - RNA, 19 nt, Artificial Sequence
  Description of Artificial Sequence: Synthetic oligonucleotide
ccccaucuaugaggaugga

SEQ ID NO: 1053655 - RNA, 19 nt, Artificial Sequence
  Description of Artificial Sequence: Synthetic oligonucleotide
cgucccuacccagauccuu

SEQ ID NO: 1053656 - RNA, 19 nt, Artificial Sequence
  Description of Artificial Sequence: Synthetic oligonucleotide
cguccguucuggggcuggu

SEQ ID NO: 1053657 - RNA, 19 nt, Artificial Sequence
  Description of Artificial Sequence: Synthetic oligonucleotide
aauaauauguuuucuccag

SEQ ID NO: 1053658 - RNA, 19 nt, Artificial Sequence
  Description of Artificial Sequence: Synthetic oligonucleotide
aaacugaagccacauaucg

SEQ ID NO: 1053659 - RNA, 19 nt, Artificial Sequence
  Description of Artificial Sequence: Synthetic oligonucleotide
aauaaguacaaucaucaca

SEQ ID NO: 1053660 - RNA, 19 nt, Artificial Sequence
  Description of Artificial Sequence: Synthetic oligonucleotide
aaucauaucucccagugug

SEQ ID NO: 1053661 - RNA, 19 nt, Artificial Sequence
  Description of Artificial Sequence: Synthetic oligonucleotide
auguaguagaacuugauuc

SEQ ID NO: 1053662 - RNA, 19 nt, Artificial Sequence
  Description of Artificial Sequence: Synthetic oligonucleotide
aacuugauucaccagaaag

SEQ ID NO: 1053663 - RNA, 19 nt, Artificial Sequence
  Description of Artificial Sequence: Synthetic oligonucleotide
auacccaccaauuacauag

SEQ ID NO: 1053664 - RNA, 19 nt, Artificial Sequence
  Description of Artificial Sequence: Synthetic oligonucleotide
ugcccuuaaaacaacaggg

SEQ ID NO: 1053665 - RNA, 19 nt, Artificial Sequence
  Description of Artificial Sequence: Synthetic oligonucleotide
aacauuccgcauuagaaag

SEQ ID NO: 1053666 - RNA, 19 nt, Artificial Sequence
  Description of Artificial Sequence: Synthetic oligonucleotide
cauguaaggaaacugaagc

SEQ ID NO: 1053667 - RNA, 19 nt, Artificial Sequence
  Description of Artificial Sequence: Synthetic oligonucleotide
aauugcauagagucucccc

SEQ ID NO: 1053668 - RNA, 19 nt, Artificial Sequence
  Description of Artificial Sequence: Synthetic oligonucleotide
gagaauucccaucauaucc

SEQ ID NO: 1053669 - RNA, 19 nt, Artificial Sequence
  Description of Artificial Sequence: Synthetic oligonucleotide
gaauguaccauacacagca

SEQ ID NO: 1053670 - RNA, 19 nt, Artificial Sequence
  Description of Artificial Sequence: Synthetic oligonucleotide
agagacguaaaucauaucu

SEQ ID NO: 1053671 - RNA, 19 nt, Artificial Sequence
  Description of Artificial Sequence: Synthetic oligonucleotide
auaaguacaaucaucacag

SEQ ID NO: 1053672 - RNA, 19 nt, Artificial Sequence
  Description of Artificial Sequence: Synthetic oligonucleotide
caauguuugggucauaccg

SEQ ID NO: 1053673 - RNA, 19 nt, Artificial Sequence
  Description of Artificial Sequence: Synthetic oligonucleotide
uucuguuuaccacagguag

SEQ ID NO: 1053674 - RNA, 19 nt, Artificial Sequence
  Description of Artificial Sequence: Synthetic oligonucleotide
aaauaauauguuuucucca

SEQ ID NO: 1053675 - RNA, 19 nt, Artificial Sequence
  Description of Artificial Sequence: Synthetic oligonucleotide
uagaauacacgcuaaagac

SEQ ID NO: 1053676 - RNA, 19 nt, Artificial Sequence
  Description of Artificial Sequence: Synthetic oligonucleotide
aagacgauuguaaagucac

SEQ ID NO: 1053677 - RNA, 19 nt, Artificial Sequence
  Description of Artificial Sequence: Synthetic oligonucleotide
ucggagaacacauacacca

SEQ ID NO: 1053678 - RNA, 19 nt, Artificial Sequence
  Description of Artificial Sequence: Synthetic oligonucleotide
aaugcuacucagcagagaa

SEQ ID NO: 1053679 - RNA, 19 nt, Artificial Sequence
  Description of Artificial Sequence: Synthetic oligonucleotide
ugaacuacuaggcugcagc

SEQ ID NO: 1053680 - RNA, 19 nt, Artificial Sequence
  Description of Artificial Sequence: Synthetic oligonucleotide
acuacagcggaugaaaggc

SEQ ID NO: 1053681 - RNA, 19 nt, Artificial Sequence
  Description of Artificial Sequence: Synthetic oligonucleotide
gaauacacgcuaaagacag

SEQ ID NO: 1053682 - RNA, 19 nt, Artificial Sequence
  Description of Artificial Sequence: Synthetic oligonucleotide
cugaauguaccauacacag

SEQ ID NO: 1053683 - RNA, 19 nt, Artificial Sequence
  Description of Artificial Sequence: Synthetic oligonucleotide
auguuguaagcuucaagcc

SEQ ID NO: 1053684 - RNA, 19 nt, Artificial Sequence
  Description of Artificial Sequence: Synthetic oligonucleotide
gauacauacguucucuccc

SEQ ID NO: 1053685 - RNA, 19 nt, Artificial Sequence
  Description of Artificial Sequence: Synthetic oligonucleotide
aaguacaaucaucacagca

SEQ ID NO: 1053686 - RNA, 19 nt, Artificial Sequence
  Description of Artificial Sequence: Synthetic oligonucleotide
cuagacaguagauauuccg

SEQ ID NO: 1053687 - RNA, 19 nt, Artificial Sequence
  Description of Artificial Sequence: Synthetic oligonucleotide
ucuguaauguaccuggggu

SEQ ID NO: 1053688 - RNA, 19 nt, Artificial Sequence
  Description of Artificial Sequence: Synthetic oligonucleotide
aacuacagcggaugaaagg

SEQ ID NO: 1053689 - RNA, 19 nt, Artificial Sequence
  Description of Artificial Sequence: Synthetic oligonucleotide
uuccgcauuagaaagaccu

SEQ ID NO: 1053690 - RNA, 19 nt, Artificial Sequence
  Description of Artificial Sequence: Synthetic oligonucleotide
uguaguagaacuugauuca

SEQ ID NO: 1053691 - RNA, 19 nt, Artificial Sequence
  Description of Artificial Sequence: Synthetic oligonucleotide
aaaguuggucuucacccac

SEQ ID NO: 1053692 - RNA, 19 nt, Artificial Sequence
  Description of Artificial Sequence: Synthetic oligonucleotide
aguacaaucaucacagcac

SEQ ID NO: 1053693 - RNA, 19 nt, Artificial Sequence
  Description of Artificial Sequence: Synthetic oligonucleotide
ccaccaauuacauagaucc

SEQ ID NO: 1053694 - RNA, 19 nt, Artificial Sequence
  Description of Artificial Sequence: Synthetic oligonucleotide
aguguaguaauguaguaga

SEQ ID NO: 1053695 - RNA, 19 nt, Artificial Sequence
  Description of Artificial Sequence: Synthetic oligonucleotide
uuaccaguaugaaggagcg

SEQ ID NO: 1053696 - RNA, 19 nt, Artificial Sequence
  Description of Artificial Sequence: Synthetic oligonucleotide
uagaguagucauuagcucc

SEQ ID NO: 1053697 - RNA, 19 nt, Artificial Sequence
  Description of Artificial Sequence: Synthetic oligonucleotide
ucaacuagaucucugcacu

SEQ ID NO: 1053698 - RNA, 19 nt, Artificial Sequence
  Description of Artificial Sequence: Synthetic oligonucleotide
ggaugaauagaauacacgc

SEQ ID NO: 1053699 - RNA, 19 nt, Artificial Sequence
  Description of Artificial Sequence: Synthetic oligonucleotide
uguuguaagcuucaagcca

SEQ ID NO: 1053700 - RNA, 19 nt, Artificial Sequence
  Description of Artificial Sequence: Synthetic oligonucleotide
gaugguacaacauuccgca

SEQ ID NO: 1053701 - RNA, 19 nt, Artificial Sequence
  Description of Artificial Sequence: Synthetic oligonucleotide
uccaggaugaauagaauac

SEQ ID NO: 1053702 - RNA, 19 nt, Artificial Sequence
  Description of Artificial Sequence: Synthetic oligonucleotide
aucaacuagaucucugcac

SEQ ID NO: 1053703 - RNA, 19 nt, Artificial Sequence
  Description of Artificial Sequence: Synthetic oligonucleotide
auagcauucaaugcuacuc

SEQ ID NO: 1053704 - RNA, 19 nt, Artificial Sequence
  Description of Artificial Sequence: Synthetic oligonucleotide
ucauguaaggaaacugaag

SEQ ID NO: 1053705 - RNA, 19 nt, Artificial Sequence
  Description of Artificial Sequence: Synthetic oligonucleotide
uagacaguagauauuccgc

SEQ ID NO: 1053706 - RNA, 19 nt, Artificial Sequence
  Description of Artificial Sequence: Synthetic oligonucleotide
auacacgcuaaagacaggc

SEQ ID NO: 1053707 - RNA, 19 nt, Artificial Sequence
  Description of Artificial Sequence: Synthetic oligonucleotide
ucuguuuaccacagguagg

SEQ ID NO: 1053708 - RNA, 19 nt, Artificial Sequence
  Description of Artificial Sequence: Synthetic oligonucleotide
aaaggauccuugauucucc

SEQ ID NO: 1053709 - RNA, 19 nt, Artificial Sequence
  Description of Artificial Sequence: Synthetic oligonucleotide
uguaaggaaacugaagcca

SEQ ID NO: 1053710 - RNA, 19 nt, Artificial Sequence
  Description of Artificial Sequence: Synthetic oligonucleotide
aguagaacuugauucacca

SEQ ID NO: 1053711 - RNA, 19 nt, Artificial Sequence
  Description of Artificial Sequence: Synthetic oligonucleotide
uguaaucuagacauuccac

SEQ ID NO: 1053712 - RNA, 19 nt, Artificial Sequence
  Description of Artificial Sequence: Synthetic oligonucleotide
auacucgugacaguugucc

SEQ ID NO: 1053713 - RNA, 19 nt, Artificial Sequence
  Description of Artificial Sequence: Synthetic oligonucleotide
uuuacaccaucucuuauuc

SEQ ID NO: 1053714 - RNA, 19 nt, Artificial Sequence
  Description of Artificial Sequence: Synthetic oligonucleotide
agcaguauuaagcacuucu

SEQ ID NO: 1053715 - RNA, 19 nt, Artificial Sequence
  Description of Artificial Sequence: Synthetic oligonucleotide
auaucucccagcaugcucc

SEQ ID NO: 1053716 - RNA, 19 nt, Artificial Sequence
  Description of Artificial Sequence: Synthetic oligonucleotide
guauuaagcacuucuuagc

SEQ ID NO: 1053717 - RNA, 19 nt, Artificial Sequence
  Description of Artificial Sequence: Synthetic oligonucleotide
ucucacauccaaaugugca

SEQ ID NO: 1053718 - RNA, 19 nt, Artificial Sequence
  Description of Artificial Sequence: Synthetic oligonucleotide
cuccauacuuguaugacgc

SEQ ID NO: 1053719 - RNA, 19 nt, Artificial Sequence
  Description of Artificial Sequence: Synthetic oligonucleotide
ucucaugaguaccuguugc

SEQ ID NO: 1053720 - RNA, 19 nt, Artificial Sequence
  Description of Artificial Sequence: Synthetic oligonucleotide
aaucuagacauuccacuga

SEQ ID NO: 1053721 - RNA, 19 nt, Artificial Sequence
  Description of Artificial Sequence: Synthetic oligonucleotide
uuucucggagaacacauac

SEQ ID NO: 1053722 - RNA, 19 nt, Artificial Sequence
  Description of Artificial Sequence: Synthetic oligonucleotide
augaauagaauacacgcua

SEQ ID NO: 1053723 - RNA, 19 nt, Artificial Sequence
  Description of Artificial Sequence: Synthetic oligonucleotide
acaguuacuuuucucggag

SEQ ID NO: 1053724 - RNA, 19 nt, Artificial Sequence
  Description of Artificial Sequence: Synthetic oligonucleotide
acgauuguaaagucacagg

SEQ ID NO: 1053725 - RNA, 19 nt, Artificial Sequence
  Description of Artificial Sequence: Synthetic oligonucleotide
gacgauuguaaagucacag

SEQ ID NO: 1053726 - RNA, 19 nt, Artificial Sequence
  Description of Artificial Sequence: Synthetic oligonucleotide
guaguaauguaguagaacu

SEQ ID NO: 1053727 - RNA, 19 nt, Artificial Sequence
  Description of Artificial Sequence: Synthetic oligonucleotide
cauccgaacauacuguaag

SEQ ID NO: 1053728 - RNA, 19 nt, Artificial Sequence
  Description of Artificial Sequence: Synthetic oligonucleotide
agagaauucccaucauauc

SEQ ID NO: 1053729 - RNA, 19 nt, Artificial Sequence
  Description of Artificial Sequence: Synthetic oligonucleotide
agaugguacaacauuccgc

SEQ ID NO: 1053730 - RNA, 19 nt, Artificial Sequence
  Description of Artificial Sequence: Synthetic oligonucleotide
auaggggccacagaauacc

SEQ ID NO: 1053731 - RNA, 19 nt, Artificial Sequence
  Description of Artificial Sequence: Synthetic oligonucleotide
ugccauggcuacaugagcc

SEQ ID NO: 1053732 - RNA, 19 nt, Artificial Sequence
  Description of Artificial Sequence: Synthetic oligonucleotide
aguaaucagguaccugaac

SEQ ID NO: 1053733 - RNA, 19 nt, Artificial Sequence
  Description of Artificial Sequence: Synthetic oligonucleotide
ugugcccuuaaaacaacag

SEQ ID NO: 1053734 - RNA, 19 nt, Artificial Sequence
  Description of Artificial Sequence: Synthetic oligonucleotide
uguaaacuacagcggauga

SEQ ID NO: 1053735 - RNA, 19 nt, Artificial Sequence
  Description of Artificial Sequence: Synthetic oligonucleotide
uaccugaacuacuaggcug

SEQ ID NO: 1053736 - RNA, 19 nt, Artificial Sequence
  Description of Artificial Sequence: Synthetic oligonucleotide
acuuguaugacgccugcug

SEQ ID NO: 1053737 - RNA, 19 nt, Artificial Sequence
  Description of Artificial Sequence: Synthetic oligonucleotide
aacaguuacuuuucucgga

SEQ ID NO: 1053738 - RNA, 19 nt, Artificial Sequence
  Description of Artificial Sequence: Synthetic oligonucleotide
uacauagauccgaucaugu

SEQ ID NO: 1053739 - RNA, 19 nt, Artificial Sequence
  Description of Artificial Sequence: Synthetic oligonucleotide
uguaguaauguaguagaac

SEQ ID NO: 1053740 - RNA, 19 nt, Artificial Sequence
  Description of Artificial Sequence: Synthetic oligonucleotide
uacaacauuccgcauuaga

SEQ ID NO: 1053741 - RNA, 19 nt, Artificial Sequence
  Description of Artificial Sequence: Synthetic oligonucleotide
gauccgaucauguaaggaa

SEQ ID NO: 1053742 - RNA, 19 nt, Artificial Sequence
  Description of Artificial Sequence: Synthetic oligonucleotide
uguaauguaccugggguca

SEQ ID NO: 1053743 - RNA, 19 nt, Artificial Sequence
  Description of Artificial Sequence: Synthetic oligonucleotide
ugaauagaauacacgcuaa

SEQ ID NO: 1053744 - RNA, 19 nt, Artificial Sequence
  Description of Artificial Sequence: Synthetic oligonucleotide
ccugcaauugcauagaguc

SEQ ID NO: 1053745 - RNA, 19 nt, Artificial Sequence
  Description of Artificial Sequence: Synthetic oligonucleotide
auuccacugaacugaggcg

SEQ ID NO: 1053746 - RNA, 19 nt, Artificial Sequence
  Description of Artificial Sequence: Synthetic oligonucleotide
acguaaaucauaucuccca

SEQ ID NO: 1053747 - RNA, 19 nt, Artificial Sequence
  Description of Artificial Sequence: Synthetic oligonucleotide
uacaccaucucuuauucua

SEQ ID NO: 1053748 - RNA, 19 nt, Artificial Sequence
  Description of Artificial Sequence: Synthetic oligonucleotide
agcacuucuuagcaaagug

SEQ ID NO: 1053749 - RNA, 19 nt, Artificial Sequence
  Description of Artificial Sequence: Synthetic oligonucleotide
caacauuaccaguaugaag

SEQ ID NO: 1053750 - RNA, 19 nt, Artificial Sequence
  Description of Artificial Sequence: Synthetic oligonucleotide
auacuuguaugacgccugc

SEQ ID NO: 1053751 - RNA, 19 nt, Artificial Sequence
  Description of Artificial Sequence: Synthetic oligonucleotide
gugcccuuaaaacaacagg

SEQ ID NO: 1053752 - RNA, 19 nt, Artificial Sequence
  Description of Artificial Sequence: Synthetic oligonucleotide
uagucauuagcuccagcug

SEQ ID NO: 1053753 - RNA, 19 nt, Artificial Sequence
  Description of Artificial Sequence: Synthetic oligonucleotide
auaucucccagugugguag

SEQ ID NO: 1053754 - RNA, 19 nt, Artificial Sequence
  Description of Artificial Sequence: Synthetic oligonucleotide
ugaauguaccauacacagc

SEQ ID NO: 1053755 - RNA, 19 nt, Artificial Sequence
  Description of Artificial Sequence: Synthetic oligonucleotide
uuagaguagucauuagcuc

SEQ ID NO: 1053756 - RNA, 19 nt, Artificial Sequence
  Description of Artificial Sequence: Synthetic oligonucleotide
cuguuaaucucccagucuc

SEQ ID NO: 1053757 - RNA, 19 nt, Artificial Sequence
  Description of Artificial Sequence: Synthetic oligonucleotide
auagauccgaucauguaag

SEQ ID NO: 1053758 - RNA, 19 nt, Artificial Sequence
  Description of Artificial Sequence: Synthetic oligonucleotide
ugaaggagcguguguauca

SEQ ID NO: 1053759 - RNA, 19 nt, Artificial Sequence
  Description of Artificial Sequence: Synthetic oligonucleotide
uaguagaacuugauucacc

SEQ ID NO: 1053760 - RNA, 19 nt, Artificial Sequence
  Description of Artificial Sequence: Synthetic oligonucleotide
aggaugaauagaauacacg

SEQ ID NO: 1053761 - RNA, 19 nt, Artificial Sequence
  Description of Artificial Sequence: Synthetic oligonucleotide
auaucgucuuuuccgagug

SEQ ID NO: 1053762 - RNA, 19 nt, Artificial Sequence
  Description of Artificial Sequence: Synthetic oligonucleotide
caggcaaggaucuucucgc

SEQ ID NO: 1053763 - RNA, 19 nt, Artificial Sequence
  Description of Artificial Sequence: Synthetic oligonucleotide
gauucucccacaaacucug

SEQ ID NO: 1053764 - RNA, 19 nt, Artificial Sequence
  Description of Artificial Sequence: Synthetic oligonucleotide
cuucauuggcuccuagacg

SEQ ID NO: 1053765 - RNA, 19 nt, Artificial Sequence
  Description of Artificial Sequence: Synthetic oligonucleotide
uguggaaguguaguaaugu

SEQ ID NO: 1053766 - RNA, 19 nt, Artificial Sequence
  Description of Artificial Sequence: Synthetic oligonucleotide
uacuguaagaggucaggca

SEQ ID NO: 1053767 - RNA, 19 nt, Artificial Sequence
  Description of Artificial Sequence: Synthetic oligonucleotide
ucauaggggccacagaaua

SEQ ID NO: 1053768 - RNA, 19 nt, Artificial Sequence
  Description of Artificial Sequence: Synthetic oligonucleotide
uccgaacauacuguaagag

SEQ ID NO: 1053769 - RNA, 19 nt, Artificial Sequence
  Description of Artificial Sequence: Synthetic oligonucleotide
guagauauuccgcuggcca

SEQ ID NO: 1053770 - RNA, 19 nt, Artificial Sequence
  Description of Artificial Sequence: Synthetic oligonucleotide
agugccaagaugguacaac

SEQ ID NO: 1053771 - RNA, 19 nt, Artificial Sequence
  Description of Artificial Sequence: Synthetic oligonucleotide
augggaaccaacaaaagau

SEQ ID NO: 1053772 - RNA, 19 nt, Artificial Sequence
  Description of Artificial Sequence: Synthetic oligonucleotide
uuacacuucagggauacau

SEQ ID NO: 1053773 - RNA, 19 nt, Artificial Sequence
  Description of Artificial Sequence: Synthetic oligonucleotide
uguaaagucacagguacuu

SEQ ID NO: 1053774 - RNA, 19 nt, Artificial Sequence
  Description of Artificial Sequence: Synthetic oligonucleotide
agcaacauuaccaguauga

SEQ ID NO: 1053775 - RNA, 19 nt, Artificial Sequence
  Description of Artificial Sequence: Synthetic oligonucleotide
aguagauauuccgcuggcc

SEQ ID NO: 1053776 - RNA, 19 nt, Artificial Sequence
  Description of Artificial Sequence: Synthetic oligonucleotide
auuuacaccaucucuuauu

SEQ ID NO: 1053777 - RNA, 19 nt, Artificial Sequence
  Description of Artificial Sequence: Synthetic oligonucleotide
cauacuuguaugacgccug

SEQ ID NO: 1053778 - RNA, 19 nt, Artificial Sequence
  Description of Artificial Sequence: Synthetic oligonucleotide
ugcucaaauaacaguuacu

SEQ ID NO: 1053779 - RNA, 19 nt, Artificial Sequence
  Description of Artificial Sequence: Synthetic oligonucleotide
aguuacuuuucucggagaa

SEQ ID NO: 1053780 - RNA, 19 nt, Artificial Sequence
  Description of Artificial Sequence: Synthetic oligonucleotide
agggcaguaaucagguacc

SEQ ID NO: 1053781 - RNA, 19 nt, Artificial Sequence
  Description of Artificial Sequence: Synthetic oligonucleotide
uuccaggaugaauagaaua

SEQ ID NO: 1053782 - RNA, 19 nt, Artificial Sequence
  Description of Artificial Sequence: Synthetic oligonucleotide
uucucacauccaaaugugc

SEQ ID NO: 1053783 - RNA, 19 nt, Artificial Sequence
  Description of Artificial Sequence: Synthetic oligonucleotide
uuagaaagaccugggguca

SEQ ID NO: 1053784 - RNA, 19 nt, Artificial Sequence
  Description of Artificial Sequence: Synthetic oligonucleotide
ucagugcgaauguuguaag

SEQ ID NO: 1053785 - RNA, 19 nt, Artificial Sequence
  Description of Artificial Sequence: Synthetic oligonucleotide
accaauuacauagauccga

SEQ ID NO: 1053786 - RNA, 19 nt, Artificial Sequence
  Description of Artificial Sequence: Synthetic oligonucleotide
uucucaugaguaccuguug

SEQ ID NO: 1053787 - RNA, 19 nt, Artificial Sequence
  Description of Artificial Sequence: Synthetic oligonucleotide
ccuuaaaacaacagggcag

SEQ ID NO: 1053788 - RNA, 19 nt, Artificial Sequence
  Description of Artificial Sequence: Synthetic oligonucleotide
cucaugaguaccuguugcc

SEQ ID NO: 1053789 - RNA, 19 nt, Artificial Sequence
  Description of Artificial Sequence: Synthetic oligonucleotide
gaacuacuaggcugcagcc

SEQ ID NO: 1053790 - RNA, 19 nt, Artificial Sequence
  Description of Artificial Sequence: Synthetic oligonucleotide
ugcgaauguuguaagcuuc

SEQ ID NO: 1053791 - RNA, 19 nt, Artificial Sequence
  Description of Artificial Sequence: Synthetic oligonucleotide
uuguaugacgccugcugcc

SEQ ID NO: 1053792 - RNA, 19 nt, Artificial Sequence
  Description of Artificial Sequence: Synthetic oligonucleotide
agugcgaauguuguaagcu

SEQ ID NO: 1053793 - RNA, 19 nt, Artificial Sequence
  Description of Artificial Sequence: Synthetic oligonucleotide
uaaucagguaccugaacua

SEQ ID NO: 1053794 - RNA, 19 nt, Artificial Sequence
  Description of Artificial Sequence: Synthetic oligonucleotide
agcacuguggccccuacgu

SEQ ID NO: 1053795 - RNA, 19 nt, Artificial Sequence
  Description of Artificial Sequence: Synthetic oligonucleotide
guaaucuagacauuccacu

SEQ ID NO: 1053796 - RNA, 19 nt, Artificial Sequence
  Description of Artificial Sequence: Synthetic oligonucleotide
aacucugccuuagaguagu

SEQ ID NO: 1053797 - RNA, 19 nt, Artificial Sequence
  Description of Artificial Sequence: Synthetic oligonucleotide
ucgaugauagggucauagc

SEQ ID NO: 1053798 - RNA, 19 nt, Artificial Sequence
  Description of Artificial Sequence: Synthetic oligonucleotide
acaacauuccgcauuagaa

SEQ ID NO: 1053799 - RNA, 19 nt, Artificial Sequence
  Description of Artificial Sequence: Synthetic oligonucleotide
cauuugacuucgaaguuca

SEQ ID NO: 1053800 - RNA, 19 nt, Artificial Sequence
  Description of Artificial Sequence: Synthetic oligonucleotide
aaauaguguggaaguguag

SEQ ID NO: 1053801 - RNA, 19 nt, Artificial Sequence
  Description of Artificial Sequence: Synthetic oligonucleotide
cagugagaaauagacauuc

SEQ ID NO: 1053802 - RNA, 19 nt, Artificial Sequence
  Description of Artificial Sequence: Synthetic oligonucleotide
uacguagcaucguggagug

SEQ ID NO: 1053803 - RNA, 19 nt, Artificial Sequence
  Description of Artificial Sequence: Synthetic oligonucleotide
aagaacaugguaaguuaga

SEQ ID NO: 1053804 - RNA, 19 nt, Artificial Sequence
  Description of Artificial Sequence: Synthetic oligonucleotide
auacauacguucucuccca

SEQ ID NO: 1053805 - RNA, 19 nt, Artificial Sequence
  Description of Artificial Sequence: Synthetic oligonucleotide
aguaugaaggagcgugugu

SEQ ID NO: 1053806 - RNA, 19 nt, Artificial Sequence
  Description of Artificial Sequence: Synthetic oligonucleotide
aagugugcccuuaaaacaa

SEQ ID NO: 1053807 - RNA, 19 nt, Artificial Sequence
  Description of Artificial Sequence: Synthetic oligonucleotide
agaauacacgcuaaagaca

SEQ ID NO: 1053808 - RNA, 19 nt, Artificial Sequence
  Description of Artificial Sequence: Synthetic oligonucleotide
gagcguguguaucaaauaa

SEQ ID NO: 1053809 - RNA, 19 nt, Artificial Sequence
  Description of Artificial Sequence: Synthetic oligonucleotide
caugaguaccuguugccac

SEQ ID NO: 1053810 - RNA, 19 nt, Artificial Sequence
  Description of Artificial Sequence: Synthetic oligonucleotide
uccagagacguaaaucaua

SEQ ID NO: 1053811 - RNA, 19 nt, Artificial Sequence
  Description of Artificial Sequence: Synthetic oligonucleotide
uccucuucucaugaguacc

SEQ ID NO: 1053812 - RNA, 19 nt, Artificial Sequence
  Description of Artificial Sequence: Synthetic oligonucleotide
gcaguaaucagguaccuga

SEQ ID NO: 1053813 - RNA, 19 nt, Artificial Sequence
  Description of Artificial Sequence: Synthetic oligonucleotide
ucguggaguggucauacuc

SEQ ID NO: 1053814 - RNA, 19 nt, Artificial Sequence
  Description of Artificial Sequence: Synthetic oligonucleotide
gagacguaaaucauaucuc

SEQ ID NO: 1053815 - RNA, 19 nt, Artificial Sequence
  Description of Artificial Sequence: Synthetic oligonucleotide
uagauccgaucauguaagg

SEQ ID NO: 1053816 - RNA, 19 nt, Artificial Sequence
  Description of Artificial Sequence: Synthetic oligonucleotide
uuguaaagucacagguacu

SEQ ID NO: 1053817 - RNA, 19 nt, Artificial Sequence
  Description of Artificial Sequence: Synthetic oligonucleotide
agcugucgaugauaggguc

SEQ ID NO: 1053818 - RNA, 19 nt, Artificial Sequence
  Description of Artificial Sequence: Synthetic oligonucleotide
ugacuucgaaguucaggcc

SEQ ID NO: 1053819 - RNA, 19 nt, Artificial Sequence
  Description of Artificial Sequence: Synthetic oligonucleotide
cacuacuaguccugcaccc

SEQ ID NO: 1053820 - RNA, 19 nt, Artificial Sequence
  Description of Artificial Sequence: Synthetic oligonucleotide
ucaugaguaccuguugcca

SEQ ID NO: 1053821 - RNA, 19 nt, Artificial Sequence
  Description of Artificial Sequence: Synthetic oligonucleotide
uguaucaaauaaguacaau

SEQ ID NO: 1053822 - RNA, 19 nt, Artificial Sequence
  Description of Artificial Sequence: Synthetic oligonucleotide
cuguaauguaccugggguc

SEQ ID NO: 1053823 - RNA, 19 nt, Artificial Sequence
  Description of Artificial Sequence: Synthetic oligonucleotide
uccgaucauguaaggaaac

SEQ ID NO: 1053824 - RNA, 19 nt, Artificial Sequence
  Description of Artificial Sequence: Synthetic oligonucleotide
ucgagcugucugcauaucu

SEQ ID NO: 1053825 - RNA, 19 nt, Artificial Sequence
  Description of Artificial Sequence: Synthetic oligonucleotide
guagaacuugauucaccag

SEQ ID NO: 1053826 - RNA, 19 nt, Artificial Sequence
  Description of Artificial Sequence: Synthetic oligonucleotide
gaacaugguaaguuagaaa

SEQ ID NO: 1053827 - RNA, 19 nt, Artificial Sequence
  Description of Artificial Sequence: Synthetic oligonucleotide
ugcuacucagcagagaauu

SEQ ID NO: 1053828 - RNA, 19 nt, Artificial Sequence
  Description of Artificial Sequence: Synthetic oligonucleotide
uguccuagguccuugcauu

SEQ ID NO: 1053829 - RNA, 19 nt, Artificial Sequence
  Description of Artificial Sequence: Synthetic oligonucleotide
agcuucaagccaucauauc

SEQ ID NO: 1053830 - RNA, 19 nt, Artificial Sequence
  Description of Artificial Sequence: Synthetic oligonucleotide
ggauacauacguucucucc

SEQ ID NO: 1053831 - RNA, 19 nt, Artificial Sequence
  Description of Artificial Sequence: Synthetic oligonucleotide
aucuagacauuccacugaa

SEQ ID NO: 1053832 - RNA, 19 nt, Artificial Sequence
  Description of Artificial Sequence: Synthetic oligonucleotide
uacacgcuaaagacaggca

SEQ ID NO: 1053833 - RNA, 19 nt, Artificial Sequence
  Description of Artificial Sequence: Synthetic oligonucleotide
ucauuggcuccuagacggg

SEQ ID NO: 1053834 - RNA, 19 nt, Artificial Sequence
  Description of Artificial Sequence: Synthetic oligonucleotide
caccaauuacauagauccg

SEQ ID NO: 1053835 - RNA, 19 nt, Artificial Sequence
  Description of Artificial Sequence: Synthetic oligonucleotide
cauacguucucucccaaga

SEQ ID NO: 1053836 - RNA, 19 nt, Artificial Sequence
  Description of Artificial Sequence: Synthetic oligonucleotide
uacagcggaugaaaggcuc

SEQ ID NO: 1053837 - RNA, 19 nt, Artificial Sequence
  Description of Artificial Sequence: Synthetic oligonucleotide
acauaucgucuuuuccgag

SEQ ID NO: 1053838 - RNA, 19 nt, Artificial Sequence
  Description of Artificial Sequence: Synthetic oligonucleotide
ucauaccgcuccauacuug

SEQ ID NO: 1053839 - RNA, 19 nt, Artificial Sequence
  Description of Artificial Sequence: Synthetic oligonucleotide
aauacacgcuaaagacagg

SEQ ID NO: 1053840 - RNA, 19 nt, Artificial Sequence
  Description of Artificial Sequence: Synthetic oligonucleotide
cauuccgcauuagaaagac

SEQ ID NO: 1053841 - RNA, 19 nt, Artificial Sequence
  Description of Artificial Sequence: Synthetic oligonucleotide
cugaacugaggcgggaacg

SEQ ID NO: 1053842 - RNA, 19 nt, Artificial Sequence
  Description of Artificial Sequence: Synthetic oligonucleotide
aucauacccaccaauuaca

SEQ ID NO: 1053843 - RNA, 19 nt, Artificial Sequence
  Description of Artificial Sequence: Synthetic oligonucleotide
acauuaccaguaugaagga

SEQ ID NO: 1053844 - RNA, 19 nt, Artificial Sequence
  Description of Artificial Sequence: Synthetic oligonucleotide
cauggcuacaugagcccgg

SEQ ID NO: 1053845 - RNA, 19 nt, Artificial Sequence
  Description of Artificial Sequence: Synthetic oligonucleotide
caagacgauuguaaaguca

SEQ ID NO: 1053846 - RNA, 19 nt, Artificial Sequence
  Description of Artificial Sequence: Synthetic oligonucleotide
ggcuacaugagcccggcag

SEQ ID NO: 1053847 - RNA, 19 nt, Artificial Sequence
  Description of Artificial Sequence: Synthetic oligonucleotide
cccauccccaaauaaauag

SEQ ID NO: 1053848 - RNA, 19 nt, Artificial Sequence
  Description of Artificial Sequence: Synthetic oligonucleotide
ccgaacauacuguaagagg

SEQ ID NO: 1053849 - RNA, 19 nt, Artificial Sequence
  Description of Artificial Sequence: Synthetic oligonucleotide
uccgagugauacuuggcaa

SEQ ID NO: 1053850 - RNA, 19 nt, Artificial Sequence
  Description of Artificial Sequence: Synthetic oligonucleotide
caugcuccacugaucaaug

SEQ ID NO: 1053851 - RNA, 19 nt, Artificial Sequence
  Description of Artificial Sequence: Synthetic oligonucleotide
gaugaauagaauacacgcu

SEQ ID NO: 1053852 - RNA, 19 nt, Artificial Sequence
  Description of Artificial Sequence: Synthetic oligonucleotide
cauaucucccagcaugcuc

SEQ ID NO: 1053853 - RNA, 19 nt, Artificial Sequence
  Description of Artificial Sequence: Synthetic oligonucleotide
acauacguucucucccaag

SEQ ID NO: 1053854 - RNA, 19 nt, Artificial Sequence
  Description of Artificial Sequence: Synthetic oligonucleotide
gucgcacauucauaggggc

SEQ ID NO: 1053855 - RNA, 19 nt, Artificial Sequence
  Description of Artificial Sequence: Synthetic oligonucleotide
cauaggggccacagaauac

SEQ ID NO: 1053856 - RNA, 19 nt, Artificial Sequence
  Description of Artificial Sequence: Synthetic oligonucleotide
caacauuccgcauuagaaa

SEQ ID NO: 1053857 - RNA, 19 nt, Artificial Sequence
  Description of Artificial Sequence: Synthetic oligonucleotide
ugauagggucauagcauuc

SEQ ID NO: 1053858 - RNA, 19 nt, Artificial Sequence
  Description of Artificial Sequence: Synthetic oligonucleotide
ggggcauccgaacauacug

SEQ ID NO: 1053859 - RNA, 19 nt, Artificial Sequence
  Description of Artificial Sequence: Synthetic oligonucleotide
aucauaucucccagugugg

SEQ ID NO: 1053860 - RNA, 19 nt, Artificial Sequence
  Description of Artificial Sequence: Synthetic oligonucleotide
caucaauaggagacugcug

SEQ ID NO: 1053861 - RNA, 19 nt, Artificial Sequence
  Description of Artificial Sequence: Synthetic oligonucleotide
uacucgugacaguugucca

SEQ ID NO: 1053862 - RNA, 19 nt, Artificial Sequence
  Description of Artificial Sequence: Synthetic oligonucleotide
agcguguguaucaaauaag

SEQ ID NO: 1053863 - RNA, 19 nt, Artificial Sequence
  Description of Artificial Sequence: Synthetic oligonucleotide
ucuagacauuccacugaac

SEQ ID NO: 1053864 - RNA, 19 nt, Artificial Sequence
  Description of Artificial Sequence: Synthetic oligonucleotide
uccauacuuguaugacgcc

SEQ ID NO: 1053865 - RNA, 19 nt, Artificial Sequence
  Description of Artificial Sequence: Synthetic oligonucleotide
cacauaucgucuuuuccga

SEQ ID NO: 1053866 - RNA, 19 nt, Artificial Sequence
  Description of Artificial Sequence: Synthetic oligonucleotide
gauuguaaagucacaggua

SEQ ID NO: 1053867 - RNA, 19 nt, Artificial Sequence
  Description of Artificial Sequence: Synthetic oligonucleotide
uucaagccaucauauccuc

SEQ ID NO: 1053868 - RNA, 19 nt, Artificial Sequence
  Description of Artificial Sequence: Synthetic oligonucleotide
uguaagcuucaagccauca

SEQ ID NO: 1053869 - RNA, 19 nt, Artificial Sequence
  Description of Artificial Sequence: Synthetic oligonucleotide
uguguuuuggggucauauu

SEQ ID NO: 1053870 - RNA, 19 nt, Artificial Sequence
  Description of Artificial Sequence: Synthetic oligonucleotide
acgcuaaagacaggcacag

SEQ ID NO: 1053871 - RNA, 19 nt, Artificial Sequence
  Description of Artificial Sequence: Synthetic oligonucleotide
agaguagucauuagcucca

SEQ ID NO: 1053872 - RNA, 19 nt, Artificial Sequence
  Description of Artificial Sequence: Synthetic oligonucleotide
ggaguggucauacucguga

SEQ ID NO: 1053873 - RNA, 19 nt, Artificial Sequence
  Description of Artificial Sequence: Synthetic oligonucleotide
gguaugggaaccaacaaaa

SEQ ID NO: 1053874 - RNA, 19 nt, Artificial Sequence
  Description of Artificial Sequence: Synthetic oligonucleotide
uuugggucauaccgcucca

SEQ ID NO: 1053875 - RNA, 19 nt, Artificial Sequence
  Description of Artificial Sequence: Synthetic oligonucleotide
gagcaacauuaccaguaug

SEQ ID NO: 1053876 - RNA, 19 nt, Artificial Sequence
  Description of Artificial Sequence: Synthetic oligonucleotide
gggaacggccaucauaccc

SEQ ID NO: 1053877 - RNA, 19 nt, Artificial Sequence
  Description of Artificial Sequence: Synthetic oligonucleotide
guaguagaacuugauucac

SEQ ID NO: 1053878 - RNA, 19 nt, Artificial Sequence
  Description of Artificial Sequence: Synthetic oligonucleotide
gaugauagggucauagcau

SEQ ID NO: 1053879 - RNA, 19 nt, Artificial Sequence
  Description of Artificial Sequence: Synthetic oligonucleotide
auggcuacaugagcccggc

SEQ ID NO: 1053880 - RNA, 19 nt, Artificial Sequence
  Description of Artificial Sequence: Synthetic oligonucleotide
accgcuccauacuuguaug

SEQ ID NO: 1053881 - RNA, 19 nt, Artificial Sequence
  Description of Artificial Sequence: Synthetic oligonucleotide
acuaguccugcacccucuc

SEQ ID NO: 1053882 - RNA, 19 nt, Artificial Sequence
  Description of Artificial Sequence: Synthetic oligonucleotide
uccgcuggccacuacuagu

SEQ ID NO: 1053883 - RNA, 19 nt, Artificial Sequence
  Description of Artificial Sequence: Synthetic oligonucleotide
caguagauauuccgcuggc

SEQ ID NO: 1053884 - RNA, 19 nt, Artificial Sequence
  Description of Artificial Sequence: Synthetic oligonucleotide
aucacaacgcuggguuccc

SEQ ID NO: 1053885 - RNA, 19 nt, Artificial Sequence
  Description of Artificial Sequence: Synthetic oligonucleotide
cauuaccaguaugaaggag

SEQ ID NO: 1053886 - RNA, 19 nt, Artificial Sequence
  Description of Artificial Sequence: Synthetic oligonucleotide
guacuucuguuuaccacag

SEQ ID NO: 1053887 - RNA, 19 nt, Artificial Sequence
  Description of Artificial Sequence: Synthetic oligonucleotide
agugugcccuuaaaacaac

SEQ ID NO: 1053888 - RNA, 19 nt, Artificial Sequence
  Description of Artificial Sequence: Synthetic oligonucleotide
cagugcgaauguuguaagc

SEQ ID NO: 1053889 - RNA, 19 nt, Artificial Sequence
  Description of Artificial Sequence: Synthetic oligonucleotide
cacgcuaaagacaggcaca

SEQ ID NO: 1053890 - RNA, 19 nt, Artificial Sequence
  Description of Artificial Sequence: Synthetic oligonucleotide
caacuagaucucugcacug

SEQ ID NO: 1053891 - RNA, 19 nt, Artificial Sequence
  Description of Artificial Sequence: Synthetic oligonucleotide
cucgucgcacauucauagg

SEQ ID NO: 1053892 - RNA, 19 nt, Artificial Sequence
  Description of Artificial Sequence: Synthetic oligonucleotide
cagagaauucccaucauau

SEQ ID NO: 1053893 - RNA, 19 nt, Artificial Sequence
  Description of Artificial Sequence: Synthetic oligonucleotide
cacuacuucccagcugucg

SEQ ID NO: 1053894 - RNA, 19 nt, Artificial Sequence
  Description of Artificial Sequence: Synthetic oligonucleotide
auuccgcauuagaaagacc

SEQ ID NO: 1053895 - RNA, 19 nt, Artificial Sequence
  Description of Artificial Sequence: Synthetic oligonucleotide
cuuuuccgagugauacuug

SEQ ID NO: 1053896 - RNA, 19 nt, Artificial Sequence
  Description of Artificial Sequence: Synthetic oligonucleotide
acuaggcugcagccacccc

SEQ ID NO: 1053897 - RNA, 19 nt, Artificial Sequence
  Description of Artificial Sequence: Synthetic oligonucleotide
agauccgaucauguaagga

SEQ ID NO: 1053898 - RNA, 19 nt, Artificial Sequence
  Description of Artificial Sequence: Synthetic oligonucleotide
uaucgucuuuuccgaguga

SEQ ID NO: 1053899 - RNA, 19 nt, Artificial Sequence
  Description of Artificial Sequence: Synthetic oligonucleotide
auacguucucucccaagaa

SEQ ID NO: 1053900 - RNA, 19 nt, Artificial Sequence
  Description of Artificial Sequence: Synthetic oligonucleotide
cugccauggcuacaugagc

SEQ ID NO: 1053901 - RNA, 19 nt, Artificial Sequence
  Description of Artificial Sequence: Synthetic oligonucleotide
ccucgucgcacauucauag

SEQ ID NO: 1053902 - RNA, 19 nt, Artificial Sequence
  Description of Artificial Sequence: Synthetic oligonucleotide
uggaguggucauacucgug

SEQ ID NO: 1053903 - RNA, 19 nt, Artificial Sequence
  Description of Artificial Sequence: Synthetic oligonucleotide
acuucccagcugucgauga

SEQ ID NO: 1053904 - RNA, 19 nt, Artificial Sequence
  Description of Artificial Sequence: Synthetic oligonucleotide
cuaguccugcacccucucg

SEQ ID NO: 1053905 - RNA, 19 nt, Artificial Sequence
  Description of Artificial Sequence: Synthetic oligonucleotide
agcggaugaaaggcucagc

SEQ ID NO: 1053906 - RNA, 19 nt, Artificial Sequence
  Description of Artificial Sequence: Synthetic oligonucleotide
agauauuccgcuggccacu

SEQ ID NO: 1053907 - RNA, 19 nt, Artificial Sequence
  Description of Artificial Sequence: Synthetic oligonucleotide
cacccucugagcaacauua

SEQ ID NO: 1053908 - RNA, 19 nt, Artificial Sequence
  Description of Artificial Sequence: Synthetic oligonucleotide
caucaacuagaucucugca

SEQ ID NO: 1053909 - RNA, 19 nt, Artificial Sequence
  Description of Artificial Sequence: Synthetic oligonucleotide
cacagaauaccagacucca

SEQ ID NO: 1053910 - RNA, 19 nt, Artificial Sequence
  Description of Artificial Sequence: Synthetic oligonucleotide
uccuccuagacaguagaua

SEQ ID NO: 1053911 - RNA, 19 nt, Artificial Sequence
  Description of Artificial Sequence: Synthetic oligonucleotide
guaugaaggagcgugugua

SEQ ID NO: 1053912 - RNA, 19 nt, Artificial Sequence
  Description of Artificial Sequence: Synthetic oligonucleotide
uacauacguucucucccaa

SEQ ID NO: 1053913 - RNA, 19 nt, Artificial Sequence
  Description of Artificial Sequence: Synthetic oligonucleotide
uaauguaccuggggucagc

SEQ ID NO: 1053914 - RNA, 19 nt, Artificial Sequence
  Description of Artificial Sequence: Synthetic oligonucleotide
gguacaacauuccgcauua

SEQ ID NO: 1053915 - RNA, 19 nt, Artificial Sequence
  Description of Artificial Sequence: Synthetic oligonucleotide
aucgucuuuuccgagugau

SEQ ID NO: 1053916 - RNA, 19 nt, Artificial Sequence
  Description of Artificial Sequence: Synthetic oligonucleotide
aaggagcguguguaucaaa

SEQ ID NO: 1053917 - RNA, 19 nt, Artificial Sequence
  Description of Artificial Sequence: Synthetic oligonucleotide
acuacuaguccugcacccu

SEQ ID NO: 1053918 - RNA, 19 nt, Artificial Sequence
  Description of Artificial Sequence: Synthetic oligonucleotide
gaacggccaucauacccac

SEQ ID NO: 1053919 - RNA, 19 nt, Artificial Sequence
  Description of Artificial Sequence: Synthetic oligonucleotide
aaguuggucuucacccacu

SEQ ID NO: 1053920 - RNA, 19 nt, Artificial Sequence
  Description of Artificial Sequence: Synthetic oligonucleotide
uuggcuccuagacgggcuc

SEQ ID NO: 1053921 - RNA, 19 nt, Artificial Sequence
  Description of Artificial Sequence: Synthetic oligonucleotide
auauuccgcuggccacuac

SEQ ID NO: 1053922 - RNA, 19 nt, Artificial Sequence
  Description of Artificial Sequence: Synthetic oligonucleotide
gccacuacuaguccugcac

SEQ ID NO: 1053923 - RNA, 19 nt, Artificial Sequence
  Description of Artificial Sequence: Synthetic oligonucleotide
cauuggcuccuagacgggc

SEQ ID NO: 1053924 - RNA, 19 nt, Artificial Sequence
  Description of Artificial Sequence: Synthetic oligonucleotide
caguuuacacuucagggau

SEQ ID NO: 1053925 - RNA, 19 nt, Artificial Sequence
  Description of Artificial Sequence: Synthetic oligonucleotide
ccgcauuagaaagaccugg

SEQ ID NO: 1053926 - RNA, 19 nt, Artificial Sequence
  Description of Artificial Sequence: Synthetic oligonucleotide
caggaagagagcugaaugu

SEQ ID NO: 1053927 - RNA, 19 nt, Artificial Sequence
  Description of Artificial Sequence: Synthetic oligonucleotide
gaacuugauucaccagaaa

SEQ ID NO: 1053928 - RNA, 19 nt, Artificial Sequence
  Description of Artificial Sequence: Synthetic oligonucleotide
aggagcguguguaucaaau

SEQ ID NO: 1053929 - RNA, 19 nt, Artificial Sequence
  Description of Artificial Sequence: Synthetic oligonucleotide
auccgaucauguaaggaaa

SEQ ID NO: 1053930 - RNA, 19 nt, Artificial Sequence
  Description of Artificial Sequence: Synthetic oligonucleotide
cauacucgugacaguuguc

SEQ ID NO: 1053931 - RNA, 19 nt, Artificial Sequence
  Description of Artificial Sequence: Synthetic oligonucleotide
gggucauaccgcuccauac

SEQ ID NO: 1053932 - RNA, 19 nt, Artificial Sequence
  Description of Artificial Sequence: Synthetic oligonucleotide
guaaacuacagcggaugaa

SEQ ID NO: 1053933 - RNA, 19 nt, Artificial Sequence
  Description of Artificial Sequence: Synthetic oligonucleotide
cacuucauuggcuccuaga

SEQ ID NO: 1053934 - RNA, 19 nt, Artificial Sequence
  Description of Artificial Sequence: Synthetic oligonucleotide
gcgggaacggccaucauac

SEQ ID NO: 1053935 - RNA, 19 nt, Artificial Sequence
  Description of Artificial Sequence: Synthetic oligonucleotide
acauuccgcauuagaaaga

SEQ ID NO: 1053936 - RNA, 19 nt, Artificial Sequence
  Description of Artificial Sequence: Synthetic oligonucleotide
cauaucgucuuuuccgagu

SEQ ID NO: 1053937 - RNA, 19 nt, Artificial Sequence
  Description of Artificial Sequence: Synthetic oligonucleotide
cuacguagcaucguggagu

SEQ ID NO: 1053938 - RNA, 19 nt, Artificial Sequence
  Description of Artificial Sequence: Synthetic oligonucleotide
gagcugaauguaccauaca

SEQ ID NO: 1053939 - RNA, 19 nt, Artificial Sequence
  Description of Artificial Sequence: Synthetic oligonucleotide
cagguagguugaacucugc

SEQ ID NO: 1053940 - RNA, 19 nt, Artificial Sequence
  Description of Artificial Sequence: Synthetic oligonucleotide
ggaacggccaucauaccca

SEQ ID NO: 1053941 - RNA, 19 nt, Artificial Sequence
  Description of Artificial Sequence: Synthetic oligonucleotide
cauaccgcuccauacuugu

SEQ ID NO: 1053942 - RNA, 19 nt, Artificial Sequence
  Description of Artificial Sequence: Synthetic oligonucleotide
ucgucuuuuccgagugaua

SEQ ID NO: 1053943 - RNA, 19 nt, Artificial Sequence
  Description of Artificial Sequence: Synthetic oligonucleotide
gacgggcucuuguccuagg

SEQ ID NO: 1053944 - RNA, 19 nt, Artificial Sequence
  Description of Artificial Sequence: Synthetic oligonucleotide
guguaucaaauaaguacaa

SEQ ID NO: 1053945 - RNA, 19 nt, Artificial Sequence
  Description of Artificial Sequence: Synthetic oligonucleotide
caggggcauccgaacauac

SEQ ID NO: 1053946 - RNA, 19 nt, Artificial Sequence
  Description of Artificial Sequence: Synthetic oligonucleotide
ccggcagggaccaagacga

SEQ ID NO: 1053947 - RNA, 19 nt, Artificial Sequence
  Description of Artificial Sequence: Synthetic oligonucleotide
uuuacacuucagggauaca

SEQ ID NO: 1053948 - RNA, 19 nt, Artificial Sequence
  Description of Artificial Sequence: Synthetic oligonucleotide
uacuuguaugacgccugcu

SEQ ID NO: 1053949 - RNA, 19 nt, Artificial Sequence
  Description of Artificial Sequence: Synthetic oligonucleotide
agaccuggggucaaauaau

SEQ ID NO: 1053950 - RNA, 19 nt, Artificial Sequence
  Description of Artificial Sequence: Synthetic oligonucleotide
ccacuacuaguccugcacc

SEQ ID NO: 1053951 - RNA, 19 nt, Artificial Sequence
  Description of Artificial Sequence: Synthetic oligonucleotide
cagagacguaaaucauauc

SEQ ID NO: 1053952 - RNA, 19 nt, Artificial Sequence
  Description of Artificial Sequence: Synthetic oligonucleotide
gcauuugacuucgaaguuc

SEQ ID NO: 1053953 - RNA, 19 nt, Artificial Sequence
  Description of Artificial Sequence: Synthetic oligonucleotide
cgaacauacuguaagaggu

SEQ ID NO: 1053954 - RNA, 19 nt, Artificial Sequence
  Description of Artificial Sequence: Synthetic oligonucleotide
aggcaaggaucuucucgcu

SEQ ID NO: 1053955 - RNA, 19 nt, Artificial Sequence
  Description of Artificial Sequence: Synthetic oligonucleotide
guaccugaacuacuaggcu

SEQ ID NO: 1053956 - RNA, 19 nt, Artificial Sequence
  Description of Artificial Sequence: Synthetic oligonucleotide
cgucuuuuccgagugauac

SEQ ID NO: 1053957 - RNA, 19 nt, Artificial Sequence
  Description of Artificial Sequence: Synthetic oligonucleotide
guggccccuacguagcauc

SEQ ID NO: 1053958 - RNA, 19 nt, Artificial Sequence
  Description of Artificial Sequence: Synthetic oligonucleotide
cgaugauagggucauagca

SEQ ID NO: 1053959 - RNA, 19 nt, Artificial Sequence
  Description of Artificial Sequence: Synthetic oligonucleotide
caguaaucagguaccugaa

SEQ ID NO: 1053960 - RNA, 19 nt, Artificial Sequence
  Description of Artificial Sequence: Synthetic oligonucleotide
gggaccaagacgauuguaa

SEQ ID NO: 1053961 - RNA, 19 nt, Artificial Sequence
  Description of Artificial Sequence: Synthetic oligonucleotide
uaccacagguagguugaac

SEQ ID NO: 1053962 - RNA, 19 nt, Artificial Sequence
  Description of Artificial Sequence: Synthetic oligonucleotide
gccauggcuacaugagccc

SEQ ID NO: 1053963 - RNA, 19 nt, Artificial Sequence
  Description of Artificial Sequence: Synthetic oligonucleotide
gcucaaauaacaguuacuu

SEQ ID NO: 1053964 - RNA, 19 nt, Artificial Sequence
  Description of Artificial Sequence: Synthetic oligonucleotide
ccaagacgauuguaaaguc

SEQ ID NO: 1053965 - RNA, 19 nt, Artificial Sequence
  Description of Artificial Sequence: Synthetic oligonucleotide
acucagcagagaauuccca

SEQ ID NO: 1053966 - RNA, 19 nt, Artificial Sequence
  Description of Artificial Sequence: Synthetic oligonucleotide
cauucauaggggccacaga

SEQ ID NO: 1053967 - RNA, 19 nt, Artificial Sequence
  Description of Artificial Sequence: Synthetic oligonucleotide
cgucgcacauucauagggg

SEQ ID NO: 1053968 - RNA, 19 nt, Artificial Sequence
  Description of Artificial Sequence: Synthetic oligonucleotide
acaccaucucuuauucuaa

SEQ ID NO: 1053969 - RNA, 19 nt, Artificial Sequence
  Description of Artificial Sequence: Synthetic oligonucleotide
acagcggaugaaaggcuca

SEQ ID NO: 1053970 - RNA, 19 nt, Artificial Sequence
  Description of Artificial Sequence: Synthetic oligonucleotide
uagaaagaccuggggucaa

SEQ ID NO: 1053971 - RNA, 19 nt, Artificial Sequence
  Description of Artificial Sequence: Synthetic oligonucleotide
agacgauuguaaagucaca

SEQ ID NO: 1053972 - RNA, 19 nt, Artificial Sequence
  Description of Artificial Sequence: Synthetic oligonucleotide
aucguggaguggucauacu

SEQ ID NO: 1053973 - RNA, 19 nt, Artificial Sequence
  Description of Artificial Sequence: Synthetic oligonucleotide
caucuaucacaucuguaau

SEQ ID NO: 1053974 - RNA, 19 nt, Artificial Sequence
  Description of Artificial Sequence: Synthetic oligonucleotide
cagcggaugaaaggcucag

SEQ ID NO: 1053975 - RNA, 19 nt, Artificial Sequence
  Description of Artificial Sequence: Synthetic oligonucleotide
gaccuggggucaaauaaua

SEQ ID NO: 1053976 - RNA, 19 nt, Artificial Sequence
  Description of Artificial Sequence: Synthetic oligonucleotide
agacgggcucuuguccuag

SEQ ID NO: 1053977 - RNA, 19 nt, Artificial Sequence
  Description of Artificial Sequence: Synthetic oligonucleotide
guacaacauuccgcauuag

SEQ ID NO: 1053978 - RNA, 19 nt, Artificial Sequence
  Description of Artificial Sequence: Synthetic oligonucleotide
ccuacguagcaucguggag

SEQ ID NO: 1053979 - RNA, 19 nt, Artificial Sequence
  Description of Artificial Sequence: Synthetic oligonucleotide
ccacagguagguugaacuc

SEQ ID NO: 1053980 - RNA, 19 nt, Artificial Sequence
  Description of Artificial Sequence: Synthetic oligonucleotide
ggucauaccgcuccauacu

SEQ ID NO: 1053981 - RNA, 19 nt, Artificial Sequence
  Description of Artificial Sequence: Synthetic oligonucleotide
gcaacauuaccaguaugaa

SEQ ID NO: 1053982 - RNA, 19 nt, Artificial Sequence
  Description of Artificial Sequence: Synthetic oligonucleotide
gguugaacucugcacauuu

SEQ ID NO: 1053983 - RNA, 19 nt, Artificial Sequence
  Description of Artificial Sequence: Synthetic oligonucleotide
cauaucucccaguguggua

SEQ ID NO: 1053984 - RNA, 19 nt, Artificial Sequence
  Description of Artificial Sequence: Synthetic oligonucleotide
uaccaguaugaaggagcgu

SEQ ID NO: 1053985 - RNA, 19 nt, Artificial Sequence
  Description of Artificial Sequence: Synthetic oligonucleotide
cugcaauugcauagagucu

SEQ ID NO: 1053986 - RNA, 19 nt, Artificial Sequence
  Description of Artificial Sequence: Synthetic oligonucleotide
cgauuguaaagucacaggu

SEQ ID NO: 1053987 - RNA, 19 nt, Artificial Sequence
  Description of Artificial Sequence: Synthetic oligonucleotide
agcaugcuccacugaucaa

SEQ ID NO: 1053988 - RNA, 19 nt, Artificial Sequence
  Description of Artificial Sequence: Synthetic oligonucleotide
guaagaggucaggcaagga

SEQ ID NO: 1053989 - RNA, 19 nt, Artificial Sequence
  Description of Artificial Sequence: Synthetic oligonucleotide
gucauaccgcuccauacuu

SEQ ID NO: 1053990 - RNA, 19 nt, Artificial Sequence
  Description of Artificial Sequence: Synthetic oligonucleotide
gauauuccgcuggccacua

SEQ ID NO: 1053991 - RNA, 19 nt, Artificial Sequence
  Description of Artificial Sequence: Synthetic oligonucleotide
caauaggagacugcuggcu

SEQ ID NO: 1053992 - RNA, 19 nt, Artificial Sequence
  Description of Artificial Sequence: Synthetic oligonucleotide
ccccuacguagcaucgugg

SEQ ID NO: 1053993 - RNA, 19 nt, Artificial Sequence
  Description of Artificial Sequence: Synthetic oligonucleotide
gccccuacguagcaucgug

SEQ ID NO: 1053994 - RNA, 19 nt, Artificial Sequence
  Description of Artificial Sequence: Synthetic oligonucleotide
aguucaggccucaggugaa

SEQ ID NO: 1053995 - RNA, 19 nt, Artificial Sequence
  Description of Artificial Sequence: Synthetic oligonucleotide
cuacagcggaugaaaggcu

SEQ ID NO: 1053996 - RNA, 19 nt, Artificial Sequence
  Description of Artificial Sequence: Synthetic oligonucleotide
agaaagaccuggggucaaa

SEQ ID NO: 1053997 - RNA, 19 nt, Artificial Sequence
  Description of Artificial Sequence: Synthetic oligonucleotide
ccauggcuacaugagcccg

SEQ ID NO: 1053998 - RNA, 19 nt, Artificial Sequence
  Description of Artificial Sequence: Synthetic oligonucleotide
uggcuacaugagcccggca

SEQ ID NO: 1053999 - RNA, 19 nt, Artificial Sequence
  Description of Artificial Sequence: Synthetic oligonucleotide
cacagguagguugaacucu

SEQ ID NO: 1054000 - RNA, 19 nt, Artificial Sequence
  Description of Artificial Sequence: Synthetic oligonucleotide
ggcauccgaacauacugua

SEQ ID NO: 1054001 - RNA, 19 nt, Artificial Sequence
  Description of Artificial Sequence: Synthetic oligonucleotide
accuggggucaaauaauau

SEQ ID NO: 1054002 - RNA, 19 nt, Artificial Sequence
  Description of Artificial Sequence: Synthetic oligonucleotide
ggagcguguguaucaaaua

SEQ ID NO: 1054003 - RNA, 19 nt, Artificial Sequence
  Description of Artificial Sequence: Synthetic oligonucleotide
gugcgaauguuguaagcuu

SEQ ID NO: 1054004 - RNA, 19 nt, Artificial Sequence
  Description of Artificial Sequence: Synthetic oligonucleotide
gcguguguaucaaauaagu

SEQ ID NO: 1054005 - RNA, 19 nt, Artificial Sequence
  Description of Artificial Sequence: Synthetic oligonucleotide
aggggcauccgaacauacu

SEQ ID NO: 1054006 - RNA, 19 nt, Artificial Sequence
  Description of Artificial Sequence: Synthetic oligonucleotide
guagcaucguggagugguc

SEQ ID NO: 1054007 - RNA, 19 nt, Artificial Sequence
  Description of Artificial Sequence: Synthetic oligonucleotide
auuccgcuggccacuacua

SEQ ID NO: 1054008 - RNA, 19 nt, Artificial Sequence
  Description of Artificial Sequence: Synthetic oligonucleotide
ugaggcgggaacggccauc

SEQ ID NO: 1054009 - RNA, 19 nt, Artificial Sequence
  Description of Artificial Sequence: Synthetic oligonucleotide
cucucccaagaacauggua

SEQ ID NO: 1054010 - RNA, 19 nt, Artificial Sequence
  Description of Artificial Sequence: Synthetic oligonucleotide
gucauuagcuccagcuggu

SEQ ID NO: 1054011 - RNA, 19 nt, Artificial Sequence
  Description of Artificial Sequence: Synthetic oligonucleotide
ggugcucaaauaacaguua

SEQ ID NO: 1054012 - RNA, 19 nt, Artificial Sequence
  Description of Artificial Sequence: Synthetic oligonucleotide
ccgcuggccacuacuaguc

SEQ ID NO: 1054013 - RNA, 19 nt, Artificial Sequence
  Description of Artificial Sequence: Synthetic oligonucleotide
cuguguuuuggggucauau

SEQ ID NO: 1054014 - RNA, 19 nt, Artificial Sequence
  Description of Artificial Sequence: Synthetic oligonucleotide
ucacaacgcuggguuccca

SEQ ID NO: 1054015 - RNA, 19 nt, Artificial Sequence
  Description of Artificial Sequence: Synthetic oligonucleotide
ccauggaggccacuacuuc

SEQ ID NO: 1054016 - RNA, 19 nt, Artificial Sequence
  Description of Artificial Sequence: Synthetic oligonucleotide
augcuacucagcagagaau

SEQ ID NO: 1054017 - RNA, 19 nt, Artificial Sequence
  Description of Artificial Sequence: Synthetic oligonucleotide
augaaaggcucagcaucua

SEQ ID NO: 1054018 - RNA, 19 nt, Artificial Sequence
  Description of Artificial Sequence: Synthetic oligonucleotide
gcaucacaacgcuggguuc

SEQ ID NO: 1054019 - RNA, 19 nt, Artificial Sequence
  Description of Artificial Sequence: Synthetic oligonucleotide
acguagcaucguggagugg

SEQ ID NO: 1054020 - RNA, 19 nt, Artificial Sequence
  Description of Artificial Sequence: Synthetic oligonucleotide
gcacuucauuggcuccuag

SEQ ID NO: 1054021 - RNA, 19 nt, Artificial Sequence
  Description of Artificial Sequence: Synthetic oligonucleotide
agggaccaagacgauugua

SEQ ID NO: 1054022 - RNA, 19 nt, Artificial Sequence
  Description of Artificial Sequence: Synthetic oligonucleotide
cccuacguagcaucgugga

SEQ ID NO: 1054023 - RNA, 19 nt, Artificial Sequence
  Description of Artificial Sequence: Synthetic oligonucleotide
ccgagugauacuuggcaaa

SEQ ID NO: 1054024 - RNA, 19 nt, Artificial Sequence
  Description of Artificial Sequence: Synthetic oligonucleotide
ccaucauacccaccaauua

SEQ ID NO: 1054025 - RNA, 19 nt, Artificial Sequence
  Description of Artificial Sequence: Synthetic oligonucleotide
ccaauuacauagauccgau

SEQ ID NO: 1054026 - RNA, 19 nt, Artificial Sequence
  Description of Artificial Sequence: Synthetic oligonucleotide
cuucgaaguucaggccuca

SEQ ID NO: 1054027 - RNA, 19 nt, Artificial Sequence
  Description of Artificial Sequence: Synthetic oligonucleotide
cucgagcugucugcauauc

SEQ ID NO: 1054028 - RNA, 19 nt, Artificial Sequence
  Description of Artificial Sequence: Synthetic oligonucleotide
ccuugcauuugacuucgaa

SEQ ID NO: 1054029 - RNA, 19 nt, Artificial Sequence
  Description of Artificial Sequence: Synthetic oligonucleotide
cuccuagacgggcucuugu

SEQ ID NO: 1054030 - RNA, 19 nt, Artificial Sequence
  Description of Artificial Sequence: Synthetic oligonucleotide
gcaugcuccacugaucaau

SEQ ID NO: 1054031 - RNA, 19 nt, Artificial Sequence
  Description of Artificial Sequence: Synthetic oligonucleotide
cuccuagacaguagauauu

SEQ ID NO: 1054032 - RNA, 19 nt, Artificial Sequence
  Description of Artificial Sequence: Synthetic oligonucleotide
agcccggcagggaccaaga

SEQ ID NO: 1054033 - RNA, 19 nt, Artificial Sequence
  Description of Artificial Sequence: Synthetic oligonucleotide
ccauacuuguaugacgccu

SEQ ID NO: 1054034 - RNA, 19 nt, Artificial Sequence
  Description of Artificial Sequence: Synthetic oligonucleotide
cacaacgcuggguucccau

SEQ ID NO: 1054035 - RNA, 19 nt, Artificial Sequence
  Description of Artificial Sequence: Synthetic oligonucleotide
gcauccgaacauacuguaa

SEQ ID NO: 1054036 - RNA, 19 nt, Artificial Sequence
  Description of Artificial Sequence: Synthetic oligonucleotide
auaccgcuccauacuugua

SEQ ID NO: 1054037 - RNA, 19 nt, Artificial Sequence
  Description of Artificial Sequence: Synthetic oligonucleotide
gaguaccuguugccacccu

SEQ ID NO: 1054038 - RNA, 19 nt, Artificial Sequence
  Description of Artificial Sequence: Synthetic oligonucleotide
ccgcuccauacuuguauga

SEQ ID NO: 1054039 - RNA, 19 nt, Artificial Sequence
  Description of Artificial Sequence: Synthetic oligonucleotide
ggccucgucgcacauucau

SEQ ID NO: 1054040 - RNA, 19 nt, Artificial Sequence
  Description of Artificial Sequence: Synthetic oligonucleotide
cgcuggccacuacuagucc

SEQ ID NO: 1054041 - RNA, 19 nt, Artificial Sequence
  Description of Artificial Sequence: Synthetic oligonucleotide
gcacuguggccccuacgua

SEQ ID NO: 1054042 - RNA, 19 nt, Artificial Sequence
  Description of Artificial Sequence: Synthetic oligonucleotide
ccacuacuucccagcuguc

SEQ ID NO: 1054043 - RNA, 19 nt, Artificial Sequence
  Description of Artificial Sequence: Synthetic oligonucleotide
aggcgggaacggccaucau

SEQ ID NO: 1054044 - RNA, 19 nt, Artificial Sequence
  Description of Artificial Sequence: Synthetic oligonucleotide
cgggaacggccaucauacc

SEQ ID NO: 1054045 - RNA, 19 nt, Artificial Sequence
  Description of Artificial Sequence: Synthetic oligonucleotide
aggccucgucgcacauuca

SEQ ID NO: 1054046 - RNA, 19 nt, Artificial Sequence
  Description of Artificial Sequence: Synthetic oligonucleotide
gcccggcagggaccaagac

SEQ ID NO: 1054047 - RNA, 19 nt, Artificial Sequence
  Description of Artificial Sequence: Synthetic oligonucleotide
gcaucguggaguggucaua

SEQ ID NO: 1054048 - RNA, 19 nt, Artificial Sequence
  Description of Artificial Sequence: Synthetic oligonucleotide
gccucgucgcacauucaua

SEQ ID NO: 1054049 - RNA, 19 nt, Artificial Sequence
  Description of Artificial Sequence: Synthetic oligonucleotide
ccccacuguuaaucuccca

SEQ ID NO: 1054050 - RNA, 19 nt, Artificial Sequence
  Description of Artificial Sequence: Synthetic oligonucleotide
ccacugaacugaggcggga

SEQ ID NO: 1054051 - RNA, 19 nt, Artificial Sequence
  Description of Artificial Sequence: Synthetic oligonucleotide
cugaggcgggaacggccau

SEQ ID NO: 1054052 - RNA, 19 nt, Artificial Sequence
  Description of Artificial Sequence: Synthetic oligonucleotide
cgaagcacuguggccccua

SEQ ID NO: 1054053 - RNA, 19 nt, Artificial Sequence
  Description of Artificial Sequence: Synthetic oligonucleotide
cggcagggaccaagacgau

SEQ ID NO: 1054054 - RNA, 19 nt, Artificial Sequence
  Description of Artificial Sequence: Synthetic oligonucleotide
aauauuaaagucucgggcg

SEQ ID NO: 1054055 - RNA, 19 nt, Artificial Sequence
  Description of Artificial Sequence: Synthetic oligonucleotide
aucgauauaauccagcagg

SEQ ID NO: 1054056 - RNA, 19 nt, Artificial Sequence
  Description of Artificial Sequence: Synthetic oligonucleotide
uucguuuauggaaagaacg

SEQ ID NO: 1054057 - RNA, 19 nt, Artificial Sequence
  Description of Artificial Sequence: Synthetic oligonucleotide
aaauggacuaaccaguguc

SEQ ID NO: 1054058 - RNA, 19 nt, Artificial Sequence
  Description of Artificial Sequence: Synthetic oligonucleotide
uuugucaauauuaaagucu

SEQ ID NO: 1054059 - RNA, 19 nt, Artificial Sequence
  Description of Artificial Sequence: Synthetic oligonucleotide
aaaucauggagcuggagug

SEQ ID NO: 1054060 - RNA, 19 nt, Artificial Sequence
  Description of Artificial Sequence: Synthetic oligonucleotide
agcguaauaauccugcagg

SEQ ID NO: 1054061 - RNA, 19 nt, Artificial Sequence
  Description of Artificial Sequence: Synthetic oligonucleotide
ucaauaaauggacuaacca

SEQ ID NO: 1054062 - RNA, 19 nt, Artificial Sequence
  Description of Artificial Sequence: Synthetic oligonucleotide
aagaacguaucguagcagg

SEQ ID NO: 1054063 - RNA, 19 nt, Artificial Sequence
  Description of Artificial Sequence: Synthetic oligonucleotide
uuauggaaagaacguaucg

SEQ ID NO: 1054064 - RNA, 19 nt, Artificial Sequence
  Description of Artificial Sequence: Synthetic oligonucleotide
uuugcacacgucaaaaucc

SEQ ID NO: 1054065 - RNA, 19 nt, Artificial Sequence
  Description of Artificial Sequence: Synthetic oligonucleotide
caauaaauggacuaaccag

SEQ ID NO: 1054066 - RNA, 19 nt, Artificial Sequence
  Description of Artificial Sequence: Synthetic oligonucleotide
uccugcauaaauaaggaac

SEQ ID NO: 1054067 - RNA, 19 nt, Artificial Sequence
  Description of Artificial Sequence: Synthetic oligonucleotide
auauuaaagucucgggcgc

SEQ ID NO: 1054068 - RNA, 19 nt, Artificial Sequence
  Description of Artificial Sequence: Synthetic oligonucleotide
aauaaauggacuaaccagu

SEQ ID NO: 1054069 - RNA, 19 nt, Artificial Sequence
  Description of Artificial Sequence: Synthetic oligonucleotide
ucuauaacagucuuguuau

SEQ ID NO: 1054070 - RNA, 19 nt, Artificial Sequence
  Description of Artificial Sequence: Synthetic oligonucleotide
aaaacgaugucccuuugca

SEQ ID NO: 1054071 - RNA, 19 nt, Artificial Sequence
  Description of Artificial Sequence: Synthetic oligonucleotide
uuuaucgauauaauccagc

SEQ ID NO: 1054072 - RNA, 19 nt, Artificial Sequence
  Description of Artificial Sequence: Synthetic oligonucleotide
caauauuaaagucucgggc

SEQ ID NO: 1054073 - RNA, 19 nt, Artificial Sequence
  Description of Artificial Sequence: Synthetic oligonucleotide
auaaggaacuuucuucugg

SEQ ID NO: 1054074 - RNA, 19 nt, Artificial Sequence
  Description of Artificial Sequence: Synthetic oligonucleotide
uugucaucaauaaauggac

SEQ ID NO: 1054075 - RNA, 19 nt, Artificial Sequence
  Description of Artificial Sequence: Synthetic oligonucleotide
aauggacuaaccagugucc

SEQ ID NO: 1054076 - RNA, 19 nt, Artificial Sequence
  Description of Artificial Sequence: Synthetic oligonucleotide
ugguauuuucuucgcaucg

SEQ ID NO: 1054077 - RNA, 19 nt, Artificial Sequence
  Description of Artificial Sequence: Synthetic oligonucleotide
uuaucgauauaauccagca

SEQ ID NO: 1054078 - RNA, 19 nt, Artificial Sequence
  Description of Artificial Sequence: Synthetic oligonucleotide
ucgucuuaggccuucuucg

SEQ ID NO: 1054079 - RNA, 19 nt, Artificial Sequence
  Description of Artificial Sequence: Synthetic oligonucleotide
gaugauacgcagcaaggcc

SEQ ID NO: 1054080 - RNA, 19 nt, Artificial Sequence
  Description of Artificial Sequence: Synthetic oligonucleotide
uacugauucuauaacaguc

SEQ ID NO: 1054081 - RNA, 19 nt, Artificial Sequence
  Description of Artificial Sequence: Synthetic oligonucleotide
ugauuggucggccaaagac

SEQ ID NO: 1054082 - RNA, 19 nt, Artificial Sequence
  Description of Artificial Sequence: Synthetic oligonucleotide
uucucuaugagcugcacgu

SEQ ID NO: 1054083 - RNA, 19 nt, Artificial Sequence
  Description of Artificial Sequence: Synthetic oligonucleotide
uccacgagcugauuggucg

SEQ ID NO: 1054084 - RNA, 19 nt, Artificial Sequence
  Description of Artificial Sequence: Synthetic oligonucleotide
aaacgaugucccuuugcac

SEQ ID NO: 1054085 - RNA, 19 nt, Artificial Sequence
  Description of Artificial Sequence: Synthetic oligonucleotide
ucuaguuugucgucagggg

SEQ ID NO: 1054086 - RNA, 19 nt, Artificial Sequence
  Description of Artificial Sequence: Synthetic oligonucleotide
uuuccgccaaguuagagac

SEQ ID NO: 1054087 - RNA, 19 nt, Artificial Sequence
  Description of Artificial Sequence: Synthetic oligonucleotide
ucgaugauacgcagcaagg

SEQ ID NO: 1054088 - RNA, 19 nt, Artificial Sequence
  Description of Artificial Sequence: Synthetic oligonucleotide
gaagcguuuucuuggaggc

SEQ ID NO: 1054089 - RNA, 19 nt, Artificial Sequence
  Description of Artificial Sequence: Synthetic oligonucleotide
uccagcguaauaauccugc

SEQ ID NO: 1054090 - RNA, 19 nt, Artificial Sequence
  Description of Artificial Sequence: Synthetic oligonucleotide
uaucgauauaauccagcag

SEQ ID NO: 1054091 - RNA, 19 nt, Artificial Sequence
  Description of Artificial Sequence: Synthetic oligonucleotide
cuucgcaucgucuuaggcc

SEQ ID NO: 1054092 - RNA, 19 nt, Artificial Sequence
  Description of Artificial Sequence: Synthetic oligonucleotide
uggacuguugagugaagcg

SEQ ID NO: 1054093 - RNA, 19 nt, Artificial Sequence
  Description of Artificial Sequence: Synthetic oligonucleotide
uuugguauuuucuucgcau

SEQ ID NO: 1054094 - RNA, 19 nt, Artificial Sequence
  Description of Artificial Sequence: Synthetic oligonucleotide
ucguuuauggaaagaacgu

SEQ ID NO: 1054095 - RNA, 19 nt, Artificial Sequence
  Description of Artificial Sequence: Synthetic oligonucleotide
aacguaucguagcagggcu

SEQ ID NO: 1054096 - RNA, 19 nt, Artificial Sequence
  Description of Artificial Sequence: Synthetic oligonucleotide
ucuuuugauguagucggcg

SEQ ID NO: 1054097 - RNA, 19 nt, Artificial Sequence
  Description of Artificial Sequence: Synthetic oligonucleotide
uucgcaucgucuuaggccu

SEQ ID NO: 1054098 - RNA, 19 nt, Artificial Sequence
  Description of Artificial Sequence: Synthetic oligonucleotide
ucgauauaauccagcaggc

SEQ ID NO: 1054099 - RNA, 19 nt, Artificial Sequence
  Description of Artificial Sequence: Synthetic oligonucleotide
ucugguguugucaucaaua

SEQ ID NO: 1054100 - RNA, 19 nt, Artificial Sequence
  Description of Artificial Sequence: Synthetic oligonucleotide
uuagagugauaaauguuaa

SEQ ID NO: 1054101 - RNA, 19 nt, Artificial Sequence
  Description of Artificial Sequence: Synthetic oligonucleotide
cuuagagugauaaauguua

SEQ ID NO: 1054102 - RNA, 19 nt, Artificial Sequence
  Description of Artificial Sequence: Synthetic oligonucleotide
ugucaauauuaaagucucg

SEQ ID NO: 1054103 - RNA, 19 nt, Artificial Sequence
  Description of Artificial Sequence: Synthetic oligonucleotide
acuuccguguaguacauca

SEQ ID NO: 1054104 - RNA, 19 nt, Artificial Sequence
  Description of Artificial Sequence: Synthetic oligonucleotide
agauuuggggaccaggcca

SEQ ID NO: 1054105 - RNA, 19 nt, Artificial Sequence
  Description of Artificial Sequence: Synthetic oligonucleotide
acacccacgugcuuugagc

SEQ ID NO: 1054106 - RNA, 19 nt, Artificial Sequence
  Description of Artificial Sequence: Synthetic oligonucleotide
ugauucuauaacagucuug

SEQ ID NO: 1054107 - RNA, 19 nt, Artificial Sequence
  Description of Artificial Sequence: Synthetic oligonucleotide
aucgucuuaggccuucuuc

SEQ ID NO: 1054108 - RNA, 19 nt, Artificial Sequence
  Description of Artificial Sequence: Synthetic oligonucleotide
aaaccggagaauaugcuca

SEQ ID NO: 1054109 - RNA, 19 nt, Artificial Sequence
  Description of Artificial Sequence: Synthetic oligonucleotide
uaguuugucgucaggggug

SEQ ID NO: 1054110 - RNA, 19 nt, Artificial Sequence
  Description of Artificial Sequence: Synthetic oligonucleotide
cucgaugauacgcagcaag

SEQ ID NO: 1054111 - RNA, 19 nt, Artificial Sequence
  Description of Artificial Sequence: Synthetic oligonucleotide
gaaaccggagaauaugcuc

SEQ ID NO: 1054112 - RNA, 19 nt, Artificial Sequence
  Description of Artificial Sequence: Synthetic oligonucleotide
cuggcggacugguagaugg

SEQ ID NO: 1054113 - RNA, 19 nt, Artificial Sequence
  Description of Artificial Sequence: Synthetic oligonucleotide
ugugacuguacacccacgu

SEQ ID NO: 1054114 - RNA, 19 nt, Artificial Sequence
  Description of Artificial Sequence: Synthetic oligonucleotide
guagucggcgucuaguuug

SEQ ID NO: 1054115 - RNA, 19 nt, Artificial Sequence
  Description of Artificial Sequence: Synthetic oligonucleotide
aaagaacguaucguagcag

SEQ ID NO: 1054116 - RNA, 19 nt, Artificial Sequence
  Description of Artificial Sequence: Synthetic oligonucleotide
aggaacuuucuucuggugu

SEQ ID NO: 1054117 - RNA, 19 nt, Artificial Sequence
  Description of Artificial Sequence: Synthetic oligonucleotide
aagagcucgcaccaagccu

SEQ ID NO: 1054118 - RNA, 19 nt, Artificial Sequence
  Description of Artificial Sequence: Synthetic oligonucleotide
cuucguuuauggaaagaac

SEQ ID NO: 1054119 - RNA, 19 nt, Artificial Sequence
  Description of Artificial Sequence: Synthetic oligonucleotide
aggccugugacuguacacc

SEQ ID NO: 1054120 - RNA, 19 nt, Artificial Sequence
  Description of Artificial Sequence: Synthetic oligonucleotide
cacacgucaaaaucccagg

SEQ ID NO: 1054121 - RNA, 19 nt, Artificial Sequence
  Description of Artificial Sequence: Synthetic oligonucleotide
ucagagccgaucacuuccg

SEQ ID NO: 1054122 - RNA, 19 nt, Artificial Sequence
  Description of Artificial Sequence: Synthetic oligonucleotide
acgaugucccuuugcacac

SEQ ID NO: 1054123 - RNA, 19 nt, Artificial Sequence
  Description of Artificial Sequence: Synthetic oligonucleotide
uuccguguaguacaucacu

SEQ ID NO: 1054124 - RNA, 19 nt, Artificial Sequence
  Description of Artificial Sequence: Synthetic oligonucleotide
auaugcucauccuuuggga

SEQ ID NO: 1054125 - RNA, 19 nt, Artificial Sequence
  Description of Artificial Sequence: Synthetic oligonucleotide
agcaaaaucgccaucugga

SEQ ID NO: 1054126 - RNA, 19 nt, Artificial Sequence
  Description of Artificial Sequence: Synthetic oligonucleotide
caugccuaguggaacuucc

SEQ ID NO: 1054127 - RNA, 19 nt, Artificial Sequence
  Description of Artificial Sequence: Synthetic oligonucleotide
acccaaguaucuuuugaug

SEQ ID NO: 1054128 - RNA, 19 nt, Artificial Sequence
  Description of Artificial Sequence: Synthetic oligonucleotide
gcuguuuccgccaaguuag

SEQ ID NO: 1054129 - RNA, 19 nt, Artificial Sequence
  Description of Artificial Sequence: Synthetic oligonucleotide
ucuucgcaucgucuuaggc

SEQ ID NO: 1054130 - RNA, 19 nt, Artificial Sequence
  Description of Artificial Sequence: Synthetic oligonucleotide
uuucuucgcaucgucuuag

SEQ ID NO: 1054131 - RNA, 19 nt, Artificial Sequence
  Description of Artificial Sequence: Synthetic oligonucleotide
gagauuuggggaccaggcc

SEQ ID NO: 1054132 - RNA, 19 nt, Artificial Sequence
  Description of Artificial Sequence: Synthetic oligonucleotide
gauguagaagcccggccac

SEQ ID NO: 1054133 - RNA, 19 nt, Artificial Sequence
  Description of Artificial Sequence: Synthetic oligonucleotide
gauggcgcauguucagucc

SEQ ID NO: 1054134 - RNA, 19 nt, Artificial Sequence
  Description of Artificial Sequence: Synthetic oligonucleotide
acugauucuauaacagucu

SEQ ID NO: 1054135 - RNA, 19 nt, Artificial Sequence
  Description of Artificial Sequence: Synthetic oligonucleotide
uccacucgggguagguugg

SEQ ID NO: 1054136 - RNA, 19 nt, Artificial Sequence
  Description of Artificial Sequence: Synthetic oligonucleotide
uguacacccacgugcuuug

SEQ ID NO: 1054137 - RNA, 19 nt, Artificial Sequence
  Description of Artificial Sequence: Synthetic oligonucleotide
caggaaaucuggaauuauc

SEQ ID NO: 1054138 - RNA, 19 nt, Artificial Sequence
  Description of Artificial Sequence: Synthetic oligonucleotide
acacucacgucacacccag

SEQ ID NO: 1054139 - RNA, 19 nt, Artificial Sequence
  Description of Artificial Sequence: Synthetic oligonucleotide
gacuaaccaguguccagag

SEQ ID NO: 1054140 - RNA, 19 nt, Artificial Sequence
  Description of Artificial Sequence: Synthetic oligonucleotide
gaacguaucguagcagggc

SEQ ID NO: 1054141 - RNA, 19 nt, Artificial Sequence
  Description of Artificial Sequence: Synthetic oligonucleotide
guaguuggccuccaccacc

SEQ ID NO: 1054142 - RNA, 19 nt, Artificial Sequence
  Description of Artificial Sequence: Synthetic oligonucleotide
aaguuagagacuggcacau

SEQ ID NO: 1054143 - RNA, 19 nt, Artificial Sequence
  Description of Artificial Sequence: Synthetic oligonucleotide
caugcuggcaugccuagug

SEQ ID NO: 1054144 - RNA, 19 nt, Artificial Sequence
  Description of Artificial Sequence: Synthetic oligonucleotide
gcuacugauucuauaacag

SEQ ID NO: 1054145 - RNA, 19 nt, Artificial Sequence
  Description of Artificial Sequence: Synthetic oligonucleotide
agcgcugagggcugaacag

SEQ ID NO: 1054146 - RNA, 19 nt, Artificial Sequence
  Description of Artificial Sequence: Synthetic oligonucleotide
uggacuaaccaguguccag

SEQ ID NO: 1054147 - RNA, 19 nt, Artificial Sequence
  Description of Artificial Sequence: Synthetic oligonucleotide
ccaaguuagagacuggcac

SEQ ID NO: 1054148 - RNA, 19 nt, Artificial Sequence
  Description of Artificial Sequence: Synthetic oligonucleotide
guuuccgccaaguuagaga

SEQ ID NO: 1054149 - RNA, 19 nt, Artificial Sequence
  Description of Artificial Sequence: Synthetic oligonucleotide
uagagugauaaauguuaaa

SEQ ID NO: 1054150 - RNA, 19 nt, Artificial Sequence
  Description of Artificial Sequence: Synthetic oligonucleotide
caaguuagagacuggcaca

SEQ ID NO: 1054151 - RNA, 19 nt, Artificial Sequence
  Description of Artificial Sequence: Synthetic oligonucleotide
ugagcacauacaggggccg

SEQ ID NO: 1054152 - RNA, 19 nt, Artificial Sequence
  Description of Artificial Sequence: Synthetic oligonucleotide
ucaggucacccaaguaucu

SEQ ID NO: 1054153 - RNA, 19 nt, Artificial Sequence
  Description of Artificial Sequence: Synthetic oligonucleotide
cucacaaggcaaccagugc

SEQ ID NO: 1054154 - RNA, 19 nt, Artificial Sequence
  Description of Artificial Sequence: Synthetic oligonucleotide
agaacguaucguagcaggg

SEQ ID NO: 1054155 - RNA, 19 nt, Artificial Sequence
  Description of Artificial Sequence: Synthetic oligonucleotide
agugaagcguuuucuugga

SEQ ID NO: 1054156 - RNA, 19 nt, Artificial Sequence
  Description of Artificial Sequence: Synthetic oligonucleotide
ucgccaucuggaaaucaug

SEQ ID NO: 1054157 - RNA, 19 nt, Artificial Sequence
  Description of Artificial Sequence: Synthetic oligonucleotide
ugccuaguggaacuuccac

SEQ ID NO: 1054158 - RNA, 19 nt, Artificial Sequence
  Description of Artificial Sequence: Synthetic oligonucleotide
ggcguggggaagcugaagg

SEQ ID NO: 1054159 - RNA, 19 nt, Artificial Sequence
  Description of Artificial Sequence: Synthetic oligonucleotide
cagcguaauaauccugcag

SEQ ID NO: 1054160 - RNA, 19 nt, Artificial Sequence
  Description of Artificial Sequence: Synthetic oligonucleotide
guccacucgggguagguug

SEQ ID NO: 1054161 - RNA, 19 nt, Artificial Sequence
  Description of Artificial Sequence: Synthetic oligonucleotide
uacacccacgugcuuugag

SEQ ID NO: 1054162 - RNA, 19 nt, Artificial Sequence
  Description of Artificial Sequence: Synthetic oligonucleotide
agaccucuuagagugauaa

SEQ ID NO: 1054163 - RNA, 19 nt, Artificial Sequence
  Description of Artificial Sequence: Synthetic oligonucleotide
uucuucgcaucgucuuagg

SEQ ID NO: 1054164 - RNA, 19 nt, Artificial Sequence
  Description of Artificial Sequence: Synthetic oligonucleotide
gauccucccuugaacacgc

SEQ ID NO: 1054165 - RNA, 19 nt, Artificial Sequence
  Description of Artificial Sequence: Synthetic oligonucleotide
uugagugaagcguuuucuu

SEQ ID NO: 1054166 - RNA, 19 nt, Artificial Sequence
  Description of Artificial Sequence: Synthetic oligonucleotide
ucauggagccucugaaauc

SEQ ID NO: 1054167 - RNA, 19 nt, Artificial Sequence
  Description of Artificial Sequence: Synthetic oligonucleotide
gaauuaucucuuuaucgau

SEQ ID NO: 1054168 - RNA, 19 nt, Artificial Sequence
  Description of Artificial Sequence: Synthetic oligonucleotide
ugcacguuguucccaccug

SEQ ID NO: 1054169 - RNA, 19 nt, Artificial Sequence
  Description of Artificial Sequence: Synthetic oligonucleotide
cagcacgucguccacucgg

SEQ ID NO: 1054170 - RNA, 19 nt, Artificial Sequence
  Description of Artificial Sequence: Synthetic oligonucleotide
uuugucgucaggggugccc

SEQ ID NO: 1054171 - RNA, 19 nt, Artificial Sequence
  Description of Artificial Sequence: Synthetic oligonucleotide
uguuuccgccaaguuagag

SEQ ID NO: 1054172 - RNA, 19 nt, Artificial Sequence
  Description of Artificial Sequence: Synthetic oligonucleotide
agacgcgaugcugugggcg

SEQ ID NO: 1054173 - RNA, 19 nt, Artificial Sequence
  Description of Artificial Sequence: Synthetic oligonucleotide
ugcagggacgccagcacgu

SEQ ID NO: 1054174 - RNA, 19 nt, Artificial Sequence
  Description of Artificial Sequence: Synthetic oligonucleotide
gacgcgaugcugugggcgc

SEQ ID NO: 1054175 - RNA, 19 nt, Artificial Sequence
  Description of Artificial Sequence: Synthetic oligonucleotide
gucucgggcgcgcagaaac

SEQ ID NO: 1054176 - RNA, 19 nt, Artificial Sequence
  Description of Artificial Sequence: Synthetic oligonucleotide
acgucacacccagucaccc

SEQ ID NO: 1054177 - RNA, 19 nt, Artificial Sequence
  Description of Artificial Sequence: Synthetic oligonucleotide
uggggagaccucuuagagu

SEQ ID NO: 1054178 - RNA, 19 nt, Artificial Sequence
  Description of Artificial Sequence: Synthetic oligonucleotide
gaggaggcggcccagcguc

SEQ ID NO: 1054179 - RNA, 19 nt, Artificial Sequence
  Description of Artificial Sequence: Synthetic oligonucleotide
gauuuggggaccaggccac

SEQ ID NO: 1054180 - RNA, 19 nt, Artificial Sequence
  Description of Artificial Sequence: Synthetic oligonucleotide
uugaccccaggucuccaca

SEQ ID NO: 1054181 - RNA, 19 nt, Artificial Sequence
  Description of Artificial Sequence: Synthetic oligonucleotide
guaguacaucacuuugcac

SEQ ID NO: 1054182 - RNA, 19 nt, Artificial Sequence
  Description of Artificial Sequence: Synthetic oligonucleotide
uguagaagcccggccaccu

SEQ ID NO: 1054183 - RNA, 19 nt, Artificial Sequence
  Description of Artificial Sequence: Synthetic oligonucleotide
gcaaccagugcccuguggc

SEQ ID NO: 1054184 - RNA, 19 nt, Artificial Sequence
  Description of Artificial Sequence: Synthetic oligonucleotide
aaccggagaauaugcucau

SEQ ID NO: 1054185 - RNA, 19 nt, Artificial Sequence
  Description of Artificial Sequence: Synthetic oligonucleotide
acguuguucccaccuggag

SEQ ID NO: 1054186 - RNA, 19 nt, Artificial Sequence
  Description of Artificial Sequence: Synthetic oligonucleotide
ugagaacccgcuguggcuc

SEQ ID NO: 1054187 - RNA, 19 nt, Artificial Sequence
  Description of Artificial Sequence: Synthetic oligonucleotide
auguagaagcccggccacc

SEQ ID NO: 1054188 - RNA, 19 nt, Artificial Sequence
  Description of Artificial Sequence: Synthetic oligonucleotide
cccuugaacacgcuggcgg

SEQ ID NO: 1054189 - RNA, 19 nt, Artificial Sequence
  Description of Artificial Sequence: Synthetic oligonucleotide
ugcacacgucaaaauccca

SEQ ID NO: 1054190 - RNA, 19 nt, Artificial Sequence
  Description of Artificial Sequence: Synthetic oligonucleotide
cauggcugcgacucaaaca

SEQ ID NO: 1054191 - RNA, 19 nt, Artificial Sequence
  Description of Artificial Sequence: Synthetic oligonucleotide
uguagucggcgucuaguuu

SEQ ID NO: 1054192 - RNA, 19 nt, Artificial Sequence
  Description of Artificial Sequence: Synthetic oligonucleotide
ucucuagcuuugucaauau

SEQ ID NO: 1054193 - RNA, 19 nt, Artificial Sequence
  Description of Artificial Sequence: Synthetic oligonucleotide
gagccgaucacuuccgugu

SEQ ID NO: 1054194 - RNA, 19 nt, Artificial Sequence
  Description of Artificial Sequence: Synthetic oligonucleotide
ugcgacucaaacaguucua

SEQ ID NO: 1054195 - RNA, 19 nt, Artificial Sequence
  Description of Artificial Sequence: Synthetic oligonucleotide
gauuggucggccaaagacu

SEQ ID NO: 1054196 - RNA, 19 nt, Artificial Sequence
  Description of Artificial Sequence: Synthetic oligonucleotide
cuuccguguaguacaucac

SEQ ID NO: 1054197 - RNA, 19 nt, Artificial Sequence
  Description of Artificial Sequence: Synthetic oligonucleotide
ugauacgcagcaaggccuu

SEQ ID NO: 1054198 - RNA, 19 nt, Artificial Sequence
  Description of Artificial Sequence: Synthetic oligonucleotide
acuccaccgugcuguaguc

SEQ ID NO: 1054199 - RNA, 19 nt, Artificial Sequence
  Description of Artificial Sequence: Synthetic oligonucleotide
uucuucguuuauggaaaga

SEQ ID NO: 1054200 - RNA, 19 nt, Artificial Sequence
  Description of Artificial Sequence: Synthetic oligonucleotide
ucucgggcgcgcagaaacc

SEQ ID NO: 1054201 - RNA, 19 nt, Artificial Sequence
  Description of Artificial Sequence: Synthetic oligonucleotide
aaccagugcccuguggcgu

SEQ ID NO: 1054202 - RNA, 19 nt, Artificial Sequence
  Description of Artificial Sequence: Synthetic oligonucleotide
auggcgcauguucaguccu

SEQ ID NO: 1054203 - RNA, 19 nt, Artificial Sequence
  Description of Artificial Sequence: Synthetic oligonucleotide
acccgcuguggcucgacuc

SEQ ID NO: 1054204 - RNA, 19 nt, Artificial Sequence
  Description of Artificial Sequence: Synthetic oligonucleotide
agaaaccggagaauaugcu

SEQ ID NO: 1054205 - RNA, 19 nt, Artificial Sequence
  Description of Artificial Sequence: Synthetic oligonucleotide
gagaauaugcucauccuuu

SEQ ID NO: 1054206 - RNA, 19 nt, Artificial Sequence
  Description of Artificial Sequence: Synthetic oligonucleotide
ucccuuugcacacgucaaa

SEQ ID NO: 1054207 - RNA, 19 nt, Artificial Sequence
  Description of Artificial Sequence: Synthetic oligonucleotide
auguagucggcgucuaguu

SEQ ID NO: 1054208 - RNA, 19 nt, Artificial Sequence
  Description of Artificial Sequence: Synthetic oligonucleotide
acgagcugauuggucggcc

SEQ ID NO: 1054209 - RNA, 19 nt, Artificial Sequence
  Description of Artificial Sequence: Synthetic oligonucleotide
uucugguguugucaucaau

SEQ ID NO: 1054210 - RNA, 19 nt, Artificial Sequence
  Description of Artificial Sequence: Synthetic oligonucleotide
gaaauccucagagccgauc

SEQ ID NO: 1054211 - RNA, 19 nt, Artificial Sequence
  Description of Artificial Sequence: Synthetic oligonucleotide
gccuccagcguaauaaucc

SEQ ID NO: 1054212 - RNA, 19 nt, Artificial Sequence
  Description of Artificial Sequence: Synthetic oligonucleotide
gcagaaaccggagaauaug

SEQ ID NO: 1054213 - RNA, 19 nt, Artificial Sequence
  Description of Artificial Sequence: Synthetic oligonucleotide
auggacuaaccagugucca

SEQ ID NO: 1054214 - RNA, 19 nt, Artificial Sequence
  Description of Artificial Sequence: Synthetic oligonucleotide
ggauguaauccaccuggug

SEQ ID NO: 1054215 - RNA, 19 nt, Artificial Sequence
  Description of Artificial Sequence: Synthetic oligonucleotide
cagucaccccucacaaggc

SEQ ID NO: 1054216 - RNA, 19 nt, Artificial Sequence
  Description of Artificial Sequence: Synthetic oligonucleotide
agaucagcggcgacuccac

SEQ ID NO: 1054217 - RNA, 19 nt, Artificial Sequence
  Description of Artificial Sequence: Synthetic oligonucleotide
agcgcaugcuggcaugccu

SEQ ID NO: 1054218 - RNA, 19 nt, Artificial Sequence
  Description of Artificial Sequence: Synthetic oligonucleotide
gcacguuguucccaccugg

SEQ ID NO: 1054219 - RNA, 19 nt, Artificial Sequence
  Description of Artificial Sequence: Synthetic oligonucleotide
auuggucggccaaagacuu

SEQ ID NO: 1054220 - RNA, 19 nt, Artificial Sequence
  Description of Artificial Sequence: Synthetic oligonucleotide
cacuggcgcagucugauga

SEQ ID NO: 1054221 - RNA, 19 nt, Artificial Sequence
  Description of Artificial Sequence: Synthetic oligonucleotide
uagucggcgucuaguuugu

SEQ ID NO: 1054222 - RNA, 19 nt, Artificial Sequence
  Description of Artificial Sequence: Synthetic oligonucleotide
cuaguuugucgucaggggu

SEQ ID NO: 1054223 - RNA, 19 nt, Artificial Sequence
  Description of Artificial Sequence: Synthetic oligonucleotide
acaguucuacaaacaucuc

SEQ ID NO: 1054224 - RNA, 19 nt, Artificial Sequence
  Description of Artificial Sequence: Synthetic oligonucleotide
gauguagucggcgucuagu

SEQ ID NO: 1054225 - RNA, 19 nt, Artificial Sequence
  Description of Artificial Sequence: Synthetic oligonucleotide
gcacacgucaaaaucccag

SEQ ID NO: 1054226 - RNA, 19 nt, Artificial Sequence
  Description of Artificial Sequence: Synthetic oligonucleotide
agccacacacucacgucac

SEQ ID NO: 1054227 - RNA, 19 nt, Artificial Sequence
  Description of Artificial Sequence: Synthetic oligonucleotide
ucacuuccguguaguacau

SEQ ID NO: 1054228 - RNA, 19 nt, Artificial Sequence
  Description of Artificial Sequence: Synthetic oligonucleotide
cucgggcgcgcagaaaccg

SEQ ID NO: 1054229 - RNA, 19 nt, Artificial Sequence
  Description of Artificial Sequence: Synthetic oligonucleotide
gcucgcaccaagccuuugg

SEQ ID NO: 1054230 - RNA, 19 nt, Artificial Sequence
  Description of Artificial Sequence: Synthetic oligonucleotide
guugagugaagcguuuucu

SEQ ID NO: 1054231 - RNA, 19 nt, Artificial Sequence
  Description of Artificial Sequence: Synthetic oligonucleotide
acgucguccacucggggua

SEQ ID NO: 1054232 - RNA, 19 nt, Artificial Sequence
  Description of Artificial Sequence: Synthetic oligonucleotide
ggcacauguggacuguuga

SEQ ID NO: 1054233 - RNA, 19 nt, Artificial Sequence
  Description of Artificial Sequence: Synthetic oligonucleotide
agccuccagcguaauaauc

SEQ ID NO: 1054234 - RNA, 19 nt, Artificial Sequence
  Description of Artificial Sequence: Synthetic oligonucleotide
gaugcagcgcccgggcuac

SEQ ID NO: 1054235 - RNA, 19 nt, Artificial Sequence
  Description of Artificial Sequence: Synthetic oligonucleotide
ugucccagccugagcacau

SEQ ID NO: 1054236 - RNA, 19 nt, Artificial Sequence
  Description of Artificial Sequence: Synthetic oligonucleotide
agcacgucguccacucggg

SEQ ID NO: 1054237 - RNA, 19 nt, Artificial Sequence
  Description of Artificial Sequence: Synthetic oligonucleotide
gguagauggucuccgucca

SEQ ID NO: 1054238 - RNA, 19 nt, Artificial Sequence
  Description of Artificial Sequence: Synthetic oligonucleotide
gaucagcggcgacuccacc

SEQ ID NO: 1054239 - RNA, 19 nt, Artificial Sequence
  Description of Artificial Sequence: Synthetic oligonucleotide
ggccugugacuguacaccc

SEQ ID NO: 1054240 - RNA, 19 nt, Artificial Sequence
  Description of Artificial Sequence: Synthetic oligonucleotide
ggacuaaccaguguccaga

SEQ ID NO: 1054241 - RNA, 19 nt, Artificial Sequence
  Description of Artificial Sequence: Synthetic oligonucleotide
aacccgcuguggcucgacu

SEQ ID NO: 1054242 - RNA, 19 nt, Artificial Sequence
  Description of Artificial Sequence: Synthetic oligonucleotide
cucggaugcagcgcccggg

SEQ ID NO: 1054243 - RNA, 19 nt, Artificial Sequence
  Description of Artificial Sequence: Synthetic oligonucleotide
cuggagacgcgaugcugug

SEQ ID NO: 1054244 - RNA, 19 nt, Artificial Sequence
  Description of Artificial Sequence: Synthetic oligonucleotide
cagucugaugagacagcuc

SEQ ID NO: 1054245 - RNA, 19 nt, Artificial Sequence
  Description of Artificial Sequence: Synthetic oligonucleotide
ugaaauccucagagccgau

SEQ ID NO: 1054246 - RNA, 19 nt, Artificial Sequence
  Description of Artificial Sequence: Synthetic oligonucleotide
gcguaauaauccugcagga

SEQ ID NO: 1054247 - RNA, 19 nt, Artificial Sequence
  Description of Artificial Sequence: Synthetic oligonucleotide
gauuuugcccuuguguguu

SEQ ID NO: 1054248 - RNA, 19 nt, Artificial Sequence
  Description of Artificial Sequence: Synthetic oligonucleotide
gacuguacacccacgugcu

SEQ ID NO: 1054249 - RNA, 19 nt, Artificial Sequence
  Description of Artificial Sequence: Synthetic oligonucleotide
cugcgacucaaacaguucu

SEQ ID NO: 1054250 - RNA, 19 nt, Artificial Sequence
  Description of Artificial Sequence: Synthetic oligonucleotide
gcaaaaucgccaucuggaa

SEQ ID NO: 1054251 - RNA, 19 nt, Artificial Sequence
  Description of Artificial Sequence: Synthetic oligonucleotide
gagacgcgaugcugugggc

SEQ ID NO: 1054252 - RNA, 19 nt, Artificial Sequence
  Description of Artificial Sequence: Synthetic oligonucleotide
guucccaccuggagacgcg

SEQ ID NO: 1054253 - RNA, 19 nt, Artificial Sequence
  Description of Artificial Sequence: Synthetic oligonucleotide
acaaggcaaccagugcccu

SEQ ID NO: 1054254 - RNA, 19 nt, Artificial Sequence
  Description of Artificial Sequence: Synthetic oligonucleotide
gcgcucagcugugagaacc

SEQ ID NO: 1054255 - RNA, 19 nt, Artificial Sequence
  Description of Artificial Sequence: Synthetic oligonucleotide
gauacgcagcaaggccuug

SEQ ID NO: 1054256 - RNA, 19 nt, Artificial Sequence
  Description of Artificial Sequence: Synthetic oligonucleotide
cacguuguucccaccugga

SEQ ID NO: 1054257 - RNA, 19 nt, Artificial Sequence
  Description of Artificial Sequence: Synthetic oligonucleotide
ucucuaugagcugcacguu

SEQ ID NO: 1054258 - RNA, 19 nt, Artificial Sequence
  Description of Artificial Sequence: Synthetic oligonucleotide
acuugugggaggagaccug

SEQ ID NO: 1054259 - RNA, 19 nt, Artificial Sequence
  Description of Artificial Sequence: Synthetic oligonucleotide
agcuggagugugauuggcu

SEQ ID NO: 1054260 - RNA, 19 nt, Artificial Sequence
  Description of Artificial Sequence: Synthetic oligonucleotide
acgcgaugcugugggcgcc

SEQ ID NO: 1054261 - RNA, 19 nt, Artificial Sequence
  Description of Artificial Sequence: Synthetic oligonucleotide
ucgggguagguugguggca

SEQ ID NO: 1054262 - RNA, 19 nt, Artificial Sequence
  Description of Artificial Sequence: Synthetic oligonucleotide
gcgucuaguuugucgucag

SEQ ID NO: 1054263 - RNA, 19 nt, Artificial Sequence
  Description of Artificial Sequence: Synthetic oligonucleotide
ggagaauaugcucauccuu

SEQ ID NO: 1054264 - RNA, 19 nt, Artificial Sequence
  Description of Artificial Sequence: Synthetic oligonucleotide
gcgacucaaacaguucuac

SEQ ID NO: 1054265 - RNA, 19 nt, Artificial Sequence
  Description of Artificial Sequence: Synthetic oligonucleotide
ccacgagcugauuggucgg

SEQ ID NO: 1054266 - RNA, 19 nt, Artificial Sequence
  Description of Artificial Sequence: Synthetic oligonucleotide
cacauguggacuguugagu

SEQ ID NO: 1054267 - RNA, 19 nt, Artificial Sequence
  Description of Artificial Sequence: Synthetic oligonucleotide
uggcguggggaagcugaag

SEQ ID NO: 1054268 - RNA, 19 nt, Artificial Sequence
  Description of Artificial Sequence: Synthetic oligonucleotide
aauccaccuggugcuguuu

SEQ ID NO: 1054269 - RNA, 19 nt, Artificial Sequence
  Description of Artificial Sequence: Synthetic oligonucleotide
gugagaacccgcuguggcu

SEQ ID NO: 1054270 - RNA, 19 nt, Artificial Sequence
  Description of Artificial Sequence: Synthetic oligonucleotide
cugauuggucggccaaaga

SEQ ID NO: 1054271 - RNA, 19 nt, Artificial Sequence
  Description of Artificial Sequence: Synthetic oligonucleotide
gacuguugagugaagcguu

SEQ ID NO: 1054272 - RNA, 19 nt, Artificial Sequence
  Description of Artificial Sequence: Synthetic oligonucleotide
ggauuuugcccuugugugu

SEQ ID NO: 1054273 - RNA, 19 nt, Artificial Sequence
  Description of Artificial Sequence: Synthetic oligonucleotide
cgaugauacgcagcaaggc

SEQ ID NO: 1054274 - RNA, 19 nt, Artificial Sequence
  Description of Artificial Sequence: Synthetic oligonucleotide
cagcgcucagcugugagaa

SEQ ID NO: 1054275 - RNA, 19 nt, Artificial Sequence
  Description of Artificial Sequence: Synthetic oligonucleotide
gucgucaggggugcccacc

SEQ ID NO: 1054276 - RNA, 19 nt, Artificial Sequence
  Description of Artificial Sequence: Synthetic oligonucleotide
uuggucggccaaagacuuu

SEQ ID NO: 1054277 - RNA, 19 nt, Artificial Sequence
  Description of Artificial Sequence: Synthetic oligonucleotide
agccgaucacuuccgugua

SEQ ID NO: 1054278 - RNA, 19 nt, Artificial Sequence
  Description of Artificial Sequence: Synthetic oligonucleotide
cacccacgugcuuugagcu

SEQ ID NO: 1054279 - RNA, 19 nt, Artificial Sequence
  Description of Artificial Sequence: Synthetic oligonucleotide
ggacuguugagugaagcgu

SEQ ID NO: 1054280 - RNA, 19 nt, Artificial Sequence
  Description of Artificial Sequence: Synthetic oligonucleotide
augccuaguggaacuucca

SEQ ID NO: 1054281 - RNA, 19 nt, Artificial Sequence
  Description of Artificial Sequence: Synthetic oligonucleotide
caggggccgcccaucuuug

SEQ ID NO: 1054282 - RNA, 19 nt, Artificial Sequence
  Description of Artificial Sequence: Synthetic oligonucleotide
cccgcuguggcucgacucc

SEQ ID NO: 1054283 - RNA, 19 nt, Artificial Sequence
  Description of Artificial Sequence: Synthetic oligonucleotide
cuccggguaguuggccucc

SEQ ID NO: 1054284 - RNA, 19 nt, Artificial Sequence
  Description of Artificial Sequence: Synthetic oligonucleotide
ugugggcgcccagcgaguc

SEQ ID NO: 1054285 - RNA, 19 nt, Artificial Sequence
  Description of Artificial Sequence: Synthetic oligonucleotide
acuccccgcucaggaaauc

SEQ ID NO: 1054286 - RNA, 19 nt, Artificial Sequence
  Description of Artificial Sequence: Synthetic oligonucleotide
uggucuccguccagagcuu

SEQ ID NO: 1054287 - RNA, 19 nt, Artificial Sequence
  Description of Artificial Sequence: Synthetic oligonucleotide
gccuaguggaacuuccacu

SEQ ID NO: 1054288 - RNA, 19 nt, Artificial Sequence
  Description of Artificial Sequence: Synthetic oligonucleotide
ggcagcgcaugcuggcaug

SEQ ID NO: 1054289 - RNA, 19 nt, Artificial Sequence
  Description of Artificial Sequence: Synthetic oligonucleotide
gccgaucacuuccguguag

SEQ ID NO: 1054290 - RNA, 19 nt, Artificial Sequence
  Description of Artificial Sequence: Synthetic oligonucleotide
ggcgucuaguuugucguca

SEQ ID NO: 1054291 - RNA, 19 nt, Artificial Sequence
  Description of Artificial Sequence: Synthetic oligonucleotide
ggucggccaaagacuuugg

SEQ ID NO: 1054292 - RNA, 19 nt, Artificial Sequence
  Description of Artificial Sequence: Synthetic oligonucleotide
agaagcccggccaccuggu

SEQ ID NO: 1054293 - RNA, 19 nt, Artificial Sequence
  Description of Artificial Sequence: Synthetic oligonucleotide
ccguccagagcuucagauc

SEQ ID NO: 1054294 - RNA, 19 nt, Artificial Sequence
  Description of Artificial Sequence: Synthetic oligonucleotide
ccuugaacacgcuggcgga

SEQ ID NO: 1054295 - RNA, 19 nt, Artificial Sequence
  Description of Artificial Sequence: Synthetic oligonucleotide
ggcgacuccaccgugcugu

SEQ ID NO: 1054296 - RNA, 19 nt, Artificial Sequence
  Description of Artificial Sequence: Synthetic oligonucleotide
gcagcgcucagcugugaga

SEQ ID NO: 1054297 - RNA, 19 nt, Artificial Sequence
  Description of Artificial Sequence: Synthetic oligonucleotide
cuguuuccgccaaguuaga

SEQ ID NO: 1054298 - RNA, 19 nt, Artificial Sequence
  Description of Artificial Sequence: Synthetic oligonucleotide
cugcacguuguucccaccu

SEQ ID NO: 1054299 - RNA, 19 nt, Artificial Sequence
  Description of Artificial Sequence: Synthetic oligonucleotide
agucggcgucuaguuuguc

SEQ ID NO: 1054300 - RNA, 19 nt, Artificial Sequence
  Description of Artificial Sequence: Synthetic oligonucleotide
gcucggaugcagcgcccgg

SEQ ID NO: 1054301 - RNA, 19 nt, Artificial Sequence
  Description of Artificial Sequence: Synthetic oligonucleotide
gcgcgcagaaaccggagaa

SEQ ID NO: 1054302 - RNA, 19 nt, Artificial Sequence
  Description of Artificial Sequence: Synthetic oligonucleotide
cacucgggguagguuggug

SEQ ID NO: 1054303 - RNA, 19 nt, Artificial Sequence
  Description of Artificial Sequence: Synthetic oligonucleotide
guuugucgucaggggugcc

SEQ ID NO: 1054304 - RNA, 19 nt, Artificial Sequence
  Description of Artificial Sequence: Synthetic oligonucleotide
ggaugcagcgcccgggcua

SEQ ID NO: 1054305 - RNA, 19 nt, Artificial Sequence
  Description of Artificial Sequence: Synthetic oligonucleotide
cagcgcaugcuggcaugcc

SEQ ID NO: 1054306 - RNA, 19 nt, Artificial Sequence
  Description of Artificial Sequence: Synthetic oligonucleotide
ccaccgugcuguagucacg

SEQ ID NO: 1054307 - RNA, 19 nt, Artificial Sequence
  Description of Artificial Sequence: Synthetic oligonucleotide
ggcgcgcagaaaccggaga

SEQ ID NO: 1054308 - RNA, 19 nt, Artificial Sequence
  Description of Artificial Sequence: Synthetic oligonucleotide
gaacccgcuguggcucgac

SEQ ID NO: 1054309 - RNA, 19 nt, Artificial Sequence
  Description of Artificial Sequence: Synthetic oligonucleotide
uccggguaguuggccucca

SEQ ID NO: 1054310 - RNA, 19 nt, Artificial Sequence
  Description of Artificial Sequence: Synthetic oligonucleotide
ggcggacugguagaugguc

SEQ ID NO: 1054311 - RNA, 19 nt, Artificial Sequence
  Description of Artificial Sequence: Synthetic oligonucleotide
gucuuaggccuucuucguu

SEQ ID NO: 1054312 - RNA, 19 nt, Artificial Sequence
  Description of Artificial Sequence: Synthetic oligonucleotide
cuggcgcagucugaugaga

SEQ ID NO: 1054313 - RNA, 19 nt, Artificial Sequence
  Description of Artificial Sequence: Synthetic oligonucleotide
ccagcguaauaauccugca

SEQ ID NO: 1054314 - RNA, 19 nt, Artificial Sequence
  Description of Artificial Sequence: Synthetic oligonucleotide
gcagucugaugagacagcu

SEQ ID NO: 1054315 - RNA, 19 nt, Artificial Sequence
  Description of Artificial Sequence: Synthetic oligonucleotide
ucgcaucgucuuaggccuu

SEQ ID NO: 1054316 - RNA, 19 nt, Artificial Sequence
  Description of Artificial Sequence: Synthetic oligonucleotide
acguaucguagcagggcuu

SEQ ID NO: 1054317 - RNA, 19 nt, Artificial Sequence
  Description of Artificial Sequence: Synthetic oligonucleotide
cguaucguagcagggcuuc

SEQ ID NO: 1054318 - RNA, 19 nt, Artificial Sequence
  Description of Artificial Sequence: Synthetic oligonucleotide
ggggccgcccaucuuuguc

SEQ ID NO: 1054319 - RNA, 19 nt, Artificial Sequence
  Description of Artificial Sequence: Synthetic oligonucleotide
gagaccucuuagagugaua

SEQ ID NO: 1054320 - RNA, 19 nt, Artificial Sequence
  Description of Artificial Sequence: Synthetic oligonucleotide
cgcaccaagccuuuggugu

SEQ ID NO: 1054321 - RNA, 19 nt, Artificial Sequence
  Description of Artificial Sequence: Synthetic oligonucleotide
cacuuccguguaguacauc

SEQ ID NO: 1054322 - RNA, 19 nt, Artificial Sequence
  Description of Artificial Sequence: Synthetic oligonucleotide
ccgccaaguuagagacugg

SEQ ID NO: 1054323 - RNA, 19 nt, Artificial Sequence
  Description of Artificial Sequence: Synthetic oligonucleotide
gcaugccuaguggaacuuc

SEQ ID NO: 1054324 - RNA, 19 nt, Artificial Sequence
  Description of Artificial Sequence: Synthetic oligonucleotide
gccuugaccccaggucucc

SEQ ID NO: 1054325 - RNA, 19 nt, Artificial Sequence
  Description of Artificial Sequence: Synthetic oligonucleotide
cagcggcgacuccaccgug

SEQ ID NO: 1054326 - RNA, 19 nt, Artificial Sequence
  Description of Artificial Sequence: Synthetic oligonucleotide
cugagacauggcugcgacu

SEQ ID NO: 1054327 - RNA, 19 nt, Artificial Sequence
  Description of Artificial Sequence: Synthetic oligonucleotide
ccuccagcguaauaauccu

SEQ ID NO: 1054328 - RNA, 19 nt, Artificial Sequence
  Description of Artificial Sequence: Synthetic oligonucleotide
guacacccacgugcuuuga

SEQ ID NO: 1054329 - RNA, 19 nt, Artificial Sequence
  Description of Artificial Sequence: Synthetic oligonucleotide
cuaugagcugcacguuguu

SEQ ID NO: 1054330 - RNA, 19 nt, Artificial Sequence
  Description of Artificial Sequence: Synthetic oligonucleotide
ccaggugauccucccuuga

SEQ ID NO: 1054331 - RNA, 19 nt, Artificial Sequence
  Description of Artificial Sequence: Synthetic oligonucleotide
gcuggcggacugguagaug

SEQ ID NO: 1054332 - RNA, 19 nt, Artificial Sequence
  Description of Artificial Sequence: Synthetic oligonucleotide
gggcgcgcagaaaccggag

SEQ ID NO: 1054333 - RNA, 19 nt, Artificial Sequence
  Description of Artificial Sequence: Synthetic oligonucleotide
agucucgggcgcgcagaaa

SEQ ID NO: 1054334 - RNA, 19 nt, Artificial Sequence
  Description of Artificial Sequence: Synthetic oligonucleotide
caugggagcccugcacacu

SEQ ID NO: 1054335 - RNA, 19 nt, Artificial Sequence
  Description of Artificial Sequence: Synthetic oligonucleotide
cuccccgcucaggaaaucu

SEQ ID NO: 1054336 - RNA, 19 nt, Artificial Sequence
  Description of Artificial Sequence: Synthetic oligonucleotide
aggaggcggcccagcgucu

SEQ ID NO: 1054337 - RNA, 19 nt, Artificial Sequence
  Description of Artificial Sequence: Synthetic oligonucleotide
gccugugacuguacaccca

SEQ ID NO: 1054338 - RNA, 19 nt, Artificial Sequence
  Description of Artificial Sequence: Synthetic oligonucleotide
cacuccccgcucaggaaau

SEQ ID NO: 1054339 - RNA, 19 nt, Artificial Sequence
  Description of Artificial Sequence: Synthetic oligonucleotide
ggagaccugcagggacgcc

SEQ ID NO: 1054340 - RNA, 19 nt, Artificial Sequence
  Description of Artificial Sequence: Synthetic oligonucleotide
gggacgccagcacgucguc

SEQ ID NO: 1054341 - RNA, 19 nt, Artificial Sequence
  Description of Artificial Sequence: Synthetic oligonucleotide
cagagccgaucacuuccgu

SEQ ID NO: 1054342 - RNA, 19 nt, Artificial Sequence
  Description of Artificial Sequence: Synthetic oligonucleotide
cggagaauaugcucauccu

SEQ ID NO: 1054343 - RNA, 19 nt, Artificial Sequence
  Description of Artificial Sequence: Synthetic oligonucleotide
gcgcaugcuggcaugccua

SEQ ID NO: 1054344 - RNA, 19 nt, Artificial Sequence
  Description of Artificial Sequence: Synthetic oligonucleotide
cugugggcgcccagcgagu

SEQ ID NO: 1054345 - RNA, 19 nt, Artificial Sequence
  Description of Artificial Sequence: Synthetic oligonucleotide
ccgggcuacugauucuaua

SEQ ID NO: 1054346 - RNA, 19 nt, Artificial Sequence
  Description of Artificial Sequence: Synthetic oligonucleotide
ccgaucacuuccguguagu

SEQ ID NO: 1054347 - RNA, 19 nt, Artificial Sequence
  Description of Artificial Sequence: Synthetic oligonucleotide
ccggguaguuggccuccac

SEQ ID NO: 1054348 - RNA, 19 nt, Artificial Sequence
  Description of Artificial Sequence: Synthetic oligonucleotide
gcggcgacuccaccgugcu

SEQ ID NO: 1054349 - RNA, 19 nt, Artificial Sequence
  Description of Artificial Sequence: Synthetic oligonucleotide
gcgcugagggcugaacagu

SEQ ID NO: 1054350 - RNA, 19 nt, Artificial Sequence
  Description of Artificial Sequence: Synthetic oligonucleotide
cacucacgucacacccagu

SEQ ID NO: 1054351 - RNA, 19 nt, Artificial Sequence
  Description of Artificial Sequence: Synthetic oligonucleotide
cgucaaaaucccaggugau

SEQ ID NO: 1054352 - RNA, 19 nt, Artificial Sequence
  Description of Artificial Sequence: Synthetic oligonucleotide
gucccagccugagcacaua

SEQ ID NO: 1054353 - RNA, 19 nt, Artificial Sequence
  Description of Artificial Sequence: Synthetic oligonucleotide
cgucguccacucgggguag

SEQ ID NO: 1054354 - RNA, 19 nt, Artificial Sequence
  Description of Artificial Sequence: Synthetic oligonucleotide
cgcgaugcugugggcgccc

SEQ ID NO: 1054355 - RNA, 19 nt, Artificial Sequence
  Description of Artificial Sequence: Synthetic oligonucleotide
gcucgacuccaggcugguc

SEQ ID NO: 1054356 - RNA, 19 nt, Artificial Sequence
  Description of Artificial Sequence: Synthetic oligonucleotide
cggcgacuccaccgugcug

SEQ ID NO: 1054357 - RNA, 19 nt, Artificial Sequence
  Description of Artificial Sequence: Synthetic oligonucleotide
ccacgugcuuugagcuuuu

SEQ ID NO: 1054358 - RNA, 19 nt, Artificial Sequence
  Description of Artificial Sequence: Synthetic oligonucleotide
ccacucgggguagguuggu

SEQ ID NO: 1054359 - RNA, 19 nt, Artificial Sequence
  Description of Artificial Sequence: Synthetic oligonucleotide
ccagcgucuccggguaguu

SEQ ID NO: 1054360 - RNA, 19 nt, Artificial Sequence
  Description of Artificial Sequence: Synthetic oligonucleotide
aagaucauaaagcaaaacu

SEQ ID NO: 1054361 - RNA, 19 nt, Artificial Sequence
  Description of Artificial Sequence: Synthetic oligonucleotide
uuuuccauugaaaacaaaa

SEQ ID NO: 1054362 - RNA, 19 nt, Artificial Sequence
  Description of Artificial Sequence: Synthetic oligonucleotide
uugggugugacauugagga

SEQ ID NO: 1054363 - RNA, 19 nt, Artificial Sequence
  Description of Artificial Sequence: Synthetic oligonucleotide
uagaaacccaccuuggagg

SEQ ID NO: 1054364 - RNA, 19 nt, Artificial Sequence
  Description of Artificial Sequence: Synthetic oligonucleotide
uuuggucaagaacaugugg

SEQ ID NO: 1054365 - RNA, 19 nt, Artificial Sequence
  Description of Artificial Sequence: Synthetic oligonucleotide
cuuggaucgggcuucaucg

SEQ ID NO: 1054366 - RNA, 19 nt, Artificial Sequence
  Description of Artificial Sequence: Synthetic oligonucleotide
aagcacaacucacagcaac

SEQ ID NO: 1054367 - RNA, 19 nt, Artificial Sequence
  Description of Artificial Sequence: Synthetic oligonucleotide
gaaagaaaagaaaagaaaa

SEQ ID NO: 1054368 - RNA, 19 nt, Artificial Sequence
  Description of Artificial Sequence: Synthetic oligonucleotide
aaaacacucucucucucuc

SEQ ID NO: 1054369 - RNA, 19 nt, Artificial Sequence
  Description of Artificial Sequence: Synthetic oligonucleotide
uguagggucacaaauuuuc

SEQ ID NO: 1054370 - RNA, 19 nt, Artificial Sequence
  Description of Artificial Sequence: Synthetic oligonucleotide
ugugucaggccucacgugg

SEQ ID NO: 1054371 - RNA, 19 nt, Artificial Sequence
  Description of Artificial Sequence: Synthetic oligonucleotide
uuguuagaaacccaccuug

SEQ ID NO: 1054372 - RNA, 19 nt, Artificial Sequence
  Description of Artificial Sequence: Synthetic oligonucleotide
cauaagaucauaaagcaaa

SEQ ID NO: 1054373 - RNA, 19 nt, Artificial Sequence
  Description of Artificial Sequence: Synthetic oligonucleotide
uucagcaacacaugucugg

SEQ ID NO: 1054374 - RNA, 19 nt, Artificial Sequence
  Description of Artificial Sequence: Synthetic oligonucleotide
uuaacgaagucguaggcgu

SEQ ID NO: 1054375 - RNA, 19 nt, Artificial Sequence
  Description of Artificial Sequence: Synthetic oligonucleotide
aacacucugugcuccaggg

SEQ ID NO: 1054376 - RNA, 19 nt, Artificial Sequence
  Description of Artificial Sequence: Synthetic oligonucleotide
agaucauaaagcaaaacug

SEQ ID NO: 1054377 - RNA, 19 nt, Artificial Sequence
  Description of Artificial Sequence: Synthetic oligonucleotide
aguagagcuguucacuggg

SEQ ID NO: 1054378 - RNA, 19 nt, Artificial Sequence
  Description of Artificial Sequence: Synthetic oligonucleotide
agagcuguucacugggugc

SEQ ID NO: 1054379 - RNA, 19 nt, Artificial Sequence
  Description of Artificial Sequence: Synthetic oligonucleotide
aaacagucacaauggcugg

SEQ ID NO: 1054380 - RNA, 19 nt, Artificial Sequence
  Description of Artificial Sequence: Synthetic oligonucleotide
guaacugucacugaacggc

SEQ ID NO: 1054381 - RNA, 19 nt, Artificial Sequence
  Description of Artificial Sequence: Synthetic oligonucleotide
aacacucucucucucucuc

SEQ ID NO: 1054382 - RNA, 19 nt, Artificial Sequence
  Description of Artificial Sequence: Synthetic oligonucleotide
auacaagaagagcuugaac

SEQ ID NO: 1054383 - RNA, 19 nt, Artificial Sequence
  Description of Artificial Sequence: Synthetic oligonucleotide
uguguguagggucacaaau

SEQ ID NO: 1054384 - RNA, 19 nt, Artificial Sequence
  Description of Artificial Sequence: Synthetic oligonucleotide
gaaguaguaaacucagguc

SEQ ID NO: 1054385 - RNA, 19 nt, Artificial Sequence
  Description of Artificial Sequence: Synthetic oligonucleotide
agaugguauaaccaggggu

SEQ ID NO: 1054386 - RNA, 19 nt, Artificial Sequence
  Description of Artificial Sequence: Synthetic oligonucleotide
aagacaccgcacuucuugg

SEQ ID NO: 1054387 - RNA, 19 nt, Artificial Sequence
  Description of Artificial Sequence: Synthetic oligonucleotide
cucuuaacgaagucguagg

SEQ ID NO: 1054388 - RNA, 19 nt, Artificial Sequence
  Description of Artificial Sequence: Synthetic oligonucleotide
gaugguauaaccagggguc

SEQ ID NO: 1054389 - RNA, 19 nt, Artificial Sequence
  Description of Artificial Sequence: Synthetic oligonucleotide
ugugcaaaaugcauuuggu

SEQ ID NO: 1054390 - RNA, 19 nt, Artificial Sequence
  Description of Artificial Sequence: Synthetic oligonucleotide
agagcuugaacacucugug

SEQ ID NO: 1054391 - RNA, 19 nt, Artificial Sequence
  Description of Artificial Sequence: Synthetic oligonucleotide
uuccucuuaacgaagucgu

SEQ ID NO: 1054392 - RNA, 19 nt, Artificial Sequence
  Description of Artificial Sequence: Synthetic oligonucleotide
aaaaugagacagagaggcc

SEQ ID NO: 1054393 - RNA, 19 nt, Artificial Sequence
  Description of Artificial Sequence: Synthetic oligonucleotide
auuagucucacaaugcucu

SEQ ID NO: 1054394 - RNA, 19 nt, Artificial Sequence
  Description of Artificial Sequence: Synthetic oligonucleotide
auugggugagauguuagac

SEQ ID NO: 1054395 - RNA, 19 nt, Artificial Sequence
  Description of Artificial Sequence: Synthetic oligonucleotide
ucuuaacgaagucguaggc

SEQ ID NO: 1054396 - RNA, 19 nt, Artificial Sequence
  Description of Artificial Sequence: Synthetic oligonucleotide
aauugggugagauguuaga

SEQ ID NO: 1054397 - RNA, 19 nt, Artificial Sequence
  Description of Artificial Sequence: Synthetic oligonucleotide
cacauuagucucacaaugc

SEQ ID NO: 1054398 - RNA, 19 nt, Artificial Sequence
  Description of Artificial Sequence: Synthetic oligonucleotide
cuuaacgaagucguaggcg

SEQ ID NO: 1054399 - RNA, 19 nt, Artificial Sequence
  Description of Artificial Sequence: Synthetic oligonucleotide
uauguguguguguguaggg

SEQ ID NO: 1054400 - RNA, 19 nt, Artificial Sequence
  Description of Artificial Sequence: Synthetic oligonucleotide
acauuagucucacaaugcu

SEQ ID NO: 1054401 - RNA, 19 nt, Artificial Sequence
  Description of Artificial Sequence: Synthetic oligonucleotide
aacucacagcaacucauca

SEQ ID NO: 1054402 - RNA, 19 nt, Artificial Sequence
  Description of Artificial Sequence: Synthetic oligonucleotide
uguguagggucacaaauuu

SEQ ID NO: 1054403 - RNA, 19 nt, Artificial Sequence
  Description of Artificial Sequence: Synthetic oligonucleotide
gaagaacugagagagguuc

SEQ ID NO: 1054404 - RNA, 19 nt, Artificial Sequence
  Description of Artificial Sequence: Synthetic oligonucleotide
gucacugaacggcugaugc

SEQ ID NO: 1054405 - RNA, 19 nt, Artificial Sequence
  Description of Artificial Sequence: Synthetic oligonucleotide
aacgaagucguaggcgucg

SEQ ID NO: 1054406 - RNA, 19 nt, Artificial Sequence
  Description of Artificial Sequence: Synthetic oligonucleotide
aaugcucugaguauuccgu

SEQ ID NO: 1054407 - RNA, 19 nt, Artificial Sequence
  Description of Artificial Sequence: Synthetic oligonucleotide
ugugguuugucuuuuccau

SEQ ID NO: 1054408 - RNA, 19 nt, Artificial Sequence
  Description of Artificial Sequence: Synthetic oligonucleotide
cugcaggauucucagaagg

SEQ ID NO: 1054409 - RNA, 19 nt, Artificial Sequence
  Description of Artificial Sequence: Synthetic oligonucleotide
cucgccaccaugcucaaag

SEQ ID NO: 1054410 - RNA, 19 nt, Artificial Sequence
  Description of Artificial Sequence: Synthetic oligonucleotide
cuccaauggucagagaugg

SEQ ID NO: 1054411 - RNA, 19 nt, Artificial Sequence
  Description of Artificial Sequence: Synthetic oligonucleotide
gguuagagaugguauaacc

SEQ ID NO: 1054412 - RNA, 19 nt, Artificial Sequence
  Description of Artificial Sequence: Synthetic oligonucleotide
uauuccgucuggaacuugu

SEQ ID NO: 1054413 - RNA, 19 nt, Artificial Sequence
  Description of Artificial Sequence: Synthetic oligonucleotide
gaacuuguuagaaacccac

SEQ ID NO: 1054414 - RNA, 19 nt, Artificial Sequence
  Description of Artificial Sequence: Synthetic oligonucleotide
agugugucaggccucacgu

SEQ ID NO: 1054415 - RNA, 19 nt, Artificial Sequence
  Description of Artificial Sequence: Synthetic oligonucleotide
aaauugggugagauguuag

SEQ ID NO: 1054416 - RNA, 19 nt, Artificial Sequence
  Description of Artificial Sequence: Synthetic oligonucleotide
uugggugagauguuagacu

SEQ ID NO: 1054417 - RNA, 19 nt, Artificial Sequence
  Description of Artificial Sequence: Synthetic oligonucleotide
gccaaguacauccagguug

SEQ ID NO: 1054418 - RNA, 19 nt, Artificial Sequence
  Description of Artificial Sequence: Synthetic oligonucleotide
guauguguguguguguagg

SEQ ID NO: 1054419 - RNA, 19 nt, Artificial Sequence
  Description of Artificial Sequence: Synthetic oligonucleotide
gcuacaguaacugucacug

SEQ ID NO: 1054420 - RNA, 19 nt, Artificial Sequence
  Description of Artificial Sequence: Synthetic oligonucleotide
ugcaaggcagugcaccaag

SEQ ID NO: 1054421 - RNA, 19 nt, Artificial Sequence
  Description of Artificial Sequence: Synthetic oligonucleotide
uguguguguguguaugugu

SEQ ID NO: 1054422 - RNA, 19 nt, Artificial Sequence
  Description of Artificial Sequence: Synthetic oligonucleotide
guugaaauugggugagaug

SEQ ID NO: 1054423 - RNA, 19 nt, Artificial Sequence
  Description of Artificial Sequence: Synthetic oligonucleotide
uguauguguguguguguag

SEQ ID NO: 1054424 - RNA, 19 nt, Artificial Sequence
  Description of Artificial Sequence: Synthetic oligonucleotide
aucuuuugcaucagguagg

SEQ ID NO: 1054425 - RNA, 19 nt, Artificial Sequence
  Description of Artificial Sequence: Synthetic oligonucleotide
acaugugcaaaaugcauuu

SEQ ID NO: 1054426 - RNA, 19 nt, Artificial Sequence
  Description of Artificial Sequence: Synthetic oligonucleotide
uuaccugccagaaguagua

SEQ ID NO: 1054427 - RNA, 19 nt, Artificial Sequence
  Description of Artificial Sequence: Synthetic oligonucleotide
ugggugagauguuagacuu

SEQ ID NO: 1054428 - RNA, 19 nt, Artificial Sequence
  Description of Artificial Sequence: Synthetic oligonucleotide
guuagagaugguauaacca

SEQ ID NO: 1054429 - RNA, 19 nt, Artificial Sequence
  Description of Artificial Sequence: Synthetic oligonucleotide
ggacagacaaugcaaagac

SEQ ID NO: 1054430 - RNA, 19 nt, Artificial Sequence
  Description of Artificial Sequence: Synthetic oligonucleotide
gauuaccugccagaaguag

SEQ ID NO: 1054431 - RNA, 19 nt, Artificial Sequence
  Description of Artificial Sequence: Synthetic oligonucleotide
uagagcuguucacugggug

SEQ ID NO: 1054432 - RNA, 19 nt, Artificial Sequence
  Description of Artificial Sequence: Synthetic oligonucleotide
auuugaugccauacuugcc

SEQ ID NO: 1054433 - RNA, 19 nt, Artificial Sequence
  Description of Artificial Sequence: Synthetic oligonucleotide
aagagcuugaacacucugu

SEQ ID NO: 1054434 - RNA, 19 nt, Artificial Sequence
  Description of Artificial Sequence: Synthetic oligonucleotide
uguguguguguguaggguc

SEQ ID NO: 1054435 - RNA, 19 nt, Artificial Sequence
  Description of Artificial Sequence: Synthetic oligonucleotide
aagucguaggcgucguuga

SEQ ID NO: 1054436 - RNA, 19 nt, Artificial Sequence
  Description of Artificial Sequence: Synthetic oligonucleotide
gaagagcuugaacacucug

SEQ ID NO: 1054437 - RNA, 19 nt, Artificial Sequence
  Description of Artificial Sequence: Synthetic oligonucleotide
aaguugagaccaaugcuca

SEQ ID NO: 1054438 - RNA, 19 nt, Artificial Sequence
  Description of Artificial Sequence: Synthetic oligonucleotide
acaguaacugucacugaac

SEQ ID NO: 1054439 - RNA, 19 nt, Artificial Sequence
  Description of Artificial Sequence: Synthetic oligonucleotide
aguugagaccaaugcucac

SEQ ID NO: 1054440 - RNA, 19 nt, Artificial Sequence
  Description of Artificial Sequence: Synthetic oligonucleotide
caacucaucagugcaaaug

SEQ ID NO: 1054441 - RNA, 19 nt, Artificial Sequence
  Description of Artificial Sequence: Synthetic oligonucleotide
aaacacucucucucucucu

SEQ ID NO: 1054442 - RNA, 19 nt, Artificial Sequence
  Description of Artificial Sequence: Synthetic oligonucleotide
caccgcacuucuuggaucg

SEQ ID NO: 1054443 - RNA, 19 nt, Artificial Sequence
  Description of Artificial Sequence: Synthetic oligonucleotide
ucuuggaucgggcuucauc

SEQ ID NO: 1054444 - RNA, 19 nt, Artificial Sequence
  Description of Artificial Sequence: Synthetic oligonucleotide
ucuuuugcaucagguaggc

SEQ ID NO: 1054445 - RNA, 19 nt, Artificial Sequence
  Description of Artificial Sequence: Synthetic oligonucleotide
gaagucguaggcgucguug

SEQ ID NO: 1054446 - RNA, 19 nt, Artificial Sequence
  Description of Artificial Sequence: Synthetic oligonucleotide
ucugacucgccaucagagc

SEQ ID NO: 1054447 - RNA, 19 nt, Artificial Sequence
  Description of Artificial Sequence: Synthetic oligonucleotide
auguguaugugugugugug

SEQ ID NO: 1054448 - RNA, 19 nt, Artificial Sequence
  Description of Artificial Sequence: Synthetic oligonucleotide
uaacugucacugaacggcu

SEQ ID NO: 1054449 - RNA, 19 nt, Artificial Sequence
  Description of Artificial Sequence: Synthetic oligonucleotide
agaaacccaccuuggaggu

SEQ ID NO: 1054450 - RNA, 19 nt, Artificial Sequence
  Description of Artificial Sequence: Synthetic oligonucleotide
gaacucgccaccaugcuca

SEQ ID NO: 1054451 - RNA, 19 nt, Artificial Sequence
  Description of Artificial Sequence: Synthetic oligonucleotide
ugcugcgcccauuagugug

SEQ ID NO: 1054452 - RNA, 19 nt, Artificial Sequence
  Description of Artificial Sequence: Synthetic oligonucleotide
uucacugggugcgugguug

SEQ ID NO: 1054453 - RNA, 19 nt, Artificial Sequence
  Description of Artificial Sequence: Synthetic oligonucleotide
cagaaguaguaaacucagg

SEQ ID NO: 1054454 - RNA, 19 nt, Artificial Sequence
  Description of Artificial Sequence: Synthetic oligonucleotide
uccacauuagucucacaau

SEQ ID NO: 1054455 - RNA, 19 nt, Artificial Sequence
  Description of Artificial Sequence: Synthetic oligonucleotide
gcuaucagcagaauggaug

SEQ ID NO: 1054456 - RNA, 19 nt, Artificial Sequence
  Description of Artificial Sequence: Synthetic oligonucleotide
ucagcaacacaugucugga

SEQ ID NO: 1054457 - RNA, 19 nt, Artificial Sequence
  Description of Artificial Sequence: Synthetic oligonucleotide
guccacauuagucucacaa

SEQ ID NO: 1054458 - RNA, 19 nt, Artificial Sequence
  Description of Artificial Sequence: Synthetic oligonucleotide
cuaggaggacagacaaugc

SEQ ID NO: 1054459 - RNA, 19 nt, Artificial Sequence
  Description of Artificial Sequence: Synthetic oligonucleotide
aguaguaaacucaggucug

SEQ ID NO: 1054460 - RNA, 19 nt, Artificial Sequence
  Description of Artificial Sequence: Synthetic oligonucleotide
ucacugaacggcugaugcc

SEQ ID NO: 1054461 - RNA, 19 nt, Artificial Sequence
  Description of Artificial Sequence: Synthetic oligonucleotide
aauggauguccuggggcag

SEQ ID NO: 1054462 - RNA, 19 nt, Artificial Sequence
  Description of Artificial Sequence: Synthetic oligonucleotide
guugggugugacauugagg

SEQ ID NO: 1054463 - RNA, 19 nt, Artificial Sequence
  Description of Artificial Sequence: Synthetic oligonucleotide
gcuaggaggacagacaaug

SEQ ID NO: 1054464 - RNA, 19 nt, Artificial Sequence
  Description of Artificial Sequence: Synthetic oligonucleotide
ccagaaguaguaaacucag

SEQ ID NO: 1054465 - RNA, 19 nt, Artificial Sequence
  Description of Artificial Sequence: Synthetic oligonucleotide
uauguguaugugugugugu

SEQ ID NO: 1054466 - RNA, 19 nt, Artificial Sequence
  Description of Artificial Sequence: Synthetic oligonucleotide
uguguguguguguguaugu

SEQ ID NO: 1054467 - RNA, 19 nt, Artificial Sequence
  Description of Artificial Sequence: Synthetic oligonucleotide
uugagaccaaugcucacuu

SEQ ID NO: 1054468 - RNA, 19 nt, Artificial Sequence
  Description of Artificial Sequence: Synthetic oligonucleotide
guaugugugugugugugug

SEQ ID NO: 1054469 - RNA, 19 nt, Artificial Sequence
  Description of Artificial Sequence: Synthetic oligonucleotide
uguguguguaugugugugu

SEQ ID NO: 1054470 - RNA, 19 nt, Artificial Sequence
  Description of Artificial Sequence: Synthetic oligonucleotide
guguguaugugugugugug

SEQ ID NO: 1054471 - RNA, 19 nt, Artificial Sequence
  Description of Artificial Sequence: Synthetic oligonucleotide
acagguuagagaugguaua

SEQ ID NO: 1054472 - RNA, 19 nt, Artificial Sequence
  Description of Artificial Sequence: Synthetic oligonucleotide
gguccugaugccuggaaag

SEQ ID NO: 1054473 - RNA, 19 nt, Artificial Sequence
  Description of Artificial Sequence: Synthetic oligonucleotide
acugucacugaacggcuga

SEQ ID NO: 1054474 - RNA, 19 nt, Artificial Sequence
  Description of Artificial Sequence: Synthetic oligonucleotide
guaggcgucguugagggac

SEQ ID NO: 1054475 - RNA, 19 nt, Artificial Sequence
  Description of Artificial Sequence: Synthetic oligonucleotide
uguaugugugugugugugu

SEQ ID NO: 1054476 - RNA, 19 nt, Artificial Sequence
  Description of Artificial Sequence: Synthetic oligonucleotide
guuagaaacccaccuugga

SEQ ID NO: 1054477 - RNA, 19 nt, Artificial Sequence
  Description of Artificial Sequence: Synthetic oligonucleotide
uguguaugugugugugugu

SEQ ID NO: 1054478 - RNA, 19 nt, Artificial Sequence
  Description of Artificial Sequence: Synthetic oligonucleotide
agguaggcuacaguaacug

SEQ ID NO: 1054479 - RNA, 19 nt, Artificial Sequence
  Description of Artificial Sequence: Synthetic oligonucleotide
aguugaaauugggugagau

SEQ ID NO: 1054480 - RNA, 19 nt, Artificial Sequence
  Description of Artificial Sequence: Synthetic oligonucleotide
cuuggagguaguaggccug

SEQ ID NO: 1054481 - RNA, 19 nt, Artificial Sequence
  Description of Artificial Sequence: Synthetic oligonucleotide
uguguguguguaugugugu

SEQ ID NO: 1054482 - RNA, 19 nt, Artificial Sequence
  Description of Artificial Sequence: Synthetic oligonucleotide
ugagagagguucugggcuc

SEQ ID NO: 1054483 - RNA, 19 nt, Artificial Sequence
  Description of Artificial Sequence: Synthetic oligonucleotide
uguguguaugugugugugu

SEQ ID NO: 1054484 - RNA, 19 nt, Artificial Sequence
  Description of Artificial Sequence: Synthetic oligonucleotide
cagcacugaacucggcugg

SEQ ID NO: 1054485 - RNA, 19 nt, Artificial Sequence
  Description of Artificial Sequence: Synthetic oligonucleotide
gaugaagcugauggccucc

SEQ ID NO: 1054486 - RNA, 19 nt, Artificial Sequence
  Description of Artificial Sequence: Synthetic oligonucleotide
ccacauuagucucacaaug

SEQ ID NO: 1054487 - RNA, 19 nt, Artificial Sequence
  Description of Artificial Sequence: Synthetic oligonucleotide
guguaugugugugugugug

SEQ ID NO: 1054488 - RNA, 19 nt, Artificial Sequence
  Description of Artificial Sequence: Synthetic oligonucleotide
caaggcagugcaccaagac

SEQ ID NO: 1054489 - RNA, 19 nt, Artificial Sequence
  Description of Artificial Sequence: Synthetic oligonucleotide
ccgggaagaacugagagag

SEQ ID NO: 1054490 - RNA, 19 nt, Artificial Sequence
  Description of Artificial Sequence: Synthetic oligonucleotide
aagaacugagagagguucu

SEQ ID NO: 1054491 - RNA, 19 nt, Artificial Sequence
  Description of Artificial Sequence: Synthetic oligonucleotide
uggugcugcgcccauuagu

SEQ ID NO: 1054492 - RNA, 19 nt, Artificial Sequence
  Description of Artificial Sequence: Synthetic oligonucleotide
cugacucgccaucagagca

SEQ ID NO: 1054493 - RNA, 19 nt, Artificial Sequence
  Description of Artificial Sequence: Synthetic oligonucleotide
cucugaguauuccgucugg

SEQ ID NO: 1054494 - RNA, 19 nt, Artificial Sequence
  Description of Artificial Sequence: Synthetic oligonucleotide
ucugaguauuccgucugga

SEQ ID NO: 1054495 - RNA, 19 nt, Artificial Sequence
  Description of Artificial Sequence: Synthetic oligonucleotide
guguguguguguaugugug

SEQ ID NO: 1054496 - RNA, 19 nt, Artificial Sequence
  Description of Artificial Sequence: Synthetic oligonucleotide
uaugugugugugugugugu

SEQ ID NO: 1054497 - RNA, 19 nt, Artificial Sequence
  Description of Artificial Sequence: Synthetic oligonucleotide
aagcaaaacuggccacccu

SEQ ID NO: 1054498 - RNA, 19 nt, Artificial Sequence
  Description of Artificial Sequence: Synthetic oligonucleotide
gcaacacaugucuggaaag

SEQ ID NO: 1054499 - RNA, 19 nt, Artificial Sequence
  Description of Artificial Sequence: Synthetic oligonucleotide
augugugugugugugugug

SEQ ID NO: 1054500 - RNA, 19 nt, Artificial Sequence
  Description of Artificial Sequence: Synthetic oligonucleotide
ugugguuggugggagugga

SEQ ID NO: 1054501 - RNA, 19 nt, Artificial Sequence
  Description of Artificial Sequence: Synthetic oligonucleotide
ugucgcacgggcugcugag

SEQ ID NO: 1054502 - RNA, 19 nt, Artificial Sequence
  Description of Artificial Sequence: Synthetic oligonucleotide
aacucggcugggccacagg

SEQ ID NO: 1054503 - RNA, 19 nt, Artificial Sequence
  Description of Artificial Sequence: Synthetic oligonucleotide
gaaauugggugagauguua

SEQ ID NO: 1054504 - RNA, 19 nt, Artificial Sequence
  Description of Artificial Sequence: Synthetic oligonucleotide
ucgcacgggcugcugagcc

SEQ ID NO: 1054505 - RNA, 19 nt, Artificial Sequence
  Description of Artificial Sequence: Synthetic oligonucleotide
ugcaucagguaggcuacag

SEQ ID NO: 1054506 - RNA, 19 nt, Artificial Sequence
  Description of Artificial Sequence: Synthetic oligonucleotide
guguguguguaugugugug

SEQ ID NO: 1054507 - RNA, 19 nt, Artificial Sequence
  Description of Artificial Sequence: Synthetic oligonucleotide
auuagugugucaggccuca

SEQ ID NO: 1054508 - RNA, 19 nt, Artificial Sequence
  Description of Artificial Sequence: Synthetic oligonucleotide
guauacacucauuuacacu

SEQ ID NO: 1054509 - RNA, 19 nt, Artificial Sequence
  Description of Artificial Sequence: Synthetic oligonucleotide
aaguacauccagguuggua

SEQ ID NO: 1054510 - RNA, 19 nt, Artificial Sequence
  Description of Artificial Sequence: Synthetic oligonucleotide
gguugggugugacauugag

SEQ ID NO: 1054511 - RNA, 19 nt, Artificial Sequence
  Description of Artificial Sequence: Synthetic oligonucleotide
acucggcugggccacaggu

SEQ ID NO: 1054512 - RNA, 19 nt, Artificial Sequence
  Description of Artificial Sequence: Synthetic oligonucleotide
caucgggcccuguggaagg

SEQ ID NO: 1054513 - RNA, 19 nt, Artificial Sequence
  Description of Artificial Sequence: Synthetic oligonucleotide
cacccucucugguauacac

SEQ ID NO: 1054514 - RNA, 19 nt, Artificial Sequence
  Description of Artificial Sequence: Synthetic oligonucleotide
uuccgucuggaacuuguua

SEQ ID NO: 1054515 - RNA, 19 nt, Artificial Sequence
  Description of Artificial Sequence: Synthetic oligonucleotide
guguguguaugugugugug

SEQ ID NO: 1054516 - RNA, 19 nt, Artificial Sequence
  Description of Artificial Sequence: Synthetic oligonucleotide
ucgccaccaugcucaaagg

SEQ ID NO: 1054517 - RNA, 19 nt, Artificial Sequence
  Description of Artificial Sequence: Synthetic oligonucleotide
cauuagugugucaggccuc

SEQ ID NO: 1054518 - RNA, 19 nt, Artificial Sequence
  Description of Artificial Sequence: Synthetic oligonucleotide
caacucacagcaacucauc

SEQ ID NO: 1054519 - RNA, 19 nt, Artificial Sequence
  Description of Artificial Sequence: Synthetic oligonucleotide
ugugugugugugugugugu

SEQ ID NO: 1054520 - RNA, 19 nt, Artificial Sequence
  Description of Artificial Sequence: Synthetic oligonucleotide
cuuguaggugaacucgcca

SEQ ID NO: 1054521 - RNA, 19 nt, Artificial Sequence
  Description of Artificial Sequence: Synthetic oligonucleotide
caggccgagaaccgaggcg

SEQ ID NO: 1054522 - RNA, 19 nt, Artificial Sequence
  Description of Artificial Sequence: Synthetic oligonucleotide
uaacgaagucguaggcguc

SEQ ID NO: 1054523 - RNA, 19 nt, Artificial Sequence
  Description of Artificial Sequence: Synthetic oligonucleotide
aucuggacugggaaggcug

SEQ ID NO: 1054524 - RNA, 19 nt, Artificial Sequence
  Description of Artificial Sequence: Synthetic oligonucleotide
uagucucacaaugcucuga

SEQ ID NO: 1054525 - RNA, 19 nt, Artificial Sequence
  Description of Artificial Sequence: Synthetic oligonucleotide
guguguguguguguguaug

SEQ ID NO: 1054526 - RNA, 19 nt, Artificial Sequence
  Description of Artificial Sequence: Synthetic oligonucleotide
uugucgcacgggcugcuga

SEQ ID NO: 1054527 - RNA, 19 nt, Artificial Sequence
  Description of Artificial Sequence: Synthetic oligonucleotide
gcagcucucggucugacuc

SEQ ID NO: 1054528 - RNA, 19 nt, Artificial Sequence
  Description of Artificial Sequence: Synthetic oligonucleotide
cucgggcugccacucagcc

SEQ ID NO: 1054529 - RNA, 19 nt, Artificial Sequence
  Description of Artificial Sequence: Synthetic oligonucleotide
ugucacugaacggcugaug

SEQ ID NO: 1054530 - RNA, 19 nt, Artificial Sequence
  Description of Artificial Sequence: Synthetic oligonucleotide
cacccugcccaggacaacg

SEQ ID NO: 1054531 - RNA, 19 nt, Artificial Sequence
  Description of Artificial Sequence: Synthetic oligonucleotide
cagcguccgcucaaagucc

SEQ ID NO: 1054532 - RNA, 19 nt, Artificial Sequence
  Description of Artificial Sequence: Synthetic oligonucleotide
uaggcgucguugagggaca

SEQ ID NO: 1054533 - RNA, 19 nt, Artificial Sequence
  Description of Artificial Sequence: Synthetic oligonucleotide
auguguguguguguagggu

SEQ ID NO: 1054534 - RNA, 19 nt, Artificial Sequence
  Description of Artificial Sequence: Synthetic oligonucleotide
ccagcguccgcucaaaguc

SEQ ID NO: 1054535 - RNA, 19 nt, Artificial Sequence
  Description of Artificial Sequence: Synthetic oligonucleotide
cucucucucucucucaaaa

SEQ ID NO: 1054536 - RNA, 19 nt, Artificial Sequence
  Description of Artificial Sequence: Synthetic oligonucleotide
ugucaggccucacguggac

SEQ ID NO: 1054537 - RNA, 19 nt, Artificial Sequence
  Description of Artificial Sequence: Synthetic oligonucleotide
uguguguguguguguguau

SEQ ID NO: 1054538 - RNA, 19 nt, Artificial Sequence
  Description of Artificial Sequence: Synthetic oligonucleotide
ucggagaggacgagcuguc

SEQ ID NO: 1054539 - RNA, 19 nt, Artificial Sequence
  Description of Artificial Sequence: Synthetic oligonucleotide
acgagcuguccacauuagu

SEQ ID NO: 1054540 - RNA, 19 nt, Artificial Sequence
  Description of Artificial Sequence: Synthetic oligonucleotide
uauaaccagggguccugau

SEQ ID NO: 1054541 - RNA, 19 nt, Artificial Sequence
  Description of Artificial Sequence: Synthetic oligonucleotide
aaccgaggcgggagcaccg

SEQ ID NO: 1054542 - RNA, 19 nt, Artificial Sequence
  Description of Artificial Sequence: Synthetic oligonucleotide
gucgucucgcagcuucugc

SEQ ID NO: 1054543 - RNA, 19 nt, Artificial Sequence
  Description of Artificial Sequence: Synthetic oligonucleotide
ugcgugguugucgcacggg

SEQ ID NO: 1054544 - RNA, 19 nt, Artificial Sequence
  Description of Artificial Sequence: Synthetic oligonucleotide
caacgugggagcucaguga

SEQ ID NO: 1054545 - RNA, 19 nt, Artificial Sequence
  Description of Artificial Sequence: Synthetic oligonucleotide
guguguguguguguaugug

SEQ ID NO: 1054546 - RNA, 19 nt, Artificial Sequence
  Description of Artificial Sequence: Synthetic oligonucleotide
cugagagagguucugggcu

SEQ ID NO: 1054547 - RNA, 19 nt, Artificial Sequence
  Description of Artificial Sequence: Synthetic oligonucleotide
ucucugguauacacucauu

SEQ ID NO: 1054548 - RNA, 19 nt, Artificial Sequence
  Description of Artificial Sequence: Synthetic oligonucleotide
cagguugguagaguccuug

SEQ ID NO: 1054549 - RNA, 19 nt, Artificial Sequence
  Description of Artificial Sequence: Synthetic oligonucleotide
gacgagcuguccacauuag

SEQ ID NO: 1054550 - RNA, 19 nt, Artificial Sequence
  Description of Artificial Sequence: Synthetic oligonucleotide
acacucucucucucucuca

SEQ ID NO: 1054551 - RNA, 19 nt, Artificial Sequence
  Description of Artificial Sequence: Synthetic oligonucleotide
uccucuuaacgaagucgua

SEQ ID NO: 1054552 - RNA, 19 nt, Artificial Sequence
  Description of Artificial Sequence: Synthetic oligonucleotide
ucucggucugacucgccau

SEQ ID NO: 1054553 - RNA, 19 nt, Artificial Sequence
  Description of Artificial Sequence: Synthetic oligonucleotide
cugaguauuccgucuggaa

SEQ ID NO: 1054554 - RNA, 19 nt, Artificial Sequence
  Description of Artificial Sequence: Synthetic oligonucleotide
ggugcgugguugucgcacg

SEQ ID NO: 1054555 - RNA, 19 nt, Artificial Sequence
  Description of Artificial Sequence: Synthetic oligonucleotide
gguauaaccagggguccug

SEQ ID NO: 1054556 - RNA, 19 nt, Artificial Sequence
  Description of Artificial Sequence: Synthetic oligonucleotide
cacagguuagagaugguau

SEQ ID NO: 1054557 - RNA, 19 nt, Artificial Sequence
  Description of Artificial Sequence: Synthetic oligonucleotide
caaaacacucucucucucu

SEQ ID NO: 1054558 - RNA, 19 nt, Artificial Sequence
  Description of Artificial Sequence: Synthetic oligonucleotide
cuggacggcacagggcugc

SEQ ID NO: 1054559 - RNA, 19 nt, Artificial Sequence
  Description of Artificial Sequence: Synthetic oligonucleotide
ggcuuggauuaccugccag

SEQ ID NO: 1054560 - RNA, 19 nt, Artificial Sequence
  Description of Artificial Sequence: Synthetic oligonucleotide
agccgagguagagguaggg

SEQ ID NO: 1054561 - RNA, 19 nt, Artificial Sequence
  Description of Artificial Sequence: Synthetic oligonucleotide
guguguguguguaggguca

SEQ ID NO: 1054562 - RNA, 19 nt, Artificial Sequence
  Description of Artificial Sequence: Synthetic oligonucleotide
acuggccacccucucuggu

SEQ ID NO: 1054563 - RNA, 19 nt, Artificial Sequence
  Description of Artificial Sequence: Synthetic oligonucleotide
agaagagcuugaacacucu

SEQ ID NO: 1054564 - RNA, 19 nt, Artificial Sequence
  Description of Artificial Sequence: Synthetic oligonucleotide
gugugucaggccucacgug

SEQ ID NO: 1054565 - RNA, 19 nt, Artificial Sequence
  Description of Artificial Sequence: Synthetic oligonucleotide
gugcgugguugucgcacgg

SEQ ID NO: 1054566 - RNA, 19 nt, Artificial Sequence
  Description of Artificial Sequence: Synthetic oligonucleotide
cucugguauacacucauuu

SEQ ID NO: 1054567 - RNA, 19 nt, Artificial Sequence
  Description of Artificial Sequence: Synthetic oligonucleotide
cucggucugacucgccauc

SEQ ID NO: 1054568 - RNA, 19 nt, Artificial Sequence
  Description of Artificial Sequence: Synthetic oligonucleotide
uccgacucaguggcacugc

SEQ ID NO: 1054569 - RNA, 19 nt, Artificial Sequence
  Description of Artificial Sequence: Synthetic oligonucleotide
guguaugugugugugugua

SEQ ID NO: 1054570 - RNA, 19 nt, Artificial Sequence
  Description of Artificial Sequence: Synthetic oligonucleotide
aguauuccgucuggaacuu

SEQ ID NO: 1054571 - RNA, 19 nt, Artificial Sequence
  Description of Artificial Sequence: Synthetic oligonucleotide
ugggugugacauugaggau

SEQ ID NO: 1054572 - RNA, 19 nt, Artificial Sequence
  Description of Artificial Sequence: Synthetic oligonucleotide
gcgcccauuagugugucag

SEQ ID NO: 1054573 - RNA, 19 nt, Artificial Sequence
  Description of Artificial Sequence: Synthetic oligonucleotide
agaggccugcaggauucuc

SEQ ID NO: 1054574 - RNA, 19 nt, Artificial Sequence
  Description of Artificial Sequence: Synthetic oligonucleotide
agcaggccgagaaccgagg

SEQ ID NO: 1054575 - RNA, 19 nt, Artificial Sequence
  Description of Artificial Sequence: Synthetic oligonucleotide
acggcacagggcugccauc

SEQ ID NO: 1054576 - RNA, 19 nt, Artificial Sequence
  Description of Artificial Sequence: Synthetic oligonucleotide
guagggcaggaucuggacu

SEQ ID NO: 1054577 - RNA, 19 nt, Artificial Sequence
  Description of Artificial Sequence: Synthetic oligonucleotide
aggcuuggauuaccugcca

SEQ ID NO: 1054578 - RNA, 19 nt, Artificial Sequence
  Description of Artificial Sequence: Synthetic oligonucleotide
acucucucucucucucaaa

SEQ ID NO: 1054579 - RNA, 19 nt, Artificial Sequence
  Description of Artificial Sequence: Synthetic oligonucleotide
aacucgccaccaugcucaa

SEQ ID NO: 1054580 - RNA, 19 nt, Artificial Sequence
  Description of Artificial Sequence: Synthetic oligonucleotide
cacucggagaggacgagcu

SEQ ID NO: 1054581 - RNA, 19 nt, Artificial Sequence
  Description of Artificial Sequence: Synthetic oligonucleotide
agugcccaccaagcacaac

SEQ ID NO: 1054582 - RNA, 19 nt, Artificial Sequence
  Description of Artificial Sequence: Synthetic oligonucleotide
guauaaccagggguccuga

SEQ ID NO: 1054583 - RNA, 19 nt, Artificial Sequence
  Description of Artificial Sequence: Synthetic oligonucleotide
guguguguagggucacaaa

SEQ ID NO: 1054584 - RNA, 19 nt, Artificial Sequence
  Description of Artificial Sequence: Synthetic oligonucleotide
cacugaacggcugaugccu

SEQ ID NO: 1054585 - RNA, 19 nt, Artificial Sequence
  Description of Artificial Sequence: Synthetic oligonucleotide
caagaauggccugcuggga

SEQ ID NO: 1054586 - RNA, 19 nt, Artificial Sequence
  Description of Artificial Sequence: Synthetic oligonucleotide
ggcuggacggcacagggcu

SEQ ID NO: 1054587 - RNA, 19 nt, Artificial Sequence
  Description of Artificial Sequence: Synthetic oligonucleotide
gcgugguugucgcacgggc

SEQ ID NO: 1054588 - RNA, 19 nt, Artificial Sequence
  Description of Artificial Sequence: Synthetic oligonucleotide
cacucucucucucucucaa

SEQ ID NO: 1054589 - RNA, 19 nt, Artificial Sequence
  Description of Artificial Sequence: Synthetic oligonucleotide
gagaggcuucacacaugug

SEQ ID NO: 1054590 - RNA, 19 nt, Artificial Sequence
  Description of Artificial Sequence: Synthetic oligonucleotide
cucaggucuguggauaugu

SEQ ID NO: 1054591 - RNA, 19 nt, Artificial Sequence
  Description of Artificial Sequence: Synthetic oligonucleotide
gugugugugugugugugua

SEQ ID NO: 1054592 - RNA, 19 nt, Artificial Sequence
  Description of Artificial Sequence: Synthetic oligonucleotide
cuggugcugcgcccauuag

SEQ ID NO: 1054593 - RNA, 19 nt, Artificial Sequence
  Description of Artificial Sequence: Synthetic oligonucleotide
caggccucacguggacucg

SEQ ID NO: 1054594 - RNA, 19 nt, Artificial Sequence
  Description of Artificial Sequence: Synthetic oligonucleotide
uugcaucagguaggcuaca

SEQ ID NO: 1054595 - RNA, 19 nt, Artificial Sequence
  Description of Artificial Sequence: Synthetic oligonucleotide
uuagugugucaggccucac

SEQ ID NO: 1054596 - RNA, 19 nt, Artificial Sequence
  Description of Artificial Sequence: Synthetic oligonucleotide
gacggcacagggcugccau

SEQ ID NO: 1054597 - RNA, 19 nt, Artificial Sequence
  Description of Artificial Sequence: Synthetic oligonucleotide
agcguccgcucaaagucca

SEQ ID NO: 1054598 - RNA, 19 nt, Artificial Sequence
  Description of Artificial Sequence: Synthetic oligonucleotide
ugcgcccauuaguguguca

SEQ ID NO: 1054599 - RNA, 19 nt, Artificial Sequence
  Description of Artificial Sequence: Synthetic oligonucleotide
gcacaacucacagcaacuc

SEQ ID NO: 1054600 - RNA, 19 nt, Artificial Sequence
  Description of Artificial Sequence: Synthetic oligonucleotide
guauuccgucuggaacuug

SEQ ID NO: 1054601 - RNA, 19 nt, Artificial Sequence
  Description of Artificial Sequence: Synthetic oligonucleotide
accgaggcgggagcaccgg

SEQ ID NO: 1054602 - RNA, 19 nt, Artificial Sequence
  Description of Artificial Sequence: Synthetic oligonucleotide
uggacucgaggguguugau

SEQ ID NO: 1054603 - RNA, 19 nt, Artificial Sequence
  Description of Artificial Sequence: Synthetic oligonucleotide
cgcacuucuuggaucgggc

SEQ ID NO: 1054604 - RNA, 19 nt, Artificial Sequence
  Description of Artificial Sequence: Synthetic oligonucleotide
acgaagucguaggcgucgu

SEQ ID NO: 1054605 - RNA, 19 nt, Artificial Sequence
  Description of Artificial Sequence: Synthetic oligonucleotide
cucggagaggacgagcugu

SEQ ID NO: 1054606 - RNA, 19 nt, Artificial Sequence
  Description of Artificial Sequence: Synthetic oligonucleotide
gccucacguggacucgagg

SEQ ID NO: 1054607 - RNA, 19 nt, Artificial Sequence
  Description of Artificial Sequence: Synthetic oligonucleotide
gguaggcuacaguaacugu

SEQ ID NO: 1054608 - RNA, 19 nt, Artificial Sequence
  Description of Artificial Sequence: Synthetic oligonucleotide
cagguaggcuacaguaacu

SEQ ID NO: 1054609 - RNA, 19 nt, Artificial Sequence
  Description of Artificial Sequence: Synthetic oligonucleotide
gugaacucgccaccaugcu

SEQ ID NO: 1054610 - RNA, 19 nt, Artificial Sequence
  Description of Artificial Sequence: Synthetic oligonucleotide
ccuggcagccgucgucucg

SEQ ID NO: 1054611 - RNA, 19 nt, Artificial Sequence
  Description of Artificial Sequence: Synthetic oligonucleotide
gacaacgugggagcucagu

SEQ ID NO: 1054612 - RNA, 19 nt, Artificial Sequence
  Description of Artificial Sequence: Synthetic oligonucleotide
ugggugcgugguugucgca

SEQ ID NO: 1054613 - RNA, 19 nt, Artificial Sequence
  Description of Artificial Sequence: Synthetic oligonucleotide
cacucugauccaucuuucu

SEQ ID NO: 1054614 - RNA, 19 nt, Artificial Sequence
  Description of Artificial Sequence: Synthetic oligonucleotide
agcacggagguggguggug

SEQ ID NO: 1054615 - RNA, 19 nt, Artificial Sequence
  Description of Artificial Sequence: Synthetic oligonucleotide
gggcuaucagcagaaugga

SEQ ID NO: 1054616 - RNA, 19 nt, Artificial Sequence
  Description of Artificial Sequence: Synthetic oligonucleotide
guguguagggucacaaauu

SEQ ID NO: 1054617 - RNA, 19 nt, Artificial Sequence
  Description of Artificial Sequence: Synthetic oligonucleotide
gugguuugucuuuuccauu

SEQ ID NO: 1054618 - RNA, 19 nt, Artificial Sequence
  Description of Artificial Sequence: Synthetic oligonucleotide
cuggccacccucucuggua

SEQ ID NO: 1054619 - RNA, 19 nt, Artificial Sequence
  Description of Artificial Sequence: Synthetic oligonucleotide
cagcaacacaugucuggaa

SEQ ID NO: 1054620 - RNA, 19 nt, Artificial Sequence
  Description of Artificial Sequence: Synthetic oligonucleotide
gacccuggugcugcgccca

SEQ ID NO: 1054621 - RNA, 19 nt, Artificial Sequence
  Description of Artificial Sequence: Synthetic oligonucleotide
ggcuacaguaacugucacu

SEQ ID NO: 1054622 - RNA, 19 nt, Artificial Sequence
  Description of Artificial Sequence: Synthetic oligonucleotide
gugucaggccucacgugga

SEQ ID NO: 1054623 - RNA, 19 nt, Artificial Sequence
  Description of Artificial Sequence: Synthetic oligonucleotide
uggacggcacagggcugcc

SEQ ID NO: 1054624 - RNA, 19 nt, Artificial Sequence
  Description of Artificial Sequence: Synthetic oligonucleotide
ucgggcccuguggaaggca

SEQ ID NO: 1054625 - RNA, 19 nt, Artificial Sequence
  Description of Artificial Sequence: Synthetic oligonucleotide
gggugcgugguugucgcac

SEQ ID NO: 1054626 - RNA, 19 nt, Artificial Sequence
  Description of Artificial Sequence: Synthetic oligonucleotide
ccgagaaccgaggcgggag

SEQ ID NO: 1054627 - RNA, 19 nt, Artificial Sequence
  Description of Artificial Sequence: Synthetic oligonucleotide
gucgcacgggcugcugagc

SEQ ID NO: 1054628 - RNA, 19 nt, Artificial Sequence
  Description of Artificial Sequence: Synthetic oligonucleotide
cagcccgguccucuggaca

SEQ ID NO: 1054629 - RNA, 19 nt, Artificial Sequence
  Description of Artificial Sequence: Synthetic oligonucleotide
auuccgucuggaacuuguu

SEQ ID NO: 1054630 - RNA, 19 nt, Artificial Sequence
  Description of Artificial Sequence: Synthetic oligonucleotide
aggccucacguggacucga

SEQ ID NO: 1054631 - RNA, 19 nt, Artificial Sequence
  Description of Artificial Sequence: Synthetic oligonucleotide
ccgcacuucuuggaucggg

SEQ ID NO: 1054632 - RNA, 19 nt, Artificial Sequence
  Description of Artificial Sequence: Synthetic oligonucleotide
uggcagccgucgucucgca

SEQ ID NO: 1054633 - RNA, 19 nt, Artificial Sequence
  Description of Artificial Sequence: Synthetic oligonucleotide
gcgucguugagggacaggu

SEQ ID NO: 1054634 - RNA, 19 nt, Artificial Sequence
  Description of Artificial Sequence: Synthetic oligonucleotide
cuucuuggaucgggcuuca

SEQ ID NO: 1054635 - RNA, 19 nt, Artificial Sequence
  Description of Artificial Sequence: Synthetic oligonucleotide
gcaagugcuaccacacccu

SEQ ID NO: 1054636 - RNA, 19 nt, Artificial Sequence
  Description of Artificial Sequence: Synthetic oligonucleotide
aggcgucguugagggacag

SEQ ID NO: 1054637 - RNA, 19 nt, Artificial Sequence
  Description of Artificial Sequence: Synthetic oligonucleotide
cgagaaccgaggcgggagc

SEQ ID NO: 1054638 - RNA, 19 nt, Artificial Sequence
  Description of Artificial Sequence: Synthetic oligonucleotide
agguugggugugacauuga

SEQ ID NO: 1054639 - RNA, 19 nt, Artificial Sequence
  Description of Artificial Sequence: Synthetic oligonucleotide
ccacaacagcaagugcuac

SEQ ID NO: 1054640 - RNA, 19 nt, Artificial Sequence
  Description of Artificial Sequence: Synthetic oligonucleotide
ggagcaggccgagaaccga

SEQ ID NO: 1054641 - RNA, 19 nt, Artificial Sequence
  Description of Artificial Sequence: Synthetic oligonucleotide
ggauuaccugccagaagua

SEQ ID NO: 1054642 - RNA, 19 nt, Artificial Sequence
  Description of Artificial Sequence: Synthetic oligonucleotide
cagucacaauggcugggcu

SEQ ID NO: 1054643 - RNA, 19 nt, Artificial Sequence
  Description of Artificial Sequence: Synthetic oligonucleotide
ccacucggagaggacgagc

SEQ ID NO: 1054644 - RNA, 19 nt, Artificial Sequence
  Description of Artificial Sequence: Synthetic oligonucleotide
ggcgucguugagggacagg

SEQ ID NO: 1054645 - RNA, 19 nt, Artificial Sequence
  Description of Artificial Sequence: Synthetic oligonucleotide
gcacuucuuggaucgggcu

SEQ ID NO: 1054646 - RNA, 19 nt, Artificial Sequence
  Description of Artificial Sequence: Synthetic oligonucleotide
uucuuggaucgggcuucau

SEQ ID NO: 1054647 - RNA, 19 nt, Artificial Sequence
  Description of Artificial Sequence: Synthetic oligonucleotide
cacugggugcgugguuguc

SEQ ID NO: 1054648 - RNA, 19 nt, Artificial Sequence
  Description of Artificial Sequence: Synthetic oligonucleotide
cugcaaggcagugcaccaa

SEQ ID NO: 1054649 - RNA, 19 nt, Artificial Sequence
  Description of Artificial Sequence: Synthetic oligonucleotide
gguggguggugagccacuc

SEQ ID NO: 1054650 - RNA, 19 nt, Artificial Sequence
  Description of Artificial Sequence: Synthetic oligonucleotide
cguccgcucaaaguccagc

SEQ ID NO: 1054651 - RNA, 19 nt, Artificial Sequence
  Description of Artificial Sequence: Synthetic oligonucleotide
cagugcccaccaagcacaa

SEQ ID NO: 1054652 - RNA, 19 nt, Artificial Sequence
  Description of Artificial Sequence: Synthetic oligonucleotide
gugcugcgcccauuagugu

SEQ ID NO: 1054653 - RNA, 19 nt, Artificial Sequence
  Description of Artificial Sequence: Synthetic oligonucleotide
ggauucucagaagguggcu

SEQ ID NO: 1054654 - RNA, 19 nt, Artificial Sequence
  Description of Artificial Sequence: Synthetic oligonucleotide
gguugugguuggugggagu

SEQ ID NO: 1054655 - RNA, 19 nt, Artificial Sequence
  Description of Artificial Sequence: Synthetic oligonucleotide
ggccucacguggacucgag

SEQ ID NO: 1054656 - RNA, 19 nt, Artificial Sequence
  Description of Artificial Sequence: Synthetic oligonucleotide
gcacggaggugggugguga

SEQ ID NO: 1054657 - RNA, 19 nt, Artificial Sequence
  Description of Artificial Sequence: Synthetic oligonucleotide
guucacugggugcgugguu

SEQ ID NO: 1054658 - RNA, 19 nt, Artificial Sequence
  Description of Artificial Sequence: Synthetic oligonucleotide
gcuggacggcacagggcug

SEQ ID NO: 1054659 - RNA, 19 nt, Artificial Sequence
  Description of Artificial Sequence: Synthetic oligonucleotide
acguggacucgaggguguu

SEQ ID NO: 1054660 - RNA, 19 nt, Artificial Sequence
  Description of Artificial Sequence: Synthetic oligonucleotide
cgcacgggcugcugagccc

SEQ ID NO: 1054661 - RNA, 19 nt, Artificial Sequence
  Description of Artificial Sequence: Synthetic oligonucleotide
gcugggcagcucucggucu

SEQ ID NO: 1054662 - RNA, 19 nt, Artificial Sequence
  Description of Artificial Sequence: Synthetic oligonucleotide
cucggcugggccacagguu

SEQ ID NO: 1054663 - RNA, 19 nt, Artificial Sequence
  Description of Artificial Sequence: Synthetic oligonucleotide
cggucugacucgccaucag

SEQ ID NO: 1054664 - RNA, 19 nt, Artificial Sequence
  Description of Artificial Sequence: Synthetic oligonucleotide
acucgccaccaugcucaaa

SEQ ID NO: 1054665 - RNA, 19 nt, Artificial Sequence
  Description of Artificial Sequence: Synthetic oligonucleotide
ggacaacgugggagcucag

SEQ ID NO: 1054666 - RNA, 19 nt, Artificial Sequence
  Description of Artificial Sequence: Synthetic oligonucleotide
ggcuaucagcagaauggau

SEQ ID NO: 1054667 - RNA, 19 nt, Artificial Sequence
  Description of Artificial Sequence: Synthetic oligonucleotide
gcguccgcucaaaguccag

SEQ ID NO: 1054668 - RNA, 19 nt, Artificial Sequence
  Description of Artificial Sequence: Synthetic oligonucleotide
gccgagaaccgaggcggga

SEQ ID NO: 1054669 - RNA, 19 nt, Artificial Sequence
  Description of Artificial Sequence: Synthetic oligonucleotide
gcucucggucugacucgcc

SEQ ID NO: 1054670 - RNA, 19 nt, Artificial Sequence
  Description of Artificial Sequence: Synthetic oligonucleotide
gggcuccaauggucagaga

SEQ ID NO: 1054671 - RNA, 19 nt, Artificial Sequence
  Description of Artificial Sequence: Synthetic oligonucleotide
cccaucgggcccuguggaa

SEQ ID NO: 1054672 - RNA, 19 nt, Artificial Sequence
  Description of Artificial Sequence: Synthetic oligonucleotide
cgucgucucgcagcuucug

SEQ ID NO: 1054673 - RNA, 19 nt, Artificial Sequence
  Description of Artificial Sequence: Synthetic oligonucleotide
gccuggcagccgucgucuc

SEQ ID NO: 1054674 - RNA, 19 nt, Artificial Sequence
  Description of Artificial Sequence: Synthetic oligonucleotide
gggugagauguuagacuuu

SEQ ID NO: 1054675 - RNA, 19 nt, Artificial Sequence
  Description of Artificial Sequence: Synthetic oligonucleotide
cagcacggagguggguggu

SEQ ID NO: 1054676 - RNA, 19 nt, Artificial Sequence
  Description of Artificial Sequence: Synthetic oligonucleotide
ccgacucaguggcacugcu

SEQ ID NO: 1054677 - RNA, 19 nt, Artificial Sequence
  Description of Artificial Sequence: Synthetic oligonucleotide
ccacccucucugguauaca

SEQ ID NO: 1054678 - RNA, 19 nt, Artificial Sequence
  Description of Artificial Sequence: Synthetic oligonucleotide
gccccagcguccgcucaaa

SEQ ID NO: 1054679 - RNA, 19 nt, Artificial Sequence
  Description of Artificial Sequence: Synthetic oligonucleotide
caccgggcucgggcugcca

SEQ ID NO: 1054680 - RNA, 19 nt, Artificial Sequence
  Description of Artificial Sequence: Synthetic oligonucleotide
ccgggcucgggcugccacu

SEQ ID NO: 1054681 - RNA, 19 nt, Artificial Sequence
  Description of Artificial Sequence: Synthetic oligonucleotide
cgggagcaccgggcucggg

SEQ ID NO: 1054682 - RNA, 19 nt, Artificial Sequence
  Description of Artificial Sequence: Synthetic oligonucleotide
uuuaauuugauaaucugac

SEQ ID NO: 1054683 - RNA, 19 nt, Artificial Sequence
  Description of Artificial Sequence: Synthetic oligonucleotide
aaucagaacaacauauugc

SEQ ID NO: 1054684 - RNA, 19 nt, Artificial Sequence
  Description of Artificial Sequence: Synthetic oligonucleotide
aggucugcgauuuucaucc

SEQ ID NO: 1054685 - RNA, 19 nt, Artificial Sequence
  Description of Artificial Sequence: Synthetic oligonucleotide
aacaacauauugcacacag

SEQ ID NO: 1054686 - RNA, 19 nt, Artificial Sequence
  Description of Artificial Sequence: Synthetic oligonucleotide
uuauuagaaaacuuuaaga

SEQ ID NO: 1054687 - RNA, 19 nt, Artificial Sequence
  Description of Artificial Sequence: Synthetic oligonucleotide
aauccuuuauauuuccagg

SEQ ID NO: 1054688 - RNA, 19 nt, Artificial Sequence
  Description of Artificial Sequence: Synthetic oligonucleotide
uggauaagcgacaaaaugc

SEQ ID NO: 1054689 - RNA, 19 nt, Artificial Sequence
  Description of Artificial Sequence: Synthetic oligonucleotide
ucuuucuaaauccagaaaa

SEQ ID NO: 1054690 - RNA, 19 nt, Artificial Sequence
  Description of Artificial Sequence: Synthetic oligonucleotide
aaagaaauggguuaaucau

SEQ ID NO: 1054691 - RNA, 19 nt, Artificial Sequence
  Description of Artificial Sequence: Synthetic oligonucleotide
cuauuaagcagccagaaug

SEQ ID NO: 1054692 - RNA, 19 nt, Artificial Sequence
  Description of Artificial Sequence: Synthetic oligonucleotide
aaaucuaguggucucucac

SEQ ID NO: 1054693 - RNA, 19 nt, Artificial Sequence
  Description of Artificial Sequence: Synthetic oligonucleotide
ugaaaugccauaccugacg

SEQ ID NO: 1054694 - RNA, 19 nt, Artificial Sequence
  Description of Artificial Sequence: Synthetic oligonucleotide
acauauugcacacagauaa

SEQ ID NO: 1054695 - RNA, 19 nt, Artificial Sequence
  Description of Artificial Sequence: Synthetic oligonucleotide
agaacaacauauugcacac

SEQ ID NO: 1054696 - RNA, 19 nt, Artificial Sequence
  Description of Artificial Sequence: Synthetic oligonucleotide
augugcuagauugagagcc

SEQ ID NO: 1054697 - RNA, 19 nt, Artificial Sequence
  Description of Artificial Sequence: Synthetic oligonucleotide
uuaaauugcuccaaugcac

SEQ ID NO: 1054698 - RNA, 19 nt, Artificial Sequence
  Description of Artificial Sequence: Synthetic oligonucleotide
agacuaugacuucaaaagc

SEQ ID NO: 1054699 - RNA, 19 nt, Artificial Sequence
  Description of Artificial Sequence: Synthetic oligonucleotide
agacaauauaugugaaugc

SEQ ID NO: 1054700 - RNA, 19 nt, Artificial Sequence
  Description of Artificial Sequence: Synthetic oligonucleotide
uguagguauguaaugaaga

SEQ ID NO: 1054701 - RNA, 19 nt, Artificial Sequence
  Description of Artificial Sequence: Synthetic oligonucleotide
uuaauuugauaaucugacg

SEQ ID NO: 1054702 - RNA, 19 nt, Artificial Sequence
  Description of Artificial Sequence: Synthetic oligonucleotide
aaauggguuaaucaucuga

SEQ ID NO: 1054703 - RNA, 19 nt, Artificial Sequence
  Description of Artificial Sequence: Synthetic oligonucleotide
aauacaugaccauuucucu

SEQ ID NO: 1054704 - RNA, 19 nt, Artificial Sequence
  Description of Artificial Sequence: Synthetic oligonucleotide
auaaucugacgucuuagcg

SEQ ID NO: 1054705 - RNA, 19 nt, Artificial Sequence
  Description of Artificial Sequence: Synthetic oligonucleotide
aucagaacaacauauugca

SEQ ID NO: 1054706 - RNA, 19 nt, Artificial Sequence
  Description of Artificial Sequence: Synthetic oligonucleotide
uguauuccauuucauacug

SEQ ID NO: 1054707 - RNA, 19 nt, Artificial Sequence
  Description of Artificial Sequence: Synthetic oligonucleotide
uguuugaaaugccauaccu

SEQ ID NO: 1054708 - RNA, 19 nt, Artificial Sequence
  Description of Artificial Sequence: Synthetic oligonucleotide
uuuagcacguucuuuauuc

SEQ ID NO: 1054709 - RNA, 19 nt, Artificial Sequence
  Description of Artificial Sequence: Synthetic oligonucleotide
uuccauuucauacugaauu

SEQ ID NO: 1054710 - RNA, 19 nt, Artificial Sequence
  Description of Artificial Sequence: Synthetic oligonucleotide
gagacaauauaugugaaug

SEQ ID NO: 1054711 - RNA, 19 nt, Artificial Sequence
  Description of Artificial Sequence: Synthetic oligonucleotide
aaacucauucuuuacgacu

SEQ ID NO: 1054712 - RNA, 19 nt, Artificial Sequence
  Description of Artificial Sequence: Synthetic oligonucleotide
aaacaauggaguuugcaaa

SEQ ID NO: 1054713 - RNA, 19 nt, Artificial Sequence
  Description of Artificial Sequence: Synthetic oligonucleotide
aauauaugugaaugcugag

SEQ ID NO: 1054714 - RNA, 19 nt, Artificial Sequence
  Description of Artificial Sequence: Synthetic oligonucleotide
aauggguuaaucaucugag

SEQ ID NO: 1054715 - RNA, 19 nt, Artificial Sequence
  Description of Artificial Sequence: Synthetic oligonucleotide
agguggucuuucuaaaucc

SEQ ID NO: 1054716 - RNA, 19 nt, Artificial Sequence
  Description of Artificial Sequence: Synthetic oligonucleotide
ucuuaagugaugcaccaga

SEQ ID NO: 1054717 - RNA, 19 nt, Artificial Sequence
  Description of Artificial Sequence: Synthetic oligonucleotide
uaagcagccagaaugcuac

SEQ ID NO: 1054718 - RNA, 19 nt, Artificial Sequence
  Description of Artificial Sequence: Synthetic oligonucleotide
cugacuaauaccuucggug

SEQ ID NO: 1054719 - RNA, 19 nt, Artificial Sequence
  Description of Artificial Sequence: Synthetic oligonucleotide
cagaggaaagacuagcucc

SEQ ID NO: 1054720 - RNA, 19 nt, Artificial Sequence
  Description of Artificial Sequence: Synthetic oligonucleotide
aagaaauggguuaaucauc

SEQ ID NO: 1054721 - RNA, 19 nt, Artificial Sequence
  Description of Artificial Sequence: Synthetic oligonucleotide
uaagcgacaaaaugccacg

SEQ ID NO: 1054722 - RNA, 19 nt, Artificial Sequence
  Description of Artificial Sequence: Synthetic oligonucleotide
uaaauugcuccaaugcaca

SEQ ID NO: 1054723 - RNA, 19 nt, Artificial Sequence
  Description of Artificial Sequence: Synthetic oligonucleotide
ugaggauuagaaguggcgg

SEQ ID NO: 1054724 - RNA, 19 nt, Artificial Sequence
  Description of Artificial Sequence: Synthetic oligonucleotide
uuagccugccaacugcucg

SEQ ID NO: 1054725 - RNA, 19 nt, Artificial Sequence
  Description of Artificial Sequence: Synthetic oligonucleotide
aaucugacgucuuagcgaa

SEQ ID NO: 1054726 - RNA, 19 nt, Artificial Sequence
  Description of Artificial Sequence: Synthetic oligonucleotide
ucuagcgucgaaaccacag

SEQ ID NO: 1054727 - RNA, 19 nt, Artificial Sequence
  Description of Artificial Sequence: Synthetic oligonucleotide
aaccugcugaaucauuagg

SEQ ID NO: 1054728 - RNA, 19 nt, Artificial Sequence
  Description of Artificial Sequence: Synthetic oligonucleotide
agaucaguaacagaacagg

SEQ ID NO: 1054729 - RNA, 19 nt, Artificial Sequence
  Description of Artificial Sequence: Synthetic oligonucleotide
aagacagaaacaauggagu

SEQ ID NO: 1054730 - RNA, 19 nt, Artificial Sequence
  Description of Artificial Sequence: Synthetic oligonucleotide
uuuuccgggacccucauuc

SEQ ID NO: 1054731 - RNA, 19 nt, Artificial Sequence
  Description of Artificial Sequence: Synthetic oligonucleotide
aaucauuccugaccaacug

SEQ ID NO: 1054732 - RNA, 19 nt, Artificial Sequence
  Description of Artificial Sequence: Synthetic oligonucleotide
ugcaaaacuggcugaaugc

SEQ ID NO: 1054733 - RNA, 19 nt, Artificial Sequence
  Description of Artificial Sequence: Synthetic oligonucleotide
acagccaacuauuaagcag

SEQ ID NO: 1054734 - RNA, 19 nt, Artificial Sequence
  Description of Artificial Sequence: Synthetic oligonucleotide
caugcaaaaggcgagagug

SEQ ID NO: 1054735 - RNA, 19 nt, Artificial Sequence
  Description of Artificial Sequence: Synthetic oligonucleotide
uauuacacuggcauuugga

SEQ ID NO: 1054736 - RNA, 19 nt, Artificial Sequence
  Description of Artificial Sequence: Synthetic oligonucleotide
ugcuauuuggcacuaucug

SEQ ID NO: 1054737 - RNA, 19 nt, Artificial Sequence
  Description of Artificial Sequence: Synthetic oligonucleotide
uggguuaaucaucugagaa

SEQ ID NO: 1054738 - RNA, 19 nt, Artificial Sequence
  Description of Artificial Sequence: Synthetic oligonucleotide
gacaaaaugccacgggcag

SEQ ID NO: 1054739 - RNA, 19 nt, Artificial Sequence
  Description of Artificial Sequence: Synthetic oligonucleotide
augaccauuucucuuuuag

SEQ ID NO: 1054740 - RNA, 19 nt, Artificial Sequence
  Description of Artificial Sequence: Synthetic oligonucleotide
uuauuacacuggcauuugg

SEQ ID NO: 1054741 - RNA, 19 nt, Artificial Sequence
  Description of Artificial Sequence: Synthetic oligonucleotide
cagccaacuauuaagcagc

SEQ ID NO: 1054742 - RNA, 19 nt, Artificial Sequence
  Description of Artificial Sequence: Synthetic oligonucleotide
ugcuccaaugcacaugugc

SEQ ID NO: 1054743 - RNA, 19 nt, Artificial Sequence
  Description of Artificial Sequence: Synthetic oligonucleotide
ugacuaauaccuucggugu

SEQ ID NO: 1054744 - RNA, 19 nt, Artificial Sequence
  Description of Artificial Sequence: Synthetic oligonucleotide
uucuuuacgacugucauuu

SEQ ID NO: 1054745 - RNA, 19 nt, Artificial Sequence
  Description of Artificial Sequence: Synthetic oligonucleotide
uuagagaauuagcuguaca

SEQ ID NO: 1054746 - RNA, 19 nt, Artificial Sequence
  Description of Artificial Sequence: Synthetic oligonucleotide
aacucauucuuuacgacug

SEQ ID NO: 1054747 - RNA, 19 nt, Artificial Sequence
  Description of Artificial Sequence: Synthetic oligonucleotide
agguauguaaugaagaagu

SEQ ID NO: 1054748 - RNA, 19 nt, Artificial Sequence
  Description of Artificial Sequence: Synthetic oligonucleotide
aaugcuacaguaauugaau

SEQ ID NO: 1054749 - RNA, 19 nt, Artificial Sequence
  Description of Artificial Sequence: Synthetic oligonucleotide
auuucauacugaauucggc

SEQ ID NO: 1054750 - RNA, 19 nt, Artificial Sequence
  Description of Artificial Sequence: Synthetic oligonucleotide
guuuaaagggaguggacug

SEQ ID NO: 1054751 - RNA, 19 nt, Artificial Sequence
  Description of Artificial Sequence: Synthetic oligonucleotide
uucgguguauuccauuuca

SEQ ID NO: 1054752 - RNA, 19 nt, Artificial Sequence
  Description of Artificial Sequence: Synthetic oligonucleotide
uuauauuuccagguguuga

SEQ ID NO: 1054753 - RNA, 19 nt, Artificial Sequence
  Description of Artificial Sequence: Synthetic oligonucleotide
uccuuuauauuuccaggug

SEQ ID NO: 1054754 - RNA, 19 nt, Artificial Sequence
  Description of Artificial Sequence: Synthetic oligonucleotide
ugaauacaugaccauuucu

SEQ ID NO: 1054755 - RNA, 19 nt, Artificial Sequence
  Description of Artificial Sequence: Synthetic oligonucleotide
ucauacugaauucggcuga

SEQ ID NO: 1054756 - RNA, 19 nt, Artificial Sequence
  Description of Artificial Sequence: Synthetic oligonucleotide
cuggauaagcgacaaaaug

SEQ ID NO: 1054757 - RNA, 19 nt, Artificial Sequence
  Description of Artificial Sequence: Synthetic oligonucleotide
gaacaggccaugcaaagac

SEQ ID NO: 1054758 - RNA, 19 nt, Artificial Sequence
  Description of Artificial Sequence: Synthetic oligonucleotide
ugcuacaguaauugaauac

SEQ ID NO: 1054759 - RNA, 19 nt, Artificial Sequence
  Description of Artificial Sequence: Synthetic oligonucleotide
uucagguagcauaugggga

SEQ ID NO: 1054760 - RNA, 19 nt, Artificial Sequence
  Description of Artificial Sequence: Synthetic oligonucleotide
aaucuaguggucucucacu

SEQ ID NO: 1054761 - RNA, 19 nt, Artificial Sequence
  Description of Artificial Sequence: Synthetic oligonucleotide
cagacgucuauuuaauuug

SEQ ID NO: 1054762 - RNA, 19 nt, Artificial Sequence
  Description of Artificial Sequence: Synthetic oligonucleotide
cagaacaacauauugcaca

SEQ ID NO: 1054763 - RNA, 19 nt, Artificial Sequence
  Description of Artificial Sequence: Synthetic oligonucleotide
aaaugccacgggcagagga

SEQ ID NO: 1054764 - RNA, 19 nt, Artificial Sequence
  Description of Artificial Sequence: Synthetic oligonucleotide
ucauucgcugacuaauacc

SEQ ID NO: 1054765 - RNA, 19 nt, Artificial Sequence
  Description of Artificial Sequence: Synthetic oligonucleotide
aucuaguggucucucacuc

SEQ ID NO: 1054766 - RNA, 19 nt, Artificial Sequence
  Description of Artificial Sequence: Synthetic oligonucleotide
ucuguguagguauguaaug

SEQ ID NO: 1054767 - RNA, 19 nt, Artificial Sequence
  Description of Artificial Sequence: Synthetic oligonucleotide
gaacccuugguccagguca

SEQ ID NO: 1054768 - RNA, 19 nt, Artificial Sequence
  Description of Artificial Sequence: Synthetic oligonucleotide
uauuuccagguguugagac

SEQ ID NO: 1054769 - RNA, 19 nt, Artificial Sequence
  Description of Artificial Sequence: Synthetic oligonucleotide
agcacguucuuuauucucc

SEQ ID NO: 1054770 - RNA, 19 nt, Artificial Sequence
  Description of Artificial Sequence: Synthetic oligonucleotide
ugugacaacgauccucucu

SEQ ID NO: 1054771 - RNA, 19 nt, Artificial Sequence
  Description of Artificial Sequence: Synthetic oligonucleotide
gugacaacgauccucucug

SEQ ID NO: 1054772 - RNA, 19 nt, Artificial Sequence
  Description of Artificial Sequence: Synthetic oligonucleotide
aaaaucuaguggucucuca

SEQ ID NO: 1054773 - RNA, 19 nt, Artificial Sequence
  Description of Artificial Sequence: Synthetic oligonucleotide
caaaaggcgagaguguagg

SEQ ID NO: 1054774 - RNA, 19 nt, Artificial Sequence
  Description of Artificial Sequence: Synthetic oligonucleotide
uuaagugaugcaccagacu

SEQ ID NO: 1054775 - RNA, 19 nt, Artificial Sequence
  Description of Artificial Sequence: Synthetic oligonucleotide
ucgcugacuaauaccuucg

SEQ ID NO: 1054776 - RNA, 19 nt, Artificial Sequence
  Description of Artificial Sequence: Synthetic oligonucleotide
auuacacuggcauuuggaa

SEQ ID NO: 1054777 - RNA, 19 nt, Artificial Sequence
  Description of Artificial Sequence: Synthetic oligonucleotide
acggaaucauuccugacca

SEQ ID NO: 1054778 - RNA, 19 nt, Artificial Sequence
  Description of Artificial Sequence: Synthetic oligonucleotide
uuuacgacugucauuucuu

SEQ ID NO: 1054779 - RNA, 19 nt, Artificial Sequence
  Description of Artificial Sequence: Synthetic oligonucleotide
aaguuaguuggguugguuu

SEQ ID NO: 1054780 - RNA, 19 nt, Artificial Sequence
  Description of Artificial Sequence: Synthetic oligonucleotide
ugcaucuauguuugaaaug

SEQ ID NO: 1054781 - RNA, 19 nt, Artificial Sequence
  Description of Artificial Sequence: Synthetic oligonucleotide
uagcgucgaaaccacagcc

SEQ ID NO: 1054782 - RNA, 19 nt, Artificial Sequence
  Description of Artificial Sequence: Synthetic oligonucleotide
ugcugguaagcccuacggg

SEQ ID NO: 1054783 - RNA, 19 nt, Artificial Sequence
  Description of Artificial Sequence: Synthetic oligonucleotide
uugcuauuuggcacuaucu

SEQ ID NO: 1054784 - RNA, 19 nt, Artificial Sequence
  Description of Artificial Sequence: Synthetic oligonucleotide
cagucaugucaucugaugc

SEQ ID NO: 1054785 - RNA, 19 nt, Artificial Sequence
  Description of Artificial Sequence: Synthetic oligonucleotide
uccaaugcacaugugcuag

SEQ ID NO: 1054786 - RNA, 19 nt, Artificial Sequence
  Description of Artificial Sequence: Synthetic oligonucleotide
uccauuucauacugaauuc

SEQ ID NO: 1054787 - RNA, 19 nt, Artificial Sequence
  Description of Artificial Sequence: Synthetic oligonucleotide
aaaggcgagaguguaggug

SEQ ID NO: 1054788 - RNA, 19 nt, Artificial Sequence
  Description of Artificial Sequence: Synthetic oligonucleotide
acagccuauuuacaaaaca

SEQ ID NO: 1054789 - RNA, 19 nt, Artificial Sequence
  Description of Artificial Sequence: Synthetic oligonucleotide
gcaucuauguuugaaaugc

SEQ ID NO: 1054790 - RNA, 19 nt, Artificial Sequence
  Description of Artificial Sequence: Synthetic oligonucleotide
gucacaacggaaucauucc

SEQ ID NO: 1054791 - RNA, 19 nt, Artificial Sequence
  Description of Artificial Sequence: Synthetic oligonucleotide
cuucguuuugaggaguugg

SEQ ID NO: 1054792 - RNA, 19 nt, Artificial Sequence
  Description of Artificial Sequence: Synthetic oligonucleotide
agaaauggguuaaucaucu

SEQ ID NO: 1054793 - RNA, 19 nt, Artificial Sequence
  Description of Artificial Sequence: Synthetic oligonucleotide
gacaacgauccucucuggg

SEQ ID NO: 1054794 - RNA, 19 nt, Artificial Sequence
  Description of Artificial Sequence: Synthetic oligonucleotide
ugggacuugcauuauuaca

SEQ ID NO: 1054795 - RNA, 19 nt, Artificial Sequence
  Description of Artificial Sequence: Synthetic oligonucleotide
uuacacuggcauuuggaac

SEQ ID NO: 1054796 - RNA, 19 nt, Artificial Sequence
  Description of Artificial Sequence: Synthetic oligonucleotide
cuuaagugaugcaccagac

SEQ ID NO: 1054797 - RNA, 19 nt, Artificial Sequence
  Description of Artificial Sequence: Synthetic oligonucleotide
uuuauauuuccagguguug

SEQ ID NO: 1054798 - RNA, 19 nt, Artificial Sequence
  Description of Artificial Sequence: Synthetic oligonucleotide
ucugcugguaagcccuacg

SEQ ID NO: 1054799 - RNA, 19 nt, Artificial Sequence
  Description of Artificial Sequence: Synthetic oligonucleotide
accaaauaugaaacaacgg

SEQ ID NO: 1054800 - RNA, 19 nt, Artificial Sequence
  Description of Artificial Sequence: Synthetic oligonucleotide
uguguagguauguaaugaa

SEQ ID NO: 1054801 - RNA, 19 nt, Artificial Sequence
  Description of Artificial Sequence: Synthetic oligonucleotide
ugaaacaacgggcuugcua

SEQ ID NO: 1054802 - RNA, 19 nt, Artificial Sequence
  Description of Artificial Sequence: Synthetic oligonucleotide
ucugggacuugcauuauua

SEQ ID NO: 1054803 - RNA, 19 nt, Artificial Sequence
  Description of Artificial Sequence: Synthetic oligonucleotide
agaguguaggugccacugc

SEQ ID NO: 1054804 - RNA, 19 nt, Artificial Sequence
  Description of Artificial Sequence: Synthetic oligonucleotide
uucguuuugaggaguugga

SEQ ID NO: 1054805 - RNA, 19 nt, Artificial Sequence
  Description of Artificial Sequence: Synthetic oligonucleotide
gguuaaucaucugagaaac

SEQ ID NO: 1054806 - RNA, 19 nt, Artificial Sequence
  Description of Artificial Sequence: Synthetic oligonucleotide
uuaccucuagcgucgaaac

SEQ ID NO: 1054807 - RNA, 19 nt, Artificial Sequence
  Description of Artificial Sequence: Synthetic oligonucleotide
aauugcuccaaugcacaug

SEQ ID NO: 1054808 - RNA, 19 nt, Artificial Sequence
  Description of Artificial Sequence: Synthetic oligonucleotide
aacuauuaagcagccagaa

SEQ ID NO: 1054809 - RNA, 19 nt, Artificial Sequence
  Description of Artificial Sequence: Synthetic oligonucleotide
ugguaagcccuacgggugg

SEQ ID NO: 1054810 - RNA, 19 nt, Artificial Sequence
  Description of Artificial Sequence: Synthetic oligonucleotide
aauggaguuugcaaauccu

SEQ ID NO: 1054811 - RNA, 19 nt, Artificial Sequence
  Description of Artificial Sequence: Synthetic oligonucleotide
ucagaacaacauauugcac

SEQ ID NO: 1054812 - RNA, 19 nt, Artificial Sequence
  Description of Artificial Sequence: Synthetic oligonucleotide
uaaccugcugaaucauuag

SEQ ID NO: 1054813 - RNA, 19 nt, Artificial Sequence
  Description of Artificial Sequence: Synthetic oligonucleotide
ucugacgucuuagcgaagc

SEQ ID NO: 1054814 - RNA, 19 nt, Artificial Sequence
  Description of Artificial Sequence: Synthetic oligonucleotide
uuagcgaagcugcauccac

SEQ ID NO: 1054815 - RNA, 19 nt, Artificial Sequence
  Description of Artificial Sequence: Synthetic oligonucleotide
agcgacaaaaugccacggg

SEQ ID NO: 1054816 - RNA, 19 nt, Artificial Sequence
  Description of Artificial Sequence: Synthetic oligonucleotide
ucauggaacgcucucuuuu

SEQ ID NO: 1054817 - RNA, 19 nt, Artificial Sequence
  Description of Artificial Sequence: Synthetic oligonucleotide
uguccauucuggcgaacag

SEQ ID NO: 1054818 - RNA, 19 nt, Artificial Sequence
  Description of Artificial Sequence: Synthetic oligonucleotide
ucacaacggaaucauuccu

SEQ ID NO: 1054819 - RNA, 19 nt, Artificial Sequence
  Description of Artificial Sequence: Synthetic oligonucleotide
acaacgauccucucuggga

SEQ ID NO: 1054820 - RNA, 19 nt, Artificial Sequence
  Description of Artificial Sequence: Synthetic oligonucleotide
caaaaugccacgggcagag

SEQ ID NO: 1054821 - RNA, 19 nt, Artificial Sequence
  Description of Artificial Sequence: Synthetic oligonucleotide
acaacggaaucauuccuga

SEQ ID NO: 1054822 - RNA, 19 nt, Artificial Sequence
  Description of Artificial Sequence: Synthetic oligonucleotide
gcuauuuggcacuaucugc

SEQ ID NO: 1054823 - RNA, 19 nt, Artificial Sequence
  Description of Artificial Sequence: Synthetic oligonucleotide
gaugaggauuagaaguggc

SEQ ID NO: 1054824 - RNA, 19 nt, Artificial Sequence
  Description of Artificial Sequence: Synthetic oligonucleotide
auaccugacguugucauga

SEQ ID NO: 1054825 - RNA, 19 nt, Artificial Sequence
  Description of Artificial Sequence: Synthetic oligonucleotide
gauuucugccaucucagaa

SEQ ID NO: 1054826 - RNA, 19 nt, Artificial Sequence
  Description of Artificial Sequence: Synthetic oligonucleotide
ggauaagcgacaaaaugcc

SEQ ID NO: 1054827 - RNA, 19 nt, Artificial Sequence
  Description of Artificial Sequence: Synthetic oligonucleotide
ugagagccacuuuuguccc

SEQ ID NO: 1054828 - RNA, 19 nt, Artificial Sequence
  Description of Artificial Sequence: Synthetic oligonucleotide
augaggauuagaaguggcg

SEQ ID NO: 1054829 - RNA, 19 nt, Artificial Sequence
  Description of Artificial Sequence: Synthetic oligonucleotide
gagguggucuuucuaaauc

SEQ ID NO: 1054830 - RNA, 19 nt, Artificial Sequence
  Description of Artificial Sequence: Synthetic oligonucleotide
cuugcuauuuggcacuauc

SEQ ID NO: 1054831 - RNA, 19 nt, Artificial Sequence
  Description of Artificial Sequence: Synthetic oligonucleotide
gccuauuuacaaaacaugc

SEQ ID NO: 1054832 - RNA, 19 nt, Artificial Sequence
  Description of Artificial Sequence: Synthetic oligonucleotide
uugaaaugccauaccugac

SEQ ID NO: 1054833 - RNA, 19 nt, Artificial Sequence
  Description of Artificial Sequence: Synthetic oligonucleotide
uuugauaaucugacgucuu

SEQ ID NO: 1054834 - RNA, 19 nt, Artificial Sequence
  Description of Artificial Sequence: Synthetic oligonucleotide
  modified_base (7)..(7): a, c, u, g, unknown or other
ucgcagnggccguuggccg

SEQ ID NO: 1054835 - RNA, 19 nt, Artificial Sequence
  Description of Artificial Sequence: Synthetic oligonucleotide
ugacguugucaugaugagg

SEQ ID NO: 1054836 - RNA, 19 nt, Artificial Sequence
  Description of Artificial Sequence: Synthetic oligonucleotide
uacccguucucuguguagg

SEQ ID NO: 1054837 - RNA, 19 nt, Artificial Sequence
  Description of Artificial Sequence: Synthetic oligonucleotide
agaaugcuacaguaauuga

SEQ ID NO: 1054838 - RNA, 19 nt, Artificial Sequence
  Description of Artificial Sequence: Synthetic oligonucleotide
caucuauguuugaaaugcc

SEQ ID NO: 1054839 - RNA, 19 nt, Artificial Sequence
  Description of Artificial Sequence: Synthetic oligonucleotide
aagcgacaaaaugccacgg

SEQ ID NO: 1054840 - RNA, 19 nt, Artificial Sequence
  Description of Artificial Sequence: Synthetic oligonucleotide
uagccugccaacugcucgg

SEQ ID NO: 1054841 - RNA, 19 nt, Artificial Sequence
  Description of Artificial Sequence: Synthetic oligonucleotide
gucaugaugaggauuagaa

SEQ ID NO: 1054842 - RNA, 19 nt, Artificial Sequence
  Description of Artificial Sequence: Synthetic oligonucleotide
uggaguuugcaaauccuuu

SEQ ID NO: 1054843 - RNA, 19 nt, Artificial Sequence
  Description of Artificial Sequence: Synthetic oligonucleotide
ugugcuagauugagagcca

SEQ ID NO: 1054844 - RNA, 19 nt, Artificial Sequence
  Description of Artificial Sequence: Synthetic oligonucleotide
accucuagcgucgaaacca

SEQ ID NO: 1054845 - RNA, 19 nt, Artificial Sequence
  Description of Artificial Sequence: Synthetic oligonucleotide
aucauuccugaccaacugu

SEQ ID NO: 1054846 - RNA, 19 nt, Artificial Sequence
  Description of Artificial Sequence: Synthetic oligonucleotide
gacaauauaugugaaugcu

SEQ ID NO: 1054847 - RNA, 19 nt, Artificial Sequence
  Description of Artificial Sequence: Synthetic oligonucleotide
aaaaggcgagaguguaggu

SEQ ID NO: 1054848 - RNA, 19 nt, Artificial Sequence
  Description of Artificial Sequence: Synthetic oligonucleotide
acacagauaaccugcugaa

SEQ ID NO: 1054849 - RNA, 19 nt, Artificial Sequence
  Description of Artificial Sequence: Synthetic oligonucleotide
ugcgauuuucauccagcac

SEQ ID NO: 1054850 - RNA, 19 nt, Artificial Sequence
  Description of Artificial Sequence: Synthetic oligonucleotide
cugcugguaagcccuacgg

SEQ ID NO: 1054851 - RNA, 19 nt, Artificial Sequence
  Description of Artificial Sequence: Synthetic oligonucleotide
cauuccugaccaacugucc

SEQ ID NO: 1054852 - RNA, 19 nt, Artificial Sequence
  Description of Artificial Sequence: Synthetic oligonucleotide
uuuagagaauuagcuguac

SEQ ID NO: 1054853 - RNA, 19 nt, Artificial Sequence
  Description of Artificial Sequence: Synthetic oligonucleotide
uuucacucauggaacgcuc

SEQ ID NO: 1054854 - RNA, 19 nt, Artificial Sequence
  Description of Artificial Sequence: Synthetic oligonucleotide
uugcauuauuacacuggca

SEQ ID NO: 1054855 - RNA, 19 nt, Artificial Sequence
  Description of Artificial Sequence: Synthetic oligonucleotide
gggacuugcauuauuacac

SEQ ID NO: 1054856 - RNA, 19 nt, Artificial Sequence
  Description of Artificial Sequence: Synthetic oligonucleotide
agccuauuuacaaaacaug

SEQ ID NO: 1054857 - RNA, 19 nt, Artificial Sequence
  Description of Artificial Sequence: Synthetic oligonucleotide
caacgauccucucugggac

SEQ ID NO: 1054858 - RNA, 19 nt, Artificial Sequence
  Description of Artificial Sequence: Synthetic oligonucleotide
uuagcacguucuuuauucu

SEQ ID NO: 1054859 - RNA, 19 nt, Artificial Sequence
  Description of Artificial Sequence: Synthetic oligonucleotide
gagaguguaggugccacug

SEQ ID NO: 1054860 - RNA, 19 nt, Artificial Sequence
  Description of Artificial Sequence: Synthetic oligonucleotide
cuagcgucgaaaccacagc

SEQ ID NO: 1054861 - RNA, 19 nt, Artificial Sequence
  Description of Artificial Sequence: Synthetic oligonucleotide
ucguuuugaggaguuggag

SEQ ID NO: 1054862 - RNA, 19 nt, Artificial Sequence
  Description of Artificial Sequence: Synthetic oligonucleotide
cauucgcugacuaauaccu

SEQ ID NO: 1054863 - RNA, 19 nt, Artificial Sequence
  Description of Artificial Sequence: Synthetic oligonucleotide
gauaaggucaagaucugcu

SEQ ID NO: 1054864 - RNA, 19 nt, Artificial Sequence
  Description of Artificial Sequence: Synthetic oligonucleotide
cucauucgcugacuaauac

SEQ ID NO: 1054865 - RNA, 19 nt, Artificial Sequence
  Description of Artificial Sequence: Synthetic oligonucleotide
acgucuauuuaauuugaua

SEQ ID NO: 1054866 - RNA, 19 nt, Artificial Sequence
  Description of Artificial Sequence: Synthetic oligonucleotide
aagcccuacggguggaaga

SEQ ID NO: 1054867 - RNA, 19 nt, Artificial Sequence
  Description of Artificial Sequence: Synthetic oligonucleotide
agacugaugaggcccaaaa

SEQ ID NO: 1054868 - RNA, 19 nt, Artificial Sequence
  Description of Artificial Sequence: Synthetic oligonucleotide
ucuaguggucucucacuca

SEQ ID NO: 1054869 - RNA, 19 nt, Artificial Sequence
  Description of Artificial Sequence: Synthetic oligonucleotide
acuauuaagcagccagaau

SEQ ID NO: 1054870 - RNA, 19 nt, Artificial Sequence
  Description of Artificial Sequence: Synthetic oligonucleotide
guaggugccacugcaaaac

SEQ ID NO: 1054871 - RNA, 19 nt, Artificial Sequence
  Description of Artificial Sequence: Synthetic oligonucleotide
aaguugcagacgucuauuu

SEQ ID NO: 1054872 - RNA, 19 nt, Artificial Sequence
  Description of Artificial Sequence: Synthetic oligonucleotide
uuacccguucucuguguag

SEQ ID NO: 1054873 - RNA, 19 nt, Artificial Sequence
  Description of Artificial Sequence: Synthetic oligonucleotide
caaacaaaccuacagccua

SEQ ID NO: 1054874 - RNA, 19 nt, Artificial Sequence
  Description of Artificial Sequence: Synthetic oligonucleotide
ugccccacucaccaaauau

SEQ ID NO: 1054875 - RNA, 19 nt, Artificial Sequence
  Description of Artificial Sequence: Synthetic oligonucleotide
uuuuagcacguucuuuauu

SEQ ID NO: 1054876 - RNA, 19 nt, Artificial Sequence
  Description of Artificial Sequence: Synthetic oligonucleotide
agugaugcaccagacuaug

SEQ ID NO: 1054877 - RNA, 19 nt, Artificial Sequence
  Description of Artificial Sequence: Synthetic oligonucleotide
gaaauggguuaaucaucug

SEQ ID NO: 1054878 - RNA, 19 nt, Artificial Sequence
  Description of Artificial Sequence: Synthetic oligonucleotide
uguaggugccacugcaaaa

SEQ ID NO: 1054879 - RNA, 19 nt, Artificial Sequence
  Description of Artificial Sequence: Synthetic oligonucleotide
agaucugcugguaagcccu

SEQ ID NO: 1054880 - RNA, 19 nt, Artificial Sequence
  Description of Artificial Sequence: Synthetic oligonucleotide
cugguaagcccuacgggug

SEQ ID NO: 1054881 - RNA, 19 nt, Artificial Sequence
  Description of Artificial Sequence: Synthetic oligonucleotide
caacgggcuugcuauuugg

SEQ ID NO: 1054882 - RNA, 19 nt, Artificial Sequence
  Description of Artificial Sequence: Synthetic oligonucleotide
uauuuccugugacaacgau

SEQ ID NO: 1054883 - RNA, 19 nt, Artificial Sequence
  Description of Artificial Sequence: Synthetic oligonucleotide
ugacaacgauccucucugg

SEQ ID NO: 1054884 - RNA, 19 nt, Artificial Sequence
  Description of Artificial Sequence: Synthetic oligonucleotide
uugcagacgucuauuuaau

SEQ ID NO: 1054885 - RNA, 19 nt, Artificial Sequence
  Description of Artificial Sequence: Synthetic oligonucleotide
acaggccaugcaaagacag

SEQ ID NO: 1054886 - RNA, 19 nt, Artificial Sequence
  Description of Artificial Sequence: Synthetic oligonucleotide
uuagaaguggcggcagcug

SEQ ID NO: 1054887 - RNA, 19 nt, Artificial Sequence
  Description of Artificial Sequence: Synthetic oligonucleotide
gaaaugccauaccugacgu

SEQ ID NO: 1054888 - RNA, 19 nt, Artificial Sequence
  Description of Artificial Sequence: Synthetic oligonucleotide
uaccucuagcgucgaaacc

SEQ ID NO: 1054889 - RNA, 19 nt, Artificial Sequence
  Description of Artificial Sequence: Synthetic oligonucleotide
gaugcaccagacuaugacu

SEQ ID NO: 1054890 - RNA, 19 nt, Artificial Sequence
  Description of Artificial Sequence: Synthetic oligonucleotide
auggguuaaucaucugaga

SEQ ID NO: 1054891 - RNA, 19 nt, Artificial Sequence
  Description of Artificial Sequence: Synthetic oligonucleotide
cugucaaagaaauggguua

SEQ ID NO: 1054892 - RNA, 19 nt, Artificial Sequence
  Description of Artificial Sequence: Synthetic oligonucleotide
uuuuacccguucucugugu

SEQ ID NO: 1054893 - RNA, 19 nt, Artificial Sequence
  Description of Artificial Sequence: Synthetic oligonucleotide
agaggaaagacuagcucca

SEQ ID NO: 1054894 - RNA, 19 nt, Artificial Sequence
  Description of Artificial Sequence: Synthetic oligonucleotide
ugucaugaugaggauuaga

SEQ ID NO: 1054895 - RNA, 19 nt, Artificial Sequence
  Description of Artificial Sequence: Synthetic oligonucleotide
ucuggcgaacagcauuuuc

SEQ ID NO: 1054896 - RNA, 19 nt, Artificial Sequence
  Description of Artificial Sequence: Synthetic oligonucleotide
ucuagaaguugcagacguc

SEQ ID NO: 1054897 - RNA, 19 nt, Artificial Sequence
  Description of Artificial Sequence: Synthetic oligonucleotide
aacuccuucuuggaacccu

SEQ ID NO: 1054898 - RNA, 19 nt, Artificial Sequence
  Description of Artificial Sequence: Synthetic oligonucleotide
uuggcggugcuacuuuuaa

SEQ ID NO: 1054899 - RNA, 19 nt, Artificial Sequence
  Description of Artificial Sequence: Synthetic oligonucleotide
acuaauaccuucgguguau

SEQ ID NO: 1054900 - RNA, 19 nt, Artificial Sequence
  Description of Artificial Sequence: Synthetic oligonucleotide
caucugagaaacaaacugu

SEQ ID NO: 1054901 - RNA, 19 nt, Artificial Sequence
  Description of Artificial Sequence: Synthetic oligonucleotide
ugcaaaaggcgagagugua

SEQ ID NO: 1054902 - RNA, 19 nt, Artificial Sequence
  Description of Artificial Sequence: Synthetic oligonucleotide
agcccuacggguggaagac

SEQ ID NO: 1054903 - RNA, 19 nt, Artificial Sequence
  Description of Artificial Sequence: Synthetic oligonucleotide
acaacgggcuugcuauuug

SEQ ID NO: 1054904 - RNA, 19 nt, Artificial Sequence
  Description of Artificial Sequence: Synthetic oligonucleotide
aaacaaaccuacagccuau

SEQ ID NO: 1054905 - RNA, 19 nt, Artificial Sequence
  Description of Artificial Sequence: Synthetic oligonucleotide
cgucuauuuaauuugauaa

SEQ ID NO: 1054906 - RNA, 19 nt, Artificial Sequence
  Description of Artificial Sequence: Synthetic oligonucleotide
cugggacuugcauuauuac

SEQ ID NO: 1054907 - RNA, 19 nt, Artificial Sequence
  Description of Artificial Sequence: Synthetic oligonucleotide
aguuugcaaauccuuuaua

SEQ ID NO: 1054908 - RNA, 19 nt, Artificial Sequence
  Description of Artificial Sequence: Synthetic oligonucleotide
ugcuagauugagagccacu

SEQ ID NO: 1054909 - RNA, 19 nt, Artificial Sequence
  Description of Artificial Sequence: Synthetic oligonucleotide
aggauuagaaguggcggca

SEQ ID NO: 1054910 - RNA, 19 nt, Artificial Sequence
  Description of Artificial Sequence: Synthetic oligonucleotide
gauaagcgacaaaaugcca

SEQ ID NO: 1054911 - RNA, 19 nt, Artificial Sequence
  Description of Artificial Sequence: Synthetic oligonucleotide
gcgacaaaaugccacgggc

SEQ ID NO: 1054912 - RNA, 19 nt, Artificial Sequence
  Description of Artificial Sequence: Synthetic oligonucleotide
caacuauuaagcagccaga

SEQ ID NO: 1054913 - RNA, 19 nt, Artificial Sequence
  Description of Artificial Sequence: Synthetic oligonucleotide
agauugagagccacuuuug

SEQ ID NO: 1054914 - RNA, 19 nt, Artificial Sequence
  Description of Artificial Sequence: Synthetic oligonucleotide
  modified_base (8)..(8): a, c, u, g, unknown or other
cucgcagnggccguuggcc

SEQ ID NO: 1054915 - RNA, 19 nt, Artificial Sequence
  Description of Artificial Sequence: Synthetic oligonucleotide
acgggcuugcuauuuggca

SEQ ID NO: 1054916 - RNA, 19 nt, Artificial Sequence
  Description of Artificial Sequence: Synthetic oligonucleotide
agccaacuauuaagcagcc

SEQ ID NO: 1054917 - RNA, 19 nt, Artificial Sequence
  Description of Artificial Sequence: Synthetic oligonucleotide
ccuauuuacaaaacaugca

SEQ ID NO: 1054918 - RNA, 19 nt, Artificial Sequence
  Description of Artificial Sequence: Synthetic oligonucleotide
cuguguagguauguaauga

SEQ ID NO: 1054919 - RNA, 19 nt, Artificial Sequence
  Description of Artificial Sequence: Synthetic oligonucleotide
guagcauauggggaggaca

SEQ ID NO: 1054920 - RNA, 19 nt, Artificial Sequence
  Description of Artificial Sequence: Synthetic oligonucleotide
gucuauuuaauuugauaau

SEQ ID NO: 1054921 - RNA, 19 nt, Artificial Sequence
  Description of Artificial Sequence: Synthetic oligonucleotide
cauaccugacguugucaug

SEQ ID NO: 1054922 - RNA, 19 nt, Artificial Sequence
  Description of Artificial Sequence: Synthetic oligonucleotide
aaugccacgggcagaggaa

SEQ ID NO: 1054923 - RNA, 19 nt, Artificial Sequence
  Description of Artificial Sequence: Synthetic oligonucleotide
aagugaugcaccagacuau

SEQ ID NO: 1054924 - RNA, 19 nt, Artificial Sequence
  Description of Artificial Sequence: Synthetic oligonucleotide
aaaaugccacgggcagagg

SEQ ID NO: 1054925 - RNA, 19 nt, Artificial Sequence
  Description of Artificial Sequence: Synthetic oligonucleotide
uuacgacugucauuucuuu

SEQ ID NO: 1054926 - RNA, 19 nt, Artificial Sequence
  Description of Artificial Sequence: Synthetic oligonucleotide
uaagcccuacggguggaag

SEQ ID NO: 1054927 - RNA, 19 nt, Artificial Sequence
  Description of Artificial Sequence: Synthetic oligonucleotide
acucauggaacgcucucuu

SEQ ID NO: 1054928 - RNA, 19 nt, Artificial Sequence
  Description of Artificial Sequence: Synthetic oligonucleotide
ucgguguauuccauuucau

SEQ ID NO: 1054929 - RNA, 19 nt, Artificial Sequence
  Description of Artificial Sequence: Synthetic oligonucleotide
ggguuaaucaucugagaaa

SEQ ID NO: 1054930 - RNA, 19 nt, Artificial Sequence
  Description of Artificial Sequence: Synthetic oligonucleotide
uacgacugucauuucuuuu

SEQ ID NO: 1054931 - RNA, 19 nt, Artificial Sequence
  Description of Artificial Sequence: Synthetic oligonucleotide
gaaguggcggcagcugacc

SEQ ID NO: 1054932 - RNA, 19 nt, Artificial Sequence
  Description of Artificial Sequence: Synthetic oligonucleotide
uauuuggcacuaucugcuu

SEQ ID NO: 1054933 - RNA, 19 nt, Artificial Sequence
  Description of Artificial Sequence: Synthetic oligonucleotide
aacaacgggcuugcuauuu

SEQ ID NO: 1054934 - RNA, 19 nt, Artificial Sequence
  Description of Artificial Sequence: Synthetic oligonucleotide
agacgucuauuuaauuuga

SEQ ID NO: 1054935 - RNA, 19 nt, Artificial Sequence
  Description of Artificial Sequence: Synthetic oligonucleotide
cacgcaacacaggucugcg

SEQ ID NO: 1054936 - RNA, 19 nt, Artificial Sequence
  Description of Artificial Sequence: Synthetic oligonucleotide
uaaagggaguggacuggau

SEQ ID NO: 1054937 - RNA, 19 nt, Artificial Sequence
  Description of Artificial Sequence: Synthetic oligonucleotide
ugcaccagacuaugacuuc

SEQ ID NO: 1054938 - RNA, 19 nt, Artificial Sequence
  Description of Artificial Sequence: Synthetic oligonucleotide
acaaaccuacagccuauuu

SEQ ID NO: 1054939 - RNA, 19 nt, Artificial Sequence
  Description of Artificial Sequence: Synthetic oligonucleotide
cuuuacgacugucauuucu

SEQ ID NO: 1054940 - RNA, 19 nt, Artificial Sequence
  Description of Artificial Sequence: Synthetic oligonucleotide
gacuaauaccuucggugua

SEQ ID NO: 1054941 - RNA, 19 nt, Artificial Sequence
  Description of Artificial Sequence: Synthetic oligonucleotide
cuucgguguauuccauuuc

SEQ ID NO: 1054942 - RNA, 19 nt, Artificial Sequence
  Description of Artificial Sequence: Synthetic oligonucleotide
caacggaaucauuccugac

SEQ ID NO: 1054943 - RNA, 19 nt, Artificial Sequence
  Description of Artificial Sequence: Synthetic oligonucleotide
uugucaugaugaggauuag

SEQ ID NO: 1054944 - RNA, 19 nt, Artificial Sequence
  Description of Artificial Sequence: Synthetic oligonucleotide
cuuuauauuuccagguguu

SEQ ID NO: 1054945 - RNA, 19 nt, Artificial Sequence
  Description of Artificial Sequence: Synthetic oligonucleotide
gggaguggacuggauaagg

SEQ ID NO: 1054946 - RNA, 19 nt, Artificial Sequence
  Description of Artificial Sequence: Synthetic oligonucleotide
ggaaaugcugccccacuca

SEQ ID NO: 1054947 - RNA, 19 nt, Artificial Sequence
  Description of Artificial Sequence: Synthetic oligonucleotide
acaaaaugccacgggcaga

SEQ ID NO: 1054948 - RNA, 19 nt, Artificial Sequence
  Description of Artificial Sequence: Synthetic oligonucleotide
ugcagacgucuauuuaauu

SEQ ID NO: 1054949 - RNA, 19 nt, Artificial Sequence
  Description of Artificial Sequence: Synthetic oligonucleotide
cugcgauuuucauccagca

SEQ ID NO: 1054950 - RNA, 19 nt, Artificial Sequence
  Description of Artificial Sequence: Synthetic oligonucleotide
ugccauaccugacguuguc

SEQ ID NO: 1054951 - RNA, 19 nt, Artificial Sequence
  Description of Artificial Sequence: Synthetic oligonucleotide
cagguguugagacaauaua

SEQ ID NO: 1054952 - RNA, 19 nt, Artificial Sequence
  Description of Artificial Sequence: Synthetic oligonucleotide
guggcgauggugucacaac

SEQ ID NO: 1054953 - RNA, 19 nt, Artificial Sequence
  Description of Artificial Sequence: Synthetic oligonucleotide
cucauucuuuacgacuguc

SEQ ID NO: 1054954 - RNA, 19 nt, Artificial Sequence
  Description of Artificial Sequence: Synthetic oligonucleotide
acagaacaggccaugcaaa

SEQ ID NO: 1054955 - RNA, 19 nt, Artificial Sequence
  Description of Artificial Sequence: Synthetic oligonucleotide
acgggcagaggaaagacua

SEQ ID NO: 1054956 - RNA, 19 nt, Artificial Sequence
  Description of Artificial Sequence: Synthetic oligonucleotide
uggcacuaucugcuucugu

SEQ ID NO: 1054957 - RNA, 19 nt, Artificial Sequence
  Description of Artificial Sequence: Synthetic oligonucleotide
acaacauauugcacacaga

SEQ ID NO: 1054958 - RNA, 19 nt, Artificial Sequence
  Description of Artificial Sequence: Synthetic oligonucleotide
auggaguuugcaaauccuu

SEQ ID NO: 1054959 - RNA, 19 nt, Artificial Sequence
  Description of Artificial Sequence: Synthetic oligonucleotide
guuaaucaucugagaaaca

SEQ ID NO: 1054960 - RNA, 19 nt, Artificial Sequence
  Description of Artificial Sequence: Synthetic oligonucleotide
uggacuggauaaggucaag

SEQ ID NO: 1054961 - RNA, 19 nt, Artificial Sequence
  Description of Artificial Sequence: Synthetic oligonucleotide
ggauaaggucaagaucugc

SEQ ID NO: 1054962 - RNA, 19 nt, Artificial Sequence
  Description of Artificial Sequence: Synthetic oligonucleotide
agggaguggacuggauaag

SEQ ID NO: 1054963 - RNA, 19 nt, Artificial Sequence
  Description of Artificial Sequence: Synthetic oligonucleotide
gguccaggucagcacuugg

SEQ ID NO: 1054964 - RNA, 19 nt, Artificial Sequence
  Description of Artificial Sequence: Synthetic oligonucleotide
gguuuaaagggaguggacu

SEQ ID NO: 1054965 - RNA, 19 nt, Artificial Sequence
  Description of Artificial Sequence: Synthetic oligonucleotide
ucuuuacgacugucauuuc

SEQ ID NO: 1054966 - RNA, 19 nt, Artificial Sequence
  Description of Artificial Sequence: Synthetic oligonucleotide
agcgucgaaaccacagcca

SEQ ID NO: 1054967 - RNA, 19 nt, Artificial Sequence
  Description of Artificial Sequence: Synthetic oligonucleotide
gcaaaacuggcugaaugca

SEQ ID NO: 1054968 - RNA, 19 nt, Artificial Sequence
  Description of Artificial Sequence: Synthetic oligonucleotide
guacuucauauuaaauccu

SEQ ID NO: 1054969 - RNA, 19 nt, Artificial Sequence
  Description of Artificial Sequence: Synthetic oligonucleotide
ggauuagaaguggcggcag

SEQ ID NO: 1054970 - RNA, 19 nt, Artificial Sequence
  Description of Artificial Sequence: Synthetic oligonucleotide
ccagacuaugacuucaaaa

SEQ ID NO: 1054971 - RNA, 19 nt, Artificial Sequence
  Description of Artificial Sequence: Synthetic oligonucleotide
gcugguaagcccuacgggu

SEQ ID NO: 1054972 - RNA, 19 nt, Artificial Sequence
  Description of Artificial Sequence: Synthetic oligonucleotide
cugcaucuauguuugaaau

SEQ ID NO: 1054973 - RNA, 19 nt, Artificial Sequence
  Description of Artificial Sequence: Synthetic oligonucleotide
agaaguuaguuggguuggu

SEQ ID NO: 1054974 - RNA, 19 nt, Artificial Sequence
  Description of Artificial Sequence: Synthetic oligonucleotide
aggugccacugcaaaacug

SEQ ID NO: 1054975 - RNA, 19 nt, Artificial Sequence
  Description of Artificial Sequence: Synthetic oligonucleotide
gcaaaaggcgagaguguag

SEQ ID NO: 1054976 - RNA, 19 nt, Artificial Sequence
  Description of Artificial Sequence: Synthetic oligonucleotide
cuuagcgaagcugcaucca

SEQ ID NO: 1054977 - RNA, 19 nt, Artificial Sequence
  Description of Artificial Sequence: Synthetic oligonucleotide
cauucuggcgaacagcauu

SEQ ID NO: 1054978 - RNA, 19 nt, Artificial Sequence
  Description of Artificial Sequence: Synthetic oligonucleotide
acccguucucuguguaggu

SEQ ID NO: 1054979 - RNA, 19 nt, Artificial Sequence
  Description of Artificial Sequence: Synthetic oligonucleotide
uugcuccaaugcacaugug

SEQ ID NO: 1054980 - RNA, 19 nt, Artificial Sequence
  Description of Artificial Sequence: Synthetic oligonucleotide
cuccaaugcacaugugcua

SEQ ID NO: 1054981 - RNA, 19 nt, Artificial Sequence
  Description of Artificial Sequence: Synthetic oligonucleotide
acgcaacacaggucugcga

SEQ ID NO: 1054982 - RNA, 19 nt, Artificial Sequence
  Description of Artificial Sequence: Synthetic oligonucleotide
ucucucacucagggugagc

SEQ ID NO: 1054983 - RNA, 19 nt, Artificial Sequence
  Description of Artificial Sequence: Synthetic oligonucleotide
ggcggugcuacuuuuaauu

SEQ ID NO: 1054984 - RNA, 19 nt, Artificial Sequence
  Description of Artificial Sequence: Synthetic oligonucleotide
gugcuagauugagagccac

SEQ ID NO: 1054985 - RNA, 19 nt, Artificial Sequence
  Description of Artificial Sequence: Synthetic oligonucleotide
ccuuuauauuuccaggugu

SEQ ID NO: 1054986 - RNA, 19 nt, Artificial Sequence
  Description of Artificial Sequence: Synthetic oligonucleotide
cccuacggguggaagacug

SEQ ID NO: 1054987 - RNA, 19 nt, Artificial Sequence
  Description of Artificial Sequence: Synthetic oligonucleotide
uuccagguguugagacaau

SEQ ID NO: 1054988 - RNA, 19 nt, Artificial Sequence
  Description of Artificial Sequence: Synthetic oligonucleotide
ccuacagccuauuuacaaa

SEQ ID NO: 1054989 - RNA, 19 nt, Artificial Sequence
  Description of Artificial Sequence: Synthetic oligonucleotide
acccucauucgcugacuaa

SEQ ID NO: 1054990 - RNA, 19 nt, Artificial Sequence
  Description of Artificial Sequence: Synthetic oligonucleotide
agguagcauauggggagga

SEQ ID NO: 1054991 - RNA, 19 nt, Artificial Sequence
  Description of Artificial Sequence: Synthetic oligonucleotide
caggccaugcaaagacaga

SEQ ID NO: 1054992 - RNA, 19 nt, Artificial Sequence
  Description of Artificial Sequence: Synthetic oligonucleotide
ccuacggguggaagacugg

SEQ ID NO: 1054993 - RNA, 19 nt, Artificial Sequence
  Description of Artificial Sequence: Synthetic oligonucleotide
gagagggccgccgcccgcc

SEQ ID NO: 1054994 - RNA, 19 nt, Artificial Sequence
  Description of Artificial Sequence: Synthetic oligonucleotide
cccguggugguguuuucag

SEQ ID NO: 1054995 - RNA, 19 nt, Artificial Sequence
  Description of Artificial Sequence: Synthetic oligonucleotide
ggacuugcauuauuacacu

SEQ ID NO: 1054996 - RNA, 19 nt, Artificial Sequence
  Description of Artificial Sequence: Synthetic oligonucleotide
ccucuagcgucgaaaccac

SEQ ID NO: 1054997 - RNA, 19 nt, Artificial Sequence
  Description of Artificial Sequence: Synthetic oligonucleotide
caucugaugcuccuucaau

SEQ ID NO: 1054998 - RNA, 19 nt, Artificial Sequence
  Description of Artificial Sequence: Synthetic oligonucleotide
gauaaccugcugaaucauu

SEQ ID NO: 1054999 - RNA, 19 nt, Artificial Sequence
  Description of Artificial Sequence: Synthetic oligonucleotide
  modified_base (16)..(16): a, c, u, g, unknown or other
ggcgggcgcucgcagnggc

SEQ ID NO: 1055000 - RNA, 19 nt, Artificial Sequence
  Description of Artificial Sequence: Synthetic oligonucleotide
cagcugacccaccacgcaa

SEQ ID NO: 1055001 - RNA, 19 nt, Artificial Sequence
  Description of Artificial Sequence: Synthetic oligonucleotide
gcuccaaugcacaugugcu

SEQ ID NO: 1055002 - RNA, 19 nt, Artificial Sequence
  Description of Artificial Sequence: Synthetic oligonucleotide
cacucagggugagcacccg

SEQ ID NO: 1055003 - RNA, 19 nt, Artificial Sequence
  Description of Artificial Sequence: Synthetic oligonucleotide
gguagcauauggggaggac

SEQ ID NO: 1055004 - RNA, 19 nt, Artificial Sequence
  Description of Artificial Sequence: Synthetic oligonucleotide
ggucaagaucugcuggucu

SEQ ID NO: 1055005 - RNA, 19 nt, Artificial Sequence
  Description of Artificial Sequence: Synthetic oligonucleotide
cgacaaaaugccacgggca

SEQ ID NO: 1055006 - RNA, 19 nt, Artificial Sequence
  Description of Artificial Sequence: Synthetic oligonucleotide
acccguggugguguuuuca

SEQ ID NO: 1055007 - RNA, 19 nt, Artificial Sequence
  Description of Artificial Sequence: Synthetic oligonucleotide
gaaguuaguuggguugguu

SEQ ID NO: 1055008 - RNA, 19 nt, Artificial Sequence
  Description of Artificial Sequence: Synthetic oligonucleotide
augccacgggcagaggaaa

SEQ ID NO: 1055009 - RNA, 19 nt, Artificial Sequence
  Description of Artificial Sequence: Synthetic oligonucleotide
gugaugcaccagacuauga

SEQ ID NO: 1055010 - RNA, 19 nt, Artificial Sequence
  Description of Artificial Sequence: Synthetic oligonucleotide
gacgucuauuuaauuugau

SEQ ID NO: 1055011 - RNA, 19 nt, Artificial Sequence
  Description of Artificial Sequence: Synthetic oligonucleotide
acgauccucucugggacuu

SEQ ID NO: 1055012 - RNA, 19 nt, Artificial Sequence
  Description of Artificial Sequence: Synthetic oligonucleotide
acgucuuagcgaagcugca

SEQ ID NO: 1055013 - RNA, 19 nt, Artificial Sequence
  Description of Artificial Sequence: Synthetic oligonucleotide
ucucugggacuugcauuau

SEQ ID NO: 1055014 - RNA, 19 nt, Artificial Sequence
  Description of Artificial Sequence: Synthetic oligonucleotide
ccacgcaacacaggucugc

SEQ ID NO: 1055015 - RNA, 19 nt, Artificial Sequence
  Description of Artificial Sequence: Synthetic oligonucleotide
augaaacaacgggcuugcu

SEQ ID NO: 1055016 - RNA, 19 nt, Artificial Sequence
  Description of Artificial Sequence: Synthetic oligonucleotide
cuagauugagagccacuuu

SEQ ID NO: 1055017 - RNA, 19 nt, Artificial Sequence
  Description of Artificial Sequence: Synthetic oligonucleotide
gcuagauugagagccacuu

SEQ ID NO: 1055018 - RNA, 19 nt, Artificial Sequence
  Description of Artificial Sequence: Synthetic oligonucleotide
gcagcugacccaccacgca

SEQ ID NO: 1055019 - RNA, 19 nt, Artificial Sequence
  Description of Artificial Sequence: Synthetic oligonucleotide
uucuggcgaacagcauuuu

SEQ ID NO: 1055020 - RNA, 19 nt, Artificial Sequence
  Description of Artificial Sequence: Synthetic oligonucleotide
cgcugacuaauaccuucgg

SEQ ID NO: 1055021 - RNA, 19 nt, Artificial Sequence
  Description of Artificial Sequence: Synthetic oligonucleotide
aucugacgucuuagcgaag

SEQ ID NO: 1055022 - RNA, 19 nt, Artificial Sequence
  Description of Artificial Sequence: Synthetic oligonucleotide
acagacccgaggagccugu

SEQ ID NO: 1055023 - RNA, 19 nt, Artificial Sequence
  Description of Artificial Sequence: Synthetic oligonucleotide
caacacaggucugcgauuu

SEQ ID NO: 1055024 - RNA, 19 nt, Artificial Sequence
  Description of Artificial Sequence: Synthetic oligonucleotide
guggucucucacucagggu

SEQ ID NO: 1055025 - RNA, 19 nt, Artificial Sequence
  Description of Artificial Sequence: Synthetic oligonucleotide
cccgcuggagggucccugg

SEQ ID NO: 1055026 - RNA, 19 nt, Artificial Sequence
  Description of Artificial Sequence: Synthetic oligonucleotide
cacucauggaacgcucucu

SEQ ID NO: 1055027 - RNA, 19 nt, Artificial Sequence
  Description of Artificial Sequence: Synthetic oligonucleotide
ggaguggacuggauaaggu

SEQ ID NO: 1055028 - RNA, 19 nt, Artificial Sequence
  Description of Artificial Sequence: Synthetic oligonucleotide
cugacgucuuagcgaagcu

SEQ ID NO: 1055029 - RNA, 19 nt, Artificial Sequence
  Description of Artificial Sequence: Synthetic oligonucleotide
gccauaccugacguuguca

SEQ ID NO: 1055030 - RNA, 19 nt, Artificial Sequence
  Description of Artificial Sequence: Synthetic oligonucleotide
agccugccaacugcucgga

SEQ ID NO: 1055031 - RNA, 19 nt, Artificial Sequence
  Description of Artificial Sequence: Synthetic oligonucleotide
cgggcagaggaaagacuag

SEQ ID NO: 1055032 - RNA, 19 nt, Artificial Sequence
  Description of Artificial Sequence: Synthetic oligonucleotide
ggcugauuucugccaucuc

SEQ ID NO: 1055033 - RNA, 19 nt, Artificial Sequence
  Description of Artificial Sequence: Synthetic oligonucleotide
agguuaccucuagcgucga

SEQ ID NO: 1055034 - RNA, 19 nt, Artificial Sequence
  Description of Artificial Sequence: Synthetic oligonucleotide
cacccguggugguguuuuc

SEQ ID NO: 1055035 - RNA, 19 nt, Artificial Sequence
  Description of Artificial Sequence: Synthetic oligonucleotide
ggccaugcaaagacagaaa

SEQ ID NO: 1055036 - RNA, 19 nt, Artificial Sequence
  Description of Artificial Sequence: Synthetic oligonucleotide
ccucauucgcugacuaaua

SEQ ID NO: 1055037 - RNA, 19 nt, Artificial Sequence
  Description of Artificial Sequence: Synthetic oligonucleotide
ugguggcgauggugucaca

SEQ ID NO: 1055038 - RNA, 19 nt, Artificial Sequence
  Description of Artificial Sequence: Synthetic oligonucleotide
cucauggaacgcucucuuu

SEQ ID NO: 1055039 - RNA, 19 nt, Artificial Sequence
  Description of Artificial Sequence: Synthetic oligonucleotide
guaagcccuacggguggaa

SEQ ID NO: 1055040 - RNA, 19 nt, Artificial Sequence
  Description of Artificial Sequence: Synthetic oligonucleotide
ccgggacccucauucgcug

SEQ ID NO: 1055041 - RNA, 19 nt, Artificial Sequence
  Description of Artificial Sequence: Synthetic oligonucleotide
ccagguguugagacaauau

SEQ ID NO: 1055042 - RNA, 19 nt, Artificial Sequence
  Description of Artificial Sequence: Synthetic oligonucleotide
gguaagcccuacgggugga

SEQ ID NO: 1055043 - RNA, 19 nt, Artificial Sequence
  Description of Artificial Sequence: Synthetic oligonucleotide
gccaacuauuaagcagcca

SEQ ID NO: 1055044 - RNA, 19 nt, Artificial Sequence
  Description of Artificial Sequence: Synthetic oligonucleotide
cacagauaaccugcugaau

SEQ ID NO: 1055045 - RNA, 19 nt, Artificial Sequence
  Description of Artificial Sequence: Synthetic oligonucleotide
cuaauaccuucgguguauu

SEQ ID NO: 1055046 - RNA, 19 nt, Artificial Sequence
  Description of Artificial Sequence: Synthetic oligonucleotide
ccguucucuguguagguau

SEQ ID NO: 1055047 - RNA, 19 nt, Artificial Sequence
  Description of Artificial Sequence: Synthetic oligonucleotide
gguuaccucuagcgucgaa

SEQ ID NO: 1055048 - RNA, 19 nt, Artificial Sequence
  Description of Artificial Sequence: Synthetic oligonucleotide
ggggcgcucgggcgggcgc

SEQ ID NO: 1055049 - RNA, 19 nt, Artificial Sequence
  Description of Artificial Sequence: Synthetic oligonucleotide
gcaacacaggucugcgauu

SEQ ID NO: 1055050 - RNA, 19 nt, Artificial Sequence
  Description of Artificial Sequence: Synthetic oligonucleotide
ggugagcacccgugguggu

SEQ ID NO: 1055051 - RNA, 19 nt, Artificial Sequence
  Description of Artificial Sequence: Synthetic oligonucleotide
ggcuugcuauuuggcacua

SEQ ID NO: 1055052 - RNA, 19 nt, Artificial Sequence
  Description of Artificial Sequence: Synthetic oligonucleotide
  modified_base (11)..(11): a, c, u, g, unknown or other
gcgcucgcagnggccguug

SEQ ID NO: 1055053 - RNA, 19 nt, Artificial Sequence
  Description of Artificial Sequence: Synthetic oligonucleotide
  modified_base (6)..(6): a, c, u, g, unknown or other
cgcagnggccguuggccga

SEQ ID NO: 1055054 - RNA, 19 nt, Artificial Sequence
  Description of Artificial Sequence: Synthetic oligonucleotide
cccguucucuguguaggua

SEQ ID NO: 1055055 - RNA, 19 nt, Artificial Sequence
  Description of Artificial Sequence: Synthetic oligonucleotide
gagcacccguggugguguu

SEQ ID NO: 1055056 - RNA, 19 nt, Artificial Sequence
  Description of Artificial Sequence: Synthetic oligonucleotide
cguugucaugaugaggauu

SEQ ID NO: 1055057 - RNA, 19 nt, Artificial Sequence
  Description of Artificial Sequence: Synthetic oligonucleotide
cgagaguguaggugccacu

SEQ ID NO: 1055058 - RNA, 19 nt, Artificial Sequence
  Description of Artificial Sequence: Synthetic oligonucleotide
cgggacccucauucgcuga

SEQ ID NO: 1055059 - RNA, 19 nt, Artificial Sequence
  Description of Artificial Sequence: Synthetic oligonucleotide
gggccccgcuggagggucc

SEQ ID NO: 1055060 - RNA, 19 nt, Artificial Sequence
  Description of Artificial Sequence: Synthetic oligonucleotide
ccgcuggagggucccugga

SEQ ID NO: 1055061 - RNA, 19 nt, Artificial Sequence
  Description of Artificial Sequence: Synthetic oligonucleotide
gcuugcuauuuggcacuau

SEQ ID NO: 1055062 - RNA, 19 nt, Artificial Sequence
  Description of Artificial Sequence: Synthetic oligonucleotide
gcccuacggguggaagacu

SEQ ID NO: 1055063 - RNA, 19 nt, Artificial Sequence
  Description of Artificial Sequence: Synthetic oligonucleotide
cgucuuagcgaagcugcau

SEQ ID NO: 1055064 - RNA, 19 nt, Artificial Sequence
  Description of Artificial Sequence: Synthetic oligonucleotide
ggcgcucgggcgggcgcuc

SEQ ID NO: 1055065 - RNA, 19 nt, Artificial Sequence
  Description of Artificial Sequence: Synthetic oligonucleotide
cggggcgcucgggcgggcg

SEQ ID NO: 1055066 - RNA, 19 nt, Artificial Sequence
  Description of Artificial Sequence: Synthetic oligonucleotide
cggcuccggggcgcucggg

SEQ ID NO: 1055067 - RNA, 19 nt, Artificial Sequence
  Description of Artificial Sequence: Synthetic oligonucleotide
uguuugaacacgcugaugg

SEQ ID NO: 1055068 - RNA, 19 nt, Artificial Sequence
  Description of Artificial Sequence: Synthetic oligonucleotide
aauuuuauaaccccuccuc

SEQ ID NO: 1055069 - RNA, 19 nt, Artificial Sequence
  Description of Artificial Sequence: Synthetic oligonucleotide
acaaagauuccauagcgcc

SEQ ID NO: 1055070 - RNA, 19 nt, Artificial Sequence
  Description of Artificial Sequence: Synthetic oligonucleotide
gaaguuaugacccacuggc

SEQ ID NO: 1055071 - RNA, 19 nt, Artificial Sequence
  Description of Artificial Sequence: Synthetic oligonucleotide
uaguauuuaaccuugcuga

SEQ ID NO: 1055072 - RNA, 19 nt, Artificial Sequence
  Description of Artificial Sequence: Synthetic oligonucleotide
auaauuuuauaaccccucc

SEQ ID NO: 1055073 - RNA, 19 nt, Artificial Sequence
  Description of Artificial Sequence: Synthetic oligonucleotide
aaauuaucuagauuuggca

SEQ ID NO: 1055074 - RNA, 19 nt, Artificial Sequence
  Description of Artificial Sequence: Synthetic oligonucleotide
uuaucaauggugaugguga

SEQ ID NO: 1055075 - RNA, 19 nt, Artificial Sequence
  Description of Artificial Sequence: Synthetic oligonucleotide
auuaucuagauuuggcaac

SEQ ID NO: 1055076 - RNA, 19 nt, Artificial Sequence
  Description of Artificial Sequence: Synthetic oligonucleotide
ucuagauuuggcaacaaac

SEQ ID NO: 1055077 - RNA, 19 nt, Artificial Sequence
  Description of Artificial Sequence: Synthetic oligonucleotide
ucuguuauguccuuguccc

SEQ ID NO: 1055078 - RNA, 19 nt, Artificial Sequence
  Description of Artificial Sequence: Synthetic oligonucleotide
aacgagucaaugcagaaca

SEQ ID NO: 1055079 - RNA, 19 nt, Artificial Sequence
  Description of Artificial Sequence: Synthetic oligonucleotide
uauuuaaccuugcugaaga

SEQ ID NO: 1055080 - RNA, 19 nt, Artificial Sequence
  Description of Artificial Sequence: Synthetic oligonucleotide
aauuaucuagauuuggcaa

SEQ ID NO: 1055081 - RNA, 19 nt, Artificial Sequence
  Description of Artificial Sequence: Synthetic oligonucleotide
uguacaggcuccauguugg

SEQ ID NO: 1055082 - RNA, 19 nt, Artificial Sequence
  Description of Artificial Sequence: Synthetic oligonucleotide
uccaauuacaucuucuuca

SEQ ID NO: 1055083 - RNA, 19 nt, Artificial Sequence
  Description of Artificial Sequence: Synthetic oligonucleotide
gauguaauaacccaggagu

SEQ ID NO: 1055084 - RNA, 19 nt, Artificial Sequence
  Description of Artificial Sequence: Synthetic oligonucleotide
aaagauuccauagcgcccg

SEQ ID NO: 1055085 - RNA, 19 nt, Artificial Sequence
  Description of Artificial Sequence: Synthetic oligonucleotide
ucugucaucagaaaccacu

SEQ ID NO: 1055086 - RNA, 19 nt, Artificial Sequence
  Description of Artificial Sequence: Synthetic oligonucleotide
ucuguuauuggcuguacag

SEQ ID NO: 1055087 - RNA, 19 nt, Artificial Sequence
  Description of Artificial Sequence: Synthetic oligonucleotide
agauccacugaguaaggcc

SEQ ID NO: 1055088 - RNA, 19 nt, Artificial Sequence
  Description of Artificial Sequence: Synthetic oligonucleotide
uccuuuauaauuuccaaaa

SEQ ID NO: 1055089 - RNA, 19 nt, Artificial Sequence
  Description of Artificial Sequence: Synthetic oligonucleotide
agcuauaauuuuauaaccc

SEQ ID NO: 1055090 - RNA, 19 nt, Artificial Sequence
  Description of Artificial Sequence: Synthetic oligonucleotide
uauaauuuuauaaccccuc

SEQ ID NO: 1055091 - RNA, 19 nt, Artificial Sequence
  Description of Artificial Sequence: Synthetic oligonucleotide
agucauauggggccgaggg

SEQ ID NO: 1055092 - RNA, 19 nt, Artificial Sequence
  Description of Artificial Sequence: Synthetic oligonucleotide
uguuauuggcuguacaggc

SEQ ID NO: 1055093 - RNA, 19 nt, Artificial Sequence
  Description of Artificial Sequence: Synthetic oligonucleotide
ucauucuuuagccaagaga

SEQ ID NO: 1055094 - RNA, 19 nt, Artificial Sequence
  Description of Artificial Sequence: Synthetic oligonucleotide
agauuuggcaacaaacagc

SEQ ID NO: 1055095 - RNA, 19 nt, Artificial Sequence
  Description of Artificial Sequence: Synthetic oligonucleotide
uggagaacgagucaaugca

SEQ ID NO: 1055096 - RNA, 19 nt, Artificial Sequence
  Description of Artificial Sequence: Synthetic oligonucleotide
guaguauuuaaccuugcug

SEQ ID NO: 1055097 - RNA, 19 nt, Artificial Sequence
  Description of Artificial Sequence: Synthetic oligonucleotide
agauguaauaacccaggag

SEQ ID NO: 1055098 - RNA, 19 nt, Artificial Sequence
  Description of Artificial Sequence: Synthetic oligonucleotide
uuuauaaccccuccucaca

SEQ ID NO: 1055099 - RNA, 19 nt, Artificial Sequence
  Description of Artificial Sequence: Synthetic oligonucleotide
aagcgagucuccuucuugg

SEQ ID NO: 1055100 - RNA, 19 nt, Artificial Sequence
  Description of Artificial Sequence: Synthetic oligonucleotide
uuaucagaguccuuggggu

SEQ ID NO: 1055101 - RNA, 19 nt, Artificial Sequence
  Description of Artificial Sequence: Synthetic oligonucleotide
  modified_base (15)..(15): a, c, u, g, unknown or other
aacggcaugcccggnaucc

SEQ ID NO: 1055102 - RNA, 19 nt, Artificial Sequence
  Description of Artificial Sequence: Synthetic oligonucleotide
ucgcugaccgaccugaugc

SEQ ID NO: 1055103 - RNA, 19 nt, Artificial Sequence
  Description of Artificial Sequence: Synthetic oligonucleotide
uaauuuuauaaccccuccu

SEQ ID NO: 1055104 - RNA, 19 nt, Artificial Sequence
  Description of Artificial Sequence: Synthetic oligonucleotide
augugcgaaguuaugaccc

SEQ ID NO: 1055105 - RNA, 19 nt, Artificial Sequence
  Description of Artificial Sequence: Synthetic oligonucleotide
guuaugacccacuggcugg

SEQ ID NO: 1055106 - RNA, 19 nt, Artificial Sequence
  Description of Artificial Sequence: Synthetic oligonucleotide
aggauaggagugcaaaguc

SEQ ID NO: 1055107 - RNA, 19 nt, Artificial Sequence
  Description of Artificial Sequence: Synthetic oligonucleotide
aguuaugacccacuggcug

SEQ ID NO: 1055108 - RNA, 19 nt, Artificial Sequence
  Description of Artificial Sequence: Synthetic oligonucleotide
uuuuauaaccccuccucac

SEQ ID NO: 1055109 - RNA, 19 nt, Artificial Sequence
  Description of Artificial Sequence: Synthetic oligonucleotide
gaaauguccagcuguguac

SEQ ID NO: 1055110 - RNA, 19 nt, Artificial Sequence
  Description of Artificial Sequence: Synthetic oligonucleotide
aacuugguguccaggaugg

SEQ ID NO: 1055111 - RNA, 19 nt, Artificial Sequence
  Description of Artificial Sequence: Synthetic oligonucleotide
uguguacugagauccacug

SEQ ID NO: 1055112 - RNA, 19 nt, Artificial Sequence
  Description of Artificial Sequence: Synthetic oligonucleotide
auuuuauaaccccuccuca

SEQ ID NO: 1055113 - RNA, 19 nt, Artificial Sequence
  Description of Artificial Sequence: Synthetic oligonucleotide
aagugucuguuauuggcug

SEQ ID NO: 1055114 - RNA, 19 nt, Artificial Sequence
  Description of Artificial Sequence: Synthetic oligonucleotide
guagauguaauaacccagg

SEQ ID NO: 1055115 - RNA, 19 nt, Artificial Sequence
  Description of Artificial Sequence: Synthetic oligonucleotide
agacagaucugcugagagc

SEQ ID NO: 1055116 - RNA, 19 nt, Artificial Sequence
  Description of Artificial Sequence: Synthetic oligonucleotide
uuguggaaccaaauggucu

SEQ ID NO: 1055117 - RNA, 19 nt, Artificial Sequence
  Description of Artificial Sequence: Synthetic oligonucleotide
aaagcgagucuccuucuug

SEQ ID NO: 1055118 - RNA, 19 nt, Artificial Sequence
  Description of Artificial Sequence: Synthetic oligonucleotide
ucaucaacggcaugcccgg

SEQ ID NO: 1055119 - RNA, 19 nt, Artificial Sequence
  Description of Artificial Sequence: Synthetic oligonucleotide
gcuauaauuuuauaacccc

SEQ ID NO: 1055120 - RNA, 19 nt, Artificial Sequence
  Description of Artificial Sequence: Synthetic oligonucleotide
cugagauccacugaguaag

SEQ ID NO: 1055121 - RNA, 19 nt, Artificial Sequence
  Description of Artificial Sequence: Synthetic oligonucleotide
uuauuggcuguacaggcuc

SEQ ID NO: 1055122 - RNA, 19 nt, Artificial Sequence
  Description of Artificial Sequence: Synthetic oligonucleotide
ugcagaacagcccggcucc

SEQ ID NO: 1055123 - RNA, 19 nt, Artificial Sequence
  Description of Artificial Sequence: Synthetic oligonucleotide
caugugcgaaguuaugacc

SEQ ID NO: 1055124 - RNA, 19 nt, Artificial Sequence
  Description of Artificial Sequence: Synthetic oligonucleotide
uucgccaacgccagccucg

SEQ ID NO: 1055125 - RNA, 19 nt, Artificial Sequence
  Description of Artificial Sequence: Synthetic oligonucleotide
aaagcuugcccagacagau

SEQ ID NO: 1055126 - RNA, 19 nt, Artificial Sequence
  Description of Artificial Sequence: Synthetic oligonucleotide
cuuaucaauggugauggug

SEQ ID NO: 1055127 - RNA, 19 nt, Artificial Sequence
  Description of Artificial Sequence: Synthetic oligonucleotide
uuugaacacgcugauggug

SEQ ID NO: 1055128 - RNA, 19 nt, Artificial Sequence
  Description of Artificial Sequence: Synthetic oligonucleotide
uaggguggaucucaggcug

SEQ ID NO: 1055129 - RNA, 19 nt, Artificial Sequence
  Description of Artificial Sequence: Synthetic oligonucleotide
ucgauucuucucaaugaug

SEQ ID NO: 1055130 - RNA, 19 nt, Artificial Sequence
  Description of Artificial Sequence: Synthetic oligonucleotide
ucaaugcagaacagcccgg

SEQ ID NO: 1055131 - RNA, 19 nt, Artificial Sequence
  Description of Artificial Sequence: Synthetic oligonucleotide
cucacaucuugcuuucagg

SEQ ID NO: 1055132 - RNA, 19 nt, Artificial Sequence
  Description of Artificial Sequence: Synthetic oligonucleotide
uccauguuggaagaagccc

SEQ ID NO: 1055133 - RNA, 19 nt, Artificial Sequence
  Description of Artificial Sequence: Synthetic oligonucleotide
aacacgcugauggugaccu

SEQ ID NO: 1055134 - RNA, 19 nt, Artificial Sequence
  Description of Artificial Sequence: Synthetic oligonucleotide
acguuugucuuuguggaac

SEQ ID NO: 1055135 - RNA, 19 nt, Artificial Sequence
  Description of Artificial Sequence: Synthetic oligonucleotide
uuaucuagauuuggcaaca

SEQ ID NO: 1055136 - RNA, 19 nt, Artificial Sequence
  Description of Artificial Sequence: Synthetic oligonucleotide
gauuuggcaacaaacagcu

SEQ ID NO: 1055137 - RNA, 19 nt, Artificial Sequence
  Description of Artificial Sequence: Synthetic oligonucleotide
ucuagggugguaccugccc

SEQ ID NO: 1055138 - RNA, 19 nt, Artificial Sequence
  Description of Artificial Sequence: Synthetic oligonucleotide
auaaccccuccucacaucu

SEQ ID NO: 1055139 - RNA, 19 nt, Artificial Sequence
  Description of Artificial Sequence: Synthetic oligonucleotide
ugagauccacugaguaagg

SEQ ID NO: 1055140 - RNA, 19 nt, Artificial Sequence
  Description of Artificial Sequence: Synthetic oligonucleotide
ugguaucggucaaggaagg

SEQ ID NO: 1055141 - RNA, 19 nt, Artificial Sequence
  Description of Artificial Sequence: Synthetic oligonucleotide
acaggauaggagugcaaag

SEQ ID NO: 1055142 - RNA, 19 nt, Artificial Sequence
  Description of Artificial Sequence: Synthetic oligonucleotide
cagugcuuaccccacaccc

SEQ ID NO: 1055143 - RNA, 19 nt, Artificial Sequence
  Description of Artificial Sequence: Synthetic oligonucleotide
gugguaucggucaaggaag

SEQ ID NO: 1055144 - RNA, 19 nt, Artificial Sequence
  Description of Artificial Sequence: Synthetic oligonucleotide
cagcuguguacugagaucc

SEQ ID NO: 1055145 - RNA, 19 nt, Artificial Sequence
  Description of Artificial Sequence: Synthetic oligonucleotide
gauuccauagcgcccgcug

SEQ ID NO: 1055146 - RNA, 19 nt, Artificial Sequence
  Description of Artificial Sequence: Synthetic oligonucleotide
gaagguagggaaaugucca

SEQ ID NO: 1055147 - RNA, 19 nt, Artificial Sequence
  Description of Artificial Sequence: Synthetic oligonucleotide
ugagccauacuuguucuug

SEQ ID NO: 1055148 - RNA, 19 nt, Artificial Sequence
  Description of Artificial Sequence: Synthetic oligonucleotide
uuauaaccccuccucacau

SEQ ID NO: 1055149 - RNA, 19 nt, Artificial Sequence
  Description of Artificial Sequence: Synthetic oligonucleotide
cuguuauuggcuguacagg

SEQ ID NO: 1055150 - RNA, 19 nt, Artificial Sequence
  Description of Artificial Sequence: Synthetic oligonucleotide
gacaaagauuccauagcgc

SEQ ID NO: 1055151 - RNA, 19 nt, Artificial Sequence
  Description of Artificial Sequence: Synthetic oligonucleotide
uguggaaccaaauggucuu

SEQ ID NO: 1055152 - RNA, 19 nt, Artificial Sequence
  Description of Artificial Sequence: Synthetic oligonucleotide
uggacauuccaauuacauc

SEQ ID NO: 1055153 - RNA, 19 nt, Artificial Sequence
  Description of Artificial Sequence: Synthetic oligonucleotide
cauacugcccgcugggagc

SEQ ID NO: 1055154 - RNA, 19 nt, Artificial Sequence
  Description of Artificial Sequence: Synthetic oligonucleotide
guaucggucaaggaaggag

SEQ ID NO: 1055155 - RNA, 19 nt, Artificial Sequence
  Description of Artificial Sequence: Synthetic oligonucleotide
ucuuuagccaagagauuuc

SEQ ID NO: 1055156 - RNA, 19 nt, Artificial Sequence
  Description of Artificial Sequence: Synthetic oligonucleotide
gaccuuaucaauggugaug

SEQ ID NO: 1055157 - RNA, 19 nt, Artificial Sequence
  Description of Artificial Sequence: Synthetic oligonucleotide
uuccgugccacccuccaca

SEQ ID NO: 1055158 - RNA, 19 nt, Artificial Sequence
  Description of Artificial Sequence: Synthetic oligonucleotide
cuccauguuggaagaagcc

SEQ ID NO: 1055159 - RNA, 19 nt, Artificial Sequence
  Description of Artificial Sequence: Synthetic oligonucleotide
cagacagaucugcugagag

SEQ ID NO: 1055160 - RNA, 19 nt, Artificial Sequence
  Description of Artificial Sequence: Synthetic oligonucleotide
ucugaaagcuuggacuuga

SEQ ID NO: 1055161 - RNA, 19 nt, Artificial Sequence
  Description of Artificial Sequence: Synthetic oligonucleotide
ugaugucccugcuucccgg

SEQ ID NO: 1055162 - RNA, 19 nt, Artificial Sequence
  Description of Artificial Sequence: Synthetic oligonucleotide
  modified_base (8)..(8): a, c, u, g, unknown or other
ugcccggnaucccagguca

SEQ ID NO: 1055163 - RNA, 19 nt, Artificial Sequence
  Description of Artificial Sequence: Synthetic oligonucleotide
guauuuaaccuugcugaag

SEQ ID NO: 1055164 - RNA, 19 nt, Artificial Sequence
  Description of Artificial Sequence: Synthetic oligonucleotide
gauggugaccucaguaccc

SEQ ID NO: 1055165 - RNA, 19 nt, Artificial Sequence
  Description of Artificial Sequence: Synthetic oligonucleotide
aaccgugaacuuggugucc

SEQ ID NO: 1055166 - RNA, 19 nt, Artificial Sequence
  Description of Artificial Sequence: Synthetic oligonucleotide
gggaguagauguaauaacc

SEQ ID NO: 1055167 - RNA, 19 nt, Artificial Sequence
  Description of Artificial Sequence: Synthetic oligonucleotide
gauugugucgucuuccccu

SEQ ID NO: 1055168 - RNA, 19 nt, Artificial Sequence
  Description of Artificial Sequence: Synthetic oligonucleotide
cuaaggccagugcuuaccc

SEQ ID NO: 1055169 - RNA, 19 nt, Artificial Sequence
  Description of Artificial Sequence: Synthetic oligonucleotide
cugcgggucauacugcccg

SEQ ID NO: 1055170 - RNA, 19 nt, Artificial Sequence
  Description of Artificial Sequence: Synthetic oligonucleotide
augguaguauuuaaccuug

SEQ ID NO: 1055171 - RNA, 19 nt, Artificial Sequence
  Description of Artificial Sequence: Synthetic oligonucleotide
ugcuugacucugaugggcu

SEQ ID NO: 1055172 - RNA, 19 nt, Artificial Sequence
  Description of Artificial Sequence: Synthetic oligonucleotide
ugcggagagagcaccaauc

SEQ ID NO: 1055173 - RNA, 19 nt, Artificial Sequence
  Description of Artificial Sequence: Synthetic oligonucleotide
gacagaucugcugagagcu

SEQ ID NO: 1055174 - RNA, 19 nt, Artificial Sequence
  Description of Artificial Sequence: Synthetic oligonucleotide
cuguacaggcuccauguug

SEQ ID NO: 1055175 - RNA, 19 nt, Artificial Sequence
  Description of Artificial Sequence: Synthetic oligonucleotide
ggaguagauguaauaaccc

SEQ ID NO: 1055176 - RNA, 19 nt, Artificial Sequence
  Description of Artificial Sequence: Synthetic oligonucleotide
guuguucaccguuugccac

SEQ ID NO: 1055177 - RNA, 19 nt, Artificial Sequence
  Description of Artificial Sequence: Synthetic oligonucleotide
uccccuggaucuucagugg

SEQ ID NO: 1055178 - RNA, 19 nt, Artificial Sequence
  Description of Artificial Sequence: Synthetic oligonucleotide
aaacagcuauaauuuuaua

SEQ ID NO: 1055179 - RNA, 19 nt, Artificial Sequence
  Description of Artificial Sequence: Synthetic oligonucleotide
ugcgaaguuaugacccacu

SEQ ID NO: 1055180 - RNA, 19 nt, Artificial Sequence
  Description of Artificial Sequence: Synthetic oligonucleotide
uaucaauggugauggugac

SEQ ID NO: 1055181 - RNA, 19 nt, Artificial Sequence
  Description of Artificial Sequence: Synthetic oligonucleotide
ugugcgaaguuaugaccca

SEQ ID NO: 1055182 - RNA, 19 nt, Artificial Sequence
  Description of Artificial Sequence: Synthetic oligonucleotide
ggaaccgugaacuuggugu

SEQ ID NO: 1055183 - RNA, 19 nt, Artificial Sequence
  Description of Artificial Sequence: Synthetic oligonucleotide
uccuccccguguuugaaca

SEQ ID NO: 1055184 - RNA, 19 nt, Artificial Sequence
  Description of Artificial Sequence: Synthetic oligonucleotide
ggaagguagggaaaugucc

SEQ ID NO: 1055185 - RNA, 19 nt, Artificial Sequence
  Description of Artificial Sequence: Synthetic oligonucleotide
ucaucuagggugguaccug

SEQ ID NO: 1055186 - RNA, 19 nt, Artificial Sequence
  Description of Artificial Sequence: Synthetic oligonucleotide
ugguaguauuuaaccuugc

SEQ ID NO: 1055187 - RNA, 19 nt, Artificial Sequence
  Description of Artificial Sequence: Synthetic oligonucleotide
auaacccaggaguuccgug

SEQ ID NO: 1055188 - RNA, 19 nt, Artificial Sequence
  Description of Artificial Sequence: Synthetic oligonucleotide
uuguucaccguuugccacu

SEQ ID NO: 1055189 - RNA, 19 nt, Artificial Sequence
  Description of Artificial Sequence: Synthetic oligonucleotide
aauaacccaggaguuccgu

SEQ ID NO: 1055190 - RNA, 19 nt, Artificial Sequence
  Description of Artificial Sequence: Synthetic oligonucleotide
cauguuggaagaagcccug

SEQ ID NO: 1055191 - RNA, 19 nt, Artificial Sequence
  Description of Artificial Sequence: Synthetic oligonucleotide
acagaggucugcgugucuc

SEQ ID NO: 1055192 - RNA, 19 nt, Artificial Sequence
  Description of Artificial Sequence: Synthetic oligonucleotide
cuuuguggaaccaaauggu

SEQ ID NO: 1055193 - RNA, 19 nt, Artificial Sequence
  Description of Artificial Sequence: Synthetic oligonucleotide
gguaccugcccucacccgg

SEQ ID NO: 1055194 - RNA, 19 nt, Artificial Sequence
  Description of Artificial Sequence: Synthetic oligonucleotide
gaacgagucaaugcagaac

SEQ ID NO: 1055195 - RNA, 19 nt, Artificial Sequence
  Description of Artificial Sequence: Synthetic oligonucleotide
uugguguauuggauucagc

SEQ ID NO: 1055196 - RNA, 19 nt, Artificial Sequence
  Description of Artificial Sequence: Synthetic oligonucleotide
cugauuucuaaggccagug

SEQ ID NO: 1055197 - RNA, 19 nt, Artificial Sequence
  Description of Artificial Sequence: Synthetic oligonucleotide
uaaggccagccaaaguguc

SEQ ID NO: 1055198 - RNA, 19 nt, Artificial Sequence
  Description of Artificial Sequence: Synthetic oligonucleotide
guacccuucaccuccaugu

SEQ ID NO: 1055199 - RNA, 19 nt, Artificial Sequence
  Description of Artificial Sequence: Synthetic oligonucleotide
gucaucagaaaccacugcu

SEQ ID NO: 1055200 - RNA, 19 nt, Artificial Sequence
  Description of Artificial Sequence: Synthetic oligonucleotide
agaacgagucaaugcagaa

SEQ ID NO: 1055201 - RNA, 19 nt, Artificial Sequence
  Description of Artificial Sequence: Synthetic oligonucleotide
caucuagggugguaccugc

SEQ ID NO: 1055202 - RNA, 19 nt, Artificial Sequence
  Description of Artificial Sequence: Synthetic oligonucleotide
ugacccuggacauuccaau

SEQ ID NO: 1055203 - RNA, 19 nt, Artificial Sequence
  Description of Artificial Sequence: Synthetic oligonucleotide
ugaguccuguaccccagcu

SEQ ID NO: 1055204 - RNA, 19 nt, Artificial Sequence
  Description of Artificial Sequence: Synthetic oligonucleotide
uauuggauucagcucuguu

SEQ ID NO: 1055205 - RNA, 19 nt, Artificial Sequence
  Description of Artificial Sequence: Synthetic oligonucleotide
gucauucuuuagccaagag

SEQ ID NO: 1055206 - RNA, 19 nt, Artificial Sequence
  Description of Artificial Sequence: Synthetic oligonucleotide
aagucauauggggccgagg

SEQ ID NO: 1055207 - RNA, 19 nt, Artificial Sequence
  Description of Artificial Sequence: Synthetic oligonucleotide
uucaggggcggggaauugg

SEQ ID NO: 1055208 - RNA, 19 nt, Artificial Sequence
  Description of Artificial Sequence: Synthetic oligonucleotide
ucaggggcggggaauugga

SEQ ID NO: 1055209 - RNA, 19 nt, Artificial Sequence
  Description of Artificial Sequence: Synthetic oligonucleotide
ugaaagcgagucuccuucu

SEQ ID NO: 1055210 - RNA, 19 nt, Artificial Sequence
  Description of Artificial Sequence: Synthetic oligonucleotide
cuccaugugguaucgguca

SEQ ID NO: 1055211 - RNA, 19 nt, Artificial Sequence
  Description of Artificial Sequence: Synthetic oligonucleotide
  modified_base (17)..(17): a, c, u, g, unknown or other
ucaacggcaugcccggnau

SEQ ID NO: 1055212 - RNA, 19 nt, Artificial Sequence
  Description of Artificial Sequence: Synthetic oligonucleotide
ggggcggggaauuggaagg

SEQ ID NO: 1055213 - RNA, 19 nt, Artificial Sequence
  Description of Artificial Sequence: Synthetic oligonucleotide
aucggucaaggaaggagac

SEQ ID NO: 1055214 - RNA, 19 nt, Artificial Sequence
  Description of Artificial Sequence: Synthetic oligonucleotide
uacccuucaccuccaugug

SEQ ID NO: 1055215 - RNA, 19 nt, Artificial Sequence
  Description of Artificial Sequence: Synthetic oligonucleotide
aguacccuucaccuccaug

SEQ ID NO: 1055216 - RNA, 19 nt, Artificial Sequence
  Description of Artificial Sequence: Synthetic oligonucleotide
cuccuuuauaauuuccaaa

SEQ ID NO: 1055217 - RNA, 19 nt, Artificial Sequence
  Description of Artificial Sequence: Synthetic oligonucleotide
gugcuuaccccacacccug

SEQ ID NO: 1055218 - RNA, 19 nt, Artificial Sequence
  Description of Artificial Sequence: Synthetic oligonucleotide
ugcuuaccccacacccugg

SEQ ID NO: 1055219 - RNA, 19 nt, Artificial Sequence
  Description of Artificial Sequence: Synthetic oligonucleotide
uggaaccgugaacuuggug

SEQ ID NO: 1055220 - RNA, 19 nt, Artificial Sequence
  Description of Artificial Sequence: Synthetic oligonucleotide
guagggaaauguccagcug

SEQ ID NO: 1055221 - RNA, 19 nt, Artificial Sequence
  Description of Artificial Sequence: Synthetic oligonucleotide
gagaacgagucaaugcaga

SEQ ID NO: 1055222 - RNA, 19 nt, Artificial Sequence
  Description of Artificial Sequence: Synthetic oligonucleotide
gugguaccugcccucaccc

SEQ ID NO: 1055223 - RNA, 19 nt, Artificial Sequence
  Description of Artificial Sequence: Synthetic oligonucleotide
auccccuggucuucuuugg

SEQ ID NO: 1055224 - RNA, 19 nt, Artificial Sequence
  Description of Artificial Sequence: Synthetic oligonucleotide
cagaucugcugagagcugc

SEQ ID NO: 1055225 - RNA, 19 nt, Artificial Sequence
  Description of Artificial Sequence: Synthetic oligonucleotide
gucaccacucuccagacgu

SEQ ID NO: 1055226 - RNA, 19 nt, Artificial Sequence
  Description of Artificial Sequence: Synthetic oligonucleotide
auguaggguggaucucagg

SEQ ID NO: 1055227 - RNA, 19 nt, Artificial Sequence
  Description of Artificial Sequence: Synthetic oligonucleotide
accgaccugaugcaaaauu

SEQ ID NO: 1055228 - RNA, 19 nt, Artificial Sequence
  Description of Artificial Sequence: Synthetic oligonucleotide
ugaccgaccugaugcaaaa

SEQ ID NO: 1055229 - RNA, 19 nt, Artificial Sequence
  Description of Artificial Sequence: Synthetic oligonucleotide
agaucugcugagagcugcc

SEQ ID NO: 1055230 - RNA, 19 nt, Artificial Sequence
  Description of Artificial Sequence: Synthetic oligonucleotide
gagauccacugaguaaggc

SEQ ID NO: 1055231 - RNA, 19 nt, Artificial Sequence
  Description of Artificial Sequence: Synthetic oligonucleotide
aaguuaugacccacuggcu

SEQ ID NO: 1055232 - RNA, 19 nt, Artificial Sequence
  Description of Artificial Sequence: Synthetic oligonucleotide
ccggcaguuaucuccaggg

SEQ ID NO: 1055233 - RNA, 19 nt, Artificial Sequence
  Description of Artificial Sequence: Synthetic oligonucleotide
ggucauacugcccgcuggg

SEQ ID NO: 1055234 - RNA, 19 nt, Artificial Sequence
  Description of Artificial Sequence: Synthetic oligonucleotide
caagagauuucaggggaug

SEQ ID NO: 1055235 - RNA, 19 nt, Artificial Sequence
  Description of Artificial Sequence: Synthetic oligonucleotide
  modified_base (9)..(9): a, c, u, g, unknown or other
augcccggnaucccagguc

SEQ ID NO: 1055236 - RNA, 19 nt, Artificial Sequence
  Description of Artificial Sequence: Synthetic oligonucleotide
gauaggagugcaaagucau

SEQ ID NO: 1055237 - RNA, 19 nt, Artificial Sequence
  Description of Artificial Sequence: Synthetic oligonucleotide
uauaaccccuccucacauc

SEQ ID NO: 1055238 - RNA, 19 nt, Artificial Sequence
  Description of Artificial Sequence: Synthetic oligonucleotide
uuccauagcgcccgcuguc

SEQ ID NO: 1055239 - RNA, 19 nt, Artificial Sequence
  Description of Artificial Sequence: Synthetic oligonucleotide
  modified_base (2)..(2): a, c, u, g, unknown or other
gnaucccaggucacccagg

SEQ ID NO: 1055240 - RNA, 19 nt, Artificial Sequence
  Description of Artificial Sequence: Synthetic oligonucleotide
ugguguuggucaccuuucu

SEQ ID NO: 1055241 - RNA, 19 nt, Artificial Sequence
  Description of Artificial Sequence: Synthetic oligonucleotide
uggaaccaaauggucuuca

SEQ ID NO: 1055242 - RNA, 19 nt, Artificial Sequence
  Description of Artificial Sequence: Synthetic oligonucleotide
ugguaccugcccucacccg

SEQ ID NO: 1055243 - RNA, 19 nt, Artificial Sequence
  Description of Artificial Sequence: Synthetic oligonucleotide
caugguaguauuuaaccuu

SEQ ID NO: 1055244 - RNA, 19 nt, Artificial Sequence
  Description of Artificial Sequence: Synthetic oligonucleotide
  modified_base (3)..(3): a, c, u, g, unknown or other
ggnaucccaggucacccag

SEQ ID NO: 1055245 - RNA, 19 nt, Artificial Sequence
  Description of Artificial Sequence: Synthetic oligonucleotide
acacccuggaguccuguga

SEQ ID NO: 1055246 - RNA, 19 nt, Artificial Sequence
  Description of Artificial Sequence: Synthetic oligonucleotide
ugaacacgcugauggugac

SEQ ID NO: 1055247 - RNA, 19 nt, Artificial Sequence
  Description of Artificial Sequence: Synthetic oligonucleotide
gcaugugcgaaguuaugac

SEQ ID NO: 1055248 - RNA, 19 nt, Artificial Sequence
  Description of Artificial Sequence: Synthetic oligonucleotide
ucuugcuuucaggggcggg

SEQ ID NO: 1055249 - RNA, 19 nt, Artificial Sequence
  Description of Artificial Sequence: Synthetic oligonucleotide
uggcaugugcgaaguuaug

SEQ ID NO: 1055250 - RNA, 19 nt, Artificial Sequence
  Description of Artificial Sequence: Synthetic oligonucleotide
gccaagagauuucagggga

SEQ ID NO: 1055251 - RNA, 19 nt, Artificial Sequence
  Description of Artificial Sequence: Synthetic oligonucleotide
agaacagcccggcucccgu

SEQ ID NO: 1055252 - RNA, 19 nt, Artificial Sequence
  Description of Artificial Sequence: Synthetic oligonucleotide
cugaaagcuuggacuugag

SEQ ID NO: 1055253 - RNA, 19 nt, Artificial Sequence
  Description of Artificial Sequence: Synthetic oligonucleotide
uguagauccccuggucuuc

SEQ ID NO: 1055254 - RNA, 19 nt, Artificial Sequence
  Description of Artificial Sequence: Synthetic oligonucleotide
  modified_base (18)..(18): a, c, u, g, unknown or other
aucaacggcaugcccggna

SEQ ID NO: 1055255 - RNA, 19 nt, Artificial Sequence
  Description of Artificial Sequence: Synthetic oligonucleotide
uccgugccacccuccacag

SEQ ID NO: 1055256 - RNA, 19 nt, Artificial Sequence
  Description of Artificial Sequence: Synthetic oligonucleotide
ggagaacgagucaaugcag

SEQ ID NO: 1055257 - RNA, 19 nt, Artificial Sequence
  Description of Artificial Sequence: Synthetic oligonucleotide
aguuccgugccacccucca

SEQ ID NO: 1055258 - RNA, 19 nt, Artificial Sequence
  Description of Artificial Sequence: Synthetic oligonucleotide
caggcuggucauucuuuag

SEQ ID NO: 1055259 - RNA, 19 nt, Artificial Sequence
  Description of Artificial Sequence: Synthetic oligonucleotide
gcggagagagcaccaaucc

SEQ ID NO: 1055260 - RNA, 19 nt, Artificial Sequence
  Description of Artificial Sequence: Synthetic oligonucleotide
ggacuugagcuggaggagg

SEQ ID NO: 1055261 - RNA, 19 nt, Artificial Sequence
  Description of Artificial Sequence: Synthetic oligonucleotide
caggaguuccgugccaccc

SEQ ID NO: 1055262 - RNA, 19 nt, Artificial Sequence
  Description of Artificial Sequence: Synthetic oligonucleotide
gcucgauucuucucaauga

SEQ ID NO: 1055263 - RNA, 19 nt, Artificial Sequence
  Description of Artificial Sequence: Synthetic oligonucleotide
ugucgcagccgagcuuucg

SEQ ID NO: 1055264 - RNA, 19 nt, Artificial Sequence
  Description of Artificial Sequence: Synthetic oligonucleotide
ggaaauguccagcugugua

SEQ ID NO: 1055265 - RNA, 19 nt, Artificial Sequence
  Description of Artificial Sequence: Synthetic oligonucleotide
uccccuggucuucuuugga

SEQ ID NO: 1055266 - RNA, 19 nt, Artificial Sequence
  Description of Artificial Sequence: Synthetic oligonucleotide
caucagaaaccacugcucu

SEQ ID NO: 1055267 - RNA, 19 nt, Artificial Sequence
  Description of Artificial Sequence: Synthetic oligonucleotide
ugacgcaggucaggcacag

SEQ ID NO: 1055268 - RNA, 19 nt, Artificial Sequence
  Description of Artificial Sequence: Synthetic oligonucleotide
cugaguaaggccagccaaa

SEQ ID NO: 1055269 - RNA, 19 nt, Artificial Sequence
  Description of Artificial Sequence: Synthetic oligonucleotide
acgcugauggugaccuggc

SEQ ID NO: 1055270 - RNA, 19 nt, Artificial Sequence
  Description of Artificial Sequence: Synthetic oligonucleotide
ucgcuucuuugguguauug

SEQ ID NO: 1055271 - RNA, 19 nt, Artificial Sequence
  Description of Artificial Sequence: Synthetic oligonucleotide
ugucuguuauuggcuguac

SEQ ID NO: 1055272 - RNA, 19 nt, Artificial Sequence
  Description of Artificial Sequence: Synthetic oligonucleotide
agugcuuaccccacacccu

SEQ ID NO: 1055273 - RNA, 19 nt, Artificial Sequence
  Description of Artificial Sequence: Synthetic oligonucleotide
gugaccucaguacccuuca

SEQ ID NO: 1055274 - RNA, 19 nt, Artificial Sequence
  Description of Artificial Sequence: Synthetic oligonucleotide
cugccggacuuccuucccg

SEQ ID NO: 1055275 - RNA, 19 nt, Artificial Sequence
  Description of Artificial Sequence: Synthetic oligonucleotide
gcccuuaucagaguccuug

SEQ ID NO: 1055276 - RNA, 19 nt, Artificial Sequence
  Description of Artificial Sequence: Synthetic oligonucleotide
gaacacgcugauggugacc

SEQ ID NO: 1055277 - RNA, 19 nt, Artificial Sequence
  Description of Artificial Sequence: Synthetic oligonucleotide
gcgaaguuaugacccacug

SEQ ID NO: 1055278 - RNA, 19 nt, Artificial Sequence
  Description of Artificial Sequence: Synthetic oligonucleotide
ucggucaaggaaggagaca

SEQ ID NO: 1055279 - RNA, 19 nt, Artificial Sequence
  Description of Artificial Sequence: Synthetic oligonucleotide
ccgaccugaugcaaaauuc

SEQ ID NO: 1055280 - RNA, 19 nt, Artificial Sequence
  Description of Artificial Sequence: Synthetic oligonucleotide
gccaacgccagccucgcug

SEQ ID NO: 1055281 - RNA, 19 nt, Artificial Sequence
  Description of Artificial Sequence: Synthetic oligonucleotide
cuugccuugcccuguccca

SEQ ID NO: 1055282 - RNA, 19 nt, Artificial Sequence
  Description of Artificial Sequence: Synthetic oligonucleotide
ugcgugucucugaaagcuu

SEQ ID NO: 1055283 - RNA, 19 nt, Artificial Sequence
  Description of Artificial Sequence: Synthetic oligonucleotide
ggauaggagugcaaaguca

SEQ ID NO: 1055284 - RNA, 19 nt, Artificial Sequence
  Description of Artificial Sequence: Synthetic oligonucleotide
cgaaguuaugacccacugg

SEQ ID NO: 1055285 - RNA, 19 nt, Artificial Sequence
  Description of Artificial Sequence: Synthetic oligonucleotide
gccacugaaagcgagucuc

SEQ ID NO: 1055286 - RNA, 19 nt, Artificial Sequence
  Description of Artificial Sequence: Synthetic oligonucleotide
ccgucugcgggucauacug

SEQ ID NO: 1055287 - RNA, 19 nt, Artificial Sequence
  Description of Artificial Sequence: Synthetic oligonucleotide
auagcgcccgcugucuuca

SEQ ID NO: 1055288 - RNA, 19 nt, Artificial Sequence
  Description of Artificial Sequence: Synthetic oligonucleotide
cacaggauaggagugcaaa

SEQ ID NO: 1055289 - RNA, 19 nt, Artificial Sequence
  Description of Artificial Sequence: Synthetic oligonucleotide
ugcgggucauacugcccgc

SEQ ID NO: 1055290 - RNA, 19 nt, Artificial Sequence
  Description of Artificial Sequence: Synthetic oligonucleotide
uucccgggaguagauguaa

SEQ ID NO: 1055291 - RNA, 19 nt, Artificial Sequence
  Description of Artificial Sequence: Synthetic oligonucleotide
uguucaccguuugccacuc

SEQ ID NO: 1055292 - RNA, 19 nt, Artificial Sequence
  Description of Artificial Sequence: Synthetic oligonucleotide
guaggguggaucucaggcu

SEQ ID NO: 1055293 - RNA, 19 nt, Artificial Sequence
  Description of Artificial Sequence: Synthetic oligonucleotide
ggcaugugcgaaguuauga

SEQ ID NO: 1055294 - RNA, 19 nt, Artificial Sequence
  Description of Artificial Sequence: Synthetic oligonucleotide
cauggcaugugcgaaguua

SEQ ID NO: 1055295 - RNA, 19 nt, Artificial Sequence
  Description of Artificial Sequence: Synthetic oligonucleotide
gguaguauuuaaccuugcu

SEQ ID NO: 1055296 - RNA, 19 nt, Artificial Sequence
  Description of Artificial Sequence: Synthetic oligonucleotide
ucacccggucaccacucuc

SEQ ID NO: 1055297 - RNA, 19 nt, Artificial Sequence
  Description of Artificial Sequence: Synthetic oligonucleotide
ggauccccucuucaguccc

SEQ ID NO: 1055298 - RNA, 19 nt, Artificial Sequence
  Description of Artificial Sequence: Synthetic oligonucleotide
acgucuggcaggccccuca

SEQ ID NO: 1055299 - RNA, 19 nt, Artificial Sequence
  Description of Artificial Sequence: Synthetic oligonucleotide
cucgcugaccgaccugaug

SEQ ID NO: 1055300 - RNA, 19 nt, Artificial Sequence
  Description of Artificial Sequence: Synthetic oligonucleotide
accccuccucacaucuugc

SEQ ID NO: 1055301 - RNA, 19 nt, Artificial Sequence
  Description of Artificial Sequence: Synthetic oligonucleotide
ccucacaucuugcuuucag

SEQ ID NO: 1055302 - RNA, 19 nt, Artificial Sequence
  Description of Artificial Sequence: Synthetic oligonucleotide
gggaauuggaagguaggga

SEQ ID NO: 1055303 - RNA, 19 nt, Artificial Sequence
  Description of Artificial Sequence: Synthetic oligonucleotide
auauggggccgagggguag

SEQ ID NO: 1055304 - RNA, 19 nt, Artificial Sequence
  Description of Artificial Sequence: Synthetic oligonucleotide
uuucaggggcggggaauug

SEQ ID NO: 1055305 - RNA, 19 nt, Artificial Sequence
  Description of Artificial Sequence: Synthetic oligonucleotide
cugaguccuguaccccagc

SEQ ID NO: 1055306 - RNA, 19 nt, Artificial Sequence
  Description of Artificial Sequence: Synthetic oligonucleotide
auacugcccgcugggagcu

SEQ ID NO: 1055307 - RNA, 19 nt, Artificial Sequence
  Description of Artificial Sequence: Synthetic oligonucleotide
cacugaguaaggccagcca

SEQ ID NO: 1055308 - RNA, 19 nt, Artificial Sequence
  Description of Artificial Sequence: Synthetic oligonucleotide
ccguguuugaacacgcuga

SEQ ID NO: 1055309 - RNA, 19 nt, Artificial Sequence
  Description of Artificial Sequence: Synthetic oligonucleotide
agccgagcuuucgccaacg

SEQ ID NO: 1055310 - RNA, 19 nt, Artificial Sequence
  Description of Artificial Sequence: Synthetic oligonucleotide
ggggccgagggguagccag

SEQ ID NO: 1055311 - RNA, 19 nt, Artificial Sequence
  Description of Artificial Sequence: Synthetic oligonucleotide
guaaggccagccaaagugu

SEQ ID NO: 1055312 - RNA, 19 nt, Artificial Sequence
  Description of Artificial Sequence: Synthetic oligonucleotide
uugugucgucuuccccucu

SEQ ID NO: 1055313 - RNA, 19 nt, Artificial Sequence
  Description of Artificial Sequence: Synthetic oligonucleotide
ggauucagcucuguuaugu

SEQ ID NO: 1055314 - RNA, 19 nt, Artificial Sequence
  Description of Artificial Sequence: Synthetic oligonucleotide
caggauaggagugcaaagu

SEQ ID NO: 1055315 - RNA, 19 nt, Artificial Sequence
  Description of Artificial Sequence: Synthetic oligonucleotide
gcgagucuccuucuuggug

SEQ ID NO: 1055316 - RNA, 19 nt, Artificial Sequence
  Description of Artificial Sequence: Synthetic oligonucleotide
acugcccgcugggagcuuc

SEQ ID NO: 1055317 - RNA, 19 nt, Artificial Sequence
  Description of Artificial Sequence: Synthetic oligonucleotide
cugacccuggacauuccaa

SEQ ID NO: 1055318 - RNA, 19 nt, Artificial Sequence
  Description of Artificial Sequence: Synthetic oligonucleotide
aggccagugcuuaccccac

SEQ ID NO: 1055319 - RNA, 19 nt, Artificial Sequence
  Description of Artificial Sequence: Synthetic oligonucleotide
  modified_base (16)..(16): a, c, u, g, unknown or other
caacggcaugcccggnauc

SEQ ID NO: 1055320 - RNA, 19 nt, Artificial Sequence
  Description of Artificial Sequence: Synthetic oligonucleotide
cuccuccccguguuugaac

SEQ ID NO: 1055321 - RNA, 19 nt, Artificial Sequence
  Description of Artificial Sequence: Synthetic oligonucleotide
cucgauucuucucaaugau

SEQ ID NO: 1055322 - RNA, 19 nt, Artificial Sequence
  Description of Artificial Sequence: Synthetic oligonucleotide
gagcaccaauccugcccag

SEQ ID NO: 1055323 - RNA, 19 nt, Artificial Sequence
  Description of Artificial Sequence: Synthetic oligonucleotide
cccguguuugaacacgcug

SEQ ID NO: 1055324 - RNA, 19 nt, Artificial Sequence
  Description of Artificial Sequence: Synthetic oligonucleotide
cacccaggugaagagcuuc

SEQ ID NO: 1055325 - RNA, 19 nt, Artificial Sequence
  Description of Artificial Sequence: Synthetic oligonucleotide
gugaccuggcccguuucug

SEQ ID NO: 1055326 - RNA, 19 nt, Artificial Sequence
  Description of Artificial Sequence: Synthetic oligonucleotide
auguuggaagaagcccuga

SEQ ID NO: 1055327 - RNA, 19 nt, Artificial Sequence
  Description of Artificial Sequence: Synthetic oligonucleotide
gagcuucuguggaaacuga

SEQ ID NO: 1055328 - RNA, 19 nt, Artificial Sequence
  Description of Artificial Sequence: Synthetic oligonucleotide
ccacugaaagcgagucucc

SEQ ID NO: 1055329 - RNA, 19 nt, Artificial Sequence
  Description of Artificial Sequence: Synthetic oligonucleotide
ccuugccuugcccuguccc

SEQ ID NO: 1055330 - RNA, 19 nt, Artificial Sequence
  Description of Artificial Sequence: Synthetic oligonucleotide
gugagguccaggauugugu

SEQ ID NO: 1055331 - RNA, 19 nt, Artificial Sequence
  Description of Artificial Sequence: Synthetic oligonucleotide
uggcccguuucugagccau

SEQ ID NO: 1055332 - RNA, 19 nt, Artificial Sequence
  Description of Artificial Sequence: Synthetic oligonucleotide
uugccacucugaugucccu

SEQ ID NO: 1055333 - RNA, 19 nt, Artificial Sequence
  Description of Artificial Sequence: Synthetic oligonucleotide
cugcgugucucugaaagcu

SEQ ID NO: 1055334 - RNA, 19 nt, Artificial Sequence
  Description of Artificial Sequence: Synthetic oligonucleotide
gaacagcccggcucccguc

SEQ ID NO: 1055335 - RNA, 19 nt, Artificial Sequence
  Description of Artificial Sequence: Synthetic oligonucleotide
ccccucugucaucagaaac

SEQ ID NO: 1055336 - RNA, 19 nt, Artificial Sequence
  Description of Artificial Sequence: Synthetic oligonucleotide
gugcgaaguuaugacccac

SEQ ID NO: 1055337 - RNA, 19 nt, Artificial Sequence
  Description of Artificial Sequence: Synthetic oligonucleotide
gcugaagagccggaucccc

SEQ ID NO: 1055338 - RNA, 19 nt, Artificial Sequence
  Description of Artificial Sequence: Synthetic oligonucleotide
uucaggggaugggucuccu

SEQ ID NO: 1055339 - RNA, 19 nt, Artificial Sequence
  Description of Artificial Sequence: Synthetic oligonucleotide
ccauguuggaagaagcccu

SEQ ID NO: 1055340 - RNA, 19 nt, Artificial Sequence
  Description of Artificial Sequence: Synthetic oligonucleotide
ucgccaacgccagccucgc

SEQ ID NO: 1055341 - RNA, 19 nt, Artificial Sequence
  Description of Artificial Sequence: Synthetic oligonucleotide
ccaccccauggcaugugcg

SEQ ID NO: 1055342 - RNA, 19 nt, Artificial Sequence
  Description of Artificial Sequence: Synthetic oligonucleotide
gccagugcuuaccccacac

SEQ ID NO: 1055343 - RNA, 19 nt, Artificial Sequence
  Description of Artificial Sequence: Synthetic oligonucleotide
guggaaccaaauggucuuc

SEQ ID NO: 1055344 - RNA, 19 nt, Artificial Sequence
  Description of Artificial Sequence: Synthetic oligonucleotide
gguaagggagacagagguc

SEQ ID NO: 1055345 - RNA, 19 nt, Artificial Sequence
  Description of Artificial Sequence: Synthetic oligonucleotide
  modified_base (11)..(11): a, c, u, g, unknown or other
gcaugcccggnaucccagg

SEQ ID NO: 1055346 - RNA, 19 nt, Artificial Sequence
  Description of Artificial Sequence: Synthetic oligonucleotide
ucccuugccuugcccuguc

SEQ ID NO: 1055347 - RNA, 19 nt, Artificial Sequence
  Description of Artificial Sequence: Synthetic oligonucleotide
  modified_base (5)..(5): a, c, u, g, unknown or other
ccggnaucccaggucaccc

SEQ ID NO: 1055348 - RNA, 19 nt, Artificial Sequence
  Description of Artificial Sequence: Synthetic oligonucleotide
gcuguguacugagauccac

SEQ ID NO: 1055349 - RNA, 19 nt, Artificial Sequence
  Description of Artificial Sequence: Synthetic oligonucleotide
gaaagcgagucuccuucuu

SEQ ID NO: 1055350 - RNA, 19 nt, Artificial Sequence
  Description of Artificial Sequence: Synthetic oligonucleotide
cagccaaagugucuguuau

SEQ ID NO: 1055351 - RNA, 19 nt, Artificial Sequence
  Description of Artificial Sequence: Synthetic oligonucleotide
agggugguaccugcccuca

SEQ ID NO: 1055352 - RNA, 19 nt, Artificial Sequence
  Description of Artificial Sequence: Synthetic oligonucleotide
  modified_base (10)..(10): a, c, u, g, unknown or other
caugcccggnaucccaggu

SEQ ID NO: 1055353 - RNA, 19 nt, Artificial Sequence
  Description of Artificial Sequence: Synthetic oligonucleotide
ggcugugucgcagccgagc

SEQ ID NO: 1055354 - RNA, 19 nt, Artificial Sequence
  Description of Artificial Sequence: Synthetic oligonucleotide
augacgcaggucaggcaca

SEQ ID NO: 1055355 - RNA, 19 nt, Artificial Sequence
  Description of Artificial Sequence: Synthetic oligonucleotide
ucccggcaguuaucuccag

SEQ ID NO: 1055356 - RNA, 19 nt, Artificial Sequence
  Description of Artificial Sequence: Synthetic oligonucleotide
ggguugcggagagagcacc

SEQ ID NO: 1055357 - RNA, 19 nt, Artificial Sequence
  Description of Artificial Sequence: Synthetic oligonucleotide
ccggucaccacucuccaga

SEQ ID NO: 1055358 - RNA, 19 nt, Artificial Sequence
  Description of Artificial Sequence: Synthetic oligonucleotide
gcuggacugaugguccaug

SEQ ID NO: 1055359 - RNA, 19 nt, Artificial Sequence
  Description of Artificial Sequence: Synthetic oligonucleotide
guugcggagagagcaccaa

SEQ ID NO: 1055360 - RNA, 19 nt, Artificial Sequence
  Description of Artificial Sequence: Synthetic oligonucleotide
cccggcaguuaucuccagg

SEQ ID NO: 1055361 - RNA, 19 nt, Artificial Sequence
  Description of Artificial Sequence: Synthetic oligonucleotide
cauauggggccgaggggua

SEQ ID NO: 1055362 - RNA, 19 nt, Artificial Sequence
  Description of Artificial Sequence: Synthetic oligonucleotide
  modified_base (12)..(12): a, c, u, g, unknown or other
ggcaugcccggnaucccag

SEQ ID NO: 1055363 - RNA, 19 nt, Artificial Sequence
  Description of Artificial Sequence: Synthetic oligonucleotide
agcuguguacugagaucca

SEQ ID NO: 1055364 - RNA, 19 nt, Artificial Sequence
  Description of Artificial Sequence: Synthetic oligonucleotide
cugaugguccauguagggu

SEQ ID NO: 1055365 - RNA, 19 nt, Artificial Sequence
  Description of Artificial Sequence: Synthetic oligonucleotide
cuucccgggaguagaugua

SEQ ID NO: 1055366 - RNA, 19 nt, Artificial Sequence
  Description of Artificial Sequence: Synthetic oligonucleotide
cuguagauccccuggucuu

SEQ ID NO: 1055367 - RNA, 19 nt, Artificial Sequence
  Description of Artificial Sequence: Synthetic oligonucleotide
aggucaggcacagggucuu

SEQ ID NO: 1055368 - RNA, 19 nt, Artificial Sequence
  Description of Artificial Sequence: Synthetic oligonucleotide
gcuuaccccacacccugga

SEQ ID NO: 1055369 - RNA, 19 nt, Artificial Sequence
  Description of Artificial Sequence: Synthetic oligonucleotide
gaguccuguaccccagcuu

SEQ ID NO: 1055370 - RNA, 19 nt, Artificial Sequence
  Description of Artificial Sequence: Synthetic oligonucleotide
ccccauggcaugugcgaag

SEQ ID NO: 1055371 - RNA, 19 nt, Artificial Sequence
  Description of Artificial Sequence: Synthetic oligonucleotide
caggcacagggucuugucu

SEQ ID NO: 1055372 - RNA, 19 nt, Artificial Sequence
  Description of Artificial Sequence: Synthetic oligonucleotide
aggguggaucucaggcuga

SEQ ID NO: 1055373 - RNA, 19 nt, Artificial Sequence
  Description of Artificial Sequence: Synthetic oligonucleotide
ccagccucgcugaccgacc

SEQ ID NO: 1055374 - RNA, 19 nt, Artificial Sequence
  Description of Artificial Sequence: Synthetic oligonucleotide
gacagaggucugcgugucu

SEQ ID NO: 1055375 - RNA, 19 nt, Artificial Sequence
  Description of Artificial Sequence: Synthetic oligonucleotide
uagauccccuggucuucuu

SEQ ID NO: 1055376 - RNA, 19 nt, Artificial Sequence
  Description of Artificial Sequence: Synthetic oligonucleotide
cuguuauguccuugucccu

SEQ ID NO: 1055377 - RNA, 19 nt, Artificial Sequence
  Description of Artificial Sequence: Synthetic oligonucleotide
gccagaucucaucuagggu

SEQ ID NO: 1055378 - RNA, 19 nt, Artificial Sequence
  Description of Artificial Sequence: Synthetic oligonucleotide
cuuucgccaacgccagccu

SEQ ID NO: 1055379 - RNA, 19 nt, Artificial Sequence
  Description of Artificial Sequence: Synthetic oligonucleotide
auuuggcaacaaacagcua

SEQ ID NO: 1055380 - RNA, 19 nt, Artificial Sequence
  Description of Artificial Sequence: Synthetic oligonucleotide
augguccauguagggugga

SEQ ID NO: 1055381 - RNA, 19 nt, Artificial Sequence
  Description of Artificial Sequence: Synthetic oligonucleotide
guagauccccuggucuucu

SEQ ID NO: 1055382 - RNA, 19 nt, Artificial Sequence
  Description of Artificial Sequence: Synthetic oligonucleotide
ggaaccaaauggucuucau

SEQ ID NO: 1055383 - RNA, 19 nt, Artificial Sequence
  Description of Artificial Sequence: Synthetic oligonucleotide
gcugugucgcagccgagcu

SEQ ID NO: 1055384 - RNA, 19 nt, Artificial Sequence
  Description of Artificial Sequence: Synthetic oligonucleotide
gguugcggagagagcacca

SEQ ID NO: 1055385 - RNA, 19 nt, Artificial Sequence
  Description of Artificial Sequence: Synthetic oligonucleotide
  modified_base (6)..(6): a, c, u, g, unknown or other
cccggnaucccaggucacc

SEQ ID NO: 1055386 - RNA, 19 nt, Artificial Sequence
  Description of Artificial Sequence: Synthetic oligonucleotide
guauuggauucagcucugu

SEQ ID NO: 1055387 - RNA, 19 nt, Artificial Sequence
  Description of Artificial Sequence: Synthetic oligonucleotide
ggccgagggguagccagag

SEQ ID NO: 1055388 - RNA, 19 nt, Artificial Sequence
  Description of Artificial Sequence: Synthetic oligonucleotide
gccagccucgcugaccgac

SEQ ID NO: 1055389 - RNA, 19 nt, Artificial Sequence
  Description of Artificial Sequence: Synthetic oligonucleotide
ccucacccggucaccacuc

SEQ ID NO: 1055390 - RNA, 19 nt, Artificial Sequence
  Description of Artificial Sequence: Synthetic oligonucleotide
cagaggucugcgugucucu

SEQ ID NO: 1055391 - RNA, 19 nt, Artificial Sequence
  Description of Artificial Sequence: Synthetic oligonucleotide
uggggccgagggguagcca

SEQ ID NO: 1055392 - RNA, 19 nt, Artificial Sequence
  Description of Artificial Sequence: Synthetic oligonucleotide
ggugaccuggcccguuucu

SEQ ID NO: 1055393 - RNA, 19 nt, Artificial Sequence
  Description of Artificial Sequence: Synthetic oligonucleotide
gccggacuuccuucccggc

SEQ ID NO: 1055394 - RNA, 19 nt, Artificial Sequence
  Description of Artificial Sequence: Synthetic oligonucleotide
ccuccccguguuugaacac

SEQ ID NO: 1055395 - RNA, 19 nt, Artificial Sequence
  Description of Artificial Sequence: Synthetic oligonucleotide
gggcuuguuguucaccguu

SEQ ID NO: 1055396 - RNA, 19 nt, Artificial Sequence
  Description of Artificial Sequence: Synthetic oligonucleotide
ccguuucugagccauacuu

SEQ ID NO: 1055397 - RNA, 19 nt, Artificial Sequence
  Description of Artificial Sequence: Synthetic oligonucleotide
gggguugcggagagagcac

SEQ ID NO: 1055398 - RNA, 19 nt, Artificial Sequence
  Description of Artificial Sequence: Synthetic oligonucleotide
cuugggcuccuccccgugu

SEQ ID NO: 1055399 - RNA, 19 nt, Artificial Sequence
  Description of Artificial Sequence: Synthetic oligonucleotide
aggcuccauguuggaagaa

SEQ ID NO: 1055400 - RNA, 19 nt, Artificial Sequence
  Description of Artificial Sequence: Synthetic oligonucleotide
uagcgcccgcugucuucac

SEQ ID NO: 1055401 - RNA, 19 nt, Artificial Sequence
  Description of Artificial Sequence: Synthetic oligonucleotide
cccgggaguagauguaaua

SEQ ID NO: 1055402 - RNA, 19 nt, Artificial Sequence
  Description of Artificial Sequence: Synthetic oligonucleotide
cuucgcuucuuugguguau

SEQ ID NO: 1055403 - RNA, 19 nt, Artificial Sequence
  Description of Artificial Sequence: Synthetic oligonucleotide
cacucugaugucccugcuu

SEQ ID NO: 1055404 - RNA, 19 nt, Artificial Sequence
  Description of Artificial Sequence: Synthetic oligonucleotide
ccggacuuccuucccggca

SEQ ID NO: 1055405 - RNA, 19 nt, Artificial Sequence
  Description of Artificial Sequence: Synthetic oligonucleotide
cuggaaccgugaacuuggu

SEQ ID NO: 1055406 - RNA, 19 nt, Artificial Sequence
  Description of Artificial Sequence: Synthetic oligonucleotide
gcuucgcuucuuuggugua

SEQ ID NO: 1055407 - RNA, 19 nt, Artificial Sequence
  Description of Artificial Sequence: Synthetic oligonucleotide
  modified_base (19)..(19): a, c, u, g, unknown or other
caucaacggcaugcccggn

SEQ ID NO: 1055408 - RNA, 19 nt, Artificial Sequence
  Description of Artificial Sequence: Synthetic oligonucleotide
cuggcccguuucugagcca

SEQ ID NO: 1055409 - RNA, 19 nt, Artificial Sequence
  Description of Artificial Sequence: Synthetic oligonucleotide
ggccagugcuuaccccaca

SEQ ID NO: 1055410 - RNA, 19 nt, Artificial Sequence
  Description of Artificial Sequence: Synthetic oligonucleotide
gcugaccgaccugaugcaa

SEQ ID NO: 1055411 - RNA, 19 nt, Artificial Sequence
  Description of Artificial Sequence: Synthetic oligonucleotide
gaccgaccugaugcaaaau

SEQ ID NO: 1055412 - RNA, 19 nt, Artificial Sequence
  Description of Artificial Sequence: Synthetic oligonucleotide
ccaagagauuucaggggau

SEQ ID NO: 1055413 - RNA, 19 nt, Artificial Sequence
  Description of Artificial Sequence: Synthetic oligonucleotide
uggccacgucuggcaggcc

SEQ ID NO: 1055414 - RNA, 19 nt, Artificial Sequence
  Description of Artificial Sequence: Synthetic oligonucleotide
  modified_base (4)..(4): a, c, u, g, unknown or other
cggnaucccaggucaccca

SEQ ID NO: 1055415 - RNA, 19 nt, Artificial Sequence
  Description of Artificial Sequence: Synthetic oligonucleotide
cugcuucccgggaguagau

SEQ ID NO: 1055416 - RNA, 19 nt, Artificial Sequence
  Description of Artificial Sequence: Synthetic oligonucleotide
  modified_base (7)..(7): a, c, u, g, unknown or other
gcccggnaucccaggucac

SEQ ID NO: 1055417 - RNA, 19 nt, Artificial Sequence
  Description of Artificial Sequence: Synthetic oligonucleotide
gucccuugccuugcccugu

SEQ ID NO: 1055418 - RNA, 19 nt, Artificial Sequence
  Description of Artificial Sequence: Synthetic oligonucleotide
cacgucuggcaggccccuc

SEQ ID NO: 1055419 - RNA, 19 nt, Artificial Sequence
  Description of Artificial Sequence: Synthetic oligonucleotide
ccacaggauaggagugcaa

SEQ ID NO: 1055420 - RNA, 19 nt, Artificial Sequence
  Description of Artificial Sequence: Synthetic oligonucleotide
caccacucuccagacguuu

SEQ ID NO: 1055421 - RNA, 19 nt, Artificial Sequence
  Description of Artificial Sequence: Synthetic oligonucleotide
gcuuucaggggcggggaau

SEQ ID NO: 1055422 - RNA, 19 nt, Artificial Sequence
  Description of Artificial Sequence: Synthetic oligonucleotide
ugcccgcugggagcuucuu

SEQ ID NO: 1055423 - RNA, 19 nt, Artificial Sequence
  Description of Artificial Sequence: Synthetic oligonucleotide
cgucuggcaggccccucac

SEQ ID NO: 1055424 - RNA, 19 nt, Artificial Sequence
  Description of Artificial Sequence: Synthetic oligonucleotide
ggcggggaauuggaaggua

SEQ ID NO: 1055425 - RNA, 19 nt, Artificial Sequence
  Description of Artificial Sequence: Synthetic oligonucleotide
cgcugaccgaccugaugca

SEQ ID NO: 1055426 - RNA, 19 nt, Artificial Sequence
  Description of Artificial Sequence: Synthetic oligonucleotide
cugugucgcagccgagcuu

SEQ ID NO: 1055427 - RNA, 19 nt, Artificial Sequence
  Description of Artificial Sequence: Synthetic oligonucleotide
gggccgagggguagccaga

SEQ ID NO: 1055428 - RNA, 19 nt, Artificial Sequence
  Description of Artificial Sequence: Synthetic oligonucleotide
cggagagagcaccaauccu

SEQ ID NO: 1055429 - RNA, 19 nt, Artificial Sequence
  Description of Artificial Sequence: Synthetic oligonucleotide
gggcggggaauuggaaggu

SEQ ID NO: 1055430 - RNA, 19 nt, Artificial Sequence
  Description of Artificial Sequence: Synthetic oligonucleotide
cugcccgcugggagcuucu

SEQ ID NO: 1055431 - RNA, 19 nt, Artificial Sequence
  Description of Artificial Sequence: Synthetic oligonucleotide
uacugcccgcugggagcuu

SEQ ID NO: 1055432 - RNA, 19 nt, Artificial Sequence
  Description of Artificial Sequence: Synthetic oligonucleotide
gcccgcugucuucacuggu

SEQ ID NO: 1055433 - RNA, 19 nt, Artificial Sequence
  Description of Artificial Sequence: Synthetic oligonucleotide
cccucacccggucaccacu

SEQ ID NO: 1055434 - RNA, 19 nt, Artificial Sequence
  Description of Artificial Sequence: Synthetic oligonucleotide
ccaggaugugcagccagau

SEQ ID NO: 1055435 - RNA, 19 nt, Artificial Sequence
  Description of Artificial Sequence: Synthetic oligonucleotide
caguacccuucaccuccau

SEQ ID NO: 1055436 - RNA, 19 nt, Artificial Sequence
  Description of Artificial Sequence: Synthetic oligonucleotide
gcgggucauacugcccgcu

SEQ ID NO: 1055437 - RNA, 19 nt, Artificial Sequence
  Description of Artificial Sequence: Synthetic oligonucleotide
ccccguguuugaacacgcu

SEQ ID NO: 1055438 - RNA, 19 nt, Artificial Sequence
  Description of Artificial Sequence: Synthetic oligonucleotide
cggcaguuaucuccagggu

SEQ ID NO: 1055439 - RNA, 19 nt, Artificial Sequence
  Description of Artificial Sequence: Synthetic oligonucleotide
gcccgcugggagcuucuuu

SEQ ID NO: 1055440 - RNA, 19 nt, Artificial Sequence
  Description of Artificial Sequence: Synthetic oligonucleotide
ggcccguuucugagccaua

SEQ ID NO: 1055441 - RNA, 19 nt, Artificial Sequence
  Description of Artificial Sequence: Synthetic oligonucleotide
ccauggcaugugcgaaguu

SEQ ID NO: 1055442 - RNA, 19 nt, Artificial Sequence
  Description of Artificial Sequence: Synthetic oligonucleotide
ccucgcugaccgaccugau

SEQ ID NO: 1055443 - RNA, 19 nt, Artificial Sequence
  Description of Artificial Sequence: Synthetic oligonucleotide
ccacgucuggcaggccccu

SEQ ID NO: 1055444 - RNA, 19 nt, Artificial Sequence
  Description of Artificial Sequence: Synthetic oligonucleotide
auaguuauaagcuucauug

SEQ ID NO: 1055445 - RNA, 19 nt, Artificial Sequence
  Description of Artificial Sequence: Synthetic oligonucleotide
aaaucgcccauauucaugc

SEQ ID NO: 1055446 - RNA, 19 nt, Artificial Sequence
  Description of Artificial Sequence: Synthetic oligonucleotide
guuguuugcaucaaaaucg

SEQ ID NO: 1055447 - RNA, 19 nt, Artificial Sequence
  Description of Artificial Sequence: Synthetic oligonucleotide
uuaugauccaguucuaggg

SEQ ID NO: 1055448 - RNA, 19 nt, Artificial Sequence
  Description of Artificial Sequence: Synthetic oligonucleotide
ugcucgauuaccauaauag

SEQ ID NO: 1055449 - RNA, 19 nt, Artificial Sequence
  Description of Artificial Sequence: Synthetic oligonucleotide
aacugcucuaaguacacgg

SEQ ID NO: 1055450 - RNA, 19 nt, Artificial Sequence
  Description of Artificial Sequence: Synthetic oligonucleotide
aacacaagccuucucgugg

SEQ ID NO: 1055451 - RNA, 19 nt, Artificial Sequence
  Description of Artificial Sequence: Synthetic oligonucleotide
auaucuauggccuuugugu

SEQ ID NO: 1055452 - RNA, 19 nt, Artificial Sequence
  Description of Artificial Sequence: Synthetic oligonucleotide
uuaggacacauaucuaugg

SEQ ID NO: 1055453 - RNA, 19 nt, Artificial Sequence
  Description of Artificial Sequence: Synthetic oligonucleotide
cuguguacaguucauaugc

SEQ ID NO: 1055454 - RNA, 19 nt, Artificial Sequence
  Description of Artificial Sequence: Synthetic oligonucleotide
agcaacacaagccuucucg

SEQ ID NO: 1055455 - RNA, 19 nt, Artificial Sequence
  Description of Artificial Sequence: Synthetic oligonucleotide
aaaacaaccuuccggaaau

SEQ ID NO: 1055456 - RNA, 19 nt, Artificial Sequence
  Description of Artificial Sequence: Synthetic oligonucleotide
aggacacauaucuauggcc

SEQ ID NO: 1055457 - RNA, 19 nt, Artificial Sequence
  Description of Artificial Sequence: Synthetic oligonucleotide
uaggcuuuuauguaggugu

SEQ ID NO: 1055458 - RNA, 19 nt, Artificial Sequence
  Description of Artificial Sequence: Synthetic oligonucleotide
uaagcuuggaauuaaccgu

SEQ ID NO: 1055459 - RNA, 19 nt, Artificial Sequence
  Description of Artificial Sequence: Synthetic oligonucleotide
auguuguuagggucuaucc

SEQ ID NO: 1055460 - RNA, 19 nt, Artificial Sequence
  Description of Artificial Sequence: Synthetic oligonucleotide
cuuggaauuaaccguaccc

SEQ ID NO: 1055461 - RNA, 19 nt, Artificial Sequence
  Description of Artificial Sequence: Synthetic oligonucleotide
ucuggauggugcaucaagg

SEQ ID NO: 1055462 - RNA, 19 nt, Artificial Sequence
  Description of Artificial Sequence: Synthetic oligonucleotide
uuuaggacacauaucuaug

SEQ ID NO: 1055463 - RNA, 19 nt, Artificial Sequence
  Description of Artificial Sequence: Synthetic oligonucleotide
auuaccacaucgcacuccg

SEQ ID NO: 1055464 - RNA, 19 nt, Artificial Sequence
  Description of Artificial Sequence: Synthetic oligonucleotide
uuuguacagucaucuaugg

SEQ ID NO: 1055465 - RNA, 19 nt, Artificial Sequence
  Description of Artificial Sequence: Synthetic oligonucleotide
agcuucaccgcauuuguac

SEQ ID NO: 1055466 - RNA, 19 nt, Artificial Sequence
  Description of Artificial Sequence: Synthetic oligonucleotide
uggaauuaaccguaccccg

SEQ ID NO: 1055467 - RNA, 19 nt, Artificial Sequence
  Description of Artificial Sequence: Synthetic oligonucleotide
uuuggcauuucuacaagca

SEQ ID NO: 1055468 - RNA, 19 nt, Artificial Sequence
  Description of Artificial Sequence: Synthetic oligonucleotide
guuguuagggucuaucccc

SEQ ID NO: 1055469 - RNA, 19 nt, Artificial Sequence
  Description of Artificial Sequence: Synthetic oligonucleotide
uucguaaaaugucacuggc

SEQ ID NO: 1055470 - RNA, 19 nt, Artificial Sequence
  Description of Artificial Sequence: Synthetic oligonucleotide
uucaaaauccgauucugcu

SEQ ID NO: 1055471 - RNA, 19 nt, Artificial Sequence
  Description of Artificial Sequence: Synthetic oligonucleotide
aggugaaccguccacacuc

SEQ ID NO: 1055472 - RNA, 19 nt, Artificial Sequence
  Description of Artificial Sequence: Synthetic oligonucleotide
uguuguuagggucuauccc

SEQ ID NO: 1055473 - RNA, 19 nt, Artificial Sequence
  Description of Artificial Sequence: Synthetic oligonucleotide
aauaguuauaagcuucauu

SEQ ID NO: 1055474 - RNA, 19 nt, Artificial Sequence
  Description of Artificial Sequence: Synthetic oligonucleotide
uuugccuucacggagguga

SEQ ID NO: 1055475 - RNA, 19 nt, Artificial Sequence
  Description of Artificial Sequence: Synthetic oligonucleotide
caugguuaaacugagcaag

SEQ ID NO: 1055476 - RNA, 19 nt, Artificial Sequence
  Description of Artificial Sequence: Synthetic oligonucleotide
auuaccauaauagcuagca

SEQ ID NO: 1055477 - RNA, 19 nt, Artificial Sequence
  Description of Artificial Sequence: Synthetic oligonucleotide
ucgauuaccauaauagcua

SEQ ID NO: 1055478 - RNA, 19 nt, Artificial Sequence
  Description of Artificial Sequence: Synthetic oligonucleotide
aauucuagggcacggucca

SEQ ID NO: 1055479 - RNA, 19 nt, Artificial Sequence
  Description of Artificial Sequence: Synthetic oligonucleotide
uaccacaucgcacuccgcg

SEQ ID NO: 1055480 - RNA, 19 nt, Artificial Sequence
  Description of Artificial Sequence: Synthetic oligonucleotide
gauuuugaagcgauggcag

SEQ ID NO: 1055481 - RNA, 19 nt, Artificial Sequence
  Description of Artificial Sequence: Synthetic oligonucleotide
aaacgaaacugcucuaagu

SEQ ID NO: 1055482 - RNA, 19 nt, Artificial Sequence
  Description of Artificial Sequence: Synthetic oligonucleotide
cauugcauucccaagugag

SEQ ID NO: 1055483 - RNA, 19 nt, Artificial Sequence
  Description of Artificial Sequence: Synthetic oligonucleotide
acgaaacugcucuaaguac

SEQ ID NO: 1055484 - RNA, 19 nt, Artificial Sequence
  Description of Artificial Sequence: Synthetic oligonucleotide
caaccuuccggaaaucucg

SEQ ID NO: 1055485 - RNA, 19 nt, Artificial Sequence
  Description of Artificial Sequence: Synthetic oligonucleotide
uuaaacugagcaagucugc

SEQ ID NO: 1055486 - RNA, 19 nt, Artificial Sequence
  Description of Artificial Sequence: Synthetic oligonucleotide
uuggaauuaaccguacccc

SEQ ID NO: 1055487 - RNA, 19 nt, Artificial Sequence
  Description of Artificial Sequence: Synthetic oligonucleotide
uuauaagcuucauuguagu

SEQ ID NO: 1055488 - RNA, 19 nt, Artificial Sequence
  Description of Artificial Sequence: Synthetic oligonucleotide
uuuguguaauaguuauaag

SEQ ID NO: 1055489 - RNA, 19 nt, Artificial Sequence
  Description of Artificial Sequence: Synthetic oligonucleotide
uguaacacugagcucuucu

SEQ ID NO: 1055490 - RNA, 19 nt, Artificial Sequence
  Description of Artificial Sequence: Synthetic oligonucleotide
uuguuugcaucaaaaucgc

SEQ ID NO: 1055491 - RNA, 19 nt, Artificial Sequence
  Description of Artificial Sequence: Synthetic oligonucleotide
uacaguagaguuuagcauu

SEQ ID NO: 1055492 - RNA, 19 nt, Artificial Sequence
  Description of Artificial Sequence: Synthetic oligonucleotide
gagaaaacgaaacugcucu

SEQ ID NO: 1055493 - RNA, 19 nt, Artificial Sequence
  Description of Artificial Sequence: Synthetic oligonucleotide
uugcuaaacauucugcuuu

SEQ ID NO: 1055494 - RNA, 19 nt, Artificial Sequence
  Description of Artificial Sequence: Synthetic oligonucleotide
ucucaaguaggcuuuuaug

SEQ ID NO: 1055495 - RNA, 19 nt, Artificial Sequence
  Description of Artificial Sequence: Synthetic oligonucleotide
agcauugcuaaacauucug

SEQ ID NO: 1055496 - RNA, 19 nt, Artificial Sequence
  Description of Artificial Sequence: Synthetic oligonucleotide
aucgcccauauucaugccc

SEQ ID NO: 1055497 - RNA, 19 nt, Artificial Sequence
  Description of Artificial Sequence: Synthetic oligonucleotide
aggcauucuugucaacucc

SEQ ID NO: 1055498 - RNA, 19 nt, Artificial Sequence
  Description of Artificial Sequence: Synthetic oligonucleotide
uggcauuucuacaagcaac

SEQ ID NO: 1055499 - RNA, 19 nt, Artificial Sequence
  Description of Artificial Sequence: Synthetic oligonucleotide
uaugcuagcuuguaauuuc

SEQ ID NO: 1055500 - RNA, 19 nt, Artificial Sequence
  Description of Artificial Sequence: Synthetic oligonucleotide
uaccauaauagcuagcauu

SEQ ID NO: 1055501 - RNA, 19 nt, Artificial Sequence
  Description of Artificial Sequence: Synthetic oligonucleotide
uccgauucugcuauuuucu

SEQ ID NO: 1055502 - RNA, 19 nt, Artificial Sequence
  Description of Artificial Sequence: Synthetic oligonucleotide
ugagaaaacgaaacugcuc

SEQ ID NO: 1055503 - RNA, 19 nt, Artificial Sequence
  Description of Artificial Sequence: Synthetic oligonucleotide
uuuuaugauccaguucuag

SEQ ID NO: 1055504 - RNA, 19 nt, Artificial Sequence
  Description of Artificial Sequence: Synthetic oligonucleotide
cucaugguuaaacugagca

SEQ ID NO: 1055505 - RNA, 19 nt, Artificial Sequence
  Description of Artificial Sequence: Synthetic oligonucleotide
cauaguaugcguucccuug

SEQ ID NO: 1055506 - RNA, 19 nt, Artificial Sequence
  Description of Artificial Sequence: Synthetic oligonucleotide
gaagaaauucccugggcca

SEQ ID NO: 1055507 - RNA, 19 nt, Artificial Sequence
  Description of Artificial Sequence: Synthetic oligonucleotide
uucugcuauuuucucauac

SEQ ID NO: 1055508 - RNA, 19 nt, Artificial Sequence
  Description of Artificial Sequence: Synthetic oligonucleotide
uaauaaaggcaaagacccc

SEQ ID NO: 1055509 - RNA, 19 nt, Artificial Sequence
  Description of Artificial Sequence: Synthetic oligonucleotide
cuuagcauaguaugcguuc

SEQ ID NO: 1055510 - RNA, 19 nt, Artificial Sequence
  Description of Artificial Sequence: Synthetic oligonucleotide
guacacggggacaugaugg

SEQ ID NO: 1055511 - RNA, 19 nt, Artificial Sequence
  Description of Artificial Sequence: Synthetic oligonucleotide
uugcauucccaagugagag

SEQ ID NO: 1055512 - RNA, 19 nt, Artificial Sequence
  Description of Artificial Sequence: Synthetic oligonucleotide
cuucucguggucaggagcc

SEQ ID NO: 1055513 - RNA, 19 nt, Artificial Sequence
  Description of Artificial Sequence: Synthetic oligonucleotide
uggaccucggcacuggccc

SEQ ID NO: 1055514 - RNA, 19 nt, Artificial Sequence
  Description of Artificial Sequence: Synthetic oligonucleotide
guaguaaucuuuccucuug

SEQ ID NO: 1055515 - RNA, 19 nt, Artificial Sequence
  Description of Artificial Sequence: Synthetic oligonucleotide
aagaaauucccugggccag

SEQ ID NO: 1055516 - RNA, 19 nt, Artificial Sequence
  Description of Artificial Sequence: Synthetic oligonucleotide
uuuugaagcgauggcaggc

SEQ ID NO: 1055517 - RNA, 19 nt, Artificial Sequence
  Description of Artificial Sequence: Synthetic oligonucleotide
caucaucuaguuuucuaag

SEQ ID NO: 1055518 - RNA, 19 nt, Artificial Sequence
  Description of Artificial Sequence: Synthetic oligonucleotide
uuaaaugcuuuauucccau

SEQ ID NO: 1055519 - RNA, 19 nt, Artificial Sequence
  Description of Artificial Sequence: Synthetic oligonucleotide
aaucgcccauauucaugcc

SEQ ID NO: 1055520 - RNA, 19 nt, Artificial Sequence
  Description of Artificial Sequence: Synthetic oligonucleotide
auuuguacagucaucuaug

SEQ ID NO: 1055521 - RNA, 19 nt, Artificial Sequence
  Description of Artificial Sequence: Synthetic oligonucleotide
uaguuuucuaagcuuggaa

SEQ ID NO: 1055522 - RNA, 19 nt, Artificial Sequence
  Description of Artificial Sequence: Synthetic oligonucleotide
aacacugagcucuucucaa

SEQ ID NO: 1055523 - RNA, 19 nt, Artificial Sequence
  Description of Artificial Sequence: Synthetic oligonucleotide
augcagaaaacaaccuucc

SEQ ID NO: 1055524 - RNA, 19 nt, Artificial Sequence
  Description of Artificial Sequence: Synthetic oligonucleotide
guaugcguucccuuguucc

SEQ ID NO: 1055525 - RNA, 19 nt, Artificial Sequence
  Description of Artificial Sequence: Synthetic oligonucleotide
aaaaucgcccauauucaug

SEQ ID NO: 1055526 - RNA, 19 nt, Artificial Sequence
  Description of Artificial Sequence: Synthetic oligonucleotide
guaguugcccuucauuagc

SEQ ID NO: 1055527 - RNA, 19 nt, Artificial Sequence
  Description of Artificial Sequence: Synthetic oligonucleotide
uaguuauaagcuucauugu

SEQ ID NO: 1055528 - RNA, 19 nt, Artificial Sequence
  Description of Artificial Sequence: Synthetic oligonucleotide
uccauucguaaaaugucac

SEQ ID NO: 1055529 - RNA, 19 nt, Artificial Sequence
  Description of Artificial Sequence: Synthetic oligonucleotide
cuccaugacggcauuggcg

SEQ ID NO: 1055530 - RNA, 19 nt, Artificial Sequence
  Description of Artificial Sequence: Synthetic oligonucleotide
aaugcuuuauucccaucuu

SEQ ID NO: 1055531 - RNA, 19 nt, Artificial Sequence
  Description of Artificial Sequence: Synthetic oligonucleotide
uccucuagcaguucaggcu

SEQ ID NO: 1055532 - RNA, 19 nt, Artificial Sequence
  Description of Artificial Sequence: Synthetic oligonucleotide
uggguaucgacccagcauu

SEQ ID NO: 1055533 - RNA, 19 nt, Artificial Sequence
  Description of Artificial Sequence: Synthetic oligonucleotide
uuggcuuuaagggcuuugg

SEQ ID NO: 1055534 - RNA, 19 nt, Artificial Sequence
  Description of Artificial Sequence: Synthetic oligonucleotide
accccggacauacagagca

SEQ ID NO: 1055535 - RNA, 19 nt, Artificial Sequence
  Description of Artificial Sequence: Synthetic oligonucleotide
uuguacagucaucuauggc

SEQ ID NO: 1055536 - RNA, 19 nt, Artificial Sequence
  Description of Artificial Sequence: Synthetic oligonucleotide
gaaaacaaccuuccggaaa

SEQ ID NO: 1055537 - RNA, 19 nt, Artificial Sequence
  Description of Artificial Sequence: Synthetic oligonucleotide
aggggcaaauucuagggca

SEQ ID NO: 1055538 - RNA, 19 nt, Artificial Sequence
  Description of Artificial Sequence: Synthetic oligonucleotide
ugcaucaaggcccgcuucc

SEQ ID NO: 1055539 - RNA, 19 nt, Artificial Sequence
  Description of Artificial Sequence: Synthetic oligonucleotide
uuuucuccgucugauacac

SEQ ID NO: 1055540 - RNA, 19 nt, Artificial Sequence
  Description of Artificial Sequence: Synthetic oligonucleotide
ucaugguuaaacugagcaa

SEQ ID NO: 1055541 - RNA, 19 nt, Artificial Sequence
  Description of Artificial Sequence: Synthetic oligonucleotide
aaccguaccccgauuacag

SEQ ID NO: 1055542 - RNA, 19 nt, Artificial Sequence
  Description of Artificial Sequence: Synthetic oligonucleotide
uuaaccguaccccgauuac

SEQ ID NO: 1055543 - RNA, 19 nt, Artificial Sequence
  Description of Artificial Sequence: Synthetic oligonucleotide
cauaucuauggccuuugug

SEQ ID NO: 1055544 - RNA, 19 nt, Artificial Sequence
  Description of Artificial Sequence: Synthetic oligonucleotide
ucuaaguacacggggacau

SEQ ID NO: 1055545 - RNA, 19 nt, Artificial Sequence
  Description of Artificial Sequence: Synthetic oligonucleotide
ucuagggcucuuuggaaac

SEQ ID NO: 1055546 - RNA, 19 nt, Artificial Sequence
  Description of Artificial Sequence: Synthetic oligonucleotide
uucuuagcauaguaugcgu

SEQ ID NO: 1055547 - RNA, 19 nt, Artificial Sequence
  Description of Artificial Sequence: Synthetic oligonucleotide
agggccaccgaagaaugcc

SEQ ID NO: 1055548 - RNA, 19 nt, Artificial Sequence
  Description of Artificial Sequence: Synthetic oligonucleotide
uguuugcaucaaaaucgcc

SEQ ID NO: 1055549 - RNA, 19 nt, Artificial Sequence
  Description of Artificial Sequence: Synthetic oligonucleotide
auuaaccguaccccgauua

SEQ ID NO: 1055550 - RNA, 19 nt, Artificial Sequence
  Description of Artificial Sequence: Synthetic oligonucleotide
uauaagcuucauuguaguc

SEQ ID NO: 1055551 - RNA, 19 nt, Artificial Sequence
  Description of Artificial Sequence: Synthetic oligonucleotide
ucgcccacuuccuugaacu

SEQ ID NO: 1055552 - RNA, 19 nt, Artificial Sequence
  Description of Artificial Sequence: Synthetic oligonucleotide
ugaaccguccacacucaug

SEQ ID NO: 1055553 - RNA, 19 nt, Artificial Sequence
  Description of Artificial Sequence: Synthetic oligonucleotide
ugucaucuagcuucaccgc

SEQ ID NO: 1055554 - RNA, 19 nt, Artificial Sequence
  Description of Artificial Sequence: Synthetic oligonucleotide
aguacacggggacaugaug

SEQ ID NO: 1055555 - RNA, 19 nt, Artificial Sequence
  Description of Artificial Sequence: Synthetic oligonucleotide
uguaguccuucuuagcaua

SEQ ID NO: 1055556 - RNA, 19 nt, Artificial Sequence
  Description of Artificial Sequence: Synthetic oligonucleotide
agucucacugacugcugcg

SEQ ID NO: 1055557 - RNA, 19 nt, Artificial Sequence
  Description of Artificial Sequence: Synthetic oligonucleotide
auaguaugcguucccuugu

SEQ ID NO: 1055558 - RNA, 19 nt, Artificial Sequence
  Description of Artificial Sequence: Synthetic oligonucleotide
uuccgguaagcuuucuuga

SEQ ID NO: 1055559 - RNA, 19 nt, Artificial Sequence
  Description of Artificial Sequence: Synthetic oligonucleotide
uauggccuuuguguaauag

SEQ ID NO: 1055560 - RNA, 19 nt, Artificial Sequence
  Description of Artificial Sequence: Synthetic oligonucleotide
uguguacaguucauaugcu

SEQ ID NO: 1055561 - RNA, 19 nt, Artificial Sequence
  Description of Artificial Sequence: Synthetic oligonucleotide
aacaaccuuccggaaaucu

SEQ ID NO: 1055562 - RNA, 19 nt, Artificial Sequence
  Description of Artificial Sequence: Synthetic oligonucleotide
aguaugcguucccuuguuc

SEQ ID NO: 1055563 - RNA, 19 nt, Artificial Sequence
  Description of Artificial Sequence: Synthetic oligonucleotide
gauggugcaucaaggcccg

SEQ ID NO: 1055564 - RNA, 19 nt, Artificial Sequence
  Description of Artificial Sequence: Synthetic oligonucleotide
aguguggcugcucgauuac

SEQ ID NO: 1055565 - RNA, 19 nt, Artificial Sequence
  Description of Artificial Sequence: Synthetic oligonucleotide
cugcucuaaguacacgggg

SEQ ID NO: 1055566 - RNA, 19 nt, Artificial Sequence
  Description of Artificial Sequence: Synthetic oligonucleotide
ucuuagcauaguaugcguu

SEQ ID NO: 1055567 - RNA, 19 nt, Artificial Sequence
  Description of Artificial Sequence: Synthetic oligonucleotide
aaccguccaagcaucauca

SEQ ID NO: 1055568 - RNA, 19 nt, Artificial Sequence
  Description of Artificial Sequence: Synthetic oligonucleotide
uucuccgucugauacacuu

SEQ ID NO: 1055569 - RNA, 19 nt, Artificial Sequence
  Description of Artificial Sequence: Synthetic oligonucleotide
ucgcccauauucaugcccu

SEQ ID NO: 1055570 - RNA, 19 nt, Artificial Sequence
  Description of Artificial Sequence: Synthetic oligonucleotide
aaacugcucuaaguacacg

SEQ ID NO: 1055571 - RNA, 19 nt, Artificial Sequence
  Description of Artificial Sequence: Synthetic oligonucleotide
uggguucugaguaguugcc

SEQ ID NO: 1055572 - RNA, 19 nt, Artificial Sequence
  Description of Artificial Sequence: Synthetic oligonucleotide
cucgauuaccauaauagcu

SEQ ID NO: 1055573 - RNA, 19 nt, Artificial Sequence
  Description of Artificial Sequence: Synthetic oligonucleotide
acacagggcacccaacuga

SEQ ID NO: 1055574 - RNA, 19 nt, Artificial Sequence
  Description of Artificial Sequence: Synthetic oligonucleotide
augcuagcuuguaauuucc

SEQ ID NO: 1055575 - RNA, 19 nt, Artificial Sequence
  Description of Artificial Sequence: Synthetic oligonucleotide
uaugcguucccuuguuccu

SEQ ID NO: 1055576 - RNA, 19 nt, Artificial Sequence
  Description of Artificial Sequence: Synthetic oligonucleotide
uauguuguuagggucuauc

SEQ ID NO: 1055577 - RNA, 19 nt, Artificial Sequence
  Description of Artificial Sequence: Synthetic oligonucleotide
acacucaugguuaaacuga

SEQ ID NO: 1055578 - RNA, 19 nt, Artificial Sequence
  Description of Artificial Sequence: Synthetic oligonucleotide
aauccgauucugcuauuuu

SEQ ID NO: 1055579 - RNA, 19 nt, Artificial Sequence
  Description of Artificial Sequence: Synthetic oligonucleotide
cuucaccgcauuuguacag

SEQ ID NO: 1055580 - RNA, 19 nt, Artificial Sequence
  Description of Artificial Sequence: Synthetic oligonucleotide
guaauaguuauaagcuuca

SEQ ID NO: 1055581 - RNA, 19 nt, Artificial Sequence
  Description of Artificial Sequence: Synthetic oligonucleotide
uuaccauaauagcuagcau

SEQ ID NO: 1055582 - RNA, 19 nt, Artificial Sequence
  Description of Artificial Sequence: Synthetic oligonucleotide
uuugaagcgauggcaggca

SEQ ID NO: 1055583 - RNA, 19 nt, Artificial Sequence
  Description of Artificial Sequence: Synthetic oligonucleotide
ugcugcgcaucuccaagag

SEQ ID NO: 1055584 - RNA, 19 nt, Artificial Sequence
  Description of Artificial Sequence: Synthetic oligonucleotide
auauucaugcccuccucau

SEQ ID NO: 1055585 - RNA, 19 nt, Artificial Sequence
  Description of Artificial Sequence: Synthetic oligonucleotide
uagcauaguaugcguuccc

SEQ ID NO: 1055586 - RNA, 19 nt, Artificial Sequence
  Description of Artificial Sequence: Synthetic oligonucleotide
uucacggaggugaccccgg

SEQ ID NO: 1055587 - RNA, 19 nt, Artificial Sequence
  Description of Artificial Sequence: Synthetic oligonucleotide
acggcauuggcguucuuga

SEQ ID NO: 1055588 - RNA, 19 nt, Artificial Sequence
  Description of Artificial Sequence: Synthetic oligonucleotide
auggccuuuguguaauagu

SEQ ID NO: 1055589 - RNA, 19 nt, Artificial Sequence
  Description of Artificial Sequence: Synthetic oligonucleotide
acaaccuuccggaaaucuc

SEQ ID NO: 1055590 - RNA, 19 nt, Artificial Sequence
  Description of Artificial Sequence: Synthetic oligonucleotide
ggauggugcaucaaggccc

SEQ ID NO: 1055591 - RNA, 19 nt, Artificial Sequence
  Description of Artificial Sequence: Synthetic oligonucleotide
gguggcauuugccuucacg

SEQ ID NO: 1055592 - RNA, 19 nt, Artificial Sequence
  Description of Artificial Sequence: Synthetic oligonucleotide
ucugaguaguugcccuuca

SEQ ID NO: 1055593 - RNA, 19 nt, Artificial Sequence
  Description of Artificial Sequence: Synthetic oligonucleotide
ucgguccccgccauuacca

SEQ ID NO: 1055594 - RNA, 19 nt, Artificial Sequence
  Description of Artificial Sequence: Synthetic oligonucleotide
gaaaacgaaacugcucuaa

SEQ ID NO: 1055595 - RNA, 19 nt, Artificial Sequence
  Description of Artificial Sequence: Synthetic oligonucleotide
ccggacaaaacugucaucc

SEQ ID NO: 1055596 - RNA, 19 nt, Artificial Sequence
  Description of Artificial Sequence: Synthetic oligonucleotide
ugcccacugucauaacgag

SEQ ID NO: 1055597 - RNA, 19 nt, Artificial Sequence
  Description of Artificial Sequence: Synthetic oligonucleotide
cuucauuagccaaacugaa

SEQ ID NO: 1055598 - RNA, 19 nt, Artificial Sequence
  Description of Artificial Sequence: Synthetic oligonucleotide
aaacaaccuuccggaaauc

SEQ ID NO: 1055599 - RNA, 19 nt, Artificial Sequence
  Description of Artificial Sequence: Synthetic oligonucleotide
ucuucguccucuagcaguu

SEQ ID NO: 1055600 - RNA, 19 nt, Artificial Sequence
  Description of Artificial Sequence: Synthetic oligonucleotide
uuucuaagcuuggaauuaa

SEQ ID NO: 1055601 - RNA, 19 nt, Artificial Sequence
  Description of Artificial Sequence: Synthetic oligonucleotide
gaggaugguaaaggccucg

SEQ ID NO: 1055602 - RNA, 19 nt, Artificial Sequence
  Description of Artificial Sequence: Synthetic oligonucleotide
uacacggggacaugaugga

SEQ ID NO: 1055603 - RNA, 19 nt, Artificial Sequence
  Description of Artificial Sequence: Synthetic oligonucleotide
ugguggaauccauucguaa

SEQ ID NO: 1055604 - RNA, 19 nt, Artificial Sequence
  Description of Artificial Sequence: Synthetic oligonucleotide
ucguccucuagcaguucag

SEQ ID NO: 1055605 - RNA, 19 nt, Artificial Sequence
  Description of Artificial Sequence: Synthetic oligonucleotide
gauuaccauaauagcuagc

SEQ ID NO: 1055606 - RNA, 19 nt, Artificial Sequence
  Description of Artificial Sequence: Synthetic oligonucleotide
ucgucuaccccucggcuuc

SEQ ID NO: 1055607 - RNA, 19 nt, Artificial Sequence
  Description of Artificial Sequence: Synthetic oligonucleotide
uggcauuugccuucacgga

SEQ ID NO: 1055608 - RNA, 19 nt, Artificial Sequence
  Description of Artificial Sequence: Synthetic oligonucleotide
gcucgauuaccauaauagc

SEQ ID NO: 1055609 - RNA, 19 nt, Artificial Sequence
  Description of Artificial Sequence: Synthetic oligonucleotide
ugcuagcuuguaauuuccu

SEQ ID NO: 1055610 - RNA, 19 nt, Artificial Sequence
  Description of Artificial Sequence: Synthetic oligonucleotide
uauccccaaggcuucugug

SEQ ID NO: 1055611 - RNA, 19 nt, Artificial Sequence
  Description of Artificial Sequence: Synthetic oligonucleotide
uaccccgauuacaguagag

SEQ ID NO: 1055612 - RNA, 19 nt, Artificial Sequence
  Description of Artificial Sequence: Synthetic oligonucleotide
cauauucaugcccuccuca

SEQ ID NO: 1055613 - RNA, 19 nt, Artificial Sequence
  Description of Artificial Sequence: Synthetic oligonucleotide
cauugcuaaacauucugcu

SEQ ID NO: 1055614 - RNA, 19 nt, Artificial Sequence
  Description of Artificial Sequence: Synthetic oligonucleotide
aauuaaccguaccccgauu

SEQ ID NO: 1055615 - RNA, 19 nt, Artificial Sequence
  Description of Artificial Sequence: Synthetic oligonucleotide
uaaccguaccccgauuaca

SEQ ID NO: 1055616 - RNA, 19 nt, Artificial Sequence
  Description of Artificial Sequence: Synthetic oligonucleotide
cacccaacugagaaaacga

SEQ ID NO: 1055617 - RNA, 19 nt, Artificial Sequence
  Description of Artificial Sequence: Synthetic oligonucleotide
acucaugguuaaacugagc

SEQ ID NO: 1055618 - RNA, 19 nt, Artificial Sequence
  Description of Artificial Sequence: Synthetic oligonucleotide
uuuauguuguuagggucua

SEQ ID NO: 1055619 - RNA, 19 nt, Artificial Sequence
  Description of Artificial Sequence: Synthetic oligonucleotide
uucaccccacucauacaga

SEQ ID NO: 1055620 - RNA, 19 nt, Artificial Sequence
  Description of Artificial Sequence: Synthetic oligonucleotide
acacaagccuucucguggu

SEQ ID NO: 1055621 - RNA, 19 nt, Artificial Sequence
  Description of Artificial Sequence: Synthetic oligonucleotide
aucgacccagcauugcuaa

SEQ ID NO: 1055622 - RNA, 19 nt, Artificial Sequence
  Description of Artificial Sequence: Synthetic oligonucleotide
cuucacggaggugaccccg

SEQ ID NO: 1055623 - RNA, 19 nt, Artificial Sequence
  Description of Artificial Sequence: Synthetic oligonucleotide
uugguggaauccauucgua

SEQ ID NO: 1055624 - RNA, 19 nt, Artificial Sequence
  Description of Artificial Sequence: Synthetic oligonucleotide
acggggacaugauggagga

SEQ ID NO: 1055625 - RNA, 19 nt, Artificial Sequence
  Description of Artificial Sequence: Synthetic oligonucleotide
ugguuaaacugagcaaguc

SEQ ID NO: 1055626 - RNA, 19 nt, Artificial Sequence
  Description of Artificial Sequence: Synthetic oligonucleotide
auugcauucccaagugaga

SEQ ID NO: 1055627 - RNA, 19 nt, Artificial Sequence
  Description of Artificial Sequence: Synthetic oligonucleotide
uuuaagggcuuuggcauuu

SEQ ID NO: 1055628 - RNA, 19 nt, Artificial Sequence
  Description of Artificial Sequence: Synthetic oligonucleotide
cauuaccacaucgcacucc

SEQ ID NO: 1055629 - RNA, 19 nt, Artificial Sequence
  Description of Artificial Sequence: Synthetic oligonucleotide
cugugcguucuugaggagc

SEQ ID NO: 1055630 - RNA, 19 nt, Artificial Sequence
  Description of Artificial Sequence: Synthetic oligonucleotide
gugaccccggacaaaacug

SEQ ID NO: 1055631 - RNA, 19 nt, Artificial Sequence
  Description of Artificial Sequence: Synthetic oligonucleotide
uccgguaagcuuucuugau

SEQ ID NO: 1055632 - RNA, 19 nt, Artificial Sequence
  Description of Artificial Sequence: Synthetic oligonucleotide
agaaaacgaaacugcucua

SEQ ID NO: 1055633 - RNA, 19 nt, Artificial Sequence
  Description of Artificial Sequence: Synthetic oligonucleotide
cugccauugcauucccaag

SEQ ID NO: 1055634 - RNA, 19 nt, Artificial Sequence
  Description of Artificial Sequence: Synthetic oligonucleotide
uucaggcucgguccccgcc

SEQ ID NO: 1055635 - RNA, 19 nt, Artificial Sequence
  Description of Artificial Sequence: Synthetic oligonucleotide
ucccucgucuaccccucgg

SEQ ID NO: 1055636 - RNA, 19 nt, Artificial Sequence
  Description of Artificial Sequence: Synthetic oligonucleotide
uccggcaugcugccauugc

SEQ ID NO: 1055637 - RNA, 19 nt, Artificial Sequence
  Description of Artificial Sequence: Synthetic oligonucleotide
gguuaaacugagcaagucu

SEQ ID NO: 1055638 - RNA, 19 nt, Artificial Sequence
  Description of Artificial Sequence: Synthetic oligonucleotide
uaauaguuauaagcuucau

SEQ ID NO: 1055639 - RNA, 19 nt, Artificial Sequence
  Description of Artificial Sequence: Synthetic oligonucleotide
uccauguaacacugagcuc

SEQ ID NO: 1055640 - RNA, 19 nt, Artificial Sequence
  Description of Artificial Sequence: Synthetic oligonucleotide
aucgcacuccgcgguagcc

SEQ ID NO: 1055641 - RNA, 19 nt, Artificial Sequence
  Description of Artificial Sequence: Synthetic oligonucleotide
ugcguucccuuguuccuug

SEQ ID NO: 1055642 - RNA, 19 nt, Artificial Sequence
  Description of Artificial Sequence: Synthetic oligonucleotide
aggcuuuuauguagguguc

SEQ ID NO: 1055643 - RNA, 19 nt, Artificial Sequence
  Description of Artificial Sequence: Synthetic oligonucleotide
gcuucuucguccucuagca

SEQ ID NO: 1055644 - RNA, 19 nt, Artificial Sequence
  Description of Artificial Sequence: Synthetic oligonucleotide
guaguccuucuuagcauag

SEQ ID NO: 1055645 - RNA, 19 nt, Artificial Sequence
  Description of Artificial Sequence: Synthetic oligonucleotide
uucaccgcauuuguacagu

SEQ ID NO: 1055646 - RNA, 19 nt, Artificial Sequence
  Description of Artificial Sequence: Synthetic oligonucleotide
agcuuggaauuaaccguac

SEQ ID NO: 1055647 - RNA, 19 nt, Artificial Sequence
  Description of Artificial Sequence: Synthetic oligonucleotide
accccgauuacaguagagu

SEQ ID NO: 1055648 - RNA, 19 nt, Artificial Sequence
  Description of Artificial Sequence: Synthetic oligonucleotide
uucccggaaccguccaagc

SEQ ID NO: 1055649 - RNA, 19 nt, Artificial Sequence
  Description of Artificial Sequence: Synthetic oligonucleotide
acauaucuauggccuuugu

SEQ ID NO: 1055650 - RNA, 19 nt, Artificial Sequence
  Description of Artificial Sequence: Synthetic oligonucleotide
ggcaaauucuagggcacgg

SEQ ID NO: 1055651 - RNA, 19 nt, Artificial Sequence
  Description of Artificial Sequence: Synthetic oligonucleotide
gcauugcuaaacauucugc

SEQ ID NO: 1055652 - RNA, 19 nt, Artificial Sequence
  Description of Artificial Sequence: Synthetic oligonucleotide
caucuccaagagcuucccg

SEQ ID NO: 1055653 - RNA, 19 nt, Artificial Sequence
  Description of Artificial Sequence: Synthetic oligonucleotide
gaauuaaccguaccccgau

SEQ ID NO: 1055654 - RNA, 19 nt, Artificial Sequence
  Description of Artificial Sequence: Synthetic oligonucleotide
cuucccggaaccguccaag

SEQ ID NO: 1055655 - RNA, 19 nt, Artificial Sequence
  Description of Artificial Sequence: Synthetic oligonucleotide
uucuggaccucggcacugg

SEQ ID NO: 1055656 - RNA, 19 nt, Artificial Sequence
  Description of Artificial Sequence: Synthetic oligonucleotide
ucgcacuccgcgguagccg

SEQ ID NO: 1055657 - RNA, 19 nt, Artificial Sequence
  Description of Artificial Sequence: Synthetic oligonucleotide
gcauuugccuucacggagg

SEQ ID NO: 1055658 - RNA, 19 nt, Artificial Sequence
  Description of Artificial Sequence: Synthetic oligonucleotide
accguccacacucaugguu

SEQ ID NO: 1055659 - RNA, 19 nt, Artificial Sequence
  Description of Artificial Sequence: Synthetic oligonucleotide
uugaaggauucugccuccc

SEQ ID NO: 1055660 - RNA, 19 nt, Artificial Sequence
  Description of Artificial Sequence: Synthetic oligonucleotide
ucauagucccgcacagcuu

SEQ ID NO: 1055661 - RNA, 19 nt, Artificial Sequence
  Description of Artificial Sequence: Synthetic oligonucleotide
ucaccgcauuuguacaguc

SEQ ID NO: 1055662 - RNA, 19 nt, Artificial Sequence
  Description of Artificial Sequence: Synthetic oligonucleotide
cacauaucuauggccuuug

SEQ ID NO: 1055663 - RNA, 19 nt, Artificial Sequence
  Description of Artificial Sequence: Synthetic oligonucleotide
aagaccccggacauacaga

SEQ ID NO: 1055664 - RNA, 19 nt, Artificial Sequence
  Description of Artificial Sequence: Synthetic oligonucleotide
ccugcccacugucauaacg

SEQ ID NO: 1055665 - RNA, 19 nt, Artificial Sequence
  Description of Artificial Sequence: Synthetic oligonucleotide
acaagccuucucgugguca

SEQ ID NO: 1055666 - RNA, 19 nt, Artificial Sequence
  Description of Artificial Sequence: Synthetic oligonucleotide
gccauugcauucccaagug

SEQ ID NO: 1055667 - RNA, 19 nt, Artificial Sequence
  Description of Artificial Sequence: Synthetic oligonucleotide
uaguaugcguucccuuguu

SEQ ID NO: 1055668 - RNA, 19 nt, Artificial Sequence
  Description of Artificial Sequence: Synthetic oligonucleotide
ucuccgucugauacacuuu

SEQ ID NO: 1055669 - RNA, 19 nt, Artificial Sequence
  Description of Artificial Sequence: Synthetic oligonucleotide
gcucuaaguacacggggac

SEQ ID NO: 1055670 - RNA, 19 nt, Artificial Sequence
  Description of Artificial Sequence: Synthetic oligonucleotide
aaggcccgcuuccgguaag

SEQ ID NO: 1055671 - RNA, 19 nt, Artificial Sequence
  Description of Artificial Sequence: Synthetic oligonucleotide
cuaguuuucuaagcuugga

SEQ ID NO: 1055672 - RNA, 19 nt, Artificial Sequence
  Description of Artificial Sequence: Synthetic oligonucleotide
cgauuaccauaauagcuag

SEQ ID NO: 1055673 - RNA, 19 nt, Artificial Sequence
  Description of Artificial Sequence: Synthetic oligonucleotide
cucgguccccgccauuacc

SEQ ID NO: 1055674 - RNA, 19 nt, Artificial Sequence
  Description of Artificial Sequence: Synthetic oligonucleotide
aaccuuccggaaaucucgu

SEQ ID NO: 1055675 - RNA, 19 nt, Artificial Sequence
  Description of Artificial Sequence: Synthetic oligonucleotide
uuaccacaucgcacuccgc

SEQ ID NO: 1055676 - RNA, 19 nt, Artificial Sequence
  Description of Artificial Sequence: Synthetic oligonucleotide
gcuuggaauuaaccguacc

SEQ ID NO: 1055677 - RNA, 19 nt, Artificial Sequence
  Description of Artificial Sequence: Synthetic oligonucleotide
aaccguccacacucauggu

SEQ ID NO: 1055678 - RNA, 19 nt, Artificial Sequence
  Description of Artificial Sequence: Synthetic oligonucleotide
caugacggcauuggcguuc

SEQ ID NO: 1055679 - RNA, 19 nt, Artificial Sequence
  Description of Artificial Sequence: Synthetic oligonucleotide
accguccaagcaucaucag

SEQ ID NO: 1055680 - RNA, 19 nt, Artificial Sequence
  Description of Artificial Sequence: Synthetic oligonucleotide
uggugcaucaaggcccgcu

SEQ ID NO: 1055681 - RNA, 19 nt, Artificial Sequence
  Description of Artificial Sequence: Synthetic oligonucleotide
ggcguucuugaacuccugc

SEQ ID NO: 1055682 - RNA, 19 nt, Artificial Sequence
  Description of Artificial Sequence: Synthetic oligonucleotide
uguuagggucuauccccaa

SEQ ID NO: 1055683 - RNA, 19 nt, Artificial Sequence
  Description of Artificial Sequence: Synthetic oligonucleotide
cucuggguaucgacccagc

SEQ ID NO: 1055684 - RNA, 19 nt, Artificial Sequence
  Description of Artificial Sequence: Synthetic oligonucleotide
cauacagagcaucagcauu

SEQ ID NO: 1055685 - RNA, 19 nt, Artificial Sequence
  Description of Artificial Sequence: Synthetic oligonucleotide
gugccucuggguaucgacc

SEQ ID NO: 1055686 - RNA, 19 nt, Artificial Sequence
  Description of Artificial Sequence: Synthetic oligonucleotide
aucaguguggcugcucgau

SEQ ID NO: 1055687 - RNA, 19 nt, Artificial Sequence
  Description of Artificial Sequence: Synthetic oligonucleotide
ggaggugaaccguccacac

SEQ ID NO: 1055688 - RNA, 19 nt, Artificial Sequence
  Description of Artificial Sequence: Synthetic oligonucleotide
aaguacacggggacaugau

SEQ ID NO: 1055689 - RNA, 19 nt, Artificial Sequence
  Description of Artificial Sequence: Synthetic oligonucleotide
gccuucacggaggugaccc

SEQ ID NO: 1055690 - RNA, 19 nt, Artificial Sequence
  Description of Artificial Sequence: Synthetic oligonucleotide
gggcucuuuggaaacuccg

SEQ ID NO: 1055691 - RNA, 19 nt, Artificial Sequence
  Description of Artificial Sequence: Synthetic oligonucleotide
cugcuuugaggauuuugaa

SEQ ID NO: 1055692 - RNA, 19 nt, Artificial Sequence
  Description of Artificial Sequence: Synthetic oligonucleotide
cccgccauuaccacaucgc

SEQ ID NO: 1055693 - RNA, 19 nt, Artificial Sequence
  Description of Artificial Sequence: Synthetic oligonucleotide
cuaccccucggcuucccuc

SEQ ID NO: 1055694 - RNA, 19 nt, Artificial Sequence
  Description of Artificial Sequence: Synthetic oligonucleotide
ucuaccccucggcuucccu

SEQ ID NO: 1055695 - RNA, 19 nt, Artificial Sequence
  Description of Artificial Sequence: Synthetic oligonucleotide
cacgguccaugcagaaaac

SEQ ID NO: 1055696 - RNA, 19 nt, Artificial Sequence
  Description of Artificial Sequence: Synthetic oligonucleotide
acgguccaugcagaaaaca

SEQ ID NO: 1055697 - RNA, 19 nt, Artificial Sequence
  Description of Artificial Sequence: Synthetic oligonucleotide
acccagcauugcuaaacau

SEQ ID NO: 1055698 - RNA, 19 nt, Artificial Sequence
  Description of Artificial Sequence: Synthetic oligonucleotide
ggaauuaaccguaccccga

SEQ ID NO: 1055699 - RNA, 19 nt, Artificial Sequence
  Description of Artificial Sequence: Synthetic oligonucleotide
cuugaggagcuguuugugu

SEQ ID NO: 1055700 - RNA, 19 nt, Artificial Sequence
  Description of Artificial Sequence: Synthetic oligonucleotide
acaucgcacuccgcgguag

SEQ ID NO: 1055701 - RNA, 19 nt, Artificial Sequence
  Description of Artificial Sequence: Synthetic oligonucleotide
agggcacccaacugagaaa

SEQ ID NO: 1055702 - RNA, 19 nt, Artificial Sequence
  Description of Artificial Sequence: Synthetic oligonucleotide
accguaccccgauuacagu

SEQ ID NO: 1055703 - RNA, 19 nt, Artificial Sequence
  Description of Artificial Sequence: Synthetic oligonucleotide
auguaacacugagcucuuc

SEQ ID NO: 1055704 - RNA, 19 nt, Artificial Sequence
  Description of Artificial Sequence: Synthetic oligonucleotide
ugccucucccucgucuacc

SEQ ID NO: 1055705 - RNA, 19 nt, Artificial Sequence
  Description of Artificial Sequence: Synthetic oligonucleotide
cucgcccacuuccuugaac

SEQ ID NO: 1055706 - RNA, 19 nt, Artificial Sequence
  Description of Artificial Sequence: Synthetic oligonucleotide
gcuucaccgcauuuguaca

SEQ ID NO: 1055707 - RNA, 19 nt, Artificial Sequence
  Description of Artificial Sequence: Synthetic oligonucleotide
acccaacugagaaaacgaa

SEQ ID NO: 1055708 - RNA, 19 nt, Artificial Sequence
  Description of Artificial Sequence: Synthetic oligonucleotide
caucgcacuccgcgguagc

SEQ ID NO: 1055709 - RNA, 19 nt, Artificial Sequence
  Description of Artificial Sequence: Synthetic oligonucleotide
cucuaaguacacggggaca

SEQ ID NO: 1055710 - RNA, 19 nt, Artificial Sequence
  Description of Artificial Sequence: Synthetic oligonucleotide
guaccccgauuacaguaga

SEQ ID NO: 1055711 - RNA, 19 nt, Artificial Sequence
  Description of Artificial Sequence: Synthetic oligonucleotide
caccgcauuuguacaguca

SEQ ID NO: 1055712 - RNA, 19 nt, Artificial Sequence
  Description of Artificial Sequence: Synthetic oligonucleotide
acugugccucuggguaucg

SEQ ID NO: 1055713 - RNA, 19 nt, Artificial Sequence
  Description of Artificial Sequence: Synthetic oligonucleotide
aggcccgcuuccgguaagc

SEQ ID NO: 1055714 - RNA, 19 nt, Artificial Sequence
  Description of Artificial Sequence: Synthetic oligonucleotide
acaugauggaggaggugaa

SEQ ID NO: 1055715 - RNA, 19 nt, Artificial Sequence
  Description of Artificial Sequence: Synthetic oligonucleotide
cguaccccgauuacaguag

SEQ ID NO: 1055716 - RNA, 19 nt, Artificial Sequence
  Description of Artificial Sequence: Synthetic oligonucleotide
guucauaugcuagcuugua

SEQ ID NO: 1055717 - RNA, 19 nt, Artificial Sequence
  Description of Artificial Sequence: Synthetic oligonucleotide
gggcaaauucuagggcacg

SEQ ID NO: 1055718 - RNA, 19 nt, Artificial Sequence
  Description of Artificial Sequence: Synthetic oligonucleotide
uccaguucuagggcucuuu

SEQ ID NO: 1055719 - RNA, 19 nt, Artificial Sequence
  Description of Artificial Sequence: Synthetic oligonucleotide
agcuucccggaaccgucca

SEQ ID NO: 1055720 - RNA, 19 nt, Artificial Sequence
  Description of Artificial Sequence: Synthetic oligonucleotide
cuucuggaccucggcacug

SEQ ID NO: 1055721 - RNA, 19 nt, Artificial Sequence
  Description of Artificial Sequence: Synthetic oligonucleotide
caaaacugucauccagucu

SEQ ID NO: 1055722 - RNA, 19 nt, Artificial Sequence
  Description of Artificial Sequence: Synthetic oligonucleotide
ggugaccccggacaaaacu

SEQ ID NO: 1055723 - RNA, 19 nt, Artificial Sequence
  Description of Artificial Sequence: Synthetic oligonucleotide
uucucguggucaggagcca

SEQ ID NO: 1055724 - RNA, 19 nt, Artificial Sequence
  Description of Artificial Sequence: Synthetic oligonucleotide
gcaucaaggcccgcuuccg

SEQ ID NO: 1055725 - RNA, 19 nt, Artificial Sequence
  Description of Artificial Sequence: Synthetic oligonucleotide
cugcucgauuaccauaaua

SEQ ID NO: 1055726 - RNA, 19 nt, Artificial Sequence
  Description of Artificial Sequence: Synthetic oligonucleotide
augacggcauuggcguucu

SEQ ID NO: 1055727 - RNA, 19 nt, Artificial Sequence
  Description of Artificial Sequence: Synthetic oligonucleotide
ccaguucuagggcucuuug

SEQ ID NO: 1055728 - RNA, 19 nt, Artificial Sequence
  Description of Artificial Sequence: Synthetic oligonucleotide
ggcugcucgauuaccauaa

SEQ ID NO: 1055729 - RNA, 19 nt, Artificial Sequence
  Description of Artificial Sequence: Synthetic oligonucleotide
gaggugaaccguccacacu

SEQ ID NO: 1055730 - RNA, 19 nt, Artificial Sequence
  Description of Artificial Sequence: Synthetic oligonucleotide
ccgguaagcuuucuugauc

SEQ ID NO: 1055731 - RNA, 19 nt, Artificial Sequence
  Description of Artificial Sequence: Synthetic oligonucleotide
ucucguggucaggagccau

SEQ ID NO: 1055732 - RNA, 19 nt, Artificial Sequence
  Description of Artificial Sequence: Synthetic oligonucleotide
ggggcaaauucuagggcac

SEQ ID NO: 1055733 - RNA, 19 nt, Artificial Sequence
  Description of Artificial Sequence: Synthetic oligonucleotide
gaccccggacaaaacuguc

SEQ ID NO: 1055734 - RNA, 19 nt, Artificial Sequence
  Description of Artificial Sequence: Synthetic oligonucleotide
ccgauuacaguagaguuua

SEQ ID NO: 1055735 - RNA, 19 nt, Artificial Sequence
  Description of Artificial Sequence: Synthetic oligonucleotide
ccgauucugcuauuuucuc

SEQ ID NO: 1055736 - RNA, 19 nt, Artificial Sequence
  Description of Artificial Sequence: Synthetic oligonucleotide
cuggguaucgacccagcau

SEQ ID NO: 1055737 - RNA, 19 nt, Artificial Sequence
  Description of Artificial Sequence: Synthetic oligonucleotide
caucaguguggcugcucga

SEQ ID NO: 1055738 - RNA, 19 nt, Artificial Sequence
  Description of Artificial Sequence: Synthetic oligonucleotide
uccugagagccugcacaaa

SEQ ID NO: 1055739 - RNA, 19 nt, Artificial Sequence
  Description of Artificial Sequence: Synthetic oligonucleotide
ccauauucaugcccuccuc

SEQ ID NO: 1055740 - RNA, 19 nt, Artificial Sequence
  Description of Artificial Sequence: Synthetic oligonucleotide
gggucuauccccaaggcuu

SEQ ID NO: 1055741 - RNA, 19 nt, Artificial Sequence
  Description of Artificial Sequence: Synthetic oligonucleotide
cagcgcuggcucccuuucc

SEQ ID NO: 1055742 - RNA, 19 nt, Artificial Sequence
  Description of Artificial Sequence: Synthetic oligonucleotide
guaaaggccucgcccacuu

SEQ ID NO: 1055743 - RNA, 19 nt, Artificial Sequence
  Description of Artificial Sequence: Synthetic oligonucleotide
caaagaccccggacauaca

SEQ ID NO: 1055744 - RNA, 19 nt, Artificial Sequence
  Description of Artificial Sequence: Synthetic oligonucleotide
cgccauuaccacaucgcac

SEQ ID NO: 1055745 - RNA, 19 nt, Artificial Sequence
  Description of Artificial Sequence: Synthetic oligonucleotide
ccccgccauuaccacaucg

SEQ ID NO: 1055746 - RNA, 19 nt, Artificial Sequence
  Description of Artificial Sequence: Synthetic oligonucleotide
auggugcaucaaggcccgc

SEQ ID NO: 1055747 - RNA, 19 nt, Artificial Sequence
  Description of Artificial Sequence: Synthetic oligonucleotide
ggguaucgacccagcauug

SEQ ID NO: 1055748 - RNA, 19 nt, Artificial Sequence
  Description of Artificial Sequence: Synthetic oligonucleotide
ccggaaccguccaagcauc

SEQ ID NO: 1055749 - RNA, 19 nt, Artificial Sequence
  Description of Artificial Sequence: Synthetic oligonucleotide
auagucccgcacagcuucu

SEQ ID NO: 1055750 - RNA, 19 nt, Artificial Sequence
  Description of Artificial Sequence: Synthetic oligonucleotide
caagcaacacaagccuucu

SEQ ID NO: 1055751 - RNA, 19 nt, Artificial Sequence
  Description of Artificial Sequence: Synthetic oligonucleotide
augcguucccuuguuccuu

SEQ ID NO: 1055752 - RNA, 19 nt, Artificial Sequence
  Description of Artificial Sequence: Synthetic oligonucleotide
gaaauucccugggccagau

SEQ ID NO: 1055753 - RNA, 19 nt, Artificial Sequence
  Description of Artificial Sequence: Synthetic oligonucleotide
cuccgucugauacacuuuu

SEQ ID NO: 1055754 - RNA, 19 nt, Artificial Sequence
  Description of Artificial Sequence: Synthetic oligonucleotide
cgacccagcauugcuaaac

SEQ ID NO: 1055755 - RNA, 19 nt, Artificial Sequence
  Description of Artificial Sequence: Synthetic oligonucleotide
gcugugcguucuugaggag

SEQ ID NO: 1055756 - RNA, 19 nt, Artificial Sequence
  Description of Artificial Sequence: Synthetic oligonucleotide
cauuugccuucacggaggu

SEQ ID NO: 1055757 - RNA, 19 nt, Artificial Sequence
  Description of Artificial Sequence: Synthetic oligonucleotide
ccuucacggaggugacccc

SEQ ID NO: 1055758 - RNA, 19 nt, Artificial Sequence
  Description of Artificial Sequence: Synthetic oligonucleotide
cgguaagcuuucuugaucu

SEQ ID NO: 1055759 - RNA, 19 nt, Artificial Sequence
  Description of Artificial Sequence: Synthetic oligonucleotide
ggugaaccguccacacuca

SEQ ID NO: 1055760 - RNA, 19 nt, Artificial Sequence
  Description of Artificial Sequence: Synthetic oligonucleotide
caaggcccgcuuccgguaa

SEQ ID NO: 1055761 - RNA, 19 nt, Artificial Sequence
  Description of Artificial Sequence: Synthetic oligonucleotide
ccguaccccgauuacagua

SEQ ID NO: 1055762 - RNA, 19 nt, Artificial Sequence
  Description of Artificial Sequence: Synthetic oligonucleotide
cgcacuccgcgguagccgc

SEQ ID NO: 1055763 - RNA, 19 nt, Artificial Sequence
  Description of Artificial Sequence: Synthetic oligonucleotide
cucgucuaccccucggcuu

SEQ ID NO: 1055764 - RNA, 19 nt, Artificial Sequence
  Description of Artificial Sequence: Synthetic oligonucleotide
uccccgccauuaccacauc

SEQ ID NO: 1055765 - RNA, 19 nt, Artificial Sequence
  Description of Artificial Sequence: Synthetic oligonucleotide
gcgcaucuccaagagcuuc

SEQ ID NO: 1055766 - RNA, 19 nt, Artificial Sequence
  Description of Artificial Sequence: Synthetic oligonucleotide
cccggacauacagagcauc

SEQ ID NO: 1055767 - RNA, 19 nt, Artificial Sequence
  Description of Artificial Sequence: Synthetic oligonucleotide
cgauuacaguagaguuuag

SEQ ID NO: 1055768 - RNA, 19 nt, Artificial Sequence
  Description of Artificial Sequence: Synthetic oligonucleotide
cccggacaaaacugucauc

SEQ ID NO: 1055769 - RNA, 19 nt, Artificial Sequence
  Description of Artificial Sequence: Synthetic oligonucleotide
cacaucgcacuccgcggua

SEQ ID NO: 1055770 - RNA, 19 nt, Artificial Sequence
  Description of Artificial Sequence: Synthetic oligonucleotide
ggugcaucaaggcccgcuu

SEQ ID NO: 1055771 - RNA, 19 nt, Artificial Sequence
  Description of Artificial Sequence: Synthetic oligonucleotide
cuccgcgguagccgccauc

SEQ ID NO: 1055772 - RNA, 19 nt, Artificial Sequence
  Description of Artificial Sequence: Synthetic oligonucleotide
cgaucuggauggugcauca

SEQ ID NO: 1055773 - RNA, 19 nt, Artificial Sequence
  Description of Artificial Sequence: Synthetic oligonucleotide
gcauaguaugcguucccuu

SEQ ID NO: 1055774 - RNA, 19 nt, Artificial Sequence
  Description of Artificial Sequence: Synthetic oligonucleotide
ccggcaugcugccauugca

SEQ ID NO: 1055775 - RNA, 19 nt, Artificial Sequence
  Description of Artificial Sequence: Synthetic oligonucleotide
cccgauuacaguagaguuu

SEQ ID NO: 1055776 - RNA, 19 nt, Artificial Sequence
  Description of Artificial Sequence: Synthetic oligonucleotide
gugaaccguccacacucau

SEQ ID NO: 1055777 - RNA, 19 nt, Artificial Sequence
  Description of Artificial Sequence: Synthetic oligonucleotide
ggcacccaacugagaaaac

SEQ ID NO: 1055778 - RNA, 19 nt, Artificial Sequence
  Description of Artificial Sequence: Synthetic oligonucleotide
ccccgauuacaguagaguu

SEQ ID NO: 1055779 - RNA, 19 nt, Artificial Sequence
  Description of Artificial Sequence: Synthetic oligonucleotide
cacuccgcgguagccgcca

SEQ ID NO: 1055780 - RNA, 19 nt, Artificial Sequence
  Description of Artificial Sequence: Synthetic oligonucleotide
gcucgguccccgccauuac

SEQ ID NO: 1055781 - RNA, 19 nt, Artificial Sequence
  Description of Artificial Sequence: Synthetic oligonucleotide
ggcacgguccaugcagaaa

SEQ ID NO: 1055782 - RNA, 19 nt, Artificial Sequence
  Description of Artificial Sequence: Synthetic oligonucleotide
gccucuggguaucgaccca

SEQ ID NO: 1055783 - RNA, 19 nt, Artificial Sequence
  Description of Artificial Sequence: Synthetic oligonucleotide
gguaaaggccucgcccacu

SEQ ID NO: 1055784 - RNA, 19 nt, Artificial Sequence
  Description of Artificial Sequence: Synthetic oligonucleotide
cccggaaccguccaagcau

SEQ ID NO: 1055785 - RNA, 19 nt, Artificial Sequence
  Description of Artificial Sequence: Synthetic oligonucleotide
ccguccaagcaucaucagu

SEQ ID NO: 1055786 - RNA, 19 nt, Artificial Sequence
  Description of Artificial Sequence: Synthetic oligonucleotide
cgcuggcucccuuuccuuc

SEQ ID NO: 1055787 - RNA, 19 nt, Artificial Sequence
  Description of Artificial Sequence: Synthetic oligonucleotide
gucuauccccaaggcuucu

SEQ ID NO: 1055788 - RNA, 19 nt, Artificial Sequence
  Description of Artificial Sequence: Synthetic oligonucleotide
ggcaaagaccccggacaua

SEQ ID NO: 1055789 - RNA, 19 nt, Artificial Sequence
  Description of Artificial Sequence: Synthetic oligonucleotide
ccccggacaaaacugucau

SEQ ID NO: 1055790 - RNA, 19 nt, Artificial Sequence
  Description of Artificial Sequence: Synthetic oligonucleotide
ccgcuuccgguaagcuuuc

SEQ ID NO: 1055791 - RNA, 19 nt, Artificial Sequence
  Description of Artificial Sequence: Synthetic oligonucleotide
ccacaucgcacuccgcggu

SEQ ID NO: 1055792 - RNA, 19 nt, Artificial Sequence
  Description of Artificial Sequence: Synthetic oligonucleotide
gccccacugugccgaucug

SEQ ID NO: 1055793 - RNA, 19 nt, Artificial Sequence
  Description of Artificial Sequence: Synthetic oligonucleotide
gcccacugucauaacgagu

SEQ ID NO: 1055794 - RNA, 19 nt, Artificial Sequence
  Description of Artificial Sequence: Synthetic oligonucleotide
ccucgucuaccccucggcu

SEQ ID NO: 1055795 - RNA, 19 nt, Artificial Sequence
  Description of Artificial Sequence: Synthetic oligonucleotide
gcacuccgcgguagccgcc

SEQ ID NO: 1055796 - RNA, 19 nt, Artificial Sequence
  Description of Artificial Sequence: Synthetic oligonucleotide
cggaaccguccaagcauca

SEQ ID NO: 1055797 - RNA, 19 nt, Artificial Sequence
  Description of Artificial Sequence: Synthetic oligonucleotide
gcugcucgauuaccauaau

SEQ ID NO: 1055798 - RNA, 19 nt, Artificial Sequence
  Description of Artificial Sequence: Synthetic oligonucleotide
gcccuucauuagccaaacu

SEQ ID NO: 1055799 - RNA, 19 nt, Artificial Sequence
  Description of Artificial Sequence: Synthetic oligonucleotide
gcccgcuuccgguaagcuu

SEQ ID NO: 1055800 - RNA, 19 nt, Artificial Sequence
  Description of Artificial Sequence: Synthetic oligonucleotide
cccgcacagcuucuucaua

SEQ ID NO: 1055801 - RNA, 19 nt, Artificial Sequence
  Description of Artificial Sequence: Synthetic oligonucleotide
cggcaugcugccauugcau

SEQ ID NO: 1055802 - RNA, 19 nt, Artificial Sequence
  Description of Artificial Sequence: Synthetic oligonucleotide
gccgaucuggauggugcau

SEQ ID NO: 1055803 - RNA, 19 nt, Artificial Sequence
  Description of Artificial Sequence: Synthetic oligonucleotide
ggcccgcuuccgguaagcu

SEQ ID NO: 1055804 - RNA, 19 nt, Artificial Sequence
  Description of Artificial Sequence: Synthetic oligonucleotide
cugugccgaucuggauggu

SEQ ID NO: 1055805 - RNA, 19 nt, Artificial Sequence
  Description of Artificial Sequence: Synthetic oligonucleotide
ccccggacauacagagcau

SEQ ID NO: 1055806 - RNA, 19 nt, Artificial Sequence
  Description of Artificial Sequence: Synthetic oligonucleotide
ccaugacggcauuggcguu

SEQ ID NO: 1055807 - RNA, 19 nt, Artificial Sequence
  Description of Artificial Sequence: Synthetic oligonucleotide
uuauguagagcuaagacgg

SEQ ID NO: 1055808 - RNA, 19 nt, Artificial Sequence
  Description of Artificial Sequence: Synthetic oligonucleotide
aauugagcgaaucuugagc

SEQ ID NO: 1055809 - RNA, 19 nt, Artificial Sequence
  Description of Artificial Sequence: Synthetic oligonucleotide
uuaauuuuccuuuugguag

SEQ ID NO: 1055810 - RNA, 19 nt, Artificial Sequence
  Description of Artificial Sequence: Synthetic oligonucleotide
aagguaauaauguuggucu

SEQ ID NO: 1055811 - RNA, 19 nt, Artificial Sequence
  Description of Artificial Sequence: Synthetic oligonucleotide
aaacuugucauuuauacua

SEQ ID NO: 1055812 - RNA, 19 nt, Artificial Sequence
  Description of Artificial Sequence: Synthetic oligonucleotide
auuaacugcacuuucuuag

SEQ ID NO: 1055813 - RNA, 19 nt, Artificial Sequence
  Description of Artificial Sequence: Synthetic oligonucleotide
aaaucaauguguucugguc

SEQ ID NO: 1055814 - RNA, 19 nt, Artificial Sequence
  Description of Artificial Sequence: Synthetic oligonucleotide
gauguucuaacucacuccg

SEQ ID NO: 1055815 - RNA, 19 nt, Artificial Sequence
  Description of Artificial Sequence: Synthetic oligonucleotide
aaagguaauaauguugguc

SEQ ID NO: 1055816 - RNA, 19 nt, Artificial Sequence
  Description of Artificial Sequence: Synthetic oligonucleotide
auuugaauaagcccgagcu

SEQ ID NO: 1055817 - RNA, 19 nt, Artificial Sequence
  Description of Artificial Sequence: Synthetic oligonucleotide
ucugucguggucaauaaag

SEQ ID NO: 1055818 - RNA, 19 nt, Artificial Sequence
  Description of Artificial Sequence: Synthetic oligonucleotide
uaaaugaaggaacuguuga

SEQ ID NO: 1055819 - RNA, 19 nt, Artificial Sequence
  Description of Artificial Sequence: Synthetic oligonucleotide
ugacacuucguuuaucucg

SEQ ID NO: 1055820 - RNA, 19 nt, Artificial Sequence
  Description of Artificial Sequence: Synthetic oligonucleotide
cugucaauacacaagauac

SEQ ID NO: 1055821 - RNA, 19 nt, Artificial Sequence
  Description of Artificial Sequence: Synthetic oligonucleotide
aaaguugucauuugacucu

SEQ ID NO: 1055822 - RNA, 19 nt, Artificial Sequence
  Description of Artificial Sequence: Synthetic oligonucleotide
uguguauccagaaagguau

SEQ ID NO: 1055823 - RNA, 19 nt, Artificial Sequence
  Description of Artificial Sequence: Synthetic oligonucleotide
uuaggauagauauuguaga

SEQ ID NO: 1055824 - RNA, 19 nt, Artificial Sequence
  Description of Artificial Sequence: Synthetic oligonucleotide
agauguucuaacucacucc

SEQ ID NO: 1055825 - RNA, 19 nt, Artificial Sequence
  Description of Artificial Sequence: Synthetic oligonucleotide
uccugauuaaguuuuagcu

SEQ ID NO: 1055826 - RNA, 19 nt, Artificial Sequence
  Description of Artificial Sequence: Synthetic oligonucleotide
aaagugcguucucugaugg

SEQ ID NO: 1055827 - RNA, 19 nt, Artificial Sequence
  Description of Artificial Sequence: Synthetic oligonucleotide
uguagagcuaagacggugg

SEQ ID NO: 1055828 - RNA, 19 nt, Artificial Sequence
  Description of Artificial Sequence: Synthetic oligonucleotide
ucuguauuaagacauuauc

SEQ ID NO: 1055829 - RNA, 19 nt, Artificial Sequence
  Description of Artificial Sequence: Synthetic oligonucleotide
aauacagcgguauucugga

SEQ ID NO: 1055830 - RNA, 19 nt, Artificial Sequence
  Description of Artificial Sequence: Synthetic oligonucleotide
acauuagugccuuugaacu

SEQ ID NO: 1055831 - RNA, 19 nt, Artificial Sequence
  Description of Artificial Sequence: Synthetic oligonucleotide
ugaaaguaaaauguugcag

SEQ ID NO: 1055832 - RNA, 19 nt, Artificial Sequence
  Description of Artificial Sequence: Synthetic oligonucleotide
aaaguucguauuucccucg

SEQ ID NO: 1055833 - RNA, 19 nt, Artificial Sequence
  Description of Artificial Sequence: Synthetic oligonucleotide
ucuuguacucuucuuguag

SEQ ID NO: 1055834 - RNA, 19 nt, Artificial Sequence
  Description of Artificial Sequence: Synthetic oligonucleotide
uucaauugagcgaaucuug

SEQ ID NO: 1055835 - RNA, 19 nt, Artificial Sequence
  Description of Artificial Sequence: Synthetic oligonucleotide
uguauuggcuuggauaugg

SEQ ID NO: 1055836 - RNA, 19 nt, Artificial Sequence
  Description of Artificial Sequence: Synthetic oligonucleotide
uucgagauaaccuuuccac

SEQ ID NO: 1055837 - RNA, 19 nt, Artificial Sequence
  Description of Artificial Sequence: Synthetic oligonucleotide
cuuggcaccgauaaguggc

SEQ ID NO: 1055838 - RNA, 19 nt, Artificial Sequence
  Description of Artificial Sequence: Synthetic oligonucleotide
uaccuuaaacugcagaugu

SEQ ID NO: 1055839 - RNA, 19 nt, Artificial Sequence
  Description of Artificial Sequence: Synthetic oligonucleotide
uuuuccuacacaaccgccc

SEQ ID NO: 1055840 - RNA, 19 nt, Artificial Sequence
  Description of Artificial Sequence: Synthetic oligonucleotide
uuuaucucguaugauaugu

SEQ ID NO: 1055841 - RNA, 19 nt, Artificial Sequence
  Description of Artificial Sequence: Synthetic oligonucleotide
auugagcgaaucuugagcu

SEQ ID NO: 1055842 - RNA, 19 nt, Artificial Sequence
  Description of Artificial Sequence: Synthetic oligonucleotide
ucugauggagggauagagg

SEQ ID NO: 1055843 - RNA, 19 nt, Artificial Sequence
  Description of Artificial Sequence: Synthetic oligonucleotide
ucucguaugauauguugag

SEQ ID NO: 1055844 - RNA, 19 nt, Artificial Sequence
  Description of Artificial Sequence: Synthetic oligonucleotide
uuuauacuaaaugaaggaa

SEQ ID NO: 1055845 - RNA, 19 nt, Artificial Sequence
  Description of Artificial Sequence: Synthetic oligonucleotide
ucacucuguauuaagacau

SEQ ID NO: 1055846 - RNA, 19 nt, Artificial Sequence
  Description of Artificial Sequence: Synthetic oligonucleotide
ucuaacucacuccguaaag

SEQ ID NO: 1055847 - RNA, 19 nt, Artificial Sequence
  Description of Artificial Sequence: Synthetic oligonucleotide
uugagauuaauuuuccuuu

SEQ ID NO: 1055848 - RNA, 19 nt, Artificial Sequence
  Description of Artificial Sequence: Synthetic oligonucleotide
ucaauuaacugcacuuucu

SEQ ID NO: 1055849 - RNA, 19 nt, Artificial Sequence
  Description of Artificial Sequence: Synthetic oligonucleotide
aguaccuuaaacugcagau

SEQ ID NO: 1055850 - RNA, 19 nt, Artificial Sequence
  Description of Artificial Sequence: Synthetic oligonucleotide
ugauacuccagcuuugggu

SEQ ID NO: 1055851 - RNA, 19 nt, Artificial Sequence
  Description of Artificial Sequence: Synthetic oligonucleotide
uggauuagcuuuaaaguau

SEQ ID NO: 1055852 - RNA, 19 nt, Artificial Sequence
  Description of Artificial Sequence: Synthetic oligonucleotide
uggugauuugaauaagccc

SEQ ID NO: 1055853 - RNA, 19 nt, Artificial Sequence
  Description of Artificial Sequence: Synthetic oligonucleotide
uuuguccccagaaagguaa

SEQ ID NO: 1055854 - RNA, 19 nt, Artificial Sequence
  Description of Artificial Sequence: Synthetic oligonucleotide
auacacaagauaccucccg

SEQ ID NO: 1055855 - RNA, 19 nt, Artificial Sequence
  Description of Artificial Sequence: Synthetic oligonucleotide
uaaaacucggagcacccug

SEQ ID NO: 1055856 - RNA, 19 nt, Artificial Sequence
  Description of Artificial Sequence: Synthetic oligonucleotide
gaaaagaucaguaaucaua

SEQ ID NO: 1055857 - RNA, 19 nt, Artificial Sequence
  Description of Artificial Sequence: Synthetic oligonucleotide
agcacaauuucaucauaac

SEQ ID NO: 1055858 - RNA, 19 nt, Artificial Sequence
  Description of Artificial Sequence: Synthetic oligonucleotide
ucuauugggacaucacucu

SEQ ID NO: 1055859 - RNA, 19 nt, Artificial Sequence
  Description of Artificial Sequence: Synthetic oligonucleotide
uaucucguaugauauguug

SEQ ID NO: 1055860 - RNA, 19 nt, Artificial Sequence
  Description of Artificial Sequence: Synthetic oligonucleotide
ucguaugauauguugagau

SEQ ID NO: 1055861 - RNA, 19 nt, Artificial Sequence
  Description of Artificial Sequence: Synthetic oligonucleotide
ucaauugagcgaaucuuga

SEQ ID NO: 1055862 - RNA, 19 nt, Artificial Sequence
  Description of Artificial Sequence: Synthetic oligonucleotide
uguaaaacucggagcaccc

SEQ ID NO: 1055863 - RNA, 19 nt, Artificial Sequence
  Description of Artificial Sequence: Synthetic oligonucleotide
guacuggcgaaccugacag

SEQ ID NO: 1055864 - RNA, 19 nt, Artificial Sequence
  Description of Artificial Sequence: Synthetic oligonucleotide
uacuaaaugaaggaacugu

SEQ ID NO: 1055865 - RNA, 19 nt, Artificial Sequence
  Description of Artificial Sequence: Synthetic oligonucleotide
uuucuuagccagaagcaac

SEQ ID NO: 1055866 - RNA, 19 nt, Artificial Sequence
  Description of Artificial Sequence: Synthetic oligonucleotide
uccgaugugccaaacagaa

SEQ ID NO: 1055867 - RNA, 19 nt, Artificial Sequence
  Description of Artificial Sequence: Synthetic oligonucleotide
uaauccagccugaauacgu

SEQ ID NO: 1055868 - RNA, 19 nt, Artificial Sequence
  Description of Artificial Sequence: Synthetic oligonucleotide
ugcuaaagcucacaacagc

SEQ ID NO: 1055869 - RNA, 19 nt, Artificial Sequence
  Description of Artificial Sequence: Synthetic oligonucleotide
cuucaaggcaucaauuaac

SEQ ID NO: 1055870 - RNA, 19 nt, Artificial Sequence
  Description of Artificial Sequence: Synthetic oligonucleotide
uuggauauggugauuugaa

SEQ ID NO: 1055871 - RNA, 19 nt, Artificial Sequence
  Description of Artificial Sequence: Synthetic oligonucleotide
gagauaaccuuuccacagg

SEQ ID NO: 1055872 - RNA, 19 nt, Artificial Sequence
  Description of Artificial Sequence: Synthetic oligonucleotide
acuucguuuaucucguaug

SEQ ID NO: 1055873 - RNA, 19 nt, Artificial Sequence
  Description of Artificial Sequence: Synthetic oligonucleotide
ccuuguuuaucuuucaugc

SEQ ID NO: 1055874 - RNA, 19 nt, Artificial Sequence
  Description of Artificial Sequence: Synthetic oligonucleotide
agcgauguaaugcuuucag

SEQ ID NO: 1055875 - RNA, 19 nt, Artificial Sequence
  Description of Artificial Sequence: Synthetic oligonucleotide
uccucggagucacauaugc

SEQ ID NO: 1055876 - RNA, 19 nt, Artificial Sequence
  Description of Artificial Sequence: Synthetic oligonucleotide
uacacaagauaccucccgc

SEQ ID NO: 1055877 - RNA, 19 nt, Artificial Sequence
  Description of Artificial Sequence: Synthetic oligonucleotide
aucagaucccuguaaaacu

SEQ ID NO: 1055878 - RNA, 19 nt, Artificial Sequence
  Description of Artificial Sequence: Synthetic oligonucleotide
uuccugauuaaguuuuagc

SEQ ID NO: 1055879 - RNA, 19 nt, Artificial Sequence
  Description of Artificial Sequence: Synthetic oligonucleotide
acagcgguauucuggaauc

SEQ ID NO: 1055880 - RNA, 19 nt, Artificial Sequence
  Description of Artificial Sequence: Synthetic oligonucleotide
gauuugaauaagcccgagc

SEQ ID NO: 1055881 - RNA, 19 nt, Artificial Sequence
  Description of Artificial Sequence: Synthetic oligonucleotide
uuguguauuggcuuggaua

SEQ ID NO: 1055882 - RNA, 19 nt, Artificial Sequence
  Description of Artificial Sequence: Synthetic oligonucleotide
ucacauaugccugaagugu

SEQ ID NO: 1055883 - RNA, 19 nt, Artificial Sequence
  Description of Artificial Sequence: Synthetic oligonucleotide
agagccuuucaagaugugc

SEQ ID NO: 1055884 - RNA, 19 nt, Artificial Sequence
  Description of Artificial Sequence: Synthetic oligonucleotide
caaaucgcagcacagguuc

SEQ ID NO: 1055885 - RNA, 19 nt, Artificial Sequence
  Description of Artificial Sequence: Synthetic oligonucleotide
aucuauugggacaucacuc

SEQ ID NO: 1055886 - RNA, 19 nt, Artificial Sequence
  Description of Artificial Sequence: Synthetic oligonucleotide
aauuaacugcacuuucuua

SEQ ID NO: 1055887 - RNA, 19 nt, Artificial Sequence
  Description of Artificial Sequence: Synthetic oligonucleotide
uucuuagccagaagcaacu

SEQ ID NO: 1055888 - RNA, 19 nt, Artificial Sequence
  Description of Artificial Sequence: Synthetic oligonucleotide
uguauacgcauucgaguug

SEQ ID NO: 1055889 - RNA, 19 nt, Artificial Sequence
  Description of Artificial Sequence: Synthetic oligonucleotide
uaugauauguugagauuaa

SEQ ID NO: 1055890 - RNA, 19 nt, Artificial Sequence
  Description of Artificial Sequence: Synthetic oligonucleotide
ucagaucccuguaaaacuc

SEQ ID NO: 1055891 - RNA, 19 nt, Artificial Sequence
  Description of Artificial Sequence: Synthetic oligonucleotide
ucugcauuuccugauuaag

SEQ ID NO: 1055892 - RNA, 19 nt, Artificial Sequence
  Description of Artificial Sequence: Synthetic oligonucleotide
caucacucuguauuaagac

SEQ ID NO: 1055893 - RNA, 19 nt, Artificial Sequence
  Description of Artificial Sequence: Synthetic oligonucleotide
uggccuauuagagucaaug

SEQ ID NO: 1055894 - RNA, 19 nt, Artificial Sequence
  Description of Artificial Sequence: Synthetic oligonucleotide
ugucguggucaauaaagug

SEQ ID NO: 1055895 - RNA, 19 nt, Artificial Sequence
  Description of Artificial Sequence: Synthetic oligonucleotide
uguucuaacucacuccgua

SEQ ID NO: 1055896 - RNA, 19 nt, Artificial Sequence
  Description of Artificial Sequence: Synthetic oligonucleotide
aauguauucaugggucugu

SEQ ID NO: 1055897 - RNA, 19 nt, Artificial Sequence
  Description of Artificial Sequence: Synthetic oligonucleotide
uaaagugcguucucugaug

SEQ ID NO: 1055898 - RNA, 19 nt, Artificial Sequence
  Description of Artificial Sequence: Synthetic oligonucleotide
uaacugcacuuucuuagcc

SEQ ID NO: 1055899 - RNA, 19 nt, Artificial Sequence
  Description of Artificial Sequence: Synthetic oligonucleotide
ucaauaaagugcguucucu

SEQ ID NO: 1055900 - RNA, 19 nt, Artificial Sequence
  Description of Artificial Sequence: Synthetic oligonucleotide
ucaauguauucaugggucu

SEQ ID NO: 1055901 - RNA, 19 nt, Artificial Sequence
  Description of Artificial Sequence: Synthetic oligonucleotide
gagggauagagguuugaug

SEQ ID NO: 1055902 - RNA, 19 nt, Artificial Sequence
  Description of Artificial Sequence: Synthetic oligonucleotide
ugcguucucugauggaggg

SEQ ID NO: 1055903 - RNA, 19 nt, Artificial Sequence
  Description of Artificial Sequence: Synthetic oligonucleotide
ugaacuggccuauuagagu

SEQ ID NO: 1055904 - RNA, 19 nt, Artificial Sequence
  Description of Artificial Sequence: Synthetic oligonucleotide
ugagcgaaucuugagcucc

SEQ ID NO: 1055905 - RNA, 19 nt, Artificial Sequence
  Description of Artificial Sequence: Synthetic oligonucleotide
auucgaguuguguauccag

SEQ ID NO: 1055906 - RNA, 19 nt, Artificial Sequence
  Description of Artificial Sequence: Synthetic oligonucleotide
gcugcuaaagcucacaaca

SEQ ID NO: 1055907 - RNA, 19 nt, Artificial Sequence
  Description of Artificial Sequence: Synthetic oligonucleotide
accgauaaguggcaagaag

SEQ ID NO: 1055908 - RNA, 19 nt, Artificial Sequence
  Description of Artificial Sequence: Synthetic oligonucleotide
uauugggacaucacucugu

SEQ ID NO: 1055909 - RNA, 19 nt, Artificial Sequence
  Description of Artificial Sequence: Synthetic oligonucleotide
ugaauacguggccagcaca

SEQ ID NO: 1055910 - RNA, 19 nt, Artificial Sequence
  Description of Artificial Sequence: Synthetic oligonucleotide
aguuguguauccagaaagg

SEQ ID NO: 1055911 - RNA, 19 nt, Artificial Sequence
  Description of Artificial Sequence: Synthetic oligonucleotide
cuauacacuuccaccauuc

SEQ ID NO: 1055912 - RNA, 19 nt, Artificial Sequence
  Description of Artificial Sequence: Synthetic oligonucleotide
aauaagcccgagcuuucca

SEQ ID NO: 1055913 - RNA, 19 nt, Artificial Sequence
  Description of Artificial Sequence: Synthetic oligonucleotide
aacaccggcaucauucgag

SEQ ID NO: 1055914 - RNA, 19 nt, Artificial Sequence
  Description of Artificial Sequence: Synthetic oligonucleotide
ugguauuugcuuggcaccg

SEQ ID NO: 1055915 - RNA, 19 nt, Artificial Sequence
  Description of Artificial Sequence: Synthetic oligonucleotide
uaggauagauauuguagaa

SEQ ID NO: 1055916 - RNA, 19 nt, Artificial Sequence
  Description of Artificial Sequence: Synthetic oligonucleotide
guugucagcccuguaaucc

SEQ ID NO: 1055917 - RNA, 19 nt, Artificial Sequence
  Description of Artificial Sequence: Synthetic oligonucleotide
ucguuuaucucguaugaua

SEQ ID NO: 1055918 - RNA, 19 nt, Artificial Sequence
  Description of Artificial Sequence: Synthetic oligonucleotide
uuacauuagugccuuugaa

SEQ ID NO: 1055919 - RNA, 19 nt, Artificial Sequence
  Description of Artificial Sequence: Synthetic oligonucleotide
ucuccaguagaauggguac

SEQ ID NO: 1055920 - RNA, 19 nt, Artificial Sequence
  Description of Artificial Sequence: Synthetic oligonucleotide
uaucuaugaaaagaucagu

SEQ ID NO: 1055921 - RNA, 19 nt, Artificial Sequence
  Description of Artificial Sequence: Synthetic oligonucleotide
ucaauacacaagauaccuc

SEQ ID NO: 1055922 - RNA, 19 nt, Artificial Sequence
  Description of Artificial Sequence: Synthetic oligonucleotide
uucuaacucacuccguaaa

SEQ ID NO: 1055923 - RNA, 19 nt, Artificial Sequence
  Description of Artificial Sequence: Synthetic oligonucleotide
ucgagauaaccuuuccaca

SEQ ID NO: 1055924 - RNA, 19 nt, Artificial Sequence
  Description of Artificial Sequence: Synthetic oligonucleotide
uucgaguuguguauccaga

SEQ ID NO: 1055925 - RNA, 19 nt, Artificial Sequence
  Description of Artificial Sequence: Synthetic oligonucleotide
agcaaagcugaacuggccu

SEQ ID NO: 1055926 - RNA, 19 nt, Artificial Sequence
  Description of Artificial Sequence: Synthetic oligonucleotide
cuuuuccuacacaaccgcc

SEQ ID NO: 1055927 - RNA, 19 nt, Artificial Sequence
  Description of Artificial Sequence: Synthetic oligonucleotide
caucagaucccuguaaaac

SEQ ID NO: 1055928 - RNA, 19 nt, Artificial Sequence
  Description of Artificial Sequence: Synthetic oligonucleotide
cuagaauacagcgguauuc

SEQ ID NO: 1055929 - RNA, 19 nt, Artificial Sequence
  Description of Artificial Sequence: Synthetic oligonucleotide
agauaaccuuuccacagga

SEQ ID NO: 1055930 - RNA, 19 nt, Artificial Sequence
  Description of Artificial Sequence: Synthetic oligonucleotide
uauucaugggucugucgug

SEQ ID NO: 1055931 - RNA, 19 nt, Artificial Sequence
  Description of Artificial Sequence: Synthetic oligonucleotide
uccuacacaaccgcccugg

SEQ ID NO: 1055932 - RNA, 19 nt, Artificial Sequence
  Description of Artificial Sequence: Synthetic oligonucleotide
uguugagauuaauuuuccu

SEQ ID NO: 1055933 - RNA, 19 nt, Artificial Sequence
  Description of Artificial Sequence: Synthetic oligonucleotide
uacagcgguauucuggaau

SEQ ID NO: 1055934 - RNA, 19 nt, Artificial Sequence
  Description of Artificial Sequence: Synthetic oligonucleotide
cauuaucuauugcagucug

SEQ ID NO: 1055935 - RNA, 19 nt, Artificial Sequence
  Description of Artificial Sequence: Synthetic oligonucleotide
ugaaaagaucaguaaucau

SEQ ID NO: 1055936 - RNA, 19 nt, Artificial Sequence
  Description of Artificial Sequence: Synthetic oligonucleotide
ucauuugacucugugucac

SEQ ID NO: 1055937 - RNA, 19 nt, Artificial Sequence
  Description of Artificial Sequence: Synthetic oligonucleotide
cuuugcucgauugugaaga

SEQ ID NO: 1055938 - RNA, 19 nt, Artificial Sequence
  Description of Artificial Sequence: Synthetic oligonucleotide
uuugaauaagcccgagcuu

SEQ ID NO: 1055939 - RNA, 19 nt, Artificial Sequence
  Description of Artificial Sequence: Synthetic oligonucleotide
caauugagcgaaucuugag

SEQ ID NO: 1055940 - RNA, 19 nt, Artificial Sequence
  Description of Artificial Sequence: Synthetic oligonucleotide
uacgcauucgaguugugua

SEQ ID NO: 1055941 - RNA, 19 nt, Artificial Sequence
  Description of Artificial Sequence: Synthetic oligonucleotide
gucaauguauucauggguc

SEQ ID NO: 1055942 - RNA, 19 nt, Artificial Sequence
  Description of Artificial Sequence: Synthetic oligonucleotide
gucauuuauacuaaaugaa

SEQ ID NO: 1055943 - RNA, 19 nt, Artificial Sequence
  Description of Artificial Sequence: Synthetic oligonucleotide
cuguaaaacucggagcacc

SEQ ID NO: 1055944 - RNA, 19 nt, Artificial Sequence
  Description of Artificial Sequence: Synthetic oligonucleotide
aaacucggagcacccuguc

SEQ ID NO: 1055945 - RNA, 19 nt, Artificial Sequence
  Description of Artificial Sequence: Synthetic oligonucleotide
ugugaagacuguugguagu

SEQ ID NO: 1055946 - RNA, 19 nt, Artificial Sequence
  Description of Artificial Sequence: Synthetic oligonucleotide
ugugguacuggcgaaccug

SEQ ID NO: 1055947 - RNA, 19 nt, Artificial Sequence
  Description of Artificial Sequence: Synthetic oligonucleotide
guggauuagcuuuaaagua

SEQ ID NO: 1055948 - RNA, 19 nt, Artificial Sequence
  Description of Artificial Sequence: Synthetic oligonucleotide
cacauaugccugaagugug

SEQ ID NO: 1055949 - RNA, 19 nt, Artificial Sequence
  Description of Artificial Sequence: Synthetic oligonucleotide
uuaaacugcagauguucua

SEQ ID NO: 1055950 - RNA, 19 nt, Artificial Sequence
  Description of Artificial Sequence: Synthetic oligonucleotide
cugcaguaccuuaaacugc

SEQ ID NO: 1055951 - RNA, 19 nt, Artificial Sequence
  Description of Artificial Sequence: Synthetic oligonucleotide
guaugauauguugagauua

SEQ ID NO: 1055952 - RNA, 19 nt, Artificial Sequence
  Description of Artificial Sequence: Synthetic oligonucleotide
ugagauuaauuuuccuuuu

SEQ ID NO: 1055953 - RNA, 19 nt, Artificial Sequence
  Description of Artificial Sequence: Synthetic oligonucleotide
guucguauuucccucguga

SEQ ID NO: 1055954 - RNA, 19 nt, Artificial Sequence
  Description of Artificial Sequence: Synthetic oligonucleotide
acacaaccgcccuggagcg

SEQ ID NO: 1055955 - RNA, 19 nt, Artificial Sequence
  Description of Artificial Sequence: Synthetic oligonucleotide
cagaucccuguaaaacucg

SEQ ID NO: 1055956 - RNA, 19 nt, Artificial Sequence
  Description of Artificial Sequence: Synthetic oligonucleotide
cugcuaaagcucacaacag

SEQ ID NO: 1055957 - RNA, 19 nt, Artificial Sequence
  Description of Artificial Sequence: Synthetic oligonucleotide
aaguugucauuugacucug

SEQ ID NO: 1055958 - RNA, 19 nt, Artificial Sequence
  Description of Artificial Sequence: Synthetic oligonucleotide
guuuaucucguaugauaug

SEQ ID NO: 1055959 - RNA, 19 nt, Artificial Sequence
  Description of Artificial Sequence: Synthetic oligonucleotide
cagauucuccugcuggagg

SEQ ID NO: 1055960 - RNA, 19 nt, Artificial Sequence
  Description of Artificial Sequence: Synthetic oligonucleotide
auccagccugaauacgugg

SEQ ID NO: 1055961 - RNA, 19 nt, Artificial Sequence
  Description of Artificial Sequence: Synthetic oligonucleotide
uucuagaauacagcgguau

SEQ ID NO: 1055962 - RNA, 19 nt, Artificial Sequence
  Description of Artificial Sequence: Synthetic oligonucleotide
uucguauuucccucgugaa

SEQ ID NO: 1055963 - RNA, 19 nt, Artificial Sequence
  Description of Artificial Sequence: Synthetic oligonucleotide
guugguaguuuucucuuuc

SEQ ID NO: 1055964 - RNA, 19 nt, Artificial Sequence
  Description of Artificial Sequence: Synthetic oligonucleotide
gaaaucaauguguucuggu

SEQ ID NO: 1055965 - RNA, 19 nt, Artificial Sequence
  Description of Artificial Sequence: Synthetic oligonucleotide
gaucuauugggacaucacu

SEQ ID NO: 1055966 - RNA, 19 nt, Artificial Sequence
  Description of Artificial Sequence: Synthetic oligonucleotide
ucgaguuguguauccagaa

SEQ ID NO: 1055967 - RNA, 19 nt, Artificial Sequence
  Description of Artificial Sequence: Synthetic oligonucleotide
gguggauuagcuuuaaagu

SEQ ID NO: 1055968 - RNA, 19 nt, Artificial Sequence
  Description of Artificial Sequence: Synthetic oligonucleotide
acauuaucuauugcagucu

SEQ ID NO: 1055969 - RNA, 19 nt, Artificial Sequence
  Description of Artificial Sequence: Synthetic oligonucleotide
uaagacgguggguggacca

SEQ ID NO: 1055970 - RNA, 19 nt, Artificial Sequence
  Description of Artificial Sequence: Synthetic oligonucleotide
auacuaaaugaaggaacug

SEQ ID NO: 1055971 - RNA, 19 nt, Artificial Sequence
  Description of Artificial Sequence: Synthetic oligonucleotide
aaguucguauuucccucgu

SEQ ID NO: 1055972 - RNA, 19 nt, Artificial Sequence
  Description of Artificial Sequence: Synthetic oligonucleotide
uacguggccagcacaauuu

SEQ ID NO: 1055973 - RNA, 19 nt, Artificial Sequence
  Description of Artificial Sequence: Synthetic oligonucleotide
uaugccugaagugugccau

SEQ ID NO: 1055974 - RNA, 19 nt, Artificial Sequence
  Description of Artificial Sequence: Synthetic oligonucleotide
auauggugauuugaauaag

SEQ ID NO: 1055975 - RNA, 19 nt, Artificial Sequence
  Description of Artificial Sequence: Synthetic oligonucleotide
uauguagagcuaagacggu

SEQ ID NO: 1055976 - RNA, 19 nt, Artificial Sequence
  Description of Artificial Sequence: Synthetic oligonucleotide
uggauauggugauuugaau

SEQ ID NO: 1055977 - RNA, 19 nt, Artificial Sequence
  Description of Artificial Sequence: Synthetic oligonucleotide
acacaagauaccucccgcu

SEQ ID NO: 1055978 - RNA, 19 nt, Artificial Sequence
  Description of Artificial Sequence: Synthetic oligonucleotide
cuucguuuaucucguauga

SEQ ID NO: 1055979 - RNA, 19 nt, Artificial Sequence
  Description of Artificial Sequence: Synthetic oligonucleotide
guaccuuaaacugcagaug

SEQ ID NO: 1055980 - RNA, 19 nt, Artificial Sequence
  Description of Artificial Sequence: Synthetic oligonucleotide
uuuguguauuggcuuggau

SEQ ID NO: 1055981 - RNA, 19 nt, Artificial Sequence
  Description of Artificial Sequence: Synthetic oligonucleotide
aaaacucggagcacccugu

SEQ ID NO: 1055982 - RNA, 19 nt, Artificial Sequence
  Description of Artificial Sequence: Synthetic oligonucleotide
aauccagccugaauacgug

SEQ ID NO: 1055983 - RNA, 19 nt, Artificial Sequence
  Description of Artificial Sequence: Synthetic oligonucleotide
uguauccagaaagguauuc

SEQ ID NO: 1055984 - RNA, 19 nt, Artificial Sequence
  Description of Artificial Sequence: Synthetic oligonucleotide
ccuuucaagaugugcaggc

SEQ ID NO: 1055985 - RNA, 19 nt, Artificial Sequence
  Description of Artificial Sequence: Synthetic oligonucleotide
acuaaaugaaggaacuguu

SEQ ID NO: 1055986 - RNA, 19 nt, Artificial Sequence
  Description of Artificial Sequence: Synthetic oligonucleotide
uaugcuugacugacacuuc

SEQ ID NO: 1055987 - RNA, 19 nt, Artificial Sequence
  Description of Artificial Sequence: Synthetic oligonucleotide
aagaccuucuccggaguca

SEQ ID NO: 1055988 - RNA, 19 nt, Artificial Sequence
  Description of Artificial Sequence: Synthetic oligonucleotide
cuauugggacaucacucug

SEQ ID NO: 1055989 - RNA, 19 nt, Artificial Sequence
  Description of Artificial Sequence: Synthetic oligonucleotide
agaugugcaggcugcuucu

SEQ ID NO: 1055990 - RNA, 19 nt, Artificial Sequence
  Description of Artificial Sequence: Synthetic oligonucleotide
ugcuuugcucgauugugaa

SEQ ID NO: 1055991 - RNA, 19 nt, Artificial Sequence
  Description of Artificial Sequence: Synthetic oligonucleotide
cugauacuccagcuuuggg

SEQ ID NO: 1055992 - RNA, 19 nt, Artificial Sequence
  Description of Artificial Sequence: Synthetic oligonucleotide
auaagcccgagcuuuccau

SEQ ID NO: 1055993 - RNA, 19 nt, Artificial Sequence
  Description of Artificial Sequence: Synthetic oligonucleotide
uuaucucguaugauauguu

SEQ ID NO: 1055994 - RNA, 19 nt, Artificial Sequence
  Description of Artificial Sequence: Synthetic oligonucleotide
aucucguaugauauguuga

SEQ ID NO: 1055995 - RNA, 19 nt, Artificial Sequence
  Description of Artificial Sequence: Synthetic oligonucleotide
aaaguaugcuugacugaca

SEQ ID NO: 1055996 - RNA, 19 nt, Artificial Sequence
  Description of Artificial Sequence: Synthetic oligonucleotide
uuugcucgauugugaagac

SEQ ID NO: 1055997 - RNA, 19 nt, Artificial Sequence
  Description of Artificial Sequence: Synthetic oligonucleotide
auugggacaucacucugua

SEQ ID NO: 1055998 - RNA, 19 nt, Artificial Sequence
  Description of Artificial Sequence: Synthetic oligonucleotide
uggagcgauguaaugcuuu

SEQ ID NO: 1055999 - RNA, 19 nt, Artificial Sequence
  Description of Artificial Sequence: Synthetic oligonucleotide
uuggcaccgauaaguggca

SEQ ID NO: 1056000 - RNA, 19 nt, Artificial Sequence
  Description of Artificial Sequence: Synthetic oligonucleotide
uccccagaaagguaauaau

SEQ ID NO: 1056001 - RNA, 19 nt, Artificial Sequence
  Description of Artificial Sequence: Synthetic oligonucleotide
ugcuugacugacacuucgu

SEQ ID NO: 1056002 - RNA, 19 nt, Artificial Sequence
  Description of Artificial Sequence: Synthetic oligonucleotide
auguagagcuaagacggug

SEQ ID NO: 1056003 - RNA, 19 nt, Artificial Sequence
  Description of Artificial Sequence: Synthetic oligonucleotide
cauaugccugaagugugcc

SEQ ID NO: 1056004 - RNA, 19 nt, Artificial Sequence
  Description of Artificial Sequence: Synthetic oligonucleotide
cucuaagacaaggcuguag

SEQ ID NO: 1056005 - RNA, 19 nt, Artificial Sequence
  Description of Artificial Sequence: Synthetic oligonucleotide
acaagauaccucccgcuuu

SEQ ID NO: 1056006 - RNA, 19 nt, Artificial Sequence
  Description of Artificial Sequence: Synthetic oligonucleotide
gaaccugcaauuccuucaa

SEQ ID NO: 1056007 - RNA, 19 nt, Artificial Sequence
  Description of Artificial Sequence: Synthetic oligonucleotide
gucaauaaagugcguucuc

SEQ ID NO: 1056008 - RNA, 19 nt, Artificial Sequence
  Description of Artificial Sequence: Synthetic oligonucleotide
gaauacguggccagcacaa

SEQ ID NO: 1056009 - RNA, 19 nt, Artificial Sequence
  Description of Artificial Sequence: Synthetic oligonucleotide
cguauuucccucgugaacc

SEQ ID NO: 1056010 - RNA, 19 nt, Artificial Sequence
  Description of Artificial Sequence: Synthetic oligonucleotide
acuggcgaaccugacaggu

SEQ ID NO: 1056011 - RNA, 19 nt, Artificial Sequence
  Description of Artificial Sequence: Synthetic oligonucleotide
caauguauucaugggucug

SEQ ID NO: 1056012 - RNA, 19 nt, Artificial Sequence
  Description of Artificial Sequence: Synthetic oligonucleotide
acgcauucgaguuguguau

SEQ ID NO: 1056013 - RNA, 19 nt, Artificial Sequence
  Description of Artificial Sequence: Synthetic oligonucleotide
uacuggcgaaccugacagg

SEQ ID NO: 1056014 - RNA, 19 nt, Artificial Sequence
  Description of Artificial Sequence: Synthetic oligonucleotide
acguggccagcacaauuuc

SEQ ID NO: 1056015 - RNA, 19 nt, Artificial Sequence
  Description of Artificial Sequence: Synthetic oligonucleotide
aguucguauuucccucgug

SEQ ID NO: 1056016 - RNA, 19 nt, Artificial Sequence
  Description of Artificial Sequence: Synthetic oligonucleotide
aagacgguggguggaccag

SEQ ID NO: 1056017 - RNA, 19 nt, Artificial Sequence
  Description of Artificial Sequence: Synthetic oligonucleotide
cugaauacguggccagcac

SEQ ID NO: 1056018 - RNA, 19 nt, Artificial Sequence
  Description of Artificial Sequence: Synthetic oligonucleotide
auaugccugaagugugcca

SEQ ID NO: 1056019 - RNA, 19 nt, Artificial Sequence
  Description of Artificial Sequence: Synthetic oligonucleotide
cagaagcaacugauacucc

SEQ ID NO: 1056020 - RNA, 19 nt, Artificial Sequence
  Description of Artificial Sequence: Synthetic oligonucleotide
cuaacucacuccguaaaga

SEQ ID NO: 1056021 - RNA, 19 nt, Artificial Sequence
  Description of Artificial Sequence: Synthetic oligonucleotide
agcgguauucuggaaucag

SEQ ID NO: 1056022 - RNA, 19 nt, Artificial Sequence
  Description of Artificial Sequence: Synthetic oligonucleotide
ccgauaaguggcaagaaga

SEQ ID NO: 1056023 - RNA, 19 nt, Artificial Sequence
  Description of Artificial Sequence: Synthetic oligonucleotide
ggauuagcuuuaaaguaug

SEQ ID NO: 1056024 - RNA, 19 nt, Artificial Sequence
  Description of Artificial Sequence: Synthetic oligonucleotide
uugaugugguacuggcgaa

SEQ ID NO: 1056025 - RNA, 19 nt, Artificial Sequence
  Description of Artificial Sequence: Synthetic oligonucleotide
gaauuucccauuuguguau

SEQ ID NO: 1056026 - RNA, 19 nt, Artificial Sequence
  Description of Artificial Sequence: Synthetic oligonucleotide
ugauggagggauagagguu

SEQ ID NO: 1056027 - RNA, 19 nt, Artificial Sequence
  Description of Artificial Sequence: Synthetic oligonucleotide
uucuccggagucaccgcca

SEQ ID NO: 1056028 - RNA, 19 nt, Artificial Sequence
  Description of Artificial Sequence: Synthetic oligonucleotide
aagugcguucucugaugga

SEQ ID NO: 1056029 - RNA, 19 nt, Artificial Sequence
  Description of Artificial Sequence: Synthetic oligonucleotide
gcuaaagcucacaacagca

SEQ ID NO: 1056030 - RNA, 19 nt, Artificial Sequence
  Description of Artificial Sequence: Synthetic oligonucleotide
agcaaaucuaugauaucaa

SEQ ID NO: 1056031 - RNA, 19 nt, Artificial Sequence
  Description of Artificial Sequence: Synthetic oligonucleotide
cuggccuucaauugagcga

SEQ ID NO: 1056032 - RNA, 19 nt, Artificial Sequence
  Description of Artificial Sequence: Synthetic oligonucleotide
acaccggcaucauucgaga

SEQ ID NO: 1056033 - RNA, 19 nt, Artificial Sequence
  Description of Artificial Sequence: Synthetic oligonucleotide
ugaugugguacuggcgaac

SEQ ID NO: 1056034 - RNA, 19 nt, Artificial Sequence
  Description of Artificial Sequence: Synthetic oligonucleotide
uuccuacacaaccgcccug

SEQ ID NO: 1056035 - RNA, 19 nt, Artificial Sequence
  Description of Artificial Sequence: Synthetic oligonucleotide
uauacgcauucgaguugug

SEQ ID NO: 1056036 - RNA, 19 nt, Artificial Sequence
  Description of Artificial Sequence: Synthetic oligonucleotide
cugacacuucguuuaucuc

SEQ ID NO: 1056037 - RNA, 19 nt, Artificial Sequence
  Description of Artificial Sequence: Synthetic oligonucleotide
uauuugcuuggcaccgaua

SEQ ID NO: 1056038 - RNA, 19 nt, Artificial Sequence
  Description of Artificial Sequence: Synthetic oligonucleotide
auacgcauucgaguugugu

SEQ ID NO: 1056039 - RNA, 19 nt, Artificial Sequence
  Description of Artificial Sequence: Synthetic oligonucleotide
uucguuuaucucguaugau

SEQ ID NO: 1056040 - RNA, 19 nt, Artificial Sequence
  Description of Artificial Sequence: Synthetic oligonucleotide
aaucgcagcacagguucau

SEQ ID NO: 1056041 - RNA, 19 nt, Artificial Sequence
  Description of Artificial Sequence: Synthetic oligonucleotide
ggaaucagaaaguucguau

SEQ ID NO: 1056042 - RNA, 19 nt, Artificial Sequence
  Description of Artificial Sequence: Synthetic oligonucleotide
agcccgagcuuuccauccg

SEQ ID NO: 1056043 - RNA, 19 nt, Artificial Sequence
  Description of Artificial Sequence: Synthetic oligonucleotide
gugcguucucugauggagg

SEQ ID NO: 1056044 - RNA, 19 nt, Artificial Sequence
  Description of Artificial Sequence: Synthetic oligonucleotide
aaaucgcagcacagguuca

SEQ ID NO: 1056045 - RNA, 19 nt, Artificial Sequence
  Description of Artificial Sequence: Synthetic oligonucleotide
caucauucgagauaaccuu

SEQ ID NO: 1056046 - RNA, 19 nt, Artificial Sequence
  Description of Artificial Sequence: Synthetic oligonucleotide
caguaccuuaaacugcaga

SEQ ID NO: 1056047 - RNA, 19 nt, Artificial Sequence
  Description of Artificial Sequence: Synthetic oligonucleotide
uauuucccucgugaaccug

SEQ ID NO: 1056048 - RNA, 19 nt, Artificial Sequence
  Description of Artificial Sequence: Synthetic oligonucleotide
gacacuucguuuaucucgu

SEQ ID NO: 1056049 - RNA, 19 nt, Artificial Sequence
  Description of Artificial Sequence: Synthetic oligonucleotide
cuguauacgcauucgaguu

SEQ ID NO: 1056050 - RNA, 19 nt, Artificial Sequence
  Description of Artificial Sequence: Synthetic oligonucleotide
gcauucgaguuguguaucc

SEQ ID NO: 1056051 - RNA, 19 nt, Artificial Sequence
  Description of Artificial Sequence: Synthetic oligonucleotide
cuaagacgguggguggacc

SEQ ID NO: 1056052 - RNA, 19 nt, Artificial Sequence
  Description of Artificial Sequence: Synthetic oligonucleotide
ccaacaccggcaucauucg

SEQ ID NO: 1056053 - RNA, 19 nt, Artificial Sequence
  Description of Artificial Sequence: Synthetic oligonucleotide
agcuuuggguggauuagcu

SEQ ID NO: 1056054 - RNA, 19 nt, Artificial Sequence
  Description of Artificial Sequence: Synthetic oligonucleotide
ccuauuagagucaauguau

SEQ ID NO: 1056055 - RNA, 19 nt, Artificial Sequence
  Description of Artificial Sequence: Synthetic oligonucleotide
caggccaacaccggcauca

SEQ ID NO: 1056056 - RNA, 19 nt, Artificial Sequence
  Description of Artificial Sequence: Synthetic oligonucleotide
ggcaccgauaaguggcaag

SEQ ID NO: 1056057 - RNA, 19 nt, Artificial Sequence
  Description of Artificial Sequence: Synthetic oligonucleotide
gguacuggcgaaccugaca

SEQ ID NO: 1056058 - RNA, 19 nt, Artificial Sequence
  Description of Artificial Sequence: Synthetic oligonucleotide
gcuuugcucgauugugaag

SEQ ID NO: 1056059 - RNA, 19 nt, Artificial Sequence
  Description of Artificial Sequence: Synthetic oligonucleotide
cagcuuuggguggauuagc

SEQ ID NO: 1056060 - RNA, 19 nt, Artificial Sequence
  Description of Artificial Sequence: Synthetic oligonucleotide
ggagcgauguaaugcuuuc

SEQ ID NO: 1056061 - RNA, 19 nt, Artificial Sequence
  Description of Artificial Sequence: Synthetic oligonucleotide
guauacgcauucgaguugu

SEQ ID NO: 1056062 - RNA, 19 nt, Artificial Sequence
  Description of Artificial Sequence: Synthetic oligonucleotide
uugcucgauugugaagacu

SEQ ID NO: 1056063 - RNA, 19 nt, Artificial Sequence
  Description of Artificial Sequence: Synthetic oligonucleotide
agacgguggguggaccagg

SEQ ID NO: 1056064 - RNA, 19 nt, Artificial Sequence
  Description of Artificial Sequence: Synthetic oligonucleotide
gaauccucggagucacaua

SEQ ID NO: 1056065 - RNA, 19 nt, Artificial Sequence
  Description of Artificial Sequence: Synthetic oligonucleotide
uggguggauuagcuuuaaa

SEQ ID NO: 1056066 - RNA, 19 nt, Artificial Sequence
  Description of Artificial Sequence: Synthetic oligonucleotide
uggagggauagagguuuga

SEQ ID NO: 1056067 - RNA, 19 nt, Artificial Sequence
  Description of Artificial Sequence: Synthetic oligonucleotide
cagcacagguucauuugca

SEQ ID NO: 1056068 - RNA, 19 nt, Artificial Sequence
  Description of Artificial Sequence: Synthetic oligonucleotide
auccgaugugccaaacaga

SEQ ID NO: 1056069 - RNA, 19 nt, Artificial Sequence
  Description of Artificial Sequence: Synthetic oligonucleotide
cucguaugauauguugaga

SEQ ID NO: 1056070 - RNA, 19 nt, Artificial Sequence
  Description of Artificial Sequence: Synthetic oligonucleotide
cuggugguauuugcuuggc

SEQ ID NO: 1056071 - RNA, 19 nt, Artificial Sequence
  Description of Artificial Sequence: Synthetic oligonucleotide
caacugauacuccagcuuu

SEQ ID NO: 1056072 - RNA, 19 nt, Artificial Sequence
  Description of Artificial Sequence: Synthetic oligonucleotide
ucauaccauagagccuuuc

SEQ ID NO: 1056073 - RNA, 19 nt, Artificial Sequence
  Description of Artificial Sequence: Synthetic oligonucleotide
cugucguggucaauaaagu

SEQ ID NO: 1056074 - RNA, 19 nt, Artificial Sequence
  Description of Artificial Sequence: Synthetic oligonucleotide
gcaucauucgagauaaccu

SEQ ID NO: 1056075 - RNA, 19 nt, Artificial Sequence
  Description of Artificial Sequence: Synthetic oligonucleotide
gagcgauguaaugcuuuca

SEQ ID NO: 1056076 - RNA, 19 nt, Artificial Sequence
  Description of Artificial Sequence: Synthetic oligonucleotide
acaaccgcccuggagcgau

SEQ ID NO: 1056077 - RNA, 19 nt, Artificial Sequence
  Description of Artificial Sequence: Synthetic oligonucleotide
cacuccguaaagaggaaau

SEQ ID NO: 1056078 - RNA, 19 nt, Artificial Sequence
  Description of Artificial Sequence: Synthetic oligonucleotide
acaccacccaggagugaac

SEQ ID NO: 1056079 - RNA, 19 nt, Artificial Sequence
  Description of Artificial Sequence: Synthetic oligonucleotide
ugacuuugcuuugcucgau

SEQ ID NO: 1056080 - RNA, 19 nt, Artificial Sequence
  Description of Artificial Sequence: Synthetic oligonucleotide
cauucgaguuguguaucca

SEQ ID NO: 1056081 - RNA, 19 nt, Artificial Sequence
  Description of Artificial Sequence: Synthetic oligonucleotide
agcgaaucuugagcuccag

SEQ ID NO: 1056082 - RNA, 19 nt, Artificial Sequence
  Description of Artificial Sequence: Synthetic oligonucleotide
gcgauguaaugcuuucaga

SEQ ID NO: 1056083 - RNA, 19 nt, Artificial Sequence
  Description of Artificial Sequence: Synthetic oligonucleotide
guguauuggcuuggauaug

SEQ ID NO: 1056084 - RNA, 19 nt, Artificial Sequence
  Description of Artificial Sequence: Synthetic oligonucleotide
uccuuaugagugggcucug

SEQ ID NO: 1056085 - RNA, 19 nt, Artificial Sequence
  Description of Artificial Sequence: Synthetic oligonucleotide
auacagcgguauucuggaa

SEQ ID NO: 1056086 - RNA, 19 nt, Artificial Sequence
  Description of Artificial Sequence: Synthetic oligonucleotide
aaccgcccuggagcgaugu

SEQ ID NO: 1056087 - RNA, 19 nt, Artificial Sequence
  Description of Artificial Sequence: Synthetic oligonucleotide
ggucaauaaagugcguucu

SEQ ID NO: 1056088 - RNA, 19 nt, Artificial Sequence
  Description of Artificial Sequence: Synthetic oligonucleotide
ccuucaaggcaucaauuaa

SEQ ID NO: 1056089 - RNA, 19 nt, Artificial Sequence
  Description of Artificial Sequence: Synthetic oligonucleotide
gcaccgauaaguggcaaga

SEQ ID NO: 1056090 - RNA, 19 nt, Artificial Sequence
  Description of Artificial Sequence: Synthetic oligonucleotide
uuggguggauuagcuuuaa

SEQ ID NO: 1056091 - RNA, 19 nt, Artificial Sequence
  Description of Artificial Sequence: Synthetic oligonucleotide
ggccuauuagagucaaugu

SEQ ID NO: 1056092 - RNA, 19 nt, Artificial Sequence
  Description of Artificial Sequence: Synthetic oligonucleotide
agacaacaucugaucaaau

SEQ ID NO: 1056093 - RNA, 19 nt, Artificial Sequence
  Description of Artificial Sequence: Synthetic oligonucleotide
accuuuccacaggaaggca

SEQ ID NO: 1056094 - RNA, 19 nt, Artificial Sequence
  Description of Artificial Sequence: Synthetic oligonucleotide
uagugccuuugaacuugaa

SEQ ID NO: 1056095 - RNA, 19 nt, Artificial Sequence
  Description of Artificial Sequence: Synthetic oligonucleotide
cauuucgaauuucccauuu

SEQ ID NO: 1056096 - RNA, 19 nt, Artificial Sequence
  Description of Artificial Sequence: Synthetic oligonucleotide
gucugucguggucaauaaa

SEQ ID NO: 1056097 - RNA, 19 nt, Artificial Sequence
  Description of Artificial Sequence: Synthetic oligonucleotide
cauuagugccuuugaacuu

SEQ ID NO: 1056098 - RNA, 19 nt, Artificial Sequence
  Description of Artificial Sequence: Synthetic oligonucleotide
gagcgaaucuugagcucca

SEQ ID NO: 1056099 - RNA, 19 nt, Artificial Sequence
  Description of Artificial Sequence: Synthetic oligonucleotide
cuuucaagaugugcaggcu

SEQ ID NO: 1056100 - RNA, 19 nt, Artificial Sequence
  Description of Artificial Sequence: Synthetic oligonucleotide
gccagaagcaacugauacu

SEQ ID NO: 1056101 - RNA, 19 nt, Artificial Sequence
  Description of Artificial Sequence: Synthetic oligonucleotide
ggucugucguggucaauaa

SEQ ID NO: 1056102 - RNA, 19 nt, Artificial Sequence
  Description of Artificial Sequence: Synthetic oligonucleotide
ccgaugugccaaacagaag

SEQ ID NO: 1056103 - RNA, 19 nt, Artificial Sequence
  Description of Artificial Sequence: Synthetic oligonucleotide
caacaccggcaucauucga

SEQ ID NO: 1056104 - RNA, 19 nt, Artificial Sequence
  Description of Artificial Sequence: Synthetic oligonucleotide
guaaaacucggagcacccu

SEQ ID NO: 1056105 - RNA, 19 nt, Artificial Sequence
  Description of Artificial Sequence: Synthetic oligonucleotide
auccucggagucacauaug

SEQ ID NO: 1056106 - RNA, 19 nt, Artificial Sequence
  Description of Artificial Sequence: Synthetic oligonucleotide
cacuucguuuaucucguau

SEQ ID NO: 1056107 - RNA, 19 nt, Artificial Sequence
  Description of Artificial Sequence: Synthetic oligonucleotide
ccuguaaaacucggagcac

SEQ ID NO: 1056108 - RNA, 19 nt, Artificial Sequence
  Description of Artificial Sequence: Synthetic oligonucleotide
cguuuaucucguaugauau

SEQ ID NO: 1056109 - RNA, 19 nt, Artificial Sequence
  Description of Artificial Sequence: Synthetic oligonucleotide
guagaucuauugggacauc

SEQ ID NO: 1056110 - RNA, 19 nt, Artificial Sequence
  Description of Artificial Sequence: Synthetic oligonucleotide
cacaagauaccucccgcuu

SEQ ID NO: 1056111 - RNA, 19 nt, Artificial Sequence
  Description of Artificial Sequence: Synthetic oligonucleotide
cgguauucuggaaucagaa

SEQ ID NO: 1056112 - RNA, 19 nt, Artificial Sequence
  Description of Artificial Sequence: Synthetic oligonucleotide
ccggcaucauucgagauaa

SEQ ID NO: 1056113 - RNA, 19 nt, Artificial Sequence
  Description of Artificial Sequence: Synthetic oligonucleotide
cuauugcagucugcaccuc

SEQ ID NO: 1056114 - RNA, 19 nt, Artificial Sequence
  Description of Artificial Sequence: Synthetic oligonucleotide
ccgagcuuuccauccgaug

SEQ ID NO: 1056115 - RNA, 19 nt, Artificial Sequence
  Description of Artificial Sequence: Synthetic oligonucleotide
gggucugucguggucaaua

SEQ ID NO: 1056116 - RNA, 19 nt, Artificial Sequence
  Description of Artificial Sequence: Synthetic oligonucleotide
gugaagacuguugguaguu

SEQ ID NO: 1056117 - RNA, 19 nt, Artificial Sequence
  Description of Artificial Sequence: Synthetic oligonucleotide
caccgccaucuccauuaug

SEQ ID NO: 1056118 - RNA, 19 nt, Artificial Sequence
  Description of Artificial Sequence: Synthetic oligonucleotide
gcgguauucuggaaucaga

SEQ ID NO: 1056119 - RNA, 19 nt, Artificial Sequence
  Description of Artificial Sequence: Synthetic oligonucleotide
acacuucguuuaucucgua

SEQ ID NO: 1056120 - RNA, 19 nt, Artificial Sequence
  Description of Artificial Sequence: Synthetic oligonucleotide
ccugaauacguggccagca

SEQ ID NO: 1056121 - RNA, 19 nt, Artificial Sequence
  Description of Artificial Sequence: Synthetic oligonucleotide
gguauuugcuuggcaccga

SEQ ID NO: 1056122 - RNA, 19 nt, Artificial Sequence
  Description of Artificial Sequence: Synthetic oligonucleotide
aucgcagcacagguucauu

SEQ ID NO: 1056123 - RNA, 19 nt, Artificial Sequence
  Description of Artificial Sequence: Synthetic oligonucleotide
caaagcugaacuggccuau

SEQ ID NO: 1056124 - RNA, 19 nt, Artificial Sequence
  Description of Artificial Sequence: Synthetic oligonucleotide
cagcgguauucuggaauca

SEQ ID NO: 1056125 - RNA, 19 nt, Artificial Sequence
  Description of Artificial Sequence: Synthetic oligonucleotide
caccgauaaguggcaagaa

SEQ ID NO: 1056126 - RNA, 19 nt, Artificial Sequence
  Description of Artificial Sequence: Synthetic oligonucleotide
gcagauguucuaacucacu

SEQ ID NO: 1056127 - RNA, 19 nt, Artificial Sequence
  Description of Artificial Sequence: Synthetic oligonucleotide
ugggucugucguggucaau

SEQ ID NO: 1056128 - RNA, 19 nt, Artificial Sequence
  Description of Artificial Sequence: Synthetic oligonucleotide
gcccgagcuuuccauccga

SEQ ID NO: 1056129 - RNA, 19 nt, Artificial Sequence
  Description of Artificial Sequence: Synthetic oligonucleotide
accgcccuggagcgaugua

SEQ ID NO: 1056130 - RNA, 19 nt, Artificial Sequence
  Description of Artificial Sequence: Synthetic oligonucleotide
cucuguugucagcccugua

SEQ ID NO: 1056131 - RNA, 19 nt, Artificial Sequence
  Description of Artificial Sequence: Synthetic oligonucleotide
gguggaccagguacuucaa

SEQ ID NO: 1056132 - RNA, 19 nt, Artificial Sequence
  Description of Artificial Sequence: Synthetic oligonucleotide
cguaugauauguugagauu

SEQ ID NO: 1056133 - RNA, 19 nt, Artificial Sequence
  Description of Artificial Sequence: Synthetic oligonucleotide
ccuguaauccagccugaau

SEQ ID NO: 1056134 - RNA, 19 nt, Artificial Sequence
  Description of Artificial Sequence: Synthetic oligonucleotide
caccggcaucauucgagau

SEQ ID NO: 1056135 - RNA, 19 nt, Artificial Sequence
  Description of Artificial Sequence: Synthetic oligonucleotide
gcguucucugauggaggga

SEQ ID NO: 1056136 - RNA, 19 nt, Artificial Sequence
  Description of Artificial Sequence: Synthetic oligonucleotide
cacaaccgcccuggagcga

SEQ ID NO: 1056137 - RNA, 19 nt, Artificial Sequence
  Description of Artificial Sequence: Synthetic oligonucleotide
ccuacacaaccgcccugga

SEQ ID NO: 1056138 - RNA, 19 nt, Artificial Sequence
  Description of Artificial Sequence: Synthetic oligonucleotide
gcccuguaauccagccuga

SEQ ID NO: 1056139 - RNA, 19 nt, Artificial Sequence
  Description of Artificial Sequence: Synthetic oligonucleotide
ccgccaucuccauuaugua

SEQ ID NO: 1056140 - RNA, 19 nt, Artificial Sequence
  Description of Artificial Sequence: Synthetic oligonucleotide
ccgcccuggagcgauguaa

SEQ ID NO: 1056141 - RNA, 19 nt, Artificial Sequence
  Description of Artificial Sequence: Synthetic oligonucleotide
cccuguaauccagccugaa

SEQ ID NO: 1056142 - RNA, 19 nt, Artificial Sequence
  Description of Artificial Sequence: Synthetic oligonucleotide
ccuuaugagugggcucugu

SEQ ID NO: 1056143 - RNA, 19 nt, Artificial Sequence
  Description of Artificial Sequence: Synthetic oligonucleotide
ggcgaaccugacagguuuu

SEQ ID NO: 1056144 - RNA, 19 nt, Artificial Sequence
  Description of Artificial Sequence: Synthetic oligonucleotide
ccucuaagacaaggcugua

SEQ ID NO: 1056145 - RNA, 19 nt, Artificial Sequence
  Description of Artificial Sequence: Synthetic oligonucleotide
cguggucaauaaagugcgu

SEQ ID NO: 1056146 - RNA, 19 nt, Artificial Sequence
  Description of Artificial Sequence: Synthetic oligonucleotide
cccgagcuuuccauccgau

SEQ ID NO: 1056147 - RNA, 19 nt, Artificial Sequence
  Description of Artificial Sequence: Synthetic oligonucleotide
cgcccuggagcgauguaau

SEQ ID NO: 1056148 - RNA, 19 nt, Artificial Sequence
  Description of Artificial Sequence: Synthetic oligonucleotide
aaagcgaaguaauaugagc

SEQ ID NO: 1056149 - RNA, 19 nt, Artificial Sequence
  Description of Artificial Sequence: Synthetic oligonucleotide
aguaucuuuaguuucuggc

SEQ ID NO: 1056150 - RNA, 19 nt, Artificial Sequence
  Description of Artificial Sequence: Synthetic oligonucleotide
ucuaaguucucauaauucg

SEQ ID NO: 1056151 - RNA, 19 nt, Artificial Sequence
  Description of Artificial Sequence: Synthetic oligonucleotide
aauuaauugaagaggaagg

SEQ ID NO: 1056152 - RNA, 19 nt, Artificial Sequence
  Description of Artificial Sequence: Synthetic oligonucleotide
agcagaacgaacuccaucc

SEQ ID NO: 1056153 - RNA, 19 nt, Artificial Sequence
  Description of Artificial Sequence: Synthetic oligonucleotide
uuaaagaaccccuuuaccc

SEQ ID NO: 1056154 - RNA, 19 nt, Artificial Sequence
  Description of Artificial Sequence: Synthetic oligonucleotide
acauaauaggauuacagag

SEQ ID NO: 1056155 - RNA, 19 nt, Artificial Sequence
  Description of Artificial Sequence: Synthetic oligonucleotide
uacaauuaauugaagagga

SEQ ID NO: 1056156 - RNA, 19 nt, Artificial Sequence
  Description of Artificial Sequence: Synthetic oligonucleotide
aauucguggacuaaggauc

SEQ ID NO: 1056157 - RNA, 19 nt, Artificial Sequence
  Description of Artificial Sequence: Synthetic oligonucleotide
aaacaacucaaguagcaag

SEQ ID NO: 1056158 - RNA, 19 nt, Artificial Sequence
  Description of Artificial Sequence: Synthetic oligonucleotide
auguaagugaauuacuuag

SEQ ID NO: 1056159 - RNA, 19 nt, Artificial Sequence
  Description of Artificial Sequence: Synthetic oligonucleotide
gaugagaaaaugcuggacc

SEQ ID NO: 1056160 - RNA, 19 nt, Artificial Sequence
  Description of Artificial Sequence: Synthetic oligonucleotide
auuaccccaaacuaccacc

SEQ ID NO: 1056161 - RNA, 19 nt, Artificial Sequence
  Description of Artificial Sequence: Synthetic oligonucleotide
aauaggauuacagaguggu

SEQ ID NO: 1056162 - RNA, 19 nt, Artificial Sequence
  Description of Artificial Sequence: Synthetic oligonucleotide
aacuauaugguggagaaca

SEQ ID NO: 1056163 - RNA, 19 nt, Artificial Sequence
  Description of Artificial Sequence: Synthetic oligonucleotide
cuuauaucuacacagggug

SEQ ID NO: 1056164 - RNA, 19 nt, Artificial Sequence
  Description of Artificial Sequence: Synthetic oligonucleotide
auaauaggauuacagagug

SEQ ID NO: 1056165 - RNA, 19 nt, Artificial Sequence
  Description of Artificial Sequence: Synthetic oligonucleotide
uguaagugaauuacuuagg

SEQ ID NO: 1056166 - RNA, 19 nt, Artificial Sequence
  Description of Artificial Sequence: Synthetic oligonucleotide
uaugagcaaaccauuaccc

SEQ ID NO: 1056167 - RNA, 19 nt, Artificial Sequence
  Description of Artificial Sequence: Synthetic oligonucleotide
auacaauuaauugaagagg

SEQ ID NO: 1056168 - RNA, 19 nt, Artificial Sequence
  Description of Artificial Sequence: Synthetic oligonucleotide
cuaucugaaggcaagagug

SEQ ID NO: 1056169 - RNA, 19 nt, Artificial Sequence
  Description of Artificial Sequence: Synthetic oligonucleotide
uuuguuuuaguauccaagu

SEQ ID NO: 1056170 - RNA, 19 nt, Artificial Sequence
  Description of Artificial Sequence: Synthetic oligonucleotide
aaguucucauaauucgugg

SEQ ID NO: 1056171 - RNA, 19 nt, Artificial Sequence
  Description of Artificial Sequence: Synthetic oligonucleotide
uggucaauacaauuaauug

SEQ ID NO: 1056172 - RNA, 19 nt, Artificial Sequence
  Description of Artificial Sequence: Synthetic oligonucleotide
aaacaggugguucuuaacu

SEQ ID NO: 1056173 - RNA, 19 nt, Artificial Sequence
  Description of Artificial Sequence: Synthetic oligonucleotide
gagucaguaacccaaauca

SEQ ID NO: 1056174 - RNA, 19 nt, Artificial Sequence
  Description of Artificial Sequence: Synthetic oligonucleotide
cagauagucagacucaagg

SEQ ID NO: 1056175 - RNA, 19 nt, Artificial Sequence
  Description of Artificial Sequence: Synthetic oligonucleotide
ggagcuauggcccuaaugg

SEQ ID NO: 1056176 - RNA, 19 nt, Artificial Sequence
  Description of Artificial Sequence: Synthetic oligonucleotide
guaauagcugaacugagcc

SEQ ID NO: 1056177 - RNA, 19 nt, Artificial Sequence
  Description of Artificial Sequence: Synthetic oligonucleotide
acuaugguuuccuuaacuc

SEQ ID NO: 1056178 - RNA, 19 nt, Artificial Sequence
  Description of Artificial Sequence: Synthetic oligonucleotide
aguaguuguucccucaggg

SEQ ID NO: 1056179 - RNA, 19 nt, Artificial Sequence
  Description of Artificial Sequence: Synthetic oligonucleotide
uaacucuugagucaguaac

SEQ ID NO: 1056180 - RNA, 19 nt, Artificial Sequence
  Description of Artificial Sequence: Synthetic oligonucleotide
uuuccaaggacuuuaaaua

SEQ ID NO: 1056181 - RNA, 19 nt, Artificial Sequence
  Description of Artificial Sequence: Synthetic oligonucleotide
uacauaauaggauuacaga

SEQ ID NO: 1056182 - RNA, 19 nt, Artificial Sequence
  Description of Artificial Sequence: Synthetic oligonucleotide
uguaacuaggccccaaccc

SEQ ID NO: 1056183 - RNA, 19 nt, Artificial Sequence
  Description of Artificial Sequence: Synthetic oligonucleotide
uauaugguggagaacauua

SEQ ID NO: 1056184 - RNA, 19 nt, Artificial Sequence
  Description of Artificial Sequence: Synthetic oligonucleotide
aacaacucaaguagcaagg

SEQ ID NO: 1056185 - RNA, 19 nt, Artificial Sequence
  Description of Artificial Sequence: Synthetic oligonucleotide
accccuuuacccuauacac

SEQ ID NO: 1056186 - RNA, 19 nt, Artificial Sequence
  Description of Artificial Sequence: Synthetic oligonucleotide
cuggaaaacucugagaagg

SEQ ID NO: 1056187 - RNA, 19 nt, Artificial Sequence
  Description of Artificial Sequence: Synthetic oligonucleotide
aauagcugaacugagccca

SEQ ID NO: 1056188 - RNA, 19 nt, Artificial Sequence
  Description of Artificial Sequence: Synthetic oligonucleotide
uacagaguggucaauacaa

SEQ ID NO: 1056189 - RNA, 19 nt, Artificial Sequence
  Description of Artificial Sequence: Synthetic oligonucleotide
aagaauuuucgaugcuggg

SEQ ID NO: 1056190 - RNA, 19 nt, Artificial Sequence
  Description of Artificial Sequence: Synthetic oligonucleotide
gaacucaggacaaagcagg

SEQ ID NO: 1056191 - RNA, 19 nt, Artificial Sequence
  Description of Artificial Sequence: Synthetic oligonucleotide
uaauugaagaggaaggaua

SEQ ID NO: 1056192 - RNA, 19 nt, Artificial Sequence
  Description of Artificial Sequence: Synthetic oligonucleotide
cugacuuucauuuggauca

SEQ ID NO: 1056193 - RNA, 19 nt, Artificial Sequence
  Description of Artificial Sequence: Synthetic oligonucleotide
caaaauacagcaugaugcc

SEQ ID NO: 1056194 - RNA, 19 nt, Artificial Sequence
  Description of Artificial Sequence: Synthetic oligonucleotide
uuuggaucaauaagaggcc

SEQ ID NO: 1056195 - RNA, 19 nt, Artificial Sequence
  Description of Artificial Sequence: Synthetic oligonucleotide
ugguaaauuucacacuacc

SEQ ID NO: 1056196 - RNA, 19 nt, Artificial Sequence
  Description of Artificial Sequence: Synthetic oligonucleotide
aguccuaagaggcaauauc

SEQ ID NO: 1056197 - RNA, 19 nt, Artificial Sequence
  Description of Artificial Sequence: Synthetic oligonucleotide
gauagaauucugcuguuac

SEQ ID NO: 1056198 - RNA, 19 nt, Artificial Sequence
  Description of Artificial Sequence: Synthetic oligonucleotide
guaagugaauuacuuaggc

SEQ ID NO: 1056199 - RNA, 19 nt, Artificial Sequence
  Description of Artificial Sequence: Synthetic oligonucleotide
agggcuuccuaccaaauuc

SEQ ID NO: 1056200 - RNA, 19 nt, Artificial Sequence
  Description of Artificial Sequence: Synthetic oligonucleotide
aaaguaguuguucccucag

SEQ ID NO: 1056201 - RNA, 19 nt, Artificial Sequence
  Description of Artificial Sequence: Synthetic oligonucleotide
cauaauucguggacuaagg

SEQ ID NO: 1056202 - RNA, 19 nt, Artificial Sequence
  Description of Artificial Sequence: Synthetic oligonucleotide
aaucuccaaaacaaaggac

SEQ ID NO: 1056203 - RNA, 19 nt, Artificial Sequence
  Description of Artificial Sequence: Synthetic oligonucleotide
uuagcuauuuguauaggau

SEQ ID NO: 1056204 - RNA, 19 nt, Artificial Sequence
  Description of Artificial Sequence: Synthetic oligonucleotide
aaauacagcaugaugccug

SEQ ID NO: 1056205 - RNA, 19 nt, Artificial Sequence
  Description of Artificial Sequence: Synthetic oligonucleotide
accuuauaucuacacaggg

SEQ ID NO: 1056206 - RNA, 19 nt, Artificial Sequence
  Description of Artificial Sequence: Synthetic oligonucleotide
ucaacuauaugguggagaa

SEQ ID NO: 1056207 - RNA, 19 nt, Artificial Sequence
  Description of Artificial Sequence: Synthetic oligonucleotide
uaugguggagaacauuagc

SEQ ID NO: 1056208 - RNA, 19 nt, Artificial Sequence
  Description of Artificial Sequence: Synthetic oligonucleotide
ugagcaaaccauuacccca

SEQ ID NO: 1056209 - RNA, 19 nt, Artificial Sequence
  Description of Artificial Sequence: Synthetic oligonucleotide
uaagucacauuugagcucc

SEQ ID NO: 1056210 - RNA, 19 nt, Artificial Sequence
  Description of Artificial Sequence: Synthetic oligonucleotide
uuucguggcaagcagcacc

SEQ ID NO: 1056211 - RNA, 19 nt, Artificial Sequence
  Description of Artificial Sequence: Synthetic oligonucleotide
acugucaacuauauggugg

SEQ ID NO: 1056212 - RNA, 19 nt, Artificial Sequence
  Description of Artificial Sequence: Synthetic oligonucleotide
aagcccuugacaucaagca

SEQ ID NO: 1056213 - RNA, 19 nt, Artificial Sequence
  Description of Artificial Sequence: Synthetic oligonucleotide
cagacagaugagaaaaugc

SEQ ID NO: 1056214 - RNA, 19 nt, Artificial Sequence
  Description of Artificial Sequence: Synthetic oligonucleotide
aggggcauagacuagcaag

SEQ ID NO: 1056215 - RNA, 19 nt, Artificial Sequence
  Description of Artificial Sequence: Synthetic oligonucleotide
uaggauuacagagugguca

SEQ ID NO: 1056216 - RNA, 19 nt, Artificial Sequence
  Description of Artificial Sequence: Synthetic oligonucleotide
auuagcuauuuguauagga

SEQ ID NO: 1056217 - RNA, 19 nt, Artificial Sequence
  Description of Artificial Sequence: Synthetic oligonucleotide
aagcgaaguaauaugagca

SEQ ID NO: 1056218 - RNA, 19 nt, Artificial Sequence
  Description of Artificial Sequence: Synthetic oligonucleotide
uaagugaauuacuuaggca

SEQ ID NO: 1056219 - RNA, 19 nt, Artificial Sequence
  Description of Artificial Sequence: Synthetic oligonucleotide
ucugcucuaaguccuaaga

SEQ ID NO: 1056220 - RNA, 19 nt, Artificial Sequence
  Description of Artificial Sequence: Synthetic oligonucleotide
agauacauaauaggauuac

SEQ ID NO: 1056221 - RNA, 19 nt, Artificial Sequence
  Description of Artificial Sequence: Synthetic oligonucleotide
acaaagcaggggcauagac

SEQ ID NO: 1056222 - RNA, 19 nt, Artificial Sequence
  Description of Artificial Sequence: Synthetic oligonucleotide
acuaauuuauggaagaaaa

SEQ ID NO: 1056223 - RNA, 19 nt, Artificial Sequence
  Description of Artificial Sequence: Synthetic oligonucleotide
agugguaaauuucacacua

SEQ ID NO: 1056224 - RNA, 19 nt, Artificial Sequence
  Description of Artificial Sequence: Synthetic oligonucleotide
aacugacugaucaugaccu

SEQ ID NO: 1056225 - RNA, 19 nt, Artificial Sequence
  Description of Artificial Sequence: Synthetic oligonucleotide
gaaguaauaugagcaaacc

SEQ ID NO: 1056226 - RNA, 19 nt, Artificial Sequence
  Description of Artificial Sequence: Synthetic oligonucleotide
guaacuaauuuauggaaga

SEQ ID NO: 1056227 - RNA, 19 nt, Artificial Sequence
  Description of Artificial Sequence: Synthetic oligonucleotide
uauuuucguggcaagcagc

SEQ ID NO: 1056228 - RNA, 19 nt, Artificial Sequence
  Description of Artificial Sequence: Synthetic oligonucleotide
ucauaauucguggacuaag

SEQ ID NO: 1056229 - RNA, 19 nt, Artificial Sequence
  Description of Artificial Sequence: Synthetic oligonucleotide
uaauucguggacuaaggau

SEQ ID NO: 1056230 - RNA, 19 nt, Artificial Sequence
  Description of Artificial Sequence: Synthetic oligonucleotide
aaguaguuguucccucagg

SEQ ID NO: 1056231 - RNA, 19 nt, Artificial Sequence
  Description of Artificial Sequence: Synthetic oligonucleotide
uaauaggauuacagagugg

SEQ ID NO: 1056232 - RNA, 19 nt, Artificial Sequence
  Description of Artificial Sequence: Synthetic oligonucleotide
uuuguuauuuucguggcaa

SEQ ID NO: 1056233 - RNA, 19 nt, Artificial Sequence
  Description of Artificial Sequence: Synthetic oligonucleotide
aauuagcuauuuguauagg

SEQ ID NO: 1056234 - RNA, 19 nt, Artificial Sequence
  Description of Artificial Sequence: Synthetic oligonucleotide
ugguaacuaauuuauggaa

SEQ ID NO: 1056235 - RNA, 19 nt, Artificial Sequence
  Description of Artificial Sequence: Synthetic oligonucleotide
acucuugagucaguaaccc

SEQ ID NO: 1056236 - RNA, 19 nt, Artificial Sequence
  Description of Artificial Sequence: Synthetic oligonucleotide
accagauaggcaguggagc

SEQ ID NO: 1056237 - RNA, 19 nt, Artificial Sequence
  Description of Artificial Sequence: Synthetic oligonucleotide
uaggguuugagaguggagc

SEQ ID NO: 1056238 - RNA, 19 nt, Artificial Sequence
  Description of Artificial Sequence: Synthetic oligonucleotide
acugaucaugaccugacca

SEQ ID NO: 1056239 - RNA, 19 nt, Artificial Sequence
  Description of Artificial Sequence: Synthetic oligonucleotide
uuacagaguggucaauaca

SEQ ID NO: 1056240 - RNA, 19 nt, Artificial Sequence
  Description of Artificial Sequence: Synthetic oligonucleotide
acaggaaaagcagggaagg

SEQ ID NO: 1056241 - RNA, 19 nt, Artificial Sequence
  Description of Artificial Sequence: Synthetic oligonucleotide
uauguaagugaauuacuua

SEQ ID NO: 1056242 - RNA, 19 nt, Artificial Sequence
  Description of Artificial Sequence: Synthetic oligonucleotide
uaauaugagcaaaccauua

SEQ ID NO: 1056243 - RNA, 19 nt, Artificial Sequence
  Description of Artificial Sequence: Synthetic oligonucleotide
acaggugguucuuaacuuc

SEQ ID NO: 1056244 - RNA, 19 nt, Artificial Sequence
  Description of Artificial Sequence: Synthetic oligonucleotide
ugagucaguaacccaaauc

SEQ ID NO: 1056245 - RNA, 19 nt, Artificial Sequence
  Description of Artificial Sequence: Synthetic oligonucleotide
ugcugaaacaacucaagua

SEQ ID NO: 1056246 - RNA, 19 nt, Artificial Sequence
  Description of Artificial Sequence: Synthetic oligonucleotide
uuuuaaggaugcuuuuccu

SEQ ID NO: 1056247 - RNA, 19 nt, Artificial Sequence
  Description of Artificial Sequence: Synthetic oligonucleotide
cuuuacccuauacacacac

SEQ ID NO: 1056248 - RNA, 19 nt, Artificial Sequence
  Description of Artificial Sequence: Synthetic oligonucleotide
gaauuuucgaugcugggua

SEQ ID NO: 1056249 - RNA, 19 nt, Artificial Sequence
  Description of Artificial Sequence: Synthetic oligonucleotide
acgaacuccauccuugugu

SEQ ID NO: 1056250 - RNA, 19 nt, Artificial Sequence
  Description of Artificial Sequence: Synthetic oligonucleotide
acccuauacacacacucag

SEQ ID NO: 1056251 - RNA, 19 nt, Artificial Sequence
  Description of Artificial Sequence: Synthetic oligonucleotide
aggaaggauagaauucugc

SEQ ID NO: 1056252 - RNA, 19 nt, Artificial Sequence
  Description of Artificial Sequence: Synthetic oligonucleotide
acuguaacuaggccccaac

SEQ ID NO: 1056253 - RNA, 19 nt, Artificial Sequence
  Description of Artificial Sequence: Synthetic oligonucleotide
acuaccacccacuucuugu

SEQ ID NO: 1056254 - RNA, 19 nt, Artificial Sequence
  Description of Artificial Sequence: Synthetic oligonucleotide
uuuuguuauuuucguggca

SEQ ID NO: 1056255 - RNA, 19 nt, Artificial Sequence
  Description of Artificial Sequence: Synthetic oligonucleotide
gagaaggcaacagauaguc

SEQ ID NO: 1056256 - RNA, 19 nt, Artificial Sequence
  Description of Artificial Sequence: Synthetic oligonucleotide
uuguuuuaguauccaaguc

SEQ ID NO: 1056257 - RNA, 19 nt, Artificial Sequence
  Description of Artificial Sequence: Synthetic oligonucleotide
acaguuaauuagcuauuug

SEQ ID NO: 1056258 - RNA, 19 nt, Artificial Sequence
  Description of Artificial Sequence: Synthetic oligonucleotide
augcgauaaugccagguag

SEQ ID NO: 1056259 - RNA, 19 nt, Artificial Sequence
  Description of Artificial Sequence: Synthetic oligonucleotide
ugaccugaccaucaacagc

SEQ ID NO: 1056260 - RNA, 19 nt, Artificial Sequence
  Description of Artificial Sequence: Synthetic oligonucleotide
ggucaauacaauuaauuga

SEQ ID NO: 1056261 - RNA, 19 nt, Artificial Sequence
  Description of Artificial Sequence: Synthetic oligonucleotide
uccuaagaggcaauaucca

SEQ ID NO: 1056262 - RNA, 19 nt, Artificial Sequence
  Description of Artificial Sequence: Synthetic oligonucleotide
aaucacuaugguuuccuua

SEQ ID NO: 1056263 - RNA, 19 nt, Artificial Sequence
  Description of Artificial Sequence: Synthetic oligonucleotide
auaauucguggacuaagga

SEQ ID NO: 1056264 - RNA, 19 nt, Artificial Sequence
  Description of Artificial Sequence: Synthetic oligonucleotide
guccuaagaggcaauaucc

SEQ ID NO: 1056265 - RNA, 19 nt, Artificial Sequence
  Description of Artificial Sequence: Synthetic oligonucleotide
uggaaaacucugagaaggc

SEQ ID NO: 1056266 - RNA, 19 nt, Artificial Sequence
  Description of Artificial Sequence: Synthetic oligonucleotide
aaucagaggagcaguccac

SEQ ID NO: 1056267 - RNA, 19 nt, Artificial Sequence
  Description of Artificial Sequence: Synthetic oligonucleotide
uuuaaggaugcuuuuccuu

SEQ ID NO: 1056268 - RNA, 19 nt, Artificial Sequence
  Description of Artificial Sequence: Synthetic oligonucleotide
caaggcccaaucacuaugg

SEQ ID NO: 1056269 - RNA, 19 nt, Artificial Sequence
  Description of Artificial Sequence: Synthetic oligonucleotide
gaaggcaagaguggguggg

SEQ ID NO: 1056270 - RNA, 19 nt, Artificial Sequence
  Description of Artificial Sequence: Synthetic oligonucleotide
gacagaugagaaaaugcug

SEQ ID NO: 1056271 - RNA, 19 nt, Artificial Sequence
  Description of Artificial Sequence: Synthetic oligonucleotide
uuaauugaagaggaaggau

SEQ ID NO: 1056272 - RNA, 19 nt, Artificial Sequence
  Description of Artificial Sequence: Synthetic oligonucleotide
aaaggacagugguaaauuu

SEQ ID NO: 1056273 - RNA, 19 nt, Artificial Sequence
  Description of Artificial Sequence: Synthetic oligonucleotide
gcccuaauggaaaugaugg

SEQ ID NO: 1056274 - RNA, 19 nt, Artificial Sequence
  Description of Artificial Sequence: Synthetic oligonucleotide
auuugagcucccuaucuga

SEQ ID NO: 1056275 - RNA, 19 nt, Artificial Sequence
  Description of Artificial Sequence: Synthetic oligonucleotide
aaugaucccagcaugcgau

SEQ ID NO: 1056276 - RNA, 19 nt, Artificial Sequence
  Description of Artificial Sequence: Synthetic oligonucleotide
aacaggugguucuuaacuu

SEQ ID NO: 1056277 - RNA, 19 nt, Artificial Sequence
  Description of Artificial Sequence: Synthetic oligonucleotide
gguaacuaauuuauggaag

SEQ ID NO: 1056278 - RNA, 19 nt, Artificial Sequence
  Description of Artificial Sequence: Synthetic oligonucleotide
gugguaacuaauuuaugga

SEQ ID NO: 1056279 - RNA, 19 nt, Artificial Sequence
  Description of Artificial Sequence: Synthetic oligonucleotide
caccuuauaucuacacagg

SEQ ID NO: 1056280 - RNA, 19 nt, Artificial Sequence
  Description of Artificial Sequence: Synthetic oligonucleotide
guucuagccagaaaagagc

SEQ ID NO: 1056281 - RNA, 19 nt, Artificial Sequence
  Description of Artificial Sequence: Synthetic oligonucleotide
ccaccuuauaucuacacag

SEQ ID NO: 1056282 - RNA, 19 nt, Artificial Sequence
  Description of Artificial Sequence: Synthetic oligonucleotide
ugcgauaaugccagguagu

SEQ ID NO: 1056283 - RNA, 19 nt, Artificial Sequence
  Description of Artificial Sequence: Synthetic oligonucleotide
ucuaaguccuaagaggcaa

SEQ ID NO: 1056284 - RNA, 19 nt, Artificial Sequence
  Description of Artificial Sequence: Synthetic oligonucleotide
uggagcagugacaggaaca

SEQ ID NO: 1056285 - RNA, 19 nt, Artificial Sequence
  Description of Artificial Sequence: Synthetic oligonucleotide
auagaauucugcuguuaca

SEQ ID NO: 1056286 - RNA, 19 nt, Artificial Sequence
  Description of Artificial Sequence: Synthetic oligonucleotide
aguucucauaauucgugga

SEQ ID NO: 1056287 - RNA, 19 nt, Artificial Sequence
  Description of Artificial Sequence: Synthetic oligonucleotide
accuggaaucaugagcugc

SEQ ID NO: 1056288 - RNA, 19 nt, Artificial Sequence
  Description of Artificial Sequence: Synthetic oligonucleotide
uggaucaauaagaggccca

SEQ ID NO: 1056289 - RNA, 19 nt, Artificial Sequence
  Description of Artificial Sequence: Synthetic oligonucleotide
uagacuagcaaggcagucc

SEQ ID NO: 1056290 - RNA, 19 nt, Artificial Sequence
  Description of Artificial Sequence: Synthetic oligonucleotide
ccuaccaaauucaaauggg

SEQ ID NO: 1056291 - RNA, 19 nt, Artificial Sequence
  Description of Artificial Sequence: Synthetic oligonucleotide
uagcaaggcaguccuaugu

SEQ ID NO: 1056292 - RNA, 19 nt, Artificial Sequence
  Description of Artificial Sequence: Synthetic oligonucleotide
ggaaucaugagcugcacca

SEQ ID NO: 1056293 - RNA, 19 nt, Artificial Sequence
  Description of Artificial Sequence: Synthetic oligonucleotide
agacuagcaaggcaguccu

SEQ ID NO: 1056294 - RNA, 19 nt, Artificial Sequence
  Description of Artificial Sequence: Synthetic oligonucleotide
ugacugaucaugaccugac

SEQ ID NO: 1056295 - RNA, 19 nt, Artificial Sequence
  Description of Artificial Sequence: Synthetic oligonucleotide
ugguucugcucuaaguccu

SEQ ID NO: 1056296 - RNA, 19 nt, Artificial Sequence
  Description of Artificial Sequence: Synthetic oligonucleotide
uccaaacuuugccggaagc

SEQ ID NO: 1056297 - RNA, 19 nt, Artificial Sequence
  Description of Artificial Sequence: Synthetic oligonucleotide
uuguuauuuucguggcaag

SEQ ID NO: 1056298 - RNA, 19 nt, Artificial Sequence
  Description of Artificial Sequence: Synthetic oligonucleotide
ugaaggcaagagugggugg

SEQ ID NO: 1056299 - RNA, 19 nt, Artificial Sequence
  Description of Artificial Sequence: Synthetic oligonucleotide
ucagacucaaggcccaauc

SEQ ID NO: 1056300 - RNA, 19 nt, Artificial Sequence
  Description of Artificial Sequence: Synthetic oligonucleotide
agaauuuucgaugcugggu

SEQ ID NO: 1056301 - RNA, 19 nt, Artificial Sequence
  Description of Artificial Sequence: Synthetic oligonucleotide
augaccugaccaucaacag

SEQ ID NO: 1056302 - RNA, 19 nt, Artificial Sequence
  Description of Artificial Sequence: Synthetic oligonucleotide
uggacuaaggauccaucaa

SEQ ID NO: 1056303 - RNA, 19 nt, Artificial Sequence
  Description of Artificial Sequence: Synthetic oligonucleotide
uaacuaggccccaacccug

SEQ ID NO: 1056304 - RNA, 19 nt, Artificial Sequence
  Description of Artificial Sequence: Synthetic oligonucleotide
uccacugaaacugacugau

SEQ ID NO: 1056305 - RNA, 19 nt, Artificial Sequence
  Description of Artificial Sequence: Synthetic oligonucleotide
acaacucaaguagcaaggg

SEQ ID NO: 1056306 - RNA, 19 nt, Artificial Sequence
  Description of Artificial Sequence: Synthetic oligonucleotide
cauaauaggauuacagagu

SEQ ID NO: 1056307 - RNA, 19 nt, Artificial Sequence
  Description of Artificial Sequence: Synthetic oligonucleotide
ugggccguggccuuucucc

SEQ ID NO: 1056308 - RNA, 19 nt, Artificial Sequence
  Description of Artificial Sequence: Synthetic oligonucleotide
aaauuuuaaagaaccccuu

SEQ ID NO: 1056309 - RNA, 19 nt, Artificial Sequence
  Description of Artificial Sequence: Synthetic oligonucleotide
gcauagacuagcaaggcag

SEQ ID NO: 1056310 - RNA, 19 nt, Artificial Sequence
  Description of Artificial Sequence: Synthetic oligonucleotide
caguaacccaaaucagucc

SEQ ID NO: 1056311 - RNA, 19 nt, Artificial Sequence
  Description of Artificial Sequence: Synthetic oligonucleotide
uucguggcaagcagcaccu

SEQ ID NO: 1056312 - RNA, 19 nt, Artificial Sequence
  Description of Artificial Sequence: Synthetic oligonucleotide
gguaaauuucacacuaccc

SEQ ID NO: 1056313 - RNA, 19 nt, Artificial Sequence
  Description of Artificial Sequence: Synthetic oligonucleotide
guuaauuagcuauuuguau

SEQ ID NO: 1056314 - RNA, 19 nt, Artificial Sequence
  Description of Artificial Sequence: Synthetic oligonucleotide
aguccuauguaagugaauu

SEQ ID NO: 1056315 - RNA, 19 nt, Artificial Sequence
  Description of Artificial Sequence: Synthetic oligonucleotide
uuggaucaauaagaggccc

SEQ ID NO: 1056316 - RNA, 19 nt, Artificial Sequence
  Description of Artificial Sequence: Synthetic oligonucleotide
gaaacaggugguucuuaac

SEQ ID NO: 1056317 - RNA, 19 nt, Artificial Sequence
  Description of Artificial Sequence: Synthetic oligonucleotide
aguuaauuagcuauuugua

SEQ ID NO: 1056318 - RNA, 19 nt, Artificial Sequence
  Description of Artificial Sequence: Synthetic oligonucleotide
caguaauagcugaacugag

SEQ ID NO: 1056319 - RNA, 19 nt, Artificial Sequence
  Description of Artificial Sequence: Synthetic oligonucleotide
aacuaccacccacuucuug

SEQ ID NO: 1056320 - RNA, 19 nt, Artificial Sequence
  Description of Artificial Sequence: Synthetic oligonucleotide
agucucacaccugacuuuc

SEQ ID NO: 1056321 - RNA, 19 nt, Artificial Sequence
  Description of Artificial Sequence: Synthetic oligonucleotide
uuuguauaggauggauuac

SEQ ID NO: 1056322 - RNA, 19 nt, Artificial Sequence
  Description of Artificial Sequence: Synthetic oligonucleotide
aguagcaagggaucuuuaa

SEQ ID NO: 1056323 - RNA, 19 nt, Artificial Sequence
  Description of Artificial Sequence: Synthetic oligonucleotide
ggauggauuacuuauuaaa

SEQ ID NO: 1056324 - RNA, 19 nt, Artificial Sequence
  Description of Artificial Sequence: Synthetic oligonucleotide
ugcacauccagguguauuu

SEQ ID NO: 1056325 - RNA, 19 nt, Artificial Sequence
  Description of Artificial Sequence: Synthetic oligonucleotide
uuuacccuauacacacacu

SEQ ID NO: 1056326 - RNA, 19 nt, Artificial Sequence
  Description of Artificial Sequence: Synthetic oligonucleotide
ugguucuuaacuucuugua

SEQ ID NO: 1056327 - RNA, 19 nt, Artificial Sequence
  Description of Artificial Sequence: Synthetic oligonucleotide
ugaacugagcccaccuuau

SEQ ID NO: 1056328 - RNA, 19 nt, Artificial Sequence
  Description of Artificial Sequence: Synthetic oligonucleotide
aggguuugagaguggagca

SEQ ID NO: 1056329 - RNA, 19 nt, Artificial Sequence
  Description of Artificial Sequence: Synthetic oligonucleotide
gagcccaccuuauaucuac

SEQ ID NO: 1056330 - RNA, 19 nt, Artificial Sequence
  Description of Artificial Sequence: Synthetic oligonucleotide
ccuaauggaaaugauggag

SEQ ID NO: 1056331 - RNA, 19 nt, Artificial Sequence
  Description of Artificial Sequence: Synthetic oligonucleotide
aacacaaaccacagaaauu

SEQ ID NO: 1056332 - RNA, 19 nt, Artificial Sequence
  Description of Artificial Sequence: Synthetic oligonucleotide
aacagauagucagacucaa

SEQ ID NO: 1056333 - RNA, 19 nt, Artificial Sequence
  Description of Artificial Sequence: Synthetic oligonucleotide
cacacaguuaauuagcuau

SEQ ID NO: 1056334 - RNA, 19 nt, Artificial Sequence
  Description of Artificial Sequence: Synthetic oligonucleotide
aguuccuaaccacugucaa

SEQ ID NO: 1056335 - RNA, 19 nt, Artificial Sequence
  Description of Artificial Sequence: Synthetic oligonucleotide
uggugguaacuaauuuaug

SEQ ID NO: 1056336 - RNA, 19 nt, Artificial Sequence
  Description of Artificial Sequence: Synthetic oligonucleotide
agcgaaguaauaugagcaa

SEQ ID NO: 1056337 - RNA, 19 nt, Artificial Sequence
  Description of Artificial Sequence: Synthetic oligonucleotide
aaacuuugccggaagcccu

SEQ ID NO: 1056338 - RNA, 19 nt, Artificial Sequence
  Description of Artificial Sequence: Synthetic oligonucleotide
aguucagacagagcccggg

SEQ ID NO: 1056339 - RNA, 19 nt, Artificial Sequence
  Description of Artificial Sequence: Synthetic oligonucleotide
ucaugaccugaccaucaac

SEQ ID NO: 1056340 - RNA, 19 nt, Artificial Sequence
  Description of Artificial Sequence: Synthetic oligonucleotide
cugaaggcaagagugggug

SEQ ID NO: 1056341 - RNA, 19 nt, Artificial Sequence
  Description of Artificial Sequence: Synthetic oligonucleotide
auagacuagcaaggcaguc

SEQ ID NO: 1056342 - RNA, 19 nt, Artificial Sequence
  Description of Artificial Sequence: Synthetic oligonucleotide
agccagacagaugagaaaa

SEQ ID NO: 1056343 - RNA, 19 nt, Artificial Sequence
  Description of Artificial Sequence: Synthetic oligonucleotide
uucagacagagcccgggaa

SEQ ID NO: 1056344 - RNA, 19 nt, Artificial Sequence
  Description of Artificial Sequence: Synthetic oligonucleotide
gaaucaugagcugcaccag

SEQ ID NO: 1056345 - RNA, 19 nt, Artificial Sequence
  Description of Artificial Sequence: Synthetic oligonucleotide
uauccaagucucacaccug

SEQ ID NO: 1056346 - RNA, 19 nt, Artificial Sequence
  Description of Artificial Sequence: Synthetic oligonucleotide
auaucuacacagggugggg

SEQ ID NO: 1056347 - RNA, 19 nt, Artificial Sequence
  Description of Artificial Sequence: Synthetic oligonucleotide
gcucuaaguccuaagaggc

SEQ ID NO: 1056348 - RNA, 19 nt, Artificial Sequence
  Description of Artificial Sequence: Synthetic oligonucleotide
auuuucguggcaagcagca

SEQ ID NO: 1056349 - RNA, 19 nt, Artificial Sequence
  Description of Artificial Sequence: Synthetic oligonucleotide
agucaguaacccaaaucag

SEQ ID NO: 1056350 - RNA, 19 nt, Artificial Sequence
  Description of Artificial Sequence: Synthetic oligonucleotide
guagcaagggaucuuuaaa

SEQ ID NO: 1056351 - RNA, 19 nt, Artificial Sequence
  Description of Artificial Sequence: Synthetic oligonucleotide
aagucucacaccugacuuu

SEQ ID NO: 1056352 - RNA, 19 nt, Artificial Sequence
  Description of Artificial Sequence: Synthetic oligonucleotide
aacccugagcuggaaaacu

SEQ ID NO: 1056353 - RNA, 19 nt, Artificial Sequence
  Description of Artificial Sequence: Synthetic oligonucleotide
guggacuaaggauccauca

SEQ ID NO: 1056354 - RNA, 19 nt, Artificial Sequence
  Description of Artificial Sequence: Synthetic oligonucleotide
cuaaccacugucaacuaua

SEQ ID NO: 1056355 - RNA, 19 nt, Artificial Sequence
  Description of Artificial Sequence: Synthetic oligonucleotide
gcaagcagcaccuggaauc

SEQ ID NO: 1056356 - RNA, 19 nt, Artificial Sequence
  Description of Artificial Sequence: Synthetic oligonucleotide
aagggaucuuuaaaaguau

SEQ ID NO: 1056357 - RNA, 19 nt, Artificial Sequence
  Description of Artificial Sequence: Synthetic oligonucleotide
gacugaucaugaccugacc

SEQ ID NO: 1056358 - RNA, 19 nt, Artificial Sequence
  Description of Artificial Sequence: Synthetic oligonucleotide
ggggcauagacuagcaagg

SEQ ID NO: 1056359 - RNA, 19 nt, Artificial Sequence
  Description of Artificial Sequence: Synthetic oligonucleotide
uaucuacacagggugggga

SEQ ID NO: 1056360 - RNA, 19 nt, Artificial Sequence
  Description of Artificial Sequence: Synthetic oligonucleotide
aggaaaagcagggaaggaa

SEQ ID NO: 1056361 - RNA, 19 nt, Artificial Sequence
  Description of Artificial Sequence: Synthetic oligonucleotide
cugucaacuauauggugga

SEQ ID NO: 1056362 - RNA, 19 nt, Artificial Sequence
  Description of Artificial Sequence: Synthetic oligonucleotide
ucuuuaguuucuggccaag

SEQ ID NO: 1056363 - RNA, 19 nt, Artificial Sequence
  Description of Artificial Sequence: Synthetic oligonucleotide
acaaaggacagugguaaau

SEQ ID NO: 1056364 - RNA, 19 nt, Artificial Sequence
  Description of Artificial Sequence: Synthetic oligonucleotide
uucugcuguuacaggaaaa

SEQ ID NO: 1056365 - RNA, 19 nt, Artificial Sequence
  Description of Artificial Sequence: Synthetic oligonucleotide
guuccuaaccacugucaac

SEQ ID NO: 1056366 - RNA, 19 nt, Artificial Sequence
  Description of Artificial Sequence: Synthetic oligonucleotide
guaacuaggccccaacccu

SEQ ID NO: 1056367 - RNA, 19 nt, Artificial Sequence
  Description of Artificial Sequence: Synthetic oligonucleotide
gagcagaacgaacuccauc

SEQ ID NO: 1056368 - RNA, 19 nt, Artificial Sequence
  Description of Artificial Sequence: Synthetic oligonucleotide
ugaccaucaacagcaucca

SEQ ID NO: 1056369 - RNA, 19 nt, Artificial Sequence
  Description of Artificial Sequence: Synthetic oligonucleotide
ugaauuacuuaggcaugac

SEQ ID NO: 1056370 - RNA, 19 nt, Artificial Sequence
  Description of Artificial Sequence: Synthetic oligonucleotide
agcucaaaauacagcauga

SEQ ID NO: 1056371 - RNA, 19 nt, Artificial Sequence
  Description of Artificial Sequence: Synthetic oligonucleotide
auaggauuacagagugguc

SEQ ID NO: 1056372 - RNA, 19 nt, Artificial Sequence
  Description of Artificial Sequence: Synthetic oligonucleotide
acuagcaaggcaguccuau

SEQ ID NO: 1056373 - RNA, 19 nt, Artificial Sequence
  Description of Artificial Sequence: Synthetic oligonucleotide
gcaguaauagcugaacuga

SEQ ID NO: 1056374 - RNA, 19 nt, Artificial Sequence
  Description of Artificial Sequence: Synthetic oligonucleotide
gucaacuauaugguggaga

SEQ ID NO: 1056375 - RNA, 19 nt, Artificial Sequence
  Description of Artificial Sequence: Synthetic oligonucleotide
agguguauuuauagagcuc

SEQ ID NO: 1056376 - RNA, 19 nt, Artificial Sequence
  Description of Artificial Sequence: Synthetic oligonucleotide
ggagacauguccacaguag

SEQ ID NO: 1056377 - RNA, 19 nt, Artificial Sequence
  Description of Artificial Sequence: Synthetic oligonucleotide
cuaaguucucauaauucgu

SEQ ID NO: 1056378 - RNA, 19 nt, Artificial Sequence
  Description of Artificial Sequence: Synthetic oligonucleotide
cagguaguggccccugggc

SEQ ID NO: 1056379 - RNA, 19 nt, Artificial Sequence
  Description of Artificial Sequence: Synthetic oligonucleotide
gagcuauggcccuaaugga

SEQ ID NO: 1056380 - RNA, 19 nt, Artificial Sequence
  Description of Artificial Sequence: Synthetic oligonucleotide
acugacugaucaugaccug

SEQ ID NO: 1056381 - RNA, 19 nt, Artificial Sequence
  Description of Artificial Sequence: Synthetic oligonucleotide
cacauuugagcucccuauc

SEQ ID NO: 1056382 - RNA, 19 nt, Artificial Sequence
  Description of Artificial Sequence: Synthetic oligonucleotide
uauggcccuaauggaaaug

SEQ ID NO: 1056383 - RNA, 19 nt, Artificial Sequence
  Description of Artificial Sequence: Synthetic oligonucleotide
ugcaccagauaggcagugg

SEQ ID NO: 1056384 - RNA, 19 nt, Artificial Sequence
  Description of Artificial Sequence: Synthetic oligonucleotide
ugacaucaagcagaugcaa

SEQ ID NO: 1056385 - RNA, 19 nt, Artificial Sequence
  Description of Artificial Sequence: Synthetic oligonucleotide
gugaauuacuuaggcauga

SEQ ID NO: 1056386 - RNA, 19 nt, Artificial Sequence
  Description of Artificial Sequence: Synthetic oligonucleotide
aguuucuggccaagguuuc

SEQ ID NO: 1056387 - RNA, 19 nt, Artificial Sequence
  Description of Artificial Sequence: Synthetic oligonucleotide
uguguacaccagcauucau

SEQ ID NO: 1056388 - RNA, 19 nt, Artificial Sequence
  Description of Artificial Sequence: Synthetic oligonucleotide
cuagcaaggcaguccuaug

SEQ ID NO: 1056389 - RNA, 19 nt, Artificial Sequence
  Description of Artificial Sequence: Synthetic oligonucleotide
ggaucaauaagaggcccag

SEQ ID NO: 1056390 - RNA, 19 nt, Artificial Sequence
  Description of Artificial Sequence: Synthetic oligonucleotide
ggaaggauagaauucugcu

SEQ ID NO: 1056391 - RNA, 19 nt, Artificial Sequence
  Description of Artificial Sequence: Synthetic oligonucleotide
agauaggcaguggagcagu

SEQ ID NO: 1056392 - RNA, 19 nt, Artificial Sequence
  Description of Artificial Sequence: Synthetic oligonucleotide
aagagugggugggccgugg

SEQ ID NO: 1056393 - RNA, 19 nt, Artificial Sequence
  Description of Artificial Sequence: Synthetic oligonucleotide
gaaccccuuuacccuauac

SEQ ID NO: 1056394 - RNA, 19 nt, Artificial Sequence
  Description of Artificial Sequence: Synthetic oligonucleotide
cagaugagaaaaugcugga

SEQ ID NO: 1056395 - RNA, 19 nt, Artificial Sequence
  Description of Artificial Sequence: Synthetic oligonucleotide
cacaccugacuuucauuug

SEQ ID NO: 1056396 - RNA, 19 nt, Artificial Sequence
  Description of Artificial Sequence: Synthetic oligonucleotide
cgaaguaauaugagcaaac

SEQ ID NO: 1056397 - RNA, 19 nt, Artificial Sequence
  Description of Artificial Sequence: Synthetic oligonucleotide
acuuaggcaugacacuguu

SEQ ID NO: 1056398 - RNA, 19 nt, Artificial Sequence
  Description of Artificial Sequence: Synthetic oligonucleotide
ggacuaaggauccaucaaa

SEQ ID NO: 1056399 - RNA, 19 nt, Artificial Sequence
  Description of Artificial Sequence: Synthetic oligonucleotide
agcccgggaaaagggagac

SEQ ID NO: 1056400 - RNA, 19 nt, Artificial Sequence
  Description of Artificial Sequence: Synthetic oligonucleotide
agcaaggcaguccuaugua

SEQ ID NO: 1056401 - RNA, 19 nt, Artificial Sequence
  Description of Artificial Sequence: Synthetic oligonucleotide
caguggagcagugacagga

SEQ ID NO: 1056402 - RNA, 19 nt, Artificial Sequence
  Description of Artificial Sequence: Synthetic oligonucleotide
gacauguccacaguagggu

SEQ ID NO: 1056403 - RNA, 19 nt, Artificial Sequence
  Description of Artificial Sequence: Synthetic oligonucleotide
ggaagggacaguuccuaac

SEQ ID NO: 1056404 - RNA, 19 nt, Artificial Sequence
  Description of Artificial Sequence: Synthetic oligonucleotide
uggccaagguuucauucuu

SEQ ID NO: 1056405 - RNA, 19 nt, Artificial Sequence
  Description of Artificial Sequence: Synthetic oligonucleotide
acaauuaauugaagaggaa

SEQ ID NO: 1056406 - RNA, 19 nt, Artificial Sequence
  Description of Artificial Sequence: Synthetic oligonucleotide
uaaguccuaagaggcaaua

SEQ ID NO: 1056407 - RNA, 19 nt, Artificial Sequence
  Description of Artificial Sequence: Synthetic oligonucleotide
uaccccaaacuaccaccca

SEQ ID NO: 1056408 - RNA, 19 nt, Artificial Sequence
  Description of Artificial Sequence: Synthetic oligonucleotide
cuggguacacagcugcuca

SEQ ID NO: 1056409 - RNA, 19 nt, Artificial Sequence
  Description of Artificial Sequence: Synthetic oligonucleotide
caacucaaguagcaaggga

SEQ ID NO: 1056410 - RNA, 19 nt, Artificial Sequence
  Description of Artificial Sequence: Synthetic oligonucleotide
ggcaagagugggugggccg

SEQ ID NO: 1056411 - RNA, 19 nt, Artificial Sequence
  Description of Artificial Sequence: Synthetic oligonucleotide
aagucacauuugagcuccc

SEQ ID NO: 1056412 - RNA, 19 nt, Artificial Sequence
  Description of Artificial Sequence: Synthetic oligonucleotide
ucaaguagcaagggaucuu

SEQ ID NO: 1056413 - RNA, 19 nt, Artificial Sequence
  Description of Artificial Sequence: Synthetic oligonucleotide
caguuccuaaccacuguca

SEQ ID NO: 1056414 - RNA, 19 nt, Artificial Sequence
  Description of Artificial Sequence: Synthetic oligonucleotide
cucuaaguccuaagaggca

SEQ ID NO: 1056415 - RNA, 19 nt, Artificial Sequence
  Description of Artificial Sequence: Synthetic oligonucleotide
gagcaaaccauuaccccaa

SEQ ID NO: 1056416 - RNA, 19 nt, Artificial Sequence
  Description of Artificial Sequence: Synthetic oligonucleotide
cagcaugaugccuguggac

SEQ ID NO: 1056417 - RNA, 19 nt, Artificial Sequence
  Description of Artificial Sequence: Synthetic oligonucleotide
ccaaacuuugccggaagcc

SEQ ID NO: 1056418 - RNA, 19 nt, Artificial Sequence
  Description of Artificial Sequence: Synthetic oligonucleotide
acagauagucagacucaag

SEQ ID NO: 1056419 - RNA, 19 nt, Artificial Sequence
  Description of Artificial Sequence: Synthetic oligonucleotide
guaggguuugagaguggag

SEQ ID NO: 1056420 - RNA, 19 nt, Artificial Sequence
  Description of Artificial Sequence: Synthetic oligonucleotide
cuugagucaguaacccaaa

SEQ ID NO: 1056421 - RNA, 19 nt, Artificial Sequence
  Description of Artificial Sequence: Synthetic oligonucleotide
uaccacccacuucuuguuc

SEQ ID NO: 1056422 - RNA, 19 nt, Artificial Sequence
  Description of Artificial Sequence: Synthetic oligonucleotide
auaggauggauuacuuauu

SEQ ID NO: 1056423 - RNA, 19 nt, Artificial Sequence
  Description of Artificial Sequence: Synthetic oligonucleotide
agagcucaaaauacagcau

SEQ ID NO: 1056424 - RNA, 19 nt, Artificial Sequence
  Description of Artificial Sequence: Synthetic oligonucleotide
ggcccuaauggaaaugaug

SEQ ID NO: 1056425 - RNA, 19 nt, Artificial Sequence
  Description of Artificial Sequence: Synthetic oligonucleotide
guaauaugagcaaaccauu

SEQ ID NO: 1056426 - RNA, 19 nt, Artificial Sequence
  Description of Artificial Sequence: Synthetic oligonucleotide
guucagacagagcccggga

SEQ ID NO: 1056427 - RNA, 19 nt, Artificial Sequence
  Description of Artificial Sequence: Synthetic oligonucleotide
aacuaggccccaacccuga

SEQ ID NO: 1056428 - RNA, 19 nt, Artificial Sequence
  Description of Artificial Sequence: Synthetic oligonucleotide
ucccuaucugaaggcaaga

SEQ ID NO: 1056429 - RNA, 19 nt, Artificial Sequence
  Description of Artificial Sequence: Synthetic oligonucleotide
gacucaaggcccaaucacu

SEQ ID NO: 1056430 - RNA, 19 nt, Artificial Sequence
  Description of Artificial Sequence: Synthetic oligonucleotide
aggauagaauucugcuguu

SEQ ID NO: 1056431 - RNA, 19 nt, Artificial Sequence
  Description of Artificial Sequence: Synthetic oligonucleotide
ucguggacuaaggauccau

SEQ ID NO: 1056432 - RNA, 19 nt, Artificial Sequence
  Description of Artificial Sequence: Synthetic oligonucleotide
ggaaacaggugguucuuaa

SEQ ID NO: 1056433 - RNA, 19 nt, Artificial Sequence
  Description of Artificial Sequence: Synthetic oligonucleotide
uggcccuaauggaaaugau

SEQ ID NO: 1056434 - RNA, 19 nt, Artificial Sequence
  Description of Artificial Sequence: Synthetic oligonucleotide
cugacugaucaugaccuga

SEQ ID NO: 1056435 - RNA, 19 nt, Artificial Sequence
  Description of Artificial Sequence: Synthetic oligonucleotide
caguucagacagagcccgg

SEQ ID NO: 1056436 - RNA, 19 nt, Artificial Sequence
  Description of Artificial Sequence: Synthetic oligonucleotide
acacagggauccugcacau

SEQ ID NO: 1056437 - RNA, 19 nt, Artificial Sequence
  Description of Artificial Sequence: Synthetic oligonucleotide
gaacgaacuccauccuugu

SEQ ID NO: 1056438 - RNA, 19 nt, Artificial Sequence
  Description of Artificial Sequence: Synthetic oligonucleotide
acuauaugguggagaacau

SEQ ID NO: 1056439 - RNA, 19 nt, Artificial Sequence
  Description of Artificial Sequence: Synthetic oligonucleotide
gcgauaaugccagguagug

SEQ ID NO: 1056440 - RNA, 19 nt, Artificial Sequence
  Description of Artificial Sequence: Synthetic oligonucleotide
acucaaggcccaaucacua

SEQ ID NO: 1056441 - RNA, 19 nt, Artificial Sequence
  Description of Artificial Sequence: Synthetic oligonucleotide
agaaggcaacagauaguca

SEQ ID NO: 1056442 - RNA, 19 nt, Artificial Sequence
  Description of Artificial Sequence: Synthetic oligonucleotide
cacuaugguuuccuuaacu

SEQ ID NO: 1056443 - RNA, 19 nt, Artificial Sequence
  Description of Artificial Sequence: Synthetic oligonucleotide
cagcaaugggaagaaagaa

SEQ ID NO: 1056444 - RNA, 19 nt, Artificial Sequence
  Description of Artificial Sequence: Synthetic oligonucleotide
uccuaaccacugucaacua

SEQ ID NO: 1056445 - RNA, 19 nt, Artificial Sequence
  Description of Artificial Sequence: Synthetic oligonucleotide
cauagacuagcaaggcagu

SEQ ID NO: 1056446 - RNA, 19 nt, Artificial Sequence
  Description of Artificial Sequence: Synthetic oligonucleotide
agucacauuugagcucccu

SEQ ID NO: 1056447 - RNA, 19 nt, Artificial Sequence
  Description of Artificial Sequence: Synthetic oligonucleotide
gcaugaugccuguggacac

SEQ ID NO: 1056448 - RNA, 19 nt, Artificial Sequence
  Description of Artificial Sequence: Synthetic oligonucleotide
ccagauaggcaguggagca

SEQ ID NO: 1056449 - RNA, 19 nt, Artificial Sequence
  Description of Artificial Sequence: Synthetic oligonucleotide
ucaguccauccaguucaga

SEQ ID NO: 1056450 - RNA, 19 nt, Artificial Sequence
  Description of Artificial Sequence: Synthetic oligonucleotide
ccuaagaggcaauauccaa

SEQ ID NO: 1056451 - RNA, 19 nt, Artificial Sequence
  Description of Artificial Sequence: Synthetic oligonucleotide
aacuuugccggaagcccuu

SEQ ID NO: 1056452 - RNA, 19 nt, Artificial Sequence
  Description of Artificial Sequence: Synthetic oligonucleotide
ggcccaaucacuaugguuu

SEQ ID NO: 1056453 - RNA, 19 nt, Artificial Sequence
  Description of Artificial Sequence: Synthetic oligonucleotide
agcaaaccauuaccccaaa

SEQ ID NO: 1056454 - RNA, 19 nt, Artificial Sequence
  Description of Artificial Sequence: Synthetic oligonucleotide
caccuggaaucaugagcug

SEQ ID NO: 1056455 - RNA, 19 nt, Artificial Sequence
  Description of Artificial Sequence: Synthetic oligonucleotide
aaguagcaagggaucuuua

SEQ ID NO: 1056456 - RNA, 19 nt, Artificial Sequence
  Description of Artificial Sequence: Synthetic oligonucleotide
ugggaaacaggugguucuu

SEQ ID NO: 1056457 - RNA, 19 nt, Artificial Sequence
  Description of Artificial Sequence: Synthetic oligonucleotide
uucguggacuaaggaucca

SEQ ID NO: 1056458 - RNA, 19 nt, Artificial Sequence
  Description of Artificial Sequence: Synthetic oligonucleotide
ccuuauaucuacacagggu

SEQ ID NO: 1056459 - RNA, 19 nt, Artificial Sequence
  Description of Artificial Sequence: Synthetic oligonucleotide
guaguggccccugggcaug

SEQ ID NO: 1056460 - RNA, 19 nt, Artificial Sequence
  Description of Artificial Sequence: Synthetic oligonucleotide
caugcgguggugguaacua

SEQ ID NO: 1056461 - RNA, 19 nt, Artificial Sequence
  Description of Artificial Sequence: Synthetic oligonucleotide
cucaaguagcaagggaucu

SEQ ID NO: 1056462 - RNA, 19 nt, Artificial Sequence
  Description of Artificial Sequence: Synthetic oligonucleotide
cagaguggucaauacaauu

SEQ ID NO: 1056463 - RNA, 19 nt, Artificial Sequence
  Description of Artificial Sequence: Synthetic oligonucleotide
cucauaauucguggacuaa

SEQ ID NO: 1056464 - RNA, 19 nt, Artificial Sequence
  Description of Artificial Sequence: Synthetic oligonucleotide
gcaaggcaguccuauguaa

SEQ ID NO: 1056465 - RNA, 19 nt, Artificial Sequence
  Description of Artificial Sequence: Synthetic oligonucleotide
guucccucagggcaguaau

SEQ ID NO: 1056466 - RNA, 19 nt, Artificial Sequence
  Description of Artificial Sequence: Synthetic oligonucleotide
uccuguuuccaaggacuuu

SEQ ID NO: 1056467 - RNA, 19 nt, Artificial Sequence
  Description of Artificial Sequence: Synthetic oligonucleotide
ccaaacuaccacccacuuc

SEQ ID NO: 1056468 - RNA, 19 nt, Artificial Sequence
  Description of Artificial Sequence: Synthetic oligonucleotide
gggagacauguccacagua

SEQ ID NO: 1056469 - RNA, 19 nt, Artificial Sequence
  Description of Artificial Sequence: Synthetic oligonucleotide
caaaggacagugguaaauu

SEQ ID NO: 1056470 - RNA, 19 nt, Artificial Sequence
  Description of Artificial Sequence: Synthetic oligonucleotide
gcuauggcccuaauggaaa

SEQ ID NO: 1056471 - RNA, 19 nt, Artificial Sequence
  Description of Artificial Sequence: Synthetic oligonucleotide
gcgaaguaauaugagcaaa

SEQ ID NO: 1056472 - RNA, 19 nt, Artificial Sequence
  Description of Artificial Sequence: Synthetic oligonucleotide
cccaccuuauaucuacaca

SEQ ID NO: 1056473 - RNA, 19 nt, Artificial Sequence
  Description of Artificial Sequence: Synthetic oligonucleotide
ccuuucauccuguuuccaa

SEQ ID NO: 1056474 - RNA, 19 nt, Artificial Sequence
  Description of Artificial Sequence: Synthetic oligonucleotide
cccuaauggaaaugaugga

SEQ ID NO: 1056475 - RNA, 19 nt, Artificial Sequence
  Description of Artificial Sequence: Synthetic oligonucleotide
caaguagcaagggaucuuu

SEQ ID NO: 1056476 - RNA, 19 nt, Artificial Sequence
  Description of Artificial Sequence: Synthetic oligonucleotide
ugggcaugcggugguggua

SEQ ID NO: 1056477 - RNA, 19 nt, Artificial Sequence
  Description of Artificial Sequence: Synthetic oligonucleotide
cccuauacacacacucaga

SEQ ID NO: 1056478 - RNA, 19 nt, Artificial Sequence
  Description of Artificial Sequence: Synthetic oligonucleotide
ccugaccaucaacagcauc

SEQ ID NO: 1056479 - RNA, 19 nt, Artificial Sequence
  Description of Artificial Sequence: Synthetic oligonucleotide
ggauagaauucugcuguua

SEQ ID NO: 1056480 - RNA, 19 nt, Artificial Sequence
  Description of Artificial Sequence: Synthetic oligonucleotide
guucugcucuaaguccuaa

SEQ ID NO: 1056481 - RNA, 19 nt, Artificial Sequence
  Description of Artificial Sequence: Synthetic oligonucleotide
gcaguccuauguaagugaa

SEQ ID NO: 1056482 - RNA, 19 nt, Artificial Sequence
  Description of Artificial Sequence: Synthetic oligonucleotide
cguggacuaaggauccauc

SEQ ID NO: 1056483 - RNA, 19 nt, Artificial Sequence
  Description of Artificial Sequence: Synthetic oligonucleotide
gggacaguuccuaaccacu

SEQ ID NO: 1056484 - RNA, 19 nt, Artificial Sequence
  Description of Artificial Sequence: Synthetic oligonucleotide
cuauaugguggagaacauu

SEQ ID NO: 1056485 - RNA, 19 nt, Artificial Sequence
  Description of Artificial Sequence: Synthetic oligonucleotide
agcccaccuuauaucuaca

SEQ ID NO: 1056486 - RNA, 19 nt, Artificial Sequence
  Description of Artificial Sequence: Synthetic oligonucleotide
augccagguaguggccccu

SEQ ID NO: 1056487 - RNA, 19 nt, Artificial Sequence
  Description of Artificial Sequence: Synthetic oligonucleotide
gaggagcaguccacugaaa

SEQ ID NO: 1056488 - RNA, 19 nt, Artificial Sequence
  Description of Artificial Sequence: Synthetic oligonucleotide
ccgggaaaagggagacaug

SEQ ID NO: 1056489 - RNA, 19 nt, Artificial Sequence
  Description of Artificial Sequence: Synthetic oligonucleotide
ccuuuacccuauacacaca

SEQ ID NO: 1056490 - RNA, 19 nt, Artificial Sequence
  Description of Artificial Sequence: Synthetic oligonucleotide
cgaacuccauccuugugua

SEQ ID NO: 1056491 - RNA, 19 nt, Artificial Sequence
  Description of Artificial Sequence: Synthetic oligonucleotide
gggcaugcgguggugguaa

SEQ ID NO: 1056492 - RNA, 19 nt, Artificial Sequence
  Description of Artificial Sequence: Synthetic oligonucleotide
caguccuauguaagugaau

SEQ ID NO: 1056493 - RNA, 19 nt, Artificial Sequence
  Description of Artificial Sequence: Synthetic oligonucleotide
ggcuuccuaccaaauucaa

SEQ ID NO: 1056494 - RNA, 19 nt, Artificial Sequence
  Description of Artificial Sequence: Synthetic oligonucleotide
gugggccguggccuuucuc

SEQ ID NO: 1056495 - RNA, 19 nt, Artificial Sequence
  Description of Artificial Sequence: Synthetic oligonucleotide
gacuagcaaggcaguccua

SEQ ID NO: 1056496 - RNA, 19 nt, Artificial Sequence
  Description of Artificial Sequence: Synthetic oligonucleotide
cagggcuuccuaccaaauu

SEQ ID NO: 1056497 - RNA, 19 nt, Artificial Sequence
  Description of Artificial Sequence: Synthetic oligonucleotide
accugaccaucaacagcau

SEQ ID NO: 1056498 - RNA, 19 nt, Artificial Sequence
  Description of Artificial Sequence: Synthetic oligonucleotide
ggcaugcgguggugguaac

SEQ ID NO: 1056499 - RNA, 19 nt, Artificial Sequence
  Description of Artificial Sequence: Synthetic oligonucleotide
cccgggaaaagggagacau

SEQ ID NO: 1056500 - RNA, 19 nt, Artificial Sequence
  Description of Artificial Sequence: Synthetic oligonucleotide
ccuaaccacugucaacuau

SEQ ID NO: 1056501 - RNA, 19 nt, Artificial Sequence
  Description of Artificial Sequence: Synthetic oligonucleotide
gcugaacugagcccaccuu

SEQ ID NO: 1056502 - RNA, 19 nt, Artificial Sequence
  Description of Artificial Sequence: Synthetic oligonucleotide
gucagacucaaggcccaau

SEQ ID NO: 1056503 - RNA, 19 nt, Artificial Sequence
  Description of Artificial Sequence: Synthetic oligonucleotide
gccagacagaugagaaaau

SEQ ID NO: 1056504 - RNA, 19 nt, Artificial Sequence
  Description of Artificial Sequence: Synthetic oligonucleotide
cccuuucauccuguuucca

SEQ ID NO: 1056505 - RNA, 19 nt, Artificial Sequence
  Description of Artificial Sequence: Synthetic oligonucleotide
ccuuaacucuugagucagu

SEQ ID NO: 1056506 - RNA, 19 nt, Artificial Sequence
  Description of Artificial Sequence: Synthetic oligonucleotide
gcaugcgguggugguaacu

SEQ ID NO: 1056507 - RNA, 19 nt, Artificial Sequence
  Description of Artificial Sequence: Synthetic oligonucleotide
cccaaacuaccacccacuu

SEQ ID NO: 1056508 - RNA, 19 nt, Artificial Sequence
  Description of Artificial Sequence: Synthetic oligonucleotide
gcccgggaaaagggagaca

SEQ ID NO: 1056509 - RNA, 19 nt, Artificial Sequence
  Description of Artificial Sequence: Synthetic oligonucleotide
ggugggccguggccuuucu

SEQ ID NO: 1056510 - RNA, 19 nt, Artificial Sequence
  Description of Artificial Sequence: Synthetic oligonucleotide
cggaagcccuugacaucaa

SEQ ID NO: 1056511 - RNA, 19 nt, Artificial Sequence
  Description of Artificial Sequence: Synthetic oligonucleotide
ccguggccuuucucccuuu

SEQ ID NO: 1056512 - RNA, 19 nt, Artificial Sequence
  Description of Artificial Sequence: Synthetic oligonucleotide
ucgaauuuuacacuguccc

SEQ ID NO: 1056513 - RNA, 19 nt, Artificial Sequence
  Description of Artificial Sequence: Synthetic oligonucleotide
aauaacguuccacugccuc

SEQ ID NO: 1056514 - RNA, 19 nt, Artificial Sequence
  Description of Artificial Sequence: Synthetic oligonucleotide
aguucaauguucuccauag

SEQ ID NO: 1056515 - RNA, 19 nt, Artificial Sequence
  Description of Artificial Sequence: Synthetic oligonucleotide
uucaauguucuccauagac

SEQ ID NO: 1056516 - RNA, 19 nt, Artificial Sequence
  Description of Artificial Sequence: Synthetic oligonucleotide
ugauucagguaguucagcg

SEQ ID NO: 1056517 - RNA, 19 nt, Artificial Sequence
  Description of Artificial Sequence: Synthetic oligonucleotide
uucuacgaagcacaucccg

SEQ ID NO: 1056518 - RNA, 19 nt, Artificial Sequence
  Description of Artificial Sequence: Synthetic oligonucleotide
aacuccuguacaugggcac

SEQ ID NO: 1056519 - RNA, 19 nt, Artificial Sequence
  Description of Artificial Sequence: Synthetic oligonucleotide
guaauaacguuccacugcc

SEQ ID NO: 1056520 - RNA, 19 nt, Artificial Sequence
  Description of Artificial Sequence: Synthetic oligonucleotide
aucgugcuggcacugaggc

SEQ ID NO: 1056521 - RNA, 19 nt, Artificial Sequence
  Description of Artificial Sequence: Synthetic oligonucleotide
gcuucuacgaagcacaucc

SEQ ID NO: 1056522 - RNA, 19 nt, Artificial Sequence
  Description of Artificial Sequence: Synthetic oligonucleotide
uucacuacgcuguaagcgc

SEQ ID NO: 1056523 - RNA, 19 nt, Artificial Sequence
  Description of Artificial Sequence: Synthetic oligonucleotide
ucccuauacaccaaagcca

SEQ ID NO: 1056524 - RNA, 19 nt, Artificial Sequence
  Description of Artificial Sequence: Synthetic oligonucleotide
auagccgccgcacuugagc

SEQ ID NO: 1056525 - RNA, 19 nt, Artificial Sequence
  Description of Artificial Sequence: Synthetic oligonucleotide
gucccuauacaccaaagcc

SEQ ID NO: 1056526 - RNA, 19 nt, Artificial Sequence
  Description of Artificial Sequence: Synthetic oligonucleotide
cuuaccaggagcucacugc

SEQ ID NO: 1056527 - RNA, 19 nt, Artificial Sequence
  Description of Artificial Sequence: Synthetic oligonucleotide
uuuucucggaucuccagug

SEQ ID NO: 1056528 - RNA, 19 nt, Artificial Sequence
  Description of Artificial Sequence: Synthetic oligonucleotide
guaguguucacuguggggc

SEQ ID NO: 1056529 - RNA, 19 nt, Artificial Sequence
  Description of Artificial Sequence: Synthetic oligonucleotide
ucuacugugcucagguggc

SEQ ID NO: 1056530 - RNA, 19 nt, Artificial Sequence
  Description of Artificial Sequence: Synthetic oligonucleotide
agguaguucagcgaggcgg

SEQ ID NO: 1056531 - RNA, 19 nt, Artificial Sequence
  Description of Artificial Sequence: Synthetic oligonucleotide
guucacuacgcuguaagcg

SEQ ID NO: 1056532 - RNA, 19 nt, Artificial Sequence
  Description of Artificial Sequence: Synthetic oligonucleotide
aauccuucugccaucaccu

SEQ ID NO: 1056533 - RNA, 19 nt, Artificial Sequence
  Description of Artificial Sequence: Synthetic oligonucleotide
uagaccgucgcaacugccg

SEQ ID NO: 1056534 - RNA, 19 nt, Artificial Sequence
  Description of Artificial Sequence: Synthetic oligonucleotide
ugcuuuuccgacucuacug

SEQ ID NO: 1056535 - RNA, 19 nt, Artificial Sequence
  Description of Artificial Sequence: Synthetic oligonucleotide
guauuuaccccuuuugcca

SEQ ID NO: 1056536 - RNA, 19 nt, Artificial Sequence
  Description of Artificial Sequence: Synthetic oligonucleotide
cucacugcuucuacgaagc

SEQ ID NO: 1056537 - RNA, 19 nt, Artificial Sequence
  Description of Artificial Sequence: Synthetic oligonucleotide
uuuuccgacucuacugugc

SEQ ID NO: 1056538 - RNA, 19 nt, Artificial Sequence
  Description of Artificial Sequence: Synthetic oligonucleotide
ugcccaagaccuuuucucg

SEQ ID NO: 1056539 - RNA, 19 nt, Artificial Sequence
  Description of Artificial Sequence: Synthetic oligonucleotide
ugaugcaucgucaccuccc

SEQ ID NO: 1056540 - RNA, 19 nt, Artificial Sequence
  Description of Artificial Sequence: Synthetic oligonucleotide
gguaauaacguuccacugc

SEQ ID NO: 1056541 - RNA, 19 nt, Artificial Sequence
  Description of Artificial Sequence: Synthetic oligonucleotide
uugaguguggcagccacgg

SEQ ID NO: 1056542 - RNA, 19 nt, Artificial Sequence
  Description of Artificial Sequence: Synthetic oligonucleotide
gguugauucagguaguuca

SEQ ID NO: 1056543 - RNA, 19 nt, Artificial Sequence
  Description of Artificial Sequence: Synthetic oligonucleotide
acgcagggcacauuccucc

SEQ ID NO: 1056544 - RNA, 19 nt, Artificial Sequence
  Description of Artificial Sequence: Synthetic oligonucleotide
gaagagagguccaucgugc

SEQ ID NO: 1056545 - RNA, 19 nt, Artificial Sequence
  Description of Artificial Sequence: Synthetic oligonucleotide
ugguaauaacguuccacug

SEQ ID NO: 1056546 - RNA, 19 nt, Artificial Sequence
  Description of Artificial Sequence: Synthetic oligonucleotide
uguugaguguggcagccac

SEQ ID NO: 1056547 - RNA, 19 nt, Artificial Sequence
  Description of Artificial Sequence: Synthetic oligonucleotide
acauuaggguugucuggcc

SEQ ID NO: 1056548 - RNA, 19 nt, Artificial Sequence
  Description of Artificial Sequence: Synthetic oligonucleotide
ucccucgaauuuuacacug

SEQ ID NO: 1056549 - RNA, 19 nt, Artificial Sequence
  Description of Artificial Sequence: Synthetic oligonucleotide
uucugagggcaucauucag

SEQ ID NO: 1056550 - RNA, 19 nt, Artificial Sequence
  Description of Artificial Sequence: Synthetic oligonucleotide
ugugggacaggcucugcag

SEQ ID NO: 1056551 - RNA, 19 nt, Artificial Sequence
  Description of Artificial Sequence: Synthetic oligonucleotide
uguucuccauagaccgucg

SEQ ID NO: 1056552 - RNA, 19 nt, Artificial Sequence
  Description of Artificial Sequence: Synthetic oligonucleotide
ucccaguucaauguucucc

SEQ ID NO: 1056553 - RNA, 19 nt, Artificial Sequence
  Description of Artificial Sequence: Synthetic oligonucleotide
acacucaauggugugggac

SEQ ID NO: 1056554 - RNA, 19 nt, Artificial Sequence
  Description of Artificial Sequence: Synthetic oligonucleotide
uguucacuacgcuguaagc

SEQ ID NO: 1056555 - RNA, 19 nt, Artificial Sequence
  Description of Artificial Sequence: Synthetic oligonucleotide
ugguccgagcuacauuagg

SEQ ID NO: 1056556 - RNA, 19 nt, Artificial Sequence
  Description of Artificial Sequence: Synthetic oligonucleotide
ugcccgcuagcucaucucg

SEQ ID NO: 1056557 - RNA, 19 nt, Artificial Sequence
  Description of Artificial Sequence: Synthetic oligonucleotide
auaacguuccacugccuca

SEQ ID NO: 1056558 - RNA, 19 nt, Artificial Sequence
  Description of Artificial Sequence: Synthetic oligonucleotide
ucauauccggccugcuggg

SEQ ID NO: 1056559 - RNA, 19 nt, Artificial Sequence
  Description of Artificial Sequence: Synthetic oligonucleotide
aguucagcgaggcggcccg

SEQ ID NO: 1056560 - RNA, 19 nt, Artificial Sequence
  Description of Artificial Sequence: Synthetic oligonucleotide
agcugcauacuggaugacc

SEQ ID NO: 1056561 - RNA, 19 nt, Artificial Sequence
  Description of Artificial Sequence: Synthetic oligonucleotide
uucuccauagaccgucgca

SEQ ID NO: 1056562 - RNA, 19 nt, Artificial Sequence
  Description of Artificial Sequence: Synthetic oligonucleotide
cuccguacucugcauaggg

SEQ ID NO: 1056563 - RNA, 19 nt, Artificial Sequence
  Description of Artificial Sequence: Synthetic oligonucleotide
guuuugacacaggagggcc

SEQ ID NO: 1056564 - RNA, 19 nt, Artificial Sequence
  Description of Artificial Sequence: Synthetic oligonucleotide
cauagcgacccugagcugc

SEQ ID NO: 1056565 - RNA, 19 nt, Artificial Sequence
  Description of Artificial Sequence: Synthetic oligonucleotide
auuaggguugucuggcccu

SEQ ID NO: 1056566 - RNA, 19 nt, Artificial Sequence
  Description of Artificial Sequence: Synthetic oligonucleotide
uaacaggaagccagguugu

SEQ ID NO: 1056567 - RNA, 19 nt, Artificial Sequence
  Description of Artificial Sequence: Synthetic oligonucleotide
ggguccgcaaccuugcugg

SEQ ID NO: 1056568 - RNA, 19 nt, Artificial Sequence
  Description of Artificial Sequence: Synthetic oligonucleotide
cuuggagcuuccuuaccag

SEQ ID NO: 1056569 - RNA, 19 nt, Artificial Sequence
  Description of Artificial Sequence: Synthetic oligonucleotide
acacaggagggccaaguug

SEQ ID NO: 1056570 - RNA, 19 nt, Artificial Sequence
  Description of Artificial Sequence: Synthetic oligonucleotide
cauuaggguugucuggccc

SEQ ID NO: 1056571 - RNA, 19 nt, Artificial Sequence
  Description of Artificial Sequence: Synthetic oligonucleotide
cucaucucgaagccacugg

SEQ ID NO: 1056572 - RNA, 19 nt, Artificial Sequence
  Description of Artificial Sequence: Synthetic oligonucleotide
uauuuaccccuuuugccau

SEQ ID NO: 1056573 - RNA, 19 nt, Artificial Sequence
  Description of Artificial Sequence: Synthetic oligonucleotide
agacccaaacuccuguaca

SEQ ID NO: 1056574 - RNA, 19 nt, Artificial Sequence
  Description of Artificial Sequence: Synthetic oligonucleotide
cucauagcgacccugagcu

SEQ ID NO: 1056575 - RNA, 19 nt, Artificial Sequence
  Description of Artificial Sequence: Synthetic oligonucleotide
auagauggcuagcgcccgc

SEQ ID NO: 1056576 - RNA, 19 nt, Artificial Sequence
  Description of Artificial Sequence: Synthetic oligonucleotide
ugcugggaucucauauccg

SEQ ID NO: 1056577 - RNA, 19 nt, Artificial Sequence
  Description of Artificial Sequence: Synthetic oligonucleotide
cuucgccacaucugggugg

SEQ ID NO: 1056578 - RNA, 19 nt, Artificial Sequence
  Description of Artificial Sequence: Synthetic oligonucleotide
uccauagaccgucgcaacu

SEQ ID NO: 1056579 - RNA, 19 nt, Artificial Sequence
  Description of Artificial Sequence: Synthetic oligonucleotide
agaccgucgcaacugccgg

SEQ ID NO: 1056580 - RNA, 19 nt, Artificial Sequence
  Description of Artificial Sequence: Synthetic oligonucleotide
uuucucggaucuccagugc

SEQ ID NO: 1056581 - RNA, 19 nt, Artificial Sequence
  Description of Artificial Sequence: Synthetic oligonucleotide
auucugagggcaucauuca

SEQ ID NO: 1056582 - RNA, 19 nt, Artificial Sequence
  Description of Artificial Sequence: Synthetic oligonucleotide
guugauucagguaguucag

SEQ ID NO: 1056583 - RNA, 19 nt, Artificial Sequence
  Description of Artificial Sequence: Synthetic oligonucleotide
cuguacaugggcacggguc

SEQ ID NO: 1056584 - RNA, 19 nt, Artificial Sequence
  Description of Artificial Sequence: Synthetic oligonucleotide
guaagcgcugcugagugcc

SEQ ID NO: 1056585 - RNA, 19 nt, Artificial Sequence
  Description of Artificial Sequence: Synthetic oligonucleotide
cuguaagcgcugcugagug

SEQ ID NO: 1056586 - RNA, 19 nt, Artificial Sequence
  Description of Artificial Sequence: Synthetic oligonucleotide
ccugcuuuagguaacagga

SEQ ID NO: 1056587 - RNA, 19 nt, Artificial Sequence
  Description of Artificial Sequence: Synthetic oligonucleotide
ucuccauagaccgucgcaa

SEQ ID NO: 1056588 - RNA, 19 nt, Artificial Sequence
  Description of Artificial Sequence: Synthetic oligonucleotide
uggucccuauacaccaaag

SEQ ID NO: 1056589 - RNA, 19 nt, Artificial Sequence
  Description of Artificial Sequence: Synthetic oligonucleotide
cuggcgccgguacagagcc

SEQ ID NO: 1056590 - RNA, 19 nt, Artificial Sequence
  Description of Artificial Sequence: Synthetic oligonucleotide
uccagauaggcuugugguc

SEQ ID NO: 1056591 - RNA, 19 nt, Artificial Sequence
  Description of Artificial Sequence: Synthetic oligonucleotide
aaacuccuguacaugggca

SEQ ID NO: 1056592 - RNA, 19 nt, Artificial Sequence
  Description of Artificial Sequence: Synthetic oligonucleotide
uccgcaaccuugcugggau

SEQ ID NO: 1056593 - RNA, 19 nt, Artificial Sequence
  Description of Artificial Sequence: Synthetic oligonucleotide
uacgcuguaagcgcugcug

SEQ ID NO: 1056594 - RNA, 19 nt, Artificial Sequence
  Description of Artificial Sequence: Synthetic oligonucleotide
uugauucagguaguucagc

SEQ ID NO: 1056595 - RNA, 19 nt, Artificial Sequence
  Description of Artificial Sequence: Synthetic oligonucleotide
acuacgcuguaagcgcugc

SEQ ID NO: 1056596 - RNA, 19 nt, Artificial Sequence
  Description of Artificial Sequence: Synthetic oligonucleotide
ucacuacgcuguaagcgcu

SEQ ID NO: 1056597 - RNA, 19 nt, Artificial Sequence
  Description of Artificial Sequence: Synthetic oligonucleotide
acaucccggaucuugccca

SEQ ID NO: 1056598 - RNA, 19 nt, Artificial Sequence
  Description of Artificial Sequence: Synthetic oligonucleotide
cauagaccgucgcaacugc

SEQ ID NO: 1056599 - RNA, 19 nt, Artificial Sequence
  Description of Artificial Sequence: Synthetic oligonucleotide
cccuauacaccaaagccag

SEQ ID NO: 1056600 - RNA, 19 nt, Artificial Sequence
  Description of Artificial Sequence: Synthetic oligonucleotide
cugggaucucauauccggc

SEQ ID NO: 1056601 - RNA, 19 nt, Artificial Sequence
  Description of Artificial Sequence: Synthetic oligonucleotide
gacucuacugugcucaggu

SEQ ID NO: 1056602 - RNA, 19 nt, Artificial Sequence
  Description of Artificial Sequence: Synthetic oligonucleotide
gguccgagcuacauuaggg

SEQ ID NO: 1056603 - RNA, 19 nt, Artificial Sequence
  Description of Artificial Sequence: Synthetic oligonucleotide
cugguaauaacguuccacu

SEQ ID NO: 1056604 - RNA, 19 nt, Artificial Sequence
  Description of Artificial Sequence: Synthetic oligonucleotide
augggcacgggucaggauu

SEQ ID NO: 1056605 - RNA, 19 nt, Artificial Sequence
  Description of Artificial Sequence: Synthetic oligonucleotide
caucgugcuggcacugagg

SEQ ID NO: 1056606 - RNA, 19 nt, Artificial Sequence
  Description of Artificial Sequence: Synthetic oligonucleotide
uccguacucugcauagggu

SEQ ID NO: 1056607 - RNA, 19 nt, Artificial Sequence
  Description of Artificial Sequence: Synthetic oligonucleotide
cuucuacgaagcacauccc

SEQ ID NO: 1056608 - RNA, 19 nt, Artificial Sequence
  Description of Artificial Sequence: Synthetic oligonucleotide
acgggucaggauuucuuug

SEQ ID NO: 1056609 - RNA, 19 nt, Artificial Sequence
  Description of Artificial Sequence: Synthetic oligonucleotide
uguaagcgcugcugagugc

SEQ ID NO: 1056610 - RNA, 19 nt, Artificial Sequence
  Description of Artificial Sequence: Synthetic oligonucleotide
cuugcccugcuuuagguaa

SEQ ID NO: 1056611 - RNA, 19 nt, Artificial Sequence
  Description of Artificial Sequence: Synthetic oligonucleotide
uaauaacguuccacugccu

SEQ ID NO: 1056612 - RNA, 19 nt, Artificial Sequence
  Description of Artificial Sequence: Synthetic oligonucleotide
ucauacuggcgcagcugcc

SEQ ID NO: 1056613 - RNA, 19 nt, Artificial Sequence
  Description of Artificial Sequence: Synthetic oligonucleotide
cuuuuccgacucuacugug

SEQ ID NO: 1056614 - RNA, 19 nt, Artificial Sequence
  Description of Artificial Sequence: Synthetic oligonucleotide
uugguccgagcuacauuag

SEQ ID NO: 1056615 - RNA, 19 nt, Artificial Sequence
  Description of Artificial Sequence: Synthetic oligonucleotide
cauagauggcuagcgcccg

SEQ ID NO: 1056616 - RNA, 19 nt, Artificial Sequence
  Description of Artificial Sequence: Synthetic oligonucleotide
gaccacuccacagccacug

SEQ ID NO: 1056617 - RNA, 19 nt, Artificial Sequence
  Description of Artificial Sequence: Synthetic oligonucleotide
cacucaauggugugggaca

SEQ ID NO: 1056618 - RNA, 19 nt, Artificial Sequence
  Description of Artificial Sequence: Synthetic oligonucleotide
auagaccgucgcaacugcc

SEQ ID NO: 1056619 - RNA, 19 nt, Artificial Sequence
  Description of Artificial Sequence: Synthetic oligonucleotide
gagucucagccucugagua

SEQ ID NO: 1056620 - RNA, 19 nt, Artificial Sequence
  Description of Artificial Sequence: Synthetic oligonucleotide
gagccccuagguuucucag

SEQ ID NO: 1056621 - RNA, 19 nt, Artificial Sequence
  Description of Artificial Sequence: Synthetic oligonucleotide
uuuaccccuuuugccauac

SEQ ID NO: 1056622 - RNA, 19 nt, Artificial Sequence
  Description of Artificial Sequence: Synthetic oligonucleotide
ggcacauuccuccaagguc

SEQ ID NO: 1056623 - RNA, 19 nt, Artificial Sequence
  Description of Artificial Sequence: Synthetic oligonucleotide
ccagauaggcuuguggucc

SEQ ID NO: 1056624 - RNA, 19 nt, Artificial Sequence
  Description of Artificial Sequence: Synthetic oligonucleotide
uucucaugcaccagcccuu

SEQ ID NO: 1056625 - RNA, 19 nt, Artificial Sequence
  Description of Artificial Sequence: Synthetic oligonucleotide
cuacgaagcacaucccgga

SEQ ID NO: 1056626 - RNA, 19 nt, Artificial Sequence
  Description of Artificial Sequence: Synthetic oligonucleotide
ccuuuugccauacagcaca

SEQ ID NO: 1056627 - RNA, 19 nt, Artificial Sequence
  Description of Artificial Sequence: Synthetic oligonucleotide
cagacccaaacuccuguac

SEQ ID NO: 1056628 - RNA, 19 nt, Artificial Sequence
  Description of Artificial Sequence: Synthetic oligonucleotide
aagcgcugcugagugcccg

SEQ ID NO: 1056629 - RNA, 19 nt, Artificial Sequence
  Description of Artificial Sequence: Synthetic oligonucleotide
gcuagcucaucucgaagcc

SEQ ID NO: 1056630 - RNA, 19 nt, Artificial Sequence
  Description of Artificial Sequence: Synthetic oligonucleotide
ucccuuggagcuuccuuac

SEQ ID NO: 1056631 - RNA, 19 nt, Artificial Sequence
  Description of Artificial Sequence: Synthetic oligonucleotide
ucuugguccgagcuacauu

SEQ ID NO: 1056632 - RNA, 19 nt, Artificial Sequence
  Description of Artificial Sequence: Synthetic oligonucleotide
accucccucgaauuuuaca

SEQ ID NO: 1056633 - RNA, 19 nt, Artificial Sequence
  Description of Artificial Sequence: Synthetic oligonucleotide
agagccccuagguuucuca

SEQ ID NO: 1056634 - RNA, 19 nt, Artificial Sequence
  Description of Artificial Sequence: Synthetic oligonucleotide
uauccggccugcugggcug

SEQ ID NO: 1056635 - RNA, 19 nt, Artificial Sequence
  Description of Artificial Sequence: Synthetic oligonucleotide
uacgaagcacaucccggau

SEQ ID NO: 1056636 - RNA, 19 nt, Artificial Sequence
  Description of Artificial Sequence: Synthetic oligonucleotide
cucaucauacuggcgcagc

SEQ ID NO: 1056637 - RNA, 19 nt, Artificial Sequence
  Description of Artificial Sequence: Synthetic oligonucleotide
ugaccucggccagaggugc

SEQ ID NO: 1056638 - RNA, 19 nt, Artificial Sequence
  Description of Artificial Sequence: Synthetic oligonucleotide
gguuuugacacaggagggc

SEQ ID NO: 1056639 - RNA, 19 nt, Artificial Sequence
  Description of Artificial Sequence: Synthetic oligonucleotide
uggucugacugaugggguc

SEQ ID NO: 1056640 - RNA, 19 nt, Artificial Sequence
  Description of Artificial Sequence: Synthetic oligonucleotide
gccccuagguuucucagag

SEQ ID NO: 1056641 - RNA, 19 nt, Artificial Sequence
  Description of Artificial Sequence: Synthetic oligonucleotide
cuggaguggggcugcacug

SEQ ID NO: 1056642 - RNA, 19 nt, Artificial Sequence
  Description of Artificial Sequence: Synthetic oligonucleotide
acgcuguaagcgcugcuga

SEQ ID NO: 1056643 - RNA, 19 nt, Artificial Sequence
  Description of Artificial Sequence: Synthetic oligonucleotide
gaccgucgcaacugccggg

SEQ ID NO: 1056644 - RNA, 19 nt, Artificial Sequence
  Description of Artificial Sequence: Synthetic oligonucleotide
ugugcaggguccgcaaccu

SEQ ID NO: 1056645 - RNA, 19 nt, Artificial Sequence
  Description of Artificial Sequence: Synthetic oligonucleotide
cccugcuuuagguaacagg

SEQ ID NO: 1056646 - RNA, 19 nt, Artificial Sequence
  Description of Artificial Sequence: Synthetic oligonucleotide
agggaauccuuggugacau

SEQ ID NO: 1056647 - RNA, 19 nt, Artificial Sequence
  Description of Artificial Sequence: Synthetic oligonucleotide
gccgcucucacggugacgg

SEQ ID NO: 1056648 - RNA, 19 nt, Artificial Sequence
  Description of Artificial Sequence: Synthetic oligonucleotide
gaauccuuggugacaucuc

SEQ ID NO: 1056649 - RNA, 19 nt, Artificial Sequence
  Description of Artificial Sequence: Synthetic oligonucleotide
guggucccggcccagggug

SEQ ID NO: 1056650 - RNA, 19 nt, Artificial Sequence
  Description of Artificial Sequence: Synthetic oligonucleotide
uaagcgcugcugagugccc

SEQ ID NO: 1056651 - RNA, 19 nt, Artificial Sequence
  Description of Artificial Sequence: Synthetic oligonucleotide
cuccuguacaugggcacgg

SEQ ID NO: 1056652 - RNA, 19 nt, Artificial Sequence
  Description of Artificial Sequence: Synthetic oligonucleotide
uacugugcucagguggcug

SEQ ID NO: 1056653 - RNA, 19 nt, Artificial Sequence
  Description of Artificial Sequence: Synthetic oligonucleotide
cagauuguugaguguggca

SEQ ID NO: 1056654 - RNA, 19 nt, Artificial Sequence
  Description of Artificial Sequence: Synthetic oligonucleotide
gaacgcagggcacauuccu

SEQ ID NO: 1056655 - RNA, 19 nt, Artificial Sequence
  Description of Artificial Sequence: Synthetic oligonucleotide
ccguacucugcauagggug

SEQ ID NO: 1056656 - RNA, 19 nt, Artificial Sequence
  Description of Artificial Sequence: Synthetic oligonucleotide
cauccccugaccacuccac

SEQ ID NO: 1056657 - RNA, 19 nt, Artificial Sequence
  Description of Artificial Sequence: Synthetic oligonucleotide
guucuccauagaccgucgc

SEQ ID NO: 1056658 - RNA, 19 nt, Artificial Sequence
  Description of Artificial Sequence: Synthetic oligonucleotide
ucggccagaggugcgcucc

SEQ ID NO: 1056659 - RNA, 19 nt, Artificial Sequence
  Description of Artificial Sequence: Synthetic oligonucleotide
guacagagccccuagguuu

SEQ ID NO: 1056660 - RNA, 19 nt, Artificial Sequence
  Description of Artificial Sequence: Synthetic oligonucleotide
ccgagcuacauuaggguug

SEQ ID NO: 1056661 - RNA, 19 nt, Artificial Sequence
  Description of Artificial Sequence: Synthetic oligonucleotide
cucgcuggggaagagguca

SEQ ID NO: 1056662 - RNA, 19 nt, Artificial Sequence
  Description of Artificial Sequence: Synthetic oligonucleotide
uugcccugcuuuagguaac

SEQ ID NO: 1056663 - RNA, 19 nt, Artificial Sequence
  Description of Artificial Sequence: Synthetic oligonucleotide
cuggccacgggacaagcca

SEQ ID NO: 1056664 - RNA, 19 nt, Artificial Sequence
  Description of Artificial Sequence: Synthetic oligonucleotide
ucauagcgacccugagcug

SEQ ID NO: 1056665 - RNA, 19 nt, Artificial Sequence
  Description of Artificial Sequence: Synthetic oligonucleotide
gguaguucagcgaggcggc

SEQ ID NO: 1056666 - RNA, 19 nt, Artificial Sequence
  Description of Artificial Sequence: Synthetic oligonucleotide
agcgcccgcugguaauaac

SEQ ID NO: 1056667 - RNA, 19 nt, Artificial Sequence
  Description of Artificial Sequence: Synthetic oligonucleotide
ggcucucauagauggcuag

SEQ ID NO: 1056668 - RNA, 19 nt, Artificial Sequence
  Description of Artificial Sequence: Synthetic oligonucleotide
uuccuggaacgcagggcac

SEQ ID NO: 1056669 - RNA, 19 nt, Artificial Sequence
  Description of Artificial Sequence: Synthetic oligonucleotide
guucaauguucuccauaga

SEQ ID NO: 1056670 - RNA, 19 nt, Artificial Sequence
  Description of Artificial Sequence: Synthetic oligonucleotide
ggugguuggugcccaagac

SEQ ID NO: 1056671 - RNA, 19 nt, Artificial Sequence
  Description of Artificial Sequence: Synthetic oligonucleotide
ugggcacgggucaggauuu

SEQ ID NO: 1056672 - RNA, 19 nt, Artificial Sequence
  Description of Artificial Sequence: Synthetic oligonucleotide
augcaucgucaccucccuc

SEQ ID NO: 1056673 - RNA, 19 nt, Artificial Sequence
  Description of Artificial Sequence: Synthetic oligonucleotide
ccucauagcgacccugagc

SEQ ID NO: 1056674 - RNA, 19 nt, Artificial Sequence
  Description of Artificial Sequence: Synthetic oligonucleotide
gaugcaucgucaccucccu

SEQ ID NO: 1056675 - RNA, 19 nt, Artificial Sequence
  Description of Artificial Sequence: Synthetic oligonucleotide
ccgcugguaauaacguucc

SEQ ID NO: 1056676 - RNA, 19 nt, Artificial Sequence
  Description of Artificial Sequence: Synthetic oligonucleotide
ccccuuuugccauacagca

SEQ ID NO: 1056677 - RNA, 19 nt, Artificial Sequence
  Description of Artificial Sequence: Synthetic oligonucleotide
agccccuagguuucucaga

SEQ ID NO: 1056678 - RNA, 19 nt, Artificial Sequence
  Description of Artificial Sequence: Synthetic oligonucleotide
gacccaaacuccuguacau

SEQ ID NO: 1056679 - RNA, 19 nt, Artificial Sequence
  Description of Artificial Sequence: Synthetic oligonucleotide
uucuugguccgagcuacau

SEQ ID NO: 1056680 - RNA, 19 nt, Artificial Sequence
  Description of Artificial Sequence: Synthetic oligonucleotide
cacuacgcuguaagcgcug

SEQ ID NO: 1056681 - RNA, 19 nt, Artificial Sequence
  Description of Artificial Sequence: Synthetic oligonucleotide
agauggcuagcgcccgcug

SEQ ID NO: 1056682 - RNA, 19 nt, Artificial Sequence
  Description of Artificial Sequence: Synthetic oligonucleotide
cagccacugaugcaucguc

SEQ ID NO: 1056683 - RNA, 19 nt, Artificial Sequence
  Description of Artificial Sequence: Synthetic oligonucleotide
gugaccucggccagaggug

SEQ ID NO: 1056684 - RNA, 19 nt, Artificial Sequence
  Description of Artificial Sequence: Synthetic oligonucleotide
gccacugaugcaucgucac

SEQ ID NO: 1056685 - RNA, 19 nt, Artificial Sequence
  Description of Artificial Sequence: Synthetic oligonucleotide
gacacucaaugguguggga

SEQ ID NO: 1056686 - RNA, 19 nt, Artificial Sequence
  Description of Artificial Sequence: Synthetic oligonucleotide
cacgggacaagccauugcu

SEQ ID NO: 1056687 - RNA, 19 nt, Artificial Sequence
  Description of Artificial Sequence: Synthetic oligonucleotide
cucacggugacggcuucug

SEQ ID NO: 1056688 - RNA, 19 nt, Artificial Sequence
  Description of Artificial Sequence: Synthetic oligonucleotide
ucgucaccucccucgaauu

SEQ ID NO: 1056689 - RNA, 19 nt, Artificial Sequence
  Description of Artificial Sequence: Synthetic oligonucleotide
cauagggugugccgcucuc

SEQ ID NO: 1056690 - RNA, 19 nt, Artificial Sequence
  Description of Artificial Sequence: Synthetic oligonucleotide
uccuuguauuuaccccuuu

SEQ ID NO: 1056691 - RNA, 19 nt, Artificial Sequence
  Description of Artificial Sequence: Synthetic oligonucleotide
acagccacugaugcaucgu

SEQ ID NO: 1056692 - RNA, 19 nt, Artificial Sequence
  Description of Artificial Sequence: Synthetic oligonucleotide
ggccuuguaccacccuccg

SEQ ID NO: 1056693 - RNA, 19 nt, Artificial Sequence
  Description of Artificial Sequence: Synthetic oligonucleotide
guccgagcuacauuagggu

SEQ ID NO: 1056694 - RNA, 19 nt, Artificial Sequence
  Description of Artificial Sequence: Synthetic oligonucleotide
ucucaugcaccagcccuuc

SEQ ID NO: 1056695 - RNA, 19 nt, Artificial Sequence
  Description of Artificial Sequence: Synthetic oligonucleotide
cauagccgccgcacuugag

SEQ ID NO: 1056696 - RNA, 19 nt, Artificial Sequence
  Description of Artificial Sequence: Synthetic oligonucleotide
gcgacccugagcugcauac

SEQ ID NO: 1056697 - RNA, 19 nt, Artificial Sequence
  Description of Artificial Sequence: Synthetic oligonucleotide
gcgcccgcugguaauaacg

SEQ ID NO: 1056698 - RNA, 19 nt, Artificial Sequence
  Description of Artificial Sequence: Synthetic oligonucleotide
guacaugggcacgggucag

SEQ ID NO: 1056699 - RNA, 19 nt, Artificial Sequence
  Description of Artificial Sequence: Synthetic oligonucleotide
auuuaccccuuuugccaua

SEQ ID NO: 1056700 - RNA, 19 nt, Artificial Sequence
  Description of Artificial Sequence: Synthetic oligonucleotide
cacugaugcaucgucaccu

SEQ ID NO: 1056701 - RNA, 19 nt, Artificial Sequence
  Description of Artificial Sequence: Synthetic oligonucleotide
ugcuucuacgaagcacauc

SEQ ID NO: 1056702 - RNA, 19 nt, Artificial Sequence
  Description of Artificial Sequence: Synthetic oligonucleotide
ccagauuguugaguguggc

SEQ ID NO: 1056703 - RNA, 19 nt, Artificial Sequence
  Description of Artificial Sequence: Synthetic oligonucleotide
acgggacaagccauugcug

SEQ ID NO: 1056704 - RNA, 19 nt, Artificial Sequence
  Description of Artificial Sequence: Synthetic oligonucleotide
auagggugugccgcucuca

SEQ ID NO: 1056705 - RNA, 19 nt, Artificial Sequence
  Description of Artificial Sequence: Synthetic oligonucleotide
ccauagaccgucgcaacug

SEQ ID NO: 1056706 - RNA, 19 nt, Artificial Sequence
  Description of Artificial Sequence: Synthetic oligonucleotide
cucaugcaccagcccuucc

SEQ ID NO: 1056707 - RNA, 19 nt, Artificial Sequence
  Description of Artificial Sequence: Synthetic oligonucleotide
uuaggguugucuggcccua

SEQ ID NO: 1056708 - RNA, 19 nt, Artificial Sequence
  Description of Artificial Sequence: Synthetic oligonucleotide
cccuccguacucugcauag

SEQ ID NO: 1056709 - RNA, 19 nt, Artificial Sequence
  Description of Artificial Sequence: Synthetic oligonucleotide
gcuuuuccgacucuacugu

SEQ ID NO: 1056710 - RNA, 19 nt, Artificial Sequence
  Description of Artificial Sequence: Synthetic oligonucleotide
agccacugaugcaucguca

SEQ ID NO: 1056711 - RNA, 19 nt, Artificial Sequence
  Description of Artificial Sequence: Synthetic oligonucleotide
ggaauccuuggugacaucu

SEQ ID NO: 1056712 - RNA, 19 nt, Artificial Sequence
  Description of Artificial Sequence: Synthetic oligonucleotide
ccuuguaccacccuccgua

SEQ ID NO: 1056713 - RNA, 19 nt, Artificial Sequence
  Description of Artificial Sequence: Synthetic oligonucleotide
gguuucucagaguaguguu

SEQ ID NO: 1056714 - RNA, 19 nt, Artificial Sequence
  Description of Artificial Sequence: Synthetic oligonucleotide
cauauccggccugcugggc

SEQ ID NO: 1056715 - RNA, 19 nt, Artificial Sequence
  Description of Artificial Sequence: Synthetic oligonucleotide
uggguugauucagguaguu

SEQ ID NO: 1056716 - RNA, 19 nt, Artificial Sequence
  Description of Artificial Sequence: Synthetic oligonucleotide
ucccggauucugagggcau

SEQ ID NO: 1056717 - RNA, 19 nt, Artificial Sequence
  Description of Artificial Sequence: Synthetic oligonucleotide
ccacaucagggugaccucg

SEQ ID NO: 1056718 - RNA, 19 nt, Artificial Sequence
  Description of Artificial Sequence: Synthetic oligonucleotide
gccgguacagagccccuag

SEQ ID NO: 1056719 - RNA, 19 nt, Artificial Sequence
  Description of Artificial Sequence: Synthetic oligonucleotide
ccuuaccaggagcucacug

SEQ ID NO: 1056720 - RNA, 19 nt, Artificial Sequence
  Description of Artificial Sequence: Synthetic oligonucleotide
auagcgacccugagcugca

SEQ ID NO: 1056721 - RNA, 19 nt, Artificial Sequence
  Description of Artificial Sequence: Synthetic oligonucleotide
gcucucauagauggcuagc

SEQ ID NO: 1056722 - RNA, 19 nt, Artificial Sequence
  Description of Artificial Sequence: Synthetic oligonucleotide
gaccucggccagaggugcg

SEQ ID NO: 1056723 - RNA, 19 nt, Artificial Sequence
  Description of Artificial Sequence: Synthetic oligonucleotide
cucccucgaauuuuacacu

SEQ ID NO: 1056724 - RNA, 19 nt, Artificial Sequence
  Description of Artificial Sequence: Synthetic oligonucleotide
guacuuauucuggucccua

SEQ ID NO: 1056725 - RNA, 19 nt, Artificial Sequence
  Description of Artificial Sequence: Synthetic oligonucleotide
guaguucagcgaggcggcc

SEQ ID NO: 1056726 - RNA, 19 nt, Artificial Sequence
  Description of Artificial Sequence: Synthetic oligonucleotide
acccuccguacucugcaua

SEQ ID NO: 1056727 - RNA, 19 nt, Artificial Sequence
  Description of Artificial Sequence: Synthetic oligonucleotide
ggaacgcagggcacauucc

SEQ ID NO: 1056728 - RNA, 19 nt, Artificial Sequence
  Description of Artificial Sequence: Synthetic oligonucleotide
cagggaauccuuggugaca

SEQ ID NO: 1056729 - RNA, 19 nt, Artificial Sequence
  Description of Artificial Sequence: Synthetic oligonucleotide
gucccaguucaauguucuc

SEQ ID NO: 1056730 - RNA, 19 nt, Artificial Sequence
  Description of Artificial Sequence: Synthetic oligonucleotide
ggugcucucccggauucug

SEQ ID NO: 1056731 - RNA, 19 nt, Artificial Sequence
  Description of Artificial Sequence: Synthetic oligonucleotide
cuggucccuauacaccaaa

SEQ ID NO: 1056732 - RNA, 19 nt, Artificial Sequence
  Description of Artificial Sequence: Synthetic oligonucleotide
ccccugaccacuccacagc

SEQ ID NO: 1056733 - RNA, 19 nt, Artificial Sequence
  Description of Artificial Sequence: Synthetic oligonucleotide
cccuuuugccauacagcac

SEQ ID NO: 1056734 - RNA, 19 nt, Artificial Sequence
  Description of Artificial Sequence: Synthetic oligonucleotide
ucugacugauggggucagu

SEQ ID NO: 1056735 - RNA, 19 nt, Artificial Sequence
  Description of Artificial Sequence: Synthetic oligonucleotide
cugcuuuuccgacucuacu

SEQ ID NO: 1056736 - RNA, 19 nt, Artificial Sequence
  Description of Artificial Sequence: Synthetic oligonucleotide
caccucccucgaauuuuac

SEQ ID NO: 1056737 - RNA, 19 nt, Artificial Sequence
  Description of Artificial Sequence: Synthetic oligonucleotide
cacggcuggguggucccgg

SEQ ID NO: 1056738 - RNA, 19 nt, Artificial Sequence
  Description of Artificial Sequence: Synthetic oligonucleotide
ggucugacugaugggguca

SEQ ID NO: 1056739 - RNA, 19 nt, Artificial Sequence
  Description of Artificial Sequence: Synthetic oligonucleotide
cacuggguugauucaggua

SEQ ID NO: 1056740 - RNA, 19 nt, Artificial Sequence
  Description of Artificial Sequence: Synthetic oligonucleotide
gguccgcaaccuugcuggg

SEQ ID NO: 1056741 - RNA, 19 nt, Artificial Sequence
  Description of Artificial Sequence: Synthetic oligonucleotide
gggcccuccugggaaaucc

SEQ ID NO: 1056742 - RNA, 19 nt, Artificial Sequence
  Description of Artificial Sequence: Synthetic oligonucleotide
gguacagagccccuagguu

SEQ ID NO: 1056743 - RNA, 19 nt, Artificial Sequence
  Description of Artificial Sequence: Synthetic oligonucleotide
ggguugauucagguaguuc

SEQ ID NO: 1056744 - RNA, 19 nt, Artificial Sequence
  Description of Artificial Sequence: Synthetic oligonucleotide
gcugagugcccgcuagcuc

SEQ ID NO: 1056745 - RNA, 19 nt, Artificial Sequence
  Description of Artificial Sequence: Synthetic oligonucleotide
agggcccuccugggaaauc

SEQ ID NO: 1056746 - RNA, 19 nt, Artificial Sequence
  Description of Artificial Sequence: Synthetic oligonucleotide
cucucacggugacggcuuc

SEQ ID NO: 1056747 - RNA, 19 nt, Artificial Sequence
  Description of Artificial Sequence: Synthetic oligonucleotide
ccacgggacaagccauugc

SEQ ID NO: 1056748 - RNA, 19 nt, Artificial Sequence
  Description of Artificial Sequence: Synthetic oligonucleotide
ccgguacagagccccuagg

SEQ ID NO: 1056749 - RNA, 19 nt, Artificial Sequence
  Description of Artificial Sequence: Synthetic oligonucleotide
gggcacauuccuccaaggu

SEQ ID NO: 1056750 - RNA, 19 nt, Artificial Sequence
  Description of Artificial Sequence: Synthetic oligonucleotide
uggcgccgguacagagccc

SEQ ID NO: 1056751 - RNA, 19 nt, Artificial Sequence
  Description of Artificial Sequence: Synthetic oligonucleotide
uagcgcccgcugguaauaa

SEQ ID NO: 1056752 - RNA, 19 nt, Artificial Sequence
  Description of Artificial Sequence: Synthetic oligonucleotide
cagauaggcuugugguccu

SEQ ID NO: 1056753 - RNA, 19 nt, Artificial Sequence
  Description of Artificial Sequence: Synthetic oligonucleotide
gcaucgucaccucccucga

SEQ ID NO: 1056754 - RNA, 19 nt, Artificial Sequence
  Description of Artificial Sequence: Synthetic oligonucleotide
cacgggucaggauuucuuu

SEQ ID NO: 1056755 - RNA, 19 nt, Artificial Sequence
  Description of Artificial Sequence: Synthetic oligonucleotide
cagcugcuugaagagaggu

SEQ ID NO: 1056756 - RNA, 19 nt, Artificial Sequence
  Description of Artificial Sequence: Synthetic oligonucleotide
ccuccguacucugcauagg

SEQ ID NO: 1056757 - RNA, 19 nt, Artificial Sequence
  Description of Artificial Sequence: Synthetic oligonucleotide
gcauagccgccgcacuuga

SEQ ID NO: 1056758 - RNA, 19 nt, Artificial Sequence
  Description of Artificial Sequence: Synthetic oligonucleotide
gccacgggacaagccauug

SEQ ID NO: 1056759 - RNA, 19 nt, Artificial Sequence
  Description of Artificial Sequence: Synthetic oligonucleotide
guccgcaaccuugcuggga

SEQ ID NO: 1056760 - RNA, 19 nt, Artificial Sequence
  Description of Artificial Sequence: Synthetic oligonucleotide
guucuugguccgagcuaca

SEQ ID NO: 1056761 - RNA, 19 nt, Artificial Sequence
  Description of Artificial Sequence: Synthetic oligonucleotide
ggguugucuggcccuagcu

SEQ ID NO: 1056762 - RNA, 19 nt, Artificial Sequence
  Description of Artificial Sequence: Synthetic oligonucleotide
ccacuccucugcagcgugc

SEQ ID NO: 1056763 - RNA, 19 nt, Artificial Sequence
  Description of Artificial Sequence: Synthetic oligonucleotide
cgaagcacaucccggaucu

SEQ ID NO: 1056764 - RNA, 19 nt, Artificial Sequence
  Description of Artificial Sequence: Synthetic oligonucleotide
gcgugccacugccaucccc

SEQ ID NO: 1056765 - RNA, 19 nt, Artificial Sequence
  Description of Artificial Sequence: Synthetic oligonucleotide
ccuagcuggcucucauaga

SEQ ID NO: 1056766 - RNA, 19 nt, Artificial Sequence
  Description of Artificial Sequence: Synthetic oligonucleotide
ccgacucuacugugcucag

SEQ ID NO: 1056767 - RNA, 19 nt, Artificial Sequence
  Description of Artificial Sequence: Synthetic oligonucleotide
gccauccccugaccacucc

SEQ ID NO: 1056768 - RNA, 19 nt, Artificial Sequence
  Description of Artificial Sequence: Synthetic oligonucleotide
uggcuagcgcccgcuggua

SEQ ID NO: 1056769 - RNA, 19 nt, Artificial Sequence
  Description of Artificial Sequence: Synthetic oligonucleotide
cuagcgcccgcugguaaua

SEQ ID NO: 1056770 - RNA, 19 nt, Artificial Sequence
  Description of Artificial Sequence: Synthetic oligonucleotide
gugcgcuccagguccucua

SEQ ID NO: 1056771 - RNA, 19 nt, Artificial Sequence
  Description of Artificial Sequence: Synthetic oligonucleotide
caucgucaccucccucgaa

SEQ ID NO: 1056772 - RNA, 19 nt, Artificial Sequence
  Description of Artificial Sequence: Synthetic oligonucleotide
cugcagcgugccacugcca

SEQ ID NO: 1056773 - RNA, 19 nt, Artificial Sequence
  Description of Artificial Sequence: Synthetic oligonucleotide
gcggcccgcuucauguugc

SEQ ID NO: 1056774 - RNA, 19 nt, Artificial Sequence
  Description of Artificial Sequence: Synthetic oligonucleotide
caggagcucacugcuucua

SEQ ID NO: 1056775 - RNA, 19 nt, Artificial Sequence
  Description of Artificial Sequence: Synthetic oligonucleotide
guucagcgaggcggcccgc

SEQ ID NO: 1056776 - RNA, 19 nt, Artificial Sequence
  Description of Artificial Sequence: Synthetic oligonucleotide
cugcuucuacgaagcacau

SEQ ID NO: 1056777 - RNA, 19 nt, Artificial Sequence
  Description of Artificial Sequence: Synthetic oligonucleotide
gccgaggcucagucccuug

SEQ ID NO: 1056778 - RNA, 19 nt, Artificial Sequence
  Description of Artificial Sequence: Synthetic oligonucleotide
ccauccccugaccacucca

SEQ ID NO: 1056779 - RNA, 19 nt, Artificial Sequence
  Description of Artificial Sequence: Synthetic oligonucleotide
cguacucugcauagggugu

SEQ ID NO: 1056780 - RNA, 19 nt, Artificial Sequence
  Description of Artificial Sequence: Synthetic oligonucleotide
cuacgcuguaagcgcugcu

SEQ ID NO: 1056781 - RNA, 19 nt, Artificial Sequence
  Description of Artificial Sequence: Synthetic oligonucleotide
gcaaccuugcugggaucuc

SEQ ID NO: 1056782 - RNA, 19 nt, Artificial Sequence
  Description of Artificial Sequence: Synthetic oligonucleotide
ggccagaggugcgcuccag

SEQ ID NO: 1056783 - RNA, 19 nt, Artificial Sequence
  Description of Artificial Sequence: Synthetic oligonucleotide
gcauagggugugccgcucu

SEQ ID NO: 1056784 - RNA, 19 nt, Artificial Sequence
  Description of Artificial Sequence: Synthetic oligonucleotide
ccggauucugagggcauca

SEQ ID NO: 1056785 - RNA, 19 nt, Artificial Sequence
  Description of Artificial Sequence: Synthetic oligonucleotide
ucgcaacugccgggccuuc

SEQ ID NO: 1056786 - RNA, 19 nt, Artificial Sequence
  Description of Artificial Sequence: Synthetic oligonucleotide
ccuuguauuuaccccuuuu

SEQ ID NO: 1056787 - RNA, 19 nt, Artificial Sequence
  Description of Artificial Sequence: Synthetic oligonucleotide
gucgcaacugccgggccuu

SEQ ID NO: 1056788 - RNA, 19 nt, Artificial Sequence
  Description of Artificial Sequence: Synthetic oligonucleotide
ggcccgcuucauguugcug

SEQ ID NO: 1056789 - RNA, 19 nt, Artificial Sequence
  Description of Artificial Sequence: Synthetic oligonucleotide
cuacugugcucagguggcu

SEQ ID NO: 1056790 - RNA, 19 nt, Artificial Sequence
  Description of Artificial Sequence: Synthetic oligonucleotide
gcuagcgcccgcugguaau

SEQ ID NO: 1056791 - RNA, 19 nt, Artificial Sequence
  Description of Artificial Sequence: Synthetic oligonucleotide
cccggauucugagggcauc

SEQ ID NO: 1056792 - RNA, 19 nt, Artificial Sequence
  Description of Artificial Sequence: Synthetic oligonucleotide
cccuggccacgggacaagc

SEQ ID NO: 1056793 - RNA, 19 nt, Artificial Sequence
  Description of Artificial Sequence: Synthetic oligonucleotide
cccucgaauuuuacacugu

SEQ ID NO: 1056794 - RNA, 19 nt, Artificial Sequence
  Description of Artificial Sequence: Synthetic oligonucleotide
ccgucgcaacugccgggcc

SEQ ID NO: 1056795 - RNA, 19 nt, Artificial Sequence
  Description of Artificial Sequence: Synthetic oligonucleotide
ccgcucucacggugacggc

SEQ ID NO: 1056796 - RNA, 19 nt, Artificial Sequence
  Description of Artificial Sequence: Synthetic oligonucleotide
cgguacagagccccuaggu

SEQ ID NO: 1056797 - RNA, 19 nt, Artificial Sequence
  Description of Artificial Sequence: Synthetic oligonucleotide
ccgcaaccuugcugggauc

SEQ ID NO: 1056798 - RNA, 19 nt, Artificial Sequence
  Description of Artificial Sequence: Synthetic oligonucleotide
gccuuguaccacccuccgu

SEQ ID NO: 1056799 - RNA, 19 nt, Artificial Sequence
  Description of Artificial Sequence: Synthetic oligonucleotide
gaagcacaucccggaucuu

SEQ ID NO: 1056800 - RNA, 19 nt, Artificial Sequence
  Description of Artificial Sequence: Synthetic oligonucleotide
cacccuccguacucugcau

SEQ ID NO: 1056801 - RNA, 19 nt, Artificial Sequence
  Description of Artificial Sequence: Synthetic oligonucleotide
cccgcuucauguugcugcu

SEQ ID NO: 1056802 - RNA, 19 nt, Artificial Sequence
  Description of Artificial Sequence: Synthetic oligonucleotide
ccacggcuggguggucccg

SEQ ID NO: 1056803 - RNA, 19 nt, Artificial Sequence
  Description of Artificial Sequence: Synthetic oligonucleotide
gcacgggucaggauuucuu

SEQ ID NO: 1056804 - RNA, 19 nt, Artificial Sequence
  Description of Artificial Sequence: Synthetic oligonucleotide
ccgcuucauguugcugcug

SEQ ID NO: 1056805 - RNA, 19 nt, Artificial Sequence
  Description of Artificial Sequence: Synthetic oligonucleotide
cggugacggcuucugcuca

SEQ ID NO: 1056806 - RNA, 19 nt, Artificial Sequence
  Description of Artificial Sequence: Synthetic oligonucleotide
gcucucacggugacggcuu

SEQ ID NO: 1056807 - RNA, 19 nt, Artificial Sequence
  Description of Artificial Sequence: Synthetic oligonucleotide
ggccucacucagucccagu

SEQ ID NO: 1056808 - RNA, 19 nt, Artificial Sequence
  Description of Artificial Sequence: Synthetic oligonucleotide
gcccgcugguaauaacguu

SEQ ID NO: 1056809 - RNA, 19 nt, Artificial Sequence
  Description of Artificial Sequence: Synthetic oligonucleotide
ucgccacaucugggugguu

SEQ ID NO: 1056810 - RNA, 19 nt, Artificial Sequence
  Description of Artificial Sequence: Synthetic oligonucleotide
cgcugguaauaacguucca

SEQ ID NO: 1056811 - RNA, 19 nt, Artificial Sequence
  Description of Artificial Sequence: Synthetic oligonucleotide
gggcacgggucaggauuuc

SEQ ID NO: 1056812 - RNA, 19 nt, Artificial Sequence
  Description of Artificial Sequence: Synthetic oligonucleotide
cgcccgcugguaauaacgu

SEQ ID NO: 1056813 - RNA, 19 nt, Artificial Sequence
  Description of Artificial Sequence: Synthetic oligonucleotide
cagggcccuccugggaaau

SEQ ID NO: 1056814 - RNA, 19 nt, Artificial Sequence
  Description of Artificial Sequence: Synthetic oligonucleotide
cgucgcaacugccgggccu

SEQ ID NO: 1056815 - RNA, 19 nt, Artificial Sequence
  Description of Artificial Sequence: Synthetic oligonucleotide
ggccacgggacaagccauu

SEQ ID NO: 1056816 - RNA, 19 nt, Artificial Sequence
  Description of Artificial Sequence: Synthetic oligonucleotide
gcgcugcugagugcccgcu

SEQ ID NO: 1056817 - RNA, 19 nt, Artificial Sequence
  Description of Artificial Sequence: Synthetic oligonucleotide
cgacccugagcugcauacu

SEQ ID NO: 1056818 - RNA, 19 nt, Artificial Sequence
  Description of Artificial Sequence: Synthetic oligonucleotide
cgccgguacagagccccua

SEQ ID NO: 1056819 - RNA, 19 nt, Artificial Sequence
  Description of Artificial Sequence: Synthetic oligonucleotide
gaauccuucaguuugagag

SEQ ID NO: 1056820 - RNA, 19 nt, Artificial Sequence
  Description of Artificial Sequence: Synthetic oligonucleotide
gaauagaacacucucagcc

SEQ ID NO: 1056821 - RNA, 19 nt, Artificial Sequence
  Description of Artificial Sequence: Synthetic oligonucleotide
agacauauaacacgggccc

SEQ ID NO: 1056822 - RNA, 19 nt, Artificial Sequence
  Description of Artificial Sequence: Synthetic oligonucleotide
aggaguuagaguuaggguc

SEQ ID NO: 1056823 - RNA, 19 nt, Artificial Sequence
  Description of Artificial Sequence: Synthetic oligonucleotide
aguuugaggaaccuugggc

SEQ ID NO: 1056824 - RNA, 19 nt, Artificial Sequence
  Description of Artificial Sequence: Synthetic oligonucleotide
agaauugucaucuuacaug

SEQ ID NO: 1056825 - RNA, 19 nt, Artificial Sequence
  Description of Artificial Sequence: Synthetic oligonucleotide
uccgagacauauaacacgg

SEQ ID NO: 1056826 - RNA, 19 nt, Artificial Sequence
  Description of Artificial Sequence: Synthetic oligonucleotide
cauguguucauucucagag

SEQ ID NO: 1056827 - RNA, 19 nt, Artificial Sequence
  Description of Artificial Sequence: Synthetic oligonucleotide
ugcuuaauguguaacaaga

SEQ ID NO: 1056828 - RNA, 19 nt, Artificial Sequence
  Description of Artificial Sequence: Synthetic oligonucleotide
aaagauuggccucuuguug

SEQ ID NO: 1056829 - RNA, 19 nt, Artificial Sequence
  Description of Artificial Sequence: Synthetic oligonucleotide
agugacgugaccuuuagca

SEQ ID NO: 1056830 - RNA, 19 nt, Artificial Sequence
  Description of Artificial Sequence: Synthetic oligonucleotide
uuaaagauuggccucuugu

SEQ ID NO: 1056831 - RNA, 19 nt, Artificial Sequence
  Description of Artificial Sequence: Synthetic oligonucleotide
auaagaauugucaucuuac

SEQ ID NO: 1056832 - RNA, 19 nt, Artificial Sequence
  Description of Artificial Sequence: Synthetic oligonucleotide
uuuacuuguuacauaagaa

SEQ ID NO: 1056833 - RNA, 19 nt, Artificial Sequence
  Description of Artificial Sequence: Synthetic oligonucleotide
gaguaugaaugacaggagg

SEQ ID NO: 1056834 - RNA, 19 nt, Artificial Sequence
  Description of Artificial Sequence: Synthetic oligonucleotide
auagauagagcacugugca

SEQ ID NO: 1056835 - RNA, 19 nt, Artificial Sequence
  Description of Artificial Sequence: Synthetic oligonucleotide
ggugaugccucuuugaggg

SEQ ID NO: 1056836 - RNA, 19 nt, Artificial Sequence
  Description of Artificial Sequence: Synthetic oligonucleotide
ucuagcaaagcuugggacc

SEQ ID NO: 1056837 - RNA, 19 nt, Artificial Sequence
  Description of Artificial Sequence: Synthetic oligonucleotide
cauguccagacuaucaccg

SEQ ID NO: 1056838 - RNA, 19 nt, Artificial Sequence
  Description of Artificial Sequence: Synthetic oligonucleotide
cauagauagagcacugugc

SEQ ID NO: 1056839 - RNA, 19 nt, Artificial Sequence
  Description of Artificial Sequence: Synthetic oligonucleotide
uucgcaugcaccgagauga

SEQ ID NO: 1056840 - RNA, 19 nt, Artificial Sequence
  Description of Artificial Sequence: Synthetic oligonucleotide
uuaugcugccacucgagcg

SEQ ID NO: 1056841 - RNA, 19 nt, Artificial Sequence
  Description of Artificial Sequence: Synthetic oligonucleotide
uggaggauccucccuaugg

SEQ ID NO: 1056842 - RNA, 19 nt, Artificial Sequence
  Description of Artificial Sequence: Synthetic oligonucleotide
aagauuggccucuuguugu

SEQ ID NO: 1056843 - RNA, 19 nt, Artificial Sequence
  Description of Artificial Sequence: Synthetic oligonucleotide
ugacgugaccuuuagcagg

SEQ ID NO: 1056844 - RNA, 19 nt, Artificial Sequence
  Description of Artificial Sequence: Synthetic oligonucleotide
aacacucucagccuuaauu

SEQ ID NO: 1056845 - RNA, 19 nt, Artificial Sequence
  Description of Artificial Sequence: Synthetic oligonucleotide
ucaucuuacauguccagac

SEQ ID NO: 1056846 - RNA, 19 nt, Artificial Sequence
  Description of Artificial Sequence: Synthetic oligonucleotide
uguaccuuuagugacguga

SEQ ID NO: 1056847 - RNA, 19 nt, Artificial Sequence
  Description of Artificial Sequence: Synthetic oligonucleotide
guauccgagacauauaaca

SEQ ID NO: 1056848 - RNA, 19 nt, Artificial Sequence
  Description of Artificial Sequence: Synthetic oligonucleotide
aagggcucgagagacaccg

SEQ ID NO: 1056849 - RNA, 19 nt, Artificial Sequence
  Description of Artificial Sequence: Synthetic oligonucleotide
auccgagacauauaacacg

SEQ ID NO: 1056850 - RNA, 19 nt, Artificial Sequence
  Description of Artificial Sequence: Synthetic oligonucleotide
uaacaagacauuaaagauu

SEQ ID NO: 1056851 - RNA, 19 nt, Artificial Sequence
  Description of Artificial Sequence: Synthetic oligonucleotide
auaacacgggcccaggguc

SEQ ID NO: 1056852 - RNA, 19 nt, Artificial Sequence
  Description of Artificial Sequence: Synthetic oligonucleotide
agauucaggacacuucuug

SEQ ID NO: 1056853 - RNA, 19 nt, Artificial Sequence
  Description of Artificial Sequence: Synthetic oligonucleotide
guaggaguuagaguuaggg

SEQ ID NO: 1056854 - RNA, 19 nt, Artificial Sequence
  Description of Artificial Sequence: Synthetic oligonucleotide
ugcagaauagaacacucuc

SEQ ID NO: 1056855 - RNA, 19 nt, Artificial Sequence
  Description of Artificial Sequence: Synthetic oligonucleotide
uucaguuugagagaggcuc

SEQ ID NO: 1056856 - RNA, 19 nt, Artificial Sequence
  Description of Artificial Sequence: Synthetic oligonucleotide
ucccagaagacagagaugu

SEQ ID NO: 1056857 - RNA, 19 nt, Artificial Sequence
  Description of Artificial Sequence: Synthetic oligonucleotide
agaguuaggguccugagua

SEQ ID NO: 1056858 - RNA, 19 nt, Artificial Sequence
  Description of Artificial Sequence: Synthetic oligonucleotide
uuacauguccagacuauca

SEQ ID NO: 1056859 - RNA, 19 nt, Artificial Sequence
  Description of Artificial Sequence: Synthetic oligonucleotide
uauccgagacauauaacac

SEQ ID NO: 1056860 - RNA, 19 nt, Artificial Sequence
  Description of Artificial Sequence: Synthetic oligonucleotide
gacaccgggaguuugagga

SEQ ID NO: 1056861 - RNA, 19 nt, Artificial Sequence
  Description of Artificial Sequence: Synthetic oligonucleotide
uaagaauugucaucuuaca

SEQ ID NO: 1056862 - RNA, 19 nt, Artificial Sequence
  Description of Artificial Sequence: Synthetic oligonucleotide
auuucuagcaaagcuuggg

SEQ ID NO: 1056863 - RNA, 19 nt, Artificial Sequence
  Description of Artificial Sequence: Synthetic oligonucleotide
gaauugucaucuuacaugu

SEQ ID NO: 1056864 - RNA, 19 nt, Artificial Sequence
  Description of Artificial Sequence: Synthetic oligonucleotide
uccauguaccuuuagugac

SEQ ID NO: 1056865 - RNA, 19 nt, Artificial Sequence
  Description of Artificial Sequence: Synthetic oligonucleotide
ugugcagaauagaacacuc

SEQ ID NO: 1056866 - RNA, 19 nt, Artificial Sequence
  Description of Artificial Sequence: Synthetic oligonucleotide
gagacauauaacacgggcc

SEQ ID NO: 1056867 - RNA, 19 nt, Artificial Sequence
  Description of Artificial Sequence: Synthetic oligonucleotide
ggggcuugcgcauagauag

SEQ ID NO: 1056868 - RNA, 19 nt, Artificial Sequence
  Description of Artificial Sequence: Synthetic oligonucleotide
uacauguccagacuaucac

SEQ ID NO: 1056869 - RNA, 19 nt, Artificial Sequence
  Description of Artificial Sequence: Synthetic oligonucleotide
ugugguauccgagacauau

SEQ ID NO: 1056870 - RNA, 19 nt, Artificial Sequence
  Description of Artificial Sequence: Synthetic oligonucleotide
uauaacacgggcccagggu

SEQ ID NO: 1056871 - RNA, 19 nt, Artificial Sequence
  Description of Artificial Sequence: Synthetic oligonucleotide
uugagagaggcucuuucug

SEQ ID NO: 1056872 - RNA, 19 nt, Artificial Sequence
  Description of Artificial Sequence: Synthetic oligonucleotide
uauagaucuccauguaccu

SEQ ID NO: 1056873 - RNA, 19 nt, Artificial Sequence
  Description of Artificial Sequence: Synthetic oligonucleotide
acuuguuacauaagaauug

SEQ ID NO: 1056874 - RNA, 19 nt, Artificial Sequence
  Description of Artificial Sequence: Synthetic oligonucleotide
ugcaccgagaugaggaggc

SEQ ID NO: 1056875 - RNA, 19 nt, Artificial Sequence
  Description of Artificial Sequence: Synthetic oligonucleotide
uuagugacgugaccuuuag

SEQ ID NO: 1056876 - RNA, 19 nt, Artificial Sequence
  Description of Artificial Sequence: Synthetic oligonucleotide
uuagaguuaggguccugag

SEQ ID NO: 1056877 - RNA, 19 nt, Artificial Sequence
  Description of Artificial Sequence: Synthetic oligonucleotide
cauccguucgcaugcaccg

SEQ ID NO: 1056878 - RNA, 19 nt, Artificial Sequence
  Description of Artificial Sequence: Synthetic oligonucleotide
cagguaaaaucccagaaga

SEQ ID NO: 1056879 - RNA, 19 nt, Artificial Sequence
  Description of Artificial Sequence: Synthetic oligonucleotide
uugggugaagugucggagg

SEQ ID NO: 1056880 - RNA, 19 nt, Artificial Sequence
  Description of Artificial Sequence: Synthetic oligonucleotide
gauagcagugugucugugc

SEQ ID NO: 1056881 - RNA, 19 nt, Artificial Sequence
  Description of Artificial Sequence: Synthetic oligonucleotide
uuugacccuaagcugccgc

SEQ ID NO: 1056882 - RNA, 19 nt, Artificial Sequence
  Description of Artificial Sequence: Synthetic oligonucleotide
cuugcgcauagauagagca

SEQ ID NO: 1056883 - RNA, 19 nt, Artificial Sequence
  Description of Artificial Sequence: Synthetic oligonucleotide
auauaacacgggcccaggg

SEQ ID NO: 1056884 - RNA, 19 nt, Artificial Sequence
  Description of Artificial Sequence: Synthetic oligonucleotide
ucucuuuggugcuauggcu

SEQ ID NO: 1056885 - RNA, 19 nt, Artificial Sequence
  Description of Artificial Sequence: Synthetic oligonucleotide
aggcuauagaucuccaugu

SEQ ID NO: 1056886 - RNA, 19 nt, Artificial Sequence
  Description of Artificial Sequence: Synthetic oligonucleotide
acuaucaccggaucuuugu

SEQ ID NO: 1056887 - RNA, 19 nt, Artificial Sequence
  Description of Artificial Sequence: Synthetic oligonucleotide
caggcuauagaucuccaug

SEQ ID NO: 1056888 - RNA, 19 nt, Artificial Sequence
  Description of Artificial Sequence: Synthetic oligonucleotide
ugcgcauagauagagcacu

SEQ ID NO: 1056889 - RNA, 19 nt, Artificial Sequence
  Description of Artificial Sequence: Synthetic oligonucleotide
aguaugaaugacaggaggu

SEQ ID NO: 1056890 - RNA, 19 nt, Artificial Sequence
  Description of Artificial Sequence: Synthetic oligonucleotide
uggaucgguccuuuggaag

SEQ ID NO: 1056891 - RNA, 19 nt, Artificial Sequence
  Description of Artificial Sequence: Synthetic oligonucleotide
uaagcugccgcugcgagac

SEQ ID NO: 1056892 - RNA, 19 nt, Artificial Sequence
  Description of Artificial Sequence: Synthetic oligonucleotide
uaucaccggaucuuugucu

SEQ ID NO: 1056893 - RNA, 19 nt, Artificial Sequence
  Description of Artificial Sequence: Synthetic oligonucleotide
cugaauaguccagagucag

SEQ ID NO: 1056894 - RNA, 19 nt, Artificial Sequence
  Description of Artificial Sequence: Synthetic oligonucleotide
uagaguuaggguccugagu

SEQ ID NO: 1056895 - RNA, 19 nt, Artificial Sequence
  Description of Artificial Sequence: Synthetic oligonucleotide
cucuuacuggaguugggag

SEQ ID NO: 1056896 - RNA, 19 nt, Artificial Sequence
  Description of Artificial Sequence: Synthetic oligonucleotide
ggaucgguccuuuggaagg

SEQ ID NO: 1056897 - RNA, 19 nt, Artificial Sequence
  Description of Artificial Sequence: Synthetic oligonucleotide
cuugggguaggaguuagag

SEQ ID NO: 1056898 - RNA, 19 nt, Artificial Sequence
  Description of Artificial Sequence: Synthetic oligonucleotide
ucguuauucuccccagcug

SEQ ID NO: 1056899 - RNA, 19 nt, Artificial Sequence
  Description of Artificial Sequence: Synthetic oligonucleotide
uuuagugacgugaccuuua

SEQ ID NO: 1056900 - RNA, 19 nt, Artificial Sequence
  Description of Artificial Sequence: Synthetic oligonucleotide
uucgugauagcaguguguc

SEQ ID NO: 1056901 - RNA, 19 nt, Artificial Sequence
  Description of Artificial Sequence: Synthetic oligonucleotide
gaggcugucacugacagua

SEQ ID NO: 1056902 - RNA, 19 nt, Artificial Sequence
  Description of Artificial Sequence: Synthetic oligonucleotide
accuuuagugacgugaccu

SEQ ID NO: 1056903 - RNA, 19 nt, Artificial Sequence
  Description of Artificial Sequence: Synthetic oligonucleotide
guuugaggaaccuugggcu

SEQ ID NO: 1056904 - RNA, 19 nt, Artificial Sequence
  Description of Artificial Sequence: Synthetic oligonucleotide
uucuucggguuucugucug

SEQ ID NO: 1056905 - RNA, 19 nt, Artificial Sequence
  Description of Artificial Sequence: Synthetic oligonucleotide
ugucugggaauguuucuga

SEQ ID NO: 1056906 - RNA, 19 nt, Artificial Sequence
  Description of Artificial Sequence: Synthetic oligonucleotide
uuugagggaauuucucuuu

SEQ ID NO: 1056907 - RNA, 19 nt, Artificial Sequence
  Description of Artificial Sequence: Synthetic oligonucleotide
cuuaugcugccacucgagc

SEQ ID NO: 1056908 - RNA, 19 nt, Artificial Sequence
  Description of Artificial Sequence: Synthetic oligonucleotide
gugacgugaccuuuagcag

SEQ ID NO: 1056909 - RNA, 19 nt, Artificial Sequence
  Description of Artificial Sequence: Synthetic oligonucleotide
auuaaagauuggccucuug

SEQ ID NO: 1056910 - RNA, 19 nt, Artificial Sequence
  Description of Artificial Sequence: Synthetic oligonucleotide
gcagguaaaaucccagaag

SEQ ID NO: 1056911 - RNA, 19 nt, Artificial Sequence
  Description of Artificial Sequence: Synthetic oligonucleotide
ugggugaagugucggaggu

SEQ ID NO: 1056912 - RNA, 19 nt, Artificial Sequence
  Description of Artificial Sequence: Synthetic oligonucleotide
gucacguggggccucuugg

SEQ ID NO: 1056913 - RNA, 19 nt, Artificial Sequence
  Description of Artificial Sequence: Synthetic oligonucleotide
acugugcagaauagaacac

SEQ ID NO: 1056914 - RNA, 19 nt, Artificial Sequence
  Description of Artificial Sequence: Synthetic oligonucleotide
ucccucuacccuucagugg

SEQ ID NO: 1056915 - RNA, 19 nt, Artificial Sequence
  Description of Artificial Sequence: Synthetic oligonucleotide
aucuuacauguccagacua

SEQ ID NO: 1056916 - RNA, 19 nt, Artificial Sequence
  Description of Artificial Sequence: Synthetic oligonucleotide
uccguucgcaugcaccgag

SEQ ID NO: 1056917 - RNA, 19 nt, Artificial Sequence
  Description of Artificial Sequence: Synthetic oligonucleotide
agccccagaggacacugac

SEQ ID NO: 1056918 - RNA, 19 nt, Artificial Sequence
  Description of Artificial Sequence: Synthetic oligonucleotide
ugaauaguccagagucagu

SEQ ID NO: 1056919 - RNA, 19 nt, Artificial Sequence
  Description of Artificial Sequence: Synthetic oligonucleotide
agauuggccucuuguuguc

SEQ ID NO: 1056920 - RNA, 19 nt, Artificial Sequence
  Description of Artificial Sequence: Synthetic oligonucleotide
aggauccucccuauggugg

SEQ ID NO: 1056921 - RNA, 19 nt, Artificial Sequence
  Description of Artificial Sequence: Synthetic oligonucleotide
cuugggugaagugucggag

SEQ ID NO: 1056922 - RNA, 19 nt, Artificial Sequence
  Description of Artificial Sequence: Synthetic oligonucleotide
ggaguuagaguuagggucc

SEQ ID NO: 1056923 - RNA, 19 nt, Artificial Sequence
  Description of Artificial Sequence: Synthetic oligonucleotide
uaacacgggcccagggucc

SEQ ID NO: 1056924 - RNA, 19 nt, Artificial Sequence
  Description of Artificial Sequence: Synthetic oligonucleotide
ugcgcauguguucauucuc

SEQ ID NO: 1056925 - RNA, 19 nt, Artificial Sequence
  Description of Artificial Sequence: Synthetic oligonucleotide
ucuucggguuucugucugg

SEQ ID NO: 1056926 - RNA, 19 nt, Artificial Sequence
  Description of Artificial Sequence: Synthetic oligonucleotide
uugcgcauagauagagcac

SEQ ID NO: 1056927 - RNA, 19 nt, Artificial Sequence
  Description of Artificial Sequence: Synthetic oligonucleotide
auguccagacuaucaccgg

SEQ ID NO: 1056928 - RNA, 19 nt, Artificial Sequence
  Description of Artificial Sequence: Synthetic oligonucleotide
ucggggucuuccgaguugg

SEQ ID NO: 1056929 - RNA, 19 nt, Artificial Sequence
  Description of Artificial Sequence: Synthetic oligonucleotide
ugaaugacaggaggugcug

SEQ ID NO: 1056930 - RNA, 19 nt, Artificial Sequence
  Description of Artificial Sequence: Synthetic oligonucleotide
caccuuugacccuaagcug

SEQ ID NO: 1056931 - RNA, 19 nt, Artificial Sequence
  Description of Artificial Sequence: Synthetic oligonucleotide
uaccuuuagugacgugacc

SEQ ID NO: 1056932 - RNA, 19 nt, Artificial Sequence
  Description of Artificial Sequence: Synthetic oligonucleotide
ugaguugcuuaauguguaa

SEQ ID NO: 1056933 - RNA, 19 nt, Artificial Sequence
  Description of Artificial Sequence: Synthetic oligonucleotide
gauguagacaggccccauc

SEQ ID NO: 1056934 - RNA, 19 nt, Artificial Sequence
  Description of Artificial Sequence: Synthetic oligonucleotide
cacagcaggcuauagaucu

SEQ ID NO: 1056935 - RNA, 19 nt, Artificial Sequence
  Description of Artificial Sequence: Synthetic oligonucleotide
uccuggcagguaaaauccc

SEQ ID NO: 1056936 - RNA, 19 nt, Artificial Sequence
  Description of Artificial Sequence: Synthetic oligonucleotide
caugcaccgagaugaggag

SEQ ID NO: 1056937 - RNA, 19 nt, Artificial Sequence
  Description of Artificial Sequence: Synthetic oligonucleotide
ugaagugucggaggucccc

SEQ ID NO: 1056938 - RNA, 19 nt, Artificial Sequence
  Description of Artificial Sequence: Synthetic oligonucleotide
uguagacaggccccaucac

SEQ ID NO: 1056939 - RNA, 19 nt, Artificial Sequence
  Description of Artificial Sequence: Synthetic oligonucleotide
ugcaccggggcuuccuucc

SEQ ID NO: 1056940 - RNA, 19 nt, Artificial Sequence
  Description of Artificial Sequence: Synthetic oligonucleotide
cguuauucuccccagcugg

SEQ ID NO: 1056941 - RNA, 19 nt, Artificial Sequence
  Description of Artificial Sequence: Synthetic oligonucleotide
gggaguuugaggaaccuug

SEQ ID NO: 1056942 - RNA, 19 nt, Artificial Sequence
  Description of Artificial Sequence: Synthetic oligonucleotide
gggucuuccgaguuggggc

SEQ ID NO: 1056943 - RNA, 19 nt, Artificial Sequence
  Description of Artificial Sequence: Synthetic oligonucleotide
agaagcaggguuggagauc

SEQ ID NO: 1056944 - RNA, 19 nt, Artificial Sequence
  Description of Artificial Sequence: Synthetic oligonucleotide
aagucccucuacccuucag

SEQ ID NO: 1056945 - RNA, 19 nt, Artificial Sequence
  Description of Artificial Sequence: Synthetic oligonucleotide
agacaggccccaucacuuc

SEQ ID NO: 1056946 - RNA, 19 nt, Artificial Sequence
  Description of Artificial Sequence: Synthetic oligonucleotide
cacucucagccuuaauuuc

SEQ ID NO: 1056947 - RNA, 19 nt, Artificial Sequence
  Description of Artificial Sequence: Synthetic oligonucleotide
gacccuaagcugccgcugc

SEQ ID NO: 1056948 - RNA, 19 nt, Artificial Sequence
  Description of Artificial Sequence: Synthetic oligonucleotide
guuagaguuaggguccuga

SEQ ID NO: 1056949 - RNA, 19 nt, Artificial Sequence
  Description of Artificial Sequence: Synthetic oligonucleotide
agccucguuauucucccca

SEQ ID NO: 1056950 - RNA, 19 nt, Artificial Sequence
  Description of Artificial Sequence: Synthetic oligonucleotide
cuuacauguccagacuauc

SEQ ID NO: 1056951 - RNA, 19 nt, Artificial Sequence
  Description of Artificial Sequence: Synthetic oligonucleotide
uggcuauccuucccuuugc

SEQ ID NO: 1056952 - RNA, 19 nt, Artificial Sequence
  Description of Artificial Sequence: Synthetic oligonucleotide
uucauucucagaggaguuc

SEQ ID NO: 1056953 - RNA, 19 nt, Artificial Sequence
  Description of Artificial Sequence: Synthetic oligonucleotide
acuuaugcugccacucgag

SEQ ID NO: 1056954 - RNA, 19 nt, Artificial Sequence
  Description of Artificial Sequence: Synthetic oligonucleotide
ucuacccuucaguggaguc

SEQ ID NO: 1056955 - RNA, 19 nt, Artificial Sequence
  Description of Artificial Sequence: Synthetic oligonucleotide
acucuuacuggaguuggga

SEQ ID NO: 1056956 - RNA, 19 nt, Artificial Sequence
  Description of Artificial Sequence: Synthetic oligonucleotide
ccauguaccuuuagugacg

SEQ ID NO: 1056957 - RNA, 19 nt, Artificial Sequence
  Description of Artificial Sequence: Synthetic oligonucleotide
uugacccuaagcugccgcu

SEQ ID NO: 1056958 - RNA, 19 nt, Artificial Sequence
  Description of Artificial Sequence: Synthetic oligonucleotide
gggacuagaagcaggguug

SEQ ID NO: 1056959 - RNA, 19 nt, Artificial Sequence
  Description of Artificial Sequence: Synthetic oligonucleotide
uagugacgugaccuuuagc

SEQ ID NO: 1056960 - RNA, 19 nt, Artificial Sequence
  Description of Artificial Sequence: Synthetic oligonucleotide
ucgagagacaccgggaguu

SEQ ID NO: 1056961 - RNA, 19 nt, Artificial Sequence
  Description of Artificial Sequence: Synthetic oligonucleotide
acucucagccuuaauuuca

SEQ ID NO: 1056962 - RNA, 19 nt, Artificial Sequence
  Description of Artificial Sequence: Synthetic oligonucleotide
acucgagcggggcagccug

SEQ ID NO: 1056963 - RNA, 19 nt, Artificial Sequence
  Description of Artificial Sequence: Synthetic oligonucleotide
uccuucgugauagcagugu

SEQ ID NO: 1056964 - RNA, 19 nt, Artificial Sequence
  Description of Artificial Sequence: Synthetic oligonucleotide
caccggaucuuugucuugg

SEQ ID NO: 1056965 - RNA, 19 nt, Artificial Sequence
  Description of Artificial Sequence: Synthetic oligonucleotide
guaccuuuagugacgugac

SEQ ID NO: 1056966 - RNA, 19 nt, Artificial Sequence
  Description of Artificial Sequence: Synthetic oligonucleotide
uugaggaaccuugggcucu

SEQ ID NO: 1056967 - RNA, 19 nt, Artificial Sequence
  Description of Artificial Sequence: Synthetic oligonucleotide
uacuggaguugggagcaag

SEQ ID NO: 1056968 - RNA, 19 nt, Artificial Sequence
  Description of Artificial Sequence: Synthetic oligonucleotide
augcaccgagaugaggagg

SEQ ID NO: 1056969 - RNA, 19 nt, Artificial Sequence
  Description of Artificial Sequence: Synthetic oligonucleotide
gaucgguccuuuggaaggc

SEQ ID NO: 1056970 - RNA, 19 nt, Artificial Sequence
  Description of Artificial Sequence: Synthetic oligonucleotide
accgggaguuugaggaacc

SEQ ID NO: 1056971 - RNA, 19 nt, Artificial Sequence
  Description of Artificial Sequence: Synthetic oligonucleotide
cuucggguuucugucuggg

SEQ ID NO: 1056972 - RNA, 19 nt, Artificial Sequence
  Description of Artificial Sequence: Synthetic oligonucleotide
aucgguccuuuggaaggcc

SEQ ID NO: 1056973 - RNA, 19 nt, Artificial Sequence
  Description of Artificial Sequence: Synthetic oligonucleotide
guucgcaugcaccgagaug

SEQ ID NO: 1056974 - RNA, 19 nt, Artificial Sequence
  Description of Artificial Sequence: Synthetic oligonucleotide
accuuguuuucuucggguu

SEQ ID NO: 1056975 - RNA, 19 nt, Artificial Sequence
  Description of Artificial Sequence: Synthetic oligonucleotide
ugcgccggacacuggcagg

SEQ ID NO: 1056976 - RNA, 19 nt, Artificial Sequence
  Description of Artificial Sequence: Synthetic oligonucleotide
cuuugucuugggguaggag

SEQ ID NO: 1056977 - RNA, 19 nt, Artificial Sequence
  Description of Artificial Sequence: Synthetic oligonucleotide
gagacaccgggaguuugag

SEQ ID NO: 1056978 - RNA, 19 nt, Artificial Sequence
  Description of Artificial Sequence: Synthetic oligonucleotide
uggggcuugcgcauagaua

SEQ ID NO: 1056979 - RNA, 19 nt, Artificial Sequence
  Description of Artificial Sequence: Synthetic oligonucleotide
ugggugucucccgagggga

SEQ ID NO: 1056980 - RNA, 19 nt, Artificial Sequence
  Description of Artificial Sequence: Synthetic oligonucleotide
cucuuuggugcuauggcua

SEQ ID NO: 1056981 - RNA, 19 nt, Artificial Sequence
  Description of Artificial Sequence: Synthetic oligonucleotide
ugacaaccacagacacaag

SEQ ID NO: 1056982 - RNA, 19 nt, Artificial Sequence
  Description of Artificial Sequence: Synthetic oligonucleotide
uggagucaguucccucuga

SEQ ID NO: 1056983 - RNA, 19 nt, Artificial Sequence
  Description of Artificial Sequence: Synthetic oligonucleotide
ucgugauagcagugugucu

SEQ ID NO: 1056984 - RNA, 19 nt, Artificial Sequence
  Description of Artificial Sequence: Synthetic oligonucleotide
uucccuuugcuggaucggu

SEQ ID NO: 1056985 - RNA, 19 nt, Artificial Sequence
  Description of Artificial Sequence: Synthetic oligonucleotide
uucggguuucugucuggga

SEQ ID NO: 1056986 - RNA, 19 nt, Artificial Sequence
  Description of Artificial Sequence: Synthetic oligonucleotide
gaccuuguuuucuucgggu

SEQ ID NO: 1056987 - RNA, 19 nt, Artificial Sequence
  Description of Artificial Sequence: Synthetic oligonucleotide
gacuaucaccggaucuuug

SEQ ID NO: 1056988 - RNA, 19 nt, Artificial Sequence
  Description of Artificial Sequence: Synthetic oligonucleotide
ugacccuaagcugccgcug

SEQ ID NO: 1056989 - RNA, 19 nt, Artificial Sequence
  Description of Artificial Sequence: Synthetic oligonucleotide
ucaccggaucuuugucuug

SEQ ID NO: 1056990 - RNA, 19 nt, Artificial Sequence
  Description of Artificial Sequence: Synthetic oligonucleotide
guuaggguccugaguauga

SEQ ID NO: 1056991 - RNA, 19 nt, Artificial Sequence
  Description of Artificial Sequence: Synthetic oligonucleotide
ggaucuuugucuuggggua

SEQ ID NO: 1056992 - RNA, 19 nt, Artificial Sequence
  Description of Artificial Sequence: Synthetic oligonucleotide
ucccuuugcuggaucgguc

SEQ ID NO: 1056993 - RNA, 19 nt, Artificial Sequence
  Description of Artificial Sequence: Synthetic oligonucleotide
ucgcaugcaccgagaugag

SEQ ID NO: 1056994 - RNA, 19 nt, Artificial Sequence
  Description of Artificial Sequence: Synthetic oligonucleotide
caggacgcuuccagggccc

SEQ ID NO: 1056995 - RNA, 19 nt, Artificial Sequence
  Description of Artificial Sequence: Synthetic oligonucleotide
ggacacuucuuggaggccc

SEQ ID NO: 1056996 - RNA, 19 nt, Artificial Sequence
  Description of Artificial Sequence: Synthetic oligonucleotide
cccagaagauucaggacac

SEQ ID NO: 1056997 - RNA, 19 nt, Artificial Sequence
  Description of Artificial Sequence: Synthetic oligonucleotide
gaugccgguggagcauccg

SEQ ID NO: 1056998 - RNA, 19 nt, Artificial Sequence
  Description of Artificial Sequence: Synthetic oligonucleotide
gcuauccuucccuuugcug

SEQ ID NO: 1056999 - RNA, 19 nt, Artificial Sequence
  Description of Artificial Sequence: Synthetic oligonucleotide
uuggugcuauggcuauccu

SEQ ID NO: 1057000 - RNA, 19 nt, Artificial Sequence
  Description of Artificial Sequence: Synthetic oligonucleotide
cgugauagcagugugucug

SEQ ID NO: 1057001 - RNA, 19 nt, Artificial Sequence
  Description of Artificial Sequence: Synthetic oligonucleotide
ggacuagaagcaggguugg

SEQ ID NO: 1057002 - RNA, 19 nt, Artificial Sequence
  Description of Artificial Sequence: Synthetic oligonucleotide
gcugggugucucccgaggg

SEQ ID NO: 1057003 - RNA, 19 nt, Artificial Sequence
  Description of Artificial Sequence: Synthetic oligonucleotide
gcaugcaccgagaugagga

SEQ ID NO: 1057004 - RNA, 19 nt, Artificial Sequence
  Description of Artificial Sequence: Synthetic oligonucleotide
ggguaggaguuagaguuag

SEQ ID NO: 1057005 - RNA, 19 nt, Artificial Sequence
  Description of Artificial Sequence: Synthetic oligonucleotide
ugccgcugcgagacugucc

SEQ ID NO: 1057006 - RNA, 19 nt, Artificial Sequence
  Description of Artificial Sequence: Synthetic oligonucleotide
ggcuugcgcauagauagag

SEQ ID NO: 1057007 - RNA, 19 nt, Artificial Sequence
  Description of Artificial Sequence: Synthetic oligonucleotide
auggaggauccucccuaug

SEQ ID NO: 1057008 - RNA, 19 nt, Artificial Sequence
  Description of Artificial Sequence: Synthetic oligonucleotide
ggauccucccuaugguggc

SEQ ID NO: 1057009 - RNA, 19 nt, Artificial Sequence
  Description of Artificial Sequence: Synthetic oligonucleotide
ugggagcaaggcccaacuc

SEQ ID NO: 1057010 - RNA, 19 nt, Artificial Sequence
  Description of Artificial Sequence: Synthetic oligonucleotide
uaugguggcccgcccugaa

SEQ ID NO: 1057011 - RNA, 19 nt, Artificial Sequence
  Description of Artificial Sequence: Synthetic oligonucleotide
cucguuauucuccccagcu

SEQ ID NO: 1057012 - RNA, 19 nt, Artificial Sequence
  Description of Artificial Sequence: Synthetic oligonucleotide
uuugcuggaucgguccuuu

SEQ ID NO: 1057013 - RNA, 19 nt, Artificial Sequence
  Description of Artificial Sequence: Synthetic oligonucleotide
ucuuccgaguuggggcugc

SEQ ID NO: 1057014 - RNA, 19 nt, Artificial Sequence
  Description of Artificial Sequence: Synthetic oligonucleotide
cuuugagggaauuucucuu

SEQ ID NO: 1057015 - RNA, 19 nt, Artificial Sequence
  Description of Artificial Sequence: Synthetic oligonucleotide
cacuuaugcugccacucga

SEQ ID NO: 1057016 - RNA, 19 nt, Artificial Sequence
  Description of Artificial Sequence: Synthetic oligonucleotide
cuccuucgugauagcagug

SEQ ID NO: 1057017 - RNA, 19 nt, Artificial Sequence
  Description of Artificial Sequence: Synthetic oligonucleotide
ggaagggcucgagagacac

SEQ ID NO: 1057018 - RNA, 19 nt, Artificial Sequence
  Description of Artificial Sequence: Synthetic oligonucleotide
ccacuuaugcugccacucg

SEQ ID NO: 1057019 - RNA, 19 nt, Artificial Sequence
  Description of Artificial Sequence: Synthetic oligonucleotide
ucuguaggggauggaggau

SEQ ID NO: 1057020 - RNA, 19 nt, Artificial Sequence
  Description of Artificial Sequence: Synthetic oligonucleotide
ugcuccucugcuggauuug

SEQ ID NO: 1057021 - RNA, 19 nt, Artificial Sequence
  Description of Artificial Sequence: Synthetic oligonucleotide
ccaccuuugacccuaagcu

SEQ ID NO: 1057022 - RNA, 19 nt, Artificial Sequence
  Description of Artificial Sequence: Synthetic oligonucleotide
ugaggcugucacugacagu

SEQ ID NO: 1057023 - RNA, 19 nt, Artificial Sequence
  Description of Artificial Sequence: Synthetic oligonucleotide
cugcgccggacacuggcag

SEQ ID NO: 1057024 - RNA, 19 nt, Artificial Sequence
  Description of Artificial Sequence: Synthetic oligonucleotide
cucccuaugguggcccgcc

SEQ ID NO: 1057025 - RNA, 19 nt, Artificial Sequence
  Description of Artificial Sequence: Synthetic oligonucleotide
ucgagcggggcagccuggg

SEQ ID NO: 1057026 - RNA, 19 nt, Artificial Sequence
  Description of Artificial Sequence: Synthetic oligonucleotide
gacgugaccuuuagcaggu

SEQ ID NO: 1057027 - RNA, 19 nt, Artificial Sequence
  Description of Artificial Sequence: Synthetic oligonucleotide
cuaagcugccgcugcgaga

SEQ ID NO: 1057028 - RNA, 19 nt, Artificial Sequence
  Description of Artificial Sequence: Synthetic oligonucleotide
caccgggaguuugaggaac

SEQ ID NO: 1057029 - RNA, 19 nt, Artificial Sequence
  Description of Artificial Sequence: Synthetic oligonucleotide
gaagggcucgagagacacc

SEQ ID NO: 1057030 - RNA, 19 nt, Artificial Sequence
  Description of Artificial Sequence: Synthetic oligonucleotide
ccagguccagucacguggg

SEQ ID NO: 1057031 - RNA, 19 nt, Artificial Sequence
  Description of Artificial Sequence: Synthetic oligonucleotide
agacuaucaccggaucuuu

SEQ ID NO: 1057032 - RNA, 19 nt, Artificial Sequence
  Description of Artificial Sequence: Synthetic oligonucleotide
acaccgggaguuugaggaa

SEQ ID NO: 1057033 - RNA, 19 nt, Artificial Sequence
  Description of Artificial Sequence: Synthetic oligonucleotide
auguaccuuuagugacgug

SEQ ID NO: 1057034 - RNA, 19 nt, Artificial Sequence
  Description of Artificial Sequence: Synthetic oligonucleotide
gcauccguucgcaugcacc

SEQ ID NO: 1057035 - RNA, 19 nt, Artificial Sequence
  Description of Artificial Sequence: Synthetic oligonucleotide
gguauccgagacauauaac

SEQ ID NO: 1057036 - RNA, 19 nt, Artificial Sequence
  Description of Artificial Sequence: Synthetic oligonucleotide
gguaggaguuagaguuagg

SEQ ID NO: 1057037 - RNA, 19 nt, Artificial Sequence
  Description of Artificial Sequence: Synthetic oligonucleotide
ggauggaggauccucccua

SEQ ID NO: 1057038 - RNA, 19 nt, Artificial Sequence
  Description of Artificial Sequence: Synthetic oligonucleotide
agcugccgcugcgagacug

SEQ ID NO: 1057039 - RNA, 19 nt, Artificial Sequence
  Description of Artificial Sequence: Synthetic oligonucleotide
cccucuacccuucagugga

SEQ ID NO: 1057040 - RNA, 19 nt, Artificial Sequence
  Description of Artificial Sequence: Synthetic oligonucleotide
cuggugaugccaggggcuc

SEQ ID NO: 1057041 - RNA, 19 nt, Artificial Sequence
  Description of Artificial Sequence: Synthetic oligonucleotide
ucccgaggggaagcccugg

SEQ ID NO: 1057042 - RNA, 19 nt, Artificial Sequence
  Description of Artificial Sequence: Synthetic oligonucleotide
cucgagcggggcagccugg

SEQ ID NO: 1057043 - RNA, 19 nt, Artificial Sequence
  Description of Artificial Sequence: Synthetic oligonucleotide
cuggaucgguccuuuggaa

SEQ ID NO: 1057044 - RNA, 19 nt, Artificial Sequence
  Description of Artificial Sequence: Synthetic oligonucleotide
gccucguuauucuccccag

SEQ ID NO: 1057045 - RNA, 19 nt, Artificial Sequence
  Description of Artificial Sequence: Synthetic oligonucleotide
gugucucccgaggggaagc

SEQ ID NO: 1057046 - RNA, 19 nt, Artificial Sequence
  Description of Artificial Sequence: Synthetic oligonucleotide
uggaugccgguggagcauc

SEQ ID NO: 1057047 - RNA, 19 nt, Artificial Sequence
  Description of Artificial Sequence: Synthetic oligonucleotide
caccuugcgcauguguuca

SEQ ID NO: 1057048 - RNA, 19 nt, Artificial Sequence
  Description of Artificial Sequence: Synthetic oligonucleotide
gcuauggcuauccuucccu

SEQ ID NO: 1057049 - RNA, 19 nt, Artificial Sequence
  Description of Artificial Sequence: Synthetic oligonucleotide
aucuggcuacugccugucu

SEQ ID NO: 1057050 - RNA, 19 nt, Artificial Sequence
  Description of Artificial Sequence: Synthetic oligonucleotide
ggagcucucggggucuucc

SEQ ID NO: 1057051 - RNA, 19 nt, Artificial Sequence
  Description of Artificial Sequence: Synthetic oligonucleotide
cugcgagacuguccuggug

SEQ ID NO: 1057052 - RNA, 19 nt, Artificial Sequence
  Description of Artificial Sequence: Synthetic oligonucleotide
gagcggggcagccugggcu

SEQ ID NO: 1057053 - RNA, 19 nt, Artificial Sequence
  Description of Artificial Sequence: Synthetic oligonucleotide
cccgcacagagcuccuucg

SEQ ID NO: 1057054 - RNA, 19 nt, Artificial Sequence
  Description of Artificial Sequence: Synthetic oligonucleotide
aguuugagagaggcucuuu

SEQ ID NO: 1057055 - RNA, 19 nt, Artificial Sequence
  Description of Artificial Sequence: Synthetic oligonucleotide
cagguccagucacgugggg

SEQ ID NO: 1057056 - RNA, 19 nt, Artificial Sequence
  Description of Artificial Sequence: Synthetic oligonucleotide
cugugcagaauagaacacu

SEQ ID NO: 1057057 - RNA, 19 nt, Artificial Sequence
  Description of Artificial Sequence: Synthetic oligonucleotide
gugauagcagugugucugu

SEQ ID NO: 1057058 - RNA, 19 nt, Artificial Sequence
  Description of Artificial Sequence: Synthetic oligonucleotide
gcuccuucgugauagcagu

SEQ ID NO: 1057059 - RNA, 19 nt, Artificial Sequence
  Description of Artificial Sequence: Synthetic oligonucleotide
cauguaccuuuagugacgu

SEQ ID NO: 1057060 - RNA, 19 nt, Artificial Sequence
  Description of Artificial Sequence: Synthetic oligonucleotide
cuuuggugcuauggcuauc

SEQ ID NO: 1057061 - RNA, 19 nt, Artificial Sequence
  Description of Artificial Sequence: Synthetic oligonucleotide
cagccucguuauucucccc

SEQ ID NO: 1057062 - RNA, 19 nt, Artificial Sequence
  Description of Artificial Sequence: Synthetic oligonucleotide
gcuugcgcauagauagagc

SEQ ID NO: 1057063 - RNA, 19 nt, Artificial Sequence
  Description of Artificial Sequence: Synthetic oligonucleotide
gacuagaagcaggguugga

SEQ ID NO: 1057064 - RNA, 19 nt, Artificial Sequence
  Description of Artificial Sequence: Synthetic oligonucleotide
cucccgaggggaagcccug

SEQ ID NO: 1057065 - RNA, 19 nt, Artificial Sequence
  Description of Artificial Sequence: Synthetic oligonucleotide
augguggcccgcccugaau

SEQ ID NO: 1057066 - RNA, 19 nt, Artificial Sequence
  Description of Artificial Sequence: Synthetic oligonucleotide
ggcuauagaucuccaugua

SEQ ID NO: 1057067 - RNA, 19 nt, Artificial Sequence
  Description of Artificial Sequence: Synthetic oligonucleotide
cagagucagugagccaguc

SEQ ID NO: 1057068 - RNA, 19 nt, Artificial Sequence
  Description of Artificial Sequence: Synthetic oligonucleotide
gcaaagcuugggaccgggg

SEQ ID NO: 1057069 - RNA, 19 nt, Artificial Sequence
  Description of Artificial Sequence: Synthetic oligonucleotide
ccaucacuucuguagggga

SEQ ID NO: 1057070 - RNA, 19 nt, Artificial Sequence
  Description of Artificial Sequence: Synthetic oligonucleotide
ccuaugguggcccgcccug

SEQ ID NO: 1057071 - RNA, 19 nt, Artificial Sequence
  Description of Artificial Sequence: Synthetic oligonucleotide
cccacuuaugcugccacuc

SEQ ID NO: 1057072 - RNA, 19 nt, Artificial Sequence
  Description of Artificial Sequence: Synthetic oligonucleotide
ggaaccuccuggggaacug

SEQ ID NO: 1057073 - RNA, 19 nt, Artificial Sequence
  Description of Artificial Sequence: Synthetic oligonucleotide
ccucguuauucuccccagc

SEQ ID NO: 1057074 - RNA, 19 nt, Artificial Sequence
  Description of Artificial Sequence: Synthetic oligonucleotide
gaugucagcucaggacgcu

SEQ ID NO: 1057075 - RNA, 19 nt, Artificial Sequence
  Description of Artificial Sequence: Synthetic oligonucleotide
gugcagaauagaacacucu

SEQ ID NO: 1057076 - RNA, 19 nt, Artificial Sequence
  Description of Artificial Sequence: Synthetic oligonucleotide
gguggagcauccguucgca

SEQ ID NO: 1057077 - RNA, 19 nt, Artificial Sequence
  Description of Artificial Sequence: Synthetic oligonucleotide
cgcauguguucauucucag

SEQ ID NO: 1057078 - RNA, 19 nt, Artificial Sequence
  Description of Artificial Sequence: Synthetic oligonucleotide
ggucuuccgaguuggggcu

SEQ ID NO: 1057079 - RNA, 19 nt, Artificial Sequence
  Description of Artificial Sequence: Synthetic oligonucleotide
gcgcauguguucauucuca

SEQ ID NO: 1057080 - RNA, 19 nt, Artificial Sequence
  Description of Artificial Sequence: Synthetic oligonucleotide
gacacuucuuggaggcccu

SEQ ID NO: 1057081 - RNA, 19 nt, Artificial Sequence
  Description of Artificial Sequence: Synthetic oligonucleotide
gccgcugcgagacuguccu

SEQ ID NO: 1057082 - RNA, 19 nt, Artificial Sequence
  Description of Artificial Sequence: Synthetic oligonucleotide
auccguucgcaugcaccga

SEQ ID NO: 1057083 - RNA, 19 nt, Artificial Sequence
  Description of Artificial Sequence: Synthetic oligonucleotide
gaguuagaguuaggguccu

SEQ ID NO: 1057084 - RNA, 19 nt, Artificial Sequence
  Description of Artificial Sequence: Synthetic oligonucleotide
accuugcgcauguguucau

SEQ ID NO: 1057085 - RNA, 19 nt, Artificial Sequence
  Description of Artificial Sequence: Synthetic oligonucleotide
gcgcauagauagagcacug

SEQ ID NO: 1057086 - RNA, 19 nt, Artificial Sequence
  Description of Artificial Sequence: Synthetic oligonucleotide
gcugccacucgagcggggc

SEQ ID NO: 1057087 - RNA, 19 nt, Artificial Sequence
  Description of Artificial Sequence: Synthetic oligonucleotide
gcuugggugcugccccuug

SEQ ID NO: 1057088 - RNA, 19 nt, Artificial Sequence
  Description of Artificial Sequence: Synthetic oligonucleotide
gaugccucuuugagggaau

SEQ ID NO: 1057089 - RNA, 19 nt, Artificial Sequence
  Description of Artificial Sequence: Synthetic oligonucleotide
gugguauccgagacauaua

SEQ ID NO: 1057090 - RNA, 19 nt, Artificial Sequence
  Description of Artificial Sequence: Synthetic oligonucleotide
aagcaggguuggagaucug

SEQ ID NO: 1057091 - RNA, 19 nt, Artificial Sequence
  Description of Artificial Sequence: Synthetic oligonucleotide
guccagacuaucaccggau

SEQ ID NO: 1057092 - RNA, 19 nt, Artificial Sequence
  Description of Artificial Sequence: Synthetic oligonucleotide
cccgcccugaauccuucag

SEQ ID NO: 1057093 - RNA, 19 nt, Artificial Sequence
  Description of Artificial Sequence: Synthetic oligonucleotide
ggcucgagagacaccggga

SEQ ID NO: 1057094 - RNA, 19 nt, Artificial Sequence
  Description of Artificial Sequence: Synthetic oligonucleotide
cuaugguggcccgcccuga

SEQ ID NO: 1057095 - RNA, 19 nt, Artificial Sequence
  Description of Artificial Sequence: Synthetic oligonucleotide
cugccacucgagcggggca

SEQ ID NO: 1057096 - RNA, 19 nt, Artificial Sequence
  Description of Artificial Sequence: Synthetic oligonucleotide
gaacacucucagccuuaau

SEQ ID NO: 1057097 - RNA, 19 nt, Artificial Sequence
  Description of Artificial Sequence: Synthetic oligonucleotide
gcgccggacacuggcaggc

SEQ ID NO: 1057098 - RNA, 19 nt, Artificial Sequence
  Description of Artificial Sequence: Synthetic oligonucleotide
ccagacuaucaccggaucu

SEQ ID NO: 1057099 - RNA, 19 nt, Artificial Sequence
  Description of Artificial Sequence: Synthetic oligonucleotide
aggccccaucacuucugua

SEQ ID NO: 1057100 - RNA, 19 nt, Artificial Sequence
  Description of Artificial Sequence: Synthetic oligonucleotide
aggacgcuuccagggcccu

SEQ ID NO: 1057101 - RNA, 19 nt, Artificial Sequence
  Description of Artificial Sequence: Synthetic oligonucleotide
cucucggggucuuccgagu

SEQ ID NO: 1057102 - RNA, 19 nt, Artificial Sequence
  Description of Artificial Sequence: Synthetic oligonucleotide
cgguggagcauccguucgc

SEQ ID NO: 1057103 - RNA, 19 nt, Artificial Sequence
  Description of Artificial Sequence: Synthetic oligonucleotide
cccggugaugccucuuuga

SEQ ID NO: 1057104 - RNA, 19 nt, Artificial Sequence
  Description of Artificial Sequence: Synthetic oligonucleotide
gcucacucuuacuggaguu

SEQ ID NO: 1057105 - RNA, 19 nt, Artificial Sequence
  Description of Artificial Sequence: Synthetic oligonucleotide
uggagcucucggggucuuc

SEQ ID NO: 1057106 - RNA, 19 nt, Artificial Sequence
  Description of Artificial Sequence: Synthetic oligonucleotide
ggaugccgguggagcaucc

SEQ ID NO: 1057107 - RNA, 19 nt, Artificial Sequence
  Description of Artificial Sequence: Synthetic oligonucleotide
acgggcccaggguccuuau

SEQ ID NO: 1057108 - RNA, 19 nt, Artificial Sequence
  Description of Artificial Sequence: Synthetic oligonucleotide
cugccgcugcgagacuguc

SEQ ID NO: 1057109 - RNA, 19 nt, Artificial Sequence
  Description of Artificial Sequence: Synthetic oligonucleotide
gcaccggggcuuccuuccc

SEQ ID NO: 1057110 - RNA, 19 nt, Artificial Sequence
  Description of Artificial Sequence: Synthetic oligonucleotide
cgcaugcaccgagaugagg

SEQ ID NO: 1057111 - RNA, 19 nt, Artificial Sequence
  Description of Artificial Sequence: Synthetic oligonucleotide
cucuacccuucaguggagu

SEQ ID NO: 1057112 - RNA, 19 nt, Artificial Sequence
  Description of Artificial Sequence: Synthetic oligonucleotide
cgcccacuuaugcugccac

SEQ ID NO: 1057113 - RNA, 19 nt, Artificial Sequence
  Description of Artificial Sequence: Synthetic oligonucleotide
cauuaaagauuggccucuu

SEQ ID NO: 1057114 - RNA, 19 nt, Artificial Sequence
  Description of Artificial Sequence: Synthetic oligonucleotide
ccccggugaugccucuuug

SEQ ID NO: 1057115 - RNA, 19 nt, Artificial Sequence
  Description of Artificial Sequence: Synthetic oligonucleotide
ccuuuagugacgugaccuu

SEQ ID NO: 1057116 - RNA, 19 nt, Artificial Sequence
  Description of Artificial Sequence: Synthetic oligonucleotide
ccccagguccagucacgug

SEQ ID NO: 1057117 - RNA, 19 nt, Artificial Sequence
  Description of Artificial Sequence: Synthetic oligonucleotide
gcugcgagacuguccuggu

SEQ ID NO: 1057118 - RNA, 19 nt, Artificial Sequence
  Description of Artificial Sequence: Synthetic oligonucleotide
ggggaaccuccuggggaac

SEQ ID NO: 1057119 - RNA, 19 nt, Artificial Sequence
  Description of Artificial Sequence: Synthetic oligonucleotide
guaggggauggaggauccu

SEQ ID NO: 1057120 - RNA, 19 nt, Artificial Sequence
  Description of Artificial Sequence: Synthetic oligonucleotide
gguuucugucugggaaugu

SEQ ID NO: 1057121 - RNA, 19 nt, Artificial Sequence
  Description of Artificial Sequence: Synthetic oligonucleotide
gggcuugcgcauagauaga

SEQ ID NO: 1057122 - RNA, 19 nt, Artificial Sequence
  Description of Artificial Sequence: Synthetic oligonucleotide
gcugcgccggacacuggca

SEQ ID NO: 1057123 - RNA, 19 nt, Artificial Sequence
  Description of Artificial Sequence: Synthetic oligonucleotide
cuggaugccgguggagcau

SEQ ID NO: 1057124 - RNA, 19 nt, Artificial Sequence
  Description of Artificial Sequence: Synthetic oligonucleotide
ccucccuaugguggcccgc

SEQ ID NO: 1057125 - RNA, 19 nt, Artificial Sequence
  Description of Artificial Sequence: Synthetic oligonucleotide
gccacucgagcggggcagc

SEQ ID NO: 1057126 - RNA, 19 nt, Artificial Sequence
  Description of Artificial Sequence: Synthetic oligonucleotide
caguuugagagaggcucuu

SEQ ID NO: 1057127 - RNA, 19 nt, Artificial Sequence
  Description of Artificial Sequence: Synthetic oligonucleotide
ggacgcuuccagggcccug

SEQ ID NO: 1057128 - RNA, 19 nt, Artificial Sequence
  Description of Artificial Sequence: Synthetic oligonucleotide
ccguucgcaugcaccgaga

SEQ ID NO: 1057129 - RNA, 19 nt, Artificial Sequence
  Description of Artificial Sequence: Synthetic oligonucleotide
gcccacuuaugcugccacu

SEQ ID NO: 1057130 - RNA, 19 nt, Artificial Sequence
  Description of Artificial Sequence: Synthetic oligonucleotide
gcgagacuguccuggugau

SEQ ID NO: 1057131 - RNA, 19 nt, Artificial Sequence
  Description of Artificial Sequence: Synthetic oligonucleotide
gggaaccuccuggggaacu

SEQ ID NO: 1057132 - RNA, 19 nt, Artificial Sequence
  Description of Artificial Sequence: Synthetic oligonucleotide
gggugucucccgaggggaa

SEQ ID NO: 1057133 - RNA, 19 nt, Artificial Sequence
  Description of Artificial Sequence: Synthetic oligonucleotide
cacgggcccaggguccuua

SEQ ID NO: 1057134 - RNA, 19 nt, Artificial Sequence
  Description of Artificial Sequence: Synthetic oligonucleotide
cccuggccgcccacuuaug

SEQ ID NO: 1057135 - RNA, 19 nt, Artificial Sequence
  Description of Artificial Sequence: Synthetic oligonucleotide
ccgcccugaauccuucagu

SEQ ID NO: 1057136 - RNA, 19 nt, Artificial Sequence
  Description of Artificial Sequence: Synthetic oligonucleotide
gcccgcccugaauccuuca

SEQ ID NO: 1057137 - RNA, 19 nt, Artificial Sequence
  Description of Artificial Sequence: Synthetic oligonucleotide
ccgcugcgagacuguccug

SEQ ID NO: 1057138 - RNA, 19 nt, Artificial Sequence
  Description of Artificial Sequence: Synthetic oligonucleotide
cuuccgaguuggggcugcu

SEQ ID NO: 1057139 - RNA, 19 nt, Artificial Sequence
  Description of Artificial Sequence: Synthetic oligonucleotide
cguucgcaugcaccgagau

SEQ ID NO: 1057140 - RNA, 19 nt, Artificial Sequence
  Description of Artificial Sequence: Synthetic oligonucleotide
gcugccgcugcgagacugu

SEQ ID NO: 1057141 - RNA, 19 nt, Artificial Sequence
  Description of Artificial Sequence: Synthetic oligonucleotide
ccgcacagagcuccuucgu

SEQ ID NO: 1057142 - RNA, 19 nt, Artificial Sequence
  Description of Artificial Sequence: Synthetic oligonucleotide
ccagaagauucaggacacu

SEQ ID NO: 1057143 - RNA, 19 nt, Artificial Sequence
  Description of Artificial Sequence: Synthetic oligonucleotide
cagagccagccucguuauu

SEQ ID NO: 1057144 - RNA, 19 nt, Artificial Sequence
  Description of Artificial Sequence: Synthetic oligonucleotide
ccgcccacuuaugcugcca

SEQ ID NO: 1057145 - RNA, 19 nt, Artificial Sequence
  Description of Artificial Sequence: Synthetic oligonucleotide
ccgaggggaagcccuggau

SEQ ID NO: 1057146 - RNA, 19 nt, Artificial Sequence
  Description of Artificial Sequence: Synthetic oligonucleotide
ccgggaguuugaggaaccu

SEQ ID NO: 1057147 - RNA, 19 nt, Artificial Sequence
  Description of Artificial Sequence: Synthetic oligonucleotide
ccgagaugaggaggccacu

SEQ ID NO: 1057148 - RNA, 19 nt, Artificial Sequence
  Description of Artificial Sequence: Synthetic oligonucleotide
gggccaccuuugacccuaa

SEQ ID NO: 1057149 - RNA, 19 nt, Artificial Sequence
  Description of Artificial Sequence: Synthetic oligonucleotide
cgggaguuugaggaaccuu

SEQ ID NO: 1057150 - RNA, 19 nt, Artificial Sequence
  Description of Artificial Sequence: Synthetic oligonucleotide
cagucacguggggccucuu

SEQ ID NO: 1057151 - RNA, 19 nt, Artificial Sequence
  Description of Artificial Sequence: Synthetic oligonucleotide
ugugaaaucccucaggaug

SEQ ID NO: 1057152 - RNA, 19 nt, Artificial Sequence
  Description of Artificial Sequence: Synthetic oligonucleotide
aauuuaauugucuccguug

SEQ ID NO: 1057153 - RNA, 19 nt, Artificial Sequence
  Description of Artificial Sequence: Synthetic oligonucleotide
uucauugauccucuguggg

SEQ ID NO: 1057154 - RNA, 19 nt, Artificial Sequence
  Description of Artificial Sequence: Synthetic oligonucleotide
aauaauguccucguccguc

SEQ ID NO: 1057155 - RNA, 19 nt, Artificial Sequence
  Description of Artificial Sequence: Synthetic oligonucleotide
agugcgacaccccaguccc

SEQ ID NO: 1057156 - RNA, 19 nt, Artificial Sequence
  Description of Artificial Sequence: Synthetic oligonucleotide
ucuaguugcaccccaaaga

SEQ ID NO: 1057157 - RNA, 19 nt, Artificial Sequence
  Description of Artificial Sequence: Synthetic oligonucleotide
acaacaacgggcauggggc

SEQ ID NO: 1057158 - RNA, 19 nt, Artificial Sequence
  Description of Artificial Sequence: Synthetic oligonucleotide
uccguugucuacuuguagg

SEQ ID NO: 1057159 - RNA, 19 nt, Artificial Sequence
  Description of Artificial Sequence: Synthetic oligonucleotide
gacaacaacgggcaugggg

SEQ ID NO: 1057160 - RNA, 19 nt, Artificial Sequence
  Description of Artificial Sequence: Synthetic oligonucleotide
auucacgccccuuacaauc

SEQ ID NO: 1057161 - RNA, 19 nt, Artificial Sequence
  Description of Artificial Sequence: Synthetic oligonucleotide
ugcgaauccagucugcggc

SEQ ID NO: 1057162 - RNA, 19 nt, Artificial Sequence
  Description of Artificial Sequence: Synthetic oligonucleotide
aauugucuccguugucuac

SEQ ID NO: 1057163 - RNA, 19 nt, Artificial Sequence
  Description of Artificial Sequence: Synthetic oligonucleotide
aaaggauguccccguuucc

SEQ ID NO: 1057164 - RNA, 19 nt, Artificial Sequence
  Description of Artificial Sequence: Synthetic oligonucleotide
ugagcgauucaugagugcg

SEQ ID NO: 1057165 - RNA, 19 nt, Artificial Sequence
  Description of Artificial Sequence: Synthetic oligonucleotide
uccucaaacgaaaggaugu

SEQ ID NO: 1057166 - RNA, 19 nt, Artificial Sequence
  Description of Artificial Sequence: Synthetic oligonucleotide
agcagguucgugcacacgg

SEQ ID NO: 1057167 - RNA, 19 nt, Artificial Sequence
  Description of Artificial Sequence: Synthetic oligonucleotide
auuuaauugucuccguugu

SEQ ID NO: 1057168 - RNA, 19 nt, Artificial Sequence
  Description of Artificial Sequence: Synthetic oligonucleotide
aagguauagcuuuccacug

SEQ ID NO: 1057169 - RNA, 19 nt, Artificial Sequence
  Description of Artificial Sequence: Synthetic oligonucleotide
ugguuuugucuccagguag

SEQ ID NO: 1057170 - RNA, 19 nt, Artificial Sequence
  Description of Artificial Sequence: Synthetic oligonucleotide
agaaggaagcgccgggucc

SEQ ID NO: 1057171 - RNA, 19 nt, Artificial Sequence
  Description of Artificial Sequence: Synthetic oligonucleotide
aacgcgacaggucacgcug

SEQ ID NO: 1057172 - RNA, 19 nt, Artificial Sequence
  Description of Artificial Sequence: Synthetic oligonucleotide
uagacaaggucgauggggc

SEQ ID NO: 1057173 - RNA, 19 nt, Artificial Sequence
  Description of Artificial Sequence: Synthetic oligonucleotide
aaauuuaauugucuccguu

SEQ ID NO: 1057174 - RNA, 19 nt, Artificial Sequence
  Description of Artificial Sequence: Synthetic oligonucleotide
accacgggcgaucaugacc

SEQ ID NO: 1057175 - RNA, 19 nt, Artificial Sequence
  Description of Artificial Sequence: Synthetic oligonucleotide
aaggguagguucccgcacg

SEQ ID NO: 1057176 - RNA, 19 nt, Artificial Sequence
  Description of Artificial Sequence: Synthetic oligonucleotide
ucauucacgccccuuacaa

SEQ ID NO: 1057177 - RNA, 19 nt, Artificial Sequence
  Description of Artificial Sequence: Synthetic oligonucleotide
guggucucggccuagguag

SEQ ID NO: 1057178 - RNA, 19 nt, Artificial Sequence
  Description of Artificial Sequence: Synthetic oligonucleotide
acugaugcgaauccagucu

SEQ ID NO: 1057179 - RNA, 19 nt, Artificial Sequence
  Description of Artificial Sequence: Synthetic oligonucleotide
gccauugcgcacuagaggg

SEQ ID NO: 1057180 - RNA, 19 nt, Artificial Sequence
  Description of Artificial Sequence: Synthetic oligonucleotide
cacaucaugaaggaaucgg

SEQ ID NO: 1057181 - RNA, 19 nt, Artificial Sequence
  Description of Artificial Sequence: Synthetic oligonucleotide
cacugcucgauguagggcc

SEQ ID NO: 1057182 - RNA, 19 nt, Artificial Sequence
  Description of Artificial Sequence: Synthetic oligonucleotide
ucacgcuguaaggacaucg

SEQ ID NO: 1057183 - RNA, 19 nt, Artificial Sequence
  Description of Artificial Sequence: Synthetic oligonucleotide
uuuccgaacaggggcaugg

SEQ ID NO: 1057184 - RNA, 19 nt, Artificial Sequence
  Description of Artificial Sequence: Synthetic oligonucleotide
gacgagaugucccaguguc

SEQ ID NO: 1057185 - RNA, 19 nt, Artificial Sequence
  Description of Artificial Sequence: Synthetic oligonucleotide
cacucgagaaggaagcgcc

SEQ ID NO: 1057186 - RNA, 19 nt, Artificial Sequence
  Description of Artificial Sequence: Synthetic oligonucleotide
aacgaaaggauguccccgu

SEQ ID NO: 1057187 - RNA, 19 nt, Artificial Sequence
  Description of Artificial Sequence: Synthetic oligonucleotide
gucaaggggccacaggugg

SEQ ID NO: 1057188 - RNA, 19 nt, Artificial Sequence
  Description of Artificial Sequence: Synthetic oligonucleotide
agcgcauuuggucauggug

SEQ ID NO: 1057189 - RNA, 19 nt, Artificial Sequence
  Description of Artificial Sequence: Synthetic oligonucleotide
uagccgaauaauguccucg

SEQ ID NO: 1057190 - RNA, 19 nt, Artificial Sequence
  Description of Artificial Sequence: Synthetic oligonucleotide
cuuuugucuggccacgggc

SEQ ID NO: 1057191 - RNA, 19 nt, Artificial Sequence
  Description of Artificial Sequence: Synthetic oligonucleotide
acugcgaugguuucacaug

SEQ ID NO: 1057192 - RNA, 19 nt, Artificial Sequence
  Description of Artificial Sequence: Synthetic oligonucleotide
ugcgacaccugucugcaug

SEQ ID NO: 1057193 - RNA, 19 nt, Artificial Sequence
  Description of Artificial Sequence: Synthetic oligonucleotide
auaccugcaaagaaaggag

SEQ ID NO: 1057194 - RNA, 19 nt, Artificial Sequence
  Description of Artificial Sequence: Synthetic oligonucleotide
caugaaggaaucggcaccg

SEQ ID NO: 1057195 - RNA, 19 nt, Artificial Sequence
  Description of Artificial Sequence: Synthetic oligonucleotide
ucauugauccucuguggga

SEQ ID NO: 1057196 - RNA, 19 nt, Artificial Sequence
  Description of Artificial Sequence: Synthetic oligonucleotide
uuggcgcuuacgcagcugc

SEQ ID NO: 1057197 - RNA, 19 nt, Artificial Sequence
  Description of Artificial Sequence: Synthetic oligonucleotide
uaaccguggcuacaguggc

SEQ ID NO: 1057198 - RNA, 19 nt, Artificial Sequence
  Description of Artificial Sequence: Synthetic oligonucleotide
acgcuguaaggacaucggc

SEQ ID NO: 1057199 - RNA, 19 nt, Artificial Sequence
  Description of Artificial Sequence: Synthetic oligonucleotide
gaugcgaauccagucugcg

SEQ ID NO: 1057200 - RNA, 19 nt, Artificial Sequence
  Description of Artificial Sequence: Synthetic oligonucleotide
cauaccugcaaagaaagga

SEQ ID NO: 1057201 - RNA, 19 nt, Artificial Sequence
  Description of Artificial Sequence: Synthetic oligonucleotide
ucgagaaggaagcgccggg

SEQ ID NO: 1057202 - RNA, 19 nt, Artificial Sequence
  Description of Artificial Sequence: Synthetic oligonucleotide
acggccauggagugugacc

SEQ ID NO: 1057203 - RNA, 19 nt, Artificial Sequence
  Description of Artificial Sequence: Synthetic oligonucleotide
agcucagcgcauuugguca

SEQ ID NO: 1057204 - RNA, 19 nt, Artificial Sequence
  Description of Artificial Sequence: Synthetic oligonucleotide
cacccugcgugucagagcc

SEQ ID NO: 1057205 - RNA, 19 nt, Artificial Sequence
  Description of Artificial Sequence: Synthetic oligonucleotide
gguagguucccgcacgugg

SEQ ID NO: 1057206 - RNA, 19 nt, Artificial Sequence
  Description of Artificial Sequence: Synthetic oligonucleotide
ucacauccgcaccgaagcg

SEQ ID NO: 1057207 - RNA, 19 nt, Artificial Sequence
  Description of Artificial Sequence: Synthetic oligonucleotide
gccccuuacaaucugcugg

SEQ ID NO: 1057208 - RNA, 19 nt, Artificial Sequence
  Description of Artificial Sequence: Synthetic oligonucleotide
ucucggccuagguaguagg

SEQ ID NO: 1057209 - RNA, 19 nt, Artificial Sequence
  Description of Artificial Sequence: Synthetic oligonucleotide
auaauguccucguccguca

SEQ ID NO: 1057210 - RNA, 19 nt, Artificial Sequence
  Description of Artificial Sequence: Synthetic oligonucleotide
aaaugcacacguggcugac

SEQ ID NO: 1057211 - RNA, 19 nt, Artificial Sequence
  Description of Artificial Sequence: Synthetic oligonucleotide
uggaacuuggcugagcgau

SEQ ID NO: 1057212 - RNA, 19 nt, Artificial Sequence
  Description of Artificial Sequence: Synthetic oligonucleotide
gaaggaagcgccggguccg

SEQ ID NO: 1057213 - RNA, 19 nt, Artificial Sequence
  Description of Artificial Sequence: Synthetic oligonucleotide
gaugcggcgaaaggguagg

SEQ ID NO: 1057214 - RNA, 19 nt, Artificial Sequence
  Description of Artificial Sequence: Synthetic oligonucleotide
cucaaacgaaaggaugucc

SEQ ID NO: 1057215 - RNA, 19 nt, Artificial Sequence
  Description of Artificial Sequence: Synthetic oligonucleotide
cucuaguugcaccccaaag

SEQ ID NO: 1057216 - RNA, 19 nt, Artificial Sequence
  Description of Artificial Sequence: Synthetic oligonucleotide
caagguauagcuuuccacu

SEQ ID NO: 1057217 - RNA, 19 nt, Artificial Sequence
  Description of Artificial Sequence: Synthetic oligonucleotide
ugaccagugcgacacccca

SEQ ID NO: 1057218 - RNA, 19 nt, Artificial Sequence
  Description of Artificial Sequence: Synthetic oligonucleotide
aguaggguggucuuucauu

SEQ ID NO: 1057219 - RNA, 19 nt, Artificial Sequence
  Description of Artificial Sequence: Synthetic oligonucleotide
auguccucguccgucaagg

SEQ ID NO: 1057220 - RNA, 19 nt, Artificial Sequence
  Description of Artificial Sequence: Synthetic oligonucleotide
gacaaggucgauggggcag

SEQ ID NO: 1057221 - RNA, 19 nt, Artificial Sequence
  Description of Artificial Sequence: Synthetic oligonucleotide
acaaggucgauggggcagc

SEQ ID NO: 1057222 - RNA, 19 nt, Artificial Sequence
  Description of Artificial Sequence: Synthetic oligonucleotide
cauacugcgaugguuucac

SEQ ID NO: 1057223 - RNA, 19 nt, Artificial Sequence
  Description of Artificial Sequence: Synthetic oligonucleotide
ugaacacccgugcgcaucu

SEQ ID NO: 1057224 - RNA, 19 nt, Artificial Sequence
  Description of Artificial Sequence: Synthetic oligonucleotide
gauguccucgcaggggugg

SEQ ID NO: 1057225 - RNA, 19 nt, Artificial Sequence
  Description of Artificial Sequence: Synthetic oligonucleotide
ucugggguaaccguggcua

SEQ ID NO: 1057226 - RNA, 19 nt, Artificial Sequence
  Description of Artificial Sequence: Synthetic oligonucleotide
augcgaauccagucugcgg

SEQ ID NO: 1057227 - RNA, 19 nt, Artificial Sequence
  Description of Artificial Sequence: Synthetic oligonucleotide
uuccacugauguccagccg

SEQ ID NO: 1057228 - RNA, 19 nt, Artificial Sequence
  Description of Artificial Sequence: Synthetic oligonucleotide
uacugcgaugguuucacau

SEQ ID NO: 1057229 - RNA, 19 nt, Artificial Sequence
  Description of Artificial Sequence: Synthetic oligonucleotide
ugaugcgaauccagucugc

SEQ ID NO: 1057230 - RNA, 19 nt, Artificial Sequence
  Description of Artificial Sequence: Synthetic oligonucleotide
aaacgcgacaggucacgcu

SEQ ID NO: 1057231 - RNA, 19 nt, Artificial Sequence
  Description of Artificial Sequence: Synthetic oligonucleotide
cugaugcgaauccagucug

SEQ ID NO: 1057232 - RNA, 19 nt, Artificial Sequence
  Description of Artificial Sequence: Synthetic oligonucleotide
uucacgccccuuacaaucu

SEQ ID NO: 1057233 - RNA, 19 nt, Artificial Sequence
  Description of Artificial Sequence: Synthetic oligonucleotide
aggacgagaugucccagug

SEQ ID NO: 1057234 - RNA, 19 nt, Artificial Sequence
  Description of Artificial Sequence: Synthetic oligonucleotide
cugcaccagguucugaccc

SEQ ID NO: 1057235 - RNA, 19 nt, Artificial Sequence
  Description of Artificial Sequence: Synthetic oligonucleotide
caugaggccggcuuuuguc

SEQ ID NO: 1057236 - RNA, 19 nt, Artificial Sequence
  Description of Artificial Sequence: Synthetic oligonucleotide
aguuggcauccucaaacga

SEQ ID NO: 1057237 - RNA, 19 nt, Artificial Sequence
  Description of Artificial Sequence: Synthetic oligonucleotide
gcuugagcaaggcaccacg

SEQ ID NO: 1057238 - RNA, 19 nt, Artificial Sequence
  Description of Artificial Sequence: Synthetic oligonucleotide
ggcauccucaaacgaaagg

SEQ ID NO: 1057239 - RNA, 19 nt, Artificial Sequence
  Description of Artificial Sequence: Synthetic oligonucleotide
acacguggcugacuccugg

SEQ ID NO: 1057240 - RNA, 19 nt, Artificial Sequence
  Description of Artificial Sequence: Synthetic oligonucleotide
uaauugucuccguugucua

SEQ ID NO: 1057241 - RNA, 19 nt, Artificial Sequence
  Description of Artificial Sequence: Synthetic oligonucleotide
gugucaaacagcacacagc

SEQ ID NO: 1057242 - RNA, 19 nt, Artificial Sequence
  Description of Artificial Sequence: Synthetic oligonucleotide
gggacaacaacgggcaugg

SEQ ID NO: 1057243 - RNA, 19 nt, Artificial Sequence
  Description of Artificial Sequence: Synthetic oligonucleotide
augaggccggcuuuugucu

SEQ ID NO: 1057244 - RNA, 19 nt, Artificial Sequence
  Description of Artificial Sequence: Synthetic oligonucleotide
agggcuugagcaaggcacc

SEQ ID NO: 1057245 - RNA, 19 nt, Artificial Sequence
  Description of Artificial Sequence: Synthetic oligonucleotide
aaggcccacucagacaucu

SEQ ID NO: 1057246 - RNA, 19 nt, Artificial Sequence
  Description of Artificial Sequence: Synthetic oligonucleotide
gagcucagcgcauuugguc

SEQ ID NO: 1057247 - RNA, 19 nt, Artificial Sequence
  Description of Artificial Sequence: Synthetic oligonucleotide
cuuacgcagcugcugcugc

SEQ ID NO: 1057248 - RNA, 19 nt, Artificial Sequence
  Description of Artificial Sequence: Synthetic oligonucleotide
augagugcgcagccgccac

SEQ ID NO: 1057249 - RNA, 19 nt, Artificial Sequence
  Description of Artificial Sequence: Synthetic oligonucleotide
cauugcgcacuagagggag

SEQ ID NO: 1057250 - RNA, 19 nt, Artificial Sequence
  Description of Artificial Sequence: Synthetic oligonucleotide
cacugaugcgaauccaguc

SEQ ID NO: 1057251 - RNA, 19 nt, Artificial Sequence
  Description of Artificial Sequence: Synthetic oligonucleotide
agccgaauaauguccucgu

SEQ ID NO: 1057252 - RNA, 19 nt, Artificial Sequence
  Description of Artificial Sequence: Synthetic oligonucleotide
aaccguggcuacaguggcc

SEQ ID NO: 1057253 - RNA, 19 nt, Artificial Sequence
  Description of Artificial Sequence: Synthetic oligonucleotide
caggucacgcuguaaggac

SEQ ID NO: 1057254 - RNA, 19 nt, Artificial Sequence
  Description of Artificial Sequence: Synthetic oligonucleotide
cucggccuagguaguaggg

SEQ ID NO: 1057255 - RNA, 19 nt, Artificial Sequence
  Description of Artificial Sequence: Synthetic oligonucleotide
aacggccauggagugugac

SEQ ID NO: 1057256 - RNA, 19 nt, Artificial Sequence
  Description of Artificial Sequence: Synthetic oligonucleotide
cagugcgacaccccagucc

SEQ ID NO: 1057257 - RNA, 19 nt, Artificial Sequence
  Description of Artificial Sequence: Synthetic oligonucleotide
ccacgggcgaucaugaccc

SEQ ID NO: 1057258 - RNA, 19 nt, Artificial Sequence
  Description of Artificial Sequence: Synthetic oligonucleotide
cuggucugggguaaccgug

SEQ ID NO: 1057259 - RNA, 19 nt, Artificial Sequence
  Description of Artificial Sequence: Synthetic oligonucleotide
ggccauugcgcacuagagg

SEQ ID NO: 1057260 - RNA, 19 nt, Artificial Sequence
  Description of Artificial Sequence: Synthetic oligonucleotide
uguucaggccauugcgcac

SEQ ID NO: 1057261 - RNA, 19 nt, Artificial Sequence
  Description of Artificial Sequence: Synthetic oligonucleotide
gcgaugguuucacaugagg

SEQ ID NO: 1057262 - RNA, 19 nt, Artificial Sequence
  Description of Artificial Sequence: Synthetic oligonucleotide
ucaccgcacgucacauccg

SEQ ID NO: 1057263 - RNA, 19 nt, Artificial Sequence
  Description of Artificial Sequence: Synthetic oligonucleotide
uguaaggacaucggccgaa

SEQ ID NO: 1057264 - RNA, 19 nt, Artificial Sequence
  Description of Artificial Sequence: Synthetic oligonucleotide
ugucccagugucucuguuc

SEQ ID NO: 1057265 - RNA, 19 nt, Artificial Sequence
  Description of Artificial Sequence: Synthetic oligonucleotide
ucauacugcgaugguuuca

SEQ ID NO: 1057266 - RNA, 19 nt, Artificial Sequence
  Description of Artificial Sequence: Synthetic oligonucleotide
cccguuuccgaacaggggc

SEQ ID NO: 1057267 - RNA, 19 nt, Artificial Sequence
  Description of Artificial Sequence: Synthetic oligonucleotide
gagaaggaagcgccggguc

SEQ ID NO: 1057268 - RNA, 19 nt, Artificial Sequence
  Description of Artificial Sequence: Synthetic oligonucleotide
cugugggagucgcucaagc

SEQ ID NO: 1057269 - RNA, 19 nt, Artificial Sequence
  Description of Artificial Sequence: Synthetic oligonucleotide
ggccgaaggugucaaacag

SEQ ID NO: 1057270 - RNA, 19 nt, Artificial Sequence
  Description of Artificial Sequence: Synthetic oligonucleotide
caacaacgggcauggggcc

SEQ ID NO: 1057271 - RNA, 19 nt, Artificial Sequence
  Description of Artificial Sequence: Synthetic oligonucleotide
aggguggucuuucauugau

SEQ ID NO: 1057272 - RNA, 19 nt, Artificial Sequence
  Description of Artificial Sequence: Synthetic oligonucleotide
cacuagagggaguugcaca

SEQ ID NO: 1057273 - RNA, 19 nt, Artificial Sequence
  Description of Artificial Sequence: Synthetic oligonucleotide
ugaggccggcuuuugucug

SEQ ID NO: 1057274 - RNA, 19 nt, Artificial Sequence
  Description of Artificial Sequence: Synthetic oligonucleotide
gcauccucaaacgaaagga

SEQ ID NO: 1057275 - RNA, 19 nt, Artificial Sequence
  Description of Artificial Sequence: Synthetic oligonucleotide
agcgauucaugagugcgca

SEQ ID NO: 1057276 - RNA, 19 nt, Artificial Sequence
  Description of Artificial Sequence: Synthetic oligonucleotide
gguguagcgcuguucccgg

SEQ ID NO: 1057277 - RNA, 19 nt, Artificial Sequence
  Description of Artificial Sequence: Synthetic oligonucleotide
ucggccgaaggugucaaac

SEQ ID NO: 1057278 - RNA, 19 nt, Artificial Sequence
  Description of Artificial Sequence: Synthetic oligonucleotide
ucuccguugucuacuugua

SEQ ID NO: 1057279 - RNA, 19 nt, Artificial Sequence
  Description of Artificial Sequence: Synthetic oligonucleotide
uuccaggccguagugugug

SEQ ID NO: 1057280 - RNA, 19 nt, Artificial Sequence
  Description of Artificial Sequence: Synthetic oligonucleotide
ggcaccggucaccaaaugc

SEQ ID NO: 1057281 - RNA, 19 nt, Artificial Sequence
  Description of Artificial Sequence: Synthetic oligonucleotide
ccgaacaggggcauggggc

SEQ ID NO: 1057282 - RNA, 19 nt, Artificial Sequence
  Description of Artificial Sequence: Synthetic oligonucleotide
accccugcgacaccugucu

SEQ ID NO: 1057283 - RNA, 19 nt, Artificial Sequence
  Description of Artificial Sequence: Synthetic oligonucleotide
cuccguugucuacuuguag

SEQ ID NO: 1057284 - RNA, 19 nt, Artificial Sequence
  Description of Artificial Sequence: Synthetic oligonucleotide
gagcgauucaugagugcgc

SEQ ID NO: 1057285 - RNA, 19 nt, Artificial Sequence
  Description of Artificial Sequence: Synthetic oligonucleotide
gccguagugugugaaaucc

SEQ ID NO: 1057286 - RNA, 19 nt, Artificial Sequence
  Description of Artificial Sequence: Synthetic oligonucleotide
acguggcugacuccuggag

SEQ ID NO: 1057287 - RNA, 19 nt, Artificial Sequence
  Description of Artificial Sequence: Synthetic oligonucleotide
aaggaagcgccggguccgc

SEQ ID NO: 1057288 - RNA, 19 nt, Artificial Sequence
  Description of Artificial Sequence: Synthetic oligonucleotide
agcgccccacaucaugaag

SEQ ID NO: 1057289 - RNA, 19 nt, Artificial Sequence
  Description of Artificial Sequence: Synthetic oligonucleotide
cugcgaugguuucacauga

SEQ ID NO: 1057290 - RNA, 19 nt, Artificial Sequence
  Description of Artificial Sequence: Synthetic oligonucleotide
cacauccgcaccgaagcgc

SEQ ID NO: 1057291 - RNA, 19 nt, Artificial Sequence
  Description of Artificial Sequence: Synthetic oligonucleotide
ccguagccgaauaaugucc

SEQ ID NO: 1057292 - RNA, 19 nt, Artificial Sequence
  Description of Artificial Sequence: Synthetic oligonucleotide
uugucauacugcgaugguu

SEQ ID NO: 1057293 - RNA, 19 nt, Artificial Sequence
  Description of Artificial Sequence: Synthetic oligonucleotide
caaaugcacacguggcuga

SEQ ID NO: 1057294 - RNA, 19 nt, Artificial Sequence
  Description of Artificial Sequence: Synthetic oligonucleotide
uaguaggguggucuuucau

SEQ ID NO: 1057295 - RNA, 19 nt, Artificial Sequence
  Description of Artificial Sequence: Synthetic oligonucleotide
cacuuggcgcuuacgcagc

SEQ ID NO: 1057296 - RNA, 19 nt, Artificial Sequence
  Description of Artificial Sequence: Synthetic oligonucleotide
cacacuuggcgcuuacgca

SEQ ID NO: 1057297 - RNA, 19 nt, Artificial Sequence
  Description of Artificial Sequence: Synthetic oligonucleotide
ugcgacaccccagucccgc

SEQ ID NO: 1057298 - RNA, 19 nt, Artificial Sequence
  Description of Artificial Sequence: Synthetic oligonucleotide
acgggcacauaccugcaaa

SEQ ID NO: 1057299 - RNA, 19 nt, Artificial Sequence
  Description of Artificial Sequence: Synthetic oligonucleotide
caccggucaccaaaugcac

SEQ ID NO: 1057300 - RNA, 19 nt, Artificial Sequence
  Description of Artificial Sequence: Synthetic oligonucleotide
ucacgccccuuacaaucug

SEQ ID NO: 1057301 - RNA, 19 nt, Artificial Sequence
  Description of Artificial Sequence: Synthetic oligonucleotide
gagcaagguauagcuuucc

SEQ ID NO: 1057302 - RNA, 19 nt, Artificial Sequence
  Description of Artificial Sequence: Synthetic oligonucleotide
agaugcggcgaaaggguag

SEQ ID NO: 1057303 - RNA, 19 nt, Artificial Sequence
  Description of Artificial Sequence: Synthetic oligonucleotide
gguagcgccccacaucaug

SEQ ID NO: 1057304 - RNA, 19 nt, Artificial Sequence
  Description of Artificial Sequence: Synthetic oligonucleotide
auguccccguuuccgaaca

SEQ ID NO: 1057305 - RNA, 19 nt, Artificial Sequence
  Description of Artificial Sequence: Synthetic oligonucleotide
caccgcacgucacauccgc

SEQ ID NO: 1057306 - RNA, 19 nt, Artificial Sequence
  Description of Artificial Sequence: Synthetic oligonucleotide
ugagugcgcagccgccacc

SEQ ID NO: 1057307 - RNA, 19 nt, Artificial Sequence
  Description of Artificial Sequence: Synthetic oligonucleotide
guaaggacaucggccgaag

SEQ ID NO: 1057308 - RNA, 19 nt, Artificial Sequence
  Description of Artificial Sequence: Synthetic oligonucleotide
ugucuccguugucuacuug

SEQ ID NO: 1057309 - RNA, 19 nt, Artificial Sequence
  Description of Artificial Sequence: Synthetic oligonucleotide
ggucaggcggcgcagggcc

SEQ ID NO: 1057310 - RNA, 19 nt, Artificial Sequence
  Description of Artificial Sequence: Synthetic oligonucleotide
acgggcauggggcccuggg

SEQ ID NO: 1057311 - RNA, 19 nt, Artificial Sequence
  Description of Artificial Sequence: Synthetic oligonucleotide
gaaucggcaccggucacca

SEQ ID NO: 1057312 - RNA, 19 nt, Artificial Sequence
  Description of Artificial Sequence: Synthetic oligonucleotide
agcgagcuaccaccucuuc

SEQ ID NO: 1057313 - RNA, 19 nt, Artificial Sequence
  Description of Artificial Sequence: Synthetic oligonucleotide
cacgccccuuacaaucugc

SEQ ID NO: 1057314 - RNA, 19 nt, Artificial Sequence
  Description of Artificial Sequence: Synthetic oligonucleotide
ggcacauaccugcaaagaa

SEQ ID NO: 1057315 - RNA, 19 nt, Artificial Sequence
  Description of Artificial Sequence: Synthetic oligonucleotide
acaugaggccggcuuuugu

SEQ ID NO: 1057316 - RNA, 19 nt, Artificial Sequence
  Description of Artificial Sequence: Synthetic oligonucleotide
uucgugcacacggccaucu

SEQ ID NO: 1057317 - RNA, 19 nt, Artificial Sequence
  Description of Artificial Sequence: Synthetic oligonucleotide
gagcggagcaagguauagc

SEQ ID NO: 1057318 - RNA, 19 nt, Artificial Sequence
  Description of Artificial Sequence: Synthetic oligonucleotide
gcacgucacauccgcaccg

SEQ ID NO: 1057319 - RNA, 19 nt, Artificial Sequence
  Description of Artificial Sequence: Synthetic oligonucleotide
ucggccuagguaguagggu

SEQ ID NO: 1057320 - RNA, 19 nt, Artificial Sequence
  Description of Artificial Sequence: Synthetic oligonucleotide
gucuccguugucuacuugu

SEQ ID NO: 1057321 - RNA, 19 nt, Artificial Sequence
  Description of Artificial Sequence: Synthetic oligonucleotide
gcuuuugucuggccacggg

SEQ ID NO: 1057322 - RNA, 19 nt, Artificial Sequence
  Description of Artificial Sequence: Synthetic oligonucleotide
uccgcaccgaagcgcuugc

SEQ ID NO: 1057323 - RNA, 19 nt, Artificial Sequence
  Description of Artificial Sequence: Synthetic oligonucleotide
gccgccacccuucuuguag

SEQ ID NO: 1057324 - RNA, 19 nt, Artificial Sequence
  Description of Artificial Sequence: Synthetic oligonucleotide
uguccccguuuccgaacag

SEQ ID NO: 1057325 - RNA, 19 nt, Artificial Sequence
  Description of Artificial Sequence: Synthetic oligonucleotide
ucggcaccggucaccaaau

SEQ ID NO: 1057326 - RNA, 19 nt, Artificial Sequence
  Description of Artificial Sequence: Synthetic oligonucleotide
ccggucaccaaaugcacac

SEQ ID NO: 1057327 - RNA, 19 nt, Artificial Sequence
  Description of Artificial Sequence: Synthetic oligonucleotide
cuagguaguaggguggucu

SEQ ID NO: 1057328 - RNA, 19 nt, Artificial Sequence
  Description of Artificial Sequence: Synthetic oligonucleotide
gcggcgaaaggguagguuc

SEQ ID NO: 1057329 - RNA, 19 nt, Artificial Sequence
  Description of Artificial Sequence: Synthetic oligonucleotide
acauccgcaccgaagcgcu

SEQ ID NO: 1057330 - RNA, 19 nt, Artificial Sequence
  Description of Artificial Sequence: Synthetic oligonucleotide
gcaaacgcgacaggucacg

SEQ ID NO: 1057331 - RNA, 19 nt, Artificial Sequence
  Description of Artificial Sequence: Synthetic oligonucleotide
ggccaugagcgucuccagg

SEQ ID NO: 1057332 - RNA, 19 nt, Artificial Sequence
  Description of Artificial Sequence: Synthetic oligonucleotide
guccccguuuccgaacagg

SEQ ID NO: 1057333 - RNA, 19 nt, Artificial Sequence
  Description of Artificial Sequence: Synthetic oligonucleotide
ucaggagcucagcgcauuu

SEQ ID NO: 1057334 - RNA, 19 nt, Artificial Sequence
  Description of Artificial Sequence: Synthetic oligonucleotide
caaacgcgacaggucacgc

SEQ ID NO: 1057335 - RNA, 19 nt, Artificial Sequence
  Description of Artificial Sequence: Synthetic oligonucleotide
guauagcuuuccacugaug

SEQ ID NO: 1057336 - RNA, 19 nt, Artificial Sequence
  Description of Artificial Sequence: Synthetic oligonucleotide
gcgccccacaucaugaagg

SEQ ID NO: 1057337 - RNA, 19 nt, Artificial Sequence
  Description of Artificial Sequence: Synthetic oligonucleotide
ugcgugucagagccccagu

SEQ ID NO: 1057338 - RNA, 19 nt, Artificial Sequence
  Description of Artificial Sequence: Synthetic oligonucleotide
guaguaggguggucuuuca

SEQ ID NO: 1057339 - RNA, 19 nt, Artificial Sequence
  Description of Artificial Sequence: Synthetic oligonucleotide
guagcgccccacaucauga

SEQ ID NO: 1057340 - RNA, 19 nt, Artificial Sequence
  Description of Artificial Sequence: Synthetic oligonucleotide
acccgugcgcaucuucaca

SEQ ID NO: 1057341 - RNA, 19 nt, Artificial Sequence
  Description of Artificial Sequence: Synthetic oligonucleotide
guagccgaauaauguccuc

SEQ ID NO: 1057342 - RNA, 19 nt, Artificial Sequence
  Description of Artificial Sequence: Synthetic oligonucleotide
ucccgcacguggugagcgg

SEQ ID NO: 1057343 - RNA, 19 nt, Artificial Sequence
  Description of Artificial Sequence: Synthetic oligonucleotide
gagugugaccagugcgaca

SEQ ID NO: 1057344 - RNA, 19 nt, Artificial Sequence
  Description of Artificial Sequence: Synthetic oligonucleotide
aggguagguucccgcacgu

SEQ ID NO: 1057345 - RNA, 19 nt, Artificial Sequence
  Description of Artificial Sequence: Synthetic oligonucleotide
gccguagccgaauaauguc

SEQ ID NO: 1057346 - RNA, 19 nt, Artificial Sequence
  Description of Artificial Sequence: Synthetic oligonucleotide
uugcgcacuagagggaguu

SEQ ID NO: 1057347 - RNA, 19 nt, Artificial Sequence
  Description of Artificial Sequence: Synthetic oligonucleotide
cugaacacccgugcgcauc

SEQ ID NO: 1057348 - RNA, 19 nt, Artificial Sequence
  Description of Artificial Sequence: Synthetic oligonucleotide
uggucucggccuagguagu

SEQ ID NO: 1057349 - RNA, 19 nt, Artificial Sequence
  Description of Artificial Sequence: Synthetic oligonucleotide
ugggguaaccguggcuaca

SEQ ID NO: 1057350 - RNA, 19 nt, Artificial Sequence
  Description of Artificial Sequence: Synthetic oligonucleotide
agucgcucaagcaggccca

SEQ ID NO: 1057351 - RNA, 19 nt, Artificial Sequence
  Description of Artificial Sequence: Synthetic oligonucleotide
aggccguagugugugaaau

SEQ ID NO: 1057352 - RNA, 19 nt, Artificial Sequence
  Description of Artificial Sequence: Synthetic oligonucleotide
aggucacgcuguaaggaca

SEQ ID NO: 1057353 - RNA, 19 nt, Artificial Sequence
  Description of Artificial Sequence: Synthetic oligonucleotide
agggccguagccgaauaau

SEQ ID NO: 1057354 - RNA, 19 nt, Artificial Sequence
  Description of Artificial Sequence: Synthetic oligonucleotide
cgauucaugagugcgcagc

SEQ ID NO: 1057355 - RNA, 19 nt, Artificial Sequence
  Description of Artificial Sequence: Synthetic oligonucleotide
auccgcaccgaagcgcuug

SEQ ID NO: 1057356 - RNA, 19 nt, Artificial Sequence
  Description of Artificial Sequence: Synthetic oligonucleotide
cugccacucggggugcugg

SEQ ID NO: 1057357 - RNA, 19 nt, Artificial Sequence
  Description of Artificial Sequence: Synthetic oligonucleotide
cccgugcgcaucuucacag

SEQ ID NO: 1057358 - RNA, 19 nt, Artificial Sequence
  Description of Artificial Sequence: Synthetic oligonucleotide
ggaaggcgcccucuaguug

SEQ ID NO: 1057359 - RNA, 19 nt, Artificial Sequence
  Description of Artificial Sequence: Synthetic oligonucleotide
cauccucaaacgaaaggau

SEQ ID NO: 1057360 - RNA, 19 nt, Artificial Sequence
  Description of Artificial Sequence: Synthetic oligonucleotide
auguagggccagucagcca

SEQ ID NO: 1057361 - RNA, 19 nt, Artificial Sequence
  Description of Artificial Sequence: Synthetic oligonucleotide
augagcgucuccagguggu

SEQ ID NO: 1057362 - RNA, 19 nt, Artificial Sequence
  Description of Artificial Sequence: Synthetic oligonucleotide
gcaccggucaccaaaugca

SEQ ID NO: 1057363 - RNA, 19 nt, Artificial Sequence
  Description of Artificial Sequence: Synthetic oligonucleotide
acuuggcgcuuacgcagcu

SEQ ID NO: 1057364 - RNA, 19 nt, Artificial Sequence
  Description of Artificial Sequence: Synthetic oligonucleotide
auacugcgaugguuucaca

SEQ ID NO: 1057365 - RNA, 19 nt, Artificial Sequence
  Description of Artificial Sequence: Synthetic oligonucleotide
ucguccgucaaggggccac

SEQ ID NO: 1057366 - RNA, 19 nt, Artificial Sequence
  Description of Artificial Sequence: Synthetic oligonucleotide
gguucccgcacguggugag

SEQ ID NO: 1057367 - RNA, 19 nt, Artificial Sequence
  Description of Artificial Sequence: Synthetic oligonucleotide
ggcugagcgauucaugagu

SEQ ID NO: 1057368 - RNA, 19 nt, Artificial Sequence
  Description of Artificial Sequence: Synthetic oligonucleotide
ucucaccgcacgucacauc

SEQ ID NO: 1057369 - RNA, 19 nt, Artificial Sequence
  Description of Artificial Sequence: Synthetic oligonucleotide
acaucggccgaagguguca

SEQ ID NO: 1057370 - RNA, 19 nt, Artificial Sequence
  Description of Artificial Sequence: Synthetic oligonucleotide
gcacauaccugcaaagaaa

SEQ ID NO: 1057371 - RNA, 19 nt, Artificial Sequence
  Description of Artificial Sequence: Synthetic oligonucleotide
uguucuggucugggguaac

SEQ ID NO: 1057372 - RNA, 19 nt, Artificial Sequence
  Description of Artificial Sequence: Synthetic oligonucleotide
gugaccagugcgacacccc

SEQ ID NO: 1057373 - RNA, 19 nt, Artificial Sequence
  Description of Artificial Sequence: Synthetic oligonucleotide
agguucgugcacacggcca

SEQ ID NO: 1057374 - RNA, 19 nt, Artificial Sequence
  Description of Artificial Sequence: Synthetic oligonucleotide
gcgaauccagucugcggcc

SEQ ID NO: 1057375 - RNA, 19 nt, Artificial Sequence
  Description of Artificial Sequence: Synthetic oligonucleotide
cgaaaggguagguucccgc

SEQ ID NO: 1057376 - RNA, 19 nt, Artificial Sequence
  Description of Artificial Sequence: Synthetic oligonucleotide
cacccgugcgcaucuucac

SEQ ID NO: 1057377 - RNA, 19 nt, Artificial Sequence
  Description of Artificial Sequence: Synthetic oligonucleotide
ugcgcacuagagggaguug

SEQ ID NO: 1057378 - RNA, 19 nt, Artificial Sequence
  Description of Artificial Sequence: Synthetic oligonucleotide
ggcaccuguuguugcucgg

SEQ ID NO: 1057379 - RNA, 19 nt, Artificial Sequence
  Description of Artificial Sequence: Synthetic oligonucleotide
gcuaccuuggcgcacugcu

SEQ ID NO: 1057380 - RNA, 19 nt, Artificial Sequence
  Description of Artificial Sequence: Synthetic oligonucleotide
ucgcucaagcaggcccacg

SEQ ID NO: 1057381 - RNA, 19 nt, Artificial Sequence
  Description of Artificial Sequence: Synthetic oligonucleotide
gcgcccucuaguugcaccc

SEQ ID NO: 1057382 - RNA, 19 nt, Artificial Sequence
  Description of Artificial Sequence: Synthetic oligonucleotide
aucucaccgcacgucacau

SEQ ID NO: 1057383 - RNA, 19 nt, Artificial Sequence
  Description of Artificial Sequence: Synthetic oligonucleotide
gccaucucaccgcacguca

SEQ ID NO: 1057384 - RNA, 19 nt, Artificial Sequence
  Description of Artificial Sequence: Synthetic oligonucleotide
gcgcacuagagggaguugc

SEQ ID NO: 1057385 - RNA, 19 nt, Artificial Sequence
  Description of Artificial Sequence: Synthetic oligonucleotide
ggcgcacugcucgauguag

SEQ ID NO: 1057386 - RNA, 19 nt, Artificial Sequence
  Description of Artificial Sequence: Synthetic oligonucleotide
cgcucaagcaggcccacgg

SEQ ID NO: 1057387 - RNA, 19 nt, Artificial Sequence
  Description of Artificial Sequence: Synthetic oligonucleotide
gugcgcaucuucacaguca

SEQ ID NO: 1057388 - RNA, 19 nt, Artificial Sequence
  Description of Artificial Sequence: Synthetic oligonucleotide
ucacagggccguagccgaa

SEQ ID NO: 1057389 - RNA, 19 nt, Artificial Sequence
  Description of Artificial Sequence: Synthetic oligonucleotide
caggagcucagcgcauuug

SEQ ID NO: 1057390 - RNA, 19 nt, Artificial Sequence
  Description of Artificial Sequence: Synthetic oligonucleotide
gagaugucccagugucucu

SEQ ID NO: 1057391 - RNA, 19 nt, Artificial Sequence
  Description of Artificial Sequence: Synthetic oligonucleotide
cacacguggcugacuccug

SEQ ID NO: 1057392 - RNA, 19 nt, Artificial Sequence
  Description of Artificial Sequence: Synthetic oligonucleotide
ggcgcccucuaguugcacc

SEQ ID NO: 1057393 - RNA, 19 nt, Artificial Sequence
  Description of Artificial Sequence: Synthetic oligonucleotide
ccggcuuuugucuggccac

SEQ ID NO: 1057394 - RNA, 19 nt, Artificial Sequence
  Description of Artificial Sequence: Synthetic oligonucleotide
uccaggccguaguguguga

SEQ ID NO: 1057395 - RNA, 19 nt, Artificial Sequence
  Description of Artificial Sequence: Synthetic oligonucleotide
ggagugugaccagugcgac

SEQ ID NO: 1057396 - RNA, 19 nt, Artificial Sequence
  Description of Artificial Sequence: Synthetic oligonucleotide
guuuccgaacaggggcaug

SEQ ID NO: 1057397 - RNA, 19 nt, Artificial Sequence
  Description of Artificial Sequence: Synthetic oligonucleotide
cuguaaggacaucggccga

SEQ ID NO: 1057398 - RNA, 19 nt, Artificial Sequence
  Description of Artificial Sequence: Synthetic oligonucleotide
gacaucggccgaagguguc

SEQ ID NO: 1057399 - RNA, 19 nt, Artificial Sequence
  Description of Artificial Sequence: Synthetic oligonucleotide
cgaucaugaccccugcgac

SEQ ID NO: 1057400 - RNA, 19 nt, Artificial Sequence
  Description of Artificial Sequence: Synthetic oligonucleotide
acgagaugucccagugucu

SEQ ID NO: 1057401 - RNA, 19 nt, Artificial Sequence
  Description of Artificial Sequence: Synthetic oligonucleotide
gccacucgagaaggaagcg

SEQ ID NO: 1057402 - RNA, 19 nt, Artificial Sequence
  Description of Artificial Sequence: Synthetic oligonucleotide
ucgugcacacggccaucuc

SEQ ID NO: 1057403 - RNA, 19 nt, Artificial Sequence
  Description of Artificial Sequence: Synthetic oligonucleotide
aacgggcauggggcccugg

SEQ ID NO: 1057404 - RNA, 19 nt, Artificial Sequence
  Description of Artificial Sequence: Synthetic oligonucleotide
gggccguagccgaauaaug

SEQ ID NO: 1057405 - RNA, 19 nt, Artificial Sequence
  Description of Artificial Sequence: Synthetic oligonucleotide
ggagcaagguauagcuuuc

SEQ ID NO: 1057406 - RNA, 19 nt, Artificial Sequence
  Description of Artificial Sequence: Synthetic oligonucleotide
gccacgggcccucuugggc

SEQ ID NO: 1057407 - RNA, 19 nt, Artificial Sequence
  Description of Artificial Sequence: Synthetic oligonucleotide
aaucggcaccggucaccaa

SEQ ID NO: 1057408 - RNA, 19 nt, Artificial Sequence
  Description of Artificial Sequence: Synthetic oligonucleotide
caugagugcgcagccgcca

SEQ ID NO: 1057409 - RNA, 19 nt, Artificial Sequence
  Description of Artificial Sequence: Synthetic oligonucleotide
guucaggccauugcgcacu

SEQ ID NO: 1057410 - RNA, 19 nt, Artificial Sequence
  Description of Artificial Sequence: Synthetic oligonucleotide
ccccguuuccgaacagggg

SEQ ID NO: 1057411 - RNA, 19 nt, Artificial Sequence
  Description of Artificial Sequence: Synthetic oligonucleotide
gguggucucggccuaggua

SEQ ID NO: 1057412 - RNA, 19 nt, Artificial Sequence
  Description of Artificial Sequence: Synthetic oligonucleotide
guccucgcagggguggcgc

SEQ ID NO: 1057413 - RNA, 19 nt, Artificial Sequence
  Description of Artificial Sequence: Synthetic oligonucleotide
cgucacauccgcaccgaag

SEQ ID NO: 1057414 - RNA, 19 nt, Artificial Sequence
  Description of Artificial Sequence: Synthetic oligonucleotide
cacgggcccucuugggcac

SEQ ID NO: 1057415 - RNA, 19 nt, Artificial Sequence
  Description of Artificial Sequence: Synthetic oligonucleotide
gugugaaaucccucaggau

SEQ ID NO: 1057416 - RNA, 19 nt, Artificial Sequence
  Description of Artificial Sequence: Synthetic oligonucleotide
gcgcauuuggucauggugu

SEQ ID NO: 1057417 - RNA, 19 nt, Artificial Sequence
  Description of Artificial Sequence: Synthetic oligonucleotide
caaggucgauggggcagcc

SEQ ID NO: 1057418 - RNA, 19 nt, Artificial Sequence
  Description of Artificial Sequence: Synthetic oligonucleotide
gcgaaaggguagguucccg

SEQ ID NO: 1057419 - RNA, 19 nt, Artificial Sequence
  Description of Artificial Sequence: Synthetic oligonucleotide
acgccccuuacaaucugcu

SEQ ID NO: 1057420 - RNA, 19 nt, Artificial Sequence
  Description of Artificial Sequence: Synthetic oligonucleotide
ggcgaaaggguagguuccc

SEQ ID NO: 1057421 - RNA, 19 nt, Artificial Sequence
  Description of Artificial Sequence: Synthetic oligonucleotide
ccgcacgucacauccgcac

SEQ ID NO: 1057422 - RNA, 19 nt, Artificial Sequence
  Description of Artificial Sequence: Synthetic oligonucleotide
guguccaacugggcauggc

SEQ ID NO: 1057423 - RNA, 19 nt, Artificial Sequence
  Description of Artificial Sequence: Synthetic oligonucleotide
cacguggcugacuccugga

SEQ ID NO: 1057424 - RNA, 19 nt, Artificial Sequence
  Description of Artificial Sequence: Synthetic oligonucleotide
cuguucccgggaacggcca

SEQ ID NO: 1057425 - RNA, 19 nt, Artificial Sequence
  Description of Artificial Sequence: Synthetic oligonucleotide
cucagcgcauuuggucaug

SEQ ID NO: 1057426 - RNA, 19 nt, Artificial Sequence
  Description of Artificial Sequence: Synthetic oligonucleotide
acgucacauccgcaccgaa

SEQ ID NO: 1057427 - RNA, 19 nt, Artificial Sequence
  Description of Artificial Sequence: Synthetic oligonucleotide
ccucaaacgaaaggauguc

SEQ ID NO: 1057428 - RNA, 19 nt, Artificial Sequence
  Description of Artificial Sequence: Synthetic oligonucleotide
cagaugcggcgaaagggua

SEQ ID NO: 1057429 - RNA, 19 nt, Artificial Sequence
  Description of Artificial Sequence: Synthetic oligonucleotide
gcgauucaugagugcgcag

SEQ ID NO: 1057430 - RNA, 19 nt, Artificial Sequence
  Description of Artificial Sequence: Synthetic oligonucleotide
caaagccgggugggacugg

SEQ ID NO: 1057431 - RNA, 19 nt, Artificial Sequence
  Description of Artificial Sequence: Synthetic oligonucleotide
gcacuagagggaguugcac

SEQ ID NO: 1057432 - RNA, 19 nt, Artificial Sequence
  Description of Artificial Sequence: Synthetic oligonucleotide
guagggccagucagccagc

SEQ ID NO: 1057433 - RNA, 19 nt, Artificial Sequence
  Description of Artificial Sequence: Synthetic oligonucleotide
caccacgggcgaucaugac

SEQ ID NO: 1057434 - RNA, 19 nt, Artificial Sequence
  Description of Artificial Sequence: Synthetic oligonucleotide
caccgaagcgcuugcagau

SEQ ID NO: 1057435 - RNA, 19 nt, Artificial Sequence
  Description of Artificial Sequence: Synthetic oligonucleotide
gcagguucgugcacacggc

SEQ ID NO: 1057436 - RNA, 19 nt, Artificial Sequence
  Description of Artificial Sequence: Synthetic oligonucleotide
acgggcgaucaugaccccu

SEQ ID NO: 1057437 - RNA, 19 nt, Artificial Sequence
  Description of Artificial Sequence: Synthetic oligonucleotide
gucgauggggcagcccaca

SEQ ID NO: 1057438 - RNA, 19 nt, Artificial Sequence
  Description of Artificial Sequence: Synthetic oligonucleotide
caggccguagugugugaaa

SEQ ID NO: 1057439 - RNA, 19 nt, Artificial Sequence
  Description of Artificial Sequence: Synthetic oligonucleotide
cugcucgauguagggccag

SEQ ID NO: 1057440 - RNA, 19 nt, Artificial Sequence
  Description of Artificial Sequence: Synthetic oligonucleotide
cacgggcgaucaugacccc

SEQ ID NO: 1057441 - RNA, 19 nt, Artificial Sequence
  Description of Artificial Sequence: Synthetic oligonucleotide
ggugagcggagcaagguau

SEQ ID NO: 1057442 - RNA, 19 nt, Artificial Sequence
  Description of Artificial Sequence: Synthetic oligonucleotide
ccagucccgcagcucaggc

SEQ ID NO: 1057443 - RNA, 19 nt, Artificial Sequence
  Description of Artificial Sequence: Synthetic oligonucleotide
gcagaugcggcgaaagggu

SEQ ID NO: 1057444 - RNA, 19 nt, Artificial Sequence
  Description of Artificial Sequence: Synthetic oligonucleotide
acgcuccugaacacccgug

SEQ ID NO: 1057445 - RNA, 19 nt, Artificial Sequence
  Description of Artificial Sequence: Synthetic oligonucleotide
guccgucaaggggccacag

SEQ ID NO: 1057446 - RNA, 19 nt, Artificial Sequence
  Description of Artificial Sequence: Synthetic oligonucleotide
cauucacgccccuuacaau

SEQ ID NO: 1057447 - RNA, 19 nt, Artificial Sequence
  Description of Artificial Sequence: Synthetic oligonucleotide
cgcacgucacauccgcacc

SEQ ID NO: 1057448 - RNA, 19 nt, Artificial Sequence
  Description of Artificial Sequence: Synthetic oligonucleotide
ucgcagggguggcgcuuga

SEQ ID NO: 1057449 - RNA, 19 nt, Artificial Sequence
  Description of Artificial Sequence: Synthetic oligonucleotide
aucggccgaaggugucaaa

SEQ ID NO: 1057450 - RNA, 19 nt, Artificial Sequence
  Description of Artificial Sequence: Synthetic oligonucleotide
ggccguagccgaauaaugu

SEQ ID NO: 1057451 - RNA, 19 nt, Artificial Sequence
  Description of Artificial Sequence: Synthetic oligonucleotide
gguucgugcacacggccau

SEQ ID NO: 1057452 - RNA, 19 nt, Artificial Sequence
  Description of Artificial Sequence: Synthetic oligonucleotide
ccguuuccgaacaggggca

SEQ ID NO: 1057453 - RNA, 19 nt, Artificial Sequence
  Description of Artificial Sequence: Synthetic oligonucleotide
ccgggaacggccauggagu

SEQ ID NO: 1057454 - RNA, 19 nt, Artificial Sequence
  Description of Artificial Sequence: Synthetic oligonucleotide
gugcgacaccccagucccg

SEQ ID NO: 1057455 - RNA, 19 nt, Artificial Sequence
  Description of Artificial Sequence: Synthetic oligonucleotide
cgugcgcaucuucacaguc

SEQ ID NO: 1057456 - RNA, 19 nt, Artificial Sequence
  Description of Artificial Sequence: Synthetic oligonucleotide
cacgucacauccgcaccga

SEQ ID NO: 1057457 - RNA, 19 nt, Artificial Sequence
  Description of Artificial Sequence: Synthetic oligonucleotide
ggcuugagcaaggcaccac

SEQ ID NO: 1057458 - RNA, 19 nt, Artificial Sequence
  Description of Artificial Sequence: Synthetic oligonucleotide
ccgucaaggggccacaggu

SEQ ID NO: 1057459 - RNA, 19 nt, Artificial Sequence
  Description of Artificial Sequence: Synthetic oligonucleotide
cgggcgaucaugaccccug

SEQ ID NO: 1057460 - RNA, 19 nt, Artificial Sequence
  Description of Artificial Sequence: Synthetic oligonucleotide
guucgugcacacggccauc

SEQ ID NO: 1057461 - RNA, 19 nt, Artificial Sequence
  Description of Artificial Sequence: Synthetic oligonucleotide
cacguggugagcggagcaa

SEQ ID NO: 1057462 - RNA, 19 nt, Artificial Sequence
  Description of Artificial Sequence: Synthetic oligonucleotide
gucgcucaagcaggcccac

SEQ ID NO: 1057463 - RNA, 19 nt, Artificial Sequence
  Description of Artificial Sequence: Synthetic oligonucleotide
gugagcggagcaagguaua

SEQ ID NO: 1057464 - RNA, 19 nt, Artificial Sequence
  Description of Artificial Sequence: Synthetic oligonucleotide
cacgggcacauaccugcaa

SEQ ID NO: 1057465 - RNA, 19 nt, Artificial Sequence
  Description of Artificial Sequence: Synthetic oligonucleotide
ccacgggcccucuugggca

SEQ ID NO: 1057466 - RNA, 19 nt, Artificial Sequence
  Description of Artificial Sequence: Synthetic oligonucleotide
gcgcucagaggacgagaug

SEQ ID NO: 1057467 - RNA, 19 nt, Artificial Sequence
  Description of Artificial Sequence: Synthetic oligonucleotide
gcaccacgggcgaucauga

SEQ ID NO: 1057468 - RNA, 19 nt, Artificial Sequence
  Description of Artificial Sequence: Synthetic oligonucleotide
accgcacgucacauccgca

SEQ ID NO: 1057469 - RNA, 19 nt, Artificial Sequence
  Description of Artificial Sequence: Synthetic oligonucleotide
ccugcgacaccugucugca

SEQ ID NO: 1057470 - RNA, 19 nt, Artificial Sequence
  Description of Artificial Sequence: Synthetic oligonucleotide
ccauugcgcacuagaggga

SEQ ID NO: 1057471 - RNA, 19 nt, Artificial Sequence
  Description of Artificial Sequence: Synthetic oligonucleotide
ggcuggcuaccuuggcgca

SEQ ID NO: 1057472 - RNA, 19 nt, Artificial Sequence
  Description of Artificial Sequence: Synthetic oligonucleotide
cagggccguagccgaauaa

SEQ ID NO: 1057473 - RNA, 19 nt, Artificial Sequence
  Description of Artificial Sequence: Synthetic oligonucleotide
augcggcgaaaggguaggu

SEQ ID NO: 1057474 - RNA, 19 nt, Artificial Sequence
  Description of Artificial Sequence: Synthetic oligonucleotide
ggacaacaacgggcauggg

SEQ ID NO: 1057475 - RNA, 19 nt, Artificial Sequence
  Description of Artificial Sequence: Synthetic oligonucleotide
caucggccgaaggugucaa

SEQ ID NO: 1057476 - RNA, 19 nt, Artificial Sequence
  Description of Artificial Sequence: Synthetic oligonucleotide
ggcccacgggcacauaccu

SEQ ID NO: 1057477 - RNA, 19 nt, Artificial Sequence
  Description of Artificial Sequence: Synthetic oligonucleotide
gucacgcuguaaggacauc

SEQ ID NO: 1057478 - RNA, 19 nt, Artificial Sequence
  Description of Artificial Sequence: Synthetic oligonucleotide
cgcaaacgcgacaggucac

SEQ ID NO: 1057479 - RNA, 19 nt, Artificial Sequence
  Description of Artificial Sequence: Synthetic oligonucleotide
ccacauuaauguccacaaa

SEQ ID NO: 1057480 - RNA, 19 nt, Artificial Sequence
  Description of Artificial Sequence: Synthetic oligonucleotide
ggguagguucccgcacgug

SEQ ID NO: 1057481 - RNA, 19 nt, Artificial Sequence
  Description of Artificial Sequence: Synthetic oligonucleotide
gaacggccauggaguguga

SEQ ID NO: 1057482 - RNA, 19 nt, Artificial Sequence
  Description of Artificial Sequence: Synthetic oligonucleotide
ggacaucggccgaaggugu

SEQ ID NO: 1057483 - RNA, 19 nt, Artificial Sequence
  Description of Artificial Sequence: Synthetic oligonucleotide
cguagccgaauaauguccu

SEQ ID NO: 1057484 - RNA, 19 nt, Artificial Sequence
  Description of Artificial Sequence: Synthetic oligonucleotide
cgggaacggccauggagug

SEQ ID NO: 1057485 - RNA, 19 nt, Artificial Sequence
  Description of Artificial Sequence: Synthetic oligonucleotide
cggucaccaaaugcacacg

SEQ ID NO: 1057486 - RNA, 19 nt, Artificial Sequence
  Description of Artificial Sequence: Synthetic oligonucleotide
gcuggcuaccuuggcgcac

SEQ ID NO: 1057487 - RNA, 19 nt, Artificial Sequence
  Description of Artificial Sequence: Synthetic oligonucleotide
agccgccacccuucuugua

SEQ ID NO: 1057488 - RNA, 19 nt, Artificial Sequence
  Description of Artificial Sequence: Synthetic oligonucleotide
uggugcgguucaggagcuc

SEQ ID NO: 1057489 - RNA, 19 nt, Artificial Sequence
  Description of Artificial Sequence: Synthetic oligonucleotide
ggucacgcuguaaggacau

SEQ ID NO: 1057490 - RNA, 19 nt, Artificial Sequence
  Description of Artificial Sequence: Synthetic oligonucleotide
cgccccuuacaaucugcug

SEQ ID NO: 1057491 - RNA, 19 nt, Artificial Sequence
  Description of Artificial Sequence: Synthetic oligonucleotide
cgcacuagagggaguugca

SEQ ID NO: 1057492 - RNA, 19 nt, Artificial Sequence
  Description of Artificial Sequence: Synthetic oligonucleotide
cguugucuacuuguaggca

SEQ ID NO: 1057493 - RNA, 19 nt, Artificial Sequence
  Description of Artificial Sequence: Synthetic oligonucleotide
cagcgcauuuggucauggu

SEQ ID NO: 1057494 - RNA, 19 nt, Artificial Sequence
  Description of Artificial Sequence: Synthetic oligonucleotide
ccgccacccuucuuguaga

SEQ ID NO: 1057495 - RNA, 19 nt, Artificial Sequence
  Description of Artificial Sequence: Synthetic oligonucleotide
cagcgagcuaccaccucuu

SEQ ID NO: 1057496 - RNA, 19 nt, Artificial Sequence
  Description of Artificial Sequence: Synthetic oligonucleotide
gcucagcgcauuuggucau

SEQ ID NO: 1057497 - RNA, 19 nt, Artificial Sequence
  Description of Artificial Sequence: Synthetic oligonucleotide
gcuugcagaugcggcgaaa

SEQ ID NO: 1057498 - RNA, 19 nt, Artificial Sequence
  Description of Artificial Sequence: Synthetic oligonucleotide
gcgacaccccagucccgca

SEQ ID NO: 1057499 - RNA, 19 nt, Artificial Sequence
  Description of Artificial Sequence: Synthetic oligonucleotide
ccccugcgacaccugucug

SEQ ID NO: 1057500 - RNA, 19 nt, Artificial Sequence
  Description of Artificial Sequence: Synthetic oligonucleotide
ggguaaccguggcuacagu

SEQ ID NO: 1057501 - RNA, 19 nt, Artificial Sequence
  Description of Artificial Sequence: Synthetic oligonucleotide
ggucucggccuagguagua

SEQ ID NO: 1057502 - RNA, 19 nt, Artificial Sequence
  Description of Artificial Sequence: Synthetic oligonucleotide
cucguccgucaaggggcca

SEQ ID NO: 1057503 - RNA, 19 nt, Artificial Sequence
  Description of Artificial Sequence: Synthetic oligonucleotide
gcgacaggucacgcuguaa

SEQ ID NO: 1057504 - RNA, 19 nt, Artificial Sequence
  Description of Artificial Sequence: Synthetic oligonucleotide
cacagggccguagccgaau

SEQ ID NO: 1057505 - RNA, 19 nt, Artificial Sequence
  Description of Artificial Sequence: Synthetic oligonucleotide
ccaggccguagugugugaa

SEQ ID NO: 1057506 - RNA, 19 nt, Artificial Sequence
  Description of Artificial Sequence: Synthetic oligonucleotide
cgcccucuaguugcacccc

SEQ ID NO: 1057507 - RNA, 19 nt, Artificial Sequence
  Description of Artificial Sequence: Synthetic oligonucleotide
ggcauggggcuggcuaccu

SEQ ID NO: 1057508 - RNA, 19 nt, Artificial Sequence
  Description of Artificial Sequence: Synthetic oligonucleotide
cccgcacguggugagcgga

SEQ ID NO: 1057509 - RNA, 19 nt, Artificial Sequence
  Description of Artificial Sequence: Synthetic oligonucleotide
cgucgauggugcgguucag

SEQ ID NO: 1057510 - RNA, 19 nt, Artificial Sequence
  Description of Artificial Sequence: Synthetic oligonucleotide
gaacacccgugcgcaucuu

SEQ ID NO: 1057511 - RNA, 19 nt, Artificial Sequence
  Description of Artificial Sequence: Synthetic oligonucleotide
cggcaccggucaccaaaug

SEQ ID NO: 1057512 - RNA, 19 nt, Artificial Sequence
  Description of Artificial Sequence: Synthetic oligonucleotide
cugcgacaccugucugcau

SEQ ID NO: 1057513 - RNA, 19 nt, Artificial Sequence
  Description of Artificial Sequence: Synthetic oligonucleotide
cauccgcaccgaagcgcuu

SEQ ID NO: 1057514 - RNA, 19 nt, Artificial Sequence
  Description of Artificial Sequence: Synthetic oligonucleotide
ccgugcgcaucuucacagu

SEQ ID NO: 1057515 - RNA, 19 nt, Artificial Sequence
  Description of Artificial Sequence: Synthetic oligonucleotide
cguccgucaaggggccaca

SEQ ID NO: 1057516 - RNA, 19 nt, Artificial Sequence
  Description of Artificial Sequence: Synthetic oligonucleotide
cgcgacaggucacgcugua

SEQ ID NO: 1057517 - RNA, 19 nt, Artificial Sequence
  Description of Artificial Sequence: Synthetic oligonucleotide
gcgcagccgccacccuucu

SEQ ID NO: 1057518 - RNA, 19 nt, Artificial Sequence
  Description of Artificial Sequence: Synthetic oligonucleotide
ccgcaccgaagcgcuugca

SEQ ID NO: 1057519 - RNA, 19 nt, Artificial Sequence
  Description of Artificial Sequence: Synthetic oligonucleotide
cguuuccgaacaggggcau

SEQ ID NO: 1057520 - RNA, 19 nt, Artificial Sequence
  Description of Artificial Sequence: Synthetic oligonucleotide
aaaagcuucgagccgaccc

SEQ ID NO: 1057521 - RNA, 19 nt, Artificial Sequence
  Description of Artificial Sequence: Synthetic oligonucleotide
auuuucgauaguuuggccc

SEQ ID NO: 1057522 - RNA, 19 nt, Artificial Sequence
  Description of Artificial Sequence: Synthetic oligonucleotide
aacgcaaggccccaaacac

SEQ ID NO: 1057523 - RNA, 19 nt, Artificial Sequence
  Description of Artificial Sequence: Synthetic oligonucleotide
auugacuuccagcagaauc

SEQ ID NO: 1057524 - RNA, 19 nt, Artificial Sequence
  Description of Artificial Sequence: Synthetic oligonucleotide
aaccccauguuauuacucc

SEQ ID NO: 1057525 - RNA, 19 nt, Artificial Sequence
  Description of Artificial Sequence: Synthetic oligonucleotide
uguguuuaggagacgauag

SEQ ID NO: 1057526 - RNA, 19 nt, Artificial Sequence
  Description of Artificial Sequence: Synthetic oligonucleotide
gaagccaucauguagguca

SEQ ID NO: 1057527 - RNA, 19 nt, Artificial Sequence
  Description of Artificial Sequence: Synthetic oligonucleotide
agaaacuuagcagaucagc

SEQ ID NO: 1057528 - RNA, 19 nt, Artificial Sequence
  Description of Artificial Sequence: Synthetic oligonucleotide
ugaauacucaucuuguagu

SEQ ID NO: 1057529 - RNA, 19 nt, Artificial Sequence
  Description of Artificial Sequence: Synthetic oligonucleotide
aaagcuucgagccgacccg

SEQ ID NO: 1057530 - RNA, 19 nt, Artificial Sequence
  Description of Artificial Sequence: Synthetic oligonucleotide
uguagguuagggaaguuga

SEQ ID NO: 1057531 - RNA, 19 nt, Artificial Sequence
  Description of Artificial Sequence: Synthetic oligonucleotide
ucauguaggucacacagga

SEQ ID NO: 1057532 - RNA, 19 nt, Artificial Sequence
  Description of Artificial Sequence: Synthetic oligonucleotide
augaagcuagcccagcgcc

SEQ ID NO: 1057533 - RNA, 19 nt, Artificial Sequence
  Description of Artificial Sequence: Synthetic oligonucleotide
agugucuggaugucggucc

SEQ ID NO: 1057534 - RNA, 19 nt, Artificial Sequence
  Description of Artificial Sequence: Synthetic oligonucleotide
ugaaucacacagaugcucc

SEQ ID NO: 1057535 - RNA, 19 nt, Artificial Sequence
  Description of Artificial Sequence: Synthetic oligonucleotide
cagacugccuuucagaucc

SEQ ID NO: 1057536 - RNA, 19 nt, Artificial Sequence
  Description of Artificial Sequence: Synthetic oligonucleotide
caucauguaggucacacag

SEQ ID NO: 1057537 - RNA, 19 nt, Artificial Sequence
  Description of Artificial Sequence: Synthetic oligonucleotide
auucccuuguaacugcagc

SEQ ID NO: 1057538 - RNA, 19 nt, Artificial Sequence
  Description of Artificial Sequence: Synthetic oligonucleotide
auaguuuggcccuccagac

SEQ ID NO: 1057539 - RNA, 19 nt, Artificial Sequence
  Description of Artificial Sequence: Synthetic oligonucleotide
cauaauguagguuagggaa

SEQ ID NO: 1057540 - RNA, 19 nt, Artificial Sequence
  Description of Artificial Sequence: Synthetic oligonucleotide
aguuugaaaggcugacacc

SEQ ID NO: 1057541 - RNA, 19 nt, Artificial Sequence
  Description of Artificial Sequence: Synthetic oligonucleotide
gaaacuuagcagaucagcc

SEQ ID NO: 1057542 - RNA, 19 nt, Artificial Sequence
  Description of Artificial Sequence: Synthetic oligonucleotide
auagggagcaguuaccgug

SEQ ID NO: 1057543 - RNA, 19 nt, Artificial Sequence
  Description of Artificial Sequence: Synthetic oligonucleotide
uuuucgauaguuuggcccu

SEQ ID NO: 1057544 - RNA, 19 nt, Artificial Sequence
  Description of Artificial Sequence: Synthetic oligonucleotide
gaacacaggcgauagggag

SEQ ID NO: 1057545 - RNA, 19 nt, Artificial Sequence
  Description of Artificial Sequence: Synthetic oligonucleotide
gucuauaccccucagcacc

SEQ ID NO: 1057546 - RNA, 19 nt, Artificial Sequence
  Description of Artificial Sequence: Synthetic oligonucleotide
gauaguuuggcccuccaga

SEQ ID NO: 1057547 - RNA, 19 nt, Artificial Sequence
  Description of Artificial Sequence: Synthetic oligonucleotide
auguuauuacuccccggcc

SEQ ID NO: 1057548 - RNA, 19 nt, Artificial Sequence
  Description of Artificial Sequence: Synthetic oligonucleotide
aauacccuucccuggaaca

SEQ ID NO: 1057549 - RNA, 19 nt, Artificial Sequence
  Description of Artificial Sequence: Synthetic oligonucleotide
uguuauuacuccccggccu

SEQ ID NO: 1057550 - RNA, 19 nt, Artificial Sequence
  Description of Artificial Sequence: Synthetic oligonucleotide
guaacacugggccagguug

SEQ ID NO: 1057551 - RNA, 19 nt, Artificial Sequence
  Description of Artificial Sequence: Synthetic oligonucleotide
agccaaaugagccauggga

SEQ ID NO: 1057552 - RNA, 19 nt, Artificial Sequence
  Description of Artificial Sequence: Synthetic oligonucleotide
uguuguaaguacugggcca

SEQ ID NO: 1057553 - RNA, 19 nt, Artificial Sequence
  Description of Artificial Sequence: Synthetic oligonucleotide
agggccauucccuuguaac

SEQ ID NO: 1057554 - RNA, 19 nt, Artificial Sequence
  Description of Artificial Sequence: Synthetic oligonucleotide
gaaguugacagguggcuug

SEQ ID NO: 1057555 - RNA, 19 nt, Artificial Sequence
  Description of Artificial Sequence: Synthetic oligonucleotide
uccgcaacagaugugaaga

SEQ ID NO: 1057556 - RNA, 19 nt, Artificial Sequence
  Description of Artificial Sequence: Synthetic oligonucleotide
ugcacugcugcacacuuug

SEQ ID NO: 1057557 - RNA, 19 nt, Artificial Sequence
  Description of Artificial Sequence: Synthetic oligonucleotide
ugucgguccuuguagaggc

SEQ ID NO: 1057558 - RNA, 19 nt, Artificial Sequence
  Description of Artificial Sequence: Synthetic oligonucleotide
agucaggugcaccagacca

SEQ ID NO: 1057559 - RNA, 19 nt, Artificial Sequence
  Description of Artificial Sequence: Synthetic oligonucleotide
auaagggacagaccaaaga

SEQ ID NO: 1057560 - RNA, 19 nt, Artificial Sequence
  Description of Artificial Sequence: Synthetic oligonucleotide
ugaacaagacgucggggca

SEQ ID NO: 1057561 - RNA, 19 nt, Artificial Sequence
  Description of Artificial Sequence: Synthetic oligonucleotide
ugagucgcggcguauaggu

SEQ ID NO: 1057562 - RNA, 19 nt, Artificial Sequence
  Description of Artificial Sequence: Synthetic oligonucleotide
agcgugagcaccucgcggg

SEQ ID NO: 1057563 - RNA, 19 nt, Artificial Sequence
  Description of Artificial Sequence: Synthetic oligonucleotide
acugguauggcuugcucug

SEQ ID NO: 1057564 - RNA, 19 nt, Artificial Sequence
  Description of Artificial Sequence: Synthetic oligonucleotide
uaggagacgauagauauuu

SEQ ID NO: 1057565 - RNA, 19 nt, Artificial Sequence
  Description of Artificial Sequence: Synthetic oligonucleotide
ugaagcuagcccagcgccg

SEQ ID NO: 1057566 - RNA, 19 nt, Artificial Sequence
  Description of Artificial Sequence: Synthetic oligonucleotide
accccauguuauuacuccc

SEQ ID NO: 1057567 - RNA, 19 nt, Artificial Sequence
  Description of Artificial Sequence: Synthetic oligonucleotide
guaccugggcuccuuaagg

SEQ ID NO: 1057568 - RNA, 19 nt, Artificial Sequence
  Description of Artificial Sequence: Synthetic oligonucleotide
uguuuaggagacgauagau

SEQ ID NO: 1057569 - RNA, 19 nt, Artificial Sequence
  Description of Artificial Sequence: Synthetic oligonucleotide
aaacacggggaugcuuugc

SEQ ID NO: 1057570 - RNA, 19 nt, Artificial Sequence
  Description of Artificial Sequence: Synthetic oligonucleotide
aaaccccauguuauuacuc

SEQ ID NO: 1057571 - RNA, 19 nt, Artificial Sequence
  Description of Artificial Sequence: Synthetic oligonucleotide
aagacgucggggcacaguu

SEQ ID NO: 1057572 - RNA, 19 nt, Artificial Sequence
  Description of Artificial Sequence: Synthetic oligonucleotide
gaugcuccgaggguggagg

SEQ ID NO: 1057573 - RNA, 19 nt, Artificial Sequence
  Description of Artificial Sequence: Synthetic oligonucleotide
uuagcagaucagccaaaug

SEQ ID NO: 1057574 - RNA, 19 nt, Artificial Sequence
  Description of Artificial Sequence: Synthetic oligonucleotide
guuauuacuccccggccug

SEQ ID NO: 1057575 - RNA, 19 nt, Artificial Sequence
  Description of Artificial Sequence: Synthetic oligonucleotide
cauccaugaagcuagccca

SEQ ID NO: 1057576 - RNA, 19 nt, Artificial Sequence
  Description of Artificial Sequence: Synthetic oligonucleotide
aaacccgagaaauguccca

SEQ ID NO: 1057577 - RNA, 19 nt, Artificial Sequence
  Description of Artificial Sequence: Synthetic oligonucleotide
uacugguauggcuugcucu

SEQ ID NO: 1057578 - RNA, 19 nt, Artificial Sequence
  Description of Artificial Sequence: Synthetic oligonucleotide
guaaguacugggccaagac

SEQ ID NO: 1057579 - RNA, 19 nt, Artificial Sequence
  Description of Artificial Sequence: Synthetic oligonucleotide
aucaugguuguacuucuga

SEQ ID NO: 1057580 - RNA, 19 nt, Artificial Sequence
  Description of Artificial Sequence: Synthetic oligonucleotide
ucugcacucagaagguccu

SEQ ID NO: 1057581 - RNA, 19 nt, Artificial Sequence
  Description of Artificial Sequence: Synthetic oligonucleotide
gcaguuaccguguccaggg

SEQ ID NO: 1057582 - RNA, 19 nt, Artificial Sequence
  Description of Artificial Sequence: Synthetic oligonucleotide
gaugagucgcggcguauag

SEQ ID NO: 1057583 - RNA, 19 nt, Artificial Sequence
  Description of Artificial Sequence: Synthetic oligonucleotide
ucuauaccccucagcacca

SEQ ID NO: 1057584 - RNA, 19 nt, Artificial Sequence
  Description of Artificial Sequence: Synthetic oligonucleotide
aggggaugauugcuucugc

SEQ ID NO: 1057585 - RNA, 19 nt, Artificial Sequence
  Description of Artificial Sequence: Synthetic oligonucleotide
caugaagcuagcccagcgc

SEQ ID NO: 1057586 - RNA, 19 nt, Artificial Sequence
  Description of Artificial Sequence: Synthetic oligonucleotide
cauuuucgauaguuuggcc

SEQ ID NO: 1057587 - RNA, 19 nt, Artificial Sequence
  Description of Artificial Sequence: Synthetic oligonucleotide
ucaguacucagcacucccu

SEQ ID NO: 1057588 - RNA, 19 nt, Artificial Sequence
  Description of Artificial Sequence: Synthetic oligonucleotide
gaugcuuugcacugcugca

SEQ ID NO: 1057589 - RNA, 19 nt, Artificial Sequence
  Description of Artificial Sequence: Synthetic oligonucleotide
gauaagggacagaccaaag

SEQ ID NO: 1057590 - RNA, 19 nt, Artificial Sequence
  Description of Artificial Sequence: Synthetic oligonucleotide
uuuggguaagcuucuucuc

SEQ ID NO: 1057591 - RNA, 19 nt, Artificial Sequence
  Description of Artificial Sequence: Synthetic oligonucleotide
uagcaccuacaccagagaa

SEQ ID NO: 1057592 - RNA, 19 nt, Artificial Sequence
  Description of Artificial Sequence: Synthetic oligonucleotide
gaaacccgagaaauguccc

SEQ ID NO: 1057593 - RNA, 19 nt, Artificial Sequence
  Description of Artificial Sequence: Synthetic oligonucleotide
uggugcaaggaugaagaug

SEQ ID NO: 1057594 - RNA, 19 nt, Artificial Sequence
  Description of Artificial Sequence: Synthetic oligonucleotide
gaacgcaaggccccaaaca

SEQ ID NO: 1057595 - RNA, 19 nt, Artificial Sequence
  Description of Artificial Sequence: Synthetic oligonucleotide
ugccucccagagauaaggg

SEQ ID NO: 1057596 - RNA, 19 nt, Artificial Sequence
  Description of Artificial Sequence: Synthetic oligonucleotide
aggacacucuccccuuggc

SEQ ID NO: 1057597 - RNA, 19 nt, Artificial Sequence
  Description of Artificial Sequence: Synthetic oligonucleotide
cguuucaccaucaugguug

SEQ ID NO: 1057598 - RNA, 19 nt, Artificial Sequence
  Description of Artificial Sequence: Synthetic oligonucleotide
uuaggguucuuuggguaag

SEQ ID NO: 1057599 - RNA, 19 nt, Artificial Sequence
  Description of Artificial Sequence: Synthetic oligonucleotide
ugcgccccgacgaaacccg

SEQ ID NO: 1057600 - RNA, 19 nt, Artificial Sequence
  Description of Artificial Sequence: Synthetic oligonucleotide
ugaacgcaaggccccaaac

SEQ ID NO: 1057601 - RNA, 19 nt, Artificial Sequence
  Description of Artificial Sequence: Synthetic oligonucleotide
ugucuauaccccucagcac

SEQ ID NO: 1057602 - RNA, 19 nt, Artificial Sequence
  Description of Artificial Sequence: Synthetic oligonucleotide
agcagaauccccacaagca

SEQ ID NO: 1057603 - RNA, 19 nt, Artificial Sequence
  Description of Artificial Sequence: Synthetic oligonucleotide
gggucgaaggcccagguug

SEQ ID NO: 1057604 - RNA, 19 nt, Artificial Sequence
  Description of Artificial Sequence: Synthetic oligonucleotide
auguagguuagggaaguug

SEQ ID NO: 1057605 - RNA, 19 nt, Artificial Sequence
  Description of Artificial Sequence: Synthetic oligonucleotide
uggcgcuacaguggaaugg

SEQ ID NO: 1057606 - RNA, 19 nt, Artificial Sequence
  Description of Artificial Sequence: Synthetic oligonucleotide
aucauguaggucacacagg

SEQ ID NO: 1057607 - RNA, 19 nt, Artificial Sequence
  Description of Artificial Sequence: Synthetic oligonucleotide
agugcgccccgacgaaacc

SEQ ID NO: 1057608 - RNA, 19 nt, Artificial Sequence
  Description of Artificial Sequence: Synthetic oligonucleotide
ugucccaacugcagcguga

SEQ ID NO: 1057609 - RNA, 19 nt, Artificial Sequence
  Description of Artificial Sequence: Synthetic oligonucleotide
uaguuuggcccuccagaca

SEQ ID NO: 1057610 - RNA, 19 nt, Artificial Sequence
  Description of Artificial Sequence: Synthetic oligonucleotide
caguggaauggcagagugg

SEQ ID NO: 1057611 - RNA, 19 nt, Artificial Sequence
  Description of Artificial Sequence: Synthetic oligonucleotide
gagccgacccguuucacca

SEQ ID NO: 1057612 - RNA, 19 nt, Artificial Sequence
  Description of Artificial Sequence: Synthetic oligonucleotide
acacggggaugcuuugcac

SEQ ID NO: 1057613 - RNA, 19 nt, Artificial Sequence
  Description of Artificial Sequence: Synthetic oligonucleotide
cgagaaaugucccaacugc

SEQ ID NO: 1057614 - RNA, 19 nt, Artificial Sequence
  Description of Artificial Sequence: Synthetic oligonucleotide
aggauggcgcuacagugga

SEQ ID NO: 1057615 - RNA, 19 nt, Artificial Sequence
  Description of Artificial Sequence: Synthetic oligonucleotide
agcauccaugaagcuagcc

SEQ ID NO: 1057616 - RNA, 19 nt, Artificial Sequence
  Description of Artificial Sequence: Synthetic oligonucleotide
uuaggagacgauagauauu

SEQ ID NO: 1057617 - RNA, 19 nt, Artificial Sequence
  Description of Artificial Sequence: Synthetic oligonucleotide
guaucaggaagggacuggc

SEQ ID NO: 1057618 - RNA, 19 nt, Artificial Sequence
  Description of Artificial Sequence: Synthetic oligonucleotide
ggcgauagggagcaguuac

SEQ ID NO: 1057619 - RNA, 19 nt, Artificial Sequence
  Description of Artificial Sequence: Synthetic oligonucleotide
agguuacugguauggcuug

SEQ ID NO: 1057620 - RNA, 19 nt, Artificial Sequence
  Description of Artificial Sequence: Synthetic oligonucleotide
guccgcaacagaugugaag

SEQ ID NO: 1057621 - RNA, 19 nt, Artificial Sequence
  Description of Artificial Sequence: Synthetic oligonucleotide
uuacugguauggcuugcuc

SEQ ID NO: 1057622 - RNA, 19 nt, Artificial Sequence
  Description of Artificial Sequence: Synthetic oligonucleotide
gaagcuagcccagcgccgc

SEQ ID NO: 1057623 - RNA, 19 nt, Artificial Sequence
  Description of Artificial Sequence: Synthetic oligonucleotide
gacccguuucaccaucaug

SEQ ID NO: 1057624 - RNA, 19 nt, Artificial Sequence
  Description of Artificial Sequence: Synthetic oligonucleotide
acccgagaaaugucccaac

SEQ ID NO: 1057625 - RNA, 19 nt, Artificial Sequence
  Description of Artificial Sequence: Synthetic oligonucleotide
gccgguucugaacaagacg

SEQ ID NO: 1057626 - RNA, 19 nt, Artificial Sequence
  Description of Artificial Sequence: Synthetic oligonucleotide
agucgcggcguauagguuu

SEQ ID NO: 1057627 - RNA, 19 nt, Artificial Sequence
  Description of Artificial Sequence: Synthetic oligonucleotide
guuuuagcaccuacaccag

SEQ ID NO: 1057628 - RNA, 19 nt, Artificial Sequence
  Description of Artificial Sequence: Synthetic oligonucleotide
agaagagguguggguaagg

SEQ ID NO: 1057629 - RNA, 19 nt, Artificial Sequence
  Description of Artificial Sequence: Synthetic oligonucleotide
guuaccguguccagggcug

SEQ ID NO: 1057630 - RNA, 19 nt, Artificial Sequence
  Description of Artificial Sequence: Synthetic oligonucleotide
uauaccccucagcaccacu

SEQ ID NO: 1057631 - RNA, 19 nt, Artificial Sequence
  Description of Artificial Sequence: Synthetic oligonucleotide
uucgagccgacccguuuca

SEQ ID NO: 1057632 - RNA, 19 nt, Artificial Sequence
  Description of Artificial Sequence: Synthetic oligonucleotide
aacccgagaaaugucccaa

SEQ ID NO: 1057633 - RNA, 19 nt, Artificial Sequence
  Description of Artificial Sequence: Synthetic oligonucleotide
gaauucagacugccuuuca

SEQ ID NO: 1057634 - RNA, 19 nt, Artificial Sequence
  Description of Artificial Sequence: Synthetic oligonucleotide
uccugguaacacugggcca

SEQ ID NO: 1057635 - RNA, 19 nt, Artificial Sequence
  Description of Artificial Sequence: Synthetic oligonucleotide
cagaauccccacaagcaga

SEQ ID NO: 1057636 - RNA, 19 nt, Artificial Sequence
  Description of Artificial Sequence: Synthetic oligonucleotide
uacuccccggccugaauac

SEQ ID NO: 1057637 - RNA, 19 nt, Artificial Sequence
  Description of Artificial Sequence: Synthetic oligonucleotide
guucggccgguucugaaca

SEQ ID NO: 1057638 - RNA, 19 nt, Artificial Sequence
  Description of Artificial Sequence: Synthetic oligonucleotide
uuuggcccuccagacacca

SEQ ID NO: 1057639 - RNA, 19 nt, Artificial Sequence
  Description of Artificial Sequence: Synthetic oligonucleotide
acgaaacccgagaaauguc

SEQ ID NO: 1057640 - RNA, 19 nt, Artificial Sequence
  Description of Artificial Sequence: Synthetic oligonucleotide
guguuuaggagacgauaga

SEQ ID NO: 1057641 - RNA, 19 nt, Artificial Sequence
  Description of Artificial Sequence: Synthetic oligonucleotide
gaacaagacgucggggcac

SEQ ID NO: 1057642 - RNA, 19 nt, Artificial Sequence
  Description of Artificial Sequence: Synthetic oligonucleotide
ugaggaugagucgcggcgu

SEQ ID NO: 1057643 - RNA, 19 nt, Artificial Sequence
  Description of Artificial Sequence: Synthetic oligonucleotide
gguaccugggcuccuuaag

SEQ ID NO: 1057644 - RNA, 19 nt, Artificial Sequence
  Description of Artificial Sequence: Synthetic oligonucleotide
gaggcgcauguauggagac

SEQ ID NO: 1057645 - RNA, 19 nt, Artificial Sequence
  Description of Artificial Sequence: Synthetic oligonucleotide
uugggucgaaggcccaggu

SEQ ID NO: 1057646 - RNA, 19 nt, Artificial Sequence
  Description of Artificial Sequence: Synthetic oligonucleotide
ucgauaguuuggcccucca

SEQ ID NO: 1057647 - RNA, 19 nt, Artificial Sequence
  Description of Artificial Sequence: Synthetic oligonucleotide
cuccccuuggccaaaagcu

SEQ ID NO: 1057648 - RNA, 19 nt, Artificial Sequence
  Description of Artificial Sequence: Synthetic oligonucleotide
uucgauaguuuggcccucc

SEQ ID NO: 1057649 - RNA, 19 nt, Artificial Sequence
  Description of Artificial Sequence: Synthetic oligonucleotide
cuucgagccgacccguuuc

SEQ ID NO: 1057650 - RNA, 19 nt, Artificial Sequence
  Description of Artificial Sequence: Synthetic oligonucleotide
caguacucagcacucccuc

SEQ ID NO: 1057651 - RNA, 19 nt, Artificial Sequence
  Description of Artificial Sequence: Synthetic oligonucleotide
guuuaggagacgauagaua

SEQ ID NO: 1057652 - RNA, 19 nt, Artificial Sequence
  Description of Artificial Sequence: Synthetic oligonucleotide
agggaccagggagcaaacc

SEQ ID NO: 1057653 - RNA, 19 nt, Artificial Sequence
  Description of Artificial Sequence: Synthetic oligonucleotide
uggccaugcagcguucggc

SEQ ID NO: 1057654 - RNA, 19 nt, Artificial Sequence
  Description of Artificial Sequence: Synthetic oligonucleotide
auggcgcuacaguggaaug

SEQ ID NO: 1057655 - RNA, 19 nt, Artificial Sequence
  Description of Artificial Sequence: Synthetic oligonucleotide
augagucgcggcguauagg

SEQ ID NO: 1057656 - RNA, 19 nt, Artificial Sequence
  Description of Artificial Sequence: Synthetic oligonucleotide
ggcguauagguuuccuggc

SEQ ID NO: 1057657 - RNA, 19 nt, Artificial Sequence
  Description of Artificial Sequence: Synthetic oligonucleotide
guuguaaguacugggccaa

SEQ ID NO: 1057658 - RNA, 19 nt, Artificial Sequence
  Description of Artificial Sequence: Synthetic oligonucleotide
agaggcgcauguauggaga

SEQ ID NO: 1057659 - RNA, 19 nt, Artificial Sequence
  Description of Artificial Sequence: Synthetic oligonucleotide
uuauuacuccccggccuga

SEQ ID NO: 1057660 - RNA, 19 nt, Artificial Sequence
  Description of Artificial Sequence: Synthetic oligonucleotide
acgcaaggccccaaacacg

SEQ ID NO: 1057661 - RNA, 19 nt, Artificial Sequence
  Description of Artificial Sequence: Synthetic oligonucleotide
uuguaaguacugggccaag

SEQ ID NO: 1057662 - RNA, 19 nt, Artificial Sequence
  Description of Artificial Sequence: Synthetic oligonucleotide
augucccaacugcagcgug

SEQ ID NO: 1057663 - RNA, 19 nt, Artificial Sequence
  Description of Artificial Sequence: Synthetic oligonucleotide
ggccaaaagcuucgagccg

SEQ ID NO: 1057664 - RNA, 19 nt, Artificial Sequence
  Description of Artificial Sequence: Synthetic oligonucleotide
cggcguauagguuuccugg

SEQ ID NO: 1057665 - RNA, 19 nt, Artificial Sequence
  Description of Artificial Sequence: Synthetic oligonucleotide
acaggcgauagggagcagu

SEQ ID NO: 1057666 - RNA, 19 nt, Artificial Sequence
  Description of Artificial Sequence: Synthetic oligonucleotide
ggaugauugcuucugcugu

SEQ ID NO: 1057667 - RNA, 19 nt, Artificial Sequence
  Description of Artificial Sequence: Synthetic oligonucleotide
augaacgcaaggccccaaa

SEQ ID NO: 1057668 - RNA, 19 nt, Artificial Sequence
  Description of Artificial Sequence: Synthetic oligonucleotide
aauguagguuagggaaguu

SEQ ID NO: 1057669 - RNA, 19 nt, Artificial Sequence
  Description of Artificial Sequence: Synthetic oligonucleotide
ggccaugcagcguucggcc

SEQ ID NO: 1057670 - RNA, 19 nt, Artificial Sequence
  Description of Artificial Sequence: Synthetic oligonucleotide
gccaagacuucuucuccag

SEQ ID NO: 1057671 - RNA, 19 nt, Artificial Sequence
  Description of Artificial Sequence: Synthetic oligonucleotide
gcguauagguuuccuggcc

SEQ ID NO: 1057672 - RNA, 19 nt, Artificial Sequence
  Description of Artificial Sequence: Synthetic oligonucleotide
ggcgcauguauggagacca

SEQ ID NO: 1057673 - RNA, 19 nt, Artificial Sequence
  Description of Artificial Sequence: Synthetic oligonucleotide
cagugcgccccgacgaaac

SEQ ID NO: 1057674 - RNA, 19 nt, Artificial Sequence
  Description of Artificial Sequence: Synthetic oligonucleotide
ucuucgcccucggucgucc

SEQ ID NO: 1057675 - RNA, 19 nt, Artificial Sequence
  Description of Artificial Sequence: Synthetic oligonucleotide
aagcuucgagccgacccgu

SEQ ID NO: 1057676 - RNA, 19 nt, Artificial Sequence
  Description of Artificial Sequence: Synthetic oligonucleotide
ggcgcuacaguggaauggc

SEQ ID NO: 1057677 - RNA, 19 nt, Artificial Sequence
  Description of Artificial Sequence: Synthetic oligonucleotide
ugcagcguucggccgguuc

SEQ ID NO: 1057678 - RNA, 19 nt, Artificial Sequence
  Description of Artificial Sequence: Synthetic oligonucleotide
ucggccgguucugaacaag

SEQ ID NO: 1057679 - RNA, 19 nt, Artificial Sequence
  Description of Artificial Sequence: Synthetic oligonucleotide
ccgagaaaugucccaacug

SEQ ID NO: 1057680 - RNA, 19 nt, Artificial Sequence
  Description of Artificial Sequence: Synthetic oligonucleotide
gaaggggaugauugcuucu

SEQ ID NO: 1057681 - RNA, 19 nt, Artificial Sequence
  Description of Artificial Sequence: Synthetic oligonucleotide
accguguccagggcuguag

SEQ ID NO: 1057682 - RNA, 19 nt, Artificial Sequence
  Description of Artificial Sequence: Synthetic oligonucleotide
auacccuucccuggaacau

SEQ ID NO: 1057683 - RNA, 19 nt, Artificial Sequence
  Description of Artificial Sequence: Synthetic oligonucleotide
auuacuccccggccugaau

SEQ ID NO: 1057684 - RNA, 19 nt, Artificial Sequence
  Description of Artificial Sequence: Synthetic oligonucleotide
caccuacaccagagaagcc

SEQ ID NO: 1057685 - RNA, 19 nt, Artificial Sequence
  Description of Artificial Sequence: Synthetic oligonucleotide
ggacagaccaaagagcugu

SEQ ID NO: 1057686 - RNA, 19 nt, Artificial Sequence
  Description of Artificial Sequence: Synthetic oligonucleotide
gaggaagucugaccagacu

SEQ ID NO: 1057687 - RNA, 19 nt, Artificial Sequence
  Description of Artificial Sequence: Synthetic oligonucleotide
caaaagcuucgagccgacc

SEQ ID NO: 1057688 - RNA, 19 nt, Artificial Sequence
  Description of Artificial Sequence: Synthetic oligonucleotide
cuguguuuaggagacgaua

SEQ ID NO: 1057689 - RNA, 19 nt, Artificial Sequence
  Description of Artificial Sequence: Synthetic oligonucleotide
uauuacuccccggccugaa

SEQ ID NO: 1057690 - RNA, 19 nt, Artificial Sequence
  Description of Artificial Sequence: Synthetic oligonucleotide
aagcuagcccagcgccgca

SEQ ID NO: 1057691 - RNA, 19 nt, Artificial Sequence
  Description of Artificial Sequence: Synthetic oligonucleotide
uuucgauaguuuggcccuc

SEQ ID NO: 1057692 - RNA, 19 nt, Artificial Sequence
  Description of Artificial Sequence: Synthetic oligonucleotide
caaaccccauguuauuacu

SEQ ID NO: 1057693 - RNA, 19 nt, Artificial Sequence
  Description of Artificial Sequence: Synthetic oligonucleotide
ggaugucgguccuuguaga

SEQ ID NO: 1057694 - RNA, 19 nt, Artificial Sequence
  Description of Artificial Sequence: Synthetic oligonucleotide
cugguaacacugggccagg

SEQ ID NO: 1057695 - RNA, 19 nt, Artificial Sequence
  Description of Artificial Sequence: Synthetic oligonucleotide
agaugaacgcaaggcccca

SEQ ID NO: 1057696 - RNA, 19 nt, Artificial Sequence
  Description of Artificial Sequence: Synthetic oligonucleotide
uucgcccucggucguccgu

SEQ ID NO: 1057697 - RNA, 19 nt, Artificial Sequence
  Description of Artificial Sequence: Synthetic oligonucleotide
ccgguucugaacaagacgu

SEQ ID NO: 1057698 - RNA, 19 nt, Artificial Sequence
  Description of Artificial Sequence: Synthetic oligonucleotide
cgcuacaguggaauggcag

SEQ ID NO: 1057699 - RNA, 19 nt, Artificial Sequence
  Description of Artificial Sequence: Synthetic oligonucleotide
ugggucgaaggcccagguu

SEQ ID NO: 1057700 - RNA, 19 nt, Artificial Sequence
  Description of Artificial Sequence: Synthetic oligonucleotide
ccccaauacccuucccugg

SEQ ID NO: 1057701 - RNA, 19 nt, Artificial Sequence
  Description of Artificial Sequence: Synthetic oligonucleotide
caccagugcgccccgacga

SEQ ID NO: 1057702 - RNA, 19 nt, Artificial Sequence
  Description of Artificial Sequence: Synthetic oligonucleotide
ccaugcagcguucggccgg

SEQ ID NO: 1057703 - RNA, 19 nt, Artificial Sequence
  Description of Artificial Sequence: Synthetic oligonucleotide
acucuucgcccucggucgu

SEQ ID NO: 1057704 - RNA, 19 nt, Artificial Sequence
  Description of Artificial Sequence: Synthetic oligonucleotide
agggcguccgcaacagaug

SEQ ID NO: 1057705 - RNA, 19 nt, Artificial Sequence
  Description of Artificial Sequence: Synthetic oligonucleotide
gggagcaguuaccgugucc

SEQ ID NO: 1057706 - RNA, 19 nt, Artificial Sequence
  Description of Artificial Sequence: Synthetic oligonucleotide
gccaugcagcguucggccg

SEQ ID NO: 1057707 - RNA, 19 nt, Artificial Sequence
  Description of Artificial Sequence: Synthetic oligonucleotide
gcggcguauagguuuccug

SEQ ID NO: 1057708 - RNA, 19 nt, Artificial Sequence
  Description of Artificial Sequence: Synthetic oligonucleotide
agacgucggggcacaguuc

SEQ ID NO: 1057709 - RNA, 19 nt, Artificial Sequence
  Description of Artificial Sequence: Synthetic oligonucleotide
uuaccguguccagggcugu

SEQ ID NO: 1057710 - RNA, 19 nt, Artificial Sequence
  Description of Artificial Sequence: Synthetic oligonucleotide
ggucgaaggcccagguugc

SEQ ID NO: 1057711 - RNA, 19 nt, Artificial Sequence
  Description of Artificial Sequence: Synthetic oligonucleotide
gugcgccccgacgaaaccc

SEQ ID NO: 1057712 - RNA, 19 nt, Artificial Sequence
  Description of Artificial Sequence: Synthetic oligonucleotide
uucggccgguucugaacaa

SEQ ID NO: 1057713 - RNA, 19 nt, Artificial Sequence
  Description of Artificial Sequence: Synthetic oligonucleotide
gaggaugagucgcggcgua

SEQ ID NO: 1057714 - RNA, 19 nt, Artificial Sequence
  Description of Artificial Sequence: Synthetic oligonucleotide
gccuggaaccagugggaag

SEQ ID NO: 1057715 - RNA, 19 nt, Artificial Sequence
  Description of Artificial Sequence: Synthetic oligonucleotide
ggguaucaggaagggacug

SEQ ID NO: 1057716 - RNA, 19 nt, Artificial Sequence
  Description of Artificial Sequence: Synthetic oligonucleotide
cacggggaugcuuugcacu

SEQ ID NO: 1057717 - RNA, 19 nt, Artificial Sequence
  Description of Artificial Sequence: Synthetic oligonucleotide
cuguacccagucaggugca

SEQ ID NO: 1057718 - RNA, 19 nt, Artificial Sequence
  Description of Artificial Sequence: Synthetic oligonucleotide
gccucccagagauaaggga

SEQ ID NO: 1057719 - RNA, 19 nt, Artificial Sequence
  Description of Artificial Sequence: Synthetic oligonucleotide
acuuagcagaucagccaaa

SEQ ID NO: 1057720 - RNA, 19 nt, Artificial Sequence
  Description of Artificial Sequence: Synthetic oligonucleotide
agcuagcccagcgccgcag

SEQ ID NO: 1057721 - RNA, 19 nt, Artificial Sequence
  Description of Artificial Sequence: Synthetic oligonucleotide
accagugcgccccgacgaa

SEQ ID NO: 1057722 - RNA, 19 nt, Artificial Sequence
  Description of Artificial Sequence: Synthetic oligonucleotide
cuucgcccucggucguccg

SEQ ID NO: 1057723 - RNA, 19 nt, Artificial Sequence
  Description of Artificial Sequence: Synthetic oligonucleotide
guuacugguauggcuugcu

SEQ ID NO: 1057724 - RNA, 19 nt, Artificial Sequence
  Description of Artificial Sequence: Synthetic oligonucleotide
ggucguccgucccagcgca

SEQ ID NO: 1057725 - RNA, 19 nt, Artificial Sequence
  Description of Artificial Sequence: Synthetic oligonucleotide
gcgauagggagcaguuacc

SEQ ID NO: 1057726 - RNA, 19 nt, Artificial Sequence
  Description of Artificial Sequence: Synthetic oligonucleotide
gcguccgcaacagauguga

SEQ ID NO: 1057727 - RNA, 19 nt, Artificial Sequence
  Description of Artificial Sequence: Synthetic oligonucleotide
gaugaacgcaaggccccaa

SEQ ID NO: 1057728 - RNA, 19 nt, Artificial Sequence
  Description of Artificial Sequence: Synthetic oligonucleotide
cagggcguccgcaacagau

SEQ ID NO: 1057729 - RNA, 19 nt, Artificial Sequence
  Description of Artificial Sequence: Synthetic oligonucleotide
cagacaccaucaguacuca

SEQ ID NO: 1057730 - RNA, 19 nt, Artificial Sequence
  Description of Artificial Sequence: Synthetic oligonucleotide
cuuagcagaucagccaaau

SEQ ID NO: 1057731 - RNA, 19 nt, Artificial Sequence
  Description of Artificial Sequence: Synthetic oligonucleotide
cuauaccccucagcaccac

SEQ ID NO: 1057732 - RNA, 19 nt, Artificial Sequence
  Description of Artificial Sequence: Synthetic oligonucleotide
caagucuguugagcucuuc

SEQ ID NO: 1057733 - RNA, 19 nt, Artificial Sequence
  Description of Artificial Sequence: Synthetic oligonucleotide
gucgcggcguauagguuuc

SEQ ID NO: 1057734 - RNA, 19 nt, Artificial Sequence
  Description of Artificial Sequence: Synthetic oligonucleotide
ggaagucugaccagacucu

SEQ ID NO: 1057735 - RNA, 19 nt, Artificial Sequence
  Description of Artificial Sequence: Synthetic oligonucleotide
cguauagguuuccuggcca

SEQ ID NO: 1057736 - RNA, 19 nt, Artificial Sequence
  Description of Artificial Sequence: Synthetic oligonucleotide
gggacagaccaaagagcug

SEQ ID NO: 1057737 - RNA, 19 nt, Artificial Sequence
  Description of Artificial Sequence: Synthetic oligonucleotide
ggcgacucuucgcccucgg

SEQ ID NO: 1057738 - RNA, 19 nt, Artificial Sequence
  Description of Artificial Sequence: Synthetic oligonucleotide
cgauaguuuggcccuccag

SEQ ID NO: 1057739 - RNA, 19 nt, Artificial Sequence
  Description of Artificial Sequence: Synthetic oligonucleotide
ggaggugcacucugaggaa

SEQ ID NO: 1057740 - RNA, 19 nt, Artificial Sequence
  Description of Artificial Sequence: Synthetic oligonucleotide
cuuaagacucuaggaugcu

SEQ ID NO: 1057741 - RNA, 19 nt, Artificial Sequence
  Description of Artificial Sequence: Synthetic oligonucleotide
cgacgaaacccgagaaaug

SEQ ID NO: 1057742 - RNA, 19 nt, Artificial Sequence
  Description of Artificial Sequence: Synthetic oligonucleotide
cugcacucagaagguccug

SEQ ID NO: 1057743 - RNA, 19 nt, Artificial Sequence
  Description of Artificial Sequence: Synthetic oligonucleotide
ucgagccgacccguuucac

SEQ ID NO: 1057744 - RNA, 19 nt, Artificial Sequence
  Description of Artificial Sequence: Synthetic oligonucleotide
cgagccgacccguuucacc

SEQ ID NO: 1057745 - RNA, 19 nt, Artificial Sequence
  Description of Artificial Sequence: Synthetic oligonucleotide
gucgguccuuguagaggcc

SEQ ID NO: 1057746 - RNA, 19 nt, Artificial Sequence
  Description of Artificial Sequence: Synthetic oligonucleotide
cguucggccgguucugaac

SEQ ID NO: 1057747 - RNA, 19 nt, Artificial Sequence
  Description of Artificial Sequence: Synthetic oligonucleotide
aggaugagucgcggcguau

SEQ ID NO: 1057748 - RNA, 19 nt, Artificial Sequence
  Description of Artificial Sequence: Synthetic oligonucleotide
gcccugcaaauagucacac

SEQ ID NO: 1057749 - RNA, 19 nt, Artificial Sequence
  Description of Artificial Sequence: Synthetic oligonucleotide
cagcguucggccgguucug

SEQ ID NO: 1057750 - RNA, 19 nt, Artificial Sequence
  Description of Artificial Sequence: Synthetic oligonucleotide
gcaagggugucccuggguu

SEQ ID NO: 1057751 - RNA, 19 nt, Artificial Sequence
  Description of Artificial Sequence: Synthetic oligonucleotide
uccgaggguggaggugcac

SEQ ID NO: 1057752 - RNA, 19 nt, Artificial Sequence
  Description of Artificial Sequence: Synthetic oligonucleotide
gcagcguucggccgguucu

SEQ ID NO: 1057753 - RNA, 19 nt, Artificial Sequence
  Description of Artificial Sequence: Synthetic oligonucleotide
gccccgacgaaacccgaga

SEQ ID NO: 1057754 - RNA, 19 nt, Artificial Sequence
  Description of Artificial Sequence: Synthetic oligonucleotide
caggcgauagggagcaguu

SEQ ID NO: 1057755 - RNA, 19 nt, Artificial Sequence
  Description of Artificial Sequence: Synthetic oligonucleotide
agcguucggccgguucuga

SEQ ID NO: 1057756 - RNA, 19 nt, Artificial Sequence
  Description of Artificial Sequence: Synthetic oligonucleotide
gggcguccgcaacagaugu

SEQ ID NO: 1057757 - RNA, 19 nt, Artificial Sequence
  Description of Artificial Sequence: Synthetic oligonucleotide
ccguguccagggcuguagc

SEQ ID NO: 1057758 - RNA, 19 nt, Artificial Sequence
  Description of Artificial Sequence: Synthetic oligonucleotide
ccaagauugcagggaccag

SEQ ID NO: 1057759 - RNA, 19 nt, Artificial Sequence
  Description of Artificial Sequence: Synthetic oligonucleotide
ggguaagcuucuucucugu

SEQ ID NO: 1057760 - RNA, 19 nt, Artificial Sequence
  Description of Artificial Sequence: Synthetic oligonucleotide
aggcgauagggagcaguua

SEQ ID NO: 1057761 - RNA, 19 nt, Artificial Sequence
  Description of Artificial Sequence: Synthetic oligonucleotide
aggagacgauagauauuuu

SEQ ID NO: 1057762 - RNA, 19 nt, Artificial Sequence
  Description of Artificial Sequence: Synthetic oligonucleotide
ucgcggcguauagguuucc

SEQ ID NO: 1057763 - RNA, 19 nt, Artificial Sequence
  Description of Artificial Sequence: Synthetic oligonucleotide
ggguucuuuggguaagcuu

SEQ ID NO: 1057764 - RNA, 19 nt, Artificial Sequence
  Description of Artificial Sequence: Synthetic oligonucleotide
ccauucccuuguaacugca

SEQ ID NO: 1057765 - RNA, 19 nt, Artificial Sequence
  Description of Artificial Sequence: Synthetic oligonucleotide
ggaugagucgcggcguaua

SEQ ID NO: 1057766 - RNA, 19 nt, Artificial Sequence
  Description of Artificial Sequence: Synthetic oligonucleotide
cuggugcaaggaugaagau

SEQ ID NO: 1057767 - RNA, 19 nt, Artificial Sequence
  Description of Artificial Sequence: Synthetic oligonucleotide
ccgacgaaacccgagaaau

SEQ ID NO: 1057768 - RNA, 19 nt, Artificial Sequence
  Description of Artificial Sequence: Synthetic oligonucleotide
cccggccugaauacucauc

SEQ ID NO: 1057769 - RNA, 19 nt, Artificial Sequence
  Description of Artificial Sequence: Synthetic oligonucleotide
cucuucgcccucggucguc

SEQ ID NO: 1057770 - RNA, 19 nt, Artificial Sequence
  Description of Artificial Sequence: Synthetic oligonucleotide
uaccguguccagggcugua

SEQ ID NO: 1057771 - RNA, 19 nt, Artificial Sequence
  Description of Artificial Sequence: Synthetic oligonucleotide
ggcguccgcaacagaugug

SEQ ID NO: 1057772 - RNA, 19 nt, Artificial Sequence
  Description of Artificial Sequence: Synthetic oligonucleotide
gcgcauguauggagaccag

SEQ ID NO: 1057773 - RNA, 19 nt, Artificial Sequence
  Description of Artificial Sequence: Synthetic oligonucleotide
ccucggucguccgucccag

SEQ ID NO: 1057774 - RNA, 19 nt, Artificial Sequence
  Description of Artificial Sequence: Synthetic oligonucleotide
cagauccaugaggaugagu

SEQ ID NO: 1057775 - RNA, 19 nt, Artificial Sequence
  Description of Artificial Sequence: Synthetic oligonucleotide
cccgacgaaacccgagaaa

SEQ ID NO: 1057776 - RNA, 19 nt, Artificial Sequence
  Description of Artificial Sequence: Synthetic oligonucleotide
gccacucugcagggcgucc

SEQ ID NO: 1057777 - RNA, 19 nt, Artificial Sequence
  Description of Artificial Sequence: Synthetic oligonucleotide
caagacgucggggcacagu

SEQ ID NO: 1057778 - RNA, 19 nt, Artificial Sequence
  Description of Artificial Sequence: Synthetic oligonucleotide
ccaugcuacuguagugucu

SEQ ID NO: 1057779 - RNA, 19 nt, Artificial Sequence
  Description of Artificial Sequence: Synthetic oligonucleotide
ccagcgcagcauccugcug

SEQ ID NO: 1057780 - RNA, 19 nt, Artificial Sequence
  Description of Artificial Sequence: Synthetic oligonucleotide
ccgcaacagaugugaagaa

SEQ ID NO: 1057781 - RNA, 19 nt, Artificial Sequence
  Description of Artificial Sequence: Synthetic oligonucleotide
gggguccauggagugucuc

SEQ ID NO: 1057782 - RNA, 19 nt, Artificial Sequence
  Description of Artificial Sequence: Synthetic oligonucleotide
ccgacccguuucaccauca

SEQ ID NO: 1057783 - RNA, 19 nt, Artificial Sequence
  Description of Artificial Sequence: Synthetic oligonucleotide
agcuucgagccgacccguu

SEQ ID NO: 1057784 - RNA, 19 nt, Artificial Sequence
  Description of Artificial Sequence: Synthetic oligonucleotide
gcccucggucguccguccc

SEQ ID NO: 1057785 - RNA, 19 nt, Artificial Sequence
  Description of Artificial Sequence: Synthetic oligonucleotide
ccaggguaucaggaaggga

SEQ ID NO: 1057786 - RNA, 19 nt, Artificial Sequence
  Description of Artificial Sequence: Synthetic oligonucleotide
caugcagcguucggccggu

SEQ ID NO: 1057787 - RNA, 19 nt, Artificial Sequence
  Description of Artificial Sequence: Synthetic oligonucleotide
cccguuucaccaucauggu

SEQ ID NO: 1057788 - RNA, 19 nt, Artificial Sequence
  Description of Artificial Sequence: Synthetic oligonucleotide
cgcauguauggagaccaga

SEQ ID NO: 1057789 - RNA, 19 nt, Artificial Sequence
  Description of Artificial Sequence: Synthetic oligonucleotide
ccccggcgacucuucgccc

SEQ ID NO: 1057790 - RNA, 19 nt, Artificial Sequence
  Description of Artificial Sequence: Synthetic oligonucleotide
ccccgacgaaacccgagaa

SEQ ID NO: 1057791 - RNA, 19 nt, Artificial Sequence
  Description of Artificial Sequence: Synthetic oligonucleotide
gcuguguuuaggagacgau

SEQ ID NO: 1057792 - RNA, 19 nt, Artificial Sequence
  Description of Artificial Sequence: Synthetic oligonucleotide
cgccccgacgaaacccgag

SEQ ID NO: 1057793 - RNA, 19 nt, Artificial Sequence
  Description of Artificial Sequence: Synthetic oligonucleotide
gcguucggccgguucugaa

SEQ ID NO: 1057794 - RNA, 19 nt, Artificial Sequence
  Description of Artificial Sequence: Synthetic oligonucleotide
gcgcuacaguggaauggca

SEQ ID NO: 1057795 - RNA, 19 nt, Artificial Sequence
  Description of Artificial Sequence: Synthetic oligonucleotide
gcuucgagccgacccguuu

SEQ ID NO: 1057796 - RNA, 19 nt, Artificial Sequence
  Description of Artificial Sequence: Synthetic oligonucleotide
cccucggucguccguccca

SEQ ID NO: 1057797 - RNA, 19 nt, Artificial Sequence
  Description of Artificial Sequence: Synthetic oligonucleotide
cacucuccccuuggccaaa

SEQ ID NO: 1057798 - RNA, 19 nt, Artificial Sequence
  Description of Artificial Sequence: Synthetic oligonucleotide
cuccuguacacggcagcuu

SEQ ID NO: 1057799 - RNA, 19 nt, Artificial Sequence
  Description of Artificial Sequence: Synthetic oligonucleotide
ggauggcgcuacaguggaa

SEQ ID NO: 1057800 - RNA, 19 nt, Artificial Sequence
  Description of Artificial Sequence: Synthetic oligonucleotide
gcgacucuucgcccucggu

SEQ ID NO: 1057801 - RNA, 19 nt, Artificial Sequence
  Description of Artificial Sequence: Synthetic oligonucleotide
cguccgcaacagaugugaa

SEQ ID NO: 1057802 - RNA, 19 nt, Artificial Sequence
  Description of Artificial Sequence: Synthetic oligonucleotide
ccgaggguggaggugcacu

SEQ ID NO: 1057803 - RNA, 19 nt, Artificial Sequence
  Description of Artificial Sequence: Synthetic oligonucleotide
ccagugcgccccgacgaaa

SEQ ID NO: 1057804 - RNA, 19 nt, Artificial Sequence
  Description of Artificial Sequence: Synthetic oligonucleotide
gggccccgcccgccauacc

SEQ ID NO: 1057805 - RNA, 19 nt, Artificial Sequence
  Description of Artificial Sequence: Synthetic oligonucleotide
augcagcguucggccgguu

SEQ ID NO: 1057806 - RNA, 19 nt, Artificial Sequence
  Description of Artificial Sequence: Synthetic oligonucleotide
gcgccccgacgaaacccga

SEQ ID NO: 1057807 - RNA, 19 nt, Artificial Sequence
  Description of Artificial Sequence: Synthetic oligonucleotide
gccgcaggucaagucuguu

SEQ ID NO: 1057808 - RNA, 19 nt, Artificial Sequence
  Description of Artificial Sequence: Synthetic oligonucleotide
cgacccguuucaccaucau

SEQ ID NO: 1057809 - RNA, 19 nt, Artificial Sequence
  Description of Artificial Sequence: Synthetic oligonucleotide
cgcggcguauagguuuccu

SEQ ID NO: 1057810 - RNA, 19 nt, Artificial Sequence
  Description of Artificial Sequence: Synthetic oligonucleotide
gcgcagcauccugcugguu

SEQ ID NO: 1057811 - RNA, 19 nt, Artificial Sequence
  Description of Artificial Sequence: Synthetic oligonucleotide
aauuugaacgauuacacuc

SEQ ID NO: 1057812 - RNA, 19 nt, Artificial Sequence
  Description of Artificial Sequence: Synthetic oligonucleotide
aauacuaccaugcuggugu

SEQ ID NO: 1057813 - RNA, 19 nt, Artificial Sequence
  Description of Artificial Sequence: Synthetic oligonucleotide
auuacuucuaaacaucagc

SEQ ID NO: 1057814 - RNA, 19 nt, Artificial Sequence
  Description of Artificial Sequence: Synthetic oligonucleotide
ucaauuguggguuugaaag

SEQ ID NO: 1057815 - RNA, 19 nt, Artificial Sequence
  Description of Artificial Sequence: Synthetic oligonucleotide
aguacuauugcuguuaugc

SEQ ID NO: 1057816 - RNA, 19 nt, Artificial Sequence
  Description of Artificial Sequence: Synthetic oligonucleotide
uuacaauucacccaaacug

SEQ ID NO: 1057817 - RNA, 19 nt, Artificial Sequence
  Description of Artificial Sequence: Synthetic oligonucleotide
aacaucagcauguacagag

SEQ ID NO: 1057818 - RNA, 19 nt, Artificial Sequence
  Description of Artificial Sequence: Synthetic oligonucleotide
aaauccuucacacaucguc

SEQ ID NO: 1057819 - RNA, 19 nt, Artificial Sequence
  Description of Artificial Sequence: Synthetic oligonucleotide
aauuaaaugagucgucguc

SEQ ID NO: 1057820 - RNA, 19 nt, Artificial Sequence
  Description of Artificial Sequence: Synthetic oligonucleotide
uucacuacauaaauuauag

SEQ ID NO: 1057821 - RNA, 19 nt, Artificial Sequence
  Description of Artificial Sequence: Synthetic oligonucleotide
ucuuugaagauacuuaacc

SEQ ID NO: 1057822 - RNA, 19 nt, Artificial Sequence
  Description of Artificial Sequence: Synthetic oligonucleotide
uaacuguucacuaauaacu

SEQ ID NO: 1057823 - RNA, 19 nt, Artificial Sequence
  Description of Artificial Sequence: Synthetic oligonucleotide
acacuaaaauuucuaaagc

SEQ ID NO: 1057824 - RNA, 19 nt, Artificial Sequence
  Description of Artificial Sequence: Synthetic oligonucleotide
uguuggaucaaccaaaguc

SEQ ID NO: 1057825 - RNA, 19 nt, Artificial Sequence
  Description of Artificial Sequence: Synthetic oligonucleotide
aacgauuacacuccuucac

SEQ ID NO: 1057826 - RNA, 19 nt, Artificial Sequence
  Description of Artificial Sequence: Synthetic oligonucleotide
cauauguagacucaugagg

SEQ ID NO: 1057827 - RNA, 19 nt, Artificial Sequence
  Description of Artificial Sequence: Synthetic oligonucleotide
ugaagauuacuucuaaaca

SEQ ID NO: 1057828 - RNA, 19 nt, Artificial Sequence
  Description of Artificial Sequence: Synthetic oligonucleotide
aaaguccucauucuacaac

SEQ ID NO: 1057829 - RNA, 19 nt, Artificial Sequence
  Description of Artificial Sequence: Synthetic oligonucleotide
uaaccuaugacuauuugac

SEQ ID NO: 1057830 - RNA, 19 nt, Artificial Sequence
  Description of Artificial Sequence: Synthetic oligonucleotide
cuagauuuaggauucgggg

SEQ ID NO: 1057831 - RNA, 19 nt, Artificial Sequence
  Description of Artificial Sequence: Synthetic oligonucleotide
guuauuugaagucagcuac

SEQ ID NO: 1057832 - RNA, 19 nt, Artificial Sequence
  Description of Artificial Sequence: Synthetic oligonucleotide
uuuaaagauggaaaucccc

SEQ ID NO: 1057833 - RNA, 19 nt, Artificial Sequence
  Description of Artificial Sequence: Synthetic oligonucleotide
auuguguagguuuuguagg

SEQ ID NO: 1057834 - RNA, 19 nt, Artificial Sequence
  Description of Artificial Sequence: Synthetic oligonucleotide
auuaaaugagucgucgucc

SEQ ID NO: 1057835 - RNA, 19 nt, Artificial Sequence
  Description of Artificial Sequence: Synthetic oligonucleotide
uguugauggacuaauacuc

SEQ ID NO: 1057836 - RNA, 19 nt, Artificial Sequence
  Description of Artificial Sequence: Synthetic oligonucleotide
uuacuucuaaacaucagca

SEQ ID NO: 1057837 - RNA, 19 nt, Artificial Sequence
  Description of Artificial Sequence: Synthetic oligonucleotide
uucacuaauaacuuggaau

SEQ ID NO: 1057838 - RNA, 19 nt, Artificial Sequence
  Description of Artificial Sequence: Synthetic oligonucleotide
gauuaaguuugucaacagg

SEQ ID NO: 1057839 - RNA, 19 nt, Artificial Sequence
  Description of Artificial Sequence: Synthetic oligonucleotide
uuuacaauucacccaaacu

SEQ ID NO: 1057840 - RNA, 19 nt, Artificial Sequence
  Description of Artificial Sequence: Synthetic oligonucleotide
uuuguugauggacuaauac

SEQ ID NO: 1057841 - RNA, 19 nt, Artificial Sequence
  Description of Artificial Sequence: Synthetic oligonucleotide
auaauguucaacacagccc

SEQ ID NO: 1057842 - RNA, 19 nt, Artificial Sequence
  Description of Artificial Sequence: Synthetic oligonucleotide
uggacuaauacucuuggcu

SEQ ID NO: 1057843 - RNA, 19 nt, Artificial Sequence
  Description of Artificial Sequence: Synthetic oligonucleotide
aaagguauuaaaguugcca

SEQ ID NO: 1057844 - RNA, 19 nt, Artificial Sequence
  Description of Artificial Sequence: Synthetic oligonucleotide
aauuagccaaguuccuugg

SEQ ID NO: 1057845 - RNA, 19 nt, Artificial Sequence
  Description of Artificial Sequence: Synthetic oligonucleotide
gauggacuaauacucuugg

SEQ ID NO: 1057846 - RNA, 19 nt, Artificial Sequence
  Description of Artificial Sequence: Synthetic oligonucleotide
ugauagaagaaagucaaug

SEQ ID NO: 1057847 - RNA, 19 nt, Artificial Sequence
  Description of Artificial Sequence: Synthetic oligonucleotide
cuguucacuaauaacuugg

SEQ ID NO: 1057848 - RNA, 19 nt, Artificial Sequence
  Description of Artificial Sequence: Synthetic oligonucleotide
uauccaaguucuuugaaga

SEQ ID NO: 1057849 - RNA, 19 nt, Artificial Sequence
  Description of Artificial Sequence: Synthetic oligonucleotide
acuucuaaacaucagcaug

SEQ ID NO: 1057850 - RNA, 19 nt, Artificial Sequence
  Description of Artificial Sequence: Synthetic oligonucleotide
uugacgaucgaauaaucug

SEQ ID NO: 1057851 - RNA, 19 nt, Artificial Sequence
  Description of Artificial Sequence: Synthetic oligonucleotide
uauaucucuuucuugguga

SEQ ID NO: 1057852 - RNA, 19 nt, Artificial Sequence
  Description of Artificial Sequence: Synthetic oligonucleotide
uauuaaaguugccaacacc

SEQ ID NO: 1057853 - RNA, 19 nt, Artificial Sequence
  Description of Artificial Sequence: Synthetic oligonucleotide
ugaacgauuacacuccuuc

SEQ ID NO: 1057854 - RNA, 19 nt, Artificial Sequence
  Description of Artificial Sequence: Synthetic oligonucleotide
cuuggauucaagagcaagg

SEQ ID NO: 1057855 - RNA, 19 nt, Artificial Sequence
  Description of Artificial Sequence: Synthetic oligonucleotide
aagguauuaaaguugccaa

SEQ ID NO: 1057856 - RNA, 19 nt, Artificial Sequence
  Description of Artificial Sequence: Synthetic oligonucleotide
uacaauucacccaaacuga

SEQ ID NO: 1057857 - RNA, 19 nt, Artificial Sequence
  Description of Artificial Sequence: Synthetic oligonucleotide
uggaaagaacaucaguuug

SEQ ID NO: 1057858 - RNA, 19 nt, Artificial Sequence
  Description of Artificial Sequence: Synthetic oligonucleotide
auagcuaucucaauacuac

SEQ ID NO: 1057859 - RNA, 19 nt, Artificial Sequence
  Description of Artificial Sequence: Synthetic oligonucleotide
auagcuguaagucuuuugu

SEQ ID NO: 1057860 - RNA, 19 nt, Artificial Sequence
  Description of Artificial Sequence: Synthetic oligonucleotide
auuaaaguugccaacacca

SEQ ID NO: 1057861 - RNA, 19 nt, Artificial Sequence
  Description of Artificial Sequence: Synthetic oligonucleotide
gaucgaauaaucuguugag

SEQ ID NO: 1057862 - RNA, 19 nt, Artificial Sequence
  Description of Artificial Sequence: Synthetic oligonucleotide
gcgaggaagaauuugaacg

SEQ ID NO: 1057863 - RNA, 19 nt, Artificial Sequence
  Description of Artificial Sequence: Synthetic oligonucleotide
uucuuggugaguacuauug

SEQ ID NO: 1057864 - RNA, 19 nt, Artificial Sequence
  Description of Artificial Sequence: Synthetic oligonucleotide
uacuauuccauguauuugu

SEQ ID NO: 1057865 - RNA, 19 nt, Artificial Sequence
  Description of Artificial Sequence: Synthetic oligonucleotide
ucuuacauucccaaguaaa

SEQ ID NO: 1057866 - RNA, 19 nt, Artificial Sequence
  Description of Artificial Sequence: Synthetic oligonucleotide
gacuauuugacauagaguu

SEQ ID NO: 1057867 - RNA, 19 nt, Artificial Sequence
  Description of Artificial Sequence: Synthetic oligonucleotide
aguuaaacgaggcugcuga

SEQ ID NO: 1057868 - RNA, 19 nt, Artificial Sequence
  Description of Artificial Sequence: Synthetic oligonucleotide
guuuaguuaaacgaggcug

SEQ ID NO: 1057869 - RNA, 19 nt, Artificial Sequence
  Description of Artificial Sequence: Synthetic oligonucleotide
cuagucagagaaaugcugc

SEQ ID NO: 1057870 - RNA, 19 nt, Artificial Sequence
  Description of Artificial Sequence: Synthetic oligonucleotide
auauccaaguucuuugaag

SEQ ID NO: 1057871 - RNA, 19 nt, Artificial Sequence
  Description of Artificial Sequence: Synthetic oligonucleotide
aauccuucacacaucgucg

SEQ ID NO: 1057872 - RNA, 19 nt, Artificial Sequence
  Description of Artificial Sequence: Synthetic oligonucleotide
caaauuaaaugagucgucg

SEQ ID NO: 1057873 - RNA, 19 nt, Artificial Sequence
  Description of Artificial Sequence: Synthetic oligonucleotide
guuggaucaaccaaagucc

SEQ ID NO: 1057874 - RNA, 19 nt, Artificial Sequence
  Description of Artificial Sequence: Synthetic oligonucleotide
uuauaucucuuucuuggug

SEQ ID NO: 1057875 - RNA, 19 nt, Artificial Sequence
  Description of Artificial Sequence: Synthetic oligonucleotide
gaauuagccaaguuccuug

SEQ ID NO: 1057876 - RNA, 19 nt, Artificial Sequence
  Description of Artificial Sequence: Synthetic oligonucleotide
uguuaggaaauccuucaca

SEQ ID NO: 1057877 - RNA, 19 nt, Artificial Sequence
  Description of Artificial Sequence: Synthetic oligonucleotide
aaaugagucgucguccuuc

SEQ ID NO: 1057878 - RNA, 19 nt, Artificial Sequence
  Description of Artificial Sequence: Synthetic oligonucleotide
aauuguggguuugaaagug

SEQ ID NO: 1057879 - RNA, 19 nt, Artificial Sequence
  Description of Artificial Sequence: Synthetic oligonucleotide
acuuaaagguauuaaaguu

SEQ ID NO: 1057880 - RNA, 19 nt, Artificial Sequence
  Description of Artificial Sequence: Synthetic oligonucleotide
aacaucuuacauucccaag

SEQ ID NO: 1057881 - RNA, 19 nt, Artificial Sequence
  Description of Artificial Sequence: Synthetic oligonucleotide
ugacgaucgaauaaucugu

SEQ ID NO: 1057882 - RNA, 19 nt, Artificial Sequence
  Description of Artificial Sequence: Synthetic oligonucleotide
ucaauguuggaucaaccaa

SEQ ID NO: 1057883 - RNA, 19 nt, Artificial Sequence
  Description of Artificial Sequence: Synthetic oligonucleotide
ucgaauaaucuguugagaa

SEQ ID NO: 1057884 - RNA, 19 nt, Artificial Sequence
  Description of Artificial Sequence: Synthetic oligonucleotide
acaucuuacauucccaagu

SEQ ID NO: 1057885 - RNA, 19 nt, Artificial Sequence
  Description of Artificial Sequence: Synthetic oligonucleotide
uagaguuauuugaagucag

SEQ ID NO: 1057886 - RNA, 19 nt, Artificial Sequence
  Description of Artificial Sequence: Synthetic oligonucleotide
uuguugauggacuaauacu

SEQ ID NO: 1057887 - RNA, 19 nt, Artificial Sequence
  Description of Artificial Sequence: Synthetic oligonucleotide
uuccuuggauucaagagca

SEQ ID NO: 1057888 - RNA, 19 nt, Artificial Sequence
  Description of Artificial Sequence: Synthetic oligonucleotide
gaagguuuccugcuacugg

SEQ ID NO: 1057889 - RNA, 19 nt, Artificial Sequence
  Description of Artificial Sequence: Synthetic oligonucleotide
aauccagauagcuguaagu

SEQ ID NO: 1057890 - RNA, 19 nt, Artificial Sequence
  Description of Artificial Sequence: Synthetic oligonucleotide
uuuuacaauucacccaaac

SEQ ID NO: 1057891 - RNA, 19 nt, Artificial Sequence
  Description of Artificial Sequence: Synthetic oligonucleotide
uguaacuguucacuaauaa

SEQ ID NO: 1057892 - RNA, 19 nt, Artificial Sequence
  Description of Artificial Sequence: Synthetic oligonucleotide
ucucaauacuaccaugcug

SEQ ID NO: 1057893 - RNA, 19 nt, Artificial Sequence
  Description of Artificial Sequence: Synthetic oligonucleotide
uaaugaccagcauucuugg

SEQ ID NO: 1057894 - RNA, 19 nt, Artificial Sequence
  Description of Artificial Sequence: Synthetic oligonucleotide
uugacuuaaagguauuaaa

SEQ ID NO: 1057895 - RNA, 19 nt, Artificial Sequence
  Description of Artificial Sequence: Synthetic oligonucleotide
guugagaaaucaccgaagc

SEQ ID NO: 1057896 - RNA, 19 nt, Artificial Sequence
  Description of Artificial Sequence: Synthetic oligonucleotide
agguauuaaaguugccaac

SEQ ID NO: 1057897 - RNA, 19 nt, Artificial Sequence
  Description of Artificial Sequence: Synthetic oligonucleotide
auucuuaacuggcuguguc

SEQ ID NO: 1057898 - RNA, 19 nt, Artificial Sequence
  Description of Artificial Sequence: Synthetic oligonucleotide
aagucaauguuggaucaac

SEQ ID NO: 1057899 - RNA, 19 nt, Artificial Sequence
  Description of Artificial Sequence: Synthetic oligonucleotide
uucauauggcuauauccag

SEQ ID NO: 1057900 - RNA, 19 nt, Artificial Sequence
  Description of Artificial Sequence: Synthetic oligonucleotide
ucugcguucucuuuugucu

SEQ ID NO: 1057901 - RNA, 19 nt, Artificial Sequence
  Description of Artificial Sequence: Synthetic oligonucleotide
uacuuauccacuccagaug

SEQ ID NO: 1057902 - RNA, 19 nt, Artificial Sequence
  Description of Artificial Sequence: Synthetic oligonucleotide
aaacugagagauguaucac

SEQ ID NO: 1057903 - RNA, 19 nt, Artificial Sequence
  Description of Artificial Sequence: Synthetic oligonucleotide
ccagaauuagccaaguucc

SEQ ID NO: 1057904 - RNA, 19 nt, Artificial Sequence
  Description of Artificial Sequence: Synthetic oligonucleotide
aauaaucuguugagaaauc

SEQ ID NO: 1057905 - RNA, 19 nt, Artificial Sequence
  Description of Artificial Sequence: Synthetic oligonucleotide
uugguucucucucauauuc

SEQ ID NO: 1057906 - RNA, 19 nt, Artificial Sequence
  Description of Artificial Sequence: Synthetic oligonucleotide
ugauggacuaauacucuug

SEQ ID NO: 1057907 - RNA, 19 nt, Artificial Sequence
  Description of Artificial Sequence: Synthetic oligonucleotide
uggagcucuagauuuagga

SEQ ID NO: 1057908 - RNA, 19 nt, Artificial Sequence
  Description of Artificial Sequence: Synthetic oligonucleotide
uguacuuauccacuccaga

SEQ ID NO: 1057909 - RNA, 19 nt, Artificial Sequence
  Description of Artificial Sequence: Synthetic oligonucleotide
ugacuauuugacauagagu

SEQ ID NO: 1057910 - RNA, 19 nt, Artificial Sequence
  Description of Artificial Sequence: Synthetic oligonucleotide
uaaacgaggcugcugauua

SEQ ID NO: 1057911 - RNA, 19 nt, Artificial Sequence
  Description of Artificial Sequence: Synthetic oligonucleotide
guaacuguucacuaauaac

SEQ ID NO: 1057912 - RNA, 19 nt, Artificial Sequence
  Description of Artificial Sequence: Synthetic oligonucleotide
uucucgucaguuuaguuaa

SEQ ID NO: 1057913 - RNA, 19 nt, Artificial Sequence
  Description of Artificial Sequence: Synthetic oligonucleotide
uccuuuaauagucuguguu

SEQ ID NO: 1057914 - RNA, 19 nt, Artificial Sequence
  Description of Artificial Sequence: Synthetic oligonucleotide
cagguuuggggauuaagcc

SEQ ID NO: 1057915 - RNA, 19 nt, Artificial Sequence
  Description of Artificial Sequence: Synthetic oligonucleotide
uggaaauccccucaacugu

SEQ ID NO: 1057916 - RNA, 19 nt, Artificial Sequence
  Description of Artificial Sequence: Synthetic oligonucleotide
uguagacucaugaggaaaa

SEQ ID NO: 1057917 - RNA, 19 nt, Artificial Sequence
  Description of Artificial Sequence: Synthetic oligonucleotide
ucacacaucgucgucaucu

SEQ ID NO: 1057918 - RNA, 19 nt, Artificial Sequence
  Description of Artificial Sequence: Synthetic oligonucleotide
caaacugagagauguauca

SEQ ID NO: 1057919 - RNA, 19 nt, Artificial Sequence
  Description of Artificial Sequence: Synthetic oligonucleotide
gcuauauccagaauuagcc

SEQ ID NO: 1057920 - RNA, 19 nt, Artificial Sequence
  Description of Artificial Sequence: Synthetic oligonucleotide
ucuccuuuaauagucugug

SEQ ID NO: 1057921 - RNA, 19 nt, Artificial Sequence
  Description of Artificial Sequence: Synthetic oligonucleotide
ucacacuaaaauuucuaaa

SEQ ID NO: 1057922 - RNA, 19 nt, Artificial Sequence
  Description of Artificial Sequence: Synthetic oligonucleotide
aagguugacgaucgaauaa

SEQ ID NO: 1057923 - RNA, 19 nt, Artificial Sequence
  Description of Artificial Sequence: Synthetic oligonucleotide
aauuuguugauggacuaau

SEQ ID NO: 1057924 - RNA, 19 nt, Artificial Sequence
  Description of Artificial Sequence: Synthetic oligonucleotide
uuaaaugagucgucguccu

SEQ ID NO: 1057925 - RNA, 19 nt, Artificial Sequence
  Description of Artificial Sequence: Synthetic oligonucleotide
ucuuggugaguacuauugc

SEQ ID NO: 1057926 - RNA, 19 nt, Artificial Sequence
  Description of Artificial Sequence: Synthetic oligonucleotide
caguuuaguuaaacgaggc

SEQ ID NO: 1057927 - RNA, 19 nt, Artificial Sequence
  Description of Artificial Sequence: Synthetic oligonucleotide
gacuuaaagguauuaaagu

SEQ ID NO: 1057928 - RNA, 19 nt, Artificial Sequence
  Description of Artificial Sequence: Synthetic oligonucleotide
uguucaacacagcccaaca

SEQ ID NO: 1057929 - RNA, 19 nt, Artificial Sequence
  Description of Artificial Sequence: Synthetic oligonucleotide
auggacuaauacucuuggc

SEQ ID NO: 1057930 - RNA, 19 nt, Artificial Sequence
  Description of Artificial Sequence: Synthetic oligonucleotide
uaucacacuaaaauuucua

SEQ ID NO: 1057931 - RNA, 19 nt, Artificial Sequence
  Description of Artificial Sequence: Synthetic oligonucleotide
acuaauaacuuggaauucu

SEQ ID NO: 1057932 - RNA, 19 nt, Artificial Sequence
  Description of Artificial Sequence: Synthetic oligonucleotide
ugaccagcauucuuggagc

SEQ ID NO: 1057933 - RNA, 19 nt, Artificial Sequence
  Description of Artificial Sequence: Synthetic oligonucleotide
ugaagauacuuaaccuaug

SEQ ID NO: 1057934 - RNA, 19 nt, Artificial Sequence
  Description of Artificial Sequence: Synthetic oligonucleotide
uauuaccuuucuuaaugac

SEQ ID NO: 1057935 - RNA, 19 nt, Artificial Sequence
  Description of Artificial Sequence: Synthetic oligonucleotide
auagaguuauuugaaguca

SEQ ID NO: 1057936 - RNA, 19 nt, Artificial Sequence
  Description of Artificial Sequence: Synthetic oligonucleotide
ucaggauuuaaagauggaa

SEQ ID NO: 1057937 - RNA, 19 nt, Artificial Sequence
  Description of Artificial Sequence: Synthetic oligonucleotide
uucccauacaccugcagcu

SEQ ID NO: 1057938 - RNA, 19 nt, Artificial Sequence
  Description of Artificial Sequence: Synthetic oligonucleotide
uacuauugcuguuaugcaa

SEQ ID NO: 1057939 - RNA, 19 nt, Artificial Sequence
  Description of Artificial Sequence: Synthetic oligonucleotide
aguuuaguuaaacgaggcu

SEQ ID NO: 1057940 - RNA, 19 nt, Artificial Sequence
  Description of Artificial Sequence: Synthetic oligonucleotide
cacauugcuagucagagaa

SEQ ID NO: 1057941 - RNA, 19 nt, Artificial Sequence
  Description of Artificial Sequence: Synthetic oligonucleotide
auucucgucaguuuaguua

SEQ ID NO: 1057942 - RNA, 19 nt, Artificial Sequence
  Description of Artificial Sequence: Synthetic oligonucleotide
acuguucacuaauaacuug

SEQ ID NO: 1057943 - RNA, 19 nt, Artificial Sequence
  Description of Artificial Sequence: Synthetic oligonucleotide
aaccuaugacuauuugaca

SEQ ID NO: 1057944 - RNA, 19 nt, Artificial Sequence
  Description of Artificial Sequence: Synthetic oligonucleotide
ucucucauauucaggauuu

SEQ ID NO: 1057945 - RNA, 19 nt, Artificial Sequence
  Description of Artificial Sequence: Synthetic oligonucleotide
aguuauuugaagucagcua

SEQ ID NO: 1057946 - RNA, 19 nt, Artificial Sequence
  Description of Artificial Sequence: Synthetic oligonucleotide
gauagcuguaagucuuuug

SEQ ID NO: 1057947 - RNA, 19 nt, Artificial Sequence
  Description of Artificial Sequence: Synthetic oligonucleotide
uuagccaaguuccuuggau

SEQ ID NO: 1057948 - RNA, 19 nt, Artificial Sequence
  Description of Artificial Sequence: Synthetic oligonucleotide
aaucaccgaagcauugccg

SEQ ID NO: 1057949 - RNA, 19 nt, Artificial Sequence
  Description of Artificial Sequence: Synthetic oligonucleotide
aaugagucgucguccuucu

SEQ ID NO: 1057950 - RNA, 19 nt, Artificial Sequence
  Description of Artificial Sequence: Synthetic oligonucleotide
uccagauagcuguaagucu

SEQ ID NO: 1057951 - RNA, 19 nt, Artificial Sequence
  Description of Artificial Sequence: Synthetic oligonucleotide
uuggaucaaccaaaguccu

SEQ ID NO: 1057952 - RNA, 19 nt, Artificial Sequence
  Description of Artificial Sequence: Synthetic oligonucleotide
cacucuucuuaucacugcg

SEQ ID NO: 1057953 - RNA, 19 nt, Artificial Sequence
  Description of Artificial Sequence: Synthetic oligonucleotide
ugcuguuaugcaaauuaaa

SEQ ID NO: 1057954 - RNA, 19 nt, Artificial Sequence
  Description of Artificial Sequence: Synthetic oligonucleotide
ucuuaacuggcugugucug

SEQ ID NO: 1057955 - RNA, 19 nt, Artificial Sequence
  Description of Artificial Sequence: Synthetic oligonucleotide
uguggaaagguugacgauc

SEQ ID NO: 1057956 - RNA, 19 nt, Artificial Sequence
  Description of Artificial Sequence: Synthetic oligonucleotide
ucagcuacccauauuuguu

SEQ ID NO: 1057957 - RNA, 19 nt, Artificial Sequence
  Description of Artificial Sequence: Synthetic oligonucleotide
agucaauguuggaucaacc

SEQ ID NO: 1057958 - RNA, 19 nt, Artificial Sequence
  Description of Artificial Sequence: Synthetic oligonucleotide
gauuacuucuaaacaucag

SEQ ID NO: 1057959 - RNA, 19 nt, Artificial Sequence
  Description of Artificial Sequence: Synthetic oligonucleotide
gaaaucaccgaagcauugc

SEQ ID NO: 1057960 - RNA, 19 nt, Artificial Sequence
  Description of Artificial Sequence: Synthetic oligonucleotide
auaucucuuucuuggugag

SEQ ID NO: 1057961 - RNA, 19 nt, Artificial Sequence
  Description of Artificial Sequence: Synthetic oligonucleotide
aucaccgaagcauugccgu

SEQ ID NO: 1057962 - RNA, 19 nt, Artificial Sequence
  Description of Artificial Sequence: Synthetic oligonucleotide
auugccguucucuugugga

SEQ ID NO: 1057963 - RNA, 19 nt, Artificial Sequence
  Description of Artificial Sequence: Synthetic oligonucleotide
uuaaaguugccaacaccau

SEQ ID NO: 1057964 - RNA, 19 nt, Artificial Sequence
  Description of Artificial Sequence: Synthetic oligonucleotide
cacuacauaaauuauaguu

SEQ ID NO: 1057965 - RNA, 19 nt, Artificial Sequence
  Description of Artificial Sequence: Synthetic oligonucleotide
guggaaagguugacgaucg

SEQ ID NO: 1057966 - RNA, 19 nt, Artificial Sequence
  Description of Artificial Sequence: Synthetic oligonucleotide
gucaauguuggaucaacca

SEQ ID NO: 1057967 - RNA, 19 nt, Artificial Sequence
  Description of Artificial Sequence: Synthetic oligonucleotide
uuugaacgauuacacuccu

SEQ ID NO: 1057968 - RNA, 19 nt, Artificial Sequence
  Description of Artificial Sequence: Synthetic oligonucleotide
agagacacaaauagcuauc

SEQ ID NO: 1057969 - RNA, 19 nt, Artificial Sequence
  Description of Artificial Sequence: Synthetic oligonucleotide
acgauuacacuccuucacu

SEQ ID NO: 1057970 - RNA, 19 nt, Artificial Sequence
  Description of Artificial Sequence: Synthetic oligonucleotide
uucuuaacuggcugugucu

SEQ ID NO: 1057971 - RNA, 19 nt, Artificial Sequence
  Description of Artificial Sequence: Synthetic oligonucleotide
cuuaucacugcgcauucuc

SEQ ID NO: 1057972 - RNA, 19 nt, Artificial Sequence
  Description of Artificial Sequence: Synthetic oligonucleotide
gauguaucacacuaaaauu

SEQ ID NO: 1057973 - RNA, 19 nt, Artificial Sequence
  Description of Artificial Sequence: Synthetic oligonucleotide
ucugaagauuacuucuaaa

SEQ ID NO: 1057974 - RNA, 19 nt, Artificial Sequence
  Description of Artificial Sequence: Synthetic oligonucleotide
ugcuagucagagaaaugcu

SEQ ID NO: 1057975 - RNA, 19 nt, Artificial Sequence
  Description of Artificial Sequence: Synthetic oligonucleotide
cuaucucaauacuaccaug

SEQ ID NO: 1057976 - RNA, 19 nt, Artificial Sequence
  Description of Artificial Sequence: Synthetic oligonucleotide
agaacaucaguuuguggaa

SEQ ID NO: 1057977 - RNA, 19 nt, Artificial Sequence
  Description of Artificial Sequence: Synthetic oligonucleotide
aacgaggcugcugauuaag

SEQ ID NO: 1057978 - RNA, 19 nt, Artificial Sequence
  Description of Artificial Sequence: Synthetic oligonucleotide
caacaccauauguagacuc

SEQ ID NO: 1057979 - RNA, 19 nt, Artificial Sequence
  Description of Artificial Sequence: Synthetic oligonucleotide
ucucucauuucauccucag

SEQ ID NO: 1057980 - RNA, 19 nt, Artificial Sequence
  Description of Artificial Sequence: Synthetic oligonucleotide
uggggauuaagccuuuaua

SEQ ID NO: 1057981 - RNA, 19 nt, Artificial Sequence
  Description of Artificial Sequence: Synthetic oligonucleotide
uagcuaucucaauacuacc

SEQ ID NO: 1057982 - RNA, 19 nt, Artificial Sequence
  Description of Artificial Sequence: Synthetic oligonucleotide
agguuuuguagguggaaca

SEQ ID NO: 1057983 - RNA, 19 nt, Artificial Sequence
  Description of Artificial Sequence: Synthetic oligonucleotide
uuguggguuugaaagugcu

SEQ ID NO: 1057984 - RNA, 19 nt, Artificial Sequence
  Description of Artificial Sequence: Synthetic oligonucleotide
ucuaaugggguaguucacu

SEQ ID NO: 1057985 - RNA, 19 nt, Artificial Sequence
  Description of Artificial Sequence: Synthetic oligonucleotide
aucacugcgcauucucguc

SEQ ID NO: 1057986 - RNA, 19 nt, Artificial Sequence
  Description of Artificial Sequence: Synthetic oligonucleotide
uaucacugcgcauucucgu

SEQ ID NO: 1057987 - RNA, 19 nt, Artificial Sequence
  Description of Artificial Sequence: Synthetic oligonucleotide
aguugccaacaccauaugu

SEQ ID NO: 1057988 - RNA, 19 nt, Artificial Sequence
  Description of Artificial Sequence: Synthetic oligonucleotide
uuggagcucuagauuuagg

SEQ ID NO: 1057989 - RNA, 19 nt, Artificial Sequence
  Description of Artificial Sequence: Synthetic oligonucleotide
cagugauagaagaaaguca

SEQ ID NO: 1057990 - RNA, 19 nt, Artificial Sequence
  Description of Artificial Sequence: Synthetic oligonucleotide
uugcuguuaugcaaauuaa

SEQ ID NO: 1057991 - RNA, 19 nt, Artificial Sequence
  Description of Artificial Sequence: Synthetic oligonucleotide
caucagcauguacagagac

SEQ ID NO: 1057992 - RNA, 19 nt, Artificial Sequence
  Description of Artificial Sequence: Synthetic oligonucleotide
auguucaacacagcccaac

SEQ ID NO: 1057993 - RNA, 19 nt, Artificial Sequence
  Description of Artificial Sequence: Synthetic oligonucleotide
uucuguaacuguucacuaa

SEQ ID NO: 1057994 - RNA, 19 nt, Artificial Sequence
  Description of Artificial Sequence: Synthetic oligonucleotide
agauuacuucuaaacauca

SEQ ID NO: 1057995 - RNA, 19 nt, Artificial Sequence
  Description of Artificial Sequence: Synthetic oligonucleotide
gaacaucuuacauucccaa

SEQ ID NO: 1057996 - RNA, 19 nt, Artificial Sequence
  Description of Artificial Sequence: Synthetic oligonucleotide
aucgucgucaucugaugug

SEQ ID NO: 1057997 - RNA, 19 nt, Artificial Sequence
  Description of Artificial Sequence: Synthetic oligonucleotide
ugaagguuuccugcuacug

SEQ ID NO: 1057998 - RNA, 19 nt, Artificial Sequence
  Description of Artificial Sequence: Synthetic oligonucleotide
ucacugcgcauucucguca

SEQ ID NO: 1057999 - RNA, 19 nt, Artificial Sequence
  Description of Artificial Sequence: Synthetic oligonucleotide
aaugaccagcauucuugga

SEQ ID NO: 1058000 - RNA, 19 nt, Artificial Sequence
  Description of Artificial Sequence: Synthetic oligonucleotide
ucuucuaaugggguaguuc

SEQ ID NO: 1058001 - RNA, 19 nt, Artificial Sequence
  Description of Artificial Sequence: Synthetic oligonucleotide
aucucaauacuaccaugcu

SEQ ID NO: 1058002 - RNA, 19 nt, Artificial Sequence
  Description of Artificial Sequence: Synthetic oligonucleotide
auccaauuuaugugcaaaa

SEQ ID NO: 1058003 - RNA, 19 nt, Artificial Sequence
  Description of Artificial Sequence: Synthetic oligonucleotide
ugaguacuauugcuguuau

SEQ ID NO: 1058004 - RNA, 19 nt, Artificial Sequence
  Description of Artificial Sequence: Synthetic oligonucleotide
ggggauuaagccuuuauaa

SEQ ID NO: 1058005 - RNA, 19 nt, Artificial Sequence
  Description of Artificial Sequence: Synthetic oligonucleotide
aacuguucacuaauaacuu

SEQ ID NO: 1058006 - RNA, 19 nt, Artificial Sequence
  Description of Artificial Sequence: Synthetic oligonucleotide
acuauuccauguauuuguc

SEQ ID NO: 1058007 - RNA, 19 nt, Artificial Sequence
  Description of Artificial Sequence: Synthetic oligonucleotide
cugggaauccagauagcug

SEQ ID NO: 1058008 - RNA, 19 nt, Artificial Sequence
  Description of Artificial Sequence: Synthetic oligonucleotide
aucgucacauugcuaguca

SEQ ID NO: 1058009 - RNA, 19 nt, Artificial Sequence
  Description of Artificial Sequence: Synthetic oligonucleotide
uaaugggguaguucacuac

SEQ ID NO: 1058010 - RNA, 19 nt, Artificial Sequence
  Description of Artificial Sequence: Synthetic oligonucleotide
gaacgauuacacuccuuca

SEQ ID NO: 1058011 - RNA, 19 nt, Artificial Sequence
  Description of Artificial Sequence: Synthetic oligonucleotide
uucuaaugggguaguucac

SEQ ID NO: 1058012 - RNA, 19 nt, Artificial Sequence
  Description of Artificial Sequence: Synthetic oligonucleotide
auccccucaacugucugcg

SEQ ID NO: 1058013 - RNA, 19 nt, Artificial Sequence
  Description of Artificial Sequence: Synthetic oligonucleotide
caguuccauucuuaacugg

SEQ ID NO: 1058014 - RNA, 19 nt, Artificial Sequence
  Description of Artificial Sequence: Synthetic oligonucleotide
agcuaucucaauacuacca

SEQ ID NO: 1058015 - RNA, 19 nt, Artificial Sequence
  Description of Artificial Sequence: Synthetic oligonucleotide
uuauccacuccagaugaaa

SEQ ID NO: 1058016 - RNA, 19 nt, Artificial Sequence
  Description of Artificial Sequence: Synthetic oligonucleotide
ugaagucagcuacccauau

SEQ ID NO: 1058017 - RNA, 19 nt, Artificial Sequence
  Description of Artificial Sequence: Synthetic oligonucleotide
gaauuugaacgauuacacu

SEQ ID NO: 1058018 - RNA, 19 nt, Artificial Sequence
  Description of Artificial Sequence: Synthetic oligonucleotide
agauuuauucugauuuggu

SEQ ID NO: 1058019 - RNA, 19 nt, Artificial Sequence
  Description of Artificial Sequence: Synthetic oligonucleotide
agggagcacauguuucauc

SEQ ID NO: 1058020 - RNA, 19 nt, Artificial Sequence
  Description of Artificial Sequence: Synthetic oligonucleotide
gccaacaccauauguagac

SEQ ID NO: 1058021 - RNA, 19 nt, Artificial Sequence
  Description of Artificial Sequence: Synthetic oligonucleotide
uguguagguuuuguaggug

SEQ ID NO: 1058022 - RNA, 19 nt, Artificial Sequence
  Description of Artificial Sequence: Synthetic oligonucleotide
uugauggacuaauacucuu

SEQ ID NO: 1058023 - RNA, 19 nt, Artificial Sequence
  Description of Artificial Sequence: Synthetic oligonucleotide
acgaucgaauaaucuguug

SEQ ID NO: 1058024 - RNA, 19 nt, Artificial Sequence
  Description of Artificial Sequence: Synthetic oligonucleotide
ucacagaucaggccauuuu

SEQ ID NO: 1058025 - RNA, 19 nt, Artificial Sequence
  Description of Artificial Sequence: Synthetic oligonucleotide
ucacuguacuuauccacuc

SEQ ID NO: 1058026 - RNA, 19 nt, Artificial Sequence
  Description of Artificial Sequence: Synthetic oligonucleotide
uuggggauuaagccuuuau

SEQ ID NO: 1058027 - RNA, 19 nt, Artificial Sequence
  Description of Artificial Sequence: Synthetic oligonucleotide
guacuauugcuguuaugca

SEQ ID NO: 1058028 - RNA, 19 nt, Artificial Sequence
  Description of Artificial Sequence: Synthetic oligonucleotide
guugacuuaaagguauuaa

SEQ ID NO: 1058029 - RNA, 19 nt, Artificial Sequence
  Description of Artificial Sequence: Synthetic oligonucleotide
uggcuauauccagaauuag

SEQ ID NO: 1058030 - RNA, 19 nt, Artificial Sequence
  Description of Artificial Sequence: Synthetic oligonucleotide
ucacauugcuagucagaga

SEQ ID NO: 1058031 - RNA, 19 nt, Artificial Sequence
  Description of Artificial Sequence: Synthetic oligonucleotide
uucuacucugucccuuuuc

SEQ ID NO: 1058032 - RNA, 19 nt, Artificial Sequence
  Description of Artificial Sequence: Synthetic oligonucleotide
ucuucuuaucacugcgcau

SEQ ID NO: 1058033 - RNA, 19 nt, Artificial Sequence
  Description of Artificial Sequence: Synthetic oligonucleotide
cuuggagcucuagauuuag

SEQ ID NO: 1058034 - RNA, 19 nt, Artificial Sequence
  Description of Artificial Sequence: Synthetic oligonucleotide
gcagugauagaagaaaguc

SEQ ID NO: 1058035 - RNA, 19 nt, Artificial Sequence
  Description of Artificial Sequence: Synthetic oligonucleotide
auauccaauuuaugugcaa

SEQ ID NO: 1058036 - RNA, 19 nt, Artificial Sequence
  Description of Artificial Sequence: Synthetic oligonucleotide
uacuuaaccuaugacuauu

SEQ ID NO: 1058037 - RNA, 19 nt, Artificial Sequence
  Description of Artificial Sequence: Synthetic oligonucleotide
auuugacauagaguuauuu

SEQ ID NO: 1058038 - RNA, 19 nt, Artificial Sequence
  Description of Artificial Sequence: Synthetic oligonucleotide
auccuucacacaucgucgu

SEQ ID NO: 1058039 - RNA, 19 nt, Artificial Sequence
  Description of Artificial Sequence: Synthetic oligonucleotide
ggauucaagagcaaggucu

SEQ ID NO: 1058040 - RNA, 19 nt, Artificial Sequence
  Description of Artificial Sequence: Synthetic oligonucleotide
ccauauguagacucaugag

SEQ ID NO: 1058041 - RNA, 19 nt, Artificial Sequence
  Description of Artificial Sequence: Synthetic oligonucleotide
uaccuuucuuaaugaccag

SEQ ID NO: 1058042 - RNA, 19 nt, Artificial Sequence
  Description of Artificial Sequence: Synthetic oligonucleotide
cuucuuuacuauuccaugu

SEQ ID NO: 1058043 - RNA, 19 nt, Artificial Sequence
  Description of Artificial Sequence: Synthetic oligonucleotide
agaaaucaccgaagcauug

SEQ ID NO: 1058044 - RNA, 19 nt, Artificial Sequence
  Description of Artificial Sequence: Synthetic oligonucleotide
uaguuaaacgaggcugcug

SEQ ID NO: 1058045 - RNA, 19 nt, Artificial Sequence
  Description of Artificial Sequence: Synthetic oligonucleotide
gacuaauacucuuggcugu

SEQ ID NO: 1058046 - RNA, 19 nt, Artificial Sequence
  Description of Artificial Sequence: Synthetic oligonucleotide
cauugccguucucuugugg

SEQ ID NO: 1058047 - RNA, 19 nt, Artificial Sequence
  Description of Artificial Sequence: Synthetic oligonucleotide
auugcuagucagagaaaug

SEQ ID NO: 1058048 - RNA, 19 nt, Artificial Sequence
  Description of Artificial Sequence: Synthetic oligonucleotide
ucuuggagcucuagauuua

SEQ ID NO: 1058049 - RNA, 19 nt, Artificial Sequence
  Description of Artificial Sequence: Synthetic oligonucleotide
guagacucaugaggaaaag

SEQ ID NO: 1058050 - RNA, 19 nt, Artificial Sequence
  Description of Artificial Sequence: Synthetic oligonucleotide
caggcgaggaagaauuuga

SEQ ID NO: 1058051 - RNA, 19 nt, Artificial Sequence
  Description of Artificial Sequence: Synthetic oligonucleotide
gaaagguugacgaucgaau

SEQ ID NO: 1058052 - RNA, 19 nt, Artificial Sequence
  Description of Artificial Sequence: Synthetic oligonucleotide
ucacccaaacugagagaug

SEQ ID NO: 1058053 - RNA, 19 nt, Artificial Sequence
  Description of Artificial Sequence: Synthetic oligonucleotide
guucacuacauaaauuaua

SEQ ID NO: 1058054 - RNA, 19 nt, Artificial Sequence
  Description of Artificial Sequence: Synthetic oligonucleotide
guacuuauccacuccagau

SEQ ID NO: 1058055 - RNA, 19 nt, Artificial Sequence
  Description of Artificial Sequence: Synthetic oligonucleotide
uauuugacauagaguuauu

SEQ ID NO: 1058056 - RNA, 19 nt, Artificial Sequence
  Description of Artificial Sequence: Synthetic oligonucleotide
acaggcgaggaagaauuug

SEQ ID NO: 1058057 - RNA, 19 nt, Artificial Sequence
  Description of Artificial Sequence: Synthetic oligonucleotide
uucucaauuguggguuuga

SEQ ID NO: 1058058 - RNA, 19 nt, Artificial Sequence
  Description of Artificial Sequence: Synthetic oligonucleotide
aguucacuacauaaauuau

SEQ ID NO: 1058059 - RNA, 19 nt, Artificial Sequence
  Description of Artificial Sequence: Synthetic oligonucleotide
uuaaacgaggcugcugauu

SEQ ID NO: 1058060 - RNA, 19 nt, Artificial Sequence
  Description of Artificial Sequence: Synthetic oligonucleotide
gggauuaagccuuuauaaa

SEQ ID NO: 1058061 - RNA, 19 nt, Artificial Sequence
  Description of Artificial Sequence: Synthetic oligonucleotide
cccaucuccuuuaauaguc

SEQ ID NO: 1058062 - RNA, 19 nt, Artificial Sequence
  Description of Artificial Sequence: Synthetic oligonucleotide
cucgucaguuuaguuaaac

SEQ ID NO: 1058063 - RNA, 19 nt, Artificial Sequence
  Description of Artificial Sequence: Synthetic oligonucleotide
aaacgaggcugcugauuaa

SEQ ID NO: 1058064 - RNA, 19 nt, Artificial Sequence
  Description of Artificial Sequence: Synthetic oligonucleotide
gcuagucagagaaaugcug

SEQ ID NO: 1058065 - RNA, 19 nt, Artificial Sequence
  Description of Artificial Sequence: Synthetic oligonucleotide
uuguggaaagguugacgau

SEQ ID NO: 1058066 - RNA, 19 nt, Artificial Sequence
  Description of Artificial Sequence: Synthetic oligonucleotide
cucaauuguggguuugaaa

SEQ ID NO: 1058067 - RNA, 19 nt, Artificial Sequence
  Description of Artificial Sequence: Synthetic oligonucleotide
auguuggaucaaccaaagu

SEQ ID NO: 1058068 - RNA, 19 nt, Artificial Sequence
  Description of Artificial Sequence: Synthetic oligonucleotide
gguaguucacuacauaaau

SEQ ID NO: 1058069 - RNA, 19 nt, Artificial Sequence
  Description of Artificial Sequence: Synthetic oligonucleotide
ugggguaguucacuacaua

SEQ ID NO: 1058070 - RNA, 19 nt, Artificial Sequence
  Description of Artificial Sequence: Synthetic oligonucleotide
gaauuuguugauggacuaa

SEQ ID NO: 1058071 - RNA, 19 nt, Artificial Sequence
  Description of Artificial Sequence: Synthetic oligonucleotide
cucauuucauccucaguua

SEQ ID NO: 1058072 - RNA, 19 nt, Artificial Sequence
  Description of Artificial Sequence: Synthetic oligonucleotide
ccugcuacugggaauccag

SEQ ID NO: 1058073 - RNA, 19 nt, Artificial Sequence
  Description of Artificial Sequence: Synthetic oligonucleotide
aagcuguuaggaaauccuu

SEQ ID NO: 1058074 - RNA, 19 nt, Artificial Sequence
  Description of Artificial Sequence: Synthetic oligonucleotide
ggaagaauuugaacgauua

SEQ ID NO: 1058075 - RNA, 19 nt, Artificial Sequence
  Description of Artificial Sequence: Synthetic oligonucleotide
caucuuacauucccaagua

SEQ ID NO: 1058076 - RNA, 19 nt, Artificial Sequence
  Description of Artificial Sequence: Synthetic oligonucleotide
cacacaucgucgucaucug

SEQ ID NO: 1058077 - RNA, 19 nt, Artificial Sequence
  Description of Artificial Sequence: Synthetic oligonucleotide
uaaaugagucgucguccuu

SEQ ID NO: 1058078 - RNA, 19 nt, Artificial Sequence
  Description of Artificial Sequence: Synthetic oligonucleotide
ggcgaggaagaauuugaac

SEQ ID NO: 1058079 - RNA, 19 nt, Artificial Sequence
  Description of Artificial Sequence: Synthetic oligonucleotide
cuaaugggguaguucacua

SEQ ID NO: 1058080 - RNA, 19 nt, Artificial Sequence
  Description of Artificial Sequence: Synthetic oligonucleotide
cagcccaucuccuuuaaua

SEQ ID NO: 1058081 - RNA, 19 nt, Artificial Sequence
  Description of Artificial Sequence: Synthetic oligonucleotide
gucagcuacccauauuugu

SEQ ID NO: 1058082 - RNA, 19 nt, Artificial Sequence
  Description of Artificial Sequence: Synthetic oligonucleotide
caauacuaccaugcuggug

SEQ ID NO: 1058083 - RNA, 19 nt, Artificial Sequence
  Description of Artificial Sequence: Synthetic oligonucleotide
ugcgcauucucgucaguuu

SEQ ID NO: 1058084 - RNA, 19 nt, Artificial Sequence
  Description of Artificial Sequence: Synthetic oligonucleotide
agcuacccauauuuguuuu

SEQ ID NO: 1058085 - RNA, 19 nt, Artificial Sequence
  Description of Artificial Sequence: Synthetic oligonucleotide
ccaguuccauucuuaacug

SEQ ID NO: 1058086 - RNA, 19 nt, Artificial Sequence
  Description of Artificial Sequence: Synthetic oligonucleotide
uccuucacacaucgucguc

SEQ ID NO: 1058087 - RNA, 19 nt, Artificial Sequence
  Description of Artificial Sequence: Synthetic oligonucleotide
accgaagcauugccguucu

SEQ ID NO: 1058088 - RNA, 19 nt, Artificial Sequence
  Description of Artificial Sequence: Synthetic oligonucleotide
gagauguaucacacuaaaa

SEQ ID NO: 1058089 - RNA, 19 nt, Artificial Sequence
  Description of Artificial Sequence: Synthetic oligonucleotide
cacugcgcauucucgucag

SEQ ID NO: 1058090 - RNA, 19 nt, Artificial Sequence
  Description of Artificial Sequence: Synthetic oligonucleotide
gagacacaaauagcuaucu

SEQ ID NO: 1058091 - RNA, 19 nt, Artificial Sequence
  Description of Artificial Sequence: Synthetic oligonucleotide
ucuuaucacugcgcauucu

SEQ ID NO: 1058092 - RNA, 19 nt, Artificial Sequence
  Description of Artificial Sequence: Synthetic oligonucleotide
gaacaucaguuuguggaaa

SEQ ID NO: 1058093 - RNA, 19 nt, Artificial Sequence
  Description of Artificial Sequence: Synthetic oligonucleotide
cuucuguaacuguucacua

SEQ ID NO: 1058094 - RNA, 19 nt, Artificial Sequence
  Description of Artificial Sequence: Synthetic oligonucleotide
uggaaagguugacgaucga

SEQ ID NO: 1058095 - RNA, 19 nt, Artificial Sequence
  Description of Artificial Sequence: Synthetic oligonucleotide
cuaauacucuuggcuguug

SEQ ID NO: 1058096 - RNA, 19 nt, Artificial Sequence
  Description of Artificial Sequence: Synthetic oligonucleotide
cuaaagauuuauucugauu

SEQ ID NO: 1058097 - RNA, 19 nt, Artificial Sequence
  Description of Artificial Sequence: Synthetic oligonucleotide
uugaacgauuacacuccuu

SEQ ID NO: 1058098 - RNA, 19 nt, Artificial Sequence
  Description of Artificial Sequence: Synthetic oligonucleotide
uggguuugaaagugcuguu

SEQ ID NO: 1058099 - RNA, 19 nt, Artificial Sequence
  Description of Artificial Sequence: Synthetic oligonucleotide
guugacgaucgaauaaucu

SEQ ID NO: 1058100 - RNA, 19 nt, Artificial Sequence
  Description of Artificial Sequence: Synthetic oligonucleotide
cucuagugaacuggaaaga

SEQ ID NO: 1058101 - RNA, 19 nt, Artificial Sequence
  Description of Artificial Sequence: Synthetic oligonucleotide
agucagcuacccauauuug

SEQ ID NO: 1058102 - RNA, 19 nt, Artificial Sequence
  Description of Artificial Sequence: Synthetic oligonucleotide
agcauucuuggagcucuag

SEQ ID NO: 1058103 - RNA, 19 nt, Artificial Sequence
  Description of Artificial Sequence: Synthetic oligonucleotide
caaaguccucauucuacaa

SEQ ID NO: 1058104 - RNA, 19 nt, Artificial Sequence
  Description of Artificial Sequence: Synthetic oligonucleotide
gucugcguucucuuuuguc

SEQ ID NO: 1058105 - RNA, 19 nt, Artificial Sequence
  Description of Artificial Sequence: Synthetic oligonucleotide
caacaggcgaggaagaauu

SEQ ID NO: 1058106 - RNA, 19 nt, Artificial Sequence
  Description of Artificial Sequence: Synthetic oligonucleotide
ggucuucuuuacuauucca

SEQ ID NO: 1058107 - RNA, 19 nt, Artificial Sequence
  Description of Artificial Sequence: Synthetic oligonucleotide
acuaauacucuuggcuguu

SEQ ID NO: 1058108 - RNA, 19 nt, Artificial Sequence
  Description of Artificial Sequence: Synthetic oligonucleotide
acuuaaccuaugacuauuu

SEQ ID NO: 1058109 - RNA, 19 nt, Artificial Sequence
  Description of Artificial Sequence: Synthetic oligonucleotide
guugauggacuaauacucu

SEQ ID NO: 1058110 - RNA, 19 nt, Artificial Sequence
  Description of Artificial Sequence: Synthetic oligonucleotide
aauguucaacacagcccaa

SEQ ID NO: 1058111 - RNA, 19 nt, Artificial Sequence
  Description of Artificial Sequence: Synthetic oligonucleotide
cgaucgaauaaucuguuga

SEQ ID NO: 1058112 - RNA, 19 nt, Artificial Sequence
  Description of Artificial Sequence: Synthetic oligonucleotide
uccuuggauucaagagcaa

SEQ ID NO: 1058113 - RNA, 19 nt, Artificial Sequence
  Description of Artificial Sequence: Synthetic oligonucleotide
auuuguugauggacuaaua

SEQ ID NO: 1058114 - RNA, 19 nt, Artificial Sequence
  Description of Artificial Sequence: Synthetic oligonucleotide
ucucgucaguuuaguuaaa

SEQ ID NO: 1058115 - RNA, 19 nt, Artificial Sequence
  Description of Artificial Sequence: Synthetic oligonucleotide
cuguuuauaucucuuucuu

SEQ ID NO: 1058116 - RNA, 19 nt, Artificial Sequence
  Description of Artificial Sequence: Synthetic oligonucleotide
ugccucuagugaacuggaa

SEQ ID NO: 1058117 - RNA, 19 nt, Artificial Sequence
  Description of Artificial Sequence: Synthetic oligonucleotide
gagaaaucaccgaagcauu

SEQ ID NO: 1058118 - RNA, 19 nt, Artificial Sequence
  Description of Artificial Sequence: Synthetic oligonucleotide
cacccaaacugagagaugu

SEQ ID NO: 1058119 - RNA, 19 nt, Artificial Sequence
  Description of Artificial Sequence: Synthetic oligonucleotide
ugcguucucuuuugucuuu

SEQ ID NO: 1058120 - RNA, 19 nt, Artificial Sequence
  Description of Artificial Sequence: Synthetic oligonucleotide
gcuacuugucucuguguca

SEQ ID NO: 1058121 - RNA, 19 nt, Artificial Sequence
  Description of Artificial Sequence: Synthetic oligonucleotide
guaucacacuaaaauuucu

SEQ ID NO: 1058122 - RNA, 19 nt, Artificial Sequence
  Description of Artificial Sequence: Synthetic oligonucleotide
caccgaagcauugccguuc

SEQ ID NO: 1058123 - RNA, 19 nt, Artificial Sequence
  Description of Artificial Sequence: Synthetic oligonucleotide
ggaaauccccucaacuguc

SEQ ID NO: 1058124 - RNA, 19 nt, Artificial Sequence
  Description of Artificial Sequence: Synthetic oligonucleotide
ucaccgaagcauugccguu

SEQ ID NO: 1058125 - RNA, 19 nt, Artificial Sequence
  Description of Artificial Sequence: Synthetic oligonucleotide
ucuuggcuguugacuuaaa

SEQ ID NO: 1058126 - RNA, 19 nt, Artificial Sequence
  Description of Artificial Sequence: Synthetic oligonucleotide
uucacacaucgucgucauc

SEQ ID NO: 1058127 - RNA, 19 nt, Artificial Sequence
  Description of Artificial Sequence: Synthetic oligonucleotide
ggaaagguugacgaucgaa

SEQ ID NO: 1058128 - RNA, 19 nt, Artificial Sequence
  Description of Artificial Sequence: Synthetic oligonucleotide
gccucuagugaacuggaaa

SEQ ID NO: 1058129 - RNA, 19 nt, Artificial Sequence
  Description of Artificial Sequence: Synthetic oligonucleotide
uacuaccaugcugguguga

SEQ ID NO: 1058130 - RNA, 19 nt, Artificial Sequence
  Description of Artificial Sequence: Synthetic oligonucleotide
gcuacugggaauccagaua

SEQ ID NO: 1058131 - RNA, 19 nt, Artificial Sequence
  Description of Artificial Sequence: Synthetic oligonucleotide
gcuaucucaauacuaccau

SEQ ID NO: 1058132 - RNA, 19 nt, Artificial Sequence
  Description of Artificial Sequence: Synthetic oligonucleotide
cagaugaaauauccaauuu

SEQ ID NO: 1058133 - RNA, 19 nt, Artificial Sequence
  Description of Artificial Sequence: Synthetic oligonucleotide
ggaccaguuccauucuuaa

SEQ ID NO: 1058134 - RNA, 19 nt, Artificial Sequence
  Description of Artificial Sequence: Synthetic oligonucleotide
gguuugaaagugcuguuuu

SEQ ID NO: 1058135 - RNA, 19 nt, Artificial Sequence
  Description of Artificial Sequence: Synthetic oligonucleotide
ggagcucuagauuuaggau

SEQ ID NO: 1058136 - RNA, 19 nt, Artificial Sequence
  Description of Artificial Sequence: Synthetic oligonucleotide
acacagcccaacacaacau

SEQ ID NO: 1058137 - RNA, 19 nt, Artificial Sequence
  Description of Artificial Sequence: Synthetic oligonucleotide
gaggaagaauuugaacgau

SEQ ID NO: 1058138 - RNA, 19 nt, Artificial Sequence
  Description of Artificial Sequence: Synthetic oligonucleotide
cagaauuagccaaguuccu

SEQ ID NO: 1058139 - RNA, 19 nt, Artificial Sequence
  Description of Artificial Sequence: Synthetic oligonucleotide
gguugacgaucgaauaauc

SEQ ID NO: 1058140 - RNA, 19 nt, Artificial Sequence
  Description of Artificial Sequence: Synthetic oligonucleotide
augggguaguucacuacau

SEQ ID NO: 1058141 - RNA, 19 nt, Artificial Sequence
  Description of Artificial Sequence: Synthetic oligonucleotide
gaaauccccucaacugucu

SEQ ID NO: 1058142 - RNA, 19 nt, Artificial Sequence
  Description of Artificial Sequence: Synthetic oligonucleotide
gaucaaccaaaguccucau

SEQ ID NO: 1058143 - RNA, 19 nt, Artificial Sequence
  Description of Artificial Sequence: Synthetic oligonucleotide
acgaggcugcugauuaagu

SEQ ID NO: 1058144 - RNA, 19 nt, Artificial Sequence
  Description of Artificial Sequence: Synthetic oligonucleotide
ggguaguucacuacauaaa

SEQ ID NO: 1058145 - RNA, 19 nt, Artificial Sequence
  Description of Artificial Sequence: Synthetic oligonucleotide
gcuaaagauuuauucugau

SEQ ID NO: 1058146 - RNA, 19 nt, Artificial Sequence
  Description of Artificial Sequence: Synthetic oligonucleotide
ggguauucccauacaccug

SEQ ID NO: 1058147 - RNA, 19 nt, Artificial Sequence
  Description of Artificial Sequence: Synthetic oligonucleotide
gaagucagcuacccauauu

SEQ ID NO: 1058148 - RNA, 19 nt, Artificial Sequence
  Description of Artificial Sequence: Synthetic oligonucleotide
cuacuugucucugugucau

SEQ ID NO: 1058149 - RNA, 19 nt, Artificial Sequence
  Description of Artificial Sequence: Synthetic oligonucleotide
aggcgaggaagaauuugaa

SEQ ID NO: 1058150 - RNA, 19 nt, Artificial Sequence
  Description of Artificial Sequence: Synthetic oligonucleotide
cccucaacugucugcguuc

SEQ ID NO: 1058151 - RNA, 19 nt, Artificial Sequence
  Description of Artificial Sequence: Synthetic oligonucleotide
gacgaucgaauaaucuguu

SEQ ID NO: 1058152 - RNA, 19 nt, Artificial Sequence
  Description of Artificial Sequence: Synthetic oligonucleotide
cgcauucucgucaguuuag

SEQ ID NO: 1058153 - RNA, 19 nt, Artificial Sequence
  Description of Artificial Sequence: Synthetic oligonucleotide
cagcauguacagagacaca

SEQ ID NO: 1058154 - RNA, 19 nt, Artificial Sequence
  Description of Artificial Sequence: Synthetic oligonucleotide
guuaaacgaggcugcugau

SEQ ID NO: 1058155 - RNA, 19 nt, Artificial Sequence
  Description of Artificial Sequence: Synthetic oligonucleotide
acagcagguuuggggauua

SEQ ID NO: 1058156 - RNA, 19 nt, Artificial Sequence
  Description of Artificial Sequence: Synthetic oligonucleotide
uccccucaacugucugcgu

SEQ ID NO: 1058157 - RNA, 19 nt, Artificial Sequence
  Description of Artificial Sequence: Synthetic oligonucleotide
cucaacugucugcguucuc

SEQ ID NO: 1058158 - RNA, 19 nt, Artificial Sequence
  Description of Artificial Sequence: Synthetic oligonucleotide
gguuuggggauuaagccuu

SEQ ID NO: 1058159 - RNA, 19 nt, Artificial Sequence
  Description of Artificial Sequence: Synthetic oligonucleotide
gaaauccuucacacaucgu

SEQ ID NO: 1058160 - RNA, 19 nt, Artificial Sequence
  Description of Artificial Sequence: Synthetic oligonucleotide
aucuucuaaugggguaguu

SEQ ID NO: 1058161 - RNA, 19 nt, Artificial Sequence
  Description of Artificial Sequence: Synthetic oligonucleotide
guauucccauacaccugca

SEQ ID NO: 1058162 - RNA, 19 nt, Artificial Sequence
  Description of Artificial Sequence: Synthetic oligonucleotide
gcgcauucucgucaguuua

SEQ ID NO: 1058163 - RNA, 19 nt, Artificial Sequence
  Description of Artificial Sequence: Synthetic oligonucleotide
cauucuuaacuggcugugu

SEQ ID NO: 1058164 - RNA, 19 nt, Artificial Sequence
  Description of Artificial Sequence: Synthetic oligonucleotide
cauucucgucaguuuaguu

SEQ ID NO: 1058165 - RNA, 19 nt, Artificial Sequence
  Description of Artificial Sequence: Synthetic oligonucleotide
cagcuacccauauuuguuu

SEQ ID NO: 1058166 - RNA, 19 nt, Artificial Sequence
  Description of Artificial Sequence: Synthetic oligonucleotide
gcauugccguucucuugug

SEQ ID NO: 1058167 - RNA, 19 nt, Artificial Sequence
  Description of Artificial Sequence: Synthetic oligonucleotide
caccugcagcuaaagauuu

SEQ ID NO: 1058168 - RNA, 19 nt, Artificial Sequence
  Description of Artificial Sequence: Synthetic oligonucleotide
cauucucaauuguggguuu

SEQ ID NO: 1058169 - RNA, 19 nt, Artificial Sequence
  Description of Artificial Sequence: Synthetic oligonucleotide
cugaugugucacugcuacu

SEQ ID NO: 1058170 - RNA, 19 nt, Artificial Sequence
  Description of Artificial Sequence: Synthetic oligonucleotide
cugucccuuuucaaugcuu

SEQ ID NO: 1058171 - RNA, 19 nt, Artificial Sequence
  Description of Artificial Sequence: Synthetic oligonucleotide
ggguuugaaagugcuguuu

SEQ ID NO: 1058172 - RNA, 19 nt, Artificial Sequence
  Description of Artificial Sequence: Synthetic oligonucleotide
gucacagaucaggccauuu

SEQ ID NO: 1058173 - RNA, 19 nt, Artificial Sequence
  Description of Artificial Sequence: Synthetic oligonucleotide
cugcgcauucucgucaguu

SEQ ID NO: 1058174 - RNA, 19 nt, Artificial Sequence
  Description of Artificial Sequence: Synthetic oligonucleotide
gggaauccagauagcugua

SEQ ID NO: 1058175 - RNA, 19 nt, Artificial Sequence
  Description of Artificial Sequence: Synthetic oligonucleotide
cagcauucuuggagcucua

SEQ ID NO: 1058176 - RNA, 19 nt, Artificial Sequence
  Description of Artificial Sequence: Synthetic oligonucleotide
guuuggggauuaagccuuu

SEQ ID NO: 1058177 - RNA, 19 nt, Artificial Sequence
  Description of Artificial Sequence: Synthetic oligonucleotide
ccaacaccauauguagacu

SEQ ID NO: 1058178 - RNA, 19 nt, Artificial Sequence
  Description of Artificial Sequence: Synthetic oligonucleotide
ccgaagcauugccguucuc

SEQ ID NO: 1058179 - RNA, 19 nt, Artificial Sequence
  Description of Artificial Sequence: Synthetic oligonucleotide
ccucaacugucugcguucu

SEQ ID NO: 1058180 - RNA, 19 nt, Artificial Sequence
  Description of Artificial Sequence: Synthetic oligonucleotide
cagcagguuuggggauuaa

SEQ ID NO: 1058181 - RNA, 19 nt, Artificial Sequence
  Description of Artificial Sequence: Synthetic oligonucleotide
ccccucaacugucugcguu

SEQ ID NO: 1058182 - RNA, 19 nt, Artificial Sequence
  Description of Artificial Sequence: Synthetic oligonucleotide
aacuagagaaaucacagac

SEQ ID NO: 1058183 - RNA, 19 nt, Artificial Sequence
  Description of Artificial Sequence: Synthetic oligonucleotide
aauuugucaaaacugucac

SEQ ID NO: 1058184 - RNA, 19 nt, Artificial Sequence
  Description of Artificial Sequence: Synthetic oligonucleotide
ucuaauuugaguuuaauau

SEQ ID NO: 1058185 - RNA, 19 nt, Artificial Sequence
  Description of Artificial Sequence: Synthetic oligonucleotide
auauuuauaauguagggca

SEQ ID NO: 1058186 - RNA, 19 nt, Artificial Sequence
  Description of Artificial Sequence: Synthetic oligonucleotide
uuaauauuaacaauuuaca

SEQ ID NO: 1058187 - RNA, 19 nt, Artificial Sequence
  Description of Artificial Sequence: Synthetic oligonucleotide
aauggagcuaguaaaauac

SEQ ID NO: 1058188 - RNA, 19 nt, Artificial Sequence
  Description of Artificial Sequence: Synthetic oligonucleotide
aaaaucacaaagucauaac

SEQ ID NO: 1058189 - RNA, 19 nt, Artificial Sequence
  Description of Artificial Sequence: Synthetic oligonucleotide
aaaucauaaaauuucagua

SEQ ID NO: 1058190 - RNA, 19 nt, Artificial Sequence
  Description of Artificial Sequence: Synthetic oligonucleotide
uuuggaaucagcaauguaa

SEQ ID NO: 1058191 - RNA, 19 nt, Artificial Sequence
  Description of Artificial Sequence: Synthetic oligonucleotide
uauaacuauauuuaacuga

SEQ ID NO: 1058192 - RNA, 19 nt, Artificial Sequence
  Description of Artificial Sequence: Synthetic oligonucleotide
aaugaguucaaauuacagu

SEQ ID NO: 1058193 - RNA, 19 nt, Artificial Sequence
  Description of Artificial Sequence: Synthetic oligonucleotide
uuagagaauagucaggaac

SEQ ID NO: 1058194 - RNA, 19 nt, Artificial Sequence
  Description of Artificial Sequence: Synthetic oligonucleotide
aaucuaaugaauugguacu

SEQ ID NO: 1058195 - RNA, 19 nt, Artificial Sequence
  Description of Artificial Sequence: Synthetic oligonucleotide
aagggcaugacaaggaucc

SEQ ID NO: 1058196 - RNA, 19 nt, Artificial Sequence
  Description of Artificial Sequence: Synthetic oligonucleotide
uuaaacuagagaaaucaca

SEQ ID NO: 1058197 - RNA, 19 nt, Artificial Sequence
  Description of Artificial Sequence: Synthetic oligonucleotide
aguuacaucugaaugaagc

SEQ ID NO: 1058198 - RNA, 19 nt, Artificial Sequence
  Description of Artificial Sequence: Synthetic oligonucleotide
aauaaaucacaccauugca

SEQ ID NO: 1058199 - RNA, 19 nt, Artificial Sequence
  Description of Artificial Sequence: Synthetic oligonucleotide
uacucuaauaugaucacag

SEQ ID NO: 1058200 - RNA, 19 nt, Artificial Sequence
  Description of Artificial Sequence: Synthetic oligonucleotide
uaauccuaaauuaacacuc

SEQ ID NO: 1058201 - RNA, 19 nt, Artificial Sequence
  Description of Artificial Sequence: Synthetic oligonucleotide
ugugcuuaaauaaaucaca

SEQ ID NO: 1058202 - RNA, 19 nt, Artificial Sequence
  Description of Artificial Sequence: Synthetic oligonucleotide
uuagauugugcuuaaauaa

SEQ ID NO: 1058203 - RNA, 19 nt, Artificial Sequence
  Description of Artificial Sequence: Synthetic oligonucleotide
uuuaacugaauuaugguuu

SEQ ID NO: 1058204 - RNA, 19 nt, Artificial Sequence
  Description of Artificial Sequence: Synthetic oligonucleotide
augucauaccuuuacagac

SEQ ID NO: 1058205 - RNA, 19 nt, Artificial Sequence
  Description of Artificial Sequence: Synthetic oligonucleotide
auauuuaacugaauuaugg

SEQ ID NO: 1058206 - RNA, 19 nt, Artificial Sequence
  Description of Artificial Sequence: Synthetic oligonucleotide
aagucuaccuaacaauuag

SEQ ID NO: 1058207 - RNA, 19 nt, Artificial Sequence
  Description of Artificial Sequence: Synthetic oligonucleotide
aaugucauaccuuuacaga

SEQ ID NO: 1058208 - RNA, 19 nt, Artificial Sequence
  Description of Artificial Sequence: Synthetic oligonucleotide
gagcuaguaaaauacauac

SEQ ID NO: 1058209 - RNA, 19 nt, Artificial Sequence
  Description of Artificial Sequence: Synthetic oligonucleotide
ucuaaugcaauggagcuag

SEQ ID NO: 1058210 - RNA, 19 nt, Artificial Sequence
  Description of Artificial Sequence: Synthetic oligonucleotide
cuaauaugaucacagaaug

SEQ ID NO: 1058211 - RNA, 19 nt, Artificial Sequence
  Description of Artificial Sequence: Synthetic oligonucleotide
uuuaagagccagcuuuugg

SEQ ID NO: 1058212 - RNA, 19 nt, Artificial Sequence
  Description of Artificial Sequence: Synthetic oligonucleotide
aauaaaucauaaaauuuca

SEQ ID NO: 1058213 - RNA, 19 nt, Artificial Sequence
  Description of Artificial Sequence: Synthetic oligonucleotide
caucaauuuaaaguaaugg

SEQ ID NO: 1058214 - RNA, 19 nt, Artificial Sequence
  Description of Artificial Sequence: Synthetic oligonucleotide
aguacuuaauccuaaauua

SEQ ID NO: 1058215 - RNA, 19 nt, Artificial Sequence
  Description of Artificial Sequence: Synthetic oligonucleotide
uaacaauuuacacuauucu

SEQ ID NO: 1058216 - RNA, 19 nt, Artificial Sequence
  Description of Artificial Sequence: Synthetic oligonucleotide
uuaauccuaaauuaacacu

SEQ ID NO: 1058217 - RNA, 19 nt, Artificial Sequence
  Description of Artificial Sequence: Synthetic oligonucleotide
uaaaucacaccauugcaug

SEQ ID NO: 1058218 - RNA, 19 nt, Artificial Sequence
  Description of Artificial Sequence: Synthetic oligonucleotide
uauaaguuuugucugcaca

SEQ ID NO: 1058219 - RNA, 19 nt, Artificial Sequence
  Description of Artificial Sequence: Synthetic oligonucleotide
aaacgagacguguaccugg

SEQ ID NO: 1058220 - RNA, 19 nt, Artificial Sequence
  Description of Artificial Sequence: Synthetic oligonucleotide
agauaauaaauuucacaag

SEQ ID NO: 1058221 - RNA, 19 nt, Artificial Sequence
  Description of Artificial Sequence: Synthetic oligonucleotide
aagugauucaacuaacuuu

SEQ ID NO: 1058222 - RNA, 19 nt, Artificial Sequence
  Description of Artificial Sequence: Synthetic oligonucleotide
uuaaauaaaucacaccauu

SEQ ID NO: 1058223 - RNA, 19 nt, Artificial Sequence
  Description of Artificial Sequence: Synthetic oligonucleotide
ugcucuaaugcaauggagc

SEQ ID NO: 1058224 - RNA, 19 nt, Artificial Sequence
  Description of Artificial Sequence: Synthetic oligonucleotide
aacaaucuggagcaaucuc

SEQ ID NO: 1058225 - RNA, 19 nt, Artificial Sequence
  Description of Artificial Sequence: Synthetic oligonucleotide
gcaauugccaguuacaaag

SEQ ID NO: 1058226 - RNA, 19 nt, Artificial Sequence
  Description of Artificial Sequence: Synthetic oligonucleotide
ugcuaagaaaaguuuaaca

SEQ ID NO: 1058227 - RNA, 19 nt, Artificial Sequence
  Description of Artificial Sequence: Synthetic oligonucleotide
gcuuaaauaaaucacacca

SEQ ID NO: 1058228 - RNA, 19 nt, Artificial Sequence
  Description of Artificial Sequence: Synthetic oligonucleotide
uuagaguuaacaucaauuu

SEQ ID NO: 1058229 - RNA, 19 nt, Artificial Sequence
  Description of Artificial Sequence: Synthetic oligonucleotide
acaaucuggagcaaucucc

SEQ ID NO: 1058230 - RNA, 19 nt, Artificial Sequence
  Description of Artificial Sequence: Synthetic oligonucleotide
ugugaggcuaaccugaaaa

SEQ ID NO: 1058231 - RNA, 19 nt, Artificial Sequence
  Description of Artificial Sequence: Synthetic oligonucleotide
aaauuugucaaaacuguca

SEQ ID NO: 1058232 - RNA, 19 nt, Artificial Sequence
  Description of Artificial Sequence: Synthetic oligonucleotide
aaagauguaaaauguccau

SEQ ID NO: 1058233 - RNA, 19 nt, Artificial Sequence
  Description of Artificial Sequence: Synthetic oligonucleotide
uauuuaacugaauuauggu

SEQ ID NO: 1058234 - RNA, 19 nt, Artificial Sequence
  Description of Artificial Sequence: Synthetic oligonucleotide
uucaguuccagccucaaau

SEQ ID NO: 1058235 - RNA, 19 nt, Artificial Sequence
  Description of Artificial Sequence: Synthetic oligonucleotide
uugugcuuaaauaaaucac

SEQ ID NO: 1058236 - RNA, 19 nt, Artificial Sequence
  Description of Artificial Sequence: Synthetic oligonucleotide
uuuaaacuagagaaaucac

SEQ ID NO: 1058237 - RNA, 19 nt, Artificial Sequence
  Description of Artificial Sequence: Synthetic oligonucleotide
uucccuguaauacagcaga

SEQ ID NO: 1058238 - RNA, 19 nt, Artificial Sequence
  Description of Artificial Sequence: Synthetic oligonucleotide
guaaagaccaaucuauuuc

SEQ ID NO: 1058239 - RNA, 19 nt, Artificial Sequence
  Description of Artificial Sequence: Synthetic oligonucleotide
uguccauuuaaacuagaga

SEQ ID NO: 1058240 - RNA, 19 nt, Artificial Sequence
  Description of Artificial Sequence: Synthetic oligonucleotide
accuuuacagacccgugcc

SEQ ID NO: 1058241 - RNA, 19 nt, Artificial Sequence
  Description of Artificial Sequence: Synthetic oligonucleotide
caauacaaggaaacgagac

SEQ ID NO: 1058242 - RNA, 19 nt, Artificial Sequence
  Description of Artificial Sequence: Synthetic oligonucleotide
caaggagcagacaucaugc

SEQ ID NO: 1058243 - RNA, 19 nt, Artificial Sequence
  Description of Artificial Sequence: Synthetic oligonucleotide
uagucaggaaccaauacaa

SEQ ID NO: 1058244 - RNA, 19 nt, Artificial Sequence
  Description of Artificial Sequence: Synthetic oligonucleotide
aaagugauucaacuaacuu

SEQ ID NO: 1058245 - RNA, 19 nt, Artificial Sequence
  Description of Artificial Sequence: Synthetic oligonucleotide
acucaguuacaucugaaug

SEQ ID NO: 1058246 - RNA, 19 nt, Artificial Sequence
  Description of Artificial Sequence: Synthetic oligonucleotide
ucaugugaggcuaaccuga

SEQ ID NO: 1058247 - RNA, 19 nt, Artificial Sequence
  Description of Artificial Sequence: Synthetic oligonucleotide
acaauacacacgaucauac

SEQ ID NO: 1058248 - RNA, 19 nt, Artificial Sequence
  Description of Artificial Sequence: Synthetic oligonucleotide
ugcaugaaaguuuuagaga

SEQ ID NO: 1058249 - RNA, 19 nt, Artificial Sequence
  Description of Artificial Sequence: Synthetic oligonucleotide
aaauccagcauaaaggcaa

SEQ ID NO: 1058250 - RNA, 19 nt, Artificial Sequence
  Description of Artificial Sequence: Synthetic oligonucleotide
gagaagauucuucauguac

SEQ ID NO: 1058251 - RNA, 19 nt, Artificial Sequence
  Description of Artificial Sequence: Synthetic oligonucleotide
uguuagauugugcuuaaau

SEQ ID NO: 1058252 - RNA, 19 nt, Artificial Sequence
  Description of Artificial Sequence: Synthetic oligonucleotide
auuuaacugaauuaugguu

SEQ ID NO: 1058253 - RNA, 19 nt, Artificial Sequence
  Description of Artificial Sequence: Synthetic oligonucleotide
uuggaaucagcaauguaac

SEQ ID NO: 1058254 - RNA, 19 nt, Artificial Sequence
  Description of Artificial Sequence: Synthetic oligonucleotide
uaaaguaauggaaguguac

SEQ ID NO: 1058255 - RNA, 19 nt, Artificial Sequence
  Description of Artificial Sequence: Synthetic oligonucleotide
ugucaaaacugucacuugu

SEQ ID NO: 1058256 - RNA, 19 nt, Artificial Sequence
  Description of Artificial Sequence: Synthetic oligonucleotide
acaaagucauaacauauaa

SEQ ID NO: 1058257 - RNA, 19 nt, Artificial Sequence
  Description of Artificial Sequence: Synthetic oligonucleotide
ucacauguuauaacuauau

SEQ ID NO: 1058258 - RNA, 19 nt, Artificial Sequence
  Description of Artificial Sequence: Synthetic oligonucleotide
cuaacaauuagaguuaaca

SEQ ID NO: 1058259 - RNA, 19 nt, Artificial Sequence
  Description of Artificial Sequence: Synthetic oligonucleotide
aauccugcccucugacagc

SEQ ID NO: 1058260 - RNA, 19 nt, Artificial Sequence
  Description of Artificial Sequence: Synthetic oligonucleotide
ugucauaccuuuacagacc

SEQ ID NO: 1058261 - RNA, 19 nt, Artificial Sequence
  Description of Artificial Sequence: Synthetic oligonucleotide
agucaugugaggcuaaccu

SEQ ID NO: 1058262 - RNA, 19 nt, Artificial Sequence
  Description of Artificial Sequence: Synthetic oligonucleotide
aauguagggcaauguaugu

SEQ ID NO: 1058263 - RNA, 19 nt, Artificial Sequence
  Description of Artificial Sequence: Synthetic oligonucleotide
ugugguaaagugauucaac

SEQ ID NO: 1058264 - RNA, 19 nt, Artificial Sequence
  Description of Artificial Sequence: Synthetic oligonucleotide
aaccaauacaaggaaacga

SEQ ID NO: 1058265 - RNA, 19 nt, Artificial Sequence
  Description of Artificial Sequence: Synthetic oligonucleotide
aauuagaguuaacaucaau

SEQ ID NO: 1058266 - RNA, 19 nt, Artificial Sequence
  Description of Artificial Sequence: Synthetic oligonucleotide
ugcgauaguucucaacacc

SEQ ID NO: 1058267 - RNA, 19 nt, Artificial Sequence
  Description of Artificial Sequence: Synthetic oligonucleotide
guucaaauuacaguagagc

SEQ ID NO: 1058268 - RNA, 19 nt, Artificial Sequence
  Description of Artificial Sequence: Synthetic oligonucleotide
aauugccaguuacaaagga

SEQ ID NO: 1058269 - RNA, 19 nt, Artificial Sequence
  Description of Artificial Sequence: Synthetic oligonucleotide
uuuauaauguagggcaaug

SEQ ID NO: 1058270 - RNA, 19 nt, Artificial Sequence
  Description of Artificial Sequence: Synthetic oligonucleotide
cugacaacaaucuggagca

SEQ ID NO: 1058271 - RNA, 19 nt, Artificial Sequence
  Description of Artificial Sequence: Synthetic oligonucleotide
acaaggagcagacaucaug

SEQ ID NO: 1058272 - RNA, 19 nt, Artificial Sequence
  Description of Artificial Sequence: Synthetic oligonucleotide
aauuacaguagagccaaca

SEQ ID NO: 1058273 - RNA, 19 nt, Artificial Sequence
  Description of Artificial Sequence: Synthetic oligonucleotide
agaguuaacaucaauuuaa

SEQ ID NO: 1058274 - RNA, 19 nt, Artificial Sequence
  Description of Artificial Sequence: Synthetic oligonucleotide
agauguaaaauguccauuu

SEQ ID NO: 1058275 - RNA, 19 nt, Artificial Sequence
  Description of Artificial Sequence: Synthetic oligonucleotide
auugcaugaaaguuuuaga

SEQ ID NO: 1058276 - RNA, 19 nt, Artificial Sequence
  Description of Artificial Sequence: Synthetic oligonucleotide
uuaacacucuaauuugagu

SEQ ID NO: 1058277 - RNA, 19 nt, Artificial Sequence
  Description of Artificial Sequence: Synthetic oligonucleotide
augcguguuaucuugguca

SEQ ID NO: 1058278 - RNA, 19 nt, Artificial Sequence
  Description of Artificial Sequence: Synthetic oligonucleotide
cuauacaugcagacuauac

SEQ ID NO: 1058279 - RNA, 19 nt, Artificial Sequence
  Description of Artificial Sequence: Synthetic oligonucleotide
agaccaaaccucucccugc

SEQ ID NO: 1058280 - RNA, 19 nt, Artificial Sequence
  Description of Artificial Sequence: Synthetic oligonucleotide
aauggaaguguacauuaua

SEQ ID NO: 1058281 - RNA, 19 nt, Artificial Sequence
  Description of Artificial Sequence: Synthetic oligonucleotide
uacaauucaguuccagccu

SEQ ID NO: 1058282 - RNA, 19 nt, Artificial Sequence
  Description of Artificial Sequence: Synthetic oligonucleotide
cauugcaugaaaguuuuag

SEQ ID NO: 1058283 - RNA, 19 nt, Artificial Sequence
  Description of Artificial Sequence: Synthetic oligonucleotide
aaaucacaccauugcauga

SEQ ID NO: 1058284 - RNA, 19 nt, Artificial Sequence
  Description of Artificial Sequence: Synthetic oligonucleotide
uacugugugguaaagugau

SEQ ID NO: 1058285 - RNA, 19 nt, Artificial Sequence
  Description of Artificial Sequence: Synthetic oligonucleotide
aaugcuaagaaaaguuuaa

SEQ ID NO: 1058286 - RNA, 19 nt, Artificial Sequence
  Description of Artificial Sequence: Synthetic oligonucleotide
accaauacaaggaaacgag

SEQ ID NO: 1058287 - RNA, 19 nt, Artificial Sequence
  Description of Artificial Sequence: Synthetic oligonucleotide
aauuaacacucuaauuuga

SEQ ID NO: 1058288 - RNA, 19 nt, Artificial Sequence
  Description of Artificial Sequence: Synthetic oligonucleotide
agagaaaucacagaccaaa

SEQ ID NO: 1058289 - RNA, 19 nt, Artificial Sequence
  Description of Artificial Sequence: Synthetic oligonucleotide
ucaaaacugucacuuguuc

SEQ ID NO: 1058290 - RNA, 19 nt, Artificial Sequence
  Description of Artificial Sequence: Synthetic oligonucleotide
cacacgaucauacugacaa

SEQ ID NO: 1058291 - RNA, 19 nt, Artificial Sequence
  Description of Artificial Sequence: Synthetic oligonucleotide
aaaaugcuaagaaaaguuu

SEQ ID NO: 1058292 - RNA, 19 nt, Artificial Sequence
  Description of Artificial Sequence: Synthetic oligonucleotide
ugaucacagaaugucauac

SEQ ID NO: 1058293 - RNA, 19 nt, Artificial Sequence
  Description of Artificial Sequence: Synthetic oligonucleotide
auuagaguuaacaucaauu

SEQ ID NO: 1058294 - RNA, 19 nt, Artificial Sequence
  Description of Artificial Sequence: Synthetic oligonucleotide
ucuuguuagauugugcuua

SEQ ID NO: 1058295 - RNA, 19 nt, Artificial Sequence
  Description of Artificial Sequence: Synthetic oligonucleotide
gaugcugccacggauagca

SEQ ID NO: 1058296 - RNA, 19 nt, Artificial Sequence
  Description of Artificial Sequence: Synthetic oligonucleotide
uuucccuguaauacagcag

SEQ ID NO: 1058297 - RNA, 19 nt, Artificial Sequence
  Description of Artificial Sequence: Synthetic oligonucleotide
acaagaugugcaccccacc

SEQ ID NO: 1058298 - RNA, 19 nt, Artificial Sequence
  Description of Artificial Sequence: Synthetic oligonucleotide
uaccuuuacagacccgugc

SEQ ID NO: 1058299 - RNA, 19 nt, Artificial Sequence
  Description of Artificial Sequence: Synthetic oligonucleotide
ucauacugacaacaaucug

SEQ ID NO: 1058300 - RNA, 19 nt, Artificial Sequence
  Description of Artificial Sequence: Synthetic oligonucleotide
caaauguauaaguuuuguc

SEQ ID NO: 1058301 - RNA, 19 nt, Artificial Sequence
  Description of Artificial Sequence: Synthetic oligonucleotide
aaaugcuaagaaaaguuua

SEQ ID NO: 1058302 - RNA, 19 nt, Artificial Sequence
  Description of Artificial Sequence: Synthetic oligonucleotide
guuagauugugcuuaaaua

SEQ ID NO: 1058303 - RNA, 19 nt, Artificial Sequence
  Description of Artificial Sequence: Synthetic oligonucleotide
aaaugucuuaugcauugua

SEQ ID NO: 1058304 - RNA, 19 nt, Artificial Sequence
  Description of Artificial Sequence: Synthetic oligonucleotide
agugauucaacuaacuuua

SEQ ID NO: 1058305 - RNA, 19 nt, Artificial Sequence
  Description of Artificial Sequence: Synthetic oligonucleotide
ggagauaauaaauuucaca

SEQ ID NO: 1058306 - RNA, 19 nt, Artificial Sequence
  Description of Artificial Sequence: Synthetic oligonucleotide
cagaaugucauaccuuuac

SEQ ID NO: 1058307 - RNA, 19 nt, Artificial Sequence
  Description of Artificial Sequence: Synthetic oligonucleotide
auuacaguagagccaacaa

SEQ ID NO: 1058308 - RNA, 19 nt, Artificial Sequence
  Description of Artificial Sequence: Synthetic oligonucleotide
aucuaaugaauugguacuc

SEQ ID NO: 1058309 - RNA, 19 nt, Artificial Sequence
  Description of Artificial Sequence: Synthetic oligonucleotide
aaugucuuaugcauuguaa

SEQ ID NO: 1058310 - RNA, 19 nt, Artificial Sequence
  Description of Artificial Sequence: Synthetic oligonucleotide
gucauaccuuuacagaccc

SEQ ID NO: 1058311 - RNA, 19 nt, Artificial Sequence
  Description of Artificial Sequence: Synthetic oligonucleotide
uggagcuaguaaaauacau

SEQ ID NO: 1058312 - RNA, 19 nt, Artificial Sequence
  Description of Artificial Sequence: Synthetic oligonucleotide
uuaacugaauuaugguuua

SEQ ID NO: 1058313 - RNA, 19 nt, Artificial Sequence
  Description of Artificial Sequence: Synthetic oligonucleotide
aagguugcgauaguucuca

SEQ ID NO: 1058314 - RNA, 19 nt, Artificial Sequence
  Description of Artificial Sequence: Synthetic oligonucleotide
uggagauaauaaauuucac

SEQ ID NO: 1058315 - RNA, 19 nt, Artificial Sequence
  Description of Artificial Sequence: Synthetic oligonucleotide
ugugugguaaagugauuca

SEQ ID NO: 1058316 - RNA, 19 nt, Artificial Sequence
  Description of Artificial Sequence: Synthetic oligonucleotide
ccuugcuucaacaggaucc

SEQ ID NO: 1058317 - RNA, 19 nt, Artificial Sequence
  Description of Artificial Sequence: Synthetic oligonucleotide
augcuaagaaaaguuuaac

SEQ ID NO: 1058318 - RNA, 19 nt, Artificial Sequence
  Description of Artificial Sequence: Synthetic oligonucleotide
uuucaguacuuaauccuaa

SEQ ID NO: 1058319 - RNA, 19 nt, Artificial Sequence
  Description of Artificial Sequence: Synthetic oligonucleotide
agaaugucauaccuuuaca

SEQ ID NO: 1058320 - RNA, 19 nt, Artificial Sequence
  Description of Artificial Sequence: Synthetic oligonucleotide
aauucagucaagccaccua

SEQ ID NO: 1058321 - RNA, 19 nt, Artificial Sequence
  Description of Artificial Sequence: Synthetic oligonucleotide
cuauguucaaucacaagaa

SEQ ID NO: 1058322 - RNA, 19 nt, Artificial Sequence
  Description of Artificial Sequence: Synthetic oligonucleotide
agucaagccaccuaauaua

SEQ ID NO: 1058323 - RNA, 19 nt, Artificial Sequence
  Description of Artificial Sequence: Synthetic oligonucleotide
uuugaauguaaagaccaau

SEQ ID NO: 1058324 - RNA, 19 nt, Artificial Sequence
  Description of Artificial Sequence: Synthetic oligonucleotide
augucuuaugcauuguaau

SEQ ID NO: 1058325 - RNA, 19 nt, Artificial Sequence
  Description of Artificial Sequence: Synthetic oligonucleotide
guaauggaaguguacauua

SEQ ID NO: 1058326 - RNA, 19 nt, Artificial Sequence
  Description of Artificial Sequence: Synthetic oligonucleotide
aaagguugcgauaguucuc

SEQ ID NO: 1058327 - RNA, 19 nt, Artificial Sequence
  Description of Artificial Sequence: Synthetic oligonucleotide
aacgagacguguaccuggc

SEQ ID NO: 1058328 - RNA, 19 nt, Artificial Sequence
  Description of Artificial Sequence: Synthetic oligonucleotide
uuacaaaggaagguucaca

SEQ ID NO: 1058329 - RNA, 19 nt, Artificial Sequence
  Description of Artificial Sequence: Synthetic oligonucleotide
acaacaaucuggagcaauc

SEQ ID NO: 1058330 - RNA, 19 nt, Artificial Sequence
  Description of Artificial Sequence: Synthetic oligonucleotide
aauccuaaauuaacacucu

SEQ ID NO: 1058331 - RNA, 19 nt, Artificial Sequence
  Description of Artificial Sequence: Synthetic oligonucleotide
ugaguuaaacugcucuaau

SEQ ID NO: 1058332 - RNA, 19 nt, Artificial Sequence
  Description of Artificial Sequence: Synthetic oligonucleotide
aggggcgaaggaaacagcc

SEQ ID NO: 1058333 - RNA, 19 nt, Artificial Sequence
  Description of Artificial Sequence: Synthetic oligonucleotide
gauagcaagacgggccagg

SEQ ID NO: 1058334 - RNA, 19 nt, Artificial Sequence
  Description of Artificial Sequence: Synthetic oligonucleotide
gaaaagguugcgauaguuc

SEQ ID NO: 1058335 - RNA, 19 nt, Artificial Sequence
  Description of Artificial Sequence: Synthetic oligonucleotide
ugcagacuauacugugugg

SEQ ID NO: 1058336 - RNA, 19 nt, Artificial Sequence
  Description of Artificial Sequence: Synthetic oligonucleotide
uacaaggaaacgagacgug

SEQ ID NO: 1058337 - RNA, 19 nt, Artificial Sequence
  Description of Artificial Sequence: Synthetic oligonucleotide
ucuaaugaauugguacucu

SEQ ID NO: 1058338 - RNA, 19 nt, Artificial Sequence
  Description of Artificial Sequence: Synthetic oligonucleotide
accaaucuauuucucacau

SEQ ID NO: 1058339 - RNA, 19 nt, Artificial Sequence
  Description of Artificial Sequence: Synthetic oligonucleotide
aaaaucuaaugaauuggua

SEQ ID NO: 1058340 - RNA, 19 nt, Artificial Sequence
  Description of Artificial Sequence: Synthetic oligonucleotide
aggaaacgagacguguacc

SEQ ID NO: 1058341 - RNA, 19 nt, Artificial Sequence
  Description of Artificial Sequence: Synthetic oligonucleotide
auacacacgaucauacuga

SEQ ID NO: 1058342 - RNA, 19 nt, Artificial Sequence
  Description of Artificial Sequence: Synthetic oligonucleotide
gaaaguuuuagagaauagu

SEQ ID NO: 1058343 - RNA, 19 nt, Artificial Sequence
  Description of Artificial Sequence: Synthetic oligonucleotide
cucuaauaugaucacagaa

SEQ ID NO: 1058344 - RNA, 19 nt, Artificial Sequence
  Description of Artificial Sequence: Synthetic oligonucleotide
accuaauauacagacuuca

SEQ ID NO: 1058345 - RNA, 19 nt, Artificial Sequence
  Description of Artificial Sequence: Synthetic oligonucleotide
augaaaguuuuagagaaua

SEQ ID NO: 1058346 - RNA, 19 nt, Artificial Sequence
  Description of Artificial Sequence: Synthetic oligonucleotide
cuuuacagacccgugcccc

SEQ ID NO: 1058347 - RNA, 19 nt, Artificial Sequence
  Description of Artificial Sequence: Synthetic oligonucleotide
caguuacaaaggaagguuc

SEQ ID NO: 1058348 - RNA, 19 nt, Artificial Sequence
  Description of Artificial Sequence: Synthetic oligonucleotide
ugguaaagugauucaacua

SEQ ID NO: 1058349 - RNA, 19 nt, Artificial Sequence
  Description of Artificial Sequence: Synthetic oligonucleotide
uuuagagaauagucaggaa

SEQ ID NO: 1058350 - RNA, 19 nt, Artificial Sequence
  Description of Artificial Sequence: Synthetic oligonucleotide
gauccaauacaauucaguu

SEQ ID NO: 1058351 - RNA, 19 nt, Artificial Sequence
  Description of Artificial Sequence: Synthetic oligonucleotide
ucucccaccgcucacuuuu

SEQ ID NO: 1058352 - RNA, 19 nt, Artificial Sequence
  Description of Artificial Sequence: Synthetic oligonucleotide
cuccacaauacacacgauc

SEQ ID NO: 1058353 - RNA, 19 nt, Artificial Sequence
  Description of Artificial Sequence: Synthetic oligonucleotide
gucaugugaggcuaaccug

SEQ ID NO: 1058354 - RNA, 19 nt, Artificial Sequence
  Description of Artificial Sequence: Synthetic oligonucleotide
uugucaaaacugucacuug

SEQ ID NO: 1058355 - RNA, 19 nt, Artificial Sequence
  Description of Artificial Sequence: Synthetic oligonucleotide
ucagucaagccaccuaaua

SEQ ID NO: 1058356 - RNA, 19 nt, Artificial Sequence
  Description of Artificial Sequence: Synthetic oligonucleotide
aguuucuuguuagauugug

SEQ ID NO: 1058357 - RNA, 19 nt, Artificial Sequence
  Description of Artificial Sequence: Synthetic oligonucleotide
agaggggcgaaggaaacag

SEQ ID NO: 1058358 - RNA, 19 nt, Artificial Sequence
  Description of Artificial Sequence: Synthetic oligonucleotide
acuuguucugaugaagaca

SEQ ID NO: 1058359 - RNA, 19 nt, Artificial Sequence
  Description of Artificial Sequence: Synthetic oligonucleotide
ucugcuucgcauacucagu

SEQ ID NO: 1058360 - RNA, 19 nt, Artificial Sequence
  Description of Artificial Sequence: Synthetic oligonucleotide
gaggcuaaccugaaaauaa

SEQ ID NO: 1058361 - RNA, 19 nt, Artificial Sequence
  Description of Artificial Sequence: Synthetic oligonucleotide
aaaaugucuuaugcauugu

SEQ ID NO: 1058362 - RNA, 19 nt, Artificial Sequence
  Description of Artificial Sequence: Synthetic oligonucleotide
acucuaauaugaucacaga

SEQ ID NO: 1058363 - RNA, 19 nt, Artificial Sequence
  Description of Artificial Sequence: Synthetic oligonucleotide
gccacggauagcaagacgg

SEQ ID NO: 1058364 - RNA, 19 nt, Artificial Sequence
  Description of Artificial Sequence: Synthetic oligonucleotide
acaaggaucccuccaacuu

SEQ ID NO: 1058365 - RNA, 19 nt, Artificial Sequence
  Description of Artificial Sequence: Synthetic oligonucleotide
guaaagugauucaacuaac

SEQ ID NO: 1058366 - RNA, 19 nt, Artificial Sequence
  Description of Artificial Sequence: Synthetic oligonucleotide
cugugugguaaagugauuc

SEQ ID NO: 1058367 - RNA, 19 nt, Artificial Sequence
  Description of Artificial Sequence: Synthetic oligonucleotide
ucauaccuuuacagacccg

SEQ ID NO: 1058368 - RNA, 19 nt, Artificial Sequence
  Description of Artificial Sequence: Synthetic oligonucleotide
uggagcaaucuccaagcaa

SEQ ID NO: 1058369 - RNA, 19 nt, Artificial Sequence
  Description of Artificial Sequence: Synthetic oligonucleotide
uuuuaagagccagcuuuug

SEQ ID NO: 1058370 - RNA, 19 nt, Artificial Sequence
  Description of Artificial Sequence: Synthetic oligonucleotide
gugcuuaaauaaaucacac

SEQ ID NO: 1058371 - RNA, 19 nt, Artificial Sequence
  Description of Artificial Sequence: Synthetic oligonucleotide
aaggaucccuccaacuuug

SEQ ID NO: 1058372 - RNA, 19 nt, Artificial Sequence
  Description of Artificial Sequence: Synthetic oligonucleotide
uucaguacuuaauccuaaa

SEQ ID NO: 1058373 - RNA, 19 nt, Artificial Sequence
  Description of Artificial Sequence: Synthetic oligonucleotide
agaugugcaccccacccca

SEQ ID NO: 1058374 - RNA, 19 nt, Artificial Sequence
  Description of Artificial Sequence: Synthetic oligonucleotide
augugcaccccaccccacc

SEQ ID NO: 1058375 - RNA, 19 nt, Artificial Sequence
  Description of Artificial Sequence: Synthetic oligonucleotide
auaugaucacagaauguca

SEQ ID NO: 1058376 - RNA, 19 nt, Artificial Sequence
  Description of Artificial Sequence: Synthetic oligonucleotide
acacgaucauacugacaac

SEQ ID NO: 1058377 - RNA, 19 nt, Artificial Sequence
  Description of Artificial Sequence: Synthetic oligonucleotide
ugcagccuauguucaauca

SEQ ID NO: 1058378 - RNA, 19 nt, Artificial Sequence
  Description of Artificial Sequence: Synthetic oligonucleotide
cuuuucccuguaauacagc

SEQ ID NO: 1058379 - RNA, 19 nt, Artificial Sequence
  Description of Artificial Sequence: Synthetic oligonucleotide
ugccacggauagcaagacg

SEQ ID NO: 1058380 - RNA, 19 nt, Artificial Sequence
  Description of Artificial Sequence: Synthetic oligonucleotide
cugcucuaaugcaauggag

SEQ ID NO: 1058381 - RNA, 19 nt, Artificial Sequence
  Description of Artificial Sequence: Synthetic oligonucleotide
uacacacgaucauacugac

SEQ ID NO: 1058382 - RNA, 19 nt, Artificial Sequence
  Description of Artificial Sequence: Synthetic oligonucleotide
ucaagccaccuaauauaca

SEQ ID NO: 1058383 - RNA, 19 nt, Artificial Sequence
  Description of Artificial Sequence: Synthetic oligonucleotide
aguuacaaaggaagguuca

SEQ ID NO: 1058384 - RNA, 19 nt, Artificial Sequence
  Description of Artificial Sequence: Synthetic oligonucleotide
gaccaaucuauuucucaca

SEQ ID NO: 1058385 - RNA, 19 nt, Artificial Sequence
  Description of Artificial Sequence: Synthetic oligonucleotide
aaacugucacuuguucuga

SEQ ID NO: 1058386 - RNA, 19 nt, Artificial Sequence
  Description of Artificial Sequence: Synthetic oligonucleotide
uggaaucagcaauguaacu

SEQ ID NO: 1058387 - RNA, 19 nt, Artificial Sequence
  Description of Artificial Sequence: Synthetic oligonucleotide
gaaacgagacguguaccug

SEQ ID NO: 1058388 - RNA, 19 nt, Artificial Sequence
  Description of Artificial Sequence: Synthetic oligonucleotide
guuacaucugaaugaagcu

SEQ ID NO: 1058389 - RNA, 19 nt, Artificial Sequence
  Description of Artificial Sequence: Synthetic oligonucleotide
uucuaugaaguuucuuguu

SEQ ID NO: 1058390 - RNA, 19 nt, Artificial Sequence
  Description of Artificial Sequence: Synthetic oligonucleotide
ugaggcuaaccugaaaaua

SEQ ID NO: 1058391 - RNA, 19 nt, Artificial Sequence
  Description of Artificial Sequence: Synthetic oligonucleotide
uucgcauacucaguuacau

SEQ ID NO: 1058392 - RNA, 19 nt, Artificial Sequence
  Description of Artificial Sequence: Synthetic oligonucleotide
uugcgauaguucucaacac

SEQ ID NO: 1058393 - RNA, 19 nt, Artificial Sequence
  Description of Artificial Sequence: Synthetic oligonucleotide
acaucaugcaguucccaau

SEQ ID NO: 1058394 - RNA, 19 nt, Artificial Sequence
  Description of Artificial Sequence: Synthetic oligonucleotide
uguccugacuccgaacggc

SEQ ID NO: 1058395 - RNA, 19 nt, Artificial Sequence
  Description of Artificial Sequence: Synthetic oligonucleotide
ccagaaaagguugcgauag

SEQ ID NO: 1058396 - RNA, 19 nt, Artificial Sequence
  Description of Artificial Sequence: Synthetic oligonucleotide
ugugcaccccaccccaccc

SEQ ID NO: 1058397 - RNA, 19 nt, Artificial Sequence
  Description of Artificial Sequence: Synthetic oligonucleotide
auuuauaauguagggcaau

SEQ ID NO: 1058398 - RNA, 19 nt, Artificial Sequence
  Description of Artificial Sequence: Synthetic oligonucleotide
gucaagccaccuaauauac

SEQ ID NO: 1058399 - RNA, 19 nt, Artificial Sequence
  Description of Artificial Sequence: Synthetic oligonucleotide
aggcaaauguggcuuuuca

SEQ ID NO: 1058400 - RNA, 19 nt, Artificial Sequence
  Description of Artificial Sequence: Synthetic oligonucleotide
guauaaguuuugucugcac

SEQ ID NO: 1058401 - RNA, 19 nt, Artificial Sequence
  Description of Artificial Sequence: Synthetic oligonucleotide
caauguaacuucaaauccu

SEQ ID NO: 1058402 - RNA, 19 nt, Artificial Sequence
  Description of Artificial Sequence: Synthetic oligonucleotide
gugguaaagugauucaacu

SEQ ID NO: 1058403 - RNA, 19 nt, Artificial Sequence
  Description of Artificial Sequence: Synthetic oligonucleotide
agauugugcuuaaauaaau

SEQ ID NO: 1058404 - RNA, 19 nt, Artificial Sequence
  Description of Artificial Sequence: Synthetic oligonucleotide
cagccuauguucaaucaca

SEQ ID NO: 1058405 - RNA, 19 nt, Artificial Sequence
  Description of Artificial Sequence: Synthetic oligonucleotide
cuaauuugaguuuaauauu

SEQ ID NO: 1058406 - RNA, 19 nt, Artificial Sequence
  Description of Artificial Sequence: Synthetic oligonucleotide
agcaauugccaguuacaaa

SEQ ID NO: 1058407 - RNA, 19 nt, Artificial Sequence
  Description of Artificial Sequence: Synthetic oligonucleotide
gggcgaaggaaacagccag

SEQ ID NO: 1058408 - RNA, 19 nt, Artificial Sequence
  Description of Artificial Sequence: Synthetic oligonucleotide
cucugacagccagaaaagg

SEQ ID NO: 1058409 - RNA, 19 nt, Artificial Sequence
  Description of Artificial Sequence: Synthetic oligonucleotide
cagacaucaugcaguuccc

SEQ ID NO: 1058410 - RNA, 19 nt, Artificial Sequence
  Description of Artificial Sequence: Synthetic oligonucleotide
ugcguguuaucuuggucaa

SEQ ID NO: 1058411 - RNA, 19 nt, Artificial Sequence
  Description of Artificial Sequence: Synthetic oligonucleotide
gcuaaccugaaaauaaauc

SEQ ID NO: 1058412 - RNA, 19 nt, Artificial Sequence
  Description of Artificial Sequence: Synthetic oligonucleotide
acagaccaaaccucucccu

SEQ ID NO: 1058413 - RNA, 19 nt, Artificial Sequence
  Description of Artificial Sequence: Synthetic oligonucleotide
ugcaagucaugugaggcua

SEQ ID NO: 1058414 - RNA, 19 nt, Artificial Sequence
  Description of Artificial Sequence: Synthetic oligonucleotide
agaaaagguugcgauaguu

SEQ ID NO: 1058415 - RNA, 19 nt, Artificial Sequence
  Description of Artificial Sequence: Synthetic oligonucleotide
cugacuccgaacggcaggg

SEQ ID NO: 1058416 - RNA, 19 nt, Artificial Sequence
  Description of Artificial Sequence: Synthetic oligonucleotide
cacgaucauacugacaaca

SEQ ID NO: 1058417 - RNA, 19 nt, Artificial Sequence
  Description of Artificial Sequence: Synthetic oligonucleotide
agacuauacugugugguaa

SEQ ID NO: 1058418 - RNA, 19 nt, Artificial Sequence
  Description of Artificial Sequence: Synthetic oligonucleotide
cagguaacauaaaagucua

SEQ ID NO: 1058419 - RNA, 19 nt, Artificial Sequence
  Description of Artificial Sequence: Synthetic oligonucleotide
acgagacguguaccuggcc

SEQ ID NO: 1058420 - RNA, 19 nt, Artificial Sequence
  Description of Artificial Sequence: Synthetic oligonucleotide
caauggagcuaguaaaaua

SEQ ID NO: 1058421 - RNA, 19 nt, Artificial Sequence
  Description of Artificial Sequence: Synthetic oligonucleotide
caccuaauauacagacuuc

SEQ ID NO: 1058422 - RNA, 19 nt, Artificial Sequence
  Description of Artificial Sequence: Synthetic oligonucleotide
uaaugcaauggagcuagua

SEQ ID NO: 1058423 - RNA, 19 nt, Artificial Sequence
  Description of Artificial Sequence: Synthetic oligonucleotide
auugguacucuaauaugau

SEQ ID NO: 1058424 - RNA, 19 nt, Artificial Sequence
  Description of Artificial Sequence: Synthetic oligonucleotide
gcuucgcauacucaguuac

SEQ ID NO: 1058425 - RNA, 19 nt, Artificial Sequence
  Description of Artificial Sequence: Synthetic oligonucleotide
uucagucaagccaccuaau

SEQ ID NO: 1058426 - RNA, 19 nt, Artificial Sequence
  Description of Artificial Sequence: Synthetic oligonucleotide
guaauacagcagauaguac

SEQ ID NO: 1058427 - RNA, 19 nt, Artificial Sequence
  Description of Artificial Sequence: Synthetic oligonucleotide
agguaacauaaaagucuac

SEQ ID NO: 1058428 - RNA, 19 nt, Artificial Sequence
  Description of Artificial Sequence: Synthetic oligonucleotide
agacguguaccuggccagc

SEQ ID NO: 1058429 - RNA, 19 nt, Artificial Sequence
  Description of Artificial Sequence: Synthetic oligonucleotide
cucacuuuucccuguaaua

SEQ ID NO: 1058430 - RNA, 19 nt, Artificial Sequence
  Description of Artificial Sequence: Synthetic oligonucleotide
uaauucuaugaaguuucuu

SEQ ID NO: 1058431 - RNA, 19 nt, Artificial Sequence
  Description of Artificial Sequence: Synthetic oligonucleotide
ccagguaacauaaaagucu

SEQ ID NO: 1058432 - RNA, 19 nt, Artificial Sequence
  Description of Artificial Sequence: Synthetic oligonucleotide
gccuaugcguguuaucuug

SEQ ID NO: 1058433 - RNA, 19 nt, Artificial Sequence
  Description of Artificial Sequence: Synthetic oligonucleotide
cuugaugcugccacggaua

SEQ ID NO: 1058434 - RNA, 19 nt, Artificial Sequence
  Description of Artificial Sequence: Synthetic oligonucleotide
cacggauagcaagacgggc

SEQ ID NO: 1058435 - RNA, 19 nt, Artificial Sequence
  Description of Artificial Sequence: Synthetic oligonucleotide
accauugcaugaaaguuuu

SEQ ID NO: 1058436 - RNA, 19 nt, Artificial Sequence
  Description of Artificial Sequence: Synthetic oligonucleotide
caguacuuaauccuaaauu

SEQ ID NO: 1058437 - RNA, 19 nt, Artificial Sequence
  Description of Artificial Sequence: Synthetic oligonucleotide
gacaaggaucccuccaacu

SEQ ID NO: 1058438 - RNA, 19 nt, Artificial Sequence
  Description of Artificial Sequence: Synthetic oligonucleotide
ucccuguaauacagcagau

SEQ ID NO: 1058439 - RNA, 19 nt, Artificial Sequence
  Description of Artificial Sequence: Synthetic oligonucleotide
acguguaccuggccagcag

SEQ ID NO: 1058440 - RNA, 19 nt, Artificial Sequence
  Description of Artificial Sequence: Synthetic oligonucleotide
acuccgaacggcaggguug

SEQ ID NO: 1058441 - RNA, 19 nt, Artificial Sequence
  Description of Artificial Sequence: Synthetic oligonucleotide
cacaccauugcaugaaagu

SEQ ID NO: 1058442 - RNA, 19 nt, Artificial Sequence
  Description of Artificial Sequence: Synthetic oligonucleotide
auggagcuaguaaaauaca

SEQ ID NO: 1058443 - RNA, 19 nt, Artificial Sequence
  Description of Artificial Sequence: Synthetic oligonucleotide
aggauccaauacaauucag

SEQ ID NO: 1058444 - RNA, 19 nt, Artificial Sequence
  Description of Artificial Sequence: Synthetic oligonucleotide
cuccgaacggcaggguugg

SEQ ID NO: 1058445 - RNA, 19 nt, Artificial Sequence
  Description of Artificial Sequence: Synthetic oligonucleotide
cucacauguuauaacuaua

SEQ ID NO: 1058446 - RNA, 19 nt, Artificial Sequence
  Description of Artificial Sequence: Synthetic oligonucleotide
cacagaaugucauaccuuu

SEQ ID NO: 1058447 - RNA, 19 nt, Artificial Sequence
  Description of Artificial Sequence: Synthetic oligonucleotide
cauaccuuuacagacccgu

SEQ ID NO: 1058448 - RNA, 19 nt, Artificial Sequence
  Description of Artificial Sequence: Synthetic oligonucleotide
cuuguuagauugugcuuaa

SEQ ID NO: 1058449 - RNA, 19 nt, Artificial Sequence
  Description of Artificial Sequence: Synthetic oligonucleotide
guacucuaauaugaucaca

SEQ ID NO: 1058450 - RNA, 19 nt, Artificial Sequence
  Description of Artificial Sequence: Synthetic oligonucleotide
agggccuaugcguguuauc

SEQ ID NO: 1058451 - RNA, 19 nt, Artificial Sequence
  Description of Artificial Sequence: Synthetic oligonucleotide
ccuaugcguguuaucuugg

SEQ ID NO: 1058452 - RNA, 19 nt, Artificial Sequence
  Description of Artificial Sequence: Synthetic oligonucleotide
ucaacaccaauggccugga

SEQ ID NO: 1058453 - RNA, 19 nt, Artificial Sequence
  Description of Artificial Sequence: Synthetic oligonucleotide
gcagccuauguucaaucac

SEQ ID NO: 1058454 - RNA, 19 nt, Artificial Sequence
  Description of Artificial Sequence: Synthetic oligonucleotide
gacaagucugggcuguccu

SEQ ID NO: 1058455 - RNA, 19 nt, Artificial Sequence
  Description of Artificial Sequence: Synthetic oligonucleotide
ucccaccgcucacuuuucc

SEQ ID NO: 1058456 - RNA, 19 nt, Artificial Sequence
  Description of Artificial Sequence: Synthetic oligonucleotide
gucuuaugcauuguaauuu

SEQ ID NO: 1058457 - RNA, 19 nt, Artificial Sequence
  Description of Artificial Sequence: Synthetic oligonucleotide
cuucgcauacucaguuaca

SEQ ID NO: 1058458 - RNA, 19 nt, Artificial Sequence
  Description of Artificial Sequence: Synthetic oligonucleotide
ugcuucgcauacucaguua

SEQ ID NO: 1058459 - RNA, 19 nt, Artificial Sequence
  Description of Artificial Sequence: Synthetic oligonucleotide
gcuucaacaggauccaaua

SEQ ID NO: 1058460 - RNA, 19 nt, Artificial Sequence
  Description of Artificial Sequence: Synthetic oligonucleotide
aggaaccaauacaaggaaa

SEQ ID NO: 1058461 - RNA, 19 nt, Artificial Sequence
  Description of Artificial Sequence: Synthetic oligonucleotide
cacaauacacacgaucaua

SEQ ID NO: 1058462 - RNA, 19 nt, Artificial Sequence
  Description of Artificial Sequence: Synthetic oligonucleotide
caauucaguuccagccuca

SEQ ID NO: 1058463 - RNA, 19 nt, Artificial Sequence
  Description of Artificial Sequence: Synthetic oligonucleotide
ggaaacgagacguguaccu

SEQ ID NO: 1058464 - RNA, 19 nt, Artificial Sequence
  Description of Artificial Sequence: Synthetic oligonucleotide
acgaucauacugacaacaa

SEQ ID NO: 1058465 - RNA, 19 nt, Artificial Sequence
  Description of Artificial Sequence: Synthetic oligonucleotide
agccucaaauguauaaguu

SEQ ID NO: 1058466 - RNA, 19 nt, Artificial Sequence
  Description of Artificial Sequence: Synthetic oligonucleotide
gcucuaaugcaauggagcu

SEQ ID NO: 1058467 - RNA, 19 nt, Artificial Sequence
  Description of Artificial Sequence: Synthetic oligonucleotide
caauuagaguuaacaucaa

SEQ ID NO: 1058468 - RNA, 19 nt, Artificial Sequence
  Description of Artificial Sequence: Synthetic oligonucleotide
uggguauccuggucccacu

SEQ ID NO: 1058469 - RNA, 19 nt, Artificial Sequence
  Description of Artificial Sequence: Synthetic oligonucleotide
aagggccuaugcguguuau

SEQ ID NO: 1058470 - RNA, 19 nt, Artificial Sequence
  Description of Artificial Sequence: Synthetic oligonucleotide
gugugguaaagugauucaa

SEQ ID NO: 1058471 - RNA, 19 nt, Artificial Sequence
  Description of Artificial Sequence: Synthetic oligonucleotide
gccuauguucaaucacaag

SEQ ID NO: 1058472 - RNA, 19 nt, Artificial Sequence
  Description of Artificial Sequence: Synthetic oligonucleotide
cagccucaaauguauaagu

SEQ ID NO: 1058473 - RNA, 19 nt, Artificial Sequence
  Description of Artificial Sequence: Synthetic oligonucleotide
cgaacggcaggguuggacc

SEQ ID NO: 1058474 - RNA, 19 nt, Artificial Sequence
  Description of Artificial Sequence: Synthetic oligonucleotide
cagacuauacuguguggua

SEQ ID NO: 1058475 - RNA, 19 nt, Artificial Sequence
  Description of Artificial Sequence: Synthetic oligonucleotide
ggagcuaguaaaauacaua

SEQ ID NO: 1058476 - RNA, 19 nt, Artificial Sequence
  Description of Artificial Sequence: Synthetic oligonucleotide
accgcucacuuuucccugu

SEQ ID NO: 1058477 - RNA, 19 nt, Artificial Sequence
  Description of Artificial Sequence: Synthetic oligonucleotide
aggcuaaccugaaaauaaa

SEQ ID NO: 1058478 - RNA, 19 nt, Artificial Sequence
  Description of Artificial Sequence: Synthetic oligonucleotide
agcuauacaugcagacuau

SEQ ID NO: 1058479 - RNA, 19 nt, Artificial Sequence
  Description of Artificial Sequence: Synthetic oligonucleotide
cugcacaaggagcagacau

SEQ ID NO: 1058480 - RNA, 19 nt, Artificial Sequence
  Description of Artificial Sequence: Synthetic oligonucleotide
auacucaguuacaucugaa

SEQ ID NO: 1058481 - RNA, 19 nt, Artificial Sequence
  Description of Artificial Sequence: Synthetic oligonucleotide
gaggggcgaaggaaacagc

SEQ ID NO: 1058482 - RNA, 19 nt, Artificial Sequence
  Description of Artificial Sequence: Synthetic oligonucleotide
uuccagccucaaauguaua

SEQ ID NO: 1058483 - RNA, 19 nt, Artificial Sequence
  Description of Artificial Sequence: Synthetic oligonucleotide
ccuuuacagacccgugccc

SEQ ID NO: 1058484 - RNA, 19 nt, Artificial Sequence
  Description of Artificial Sequence: Synthetic oligonucleotide
aucagcaauguaacuucaa

SEQ ID NO: 1058485 - RNA, 19 nt, Artificial Sequence
  Description of Artificial Sequence: Synthetic oligonucleotide
caauacacacgaucauacu

SEQ ID NO: 1058486 - RNA, 19 nt, Artificial Sequence
  Description of Artificial Sequence: Synthetic oligonucleotide
uguaccuggccagcaguuu

SEQ ID NO: 1058487 - RNA, 19 nt, Artificial Sequence
  Description of Artificial Sequence: Synthetic oligonucleotide
ggauccaauacaauucagu

SEQ ID NO: 1058488 - RNA, 19 nt, Artificial Sequence
  Description of Artificial Sequence: Synthetic oligonucleotide
ccuaacaauuagaguuaac

SEQ ID NO: 1058489 - RNA, 19 nt, Artificial Sequence
  Description of Artificial Sequence: Synthetic oligonucleotide
ugaugcugccacggauagc

SEQ ID NO: 1058490 - RNA, 19 nt, Artificial Sequence
  Description of Artificial Sequence: Synthetic oligonucleotide
ccaaucuauuucucacaug

SEQ ID NO: 1058491 - RNA, 19 nt, Artificial Sequence
  Description of Artificial Sequence: Synthetic oligonucleotide
gugaggcuaaccugaaaau

SEQ ID NO: 1058492 - RNA, 19 nt, Artificial Sequence
  Description of Artificial Sequence: Synthetic oligonucleotide
ggcaugacaaggaucccuc

SEQ ID NO: 1058493 - RNA, 19 nt, Artificial Sequence
  Description of Artificial Sequence: Synthetic oligonucleotide
gacaacaaucuggagcaau

SEQ ID NO: 1058494 - RNA, 19 nt, Artificial Sequence
  Description of Artificial Sequence: Synthetic oligonucleotide
gacguguaccuggccagca

SEQ ID NO: 1058495 - RNA, 19 nt, Artificial Sequence
  Description of Artificial Sequence: Synthetic oligonucleotide
gucaggcaaugggaggcgc

SEQ ID NO: 1058496 - RNA, 19 nt, Artificial Sequence
  Description of Artificial Sequence: Synthetic oligonucleotide
gcugccacggauagcaaga

SEQ ID NO: 1058497 - RNA, 19 nt, Artificial Sequence
  Description of Artificial Sequence: Synthetic oligonucleotide
cuauacugugugguaaagu

SEQ ID NO: 1058498 - RNA, 19 nt, Artificial Sequence
  Description of Artificial Sequence: Synthetic oligonucleotide
gagcagacaucaugcaguu

SEQ ID NO: 1058499 - RNA, 19 nt, Artificial Sequence
  Description of Artificial Sequence: Synthetic oligonucleotide
acggccaguggugguagcu

SEQ ID NO: 1058500 - RNA, 19 nt, Artificial Sequence
  Description of Artificial Sequence: Synthetic oligonucleotide
ugacaacaaucuggagcaa

SEQ ID NO: 1058501 - RNA, 19 nt, Artificial Sequence
  Description of Artificial Sequence: Synthetic oligonucleotide
acacacgaucauacugaca

SEQ ID NO: 1058502 - RNA, 19 nt, Artificial Sequence
  Description of Artificial Sequence: Synthetic oligonucleotide
gcagacuauacuguguggu

SEQ ID NO: 1058503 - RNA, 19 nt, Artificial Sequence
  Description of Artificial Sequence: Synthetic oligonucleotide
ccaacaagaugugcacccc

SEQ ID NO: 1058504 - RNA, 19 nt, Artificial Sequence
  Description of Artificial Sequence: Synthetic oligonucleotide
gugcaccccaccccacccc

SEQ ID NO: 1058505 - RNA, 19 nt, Artificial Sequence
  Description of Artificial Sequence: Synthetic oligonucleotide
cugccacggauagcaagac

SEQ ID NO: 1058506 - RNA, 19 nt, Artificial Sequence
  Description of Artificial Sequence: Synthetic oligonucleotide
cccaccgcucacuuuuccc

SEQ ID NO: 1058507 - RNA, 19 nt, Artificial Sequence
  Description of Artificial Sequence: Synthetic oligonucleotide
agaagggccuaugcguguu

SEQ ID NO: 1058508 - RNA, 19 nt, Artificial Sequence
  Description of Artificial Sequence: Synthetic oligonucleotide
cuaugcguguuaucuuggu

SEQ ID NO: 1058509 - RNA, 19 nt, Artificial Sequence
  Description of Artificial Sequence: Synthetic oligonucleotide
ccagaggggcgaaggaaac

SEQ ID NO: 1058510 - RNA, 19 nt, Artificial Sequence
  Description of Artificial Sequence: Synthetic oligonucleotide
cucuaaugcaauggagcua

SEQ ID NO: 1058511 - RNA, 19 nt, Artificial Sequence
  Description of Artificial Sequence: Synthetic oligonucleotide
guccugacuccgaacggca

SEQ ID NO: 1058512 - RNA, 19 nt, Artificial Sequence
  Description of Artificial Sequence: Synthetic oligonucleotide
cacauguuauaacuauauu

SEQ ID NO: 1058513 - RNA, 19 nt, Artificial Sequence
  Description of Artificial Sequence: Synthetic oligonucleotide
cccucuugaugcugccacg

SEQ ID NO: 1058514 - RNA, 19 nt, Artificial Sequence
  Description of Artificial Sequence: Synthetic oligonucleotide
gccagaaaagguugcgaua

SEQ ID NO: 1058515 - RNA, 19 nt, Artificial Sequence
  Description of Artificial Sequence: Synthetic oligonucleotide
gggccuaugcguguuaucu

SEQ ID NO: 1058516 - RNA, 19 nt, Artificial Sequence
  Description of Artificial Sequence: Synthetic oligonucleotide
gugauucaacuaacuuuaa

SEQ ID NO: 1058517 - RNA, 19 nt, Artificial Sequence
  Description of Artificial Sequence: Synthetic oligonucleotide
gacuccgaacggcaggguu

SEQ ID NO: 1058518 - RNA, 19 nt, Artificial Sequence
  Description of Artificial Sequence: Synthetic oligonucleotide
ucccaagcagaagggccua

SEQ ID NO: 1058519 - RNA, 19 nt, Artificial Sequence
  Description of Artificial Sequence: Synthetic oligonucleotide
agguugcgauaguucucaa

SEQ ID NO: 1058520 - RNA, 19 nt, Artificial Sequence
  Description of Artificial Sequence: Synthetic oligonucleotide
ugacuccgaacggcagggu

SEQ ID NO: 1058521 - RNA, 19 nt, Artificial Sequence
  Description of Artificial Sequence: Synthetic oligonucleotide
gccaguuacaaaggaaggu

SEQ ID NO: 1058522 - RNA, 19 nt, Artificial Sequence
  Description of Artificial Sequence: Synthetic oligonucleotide
cucccaccgcucacuuuuc

SEQ ID NO: 1058523 - RNA, 19 nt, Artificial Sequence
  Description of Artificial Sequence: Synthetic oligonucleotide
cacggccaguggugguagc

SEQ ID NO: 1058524 - RNA, 19 nt, Artificial Sequence
  Description of Artificial Sequence: Synthetic oligonucleotide
cgagacguguaccuggcca

SEQ ID NO: 1058525 - RNA, 19 nt, Artificial Sequence
  Description of Artificial Sequence: Synthetic oligonucleotide
cccacuacugaggaaaaua

SEQ ID NO: 1058526 - RNA, 19 nt, Artificial Sequence
  Description of Artificial Sequence: Synthetic oligonucleotide
gcucacuuuucccuguaau

SEQ ID NO: 1058527 - RNA, 19 nt, Artificial Sequence
  Description of Artificial Sequence: Synthetic oligonucleotide
cugcuucgcauacucaguu

SEQ ID NO: 1058528 - RNA, 19 nt, Artificial Sequence
  Description of Artificial Sequence: Synthetic oligonucleotide
ggcgaaggaaacagccaga

SEQ ID NO: 1058529 - RNA, 19 nt, Artificial Sequence
  Description of Artificial Sequence: Synthetic oligonucleotide
caagacgggccagguccug

SEQ ID NO: 1058530 - RNA, 19 nt, Artificial Sequence
  Description of Artificial Sequence: Synthetic oligonucleotide
ggggcgaaggaaacagcca

SEQ ID NO: 1058531 - RNA, 19 nt, Artificial Sequence
  Description of Artificial Sequence: Synthetic oligonucleotide
ggcuaaccugaaaauaaau

SEQ ID NO: 1058532 - RNA, 19 nt, Artificial Sequence
  Description of Artificial Sequence: Synthetic oligonucleotide
ccgaacggcaggguuggac

SEQ ID NO: 1058533 - RNA, 19 nt, Artificial Sequence
  Description of Artificial Sequence: Synthetic oligonucleotide
gagcaaucuccaagcaauu

SEQ ID NO: 1058534 - RNA, 19 nt, Artificial Sequence
  Description of Artificial Sequence: Synthetic oligonucleotide
gcacggccaguggugguag

SEQ ID NO: 1058535 - RNA, 19 nt, Artificial Sequence
  Description of Artificial Sequence: Synthetic oligonucleotide
gcugcgcacggccaguggu

SEQ ID NO: 1058536 - RNA, 19 nt, Artificial Sequence
  Description of Artificial Sequence: Synthetic oligonucleotide
cuaaugcaauggagcuagu

SEQ ID NO: 1058537 - RNA, 19 nt, Artificial Sequence
  Description of Artificial Sequence: Synthetic oligonucleotide
ccaccgcucacuuuucccu

SEQ ID NO: 1058538 - RNA, 19 nt, Artificial Sequence
  Description of Artificial Sequence: Synthetic oligonucleotide
uccgaacggcaggguugga

SEQ ID NO: 1058539 - RNA, 19 nt, Artificial Sequence
  Description of Artificial Sequence: Synthetic oligonucleotide
cacaaggagcagacaucau

SEQ ID NO: 1058540 - RNA, 19 nt, Artificial Sequence
  Description of Artificial Sequence: Synthetic oligonucleotide
cccuguaauacagcagaua

SEQ ID NO: 1058541 - RNA, 19 nt, Artificial Sequence
  Description of Artificial Sequence: Synthetic oligonucleotide
cacucucccaccgcucacu

SEQ ID NO: 1058542 - RNA, 19 nt, Artificial Sequence
  Description of Artificial Sequence: Synthetic oligonucleotide
gcguguuaucuuggucaac

SEQ ID NO: 1058543 - RNA, 19 nt, Artificial Sequence
  Description of Artificial Sequence: Synthetic oligonucleotide
ccacaauacacacgaucau

SEQ ID NO: 1058544 - RNA, 19 nt, Artificial Sequence
  Description of Artificial Sequence: Synthetic oligonucleotide
ggccuaugcguguuaucuu

SEQ ID NO: 1058545 - RNA, 19 nt, Artificial Sequence
  Description of Artificial Sequence: Synthetic oligonucleotide
ccauugcaugaaaguuuua

SEQ ID NO: 1058546 - RNA, 19 nt, Artificial Sequence
  Description of Artificial Sequence: Synthetic oligonucleotide
gcaagacgggccagguccu

SEQ ID NO: 1058547 - RNA, 19 nt, Artificial Sequence
  Description of Artificial Sequence: Synthetic oligonucleotide
cucucccaccgcucacuuu

SEQ ID NO: 1058548 - RNA, 19 nt, Artificial Sequence
  Description of Artificial Sequence: Synthetic oligonucleotide
ccgcucacuuuucccugua

SEQ ID NO: 1058549 - RNA, 19 nt, Artificial Sequence
  Description of Artificial Sequence: Synthetic oligonucleotide
aacaaaacuacccauagca

SEQ ID NO: 1058550 - RNA, 19 nt, Artificial Sequence
  Description of Artificial Sequence: Synthetic oligonucleotide
uuuaguucaauggugaugg

SEQ ID NO: 1058551 - RNA, 19 nt, Artificial Sequence
  Description of Artificial Sequence: Synthetic oligonucleotide
aauuaaacaggaaagguuc

SEQ ID NO: 1058552 - RNA, 19 nt, Artificial Sequence
  Description of Artificial Sequence: Synthetic oligonucleotide
aaaagugagauuuaugaga

SEQ ID NO: 1058553 - RNA, 19 nt, Artificial Sequence
  Description of Artificial Sequence: Synthetic oligonucleotide
gaaagugauauacuuaggg

SEQ ID NO: 1058554 - RNA, 19 nt, Artificial Sequence
  Description of Artificial Sequence: Synthetic oligonucleotide
ugagauaaccacaauacag

SEQ ID NO: 1058555 - RNA, 19 nt, Artificial Sequence
  Description of Artificial Sequence: Synthetic oligonucleotide
ucaaccauaacauugaaau

SEQ ID NO: 1058556 - RNA, 19 nt, Artificial Sequence
  Description of Artificial Sequence: Synthetic oligonucleotide
aacuaaaaguaugucaacc

SEQ ID NO: 1058557 - RNA, 19 nt, Artificial Sequence
  Description of Artificial Sequence: Synthetic oligonucleotide
uaugucaaccauaacauug

SEQ ID NO: 1058558 - RNA, 19 nt, Artificial Sequence
  Description of Artificial Sequence: Synthetic oligonucleotide
aguaaauuucaccaccacc

SEQ ID NO: 1058559 - RNA, 19 nt, Artificial Sequence
  Description of Artificial Sequence: Synthetic oligonucleotide
ucuauauaagaaauuaaac

SEQ ID NO: 1058560 - RNA, 19 nt, Artificial Sequence
  Description of Artificial Sequence: Synthetic oligonucleotide
aguagaauauucuagggug

SEQ ID NO: 1058561 - RNA, 19 nt, Artificial Sequence
  Description of Artificial Sequence: Synthetic oligonucleotide
aaauggguaaaucugaaaa

SEQ ID NO: 1058562 - RNA, 19 nt, Artificial Sequence
  Description of Artificial Sequence: Synthetic oligonucleotide
uacuauaauauccuaaacu

SEQ ID NO: 1058563 - RNA, 19 nt, Artificial Sequence
  Description of Artificial Sequence: Synthetic oligonucleotide
uccuaaacuauguucaacg

SEQ ID NO: 1058564 - RNA, 19 nt, Artificial Sequence
  Description of Artificial Sequence: Synthetic oligonucleotide
acaguuaugaauuuaauua

SEQ ID NO: 1058565 - RNA, 19 nt, Artificial Sequence
  Description of Artificial Sequence: Synthetic oligonucleotide
uuggcaaacaauuagcuga

SEQ ID NO: 1058566 - RNA, 19 nt, Artificial Sequence
  Description of Artificial Sequence: Synthetic oligonucleotide
aguccaaaguuccacaagc

SEQ ID NO: 1058567 - RNA, 19 nt, Artificial Sequence
  Description of Artificial Sequence: Synthetic oligonucleotide
uguauuucuaaaauaucug

SEQ ID NO: 1058568 - RNA, 19 nt, Artificial Sequence
  Description of Artificial Sequence: Synthetic oligonucleotide
aaaaccugugaacuauuac

SEQ ID NO: 1058569 - RNA, 19 nt, Artificial Sequence
  Description of Artificial Sequence: Synthetic oligonucleotide
aguaaaguuaaacaagcug

SEQ ID NO: 1058570 - RNA, 19 nt, Artificial Sequence
  Description of Artificial Sequence: Synthetic oligonucleotide
guaaaguuaaacaagcugc

SEQ ID NO: 1058571 - RNA, 19 nt, Artificial Sequence
  Description of Artificial Sequence: Synthetic oligonucleotide
aacaacugacaccaagucg

SEQ ID NO: 1058572 - RNA, 19 nt, Artificial Sequence
  Description of Artificial Sequence: Synthetic oligonucleotide
aaacaaaacuacccauagc

SEQ ID NO: 1058573 - RNA, 19 nt, Artificial Sequence
  Description of Artificial Sequence: Synthetic oligonucleotide
uacauaucaacauaguggu

SEQ ID NO: 1058574 - RNA, 19 nt, Artificial Sequence
  Description of Artificial Sequence: Synthetic oligonucleotide
aaacaauuagcugacaugu

SEQ ID NO: 1058575 - RNA, 19 nt, Artificial Sequence
  Description of Artificial Sequence: Synthetic oligonucleotide
ucauuuggcaaacaauuag

SEQ ID NO: 1058576 - RNA, 19 nt, Artificial Sequence
  Description of Artificial Sequence: Synthetic oligonucleotide
acuauaauauccuaaacua

SEQ ID NO: 1058577 - RNA, 19 nt, Artificial Sequence
  Description of Artificial Sequence: Synthetic oligonucleotide
aaacaacugacaccaaguc

SEQ ID NO: 1058578 - RNA, 19 nt, Artificial Sequence
  Description of Artificial Sequence: Synthetic oligonucleotide
agaauuguguuucagggug

SEQ ID NO: 1058579 - RNA, 19 nt, Artificial Sequence
  Description of Artificial Sequence: Synthetic oligonucleotide
agggguuuaagacacacuc

SEQ ID NO: 1058580 - RNA, 19 nt, Artificial Sequence
  Description of Artificial Sequence: Synthetic oligonucleotide
aaaggaaguugguaguuag

SEQ ID NO: 1058581 - RNA, 19 nt, Artificial Sequence
  Description of Artificial Sequence: Synthetic oligonucleotide
gcaaguaucucccugaugg

SEQ ID NO: 1058582 - RNA, 19 nt, Artificial Sequence
  Description of Artificial Sequence: Synthetic oligonucleotide
uggguaaaucugaaaaugg

SEQ ID NO: 1058583 - RNA, 19 nt, Artificial Sequence
  Description of Artificial Sequence: Synthetic oligonucleotide
  modified_base (17)..(17): a, c, u, g, unknown or other
aagaaugccuguguuanac

SEQ ID NO: 1058584 - RNA, 19 nt, Artificial Sequence
  Description of Artificial Sequence: Synthetic oligonucleotide
uacagcgaaaggaaguugg

SEQ ID NO: 1058585 - RNA, 19 nt, Artificial Sequence
  Description of Artificial Sequence: Synthetic oligonucleotide
ucaacucccaccaaugcag

SEQ ID NO: 1058586 - RNA, 19 nt, Artificial Sequence
  Description of Artificial Sequence: Synthetic oligonucleotide
ugagauauuuacaagcauc

SEQ ID NO: 1058587 - RNA, 19 nt, Artificial Sequence
  Description of Artificial Sequence: Synthetic oligonucleotide
caaaacuacccauagcagg

SEQ ID NO: 1058588 - RNA, 19 nt, Artificial Sequence
  Description of Artificial Sequence: Synthetic oligonucleotide
ugaaaauggguaaaucuga

SEQ ID NO: 1058589 - RNA, 19 nt, Artificial Sequence
  Description of Artificial Sequence: Synthetic oligonucleotide
cauaucaacauaguggugc

SEQ ID NO: 1058590 - RNA, 19 nt, Artificial Sequence
  Description of Artificial Sequence: Synthetic oligonucleotide
aauaaacucaucggaagag

SEQ ID NO: 1058591 - RNA, 19 nt, Artificial Sequence
  Description of Artificial Sequence: Synthetic oligonucleotide
aaugcagucacuauguaga

SEQ ID NO: 1058592 - RNA, 19 nt, Artificial Sequence
  Description of Artificial Sequence: Synthetic oligonucleotide
ugagauuuaugagauaacc

SEQ ID NO: 1058593 - RNA, 19 nt, Artificial Sequence
  Description of Artificial Sequence: Synthetic oligonucleotide
acaacugacaccaagucgg

SEQ ID NO: 1058594 - RNA, 19 nt, Artificial Sequence
  Description of Artificial Sequence: Synthetic oligonucleotide
aaggucugagauguuagcc

SEQ ID NO: 1058595 - RNA, 19 nt, Artificial Sequence
  Description of Artificial Sequence: Synthetic oligonucleotide
ucucuagugcucuaaaacc

SEQ ID NO: 1058596 - RNA, 19 nt, Artificial Sequence
  Description of Artificial Sequence: Synthetic oligonucleotide
aguacucuacuauacauca

SEQ ID NO: 1058597 - RNA, 19 nt, Artificial Sequence
  Description of Artificial Sequence: Synthetic oligonucleotide
gaccaguuuaguucaaugg

SEQ ID NO: 1058598 - RNA, 19 nt, Artificial Sequence
  Description of Artificial Sequence: Synthetic oligonucleotide
auguagacaaaagaaauag

SEQ ID NO: 1058599 - RNA, 19 nt, Artificial Sequence
  Description of Artificial Sequence: Synthetic oligonucleotide
aacauugaaaugccaagga

SEQ ID NO: 1058600 - RNA, 19 nt, Artificial Sequence
  Description of Artificial Sequence: Synthetic oligonucleotide
agcgaaaggaaguugguag

SEQ ID NO: 1058601 - RNA, 19 nt, Artificial Sequence
  Description of Artificial Sequence: Synthetic oligonucleotide
uccguaauggaugugagcc

SEQ ID NO: 1058602 - RNA, 19 nt, Artificial Sequence
  Description of Artificial Sequence: Synthetic oligonucleotide
uggaacuaaaaguauguca

SEQ ID NO: 1058603 - RNA, 19 nt, Artificial Sequence
  Description of Artificial Sequence: Synthetic oligonucleotide
uaaaguuaaacaagcugca

SEQ ID NO: 1058604 - RNA, 19 nt, Artificial Sequence
  Description of Artificial Sequence: Synthetic oligonucleotide
uuaugagauaaccacaaua

SEQ ID NO: 1058605 - RNA, 19 nt, Artificial Sequence
  Description of Artificial Sequence: Synthetic oligonucleotide
uugguaguuagaaagucca

SEQ ID NO: 1058606 - RNA, 19 nt, Artificial Sequence
  Description of Artificial Sequence: Synthetic oligonucleotide
uaaaucugaaaauggcugc

SEQ ID NO: 1058607 - RNA, 19 nt, Artificial Sequence
  Description of Artificial Sequence: Synthetic oligonucleotide
aagacuuagaacauuccag

SEQ ID NO: 1058608 - RNA, 19 nt, Artificial Sequence
  Description of Artificial Sequence: Synthetic oligonucleotide
aagaaauagucacuuggcu

SEQ ID NO: 1058609 - RNA, 19 nt, Artificial Sequence
  Description of Artificial Sequence: Synthetic oligonucleotide
acaaccaauaaucauugca

SEQ ID NO: 1058610 - RNA, 19 nt, Artificial Sequence
  Description of Artificial Sequence: Synthetic oligonucleotide
uuauccaagugcaaccugc

SEQ ID NO: 1058611 - RNA, 19 nt, Artificial Sequence
  Description of Artificial Sequence: Synthetic oligonucleotide
uaacauugaaaugccaagg

SEQ ID NO: 1058612 - RNA, 19 nt, Artificial Sequence
  Description of Artificial Sequence: Synthetic oligonucleotide
aauggguaaaucugaaaau

SEQ ID NO: 1058613 - RNA, 19 nt, Artificial Sequence
  Description of Artificial Sequence: Synthetic oligonucleotide
aaugucauagccccagggu

SEQ ID NO: 1058614 - RNA, 19 nt, Artificial Sequence
  Description of Artificial Sequence: Synthetic oligonucleotide
gagugaagagcaaacacgg

SEQ ID NO: 1058615 - RNA, 19 nt, Artificial Sequence
  Description of Artificial Sequence: Synthetic oligonucleotide
aacucaucggaagagucac

SEQ ID NO: 1058616 - RNA, 19 nt, Artificial Sequence
  Description of Artificial Sequence: Synthetic oligonucleotide
aaagggguuuaagacacac

SEQ ID NO: 1058617 - RNA, 19 nt, Artificial Sequence
  Description of Artificial Sequence: Synthetic oligonucleotide
gaaagguucauaccaggcc

SEQ ID NO: 1058618 - RNA, 19 nt, Artificial Sequence
  Description of Artificial Sequence: Synthetic oligonucleotide
aacauaguggugccuaucu

SEQ ID NO: 1058619 - RNA, 19 nt, Artificial Sequence
  Description of Artificial Sequence: Synthetic oligonucleotide
accaagucgguccucgucc

SEQ ID NO: 1058620 - RNA, 19 nt, Artificial Sequence
  Description of Artificial Sequence: Synthetic oligonucleotide
uaaucauugcagugaauag

SEQ ID NO: 1058621 - RNA, 19 nt, Artificial Sequence
  Description of Artificial Sequence: Synthetic oligonucleotide
ucccauaucugucaagcag

SEQ ID NO: 1058622 - RNA, 19 nt, Artificial Sequence
  Description of Artificial Sequence: Synthetic oligonucleotide
gagauaaccacaauacagc

SEQ ID NO: 1058623 - RNA, 19 nt, Artificial Sequence
  Description of Artificial Sequence: Synthetic oligonucleotide
aaugguacuauaauauccu

SEQ ID NO: 1058624 - RNA, 19 nt, Artificial Sequence
  Description of Artificial Sequence: Synthetic oligonucleotide
augugauauuggcaaaagc

SEQ ID NO: 1058625 - RNA, 19 nt, Artificial Sequence
  Description of Artificial Sequence: Synthetic oligonucleotide
acaagcugagaucacguuc

SEQ ID NO: 1058626 - RNA, 19 nt, Artificial Sequence
  Description of Artificial Sequence: Synthetic oligonucleotide
uuccuagucaaucugaguu

SEQ ID NO: 1058627 - RNA, 19 nt, Artificial Sequence
  Description of Artificial Sequence: Synthetic oligonucleotide
cauuuaagcacaaaccuca

SEQ ID NO: 1058628 - RNA, 19 nt, Artificial Sequence
  Description of Artificial Sequence: Synthetic oligonucleotide
acaaaccucauucagugga

SEQ ID NO: 1058629 - RNA, 19 nt, Artificial Sequence
  Description of Artificial Sequence: Synthetic oligonucleotide
ugaaggucugagauguuag

SEQ ID NO: 1058630 - RNA, 19 nt, Artificial Sequence
  Description of Artificial Sequence: Synthetic oligonucleotide
ggugaaaagauguggaaag

SEQ ID NO: 1058631 - RNA, 19 nt, Artificial Sequence
  Description of Artificial Sequence: Synthetic oligonucleotide
ugcacaaccaauaaucauu

SEQ ID NO: 1058632 - RNA, 19 nt, Artificial Sequence
  Description of Artificial Sequence: Synthetic oligonucleotide
cuuggcuaaugucauagcc

SEQ ID NO: 1058633 - RNA, 19 nt, Artificial Sequence
  Description of Artificial Sequence: Synthetic oligonucleotide
gacaggaugaaagaaaaca

SEQ ID NO: 1058634 - RNA, 19 nt, Artificial Sequence
  Description of Artificial Sequence: Synthetic oligonucleotide
caguuaugaauuuaauuac

SEQ ID NO: 1058635 - RNA, 19 nt, Artificial Sequence
  Description of Artificial Sequence: Synthetic oligonucleotide
aaccaauaaucauugcagu

SEQ ID NO: 1058636 - RNA, 19 nt, Artificial Sequence
  Description of Artificial Sequence: Synthetic oligonucleotide
cucuacuauacaucaaacc

SEQ ID NO: 1058637 - RNA, 19 nt, Artificial Sequence
  Description of Artificial Sequence: Synthetic oligonucleotide
ucauuuaagcacaaaccuc

SEQ ID NO: 1058638 - RNA, 19 nt, Artificial Sequence
  Description of Artificial Sequence: Synthetic oligonucleotide
ugaucgaucccauaucugu

SEQ ID NO: 1058639 - RNA, 19 nt, Artificial Sequence
  Description of Artificial Sequence: Synthetic oligonucleotide
uguaagagcguagaggaga

SEQ ID NO: 1058640 - RNA, 19 nt, Artificial Sequence
  Description of Artificial Sequence: Synthetic oligonucleotide
cuauacaucaaaccacaag

SEQ ID NO: 1058641 - RNA, 19 nt, Artificial Sequence
  Description of Artificial Sequence: Synthetic oligonucleotide
uuuggcaaacaauuagcug

SEQ ID NO: 1058642 - RNA, 19 nt, Artificial Sequence
  Description of Artificial Sequence: Synthetic oligonucleotide
aaaacuacccauagcagga

SEQ ID NO: 1058643 - RNA, 19 nt, Artificial Sequence
  Description of Artificial Sequence: Synthetic oligonucleotide
aaaguaugucaaccauaac

SEQ ID NO: 1058644 - RNA, 19 nt, Artificial Sequence
  Description of Artificial Sequence: Synthetic oligonucleotide
aaauuaaacaggaaagguu

SEQ ID NO: 1058645 - RNA, 19 nt, Artificial Sequence
  Description of Artificial Sequence: Synthetic oligonucleotide
ugaaaagauguggaaagug

SEQ ID NO: 1058646 - RNA, 19 nt, Artificial Sequence
  Description of Artificial Sequence: Synthetic oligonucleotide
ugcuguaagagcguagagg

SEQ ID NO: 1058647 - RNA, 19 nt, Artificial Sequence
  Description of Artificial Sequence: Synthetic oligonucleotide
aguuccacaagcugagauc

SEQ ID NO: 1058648 - RNA, 19 nt, Artificial Sequence
  Description of Artificial Sequence: Synthetic oligonucleotide
uucccuggugaaaagaugu

SEQ ID NO: 1058649 - RNA, 19 nt, Artificial Sequence
  Description of Artificial Sequence: Synthetic oligonucleotide
caaacaauuagcugacaug

SEQ ID NO: 1058650 - RNA, 19 nt, Artificial Sequence
  Description of Artificial Sequence: Synthetic oligonucleotide
uauuggcaaaagcuguucc

SEQ ID NO: 1058651 - RNA, 19 nt, Artificial Sequence
  Description of Artificial Sequence: Synthetic oligonucleotide
ugucauagccccaggguag

SEQ ID NO: 1058652 - RNA, 19 nt, Artificial Sequence
  Description of Artificial Sequence: Synthetic oligonucleotide
agacuuagaacauuccagu

SEQ ID NO: 1058653 - RNA, 19 nt, Artificial Sequence
  Description of Artificial Sequence: Synthetic oligonucleotide
agugagauuuaugagauaa

SEQ ID NO: 1058654 - RNA, 19 nt, Artificial Sequence
  Description of Artificial Sequence: Synthetic oligonucleotide
agugaauaggucucuauau

SEQ ID NO: 1058655 - RNA, 19 nt, Artificial Sequence
  Description of Artificial Sequence: Synthetic oligonucleotide
uaaaaguaugucaaccaua

SEQ ID NO: 1058656 - RNA, 19 nt, Artificial Sequence
  Description of Artificial Sequence: Synthetic oligonucleotide
aacuauguucaacguuuuc

SEQ ID NO: 1058657 - RNA, 19 nt, Artificial Sequence
  Description of Artificial Sequence: Synthetic oligonucleotide
aaaguuaaacaagcugcag

SEQ ID NO: 1058658 - RNA, 19 nt, Artificial Sequence
  Description of Artificial Sequence: Synthetic oligonucleotide
cucuauauaagaaauuaaa

SEQ ID NO: 1058659 - RNA, 19 nt, Artificial Sequence
  Description of Artificial Sequence: Synthetic oligonucleotide
aacacggagagaagaaggg

SEQ ID NO: 1058660 - RNA, 19 nt, Artificial Sequence
  Description of Artificial Sequence: Synthetic oligonucleotide
acaagcaucuauuuacagu

SEQ ID NO: 1058661 - RNA, 19 nt, Artificial Sequence
  Description of Artificial Sequence: Synthetic oligonucleotide
cauagcaggagauaaagaa

SEQ ID NO: 1058662 - RNA, 19 nt, Artificial Sequence
  Description of Artificial Sequence: Synthetic oligonucleotide
auagcaggagauaaagaac

SEQ ID NO: 1058663 - RNA, 19 nt, Artificial Sequence
  Description of Artificial Sequence: Synthetic oligonucleotide
ucuagugcucuaaaaccug

SEQ ID NO: 1058664 - RNA, 19 nt, Artificial Sequence
  Description of Artificial Sequence: Synthetic oligonucleotide
uggaugagauauuuacaag

SEQ ID NO: 1058665 - RNA, 19 nt, Artificial Sequence
  Description of Artificial Sequence: Synthetic oligonucleotide
uaaacucaucggaagaguc

SEQ ID NO: 1058666 - RNA, 19 nt, Artificial Sequence
  Description of Artificial Sequence: Synthetic oligonucleotide
aaaauggguaaaucugaaa

SEQ ID NO: 1058667 - RNA, 19 nt, Artificial Sequence
  Description of Artificial Sequence: Synthetic oligonucleotide
ugcucuaaaaccugugaac

SEQ ID NO: 1058668 - RNA, 19 nt, Artificial Sequence
  Description of Artificial Sequence: Synthetic oligonucleotide
gaugagauauuuacaagca

SEQ ID NO: 1058669 - RNA, 19 nt, Artificial Sequence
  Description of Artificial Sequence: Synthetic oligonucleotide
agagucacacauaaugcac

SEQ ID NO: 1058670 - RNA, 19 nt, Artificial Sequence
  Description of Artificial Sequence: Synthetic oligonucleotide
acuuagaacauuccaguaa

SEQ ID NO: 1058671 - RNA, 19 nt, Artificial Sequence
  Description of Artificial Sequence: Synthetic oligonucleotide
uuggaguacucuacuauac

SEQ ID NO: 1058672 - RNA, 19 nt, Artificial Sequence
  Description of Artificial Sequence: Synthetic oligonucleotide
ucggaagagucacacauaa

SEQ ID NO: 1058673 - RNA, 19 nt, Artificial Sequence
  Description of Artificial Sequence: Synthetic oligonucleotide
acugugaucgaucccauau

SEQ ID NO: 1058674 - RNA, 19 nt, Artificial Sequence
  Description of Artificial Sequence: Synthetic oligonucleotide
agauuacaggccgacauuc

SEQ ID NO: 1058675 - RNA, 19 nt, Artificial Sequence
  Description of Artificial Sequence: Synthetic oligonucleotide
ugucaagcagaccaguuua

SEQ ID NO: 1058676 - RNA, 19 nt, Artificial Sequence
  Description of Artificial Sequence: Synthetic oligonucleotide
agaaaccucaacccugaag

SEQ ID NO: 1058677 - RNA, 19 nt, Artificial Sequence
  Description of Artificial Sequence: Synthetic oligonucleotide
uucauaccaggccucaacu

SEQ ID NO: 1058678 - RNA, 19 nt, Artificial Sequence
  Description of Artificial Sequence: Synthetic oligonucleotide
ucuaaaaccugugaacuau

SEQ ID NO: 1058679 - RNA, 19 nt, Artificial Sequence
  Description of Artificial Sequence: Synthetic oligonucleotide
aaguuccacaagcugagau

SEQ ID NO: 1058680 - RNA, 19 nt, Artificial Sequence
  Description of Artificial Sequence: Synthetic oligonucleotide
uccauuccuagucaaucug

SEQ ID NO: 1058681 - RNA, 19 nt, Artificial Sequence
  Description of Artificial Sequence: Synthetic oligonucleotide
ucaauggugauggaugaga

SEQ ID NO: 1058682 - RNA, 19 nt, Artificial Sequence
  Description of Artificial Sequence: Synthetic oligonucleotide
ugguacuauaauauccuaa

SEQ ID NO: 1058683 - RNA, 19 nt, Artificial Sequence
  Description of Artificial Sequence: Synthetic oligonucleotide
gugauauuggcaaaagcug

SEQ ID NO: 1058684 - RNA, 19 nt, Artificial Sequence
  Description of Artificial Sequence: Synthetic oligonucleotide
uaggguguauuucuaaaau

SEQ ID NO: 1058685 - RNA, 19 nt, Artificial Sequence
  Description of Artificial Sequence: Synthetic oligonucleotide
cauaacauugaaaugccaa

SEQ ID NO: 1058686 - RNA, 19 nt, Artificial Sequence
  Description of Artificial Sequence: Synthetic oligonucleotide
aauaucugaaggagaccgg

SEQ ID NO: 1058687 - RNA, 19 nt, Artificial Sequence
  Description of Artificial Sequence: Synthetic oligonucleotide
caaugcagucacuauguag

SEQ ID NO: 1058688 - RNA, 19 nt, Artificial Sequence
  Description of Artificial Sequence: Synthetic oligonucleotide
ccaguaaaguuaaacaagc

SEQ ID NO: 1058689 - RNA, 19 nt, Artificial Sequence
  Description of Artificial Sequence: Synthetic oligonucleotide
uguacuccguaauggaugu

SEQ ID NO: 1058690 - RNA, 19 nt, Artificial Sequence
  Description of Artificial Sequence: Synthetic oligonucleotide
aguugguaguuagaaaguc

SEQ ID NO: 1058691 - RNA, 19 nt, Artificial Sequence
  Description of Artificial Sequence: Synthetic oligonucleotide
cagcaaguaaauuucacca

SEQ ID NO: 1058692 - RNA, 19 nt, Artificial Sequence
  Description of Artificial Sequence: Synthetic oligonucleotide
gaccggaggauccacacug

SEQ ID NO: 1058693 - RNA, 19 nt, Artificial Sequence
  Description of Artificial Sequence: Synthetic oligonucleotide
aaaucugaaaauggcugcu

SEQ ID NO: 1058694 - RNA, 19 nt, Artificial Sequence
  Description of Artificial Sequence: Synthetic oligonucleotide
cauuccaguaaaguuaaac

SEQ ID NO: 1058695 - RNA, 19 nt, Artificial Sequence
  Description of Artificial Sequence: Synthetic oligonucleotide
uuaagacacacucuucauu

SEQ ID NO: 1058696 - RNA, 19 nt, Artificial Sequence
  Description of Artificial Sequence: Synthetic oligonucleotide
agaucacguucauuccugc

SEQ ID NO: 1058697 - RNA, 19 nt, Artificial Sequence
  Description of Artificial Sequence: Synthetic oligonucleotide
aaagcuguuccaaccauga

SEQ ID NO: 1058698 - RNA, 19 nt, Artificial Sequence
  Description of Artificial Sequence: Synthetic oligonucleotide
auagucacuuggcuaaugu

SEQ ID NO: 1058699 - RNA, 19 nt, Artificial Sequence
  Description of Artificial Sequence: Synthetic oligonucleotide
auauucuaggguguauuuc

SEQ ID NO: 1058700 - RNA, 19 nt, Artificial Sequence
  Description of Artificial Sequence: Synthetic oligonucleotide
aauacagcgaaaggaaguu

SEQ ID NO: 1058701 - RNA, 19 nt, Artificial Sequence
  Description of Artificial Sequence: Synthetic oligonucleotide
uccacaagcugagaucacg

SEQ ID NO: 1058702 - RNA, 19 nt, Artificial Sequence
  Description of Artificial Sequence: Synthetic oligonucleotide
uggaguacucuacuauaca

SEQ ID NO: 1058703 - RNA, 19 nt, Artificial Sequence
  Description of Artificial Sequence: Synthetic oligonucleotide
cauuccuagucaaucugag

SEQ ID NO: 1058704 - RNA, 19 nt, Artificial Sequence
  Description of Artificial Sequence: Synthetic oligonucleotide
agcguagaggagaagacuc

SEQ ID NO: 1058705 - RNA, 19 nt, Artificial Sequence
  Description of Artificial Sequence: Synthetic oligonucleotide
ucaaagucgggcaccgugu

SEQ ID NO: 1058706 - RNA, 19 nt, Artificial Sequence
  Description of Artificial Sequence: Synthetic oligonucleotide
uagaauuguguuucagggu

SEQ ID NO: 1058707 - RNA, 19 nt, Artificial Sequence
  Description of Artificial Sequence: Synthetic oligonucleotide
cuuagaacauuccaguaaa

SEQ ID NO: 1058708 - RNA, 19 nt, Artificial Sequence
  Description of Artificial Sequence: Synthetic oligonucleotide
uaauggaugugagccagag

SEQ ID NO: 1058709 - RNA, 19 nt, Artificial Sequence
  Description of Artificial Sequence: Synthetic oligonucleotide
gaagaaggggaccauagcu

SEQ ID NO: 1058710 - RNA, 19 nt, Artificial Sequence
  Description of Artificial Sequence: Synthetic oligonucleotide
gaaaguccaaaguuccaca

SEQ ID NO: 1058711 - RNA, 19 nt, Artificial Sequence
  Description of Artificial Sequence: Synthetic oligonucleotide
ucuaggguguauuucuaaa

SEQ ID NO: 1058712 - RNA, 19 nt, Artificial Sequence
  Description of Artificial Sequence: Synthetic oligonucleotide
aagacucucgaggugugag

SEQ ID NO: 1058713 - RNA, 19 nt, Artificial Sequence
  Description of Artificial Sequence: Synthetic oligonucleotide
auuuaugagauaaccacaa

SEQ ID NO: 1058714 - RNA, 19 nt, Artificial Sequence
  Description of Artificial Sequence: Synthetic oligonucleotide
agugcucuaaaaccuguga

SEQ ID NO: 1058715 - RNA, 19 nt, Artificial Sequence
  Description of Artificial Sequence: Synthetic oligonucleotide
aaaagcuguuccaaccaug

SEQ ID NO: 1058716 - RNA, 19 nt, Artificial Sequence
  Description of Artificial Sequence: Synthetic oligonucleotide
auccaagugcaaccugccc

SEQ ID NO: 1058717 - RNA, 19 nt, Artificial Sequence
  Description of Artificial Sequence: Synthetic oligonucleotide
ugcaccuauggucacugcu

SEQ ID NO: 1058718 - RNA, 19 nt, Artificial Sequence
  Description of Artificial Sequence: Synthetic oligonucleotide
gcuguaagagcguagagga

SEQ ID NO: 1058719 - RNA, 19 nt, Artificial Sequence
  Description of Artificial Sequence: Synthetic oligonucleotide
auauuggcaaaagcuguuc

SEQ ID NO: 1058720 - RNA, 19 nt, Artificial Sequence
  Description of Artificial Sequence: Synthetic oligonucleotide
auuagcugacaugugauau

SEQ ID NO: 1058721 - RNA, 19 nt, Artificial Sequence
  Description of Artificial Sequence: Synthetic oligonucleotide
guugguaguuagaaagucc

SEQ ID NO: 1058722 - RNA, 19 nt, Artificial Sequence
  Description of Artificial Sequence: Synthetic oligonucleotide
gguacuauaauauccuaaa

SEQ ID NO: 1058723 - RNA, 19 nt, Artificial Sequence
  Description of Artificial Sequence: Synthetic oligonucleotide
cuguagacagagugaagag

SEQ ID NO: 1058724 - RNA, 19 nt, Artificial Sequence
  Description of Artificial Sequence: Synthetic oligonucleotide
uggcaaacaauuagcugac

SEQ ID NO: 1058725 - RNA, 19 nt, Artificial Sequence
  Description of Artificial Sequence: Synthetic oligonucleotide
aggucugagauguuagccu

SEQ ID NO: 1058726 - RNA, 19 nt, Artificial Sequence
  Description of Artificial Sequence: Synthetic oligonucleotide
uuacaggccgacauucuuc

SEQ ID NO: 1058727 - RNA, 19 nt, Artificial Sequence
  Description of Artificial Sequence: Synthetic oligonucleotide
cacaauacagcgaaaggaa

SEQ ID NO: 1058728 - RNA, 19 nt, Artificial Sequence
  Description of Artificial Sequence: Synthetic oligonucleotide
  modified_base (16)..(16): a, c, u, g, unknown or other
agaaugccuguguuanacu

SEQ ID NO: 1058729 - RNA, 19 nt, Artificial Sequence
  Description of Artificial Sequence: Synthetic oligonucleotide
guacuauaauauccuaaac

SEQ ID NO: 1058730 - RNA, 19 nt, Artificial Sequence
  Description of Artificial Sequence: Synthetic oligonucleotide
agaggagaagacucucgag

SEQ ID NO: 1058731 - RNA, 19 nt, Artificial Sequence
  Description of Artificial Sequence: Synthetic oligonucleotide
uacuccguaauggauguga

SEQ ID NO: 1058732 - RNA, 19 nt, Artificial Sequence
  Description of Artificial Sequence: Synthetic oligonucleotide
aguacuuccugaagauuac

SEQ ID NO: 1058733 - RNA, 19 nt, Artificial Sequence
  Description of Artificial Sequence: Synthetic oligonucleotide
guuuaguucaauggugaug

SEQ ID NO: 1058734 - RNA, 19 nt, Artificial Sequence
  Description of Artificial Sequence: Synthetic oligonucleotide
uuuaugagauaaccacaau

SEQ ID NO: 1058735 - RNA, 19 nt, Artificial Sequence
  Description of Artificial Sequence: Synthetic oligonucleotide
auguuagccugugcuagcc

SEQ ID NO: 1058736 - RNA, 19 nt, Artificial Sequence
  Description of Artificial Sequence: Synthetic oligonucleotide
aacucccaccaaugcaguc

SEQ ID NO: 1058737 - RNA, 19 nt, Artificial Sequence
  Description of Artificial Sequence: Synthetic oligonucleotide
aagauuacaggccgacauu

SEQ ID NO: 1058738 - RNA, 19 nt, Artificial Sequence
  Description of Artificial Sequence: Synthetic oligonucleotide
ggaacuaaaaguaugucaa

SEQ ID NO: 1058739 - RNA, 19 nt, Artificial Sequence
  Description of Artificial Sequence: Synthetic oligonucleotide
ucuuauccaagugcaaccu

SEQ ID NO: 1058740 - RNA, 19 nt, Artificial Sequence
  Description of Artificial Sequence: Synthetic oligonucleotide
auccuaaacuauguucaac

SEQ ID NO: 1058741 - RNA, 19 nt, Artificial Sequence
  Description of Artificial Sequence: Synthetic oligonucleotide
gauguuagccugugcuagc

SEQ ID NO: 1058742 - RNA, 19 nt, Artificial Sequence
  Description of Artificial Sequence: Synthetic oligonucleotide
aguucaaagucgggcaccg

SEQ ID NO: 1058743 - RNA, 19 nt, Artificial Sequence
  Description of Artificial Sequence: Synthetic oligonucleotide
uggugaaaagauguggaaa

SEQ ID NO: 1058744 - RNA, 19 nt, Artificial Sequence
  Description of Artificial Sequence: Synthetic oligonucleotide
acaaaacuacccauagcag

SEQ ID NO: 1058745 - RNA, 19 nt, Artificial Sequence
  Description of Artificial Sequence: Synthetic oligonucleotide
gacaccaagucgguccucg

SEQ ID NO: 1058746 - RNA, 19 nt, Artificial Sequence
  Description of Artificial Sequence: Synthetic oligonucleotide
ucccagugagacaggauga

SEQ ID NO: 1058747 - RNA, 19 nt, Artificial Sequence
  Description of Artificial Sequence: Synthetic oligonucleotide
aacuacccauagcaggaga

SEQ ID NO: 1058748 - RNA, 19 nt, Artificial Sequence
  Description of Artificial Sequence: Synthetic oligonucleotide
aucgaucccauaucuguca

SEQ ID NO: 1058749 - RNA, 19 nt, Artificial Sequence
  Description of Artificial Sequence: Synthetic oligonucleotide
cugagaucacguucauucc

SEQ ID NO: 1058750 - RNA, 19 nt, Artificial Sequence
  Description of Artificial Sequence: Synthetic oligonucleotide
uggcaaugguacuauaaua

SEQ ID NO: 1058751 - RNA, 19 nt, Artificial Sequence
  Description of Artificial Sequence: Synthetic oligonucleotide
auaccaggccucaacuccc

SEQ ID NO: 1058752 - RNA, 19 nt, Artificial Sequence
  Description of Artificial Sequence: Synthetic oligonucleotide
caguuuaguucaaugguga

SEQ ID NO: 1058753 - RNA, 19 nt, Artificial Sequence
  Description of Artificial Sequence: Synthetic oligonucleotide
ugugaacuauuacuauuuu

SEQ ID NO: 1058754 - RNA, 19 nt, Artificial Sequence
  Description of Artificial Sequence: Synthetic oligonucleotide
gaucacguucauuccugcc

SEQ ID NO: 1058755 - RNA, 19 nt, Artificial Sequence
  Description of Artificial Sequence: Synthetic oligonucleotide
cuagucaaucugaguuugg

SEQ ID NO: 1058756 - RNA, 19 nt, Artificial Sequence
  Description of Artificial Sequence: Synthetic oligonucleotide
  modified_base (18)..(18): a, c, u, g, unknown or other
aaagaaugccuguguuana

SEQ ID NO: 1058757 - RNA, 19 nt, Artificial Sequence
  Description of Artificial Sequence: Synthetic oligonucleotide
aaacuacccauagcaggag

SEQ ID NO: 1058758 - RNA, 19 nt, Artificial Sequence
  Description of Artificial Sequence: Synthetic oligonucleotide
auaaacucaucggaagagu

SEQ ID NO: 1058759 - RNA, 19 nt, Artificial Sequence
  Description of Artificial Sequence: Synthetic oligonucleotide
cuucgaagucucucuagug

SEQ ID NO: 1058760 - RNA, 19 nt, Artificial Sequence
  Description of Artificial Sequence: Synthetic oligonucleotide
uagugcucuaaaaccugug

SEQ ID NO: 1058761 - RNA, 19 nt, Artificial Sequence
  Description of Artificial Sequence: Synthetic oligonucleotide
caggguguugcuuuuauaa

SEQ ID NO: 1058762 - RNA, 19 nt, Artificial Sequence
  Description of Artificial Sequence: Synthetic oligonucleotide
guuccacaagcugagauca

SEQ ID NO: 1058763 - RNA, 19 nt, Artificial Sequence
  Description of Artificial Sequence: Synthetic oligonucleotide
aagguucauaccaggccuc

SEQ ID NO: 1058764 - RNA, 19 nt, Artificial Sequence
  Description of Artificial Sequence: Synthetic oligonucleotide
agccagcacucuugaaacc

SEQ ID NO: 1058765 - RNA, 19 nt, Artificial Sequence
  Description of Artificial Sequence: Synthetic oligonucleotide
uuuaagcacaaaccucauu

SEQ ID NO: 1058766 - RNA, 19 nt, Artificial Sequence
  Description of Artificial Sequence: Synthetic oligonucleotide
aagucgggcaccgugugcu

SEQ ID NO: 1058767 - RNA, 19 nt, Artificial Sequence
  Description of Artificial Sequence: Synthetic oligonucleotide
gaaggagaccggaggaucc

SEQ ID NO: 1058768 - RNA, 19 nt, Artificial Sequence
  Description of Artificial Sequence: Synthetic oligonucleotide
augucauagccccagggua

SEQ ID NO: 1058769 - RNA, 19 nt, Artificial Sequence
  Description of Artificial Sequence: Synthetic oligonucleotide
gcagucacuauguagacaa

SEQ ID NO: 1058770 - RNA, 19 nt, Artificial Sequence
  Description of Artificial Sequence: Synthetic oligonucleotide
ucgguccucguccaaagau

SEQ ID NO: 1058771 - RNA, 19 nt, Artificial Sequence
  Description of Artificial Sequence: Synthetic oligonucleotide
gaguacucuacuauacauc

SEQ ID NO: 1058772 - RNA, 19 nt, Artificial Sequence
  Description of Artificial Sequence: Synthetic oligonucleotide
accacuuguacuccguaau

SEQ ID NO: 1058773 - RNA, 19 nt, Artificial Sequence
  Description of Artificial Sequence: Synthetic oligonucleotide
agacacacucuucauuuaa

SEQ ID NO: 1058774 - RNA, 19 nt, Artificial Sequence
  Description of Artificial Sequence: Synthetic oligonucleotide
acacggagagaagaagggg

SEQ ID NO: 1058775 - RNA, 19 nt, Artificial Sequence
  Description of Artificial Sequence: Synthetic oligonucleotide
uguuagccugugcuagccc

SEQ ID NO: 1058776 - RNA, 19 nt, Artificial Sequence
  Description of Artificial Sequence: Synthetic oligonucleotide
cacaaaccucauucagugg

SEQ ID NO: 1058777 - RNA, 19 nt, Artificial Sequence
  Description of Artificial Sequence: Synthetic oligonucleotide
cuaaugucauagccccagg

SEQ ID NO: 1058778 - RNA, 19 nt, Artificial Sequence
  Description of Artificial Sequence: Synthetic oligonucleotide
aggguguauuucuaaaaua

SEQ ID NO: 1058779 - RNA, 19 nt, Artificial Sequence
  Description of Artificial Sequence: Synthetic oligonucleotide
cucaucggaagagucacac

SEQ ID NO: 1058780 - RNA, 19 nt, Artificial Sequence
  Description of Artificial Sequence: Synthetic oligonucleotide
gaguccauaggcacacugc

SEQ ID NO: 1058781 - RNA, 19 nt, Artificial Sequence
  Description of Artificial Sequence: Synthetic oligonucleotide
gccuaucuuauccaagugc

SEQ ID NO: 1058782 - RNA, 19 nt, Artificial Sequence
  Description of Artificial Sequence: Synthetic oligonucleotide
aguuuaguucaauggugau

SEQ ID NO: 1058783 - RNA, 19 nt, Artificial Sequence
  Description of Artificial Sequence: Synthetic oligonucleotide
aagaaggggaccauagcuu

SEQ ID NO: 1058784 - RNA, 19 nt, Artificial Sequence
  Description of Artificial Sequence: Synthetic oligonucleotide
uucuaggguguauuucuaa

SEQ ID NO: 1058785 - RNA, 19 nt, Artificial Sequence
  Description of Artificial Sequence: Synthetic oligonucleotide
uacccauagcaggagauaa

SEQ ID NO: 1058786 - RNA, 19 nt, Artificial Sequence
  Description of Artificial Sequence: Synthetic oligonucleotide
ugucaaccauaacauugaa

SEQ ID NO: 1058787 - RNA, 19 nt, Artificial Sequence
  Description of Artificial Sequence: Synthetic oligonucleotide
aagugcaaccugcccaaaa

SEQ ID NO: 1058788 - RNA, 19 nt, Artificial Sequence
  Description of Artificial Sequence: Synthetic oligonucleotide
guuaaacaagcugcagagc

SEQ ID NO: 1058789 - RNA, 19 nt, Artificial Sequence
  Description of Artificial Sequence: Synthetic oligonucleotide
auuacaggccgacauucuu

SEQ ID NO: 1058790 - RNA, 19 nt, Artificial Sequence
  Description of Artificial Sequence: Synthetic oligonucleotide
aggucucuauauaagaaau

SEQ ID NO: 1058791 - RNA, 19 nt, Artificial Sequence
  Description of Artificial Sequence: Synthetic oligonucleotide
ggguaaaucugaaaauggc

SEQ ID NO: 1058792 - RNA, 19 nt, Artificial Sequence
  Description of Artificial Sequence: Synthetic oligonucleotide
acauaaugcacaaccaaua

SEQ ID NO: 1058793 - RNA, 19 nt, Artificial Sequence
  Description of Artificial Sequence: Synthetic oligonucleotide
uuagccugugcuagcccca

SEQ ID NO: 1058794 - RNA, 19 nt, Artificial Sequence
  Description of Artificial Sequence: Synthetic oligonucleotide
ccaguuuaguucaauggug

SEQ ID NO: 1058795 - RNA, 19 nt, Artificial Sequence
  Description of Artificial Sequence: Synthetic oligonucleotide
gagaccggaggauccacac

SEQ ID NO: 1058796 - RNA, 19 nt, Artificial Sequence
  Description of Artificial Sequence: Synthetic oligonucleotide
uccuagucaaucugaguuu

SEQ ID NO: 1058797 - RNA, 19 nt, Artificial Sequence
  Description of Artificial Sequence: Synthetic oligonucleotide
ucccuggugaaaagaugug

SEQ ID NO: 1058798 - RNA, 19 nt, Artificial Sequence
  Description of Artificial Sequence: Synthetic oligonucleotide
aagacacacucuucauuua

SEQ ID NO: 1058799 - RNA, 19 nt, Artificial Sequence
  Description of Artificial Sequence: Synthetic oligonucleotide
auagcagccagcacucuug

SEQ ID NO: 1058800 - RNA, 19 nt, Artificial Sequence
  Description of Artificial Sequence: Synthetic oligonucleotide
agucgguccucguccaaag

SEQ ID NO: 1058801 - RNA, 19 nt, Artificial Sequence
  Description of Artificial Sequence: Synthetic oligonucleotide
cauaguggugccuaucuua

SEQ ID NO: 1058802 - RNA, 19 nt, Artificial Sequence
  Description of Artificial Sequence: Synthetic oligonucleotide
agucaaucugaguuugguu

SEQ ID NO: 1058803 - RNA, 19 nt, Artificial Sequence
  Description of Artificial Sequence: Synthetic oligonucleotide
ugaagauuacaggccgaca

SEQ ID NO: 1058804 - RNA, 19 nt, Artificial Sequence
  Description of Artificial Sequence: Synthetic oligonucleotide
ugguaguuagaaaguccaa

SEQ ID NO: 1058805 - RNA, 19 nt, Artificial Sequence
  Description of Artificial Sequence: Synthetic oligonucleotide
ugccuuggaguacucuacu

SEQ ID NO: 1058806 - RNA, 19 nt, Artificial Sequence
  Description of Artificial Sequence: Synthetic oligonucleotide
ucaagcagaccaguuuagu

SEQ ID NO: 1058807 - RNA, 19 nt, Artificial Sequence
  Description of Artificial Sequence: Synthetic oligonucleotide
uggcaaaagcuguuccaac

SEQ ID NO: 1058808 - RNA, 19 nt, Artificial Sequence
  Description of Artificial Sequence: Synthetic oligonucleotide
cuccguaauggaugugagc

SEQ ID NO: 1058809 - RNA, 19 nt, Artificial Sequence
  Description of Artificial Sequence: Synthetic oligonucleotide
cuaggguguauuucuaaaa

SEQ ID NO: 1058810 - RNA, 19 nt, Artificial Sequence
  Description of Artificial Sequence: Synthetic oligonucleotide
ucaucggaagagucacaca

SEQ ID NO: 1058811 - RNA, 19 nt, Artificial Sequence
  Description of Artificial Sequence: Synthetic oligonucleotide
cugaagauuacaggccgac

SEQ ID NO: 1058812 - RNA, 19 nt, Artificial Sequence
  Description of Artificial Sequence: Synthetic oligonucleotide
uucaaaugccuuggaguac

SEQ ID NO: 1058813 - RNA, 19 nt, Artificial Sequence
  Description of Artificial Sequence: Synthetic oligonucleotide
cagcaaccaguucaaaguc

SEQ ID NO: 1058814 - RNA, 19 nt, Artificial Sequence
  Description of Artificial Sequence: Synthetic oligonucleotide
cuguaagagcguagaggag

SEQ ID NO: 1058815 - RNA, 19 nt, Artificial Sequence
  Description of Artificial Sequence: Synthetic oligonucleotide
ugugcuagccccagacaua

SEQ ID NO: 1058816 - RNA, 19 nt, Artificial Sequence
  Description of Artificial Sequence: Synthetic oligonucleotide
cacaaccaauaaucauugc

SEQ ID NO: 1058817 - RNA, 19 nt, Artificial Sequence
  Description of Artificial Sequence: Synthetic oligonucleotide
caucaaaccacaagacuua

SEQ ID NO: 1058818 - RNA, 19 nt, Artificial Sequence
  Description of Artificial Sequence: Synthetic oligonucleotide
accugugaacuauuacuau

SEQ ID NO: 1058819 - RNA, 19 nt, Artificial Sequence
  Description of Artificial Sequence: Synthetic oligonucleotide
aaggaaguugguaguuaga

SEQ ID NO: 1058820 - RNA, 19 nt, Artificial Sequence
  Description of Artificial Sequence: Synthetic oligonucleotide
gauggaguccauaggcaca

SEQ ID NO: 1058821 - RNA, 19 nt, Artificial Sequence
  Description of Artificial Sequence: Synthetic oligonucleotide
acucccaccaaugcaguca

SEQ ID NO: 1058822 - RNA, 19 nt, Artificial Sequence
  Description of Artificial Sequence: Synthetic oligonucleotide
cucaacucccaccaaugca

SEQ ID NO: 1058823 - RNA, 19 nt, Artificial Sequence
  Description of Artificial Sequence: Synthetic oligonucleotide
ucgaucccauaucugucaa

SEQ ID NO: 1058824 - RNA, 19 nt, Artificial Sequence
  Description of Artificial Sequence: Synthetic oligonucleotide
gcaaugguacuauaauauc

SEQ ID NO: 1058825 - RNA, 19 nt, Artificial Sequence
  Description of Artificial Sequence: Synthetic oligonucleotide
gaucgaucccauaucuguc

SEQ ID NO: 1058826 - RNA, 19 nt, Artificial Sequence
  Description of Artificial Sequence: Synthetic oligonucleotide
acaugugauauuggcaaaa

SEQ ID NO: 1058827 - RNA, 19 nt, Artificial Sequence
  Description of Artificial Sequence: Synthetic oligonucleotide
gcuagccccagacauacac

SEQ ID NO: 1058828 - RNA, 19 nt, Artificial Sequence
  Description of Artificial Sequence: Synthetic oligonucleotide
ggaaagugauauacuuagg

SEQ ID NO: 1058829 - RNA, 19 nt, Artificial Sequence
  Description of Artificial Sequence: Synthetic oligonucleotide
cucuagugcucuaaaaccu

SEQ ID NO: 1058830 - RNA, 19 nt, Artificial Sequence
  Description of Artificial Sequence: Synthetic oligonucleotide
augguacuauaauauccua

SEQ ID NO: 1058831 - RNA, 19 nt, Artificial Sequence
  Description of Artificial Sequence: Synthetic oligonucleotide
uuaguucaauggugaugga

SEQ ID NO: 1058832 - RNA, 19 nt, Artificial Sequence
  Description of Artificial Sequence: Synthetic oligonucleotide
acgagccacacacugugau

SEQ ID NO: 1058833 - RNA, 19 nt, Artificial Sequence
  Description of Artificial Sequence: Synthetic oligonucleotide
aagggguuuaagacacacu

SEQ ID NO: 1058834 - RNA, 19 nt, Artificial Sequence
  Description of Artificial Sequence: Synthetic oligonucleotide
auacagcgaaaggaaguug

SEQ ID NO: 1058835 - RNA, 19 nt, Artificial Sequence
  Description of Artificial Sequence: Synthetic oligonucleotide
cacauaaugcacaaccaau

SEQ ID NO: 1058836 - RNA, 19 nt, Artificial Sequence
  Description of Artificial Sequence: Synthetic oligonucleotide
caucggaagagucacacau

SEQ ID NO: 1058837 - RNA, 19 nt, Artificial Sequence
  Description of Artificial Sequence: Synthetic oligonucleotide
ucguccaaagauggaguac

SEQ ID NO: 1058838 - RNA, 19 nt, Artificial Sequence
  Description of Artificial Sequence: Synthetic oligonucleotide
caguucaaagucgggcacc

SEQ ID NO: 1058839 - RNA, 19 nt, Artificial Sequence
  Description of Artificial Sequence: Synthetic oligonucleotide
guaggaaaagaaugccugu

SEQ ID NO: 1058840 - RNA, 19 nt, Artificial Sequence
  Description of Artificial Sequence: Synthetic oligonucleotide
agaauauucuaggguguau

SEQ ID NO: 1058841 - RNA, 19 nt, Artificial Sequence
  Description of Artificial Sequence: Synthetic oligonucleotide
gcagcaaccaguucaaagu

SEQ ID NO: 1058842 - RNA, 19 nt, Artificial Sequence
  Description of Artificial Sequence: Synthetic oligonucleotide
cugagauguuagccugugc

SEQ ID NO: 1058843 - RNA, 19 nt, Artificial Sequence
  Description of Artificial Sequence: Synthetic oligonucleotide
gguaguuagaaaguccaaa

SEQ ID NO: 1058844 - RNA, 19 nt, Artificial Sequence
  Description of Artificial Sequence: Synthetic oligonucleotide
acuccguaauggaugugag

SEQ ID NO: 1058845 - RNA, 19 nt, Artificial Sequence
  Description of Artificial Sequence: Synthetic oligonucleotide
gauggaguacacagucaca

SEQ ID NO: 1058846 - RNA, 19 nt, Artificial Sequence
  Description of Artificial Sequence: Synthetic oligonucleotide
gugcuagccccagacauac

SEQ ID NO: 1058847 - RNA, 19 nt, Artificial Sequence
  Description of Artificial Sequence: Synthetic oligonucleotide
cugugaacuauuacuauuu

SEQ ID NO: 1058848 - RNA, 19 nt, Artificial Sequence
  Description of Artificial Sequence: Synthetic oligonucleotide
cagugaauaggucucuaua

SEQ ID NO: 1058849 - RNA, 19 nt, Artificial Sequence
  Description of Artificial Sequence: Synthetic oligonucleotide
acuacccauagcaggagau

SEQ ID NO: 1058850 - RNA, 19 nt, Artificial Sequence
  Description of Artificial Sequence: Synthetic oligonucleotide
uaagagcguagaggagaag

SEQ ID NO: 1058851 - RNA, 19 nt, Artificial Sequence
  Description of Artificial Sequence: Synthetic oligonucleotide
ggagagaacaaauggcagu

SEQ ID NO: 1058852 - RNA, 19 nt, Artificial Sequence
  Description of Artificial Sequence: Synthetic oligonucleotide
acauaguggugccuaucuu

SEQ ID NO: 1058853 - RNA, 19 nt, Artificial Sequence
  Description of Artificial Sequence: Synthetic oligonucleotide
ccgugugcugcucauuugg

SEQ ID NO: 1058854 - RNA, 19 nt, Artificial Sequence
  Description of Artificial Sequence: Synthetic oligonucleotide
cuaucuuauccaagugcaa

SEQ ID NO: 1058855 - RNA, 19 nt, Artificial Sequence
  Description of Artificial Sequence: Synthetic oligonucleotide
gugagacaggaugaaagaa

SEQ ID NO: 1058856 - RNA, 19 nt, Artificial Sequence
  Description of Artificial Sequence: Synthetic oligonucleotide
ggguguugcuuuuauaacu

SEQ ID NO: 1058857 - RNA, 19 nt, Artificial Sequence
  Description of Artificial Sequence: Synthetic oligonucleotide
ccucaggagagaacaaaug

SEQ ID NO: 1058858 - RNA, 19 nt, Artificial Sequence
  Description of Artificial Sequence: Synthetic oligonucleotide
gugaucgaucccauaucug

SEQ ID NO: 1058859 - RNA, 19 nt, Artificial Sequence
  Description of Artificial Sequence: Synthetic oligonucleotide
guagaauauucuagggugu

SEQ ID NO: 1058860 - RNA, 19 nt, Artificial Sequence
  Description of Artificial Sequence: Synthetic oligonucleotide
accgugugcugcucauuug

SEQ ID NO: 1058861 - RNA, 19 nt, Artificial Sequence
  Description of Artificial Sequence: Synthetic oligonucleotide
caaggaagaaugguuauau

SEQ ID NO: 1058862 - RNA, 19 nt, Artificial Sequence
  Description of Artificial Sequence: Synthetic oligonucleotide
aagucgguccucguccaaa

SEQ ID NO: 1058863 - RNA, 19 nt, Artificial Sequence
  Description of Artificial Sequence: Synthetic oligonucleotide
acauaucaacauaguggug

SEQ ID NO: 1058864 - RNA, 19 nt, Artificial Sequence
  Description of Artificial Sequence: Synthetic oligonucleotide
ggugccuaucuuauccaag

SEQ ID NO: 1058865 - RNA, 19 nt, Artificial Sequence
  Description of Artificial Sequence: Synthetic oligonucleotide
guaagagcguagaggagaa

SEQ ID NO: 1058866 - RNA, 19 nt, Artificial Sequence
  Description of Artificial Sequence: Synthetic oligonucleotide
uugcagugaauaggucucu

SEQ ID NO: 1058867 - RNA, 19 nt, Artificial Sequence
  Description of Artificial Sequence: Synthetic oligonucleotide
gucaaccauaacauugaaa

SEQ ID NO: 1058868 - RNA, 19 nt, Artificial Sequence
  Description of Artificial Sequence: Synthetic oligonucleotide
gggaccauagcuucauaaa

SEQ ID NO: 1058869 - RNA, 19 nt, Artificial Sequence
  Description of Artificial Sequence: Synthetic oligonucleotide
auuuaagcacaaaccucau

SEQ ID NO: 1058870 - RNA, 19 nt, Artificial Sequence
  Description of Artificial Sequence: Synthetic oligonucleotide
ggguguauuucuaaaauau

SEQ ID NO: 1058871 - RNA, 19 nt, Artificial Sequence
  Description of Artificial Sequence: Synthetic oligonucleotide
gcuguuccaaccaugaagu

SEQ ID NO: 1058872 - RNA, 19 nt, Artificial Sequence
  Description of Artificial Sequence: Synthetic oligonucleotide
cccuggugaaaagaugugg

SEQ ID NO: 1058873 - RNA, 19 nt, Artificial Sequence
  Description of Artificial Sequence: Synthetic oligonucleotide
ccuagucaaucugaguuug

SEQ ID NO: 1058874 - RNA, 19 nt, Artificial Sequence
  Description of Artificial Sequence: Synthetic oligonucleotide
acaggccgacauucuucuc

SEQ ID NO: 1058875 - RNA, 19 nt, Artificial Sequence
  Description of Artificial Sequence: Synthetic oligonucleotide
ggaguacucuacuauacau

SEQ ID NO: 1058876 - RNA, 19 nt, Artificial Sequence
  Description of Artificial Sequence: Synthetic oligonucleotide
cuuguacuccguaauggau

SEQ ID NO: 1058877 - RNA, 19 nt, Artificial Sequence
  Description of Artificial Sequence: Synthetic oligonucleotide
agagaacaaauggcaguau

SEQ ID NO: 1058878 - RNA, 19 nt, Artificial Sequence
  Description of Artificial Sequence: Synthetic oligonucleotide
acagcgaaaggaaguuggu

SEQ ID NO: 1058879 - RNA, 19 nt, Artificial Sequence
  Description of Artificial Sequence: Synthetic oligonucleotide
gcaccuauggucacugcug

SEQ ID NO: 1058880 - RNA, 19 nt, Artificial Sequence
  Description of Artificial Sequence: Synthetic oligonucleotide
acuauacaucaaaccacaa

SEQ ID NO: 1058881 - RNA, 19 nt, Artificial Sequence
  Description of Artificial Sequence: Synthetic oligonucleotide
cuagugcucuaaaaccugu

SEQ ID NO: 1058882 - RNA, 19 nt, Artificial Sequence
  Description of Artificial Sequence: Synthetic oligonucleotide
gcucuaaaaccugugaacu

SEQ ID NO: 1058883 - RNA, 19 nt, Artificial Sequence
  Description of Artificial Sequence: Synthetic oligonucleotide
caccaagucgguccucguc

SEQ ID NO: 1058884 - RNA, 19 nt, Artificial Sequence
  Description of Artificial Sequence: Synthetic oligonucleotide
ccagacauacaccucccuc

SEQ ID NO: 1058885 - RNA, 19 nt, Artificial Sequence
  Description of Artificial Sequence: Synthetic oligonucleotide
ggguuuaagacacacucuu

SEQ ID NO: 1058886 - RNA, 19 nt, Artificial Sequence
  Description of Artificial Sequence: Synthetic oligonucleotide
cucguccaaagauggagua

SEQ ID NO: 1058887 - RNA, 19 nt, Artificial Sequence
  Description of Artificial Sequence: Synthetic oligonucleotide
gaaggggaccauagcuuca

SEQ ID NO: 1058888 - RNA, 19 nt, Artificial Sequence
  Description of Artificial Sequence: Synthetic oligonucleotide
uaguggugccuaucuuauc

SEQ ID NO: 1058889 - RNA, 19 nt, Artificial Sequence
  Description of Artificial Sequence: Synthetic oligonucleotide
caaaugccuuggaguacuc

SEQ ID NO: 1058890 - RNA, 19 nt, Artificial Sequence
  Description of Artificial Sequence: Synthetic oligonucleotide
ccucaacucccaccaaugc

SEQ ID NO: 1058891 - RNA, 19 nt, Artificial Sequence
  Description of Artificial Sequence: Synthetic oligonucleotide
ggaccauagcuucauaaau

SEQ ID NO: 1058892 - RNA, 19 nt, Artificial Sequence
  Description of Artificial Sequence: Synthetic oligonucleotide
caauggugauggaugagau

SEQ ID NO: 1058893 - RNA, 19 nt, Artificial Sequence
  Description of Artificial Sequence: Synthetic oligonucleotide
guccaaagauggaguacac

SEQ ID NO: 1058894 - RNA, 19 nt, Artificial Sequence
  Description of Artificial Sequence: Synthetic oligonucleotide
gagcguagaggagaagacu

SEQ ID NO: 1058895 - RNA, 19 nt, Artificial Sequence
  Description of Artificial Sequence: Synthetic oligonucleotide
cugugcuagccccagacau

SEQ ID NO: 1058896 - RNA, 19 nt, Artificial Sequence
  Description of Artificial Sequence: Synthetic oligonucleotide
gauuacaggccgacauucu

SEQ ID NO: 1058897 - RNA, 19 nt, Artificial Sequence
  Description of Artificial Sequence: Synthetic oligonucleotide
gccugugcuagccccagac

SEQ ID NO: 1058898 - RNA, 19 nt, Artificial Sequence
  Description of Artificial Sequence: Synthetic oligonucleotide
cccugauggaguccauagg

SEQ ID NO: 1058899 - RNA, 19 nt, Artificial Sequence
  Description of Artificial Sequence: Synthetic oligonucleotide
ccauuccuagucaaucuga

SEQ ID NO: 1058900 - RNA, 19 nt, Artificial Sequence
  Description of Artificial Sequence: Synthetic oligonucleotide
acaccaagucgguccucgu

SEQ ID NO: 1058901 - RNA, 19 nt, Artificial Sequence
  Description of Artificial Sequence: Synthetic oligonucleotide
ugcuagccccagacauaca

SEQ ID NO: 1058902 - RNA, 19 nt, Artificial Sequence
  Description of Artificial Sequence: Synthetic oligonucleotide
guaugucaaccauaacauu

SEQ ID NO: 1058903 - RNA, 19 nt, Artificial Sequence
  Description of Artificial Sequence: Synthetic oligonucleotide
ccaugaaguagaauauucu

SEQ ID NO: 1058904 - RNA, 19 nt, Artificial Sequence
  Description of Artificial Sequence: Synthetic oligonucleotide
cggaggauccacacuguag

SEQ ID NO: 1058905 - RNA, 19 nt, Artificial Sequence
  Description of Artificial Sequence: Synthetic oligonucleotide
ccacacacugugaucgauc

SEQ ID NO: 1058906 - RNA, 19 nt, Artificial Sequence
  Description of Artificial Sequence: Synthetic oligonucleotide
cauaggcacacugcuccca

SEQ ID NO: 1058907 - RNA, 19 nt, Artificial Sequence
  Description of Artificial Sequence: Synthetic oligonucleotide
cacguucauuccugccauc

SEQ ID NO: 1058908 - RNA, 19 nt, Artificial Sequence
  Description of Artificial Sequence: Synthetic oligonucleotide
gcgaaaggaaguugguagu

SEQ ID NO: 1058909 - RNA, 19 nt, Artificial Sequence
  Description of Artificial Sequence: Synthetic oligonucleotide
gucgguccucguccaaaga

SEQ ID NO: 1058910 - RNA, 19 nt, Artificial Sequence
  Description of Artificial Sequence: Synthetic oligonucleotide
cugucaagcagaccaguuu

SEQ ID NO: 1058911 - RNA, 19 nt, Artificial Sequence
  Description of Artificial Sequence: Synthetic oligonucleotide
acucaucggaagagucaca

SEQ ID NO: 1058912 - RNA, 19 nt, Artificial Sequence
  Description of Artificial Sequence: Synthetic oligonucleotide
ccuaaacuauguucaacgu

SEQ ID NO: 1058913 - RNA, 19 nt, Artificial Sequence
  Description of Artificial Sequence: Synthetic oligonucleotide
cugacaccaagucgguccu

SEQ ID NO: 1058914 - RNA, 19 nt, Artificial Sequence
  Description of Artificial Sequence: Synthetic oligonucleotide
cuacccauagcaggagaua

SEQ ID NO: 1058915 - RNA, 19 nt, Artificial Sequence
  Description of Artificial Sequence: Synthetic oligonucleotide
cagcgaaaggaaguuggua

SEQ ID NO: 1058916 - RNA, 19 nt, Artificial Sequence
  Description of Artificial Sequence: Synthetic oligonucleotide
cacgagccacacacuguga

SEQ ID NO: 1058917 - RNA, 19 nt, Artificial Sequence
  Description of Artificial Sequence: Synthetic oligonucleotide
cugcuuuggcaaagcaagu

SEQ ID NO: 1058918 - RNA, 19 nt, Artificial Sequence
  Description of Artificial Sequence: Synthetic oligonucleotide
guacuccguaauggaugug

SEQ ID NO: 1058919 - RNA, 19 nt, Artificial Sequence
  Description of Artificial Sequence: Synthetic oligonucleotide
ccugaagauuacaggccga

SEQ ID NO: 1058920 - RNA, 19 nt, Artificial Sequence
  Description of Artificial Sequence: Synthetic oligonucleotide
caacugacaccaagucggu

SEQ ID NO: 1058921 - RNA, 19 nt, Artificial Sequence
  Description of Artificial Sequence: Synthetic oligonucleotide
aggggaccauagcuucaua

SEQ ID NO: 1058922 - RNA, 19 nt, Artificial Sequence
  Description of Artificial Sequence: Synthetic oligonucleotide
ccugugaacuauuacuauu

SEQ ID NO: 1058923 - RNA, 19 nt, Artificial Sequence
  Description of Artificial Sequence: Synthetic oligonucleotide
cguagaggagaagacucuc

SEQ ID NO: 1058924 - RNA, 19 nt, Artificial Sequence
  Description of Artificial Sequence: Synthetic oligonucleotide
ccguaauggaugugagcca

SEQ ID NO: 1058925 - RNA, 19 nt, Artificial Sequence
  Description of Artificial Sequence: Synthetic oligonucleotide
gggguuuaagacacacucu

SEQ ID NO: 1058926 - RNA, 19 nt, Artificial Sequence
  Description of Artificial Sequence: Synthetic oligonucleotide
ccuuggaguacucuacuau

SEQ ID NO: 1058927 - RNA, 19 nt, Artificial Sequence
  Description of Artificial Sequence: Synthetic oligonucleotide
cacugugaucgaucccaua

SEQ ID NO: 1058928 - RNA, 19 nt, Artificial Sequence
  Description of Artificial Sequence: Synthetic oligonucleotide
ggcaaacaauuagcugaca

SEQ ID NO: 1058929 - RNA, 19 nt, Artificial Sequence
  Description of Artificial Sequence: Synthetic oligonucleotide
ggagaccggaggauccaca

SEQ ID NO: 1058930 - RNA, 19 nt, Artificial Sequence
  Description of Artificial Sequence: Synthetic oligonucleotide
caccgugugcugcucauuu

SEQ ID NO: 1058931 - RNA, 19 nt, Artificial Sequence
  Description of Artificial Sequence: Synthetic oligonucleotide
ccaagucgguccucgucca

SEQ ID NO: 1058932 - RNA, 19 nt, Artificial Sequence
  Description of Artificial Sequence: Synthetic oligonucleotide
caagucgguccucguccaa

SEQ ID NO: 1058933 - RNA, 19 nt, Artificial Sequence
  Description of Artificial Sequence: Synthetic oligonucleotide
gcugcucauuuggcaaaca

SEQ ID NO: 1058934 - RNA, 19 nt, Artificial Sequence
  Description of Artificial Sequence: Synthetic oligonucleotide
ggccgacauucuucucuuc

SEQ ID NO: 1058935 - RNA, 19 nt, Artificial Sequence
  Description of Artificial Sequence: Synthetic oligonucleotide
cagaccaguuuaguucaau

SEQ ID NO: 1058936 - RNA, 19 nt, Artificial Sequence
  Description of Artificial Sequence: Synthetic oligonucleotide
gcguagaggagaagacucu

SEQ ID NO: 1058937 - RNA, 19 nt, Artificial Sequence
  Description of Artificial Sequence: Synthetic oligonucleotide
gcagaccaguuuaguucaa

SEQ ID NO: 1058938 - RNA, 19 nt, Artificial Sequence
  Description of Artificial Sequence: Synthetic oligonucleotide
ccggaggauccacacugua

SEQ ID NO: 1058939 - RNA, 19 nt, Artificial Sequence
  Description of Artificial Sequence: Synthetic oligonucleotide
cccagugccucaggagaga

SEQ ID NO: 1058940 - RNA, 19 nt, Artificial Sequence
  Description of Artificial Sequence: Synthetic oligonucleotide
uuauauguaauuccuaagc

SEQ ID NO: 1058941 - RNA, 19 nt, Artificial Sequence
  Description of Artificial Sequence: Synthetic oligonucleotide
uauguaauuccuaagccag

SEQ ID NO: 1058942 - RNA, 19 nt, Artificial Sequence
  Description of Artificial Sequence: Synthetic oligonucleotide
aguugguugacccacuugc

SEQ ID NO: 1058943 - RNA, 19 nt, Artificial Sequence
  Description of Artificial Sequence: Synthetic oligonucleotide
agcauuauccccuccaacc

SEQ ID NO: 1058944 - RNA, 19 nt, Artificial Sequence
  Description of Artificial Sequence: Synthetic oligonucleotide
acugguauggcuucagucc

SEQ ID NO: 1058945 - RNA, 19 nt, Artificial Sequence
  Description of Artificial Sequence: Synthetic oligonucleotide
uauauguaauuccuaagcc

SEQ ID NO: 1058946 - RNA, 19 nt, Artificial Sequence
  Description of Artificial Sequence: Synthetic oligonucleotide
aguacuaacugauaccgac

SEQ ID NO: 1058947 - RNA, 19 nt, Artificial Sequence
  Description of Artificial Sequence: Synthetic oligonucleotide
acuacagaagcauuauccc

SEQ ID NO: 1058948 - RNA, 19 nt, Artificial Sequence
  Description of Artificial Sequence: Synthetic oligonucleotide
cuuucguuccucuuuaugg

SEQ ID NO: 1058949 - RNA, 19 nt, Artificial Sequence
  Description of Artificial Sequence: Synthetic oligonucleotide
uccaugucccuuuacaugg

SEQ ID NO: 1058950 - RNA, 19 nt, Artificial Sequence
  Description of Artificial Sequence: Synthetic oligonucleotide
gauaccgacaugcaaagug

SEQ ID NO: 1058951 - RNA, 19 nt, Artificial Sequence
  Description of Artificial Sequence: Synthetic oligonucleotide
ugauauuugaguugguuga

SEQ ID NO: 1058952 - RNA, 19 nt, Artificial Sequence
  Description of Artificial Sequence: Synthetic oligonucleotide
aaaccuuggacucuugucu

SEQ ID NO: 1058953 - RNA, 19 nt, Artificial Sequence
  Description of Artificial Sequence: Synthetic oligonucleotide
cuaacugauaccgacaugc

SEQ ID NO: 1058954 - RNA, 19 nt, Artificial Sequence
  Description of Artificial Sequence: Synthetic oligonucleotide
uucaucuagacuuuccugc

SEQ ID NO: 1058955 - RNA, 19 nt, Artificial Sequence
  Description of Artificial Sequence: Synthetic oligonucleotide
aaacauaggguuuggccuc

SEQ ID NO: 1058956 - RNA, 19 nt, Artificial Sequence
  Description of Artificial Sequence: Synthetic oligonucleotide
uuggauuauauguaauucc

SEQ ID NO: 1058957 - RNA, 19 nt, Artificial Sequence
  Description of Artificial Sequence: Synthetic oligonucleotide
cauagugauacucaagaag

SEQ ID NO: 1058958 - RNA, 19 nt, Artificial Sequence
  Description of Artificial Sequence: Synthetic oligonucleotide
uggauuauauguaauuccu

SEQ ID NO: 1058959 - RNA, 19 nt, Artificial Sequence
  Description of Artificial Sequence: Synthetic oligonucleotide
auuauauguaauuccuaag

SEQ ID NO: 1058960 - RNA, 19 nt, Artificial Sequence
  Description of Artificial Sequence: Synthetic oligonucleotide
aacaaugguagacacugga

SEQ ID NO: 1058961 - RNA, 19 nt, Artificial Sequence
  Description of Artificial Sequence: Synthetic oligonucleotide
gauauguccucguaggcug

SEQ ID NO: 1058962 - RNA, 19 nt, Artificial Sequence
  Description of Artificial Sequence: Synthetic oligonucleotide
uauuugaguugguugaccc

SEQ ID NO: 1058963 - RNA, 19 nt, Artificial Sequence
  Description of Artificial Sequence: Synthetic oligonucleotide
aacaagucccucagaaucc

SEQ ID NO: 1058964 - RNA, 19 nt, Artificial Sequence
  Description of Artificial Sequence: Synthetic oligonucleotide
caugugauauuugaguugg

SEQ ID NO: 1058965 - RNA, 19 nt, Artificial Sequence
  Description of Artificial Sequence: Synthetic oligonucleotide
uuacccuaggcuuaguccc

SEQ ID NO: 1058966 - RNA, 19 nt, Artificial Sequence
  Description of Artificial Sequence: Synthetic oligonucleotide
agucaguacacuuguagag

SEQ ID NO: 1058967 - RNA, 19 nt, Artificial Sequence
  Description of Artificial Sequence: Synthetic oligonucleotide
uacagaagcauuauccccu

SEQ ID NO: 1058968 - RNA, 19 nt, Artificial Sequence
  Description of Artificial Sequence: Synthetic oligonucleotide
uuuauauagcuguuaauuu

SEQ ID NO: 1058969 - RNA, 19 nt, Artificial Sequence
  Description of Artificial Sequence: Synthetic oligonucleotide
ucuccuaucaucucugacu

SEQ ID NO: 1058970 - RNA, 19 nt, Artificial Sequence
  Description of Artificial Sequence: Synthetic oligonucleotide
aggaguucccuccuuauuc

SEQ ID NO: 1058971 - RNA, 19 nt, Artificial Sequence
  Description of Artificial Sequence: Synthetic oligonucleotide
aagggcgucagccuucagg

SEQ ID NO: 1058972 - RNA, 19 nt, Artificial Sequence
  Description of Artificial Sequence: Synthetic oligonucleotide
ucuuuauggauccgcaugu

SEQ ID NO: 1058973 - RNA, 19 nt, Artificial Sequence
  Description of Artificial Sequence: Synthetic oligonucleotide
auagugauacucaagaaga

SEQ ID NO: 1058974 - RNA, 19 nt, Artificial Sequence
  Description of Artificial Sequence: Synthetic oligonucleotide
uguaggugcacugugggag

SEQ ID NO: 1058975 - RNA, 19 nt, Artificial Sequence
  Description of Artificial Sequence: Synthetic oligonucleotide
ugacuugaaacacggggag

SEQ ID NO: 1058976 - RNA, 19 nt, Artificial Sequence
  Description of Artificial Sequence: Synthetic oligonucleotide
gugauauuugaguugguug

SEQ ID NO: 1058977 - RNA, 19 nt, Artificial Sequence
  Description of Artificial Sequence: Synthetic oligonucleotide
acggauauguccucguagg

SEQ ID NO: 1058978 - RNA, 19 nt, Artificial Sequence
  Description of Artificial Sequence: Synthetic oligonucleotide
gaagaaggggugucggucg

SEQ ID NO: 1058979 - RNA, 19 nt, Artificial Sequence
  Description of Artificial Sequence: Synthetic oligonucleotide
uuauucuuacccuaggcuu

SEQ ID NO: 1058980 - RNA, 19 nt, Artificial Sequence
  Description of Artificial Sequence: Synthetic oligonucleotide
cauaucuuggauuauaugu

SEQ ID NO: 1058981 - RNA, 19 nt, Artificial Sequence
  Description of Artificial Sequence: Synthetic oligonucleotide
cacgaagugcaucagcucg

SEQ ID NO: 1058982 - RNA, 19 nt, Artificial Sequence
  Description of Artificial Sequence: Synthetic oligonucleotide
cuuacccuaggcuuagucc

SEQ ID NO: 1058983 - RNA, 19 nt, Artificial Sequence
  Description of Artificial Sequence: Synthetic oligonucleotide
uccaaguagugcuuuacca

SEQ ID NO: 1058984 - RNA, 19 nt, Artificial Sequence
  Description of Artificial Sequence: Synthetic oligonucleotide
caacaagucccucagaauc

SEQ ID NO: 1058985 - RNA, 19 nt, Artificial Sequence
  Description of Artificial Sequence: Synthetic oligonucleotide
cuaucuuuuauauagcugu

SEQ ID NO: 1058986 - RNA, 19 nt, Artificial Sequence
  Description of Artificial Sequence: Synthetic oligonucleotide
uuucaucuagacuuuccug

SEQ ID NO: 1058987 - RNA, 19 nt, Artificial Sequence
  Description of Artificial Sequence: Synthetic oligonucleotide
ucuacaggacauccagggg

SEQ ID NO: 1058988 - RNA, 19 nt, Artificial Sequence
  Description of Artificial Sequence: Synthetic oligonucleotide
uccaguacuaacugauacc

SEQ ID NO: 1058989 - RNA, 19 nt, Artificial Sequence
  Description of Artificial Sequence: Synthetic oligonucleotide
cagguuaaaaccauaguga

SEQ ID NO: 1058990 - RNA, 19 nt, Artificial Sequence
  Description of Artificial Sequence: Synthetic oligonucleotide
aauggugcugucuccgaug

SEQ ID NO: 1058991 - RNA, 19 nt, Artificial Sequence
  Description of Artificial Sequence: Synthetic oligonucleotide
acggggagggacucgaagc

SEQ ID NO: 1058992 - RNA, 19 nt, Artificial Sequence
  Description of Artificial Sequence: Synthetic oligonucleotide
agagcaugcugcuucagug

SEQ ID NO: 1058993 - RNA, 19 nt, Artificial Sequence
  Description of Artificial Sequence: Synthetic oligonucleotide
auauuugaguugguugacc

SEQ ID NO: 1058994 - RNA, 19 nt, Artificial Sequence
  Description of Artificial Sequence: Synthetic oligonucleotide
aaguuacggagcuggcaac

SEQ ID NO: 1058995 - RNA, 19 nt, Artificial Sequence
  Description of Artificial Sequence: Synthetic oligonucleotide
uuucguuccucuuuaugga

SEQ ID NO: 1058996 - RNA, 19 nt, Artificial Sequence
  Description of Artificial Sequence: Synthetic oligonucleotide
ucugcgcacaugcuugacg

SEQ ID NO: 1058997 - RNA, 19 nt, Artificial Sequence
  Description of Artificial Sequence: Synthetic oligonucleotide
gaaauuguuuuaguccaag

SEQ ID NO: 1058998 - RNA, 19 nt, Artificial Sequence
  Description of Artificial Sequence: Synthetic oligonucleotide
ucaggcuagcuacaguccc

SEQ ID NO: 1058999 - RNA, 19 nt, Artificial Sequence
  Description of Artificial Sequence: Synthetic oligonucleotide
aaaacuacagaagcauuau

SEQ ID NO: 1059000 - RNA, 19 nt, Artificial Sequence
  Description of Artificial Sequence: Synthetic oligonucleotide
aaaccauagugauacucaa

SEQ ID NO: 1059001 - RNA, 19 nt, Artificial Sequence
  Description of Artificial Sequence: Synthetic oligonucleotide
cuuggauuauauguaauuc

SEQ ID NO: 1059002 - RNA, 19 nt, Artificial Sequence
  Description of Artificial Sequence: Synthetic oligonucleotide
gcuguuuacggauaugucc

SEQ ID NO: 1059003 - RNA, 19 nt, Artificial Sequence
  Description of Artificial Sequence: Synthetic oligonucleotide
ucuuggauuauauguaauu

SEQ ID NO: 1059004 - RNA, 19 nt, Artificial Sequence
  Description of Artificial Sequence: Synthetic oligonucleotide
uacuaacugauaccgacau

SEQ ID NO: 1059005 - RNA, 19 nt, Artificial Sequence
  Description of Artificial Sequence: Synthetic oligonucleotide
ugggugucggcgcagagca

SEQ ID NO: 1059006 - RNA, 19 nt, Artificial Sequence
  Description of Artificial Sequence: Synthetic oligonucleotide
uaucuuggauuauauguaa

SEQ ID NO: 1059007 - RNA, 19 nt, Artificial Sequence
  Description of Artificial Sequence: Synthetic oligonucleotide
uugccuacacccugguugg

SEQ ID NO: 1059008 - RNA, 19 nt, Artificial Sequence
  Description of Artificial Sequence: Synthetic oligonucleotide
agguuaaaaccauagugau

SEQ ID NO: 1059009 - RNA, 19 nt, Artificial Sequence
  Description of Artificial Sequence: Synthetic oligonucleotide
cauguaggugcacuguggg

SEQ ID NO: 1059010 - RNA, 19 nt, Artificial Sequence
  Description of Artificial Sequence: Synthetic oligonucleotide
aguacucacacucgggaca

SEQ ID NO: 1059011 - RNA, 19 nt, Artificial Sequence
  Description of Artificial Sequence: Synthetic oligonucleotide
ugcaguacucacacucggg

SEQ ID NO: 1059012 - RNA, 19 nt, Artificial Sequence
  Description of Artificial Sequence: Synthetic oligonucleotide
aguacacuuguagagccgg

SEQ ID NO: 1059013 - RNA, 19 nt, Artificial Sequence
  Description of Artificial Sequence: Synthetic oligonucleotide
auggguaagggcaugaugu

SEQ ID NO: 1059014 - RNA, 19 nt, Artificial Sequence
  Description of Artificial Sequence: Synthetic oligonucleotide
auaucccaaagccaguccu

SEQ ID NO: 1059015 - RNA, 19 nt, Artificial Sequence
  Description of Artificial Sequence: Synthetic oligonucleotide
agggacucgaagcagagaa

SEQ ID NO: 1059016 - RNA, 19 nt, Artificial Sequence
  Description of Artificial Sequence: Synthetic oligonucleotide
ugaaacacggggagggacu

SEQ ID NO: 1059017 - RNA, 19 nt, Artificial Sequence
  Description of Artificial Sequence: Synthetic oligonucleotide
uaccgacaugcaaaguggg

SEQ ID NO: 1059018 - RNA, 19 nt, Artificial Sequence
  Description of Artificial Sequence: Synthetic oligonucleotide
ucccuuuacaugguggucc

SEQ ID NO: 1059019 - RNA, 19 nt, Artificial Sequence
  Description of Artificial Sequence: Synthetic oligonucleotide
ugcauaucuuggauuauau

SEQ ID NO: 1059020 - RNA, 19 nt, Artificial Sequence
  Description of Artificial Sequence: Synthetic oligonucleotide
auaccgacaugcaaagugg

SEQ ID NO: 1059021 - RNA, 19 nt, Artificial Sequence
  Description of Artificial Sequence: Synthetic oligonucleotide
acgaaaggaucaaucaagg

SEQ ID NO: 1059022 - RNA, 19 nt, Artificial Sequence
  Description of Artificial Sequence: Synthetic oligonucleotide
auaggcacagucaguacac

SEQ ID NO: 1059023 - RNA, 19 nt, Artificial Sequence
  Description of Artificial Sequence: Synthetic oligonucleotide
gugggugcgaagcaggaag

SEQ ID NO: 1059024 - RNA, 19 nt, Artificial Sequence
  Description of Artificial Sequence: Synthetic oligonucleotide
aagaaggggugucggucgg

SEQ ID NO: 1059025 - RNA, 19 nt, Artificial Sequence
  Description of Artificial Sequence: Synthetic oligonucleotide
uucuguuaaucucuccuau

SEQ ID NO: 1059026 - RNA, 19 nt, Artificial Sequence
  Description of Artificial Sequence: Synthetic oligonucleotide
cugauaccgacaugcaaag

SEQ ID NO: 1059027 - RNA, 19 nt, Artificial Sequence
  Description of Artificial Sequence: Synthetic oligonucleotide
gugcuauaggcacagucag

SEQ ID NO: 1059028 - RNA, 19 nt, Artificial Sequence
  Description of Artificial Sequence: Synthetic oligonucleotide
acccacuugcacuuguauc

SEQ ID NO: 1059029 - RNA, 19 nt, Artificial Sequence
  Description of Artificial Sequence: Synthetic oligonucleotide
ugccugaccaacaauggua

SEQ ID NO: 1059030 - RNA, 19 nt, Artificial Sequence
  Description of Artificial Sequence: Synthetic oligonucleotide
ugguccaguacuaacugau

SEQ ID NO: 1059031 - RNA, 19 nt, Artificial Sequence
  Description of Artificial Sequence: Synthetic oligonucleotide
ggaucaaucaaggaucaag

SEQ ID NO: 1059032 - RNA, 19 nt, Artificial Sequence
  Description of Artificial Sequence: Synthetic oligonucleotide
uagugcuuuaccaggccca

SEQ ID NO: 1059033 - RNA, 19 nt, Artificial Sequence
  Description of Artificial Sequence: Synthetic oligonucleotide
ugaccaacaaugguagaca

SEQ ID NO: 1059034 - RNA, 19 nt, Artificial Sequence
  Description of Artificial Sequence: Synthetic oligonucleotide
uuuaccaggcccacucgcu

SEQ ID NO: 1059035 - RNA, 19 nt, Artificial Sequence
  Description of Artificial Sequence: Synthetic oligonucleotide
gaaaacuacagaagcauua

SEQ ID NO: 1059036 - RNA, 19 nt, Artificial Sequence
  Description of Artificial Sequence: Synthetic oligonucleotide
agggcaugaugucgcaggc

SEQ ID NO: 1059037 - RNA, 19 nt, Artificial Sequence
  Description of Artificial Sequence: Synthetic oligonucleotide
cuguuaaucucuccuauca

SEQ ID NO: 1059038 - RNA, 19 nt, Artificial Sequence
  Description of Artificial Sequence: Synthetic oligonucleotide
guccaguacuaacugauac

SEQ ID NO: 1059039 - RNA, 19 nt, Artificial Sequence
  Description of Artificial Sequence: Synthetic oligonucleotide
gucgguauggguaagggca

SEQ ID NO: 1059040 - RNA, 19 nt, Artificial Sequence
  Description of Artificial Sequence: Synthetic oligonucleotide
ugucccuuuacaugguggu

SEQ ID NO: 1059041 - RNA, 19 nt, Artificial Sequence
  Description of Artificial Sequence: Synthetic oligonucleotide
uguuaaucucuccuaucau

SEQ ID NO: 1059042 - RNA, 19 nt, Artificial Sequence
  Description of Artificial Sequence: Synthetic oligonucleotide
uugguugacccacuugcac

SEQ ID NO: 1059043 - RNA, 19 nt, Artificial Sequence
  Description of Artificial Sequence: Synthetic oligonucleotide
acugauaccgacaugcaaa

SEQ ID NO: 1059044 - RNA, 19 nt, Artificial Sequence
  Description of Artificial Sequence: Synthetic oligonucleotide
uccucuuuauggauccgca

SEQ ID NO: 1059045 - RNA, 19 nt, Artificial Sequence
  Description of Artificial Sequence: Synthetic oligonucleotide
acgaccuggaacuuuugcu

SEQ ID NO: 1059046 - RNA, 19 nt, Artificial Sequence
  Description of Artificial Sequence: Synthetic oligonucleotide
ugguugacccacuugcacu

SEQ ID NO: 1059047 - RNA, 19 nt, Artificial Sequence
  Description of Artificial Sequence: Synthetic oligonucleotide
uuuuggugcuauaggcaca

SEQ ID NO: 1059048 - RNA, 19 nt, Artificial Sequence
  Description of Artificial Sequence: Synthetic oligonucleotide
ugugaaugcggcugugcca

SEQ ID NO: 1059049 - RNA, 19 nt, Artificial Sequence
  Description of Artificial Sequence: Synthetic oligonucleotide
uuuacggauauguccucgu

SEQ ID NO: 1059050 - RNA, 19 nt, Artificial Sequence
  Description of Artificial Sequence: Synthetic oligonucleotide
ucuccgaugcucauccagu

SEQ ID NO: 1059051 - RNA, 19 nt, Artificial Sequence
  Description of Artificial Sequence: Synthetic oligonucleotide
agagccaacgaaaggauca

SEQ ID NO: 1059052 - RNA, 19 nt, Artificial Sequence
  Description of Artificial Sequence: Synthetic oligonucleotide
uggguguguagguucuggg

SEQ ID NO: 1059053 - RNA, 19 nt, Artificial Sequence
  Description of Artificial Sequence: Synthetic oligonucleotide
agugugaaugcggcugugc

SEQ ID NO: 1059054 - RNA, 19 nt, Artificial Sequence
  Description of Artificial Sequence: Synthetic oligonucleotide
uaggcuuagucccauccuc

SEQ ID NO: 1059055 - RNA, 19 nt, Artificial Sequence
  Description of Artificial Sequence: Synthetic oligonucleotide
uaggguuuggccucacugu

SEQ ID NO: 1059056 - RNA, 19 nt, Artificial Sequence
  Description of Artificial Sequence: Synthetic oligonucleotide
cccacuugcacuuguaucc

SEQ ID NO: 1059057 - RNA, 19 nt, Artificial Sequence
  Description of Artificial Sequence: Synthetic oligonucleotide
ucuguuaaucucuccuauc

SEQ ID NO: 1059058 - RNA, 19 nt, Artificial Sequence
  Description of Artificial Sequence: Synthetic oligonucleotide
ccaguacuaacugauaccg

SEQ ID NO: 1059059 - RNA, 19 nt, Artificial Sequence
  Description of Artificial Sequence: Synthetic oligonucleotide
auuauccccuccaaccaac

SEQ ID NO: 1059060 - RNA, 19 nt, Artificial Sequence
  Description of Artificial Sequence: Synthetic oligonucleotide
ucucccgguguacacgaag

SEQ ID NO: 1059061 - RNA, 19 nt, Artificial Sequence
  Description of Artificial Sequence: Synthetic oligonucleotide
aaggaugccugaccaacaa

SEQ ID NO: 1059062 - RNA, 19 nt, Artificial Sequence
  Description of Artificial Sequence: Synthetic oligonucleotide
caaacauaggguuuggccu

SEQ ID NO: 1059063 - RNA, 19 nt, Artificial Sequence
  Description of Artificial Sequence: Synthetic oligonucleotide
uuuacauggugguccagua

SEQ ID NO: 1059064 - RNA, 19 nt, Artificial Sequence
  Description of Artificial Sequence: Synthetic oligonucleotide
uagugauacucaagaagaa

SEQ ID NO: 1059065 - RNA, 19 nt, Artificial Sequence
  Description of Artificial Sequence: Synthetic oligonucleotide
aaggaucaaucaaggauca

SEQ ID NO: 1059066 - RNA, 19 nt, Artificial Sequence
  Description of Artificial Sequence: Synthetic oligonucleotide
gauauuugaguugguugac

SEQ ID NO: 1059067 - RNA, 19 nt, Artificial Sequence
  Description of Artificial Sequence: Synthetic oligonucleotide
uaacugauaccgacaugca

SEQ ID NO: 1059068 - RNA, 19 nt, Artificial Sequence
  Description of Artificial Sequence: Synthetic oligonucleotide
gugaaugcggcugugccag

SEQ ID NO: 1059069 - RNA, 19 nt, Artificial Sequence
  Description of Artificial Sequence: Synthetic oligonucleotide
cuuuaccaggcccacucgc

SEQ ID NO: 1059070 - RNA, 19 nt, Artificial Sequence
  Description of Artificial Sequence: Synthetic oligonucleotide
ugugaaggaguucccuccu

SEQ ID NO: 1059071 - RNA, 19 nt, Artificial Sequence
  Description of Artificial Sequence: Synthetic oligonucleotide
uuccuaagccagagguggg

SEQ ID NO: 1059072 - RNA, 19 nt, Artificial Sequence
  Description of Artificial Sequence: Synthetic oligonucleotide
guuuacggauauguccucg

SEQ ID NO: 1059073 - RNA, 19 nt, Artificial Sequence
  Description of Artificial Sequence: Synthetic oligonucleotide
aguuacggagcuggcaacg

SEQ ID NO: 1059074 - RNA, 19 nt, Artificial Sequence
  Description of Artificial Sequence: Synthetic oligonucleotide
aaccauagugauacucaag

SEQ ID NO: 1059075 - RNA, 19 nt, Artificial Sequence
  Description of Artificial Sequence: Synthetic oligonucleotide
ccaacaaugguagacacug

SEQ ID NO: 1059076 - RNA, 19 nt, Artificial Sequence
  Description of Artificial Sequence: Synthetic oligonucleotide
aaagcacgguggcaaacau

SEQ ID NO: 1059077 - RNA, 19 nt, Artificial Sequence
  Description of Artificial Sequence: Synthetic oligonucleotide
auuugaguugguugaccca

SEQ ID NO: 1059078 - RNA, 19 nt, Artificial Sequence
  Description of Artificial Sequence: Synthetic oligonucleotide
auggauccgcaugugguac

SEQ ID NO: 1059079 - RNA, 19 nt, Artificial Sequence
  Description of Artificial Sequence: Synthetic oligonucleotide
cucaguggccucuacagga

SEQ ID NO: 1059080 - RNA, 19 nt, Artificial Sequence
  Description of Artificial Sequence: Synthetic oligonucleotide
auaucuuggauuauaugua

SEQ ID NO: 1059081 - RNA, 19 nt, Artificial Sequence
  Description of Artificial Sequence: Synthetic oligonucleotide
ugaaggaguucccuccuua

SEQ ID NO: 1059082 - RNA, 19 nt, Artificial Sequence
  Description of Artificial Sequence: Synthetic oligonucleotide
cucaggcuagcuacagucc

SEQ ID NO: 1059083 - RNA, 19 nt, Artificial Sequence
  Description of Artificial Sequence: Synthetic oligonucleotide
cagcuguugacauggcgag

SEQ ID NO: 1059084 - RNA, 19 nt, Artificial Sequence
  Description of Artificial Sequence: Synthetic oligonucleotide
uccuaagccagaggugggg

SEQ ID NO: 1059085 - RNA, 19 nt, Artificial Sequence
  Description of Artificial Sequence: Synthetic oligonucleotide
cuugaggcgagaaggguca

SEQ ID NO: 1059086 - RNA, 19 nt, Artificial Sequence
  Description of Artificial Sequence: Synthetic oligonucleotide
ugauaucccaaagccaguc

SEQ ID NO: 1059087 - RNA, 19 nt, Artificial Sequence
  Description of Artificial Sequence: Synthetic oligonucleotide
ccaaguagugcuuuaccag

SEQ ID NO: 1059088 - RNA, 19 nt, Artificial Sequence
  Description of Artificial Sequence: Synthetic oligonucleotide
gagauucagucacagguua

SEQ ID NO: 1059089 - RNA, 19 nt, Artificial Sequence
  Description of Artificial Sequence: Synthetic oligonucleotide
agccuaucuuuuauauagc

SEQ ID NO: 1059090 - RNA, 19 nt, Artificial Sequence
  Description of Artificial Sequence: Synthetic oligonucleotide
uugacgaccuggaacuuuu

SEQ ID NO: 1059091 - RNA, 19 nt, Artificial Sequence
  Description of Artificial Sequence: Synthetic oligonucleotide
cuuauucuuacccuaggcu

SEQ ID NO: 1059092 - RNA, 19 nt, Artificial Sequence
  Description of Artificial Sequence: Synthetic oligonucleotide
ugggugcgaagcaggaagc

SEQ ID NO: 1059093 - RNA, 19 nt, Artificial Sequence
  Description of Artificial Sequence: Synthetic oligonucleotide
acaggcauaggagcagagg

SEQ ID NO: 1059094 - RNA, 19 nt, Artificial Sequence
  Description of Artificial Sequence: Synthetic oligonucleotide
cucacugugcuugcguagg

SEQ ID NO: 1059095 - RNA, 19 nt, Artificial Sequence
  Description of Artificial Sequence: Synthetic oligonucleotide
guacacgaagugcaucagc

SEQ ID NO: 1059096 - RNA, 19 nt, Artificial Sequence
  Description of Artificial Sequence: Synthetic oligonucleotide
agugcuuuaccaggcccac

SEQ ID NO: 1059097 - RNA, 19 nt, Artificial Sequence
  Description of Artificial Sequence: Synthetic oligonucleotide
acuaacugauaccgacaug

SEQ ID NO: 1059098 - RNA, 19 nt, Artificial Sequence
  Description of Artificial Sequence: Synthetic oligonucleotide
caacaaugguagacacugg

SEQ ID NO: 1059099 - RNA, 19 nt, Artificial Sequence
  Description of Artificial Sequence: Synthetic oligonucleotide
uguacacgaagugcaucag

SEQ ID NO: 1059100 - RNA, 19 nt, Artificial Sequence
  Description of Artificial Sequence: Synthetic oligonucleotide
uuauccccuccaaccaaca

SEQ ID NO: 1059101 - RNA, 19 nt, Artificial Sequence
  Description of Artificial Sequence: Synthetic oligonucleotide
cuguuuacggauauguccu

SEQ ID NO: 1059102 - RNA, 19 nt, Artificial Sequence
  Description of Artificial Sequence: Synthetic oligonucleotide
gcuaaacugggccucacac

SEQ ID NO: 1059103 - RNA, 19 nt, Artificial Sequence
  Description of Artificial Sequence: Synthetic oligonucleotide
gugugcauaucuuggauua

SEQ ID NO: 1059104 - RNA, 19 nt, Artificial Sequence
  Description of Artificial Sequence: Synthetic oligonucleotide
ugcuauaggcacagucagu

SEQ ID NO: 1059105 - RNA, 19 nt, Artificial Sequence
  Description of Artificial Sequence: Synthetic oligonucleotide
ggcgucagccuucaggucc

SEQ ID NO: 1059106 - RNA, 19 nt, Artificial Sequence
  Description of Artificial Sequence: Synthetic oligonucleotide
augucccuuuacauggugg

SEQ ID NO: 1059107 - RNA, 19 nt, Artificial Sequence
  Description of Artificial Sequence: Synthetic oligonucleotide
gaguugguugacccacuug

SEQ ID NO: 1059108 - RNA, 19 nt, Artificial Sequence
  Description of Artificial Sequence: Synthetic oligonucleotide
gguaagggcaugaugucgc

SEQ ID NO: 1059109 - RNA, 19 nt, Artificial Sequence
  Description of Artificial Sequence: Synthetic oligonucleotide
cuauaggcacagucaguac

SEQ ID NO: 1059110 - RNA, 19 nt, Artificial Sequence
  Description of Artificial Sequence: Synthetic oligonucleotide
auucuuacccuaggcuuag

SEQ ID NO: 1059111 - RNA, 19 nt, Artificial Sequence
  Description of Artificial Sequence: Synthetic oligonucleotide
caguacucacacucgggac

SEQ ID NO: 1059112 - RNA, 19 nt, Artificial Sequence
  Description of Artificial Sequence: Synthetic oligonucleotide
aagcgugucuugaaugccu

SEQ ID NO: 1059113 - RNA, 19 nt, Artificial Sequence
  Description of Artificial Sequence: Synthetic oligonucleotide
uuacggagcuggcaacggu

SEQ ID NO: 1059114 - RNA, 19 nt, Artificial Sequence
  Description of Artificial Sequence: Synthetic oligonucleotide
ugucggucgguauggguaa

SEQ ID NO: 1059115 - RNA, 19 nt, Artificial Sequence
  Description of Artificial Sequence: Synthetic oligonucleotide
ugcaaacauaggguuuggc

SEQ ID NO: 1059116 - RNA, 19 nt, Artificial Sequence
  Description of Artificial Sequence: Synthetic oligonucleotide
ucccgguguacacgaagug

SEQ ID NO: 1059117 - RNA, 19 nt, Artificial Sequence
  Description of Artificial Sequence: Synthetic oligonucleotide
augccugaccaacaauggu

SEQ ID NO: 1059118 - RNA, 19 nt, Artificial Sequence
  Description of Artificial Sequence: Synthetic oligonucleotide
caacgaaaggaucaaucaa

SEQ ID NO: 1059119 - RNA, 19 nt, Artificial Sequence
  Description of Artificial Sequence: Synthetic oligonucleotide
cucgaagcagagaaaacua

SEQ ID NO: 1059120 - RNA, 19 nt, Artificial Sequence
  Description of Artificial Sequence: Synthetic oligonucleotide
uugacccacuugcacuugu

SEQ ID NO: 1059121 - RNA, 19 nt, Artificial Sequence
  Description of Artificial Sequence: Synthetic oligonucleotide
uuacggauauguccucgua

SEQ ID NO: 1059122 - RNA, 19 nt, Artificial Sequence
  Description of Artificial Sequence: Synthetic oligonucleotide
guuacggagcuggcaacgg

SEQ ID NO: 1059123 - RNA, 19 nt, Artificial Sequence
  Description of Artificial Sequence: Synthetic oligonucleotide
cucugacuugaaacacggg

SEQ ID NO: 1059124 - RNA, 19 nt, Artificial Sequence
  Description of Artificial Sequence: Synthetic oligonucleotide
uguuuacggauauguccuc

SEQ ID NO: 1059125 - RNA, 19 nt, Artificial Sequence
  Description of Artificial Sequence: Synthetic oligonucleotide
uugaguugguugacccacu

SEQ ID NO: 1059126 - RNA, 19 nt, Artificial Sequence
  Description of Artificial Sequence: Synthetic oligonucleotide
acgaagugcaucagcucgg

SEQ ID NO: 1059127 - RNA, 19 nt, Artificial Sequence
  Description of Artificial Sequence: Synthetic oligonucleotide
ugguauggcuucaguccug

SEQ ID NO: 1059128 - RNA, 19 nt, Artificial Sequence
  Description of Artificial Sequence: Synthetic oligonucleotide
gggaguguguuccagccac

SEQ ID NO: 1059129 - RNA, 19 nt, Artificial Sequence
  Description of Artificial Sequence: Synthetic oligonucleotide
cugcgcacaugcuugacga

SEQ ID NO: 1059130 - RNA, 19 nt, Artificial Sequence
  Description of Artificial Sequence: Synthetic oligonucleotide
gugcgaagcaggaagcgug

SEQ ID NO: 1059131 - RNA, 19 nt, Artificial Sequence
  Description of Artificial Sequence: Synthetic oligonucleotide
ccuugggugcuguuuacgg

SEQ ID NO: 1059132 - RNA, 19 nt, Artificial Sequence
  Description of Artificial Sequence: Synthetic oligonucleotide
cuuagucccauccucagau

SEQ ID NO: 1059133 - RNA, 19 nt, Artificial Sequence
  Description of Artificial Sequence: Synthetic oligonucleotide
cacgguggcaaacauugca

SEQ ID NO: 1059134 - RNA, 19 nt, Artificial Sequence
  Description of Artificial Sequence: Synthetic oligonucleotide
uggguaagggcaugauguc

SEQ ID NO: 1059135 - RNA, 19 nt, Artificial Sequence
  Description of Artificial Sequence: Synthetic oligonucleotide
ggugcuauaggcacaguca

SEQ ID NO: 1059136 - RNA, 19 nt, Artificial Sequence
  Description of Artificial Sequence: Synthetic oligonucleotide
gcauaucuuggauuauaug

SEQ ID NO: 1059137 - RNA, 19 nt, Artificial Sequence
  Description of Artificial Sequence: Synthetic oligonucleotide
uacccuaggcuuaguccca

SEQ ID NO: 1059138 - RNA, 19 nt, Artificial Sequence
  Description of Artificial Sequence: Synthetic oligonucleotide
uacagucccagugugcaua

SEQ ID NO: 1059139 - RNA, 19 nt, Artificial Sequence
  Description of Artificial Sequence: Synthetic oligonucleotide
ucgguauggguaagggcau

SEQ ID NO: 1059140 - RNA, 19 nt, Artificial Sequence
  Description of Artificial Sequence: Synthetic oligonucleotide
accgacaugcaaagugggg

SEQ ID NO: 1059141 - RNA, 19 nt, Artificial Sequence
  Description of Artificial Sequence: Synthetic oligonucleotide
agccuugggugcuguuuac

SEQ ID NO: 1059142 - RNA, 19 nt, Artificial Sequence
  Description of Artificial Sequence: Synthetic oligonucleotide
ccaacgaaaggaucaauca

SEQ ID NO: 1059143 - RNA, 19 nt, Artificial Sequence
  Description of Artificial Sequence: Synthetic oligonucleotide
uguuccaaguagugcuuua

SEQ ID NO: 1059144 - RNA, 19 nt, Artificial Sequence
  Description of Artificial Sequence: Synthetic oligonucleotide
ugaguugguugacccacuu

SEQ ID NO: 1059145 - RNA, 19 nt, Artificial Sequence
  Description of Artificial Sequence: Synthetic oligonucleotide
cucggugccgugucucccg

SEQ ID NO: 1059146 - RNA, 19 nt, Artificial Sequence
  Description of Artificial Sequence: Synthetic oligonucleotide
gcuguugacauggcgagug

SEQ ID NO: 1059147 - RNA, 19 nt, Artificial Sequence
  Description of Artificial Sequence: Synthetic oligonucleotide
cuccgaugcucauccagug

SEQ ID NO: 1059148 - RNA, 19 nt, Artificial Sequence
  Description of Artificial Sequence: Synthetic oligonucleotide
ggacucuugucuuucaucu

SEQ ID NO: 1059149 - RNA, 19 nt, Artificial Sequence
  Description of Artificial Sequence: Synthetic oligonucleotide
ggcacagucaguacacuug

SEQ ID NO: 1059150 - RNA, 19 nt, Artificial Sequence
  Description of Artificial Sequence: Synthetic oligonucleotide
ggguaagggcaugaugucg

SEQ ID NO: 1059151 - RNA, 19 nt, Artificial Sequence
  Description of Artificial Sequence: Synthetic oligonucleotide
guagcugcagaggcggcag

SEQ ID NO: 1059152 - RNA, 19 nt, Artificial Sequence
  Description of Artificial Sequence: Synthetic oligonucleotide
ucgguuggugcaguacuca

SEQ ID NO: 1059153 - RNA, 19 nt, Artificial Sequence
  Description of Artificial Sequence: Synthetic oligonucleotide
guacuaacugauaccgaca

SEQ ID NO: 1059154 - RNA, 19 nt, Artificial Sequence
  Description of Artificial Sequence: Synthetic oligonucleotide
ggcuuuguagcugcagagg

SEQ ID NO: 1059155 - RNA, 19 nt, Artificial Sequence
  Description of Artificial Sequence: Synthetic oligonucleotide
guauccacacucagggcac

SEQ ID NO: 1059156 - RNA, 19 nt, Artificial Sequence
  Description of Artificial Sequence: Synthetic oligonucleotide
ucggucgguauggguaagg

SEQ ID NO: 1059157 - RNA, 19 nt, Artificial Sequence
  Description of Artificial Sequence: Synthetic oligonucleotide
cuuuauggauccgcaugug

SEQ ID NO: 1059158 - RNA, 19 nt, Artificial Sequence
  Description of Artificial Sequence: Synthetic oligonucleotide
cagagccaacgaaaggauc

SEQ ID NO: 1059159 - RNA, 19 nt, Artificial Sequence
  Description of Artificial Sequence: Synthetic oligonucleotide
uccuaucaucucugacuug

SEQ ID NO: 1059160 - RNA, 19 nt, Artificial Sequence
  Description of Artificial Sequence: Synthetic oligonucleotide
cuugggugcuguuuacgga

SEQ ID NO: 1059161 - RNA, 19 nt, Artificial Sequence
  Description of Artificial Sequence: Synthetic oligonucleotide
ucggugccgugucucccgg

SEQ ID NO: 1059162 - RNA, 19 nt, Artificial Sequence
  Description of Artificial Sequence: Synthetic oligonucleotide
guacuuucguuccucuuua

SEQ ID NO: 1059163 - RNA, 19 nt, Artificial Sequence
  Description of Artificial Sequence: Synthetic oligonucleotide
ugugguacuugaggcgaga

SEQ ID NO: 1059164 - RNA, 19 nt, Artificial Sequence
  Description of Artificial Sequence: Synthetic oligonucleotide
ucuagacuuuccugcccuc

SEQ ID NO: 1059165 - RNA, 19 nt, Artificial Sequence
  Description of Artificial Sequence: Synthetic oligonucleotide
aguccaagccuaucuuuua

SEQ ID NO: 1059166 - RNA, 19 nt, Artificial Sequence
  Description of Artificial Sequence: Synthetic oligonucleotide
caggcauaggagcagaggu

SEQ ID NO: 1059167 - RNA, 19 nt, Artificial Sequence
  Description of Artificial Sequence: Synthetic oligonucleotide
auauguccucguaggcugg

SEQ ID NO: 1059168 - RNA, 19 nt, Artificial Sequence
  Description of Artificial Sequence: Synthetic oligonucleotide
guacucacacucgggacac

SEQ ID NO: 1059169 - RNA, 19 nt, Artificial Sequence
  Description of Artificial Sequence: Synthetic oligonucleotide
gcaguacucacacucggga

SEQ ID NO: 1059170 - RNA, 19 nt, Artificial Sequence
  Description of Artificial Sequence: Synthetic oligonucleotide
acggagcuggcaacggugg

SEQ ID NO: 1059171 - RNA, 19 nt, Artificial Sequence
  Description of Artificial Sequence: Synthetic oligonucleotide
ugacgaccuggaacuuuug

SEQ ID NO: 1059172 - RNA, 19 nt, Artificial Sequence
  Description of Artificial Sequence: Synthetic oligonucleotide
cucucgggcagcaaaguua

SEQ ID NO: 1059173 - RNA, 19 nt, Artificial Sequence
  Description of Artificial Sequence: Synthetic oligonucleotide
ugaaugcggcugugccagg

SEQ ID NO: 1059174 - RNA, 19 nt, Artificial Sequence
  Description of Artificial Sequence: Synthetic oligonucleotide
cugagcuaaacugggccuc

SEQ ID NO: 1059175 - RNA, 19 nt, Artificial Sequence
  Description of Artificial Sequence: Synthetic oligonucleotide
ggucgguauggguaagggc

SEQ ID NO: 1059176 - RNA, 19 nt, Artificial Sequence
  Description of Artificial Sequence: Synthetic oligonucleotide
gucggcgcagagcaugcug

SEQ ID NO: 1059177 - RNA, 19 nt, Artificial Sequence
  Description of Artificial Sequence: Synthetic oligonucleotide
guacacuuguagagccggg

SEQ ID NO: 1059178 - RNA, 19 nt, Artificial Sequence
  Description of Artificial Sequence: Synthetic oligonucleotide
ugcuuggucaugugauauu

SEQ ID NO: 1059179 - RNA, 19 nt, Artificial Sequence
  Description of Artificial Sequence: Synthetic oligonucleotide
ugcguaggugggugcgaag

SEQ ID NO: 1059180 - RNA, 19 nt, Artificial Sequence
  Description of Artificial Sequence: Synthetic oligonucleotide
cuaagcuccucaggcuagc

SEQ ID NO: 1059181 - RNA, 19 nt, Artificial Sequence
  Description of Artificial Sequence: Synthetic oligonucleotide
aggcacagucaguacacuu

SEQ ID NO: 1059182 - RNA, 19 nt, Artificial Sequence
  Description of Artificial Sequence: Synthetic oligonucleotide
ggggaaggaugccugacca

SEQ ID NO: 1059183 - RNA, 19 nt, Artificial Sequence
  Description of Artificial Sequence: Synthetic oligonucleotide
ggcuuagucccauccucag

SEQ ID NO: 1059184 - RNA, 19 nt, Artificial Sequence
  Description of Artificial Sequence: Synthetic oligonucleotide
agggcacagguacuuucgu

SEQ ID NO: 1059185 - RNA, 19 nt, Artificial Sequence
  Description of Artificial Sequence: Synthetic oligonucleotide
agucacagguuaaaaccau

SEQ ID NO: 1059186 - RNA, 19 nt, Artificial Sequence
  Description of Artificial Sequence: Synthetic oligonucleotide
gcuauaggcacagucagua

SEQ ID NO: 1059187 - RNA, 19 nt, Artificial Sequence
  Description of Artificial Sequence: Synthetic oligonucleotide
ugugcauaucuuggauuau

SEQ ID NO: 1059188 - RNA, 19 nt, Artificial Sequence
  Description of Artificial Sequence: Synthetic oligonucleotide
auguaauuccuaagccaga

SEQ ID NO: 1059189 - RNA, 19 nt, Artificial Sequence
  Description of Artificial Sequence: Synthetic oligonucleotide
gcuuuaccaggcccacucg

SEQ ID NO: 1059190 - RNA, 19 nt, Artificial Sequence
  Description of Artificial Sequence: Synthetic oligonucleotide
acagucccagugugcauau

SEQ ID NO: 1059191 - RNA, 19 nt, Artificial Sequence
  Description of Artificial Sequence: Synthetic oligonucleotide
ugauaccgacaugcaaagu

SEQ ID NO: 1059192 - RNA, 19 nt, Artificial Sequence
  Description of Artificial Sequence: Synthetic oligonucleotide
guuuuaguccaagccuauc

SEQ ID NO: 1059193 - RNA, 19 nt, Artificial Sequence
  Description of Artificial Sequence: Synthetic oligonucleotide
caagccuaucuuuuauaua

SEQ ID NO: 1059194 - RNA, 19 nt, Artificial Sequence
  Description of Artificial Sequence: Synthetic oligonucleotide
gugguccaguacuaacuga

SEQ ID NO: 1059195 - RNA, 19 nt, Artificial Sequence
  Description of Artificial Sequence: Synthetic oligonucleotide
ugaggcgagaagggucagc

SEQ ID NO: 1059196 - RNA, 19 nt, Artificial Sequence
  Description of Artificial Sequence: Synthetic oligonucleotide
guaagggcaugaugucgca

SEQ ID NO: 1059197 - RNA, 19 nt, Artificial Sequence
  Description of Artificial Sequence: Synthetic oligonucleotide
gccaacgaaaggaucaauc

SEQ ID NO: 1059198 - RNA, 19 nt, Artificial Sequence
  Description of Artificial Sequence: Synthetic oligonucleotide
gcuacagucccagugugca

SEQ ID NO: 1059199 - RNA, 19 nt, Artificial Sequence
  Description of Artificial Sequence: Synthetic oligonucleotide
accuugguggcagcuguug

SEQ ID NO: 1059200 - RNA, 19 nt, Artificial Sequence
  Description of Artificial Sequence: Synthetic oligonucleotide
ugggugcuguuuacggaua

SEQ ID NO: 1059201 - RNA, 19 nt, Artificial Sequence
  Description of Artificial Sequence: Synthetic oligonucleotide
acgguggcaaacauugcaa

SEQ ID NO: 1059202 - RNA, 19 nt, Artificial Sequence
  Description of Artificial Sequence: Synthetic oligonucleotide
ggugucggcgcagagcaug

SEQ ID NO: 1059203 - RNA, 19 nt, Artificial Sequence
  Description of Artificial Sequence: Synthetic oligonucleotide
ccaaccaacaagucccuca

SEQ ID NO: 1059204 - RNA, 19 nt, Artificial Sequence
  Description of Artificial Sequence: Synthetic oligonucleotide
caguacuaacugauaccga

SEQ ID NO: 1059205 - RNA, 19 nt, Artificial Sequence
  Description of Artificial Sequence: Synthetic oligonucleotide
guugguugacccacuugca

SEQ ID NO: 1059206 - RNA, 19 nt, Artificial Sequence
  Description of Artificial Sequence: Synthetic oligonucleotide
gaaggaguucccuccuuau

SEQ ID NO: 1059207 - RNA, 19 nt, Artificial Sequence
  Description of Artificial Sequence: Synthetic oligonucleotide
ugcgcacaugcuugacgac

SEQ ID NO: 1059208 - RNA, 19 nt, Artificial Sequence
  Description of Artificial Sequence: Synthetic oligonucleotide
aaggggcccucaguggccu

SEQ ID NO: 1059209 - RNA, 19 nt, Artificial Sequence
  Description of Artificial Sequence: Synthetic oligonucleotide
ucucggugccgugucuccc

SEQ ID NO: 1059210 - RNA, 19 nt, Artificial Sequence
  Description of Artificial Sequence: Synthetic oligonucleotide
ugccgugucucccggugua

SEQ ID NO: 1059211 - RNA, 19 nt, Artificial Sequence
  Description of Artificial Sequence: Synthetic oligonucleotide
uuggugcaguacucacacu

SEQ ID NO: 1059212 - RNA, 19 nt, Artificial Sequence
  Description of Artificial Sequence: Synthetic oligonucleotide
guaccuugguggcagcugu

SEQ ID NO: 1059213 - RNA, 19 nt, Artificial Sequence
  Description of Artificial Sequence: Synthetic oligonucleotide
gauggguguguagguucug

SEQ ID NO: 1059214 - RNA, 19 nt, Artificial Sequence
  Description of Artificial Sequence: Synthetic oligonucleotide
agauucagucacagguuaa

SEQ ID NO: 1059215 - RNA, 19 nt, Artificial Sequence
  Description of Artificial Sequence: Synthetic oligonucleotide
ggggugucggucgguaugg

SEQ ID NO: 1059216 - RNA, 19 nt, Artificial Sequence
  Description of Artificial Sequence: Synthetic oligonucleotide
aggugcacugugggagugg

SEQ ID NO: 1059217 - RNA, 19 nt, Artificial Sequence
  Description of Artificial Sequence: Synthetic oligonucleotide
gaagcaggaagcgugucuu

SEQ ID NO: 1059218 - RNA, 19 nt, Artificial Sequence
  Description of Artificial Sequence: Synthetic oligonucleotide
cacaugaaagcccgggccu

SEQ ID NO: 1059219 - RNA, 19 nt, Artificial Sequence
  Description of Artificial Sequence: Synthetic oligonucleotide
gugucggucgguaugggua

SEQ ID NO: 1059220 - RNA, 19 nt, Artificial Sequence
  Description of Artificial Sequence: Synthetic oligonucleotide
cacagguuaaaaccauagu

SEQ ID NO: 1059221 - RNA, 19 nt, Artificial Sequence
  Description of Artificial Sequence: Synthetic oligonucleotide
gcuugcguaggugggugcg

SEQ ID NO: 1059222 - RNA, 19 nt, Artificial Sequence
  Description of Artificial Sequence: Synthetic oligonucleotide
ccgguguacacgaagugca

SEQ ID NO: 1059223 - RNA, 19 nt, Artificial Sequence
  Description of Artificial Sequence: Synthetic oligonucleotide
uugaggcgagaagggucag

SEQ ID NO: 1059224 - RNA, 19 nt, Artificial Sequence
  Description of Artificial Sequence: Synthetic oligonucleotide
gugcuugcguaggugggug

SEQ ID NO: 1059225 - RNA, 19 nt, Artificial Sequence
  Description of Artificial Sequence: Synthetic oligonucleotide
uugcguaggugggugcgaa

SEQ ID NO: 1059226 - RNA, 19 nt, Artificial Sequence
  Description of Artificial Sequence: Synthetic oligonucleotide
gguaccuugguggcagcug

SEQ ID NO: 1059227 - RNA, 19 nt, Artificial Sequence
  Description of Artificial Sequence: Synthetic oligonucleotide
gugcauaucuuggauuaua

SEQ ID NO: 1059228 - RNA, 19 nt, Artificial Sequence
  Description of Artificial Sequence: Synthetic oligonucleotide
ccacacugauaucccaaag

SEQ ID NO: 1059229 - RNA, 19 nt, Artificial Sequence
  Description of Artificial Sequence: Synthetic oligonucleotide
ugucuccgaugcucaucca

SEQ ID NO: 1059230 - RNA, 19 nt, Artificial Sequence
  Description of Artificial Sequence: Synthetic oligonucleotide
ggugggguaagggcgucag

SEQ ID NO: 1059231 - RNA, 19 nt, Artificial Sequence
  Description of Artificial Sequence: Synthetic oligonucleotide
gcguaggugggugcgaagc

SEQ ID NO: 1059232 - RNA, 19 nt, Artificial Sequence
  Description of Artificial Sequence: Synthetic oligonucleotide
cuuuccugcccucuccugu

SEQ ID NO: 1059233 - RNA, 19 nt, Artificial Sequence
  Description of Artificial Sequence: Synthetic oligonucleotide
caugcuugacgaccuggaa

SEQ ID NO: 1059234 - RNA, 19 nt, Artificial Sequence
  Description of Artificial Sequence: Synthetic oligonucleotide
ggauuauauguaauuccua

SEQ ID NO: 1059235 - RNA, 19 nt, Artificial Sequence
  Description of Artificial Sequence: Synthetic oligonucleotide
cucgcucucgggcagcaaa

SEQ ID NO: 1059236 - RNA, 19 nt, Artificial Sequence
  Description of Artificial Sequence: Synthetic oligonucleotide
gggugcgaagcaggaagcg

SEQ ID NO: 1059237 - RNA, 19 nt, Artificial Sequence
  Description of Artificial Sequence: Synthetic oligonucleotide
gcgcacaugcuugacgacc

SEQ ID NO: 1059238 - RNA, 19 nt, Artificial Sequence
  Description of Artificial Sequence: Synthetic oligonucleotide
cccgguguacacgaagugc

SEQ ID NO: 1059239 - RNA, 19 nt, Artificial Sequence
  Description of Artificial Sequence: Synthetic oligonucleotide
uaagggcgucagccuucag

SEQ ID NO: 1059240 - RNA, 19 nt, Artificial Sequence
  Description of Artificial Sequence: Synthetic oligonucleotide
gagccaacgaaaggaucaa

SEQ ID NO: 1059241 - RNA, 19 nt, Artificial Sequence
  Description of Artificial Sequence: Synthetic oligonucleotide
gguguacacgaagugcauc

SEQ ID NO: 1059242 - RNA, 19 nt, Artificial Sequence
  Description of Artificial Sequence: Synthetic oligonucleotide
agcggaaagcacgguggca

SEQ ID NO: 1059243 - RNA, 19 nt, Artificial Sequence
  Description of Artificial Sequence: Synthetic oligonucleotide
cuugaaacacggggaggga

SEQ ID NO: 1059244 - RNA, 19 nt, Artificial Sequence
  Description of Artificial Sequence: Synthetic oligonucleotide
ggucggccuggucagggug

SEQ ID NO: 1059245 - RNA, 19 nt, Artificial Sequence
  Description of Artificial Sequence: Synthetic oligonucleotide
cuaagccagagguggggua

SEQ ID NO: 1059246 - RNA, 19 nt, Artificial Sequence
  Description of Artificial Sequence: Synthetic oligonucleotide
cuaggcuuagucccauccu

SEQ ID NO: 1059247 - RNA, 19 nt, Artificial Sequence
  Description of Artificial Sequence: Synthetic oligonucleotide
gguauggguaagggcauga

SEQ ID NO: 1059248 - RNA, 19 nt, Artificial Sequence
  Description of Artificial Sequence: Synthetic oligonucleotide
guugacccacuugcacuug

SEQ ID NO: 1059249 - RNA, 19 nt, Artificial Sequence
  Description of Artificial Sequence: Synthetic oligonucleotide
ggauauguccucguaggcu

SEQ ID NO: 1059250 - RNA, 19 nt, Artificial Sequence
  Description of Artificial Sequence: Synthetic oligonucleotide
ugccuacacccugguuggg

SEQ ID NO: 1059251 - RNA, 19 nt, Artificial Sequence
  Description of Artificial Sequence: Synthetic oligonucleotide
ggaguucccuccuuauucu

SEQ ID NO: 1059252 - RNA, 19 nt, Artificial Sequence
  Description of Artificial Sequence: Synthetic oligonucleotide
guaggugcacugugggagu

SEQ ID NO: 1059253 - RNA, 19 nt, Artificial Sequence
  Description of Artificial Sequence: Synthetic oligonucleotide
gugucggcgcagagcaugc

SEQ ID NO: 1059254 - RNA, 19 nt, Artificial Sequence
  Description of Artificial Sequence: Synthetic oligonucleotide
gcauggaaaggauggggua

SEQ ID NO: 1059255 - RNA, 19 nt, Artificial Sequence
  Description of Artificial Sequence: Synthetic oligonucleotide
gucccuuuacauggugguc

SEQ ID NO: 1059256 - RNA, 19 nt, Artificial Sequence
  Description of Artificial Sequence: Synthetic oligonucleotide
cccagcggaaagcacggug

SEQ ID NO: 1059257 - RNA, 19 nt, Artificial Sequence
  Description of Artificial Sequence: Synthetic oligonucleotide
gaaggggugucggucggua

SEQ ID NO: 1059258 - RNA, 19 nt, Artificial Sequence
  Description of Artificial Sequence: Synthetic oligonucleotide
agcuguugacauggcgagu

SEQ ID NO: 1059259 - RNA, 19 nt, Artificial Sequence
  Description of Artificial Sequence: Synthetic oligonucleotide
gagggacucgaagcagaga

SEQ ID NO: 1059260 - RNA, 19 nt, Artificial Sequence
  Description of Artificial Sequence: Synthetic oligonucleotide
ccauagugauacucaagaa

SEQ ID NO: 1059261 - RNA, 19 nt, Artificial Sequence
  Description of Artificial Sequence: Synthetic oligonucleotide
cugauaucccaaagccagu

SEQ ID NO: 1059262 - RNA, 19 nt, Artificial Sequence
  Description of Artificial Sequence: Synthetic oligonucleotide
gcggaaagcacgguggcaa

SEQ ID NO: 1059263 - RNA, 19 nt, Artificial Sequence
  Description of Artificial Sequence: Synthetic oligonucleotide
caucauguaggugcacugu

SEQ ID NO: 1059264 - RNA, 19 nt, Artificial Sequence
  Description of Artificial Sequence: Synthetic oligonucleotide
cagccuugggugcuguuua

SEQ ID NO: 1059265 - RNA, 19 nt, Artificial Sequence
  Description of Artificial Sequence: Synthetic oligonucleotide
cggauauguccucguaggc

SEQ ID NO: 1059266 - RNA, 19 nt, Artificial Sequence
  Description of Artificial Sequence: Synthetic oligonucleotide
agccaacgaaaggaucaau

SEQ ID NO: 1059267 - RNA, 19 nt, Artificial Sequence
  Description of Artificial Sequence: Synthetic oligonucleotide
aggaucaaucaaggaucaa

SEQ ID NO: 1059268 - RNA, 19 nt, Artificial Sequence
  Description of Artificial Sequence: Synthetic oligonucleotide
cagcaaaguuacggagcug

SEQ ID NO: 1059269 - RNA, 19 nt, Artificial Sequence
  Description of Artificial Sequence: Synthetic oligonucleotide
ggggagggacucgaagcag

SEQ ID NO: 1059270 - RNA, 19 nt, Artificial Sequence
  Description of Artificial Sequence: Synthetic oligonucleotide
agcgugucuugaaugccuu

SEQ ID NO: 1059271 - RNA, 19 nt, Artificial Sequence
  Description of Artificial Sequence: Synthetic oligonucleotide
cgaaaggaucaaucaagga

SEQ ID NO: 1059272 - RNA, 19 nt, Artificial Sequence
  Description of Artificial Sequence: Synthetic oligonucleotide
ggguguguagguucugggu

SEQ ID NO: 1059273 - RNA, 19 nt, Artificial Sequence
  Description of Artificial Sequence: Synthetic oligonucleotide
gaaugcggcugugccaggu

SEQ ID NO: 1059274 - RNA, 19 nt, Artificial Sequence
  Description of Artificial Sequence: Synthetic oligonucleotide
cagugugaaugcggcugug

SEQ ID NO: 1059275 - RNA, 19 nt, Artificial Sequence
  Description of Artificial Sequence: Synthetic oligonucleotide
gucggucgguauggguaag

SEQ ID NO: 1059276 - RNA, 19 nt, Artificial Sequence
  Description of Artificial Sequence: Synthetic oligonucleotide
gguugacccacuugcacuu

SEQ ID NO: 1059277 - RNA, 19 nt, Artificial Sequence
  Description of Artificial Sequence: Synthetic oligonucleotide
gggagggacucgaagcaga

SEQ ID NO: 1059278 - RNA, 19 nt, Artificial Sequence
  Description of Artificial Sequence: Synthetic oligonucleotide
gcgugucuugaaugccuug

SEQ ID NO: 1059279 - RNA, 19 nt, Artificial Sequence
  Description of Artificial Sequence: Synthetic oligonucleotide
cuugcguaggugggugcga

SEQ ID NO: 1059280 - RNA, 19 nt, Artificial Sequence
  Description of Artificial Sequence: Synthetic oligonucleotide
ugucggcgcagagcaugcu

SEQ ID NO: 1059281 - RNA, 19 nt, Artificial Sequence
  Description of Artificial Sequence: Synthetic oligonucleotide
caggaagcgugucuugaau

SEQ ID NO: 1059282 - RNA, 19 nt, Artificial Sequence
  Description of Artificial Sequence: Synthetic oligonucleotide
gggcaugaugucgcaggcc

SEQ ID NO: 1059283 - RNA, 19 nt, Artificial Sequence
  Description of Artificial Sequence: Synthetic oligonucleotide
cagguacuuucguuccucu

SEQ ID NO: 1059284 - RNA, 19 nt, Artificial Sequence
  Description of Artificial Sequence: Synthetic oligonucleotide
ccgaugcucauccagugcu

SEQ ID NO: 1059285 - RNA, 19 nt, Artificial Sequence
  Description of Artificial Sequence: Synthetic oligonucleotide
cccuuuacaugguggucca

SEQ ID NO: 1059286 - RNA, 19 nt, Artificial Sequence
  Description of Artificial Sequence: Synthetic oligonucleotide
cggucgguauggguaaggg

SEQ ID NO: 1059287 - RNA, 19 nt, Artificial Sequence
  Description of Artificial Sequence: Synthetic oligonucleotide
guagagccgggugccucca

SEQ ID NO: 1059288 - RNA, 19 nt, Artificial Sequence
  Description of Artificial Sequence: Synthetic oligonucleotide
acccuaggcuuagucccau

SEQ ID NO: 1059289 - RNA, 19 nt, Artificial Sequence
  Description of Artificial Sequence: Synthetic oligonucleotide
gguggggucuuugccuaca

SEQ ID NO: 1059290 - RNA, 19 nt, Artificial Sequence
  Description of Artificial Sequence: Synthetic oligonucleotide
ggugcgaagcaggaagcgu

SEQ ID NO: 1059291 - RNA, 19 nt, Artificial Sequence
  Description of Artificial Sequence: Synthetic oligonucleotide
guauggguaagggcaugau

SEQ ID NO: 1059292 - RNA, 19 nt, Artificial Sequence
  Description of Artificial Sequence: Synthetic oligonucleotide
cuucaggcccuaagcuccu

SEQ ID NO: 1059293 - RNA, 19 nt, Artificial Sequence
  Description of Artificial Sequence: Synthetic oligonucleotide
gcagagcaugcugcuucag

SEQ ID NO: 1059294 - RNA, 19 nt, Artificial Sequence
  Description of Artificial Sequence: Synthetic oligonucleotide
gguccaguacuaacugaua

SEQ ID NO: 1059295 - RNA, 19 nt, Artificial Sequence
  Description of Artificial Sequence: Synthetic oligonucleotide
gggugucggucgguauggg

SEQ ID NO: 1059296 - RNA, 19 nt, Artificial Sequence
  Description of Artificial Sequence: Synthetic oligonucleotide
cuugacgaccuggaacuuu

SEQ ID NO: 1059297 - RNA, 19 nt, Artificial Sequence
  Description of Artificial Sequence: Synthetic oligonucleotide
gugaaggaguucccuccuu

SEQ ID NO: 1059298 - RNA, 19 nt, Artificial Sequence
  Description of Artificial Sequence: Synthetic oligonucleotide
cuacagucccagugugcau

SEQ ID NO: 1059299 - RNA, 19 nt, Artificial Sequence
  Description of Artificial Sequence: Synthetic oligonucleotide
aggccacauugggaacagu

SEQ ID NO: 1059300 - RNA, 19 nt, Artificial Sequence
  Description of Artificial Sequence: Synthetic oligonucleotide
ccuacacccugguuggggu

SEQ ID NO: 1059301 - RNA, 19 nt, Artificial Sequence
  Description of Artificial Sequence: Synthetic oligonucleotide
ccaacaagucccucagaau

SEQ ID NO: 1059302 - RNA, 19 nt, Artificial Sequence
  Description of Artificial Sequence: Synthetic oligonucleotide
gcccuaagcuccucaggcu

SEQ ID NO: 1059303 - RNA, 19 nt, Artificial Sequence
  Description of Artificial Sequence: Synthetic oligonucleotide
gugccgugucucccggugu

SEQ ID NO: 1059304 - RNA, 19 nt, Artificial Sequence
  Description of Artificial Sequence: Synthetic oligonucleotide
gggcgucagccuucagguc

SEQ ID NO: 1059305 - RNA, 19 nt, Artificial Sequence
  Description of Artificial Sequence: Synthetic oligonucleotide
gccugcuagggaaggucuc

SEQ ID NO: 1059306 - RNA, 19 nt, Artificial Sequence
  Description of Artificial Sequence: Synthetic oligonucleotide
cacccugguuggggucggc

SEQ ID NO: 1059307 - RNA, 19 nt, Artificial Sequence
  Description of Artificial Sequence: Synthetic oligonucleotide
ccagugugaaugcggcugu

SEQ ID NO: 1059308 - RNA, 19 nt, Artificial Sequence
  Description of Artificial Sequence: Synthetic oligonucleotide
gcgaagcaggaagcguguc

SEQ ID NO: 1059309 - RNA, 19 nt, Artificial Sequence
  Description of Artificial Sequence: Synthetic oligonucleotide
ccucuuuauggauccgcau

SEQ ID NO: 1059310 - RNA, 19 nt, Artificial Sequence
  Description of Artificial Sequence: Synthetic oligonucleotide
gcucucgggcagcaaaguu

SEQ ID NO: 1059311 - RNA, 19 nt, Artificial Sequence
  Description of Artificial Sequence: Synthetic oligonucleotide
gcggcugugccaggugauc

SEQ ID NO: 1059312 - RNA, 19 nt, Artificial Sequence
  Description of Artificial Sequence: Synthetic oligonucleotide
ccaaggguggggagugugu

SEQ ID NO: 1059313 - RNA, 19 nt, Artificial Sequence
  Description of Artificial Sequence: Synthetic oligonucleotide
cccuaggcuuagucccauc

SEQ ID NO: 1059314 - RNA, 19 nt, Artificial Sequence
  Description of Artificial Sequence: Synthetic oligonucleotide
gccgugucucccgguguac

SEQ ID NO: 1059315 - RNA, 19 nt, Artificial Sequence
  Description of Artificial Sequence: Synthetic oligonucleotide
cagcucgguuggugcagua

SEQ ID NO: 1059316 - RNA, 19 nt, Artificial Sequence
  Description of Artificial Sequence: Synthetic oligonucleotide
ccuaagccagagguggggu

SEQ ID NO: 1059317 - RNA, 19 nt, Artificial Sequence
  Description of Artificial Sequence: Synthetic oligonucleotide
ggucuccuggcaggcccca

SEQ ID NO: 1059318 - RNA, 19 nt, Artificial Sequence
  Description of Artificial Sequence: Synthetic oligonucleotide
ggguaccuugguggcagcu

SEQ ID NO: 1059319 - RNA, 19 nt, Artificial Sequence
  Description of Artificial Sequence: Synthetic oligonucleotide
ggcuagcuacagucccagu

SEQ ID NO: 1059320 - RNA, 19 nt, Artificial Sequence
  Description of Artificial Sequence: Synthetic oligonucleotide
gggucggccuggucagggu

SEQ ID NO: 1059321 - RNA, 19 nt, Artificial Sequence
  Description of Artificial Sequence: Synthetic oligonucleotide
ggcgcagagcaugcugcuu

SEQ ID NO: 1059322 - RNA, 19 nt, Artificial Sequence
  Description of Artificial Sequence: Synthetic oligonucleotide
gcuugacgaccuggaacuu

SEQ ID NO: 1059323 - RNA, 19 nt, Artificial Sequence
  Description of Artificial Sequence: Synthetic oligonucleotide
cgguguacacgaagugcau

SEQ ID NO: 1059324 - RNA, 19 nt, Artificial Sequence
  Description of Artificial Sequence: Synthetic oligonucleotide
cggcgcagagcaugcugcu

SEQ ID NO: 1059325 - RNA, 19 nt, Artificial Sequence
  Description of Artificial Sequence: Synthetic oligonucleotide
gggugucggcgcagagcau

SEQ ID NO: 1059326 - RNA, 19 nt, Artificial Sequence
  Description of Artificial Sequence: Synthetic oligonucleotide
uucuucguaaacuagauug

SEQ ID NO: 1059327 - RNA, 19 nt, Artificial Sequence
  Description of Artificial Sequence: Synthetic oligonucleotide
aguuguuagaaacuagagc

SEQ ID NO: 1059328 - RNA, 19 nt, Artificial Sequence
  Description of Artificial Sequence: Synthetic oligonucleotide
aaucuggacaugcugcucc

SEQ ID NO: 1059329 - RNA, 19 nt, Artificial Sequence
  Description of Artificial Sequence: Synthetic oligonucleotide
aaaggcaaucucuucuugc

SEQ ID NO: 1059330 - RNA, 19 nt, Artificial Sequence
  Description of Artificial Sequence: Synthetic oligonucleotide
uucaaggucaucgugaugc

SEQ ID NO: 1059331 - RNA, 19 nt, Artificial Sequence
  Description of Artificial Sequence: Synthetic oligonucleotide
agaggcauugucaacaucc

SEQ ID NO: 1059332 - RNA, 19 nt, Artificial Sequence
  Description of Artificial Sequence: Synthetic oligonucleotide
guuguuagaaacuagagcu

SEQ ID NO: 1059333 - RNA, 19 nt, Artificial Sequence
  Description of Artificial Sequence: Synthetic oligonucleotide
aaagcuguuuccuuaagau

SEQ ID NO: 1059334 - RNA, 19 nt, Artificial Sequence
  Description of Artificial Sequence: Synthetic oligonucleotide
acuagauuguguuguaaac

SEQ ID NO: 1059335 - RNA, 19 nt, Artificial Sequence
  Description of Artificial Sequence: Synthetic oligonucleotide
uuauucaaggucaucguga

SEQ ID NO: 1059336 - RNA, 19 nt, Artificial Sequence
  Description of Artificial Sequence: Synthetic oligonucleotide
agcaguaacaaguugguca

SEQ ID NO: 1059337 - RNA, 19 nt, Artificial Sequence
  Description of Artificial Sequence: Synthetic oligonucleotide
ugagagguuucauugauca

SEQ ID NO: 1059338 - RNA, 19 nt, Artificial Sequence
  Description of Artificial Sequence: Synthetic oligonucleotide
caucuuaacauugagcagg

SEQ ID NO: 1059339 - RNA, 19 nt, Artificial Sequence
  Description of Artificial Sequence: Synthetic oligonucleotide
agugcauccacuucgcagg

SEQ ID NO: 1059340 - RNA, 19 nt, Artificial Sequence
  Description of Artificial Sequence: Synthetic oligonucleotide
aaugucaagagccaucuua

SEQ ID NO: 1059341 - RNA, 19 nt, Artificial Sequence
  Description of Artificial Sequence: Synthetic oligonucleotide
ucaguuguuagaaacuaga

SEQ ID NO: 1059342 - RNA, 19 nt, Artificial Sequence
  Description of Artificial Sequence: Synthetic oligonucleotide
agaggaucgggucacauag

SEQ ID NO: 1059343 - RNA, 19 nt, Artificial Sequence
  Description of Artificial Sequence: Synthetic oligonucleotide
gaucgggucacauaggcgc

SEQ ID NO: 1059344 - RNA, 19 nt, Artificial Sequence
  Description of Artificial Sequence: Synthetic oligonucleotide
uuuauucaaggucaucgug

SEQ ID NO: 1059345 - RNA, 19 nt, Artificial Sequence
  Description of Artificial Sequence: Synthetic oligonucleotide
gucaagacgugccagagag

SEQ ID NO: 1059346 - RNA, 19 nt, Artificial Sequence
  Description of Artificial Sequence: Synthetic oligonucleotide
ugaggucaggcuuagaaac

SEQ ID NO: 1059347 - RNA, 19 nt, Artificial Sequence
  Description of Artificial Sequence: Synthetic oligonucleotide
gucaucgugaugcugagag

SEQ ID NO: 1059348 - RNA, 19 nt, Artificial Sequence
  Description of Artificial Sequence: Synthetic oligonucleotide
accuugucgauguaguugg

SEQ ID NO: 1059349 - RNA, 19 nt, Artificial Sequence
  Description of Artificial Sequence: Synthetic oligonucleotide
aaggauuccacuuuacguu

SEQ ID NO: 1059350 - RNA, 19 nt, Artificial Sequence
  Description of Artificial Sequence: Synthetic oligonucleotide
cugaaucucauccugcagg

SEQ ID NO: 1059351 - RNA, 19 nt, Artificial Sequence
  Description of Artificial Sequence: Synthetic oligonucleotide
ucuagcacaagauuucuuc

SEQ ID NO: 1059352 - RNA, 19 nt, Artificial Sequence
  Description of Artificial Sequence: Synthetic oligonucleotide
cuagagcuuauuucuaucc

SEQ ID NO: 1059353 - RNA, 19 nt, Artificial Sequence
  Description of Artificial Sequence: Synthetic oligonucleotide
agauuagucucucucaggu

SEQ ID NO: 1059354 - RNA, 19 nt, Artificial Sequence
  Description of Artificial Sequence: Synthetic oligonucleotide
uaacaaguuggucagguau

SEQ ID NO: 1059355 - RNA, 19 nt, Artificial Sequence
  Description of Artificial Sequence: Synthetic oligonucleotide
uauucuagcacaagauuuc

SEQ ID NO: 1059356 - RNA, 19 nt, Artificial Sequence
  Description of Artificial Sequence: Synthetic oligonucleotide
uccgauuggagcucggccg

SEQ ID NO: 1059357 - RNA, 19 nt, Artificial Sequence
  Description of Artificial Sequence: Synthetic oligonucleotide
agugaagaaaaguugggaa

SEQ ID NO: 1059358 - RNA, 19 nt, Artificial Sequence
  Description of Artificial Sequence: Synthetic oligonucleotide
uuaacauugagcaggucuu

SEQ ID NO: 1059359 - RNA, 19 nt, Artificial Sequence
  Description of Artificial Sequence: Synthetic oligonucleotide
uuucuaaaucuuuuagggu

SEQ ID NO: 1059360 - RNA, 19 nt, Artificial Sequence
  Description of Artificial Sequence: Synthetic oligonucleotide
uaagaggacgaggacacgg

SEQ ID NO: 1059361 - RNA, 19 nt, Artificial Sequence
  Description of Artificial Sequence: Synthetic oligonucleotide
uguaccauuccucugccuc

SEQ ID NO: 1059362 - RNA, 19 nt, Artificial Sequence
  Description of Artificial Sequence: Synthetic oligonucleotide
ugcgguaagaggacgagga

SEQ ID NO: 1059363 - RNA, 19 nt, Artificial Sequence
  Description of Artificial Sequence: Synthetic oligonucleotide
aacauccugcgguaagagg

SEQ ID NO: 1059364 - RNA, 19 nt, Artificial Sequence
  Description of Artificial Sequence: Synthetic oligonucleotide
uuuuauucaaggucaucgu

SEQ ID NO: 1059365 - RNA, 19 nt, Artificial Sequence
  Description of Artificial Sequence: Synthetic oligonucleotide
uagagcuuauuucuauccc

SEQ ID NO: 1059366 - RNA, 19 nt, Artificial Sequence
  Description of Artificial Sequence: Synthetic oligonucleotide
auuaguuccuuuaagugca

SEQ ID NO: 1059367 - RNA, 19 nt, Artificial Sequence
  Description of Artificial Sequence: Synthetic oligonucleotide
acuagagcuuauuucuauc

SEQ ID NO: 1059368 - RNA, 19 nt, Artificial Sequence
  Description of Artificial Sequence: Synthetic oligonucleotide
uucguaaacuagauugugu

SEQ ID NO: 1059369 - RNA, 19 nt, Artificial Sequence
  Description of Artificial Sequence: Synthetic oligonucleotide
ucuucguaaacuagauugu

SEQ ID NO: 1059370 - RNA, 19 nt, Artificial Sequence
  Description of Artificial Sequence: Synthetic oligonucleotide
ucuuuuagggugucaguug

SEQ ID NO: 1059371 - RNA, 19 nt, Artificial Sequence
  Description of Artificial Sequence: Synthetic oligonucleotide
ugcaguucuaccuuuucgu

SEQ ID NO: 1059372 - RNA, 19 nt, Artificial Sequence
  Description of Artificial Sequence: Synthetic oligonucleotide
uccacuuuacguucaaggu

SEQ ID NO: 1059373 - RNA, 19 nt, Artificial Sequence
  Description of Artificial Sequence: Synthetic oligonucleotide
aaacauccacaucaaucug

SEQ ID NO: 1059374 - RNA, 19 nt, Artificial Sequence
  Description of Artificial Sequence: Synthetic oligonucleotide
aggauuccacuuuacguuc

SEQ ID NO: 1059375 - RNA, 19 nt, Artificial Sequence
  Description of Artificial Sequence: Synthetic oligonucleotide
uuaagugcauccacuucgc

SEQ ID NO: 1059376 - RNA, 19 nt, Artificial Sequence
  Description of Artificial Sequence: Synthetic oligonucleotide
uuacguucaaggucaagac

SEQ ID NO: 1059377 - RNA, 19 nt, Artificial Sequence
  Description of Artificial Sequence: Synthetic oligonucleotide
ugcguuguugcacggagug

SEQ ID NO: 1059378 - RNA, 19 nt, Artificial Sequence
  Description of Artificial Sequence: Synthetic oligonucleotide
aacuagagcuuauuucuau

SEQ ID NO: 1059379 - RNA, 19 nt, Artificial Sequence
  Description of Artificial Sequence: Synthetic oligonucleotide
cuaucccaaaucuaucuug

SEQ ID NO: 1059380 - RNA, 19 nt, Artificial Sequence
  Description of Artificial Sequence: Synthetic oligonucleotide
cacuuuacguucaagguca

SEQ ID NO: 1059381 - RNA, 19 nt, Artificial Sequence
  Description of Artificial Sequence: Synthetic oligonucleotide
caagacgugccagagaggc

SEQ ID NO: 1059382 - RNA, 19 nt, Artificial Sequence
  Description of Artificial Sequence: Synthetic oligonucleotide
agagcuuauuucuauccca

SEQ ID NO: 1059383 - RNA, 19 nt, Artificial Sequence
  Description of Artificial Sequence: Synthetic oligonucleotide
uugucgauguaguuggcga

SEQ ID NO: 1059384 - RNA, 19 nt, Artificial Sequence
  Description of Artificial Sequence: Synthetic oligonucleotide
uccagauuagucucucuca

SEQ ID NO: 1059385 - RNA, 19 nt, Artificial Sequence
  Description of Artificial Sequence: Synthetic oligonucleotide
caguuguuagaaacuagag

SEQ ID NO: 1059386 - RNA, 19 nt, Artificial Sequence
  Description of Artificial Sequence: Synthetic oligonucleotide
ucguaaacuagauuguguu

SEQ ID NO: 1059387 - RNA, 19 nt, Artificial Sequence
  Description of Artificial Sequence: Synthetic oligonucleotide
auuucuaucccaaaucuau

SEQ ID NO: 1059388 - RNA, 19 nt, Artificial Sequence
  Description of Artificial Sequence: Synthetic oligonucleotide
uuggacuuguaccauuccu

SEQ ID NO: 1059389 - RNA, 19 nt, Artificial Sequence
  Description of Artificial Sequence: Synthetic oligonucleotide
uugagugggugucaaccag

SEQ ID NO: 1059390 - RNA, 19 nt, Artificial Sequence
  Description of Artificial Sequence: Synthetic oligonucleotide
cagagcaucauuguuccgg

SEQ ID NO: 1059391 - RNA, 19 nt, Artificial Sequence
  Description of Artificial Sequence: Synthetic oligonucleotide
gagcugauccaccugccgg

SEQ ID NO: 1059392 - RNA, 19 nt, Artificial Sequence
  Description of Artificial Sequence: Synthetic oligonucleotide
uguuaauggcguccgccag

SEQ ID NO: 1059393 - RNA, 19 nt, Artificial Sequence
  Description of Artificial Sequence: Synthetic oligonucleotide
aguauucuagcacaagauu

SEQ ID NO: 1059394 - RNA, 19 nt, Artificial Sequence
  Description of Artificial Sequence: Synthetic oligonucleotide
agaaagcgcaccuugucga

SEQ ID NO: 1059395 - RNA, 19 nt, Artificial Sequence
  Description of Artificial Sequence: Synthetic oligonucleotide
ucauugaucaccuguccau

SEQ ID NO: 1059396 - RNA, 19 nt, Artificial Sequence
  Description of Artificial Sequence: Synthetic oligonucleotide
ucggcuagcaggauuuugu

SEQ ID NO: 1059397 - RNA, 19 nt, Artificial Sequence
  Description of Artificial Sequence: Synthetic oligonucleotide
agagaaauccugcucuccu

SEQ ID NO: 1059398 - RNA, 19 nt, Artificial Sequence
  Description of Artificial Sequence: Synthetic oligonucleotide
ugagcugauccaccugccg

SEQ ID NO: 1059399 - RNA, 19 nt, Artificial Sequence
  Description of Artificial Sequence: Synthetic oligonucleotide
uuagggugucaguuguuag

SEQ ID NO: 1059400 - RNA, 19 nt, Artificial Sequence
  Description of Artificial Sequence: Synthetic oligonucleotide
uuuccaccgucuuaaucag

SEQ ID NO: 1059401 - RNA, 19 nt, Artificial Sequence
  Description of Artificial Sequence: Synthetic oligonucleotide
uucugaaucucauccugca

SEQ ID NO: 1059402 - RNA, 19 nt, Artificial Sequence
  Description of Artificial Sequence: Synthetic oligonucleotide
caggcuuagaaacauccac

SEQ ID NO: 1059403 - RNA, 19 nt, Artificial Sequence
  Description of Artificial Sequence: Synthetic oligonucleotide
gguacugcguuguugcacg

SEQ ID NO: 1059404 - RNA, 19 nt, Artificial Sequence
  Description of Artificial Sequence: Synthetic oligonucleotide
gaacucgguguuaauggcg

SEQ ID NO: 1059405 - RNA, 19 nt, Artificial Sequence
  Description of Artificial Sequence: Synthetic oligonucleotide
cuuaacauugagcaggucu

SEQ ID NO: 1059406 - RNA, 19 nt, Artificial Sequence
  Description of Artificial Sequence: Synthetic oligonucleotide
acugcguuguugcacggag

SEQ ID NO: 1059407 - RNA, 19 nt, Artificial Sequence
  Description of Artificial Sequence: Synthetic oligonucleotide
uauuucuaucccaaaucua

SEQ ID NO: 1059408 - RNA, 19 nt, Artificial Sequence
  Description of Artificial Sequence: Synthetic oligonucleotide
cuugguauucacgaaggug

SEQ ID NO: 1059409 - RNA, 19 nt, Artificial Sequence
  Description of Artificial Sequence: Synthetic oligonucleotide
guauucacgaaggugacga

SEQ ID NO: 1059410 - RNA, 19 nt, Artificial Sequence
  Description of Artificial Sequence: Synthetic oligonucleotide
aauccugcucuccucgccu

SEQ ID NO: 1059411 - RNA, 19 nt, Artificial Sequence
  Description of Artificial Sequence: Synthetic oligonucleotide
cucgagcucggcuagcagg

SEQ ID NO: 1059412 - RNA, 19 nt, Artificial Sequence
  Description of Artificial Sequence: Synthetic oligonucleotide
gucaggcuuagaaacaucc

SEQ ID NO: 1059413 - RNA, 19 nt, Artificial Sequence
  Description of Artificial Sequence: Synthetic oligonucleotide
gccaauaguguccugguag

SEQ ID NO: 1059414 - RNA, 19 nt, Artificial Sequence
  Description of Artificial Sequence: Synthetic oligonucleotide
aguaacaaguuggucaggu

SEQ ID NO: 1059415 - RNA, 19 nt, Artificial Sequence
  Description of Artificial Sequence: Synthetic oligonucleotide
aaggucaagacgugccaga

SEQ ID NO: 1059416 - RNA, 19 nt, Artificial Sequence
  Description of Artificial Sequence: Synthetic oligonucleotide
acguucaaggucaagacgu

SEQ ID NO: 1059417 - RNA, 19 nt, Artificial Sequence
  Description of Artificial Sequence: Synthetic oligonucleotide
uuagucucucucagguuca

SEQ ID NO: 1059418 - RNA, 19 nt, Artificial Sequence
  Description of Artificial Sequence: Synthetic oligonucleotide
aagcgcaccuugucgaugu

SEQ ID NO: 1059419 - RNA, 19 nt, Artificial Sequence
  Description of Artificial Sequence: Synthetic oligonucleotide
uggcgaagcggucauucag

SEQ ID NO: 1059420 - RNA, 19 nt, Artificial Sequence
  Description of Artificial Sequence: Synthetic oligonucleotide
gucuugguauucacgaagg

SEQ ID NO: 1059421 - RNA, 19 nt, Artificial Sequence
  Description of Artificial Sequence: Synthetic oligonucleotide
acauccugcgguaagagga

SEQ ID NO: 1059422 - RNA, 19 nt, Artificial Sequence
  Description of Artificial Sequence: Synthetic oligonucleotide
aagcuguuuccuuaagaua

SEQ ID NO: 1059423 - RNA, 19 nt, Artificial Sequence
  Description of Artificial Sequence: Synthetic oligonucleotide
uccgccagcgagaagucca

SEQ ID NO: 1059424 - RNA, 19 nt, Artificial Sequence
  Description of Artificial Sequence: Synthetic oligonucleotide
cagauuagucucucucagg

SEQ ID NO: 1059425 - RNA, 19 nt, Artificial Sequence
  Description of Artificial Sequence: Synthetic oligonucleotide
cacaucaaucuggacaugc

SEQ ID NO: 1059426 - RNA, 19 nt, Artificial Sequence
  Description of Artificial Sequence: Synthetic oligonucleotide
uugucaacauccugucuga

SEQ ID NO: 1059427 - RNA, 19 nt, Artificial Sequence
  Description of Artificial Sequence: Synthetic oligonucleotide
aagagccaucuuaacauug

SEQ ID NO: 1059428 - RNA, 19 nt, Artificial Sequence
  Description of Artificial Sequence: Synthetic oligonucleotide
guaaaccuuuucuaaaucu

SEQ ID NO: 1059429 - RNA, 19 nt, Artificial Sequence
  Description of Artificial Sequence: Synthetic oligonucleotide
cacuucgcagguaagugac

SEQ ID NO: 1059430 - RNA, 19 nt, Artificial Sequence
  Description of Artificial Sequence: Synthetic oligonucleotide
ucuaucccaaaucuaucuu

SEQ ID NO: 1059431 - RNA, 19 nt, Artificial Sequence
  Description of Artificial Sequence: Synthetic oligonucleotide
aggaauagaggcugcgacu

SEQ ID NO: 1059432 - RNA, 19 nt, Artificial Sequence
  Description of Artificial Sequence: Synthetic oligonucleotide
ggucuugguauucacgaag

SEQ ID NO: 1059433 - RNA, 19 nt, Artificial Sequence
  Description of Artificial Sequence: Synthetic oligonucleotide
accgucuuaaucaggagug

SEQ ID NO: 1059434 - RNA, 19 nt, Artificial Sequence
  Description of Artificial Sequence: Synthetic oligonucleotide
ucaagacgugccagagagg

SEQ ID NO: 1059435 - RNA, 19 nt, Artificial Sequence
  Description of Artificial Sequence: Synthetic oligonucleotide
aagcaguaacaaguugguc

SEQ ID NO: 1059436 - RNA, 19 nt, Artificial Sequence
  Description of Artificial Sequence: Synthetic oligonucleotide
caguucuaccuuuucguug

SEQ ID NO: 1059437 - RNA, 19 nt, Artificial Sequence
  Description of Artificial Sequence: Synthetic oligonucleotide
cugcaggcggccaauagug

SEQ ID NO: 1059438 - RNA, 19 nt, Artificial Sequence
  Description of Artificial Sequence: Synthetic oligonucleotide
uaccuuuucguuggugcgg

SEQ ID NO: 1059439 - RNA, 19 nt, Artificial Sequence
  Description of Artificial Sequence: Synthetic oligonucleotide
ucgagcucggcuagcagga

SEQ ID NO: 1059440 - RNA, 19 nt, Artificial Sequence
  Description of Artificial Sequence: Synthetic oligonucleotide
uguaggugcggguggacgu

SEQ ID NO: 1059441 - RNA, 19 nt, Artificial Sequence
  Description of Artificial Sequence: Synthetic oligonucleotide
ucgguguuaauggcguccg

SEQ ID NO: 1059442 - RNA, 19 nt, Artificial Sequence
  Description of Artificial Sequence: Synthetic oligonucleotide
gugacuccagauuagucuc

SEQ ID NO: 1059443 - RNA, 19 nt, Artificial Sequence
  Description of Artificial Sequence: Synthetic oligonucleotide
uccacuucgcagguaagug

SEQ ID NO: 1059444 - RNA, 19 nt, Artificial Sequence
  Description of Artificial Sequence: Synthetic oligonucleotide
gugacgagccaucucuucc

SEQ ID NO: 1059445 - RNA, 19 nt, Artificial Sequence
  Description of Artificial Sequence: Synthetic oligonucleotide
aacucgguguuaauggcgu

SEQ ID NO: 1059446 - RNA, 19 nt, Artificial Sequence
  Description of Artificial Sequence: Synthetic oligonucleotide
gcaaucucuucuugcaagg

SEQ ID NO: 1059447 - RNA, 19 nt, Artificial Sequence
  Description of Artificial Sequence: Synthetic oligonucleotide
acuuggacuuguaccauuc

SEQ ID NO: 1059448 - RNA, 19 nt, Artificial Sequence
  Description of Artificial Sequence: Synthetic oligonucleotide
agagcaucauuguuccggu

SEQ ID NO: 1059449 - RNA, 19 nt, Artificial Sequence
  Description of Artificial Sequence: Synthetic oligonucleotide
accgaauccugcagcagcc

SEQ ID NO: 1059450 - RNA, 19 nt, Artificial Sequence
  Description of Artificial Sequence: Synthetic oligonucleotide
uccaccgaauccugcagca

SEQ ID NO: 1059451 - RNA, 19 nt, Artificial Sequence
  Description of Artificial Sequence: Synthetic oligonucleotide
ucaaccagagggagugacu

SEQ ID NO: 1059452 - RNA, 19 nt, Artificial Sequence
  Description of Artificial Sequence: Synthetic oligonucleotide
cuucguaaacuagauugug

SEQ ID NO: 1059453 - RNA, 19 nt, Artificial Sequence
  Description of Artificial Sequence: Synthetic oligonucleotide
uaaacuagauuguguugua

SEQ ID NO: 1059454 - RNA, 19 nt, Artificial Sequence
  Description of Artificial Sequence: Synthetic oligonucleotide
ugguauucacgaaggugac

SEQ ID NO: 1059455 - RNA, 19 nt, Artificial Sequence
  Description of Artificial Sequence: Synthetic oligonucleotide
uauucacgaaggugacgag

SEQ ID NO: 1059456 - RNA, 19 nt, Artificial Sequence
  Description of Artificial Sequence: Synthetic oligonucleotide
cuccagauuagucucucuc

SEQ ID NO: 1059457 - RNA, 19 nt, Artificial Sequence
  Description of Artificial Sequence: Synthetic oligonucleotide
gacucauuaguuccuuuaa

SEQ ID NO: 1059458 - RNA, 19 nt, Artificial Sequence
  Description of Artificial Sequence: Synthetic oligonucleotide
caccgaauccugcagcagc

SEQ ID NO: 1059459 - RNA, 19 nt, Artificial Sequence
  Description of Artificial Sequence: Synthetic oligonucleotide
uuucuucguaaacuagauu

SEQ ID NO: 1059460 - RNA, 19 nt, Artificial Sequence
  Description of Artificial Sequence: Synthetic oligonucleotide
guaccauuccucugccucc

SEQ ID NO: 1059461 - RNA, 19 nt, Artificial Sequence
  Description of Artificial Sequence: Synthetic oligonucleotide
caugguuucgaaggugggc

SEQ ID NO: 1059462 - RNA, 19 nt, Artificial Sequence
  Description of Artificial Sequence: Synthetic oligonucleotide
aaacuagauuguguuguaa

SEQ ID NO: 1059463 - RNA, 19 nt, Artificial Sequence
  Description of Artificial Sequence: Synthetic oligonucleotide
gguaguuagcagcuucaag

SEQ ID NO: 1059464 - RNA, 19 nt, Artificial Sequence
  Description of Artificial Sequence: Synthetic oligonucleotide
caaggauuccacuuuacgu

SEQ ID NO: 1059465 - RNA, 19 nt, Artificial Sequence
  Description of Artificial Sequence: Synthetic oligonucleotide
ccagggacucauuaguucc

SEQ ID NO: 1059466 - RNA, 19 nt, Artificial Sequence
  Description of Artificial Sequence: Synthetic oligonucleotide
gucacgcuccaccucgacg

SEQ ID NO: 1059467 - RNA, 19 nt, Artificial Sequence
  Description of Artificial Sequence: Synthetic oligonucleotide
ucuugcugguacugcguug

SEQ ID NO: 1059468 - RNA, 19 nt, Artificial Sequence
  Description of Artificial Sequence: Synthetic oligonucleotide
cuuggacuuguaccauucc

SEQ ID NO: 1059469 - RNA, 19 nt, Artificial Sequence
  Description of Artificial Sequence: Synthetic oligonucleotide
ugucaagagccaucuuaac

SEQ ID NO: 1059470 - RNA, 19 nt, Artificial Sequence
  Description of Artificial Sequence: Synthetic oligonucleotide
agguucagugaagaaaagu

SEQ ID NO: 1059471 - RNA, 19 nt, Artificial Sequence
  Description of Artificial Sequence: Synthetic oligonucleotide
ucgcagguaagugacugca

SEQ ID NO: 1059472 - RNA, 19 nt, Artificial Sequence
  Description of Artificial Sequence: Synthetic oligonucleotide
gugacugcaccugucuccg

SEQ ID NO: 1059473 - RNA, 19 nt, Artificial Sequence
  Description of Artificial Sequence: Synthetic oligonucleotide
uucgcagguaagugacugc

SEQ ID NO: 1059474 - RNA, 19 nt, Artificial Sequence
  Description of Artificial Sequence: Synthetic oligonucleotide
agcacaagauuucuucgua

SEQ ID NO: 1059475 - RNA, 19 nt, Artificial Sequence
  Description of Artificial Sequence: Synthetic oligonucleotide
uucuugaacucgguguuaa

SEQ ID NO: 1059476 - RNA, 19 nt, Artificial Sequence
  Description of Artificial Sequence: Synthetic oligonucleotide
uaagugcauccacuucgca

SEQ ID NO: 1059477 - RNA, 19 nt, Artificial Sequence
  Description of Artificial Sequence: Synthetic oligonucleotide
cuccgauuggagcucggcc

SEQ ID NO: 1059478 - RNA, 19 nt, Artificial Sequence
  Description of Artificial Sequence: Synthetic oligonucleotide
auucuagcacaagauuucu

SEQ ID NO: 1059479 - RNA, 19 nt, Artificial Sequence
  Description of Artificial Sequence: Synthetic oligonucleotide
acgcaucuggcguuccagg

SEQ ID NO: 1059480 - RNA, 19 nt, Artificial Sequence
  Description of Artificial Sequence: Synthetic oligonucleotide
aucuaucuugcgcuccuga

SEQ ID NO: 1059481 - RNA, 19 nt, Artificial Sequence
  Description of Artificial Sequence: Synthetic oligonucleotide
ucgauguaguuggcgaagc

SEQ ID NO: 1059482 - RNA, 19 nt, Artificial Sequence
  Description of Artificial Sequence: Synthetic oligonucleotide
gacgcgugccuugucauug

SEQ ID NO: 1059483 - RNA, 19 nt, Artificial Sequence
  Description of Artificial Sequence: Synthetic oligonucleotide
gcuagcaggauuuuguucu

SEQ ID NO: 1059484 - RNA, 19 nt, Artificial Sequence
  Description of Artificial Sequence: Synthetic oligonucleotide
uccugcuuugccuggcgca

SEQ ID NO: 1059485 - RNA, 19 nt, Artificial Sequence
  Description of Artificial Sequence: Synthetic oligonucleotide
gaccaccgaacauccugcg

SEQ ID NO: 1059486 - RNA, 19 nt, Artificial Sequence
  Description of Artificial Sequence: Synthetic oligonucleotide
acggaccugguggacaugg

SEQ ID NO: 1059487 - RNA, 19 nt, Artificial Sequence
  Description of Artificial Sequence: Synthetic oligonucleotide
uccugcgguaagaggacga

SEQ ID NO: 1059488 - RNA, 19 nt, Artificial Sequence
  Description of Artificial Sequence: Synthetic oligonucleotide
uugcaaggauuccacuuua

SEQ ID NO: 1059489 - RNA, 19 nt, Artificial Sequence
  Description of Artificial Sequence: Synthetic oligonucleotide
auagcuccgauuggagcuc

SEQ ID NO: 1059490 - RNA, 19 nt, Artificial Sequence
  Description of Artificial Sequence: Synthetic oligonucleotide
aaagcgcaccuugucgaug

SEQ ID NO: 1059491 - RNA, 19 nt, Artificial Sequence
  Description of Artificial Sequence: Synthetic oligonucleotide
caaccagagggagugacuc

SEQ ID NO: 1059492 - RNA, 19 nt, Artificial Sequence
  Description of Artificial Sequence: Synthetic oligonucleotide
aggcgcaccgcagaggauc

SEQ ID NO: 1059493 - RNA, 19 nt, Artificial Sequence
  Description of Artificial Sequence: Synthetic oligonucleotide
accgcagaggaucggguca

SEQ ID NO: 1059494 - RNA, 19 nt, Artificial Sequence
  Description of Artificial Sequence: Synthetic oligonucleotide
agcucggccggcucgaggu

SEQ ID NO: 1059495 - RNA, 19 nt, Artificial Sequence
  Description of Artificial Sequence: Synthetic oligonucleotide
uccaccucgacgcgugccu

SEQ ID NO: 1059496 - RNA, 19 nt, Artificial Sequence
  Description of Artificial Sequence: Synthetic oligonucleotide
uccuguagguggcaaucuc

SEQ ID NO: 1059497 - RNA, 19 nt, Artificial Sequence
  Description of Artificial Sequence: Synthetic oligonucleotide
ucuuggcagccacacuuuc

SEQ ID NO: 1059498 - RNA, 19 nt, Artificial Sequence
  Description of Artificial Sequence: Synthetic oligonucleotide
agacgugccagagaggcau

SEQ ID NO: 1059499 - RNA, 19 nt, Artificial Sequence
  Description of Artificial Sequence: Synthetic oligonucleotide
gguguuaauggcguccgcc

SEQ ID NO: 1059500 - RNA, 19 nt, Artificial Sequence
  Description of Artificial Sequence: Synthetic oligonucleotide
caaggucaagacgugccag

SEQ ID NO: 1059501 - RNA, 19 nt, Artificial Sequence
  Description of Artificial Sequence: Synthetic oligonucleotide
aaacuagagcuuauuucua

SEQ ID NO: 1059502 - RNA, 19 nt, Artificial Sequence
  Description of Artificial Sequence: Synthetic oligonucleotide
augucaagagccaucuuaa

SEQ ID NO: 1059503 - RNA, 19 nt, Artificial Sequence
  Description of Artificial Sequence: Synthetic oligonucleotide
cauccugcgguaagaggac

SEQ ID NO: 1059504 - RNA, 19 nt, Artificial Sequence
  Description of Artificial Sequence: Synthetic oligonucleotide
gggaccaccgaacauccug

SEQ ID NO: 1059505 - RNA, 19 nt, Artificial Sequence
  Description of Artificial Sequence: Synthetic oligonucleotide
aaacuuggacuuguaccau

SEQ ID NO: 1059506 - RNA, 19 nt, Artificial Sequence
  Description of Artificial Sequence: Synthetic oligonucleotide
guauucuagcacaagauuu

SEQ ID NO: 1059507 - RNA, 19 nt, Artificial Sequence
  Description of Artificial Sequence: Synthetic oligonucleotide
ucugccagauugucacgcu

SEQ ID NO: 1059508 - RNA, 19 nt, Artificial Sequence
  Description of Artificial Sequence: Synthetic oligonucleotide
ccagauuagucucucucag

SEQ ID NO: 1059509 - RNA, 19 nt, Artificial Sequence
  Description of Artificial Sequence: Synthetic oligonucleotide
agagaggcauugucaacau

SEQ ID NO: 1059510 - RNA, 19 nt, Artificial Sequence
  Description of Artificial Sequence: Synthetic oligonucleotide
gauugucacgcuccaccuc

SEQ ID NO: 1059511 - RNA, 19 nt, Artificial Sequence
  Description of Artificial Sequence: Synthetic oligonucleotide
agccgcaugauguccucug

SEQ ID NO: 1059512 - RNA, 19 nt, Artificial Sequence
  Description of Artificial Sequence: Synthetic oligonucleotide
ugguacugcguuguugcac

SEQ ID NO: 1059513 - RNA, 19 nt, Artificial Sequence
  Description of Artificial Sequence: Synthetic oligonucleotide
aggucaagacgugccagag

SEQ ID NO: 1059514 - RNA, 19 nt, Artificial Sequence
  Description of Artificial Sequence: Synthetic oligonucleotide
gaagcaguaacaaguuggu

SEQ ID NO: 1059515 - RNA, 19 nt, Artificial Sequence
  Description of Artificial Sequence: Synthetic oligonucleotide
cugcuggcggacaucgcgc

SEQ ID NO: 1059516 - RNA, 19 nt, Artificial Sequence
  Description of Artificial Sequence: Synthetic oligonucleotide
guuggcagccucagagagg

SEQ ID NO: 1059517 - RNA, 19 nt, Artificial Sequence
  Description of Artificial Sequence: Synthetic oligonucleotide
cuuuuagggugucaguugu

SEQ ID NO: 1059518 - RNA, 19 nt, Artificial Sequence
  Description of Artificial Sequence: Synthetic oligonucleotide
uguuccgguuggcagccuc

SEQ ID NO: 1059519 - RNA, 19 nt, Artificial Sequence
  Description of Artificial Sequence: Synthetic oligonucleotide
aucuuaacauugagcaggu

SEQ ID NO: 1059520 - RNA, 19 nt, Artificial Sequence
  Description of Artificial Sequence: Synthetic oligonucleotide
gugaggucaggcuuagaaa

SEQ ID NO: 1059521 - RNA, 19 nt, Artificial Sequence
  Description of Artificial Sequence: Synthetic oligonucleotide
gauuguguuguaaaccuuu

SEQ ID NO: 1059522 - RNA, 19 nt, Artificial Sequence
  Description of Artificial Sequence: Synthetic oligonucleotide
guuucgaaggugggcuggg

SEQ ID NO: 1059523 - RNA, 19 nt, Artificial Sequence
  Description of Artificial Sequence: Synthetic oligonucleotide
cauugaucaccuguccauc

SEQ ID NO: 1059524 - RNA, 19 nt, Artificial Sequence
  Description of Artificial Sequence: Synthetic oligonucleotide
acaugguuucgaagguggg

SEQ ID NO: 1059525 - RNA, 19 nt, Artificial Sequence
  Description of Artificial Sequence: Synthetic oligonucleotide
guuggcgaagcggucauuc

SEQ ID NO: 1059526 - RNA, 19 nt, Artificial Sequence
  Description of Artificial Sequence: Synthetic oligonucleotide
gucagguauuuacuggaaa

SEQ ID NO: 1059527 - RNA, 19 nt, Artificial Sequence
  Description of Artificial Sequence: Synthetic oligonucleotide
cagugaagaaaaguuggga

SEQ ID NO: 1059528 - RNA, 19 nt, Artificial Sequence
  Description of Artificial Sequence: Synthetic oligonucleotide
ccacuuuacguucaagguc

SEQ ID NO: 1059529 - RNA, 19 nt, Artificial Sequence
  Description of Artificial Sequence: Synthetic oligonucleotide
acgaaggugacgagccauc

SEQ ID NO: 1059530 - RNA, 19 nt, Artificial Sequence
  Description of Artificial Sequence: Synthetic oligonucleotide
gguauucacgaaggugacg

SEQ ID NO: 1059531 - RNA, 19 nt, Artificial Sequence
  Description of Artificial Sequence: Synthetic oligonucleotide
ccaucuuaacauugagcag

SEQ ID NO: 1059532 - RNA, 19 nt, Artificial Sequence
  Description of Artificial Sequence: Synthetic oligonucleotide
uaguuggcgaagcggucau

SEQ ID NO: 1059533 - RNA, 19 nt, Artificial Sequence
  Description of Artificial Sequence: Synthetic oligonucleotide
ugcaggcggccaauagugu

SEQ ID NO: 1059534 - RNA, 19 nt, Artificial Sequence
  Description of Artificial Sequence: Synthetic oligonucleotide
cuaaaucuuuuaggguguc

SEQ ID NO: 1059535 - RNA, 19 nt, Artificial Sequence
  Description of Artificial Sequence: Synthetic oligonucleotide
gucaaccagagggagugac

SEQ ID NO: 1059536 - RNA, 19 nt, Artificial Sequence
  Description of Artificial Sequence: Synthetic oligonucleotide
agcugcucgagcucggcua

SEQ ID NO: 1059537 - RNA, 19 nt, Artificial Sequence
  Description of Artificial Sequence: Synthetic oligonucleotide
ucacgcaucuggcguucca

SEQ ID NO: 1059538 - RNA, 19 nt, Artificial Sequence
  Description of Artificial Sequence: Synthetic oligonucleotide
accuguccaucucugguuu

SEQ ID NO: 1059539 - RNA, 19 nt, Artificial Sequence
  Description of Artificial Sequence: Synthetic oligonucleotide
uaggugcggguggacgugg

SEQ ID NO: 1059540 - RNA, 19 nt, Artificial Sequence
  Description of Artificial Sequence: Synthetic oligonucleotide
uucauacugcuggcggaca

SEQ ID NO: 1059541 - RNA, 19 nt, Artificial Sequence
  Description of Artificial Sequence: Synthetic oligonucleotide
cauugagcaggucuuggua

SEQ ID NO: 1059542 - RNA, 19 nt, Artificial Sequence
  Description of Artificial Sequence: Synthetic oligonucleotide
uggcgcagagcaucauugu

SEQ ID NO: 1059543 - RNA, 19 nt, Artificial Sequence
  Description of Artificial Sequence: Synthetic oligonucleotide
gcggacaucgcgcagggca

SEQ ID NO: 1059544 - RNA, 19 nt, Artificial Sequence
  Description of Artificial Sequence: Synthetic oligonucleotide
acgcgugccuugucauugg

SEQ ID NO: 1059545 - RNA, 19 nt, Artificial Sequence
  Description of Artificial Sequence: Synthetic oligonucleotide
acuccagauuagucucucu

SEQ ID NO: 1059546 - RNA, 19 nt, Artificial Sequence
  Description of Artificial Sequence: Synthetic oligonucleotide
ugcggguggacguggucac

SEQ ID NO: 1059547 - RNA, 19 nt, Artificial Sequence
  Description of Artificial Sequence: Synthetic oligonucleotide
caucgugaugcugagaggu

SEQ ID NO: 1059548 - RNA, 19 nt, Artificial Sequence
  Description of Artificial Sequence: Synthetic oligonucleotide
cgcagagcaucauuguucc

SEQ ID NO: 1059549 - RNA, 19 nt, Artificial Sequence
  Description of Artificial Sequence: Synthetic oligonucleotide
guacugcguuguugcacgg

SEQ ID NO: 1059550 - RNA, 19 nt, Artificial Sequence
  Description of Artificial Sequence: Synthetic oligonucleotide
ucgugaugcugagagguuu

SEQ ID NO: 1059551 - RNA, 19 nt, Artificial Sequence
  Description of Artificial Sequence: Synthetic oligonucleotide
ugagcaggucuugguauuc

SEQ ID NO: 1059552 - RNA, 19 nt, Artificial Sequence
  Description of Artificial Sequence: Synthetic oligonucleotide
cugcgguaagaggacgagg

SEQ ID NO: 1059553 - RNA, 19 nt, Artificial Sequence
  Description of Artificial Sequence: Synthetic oligonucleotide
ugguaguuagcagcuucaa

SEQ ID NO: 1059554 - RNA, 19 nt, Artificial Sequence
  Description of Artificial Sequence: Synthetic oligonucleotide
gcggccaauaguguccugg

SEQ ID NO: 1059555 - RNA, 19 nt, Artificial Sequence
  Description of Artificial Sequence: Synthetic oligonucleotide
uuucgaaggugggcugggc

SEQ ID NO: 1059556 - RNA, 19 nt, Artificial Sequence
  Description of Artificial Sequence: Synthetic oligonucleotide
ugcggguguucuugaacuc

SEQ ID NO: 1059557 - RNA, 19 nt, Artificial Sequence
  Description of Artificial Sequence: Synthetic oligonucleotide
cucgcagccgcaugauguc

SEQ ID NO: 1059558 - RNA, 19 nt, Artificial Sequence
  Description of Artificial Sequence: Synthetic oligonucleotide
guaacaaguuggucaggua

SEQ ID NO: 1059559 - RNA, 19 nt, Artificial Sequence
  Description of Artificial Sequence: Synthetic oligonucleotide
ugucuccgguacucauuug

SEQ ID NO: 1059560 - RNA, 19 nt, Artificial Sequence
  Description of Artificial Sequence: Synthetic oligonucleotide
ucgacgcgugccuugucau

SEQ ID NO: 1059561 - RNA, 19 nt, Artificial Sequence
  Description of Artificial Sequence: Synthetic oligonucleotide
cacgcaucuggcguuccag

SEQ ID NO: 1059562 - RNA, 19 nt, Artificial Sequence
  Description of Artificial Sequence: Synthetic oligonucleotide
ugcacggagugugugcaau

SEQ ID NO: 1059563 - RNA, 19 nt, Artificial Sequence
  Description of Artificial Sequence: Synthetic oligonucleotide
uaccauuccucugccuccu

SEQ ID NO: 1059564 - RNA, 19 nt, Artificial Sequence
  Description of Artificial Sequence: Synthetic oligonucleotide
gacuccagauuagucucuc

SEQ ID NO: 1059565 - RNA, 19 nt, Artificial Sequence
  Description of Artificial Sequence: Synthetic oligonucleotide
cugccagauugucacgcuc

SEQ ID NO: 1059566 - RNA, 19 nt, Artificial Sequence
  Description of Artificial Sequence: Synthetic oligonucleotide
caucauuguuccgguuggc

SEQ ID NO: 1059567 - RNA, 19 nt, Artificial Sequence
  Description of Artificial Sequence: Synthetic oligonucleotide
ggacucauuaguuccuuua

SEQ ID NO: 1059568 - RNA, 19 nt, Artificial Sequence
  Description of Artificial Sequence: Synthetic oligonucleotide
aucucacgcaucuggcguu

SEQ ID NO: 1059569 - RNA, 19 nt, Artificial Sequence
  Description of Artificial Sequence: Synthetic oligonucleotide
ggugcggguguucuugaac

SEQ ID NO: 1059570 - RNA, 19 nt, Artificial Sequence
  Description of Artificial Sequence: Synthetic oligonucleotide
caaggucaucgugaugcug

SEQ ID NO: 1059571 - RNA, 19 nt, Artificial Sequence
  Description of Artificial Sequence: Synthetic oligonucleotide
ggcgaagcggucauucagc

SEQ ID NO: 1059572 - RNA, 19 nt, Artificial Sequence
  Description of Artificial Sequence: Synthetic oligonucleotide
uacugcguuguugcacgga

SEQ ID NO: 1059573 - RNA, 19 nt, Artificial Sequence
  Description of Artificial Sequence: Synthetic oligonucleotide
caccgcagaggaucggguc

SEQ ID NO: 1059574 - RNA, 19 nt, Artificial Sequence
  Description of Artificial Sequence: Synthetic oligonucleotide
acggagugugugcaauuuu

SEQ ID NO: 1059575 - RNA, 19 nt, Artificial Sequence
  Description of Artificial Sequence: Synthetic oligonucleotide
ugcucucggcuuccucucu

SEQ ID NO: 1059576 - RNA, 19 nt, Artificial Sequence
  Description of Artificial Sequence: Synthetic oligonucleotide
cucgacgcgugccuuguca

SEQ ID NO: 1059577 - RNA, 19 nt, Artificial Sequence
  Description of Artificial Sequence: Synthetic oligonucleotide
cuugcaaggauuccacuuu

SEQ ID NO: 1059578 - RNA, 19 nt, Artificial Sequence
  Description of Artificial Sequence: Synthetic oligonucleotide
caucucacgcaucuggcgu

SEQ ID NO: 1059579 - RNA, 19 nt, Artificial Sequence
  Description of Artificial Sequence: Synthetic oligonucleotide
ggaccaccgaacauccugc

SEQ ID NO: 1059580 - RNA, 19 nt, Artificial Sequence
  Description of Artificial Sequence: Synthetic oligonucleotide
cugcaccugucuccgguac

SEQ ID NO: 1059581 - RNA, 19 nt, Artificial Sequence
  Description of Artificial Sequence: Synthetic oligonucleotide
aagacgugccagagaggca

SEQ ID NO: 1059582 - RNA, 19 nt, Artificial Sequence
  Description of Artificial Sequence: Synthetic oligonucleotide
ggacuuguaccauuccucu

SEQ ID NO: 1059583 - RNA, 19 nt, Artificial Sequence
  Description of Artificial Sequence: Synthetic oligonucleotide
gagggagugacuccagauu

SEQ ID NO: 1059584 - RNA, 19 nt, Artificial Sequence
  Description of Artificial Sequence: Synthetic oligonucleotide
ugucaacauccugucugaa

SEQ ID NO: 1059585 - RNA, 19 nt, Artificial Sequence
  Description of Artificial Sequence: Synthetic oligonucleotide
cccaaaucuaucuugcgcu

SEQ ID NO: 1059586 - RNA, 19 nt, Artificial Sequence
  Description of Artificial Sequence: Synthetic oligonucleotide
caccgucuuaaucaggagu

SEQ ID NO: 1059587 - RNA, 19 nt, Artificial Sequence
  Description of Artificial Sequence: Synthetic oligonucleotide
ggcuuagaaacauccacau

SEQ ID NO: 1059588 - RNA, 19 nt, Artificial Sequence
  Description of Artificial Sequence: Synthetic oligonucleotide
cucggcuagcaggauuuug

SEQ ID NO: 1059589 - RNA, 19 nt, Artificial Sequence
  Description of Artificial Sequence: Synthetic oligonucleotide
cgugccuugucauugguga

SEQ ID NO: 1059590 - RNA, 19 nt, Artificial Sequence
  Description of Artificial Sequence: Synthetic oligonucleotide
gcugcucgagcucggcuag

SEQ ID NO: 1059591 - RNA, 19 nt, Artificial Sequence
  Description of Artificial Sequence: Synthetic oligonucleotide
agcucggcuagcaggauuu

SEQ ID NO: 1059592 - RNA, 19 nt, Artificial Sequence
  Description of Artificial Sequence: Synthetic oligonucleotide
ggacaugguuucgaaggug

SEQ ID NO: 1059593 - RNA, 19 nt, Artificial Sequence
  Description of Artificial Sequence: Synthetic oligonucleotide
ucgaggugccgggaccacc

SEQ ID NO: 1059594 - RNA, 19 nt, Artificial Sequence
  Description of Artificial Sequence: Synthetic oligonucleotide
ucuuaacauugagcagguc

SEQ ID NO: 1059595 - RNA, 19 nt, Artificial Sequence
  Description of Artificial Sequence: Synthetic oligonucleotide
ccgauuggagcucggccgg

SEQ ID NO: 1059596 - RNA, 19 nt, Artificial Sequence
  Description of Artificial Sequence: Synthetic oligonucleotide
cugauccaccugccggcgc

SEQ ID NO: 1059597 - RNA, 19 nt, Artificial Sequence
  Description of Artificial Sequence: Synthetic oligonucleotide
gugucaguuguuagaaacu

SEQ ID NO: 1059598 - RNA, 19 nt, Artificial Sequence
  Description of Artificial Sequence: Synthetic oligonucleotide
gcacaagauuucuucguaa

SEQ ID NO: 1059599 - RNA, 19 nt, Artificial Sequence
  Description of Artificial Sequence: Synthetic oligonucleotide
ugucaaccagagggaguga

SEQ ID NO: 1059600 - RNA, 19 nt, Artificial Sequence
  Description of Artificial Sequence: Synthetic oligonucleotide
gggagugacuccagauuag

SEQ ID NO: 1059601 - RNA, 19 nt, Artificial Sequence
  Description of Artificial Sequence: Synthetic oligonucleotide
ucucacgcaucuggcguuc

SEQ ID NO: 1059602 - RNA, 19 nt, Artificial Sequence
  Description of Artificial Sequence: Synthetic oligonucleotide
cuugcugguacugcguugu

SEQ ID NO: 1059603 - RNA, 19 nt, Artificial Sequence
  Description of Artificial Sequence: Synthetic oligonucleotide
ccuguagguggcaaucuca

SEQ ID NO: 1059604 - RNA, 19 nt, Artificial Sequence
  Description of Artificial Sequence: Synthetic oligonucleotide
acguggucacauagcuccg

SEQ ID NO: 1059605 - RNA, 19 nt, Artificial Sequence
  Description of Artificial Sequence: Synthetic oligonucleotide
gaaagcgcaccuugucgau

SEQ ID NO: 1059606 - RNA, 19 nt, Artificial Sequence
  Description of Artificial Sequence: Synthetic oligonucleotide
agcgagaaguccaccgaau

SEQ ID NO: 1059607 - RNA, 19 nt, Artificial Sequence
  Description of Artificial Sequence: Synthetic oligonucleotide
ccgggaccaccgaacaucc

SEQ ID NO: 1059608 - RNA, 19 nt, Artificial Sequence
  Description of Artificial Sequence: Synthetic oligonucleotide
uugcacggagugugugcaa

SEQ ID NO: 1059609 - RNA, 19 nt, Artificial Sequence
  Description of Artificial Sequence: Synthetic oligonucleotide
gcagagcaucauuguuccg

SEQ ID NO: 1059610 - RNA, 19 nt, Artificial Sequence
  Description of Artificial Sequence: Synthetic oligonucleotide
cggguguucuugaacucgg

SEQ ID NO: 1059611 - RNA, 19 nt, Artificial Sequence
  Description of Artificial Sequence: Synthetic oligonucleotide
acgugccagagaggcauug

SEQ ID NO: 1059612 - RNA, 19 nt, Artificial Sequence
  Description of Artificial Sequence: Synthetic oligonucleotide
ugccgggaccaccgaacau

SEQ ID NO: 1059613 - RNA, 19 nt, Artificial Sequence
  Description of Artificial Sequence: Synthetic oligonucleotide
cuccgcaggcgcaccgcag

SEQ ID NO: 1059614 - RNA, 19 nt, Artificial Sequence
  Description of Artificial Sequence: Synthetic oligonucleotide
uggagcucggccggcucga

SEQ ID NO: 1059615 - RNA, 19 nt, Artificial Sequence
  Description of Artificial Sequence: Synthetic oligonucleotide
uuucguuggugcggguguu

SEQ ID NO: 1059616 - RNA, 19 nt, Artificial Sequence
  Description of Artificial Sequence: Synthetic oligonucleotide
uaauggcguccgccagcga

SEQ ID NO: 1059617 - RNA, 19 nt, Artificial Sequence
  Description of Artificial Sequence: Synthetic oligonucleotide
uggugcggguguucuugaa

SEQ ID NO: 1059618 - RNA, 19 nt, Artificial Sequence
  Description of Artificial Sequence: Synthetic oligonucleotide
gacaucgcgcagggcagca

SEQ ID NO: 1059619 - RNA, 19 nt, Artificial Sequence
  Description of Artificial Sequence: Synthetic oligonucleotide
gugccgggaccaccgaaca

SEQ ID NO: 1059620 - RNA, 19 nt, Artificial Sequence
  Description of Artificial Sequence: Synthetic oligonucleotide
cagcgagaaguccaccgaa

SEQ ID NO: 1059621 - RNA, 19 nt, Artificial Sequence
  Description of Artificial Sequence: Synthetic oligonucleotide
ucgcgcagggcagcaguga

SEQ ID NO: 1059622 - RNA, 19 nt, Artificial Sequence
  Description of Artificial Sequence: Synthetic oligonucleotide
ggucaagacgugccagaga

SEQ ID NO: 1059623 - RNA, 19 nt, Artificial Sequence
  Description of Artificial Sequence: Synthetic oligonucleotide
gcugauccaccugccggcg

SEQ ID NO: 1059624 - RNA, 19 nt, Artificial Sequence
  Description of Artificial Sequence: Synthetic oligonucleotide
acuucgcagguaagugacu

SEQ ID NO: 1059625 - RNA, 19 nt, Artificial Sequence
  Description of Artificial Sequence: Synthetic oligonucleotide
ggcgcaccgcagaggaucg

SEQ ID NO: 1059626 - RNA, 19 nt, Artificial Sequence
  Description of Artificial Sequence: Synthetic oligonucleotide
aucgcgcagggcagcagug

SEQ ID NO: 1059627 - RNA, 19 nt, Artificial Sequence
  Description of Artificial Sequence: Synthetic oligonucleotide
aggcggccaauaguguccu

SEQ ID NO: 1059628 - RNA, 19 nt, Artificial Sequence
  Description of Artificial Sequence: Synthetic oligonucleotide
gcgguaagaggacgaggac

SEQ ID NO: 1059629 - RNA, 19 nt, Artificial Sequence
  Description of Artificial Sequence: Synthetic oligonucleotide
ccacuucgcagguaaguga

SEQ ID NO: 1059630 - RNA, 19 nt, Artificial Sequence
  Description of Artificial Sequence: Synthetic oligonucleotide
ggcgcgacuugcccuggcc

SEQ ID NO: 1059631 - RNA, 19 nt, Artificial Sequence
  Description of Artificial Sequence: Synthetic oligonucleotide
gcgcgacuugcccuggccc

SEQ ID NO: 1059632 - RNA, 19 nt, Artificial Sequence
  Description of Artificial Sequence: Synthetic oligonucleotide
ggagcaucuccuccugcaa

SEQ ID NO: 1059633 - RNA, 19 nt, Artificial Sequence
  Description of Artificial Sequence: Synthetic oligonucleotide
accucgacgcgugccuugu

SEQ ID NO: 1059634 - RNA, 19 nt, Artificial Sequence
  Description of Artificial Sequence: Synthetic oligonucleotide
cucacgcaucuggcguucc

SEQ ID NO: 1059635 - RNA, 19 nt, Artificial Sequence
  Description of Artificial Sequence: Synthetic oligonucleotide
cugucuccgguacucauuu

SEQ ID NO: 1059636 - RNA, 19 nt, Artificial Sequence
  Description of Artificial Sequence: Synthetic oligonucleotide
aucgugaugcugagagguu

SEQ ID NO: 1059637 - RNA, 19 nt, Artificial Sequence
  Description of Artificial Sequence: Synthetic oligonucleotide
cagggacucauuaguuccu

SEQ ID NO: 1059638 - RNA, 19 nt, Artificial Sequence
  Description of Artificial Sequence: Synthetic oligonucleotide
gccggcucgaggugccggg

SEQ ID NO: 1059639 - RNA, 19 nt, Artificial Sequence
  Description of Artificial Sequence: Synthetic oligonucleotide
cuuaaucaggaguguucuu

SEQ ID NO: 1059640 - RNA, 19 nt, Artificial Sequence
  Description of Artificial Sequence: Synthetic oligonucleotide
aggucgcccaggcgcgacu

SEQ ID NO: 1059641 - RNA, 19 nt, Artificial Sequence
  Description of Artificial Sequence: Synthetic oligonucleotide
ccugcgguaagaggacgag

SEQ ID NO: 1059642 - RNA, 19 nt, Artificial Sequence
  Description of Artificial Sequence: Synthetic oligonucleotide
ccugguggacaugguuucg

SEQ ID NO: 1059643 - RNA, 19 nt, Artificial Sequence
  Description of Artificial Sequence: Synthetic oligonucleotide
gggaugaggaauagaggcu

SEQ ID NO: 1059644 - RNA, 19 nt, Artificial Sequence
  Description of Artificial Sequence: Synthetic oligonucleotide
ccaauaguguccugguagu

SEQ ID NO: 1059645 - RNA, 19 nt, Artificial Sequence
  Description of Artificial Sequence: Synthetic oligonucleotide
caccgaacauccugcggua

SEQ ID NO: 1059646 - RNA, 19 nt, Artificial Sequence
  Description of Artificial Sequence: Synthetic oligonucleotide
ccagagggagugacuccag

SEQ ID NO: 1059647 - RNA, 19 nt, Artificial Sequence
  Description of Artificial Sequence: Synthetic oligonucleotide
guccgccagcgagaagucc

SEQ ID NO: 1059648 - RNA, 19 nt, Artificial Sequence
  Description of Artificial Sequence: Synthetic oligonucleotide
uggcguccgccagcgagaa

SEQ ID NO: 1059649 - RNA, 19 nt, Artificial Sequence
  Description of Artificial Sequence: Synthetic oligonucleotide
acuuuacguucaaggucaa

SEQ ID NO: 1059650 - RNA, 19 nt, Artificial Sequence
  Description of Artificial Sequence: Synthetic oligonucleotide
gcgcaccuugucgauguag

SEQ ID NO: 1059651 - RNA, 19 nt, Artificial Sequence
  Description of Artificial Sequence: Synthetic oligonucleotide
gauuggagcucggccggcu

SEQ ID NO: 1059652 - RNA, 19 nt, Artificial Sequence
  Description of Artificial Sequence: Synthetic oligonucleotide
uccugguaguuagcagcuu

SEQ ID NO: 1059653 - RNA, 19 nt, Artificial Sequence
  Description of Artificial Sequence: Synthetic oligonucleotide
gcguccgccagcgagaagu

SEQ ID NO: 1059654 - RNA, 19 nt, Artificial Sequence
  Description of Artificial Sequence: Synthetic oligonucleotide
agcuccgauuggagcucgg

SEQ ID NO: 1059655 - RNA, 19 nt, Artificial Sequence
  Description of Artificial Sequence: Synthetic oligonucleotide
gcuccgauuggagcucggc

SEQ ID NO: 1059656 - RNA, 19 nt, Artificial Sequence
  Description of Artificial Sequence: Synthetic oligonucleotide
cggacaucgcgcagggcag

SEQ ID NO: 1059657 - RNA, 19 nt, Artificial Sequence
  Description of Artificial Sequence: Synthetic oligonucleotide
caucgcgcagggcagcagu

SEQ ID NO: 1059658 - RNA, 19 nt, Artificial Sequence
  Description of Artificial Sequence: Synthetic oligonucleotide
gucgcccaggcgcgacuug

SEQ ID NO: 1059659 - RNA, 19 nt, Artificial Sequence
  Description of Artificial Sequence: Synthetic oligonucleotide
ccagcgagaaguccaccga

SEQ ID NO: 1059660 - RNA, 19 nt, Artificial Sequence
  Description of Artificial Sequence: Synthetic oligonucleotide
caaguuggucagguauuua

SEQ ID NO: 1059661 - RNA, 19 nt, Artificial Sequence
  Description of Artificial Sequence: Synthetic oligonucleotide
ggagugacuccagauuagu

SEQ ID NO: 1059662 - RNA, 19 nt, Artificial Sequence
  Description of Artificial Sequence: Synthetic oligonucleotide
ggacguggucacauagcuc

SEQ ID NO: 1059663 - RNA, 19 nt, Artificial Sequence
  Description of Artificial Sequence: Synthetic oligonucleotide
ccggcaugcugcuccgcag

SEQ ID NO: 1059664 - RNA, 19 nt, Artificial Sequence
  Description of Artificial Sequence: Synthetic oligonucleotide
gagcucggcuagcaggauu

SEQ ID NO: 1059665 - RNA, 19 nt, Artificial Sequence
  Description of Artificial Sequence: Synthetic oligonucleotide
gggucacauaggcgccacc

SEQ ID NO: 1059666 - RNA, 19 nt, Artificial Sequence
  Description of Artificial Sequence: Synthetic oligonucleotide
gcgaagcggucauucagcu

SEQ ID NO: 1059667 - RNA, 19 nt, Artificial Sequence
  Description of Artificial Sequence: Synthetic oligonucleotide
cgguaagaggacgaggaca

SEQ ID NO: 1059668 - RNA, 19 nt, Artificial Sequence
  Description of Artificial Sequence: Synthetic oligonucleotide
gcgugccuugucauuggug

SEQ ID NO: 1059669 - RNA, 19 nt, Artificial Sequence
  Description of Artificial Sequence: Synthetic oligonucleotide
cucgaggugccgggaccac

SEQ ID NO: 1059670 - RNA, 19 nt, Artificial Sequence
  Description of Artificial Sequence: Synthetic oligonucleotide
aggugacgagccaucucuu

SEQ ID NO: 1059671 - RNA, 19 nt, Artificial Sequence
  Description of Artificial Sequence: Synthetic oligonucleotide
cugcucgagcucggcuagc

SEQ ID NO: 1059672 - RNA, 19 nt, Artificial Sequence
  Description of Artificial Sequence: Synthetic oligonucleotide
agcgcgcugcccaggcugu

SEQ ID NO: 1059673 - RNA, 19 nt, Artificial Sequence
  Description of Artificial Sequence: Synthetic oligonucleotide
cgcagguaagugacugcac

SEQ ID NO: 1059674 - RNA, 19 nt, Artificial Sequence
  Description of Artificial Sequence: Synthetic oligonucleotide
cugcguuguugcacggagu

SEQ ID NO: 1059675 - RNA, 19 nt, Artificial Sequence
  Description of Artificial Sequence: Synthetic oligonucleotide
ggccaauaguguccuggua

SEQ ID NO: 1059676 - RNA, 19 nt, Artificial Sequence
  Description of Artificial Sequence: Synthetic oligonucleotide
cgcaccgcagaggaucggg

SEQ ID NO: 1059677 - RNA, 19 nt, Artificial Sequence
  Description of Artificial Sequence: Synthetic oligonucleotide
ccaccgaauccugcagcag

SEQ ID NO: 1059678 - RNA, 19 nt, Artificial Sequence
  Description of Artificial Sequence: Synthetic oligonucleotide
agcgcaccuugucgaugua

SEQ ID NO: 1059679 - RNA, 19 nt, Artificial Sequence
  Description of Artificial Sequence: Synthetic oligonucleotide
aguuggcgaagcggucauu

SEQ ID NO: 1059680 - RNA, 19 nt, Artificial Sequence
  Description of Artificial Sequence: Synthetic oligonucleotide
gagcaucauuguuccgguu

SEQ ID NO: 1059681 - RNA, 19 nt, Artificial Sequence
  Description of Artificial Sequence: Synthetic oligonucleotide
ggcgcagagcaucauuguu

SEQ ID NO: 1059682 - RNA, 19 nt, Artificial Sequence
  Description of Artificial Sequence: Synthetic oligonucleotide
ccgccagcgagaaguccac

SEQ ID NO: 1059683 - RNA, 19 nt, Artificial Sequence
  Description of Artificial Sequence: Synthetic oligonucleotide
ggccggcucgaggugccgg

SEQ ID NO: 1059684 - RNA, 19 nt, Artificial Sequence
  Description of Artificial Sequence: Synthetic oligonucleotide
gcucgaggugccgggacca

SEQ ID NO: 1059685 - RNA, 19 nt, Artificial Sequence
  Description of Artificial Sequence: Synthetic oligonucleotide
caccugucuccgguacuca

SEQ ID NO: 1059686 - RNA, 19 nt, Artificial Sequence
  Description of Artificial Sequence: Synthetic oligonucleotide
ggucaucgugaugcugaga

SEQ ID NO: 1059687 - RNA, 19 nt, Artificial Sequence
  Description of Artificial Sequence: Synthetic oligonucleotide
cugcuuugccuggcgcaga

SEQ ID NO: 1059688 - RNA, 19 nt, Artificial Sequence
  Description of Artificial Sequence: Synthetic oligonucleotide
caauaguguccugguaguu

SEQ ID NO: 1059689 - RNA, 19 nt, Artificial Sequence
  Description of Artificial Sequence: Synthetic oligonucleotide
cgaagcggucauucagcuc

SEQ ID NO: 1059690 - RNA, 19 nt, Artificial Sequence
  Description of Artificial Sequence: Synthetic oligonucleotide
cacggaccugguggacaug

SEQ ID NO: 1059691 - RNA, 19 nt, Artificial Sequence
  Description of Artificial Sequence: Synthetic oligonucleotide
cacggagugugugcaauuu

SEQ ID NO: 1059692 - RNA, 19 nt, Artificial Sequence
  Description of Artificial Sequence: Synthetic oligonucleotide
cccggcaugcugcuccgca

SEQ ID NO: 1059693 - RNA, 19 nt, Artificial Sequence
  Description of Artificial Sequence: Synthetic oligonucleotide
cgguguuaauggcguccgc

SEQ ID NO: 1059694 - RNA, 19 nt, Artificial Sequence
  Description of Artificial Sequence: Synthetic oligonucleotide
ggguggacguggucacaua

SEQ ID NO: 1059695 - RNA, 19 nt, Artificial Sequence
  Description of Artificial Sequence: Synthetic oligonucleotide
ggcguccgccagcgagaag

SEQ ID NO: 1059696 - RNA, 19 nt, Artificial Sequence
  Description of Artificial Sequence: Synthetic oligonucleotide
cacgcccggcaugcugcuc

SEQ ID NO: 1059697 - RNA, 19 nt, Artificial Sequence
  Description of Artificial Sequence: Synthetic oligonucleotide
cgcaggcgcaccgcagagg

SEQ ID NO: 1059698 - RNA, 19 nt, Artificial Sequence
  Description of Artificial Sequence: Synthetic oligonucleotide
cguccgccagcgagaaguc

SEQ ID NO: 1059699 - RNA, 19 nt, Artificial Sequence
  Description of Artificial Sequence: Synthetic oligonucleotide
gcgcaccgcagaggaucgg

SEQ ID NO: 1059700 - RNA, 19 nt, Artificial Sequence
  Description of Artificial Sequence: Synthetic oligonucleotide
cgauuggagcucggccggc

SEQ ID NO: 1059701 - RNA, 19 nt, Artificial Sequence
  Description of Artificial Sequence: Synthetic oligonucleotide
cgcccggcaugcugcuccg

SEQ ID NO: 1059702 - RNA, 19 nt, Artificial Sequence
  Description of Artificial Sequence: Synthetic oligonucleotide
gcacggagugugugcaauu

SEQ ID NO: 1059703 - RNA, 19 nt, Artificial Sequence
  Description of Artificial Sequence: Synthetic oligonucleotide
gcaccgcagaggaucgggu

SEQ ID NO: 1059704 - RNA, 19 nt, Artificial Sequence
  Description of Artificial Sequence: Synthetic oligonucleotide
ccgucuuaaucaggagugu

SEQ ID NO: 1059705 - RNA, 19 nt, Artificial Sequence
  Description of Artificial Sequence: Synthetic oligonucleotide
cggccaauaguguccuggu

SEQ ID NO: 1059706 - RNA, 19 nt, Artificial Sequence
  Description of Artificial Sequence: Synthetic oligonucleotide
cgucuuaaucaggaguguu

SEQ ID NO: 1059707 - RNA, 19 nt, Artificial Sequence
  Description of Artificial Sequence: Synthetic oligonucleotide
caggcgcaccgcagaggau

SEQ ID NO: 1059708 - RNA, 19 nt, Artificial Sequence
  Description of Artificial Sequence: Synthetic oligonucleotide
gcggguggacguggucaca

SEQ ID NO: 1059709 - RNA, 19 nt, Artificial Sequence
  Description of Artificial Sequence: Synthetic oligonucleotide
cgaaggugacgagccaucu

SEQ ID NO: 1059710 - RNA, 19 nt, Artificial Sequence
  Description of Artificial Sequence: Synthetic oligonucleotide
gcccggcaugcugcuccgc

SEQ ID NO: 1059711 - RNA, 19 nt, Artificial Sequence
  Description of Artificial Sequence: Synthetic oligonucleotide
ggucgcccaggcgcgacuu

SEQ ID NO: 1059712 - RNA, 19 nt, Artificial Sequence
  Description of Artificial Sequence: Synthetic oligonucleotide
ccggcucgaggugccggga

SEQ ID NO: 1059713 - RNA, 19 nt, Artificial Sequence
  Description of Artificial Sequence: Synthetic oligonucleotide
gcgacuugcccuggcccuu

SEQ ID NO: 1059714 - RNA, 19 nt, Artificial Sequence
  Description of Artificial Sequence: Synthetic oligonucleotide
gcucggcuagcaggauuuu

SEQ ID NO: 1059715 - RNA, 19 nt, Artificial Sequence
  Description of Artificial Sequence: Synthetic oligonucleotide
cgcgugccuugucauuggu

SEQ ID NO: 1059716 - RNA, 19 nt, Artificial Sequence
  Description of Artificial Sequence: Synthetic oligonucleotide
cgacgcgugccuugucauu

SEQ ID NO: 1059717 - RNA, 19 nt, Artificial Sequence
  Description of Artificial Sequence: Synthetic oligonucleotide
ccaccucgacgcgugccuu

SEQ ID NO: 1059718 - RNA, 19 nt, Artificial Sequence
  Description of Artificial Sequence: Synthetic oligonucleotide
aauagguagauguugagac

SEQ ID NO: 1059719 - RNA, 19 nt, Artificial Sequence
  Description of Artificial Sequence: Synthetic oligonucleotide
gaaaacuauaaauagguag

SEQ ID NO: 1059720 - RNA, 19 nt, Artificial Sequence
  Description of Artificial Sequence: Synthetic oligonucleotide
aagucagaaaucuggaugc

SEQ ID NO: 1059721 - RNA, 19 nt, Artificial Sequence
  Description of Artificial Sequence: Synthetic oligonucleotide
aauaauagaguuggggucc

SEQ ID NO: 1059722 - RNA, 19 nt, Artificial Sequence
  Description of Artificial Sequence: Synthetic oligonucleotide
acuauaaauagguagaugu

SEQ ID NO: 1059723 - RNA, 19 nt, Artificial Sequence
  Description of Artificial Sequence: Synthetic oligonucleotide
aguugcaucaaaaugaggc

SEQ ID NO: 1059724 - RNA, 19 nt, Artificial Sequence
  Description of Artificial Sequence: Synthetic oligonucleotide
gauuaauuguuauucgugg

SEQ ID NO: 1059725 - RNA, 19 nt, Artificial Sequence
  Description of Artificial Sequence: Synthetic oligonucleotide
guaauaacaaugcuguugg

SEQ ID NO: 1059726 - RNA, 19 nt, Artificial Sequence
  Description of Artificial Sequence: Synthetic oligonucleotide
uaaacuguggaaagcagcg

SEQ ID NO: 1059727 - RNA, 19 nt, Artificial Sequence
  Description of Artificial Sequence: Synthetic oligonucleotide
aucaugguugaucucaucc

SEQ ID NO: 1059728 - RNA, 19 nt, Artificial Sequence
  Description of Artificial Sequence: Synthetic oligonucleotide
uguaugacaagauugcacc

SEQ ID NO: 1059729 - RNA, 19 nt, Artificial Sequence
  Description of Artificial Sequence: Synthetic oligonucleotide
aaugaggcuacucuuucac

SEQ ID NO: 1059730 - RNA, 19 nt, Artificial Sequence
  Description of Artificial Sequence: Synthetic oligonucleotide
ugaguuaccagaaagccac

SEQ ID NO: 1059731 - RNA, 19 nt, Artificial Sequence
  Description of Artificial Sequence: Synthetic oligonucleotide
uuaaaaguccaauagaguu

SEQ ID NO: 1059732 - RNA, 19 nt, Artificial Sequence
  Description of Artificial Sequence: Synthetic oligonucleotide
aaaacuauaaauagguaga

SEQ ID NO: 1059733 - RNA, 19 nt, Artificial Sequence
  Description of Artificial Sequence: Synthetic oligonucleotide
guuauaaccacuguagagg

SEQ ID NO: 1059734 - RNA, 19 nt, Artificial Sequence
  Description of Artificial Sequence: Synthetic oligonucleotide
uuuguagaagauuggauug

SEQ ID NO: 1059735 - RNA, 19 nt, Artificial Sequence
  Description of Artificial Sequence: Synthetic oligonucleotide
uucagaccaaaauacaucc

SEQ ID NO: 1059736 - RNA, 19 nt, Artificial Sequence
  Description of Artificial Sequence: Synthetic oligonucleotide
uuauaaccacuguagaggg

SEQ ID NO: 1059737 - RNA, 19 nt, Artificial Sequence
  Description of Artificial Sequence: Synthetic oligonucleotide
gauuggauuguccacggcg

SEQ ID NO: 1059738 - RNA, 19 nt, Artificial Sequence
  Description of Artificial Sequence: Synthetic oligonucleotide
ucugauaggacucucgaac

SEQ ID NO: 1059739 - RNA, 19 nt, Artificial Sequence
  Description of Artificial Sequence: Synthetic oligonucleotide
uguuauaaccacuguagag

SEQ ID NO: 1059740 - RNA, 19 nt, Artificial Sequence
  Description of Artificial Sequence: Synthetic oligonucleotide
uuuagguacugaaagagaa

SEQ ID NO: 1059741 - RNA, 19 nt, Artificial Sequence
  Description of Artificial Sequence: Synthetic oligonucleotide
ugauguaugacaagauugc

SEQ ID NO: 1059742 - RNA, 19 nt, Artificial Sequence
  Description of Artificial Sequence: Synthetic oligonucleotide
auuaauuguuauucguggg

SEQ ID NO: 1059743 - RNA, 19 nt, Artificial Sequence
  Description of Artificial Sequence: Synthetic oligonucleotide
acaagauugcaccagagga

SEQ ID NO: 1059744 - RNA, 19 nt, Artificial Sequence
  Description of Artificial Sequence: Synthetic oligonucleotide
uuaaacauguccagcauuc

SEQ ID NO: 1059745 - RNA, 19 nt, Artificial Sequence
  Description of Artificial Sequence: Synthetic oligonucleotide
aauaacaaugcuguuggcu

SEQ ID NO: 1059746 - RNA, 19 nt, Artificial Sequence
  Description of Artificial Sequence: Synthetic oligonucleotide
aaugggauuauccuuugau

SEQ ID NO: 1059747 - RNA, 19 nt, Artificial Sequence
  Description of Artificial Sequence: Synthetic oligonucleotide
aaaauguggguauucuaca

SEQ ID NO: 1059748 - RNA, 19 nt, Artificial Sequence
  Description of Artificial Sequence: Synthetic oligonucleotide
ugauguugcauccauugca

SEQ ID NO: 1059749 - RNA, 19 nt, Artificial Sequence
  Description of Artificial Sequence: Synthetic oligonucleotide
aaacccacuaaacugugga

SEQ ID NO: 1059750 - RNA, 19 nt, Artificial Sequence
  Description of Artificial Sequence: Synthetic oligonucleotide
uaucauagggcacuccugc

SEQ ID NO: 1059751 - RNA, 19 nt, Artificial Sequence
  Description of Artificial Sequence: Synthetic oligonucleotide
ugggauuauccuuugaugu

SEQ ID NO: 1059752 - RNA, 19 nt, Artificial Sequence
  Description of Artificial Sequence: Synthetic oligonucleotide
ugcaaguaagcacugcugc

SEQ ID NO: 1059753 - RNA, 19 nt, Artificial Sequence
  Description of Artificial Sequence: Synthetic oligonucleotide
aagauuggauuguccacgg

SEQ ID NO: 1059754 - RNA, 19 nt, Artificial Sequence
  Description of Artificial Sequence: Synthetic oligonucleotide
uagaagauuggauugucca

SEQ ID NO: 1059755 - RNA, 19 nt, Artificial Sequence
  Description of Artificial Sequence: Synthetic oligonucleotide
ucuacaauguacucagcca

SEQ ID NO: 1059756 - RNA, 19 nt, Artificial Sequence
  Description of Artificial Sequence: Synthetic oligonucleotide
uucgcaauugccaagccaa

SEQ ID NO: 1059757 - RNA, 19 nt, Artificial Sequence
  Description of Artificial Sequence: Synthetic oligonucleotide
aagcacguuaagcugacca

SEQ ID NO: 1059758 - RNA, 19 nt, Artificial Sequence
  Description of Artificial Sequence: Synthetic oligonucleotide
acaagaaccaaauccgugu

SEQ ID NO: 1059759 - RNA, 19 nt, Artificial Sequence
  Description of Artificial Sequence: Synthetic oligonucleotide
uuuuagguacugaaagaga

SEQ ID NO: 1059760 - RNA, 19 nt, Artificial Sequence
  Description of Artificial Sequence: Synthetic oligonucleotide
ugccaaacccacuaaacug

SEQ ID NO: 1059761 - RNA, 19 nt, Artificial Sequence
  Description of Artificial Sequence: Synthetic oligonucleotide
gaugagcgcacccacaaug

SEQ ID NO: 1059762 - RNA, 19 nt, Artificial Sequence
  Description of Artificial Sequence: Synthetic oligonucleotide
aucucuucaugacaaugac

SEQ ID NO: 1059763 - RNA, 19 nt, Artificial Sequence
  Description of Artificial Sequence: Synthetic oligonucleotide
uuccauugguuuaccaccg

SEQ ID NO: 1059764 - RNA, 19 nt, Artificial Sequence
  Description of Artificial Sequence: Synthetic oligonucleotide
aucacauuagccagggagc

SEQ ID NO: 1059765 - RNA, 19 nt, Artificial Sequence
  Description of Artificial Sequence: Synthetic oligonucleotide
uccccuagaagcauggcug

SEQ ID NO: 1059766 - RNA, 19 nt, Artificial Sequence
  Description of Artificial Sequence: Synthetic oligonucleotide
aggacucucgaacuuuggc

SEQ ID NO: 1059767 - RNA, 19 nt, Artificial Sequence
  Description of Artificial Sequence: Synthetic oligonucleotide
aauucacagugucguuagc

SEQ ID NO: 1059768 - RNA, 19 nt, Artificial Sequence
  Description of Artificial Sequence: Synthetic oligonucleotide
uaaauagguagauguugag

SEQ ID NO: 1059769 - RNA, 19 nt, Artificial Sequence
  Description of Artificial Sequence: Synthetic oligonucleotide
caauaauagaguugggguc

SEQ ID NO: 1059770 - RNA, 19 nt, Artificial Sequence
  Description of Artificial Sequence: Synthetic oligonucleotide
agugguaaagcuggggucg

SEQ ID NO: 1059771 - RNA, 19 nt, Artificial Sequence
  Description of Artificial Sequence: Synthetic oligonucleotide
acaauguacucagccaugc

SEQ ID NO: 1059772 - RNA, 19 nt, Artificial Sequence
  Description of Artificial Sequence: Synthetic oligonucleotide
gaaaucuggaugcgcuucg

SEQ ID NO: 1059773 - RNA, 19 nt, Artificial Sequence
  Description of Artificial Sequence: Synthetic oligonucleotide
uggggucgaucauaaaugg

SEQ ID NO: 1059774 - RNA, 19 nt, Artificial Sequence
  Description of Artificial Sequence: Synthetic oligonucleotide
caagauugcaccagaggag

SEQ ID NO: 1059775 - RNA, 19 nt, Artificial Sequence
  Description of Artificial Sequence: Synthetic oligonucleotide
cauuucuagcacaauauca

SEQ ID NO: 1059776 - RNA, 19 nt, Artificial Sequence
  Description of Artificial Sequence: Synthetic oligonucleotide
uuugcucauccacucauac

SEQ ID NO: 1059777 - RNA, 19 nt, Artificial Sequence
  Description of Artificial Sequence: Synthetic oligonucleotide
uaugacaagauugcaccag

SEQ ID NO: 1059778 - RNA, 19 nt, Artificial Sequence
  Description of Artificial Sequence: Synthetic oligonucleotide
ccugcaauaauagaguugg

SEQ ID NO: 1059779 - RNA, 19 nt, Artificial Sequence
  Description of Artificial Sequence: Synthetic oligonucleotide
aaauguggguauucuacaa

SEQ ID NO: 1059780 - RNA, 19 nt, Artificial Sequence
  Description of Artificial Sequence: Synthetic oligonucleotide
auguaugacaagauugcac

SEQ ID NO: 1059781 - RNA, 19 nt, Artificial Sequence
  Description of Artificial Sequence: Synthetic oligonucleotide
agggcagcuagacuauccc

SEQ ID NO: 1059782 - RNA, 19 nt, Artificial Sequence
  Description of Artificial Sequence: Synthetic oligonucleotide
agauuaauuguuauucgug

SEQ ID NO: 1059783 - RNA, 19 nt, Artificial Sequence
  Description of Artificial Sequence: Synthetic oligonucleotide
augggauuauccuuugaug

SEQ ID NO: 1059784 - RNA, 19 nt, Artificial Sequence
  Description of Artificial Sequence: Synthetic oligonucleotide
ucgaucauaaaugggauua

SEQ ID NO: 1059785 - RNA, 19 nt, Artificial Sequence
  Description of Artificial Sequence: Synthetic oligonucleotide
ucgaacuuuggccugcaga

SEQ ID NO: 1059786 - RNA, 19 nt, Artificial Sequence
  Description of Artificial Sequence: Synthetic oligonucleotide
aagaucagggguugcagau

SEQ ID NO: 1059787 - RNA, 19 nt, Artificial Sequence
  Description of Artificial Sequence: Synthetic oligonucleotide
auaaauagguagauguuga

SEQ ID NO: 1059788 - RNA, 19 nt, Artificial Sequence
  Description of Artificial Sequence: Synthetic oligonucleotide
ucaaaaugaggcuacucuu

SEQ ID NO: 1059789 - RNA, 19 nt, Artificial Sequence
  Description of Artificial Sequence: Synthetic oligonucleotide
ugagcuaacagcuguggau

SEQ ID NO: 1059790 - RNA, 19 nt, Artificial Sequence
  Description of Artificial Sequence: Synthetic oligonucleotide
uugauguugcauccauugc

SEQ ID NO: 1059791 - RNA, 19 nt, Artificial Sequence
  Description of Artificial Sequence: Synthetic oligonucleotide
ugaccaggcauucggcccg

SEQ ID NO: 1059792 - RNA, 19 nt, Artificial Sequence
  Description of Artificial Sequence: Synthetic oligonucleotide
ucguuagcaccaaugacaa

SEQ ID NO: 1059793 - RNA, 19 nt, Artificial Sequence
  Description of Artificial Sequence: Synthetic oligonucleotide
cuggggucgaucauaaaug

SEQ ID NO: 1059794 - RNA, 19 nt, Artificial Sequence
  Description of Artificial Sequence: Synthetic oligonucleotide
guagcuguucagcacagug

SEQ ID NO: 1059795 - RNA, 19 nt, Artificial Sequence
  Description of Artificial Sequence: Synthetic oligonucleotide
aaacuauaaauagguagau

SEQ ID NO: 1059796 - RNA, 19 nt, Artificial Sequence
  Description of Artificial Sequence: Synthetic oligonucleotide
uguugcauccauugcaaaa

SEQ ID NO: 1059797 - RNA, 19 nt, Artificial Sequence
  Description of Artificial Sequence: Synthetic oligonucleotide
ugcagagcaucacacgucu

SEQ ID NO: 1059798 - RNA, 19 nt, Artificial Sequence
  Description of Artificial Sequence: Synthetic oligonucleotide
aagaaccaaauccgugucu

SEQ ID NO: 1059799 - RNA, 19 nt, Artificial Sequence
  Description of Artificial Sequence: Synthetic oligonucleotide
aaaucuggaugcgcuucgc

SEQ ID NO: 1059800 - RNA, 19 nt, Artificial Sequence
  Description of Artificial Sequence: Synthetic oligonucleotide
guagaaaggccgcccaggg

SEQ ID NO: 1059801 - RNA, 19 nt, Artificial Sequence
  Description of Artificial Sequence: Synthetic oligonucleotide
ugucguuagcaccaaugac

SEQ ID NO: 1059802 - RNA, 19 nt, Artificial Sequence
  Description of Artificial Sequence: Synthetic oligonucleotide
ugacaagaaccaaauccgu

SEQ ID NO: 1059803 - RNA, 19 nt, Artificial Sequence
  Description of Artificial Sequence: Synthetic oligonucleotide
agaaaucuggaugcgcuuc

SEQ ID NO: 1059804 - RNA, 19 nt, Artificial Sequence
  Description of Artificial Sequence: Synthetic oligonucleotide
agcacguuaagcugaccag

SEQ ID NO: 1059805 - RNA, 19 nt, Artificial Sequence
  Description of Artificial Sequence: Synthetic oligonucleotide
ucacagugucguuagcacc

SEQ ID NO: 1059806 - RNA, 19 nt, Artificial Sequence
  Description of Artificial Sequence: Synthetic oligonucleotide
aauugccaagccaauggug

SEQ ID NO: 1059807 - RNA, 19 nt, Artificial Sequence
  Description of Artificial Sequence: Synthetic oligonucleotide
uucuguaacugaagacacc

SEQ ID NO: 1059808 - RNA, 19 nt, Artificial Sequence
  Description of Artificial Sequence: Synthetic oligonucleotide
ucuugagcggcugaauuca

SEQ ID NO: 1059809 - RNA, 19 nt, Artificial Sequence
  Description of Artificial Sequence: Synthetic oligonucleotide
gucgcuuaaacauguccag

SEQ ID NO: 1059810 - RNA, 19 nt, Artificial Sequence
  Description of Artificial Sequence: Synthetic oligonucleotide
gucguuagcaccaaugaca

SEQ ID NO: 1059811 - RNA, 19 nt, Artificial Sequence
  Description of Artificial Sequence: Synthetic oligonucleotide
ggcggcauaaccaacaccc

SEQ ID NO: 1059812 - RNA, 19 nt, Artificial Sequence
  Description of Artificial Sequence: Synthetic oligonucleotide
agaaccaaauccgugucug

SEQ ID NO: 1059813 - RNA, 19 nt, Artificial Sequence
  Description of Artificial Sequence: Synthetic oligonucleotide
uuagguacugaaagagaau

SEQ ID NO: 1059814 - RNA, 19 nt, Artificial Sequence
  Description of Artificial Sequence: Synthetic oligonucleotide
cucgguaagcaucuucacc

SEQ ID NO: 1059815 - RNA, 19 nt, Artificial Sequence
  Description of Artificial Sequence: Synthetic oligonucleotide
ucauagggcacuccugccu

SEQ ID NO: 1059816 - RNA, 19 nt, Artificial Sequence
  Description of Artificial Sequence: Synthetic oligonucleotide
ucugugggucgcuuaaaca

SEQ ID NO: 1059817 - RNA, 19 nt, Artificial Sequence
  Description of Artificial Sequence: Synthetic oligonucleotide
gacaagaaccaaauccgug

SEQ ID NO: 1059818 - RNA, 19 nt, Artificial Sequence
  Description of Artificial Sequence: Synthetic oligonucleotide
augaccuguuuagacuucc

SEQ ID NO: 1059819 - RNA, 19 nt, Artificial Sequence
  Description of Artificial Sequence: Synthetic oligonucleotide
ugcuccggacaucugagcu

SEQ ID NO: 1059820 - RNA, 19 nt, Artificial Sequence
  Description of Artificial Sequence: Synthetic oligonucleotide
ugggaaaucaugguugauc

SEQ ID NO: 1059821 - RNA, 19 nt, Artificial Sequence
  Description of Artificial Sequence: Synthetic oligonucleotide
agauuggauuguccacggc

SEQ ID NO: 1059822 - RNA, 19 nt, Artificial Sequence
  Description of Artificial Sequence: Synthetic oligonucleotide
ugaauucacagugucguua

SEQ ID NO: 1059823 - RNA, 19 nt, Artificial Sequence
  Description of Artificial Sequence: Synthetic oligonucleotide
ugcaaaauguggguauucu

SEQ ID NO: 1059824 - RNA, 19 nt, Artificial Sequence
  Description of Artificial Sequence: Synthetic oligonucleotide
uguacucagccaugcaagu

SEQ ID NO: 1059825 - RNA, 19 nt, Artificial Sequence
  Description of Artificial Sequence: Synthetic oligonucleotide
aucuugacacucucuguug

SEQ ID NO: 1059826 - RNA, 19 nt, Artificial Sequence
  Description of Artificial Sequence: Synthetic oligonucleotide
aaauccgugucugggaaau

SEQ ID NO: 1059827 - RNA, 19 nt, Artificial Sequence
  Description of Artificial Sequence: Synthetic oligonucleotide
uuuagacuuccagaccuca

SEQ ID NO: 1059828 - RNA, 19 nt, Artificial Sequence
  Description of Artificial Sequence: Synthetic oligonucleotide
ucagaccaaaauacauccu

SEQ ID NO: 1059829 - RNA, 19 nt, Artificial Sequence
  Description of Artificial Sequence: Synthetic oligonucleotide
ucacacgucuucuuggcau

SEQ ID NO: 1059830 - RNA, 19 nt, Artificial Sequence
  Description of Artificial Sequence: Synthetic oligonucleotide
auagcagcugucaaaguca

SEQ ID NO: 1059831 - RNA, 19 nt, Artificial Sequence
  Description of Artificial Sequence: Synthetic oligonucleotide
caucacacgucuucuuggc

SEQ ID NO: 1059832 - RNA, 19 nt, Artificial Sequence
  Description of Artificial Sequence: Synthetic oligonucleotide
accaaaucggcaauggggu

SEQ ID NO: 1059833 - RNA, 19 nt, Artificial Sequence
  Description of Artificial Sequence: Synthetic oligonucleotide
cugaccaggcauucggccc

SEQ ID NO: 1059834 - RNA, 19 nt, Artificial Sequence
  Description of Artificial Sequence: Synthetic oligonucleotide
uguagagggcagcuagacu

SEQ ID NO: 1059835 - RNA, 19 nt, Artificial Sequence
  Description of Artificial Sequence: Synthetic oligonucleotide
uccauugguuuaccaccgg

SEQ ID NO: 1059836 - RNA, 19 nt, Artificial Sequence
  Description of Artificial Sequence: Synthetic oligonucleotide
aaugaccuguuuagacuuc

SEQ ID NO: 1059837 - RNA, 19 nt, Artificial Sequence
  Description of Artificial Sequence: Synthetic oligonucleotide
cuguuuagacuuccagacc

SEQ ID NO: 1059838 - RNA, 19 nt, Artificial Sequence
  Description of Artificial Sequence: Synthetic oligonucleotide
uggcaugccugcaauaaua

SEQ ID NO: 1059839 - RNA, 19 nt, Artificial Sequence
  Description of Artificial Sequence: Synthetic oligonucleotide
caaacccacuaaacugugg

SEQ ID NO: 1059840 - RNA, 19 nt, Artificial Sequence
  Description of Artificial Sequence: Synthetic oligonucleotide
gacaacaggcaugucagca

SEQ ID NO: 1059841 - RNA, 19 nt, Artificial Sequence
  Description of Artificial Sequence: Synthetic oligonucleotide
agugucguuagcaccaaug

SEQ ID NO: 1059842 - RNA, 19 nt, Artificial Sequence
  Description of Artificial Sequence: Synthetic oligonucleotide
uaauaacaaugcuguuggc

SEQ ID NO: 1059843 - RNA, 19 nt, Artificial Sequence
  Description of Artificial Sequence: Synthetic oligonucleotide
uguggaaagcagcgaccag

SEQ ID NO: 1059844 - RNA, 19 nt, Artificial Sequence
  Description of Artificial Sequence: Synthetic oligonucleotide
ggaguaauaacaaugcugu

SEQ ID NO: 1059845 - RNA, 19 nt, Artificial Sequence
  Description of Artificial Sequence: Synthetic oligonucleotide
agccaugcaaguaagcacu

SEQ ID NO: 1059846 - RNA, 19 nt, Artificial Sequence
  Description of Artificial Sequence: Synthetic oligonucleotide
gauguaugacaagauugca

SEQ ID NO: 1059847 - RNA, 19 nt, Artificial Sequence
  Description of Artificial Sequence: Synthetic oligonucleotide
ugcgcuucgcaauugccaa

SEQ ID NO: 1059848 - RNA, 19 nt, Artificial Sequence
  Description of Artificial Sequence: Synthetic oligonucleotide
ucgagcuguucccugagua

SEQ ID NO: 1059849 - RNA, 19 nt, Artificial Sequence
  Description of Artificial Sequence: Synthetic oligonucleotide
ggcauaaccaacacccagg

SEQ ID NO: 1059850 - RNA, 19 nt, Artificial Sequence
  Description of Artificial Sequence: Synthetic oligonucleotide
cagccaugcaaguaagcac

SEQ ID NO: 1059851 - RNA, 19 nt, Artificial Sequence
  Description of Artificial Sequence: Synthetic oligonucleotide
aacccacuaaacuguggaa

SEQ ID NO: 1059852 - RNA, 19 nt, Artificial Sequence
  Description of Artificial Sequence: Synthetic oligonucleotide
agucacacccaugagagua

SEQ ID NO: 1059853 - RNA, 19 nt, Artificial Sequence
  Description of Artificial Sequence: Synthetic oligonucleotide
aguuguaccauagccucca

SEQ ID NO: 1059854 - RNA, 19 nt, Artificial Sequence
  Description of Artificial Sequence: Synthetic oligonucleotide
gagcuaacagcuguggauc

SEQ ID NO: 1059855 - RNA, 19 nt, Artificial Sequence
  Description of Artificial Sequence: Synthetic oligonucleotide
gaccucaaggacuggcaug

SEQ ID NO: 1059856 - RNA, 19 nt, Artificial Sequence
  Description of Artificial Sequence: Synthetic oligonucleotide
gagcgauucauugccacac

SEQ ID NO: 1059857 - RNA, 19 nt, Artificial Sequence
  Description of Artificial Sequence: Synthetic oligonucleotide
guggaucugguuucaggcc

SEQ ID NO: 1059858 - RNA, 19 nt, Artificial Sequence
  Description of Artificial Sequence: Synthetic oligonucleotide
gugucguuagcaccaauga

SEQ ID NO: 1059859 - RNA, 19 nt, Artificial Sequence
  Description of Artificial Sequence: Synthetic oligonucleotide
caauagaguugcaucaaaa

SEQ ID NO: 1059860 - RNA, 19 nt, Artificial Sequence
  Description of Artificial Sequence: Synthetic oligonucleotide
aaaucggcaaugggguacu

SEQ ID NO: 1059861 - RNA, 19 nt, Artificial Sequence
  Description of Artificial Sequence: Synthetic oligonucleotide
gauguugcauccauugcaa

SEQ ID NO: 1059862 - RNA, 19 nt, Artificial Sequence
  Description of Artificial Sequence: Synthetic oligonucleotide
ugauaggacucucgaacuu

SEQ ID NO: 1059863 - RNA, 19 nt, Artificial Sequence
  Description of Artificial Sequence: Synthetic oligonucleotide
agaggagccgaugagcgca

SEQ ID NO: 1059864 - RNA, 19 nt, Artificial Sequence
  Description of Artificial Sequence: Synthetic oligonucleotide
uccacggcggcauaaccaa

SEQ ID NO: 1059865 - RNA, 19 nt, Artificial Sequence
  Description of Artificial Sequence: Synthetic oligonucleotide
uguccacggcggcauaacc

SEQ ID NO: 1059866 - RNA, 19 nt, Artificial Sequence
  Description of Artificial Sequence: Synthetic oligonucleotide
guaagcacugcugccaaac

SEQ ID NO: 1059867 - RNA, 19 nt, Artificial Sequence
  Description of Artificial Sequence: Synthetic oligonucleotide
cugaguuaccagaaagcca

SEQ ID NO: 1059868 - RNA, 19 nt, Artificial Sequence
  Description of Artificial Sequence: Synthetic oligonucleotide
augagcgcacccacaaugg

SEQ ID NO: 1059869 - RNA, 19 nt, Artificial Sequence
  Description of Artificial Sequence: Synthetic oligonucleotide
ucgcuuaaacauguccagc

SEQ ID NO: 1059870 - RNA, 19 nt, Artificial Sequence
  Description of Artificial Sequence: Synthetic oligonucleotide
acggcggcauaaccaacac

SEQ ID NO: 1059871 - RNA, 19 nt, Artificial Sequence
  Description of Artificial Sequence: Synthetic oligonucleotide
guugcaucaaaaugaggcu

SEQ ID NO: 1059872 - RNA, 19 nt, Artificial Sequence
  Description of Artificial Sequence: Synthetic oligonucleotide
gaucagggguugcagaucu

SEQ ID NO: 1059873 - RNA, 19 nt, Artificial Sequence
  Description of Artificial Sequence: Synthetic oligonucleotide
cagcuagacuaucccaacc

SEQ ID NO: 1059874 - RNA, 19 nt, Artificial Sequence
  Description of Artificial Sequence: Synthetic oligonucleotide
uccaauagaguugcaucaa

SEQ ID NO: 1059875 - RNA, 19 nt, Artificial Sequence
  Description of Artificial Sequence: Synthetic oligonucleotide
ucuguugguuuguggggcu

SEQ ID NO: 1059876 - RNA, 19 nt, Artificial Sequence
  Description of Artificial Sequence: Synthetic oligonucleotide
gaucuugacacucucuguu

SEQ ID NO: 1059877 - RNA, 19 nt, Artificial Sequence
  Description of Artificial Sequence: Synthetic oligonucleotide
agaggccguaaccuggagu

SEQ ID NO: 1059878 - RNA, 19 nt, Artificial Sequence
  Description of Artificial Sequence: Synthetic oligonucleotide
gaugcgcuucgcaauugcc

SEQ ID NO: 1059879 - RNA, 19 nt, Artificial Sequence
  Description of Artificial Sequence: Synthetic oligonucleotide
uucaggccuccaagugugg

SEQ ID NO: 1059880 - RNA, 19 nt, Artificial Sequence
  Description of Artificial Sequence: Synthetic oligonucleotide
acauuagccagggagcgau

SEQ ID NO: 1059881 - RNA, 19 nt, Artificial Sequence
  Description of Artificial Sequence: Synthetic oligonucleotide
uguugagaaggaagcccuc

SEQ ID NO: 1059882 - RNA, 19 nt, Artificial Sequence
  Description of Artificial Sequence: Synthetic oligonucleotide
ugaccuguuuagacuucca

SEQ ID NO: 1059883 - RNA, 19 nt, Artificial Sequence
  Description of Artificial Sequence: Synthetic oligonucleotide
cauagggcacuccugccuc

SEQ ID NO: 1059884 - RNA, 19 nt, Artificial Sequence
  Description of Artificial Sequence: Synthetic oligonucleotide
cagauuaauuguuauucgu

SEQ ID NO: 1059885 - RNA, 19 nt, Artificial Sequence
  Description of Artificial Sequence: Synthetic oligonucleotide
ugagcgcacccacaauggu

SEQ ID NO: 1059886 - RNA, 19 nt, Artificial Sequence
  Description of Artificial Sequence: Synthetic oligonucleotide
gccuccaagaaucacauua

SEQ ID NO: 1059887 - RNA, 19 nt, Artificial Sequence
  Description of Artificial Sequence: Synthetic oligonucleotide
acggagcccagacagguaa

SEQ ID NO: 1059888 - RNA, 19 nt, Artificial Sequence
  Description of Artificial Sequence: Synthetic oligonucleotide
auaucauagggcacuccug

SEQ ID NO: 1059889 - RNA, 19 nt, Artificial Sequence
  Description of Artificial Sequence: Synthetic oligonucleotide
gguauucuacaauguacuc

SEQ ID NO: 1059890 - RNA, 19 nt, Artificial Sequence
  Description of Artificial Sequence: Synthetic oligonucleotide
agacuaucccaacccacaa

SEQ ID NO: 1059891 - RNA, 19 nt, Artificial Sequence
  Description of Artificial Sequence: Synthetic oligonucleotide
gggucgaucauaaauggga

SEQ ID NO: 1059892 - RNA, 19 nt, Artificial Sequence
  Description of Artificial Sequence: Synthetic oligonucleotide
gucaagguugauuucugua

SEQ ID NO: 1059893 - RNA, 19 nt, Artificial Sequence
  Description of Artificial Sequence: Synthetic oligonucleotide
augaggcuacucuuucacu

SEQ ID NO: 1059894 - RNA, 19 nt, Artificial Sequence
  Description of Artificial Sequence: Synthetic oligonucleotide
aguuaccagaaagccaccu

SEQ ID NO: 1059895 - RNA, 19 nt, Artificial Sequence
  Description of Artificial Sequence: Synthetic oligonucleotide
gcaaguaagcacugcugcc

SEQ ID NO: 1059896 - RNA, 19 nt, Artificial Sequence
  Description of Artificial Sequence: Synthetic oligonucleotide
gggucgcuuaaacaugucc

SEQ ID NO: 1059897 - RNA, 19 nt, Artificial Sequence
  Description of Artificial Sequence: Synthetic oligonucleotide
gagggcagcuagacuaucc

SEQ ID NO: 1059898 - RNA, 19 nt, Artificial Sequence
  Description of Artificial Sequence: Synthetic oligonucleotide
uagagagugcagccacgga

SEQ ID NO: 1059899 - RNA, 19 nt, Artificial Sequence
  Description of Artificial Sequence: Synthetic oligonucleotide
agaccucaaggacuggcau

SEQ ID NO: 1059900 - RNA, 19 nt, Artificial Sequence
  Description of Artificial Sequence: Synthetic oligonucleotide
agccugaguagcuguucag

SEQ ID NO: 1059901 - RNA, 19 nt, Artificial Sequence
  Description of Artificial Sequence: Synthetic oligonucleotide
aaaggccgcccagggcacc

SEQ ID NO: 1059902 - RNA, 19 nt, Artificial Sequence
  Description of Artificial Sequence: Synthetic oligonucleotide
auguucacacugucuaaua

SEQ ID NO: 1059903 - RNA, 19 nt, Artificial Sequence
  Description of Artificial Sequence: Synthetic oligonucleotide
gagcccagacagguaaugc

SEQ ID NO: 1059904 - RNA, 19 nt, Artificial Sequence
  Description of Artificial Sequence: Synthetic oligonucleotide
ggucgcuuaaacaugucca

SEQ ID NO: 1059905 - RNA, 19 nt, Artificial Sequence
  Description of Artificial Sequence: Synthetic oligonucleotide
acguuaagcugaccaggca

SEQ ID NO: 1059906 - RNA, 19 nt, Artificial Sequence
  Description of Artificial Sequence: Synthetic oligonucleotide
caauaucauagggcacucc

SEQ ID NO: 1059907 - RNA, 19 nt, Artificial Sequence
  Description of Artificial Sequence: Synthetic oligonucleotide
cacaauaucauagggcacu

SEQ ID NO: 1059908 - RNA, 19 nt, Artificial Sequence
  Description of Artificial Sequence: Synthetic oligonucleotide
uccgugucugggaaaucau

SEQ ID NO: 1059909 - RNA, 19 nt, Artificial Sequence
  Description of Artificial Sequence: Synthetic oligonucleotide
ccaauggugccacccauag

SEQ ID NO: 1059910 - RNA, 19 nt, Artificial Sequence
  Description of Artificial Sequence: Synthetic oligonucleotide
cagguaaugccagugguaa

SEQ ID NO: 1059911 - RNA, 19 nt, Artificial Sequence
  Description of Artificial Sequence: Synthetic oligonucleotide
uugcuccggacaucugagc

SEQ ID NO: 1059912 - RNA, 19 nt, Artificial Sequence
  Description of Artificial Sequence: Synthetic oligonucleotide
agcgauucauugccacaca

SEQ ID NO: 1059913 - RNA, 19 nt, Artificial Sequence
  Description of Artificial Sequence: Synthetic oligonucleotide
auugcaaaauguggguauu

SEQ ID NO: 1059914 - RNA, 19 nt, Artificial Sequence
  Description of Artificial Sequence: Synthetic oligonucleotide
gacuaucccaacccacaaa

SEQ ID NO: 1059915 - RNA, 19 nt, Artificial Sequence
  Description of Artificial Sequence: Synthetic oligonucleotide
uaccaccggcuguugaagu

SEQ ID NO: 1059916 - RNA, 19 nt, Artificial Sequence
  Description of Artificial Sequence: Synthetic oligonucleotide
ggcaugccugcaauaauag

SEQ ID NO: 1059917 - RNA, 19 nt, Artificial Sequence
  Description of Artificial Sequence: Synthetic oligonucleotide
cuauaaauagguagauguu

SEQ ID NO: 1059918 - RNA, 19 nt, Artificial Sequence
  Description of Artificial Sequence: Synthetic oligonucleotide
cugaggcaagucagaaauc

SEQ ID NO: 1059919 - RNA, 19 nt, Artificial Sequence
  Description of Artificial Sequence: Synthetic oligonucleotide
cuguggaaagcagcgacca

SEQ ID NO: 1059920 - RNA, 19 nt, Artificial Sequence
  Description of Artificial Sequence: Synthetic oligonucleotide
guaagcaucuucaccaaau

SEQ ID NO: 1059921 - RNA, 19 nt, Artificial Sequence
  Description of Artificial Sequence: Synthetic oligonucleotide
augcgcuucgcaauugcca

SEQ ID NO: 1059922 - RNA, 19 nt, Artificial Sequence
  Description of Artificial Sequence: Synthetic oligonucleotide
caaugaccuguuuagacuu

SEQ ID NO: 1059923 - RNA, 19 nt, Artificial Sequence
  Description of Artificial Sequence: Synthetic oligonucleotide
caaaaugaggcuacucuuu

SEQ ID NO: 1059924 - RNA, 19 nt, Artificial Sequence
  Description of Artificial Sequence: Synthetic oligonucleotide
cacggcggcauaaccaaca

SEQ ID NO: 1059925 - RNA, 19 nt, Artificial Sequence
  Description of Artificial Sequence: Synthetic oligonucleotide
ucgcaauugccaagccaau

SEQ ID NO: 1059926 - RNA, 19 nt, Artificial Sequence
  Description of Artificial Sequence: Synthetic oligonucleotide
auguugcauccauugcaaa

SEQ ID NO: 1059927 - RNA, 19 nt, Artificial Sequence
  Description of Artificial Sequence: Synthetic oligonucleotide
gcauucggcccgcaacugg

SEQ ID NO: 1059928 - RNA, 19 nt, Artificial Sequence
  Description of Artificial Sequence: Synthetic oligonucleotide
ccagggagcgauucauugc

SEQ ID NO: 1059929 - RNA, 19 nt, Artificial Sequence
  Description of Artificial Sequence: Synthetic oligonucleotide
cugagcuaacagcugugga

SEQ ID NO: 1059930 - RNA, 19 nt, Artificial Sequence
  Description of Artificial Sequence: Synthetic oligonucleotide
gcuagacuaucccaaccca

SEQ ID NO: 1059931 - RNA, 19 nt, Artificial Sequence
  Description of Artificial Sequence: Synthetic oligonucleotide
cuuaaacauguccagcauu

SEQ ID NO: 1059932 - RNA, 19 nt, Artificial Sequence
  Description of Artificial Sequence: Synthetic oligonucleotide
gaguuaccagaaagccacc

SEQ ID NO: 1059933 - RNA, 19 nt, Artificial Sequence
  Description of Artificial Sequence: Synthetic oligonucleotide
auagggcacuccugccuca

SEQ ID NO: 1059934 - RNA, 19 nt, Artificial Sequence
  Description of Artificial Sequence: Synthetic oligonucleotide
agguaaugccagugguaaa

SEQ ID NO: 1059935 - RNA, 19 nt, Artificial Sequence
  Description of Artificial Sequence: Synthetic oligonucleotide
ggggucgaucauaaauggg

SEQ ID NO: 1059936 - RNA, 19 nt, Artificial Sequence
  Description of Artificial Sequence: Synthetic oligonucleotide
gcgauucauugccacacac

SEQ ID NO: 1059937 - RNA, 19 nt, Artificial Sequence
  Description of Artificial Sequence: Synthetic oligonucleotide
aguaagcacugcugccaaa

SEQ ID NO: 1059938 - RNA, 19 nt, Artificial Sequence
  Description of Artificial Sequence: Synthetic oligonucleotide
uagccagggagcgauucau

SEQ ID NO: 1059939 - RNA, 19 nt, Artificial Sequence
  Description of Artificial Sequence: Synthetic oligonucleotide
ggguuuguagaagauugga

SEQ ID NO: 1059940 - RNA, 19 nt, Artificial Sequence
  Description of Artificial Sequence: Synthetic oligonucleotide
ucauugccacacacaugau

SEQ ID NO: 1059941 - RNA, 19 nt, Artificial Sequence
  Description of Artificial Sequence: Synthetic oligonucleotide
acagguaaugccaguggua

SEQ ID NO: 1059942 - RNA, 19 nt, Artificial Sequence
  Description of Artificial Sequence: Synthetic oligonucleotide
gggagcgauucauugccac

SEQ ID NO: 1059943 - RNA, 19 nt, Artificial Sequence
  Description of Artificial Sequence: Synthetic oligonucleotide
gcagcgaccagcugaggca

SEQ ID NO: 1059944 - RNA, 19 nt, Artificial Sequence
  Description of Artificial Sequence: Synthetic oligonucleotide
ggcauugccgagucgagcu

SEQ ID NO: 1059945 - RNA, 19 nt, Artificial Sequence
  Description of Artificial Sequence: Synthetic oligonucleotide
uugagagccuuugcucauc

SEQ ID NO: 1059946 - RNA, 19 nt, Artificial Sequence
  Description of Artificial Sequence: Synthetic oligonucleotide
aaaguccaauagaguugca

SEQ ID NO: 1059947 - RNA, 19 nt, Artificial Sequence
  Description of Artificial Sequence: Synthetic oligonucleotide
cguaaccuggaguaauaac

SEQ ID NO: 1059948 - RNA, 19 nt, Artificial Sequence
  Description of Artificial Sequence: Synthetic oligonucleotide
uuguccacggcggcauaac

SEQ ID NO: 1059949 - RNA, 19 nt, Artificial Sequence
  Description of Artificial Sequence: Synthetic oligonucleotide
cuggaguaauaacaaugcu

SEQ ID NO: 1059950 - RNA, 19 nt, Artificial Sequence
  Description of Artificial Sequence: Synthetic oligonucleotide
ugggucgcuuaaacauguc

SEQ ID NO: 1059951 - RNA, 19 nt, Artificial Sequence
  Description of Artificial Sequence: Synthetic oligonucleotide
ggagcgauucauugccaca

SEQ ID NO: 1059952 - RNA, 19 nt, Artificial Sequence
  Description of Artificial Sequence: Synthetic oligonucleotide
guccacggcggcauaacca

SEQ ID NO: 1059953 - RNA, 19 nt, Artificial Sequence
  Description of Artificial Sequence: Synthetic oligonucleotide
cagccugaguagcuguuca

SEQ ID NO: 1059954 - RNA, 19 nt, Artificial Sequence
  Description of Artificial Sequence: Synthetic oligonucleotide
caauugccaagccaauggu

SEQ ID NO: 1059955 - RNA, 19 nt, Artificial Sequence
  Description of Artificial Sequence: Synthetic oligonucleotide
auuguccacggcggcauaa

SEQ ID NO: 1059956 - RNA, 19 nt, Artificial Sequence
  Description of Artificial Sequence: Synthetic oligonucleotide
aagcagcgaccagcugagg

SEQ ID NO: 1059957 - RNA, 19 nt, Artificial Sequence
  Description of Artificial Sequence: Synthetic oligonucleotide
ggaucugugggucgcuuaa

SEQ ID NO: 1059958 - RNA, 19 nt, Artificial Sequence
  Description of Artificial Sequence: Synthetic oligonucleotide
ggagccgaugagcgcaccc

SEQ ID NO: 1059959 - RNA, 19 nt, Artificial Sequence
  Description of Artificial Sequence: Synthetic oligonucleotide
cuuugcucauccacucaua

SEQ ID NO: 1059960 - RNA, 19 nt, Artificial Sequence
  Description of Artificial Sequence: Synthetic oligonucleotide
agccauugcuccggacauc

SEQ ID NO: 1059961 - RNA, 19 nt, Artificial Sequence
  Description of Artificial Sequence: Synthetic oligonucleotide
ggcagcuagacuaucccaa

SEQ ID NO: 1059962 - RNA, 19 nt, Artificial Sequence
  Description of Artificial Sequence: Synthetic oligonucleotide
caaauccgugucugggaaa

SEQ ID NO: 1059963 - RNA, 19 nt, Artificial Sequence
  Description of Artificial Sequence: Synthetic oligonucleotide
cuugacacucucuguuggu

SEQ ID NO: 1059964 - RNA, 19 nt, Artificial Sequence
  Description of Artificial Sequence: Synthetic oligonucleotide
caacugggugaauuccaaa

SEQ ID NO: 1059965 - RNA, 19 nt, Artificial Sequence
  Description of Artificial Sequence: Synthetic oligonucleotide
aggagccgaugagcgcacc

SEQ ID NO: 1059966 - RNA, 19 nt, Artificial Sequence
  Description of Artificial Sequence: Synthetic oligonucleotide
ccaugagaguagagagugc

SEQ ID NO: 1059967 - RNA, 19 nt, Artificial Sequence
  Description of Artificial Sequence: Synthetic oligonucleotide
uccucuugagcggcugaau

SEQ ID NO: 1059968 - RNA, 19 nt, Artificial Sequence
  Description of Artificial Sequence: Synthetic oligonucleotide
ggagcccagacagguaaug

SEQ ID NO: 1059969 - RNA, 19 nt, Artificial Sequence
  Description of Artificial Sequence: Synthetic oligonucleotide
uaauagaguugggguccuc

SEQ ID NO: 1059970 - RNA, 19 nt, Artificial Sequence
  Description of Artificial Sequence: Synthetic oligonucleotide
cucaaggacuggcaugccu

SEQ ID NO: 1059971 - RNA, 19 nt, Artificial Sequence
  Description of Artificial Sequence: Synthetic oligonucleotide
cagaggccguaaccuggag

SEQ ID NO: 1059972 - RNA, 19 nt, Artificial Sequence
  Description of Artificial Sequence: Synthetic oligonucleotide
gucgaucauaaaugggauu

SEQ ID NO: 1059973 - RNA, 19 nt, Artificial Sequence
  Description of Artificial Sequence: Synthetic oligonucleotide
agcuguucccugaguagaa

SEQ ID NO: 1059974 - RNA, 19 nt, Artificial Sequence
  Description of Artificial Sequence: Synthetic oligonucleotide
cggcauaaccaacacccag

SEQ ID NO: 1059975 - RNA, 19 nt, Artificial Sequence
  Description of Artificial Sequence: Synthetic oligonucleotide
gggcagcuagacuauccca

SEQ ID NO: 1059976 - RNA, 19 nt, Artificial Sequence
  Description of Artificial Sequence: Synthetic oligonucleotide
gcccagacagguaaugcca

SEQ ID NO: 1059977 - RNA, 19 nt, Artificial Sequence
  Description of Artificial Sequence: Synthetic oligonucleotide
gcacaauaucauagggcac

SEQ ID NO: 1059978 - RNA, 19 nt, Artificial Sequence
  Description of Artificial Sequence: Synthetic oligonucleotide
gcauugccgagucgagcug

SEQ ID NO: 1059979 - RNA, 19 nt, Artificial Sequence
  Description of Artificial Sequence: Synthetic oligonucleotide
cuagaagcauggcuguguu

SEQ ID NO: 1059980 - RNA, 19 nt, Artificial Sequence
  Description of Artificial Sequence: Synthetic oligonucleotide
ccaaauccgugucugggaa

SEQ ID NO: 1059981 - RNA, 19 nt, Artificial Sequence
  Description of Artificial Sequence: Synthetic oligonucleotide
gaggagccgaugagcgcac

SEQ ID NO: 1059982 - RNA, 19 nt, Artificial Sequence
  Description of Artificial Sequence: Synthetic oligonucleotide
uugcaccagaggagccgau

SEQ ID NO: 1059983 - RNA, 19 nt, Artificial Sequence
  Description of Artificial Sequence: Synthetic oligonucleotide
caccgagggagcagauaca

SEQ ID NO: 1059984 - RNA, 19 nt, Artificial Sequence
  Description of Artificial Sequence: Synthetic oligonucleotide
ccaauagaguugcaucaaa

SEQ ID NO: 1059985 - RNA, 19 nt, Artificial Sequence
  Description of Artificial Sequence: Synthetic oligonucleotide
ccaugcaaguaagcacugc

SEQ ID NO: 1059986 - RNA, 19 nt, Artificial Sequence
  Description of Artificial Sequence: Synthetic oligonucleotide
acagugucguuagcaccaa

SEQ ID NO: 1059987 - RNA, 19 nt, Artificial Sequence
  Description of Artificial Sequence: Synthetic oligonucleotide
agggagcgauucauugcca

SEQ ID NO: 1059988 - RNA, 19 nt, Artificial Sequence
  Description of Artificial Sequence: Synthetic oligonucleotide
agguagauguugagacuuu

SEQ ID NO: 1059989 - RNA, 19 nt, Artificial Sequence
  Description of Artificial Sequence: Synthetic oligonucleotide
gcgcuucgcaauugccaag

SEQ ID NO: 1059990 - RNA, 19 nt, Artificial Sequence
  Description of Artificial Sequence: Synthetic oligonucleotide
uccggacaucugagcuaac

SEQ ID NO: 1059991 - RNA, 19 nt, Artificial Sequence
  Description of Artificial Sequence: Synthetic oligonucleotide
ccgcaacugggugaauucc

SEQ ID NO: 1059992 - RNA, 19 nt, Artificial Sequence
  Description of Artificial Sequence: Synthetic oligonucleotide
gccuugcucgguaagcauc

SEQ ID NO: 1059993 - RNA, 19 nt, Artificial Sequence
  Description of Artificial Sequence: Synthetic oligonucleotide
auucggcccgcaacugggu

SEQ ID NO: 1059994 - RNA, 19 nt, Artificial Sequence
  Description of Artificial Sequence: Synthetic oligonucleotide
uugguuuguggggcuucuu

SEQ ID NO: 1059995 - RNA, 19 nt, Artificial Sequence
  Description of Artificial Sequence: Synthetic oligonucleotide
uugccgagucgagcuguuc

SEQ ID NO: 1059996 - RNA, 19 nt, Artificial Sequence
  Description of Artificial Sequence: Synthetic oligonucleotide
ggucgaucauaaaugggau

SEQ ID NO: 1059997 - RNA, 19 nt, Artificial Sequence
  Description of Artificial Sequence: Synthetic oligonucleotide
agccuccaagaaucacauu

SEQ ID NO: 1059998 - RNA, 19 nt, Artificial Sequence
  Description of Artificial Sequence: Synthetic oligonucleotide
ggcauucggcccgcaacug

SEQ ID NO: 1059999 - RNA, 19 nt, Artificial Sequence
  Description of Artificial Sequence: Synthetic oligonucleotide
cugaauucacagugucguu

SEQ ID NO: 1060000 - RNA, 19 nt, Artificial Sequence
  Description of Artificial Sequence: Synthetic oligonucleotide
gagggagcagauacagauu

SEQ ID NO: 1060001 - RNA, 19 nt, Artificial Sequence
  Description of Artificial Sequence: Synthetic oligonucleotide
gccauugcuccggacaucu

SEQ ID NO: 1060002 - RNA, 19 nt, Artificial Sequence
  Description of Artificial Sequence: Synthetic oligonucleotide
ccuugcucgguaagcaucu

SEQ ID NO: 1060003 - RNA, 19 nt, Artificial Sequence
  Description of Artificial Sequence: Synthetic oligonucleotide
cagcgaccagcugaggcaa

SEQ ID NO: 1060004 - RNA, 19 nt, Artificial Sequence
  Description of Artificial Sequence: Synthetic oligonucleotide
gcuccggacaucugagcua

SEQ ID NO: 1060005 - RNA, 19 nt, Artificial Sequence
  Description of Artificial Sequence: Synthetic oligonucleotide
auugccgagucgagcuguu

SEQ ID NO: 1060006 - RNA, 19 nt, Artificial Sequence
  Description of Artificial Sequence: Synthetic oligonucleotide
aggccguaaccuggaguaa

SEQ ID NO: 1060007 - RNA, 19 nt, Artificial Sequence
  Description of Artificial Sequence: Synthetic oligonucleotide
ccgcccagggcaccaacac

SEQ ID NO: 1060008 - RNA, 19 nt, Artificial Sequence
  Description of Artificial Sequence: Synthetic oligonucleotide
gggaucugugggucgcuua

SEQ ID NO: 1060009 - RNA, 19 nt, Artificial Sequence
  Description of Artificial Sequence: Synthetic oligonucleotide
gcacaagccugagcccaag

SEQ ID NO: 1060010 - RNA, 19 nt, Artificial Sequence
  Description of Artificial Sequence: Synthetic oligonucleotide
caccggcuguugaaguugu

SEQ ID NO: 1060011 - RNA, 19 nt, Artificial Sequence
  Description of Artificial Sequence: Synthetic oligonucleotide
ccggacaucugagcuaaca

SEQ ID NO: 1060012 - RNA, 19 nt, Artificial Sequence
  Description of Artificial Sequence: Synthetic oligonucleotide
gcccaaguacaugaucucu

SEQ ID NO: 1060013 - RNA, 19 nt, Artificial Sequence
  Description of Artificial Sequence: Synthetic oligonucleotide
gggagcagauacagauuaa

SEQ ID NO: 1060014 - RNA, 19 nt, Artificial Sequence
  Description of Artificial Sequence: Synthetic oligonucleotide
gcaccaccgagggagcaga

SEQ ID NO: 1060015 - RNA, 19 nt, Artificial Sequence
  Description of Artificial Sequence: Synthetic oligonucleotide
cacaagccugagcccaagu

SEQ ID NO: 1060016 - RNA, 19 nt, Artificial Sequence
  Description of Artificial Sequence: Synthetic oligonucleotide
gcagaucuugacacucucu

SEQ ID NO: 1060017 - RNA, 19 nt, Artificial Sequence
  Description of Artificial Sequence: Synthetic oligonucleotide
cacggagcccagacaggua

SEQ ID NO: 1060018 - RNA, 19 nt, Artificial Sequence
  Description of Artificial Sequence: Synthetic oligonucleotide
ccaaaucggcaauggggua

SEQ ID NO: 1060019 - RNA, 19 nt, Artificial Sequence
  Description of Artificial Sequence: Synthetic oligonucleotide
ccacggcggcauaaccaac

SEQ ID NO: 1060020 - RNA, 19 nt, Artificial Sequence
  Description of Artificial Sequence: Synthetic oligonucleotide
gcggcauaaccaacaccca

SEQ ID NO: 1060021 - RNA, 19 nt, Artificial Sequence
  Description of Artificial Sequence: Synthetic oligonucleotide
gcgcacccacaauggucag

SEQ ID NO: 1060022 - RNA, 19 nt, Artificial Sequence
  Description of Artificial Sequence: Synthetic oligonucleotide
gccguaaccuggaguaaua

SEQ ID NO: 1060023 - RNA, 19 nt, Artificial Sequence
  Description of Artificial Sequence: Synthetic oligonucleotide
gccgaugagcgcacccaca

SEQ ID NO: 1060024 - RNA, 19 nt, Artificial Sequence
  Description of Artificial Sequence: Synthetic oligonucleotide
ccgagggagcagauacaga

SEQ ID NO: 1060025 - RNA, 19 nt, Artificial Sequence
  Description of Artificial Sequence: Synthetic oligonucleotide
ccguaaccuggaguaauaa

SEQ ID NO: 1060026 - RNA, 19 nt, Artificial Sequence
  Description of Artificial Sequence: Synthetic oligonucleotide
ggccguaaccuggaguaau

SEQ ID NO: 1060027 - RNA, 19 nt, Artificial Sequence
  Description of Artificial Sequence: Synthetic oligonucleotide
ccucuugagcggcugaauu

SEQ ID NO: 1060028 - RNA, 19 nt, Artificial Sequence
  Description of Artificial Sequence: Synthetic oligonucleotide
gcggcugaauucacagugu

SEQ ID NO: 1060029 - RNA, 19 nt, Artificial Sequence
  Description of Artificial Sequence: Synthetic oligonucleotide
cugggaaaucaugguugau

SEQ ID NO: 1060030 - RNA, 19 nt, Artificial Sequence
  Description of Artificial Sequence: Synthetic oligonucleotide
accggcuguugaaguugua

SEQ ID NO: 1060031 - RNA, 19 nt, Artificial Sequence
  Description of Artificial Sequence: Synthetic oligonucleotide
cagugucguuagcaccaau

SEQ ID NO: 1060032 - RNA, 19 nt, Artificial Sequence
  Description of Artificial Sequence: Synthetic oligonucleotide
gcgaccagcugaggcaagu

SEQ ID NO: 1060033 - RNA, 19 nt, Artificial Sequence
  Description of Artificial Sequence: Synthetic oligonucleotide
cuugcucgguaagcaucuu

SEQ ID NO: 1060034 - RNA, 19 nt, Artificial Sequence
  Description of Artificial Sequence: Synthetic oligonucleotide
gcagagcaucacacgucuu

SEQ ID NO: 1060035 - RNA, 19 nt, Artificial Sequence
  Description of Artificial Sequence: Synthetic oligonucleotide
cgaugagcgcacccacaau

SEQ ID NO: 1060036 - RNA, 19 nt, Artificial Sequence
  Description of Artificial Sequence: Synthetic oligonucleotide
cggcccgcaacugggugaa

SEQ ID NO: 1060037 - RNA, 19 nt, Artificial Sequence
  Description of Artificial Sequence: Synthetic oligonucleotide
ggcccgcaacugggugaau

SEQ ID NO: 1060038 - RNA, 19 nt, Artificial Sequence
  Description of Artificial Sequence: Synthetic oligonucleotide
cauaauaaagauuuggucg

SEQ ID NO: 1060039 - RNA, 19 nt, Artificial Sequence
  Description of Artificial Sequence: Synthetic oligonucleotide
aguaaaugauuccugaucg

SEQ ID NO: 1060040 - RNA, 19 nt, Artificial Sequence
  Description of Artificial Sequence: Synthetic oligonucleotide
uccauaagagagaugaugg

SEQ ID NO: 1060041 - RNA, 19 nt, Artificial Sequence
  Description of Artificial Sequence: Synthetic oligonucleotide
aaagccguaguacagaaug

SEQ ID NO: 1060042 - RNA, 19 nt, Artificial Sequence
  Description of Artificial Sequence: Synthetic oligonucleotide
aauggcaagccucagauga

SEQ ID NO: 1060043 - RNA, 19 nt, Artificial Sequence
  Description of Artificial Sequence: Synthetic oligonucleotide
accaccaucgagcugaucc

SEQ ID NO: 1060044 - RNA, 19 nt, Artificial Sequence
  Description of Artificial Sequence: Synthetic oligonucleotide
uguguaagauacaaaauug

SEQ ID NO: 1060045 - RNA, 19 nt, Artificial Sequence
  Description of Artificial Sequence: Synthetic oligonucleotide
gauuagguaacacucaggc

SEQ ID NO: 1060046 - RNA, 19 nt, Artificial Sequence
  Description of Artificial Sequence: Synthetic oligonucleotide
uuagguaacacucaggcau

SEQ ID NO: 1060047 - RNA, 19 nt, Artificial Sequence
  Description of Artificial Sequence: Synthetic oligonucleotide
uaaacuaaugguaacuugu

SEQ ID NO: 1060048 - RNA, 19 nt, Artificial Sequence
  Description of Artificial Sequence: Synthetic oligonucleotide
uacguaaacaguuauuuug

SEQ ID NO: 1060049 - RNA, 19 nt, Artificial Sequence
  Description of Artificial Sequence: Synthetic oligonucleotide
aggccuagaaaucaugucc

SEQ ID NO: 1060050 - RNA, 19 nt, Artificial Sequence
  Description of Artificial Sequence: Synthetic oligonucleotide
aacuauaaaagugauccag

SEQ ID NO: 1060051 - RNA, 19 nt, Artificial Sequence
  Description of Artificial Sequence: Synthetic oligonucleotide
ugauggaugacaaaccuca

SEQ ID NO: 1060052 - RNA, 19 nt, Artificial Sequence
  Description of Artificial Sequence: Synthetic oligonucleotide
uuugagauacugcugcagg

SEQ ID NO: 1060053 - RNA, 19 nt, Artificial Sequence
  Description of Artificial Sequence: Synthetic oligonucleotide
ucuagucuggacaugaaca

SEQ ID NO: 1060054 - RNA, 19 nt, Artificial Sequence
  Description of Artificial Sequence: Synthetic oligonucleotide
uguugugcgaucaacacac

SEQ ID NO: 1060055 - RNA, 19 nt, Artificial Sequence
  Description of Artificial Sequence: Synthetic oligonucleotide
uguguaugaacccuggucu

SEQ ID NO: 1060056 - RNA, 19 nt, Artificial Sequence
  Description of Artificial Sequence: Synthetic oligonucleotide
aaugauggaugacaaaccu

SEQ ID NO: 1060057 - RNA, 19 nt, Artificial Sequence
  Description of Artificial Sequence: Synthetic oligonucleotide
aagauuagguaacacucag

SEQ ID NO: 1060058 - RNA, 19 nt, Artificial Sequence
  Description of Artificial Sequence: Synthetic oligonucleotide
ugauaguaauucuccaugg

SEQ ID NO: 1060059 - RNA, 19 nt, Artificial Sequence
  Description of Artificial Sequence: Synthetic oligonucleotide
cuugcuuauauucuggcag

SEQ ID NO: 1060060 - RNA, 19 nt, Artificial Sequence
  Description of Artificial Sequence: Synthetic oligonucleotide
caacaaaaggucuuuacag

SEQ ID NO: 1060061 - RNA, 19 nt, Artificial Sequence
  Description of Artificial Sequence: Synthetic oligonucleotide
ugaaugauggaugacaaac

SEQ ID NO: 1060062 - RNA, 19 nt, Artificial Sequence
  Description of Artificial Sequence: Synthetic oligonucleotide
uauucuggcaguacgacac

SEQ ID NO: 1060063 - RNA, 19 nt, Artificial Sequence
  Description of Artificial Sequence: Synthetic oligonucleotide
uggauuugcucauugaaug

SEQ ID NO: 1060064 - RNA, 19 nt, Artificial Sequence
  Description of Artificial Sequence: Synthetic oligonucleotide
ucauaauaaagauuugguc

SEQ ID NO: 1060065 - RNA, 19 nt, Artificial Sequence
  Description of Artificial Sequence: Synthetic oligonucleotide
uccaugaccaccaucgagc

SEQ ID NO: 1060066 - RNA, 19 nt, Artificial Sequence
  Description of Artificial Sequence: Synthetic oligonucleotide
ucaggcaucaucaaguuuu

SEQ ID NO: 1060067 - RNA, 19 nt, Artificial Sequence
  Description of Artificial Sequence: Synthetic oligonucleotide
ucagauacgagaugguagc

SEQ ID NO: 1060068 - RNA, 19 nt, Artificial Sequence
  Description of Artificial Sequence: Synthetic oligonucleotide
auauuggcaugguaagugc

SEQ ID NO: 1060069 - RNA, 19 nt, Artificial Sequence
  Description of Artificial Sequence: Synthetic oligonucleotide
aacuguagcuacaaccacc

SEQ ID NO: 1060070 - RNA, 19 nt, Artificial Sequence
  Description of Artificial Sequence: Synthetic oligonucleotide
cugaauaugucuccaaagc

SEQ ID NO: 1060071 - RNA, 19 nt, Artificial Sequence
  Description of Artificial Sequence: Synthetic oligonucleotide
agaagacuagcucuggauc

SEQ ID NO: 1060072 - RNA, 19 nt, Artificial Sequence
  Description of Artificial Sequence: Synthetic oligonucleotide
aaauauagcuuuauaugug

SEQ ID NO: 1060073 - RNA, 19 nt, Artificial Sequence
  Description of Artificial Sequence: Synthetic oligonucleotide
gaagacuagcucuggaucc

SEQ ID NO: 1060074 - RNA, 19 nt, Artificial Sequence
  Description of Artificial Sequence: Synthetic oligonucleotide
uucaaaacaugguuaguug

SEQ ID NO: 1060075 - RNA, 19 nt, Artificial Sequence
  Description of Artificial Sequence: Synthetic oligonucleotide
agugccuuauaaucaggcc

SEQ ID NO: 1060076 - RNA, 19 nt, Artificial Sequence
  Description of Artificial Sequence: Synthetic oligonucleotide
guaaacaguuauuuugugc

SEQ ID NO: 1060077 - RNA, 19 nt, Artificial Sequence
  Description of Artificial Sequence: Synthetic oligonucleotide
aaaaggucuuuacagcagu

SEQ ID NO: 1060078 - RNA, 19 nt, Artificial Sequence
  Description of Artificial Sequence: Synthetic oligonucleotide
uaguacagaaugcagucug

SEQ ID NO: 1060079 - RNA, 19 nt, Artificial Sequence
  Description of Artificial Sequence: Synthetic oligonucleotide
uuauauucuggcaguacga

SEQ ID NO: 1060080 - RNA, 19 nt, Artificial Sequence
  Description of Artificial Sequence: Synthetic oligonucleotide
caugaacccauuuucuucc

SEQ ID NO: 1060081 - RNA, 19 nt, Artificial Sequence
  Description of Artificial Sequence: Synthetic oligonucleotide
auguguaagauacaaaauu

SEQ ID NO: 1060082 - RNA, 19 nt, Artificial Sequence
  Description of Artificial Sequence: Synthetic oligonucleotide
ucauccacggcuauccgag

SEQ ID NO: 1060083 - RNA, 19 nt, Artificial Sequence
  Description of Artificial Sequence: Synthetic oligonucleotide
uaaagauuuggucgguuga

SEQ ID NO: 1060084 - RNA, 19 nt, Artificial Sequence
  Description of Artificial Sequence: Synthetic oligonucleotide
uaaaugauuccugaucgcc

SEQ ID NO: 1060085 - RNA, 19 nt, Artificial Sequence
  Description of Artificial Sequence: Synthetic oligonucleotide
ugugcauccuucaaaacau

SEQ ID NO: 1060086 - RNA, 19 nt, Artificial Sequence
  Description of Artificial Sequence: Synthetic oligonucleotide
agcaaugcacuucauccac

SEQ ID NO: 1060087 - RNA, 19 nt, Artificial Sequence
  Description of Artificial Sequence: Synthetic oligonucleotide
uccauauuggcaugguaag

SEQ ID NO: 1060088 - RNA, 19 nt, Artificial Sequence
  Description of Artificial Sequence: Synthetic oligonucleotide
uacgcuuucucuagucugg

SEQ ID NO: 1060089 - RNA, 19 nt, Artificial Sequence
  Description of Artificial Sequence: Synthetic oligonucleotide
uggguuauauucuucuucu

SEQ ID NO: 1060090 - RNA, 19 nt, Artificial Sequence
  Description of Artificial Sequence: Synthetic oligonucleotide
aacauacguaaacaguuau

SEQ ID NO: 1060091 - RNA, 19 nt, Artificial Sequence
  Description of Artificial Sequence: Synthetic oligonucleotide
aucuugaccaggucucugc

SEQ ID NO: 1060092 - RNA, 19 nt, Artificial Sequence
  Description of Artificial Sequence: Synthetic oligonucleotide
uuugugcaagauuagguaa

SEQ ID NO: 1060093 - RNA, 19 nt, Artificial Sequence
  Description of Artificial Sequence: Synthetic oligonucleotide
ugugcgaucaacacacgac

SEQ ID NO: 1060094 - RNA, 19 nt, Artificial Sequence
  Description of Artificial Sequence: Synthetic oligonucleotide
uuuugugcaagauuaggua

SEQ ID NO: 1060095 - RNA, 19 nt, Artificial Sequence
  Description of Artificial Sequence: Synthetic oligonucleotide
uccucaauaaagucuucag

SEQ ID NO: 1060096 - RNA, 19 nt, Artificial Sequence
  Description of Artificial Sequence: Synthetic oligonucleotide
guagucuucuuugagauac

SEQ ID NO: 1060097 - RNA, 19 nt, Artificial Sequence
  Description of Artificial Sequence: Synthetic oligonucleotide
uauucaccauuucagcaug

SEQ ID NO: 1060098 - RNA, 19 nt, Artificial Sequence
  Description of Artificial Sequence: Synthetic oligonucleotide
uuggucgguugaaagaugc

SEQ ID NO: 1060099 - RNA, 19 nt, Artificial Sequence
  Description of Artificial Sequence: Synthetic oligonucleotide
auaguaauucuccauggau

SEQ ID NO: 1060100 - RNA, 19 nt, Artificial Sequence
  Description of Artificial Sequence: Synthetic oligonucleotide
agauuuggucgguugaaag

SEQ ID NO: 1060101 - RNA, 19 nt, Artificial Sequence
  Description of Artificial Sequence: Synthetic oligonucleotide
aagauguccuuucuagcca

SEQ ID NO: 1060102 - RNA, 19 nt, Artificial Sequence
  Description of Artificial Sequence: Synthetic oligonucleotide
uuugccgaaccucauaaua

SEQ ID NO: 1060103 - RNA, 19 nt, Artificial Sequence
  Description of Artificial Sequence: Synthetic oligonucleotide
ucuucucggggaaggaccg

SEQ ID NO: 1060104 - RNA, 19 nt, Artificial Sequence
  Description of Artificial Sequence: Synthetic oligonucleotide
aauaugucuccaaagccgu

SEQ ID NO: 1060105 - RNA, 19 nt, Artificial Sequence
  Description of Artificial Sequence: Synthetic oligonucleotide
aguaauucuccauggauuu

SEQ ID NO: 1060106 - RNA, 19 nt, Artificial Sequence
  Description of Artificial Sequence: Synthetic oligonucleotide
uauauguguaagauacaaa

SEQ ID NO: 1060107 - RNA, 19 nt, Artificial Sequence
  Description of Artificial Sequence: Synthetic oligonucleotide
aaaacaugguuaguugcug

SEQ ID NO: 1060108 - RNA, 19 nt, Artificial Sequence
  Description of Artificial Sequence: Synthetic oligonucleotide
aaacaugguuaguugcugu

SEQ ID NO: 1060109 - RNA, 19 nt, Artificial Sequence
  Description of Artificial Sequence: Synthetic oligonucleotide
uauuggcaugguaagugcc

SEQ ID NO: 1060110 - RNA, 19 nt, Artificial Sequence
  Description of Artificial Sequence: Synthetic oligonucleotide
uaucguccauuaaugagcu

SEQ ID NO: 1060111 - RNA, 19 nt, Artificial Sequence
  Description of Artificial Sequence: Synthetic oligonucleotide
auuaacuauaaaagugauc

SEQ ID NO: 1060112 - RNA, 19 nt, Artificial Sequence
  Description of Artificial Sequence: Synthetic oligonucleotide
gugcgaucaacacacgacg

SEQ ID NO: 1060113 - RNA, 19 nt, Artificial Sequence
  Description of Artificial Sequence: Synthetic oligonucleotide
guagcguaagcugugaagc

SEQ ID NO: 1060114 - RNA, 19 nt, Artificial Sequence
  Description of Artificial Sequence: Synthetic oligonucleotide
aauuaacuauaaaagugau

SEQ ID NO: 1060115 - RNA, 19 nt, Artificial Sequence
  Description of Artificial Sequence: Synthetic oligonucleotide
cacgaacauacguaaacag

SEQ ID NO: 1060116 - RNA, 19 nt, Artificial Sequence
  Description of Artificial Sequence: Synthetic oligonucleotide
cauauuggcaugguaagug

SEQ ID NO: 1060117 - RNA, 19 nt, Artificial Sequence
  Description of Artificial Sequence: Synthetic oligonucleotide
uggagugagcuuuucauuc

SEQ ID NO: 1060118 - RNA, 19 nt, Artificial Sequence
  Description of Artificial Sequence: Synthetic oligonucleotide
cuuagaaccagauggcuga

SEQ ID NO: 1060119 - RNA, 19 nt, Artificial Sequence
  Description of Artificial Sequence: Synthetic oligonucleotide
accaccugaaguucauugg

SEQ ID NO: 1060120 - RNA, 19 nt, Artificial Sequence
  Description of Artificial Sequence: Synthetic oligonucleotide
uugugcaagauuagguaac

SEQ ID NO: 1060121 - RNA, 19 nt, Artificial Sequence
  Description of Artificial Sequence: Synthetic oligonucleotide
ugauccugaauaugucucc

SEQ ID NO: 1060122 - RNA, 19 nt, Artificial Sequence
  Description of Artificial Sequence: Synthetic oligonucleotide
uacgacaccaucucauaca

SEQ ID NO: 1060123 - RNA, 19 nt, Artificial Sequence
  Description of Artificial Sequence: Synthetic oligonucleotide
cuucauacgcuuucucuag

SEQ ID NO: 1060124 - RNA, 19 nt, Artificial Sequence
  Description of Artificial Sequence: Synthetic oligonucleotide
gauuuggucgguugaaaga

SEQ ID NO: 1060125 - RNA, 19 nt, Artificial Sequence
  Description of Artificial Sequence: Synthetic oligonucleotide
caugguuaguugcuguugc

SEQ ID NO: 1060126 - RNA, 19 nt, Artificial Sequence
  Description of Artificial Sequence: Synthetic oligonucleotide
uguguucuuagaaccagau

SEQ ID NO: 1060127 - RNA, 19 nt, Artificial Sequence
  Description of Artificial Sequence: Synthetic oligonucleotide
augaccaccaucgagcuga

SEQ ID NO: 1060128 - RNA, 19 nt, Artificial Sequence
  Description of Artificial Sequence: Synthetic oligonucleotide
aagccucagaugaugcagc

SEQ ID NO: 1060129 - RNA, 19 nt, Artificial Sequence
  Description of Artificial Sequence: Synthetic oligonucleotide
ucauacaacuucugcugcc

SEQ ID NO: 1060130 - RNA, 19 nt, Artificial Sequence
  Description of Artificial Sequence: Synthetic oligonucleotide
cugaucgcccuuuguaucg

SEQ ID NO: 1060131 - RNA, 19 nt, Artificial Sequence
  Description of Artificial Sequence: Synthetic oligonucleotide
gauaguaauucuccaugga

SEQ ID NO: 1060132 - RNA, 19 nt, Artificial Sequence
  Description of Artificial Sequence: Synthetic oligonucleotide
auacgcuuucucuagucug

SEQ ID NO: 1060133 - RNA, 19 nt, Artificial Sequence
  Description of Artificial Sequence: Synthetic oligonucleotide
uagacuucuggaaguuucc

SEQ ID NO: 1060134 - RNA, 19 nt, Artificial Sequence
  Description of Artificial Sequence: Synthetic oligonucleotide
acgcccacucucuugauag

SEQ ID NO: 1060135 - RNA, 19 nt, Artificial Sequence
  Description of Artificial Sequence: Synthetic oligonucleotide
uugccgaaccucauaauaa

SEQ ID NO: 1060136 - RNA, 19 nt, Artificial Sequence
  Description of Artificial Sequence: Synthetic oligonucleotide
cugcaaagugacagcaugg

SEQ ID NO: 1060137 - RNA, 19 nt, Artificial Sequence
  Description of Artificial Sequence: Synthetic oligonucleotide
agucaucgcgaccugcacg

SEQ ID NO: 1060138 - RNA, 19 nt, Artificial Sequence
  Description of Artificial Sequence: Synthetic oligonucleotide
ugcucauugaaugauggau

SEQ ID NO: 1060139 - RNA, 19 nt, Artificial Sequence
  Description of Artificial Sequence: Synthetic oligonucleotide
ucacaaguguaaaaccauc

SEQ ID NO: 1060140 - RNA, 19 nt, Artificial Sequence
  Description of Artificial Sequence: Synthetic oligonucleotide
gagucagucuuccagcuuc

SEQ ID NO: 1060141 - RNA, 19 nt, Artificial Sequence
  Description of Artificial Sequence: Synthetic oligonucleotide
aagccguaguacagaaugc

SEQ ID NO: 1060142 - RNA, 19 nt, Artificial Sequence
  Description of Artificial Sequence: Synthetic oligonucleotide
uuccccuuuugcaucugcg

SEQ ID NO: 1060143 - RNA, 19 nt, Artificial Sequence
  Description of Artificial Sequence: Synthetic oligonucleotide
uguaaacuaaugguaacuu

SEQ ID NO: 1060144 - RNA, 19 nt, Artificial Sequence
  Description of Artificial Sequence: Synthetic oligonucleotide
aguucauuggcugaccacu

SEQ ID NO: 1060145 - RNA, 19 nt, Artificial Sequence
  Description of Artificial Sequence: Synthetic oligonucleotide
uuacaauguccucaauaaa

SEQ ID NO: 1060146 - RNA, 19 nt, Artificial Sequence
  Description of Artificial Sequence: Synthetic oligonucleotide
uucguugcucagaagacua

SEQ ID NO: 1060147 - RNA, 19 nt, Artificial Sequence
  Description of Artificial Sequence: Synthetic oligonucleotide
ugcacgaauucccaguuuu

SEQ ID NO: 1060148 - RNA, 19 nt, Artificial Sequence
  Description of Artificial Sequence: Synthetic oligonucleotide
cugauccugaauaugucuc

SEQ ID NO: 1060149 - RNA, 19 nt, Artificial Sequence
  Description of Artificial Sequence: Synthetic oligonucleotide
cuucaagaugccgagugcc

SEQ ID NO: 1060150 - RNA, 19 nt, Artificial Sequence
  Description of Artificial Sequence: Synthetic oligonucleotide
ggcuuaucaauucccaugc

SEQ ID NO: 1060151 - RNA, 19 nt, Artificial Sequence
  Description of Artificial Sequence: Synthetic oligonucleotide
uacaaccaccugaaguuca

SEQ ID NO: 1060152 - RNA, 19 nt, Artificial Sequence
  Description of Artificial Sequence: Synthetic oligonucleotide
ugccuuauaaucaggccua

SEQ ID NO: 1060153 - RNA, 19 nt, Artificial Sequence
  Description of Artificial Sequence: Synthetic oligonucleotide
augggcaaaucacaagugu

SEQ ID NO: 1060154 - RNA, 19 nt, Artificial Sequence
  Description of Artificial Sequence: Synthetic oligonucleotide
ucucgagucaucgcgaccu

SEQ ID NO: 1060155 - RNA, 19 nt, Artificial Sequence
  Description of Artificial Sequence: Synthetic oligonucleotide
ucagaagacuagcucugga

SEQ ID NO: 1060156 - RNA, 19 nt, Artificial Sequence
  Description of Artificial Sequence: Synthetic oligonucleotide
uccgagucagucuuccagc

SEQ ID NO: 1060157 - RNA, 19 nt, Artificial Sequence
  Description of Artificial Sequence: Synthetic oligonucleotide
acggcuauccgagucaguc

SEQ ID NO: 1060158 - RNA, 19 nt, Artificial Sequence
  Description of Artificial Sequence: Synthetic oligonucleotide
cauugaaugauggaugaca

SEQ ID NO: 1060159 - RNA, 19 nt, Artificial Sequence
  Description of Artificial Sequence: Synthetic oligonucleotide
gucaucgcgaccugcacgc

SEQ ID NO: 1060160 - RNA, 19 nt, Artificial Sequence
  Description of Artificial Sequence: Synthetic oligonucleotide
ucuagccauggugacauug

SEQ ID NO: 1060161 - RNA, 19 nt, Artificial Sequence
  Description of Artificial Sequence: Synthetic oligonucleotide
ggucuuaucuucugguucc

SEQ ID NO: 1060162 - RNA, 19 nt, Artificial Sequence
  Description of Artificial Sequence: Synthetic oligonucleotide
cugcucucgagucaucgcg

SEQ ID NO: 1060163 - RNA, 19 nt, Artificial Sequence
  Description of Artificial Sequence: Synthetic oligonucleotide
ugccgagugccuuauaauc

SEQ ID NO: 1060164 - RNA, 19 nt, Artificial Sequence
  Description of Artificial Sequence: Synthetic oligonucleotide
ugggcaaaucacaagugua

SEQ ID NO: 1060165 - RNA, 19 nt, Artificial Sequence
  Description of Artificial Sequence: Synthetic oligonucleotide
uacgagaugguagcguaag

SEQ ID NO: 1060166 - RNA, 19 nt, Artificial Sequence
  Description of Artificial Sequence: Synthetic oligonucleotide
uugugcgaucaacacacga

SEQ ID NO: 1060167 - RNA, 19 nt, Artificial Sequence
  Description of Artificial Sequence: Synthetic oligonucleotide
cuguguaugaacccugguc

SEQ ID NO: 1060168 - RNA, 19 nt, Artificial Sequence
  Description of Artificial Sequence: Synthetic oligonucleotide
agucuggacaugaacaucu

SEQ ID NO: 1060169 - RNA, 19 nt, Artificial Sequence
  Description of Artificial Sequence: Synthetic oligonucleotide
aaaccucacaucuggcuua

SEQ ID NO: 1060170 - RNA, 19 nt, Artificial Sequence
  Description of Artificial Sequence: Synthetic oligonucleotide
auauucuggcaguacgaca

SEQ ID NO: 1060171 - RNA, 19 nt, Artificial Sequence
  Description of Artificial Sequence: Synthetic oligonucleotide
gauccaaccuucagauacg

SEQ ID NO: 1060172 - RNA, 19 nt, Artificial Sequence
  Description of Artificial Sequence: Synthetic oligonucleotide
uuuggucgguugaaagaug

SEQ ID NO: 1060173 - RNA, 19 nt, Artificial Sequence
  Description of Artificial Sequence: Synthetic oligonucleotide
guuaguugcuguugcaguc

SEQ ID NO: 1060174 - RNA, 19 nt, Artificial Sequence
  Description of Artificial Sequence: Synthetic oligonucleotide
uuccgaauggcaagccuca

SEQ ID NO: 1060175 - RNA, 19 nt, Artificial Sequence
  Description of Artificial Sequence: Synthetic oligonucleotide
auuuggucgguugaaagau

SEQ ID NO: 1060176 - RNA, 19 nt, Artificial Sequence
  Description of Artificial Sequence: Synthetic oligonucleotide
uagaaaucauguccccacu

SEQ ID NO: 1060177 - RNA, 19 nt, Artificial Sequence
  Description of Artificial Sequence: Synthetic oligonucleotide
ugcacgcccacucucuuga

SEQ ID NO: 1060178 - RNA, 19 nt, Artificial Sequence
  Description of Artificial Sequence: Synthetic oligonucleotide
ugcgaucaacacacgacga

SEQ ID NO: 1060179 - RNA, 19 nt, Artificial Sequence
  Description of Artificial Sequence: Synthetic oligonucleotide
accuccugugggcaugacc

SEQ ID NO: 1060180 - RNA, 19 nt, Artificial Sequence
  Description of Artificial Sequence: Synthetic oligonucleotide
uggcaguacgacaccaucu

SEQ ID NO: 1060181 - RNA, 19 nt, Artificial Sequence
  Description of Artificial Sequence: Synthetic oligonucleotide
uguuacaggcgucugcauu

SEQ ID NO: 1060182 - RNA, 19 nt, Artificial Sequence
  Description of Artificial Sequence: Synthetic oligonucleotide
uggcugaccacuguguaug

SEQ ID NO: 1060183 - RNA, 19 nt, Artificial Sequence
  Description of Artificial Sequence: Synthetic oligonucleotide
gaugccgagugccuuauaa

SEQ ID NO: 1060184 - RNA, 19 nt, Artificial Sequence
  Description of Artificial Sequence: Synthetic oligonucleotide
gaucaacacacgacgacac

SEQ ID NO: 1060185 - RNA, 19 nt, Artificial Sequence
  Description of Artificial Sequence: Synthetic oligonucleotide
ugcguguuccgaauggcaa

SEQ ID NO: 1060186 - RNA, 19 nt, Artificial Sequence
  Description of Artificial Sequence: Synthetic oligonucleotide
gaaguucauuggcugacca

SEQ ID NO: 1060187 - RNA, 19 nt, Artificial Sequence
  Description of Artificial Sequence: Synthetic oligonucleotide
ucuugaccaggucucugca

SEQ ID NO: 1060188 - RNA, 19 nt, Artificial Sequence
  Description of Artificial Sequence: Synthetic oligonucleotide
uguuccgaauggcaagccu

SEQ ID NO: 1060189 - RNA, 19 nt, Artificial Sequence
  Description of Artificial Sequence: Synthetic oligonucleotide
uuaguugcuguugcaguca

SEQ ID NO: 1060190 - RNA, 19 nt, Artificial Sequence
  Description of Artificial Sequence: Synthetic oligonucleotide
ugugcaagauuagguaaca

SEQ ID NO: 1060191 - RNA, 19 nt, Artificial Sequence
  Description of Artificial Sequence: Synthetic oligonucleotide
gaugggcaaaucacaagug

SEQ ID NO: 1060192 - RNA, 19 nt, Artificial Sequence
  Description of Artificial Sequence: Synthetic oligonucleotide
gguagcguaagcugugaag

SEQ ID NO: 1060193 - RNA, 19 nt, Artificial Sequence
  Description of Artificial Sequence: Synthetic oligonucleotide
uugacaguuuccagcugca

SEQ ID NO: 1060194 - RNA, 19 nt, Artificial Sequence
  Description of Artificial Sequence: Synthetic oligonucleotide
acguaaacaguuauuuugu

SEQ ID NO: 1060195 - RNA, 19 nt, Artificial Sequence
  Description of Artificial Sequence: Synthetic oligonucleotide
agauuagguaacacucagg

SEQ ID NO: 1060196 - RNA, 19 nt, Artificial Sequence
  Description of Artificial Sequence: Synthetic oligonucleotide
caacacacgacgacacuug

SEQ ID NO: 1060197 - RNA, 19 nt, Artificial Sequence
  Description of Artificial Sequence: Synthetic oligonucleotide
ugggcuucguugcucagaa

SEQ ID NO: 1060198 - RNA, 19 nt, Artificial Sequence
  Description of Artificial Sequence: Synthetic oligonucleotide
cacuguguaugaacccugg

SEQ ID NO: 1060199 - RNA, 19 nt, Artificial Sequence
  Description of Artificial Sequence: Synthetic oligonucleotide
acacuugcuuauauucugg

SEQ ID NO: 1060200 - RNA, 19 nt, Artificial Sequence
  Description of Artificial Sequence: Synthetic oligonucleotide
aaacuaaugguaacuuguu

SEQ ID NO: 1060201 - RNA, 19 nt, Artificial Sequence
  Description of Artificial Sequence: Synthetic oligonucleotide
auacguaaacaguuauuuu

SEQ ID NO: 1060202 - RNA, 19 nt, Artificial Sequence
  Description of Artificial Sequence: Synthetic oligonucleotide
guagacuucuggaaguuuc

SEQ ID NO: 1060203 - RNA, 19 nt, Artificial Sequence
  Description of Artificial Sequence: Synthetic oligonucleotide
ugccgaaccucauaauaaa

SEQ ID NO: 1060204 - RNA, 19 nt, Artificial Sequence
  Description of Artificial Sequence: Synthetic oligonucleotide
uagguaacacucaggcauc

SEQ ID NO: 1060205 - RNA, 19 nt, Artificial Sequence
  Description of Artificial Sequence: Synthetic oligonucleotide
agugauccagacacgaaca

SEQ ID NO: 1060206 - RNA, 19 nt, Artificial Sequence
  Description of Artificial Sequence: Synthetic oligonucleotide
ccugaauaugucuccaaag

SEQ ID NO: 1060207 - RNA, 19 nt, Artificial Sequence
  Description of Artificial Sequence: Synthetic oligonucleotide
acgaacauacguaaacagu

SEQ ID NO: 1060208 - RNA, 19 nt, Artificial Sequence
  Description of Artificial Sequence: Synthetic oligonucleotide
ucaacacacgacgacacuu

SEQ ID NO: 1060209 - RNA, 19 nt, Artificial Sequence
  Description of Artificial Sequence: Synthetic oligonucleotide
uguguggaccucgucaccu

SEQ ID NO: 1060210 - RNA, 19 nt, Artificial Sequence
  Description of Artificial Sequence: Synthetic oligonucleotide
uccugaucgcccuuuguau

SEQ ID NO: 1060211 - RNA, 19 nt, Artificial Sequence
  Description of Artificial Sequence: Synthetic oligonucleotide
ucugcucucgagucaucgc

SEQ ID NO: 1060212 - RNA, 19 nt, Artificial Sequence
  Description of Artificial Sequence: Synthetic oligonucleotide
uucauuggcugaccacugu

SEQ ID NO: 1060213 - RNA, 19 nt, Artificial Sequence
  Description of Artificial Sequence: Synthetic oligonucleotide
ugguuccauauuggcaugg

SEQ ID NO: 1060214 - RNA, 19 nt, Artificial Sequence
  Description of Artificial Sequence: Synthetic oligonucleotide
ggcuucguugcucagaaga

SEQ ID NO: 1060215 - RNA, 19 nt, Artificial Sequence
  Description of Artificial Sequence: Synthetic oligonucleotide
acacaggauuuucugugca

SEQ ID NO: 1060216 - RNA, 19 nt, Artificial Sequence
  Description of Artificial Sequence: Synthetic oligonucleotide
uguccuuucuagccauggu

SEQ ID NO: 1060217 - RNA, 19 nt, Artificial Sequence
  Description of Artificial Sequence: Synthetic oligonucleotide
gguugaaagaugcuguaaa

SEQ ID NO: 1060218 - RNA, 19 nt, Artificial Sequence
  Description of Artificial Sequence: Synthetic oligonucleotide
gaauggcaagccucagaug

SEQ ID NO: 1060219 - RNA, 19 nt, Artificial Sequence
  Description of Artificial Sequence: Synthetic oligonucleotide
agagagaugaugggcaaau

SEQ ID NO: 1060220 - RNA, 19 nt, Artificial Sequence
  Description of Artificial Sequence: Synthetic oligonucleotide
agcuucaguggagugagcu

SEQ ID NO: 1060221 - RNA, 19 nt, Artificial Sequence
  Description of Artificial Sequence: Synthetic oligonucleotide
guacgacaccaucucauac

SEQ ID NO: 1060222 - RNA, 19 nt, Artificial Sequence
  Description of Artificial Sequence: Synthetic oligonucleotide
ugcucucgagucaucgcga

SEQ ID NO: 1060223 - RNA, 19 nt, Artificial Sequence
  Description of Artificial Sequence: Synthetic oligonucleotide
uagcguaagcugugaagcu

SEQ ID NO: 1060224 - RNA, 19 nt, Artificial Sequence
  Description of Artificial Sequence: Synthetic oligonucleotide
aucgcccuuuguaucgucc

SEQ ID NO: 1060225 - RNA, 19 nt, Artificial Sequence
  Description of Artificial Sequence: Synthetic oligonucleotide
agcugugaagcuguagucu

SEQ ID NO: 1060226 - RNA, 19 nt, Artificial Sequence
  Description of Artificial Sequence: Synthetic oligonucleotide
agauguccuuucuagccau

SEQ ID NO: 1060227 - RNA, 19 nt, Artificial Sequence
  Description of Artificial Sequence: Synthetic oligonucleotide
ggaaacuggcgcuucaaga

SEQ ID NO: 1060228 - RNA, 19 nt, Artificial Sequence
  Description of Artificial Sequence: Synthetic oligonucleotide
guagcuacaaccaccugaa

SEQ ID NO: 1060229 - RNA, 19 nt, Artificial Sequence
  Description of Artificial Sequence: Synthetic oligonucleotide
ucugcguguuccgaauggc

SEQ ID NO: 1060230 - RNA, 19 nt, Artificial Sequence
  Description of Artificial Sequence: Synthetic oligonucleotide
agauacgagaugguagcgu

SEQ ID NO: 1060231 - RNA, 19 nt, Artificial Sequence
  Description of Artificial Sequence: Synthetic oligonucleotide
gauuccugaucgcccuuug

SEQ ID NO: 1060232 - RNA, 19 nt, Artificial Sequence
  Description of Artificial Sequence: Synthetic oligonucleotide
caaaacaugguuaguugcu

SEQ ID NO: 1060233 - RNA, 19 nt, Artificial Sequence
  Description of Artificial Sequence: Synthetic oligonucleotide
aguacgacaccaucucaua

SEQ ID NO: 1060234 - RNA, 19 nt, Artificial Sequence
  Description of Artificial Sequence: Synthetic oligonucleotide
aucacaaguguaaaaccau

SEQ ID NO: 1060235 - RNA, 19 nt, Artificial Sequence
  Description of Artificial Sequence: Synthetic oligonucleotide
caacuguagcuacaaccac

SEQ ID NO: 1060236 - RNA, 19 nt, Artificial Sequence
  Description of Artificial Sequence: Synthetic oligonucleotide
gcucauugaaugauggaug

SEQ ID NO: 1060237 - RNA, 19 nt, Artificial Sequence
  Description of Artificial Sequence: Synthetic oligonucleotide
ucgagcugauccugaauau

SEQ ID NO: 1060238 - RNA, 19 nt, Artificial Sequence
  Description of Artificial Sequence: Synthetic oligonucleotide
acaggcgucugcauuccac

SEQ ID NO: 1060239 - RNA, 19 nt, Artificial Sequence
  Description of Artificial Sequence: Synthetic oligonucleotide
auguccucaauaaagucuu

SEQ ID NO: 1060240 - RNA, 19 nt, Artificial Sequence
  Description of Artificial Sequence: Synthetic oligonucleotide
uugggaaacuggcgcuuca

SEQ ID NO: 1060241 - RNA, 19 nt, Artificial Sequence
  Description of Artificial Sequence: Synthetic oligonucleotide
cuguaaaagucaaacacuu

SEQ ID NO: 1060242 - RNA, 19 nt, Artificial Sequence
  Description of Artificial Sequence: Synthetic oligonucleotide
gcaacuguagcuacaacca

SEQ ID NO: 1060243 - RNA, 19 nt, Artificial Sequence
  Description of Artificial Sequence: Synthetic oligonucleotide
gcaugaacccauuuucuuc

SEQ ID NO: 1060244 - RNA, 19 nt, Artificial Sequence
  Description of Artificial Sequence: Synthetic oligonucleotide
uuuugccgaaccucauaau

SEQ ID NO: 1060245 - RNA, 19 nt, Artificial Sequence
  Description of Artificial Sequence: Synthetic oligonucleotide
agccguaguacagaaugca

SEQ ID NO: 1060246 - RNA, 19 nt, Artificial Sequence
  Description of Artificial Sequence: Synthetic oligonucleotide
cauuaaugagcuuuacaau

SEQ ID NO: 1060247 - RNA, 19 nt, Artificial Sequence
  Description of Artificial Sequence: Synthetic oligonucleotide
ucgcccuuuguaucgucca

SEQ ID NO: 1060248 - RNA, 19 nt, Artificial Sequence
  Description of Artificial Sequence: Synthetic oligonucleotide
cauacguaaacaguuauuu

SEQ ID NO: 1060249 - RNA, 19 nt, Artificial Sequence
  Description of Artificial Sequence: Synthetic oligonucleotide
ugaacccauuuucuuccau

SEQ ID NO: 1060250 - RNA, 19 nt, Artificial Sequence
  Description of Artificial Sequence: Synthetic oligonucleotide
cagauacgagaugguagcg

SEQ ID NO: 1060251 - RNA, 19 nt, Artificial Sequence
  Description of Artificial Sequence: Synthetic oligonucleotide
ggccuagaaaucauguccc

SEQ ID NO: 1060252 - RNA, 19 nt, Artificial Sequence
  Description of Artificial Sequence: Synthetic oligonucleotide
guaagcugugaagcuguag

SEQ ID NO: 1060253 - RNA, 19 nt, Artificial Sequence
  Description of Artificial Sequence: Synthetic oligonucleotide
gcaaagugacagcaugggc

SEQ ID NO: 1060254 - RNA, 19 nt, Artificial Sequence
  Description of Artificial Sequence: Synthetic oligonucleotide
gaacauacguaaacaguua

SEQ ID NO: 1060255 - RNA, 19 nt, Artificial Sequence
  Description of Artificial Sequence: Synthetic oligonucleotide
ggucgguugaaagaugcug

SEQ ID NO: 1060256 - RNA, 19 nt, Artificial Sequence
  Description of Artificial Sequence: Synthetic oligonucleotide
uuacaggcgucugcauucc

SEQ ID NO: 1060257 - RNA, 19 nt, Artificial Sequence
  Description of Artificial Sequence: Synthetic oligonucleotide
ugacaguuuccagcugcag

SEQ ID NO: 1060258 - RNA, 19 nt, Artificial Sequence
  Description of Artificial Sequence: Synthetic oligonucleotide
aaucagcgagguguuggga

SEQ ID NO: 1060259 - RNA, 19 nt, Artificial Sequence
  Description of Artificial Sequence: Synthetic oligonucleotide
cuggcaguacgacaccauc

SEQ ID NO: 1060260 - RNA, 19 nt, Artificial Sequence
  Description of Artificial Sequence: Synthetic oligonucleotide
aggaccggggcgacgacac

SEQ ID NO: 1060261 - RNA, 19 nt, Artificial Sequence
  Description of Artificial Sequence: Synthetic oligonucleotide
uggucgguugaaagaugcu

SEQ ID NO: 1060262 - RNA, 19 nt, Artificial Sequence
  Description of Artificial Sequence: Synthetic oligonucleotide
ccaccugaaguucauuggc

SEQ ID NO: 1060263 - RNA, 19 nt, Artificial Sequence
  Description of Artificial Sequence: Synthetic oligonucleotide
ggcgcuucaagaugccgag

SEQ ID NO: 1060264 - RNA, 19 nt, Artificial Sequence
  Description of Artificial Sequence: Synthetic oligonucleotide
acacuucaucaaaauguug

SEQ ID NO: 1060265 - RNA, 19 nt, Artificial Sequence
  Description of Artificial Sequence: Synthetic oligonucleotide
ugguagcguaagcugugaa

SEQ ID NO: 1060266 - RNA, 19 nt, Artificial Sequence
  Description of Artificial Sequence: Synthetic oligonucleotide
uagucuggacaugaacauc

SEQ ID NO: 1060267 - RNA, 19 nt, Artificial Sequence
  Description of Artificial Sequence: Synthetic oligonucleotide
cuggauccaaccuucagau

SEQ ID NO: 1060268 - RNA, 19 nt, Artificial Sequence
  Description of Artificial Sequence: Synthetic oligonucleotide
cuuucucuagucuggacau

SEQ ID NO: 1060269 - RNA, 19 nt, Artificial Sequence
  Description of Artificial Sequence: Synthetic oligonucleotide
uggaccucgucaccugcaa

SEQ ID NO: 1060270 - RNA, 19 nt, Artificial Sequence
  Description of Artificial Sequence: Synthetic oligonucleotide
ggcaguacgacaccaucuc

SEQ ID NO: 1060271 - RNA, 19 nt, Artificial Sequence
  Description of Artificial Sequence: Synthetic oligonucleotide
augccgagugccuuauaau

SEQ ID NO: 1060272 - RNA, 19 nt, Artificial Sequence
  Description of Artificial Sequence: Synthetic oligonucleotide
caucgcgaccugcacgccc

SEQ ID NO: 1060273 - RNA, 19 nt, Artificial Sequence
  Description of Artificial Sequence: Synthetic oligonucleotide
gagucaucgcgaccugcac

SEQ ID NO: 1060274 - RNA, 19 nt, Artificial Sequence
  Description of Artificial Sequence: Synthetic oligonucleotide
cuacaaccaccugaaguuc

SEQ ID NO: 1060275 - RNA, 19 nt, Artificial Sequence
  Description of Artificial Sequence: Synthetic oligonucleotide
cugguuccauauuggcaug

SEQ ID NO: 1060276 - RNA, 19 nt, Artificial Sequence
  Description of Artificial Sequence: Synthetic oligonucleotide
gcuacaaccaccugaaguu

SEQ ID NO: 1060277 - RNA, 19 nt, Artificial Sequence
  Description of Artificial Sequence: Synthetic oligonucleotide
aucaggccuagaaaucaug

SEQ ID NO: 1060278 - RNA, 19 nt, Artificial Sequence
  Description of Artificial Sequence: Synthetic oligonucleotide
aggagagcaugugcaauga

SEQ ID NO: 1060279 - RNA, 19 nt, Artificial Sequence
  Description of Artificial Sequence: Synthetic oligonucleotide
gcaaaucacaaguguaaaa

SEQ ID NO: 1060280 - RNA, 19 nt, Artificial Sequence
  Description of Artificial Sequence: Synthetic oligonucleotide
cuucaaaacaugguuaguu

SEQ ID NO: 1060281 - RNA, 19 nt, Artificial Sequence
  Description of Artificial Sequence: Synthetic oligonucleotide
agacuucuggaaguuuccu

SEQ ID NO: 1060282 - RNA, 19 nt, Artificial Sequence
  Description of Artificial Sequence: Synthetic oligonucleotide
cgagguguugggaaacugg

SEQ ID NO: 1060283 - RNA, 19 nt, Artificial Sequence
  Description of Artificial Sequence: Synthetic oligonucleotide
caucugcguguuccgaaug

SEQ ID NO: 1060284 - RNA, 19 nt, Artificial Sequence
  Description of Artificial Sequence: Synthetic oligonucleotide
acuggcgcuucaagaugcc

SEQ ID NO: 1060285 - RNA, 19 nt, Artificial Sequence
  Description of Artificial Sequence: Synthetic oligonucleotide
ccgagugccuuauaaucag

SEQ ID NO: 1060286 - RNA, 19 nt, Artificial Sequence
  Description of Artificial Sequence: Synthetic oligonucleotide
cauugacaguuuccagcug

SEQ ID NO: 1060287 - RNA, 19 nt, Artificial Sequence
  Description of Artificial Sequence: Synthetic oligonucleotide
uguagacuucuggaaguuu

SEQ ID NO: 1060288 - RNA, 19 nt, Artificial Sequence
  Description of Artificial Sequence: Synthetic oligonucleotide
gcuucaagaugccgagugc

SEQ ID NO: 1060289 - RNA, 19 nt, Artificial Sequence
  Description of Artificial Sequence: Synthetic oligonucleotide
auauagcuuuauaugugua

SEQ ID NO: 1060290 - RNA, 19 nt, Artificial Sequence
  Description of Artificial Sequence: Synthetic oligonucleotide
ccgaaccucauaauaaaga

SEQ ID NO: 1060291 - RNA, 19 nt, Artificial Sequence
  Description of Artificial Sequence: Synthetic oligonucleotide
aaccagcuuuuaauuggga

SEQ ID NO: 1060292 - RNA, 19 nt, Artificial Sequence
  Description of Artificial Sequence: Synthetic oligonucleotide
acauacguaaacaguuauu

SEQ ID NO: 1060293 - RNA, 19 nt, Artificial Sequence
  Description of Artificial Sequence: Synthetic oligonucleotide
cucucgagucaucgcgacc

SEQ ID NO: 1060294 - RNA, 19 nt, Artificial Sequence
  Description of Artificial Sequence: Synthetic oligonucleotide
ucgagucaucgcgaccugc

SEQ ID NO: 1060295 - RNA, 19 nt, Artificial Sequence
  Description of Artificial Sequence: Synthetic oligonucleotide
aagaugccgagugccuuau

SEQ ID NO: 1060296 - RNA, 19 nt, Artificial Sequence
  Description of Artificial Sequence: Synthetic oligonucleotide
accucauaauaaagauuug

SEQ ID NO: 1060297 - RNA, 19 nt, Artificial Sequence
  Description of Artificial Sequence: Synthetic oligonucleotide
aaggaccggggcgacgaca

SEQ ID NO: 1060298 - RNA, 19 nt, Artificial Sequence
  Description of Artificial Sequence: Synthetic oligonucleotide
uuagaaccagauggcugaa

SEQ ID NO: 1060299 - RNA, 19 nt, Artificial Sequence
  Description of Artificial Sequence: Synthetic oligonucleotide
gauguccuuucuagccaug

SEQ ID NO: 1060300 - RNA, 19 nt, Artificial Sequence
  Description of Artificial Sequence: Synthetic oligonucleotide
gcguguuccgaauggcaag

SEQ ID NO: 1060301 - RNA, 19 nt, Artificial Sequence
  Description of Artificial Sequence: Synthetic oligonucleotide
cuguguggaccucgucacc

SEQ ID NO: 1060302 - RNA, 19 nt, Artificial Sequence
  Description of Artificial Sequence: Synthetic oligonucleotide
uuacagcaguugucacaca

SEQ ID NO: 1060303 - RNA, 19 nt, Artificial Sequence
  Description of Artificial Sequence: Synthetic oligonucleotide
uccgaauggcaagccucag

SEQ ID NO: 1060304 - RNA, 19 nt, Artificial Sequence
  Description of Artificial Sequence: Synthetic oligonucleotide
gcgaucaacacacgacgac

SEQ ID NO: 1060305 - RNA, 19 nt, Artificial Sequence
  Description of Artificial Sequence: Synthetic oligonucleotide
guugugcgaucaacacacg

SEQ ID NO: 1060306 - RNA, 19 nt, Artificial Sequence
  Description of Artificial Sequence: Synthetic oligonucleotide
agugagcuuuucauucagu

SEQ ID NO: 1060307 - RNA, 19 nt, Artificial Sequence
  Description of Artificial Sequence: Synthetic oligonucleotide
gcaaugcacuucauccacg

SEQ ID NO: 1060308 - RNA, 19 nt, Artificial Sequence
  Description of Artificial Sequence: Synthetic oligonucleotide
uacaggcgucugcauucca

SEQ ID NO: 1060309 - RNA, 19 nt, Artificial Sequence
  Description of Artificial Sequence: Synthetic oligonucleotide
caggcgucugcauuccaca

SEQ ID NO: 1060310 - RNA, 19 nt, Artificial Sequence
  Description of Artificial Sequence: Synthetic oligonucleotide
guuccauauuggcauggua

SEQ ID NO: 1060311 - RNA, 19 nt, Artificial Sequence
  Description of Artificial Sequence: Synthetic oligonucleotide
cugcguguuccgaauggca

SEQ ID NO: 1060312 - RNA, 19 nt, Artificial Sequence
  Description of Artificial Sequence: Synthetic oligonucleotide
aaccucacaucuggcuuau

SEQ ID NO: 1060313 - RNA, 19 nt, Artificial Sequence
  Description of Artificial Sequence: Synthetic oligonucleotide
cuggcgcuucaagaugccg

SEQ ID NO: 1060314 - RNA, 19 nt, Artificial Sequence
  Description of Artificial Sequence: Synthetic oligonucleotide
gcuuaucaauucccaugcc

SEQ ID NO: 1060315 - RNA, 19 nt, Artificial Sequence
  Description of Artificial Sequence: Synthetic oligonucleotide
gccgaaccucauaauaaag

SEQ ID NO: 1060316 - RNA, 19 nt, Artificial Sequence
  Description of Artificial Sequence: Synthetic oligonucleotide
cauacgcuuucucuagucu

SEQ ID NO: 1060317 - RNA, 19 nt, Artificial Sequence
  Description of Artificial Sequence: Synthetic oligonucleotide
ugguaagugccugcacgaa

SEQ ID NO: 1060318 - RNA, 19 nt, Artificial Sequence
  Description of Artificial Sequence: Synthetic oligonucleotide
cccuacguucuccaugacc

SEQ ID NO: 1060319 - RNA, 19 nt, Artificial Sequence
  Description of Artificial Sequence: Synthetic oligonucleotide
uggauccaaccuucagaua

SEQ ID NO: 1060320 - RNA, 19 nt, Artificial Sequence
  Description of Artificial Sequence: Synthetic oligonucleotide
ugauuccugaucgcccuuu

SEQ ID NO: 1060321 - RNA, 19 nt, Artificial Sequence
  Description of Artificial Sequence: Synthetic oligonucleotide
gugcaagauuagguaacac

SEQ ID NO: 1060322 - RNA, 19 nt, Artificial Sequence
  Description of Artificial Sequence: Synthetic oligonucleotide
cguaaacaguuauuuugug

SEQ ID NO: 1060323 - RNA, 19 nt, Artificial Sequence
  Description of Artificial Sequence: Synthetic oligonucleotide
ugaucgcccuuuguaucgu

SEQ ID NO: 1060324 - RNA, 19 nt, Artificial Sequence
  Description of Artificial Sequence: Synthetic oligonucleotide
gcuuauauucuggcaguac

SEQ ID NO: 1060325 - RNA, 19 nt, Artificial Sequence
  Description of Artificial Sequence: Synthetic oligonucleotide
acacgacgacacuugcuua

SEQ ID NO: 1060326 - RNA, 19 nt, Artificial Sequence
  Description of Artificial Sequence: Synthetic oligonucleotide
agguaacacucaggcauca

SEQ ID NO: 1060327 - RNA, 19 nt, Artificial Sequence
  Description of Artificial Sequence: Synthetic oligonucleotide
cagaagacuagcucuggau

SEQ ID NO: 1060328 - RNA, 19 nt, Artificial Sequence
  Description of Artificial Sequence: Synthetic oligonucleotide
ccugaucgcccuuuguauc

SEQ ID NO: 1060329 - RNA, 19 nt, Artificial Sequence
  Description of Artificial Sequence: Synthetic oligonucleotide
caaaccucacaucuggcuu

SEQ ID NO: 1060330 - RNA, 19 nt, Artificial Sequence
  Description of Artificial Sequence: Synthetic oligonucleotide
gaccggggcgacgacacca

SEQ ID NO: 1060331 - RNA, 19 nt, Artificial Sequence
  Description of Artificial Sequence: Synthetic oligonucleotide
gaucgcccuuuguaucguc

SEQ ID NO: 1060332 - RNA, 19 nt, Artificial Sequence
  Description of Artificial Sequence: Synthetic oligonucleotide
ccccuuuugcaucugcgug

SEQ ID NO: 1060333 - RNA, 19 nt, Artificial Sequence
  Description of Artificial Sequence: Synthetic oligonucleotide
cacacgacgacacuugcuu

SEQ ID NO: 1060334 - RNA, 19 nt, Artificial Sequence
  Description of Artificial Sequence: Synthetic oligonucleotide
cgcuucaagaugccgagug

SEQ ID NO: 1060335 - RNA, 19 nt, Artificial Sequence
  Description of Artificial Sequence: Synthetic oligonucleotide
augggcuucguugcucaga

SEQ ID NO: 1060336 - RNA, 19 nt, Artificial Sequence
  Description of Artificial Sequence: Synthetic oligonucleotide
gugcauccuucaaaacaug

SEQ ID NO: 1060337 - RNA, 19 nt, Artificial Sequence
  Description of Artificial Sequence: Synthetic oligonucleotide
auucaccauuucagcauga

SEQ ID NO: 1060338 - RNA, 19 nt, Artificial Sequence
  Description of Artificial Sequence: Synthetic oligonucleotide
gcuucguugcucagaagac

SEQ ID NO: 1060339 - RNA, 19 nt, Artificial Sequence
  Description of Artificial Sequence: Synthetic oligonucleotide
guaguacagaaugcagucu

SEQ ID NO: 1060340 - RNA, 19 nt, Artificial Sequence
  Description of Artificial Sequence: Synthetic oligonucleotide
acacacgacgacacuugcu

SEQ ID NO: 1060341 - RNA, 19 nt, Artificial Sequence
  Description of Artificial Sequence: Synthetic oligonucleotide
guaagugccugcacgaauu

SEQ ID NO: 1060342 - RNA, 19 nt, Artificial Sequence
  Description of Artificial Sequence: Synthetic oligonucleotide
guguuccgaauggcaagcc

SEQ ID NO: 1060343 - RNA, 19 nt, Artificial Sequence
  Description of Artificial Sequence: Synthetic oligonucleotide
caccaucgagcugauccug

SEQ ID NO: 1060344 - RNA, 19 nt, Artificial Sequence
  Description of Artificial Sequence: Synthetic oligonucleotide
aucgcgaccugcacgccca

SEQ ID NO: 1060345 - RNA, 19 nt, Artificial Sequence
  Description of Artificial Sequence: Synthetic oligonucleotide
guacagaaugcagucugcu

SEQ ID NO: 1060346 - RNA, 19 nt, Artificial Sequence
  Description of Artificial Sequence: Synthetic oligonucleotide
ccacuguguaugaacccug

SEQ ID NO: 1060347 - RNA, 19 nt, Artificial Sequence
  Description of Artificial Sequence: Synthetic oligonucleotide
agacacgaacauacguaaa

SEQ ID NO: 1060348 - RNA, 19 nt, Artificial Sequence
  Description of Artificial Sequence: Synthetic oligonucleotide
gccgagugccuuauaauca

SEQ ID NO: 1060349 - RNA, 19 nt, Artificial Sequence
  Description of Artificial Sequence: Synthetic oligonucleotide
agcgagguguugggaaacu

SEQ ID NO: 1060350 - RNA, 19 nt, Artificial Sequence
  Description of Artificial Sequence: Synthetic oligonucleotide
ggggcuuuugccgaaccuc

SEQ ID NO: 1060351 - RNA, 19 nt, Artificial Sequence
  Description of Artificial Sequence: Synthetic oligonucleotide
augauuccugaucgcccuu

SEQ ID NO: 1060352 - RNA, 19 nt, Artificial Sequence
  Description of Artificial Sequence: Synthetic oligonucleotide
acagcaguugucacacauu

SEQ ID NO: 1060353 - RNA, 19 nt, Artificial Sequence
  Description of Artificial Sequence: Synthetic oligonucleotide
cucgagucaucgcgaccug

SEQ ID NO: 1060354 - RNA, 19 nt, Artificial Sequence
  Description of Artificial Sequence: Synthetic oligonucleotide
uccaagcauccaucagcuu

SEQ ID NO: 1060355 - RNA, 19 nt, Artificial Sequence
  Description of Artificial Sequence: Synthetic oligonucleotide
gaaggaccggggcgacgac

SEQ ID NO: 1060356 - RNA, 19 nt, Artificial Sequence
  Description of Artificial Sequence: Synthetic oligonucleotide
cagcgagguguugggaaac

SEQ ID NO: 1060357 - RNA, 19 nt, Artificial Sequence
  Description of Artificial Sequence: Synthetic oligonucleotide
ccucagaugaugcagcccu

SEQ ID NO: 1060358 - RNA, 19 nt, Artificial Sequence
  Description of Artificial Sequence: Synthetic oligonucleotide
cacugacugcagcaaugca

SEQ ID NO: 1060359 - RNA, 19 nt, Artificial Sequence
  Description of Artificial Sequence: Synthetic oligonucleotide
cgaacauacguaaacaguu

SEQ ID NO: 1060360 - RNA, 19 nt, Artificial Sequence
  Description of Artificial Sequence: Synthetic oligonucleotide
gcaguacgacaccaucuca

SEQ ID NO: 1060361 - RNA, 19 nt, Artificial Sequence
  Description of Artificial Sequence: Synthetic oligonucleotide
acgcuuucucuagucugga

SEQ ID NO: 1060362 - RNA, 19 nt, Artificial Sequence
  Description of Artificial Sequence: Synthetic oligonucleotide
gcaugggcuucguugcuca

SEQ ID NO: 1060363 - RNA, 19 nt, Artificial Sequence
  Description of Artificial Sequence: Synthetic oligonucleotide
cgagugccuuauaaucagg

SEQ ID NO: 1060364 - RNA, 19 nt, Artificial Sequence
  Description of Artificial Sequence: Synthetic oligonucleotide
ucaucgcgaccugcacgcc

SEQ ID NO: 1060365 - RNA, 19 nt, Artificial Sequence
  Description of Artificial Sequence: Synthetic oligonucleotide
cacgacgacacuugcuuau

SEQ ID NO: 1060366 - RNA, 19 nt, Artificial Sequence
  Description of Artificial Sequence: Synthetic oligonucleotide
gggcuuuugccgaaccuca

SEQ ID NO: 1060367 - RNA, 19 nt, Artificial Sequence
  Description of Artificial Sequence: Synthetic oligonucleotide
gcucucgagucaucgcgac

SEQ ID NO: 1060368 - RNA, 19 nt, Artificial Sequence
  Description of Artificial Sequence: Synthetic oligonucleotide
gggucugaacuucugcagu

SEQ ID NO: 1060369 - RNA, 19 nt, Artificial Sequence
  Description of Artificial Sequence: Synthetic oligonucleotide
gcgaccugcacgcccacuc

SEQ ID NO: 1060370 - RNA, 19 nt, Artificial Sequence
  Description of Artificial Sequence: Synthetic oligonucleotide
cguguuccgaauggcaagc

SEQ ID NO: 1060371 - RNA, 19 nt, Artificial Sequence
  Description of Artificial Sequence: Synthetic oligonucleotide
ugaccaccaucgagcugau

SEQ ID NO: 1060372 - RNA, 19 nt, Artificial Sequence
  Description of Artificial Sequence: Synthetic oligonucleotide
guaugaacccuggucuuau

SEQ ID NO: 1060373 - RNA, 19 nt, Artificial Sequence
  Description of Artificial Sequence: Synthetic oligonucleotide
ccuagaaaucaugucccca

SEQ ID NO: 1060374 - RNA, 19 nt, Artificial Sequence
  Description of Artificial Sequence: Synthetic oligonucleotide
gguaagugccugcacgaau

SEQ ID NO: 1060375 - RNA, 19 nt, Artificial Sequence
  Description of Artificial Sequence: Synthetic oligonucleotide
accggggcgacgacaccag

SEQ ID NO: 1060376 - RNA, 19 nt, Artificial Sequence
  Description of Artificial Sequence: Synthetic oligonucleotide
ggcuauccgagucagucuu

SEQ ID NO: 1060377 - RNA, 19 nt, Artificial Sequence
  Description of Artificial Sequence: Synthetic oligonucleotide
acgacgacacuugcuuaua

SEQ ID NO: 1060378 - RNA, 19 nt, Artificial Sequence
  Description of Artificial Sequence: Synthetic oligonucleotide
gcuuuugccgaaccucaua

SEQ ID NO: 1060379 - RNA, 19 nt, Artificial Sequence
  Description of Artificial Sequence: Synthetic oligonucleotide
cuuccauaagagagaugau

SEQ ID NO: 1060380 - RNA, 19 nt, Artificial Sequence
  Description of Artificial Sequence: Synthetic oligonucleotide
auaugucuccaaagccgua

SEQ ID NO: 1060381 - RNA, 19 nt, Artificial Sequence
  Description of Artificial Sequence: Synthetic oligonucleotide
ggucugaacuucugcaguu

SEQ ID NO: 1060382 - RNA, 19 nt, Artificial Sequence
  Description of Artificial Sequence: Synthetic oligonucleotide
gagcacagugccggcagcu

SEQ ID NO: 1060383 - RNA, 19 nt, Artificial Sequence
  Description of Artificial Sequence: Synthetic oligonucleotide
cgaucaacacacgacgaca

SEQ ID NO: 1060384 - RNA, 19 nt, Artificial Sequence
  Description of Artificial Sequence: Synthetic oligonucleotide
cggggcgacgacaccagcc

SEQ ID NO: 1060385 - RNA, 19 nt, Artificial Sequence
  Description of Artificial Sequence: Synthetic oligonucleotide
caaagccguaguacagaau

SEQ ID NO: 1060386 - RNA, 19 nt, Artificial Sequence
  Description of Artificial Sequence: Synthetic oligonucleotide
ucgcgaccugcacgcccac

SEQ ID NO: 1060387 - RNA, 19 nt, Artificial Sequence
  Description of Artificial Sequence: Synthetic oligonucleotide
cgagucaucgcgaccugca

SEQ ID NO: 1060388 - RNA, 19 nt, Artificial Sequence
  Description of Artificial Sequence: Synthetic oligonucleotide
ccacggcuauccgagucag

SEQ ID NO: 1060389 - RNA, 19 nt, Artificial Sequence
  Description of Artificial Sequence: Synthetic oligonucleotide
gggcuucguugcucagaag

SEQ ID NO: 1060390 - RNA, 19 nt, Artificial Sequence
  Description of Artificial Sequence: Synthetic oligonucleotide
gcguaagcugugaagcugu

SEQ ID NO: 1060391 - RNA, 19 nt, Artificial Sequence
  Description of Artificial Sequence: Synthetic oligonucleotide
ccgaauggcaagccucaga

SEQ ID NO: 1060392 - RNA, 19 nt, Artificial Sequence
  Description of Artificial Sequence: Synthetic oligonucleotide
gggcgacgacaccagccac

SEQ ID NO: 1060393 - RNA, 19 nt, Artificial Sequence
  Description of Artificial Sequence: Synthetic oligonucleotide
gcuauccgagucagucuuc

SEQ ID NO: 1060394 - RNA, 19 nt, Artificial Sequence
  Description of Artificial Sequence: Synthetic oligonucleotide
cguccauuaaugagcuuua

SEQ ID NO: 1060395 - RNA, 19 nt, Artificial Sequence
  Description of Artificial Sequence: Synthetic oligonucleotide
ggagagcaugugcaaugau

SEQ ID NO: 1060396 - RNA, 19 nt, Artificial Sequence
  Description of Artificial Sequence: Synthetic oligonucleotide
gcuucaguggagugagcuu

SEQ ID NO: 1060397 - RNA, 19 nt, Artificial Sequence
  Description of Artificial Sequence: Synthetic oligonucleotide
ggaccggggcgacgacacc

SEQ ID NO: 1060398 - RNA, 19 nt, Artificial Sequence
  Description of Artificial Sequence: Synthetic oligonucleotide
cauccacggcuauccgagu

SEQ ID NO: 1060399 - RNA, 19 nt, Artificial Sequence
  Description of Artificial Sequence: Synthetic oligonucleotide
ccaccaucgagcugauccu

SEQ ID NO: 1060400 - RNA, 19 nt, Artificial Sequence
  Description of Artificial Sequence: Synthetic oligonucleotide
gaccaccaucgagcugauc

SEQ ID NO: 1060401 - RNA, 19 nt, Artificial Sequence
  Description of Artificial Sequence: Synthetic oligonucleotide
ccgagucagucuuccagcu

SEQ ID NO: 1060402 - RNA, 19 nt, Artificial Sequence
  Description of Artificial Sequence: Synthetic oligonucleotide
cagcaugggcuucguugcu

SEQ ID NO: 1060403 - RNA, 19 nt, Artificial Sequence
  Description of Artificial Sequence: Synthetic oligonucleotide
cugcacgaauucccaguuu

SEQ ID NO: 1060404 - RNA, 19 nt, Artificial Sequence
  Description of Artificial Sequence: Synthetic oligonucleotide
ggggaaggaccggggcgac

SEQ ID NO: 1060405 - RNA, 19 nt, Artificial Sequence
  Description of Artificial Sequence: Synthetic oligonucleotide
ccugcacgaauucccaguu

SEQ ID NO: 1060406 - RNA, 19 nt, Artificial Sequence
  Description of Artificial Sequence: Synthetic oligonucleotide
cacggcuauccgagucagu

SEQ ID NO: 1060407 - RNA, 19 nt, Artificial Sequence
  Description of Artificial Sequence: Synthetic oligonucleotide
ccggggcgacgacaccagc

SEQ ID NO: 1060408 - RNA, 19 nt, Artificial Sequence
  Description of Artificial Sequence: Synthetic oligonucleotide
gcccuacguucuccaugac

SEQ ID NO: 1060409 - RNA, 19 nt, Artificial Sequence
  Description of Artificial Sequence: Synthetic oligonucleotide
cgucugcauuccacacuuc

SEQ ID NO: 1060410 - RNA, 19 nt, Artificial Sequence
  Description of Artificial Sequence: Synthetic oligonucleotide
cagauggcugaagccuuuu

SEQ ID NO: 1060411 - RNA, 19 nt, Artificial Sequence
  Description of Artificial Sequence: Synthetic oligonucleotide
gcccuuuguaucguccauu

SEQ ID NO: 1060412 - RNA, 19 nt, Artificial Sequence
  Description of Artificial Sequence: Synthetic oligonucleotide
cggcuauccgagucagucu

SEQ ID NO: 1060413 - RNA, 19 nt, Artificial Sequence
  Description of Artificial Sequence: Synthetic oligonucleotide
cgacgacacuugcuuauau

SEQ ID NO: 1060414 - RNA, 19 nt, Artificial Sequence
  Description of Artificial Sequence: Synthetic oligonucleotide
cgaccugcacgcccacucu

SEQ ID NO: 1060415 - RNA, 19 nt, Artificial Sequence
  Description of Artificial Sequence: Synthetic oligonucleotide
cgcccuuuguaucguccau

SEQ ID NO: 1060416 - RNA, 19 nt, Artificial Sequence
  Description of Artificial Sequence: Synthetic oligonucleotide
agaacuauaguagaaaugg

SEQ ID NO: 1060417 - RNA, 19 nt, Artificial Sequence
  Description of Artificial Sequence: Synthetic oligonucleotide
uuagagauaacuucauugg

SEQ ID NO: 1060418 - RNA, 19 nt, Artificial Sequence
  Description of Artificial Sequence: Synthetic oligonucleotide
ucuaacauguccuuuacag

SEQ ID NO: 1060419 - RNA, 19 nt, Artificial Sequence
  Description of Artificial Sequence: Synthetic oligonucleotide
aaaauguuucgcuccgucc

SEQ ID NO: 1060420 - RNA, 19 nt, Artificial Sequence
  Description of Artificial Sequence: Synthetic oligonucleotide
uuaguggcuaauuuaauag

SEQ ID NO: 1060421 - RNA, 19 nt, Artificial Sequence
  Description of Artificial Sequence: Synthetic oligonucleotide
guuacuaugacauuugcac

SEQ ID NO: 1060422 - RNA, 19 nt, Artificial Sequence
  Description of Artificial Sequence: Synthetic oligonucleotide
aauagcauacuguucaagu

SEQ ID NO: 1060423 - RNA, 19 nt, Artificial Sequence
  Description of Artificial Sequence: Synthetic oligonucleotide
uguagaaccucgaagaacu

SEQ ID NO: 1060424 - RNA, 19 nt, Artificial Sequence
  Description of Artificial Sequence: Synthetic oligonucleotide
aacuccaucaucgaccgcc

SEQ ID NO: 1060425 - RNA, 19 nt, Artificial Sequence
  Description of Artificial Sequence: Synthetic oligonucleotide
gauauuaccucugaaacug

SEQ ID NO: 1060426 - RNA, 19 nt, Artificial Sequence
  Description of Artificial Sequence: Synthetic oligonucleotide
auguaucuaagauacuggc

SEQ ID NO: 1060427 - RNA, 19 nt, Artificial Sequence
  Description of Artificial Sequence: Synthetic oligonucleotide
aauagauacacaugccuga

SEQ ID NO: 1060428 - RNA, 19 nt, Artificial Sequence
  Description of Artificial Sequence: Synthetic oligonucleotide
uaucaugccaucaaaggga

SEQ ID NO: 1060429 - RNA, 19 nt, Artificial Sequence
  Description of Artificial Sequence: Synthetic oligonucleotide
aacaacauaccaaaucggg

SEQ ID NO: 1060430 - RNA, 19 nt, Artificial Sequence
  Description of Artificial Sequence: Synthetic oligonucleotide
uuaacuccaucaucgaccg

SEQ ID NO: 1060431 - RNA, 19 nt, Artificial Sequence
  Description of Artificial Sequence: Synthetic oligonucleotide
agagauaacuucauuggcc

SEQ ID NO: 1060432 - RNA, 19 nt, Artificial Sequence
  Description of Artificial Sequence: Synthetic oligonucleotide
acuauaguagaaauggcac

SEQ ID NO: 1060433 - RNA, 19 nt, Artificial Sequence
  Description of Artificial Sequence: Synthetic oligonucleotide
ucagaaguuccucagcgag

SEQ ID NO: 1060434 - RNA, 19 nt, Artificial Sequence
  Description of Artificial Sequence: Synthetic oligonucleotide
cuuguauauuucuauacac

SEQ ID NO: 1060435 - RNA, 19 nt, Artificial Sequence
  Description of Artificial Sequence: Synthetic oligonucleotide
uuugcaagcuauuucauau

SEQ ID NO: 1060436 - RNA, 19 nt, Artificial Sequence
  Description of Artificial Sequence: Synthetic oligonucleotide
gucauuuuggucaucaucc

SEQ ID NO: 1060437 - RNA, 19 nt, Artificial Sequence
  Description of Artificial Sequence: Synthetic oligonucleotide
uguuacaucaccuucgguu

SEQ ID NO: 1060438 - RNA, 19 nt, Artificial Sequence
  Description of Artificial Sequence: Synthetic oligonucleotide
agcccagaaucuuacauac

SEQ ID NO: 1060439 - RNA, 19 nt, Artificial Sequence
  Description of Artificial Sequence: Synthetic oligonucleotide
augacauuugcacccgugc

SEQ ID NO: 1060440 - RNA, 19 nt, Artificial Sequence
  Description of Artificial Sequence: Synthetic oligonucleotide
auagcauacuguucaaguc

SEQ ID NO: 1060441 - RNA, 19 nt, Artificial Sequence
  Description of Artificial Sequence: Synthetic oligonucleotide
aacauaccaaaucgggaag

SEQ ID NO: 1060442 - RNA, 19 nt, Artificial Sequence
  Description of Artificial Sequence: Synthetic oligonucleotide
acugcauaaaguuuagaga

SEQ ID NO: 1060443 - RNA, 19 nt, Artificial Sequence
  Description of Artificial Sequence: Synthetic oligonucleotide
uucauauccugauauuacc

SEQ ID NO: 1060444 - RNA, 19 nt, Artificial Sequence
  Description of Artificial Sequence: Synthetic oligonucleotide
gaugugaucuguuuggcca

SEQ ID NO: 1060445 - RNA, 19 nt, Artificial Sequence
  Description of Artificial Sequence: Synthetic oligonucleotide
uguacggguagucugagaa

SEQ ID NO: 1060446 - RNA, 19 nt, Artificial Sequence
  Description of Artificial Sequence: Synthetic oligonucleotide
ugaauagauaccagagccc

SEQ ID NO: 1060447 - RNA, 19 nt, Artificial Sequence
  Description of Artificial Sequence: Synthetic oligonucleotide
uacugcuuacucauuacag

SEQ ID NO: 1060448 - RNA, 19 nt, Artificial Sequence
  Description of Artificial Sequence: Synthetic oligonucleotide
aacuauaguagaaauggca

SEQ ID NO: 1060449 - RNA, 19 nt, Artificial Sequence
  Description of Artificial Sequence: Synthetic oligonucleotide
gauguuacaucaccuucgg

SEQ ID NO: 1060450 - RNA, 19 nt, Artificial Sequence
  Description of Artificial Sequence: Synthetic oligonucleotide
ugagaucccacuuugaguu

SEQ ID NO: 1060451 - RNA, 19 nt, Artificial Sequence
  Description of Artificial Sequence: Synthetic oligonucleotide
cauaugagaggccaucacg

SEQ ID NO: 1060452 - RNA, 19 nt, Artificial Sequence
  Description of Artificial Sequence: Synthetic oligonucleotide
aucgggaagaaucucauga

SEQ ID NO: 1060453 - RNA, 19 nt, Artificial Sequence
  Description of Artificial Sequence: Synthetic oligonucleotide
agccucaauauccaacccc

SEQ ID NO: 1060454 - RNA, 19 nt, Artificial Sequence
  Description of Artificial Sequence: Synthetic oligonucleotide
aucuuacauacucugaugu

SEQ ID NO: 1060455 - RNA, 19 nt, Artificial Sequence
  Description of Artificial Sequence: Synthetic oligonucleotide
uuaucaacauugaaauuuc

SEQ ID NO: 1060456 - RNA, 19 nt, Artificial Sequence
  Description of Artificial Sequence: Synthetic oligonucleotide
ucuaaguacagugacugca

SEQ ID NO: 1060457 - RNA, 19 nt, Artificial Sequence
  Description of Artificial Sequence: Synthetic oligonucleotide
uagagauaacuucauuggc

SEQ ID NO: 1060458 - RNA, 19 nt, Artificial Sequence
  Description of Artificial Sequence: Synthetic oligonucleotide
ucuuuaucagcaccguccc

SEQ ID NO: 1060459 - RNA, 19 nt, Artificial Sequence
  Description of Artificial Sequence: Synthetic oligonucleotide
ucauauccugauauuaccu

SEQ ID NO: 1060460 - RNA, 19 nt, Artificial Sequence
  Description of Artificial Sequence: Synthetic oligonucleotide
agucuuucuucccacuugg

SEQ ID NO: 1060461 - RNA, 19 nt, Artificial Sequence
  Description of Artificial Sequence: Synthetic oligonucleotide
uguaucuaagauacuggcu

SEQ ID NO: 1060462 - RNA, 19 nt, Artificial Sequence
  Description of Artificial Sequence: Synthetic oligonucleotide
ugcuuacucauuacagagg

SEQ ID NO: 1060463 - RNA, 19 nt, Artificial Sequence
  Description of Artificial Sequence: Synthetic oligonucleotide
ugauauuaccucugaaacu

SEQ ID NO: 1060464 - RNA, 19 nt, Artificial Sequence
  Description of Artificial Sequence: Synthetic oligonucleotide
agagguaaacacuaucaca

SEQ ID NO: 1060465 - RNA, 19 nt, Artificial Sequence
  Description of Artificial Sequence: Synthetic oligonucleotide
ugcgucauuugucacaaac

SEQ ID NO: 1060466 - RNA, 19 nt, Artificial Sequence
  Description of Artificial Sequence: Synthetic oligonucleotide
acuugugcguccaugagac

SEQ ID NO: 1060467 - RNA, 19 nt, Artificial Sequence
  Description of Artificial Sequence: Synthetic oligonucleotide
uauuuucccaaguauguau

SEQ ID NO: 1060468 - RNA, 19 nt, Artificial Sequence
  Description of Artificial Sequence: Synthetic oligonucleotide
aaccaugccaugcaauacu

SEQ ID NO: 1060469 - RNA, 19 nt, Artificial Sequence
  Description of Artificial Sequence: Synthetic oligonucleotide
aucagauuaucuguagaac

SEQ ID NO: 1060470 - RNA, 19 nt, Artificial Sequence
  Description of Artificial Sequence: Synthetic oligonucleotide
auacucugauguuaucaac

SEQ ID NO: 1060471 - RNA, 19 nt, Artificial Sequence
  Description of Artificial Sequence: Synthetic oligonucleotide
gacgcuuaucccuugugag

SEQ ID NO: 1060472 - RNA, 19 nt, Artificial Sequence
  Description of Artificial Sequence: Synthetic oligonucleotide
accucgaagaacuauagua

SEQ ID NO: 1060473 - RNA, 19 nt, Artificial Sequence
  Description of Artificial Sequence: Synthetic oligonucleotide
uuaauagcccaguauuuuc

SEQ ID NO: 1060474 - RNA, 19 nt, Artificial Sequence
  Description of Artificial Sequence: Synthetic oligonucleotide
uuuaucagcaccguccccu

SEQ ID NO: 1060475 - RNA, 19 nt, Artificial Sequence
  Description of Artificial Sequence: Synthetic oligonucleotide
gaacaacauaccaaaucgg

SEQ ID NO: 1060476 - RNA, 19 nt, Artificial Sequence
  Description of Artificial Sequence: Synthetic oligonucleotide
aauuucuguugcuccaccu

SEQ ID NO: 1060477 - RNA, 19 nt, Artificial Sequence
  Description of Artificial Sequence: Synthetic oligonucleotide
uggcuaauuuaauagccca

SEQ ID NO: 1060478 - RNA, 19 nt, Artificial Sequence
  Description of Artificial Sequence: Synthetic oligonucleotide
uaaacacuaucacaauguc

SEQ ID NO: 1060479 - RNA, 19 nt, Artificial Sequence
  Description of Artificial Sequence: Synthetic oligonucleotide
uguuaacuccaucaucgac

SEQ ID NO: 1060480 - RNA, 19 nt, Artificial Sequence
  Description of Artificial Sequence: Synthetic oligonucleotide
uacggguagucugagaaag

SEQ ID NO: 1060481 - RNA, 19 nt, Artificial Sequence
  Description of Artificial Sequence: Synthetic oligonucleotide
auauccugauauuaccucu

SEQ ID NO: 1060482 - RNA, 19 nt, Artificial Sequence
  Description of Artificial Sequence: Synthetic oligonucleotide
auuuuggucaucaucccag

SEQ ID NO: 1060483 - RNA, 19 nt, Artificial Sequence
  Description of Artificial Sequence: Synthetic oligonucleotide
ucuuaauagcauacuguuc

SEQ ID NO: 1060484 - RNA, 19 nt, Artificial Sequence
  Description of Artificial Sequence: Synthetic oligonucleotide
uauccugauauuaccucug

SEQ ID NO: 1060485 - RNA, 19 nt, Artificial Sequence
  Description of Artificial Sequence: Synthetic oligonucleotide
ucuugcauaugagaggcca

SEQ ID NO: 1060486 - RNA, 19 nt, Artificial Sequence
  Description of Artificial Sequence: Synthetic oligonucleotide
gagagguaaacacuaucac

SEQ ID NO: 1060487 - RNA, 19 nt, Artificial Sequence
  Description of Artificial Sequence: Synthetic oligonucleotide
gagaugacacuucaucaac

SEQ ID NO: 1060488 - RNA, 19 nt, Artificial Sequence
  Description of Artificial Sequence: Synthetic oligonucleotide
guacuuguuagcauaauga

SEQ ID NO: 1060489 - RNA, 19 nt, Artificial Sequence
  Description of Artificial Sequence: Synthetic oligonucleotide
ucgaagaacuauaguagaa

SEQ ID NO: 1060490 - RNA, 19 nt, Artificial Sequence
  Description of Artificial Sequence: Synthetic oligonucleotide
guucuaaucagagaugaca

SEQ ID NO: 1060491 - RNA, 19 nt, Artificial Sequence
  Description of Artificial Sequence: Synthetic oligonucleotide
aaccaacaugauauuguac

SEQ ID NO: 1060492 - RNA, 19 nt, Artificial Sequence
  Description of Artificial Sequence: Synthetic oligonucleotide
aucgccaaccucuuguucu

SEQ ID NO: 1060493 - RNA, 19 nt, Artificial Sequence
  Description of Artificial Sequence: Synthetic oligonucleotide
cauauccugauauuaccuc

SEQ ID NO: 1060494 - RNA, 19 nt, Artificial Sequence
  Description of Artificial Sequence: Synthetic oligonucleotide
agccuaaccaacaugauau

SEQ ID NO: 1060495 - RNA, 19 nt, Artificial Sequence
  Description of Artificial Sequence: Synthetic oligonucleotide
gacacgucucuccauauga

SEQ ID NO: 1060496 - RNA, 19 nt, Artificial Sequence
  Description of Artificial Sequence: Synthetic oligonucleotide
ucauuuuggucaucauccc

SEQ ID NO: 1060497 - RNA, 19 nt, Artificial Sequence
  Description of Artificial Sequence: Synthetic oligonucleotide
gauaacuucauuggccuuc

SEQ ID NO: 1060498 - RNA, 19 nt, Artificial Sequence
  Description of Artificial Sequence: Synthetic oligonucleotide
uuuaauagcccaguauuuu

SEQ ID NO: 1060499 - RNA, 19 nt, Artificial Sequence
  Description of Artificial Sequence: Synthetic oligonucleotide
agcuauuucauauccugau

SEQ ID NO: 1060500 - RNA, 19 nt, Artificial Sequence
  Description of Artificial Sequence: Synthetic oligonucleotide
gguagucugagaaagcucc

SEQ ID NO: 1060501 - RNA, 19 nt, Artificial Sequence
  Description of Artificial Sequence: Synthetic oligonucleotide
agauuaucuguagaaccuc

SEQ ID NO: 1060502 - RNA, 19 nt, Artificial Sequence
  Description of Artificial Sequence: Synthetic oligonucleotide
agucugagaaagcuccuug

SEQ ID NO: 1060503 - RNA, 19 nt, Artificial Sequence
  Description of Artificial Sequence: Synthetic oligonucleotide
uuggccaauucaauuucug

SEQ ID NO: 1060504 - RNA, 19 nt, Artificial Sequence
  Description of Artificial Sequence: Synthetic oligonucleotide
ugcaagcuuguauauuucu

SEQ ID NO: 1060505 - RNA, 19 nt, Artificial Sequence
  Description of Artificial Sequence: Synthetic oligonucleotide
auacugaagaugaauagau

SEQ ID NO: 1060506 - RNA, 19 nt, Artificial Sequence
  Description of Artificial Sequence: Synthetic oligonucleotide
uaauagcauacuguucaag

SEQ ID NO: 1060507 - RNA, 19 nt, Artificial Sequence
  Description of Artificial Sequence: Synthetic oligonucleotide
aaucgggaagaaucucaug

SEQ ID NO: 1060508 - RNA, 19 nt, Artificial Sequence
  Description of Artificial Sequence: Synthetic oligonucleotide
uucccaaguauguaucuaa

SEQ ID NO: 1060509 - RNA, 19 nt, Artificial Sequence
  Description of Artificial Sequence: Synthetic oligonucleotide
acauguccuuuacagccgg

SEQ ID NO: 1060510 - RNA, 19 nt, Artificial Sequence
  Description of Artificial Sequence: Synthetic oligonucleotide
gagauaacuucauuggccu

SEQ ID NO: 1060511 - RNA, 19 nt, Artificial Sequence
  Description of Artificial Sequence: Synthetic oligonucleotide
gccaauucaauuucuguug

SEQ ID NO: 1060512 - RNA, 19 nt, Artificial Sequence
  Description of Artificial Sequence: Synthetic oligonucleotide
auaugagaggccaucacga

SEQ ID NO: 1060513 - RNA, 19 nt, Artificial Sequence
  Description of Artificial Sequence: Synthetic oligonucleotide
gaacuauaguagaaauggc

SEQ ID NO: 1060514 - RNA, 19 nt, Artificial Sequence
  Description of Artificial Sequence: Synthetic oligonucleotide
gauguuguacuuccagcuc

SEQ ID NO: 1060515 - RNA, 19 nt, Artificial Sequence
  Description of Artificial Sequence: Synthetic oligonucleotide
ucccuugugagaacuuuga

SEQ ID NO: 1060516 - RNA, 19 nt, Artificial Sequence
  Description of Artificial Sequence: Synthetic oligonucleotide
gaagaacuauaguagaaau

SEQ ID NO: 1060517 - RNA, 19 nt, Artificial Sequence
  Description of Artificial Sequence: Synthetic oligonucleotide
gaaucuuacauacucugau

SEQ ID NO: 1060518 - RNA, 19 nt, Artificial Sequence
  Description of Artificial Sequence: Synthetic oligonucleotide
aucuuugacagauguuaca

SEQ ID NO: 1060519 - RNA, 19 nt, Artificial Sequence
  Description of Artificial Sequence: Synthetic oligonucleotide
gaaccucgaagaacuauag

SEQ ID NO: 1060520 - RNA, 19 nt, Artificial Sequence
  Description of Artificial Sequence: Synthetic oligonucleotide
acgugaagcgccauggccg

SEQ ID NO: 1060521 - RNA, 19 nt, Artificial Sequence
  Description of Artificial Sequence: Synthetic oligonucleotide
uggccuucacaccagaauu

SEQ ID NO: 1060522 - RNA, 19 nt, Artificial Sequence
  Description of Artificial Sequence: Synthetic oligonucleotide
uugacagauguuacaucac

SEQ ID NO: 1060523 - RNA, 19 nt, Artificial Sequence
  Description of Artificial Sequence: Synthetic oligonucleotide
aaccucgaagaacuauagu

SEQ ID NO: 1060524 - RNA, 19 nt, Artificial Sequence
  Description of Artificial Sequence: Synthetic oligonucleotide
auaguugcugcgucauuug

SEQ ID NO: 1060525 - RNA, 19 nt, Artificial Sequence
  Description of Artificial Sequence: Synthetic oligonucleotide
ucacuugugcguccaugag

SEQ ID NO: 1060526 - RNA, 19 nt, Artificial Sequence
  Description of Artificial Sequence: Synthetic oligonucleotide
ccucgaagaacuauaguag

SEQ ID NO: 1060527 - RNA, 19 nt, Artificial Sequence
  Description of Artificial Sequence: Synthetic oligonucleotide
guaucuaagauacuggcuu

SEQ ID NO: 1060528 - RNA, 19 nt, Artificial Sequence
  Description of Artificial Sequence: Synthetic oligonucleotide
aucaugccaucaaagggac

SEQ ID NO: 1060529 - RNA, 19 nt, Artificial Sequence
  Description of Artificial Sequence: Synthetic oligonucleotide
acuaugacauuugcacccg

SEQ ID NO: 1060530 - RNA, 19 nt, Artificial Sequence
  Description of Artificial Sequence: Synthetic oligonucleotide
cuccauaugaugugaucug

SEQ ID NO: 1060531 - RNA, 19 nt, Artificial Sequence
  Description of Artificial Sequence: Synthetic oligonucleotide
ugcauaaaguuuagagaua

SEQ ID NO: 1060532 - RNA, 19 nt, Artificial Sequence
  Description of Artificial Sequence: Synthetic oligonucleotide
caaguauguaucuaagaua

SEQ ID NO: 1060533 - RNA, 19 nt, Artificial Sequence
  Description of Artificial Sequence: Synthetic oligonucleotide
uggccaauucaauuucugu

SEQ ID NO: 1060534 - RNA, 19 nt, Artificial Sequence
  Description of Artificial Sequence: Synthetic oligonucleotide
cuaaccaacaugauauugu

SEQ ID NO: 1060535 - RNA, 19 nt, Artificial Sequence
  Description of Artificial Sequence: Synthetic oligonucleotide
ugcuguacggguagucuga

SEQ ID NO: 1060536 - RNA, 19 nt, Artificial Sequence
  Description of Artificial Sequence: Synthetic oligonucleotide
guaaacacuaucacaaugu

SEQ ID NO: 1060537 - RNA, 19 nt, Artificial Sequence
  Description of Artificial Sequence: Synthetic oligonucleotide
uccccuuagucucuguuau

SEQ ID NO: 1060538 - RNA, 19 nt, Artificial Sequence
  Description of Artificial Sequence: Synthetic oligonucleotide
agacgcuuaucccuuguga

SEQ ID NO: 1060539 - RNA, 19 nt, Artificial Sequence
  Description of Artificial Sequence: Synthetic oligonucleotide
uaugcuguacggguagucu

SEQ ID NO: 1060540 - RNA, 19 nt, Artificial Sequence
  Description of Artificial Sequence: Synthetic oligonucleotide
uuugcacccgugcuggcaa

SEQ ID NO: 1060541 - RNA, 19 nt, Artificial Sequence
  Description of Artificial Sequence: Synthetic oligonucleotide
uugugcguccaugagacuc

SEQ ID NO: 1060542 - RNA, 19 nt, Artificial Sequence
  Description of Artificial Sequence: Synthetic oligonucleotide
acuaucacaaugucccauu

SEQ ID NO: 1060543 - RNA, 19 nt, Artificial Sequence
  Description of Artificial Sequence: Synthetic oligonucleotide
cuuugacagauguuacauc

SEQ ID NO: 1060544 - RNA, 19 nt, Artificial Sequence
  Description of Artificial Sequence: Synthetic oligonucleotide
acaacauaccaaaucggga

SEQ ID NO: 1060545 - RNA, 19 nt, Artificial Sequence
  Description of Artificial Sequence: Synthetic oligonucleotide
augcuguacggguagucug

SEQ ID NO: 1060546 - RNA, 19 nt, Artificial Sequence
  Description of Artificial Sequence: Synthetic oligonucleotide
ugcugcgucauuugucaca

SEQ ID NO: 1060547 - RNA, 19 nt, Artificial Sequence
  Description of Artificial Sequence: Synthetic oligonucleotide
ucuuacauacucugauguu

SEQ ID NO: 1060548 - RNA, 19 nt, Artificial Sequence
  Description of Artificial Sequence: Synthetic oligonucleotide
ggcuucauuaccauacugc

SEQ ID NO: 1060549 - RNA, 19 nt, Artificial Sequence
  Description of Artificial Sequence: Synthetic oligonucleotide
cauacucugauguuaucaa

SEQ ID NO: 1060550 - RNA, 19 nt, Artificial Sequence
  Description of Artificial Sequence: Synthetic oligonucleotide
ucauuacagagguucuaau

SEQ ID NO: 1060551 - RNA, 19 nt, Artificial Sequence
  Description of Artificial Sequence: Synthetic oligonucleotide
uuuggucaucaucccaguc

SEQ ID NO: 1060552 - RNA, 19 nt, Artificial Sequence
  Description of Artificial Sequence: Synthetic oligonucleotide
uccauaugcuguacgggua

SEQ ID NO: 1060553 - RNA, 19 nt, Artificial Sequence
  Description of Artificial Sequence: Synthetic oligonucleotide
acgucucuccauaugaugu

SEQ ID NO: 1060554 - RNA, 19 nt, Artificial Sequence
  Description of Artificial Sequence: Synthetic oligonucleotide
guucagccuaaccaacaug

SEQ ID NO: 1060555 - RNA, 19 nt, Artificial Sequence
  Description of Artificial Sequence: Synthetic oligonucleotide
uugcaagcuuguauauuuc

SEQ ID NO: 1060556 - RNA, 19 nt, Artificial Sequence
  Description of Artificial Sequence: Synthetic oligonucleotide
agaaucuuacauacucuga

SEQ ID NO: 1060557 - RNA, 19 nt, Artificial Sequence
  Description of Artificial Sequence: Synthetic oligonucleotide
uaugagaggccaucacgau

SEQ ID NO: 1060558 - RNA, 19 nt, Artificial Sequence
  Description of Artificial Sequence: Synthetic oligonucleotide
ccaauucaauuucuguugc

SEQ ID NO: 1060559 - RNA, 19 nt, Artificial Sequence
  Description of Artificial Sequence: Synthetic oligonucleotide
cugacaggccgauucucag

SEQ ID NO: 1060560 - RNA, 19 nt, Artificial Sequence
  Description of Artificial Sequence: Synthetic oligonucleotide
acgcuuaucccuugugaga

SEQ ID NO: 1060561 - RNA, 19 nt, Artificial Sequence
  Description of Artificial Sequence: Synthetic oligonucleotide
ggaggagucaaucuaggaa

SEQ ID NO: 1060562 - RNA, 19 nt, Artificial Sequence
  Description of Artificial Sequence: Synthetic oligonucleotide
aggaggagucaaucuagga

SEQ ID NO: 1060563 - RNA, 19 nt, Artificial Sequence
  Description of Artificial Sequence: Synthetic oligonucleotide
cuggcaauagcuuucacuu

SEQ ID NO: 1060564 - RNA, 19 nt, Artificial Sequence
  Description of Artificial Sequence: Synthetic oligonucleotide
acauaccaaaucgggaaga

SEQ ID NO: 1060565 - RNA, 19 nt, Artificial Sequence
  Description of Artificial Sequence: Synthetic oligonucleotide
cuaauuuaauagcccagua

SEQ ID NO: 1060566 - RNA, 19 nt, Artificial Sequence
  Description of Artificial Sequence: Synthetic oligonucleotide
accagaauucucugccagu

SEQ ID NO: 1060567 - RNA, 19 nt, Artificial Sequence
  Description of Artificial Sequence: Synthetic oligonucleotide
gggacaagacgcuuauccc

SEQ ID NO: 1060568 - RNA, 19 nt, Artificial Sequence
  Description of Artificial Sequence: Synthetic oligonucleotide
cugauccacucuaaguaca

SEQ ID NO: 1060569 - RNA, 19 nt, Artificial Sequence
  Description of Artificial Sequence: Synthetic oligonucleotide
agcgagcuccaaaagagcu

SEQ ID NO: 1060570 - RNA, 19 nt, Artificial Sequence
  Description of Artificial Sequence: Synthetic oligonucleotide
cuugcaagcuuguauauuu

SEQ ID NO: 1060571 - RNA, 19 nt, Artificial Sequence
  Description of Artificial Sequence: Synthetic oligonucleotide
auccugauauuaccucuga

SEQ ID NO: 1060572 - RNA, 19 nt, Artificial Sequence
  Description of Artificial Sequence: Synthetic oligonucleotide
ucauuaccauacugcuuac

SEQ ID NO: 1060573 - RNA, 19 nt, Artificial Sequence
  Description of Artificial Sequence: Synthetic oligonucleotide
agaugacacuucaucaaca

SEQ ID NO: 1060574 - RNA, 19 nt, Artificial Sequence
  Description of Artificial Sequence: Synthetic oligonucleotide
uacugaaguucaucagcuc

SEQ ID NO: 1060575 - RNA, 19 nt, Artificial Sequence
  Description of Artificial Sequence: Synthetic oligonucleotide
uagaaccucgaagaacuau

SEQ ID NO: 1060576 - RNA, 19 nt, Artificial Sequence
  Description of Artificial Sequence: Synthetic oligonucleotide
agaaccucgaagaacuaua

SEQ ID NO: 1060577 - RNA, 19 nt, Artificial Sequence
  Description of Artificial Sequence: Synthetic oligonucleotide
uugcauaugagaggccauc

SEQ ID NO: 1060578 - RNA, 19 nt, Artificial Sequence
  Description of Artificial Sequence: Synthetic oligonucleotide
uccaucaucgaccgcccuu

SEQ ID NO: 1060579 - RNA, 19 nt, Artificial Sequence
  Description of Artificial Sequence: Synthetic oligonucleotide
uuucuauacacagccucuu

SEQ ID NO: 1060580 - RNA, 19 nt, Artificial Sequence
  Description of Artificial Sequence: Synthetic oligonucleotide
uccuugcaagcuuguauau

SEQ ID NO: 1060581 - RNA, 19 nt, Artificial Sequence
  Description of Artificial Sequence: Synthetic oligonucleotide
cagcgagcuccaaaagagc

SEQ ID NO: 1060582 - RNA, 19 nt, Artificial Sequence
  Description of Artificial Sequence: Synthetic oligonucleotide
gcauaaaguuuagagauaa

SEQ ID NO: 1060583 - RNA, 19 nt, Artificial Sequence
  Description of Artificial Sequence: Synthetic oligonucleotide
guccuuuacagccggaacu

SEQ ID NO: 1060584 - RNA, 19 nt, Artificial Sequence
  Description of Artificial Sequence: Synthetic oligonucleotide
ggcuaauuuaauagcccag

SEQ ID NO: 1060585 - RNA, 19 nt, Artificial Sequence
  Description of Artificial Sequence: Synthetic oligonucleotide
acggguagucugagaaagc

SEQ ID NO: 1060586 - RNA, 19 nt, Artificial Sequence
  Description of Artificial Sequence: Synthetic oligonucleotide
acaagacgcuuaucccuug

SEQ ID NO: 1060587 - RNA, 19 nt, Artificial Sequence
  Description of Artificial Sequence: Synthetic oligonucleotide
uacauacucugauguuauc

SEQ ID NO: 1060588 - RNA, 19 nt, Artificial Sequence
  Description of Artificial Sequence: Synthetic oligonucleotide
ucuuggugcacugcauaaa

SEQ ID NO: 1060589 - RNA, 19 nt, Artificial Sequence
  Description of Artificial Sequence: Synthetic oligonucleotide
gaccgcccuuucuauauca

SEQ ID NO: 1060590 - RNA, 19 nt, Artificial Sequence
  Description of Artificial Sequence: Synthetic oligonucleotide
uguuucgcuccguccuuga

SEQ ID NO: 1060591 - RNA, 19 nt, Artificial Sequence
  Description of Artificial Sequence: Synthetic oligonucleotide
auaccagagcccagaaucu

SEQ ID NO: 1060592 - RNA, 19 nt, Artificial Sequence
  Description of Artificial Sequence: Synthetic oligonucleotide
augagacucuccucucccu

SEQ ID NO: 1060593 - RNA, 19 nt, Artificial Sequence
  Description of Artificial Sequence: Synthetic oligonucleotide
uuggggacgugaagcgcca

SEQ ID NO: 1060594 - RNA, 19 nt, Artificial Sequence
  Description of Artificial Sequence: Synthetic oligonucleotide
ccaugcaauacugaagaug

SEQ ID NO: 1060595 - RNA, 19 nt, Artificial Sequence
  Description of Artificial Sequence: Synthetic oligonucleotide
uuaucccuugugagaacuu

SEQ ID NO: 1060596 - RNA, 19 nt, Artificial Sequence
  Description of Artificial Sequence: Synthetic oligonucleotide
gucaaucuaggaagagcug

SEQ ID NO: 1060597 - RNA, 19 nt, Artificial Sequence
  Description of Artificial Sequence: Synthetic oligonucleotide
cacuugugcguccaugaga

SEQ ID NO: 1060598 - RNA, 19 nt, Artificial Sequence
  Description of Artificial Sequence: Synthetic oligonucleotide
agauaacuucauuggccuu

SEQ ID NO: 1060599 - RNA, 19 nt, Artificial Sequence
  Description of Artificial Sequence: Synthetic oligonucleotide
aucccuugugagaacuuug

SEQ ID NO: 1060600 - RNA, 19 nt, Artificial Sequence
  Description of Artificial Sequence: Synthetic oligonucleotide
ccauaugcuguacggguag

SEQ ID NO: 1060601 - RNA, 19 nt, Artificial Sequence
  Description of Artificial Sequence: Synthetic oligonucleotide
ccuaaccaacaugauauug

SEQ ID NO: 1060602 - RNA, 19 nt, Artificial Sequence
  Description of Artificial Sequence: Synthetic oligonucleotide
augccaucaaagggacagg

SEQ ID NO: 1060603 - RNA, 19 nt, Artificial Sequence
  Description of Artificial Sequence: Synthetic oligonucleotide
auaguagaaauggcaccau

SEQ ID NO: 1060604 - RNA, 19 nt, Artificial Sequence
  Description of Artificial Sequence: Synthetic oligonucleotide
ccuugugagaacuuugaaa

SEQ ID NO: 1060605 - RNA, 19 nt, Artificial Sequence
  Description of Artificial Sequence: Synthetic oligonucleotide
aguauguaucuaagauacu

SEQ ID NO: 1060606 - RNA, 19 nt, Artificial Sequence
  Description of Artificial Sequence: Synthetic oligonucleotide
aucaaccgcucacgcgcuc

SEQ ID NO: 1060607 - RNA, 19 nt, Artificial Sequence
  Description of Artificial Sequence: Synthetic oligonucleotide
gagaucccacuuugaguuc

SEQ ID NO: 1060608 - RNA, 19 nt, Artificial Sequence
  Description of Artificial Sequence: Synthetic oligonucleotide
auaccaaaucgggaagaau

SEQ ID NO: 1060609 - RNA, 19 nt, Artificial Sequence
  Description of Artificial Sequence: Synthetic oligonucleotide
uuaucagcaccguccccuu

SEQ ID NO: 1060610 - RNA, 19 nt, Artificial Sequence
  Description of Artificial Sequence: Synthetic oligonucleotide
acaggccgauucucagaag

SEQ ID NO: 1060611 - RNA, 19 nt, Artificial Sequence
  Description of Artificial Sequence: Synthetic oligonucleotide
gaaagcuccuugcaagcuu

SEQ ID NO: 1060612 - RNA, 19 nt, Artificial Sequence
  Description of Artificial Sequence: Synthetic oligonucleotide
auguccuuuacagccggaa

SEQ ID NO: 1060613 - RNA, 19 nt, Artificial Sequence
  Description of Artificial Sequence: Synthetic oligonucleotide
ggccuuggggacgugaagc

SEQ ID NO: 1060614 - RNA, 19 nt, Artificial Sequence
  Description of Artificial Sequence: Synthetic oligonucleotide
uggccggcccgcaaucaac

SEQ ID NO: 1060615 - RNA, 19 nt, Artificial Sequence
  Description of Artificial Sequence: Synthetic oligonucleotide
ccaaguauguaucuaagau

SEQ ID NO: 1060616 - RNA, 19 nt, Artificial Sequence
  Description of Artificial Sequence: Synthetic oligonucleotide
uuguacuuguuagcauaau

SEQ ID NO: 1060617 - RNA, 19 nt, Artificial Sequence
  Description of Artificial Sequence: Synthetic oligonucleotide
aggacacgucucuccauau

SEQ ID NO: 1060618 - RNA, 19 nt, Artificial Sequence
  Description of Artificial Sequence: Synthetic oligonucleotide
gcauaugagaggccaucac

SEQ ID NO: 1060619 - RNA, 19 nt, Artificial Sequence
  Description of Artificial Sequence: Synthetic oligonucleotide
uaacuccaucaucgaccgc

SEQ ID NO: 1060620 - RNA, 19 nt, Artificial Sequence
  Description of Artificial Sequence: Synthetic oligonucleotide
caucgccaaccucuuguuc

SEQ ID NO: 1060621 - RNA, 19 nt, Artificial Sequence
  Description of Artificial Sequence: Synthetic oligonucleotide
gccucaauauccaacccca

SEQ ID NO: 1060622 - RNA, 19 nt, Artificial Sequence
  Description of Artificial Sequence: Synthetic oligonucleotide
cauaccaaaucgggaagaa

SEQ ID NO: 1060623 - RNA, 19 nt, Artificial Sequence
  Description of Artificial Sequence: Synthetic oligonucleotide
cagccuaaccaacaugaua

SEQ ID NO: 1060624 - RNA, 19 nt, Artificial Sequence
  Description of Artificial Sequence: Synthetic oligonucleotide
ccgguuacuaugacauuug

SEQ ID NO: 1060625 - RNA, 19 nt, Artificial Sequence
  Description of Artificial Sequence: Synthetic oligonucleotide
caggccgauucucagaagu

SEQ ID NO: 1060626 - RNA, 19 nt, Artificial Sequence
  Description of Artificial Sequence: Synthetic oligonucleotide
aggcgauugaugaccauuu

SEQ ID NO: 1060627 - RNA, 19 nt, Artificial Sequence
  Description of Artificial Sequence: Synthetic oligonucleotide
gcuggcaauagcuuucacu

SEQ ID NO: 1060628 - RNA, 19 nt, Artificial Sequence
  Description of Artificial Sequence: Synthetic oligonucleotide
gcaccguccccuuagucuc

SEQ ID NO: 1060629 - RNA, 19 nt, Artificial Sequence
  Description of Artificial Sequence: Synthetic oligonucleotide
gcuaauuuaauagcccagu

SEQ ID NO: 1060630 - RNA, 19 nt, Artificial Sequence
  Description of Artificial Sequence: Synthetic oligonucleotide
ggacacgucucuccauaug

SEQ ID NO: 1060631 - RNA, 19 nt, Artificial Sequence
  Description of Artificial Sequence: Synthetic oligonucleotide
guacggguagucugagaaa

SEQ ID NO: 1060632 - RNA, 19 nt, Artificial Sequence
  Description of Artificial Sequence: Synthetic oligonucleotide
ccaaaagagcuccagcaaa

SEQ ID NO: 1060633 - RNA, 19 nt, Artificial Sequence
  Description of Artificial Sequence: Synthetic oligonucleotide
ucgccaaccucuuguucuu

SEQ ID NO: 1060634 - RNA, 19 nt, Artificial Sequence
  Description of Artificial Sequence: Synthetic oligonucleotide
gcgauugaugaccauuuua

SEQ ID NO: 1060635 - RNA, 19 nt, Artificial Sequence
  Description of Artificial Sequence: Synthetic oligonucleotide
cacucuaaguacagugacu

SEQ ID NO: 1060636 - RNA, 19 nt, Artificial Sequence
  Description of Artificial Sequence: Synthetic oligonucleotide
cccgcaaucaaccgcucac

SEQ ID NO: 1060637 - RNA, 19 nt, Artificial Sequence
  Description of Artificial Sequence: Synthetic oligonucleotide
cacccgugcuggcaauagc

SEQ ID NO: 1060638 - RNA, 19 nt, Artificial Sequence
  Description of Artificial Sequence: Synthetic oligonucleotide
cuucgguuuccuucuuaaa

SEQ ID NO: 1060639 - RNA, 19 nt, Artificial Sequence
  Description of Artificial Sequence: Synthetic oligonucleotide
cccaaguauguaucuaaga

SEQ ID NO: 1060640 - RNA, 19 nt, Artificial Sequence
  Description of Artificial Sequence: Synthetic oligonucleotide
gcgucauuugucacaaaca

SEQ ID NO: 1060641 - RNA, 19 nt, Artificial Sequence
  Description of Artificial Sequence: Synthetic oligonucleotide
gacaagacgcuuaucccuu

SEQ ID NO: 1060642 - RNA, 19 nt, Artificial Sequence
  Description of Artificial Sequence: Synthetic oligonucleotide
cacuuugaguucagccuaa

SEQ ID NO: 1060643 - RNA, 19 nt, Artificial Sequence
  Description of Artificial Sequence: Synthetic oligonucleotide
gaaguuccucagcgagcuc

SEQ ID NO: 1060644 - RNA, 19 nt, Artificial Sequence
  Description of Artificial Sequence: Synthetic oligonucleotide
aucgaccgcccuuucuaua

SEQ ID NO: 1060645 - RNA, 19 nt, Artificial Sequence
  Description of Artificial Sequence: Synthetic oligonucleotide
ugaaacugacaggccgauu

SEQ ID NO: 1060646 - RNA, 19 nt, Artificial Sequence
  Description of Artificial Sequence: Synthetic oligonucleotide
ggacgugaagcgccauggc

SEQ ID NO: 1060647 - RNA, 19 nt, Artificial Sequence
  Description of Artificial Sequence: Synthetic oligonucleotide
ugggcccaccagcugguuu

SEQ ID NO: 1060648 - RNA, 19 nt, Artificial Sequence
  Description of Artificial Sequence: Synthetic oligonucleotide
cuucauuaccauacugcuu

SEQ ID NO: 1060649 - RNA, 19 nt, Artificial Sequence
  Description of Artificial Sequence: Synthetic oligonucleotide
cgugaagcgccauggccgg

SEQ ID NO: 1060650 - RNA, 19 nt, Artificial Sequence
  Description of Artificial Sequence: Synthetic oligonucleotide
auggccggcccgcaaucaa

SEQ ID NO: 1060651 - RNA, 19 nt, Artificial Sequence
  Description of Artificial Sequence: Synthetic oligonucleotide
cgcaaucaaccgcucacgc

SEQ ID NO: 1060652 - RNA, 19 nt, Artificial Sequence
  Description of Artificial Sequence: Synthetic oligonucleotide
cgguuacuaugacauuugc

SEQ ID NO: 1060653 - RNA, 19 nt, Artificial Sequence
  Description of Artificial Sequence: Synthetic oligonucleotide
gcugcgucauuugucacaa

SEQ ID NO: 1060654 - RNA, 19 nt, Artificial Sequence
  Description of Artificial Sequence: Synthetic oligonucleotide
ggguagucugagaaagcuc

SEQ ID NO: 1060655 - RNA, 19 nt, Artificial Sequence
  Description of Artificial Sequence: Synthetic oligonucleotide
ccaaaucgggaagaaucuc

SEQ ID NO: 1060656 - RNA, 19 nt, Artificial Sequence
  Description of Artificial Sequence: Synthetic oligonucleotide
gcuguacggguagucugag

SEQ ID NO: 1060657 - RNA, 19 nt, Artificial Sequence
  Description of Artificial Sequence: Synthetic oligonucleotide
caucaucgaccgcccuuuc

SEQ ID NO: 1060658 - RNA, 19 nt, Artificial Sequence
  Description of Artificial Sequence: Synthetic oligonucleotide
cuguacggguagucugaga

SEQ ID NO: 1060659 - RNA, 19 nt, Artificial Sequence
  Description of Artificial Sequence: Synthetic oligonucleotide
gccggcccgcaaucaaccg

SEQ ID NO: 1060660 - RNA, 19 nt, Artificial Sequence
  Description of Artificial Sequence: Synthetic oligonucleotide
ccggcccgcaaucaaccgc

SEQ ID NO: 1060661 - RNA, 19 nt, Artificial Sequence
  Description of Artificial Sequence: Synthetic oligonucleotide
ugcacccgugcuggcaaua

SEQ ID NO: 1060662 - RNA, 19 nt, Artificial Sequence
  Description of Artificial Sequence: Synthetic oligonucleotide
ccguggaauagcuucaaau

SEQ ID NO: 1060663 - RNA, 19 nt, Artificial Sequence
  Description of Artificial Sequence: Synthetic oligonucleotide
ggccggcccgcaaucaacc

SEQ ID NO: 1060664 - RNA, 19 nt, Artificial Sequence
  Description of Artificial Sequence: Synthetic oligonucleotide
guagaaccucgaagaacua

SEQ ID NO: 1060665 - RNA, 19 nt, Artificial Sequence
  Description of Artificial Sequence: Synthetic oligonucleotide
caaugagcuuggccagaaa

SEQ ID NO: 1060666 - RNA, 19 nt, Artificial Sequence
  Description of Artificial Sequence: Synthetic oligonucleotide
agcuccuugcaagcuugua

SEQ ID NO: 1060667 - RNA, 19 nt, Artificial Sequence
  Description of Artificial Sequence: Synthetic oligonucleotide
gcgagcuccaaaagagcuc

SEQ ID NO: 1060668 - RNA, 19 nt, Artificial Sequence
  Description of Artificial Sequence: Synthetic oligonucleotide
accgcccuuucuauaucau

SEQ ID NO: 1060669 - RNA, 19 nt, Artificial Sequence
  Description of Artificial Sequence: Synthetic oligonucleotide
gagcuccaaaagagcucca

SEQ ID NO: 1060670 - RNA, 19 nt, Artificial Sequence
  Description of Artificial Sequence: Synthetic oligonucleotide
cauggccggcccgcaauca

SEQ ID NO: 1060671 - RNA, 19 nt, Artificial Sequence
  Description of Artificial Sequence: Synthetic oligonucleotide
caucgaccgcccuuucuau

SEQ ID NO: 1060672 - RNA, 19 nt, Artificial Sequence
  Description of Artificial Sequence: Synthetic oligonucleotide
cauaugcuguacggguagu

SEQ ID NO: 1060673 - RNA, 19 nt, Artificial Sequence
  Description of Artificial Sequence: Synthetic oligonucleotide
ccuuuacagccggaacuuc

SEQ ID NO: 1060674 - RNA, 19 nt, Artificial Sequence
  Description of Artificial Sequence: Synthetic oligonucleotide
ccccuuagucucuguuauc

SEQ ID NO: 1060675 - RNA, 19 nt, Artificial Sequence
  Description of Artificial Sequence: Synthetic oligonucleotide
gcccgcaaucaaccgcuca

SEQ ID NO: 1060676 - RNA, 19 nt, Artificial Sequence
  Description of Artificial Sequence: Synthetic oligonucleotide
uggggacgugaagcgccau

SEQ ID NO: 1060677 - RNA, 19 nt, Artificial Sequence
  Description of Artificial Sequence: Synthetic oligonucleotide
cuugugcguccaugagacu

SEQ ID NO: 1060678 - RNA, 19 nt, Artificial Sequence
  Description of Artificial Sequence: Synthetic oligonucleotide
ccauggccggcccgcaauc

SEQ ID NO: 1060679 - RNA, 19 nt, Artificial Sequence
  Description of Artificial Sequence: Synthetic oligonucleotide
ccgauucucagaaguuccu

SEQ ID NO: 1060680 - RNA, 19 nt, Artificial Sequence
  Description of Artificial Sequence: Synthetic oligonucleotide
ggcgauugaugaccauuuu

SEQ ID NO: 1060681 - RNA, 19 nt, Artificial Sequence
  Description of Artificial Sequence: Synthetic oligonucleotide
cccgguuacuaugacauuu

SEQ ID NO: 1060682 - RNA, 19 nt, Artificial Sequence
  Description of Artificial Sequence: Synthetic oligonucleotide
cugcgucauuugucacaaa

SEQ ID NO: 1060683 - RNA, 19 nt, Artificial Sequence
  Description of Artificial Sequence: Synthetic oligonucleotide
gccuaaccaacaugauauu

SEQ ID NO: 1060684 - RNA, 19 nt, Artificial Sequence
  Description of Artificial Sequence: Synthetic oligonucleotide
ccgugcuggcaauagcuuu

SEQ ID NO: 1060685 - RNA, 19 nt, Artificial Sequence
  Description of Artificial Sequence: Synthetic oligonucleotide
gcccagaaucuuacauacu

SEQ ID NO: 1060686 - RNA, 19 nt, Artificial Sequence
  Description of Artificial Sequence: Synthetic oligonucleotide
cggcccgcaaucaaccgcu

SEQ ID NO: 1060687 - RNA, 19 nt, Artificial Sequence
  Description of Artificial Sequence: Synthetic oligonucleotide
ccuugcaagcuuguauauu

SEQ ID NO: 1060688 - RNA, 19 nt, Artificial Sequence
  Description of Artificial Sequence: Synthetic oligonucleotide
ggcccgcaaucaaccgcuc

SEQ ID NO: 1060689 - RNA, 19 nt, Artificial Sequence
  Description of Artificial Sequence: Synthetic oligonucleotide
cccgugcuggcaauagcuu

SEQ ID NO: 1060690 - RNA, 19 nt, Artificial Sequence
  Description of Artificial Sequence: Synthetic oligonucleotide
ccccgguuacuaugacauu

SEQ ID NO: 1060691 - RNA, 19 nt, Artificial Sequence
  Description of Artificial Sequence: Synthetic oligonucleotide
ccguccccuuagucucugu

SEQ ID NO: 1060692 - RNA, 19 nt, Artificial Sequence
  Description of Artificial Sequence: Synthetic oligonucleotide
ccggaacuucagccucaau

SEQ ID NO: 1060693 - RNA, 19 nt, Artificial Sequence
  Description of Artificial Sequence: Synthetic oligonucleotide
aauauugaagaguagucac

SEQ ID NO: 1060694 - RNA, 19 nt, Artificial Sequence
  Description of Artificial Sequence: Synthetic oligonucleotide
aguggaagaaaacaaaggc

SEQ ID NO: 1060695 - RNA, 19 nt, Artificial Sequence
  Description of Artificial Sequence: Synthetic oligonucleotide
acuaacauaaagcuuagac

SEQ ID NO: 1060696 - RNA, 19 nt, Artificial Sequence
  Description of Artificial Sequence: Synthetic oligonucleotide
uaacauaaagcuuagacgu

SEQ ID NO: 1060697 - RNA, 19 nt, Artificial Sequence
  Description of Artificial Sequence: Synthetic oligonucleotide
uaauaauuacaucuagugg

SEQ ID NO: 1060698 - RNA, 19 nt, Artificial Sequence
  Description of Artificial Sequence: Synthetic oligonucleotide
auaauaauuacaucuagug

SEQ ID NO: 1060699 - RNA, 19 nt, Artificial Sequence
  Description of Artificial Sequence: Synthetic oligonucleotide
aaugcaccauacuugagac

SEQ ID NO: 1060700 - RNA, 19 nt, Artificial Sequence
  Description of Artificial Sequence: Synthetic oligonucleotide
cuaacauaaagcuuagacg

SEQ ID NO: 1060701 - RNA, 19 nt, Artificial Sequence
  Description of Artificial Sequence: Synthetic oligonucleotide
aaacaaggcagcucuaucg

SEQ ID NO: 1060702 - RNA, 19 nt, Artificial Sequence
  Description of Artificial Sequence: Synthetic oligonucleotide
acuaacacuaacauaaagc

SEQ ID NO: 1060703 - RNA, 19 nt, Artificial Sequence
  Description of Artificial Sequence: Synthetic oligonucleotide
uuauuuaucauugguauag

SEQ ID NO: 1060704 - RNA, 19 nt, Artificial Sequence
  Description of Artificial Sequence: Synthetic oligonucleotide
uucuaguugaaauuucugg

SEQ ID NO: 1060705 - RNA, 19 nt, Artificial Sequence
  Description of Artificial Sequence: Synthetic oligonucleotide
aguguaaauguguccaugc

SEQ ID NO: 1060706 - RNA, 19 nt, Artificial Sequence
  Description of Artificial Sequence: Synthetic oligonucleotide
auagcagauauccaguggg

SEQ ID NO: 1060707 - RNA, 19 nt, Artificial Sequence
  Description of Artificial Sequence: Synthetic oligonucleotide
aggaguuaaaauucagacc

SEQ ID NO: 1060708 - RNA, 19 nt, Artificial Sequence
  Description of Artificial Sequence: Synthetic oligonucleotide
aauuucuggaaguaggcgu

SEQ ID NO: 1060709 - RNA, 19 nt, Artificial Sequence
  Description of Artificial Sequence: Synthetic oligonucleotide
cauucuucggaauuuaacc

SEQ ID NO: 1060710 - RNA, 19 nt, Artificial Sequence
  Description of Artificial Sequence: Synthetic oligonucleotide
gaauucaggaucaagcagg

SEQ ID NO: 1060711 - RNA, 19 nt, Artificial Sequence
  Description of Artificial Sequence: Synthetic oligonucleotide
uguguucuaaacaacugcc

SEQ ID NO: 1060712 - RNA, 19 nt, Artificial Sequence
  Description of Artificial Sequence: Synthetic oligonucleotide
aaugcagcaaugccuaaag

SEQ ID NO: 1060713 - RNA, 19 nt, Artificial Sequence
  Description of Artificial Sequence: Synthetic oligonucleotide
gacucaucaccauagagcc

SEQ ID NO: 1060714 - RNA, 19 nt, Artificial Sequence
  Description of Artificial Sequence: Synthetic oligonucleotide
auucuucggaauuuaaccg

SEQ ID NO: 1060715 - RNA, 19 nt, Artificial Sequence
  Description of Artificial Sequence: Synthetic oligonucleotide
gucacaauaauagugcugg

SEQ ID NO: 1060716 - RNA, 19 nt, Artificial Sequence
  Description of Artificial Sequence: Synthetic oligonucleotide
ucuaguugaaauuucugga

SEQ ID NO: 1060717 - RNA, 19 nt, Artificial Sequence
  Description of Artificial Sequence: Synthetic oligonucleotide
uaaacaacugccuaucaac

SEQ ID NO: 1060718 - RNA, 19 nt, Artificial Sequence
  Description of Artificial Sequence: Synthetic oligonucleotide
uaugaucauaaguugaccu

SEQ ID NO: 1060719 - RNA, 19 nt, Artificial Sequence
  Description of Artificial Sequence: Synthetic oligonucleotide
accaaacaagcuuucagcg

SEQ ID NO: 1060720 - RNA, 19 nt, Artificial Sequence
  Description of Artificial Sequence: Synthetic oligonucleotide
aacacuaacauaaagcuua

SEQ ID NO: 1060721 - RNA, 19 nt, Artificial Sequence
  Description of Artificial Sequence: Synthetic oligonucleotide
uguagauuaacucuuucua

SEQ ID NO: 1060722 - RNA, 19 nt, Artificial Sequence
  Description of Artificial Sequence: Synthetic oligonucleotide
aaggagagucuuuaauuuc

SEQ ID NO: 1060723 - RNA, 19 nt, Artificial Sequence
  Description of Artificial Sequence: Synthetic oligonucleotide
uuagacgugucccaugaag

SEQ ID NO: 1060724 - RNA, 19 nt, Artificial Sequence
  Description of Artificial Sequence: Synthetic oligonucleotide
uuaaccgaaccuuugcaag

SEQ ID NO: 1060725 - RNA, 19 nt, Artificial Sequence
  Description of Artificial Sequence: Synthetic oligonucleotide
uguaugaucauaaguugac

SEQ ID NO: 1060726 - RNA, 19 nt, Artificial Sequence
  Description of Artificial Sequence: Synthetic oligonucleotide
ugcaccauacuugagacag

SEQ ID NO: 1060727 - RNA, 19 nt, Artificial Sequence
  Description of Artificial Sequence: Synthetic oligonucleotide
agcaaaauguacugcuccc

SEQ ID NO: 1060728 - RNA, 19 nt, Artificial Sequence
  Description of Artificial Sequence: Synthetic oligonucleotide
uguuauggauuucuuaaac

SEQ ID NO: 1060729 - RNA, 19 nt, Artificial Sequence
  Description of Artificial Sequence: Synthetic oligonucleotide
auuucagaaaugauguuac

SEQ ID NO: 1060730 - RNA, 19 nt, Artificial Sequence
  Description of Artificial Sequence: Synthetic oligonucleotide
aaaggugaucaacccaccg

SEQ ID NO: 1060731 - RNA, 19 nt, Artificial Sequence
  Description of Artificial Sequence: Synthetic oligonucleotide
cuaguggaagaaaacaaag

SEQ ID NO: 1060732 - RNA, 19 nt, Artificial Sequence
  Description of Artificial Sequence: Synthetic oligonucleotide
agucucuugaguuuuaggu

SEQ ID NO: 1060733 - RNA, 19 nt, Artificial Sequence
  Description of Artificial Sequence: Synthetic oligonucleotide
aaaauucagaccauccaag

SEQ ID NO: 1060734 - RNA, 19 nt, Artificial Sequence
  Description of Artificial Sequence: Synthetic oligonucleotide
aaauuucuggaaguaggcg

SEQ ID NO: 1060735 - RNA, 19 nt, Artificial Sequence
  Description of Artificial Sequence: Synthetic oligonucleotide
acuaacaagggccaggccu

SEQ ID NO: 1060736 - RNA, 19 nt, Artificial Sequence
  Description of Artificial Sequence: Synthetic oligonucleotide
uaugucguuagacaaugca

SEQ ID NO: 1060737 - RNA, 19 nt, Artificial Sequence
  Description of Artificial Sequence: Synthetic oligonucleotide
auaaagcuuagacgugucc

SEQ ID NO: 1060738 - RNA, 19 nt, Artificial Sequence
  Description of Artificial Sequence: Synthetic oligonucleotide
uucggaauuuaaccgaacc

SEQ ID NO: 1060739 - RNA, 19 nt, Artificial Sequence
  Description of Artificial Sequence: Synthetic oligonucleotide
uauugaagaguagucacag

SEQ ID NO: 1060740 - RNA, 19 nt, Artificial Sequence
  Description of Artificial Sequence: Synthetic oligonucleotide
aauaauagugcugguuauc

SEQ ID NO: 1060741 - RNA, 19 nt, Artificial Sequence
  Description of Artificial Sequence: Synthetic oligonucleotide
uuucuuaugucguuagaca

SEQ ID NO: 1060742 - RNA, 19 nt, Artificial Sequence
  Description of Artificial Sequence: Synthetic oligonucleotide
uaacacaacuaacaagggc

SEQ ID NO: 1060743 - RNA, 19 nt, Artificial Sequence
  Description of Artificial Sequence: Synthetic oligonucleotide
agagauuucagaaaugaug

SEQ ID NO: 1060744 - RNA, 19 nt, Artificial Sequence
  Description of Artificial Sequence: Synthetic oligonucleotide
guagauuaacucuuucuag

SEQ ID NO: 1060745 - RNA, 19 nt, Artificial Sequence
  Description of Artificial Sequence: Synthetic oligonucleotide
uguacaaucucuuguuaug

SEQ ID NO: 1060746 - RNA, 19 nt, Artificial Sequence
  Description of Artificial Sequence: Synthetic oligonucleotide
uucugauugacuuguggag

SEQ ID NO: 1060747 - RNA, 19 nt, Artificial Sequence
  Description of Artificial Sequence: Synthetic oligonucleotide
aagaguaguagcuggucug

SEQ ID NO: 1060748 - RNA, 19 nt, Artificial Sequence
  Description of Artificial Sequence: Synthetic oligonucleotide
uagauuaacucuuucuagu

SEQ ID NO: 1060749 - RNA, 19 nt, Artificial Sequence
  Description of Artificial Sequence: Synthetic oligonucleotide
uaggcguuuucacagagca

SEQ ID NO: 1060750 - RNA, 19 nt, Artificial Sequence
  Description of Artificial Sequence: Synthetic oligonucleotide
uuuccuuguaugaucauaa

SEQ ID NO: 1060751 - RNA, 19 nt, Artificial Sequence
  Description of Artificial Sequence: Synthetic oligonucleotide
aauucugagcaauaauuua

SEQ ID NO: 1060752 - RNA, 19 nt, Artificial Sequence
  Description of Artificial Sequence: Synthetic oligonucleotide
aagacuaugaggcccaauu

SEQ ID NO: 1060753 - RNA, 19 nt, Artificial Sequence
  Description of Artificial Sequence: Synthetic oligonucleotide
acaauaauagugcugguua

SEQ ID NO: 1060754 - RNA, 19 nt, Artificial Sequence
  Description of Artificial Sequence: Synthetic oligonucleotide
uucagaaaugauguuacug

SEQ ID NO: 1060755 - RNA, 19 nt, Artificial Sequence
  Description of Artificial Sequence: Synthetic oligonucleotide
uuuucuuaugucguuagac

SEQ ID NO: 1060756 - RNA, 19 nt, Artificial Sequence
  Description of Artificial Sequence: Synthetic oligonucleotide
gauuaacucuuucuaguug

SEQ ID NO: 1060757 - RNA, 19 nt, Artificial Sequence
  Description of Artificial Sequence: Synthetic oligonucleotide
cagcgagucacaauaauag

SEQ ID NO: 1060758 - RNA, 19 nt, Artificial Sequence
  Description of Artificial Sequence: Synthetic oligonucleotide
uaaagcuuagacguguccc

SEQ ID NO: 1060759 - RNA, 19 nt, Artificial Sequence
  Description of Artificial Sequence: Synthetic oligonucleotide
aaagcuuagacguguccca

SEQ ID NO: 1060760 - RNA, 19 nt, Artificial Sequence
  Description of Artificial Sequence: Synthetic oligonucleotide
aggucagucccucucacac

SEQ ID NO: 1060761 - RNA, 19 nt, Artificial Sequence
  Description of Artificial Sequence: Synthetic oligonucleotide
ugccuaucaacacaggcac

SEQ ID NO: 1060762 - RNA, 19 nt, Artificial Sequence
  Description of Artificial Sequence: Synthetic oligonucleotide
caaagcaacccagagagag

SEQ ID NO: 1060763 - RNA, 19 nt, Artificial Sequence
  Description of Artificial Sequence: Synthetic oligonucleotide
uaacugaacgcccucugcc

SEQ ID NO: 1060764 - RNA, 19 nt, Artificial Sequence
  Description of Artificial Sequence: Synthetic oligonucleotide
caauaaaucuuugccagcc

SEQ ID NO: 1060765 - RNA, 19 nt, Artificial Sequence
  Description of Artificial Sequence: Synthetic oligonucleotide
cuuguuauggauuucuuaa

SEQ ID NO: 1060766 - RNA, 19 nt, Artificial Sequence
  Description of Artificial Sequence: Synthetic oligonucleotide
aacaauccagucucuugag

SEQ ID NO: 1060767 - RNA, 19 nt, Artificial Sequence
  Description of Artificial Sequence: Synthetic oligonucleotide
aaccgaaccuuugcaagcc

SEQ ID NO: 1060768 - RNA, 19 nt, Artificial Sequence
  Description of Artificial Sequence: Synthetic oligonucleotide
uucuuaugucguuagacaa

SEQ ID NO: 1060769 - RNA, 19 nt, Artificial Sequence
  Description of Artificial Sequence: Synthetic oligonucleotide
aaucucuuguuauggauuu

SEQ ID NO: 1060770 - RNA, 19 nt, Artificial Sequence
  Description of Artificial Sequence: Synthetic oligonucleotide
ucggaauuuaaccgaaccu

SEQ ID NO: 1060771 - RNA, 19 nt, Artificial Sequence
  Description of Artificial Sequence: Synthetic oligonucleotide
cauguaucugagaagccag

SEQ ID NO: 1060772 - RNA, 19 nt, Artificial Sequence
  Description of Artificial Sequence: Synthetic oligonucleotide
gacuaugaggcccaauuac

SEQ ID NO: 1060773 - RNA, 19 nt, Artificial Sequence
  Description of Artificial Sequence: Synthetic oligonucleotide
uggcauguaucugagaagc

SEQ ID NO: 1060774 - RNA, 19 nt, Artificial Sequence
  Description of Artificial Sequence: Synthetic oligonucleotide
ugcggccuuaagaaggugg

SEQ ID NO: 1060775 - RNA, 19 nt, Artificial Sequence
  Description of Artificial Sequence: Synthetic oligonucleotide
uguucuaaacaacugccua

SEQ ID NO: 1060776 - RNA, 19 nt, Artificial Sequence
  Description of Artificial Sequence: Synthetic oligonucleotide
ugaaggagagucuuuaauu

SEQ ID NO: 1060777 - RNA, 19 nt, Artificial Sequence
  Description of Artificial Sequence: Synthetic oligonucleotide
caagcuuucagcgagucac

SEQ ID NO: 1060778 - RNA, 19 nt, Artificial Sequence
  Description of Artificial Sequence: Synthetic oligonucleotide
acacuacacacuuucccac

SEQ ID NO: 1060779 - RNA, 19 nt, Artificial Sequence
  Description of Artificial Sequence: Synthetic oligonucleotide
ucacagggauccuaaaagc

SEQ ID NO: 1060780 - RNA, 19 nt, Artificial Sequence
  Description of Artificial Sequence: Synthetic oligonucleotide
aagccaugcugcccgauuc

SEQ ID NO: 1060781 - RNA, 19 nt, Artificial Sequence
  Description of Artificial Sequence: Synthetic oligonucleotide
uuuaaccgaaccuuugcaa

SEQ ID NO: 1060782 - RNA, 19 nt, Artificial Sequence
  Description of Artificial Sequence: Synthetic oligonucleotide
auguuacuggaaugugucc

SEQ ID NO: 1060783 - RNA, 19 nt, Artificial Sequence
  Description of Artificial Sequence: Synthetic oligonucleotide
uagacgugucccaugaaga

SEQ ID NO: 1060784 - RNA, 19 nt, Artificial Sequence
  Description of Artificial Sequence: Synthetic oligonucleotide
ucgggcauagucugcauag

SEQ ID NO: 1060785 - RNA, 19 nt, Artificial Sequence
  Description of Artificial Sequence: Synthetic oligonucleotide
uucuucggaauuuaaccga

SEQ ID NO: 1060786 - RNA, 19 nt, Artificial Sequence
  Description of Artificial Sequence: Synthetic oligonucleotide
ucaagcaggaguuuucuua

SEQ ID NO: 1060787 - RNA, 19 nt, Artificial Sequence
  Description of Artificial Sequence: Synthetic oligonucleotide
ugugaagcgucucugccac

SEQ ID NO: 1060788 - RNA, 19 nt, Artificial Sequence
  Description of Artificial Sequence: Synthetic oligonucleotide
acaaaaugcagcaaugccu

SEQ ID NO: 1060789 - RNA, 19 nt, Artificial Sequence
  Description of Artificial Sequence: Synthetic oligonucleotide
cuuaagaaggugguaacac

SEQ ID NO: 1060790 - RNA, 19 nt, Artificial Sequence
  Description of Artificial Sequence: Synthetic oligonucleotide
ugucguuagacaaugcauu

SEQ ID NO: 1060791 - RNA, 19 nt, Artificial Sequence
  Description of Artificial Sequence: Synthetic oligonucleotide
aauccacucaaauguucug

SEQ ID NO: 1060792 - RNA, 19 nt, Artificial Sequence
  Description of Artificial Sequence: Synthetic oligonucleotide
caugaagacuaugaggccc

SEQ ID NO: 1060793 - RNA, 19 nt, Artificial Sequence
  Description of Artificial Sequence: Synthetic oligonucleotide
cuuaauggugcucugagaa

SEQ ID NO: 1060794 - RNA, 19 nt, Artificial Sequence
  Description of Artificial Sequence: Synthetic oligonucleotide
auuuaaccgaaccuuugca

SEQ ID NO: 1060795 - RNA, 19 nt, Artificial Sequence
  Description of Artificial Sequence: Synthetic oligonucleotide
guuauggauuucuuaaaca

SEQ ID NO: 1060796 - RNA, 19 nt, Artificial Sequence
  Description of Artificial Sequence: Synthetic oligonucleotide
gauguuacuggaauguguc

SEQ ID NO: 1060797 - RNA, 19 nt, Artificial Sequence
  Description of Artificial Sequence: Synthetic oligonucleotide
guacaaucucuuguuaugg

SEQ ID NO: 1060798 - RNA, 19 nt, Artificial Sequence
  Description of Artificial Sequence: Synthetic oligonucleotide
ucaccauagagccuuggaa

SEQ ID NO: 1060799 - RNA, 19 nt, Artificial Sequence
  Description of Artificial Sequence: Synthetic oligonucleotide
uaaaucuuugccagccgcu

SEQ ID NO: 1060800 - RNA, 19 nt, Artificial Sequence
  Description of Artificial Sequence: Synthetic oligonucleotide
cucgccauaugucugcagg

SEQ ID NO: 1060801 - RNA, 19 nt, Artificial Sequence
  Description of Artificial Sequence: Synthetic oligonucleotide
cuuaugucguuagacaaug

SEQ ID NO: 1060802 - RNA, 19 nt, Artificial Sequence
  Description of Artificial Sequence: Synthetic oligonucleotide
uaaccgaaccuuugcaagc

SEQ ID NO: 1060803 - RNA, 19 nt, Artificial Sequence
  Description of Artificial Sequence: Synthetic oligonucleotide
ucugccaacuugccauugg

SEQ ID NO: 1060804 - RNA, 19 nt, Artificial Sequence
  Description of Artificial Sequence: Synthetic oligonucleotide
uucacaucagucugaccag

SEQ ID NO: 1060805 - RNA, 19 nt, Artificial Sequence
  Description of Artificial Sequence: Synthetic oligonucleotide
ugccaacuugccauuggcg

SEQ ID NO: 1060806 - RNA, 19 nt, Artificial Sequence
  Description of Artificial Sequence: Synthetic oligonucleotide
agucugaccagaccacgac

SEQ ID NO: 1060807 - RNA, 19 nt, Artificial Sequence
  Description of Artificial Sequence: Synthetic oligonucleotide
uccacucaaauguucugcc

SEQ ID NO: 1060808 - RNA, 19 nt, Artificial Sequence
  Description of Artificial Sequence: Synthetic oligonucleotide
acauucuucggaauuuaac

SEQ ID NO: 1060809 - RNA, 19 nt, Artificial Sequence
  Description of Artificial Sequence: Synthetic oligonucleotide
acagggauccuaaaagcac

SEQ ID NO: 1060810 - RNA, 19 nt, Artificial Sequence
  Description of Artificial Sequence: Synthetic oligonucleotide
uugccauuggcgaucauau

SEQ ID NO: 1060811 - RNA, 19 nt, Artificial Sequence
  Description of Artificial Sequence: Synthetic oligonucleotide
ucugauugacuuguggaga

SEQ ID NO: 1060812 - RNA, 19 nt, Artificial Sequence
  Description of Artificial Sequence: Synthetic oligonucleotide
cacacuuucccacugugug

SEQ ID NO: 1060813 - RNA, 19 nt, Artificial Sequence
  Description of Artificial Sequence: Synthetic oligonucleotide
ucugagcaauaauuuauaa

SEQ ID NO: 1060814 - RNA, 19 nt, Artificial Sequence
  Description of Artificial Sequence: Synthetic oligonucleotide
acgacagcgacugugagca

SEQ ID NO: 1060815 - RNA, 19 nt, Artificial Sequence
  Description of Artificial Sequence: Synthetic oligonucleotide
ucagcgagucacaauaaua

SEQ ID NO: 1060816 - RNA, 19 nt, Artificial Sequence
  Description of Artificial Sequence: Synthetic oligonucleotide
ucuaucgaaguaccucaug

SEQ ID NO: 1060817 - RNA, 19 nt, Artificial Sequence
  Description of Artificial Sequence: Synthetic oligonucleotide
ucuuaugucguuagacaau

SEQ ID NO: 1060818 - RNA, 19 nt, Artificial Sequence
  Description of Artificial Sequence: Synthetic oligonucleotide
aagcaacccagagagagga

SEQ ID NO: 1060819 - RNA, 19 nt, Artificial Sequence
  Description of Artificial Sequence: Synthetic oligonucleotide
aagcgucucugccacacug

SEQ ID NO: 1060820 - RNA, 19 nt, Artificial Sequence
  Description of Artificial Sequence: Synthetic oligonucleotide
uaucgaaguaccucaugcu

SEQ ID NO: 1060821 - RNA, 19 nt, Artificial Sequence
  Description of Artificial Sequence: Synthetic oligonucleotide
aacugaacgcccucugcca

SEQ ID NO: 1060822 - RNA, 19 nt, Artificial Sequence
  Description of Artificial Sequence: Synthetic oligonucleotide
gaacaugucacccuucugu

SEQ ID NO: 1060823 - RNA, 19 nt, Artificial Sequence
  Description of Artificial Sequence: Synthetic oligonucleotide
ucuuguuauggauuucuua

SEQ ID NO: 1060824 - RNA, 19 nt, Artificial Sequence
  Description of Artificial Sequence: Synthetic oligonucleotide
caugguaguuccugcacag

SEQ ID NO: 1060825 - RNA, 19 nt, Artificial Sequence
  Description of Artificial Sequence: Synthetic oligonucleotide
ucuaucaggcagaguaacu

SEQ ID NO: 1060826 - RNA, 19 nt, Artificial Sequence
  Description of Artificial Sequence: Synthetic oligonucleotide
agaacuggcuccuagugua

SEQ ID NO: 1060827 - RNA, 19 nt, Artificial Sequence
  Description of Artificial Sequence: Synthetic oligonucleotide
agcucuaucgaaguaccuc

SEQ ID NO: 1060828 - RNA, 19 nt, Artificial Sequence
  Description of Artificial Sequence: Synthetic oligonucleotide
gaauuuaaccgaaccuuug

SEQ ID NO: 1060829 - RNA, 19 nt, Artificial Sequence
  Description of Artificial Sequence: Synthetic oligonucleotide
caagagagugaauucagga

SEQ ID NO: 1060830 - RNA, 19 nt, Artificial Sequence
  Description of Artificial Sequence: Synthetic oligonucleotide
cauauugguugccaccagc

SEQ ID NO: 1060831 - RNA, 19 nt, Artificial Sequence
  Description of Artificial Sequence: Synthetic oligonucleotide
acaucuaguggaagaaaac

SEQ ID NO: 1060832 - RNA, 19 nt, Artificial Sequence
  Description of Artificial Sequence: Synthetic oligonucleotide
aguaggcguuuucacagag

SEQ ID NO: 1060833 - RNA, 19 nt, Artificial Sequence
  Description of Artificial Sequence: Synthetic oligonucleotide
ugguaguuccugcacagaa

SEQ ID NO: 1060834 - RNA, 19 nt, Artificial Sequence
  Description of Artificial Sequence: Synthetic oligonucleotide
cacuaacacuaacauaaag

SEQ ID NO: 1060835 - RNA, 19 nt, Artificial Sequence
  Description of Artificial Sequence: Synthetic oligonucleotide
agauguacaaucucuuguu

SEQ ID NO: 1060836 - RNA, 19 nt, Artificial Sequence
  Description of Artificial Sequence: Synthetic oligonucleotide
uucugagcaauaauuuaua

SEQ ID NO: 1060837 - RNA, 19 nt, Artificial Sequence
  Description of Artificial Sequence: Synthetic oligonucleotide
aaguaccucaugcugugaa

SEQ ID NO: 1060838 - RNA, 19 nt, Artificial Sequence
  Description of Artificial Sequence: Synthetic oligonucleotide
acugaucugagcucacaug

SEQ ID NO: 1060839 - RNA, 19 nt, Artificial Sequence
  Description of Artificial Sequence: Synthetic oligonucleotide
uccuaguguaaaugugucc

SEQ ID NO: 1060840 - RNA, 19 nt, Artificial Sequence
  Description of Artificial Sequence: Synthetic oligonucleotide
cauggcauguaucugagaa

SEQ ID NO: 1060841 - RNA, 19 nt, Artificial Sequence
  Description of Artificial Sequence: Synthetic oligonucleotide
augcagcaaugccuaaagc

SEQ ID NO: 1060842 - RNA, 19 nt, Artificial Sequence
  Description of Artificial Sequence: Synthetic oligonucleotide
cuaucaggcagaguaacug

SEQ ID NO: 1060843 - RNA, 19 nt, Artificial Sequence
  Description of Artificial Sequence: Synthetic oligonucleotide
uaacacuaacauaaagcuu

SEQ ID NO: 1060844 - RNA, 19 nt, Artificial Sequence
  Description of Artificial Sequence: Synthetic oligonucleotide
uccuaaaagcacuuuccaa

SEQ ID NO: 1060845 - RNA, 19 nt, Artificial Sequence
  Description of Artificial Sequence: Synthetic oligonucleotide
auagucugcauagauggca

SEQ ID NO: 1060846 - RNA, 19 nt, Artificial Sequence
  Description of Artificial Sequence: Synthetic oligonucleotide
cuaggaguuaaaauucaga

SEQ ID NO: 1060847 - RNA, 19 nt, Artificial Sequence
  Description of Artificial Sequence: Synthetic oligonucleotide
auguacaaucucuuguuau

SEQ ID NO: 1060848 - RNA, 19 nt, Artificial Sequence
  Description of Artificial Sequence: Synthetic oligonucleotide
cccacuaacacuaacauaa

SEQ ID NO: 1060849 - RNA, 19 nt, Artificial Sequence
  Description of Artificial Sequence: Synthetic oligonucleotide
cuuucagcgagucacaaua

SEQ ID NO: 1060850 - RNA, 19 nt, Artificial Sequence
  Description of Artificial Sequence: Synthetic oligonucleotide
cauaugucugcagguagcg

SEQ ID NO: 1060851 - RNA, 19 nt, Artificial Sequence
  Description of Artificial Sequence: Synthetic oligonucleotide
cagggaauccacucaaaug

SEQ ID NO: 1060852 - RNA, 19 nt, Artificial Sequence
  Description of Artificial Sequence: Synthetic oligonucleotide
aacauaaagcuuagacgug

SEQ ID NO: 1060853 - RNA, 19 nt, Artificial Sequence
  Description of Artificial Sequence: Synthetic oligonucleotide
agaguaacugaacgcccuc

SEQ ID NO: 1060854 - RNA, 19 nt, Artificial Sequence
  Description of Artificial Sequence: Synthetic oligonucleotide
aguaccucaugcugugaag

SEQ ID NO: 1060855 - RNA, 19 nt, Artificial Sequence
  Description of Artificial Sequence: Synthetic oligonucleotide
agauuaacucuuucuaguu

SEQ ID NO: 1060856 - RNA, 19 nt, Artificial Sequence
  Description of Artificial Sequence: Synthetic oligonucleotide
gaaccuuugcaagccaugc

SEQ ID NO: 1060857 - RNA, 19 nt, Artificial Sequence
  Description of Artificial Sequence: Synthetic oligonucleotide
uguaucugagaagccagca

SEQ ID NO: 1060858 - RNA, 19 nt, Artificial Sequence
  Description of Artificial Sequence: Synthetic oligonucleotide
caguggugaccaaacaagc

SEQ ID NO: 1060859 - RNA, 19 nt, Artificial Sequence
  Description of Artificial Sequence: Synthetic oligonucleotide
uguccuguggagcaccuuc

SEQ ID NO: 1060860 - RNA, 19 nt, Artificial Sequence
  Description of Artificial Sequence: Synthetic oligonucleotide
augccuaaagcagggaauc

SEQ ID NO: 1060861 - RNA, 19 nt, Artificial Sequence
  Description of Artificial Sequence: Synthetic oligonucleotide
aaugccuaaagcagggaau

SEQ ID NO: 1060862 - RNA, 19 nt, Artificial Sequence
  Description of Artificial Sequence: Synthetic oligonucleotide
aguaacugaacgcccucug

SEQ ID NO: 1060863 - RNA, 19 nt, Artificial Sequence
  Description of Artificial Sequence: Synthetic oligonucleotide
auugguugccaccagcuua

SEQ ID NO: 1060864 - RNA, 19 nt, Artificial Sequence
  Description of Artificial Sequence: Synthetic oligonucleotide
aauguguccuaggaguuaa

SEQ ID NO: 1060865 - RNA, 19 nt, Artificial Sequence
  Description of Artificial Sequence: Synthetic oligonucleotide
gauuccacucgccauaugu

SEQ ID NO: 1060866 - RNA, 19 nt, Artificial Sequence
  Description of Artificial Sequence: Synthetic oligonucleotide
ucugacccaagaguaguag

SEQ ID NO: 1060867 - RNA, 19 nt, Artificial Sequence
  Description of Artificial Sequence: Synthetic oligonucleotide
auggcauguaucugagaag

SEQ ID NO: 1060868 - RNA, 19 nt, Artificial Sequence
  Description of Artificial Sequence: Synthetic oligonucleotide
acauaaagcuuagacgugu

SEQ ID NO: 1060869 - RNA, 19 nt, Artificial Sequence
  Description of Artificial Sequence: Synthetic oligonucleotide
gacaguggugaccaaacaa

SEQ ID NO: 1060870 - RNA, 19 nt, Artificial Sequence
  Description of Artificial Sequence: Synthetic oligonucleotide
ucagucugaccagaccacg

SEQ ID NO: 1060871 - RNA, 19 nt, Artificial Sequence
  Description of Artificial Sequence: Synthetic oligonucleotide
agugcugguuaucugcacu

SEQ ID NO: 1060872 - RNA, 19 nt, Artificial Sequence
  Description of Artificial Sequence: Synthetic oligonucleotide
uuaugucguuagacaaugc

SEQ ID NO: 1060873 - RNA, 19 nt, Artificial Sequence
  Description of Artificial Sequence: Synthetic oligonucleotide
uucuaaacaacugccuauc

SEQ ID NO: 1060874 - RNA, 19 nt, Artificial Sequence
  Description of Artificial Sequence: Synthetic oligonucleotide
gauugacuuguggagaaca

SEQ ID NO: 1060875 - RNA, 19 nt, Artificial Sequence
  Description of Artificial Sequence: Synthetic oligonucleotide
augaucauaaguugaccuu

SEQ ID NO: 1060876 - RNA, 19 nt, Artificial Sequence
  Description of Artificial Sequence: Synthetic oligonucleotide
uccaguggguuguucagcu

SEQ ID NO: 1060877 - RNA, 19 nt, Artificial Sequence
  Description of Artificial Sequence: Synthetic oligonucleotide
uaugaggcccaauuacaaa

SEQ ID NO: 1060878 - RNA, 19 nt, Artificial Sequence
  Description of Artificial Sequence: Synthetic oligonucleotide
ugaucauaaguugaccuuu

SEQ ID NO: 1060879 - RNA, 19 nt, Artificial Sequence
  Description of Artificial Sequence: Synthetic oligonucleotide
uccacucgccauaugucug

SEQ ID NO: 1060880 - RNA, 19 nt, Artificial Sequence
  Description of Artificial Sequence: Synthetic oligonucleotide
gagagugaauucaggauca

SEQ ID NO: 1060881 - RNA, 19 nt, Artificial Sequence
  Description of Artificial Sequence: Synthetic oligonucleotide
aaccugcggccuuaagaag

SEQ ID NO: 1060882 - RNA, 19 nt, Artificial Sequence
  Description of Artificial Sequence: Synthetic oligonucleotide
guaacugaacgcccucugc

SEQ ID NO: 1060883 - RNA, 19 nt, Artificial Sequence
  Description of Artificial Sequence: Synthetic oligonucleotide
uaguguaaauguguccaug

SEQ ID NO: 1060884 - RNA, 19 nt, Artificial Sequence
  Description of Artificial Sequence: Synthetic oligonucleotide
guaugaucauaaguugacc

SEQ ID NO: 1060885 - RNA, 19 nt, Artificial Sequence
  Description of Artificial Sequence: Synthetic oligonucleotide
cacugacaaagcaacccag

SEQ ID NO: 1060886 - RNA, 19 nt, Artificial Sequence
  Description of Artificial Sequence: Synthetic oligonucleotide
aaccaaggcucuucaggcu

SEQ ID NO: 1060887 - RNA, 19 nt, Artificial Sequence
  Description of Artificial Sequence: Synthetic oligonucleotide
cagaccacgacagcgacug

SEQ ID NO: 1060888 - RNA, 19 nt, Artificial Sequence
  Description of Artificial Sequence: Synthetic oligonucleotide
ugucuaucaggcagaguaa

SEQ ID NO: 1060889 - RNA, 19 nt, Artificial Sequence
  Description of Artificial Sequence: Synthetic oligonucleotide
cuuccuguagauuaacucu

SEQ ID NO: 1060890 - RNA, 19 nt, Artificial Sequence
  Description of Artificial Sequence: Synthetic oligonucleotide
agcgagucacaauaauagu

SEQ ID NO: 1060891 - RNA, 19 nt, Artificial Sequence
  Description of Artificial Sequence: Synthetic oligonucleotide
caucuaguggaagaaaaca

SEQ ID NO: 1060892 - RNA, 19 nt, Artificial Sequence
  Description of Artificial Sequence: Synthetic oligonucleotide
cugccuaucaacacaggca

SEQ ID NO: 1060893 - RNA, 19 nt, Artificial Sequence
  Description of Artificial Sequence: Synthetic oligonucleotide
auguaucugagaagccagc

SEQ ID NO: 1060894 - RNA, 19 nt, Artificial Sequence
  Description of Artificial Sequence: Synthetic oligonucleotide
aaaugcagcaaugccuaaa

SEQ ID NO: 1060895 - RNA, 19 nt, Artificial Sequence
  Description of Artificial Sequence: Synthetic oligonucleotide
accugcggccuuaagaagg

SEQ ID NO: 1060896 - RNA, 19 nt, Artificial Sequence
  Description of Artificial Sequence: Synthetic oligonucleotide
uucagcgagucacaauaau

SEQ ID NO: 1060897 - RNA, 19 nt, Artificial Sequence
  Description of Artificial Sequence: Synthetic oligonucleotide
aaguaggcguuuucacaga

SEQ ID NO: 1060898 - RNA, 19 nt, Artificial Sequence
  Description of Artificial Sequence: Synthetic oligonucleotide
auauugaagaguagucaca

SEQ ID NO: 1060899 - RNA, 19 nt, Artificial Sequence
  Description of Artificial Sequence: Synthetic oligonucleotide
cagagcacaucauagcaga

SEQ ID NO: 1060900 - RNA, 19 nt, Artificial Sequence
  Description of Artificial Sequence: Synthetic oligonucleotide
gagugaauucaggaucaag

SEQ ID NO: 1060901 - RNA, 19 nt, Artificial Sequence
  Description of Artificial Sequence: Synthetic oligonucleotide
gucguuagacaaugcauuc

SEQ ID NO: 1060902 - RNA, 19 nt, Artificial Sequence
  Description of Artificial Sequence: Synthetic oligonucleotide
aggagagucuuuaauuucu

SEQ ID NO: 1060903 - RNA, 19 nt, Artificial Sequence
  Description of Artificial Sequence: Synthetic oligonucleotide
gcucacaugagacacagaa

SEQ ID NO: 1060904 - RNA, 19 nt, Artificial Sequence
  Description of Artificial Sequence: Synthetic oligonucleotide
aucaccauagagccuugga

SEQ ID NO: 1060905 - RNA, 19 nt, Artificial Sequence
  Description of Artificial Sequence: Synthetic oligonucleotide
uggcuccuaguguaaaugu

SEQ ID NO: 1060906 - RNA, 19 nt, Artificial Sequence
  Description of Artificial Sequence: Synthetic oligonucleotide
accagcuuaauggugcucu

SEQ ID NO: 1060907 - RNA, 19 nt, Artificial Sequence
  Description of Artificial Sequence: Synthetic oligonucleotide
gaagaguagucacagggau

SEQ ID NO: 1060908 - RNA, 19 nt, Artificial Sequence
  Description of Artificial Sequence: Synthetic oligonucleotide
uuucagcgagucacaauaa

SEQ ID NO: 1060909 - RNA, 19 nt, Artificial Sequence
  Description of Artificial Sequence: Synthetic oligonucleotide
agcccacuaacacuaacau

SEQ ID NO: 1060910 - RNA, 19 nt, Artificial Sequence
  Description of Artificial Sequence: Synthetic oligonucleotide
auccaagcccacuaacacu

SEQ ID NO: 1060911 - RNA, 19 nt, Artificial Sequence
  Description of Artificial Sequence: Synthetic oligonucleotide
ugucugacccaagaguagu

SEQ ID NO: 1060912 - RNA, 19 nt, Artificial Sequence
  Description of Artificial Sequence: Synthetic oligonucleotide
cuccuaguguaaauguguc

SEQ ID NO: 1060913 - RNA, 19 nt, Artificial Sequence
  Description of Artificial Sequence: Synthetic oligonucleotide
uagcagauauccagugggu

SEQ ID NO: 1060914 - RNA, 19 nt, Artificial Sequence
  Description of Artificial Sequence: Synthetic oligonucleotide
cauaaagcuuagacguguc

SEQ ID NO: 1060915 - RNA, 19 nt, Artificial Sequence
  Description of Artificial Sequence: Synthetic oligonucleotide
aucuaguggaagaaaacaa

SEQ ID NO: 1060916 - RNA, 19 nt, Artificial Sequence
  Description of Artificial Sequence: Synthetic oligonucleotide
caagaagugcagcucugac

SEQ ID NO: 1060917 - RNA, 19 nt, Artificial Sequence
  Description of Artificial Sequence: Synthetic oligonucleotide
cacagggauccuaaaagca

SEQ ID NO: 1060918 - RNA, 19 nt, Artificial Sequence
  Description of Artificial Sequence: Synthetic oligonucleotide
ugaagcgucucugccacac

SEQ ID NO: 1060919 - RNA, 19 nt, Artificial Sequence
  Description of Artificial Sequence: Synthetic oligonucleotide
gguuaucugcacuuguuuc

SEQ ID NO: 1060920 - RNA, 19 nt, Artificial Sequence
  Description of Artificial Sequence: Synthetic oligonucleotide
auccaguggguuguucagc

SEQ ID NO: 1060921 - RNA, 19 nt, Artificial Sequence
  Description of Artificial Sequence: Synthetic oligonucleotide
caaccugcggccuuaagaa

SEQ ID NO: 1060922 - RNA, 19 nt, Artificial Sequence
  Description of Artificial Sequence: Synthetic oligonucleotide
uccaugcugcaaccugcgg

SEQ ID NO: 1060923 - RNA, 19 nt, Artificial Sequence
  Description of Artificial Sequence: Synthetic oligonucleotide
uggcgaucauauugguugc

SEQ ID NO: 1060924 - RNA, 19 nt, Artificial Sequence
  Description of Artificial Sequence: Synthetic oligonucleotide
aggaguuuucuuaugucgu

SEQ ID NO: 1060925 - RNA, 19 nt, Artificial Sequence
  Description of Artificial Sequence: Synthetic oligonucleotide
cacgacagcgacugugagc

SEQ ID NO: 1060926 - RNA, 19 nt, Artificial Sequence
  Description of Artificial Sequence: Synthetic oligonucleotide
uguguccuaggaguuaaaa

SEQ ID NO: 1060927 - RNA, 19 nt, Artificial Sequence
  Description of Artificial Sequence: Synthetic oligonucleotide
uccuccgccacuguccaag

SEQ ID NO: 1060928 - RNA, 19 nt, Artificial Sequence
  Description of Artificial Sequence: Synthetic oligonucleotide
agaacaugucacccuucug

SEQ ID NO: 1060929 - RNA, 19 nt, Artificial Sequence
  Description of Artificial Sequence: Synthetic oligonucleotide
cugucugacccaagaguag

SEQ ID NO: 1060930 - RNA, 19 nt, Artificial Sequence
  Description of Artificial Sequence: Synthetic oligonucleotide
ugcccgauuccacucgcca

SEQ ID NO: 1060931 - RNA, 19 nt, Artificial Sequence
  Description of Artificial Sequence: Synthetic oligonucleotide
caacuuguuucuugaagga

SEQ ID NO: 1060932 - RNA, 19 nt, Artificial Sequence
  Description of Artificial Sequence: Synthetic oligonucleotide
aggugguaacacaacuaac

SEQ ID NO: 1060933 - RNA, 19 nt, Artificial Sequence
  Description of Artificial Sequence: Synthetic oligonucleotide
gcgagucacaauaauagug

SEQ ID NO: 1060934 - RNA, 19 nt, Artificial Sequence
  Description of Artificial Sequence: Synthetic oligonucleotide
gacagcgacugugagcaug

SEQ ID NO: 1060935 - RNA, 19 nt, Artificial Sequence
  Description of Artificial Sequence: Synthetic oligonucleotide
cugccaacuugccauuggc

SEQ ID NO: 1060936 - RNA, 19 nt, Artificial Sequence
  Description of Artificial Sequence: Synthetic oligonucleotide
ggcguuuucacagagcaca

SEQ ID NO: 1060937 - RNA, 19 nt, Artificial Sequence
  Description of Artificial Sequence: Synthetic oligonucleotide
auaugucugcagguagcgg

SEQ ID NO: 1060938 - RNA, 19 nt, Artificial Sequence
  Description of Artificial Sequence: Synthetic oligonucleotide
uugcuuccaacaugguagu

SEQ ID NO: 1060939 - RNA, 19 nt, Artificial Sequence
  Description of Artificial Sequence: Synthetic oligonucleotide
caaaugcaccauacuugag

SEQ ID NO: 1060940 - RNA, 19 nt, Artificial Sequence
  Description of Artificial Sequence: Synthetic oligonucleotide
ucauugguauagucacagu

SEQ ID NO: 1060941 - RNA, 19 nt, Artificial Sequence
  Description of Artificial Sequence: Synthetic oligonucleotide
agacuaugaggcccaauua

SEQ ID NO: 1060942 - RNA, 19 nt, Artificial Sequence
  Description of Artificial Sequence: Synthetic oligonucleotide
ccucacugacuucaaaugc

SEQ ID NO: 1060943 - RNA, 19 nt, Artificial Sequence
  Description of Artificial Sequence: Synthetic oligonucleotide
guauagucacaguuguuua

SEQ ID NO: 1060944 - RNA, 19 nt, Artificial Sequence
  Description of Artificial Sequence: Synthetic oligonucleotide
ucgccauaugucugcaggu

SEQ ID NO: 1060945 - RNA, 19 nt, Artificial Sequence
  Description of Artificial Sequence: Synthetic oligonucleotide
augucguuagacaaugcau

SEQ ID NO: 1060946 - RNA, 19 nt, Artificial Sequence
  Description of Artificial Sequence: Synthetic oligonucleotide
gguagcggcaggcaucugc

SEQ ID NO: 1060947 - RNA, 19 nt, Artificial Sequence
  Description of Artificial Sequence: Synthetic oligonucleotide
gcauucaacuuguuucuug

SEQ ID NO: 1060948 - RNA, 19 nt, Artificial Sequence
  Description of Artificial Sequence: Synthetic oligonucleotide
ucaaauguucugcccuguu

SEQ ID NO: 1060949 - RNA, 19 nt, Artificial Sequence
  Description of Artificial Sequence: Synthetic oligonucleotide
ucacaauaauagugcuggu

SEQ ID NO: 1060950 - RNA, 19 nt, Artificial Sequence
  Description of Artificial Sequence: Synthetic oligonucleotide
agaccauccaagcccacua

SEQ ID NO: 1060951 - RNA, 19 nt, Artificial Sequence
  Description of Artificial Sequence: Synthetic oligonucleotide
gugaucaacccaccgcuuc

SEQ ID NO: 1060952 - RNA, 19 nt, Artificial Sequence
  Description of Artificial Sequence: Synthetic oligonucleotide
cuucggaauuuaaccgaac

SEQ ID NO: 1060953 - RNA, 19 nt, Artificial Sequence
  Description of Artificial Sequence: Synthetic oligonucleotide
gcucuaucgaaguaccuca

SEQ ID NO: 1060954 - RNA, 19 nt, Artificial Sequence
  Description of Artificial Sequence: Synthetic oligonucleotide
cuggcuccuaguguaaaug

SEQ ID NO: 1060955 - RNA, 19 nt, Artificial Sequence
  Description of Artificial Sequence: Synthetic oligonucleotide
aggcaccucugcaagagag

SEQ ID NO: 1060956 - RNA, 19 nt, Artificial Sequence
  Description of Artificial Sequence: Synthetic oligonucleotide
gccauaugucugcagguag

SEQ ID NO: 1060957 - RNA, 19 nt, Artificial Sequence
  Description of Artificial Sequence: Synthetic oligonucleotide
acacuaacauaaagcuuag

SEQ ID NO: 1060958 - RNA, 19 nt, Artificial Sequence
  Description of Artificial Sequence: Synthetic oligonucleotide
gucuaucaggcagaguaac

SEQ ID NO: 1060959 - RNA, 19 nt, Artificial Sequence
  Description of Artificial Sequence: Synthetic oligonucleotide
aagugcagcucugacucau

SEQ ID NO: 1060960 - RNA, 19 nt, Artificial Sequence
  Description of Artificial Sequence: Synthetic oligonucleotide
ugcagcucugacucaucac

SEQ ID NO: 1060961 - RNA, 19 nt, Artificial Sequence
  Description of Artificial Sequence: Synthetic oligonucleotide
accaaggcucuucaggcuu

SEQ ID NO: 1060962 - RNA, 19 nt, Artificial Sequence
  Description of Artificial Sequence: Synthetic oligonucleotide
acugacaaagcaacccaga

SEQ ID NO: 1060963 - RNA, 19 nt, Artificial Sequence
  Description of Artificial Sequence: Synthetic oligonucleotide
ugccuaaagcagggaaucc

SEQ ID NO: 1060964 - RNA, 19 nt, Artificial Sequence
  Description of Artificial Sequence: Synthetic oligonucleotide
ccuaaagcagggaauccac

SEQ ID NO: 1060965 - RNA, 19 nt, Artificial Sequence
  Description of Artificial Sequence: Synthetic oligonucleotide
agcuuagacgugucccaug

SEQ ID NO: 1060966 - RNA, 19 nt, Artificial Sequence
  Description of Artificial Sequence: Synthetic oligonucleotide
caaugccuaaagcagggaa

SEQ ID NO: 1060967 - RNA, 19 nt, Artificial Sequence
  Description of Artificial Sequence: Synthetic oligonucleotide
uucgggcauagucugcaua

SEQ ID NO: 1060968 - RNA, 19 nt, Artificial Sequence
  Description of Artificial Sequence: Synthetic oligonucleotide
ugcccuguuguguucuaaa

SEQ ID NO: 1060969 - RNA, 19 nt, Artificial Sequence
  Description of Artificial Sequence: Synthetic oligonucleotide
ccauaugucugcagguagc

SEQ ID NO: 1060970 - RNA, 19 nt, Artificial Sequence
  Description of Artificial Sequence: Synthetic oligonucleotide
cauugguauagucacaguu

SEQ ID NO: 1060971 - RNA, 19 nt, Artificial Sequence
  Description of Artificial Sequence: Synthetic oligonucleotide
ccuaguguaaaugugucca

SEQ ID NO: 1060972 - RNA, 19 nt, Artificial Sequence
  Description of Artificial Sequence: Synthetic oligonucleotide
cugagcaauaauuuauaau

SEQ ID NO: 1060973 - RNA, 19 nt, Artificial Sequence
  Description of Artificial Sequence: Synthetic oligonucleotide
ggcccaauuacaaaaugca

SEQ ID NO: 1060974 - RNA, 19 nt, Artificial Sequence
  Description of Artificial Sequence: Synthetic oligonucleotide
aaacaagcuuucagcgagu

SEQ ID NO: 1060975 - RNA, 19 nt, Artificial Sequence
  Description of Artificial Sequence: Synthetic oligonucleotide
acaaggcagcucuaucgaa

SEQ ID NO: 1060976 - RNA, 19 nt, Artificial Sequence
  Description of Artificial Sequence: Synthetic oligonucleotide
acugaacgcccucugccaa

SEQ ID NO: 1060977 - RNA, 19 nt, Artificial Sequence
  Description of Artificial Sequence: Synthetic oligonucleotide
gcaaccugcggccuuaaga

SEQ ID NO: 1060978 - RNA, 19 nt, Artificial Sequence
  Description of Artificial Sequence: Synthetic oligonucleotide
acggcucugucugucugac

SEQ ID NO: 1060979 - RNA, 19 nt, Artificial Sequence
  Description of Artificial Sequence: Synthetic oligonucleotide
aggcacacauggcauguau

SEQ ID NO: 1060980 - RNA, 19 nt, Artificial Sequence
  Description of Artificial Sequence: Synthetic oligonucleotide
aagcuuagacgugucccau

SEQ ID NO: 1060981 - RNA, 19 nt, Artificial Sequence
  Description of Artificial Sequence: Synthetic oligonucleotide
cugugaagcgucucugcca

SEQ ID NO: 1060982 - RNA, 19 nt, Artificial Sequence
  Description of Artificial Sequence: Synthetic oligonucleotide
acagaacaugucacccuuc

SEQ ID NO: 1060983 - RNA, 19 nt, Artificial Sequence
  Description of Artificial Sequence: Synthetic oligonucleotide
ugauugacuuguggagaac

SEQ ID NO: 1060984 - RNA, 19 nt, Artificial Sequence
  Description of Artificial Sequence: Synthetic oligonucleotide
gaaaacaagcaggcaccuc

SEQ ID NO: 1060985 - RNA, 19 nt, Artificial Sequence
  Description of Artificial Sequence: Synthetic oligonucleotide
gcuuagacgugucccauga

SEQ ID NO: 1060986 - RNA, 19 nt, Artificial Sequence
  Description of Artificial Sequence: Synthetic oligonucleotide
cuggaaguaggcguuuuca

SEQ ID NO: 1060987 - RNA, 19 nt, Artificial Sequence
  Description of Artificial Sequence: Synthetic oligonucleotide
uagugcugguuaucugcac

SEQ ID NO: 1060988 - RNA, 19 nt, Artificial Sequence
  Description of Artificial Sequence: Synthetic oligonucleotide
uaguuccugcacagaacau

SEQ ID NO: 1060989 - RNA, 19 nt, Artificial Sequence
  Description of Artificial Sequence: Synthetic oligonucleotide
cacucaaauguucugcccu

SEQ ID NO: 1060990 - RNA, 19 nt, Artificial Sequence
  Description of Artificial Sequence: Synthetic oligonucleotide
ggcagcucuaucgaaguac

SEQ ID NO: 1060991 - RNA, 19 nt, Artificial Sequence
  Description of Artificial Sequence: Synthetic oligonucleotide
augcaccauacuugagaca

SEQ ID NO: 1060992 - RNA, 19 nt, Artificial Sequence
  Description of Artificial Sequence: Synthetic oligonucleotide
ugcaaccugcggccuuaag

SEQ ID NO: 1060993 - RNA, 19 nt, Artificial Sequence
  Description of Artificial Sequence: Synthetic oligonucleotide
cacaacuaacaagggccag

SEQ ID NO: 1060994 - RNA, 19 nt, Artificial Sequence
  Description of Artificial Sequence: Synthetic oligonucleotide
guaggcguuuucacagagc

SEQ ID NO: 1060995 - RNA, 19 nt, Artificial Sequence
  Description of Artificial Sequence: Synthetic oligonucleotide
guagucacagggauccuaa

SEQ ID NO: 1060996 - RNA, 19 nt, Artificial Sequence
  Description of Artificial Sequence: Synthetic oligonucleotide
acucgccauaugucugcag

SEQ ID NO: 1060997 - RNA, 19 nt, Artificial Sequence
  Description of Artificial Sequence: Synthetic oligonucleotide
gaguaguagcuggucugug

SEQ ID NO: 1060998 - RNA, 19 nt, Artificial Sequence
  Description of Artificial Sequence: Synthetic oligonucleotide
cuuggaaaacaagcaggca

SEQ ID NO: 1060999 - RNA, 19 nt, Artificial Sequence
  Description of Artificial Sequence: Synthetic oligonucleotide
aucaagcaggaguuuucuu

SEQ ID NO: 1061000 - RNA, 19 nt, Artificial Sequence
  Description of Artificial Sequence: Synthetic oligonucleotide
aguagcuggucugugcauu

SEQ ID NO: 1061001 - RNA, 19 nt, Artificial Sequence
  Description of Artificial Sequence: Synthetic oligonucleotide
aguagucacagggauccua

SEQ ID NO: 1061002 - RNA, 19 nt, Artificial Sequence
  Description of Artificial Sequence: Synthetic oligonucleotide
guguaaauguguccaugcu

SEQ ID NO: 1061003 - RNA, 19 nt, Artificial Sequence
  Description of Artificial Sequence: Synthetic oligonucleotide
gcagcucuaucgaaguacc

SEQ ID NO: 1061004 - RNA, 19 nt, Artificial Sequence
  Description of Artificial Sequence: Synthetic oligonucleotide
cugaacgcccucugccaac

SEQ ID NO: 1061005 - RNA, 19 nt, Artificial Sequence
  Description of Artificial Sequence: Synthetic oligonucleotide
gcggcaggcaucugcagcc

SEQ ID NO: 1061006 - RNA, 19 nt, Artificial Sequence
  Description of Artificial Sequence: Synthetic oligonucleotide
gccuuaagaaggugguaac

SEQ ID NO: 1061007 - RNA, 19 nt, Artificial Sequence
  Description of Artificial Sequence: Synthetic oligonucleotide
caucaccauagagccuugg

SEQ ID NO: 1061008 - RNA, 19 nt, Artificial Sequence
  Description of Artificial Sequence: Synthetic oligonucleotide
guguccuaggaguuaaaau

SEQ ID NO: 1061009 - RNA, 19 nt, Artificial Sequence
  Description of Artificial Sequence: Synthetic oligonucleotide
cagggauccuaaaagcacu

SEQ ID NO: 1061010 - RNA, 19 nt, Artificial Sequence
  Description of Artificial Sequence: Synthetic oligonucleotide
gguaguuccugcacagaac

SEQ ID NO: 1061011 - RNA, 19 nt, Artificial Sequence
  Description of Artificial Sequence: Synthetic oligonucleotide
caauaauagugcugguuau

SEQ ID NO: 1061012 - RNA, 19 nt, Artificial Sequence
  Description of Artificial Sequence: Synthetic oligonucleotide
accacgacagcgacuguga

SEQ ID NO: 1061013 - RNA, 19 nt, Artificial Sequence
  Description of Artificial Sequence: Synthetic oligonucleotide
ccucaugcugugaagcguc

SEQ ID NO: 1061014 - RNA, 19 nt, Artificial Sequence
  Description of Artificial Sequence: Synthetic oligonucleotide
ggccuuaagaaggugguaa

SEQ ID NO: 1061015 - RNA, 19 nt, Artificial Sequence
  Description of Artificial Sequence: Synthetic oligonucleotide
gaccauccaagcccacuaa

SEQ ID NO: 1061016 - RNA, 19 nt, Artificial Sequence
  Description of Artificial Sequence: Synthetic oligonucleotide
caugcugugaagcgucucu

SEQ ID NO: 1061017 - RNA, 19 nt, Artificial Sequence
  Description of Artificial Sequence: Synthetic oligonucleotide
cagucugaccagaccacga

SEQ ID NO: 1061018 - RNA, 19 nt, Artificial Sequence
  Description of Artificial Sequence: Synthetic oligonucleotide
ccucucacaccuugcuucc

SEQ ID NO: 1061019 - RNA, 19 nt, Artificial Sequence
  Description of Artificial Sequence: Synthetic oligonucleotide
auuggcgaucauauugguu

SEQ ID NO: 1061020 - RNA, 19 nt, Artificial Sequence
  Description of Artificial Sequence: Synthetic oligonucleotide
ugcauucaacuuguuucuu

SEQ ID NO: 1061021 - RNA, 19 nt, Artificial Sequence
  Description of Artificial Sequence: Synthetic oligonucleotide
cuucaggcuucgggcauag

SEQ ID NO: 1061022 - RNA, 19 nt, Artificial Sequence
  Description of Artificial Sequence: Synthetic oligonucleotide
ggcuccuaguguaaaugug

SEQ ID NO: 1061023 - RNA, 19 nt, Artificial Sequence
  Description of Artificial Sequence: Synthetic oligonucleotide
cuaacaagggccaggccuu

SEQ ID NO: 1061024 - RNA, 19 nt, Artificial Sequence
  Description of Artificial Sequence: Synthetic oligonucleotide
ccacacugacaaagcaacc

SEQ ID NO: 1061025 - RNA, 19 nt, Artificial Sequence
  Description of Artificial Sequence: Synthetic oligonucleotide
ccacucgccauaugucugc

SEQ ID NO: 1061026 - RNA, 19 nt, Artificial Sequence
  Description of Artificial Sequence: Synthetic oligonucleotide
cugcccgauuccacucgcc

SEQ ID NO: 1061027 - RNA, 19 nt, Artificial Sequence
  Description of Artificial Sequence: Synthetic oligonucleotide
gaaguaccucaugcuguga

SEQ ID NO: 1061028 - RNA, 19 nt, Artificial Sequence
  Description of Artificial Sequence: Synthetic oligonucleotide
ggggauccaagcucauuca

SEQ ID NO: 1061029 - RNA, 19 nt, Artificial Sequence
  Description of Artificial Sequence: Synthetic oligonucleotide
gcccuguuguguucuaaac

SEQ ID NO: 1061030 - RNA, 19 nt, Artificial Sequence
  Description of Artificial Sequence: Synthetic oligonucleotide
acaaagcaacccagagaga

SEQ ID NO: 1061031 - RNA, 19 nt, Artificial Sequence
  Description of Artificial Sequence: Synthetic oligonucleotide
cccuguuguguucuaaaca

SEQ ID NO: 1061032 - RNA, 19 nt, Artificial Sequence
  Description of Artificial Sequence: Synthetic oligonucleotide
cuaguguaaauguguccau

SEQ ID NO: 1061033 - RNA, 19 nt, Artificial Sequence
  Description of Artificial Sequence: Synthetic oligonucleotide
gaucauaaguugaccuuuu

SEQ ID NO: 1061034 - RNA, 19 nt, Artificial Sequence
  Description of Artificial Sequence: Synthetic oligonucleotide
agcgucucugccacacuga

SEQ ID NO: 1061035 - RNA, 19 nt, Artificial Sequence
  Description of Artificial Sequence: Synthetic oligonucleotide
cacaauaauagugcugguu

SEQ ID NO: 1061036 - RNA, 19 nt, Artificial Sequence
  Description of Artificial Sequence: Synthetic oligonucleotide
agggauccuaaaagcacuu

SEQ ID NO: 1061037 - RNA, 19 nt, Artificial Sequence
  Description of Artificial Sequence: Synthetic oligonucleotide
cacuacacacuuucccacu

SEQ ID NO: 1061038 - RNA, 19 nt, Artificial Sequence
  Description of Artificial Sequence: Synthetic oligonucleotide
gggauccaagcucauucaa

SEQ ID NO: 1061039 - RNA, 19 nt, Artificial Sequence
  Description of Artificial Sequence: Synthetic oligonucleotide
gcuccuaguguaaaugugu

SEQ ID NO: 1061040 - RNA, 19 nt, Artificial Sequence
  Description of Artificial Sequence: Synthetic oligonucleotide
ggaauuuaaccgaaccuuu

SEQ ID NO: 1061041 - RNA, 19 nt, Artificial Sequence
  Description of Artificial Sequence: Synthetic oligonucleotide
guggagcaccuuccuccgc

SEQ ID NO: 1061042 - RNA, 19 nt, Artificial Sequence
  Description of Artificial Sequence: Synthetic oligonucleotide
cacggcucugucugucuga

SEQ ID NO: 1061043 - RNA, 19 nt, Artificial Sequence
  Description of Artificial Sequence: Synthetic oligonucleotide
aggcagcucuaucgaagua

SEQ ID NO: 1061044 - RNA, 19 nt, Artificial Sequence
  Description of Artificial Sequence: Synthetic oligonucleotide
gcgucucugccacacugac

SEQ ID NO: 1061045 - RNA, 19 nt, Artificial Sequence
  Description of Artificial Sequence: Synthetic oligonucleotide
cauuggcgaucauauuggu

SEQ ID NO: 1061046 - RNA, 19 nt, Artificial Sequence
  Description of Artificial Sequence: Synthetic oligonucleotide
cuuagacgugucccaugaa

SEQ ID NO: 1061047 - RNA, 19 nt, Artificial Sequence
  Description of Artificial Sequence: Synthetic oligonucleotide
ggcgaucauauugguugcc

SEQ ID NO: 1061048 - RNA, 19 nt, Artificial Sequence
  Description of Artificial Sequence: Synthetic oligonucleotide
ccuuaagaaggugguaaca

SEQ ID NO: 1061049 - RNA, 19 nt, Artificial Sequence
  Description of Artificial Sequence: Synthetic oligonucleotide
gcugcccgauuccacucgc

SEQ ID NO: 1061050 - RNA, 19 nt, Artificial Sequence
  Description of Artificial Sequence: Synthetic oligonucleotide
cacuaacauaaagcuuaga

SEQ ID NO: 1061051 - RNA, 19 nt, Artificial Sequence
  Description of Artificial Sequence: Synthetic oligonucleotide
cacaaacaaggcagcucua

SEQ ID NO: 1061052 - RNA, 19 nt, Artificial Sequence
  Description of Artificial Sequence: Synthetic oligonucleotide
gaagcgucucugccacacu

SEQ ID NO: 1061053 - RNA, 19 nt, Artificial Sequence
  Description of Artificial Sequence: Synthetic oligonucleotide
ggaguuuucuuaugucguu

SEQ ID NO: 1061054 - RNA, 19 nt, Artificial Sequence
  Description of Artificial Sequence: Synthetic oligonucleotide
ccaaggcucuucaggcuuc

SEQ ID NO: 1061055 - RNA, 19 nt, Artificial Sequence
  Description of Artificial Sequence: Synthetic oligonucleotide
cugcacggcucugucuguc

SEQ ID NO: 1061056 - RNA, 19 nt, Artificial Sequence
  Description of Artificial Sequence: Synthetic oligonucleotide
cucuaucgaaguaccucau

SEQ ID NO: 1061057 - RNA, 19 nt, Artificial Sequence
  Description of Artificial Sequence: Synthetic oligonucleotide
gucugacccaagaguagua

SEQ ID NO: 1061058 - RNA, 19 nt, Artificial Sequence
  Description of Artificial Sequence: Synthetic oligonucleotide
agaccacgacagcgacugu

SEQ ID NO: 1061059 - RNA, 19 nt, Artificial Sequence
  Description of Artificial Sequence: Synthetic oligonucleotide
caccagcuuaauggugcuc

SEQ ID NO: 1061060 - RNA, 19 nt, Artificial Sequence
  Description of Artificial Sequence: Synthetic oligonucleotide
ggagcaccuuccuccgcca

SEQ ID NO: 1061061 - RNA, 19 nt, Artificial Sequence
  Description of Artificial Sequence: Synthetic oligonucleotide
cucaugcugugaagcgucu

SEQ ID NO: 1061062 - RNA, 19 nt, Artificial Sequence
  Description of Artificial Sequence: Synthetic oligonucleotide
ccacgacagcgacugugag

SEQ ID NO: 1061063 - RNA, 19 nt, Artificial Sequence
  Description of Artificial Sequence: Synthetic oligonucleotide
cagguagcggcaggcaucu

SEQ ID NO: 1061064 - RNA, 19 nt, Artificial Sequence
  Description of Artificial Sequence: Synthetic oligonucleotide
cugcggccuuaagaaggug

SEQ ID NO: 1061065 - RNA, 19 nt, Artificial Sequence
  Description of Artificial Sequence: Synthetic oligonucleotide
cagcucuaucgaaguaccu

SEQ ID NO: 1061066 - RNA, 19 nt, Artificial Sequence
  Description of Artificial Sequence: Synthetic oligonucleotide
cacucgccauaugucugca

SEQ ID NO: 1061067 - RNA, 19 nt, Artificial Sequence
  Description of Artificial Sequence: Synthetic oligonucleotide
auguguccuaggaguuaaa

SEQ ID NO: 1061068 - RNA, 19 nt, Artificial Sequence
  Description of Artificial Sequence: Synthetic oligonucleotide
acuugccauuggcgaucau

SEQ ID NO: 1061069 - RNA, 19 nt, Artificial Sequence
  Description of Artificial Sequence: Synthetic oligonucleotide
ccccacugaucugagcuca

SEQ ID NO: 1061070 - RNA, 19 nt, Artificial Sequence
  Description of Artificial Sequence: Synthetic oligonucleotide
cggaauuuaaccgaaccuu

SEQ ID NO: 1061071 - RNA, 19 nt, Artificial Sequence
  Description of Artificial Sequence: Synthetic oligonucleotide
gccuaucaacacaggcaca

SEQ ID NO: 1061072 - RNA, 19 nt, Artificial Sequence
  Description of Artificial Sequence: Synthetic oligonucleotide
gcggccuuaagaagguggu

SEQ ID NO: 1061073 - RNA, 19 nt, Artificial Sequence
  Description of Artificial Sequence: Synthetic oligonucleotide
cuucgggcauagucugcau

SEQ ID NO: 1061074 - RNA, 19 nt, Artificial Sequence
  Description of Artificial Sequence: Synthetic oligonucleotide
ccugcggccuuaagaaggu

SEQ ID NO: 1061075 - RNA, 19 nt, Artificial Sequence
  Description of Artificial Sequence: Synthetic oligonucleotide
ccaccgcuucagaacaucu

SEQ ID NO: 1061076 - RNA, 19 nt, Artificial Sequence
  Description of Artificial Sequence: Synthetic oligonucleotide
ccacugaucugagcucaca

SEQ ID NO: 1061077 - RNA, 19 nt, Artificial Sequence
  Description of Artificial Sequence: Synthetic oligonucleotide
ccaagcccacuaacacuaa

SEQ ID NO: 1061078 - RNA, 19 nt, Artificial Sequence
  Description of Artificial Sequence: Synthetic oligonucleotide
ccgaaccuuugcaagccau

SEQ ID NO: 1061079 - RNA, 19 nt, Artificial Sequence
  Description of Artificial Sequence: Synthetic oligonucleotide
gcugcacggcucugucugu

SEQ ID NO: 1061080 - RNA, 19 nt, Artificial Sequence
  Description of Artificial Sequence: Synthetic oligonucleotide
ccagaccacgacagcgacu

SEQ ID NO: 1061081 - RNA, 19 nt, Artificial Sequence
  Description of Artificial Sequence: Synthetic oligonucleotide
cugcaaccugcggccuuaa

SEQ ID NO: 1061082 - RNA, 19 nt, Artificial Sequence
  Description of Artificial Sequence: Synthetic oligonucleotide
cgccauaugucugcaggua

SEQ ID NO: 1061083 - RNA, 19 nt, Artificial Sequence
  Description of Artificial Sequence: Synthetic oligonucleotide
cgggcauagucugcauaga

SEQ ID NO: 1061084 - RNA, 19 nt, Artificial Sequence
  Description of Artificial Sequence: Synthetic oligonucleotide
aaacagaauaccuauuuac

SEQ ID NO: 1061085 - RNA, 19 nt, Artificial Sequence
  Description of Artificial Sequence: Synthetic oligonucleotide
aaagguuagucuuggaacc

SEQ ID NO: 1061086 - RNA, 19 nt, Artificial Sequence
  Description of Artificial Sequence: Synthetic oligonucleotide
aguguauucauacacgagc

SEQ ID NO: 1061087 - RNA, 19 nt, Artificial Sequence
  Description of Artificial Sequence: Synthetic oligonucleotide
auaccuauuuaccagacac

SEQ ID NO: 1061088 - RNA, 19 nt, Artificial Sequence
  Description of Artificial Sequence: Synthetic oligonucleotide
aaaagaucguaauuuauga

SEQ ID NO: 1061089 - RNA, 19 nt, Artificial Sequence
  Description of Artificial Sequence: Synthetic oligonucleotide
aagucaucccguuaaacac

SEQ ID NO: 1061090 - RNA, 19 nt, Artificial Sequence
  Description of Artificial Sequence: Synthetic oligonucleotide
aaugagacguacaauuucc

SEQ ID NO: 1061091 - RNA, 19 nt, Artificial Sequence
  Description of Artificial Sequence: Synthetic oligonucleotide
ugaacguuagaacacgagg

SEQ ID NO: 1061092 - RNA, 19 nt, Artificial Sequence
  Description of Artificial Sequence: Synthetic oligonucleotide
uaaaagaucguaauuuaug

SEQ ID NO: 1061093 - RNA, 19 nt, Artificial Sequence
  Description of Artificial Sequence: Synthetic oligonucleotide
aacagaauaccuauuuacc

SEQ ID NO: 1061094 - RNA, 19 nt, Artificial Sequence
  Description of Artificial Sequence: Synthetic oligonucleotide
ucauacguccugaagaggg

SEQ ID NO: 1061095 - RNA, 19 nt, Artificial Sequence
  Description of Artificial Sequence: Synthetic oligonucleotide
auuaagauaugcucuuggc

SEQ ID NO: 1061096 - RNA, 19 nt, Artificial Sequence
  Description of Artificial Sequence: Synthetic oligonucleotide
caucguauaagcuacauuc

SEQ ID NO: 1061097 - RNA, 19 nt, Artificial Sequence
  Description of Artificial Sequence: Synthetic oligonucleotide
aaacaccuaaccuacaacu

SEQ ID NO: 1061098 - RNA, 19 nt, Artificial Sequence
  Description of Artificial Sequence: Synthetic oligonucleotide
auucggacacguuugaagc

SEQ ID NO: 1061099 - RNA, 19 nt, Artificial Sequence
  Description of Artificial Sequence: Synthetic oligonucleotide
cuauuuaccagacacacac

SEQ ID NO: 1061100 - RNA, 19 nt, Artificial Sequence
  Description of Artificial Sequence: Synthetic oligonucleotide
uaauuuaugacugggguag

SEQ ID NO: 1061101 - RNA, 19 nt, Artificial Sequence
  Description of Artificial Sequence: Synthetic oligonucleotide
aacagaaaucuuuuccccg

SEQ ID NO: 1061102 - RNA, 19 nt, Artificial Sequence
  Description of Artificial Sequence: Synthetic oligonucleotide
uggaauuucugccacagug

SEQ ID NO: 1061103 - RNA, 19 nt, Artificial Sequence
  Description of Artificial Sequence: Synthetic oligonucleotide
uuaucuucauguuucaaug

SEQ ID NO: 1061104 - RNA, 19 nt, Artificial Sequence
  Description of Artificial Sequence: Synthetic oligonucleotide
ucuagcaacacacagcuau

SEQ ID NO: 1061105 - RNA, 19 nt, Artificial Sequence
  Description of Artificial Sequence: Synthetic oligonucleotide
aacguuagaacacgagggg

SEQ ID NO: 1061106 - RNA, 19 nt, Artificial Sequence
  Description of Artificial Sequence: Synthetic oligonucleotide
gucgcuuucacacacgugg

SEQ ID NO: 1061107 - RNA, 19 nt, Artificial Sequence
  Description of Artificial Sequence: Synthetic oligonucleotide
ugcaguaucagaacaagga

SEQ ID NO: 1061108 - RNA, 19 nt, Artificial Sequence
  Description of Artificial Sequence: Synthetic oligonucleotide
uauguguaacgucugagca

SEQ ID NO: 1061109 - RNA, 19 nt, Artificial Sequence
  Description of Artificial Sequence: Synthetic oligonucleotide
gaacguuagaacacgaggg

SEQ ID NO: 1061110 - RNA, 19 nt, Artificial Sequence
  Description of Artificial Sequence: Synthetic oligonucleotide
ucuucauguuucaaugggg

SEQ ID NO: 1061111 - RNA, 19 nt, Artificial Sequence
  Description of Artificial Sequence: Synthetic oligonucleotide
gagggauucaaauuuggcc

SEQ ID NO: 1061112 - RNA, 19 nt, Artificial Sequence
  Description of Artificial Sequence: Synthetic oligonucleotide
uuaagauaugcucuuggcu

SEQ ID NO: 1061113 - RNA, 19 nt, Artificial Sequence
  Description of Artificial Sequence: Synthetic oligonucleotide
ugaagagggauucaaauuu

SEQ ID NO: 1061114 - RNA, 19 nt, Artificial Sequence
  Description of Artificial Sequence: Synthetic oligonucleotide
ugugauuaccaccaacuca

SEQ ID NO: 1061115 - RNA, 19 nt, Artificial Sequence
  Description of Artificial Sequence: Synthetic oligonucleotide
aacagaaccuagaaaagag

SEQ ID NO: 1061116 - RNA, 19 nt, Artificial Sequence
  Description of Artificial Sequence: Synthetic oligonucleotide
auuucuaccacacgcaagu

SEQ ID NO: 1061117 - RNA, 19 nt, Artificial Sequence
  Description of Artificial Sequence: Synthetic oligonucleotide
acguacaauuuccacaugg

SEQ ID NO: 1061118 - RNA, 19 nt, Artificial Sequence
  Description of Artificial Sequence: Synthetic oligonucleotide
augacaguaauuucuacca

SEQ ID NO: 1061119 - RNA, 19 nt, Artificial Sequence
  Description of Artificial Sequence: Synthetic oligonucleotide
auuaccaccaacucaguga

SEQ ID NO: 1061120 - RNA, 19 nt, Artificial Sequence
  Description of Artificial Sequence: Synthetic oligonucleotide
agucauacaugcgugaacg

SEQ ID NO: 1061121 - RNA, 19 nt, Artificial Sequence
  Description of Artificial Sequence: Synthetic oligonucleotide
uauucggacacguuugaag

SEQ ID NO: 1061122 - RNA, 19 nt, Artificial Sequence
  Description of Artificial Sequence: Synthetic oligonucleotide
caaagguuagucuuggaac

SEQ ID NO: 1061123 - RNA, 19 nt, Artificial Sequence
  Description of Artificial Sequence: Synthetic oligonucleotide
gguuauuucagagugacag

SEQ ID NO: 1061124 - RNA, 19 nt, Artificial Sequence
  Description of Artificial Sequence: Synthetic oligonucleotide
auacuucucaccuggcccc

SEQ ID NO: 1061125 - RNA, 19 nt, Artificial Sequence
  Description of Artificial Sequence: Synthetic oligonucleotide
uuuagaaugugccgucucc

SEQ ID NO: 1061126 - RNA, 19 nt, Artificial Sequence
  Description of Artificial Sequence: Synthetic oligonucleotide
uaaccuacaacuucccacc

SEQ ID NO: 1061127 - RNA, 19 nt, Artificial Sequence
  Description of Artificial Sequence: Synthetic oligonucleotide
uuaauuggcauuagguuau

SEQ ID NO: 1061128 - RNA, 19 nt, Artificial Sequence
  Description of Artificial Sequence: Synthetic oligonucleotide
acagaaaucuuuuccccgg

SEQ ID NO: 1061129 - RNA, 19 nt, Artificial Sequence
  Description of Artificial Sequence: Synthetic oligonucleotide
ucagcugcggauaaggggu

SEQ ID NO: 1061130 - RNA, 19 nt, Artificial Sequence
  Description of Artificial Sequence: Synthetic oligonucleotide
ucguaauuuaugacugggg

SEQ ID NO: 1061131 - RNA, 19 nt, Artificial Sequence
  Description of Artificial Sequence: Synthetic oligonucleotide
gugauuaccaccaacucag

SEQ ID NO: 1061132 - RNA, 19 nt, Artificial Sequence
  Description of Artificial Sequence: Synthetic oligonucleotide
gugaguacaagacacuacc

SEQ ID NO: 1061133 - RNA, 19 nt, Artificial Sequence
  Description of Artificial Sequence: Synthetic oligonucleotide
cauuaagauaugcucuugg

SEQ ID NO: 1061134 - RNA, 19 nt, Artificial Sequence
  Description of Artificial Sequence: Synthetic oligonucleotide
accuauuuaccagacacac

SEQ ID NO: 1061135 - RNA, 19 nt, Artificial Sequence
  Description of Artificial Sequence: Synthetic oligonucleotide
acuguuaauuggcauuagg

SEQ ID NO: 1061136 - RNA, 19 nt, Artificial Sequence
  Description of Artificial Sequence: Synthetic oligonucleotide
acagcuaugacuccacaug

SEQ ID NO: 1061137 - RNA, 19 nt, Artificial Sequence
  Description of Artificial Sequence: Synthetic oligonucleotide
ucauacacgagcaaagguu

SEQ ID NO: 1061138 - RNA, 19 nt, Artificial Sequence
  Description of Artificial Sequence: Synthetic oligonucleotide
aacuugugcaagaaagcac

SEQ ID NO: 1061139 - RNA, 19 nt, Artificial Sequence
  Description of Artificial Sequence: Synthetic oligonucleotide
auauccuugugugauuacc

SEQ ID NO: 1061140 - RNA, 19 nt, Artificial Sequence
  Description of Artificial Sequence: Synthetic oligonucleotide
cagaaccuagaaaagagug

SEQ ID NO: 1061141 - RNA, 19 nt, Artificial Sequence
  Description of Artificial Sequence: Synthetic oligonucleotide
acaccuaaccuacaacuuc

SEQ ID NO: 1061142 - RNA, 19 nt, Artificial Sequence
  Description of Artificial Sequence: Synthetic oligonucleotide
auggucacgguccaucugg

SEQ ID NO: 1061143 - RNA, 19 nt, Artificial Sequence
  Description of Artificial Sequence: Synthetic oligonucleotide
ucccguuaaacacaugaca

SEQ ID NO: 1061144 - RNA, 19 nt, Artificial Sequence
  Description of Artificial Sequence: Synthetic oligonucleotide
cuauguguaacgucugagc

SEQ ID NO: 1061145 - RNA, 19 nt, Artificial Sequence
  Description of Artificial Sequence: Synthetic oligonucleotide
aagguuagucuuggaaccc

SEQ ID NO: 1061146 - RNA, 19 nt, Artificial Sequence
  Description of Artificial Sequence: Synthetic oligonucleotide
aaacugucucaaucaacag

SEQ ID NO: 1061147 - RNA, 19 nt, Artificial Sequence
  Description of Artificial Sequence: Synthetic oligonucleotide
agaaaucuuuuccccgggc

SEQ ID NO: 1061148 - RNA, 19 nt, Artificial Sequence
  Description of Artificial Sequence: Synthetic oligonucleotide
cacuugguggcuuuguggg

SEQ ID NO: 1061149 - RNA, 19 nt, Artificial Sequence
  Description of Artificial Sequence: Synthetic oligonucleotide
uauuuaccagacacacacg

SEQ ID NO: 1061150 - RNA, 19 nt, Artificial Sequence
  Description of Artificial Sequence: Synthetic oligonucleotide
aaccuacaacuucccaccc

SEQ ID NO: 1061151 - RNA, 19 nt, Artificial Sequence
  Description of Artificial Sequence: Synthetic oligonucleotide
gaucguaauuuaugacugg

SEQ ID NO: 1061152 - RNA, 19 nt, Artificial Sequence
  Description of Artificial Sequence: Synthetic oligonucleotide
uuagucuuggaacccaguc

SEQ ID NO: 1061153 - RNA, 19 nt, Artificial Sequence
  Description of Artificial Sequence: Synthetic oligonucleotide
cuagaaaagagugaguaca

SEQ ID NO: 1061154 - RNA, 19 nt, Artificial Sequence
  Description of Artificial Sequence: Synthetic oligonucleotide
gagacguacaauuuccaca

SEQ ID NO: 1061155 - RNA, 19 nt, Artificial Sequence
  Description of Artificial Sequence: Synthetic oligonucleotide
acaguguauucauacacga

SEQ ID NO: 1061156 - RNA, 19 nt, Artificial Sequence
  Description of Artificial Sequence: Synthetic oligonucleotide
ugggguuuagaaugugccg

SEQ ID NO: 1061157 - RNA, 19 nt, Artificial Sequence
  Description of Artificial Sequence: Synthetic oligonucleotide
ugugagaccaaaacagaau

SEQ ID NO: 1061158 - RNA, 19 nt, Artificial Sequence
  Description of Artificial Sequence: Synthetic oligonucleotide
aucguaauuuaugacuggg

SEQ ID NO: 1061159 - RNA, 19 nt, Artificial Sequence
  Description of Artificial Sequence: Synthetic oligonucleotide
cacguggugacuacaaaag

SEQ ID NO: 1061160 - RNA, 19 nt, Artificial Sequence
  Description of Artificial Sequence: Synthetic oligonucleotide
uuuauucggacacguuuga

SEQ ID NO: 1061161 - RNA, 19 nt, Artificial Sequence
  Description of Artificial Sequence: Synthetic oligonucleotide
acuaccauuaucaguuuuc

SEQ ID NO: 1061162 - RNA, 19 nt, Artificial Sequence
  Description of Artificial Sequence: Synthetic oligonucleotide
uagucuuggaacccaguca

SEQ ID NO: 1061163 - RNA, 19 nt, Artificial Sequence
  Description of Artificial Sequence: Synthetic oligonucleotide
acacuugguggcuuugugg

SEQ ID NO: 1061164 - RNA, 19 nt, Artificial Sequence
  Description of Artificial Sequence: Synthetic oligonucleotide
augcgugaacguuagaaca

SEQ ID NO: 1061165 - RNA, 19 nt, Artificial Sequence
  Description of Artificial Sequence: Synthetic oligonucleotide
uaauuucuaccacacgcaa

SEQ ID NO: 1061166 - RNA, 19 nt, Artificial Sequence
  Description of Artificial Sequence: Synthetic oligonucleotide
agaucguaauuuaugacug

SEQ ID NO: 1061167 - RNA, 19 nt, Artificial Sequence
  Description of Artificial Sequence: Synthetic oligonucleotide
agcaacacacagcuaugac

SEQ ID NO: 1061168 - RNA, 19 nt, Artificial Sequence
  Description of Artificial Sequence: Synthetic oligonucleotide
uagguuauuucagagugac

SEQ ID NO: 1061169 - RNA, 19 nt, Artificial Sequence
  Description of Artificial Sequence: Synthetic oligonucleotide
ugaaguuuauucggacacg

SEQ ID NO: 1061170 - RNA, 19 nt, Artificial Sequence
  Description of Artificial Sequence: Synthetic oligonucleotide
ugaguacaagacacuacca

SEQ ID NO: 1061171 - RNA, 19 nt, Artificial Sequence
  Description of Artificial Sequence: Synthetic oligonucleotide
aauuucuaccacacgcaag

SEQ ID NO: 1061172 - RNA, 19 nt, Artificial Sequence
  Description of Artificial Sequence: Synthetic oligonucleotide
auccuugugugauuaccac

SEQ ID NO: 1061173 - RNA, 19 nt, Artificial Sequence
  Description of Artificial Sequence: Synthetic oligonucleotide
uuagguuauuucagaguga

SEQ ID NO: 1061174 - RNA, 19 nt, Artificial Sequence
  Description of Artificial Sequence: Synthetic oligonucleotide
agucuuggaacccagucau

SEQ ID NO: 1061175 - RNA, 19 nt, Artificial Sequence
  Description of Artificial Sequence: Synthetic oligonucleotide
acaagacacuaccauuauc

SEQ ID NO: 1061176 - RNA, 19 nt, Artificial Sequence
  Description of Artificial Sequence: Synthetic oligonucleotide
gaaagucccaaauggucac

SEQ ID NO: 1061177 - RNA, 19 nt, Artificial Sequence
  Description of Artificial Sequence: Synthetic oligonucleotide
cuucuacuugcuuccaacc

SEQ ID NO: 1061178 - RNA, 19 nt, Artificial Sequence
  Description of Artificial Sequence: Synthetic oligonucleotide
agcaugcacuguuaauugg

SEQ ID NO: 1061179 - RNA, 19 nt, Artificial Sequence
  Description of Artificial Sequence: Synthetic oligonucleotide
uaggcguguacucuggccu

SEQ ID NO: 1061180 - RNA, 19 nt, Artificial Sequence
  Description of Artificial Sequence: Synthetic oligonucleotide
aguacaagacacuaccauu

SEQ ID NO: 1061181 - RNA, 19 nt, Artificial Sequence
  Description of Artificial Sequence: Synthetic oligonucleotide
gcuaugaccagccaccugc

SEQ ID NO: 1061182 - RNA, 19 nt, Artificial Sequence
  Description of Artificial Sequence: Synthetic oligonucleotide
aacaugaacuggaauuucu

SEQ ID NO: 1061183 - RNA, 19 nt, Artificial Sequence
  Description of Artificial Sequence: Synthetic oligonucleotide
acguggugacuacaaaagg

SEQ ID NO: 1061184 - RNA, 19 nt, Artificial Sequence
  Description of Artificial Sequence: Synthetic oligonucleotide
uccuucuacccucuguucu

SEQ ID NO: 1061185 - RNA, 19 nt, Artificial Sequence
  Description of Artificial Sequence: Synthetic oligonucleotide
ugcgugaacguuagaacac

SEQ ID NO: 1061186 - RNA, 19 nt, Artificial Sequence
  Description of Artificial Sequence: Synthetic oligonucleotide
caugcgugaacguuagaac

SEQ ID NO: 1061187 - RNA, 19 nt, Artificial Sequence
  Description of Artificial Sequence: Synthetic oligonucleotide
acguuugaagcucuuaaaa

SEQ ID NO: 1061188 - RNA, 19 nt, Artificial Sequence
  Description of Artificial Sequence: Synthetic oligonucleotide
aagucccaaauggucacgg

SEQ ID NO: 1061189 - RNA, 19 nt, Artificial Sequence
  Description of Artificial Sequence: Synthetic oligonucleotide
aaucaacaguucccaaaga

SEQ ID NO: 1061190 - RNA, 19 nt, Artificial Sequence
  Description of Artificial Sequence: Synthetic oligonucleotide
uugaagcucuuaaaauacu

SEQ ID NO: 1061191 - RNA, 19 nt, Artificial Sequence
  Description of Artificial Sequence: Synthetic oligonucleotide
agaaugugccgucuccauc

SEQ ID NO: 1061192 - RNA, 19 nt, Artificial Sequence
  Description of Artificial Sequence: Synthetic oligonucleotide
cuacccucuguucucaccc

SEQ ID NO: 1061193 - RNA, 19 nt, Artificial Sequence
  Description of Artificial Sequence: Synthetic oligonucleotide
acuugugcaagaaagcaca

SEQ ID NO: 1061194 - RNA, 19 nt, Artificial Sequence
  Description of Artificial Sequence: Synthetic oligonucleotide
ugagacguacaauuuccac

SEQ ID NO: 1061195 - RNA, 19 nt, Artificial Sequence
  Description of Artificial Sequence: Synthetic oligonucleotide
aagauaugcucuuggcuuu

SEQ ID NO: 1061196 - RNA, 19 nt, Artificial Sequence
  Description of Artificial Sequence: Synthetic oligonucleotide
uguuucaauggggugaaaa

SEQ ID NO: 1061197 - RNA, 19 nt, Artificial Sequence
  Description of Artificial Sequence: Synthetic oligonucleotide
caucccguuaaacacauga

SEQ ID NO: 1061198 - RNA, 19 nt, Artificial Sequence
  Description of Artificial Sequence: Synthetic oligonucleotide
agugggguuuagaaugugc

SEQ ID NO: 1061199 - RNA, 19 nt, Artificial Sequence
  Description of Artificial Sequence: Synthetic oligonucleotide
cuugucauacguccugaag

SEQ ID NO: 1061200 - RNA, 19 nt, Artificial Sequence
  Description of Artificial Sequence: Synthetic oligonucleotide
cucgagacuccuucuaccc

SEQ ID NO: 1061201 - RNA, 19 nt, Artificial Sequence
  Description of Artificial Sequence: Synthetic oligonucleotide
gagaaagucccaaaugguc

SEQ ID NO: 1061202 - RNA, 19 nt, Artificial Sequence
  Description of Artificial Sequence: Synthetic oligonucleotide
agugaguacaagacacuac

SEQ ID NO: 1061203 - RNA, 19 nt, Artificial Sequence
  Description of Artificial Sequence: Synthetic oligonucleotide
ucguauaagcuacauucua

SEQ ID NO: 1061204 - RNA, 19 nt, Artificial Sequence
  Description of Artificial Sequence: Synthetic oligonucleotide
agcucgagacuccuucuac

SEQ ID NO: 1061205 - RNA, 19 nt, Artificial Sequence
  Description of Artificial Sequence: Synthetic oligonucleotide
agauagcauauaaaagauc

SEQ ID NO: 1061206 - RNA, 19 nt, Artificial Sequence
  Description of Artificial Sequence: Synthetic oligonucleotide
auaaccuuucugcacugga

SEQ ID NO: 1061207 - RNA, 19 nt, Artificial Sequence
  Description of Artificial Sequence: Synthetic oligonucleotide
ugagcuuccuauguguaac

SEQ ID NO: 1061208 - RNA, 19 nt, Artificial Sequence
  Description of Artificial Sequence: Synthetic oligonucleotide
gacacuaccauuaucaguu

SEQ ID NO: 1061209 - RNA, 19 nt, Artificial Sequence
  Description of Artificial Sequence: Synthetic oligonucleotide
uguauucauacacgagcaa

SEQ ID NO: 1061210 - RNA, 19 nt, Artificial Sequence
  Description of Artificial Sequence: Synthetic oligonucleotide
cagcuaugacuccacaugc

SEQ ID NO: 1061211 - RNA, 19 nt, Artificial Sequence
  Description of Artificial Sequence: Synthetic oligonucleotide
aauggucacgguccaucug

SEQ ID NO: 1061212 - RNA, 19 nt, Artificial Sequence
  Description of Artificial Sequence: Synthetic oligonucleotide
gguagcgucuucuacuugc

SEQ ID NO: 1061213 - RNA, 19 nt, Artificial Sequence
  Description of Artificial Sequence: Synthetic oligonucleotide
cccguuaaacacaugacag

SEQ ID NO: 1061214 - RNA, 19 nt, Artificial Sequence
  Description of Artificial Sequence: Synthetic oligonucleotide
cauuaucaguuuucuggag

SEQ ID NO: 1061215 - RNA, 19 nt, Artificial Sequence
  Description of Artificial Sequence: Synthetic oligonucleotide
acacgagcaaagguuaguc

SEQ ID NO: 1061216 - RNA, 19 nt, Artificial Sequence
  Description of Artificial Sequence: Synthetic oligonucleotide
acgagcaaagguuagucuu

SEQ ID NO: 1061217 - RNA, 19 nt, Artificial Sequence
  Description of Artificial Sequence: Synthetic oligonucleotide
auugggcggagccaggugu

SEQ ID NO: 1061218 - RNA, 19 nt, Artificial Sequence
  Description of Artificial Sequence: Synthetic oligonucleotide
agacaaagccuugauucuc

SEQ ID NO: 1061219 - RNA, 19 nt, Artificial Sequence
  Description of Artificial Sequence: Synthetic oligonucleotide
acacguuugaagcucuuaa

SEQ ID NO: 1061220 - RNA, 19 nt, Artificial Sequence
  Description of Artificial Sequence: Synthetic oligonucleotide
gagcuuccuauguguaacg

SEQ ID NO: 1061221 - RNA, 19 nt, Artificial Sequence
  Description of Artificial Sequence: Synthetic oligonucleotide
accuagaaaagagugagua

SEQ ID NO: 1061222 - RNA, 19 nt, Artificial Sequence
  Description of Artificial Sequence: Synthetic oligonucleotide
ggaacucaagaucaacuug

SEQ ID NO: 1061223 - RNA, 19 nt, Artificial Sequence
  Description of Artificial Sequence: Synthetic oligonucleotide
cuuggucgcuuucacacac

SEQ ID NO: 1061224 - RNA, 19 nt, Artificial Sequence
  Description of Artificial Sequence: Synthetic oligonucleotide
uguacucuggccuccucgu

SEQ ID NO: 1061225 - RNA, 19 nt, Artificial Sequence
  Description of Artificial Sequence: Synthetic oligonucleotide
uguaacgucugagcaaagu

SEQ ID NO: 1061226 - RNA, 19 nt, Artificial Sequence
  Description of Artificial Sequence: Synthetic oligonucleotide
agaccaaaacagaauaccu

SEQ ID NO: 1061227 - RNA, 19 nt, Artificial Sequence
  Description of Artificial Sequence: Synthetic oligonucleotide
guaauuucuaccacacgca

SEQ ID NO: 1061228 - RNA, 19 nt, Artificial Sequence
  Description of Artificial Sequence: Synthetic oligonucleotide
guaauuuaugacuggggua

SEQ ID NO: 1061229 - RNA, 19 nt, Artificial Sequence
  Description of Artificial Sequence: Synthetic oligonucleotide
cuuccuauguguaacgucu

SEQ ID NO: 1061230 - RNA, 19 nt, Artificial Sequence
  Description of Artificial Sequence: Synthetic oligonucleotide
gcauuagguuauuucagag

SEQ ID NO: 1061231 - RNA, 19 nt, Artificial Sequence
  Description of Artificial Sequence: Synthetic oligonucleotide
ugcugaaguuuauucggac

SEQ ID NO: 1061232 - RNA, 19 nt, Artificial Sequence
  Description of Artificial Sequence: Synthetic oligonucleotide
uuuggcugaaauucacaua

SEQ ID NO: 1061233 - RNA, 19 nt, Artificial Sequence
  Description of Artificial Sequence: Synthetic oligonucleotide
auaaaagaucguaauuuau

SEQ ID NO: 1061234 - RNA, 19 nt, Artificial Sequence
  Description of Artificial Sequence: Synthetic oligonucleotide
uaccacacgcaagucacag

SEQ ID NO: 1061235 - RNA, 19 nt, Artificial Sequence
  Description of Artificial Sequence: Synthetic oligonucleotide
caguguauucauacacgag

SEQ ID NO: 1061236 - RNA, 19 nt, Artificial Sequence
  Description of Artificial Sequence: Synthetic oligonucleotide
cuugugcaagaaagcacag

SEQ ID NO: 1061237 - RNA, 19 nt, Artificial Sequence
  Description of Artificial Sequence: Synthetic oligonucleotide
acaugcgugaacguuagaa

SEQ ID NO: 1061238 - RNA, 19 nt, Artificial Sequence
  Description of Artificial Sequence: Synthetic oligonucleotide
uaccauuaucaguuuucug

SEQ ID NO: 1061239 - RNA, 19 nt, Artificial Sequence
  Description of Artificial Sequence: Synthetic oligonucleotide
cuguuaauuggcauuaggu

SEQ ID NO: 1061240 - RNA, 19 nt, Artificial Sequence
  Description of Artificial Sequence: Synthetic oligonucleotide
gugggguuuagaaugugcc

SEQ ID NO: 1061241 - RNA, 19 nt, Artificial Sequence
  Description of Artificial Sequence: Synthetic oligonucleotide
gauaagggguugcugaagu

SEQ ID NO: 1061242 - RNA, 19 nt, Artificial Sequence
  Description of Artificial Sequence: Synthetic oligonucleotide
ucccauaaccuuucugcac

SEQ ID NO: 1061243 - RNA, 19 nt, Artificial Sequence
  Description of Artificial Sequence: Synthetic oligonucleotide
uuccuauguguaacgucug

SEQ ID NO: 1061244 - RNA, 19 nt, Artificial Sequence
  Description of Artificial Sequence: Synthetic oligonucleotide
uggugcgcuggacagggug

SEQ ID NO: 1061245 - RNA, 19 nt, Artificial Sequence
  Description of Artificial Sequence: Synthetic oligonucleotide
ucugccuaccaguggggcc

SEQ ID NO: 1061246 - RNA, 19 nt, Artificial Sequence
  Description of Artificial Sequence: Synthetic oligonucleotide
cuccgucuuaugcagcugc

SEQ ID NO: 1061247 - RNA, 19 nt, Artificial Sequence
  Description of Artificial Sequence: Synthetic oligonucleotide
aucccguuaaacacaugac

SEQ ID NO: 1061248 - RNA, 19 nt, Artificial Sequence
  Description of Artificial Sequence: Synthetic oligonucleotide
uuggucgcuuucacacacg

SEQ ID NO: 1061249 - RNA, 19 nt, Artificial Sequence
  Description of Artificial Sequence: Synthetic oligonucleotide
guaacgucugagcaaagua

SEQ ID NO: 1061250 - RNA, 19 nt, Artificial Sequence
  Description of Artificial Sequence: Synthetic oligonucleotide
guguauucauacacgagca

SEQ ID NO: 1061251 - RNA, 19 nt, Artificial Sequence
  Description of Artificial Sequence: Synthetic oligonucleotide
ugacgugugggcuucccaa

SEQ ID NO: 1061252 - RNA, 19 nt, Artificial Sequence
  Description of Artificial Sequence: Synthetic oligonucleotide
cauacacgagcaaagguua

SEQ ID NO: 1061253 - RNA, 19 nt, Artificial Sequence
  Description of Artificial Sequence: Synthetic oligonucleotide
aaugugccgucuccaucug

SEQ ID NO: 1061254 - RNA, 19 nt, Artificial Sequence
  Description of Artificial Sequence: Synthetic oligonucleotide
guauucauacacgagcaaa

SEQ ID NO: 1061255 - RNA, 19 nt, Artificial Sequence
  Description of Artificial Sequence: Synthetic oligonucleotide
cuuggagauagcauauaaa

SEQ ID NO: 1061256 - RNA, 19 nt, Artificial Sequence
  Description of Artificial Sequence: Synthetic oligonucleotide
acacacacguggugacuac

SEQ ID NO: 1061257 - RNA, 19 nt, Artificial Sequence
  Description of Artificial Sequence: Synthetic oligonucleotide
acagcaaaacuggugucug

SEQ ID NO: 1061258 - RNA, 19 nt, Artificial Sequence
  Description of Artificial Sequence: Synthetic oligonucleotide
aggugugagcuuccuaugu

SEQ ID NO: 1061259 - RNA, 19 nt, Artificial Sequence
  Description of Artificial Sequence: Synthetic oligonucleotide
agucacagggagcucgaga

SEQ ID NO: 1061260 - RNA, 19 nt, Artificial Sequence
  Description of Artificial Sequence: Synthetic oligonucleotide
aacaccuaaccuacaacuu

SEQ ID NO: 1061261 - RNA, 19 nt, Artificial Sequence
  Description of Artificial Sequence: Synthetic oligonucleotide
ucgcuuucacacacgugga

SEQ ID NO: 1061262 - RNA, 19 nt, Artificial Sequence
  Description of Artificial Sequence: Synthetic oligonucleotide
gugaacguuagaacacgag

SEQ ID NO: 1061263 - RNA, 19 nt, Artificial Sequence
  Description of Artificial Sequence: Synthetic oligonucleotide
accacacgcaagucacagg

SEQ ID NO: 1061264 - RNA, 19 nt, Artificial Sequence
  Description of Artificial Sequence: Synthetic oligonucleotide
ucgagacuccuucuacccu

SEQ ID NO: 1061265 - RNA, 19 nt, Artificial Sequence
  Description of Artificial Sequence: Synthetic oligonucleotide
guuuagaaugugccgucuc

SEQ ID NO: 1061266 - RNA, 19 nt, Artificial Sequence
  Description of Artificial Sequence: Synthetic oligonucleotide
auacaugcgugaacguuag

SEQ ID NO: 1061267 - RNA, 19 nt, Artificial Sequence
  Description of Artificial Sequence: Synthetic oligonucleotide
gaacccagucauacaugcg

SEQ ID NO: 1061268 - RNA, 19 nt, Artificial Sequence
  Description of Artificial Sequence: Synthetic oligonucleotide
caacugguggagaggcggg

SEQ ID NO: 1061269 - RNA, 19 nt, Artificial Sequence
  Description of Artificial Sequence: Synthetic oligonucleotide
gucccaaauggucacgguc

SEQ ID NO: 1061270 - RNA, 19 nt, Artificial Sequence
  Description of Artificial Sequence: Synthetic oligonucleotide
acgcaagucacagggagcu

SEQ ID NO: 1061271 - RNA, 19 nt, Artificial Sequence
  Description of Artificial Sequence: Synthetic oligonucleotide
cacgcaagucacagggagc

SEQ ID NO: 1061272 - RNA, 19 nt, Artificial Sequence
  Description of Artificial Sequence: Synthetic oligonucleotide
caugcacuguuaauuggca

SEQ ID NO: 1061273 - RNA, 19 nt, Artificial Sequence
  Description of Artificial Sequence: Synthetic oligonucleotide
aacucagugaauggcccaa

SEQ ID NO: 1061274 - RNA, 19 nt, Artificial Sequence
  Description of Artificial Sequence: Synthetic oligonucleotide
gagacaaagccuugauucu

SEQ ID NO: 1061275 - RNA, 19 nt, Artificial Sequence
  Description of Artificial Sequence: Synthetic oligonucleotide
gugugauuaccaccaacuc

SEQ ID NO: 1061276 - RNA, 19 nt, Artificial Sequence
  Description of Artificial Sequence: Synthetic oligonucleotide
uaucaguuuucuggagaug

SEQ ID NO: 1061277 - RNA, 19 nt, Artificial Sequence
  Description of Artificial Sequence: Synthetic oligonucleotide
cuggauugggcggagccag

SEQ ID NO: 1061278 - RNA, 19 nt, Artificial Sequence
  Description of Artificial Sequence: Synthetic oligonucleotide
uagaaugugccgucuccau

SEQ ID NO: 1061279 - RNA, 19 nt, Artificial Sequence
  Description of Artificial Sequence: Synthetic oligonucleotide
agcucuuaaaauacuggaa

SEQ ID NO: 1061280 - RNA, 19 nt, Artificial Sequence
  Description of Artificial Sequence: Synthetic oligonucleotide
cauucuacacaggaacuca

SEQ ID NO: 1061281 - RNA, 19 nt, Artificial Sequence
  Description of Artificial Sequence: Synthetic oligonucleotide
cagucaaccuguccuuggc

SEQ ID NO: 1061282 - RNA, 19 nt, Artificial Sequence
  Description of Artificial Sequence: Synthetic oligonucleotide
uuagaacacgaggggaaaa

SEQ ID NO: 1061283 - RNA, 19 nt, Artificial Sequence
  Description of Artificial Sequence: Synthetic oligonucleotide
cauaaccuuucugcacugg

SEQ ID NO: 1061284 - RNA, 19 nt, Artificial Sequence
  Description of Artificial Sequence: Synthetic oligonucleotide
uccgucuuaugcagcugca

SEQ ID NO: 1061285 - RNA, 19 nt, Artificial Sequence
  Description of Artificial Sequence: Synthetic oligonucleotide
uccucgucuggauaauuuu

SEQ ID NO: 1061286 - RNA, 19 nt, Artificial Sequence
  Description of Artificial Sequence: Synthetic oligonucleotide
uacacgagcaaagguuagu

SEQ ID NO: 1061287 - RNA, 19 nt, Artificial Sequence
  Description of Artificial Sequence: Synthetic oligonucleotide
cguauaagcuacauucuac

SEQ ID NO: 1061288 - RNA, 19 nt, Artificial Sequence
  Description of Artificial Sequence: Synthetic oligonucleotide
agauauccuugugugauua

SEQ ID NO: 1061289 - RNA, 19 nt, Artificial Sequence
  Description of Artificial Sequence: Synthetic oligonucleotide
cucauacuucucaccuggc

SEQ ID NO: 1061290 - RNA, 19 nt, Artificial Sequence
  Description of Artificial Sequence: Synthetic oligonucleotide
cagucauacaugcgugaac

SEQ ID NO: 1061291 - RNA, 19 nt, Artificial Sequence
  Description of Artificial Sequence: Synthetic oligonucleotide
cacaggcauuaagauaugc

SEQ ID NO: 1061292 - RNA, 19 nt, Artificial Sequence
  Description of Artificial Sequence: Synthetic oligonucleotide
ccuugugugauuaccacca

SEQ ID NO: 1061293 - RNA, 19 nt, Artificial Sequence
  Description of Artificial Sequence: Synthetic oligonucleotide
cauuagguuauuucagagu

SEQ ID NO: 1061294 - RNA, 19 nt, Artificial Sequence
  Description of Artificial Sequence: Synthetic oligonucleotide
aggcguguacucuggccuc

SEQ ID NO: 1061295 - RNA, 19 nt, Artificial Sequence
  Description of Artificial Sequence: Synthetic oligonucleotide
acguuagaacacgagggga

SEQ ID NO: 1061296 - RNA, 19 nt, Artificial Sequence
  Description of Artificial Sequence: Synthetic oligonucleotide
aaccuagaaaagagugagu

SEQ ID NO: 1061297 - RNA, 19 nt, Artificial Sequence
  Description of Artificial Sequence: Synthetic oligonucleotide
gcaaagguuagucuuggaa

SEQ ID NO: 1061298 - RNA, 19 nt, Artificial Sequence
  Description of Artificial Sequence: Synthetic oligonucleotide
gucauacguccugaagagg

SEQ ID NO: 1061299 - RNA, 19 nt, Artificial Sequence
  Description of Artificial Sequence: Synthetic oligonucleotide
agucaucccguuaaacaca

SEQ ID NO: 1061300 - RNA, 19 nt, Artificial Sequence
  Description of Artificial Sequence: Synthetic oligonucleotide
ccaacucagugaauggccc

SEQ ID NO: 1061301 - RNA, 19 nt, Artificial Sequence
  Description of Artificial Sequence: Synthetic oligonucleotide
ggugacuacaaaaggagaa

SEQ ID NO: 1061302 - RNA, 19 nt, Artificial Sequence
  Description of Artificial Sequence: Synthetic oligonucleotide
gauugggcggagccaggug

SEQ ID NO: 1061303 - RNA, 19 nt, Artificial Sequence
  Description of Artificial Sequence: Synthetic oligonucleotide
cuuucacacacguggacua

SEQ ID NO: 1061304 - RNA, 19 nt, Artificial Sequence
  Description of Artificial Sequence: Synthetic oligonucleotide
gucaaccuguccuuggcaa

SEQ ID NO: 1061305 - RNA, 19 nt, Artificial Sequence
  Description of Artificial Sequence: Synthetic oligonucleotide
uugggcggagccaggugug

SEQ ID NO: 1061306 - RNA, 19 nt, Artificial Sequence
  Description of Artificial Sequence: Synthetic oligonucleotide
ccuacaacuucccacccac

SEQ ID NO: 1061307 - RNA, 19 nt, Artificial Sequence
  Description of Artificial Sequence: Synthetic oligonucleotide
gauguccuugucauacguc

SEQ ID NO: 1061308 - RNA, 19 nt, Artificial Sequence
  Description of Artificial Sequence: Synthetic oligonucleotide
cacagggagcucgagacuc

SEQ ID NO: 1061309 - RNA, 19 nt, Artificial Sequence
  Description of Artificial Sequence: Synthetic oligonucleotide
aagcuaugaccagccaccu

SEQ ID NO: 1061310 - RNA, 19 nt, Artificial Sequence
  Description of Artificial Sequence: Synthetic oligonucleotide
gcugaaguuuauucggaca

SEQ ID NO: 1061311 - RNA, 19 nt, Artificial Sequence
  Description of Artificial Sequence: Synthetic oligonucleotide
gugccacggacauggacug

SEQ ID NO: 1061312 - RNA, 19 nt, Artificial Sequence
  Description of Artificial Sequence: Synthetic oligonucleotide
gagugaguacaagacacua

SEQ ID NO: 1061313 - RNA, 19 nt, Artificial Sequence
  Description of Artificial Sequence: Synthetic oligonucleotide
uuauucggacacguuugaa

SEQ ID NO: 1061314 - RNA, 19 nt, Artificial Sequence
  Description of Artificial Sequence: Synthetic oligonucleotide
gacguacaauuuccacaug

SEQ ID NO: 1061315 - RNA, 19 nt, Artificial Sequence
  Description of Artificial Sequence: Synthetic oligonucleotide
auacacgagcaaagguuag

SEQ ID NO: 1061316 - RNA, 19 nt, Artificial Sequence
  Description of Artificial Sequence: Synthetic oligonucleotide
aauuggcauuagguuauuu

SEQ ID NO: 1061317 - RNA, 19 nt, Artificial Sequence
  Description of Artificial Sequence: Synthetic oligonucleotide
caggugugagcuuccuaug

SEQ ID NO: 1061318 - RNA, 19 nt, Artificial Sequence
  Description of Artificial Sequence: Synthetic oligonucleotide
cccaagacauuccugggug

SEQ ID NO: 1061319 - RNA, 19 nt, Artificial Sequence
  Description of Artificial Sequence: Synthetic oligonucleotide
cccucuagcaacacacagc

SEQ ID NO: 1061320 - RNA, 19 nt, Artificial Sequence
  Description of Artificial Sequence: Synthetic oligonucleotide
auaagggguugcugaaguu

SEQ ID NO: 1061321 - RNA, 19 nt, Artificial Sequence
  Description of Artificial Sequence: Synthetic oligonucleotide
acgucugagcaaaguacag

SEQ ID NO: 1061322 - RNA, 19 nt, Artificial Sequence
  Description of Artificial Sequence: Synthetic oligonucleotide
cauacguccugaagaggga

SEQ ID NO: 1061323 - RNA, 19 nt, Artificial Sequence
  Description of Artificial Sequence: Synthetic oligonucleotide
gguggauaggcguguacuc

SEQ ID NO: 1061324 - RNA, 19 nt, Artificial Sequence
  Description of Artificial Sequence: Synthetic oligonucleotide
ugccaucguauaagcuaca

SEQ ID NO: 1061325 - RNA, 19 nt, Artificial Sequence
  Description of Artificial Sequence: Synthetic oligonucleotide
uacguccugaagagggauu

SEQ ID NO: 1061326 - RNA, 19 nt, Artificial Sequence
  Description of Artificial Sequence: Synthetic oligonucleotide
agcuaugaccagccaccug

SEQ ID NO: 1061327 - RNA, 19 nt, Artificial Sequence
  Description of Artificial Sequence: Synthetic oligonucleotide
gcucgagacuccuucuacc

SEQ ID NO: 1061328 - RNA, 19 nt, Artificial Sequence
  Description of Artificial Sequence: Synthetic oligonucleotide
agguuagucuuggaaccca

SEQ ID NO: 1061329 - RNA, 19 nt, Artificial Sequence
  Description of Artificial Sequence: Synthetic oligonucleotide
uggcaccugacagcaaaac

SEQ ID NO: 1061330 - RNA, 19 nt, Artificial Sequence
  Description of Artificial Sequence: Synthetic oligonucleotide
aggcggaaaacaacagugu

SEQ ID NO: 1061331 - RNA, 19 nt, Artificial Sequence
  Description of Artificial Sequence: Synthetic oligonucleotide
gaacuccgucuuaugcagc

SEQ ID NO: 1061332 - RNA, 19 nt, Artificial Sequence
  Description of Artificial Sequence: Synthetic oligonucleotide
cccaaggcggaaaacaaca

SEQ ID NO: 1061333 - RNA, 19 nt, Artificial Sequence
  Description of Artificial Sequence: Synthetic oligonucleotide
acagggugacgugugggcu

SEQ ID NO: 1061334 - RNA, 19 nt, Artificial Sequence
  Description of Artificial Sequence: Synthetic oligonucleotide
agggugacgugugggcuuc

SEQ ID NO: 1061335 - RNA, 19 nt, Artificial Sequence
  Description of Artificial Sequence: Synthetic oligonucleotide
aaguuuauucggacacguu

SEQ ID NO: 1061336 - RNA, 19 nt, Artificial Sequence
  Description of Artificial Sequence: Synthetic oligonucleotide
uggcugaaauucacauaua

SEQ ID NO: 1061337 - RNA, 19 nt, Artificial Sequence
  Description of Artificial Sequence: Synthetic oligonucleotide
gacaaagccuugauucucu

SEQ ID NO: 1061338 - RNA, 19 nt, Artificial Sequence
  Description of Artificial Sequence: Synthetic oligonucleotide
gcgugaacguuagaacacg

SEQ ID NO: 1061339 - RNA, 19 nt, Artificial Sequence
  Description of Artificial Sequence: Synthetic oligonucleotide
uccaaccaacugguggaga

SEQ ID NO: 1061340 - RNA, 19 nt, Artificial Sequence
  Description of Artificial Sequence: Synthetic oligonucleotide
uuucuaccacacgcaaguc

SEQ ID NO: 1061341 - RNA, 19 nt, Artificial Sequence
  Description of Artificial Sequence: Synthetic oligonucleotide
ggcccaagacauuccuggg

SEQ ID NO: 1061342 - RNA, 19 nt, Artificial Sequence
  Description of Artificial Sequence: Synthetic oligonucleotide
ucaucccguuaaacacaug

SEQ ID NO: 1061343 - RNA, 19 nt, Artificial Sequence
  Description of Artificial Sequence: Synthetic oligonucleotide
accagucaaccuguccuug

SEQ ID NO: 1061344 - RNA, 19 nt, Artificial Sequence
  Description of Artificial Sequence: Synthetic oligonucleotide
auacguccugaagagggau

SEQ ID NO: 1061345 - RNA, 19 nt, Artificial Sequence
  Description of Artificial Sequence: Synthetic oligonucleotide
acucagugaauggcccaag

SEQ ID NO: 1061346 - RNA, 19 nt, Artificial Sequence
  Description of Artificial Sequence: Synthetic oligonucleotide
ccagucaaccuguccuugg

SEQ ID NO: 1061347 - RNA, 19 nt, Artificial Sequence
  Description of Artificial Sequence: Synthetic oligonucleotide
uacaugcgugaacguuaga

SEQ ID NO: 1061348 - RNA, 19 nt, Artificial Sequence
  Description of Artificial Sequence: Synthetic oligonucleotide
cucugccuaccaguggggc

SEQ ID NO: 1061349 - RNA, 19 nt, Artificial Sequence
  Description of Artificial Sequence: Synthetic oligonucleotide
ggauaggcguguacucugg

SEQ ID NO: 1061350 - RNA, 19 nt, Artificial Sequence
  Description of Artificial Sequence: Synthetic oligonucleotide
gguuagucuuggaacccag

SEQ ID NO: 1061351 - RNA, 19 nt, Artificial Sequence
  Description of Artificial Sequence: Synthetic oligonucleotide
auaugcucuuggcuuuauu

SEQ ID NO: 1061352 - RNA, 19 nt, Artificial Sequence
  Description of Artificial Sequence: Synthetic oligonucleotide
cagcucauacuucucaccu

SEQ ID NO: 1061353 - RNA, 19 nt, Artificial Sequence
  Description of Artificial Sequence: Synthetic oligonucleotide
cacuguuaauuggcauuag

SEQ ID NO: 1061354 - RNA, 19 nt, Artificial Sequence
  Description of Artificial Sequence: Synthetic oligonucleotide
uucuacccucuguucucac

SEQ ID NO: 1061355 - RNA, 19 nt, Artificial Sequence
  Description of Artificial Sequence: Synthetic oligonucleotide
uggugucugccaucguaua

SEQ ID NO: 1061356 - RNA, 19 nt, Artificial Sequence
  Description of Artificial Sequence: Synthetic oligonucleotide
ggcggaaaacaacagugua

SEQ ID NO: 1061357 - RNA, 19 nt, Artificial Sequence
  Description of Artificial Sequence: Synthetic oligonucleotide
ggguuuagaaugugccguc

SEQ ID NO: 1061358 - RNA, 19 nt, Artificial Sequence
  Description of Artificial Sequence: Synthetic oligonucleotide
aggugcaguaucagaacaa

SEQ ID NO: 1061359 - RNA, 19 nt, Artificial Sequence
  Description of Artificial Sequence: Synthetic oligonucleotide
cgagcaaagguuagucuug

SEQ ID NO: 1061360 - RNA, 19 nt, Artificial Sequence
  Description of Artificial Sequence: Synthetic oligonucleotide
caagucacagggagcucga

SEQ ID NO: 1061361 - RNA, 19 nt, Artificial Sequence
  Description of Artificial Sequence: Synthetic oligonucleotide
ugcgcuggacagggugacg

SEQ ID NO: 1061362 - RNA, 19 nt, Artificial Sequence
  Description of Artificial Sequence: Synthetic oligonucleotide
accaacugguggagaggcg

SEQ ID NO: 1061363 - RNA, 19 nt, Artificial Sequence
  Description of Artificial Sequence: Synthetic oligonucleotide
cuaccauuaucaguuuucu

SEQ ID NO: 1061364 - RNA, 19 nt, Artificial Sequence
  Description of Artificial Sequence: Synthetic oligonucleotide
uacuucucaccuggcccca

SEQ ID NO: 1061365 - RNA, 19 nt, Artificial Sequence
  Description of Artificial Sequence: Synthetic oligonucleotide
ggugccacggacauggacu

SEQ ID NO: 1061366 - RNA, 19 nt, Artificial Sequence
  Description of Artificial Sequence: Synthetic oligonucleotide
ggugacauggugcgcugga

SEQ ID NO: 1061367 - RNA, 19 nt, Artificial Sequence
  Description of Artificial Sequence: Synthetic oligonucleotide
acacacguggugacuacaa

SEQ ID NO: 1061368 - RNA, 19 nt, Artificial Sequence
  Description of Artificial Sequence: Synthetic oligonucleotide
ugugucccucuagcaacac

SEQ ID NO: 1061369 - RNA, 19 nt, Artificial Sequence
  Description of Artificial Sequence: Synthetic oligonucleotide
gcuacauucuacacaggaa

SEQ ID NO: 1061370 - RNA, 19 nt, Artificial Sequence
  Description of Artificial Sequence: Synthetic oligonucleotide
uggcgucagcugcggauaa

SEQ ID NO: 1061371 - RNA, 19 nt, Artificial Sequence
  Description of Artificial Sequence: Synthetic oligonucleotide
cuuuuccccgggccaccag

SEQ ID NO: 1061372 - RNA, 19 nt, Artificial Sequence
  Description of Artificial Sequence: Synthetic oligonucleotide
uggacccugaaugcugguu

SEQ ID NO: 1061373 - RNA, 19 nt, Artificial Sequence
  Description of Artificial Sequence: Synthetic oligonucleotide
cguaauuuaugacuggggu

SEQ ID NO: 1061374 - RNA, 19 nt, Artificial Sequence
  Description of Artificial Sequence: Synthetic oligonucleotide
agguuauuucagagugaca

SEQ ID NO: 1061375 - RNA, 19 nt, Artificial Sequence
  Description of Artificial Sequence: Synthetic oligonucleotide
gcugugagaccaaaacaga

SEQ ID NO: 1061376 - RNA, 19 nt, Artificial Sequence
  Description of Artificial Sequence: Synthetic oligonucleotide
cuggagauguccccagaua

SEQ ID NO: 1061377 - RNA, 19 nt, Artificial Sequence
  Description of Artificial Sequence: Synthetic oligonucleotide
ccgucuccaucugugagcc

SEQ ID NO: 1061378 - RNA, 19 nt, Artificial Sequence
  Description of Artificial Sequence: Synthetic oligonucleotide
auggacugaggugcaguau

SEQ ID NO: 1061379 - RNA, 19 nt, Artificial Sequence
  Description of Artificial Sequence: Synthetic oligonucleotide
gggguuuagaaugugccgu

SEQ ID NO: 1061380 - RNA, 19 nt, Artificial Sequence
  Description of Artificial Sequence: Synthetic oligonucleotide
gugucccucuagcaacaca

SEQ ID NO: 1061381 - RNA, 19 nt, Artificial Sequence
  Description of Artificial Sequence: Synthetic oligonucleotide
cguggacuaccacacuggg

SEQ ID NO: 1061382 - RNA, 19 nt, Artificial Sequence
  Description of Artificial Sequence: Synthetic oligonucleotide
cacgagcaaagguuagucu

SEQ ID NO: 1061383 - RNA, 19 nt, Artificial Sequence
  Description of Artificial Sequence: Synthetic oligonucleotide
cacacgcaagucacaggga

SEQ ID NO: 1061384 - RNA, 19 nt, Artificial Sequence
  Description of Artificial Sequence: Synthetic oligonucleotide
gccaccagucaaccugucc

SEQ ID NO: 1061385 - RNA, 19 nt, Artificial Sequence
  Description of Artificial Sequence: Synthetic oligonucleotide
agacuccuucuacccucug

SEQ ID NO: 1061386 - RNA, 19 nt, Artificial Sequence
  Description of Artificial Sequence: Synthetic oligonucleotide
cacaggugacauggugcgc

SEQ ID NO: 1061387 - RNA, 19 nt, Artificial Sequence
  Description of Artificial Sequence: Synthetic oligonucleotide
ggcggagccaggugugagc

SEQ ID NO: 1061388 - RNA, 19 nt, Artificial Sequence
  Description of Artificial Sequence: Synthetic oligonucleotide
ccuauuuaccagacacaca

SEQ ID NO: 1061389 - RNA, 19 nt, Artificial Sequence
  Description of Artificial Sequence: Synthetic oligonucleotide
uaauuggcauuagguuauu

SEQ ID NO: 1061390 - RNA, 19 nt, Artificial Sequence
  Description of Artificial Sequence: Synthetic oligonucleotide
acuccgucuuaugcagcug

SEQ ID NO: 1061391 - RNA, 19 nt, Artificial Sequence
  Description of Artificial Sequence: Synthetic oligonucleotide
cacagcuaugacuccacau

SEQ ID NO: 1061392 - RNA, 19 nt, Artificial Sequence
  Description of Artificial Sequence: Synthetic oligonucleotide
cuugugugauuaccaccaa

SEQ ID NO: 1061393 - RNA, 19 nt, Artificial Sequence
  Description of Artificial Sequence: Synthetic oligonucleotide
guggacuaccacacuggga

SEQ ID NO: 1061394 - RNA, 19 nt, Artificial Sequence
  Description of Artificial Sequence: Synthetic oligonucleotide
ccauaaccuuucugcacug

SEQ ID NO: 1061395 - RNA, 19 nt, Artificial Sequence
  Description of Artificial Sequence: Synthetic oligonucleotide
cgagacuccuucuacccuc

SEQ ID NO: 1061396 - RNA, 19 nt, Artificial Sequence
  Description of Artificial Sequence: Synthetic oligonucleotide
caaccuguccuuggcaaaa

SEQ ID NO: 1061397 - RNA, 19 nt, Artificial Sequence
  Description of Artificial Sequence: Synthetic oligonucleotide
ugagguggauaggcgugua

SEQ ID NO: 1061398 - RNA, 19 nt, Artificial Sequence
  Description of Artificial Sequence: Synthetic oligonucleotide
uaccaccaacucagugaau

SEQ ID NO: 1061399 - RNA, 19 nt, Artificial Sequence
  Description of Artificial Sequence: Synthetic oligonucleotide
ugggcuucccaaggcggaa

SEQ ID NO: 1061400 - RNA, 19 nt, Artificial Sequence
  Description of Artificial Sequence: Synthetic oligonucleotide
cauuccugggugccacgga

SEQ ID NO: 1061401 - RNA, 19 nt, Artificial Sequence
  Description of Artificial Sequence: Synthetic oligonucleotide
acuucucaccuggccccag

SEQ ID NO: 1061402 - RNA, 19 nt, Artificial Sequence
  Description of Artificial Sequence: Synthetic oligonucleotide
ggacugaggugcaguauca

SEQ ID NO: 1061403 - RNA, 19 nt, Artificial Sequence
  Description of Artificial Sequence: Synthetic oligonucleotide
agccuggcgucagcugcgg

SEQ ID NO: 1061404 - RNA, 19 nt, Artificial Sequence
  Description of Artificial Sequence: Synthetic oligonucleotide
cccauaaccuuucugcacu

SEQ ID NO: 1061405 - RNA, 19 nt, Artificial Sequence
  Description of Artificial Sequence: Synthetic oligonucleotide
ugggcggagccagguguga

SEQ ID NO: 1061406 - RNA, 19 nt, Artificial Sequence
  Description of Artificial Sequence: Synthetic oligonucleotide
gcaacaugaacuggaauuu

SEQ ID NO: 1061407 - RNA, 19 nt, Artificial Sequence
  Description of Artificial Sequence: Synthetic oligonucleotide
gcugcggauaagggguugc

SEQ ID NO: 1061408 - RNA, 19 nt, Artificial Sequence
  Description of Artificial Sequence: Synthetic oligonucleotide
ccaccagucaaccuguccu

SEQ ID NO: 1061409 - RNA, 19 nt, Artificial Sequence
  Description of Artificial Sequence: Synthetic oligonucleotide
cacacacguggugacuaca

SEQ ID NO: 1061410 - RNA, 19 nt, Artificial Sequence
  Description of Artificial Sequence: Synthetic oligonucleotide
guuagucuuggaacccagu

SEQ ID NO: 1061411 - RNA, 19 nt, Artificial Sequence
  Description of Artificial Sequence: Synthetic oligonucleotide
gucaucccguuaaacacau

SEQ ID NO: 1061412 - RNA, 19 nt, Artificial Sequence
  Description of Artificial Sequence: Synthetic oligonucleotide
ccuaaccuacaacuuccca

SEQ ID NO: 1061413 - RNA, 19 nt, Artificial Sequence
  Description of Artificial Sequence: Synthetic oligonucleotide
guugucccauaaccuuucu

SEQ ID NO: 1061414 - RNA, 19 nt, Artificial Sequence
  Description of Artificial Sequence: Synthetic oligonucleotide
cuccucgucuggauaauuu

SEQ ID NO: 1061415 - RNA, 19 nt, Artificial Sequence
  Description of Artificial Sequence: Synthetic oligonucleotide
ggugcgcuggacaggguga

SEQ ID NO: 1061416 - RNA, 19 nt, Artificial Sequence
  Description of Artificial Sequence: Synthetic oligonucleotide
ggguagcgucuucuacuug

SEQ ID NO: 1061417 - RNA, 19 nt, Artificial Sequence
  Description of Artificial Sequence: Synthetic oligonucleotide
guagcgucuucuacuugcu

SEQ ID NO: 1061418 - RNA, 19 nt, Artificial Sequence
  Description of Artificial Sequence: Synthetic oligonucleotide
gugcgcuggacagggugac

SEQ ID NO: 1061419 - RNA, 19 nt, Artificial Sequence
  Description of Artificial Sequence: Synthetic oligonucleotide
cguuugaagcucuuaaaau

SEQ ID NO: 1061420 - RNA, 19 nt, Artificial Sequence
  Description of Artificial Sequence: Synthetic oligonucleotide
uccccaugagugggguuua

SEQ ID NO: 1061421 - RNA, 19 nt, Artificial Sequence
  Description of Artificial Sequence: Synthetic oligonucleotide
ggugacgugugggcuuccc

SEQ ID NO: 1061422 - RNA, 19 nt, Artificial Sequence
  Description of Artificial Sequence: Synthetic oligonucleotide
gcggaaaacaacaguguau

SEQ ID NO: 1061423 - RNA, 19 nt, Artificial Sequence
  Description of Artificial Sequence: Synthetic oligonucleotide
ccguuaaacacaugacagu

SEQ ID NO: 1061424 - RNA, 19 nt, Artificial Sequence
  Description of Artificial Sequence: Synthetic oligonucleotide
cacugggguugucccauaa

SEQ ID NO: 1061425 - RNA, 19 nt, Artificial Sequence
  Description of Artificial Sequence: Synthetic oligonucleotide
cuacaacuucccacccacu

SEQ ID NO: 1061426 - RNA, 19 nt, Artificial Sequence
  Description of Artificial Sequence: Synthetic oligonucleotide
ccgucuuaugcagcugcag

SEQ ID NO: 1061427 - RNA, 19 nt, Artificial Sequence
  Description of Artificial Sequence: Synthetic oligonucleotide
agccaggugugagcuuccu

SEQ ID NO: 1061428 - RNA, 19 nt, Artificial Sequence
  Description of Artificial Sequence: Synthetic oligonucleotide
ugccuaccaguggggccug

SEQ ID NO: 1061429 - RNA, 19 nt, Artificial Sequence
  Description of Artificial Sequence: Synthetic oligonucleotide
gcuuuguggggugccucug

SEQ ID NO: 1061430 - RNA, 19 nt, Artificial Sequence
  Description of Artificial Sequence: Synthetic oligonucleotide
ccacaggcauuaagauaug

SEQ ID NO: 1061431 - RNA, 19 nt, Artificial Sequence
  Description of Artificial Sequence: Synthetic oligonucleotide
ggagcucgagacuccuucu

SEQ ID NO: 1061432 - RNA, 19 nt, Artificial Sequence
  Description of Artificial Sequence: Synthetic oligonucleotide
gcccaagacauuccugggu

SEQ ID NO: 1061433 - RNA, 19 nt, Artificial Sequence
  Description of Artificial Sequence: Synthetic oligonucleotide
cagauauccuugugugauu

SEQ ID NO: 1061434 - RNA, 19 nt, Artificial Sequence
  Description of Artificial Sequence: Synthetic oligonucleotide
cccaaauggucacggucca

SEQ ID NO: 1061435 - RNA, 19 nt, Artificial Sequence
  Description of Artificial Sequence: Synthetic oligonucleotide
gcuucccaaggcggaaaac

SEQ ID NO: 1061436 - RNA, 19 nt, Artificial Sequence
  Description of Artificial Sequence: Synthetic oligonucleotide
ggcgucagcugcggauaag

SEQ ID NO: 1061437 - RNA, 19 nt, Artificial Sequence
  Description of Artificial Sequence: Synthetic oligonucleotide
auguuucaauggggugaaa

SEQ ID NO: 1061438 - RNA, 19 nt, Artificial Sequence
  Description of Artificial Sequence: Synthetic oligonucleotide
ccagucauacaugcgugaa

SEQ ID NO: 1061439 - RNA, 19 nt, Artificial Sequence
  Description of Artificial Sequence: Synthetic oligonucleotide
gggguagcgucuucuacuu

SEQ ID NO: 1061440 - RNA, 19 nt, Artificial Sequence
  Description of Artificial Sequence: Synthetic oligonucleotide
caccagucaaccuguccuu

SEQ ID NO: 1061441 - RNA, 19 nt, Artificial Sequence
  Description of Artificial Sequence: Synthetic oligonucleotide
gggcggagccaggugugag

SEQ ID NO: 1061442 - RNA, 19 nt, Artificial Sequence
  Description of Artificial Sequence: Synthetic oligonucleotide
gucuuggaacccagucaua

SEQ ID NO: 1061443 - RNA, 19 nt, Artificial Sequence
  Description of Artificial Sequence: Synthetic oligonucleotide
ccuugucauacguccugaa

SEQ ID NO: 1061444 - RNA, 19 nt, Artificial Sequence
  Description of Artificial Sequence: Synthetic oligonucleotide
cagggugacgugugggcuu

SEQ ID NO: 1061445 - RNA, 19 nt, Artificial Sequence
  Description of Artificial Sequence: Synthetic oligonucleotide
cggaaaacaacaguguauu

SEQ ID NO: 1061446 - RNA, 19 nt, Artificial Sequence
  Description of Artificial Sequence: Synthetic oligonucleotide
cccgggccaccagucaacc

SEQ ID NO: 1061447 - RNA, 19 nt, Artificial Sequence
  Description of Artificial Sequence: Synthetic oligonucleotide
ggauugggcggagccaggu

SEQ ID NO: 1061448 - RNA, 19 nt, Artificial Sequence
  Description of Artificial Sequence: Synthetic oligonucleotide
gguacaccacaggcauuaa

SEQ ID NO: 1061449 - RNA, 19 nt, Artificial Sequence
  Description of Artificial Sequence: Synthetic oligonucleotide
cugcggauaagggguugcu

SEQ ID NO: 1061450 - RNA, 19 nt, Artificial Sequence
  Description of Artificial Sequence: Synthetic oligonucleotide
gcgcuggacagggugacgu

SEQ ID NO: 1061451 - RNA, 19 nt, Artificial Sequence
  Description of Artificial Sequence: Synthetic oligonucleotide
gccaucguauaagcuacau

SEQ ID NO: 1061452 - RNA, 19 nt, Artificial Sequence
  Description of Artificial Sequence: Synthetic oligonucleotide
cacuggcaccugacagcaa

SEQ ID NO: 1061453 - RNA, 19 nt, Artificial Sequence
  Description of Artificial Sequence: Synthetic oligonucleotide
ccaucguauaagcuacauu

SEQ ID NO: 1061454 - RNA, 19 nt, Artificial Sequence
  Description of Artificial Sequence: Synthetic oligonucleotide
cagguacaccacaggcauu

SEQ ID NO: 1061455 - RNA, 19 nt, Artificial Sequence
  Description of Artificial Sequence: Synthetic oligonucleotide
gggcuucccaaggcggaaa

SEQ ID NO: 1061456 - RNA, 19 nt, Artificial Sequence
  Description of Artificial Sequence: Synthetic oligonucleotide
gggguugcugaaguuuauu

SEQ ID NO: 1061457 - RNA, 19 nt, Artificial Sequence
  Description of Artificial Sequence: Synthetic oligonucleotide
cagcugcggauaagggguu

SEQ ID NO: 1061458 - RNA, 19 nt, Artificial Sequence
  Description of Artificial Sequence: Synthetic oligonucleotide
gccuaccaguggggccugg

SEQ ID NO: 1061459 - RNA, 19 nt, Artificial Sequence
  Description of Artificial Sequence: Synthetic oligonucleotide
gccuggcgucagcugcgga

SEQ ID NO: 1061460 - RNA, 19 nt, Artificial Sequence
  Description of Artificial Sequence: Synthetic oligonucleotide
cguccugaagagggauuca

SEQ ID NO: 1061461 - RNA, 19 nt, Artificial Sequence
  Description of Artificial Sequence: Synthetic oligonucleotide
cggacacguuugaagcucu

SEQ ID NO: 1061462 - RNA, 19 nt, Artificial Sequence
  Description of Artificial Sequence: Synthetic oligonucleotide
cgcaagucacagggagcuc

SEQ ID NO: 1061463 - RNA, 19 nt, Artificial Sequence
  Description of Artificial Sequence: Synthetic oligonucleotide
gcguguacucuggccuccu

SEQ ID NO: 1061464 - RNA, 19 nt, Artificial Sequence
  Description of Artificial Sequence: Synthetic oligonucleotide
gccuccucgucuggauaau

SEQ ID NO: 1061465 - RNA, 19 nt, Artificial Sequence
  Description of Artificial Sequence: Synthetic oligonucleotide
ccuccucgucuggauaauu

SEQ ID NO: 1061466 - RNA, 19 nt, Artificial Sequence
  Description of Artificial Sequence: Synthetic oligonucleotide
aaaauuugaguuuauauug

SEQ ID NO: 1061467 - RNA, 19 nt, Artificial Sequence
  Description of Artificial Sequence: Synthetic oligonucleotide
aaacagaauaaccacacgc

SEQ ID NO: 1061468 - RNA, 19 nt, Artificial Sequence
  Description of Artificial Sequence: Synthetic oligonucleotide
uuuauauugaaccugacaa

SEQ ID NO: 1061469 - RNA, 19 nt, Artificial Sequence
  Description of Artificial Sequence: Synthetic oligonucleotide
uuugaguuuauauugaacc

SEQ ID NO: 1061470 - RNA, 19 nt, Artificial Sequence
  Description of Artificial Sequence: Synthetic oligonucleotide
uuguagacaaucaugacag

SEQ ID NO: 1061471 - RNA, 19 nt, Artificial Sequence
  Description of Artificial Sequence: Synthetic oligonucleotide
uuauauaacacccauugac

SEQ ID NO: 1061472 - RNA, 19 nt, Artificial Sequence
  Description of Artificial Sequence: Synthetic oligonucleotide
ugauuuucaaguaaugaag

SEQ ID NO: 1061473 - RNA, 19 nt, Artificial Sequence
  Description of Artificial Sequence: Synthetic oligonucleotide
aaugcagccaauccgaaug

SEQ ID NO: 1061474 - RNA, 19 nt, Artificial Sequence
  Description of Artificial Sequence: Synthetic oligonucleotide
uauauaacacccauugacc

SEQ ID NO: 1061475 - RNA, 19 nt, Artificial Sequence
  Description of Artificial Sequence: Synthetic oligonucleotide
aucgcuauaacaccaaggg

SEQ ID NO: 1061476 - RNA, 19 nt, Artificial Sequence
  Description of Artificial Sequence: Synthetic oligonucleotide
uuggauuugacaaaaucug

SEQ ID NO: 1061477 - RNA, 19 nt, Artificial Sequence
  Description of Artificial Sequence: Synthetic oligonucleotide
acaagguugcagcaaaugc

SEQ ID NO: 1061478 - RNA, 19 nt, Artificial Sequence
  Description of Artificial Sequence: Synthetic oligonucleotide
ugcauuauuaaaaguaaca

SEQ ID NO: 1061479 - RNA, 19 nt, Artificial Sequence
  Description of Artificial Sequence: Synthetic oligonucleotide
uucauuaugcaucuguuac

SEQ ID NO: 1061480 - RNA, 19 nt, Artificial Sequence
  Description of Artificial Sequence: Synthetic oligonucleotide
aauaauuguagacaaucau

SEQ ID NO: 1061481 - RNA, 19 nt, Artificial Sequence
  Description of Artificial Sequence: Synthetic oligonucleotide
uucuacgaaggaaucaucg

SEQ ID NO: 1061482 - RNA, 19 nt, Artificial Sequence
  Description of Artificial Sequence: Synthetic oligonucleotide
aauuguagacaaucaugac

SEQ ID NO: 1061483 - RNA, 19 nt, Artificial Sequence
  Description of Artificial Sequence: Synthetic oligonucleotide
ucuggaaguaccuucuacg

SEQ ID NO: 1061484 - RNA, 19 nt, Artificial Sequence
  Description of Artificial Sequence: Synthetic oligonucleotide
uuucacaugguaaucacac

SEQ ID NO: 1061485 - RNA, 19 nt, Artificial Sequence
  Description of Artificial Sequence: Synthetic oligonucleotide
uucuauacgcaacaagucc

SEQ ID NO: 1061486 - RNA, 19 nt, Artificial Sequence
  Description of Artificial Sequence: Synthetic oligonucleotide
aguauuauagucucuagau

SEQ ID NO: 1061487 - RNA, 19 nt, Artificial Sequence
  Description of Artificial Sequence: Synthetic oligonucleotide
ucgaucauggccauuguag

SEQ ID NO: 1061488 - RNA, 19 nt, Artificial Sequence
  Description of Artificial Sequence: Synthetic oligonucleotide
gaacauaucgcuauaacac

SEQ ID NO: 1061489 - RNA, 19 nt, Artificial Sequence
  Description of Artificial Sequence: Synthetic oligonucleotide
acaaccaguaucguaaccc

SEQ ID NO: 1061490 - RNA, 19 nt, Artificial Sequence
  Description of Artificial Sequence: Synthetic oligonucleotide
cuccauacaaccaguaucg

SEQ ID NO: 1061491 - RNA, 19 nt, Artificial Sequence
  Description of Artificial Sequence: Synthetic oligonucleotide
aaugugcccauuuuggaca

SEQ ID NO: 1061492 - RNA, 19 nt, Artificial Sequence
  Description of Artificial Sequence: Synthetic oligonucleotide
auugaaauaauuguagaca

SEQ ID NO: 1061493 - RNA, 19 nt, Artificial Sequence
  Description of Artificial Sequence: Synthetic oligonucleotide
guaauauugaauucgaucu

SEQ ID NO: 1061494 - RNA, 19 nt, Artificial Sequence
  Description of Artificial Sequence: Synthetic oligonucleotide
aaacgaagacuucaucuag

SEQ ID NO: 1061495 - RNA, 19 nt, Artificial Sequence
  Description of Artificial Sequence: Synthetic oligonucleotide
aaccugacaaguauuauag

SEQ ID NO: 1061496 - RNA, 19 nt, Artificial Sequence
  Description of Artificial Sequence: Synthetic oligonucleotide
uuacugagcagaaugugcc

SEQ ID NO: 1061497 - RNA, 19 nt, Artificial Sequence
  Description of Artificial Sequence: Synthetic oligonucleotide
aaguauuauagucucuaga

SEQ ID NO: 1061498 - RNA, 19 nt, Artificial Sequence
  Description of Artificial Sequence: Synthetic oligonucleotide
auacaugcuauccugagga

SEQ ID NO: 1061499 - RNA, 19 nt, Artificial Sequence
  Description of Artificial Sequence: Synthetic oligonucleotide
uuuauagcgaacacuucug

SEQ ID NO: 1061500 - RNA, 19 nt, Artificial Sequence
  Description of Artificial Sequence: Synthetic oligonucleotide
uguuaggcuauaugggugg

SEQ ID NO: 1061501 - RNA, 19 nt, Artificial Sequence
  Description of Artificial Sequence: Synthetic oligonucleotide
uuaauuccucuauucagag

SEQ ID NO: 1061502 - RNA, 19 nt, Artificial Sequence
  Description of Artificial Sequence: Synthetic oligonucleotide
uauagucucuagauuauga

SEQ ID NO: 1061503 - RNA, 19 nt, Artificial Sequence
  Description of Artificial Sequence: Synthetic oligonucleotide
aauccgaauggaaugauug

SEQ ID NO: 1061504 - RNA, 19 nt, Artificial Sequence
  Description of Artificial Sequence: Synthetic oligonucleotide
uauauugaaccugacaagu

SEQ ID NO: 1061505 - RNA, 19 nt, Artificial Sequence
  Description of Artificial Sequence: Synthetic oligonucleotide
uaucguaacccucuuguug

SEQ ID NO: 1061506 - RNA, 19 nt, Artificial Sequence
  Description of Artificial Sequence: Synthetic oligonucleotide
aauuuaucaacaugaugaa

SEQ ID NO: 1061507 - RNA, 19 nt, Artificial Sequence
  Description of Artificial Sequence: Synthetic oligonucleotide
auuacugagcagaaugugc

SEQ ID NO: 1061508 - RNA, 19 nt, Artificial Sequence
  Description of Artificial Sequence: Synthetic oligonucleotide
aaucaucgagaauuuuguc

SEQ ID NO: 1061509 - RNA, 19 nt, Artificial Sequence
  Description of Artificial Sequence: Synthetic oligonucleotide
aguaucguaacccucuugu

SEQ ID NO: 1061510 - RNA, 19 nt, Artificial Sequence
  Description of Artificial Sequence: Synthetic oligonucleotide
aggaggaacagcgugaacg

SEQ ID NO: 1061511 - RNA, 19 nt, Artificial Sequence
  Description of Artificial Sequence: Synthetic oligonucleotide
augacaguccaauuuauca

SEQ ID NO: 1061512 - RNA, 19 nt, Artificial Sequence
  Description of Artificial Sequence: Synthetic oligonucleotide
ucuccauacaaccaguauc

SEQ ID NO: 1061513 - RNA, 19 nt, Artificial Sequence
  Description of Artificial Sequence: Synthetic oligonucleotide
acuccuuaaaucauggcac

SEQ ID NO: 1061514 - RNA, 19 nt, Artificial Sequence
  Description of Artificial Sequence: Synthetic oligonucleotide
uaugacuuuauagcgaaca

SEQ ID NO: 1061515 - RNA, 19 nt, Artificial Sequence
  Description of Artificial Sequence: Synthetic oligonucleotide
aucaucgagaauuuugucu

SEQ ID NO: 1061516 - RNA, 19 nt, Artificial Sequence
  Description of Artificial Sequence: Synthetic oligonucleotide
cacccauugaccuucauug

SEQ ID NO: 1061517 - RNA, 19 nt, Artificial Sequence
  Description of Artificial Sequence: Synthetic oligonucleotide
aacagcuaugguugucccc

SEQ ID NO: 1061518 - RNA, 19 nt, Artificial Sequence
  Description of Artificial Sequence: Synthetic oligonucleotide
ucaucgagaauuuugucuc

SEQ ID NO: 1061519 - RNA, 19 nt, Artificial Sequence
  Description of Artificial Sequence: Synthetic oligonucleotide
agaauaaccacacgcagau

SEQ ID NO: 1061520 - RNA, 19 nt, Artificial Sequence
  Description of Artificial Sequence: Synthetic oligonucleotide
uggauuugacaaaaucugc

SEQ ID NO: 1061521 - RNA, 19 nt, Artificial Sequence
  Description of Artificial Sequence: Synthetic oligonucleotide
auaauuguagacaaucaug

SEQ ID NO: 1061522 - RNA, 19 nt, Artificial Sequence
  Description of Artificial Sequence: Synthetic oligonucleotide
guauguaagggccaauacc

SEQ ID NO: 1061523 - RNA, 19 nt, Artificial Sequence
  Description of Artificial Sequence: Synthetic oligonucleotide
ugaccauguaaauaccugc

SEQ ID NO: 1061524 - RNA, 19 nt, Artificial Sequence
  Description of Artificial Sequence: Synthetic oligonucleotide
ucuaugacuuuauagcgaa

SEQ ID NO: 1061525 - RNA, 19 nt, Artificial Sequence
  Description of Artificial Sequence: Synthetic oligonucleotide
ugugugauuuucaaguaau

SEQ ID NO: 1061526 - RNA, 19 nt, Artificial Sequence
  Description of Artificial Sequence: Synthetic oligonucleotide
augacuuuauagcgaacac

SEQ ID NO: 1061527 - RNA, 19 nt, Artificial Sequence
  Description of Artificial Sequence: Synthetic oligonucleotide
uauugaaccugacaaguau

SEQ ID NO: 1061528 - RNA, 19 nt, Artificial Sequence
  Description of Artificial Sequence: Synthetic oligonucleotide
aucuugacgguguuccacc

SEQ ID NO: 1061529 - RNA, 19 nt, Artificial Sequence
  Description of Artificial Sequence: Synthetic oligonucleotide
ugaguuuauauugaaccug

SEQ ID NO: 1061530 - RNA, 19 nt, Artificial Sequence
  Description of Artificial Sequence: Synthetic oligonucleotide
auagcgaacacuucugacu

SEQ ID NO: 1061531 - RNA, 19 nt, Artificial Sequence
  Description of Artificial Sequence: Synthetic oligonucleotide
cauacaaccaguaucguaa

SEQ ID NO: 1061532 - RNA, 19 nt, Artificial Sequence
  Description of Artificial Sequence: Synthetic oligonucleotide
cuccugaccauguaaauac

SEQ ID NO: 1061533 - RNA, 19 nt, Artificial Sequence
  Description of Artificial Sequence: Synthetic oligonucleotide
cuuaagcagaguaggcucg

SEQ ID NO: 1061534 - RNA, 19 nt, Artificial Sequence
  Description of Artificial Sequence: Synthetic oligonucleotide
uucuaugacuuuauagcga

SEQ ID NO: 1061535 - RNA, 19 nt, Artificial Sequence
  Description of Artificial Sequence: Synthetic oligonucleotide
uccgaauggaaugauuggg

SEQ ID NO: 1061536 - RNA, 19 nt, Artificial Sequence
  Description of Artificial Sequence: Synthetic oligonucleotide
aaugauugggagaggaucu

SEQ ID NO: 1061537 - RNA, 19 nt, Artificial Sequence
  Description of Artificial Sequence: Synthetic oligonucleotide
uuaaaucauggcacuggag

SEQ ID NO: 1061538 - RNA, 19 nt, Artificial Sequence
  Description of Artificial Sequence: Synthetic oligonucleotide
ucuuauucuggaaguaccu

SEQ ID NO: 1061539 - RNA, 19 nt, Artificial Sequence
  Description of Artificial Sequence: Synthetic oligonucleotide
uccugcaauggugugaacg

SEQ ID NO: 1061540 - RNA, 19 nt, Artificial Sequence
  Description of Artificial Sequence: Synthetic oligonucleotide
aauucgaucuuuagccuuc

SEQ ID NO: 1061541 - RNA, 19 nt, Artificial Sequence
  Description of Artificial Sequence: Synthetic oligonucleotide
ucuuuaauuuccugaagau

SEQ ID NO: 1061542 - RNA, 19 nt, Artificial Sequence
  Description of Artificial Sequence: Synthetic oligonucleotide
ucgaucuuuagccuucucu

SEQ ID NO: 1061543 - RNA, 19 nt, Artificial Sequence
  Description of Artificial Sequence: Synthetic oligonucleotide
uuguuaggcuauaugggug

SEQ ID NO: 1061544 - RNA, 19 nt, Artificial Sequence
  Description of Artificial Sequence: Synthetic oligonucleotide
caccaaggggcuauuaugg

SEQ ID NO: 1061545 - RNA, 19 nt, Artificial Sequence
  Description of Artificial Sequence: Synthetic oligonucleotide
aguccaauuuaucaacaug

SEQ ID NO: 1061546 - RNA, 19 nt, Artificial Sequence
  Description of Artificial Sequence: Synthetic oligonucleotide
ucgcuauaacaccaagggg

SEQ ID NO: 1061547 - RNA, 19 nt, Artificial Sequence
  Description of Artificial Sequence: Synthetic oligonucleotide
aauaccugcuuaaaauucu

SEQ ID NO: 1061548 - RNA, 19 nt, Artificial Sequence
  Description of Artificial Sequence: Synthetic oligonucleotide
ugacaaguauuauagucuc

SEQ ID NO: 1061549 - RNA, 19 nt, Artificial Sequence
  Description of Artificial Sequence: Synthetic oligonucleotide
uuguagaacauaucgcuau

SEQ ID NO: 1061550 - RNA, 19 nt, Artificial Sequence
  Description of Artificial Sequence: Synthetic oligonucleotide
aauauugaauucgaucuuu

SEQ ID NO: 1061551 - RNA, 19 nt, Artificial Sequence
  Description of Artificial Sequence: Synthetic oligonucleotide
agauuaugaagaaauguca

SEQ ID NO: 1061552 - RNA, 19 nt, Artificial Sequence
  Description of Artificial Sequence: Synthetic oligonucleotide
uuauagcgaacacuucuga

SEQ ID NO: 1061553 - RNA, 19 nt, Artificial Sequence
  Description of Artificial Sequence: Synthetic oligonucleotide
gaaugugcccauuuuggac

SEQ ID NO: 1061554 - RNA, 19 nt, Artificial Sequence
  Description of Artificial Sequence: Synthetic oligonucleotide
aaggggcuauuaugggacc

SEQ ID NO: 1061555 - RNA, 19 nt, Artificial Sequence
  Description of Artificial Sequence: Synthetic oligonucleotide
ucaucuagagaaccagaga

SEQ ID NO: 1061556 - RNA, 19 nt, Artificial Sequence
  Description of Artificial Sequence: Synthetic oligonucleotide
aguuucuagggaaccaccc

SEQ ID NO: 1061557 - RNA, 19 nt, Artificial Sequence
  Description of Artificial Sequence: Synthetic oligonucleotide
ggaaaaggagaccuuaagc

SEQ ID NO: 1061558 - RNA, 19 nt, Artificial Sequence
  Description of Artificial Sequence: Synthetic oligonucleotide
uacgcaacaaguccacgug

SEQ ID NO: 1061559 - RNA, 19 nt, Artificial Sequence
  Description of Artificial Sequence: Synthetic oligonucleotide
uuuucaaguaaugaagauu

SEQ ID NO: 1061560 - RNA, 19 nt, Artificial Sequence
  Description of Artificial Sequence: Synthetic oligonucleotide
cacacuccuuaaaucaugg

SEQ ID NO: 1061561 - RNA, 19 nt, Artificial Sequence
  Description of Artificial Sequence: Synthetic oligonucleotide
aaaggagaccuuaagcaga

SEQ ID NO: 1061562 - RNA, 19 nt, Artificial Sequence
  Description of Artificial Sequence: Synthetic oligonucleotide
uguaagggccaauaccaca

SEQ ID NO: 1061563 - RNA, 19 nt, Artificial Sequence
  Description of Artificial Sequence: Synthetic oligonucleotide
auccgaauggaaugauugg

SEQ ID NO: 1061564 - RNA, 19 nt, Artificial Sequence
  Description of Artificial Sequence: Synthetic oligonucleotide
uugcgcacauuucuauacg

SEQ ID NO: 1061565 - RNA, 19 nt, Artificial Sequence
  Description of Artificial Sequence: Synthetic oligonucleotide
uggguguacauagucauca

SEQ ID NO: 1061566 - RNA, 19 nt, Artificial Sequence
  Description of Artificial Sequence: Synthetic oligonucleotide
gaaugauugggagaggauc

SEQ ID NO: 1061567 - RNA, 19 nt, Artificial Sequence
  Description of Artificial Sequence: Synthetic oligonucleotide
gugugaacggccuuguaug

SEQ ID NO: 1061568 - RNA, 19 nt, Artificial Sequence
  Description of Artificial Sequence: Synthetic oligonucleotide
uagcgaacacuucugacuc

SEQ ID NO: 1061569 - RNA, 19 nt, Artificial Sequence
  Description of Artificial Sequence: Synthetic oligonucleotide
caucuguuacacuuccugc

SEQ ID NO: 1061570 - RNA, 19 nt, Artificial Sequence
  Description of Artificial Sequence: Synthetic oligonucleotide
uuggcagacuuuacaauac

SEQ ID NO: 1061571 - RNA, 19 nt, Artificial Sequence
  Description of Artificial Sequence: Synthetic oligonucleotide
cugauucgccaucacaggg

SEQ ID NO: 1061572 - RNA, 19 nt, Artificial Sequence
  Description of Artificial Sequence: Synthetic oligonucleotide
uauagcgaacacuucugac

SEQ ID NO: 1061573 - RNA, 19 nt, Artificial Sequence
  Description of Artificial Sequence: Synthetic oligonucleotide
aacaagguugcagcaaaug

SEQ ID NO: 1061574 - RNA, 19 nt, Artificial Sequence
  Description of Artificial Sequence: Synthetic oligonucleotide
auacaaccaguaucguaac

SEQ ID NO: 1061575 - RNA, 19 nt, Artificial Sequence
  Description of Artificial Sequence: Synthetic oligonucleotide
aagcagaguaggcucguug

SEQ ID NO: 1061576 - RNA, 19 nt, Artificial Sequence
  Description of Artificial Sequence: Synthetic oligonucleotide
uguuucacaugguaaucac

SEQ ID NO: 1061577 - RNA, 19 nt, Artificial Sequence
  Description of Artificial Sequence: Synthetic oligonucleotide
uggcauugaaauaauugua

SEQ ID NO: 1061578 - RNA, 19 nt, Artificial Sequence
  Description of Artificial Sequence: Synthetic oligonucleotide
aaccacacgcagauacucc

SEQ ID NO: 1061579 - RNA, 19 nt, Artificial Sequence
  Description of Artificial Sequence: Synthetic oligonucleotide
cgcuauaacaccaaggggc

SEQ ID NO: 1061580 - RNA, 19 nt, Artificial Sequence
  Description of Artificial Sequence: Synthetic oligonucleotide
uucgccaucacagggacac

SEQ ID NO: 1061581 - RNA, 19 nt, Artificial Sequence
  Description of Artificial Sequence: Synthetic oligonucleotide
ccuguuguauguaagggcc

SEQ ID NO: 1061582 - RNA, 19 nt, Artificial Sequence
  Description of Artificial Sequence: Synthetic oligonucleotide
uuuagccuucucuucaauc

SEQ ID NO: 1061583 - RNA, 19 nt, Artificial Sequence
  Description of Artificial Sequence: Synthetic oligonucleotide
acuggagauacaugcuauc

SEQ ID NO: 1061584 - RNA, 19 nt, Artificial Sequence
  Description of Artificial Sequence: Synthetic oligonucleotide
ggcauugaaauaauuguag

SEQ ID NO: 1061585 - RNA, 19 nt, Artificial Sequence
  Description of Artificial Sequence: Synthetic oligonucleotide
auagucucuagauuaugaa

SEQ ID NO: 1061586 - RNA, 19 nt, Artificial Sequence
  Description of Artificial Sequence: Synthetic oligonucleotide
uaggcuauauggguggcag

SEQ ID NO: 1061587 - RNA, 19 nt, Artificial Sequence
  Description of Artificial Sequence: Synthetic oligonucleotide
auacgcaacaaguccacgu

SEQ ID NO: 1061588 - RNA, 19 nt, Artificial Sequence
  Description of Artificial Sequence: Synthetic oligonucleotide
agccaauccgaauggaaug

SEQ ID NO: 1061589 - RNA, 19 nt, Artificial Sequence
  Description of Artificial Sequence: Synthetic oligonucleotide
acacuccuuaaaucauggc

SEQ ID NO: 1061590 - RNA, 19 nt, Artificial Sequence
  Description of Artificial Sequence: Synthetic oligonucleotide
cauuguagaacauaucgcu

SEQ ID NO: 1061591 - RNA, 19 nt, Artificial Sequence
  Description of Artificial Sequence: Synthetic oligonucleotide
ugcgcacauuucuauacgc

SEQ ID NO: 1061592 - RNA, 19 nt, Artificial Sequence
  Description of Artificial Sequence: Synthetic oligonucleotide
cacagggacacuuuuccac

SEQ ID NO: 1061593 - RNA, 19 nt, Artificial Sequence
  Description of Artificial Sequence: Synthetic oligonucleotide
ugcuaaaaugagcuccccu

SEQ ID NO: 1061594 - RNA, 19 nt, Artificial Sequence
  Description of Artificial Sequence: Synthetic oligonucleotide
aagggccaauaccacaaca

SEQ ID NO: 1061595 - RNA, 19 nt, Artificial Sequence
  Description of Artificial Sequence: Synthetic oligonucleotide
cacuccuuaaaucauggca

SEQ ID NO: 1061596 - RNA, 19 nt, Artificial Sequence
  Description of Artificial Sequence: Synthetic oligonucleotide
uggccauuguagaacauau

SEQ ID NO: 1061597 - RNA, 19 nt, Artificial Sequence
  Description of Artificial Sequence: Synthetic oligonucleotide
aaggagaccuuaagcagag

SEQ ID NO: 1061598 - RNA, 19 nt, Artificial Sequence
  Description of Artificial Sequence: Synthetic oligonucleotide
acacaguuucuagggaacc

SEQ ID NO: 1061599 - RNA, 19 nt, Artificial Sequence
  Description of Artificial Sequence: Synthetic oligonucleotide
ugugaacggccuuguaugc

SEQ ID NO: 1061600 - RNA, 19 nt, Artificial Sequence
  Description of Artificial Sequence: Synthetic oligonucleotide
uugaccuucauuggauuug

SEQ ID NO: 1061601 - RNA, 19 nt, Artificial Sequence
  Description of Artificial Sequence: Synthetic oligonucleotide
acgguguuccacccaaagg

SEQ ID NO: 1061602 - RNA, 19 nt, Artificial Sequence
  Description of Artificial Sequence: Synthetic oligonucleotide
aacgaagcaugguucuggu

SEQ ID NO: 1061603 - RNA, 19 nt, Artificial Sequence
  Description of Artificial Sequence: Synthetic oligonucleotide
gagucgaucauggccauug

SEQ ID NO: 1061604 - RNA, 19 nt, Artificial Sequence
  Description of Artificial Sequence: Synthetic oligonucleotide
aaaggagagccgauuauaa

SEQ ID NO: 1061605 - RNA, 19 nt, Artificial Sequence
  Description of Artificial Sequence: Synthetic oligonucleotide
ccgauuauaaagcugggug

SEQ ID NO: 1061606 - RNA, 19 nt, Artificial Sequence
  Description of Artificial Sequence: Synthetic oligonucleotide
gauucgccaucacagggac

SEQ ID NO: 1061607 - RNA, 19 nt, Artificial Sequence
  Description of Artificial Sequence: Synthetic oligonucleotide
aaaugcagccaauccgaau

SEQ ID NO: 1061608 - RNA, 19 nt, Artificial Sequence
  Description of Artificial Sequence: Synthetic oligonucleotide
gaaccugacaaguauuaua

SEQ ID NO: 1061609 - RNA, 19 nt, Artificial Sequence
  Description of Artificial Sequence: Synthetic oligonucleotide
guagacaaucaugacaguc

SEQ ID NO: 1061610 - RNA, 19 nt, Artificial Sequence
  Description of Artificial Sequence: Synthetic oligonucleotide
aauccaugauucaauggaa

SEQ ID NO: 1061611 - RNA, 19 nt, Artificial Sequence
  Description of Artificial Sequence: Synthetic oligonucleotide
agugcuaaucccaaggcaa

SEQ ID NO: 1061612 - RNA, 19 nt, Artificial Sequence
  Description of Artificial Sequence: Synthetic oligonucleotide
uguagaacauaucgcuaua

SEQ ID NO: 1061613 - RNA, 19 nt, Artificial Sequence
  Description of Artificial Sequence: Synthetic oligonucleotide
cuccuguuguauguaaggg

SEQ ID NO: 1061614 - RNA, 19 nt, Artificial Sequence
  Description of Artificial Sequence: Synthetic oligonucleotide
uauacgcaacaaguccacg

SEQ ID NO: 1061615 - RNA, 19 nt, Artificial Sequence
  Description of Artificial Sequence: Synthetic oligonucleotide
uggaaguaccuucuacgaa

SEQ ID NO: 1061616 - RNA, 19 nt, Artificial Sequence
  Description of Artificial Sequence: Synthetic oligonucleotide
aacggccuuguaugcuugg

SEQ ID NO: 1061617 - RNA, 19 nt, Artificial Sequence
  Description of Artificial Sequence: Synthetic oligonucleotide
acccauugaccuucauugg

SEQ ID NO: 1061618 - RNA, 19 nt, Artificial Sequence
  Description of Artificial Sequence: Synthetic oligonucleotide
gaagcaugguucuggugac

SEQ ID NO: 1061619 - RNA, 19 nt, Artificial Sequence
  Description of Artificial Sequence: Synthetic oligonucleotide
cugacaaguauuauagucu

SEQ ID NO: 1061620 - RNA, 19 nt, Artificial Sequence
  Description of Artificial Sequence: Synthetic oligonucleotide
auacuggagauacaugcua

SEQ ID NO: 1061621 - RNA, 19 nt, Artificial Sequence
  Description of Artificial Sequence: Synthetic oligonucleotide
uccgguuuccauccccgag

SEQ ID NO: 1061622 - RNA, 19 nt, Artificial Sequence
  Description of Artificial Sequence: Synthetic oligonucleotide
uggguaaugugugauuuuc

SEQ ID NO: 1061623 - RNA, 19 nt, Artificial Sequence
  Description of Artificial Sequence: Synthetic oligonucleotide
ucuguugcgcacauuucua

SEQ ID NO: 1061624 - RNA, 19 nt, Artificial Sequence
  Description of Artificial Sequence: Synthetic oligonucleotide
gauuugacaaaaucugcau

SEQ ID NO: 1061625 - RNA, 19 nt, Artificial Sequence
  Description of Artificial Sequence: Synthetic oligonucleotide
aacgaagacuucaucuagu

SEQ ID NO: 1061626 - RNA, 19 nt, Artificial Sequence
  Description of Artificial Sequence: Synthetic oligonucleotide
auccgaggcuccucugugc

SEQ ID NO: 1061627 - RNA, 19 nt, Artificial Sequence
  Description of Artificial Sequence: Synthetic oligonucleotide
gaaucaucgagaauuuugu

SEQ ID NO: 1061628 - RNA, 19 nt, Artificial Sequence
  Description of Artificial Sequence: Synthetic oligonucleotide
uccugaccauguaaauacc

SEQ ID NO: 1061629 - RNA, 19 nt, Artificial Sequence
  Description of Artificial Sequence: Synthetic oligonucleotide
caugacaguccaauuuauc

SEQ ID NO: 1061630 - RNA, 19 nt, Artificial Sequence
  Description of Artificial Sequence: Synthetic oligonucleotide
acgcagauacuccuggcca

SEQ ID NO: 1061631 - RNA, 19 nt, Artificial Sequence
  Description of Artificial Sequence: Synthetic oligonucleotide
aaccaguaucguaacccuc

SEQ ID NO: 1061632 - RNA, 19 nt, Artificial Sequence
  Description of Artificial Sequence: Synthetic oligonucleotide
acagcgugaacgaagcaug

SEQ ID NO: 1061633 - RNA, 19 nt, Artificial Sequence
  Description of Artificial Sequence: Synthetic oligonucleotide
aggaacagcgugaacgaag

SEQ ID NO: 1061634 - RNA, 19 nt, Artificial Sequence
  Description of Artificial Sequence: Synthetic oligonucleotide
acuagaucugcaggugagg

SEQ ID NO: 1061635 - RNA, 19 nt, Artificial Sequence
  Description of Artificial Sequence: Synthetic oligonucleotide
cagaauaaccacacgcaga

SEQ ID NO: 1061636 - RNA, 19 nt, Artificial Sequence
  Description of Artificial Sequence: Synthetic oligonucleotide
uucaucuaguugguaauau

SEQ ID NO: 1061637 - RNA, 19 nt, Artificial Sequence
  Description of Artificial Sequence: Synthetic oligonucleotide
caugucaaucuugacggug

SEQ ID NO: 1061638 - RNA, 19 nt, Artificial Sequence
  Description of Artificial Sequence: Synthetic oligonucleotide
aggcucguugcauaauucu

SEQ ID NO: 1061639 - RNA, 19 nt, Artificial Sequence
  Description of Artificial Sequence: Synthetic oligonucleotide
caucgagaauuuugucucc

SEQ ID NO: 1061640 - RNA, 19 nt, Artificial Sequence
  Description of Artificial Sequence: Synthetic oligonucleotide
auugaccuucauuggauuu

SEQ ID NO: 1061641 - RNA, 19 nt, Artificial Sequence
  Description of Artificial Sequence: Synthetic oligonucleotide
ucaucuaguugguaauauu

SEQ ID NO: 1061642 - RNA, 19 nt, Artificial Sequence
  Description of Artificial Sequence: Synthetic oligonucleotide
auccaugauucaauggaag

SEQ ID NO: 1061643 - RNA, 19 nt, Artificial Sequence
  Description of Artificial Sequence: Synthetic oligonucleotide
ggggaacuagaucugcagg

SEQ ID NO: 1061644 - RNA, 19 nt, Artificial Sequence
  Description of Artificial Sequence: Synthetic oligonucleotide
ucuugacgguguuccaccc

SEQ ID NO: 1061645 - RNA, 19 nt, Artificial Sequence
  Description of Artificial Sequence: Synthetic oligonucleotide
cuuguuaggcuauaugggu

SEQ ID NO: 1061646 - RNA, 19 nt, Artificial Sequence
  Description of Artificial Sequence: Synthetic oligonucleotide
acccucuuauucuggaagu

SEQ ID NO: 1061647 - RNA, 19 nt, Artificial Sequence
  Description of Artificial Sequence: Synthetic oligonucleotide
uuguauguaagggccaaua

SEQ ID NO: 1061648 - RNA, 19 nt, Artificial Sequence
  Description of Artificial Sequence: Synthetic oligonucleotide
gaucauggccauuguagaa

SEQ ID NO: 1061649 - RNA, 19 nt, Artificial Sequence
  Description of Artificial Sequence: Synthetic oligonucleotide
uggcuaucuguucuucuuc

SEQ ID NO: 1061650 - RNA, 19 nt, Artificial Sequence
  Description of Artificial Sequence: Synthetic oligonucleotide
cuggaaguaccuucuacga

SEQ ID NO: 1061651 - RNA, 19 nt, Artificial Sequence
  Description of Artificial Sequence: Synthetic oligonucleotide
uguuguauguaagggccaa

SEQ ID NO: 1061652 - RNA, 19 nt, Artificial Sequence
  Description of Artificial Sequence: Synthetic oligonucleotide
uaaccacacgcagauacuc

SEQ ID NO: 1061653 - RNA, 19 nt, Artificial Sequence
  Description of Artificial Sequence: Synthetic oligonucleotide
aggggcuauuaugggaccc

SEQ ID NO: 1061654 - RNA, 19 nt, Artificial Sequence
  Description of Artificial Sequence: Synthetic oligonucleotide
ggagagccgauuauaaagc

SEQ ID NO: 1061655 - RNA, 19 nt, Artificial Sequence
  Description of Artificial Sequence: Synthetic oligonucleotide
uuccucuauucagaggaca

SEQ ID NO: 1061656 - RNA, 19 nt, Artificial Sequence
  Description of Artificial Sequence: Synthetic oligonucleotide
ugaccuucauuggauuuga

SEQ ID NO: 1061657 - RNA, 19 nt, Artificial Sequence
  Description of Artificial Sequence: Synthetic oligonucleotide
cauuguaacaguggcuauc

SEQ ID NO: 1061658 - RNA, 19 nt, Artificial Sequence
  Description of Artificial Sequence: Synthetic oligonucleotide
aguggcuaucuguucuucu

SEQ ID NO: 1061659 - RNA, 19 nt, Artificial Sequence
  Description of Artificial Sequence: Synthetic oligonucleotide
uaggcucguugcauaauuc

SEQ ID NO: 1061660 - RNA, 19 nt, Artificial Sequence
  Description of Artificial Sequence: Synthetic oligonucleotide
caaacaagguugcagcaaa

SEQ ID NO: 1061661 - RNA, 19 nt, Artificial Sequence
  Description of Artificial Sequence: Synthetic oligonucleotide
ugaacggccuuguaugcuu

SEQ ID NO: 1061662 - RNA, 19 nt, Artificial Sequence
  Description of Artificial Sequence: Synthetic oligonucleotide
acgaagacuucaucuaguu

SEQ ID NO: 1061663 - RNA, 19 nt, Artificial Sequence
  Description of Artificial Sequence: Synthetic oligonucleotide
caacagcuaugguuguccc

SEQ ID NO: 1061664 - RNA, 19 nt, Artificial Sequence
  Description of Artificial Sequence: Synthetic oligonucleotide
auguaagggccaauaccac

SEQ ID NO: 1061665 - RNA, 19 nt, Artificial Sequence
  Description of Artificial Sequence: Synthetic oligonucleotide
auuaugcaucuguuacacu

SEQ ID NO: 1061666 - RNA, 19 nt, Artificial Sequence
  Description of Artificial Sequence: Synthetic oligonucleotide
cuucaucuagagaaccaga

SEQ ID NO: 1061667 - RNA, 19 nt, Artificial Sequence
  Description of Artificial Sequence: Synthetic oligonucleotide
uguugcgcacauuucuaua

SEQ ID NO: 1061668 - RNA, 19 nt, Artificial Sequence
  Description of Artificial Sequence: Synthetic oligonucleotide
uguccccagugcuaauccc

SEQ ID NO: 1061669 - RNA, 19 nt, Artificial Sequence
  Description of Artificial Sequence: Synthetic oligonucleotide
uaccuucuacgaaggaauc

SEQ ID NO: 1061670 - RNA, 19 nt, Artificial Sequence
  Description of Artificial Sequence: Synthetic oligonucleotide
uguagacaaucaugacagu

SEQ ID NO: 1061671 - RNA, 19 nt, Artificial Sequence
  Description of Artificial Sequence: Synthetic oligonucleotide
ucauuguaacaguggcuau

SEQ ID NO: 1061672 - RNA, 19 nt, Artificial Sequence
  Description of Artificial Sequence: Synthetic oligonucleotide
ggccaauaccacaacacag

SEQ ID NO: 1061673 - RNA, 19 nt, Artificial Sequence
  Description of Artificial Sequence: Synthetic oligonucleotide
ccuccuguuguauguaagg

SEQ ID NO: 1061674 - RNA, 19 nt, Artificial Sequence
  Description of Artificial Sequence: Synthetic oligonucleotide
gguuggaucugauucgcca

SEQ ID NO: 1061675 - RNA, 19 nt, Artificial Sequence
  Description of Artificial Sequence: Synthetic oligonucleotide
auuccucuauucagaggac

SEQ ID NO: 1061676 - RNA, 19 nt, Artificial Sequence
  Description of Artificial Sequence: Synthetic oligonucleotide
uguauccgaggcuccucug

SEQ ID NO: 1061677 - RNA, 19 nt, Artificial Sequence
  Description of Artificial Sequence: Synthetic oligonucleotide
gauugggagaggaucucuc

SEQ ID NO: 1061678 - RNA, 19 nt, Artificial Sequence
  Description of Artificial Sequence: Synthetic oligonucleotide
acacccauugaccuucauu

SEQ ID NO: 1061679 - RNA, 19 nt, Artificial Sequence
  Description of Artificial Sequence: Synthetic oligonucleotide
aggcacuagcaggaggaac

SEQ ID NO: 1061680 - RNA, 19 nt, Artificial Sequence
  Description of Artificial Sequence: Synthetic oligonucleotide
aaggaaucaucgagaauuu

SEQ ID NO: 1061681 - RNA, 19 nt, Artificial Sequence
  Description of Artificial Sequence: Synthetic oligonucleotide
cuaugacuuuauagcgaac

SEQ ID NO: 1061682 - RNA, 19 nt, Artificial Sequence
  Description of Artificial Sequence: Synthetic oligonucleotide
accugacaaguauuauagu

SEQ ID NO: 1061683 - RNA, 19 nt, Artificial Sequence
  Description of Artificial Sequence: Synthetic oligonucleotide
agcaugguucuggugacca

SEQ ID NO: 1061684 - RNA, 19 nt, Artificial Sequence
  Description of Artificial Sequence: Synthetic oligonucleotide
aaccacccucuuauucugg

SEQ ID NO: 1061685 - RNA, 19 nt, Artificial Sequence
  Description of Artificial Sequence: Synthetic oligonucleotide
uuaggcuauauggguggca

SEQ ID NO: 1061686 - RNA, 19 nt, Artificial Sequence
  Description of Artificial Sequence: Synthetic oligonucleotide
auuguagaacauaucgcua

SEQ ID NO: 1061687 - RNA, 19 nt, Artificial Sequence
  Description of Artificial Sequence: Synthetic oligonucleotide
auugaaccugacaaguauu

SEQ ID NO: 1061688 - RNA, 19 nt, Artificial Sequence
  Description of Artificial Sequence: Synthetic oligonucleotide
acaacacagagucgaucau

SEQ ID NO: 1061689 - RNA, 19 nt, Artificial Sequence
  Description of Artificial Sequence: Synthetic oligonucleotide
acggccuuguaugcuuggc

SEQ ID NO: 1061690 - RNA, 19 nt, Artificial Sequence
  Description of Artificial Sequence: Synthetic oligonucleotide
aucgagaauuuugucucca

SEQ ID NO: 1061691 - RNA, 19 nt, Artificial Sequence
  Description of Artificial Sequence: Synthetic oligonucleotide
auguaaauaccugcuuaaa

SEQ ID NO: 1061692 - RNA, 19 nt, Artificial Sequence
  Description of Artificial Sequence: Synthetic oligonucleotide
guuucacaugguaaucaca

SEQ ID NO: 1061693 - RNA, 19 nt, Artificial Sequence
  Description of Artificial Sequence: Synthetic oligonucleotide
cauaucgcuauaacaccaa

SEQ ID NO: 1061694 - RNA, 19 nt, Artificial Sequence
  Description of Artificial Sequence: Synthetic oligonucleotide
uccccagugcuaaucccaa

SEQ ID NO: 1061695 - RNA, 19 nt, Artificial Sequence
  Description of Artificial Sequence: Synthetic oligonucleotide
gcagaauggcuucuguuuc

SEQ ID NO: 1061696 - RNA, 19 nt, Artificial Sequence
  Description of Artificial Sequence: Synthetic oligonucleotide
accuucuacgaaggaauca

SEQ ID NO: 1061697 - RNA, 19 nt, Artificial Sequence
  Description of Artificial Sequence: Synthetic oligonucleotide
caugcuauccugaggauuu

SEQ ID NO: 1061698 - RNA, 19 nt, Artificial Sequence
  Description of Artificial Sequence: Synthetic oligonucleotide
uguaugcuuggcagacuuu

SEQ ID NO: 1061699 - RNA, 19 nt, Artificial Sequence
  Description of Artificial Sequence: Synthetic oligonucleotide
caccuuccuucaucuagag

SEQ ID NO: 1061700 - RNA, 19 nt, Artificial Sequence
  Description of Artificial Sequence: Synthetic oligonucleotide
augguucuggugaccacag

SEQ ID NO: 1061701 - RNA, 19 nt, Artificial Sequence
  Description of Artificial Sequence: Synthetic oligonucleotide
gcucguugcauaauucuug

SEQ ID NO: 1061702 - RNA, 19 nt, Artificial Sequence
  Description of Artificial Sequence: Synthetic oligonucleotide
aaacaagguugcagcaaau

SEQ ID NO: 1061703 - RNA, 19 nt, Artificial Sequence
  Description of Artificial Sequence: Synthetic oligonucleotide
uacaugcuauccugaggau

SEQ ID NO: 1061704 - RNA, 19 nt, Artificial Sequence
  Description of Artificial Sequence: Synthetic oligonucleotide
acgaagcaugguucuggug

SEQ ID NO: 1061705 - RNA, 19 nt, Artificial Sequence
  Description of Artificial Sequence: Synthetic oligonucleotide
auaccacaacacagagucg

SEQ ID NO: 1061706 - RNA, 19 nt, Artificial Sequence
  Description of Artificial Sequence: Synthetic oligonucleotide
cagugcuaaucccaaggca

SEQ ID NO: 1061707 - RNA, 19 nt, Artificial Sequence
  Description of Artificial Sequence: Synthetic oligonucleotide
auauugaauucgaucuuua

SEQ ID NO: 1061708 - RNA, 19 nt, Artificial Sequence
  Description of Artificial Sequence: Synthetic oligonucleotide
auauggguggcagucuuuu

SEQ ID NO: 1061709 - RNA, 19 nt, Artificial Sequence
  Description of Artificial Sequence: Synthetic oligonucleotide
uauggguggcagucuuuuc

SEQ ID NO: 1061710 - RNA, 19 nt, Artificial Sequence
  Description of Artificial Sequence: Synthetic oligonucleotide
cuggguguacauagucauc

SEQ ID NO: 1061711 - RNA, 19 nt, Artificial Sequence
  Description of Artificial Sequence: Synthetic oligonucleotide
caguaucguaacccucuug

SEQ ID NO: 1061712 - RNA, 19 nt, Artificial Sequence
  Description of Artificial Sequence: Synthetic oligonucleotide
cacucaugucaaucuugac

SEQ ID NO: 1061713 - RNA, 19 nt, Artificial Sequence
  Description of Artificial Sequence: Synthetic oligonucleotide
cuguuguauguaagggcca

SEQ ID NO: 1061714 - RNA, 19 nt, Artificial Sequence
  Description of Artificial Sequence: Synthetic oligonucleotide
guaccuucuacgaaggaau

SEQ ID NO: 1061715 - RNA, 19 nt, Artificial Sequence
  Description of Artificial Sequence: Synthetic oligonucleotide
acuugauuacugagcagaa

SEQ ID NO: 1061716 - RNA, 19 nt, Artificial Sequence
  Description of Artificial Sequence: Synthetic oligonucleotide
ucuagggaaccacccucuu

SEQ ID NO: 1061717 - RNA, 19 nt, Artificial Sequence
  Description of Artificial Sequence: Synthetic oligonucleotide
guuaggcuauauggguggc

SEQ ID NO: 1061718 - RNA, 19 nt, Artificial Sequence
  Description of Artificial Sequence: Synthetic oligonucleotide
ucguaacccucuuguugcu

SEQ ID NO: 1061719 - RNA, 19 nt, Artificial Sequence
  Description of Artificial Sequence: Synthetic oligonucleotide
auggccauuguagaacaua

SEQ ID NO: 1061720 - RNA, 19 nt, Artificial Sequence
  Description of Artificial Sequence: Synthetic oligonucleotide
caugauucaauggaaguuu

SEQ ID NO: 1061721 - RNA, 19 nt, Artificial Sequence
  Description of Artificial Sequence: Synthetic oligonucleotide
uccauacaaccaguaucgu

SEQ ID NO: 1061722 - RNA, 19 nt, Artificial Sequence
  Description of Artificial Sequence: Synthetic oligonucleotide
acaguggcuaucuguucuu

SEQ ID NO: 1061723 - RNA, 19 nt, Artificial Sequence
  Description of Artificial Sequence: Synthetic oligonucleotide
ugccuccuguuguauguaa

SEQ ID NO: 1061724 - RNA, 19 nt, Artificial Sequence
  Description of Artificial Sequence: Synthetic oligonucleotide
guaacaguggcuaucuguu

SEQ ID NO: 1061725 - RNA, 19 nt, Artificial Sequence
  Description of Artificial Sequence: Synthetic oligonucleotide
ggcuauauggguggcaguc

SEQ ID NO: 1061726 - RNA, 19 nt, Artificial Sequence
  Description of Artificial Sequence: Synthetic oligonucleotide
agucgaucauggccauugu

SEQ ID NO: 1061727 - RNA, 19 nt, Artificial Sequence
  Description of Artificial Sequence: Synthetic oligonucleotide
gaacggccuuguaugcuug

SEQ ID NO: 1061728 - RNA, 19 nt, Artificial Sequence
  Description of Artificial Sequence: Synthetic oligonucleotide
augauucaauggaaguuuu

SEQ ID NO: 1061729 - RNA, 19 nt, Artificial Sequence
  Description of Artificial Sequence: Synthetic oligonucleotide
gaagauuuucaaacuugau

SEQ ID NO: 1061730 - RNA, 19 nt, Artificial Sequence
  Description of Artificial Sequence: Synthetic oligonucleotide
gcuaaaaugagcuccccuu

SEQ ID NO: 1061731 - RNA, 19 nt, Artificial Sequence
  Description of Artificial Sequence: Synthetic oligonucleotide
aacacccauugaccuucau

SEQ ID NO: 1061732 - RNA, 19 nt, Artificial Sequence
  Description of Artificial Sequence: Synthetic oligonucleotide
caaccaguaucguaacccu

SEQ ID NO: 1061733 - RNA, 19 nt, Artificial Sequence
  Description of Artificial Sequence: Synthetic oligonucleotide
ggcacuggagcaucuuuga

SEQ ID NO: 1061734 - RNA, 19 nt, Artificial Sequence
  Description of Artificial Sequence: Synthetic oligonucleotide
ccucuuauucuggaaguac

SEQ ID NO: 1061735 - RNA, 19 nt, Artificial Sequence
  Description of Artificial Sequence: Synthetic oligonucleotide
agcgugaacgaagcauggu

SEQ ID NO: 1061736 - RNA, 19 nt, Artificial Sequence
  Description of Artificial Sequence: Synthetic oligonucleotide
ccgaauggaaugauuggga

SEQ ID NO: 1061737 - RNA, 19 nt, Artificial Sequence
  Description of Artificial Sequence: Synthetic oligonucleotide
cuccuuaaaucauggcacu

SEQ ID NO: 1061738 - RNA, 19 nt, Artificial Sequence
  Description of Artificial Sequence: Synthetic oligonucleotide
gacaaguauuauagucucu

SEQ ID NO: 1061739 - RNA, 19 nt, Artificial Sequence
  Description of Artificial Sequence: Synthetic oligonucleotide
guaggcucguugcauaauu

SEQ ID NO: 1061740 - RNA, 19 nt, Artificial Sequence
  Description of Artificial Sequence: Synthetic oligonucleotide
cagccaauccgaauggaau

SEQ ID NO: 1061741 - RNA, 19 nt, Artificial Sequence
  Description of Artificial Sequence: Synthetic oligonucleotide
guauccgaggcuccucugu

SEQ ID NO: 1061742 - RNA, 19 nt, Artificial Sequence
  Description of Artificial Sequence: Synthetic oligonucleotide
gacuccugaccauguaaau

SEQ ID NO: 1061743 - RNA, 19 nt, Artificial Sequence
  Description of Artificial Sequence: Synthetic oligonucleotide
gggacuccugaccauguaa

SEQ ID NO: 1061744 - RNA, 19 nt, Artificial Sequence
  Description of Artificial Sequence: Synthetic oligonucleotide
cuucaucuaguugguaaua

SEQ ID NO: 1061745 - RNA, 19 nt, Artificial Sequence
  Description of Artificial Sequence: Synthetic oligonucleotide
uaacaccaaggggcuauua

SEQ ID NO: 1061746 - RNA, 19 nt, Artificial Sequence
  Description of Artificial Sequence: Synthetic oligonucleotide
gccaauccgaauggaauga

SEQ ID NO: 1061747 - RNA, 19 nt, Artificial Sequence
  Description of Artificial Sequence: Synthetic oligonucleotide
gugcuaaucccaaggcaaa

SEQ ID NO: 1061748 - RNA, 19 nt, Artificial Sequence
  Description of Artificial Sequence: Synthetic oligonucleotide
cuagggaaccacccucuua

SEQ ID NO: 1061749 - RNA, 19 nt, Artificial Sequence
  Description of Artificial Sequence: Synthetic oligonucleotide
cccauugaccuucauugga

SEQ ID NO: 1061750 - RNA, 19 nt, Artificial Sequence
  Description of Artificial Sequence: Synthetic oligonucleotide
guggcuaucuguucuucuu

SEQ ID NO: 1061751 - RNA, 19 nt, Artificial Sequence
  Description of Artificial Sequence: Synthetic oligonucleotide
gcuauaacaccaaggggcu

SEQ ID NO: 1061752 - RNA, 19 nt, Artificial Sequence
  Description of Artificial Sequence: Synthetic oligonucleotide
ggacuccugaccauguaaa

SEQ ID NO: 1061753 - RNA, 19 nt, Artificial Sequence
  Description of Artificial Sequence: Synthetic oligonucleotide
ggaucugauucgccaucac

SEQ ID NO: 1061754 - RNA, 19 nt, Artificial Sequence
  Description of Artificial Sequence: Synthetic oligonucleotide
gaggaacagcgugaacgaa

SEQ ID NO: 1061755 - RNA, 19 nt, Artificial Sequence
  Description of Artificial Sequence: Synthetic oligonucleotide
gccuccuguuguauguaag

SEQ ID NO: 1061756 - RNA, 19 nt, Artificial Sequence
  Description of Artificial Sequence: Synthetic oligonucleotide
cuauauggguggcagucuu

SEQ ID NO: 1061757 - RNA, 19 nt, Artificial Sequence
  Description of Artificial Sequence: Synthetic oligonucleotide
ggcaccacuauagucuucu

SEQ ID NO: 1061758 - RNA, 19 nt, Artificial Sequence
  Description of Artificial Sequence: Synthetic oligonucleotide
agggacuccugaccaugua

SEQ ID NO: 1061759 - RNA, 19 nt, Artificial Sequence
  Description of Artificial Sequence: Synthetic oligonucleotide
caccacuauagucuucuau

SEQ ID NO: 1061760 - RNA, 19 nt, Artificial Sequence
  Description of Artificial Sequence: Synthetic oligonucleotide
cgauuauaaagcugggugu

SEQ ID NO: 1061761 - RNA, 19 nt, Artificial Sequence
  Description of Artificial Sequence: Synthetic oligonucleotide
ccucuauucagaggacaac

SEQ ID NO: 1061762 - RNA, 19 nt, Artificial Sequence
  Description of Artificial Sequence: Synthetic oligonucleotide
gcgaacacuucugacucuc

SEQ ID NO: 1061763 - RNA, 19 nt, Artificial Sequence
  Description of Artificial Sequence: Synthetic oligonucleotide
auaacaccaaggggcuauu

SEQ ID NO: 1061764 - RNA, 19 nt, Artificial Sequence
  Description of Artificial Sequence: Synthetic oligonucleotide
guaucguaacccucuuguu

SEQ ID NO: 1061765 - RNA, 19 nt, Artificial Sequence
  Description of Artificial Sequence: Synthetic oligonucleotide
ccauacaaccaguaucgua

SEQ ID NO: 1061766 - RNA, 19 nt, Artificial Sequence
  Description of Artificial Sequence: Synthetic oligonucleotide
cauugaccuucauuggauu

SEQ ID NO: 1061767 - RNA, 19 nt, Artificial Sequence
  Description of Artificial Sequence: Synthetic oligonucleotide
gugacacagucucuuuaau

SEQ ID NO: 1061768 - RNA, 19 nt, Artificial Sequence
  Description of Artificial Sequence: Synthetic oligonucleotide
aggugaggucaggugugcu

SEQ ID NO: 1061769 - RNA, 19 nt, Artificial Sequence
  Description of Artificial Sequence: Synthetic oligonucleotide
caauccgaauggaaugauu

SEQ ID NO: 1061770 - RNA, 19 nt, Artificial Sequence
  Description of Artificial Sequence: Synthetic oligonucleotide
cuguugcgcacauuucuau

SEQ ID NO: 1061771 - RNA, 19 nt, Artificial Sequence
  Description of Artificial Sequence: Synthetic oligonucleotide
cuugauuacugagcagaau

SEQ ID NO: 1061772 - RNA, 19 nt, Artificial Sequence
  Description of Artificial Sequence: Synthetic oligonucleotide
gcgcacauuucuauacgca

SEQ ID NO: 1061773 - RNA, 19 nt, Artificial Sequence
  Description of Artificial Sequence: Synthetic oligonucleotide
gacucucuugucugccuuu

SEQ ID NO: 1061774 - RNA, 19 nt, Artificial Sequence
  Description of Artificial Sequence: Synthetic oligonucleotide
gcagccaauccgaauggaa

SEQ ID NO: 1061775 - RNA, 19 nt, Artificial Sequence
  Description of Artificial Sequence: Synthetic oligonucleotide
auucgccaucacagggaca

SEQ ID NO: 1061776 - RNA, 19 nt, Artificial Sequence
  Description of Artificial Sequence: Synthetic oligonucleotide
gcgugaacgaagcaugguu

SEQ ID NO: 1061777 - RNA, 19 nt, Artificial Sequence
  Description of Artificial Sequence: Synthetic oligonucleotide
gugaacggccuuguaugcu

SEQ ID NO: 1061778 - RNA, 19 nt, Artificial Sequence
  Description of Artificial Sequence: Synthetic oligonucleotide
ccauugaccuucauuggau

SEQ ID NO: 1061779 - RNA, 19 nt, Artificial Sequence
  Description of Artificial Sequence: Synthetic oligonucleotide
ucgccaucacagggacacu

SEQ ID NO: 1061780 - RNA, 19 nt, Artificial Sequence
  Description of Artificial Sequence: Synthetic oligonucleotide
augcuauccugaggauuuu

SEQ ID NO: 1061781 - RNA, 19 nt, Artificial Sequence
  Description of Artificial Sequence: Synthetic oligonucleotide
guuguauguaagggccaau

SEQ ID NO: 1061782 - RNA, 19 nt, Artificial Sequence
  Description of Artificial Sequence: Synthetic oligonucleotide
ggaaugauugggagaggau

SEQ ID NO: 1061783 - RNA, 19 nt, Artificial Sequence
  Description of Artificial Sequence: Synthetic oligonucleotide
gccgauuauaaagcugggu

SEQ ID NO: 1061784 - RNA, 19 nt, Artificial Sequence
  Description of Artificial Sequence: Synthetic oligonucleotide
gcuauauggguggcagucu

SEQ ID NO: 1061785 - RNA, 19 nt, Artificial Sequence
  Description of Artificial Sequence: Synthetic oligonucleotide
gcuguauccgaggcuccuc

SEQ ID NO: 1061786 - RNA, 19 nt, Artificial Sequence
  Description of Artificial Sequence: Synthetic oligonucleotide
uccauccccgagggacaaa

SEQ ID NO: 1061787 - RNA, 19 nt, Artificial Sequence
  Description of Artificial Sequence: Synthetic oligonucleotide
ggcucguugcauaauucuu

SEQ ID NO: 1061788 - RNA, 19 nt, Artificial Sequence
  Description of Artificial Sequence: Synthetic oligonucleotide
cccaacagcuaugguuguc

SEQ ID NO: 1061789 - RNA, 19 nt, Artificial Sequence
  Description of Artificial Sequence: Synthetic oligonucleotide
cccucuuauucuggaagua

SEQ ID NO: 1061790 - RNA, 19 nt, Artificial Sequence
  Description of Artificial Sequence: Synthetic oligonucleotide
ccaauccgaauggaaugau

SEQ ID NO: 1061791 - RNA, 19 nt, Artificial Sequence
  Description of Artificial Sequence: Synthetic oligonucleotide
cccggugacacagucucuu

SEQ ID NO: 1061792 - RNA, 19 nt, Artificial Sequence
  Description of Artificial Sequence: Synthetic oligonucleotide
cguaacccucuuguugcua

SEQ ID NO: 1061793 - RNA, 19 nt, Artificial Sequence
  Description of Artificial Sequence: Synthetic oligonucleotide
cgccaucacagggacacuu

SEQ ID NO: 1061794 - RNA, 19 nt, Artificial Sequence
  Description of Artificial Sequence: Synthetic oligonucleotide
uguuauuaggcuuauaccc

SEQ ID NO: 1061795 - RNA, 19 nt, Artificial Sequence
  Description of Artificial Sequence: Synthetic oligonucleotide
  modified_base (6)..(6): a, c, u, g, unknown or other
uucaanacuuaauucaugg

SEQ ID NO: 1061796 - RNA, 19 nt, Artificial Sequence
  Description of Artificial Sequence: Synthetic oligonucleotide
aguaguuugguaucgaaac

SEQ ID NO: 1061797 - RNA, 19 nt, Artificial Sequence
  Description of Artificial Sequence: Synthetic oligonucleotide
aauaguaguaguaacgagg

SEQ ID NO: 1061798 - RNA, 19 nt, Artificial Sequence
  Description of Artificial Sequence: Synthetic oligonucleotide
aaagggcuaaccuugauug

SEQ ID NO: 1061799 - RNA, 19 nt, Artificial Sequence
  Description of Artificial Sequence: Synthetic oligonucleotide
auuugaacgaaacacaaug

SEQ ID NO: 1061800 - RNA, 19 nt, Artificial Sequence
  Description of Artificial Sequence: Synthetic oligonucleotide
cagauaauuaguaaggagc

SEQ ID NO: 1061801 - RNA, 19 nt, Artificial Sequence
  Description of Artificial Sequence: Synthetic oligonucleotide
uuaaaagauagauugggug

SEQ ID NO: 1061802 - RNA, 19 nt, Artificial Sequence
  Description of Artificial Sequence: Synthetic oligonucleotide
aagguguacaaucaaacug

SEQ ID NO: 1061803 - RNA, 19 nt, Artificial Sequence
  Description of Artificial Sequence: Synthetic oligonucleotide
ucuaauacaacaucuacaa

SEQ ID NO: 1061804 - RNA, 19 nt, Artificial Sequence
  Description of Artificial Sequence: Synthetic oligonucleotide
uuuuauaguaguuugguau

SEQ ID NO: 1061805 - RNA, 19 nt, Artificial Sequence
  Description of Artificial Sequence: Synthetic oligonucleotide
  modified_base (9)..(9): a, c, u, g, unknown or other
gaauucaanacuuaauuca

SEQ ID NO: 1061806 - RNA, 19 nt, Artificial Sequence
  Description of Artificial Sequence: Synthetic oligonucleotide
aauuuuaggccacagcuga

SEQ ID NO: 1061807 - RNA, 19 nt, Artificial Sequence
  Description of Artificial Sequence: Synthetic oligonucleotide
uuugaacgaaacacaaugg

SEQ ID NO: 1061808 - RNA, 19 nt, Artificial Sequence
  Description of Artificial Sequence: Synthetic oligonucleotide
gauagauugggugauaugc

SEQ ID NO: 1061809 - RNA, 19 nt, Artificial Sequence
  Description of Artificial Sequence: Synthetic oligonucleotide
auuaugacaugcuauuagg

SEQ ID NO: 1061810 - RNA, 19 nt, Artificial Sequence
  Description of Artificial Sequence: Synthetic oligonucleotide
ucagcagauaauuaguaag

SEQ ID NO: 1061811 - RNA, 19 nt, Artificial Sequence
  Description of Artificial Sequence: Synthetic oligonucleotide
agaucaaacggacaucagc

SEQ ID NO: 1061812 - RNA, 19 nt, Artificial Sequence
  Description of Artificial Sequence: Synthetic oligonucleotide
aagauaauuuaguuucuag

SEQ ID NO: 1061813 - RNA, 19 nt, Artificial Sequence
  Description of Artificial Sequence: Synthetic oligonucleotide
uauauugucauuacuucca

SEQ ID NO: 1061814 - RNA, 19 nt, Artificial Sequence
  Description of Artificial Sequence: Synthetic oligonucleotide
uaaaggaccauguaaagaa

SEQ ID NO: 1061815 - RNA, 19 nt, Artificial Sequence
  Description of Artificial Sequence: Synthetic oligonucleotide
cugcauauuaucacaaucg

SEQ ID NO: 1061816 - RNA, 19 nt, Artificial Sequence
  Description of Artificial Sequence: Synthetic oligonucleotide
cuucaaacuaaucuaauac

SEQ ID NO: 1061817 - RNA, 19 nt, Artificial Sequence
  Description of Artificial Sequence: Synthetic oligonucleotide
gauuaugacaugcuauuag

SEQ ID NO: 1061818 - RNA, 19 nt, Artificial Sequence
  Description of Artificial Sequence: Synthetic oligonucleotide
ucuacaacacauuccagag

SEQ ID NO: 1061819 - RNA, 19 nt, Artificial Sequence
  Description of Artificial Sequence: Synthetic oligonucleotide
uguuucaccgcuuuaaaac

SEQ ID NO: 1061820 - RNA, 19 nt, Artificial Sequence
  Description of Artificial Sequence: Synthetic oligonucleotide
uaagaaucauucugaaggg

SEQ ID NO: 1061821 - RNA, 19 nt, Artificial Sequence
  Description of Artificial Sequence: Synthetic oligonucleotide
aacuguuauacccaagagu

SEQ ID NO: 1061822 - RNA, 19 nt, Artificial Sequence
  Description of Artificial Sequence: Synthetic oligonucleotide
auuaguaaggagcuugaag

SEQ ID NO: 1061823 - RNA, 19 nt, Artificial Sequence
  Description of Artificial Sequence: Synthetic oligonucleotide
aacaaauauacccaacuua

SEQ ID NO: 1061824 - RNA, 19 nt, Artificial Sequence
  Description of Artificial Sequence: Synthetic oligonucleotide
agcauaaaagauccccucc

SEQ ID NO: 1061825 - RNA, 19 nt, Artificial Sequence
  Description of Artificial Sequence: Synthetic oligonucleotide
aaauaugaucauuuagaga

SEQ ID NO: 1061826 - RNA, 19 nt, Artificial Sequence
  Description of Artificial Sequence: Synthetic oligonucleotide
  modified_base (6)..(6): a, c, u, g, unknown or other
ucagcncaaaaucauccgg

SEQ ID NO: 1061827 - RNA, 19 nt, Artificial Sequence
  Description of Artificial Sequence: Synthetic oligonucleotide
uucaaacuaaucuaauaca

SEQ ID NO: 1061828 - RNA, 19 nt, Artificial Sequence
  Description of Artificial Sequence: Synthetic oligonucleotide
uaucaaggaagcauuaacu

SEQ ID NO: 1061829 - RNA, 19 nt, Artificial Sequence
  Description of Artificial Sequence: Synthetic oligonucleotide
uugguaucgaaacaggaac

SEQ ID NO: 1061830 - RNA, 19 nt, Artificial Sequence
  Description of Artificial Sequence: Synthetic oligonucleotide
uaugcauacaaacuuuccu

SEQ ID NO: 1061831 - RNA, 19 nt, Artificial Sequence
  Description of Artificial Sequence: Synthetic oligonucleotide
uugaagaucaaacggacau

SEQ ID NO: 1061832 - RNA, 19 nt, Artificial Sequence
  Description of Artificial Sequence: Synthetic oligonucleotide
gaaauuuuaggccacagcu

SEQ ID NO: 1061833 - RNA, 19 nt, Artificial Sequence
  Description of Artificial Sequence: Synthetic oligonucleotide
agauaauuuaguuucuaga

SEQ ID NO: 1061834 - RNA, 19 nt, Artificial Sequence
  Description of Artificial Sequence: Synthetic oligonucleotide
aauacuggaagcaaggaau

SEQ ID NO: 1061835 - RNA, 19 nt, Artificial Sequence
  Description of Artificial Sequence: Synthetic oligonucleotide
uuuauuacacggcagcaaa

SEQ ID NO: 1061836 - RNA, 19 nt, Artificial Sequence
  Description of Artificial Sequence: Synthetic oligonucleotide
  modified_base (5)..(5): a, c, u, g, unknown or other
auagngguaaagcaggaga

SEQ ID NO: 1061837 - RNA, 19 nt, Artificial Sequence
  Description of Artificial Sequence: Synthetic oligonucleotide
  modified_base (11)..(11): a, c, u, g, unknown or other
auggcaauagngguaaagc

SEQ ID NO: 1061838 - RNA, 19 nt, Artificial Sequence
  Description of Artificial Sequence: Synthetic oligonucleotide
ugugacuuuaacccuuuag

SEQ ID NO: 1061839 - RNA, 19 nt, Artificial Sequence
  Description of Artificial Sequence: Synthetic oligonucleotide
uauaccccauguuucaccg

SEQ ID NO: 1061840 - RNA, 19 nt, Artificial Sequence
  Description of Artificial Sequence: Synthetic oligonucleotide
  modified_base (4)..(4): a, c, u, g, unknown or other
caanacuuaauucauggca

SEQ ID NO: 1061841 - RNA, 19 nt, Artificial Sequence
  Description of Artificial Sequence: Synthetic oligonucleotide
ugaaggguaguuaacuaug

SEQ ID NO: 1061842 - RNA, 19 nt, Artificial Sequence
  Description of Artificial Sequence: Synthetic oligonucleotide
uauaaaggaccauguaaag

SEQ ID NO: 1061843 - RNA, 19 nt, Artificial Sequence
  Description of Artificial Sequence: Synthetic oligonucleotide
uuaugacaugcuauuaggc

SEQ ID NO: 1061844 - RNA, 19 nt, Artificial Sequence
  Description of Artificial Sequence: Synthetic oligonucleotide
auaauuaguaaggagcuug

SEQ ID NO: 1061845 - RNA, 19 nt, Artificial Sequence
  Description of Artificial Sequence: Synthetic oligonucleotide
aagaugaaagaccuuugga

SEQ ID NO: 1061846 - RNA, 19 nt, Artificial Sequence
  Description of Artificial Sequence: Synthetic oligonucleotide
gaaacggaaaguaacuaag

SEQ ID NO: 1061847 - RNA, 19 nt, Artificial Sequence
  Description of Artificial Sequence: Synthetic oligonucleotide
aucaaggaagcauuaacug

SEQ ID NO: 1061848 - RNA, 19 nt, Artificial Sequence
  Description of Artificial Sequence: Synthetic oligonucleotide
ugaaauuuuaggccacagc

SEQ ID NO: 1061849 - RNA, 19 nt, Artificial Sequence
  Description of Artificial Sequence: Synthetic oligonucleotide
agaguaaaugcugacauug

SEQ ID NO: 1061850 - RNA, 19 nt, Artificial Sequence
  Description of Artificial Sequence: Synthetic oligonucleotide
uggaagaaguuaauccagg

SEQ ID NO: 1061851 - RNA, 19 nt, Artificial Sequence
  Description of Artificial Sequence: Synthetic oligonucleotide
  modified_base (7)..(7): a, c, u, g, unknown or other
aucagcncaaaaucauccg

SEQ ID NO: 1061852 - RNA, 19 nt, Artificial Sequence
  Description of Artificial Sequence: Synthetic oligonucleotide
ugucuauguaaacuguggc

SEQ ID NO: 1061853 - RNA, 19 nt, Artificial Sequence
  Description of Artificial Sequence: Synthetic oligonucleotide
uauuaucacaaucguauuc

SEQ ID NO: 1061854 - RNA, 19 nt, Artificial Sequence
  Description of Artificial Sequence: Synthetic oligonucleotide
uuuauaguaguuugguauc

SEQ ID NO: 1061855 - RNA, 19 nt, Artificial Sequence
  Description of Artificial Sequence: Synthetic oligonucleotide
  modified_base (5)..(5): a, c, u, g, unknown or other
ucaanacuuaauucauggc

SEQ ID NO: 1061856 - RNA, 19 nt, Artificial Sequence
  Description of Artificial Sequence: Synthetic oligonucleotide
uugauuguauacauucugu

SEQ ID NO: 1061857 - RNA, 19 nt, Artificial Sequence
  Description of Artificial Sequence: Synthetic oligonucleotide
cagcagauaauuaguaagg

SEQ ID NO: 1061858 - RNA, 19 nt, Artificial Sequence
  Description of Artificial Sequence: Synthetic oligonucleotide
  modified_base (8)..(8): a, c, u, g, unknown or other
caucagcncaaaaucaucc

SEQ ID NO: 1061859 - RNA, 19 nt, Artificial Sequence
  Description of Artificial Sequence: Synthetic oligonucleotide
gauugggugauaugcauac

SEQ ID NO: 1061860 - RNA, 19 nt, Artificial Sequence
  Description of Artificial Sequence: Synthetic oligonucleotide
ugaacgaaacacaaugguc

SEQ ID NO: 1061861 - RNA, 19 nt, Artificial Sequence
  Description of Artificial Sequence: Synthetic oligonucleotide
uaauaguaguaguaacgag

SEQ ID NO: 1061862 - RNA, 19 nt, Artificial Sequence
  Description of Artificial Sequence: Synthetic oligonucleotide
acggaaaguaacuaagaug

SEQ ID NO: 1061863 - RNA, 19 nt, Artificial Sequence
  Description of Artificial Sequence: Synthetic oligonucleotide
aguaacuaagaugggauag

SEQ ID NO: 1061864 - RNA, 19 nt, Artificial Sequence
  Description of Artificial Sequence: Synthetic oligonucleotide
aacggaaaguaacuaagau

SEQ ID NO: 1061865 - RNA, 19 nt, Artificial Sequence
  Description of Artificial Sequence: Synthetic oligonucleotide
  modified_base (4)..(4): a, c, u, g, unknown or other
uagngguaaagcaggagac

SEQ ID NO: 1061866 - RNA, 19 nt, Artificial Sequence
  Description of Artificial Sequence: Synthetic oligonucleotide
uuauaguaguuugguaucg

SEQ ID NO: 1061867 - RNA, 19 nt, Artificial Sequence
  Description of Artificial Sequence: Synthetic oligonucleotide
gaacgaaacacaaugguca

SEQ ID NO: 1061868 - RNA, 19 nt, Artificial Sequence
  Description of Artificial Sequence: Synthetic oligonucleotide
aaggaccauguaaagaaac

SEQ ID NO: 1061869 - RNA, 19 nt, Artificial Sequence
  Description of Artificial Sequence: Synthetic oligonucleotide
aaaguaacuaagaugggau

SEQ ID NO: 1061870 - RNA, 19 nt, Artificial Sequence
  Description of Artificial Sequence: Synthetic oligonucleotide
uucauuuagggucaucauc

SEQ ID NO: 1061871 - RNA, 19 nt, Artificial Sequence
  Description of Artificial Sequence: Synthetic oligonucleotide
  modified_base (17)..(17): a, c, u, g, unknown or other
ucaaacggacaucagcnca

SEQ ID NO: 1061872 - RNA, 19 nt, Artificial Sequence
  Description of Artificial Sequence: Synthetic oligonucleotide
auuaucacaaucguauuca

SEQ ID NO: 1061873 - RNA, 19 nt, Artificial Sequence
  Description of Artificial Sequence: Synthetic oligonucleotide
uguaaacuguggcauauaa

SEQ ID NO: 1061874 - RNA, 19 nt, Artificial Sequence
  Description of Artificial Sequence: Synthetic oligonucleotide
ugcauauuaucacaaucgu

SEQ ID NO: 1061875 - RNA, 19 nt, Artificial Sequence
  Description of Artificial Sequence: Synthetic oligonucleotide
auaauaguaguaguaacga

SEQ ID NO: 1061876 - RNA, 19 nt, Artificial Sequence
  Description of Artificial Sequence: Synthetic oligonucleotide
auaucucugcaaaaugugc

SEQ ID NO: 1061877 - RNA, 19 nt, Artificial Sequence
  Description of Artificial Sequence: Synthetic oligonucleotide
augcuauuaggcaacagac

SEQ ID NO: 1061878 - RNA, 19 nt, Artificial Sequence
  Description of Artificial Sequence: Synthetic oligonucleotide
uuuggacauuuucacagca

SEQ ID NO: 1061879 - RNA, 19 nt, Artificial Sequence
  Description of Artificial Sequence: Synthetic oligonucleotide
  modified_base (8)..(8): a, c, u, g, unknown or other
aauucaanacuuaauucau

SEQ ID NO: 1061880 - RNA, 19 nt, Artificial Sequence
  Description of Artificial Sequence: Synthetic oligonucleotide
accgcuuuaaaacacaaua

SEQ ID NO: 1061881 - RNA, 19 nt, Artificial Sequence
  Description of Artificial Sequence: Synthetic oligonucleotide
auucguaagaaugaaauuu

SEQ ID NO: 1061882 - RNA, 19 nt, Artificial Sequence
  Description of Artificial Sequence: Synthetic oligonucleotide
cacaccuuguguuauuagg

SEQ ID NO: 1061883 - RNA, 19 nt, Artificial Sequence
  Description of Artificial Sequence: Synthetic oligonucleotide
ggagcuugaagaucaaacg

SEQ ID NO: 1061884 - RNA, 19 nt, Artificial Sequence
  Description of Artificial Sequence: Synthetic oligonucleotide
uaagguguacaaucaaacu

SEQ ID NO: 1061885 - RNA, 19 nt, Artificial Sequence
  Description of Artificial Sequence: Synthetic oligonucleotide
aguuuaacaaauauaccca

SEQ ID NO: 1061886 - RNA, 19 nt, Artificial Sequence
  Description of Artificial Sequence: Synthetic oligonucleotide
aaucauccgggauugguaa

SEQ ID NO: 1061887 - RNA, 19 nt, Artificial Sequence
  Description of Artificial Sequence: Synthetic oligonucleotide
gcuaauguauuaaauaacc

SEQ ID NO: 1061888 - RNA, 19 nt, Artificial Sequence
  Description of Artificial Sequence: Synthetic oligonucleotide
uaaucuaauacaacaucua

SEQ ID NO: 1061889 - RNA, 19 nt, Artificial Sequence
  Description of Artificial Sequence: Synthetic oligonucleotide
  modified_base (5)..(5): a, c, u, g, unknown or other
cagcncaaaaucauccggg

SEQ ID NO: 1061890 - RNA, 19 nt, Artificial Sequence
  Description of Artificial Sequence: Synthetic oligonucleotide
  modified_base (6)..(6): a, c, u, g, unknown or other
aauagngguaaagcaggag

SEQ ID NO: 1061891 - RNA, 19 nt, Artificial Sequence
  Description of Artificial Sequence: Synthetic oligonucleotide
uaauuaguaaggagcuuga

SEQ ID NO: 1061892 - RNA, 19 nt, Artificial Sequence
  Description of Artificial Sequence: Synthetic oligonucleotide
ucguauucaacuucuggcu

SEQ ID NO: 1061893 - RNA, 19 nt, Artificial Sequence
  Description of Artificial Sequence: Synthetic oligonucleotide
agcuaauguauuaaauaac

SEQ ID NO: 1061894 - RNA, 19 nt, Artificial Sequence
  Description of Artificial Sequence: Synthetic oligonucleotide
aaauuuuaggccacagcug

SEQ ID NO: 1061895 - RNA, 19 nt, Artificial Sequence
  Description of Artificial Sequence: Synthetic oligonucleotide
uuauuaggcuuauacccca

SEQ ID NO: 1061896 - RNA, 19 nt, Artificial Sequence
  Description of Artificial Sequence: Synthetic oligonucleotide
aaagcugagaagugucgga

SEQ ID NO: 1061897 - RNA, 19 nt, Artificial Sequence
  Description of Artificial Sequence: Synthetic oligonucleotide
uucguaagaaugaaauuuu

SEQ ID NO: 1061898 - RNA, 19 nt, Artificial Sequence
  Description of Artificial Sequence: Synthetic oligonucleotide
auaauuuaguuucuagaua

SEQ ID NO: 1061899 - RNA, 19 nt, Artificial Sequence
  Description of Artificial Sequence: Synthetic oligonucleotide
auauaaaggaccauguaaa

SEQ ID NO: 1061900 - RNA, 19 nt, Artificial Sequence
  Description of Artificial Sequence: Synthetic oligonucleotide
gaaagcugagaagugucgg

SEQ ID NO: 1061901 - RNA, 19 nt, Artificial Sequence
  Description of Artificial Sequence: Synthetic oligonucleotide
aauugcgcacaccuugugu

SEQ ID NO: 1061902 - RNA, 19 nt, Artificial Sequence
  Description of Artificial Sequence: Synthetic oligonucleotide
aguaguaacgaggaggaga

SEQ ID NO: 1061903 - RNA, 19 nt, Artificial Sequence
  Description of Artificial Sequence: Synthetic oligonucleotide
agauaauuaguaaggagcu

SEQ ID NO: 1061904 - RNA, 19 nt, Artificial Sequence
  Description of Artificial Sequence: Synthetic oligonucleotide
cauuuagccaaguaaagaa

SEQ ID NO: 1061905 - RNA, 19 nt, Artificial Sequence
  Description of Artificial Sequence: Synthetic oligonucleotide
gaaaguaacuaagauggga

SEQ ID NO: 1061906 - RNA, 19 nt, Artificial Sequence
  Description of Artificial Sequence: Synthetic oligonucleotide
gaaucauucugaaggguag

SEQ ID NO: 1061907 - RNA, 19 nt, Artificial Sequence
  Description of Artificial Sequence: Synthetic oligonucleotide
  modified_base (12)..(12): a, c, u, g, unknown or other
uuggaauucaanacuuaau

SEQ ID NO: 1061908 - RNA, 19 nt, Artificial Sequence
  Description of Artificial Sequence: Synthetic oligonucleotide
aaaaucauccgggauuggu

SEQ ID NO: 1061909 - RNA, 19 nt, Artificial Sequence
  Description of Artificial Sequence: Synthetic oligonucleotide
auaaaaugccacgauauau

SEQ ID NO: 1061910 - RNA, 19 nt, Artificial Sequence
  Description of Artificial Sequence: Synthetic oligonucleotide
aaaagauagauugggugau

SEQ ID NO: 1061911 - RNA, 19 nt, Artificial Sequence
  Description of Artificial Sequence: Synthetic oligonucleotide
auugguaaugcugggaaug

SEQ ID NO: 1061912 - RNA, 19 nt, Artificial Sequence
  Description of Artificial Sequence: Synthetic oligonucleotide
caguugaaauacuggaagc

SEQ ID NO: 1061913 - RNA, 19 nt, Artificial Sequence
  Description of Artificial Sequence: Synthetic oligonucleotide
agaaacggaaaguaacuaa

SEQ ID NO: 1061914 - RNA, 19 nt, Artificial Sequence
  Description of Artificial Sequence: Synthetic oligonucleotide
uuauaccccauguuucacc

SEQ ID NO: 1061915 - RNA, 19 nt, Artificial Sequence
  Description of Artificial Sequence: Synthetic oligonucleotide
ugguaucgaaacaggaaca

SEQ ID NO: 1061916 - RNA, 19 nt, Artificial Sequence
  Description of Artificial Sequence: Synthetic oligonucleotide
auauugucauuacuuccag

SEQ ID NO: 1061917 - RNA, 19 nt, Artificial Sequence
  Description of Artificial Sequence: Synthetic oligonucleotide
aauggaguauuguggcacu

SEQ ID NO: 1061918 - RNA, 19 nt, Artificial Sequence
  Description of Artificial Sequence: Synthetic oligonucleotide
auuuagagaauaccacaga

SEQ ID NO: 1061919 - RNA, 19 nt, Artificial Sequence
  Description of Artificial Sequence: Synthetic oligonucleotide
gaccaguugaaauacugga

SEQ ID NO: 1061920 - RNA, 19 nt, Artificial Sequence
  Description of Artificial Sequence: Synthetic oligonucleotide
auuaacuggaagaaguuaa

SEQ ID NO: 1061921 - RNA, 19 nt, Artificial Sequence
  Description of Artificial Sequence: Synthetic oligonucleotide
cuaaucuaauacaacaucu

SEQ ID NO: 1061922 - RNA, 19 nt, Artificial Sequence
  Description of Artificial Sequence: Synthetic oligonucleotide
aguaacgaggaggagacca

SEQ ID NO: 1061923 - RNA, 19 nt, Artificial Sequence
  Description of Artificial Sequence: Synthetic oligonucleotide
agaacaauuagaaauuguu

SEQ ID NO: 1061924 - RNA, 19 nt, Artificial Sequence
  Description of Artificial Sequence: Synthetic oligonucleotide
  modified_base (14)..(14): a, c, u, g, unknown or other
ucuuggaauucaanacuua

SEQ ID NO: 1061925 - RNA, 19 nt, Artificial Sequence
  Description of Artificial Sequence: Synthetic oligonucleotide
aguaaggagcuugaagauc

SEQ ID NO: 1061926 - RNA, 19 nt, Artificial Sequence
  Description of Artificial Sequence: Synthetic oligonucleotide
ugcuauuaggcaacagacu

SEQ ID NO: 1061927 - RNA, 19 nt, Artificial Sequence
  Description of Artificial Sequence: Synthetic oligonucleotide
ugcauacaaacuuuccuau

SEQ ID NO: 1061928 - RNA, 19 nt, Artificial Sequence
  Description of Artificial Sequence: Synthetic oligonucleotide
ugcuuuaucaaggaagcau

SEQ ID NO: 1061929 - RNA, 19 nt, Artificial Sequence
  Description of Artificial Sequence: Synthetic oligonucleotide
gcuauuaggcaacagacuc

SEQ ID NO: 1061930 - RNA, 19 nt, Artificial Sequence
  Description of Artificial Sequence: Synthetic oligonucleotide
uucagcagauaauuaguaa

SEQ ID NO: 1061931 - RNA, 19 nt, Artificial Sequence
  Description of Artificial Sequence: Synthetic oligonucleotide
uaguaguuugguaucgaaa

SEQ ID NO: 1061932 - RNA, 19 nt, Artificial Sequence
  Description of Artificial Sequence: Synthetic oligonucleotide
agugucggaacauggcaag

SEQ ID NO: 1061933 - RNA, 19 nt, Artificial Sequence
  Description of Artificial Sequence: Synthetic oligonucleotide
uaacccuuuagugugugca

SEQ ID NO: 1061934 - RNA, 19 nt, Artificial Sequence
  Description of Artificial Sequence: Synthetic oligonucleotide
  modified_base (8)..(8): a, c, u, g, unknown or other
gcaauagngguaaagcagg

SEQ ID NO: 1061935 - RNA, 19 nt, Artificial Sequence
  Description of Artificial Sequence: Synthetic oligonucleotide
guaguuuaacaaauauacc

SEQ ID NO: 1061936 - RNA, 19 nt, Artificial Sequence
  Description of Artificial Sequence: Synthetic oligonucleotide
ccuauauuaaaucaccauc

SEQ ID NO: 1061937 - RNA, 19 nt, Artificial Sequence
  Description of Artificial Sequence: Synthetic oligonucleotide
caugcauuuagccaaguaa

SEQ ID NO: 1061938 - RNA, 19 nt, Artificial Sequence
  Description of Artificial Sequence: Synthetic oligonucleotide
ccuuuggacauuuucacag

SEQ ID NO: 1061939 - RNA, 19 nt, Artificial Sequence
  Description of Artificial Sequence: Synthetic oligonucleotide
auaaaggaccauguaaaga

SEQ ID NO: 1061940 - RNA, 19 nt, Artificial Sequence
  Description of Artificial Sequence: Synthetic oligonucleotide
caccagucuucauuuaggg

SEQ ID NO: 1061941 - RNA, 19 nt, Artificial Sequence
  Description of Artificial Sequence: Synthetic oligonucleotide
gaagcauuaacuggaagaa

SEQ ID NO: 1061942 - RNA, 19 nt, Artificial Sequence
  Description of Artificial Sequence: Synthetic oligonucleotide
  modified_base (3)..(3): a, c, u, g, unknown or other
agngguaaagcaggagacg

SEQ ID NO: 1061943 - RNA, 19 nt, Artificial Sequence
  Description of Artificial Sequence: Synthetic oligonucleotide
aaguaacuaagaugggaua

SEQ ID NO: 1061944 - RNA, 19 nt, Artificial Sequence
  Description of Artificial Sequence: Synthetic oligonucleotide
aucuaauacaacaucuaca

SEQ ID NO: 1061945 - RNA, 19 nt, Artificial Sequence
  Description of Artificial Sequence: Synthetic oligonucleotide
aggaacagaacaauuagaa

SEQ ID NO: 1061946 - RNA, 19 nt, Artificial Sequence
  Description of Artificial Sequence: Synthetic oligonucleotide
aggauuaugacaugcuauu

SEQ ID NO: 1061947 - RNA, 19 nt, Artificial Sequence
  Description of Artificial Sequence: Synthetic oligonucleotide
guaguaacgaggaggagac

SEQ ID NO: 1061948 - RNA, 19 nt, Artificial Sequence
  Description of Artificial Sequence: Synthetic oligonucleotide
ugauaauccauugguuucu

SEQ ID NO: 1061949 - RNA, 19 nt, Artificial Sequence
  Description of Artificial Sequence: Synthetic oligonucleotide
agggucaucaucuuugcua

SEQ ID NO: 1061950 - RNA, 19 nt, Artificial Sequence
  Description of Artificial Sequence: Synthetic oligonucleotide
gagaccaguugaaauacug

SEQ ID NO: 1061951 - RNA, 19 nt, Artificial Sequence
  Description of Artificial Sequence: Synthetic oligonucleotide
aaacggaaaguaacuaaga

SEQ ID NO: 1061952 - RNA, 19 nt, Artificial Sequence
  Description of Artificial Sequence: Synthetic oligonucleotide
  modified_base (9)..(9): a, c, u, g, unknown or other
ggcaauagngguaaagcag

SEQ ID NO: 1061953 - RNA, 19 nt, Artificial Sequence
  Description of Artificial Sequence: Synthetic oligonucleotide
uuuuauuacacggcagcaa

SEQ ID NO: 1061954 - RNA, 19 nt, Artificial Sequence
  Description of Artificial Sequence: Synthetic oligonucleotide
aagcauuaacuggaagaag

SEQ ID NO: 1061955 - RNA, 19 nt, Artificial Sequence
  Description of Artificial Sequence: Synthetic oligonucleotide
guuucaccgcuuuaaaaca

SEQ ID NO: 1061956 - RNA, 19 nt, Artificial Sequence
  Description of Artificial Sequence: Synthetic oligonucleotide
  modified_base (4)..(4): a, c, u, g, unknown or other
agcncaaaaucauccggga

SEQ ID NO: 1061957 - RNA, 19 nt, Artificial Sequence
  Description of Artificial Sequence: Synthetic oligonucleotide
  modified_base (7)..(7): a, c, u, g, unknown or other
auucaanacuuaauucaug

SEQ ID NO: 1061958 - RNA, 19 nt, Artificial Sequence
  Description of Artificial Sequence: Synthetic oligonucleotide
uucaccgcuuuaaaacaca

SEQ ID NO: 1061959 - RNA, 19 nt, Artificial Sequence
  Description of Artificial Sequence: Synthetic oligonucleotide
gucuauguaaacuguggca

SEQ ID NO: 1061960 - RNA, 19 nt, Artificial Sequence
  Description of Artificial Sequence: Synthetic oligonucleotide
aggaccauguaaagaaacg

SEQ ID NO: 1061961 - RNA, 19 nt, Artificial Sequence
  Description of Artificial Sequence: Synthetic oligonucleotide
aaauaacacuugcuagaaa

SEQ ID NO: 1061962 - RNA, 19 nt, Artificial Sequence
  Description of Artificial Sequence: Synthetic oligonucleotide
aagauagauugggugauau

SEQ ID NO: 1061963 - RNA, 19 nt, Artificial Sequence
  Description of Artificial Sequence: Synthetic oligonucleotide
acgauauauugucauuacu

SEQ ID NO: 1061964 - RNA, 19 nt, Artificial Sequence
  Description of Artificial Sequence: Synthetic oligonucleotide
aguuugguaucgaaacagg

SEQ ID NO: 1061965 - RNA, 19 nt, Artificial Sequence
  Description of Artificial Sequence: Synthetic oligonucleotide
uuauuacacggcagcaaaa

SEQ ID NO: 1061966 - RNA, 19 nt, Artificial Sequence
  Description of Artificial Sequence: Synthetic oligonucleotide
cagacauucguaagaauga

SEQ ID NO: 1061967 - RNA, 19 nt, Artificial Sequence
  Description of Artificial Sequence: Synthetic oligonucleotide
agaccaguugaaauacugg

SEQ ID NO: 1061968 - RNA, 19 nt, Artificial Sequence
  Description of Artificial Sequence: Synthetic oligonucleotide
cuaaccuugauuguauaca

SEQ ID NO: 1061969 - RNA, 19 nt, Artificial Sequence
  Description of Artificial Sequence: Synthetic oligonucleotide
auuccagagcauuguaaca

SEQ ID NO: 1061970 - RNA, 19 nt, Artificial Sequence
  Description of Artificial Sequence: Synthetic oligonucleotide
ggaccauguaaagaaacgg

SEQ ID NO: 1061971 - RNA, 19 nt, Artificial Sequence
  Description of Artificial Sequence: Synthetic oligonucleotide
ugcaacuuuuccccaauuu

SEQ ID NO: 1061972 - RNA, 19 nt, Artificial Sequence
  Description of Artificial Sequence: Synthetic oligonucleotide
uagauugggugauaugcau

SEQ ID NO: 1061973 - RNA, 19 nt, Artificial Sequence
  Description of Artificial Sequence: Synthetic oligonucleotide
aagaguaaaugcugacauu

SEQ ID NO: 1061974 - RNA, 19 nt, Artificial Sequence
  Description of Artificial Sequence: Synthetic oligonucleotide
ucguaagaaugaaauuuua

SEQ ID NO: 1061975 - RNA, 19 nt, Artificial Sequence
  Description of Artificial Sequence: Synthetic oligonucleotide
aagaaacggaaaguaacua

SEQ ID NO: 1061976 - RNA, 19 nt, Artificial Sequence
  Description of Artificial Sequence: Synthetic oligonucleotide
uaguaaggagcuugaagau

SEQ ID NO: 1061977 - RNA, 19 nt, Artificial Sequence
  Description of Artificial Sequence: Synthetic oligonucleotide
cacuguugauaauccauug

SEQ ID NO: 1061978 - RNA, 19 nt, Artificial Sequence
  Description of Artificial Sequence: Synthetic oligonucleotide
  modified_base (9)..(9): a, c, u, g, unknown or other
acaucagcncaaaaucauc

SEQ ID NO: 1061979 - RNA, 19 nt, Artificial Sequence
  Description of Artificial Sequence: Synthetic oligonucleotide
agauagauugggugauaug

SEQ ID NO: 1061980 - RNA, 19 nt, Artificial Sequence
  Description of Artificial Sequence: Synthetic oligonucleotide
agaggauuaugacaugcua

SEQ ID NO: 1061981 - RNA, 19 nt, Artificial Sequence
  Description of Artificial Sequence: Synthetic oligonucleotide
auaguaguuugguaucgaa

SEQ ID NO: 1061982 - RNA, 19 nt, Artificial Sequence
  Description of Artificial Sequence: Synthetic oligonucleotide
guaucgaaacaggaacagg

SEQ ID NO: 1061983 - RNA, 19 nt, Artificial Sequence
  Description of Artificial Sequence: Synthetic oligonucleotide
aaucauucugaaggguagu

SEQ ID NO: 1061984 - RNA, 19 nt, Artificial Sequence
  Description of Artificial Sequence: Synthetic oligonucleotide
gaccauguaaagaaacgga

SEQ ID NO: 1061985 - RNA, 19 nt, Artificial Sequence
  Description of Artificial Sequence: Synthetic oligonucleotide
uauaguaguuugguaucga

SEQ ID NO: 1061986 - RNA, 19 nt, Artificial Sequence
  Description of Artificial Sequence: Synthetic oligonucleotide
augcauuuagccaaguaaa

SEQ ID NO: 1061987 - RNA, 19 nt, Artificial Sequence
  Description of Artificial Sequence: Synthetic oligonucleotide
aaacaugcauuuagccaag

SEQ ID NO: 1061988 - RNA, 19 nt, Artificial Sequence
  Description of Artificial Sequence: Synthetic oligonucleotide
auaaaagauccccuccauu

SEQ ID NO: 1061989 - RNA, 19 nt, Artificial Sequence
  Description of Artificial Sequence: Synthetic oligonucleotide
uaugcaacuuuuccccaau

SEQ ID NO: 1061990 - RNA, 19 nt, Artificial Sequence
  Description of Artificial Sequence: Synthetic oligonucleotide
gaaugaaauuuuaggccac

SEQ ID NO: 1061991 - RNA, 19 nt, Artificial Sequence
  Description of Artificial Sequence: Synthetic oligonucleotide
aaacaaggcuucaaacuaa

SEQ ID NO: 1061992 - RNA, 19 nt, Artificial Sequence
  Description of Artificial Sequence: Synthetic oligonucleotide
guaagaugaaagaccuuug

SEQ ID NO: 1061993 - RNA, 19 nt, Artificial Sequence
  Description of Artificial Sequence: Synthetic oligonucleotide
aagggcuaaccuugauugu

SEQ ID NO: 1061994 - RNA, 19 nt, Artificial Sequence
  Description of Artificial Sequence: Synthetic oligonucleotide
ugguccacggggcuuaauc

SEQ ID NO: 1061995 - RNA, 19 nt, Artificial Sequence
  Description of Artificial Sequence: Synthetic oligonucleotide
guaguuugguaucgaaaca

SEQ ID NO: 1061996 - RNA, 19 nt, Artificial Sequence
  Description of Artificial Sequence: Synthetic oligonucleotide
agaugcacuucugaucaag

SEQ ID NO: 1061997 - RNA, 19 nt, Artificial Sequence
  Description of Artificial Sequence: Synthetic oligonucleotide
uaacuaagaugggauagau

SEQ ID NO: 1061998 - RNA, 19 nt, Artificial Sequence
  Description of Artificial Sequence: Synthetic oligonucleotide
aaaucauccgggauuggua

SEQ ID NO: 1061999 - RNA, 19 nt, Artificial Sequence
  Description of Artificial Sequence: Synthetic oligonucleotide
ggcaaguaagaugaaagac

SEQ ID NO: 1062000 - RNA, 19 nt, Artificial Sequence
  Description of Artificial Sequence: Synthetic oligonucleotide
auaccccauguuucaccgc

SEQ ID NO: 1062001 - RNA, 19 nt, Artificial Sequence
  Description of Artificial Sequence: Synthetic oligonucleotide
aauuaguaaggagcuugaa

SEQ ID NO: 1062002 - RNA, 19 nt, Artificial Sequence
  Description of Artificial Sequence: Synthetic oligonucleotide
ugccacgauauauugucau

SEQ ID NO: 1062003 - RNA, 19 nt, Artificial Sequence
  Description of Artificial Sequence: Synthetic oligonucleotide
auagauugggugauaugca

SEQ ID NO: 1062004 - RNA, 19 nt, Artificial Sequence
  Description of Artificial Sequence: Synthetic oligonucleotide
gguaucgaaacaggaacag

SEQ ID NO: 1062005 - RNA, 19 nt, Artificial Sequence
  Description of Artificial Sequence: Synthetic oligonucleotide
uacccaacuuacuuuugaa

SEQ ID NO: 1062006 - RNA, 19 nt, Artificial Sequence
  Description of Artificial Sequence: Synthetic oligonucleotide
gcugcauauuaucacaauc

SEQ ID NO: 1062007 - RNA, 19 nt, Artificial Sequence
  Description of Artificial Sequence: Synthetic oligonucleotide
aagaucaaacggacaucag

SEQ ID NO: 1062008 - RNA, 19 nt, Artificial Sequence
  Description of Artificial Sequence: Synthetic oligonucleotide
  modified_base (7)..(7): a, c, u, g, unknown or other
caauagngguaaagcagga

SEQ ID NO: 1062009 - RNA, 19 nt, Artificial Sequence
  Description of Artificial Sequence: Synthetic oligonucleotide
auaugcaacuuuuccccaa

SEQ ID NO: 1062010 - RNA, 19 nt, Artificial Sequence
  Description of Artificial Sequence: Synthetic oligonucleotide
ccgggauugguaaugcugg

SEQ ID NO: 1062011 - RNA, 19 nt, Artificial Sequence
  Description of Artificial Sequence: Synthetic oligonucleotide
uuaauccagguaaggugua

SEQ ID NO: 1062012 - RNA, 19 nt, Artificial Sequence
  Description of Artificial Sequence: Synthetic oligonucleotide
gcaacagacucaaagcagc

SEQ ID NO: 1062013 - RNA, 19 nt, Artificial Sequence
  Description of Artificial Sequence: Synthetic oligonucleotide
ggagaggauuaugacaugc

SEQ ID NO: 1062014 - RNA, 19 nt, Artificial Sequence
  Description of Artificial Sequence: Synthetic oligonucleotide
acacaauaaaaugccuaca

SEQ ID NO: 1062015 - RNA, 19 nt, Artificial Sequence
  Description of Artificial Sequence: Synthetic oligonucleotide
aaaggaccauguaaagaaa

SEQ ID NO: 1062016 - RNA, 19 nt, Artificial Sequence
  Description of Artificial Sequence: Synthetic oligonucleotide
cauaggaauuugaacgaaa

SEQ ID NO: 1062017 - RNA, 19 nt, Artificial Sequence
  Description of Artificial Sequence: Synthetic oligonucleotide
guccacggggcuuaauccc

SEQ ID NO: 1062018 - RNA, 19 nt, Artificial Sequence
  Description of Artificial Sequence: Synthetic oligonucleotide
cagguaagguguacaauca

SEQ ID NO: 1062019 - RNA, 19 nt, Artificial Sequence
  Description of Artificial Sequence: Synthetic oligonucleotide
cuuuuauuacacggcagca

SEQ ID NO: 1062020 - RNA, 19 nt, Artificial Sequence
  Description of Artificial Sequence: Synthetic oligonucleotide
uauuaggcuuauaccccau

SEQ ID NO: 1062021 - RNA, 19 nt, Artificial Sequence
  Description of Artificial Sequence: Synthetic oligonucleotide
  modified_base (2)..(2): a, c, u, g, unknown or other
gngguaaagcaggagacgu

SEQ ID NO: 1062022 - RNA, 19 nt, Artificial Sequence
  Description of Artificial Sequence: Synthetic oligonucleotide
gcuaaccuugauuguauac

SEQ ID NO: 1062023 - RNA, 19 nt, Artificial Sequence
  Description of Artificial Sequence: Synthetic oligonucleotide
accuuguguuauuaggcuu

SEQ ID NO: 1062024 - RNA, 19 nt, Artificial Sequence
  Description of Artificial Sequence: Synthetic oligonucleotide
ggauugguaaugcugggaa

SEQ ID NO: 1062025 - RNA, 19 nt, Artificial Sequence
  Description of Artificial Sequence: Synthetic oligonucleotide
guaacgaggaggagaccag

SEQ ID NO: 1062026 - RNA, 19 nt, Artificial Sequence
  Description of Artificial Sequence: Synthetic oligonucleotide
gcauaaaagauccccucca

SEQ ID NO: 1062027 - RNA, 19 nt, Artificial Sequence
  Description of Artificial Sequence: Synthetic oligonucleotide
gguaaagcaggagacguuc

SEQ ID NO: 1062028 - RNA, 19 nt, Artificial Sequence
  Description of Artificial Sequence: Synthetic oligonucleotide
cacaauaaaaugccuacau

SEQ ID NO: 1062029 - RNA, 19 nt, Artificial Sequence
  Description of Artificial Sequence: Synthetic oligonucleotide
gguccacggggcuuaaucc

SEQ ID NO: 1062030 - RNA, 19 nt, Artificial Sequence
  Description of Artificial Sequence: Synthetic oligonucleotide
aaagauagauugggugaua

SEQ ID NO: 1062031 - RNA, 19 nt, Artificial Sequence
  Description of Artificial Sequence: Synthetic oligonucleotide
uagggucaucaucuuugcu

SEQ ID NO: 1062032 - RNA, 19 nt, Artificial Sequence
  Description of Artificial Sequence: Synthetic oligonucleotide
uuaguaaggcugugacuuu

SEQ ID NO: 1062033 - RNA, 19 nt, Artificial Sequence
  Description of Artificial Sequence: Synthetic oligonucleotide
acaugcauuuagccaagua

SEQ ID NO: 1062034 - RNA, 19 nt, Artificial Sequence
  Description of Artificial Sequence: Synthetic oligonucleotide
  modified_base (2)..(2): a, c, u, g, unknown or other
cncaaaaucauccgggauu

SEQ ID NO: 1062035 - RNA, 19 nt, Artificial Sequence
  Description of Artificial Sequence: Synthetic oligonucleotide
gacauucguaagaaugaaa

SEQ ID NO: 1062036 - RNA, 19 nt, Artificial Sequence
  Description of Artificial Sequence: Synthetic oligonucleotide
gaggauuaugacaugcuau

SEQ ID NO: 1062037 - RNA, 19 nt, Artificial Sequence
  Description of Artificial Sequence: Synthetic oligonucleotide
ugucggaacauggcaagua

SEQ ID NO: 1062038 - RNA, 19 nt, Artificial Sequence
  Description of Artificial Sequence: Synthetic oligonucleotide
aggcugugacuuuaacccu

SEQ ID NO: 1062039 - RNA, 19 nt, Artificial Sequence
  Description of Artificial Sequence: Synthetic oligonucleotide
cauccgggauugguaaugc

SEQ ID NO: 1062040 - RNA, 19 nt, Artificial Sequence
  Description of Artificial Sequence: Synthetic oligonucleotide
aacaugcauuuagccaagu

SEQ ID NO: 1062041 - RNA, 19 nt, Artificial Sequence
  Description of Artificial Sequence: Synthetic oligonucleotide
uaacgaggaggagaccagu

SEQ ID NO: 1062042 - RNA, 19 nt, Artificial Sequence
  Description of Artificial Sequence: Synthetic oligonucleotide
guaaacuguggcauauaaa

SEQ ID NO: 1062043 - RNA, 19 nt, Artificial Sequence
  Description of Artificial Sequence: Synthetic oligonucleotide
cauauccaguccccacuug

SEQ ID NO: 1062044 - RNA, 19 nt, Artificial Sequence
  Description of Artificial Sequence: Synthetic oligonucleotide
  modified_base (15)..(15): a, c, u, g, unknown or other
auucauggcaauagnggua

SEQ ID NO: 1062045 - RNA, 19 nt, Artificial Sequence
  Description of Artificial Sequence: Synthetic oligonucleotide
agaaaagggcuaaccuuga

SEQ ID NO: 1062046 - RNA, 19 nt, Artificial Sequence
  Description of Artificial Sequence: Synthetic oligonucleotide
gcauuuagccaaguaaaga

SEQ ID NO: 1062047 - RNA, 19 nt, Artificial Sequence
  Description of Artificial Sequence: Synthetic oligonucleotide
ggggcuuaaucccugugca

SEQ ID NO: 1062048 - RNA, 19 nt, Artificial Sequence
  Description of Artificial Sequence: Synthetic oligonucleotide
cagaacaauuagaaauugu

SEQ ID NO: 1062049 - RNA, 19 nt, Artificial Sequence
  Description of Artificial Sequence: Synthetic oligonucleotide
caauugcgcacaccuugug

SEQ ID NO: 1062050 - RNA, 19 nt, Artificial Sequence
  Description of Artificial Sequence: Synthetic oligonucleotide
agggcuaaccuugauugua

SEQ ID NO: 1062051 - RNA, 19 nt, Artificial Sequence
  Description of Artificial Sequence: Synthetic oligonucleotide
cuauguaaacuguggcaua

SEQ ID NO: 1062052 - RNA, 19 nt, Artificial Sequence
  Description of Artificial Sequence: Synthetic oligonucleotide
  modified_base (15)..(15): a, c, u, g, unknown or other
aaacggacaucagcncaaa

SEQ ID NO: 1062053 - RNA, 19 nt, Artificial Sequence
  Description of Artificial Sequence: Synthetic oligonucleotide
gguaagguguacaaucaaa

SEQ ID NO: 1062054 - RNA, 19 nt, Artificial Sequence
  Description of Artificial Sequence: Synthetic oligonucleotide
aucauucugaaggguaguu

SEQ ID NO: 1062055 - RNA, 19 nt, Artificial Sequence
  Description of Artificial Sequence: Synthetic oligonucleotide
gauugguaaugcugggaau

SEQ ID NO: 1062056 - RNA, 19 nt, Artificial Sequence
  Description of Artificial Sequence: Synthetic oligonucleotide
ggcuuauaccccauguuuc

SEQ ID NO: 1062057 - RNA, 19 nt, Artificial Sequence
  Description of Artificial Sequence: Synthetic oligonucleotide
cauggcaaguaagaugaaa

SEQ ID NO: 1062058 - RNA, 19 nt, Artificial Sequence
  Description of Artificial Sequence: Synthetic oligonucleotide
ucauuacuuccagcauaca

SEQ ID NO: 1062059 - RNA, 19 nt, Artificial Sequence
  Description of Artificial Sequence: Synthetic oligonucleotide
uugcgcacaccuuguguua

SEQ ID NO: 1062060 - RNA, 19 nt, Artificial Sequence
  Description of Artificial Sequence: Synthetic oligonucleotide
ggaagaaguuaauccaggu

SEQ ID NO: 1062061 - RNA, 19 nt, Artificial Sequence
  Description of Artificial Sequence: Synthetic oligonucleotide
gcacuucugaucaaguuaa

SEQ ID NO: 1062062 - RNA, 19 nt, Artificial Sequence
  Description of Artificial Sequence: Synthetic oligonucleotide
gagaggauuaugacaugcu

SEQ ID NO: 1062063 - RNA, 19 nt, Artificial Sequence
  Description of Artificial Sequence: Synthetic oligonucleotide
gcuuaaucccugugcaguc

SEQ ID NO: 1062064 - RNA, 19 nt, Artificial Sequence
  Description of Artificial Sequence: Synthetic oligonucleotide
gcauaugucuacauagaaa

SEQ ID NO: 1062065 - RNA, 19 nt, Artificial Sequence
  Description of Artificial Sequence: Synthetic oligonucleotide
auccgggauugguaaugcu

SEQ ID NO: 1062066 - RNA, 19 nt, Artificial Sequence
  Description of Artificial Sequence: Synthetic oligonucleotide
gauaauuaguaaggagcuu

SEQ ID NO: 1062067 - RNA, 19 nt, Artificial Sequence
  Description of Artificial Sequence: Synthetic oligonucleotide
ugcgcacaccuuguguuau

SEQ ID NO: 1062068 - RNA, 19 nt, Artificial Sequence
  Description of Artificial Sequence: Synthetic oligonucleotide
uaguaacgaggaggagacc

SEQ ID NO: 1062069 - RNA, 19 nt, Artificial Sequence
  Description of Artificial Sequence: Synthetic oligonucleotide
gcacaccuuguguuauuag

SEQ ID NO: 1062070 - RNA, 19 nt, Artificial Sequence
  Description of Artificial Sequence: Synthetic oligonucleotide
gaguauuguggcacuuaaa

SEQ ID NO: 1062071 - RNA, 19 nt, Artificial Sequence
  Description of Artificial Sequence: Synthetic oligonucleotide
ccgcuuuaaaacacaauaa

SEQ ID NO: 1062072 - RNA, 19 nt, Artificial Sequence
  Description of Artificial Sequence: Synthetic oligonucleotide
guuauacccaagaguaaau

SEQ ID NO: 1062073 - RNA, 19 nt, Artificial Sequence
  Description of Artificial Sequence: Synthetic oligonucleotide
gaaaagggcuaaccuugau

SEQ ID NO: 1062074 - RNA, 19 nt, Artificial Sequence
  Description of Artificial Sequence: Synthetic oligonucleotide
acuuacuuuugaagauaau

SEQ ID NO: 1062075 - RNA, 19 nt, Artificial Sequence
  Description of Artificial Sequence: Synthetic oligonucleotide
ugguaaugcugggaauguu

SEQ ID NO: 1062076 - RNA, 19 nt, Artificial Sequence
  Description of Artificial Sequence: Synthetic oligonucleotide
guccccacuuggaaagcug

SEQ ID NO: 1062077 - RNA, 19 nt, Artificial Sequence
  Description of Artificial Sequence: Synthetic oligonucleotide
ccuuguguuauuaggcuua

SEQ ID NO: 1062078 - RNA, 19 nt, Artificial Sequence
  Description of Artificial Sequence: Synthetic oligonucleotide
auuuuaggccacagcugaa

SEQ ID NO: 1062079 - RNA, 19 nt, Artificial Sequence
  Description of Artificial Sequence: Synthetic oligonucleotide
gggucaucaucuuugcuau

SEQ ID NO: 1062080 - RNA, 19 nt, Artificial Sequence
  Description of Artificial Sequence: Synthetic oligonucleotide
guaaugcugggaauguuuu

SEQ ID NO: 1062081 - RNA, 19 nt, Artificial Sequence
  Description of Artificial Sequence: Synthetic oligonucleotide
augccacgauauauuguca

SEQ ID NO: 1062082 - RNA, 19 nt, Artificial Sequence
  Description of Artificial Sequence: Synthetic oligonucleotide
ggcuuaaucccugugcagu

SEQ ID NO: 1062083 - RNA, 19 nt, Artificial Sequence
  Description of Artificial Sequence: Synthetic oligonucleotide
ggauuaugacaugcuauua

SEQ ID NO: 1062084 - RNA, 19 nt, Artificial Sequence
  Description of Artificial Sequence: Synthetic oligonucleotide
gggauugguaaugcuggga

SEQ ID NO: 1062085 - RNA, 19 nt, Artificial Sequence
  Description of Artificial Sequence: Synthetic oligonucleotide
gcuuuaucaaggaagcauu

SEQ ID NO: 1062086 - RNA, 19 nt, Artificial Sequence
  Description of Artificial Sequence: Synthetic oligonucleotide
ccaacuuacuuuugaagau

SEQ ID NO: 1062087 - RNA, 19 nt, Artificial Sequence
  Description of Artificial Sequence: Synthetic oligonucleotide
gguaaugcugggaauguuu

SEQ ID NO: 1062088 - RNA, 19 nt, Artificial Sequence
  Description of Artificial Sequence: Synthetic oligonucleotide
caguccccacuuggaaagc

SEQ ID NO: 1062089 - RNA, 19 nt, Artificial Sequence
  Description of Artificial Sequence: Synthetic oligonucleotide
caauggucauuuucaguuu

SEQ ID NO: 1062090 - RNA, 19 nt, Artificial Sequence
  Description of Artificial Sequence: Synthetic oligonucleotide
ccacgauauauugucauua

SEQ ID NO: 1062091 - RNA, 19 nt, Artificial Sequence
  Description of Artificial Sequence: Synthetic oligonucleotide
uuugguccacggggcuuaa

SEQ ID NO: 1062092 - RNA, 19 nt, Artificial Sequence
  Description of Artificial Sequence: Synthetic oligonucleotide
  modified_base (3)..(3): a, c, u, g, unknown or other
gcncaaaaucauccgggau

SEQ ID NO: 1062093 - RNA, 19 nt, Artificial Sequence
  Description of Artificial Sequence: Synthetic oligonucleotide
cagaucaggagcagacauu

SEQ ID NO: 1062094 - RNA, 19 nt, Artificial Sequence
  Description of Artificial Sequence: Synthetic oligonucleotide
auuaggcaacagacucaaa

SEQ ID NO: 1062095 - RNA, 19 nt, Artificial Sequence
  Description of Artificial Sequence: Synthetic oligonucleotide
ggcuaaccuugauuguaua

SEQ ID NO: 1062096 - RNA, 19 nt, Artificial Sequence
  Description of Artificial Sequence: Synthetic oligonucleotide
cugagaagugucggaacau

SEQ ID NO: 1062097 - RNA, 19 nt, Artificial Sequence
  Description of Artificial Sequence: Synthetic oligonucleotide
cuuguguuauuaggcuuau

SEQ ID NO: 1062098 - RNA, 19 nt, Artificial Sequence
  Description of Artificial Sequence: Synthetic oligonucleotide
gcauuaacuggaagaaguu

SEQ ID NO: 1062099 - RNA, 19 nt, Artificial Sequence
  Description of Artificial Sequence: Synthetic oligonucleotide
ccaauugcgcacaccuugu

SEQ ID NO: 1062100 - RNA, 19 nt, Artificial Sequence
  Description of Artificial Sequence: Synthetic oligonucleotide
cugugacuuuaacccuuua

SEQ ID NO: 1062101 - RNA, 19 nt, Artificial Sequence
  Description of Artificial Sequence: Synthetic oligonucleotide
gugucggaacauggcaagu

SEQ ID NO: 1062102 - RNA, 19 nt, Artificial Sequence
  Description of Artificial Sequence: Synthetic oligonucleotide
gccacgauauauugucauu

SEQ ID NO: 1062103 - RNA, 19 nt, Artificial Sequence
  Description of Artificial Sequence: Synthetic oligonucleotide
ggagaccaguugaaauacu

SEQ ID NO: 1062104 - RNA, 19 nt, Artificial Sequence
  Description of Artificial Sequence: Synthetic oligonucleotide
gggcuaaccuugauuguau

SEQ ID NO: 1062105 - RNA, 19 nt, Artificial Sequence
  Description of Artificial Sequence: Synthetic oligonucleotide
cccuucuuacugugcugca

SEQ ID NO: 1062106 - RNA, 19 nt, Artificial Sequence
  Description of Artificial Sequence: Synthetic oligonucleotide
cacggggcuuaaucccugu

SEQ ID NO: 1062107 - RNA, 19 nt, Artificial Sequence
  Description of Artificial Sequence: Synthetic oligonucleotide
cguauucaacuucuggcuu

SEQ ID NO: 1062108 - RNA, 19 nt, Artificial Sequence
  Description of Artificial Sequence: Synthetic oligonucleotide
cgcacaccuuguguuauua

SEQ ID NO: 1062109 - RNA, 19 nt, Artificial Sequence
  Description of Artificial Sequence: Synthetic oligonucleotide
gcgcacaccuuguguuauu

SEQ ID NO: 1062110 - RNA, 19 nt, Artificial Sequence
  Description of Artificial Sequence: Synthetic oligonucleotide
  modified_base (1)..(1): a, c, u, g, unknown or other
ngguaaagcaggagacguu

SEQ ID NO: 1062111 - RNA, 19 nt, Artificial Sequence
  Description of Artificial Sequence: Synthetic oligonucleotide
aaauuaauaguacaggcag

SEQ ID NO: 1062112 - RNA, 19 nt, Artificial Sequence
  Description of Artificial Sequence: Synthetic oligonucleotide
uuuuguauaagcuuggugc

SEQ ID NO: 1062113 - RNA, 19 nt, Artificial Sequence
  Description of Artificial Sequence: Synthetic oligonucleotide
acauacagaauguauaugc

SEQ ID NO: 1062114 - RNA, 19 nt, Artificial Sequence
  Description of Artificial Sequence: Synthetic oligonucleotide
gauaagaacacaaaacucg

SEQ ID NO: 1062115 - RNA, 19 nt, Artificial Sequence
  Description of Artificial Sequence: Synthetic oligonucleotide
uaaguuaucguucucauga

SEQ ID NO: 1062116 - RNA, 19 nt, Artificial Sequence
  Description of Artificial Sequence: Synthetic oligonucleotide
aauuaauggacgcagugag

SEQ ID NO: 1062117 - RNA, 19 nt, Artificial Sequence
  Description of Artificial Sequence: Synthetic oligonucleotide
uuaucaaaagaaaauagcu

SEQ ID NO: 1062118 - RNA, 19 nt, Artificial Sequence
  Description of Artificial Sequence: Synthetic oligonucleotide
uguuauauaagcaaauuaa

SEQ ID NO: 1062119 - RNA, 19 nt, Artificial Sequence
  Description of Artificial Sequence: Synthetic oligonucleotide
aaugguaacacuugaaaga

SEQ ID NO: 1062120 - RNA, 19 nt, Artificial Sequence
  Description of Artificial Sequence: Synthetic oligonucleotide
cucaguagcaccauaaugg

SEQ ID NO: 1062121 - RNA, 19 nt, Artificial Sequence
  Description of Artificial Sequence: Synthetic oligonucleotide
uaucuaaauacacaggugu

SEQ ID NO: 1062122 - RNA, 19 nt, Artificial Sequence
  Description of Artificial Sequence: Synthetic oligonucleotide
ugugauaagaacacaaaac

SEQ ID NO: 1062123 - RNA, 19 nt, Artificial Sequence
  Description of Artificial Sequence: Synthetic oligonucleotide
aucaaauaaaauaacuggc

SEQ ID NO: 1062124 - RNA, 19 nt, Artificial Sequence
  Description of Artificial Sequence: Synthetic oligonucleotide
ugaguauaaauuaagccac

SEQ ID NO: 1062125 - RNA, 19 nt, Artificial Sequence
  Description of Artificial Sequence: Synthetic oligonucleotide
gguaacuuaaacuuaacag

SEQ ID NO: 1062126 - RNA, 19 nt, Artificial Sequence
  Description of Artificial Sequence: Synthetic oligonucleotide
aaauugaggagguuaggag

SEQ ID NO: 1062127 - RNA, 19 nt, Artificial Sequence
  Description of Artificial Sequence: Synthetic oligonucleotide
aauuaagccacauuucuau

SEQ ID NO: 1062128 - RNA, 19 nt, Artificial Sequence
  Description of Artificial Sequence: Synthetic oligonucleotide
uuacgugggaaauuaauag

SEQ ID NO: 1062129 - RNA, 19 nt, Artificial Sequence
  Description of Artificial Sequence: Synthetic oligonucleotide
aggaguugagaauggaucc

SEQ ID NO: 1062130 - RNA, 19 nt, Artificial Sequence
  Description of Artificial Sequence: Synthetic oligonucleotide
aaccacuucucuccaagcc

SEQ ID NO: 1062131 - RNA, 19 nt, Artificial Sequence
  Description of Artificial Sequence: Synthetic oligonucleotide
auauaagcaaauuaaugga

SEQ ID NO: 1062132 - RNA, 19 nt, Artificial Sequence
  Description of Artificial Sequence: Synthetic oligonucleotide
cugaauagaaacuuucaag

SEQ ID NO: 1062133 - RNA, 19 nt, Artificial Sequence
  Description of Artificial Sequence: Synthetic oligonucleotide
aguccgagcagcuaaacuc

SEQ ID NO: 1062134 - RNA, 19 nt, Artificial Sequence
  Description of Artificial Sequence: Synthetic oligonucleotide
aauaguacaggcaguauug

SEQ ID NO: 1062135 - RNA, 19 nt, Artificial Sequence
  Description of Artificial Sequence: Synthetic oligonucleotide
uaguuaauaaucacauuca

SEQ ID NO: 1062136 - RNA, 19 nt, Artificial Sequence
  Description of Artificial Sequence: Synthetic oligonucleotide
uaucugacggccaugaggu

SEQ ID NO: 1062137 - RNA, 19 nt, Artificial Sequence
  Description of Artificial Sequence: Synthetic oligonucleotide
uguauaugcauugugauua

SEQ ID NO: 1062138 - RNA, 19 nt, Artificial Sequence
  Description of Artificial Sequence: Synthetic oligonucleotide
cauuacugaacacaacugg

SEQ ID NO: 1062139 - RNA, 19 nt, Artificial Sequence
  Description of Artificial Sequence: Synthetic oligonucleotide
aacucgcuugaguuggugc

SEQ ID NO: 1062140 - RNA, 19 nt, Artificial Sequence
  Description of Artificial Sequence: Synthetic oligonucleotide
uguucugugauaagaacac

SEQ ID NO: 1062141 - RNA, 19 nt, Artificial Sequence
  Description of Artificial Sequence: Synthetic oligonucleotide
uaaaauaacuggcacuagu

SEQ ID NO: 1062142 - RNA, 19 nt, Artificial Sequence
  Description of Artificial Sequence: Synthetic oligonucleotide
gugauuaacgucuacaaga

SEQ ID NO: 1062143 - RNA, 19 nt, Artificial Sequence
  Description of Artificial Sequence: Synthetic oligonucleotide
aaacuuaacagucgcacau

SEQ ID NO: 1062144 - RNA, 19 nt, Artificial Sequence
  Description of Artificial Sequence: Synthetic oligonucleotide
aauggauccggccauggcu

SEQ ID NO: 1062145 - RNA, 19 nt, Artificial Sequence
  Description of Artificial Sequence: Synthetic oligonucleotide
uucuaucuaaauacacagg

SEQ ID NO: 1062146 - RNA, 19 nt, Artificial Sequence
  Description of Artificial Sequence: Synthetic oligonucleotide
aaggugggguaucugacgg

SEQ ID NO: 1062147 - RNA, 19 nt, Artificial Sequence
  Description of Artificial Sequence: Synthetic oligonucleotide
ugauaagaacacaaaacuc

SEQ ID NO: 1062148 - RNA, 19 nt, Artificial Sequence
  Description of Artificial Sequence: Synthetic oligonucleotide
uuaaacuuaacagucgcac

SEQ ID NO: 1062149 - RNA, 19 nt, Artificial Sequence
  Description of Artificial Sequence: Synthetic oligonucleotide
ucaaacucgcuugaguugg

SEQ ID NO: 1062150 - RNA, 19 nt, Artificial Sequence
  Description of Artificial Sequence: Synthetic oligonucleotide
auaagcuuggugcaagcuc

SEQ ID NO: 1062151 - RNA, 19 nt, Artificial Sequence
  Description of Artificial Sequence: Synthetic oligonucleotide
ucuauacaucccuuagugg

SEQ ID NO: 1062152 - RNA, 19 nt, Artificial Sequence
  Description of Artificial Sequence: Synthetic oligonucleotide
cugagugugucuuugguag

SEQ ID NO: 1062153 - RNA, 19 nt, Artificial Sequence
  Description of Artificial Sequence: Synthetic oligonucleotide
aaugcucggcuaaacauac

SEQ ID NO: 1062154 - RNA, 19 nt, Artificial Sequence
  Description of Artificial Sequence: Synthetic oligonucleotide
agcaccauaaugguaacac

SEQ ID NO: 1062155 - RNA, 19 nt, Artificial Sequence
  Description of Artificial Sequence: Synthetic oligonucleotide
uugaguguuauuacucugc

SEQ ID NO: 1062156 - RNA, 19 nt, Artificial Sequence
  Description of Artificial Sequence: Synthetic oligonucleotide
aguguucugugauaagaac

SEQ ID NO: 1062157 - RNA, 19 nt, Artificial Sequence
  Description of Artificial Sequence: Synthetic oligonucleotide
caugguuugaaaagauagg

SEQ ID NO: 1062158 - RNA, 19 nt, Artificial Sequence
  Description of Artificial Sequence: Synthetic oligonucleotide
ugugacaaucacuggagcc

SEQ ID NO: 1062159 - RNA, 19 nt, Artificial Sequence
  Description of Artificial Sequence: Synthetic oligonucleotide
ugcucggcuaaacauacag

SEQ ID NO: 1062160 - RNA, 19 nt, Artificial Sequence
  Description of Artificial Sequence: Synthetic oligonucleotide
uugaaacaguucaccaugg

SEQ ID NO: 1062161 - RNA, 19 nt, Artificial Sequence
  Description of Artificial Sequence: Synthetic oligonucleotide
auaaugguaacacuugaaa

SEQ ID NO: 1062162 - RNA, 19 nt, Artificial Sequence
  Description of Artificial Sequence: Synthetic oligonucleotide
acuuaacagucgcacaugg

SEQ ID NO: 1062163 - RNA, 19 nt, Artificial Sequence
  Description of Artificial Sequence: Synthetic oligonucleotide
ugguaacuuaaacuuaaca

SEQ ID NO: 1062164 - RNA, 19 nt, Artificial Sequence
  Description of Artificial Sequence: Synthetic oligonucleotide
acagacggcauacugucac

SEQ ID NO: 1062165 - RNA, 19 nt, Artificial Sequence
  Description of Artificial Sequence: Synthetic oligonucleotide
uugguuauuauuugcuucu

SEQ ID NO: 1062166 - RNA, 19 nt, Artificial Sequence
  Description of Artificial Sequence: Synthetic oligonucleotide
augggccuaaauuucaguc

SEQ ID NO: 1062167 - RNA, 19 nt, Artificial Sequence
  Description of Artificial Sequence: Synthetic oligonucleotide
ugauuaacgucuacaagaa

SEQ ID NO: 1062168 - RNA, 19 nt, Artificial Sequence
  Description of Artificial Sequence: Synthetic oligonucleotide
uuucuuaaguuaucguucu

SEQ ID NO: 1062169 - RNA, 19 nt, Artificial Sequence
  Description of Artificial Sequence: Synthetic oligonucleotide
guaacuuaaacuuaacagu

SEQ ID NO: 1062170 - RNA, 19 nt, Artificial Sequence
  Description of Artificial Sequence: Synthetic oligonucleotide
ucuuaaguuaucguucuca

SEQ ID NO: 1062171 - RNA, 19 nt, Artificial Sequence
  Description of Artificial Sequence: Synthetic oligonucleotide
gugggaaucggcuacagac

SEQ ID NO: 1062172 - RNA, 19 nt, Artificial Sequence
  Description of Artificial Sequence: Synthetic oligonucleotide
aaagaaacccgaagguggg

SEQ ID NO: 1062173 - RNA, 19 nt, Artificial Sequence
  Description of Artificial Sequence: Synthetic oligonucleotide
cuuuuaaugcgucaccuuc

SEQ ID NO: 1062174 - RNA, 19 nt, Artificial Sequence
  Description of Artificial Sequence: Synthetic oligonucleotide
ugggaaucggcuacagacg

SEQ ID NO: 1062175 - RNA, 19 nt, Artificial Sequence
  Description of Artificial Sequence: Synthetic oligonucleotide
uaauaguacaggcaguauu

SEQ ID NO: 1062176 - RNA, 19 nt, Artificial Sequence
  Description of Artificial Sequence: Synthetic oligonucleotide
caugagguuagucugccag

SEQ ID NO: 1062177 - RNA, 19 nt, Artificial Sequence
  Description of Artificial Sequence: Synthetic oligonucleotide
agguuaggagacugcagcc

SEQ ID NO: 1062178 - RNA, 19 nt, Artificial Sequence
  Description of Artificial Sequence: Synthetic oligonucleotide
cuacacgacguucucaugc

SEQ ID NO: 1062179 - RNA, 19 nt, Artificial Sequence
  Description of Artificial Sequence: Synthetic oligonucleotide
uuacuaaagccugagugug

SEQ ID NO: 1062180 - RNA, 19 nt, Artificial Sequence
  Description of Artificial Sequence: Synthetic oligonucleotide
ugugguagcacagcguuag

SEQ ID NO: 1062181 - RNA, 19 nt, Artificial Sequence
  Description of Artificial Sequence: Synthetic oligonucleotide
uaaacuuaacagucgcaca

SEQ ID NO: 1062182 - RNA, 19 nt, Artificial Sequence
  Description of Artificial Sequence: Synthetic oligonucleotide
auugaggagguuaggagac

SEQ ID NO: 1062183 - RNA, 19 nt, Artificial Sequence
  Description of Artificial Sequence: Synthetic oligonucleotide
guuaauaaucacauucaug

SEQ ID NO: 1062184 - RNA, 19 nt, Artificial Sequence
  Description of Artificial Sequence: Synthetic oligonucleotide
uucccguuaugcuagcucc

SEQ ID NO: 1062185 - RNA, 19 nt, Artificial Sequence
  Description of Artificial Sequence: Synthetic oligonucleotide
uaugcuagcuccagcuaag

SEQ ID NO: 1062186 - RNA, 19 nt, Artificial Sequence
  Description of Artificial Sequence: Synthetic oligonucleotide
uuaugcuagcuccagcuaa

SEQ ID NO: 1062187 - RNA, 19 nt, Artificial Sequence
  Description of Artificial Sequence: Synthetic oligonucleotide
uuauuacucugcagcauca

SEQ ID NO: 1062188 - RNA, 19 nt, Artificial Sequence
  Description of Artificial Sequence: Synthetic oligonucleotide
cuaucuaaauacacaggug

SEQ ID NO: 1062189 - RNA, 19 nt, Artificial Sequence
  Description of Artificial Sequence: Synthetic oligonucleotide
uuuaaugcgucaccuucac

SEQ ID NO: 1062190 - RNA, 19 nt, Artificial Sequence
  Description of Artificial Sequence: Synthetic oligonucleotide
uccguuucauaauuuggug

SEQ ID NO: 1062191 - RNA, 19 nt, Artificial Sequence
  Description of Artificial Sequence: Synthetic oligonucleotide
uuaaguuaucguucucaug

SEQ ID NO: 1062192 - RNA, 19 nt, Artificial Sequence
  Description of Artificial Sequence: Synthetic oligonucleotide
uguugaaacaguucaccau

SEQ ID NO: 1062193 - RNA, 19 nt, Artificial Sequence
  Description of Artificial Sequence: Synthetic oligonucleotide
aaacaaugcucggcuaaac

SEQ ID NO: 1062194 - RNA, 19 nt, Artificial Sequence
  Description of Artificial Sequence: Synthetic oligonucleotide
uaaagccuccguuucauaa

SEQ ID NO: 1062195 - RNA, 19 nt, Artificial Sequence
  Description of Artificial Sequence: Synthetic oligonucleotide
aacagucgcacauggcuca

SEQ ID NO: 1062196 - RNA, 19 nt, Artificial Sequence
  Description of Artificial Sequence: Synthetic oligonucleotide
guuauuacucugcagcauc

SEQ ID NO: 1062197 - RNA, 19 nt, Artificial Sequence
  Description of Artificial Sequence: Synthetic oligonucleotide
ucuaccucaggaagggugu

SEQ ID NO: 1062198 - RNA, 19 nt, Artificial Sequence
  Description of Artificial Sequence: Synthetic oligonucleotide
uacgugggaaauuaauagu

SEQ ID NO: 1062199 - RNA, 19 nt, Artificial Sequence
  Description of Artificial Sequence: Synthetic oligonucleotide
guuaucguucucaugauga

SEQ ID NO: 1062200 - RNA, 19 nt, Artificial Sequence
  Description of Artificial Sequence: Synthetic oligonucleotide
gaaauugaggagguuagga

SEQ ID NO: 1062201 - RNA, 19 nt, Artificial Sequence
  Description of Artificial Sequence: Synthetic oligonucleotide
uuaucacucacuguuccca

SEQ ID NO: 1062202 - RNA, 19 nt, Artificial Sequence
  Description of Artificial Sequence: Synthetic oligonucleotide
ccagcuaaggccauggugc

SEQ ID NO: 1062203 - RNA, 19 nt, Artificial Sequence
  Description of Artificial Sequence: Synthetic oligonucleotide
uggugauuaacgucuacaa

SEQ ID NO: 1062204 - RNA, 19 nt, Artificial Sequence
  Description of Artificial Sequence: Synthetic oligonucleotide
agcaucaugggccuaaauu

SEQ ID NO: 1062205 - RNA, 19 nt, Artificial Sequence
  Description of Artificial Sequence: Synthetic oligonucleotide
aagcgggugugacaaucac

SEQ ID NO: 1062206 - RNA, 19 nt, Artificial Sequence
  Description of Artificial Sequence: Synthetic oligonucleotide
aauuaauaguacaggcagu

SEQ ID NO: 1062207 - RNA, 19 nt, Artificial Sequence
  Description of Artificial Sequence: Synthetic oligonucleotide
uaguguuauauaagcaaau

SEQ ID NO: 1062208 - RNA, 19 nt, Artificial Sequence
  Description of Artificial Sequence: Synthetic oligonucleotide
aaauagcucaguagcacca

SEQ ID NO: 1062209 - RNA, 19 nt, Artificial Sequence
  Description of Artificial Sequence: Synthetic oligonucleotide
gggaaauuaauaguacagg

SEQ ID NO: 1062210 - RNA, 19 nt, Artificial Sequence
  Description of Artificial Sequence: Synthetic oligonucleotide
guacaggcaguauuggggc

SEQ ID NO: 1062211 - RNA, 19 nt, Artificial Sequence
  Description of Artificial Sequence: Synthetic oligonucleotide
ugauuaugaaccuggcuuu

SEQ ID NO: 1062212 - RNA, 19 nt, Artificial Sequence
  Description of Artificial Sequence: Synthetic oligonucleotide
cuugcacucaagcugccag

SEQ ID NO: 1062213 - RNA, 19 nt, Artificial Sequence
  Description of Artificial Sequence: Synthetic oligonucleotide
acacugauguggugaauuc

SEQ ID NO: 1062214 - RNA, 19 nt, Artificial Sequence
  Description of Artificial Sequence: Synthetic oligonucleotide
uuacacacucauuacugaa

SEQ ID NO: 1062215 - RNA, 19 nt, Artificial Sequence
  Description of Artificial Sequence: Synthetic oligonucleotide
uagcacagcguuaguauca

SEQ ID NO: 1062216 - RNA, 19 nt, Artificial Sequence
  Description of Artificial Sequence: Synthetic oligonucleotide
uucuuuuaaugcgucaccu

SEQ ID NO: 1062217 - RNA, 19 nt, Artificial Sequence
  Description of Artificial Sequence: Synthetic oligonucleotide
gaauauccuccauaaacaa

SEQ ID NO: 1062218 - RNA, 19 nt, Artificial Sequence
  Description of Artificial Sequence: Synthetic oligonucleotide
uuugaaaagauagguuaaa

SEQ ID NO: 1062219 - RNA, 19 nt, Artificial Sequence
  Description of Artificial Sequence: Synthetic oligonucleotide
aaagccuccguuucauaau

SEQ ID NO: 1062220 - RNA, 19 nt, Artificial Sequence
  Description of Artificial Sequence: Synthetic oligonucleotide
guuaguaucauaugaguau

SEQ ID NO: 1062221 - RNA, 19 nt, Artificial Sequence
  Description of Artificial Sequence: Synthetic oligonucleotide
gagguuauguaacauuaaa

SEQ ID NO: 1062222 - RNA, 19 nt, Artificial Sequence
  Description of Artificial Sequence: Synthetic oligonucleotide
aacacaacuggaaugcaaa

SEQ ID NO: 1062223 - RNA, 19 nt, Artificial Sequence
  Description of Artificial Sequence: Synthetic oligonucleotide
uuucauguaugcuguuuac

SEQ ID NO: 1062224 - RNA, 19 nt, Artificial Sequence
  Description of Artificial Sequence: Synthetic oligonucleotide
cuacagacggcauacuguc

SEQ ID NO: 1062225 - RNA, 19 nt, Artificial Sequence
  Description of Artificial Sequence: Synthetic oligonucleotide
auuaauaguacaggcagua

SEQ ID NO: 1062226 - RNA, 19 nt, Artificial Sequence
  Description of Artificial Sequence: Synthetic oligonucleotide
guugaguguuauuacucug

SEQ ID NO: 1062227 - RNA, 19 nt, Artificial Sequence
  Description of Artificial Sequence: Synthetic oligonucleotide
ugggccuaaauuucagucu

SEQ ID NO: 1062228 - RNA, 19 nt, Artificial Sequence
  Description of Artificial Sequence: Synthetic oligonucleotide
agguuagucugccaggaga

SEQ ID NO: 1062229 - RNA, 19 nt, Artificial Sequence
  Description of Artificial Sequence: Synthetic oligonucleotide
cuaguguuauauaagcaaa

SEQ ID NO: 1062230 - RNA, 19 nt, Artificial Sequence
  Description of Artificial Sequence: Synthetic oligonucleotide
uuaggagacugcagccggg

SEQ ID NO: 1062231 - RNA, 19 nt, Artificial Sequence
  Description of Artificial Sequence: Synthetic oligonucleotide
aguuaucguucucaugaug

SEQ ID NO: 1062232 - RNA, 19 nt, Artificial Sequence
  Description of Artificial Sequence: Synthetic oligonucleotide
ugagugugucuuugguagg

SEQ ID NO: 1062233 - RNA, 19 nt, Artificial Sequence
  Description of Artificial Sequence: Synthetic oligonucleotide
agcguuaguaucauaugag

SEQ ID NO: 1062234 - RNA, 19 nt, Artificial Sequence
  Description of Artificial Sequence: Synthetic oligonucleotide
aauggacgcagugaggaaa

SEQ ID NO: 1062235 - RNA, 19 nt, Artificial Sequence
  Description of Artificial Sequence: Synthetic oligonucleotide
acugagacugcaccguucu

SEQ ID NO: 1062236 - RNA, 19 nt, Artificial Sequence
  Description of Artificial Sequence: Synthetic oligonucleotide
uaagccacauuucuaucua

SEQ ID NO: 1062237 - RNA, 19 nt, Artificial Sequence
  Description of Artificial Sequence: Synthetic oligonucleotide
uggagugggaaucggcuac

SEQ ID NO: 1062238 - RNA, 19 nt, Artificial Sequence
  Description of Artificial Sequence: Synthetic oligonucleotide
gcacuaguguuauauaagc

SEQ ID NO: 1062239 - RNA, 19 nt, Artificial Sequence
  Description of Artificial Sequence: Synthetic oligonucleotide
aggaaauugaggagguuag

SEQ ID NO: 1062240 - RNA, 19 nt, Artificial Sequence
  Description of Artificial Sequence: Synthetic oligonucleotide
ugagaauggauccggccau

SEQ ID NO: 1062241 - RNA, 19 nt, Artificial Sequence
  Description of Artificial Sequence: Synthetic oligonucleotide
guguuauauaagcaaauua

SEQ ID NO: 1062242 - RNA, 19 nt, Artificial Sequence
  Description of Artificial Sequence: Synthetic oligonucleotide
acacucauuacugaacaca

SEQ ID NO: 1062243 - RNA, 19 nt, Artificial Sequence
  Description of Artificial Sequence: Synthetic oligonucleotide
uaugaaccuggcuuuugcu

SEQ ID NO: 1062244 - RNA, 19 nt, Artificial Sequence
  Description of Artificial Sequence: Synthetic oligonucleotide
cuuaacagucgcacauggc

SEQ ID NO: 1062245 - RNA, 19 nt, Artificial Sequence
  Description of Artificial Sequence: Synthetic oligonucleotide
acagcguuaguaucauaug

SEQ ID NO: 1062246 - RNA, 19 nt, Artificial Sequence
  Description of Artificial Sequence: Synthetic oligonucleotide
gugauuaugaaccuggcuu

SEQ ID NO: 1062247 - RNA, 19 nt, Artificial Sequence
  Description of Artificial Sequence: Synthetic oligonucleotide
aacuuaacagucgcacaug

SEQ ID NO: 1062248 - RNA, 19 nt, Artificial Sequence
  Description of Artificial Sequence: Synthetic oligonucleotide
ggugauuaacgucuacaag

SEQ ID NO: 1062249 - RNA, 19 nt, Artificial Sequence
  Description of Artificial Sequence: Synthetic oligonucleotide
uaagaacacaaaacucgau

SEQ ID NO: 1062250 - RNA, 19 nt, Artificial Sequence
  Description of Artificial Sequence: Synthetic oligonucleotide
acggcauacugucacugag

SEQ ID NO: 1062251 - RNA, 19 nt, Artificial Sequence
  Description of Artificial Sequence: Synthetic oligonucleotide
augacuacacgacguucuc

SEQ ID NO: 1062252 - RNA, 19 nt, Artificial Sequence
  Description of Artificial Sequence: Synthetic oligonucleotide
uccuuaagagugugguagc

SEQ ID NO: 1062253 - RNA, 19 nt, Artificial Sequence
  Description of Artificial Sequence: Synthetic oligonucleotide
auucgguccaugugacuuc

SEQ ID NO: 1062254 - RNA, 19 nt, Artificial Sequence
  Description of Artificial Sequence: Synthetic oligonucleotide
acugagguuauguaacauu

SEQ ID NO: 1062255 - RNA, 19 nt, Artificial Sequence
  Description of Artificial Sequence: Synthetic oligonucleotide
uaucguucucaugaugaug

SEQ ID NO: 1062256 - RNA, 19 nt, Artificial Sequence
  Description of Artificial Sequence: Synthetic oligonucleotide
aaguuaucguucucaugau

SEQ ID NO: 1062257 - RNA, 19 nt, Artificial Sequence
  Description of Artificial Sequence: Synthetic oligonucleotide
gggaaucggcuacagacgg

SEQ ID NO: 1062258 - RNA, 19 nt, Artificial Sequence
  Description of Artificial Sequence: Synthetic oligonucleotide
uuaaugcgucaccuucacc

SEQ ID NO: 1062259 - RNA, 19 nt, Artificial Sequence
  Description of Artificial Sequence: Synthetic oligonucleotide
acucgcuugaguuggugcu

SEQ ID NO: 1062260 - RNA, 19 nt, Artificial Sequence
  Description of Artificial Sequence: Synthetic oligonucleotide
aacgucuacaagaaacaau

SEQ ID NO: 1062261 - RNA, 19 nt, Artificial Sequence
  Description of Artificial Sequence: Synthetic oligonucleotide
cugagguuauguaacauua

SEQ ID NO: 1062262 - RNA, 19 nt, Artificial Sequence
  Description of Artificial Sequence: Synthetic oligonucleotide
cuuaaacuuaacagucgca

SEQ ID NO: 1062263 - RNA, 19 nt, Artificial Sequence
  Description of Artificial Sequence: Synthetic oligonucleotide
aagaaacccgaaggugggg

SEQ ID NO: 1062264 - RNA, 19 nt, Artificial Sequence
  Description of Artificial Sequence: Synthetic oligonucleotide
aguguuauauaagcaaauu

SEQ ID NO: 1062265 - RNA, 19 nt, Artificial Sequence
  Description of Artificial Sequence: Synthetic oligonucleotide
ugcacucuuaaagccuccg

SEQ ID NO: 1062266 - RNA, 19 nt, Artificial Sequence
  Description of Artificial Sequence: Synthetic oligonucleotide
gacgcagugaggaaauuga

SEQ ID NO: 1062267 - RNA, 19 nt, Artificial Sequence
  Description of Artificial Sequence: Synthetic oligonucleotide
gcugcggaacuccagaacc

SEQ ID NO: 1062268 - RNA, 19 nt, Artificial Sequence
  Description of Artificial Sequence: Synthetic oligonucleotide
ugccuauucgguccaugug

SEQ ID NO: 1062269 - RNA, 19 nt, Artificial Sequence
  Description of Artificial Sequence: Synthetic oligonucleotide
aguauaaauuaagccacau

SEQ ID NO: 1062270 - RNA, 19 nt, Artificial Sequence
  Description of Artificial Sequence: Synthetic oligonucleotide
uugguaggcgaauacuuuu

SEQ ID NO: 1062271 - RNA, 19 nt, Artificial Sequence
  Description of Artificial Sequence: Synthetic oligonucleotide
guaucauaugaguauaaau

SEQ ID NO: 1062272 - RNA, 19 nt, Artificial Sequence
  Description of Artificial Sequence: Synthetic oligonucleotide
guauaagcuuggugcaagc

SEQ ID NO: 1062273 - RNA, 19 nt, Artificial Sequence
  Description of Artificial Sequence: Synthetic oligonucleotide
uuaucguucucaugaugau

SEQ ID NO: 1062274 - RNA, 19 nt, Artificial Sequence
  Description of Artificial Sequence: Synthetic oligonucleotide
cugacggccaugagguuag

SEQ ID NO: 1062275 - RNA, 19 nt, Artificial Sequence
  Description of Artificial Sequence: Synthetic oligonucleotide
agaguuacgugggaaauua

SEQ ID NO: 1062276 - RNA, 19 nt, Artificial Sequence
  Description of Artificial Sequence: Synthetic oligonucleotide
aagccuccguuucauaauu

SEQ ID NO: 1062277 - RNA, 19 nt, Artificial Sequence
  Description of Artificial Sequence: Synthetic oligonucleotide
agguuauguaacauuaaau

SEQ ID NO: 1062278 - RNA, 19 nt, Artificial Sequence
  Description of Artificial Sequence: Synthetic oligonucleotide
ucuuuuaaugcgucaccuu

SEQ ID NO: 1062279 - RNA, 19 nt, Artificial Sequence
  Description of Artificial Sequence: Synthetic oligonucleotide
cugcggaacuccagaaccg

SEQ ID NO: 1062280 - RNA, 19 nt, Artificial Sequence
  Description of Artificial Sequence: Synthetic oligonucleotide
guaugcuguuuacacacuc

SEQ ID NO: 1062281 - RNA, 19 nt, Artificial Sequence
  Description of Artificial Sequence: Synthetic oligonucleotide
acgacguucucaugcucuc

SEQ ID NO: 1062282 - RNA, 19 nt, Artificial Sequence
  Description of Artificial Sequence: Synthetic oligonucleotide
cauaaugguaacacuugaa

SEQ ID NO: 1062283 - RNA, 19 nt, Artificial Sequence
  Description of Artificial Sequence: Synthetic oligonucleotide
uauaugcauugugauuaug

SEQ ID NO: 1062284 - RNA, 19 nt, Artificial Sequence
  Description of Artificial Sequence: Synthetic oligonucleotide
ucggcuacagacggcauac

SEQ ID NO: 1062285 - RNA, 19 nt, Artificial Sequence
  Description of Artificial Sequence: Synthetic oligonucleotide
agaaacuuucaaguccaca

SEQ ID NO: 1062286 - RNA, 19 nt, Artificial Sequence
  Description of Artificial Sequence: Synthetic oligonucleotide
uguuauuacucugcagcau

SEQ ID NO: 1062287 - RNA, 19 nt, Artificial Sequence
  Description of Artificial Sequence: Synthetic oligonucleotide
cagcguuaguaucauauga

SEQ ID NO: 1062288 - RNA, 19 nt, Artificial Sequence
  Description of Artificial Sequence: Synthetic oligonucleotide
accuuuuguauaagcuugg

SEQ ID NO: 1062289 - RNA, 19 nt, Artificial Sequence
  Description of Artificial Sequence: Synthetic oligonucleotide
aggagaguuacgugggaaa

SEQ ID NO: 1062290 - RNA, 19 nt, Artificial Sequence
  Description of Artificial Sequence: Synthetic oligonucleotide
uaacgucuacaagaaacaa

SEQ ID NO: 1062291 - RNA, 19 nt, Artificial Sequence
  Description of Artificial Sequence: Synthetic oligonucleotide
guagcacagcguuaguauc

SEQ ID NO: 1062292 - RNA, 19 nt, Artificial Sequence
  Description of Artificial Sequence: Synthetic oligonucleotide
ggugcuggcauuaucacuc

SEQ ID NO: 1062293 - RNA, 19 nt, Artificial Sequence
  Description of Artificial Sequence: Synthetic oligonucleotide
uuagucugccaggagaguu

SEQ ID NO: 1062294 - RNA, 19 nt, Artificial Sequence
  Description of Artificial Sequence: Synthetic oligonucleotide
auggcgcuuccugacagac

SEQ ID NO: 1062295 - RNA, 19 nt, Artificial Sequence
  Description of Artificial Sequence: Synthetic oligonucleotide
aguucaccauggcgcuucc

SEQ ID NO: 1062296 - RNA, 19 nt, Artificial Sequence
  Description of Artificial Sequence: Synthetic oligonucleotide
gguuagucugccaggagag

SEQ ID NO: 1062297 - RNA, 19 nt, Artificial Sequence
  Description of Artificial Sequence: Synthetic oligonucleotide
gggccuaaauuucagucug

SEQ ID NO: 1062298 - RNA, 19 nt, Artificial Sequence
  Description of Artificial Sequence: Synthetic oligonucleotide
guuacgugggaaauuaaua

SEQ ID NO: 1062299 - RNA, 19 nt, Artificial Sequence
  Description of Artificial Sequence: Synthetic oligonucleotide
cauugugauuaugaaccug

SEQ ID NO: 1062300 - RNA, 19 nt, Artificial Sequence
  Description of Artificial Sequence: Synthetic oligonucleotide
aaagcgggugugacaauca

SEQ ID NO: 1062301 - RNA, 19 nt, Artificial Sequence
  Description of Artificial Sequence: Synthetic oligonucleotide
aguuacgugggaaauuaau

SEQ ID NO: 1062302 - RNA, 19 nt, Artificial Sequence
  Description of Artificial Sequence: Synthetic oligonucleotide
uaaagccugagugugucuu

SEQ ID NO: 1062303 - RNA, 19 nt, Artificial Sequence
  Description of Artificial Sequence: Synthetic oligonucleotide
gcucaguagcaccauaaug

SEQ ID NO: 1062304 - RNA, 19 nt, Artificial Sequence
  Description of Artificial Sequence: Synthetic oligonucleotide
acucagguugucucucaug

SEQ ID NO: 1062305 - RNA, 19 nt, Artificial Sequence
  Description of Artificial Sequence: Synthetic oligonucleotide
cugguaacuuaaacuuaac

SEQ ID NO: 1062306 - RNA, 19 nt, Artificial Sequence
  Description of Artificial Sequence: Synthetic oligonucleotide
aacugagguuauguaacau

SEQ ID NO: 1062307 - RNA, 19 nt, Artificial Sequence
  Description of Artificial Sequence: Synthetic oligonucleotide
aauagcucaguagcaccau

SEQ ID NO: 1062308 - RNA, 19 nt, Artificial Sequence
  Description of Artificial Sequence: Synthetic oligonucleotide
aagccugagugugucuuug

SEQ ID NO: 1062309 - RNA, 19 nt, Artificial Sequence
  Description of Artificial Sequence: Synthetic oligonucleotide
ucugacggccaugagguua

SEQ ID NO: 1062310 - RNA, 19 nt, Artificial Sequence
  Description of Artificial Sequence: Synthetic oligonucleotide
cugggcauccaaaugucca

SEQ ID NO: 1062311 - RNA, 19 nt, Artificial Sequence
  Description of Artificial Sequence: Synthetic oligonucleotide
ccuccguuucauaauuugg

SEQ ID NO: 1062312 - RNA, 19 nt, Artificial Sequence
  Description of Artificial Sequence: Synthetic oligonucleotide
cuucccguuaugcuagcuc

SEQ ID NO: 1062313 - RNA, 19 nt, Artificial Sequence
  Description of Artificial Sequence: Synthetic oligonucleotide
aaagccugagugugucuuu

SEQ ID NO: 1062314 - RNA, 19 nt, Artificial Sequence
  Description of Artificial Sequence: Synthetic oligonucleotide
ggcauuaucacucacuguu

SEQ ID NO: 1062315 - RNA, 19 nt, Artificial Sequence
  Description of Artificial Sequence: Synthetic oligonucleotide
ggaguugagaauggauccg

SEQ ID NO: 1062316 - RNA, 19 nt, Artificial Sequence
  Description of Artificial Sequence: Synthetic oligonucleotide
agaaacccgaagguggggu

SEQ ID NO: 1062317 - RNA, 19 nt, Artificial Sequence
  Description of Artificial Sequence: Synthetic oligonucleotide
uacagacggcauacuguca

SEQ ID NO: 1062318 - RNA, 19 nt, Artificial Sequence
  Description of Artificial Sequence: Synthetic oligonucleotide
gauuaacgucuacaagaaa

SEQ ID NO: 1062319 - RNA, 19 nt, Artificial Sequence
  Description of Artificial Sequence: Synthetic oligonucleotide
cugucacugagggacgggg

SEQ ID NO: 1062320 - RNA, 19 nt, Artificial Sequence
  Description of Artificial Sequence: Synthetic oligonucleotide
gaguauaaauuaagccaca

SEQ ID NO: 1062321 - RNA, 19 nt, Artificial Sequence
  Description of Artificial Sequence: Synthetic oligonucleotide
ccacuugcacucaagcugc

SEQ ID NO: 1062322 - RNA, 19 nt, Artificial Sequence
  Description of Artificial Sequence: Synthetic oligonucleotide
agggacggggccucaaacu

SEQ ID NO: 1062323 - RNA, 19 nt, Artificial Sequence
  Description of Artificial Sequence: Synthetic oligonucleotide
gcagcuaaacucagaaaag

SEQ ID NO: 1062324 - RNA, 19 nt, Artificial Sequence
  Description of Artificial Sequence: Synthetic oligonucleotide
gcaccguucuuucugaaca

SEQ ID NO: 1062325 - RNA, 19 nt, Artificial Sequence
  Description of Artificial Sequence: Synthetic oligonucleotide
ugggguaucugacggccau

SEQ ID NO: 1062326 - RNA, 19 nt, Artificial Sequence
  Description of Artificial Sequence: Synthetic oligonucleotide
cacagcguuaguaucauau

SEQ ID NO: 1062327 - RNA, 19 nt, Artificial Sequence
  Description of Artificial Sequence: Synthetic oligonucleotide
caugacuacacgacguucu

SEQ ID NO: 1062328 - RNA, 19 nt, Artificial Sequence
  Description of Artificial Sequence: Synthetic oligonucleotide
caaagcgggugugacaauc

SEQ ID NO: 1062329 - RNA, 19 nt, Artificial Sequence
  Description of Artificial Sequence: Synthetic oligonucleotide
gacuacacgacguucucau

SEQ ID NO: 1062330 - RNA, 19 nt, Artificial Sequence
  Description of Artificial Sequence: Synthetic oligonucleotide
aacccgaaggugggguauc

SEQ ID NO: 1062331 - RNA, 19 nt, Artificial Sequence
  Description of Artificial Sequence: Synthetic oligonucleotide
ggaaauugaggagguuagg

SEQ ID NO: 1062332 - RNA, 19 nt, Artificial Sequence
  Description of Artificial Sequence: Synthetic oligonucleotide
ugacuacacgacguucuca

SEQ ID NO: 1062333 - RNA, 19 nt, Artificial Sequence
  Description of Artificial Sequence: Synthetic oligonucleotide
gugaauucuccagacgguc

SEQ ID NO: 1062334 - RNA, 19 nt, Artificial Sequence
  Description of Artificial Sequence: Synthetic oligonucleotide
gggugugacaaucacugga

SEQ ID NO: 1062335 - RNA, 19 nt, Artificial Sequence
  Description of Artificial Sequence: Synthetic oligonucleotide
uaauggacgcagugaggaa

SEQ ID NO: 1062336 - RNA, 19 nt, Artificial Sequence
  Description of Artificial Sequence: Synthetic oligonucleotide
cagaccuuuuguauaagcu

SEQ ID NO: 1062337 - RNA, 19 nt, Artificial Sequence
  Description of Artificial Sequence: Synthetic oligonucleotide
ucccguuaugcuagcucca

SEQ ID NO: 1062338 - RNA, 19 nt, Artificial Sequence
  Description of Artificial Sequence: Synthetic oligonucleotide
ccacgguuuuccuuaagag

SEQ ID NO: 1062339 - RNA, 19 nt, Artificial Sequence
  Description of Artificial Sequence: Synthetic oligonucleotide
gccuauucgguccauguga

SEQ ID NO: 1062340 - RNA, 19 nt, Artificial Sequence
  Description of Artificial Sequence: Synthetic oligonucleotide
acuacacgacguucucaug

SEQ ID NO: 1062341 - RNA, 19 nt, Artificial Sequence
  Description of Artificial Sequence: Synthetic oligonucleotide
caaugcucggcuaaacaua

SEQ ID NO: 1062342 - RNA, 19 nt, Artificial Sequence
  Description of Artificial Sequence: Synthetic oligonucleotide
aggguguucacagucgcaa

SEQ ID NO: 1062343 - RNA, 19 nt, Artificial Sequence
  Description of Artificial Sequence: Synthetic oligonucleotide
ugacaaucacuggagccau

SEQ ID NO: 1062344 - RNA, 19 nt, Artificial Sequence
  Description of Artificial Sequence: Synthetic oligonucleotide
gagggacggggccucaaac

SEQ ID NO: 1062345 - RNA, 19 nt, Artificial Sequence
  Description of Artificial Sequence: Synthetic oligonucleotide
aaacccgaaggugggguau

SEQ ID NO: 1062346 - RNA, 19 nt, Artificial Sequence
  Description of Artificial Sequence: Synthetic oligonucleotide
uuauuucauguaugcuguu

SEQ ID NO: 1062347 - RNA, 19 nt, Artificial Sequence
  Description of Artificial Sequence: Synthetic oligonucleotide
agacggcauacugucacug

SEQ ID NO: 1062348 - RNA, 19 nt, Artificial Sequence
  Description of Artificial Sequence: Synthetic oligonucleotide
ugucucacucagguugucu

SEQ ID NO: 1062349 - RNA, 19 nt, Artificial Sequence
  Description of Artificial Sequence: Synthetic oligonucleotide
gguugucucucauggugcc

SEQ ID NO: 1062350 - RNA, 19 nt, Artificial Sequence
  Description of Artificial Sequence: Synthetic oligonucleotide
cuuaaguuaucguucucau

SEQ ID NO: 1062351 - RNA, 19 nt, Artificial Sequence
  Description of Artificial Sequence: Synthetic oligonucleotide
uuaaagccuccguuucaua

SEQ ID NO: 1062352 - RNA, 19 nt, Artificial Sequence
  Description of Artificial Sequence: Synthetic oligonucleotide
gacggcauacugucacuga

SEQ ID NO: 1062353 - RNA, 19 nt, Artificial Sequence
  Description of Artificial Sequence: Synthetic oligonucleotide
caugugacuuccacuugca

SEQ ID NO: 1062354 - RNA, 19 nt, Artificial Sequence
  Description of Artificial Sequence: Synthetic oligonucleotide
cacuucucuccaagccacg

SEQ ID NO: 1062355 - RNA, 19 nt, Artificial Sequence
  Description of Artificial Sequence: Synthetic oligonucleotide
ugguagcacagcguuagua

SEQ ID NO: 1062356 - RNA, 19 nt, Artificial Sequence
  Description of Artificial Sequence: Synthetic oligonucleotide
ucgcaaagcgggugugaca

SEQ ID NO: 1062357 - RNA, 19 nt, Artificial Sequence
  Description of Artificial Sequence: Synthetic oligonucleotide
accucaggaaggguguuca

SEQ ID NO: 1062358 - RNA, 19 nt, Artificial Sequence
  Description of Artificial Sequence: Synthetic oligonucleotide
uaacuggcacuaguguuau

SEQ ID NO: 1062359 - RNA, 19 nt, Artificial Sequence
  Description of Artificial Sequence: Synthetic oligonucleotide
gacguucucaugcucucua

SEQ ID NO: 1062360 - RNA, 19 nt, Artificial Sequence
  Description of Artificial Sequence: Synthetic oligonucleotide
uaaguccgagcagcuaaac

SEQ ID NO: 1062361 - RNA, 19 nt, Artificial Sequence
  Description of Artificial Sequence: Synthetic oligonucleotide
agccaugacuacacgacgu

SEQ ID NO: 1062362 - RNA, 19 nt, Artificial Sequence
  Description of Artificial Sequence: Synthetic oligonucleotide
caccauaaugguaacacuu

SEQ ID NO: 1062363 - RNA, 19 nt, Artificial Sequence
  Description of Artificial Sequence: Synthetic oligonucleotide
augcuagcuccagcuaagg

SEQ ID NO: 1062364 - RNA, 19 nt, Artificial Sequence
  Description of Artificial Sequence: Synthetic oligonucleotide
caccauggcgcuuccugac

SEQ ID NO: 1062365 - RNA, 19 nt, Artificial Sequence
  Description of Artificial Sequence: Synthetic oligonucleotide
augcacucuuaaagccucc

SEQ ID NO: 1062366 - RNA, 19 nt, Artificial Sequence
  Description of Artificial Sequence: Synthetic oligonucleotide
ugcagccggggacauuuuc

SEQ ID NO: 1062367 - RNA, 19 nt, Artificial Sequence
  Description of Artificial Sequence: Synthetic oligonucleotide
ugcuggcauuaucacucac

SEQ ID NO: 1062368 - RNA, 19 nt, Artificial Sequence
  Description of Artificial Sequence: Synthetic oligonucleotide
acugucacugagggacggg

SEQ ID NO: 1062369 - RNA, 19 nt, Artificial Sequence
  Description of Artificial Sequence: Synthetic oligonucleotide
ccuauucgguccaugugac

SEQ ID NO: 1062370 - RNA, 19 nt, Artificial Sequence
  Description of Artificial Sequence: Synthetic oligonucleotide
ugagggacggggccucaaa

SEQ ID NO: 1062371 - RNA, 19 nt, Artificial Sequence
  Description of Artificial Sequence: Synthetic oligonucleotide
gagcagcuaaacucagaaa

SEQ ID NO: 1062372 - RNA, 19 nt, Artificial Sequence
  Description of Artificial Sequence: Synthetic oligonucleotide
acgcagugaggaaauugag

SEQ ID NO: 1062373 - RNA, 19 nt, Artificial Sequence
  Description of Artificial Sequence: Synthetic oligonucleotide
cgugggaaauuaauaguac

SEQ ID NO: 1062374 - RNA, 19 nt, Artificial Sequence
  Description of Artificial Sequence: Synthetic oligonucleotide
accauggcgcuuccugaca

SEQ ID NO: 1062375 - RNA, 19 nt, Artificial Sequence
  Description of Artificial Sequence: Synthetic oligonucleotide
aaggguguucacagucgca

SEQ ID NO: 1062376 - RNA, 19 nt, Artificial Sequence
  Description of Artificial Sequence: Synthetic oligonucleotide
guccgagcagcuaaacuca

SEQ ID NO: 1062377 - RNA, 19 nt, Artificial Sequence
  Description of Artificial Sequence: Synthetic oligonucleotide
guuaugcuagcuccagcua

SEQ ID NO: 1062378 - RNA, 19 nt, Artificial Sequence
  Description of Artificial Sequence: Synthetic oligonucleotide
aucggcuacagacggcaua

SEQ ID NO: 1062379 - RNA, 19 nt, Artificial Sequence
  Description of Artificial Sequence: Synthetic oligonucleotide
cacugagacugcaccguuc

SEQ ID NO: 1062380 - RNA, 19 nt, Artificial Sequence
  Description of Artificial Sequence: Synthetic oligonucleotide
cuugaguuggugcucugcu

SEQ ID NO: 1062381 - RNA, 19 nt, Artificial Sequence
  Description of Artificial Sequence: Synthetic oligonucleotide
cacuguucccaagcucacg

SEQ ID NO: 1062382 - RNA, 19 nt, Artificial Sequence
  Description of Artificial Sequence: Synthetic oligonucleotide
gcugguaacuuaaacuuaa

SEQ ID NO: 1062383 - RNA, 19 nt, Artificial Sequence
  Description of Artificial Sequence: Synthetic oligonucleotide
caguucaccauggcgcuuc

SEQ ID NO: 1062384 - RNA, 19 nt, Artificial Sequence
  Description of Artificial Sequence: Synthetic oligonucleotide
gcuugugucagcugaauau

SEQ ID NO: 1062385 - RNA, 19 nt, Artificial Sequence
  Description of Artificial Sequence: Synthetic oligonucleotide
uggcuuuugcugguaacuu

SEQ ID NO: 1062386 - RNA, 19 nt, Artificial Sequence
  Description of Artificial Sequence: Synthetic oligonucleotide
gagugggaaucggcuacag

SEQ ID NO: 1062387 - RNA, 19 nt, Artificial Sequence
  Description of Artificial Sequence: Synthetic oligonucleotide
auacaucccuuagugguuu

SEQ ID NO: 1062388 - RNA, 19 nt, Artificial Sequence
  Description of Artificial Sequence: Synthetic oligonucleotide
gaaacccgaagguggggua

SEQ ID NO: 1062389 - RNA, 19 nt, Artificial Sequence
  Description of Artificial Sequence: Synthetic oligonucleotide
ccguuucauaauuugguga

SEQ ID NO: 1062390 - RNA, 19 nt, Artificial Sequence
  Description of Artificial Sequence: Synthetic oligonucleotide
ggacgcagugaggaaauug

SEQ ID NO: 1062391 - RNA, 19 nt, Artificial Sequence
  Description of Artificial Sequence: Synthetic oligonucleotide
gguagcacagcguuaguau

SEQ ID NO: 1062392 - RNA, 19 nt, Artificial Sequence
  Description of Artificial Sequence: Synthetic oligonucleotide
gucgcaaagcgggugugac

SEQ ID NO: 1062393 - RNA, 19 nt, Artificial Sequence
  Description of Artificial Sequence: Synthetic oligonucleotide
uuucuaccucaggaagggu

SEQ ID NO: 1062394 - RNA, 19 nt, Artificial Sequence
  Description of Artificial Sequence: Synthetic oligonucleotide
guucugugauaagaacaca

SEQ ID NO: 1062395 - RNA, 19 nt, Artificial Sequence
  Description of Artificial Sequence: Synthetic oligonucleotide
uccagacggucauuuucua

SEQ ID NO: 1062396 - RNA, 19 nt, Artificial Sequence
  Description of Artificial Sequence: Synthetic oligonucleotide
gacuucccguuaugcuagc

SEQ ID NO: 1062397 - RNA, 19 nt, Artificial Sequence
  Description of Artificial Sequence: Synthetic oligonucleotide
gccacgguuuuccuuaaga

SEQ ID NO: 1062398 - RNA, 19 nt, Artificial Sequence
  Description of Artificial Sequence: Synthetic oligonucleotide
acguucucaugcucucuaa

SEQ ID NO: 1062399 - RNA, 19 nt, Artificial Sequence
  Description of Artificial Sequence: Synthetic oligonucleotide
cucauggugccuauucggu

SEQ ID NO: 1062400 - RNA, 19 nt, Artificial Sequence
  Description of Artificial Sequence: Synthetic oligonucleotide
ugguuauuauuugcuucuu

SEQ ID NO: 1062401 - RNA, 19 nt, Artificial Sequence
  Description of Artificial Sequence: Synthetic oligonucleotide
cuuggugcaagcucugcau

SEQ ID NO: 1062402 - RNA, 19 nt, Artificial Sequence
  Description of Artificial Sequence: Synthetic oligonucleotide
gugccgugauccucugcag

SEQ ID NO: 1062403 - RNA, 19 nt, Artificial Sequence
  Description of Artificial Sequence: Synthetic oligonucleotide
aagccacgguuuuccuuaa

SEQ ID NO: 1062404 - RNA, 19 nt, Artificial Sequence
  Description of Artificial Sequence: Synthetic oligonucleotide
gggacggggccucaaacuc

SEQ ID NO: 1062405 - RNA, 19 nt, Artificial Sequence
  Description of Artificial Sequence: Synthetic oligonucleotide
uugcacuuccacugcuguu

SEQ ID NO: 1062406 - RNA, 19 nt, Artificial Sequence
  Description of Artificial Sequence: Synthetic oligonucleotide
cuaaggccauggugcuggc

SEQ ID NO: 1062407 - RNA, 19 nt, Artificial Sequence
  Description of Artificial Sequence: Synthetic oligonucleotide
cacuugcacucaagcugcc

SEQ ID NO: 1062408 - RNA, 19 nt, Artificial Sequence
  Description of Artificial Sequence: Synthetic oligonucleotide
auggauccggccauggcuu

SEQ ID NO: 1062409 - RNA, 19 nt, Artificial Sequence
  Description of Artificial Sequence: Synthetic oligonucleotide
cacgacguucucaugcucu

SEQ ID NO: 1062410 - RNA, 19 nt, Artificial Sequence
  Description of Artificial Sequence: Synthetic oligonucleotide
acaucccuuagugguuuca

SEQ ID NO: 1062411 - RNA, 19 nt, Artificial Sequence
  Description of Artificial Sequence: Synthetic oligonucleotide
ugucucucauggugccuau

SEQ ID NO: 1062412 - RNA, 19 nt, Artificial Sequence
  Description of Artificial Sequence: Synthetic oligonucleotide
agcacagcguuaguaucau

SEQ ID NO: 1062413 - RNA, 19 nt, Artificial Sequence
  Description of Artificial Sequence: Synthetic oligonucleotide
cuugcacuuccacugcugu

SEQ ID NO: 1062414 - RNA, 19 nt, Artificial Sequence
  Description of Artificial Sequence: Synthetic oligonucleotide
agccacgguuuuccuuaag

SEQ ID NO: 1062415 - RNA, 19 nt, Artificial Sequence
  Description of Artificial Sequence: Synthetic oligonucleotide
ggacggggccucaaacucg

SEQ ID NO: 1062416 - RNA, 19 nt, Artificial Sequence
  Description of Artificial Sequence: Synthetic oligonucleotide
auggacgcagugaggaaau

SEQ ID NO: 1062417 - RNA, 19 nt, Artificial Sequence
  Description of Artificial Sequence: Synthetic oligonucleotide
uggugccgugauccucugc

SEQ ID NO: 1062418 - RNA, 19 nt, Artificial Sequence
  Description of Artificial Sequence: Synthetic oligonucleotide
gugccuauucgguccaugu

SEQ ID NO: 1062419 - RNA, 19 nt, Artificial Sequence
  Description of Artificial Sequence: Synthetic oligonucleotide
gcguuaguaucauaugagu

SEQ ID NO: 1062420 - RNA, 19 nt, Artificial Sequence
  Description of Artificial Sequence: Synthetic oligonucleotide
agucgcaaagcggguguga

SEQ ID NO: 1062421 - RNA, 19 nt, Artificial Sequence
  Description of Artificial Sequence: Synthetic oligonucleotide
cacauggcucauccagcuc

SEQ ID NO: 1062422 - RNA, 19 nt, Artificial Sequence
  Description of Artificial Sequence: Synthetic oligonucleotide
cacggugccggacucucca

SEQ ID NO: 1062423 - RNA, 19 nt, Artificial Sequence
  Description of Artificial Sequence: Synthetic oligonucleotide
gcagccggggacauuuucc

SEQ ID NO: 1062424 - RNA, 19 nt, Artificial Sequence
  Description of Artificial Sequence: Synthetic oligonucleotide
guauaugcauugugauuau

SEQ ID NO: 1062425 - RNA, 19 nt, Artificial Sequence
  Description of Artificial Sequence: Synthetic oligonucleotide
cacucuuaaagccuccguu

SEQ ID NO: 1062426 - RNA, 19 nt, Artificial Sequence
  Description of Artificial Sequence: Synthetic oligonucleotide
cguuaguaucauaugagua

SEQ ID NO: 1062427 - RNA, 19 nt, Artificial Sequence
  Description of Artificial Sequence: Synthetic oligonucleotide
gcauuaucacucacuguuc

SEQ ID NO: 1062428 - RNA, 19 nt, Artificial Sequence
  Description of Artificial Sequence: Synthetic oligonucleotide
cgaaggugggguaucugac

SEQ ID NO: 1062429 - RNA, 19 nt, Artificial Sequence
  Description of Artificial Sequence: Synthetic oligonucleotide
aaucggcuacagacggcau

SEQ ID NO: 1062430 - RNA, 19 nt, Artificial Sequence
  Description of Artificial Sequence: Synthetic oligonucleotide
ggcuaaacauacagaaugu

SEQ ID NO: 1062431 - RNA, 19 nt, Artificial Sequence
  Description of Artificial Sequence: Synthetic oligonucleotide
ggcugcggaacuccagaac

SEQ ID NO: 1062432 - RNA, 19 nt, Artificial Sequence
  Description of Artificial Sequence: Synthetic oligonucleotide
cacuggagccaugacuaca

SEQ ID NO: 1062433 - RNA, 19 nt, Artificial Sequence
  Description of Artificial Sequence: Synthetic oligonucleotide
acuucccguuaugcuagcu

SEQ ID NO: 1062434 - RNA, 19 nt, Artificial Sequence
  Description of Artificial Sequence: Synthetic oligonucleotide
gacggccaugagguuaguc

SEQ ID NO: 1062435 - RNA, 19 nt, Artificial Sequence
  Description of Artificial Sequence: Synthetic oligonucleotide
cugaugugguugguuauua

SEQ ID NO: 1062436 - RNA, 19 nt, Artificial Sequence
  Description of Artificial Sequence: Synthetic oligonucleotide
gaguuacgugggaaauuaa

SEQ ID NO: 1062437 - RNA, 19 nt, Artificial Sequence
  Description of Artificial Sequence: Synthetic oligonucleotide
ggguaucugacggccauga

SEQ ID NO: 1062438 - RNA, 19 nt, Artificial Sequence
  Description of Artificial Sequence: Synthetic oligonucleotide
aacuggcacuaguguuaua

SEQ ID NO: 1062439 - RNA, 19 nt, Artificial Sequence
  Description of Artificial Sequence: Synthetic oligonucleotide
ccggaagcagguuuggaaa

SEQ ID NO: 1062440 - RNA, 19 nt, Artificial Sequence
  Description of Artificial Sequence: Synthetic oligonucleotide
caggagaguuacgugggaa

SEQ ID NO: 1062441 - RNA, 19 nt, Artificial Sequence
  Description of Artificial Sequence: Synthetic oligonucleotide
ggaaucggcuacagacggc

SEQ ID NO: 1062442 - RNA, 19 nt, Artificial Sequence
  Description of Artificial Sequence: Synthetic oligonucleotide
caucccuuagugguuucaa

SEQ ID NO: 1062443 - RNA, 19 nt, Artificial Sequence
  Description of Artificial Sequence: Synthetic oligonucleotide
cauggcgcuuccugacaga

SEQ ID NO: 1062444 - RNA, 19 nt, Artificial Sequence
  Description of Artificial Sequence: Synthetic oligonucleotide
gucugaugugguugguuau

SEQ ID NO: 1062445 - RNA, 19 nt, Artificial Sequence
  Description of Artificial Sequence: Synthetic oligonucleotide
cuaaagccugagugugucu

SEQ ID NO: 1062446 - RNA, 19 nt, Artificial Sequence
  Description of Artificial Sequence: Synthetic oligonucleotide
ggugccuauucgguccaug

SEQ ID NO: 1062447 - RNA, 19 nt, Artificial Sequence
  Description of Artificial Sequence: Synthetic oligonucleotide
ccguuaugcuagcuccagc

SEQ ID NO: 1062448 - RNA, 19 nt, Artificial Sequence
  Description of Artificial Sequence: Synthetic oligonucleotide
cagucgcaaagcgggugug

SEQ ID NO: 1062449 - RNA, 19 nt, Artificial Sequence
  Description of Artificial Sequence: Synthetic oligonucleotide
cguuaugcuagcuccagcu

SEQ ID NO: 1062450 - RNA, 19 nt, Artificial Sequence
  Description of Artificial Sequence: Synthetic oligonucleotide
acccgaaggugggguaucu

SEQ ID NO: 1062451 - RNA, 19 nt, Artificial Sequence
  Description of Artificial Sequence: Synthetic oligonucleotide
ccaaacaaggcuguugagu

SEQ ID NO: 1062452 - RNA, 19 nt, Artificial Sequence
  Description of Artificial Sequence: Synthetic oligonucleotide
ggugaauucuccagacggu

SEQ ID NO: 1062453 - RNA, 19 nt, Artificial Sequence
  Description of Artificial Sequence: Synthetic oligonucleotide
ccaugacuacacgacguuc

SEQ ID NO: 1062454 - RNA, 19 nt, Artificial Sequence
  Description of Artificial Sequence: Synthetic oligonucleotide
gcaccauaaugguaacacu

SEQ ID NO: 1062455 - RNA, 19 nt, Artificial Sequence
  Description of Artificial Sequence: Synthetic oligonucleotide
cagccggggacauuuuccu

SEQ ID NO: 1062456 - RNA, 19 nt, Artificial Sequence
  Description of Artificial Sequence: Synthetic oligonucleotide
cuauucgguccaugugacu

SEQ ID NO: 1062457 - RNA, 19 nt, Artificial Sequence
  Description of Artificial Sequence: Synthetic oligonucleotide
cccguuaugcuagcuccag

SEQ ID NO: 1062458 - RNA, 19 nt, Artificial Sequence
  Description of Artificial Sequence: Synthetic oligonucleotide
aucugacggccaugagguu

SEQ ID NO: 1062459 - RNA, 19 nt, Artificial Sequence
  Description of Artificial Sequence: Synthetic oligonucleotide
ggcaguauuggggccaacu

SEQ ID NO: 1062460 - RNA, 19 nt, Artificial Sequence
  Description of Artificial Sequence: Synthetic oligonucleotide
cagcuaaggccauggugcu

SEQ ID NO: 1062461 - RNA, 19 nt, Artificial Sequence
  Description of Artificial Sequence: Synthetic oligonucleotide
ggguguucacagucgcaaa

SEQ ID NO: 1062462 - RNA, 19 nt, Artificial Sequence
  Description of Artificial Sequence: Synthetic oligonucleotide
ggagaguuacgugggaaau

SEQ ID NO: 1062463 - RNA, 19 nt, Artificial Sequence
  Description of Artificial Sequence: Synthetic oligonucleotide
guuagucugccaggagagu

SEQ ID NO: 1062464 - RNA, 19 nt, Artificial Sequence
  Description of Artificial Sequence: Synthetic oligonucleotide
acagucgcacauggcucau

SEQ ID NO: 1062465 - RNA, 19 nt, Artificial Sequence
  Description of Artificial Sequence: Synthetic oligonucleotide
ccccacuccugcuggugcc

SEQ ID NO: 1062466 - RNA, 19 nt, Artificial Sequence
  Description of Artificial Sequence: Synthetic oligonucleotide
ggagugggaaucggcuaca

SEQ ID NO: 1062467 - RNA, 19 nt, Artificial Sequence
  Description of Artificial Sequence: Synthetic oligonucleotide
augcucggcuaaacauaca

SEQ ID NO: 1062468 - RNA, 19 nt, Artificial Sequence
  Description of Artificial Sequence: Synthetic oligonucleotide
uggacgcagugaggaaauu

SEQ ID NO: 1062469 - RNA, 19 nt, Artificial Sequence
  Description of Artificial Sequence: Synthetic oligonucleotide
cugucucacucagguuguc

SEQ ID NO: 1062470 - RNA, 19 nt, Artificial Sequence
  Description of Artificial Sequence: Synthetic oligonucleotide
gcaguauuggggccaacuu

SEQ ID NO: 1062471 - RNA, 19 nt, Artificial Sequence
  Description of Artificial Sequence: Synthetic oligonucleotide
gugggguaucugacggcca

SEQ ID NO: 1062472 - RNA, 19 nt, Artificial Sequence
  Description of Artificial Sequence: Synthetic oligonucleotide
cagacggcauacugucacu

SEQ ID NO: 1062473 - RNA, 19 nt, Artificial Sequence
  Description of Artificial Sequence: Synthetic oligonucleotide
guugucucucauggugccu

SEQ ID NO: 1062474 - RNA, 19 nt, Artificial Sequence
  Description of Artificial Sequence: Synthetic oligonucleotide
caccguucuuucugaacau

SEQ ID NO: 1062475 - RNA, 19 nt, Artificial Sequence
  Description of Artificial Sequence: Synthetic oligonucleotide
gggguaucugacggccaug

SEQ ID NO: 1062476 - RNA, 19 nt, Artificial Sequence
  Description of Artificial Sequence: Synthetic oligonucleotide
gcacucuuaaagccuccgu

SEQ ID NO: 1062477 - RNA, 19 nt, Artificial Sequence
  Description of Artificial Sequence: Synthetic oligonucleotide
caaacucgcuugaguuggu

SEQ ID NO: 1062478 - RNA, 19 nt, Artificial Sequence
  Description of Artificial Sequence: Synthetic oligonucleotide
cucuccaagccacgguuuu

SEQ ID NO: 1062479 - RNA, 19 nt, Artificial Sequence
  Description of Artificial Sequence: Synthetic oligonucleotide
gcaggaguugagaauggau

SEQ ID NO: 1062480 - RNA, 19 nt, Artificial Sequence
  Description of Artificial Sequence: Synthetic oligonucleotide
gccggggacauuuuccuuu

SEQ ID NO: 1062481 - RNA, 19 nt, Artificial Sequence
  Description of Artificial Sequence: Synthetic oligonucleotide
ccugacagacuucccguua

SEQ ID NO: 1062482 - RNA, 19 nt, Artificial Sequence
  Description of Artificial Sequence: Synthetic oligonucleotide
gugguagcacagcguuagu

SEQ ID NO: 1062483 - RNA, 19 nt, Artificial Sequence
  Description of Artificial Sequence: Synthetic oligonucleotide
ugacggccaugagguuagu

SEQ ID NO: 1062484 - RNA, 19 nt, Artificial Sequence
  Description of Artificial Sequence: Synthetic oligonucleotide
gcggaacuccagaaccgga

SEQ ID NO: 1062485 - RNA, 19 nt, Artificial Sequence
  Description of Artificial Sequence: Synthetic oligonucleotide
gccaugacuacacgacguu

SEQ ID NO: 1062486 - RNA, 19 nt, Artificial Sequence
  Description of Artificial Sequence: Synthetic oligonucleotide
ccaugagguuagucugcca

SEQ ID NO: 1062487 - RNA, 19 nt, Artificial Sequence
  Description of Artificial Sequence: Synthetic oligonucleotide
ggacugggcugcggaacuc

SEQ ID NO: 1062488 - RNA, 19 nt, Artificial Sequence
  Description of Artificial Sequence: Synthetic oligonucleotide
cagcaucaugggccuaaau

SEQ ID NO: 1062489 - RNA, 19 nt, Artificial Sequence
  Description of Artificial Sequence: Synthetic oligonucleotide
cuacacugauguggugaau

SEQ ID NO: 1062490 - RNA, 19 nt, Artificial Sequence
  Description of Artificial Sequence: Synthetic oligonucleotide
gcacagcguuaguaucaua

SEQ ID NO: 1062491 - RNA, 19 nt, Artificial Sequence
  Description of Artificial Sequence: Synthetic oligonucleotide
cuaccucaggaaggguguu

SEQ ID NO: 1062492 - RNA, 19 nt, Artificial Sequence
  Description of Artificial Sequence: Synthetic oligonucleotide
gucucucauggugccuauu

SEQ ID NO: 1062493 - RNA, 19 nt, Artificial Sequence
  Description of Artificial Sequence: Synthetic oligonucleotide
gcaaagcgggugugacaau

SEQ ID NO: 1062494 - RNA, 19 nt, Artificial Sequence
  Description of Artificial Sequence: Synthetic oligonucleotide
ccacugagacugcaccguu

SEQ ID NO: 1062495 - RNA, 19 nt, Artificial Sequence
  Description of Artificial Sequence: Synthetic oligonucleotide
cgacguucucaugcucucu

SEQ ID NO: 1062496 - RNA, 19 nt, Artificial Sequence
  Description of Artificial Sequence: Synthetic oligonucleotide
ccagaaccggaagcagguu

SEQ ID NO: 1062497 - RNA, 19 nt, Artificial Sequence
  Description of Artificial Sequence: Synthetic oligonucleotide
uauuugaucauguagacug

SEQ ID NO: 1062498 - RNA, 19 nt, Artificial Sequence
  Description of Artificial Sequence: Synthetic oligonucleotide
aauaggaguccauagggcg

SEQ ID NO: 1062499 - RNA, 19 nt, Artificial Sequence
  Description of Artificial Sequence: Synthetic oligonucleotide
uuauagcugagauaggacg

SEQ ID NO: 1062500 - RNA, 19 nt, Artificial Sequence
  Description of Artificial Sequence: Synthetic oligonucleotide
ugcgaauuggccucgaugg

SEQ ID NO: 1062501 - RNA, 19 nt, Artificial Sequence
  Description of Artificial Sequence: Synthetic oligonucleotide
uccaauucuaaaauacucc

SEQ ID NO: 1062502 - RNA, 19 nt, Artificial Sequence
  Description of Artificial Sequence: Synthetic oligonucleotide
auaaaauaggaguccauag

SEQ ID NO: 1062503 - RNA, 19 nt, Artificial Sequence
  Description of Artificial Sequence: Synthetic oligonucleotide
aaagauaacuuuguauauc

SEQ ID NO: 1062504 - RNA, 19 nt, Artificial Sequence
  Description of Artificial Sequence: Synthetic oligonucleotide
ucauguaaacacucgaccc

SEQ ID NO: 1062505 - RNA, 19 nt, Artificial Sequence
  Description of Artificial Sequence: Synthetic oligonucleotide
aaacacucgaccccacccc

SEQ ID NO: 1062506 - RNA, 19 nt, Artificial Sequence
  Description of Artificial Sequence: Synthetic oligonucleotide
uauagaaugucauguaaac

SEQ ID NO: 1062507 - RNA, 19 nt, Artificial Sequence
  Description of Artificial Sequence: Synthetic oligonucleotide
aagaacauggagccgucgg

SEQ ID NO: 1062508 - RNA, 19 nt, Artificial Sequence
  Description of Artificial Sequence: Synthetic oligonucleotide
uuaaaggccagucuuuugu

SEQ ID NO: 1062509 - RNA, 19 nt, Artificial Sequence
  Description of Artificial Sequence: Synthetic oligonucleotide
aauacuccaaauaguagag

SEQ ID NO: 1062510 - RNA, 19 nt, Artificial Sequence
  Description of Artificial Sequence: Synthetic oligonucleotide
cucaccuagaaacuuauag

SEQ ID NO: 1062511 - RNA, 19 nt, Artificial Sequence
  Description of Artificial Sequence: Synthetic oligonucleotide
aguacugcgaauuggccuc

SEQ ID NO: 1062512 - RNA, 19 nt, Artificial Sequence
  Description of Artificial Sequence: Synthetic oligonucleotide
gacaccaugguguagcagc

SEQ ID NO: 1062513 - RNA, 19 nt, Artificial Sequence
  Description of Artificial Sequence: Synthetic oligonucleotide
ugcucguagaaguagcagg

SEQ ID NO: 1062514 - RNA, 19 nt, Artificial Sequence
  Description of Artificial Sequence: Synthetic oligonucleotide
guagcagccggacagaaag

SEQ ID NO: 1062515 - RNA, 19 nt, Artificial Sequence
  Description of Artificial Sequence: Synthetic oligonucleotide
aaugucauguaaacacucg

SEQ ID NO: 1062516 - RNA, 19 nt, Artificial Sequence
  Description of Artificial Sequence: Synthetic oligonucleotide
uguagacugugaaaucggg

SEQ ID NO: 1062517 - RNA, 19 nt, Artificial Sequence
  Description of Artificial Sequence: Synthetic oligonucleotide
ugaagaacguggaagcgca

SEQ ID NO: 1062518 - RNA, 19 nt, Artificial Sequence
  Description of Artificial Sequence: Synthetic oligonucleotide
aaguacugcgaauuggccu

SEQ ID NO: 1062519 - RNA, 19 nt, Artificial Sequence
  Description of Artificial Sequence: Synthetic oligonucleotide
uaaacacucgaccccaccc

SEQ ID NO: 1062520 - RNA, 19 nt, Artificial Sequence
  Description of Artificial Sequence: Synthetic oligonucleotide
ugguguagcagccggacag

SEQ ID NO: 1062521 - RNA, 19 nt, Artificial Sequence
  Description of Artificial Sequence: Synthetic oligonucleotide
aggcccacgaagcacacgc

SEQ ID NO: 1062522 - RNA, 19 nt, Artificial Sequence
  Description of Artificial Sequence: Synthetic oligonucleotide
acagaauccacccaccaga

SEQ ID NO: 1062523 - RNA, 19 nt, Artificial Sequence
  Description of Artificial Sequence: Synthetic oligonucleotide
gucauguaaacacucgacc

SEQ ID NO: 1062524 - RNA, 19 nt, Artificial Sequence
  Description of Artificial Sequence: Synthetic oligonucleotide
acagaaagaugaugggccg

SEQ ID NO: 1062525 - RNA, 19 nt, Artificial Sequence
  Description of Artificial Sequence: Synthetic oligonucleotide
aaugacgugccgaugaaca

SEQ ID NO: 1062526 - RNA, 19 nt, Artificial Sequence
  Description of Artificial Sequence: Synthetic oligonucleotide
ucuuuagccuuccaauucu

SEQ ID NO: 1062527 - RNA, 19 nt, Artificial Sequence
  Description of Artificial Sequence: Synthetic oligonucleotide
aaauaguagagggaacuga

SEQ ID NO: 1062528 - RNA, 19 nt, Artificial Sequence
  Description of Artificial Sequence: Synthetic oligonucleotide
aaaucgggcgacaugcgcg

SEQ ID NO: 1062529 - RNA, 19 nt, Artificial Sequence
  Description of Artificial Sequence: Synthetic oligonucleotide
ucucauaccggcaaagaua

SEQ ID NO: 1062530 - RNA, 19 nt, Artificial Sequence
  Description of Artificial Sequence: Synthetic oligonucleotide
aaucgggcgacaugcgcgg

SEQ ID NO: 1062531 - RNA, 19 nt, Artificial Sequence
  Description of Artificial Sequence: Synthetic oligonucleotide
gauagugcagcccucuuuc

SEQ ID NO: 1062532 - RNA, 19 nt, Artificial Sequence
  Description of Artificial Sequence: Synthetic oligonucleotide
agaaacaggagagauggug

SEQ ID NO: 1062533 - RNA, 19 nt, Artificial Sequence
  Description of Artificial Sequence: Synthetic oligonucleotide
agcgucaugagguauuuga

SEQ ID NO: 1062534 - RNA, 19 nt, Artificial Sequence
  Description of Artificial Sequence: Synthetic oligonucleotide
cuugugauauagaauguca

SEQ ID NO: 1062535 - RNA, 19 nt, Artificial Sequence
  Description of Artificial Sequence: Synthetic oligonucleotide
gugaaaucgggcgacaugc

SEQ ID NO: 1062536 - RNA, 19 nt, Artificial Sequence
  Description of Artificial Sequence: Synthetic oligonucleotide
uugugauauagaaugucau

SEQ ID NO: 1062537 - RNA, 19 nt, Artificial Sequence
  Description of Artificial Sequence: Synthetic oligonucleotide
acuuauagcugagauagga

SEQ ID NO: 1062538 - RNA, 19 nt, Artificial Sequence
  Description of Artificial Sequence: Synthetic oligonucleotide
aaaacgcgucuccuccugg

SEQ ID NO: 1062539 - RNA, 19 nt, Artificial Sequence
  Description of Artificial Sequence: Synthetic oligonucleotide
aaacgcgucuccuccuggg

SEQ ID NO: 1062540 - RNA, 19 nt, Artificial Sequence
  Description of Artificial Sequence: Synthetic oligonucleotide
ugugaaaucgggcgacaug

SEQ ID NO: 1062541 - RNA, 19 nt, Artificial Sequence
  Description of Artificial Sequence: Synthetic oligonucleotide
accgacaccaugguguagc

SEQ ID NO: 1062542 - RNA, 19 nt, Artificial Sequence
  Description of Artificial Sequence: Synthetic oligonucleotide
uggaaguacugcgaauugg

SEQ ID NO: 1062543 - RNA, 19 nt, Artificial Sequence
  Description of Artificial Sequence: Synthetic oligonucleotide
acauguuagaaacauucua

SEQ ID NO: 1062544 - RNA, 19 nt, Artificial Sequence
  Description of Artificial Sequence: Synthetic oligonucleotide
aggaaugacgugccgauga

SEQ ID NO: 1062545 - RNA, 19 nt, Artificial Sequence
  Description of Artificial Sequence: Synthetic oligonucleotide
ucguagaaguagcaggcga

SEQ ID NO: 1062546 - RNA, 19 nt, Artificial Sequence
  Description of Artificial Sequence: Synthetic oligonucleotide
ugaaaucgggcgacaugcg

SEQ ID NO: 1062547 - RNA, 19 nt, Artificial Sequence
  Description of Artificial Sequence: Synthetic oligonucleotide
ucuggguaccgaaagcgcu

SEQ ID NO: 1062548 - RNA, 19 nt, Artificial Sequence
  Description of Artificial Sequence: Synthetic oligonucleotide
agaaguacagcaucaugaa

SEQ ID NO: 1062549 - RNA, 19 nt, Artificial Sequence
  Description of Artificial Sequence: Synthetic oligonucleotide
gaccagauccagaagcccg

SEQ ID NO: 1062550 - RNA, 19 nt, Artificial Sequence
  Description of Artificial Sequence: Synthetic oligonucleotide
auaggaguccauagggcgc

SEQ ID NO: 1062551 - RNA, 19 nt, Artificial Sequence
  Description of Artificial Sequence: Synthetic oligonucleotide
gaaaucgggcgacaugcgc

SEQ ID NO: 1062552 - RNA, 19 nt, Artificial Sequence
  Description of Artificial Sequence: Synthetic oligonucleotide
ccggacagaaagaugaugg

SEQ ID NO: 1062553 - RNA, 19 nt, Artificial Sequence
  Description of Artificial Sequence: Synthetic oligonucleotide
accgugaagaacguggaag

SEQ ID NO: 1062554 - RNA, 19 nt, Artificial Sequence
  Description of Artificial Sequence: Synthetic oligonucleotide
cacgaugagcgucaugagg

SEQ ID NO: 1062555 - RNA, 19 nt, Artificial Sequence
  Description of Artificial Sequence: Synthetic oligonucleotide
acgcguguaaaacuuccuc

SEQ ID NO: 1062556 - RNA, 19 nt, Artificial Sequence
  Description of Artificial Sequence: Synthetic oligonucleotide
ugagacgcguguaaaacuu

SEQ ID NO: 1062557 - RNA, 19 nt, Artificial Sequence
  Description of Artificial Sequence: Synthetic oligonucleotide
augucauguaaacacucga

SEQ ID NO: 1062558 - RNA, 19 nt, Artificial Sequence
  Description of Artificial Sequence: Synthetic oligonucleotide
aacauucuaucaaucuugu

SEQ ID NO: 1062559 - RNA, 19 nt, Artificial Sequence
  Description of Artificial Sequence: Synthetic oligonucleotide
ugacgugccgaugaacagg

SEQ ID NO: 1062560 - RNA, 19 nt, Artificial Sequence
  Description of Artificial Sequence: Synthetic oligonucleotide
acgagugcagcgucuugcc

SEQ ID NO: 1062561 - RNA, 19 nt, Artificial Sequence
  Description of Artificial Sequence: Synthetic oligonucleotide
ucaggcagcuaacuugaga

SEQ ID NO: 1062562 - RNA, 19 nt, Artificial Sequence
  Description of Artificial Sequence: Synthetic oligonucleotide
cucauaccggcaaagauaa

SEQ ID NO: 1062563 - RNA, 19 nt, Artificial Sequence
  Description of Artificial Sequence: Synthetic oligonucleotide
agacgcguguaaaacuucc

SEQ ID NO: 1062564 - RNA, 19 nt, Artificial Sequence
  Description of Artificial Sequence: Synthetic oligonucleotide
agaagcccgacgugaugcc

SEQ ID NO: 1062565 - RNA, 19 nt, Artificial Sequence
  Description of Artificial Sequence: Synthetic oligonucleotide
uuugacggccggcacggcc

SEQ ID NO: 1062566 - RNA, 19 nt, Artificial Sequence
  Description of Artificial Sequence: Synthetic oligonucleotide
guuuugacggccggcacgg

SEQ ID NO: 1062567 - RNA, 19 nt, Artificial Sequence
  Description of Artificial Sequence: Synthetic oligonucleotide
cuucccgagugaaggaagg

SEQ ID NO: 1062568 - RNA, 19 nt, Artificial Sequence
  Description of Artificial Sequence: Synthetic oligonucleotide
gaagagcggcgccagcacg

SEQ ID NO: 1062569 - RNA, 19 nt, Artificial Sequence
  Description of Artificial Sequence: Synthetic oligonucleotide
agaacguggaagcgcagca

SEQ ID NO: 1062570 - RNA, 19 nt, Artificial Sequence
  Description of Artificial Sequence: Synthetic oligonucleotide
acgaugagcgucaugaggu

SEQ ID NO: 1062571 - RNA, 19 nt, Artificial Sequence
  Description of Artificial Sequence: Synthetic oligonucleotide
auauagaaugucauguaaa

SEQ ID NO: 1062572 - RNA, 19 nt, Artificial Sequence
  Description of Artificial Sequence: Synthetic oligonucleotide
uuuagccuuccaauucuaa

SEQ ID NO: 1062573 - RNA, 19 nt, Artificial Sequence
  Description of Artificial Sequence: Synthetic oligonucleotide
cacaaucgcgcucaccuag

SEQ ID NO: 1062574 - RNA, 19 nt, Artificial Sequence
  Description of Artificial Sequence: Synthetic oligonucleotide
gacgugaugcccacgauga

SEQ ID NO: 1062575 - RNA, 19 nt, Artificial Sequence
  Description of Artificial Sequence: Synthetic oligonucleotide
agagacggggcaaaacgcg

SEQ ID NO: 1062576 - RNA, 19 nt, Artificial Sequence
  Description of Artificial Sequence: Synthetic oligonucleotide
auagggcgcaccccuuccc

SEQ ID NO: 1062577 - RNA, 19 nt, Artificial Sequence
  Description of Artificial Sequence: Synthetic oligonucleotide
aagcgcucguugcacacca

SEQ ID NO: 1062578 - RNA, 19 nt, Artificial Sequence
  Description of Artificial Sequence: Synthetic oligonucleotide
cauguuagaaacauucuau

SEQ ID NO: 1062579 - RNA, 19 nt, Artificial Sequence
  Description of Artificial Sequence: Synthetic oligonucleotide
cucguugcacaccacgcgc

SEQ ID NO: 1062580 - RNA, 19 nt, Artificial Sequence
  Description of Artificial Sequence: Synthetic oligonucleotide
auaggacggcaccuugagg

SEQ ID NO: 1062581 - RNA, 19 nt, Artificial Sequence
  Description of Artificial Sequence: Synthetic oligonucleotide
gaacauggagccgucgggc

SEQ ID NO: 1062582 - RNA, 19 nt, Artificial Sequence
  Description of Artificial Sequence: Synthetic oligonucleotide
caaauaguagagggaacug

SEQ ID NO: 1062583 - RNA, 19 nt, Artificial Sequence
  Description of Artificial Sequence: Synthetic oligonucleotide
augacgugccgaugaacag

SEQ ID NO: 1062584 - RNA, 19 nt, Artificial Sequence
  Description of Artificial Sequence: Synthetic oligonucleotide
agcccucuuucuuggugcc

SEQ ID NO: 1062585 - RNA, 19 nt, Artificial Sequence
  Description of Artificial Sequence: Synthetic oligonucleotide
ugcaccaccgugcgguagc

SEQ ID NO: 1062586 - RNA, 19 nt, Artificial Sequence
  Description of Artificial Sequence: Synthetic oligonucleotide
uucacucccggcugccagg

SEQ ID NO: 1062587 - RNA, 19 nt, Artificial Sequence
  Description of Artificial Sequence: Synthetic oligonucleotide
uagggcgcaccccuucccg

SEQ ID NO: 1062588 - RNA, 19 nt, Artificial Sequence
  Description of Artificial Sequence: Synthetic oligonucleotide
ugagguauuugaucaugua

SEQ ID NO: 1062589 - RNA, 19 nt, Artificial Sequence
  Description of Artificial Sequence: Synthetic oligonucleotide
aaguagcaggcgaugacga

SEQ ID NO: 1062590 - RNA, 19 nt, Artificial Sequence
  Description of Artificial Sequence: Synthetic oligonucleotide
gguuuugacggccggcacg

SEQ ID NO: 1062591 - RNA, 19 nt, Artificial Sequence
  Description of Artificial Sequence: Synthetic oligonucleotide
ggcaaaacgcgucuccucc

SEQ ID NO: 1062592 - RNA, 19 nt, Artificial Sequence
  Description of Artificial Sequence: Synthetic oligonucleotide
guagacugugaaaucgggc

SEQ ID NO: 1062593 - RNA, 19 nt, Artificial Sequence
  Description of Artificial Sequence: Synthetic oligonucleotide
guaaacacucgaccccacc

SEQ ID NO: 1062594 - RNA, 19 nt, Artificial Sequence
  Description of Artificial Sequence: Synthetic oligonucleotide
accggcaaagauaacuuug

SEQ ID NO: 1062595 - RNA, 19 nt, Artificial Sequence
  Description of Artificial Sequence: Synthetic oligonucleotide
agaaagaugaugggccgcu

SEQ ID NO: 1062596 - RNA, 19 nt, Artificial Sequence
  Description of Artificial Sequence: Synthetic oligonucleotide
ugcagcgucuugccggacc

SEQ ID NO: 1062597 - RNA, 19 nt, Artificial Sequence
  Description of Artificial Sequence: Synthetic oligonucleotide
augcggaagagagacacga

SEQ ID NO: 1062598 - RNA, 19 nt, Artificial Sequence
  Description of Artificial Sequence: Synthetic oligonucleotide
augcgcggcguguaguggg

SEQ ID NO: 1062599 - RNA, 19 nt, Artificial Sequence
  Description of Artificial Sequence: Synthetic oligonucleotide
gaugguuuugacggccggc

SEQ ID NO: 1062600 - RNA, 19 nt, Artificial Sequence
  Description of Artificial Sequence: Synthetic oligonucleotide
agagggaacugaugugugu

SEQ ID NO: 1062601 - RNA, 19 nt, Artificial Sequence
  Description of Artificial Sequence: Synthetic oligonucleotide
gaagacgccgaugcgcacc

SEQ ID NO: 1062602 - RNA, 19 nt, Artificial Sequence
  Description of Artificial Sequence: Synthetic oligonucleotide
gauguaggccaccgacacc

SEQ ID NO: 1062603 - RNA, 19 nt, Artificial Sequence
  Description of Artificial Sequence: Synthetic oligonucleotide
cacgaagccggcgauguag

SEQ ID NO: 1062604 - RNA, 19 nt, Artificial Sequence
  Description of Artificial Sequence: Synthetic oligonucleotide
uagcguagcgcggaggcgc

SEQ ID NO: 1062605 - RNA, 19 nt, Artificial Sequence
  Description of Artificial Sequence: Synthetic oligonucleotide
gguagcguagcgcggaggc

SEQ ID NO: 1062606 - RNA, 19 nt, Artificial Sequence
  Description of Artificial Sequence: Synthetic oligonucleotide
uguaaacacucgaccccac

SEQ ID NO: 1062607 - RNA, 19 nt, Artificial Sequence
  Description of Artificial Sequence: Synthetic oligonucleotide
cugcgaauuggccucgaug

SEQ ID NO: 1062608 - RNA, 19 nt, Artificial Sequence
  Description of Artificial Sequence: Synthetic oligonucleotide
uggcuuacccacgagcgcu

SEQ ID NO: 1062609 - RNA, 19 nt, Artificial Sequence
  Description of Artificial Sequence: Synthetic oligonucleotide
gcuggcuuacccacgagcg

SEQ ID NO: 1062610 - RNA, 19 nt, Artificial Sequence
  Description of Artificial Sequence: Synthetic oligonucleotide
gcaaacuuaacccaguuuu

SEQ ID NO: 1062611 - RNA, 19 nt, Artificial Sequence
  Description of Artificial Sequence: Synthetic oligonucleotide
agguacacgaagagcggcg

SEQ ID NO: 1062612 - RNA, 19 nt, Artificial Sequence
  Description of Artificial Sequence: Synthetic oligonucleotide
cuggguaccgaaagcgcug

SEQ ID NO: 1062613 - RNA, 19 nt, Artificial Sequence
  Description of Artificial Sequence: Synthetic oligonucleotide
ucccgagugaaggaaggca

SEQ ID NO: 1062614 - RNA, 19 nt, Artificial Sequence
  Description of Artificial Sequence: Synthetic oligonucleotide
acaugcgcggcguguagug

SEQ ID NO: 1062615 - RNA, 19 nt, Artificial Sequence
  Description of Artificial Sequence: Synthetic oligonucleotide
ucguugcacaccacgcgcu

SEQ ID NO: 1062616 - RNA, 19 nt, Artificial Sequence
  Description of Artificial Sequence: Synthetic oligonucleotide
aacgcgucuccuccuggga

SEQ ID NO: 1062617 - RNA, 19 nt, Artificial Sequence
  Description of Artificial Sequence: Synthetic oligonucleotide
ccgaugcgcaccaugagcc

SEQ ID NO: 1062618 - RNA, 19 nt, Artificial Sequence
  Description of Artificial Sequence: Synthetic oligonucleotide
cacgagugcagcgucuugc

SEQ ID NO: 1062619 - RNA, 19 nt, Artificial Sequence
  Description of Artificial Sequence: Synthetic oligonucleotide
guagagcaccgagaagacg

SEQ ID NO: 1062620 - RNA, 19 nt, Artificial Sequence
  Description of Artificial Sequence: Synthetic oligonucleotide
gacugugaaaucgggcgac

SEQ ID NO: 1062621 - RNA, 19 nt, Artificial Sequence
  Description of Artificial Sequence: Synthetic oligonucleotide
cucggagaagcgcucguug

SEQ ID NO: 1062622 - RNA, 19 nt, Artificial Sequence
  Description of Artificial Sequence: Synthetic oligonucleotide
agaagacgccgaugcgcac

SEQ ID NO: 1062623 - RNA, 19 nt, Artificial Sequence
  Description of Artificial Sequence: Synthetic oligonucleotide
accaccgugcgguagccgu

SEQ ID NO: 1062624 - RNA, 19 nt, Artificial Sequence
  Description of Artificial Sequence: Synthetic oligonucleotide
guggaagcgcagcacagca

SEQ ID NO: 1062625 - RNA, 19 nt, Artificial Sequence
  Description of Artificial Sequence: Synthetic oligonucleotide
uguagcagccggacagaaa

SEQ ID NO: 1062626 - RNA, 19 nt, Artificial Sequence
  Description of Artificial Sequence: Synthetic oligonucleotide
ccgugaagaacguggaagc

SEQ ID NO: 1062627 - RNA, 19 nt, Artificial Sequence
  Description of Artificial Sequence: Synthetic oligonucleotide
accgaaagcgcugcauguc

SEQ ID NO: 1062628 - RNA, 19 nt, Artificial Sequence
  Description of Artificial Sequence: Synthetic oligonucleotide
cauaccggcaaagauaacu

SEQ ID NO: 1062629 - RNA, 19 nt, Artificial Sequence
  Description of Artificial Sequence: Synthetic oligonucleotide
gaggccuucuaaagcaaac

SEQ ID NO: 1062630 - RNA, 19 nt, Artificial Sequence
  Description of Artificial Sequence: Synthetic oligonucleotide
uggugagacgcguguaaaa

SEQ ID NO: 1062631 - RNA, 19 nt, Artificial Sequence
  Description of Artificial Sequence: Synthetic oligonucleotide
cauagggcgcaccccuucc

SEQ ID NO: 1062632 - RNA, 19 nt, Artificial Sequence
  Description of Artificial Sequence: Synthetic oligonucleotide
caaaacgcgucuccuccug

SEQ ID NO: 1062633 - RNA, 19 nt, Artificial Sequence
  Description of Artificial Sequence: Synthetic oligonucleotide
aagcgcugcauguccacua

SEQ ID NO: 1062634 - RNA, 19 nt, Artificial Sequence
  Description of Artificial Sequence: Synthetic oligonucleotide
gaauucucauaccggcaaa

SEQ ID NO: 1062635 - RNA, 19 nt, Artificial Sequence
  Description of Artificial Sequence: Synthetic oligonucleotide
uagugggccgggcacggga

SEQ ID NO: 1062636 - RNA, 19 nt, Artificial Sequence
  Description of Artificial Sequence: Synthetic oligonucleotide
caugguguagcagccggac

SEQ ID NO: 1062637 - RNA, 19 nt, Artificial Sequence
  Description of Artificial Sequence: Synthetic oligonucleotide
gacggcaccuugaggacgc

SEQ ID NO: 1062638 - RNA, 19 nt, Artificial Sequence
  Description of Artificial Sequence: Synthetic oligonucleotide
caaagauaacuuuguauau

SEQ ID NO: 1062639 - RNA, 19 nt, Artificial Sequence
  Description of Artificial Sequence: Synthetic oligonucleotide
ggcgauguaggccaccgac

SEQ ID NO: 1062640 - RNA, 19 nt, Artificial Sequence
  Description of Artificial Sequence: Synthetic oligonucleotide
uccagaagcccgacgugau

SEQ ID NO: 1062641 - RNA, 19 nt, Artificial Sequence
  Description of Artificial Sequence: Synthetic oligonucleotide
cagaaagaugaugggccgc

SEQ ID NO: 1062642 - RNA, 19 nt, Artificial Sequence
  Description of Artificial Sequence: Synthetic oligonucleotide
gaaugacgugccgaugaac

SEQ ID NO: 1062643 - RNA, 19 nt, Artificial Sequence
  Description of Artificial Sequence: Synthetic oligonucleotide
auccagaagcccgacguga

SEQ ID NO: 1062644 - RNA, 19 nt, Artificial Sequence
  Description of Artificial Sequence: Synthetic oligonucleotide
cagguacacgaagagcggc

SEQ ID NO: 1062645 - RNA, 19 nt, Artificial Sequence
  Description of Artificial Sequence: Synthetic oligonucleotide
ucgccgucgaucuggccca

SEQ ID NO: 1062646 - RNA, 19 nt, Artificial Sequence
  Description of Artificial Sequence: Synthetic oligonucleotide
cuggcuuacccacgagcgc

SEQ ID NO: 1062647 - RNA, 19 nt, Artificial Sequence
  Description of Artificial Sequence: Synthetic oligonucleotide
auagugcagcccucuuucu

SEQ ID NO: 1062648 - RNA, 19 nt, Artificial Sequence
  Description of Artificial Sequence: Synthetic oligonucleotide
guuggugagacgcguguaa

SEQ ID NO: 1062649 - RNA, 19 nt, Artificial Sequence
  Description of Artificial Sequence: Synthetic oligonucleotide
uguuagcaacuggaauucu

SEQ ID NO: 1062650 - RNA, 19 nt, Artificial Sequence
  Description of Artificial Sequence: Synthetic oligonucleotide
aagagcggcgccagcacga

SEQ ID NO: 1062651 - RNA, 19 nt, Artificial Sequence
  Description of Artificial Sequence: Synthetic oligonucleotide
ucgcgcucaccuagaaacu

SEQ ID NO: 1062652 - RNA, 19 nt, Artificial Sequence
  Description of Artificial Sequence: Synthetic oligonucleotide
uggguaccgaaagcgcugc

SEQ ID NO: 1062653 - RNA, 19 nt, Artificial Sequence
  Description of Artificial Sequence: Synthetic oligonucleotide
cgcguguaaaacuuccucc

SEQ ID NO: 1062654 - RNA, 19 nt, Artificial Sequence
  Description of Artificial Sequence: Synthetic oligonucleotide
uccgucuuggugccaucgu

SEQ ID NO: 1062655 - RNA, 19 nt, Artificial Sequence
  Description of Artificial Sequence: Synthetic oligonucleotide
ugccgaugaacagguacac

SEQ ID NO: 1062656 - RNA, 19 nt, Artificial Sequence
  Description of Artificial Sequence: Synthetic oligonucleotide
auaccggcaaagauaacuu

SEQ ID NO: 1062657 - RNA, 19 nt, Artificial Sequence
  Description of Artificial Sequence: Synthetic oligonucleotide
uccuccacgagugcagcgu

SEQ ID NO: 1062658 - RNA, 19 nt, Artificial Sequence
  Description of Artificial Sequence: Synthetic oligonucleotide
gcguguaaaacuuccucca

SEQ ID NO: 1062659 - RNA, 19 nt, Artificial Sequence
  Description of Artificial Sequence: Synthetic oligonucleotide
uagcagccggacagaaaga

SEQ ID NO: 1062660 - RNA, 19 nt, Artificial Sequence
  Description of Artificial Sequence: Synthetic oligonucleotide
uuggugagacgcguguaaa

SEQ ID NO: 1062661 - RNA, 19 nt, Artificial Sequence
  Description of Artificial Sequence: Synthetic oligonucleotide
gccggcacgguguagagca

SEQ ID NO: 1062662 - RNA, 19 nt, Artificial Sequence
  Description of Artificial Sequence: Synthetic oligonucleotide
cagggcgcugcacaaucgc

SEQ ID NO: 1062663 - RNA, 19 nt, Artificial Sequence
  Description of Artificial Sequence: Synthetic oligonucleotide
cuugccggaccagauccag

SEQ ID NO: 1062664 - RNA, 19 nt, Artificial Sequence
  Description of Artificial Sequence: Synthetic oligonucleotide
uucccgagugaaggaaggc

SEQ ID NO: 1062665 - RNA, 19 nt, Artificial Sequence
  Description of Artificial Sequence: Synthetic oligonucleotide
gcggaugcggaagagagac

SEQ ID NO: 1062666 - RNA, 19 nt, Artificial Sequence
  Description of Artificial Sequence: Synthetic oligonucleotide
uaccggcaaagauaacuuu

SEQ ID NO: 1062667 - RNA, 19 nt, Artificial Sequence
  Description of Artificial Sequence: Synthetic oligonucleotide
acgaagagcggcgccagca

SEQ ID NO: 1062668 - RNA, 19 nt, Artificial Sequence
  Description of Artificial Sequence: Synthetic oligonucleotide
cuaucaaucuugugauaua

SEQ ID NO: 1062669 - RNA, 19 nt, Artificial Sequence
  Description of Artificial Sequence: Synthetic oligonucleotide
ggaaccaggugagggacag

SEQ ID NO: 1062670 - RNA, 19 nt, Artificial Sequence
  Description of Artificial Sequence: Synthetic oligonucleotide
gguguagagcaccgagaag

SEQ ID NO: 1062671 - RNA, 19 nt, Artificial Sequence
  Description of Artificial Sequence: Synthetic oligonucleotide
acagcaccgaccgggugag

SEQ ID NO: 1062672 - RNA, 19 nt, Artificial Sequence
  Description of Artificial Sequence: Synthetic oligonucleotide
ucguggccccauuucacuc

SEQ ID NO: 1062673 - RNA, 19 nt, Artificial Sequence
  Description of Artificial Sequence: Synthetic oligonucleotide
agcgcggaggcgcgccacc

SEQ ID NO: 1062674 - RNA, 19 nt, Artificial Sequence
  Description of Artificial Sequence: Synthetic oligonucleotide
gaagaacguggaagcgcag

SEQ ID NO: 1062675 - RNA, 19 nt, Artificial Sequence
  Description of Artificial Sequence: Synthetic oligonucleotide
aagcccgacgugaugccca

SEQ ID NO: 1062676 - RNA, 19 nt, Artificial Sequence
  Description of Artificial Sequence: Synthetic oligonucleotide
agcccgacgugaugcccac

SEQ ID NO: 1062677 - RNA, 19 nt, Artificial Sequence
  Description of Artificial Sequence: Synthetic oligonucleotide
gaagcccgacgugaugccc

SEQ ID NO: 1062678 - RNA, 19 nt, Artificial Sequence
  Description of Artificial Sequence: Synthetic oligonucleotide
agcagccggacagaaagau

SEQ ID NO: 1062679 - RNA, 19 nt, Artificial Sequence
  Description of Artificial Sequence: Synthetic oligonucleotide
auggugcggaugcggaaga

SEQ ID NO: 1062680 - RNA, 19 nt, Artificial Sequence
  Description of Artificial Sequence: Synthetic oligonucleotide
agauaggacggcaccuuga

SEQ ID NO: 1062681 - RNA, 19 nt, Artificial Sequence
  Description of Artificial Sequence: Synthetic oligonucleotide
gagccgucgggccgugcgg

SEQ ID NO: 1062682 - RNA, 19 nt, Artificial Sequence
  Description of Artificial Sequence: Synthetic oligonucleotide
ugcgcggcguguagugggc

SEQ ID NO: 1062683 - RNA, 19 nt, Artificial Sequence
  Description of Artificial Sequence: Synthetic oligonucleotide
guguagugggccgggcacg

SEQ ID NO: 1062684 - RNA, 19 nt, Artificial Sequence
  Description of Artificial Sequence: Synthetic oligonucleotide
acgugaugcccacgaugag

SEQ ID NO: 1062685 - RNA, 19 nt, Artificial Sequence
  Description of Artificial Sequence: Synthetic oligonucleotide
gugagacgcguguaaaacu

SEQ ID NO: 1062686 - RNA, 19 nt, Artificial Sequence
  Description of Artificial Sequence: Synthetic oligonucleotide
aggcagcuaacuugagaaa

SEQ ID NO: 1062687 - RNA, 19 nt, Artificial Sequence
  Description of Artificial Sequence: Synthetic oligonucleotide
guagcguagcgcggaggcg

SEQ ID NO: 1062688 - RNA, 19 nt, Artificial Sequence
  Description of Artificial Sequence: Synthetic oligonucleotide
aucgugcuucaugauggug

SEQ ID NO: 1062689 - RNA, 19 nt, Artificial Sequence
  Description of Artificial Sequence: Synthetic oligonucleotide
gacgcggggacaguggaaa

SEQ ID NO: 1062690 - RNA, 19 nt, Artificial Sequence
  Description of Artificial Sequence: Synthetic oligonucleotide
agggcgcugcacaaucgcg

SEQ ID NO: 1062691 - RNA, 19 nt, Artificial Sequence
  Description of Artificial Sequence: Synthetic oligonucleotide
agguggaaguacugcgaau

SEQ ID NO: 1062692 - RNA, 19 nt, Artificial Sequence
  Description of Artificial Sequence: Synthetic oligonucleotide
ucauaccggcaaagauaac

SEQ ID NO: 1062693 - RNA, 19 nt, Artificial Sequence
  Description of Artificial Sequence: Synthetic oligonucleotide
gagacgcguguaaaacuuc

SEQ ID NO: 1062694 - RNA, 19 nt, Artificial Sequence
  Description of Artificial Sequence: Synthetic oligonucleotide
uguuggugagacgcgugua

SEQ ID NO: 1062695 - RNA, 19 nt, Artificial Sequence
  Description of Artificial Sequence: Synthetic oligonucleotide
guacugcgaauuggccucg

SEQ ID NO: 1062696 - RNA, 19 nt, Artificial Sequence
  Description of Artificial Sequence: Synthetic oligonucleotide
caugcgcggcguguagugg

SEQ ID NO: 1062697 - RNA, 19 nt, Artificial Sequence
  Description of Artificial Sequence: Synthetic oligonucleotide
cucaggcagcuaacuugag

SEQ ID NO: 1062698 - RNA, 19 nt, Artificial Sequence
  Description of Artificial Sequence: Synthetic oligonucleotide
acugugaaaucgggcgaca

SEQ ID NO: 1062699 - RNA, 19 nt, Artificial Sequence
  Description of Artificial Sequence: Synthetic oligonucleotide
uggccggcacgguguagag

SEQ ID NO: 1062700 - RNA, 19 nt, Artificial Sequence
  Description of Artificial Sequence: Synthetic oligonucleotide
gacgugccgaugaacaggu

SEQ ID NO: 1062701 - RNA, 19 nt, Artificial Sequence
  Description of Artificial Sequence: Synthetic oligonucleotide
ccuucccgagugaaggaag

SEQ ID NO: 1062702 - RNA, 19 nt, Artificial Sequence
  Description of Artificial Sequence: Synthetic oligonucleotide
cgucuuggugccaucgugc

SEQ ID NO: 1062703 - RNA, 19 nt, Artificial Sequence
  Description of Artificial Sequence: Synthetic oligonucleotide
ggucucgccaugccggcug

SEQ ID NO: 1062704 - RNA, 19 nt, Artificial Sequence
  Description of Artificial Sequence: Synthetic oligonucleotide
caccccuucccgagugaag

SEQ ID NO: 1062705 - RNA, 19 nt, Artificial Sequence
  Description of Artificial Sequence: Synthetic oligonucleotide
ccgucgaucuggcccaugg

SEQ ID NO: 1062706 - RNA, 19 nt, Artificial Sequence
  Description of Artificial Sequence: Synthetic oligonucleotide
acugcgaauuggccucgau

SEQ ID NO: 1062707 - RNA, 19 nt, Artificial Sequence
  Description of Artificial Sequence: Synthetic oligonucleotide
uggugcggaugcggaagag

SEQ ID NO: 1062708 - RNA, 19 nt, Artificial Sequence
  Description of Artificial Sequence: Synthetic oligonucleotide
gaggcccacgaagcacacg

SEQ ID NO: 1062709 - RNA, 19 nt, Artificial Sequence
  Description of Artificial Sequence: Synthetic oligonucleotide
gaccgggugaggauccaga

SEQ ID NO: 1062710 - RNA, 19 nt, Artificial Sequence
  Description of Artificial Sequence: Synthetic oligonucleotide
acaaucgcgcucaccuaga

SEQ ID NO: 1062711 - RNA, 19 nt, Artificial Sequence
  Description of Artificial Sequence: Synthetic oligonucleotide
cccacgagcgcucccagug

SEQ ID NO: 1062712 - RNA, 19 nt, Artificial Sequence
  Description of Artificial Sequence: Synthetic oligonucleotide
ggacggcaccuugaggacg

SEQ ID NO: 1062713 - RNA, 19 nt, Artificial Sequence
  Description of Artificial Sequence: Synthetic oligonucleotide
acggggcaaaacgcgucuc

SEQ ID NO: 1062714 - RNA, 19 nt, Artificial Sequence
  Description of Artificial Sequence: Synthetic oligonucleotide
aggucgccgucgaucuggc

SEQ ID NO: 1062715 - RNA, 19 nt, Artificial Sequence
  Description of Artificial Sequence: Synthetic oligonucleotide
cuggagcacgaagccggcg

SEQ ID NO: 1062716 - RNA, 19 nt, Artificial Sequence
  Description of Artificial Sequence: Synthetic oligonucleotide
ugacggccggcacggccca

SEQ ID NO: 1062717 - RNA, 19 nt, Artificial Sequence
  Description of Artificial Sequence: Synthetic oligonucleotide
agccgucgggccgugcggg

SEQ ID NO: 1062718 - RNA, 19 nt, Artificial Sequence
  Description of Artificial Sequence: Synthetic oligonucleotide
gccgaugaacagguacacg

SEQ ID NO: 1062719 - RNA, 19 nt, Artificial Sequence
  Description of Artificial Sequence: Synthetic oligonucleotide
caccgugcgguagccgucc

SEQ ID NO: 1062720 - RNA, 19 nt, Artificial Sequence
  Description of Artificial Sequence: Synthetic oligonucleotide
aucgggcgacaugcgcggc

SEQ ID NO: 1062721 - RNA, 19 nt, Artificial Sequence
  Description of Artificial Sequence: Synthetic oligonucleotide
gagcgucaugagguauuug

SEQ ID NO: 1062722 - RNA, 19 nt, Artificial Sequence
  Description of Artificial Sequence: Synthetic oligonucleotide
ccaaauaguagagggaacu

SEQ ID NO: 1062723 - RNA, 19 nt, Artificial Sequence
  Description of Artificial Sequence: Synthetic oligonucleotide
cgugcgguagccguccucg

SEQ ID NO: 1062724 - RNA, 19 nt, Artificial Sequence
  Description of Artificial Sequence: Synthetic oligonucleotide
gccggacagaaagaugaug

SEQ ID NO: 1062725 - RNA, 19 nt, Artificial Sequence
  Description of Artificial Sequence: Synthetic oligonucleotide
ggaaugacgugccgaugaa

SEQ ID NO: 1062726 - RNA, 19 nt, Artificial Sequence
  Description of Artificial Sequence: Synthetic oligonucleotide
gguggaaguacugcgaauu

SEQ ID NO: 1062727 - RNA, 19 nt, Artificial Sequence
  Description of Artificial Sequence: Synthetic oligonucleotide
uuuugacggccggcacggc

SEQ ID NO: 1062728 - RNA, 19 nt, Artificial Sequence
  Description of Artificial Sequence: Synthetic oligonucleotide
guggccggcacgguguaga

SEQ ID NO: 1062729 - RNA, 19 nt, Artificial Sequence
  Description of Artificial Sequence: Synthetic oligonucleotide
caguggaaagggugcucca

SEQ ID NO: 1062730 - RNA, 19 nt, Artificial Sequence
  Description of Artificial Sequence: Synthetic oligonucleotide
gcuucacacgguggucucg

SEQ ID NO: 1062731 - RNA, 19 nt, Artificial Sequence
  Description of Artificial Sequence: Synthetic oligonucleotide
ggugagggacagaauccac

SEQ ID NO: 1062732 - RNA, 19 nt, Artificial Sequence
  Description of Artificial Sequence: Synthetic oligonucleotide
gggcaaaacgcgucuccuc

SEQ ID NO: 1062733 - RNA, 19 nt, Artificial Sequence
  Description of Artificial Sequence: Synthetic oligonucleotide
cgugcgggcucgcagggcg

SEQ ID NO: 1062734 - RNA, 19 nt, Artificial Sequence
  Description of Artificial Sequence: Synthetic oligonucleotide
gacgcguguaaaacuuccu

SEQ ID NO: 1062735 - RNA, 19 nt, Artificial Sequence
  Description of Artificial Sequence: Synthetic oligonucleotide
caccgaccgggugaggauc

SEQ ID NO: 1062736 - RNA, 19 nt, Artificial Sequence
  Description of Artificial Sequence: Synthetic oligonucleotide
ccucguggccccauuucac

SEQ ID NO: 1062737 - RNA, 19 nt, Artificial Sequence
  Description of Artificial Sequence: Synthetic oligonucleotide
gcacgggauggccaggcuc

SEQ ID NO: 1062738 - RNA, 19 nt, Artificial Sequence
  Description of Artificial Sequence: Synthetic oligonucleotide
cgacgugaugcccacgaug

SEQ ID NO: 1062739 - RNA, 19 nt, Artificial Sequence
  Description of Artificial Sequence: Synthetic oligonucleotide
ggugaccgugaagaacgug

SEQ ID NO: 1062740 - RNA, 19 nt, Artificial Sequence
  Description of Artificial Sequence: Synthetic oligonucleotide
cguguagugggccgggcac

SEQ ID NO: 1062741 - RNA, 19 nt, Artificial Sequence
  Description of Artificial Sequence: Synthetic oligonucleotide
cucguggccccauuucacu

SEQ ID NO: 1062742 - RNA, 19 nt, Artificial Sequence
  Description of Artificial Sequence: Synthetic oligonucleotide
acgagcgcucccagugcuc

SEQ ID NO: 1062743 - RNA, 19 nt, Artificial Sequence
  Description of Artificial Sequence: Synthetic oligonucleotide
cacacgguggucucgccau

SEQ ID NO: 1062744 - RNA, 19 nt, Artificial Sequence
  Description of Artificial Sequence: Synthetic oligonucleotide
uacugcgaauuggccucga

SEQ ID NO: 1062745 - RNA, 19 nt, Artificial Sequence
  Description of Artificial Sequence: Synthetic oligonucleotide
cucgcagggcgcugcacaa

SEQ ID NO: 1062746 - RNA, 19 nt, Artificial Sequence
  Description of Artificial Sequence: Synthetic oligonucleotide
guagugggccgggcacggg

SEQ ID NO: 1062747 - RNA, 19 nt, Artificial Sequence
  Description of Artificial Sequence: Synthetic oligonucleotide
gcucgcagggcgcugcaca

SEQ ID NO: 1062748 - RNA, 19 nt, Artificial Sequence
  Description of Artificial Sequence: Synthetic oligonucleotide
caaucgcgcucaccuagaa

SEQ ID NO: 1062749 - RNA, 19 nt, Artificial Sequence
  Description of Artificial Sequence: Synthetic oligonucleotide
ggugcggaugcggaagaga

SEQ ID NO: 1062750 - RNA, 19 nt, Artificial Sequence
  Description of Artificial Sequence: Synthetic oligonucleotide
gcagggcgcugcacaaucg

SEQ ID NO: 1062751 - RNA, 19 nt, Artificial Sequence
  Description of Artificial Sequence: Synthetic oligonucleotide
ggaggcgcgccaccgccgc

SEQ ID NO: 1062752 - RNA, 19 nt, Artificial Sequence
  Description of Artificial Sequence: Synthetic oligonucleotide
uggucucgccaugccggcu

SEQ ID NO: 1062753 - RNA, 19 nt, Artificial Sequence
  Description of Artificial Sequence: Synthetic oligonucleotide
ggguagcguagcgcggagg

SEQ ID NO: 1062754 - RNA, 19 nt, Artificial Sequence
  Description of Artificial Sequence: Synthetic oligonucleotide
gacaugcgcggcguguagu

SEQ ID NO: 1062755 - RNA, 19 nt, Artificial Sequence
  Description of Artificial Sequence: Synthetic oligonucleotide
gcgauguaggccaccgaca

SEQ ID NO: 1062756 - RNA, 19 nt, Artificial Sequence
  Description of Artificial Sequence: Synthetic oligonucleotide
caccaccgugcgguagccg

SEQ ID NO: 1062757 - RNA, 19 nt, Artificial Sequence
  Description of Artificial Sequence: Synthetic oligonucleotide
gcgcugcauguccacuaag

SEQ ID NO: 1062758 - RNA, 19 nt, Artificial Sequence
  Description of Artificial Sequence: Synthetic oligonucleotide
cgagugcagcgucuugccg

SEQ ID NO: 1062759 - RNA, 19 nt, Artificial Sequence
  Description of Artificial Sequence: Synthetic oligonucleotide
ccggcaaagauaacuuugu

SEQ ID NO: 1062760 - RNA, 19 nt, Artificial Sequence
  Description of Artificial Sequence: Synthetic oligonucleotide
gguagccguccucggagaa

SEQ ID NO: 1062761 - RNA, 19 nt, Artificial Sequence
  Description of Artificial Sequence: Synthetic oligonucleotide
ccgggcacgggauggccag

SEQ ID NO: 1062762 - RNA, 19 nt, Artificial Sequence
  Description of Artificial Sequence: Synthetic oligonucleotide
ggaguccauagggcgcacc

SEQ ID NO: 1062763 - RNA, 19 nt, Artificial Sequence
  Description of Artificial Sequence: Synthetic oligonucleotide
ccgucaggcaggccaggcc

SEQ ID NO: 1062764 - RNA, 19 nt, Artificial Sequence
  Description of Artificial Sequence: Synthetic oligonucleotide
ccacgagcgcucccagugc

SEQ ID NO: 1062765 - RNA, 19 nt, Artificial Sequence
  Description of Artificial Sequence: Synthetic oligonucleotide
agccggacagaaagaugau

SEQ ID NO: 1062766 - RNA, 19 nt, Artificial Sequence
  Description of Artificial Sequence: Synthetic oligonucleotide
ggauagugcagcccucuuu

SEQ ID NO: 1062767 - RNA, 19 nt, Artificial Sequence
  Description of Artificial Sequence: Synthetic oligonucleotide
cggggcaaaacgcgucucc

SEQ ID NO: 1062768 - RNA, 19 nt, Artificial Sequence
  Description of Artificial Sequence: Synthetic oligonucleotide
guagcgcggaggcgcgcca

SEQ ID NO: 1062769 - RNA, 19 nt, Artificial Sequence
  Description of Artificial Sequence: Synthetic oligonucleotide
caucgugcuucaugauggu

SEQ ID NO: 1062770 - RNA, 19 nt, Artificial Sequence
  Description of Artificial Sequence: Synthetic oligonucleotide
caccgacaccaugguguag

SEQ ID NO: 1062771 - RNA, 19 nt, Artificial Sequence
  Description of Artificial Sequence: Synthetic oligonucleotide
cgagcgcucccagugcucg

SEQ ID NO: 1062772 - RNA, 19 nt, Artificial Sequence
  Description of Artificial Sequence: Synthetic oligonucleotide
ccauagggcgcaccccuuc

SEQ ID NO: 1062773 - RNA, 19 nt, Artificial Sequence
  Description of Artificial Sequence: Synthetic oligonucleotide
cccgacgugaugcccacga

SEQ ID NO: 1062774 - RNA, 19 nt, Artificial Sequence
  Description of Artificial Sequence: Synthetic oligonucleotide
cgguggucucgccaugccg

SEQ ID NO: 1062775 - RNA, 19 nt, Artificial Sequence
  Description of Artificial Sequence: Synthetic oligonucleotide
gcggcguguagugggccgg

SEQ ID NO: 1062776 - RNA, 19 nt, Artificial Sequence
  Description of Artificial Sequence: Synthetic oligonucleotide
cacgagcgcucccagugcu

SEQ ID NO: 1062777 - RNA, 19 nt, Artificial Sequence
  Description of Artificial Sequence: Synthetic oligonucleotide
agagcggcgccagcacgaa

SEQ ID NO: 1062778 - RNA, 19 nt, Artificial Sequence
  Description of Artificial Sequence: Synthetic oligonucleotide
cguggaagcgcagcacagc

SEQ ID NO: 1062779 - RNA, 19 nt, Artificial Sequence
  Description of Artificial Sequence: Synthetic oligonucleotide
cgaugaacagguacacgaa

SEQ ID NO: 1062780 - RNA, 19 nt, Artificial Sequence
  Description of Artificial Sequence: Synthetic oligonucleotide
accgugcgguagccguccu

SEQ ID NO: 1062781 - RNA, 19 nt, Artificial Sequence
  Description of Artificial Sequence: Synthetic oligonucleotide
gcuuacccacgagcgcucc

SEQ ID NO: 1062782 - RNA, 19 nt, Artificial Sequence
  Description of Artificial Sequence: Synthetic oligonucleotide
ggcgcugcacaaucgcgcu

SEQ ID NO: 1062783 - RNA, 19 nt, Artificial Sequence
  Description of Artificial Sequence: Synthetic oligonucleotide
gccggcuguuggugagacg

SEQ ID NO: 1062784 - RNA, 19 nt, Artificial Sequence
  Description of Artificial Sequence: Synthetic oligonucleotide
ccuccacgagugcagcguc

SEQ ID NO: 1062785 - RNA, 19 nt, Artificial Sequence
  Description of Artificial Sequence: Synthetic oligonucleotide
cacccaccagauggagcug

SEQ ID NO: 1062786 - RNA, 19 nt, Artificial Sequence
  Description of Artificial Sequence: Synthetic oligonucleotide
gcgcaccccuucccgagug

SEQ ID NO: 1062787 - RNA, 19 nt, Artificial Sequence
  Description of Artificial Sequence: Synthetic oligonucleotide
gcgcucccagugcucgcgg

SEQ ID NO: 1062788 - RNA, 19 nt, Artificial Sequence
  Description of Artificial Sequence: Synthetic oligonucleotide
gguaccgaaagcgcugcau

SEQ ID NO: 1062789 - RNA, 19 nt, Artificial Sequence
  Description of Artificial Sequence: Synthetic oligonucleotide
cgcggcguguagugggccg

SEQ ID NO: 1062790 - RNA, 19 nt, Artificial Sequence
  Description of Artificial Sequence: Synthetic oligonucleotide
ugcgcaccaugagccucuc

SEQ ID NO: 1062791 - RNA, 19 nt, Artificial Sequence
  Description of Artificial Sequence: Synthetic oligonucleotide
cggcuguuggugagacgcg

SEQ ID NO: 1062792 - RNA, 19 nt, Artificial Sequence
  Description of Artificial Sequence: Synthetic oligonucleotide
cacacgccgcucagcaggu

SEQ ID NO: 1062793 - RNA, 19 nt, Artificial Sequence
  Description of Artificial Sequence: Synthetic oligonucleotide
gcacaaucgcgcucaccua

SEQ ID NO: 1062794 - RNA, 19 nt, Artificial Sequence
  Description of Artificial Sequence: Synthetic oligonucleotide
cugugaaaucgggcgacau

SEQ ID NO: 1062795 - RNA, 19 nt, Artificial Sequence
  Description of Artificial Sequence: Synthetic oligonucleotide
cguagaaguagcaggcgau

SEQ ID NO: 1062796 - RNA, 19 nt, Artificial Sequence
  Description of Artificial Sequence: Synthetic oligonucleotide
ccgggugaggauccagaga

SEQ ID NO: 1062797 - RNA, 19 nt, Artificial Sequence
  Description of Artificial Sequence: Synthetic oligonucleotide
ggcuuacccacgagcgcuc

SEQ ID NO: 1062798 - RNA, 19 nt, Artificial Sequence
  Description of Artificial Sequence: Synthetic oligonucleotide
gcgcagcacagcaccgacc

SEQ ID NO: 1062799 - RNA, 19 nt, Artificial Sequence
  Description of Artificial Sequence: Synthetic oligonucleotide
gcaccaccgugcgguagcc

SEQ ID NO: 1062800 - RNA, 19 nt, Artificial Sequence
  Description of Artificial Sequence: Synthetic oligonucleotide
ggguaccgaaagcgcugca

SEQ ID NO: 1062801 - RNA, 19 nt, Artificial Sequence
  Description of Artificial Sequence: Synthetic oligonucleotide
ggccggcacgguguagagc

SEQ ID NO: 1062802 - RNA, 19 nt, Artificial Sequence
  Description of Artificial Sequence: Synthetic oligonucleotide
ggcguguagugggccgggc

SEQ ID NO: 1062803 - RNA, 19 nt, Artificial Sequence
  Description of Artificial Sequence: Synthetic oligonucleotide
cgacaugcgcggcguguag

SEQ ID NO: 1062804 - RNA, 19 nt, Artificial Sequence
  Description of Artificial Sequence: Synthetic oligonucleotide
gcgcggaggcgcgccaccg

SEQ ID NO: 1062805 - RNA, 19 nt, Artificial Sequence
  Description of Artificial Sequence: Synthetic oligonucleotide
ccgacaccaugguguagca

SEQ ID NO: 1062806 - RNA, 19 nt, Artificial Sequence
  Description of Artificial Sequence: Synthetic oligonucleotide
cguagcgcggaggcgcgcc

SEQ ID NO: 1062807 - RNA, 19 nt, Artificial Sequence
  Description of Artificial Sequence: Synthetic oligonucleotide
cgcugcacaaucgcgcuca

SEQ ID NO: 1062808 - RNA, 19 nt, Artificial Sequence
  Description of Artificial Sequence: Synthetic oligonucleotide
cgcugcauguccacuaagu

SEQ ID NO: 1062809 - RNA, 19 nt, Artificial Sequence
  Description of Artificial Sequence: Synthetic oligonucleotide
auggagccgucgggccgug

SEQ ID NO: 1062810 - RNA, 19 nt, Artificial Sequence
  Description of Artificial Sequence: Synthetic oligonucleotide
cgcccgucaggcaggccag

SEQ ID NO: 1062811 - RNA, 19 nt, Artificial Sequence
  Description of Artificial Sequence: Synthetic oligonucleotide
cgccgaugcgcaccaugag

SEQ ID NO: 1062812 - RNA, 19 nt, Artificial Sequence
  Description of Artificial Sequence: Synthetic oligonucleotide
gggugcuccaggguagcgu

SEQ ID NO: 1062813 - RNA, 19 nt, Artificial Sequence
  Description of Artificial Sequence: Synthetic oligonucleotide
cggaggcgcgccaccgccg

SEQ ID NO: 1062814 - RNA, 19 nt, Artificial Sequence
  Description of Artificial Sequence: Synthetic oligonucleotide
gcgcaccaugagccucucc

SEQ ID NO: 1062815 - RNA, 19 nt, Artificial Sequence
  Description of Artificial Sequence: Synthetic oligonucleotide
ccacgaagcacacgccgcu

SEQ ID NO: 1062816 - RNA, 19 nt, Artificial Sequence
  Description of Artificial Sequence: Synthetic oligonucleotide
gcaccccuucccgagugaa

SEQ ID NO: 1062817 - RNA, 19 nt, Artificial Sequence
  Description of Artificial Sequence: Synthetic oligonucleotide
gggcgacaugcgcggcgug

SEQ ID NO: 1062818 - RNA, 19 nt, Artificial Sequence
  Description of Artificial Sequence: Synthetic oligonucleotide
gcucaccuagaaacuuaua

SEQ ID NO: 1062819 - RNA, 19 nt, Artificial Sequence
  Description of Artificial Sequence: Synthetic oligonucleotide
gauggccucguggccccau

SEQ ID NO: 1062820 - RNA, 19 nt, Artificial Sequence
  Description of Artificial Sequence: Synthetic oligonucleotide
ggcgacaugcgcggcgugu

SEQ ID NO: 1062821 - RNA, 19 nt, Artificial Sequence
  Description of Artificial Sequence: Synthetic oligonucleotide
ccggcacgguguagagcac

SEQ ID NO: 1062822 - RNA, 19 nt, Artificial Sequence
  Description of Artificial Sequence: Synthetic oligonucleotide
gcgacaugcgcggcgugua

SEQ ID NO: 1062823 - RNA, 19 nt, Artificial Sequence
  Description of Artificial Sequence: Synthetic oligonucleotide
gccggcgauguaggccacc

SEQ ID NO: 1062824 - RNA, 19 nt, Artificial Sequence
  Description of Artificial Sequence: Synthetic oligonucleotide
gugcagcgucuugccggac

SEQ ID NO: 1062825 - RNA, 19 nt, Artificial Sequence
  Description of Artificial Sequence: Synthetic oligonucleotide
ggacgcggggacaguggaa

SEQ ID NO: 1062826 - RNA, 19 nt, Artificial Sequence
  Description of Artificial Sequence: Synthetic oligonucleotide
cgaugagcgucaugaggua

SEQ ID NO: 1062827 - RNA, 19 nt, Artificial Sequence
  Description of Artificial Sequence: Synthetic oligonucleotide
gcgcggcguguagugggcc

SEQ ID NO: 1062828 - RNA, 19 nt, Artificial Sequence
  Description of Artificial Sequence: Synthetic oligonucleotide
gcaccgaccgggugaggau

SEQ ID NO: 1062829 - RNA, 19 nt, Artificial Sequence
  Description of Artificial Sequence: Synthetic oligonucleotide
gcccgacgugaugcccacg

SEQ ID NO: 1062830 - RNA, 19 nt, Artificial Sequence
  Description of Artificial Sequence: Synthetic oligonucleotide
cgaccgggugaggauccag

SEQ ID NO: 1062831 - RNA, 19 nt, Artificial Sequence
  Description of Artificial Sequence: Synthetic oligonucleotide
ccgcuucacacgguggucu

SEQ ID NO: 1062832 - RNA, 19 nt, Artificial Sequence
  Description of Artificial Sequence: Synthetic oligonucleotide
ggcgcaccccuucccgagu

SEQ ID NO: 1062833 - RNA, 19 nt, Artificial Sequence
  Description of Artificial Sequence: Synthetic oligonucleotide
ccgcccggggugccacccg

SEQ ID NO: 1062834 - RNA, 19 nt, Artificial Sequence
  Description of Artificial Sequence: Synthetic oligonucleotide
cgcggaggcgcgccaccgc

SEQ ID NO: 1062835 - RNA, 19 nt, Artificial Sequence
  Description of Artificial Sequence: Synthetic oligonucleotide
cggcguguagugggccggg

SEQ ID NO: 1062836 - RNA, 19 nt, Artificial Sequence
  Description of Artificial Sequence: Synthetic oligonucleotide
ccgugcgggcucgcagggc

SEQ ID NO: 1062837 - RNA, 19 nt, Artificial Sequence
  Description of Artificial Sequence: Synthetic oligonucleotide
gcguagcgcggaggcgcgc

SEQ ID NO: 1062838 - RNA, 19 nt, Artificial Sequence
  Description of Artificial Sequence: Synthetic oligonucleotide
cgcaccccuucccgaguga

SEQ ID NO: 1062839 - RNA, 19 nt, Artificial Sequence
  Description of Artificial Sequence: Synthetic oligonucleotide
cggcgauguaggccaccga

SEQ ID NO: 1062840 - RNA, 19 nt, Artificial Sequence
  Description of Artificial Sequence: Synthetic oligonucleotide
ccgacgugaugcccacgau

SEQ ID NO: 1062841 - RNA, 19 nt, Artificial Sequence
  Description of Artificial Sequence: Synthetic oligonucleotide
cgggcgacaugcgcggcgu

SEQ ID NO: 1062842 - RNA, 19 nt, Artificial Sequence
  Description of Artificial Sequence: Synthetic oligonucleotide
cgggccgugcgggcucgca

SEQ ID NO: 1062843 - RNA, 19 nt, Artificial Sequence
  Description of Artificial Sequence: Synthetic oligonucleotide
aauuaucuaaauuuaccuc

SEQ ID NO: 1062844 - RNA, 19 nt, Artificial Sequence
  Description of Artificial Sequence: Synthetic oligonucleotide
uaauuuguaacacuguaca

SEQ ID NO: 1062845 - RNA, 19 nt, Artificial Sequence
  Description of Artificial Sequence: Synthetic oligonucleotide
uauacaugcguucagggcc

SEQ ID NO: 1062846 - RNA, 19 nt, Artificial Sequence
  Description of Artificial Sequence: Synthetic oligonucleotide
ugcagaguuauauaaaugc

SEQ ID NO: 1062847 - RNA, 19 nt, Artificial Sequence
  Description of Artificial Sequence: Synthetic oligonucleotide
ugaaagguugaacaguccg

SEQ ID NO: 1062848 - RNA, 19 nt, Artificial Sequence
  Description of Artificial Sequence: Synthetic oligonucleotide
gaauucauuaauuuguaac

SEQ ID NO: 1062849 - RNA, 19 nt, Artificial Sequence
  Description of Artificial Sequence: Synthetic oligonucleotide
uuuaagauaggacuugcug

SEQ ID NO: 1062850 - RNA, 19 nt, Artificial Sequence
  Description of Artificial Sequence: Synthetic oligonucleotide
uucucuuuaagauaggacu

SEQ ID NO: 1062851 - RNA, 19 nt, Artificial Sequence
  Description of Artificial Sequence: Synthetic oligonucleotide
aaagcuuauauacauuaga

SEQ ID NO: 1062852 - RNA, 19 nt, Artificial Sequence
  Description of Artificial Sequence: Synthetic oligonucleotide
uuuguucgagcuuugaaag

SEQ ID NO: 1062853 - RNA, 19 nt, Artificial Sequence
  Description of Artificial Sequence: Synthetic oligonucleotide
aaguguugcagcaucaagc

SEQ ID NO: 1062854 - RNA, 19 nt, Artificial Sequence
  Description of Artificial Sequence: Synthetic oligonucleotide
uuuaggauugguccaagag

SEQ ID NO: 1062855 - RNA, 19 nt, Artificial Sequence
  Description of Artificial Sequence: Synthetic oligonucleotide
uuaagauaggacuugcuga

SEQ ID NO: 1062856 - RNA, 19 nt, Artificial Sequence
  Description of Artificial Sequence: Synthetic oligonucleotide
ucacugauugggcauaugg

SEQ ID NO: 1062857 - RNA, 19 nt, Artificial Sequence
  Description of Artificial Sequence: Synthetic oligonucleotide
ucuaaaagcuuauauacau

SEQ ID NO: 1062858 - RNA, 19 nt, Artificial Sequence
  Description of Artificial Sequence: Synthetic oligonucleotide
ugacucauuguuucaaugg

SEQ ID NO: 1062859 - RNA, 19 nt, Artificial Sequence
  Description of Artificial Sequence: Synthetic oligonucleotide
uguacucuaagucuucuug

SEQ ID NO: 1062860 - RNA, 19 nt, Artificial Sequence
  Description of Artificial Sequence: Synthetic oligonucleotide
aauauaauccaccccuaca

SEQ ID NO: 1062861 - RNA, 19 nt, Artificial Sequence
  Description of Artificial Sequence: Synthetic oligonucleotide
acugauugggcauaugguc

SEQ ID NO: 1062862 - RNA, 19 nt, Artificial Sequence
  Description of Artificial Sequence: Synthetic oligonucleotide
ucucgggcuaacaagagag

SEQ ID NO: 1062863 - RNA, 19 nt, Artificial Sequence
  Description of Artificial Sequence: Synthetic oligonucleotide
uuaaaggugucauagguau

SEQ ID NO: 1062864 - RNA, 19 nt, Artificial Sequence
  Description of Artificial Sequence: Synthetic oligonucleotide
ucaguuaaagucauucuuc

SEQ ID NO: 1062865 - RNA, 19 nt, Artificial Sequence
  Description of Artificial Sequence: Synthetic oligonucleotide
uguuccaucacaaauuauu

SEQ ID NO: 1062866 - RNA, 19 nt, Artificial Sequence
  Description of Artificial Sequence: Synthetic oligonucleotide
uuuuguucgagcuuugaaa

SEQ ID NO: 1062867 - RNA, 19 nt, Artificial Sequence
  Description of Artificial Sequence: Synthetic oligonucleotide
ucucucuagaacaaacuca

SEQ ID NO: 1062868 - RNA, 19 nt, Artificial Sequence
  Description of Artificial Sequence: Synthetic oligonucleotide
gauacuagcuguuccauca

SEQ ID NO: 1062869 - RNA, 19 nt, Artificial Sequence
  Description of Artificial Sequence: Synthetic oligonucleotide
acaauguccacgcaagaag

SEQ ID NO: 1062870 - RNA, 19 nt, Artificial Sequence
  Description of Artificial Sequence: Synthetic oligonucleotide
uggucaguaacaaugucca

SEQ ID NO: 1062871 - RNA, 19 nt, Artificial Sequence
  Description of Artificial Sequence: Synthetic oligonucleotide
uuucagacagcgcucaaug

SEQ ID NO: 1062872 - RNA, 19 nt, Artificial Sequence
  Description of Artificial Sequence: Synthetic oligonucleotide
ugucuucgcacucuuauca

SEQ ID NO: 1062873 - RNA, 19 nt, Artificial Sequence
  Description of Artificial Sequence: Synthetic oligonucleotide
aagaacagaugcuaacgcu

SEQ ID NO: 1062874 - RNA, 19 nt, Artificial Sequence
  Description of Artificial Sequence: Synthetic oligonucleotide
ucuaaagacggaccgcugc

SEQ ID NO: 1062875 - RNA, 19 nt, Artificial Sequence
  Description of Artificial Sequence: Synthetic oligonucleotide
ugugaagcacuguauuagg

SEQ ID NO: 1062876 - RNA, 19 nt, Artificial Sequence
  Description of Artificial Sequence: Synthetic oligonucleotide
uuaggggugcugcagauga

SEQ ID NO: 1062877 - RNA, 19 nt, Artificial Sequence
  Description of Artificial Sequence: Synthetic oligonucleotide
ucaauauacaugcguucag

SEQ ID NO: 1062878 - RNA, 19 nt, Artificial Sequence
  Description of Artificial Sequence: Synthetic oligonucleotide
aaaggugucauagguaugu

SEQ ID NO: 1062879 - RNA, 19 nt, Artificial Sequence
  Description of Artificial Sequence: Synthetic oligonucleotide
acuguauuaggggugcugc

SEQ ID NO: 1062880 - RNA, 19 nt, Artificial Sequence
  Description of Artificial Sequence: Synthetic oligonucleotide
auauaauccaccccuacau

SEQ ID NO: 1062881 - RNA, 19 nt, Artificial Sequence
  Description of Artificial Sequence: Synthetic oligonucleotide
aaaucucguuccuccacgg

SEQ ID NO: 1062882 - RNA, 19 nt, Artificial Sequence
  Description of Artificial Sequence: Synthetic oligonucleotide
gguacugcaucccugaucc

SEQ ID NO: 1062883 - RNA, 19 nt, Artificial Sequence
  Description of Artificial Sequence: Synthetic oligonucleotide
auugcgaaggaauucauuu

SEQ ID NO: 1062884 - RNA, 19 nt, Artificial Sequence
  Description of Artificial Sequence: Synthetic oligonucleotide
aagagcugcgagcggaaac

SEQ ID NO: 1062885 - RNA, 19 nt, Artificial Sequence
  Description of Artificial Sequence: Synthetic oligonucleotide
caagcucaaauacauugcg

SEQ ID NO: 1062886 - RNA, 19 nt, Artificial Sequence
  Description of Artificial Sequence: Synthetic oligonucleotide
acgucuagaagaauucucc

SEQ ID NO: 1062887 - RNA, 19 nt, Artificial Sequence
  Description of Artificial Sequence: Synthetic oligonucleotide
ucagggccaaacuuaacag

SEQ ID NO: 1062888 - RNA, 19 nt, Artificial Sequence
  Description of Artificial Sequence: Synthetic oligonucleotide
ugucucuaaaagcuuauau

SEQ ID NO: 1062889 - RNA, 19 nt, Artificial Sequence
  Description of Artificial Sequence: Synthetic oligonucleotide
uccucggcaaaacuggaag

SEQ ID NO: 1062890 - RNA, 19 nt, Artificial Sequence
  Description of Artificial Sequence: Synthetic oligonucleotide
ugcgaaggaauucauuugu

SEQ ID NO: 1062891 - RNA, 19 nt, Artificial Sequence
  Description of Artificial Sequence: Synthetic oligonucleotide
aaaagcuuauauacauuag

SEQ ID NO: 1062892 - RNA, 19 nt, Artificial Sequence
  Description of Artificial Sequence: Synthetic oligonucleotide
aaucucguuccuccacggc

SEQ ID NO: 1062893 - RNA, 19 nt, Artificial Sequence
  Description of Artificial Sequence: Synthetic oligonucleotide
uaaguguugcagcaucaag

SEQ ID NO: 1062894 - RNA, 19 nt, Artificial Sequence
  Description of Artificial Sequence: Synthetic oligonucleotide
cucauuguuucaauggaug

SEQ ID NO: 1062895 - RNA, 19 nt, Artificial Sequence
  Description of Artificial Sequence: Synthetic oligonucleotide
aaagaauccaugucuucau

SEQ ID NO: 1062896 - RNA, 19 nt, Artificial Sequence
  Description of Artificial Sequence: Synthetic oligonucleotide
caucucuaaagacggaccg

SEQ ID NO: 1062897 - RNA, 19 nt, Artificial Sequence
  Description of Artificial Sequence: Synthetic oligonucleotide
uauacauuagaaguagcaa

SEQ ID NO: 1062898 - RNA, 19 nt, Artificial Sequence
  Description of Artificial Sequence: Synthetic oligonucleotide
cuucgcacucuuaucaagg

SEQ ID NO: 1062899 - RNA, 19 nt, Artificial Sequence
  Description of Artificial Sequence: Synthetic oligonucleotide
uuugcuucgagcuuuuguu

SEQ ID NO: 1062900 - RNA, 19 nt, Artificial Sequence
  Description of Artificial Sequence: Synthetic oligonucleotide
ucaaaacgagaaaucuuca

SEQ ID NO: 1062901 - RNA, 19 nt, Artificial Sequence
  Description of Artificial Sequence: Synthetic oligonucleotide
aguguugcagcaucaagca

SEQ ID NO: 1062902 - RNA, 19 nt, Artificial Sequence
  Description of Artificial Sequence: Synthetic oligonucleotide
gaaggaucgcuauagccac

SEQ ID NO: 1062903 - RNA, 19 nt, Artificial Sequence
  Description of Artificial Sequence: Synthetic oligonucleotide
aagcugcagaguuauauaa

SEQ ID NO: 1062904 - RNA, 19 nt, Artificial Sequence
  Description of Artificial Sequence: Synthetic oligonucleotide
uaucucggcauuugcuucg

SEQ ID NO: 1062905 - RNA, 19 nt, Artificial Sequence
  Description of Artificial Sequence: Synthetic oligonucleotide
guaacaauguccacgcaag

SEQ ID NO: 1062906 - RNA, 19 nt, Artificial Sequence
  Description of Artificial Sequence: Synthetic oligonucleotide
uaucaauauacaugcguuc

SEQ ID NO: 1062907 - RNA, 19 nt, Artificial Sequence
  Description of Artificial Sequence: Synthetic oligonucleotide
agaaauccccgugaagagc

SEQ ID NO: 1062908 - RNA, 19 nt, Artificial Sequence
  Description of Artificial Sequence: Synthetic oligonucleotide
uucgcacucuuaucaaggg

SEQ ID NO: 1062909 - RNA, 19 nt, Artificial Sequence
  Description of Artificial Sequence: Synthetic oligonucleotide
ucucuuuaagauaggacuu

SEQ ID NO: 1062910 - RNA, 19 nt, Artificial Sequence
  Description of Artificial Sequence: Synthetic oligonucleotide
agcugaauacagcucagug

SEQ ID NO: 1062911 - RNA, 19 nt, Artificial Sequence
  Description of Artificial Sequence: Synthetic oligonucleotide
uguucgagcuuugaaagcu

SEQ ID NO: 1062912 - RNA, 19 nt, Artificial Sequence
  Description of Artificial Sequence: Synthetic oligonucleotide
aguugcacaaguuugccua

SEQ ID NO: 1062913 - RNA, 19 nt, Artificial Sequence
  Description of Artificial Sequence: Synthetic oligonucleotide
ucaaugcuaucaguuaaag

SEQ ID NO: 1062914 - RNA, 19 nt, Artificial Sequence
  Description of Artificial Sequence: Synthetic oligonucleotide
acaucucuaaagacggacc

SEQ ID NO: 1062915 - RNA, 19 nt, Artificial Sequence
  Description of Artificial Sequence: Synthetic oligonucleotide
uacaccuucaagagcugcc

SEQ ID NO: 1062916 - RNA, 19 nt, Artificial Sequence
  Description of Artificial Sequence: Synthetic oligonucleotide
auuguuucaauggaugcgu

SEQ ID NO: 1062917 - RNA, 19 nt, Artificial Sequence
  Description of Artificial Sequence: Synthetic oligonucleotide
cuacacucggagcucagcg

SEQ ID NO: 1062918 - RNA, 19 nt, Artificial Sequence
  Description of Artificial Sequence: Synthetic oligonucleotide
ugauugggcauauggucag

SEQ ID NO: 1062919 - RNA, 19 nt, Artificial Sequence
  Description of Artificial Sequence: Synthetic oligonucleotide
ugggcauauggucaguaac

SEQ ID NO: 1062920 - RNA, 19 nt, Artificial Sequence
  Description of Artificial Sequence: Synthetic oligonucleotide
ugggucaaagaauccaugu

SEQ ID NO: 1062921 - RNA, 19 nt, Artificial Sequence
  Description of Artificial Sequence: Synthetic oligonucleotide
aaagcugcagaguuauaua

SEQ ID NO: 1062922 - RNA, 19 nt, Artificial Sequence
  Description of Artificial Sequence: Synthetic oligonucleotide
agauaggacuugcugaaga

SEQ ID NO: 1062923 - RNA, 19 nt, Artificial Sequence
  Description of Artificial Sequence: Synthetic oligonucleotide
aaacucauacagcacuuuu

SEQ ID NO: 1062924 - RNA, 19 nt, Artificial Sequence
  Description of Artificial Sequence: Synthetic oligonucleotide
aauguccacgcaagaaggg

SEQ ID NO: 1062925 - RNA, 19 nt, Artificial Sequence
  Description of Artificial Sequence: Synthetic oligonucleotide
uucgccagcagcaauucuc

SEQ ID NO: 1062926 - RNA, 19 nt, Artificial Sequence
  Description of Artificial Sequence: Synthetic oligonucleotide
agcacuguauuaggggugc

SEQ ID NO: 1062927 - RNA, 19 nt, Artificial Sequence
  Description of Artificial Sequence: Synthetic oligonucleotide
caaagauucgccagcagca

SEQ ID NO: 1062928 - RNA, 19 nt, Artificial Sequence
  Description of Artificial Sequence: Synthetic oligonucleotide
aauccccgugaagagcugc

SEQ ID NO: 1062929 - RNA, 19 nt, Artificial Sequence
  Description of Artificial Sequence: Synthetic oligonucleotide
cugaauacaaagaacagau

SEQ ID NO: 1062930 - RNA, 19 nt, Artificial Sequence
  Description of Artificial Sequence: Synthetic oligonucleotide
aaagguugaacaguccgau

SEQ ID NO: 1062931 - RNA, 19 nt, Artificial Sequence
  Description of Artificial Sequence: Synthetic oligonucleotide
uuuugacccagcuaucaau

SEQ ID NO: 1062932 - RNA, 19 nt, Artificial Sequence
  Description of Artificial Sequence: Synthetic oligonucleotide
ugguccaagagucuuuaaa

SEQ ID NO: 1062933 - RNA, 19 nt, Artificial Sequence
  Description of Artificial Sequence: Synthetic oligonucleotide
gaugcuaacgcugcagcug

SEQ ID NO: 1062934 - RNA, 19 nt, Artificial Sequence
  Description of Artificial Sequence: Synthetic oligonucleotide
ucaucgaggacuucugguc

SEQ ID NO: 1062935 - RNA, 19 nt, Artificial Sequence
  Description of Artificial Sequence: Synthetic oligonucleotide
ugcacaaguuugccuagcc

SEQ ID NO: 1062936 - RNA, 19 nt, Artificial Sequence
  Description of Artificial Sequence: Synthetic oligonucleotide
ucgagcuuuuguucgagcu

SEQ ID NO: 1062937 - RNA, 19 nt, Artificial Sequence
  Description of Artificial Sequence: Synthetic oligonucleotide
auacauugcgaaggaauuc

SEQ ID NO: 1062938 - RNA, 19 nt, Artificial Sequence
  Description of Artificial Sequence: Synthetic oligonucleotide
aguuccuuccucaucgagg

SEQ ID NO: 1062939 - RNA, 19 nt, Artificial Sequence
  Description of Artificial Sequence: Synthetic oligonucleotide
ucucuaaagacggaccgcu

SEQ ID NO: 1062940 - RNA, 19 nt, Artificial Sequence
  Description of Artificial Sequence: Synthetic oligonucleotide
aagugccaaagauucgcca

SEQ ID NO: 1062941 - RNA, 19 nt, Artificial Sequence
  Description of Artificial Sequence: Synthetic oligonucleotide
gacaucucuaaagacggac

SEQ ID NO: 1062942 - RNA, 19 nt, Artificial Sequence
  Description of Artificial Sequence: Synthetic oligonucleotide
gaaacgauacauguuucuc

SEQ ID NO: 1062943 - RNA, 19 nt, Artificial Sequence
  Description of Artificial Sequence: Synthetic oligonucleotide
aagacggaccgcugcuuuc

SEQ ID NO: 1062944 - RNA, 19 nt, Artificial Sequence
  Description of Artificial Sequence: Synthetic oligonucleotide
aucucuaaagacggaccgc

SEQ ID NO: 1062945 - RNA, 19 nt, Artificial Sequence
  Description of Artificial Sequence: Synthetic oligonucleotide
aagagauuuuccaagcauu

SEQ ID NO: 1062946 - RNA, 19 nt, Artificial Sequence
  Description of Artificial Sequence: Synthetic oligonucleotide
cuacucgugcgucugugcg

SEQ ID NO: 1062947 - RNA, 19 nt, Artificial Sequence
  Description of Artificial Sequence: Synthetic oligonucleotide
agaauucauuaauuuguaa

SEQ ID NO: 1062948 - RNA, 19 nt, Artificial Sequence
  Description of Artificial Sequence: Synthetic oligonucleotide
uuaucucggcauuugcuuc

SEQ ID NO: 1062949 - RNA, 19 nt, Artificial Sequence
  Description of Artificial Sequence: Synthetic oligonucleotide
guuugccuagccuggauac

SEQ ID NO: 1062950 - RNA, 19 nt, Artificial Sequence
  Description of Artificial Sequence: Synthetic oligonucleotide
aauuuaccucaagauaaaa

SEQ ID NO: 1062951 - RNA, 19 nt, Artificial Sequence
  Description of Artificial Sequence: Synthetic oligonucleotide
uuguucgagcuuugaaagc

SEQ ID NO: 1062952 - RNA, 19 nt, Artificial Sequence
  Description of Artificial Sequence: Synthetic oligonucleotide
aucgcuauagccacugcag

SEQ ID NO: 1062953 - RNA, 19 nt, Artificial Sequence
  Description of Artificial Sequence: Synthetic oligonucleotide
cagaaauccccgugaagag

SEQ ID NO: 1062954 - RNA, 19 nt, Artificial Sequence
  Description of Artificial Sequence: Synthetic oligonucleotide
gugacucauuguuucaaug

SEQ ID NO: 1062955 - RNA, 19 nt, Artificial Sequence
  Description of Artificial Sequence: Synthetic oligonucleotide
uucagacagcgcucaaugc

SEQ ID NO: 1062956 - RNA, 19 nt, Artificial Sequence
  Description of Artificial Sequence: Synthetic oligonucleotide
ucgggcuaacaagagaggc

SEQ ID NO: 1062957 - RNA, 19 nt, Artificial Sequence
  Description of Artificial Sequence: Synthetic oligonucleotide
gaugugaagcacuguauua

SEQ ID NO: 1062958 - RNA, 19 nt, Artificial Sequence
  Description of Artificial Sequence: Synthetic oligonucleotide
gaucgcuauagccacugca

SEQ ID NO: 1062959 - RNA, 19 nt, Artificial Sequence
  Description of Artificial Sequence: Synthetic oligonucleotide
uaacaauguccacgcaaga

SEQ ID NO: 1062960 - RNA, 19 nt, Artificial Sequence
  Description of Artificial Sequence: Synthetic oligonucleotide
cugauugggcauaugguca

SEQ ID NO: 1062961 - RNA, 19 nt, Artificial Sequence
  Description of Artificial Sequence: Synthetic oligonucleotide
gaugacgcuacugucuuuc

SEQ ID NO: 1062962 - RNA, 19 nt, Artificial Sequence
  Description of Artificial Sequence: Synthetic oligonucleotide
acucgugcgucugugcggc

SEQ ID NO: 1062963 - RNA, 19 nt, Artificial Sequence
  Description of Artificial Sequence: Synthetic oligonucleotide
uacucgugcgucugugcgg

SEQ ID NO: 1062964 - RNA, 19 nt, Artificial Sequence
  Description of Artificial Sequence: Synthetic oligonucleotide
cagacgucuagaagaauuc

SEQ ID NO: 1062965 - RNA, 19 nt, Artificial Sequence
  Description of Artificial Sequence: Synthetic oligonucleotide
agaaaggaggcugggaagu

SEQ ID NO: 1062966 - RNA, 19 nt, Artificial Sequence
  Description of Artificial Sequence: Synthetic oligonucleotide
agcgaggaucagccgaugg

SEQ ID NO: 1062967 - RNA, 19 nt, Artificial Sequence
  Description of Artificial Sequence: Synthetic oligonucleotide
guacucuaagucuucuuga

SEQ ID NO: 1062968 - RNA, 19 nt, Artificial Sequence
  Description of Artificial Sequence: Synthetic oligonucleotide
aaagacggaccgcugcuuu

SEQ ID NO: 1062969 - RNA, 19 nt, Artificial Sequence
  Description of Artificial Sequence: Synthetic oligonucleotide
aagauaggacuugcugaag

SEQ ID NO: 1062970 - RNA, 19 nt, Artificial Sequence
  Description of Artificial Sequence: Synthetic oligonucleotide
augcuaucaguuaaaguca

SEQ ID NO: 1062971 - RNA, 19 nt, Artificial Sequence
  Description of Artificial Sequence: Synthetic oligonucleotide
gaaagguugaacaguccga

SEQ ID NO: 1062972 - RNA, 19 nt, Artificial Sequence
  Description of Artificial Sequence: Synthetic oligonucleotide
ccaaagauucgccagcagc

SEQ ID NO: 1062973 - RNA, 19 nt, Artificial Sequence
  Description of Artificial Sequence: Synthetic oligonucleotide
aagauucgccagcagcaau

SEQ ID NO: 1062974 - RNA, 19 nt, Artificial Sequence
  Description of Artificial Sequence: Synthetic oligonucleotide
ucuacucgugcgucugugc

SEQ ID NO: 1062975 - RNA, 19 nt, Artificial Sequence
  Description of Artificial Sequence: Synthetic oligonucleotide
gacgcuacugucuuucucu

SEQ ID NO: 1062976 - RNA, 19 nt, Artificial Sequence
  Description of Artificial Sequence: Synthetic oligonucleotide
cagaagugccaaagauucg

SEQ ID NO: 1062977 - RNA, 19 nt, Artificial Sequence
  Description of Artificial Sequence: Synthetic oligonucleotide
cucuuaucucggcauuugc

SEQ ID NO: 1062978 - RNA, 19 nt, Artificial Sequence
  Description of Artificial Sequence: Synthetic oligonucleotide
gaagugccaaagauucgcc

SEQ ID NO: 1062979 - RNA, 19 nt, Artificial Sequence
  Description of Artificial Sequence: Synthetic oligonucleotide
ucgcuauagccacugcagu

SEQ ID NO: 1062980 - RNA, 19 nt, Artificial Sequence
  Description of Artificial Sequence: Synthetic oligonucleotide
cugcgagcggaaacgauac

SEQ ID NO: 1062981 - RNA, 19 nt, Artificial Sequence
  Description of Artificial Sequence: Synthetic oligonucleotide
cuuaaaggugucauaggua

SEQ ID NO: 1062982 - RNA, 19 nt, Artificial Sequence
  Description of Artificial Sequence: Synthetic oligonucleotide
caauggaugcgucuucauc

SEQ ID NO: 1062983 - RNA, 19 nt, Artificial Sequence
  Description of Artificial Sequence: Synthetic oligonucleotide
aauccaccccuacaucaaa

SEQ ID NO: 1062984 - RNA, 19 nt, Artificial Sequence
  Description of Artificial Sequence: Synthetic oligonucleotide
ugcguucagggccaaacuu

SEQ ID NO: 1062985 - RNA, 19 nt, Artificial Sequence
  Description of Artificial Sequence: Synthetic oligonucleotide
uacacucggagcucagcga

SEQ ID NO: 1062986 - RNA, 19 nt, Artificial Sequence
  Description of Artificial Sequence: Synthetic oligonucleotide
gacgucuagaagaauucuc

SEQ ID NO: 1062987 - RNA, 19 nt, Artificial Sequence
  Description of Artificial Sequence: Synthetic oligonucleotide
ggucaaagaauccaugucu

SEQ ID NO: 1062988 - RNA, 19 nt, Artificial Sequence
  Description of Artificial Sequence: Synthetic oligonucleotide
aaagauucgccagcagcaa

SEQ ID NO: 1062989 - RNA, 19 nt, Artificial Sequence
  Description of Artificial Sequence: Synthetic oligonucleotide
ggguuaggucaauuaaucc

SEQ ID NO: 1062990 - RNA, 19 nt, Artificial Sequence
  Description of Artificial Sequence: Synthetic oligonucleotide
aagcacuguauuaggggug

SEQ ID NO: 1062991 - RNA, 19 nt, Artificial Sequence
  Description of Artificial Sequence: Synthetic oligonucleotide
gcagaguuauauaaaugcc

SEQ ID NO: 1062992 - RNA, 19 nt, Artificial Sequence
  Description of Artificial Sequence: Synthetic oligonucleotide
ucagcgaggaucagccgau

SEQ ID NO: 1062993 - RNA, 19 nt, Artificial Sequence
  Description of Artificial Sequence: Synthetic oligonucleotide
ugccuagccuggauacuag

SEQ ID NO: 1062994 - RNA, 19 nt, Artificial Sequence
  Description of Artificial Sequence: Synthetic oligonucleotide
cucgggcuaacaagagagg

SEQ ID NO: 1062995 - RNA, 19 nt, Artificial Sequence
  Description of Artificial Sequence: Synthetic oligonucleotide
uugcuucgagcuuuuguuc

SEQ ID NO: 1062996 - RNA, 19 nt, Artificial Sequence
  Description of Artificial Sequence: Synthetic oligonucleotide
caugcguucagggccaaac

SEQ ID NO: 1062997 - RNA, 19 nt, Artificial Sequence
  Description of Artificial Sequence: Synthetic oligonucleotide
cuaucaauauacaugcguu

SEQ ID NO: 1062998 - RNA, 19 nt, Artificial Sequence
  Description of Artificial Sequence: Synthetic oligonucleotide
uucgagcuuuuguucgagc

SEQ ID NO: 1062999 - RNA, 19 nt, Artificial Sequence
  Description of Artificial Sequence: Synthetic oligonucleotide
gagucucgggcuaacaaga

SEQ ID NO: 1063000 - RNA, 19 nt, Artificial Sequence
  Description of Artificial Sequence: Synthetic oligonucleotide
acagcgcucaaugcuauca

SEQ ID NO: 1063001 - RNA, 19 nt, Artificial Sequence
  Description of Artificial Sequence: Synthetic oligonucleotide
gcuaacaagagaggcgagg

SEQ ID NO: 1063002 - RNA, 19 nt, Artificial Sequence
  Description of Artificial Sequence: Synthetic oligonucleotide
gaugcgucuucaucacuga

SEQ ID NO: 1063003 - RNA, 19 nt, Artificial Sequence
  Description of Artificial Sequence: Synthetic oligonucleotide
guauuaggggugcugcaga

SEQ ID NO: 1063004 - RNA, 19 nt, Artificial Sequence
  Description of Artificial Sequence: Synthetic oligonucleotide
uuaggucaauuaaucccuu

SEQ ID NO: 1063005 - RNA, 19 nt, Artificial Sequence
  Description of Artificial Sequence: Synthetic oligonucleotide
gagcggaaacgauacaugu

SEQ ID NO: 1063006 - RNA, 19 nt, Artificial Sequence
  Description of Artificial Sequence: Synthetic oligonucleotide
gcuaucaauauacaugcgu

SEQ ID NO: 1063007 - RNA, 19 nt, Artificial Sequence
  Description of Artificial Sequence: Synthetic oligonucleotide
uugggcauauggucaguaa

SEQ ID NO: 1063008 - RNA, 19 nt, Artificial Sequence
  Description of Artificial Sequence: Synthetic oligonucleotide
ugacgcuacugucuuucuc

SEQ ID NO: 1063009 - RNA, 19 nt, Artificial Sequence
  Description of Artificial Sequence: Synthetic oligonucleotide
cuauagccacugcagugac

SEQ ID NO: 1063010 - RNA, 19 nt, Artificial Sequence
  Description of Artificial Sequence: Synthetic oligonucleotide
uccacggcccucaggacau

SEQ ID NO: 1063011 - RNA, 19 nt, Artificial Sequence
  Description of Artificial Sequence: Synthetic oligonucleotide
cucagcgaggaucagccga

SEQ ID NO: 1063012 - RNA, 19 nt, Artificial Sequence
  Description of Artificial Sequence: Synthetic oligonucleotide
agcgcucaaugcuaucagu

SEQ ID NO: 1063013 - RNA, 19 nt, Artificial Sequence
  Description of Artificial Sequence: Synthetic oligonucleotide
agacgucuagaagaauucu

SEQ ID NO: 1063014 - RNA, 19 nt, Artificial Sequence
  Description of Artificial Sequence: Synthetic oligonucleotide
aucgaggacuucuggucca

SEQ ID NO: 1063015 - RNA, 19 nt, Artificial Sequence
  Description of Artificial Sequence: Synthetic oligonucleotide
aggaucgcuauagccacug

SEQ ID NO: 1063016 - RNA, 19 nt, Artificial Sequence
  Description of Artificial Sequence: Synthetic oligonucleotide
ucaauggaugcgucuucau

SEQ ID NO: 1063017 - RNA, 19 nt, Artificial Sequence
  Description of Artificial Sequence: Synthetic oligonucleotide
ggaugcgucuucaucacug

SEQ ID NO: 1063018 - RNA, 19 nt, Artificial Sequence
  Description of Artificial Sequence: Synthetic oligonucleotide
ugaguuccuuccucaucga

SEQ ID NO: 1063019 - RNA, 19 nt, Artificial Sequence
  Description of Artificial Sequence: Synthetic oligonucleotide
caguuaaagucauucuucu

SEQ ID NO: 1063020 - RNA, 19 nt, Artificial Sequence
  Description of Artificial Sequence: Synthetic oligonucleotide
augcguucagggccaaacu

SEQ ID NO: 1063021 - RNA, 19 nt, Artificial Sequence
  Description of Artificial Sequence: Synthetic oligonucleotide
agggccaaacuuaacaguu

SEQ ID NO: 1063022 - RNA, 19 nt, Artificial Sequence
  Description of Artificial Sequence: Synthetic oligonucleotide
cucuaaagacggaccgcug

SEQ ID NO: 1063023 - RNA, 19 nt, Artificial Sequence
  Description of Artificial Sequence: Synthetic oligonucleotide
cacggugcuuauuuccauc

SEQ ID NO: 1063024 - RNA, 19 nt, Artificial Sequence
  Description of Artificial Sequence: Synthetic oligonucleotide
cacgcaagaagggagcuga

SEQ ID NO: 1063025 - RNA, 19 nt, Artificial Sequence
  Description of Artificial Sequence: Synthetic oligonucleotide
ggucaauuaaucccuucaa

SEQ ID NO: 1063026 - RNA, 19 nt, Artificial Sequence
  Description of Artificial Sequence: Synthetic oligonucleotide
aacagccaucaaaugcaga

SEQ ID NO: 1063027 - RNA, 19 nt, Artificial Sequence
  Description of Artificial Sequence: Synthetic oligonucleotide
gauucgccagcagcaauuc

SEQ ID NO: 1063028 - RNA, 19 nt, Artificial Sequence
  Description of Artificial Sequence: Synthetic oligonucleotide
cugcacugucuacucgugc

SEQ ID NO: 1063029 - RNA, 19 nt, Artificial Sequence
  Description of Artificial Sequence: Synthetic oligonucleotide
cuuaucucggcauuugcuu

SEQ ID NO: 1063030 - RNA, 19 nt, Artificial Sequence
  Description of Artificial Sequence: Synthetic oligonucleotide
uuugccuagccuggauacu

SEQ ID NO: 1063031 - RNA, 19 nt, Artificial Sequence
  Description of Artificial Sequence: Synthetic oligonucleotide
cucggcaaaacuggaagga

SEQ ID NO: 1063032 - RNA, 19 nt, Artificial Sequence
  Description of Artificial Sequence: Synthetic oligonucleotide
cagcgcucaaugcuaucag

SEQ ID NO: 1063033 - RNA, 19 nt, Artificial Sequence
  Description of Artificial Sequence: Synthetic oligonucleotide
ugucuacucgugcgucugu

SEQ ID NO: 1063034 - RNA, 19 nt, Artificial Sequence
  Description of Artificial Sequence: Synthetic oligonucleotide
auuaggggugcugcagaug

SEQ ID NO: 1063035 - RNA, 19 nt, Artificial Sequence
  Description of Artificial Sequence: Synthetic oligonucleotide
auacaugcguucagggcca

SEQ ID NO: 1063036 - RNA, 19 nt, Artificial Sequence
  Description of Artificial Sequence: Synthetic oligonucleotide
cuugucuucgcacucuuau

SEQ ID NO: 1063037 - RNA, 19 nt, Artificial Sequence
  Description of Artificial Sequence: Synthetic oligonucleotide
cuucgagcuuuuguucgag

SEQ ID NO: 1063038 - RNA, 19 nt, Artificial Sequence
  Description of Artificial Sequence: Synthetic oligonucleotide
uuucaaauccagggcccaa

SEQ ID NO: 1063039 - RNA, 19 nt, Artificial Sequence
  Description of Artificial Sequence: Synthetic oligonucleotide
gcucaaugcuaucaguuaa

SEQ ID NO: 1063040 - RNA, 19 nt, Artificial Sequence
  Description of Artificial Sequence: Synthetic oligonucleotide
cuuuaagauaggacuugcu

SEQ ID NO: 1063041 - RNA, 19 nt, Artificial Sequence
  Description of Artificial Sequence: Synthetic oligonucleotide
caaaacgagaaaucuucau

SEQ ID NO: 1063042 - RNA, 19 nt, Artificial Sequence
  Description of Artificial Sequence: Synthetic oligonucleotide
ugcgagcggaaacgauaca

SEQ ID NO: 1063043 - RNA, 19 nt, Artificial Sequence
  Description of Artificial Sequence: Synthetic oligonucleotide
ucucggcauuugcuucgag

SEQ ID NO: 1063044 - RNA, 19 nt, Artificial Sequence
  Description of Artificial Sequence: Synthetic oligonucleotide
gggcuaacaagagaggcga

SEQ ID NO: 1063045 - RNA, 19 nt, Artificial Sequence
  Description of Artificial Sequence: Synthetic oligonucleotide
gcuauagccacugcaguga

SEQ ID NO: 1063046 - RNA, 19 nt, Artificial Sequence
  Description of Artificial Sequence: Synthetic oligonucleotide
agauucgccagcagcaauu

SEQ ID NO: 1063047 - RNA, 19 nt, Artificial Sequence
  Description of Artificial Sequence: Synthetic oligonucleotide
guccacgcaagaagggagc

SEQ ID NO: 1063048 - RNA, 19 nt, Artificial Sequence
  Description of Artificial Sequence: Synthetic oligonucleotide
ugucugcaagugguacugc

SEQ ID NO: 1063049 - RNA, 19 nt, Artificial Sequence
  Description of Artificial Sequence: Synthetic oligonucleotide
augacgcuacugucuuucu

SEQ ID NO: 1063050 - RNA, 19 nt, Artificial Sequence
  Description of Artificial Sequence: Synthetic oligonucleotide
ccgugaagagcugcgagcg

SEQ ID NO: 1063051 - RNA, 19 nt, Artificial Sequence
  Description of Artificial Sequence: Synthetic oligonucleotide
gucucgggcuaacaagaga

SEQ ID NO: 1063052 - RNA, 19 nt, Artificial Sequence
  Description of Artificial Sequence: Synthetic oligonucleotide
cuguauuaggggugcugca

SEQ ID NO: 1063053 - RNA, 19 nt, Artificial Sequence
  Description of Artificial Sequence: Synthetic oligonucleotide
ggugcuuauuuccaucugu

SEQ ID NO: 1063054 - RNA, 19 nt, Artificial Sequence
  Description of Artificial Sequence: Synthetic oligonucleotide
ggaaacgauacauguuucu

SEQ ID NO: 1063055 - RNA, 19 nt, Artificial Sequence
  Description of Artificial Sequence: Synthetic oligonucleotide
cccggugccgccuacacuc

SEQ ID NO: 1063056 - RNA, 19 nt, Artificial Sequence
  Description of Artificial Sequence: Synthetic oligonucleotide
cagacagcgcucaaugcua

SEQ ID NO: 1063057 - RNA, 19 nt, Artificial Sequence
  Description of Artificial Sequence: Synthetic oligonucleotide
ggauacuagcuguuccauc

SEQ ID NO: 1063058 - RNA, 19 nt, Artificial Sequence
  Description of Artificial Sequence: Synthetic oligonucleotide
caccuucaagagcugccug

SEQ ID NO: 1063059 - RNA, 19 nt, Artificial Sequence
  Description of Artificial Sequence: Synthetic oligonucleotide
agcugcagaguuauauaaa

SEQ ID NO: 1063060 - RNA, 19 nt, Artificial Sequence
  Description of Artificial Sequence: Synthetic oligonucleotide
cucaucgaggacuucuggu

SEQ ID NO: 1063061 - RNA, 19 nt, Artificial Sequence
  Description of Artificial Sequence: Synthetic oligonucleotide
cgggcuaacaagagaggcg

SEQ ID NO: 1063062 - RNA, 19 nt, Artificial Sequence
  Description of Artificial Sequence: Synthetic oligonucleotide
gcugcagaguuauauaaau

SEQ ID NO: 1063063 - RNA, 19 nt, Artificial Sequence
  Description of Artificial Sequence: Synthetic oligonucleotide
ucccuucaauuuguacucu

SEQ ID NO: 1063064 - RNA, 19 nt, Artificial Sequence
  Description of Artificial Sequence: Synthetic oligonucleotide
agacggaccgcugcuuucu

SEQ ID NO: 1063065 - RNA, 19 nt, Artificial Sequence
  Description of Artificial Sequence: Synthetic oligonucleotide
cuaaagacggaccgcugcu

SEQ ID NO: 1063066 - RNA, 19 nt, Artificial Sequence
  Description of Artificial Sequence: Synthetic oligonucleotide
cgagucucgggcuaacaag

SEQ ID NO: 1063067 - RNA, 19 nt, Artificial Sequence
  Description of Artificial Sequence: Synthetic oligonucleotide
ugccgccuacacucggagc

SEQ ID NO: 1063068 - RNA, 19 nt, Artificial Sequence
  Description of Artificial Sequence: Synthetic oligonucleotide
aaauccccgugaagagcug

SEQ ID NO: 1063069 - RNA, 19 nt, Artificial Sequence
  Description of Artificial Sequence: Synthetic oligonucleotide
augcgucuucaucacugaa

SEQ ID NO: 1063070 - RNA, 19 nt, Artificial Sequence
  Description of Artificial Sequence: Synthetic oligonucleotide
auugggcauauggucagua

SEQ ID NO: 1063071 - RNA, 19 nt, Artificial Sequence
  Description of Artificial Sequence: Synthetic oligonucleotide
acggaccgcugcuuucucu

SEQ ID NO: 1063072 - RNA, 19 nt, Artificial Sequence
  Description of Artificial Sequence: Synthetic oligonucleotide
gacagcgcucaaugcuauc

SEQ ID NO: 1063073 - RNA, 19 nt, Artificial Sequence
  Description of Artificial Sequence: Synthetic oligonucleotide
gcggaaacgauacauguuu

SEQ ID NO: 1063074 - RNA, 19 nt, Artificial Sequence
  Description of Artificial Sequence: Synthetic oligonucleotide
ccucaucgaggacuucugg

SEQ ID NO: 1063075 - RNA, 19 nt, Artificial Sequence
  Description of Artificial Sequence: Synthetic oligonucleotide
gucaaagaauccaugucuu

SEQ ID NO: 1063076 - RNA, 19 nt, Artificial Sequence
  Description of Artificial Sequence: Synthetic oligonucleotide
cacugucuacucgugcguc

SEQ ID NO: 1063077 - RNA, 19 nt, Artificial Sequence
  Description of Artificial Sequence: Synthetic oligonucleotide
agcggaaacgauacauguu

SEQ ID NO: 1063078 - RNA, 19 nt, Artificial Sequence
  Description of Artificial Sequence: Synthetic oligonucleotide
gaggcggcggcggcggcgg

SEQ ID NO: 1063079 - RNA, 19 nt, Artificial Sequence
  Description of Artificial Sequence: Synthetic oligonucleotide
ggcauauggucaguaacaa

SEQ ID NO: 1063080 - RNA, 19 nt, Artificial Sequence
  Description of Artificial Sequence: Synthetic oligonucleotide
acgcuacugucuuucucuu

SEQ ID NO: 1063081 - RNA, 19 nt, Artificial Sequence
  Description of Artificial Sequence: Synthetic oligonucleotide
guggccgccgacguugcug

SEQ ID NO: 1063082 - RNA, 19 nt, Artificial Sequence
  Description of Artificial Sequence: Synthetic oligonucleotide
ggucaguaacaauguccac

SEQ ID NO: 1063083 - RNA, 19 nt, Artificial Sequence
  Description of Artificial Sequence: Synthetic oligonucleotide
cgagcggaaacgauacaug

SEQ ID NO: 1063084 - RNA, 19 nt, Artificial Sequence
  Description of Artificial Sequence: Synthetic oligonucleotide
cgcuauagccacugcagug

SEQ ID NO: 1063085 - RNA, 19 nt, Artificial Sequence
  Description of Artificial Sequence: Synthetic oligonucleotide
cagggccaaacuuaacagu

SEQ ID NO: 1063086 - RNA, 19 nt, Artificial Sequence
  Description of Artificial Sequence: Synthetic oligonucleotide
uccccgugaagagcugcga

SEQ ID NO: 1063087 - RNA, 19 nt, Artificial Sequence
  Description of Artificial Sequence: Synthetic oligonucleotide
caagugguacugcaucccu

SEQ ID NO: 1063088 - RNA, 19 nt, Artificial Sequence
  Description of Artificial Sequence: Synthetic oligonucleotide
agaugacgcuacugucuuu

SEQ ID NO: 1063089 - RNA, 19 nt, Artificial Sequence
  Description of Artificial Sequence: Synthetic oligonucleotide
gguugaacaguccgaugcu

SEQ ID NO: 1063090 - RNA, 19 nt, Artificial Sequence
  Description of Artificial Sequence: Synthetic oligonucleotide
gccuagccuggauacuagc

SEQ ID NO: 1063091 - RNA, 19 nt, Artificial Sequence
  Description of Artificial Sequence: Synthetic oligonucleotide
gccgccuacacucggagcu

SEQ ID NO: 1063092 - RNA, 19 nt, Artificial Sequence
  Description of Artificial Sequence: Synthetic oligonucleotide
ggcacggugcuuauuucca

SEQ ID NO: 1063093 - RNA, 19 nt, Artificial Sequence
  Description of Artificial Sequence: Synthetic oligonucleotide
gcuucgagcuuuuguucga

SEQ ID NO: 1063094 - RNA, 19 nt, Artificial Sequence
  Description of Artificial Sequence: Synthetic oligonucleotide
gcucagcgaggaucagccg

SEQ ID NO: 1063095 - RNA, 19 nt, Artificial Sequence
  Description of Artificial Sequence: Synthetic oligonucleotide
agacagcgcucaaugcuau

SEQ ID NO: 1063096 - RNA, 19 nt, Artificial Sequence
  Description of Artificial Sequence: Synthetic oligonucleotide
ucggcaucgugggccgccc

SEQ ID NO: 1063097 - RNA, 19 nt, Artificial Sequence
  Description of Artificial Sequence: Synthetic oligonucleotide
gacggaccgcugcuuucuc

SEQ ID NO: 1063098 - RNA, 19 nt, Artificial Sequence
  Description of Artificial Sequence: Synthetic oligonucleotide
ggaucgcuauagccacugc

SEQ ID NO: 1063099 - RNA, 19 nt, Artificial Sequence
  Description of Artificial Sequence: Synthetic oligonucleotide
cauugcgaaggaauucauu

SEQ ID NO: 1063100 - RNA, 19 nt, Artificial Sequence
  Description of Artificial Sequence: Synthetic oligonucleotide
auccucggcaaaacuggaa

SEQ ID NO: 1063101 - RNA, 19 nt, Artificial Sequence
  Description of Artificial Sequence: Synthetic oligonucleotide
caguccgaugcuggccacc

SEQ ID NO: 1063102 - RNA, 19 nt, Artificial Sequence
  Description of Artificial Sequence: Synthetic oligonucleotide
gagcugcgagcggaaacga

SEQ ID NO: 1063103 - RNA, 19 nt, Artificial Sequence
  Description of Artificial Sequence: Synthetic oligonucleotide
gcagaugacgcuacugucu

SEQ ID NO: 1063104 - RNA, 19 nt, Artificial Sequence
  Description of Artificial Sequence: Synthetic oligonucleotide
caucgugggccgcccggug

SEQ ID NO: 1063105 - RNA, 19 nt, Artificial Sequence
  Description of Artificial Sequence: Synthetic oligonucleotide
ucgaggacuucugguccau

SEQ ID NO: 1063106 - RNA, 19 nt, Artificial Sequence
  Description of Artificial Sequence: Synthetic oligonucleotide
aggcgagucucgggcuaac

SEQ ID NO: 1063107 - RNA, 19 nt, Artificial Sequence
  Description of Artificial Sequence: Synthetic oligonucleotide
gcgaaggaauucauuuguc

SEQ ID NO: 1063108 - RNA, 19 nt, Artificial Sequence
  Description of Artificial Sequence: Synthetic oligonucleotide
caguaacaauguccacgca

SEQ ID NO: 1063109 - RNA, 19 nt, Artificial Sequence
  Description of Artificial Sequence: Synthetic oligonucleotide
ggaccgcugcuuucucuug

SEQ ID NO: 1063110 - RNA, 19 nt, Artificial Sequence
  Description of Artificial Sequence: Synthetic oligonucleotide
cagaugacgcuacugucuu

SEQ ID NO: 1063111 - RNA, 19 nt, Artificial Sequence
  Description of Artificial Sequence: Synthetic oligonucleotide
gcgagucucgggcuaacaa

SEQ ID NO: 1063112 - RNA, 19 nt, Artificial Sequence
  Description of Artificial Sequence: Synthetic oligonucleotide
ggcuaacaagagaggcgag

SEQ ID NO: 1063113 - RNA, 19 nt, Artificial Sequence
  Description of Artificial Sequence: Synthetic oligonucleotide
cucgugcgucugugcggcg

SEQ ID NO: 1063114 - RNA, 19 nt, Artificial Sequence
  Description of Artificial Sequence: Synthetic oligonucleotide
gagcggcgcgggugagagg

SEQ ID NO: 1063115 - RNA, 19 nt, Artificial Sequence
  Description of Artificial Sequence: Synthetic oligonucleotide
gccguggccgccgacguug

SEQ ID NO: 1063116 - RNA, 19 nt, Artificial Sequence
  Description of Artificial Sequence: Synthetic oligonucleotide
cacugcagugacucauugu

SEQ ID NO: 1063117 - RNA, 19 nt, Artificial Sequence
  Description of Artificial Sequence: Synthetic oligonucleotide
cggagcaucugggucaaag

SEQ ID NO: 1063118 - RNA, 19 nt, Artificial Sequence
  Description of Artificial Sequence: Synthetic oligonucleotide
ccuacacucggagcucagc

SEQ ID NO: 1063119 - RNA, 19 nt, Artificial Sequence
  Description of Artificial Sequence: Synthetic oligonucleotide
cugucucuaaaagcuuaua

SEQ ID NO: 1063120 - RNA, 19 nt, Artificial Sequence
  Description of Artificial Sequence: Synthetic oligonucleotide
guacugcaucccugaucca

SEQ ID NO: 1063121 - RNA, 19 nt, Artificial Sequence
  Description of Artificial Sequence: Synthetic oligonucleotide
gagcccggagcaucugggu

SEQ ID NO: 1063122 - RNA, 19 nt, Artificial Sequence
  Description of Artificial Sequence: Synthetic oligonucleotide
gcuuugaaagcugcagagu

SEQ ID NO: 1063123 - RNA, 19 nt, Artificial Sequence
  Description of Artificial Sequence: Synthetic oligonucleotide
gcguucagggccaaacuua

SEQ ID NO: 1063124 - RNA, 19 nt, Artificial Sequence
  Description of Artificial Sequence: Synthetic oligonucleotide
uacaugcguucagggccaa

SEQ ID NO: 1063125 - RNA, 19 nt, Artificial Sequence
  Description of Artificial Sequence: Synthetic oligonucleotide
agcugcgagcggaaacgau

SEQ ID NO: 1063126 - RNA, 19 nt, Artificial Sequence
  Description of Artificial Sequence: Synthetic oligonucleotide
ccgccgacguugcugcccc

SEQ ID NO: 1063127 - RNA, 19 nt, Artificial Sequence
  Description of Artificial Sequence: Synthetic oligonucleotide
gcacucuuaucaaggguua

SEQ ID NO: 1063128 - RNA, 19 nt, Artificial Sequence
  Description of Artificial Sequence: Synthetic oligonucleotide
gcgaggagcggcgcgggug

SEQ ID NO: 1063129 - RNA, 19 nt, Artificial Sequence
  Description of Artificial Sequence: Synthetic oligonucleotide
gcgagcggaaacgauacau

SEQ ID NO: 1063130 - RNA, 19 nt, Artificial Sequence
  Description of Artificial Sequence: Synthetic oligonucleotide
ggauugguccaagagucuu

SEQ ID NO: 1063131 - RNA, 19 nt, Artificial Sequence
  Description of Artificial Sequence: Synthetic oligonucleotide
aggagcggcgcgggugaga

SEQ ID NO: 1063132 - RNA, 19 nt, Artificial Sequence
  Description of Artificial Sequence: Synthetic oligonucleotide
ccggugccgccuacacucg

SEQ ID NO: 1063133 - RNA, 19 nt, Artificial Sequence
  Description of Artificial Sequence: Synthetic oligonucleotide
gcacugucuacucgugcgu

SEQ ID NO: 1063134 - RNA, 19 nt, Artificial Sequence
  Description of Artificial Sequence: Synthetic oligonucleotide
ugccguggccgccgacguu

SEQ ID NO: 1063135 - RNA, 19 nt, Artificial Sequence
  Description of Artificial Sequence: Synthetic oligonucleotide
cgcucaaugcuaucaguua

SEQ ID NO: 1063136 - RNA, 19 nt, Artificial Sequence
  Description of Artificial Sequence: Synthetic oligonucleotide
aggcggcggcggcggcggc

SEQ ID NO: 1063137 - RNA, 19 nt, Artificial Sequence
  Description of Artificial Sequence: Synthetic oligonucleotide
acgcaagaagggagcugau

SEQ ID NO: 1063138 - RNA, 19 nt, Artificial Sequence
  Description of Artificial Sequence: Synthetic oligonucleotide
acaugcguucagggccaaa

SEQ ID NO: 1063139 - RNA, 19 nt, Artificial Sequence
  Description of Artificial Sequence: Synthetic oligonucleotide
cggugcuuauuuccaucug

SEQ ID NO: 1063140 - RNA, 19 nt, Artificial Sequence
  Description of Artificial Sequence: Synthetic oligonucleotide
gcgcucaaugcuaucaguu

SEQ ID NO: 1063141 - RNA, 19 nt, Artificial Sequence
  Description of Artificial Sequence: Synthetic oligonucleotide
cgacguugcugccccggag

SEQ ID NO: 1063142 - RNA, 19 nt, Artificial Sequence
  Description of Artificial Sequence: Synthetic oligonucleotide
gccuacacucggagcucag

SEQ ID NO: 1063143 - RNA, 19 nt, Artificial Sequence
  Description of Artificial Sequence: Synthetic oligonucleotide
ggcgagucucgggcuaaca

SEQ ID NO: 1063144 - RNA, 19 nt, Artificial Sequence
  Description of Artificial Sequence: Synthetic oligonucleotide
gcguugcgccucuuguucu

SEQ ID NO: 1063145 - RNA, 19 nt, Artificial Sequence
  Description of Artificial Sequence: Synthetic oligonucleotide
cucguuccuccacggcccu

SEQ ID NO: 1063146 - RNA, 19 nt, Artificial Sequence
  Description of Artificial Sequence: Synthetic oligonucleotide
gcacggugcuuauuuccau

SEQ ID NO: 1063147 - RNA, 19 nt, Artificial Sequence
  Description of Artificial Sequence: Synthetic oligonucleotide
ccguggccgccgacguugc

SEQ ID NO: 1063148 - RNA, 19 nt, Artificial Sequence
  Description of Artificial Sequence: Synthetic oligonucleotide
gcggcggcggcggcggcag

SEQ ID NO: 1063149 - RNA, 19 nt, Artificial Sequence
  Description of Artificial Sequence: Synthetic oligonucleotide
ccgccuacacucggagcuc

SEQ ID NO: 1063150 - RNA, 19 nt, Artificial Sequence
  Description of Artificial Sequence: Synthetic oligonucleotide
cgcccggugccgccuacac

SEQ ID NO: 1063151 - RNA, 19 nt, Artificial Sequence
  Description of Artificial Sequence: Synthetic oligonucleotide
gcacuguauuaggggugcu

SEQ ID NO: 1063152 - RNA, 19 nt, Artificial Sequence
  Description of Artificial Sequence: Synthetic oligonucleotide
cgccuacacucggagcuca

SEQ ID NO: 1063153 - RNA, 19 nt, Artificial Sequence
  Description of Artificial Sequence: Synthetic oligonucleotide
gcccaagcucaaauacauu

SEQ ID NO: 1063154 - RNA, 19 nt, Artificial Sequence
  Description of Artificial Sequence: Synthetic oligonucleotide
gccgcccggugccgccuac

SEQ ID NO: 1063155 - RNA, 19 nt, Artificial Sequence
  Description of Artificial Sequence: Synthetic oligonucleotide
ggcggcggcggcggcggca

SEQ ID NO: 1063156 - RNA, 19 nt, Artificial Sequence
  Description of Artificial Sequence: Synthetic oligonucleotide
cccggagcaucugggucaa

SEQ ID NO: 1063157 - RNA, 19 nt, Artificial Sequence
  Description of Artificial Sequence: Synthetic oligonucleotide
cggaccgcugcuuucucuu

SEQ ID NO: 1063158 - RNA, 19 nt, Artificial Sequence
  Description of Artificial Sequence: Synthetic oligonucleotide
cgccgacguugcugccccg

SEQ ID NO: 1063159 - RNA, 19 nt, Artificial Sequence
  Description of Artificial Sequence: Synthetic oligonucleotide
cguugcgccucuuguucuu

SEQ ID NO: 1063160 - RNA, 19 nt, Artificial Sequence
  Description of Artificial Sequence: Synthetic oligonucleotide
ccgcccggugccgccuaca

SEQ ID NO: 1063161 - RNA, 19 nt, Artificial Sequence
  Description of Artificial Sequence: Synthetic oligonucleotide
cguggccgccgacguugcu

SEQ ID NO: 1063162 - RNA, 19 nt, Artificial Sequence
  Description of Artificial Sequence: Synthetic oligonucleotide
ccggagcaucugggucaaa

SEQ ID NO: 1063163 - RNA, 19 nt, Artificial Sequence
  Description of Artificial Sequence: Synthetic oligonucleotide
uauaacuuagguaugcugg

SEQ ID NO: 1063164 - RNA, 19 nt, Artificial Sequence
  Description of Artificial Sequence: Synthetic oligonucleotide
aauaucagguacaaguugc

SEQ ID NO: 1063165 - RNA, 19 nt, Artificial Sequence
  Description of Artificial Sequence: Synthetic oligonucleotide
uuuaugaucuuuauuaaac

SEQ ID NO: 1063166 - RNA, 19 nt, Artificial Sequence
  Description of Artificial Sequence: Synthetic oligonucleotide
uuucaagcaagccagacgc

SEQ ID NO: 1063167 - RNA, 19 nt, Artificial Sequence
  Description of Artificial Sequence: Synthetic oligonucleotide
ugucaagcgauaaugaccc

SEQ ID NO: 1063168 - RNA, 19 nt, Artificial Sequence
  Description of Artificial Sequence: Synthetic oligonucleotide
uuuaaaccccacauuaagg

SEQ ID NO: 1063169 - RNA, 19 nt, Artificial Sequence
  Description of Artificial Sequence: Synthetic oligonucleotide
uuguuuaugaucuuuauua

SEQ ID NO: 1063170 - RNA, 19 nt, Artificial Sequence
  Description of Artificial Sequence: Synthetic oligonucleotide
acaguuugagcacagacuc

SEQ ID NO: 1063171 - RNA, 19 nt, Artificial Sequence
  Description of Artificial Sequence: Synthetic oligonucleotide
cuacgguagaacuugaugg

SEQ ID NO: 1063172 - RNA, 19 nt, Artificial Sequence
  Description of Artificial Sequence: Synthetic oligonucleotide
aauacuauccagugugcuc

SEQ ID NO: 1063173 - RNA, 19 nt, Artificial Sequence
  Description of Artificial Sequence: Synthetic oligonucleotide
aacuuagguaugcuggcgc

SEQ ID NO: 1063174 - RNA, 19 nt, Artificial Sequence
  Description of Artificial Sequence: Synthetic oligonucleotide
uguuccuaguucuuaaacg

SEQ ID NO: 1063175 - RNA, 19 nt, Artificial Sequence
  Description of Artificial Sequence: Synthetic oligonucleotide
uaugggacgaguuucauac

SEQ ID NO: 1063176 - RNA, 19 nt, Artificial Sequence
  Description of Artificial Sequence: Synthetic oligonucleotide
ucuuaaacggggcacaaug

SEQ ID NO: 1063177 - RNA, 19 nt, Artificial Sequence
  Description of Artificial Sequence: Synthetic oligonucleotide
auaaguuccaacuccaugu

SEQ ID NO: 1063178 - RNA, 19 nt, Artificial Sequence
  Description of Artificial Sequence: Synthetic oligonucleotide
uuuauagucaagugguuug

SEQ ID NO: 1063179 - RNA, 19 nt, Artificial Sequence
  Description of Artificial Sequence: Synthetic oligonucleotide
aauaaguuccaacuccaug

SEQ ID NO: 1063180 - RNA, 19 nt, Artificial Sequence
  Description of Artificial Sequence: Synthetic oligonucleotide
aagacgcuaagucaugcgg

SEQ ID NO: 1063181 - RNA, 19 nt, Artificial Sequence
  Description of Artificial Sequence: Synthetic oligonucleotide
ugcucuaacgaucugaggu

SEQ ID NO: 1063182 - RNA, 19 nt, Artificial Sequence
  Description of Artificial Sequence: Synthetic oligonucleotide
auaacuuagguaugcuggc

SEQ ID NO: 1063183 - RNA, 19 nt, Artificial Sequence
  Description of Artificial Sequence: Synthetic oligonucleotide
uuauacucuucuuaaagga

SEQ ID NO: 1063184 - RNA, 19 nt, Artificial Sequence
  Description of Artificial Sequence: Synthetic oligonucleotide
uguaguauuccacuuggug

SEQ ID NO: 1063185 - RNA, 19 nt, Artificial Sequence
  Description of Artificial Sequence: Synthetic oligonucleotide
acaacuucuaauuucaaaa

SEQ ID NO: 1063186 - RNA, 19 nt, Artificial Sequence
  Description of Artificial Sequence: Synthetic oligonucleotide
aucaaagcgaacacgaggc

SEQ ID NO: 1063187 - RNA, 19 nt, Artificial Sequence
  Description of Artificial Sequence: Synthetic oligonucleotide
uaaucuugaacucaauauc

SEQ ID NO: 1063188 - RNA, 19 nt, Artificial Sequence
  Description of Artificial Sequence: Synthetic oligonucleotide
aacaaauuaccccaagaau

SEQ ID NO: 1063189 - RNA, 19 nt, Artificial Sequence
  Description of Artificial Sequence: Synthetic oligonucleotide
auacuauccagugugcucc

SEQ ID NO: 1063190 - RNA, 19 nt, Artificial Sequence
  Description of Artificial Sequence: Synthetic oligonucleotide
uuaaaccccacauuaaggu

SEQ ID NO: 1063191 - RNA, 19 nt, Artificial Sequence
  Description of Artificial Sequence: Synthetic oligonucleotide
gaaugguggauccagauga

SEQ ID NO: 1063192 - RNA, 19 nt, Artificial Sequence
  Description of Artificial Sequence: Synthetic oligonucleotide
auaaauguacuuaacaacu

SEQ ID NO: 1063193 - RNA, 19 nt, Artificial Sequence
  Description of Artificial Sequence: Synthetic oligonucleotide
ucaacuaccccuuuaaaua

SEQ ID NO: 1063194 - RNA, 19 nt, Artificial Sequence
  Description of Artificial Sequence: Synthetic oligonucleotide
ucggaagauauacaucagg

SEQ ID NO: 1063195 - RNA, 19 nt, Artificial Sequence
  Description of Artificial Sequence: Synthetic oligonucleotide
agauauagaauccucugca

SEQ ID NO: 1063196 - RNA, 19 nt, Artificial Sequence
  Description of Artificial Sequence: Synthetic oligonucleotide
uauagaauccucugcacac

SEQ ID NO: 1063197 - RNA, 19 nt, Artificial Sequence
  Description of Artificial Sequence: Synthetic oligonucleotide
uuaugaucuuuauuaaaca

SEQ ID NO: 1063198 - RNA, 19 nt, Artificial Sequence
  Description of Artificial Sequence: Synthetic oligonucleotide
acauauaacuuagguaugc

SEQ ID NO: 1063199 - RNA, 19 nt, Artificial Sequence
  Description of Artificial Sequence: Synthetic oligonucleotide
ugaacucaauaucagguac

SEQ ID NO: 1063200 - RNA, 19 nt, Artificial Sequence
  Description of Artificial Sequence: Synthetic oligonucleotide
aaagacgcuaagucaugcg

SEQ ID NO: 1063201 - RNA, 19 nt, Artificial Sequence
  Description of Artificial Sequence: Synthetic oligonucleotide
auugcuggaaccuacgccu

SEQ ID NO: 1063202 - RNA, 19 nt, Artificial Sequence
  Description of Artificial Sequence: Synthetic oligonucleotide
uaaauugcuggaaccuacg

SEQ ID NO: 1063203 - RNA, 19 nt, Artificial Sequence
  Description of Artificial Sequence: Synthetic oligonucleotide
cucuauagaaaccauccag

SEQ ID NO: 1063204 - RNA, 19 nt, Artificial Sequence
  Description of Artificial Sequence: Synthetic oligonucleotide
ucuuaguuauuacagcaaa

SEQ ID NO: 1063205 - RNA, 19 nt, Artificial Sequence
  Description of Artificial Sequence: Synthetic oligonucleotide
uacgugacagaucugcuca

SEQ ID NO: 1063206 - RNA, 19 nt, Artificial Sequence
  Description of Artificial Sequence: Synthetic oligonucleotide
uaaguaaucuugaacucaa

SEQ ID NO: 1063207 - RNA, 19 nt, Artificial Sequence
  Description of Artificial Sequence: Synthetic oligonucleotide
uguauguacauauuaugua

SEQ ID NO: 1063208 - RNA, 19 nt, Artificial Sequence
  Description of Artificial Sequence: Synthetic oligonucleotide
uuauguaccuguaguauuc

SEQ ID NO: 1063209 - RNA, 19 nt, Artificial Sequence
  Description of Artificial Sequence: Synthetic oligonucleotide
auaucuauauuuauaguca

SEQ ID NO: 1063210 - RNA, 19 nt, Artificial Sequence
  Description of Artificial Sequence: Synthetic oligonucleotide
agcagaauugcauccguuc

SEQ ID NO: 1063211 - RNA, 19 nt, Artificial Sequence
  Description of Artificial Sequence: Synthetic oligonucleotide
uauaaguaaucuugaacuc

SEQ ID NO: 1063212 - RNA, 19 nt, Artificial Sequence
  Description of Artificial Sequence: Synthetic oligonucleotide
caucggaagauauacauca

SEQ ID NO: 1063213 - RNA, 19 nt, Artificial Sequence
  Description of Artificial Sequence: Synthetic oligonucleotide
auauaacuuagguaugcug

SEQ ID NO: 1063214 - RNA, 19 nt, Artificial Sequence
  Description of Artificial Sequence: Synthetic oligonucleotide
uauauguaguuuuacugau

SEQ ID NO: 1063215 - RNA, 19 nt, Artificial Sequence
  Description of Artificial Sequence: Synthetic oligonucleotide
cuuaaacggggcacaaugg

SEQ ID NO: 1063216 - RNA, 19 nt, Artificial Sequence
  Description of Artificial Sequence: Synthetic oligonucleotide
ugggacgaguuucauacag

SEQ ID NO: 1063217 - RNA, 19 nt, Artificial Sequence
  Description of Artificial Sequence: Synthetic oligonucleotide
auaaugacccagcagaauu

SEQ ID NO: 1063218 - RNA, 19 nt, Artificial Sequence
  Description of Artificial Sequence: Synthetic oligonucleotide
uucacaauggagucugaug

SEQ ID NO: 1063219 - RNA, 19 nt, Artificial Sequence
  Description of Artificial Sequence: Synthetic oligonucleotide
uaaauacuauccagugugc

SEQ ID NO: 1063220 - RNA, 19 nt, Artificial Sequence
  Description of Artificial Sequence: Synthetic oligonucleotide
auauagaauccucugcaca

SEQ ID NO: 1063221 - RNA, 19 nt, Artificial Sequence
  Description of Artificial Sequence: Synthetic oligonucleotide
acugauaugugagucugac

SEQ ID NO: 1063222 - RNA, 19 nt, Artificial Sequence
  Description of Artificial Sequence: Synthetic oligonucleotide
uccauguauguacauauua

SEQ ID NO: 1063223 - RNA, 19 nt, Artificial Sequence
  Description of Artificial Sequence: Synthetic oligonucleotide
auagagagcuccguuuugc

SEQ ID NO: 1063224 - RNA, 19 nt, Artificial Sequence
  Description of Artificial Sequence: Synthetic oligonucleotide
cuaaauugcuggaaccuac

SEQ ID NO: 1063225 - RNA, 19 nt, Artificial Sequence
  Description of Artificial Sequence: Synthetic oligonucleotide
gauauagaauccucugcac

SEQ ID NO: 1063226 - RNA, 19 nt, Artificial Sequence
  Description of Artificial Sequence: Synthetic oligonucleotide
aacgaucugagguccaagu

SEQ ID NO: 1063227 - RNA, 19 nt, Artificial Sequence
  Description of Artificial Sequence: Synthetic oligonucleotide
uguaagugaugugacagga

SEQ ID NO: 1063228 - RNA, 19 nt, Artificial Sequence
  Description of Artificial Sequence: Synthetic oligonucleotide
uuuguuuaugaucuuuauu

SEQ ID NO: 1063229 - RNA, 19 nt, Artificial Sequence
  Description of Artificial Sequence: Synthetic oligonucleotide
aaguugcauagcccuacgg

SEQ ID NO: 1063230 - RNA, 19 nt, Artificial Sequence
  Description of Artificial Sequence: Synthetic oligonucleotide
gguauaaguaaucuugaac

SEQ ID NO: 1063231 - RNA, 19 nt, Artificial Sequence
  Description of Artificial Sequence: Synthetic oligonucleotide
acgacgaaaauaucuauau

SEQ ID NO: 1063232 - RNA, 19 nt, Artificial Sequence
  Description of Artificial Sequence: Synthetic oligonucleotide
cuugucaaucucaaaagca

SEQ ID NO: 1063233 - RNA, 19 nt, Artificial Sequence
  Description of Artificial Sequence: Synthetic oligonucleotide
agagaaugcaguguagcuc

SEQ ID NO: 1063234 - RNA, 19 nt, Artificial Sequence
  Description of Artificial Sequence: Synthetic oligonucleotide
acacuuucaagcaagccag

SEQ ID NO: 1063235 - RNA, 19 nt, Artificial Sequence
  Description of Artificial Sequence: Synthetic oligonucleotide
aaagaaucuuauguaccug

SEQ ID NO: 1063236 - RNA, 19 nt, Artificial Sequence
  Description of Artificial Sequence: Synthetic oligonucleotide
aguugcauagcccuacggu

SEQ ID NO: 1063237 - RNA, 19 nt, Artificial Sequence
  Description of Artificial Sequence: Synthetic oligonucleotide
gaaagaaucuuauguaccu

SEQ ID NO: 1063238 - RNA, 19 nt, Artificial Sequence
  Description of Artificial Sequence: Synthetic oligonucleotide
ucagagaaugcaguguagc

SEQ ID NO: 1063239 - RNA, 19 nt, Artificial Sequence
  Description of Artificial Sequence: Synthetic oligonucleotide
uaaacggggcacaauggac

SEQ ID NO: 1063240 - RNA, 19 nt, Artificial Sequence
  Description of Artificial Sequence: Synthetic oligonucleotide
auagucaagugguuugucu

SEQ ID NO: 1063241 - RNA, 19 nt, Artificial Sequence
  Description of Artificial Sequence: Synthetic oligonucleotide
agaacugauaugugagucu

SEQ ID NO: 1063242 - RNA, 19 nt, Artificial Sequence
  Description of Artificial Sequence: Synthetic oligonucleotide
auagaauccucugcacacc

SEQ ID NO: 1063243 - RNA, 19 nt, Artificial Sequence
  Description of Artificial Sequence: Synthetic oligonucleotide
aaauacuauccagugugcu

SEQ ID NO: 1063244 - RNA, 19 nt, Artificial Sequence
  Description of Artificial Sequence: Synthetic oligonucleotide
caauaucagguacaaguug

SEQ ID NO: 1063245 - RNA, 19 nt, Artificial Sequence
  Description of Artificial Sequence: Synthetic oligonucleotide
caagcgauaaugacccagc

SEQ ID NO: 1063246 - RNA, 19 nt, Artificial Sequence
  Description of Artificial Sequence: Synthetic oligonucleotide
uucuaaauugcuggaaccu

SEQ ID NO: 1063247 - RNA, 19 nt, Artificial Sequence
  Description of Artificial Sequence: Synthetic oligonucleotide
uacgccuggggcaaguuca

SEQ ID NO: 1063248 - RNA, 19 nt, Artificial Sequence
  Description of Artificial Sequence: Synthetic oligonucleotide
augacaagagaucugccau

SEQ ID NO: 1063249 - RNA, 19 nt, Artificial Sequence
  Description of Artificial Sequence: Synthetic oligonucleotide
uccaagucacuugauacca

SEQ ID NO: 1063250 - RNA, 19 nt, Artificial Sequence
  Description of Artificial Sequence: Synthetic oligonucleotide
aggaacacgacgaaaauau

SEQ ID NO: 1063251 - RNA, 19 nt, Artificial Sequence
  Description of Artificial Sequence: Synthetic oligonucleotide
guaaucuugaacucaauau

SEQ ID NO: 1063252 - RNA, 19 nt, Artificial Sequence
  Description of Artificial Sequence: Synthetic oligonucleotide
auagcccuacgguagaacu

SEQ ID NO: 1063253 - RNA, 19 nt, Artificial Sequence
  Description of Artificial Sequence: Synthetic oligonucleotide
agucucaccaguugauuug

SEQ ID NO: 1063254 - RNA, 19 nt, Artificial Sequence
  Description of Artificial Sequence: Synthetic oligonucleotide
ugcgggaauaaauacuauc

SEQ ID NO: 1063255 - RNA, 19 nt, Artificial Sequence
  Description of Artificial Sequence: Synthetic oligonucleotide
uucaguauggagccucuuc

SEQ ID NO: 1063256 - RNA, 19 nt, Artificial Sequence
  Description of Artificial Sequence: Synthetic oligonucleotide
agcgauaaugacccagcag

SEQ ID NO: 1063257 - RNA, 19 nt, Artificial Sequence
  Description of Artificial Sequence: Synthetic oligonucleotide
uaacuuagguaugcuggcg

SEQ ID NO: 1063258 - RNA, 19 nt, Artificial Sequence
  Description of Artificial Sequence: Synthetic oligonucleotide
gugucaagcgauaaugacc

SEQ ID NO: 1063259 - RNA, 19 nt, Artificial Sequence
  Description of Artificial Sequence: Synthetic oligonucleotide
caacaucaucacauggccg

SEQ ID NO: 1063260 - RNA, 19 nt, Artificial Sequence
  Description of Artificial Sequence: Synthetic oligonucleotide
augugagucugacuggucu

SEQ ID NO: 1063261 - RNA, 19 nt, Artificial Sequence
  Description of Artificial Sequence: Synthetic oligonucleotide
aagccagacgccauauuuc

SEQ ID NO: 1063262 - RNA, 19 nt, Artificial Sequence
  Description of Artificial Sequence: Synthetic oligonucleotide
uccacuuggugccaggcuc

SEQ ID NO: 1063263 - RNA, 19 nt, Artificial Sequence
  Description of Artificial Sequence: Synthetic oligonucleotide
gcgauaaugacccagcaga

SEQ ID NO: 1063264 - RNA, 19 nt, Artificial Sequence
  Description of Artificial Sequence: Synthetic oligonucleotide
ugaguaugggacgaguuuc

SEQ ID NO: 1063265 - RNA, 19 nt, Artificial Sequence
  Description of Artificial Sequence: Synthetic oligonucleotide
uuauaacauaaauguacuu

SEQ ID NO: 1063266 - RNA, 19 nt, Artificial Sequence
  Description of Artificial Sequence: Synthetic oligonucleotide
aguuuuacugauguacaca

SEQ ID NO: 1063267 - RNA, 19 nt, Artificial Sequence
  Description of Artificial Sequence: Synthetic oligonucleotide
uggccgucaggaaagaauc

SEQ ID NO: 1063268 - RNA, 19 nt, Artificial Sequence
  Description of Artificial Sequence: Synthetic oligonucleotide
agaacagguuucacaaugg

SEQ ID NO: 1063269 - RNA, 19 nt, Artificial Sequence
  Description of Artificial Sequence: Synthetic oligonucleotide
aacggggcacaauggacug

SEQ ID NO: 1063270 - RNA, 19 nt, Artificial Sequence
  Description of Artificial Sequence: Synthetic oligonucleotide
cacauggccgucaggaaag

SEQ ID NO: 1063271 - RNA, 19 nt, Artificial Sequence
  Description of Artificial Sequence: Synthetic oligonucleotide
uguacaggaacacgacgaa

SEQ ID NO: 1063272 - RNA, 19 nt, Artificial Sequence
  Description of Artificial Sequence: Synthetic oligonucleotide
uuagguaugcuggcgcucc

SEQ ID NO: 1063273 - RNA, 19 nt, Artificial Sequence
  Description of Artificial Sequence: Synthetic oligonucleotide
aaacggggcacaauggacu

SEQ ID NO: 1063274 - RNA, 19 nt, Artificial Sequence
  Description of Artificial Sequence: Synthetic oligonucleotide
aggccgaguuucuaaauug

SEQ ID NO: 1063275 - RNA, 19 nt, Artificial Sequence
  Description of Artificial Sequence: Synthetic oligonucleotide
aguuccaacuccauguaug

SEQ ID NO: 1063276 - RNA, 19 nt, Artificial Sequence
  Description of Artificial Sequence: Synthetic oligonucleotide
auacuuuggucugauuguc

SEQ ID NO: 1063277 - RNA, 19 nt, Artificial Sequence
  Description of Artificial Sequence: Synthetic oligonucleotide
aacacgacgaaaauaucua

SEQ ID NO: 1063278 - RNA, 19 nt, Artificial Sequence
  Description of Artificial Sequence: Synthetic oligonucleotide
gucaugcgggaauaaauac

SEQ ID NO: 1063279 - RNA, 19 nt, Artificial Sequence
  Description of Artificial Sequence: Synthetic oligonucleotide
ggaaagaaucuuauguacc

SEQ ID NO: 1063280 - RNA, 19 nt, Artificial Sequence
  Description of Artificial Sequence: Synthetic oligonucleotide
uggaaccuacgccuggggc

SEQ ID NO: 1063281 - RNA, 19 nt, Artificial Sequence
  Description of Artificial Sequence: Synthetic oligonucleotide
aaggccgaguuucuaaauu

SEQ ID NO: 1063282 - RNA, 19 nt, Artificial Sequence
  Description of Artificial Sequence: Synthetic oligonucleotide
aagcgauaaugacccagca

SEQ ID NO: 1063283 - RNA, 19 nt, Artificial Sequence
  Description of Artificial Sequence: Synthetic oligonucleotide
ggcucuauagaaaccaucc

SEQ ID NO: 1063284 - RNA, 19 nt, Artificial Sequence
  Description of Artificial Sequence: Synthetic oligonucleotide
uuauagucaagugguuugu

SEQ ID NO: 1063285 - RNA, 19 nt, Artificial Sequence
  Description of Artificial Sequence: Synthetic oligonucleotide
ccggguauaaguaaucuug

SEQ ID NO: 1063286 - RNA, 19 nt, Artificial Sequence
  Description of Artificial Sequence: Synthetic oligonucleotide
cacaccaucaaagcgaaca

SEQ ID NO: 1063287 - RNA, 19 nt, Artificial Sequence
  Description of Artificial Sequence: Synthetic oligonucleotide
aagucaugcgggaauaaau

SEQ ID NO: 1063288 - RNA, 19 nt, Artificial Sequence
  Description of Artificial Sequence: Synthetic oligonucleotide
gcgggaauaaauacuaucc

SEQ ID NO: 1063289 - RNA, 19 nt, Artificial Sequence
  Description of Artificial Sequence: Synthetic oligonucleotide
ucuugugucaagcgauaau

SEQ ID NO: 1063290 - RNA, 19 nt, Artificial Sequence
  Description of Artificial Sequence: Synthetic oligonucleotide
ugacaaaggugaguaugag

SEQ ID NO: 1063291 - RNA, 19 nt, Artificial Sequence
  Description of Artificial Sequence: Synthetic oligonucleotide
agacgcuaagucaugcggg

SEQ ID NO: 1063292 - RNA, 19 nt, Artificial Sequence
  Description of Artificial Sequence: Synthetic oligonucleotide
uauguaccuguaguauucc

SEQ ID NO: 1063293 - RNA, 19 nt, Artificial Sequence
  Description of Artificial Sequence: Synthetic oligonucleotide
caugcgggaauaaauacua

SEQ ID NO: 1063294 - RNA, 19 nt, Artificial Sequence
  Description of Artificial Sequence: Synthetic oligonucleotide
acugcucuaacgaucugag

SEQ ID NO: 1063295 - RNA, 19 nt, Artificial Sequence
  Description of Artificial Sequence: Synthetic oligonucleotide
ucuaaauugcuggaaccua

SEQ ID NO: 1063296 - RNA, 19 nt, Artificial Sequence
  Description of Artificial Sequence: Synthetic oligonucleotide
cucuggcgaacaacaaggg

SEQ ID NO: 1063297 - RNA, 19 nt, Artificial Sequence
  Description of Artificial Sequence: Synthetic oligonucleotide
cagcaaauacuuuggucug

SEQ ID NO: 1063298 - RNA, 19 nt, Artificial Sequence
  Description of Artificial Sequence: Synthetic oligonucleotide
acuuagguaugcuggcgcu

SEQ ID NO: 1063299 - RNA, 19 nt, Artificial Sequence
  Description of Artificial Sequence: Synthetic oligonucleotide
aaacaucucucuccacgau

SEQ ID NO: 1063300 - RNA, 19 nt, Artificial Sequence
  Description of Artificial Sequence: Synthetic oligonucleotide
uugauaccacccaucggaa

SEQ ID NO: 1063301 - RNA, 19 nt, Artificial Sequence
  Description of Artificial Sequence: Synthetic oligonucleotide
cugcaucuugugucaagcg

SEQ ID NO: 1063302 - RNA, 19 nt, Artificial Sequence
  Description of Artificial Sequence: Synthetic oligonucleotide
uaaaccccacauuaagguu

SEQ ID NO: 1063303 - RNA, 19 nt, Artificial Sequence
  Description of Artificial Sequence: Synthetic oligonucleotide
ucuaacgaucugaggucca

SEQ ID NO: 1063304 - RNA, 19 nt, Artificial Sequence
  Description of Artificial Sequence: Synthetic oligonucleotide
uucaagcaagccagacgcc

SEQ ID NO: 1063305 - RNA, 19 nt, Artificial Sequence
  Description of Artificial Sequence: Synthetic oligonucleotide
guacaaguugcauagcccu

SEQ ID NO: 1063306 - RNA, 19 nt, Artificial Sequence
  Description of Artificial Sequence: Synthetic oligonucleotide
ugcucugcaaggccgaguu

SEQ ID NO: 1063307 - RNA, 19 nt, Artificial Sequence
  Description of Artificial Sequence: Synthetic oligonucleotide
ugacaagagaucugccauc

SEQ ID NO: 1063308 - RNA, 19 nt, Artificial Sequence
  Description of Artificial Sequence: Synthetic oligonucleotide
cucuaacgaucugaggucc

SEQ ID NO: 1063309 - RNA, 19 nt, Artificial Sequence
  Description of Artificial Sequence: Synthetic oligonucleotide
augaguaugggacgaguuu

SEQ ID NO: 1063310 - RNA, 19 nt, Artificial Sequence
  Description of Artificial Sequence: Synthetic oligonucleotide
uggggcaaguucaaacauc

SEQ ID NO: 1063311 - RNA, 19 nt, Artificial Sequence
  Description of Artificial Sequence: Synthetic oligonucleotide
cucagagaaugcaguguag

SEQ ID NO: 1063312 - RNA, 19 nt, Artificial Sequence
  Description of Artificial Sequence: Synthetic oligonucleotide
uggagaccggguauaagua

SEQ ID NO: 1063313 - RNA, 19 nt, Artificial Sequence
  Description of Artificial Sequence: Synthetic oligonucleotide
uccuuuggugucugcagcu

SEQ ID NO: 1063314 - RNA, 19 nt, Artificial Sequence
  Description of Artificial Sequence: Synthetic oligonucleotide
guugcauagcccuacggua

SEQ ID NO: 1063315 - RNA, 19 nt, Artificial Sequence
  Description of Artificial Sequence: Synthetic oligonucleotide
cacccaucggaagauauac

SEQ ID NO: 1063316 - RNA, 19 nt, Artificial Sequence
  Description of Artificial Sequence: Synthetic oligonucleotide
agaaucaacuaccccuuua

SEQ ID NO: 1063317 - RNA, 19 nt, Artificial Sequence
  Description of Artificial Sequence: Synthetic oligonucleotide
gacgcuaagucaugcggga

SEQ ID NO: 1063318 - RNA, 19 nt, Artificial Sequence
  Description of Artificial Sequence: Synthetic oligonucleotide
caaguugcauagcccuacg

SEQ ID NO: 1063319 - RNA, 19 nt, Artificial Sequence
  Description of Artificial Sequence: Synthetic oligonucleotide
auauguaguuuuacugaug

SEQ ID NO: 1063320 - RNA, 19 nt, Artificial Sequence
  Description of Artificial Sequence: Synthetic oligonucleotide
aaauaaguuccaacuccau

SEQ ID NO: 1063321 - RNA, 19 nt, Artificial Sequence
  Description of Artificial Sequence: Synthetic oligonucleotide
acacgacgaaaauaucuau

SEQ ID NO: 1063322 - RNA, 19 nt, Artificial Sequence
  Description of Artificial Sequence: Synthetic oligonucleotide
aguugauuuguaagugaug

SEQ ID NO: 1063323 - RNA, 19 nt, Artificial Sequence
  Description of Artificial Sequence: Synthetic oligonucleotide
cacaaggcagcguacguga

SEQ ID NO: 1063324 - RNA, 19 nt, Artificial Sequence
  Description of Artificial Sequence: Synthetic oligonucleotide
gguacaaguugcauagccc

SEQ ID NO: 1063325 - RNA, 19 nt, Artificial Sequence
  Description of Artificial Sequence: Synthetic oligonucleotide
agcccuacgguagaacuug

SEQ ID NO: 1063326 - RNA, 19 nt, Artificial Sequence
  Description of Artificial Sequence: Synthetic oligonucleotide
uacaaguugcauagcccua

SEQ ID NO: 1063327 - RNA, 19 nt, Artificial Sequence
  Description of Artificial Sequence: Synthetic oligonucleotide
guacgugacagaucugcuc

SEQ ID NO: 1063328 - RNA, 19 nt, Artificial Sequence
  Description of Artificial Sequence: Synthetic oligonucleotide
caacuaccccuuuaaauaa

SEQ ID NO: 1063329 - RNA, 19 nt, Artificial Sequence
  Description of Artificial Sequence: Synthetic oligonucleotide
aggcucuauagaaaccauc

SEQ ID NO: 1063330 - RNA, 19 nt, Artificial Sequence
  Description of Artificial Sequence: Synthetic oligonucleotide
aagaaucaacuaccccuuu

SEQ ID NO: 1063331 - RNA, 19 nt, Artificial Sequence
  Description of Artificial Sequence: Synthetic oligonucleotide
uaacgaucugagguccaag

SEQ ID NO: 1063332 - RNA, 19 nt, Artificial Sequence
  Description of Artificial Sequence: Synthetic oligonucleotide
uauagucaagugguuuguc

SEQ ID NO: 1063333 - RNA, 19 nt, Artificial Sequence
  Description of Artificial Sequence: Synthetic oligonucleotide
ccaagaaucaacuaccccu

SEQ ID NO: 1063334 - RNA, 19 nt, Artificial Sequence
  Description of Artificial Sequence: Synthetic oligonucleotide
ggauauauguaguuuuacu

SEQ ID NO: 1063335 - RNA, 19 nt, Artificial Sequence
  Description of Artificial Sequence: Synthetic oligonucleotide
ucucucagcgggacucucu

SEQ ID NO: 1063336 - RNA, 19 nt, Artificial Sequence
  Description of Artificial Sequence: Synthetic oligonucleotide
agucaugcgggaauaaaua

SEQ ID NO: 1063337 - RNA, 19 nt, Artificial Sequence
  Description of Artificial Sequence: Synthetic oligonucleotide
guaccuguaguauuccacu

SEQ ID NO: 1063338 - RNA, 19 nt, Artificial Sequence
  Description of Artificial Sequence: Synthetic oligonucleotide
agcacaaggcagcguacgu

SEQ ID NO: 1063339 - RNA, 19 nt, Artificial Sequence
  Description of Artificial Sequence: Synthetic oligonucleotide
aguucucgagccuuuucuu

SEQ ID NO: 1063340 - RNA, 19 nt, Artificial Sequence
  Description of Artificial Sequence: Synthetic oligonucleotide
ugacugcagucucaccagu

SEQ ID NO: 1063341 - RNA, 19 nt, Artificial Sequence
  Description of Artificial Sequence: Synthetic oligonucleotide
ucuggagaccggguauaag

SEQ ID NO: 1063342 - RNA, 19 nt, Artificial Sequence
  Description of Artificial Sequence: Synthetic oligonucleotide
uacuauccagugugcuccc

SEQ ID NO: 1063343 - RNA, 19 nt, Artificial Sequence
  Description of Artificial Sequence: Synthetic oligonucleotide
agaccggguauaaguaauc

SEQ ID NO: 1063344 - RNA, 19 nt, Artificial Sequence
  Description of Artificial Sequence: Synthetic oligonucleotide
ccuacgguagaacuugaug

SEQ ID NO: 1063345 - RNA, 19 nt, Artificial Sequence
  Description of Artificial Sequence: Synthetic oligonucleotide
cacaguuugagcacagacu

SEQ ID NO: 1063346 - RNA, 19 nt, Artificial Sequence
  Description of Artificial Sequence: Synthetic oligonucleotide
ucucccuggcggauauaug

SEQ ID NO: 1063347 - RNA, 19 nt, Artificial Sequence
  Description of Artificial Sequence: Synthetic oligonucleotide
ggaaccuacgccuggggca

SEQ ID NO: 1063348 - RNA, 19 nt, Artificial Sequence
  Description of Artificial Sequence: Synthetic oligonucleotide
guaugacaagagaucugcc

SEQ ID NO: 1063349 - RNA, 19 nt, Artificial Sequence
  Description of Artificial Sequence: Synthetic oligonucleotide
caagcacaaggcagcguac

SEQ ID NO: 1063350 - RNA, 19 nt, Artificial Sequence
  Description of Artificial Sequence: Synthetic oligonucleotide
ucagcgggacucucuauuu

SEQ ID NO: 1063351 - RNA, 19 nt, Artificial Sequence
  Description of Artificial Sequence: Synthetic oligonucleotide
gcuguuuccaacgccauca

SEQ ID NO: 1063352 - RNA, 19 nt, Artificial Sequence
  Description of Artificial Sequence: Synthetic oligonucleotide
ccgaguuucuaaauugcug

SEQ ID NO: 1063353 - RNA, 19 nt, Artificial Sequence
  Description of Artificial Sequence: Synthetic oligonucleotide
cuggagaccggguauaagu

SEQ ID NO: 1063354 - RNA, 19 nt, Artificial Sequence
  Description of Artificial Sequence: Synthetic oligonucleotide
agguccaagucacuugaua

SEQ ID NO: 1063355 - RNA, 19 nt, Artificial Sequence
  Description of Artificial Sequence: Synthetic oligonucleotide
cacgacgaaaauaucuaua

SEQ ID NO: 1063356 - RNA, 19 nt, Artificial Sequence
  Description of Artificial Sequence: Synthetic oligonucleotide
accggguauaaguaaucuu

SEQ ID NO: 1063357 - RNA, 19 nt, Artificial Sequence
  Description of Artificial Sequence: Synthetic oligonucleotide
cccacauuaagguuuauua

SEQ ID NO: 1063358 - RNA, 19 nt, Artificial Sequence
  Description of Artificial Sequence: Synthetic oligonucleotide
cuggaaccuacgccugggg

SEQ ID NO: 1063359 - RNA, 19 nt, Artificial Sequence
  Description of Artificial Sequence: Synthetic oligonucleotide
cagcguacgugacagaucu

SEQ ID NO: 1063360 - RNA, 19 nt, Artificial Sequence
  Description of Artificial Sequence: Synthetic oligonucleotide
cagugauaugcuggugagg

SEQ ID NO: 1063361 - RNA, 19 nt, Artificial Sequence
  Description of Artificial Sequence: Synthetic oligonucleotide
gaguaugggacgaguuuca

SEQ ID NO: 1063362 - RNA, 19 nt, Artificial Sequence
  Description of Artificial Sequence: Synthetic oligonucleotide
gcucuaacgaucugagguc

SEQ ID NO: 1063363 - RNA, 19 nt, Artificial Sequence
  Description of Artificial Sequence: Synthetic oligonucleotide
uagcccuacgguagaacuu

SEQ ID NO: 1063364 - RNA, 19 nt, Artificial Sequence
  Description of Artificial Sequence: Synthetic oligonucleotide
cuuauguaccuguaguauu

SEQ ID NO: 1063365 - RNA, 19 nt, Artificial Sequence
  Description of Artificial Sequence: Synthetic oligonucleotide
gcguacgugacagaucugc

SEQ ID NO: 1063366 - RNA, 19 nt, Artificial Sequence
  Description of Artificial Sequence: Synthetic oligonucleotide
ucccuggcggauauaugua

SEQ ID NO: 1063367 - RNA, 19 nt, Artificial Sequence
  Description of Artificial Sequence: Synthetic oligonucleotide
cucccuggcggauauaugu

SEQ ID NO: 1063368 - RNA, 19 nt, Artificial Sequence
  Description of Artificial Sequence: Synthetic oligonucleotide
gaaccucugguggccacug

SEQ ID NO: 1063369 - RNA, 19 nt, Artificial Sequence
  Description of Artificial Sequence: Synthetic oligonucleotide
cauagcccuacgguagaac

SEQ ID NO: 1063370 - RNA, 19 nt, Artificial Sequence
  Description of Artificial Sequence: Synthetic oligonucleotide
ccacgaugaguaugggacg

SEQ ID NO: 1063371 - RNA, 19 nt, Artificial Sequence
  Description of Artificial Sequence: Synthetic oligonucleotide
ggacgaguuucauacagcu

SEQ ID NO: 1063372 - RNA, 19 nt, Artificial Sequence
  Description of Artificial Sequence: Synthetic oligonucleotide
caguugauuuguaagugau

SEQ ID NO: 1063373 - RNA, 19 nt, Artificial Sequence
  Description of Artificial Sequence: Synthetic oligonucleotide
cuuagguaugcuggcgcuc

SEQ ID NO: 1063374 - RNA, 19 nt, Artificial Sequence
  Description of Artificial Sequence: Synthetic oligonucleotide
uucaagcacaaggcagcgu

SEQ ID NO: 1063375 - RNA, 19 nt, Artificial Sequence
  Description of Artificial Sequence: Synthetic oligonucleotide
cagagaaugcaguguagcu

SEQ ID NO: 1063376 - RNA, 19 nt, Artificial Sequence
  Description of Artificial Sequence: Synthetic oligonucleotide
uggcggauauauguaguuu

SEQ ID NO: 1063377 - RNA, 19 nt, Artificial Sequence
  Description of Artificial Sequence: Synthetic oligonucleotide
cacaauggacuggggcucc

SEQ ID NO: 1063378 - RNA, 19 nt, Artificial Sequence
  Description of Artificial Sequence: Synthetic oligonucleotide
augggacgaguuucauaca

SEQ ID NO: 1063379 - RNA, 19 nt, Artificial Sequence
  Description of Artificial Sequence: Synthetic oligonucleotide
aguauuccacuuggugcca

SEQ ID NO: 1063380 - RNA, 19 nt, Artificial Sequence
  Description of Artificial Sequence: Synthetic oligonucleotide
gaaccuacgccuggggcaa

SEQ ID NO: 1063381 - RNA, 19 nt, Artificial Sequence
  Description of Artificial Sequence: Synthetic oligonucleotide
acgaugaguaugggacgag

SEQ ID NO: 1063382 - RNA, 19 nt, Artificial Sequence
  Description of Artificial Sequence: Synthetic oligonucleotide
ccaucggaagauauacauc

SEQ ID NO: 1063383 - RNA, 19 nt, Artificial Sequence
  Description of Artificial Sequence: Synthetic oligonucleotide
ggccgaguuucuaaauugc

SEQ ID NO: 1063384 - RNA, 19 nt, Artificial Sequence
  Description of Artificial Sequence: Synthetic oligonucleotide
gucacuugauaccacccau

SEQ ID NO: 1063385 - RNA, 19 nt, Artificial Sequence
  Description of Artificial Sequence: Synthetic oligonucleotide
auaccacccaucggaagau

SEQ ID NO: 1063386 - RNA, 19 nt, Artificial Sequence
  Description of Artificial Sequence: Synthetic oligonucleotide
ggguauaaguaaucuugaa

SEQ ID NO: 1063387 - RNA, 19 nt, Artificial Sequence
  Description of Artificial Sequence: Synthetic oligonucleotide
accugcuugaaaacaugau

SEQ ID NO: 1063388 - RNA, 19 nt, Artificial Sequence
  Description of Artificial Sequence: Synthetic oligonucleotide
cauauaacuuagguaugcu

SEQ ID NO: 1063389 - RNA, 19 nt, Artificial Sequence
  Description of Artificial Sequence: Synthetic oligonucleotide
ccuggggcaaguucaaaca

SEQ ID NO: 1063390 - RNA, 19 nt, Artificial Sequence
  Description of Artificial Sequence: Synthetic oligonucleotide
ggagaccggguauaaguaa

SEQ ID NO: 1063391 - RNA, 19 nt, Artificial Sequence
  Description of Artificial Sequence: Synthetic oligonucleotide
gaccggguauaaguaaucu

SEQ ID NO: 1063392 - RNA, 19 nt, Artificial Sequence
  Description of Artificial Sequence: Synthetic oligonucleotide
ugagucugacuggucucaa

SEQ ID NO: 1063393 - RNA, 19 nt, Artificial Sequence
  Description of Artificial Sequence: Synthetic oligonucleotide
caucuugugucaagcgaua

SEQ ID NO: 1063394 - RNA, 19 nt, Artificial Sequence
  Description of Artificial Sequence: Synthetic oligonucleotide
gggacgaguuucauacagc

SEQ ID NO: 1063395 - RNA, 19 nt, Artificial Sequence
  Description of Artificial Sequence: Synthetic oligonucleotide
agcgaacacgaggccguuc

SEQ ID NO: 1063396 - RNA, 19 nt, Artificial Sequence
  Description of Artificial Sequence: Synthetic oligonucleotide
gagaccggguauaaguaau

SEQ ID NO: 1063397 - RNA, 19 nt, Artificial Sequence
  Description of Artificial Sequence: Synthetic oligonucleotide
acgugacagaucugcucaa

SEQ ID NO: 1063398 - RNA, 19 nt, Artificial Sequence
  Description of Artificial Sequence: Synthetic oligonucleotide
guacaggaacacgacgaaa

SEQ ID NO: 1063399 - RNA, 19 nt, Artificial Sequence
  Description of Artificial Sequence: Synthetic oligonucleotide
acggggcacaauggacugg

SEQ ID NO: 1063400 - RNA, 19 nt, Artificial Sequence
  Description of Artificial Sequence: Synthetic oligonucleotide
gcaaagacgcuaagucaug

SEQ ID NO: 1063401 - RNA, 19 nt, Artificial Sequence
  Description of Artificial Sequence: Synthetic oligonucleotide
ggcggauauauguaguuuu

SEQ ID NO: 1063402 - RNA, 19 nt, Artificial Sequence
  Description of Artificial Sequence: Synthetic oligonucleotide
acaagagaucugccaucuu

SEQ ID NO: 1063403 - RNA, 19 nt, Artificial Sequence
  Description of Artificial Sequence: Synthetic oligonucleotide
gcacagauauagaauccuc

SEQ ID NO: 1063404 - RNA, 19 nt, Artificial Sequence
  Description of Artificial Sequence: Synthetic oligonucleotide
cacuuucaagcaagccaga

SEQ ID NO: 1063405 - RNA, 19 nt, Artificial Sequence
  Description of Artificial Sequence: Synthetic oligonucleotide
gaauugcauccguucuggu

SEQ ID NO: 1063406 - RNA, 19 nt, Artificial Sequence
  Description of Artificial Sequence: Synthetic oligonucleotide
uuucaguauggagccucuu

SEQ ID NO: 1063407 - RNA, 19 nt, Artificial Sequence
  Description of Artificial Sequence: Synthetic oligonucleotide
acgccauauuucagggucu

SEQ ID NO: 1063408 - RNA, 19 nt, Artificial Sequence
  Description of Artificial Sequence: Synthetic oligonucleotide
cugauaugugagucugacu

SEQ ID NO: 1063409 - RNA, 19 nt, Artificial Sequence
  Description of Artificial Sequence: Synthetic oligonucleotide
gcacaaggcagcguacgug

SEQ ID NO: 1063410 - RNA, 19 nt, Artificial Sequence
  Description of Artificial Sequence: Synthetic oligonucleotide
cuaacgaucugagguccaa

SEQ ID NO: 1063411 - RNA, 19 nt, Artificial Sequence
  Description of Artificial Sequence: Synthetic oligonucleotide
ccaagucacuugauaccac

SEQ ID NO: 1063412 - RNA, 19 nt, Artificial Sequence
  Description of Artificial Sequence: Synthetic oligonucleotide
acccaucggaagauauaca

SEQ ID NO: 1063413 - RNA, 19 nt, Artificial Sequence
  Description of Artificial Sequence: Synthetic oligonucleotide
gcucaugcagcagugauau

SEQ ID NO: 1063414 - RNA, 19 nt, Artificial Sequence
  Description of Artificial Sequence: Synthetic oligonucleotide
ggaacacgacgaaaauauc

SEQ ID NO: 1063415 - RNA, 19 nt, Artificial Sequence
  Description of Artificial Sequence: Synthetic oligonucleotide
agaaugcaguguagcuccu

SEQ ID NO: 1063416 - RNA, 19 nt, Artificial Sequence
  Description of Artificial Sequence: Synthetic oligonucleotide
gucaagcgauaaugaccca

SEQ ID NO: 1063417 - RNA, 19 nt, Artificial Sequence
  Description of Artificial Sequence: Synthetic oligonucleotide
cucucagcgggacucucua

SEQ ID NO: 1063418 - RNA, 19 nt, Artificial Sequence
  Description of Artificial Sequence: Synthetic oligonucleotide
gcacaauggacuggggcuc

SEQ ID NO: 1063419 - RNA, 19 nt, Artificial Sequence
  Description of Artificial Sequence: Synthetic oligonucleotide
gugauaugcuggugaggcu

SEQ ID NO: 1063420 - RNA, 19 nt, Artificial Sequence
  Description of Artificial Sequence: Synthetic oligonucleotide
cuccauaggcagaacugau

SEQ ID NO: 1063421 - RNA, 19 nt, Artificial Sequence
  Description of Artificial Sequence: Synthetic oligonucleotide
augcgggaauaaauacuau

SEQ ID NO: 1063422 - RNA, 19 nt, Artificial Sequence
  Description of Artificial Sequence: Synthetic oligonucleotide
auccguucugguguuccua

SEQ ID NO: 1063423 - RNA, 19 nt, Artificial Sequence
  Description of Artificial Sequence: Synthetic oligonucleotide
cggauauauguaguuuuac

SEQ ID NO: 1063424 - RNA, 19 nt, Artificial Sequence
  Description of Artificial Sequence: Synthetic oligonucleotide
gucucaccaguugauuugu

SEQ ID NO: 1063425 - RNA, 19 nt, Artificial Sequence
  Description of Artificial Sequence: Synthetic oligonucleotide
cggguauaaguaaucuuga

SEQ ID NO: 1063426 - RNA, 19 nt, Artificial Sequence
  Description of Artificial Sequence: Synthetic oligonucleotide
aaccuacgccuggggcaag

SEQ ID NO: 1063427 - RNA, 19 nt, Artificial Sequence
  Description of Artificial Sequence: Synthetic oligonucleotide
cccaucggaagauauacau

SEQ ID NO: 1063428 - RNA, 19 nt, Artificial Sequence
  Description of Artificial Sequence: Synthetic oligonucleotide
gcgaacacgaggccguucu

SEQ ID NO: 1063429 - RNA, 19 nt, Artificial Sequence
  Description of Artificial Sequence: Synthetic oligonucleotide
cuggcggauauauguaguu

SEQ ID NO: 1063430 - RNA, 19 nt, Artificial Sequence
  Description of Artificial Sequence: Synthetic oligonucleotide
acgcuaagucaugcgggaa

SEQ ID NO: 1063431 - RNA, 19 nt, Artificial Sequence
  Description of Artificial Sequence: Synthetic oligonucleotide
agcuucuaccccacacuuu

SEQ ID NO: 1063432 - RNA, 19 nt, Artificial Sequence
  Description of Artificial Sequence: Synthetic oligonucleotide
caauggacuggggcuccuc

SEQ ID NO: 1063433 - RNA, 19 nt, Artificial Sequence
  Description of Artificial Sequence: Synthetic oligonucleotide
cucagcgggacucucuauu

SEQ ID NO: 1063434 - RNA, 19 nt, Artificial Sequence
  Description of Artificial Sequence: Synthetic oligonucleotide
gacgaguuucauacagcuu

SEQ ID NO: 1063435 - RNA, 19 nt, Artificial Sequence
  Description of Artificial Sequence: Synthetic oligonucleotide
accuacgccuggggcaagu

SEQ ID NO: 1063436 - RNA, 19 nt, Artificial Sequence
  Description of Artificial Sequence: Synthetic oligonucleotide
gcggauauauguaguuuua

SEQ ID NO: 1063437 - RNA, 19 nt, Artificial Sequence
  Description of Artificial Sequence: Synthetic oligonucleotide
ccgucaggaaagaaucuua

SEQ ID NO: 1063438 - RNA, 19 nt, Artificial Sequence
  Description of Artificial Sequence: Synthetic oligonucleotide
aggcagcguacgugacaga

SEQ ID NO: 1063439 - RNA, 19 nt, Artificial Sequence
  Description of Artificial Sequence: Synthetic oligonucleotide
cgauaaugacccagcagaa

SEQ ID NO: 1063440 - RNA, 19 nt, Artificial Sequence
  Description of Artificial Sequence: Synthetic oligonucleotide
cuccauguauguacauauu

SEQ ID NO: 1063441 - RNA, 19 nt, Artificial Sequence
  Description of Artificial Sequence: Synthetic oligonucleotide
agcguacgugacagaucug

SEQ ID NO: 1063442 - RNA, 19 nt, Artificial Sequence
  Description of Artificial Sequence: Synthetic oligonucleotide
ggcagcguacgugacagau

SEQ ID NO: 1063443 - RNA, 19 nt, Artificial Sequence
  Description of Artificial Sequence: Synthetic oligonucleotide
gcagcguacgugacagauc

SEQ ID NO: 1063444 - RNA, 19 nt, Artificial Sequence
  Description of Artificial Sequence: Synthetic oligonucleotide
cauccguucugguguuccu

SEQ ID NO: 1063445 - RNA, 19 nt, Artificial Sequence
  Description of Artificial Sequence: Synthetic oligonucleotide
gccgaguuucuaaauugcu

SEQ ID NO: 1063446 - RNA, 19 nt, Artificial Sequence
  Description of Artificial Sequence: Synthetic oligonucleotide
cagcagaauugcauccguu

SEQ ID NO: 1063447 - RNA, 19 nt, Artificial Sequence
  Description of Artificial Sequence: Synthetic oligonucleotide
acgccuggggcaaguucaa

SEQ ID NO: 1063448 - RNA, 19 nt, Artificial Sequence
  Description of Artificial Sequence: Synthetic oligonucleotide
ccacccaucggaagauaua

SEQ ID NO: 1063449 - RNA, 19 nt, Artificial Sequence
  Description of Artificial Sequence: Synthetic oligonucleotide
cagcgggacucucuauuuu

SEQ ID NO: 1063450 - RNA, 19 nt, Artificial Sequence
  Description of Artificial Sequence: Synthetic oligonucleotide
ggccgucaggaaagaaucu

SEQ ID NO: 1063451 - RNA, 19 nt, Artificial Sequence
  Description of Artificial Sequence: Synthetic oligonucleotide
accccacauuaagguuuau

SEQ ID NO: 1063452 - RNA, 19 nt, Artificial Sequence
  Description of Artificial Sequence: Synthetic oligonucleotide
cguacgugacagaucugcu

SEQ ID NO: 1063453 - RNA, 19 nt, Artificial Sequence
  Description of Artificial Sequence: Synthetic oligonucleotide
ggucucuggcacagauaua

SEQ ID NO: 1063454 - RNA, 19 nt, Artificial Sequence
  Description of Artificial Sequence: Synthetic oligonucleotide
cgcuaagucaugcgggaau

SEQ ID NO: 1063455 - RNA, 19 nt, Artificial Sequence
  Description of Artificial Sequence: Synthetic oligonucleotide
cgaugaguaugggacgagu

SEQ ID NO: 1063456 - RNA, 19 nt, Artificial Sequence
  Description of Artificial Sequence: Synthetic oligonucleotide
ccguucugguguuccuagu

SEQ ID NO: 1063457 - RNA, 19 nt, Artificial Sequence
  Description of Artificial Sequence: Synthetic oligonucleotide
ccccacauuaagguuuauu

SEQ ID NO: 1063458 - RNA, 19 nt, Artificial Sequence
  Description of Artificial Sequence: Synthetic oligonucleotide
gcucugcaaggccgaguuu

SEQ ID NO: 1063459 - RNA, 19 nt, Artificial Sequence
  Description of Artificial Sequence: Synthetic oligonucleotide
ccuacgccuggggcaaguu

SEQ ID NO: 1063460 - RNA, 19 nt, Artificial Sequence
  Description of Artificial Sequence: Synthetic oligonucleotide
auucagaucgcucagaagg

SEQ ID NO: 1063461 - RNA, 19 nt, Artificial Sequence
  Description of Artificial Sequence: Synthetic oligonucleotide
uccuguacagccaucaugg

SEQ ID NO: 1063462 - RNA, 19 nt, Artificial Sequence
  Description of Artificial Sequence: Synthetic oligonucleotide
guuaucucuauauuguagg

SEQ ID NO: 1063463 - RNA, 19 nt, Artificial Sequence
  Description of Artificial Sequence: Synthetic oligonucleotide
agaacuuuucaucuauagc

SEQ ID NO: 1063464 - RNA, 19 nt, Artificial Sequence
  Description of Artificial Sequence: Synthetic oligonucleotide
uccaauucugccuucagcc

SEQ ID NO: 1063465 - RNA, 19 nt, Artificial Sequence
  Description of Artificial Sequence: Synthetic oligonucleotide
uucucuagcagucagugaa

SEQ ID NO: 1063466 - RNA, 19 nt, Artificial Sequence
  Description of Artificial Sequence: Synthetic oligonucleotide
uucagggucgaccaguugc

SEQ ID NO: 1063467 - RNA, 19 nt, Artificial Sequence
  Description of Artificial Sequence: Synthetic oligonucleotide
aggaguaagaccucuuggg

SEQ ID NO: 1063468 - RNA, 19 nt, Artificial Sequence
  Description of Artificial Sequence: Synthetic oligonucleotide
ucuauauuguaggagcucc

SEQ ID NO: 1063469 - RNA, 19 nt, Artificial Sequence
  Description of Artificial Sequence: Synthetic oligonucleotide
uugaaugucuuguucccgg

SEQ ID NO: 1063470 - RNA, 19 nt, Artificial Sequence
  Description of Artificial Sequence: Synthetic oligonucleotide
ugguaugucuucagggucg

SEQ ID NO: 1063471 - RNA, 19 nt, Artificial Sequence
  Description of Artificial Sequence: Synthetic oligonucleotide
uuagccaugagcucgaguu

SEQ ID NO: 1063472 - RNA, 19 nt, Artificial Sequence
  Description of Artificial Sequence: Synthetic oligonucleotide
uguuaccgucucuagaggg

SEQ ID NO: 1063473 - RNA, 19 nt, Artificial Sequence
  Description of Artificial Sequence: Synthetic oligonucleotide
aacuuccugacccugagau

SEQ ID NO: 1063474 - RNA, 19 nt, Artificial Sequence
  Description of Artificial Sequence: Synthetic oligonucleotide
uuaacuuguugguuuaaga

SEQ ID NO: 1063475 - RNA, 19 nt, Artificial Sequence
  Description of Artificial Sequence: Synthetic oligonucleotide
uggguuaucucuauauugu

SEQ ID NO: 1063476 - RNA, 19 nt, Artificial Sequence
  Description of Artificial Sequence: Synthetic oligonucleotide
uugcaugguagucucauug

SEQ ID NO: 1063477 - RNA, 19 nt, Artificial Sequence
  Description of Artificial Sequence: Synthetic oligonucleotide
agagcuuugaucagucugc

SEQ ID NO: 1063478 - RNA, 19 nt, Artificial Sequence
  Description of Artificial Sequence: Synthetic oligonucleotide
uuuugucuggguuaucucu

SEQ ID NO: 1063479 - RNA, 19 nt, Artificial Sequence
  Description of Artificial Sequence: Synthetic oligonucleotide
uacgaagucucucuaaauc

SEQ ID NO: 1063480 - RNA, 19 nt, Artificial Sequence
  Description of Artificial Sequence: Synthetic oligonucleotide
aggaauguugcccugagau

SEQ ID NO: 1063481 - RNA, 19 nt, Artificial Sequence
  Description of Artificial Sequence: Synthetic oligonucleotide
aguaagaccucuuggguca

SEQ ID NO: 1063482 - RNA, 19 nt, Artificial Sequence
  Description of Artificial Sequence: Synthetic oligonucleotide
uguugaaugucuuguuccc

SEQ ID NO: 1063483 - RNA, 19 nt, Artificial Sequence
  Description of Artificial Sequence: Synthetic oligonucleotide
ucggucuuguauuuguugc

SEQ ID NO: 1063484 - RNA, 19 nt, Artificial Sequence
  Description of Artificial Sequence: Synthetic oligonucleotide
guguugaaugucuuguucc

SEQ ID NO: 1063485 - RNA, 19 nt, Artificial Sequence
  Description of Artificial Sequence: Synthetic oligonucleotide
cacugcacgaugaagcugc

SEQ ID NO: 1063486 - RNA, 19 nt, Artificial Sequence
  Description of Artificial Sequence: Synthetic oligonucleotide
augggcguggaacuugacc

SEQ ID NO: 1063487 - RNA, 19 nt, Artificial Sequence
  Description of Artificial Sequence: Synthetic oligonucleotide
cuggguuaucucuauauug

SEQ ID NO: 1063488 - RNA, 19 nt, Artificial Sequence
  Description of Artificial Sequence: Synthetic oligonucleotide
accucguaaugccugggcc

SEQ ID NO: 1063489 - RNA, 19 nt, Artificial Sequence
  Description of Artificial Sequence: Synthetic oligonucleotide
ugagauucuacugaagcaa

SEQ ID NO: 1063490 - RNA, 19 nt, Artificial Sequence
  Description of Artificial Sequence: Synthetic oligonucleotide
uuaucucuauauuguagga

SEQ ID NO: 1063491 - RNA, 19 nt, Artificial Sequence
  Description of Artificial Sequence: Synthetic oligonucleotide
acgaagucucucuaaauca

SEQ ID NO: 1063492 - RNA, 19 nt, Artificial Sequence
  Description of Artificial Sequence: Synthetic oligonucleotide
ugcucaucgacugaagcag

SEQ ID NO: 1063493 - RNA, 19 nt, Artificial Sequence
  Description of Artificial Sequence: Synthetic oligonucleotide
agucgauuaggucucucuc

SEQ ID NO: 1063494 - RNA, 19 nt, Artificial Sequence
  Description of Artificial Sequence: Synthetic oligonucleotide
uuuaagaggagugcccgag

SEQ ID NO: 1063495 - RNA, 19 nt, Artificial Sequence
  Description of Artificial Sequence: Synthetic oligonucleotide
uauguuccuggucagugac

SEQ ID NO: 1063496 - RNA, 19 nt, Artificial Sequence
  Description of Artificial Sequence: Synthetic oligonucleotide
gaaggaguaagaccucuug

SEQ ID NO: 1063497 - RNA, 19 nt, Artificial Sequence
  Description of Artificial Sequence: Synthetic oligonucleotide
agugaaguguuaccgucuc

SEQ ID NO: 1063498 - RNA, 19 nt, Artificial Sequence
  Description of Artificial Sequence: Synthetic oligonucleotide
uuaacuguuccaguuccag

SEQ ID NO: 1063499 - RNA, 19 nt, Artificial Sequence
  Description of Artificial Sequence: Synthetic oligonucleotide
ugguuuaagaggagugccc

SEQ ID NO: 1063500 - RNA, 19 nt, Artificial Sequence
  Description of Artificial Sequence: Synthetic oligonucleotide
uugguuuaagaggagugcc

SEQ ID NO: 1063501 - RNA, 19 nt, Artificial Sequence
  Description of Artificial Sequence: Synthetic oligonucleotide
augucuuguucccggauuc

SEQ ID NO: 1063502 - RNA, 19 nt, Artificial Sequence
  Description of Artificial Sequence: Synthetic oligonucleotide
ugaucucgcucucucacug

SEQ ID NO: 1063503 - RNA, 19 nt, Artificial Sequence
  Description of Artificial Sequence: Synthetic oligonucleotide
ucuaaaucaugaucucgcu

SEQ ID NO: 1063504 - RNA, 19 nt, Artificial Sequence
  Description of Artificial Sequence: Synthetic oligonucleotide
aacagcucggucuuguauu

SEQ ID NO: 1063505 - RNA, 19 nt, Artificial Sequence
  Description of Artificial Sequence: Synthetic oligonucleotide
auucgaaucucauuguauu

SEQ ID NO: 1063506 - RNA, 19 nt, Artificial Sequence
  Description of Artificial Sequence: Synthetic oligonucleotide
uuauacacaguguuucuuu

SEQ ID NO: 1063507 - RNA, 19 nt, Artificial Sequence
  Description of Artificial Sequence: Synthetic oligonucleotide
aaguguuaccgucucuaga

SEQ ID NO: 1063508 - RNA, 19 nt, Artificial Sequence
  Description of Artificial Sequence: Synthetic oligonucleotide
uucccgaaggaguaagacc

SEQ ID NO: 1063509 - RNA, 19 nt, Artificial Sequence
  Description of Artificial Sequence: Synthetic oligonucleotide
agcggagaacuuuucaucu

SEQ ID NO: 1063510 - RNA, 19 nt, Artificial Sequence
  Description of Artificial Sequence: Synthetic oligonucleotide
gaaguguuaccgucucuag

SEQ ID NO: 1063511 - RNA, 19 nt, Artificial Sequence
  Description of Artificial Sequence: Synthetic oligonucleotide
ugaccagacugcuguauag

SEQ ID NO: 1063512 - RNA, 19 nt, Artificial Sequence
  Description of Artificial Sequence: Synthetic oligonucleotide
uauucagaucgcucagaag

SEQ ID NO: 1063513 - RNA, 19 nt, Artificial Sequence
  Description of Artificial Sequence: Synthetic oligonucleotide
uauauuguaggagcuccug

SEQ ID NO: 1063514 - RNA, 19 nt, Artificial Sequence
  Description of Artificial Sequence: Synthetic oligonucleotide
agccaugagcucgaguucc

SEQ ID NO: 1063515 - RNA, 19 nt, Artificial Sequence
  Description of Artificial Sequence: Synthetic oligonucleotide
cuguauagcugccucuccg

SEQ ID NO: 1063516 - RNA, 19 nt, Artificial Sequence
  Description of Artificial Sequence: Synthetic oligonucleotide
ugaaacuuccugacccuga

SEQ ID NO: 1063517 - RNA, 19 nt, Artificial Sequence
  Description of Artificial Sequence: Synthetic oligonucleotide
uagaguuuugucuggguua

SEQ ID NO: 1063518 - RNA, 19 nt, Artificial Sequence
  Description of Artificial Sequence: Synthetic oligonucleotide
uccaauggcggccaugguc

SEQ ID NO: 1063519 - RNA, 19 nt, Artificial Sequence
  Description of Artificial Sequence: Synthetic oligonucleotide
ucgauuaggucucucucuc

SEQ ID NO: 1063520 - RNA, 19 nt, Artificial Sequence
  Description of Artificial Sequence: Synthetic oligonucleotide
ucucuagcagucagugaag

SEQ ID NO: 1063521 - RNA, 19 nt, Artificial Sequence
  Description of Artificial Sequence: Synthetic oligonucleotide
uacuagucccucuagcauc

SEQ ID NO: 1063522 - RNA, 19 nt, Artificial Sequence
  Description of Artificial Sequence: Synthetic oligonucleotide
uuaugagaucuucuuuuau

SEQ ID NO: 1063523 - RNA, 19 nt, Artificial Sequence
  Description of Artificial Sequence: Synthetic oligonucleotide
uaggcgaccucguaaugcc

SEQ ID NO: 1063524 - RNA, 19 nt, Artificial Sequence
  Description of Artificial Sequence: Synthetic oligonucleotide
acuacgaagucucucuaaa

SEQ ID NO: 1063525 - RNA, 19 nt, Artificial Sequence
  Description of Artificial Sequence: Synthetic oligonucleotide
guugguuuaagaggagugc

SEQ ID NO: 1063526 - RNA, 19 nt, Artificial Sequence
  Description of Artificial Sequence: Synthetic oligonucleotide
ucaucuacuagucccucua

SEQ ID NO: 1063527 - RNA, 19 nt, Artificial Sequence
  Description of Artificial Sequence: Synthetic oligonucleotide
caugaucucgcucucucac

SEQ ID NO: 1063528 - RNA, 19 nt, Artificial Sequence
  Description of Artificial Sequence: Synthetic oligonucleotide
cuaaaucaugaucucgcuc

SEQ ID NO: 1063529 - RNA, 19 nt, Artificial Sequence
  Description of Artificial Sequence: Synthetic oligonucleotide
ccugagauucuacugaagc

SEQ ID NO: 1063530 - RNA, 19 nt, Artificial Sequence
  Description of Artificial Sequence: Synthetic oligonucleotide
uggcaguuaacuguuccag

SEQ ID NO: 1063531 - RNA, 19 nt, Artificial Sequence
  Description of Artificial Sequence: Synthetic oligonucleotide
agugucaucgccugccgca

SEQ ID NO: 1063532 - RNA, 19 nt, Artificial Sequence
  Description of Artificial Sequence: Synthetic oligonucleotide
gacuccguucaucuacuag

SEQ ID NO: 1063533 - RNA, 19 nt, Artificial Sequence
  Description of Artificial Sequence: Synthetic oligonucleotide
gacagguggcaguuaacug

SEQ ID NO: 1063534 - RNA, 19 nt, Artificial Sequence
  Description of Artificial Sequence: Synthetic oligonucleotide
uuuccaucucuagaguaug

SEQ ID NO: 1063535 - RNA, 19 nt, Artificial Sequence
  Description of Artificial Sequence: Synthetic oligonucleotide
caucgacugaagcagcccc

SEQ ID NO: 1063536 - RNA, 19 nt, Artificial Sequence
  Description of Artificial Sequence: Synthetic oligonucleotide
uuuauucagaucgcucaga

SEQ ID NO: 1063537 - RNA, 19 nt, Artificial Sequence
  Description of Artificial Sequence: Synthetic oligonucleotide
ugaaguguuaccgucucua

SEQ ID NO: 1063538 - RNA, 19 nt, Artificial Sequence
  Description of Artificial Sequence: Synthetic oligonucleotide
ucuagcagucagugaagug

SEQ ID NO: 1063539 - RNA, 19 nt, Artificial Sequence
  Description of Artificial Sequence: Synthetic oligonucleotide
ucagggucgaccaguugca

SEQ ID NO: 1063540 - RNA, 19 nt, Artificial Sequence
  Description of Artificial Sequence: Synthetic oligonucleotide
uacuuugcaugguagucuc

SEQ ID NO: 1063541 - RNA, 19 nt, Artificial Sequence
  Description of Artificial Sequence: Synthetic oligonucleotide
gucucuagagggcaccugc

SEQ ID NO: 1063542 - RNA, 19 nt, Artificial Sequence
  Description of Artificial Sequence: Synthetic oligonucleotide
gagucuccuaauguggacc

SEQ ID NO: 1063543 - RNA, 19 nt, Artificial Sequence
  Description of Artificial Sequence: Synthetic oligonucleotide
ugccgcagcaccuccaaug

SEQ ID NO: 1063544 - RNA, 19 nt, Artificial Sequence
  Description of Artificial Sequence: Synthetic oligonucleotide
uuaagaggagugcccgaga

SEQ ID NO: 1063545 - RNA, 19 nt, Artificial Sequence
  Description of Artificial Sequence: Synthetic oligonucleotide
cucgcucucucacugcacg

SEQ ID NO: 1063546 - RNA, 19 nt, Artificial Sequence
  Description of Artificial Sequence: Synthetic oligonucleotide
guugaaugucuuguucccg

SEQ ID NO: 1063547 - RNA, 19 nt, Artificial Sequence
  Description of Artificial Sequence: Synthetic oligonucleotide
ucuggguuaucucuauauu

SEQ ID NO: 1063548 - RNA, 19 nt, Artificial Sequence
  Description of Artificial Sequence: Synthetic oligonucleotide
uguaauuccuuguccuuuu

SEQ ID NO: 1063549 - RNA, 19 nt, Artificial Sequence
  Description of Artificial Sequence: Synthetic oligonucleotide
agucuccuaauguggaccu

SEQ ID NO: 1063550 - RNA, 19 nt, Artificial Sequence
  Description of Artificial Sequence: Synthetic oligonucleotide
uucuaggcgaccucguaau

SEQ ID NO: 1063551 - RNA, 19 nt, Artificial Sequence
  Description of Artificial Sequence: Synthetic oligonucleotide
accagauuugguuuccaau

SEQ ID NO: 1063552 - RNA, 19 nt, Artificial Sequence
  Description of Artificial Sequence: Synthetic oligonucleotide
uuuucccgaaggaguaaga

SEQ ID NO: 1063553 - RNA, 19 nt, Artificial Sequence
  Description of Artificial Sequence: Synthetic oligonucleotide
uccauagcugguaugucuu

SEQ ID NO: 1063554 - RNA, 19 nt, Artificial Sequence
  Description of Artificial Sequence: Synthetic oligonucleotide
uuucccgaaggaguaagac

SEQ ID NO: 1063555 - RNA, 19 nt, Artificial Sequence
  Description of Artificial Sequence: Synthetic oligonucleotide
uucacucugaccggguccc

SEQ ID NO: 1063556 - RNA, 19 nt, Artificial Sequence
  Description of Artificial Sequence: Synthetic oligonucleotide
gguuaucucuauauuguag

SEQ ID NO: 1063557 - RNA, 19 nt, Artificial Sequence
  Description of Artificial Sequence: Synthetic oligonucleotide
ucgaccaguugcauuugca

SEQ ID NO: 1063558 - RNA, 19 nt, Artificial Sequence
  Description of Artificial Sequence: Synthetic oligonucleotide
cugagauucuacugaagca

SEQ ID NO: 1063559 - RNA, 19 nt, Artificial Sequence
  Description of Artificial Sequence: Synthetic oligonucleotide
ccggauucgaaucucauug

SEQ ID NO: 1063560 - RNA, 19 nt, Artificial Sequence
  Description of Artificial Sequence: Synthetic oligonucleotide
gagcggagaacuuuucauc

SEQ ID NO: 1063561 - RNA, 19 nt, Artificial Sequence
  Description of Artificial Sequence: Synthetic oligonucleotide
aucgcucagaagguccugc

SEQ ID NO: 1063562 - RNA, 19 nt, Artificial Sequence
  Description of Artificial Sequence: Synthetic oligonucleotide
gacacuacgaagucucucu

SEQ ID NO: 1063563 - RNA, 19 nt, Artificial Sequence
  Description of Artificial Sequence: Synthetic oligonucleotide
cuaaguacuggcgcagggc

SEQ ID NO: 1063564 - RNA, 19 nt, Artificial Sequence
  Description of Artificial Sequence: Synthetic oligonucleotide
cuaggcgaccucguaaugc

SEQ ID NO: 1063565 - RNA, 19 nt, Artificial Sequence
  Description of Artificial Sequence: Synthetic oligonucleotide
ugaaugucuuguucccgga

SEQ ID NO: 1063566 - RNA, 19 nt, Artificial Sequence
  Description of Artificial Sequence: Synthetic oligonucleotide
gugucugagucuccuaaug

SEQ ID NO: 1063567 - RNA, 19 nt, Artificial Sequence
  Description of Artificial Sequence: Synthetic oligonucleotide
ucgaugcugucugugaacu

SEQ ID NO: 1063568 - RNA, 19 nt, Artificial Sequence
  Description of Artificial Sequence: Synthetic oligonucleotide
uccuaauguggaccugggc

SEQ ID NO: 1063569 - RNA, 19 nt, Artificial Sequence
  Description of Artificial Sequence: Synthetic oligonucleotide
gucacuuuaacuuguuggu

SEQ ID NO: 1063570 - RNA, 19 nt, Artificial Sequence
  Description of Artificial Sequence: Synthetic oligonucleotide
gagauucuacugaagcaac

SEQ ID NO: 1063571 - RNA, 19 nt, Artificial Sequence
  Description of Artificial Sequence: Synthetic oligonucleotide
uuuagccaugagcucgagu

SEQ ID NO: 1063572 - RNA, 19 nt, Artificial Sequence
  Description of Artificial Sequence: Synthetic oligonucleotide
agaguucggucucucucag

SEQ ID NO: 1063573 - RNA, 19 nt, Artificial Sequence
  Description of Artificial Sequence: Synthetic oligonucleotide
ccguucaucuacuaguccc

SEQ ID NO: 1063574 - RNA, 19 nt, Artificial Sequence
  Description of Artificial Sequence: Synthetic oligonucleotide
guguuaccgucucuagagg

SEQ ID NO: 1063575 - RNA, 19 nt, Artificial Sequence
  Description of Artificial Sequence: Synthetic oligonucleotide
uuccaucucuagaguauga

SEQ ID NO: 1063576 - RNA, 19 nt, Artificial Sequence
  Description of Artificial Sequence: Synthetic oligonucleotide
ugucuuguucccggauucg

SEQ ID NO: 1063577 - RNA, 19 nt, Artificial Sequence
  Description of Artificial Sequence: Synthetic oligonucleotide
caugguagucucauuggca

SEQ ID NO: 1063578 - RNA, 19 nt, Artificial Sequence
  Description of Artificial Sequence: Synthetic oligonucleotide
ucaugaucucgcucucuca

SEQ ID NO: 1063579 - RNA, 19 nt, Artificial Sequence
  Description of Artificial Sequence: Synthetic oligonucleotide
auuugcugguggcuguugu

SEQ ID NO: 1063580 - RNA, 19 nt, Artificial Sequence
  Description of Artificial Sequence: Synthetic oligonucleotide
ugcccgagagucgauuagg

SEQ ID NO: 1063581 - RNA, 19 nt, Artificial Sequence
  Description of Artificial Sequence: Synthetic oligonucleotide
ucccugaaacuuccugacc

SEQ ID NO: 1063582 - RNA, 19 nt, Artificial Sequence
  Description of Artificial Sequence: Synthetic oligonucleotide
cccugaaacuuccugaccc

SEQ ID NO: 1063583 - RNA, 19 nt, Artificial Sequence
  Description of Artificial Sequence: Synthetic oligonucleotide
uuaccgucucuagagggca

SEQ ID NO: 1063584 - RNA, 19 nt, Artificial Sequence
  Description of Artificial Sequence: Synthetic oligonucleotide
uaaugccugggccccuucc

SEQ ID NO: 1063585 - RNA, 19 nt, Artificial Sequence
  Description of Artificial Sequence: Synthetic oligonucleotide
uugaccagacugcuguaua

SEQ ID NO: 1063586 - RNA, 19 nt, Artificial Sequence
  Description of Artificial Sequence: Synthetic oligonucleotide
ugcagggaugucugcaacu

SEQ ID NO: 1063587 - RNA, 19 nt, Artificial Sequence
  Description of Artificial Sequence: Synthetic oligonucleotide
ucuaggcgaccucguaaug

SEQ ID NO: 1063588 - RNA, 19 nt, Artificial Sequence
  Description of Artificial Sequence: Synthetic oligonucleotide
cugaccgggucccaguuug

SEQ ID NO: 1063589 - RNA, 19 nt, Artificial Sequence
  Description of Artificial Sequence: Synthetic oligonucleotide
guuaccgucucuagagggc

SEQ ID NO: 1063590 - RNA, 19 nt, Artificial Sequence
  Description of Artificial Sequence: Synthetic oligonucleotide
ugaucagucugcucuccaa

SEQ ID NO: 1063591 - RNA, 19 nt, Artificial Sequence
  Description of Artificial Sequence: Synthetic oligonucleotide
uguugcccugagauccucc

SEQ ID NO: 1063592 - RNA, 19 nt, Artificial Sequence
  Description of Artificial Sequence: Synthetic oligonucleotide
cuccuaauguggaccuggg

SEQ ID NO: 1063593 - RNA, 19 nt, Artificial Sequence
  Description of Artificial Sequence: Synthetic oligonucleotide
ccuaauguggaccugggca

SEQ ID NO: 1063594 - RNA, 19 nt, Artificial Sequence
  Description of Artificial Sequence: Synthetic oligonucleotide
agccucguugagccgacuc

SEQ ID NO: 1063595 - RNA, 19 nt, Artificial Sequence
  Description of Artificial Sequence: Synthetic oligonucleotide
gaccucguaaugccugggc

SEQ ID NO: 1063596 - RNA, 19 nt, Artificial Sequence
  Description of Artificial Sequence: Synthetic oligonucleotide
uccuaaguacuggcgcagg

SEQ ID NO: 1063597 - RNA, 19 nt, Artificial Sequence
  Description of Artificial Sequence: Synthetic oligonucleotide
gguguugaaugucuuguuc

SEQ ID NO: 1063598 - RNA, 19 nt, Artificial Sequence
  Description of Artificial Sequence: Synthetic oligonucleotide
guugagccgacuccguuca

SEQ ID NO: 1063599 - RNA, 19 nt, Artificial Sequence
  Description of Artificial Sequence: Synthetic oligonucleotide
agucucucuaaaucaugau

SEQ ID NO: 1063600 - RNA, 19 nt, Artificial Sequence
  Description of Artificial Sequence: Synthetic oligonucleotide
cucgaugcugucugugaac

SEQ ID NO: 1063601 - RNA, 19 nt, Artificial Sequence
  Description of Artificial Sequence: Synthetic oligonucleotide
gucuccgguucccugaaac

SEQ ID NO: 1063602 - RNA, 19 nt, Artificial Sequence
  Description of Artificial Sequence: Synthetic oligonucleotide
ugugucugagucuccuaau

SEQ ID NO: 1063603 - RNA, 19 nt, Artificial Sequence
  Description of Artificial Sequence: Synthetic oligonucleotide
accgucucuagagggcacc

SEQ ID NO: 1063604 - RNA, 19 nt, Artificial Sequence
  Description of Artificial Sequence: Synthetic oligonucleotide
uccaucucuagaguaugaa

SEQ ID NO: 1063605 - RNA, 19 nt, Artificial Sequence
  Description of Artificial Sequence: Synthetic oligonucleotide
gaucucgcucucucacugc

SEQ ID NO: 1063606 - RNA, 19 nt, Artificial Sequence
  Description of Artificial Sequence: Synthetic oligonucleotide
cucguaaugccugggcccc

SEQ ID NO: 1063607 - RNA, 19 nt, Artificial Sequence
  Description of Artificial Sequence: Synthetic oligonucleotide
caugcuggcaucuucucua

SEQ ID NO: 1063608 - RNA, 19 nt, Artificial Sequence
  Description of Artificial Sequence: Synthetic oligonucleotide
uugcagggaugucugcaac

SEQ ID NO: 1063609 - RNA, 19 nt, Artificial Sequence
  Description of Artificial Sequence: Synthetic oligonucleotide
cuagcagucagugaagugu

SEQ ID NO: 1063610 - RNA, 19 nt, Artificial Sequence
  Description of Artificial Sequence: Synthetic oligonucleotide
cucuagaguaugaagcugu

SEQ ID NO: 1063611 - RNA, 19 nt, Artificial Sequence
  Description of Artificial Sequence: Synthetic oligonucleotide
augaucucgcucucucacu

SEQ ID NO: 1063612 - RNA, 19 nt, Artificial Sequence
  Description of Artificial Sequence: Synthetic oligonucleotide
uagagcagacagcucuauc

SEQ ID NO: 1063613 - RNA, 19 nt, Artificial Sequence
  Description of Artificial Sequence: Synthetic oligonucleotide
ccaucucuagaguaugaag

SEQ ID NO: 1063614 - RNA, 19 nt, Artificial Sequence
  Description of Artificial Sequence: Synthetic oligonucleotide
cuccagccugcuuaagcgc

SEQ ID NO: 1063615 - RNA, 19 nt, Artificial Sequence
  Description of Artificial Sequence: Synthetic oligonucleotide
cuagaguaugaagcuguug

SEQ ID NO: 1063616 - RNA, 19 nt, Artificial Sequence
  Description of Artificial Sequence: Synthetic oligonucleotide
gaccucuugggucaggcgu

SEQ ID NO: 1063617 - RNA, 19 nt, Artificial Sequence
  Description of Artificial Sequence: Synthetic oligonucleotide
cugagucuccuaaugugga

SEQ ID NO: 1063618 - RNA, 19 nt, Artificial Sequence
  Description of Artificial Sequence: Synthetic oligonucleotide
ucacuuuaacuuguugguu

SEQ ID NO: 1063619 - RNA, 19 nt, Artificial Sequence
  Description of Artificial Sequence: Synthetic oligonucleotide
cucuauauuguaggagcuc

SEQ ID NO: 1063620 - RNA, 19 nt, Artificial Sequence
  Description of Artificial Sequence: Synthetic oligonucleotide
cagaguucggucucucuca

SEQ ID NO: 1063621 - RNA, 19 nt, Artificial Sequence
  Description of Artificial Sequence: Synthetic oligonucleotide
cauggacuguagagcagac

SEQ ID NO: 1063622 - RNA, 19 nt, Artificial Sequence
  Description of Artificial Sequence: Synthetic oligonucleotide
acuagucccucuagcauca

SEQ ID NO: 1063623 - RNA, 19 nt, Artificial Sequence
  Description of Artificial Sequence: Synthetic oligonucleotide
cugggccccuuccaguucc

SEQ ID NO: 1063624 - RNA, 19 nt, Artificial Sequence
  Description of Artificial Sequence: Synthetic oligonucleotide
gagucgauuaggucucucu

SEQ ID NO: 1063625 - RNA, 19 nt, Artificial Sequence
  Description of Artificial Sequence: Synthetic oligonucleotide
ccucguaaugccugggccc

SEQ ID NO: 1063626 - RNA, 19 nt, Artificial Sequence
  Description of Artificial Sequence: Synthetic oligonucleotide
ucgcucagaagguccugca

SEQ ID NO: 1063627 - RNA, 19 nt, Artificial Sequence
  Description of Artificial Sequence: Synthetic oligonucleotide
uggggaccgauggaaguca

SEQ ID NO: 1063628 - RNA, 19 nt, Artificial Sequence
  Description of Artificial Sequence: Synthetic oligonucleotide
gucgauuaggucucucucu

SEQ ID NO: 1063629 - RNA, 19 nt, Artificial Sequence
  Description of Artificial Sequence: Synthetic oligonucleotide
gccgcagcaccuccaaugg

SEQ ID NO: 1063630 - RNA, 19 nt, Artificial Sequence
  Description of Artificial Sequence: Synthetic oligonucleotide
cuucuaggcgaccucguaa

SEQ ID NO: 1063631 - RNA, 19 nt, Artificial Sequence
  Description of Artificial Sequence: Synthetic oligonucleotide
cuaauguggaccugggcau

SEQ ID NO: 1063632 - RNA, 19 nt, Artificial Sequence
  Description of Artificial Sequence: Synthetic oligonucleotide
gaggagugcccgagagucg

SEQ ID NO: 1063633 - RNA, 19 nt, Artificial Sequence
  Description of Artificial Sequence: Synthetic oligonucleotide
auuaggucucucucuccua

SEQ ID NO: 1063634 - RNA, 19 nt, Artificial Sequence
  Description of Artificial Sequence: Synthetic oligonucleotide
acagcucggucuuguauuu

SEQ ID NO: 1063635 - RNA, 19 nt, Artificial Sequence
  Description of Artificial Sequence: Synthetic oligonucleotide
gcauguaauucuguguuuc

SEQ ID NO: 1063636 - RNA, 19 nt, Artificial Sequence
  Description of Artificial Sequence: Synthetic oligonucleotide
accugcacagagcuuugau

SEQ ID NO: 1063637 - RNA, 19 nt, Artificial Sequence
  Description of Artificial Sequence: Synthetic oligonucleotide
cuccuaaguacuggcgcag

SEQ ID NO: 1063638 - RNA, 19 nt, Artificial Sequence
  Description of Artificial Sequence: Synthetic oligonucleotide
uuuuagccaugagcucgag

SEQ ID NO: 1063639 - RNA, 19 nt, Artificial Sequence
  Description of Artificial Sequence: Synthetic oligonucleotide
gucgaccaguugcauuugc

SEQ ID NO: 1063640 - RNA, 19 nt, Artificial Sequence
  Description of Artificial Sequence: Synthetic oligonucleotide
ucucgcucucucacugcac

SEQ ID NO: 1063641 - RNA, 19 nt, Artificial Sequence
  Description of Artificial Sequence: Synthetic oligonucleotide
accgggucccaguuugcug

SEQ ID NO: 1063642 - RNA, 19 nt, Artificial Sequence
  Description of Artificial Sequence: Synthetic oligonucleotide
gaccagauuugguuuccaa

SEQ ID NO: 1063643 - RNA, 19 nt, Artificial Sequence
  Description of Artificial Sequence: Synthetic oligonucleotide
agugcccgagagucgauua

SEQ ID NO: 1063644 - RNA, 19 nt, Artificial Sequence
  Description of Artificial Sequence: Synthetic oligonucleotide
ccuaaguacuggcgcaggg

SEQ ID NO: 1063645 - RNA, 19 nt, Artificial Sequence
  Description of Artificial Sequence: Synthetic oligonucleotide
uugucuccgguucccugaa

SEQ ID NO: 1063646 - RNA, 19 nt, Artificial Sequence
  Description of Artificial Sequence: Synthetic oligonucleotide
uaagaccucuugggucagg

SEQ ID NO: 1063647 - RNA, 19 nt, Artificial Sequence
  Description of Artificial Sequence: Synthetic oligonucleotide
aggagugcccgagagucga

SEQ ID NO: 1063648 - RNA, 19 nt, Artificial Sequence
  Description of Artificial Sequence: Synthetic oligonucleotide
agagucgauuaggucucuc

SEQ ID NO: 1063649 - RNA, 19 nt, Artificial Sequence
  Description of Artificial Sequence: Synthetic oligonucleotide
ugucaucgccugccgcagc

SEQ ID NO: 1063650 - RNA, 19 nt, Artificial Sequence
  Description of Artificial Sequence: Synthetic oligonucleotide
gugcccgagagucgauuag

SEQ ID NO: 1063651 - RNA, 19 nt, Artificial Sequence
  Description of Artificial Sequence: Synthetic oligonucleotide
gucuggguuaucucuauau

SEQ ID NO: 1063652 - RNA, 19 nt, Artificial Sequence
  Description of Artificial Sequence: Synthetic oligonucleotide
agacugcuguauagcugcc

SEQ ID NO: 1063653 - RNA, 19 nt, Artificial Sequence
  Description of Artificial Sequence: Synthetic oligonucleotide
ucccggauucgaaucucau

SEQ ID NO: 1063654 - RNA, 19 nt, Artificial Sequence
  Description of Artificial Sequence: Synthetic oligonucleotide
ugagccgacuccguucauc

SEQ ID NO: 1063655 - RNA, 19 nt, Artificial Sequence
  Description of Artificial Sequence: Synthetic oligonucleotide
gagccgacuccguucaucu

SEQ ID NO: 1063656 - RNA, 19 nt, Artificial Sequence
  Description of Artificial Sequence: Synthetic oligonucleotide
gucagugaaguguuaccgu

SEQ ID NO: 1063657 - RNA, 19 nt, Artificial Sequence
  Description of Artificial Sequence: Synthetic oligonucleotide
agaucgcucagaagguccu

SEQ ID NO: 1063658 - RNA, 19 nt, Artificial Sequence
  Description of Artificial Sequence: Synthetic oligonucleotide
ucggucucucucagaguuc

SEQ ID NO: 1063659 - RNA, 19 nt, Artificial Sequence
  Description of Artificial Sequence: Synthetic oligonucleotide
cagagcggagaacuuuuca

SEQ ID NO: 1063660 - RNA, 19 nt, Artificial Sequence
  Description of Artificial Sequence: Synthetic oligonucleotide
ugaccagauuugguuucca

SEQ ID NO: 1063661 - RNA, 19 nt, Artificial Sequence
  Description of Artificial Sequence: Synthetic oligonucleotide
caucuauagcccgcuccag

SEQ ID NO: 1063662 - RNA, 19 nt, Artificial Sequence
  Description of Artificial Sequence: Synthetic oligonucleotide
ucguugagccgacuccguu

SEQ ID NO: 1063663 - RNA, 19 nt, Artificial Sequence
  Description of Artificial Sequence: Synthetic oligonucleotide
cagugucaucgccugccgc

SEQ ID NO: 1063664 - RNA, 19 nt, Artificial Sequence
  Description of Artificial Sequence: Synthetic oligonucleotide
aggaugcuuucuuguuccu

SEQ ID NO: 1063665 - RNA, 19 nt, Artificial Sequence
  Description of Artificial Sequence: Synthetic oligonucleotide
uccgcuugcagagccucgu

SEQ ID NO: 1063666 - RNA, 19 nt, Artificial Sequence
  Description of Artificial Sequence: Synthetic oligonucleotide
uuaagcgcuccaggcuucu

SEQ ID NO: 1063667 - RNA, 19 nt, Artificial Sequence
  Description of Artificial Sequence: Synthetic oligonucleotide
cuucucuagcagucaguga

SEQ ID NO: 1063668 - RNA, 19 nt, Artificial Sequence
  Description of Artificial Sequence: Synthetic oligonucleotide
uaccgucucuagagggcac

SEQ ID NO: 1063669 - RNA, 19 nt, Artificial Sequence
  Description of Artificial Sequence: Synthetic oligonucleotide
guuaacuguuccaguucca

SEQ ID NO: 1063670 - RNA, 19 nt, Artificial Sequence
  Description of Artificial Sequence: Synthetic oligonucleotide
ggaguaagaccucuugggu

SEQ ID NO: 1063671 - RNA, 19 nt, Artificial Sequence
  Description of Artificial Sequence: Synthetic oligonucleotide
ccgagagucgauuaggucu

SEQ ID NO: 1063672 - RNA, 19 nt, Artificial Sequence
  Description of Artificial Sequence: Synthetic oligonucleotide
ucugaccgggucccaguuu

SEQ ID NO: 1063673 - RNA, 19 nt, Artificial Sequence
  Description of Artificial Sequence: Synthetic oligonucleotide
cuagaguuuugucuggguu

SEQ ID NO: 1063674 - RNA, 19 nt, Artificial Sequence
  Description of Artificial Sequence: Synthetic oligonucleotide
gcuguauagcugccucucc

SEQ ID NO: 1063675 - RNA, 19 nt, Artificial Sequence
  Description of Artificial Sequence: Synthetic oligonucleotide
ggauucgaaucucauugua

SEQ ID NO: 1063676 - RNA, 19 nt, Artificial Sequence
  Description of Artificial Sequence: Synthetic oligonucleotide
uaauuugcugguggcuguu

SEQ ID NO: 1063677 - RNA, 19 nt, Artificial Sequence
  Description of Artificial Sequence: Synthetic oligonucleotide
cuauauuguaggagcuccu

SEQ ID NO: 1063678 - RNA, 19 nt, Artificial Sequence
  Description of Artificial Sequence: Synthetic oligonucleotide
gaucgcucagaagguccug

SEQ ID NO: 1063679 - RNA, 19 nt, Artificial Sequence
  Description of Artificial Sequence: Synthetic oligonucleotide
gccucguugagccgacucc

SEQ ID NO: 1063680 - RNA, 19 nt, Artificial Sequence
  Description of Artificial Sequence: Synthetic oligonucleotide
agggucgaccaguugcauu

SEQ ID NO: 1063681 - RNA, 19 nt, Artificial Sequence
  Description of Artificial Sequence: Synthetic oligonucleotide
auguugcccugagauccuc

SEQ ID NO: 1063682 - RNA, 19 nt, Artificial Sequence
  Description of Artificial Sequence: Synthetic oligonucleotide
agagccucguugagccgac

SEQ ID NO: 1063683 - RNA, 19 nt, Artificial Sequence
  Description of Artificial Sequence: Synthetic oligonucleotide
guaagaccucuugggucag

SEQ ID NO: 1063684 - RNA, 19 nt, Artificial Sequence
  Description of Artificial Sequence: Synthetic oligonucleotide
gugucaucgccugccgcag

SEQ ID NO: 1063685 - RNA, 19 nt, Artificial Sequence
  Description of Artificial Sequence: Synthetic oligonucleotide
gaaugucuuguucccggau

SEQ ID NO: 1063686 - RNA, 19 nt, Artificial Sequence
  Description of Artificial Sequence: Synthetic oligonucleotide
ccucguugagccgacuccg

SEQ ID NO: 1063687 - RNA, 19 nt, Artificial Sequence
  Description of Artificial Sequence: Synthetic oligonucleotide
gguuuugacagguggcagu

SEQ ID NO: 1063688 - RNA, 19 nt, Artificial Sequence
  Description of Artificial Sequence: Synthetic oligonucleotide
guggggaccgauggaaguc

SEQ ID NO: 1063689 - RNA, 19 nt, Artificial Sequence
  Description of Artificial Sequence: Synthetic oligonucleotide
ggucaggcguuccauagcu

SEQ ID NO: 1063690 - RNA, 19 nt, Artificial Sequence
  Description of Artificial Sequence: Synthetic oligonucleotide
cuacuagucccucuagcau

SEQ ID NO: 1063691 - RNA, 19 nt, Artificial Sequence
  Description of Artificial Sequence: Synthetic oligonucleotide
ccuucugccaaugaccaga

SEQ ID NO: 1063692 - RNA, 19 nt, Artificial Sequence
  Description of Artificial Sequence: Synthetic oligonucleotide
cuccucgaugcugucugug

SEQ ID NO: 1063693 - RNA, 19 nt, Artificial Sequence
  Description of Artificial Sequence: Synthetic oligonucleotide
ggguuaucucuauauugua

SEQ ID NO: 1063694 - RNA, 19 nt, Artificial Sequence
  Description of Artificial Sequence: Synthetic oligonucleotide
cagagccucguugagccga

SEQ ID NO: 1063695 - RNA, 19 nt, Artificial Sequence
  Description of Artificial Sequence: Synthetic oligonucleotide
aggaaggcuuguaccauuu

SEQ ID NO: 1063696 - RNA, 19 nt, Artificial Sequence
  Description of Artificial Sequence: Synthetic oligonucleotide
cagccugcuuaagcgcucc

SEQ ID NO: 1063697 - RNA, 19 nt, Artificial Sequence
  Description of Artificial Sequence: Synthetic oligonucleotide
ggcgaccucguaaugccug

SEQ ID NO: 1063698 - RNA, 19 nt, Artificial Sequence
  Description of Artificial Sequence: Synthetic oligonucleotide
uggcccucaggagacucuc

SEQ ID NO: 1063699 - RNA, 19 nt, Artificial Sequence
  Description of Artificial Sequence: Synthetic oligonucleotide
cuacgaagucucucuaaau

SEQ ID NO: 1063700 - RNA, 19 nt, Artificial Sequence
  Description of Artificial Sequence: Synthetic oligonucleotide
ugucuccgguucccugaaa

SEQ ID NO: 1063701 - RNA, 19 nt, Artificial Sequence
  Description of Artificial Sequence: Synthetic oligonucleotide
ccucuccgcuugcagagcc

SEQ ID NO: 1063702 - RNA, 19 nt, Artificial Sequence
  Description of Artificial Sequence: Synthetic oligonucleotide
gcuguugucuccgguuccc

SEQ ID NO: 1063703 - RNA, 19 nt, Artificial Sequence
  Description of Artificial Sequence: Synthetic oligonucleotide
uagcccgcuccagaucaac

SEQ ID NO: 1063704 - RNA, 19 nt, Artificial Sequence
  Description of Artificial Sequence: Synthetic oligonucleotide
ccaauucugccuucagcca

SEQ ID NO: 1063705 - RNA, 19 nt, Artificial Sequence
  Description of Artificial Sequence: Synthetic oligonucleotide
ggaagucacuuuaacuugu

SEQ ID NO: 1063706 - RNA, 19 nt, Artificial Sequence
  Description of Artificial Sequence: Synthetic oligonucleotide
cuggugcucaucgacugaa

SEQ ID NO: 1063707 - RNA, 19 nt, Artificial Sequence
  Description of Artificial Sequence: Synthetic oligonucleotide
ggcgcagggcauguaauuc

SEQ ID NO: 1063708 - RNA, 19 nt, Artificial Sequence
  Description of Artificial Sequence: Synthetic oligonucleotide
gucaggcguuccauagcug

SEQ ID NO: 1063709 - RNA, 19 nt, Artificial Sequence
  Description of Artificial Sequence: Synthetic oligonucleotide
cucaaccaacaccucauuu

SEQ ID NO: 1063710 - RNA, 19 nt, Artificial Sequence
  Description of Artificial Sequence: Synthetic oligonucleotide
aucgccugccgcagcaccu

SEQ ID NO: 1063711 - RNA, 19 nt, Artificial Sequence
  Description of Artificial Sequence: Synthetic oligonucleotide
gggucgaccaguugcauuu

SEQ ID NO: 1063712 - RNA, 19 nt, Artificial Sequence
  Description of Artificial Sequence: Synthetic oligonucleotide
ggcaguuaacuguuccagu

SEQ ID NO: 1063713 - RNA, 19 nt, Artificial Sequence
  Description of Artificial Sequence: Synthetic oligonucleotide
aggcguuccauagcuggua

SEQ ID NO: 1063714 - RNA, 19 nt, Artificial Sequence
  Description of Artificial Sequence: Synthetic oligonucleotide
cgauuaggucucucucucc

SEQ ID NO: 1063715 - RNA, 19 nt, Artificial Sequence
  Description of Artificial Sequence: Synthetic oligonucleotide
gaugggcguggaacuugac

SEQ ID NO: 1063716 - RNA, 19 nt, Artificial Sequence
  Description of Artificial Sequence: Synthetic oligonucleotide
cguugagccgacuccguuc

SEQ ID NO: 1063717 - RNA, 19 nt, Artificial Sequence
  Description of Artificial Sequence: Synthetic oligonucleotide
ccauagcugguaugucuuc

SEQ ID NO: 1063718 - RNA, 19 nt, Artificial Sequence
  Description of Artificial Sequence: Synthetic oligonucleotide
cuucaggcgcuggcacagc

SEQ ID NO: 1063719 - RNA, 19 nt, Artificial Sequence
  Description of Artificial Sequence: Synthetic oligonucleotide
gcguuccauagcugguaug

SEQ ID NO: 1063720 - RNA, 19 nt, Artificial Sequence
  Description of Artificial Sequence: Synthetic oligonucleotide
caacagcucggucuuguau

SEQ ID NO: 1063721 - RNA, 19 nt, Artificial Sequence
  Description of Artificial Sequence: Synthetic oligonucleotide
cccgagagucgauuagguc

SEQ ID NO: 1063722 - RNA, 19 nt, Artificial Sequence
  Description of Artificial Sequence: Synthetic oligonucleotide
gguaugucuucagggucga

SEQ ID NO: 1063723 - RNA, 19 nt, Artificial Sequence
  Description of Artificial Sequence: Synthetic oligonucleotide
uugagccgacuccguucau

SEQ ID NO: 1063724 - RNA, 19 nt, Artificial Sequence
  Description of Artificial Sequence: Synthetic oligonucleotide
gguggggaccgauggaagu

SEQ ID NO: 1063725 - RNA, 19 nt, Artificial Sequence
  Description of Artificial Sequence: Synthetic oligonucleotide
uacagccaucauggacugu

SEQ ID NO: 1063726 - RNA, 19 nt, Artificial Sequence
  Description of Artificial Sequence: Synthetic oligonucleotide
gacugcuguauagcugccu

SEQ ID NO: 1063727 - RNA, 19 nt, Artificial Sequence
  Description of Artificial Sequence: Synthetic oligonucleotide
agguccuuuaugagaucuu

SEQ ID NO: 1063728 - RNA, 19 nt, Artificial Sequence
  Description of Artificial Sequence: Synthetic oligonucleotide
ccuuguuuugcagggaugu

SEQ ID NO: 1063729 - RNA, 19 nt, Artificial Sequence
  Description of Artificial Sequence: Synthetic oligonucleotide
ccagagcggagaacuuuuc

SEQ ID NO: 1063730 - RNA, 19 nt, Artificial Sequence
  Description of Artificial Sequence: Synthetic oligonucleotide
ggaugggcguggaacuuga

SEQ ID NO: 1063731 - RNA, 19 nt, Artificial Sequence
  Description of Artificial Sequence: Synthetic oligonucleotide
ggaccgauggaagucacuu

SEQ ID NO: 1063732 - RNA, 19 nt, Artificial Sequence
  Description of Artificial Sequence: Synthetic oligonucleotide
cucaugcuccacaguuugu

SEQ ID NO: 1063733 - RNA, 19 nt, Artificial Sequence
  Description of Artificial Sequence: Synthetic oligonucleotide
aggcgaccucguaaugccu

SEQ ID NO: 1063734 - RNA, 19 nt, Artificial Sequence
  Description of Artificial Sequence: Synthetic oligonucleotide
ccucaggagacucuccaua

SEQ ID NO: 1063735 - RNA, 19 nt, Artificial Sequence
  Description of Artificial Sequence: Synthetic oligonucleotide
ggucgaccaguugcauuug

SEQ ID NO: 1063736 - RNA, 19 nt, Artificial Sequence
  Description of Artificial Sequence: Synthetic oligonucleotide
gcggagaacuuuucaucua

SEQ ID NO: 1063737 - RNA, 19 nt, Artificial Sequence
  Description of Artificial Sequence: Synthetic oligonucleotide
agcagucagugaaguguua

SEQ ID NO: 1063738 - RNA, 19 nt, Artificial Sequence
  Description of Artificial Sequence: Synthetic oligonucleotide
guagagcagacagcucuau

SEQ ID NO: 1063739 - RNA, 19 nt, Artificial Sequence
  Description of Artificial Sequence: Synthetic oligonucleotide
gcgcagggcauguaauucu

SEQ ID NO: 1063740 - RNA, 19 nt, Artificial Sequence
  Description of Artificial Sequence: Synthetic oligonucleotide
ccucuagcaucagcagcag

SEQ ID NO: 1063741 - RNA, 19 nt, Artificial Sequence
  Description of Artificial Sequence: Synthetic oligonucleotide
ggcauguaauucuguguuu

SEQ ID NO: 1063742 - RNA, 19 nt, Artificial Sequence
  Description of Artificial Sequence: Synthetic oligonucleotide
ccgauggaagucacuuuaa

SEQ ID NO: 1063743 - RNA, 19 nt, Artificial Sequence
  Description of Artificial Sequence: Synthetic oligonucleotide
ccagccugcuuaagcgcuc

SEQ ID NO: 1063744 - RNA, 19 nt, Artificial Sequence
  Description of Artificial Sequence: Synthetic oligonucleotide
cagcggccugcaccugcag

SEQ ID NO: 1063745 - RNA, 19 nt, Artificial Sequence
  Description of Artificial Sequence: Synthetic oligonucleotide
gccaaugaccagauuuggu

SEQ ID NO: 1063746 - RNA, 19 nt, Artificial Sequence
  Description of Artificial Sequence: Synthetic oligonucleotide
ccugcaacugugucugagu

SEQ ID NO: 1063747 - RNA, 19 nt, Artificial Sequence
  Description of Artificial Sequence: Synthetic oligonucleotide
ccuguacagccaucaugga

SEQ ID NO: 1063748 - RNA, 19 nt, Artificial Sequence
  Description of Artificial Sequence: Synthetic oligonucleotide
cguuccauagcugguaugu

SEQ ID NO: 1063749 - RNA, 19 nt, Artificial Sequence
  Description of Artificial Sequence: Synthetic oligonucleotide
ggcguuccauagcugguau

SEQ ID NO: 1063750 - RNA, 19 nt, Artificial Sequence
  Description of Artificial Sequence: Synthetic oligonucleotide
gagagucgauuaggucucu

SEQ ID NO: 1063751 - RNA, 19 nt, Artificial Sequence
  Description of Artificial Sequence: Synthetic oligonucleotide
ggggaccgauggaagucac

SEQ ID NO: 1063752 - RNA, 19 nt, Artificial Sequence
  Description of Artificial Sequence: Synthetic oligonucleotide
cauuggcagacaggacacu

SEQ ID NO: 1063753 - RNA, 19 nt, Artificial Sequence
  Description of Artificial Sequence: Synthetic oligonucleotide
gagugcccgagagucgauu

SEQ ID NO: 1063754 - RNA, 19 nt, Artificial Sequence
  Description of Artificial Sequence: Synthetic oligonucleotide
cucugaccgggucccaguu

SEQ ID NO: 1063755 - RNA, 19 nt, Artificial Sequence
  Description of Artificial Sequence: Synthetic oligonucleotide
cgaccucguaaugccuggg

SEQ ID NO: 1063756 - RNA, 19 nt, Artificial Sequence
  Description of Artificial Sequence: Synthetic oligonucleotide
gccucuccgcuugcagagc

SEQ ID NO: 1063757 - RNA, 19 nt, Artificial Sequence
  Description of Artificial Sequence: Synthetic oligonucleotide
gcccgagagucgauuaggu

SEQ ID NO: 1063758 - RNA, 19 nt, Artificial Sequence
  Description of Artificial Sequence: Synthetic oligonucleotide
ccgacuccguucaucuacu

SEQ ID NO: 1063759 - RNA, 19 nt, Artificial Sequence
  Description of Artificial Sequence: Synthetic oligonucleotide
cggauucgaaucucauugu

SEQ ID NO: 1063760 - RNA, 19 nt, Artificial Sequence
  Description of Artificial Sequence: Synthetic oligonucleotide
gcagggcauguaauucugu

SEQ ID NO: 1063761 - RNA, 19 nt, Artificial Sequence
  Description of Artificial Sequence: Synthetic oligonucleotide
ccgaaggaguaagaccucu

SEQ ID NO: 1063762 - RNA, 19 nt, Artificial Sequence
  Description of Artificial Sequence: Synthetic oligonucleotide
cccggauucgaaucucauu

SEQ ID NO: 1063763 - RNA, 19 nt, Artificial Sequence
  Description of Artificial Sequence: Synthetic oligonucleotide
gggaccgauggaagucacu

SEQ ID NO: 1063764 - RNA, 19 nt, Artificial Sequence
  Description of Artificial Sequence: Synthetic oligonucleotide
cggucucucucagaguucu

SEQ ID NO: 1063765 - RNA, 19 nt, Artificial Sequence
  Description of Artificial Sequence: Synthetic oligonucleotide
gagccucguugagccgacu

SEQ ID NO: 1063766 - RNA, 19 nt, Artificial Sequence
  Description of Artificial Sequence: Synthetic oligonucleotide
cagggucgaccaguugcau

SEQ ID NO: 1063767 - RNA, 19 nt, Artificial Sequence
  Description of Artificial Sequence: Synthetic oligonucleotide
cgacuccguucaucuacua

SEQ ID NO: 1063768 - RNA, 19 nt, Artificial Sequence
  Description of Artificial Sequence: Synthetic oligonucleotide
ccgucucuagagggcaccu

SEQ ID NO: 1063769 - RNA, 19 nt, Artificial Sequence
  Description of Artificial Sequence: Synthetic oligonucleotide
aaagacauauaauacacgg

SEQ ID NO: 1063770 - RNA, 19 nt, Artificial Sequence
  Description of Artificial Sequence: Synthetic oligonucleotide
augauauucagcuuucagc

SEQ ID NO: 1063771 - RNA, 19 nt, Artificial Sequence
  Description of Artificial Sequence: Synthetic oligonucleotide
aaaguuguaguuagaaggc

SEQ ID NO: 1063772 - RNA, 19 nt, Artificial Sequence
  Description of Artificial Sequence: Synthetic oligonucleotide
agaaagucgacucccaagg

SEQ ID NO: 1063773 - RNA, 19 nt, Artificial Sequence
  Description of Artificial Sequence: Synthetic oligonucleotide
aagucaucuacgcagcaag

SEQ ID NO: 1063774 - RNA, 19 nt, Artificial Sequence
  Description of Artificial Sequence: Synthetic oligonucleotide
accauagugcaccagaaag

SEQ ID NO: 1063775 - RNA, 19 nt, Artificial Sequence
  Description of Artificial Sequence: Synthetic oligonucleotide
ugcuauacgggucguaccg

SEQ ID NO: 1063776 - RNA, 19 nt, Artificial Sequence
  Description of Artificial Sequence: Synthetic oligonucleotide
agaauaaggccccaggucu

SEQ ID NO: 1063777 - RNA, 19 nt, Artificial Sequence
  Description of Artificial Sequence: Synthetic oligonucleotide
aauggugcaggcaaagagg

SEQ ID NO: 1063778 - RNA, 19 nt, Artificial Sequence
  Description of Artificial Sequence: Synthetic oligonucleotide
aguaucuauccggauaucc

SEQ ID NO: 1063779 - RNA, 19 nt, Artificial Sequence
  Description of Artificial Sequence: Synthetic oligonucleotide
aguugacacaaacugaaug

SEQ ID NO: 1063780 - RNA, 19 nt, Artificial Sequence
  Description of Artificial Sequence: Synthetic oligonucleotide
uaggacuuugcuauacggg

SEQ ID NO: 1063781 - RNA, 19 nt, Artificial Sequence
  Description of Artificial Sequence: Synthetic oligonucleotide
auaggacuuugcuauacgg

SEQ ID NO: 1063782 - RNA, 19 nt, Artificial Sequence
  Description of Artificial Sequence: Synthetic oligonucleotide
ucugaaacccugcuguacc

SEQ ID NO: 1063783 - RNA, 19 nt, Artificial Sequence
  Description of Artificial Sequence: Synthetic oligonucleotide
gacuuugcuauacgggucg

SEQ ID NO: 1063784 - RNA, 19 nt, Artificial Sequence
  Description of Artificial Sequence: Synthetic oligonucleotide
uagugcaccagaaagucga

SEQ ID NO: 1063785 - RNA, 19 nt, Artificial Sequence
  Description of Artificial Sequence: Synthetic oligonucleotide
aaaguugacacaaacugaa

SEQ ID NO: 1063786 - RNA, 19 nt, Artificial Sequence
  Description of Artificial Sequence: Synthetic oligonucleotide
ucaucuacgcagcaagccc

SEQ ID NO: 1063787 - RNA, 19 nt, Artificial Sequence
  Description of Artificial Sequence: Synthetic oligonucleotide
acuucggccuuugugaacc

SEQ ID NO: 1063788 - RNA, 19 nt, Artificial Sequence
  Description of Artificial Sequence: Synthetic oligonucleotide
aagauacacaacagcuucc

SEQ ID NO: 1063789 - RNA, 19 nt, Artificial Sequence
  Description of Artificial Sequence: Synthetic oligonucleotide
caagauacacaacagcuuc

SEQ ID NO: 1063790 - RNA, 19 nt, Artificial Sequence
  Description of Artificial Sequence: Synthetic oligonucleotide
gauaggacuuugcuauacg

SEQ ID NO: 1063791 - RNA, 19 nt, Artificial Sequence
  Description of Artificial Sequence: Synthetic oligonucleotide
uaagcagggacauuagggu

SEQ ID NO: 1063792 - RNA, 19 nt, Artificial Sequence
  Description of Artificial Sequence: Synthetic oligonucleotide
uguaccuugcccgacgccg

SEQ ID NO: 1063793 - RNA, 19 nt, Artificial Sequence
  Description of Artificial Sequence: Synthetic oligonucleotide
ugagccgagauuccaagug

SEQ ID NO: 1063794 - RNA, 19 nt, Artificial Sequence
  Description of Artificial Sequence: Synthetic oligonucleotide
aagucuuggacugacgugu

SEQ ID NO: 1063795 - RNA, 19 nt, Artificial Sequence
  Description of Artificial Sequence: Synthetic oligonucleotide
auauccacaauggugcagg

SEQ ID NO: 1063796 - RNA, 19 nt, Artificial Sequence
  Description of Artificial Sequence: Synthetic oligonucleotide
guccauggggacuagacag

SEQ ID NO: 1063797 - RNA, 19 nt, Artificial Sequence
  Description of Artificial Sequence: Synthetic oligonucleotide
aaaggcugaaccccaguca

SEQ ID NO: 1063798 - RNA, 19 nt, Artificial Sequence
  Description of Artificial Sequence: Synthetic oligonucleotide
uacacggaagucuuggacu

SEQ ID NO: 1063799 - RNA, 19 nt, Artificial Sequence
  Description of Artificial Sequence: Synthetic oligonucleotide
uaucuauccggauauccac

SEQ ID NO: 1063800 - RNA, 19 nt, Artificial Sequence
  Description of Artificial Sequence: Synthetic oligonucleotide
gagagcagaagucucacga

SEQ ID NO: 1063801 - RNA, 19 nt, Artificial Sequence
  Description of Artificial Sequence: Synthetic oligonucleotide
aggacuuugcuauacgggu

SEQ ID NO: 1063802 - RNA, 19 nt, Artificial Sequence
  Description of Artificial Sequence: Synthetic oligonucleotide
aaguagacugagcuugcug

SEQ ID NO: 1063803 - RNA, 19 nt, Artificial Sequence
  Description of Artificial Sequence: Synthetic oligonucleotide
agccuuugagccgagauuc

SEQ ID NO: 1063804 - RNA, 19 nt, Artificial Sequence
  Description of Artificial Sequence: Synthetic oligonucleotide
caauggugcaggcaaagag

SEQ ID NO: 1063805 - RNA, 19 nt, Artificial Sequence
  Description of Artificial Sequence: Synthetic oligonucleotide
aacccugcuguaccuugcc

SEQ ID NO: 1063806 - RNA, 19 nt, Artificial Sequence
  Description of Artificial Sequence: Synthetic oligonucleotide
cucgagacgucucaggaag

SEQ ID NO: 1063807 - RNA, 19 nt, Artificial Sequence
  Description of Artificial Sequence: Synthetic oligonucleotide
aauacacggaagucuugga

SEQ ID NO: 1063808 - RNA, 19 nt, Artificial Sequence
  Description of Artificial Sequence: Synthetic oligonucleotide
aaccccagucaauggagag

SEQ ID NO: 1063809 - RNA, 19 nt, Artificial Sequence
  Description of Artificial Sequence: Synthetic oligonucleotide
gauucacuguccauggccc

SEQ ID NO: 1063810 - RNA, 19 nt, Artificial Sequence
  Description of Artificial Sequence: Synthetic oligonucleotide
uuugcuauacgggucguac

SEQ ID NO: 1063811 - RNA, 19 nt, Artificial Sequence
  Description of Artificial Sequence: Synthetic oligonucleotide
gaagucuuggacugacgug

SEQ ID NO: 1063812 - RNA, 19 nt, Artificial Sequence
  Description of Artificial Sequence: Synthetic oligonucleotide
caucuacgcagcaagcccc

SEQ ID NO: 1063813 - RNA, 19 nt, Artificial Sequence
  Description of Artificial Sequence: Synthetic oligonucleotide
cuacaacccucacaggccg

SEQ ID NO: 1063814 - RNA, 19 nt, Artificial Sequence
  Description of Artificial Sequence: Synthetic oligonucleotide
caaaguugacacaaacuga

SEQ ID NO: 1063815 - RNA, 19 nt, Artificial Sequence
  Description of Artificial Sequence: Synthetic oligonucleotide
cauagugcaccagaaaguc

SEQ ID NO: 1063816 - RNA, 19 nt, Artificial Sequence
  Description of Artificial Sequence: Synthetic oligonucleotide
acacggaagucuuggacug

SEQ ID NO: 1063817 - RNA, 19 nt, Artificial Sequence
  Description of Artificial Sequence: Synthetic oligonucleotide
agccccguaggucacauca

SEQ ID NO: 1063818 - RNA, 19 nt, Artificial Sequence
  Description of Artificial Sequence: Synthetic oligonucleotide
ggucguaccgguaagcagg

SEQ ID NO: 1063819 - RNA, 19 nt, Artificial Sequence
  Description of Artificial Sequence: Synthetic oligonucleotide
ucuauccggauauccacaa

SEQ ID NO: 1063820 - RNA, 19 nt, Artificial Sequence
  Description of Artificial Sequence: Synthetic oligonucleotide
guaaagucaucuacgcagc

SEQ ID NO: 1063821 - RNA, 19 nt, Artificial Sequence
  Description of Artificial Sequence: Synthetic oligonucleotide
agucgaggggaugugcagc

SEQ ID NO: 1063822 - RNA, 19 nt, Artificial Sequence
  Description of Artificial Sequence: Synthetic oligonucleotide
agagagcagaagucucacg

SEQ ID NO: 1063823 - RNA, 19 nt, Artificial Sequence
  Description of Artificial Sequence: Synthetic oligonucleotide
gagccgagauuccaagugc

SEQ ID NO: 1063824 - RNA, 19 nt, Artificial Sequence
  Description of Artificial Sequence: Synthetic oligonucleotide
cagaauaaggccccagguc

SEQ ID NO: 1063825 - RNA, 19 nt, Artificial Sequence
  Description of Artificial Sequence: Synthetic oligonucleotide
ucuuggacugacgugucca

SEQ ID NO: 1063826 - RNA, 19 nt, Artificial Sequence
  Description of Artificial Sequence: Synthetic oligonucleotide
gcaguaaagucaucuacgc

SEQ ID NO: 1063827 - RNA, 19 nt, Artificial Sequence
  Description of Artificial Sequence: Synthetic oligonucleotide
cugcaaaguugacacaaac

SEQ ID NO: 1063828 - RNA, 19 nt, Artificial Sequence
  Description of Artificial Sequence: Synthetic oligonucleotide
ugcgcugauggucguagug

SEQ ID NO: 1063829 - RNA, 19 nt, Artificial Sequence
  Description of Artificial Sequence: Synthetic oligonucleotide
uccauggggacuagacagc

SEQ ID NO: 1063830 - RNA, 19 nt, Artificial Sequence
  Description of Artificial Sequence: Synthetic oligonucleotide
gacugacguguccaugggg

SEQ ID NO: 1063831 - RNA, 19 nt, Artificial Sequence
  Description of Artificial Sequence: Synthetic oligonucleotide
ucguaaggugucagcagug

SEQ ID NO: 1063832 - RNA, 19 nt, Artificial Sequence
  Description of Artificial Sequence: Synthetic oligonucleotide
gauauccacaauggugcag

SEQ ID NO: 1063833 - RNA, 19 nt, Artificial Sequence
  Description of Artificial Sequence: Synthetic oligonucleotide
gcuugggaaaggcugaacc

SEQ ID NO: 1063834 - RNA, 19 nt, Artificial Sequence
  Description of Artificial Sequence: Synthetic oligonucleotide
ugaccauagugcaccagaa

SEQ ID NO: 1063835 - RNA, 19 nt, Artificial Sequence
  Description of Artificial Sequence: Synthetic oligonucleotide
agaggcgugggcaugccac

SEQ ID NO: 1063836 - RNA, 19 nt, Artificial Sequence
  Description of Artificial Sequence: Synthetic oligonucleotide
ugcgcagcuacaacccuca

SEQ ID NO: 1063837 - RNA, 19 nt, Artificial Sequence
  Description of Artificial Sequence: Synthetic oligonucleotide
gguaagcagggacauuagg

SEQ ID NO: 1063838 - RNA, 19 nt, Artificial Sequence
  Description of Artificial Sequence: Synthetic oligonucleotide
uugcuauacgggucguacc

SEQ ID NO: 1063839 - RNA, 19 nt, Artificial Sequence
  Description of Artificial Sequence: Synthetic oligonucleotide
gacucgagacgucucagga

SEQ ID NO: 1063840 - RNA, 19 nt, Artificial Sequence
  Description of Artificial Sequence: Synthetic oligonucleotide
agacgucucaggaagccgg

SEQ ID NO: 1063841 - RNA, 19 nt, Artificial Sequence
  Description of Artificial Sequence: Synthetic oligonucleotide
guaaggugucagcaguggc

SEQ ID NO: 1063842 - RNA, 19 nt, Artificial Sequence
  Description of Artificial Sequence: Synthetic oligonucleotide
agucaucuacgcagcaagc

SEQ ID NO: 1063843 - RNA, 19 nt, Artificial Sequence
  Description of Artificial Sequence: Synthetic oligonucleotide
uaaggaguugccggcguag

SEQ ID NO: 1063844 - RNA, 19 nt, Artificial Sequence
  Description of Artificial Sequence: Synthetic oligonucleotide
ucucuggauaggacuuugc

SEQ ID NO: 1063845 - RNA, 19 nt, Artificial Sequence
  Description of Artificial Sequence: Synthetic oligonucleotide
agagcgagugagcugccug

SEQ ID NO: 1063846 - RNA, 19 nt, Artificial Sequence
  Description of Artificial Sequence: Synthetic oligonucleotide
aaggcccuagcaguaaagu

SEQ ID NO: 1063847 - RNA, 19 nt, Artificial Sequence
  Description of Artificial Sequence: Synthetic oligonucleotide
ugcgacucgagacgucuca

SEQ ID NO: 1063848 - RNA, 19 nt, Artificial Sequence
  Description of Artificial Sequence: Synthetic oligonucleotide
gucaucuacgcagcaagcc

SEQ ID NO: 1063849 - RNA, 19 nt, Artificial Sequence
  Description of Artificial Sequence: Synthetic oligonucleotide
ugaccagagcgagugagcu

SEQ ID NO: 1063850 - RNA, 19 nt, Artificial Sequence
  Description of Artificial Sequence: Synthetic oligonucleotide
gagcgugcagcagcaaugg

SEQ ID NO: 1063851 - RNA, 19 nt, Artificial Sequence
  Description of Artificial Sequence: Synthetic oligonucleotide
auagugcaccagaaagucg

SEQ ID NO: 1063852 - RNA, 19 nt, Artificial Sequence
  Description of Artificial Sequence: Synthetic oligonucleotide
uagucgaggggaugugcag

SEQ ID NO: 1063853 - RNA, 19 nt, Artificial Sequence
  Description of Artificial Sequence: Synthetic oligonucleotide
aggucugcgcagcuacaac

SEQ ID NO: 1063854 - RNA, 19 nt, Artificial Sequence
  Description of Artificial Sequence: Synthetic oligonucleotide
gagacgucucaggaagccg

SEQ ID NO: 1063855 - RNA, 19 nt, Artificial Sequence
  Description of Artificial Sequence: Synthetic oligonucleotide
aggaagccggcagugcagc

SEQ ID NO: 1063856 - RNA, 19 nt, Artificial Sequence
  Description of Artificial Sequence: Synthetic oligonucleotide
acaggccggggcuggagac

SEQ ID NO: 1063857 - RNA, 19 nt, Artificial Sequence
  Description of Artificial Sequence: Synthetic oligonucleotide
uacaacccucacaggccgg

SEQ ID NO: 1063858 - RNA, 19 nt, Artificial Sequence
  Description of Artificial Sequence: Synthetic oligonucleotide
acggaagucuuggacugac

SEQ ID NO: 1063859 - RNA, 19 nt, Artificial Sequence
  Description of Artificial Sequence: Synthetic oligonucleotide
agacugagcuugcugggga

SEQ ID NO: 1063860 - RNA, 19 nt, Artificial Sequence
  Description of Artificial Sequence: Synthetic oligonucleotide
auggucguagugcucucug

SEQ ID NO: 1063861 - RNA, 19 nt, Artificial Sequence
  Description of Artificial Sequence: Synthetic oligonucleotide
uacgggucguaccgguaag

SEQ ID NO: 1063862 - RNA, 19 nt, Artificial Sequence
  Description of Artificial Sequence: Synthetic oligonucleotide
gaauggugcugaccagagc

SEQ ID NO: 1063863 - RNA, 19 nt, Artificial Sequence
  Description of Artificial Sequence: Synthetic oligonucleotide
guuguaguuagaaggcaga

SEQ ID NO: 1063864 - RNA, 19 nt, Artificial Sequence
  Description of Artificial Sequence: Synthetic oligonucleotide
gucgaggggaugugcagcc

SEQ ID NO: 1063865 - RNA, 19 nt, Artificial Sequence
  Description of Artificial Sequence: Synthetic oligonucleotide
caaggcccuagcaguaaag

SEQ ID NO: 1063866 - RNA, 19 nt, Artificial Sequence
  Description of Artificial Sequence: Synthetic oligonucleotide
uggguagucgaggggaugu

SEQ ID NO: 1063867 - RNA, 19 nt, Artificial Sequence
  Description of Artificial Sequence: Synthetic oligonucleotide
ucgagacgucucaggaagc

SEQ ID NO: 1063868 - RNA, 19 nt, Artificial Sequence
  Description of Artificial Sequence: Synthetic oligonucleotide
auacgggucguaccgguaa

SEQ ID NO: 1063869 - RNA, 19 nt, Artificial Sequence
  Description of Artificial Sequence: Synthetic oligonucleotide
cugccuggggcaaagguga

SEQ ID NO: 1063870 - RNA, 19 nt, Artificial Sequence
  Description of Artificial Sequence: Synthetic oligonucleotide
ggacuagacagcugugacc

SEQ ID NO: 1063871 - RNA, 19 nt, Artificial Sequence
  Description of Artificial Sequence: Synthetic oligonucleotide
ucugcgcagcuacaacccu

SEQ ID NO: 1063872 - RNA, 19 nt, Artificial Sequence
  Description of Artificial Sequence: Synthetic oligonucleotide
caugcgcugauggucguag

SEQ ID NO: 1063873 - RNA, 19 nt, Artificial Sequence
  Description of Artificial Sequence: Synthetic oligonucleotide
cacaauggugcaggcaaag

SEQ ID NO: 1063874 - RNA, 19 nt, Artificial Sequence
  Description of Artificial Sequence: Synthetic oligonucleotide
uggugcugaccagagcgag

SEQ ID NO: 1063875 - RNA, 19 nt, Artificial Sequence
  Description of Artificial Sequence: Synthetic oligonucleotide
acuuccuuggguagucgag

SEQ ID NO: 1063876 - RNA, 19 nt, Artificial Sequence
  Description of Artificial Sequence: Synthetic oligonucleotide
acaacccucacaggccggg

SEQ ID NO: 1063877 - RNA, 19 nt, Artificial Sequence
  Description of Artificial Sequence: Synthetic oligonucleotide
cgugauucacuguccaugg

SEQ ID NO: 1063878 - RNA, 19 nt, Artificial Sequence
  Description of Artificial Sequence: Synthetic oligonucleotide
uggagacuggccucugaaa

SEQ ID NO: 1063879 - RNA, 19 nt, Artificial Sequence
  Description of Artificial Sequence: Synthetic oligonucleotide
ccuaggaucuccccagggg

SEQ ID NO: 1063880 - RNA, 19 nt, Artificial Sequence
  Description of Artificial Sequence: Synthetic oligonucleotide
auaauacacggaagucuug

SEQ ID NO: 1063881 - RNA, 19 nt, Artificial Sequence
  Description of Artificial Sequence: Synthetic oligonucleotide
cuuccugccgaguggccug

SEQ ID NO: 1063882 - RNA, 19 nt, Artificial Sequence
  Description of Artificial Sequence: Synthetic oligonucleotide
gggacauuaggguuggcaa

SEQ ID NO: 1063883 - RNA, 19 nt, Artificial Sequence
  Description of Artificial Sequence: Synthetic oligonucleotide
cucugaaacccugcuguac

SEQ ID NO: 1063884 - RNA, 19 nt, Artificial Sequence
  Description of Artificial Sequence: Synthetic oligonucleotide
gaguugccggcguagaagu

SEQ ID NO: 1063885 - RNA, 19 nt, Artificial Sequence
  Description of Artificial Sequence: Synthetic oligonucleotide
acgggucguaccgguaagc

SEQ ID NO: 1063886 - RNA, 19 nt, Artificial Sequence
  Description of Artificial Sequence: Synthetic oligonucleotide
acucgagacgucucaggaa

SEQ ID NO: 1063887 - RNA, 19 nt, Artificial Sequence
  Description of Artificial Sequence: Synthetic oligonucleotide
caguaaagucaucuacgca

SEQ ID NO: 1063888 - RNA, 19 nt, Artificial Sequence
  Description of Artificial Sequence: Synthetic oligonucleotide
cagcaagccccguagguca

SEQ ID NO: 1063889 - RNA, 19 nt, Artificial Sequence
  Description of Artificial Sequence: Synthetic oligonucleotide
uggggacuagacagcugug

SEQ ID NO: 1063890 - RNA, 19 nt, Artificial Sequence
  Description of Artificial Sequence: Synthetic oligonucleotide
ugugggacacugacaugau

SEQ ID NO: 1063891 - RNA, 19 nt, Artificial Sequence
  Description of Artificial Sequence: Synthetic oligonucleotide
cccugcuguaccuugcccg

SEQ ID NO: 1063892 - RNA, 19 nt, Artificial Sequence
  Description of Artificial Sequence: Synthetic oligonucleotide
gaccagagcgagugagcug

SEQ ID NO: 1063893 - RNA, 19 nt, Artificial Sequence
  Description of Artificial Sequence: Synthetic oligonucleotide
gucguaccgguaagcaggg

SEQ ID NO: 1063894 - RNA, 19 nt, Artificial Sequence
  Description of Artificial Sequence: Synthetic oligonucleotide
guguccauggggacuagac

SEQ ID NO: 1063895 - RNA, 19 nt, Artificial Sequence
  Description of Artificial Sequence: Synthetic oligonucleotide
gggacuagacagcugugac

SEQ ID NO: 1063896 - RNA, 19 nt, Artificial Sequence
  Description of Artificial Sequence: Synthetic oligonucleotide
ggaguugccggcguagaag

SEQ ID NO: 1063897 - RNA, 19 nt, Artificial Sequence
  Description of Artificial Sequence: Synthetic oligonucleotide
ugacguguccauggggacu

SEQ ID NO: 1063898 - RNA, 19 nt, Artificial Sequence
  Description of Artificial Sequence: Synthetic oligonucleotide
aucuauccggauauccaca

SEQ ID NO: 1063899 - RNA, 19 nt, Artificial Sequence
  Description of Artificial Sequence: Synthetic oligonucleotide
agugcaccagaaagucgac

SEQ ID NO: 1063900 - RNA, 19 nt, Artificial Sequence
  Description of Artificial Sequence: Synthetic oligonucleotide
cugggcuugcuguauccuc

SEQ ID NO: 1063901 - RNA, 19 nt, Artificial Sequence
  Description of Artificial Sequence: Synthetic oligonucleotide
uuggacugacguguccaug

SEQ ID NO: 1063902 - RNA, 19 nt, Artificial Sequence
  Description of Artificial Sequence: Synthetic oligonucleotide
cuuggcugagcgugcagca

SEQ ID NO: 1063903 - RNA, 19 nt, Artificial Sequence
  Description of Artificial Sequence: Synthetic oligonucleotide
gaccccgggguccaggguc

SEQ ID NO: 1063904 - RNA, 19 nt, Artificial Sequence
  Description of Artificial Sequence: Synthetic oligonucleotide
aucuacgcagcaagccccg

SEQ ID NO: 1063905 - RNA, 19 nt, Artificial Sequence
  Description of Artificial Sequence: Synthetic oligonucleotide
acccuggcggcccaaaguu

SEQ ID NO: 1063906 - RNA, 19 nt, Artificial Sequence
  Description of Artificial Sequence: Synthetic oligonucleotide
guaccgguaagcagggaca

SEQ ID NO: 1063907 - RNA, 19 nt, Artificial Sequence
  Description of Artificial Sequence: Synthetic oligonucleotide
uggagaggcgugggcaugc

SEQ ID NO: 1063908 - RNA, 19 nt, Artificial Sequence
  Description of Artificial Sequence: Synthetic oligonucleotide
ucgacucccaaggcccuag

SEQ ID NO: 1063909 - RNA, 19 nt, Artificial Sequence
  Description of Artificial Sequence: Synthetic oligonucleotide
guagucgaggggaugugca

SEQ ID NO: 1063910 - RNA, 19 nt, Artificial Sequence
  Description of Artificial Sequence: Synthetic oligonucleotide
ggcugaaccccagucaaug

SEQ ID NO: 1063911 - RNA, 19 nt, Artificial Sequence
  Description of Artificial Sequence: Synthetic oligonucleotide
agcgagugagcugccuggg

SEQ ID NO: 1063912 - RNA, 19 nt, Artificial Sequence
  Description of Artificial Sequence: Synthetic oligonucleotide
acgcagcaagccccguagg

SEQ ID NO: 1063913 - RNA, 19 nt, Artificial Sequence
  Description of Artificial Sequence: Synthetic oligonucleotide
guaccuugcccgacgccgg

SEQ ID NO: 1063914 - RNA, 19 nt, Artificial Sequence
  Description of Artificial Sequence: Synthetic oligonucleotide
gacucccaaggcccuagca

SEQ ID NO: 1063915 - RNA, 19 nt, Artificial Sequence
  Description of Artificial Sequence: Synthetic oligonucleotide
ggacugacguguccauggg

SEQ ID NO: 1063916 - RNA, 19 nt, Artificial Sequence
  Description of Artificial Sequence: Synthetic oligonucleotide
augacagacuccaggugga

SEQ ID NO: 1063917 - RNA, 19 nt, Artificial Sequence
  Description of Artificial Sequence: Synthetic oligonucleotide
ggcaguaucuauccggaua

SEQ ID NO: 1063918 - RNA, 19 nt, Artificial Sequence
  Description of Artificial Sequence: Synthetic oligonucleotide
gugaaccuuuccaagauau

SEQ ID NO: 1063919 - RNA, 19 nt, Artificial Sequence
  Description of Artificial Sequence: Synthetic oligonucleotide
agucuuggacugacguguc

SEQ ID NO: 1063920 - RNA, 19 nt, Artificial Sequence
  Description of Artificial Sequence: Synthetic oligonucleotide
gaaggugggcaguaucuau

SEQ ID NO: 1063921 - RNA, 19 nt, Artificial Sequence
  Description of Artificial Sequence: Synthetic oligonucleotide
ggauaggacuuugcuauac

SEQ ID NO: 1063922 - RNA, 19 nt, Artificial Sequence
  Description of Artificial Sequence: Synthetic oligonucleotide
ucccaaggcccuagcagua

SEQ ID NO: 1063923 - RNA, 19 nt, Artificial Sequence
  Description of Artificial Sequence: Synthetic oligonucleotide
ggucguagugcucucugga

SEQ ID NO: 1063924 - RNA, 19 nt, Artificial Sequence
  Description of Artificial Sequence: Synthetic oligonucleotide
gggucguaccgguaagcag

SEQ ID NO: 1063925 - RNA, 19 nt, Artificial Sequence
  Description of Artificial Sequence: Synthetic oligonucleotide
cugcgcagcuacaacccuc

SEQ ID NO: 1063926 - RNA, 19 nt, Artificial Sequence
  Description of Artificial Sequence: Synthetic oligonucleotide
ccgaccgugauucacuguc

SEQ ID NO: 1063927 - RNA, 19 nt, Artificial Sequence
  Description of Artificial Sequence: Synthetic oligonucleotide
gacgucucaggaagccggc

SEQ ID NO: 1063928 - RNA, 19 nt, Artificial Sequence
  Description of Artificial Sequence: Synthetic oligonucleotide
cucguaaggugucagcagu

SEQ ID NO: 1063929 - RNA, 19 nt, Artificial Sequence
  Description of Artificial Sequence: Synthetic oligonucleotide
ccgagauuccaagugcucc

SEQ ID NO: 1063930 - RNA, 19 nt, Artificial Sequence
  Description of Artificial Sequence: Synthetic oligonucleotide
guggaagcggccaucucca

SEQ ID NO: 1063931 - RNA, 19 nt, Artificial Sequence
  Description of Artificial Sequence: Synthetic oligonucleotide
gaaccccagucaauggaga

SEQ ID NO: 1063932 - RNA, 19 nt, Artificial Sequence
  Description of Artificial Sequence: Synthetic oligonucleotide
uaccuugcccgacgccggc

SEQ ID NO: 1063933 - RNA, 19 nt, Artificial Sequence
  Description of Artificial Sequence: Synthetic oligonucleotide
cagcuacaacccucacagg

SEQ ID NO: 1063934 - RNA, 19 nt, Artificial Sequence
  Description of Artificial Sequence: Synthetic oligonucleotide
cugcacccacacauccacc

SEQ ID NO: 1063935 - RNA, 19 nt, Artificial Sequence
  Description of Artificial Sequence: Synthetic oligonucleotide
cccguaggucacaucaccc

SEQ ID NO: 1063936 - RNA, 19 nt, Artificial Sequence
  Description of Artificial Sequence: Synthetic oligonucleotide
uaccgguaagcagggacau

SEQ ID NO: 1063937 - RNA, 19 nt, Artificial Sequence
  Description of Artificial Sequence: Synthetic oligonucleotide
accgugauucacuguccau

SEQ ID NO: 1063938 - RNA, 19 nt, Artificial Sequence
  Description of Artificial Sequence: Synthetic oligonucleotide
gcaguaucuauccggauau

SEQ ID NO: 1063939 - RNA, 19 nt, Artificial Sequence
  Description of Artificial Sequence: Synthetic oligonucleotide
aggaguugccggcguagaa

SEQ ID NO: 1063940 - RNA, 19 nt, Artificial Sequence
  Description of Artificial Sequence: Synthetic oligonucleotide
cauccaccaugggaaguag

SEQ ID NO: 1063941 - RNA, 19 nt, Artificial Sequence
  Description of Artificial Sequence: Synthetic oligonucleotide
ggaaguagacugagcuugc

SEQ ID NO: 1063942 - RNA, 19 nt, Artificial Sequence
  Description of Artificial Sequence: Synthetic oligonucleotide
ccucguaaggugucagcag

SEQ ID NO: 1063943 - RNA, 19 nt, Artificial Sequence
  Description of Artificial Sequence: Synthetic oligonucleotide
ugaaacccugcuguaccuu

SEQ ID NO: 1063944 - RNA, 19 nt, Artificial Sequence
  Description of Artificial Sequence: Synthetic oligonucleotide
gguagucgaggggaugugc

SEQ ID NO: 1063945 - RNA, 19 nt, Artificial Sequence
  Description of Artificial Sequence: Synthetic oligonucleotide
cuguaccuugcccgacgcc

SEQ ID NO: 1063946 - RNA, 19 nt, Artificial Sequence
  Description of Artificial Sequence: Synthetic oligonucleotide
accaugggaaguagacuga

SEQ ID NO: 1063947 - RNA, 19 nt, Artificial Sequence
  Description of Artificial Sequence: Synthetic oligonucleotide
cuugcccgacgccggcugg

SEQ ID NO: 1063948 - RNA, 19 nt, Artificial Sequence
  Description of Artificial Sequence: Synthetic oligonucleotide
cguaccgguaagcagggac

SEQ ID NO: 1063949 - RNA, 19 nt, Artificial Sequence
  Description of Artificial Sequence: Synthetic oligonucleotide
gcuauacgggucguaccgg

SEQ ID NO: 1063950 - RNA, 19 nt, Artificial Sequence
  Description of Artificial Sequence: Synthetic oligonucleotide
gacguguccauggggacua

SEQ ID NO: 1063951 - RNA, 19 nt, Artificial Sequence
  Description of Artificial Sequence: Synthetic oligonucleotide
gagcaccgggcccugcgac

SEQ ID NO: 1063952 - RNA, 19 nt, Artificial Sequence
  Description of Artificial Sequence: Synthetic oligonucleotide
aggcggacugaguccagaa

SEQ ID NO: 1063953 - RNA, 19 nt, Artificial Sequence
  Description of Artificial Sequence: Synthetic oligonucleotide
agcaagccccguaggucac

SEQ ID NO: 1063954 - RNA, 19 nt, Artificial Sequence
  Description of Artificial Sequence: Synthetic oligonucleotide
ccgugauucacuguccaug

SEQ ID NO: 1063955 - RNA, 19 nt, Artificial Sequence
  Description of Artificial Sequence: Synthetic oligonucleotide
cugauggucguagugcucu

SEQ ID NO: 1063956 - RNA, 19 nt, Artificial Sequence
  Description of Artificial Sequence: Synthetic oligonucleotide
gcuguaccuugcccgacgc

SEQ ID NO: 1063957 - RNA, 19 nt, Artificial Sequence
  Description of Artificial Sequence: Synthetic oligonucleotide
ggccuuugugaaccuuucc

SEQ ID NO: 1063958 - RNA, 19 nt, Artificial Sequence
  Description of Artificial Sequence: Synthetic oligonucleotide
aguugccggcguagaaguc

SEQ ID NO: 1063959 - RNA, 19 nt, Artificial Sequence
  Description of Artificial Sequence: Synthetic oligonucleotide
gcccuaaggaguugccggc

SEQ ID NO: 1063960 - RNA, 19 nt, Artificial Sequence
  Description of Artificial Sequence: Synthetic oligonucleotide
cuagacagcugugaccaua

SEQ ID NO: 1063961 - RNA, 19 nt, Artificial Sequence
  Description of Artificial Sequence: Synthetic oligonucleotide
gccccaagccuuugagccg

SEQ ID NO: 1063962 - RNA, 19 nt, Artificial Sequence
  Description of Artificial Sequence: Synthetic oligonucleotide
gcgcugauggucguagugc

SEQ ID NO: 1063963 - RNA, 19 nt, Artificial Sequence
  Description of Artificial Sequence: Synthetic oligonucleotide
gcugccugcaaaguugaca

SEQ ID NO: 1063964 - RNA, 19 nt, Artificial Sequence
  Description of Artificial Sequence: Synthetic oligonucleotide
cuauacgggucguaccggu

SEQ ID NO: 1063965 - RNA, 19 nt, Artificial Sequence
  Description of Artificial Sequence: Synthetic oligonucleotide
gaguggccugcaugcgcug

SEQ ID NO: 1063966 - RNA, 19 nt, Artificial Sequence
  Description of Artificial Sequence: Synthetic oligonucleotide
gccugcaaaguugacacaa

SEQ ID NO: 1063967 - RNA, 19 nt, Artificial Sequence
  Description of Artificial Sequence: Synthetic oligonucleotide
acuuugcuauacgggucgu

SEQ ID NO: 1063968 - RNA, 19 nt, Artificial Sequence
  Description of Artificial Sequence: Synthetic oligonucleotide
ccccguaggucacaucacc

SEQ ID NO: 1063969 - RNA, 19 nt, Artificial Sequence
  Description of Artificial Sequence: Synthetic oligonucleotide
cguaaggugucagcagugg

SEQ ID NO: 1063970 - RNA, 19 nt, Artificial Sequence
  Description of Artificial Sequence: Synthetic oligonucleotide
acuagacagcugugaccau

SEQ ID NO: 1063971 - RNA, 19 nt, Artificial Sequence
  Description of Artificial Sequence: Synthetic oligonucleotide
ggcggcccaaaguucccag

SEQ ID NO: 1063972 - RNA, 19 nt, Artificial Sequence
  Description of Artificial Sequence: Synthetic oligonucleotide
gaaguagacugagcuugcu

SEQ ID NO: 1063973 - RNA, 19 nt, Artificial Sequence
  Description of Artificial Sequence: Synthetic oligonucleotide
aguggccugcaugcgcuga

SEQ ID NO: 1063974 - RNA, 19 nt, Artificial Sequence
  Description of Artificial Sequence: Synthetic oligonucleotide
gcgagugagcugccugggg

SEQ ID NO: 1063975 - RNA, 19 nt, Artificial Sequence
  Description of Artificial Sequence: Synthetic oligonucleotide
gccucguaaggugucagca

SEQ ID NO: 1063976 - RNA, 19 nt, Artificial Sequence
  Description of Artificial Sequence: Synthetic oligonucleotide
caacccucacaggccgggg

SEQ ID NO: 1063977 - RNA, 19 nt, Artificial Sequence
  Description of Artificial Sequence: Synthetic oligonucleotide
cugaaacccugcuguaccu

SEQ ID NO: 1063978 - RNA, 19 nt, Artificial Sequence
  Description of Artificial Sequence: Synthetic oligonucleotide
uuccugccgaguggccugc

SEQ ID NO: 1063979 - RNA, 19 nt, Artificial Sequence
  Description of Artificial Sequence: Synthetic oligonucleotide
cccaaaguucccagaauaa

SEQ ID NO: 1063980 - RNA, 19 nt, Artificial Sequence
  Description of Artificial Sequence: Synthetic oligonucleotide
cugcgacucgagacgucuc

SEQ ID NO: 1063981 - RNA, 19 nt, Artificial Sequence
  Description of Artificial Sequence: Synthetic oligonucleotide
gccugggcuugcuguaucc

SEQ ID NO: 1063982 - RNA, 19 nt, Artificial Sequence
  Description of Artificial Sequence: Synthetic oligonucleotide
agcugccugcaaaguugac

SEQ ID NO: 1063983 - RNA, 19 nt, Artificial Sequence
  Description of Artificial Sequence: Synthetic oligonucleotide
uggcggcccaaaguuccca

SEQ ID NO: 1063984 - RNA, 19 nt, Artificial Sequence
  Description of Artificial Sequence: Synthetic oligonucleotide
ucuacgcagcaagccccgu

SEQ ID NO: 1063985 - RNA, 19 nt, Artificial Sequence
  Description of Artificial Sequence: Synthetic oligonucleotide
cuauccggauauccacaaa

SEQ ID NO: 1063986 - RNA, 19 nt, Artificial Sequence
  Description of Artificial Sequence: Synthetic oligonucleotide
auccaccaugggaaguaga

SEQ ID NO: 1063987 - RNA, 19 nt, Artificial Sequence
  Description of Artificial Sequence: Synthetic oligonucleotide
cuaaggaguugccggcgua

SEQ ID NO: 1063988 - RNA, 19 nt, Artificial Sequence
  Description of Artificial Sequence: Synthetic oligonucleotide
gaggcggacugaguccaga

SEQ ID NO: 1063989 - RNA, 19 nt, Artificial Sequence
  Description of Artificial Sequence: Synthetic oligonucleotide
ccauagugcaccagaaagu

SEQ ID NO: 1063990 - RNA, 19 nt, Artificial Sequence
  Description of Artificial Sequence: Synthetic oligonucleotide
gcagcaagccccguagguc

SEQ ID NO: 1063991 - RNA, 19 nt, Artificial Sequence
  Description of Artificial Sequence: Synthetic oligonucleotide
caguaucuauccggauauc

SEQ ID NO: 1063992 - RNA, 19 nt, Artificial Sequence
  Description of Artificial Sequence: Synthetic oligonucleotide
ggacauuaggguuggcaau

SEQ ID NO: 1063993 - RNA, 19 nt, Artificial Sequence
  Description of Artificial Sequence: Synthetic oligonucleotide
gugggacacugacaugaua

SEQ ID NO: 1063994 - RNA, 19 nt, Artificial Sequence
  Description of Artificial Sequence: Synthetic oligonucleotide
ucgaggggaugugcagccu

SEQ ID NO: 1063995 - RNA, 19 nt, Artificial Sequence
  Description of Artificial Sequence: Synthetic oligonucleotide
ccgaguggccugcaugcgc

SEQ ID NO: 1063996 - RNA, 19 nt, Artificial Sequence
  Description of Artificial Sequence: Synthetic oligonucleotide
cgacucgagacgucucagg

SEQ ID NO: 1063997 - RNA, 19 nt, Artificial Sequence
  Description of Artificial Sequence: Synthetic oligonucleotide
gggaaaggcugaaccccag

SEQ ID NO: 1063998 - RNA, 19 nt, Artificial Sequence
  Description of Artificial Sequence: Synthetic oligonucleotide
agucgacucccaaggcccu

SEQ ID NO: 1063999 - RNA, 19 nt, Artificial Sequence
  Description of Artificial Sequence: Synthetic oligonucleotide
ccguaggucacaucaccca

SEQ ID NO: 1064000 - RNA, 19 nt, Artificial Sequence
  Description of Artificial Sequence: Synthetic oligonucleotide
acgucucaggaagccggca

SEQ ID NO: 1064001 - RNA, 19 nt, Artificial Sequence
  Description of Artificial Sequence: Synthetic oligonucleotide
cccuaaggaguugccggcg

SEQ ID NO: 1064002 - RNA, 19 nt, Artificial Sequence
  Description of Artificial Sequence: Synthetic oligonucleotide
ugcccgacgccggcuggcc

SEQ ID NO: 1064003 - RNA, 19 nt, Artificial Sequence
  Description of Artificial Sequence: Synthetic oligonucleotide
ccugcuguaccuugcccga

SEQ ID NO: 1064004 - RNA, 19 nt, Artificial Sequence
  Description of Artificial Sequence: Synthetic oligonucleotide
aggcgugggcaugccaccu

SEQ ID NO: 1064005 - RNA, 19 nt, Artificial Sequence
  Description of Artificial Sequence: Synthetic oligonucleotide
ggucccgaccgugauucac

SEQ ID NO: 1064006 - RNA, 19 nt, Artificial Sequence
  Description of Artificial Sequence: Synthetic oligonucleotide
cuuggguagucgaggggau

SEQ ID NO: 1064007 - RNA, 19 nt, Artificial Sequence
  Description of Artificial Sequence: Synthetic oligonucleotide
gcgacucgagacgucucag

SEQ ID NO: 1064008 - RNA, 19 nt, Artificial Sequence
  Description of Artificial Sequence: Synthetic oligonucleotide
cuacgcagcaagccccgua

SEQ ID NO: 1064009 - RNA, 19 nt, Artificial Sequence
  Description of Artificial Sequence: Synthetic oligonucleotide
cccagucaauggagaggcg

SEQ ID NO: 1064010 - RNA, 19 nt, Artificial Sequence
  Description of Artificial Sequence: Synthetic oligonucleotide
caggucugcgcagcuacaa

SEQ ID NO: 1064011 - RNA, 19 nt, Artificial Sequence
  Description of Artificial Sequence: Synthetic oligonucleotide
ccgguaagcagggacauua

SEQ ID NO: 1064012 - RNA, 19 nt, Artificial Sequence
  Description of Artificial Sequence: Synthetic oligonucleotide
ucguaccgguaagcaggga

SEQ ID NO: 1064013 - RNA, 19 nt, Artificial Sequence
  Description of Artificial Sequence: Synthetic oligonucleotide
caccgggcccugcgacucg

SEQ ID NO: 1064014 - RNA, 19 nt, Artificial Sequence
  Description of Artificial Sequence: Synthetic oligonucleotide
cgguaagcagggacauuag

SEQ ID NO: 1064015 - RNA, 19 nt, Artificial Sequence
  Description of Artificial Sequence: Synthetic oligonucleotide
cuuugcuauacgggucgua

SEQ ID NO: 1064016 - RNA, 19 nt, Artificial Sequence
  Description of Artificial Sequence: Synthetic oligonucleotide
gccuuugagccgagauucc

SEQ ID NO: 1064017 - RNA, 19 nt, Artificial Sequence
  Description of Artificial Sequence: Synthetic oligonucleotide
gucccgaccgugauucacu

SEQ ID NO: 1064018 - RNA, 19 nt, Artificial Sequence
  Description of Artificial Sequence: Synthetic oligonucleotide
gccgaguggccugcaugcg

SEQ ID NO: 1064019 - RNA, 19 nt, Artificial Sequence
  Description of Artificial Sequence: Synthetic oligonucleotide
cauuaggguuggcaaucau

SEQ ID NO: 1064020 - RNA, 19 nt, Artificial Sequence
  Description of Artificial Sequence: Synthetic oligonucleotide
cacggaagucuuggacuga

SEQ ID NO: 1064021 - RNA, 19 nt, Artificial Sequence
  Description of Artificial Sequence: Synthetic oligonucleotide
accuugcccgacgccggcu

SEQ ID NO: 1064022 - RNA, 19 nt, Artificial Sequence
  Description of Artificial Sequence: Synthetic oligonucleotide
ccuugcccgacgccggcug

SEQ ID NO: 1064023 - RNA, 19 nt, Artificial Sequence
  Description of Artificial Sequence: Synthetic oligonucleotide
acguguccauggggacuag

SEQ ID NO: 1064024 - RNA, 19 nt, Artificial Sequence
  Description of Artificial Sequence: Synthetic oligonucleotide
ccagagcgagugagcugcc

SEQ ID NO: 1064025 - RNA, 19 nt, Artificial Sequence
  Description of Artificial Sequence: Synthetic oligonucleotide
cguagaaguccauggggua

SEQ ID NO: 1064026 - RNA, 19 nt, Artificial Sequence
  Description of Artificial Sequence: Synthetic oligonucleotide
ccacggccgccucguaagg

SEQ ID NO: 1064027 - RNA, 19 nt, Artificial Sequence
  Description of Artificial Sequence: Synthetic oligonucleotide
accgguaagcagggacauu

SEQ ID NO: 1064028 - RNA, 19 nt, Artificial Sequence
  Description of Artificial Sequence: Synthetic oligonucleotide
cgccucguaaggugucagc

SEQ ID NO: 1064029 - RNA, 19 nt, Artificial Sequence
  Description of Artificial Sequence: Synthetic oligonucleotide
gcggcccaaaguucccaga

SEQ ID NO: 1064030 - RNA, 19 nt, Artificial Sequence
  Description of Artificial Sequence: Synthetic oligonucleotide
ccggcagugcagccuucag

SEQ ID NO: 1064031 - RNA, 19 nt, Artificial Sequence
  Description of Artificial Sequence: Synthetic oligonucleotide
cccuggcggcccaaaguuc

SEQ ID NO: 1064032 - RNA, 19 nt, Artificial Sequence
  Description of Artificial Sequence: Synthetic oligonucleotide
gcccgacgccggcuggccg

SEQ ID NO: 1064033 - RNA, 19 nt, Artificial Sequence
  Description of Artificial Sequence: Synthetic oligonucleotide
gcccuagcaguaaagucau

SEQ ID NO: 1064034 - RNA, 19 nt, Artificial Sequence
  Description of Artificial Sequence: Synthetic oligonucleotide
ccccaagccuuugagccga

SEQ ID NO: 1064035 - RNA, 19 nt, Artificial Sequence
  Description of Artificial Sequence: Synthetic oligonucleotide
cuucggccuuugugaaccu

SEQ ID NO: 1064036 - RNA, 19 nt, Artificial Sequence
  Description of Artificial Sequence: Synthetic oligonucleotide
ccucugaaacccugcugua

SEQ ID NO: 1064037 - RNA, 19 nt, Artificial Sequence
  Description of Artificial Sequence: Synthetic oligonucleotide
gccccguaggucacaucac

SEQ ID NO: 1064038 - RNA, 19 nt, Artificial Sequence
  Description of Artificial Sequence: Synthetic oligonucleotide
ccgccucguaaggugucag

SEQ ID NO: 1064039 - RNA, 19 nt, Artificial Sequence
  Description of Artificial Sequence: Synthetic oligonucleotide
gucgacucccaaggcccua

SEQ ID NO: 1064040 - RNA, 19 nt, Artificial Sequence
  Description of Artificial Sequence: Synthetic oligonucleotide
ccugcgacucgagacgucu

SEQ ID NO: 1064041 - RNA, 19 nt, Artificial Sequence
  Description of Artificial Sequence: Synthetic oligonucleotide
cccaagccuuugagccgag

SEQ ID NO: 1064042 - RNA, 19 nt, Artificial Sequence
  Description of Artificial Sequence: Synthetic oligonucleotide
cccgacgccggcuggccga

SEQ ID NO: 1064043 - RNA, 19 nt, Artificial Sequence
  Description of Artificial Sequence: Synthetic oligonucleotide
caagccccguaggucacau

SEQ ID NO: 1064044 - RNA, 19 nt, Artificial Sequence
  Description of Artificial Sequence: Synthetic oligonucleotide
cgaguggccugcaugcgcu

SEQ ID NO: 1064045 - RNA, 19 nt, Artificial Sequence
  Description of Artificial Sequence: Synthetic oligonucleotide
gccgccucguaagguguca

SEQ ID NO: 1064046 - RNA, 19 nt, Artificial Sequence
  Description of Artificial Sequence: Synthetic oligonucleotide
gcgcagcuacaacccucac

SEQ ID NO: 1064047 - RNA, 19 nt, Artificial Sequence
  Description of Artificial Sequence: Synthetic oligonucleotide
cgacucccaaggcccuagc

SEQ ID NO: 1064048 - RNA, 19 nt, Artificial Sequence
  Description of Artificial Sequence: Synthetic oligonucleotide
cagagcgagugagcugccu

SEQ ID NO: 1064049 - RNA, 19 nt, Artificial Sequence
  Description of Artificial Sequence: Synthetic oligonucleotide
gcaagccccguaggucaca

SEQ ID NO: 1064050 - RNA, 19 nt, Artificial Sequence
  Description of Artificial Sequence: Synthetic oligonucleotide
cgggucguaccgguaagca

SEQ ID NO: 1064051 - RNA, 19 nt, Artificial Sequence
  Description of Artificial Sequence: Synthetic oligonucleotide
gggcaguaucuauccggau

SEQ ID NO: 1064052 - RNA, 19 nt, Artificial Sequence
  Description of Artificial Sequence: Synthetic oligonucleotide
ggccgccucguaagguguc

SEQ ID NO: 1064053 - RNA, 19 nt, Artificial Sequence
  Description of Artificial Sequence: Synthetic oligonucleotide
gggucccgaccgugauuca

SEQ ID NO: 1064054 - RNA, 19 nt, Artificial Sequence
  Description of Artificial Sequence: Synthetic oligonucleotide
cccugcgacucgagacguc

SEQ ID NO: 1064055 - RNA, 19 nt, Artificial Sequence
  Description of Artificial Sequence: Synthetic oligonucleotide
cacggccgccucguaaggu

SEQ ID NO: 1064056 - RNA, 19 nt, Artificial Sequence
  Description of Artificial Sequence: Synthetic oligonucleotide
cagggucccgaccgugauu

SEQ ID NO: 1064057 - RNA, 19 nt, Artificial Sequence
  Description of Artificial Sequence: Synthetic oligonucleotide
gcccugcgacucgagacgu

SEQ ID NO: 1064058 - RNA, 19 nt, Artificial Sequence
  Description of Artificial Sequence: Synthetic oligonucleotide
ccgacgccggcuggccgag

SEQ ID NO: 1064059 - RNA, 19 nt, Artificial Sequence
  Description of Artificial Sequence: Synthetic oligonucleotide
ccgggguccagggucccga

SEQ ID NO: 1064060 - RNA, 19 nt, Artificial Sequence
  Description of Artificial Sequence: Synthetic oligonucleotide
ccaagccuuugagccgaga

SEQ ID NO: 1064061 - RNA, 19 nt, Artificial Sequence
  Description of Artificial Sequence: Synthetic oligonucleotide
cguguccauggggacuaga

SEQ ID NO: 1064062 - RNA, 19 nt, Artificial Sequence
  Description of Artificial Sequence: Synthetic oligonucleotide
cccgaccgugauucacugu

SEQ ID NO: 1064063 - RNA, 19 nt, Artificial Sequence
  Description of Artificial Sequence: Synthetic oligonucleotide
cggccgccucguaaggugu

SEQ ID NO: 1064064 - RNA, 19 nt, Artificial Sequence
  Description of Artificial Sequence: Synthetic oligonucleotide
ccccaggggacaggggcuu

SEQ ID NO: 1064065 - RNA, 19 nt, Artificial Sequence
  Description of Artificial Sequence: Synthetic oligonucleotide
aaugcuauugaauaguagg

SEQ ID NO: 1064066 - RNA, 19 nt, Artificial Sequence
  Description of Artificial Sequence: Synthetic oligonucleotide
aaauguugccccuugaggg

SEQ ID NO: 1064067 - RNA, 19 nt, Artificial Sequence
  Description of Artificial Sequence: Synthetic oligonucleotide
ucuuacuuuauaaacaaug

SEQ ID NO: 1064068 - RNA, 19 nt, Artificial Sequence
  Description of Artificial Sequence: Synthetic oligonucleotide
uguaacgcuggucagaggg

SEQ ID NO: 1064069 - RNA, 19 nt, Artificial Sequence
  Description of Artificial Sequence: Synthetic oligonucleotide
uuuaguaugaaugugagau

SEQ ID NO: 1064070 - RNA, 19 nt, Artificial Sequence
  Description of Artificial Sequence: Synthetic oligonucleotide
aaaauguugccccuugagg

SEQ ID NO: 1064071 - RNA, 19 nt, Artificial Sequence
  Description of Artificial Sequence: Synthetic oligonucleotide
agcuaauuaccucagcucc

SEQ ID NO: 1064072 - RNA, 19 nt, Artificial Sequence
  Description of Artificial Sequence: Synthetic oligonucleotide
aaugugagauuguucuugc

SEQ ID NO: 1064073 - RNA, 19 nt, Artificial Sequence
  Description of Artificial Sequence: Synthetic oligonucleotide
gaaauaaucuaucgcaucc

SEQ ID NO: 1064074 - RNA, 19 nt, Artificial Sequence
  Description of Artificial Sequence: Synthetic oligonucleotide
acugugaucugucauagac

SEQ ID NO: 1064075 - RNA, 19 nt, Artificial Sequence
  Description of Artificial Sequence: Synthetic oligonucleotide
ugaauaguaggaauuagcu

SEQ ID NO: 1064076 - RNA, 19 nt, Artificial Sequence
  Description of Artificial Sequence: Synthetic oligonucleotide
aaugugauguagcuauaac

SEQ ID NO: 1064077 - RNA, 19 nt, Artificial Sequence
  Description of Artificial Sequence: Synthetic oligonucleotide
uguuguauaagugugaguc

SEQ ID NO: 1064078 - RNA, 19 nt, Artificial Sequence
  Description of Artificial Sequence: Synthetic oligonucleotide
ucgcuuagcauccuggucg

SEQ ID NO: 1064079 - RNA, 19 nt, Artificial Sequence
  Description of Artificial Sequence: Synthetic oligonucleotide
aauuaccucagcuccacag

SEQ ID NO: 1064080 - RNA, 19 nt, Artificial Sequence
  Description of Artificial Sequence: Synthetic oligonucleotide
augaaugugagauuguucu

SEQ ID NO: 1064081 - RNA, 19 nt, Artificial Sequence
  Description of Artificial Sequence: Synthetic oligonucleotide
uguagagccacuuggacca

SEQ ID NO: 1064082 - RNA, 19 nt, Artificial Sequence
  Description of Artificial Sequence: Synthetic oligonucleotide
guaggaauuagcuguauag

SEQ ID NO: 1064083 - RNA, 19 nt, Artificial Sequence
  Description of Artificial Sequence: Synthetic oligonucleotide
cuaacucgcagcaagagac

SEQ ID NO: 1064084 - RNA, 19 nt, Artificial Sequence
  Description of Artificial Sequence: Synthetic oligonucleotide
ucaagcuugguucacugag

SEQ ID NO: 1064085 - RNA, 19 nt, Artificial Sequence
  Description of Artificial Sequence: Synthetic oligonucleotide
uaaucuaucgcauccucag

SEQ ID NO: 1064086 - RNA, 19 nt, Artificial Sequence
  Description of Artificial Sequence: Synthetic oligonucleotide
ucagcuaacucgcagcaag

SEQ ID NO: 1064087 - RNA, 19 nt, Artificial Sequence
  Description of Artificial Sequence: Synthetic oligonucleotide
auaaacaaugugauguagc

SEQ ID NO: 1064088 - RNA, 19 nt, Artificial Sequence
  Description of Artificial Sequence: Synthetic oligonucleotide
aaugacaugggaaccuggc

SEQ ID NO: 1064089 - RNA, 19 nt, Artificial Sequence
  Description of Artificial Sequence: Synthetic oligonucleotide
aacacaagaagcucagaca

SEQ ID NO: 1064090 - RNA, 19 nt, Artificial Sequence
  Description of Artificial Sequence: Synthetic oligonucleotide
uguaccuccuccaugcucc

SEQ ID NO: 1064091 - RNA, 19 nt, Artificial Sequence
  Description of Artificial Sequence: Synthetic oligonucleotide
ugagcuaauuaccucagcu

SEQ ID NO: 1064092 - RNA, 19 nt, Artificial Sequence
  Description of Artificial Sequence: Synthetic oligonucleotide
auaagugugagucuuacuu

SEQ ID NO: 1064093 - RNA, 19 nt, Artificial Sequence
  Description of Artificial Sequence: Synthetic oligonucleotide
auuaccucagcuccacagc

SEQ ID NO: 1064094 - RNA, 19 nt, Artificial Sequence
  Description of Artificial Sequence: Synthetic oligonucleotide
agcaagagaccccagcucg

SEQ ID NO: 1064095 - RNA, 19 nt, Artificial Sequence
  Description of Artificial Sequence: Synthetic oligonucleotide
gaauaguaggaauuagcug

SEQ ID NO: 1064096 - RNA, 19 nt, Artificial Sequence
  Description of Artificial Sequence: Synthetic oligonucleotide
aucuaucgcauccucaggg

SEQ ID NO: 1064097 - RNA, 19 nt, Artificial Sequence
  Description of Artificial Sequence: Synthetic oligonucleotide
aguuaugccugugugaagg

SEQ ID NO: 1064098 - RNA, 19 nt, Artificial Sequence
  Description of Artificial Sequence: Synthetic oligonucleotide
cucuugaaauaaucuaucg

SEQ ID NO: 1064099 - RNA, 19 nt, Artificial Sequence
  Description of Artificial Sequence: Synthetic oligonucleotide
auguagcuauaacuggucc

SEQ ID NO: 1064100 - RNA, 19 nt, Artificial Sequence
  Description of Artificial Sequence: Synthetic oligonucleotide
ugauguagcuauaacuggu

SEQ ID NO: 1064101 - RNA, 19 nt, Artificial Sequence
  Description of Artificial Sequence: Synthetic oligonucleotide
uguagcuauaacugguccc

SEQ ID NO: 1064102 - RNA, 19 nt, Artificial Sequence
  Description of Artificial Sequence: Synthetic oligonucleotide
uguauaguuaugccugugu

SEQ ID NO: 1064103 - RNA, 19 nt, Artificial Sequence
  Description of Artificial Sequence: Synthetic oligonucleotide
gaccucaagucccaaaugc

SEQ ID NO: 1064104 - RNA, 19 nt, Artificial Sequence
  Description of Artificial Sequence: Synthetic oligonucleotide
aaucuaucgcauccucagg

SEQ ID NO: 1064105 - RNA, 19 nt, Artificial Sequence
  Description of Artificial Sequence: Synthetic oligonucleotide
acacaagaagcucagacaa

SEQ ID NO: 1064106 - RNA, 19 nt, Artificial Sequence
  Description of Artificial Sequence: Synthetic oligonucleotide
augcagaucugucugugcg

SEQ ID NO: 1064107 - RNA, 19 nt, Artificial Sequence
  Description of Artificial Sequence: Synthetic oligonucleotide
acguggguaggacaggagc

SEQ ID NO: 1064108 - RNA, 19 nt, Artificial Sequence
  Description of Artificial Sequence: Synthetic oligonucleotide
cacacguacaaaccgaggc

SEQ ID NO: 1064109 - RNA, 19 nt, Artificial Sequence
  Description of Artificial Sequence: Synthetic oligonucleotide
gacauguuguauaagugug

SEQ ID NO: 1064110 - RNA, 19 nt, Artificial Sequence
  Description of Artificial Sequence: Synthetic oligonucleotide
gugauguagcuauaacugg

SEQ ID NO: 1064111 - RNA, 19 nt, Artificial Sequence
  Description of Artificial Sequence: Synthetic oligonucleotide
gacugaguuccugugagcg

SEQ ID NO: 1064112 - RNA, 19 nt, Artificial Sequence
  Description of Artificial Sequence: Synthetic oligonucleotide
agcaagauguacuggaccu

SEQ ID NO: 1064113 - RNA, 19 nt, Artificial Sequence
  Description of Artificial Sequence: Synthetic oligonucleotide
ugaaauaaucuaucgcauc

SEQ ID NO: 1064114 - RNA, 19 nt, Artificial Sequence
  Description of Artificial Sequence: Synthetic oligonucleotide
guuguauggagcuggggag

SEQ ID NO: 1064115 - RNA, 19 nt, Artificial Sequence
  Description of Artificial Sequence: Synthetic oligonucleotide
uaugaaugugagauuguuc

SEQ ID NO: 1064116 - RNA, 19 nt, Artificial Sequence
  Description of Artificial Sequence: Synthetic oligonucleotide
aaccgaggcaccugguagg

SEQ ID NO: 1064117 - RNA, 19 nt, Artificial Sequence
  Description of Artificial Sequence: Synthetic oligonucleotide
acucagaccucggugaggc

SEQ ID NO: 1064118 - RNA, 19 nt, Artificial Sequence
  Description of Artificial Sequence: Synthetic oligonucleotide
guauaguuaugccugugug

SEQ ID NO: 1064119 - RNA, 19 nt, Artificial Sequence
  Description of Artificial Sequence: Synthetic oligonucleotide
ggcucaacauaccagagcc

SEQ ID NO: 1064120 - RNA, 19 nt, Artificial Sequence
  Description of Artificial Sequence: Synthetic oligonucleotide
aaaugcuauugaauaguag

SEQ ID NO: 1064121 - RNA, 19 nt, Artificial Sequence
  Description of Artificial Sequence: Synthetic oligonucleotide
uggagcuuugcugagaggu

SEQ ID NO: 1064122 - RNA, 19 nt, Artificial Sequence
  Description of Artificial Sequence: Synthetic oligonucleotide
cuguagagccacuuggacc

SEQ ID NO: 1064123 - RNA, 19 nt, Artificial Sequence
  Description of Artificial Sequence: Synthetic oligonucleotide
aacauaccagagccacuac

SEQ ID NO: 1064124 - RNA, 19 nt, Artificial Sequence
  Description of Artificial Sequence: Synthetic oligonucleotide
aaauaaucuaucgcauccu

SEQ ID NO: 1064125 - RNA, 19 nt, Artificial Sequence
  Description of Artificial Sequence: Synthetic oligonucleotide
uuuuaguaugaaugugaga

SEQ ID NO: 1064126 - RNA, 19 nt, Artificial Sequence
  Description of Artificial Sequence: Synthetic oligonucleotide
uaucgcauccucagggcag

SEQ ID NO: 1064127 - RNA, 19 nt, Artificial Sequence
  Description of Artificial Sequence: Synthetic oligonucleotide
cauuuguccgugcucacgc

SEQ ID NO: 1064128 - RNA, 19 nt, Artificial Sequence
  Description of Artificial Sequence: Synthetic oligonucleotide
ucuugcuuaugucauuaaa

SEQ ID NO: 1064129 - RNA, 19 nt, Artificial Sequence
  Description of Artificial Sequence: Synthetic oligonucleotide
ucggcucacaccccgauga

SEQ ID NO: 1064130 - RNA, 19 nt, Artificial Sequence
  Description of Artificial Sequence: Synthetic oligonucleotide
uauugaauaguaggaauua

SEQ ID NO: 1064131 - RNA, 19 nt, Artificial Sequence
  Description of Artificial Sequence: Synthetic oligonucleotide
uagcuguauaguuaugccu

SEQ ID NO: 1064132 - RNA, 19 nt, Artificial Sequence
  Description of Artificial Sequence: Synthetic oligonucleotide
aggaauuagcuguauaguu

SEQ ID NO: 1064133 - RNA, 19 nt, Artificial Sequence
  Description of Artificial Sequence: Synthetic oligonucleotide
ucccuuaccuuugugacug

SEQ ID NO: 1064134 - RNA, 19 nt, Artificial Sequence
  Description of Artificial Sequence: Synthetic oligonucleotide
uaacuggucuuguugccag

SEQ ID NO: 1064135 - RNA, 19 nt, Artificial Sequence
  Description of Artificial Sequence: Synthetic oligonucleotide
cauguuguauaagugugag

SEQ ID NO: 1064136 - RNA, 19 nt, Artificial Sequence
  Description of Artificial Sequence: Synthetic oligonucleotide
ucucagcuaacucgcagca

SEQ ID NO: 1064137 - RNA, 19 nt, Artificial Sequence
  Description of Artificial Sequence: Synthetic oligonucleotide
agcuguauaguuaugccug

SEQ ID NO: 1064138 - RNA, 19 nt, Artificial Sequence
  Description of Artificial Sequence: Synthetic oligonucleotide
ucaggggaagcccggaggc

SEQ ID NO: 1064139 - RNA, 19 nt, Artificial Sequence
  Description of Artificial Sequence: Synthetic oligonucleotide
agucugagcuaauuaccuc

SEQ ID NO: 1064140 - RNA, 19 nt, Artificial Sequence
  Description of Artificial Sequence: Synthetic oligonucleotide
agaagggccgcaauguaac

SEQ ID NO: 1064141 - RNA, 19 nt, Artificial Sequence
  Description of Artificial Sequence: Synthetic oligonucleotide
auaguuaugccugugugaa

SEQ ID NO: 1064142 - RNA, 19 nt, Artificial Sequence
  Description of Artificial Sequence: Synthetic oligonucleotide
ucacacguacaaaccgagg

SEQ ID NO: 1064143 - RNA, 19 nt, Artificial Sequence
  Description of Artificial Sequence: Synthetic oligonucleotide
ucuugagcguguucacacg

SEQ ID NO: 1064144 - RNA, 19 nt, Artificial Sequence
  Description of Artificial Sequence: Synthetic oligonucleotide
ucuaucgcauccucagggc

SEQ ID NO: 1064145 - RNA, 19 nt, Artificial Sequence
  Description of Artificial Sequence: Synthetic oligonucleotide
ugcagaucugucugugcgg

SEQ ID NO: 1064146 - RNA, 19 nt, Artificial Sequence
  Description of Artificial Sequence: Synthetic oligonucleotide
uggucucaggggaagcccg

SEQ ID NO: 1064147 - RNA, 19 nt, Artificial Sequence
  Description of Artificial Sequence: Synthetic oligonucleotide
uuuaagcuaaauugccuuu

SEQ ID NO: 1064148 - RNA, 19 nt, Artificial Sequence
  Description of Artificial Sequence: Synthetic oligonucleotide
gacaacaagggauccaaaa

SEQ ID NO: 1064149 - RNA, 19 nt, Artificial Sequence
  Description of Artificial Sequence: Synthetic oligonucleotide
ugugcggggaacacaagaa

SEQ ID NO: 1064150 - RNA, 19 nt, Artificial Sequence
  Description of Artificial Sequence: Synthetic oligonucleotide
uaggaauuagcuguauagu

SEQ ID NO: 1064151 - RNA, 19 nt, Artificial Sequence
  Description of Artificial Sequence: Synthetic oligonucleotide
cucaacauaccagagccac

SEQ ID NO: 1064152 - RNA, 19 nt, Artificial Sequence
  Description of Artificial Sequence: Synthetic oligonucleotide
cuugagaagggccgcaaug

SEQ ID NO: 1064153 - RNA, 19 nt, Artificial Sequence
  Description of Artificial Sequence: Synthetic oligonucleotide
agacugaguuccugugagc

SEQ ID NO: 1064154 - RNA, 19 nt, Artificial Sequence
  Description of Artificial Sequence: Synthetic oligonucleotide
cucaagucccaaaugccug

SEQ ID NO: 1064155 - RNA, 19 nt, Artificial Sequence
  Description of Artificial Sequence: Synthetic oligonucleotide
uuuguccgugcucacgcug

SEQ ID NO: 1064156 - RNA, 19 nt, Artificial Sequence
  Description of Artificial Sequence: Synthetic oligonucleotide
aacugccggcucaacauac

SEQ ID NO: 1064157 - RNA, 19 nt, Artificial Sequence
  Description of Artificial Sequence: Synthetic oligonucleotide
cuuaccuuugugacuggug

SEQ ID NO: 1064158 - RNA, 19 nt, Artificial Sequence
  Description of Artificial Sequence: Synthetic oligonucleotide
aggaagccucuacuugugc

SEQ ID NO: 1064159 - RNA, 19 nt, Artificial Sequence
  Description of Artificial Sequence: Synthetic oligonucleotide
uggucccuuaccuuuguga

SEQ ID NO: 1064160 - RNA, 19 nt, Artificial Sequence
  Description of Artificial Sequence: Synthetic oligonucleotide
cuuggcucuacgcuggcac

SEQ ID NO: 1064161 - RNA, 19 nt, Artificial Sequence
  Description of Artificial Sequence: Synthetic oligonucleotide
ggaugagauggccagcgcg

SEQ ID NO: 1064162 - RNA, 19 nt, Artificial Sequence
  Description of Artificial Sequence: Synthetic oligonucleotide
ugcuauugaauaguaggaa

SEQ ID NO: 1064163 - RNA, 19 nt, Artificial Sequence
  Description of Artificial Sequence: Synthetic oligonucleotide
cuggcuguaacgcugguca

SEQ ID NO: 1064164 - RNA, 19 nt, Artificial Sequence
  Description of Artificial Sequence: Synthetic oligonucleotide
uauaagugugagucuuacu

SEQ ID NO: 1064165 - RNA, 19 nt, Artificial Sequence
  Description of Artificial Sequence: Synthetic oligonucleotide
uccucauuucggcucacac

SEQ ID NO: 1064166 - RNA, 19 nt, Artificial Sequence
  Description of Artificial Sequence: Synthetic oligonucleotide
cauuucggcucacaccccg

SEQ ID NO: 1064167 - RNA, 19 nt, Artificial Sequence
  Description of Artificial Sequence: Synthetic oligonucleotide
gaggcguccuggcauagcc

SEQ ID NO: 1064168 - RNA, 19 nt, Artificial Sequence
  Description of Artificial Sequence: Synthetic oligonucleotide
ucuacuugugccucaggua

SEQ ID NO: 1064169 - RNA, 19 nt, Artificial Sequence
  Description of Artificial Sequence: Synthetic oligonucleotide
ugcuguagagccacuugga

SEQ ID NO: 1064170 - RNA, 19 nt, Artificial Sequence
  Description of Artificial Sequence: Synthetic oligonucleotide
uuguauaagugugagucuu

SEQ ID NO: 1064171 - RNA, 19 nt, Artificial Sequence
  Description of Artificial Sequence: Synthetic oligonucleotide
cuauaacuggucccuuacc

SEQ ID NO: 1064172 - RNA, 19 nt, Artificial Sequence
  Description of Artificial Sequence: Synthetic oligonucleotide
uaacucgcagcaagagacc

SEQ ID NO: 1064173 - RNA, 19 nt, Artificial Sequence
  Description of Artificial Sequence: Synthetic oligonucleotide
agagcccguugcuggaacc

SEQ ID NO: 1064174 - RNA, 19 nt, Artificial Sequence
  Description of Artificial Sequence: Synthetic oligonucleotide
caaguccucauuucggcuc

SEQ ID NO: 1064175 - RNA, 19 nt, Artificial Sequence
  Description of Artificial Sequence: Synthetic oligonucleotide
ucaaugacaugggaaccug

SEQ ID NO: 1064176 - RNA, 19 nt, Artificial Sequence
  Description of Artificial Sequence: Synthetic oligonucleotide
cuacuugugccucagguaa

SEQ ID NO: 1064177 - RNA, 19 nt, Artificial Sequence
  Description of Artificial Sequence: Synthetic oligonucleotide
uguauaagugugagucuua

SEQ ID NO: 1064178 - RNA, 19 nt, Artificial Sequence
  Description of Artificial Sequence: Synthetic oligonucleotide
agcguguucacacguacaa

SEQ ID NO: 1064179 - RNA, 19 nt, Artificial Sequence
  Description of Artificial Sequence: Synthetic oligonucleotide
agcucagacaacaagggau

SEQ ID NO: 1064180 - RNA, 19 nt, Artificial Sequence
  Description of Artificial Sequence: Synthetic oligonucleotide
ucuacgcuggcaccagcug

SEQ ID NO: 1064181 - RNA, 19 nt, Artificial Sequence
  Description of Artificial Sequence: Synthetic oligonucleotide
guuccugugagcguagcug

SEQ ID NO: 1064182 - RNA, 19 nt, Artificial Sequence
  Description of Artificial Sequence: Synthetic oligonucleotide
ugcaauucagucugagcua

SEQ ID NO: 1064183 - RNA, 19 nt, Artificial Sequence
  Description of Artificial Sequence: Synthetic oligonucleotide
cuacagacagacugaguuc

SEQ ID NO: 1064184 - RNA, 19 nt, Artificial Sequence
  Description of Artificial Sequence: Synthetic oligonucleotide
cagucgcuuagcauccugg

SEQ ID NO: 1064185 - RNA, 19 nt, Artificial Sequence
  Description of Artificial Sequence: Synthetic oligonucleotide
uuaugccugugugaaggag

SEQ ID NO: 1064186 - RNA, 19 nt, Artificial Sequence
  Description of Artificial Sequence: Synthetic oligonucleotide
gauguagcuauaacugguc

SEQ ID NO: 1064187 - RNA, 19 nt, Artificial Sequence
  Description of Artificial Sequence: Synthetic oligonucleotide
uaacgcuggucagagggag

SEQ ID NO: 1064188 - RNA, 19 nt, Artificial Sequence
  Description of Artificial Sequence: Synthetic oligonucleotide
uuccaacaaguccucauuu

SEQ ID NO: 1064189 - RNA, 19 nt, Artificial Sequence
  Description of Artificial Sequence: Synthetic oligonucleotide
ucaacauaccagagccacu

SEQ ID NO: 1064190 - RNA, 19 nt, Artificial Sequence
  Description of Artificial Sequence: Synthetic oligonucleotide
uagggcuucccacuacaga

SEQ ID NO: 1064191 - RNA, 19 nt, Artificial Sequence
  Description of Artificial Sequence: Synthetic oligonucleotide
uaccuuugugacugguggc

SEQ ID NO: 1064192 - RNA, 19 nt, Artificial Sequence
  Description of Artificial Sequence: Synthetic oligonucleotide
ccccgaugaaccuugagcc

SEQ ID NO: 1064193 - RNA, 19 nt, Artificial Sequence
  Description of Artificial Sequence: Synthetic oligonucleotide
cuaauuaccucagcuccac

SEQ ID NO: 1064194 - RNA, 19 nt, Artificial Sequence
  Description of Artificial Sequence: Synthetic oligonucleotide
aagccucuacuugugccuc

SEQ ID NO: 1064195 - RNA, 19 nt, Artificial Sequence
  Description of Artificial Sequence: Synthetic oligonucleotide
acguggaguagaccaggcg

SEQ ID NO: 1064196 - RNA, 19 nt, Artificial Sequence
  Description of Artificial Sequence: Synthetic oligonucleotide
aaggugagugcguggcaca

SEQ ID NO: 1064197 - RNA, 19 nt, Artificial Sequence
  Description of Artificial Sequence: Synthetic oligonucleotide
gguacucagaccucgguga

SEQ ID NO: 1064198 - RNA, 19 nt, Artificial Sequence
  Description of Artificial Sequence: Synthetic oligonucleotide
uucaagcuugguucacuga

SEQ ID NO: 1064199 - RNA, 19 nt, Artificial Sequence
  Description of Artificial Sequence: Synthetic oligonucleotide
aauugccuuuuaaauuccu

SEQ ID NO: 1064200 - RNA, 19 nt, Artificial Sequence
  Description of Artificial Sequence: Synthetic oligonucleotide
ugccggcucaacauaccag

SEQ ID NO: 1064201 - RNA, 19 nt, Artificial Sequence
  Description of Artificial Sequence: Synthetic oligonucleotide
guauaagugugagucuuac

SEQ ID NO: 1064202 - RNA, 19 nt, Artificial Sequence
  Description of Artificial Sequence: Synthetic oligonucleotide
cagggguuagacuggguug

SEQ ID NO: 1064203 - RNA, 19 nt, Artificial Sequence
  Description of Artificial Sequence: Synthetic oligonucleotide
ugaguuccugugagcguag

SEQ ID NO: 1064204 - RNA, 19 nt, Artificial Sequence
  Description of Artificial Sequence: Synthetic oligonucleotide
uguggucucaggggaagcc

SEQ ID NO: 1064205 - RNA, 19 nt, Artificial Sequence
  Description of Artificial Sequence: Synthetic oligonucleotide
auggccagcgcgguagagc

SEQ ID NO: 1064206 - RNA, 19 nt, Artificial Sequence
  Description of Artificial Sequence: Synthetic oligonucleotide
gucgaaugcaaagaucuuc

SEQ ID NO: 1064207 - RNA, 19 nt, Artificial Sequence
  Description of Artificial Sequence: Synthetic oligonucleotide
auaaucuaucgcauccuca

SEQ ID NO: 1064208 - RNA, 19 nt, Artificial Sequence
  Description of Artificial Sequence: Synthetic oligonucleotide
uccuccaacugccggcuca

SEQ ID NO: 1064209 - RNA, 19 nt, Artificial Sequence
  Description of Artificial Sequence: Synthetic oligonucleotide
augccugugugaaggaggg

SEQ ID NO: 1064210 - RNA, 19 nt, Artificial Sequence
  Description of Artificial Sequence: Synthetic oligonucleotide
cauagccucggugugugag

SEQ ID NO: 1064211 - RNA, 19 nt, Artificial Sequence
  Description of Artificial Sequence: Synthetic oligonucleotide
ucuggacauguuguauaag

SEQ ID NO: 1064212 - RNA, 19 nt, Artificial Sequence
  Description of Artificial Sequence: Synthetic oligonucleotide
auguuguauaagugugagu

SEQ ID NO: 1064213 - RNA, 19 nt, Artificial Sequence
  Description of Artificial Sequence: Synthetic oligonucleotide
auaggugguggggaucuuc

SEQ ID NO: 1064214 - RNA, 19 nt, Artificial Sequence
  Description of Artificial Sequence: Synthetic oligonucleotide
ugguaggagaaaccuuguc

SEQ ID NO: 1064215 - RNA, 19 nt, Artificial Sequence
  Description of Artificial Sequence: Synthetic oligonucleotide
ggucccuuaccuuugugac

SEQ ID NO: 1064216 - RNA, 19 nt, Artificial Sequence
  Description of Artificial Sequence: Synthetic oligonucleotide
aacugugaucugucauaga

SEQ ID NO: 1064217 - RNA, 19 nt, Artificial Sequence
  Description of Artificial Sequence: Synthetic oligonucleotide
ugaggguucgcaaguccuc

SEQ ID NO: 1064218 - RNA, 19 nt, Artificial Sequence
  Description of Artificial Sequence: Synthetic oligonucleotide
agucgcuuagcauccuggu

SEQ ID NO: 1064219 - RNA, 19 nt, Artificial Sequence
  Description of Artificial Sequence: Synthetic oligonucleotide
ucggugugugagcacauuu

SEQ ID NO: 1064220 - RNA, 19 nt, Artificial Sequence
  Description of Artificial Sequence: Synthetic oligonucleotide
acgcuggacagggacaggg

SEQ ID NO: 1064221 - RNA, 19 nt, Artificial Sequence
  Description of Artificial Sequence: Synthetic oligonucleotide
guagagcggauggucaugc

SEQ ID NO: 1064222 - RNA, 19 nt, Artificial Sequence
  Description of Artificial Sequence: Synthetic oligonucleotide
guacucagaccucggugag

SEQ ID NO: 1064223 - RNA, 19 nt, Artificial Sequence
  Description of Artificial Sequence: Synthetic oligonucleotide
agcuaacucgcagcaagag

SEQ ID NO: 1064224 - RNA, 19 nt, Artificial Sequence
  Description of Artificial Sequence: Synthetic oligonucleotide
cacaccccgaugaaccuug

SEQ ID NO: 1064225 - RNA, 19 nt, Artificial Sequence
  Description of Artificial Sequence: Synthetic oligonucleotide
cuauugaauaguaggaauu

SEQ ID NO: 1064226 - RNA, 19 nt, Artificial Sequence
  Description of Artificial Sequence: Synthetic oligonucleotide
uuggcucuacgcuggcacc

SEQ ID NO: 1064227 - RNA, 19 nt, Artificial Sequence
  Description of Artificial Sequence: Synthetic oligonucleotide
acguacaaaccgaggcacc

SEQ ID NO: 1064228 - RNA, 19 nt, Artificial Sequence
  Description of Artificial Sequence: Synthetic oligonucleotide
uccugugagcguagcugag

SEQ ID NO: 1064229 - RNA, 19 nt, Artificial Sequence
  Description of Artificial Sequence: Synthetic oligonucleotide
ucauuucggcucacacccc

SEQ ID NO: 1064230 - RNA, 19 nt, Artificial Sequence
  Description of Artificial Sequence: Synthetic oligonucleotide
aguuccugugagcguagcu

SEQ ID NO: 1064231 - RNA, 19 nt, Artificial Sequence
  Description of Artificial Sequence: Synthetic oligonucleotide
gagcuggaccucaaguccc

SEQ ID NO: 1064232 - RNA, 19 nt, Artificial Sequence
  Description of Artificial Sequence: Synthetic oligonucleotide
gaggguucgcaaguccucc

SEQ ID NO: 1064233 - RNA, 19 nt, Artificial Sequence
  Description of Artificial Sequence: Synthetic oligonucleotide
aguguggucucaggggaag

SEQ ID NO: 1064234 - RNA, 19 nt, Artificial Sequence
  Description of Artificial Sequence: Synthetic oligonucleotide
agaaaccuugucucuugaa

SEQ ID NO: 1064235 - RNA, 19 nt, Artificial Sequence
  Description of Artificial Sequence: Synthetic oligonucleotide
acauguuguauaaguguga

SEQ ID NO: 1064236 - RNA, 19 nt, Artificial Sequence
  Description of Artificial Sequence: Synthetic oligonucleotide
gcuauaacuggucccuuac

SEQ ID NO: 1064237 - RNA, 19 nt, Artificial Sequence
  Description of Artificial Sequence: Synthetic oligonucleotide
ggcagcacaggcaucaaug

SEQ ID NO: 1064238 - RNA, 19 nt, Artificial Sequence
  Description of Artificial Sequence: Synthetic oligonucleotide
ucugucugugcggggaaca

SEQ ID NO: 1064239 - RNA, 19 nt, Artificial Sequence
  Description of Artificial Sequence: Synthetic oligonucleotide
accgaggcaccugguaggc

SEQ ID NO: 1064240 - RNA, 19 nt, Artificial Sequence
  Description of Artificial Sequence: Synthetic oligonucleotide
agggguuagacuggguugu

SEQ ID NO: 1064241 - RNA, 19 nt, Artificial Sequence
  Description of Artificial Sequence: Synthetic oligonucleotide
cugagcuaauuaccucagc

SEQ ID NO: 1064242 - RNA, 19 nt, Artificial Sequence
  Description of Artificial Sequence: Synthetic oligonucleotide
gagcggauggucaugcaga

SEQ ID NO: 1064243 - RNA, 19 nt, Artificial Sequence
  Description of Artificial Sequence: Synthetic oligonucleotide
uucggcucacaccccgaug

SEQ ID NO: 1064244 - RNA, 19 nt, Artificial Sequence
  Description of Artificial Sequence: Synthetic oligonucleotide
cauccagggccccugaaga

SEQ ID NO: 1064245 - RNA, 19 nt, Artificial Sequence
  Description of Artificial Sequence: Synthetic oligonucleotide
guucacacguacaaaccga

SEQ ID NO: 1064246 - RNA, 19 nt, Artificial Sequence
  Description of Artificial Sequence: Synthetic oligonucleotide
guuccuugcuagguguacc

SEQ ID NO: 1064247 - RNA, 19 nt, Artificial Sequence
  Description of Artificial Sequence: Synthetic oligonucleotide
acucgcagcaagagacccc

SEQ ID NO: 1064248 - RNA, 19 nt, Artificial Sequence
  Description of Artificial Sequence: Synthetic oligonucleotide
gaguagaccaggcguugca

SEQ ID NO: 1064249 - RNA, 19 nt, Artificial Sequence
  Description of Artificial Sequence: Synthetic oligonucleotide
guuguauaagugugagucu

SEQ ID NO: 1064250 - RNA, 19 nt, Artificial Sequence
  Description of Artificial Sequence: Synthetic oligonucleotide
ccucauuucggcucacacc

SEQ ID NO: 1064251 - RNA, 19 nt, Artificial Sequence
  Description of Artificial Sequence: Synthetic oligonucleotide
uggaguagaccaggcguug

SEQ ID NO: 1064252 - RNA, 19 nt, Artificial Sequence
  Description of Artificial Sequence: Synthetic oligonucleotide
ucugugcggggaacacaag

SEQ ID NO: 1064253 - RNA, 19 nt, Artificial Sequence
  Description of Artificial Sequence: Synthetic oligonucleotide
acugccggcucaacauacc

SEQ ID NO: 1064254 - RNA, 19 nt, Artificial Sequence
  Description of Artificial Sequence: Synthetic oligonucleotide
gacuggguuguauggagcu

SEQ ID NO: 1064255 - RNA, 19 nt, Artificial Sequence
  Description of Artificial Sequence: Synthetic oligonucleotide
guagcuauaacuggucccu

SEQ ID NO: 1064256 - RNA, 19 nt, Artificial Sequence
  Description of Artificial Sequence: Synthetic oligonucleotide
gaagaagccaccagugagu

SEQ ID NO: 1064257 - RNA, 19 nt, Artificial Sequence
  Description of Artificial Sequence: Synthetic oligonucleotide
gguucgcaaguccuccagg

SEQ ID NO: 1064258 - RNA, 19 nt, Artificial Sequence
  Description of Artificial Sequence: Synthetic oligonucleotide
guaggcuuggccaggccug

SEQ ID NO: 1064259 - RNA, 19 nt, Artificial Sequence
  Description of Artificial Sequence: Synthetic oligonucleotide
acccugguaggagaaaccu

SEQ ID NO: 1064260 - RNA, 19 nt, Artificial Sequence
  Description of Artificial Sequence: Synthetic oligonucleotide
auuuguccgugcucacgcu

SEQ ID NO: 1064261 - RNA, 19 nt, Artificial Sequence
  Description of Artificial Sequence: Synthetic oligonucleotide
agcuauaacuggucccuua

SEQ ID NO: 1064262 - RNA, 19 nt, Artificial Sequence
  Description of Artificial Sequence: Synthetic oligonucleotide
gacccugguaggagaaacc

SEQ ID NO: 1064263 - RNA, 19 nt, Artificial Sequence
  Description of Artificial Sequence: Synthetic oligonucleotide
uugagcguguucacacgua

SEQ ID NO: 1064264 - RNA, 19 nt, Artificial Sequence
  Description of Artificial Sequence: Synthetic oligonucleotide
gaucugucauagaccugag

SEQ ID NO: 1064265 - RNA, 19 nt, Artificial Sequence
  Description of Artificial Sequence: Synthetic oligonucleotide
uuucggcucacaccccgau

SEQ ID NO: 1064266 - RNA, 19 nt, Artificial Sequence
  Description of Artificial Sequence: Synthetic oligonucleotide
cuaucgcauccucagggca

SEQ ID NO: 1064267 - RNA, 19 nt, Artificial Sequence
  Description of Artificial Sequence: Synthetic oligonucleotide
aggcguuccuugcuaggug

SEQ ID NO: 1064268 - RNA, 19 nt, Artificial Sequence
  Description of Artificial Sequence: Synthetic oligonucleotide
ugguucacugaggugguua

SEQ ID NO: 1064269 - RNA, 19 nt, Artificial Sequence
  Description of Artificial Sequence: Synthetic oligonucleotide
cugucauagaccugagucu

SEQ ID NO: 1064270 - RNA, 19 nt, Artificial Sequence
  Description of Artificial Sequence: Synthetic oligonucleotide
gagaagggccgcaauguaa

SEQ ID NO: 1064271 - RNA, 19 nt, Artificial Sequence
  Description of Artificial Sequence: Synthetic oligonucleotide
caagagaccccagcucgag

SEQ ID NO: 1064272 - RNA, 19 nt, Artificial Sequence
  Description of Artificial Sequence: Synthetic oligonucleotide
agcggauggucaugcagau

SEQ ID NO: 1064273 - RNA, 19 nt, Artificial Sequence
  Description of Artificial Sequence: Synthetic oligonucleotide
gucagagggagagacuguc

SEQ ID NO: 1064274 - RNA, 19 nt, Artificial Sequence
  Description of Artificial Sequence: Synthetic oligonucleotide
gugagcguagcugagauuu

SEQ ID NO: 1064275 - RNA, 19 nt, Artificial Sequence
  Description of Artificial Sequence: Synthetic oligonucleotide
uugugacugguggcagggg

SEQ ID NO: 1064276 - RNA, 19 nt, Artificial Sequence
  Description of Artificial Sequence: Synthetic oligonucleotide
caacauaccagagccacua

SEQ ID NO: 1064277 - RNA, 19 nt, Artificial Sequence
  Description of Artificial Sequence: Synthetic oligonucleotide
gaggcuagggcuucccacu

SEQ ID NO: 1064278 - RNA, 19 nt, Artificial Sequence
  Description of Artificial Sequence: Synthetic oligonucleotide
gcuauugaauaguaggaau

SEQ ID NO: 1064279 - RNA, 19 nt, Artificial Sequence
  Description of Artificial Sequence: Synthetic oligonucleotide
ucuaugugcuuggcucuac

SEQ ID NO: 1064280 - RNA, 19 nt, Artificial Sequence
  Description of Artificial Sequence: Synthetic oligonucleotide
aagaggcguccuggcauag

SEQ ID NO: 1064281 - RNA, 19 nt, Artificial Sequence
  Description of Artificial Sequence: Synthetic oligonucleotide
agcucgagccagcagugua

SEQ ID NO: 1064282 - RNA, 19 nt, Artificial Sequence
  Description of Artificial Sequence: Synthetic oligonucleotide
cagaccucggugaggccac

SEQ ID NO: 1064283 - RNA, 19 nt, Artificial Sequence
  Description of Artificial Sequence: Synthetic oligonucleotide
gcuaacucgcagcaagaga

SEQ ID NO: 1064284 - RNA, 19 nt, Artificial Sequence
  Description of Artificial Sequence: Synthetic oligonucleotide
ggcaucaaugacaugggaa

SEQ ID NO: 1064285 - RNA, 19 nt, Artificial Sequence
  Description of Artificial Sequence: Synthetic oligonucleotide
uggcucuacgcuggcacca

SEQ ID NO: 1064286 - RNA, 19 nt, Artificial Sequence
  Description of Artificial Sequence: Synthetic oligonucleotide
ggaggcuagggcuucccac

SEQ ID NO: 1064287 - RNA, 19 nt, Artificial Sequence
  Description of Artificial Sequence: Synthetic oligonucleotide
cacauuuguccgugcucac

SEQ ID NO: 1064288 - RNA, 19 nt, Artificial Sequence
  Description of Artificial Sequence: Synthetic oligonucleotide
guggucucaggggaagccc

SEQ ID NO: 1064289 - RNA, 19 nt, Artificial Sequence
  Description of Artificial Sequence: Synthetic oligonucleotide
cuguaacgcuggucagagg

SEQ ID NO: 1064290 - RNA, 19 nt, Artificial Sequence
  Description of Artificial Sequence: Synthetic oligonucleotide
guacaaaccgaggcaccug

SEQ ID NO: 1064291 - RNA, 19 nt, Artificial Sequence
  Description of Artificial Sequence: Synthetic oligonucleotide
cacguggguaggacaggag

SEQ ID NO: 1064292 - RNA, 19 nt, Artificial Sequence
  Description of Artificial Sequence: Synthetic oligonucleotide
ucggugaggccacgugggu

SEQ ID NO: 1064293 - RNA, 19 nt, Artificial Sequence
  Description of Artificial Sequence: Synthetic oligonucleotide
gucauagaccugagucugc

SEQ ID NO: 1064294 - RNA, 19 nt, Artificial Sequence
  Description of Artificial Sequence: Synthetic oligonucleotide
ggauggggauagguggugg

SEQ ID NO: 1064295 - RNA, 19 nt, Artificial Sequence
  Description of Artificial Sequence: Synthetic oligonucleotide
cucgcagcaagagacccca

SEQ ID NO: 1064296 - RNA, 19 nt, Artificial Sequence
  Description of Artificial Sequence: Synthetic oligonucleotide
ugagcguagcugagauuuu

SEQ ID NO: 1064297 - RNA, 19 nt, Artificial Sequence
  Description of Artificial Sequence: Synthetic oligonucleotide
aggguucgcaaguccucca

SEQ ID NO: 1064298 - RNA, 19 nt, Artificial Sequence
  Description of Artificial Sequence: Synthetic oligonucleotide
uggggagagcuggaccuca

SEQ ID NO: 1064299 - RNA, 19 nt, Artificial Sequence
  Description of Artificial Sequence: Synthetic oligonucleotide
aagcccgacccugguagga

SEQ ID NO: 1064300 - RNA, 19 nt, Artificial Sequence
  Description of Artificial Sequence: Synthetic oligonucleotide
gugugagucuuacuuuaua

SEQ ID NO: 1064301 - RNA, 19 nt, Artificial Sequence
  Description of Artificial Sequence: Synthetic oligonucleotide
ugugagcguagcugagauu

SEQ ID NO: 1064302 - RNA, 19 nt, Artificial Sequence
  Description of Artificial Sequence: Synthetic oligonucleotide
gugugugagcacauuuguc

SEQ ID NO: 1064303 - RNA, 19 nt, Artificial Sequence
  Description of Artificial Sequence: Synthetic oligonucleotide
gcaccugguaggcuuggcc

SEQ ID NO: 1064304 - RNA, 19 nt, Artificial Sequence
  Description of Artificial Sequence: Synthetic oligonucleotide
ggguucgcaaguccuccag

SEQ ID NO: 1064305 - RNA, 19 nt, Artificial Sequence
  Description of Artificial Sequence: Synthetic oligonucleotide
cugcccguucaaacacagc

SEQ ID NO: 1064306 - RNA, 19 nt, Artificial Sequence
  Description of Artificial Sequence: Synthetic oligonucleotide
ugccugugugaaggagggg

SEQ ID NO: 1064307 - RNA, 19 nt, Artificial Sequence
  Description of Artificial Sequence: Synthetic oligonucleotide
agugugagucuuacuuuau

SEQ ID NO: 1064308 - RNA, 19 nt, Artificial Sequence
  Description of Artificial Sequence: Synthetic oligonucleotide
cagcuaacucgcagcaaga

SEQ ID NO: 1064309 - RNA, 19 nt, Artificial Sequence
  Description of Artificial Sequence: Synthetic oligonucleotide
ggcguccuggcauagccuc

SEQ ID NO: 1064310 - RNA, 19 nt, Artificial Sequence
  Description of Artificial Sequence: Synthetic oligonucleotide
ccgaguucugcuguagagc

SEQ ID NO: 1064311 - RNA, 19 nt, Artificial Sequence
  Description of Artificial Sequence: Synthetic oligonucleotide
guaacgcuggucagaggga

SEQ ID NO: 1064312 - RNA, 19 nt, Artificial Sequence
  Description of Artificial Sequence: Synthetic oligonucleotide
ccggaggcaguguucagac

SEQ ID NO: 1064313 - RNA, 19 nt, Artificial Sequence
  Description of Artificial Sequence: Synthetic oligonucleotide
cugccggcucaacauacca

SEQ ID NO: 1064314 - RNA, 19 nt, Artificial Sequence
  Description of Artificial Sequence: Synthetic oligonucleotide
uagagccacuuggaccaca

SEQ ID NO: 1064315 - RNA, 19 nt, Artificial Sequence
  Description of Artificial Sequence: Synthetic oligonucleotide
cagagcccguugcuggaac

SEQ ID NO: 1064316 - RNA, 19 nt, Artificial Sequence
  Description of Artificial Sequence: Synthetic oligonucleotide
uccuugcuagguguaccuc

SEQ ID NO: 1064317 - RNA, 19 nt, Artificial Sequence
  Description of Artificial Sequence: Synthetic oligonucleotide
gcaauucagucugagcuaa

SEQ ID NO: 1064318 - RNA, 19 nt, Artificial Sequence
  Description of Artificial Sequence: Synthetic oligonucleotide
gcuaauuaccucagcucca

SEQ ID NO: 1064319 - RNA, 19 nt, Artificial Sequence
  Description of Artificial Sequence: Synthetic oligonucleotide
ggcaguguucagacccugg

SEQ ID NO: 1064320 - RNA, 19 nt, Artificial Sequence
  Description of Artificial Sequence: Synthetic oligonucleotide
gcucgagccagcaguguag

SEQ ID NO: 1064321 - RNA, 19 nt, Artificial Sequence
  Description of Artificial Sequence: Synthetic oligonucleotide
ggcagagcuccuucuggac

SEQ ID NO: 1064322 - RNA, 19 nt, Artificial Sequence
  Description of Artificial Sequence: Synthetic oligonucleotide
gcaagauguacuggaccug

SEQ ID NO: 1064323 - RNA, 19 nt, Artificial Sequence
  Description of Artificial Sequence: Synthetic oligonucleotide
agcccgacccugguaggag

SEQ ID NO: 1064324 - RNA, 19 nt, Artificial Sequence
  Description of Artificial Sequence: Synthetic oligonucleotide
gguagagcggauggucaug

SEQ ID NO: 1064325 - RNA, 19 nt, Artificial Sequence
  Description of Artificial Sequence: Synthetic oligonucleotide
caccccgaugaaccuugag

SEQ ID NO: 1064326 - RNA, 19 nt, Artificial Sequence
  Description of Artificial Sequence: Synthetic oligonucleotide
gacugguggcagggguuag

SEQ ID NO: 1064327 - RNA, 19 nt, Artificial Sequence
  Description of Artificial Sequence: Synthetic oligonucleotide
gaagggccgcaauguaacu

SEQ ID NO: 1064328 - RNA, 19 nt, Artificial Sequence
  Description of Artificial Sequence: Synthetic oligonucleotide
agagccacuuggaccacau

SEQ ID NO: 1064329 - RNA, 19 nt, Artificial Sequence
  Description of Artificial Sequence: Synthetic oligonucleotide
ggaguagaccaggcguugc

SEQ ID NO: 1064330 - RNA, 19 nt, Artificial Sequence
  Description of Artificial Sequence: Synthetic oligonucleotide
gguaggcuuggccaggccu

SEQ ID NO: 1064331 - RNA, 19 nt, Artificial Sequence
  Description of Artificial Sequence: Synthetic oligonucleotide
ucacaccccgaugaaccuu

SEQ ID NO: 1064332 - RNA, 19 nt, Artificial Sequence
  Description of Artificial Sequence: Synthetic oligonucleotide
caaagggaacacguggagu

SEQ ID NO: 1064333 - RNA, 19 nt, Artificial Sequence
  Description of Artificial Sequence: Synthetic oligonucleotide
guguggucucaggggaagc

SEQ ID NO: 1064334 - RNA, 19 nt, Artificial Sequence
  Description of Artificial Sequence: Synthetic oligonucleotide
ccacuuggaccacaucuuc

SEQ ID NO: 1064335 - RNA, 19 nt, Artificial Sequence
  Description of Artificial Sequence: Synthetic oligonucleotide
cggugugugagcacauuug

SEQ ID NO: 1064336 - RNA, 19 nt, Artificial Sequence
  Description of Artificial Sequence: Synthetic oligonucleotide
cucuacgcuggcaccagcu

SEQ ID NO: 1064337 - RNA, 19 nt, Artificial Sequence
  Description of Artificial Sequence: Synthetic oligonucleotide
gucccuuaccuuugugacu

SEQ ID NO: 1064338 - RNA, 19 nt, Artificial Sequence
  Description of Artificial Sequence: Synthetic oligonucleotide
auuucggcucacaccccga

SEQ ID NO: 1064339 - RNA, 19 nt, Artificial Sequence
  Description of Artificial Sequence: Synthetic oligonucleotide
ggguuguauggagcugggg

SEQ ID NO: 1064340 - RNA, 19 nt, Artificial Sequence
  Description of Artificial Sequence: Synthetic oligonucleotide
ccggcucaacauaccagag

SEQ ID NO: 1064341 - RNA, 19 nt, Artificial Sequence
  Description of Artificial Sequence: Synthetic oligonucleotide
gaagcccggaggcaguguu

SEQ ID NO: 1064342 - RNA, 19 nt, Artificial Sequence
  Description of Artificial Sequence: Synthetic oligonucleotide
ggaaagguacucagaccuc

SEQ ID NO: 1064343 - RNA, 19 nt, Artificial Sequence
  Description of Artificial Sequence: Synthetic oligonucleotide
cagagcuccuucuggacau

SEQ ID NO: 1064344 - RNA, 19 nt, Artificial Sequence
  Description of Artificial Sequence: Synthetic oligonucleotide
ccgugcucacgcuggacag

SEQ ID NO: 1064345 - RNA, 19 nt, Artificial Sequence
  Description of Artificial Sequence: Synthetic oligonucleotide
cugugagcguagcugagau

SEQ ID NO: 1064346 - RNA, 19 nt, Artificial Sequence
  Description of Artificial Sequence: Synthetic oligonucleotide
ugcguggcacagagcccgu

SEQ ID NO: 1064347 - RNA, 19 nt, Artificial Sequence
  Description of Artificial Sequence: Synthetic oligonucleotide
agacaacaagggauccaaa

SEQ ID NO: 1064348 - RNA, 19 nt, Artificial Sequence
  Description of Artificial Sequence: Synthetic oligonucleotide
cuggaccucaagucccaaa

SEQ ID NO: 1064349 - RNA, 19 nt, Artificial Sequence
  Description of Artificial Sequence: Synthetic oligonucleotide
uagcuauaacuggucccuu

SEQ ID NO: 1064350 - RNA, 19 nt, Artificial Sequence
  Description of Artificial Sequence: Synthetic oligonucleotide
gagccacuuggaccacauc

SEQ ID NO: 1064351 - RNA, 19 nt, Artificial Sequence
  Description of Artificial Sequence: Synthetic oligonucleotide
cguugcagagaggggaagg

SEQ ID NO: 1064352 - RNA, 19 nt, Artificial Sequence
  Description of Artificial Sequence: Synthetic oligonucleotide
cugguaggagaaaccuugu

SEQ ID NO: 1064353 - RNA, 19 nt, Artificial Sequence
  Description of Artificial Sequence: Synthetic oligonucleotide
ggcguuccuugcuaggugu

SEQ ID NO: 1064354 - RNA, 19 nt, Artificial Sequence
  Description of Artificial Sequence: Synthetic oligonucleotide
ggauaggugguggggaucu

SEQ ID NO: 1064355 - RNA, 19 nt, Artificial Sequence
  Description of Artificial Sequence: Synthetic oligonucleotide
ggggccucccugcaauuca

SEQ ID NO: 1064356 - RNA, 19 nt, Artificial Sequence
  Description of Artificial Sequence: Synthetic oligonucleotide
cggcucaacauaccagagc

SEQ ID NO: 1064357 - RNA, 19 nt, Artificial Sequence
  Description of Artificial Sequence: Synthetic oligonucleotide
caacugccggcucaacaua

SEQ ID NO: 1064358 - RNA, 19 nt, Artificial Sequence
  Description of Artificial Sequence: Synthetic oligonucleotide
ggcuguaacgcuggucaga

SEQ ID NO: 1064359 - RNA, 19 nt, Artificial Sequence
  Description of Artificial Sequence: Synthetic oligonucleotide
cacgcuggacagggacagg

SEQ ID NO: 1064360 - RNA, 19 nt, Artificial Sequence
  Description of Artificial Sequence: Synthetic oligonucleotide
cucacaccccgaugaaccu

SEQ ID NO: 1064361 - RNA, 19 nt, Artificial Sequence
  Description of Artificial Sequence: Synthetic oligonucleotide
ggcucacaccccgaugaac

SEQ ID NO: 1064362 - RNA, 19 nt, Artificial Sequence
  Description of Artificial Sequence: Synthetic oligonucleotide
gcagggguuagacuggguu

SEQ ID NO: 1064363 - RNA, 19 nt, Artificial Sequence
  Description of Artificial Sequence: Synthetic oligonucleotide
ccagugaguguggucucag

SEQ ID NO: 1064364 - RNA, 19 nt, Artificial Sequence
  Description of Artificial Sequence: Synthetic oligonucleotide
cacuacagacagacugagu

SEQ ID NO: 1064365 - RNA, 19 nt, Artificial Sequence
  Description of Artificial Sequence: Synthetic oligonucleotide
cguggaguagaccaggcgu

SEQ ID NO: 1064366 - RNA, 19 nt, Artificial Sequence
  Description of Artificial Sequence: Synthetic oligonucleotide
guggaguagaccaggcguu

SEQ ID NO: 1064367 - RNA, 19 nt, Artificial Sequence
  Description of Artificial Sequence: Synthetic oligonucleotide
gccucggugugugagcaca

SEQ ID NO: 1064368 - RNA, 19 nt, Artificial Sequence
  Description of Artificial Sequence: Synthetic oligonucleotide
gcgguagagcggaugguca

SEQ ID NO: 1064369 - RNA, 19 nt, Artificial Sequence
  Description of Artificial Sequence: Synthetic oligonucleotide
ccaacugccggcucaacau

SEQ ID NO: 1064370 - RNA, 19 nt, Artificial Sequence
  Description of Artificial Sequence: Synthetic oligonucleotide
guagagccacuuggaccac

SEQ ID NO: 1064371 - RNA, 19 nt, Artificial Sequence
  Description of Artificial Sequence: Synthetic oligonucleotide
gccaccagugagugugguc

SEQ ID NO: 1064372 - RNA, 19 nt, Artificial Sequence
  Description of Artificial Sequence: Synthetic oligonucleotide
gccacguggguaggacagg

SEQ ID NO: 1064373 - RNA, 19 nt, Artificial Sequence
  Description of Artificial Sequence: Synthetic oligonucleotide
cucagcuaacucgcagcaa

SEQ ID NO: 1064374 - RNA, 19 nt, Artificial Sequence
  Description of Artificial Sequence: Synthetic oligonucleotide
agacugucaggaaguccuu

SEQ ID NO: 1064375 - RNA, 19 nt, Artificial Sequence
  Description of Artificial Sequence: Synthetic oligonucleotide
gcucaacauaccagagcca

SEQ ID NO: 1064376 - RNA, 19 nt, Artificial Sequence
  Description of Artificial Sequence: Synthetic oligonucleotide
gcguccuggcauagccucg

SEQ ID NO: 1064377 - RNA, 19 nt, Artificial Sequence
  Description of Artificial Sequence: Synthetic oligonucleotide
gccagcgcgguagagcgga

SEQ ID NO: 1064378 - RNA, 19 nt, Artificial Sequence
  Description of Artificial Sequence: Synthetic oligonucleotide
gagagguucuggagccacu

SEQ ID NO: 1064379 - RNA, 19 nt, Artificial Sequence
  Description of Artificial Sequence: Synthetic oligonucleotide
gagccacuacaagaaggau

SEQ ID NO: 1064380 - RNA, 19 nt, Artificial Sequence
  Description of Artificial Sequence: Synthetic oligonucleotide
gggauaggugguggggauc

SEQ ID NO: 1064381 - RNA, 19 nt, Artificial Sequence
  Description of Artificial Sequence: Synthetic oligonucleotide
gcaagagaccccagcucga

SEQ ID NO: 1064382 - RNA, 19 nt, Artificial Sequence
  Description of Artificial Sequence: Synthetic oligonucleotide
ucgcauccucagggcaggu

SEQ ID NO: 1064383 - RNA, 19 nt, Artificial Sequence
  Description of Artificial Sequence: Synthetic oligonucleotide
guccgugcucacgcuggac

SEQ ID NO: 1064384 - RNA, 19 nt, Artificial Sequence
  Description of Artificial Sequence: Synthetic oligonucleotide
cccuuaccuuugugacugg

SEQ ID NO: 1064385 - RNA, 19 nt, Artificial Sequence
  Description of Artificial Sequence: Synthetic oligonucleotide
ggcguugcagagaggggaa

SEQ ID NO: 1064386 - RNA, 19 nt, Artificial Sequence
  Description of Artificial Sequence: Synthetic oligonucleotide
cccguucaaacacagcaau

SEQ ID NO: 1064387 - RNA, 19 nt, Artificial Sequence
  Description of Artificial Sequence: Synthetic oligonucleotide
ccuggcuguaacgcugguc

SEQ ID NO: 1064388 - RNA, 19 nt, Artificial Sequence
  Description of Artificial Sequence: Synthetic oligonucleotide
ggccgcaauguaacugguc

SEQ ID NO: 1064389 - RNA, 19 nt, Artificial Sequence
  Description of Artificial Sequence: Synthetic oligonucleotide
caauucagucugagcuaau

SEQ ID NO: 1064390 - RNA, 19 nt, Artificial Sequence
  Description of Artificial Sequence: Synthetic oligonucleotide
cgcgguagagcggaugguc

SEQ ID NO: 1064391 - RNA, 19 nt, Artificial Sequence
  Description of Artificial Sequence: Synthetic oligonucleotide
ccugugagcguagcugaga

SEQ ID NO: 1064392 - RNA, 19 nt, Artificial Sequence
  Description of Artificial Sequence: Synthetic oligonucleotide
gcccgacccugguaggaga

SEQ ID NO: 1064393 - RNA, 19 nt, Artificial Sequence
  Description of Artificial Sequence: Synthetic oligonucleotide
cuggaagcccgacccuggu

SEQ ID NO: 1064394 - RNA, 19 nt, Artificial Sequence
  Description of Artificial Sequence: Synthetic oligonucleotide
gcccguugcuggaacccug

SEQ ID NO: 1064395 - RNA, 19 nt, Artificial Sequence
  Description of Artificial Sequence: Synthetic oligonucleotide
acaccccgaugaaccuuga

SEQ ID NO: 1064396 - RNA, 19 nt, Artificial Sequence
  Description of Artificial Sequence: Synthetic oligonucleotide
gccuguagggauggggaua

SEQ ID NO: 1064397 - RNA, 19 nt, Artificial Sequence
  Description of Artificial Sequence: Synthetic oligonucleotide
ccuugucucuugaaauaau

SEQ ID NO: 1064398 - RNA, 19 nt, Artificial Sequence
  Description of Artificial Sequence: Synthetic oligonucleotide
ggccagcgcgguagagcgg

SEQ ID NO: 1064399 - RNA, 19 nt, Artificial Sequence
  Description of Artificial Sequence: Synthetic oligonucleotide
cgcuuagcauccuggucga

SEQ ID NO: 1064400 - RNA, 19 nt, Artificial Sequence
  Description of Artificial Sequence: Synthetic oligonucleotide
gcauagccucgguguguga

SEQ ID NO: 1064401 - RNA, 19 nt, Artificial Sequence
  Description of Artificial Sequence: Synthetic oligonucleotide
gcggauggucaugcagauc

SEQ ID NO: 1064402 - RNA, 19 nt, Artificial Sequence
  Description of Artificial Sequence: Synthetic oligonucleotide
ggagcuuugcugagagguu

SEQ ID NO: 1064403 - RNA, 19 nt, Artificial Sequence
  Description of Artificial Sequence: Synthetic oligonucleotide
cguacaaaccgaggcaccu

SEQ ID NO: 1064404 - RNA, 19 nt, Artificial Sequence
  Description of Artificial Sequence: Synthetic oligonucleotide
ggucgaaugcaaagaucuu

SEQ ID NO: 1064405 - RNA, 19 nt, Artificial Sequence
  Description of Artificial Sequence: Synthetic oligonucleotide
ggguuagacuggguuguau

SEQ ID NO: 1064406 - RNA, 19 nt, Artificial Sequence
  Description of Artificial Sequence: Synthetic oligonucleotide
cgaggcaccugguaggcuu

SEQ ID NO: 1064407 - RNA, 19 nt, Artificial Sequence
  Description of Artificial Sequence: Synthetic oligonucleotide
gggguuagacuggguugua

SEQ ID NO: 1064408 - RNA, 19 nt, Artificial Sequence
  Description of Artificial Sequence: Synthetic oligonucleotide
gcuggaccucaagucccaa

SEQ ID NO: 1064409 - RNA, 19 nt, Artificial Sequence
  Description of Artificial Sequence: Synthetic oligonucleotide
ccuuaccuuugugacuggu

SEQ ID NO: 1064410 - RNA, 19 nt, Artificial Sequence
  Description of Artificial Sequence: Synthetic oligonucleotide
cucggugugugagcacauu

SEQ ID NO: 1064411 - RNA, 19 nt, Artificial Sequence
  Description of Artificial Sequence: Synthetic oligonucleotide
ccacuacaagaaggaucca

SEQ ID NO: 1064412 - RNA, 19 nt, Artificial Sequence
  Description of Artificial Sequence: Synthetic oligonucleotide
ggguaggacaggagccaau

SEQ ID NO: 1064413 - RNA, 19 nt, Artificial Sequence
  Description of Artificial Sequence: Synthetic oligonucleotide
gggccgcaauguaacuggu

SEQ ID NO: 1064414 - RNA, 19 nt, Artificial Sequence
  Description of Artificial Sequence: Synthetic oligonucleotide
ggcagggguuagacugggu

SEQ ID NO: 1064415 - RNA, 19 nt, Artificial Sequence
  Description of Artificial Sequence: Synthetic oligonucleotide
ccucggugugugagcacau

SEQ ID NO: 1064416 - RNA, 19 nt, Artificial Sequence
  Description of Artificial Sequence: Synthetic oligonucleotide
ccgacccugguaggagaaa

SEQ ID NO: 1064417 - RNA, 19 nt, Artificial Sequence
  Description of Artificial Sequence: Synthetic oligonucleotide
gcgcgguagagcggauggu

SEQ ID NO: 1064418 - RNA, 19 nt, Artificial Sequence
  Description of Artificial Sequence: Synthetic oligonucleotide
ccgaggcaccugguaggcu

SEQ ID NO: 1064419 - RNA, 19 nt, Artificial Sequence
  Description of Artificial Sequence: Synthetic oligonucleotide
gcguggcacagagcccguu

SEQ ID NO: 1064420 - RNA, 19 nt, Artificial Sequence
  Description of Artificial Sequence: Synthetic oligonucleotide
ccagcgcgguagagcggau

SEQ ID NO: 1064421 - RNA, 19 nt, Artificial Sequence
  Description of Artificial Sequence: Synthetic oligonucleotide
aauguuaucacuuaacucu

SEQ ID NO: 1064422 - RNA, 19 nt, Artificial Sequence
  Description of Artificial Sequence: Synthetic oligonucleotide
aacauaucaagcuuuaaac

SEQ ID NO: 1064423 - RNA, 19 nt, Artificial Sequence
  Description of Artificial Sequence: Synthetic oligonucleotide
auaccugucaguuauaacc

SEQ ID NO: 1064424 - RNA, 19 nt, Artificial Sequence
  Description of Artificial Sequence: Synthetic oligonucleotide
ugaugaauggccaaugaag

SEQ ID NO: 1064425 - RNA, 19 nt, Artificial Sequence
  Description of Artificial Sequence: Synthetic oligonucleotide
uuaggaguagugcagaacc

SEQ ID NO: 1064426 - RNA, 19 nt, Artificial Sequence
  Description of Artificial Sequence: Synthetic oligonucleotide
uauugggauacccaaacag

SEQ ID NO: 1064427 - RNA, 19 nt, Artificial Sequence
  Description of Artificial Sequence: Synthetic oligonucleotide
ugugggaagauucuuauac

SEQ ID NO: 1064428 - RNA, 19 nt, Artificial Sequence
  Description of Artificial Sequence: Synthetic oligonucleotide
auuaucuccugauagaugu

SEQ ID NO: 1064429 - RNA, 19 nt, Artificial Sequence
  Description of Artificial Sequence: Synthetic oligonucleotide
uauaucagaagccagcuuc

SEQ ID NO: 1064430 - RNA, 19 nt, Artificial Sequence
  Description of Artificial Sequence: Synthetic oligonucleotide
uuugaaauaguuuuccggu

SEQ ID NO: 1064431 - RNA, 19 nt, Artificial Sequence
  Description of Artificial Sequence: Synthetic oligonucleotide
ugauuaagaacuuguuugg

SEQ ID NO: 1064432 - RNA, 19 nt, Artificial Sequence
  Description of Artificial Sequence: Synthetic oligonucleotide
cuuuaaacgcucuaagagg

SEQ ID NO: 1064433 - RNA, 19 nt, Artificial Sequence
  Description of Artificial Sequence: Synthetic oligonucleotide
aguaucggaagucaagugg

SEQ ID NO: 1064434 - RNA, 19 nt, Artificial Sequence
  Description of Artificial Sequence: Synthetic oligonucleotide
uuuaaacgcucuaagaggu

SEQ ID NO: 1064435 - RNA, 19 nt, Artificial Sequence
  Description of Artificial Sequence: Synthetic oligonucleotide
auuccaacuucauuuaagg

SEQ ID NO: 1064436 - RNA, 19 nt, Artificial Sequence
  Description of Artificial Sequence: Synthetic oligonucleotide
uucucuacaagcauuugcc

SEQ ID NO: 1064437 - RNA, 19 nt, Artificial Sequence
  Description of Artificial Sequence: Synthetic oligonucleotide
uuaaccaucucugaaaaca

SEQ ID NO: 1064438 - RNA, 19 nt, Artificial Sequence
  Description of Artificial Sequence: Synthetic oligonucleotide
ugagauguaguucacggca

SEQ ID NO: 1064439 - RNA, 19 nt, Artificial Sequence
  Description of Artificial Sequence: Synthetic oligonucleotide
ugaauguuaucacuuaacu

SEQ ID NO: 1064440 - RNA, 19 nt, Artificial Sequence
  Description of Artificial Sequence: Synthetic oligonucleotide
ugugaaacccauuuaaggu

SEQ ID NO: 1064441 - RNA, 19 nt, Artificial Sequence
  Description of Artificial Sequence: Synthetic oligonucleotide
aaaaucacugguaagcuug

SEQ ID NO: 1064442 - RNA, 19 nt, Artificial Sequence
  Description of Artificial Sequence: Synthetic oligonucleotide
uguaggacaucuuuuagga

SEQ ID NO: 1064443 - RNA, 19 nt, Artificial Sequence
  Description of Artificial Sequence: Synthetic oligonucleotide
aagaauugcacaguaucgg

SEQ ID NO: 1064444 - RNA, 19 nt, Artificial Sequence
  Description of Artificial Sequence: Synthetic oligonucleotide
aaaacagguuuccucugac

SEQ ID NO: 1064445 - RNA, 19 nt, Artificial Sequence
  Description of Artificial Sequence: Synthetic oligonucleotide
uauauugggauacccaaac

SEQ ID NO: 1064446 - RNA, 19 nt, Artificial Sequence
  Description of Artificial Sequence: Synthetic oligonucleotide
aacauugucagcccagucu

SEQ ID NO: 1064447 - RNA, 19 nt, Artificial Sequence
  Description of Artificial Sequence: Synthetic oligonucleotide
ucuuuuaggaguagugcag

SEQ ID NO: 1064448 - RNA, 19 nt, Artificial Sequence
  Description of Artificial Sequence: Synthetic oligonucleotide
cauugaaaugguuagccag

SEQ ID NO: 1064449 - RNA, 19 nt, Artificial Sequence
  Description of Artificial Sequence: Synthetic oligonucleotide
ucaaucguauccuaaaguc

SEQ ID NO: 1064450 - RNA, 19 nt, Artificial Sequence
  Description of Artificial Sequence: Synthetic oligonucleotide
ucugaugagagcauugagu

SEQ ID NO: 1064451 - RNA, 19 nt, Artificial Sequence
  Description of Artificial Sequence: Synthetic oligonucleotide
auuauucucugcaaagacc

SEQ ID NO: 1064452 - RNA, 19 nt, Artificial Sequence
  Description of Artificial Sequence: Synthetic oligonucleotide
uguuugaaauaguuuuccg

SEQ ID NO: 1064453 - RNA, 19 nt, Artificial Sequence
  Description of Artificial Sequence: Synthetic oligonucleotide
uugggauacccaaacagcc

SEQ ID NO: 1064454 - RNA, 19 nt, Artificial Sequence
  Description of Artificial Sequence: Synthetic oligonucleotide
gauagaacugaagagagga

SEQ ID NO: 1064455 - RNA, 19 nt, Artificial Sequence
  Description of Artificial Sequence: Synthetic oligonucleotide
aacauggucuacuuggcga

SEQ ID NO: 1064456 - RNA, 19 nt, Artificial Sequence
  Description of Artificial Sequence: Synthetic oligonucleotide
uaggacaucuuuuaggagu

SEQ ID NO: 1064457 - RNA, 19 nt, Artificial Sequence
  Description of Artificial Sequence: Synthetic oligonucleotide
cucaaaaucacugguaagc

SEQ ID NO: 1064458 - RNA, 19 nt, Artificial Sequence
  Description of Artificial Sequence: Synthetic oligonucleotide
ugaaauaguuuuccggucu

SEQ ID NO: 1064459 - RNA, 19 nt, Artificial Sequence
  Description of Artificial Sequence: Synthetic oligonucleotide
aaacauggucuacuuggcg

SEQ ID NO: 1064460 - RNA, 19 nt, Artificial Sequence
  Description of Artificial Sequence: Synthetic oligonucleotide
uagugauagaacugaagag

SEQ ID NO: 1064461 - RNA, 19 nt, Artificial Sequence
  Description of Artificial Sequence: Synthetic oligonucleotide
aaaacauggucuacuuggc

SEQ ID NO: 1064462 - RNA, 19 nt, Artificial Sequence
  Description of Artificial Sequence: Synthetic oligonucleotide
auugagcagaauuucaaca

SEQ ID NO: 1064463 - RNA, 19 nt, Artificial Sequence
  Description of Artificial Sequence: Synthetic oligonucleotide
agcugcaacuuacugaggg

SEQ ID NO: 1064464 - RNA, 19 nt, Artificial Sequence
  Description of Artificial Sequence: Synthetic oligonucleotide
uuuaugccagaauuuaacu

SEQ ID NO: 1064465 - RNA, 19 nt, Artificial Sequence
  Description of Artificial Sequence: Synthetic oligonucleotide
uuagccaggauuaucuccu

SEQ ID NO: 1064466 - RNA, 19 nt, Artificial Sequence
  Description of Artificial Sequence: Synthetic oligonucleotide
ucuugcaauagugagaaaa

SEQ ID NO: 1064467 - RNA, 19 nt, Artificial Sequence
  Description of Artificial Sequence: Synthetic oligonucleotide
ucauaucaaacuguaacug

SEQ ID NO: 1064468 - RNA, 19 nt, Artificial Sequence
  Description of Artificial Sequence: Synthetic oligonucleotide
auugggauacccaaacagc

SEQ ID NO: 1064469 - RNA, 19 nt, Artificial Sequence
  Description of Artificial Sequence: Synthetic oligonucleotide
ugacagaauaugcauacaa

SEQ ID NO: 1064470 - RNA, 19 nt, Artificial Sequence
  Description of Artificial Sequence: Synthetic oligonucleotide
agauucuuauaccugucag

SEQ ID NO: 1064471 - RNA, 19 nt, Artificial Sequence
  Description of Artificial Sequence: Synthetic oligonucleotide
uaucacuuaacucuucgau

SEQ ID NO: 1064472 - RNA, 19 nt, Artificial Sequence
  Description of Artificial Sequence: Synthetic oligonucleotide
aauuccaacuucauuuaag

SEQ ID NO: 1064473 - RNA, 19 nt, Artificial Sequence
  Description of Artificial Sequence: Synthetic oligonucleotide
cuagugauagaacugaaga

SEQ ID NO: 1064474 - RNA, 19 nt, Artificial Sequence
  Description of Artificial Sequence: Synthetic oligonucleotide
gcuuuaaacgcucuaagag

SEQ ID NO: 1064475 - RNA, 19 nt, Artificial Sequence
  Description of Artificial Sequence: Synthetic oligonucleotide
ucuacaagcauuugccaga

SEQ ID NO: 1064476 - RNA, 19 nt, Artificial Sequence
  Description of Artificial Sequence: Synthetic oligonucleotide
cacguuauuggucaucagg

SEQ ID NO: 1064477 - RNA, 19 nt, Artificial Sequence
  Description of Artificial Sequence: Synthetic oligonucleotide
ggcauuaagaauugcacag

SEQ ID NO: 1064478 - RNA, 19 nt, Artificial Sequence
  Description of Artificial Sequence: Synthetic oligonucleotide
aguuuaugccaacagcuug

SEQ ID NO: 1064479 - RNA, 19 nt, Artificial Sequence
  Description of Artificial Sequence: Synthetic oligonucleotide
aagauucuuauaccuguca

SEQ ID NO: 1064480 - RNA, 19 nt, Artificial Sequence
  Description of Artificial Sequence: Synthetic oligonucleotide
uccaggguaccauauaucu

SEQ ID NO: 1064481 - RNA, 19 nt, Artificial Sequence
  Description of Artificial Sequence: Synthetic oligonucleotide
auacaacuggcaaaagugc

SEQ ID NO: 1064482 - RNA, 19 nt, Artificial Sequence
  Description of Artificial Sequence: Synthetic oligonucleotide
uagugcagaaccaauguuc

SEQ ID NO: 1064483 - RNA, 19 nt, Artificial Sequence
  Description of Artificial Sequence: Synthetic oligonucleotide
caggauuaucuccugauag

SEQ ID NO: 1064484 - RNA, 19 nt, Artificial Sequence
  Description of Artificial Sequence: Synthetic oligonucleotide
cagaauuuaacuguggcuc

SEQ ID NO: 1064485 - RNA, 19 nt, Artificial Sequence
  Description of Artificial Sequence: Synthetic oligonucleotide
guauccuaaagucaucuac

SEQ ID NO: 1064486 - RNA, 19 nt, Artificial Sequence
  Description of Artificial Sequence: Synthetic oligonucleotide
ucaggcacguuauugguca

SEQ ID NO: 1064487 - RNA, 19 nt, Artificial Sequence
  Description of Artificial Sequence: Synthetic oligonucleotide
uaguucacggcauuaagaa

SEQ ID NO: 1064488 - RNA, 19 nt, Artificial Sequence
  Description of Artificial Sequence: Synthetic oligonucleotide
ucugaauaaggagaaacaa

SEQ ID NO: 1064489 - RNA, 19 nt, Artificial Sequence
  Description of Artificial Sequence: Synthetic oligonucleotide
uaacucuucgaucugugaa

SEQ ID NO: 1064490 - RNA, 19 nt, Artificial Sequence
  Description of Artificial Sequence: Synthetic oligonucleotide
aguagugcagaaccaaugu

SEQ ID NO: 1064491 - RNA, 19 nt, Artificial Sequence
  Description of Artificial Sequence: Synthetic oligonucleotide
auugaaaugguuagccagg

SEQ ID NO: 1064492 - RNA, 19 nt, Artificial Sequence
  Description of Artificial Sequence: Synthetic oligonucleotide
uccuaaagucaucuacuag

SEQ ID NO: 1064493 - RNA, 19 nt, Artificial Sequence
  Description of Artificial Sequence: Synthetic oligonucleotide
uaagguaugugagaugcug

SEQ ID NO: 1064494 - RNA, 19 nt, Artificial Sequence
  Description of Artificial Sequence: Synthetic oligonucleotide
aguacaagaggacuccuga

SEQ ID NO: 1064495 - RNA, 19 nt, Artificial Sequence
  Description of Artificial Sequence: Synthetic oligonucleotide
cauuauucucugcaaagac

SEQ ID NO: 1064496 - RNA, 19 nt, Artificial Sequence
  Description of Artificial Sequence: Synthetic oligonucleotide
ugucuuuauauugggauac

SEQ ID NO: 1064497 - RNA, 19 nt, Artificial Sequence
  Description of Artificial Sequence: Synthetic oligonucleotide
guaccauauaucucagggg

SEQ ID NO: 1064498 - RNA, 19 nt, Artificial Sequence
  Description of Artificial Sequence: Synthetic oligonucleotide
augaguacaagaggacucc

SEQ ID NO: 1064499 - RNA, 19 nt, Artificial Sequence
  Description of Artificial Sequence: Synthetic oligonucleotide
uuggcgagucaacauauca

SEQ ID NO: 1064500 - RNA, 19 nt, Artificial Sequence
  Description of Artificial Sequence: Synthetic oligonucleotide
uaccugucaguuauaacca

SEQ ID NO: 1064501 - RNA, 19 nt, Artificial Sequence
  Description of Artificial Sequence: Synthetic oligonucleotide
ucucuugcaauagugagaa

SEQ ID NO: 1064502 - RNA, 19 nt, Artificial Sequence
  Description of Artificial Sequence: Synthetic oligonucleotide
ucacugguaagcuuguccu

SEQ ID NO: 1064503 - RNA, 19 nt, Artificial Sequence
  Description of Artificial Sequence: Synthetic oligonucleotide
uacaacuggcaaaagugcu

SEQ ID NO: 1064504 - RNA, 19 nt, Artificial Sequence
  Description of Artificial Sequence: Synthetic oligonucleotide
agguauaucagaagccagc

SEQ ID NO: 1064505 - RNA, 19 nt, Artificial Sequence
  Description of Artificial Sequence: Synthetic oligonucleotide
uuccgugucauaucaaacu

SEQ ID NO: 1064506 - RNA, 19 nt, Artificial Sequence
  Description of Artificial Sequence: Synthetic oligonucleotide
ggcaagguauaucagaagc

SEQ ID NO: 1064507 - RNA, 19 nt, Artificial Sequence
  Description of Artificial Sequence: Synthetic oligonucleotide
cguaaggucaguaagagug

SEQ ID NO: 1064508 - RNA, 19 nt, Artificial Sequence
  Description of Artificial Sequence: Synthetic oligonucleotide
ucuuuauauugggauaccc

SEQ ID NO: 1064509 - RNA, 19 nt, Artificial Sequence
  Description of Artificial Sequence: Synthetic oligonucleotide
ugugaugaauggccaauga

SEQ ID NO: 1064510 - RNA, 19 nt, Artificial Sequence
  Description of Artificial Sequence: Synthetic oligonucleotide
aaaagugcuaggauagcca

SEQ ID NO: 1064511 - RNA, 19 nt, Artificial Sequence
  Description of Artificial Sequence: Synthetic oligonucleotide
cugaauguuaucacuuaac

SEQ ID NO: 1064512 - RNA, 19 nt, Artificial Sequence
  Description of Artificial Sequence: Synthetic oligonucleotide
gugauagaacugaagagag

SEQ ID NO: 1064513 - RNA, 19 nt, Artificial Sequence
  Description of Artificial Sequence: Synthetic oligonucleotide
cucuaagagguuuaucaug

SEQ ID NO: 1064514 - RNA, 19 nt, Artificial Sequence
  Description of Artificial Sequence: Synthetic oligonucleotide
acugauuaagaacuuguuu

SEQ ID NO: 1064515 - RNA, 19 nt, Artificial Sequence
  Description of Artificial Sequence: Synthetic oligonucleotide
aucugugaaacccauuuaa

SEQ ID NO: 1064516 - RNA, 19 nt, Artificial Sequence
  Description of Artificial Sequence: Synthetic oligonucleotide
guuagccaggauuaucucc

SEQ ID NO: 1064517 - RNA, 19 nt, Artificial Sequence
  Description of Artificial Sequence: Synthetic oligonucleotide
acggcauuaagaauugcac

SEQ ID NO: 1064518 - RNA, 19 nt, Artificial Sequence
  Description of Artificial Sequence: Synthetic oligonucleotide
agagguuuaucaugucauc

SEQ ID NO: 1064519 - RNA, 19 nt, Artificial Sequence
  Description of Artificial Sequence: Synthetic oligonucleotide
ucuacuagguccuucugua

SEQ ID NO: 1064520 - RNA, 19 nt, Artificial Sequence
  Description of Artificial Sequence: Synthetic oligonucleotide
aguaagagugggcaagcug

SEQ ID NO: 1064521 - RNA, 19 nt, Artificial Sequence
  Description of Artificial Sequence: Synthetic oligonucleotide
uuugcagcgucuuucacuu

SEQ ID NO: 1064522 - RNA, 19 nt, Artificial Sequence
  Description of Artificial Sequence: Synthetic oligonucleotide
uuauauugggauacccaaa

SEQ ID NO: 1064523 - RNA, 19 nt, Artificial Sequence
  Description of Artificial Sequence: Synthetic oligonucleotide
uuccaacuucauuuaaggc

SEQ ID NO: 1064524 - RNA, 19 nt, Artificial Sequence
  Description of Artificial Sequence: Synthetic oligonucleotide
aguuauaaccaaaaguaaa

SEQ ID NO: 1064525 - RNA, 19 nt, Artificial Sequence
  Description of Artificial Sequence: Synthetic oligonucleotide
aagcagacggucccguaag

SEQ ID NO: 1064526 - RNA, 19 nt, Artificial Sequence
  Description of Artificial Sequence: Synthetic oligonucleotide
cuuuauauugggauaccca

SEQ ID NO: 1064527 - RNA, 19 nt, Artificial Sequence
  Description of Artificial Sequence: Synthetic oligonucleotide
aguuuguaaauuccaacuu

SEQ ID NO: 1064528 - RNA, 19 nt, Artificial Sequence
  Description of Artificial Sequence: Synthetic oligonucleotide
auuuaacuguggcucucac

SEQ ID NO: 1064529 - RNA, 19 nt, Artificial Sequence
  Description of Artificial Sequence: Synthetic oligonucleotide
caggguaccauauaucuca

SEQ ID NO: 1064530 - RNA, 19 nt, Artificial Sequence
  Description of Artificial Sequence: Synthetic oligonucleotide
agaauuuaacuguggcucu

SEQ ID NO: 1064531 - RNA, 19 nt, Artificial Sequence
  Description of Artificial Sequence: Synthetic oligonucleotide
guaagcuuguccuucagaa

SEQ ID NO: 1064532 - RNA, 19 nt, Artificial Sequence
  Description of Artificial Sequence: Synthetic oligonucleotide
aagagguuuaucaugucau

SEQ ID NO: 1064533 - RNA, 19 nt, Artificial Sequence
  Description of Artificial Sequence: Synthetic oligonucleotide
uguugagauguaguucacg

SEQ ID NO: 1064534 - RNA, 19 nt, Artificial Sequence
  Description of Artificial Sequence: Synthetic oligonucleotide
uucacggcauuaagaauug

SEQ ID NO: 1064535 - RNA, 19 nt, Artificial Sequence
  Description of Artificial Sequence: Synthetic oligonucleotide
ugagcagaauuucaacauc

SEQ ID NO: 1064536 - RNA, 19 nt, Artificial Sequence
  Description of Artificial Sequence: Synthetic oligonucleotide
caaaagugcuaggauagcc

SEQ ID NO: 1064537 - RNA, 19 nt, Artificial Sequence
  Description of Artificial Sequence: Synthetic oligonucleotide
gaugaguacaagaggacuc

SEQ ID NO: 1064538 - RNA, 19 nt, Artificial Sequence
  Description of Artificial Sequence: Synthetic oligonucleotide
ugggugugugugaugaaug

SEQ ID NO: 1064539 - RNA, 19 nt, Artificial Sequence
  Description of Artificial Sequence: Synthetic oligonucleotide
ugcagcgucuuucacuucu

SEQ ID NO: 1064540 - RNA, 19 nt, Artificial Sequence
  Description of Artificial Sequence: Synthetic oligonucleotide
gaucauggccccgagauca

SEQ ID NO: 1064541 - RNA, 19 nt, Artificial Sequence
  Description of Artificial Sequence: Synthetic oligonucleotide
ugcugagccaguuuguaaa

SEQ ID NO: 1064542 - RNA, 19 nt, Artificial Sequence
  Description of Artificial Sequence: Synthetic oligonucleotide
aaacagguuuccucugaca

SEQ ID NO: 1064543 - RNA, 19 nt, Artificial Sequence
  Description of Artificial Sequence: Synthetic oligonucleotide
agugcuaggauagccauga

SEQ ID NO: 1064544 - RNA, 19 nt, Artificial Sequence
  Description of Artificial Sequence: Synthetic oligonucleotide
auuuaagguaugugagaug

SEQ ID NO: 1064545 - RNA, 19 nt, Artificial Sequence
  Description of Artificial Sequence: Synthetic oligonucleotide
aagguauaucagaagccag

SEQ ID NO: 1064546 - RNA, 19 nt, Artificial Sequence
  Description of Artificial Sequence: Synthetic oligonucleotide
uaucaagcuuuaaacgcuc

SEQ ID NO: 1064547 - RNA, 19 nt, Artificial Sequence
  Description of Artificial Sequence: Synthetic oligonucleotide
aagagaggagcuuccugcu

SEQ ID NO: 1064548 - RNA, 19 nt, Artificial Sequence
  Description of Artificial Sequence: Synthetic oligonucleotide
uugaaauaguuuuccgguc

SEQ ID NO: 1064549 - RNA, 19 nt, Artificial Sequence
  Description of Artificial Sequence: Synthetic oligonucleotide
acaguuaaccaucucugaa

SEQ ID NO: 1064550 - RNA, 19 nt, Artificial Sequence
  Description of Artificial Sequence: Synthetic oligonucleotide
ugaaaacagguuuccucug

SEQ ID NO: 1064551 - RNA, 19 nt, Artificial Sequence
  Description of Artificial Sequence: Synthetic oligonucleotide
ugaugcaggcuucuuuuac

SEQ ID NO: 1064552 - RNA, 19 nt, Artificial Sequence
  Description of Artificial Sequence: Synthetic oligonucleotide
uuaacucuucgaucuguga

SEQ ID NO: 1064553 - RNA, 19 nt, Artificial Sequence
  Description of Artificial Sequence: Synthetic oligonucleotide
aucggaagucaaguggagc

SEQ ID NO: 1064554 - RNA, 19 nt, Artificial Sequence
  Description of Artificial Sequence: Synthetic oligonucleotide
uaucggaagucaaguggag

SEQ ID NO: 1064555 - RNA, 19 nt, Artificial Sequence
  Description of Artificial Sequence: Synthetic oligonucleotide
ucccguaaggucaguaaga

SEQ ID NO: 1064556 - RNA, 19 nt, Artificial Sequence
  Description of Artificial Sequence: Synthetic oligonucleotide
aauuuaacuguggcucuca

SEQ ID NO: 1064557 - RNA, 19 nt, Artificial Sequence
  Description of Artificial Sequence: Synthetic oligonucleotide
cuaggauagccaugaacac

SEQ ID NO: 1064558 - RNA, 19 nt, Artificial Sequence
  Description of Artificial Sequence: Synthetic oligonucleotide
ucacgaaacuaagaagaug

SEQ ID NO: 1064559 - RNA, 19 nt, Artificial Sequence
  Description of Artificial Sequence: Synthetic oligonucleotide
acucuucgaucugugaaac

SEQ ID NO: 1064560 - RNA, 19 nt, Artificial Sequence
  Description of Artificial Sequence: Synthetic oligonucleotide
ccaucuuucuuucuuauac

SEQ ID NO: 1064561 - RNA, 19 nt, Artificial Sequence
  Description of Artificial Sequence: Synthetic oligonucleotide
aguguuaggccaguuuguc

SEQ ID NO: 1064562 - RNA, 19 nt, Artificial Sequence
  Description of Artificial Sequence: Synthetic oligonucleotide
gauagccaugaacacugug

SEQ ID NO: 1064563 - RNA, 19 nt, Artificial Sequence
  Description of Artificial Sequence: Synthetic oligonucleotide
gauuccgugucauaucaaa

SEQ ID NO: 1064564 - RNA, 19 nt, Artificial Sequence
  Description of Artificial Sequence: Synthetic oligonucleotide
gaaauaguuuuccggucuc

SEQ ID NO: 1064565 - RNA, 19 nt, Artificial Sequence
  Description of Artificial Sequence: Synthetic oligonucleotide
guaaggucaguaagagugg

SEQ ID NO: 1064566 - RNA, 19 nt, Artificial Sequence
  Description of Artificial Sequence: Synthetic oligonucleotide
auuccgugucauaucaaac

SEQ ID NO: 1064567 - RNA, 19 nt, Artificial Sequence
  Description of Artificial Sequence: Synthetic oligonucleotide
acaguaucggaagucaagu

SEQ ID NO: 1064568 - RNA, 19 nt, Artificial Sequence
  Description of Artificial Sequence: Synthetic oligonucleotide
agaugaguacaagaggacu

SEQ ID NO: 1064569 - RNA, 19 nt, Artificial Sequence
  Description of Artificial Sequence: Synthetic oligonucleotide
ggcaaaagugcuaggauag

SEQ ID NO: 1064570 - RNA, 19 nt, Artificial Sequence
  Description of Artificial Sequence: Synthetic oligonucleotide
uuauaccugucaguuauaa

SEQ ID NO: 1064571 - RNA, 19 nt, Artificial Sequence
  Description of Artificial Sequence: Synthetic oligonucleotide
gauuaucuccugauagaug

SEQ ID NO: 1064572 - RNA, 19 nt, Artificial Sequence
  Description of Artificial Sequence: Synthetic oligonucleotide
gucaguaagagugggcaag

SEQ ID NO: 1064573 - RNA, 19 nt, Artificial Sequence
  Description of Artificial Sequence: Synthetic oligonucleotide
acguuauuggucaucaggu

SEQ ID NO: 1064574 - RNA, 19 nt, Artificial Sequence
  Description of Artificial Sequence: Synthetic oligonucleotide
uuuaggaguagugcagaac

SEQ ID NO: 1064575 - RNA, 19 nt, Artificial Sequence
  Description of Artificial Sequence: Synthetic oligonucleotide
ucguauccuaaagucaucu

SEQ ID NO: 1064576 - RNA, 19 nt, Artificial Sequence
  Description of Artificial Sequence: Synthetic oligonucleotide
uuuaugccaacagcuugag

SEQ ID NO: 1064577 - RNA, 19 nt, Artificial Sequence
  Description of Artificial Sequence: Synthetic oligonucleotide
caaucguauccuaaaguca

SEQ ID NO: 1064578 - RNA, 19 nt, Artificial Sequence
  Description of Artificial Sequence: Synthetic oligonucleotide
ucagaauuuuaugccagaa

SEQ ID NO: 1064579 - RNA, 19 nt, Artificial Sequence
  Description of Artificial Sequence: Synthetic oligonucleotide
caacauaucaagcuuuaaa

SEQ ID NO: 1064580 - RNA, 19 nt, Artificial Sequence
  Description of Artificial Sequence: Synthetic oligonucleotide
uuguaaauuccaacuucau

SEQ ID NO: 1064581 - RNA, 19 nt, Artificial Sequence
  Description of Artificial Sequence: Synthetic oligonucleotide
uucucuccacaguuaacca

SEQ ID NO: 1064582 - RNA, 19 nt, Artificial Sequence
  Description of Artificial Sequence: Synthetic oligonucleotide
cauggccccgagaucaucc

SEQ ID NO: 1064583 - RNA, 19 nt, Artificial Sequence
  Description of Artificial Sequence: Synthetic oligonucleotide
gucccguaaggucaguaag

SEQ ID NO: 1064584 - RNA, 19 nt, Artificial Sequence
  Description of Artificial Sequence: Synthetic oligonucleotide
uggcuagugauagaacuga

SEQ ID NO: 1064585 - RNA, 19 nt, Artificial Sequence
  Description of Artificial Sequence: Synthetic oligonucleotide
auauugggauacccaaaca

SEQ ID NO: 1064586 - RNA, 19 nt, Artificial Sequence
  Description of Artificial Sequence: Synthetic oligonucleotide
uuuuaggaguagugcagaa

SEQ ID NO: 1064587 - RNA, 19 nt, Artificial Sequence
  Description of Artificial Sequence: Synthetic oligonucleotide
aagucaaguggagcccugg

SEQ ID NO: 1064588 - RNA, 19 nt, Artificial Sequence
  Description of Artificial Sequence: Synthetic oligonucleotide
ucagaaugaugcaggcuuc

SEQ ID NO: 1064589 - RNA, 19 nt, Artificial Sequence
  Description of Artificial Sequence: Synthetic oligonucleotide
aggucaguaagagugggca

SEQ ID NO: 1064590 - RNA, 19 nt, Artificial Sequence
  Description of Artificial Sequence: Synthetic oligonucleotide
gauucuuauaccugucagu

SEQ ID NO: 1064591 - RNA, 19 nt, Artificial Sequence
  Description of Artificial Sequence: Synthetic oligonucleotide
ucaguaagagugggcaagc

SEQ ID NO: 1064592 - RNA, 19 nt, Artificial Sequence
  Description of Artificial Sequence: Synthetic oligonucleotide
uucauuuaaggcugcugua

SEQ ID NO: 1064593 - RNA, 19 nt, Artificial Sequence
  Description of Artificial Sequence: Synthetic oligonucleotide
auggccaaugaagcugugc

SEQ ID NO: 1064594 - RNA, 19 nt, Artificial Sequence
  Description of Artificial Sequence: Synthetic oligonucleotide
uuaagguaugugagaugcu

SEQ ID NO: 1064595 - RNA, 19 nt, Artificial Sequence
  Description of Artificial Sequence: Synthetic oligonucleotide
ugaggcuuguagcuucaac

SEQ ID NO: 1064596 - RNA, 19 nt, Artificial Sequence
  Description of Artificial Sequence: Synthetic oligonucleotide
guaggacaucuuuuaggag

SEQ ID NO: 1064597 - RNA, 19 nt, Artificial Sequence
  Description of Artificial Sequence: Synthetic oligonucleotide
caagguauaucagaagcca

SEQ ID NO: 1064598 - RNA, 19 nt, Artificial Sequence
  Description of Artificial Sequence: Synthetic oligonucleotide
guaacugggcugcuccucc

SEQ ID NO: 1064599 - RNA, 19 nt, Artificial Sequence
  Description of Artificial Sequence: Synthetic oligonucleotide
aucagguauugcugaaugu

SEQ ID NO: 1064600 - RNA, 19 nt, Artificial Sequence
  Description of Artificial Sequence: Synthetic oligonucleotide
ucacacugagacggcaggg

SEQ ID NO: 1064601 - RNA, 19 nt, Artificial Sequence
  Description of Artificial Sequence: Synthetic oligonucleotide
cuucauuuaaggcugcugu

SEQ ID NO: 1064602 - RNA, 19 nt, Artificial Sequence
  Description of Artificial Sequence: Synthetic oligonucleotide
cucugaugagagcauugag

SEQ ID NO: 1064603 - RNA, 19 nt, Artificial Sequence
  Description of Artificial Sequence: Synthetic oligonucleotide
ggucaaucguauccuaaag

SEQ ID NO: 1064604 - RNA, 19 nt, Artificial Sequence
  Description of Artificial Sequence: Synthetic oligonucleotide
accaaaugacagaaaaggu

SEQ ID NO: 1064605 - RNA, 19 nt, Artificial Sequence
  Description of Artificial Sequence: Synthetic oligonucleotide
gacaucacugccugcucac

SEQ ID NO: 1064606 - RNA, 19 nt, Artificial Sequence
  Description of Artificial Sequence: Synthetic oligonucleotide
caacaucuugcugagccag

SEQ ID NO: 1064607 - RNA, 19 nt, Artificial Sequence
  Description of Artificial Sequence: Synthetic oligonucleotide
uucgaucugugaaacccau

SEQ ID NO: 1064608 - RNA, 19 nt, Artificial Sequence
  Description of Artificial Sequence: Synthetic oligonucleotide
guaucggaagucaagugga

SEQ ID NO: 1064609 - RNA, 19 nt, Artificial Sequence
  Description of Artificial Sequence: Synthetic oligonucleotide
uuuccggucucuugcaaua

SEQ ID NO: 1064610 - RNA, 19 nt, Artificial Sequence
  Description of Artificial Sequence: Synthetic oligonucleotide
uaaacgcucuaagagguuu

SEQ ID NO: 1064611 - RNA, 19 nt, Artificial Sequence
  Description of Artificial Sequence: Synthetic oligonucleotide
ugugugaugaauggccaau

SEQ ID NO: 1064612 - RNA, 19 nt, Artificial Sequence
  Description of Artificial Sequence: Synthetic oligonucleotide
ucaccugggucaaucguau

SEQ ID NO: 1064613 - RNA, 19 nt, Artificial Sequence
  Description of Artificial Sequence: Synthetic oligonucleotide
ugggucaaucguauccuaa

SEQ ID NO: 1064614 - RNA, 19 nt, Artificial Sequence
  Description of Artificial Sequence: Synthetic oligonucleotide
uaguugucccagcugcaac

SEQ ID NO: 1064615 - RNA, 19 nt, Artificial Sequence
  Description of Artificial Sequence: Synthetic oligonucleotide
augguuagccaggauuauc

SEQ ID NO: 1064616 - RNA, 19 nt, Artificial Sequence
  Description of Artificial Sequence: Synthetic oligonucleotide
guguuaggccaguuugucc

SEQ ID NO: 1064617 - RNA, 19 nt, Artificial Sequence
  Description of Artificial Sequence: Synthetic oligonucleotide
guaguucacggcauuaaga

SEQ ID NO: 1064618 - RNA, 19 nt, Artificial Sequence
  Description of Artificial Sequence: Synthetic oligonucleotide
uauaucucaggggcaccag

SEQ ID NO: 1064619 - RNA, 19 nt, Artificial Sequence
  Description of Artificial Sequence: Synthetic oligonucleotide
auccuaaagucaucuacua

SEQ ID NO: 1064620 - RNA, 19 nt, Artificial Sequence
  Description of Artificial Sequence: Synthetic oligonucleotide
ugcugaauguuaucacuua

SEQ ID NO: 1064621 - RNA, 19 nt, Artificial Sequence
  Description of Artificial Sequence: Synthetic oligonucleotide
aguuuuccggucucuugca

SEQ ID NO: 1064622 - RNA, 19 nt, Artificial Sequence
  Description of Artificial Sequence: Synthetic oligonucleotide
guuaaccaucucugaaaac

SEQ ID NO: 1064623 - RNA, 19 nt, Artificial Sequence
  Description of Artificial Sequence: Synthetic oligonucleotide
caguaucggaagucaagug

SEQ ID NO: 1064624 - RNA, 19 nt, Artificial Sequence
  Description of Artificial Sequence: Synthetic oligonucleotide
auauaucucaggggcacca

SEQ ID NO: 1064625 - RNA, 19 nt, Artificial Sequence
  Description of Artificial Sequence: Synthetic oligonucleotide
aguucacggcauuaagaau

SEQ ID NO: 1064626 - RNA, 19 nt, Artificial Sequence
  Description of Artificial Sequence: Synthetic oligonucleotide
caguuaaccaucucugaaa

SEQ ID NO: 1064627 - RNA, 19 nt, Artificial Sequence
  Description of Artificial Sequence: Synthetic oligonucleotide
acuuaacucuucgaucugu

SEQ ID NO: 1064628 - RNA, 19 nt, Artificial Sequence
  Description of Artificial Sequence: Synthetic oligonucleotide
gaagauucuuauaccuguc

SEQ ID NO: 1064629 - RNA, 19 nt, Artificial Sequence
  Description of Artificial Sequence: Synthetic oligonucleotide
guagcuucaacagcugaca

SEQ ID NO: 1064630 - RNA, 19 nt, Artificial Sequence
  Description of Artificial Sequence: Synthetic oligonucleotide
cagaagcugacuguaggac

SEQ ID NO: 1064631 - RNA, 19 nt, Artificial Sequence
  Description of Artificial Sequence: Synthetic oligonucleotide
agauggcuagugauagaac

SEQ ID NO: 1064632 - RNA, 19 nt, Artificial Sequence
  Description of Artificial Sequence: Synthetic oligonucleotide
caggcaagguauaucagaa

SEQ ID NO: 1064633 - RNA, 19 nt, Artificial Sequence
  Description of Artificial Sequence: Synthetic oligonucleotide
agcuucaacagcugacaaa

SEQ ID NO: 1064634 - RNA, 19 nt, Artificial Sequence
  Description of Artificial Sequence: Synthetic oligonucleotide
gugaugaauggccaaugaa

SEQ ID NO: 1064635 - RNA, 19 nt, Artificial Sequence
  Description of Artificial Sequence: Synthetic oligonucleotide
gaagcagacggucccguaa

SEQ ID NO: 1064636 - RNA, 19 nt, Artificial Sequence
  Description of Artificial Sequence: Synthetic oligonucleotide
gccucaggcacguuauugg

SEQ ID NO: 1064637 - RNA, 19 nt, Artificial Sequence
  Description of Artificial Sequence: Synthetic oligonucleotide
aaugguuagccaggauuau

SEQ ID NO: 1064638 - RNA, 19 nt, Artificial Sequence
  Description of Artificial Sequence: Synthetic oligonucleotide
ggaagauucuuauaccugu

SEQ ID NO: 1064639 - RNA, 19 nt, Artificial Sequence
  Description of Artificial Sequence: Synthetic oligonucleotide
uaugugagaugcugcucaa

SEQ ID NO: 1064640 - RNA, 19 nt, Artificial Sequence
  Description of Artificial Sequence: Synthetic oligonucleotide
cagacggucccguaagguc

SEQ ID NO: 1064641 - RNA, 19 nt, Artificial Sequence
  Description of Artificial Sequence: Synthetic oligonucleotide
gcagucaguagauggcuag

SEQ ID NO: 1064642 - RNA, 19 nt, Artificial Sequence
  Description of Artificial Sequence: Synthetic oligonucleotide
uucuuauaccugucaguua

SEQ ID NO: 1064643 - RNA, 19 nt, Artificial Sequence
  Description of Artificial Sequence: Synthetic oligonucleotide
uccagcugaagcagacggu

SEQ ID NO: 1064644 - RNA, 19 nt, Artificial Sequence
  Description of Artificial Sequence: Synthetic oligonucleotide
gucaaucguauccuaaagu

SEQ ID NO: 1064645 - RNA, 19 nt, Artificial Sequence
  Description of Artificial Sequence: Synthetic oligonucleotide
aggacuguugagauguagu

SEQ ID NO: 1064646 - RNA, 19 nt, Artificial Sequence
  Description of Artificial Sequence: Synthetic oligonucleotide
agccaugaacacugugcag

SEQ ID NO: 1064647 - RNA, 19 nt, Artificial Sequence
  Description of Artificial Sequence: Synthetic oligonucleotide
gaauuuaacuguggcucuc

SEQ ID NO: 1064648 - RNA, 19 nt, Artificial Sequence
  Description of Artificial Sequence: Synthetic oligonucleotide
agcagacggucccguaagg

SEQ ID NO: 1064649 - RNA, 19 nt, Artificial Sequence
  Description of Artificial Sequence: Synthetic oligonucleotide
auggucuacuuggcgaguc

SEQ ID NO: 1064650 - RNA, 19 nt, Artificial Sequence
  Description of Artificial Sequence: Synthetic oligonucleotide
uuaaacgcucuaagagguu

SEQ ID NO: 1064651 - RNA, 19 nt, Artificial Sequence
  Description of Artificial Sequence: Synthetic oligonucleotide
gcaagguauaucagaagcc

SEQ ID NO: 1064652 - RNA, 19 nt, Artificial Sequence
  Description of Artificial Sequence: Synthetic oligonucleotide
caucacugccugcucacac

SEQ ID NO: 1064653 - RNA, 19 nt, Artificial Sequence
  Description of Artificial Sequence: Synthetic oligonucleotide
uggucuacuuggcgaguca

SEQ ID NO: 1064654 - RNA, 19 nt, Artificial Sequence
  Description of Artificial Sequence: Synthetic oligonucleotide
uccauggaggcuaguuguc

SEQ ID NO: 1064655 - RNA, 19 nt, Artificial Sequence
  Description of Artificial Sequence: Synthetic oligonucleotide
cucuucgaucugugaaacc

SEQ ID NO: 1064656 - RNA, 19 nt, Artificial Sequence
  Description of Artificial Sequence: Synthetic oligonucleotide
gcucucacgaaacuaagaa

SEQ ID NO: 1064657 - RNA, 19 nt, Artificial Sequence
  Description of Artificial Sequence: Synthetic oligonucleotide
ugaucauggccccgagauc

SEQ ID NO: 1064658 - RNA, 19 nt, Artificial Sequence
  Description of Artificial Sequence: Synthetic oligonucleotide
cuaagagguuuaucauguc

SEQ ID NO: 1064659 - RNA, 19 nt, Artificial Sequence
  Description of Artificial Sequence: Synthetic oligonucleotide
cucaggcacguuauugguc

SEQ ID NO: 1064660 - RNA, 19 nt, Artificial Sequence
  Description of Artificial Sequence: Synthetic oligonucleotide
uguggcucucacgaaacua

SEQ ID NO: 1064661 - RNA, 19 nt, Artificial Sequence
  Description of Artificial Sequence: Synthetic oligonucleotide
acgaaacuaagaagaugag

SEQ ID NO: 1064662 - RNA, 19 nt, Artificial Sequence
  Description of Artificial Sequence: Synthetic oligonucleotide
uuaucuccugauagaugua

SEQ ID NO: 1064663 - RNA, 19 nt, Artificial Sequence
  Description of Artificial Sequence: Synthetic oligonucleotide
cauauaucucaggggcacc

SEQ ID NO: 1064664 - RNA, 19 nt, Artificial Sequence
  Description of Artificial Sequence: Synthetic oligonucleotide
agucaaguggagcccuggu

SEQ ID NO: 1064665 - RNA, 19 nt, Artificial Sequence
  Description of Artificial Sequence: Synthetic oligonucleotide
gcuagugauagaacugaag

SEQ ID NO: 1064666 - RNA, 19 nt, Artificial Sequence
  Description of Artificial Sequence: Synthetic oligonucleotide
gaucugugaaacccauuua

SEQ ID NO: 1064667 - RNA, 19 nt, Artificial Sequence
  Description of Artificial Sequence: Synthetic oligonucleotide
uccggucucuugcaauagu

SEQ ID NO: 1064668 - RNA, 19 nt, Artificial Sequence
  Description of Artificial Sequence: Synthetic oligonucleotide
cacaguuaaccaucucuga

SEQ ID NO: 1064669 - RNA, 19 nt, Artificial Sequence
  Description of Artificial Sequence: Synthetic oligonucleotide
agacggucccguaagguca

SEQ ID NO: 1064670 - RNA, 19 nt, Artificial Sequence
  Description of Artificial Sequence: Synthetic oligonucleotide
gucaaguggagcccugguc

SEQ ID NO: 1064671 - RNA, 19 nt, Artificial Sequence
  Description of Artificial Sequence: Synthetic oligonucleotide
agacagagcucuccaugga

SEQ ID NO: 1064672 - RNA, 19 nt, Artificial Sequence
  Description of Artificial Sequence: Synthetic oligonucleotide
ugaguacaagaggacuccu

SEQ ID NO: 1064673 - RNA, 19 nt, Artificial Sequence
  Description of Artificial Sequence: Synthetic oligonucleotide
guucacggcauuaagaauu

SEQ ID NO: 1064674 - RNA, 19 nt, Artificial Sequence
  Description of Artificial Sequence: Synthetic oligonucleotide
cauuuaagguaugugagau

SEQ ID NO: 1064675 - RNA, 19 nt, Artificial Sequence
  Description of Artificial Sequence: Synthetic oligonucleotide
gucuuuauauugggauacc

SEQ ID NO: 1064676 - RNA, 19 nt, Artificial Sequence
  Description of Artificial Sequence: Synthetic oligonucleotide
ugcauacaacuggcaaaag

SEQ ID NO: 1064677 - RNA, 19 nt, Artificial Sequence
  Description of Artificial Sequence: Synthetic oligonucleotide
agccaucuuucuuucuuau

SEQ ID NO: 1064678 - RNA, 19 nt, Artificial Sequence
  Description of Artificial Sequence: Synthetic oligonucleotide
uggaggcuaguugucccag

SEQ ID NO: 1064679 - RNA, 19 nt, Artificial Sequence
  Description of Artificial Sequence: Synthetic oligonucleotide
ucaucagguauugcugaau

SEQ ID NO: 1064680 - RNA, 19 nt, Artificial Sequence
  Description of Artificial Sequence: Synthetic oligonucleotide
aggauagaggcugccucag

SEQ ID NO: 1064681 - RNA, 19 nt, Artificial Sequence
  Description of Artificial Sequence: Synthetic oligonucleotide
aacgcucuaagagguuuau

SEQ ID NO: 1064682 - RNA, 19 nt, Artificial Sequence
  Description of Artificial Sequence: Synthetic oligonucleotide
agguauugcugaauguuau

SEQ ID NO: 1064683 - RNA, 19 nt, Artificial Sequence
  Description of Artificial Sequence: Synthetic oligonucleotide
auacccaaacagccucuga

SEQ ID NO: 1064684 - RNA, 19 nt, Artificial Sequence
  Description of Artificial Sequence: Synthetic oligonucleotide
uugcacaguaucggaaguc

SEQ ID NO: 1064685 - RNA, 19 nt, Artificial Sequence
  Description of Artificial Sequence: Synthetic oligonucleotide
gcaggcaagguauaucaga

SEQ ID NO: 1064686 - RNA, 19 nt, Artificial Sequence
  Description of Artificial Sequence: Synthetic oligonucleotide
aucguauccuaaagucauc

SEQ ID NO: 1064687 - RNA, 19 nt, Artificial Sequence
  Description of Artificial Sequence: Synthetic oligonucleotide
gggaagauucuuauaccug

SEQ ID NO: 1064688 - RNA, 19 nt, Artificial Sequence
  Description of Artificial Sequence: Synthetic oligonucleotide
uuccggucucuugcaauag

SEQ ID NO: 1064689 - RNA, 19 nt, Artificial Sequence
  Description of Artificial Sequence: Synthetic oligonucleotide
gucucuugcaauagugaga

SEQ ID NO: 1064690 - RNA, 19 nt, Artificial Sequence
  Description of Artificial Sequence: Synthetic oligonucleotide
gguauugcugaauguuauc

SEQ ID NO: 1064691 - RNA, 19 nt, Artificial Sequence
  Description of Artificial Sequence: Synthetic oligonucleotide
aggaguagugcagaaccaa

SEQ ID NO: 1064692 - RNA, 19 nt, Artificial Sequence
  Description of Artificial Sequence: Synthetic oligonucleotide
aggcuaguugucccagcug

SEQ ID NO: 1064693 - RNA, 19 nt, Artificial Sequence
  Description of Artificial Sequence: Synthetic oligonucleotide
cuguaacuccaggaacugc

SEQ ID NO: 1064694 - RNA, 19 nt, Artificial Sequence
  Description of Artificial Sequence: Synthetic oligonucleotide
caggauagaggcugccuca

SEQ ID NO: 1064695 - RNA, 19 nt, Artificial Sequence
  Description of Artificial Sequence: Synthetic oligonucleotide
gauguaguucacggcauua

SEQ ID NO: 1064696 - RNA, 19 nt, Artificial Sequence
  Description of Artificial Sequence: Synthetic oligonucleotide
cuuggcgagucaacauauc

SEQ ID NO: 1064697 - RNA, 19 nt, Artificial Sequence
  Description of Artificial Sequence: Synthetic oligonucleotide
acuuggcgagucaacauau

SEQ ID NO: 1064698 - RNA, 19 nt, Artificial Sequence
  Description of Artificial Sequence: Synthetic oligonucleotide
caucuacuagguccuucug

SEQ ID NO: 1064699 - RNA, 19 nt, Artificial Sequence
  Description of Artificial Sequence: Synthetic oligonucleotide
ccaguuuaugccaacagcu

SEQ ID NO: 1064700 - RNA, 19 nt, Artificial Sequence
  Description of Artificial Sequence: Synthetic oligonucleotide
gucuuucacuucucuaaaa

SEQ ID NO: 1064701 - RNA, 19 nt, Artificial Sequence
  Description of Artificial Sequence: Synthetic oligonucleotide
gaagucaaguggagcccug

SEQ ID NO: 1064702 - RNA, 19 nt, Artificial Sequence
  Description of Artificial Sequence: Synthetic oligonucleotide
accugucaguuauaaccaa

SEQ ID NO: 1064703 - RNA, 19 nt, Artificial Sequence
  Description of Artificial Sequence: Synthetic oligonucleotide
gaggcuaguugucccagcu

SEQ ID NO: 1064704 - RNA, 19 nt, Artificial Sequence
  Description of Artificial Sequence: Synthetic oligonucleotide
aaacgcucuaagagguuua

SEQ ID NO: 1064705 - RNA, 19 nt, Artificial Sequence
  Description of Artificial Sequence: Synthetic oligonucleotide
gacaucuuuuaggaguagu

SEQ ID NO: 1064706 - RNA, 19 nt, Artificial Sequence
  Description of Artificial Sequence: Synthetic oligonucleotide
agaugcucagaagcugacu

SEQ ID NO: 1064707 - RNA, 19 nt, Artificial Sequence
  Description of Artificial Sequence: Synthetic oligonucleotide
ggguaccauauaucucagg

SEQ ID NO: 1064708 - RNA, 19 nt, Artificial Sequence
  Description of Artificial Sequence: Synthetic oligonucleotide
gguaagcuuguccuucaga

SEQ ID NO: 1064709 - RNA, 19 nt, Artificial Sequence
  Description of Artificial Sequence: Synthetic oligonucleotide
aggacaucuuuuaggagua

SEQ ID NO: 1064710 - RNA, 19 nt, Artificial Sequence
  Description of Artificial Sequence: Synthetic oligonucleotide
augaugcaggcuucuuuua

SEQ ID NO: 1064711 - RNA, 19 nt, Artificial Sequence
  Description of Artificial Sequence: Synthetic oligonucleotide
guagauggcuagugauaga

SEQ ID NO: 1064712 - RNA, 19 nt, Artificial Sequence
  Description of Artificial Sequence: Synthetic oligonucleotide
gggaaaagauuccguguca

SEQ ID NO: 1064713 - RNA, 19 nt, Artificial Sequence
  Description of Artificial Sequence: Synthetic oligonucleotide
ggauagaggcugccucagg

SEQ ID NO: 1064714 - RNA, 19 nt, Artificial Sequence
  Description of Artificial Sequence: Synthetic oligonucleotide
aucuccugauagauguaca

SEQ ID NO: 1064715 - RNA, 19 nt, Artificial Sequence
  Description of Artificial Sequence: Synthetic oligonucleotide
gacggucccguaaggucag

SEQ ID NO: 1064716 - RNA, 19 nt, Artificial Sequence
  Description of Artificial Sequence: Synthetic oligonucleotide
aggcacguuauuggucauc

SEQ ID NO: 1064717 - RNA, 19 nt, Artificial Sequence
  Description of Artificial Sequence: Synthetic oligonucleotide
aucaagcuuuaaacgcucu

SEQ ID NO: 1064718 - RNA, 19 nt, Artificial Sequence
  Description of Artificial Sequence: Synthetic oligonucleotide
ccugauagauguacauguc

SEQ ID NO: 1064719 - RNA, 19 nt, Artificial Sequence
  Description of Artificial Sequence: Synthetic oligonucleotide
acgcucuaagagguuuauc

SEQ ID NO: 1064720 - RNA, 19 nt, Artificial Sequence
  Description of Artificial Sequence: Synthetic oligonucleotide
guuaggccaguuuguccuc

SEQ ID NO: 1064721 - RNA, 19 nt, Artificial Sequence
  Description of Artificial Sequence: Synthetic oligonucleotide
accaggauagaggcugccu

SEQ ID NO: 1064722 - RNA, 19 nt, Artificial Sequence
  Description of Artificial Sequence: Synthetic oligonucleotide
ggcacguuauuggucauca

SEQ ID NO: 1064723 - RNA, 19 nt, Artificial Sequence
  Description of Artificial Sequence: Synthetic oligonucleotide
ccggucucuugcaauagug

SEQ ID NO: 1064724 - RNA, 19 nt, Artificial Sequence
  Description of Artificial Sequence: Synthetic oligonucleotide
gcauuugccagaaaacucu

SEQ ID NO: 1064725 - RNA, 19 nt, Artificial Sequence
  Description of Artificial Sequence: Synthetic oligonucleotide
gggucaaucguauccuaaa

SEQ ID NO: 1064726 - RNA, 19 nt, Artificial Sequence
  Description of Artificial Sequence: Synthetic oligonucleotide
gguauaucagaagccagcu

SEQ ID NO: 1064727 - RNA, 19 nt, Artificial Sequence
  Description of Artificial Sequence: Synthetic oligonucleotide
ccaggauagaggcugccuc

SEQ ID NO: 1064728 - RNA, 19 nt, Artificial Sequence
  Description of Artificial Sequence: Synthetic oligonucleotide
cccguaaggucaguaagag

SEQ ID NO: 1064729 - RNA, 19 nt, Artificial Sequence
  Description of Artificial Sequence: Synthetic oligonucleotide
cagaauuuuaugccagaau

SEQ ID NO: 1064730 - RNA, 19 nt, Artificial Sequence
  Description of Artificial Sequence: Synthetic oligonucleotide
gguuagccaggauuaucuc

SEQ ID NO: 1064731 - RNA, 19 nt, Artificial Sequence
  Description of Artificial Sequence: Synthetic oligonucleotide
uccucaaauugagcagaau

SEQ ID NO: 1064732 - RNA, 19 nt, Artificial Sequence
  Description of Artificial Sequence: Synthetic oligonucleotide
gugugugaugaauggccaa

SEQ ID NO: 1064733 - RNA, 19 nt, Artificial Sequence
  Description of Artificial Sequence: Synthetic oligonucleotide
cucacgaaacuaagaagau

SEQ ID NO: 1064734 - RNA, 19 nt, Artificial Sequence
  Description of Artificial Sequence: Synthetic oligonucleotide
aggccaguuuaugccaaca

SEQ ID NO: 1064735 - RNA, 19 nt, Artificial Sequence
  Description of Artificial Sequence: Synthetic oligonucleotide
gucuacuuggcgagucaac

SEQ ID NO: 1064736 - RNA, 19 nt, Artificial Sequence
  Description of Artificial Sequence: Synthetic oligonucleotide
guagugcagaaccaauguu

SEQ ID NO: 1064737 - RNA, 19 nt, Artificial Sequence
  Description of Artificial Sequence: Synthetic oligonucleotide
agaaugaugcaggcuucuu

SEQ ID NO: 1064738 - RNA, 19 nt, Artificial Sequence
  Description of Artificial Sequence: Synthetic oligonucleotide
gggcauuauucucugcaaa

SEQ ID NO: 1064739 - RNA, 19 nt, Artificial Sequence
  Description of Artificial Sequence: Synthetic oligonucleotide
ggauuaucuccugauagau

SEQ ID NO: 1064740 - RNA, 19 nt, Artificial Sequence
  Description of Artificial Sequence: Synthetic oligonucleotide
ccaggguaccauauaucuc

SEQ ID NO: 1064741 - RNA, 19 nt, Artificial Sequence
  Description of Artificial Sequence: Synthetic oligonucleotide
gaggacuccugaagcuuga

SEQ ID NO: 1064742 - RNA, 19 nt, Artificial Sequence
  Description of Artificial Sequence: Synthetic oligonucleotide
acugggugugugugaugaa

SEQ ID NO: 1064743 - RNA, 19 nt, Artificial Sequence
  Description of Artificial Sequence: Synthetic oligonucleotide
uggccccgagaucauccau

SEQ ID NO: 1064744 - RNA, 19 nt, Artificial Sequence
  Description of Artificial Sequence: Synthetic oligonucleotide
ccauggaggcuaguugucc

SEQ ID NO: 1064745 - RNA, 19 nt, Artificial Sequence
  Description of Artificial Sequence: Synthetic oligonucleotide
ggaggcuaguugucccagc

SEQ ID NO: 1064746 - RNA, 19 nt, Artificial Sequence
  Description of Artificial Sequence: Synthetic oligonucleotide
gagauguaguucacggcau

SEQ ID NO: 1064747 - RNA, 19 nt, Artificial Sequence
  Description of Artificial Sequence: Synthetic oligonucleotide
caguuuaugccaacagcuu

SEQ ID NO: 1064748 - RNA, 19 nt, Artificial Sequence
  Description of Artificial Sequence: Synthetic oligonucleotide
cuacuuggcgagucaacau

SEQ ID NO: 1064749 - RNA, 19 nt, Artificial Sequence
  Description of Artificial Sequence: Synthetic oligonucleotide
gcacguuauuggucaucag

SEQ ID NO: 1064750 - RNA, 19 nt, Artificial Sequence
  Description of Artificial Sequence: Synthetic oligonucleotide
caucaccugggucaaucgu

SEQ ID NO: 1064751 - RNA, 19 nt, Artificial Sequence
  Description of Artificial Sequence: Synthetic oligonucleotide
ggugaucauggccccgaga

SEQ ID NO: 1064752 - RNA, 19 nt, Artificial Sequence
  Description of Artificial Sequence: Synthetic oligonucleotide
agauuccgugucauaucaa

SEQ ID NO: 1064753 - RNA, 19 nt, Artificial Sequence
  Description of Artificial Sequence: Synthetic oligonucleotide
ggacaucuuuuaggaguag

SEQ ID NO: 1064754 - RNA, 19 nt, Artificial Sequence
  Description of Artificial Sequence: Synthetic oligonucleotide
caccugggucaaucguauc

SEQ ID NO: 1064755 - RNA, 19 nt, Artificial Sequence
  Description of Artificial Sequence: Synthetic oligonucleotide
ggcucucacgaaacuaaga

SEQ ID NO: 1064756 - RNA, 19 nt, Artificial Sequence
  Description of Artificial Sequence: Synthetic oligonucleotide
agcuugagacugggugugu

SEQ ID NO: 1064757 - RNA, 19 nt, Artificial Sequence
  Description of Artificial Sequence: Synthetic oligonucleotide
gcuucucuacaagcauuug

SEQ ID NO: 1064758 - RNA, 19 nt, Artificial Sequence
  Description of Artificial Sequence: Synthetic oligonucleotide
cugggucaaucguauccua

SEQ ID NO: 1064759 - RNA, 19 nt, Artificial Sequence
  Description of Artificial Sequence: Synthetic oligonucleotide
uugcagcgucuuucacuuc

SEQ ID NO: 1064760 - RNA, 19 nt, Artificial Sequence
  Description of Artificial Sequence: Synthetic oligonucleotide
ugagagcauugaguccauu

SEQ ID NO: 1064761 - RNA, 19 nt, Artificial Sequence
  Description of Artificial Sequence: Synthetic oligonucleotide
gggugaucauggccccgag

SEQ ID NO: 1064762 - RNA, 19 nt, Artificial Sequence
  Description of Artificial Sequence: Synthetic oligonucleotide
ggucuacuuggcgagucaa

SEQ ID NO: 1064763 - RNA, 19 nt, Artificial Sequence
  Description of Artificial Sequence: Synthetic oligonucleotide
ccucugacagaauaugcau

SEQ ID NO: 1064764 - RNA, 19 nt, Artificial Sequence
  Description of Artificial Sequence: Synthetic oligonucleotide
cccgagaucauccauccau

SEQ ID NO: 1064765 - RNA, 19 nt, Artificial Sequence
  Description of Artificial Sequence: Synthetic oligonucleotide
ggaagucaaguggagcccu

SEQ ID NO: 1064766 - RNA, 19 nt, Artificial Sequence
  Description of Artificial Sequence: Synthetic oligonucleotide
cggaagucaaguggagccc

SEQ ID NO: 1064767 - RNA, 19 nt, Artificial Sequence
  Description of Artificial Sequence: Synthetic oligonucleotide
cagaaugaugcaggcuucu

SEQ ID NO: 1064768 - RNA, 19 nt, Artificial Sequence
  Description of Artificial Sequence: Synthetic oligonucleotide
cugggugugugugaugaau

SEQ ID NO: 1064769 - RNA, 19 nt, Artificial Sequence
  Description of Artificial Sequence: Synthetic oligonucleotide
ggcugccucaggcacguua

SEQ ID NO: 1064770 - RNA, 19 nt, Artificial Sequence
  Description of Artificial Sequence: Synthetic oligonucleotide
ggcuagugauagaacugaa

SEQ ID NO: 1064771 - RNA, 19 nt, Artificial Sequence
  Description of Artificial Sequence: Synthetic oligonucleotide
ggaguagugcagaaccaau

SEQ ID NO: 1064772 - RNA, 19 nt, Artificial Sequence
  Description of Artificial Sequence: Synthetic oligonucleotide
cucuugcaauagugagaaa

SEQ ID NO: 1064773 - RNA, 19 nt, Artificial Sequence
  Description of Artificial Sequence: Synthetic oligonucleotide
ccgugucauaucaaacugu

SEQ ID NO: 1064774 - RNA, 19 nt, Artificial Sequence
  Description of Artificial Sequence: Synthetic oligonucleotide
cuguggcucucacgaaacu

SEQ ID NO: 1064775 - RNA, 19 nt, Artificial Sequence
  Description of Artificial Sequence: Synthetic oligonucleotide
gugcuaggauagccaugaa

SEQ ID NO: 1064776 - RNA, 19 nt, Artificial Sequence
  Description of Artificial Sequence: Synthetic oligonucleotide
caacagcuugagacugggu

SEQ ID NO: 1064777 - RNA, 19 nt, Artificial Sequence
  Description of Artificial Sequence: Synthetic oligonucleotide
caguaagagugggcaagcu

SEQ ID NO: 1064778 - RNA, 19 nt, Artificial Sequence
  Description of Artificial Sequence: Synthetic oligonucleotide
cacugguaagcuuguccuu

SEQ ID NO: 1064779 - RNA, 19 nt, Artificial Sequence
  Description of Artificial Sequence: Synthetic oligonucleotide
caucugaggcuuguagcuu

SEQ ID NO: 1064780 - RNA, 19 nt, Artificial Sequence
  Description of Artificial Sequence: Synthetic oligonucleotide
gcagacggucccguaaggu

SEQ ID NO: 1064781 - RNA, 19 nt, Artificial Sequence
  Description of Artificial Sequence: Synthetic oligonucleotide
cguauccuaaagucaucua

SEQ ID NO: 1064782 - RNA, 19 nt, Artificial Sequence
  Description of Artificial Sequence: Synthetic oligonucleotide
ccguaaggucaguaagagu

SEQ ID NO: 1064783 - RNA, 19 nt, Artificial Sequence
  Description of Artificial Sequence: Synthetic oligonucleotide
gcaacuuacugagggcauu

SEQ ID NO: 1064784 - RNA, 19 nt, Artificial Sequence
  Description of Artificial Sequence: Synthetic oligonucleotide
acggucccguaaggucagu

SEQ ID NO: 1064785 - RNA, 19 nt, Artificial Sequence
  Description of Artificial Sequence: Synthetic oligonucleotide
ggauagccaugaacacugu

SEQ ID NO: 1064786 - RNA, 19 nt, Artificial Sequence
  Description of Artificial Sequence: Synthetic oligonucleotide
caggcacguuauuggucau

SEQ ID NO: 1064787 - RNA, 19 nt, Artificial Sequence
  Description of Artificial Sequence: Synthetic oligonucleotide
ccccgagaucauccaucca

SEQ ID NO: 1064788 - RNA, 19 nt, Artificial Sequence
  Description of Artificial Sequence: Synthetic oligonucleotide
cugccucaggcacguuauu

SEQ ID NO: 1064789 - RNA, 19 nt, Artificial Sequence
  Description of Artificial Sequence: Synthetic oligonucleotide
cugcacagucuggaaccuu

SEQ ID NO: 1064790 - RNA, 19 nt, Artificial Sequence
  Description of Artificial Sequence: Synthetic oligonucleotide
agagcaauacuccaaaugc

SEQ ID NO: 1064791 - RNA, 19 nt, Artificial Sequence
  Description of Artificial Sequence: Synthetic oligonucleotide
aauaccaaaguauaaugca

SEQ ID NO: 1064792 - RNA, 19 nt, Artificial Sequence
  Description of Artificial Sequence: Synthetic oligonucleotide
aauauaguggcacaucaug

SEQ ID NO: 1064793 - RNA, 19 nt, Artificial Sequence
  Description of Artificial Sequence: Synthetic oligonucleotide
aaaagggaaaugccgaccg

SEQ ID NO: 1064794 - RNA, 19 nt, Artificial Sequence
  Description of Artificial Sequence: Synthetic oligonucleotide
aaaauauaguggcacauca

SEQ ID NO: 1064795 - RNA, 19 nt, Artificial Sequence
  Description of Artificial Sequence: Synthetic oligonucleotide
aagccugcaaagucgaccc

SEQ ID NO: 1064796 - RNA, 19 nt, Artificial Sequence
  Description of Artificial Sequence: Synthetic oligonucleotide
acaguggugaacuauuuac

SEQ ID NO: 1064797 - RNA, 19 nt, Artificial Sequence
  Description of Artificial Sequence: Synthetic oligonucleotide
uguacgaugucgcugaucu

SEQ ID NO: 1064798 - RNA, 19 nt, Artificial Sequence
  Description of Artificial Sequence: Synthetic oligonucleotide
aaugguuuuccccaaccag

SEQ ID NO: 1064799 - RNA, 19 nt, Artificial Sequence
  Description of Artificial Sequence: Synthetic oligonucleotide
uggugaacuauuuacaugu

SEQ ID NO: 1064800 - RNA, 19 nt, Artificial Sequence
  Description of Artificial Sequence: Synthetic oligonucleotide
auagguagcaauuucccag

SEQ ID NO: 1064801 - RNA, 19 nt, Artificial Sequence
  Description of Artificial Sequence: Synthetic oligonucleotide
uugauagagaacuuguugu

SEQ ID NO: 1064802 - RNA, 19 nt, Artificial Sequence
  Description of Artificial Sequence: Synthetic oligonucleotide
auagagaacuuguuguagg

SEQ ID NO: 1064803 - RNA, 19 nt, Artificial Sequence
  Description of Artificial Sequence: Synthetic oligonucleotide
guaauaccaaaguauaaug

SEQ ID NO: 1064804 - RNA, 19 nt, Artificial Sequence
  Description of Artificial Sequence: Synthetic oligonucleotide
ugaacuauuuacaugucau

SEQ ID NO: 1064805 - RNA, 19 nt, Artificial Sequence
  Description of Artificial Sequence: Synthetic oligonucleotide
aaaaccggaccccauuauc

SEQ ID NO: 1064806 - RNA, 19 nt, Artificial Sequence
  Description of Artificial Sequence: Synthetic oligonucleotide
agaggaaaucaucucuacc

SEQ ID NO: 1064807 - RNA, 19 nt, Artificial Sequence
  Description of Artificial Sequence: Synthetic oligonucleotide
guagcaauuucccagagca

SEQ ID NO: 1064808 - RNA, 19 nt, Artificial Sequence
  Description of Artificial Sequence: Synthetic oligonucleotide
cauuaucaaggcaaggacc

SEQ ID NO: 1064809 - RNA, 19 nt, Artificial Sequence
  Description of Artificial Sequence: Synthetic oligonucleotide
accaccagaaaaccggacc

SEQ ID NO: 1064810 - RNA, 19 nt, Artificial Sequence
  Description of Artificial Sequence: Synthetic oligonucleotide
agcaacaacagaccagucg

SEQ ID NO: 1064811 - RNA, 19 nt, Artificial Sequence
  Description of Artificial Sequence: Synthetic oligonucleotide
ugcuucauggugaugucgg

SEQ ID NO: 1064812 - RNA, 19 nt, Artificial Sequence
  Description of Artificial Sequence: Synthetic oligonucleotide
agcaauacuccaaaugccc

SEQ ID NO: 1064813 - RNA, 19 nt, Artificial Sequence
  Description of Artificial Sequence: Synthetic oligonucleotide
ucaucaaccugcuuaggcc

SEQ ID NO: 1064814 - RNA, 19 nt, Artificial Sequence
  Description of Artificial Sequence: Synthetic oligonucleotide
ggugacaugccauagguag

SEQ ID NO: 1064815 - RNA, 19 nt, Artificial Sequence
  Description of Artificial Sequence: Synthetic oligonucleotide
uucagggcgcuccauacgg

SEQ ID NO: 1064816 - RNA, 19 nt, Artificial Sequence
  Description of Artificial Sequence: Synthetic oligonucleotide
uguaauaccaaaguauaau

SEQ ID NO: 1064817 - RNA, 19 nt, Artificial Sequence
  Description of Artificial Sequence: Synthetic oligonucleotide
uccgaggagacguagagcu

SEQ ID NO: 1064818 - RNA, 19 nt, Artificial Sequence
  Description of Artificial Sequence: Synthetic oligonucleotide
aaguguaauaccaaaguau

SEQ ID NO: 1064819 - RNA, 19 nt, Artificial Sequence
  Description of Artificial Sequence: Synthetic oligonucleotide
accugcuuaggccaaaauc

SEQ ID NO: 1064820 - RNA, 19 nt, Artificial Sequence
  Description of Artificial Sequence: Synthetic oligonucleotide
auacuggacguccuggaac

SEQ ID NO: 1064821 - RNA, 19 nt, Artificial Sequence
  Description of Artificial Sequence: Synthetic oligonucleotide
ucauaaaccugugacaggu

SEQ ID NO: 1064822 - RNA, 19 nt, Artificial Sequence
  Description of Artificial Sequence: Synthetic oligonucleotide
gcaacaacagaccagucgg

SEQ ID NO: 1064823 - RNA, 19 nt, Artificial Sequence
  Description of Artificial Sequence: Synthetic oligonucleotide
augcaaaauauaguggcac

SEQ ID NO: 1064824 - RNA, 19 nt, Artificial Sequence
  Description of Artificial Sequence: Synthetic oligonucleotide
uuggugguuaagcagcagc

SEQ ID NO: 1064825 - RNA, 19 nt, Artificial Sequence
  Description of Artificial Sequence: Synthetic oligonucleotide
aacaugcucgcaugaguuc

SEQ ID NO: 1064826 - RNA, 19 nt, Artificial Sequence
  Description of Artificial Sequence: Synthetic oligonucleotide
acuacagagagauuuggaa

SEQ ID NO: 1064827 - RNA, 19 nt, Artificial Sequence
  Description of Artificial Sequence: Synthetic oligonucleotide
uacgaugucgcugaucucc

SEQ ID NO: 1064828 - RNA, 19 nt, Artificial Sequence
  Description of Artificial Sequence: Synthetic oligonucleotide
aggggauugugcuaugagg

SEQ ID NO: 1064829 - RNA, 19 nt, Artificial Sequence
  Description of Artificial Sequence: Synthetic oligonucleotide
aacuauuuacaugucauuu

SEQ ID NO: 1064830 - RNA, 19 nt, Artificial Sequence
  Description of Artificial Sequence: Synthetic oligonucleotide
uuuucaaggccgcuggcga

SEQ ID NO: 1064831 - RNA, 19 nt, Artificial Sequence
  Description of Artificial Sequence: Synthetic oligonucleotide
accagagucaaggagccgc

SEQ ID NO: 1064832 - RNA, 19 nt, Artificial Sequence
  Description of Artificial Sequence: Synthetic oligonucleotide
uaccuugugaacacggugu

SEQ ID NO: 1064833 - RNA, 19 nt, Artificial Sequence
  Description of Artificial Sequence: Synthetic oligonucleotide
aacaauccagaggaaauca

SEQ ID NO: 1064834 - RNA, 19 nt, Artificial Sequence
  Description of Artificial Sequence: Synthetic oligonucleotide
uguacuucuuccacacacc

SEQ ID NO: 1064835 - RNA, 19 nt, Artificial Sequence
  Description of Artificial Sequence: Synthetic oligonucleotide
agaacaaaauguacuggac

SEQ ID NO: 1064836 - RNA, 19 nt, Artificial Sequence
  Description of Artificial Sequence: Synthetic oligonucleotide
uagagaacuuguuguaggc

SEQ ID NO: 1064837 - RNA, 19 nt, Artificial Sequence
  Description of Artificial Sequence: Synthetic oligonucleotide
ugcaaaauauaguggcaca

SEQ ID NO: 1064838 - RNA, 19 nt, Artificial Sequence
  Description of Artificial Sequence: Synthetic oligonucleotide
cacaccuucguacaccucc

SEQ ID NO: 1064839 - RNA, 19 nt, Artificial Sequence
  Description of Artificial Sequence: Synthetic oligonucleotide
ugcuaugaggacuauggaa

SEQ ID NO: 1064840 - RNA, 19 nt, Artificial Sequence
  Description of Artificial Sequence: Synthetic oligonucleotide
cucgcaugaguucauagac

SEQ ID NO: 1064841 - RNA, 19 nt, Artificial Sequence
  Description of Artificial Sequence: Synthetic oligonucleotide
auacagaacaaaauguacu

SEQ ID NO: 1064842 - RNA, 19 nt, Artificial Sequence
  Description of Artificial Sequence: Synthetic oligonucleotide
agaucuuugggcuggcaug

SEQ ID NO: 1064843 - RNA, 19 nt, Artificial Sequence
  Description of Artificial Sequence: Synthetic oligonucleotide
cucaagugagccuuccuag

SEQ ID NO: 1064844 - RNA, 19 nt, Artificial Sequence
  Description of Artificial Sequence: Synthetic oligonucleotide
aguggcacaucaugucagc

SEQ ID NO: 1064845 - RNA, 19 nt, Artificial Sequence
  Description of Artificial Sequence: Synthetic oligonucleotide
uucaccaaaugguuuuccc

SEQ ID NO: 1064846 - RNA, 19 nt, Artificial Sequence
  Description of Artificial Sequence: Synthetic oligonucleotide
uguagaacagccgcuggag

SEQ ID NO: 1064847 - RNA, 19 nt, Artificial Sequence
  Description of Artificial Sequence: Synthetic oligonucleotide
ugaacacggugucagggca

SEQ ID NO: 1064848 - RNA, 19 nt, Artificial Sequence
  Description of Artificial Sequence: Synthetic oligonucleotide
guucauagaccuucuccgg

SEQ ID NO: 1064849 - RNA, 19 nt, Artificial Sequence
  Description of Artificial Sequence: Synthetic oligonucleotide
ugugccuagugguugcucc

SEQ ID NO: 1064850 - RNA, 19 nt, Artificial Sequence
  Description of Artificial Sequence: Synthetic oligonucleotide
gcuaugaggacuauggaag

SEQ ID NO: 1064851 - RNA, 19 nt, Artificial Sequence
  Description of Artificial Sequence: Synthetic oligonucleotide
gucaucaaccugcuuaggc

SEQ ID NO: 1064852 - RNA, 19 nt, Artificial Sequence
  Description of Artificial Sequence: Synthetic oligonucleotide
ggggacacgccguagaugg

SEQ ID NO: 1064853 - RNA, 19 nt, Artificial Sequence
  Description of Artificial Sequence: Synthetic oligonucleotide
caugguuucaaaggcuugg

SEQ ID NO: 1064854 - RNA, 19 nt, Artificial Sequence
  Description of Artificial Sequence: Synthetic oligonucleotide
gcuuguugcgcuuaggagc

SEQ ID NO: 1064855 - RNA, 19 nt, Artificial Sequence
  Description of Artificial Sequence: Synthetic oligonucleotide
cagagcaauacuccaaaug

SEQ ID NO: 1064856 - RNA, 19 nt, Artificial Sequence
  Description of Artificial Sequence: Synthetic oligonucleotide
cuaccagagucaaggagcc

SEQ ID NO: 1064857 - RNA, 19 nt, Artificial Sequence
  Description of Artificial Sequence: Synthetic oligonucleotide
auguacuggacugagaaaa

SEQ ID NO: 1064858 - RNA, 19 nt, Artificial Sequence
  Description of Artificial Sequence: Synthetic oligonucleotide
gaaaugccgaccgugugcc

SEQ ID NO: 1064859 - RNA, 19 nt, Artificial Sequence
  Description of Artificial Sequence: Synthetic oligonucleotide
caauacuccaaaugcccag

SEQ ID NO: 1064860 - RNA, 19 nt, Artificial Sequence
  Description of Artificial Sequence: Synthetic oligonucleotide
cugucaucaaccugcuuag

SEQ ID NO: 1064861 - RNA, 19 nt, Artificial Sequence
  Description of Artificial Sequence: Synthetic oligonucleotide
uacuggacguccuggaaca

SEQ ID NO: 1064862 - RNA, 19 nt, Artificial Sequence
  Description of Artificial Sequence: Synthetic oligonucleotide
uggugaacuaacucagcca

SEQ ID NO: 1064863 - RNA, 19 nt, Artificial Sequence
  Description of Artificial Sequence: Synthetic oligonucleotide
agugguugcuccuuucugu

SEQ ID NO: 1064864 - RNA, 19 nt, Artificial Sequence
  Description of Artificial Sequence: Synthetic oligonucleotide
auagguguccccugucauc

SEQ ID NO: 1064865 - RNA, 19 nt, Artificial Sequence
  Description of Artificial Sequence: Synthetic oligonucleotide
uggguaaggugacaugcca

SEQ ID NO: 1064866 - RNA, 19 nt, Artificial Sequence
  Description of Artificial Sequence: Synthetic oligonucleotide
aagggaaaugccgaccgug

SEQ ID NO: 1064867 - RNA, 19 nt, Artificial Sequence
  Description of Artificial Sequence: Synthetic oligonucleotide
aaaccggaccccauuauca

SEQ ID NO: 1064868 - RNA, 19 nt, Artificial Sequence
  Description of Artificial Sequence: Synthetic oligonucleotide
agcucauaaaccugugaca

SEQ ID NO: 1064869 - RNA, 19 nt, Artificial Sequence
  Description of Artificial Sequence: Synthetic oligonucleotide
aagucgacccugccccagc

SEQ ID NO: 1064870 - RNA, 19 nt, Artificial Sequence
  Description of Artificial Sequence: Synthetic oligonucleotide
agucauauacagaacaaaa

SEQ ID NO: 1064871 - RNA, 19 nt, Artificial Sequence
  Description of Artificial Sequence: Synthetic oligonucleotide
auacuccaaaugcccagac

SEQ ID NO: 1064872 - RNA, 19 nt, Artificial Sequence
  Description of Artificial Sequence: Synthetic oligonucleotide
ggcgcgguccacuugaugg

SEQ ID NO: 1064873 - RNA, 19 nt, Artificial Sequence
  Description of Artificial Sequence: Synthetic oligonucleotide
aggaccagagaggaugagc

SEQ ID NO: 1064874 - RNA, 19 nt, Artificial Sequence
  Description of Artificial Sequence: Synthetic oligonucleotide
aauacuccaaaugcccaga

SEQ ID NO: 1064875 - RNA, 19 nt, Artificial Sequence
  Description of Artificial Sequence: Synthetic oligonucleotide
auccagaggaaaucaucuc

SEQ ID NO: 1064876 - RNA, 19 nt, Artificial Sequence
  Description of Artificial Sequence: Synthetic oligonucleotide
aaugccgaccgugugccag

SEQ ID NO: 1064877 - RNA, 19 nt, Artificial Sequence
  Description of Artificial Sequence: Synthetic oligonucleotide
aguguaauaccaaaguaua

SEQ ID NO: 1064878 - RNA, 19 nt, Artificial Sequence
  Description of Artificial Sequence: Synthetic oligonucleotide
gacauggccuggcuaagcc

SEQ ID NO: 1064879 - RNA, 19 nt, Artificial Sequence
  Description of Artificial Sequence: Synthetic oligonucleotide
gacgucugacuugauagag

SEQ ID NO: 1064880 - RNA, 19 nt, Artificial Sequence
  Description of Artificial Sequence: Synthetic oligonucleotide
ugguuaagcagcagcucug

SEQ ID NO: 1064881 - RNA, 19 nt, Artificial Sequence
  Description of Artificial Sequence: Synthetic oligonucleotide
cuuuucaaggccgcuggcg

SEQ ID NO: 1064882 - RNA, 19 nt, Artificial Sequence
  Description of Artificial Sequence: Synthetic oligonucleotide
gagcaauacuccaaaugcc

SEQ ID NO: 1064883 - RNA, 19 nt, Artificial Sequence
  Description of Artificial Sequence: Synthetic oligonucleotide
guagaacagccgcuggagg

SEQ ID NO: 1064884 - RNA, 19 nt, Artificial Sequence
  Description of Artificial Sequence: Synthetic oligonucleotide
gcucauaaaccugugacag

SEQ ID NO: 1064885 - RNA, 19 nt, Artificial Sequence
  Description of Artificial Sequence: Synthetic oligonucleotide
gugcagagcuuuaaaaugc

SEQ ID NO: 1064886 - RNA, 19 nt, Artificial Sequence
  Description of Artificial Sequence: Synthetic oligonucleotide
guggugaacuauuuacaug

SEQ ID NO: 1064887 - RNA, 19 nt, Artificial Sequence
  Description of Artificial Sequence: Synthetic oligonucleotide
auauaguggcacaucaugu

SEQ ID NO: 1064888 - RNA, 19 nt, Artificial Sequence
  Description of Artificial Sequence: Synthetic oligonucleotide
cucuaccagagucaaggag

SEQ ID NO: 1064889 - RNA, 19 nt, Artificial Sequence
  Description of Artificial Sequence: Synthetic oligonucleotide
aacacggugucagggcacg

SEQ ID NO: 1064890 - RNA, 19 nt, Artificial Sequence
  Description of Artificial Sequence: Synthetic oligonucleotide
acugccaacaugcucgcau

SEQ ID NO: 1064891 - RNA, 19 nt, Artificial Sequence
  Description of Artificial Sequence: Synthetic oligonucleotide
guaccuugugaacacggug

SEQ ID NO: 1064892 - RNA, 19 nt, Artificial Sequence
  Description of Artificial Sequence: Synthetic oligonucleotide
gaggggauugugcuaugag

SEQ ID NO: 1064893 - RNA, 19 nt, Artificial Sequence
  Description of Artificial Sequence: Synthetic oligonucleotide
cugcuuaggccaaaaucag

SEQ ID NO: 1064894 - RNA, 19 nt, Artificial Sequence
  Description of Artificial Sequence: Synthetic oligonucleotide
ugcuaccucuguacgaugu

SEQ ID NO: 1064895 - RNA, 19 nt, Artificial Sequence
  Description of Artificial Sequence: Synthetic oligonucleotide
uggucuugugggcagcucu

SEQ ID NO: 1064896 - RNA, 19 nt, Artificial Sequence
  Description of Artificial Sequence: Synthetic oligonucleotide
ugguggauuucagcaaagg

SEQ ID NO: 1064897 - RNA, 19 nt, Artificial Sequence
  Description of Artificial Sequence: Synthetic oligonucleotide
gugaacuauuuacauguca

SEQ ID NO: 1064898 - RNA, 19 nt, Artificial Sequence
  Description of Artificial Sequence: Synthetic oligonucleotide
ugcucgcaugaguucauag

SEQ ID NO: 1064899 - RNA, 19 nt, Artificial Sequence
  Description of Artificial Sequence: Synthetic oligonucleotide
uccaaaugcccagacgucu

SEQ ID NO: 1064900 - RNA, 19 nt, Artificial Sequence
  Description of Artificial Sequence: Synthetic oligonucleotide
uaaaccugugacaggucaa

SEQ ID NO: 1064901 - RNA, 19 nt, Artificial Sequence
  Description of Artificial Sequence: Synthetic oligonucleotide
aaagggaaaugccgaccgu

SEQ ID NO: 1064902 - RNA, 19 nt, Artificial Sequence
  Description of Artificial Sequence: Synthetic oligonucleotide
uguugcgcuuaggagcugg

SEQ ID NO: 1064903 - RNA, 19 nt, Artificial Sequence
  Description of Artificial Sequence: Synthetic oligonucleotide
cuaccucuguacgaugucg

SEQ ID NO: 1064904 - RNA, 19 nt, Artificial Sequence
  Description of Artificial Sequence: Synthetic oligonucleotide
gaccccauuaucaaggcaa

SEQ ID NO: 1064905 - RNA, 19 nt, Artificial Sequence
  Description of Artificial Sequence: Synthetic oligonucleotide
agugagccuuccuagcugu

SEQ ID NO: 1064906 - RNA, 19 nt, Artificial Sequence
  Description of Artificial Sequence: Synthetic oligonucleotide
uuucaaggccgcuggcgag

SEQ ID NO: 1064907 - RNA, 19 nt, Artificial Sequence
  Description of Artificial Sequence: Synthetic oligonucleotide
ucgggcuguagaacagccg

SEQ ID NO: 1064908 - RNA, 19 nt, Artificial Sequence
  Description of Artificial Sequence: Synthetic oligonucleotide
cuuaggagcuggguagugg

SEQ ID NO: 1064909 - RNA, 19 nt, Artificial Sequence
  Description of Artificial Sequence: Synthetic oligonucleotide
caaaauauaguggcacauc

SEQ ID NO: 1064910 - RNA, 19 nt, Artificial Sequence
  Description of Artificial Sequence: Synthetic oligonucleotide
ugcgcuuaggagcugggua

SEQ ID NO: 1064911 - RNA, 19 nt, Artificial Sequence
  Description of Artificial Sequence: Synthetic oligonucleotide
cugccuucaucacugcagc

SEQ ID NO: 1064912 - RNA, 19 nt, Artificial Sequence
  Description of Artificial Sequence: Synthetic oligonucleotide
cuggguaaggugacaugcc

SEQ ID NO: 1064913 - RNA, 19 nt, Artificial Sequence
  Description of Artificial Sequence: Synthetic oligonucleotide
gugaacacggugucagggc

SEQ ID NO: 1064914 - RNA, 19 nt, Artificial Sequence
  Description of Artificial Sequence: Synthetic oligonucleotide
agucgacccugccccagcc

SEQ ID NO: 1064915 - RNA, 19 nt, Artificial Sequence
  Description of Artificial Sequence: Synthetic oligonucleotide
agauacuggacguccugga

SEQ ID NO: 1064916 - RNA, 19 nt, Artificial Sequence
  Description of Artificial Sequence: Synthetic oligonucleotide
gguacugccucccucgggc

SEQ ID NO: 1064917 - RNA, 19 nt, Artificial Sequence
  Description of Artificial Sequence: Synthetic oligonucleotide
agaaaaccggaccccauua

SEQ ID NO: 1064918 - RNA, 19 nt, Artificial Sequence
  Description of Artificial Sequence: Synthetic oligonucleotide
ucaaggagccgcccacgcc

SEQ ID NO: 1064919 - RNA, 19 nt, Artificial Sequence
  Description of Artificial Sequence: Synthetic oligonucleotide
cagaggaaaucaucucuac

SEQ ID NO: 1064920 - RNA, 19 nt, Artificial Sequence
  Description of Artificial Sequence: Synthetic oligonucleotide
caucaaccugcuuaggcca

SEQ ID NO: 1064921 - RNA, 19 nt, Artificial Sequence
  Description of Artificial Sequence: Synthetic oligonucleotide
guagaugguuggcuuguug

SEQ ID NO: 1064922 - RNA, 19 nt, Artificial Sequence
  Description of Artificial Sequence: Synthetic oligonucleotide
ucgacccugccccagccug

SEQ ID NO: 1064923 - RNA, 19 nt, Artificial Sequence
  Description of Artificial Sequence: Synthetic oligonucleotide
acugggcuaagcacugccc

SEQ ID NO: 1064924 - RNA, 19 nt, Artificial Sequence
  Description of Artificial Sequence: Synthetic oligonucleotide
aaccggaccccauuaucaa

SEQ ID NO: 1064925 - RNA, 19 nt, Artificial Sequence
  Description of Artificial Sequence: Synthetic oligonucleotide
cauagguagcaauuuccca

SEQ ID NO: 1064926 - RNA, 19 nt, Artificial Sequence
  Description of Artificial Sequence: Synthetic oligonucleotide
agucgguaccuugugaaca

SEQ ID NO: 1064927 - RNA, 19 nt, Artificial Sequence
  Description of Artificial Sequence: Synthetic oligonucleotide
agagucaaggagccgccca

SEQ ID NO: 1064928 - RNA, 19 nt, Artificial Sequence
  Description of Artificial Sequence: Synthetic oligonucleotide
aaaccugugacaggucaau

SEQ ID NO: 1064929 - RNA, 19 nt, Artificial Sequence
  Description of Artificial Sequence: Synthetic oligonucleotide
ucucuaccagagucaagga

SEQ ID NO: 1064930 - RNA, 19 nt, Artificial Sequence
  Description of Artificial Sequence: Synthetic oligonucleotide
uuaucaaggcaaggaccag

SEQ ID NO: 1064931 - RNA, 19 nt, Artificial Sequence
  Description of Artificial Sequence: Synthetic oligonucleotide
acaugcucgcaugaguuca

SEQ ID NO: 1064932 - RNA, 19 nt, Artificial Sequence
  Description of Artificial Sequence: Synthetic oligonucleotide
uggaaugguggugaacuaa

SEQ ID NO: 1064933 - RNA, 19 nt, Artificial Sequence
  Description of Artificial Sequence: Synthetic oligonucleotide
agacgucugacuugauaga

SEQ ID NO: 1064934 - RNA, 19 nt, Artificial Sequence
  Description of Artificial Sequence: Synthetic oligonucleotide
cuucagggcgcuccauacg

SEQ ID NO: 1064935 - RNA, 19 nt, Artificial Sequence
  Description of Artificial Sequence: Synthetic oligonucleotide
guauagguguccccuguca

SEQ ID NO: 1064936 - RNA, 19 nt, Artificial Sequence
  Description of Artificial Sequence: Synthetic oligonucleotide
gguggauuucagcaaagga

SEQ ID NO: 1064937 - RNA, 19 nt, Artificial Sequence
  Description of Artificial Sequence: Synthetic oligonucleotide
auagaccuucuccgggcag

SEQ ID NO: 1064938 - RNA, 19 nt, Artificial Sequence
  Description of Artificial Sequence: Synthetic oligonucleotide
acaccuucguacaccuccc

SEQ ID NO: 1064939 - RNA, 19 nt, Artificial Sequence
  Description of Artificial Sequence: Synthetic oligonucleotide
ccauuaucaaggcaaggac

SEQ ID NO: 1064940 - RNA, 19 nt, Artificial Sequence
  Description of Artificial Sequence: Synthetic oligonucleotide
ucgggcgcgguccacuuga

SEQ ID NO: 1064941 - RNA, 19 nt, Artificial Sequence
  Description of Artificial Sequence: Synthetic oligonucleotide
uccacacaccuucguacac

SEQ ID NO: 1064942 - RNA, 19 nt, Artificial Sequence
  Description of Artificial Sequence: Synthetic oligonucleotide
agagucauauacagaacaa

SEQ ID NO: 1064943 - RNA, 19 nt, Artificial Sequence
  Description of Artificial Sequence: Synthetic oligonucleotide
gucgguaccuugugaacac

SEQ ID NO: 1064944 - RNA, 19 nt, Artificial Sequence
  Description of Artificial Sequence: Synthetic oligonucleotide
cacugggcuaagcacugcc

SEQ ID NO: 1064945 - RNA, 19 nt, Artificial Sequence
  Description of Artificial Sequence: Synthetic oligonucleotide
cuugguggauuucagcaaa

SEQ ID NO: 1064946 - RNA, 19 nt, Artificial Sequence
  Description of Artificial Sequence: Synthetic oligonucleotide
accggaccccauuaucaag

SEQ ID NO: 1064947 - RNA, 19 nt, Artificial Sequence
  Description of Artificial Sequence: Synthetic oligonucleotide
gagagauuuggaauucaaa

SEQ ID NO: 1064948 - RNA, 19 nt, Artificial Sequence
  Description of Artificial Sequence: Synthetic oligonucleotide
ggaugagccugacuucagg

SEQ ID NO: 1064949 - RNA, 19 nt, Artificial Sequence
  Description of Artificial Sequence: Synthetic oligonucleotide
ggcuuguugcgcuuaggag

SEQ ID NO: 1064950 - RNA, 19 nt, Artificial Sequence
  Description of Artificial Sequence: Synthetic oligonucleotide
cccuuggugguuaagcagc

SEQ ID NO: 1064951 - RNA, 19 nt, Artificial Sequence
  Description of Artificial Sequence: Synthetic oligonucleotide
uguccccugucaucaaccu

SEQ ID NO: 1064952 - RNA, 19 nt, Artificial Sequence
  Description of Artificial Sequence: Synthetic oligonucleotide
ccacuugucauaguugggg

SEQ ID NO: 1064953 - RNA, 19 nt, Artificial Sequence
  Description of Artificial Sequence: Synthetic oligonucleotide
aggucaauuccuggguaag

SEQ ID NO: 1064954 - RNA, 19 nt, Artificial Sequence
  Description of Artificial Sequence: Synthetic oligonucleotide
augcucaaaaccaccagaa

SEQ ID NO: 1064955 - RNA, 19 nt, Artificial Sequence
  Description of Artificial Sequence: Synthetic oligonucleotide
cagaccagucgguaccuug

SEQ ID NO: 1064956 - RNA, 19 nt, Artificial Sequence
  Description of Artificial Sequence: Synthetic oligonucleotide
ccggaccccauuaucaagg

SEQ ID NO: 1064957 - RNA, 19 nt, Artificial Sequence
  Description of Artificial Sequence: Synthetic oligonucleotide
uccuggguaaggugacaug

SEQ ID NO: 1064958 - RNA, 19 nt, Artificial Sequence
  Description of Artificial Sequence: Synthetic oligonucleotide
ccuggguaaggugacaugc

SEQ ID NO: 1064959 - RNA, 19 nt, Artificial Sequence
  Description of Artificial Sequence: Synthetic oligonucleotide
gugguuaagcagcagcucu

SEQ ID NO: 1064960 - RNA, 19 nt, Artificial Sequence
  Description of Artificial Sequence: Synthetic oligonucleotide
cauaaaccugugacagguc

SEQ ID NO: 1064961 - RNA, 19 nt, Artificial Sequence
  Description of Artificial Sequence: Synthetic oligonucleotide
aaccugcuuaggccaaaau

SEQ ID NO: 1064962 - RNA, 19 nt, Artificial Sequence
  Description of Artificial Sequence: Synthetic oligonucleotide
uugugcuaugaggacuaug

SEQ ID NO: 1064963 - RNA, 19 nt, Artificial Sequence
  Description of Artificial Sequence: Synthetic oligonucleotide
gcgcuuaggagcuggguag

SEQ ID NO: 1064964 - RNA, 19 nt, Artificial Sequence
  Description of Artificial Sequence: Synthetic oligonucleotide
aggagggccgggucagagg

SEQ ID NO: 1064965 - RNA, 19 nt, Artificial Sequence
  Description of Artificial Sequence: Synthetic oligonucleotide
acacgccguagaugguugg

SEQ ID NO: 1064966 - RNA, 19 nt, Artificial Sequence
  Description of Artificial Sequence: Synthetic oligonucleotide
ucgguaccuugugaacacg

SEQ ID NO: 1064967 - RNA, 19 nt, Artificial Sequence
  Description of Artificial Sequence: Synthetic oligonucleotide
caaaggagggccgggucag

SEQ ID NO: 1064968 - RNA, 19 nt, Artificial Sequence
  Description of Artificial Sequence: Synthetic oligonucleotide
agagagauuuggaauucaa

SEQ ID NO: 1064969 - RNA, 19 nt, Artificial Sequence
  Description of Artificial Sequence: Synthetic oligonucleotide
ggggaauuuggcuccagca

SEQ ID NO: 1064970 - RNA, 19 nt, Artificial Sequence
  Description of Artificial Sequence: Synthetic oligonucleotide
gaccagucgguaccuugug

SEQ ID NO: 1064971 - RNA, 19 nt, Artificial Sequence
  Description of Artificial Sequence: Synthetic oligonucleotide
accagucgguaccuuguga

SEQ ID NO: 1064972 - RNA, 19 nt, Artificial Sequence
  Description of Artificial Sequence: Synthetic oligonucleotide
ggaaugguggugaacuaac

SEQ ID NO: 1064973 - RNA, 19 nt, Artificial Sequence
  Description of Artificial Sequence: Synthetic oligonucleotide
gacacgccguagaugguug

SEQ ID NO: 1064974 - RNA, 19 nt, Artificial Sequence
  Description of Artificial Sequence: Synthetic oligonucleotide
aaggaccagagaggaugag

SEQ ID NO: 1064975 - RNA, 19 nt, Artificial Sequence
  Description of Artificial Sequence: Synthetic oligonucleotide
gguugcuccuuucugugca

SEQ ID NO: 1064976 - RNA, 19 nt, Artificial Sequence
  Description of Artificial Sequence: Synthetic oligonucleotide
ccuggcuaagccugcaaag

SEQ ID NO: 1064977 - RNA, 19 nt, Artificial Sequence
  Description of Artificial Sequence: Synthetic oligonucleotide
ggucaauuccuggguaagg

SEQ ID NO: 1064978 - RNA, 19 nt, Artificial Sequence
  Description of Artificial Sequence: Synthetic oligonucleotide
cagucgguaccuugugaac

SEQ ID NO: 1064979 - RNA, 19 nt, Artificial Sequence
  Description of Artificial Sequence: Synthetic oligonucleotide
ugggccguauagguguccc

SEQ ID NO: 1064980 - RNA, 19 nt, Artificial Sequence
  Description of Artificial Sequence: Synthetic oligonucleotide
cacgccugucucuucucag

SEQ ID NO: 1064981 - RNA, 19 nt, Artificial Sequence
  Description of Artificial Sequence: Synthetic oligonucleotide
guacuucuuccacacaccu

SEQ ID NO: 1064982 - RNA, 19 nt, Artificial Sequence
  Description of Artificial Sequence: Synthetic oligonucleotide
ccgaccgugugccagagug

SEQ ID NO: 1064983 - RNA, 19 nt, Artificial Sequence
  Description of Artificial Sequence: Synthetic oligonucleotide
acguccuggaacaugguuu

SEQ ID NO: 1064984 - RNA, 19 nt, Artificial Sequence
  Description of Artificial Sequence: Synthetic oligonucleotide
cuaagccugcaaagucgac

SEQ ID NO: 1064985 - RNA, 19 nt, Artificial Sequence
  Description of Artificial Sequence: Synthetic oligonucleotide
aucagccaccguggaaugg

SEQ ID NO: 1064986 - RNA, 19 nt, Artificial Sequence
  Description of Artificial Sequence: Synthetic oligonucleotide
guuguaggccaggcucucg

SEQ ID NO: 1064987 - RNA, 19 nt, Artificial Sequence
  Description of Artificial Sequence: Synthetic oligonucleotide
aaaugccgaccgugugcca

SEQ ID NO: 1064988 - RNA, 19 nt, Artificial Sequence
  Description of Artificial Sequence: Synthetic oligonucleotide
gaggagacguagagcuugc

SEQ ID NO: 1064989 - RNA, 19 nt, Artificial Sequence
  Description of Artificial Sequence: Synthetic oligonucleotide
cagaguguugaagcggcuc

SEQ ID NO: 1064990 - RNA, 19 nt, Artificial Sequence
  Description of Artificial Sequence: Synthetic oligonucleotide
cacggugucagggcacggg

SEQ ID NO: 1064991 - RNA, 19 nt, Artificial Sequence
  Description of Artificial Sequence: Synthetic oligonucleotide
augagcccaucagccaccg

SEQ ID NO: 1064992 - RNA, 19 nt, Artificial Sequence
  Description of Artificial Sequence: Synthetic oligonucleotide
agggaaaugccgaccgugu

SEQ ID NO: 1064993 - RNA, 19 nt, Artificial Sequence
  Description of Artificial Sequence: Synthetic oligonucleotide
uaccagagucaaggagccg

SEQ ID NO: 1064994 - RNA, 19 nt, Artificial Sequence
  Description of Artificial Sequence: Synthetic oligonucleotide
agaccagucgguaccuugu

SEQ ID NO: 1064995 - RNA, 19 nt, Artificial Sequence
  Description of Artificial Sequence: Synthetic oligonucleotide
caugccauagguagcaauu

SEQ ID NO: 1064996 - RNA, 19 nt, Artificial Sequence
  Description of Artificial Sequence: Synthetic oligonucleotide
cagcucugguccuggcugc

SEQ ID NO: 1064997 - RNA, 19 nt, Artificial Sequence
  Description of Artificial Sequence: Synthetic oligonucleotide
acccaacuugugcuucaug

SEQ ID NO: 1064998 - RNA, 19 nt, Artificial Sequence
  Description of Artificial Sequence: Synthetic oligonucleotide
gcgagugugguacugccuc

SEQ ID NO: 1064999 - RNA, 19 nt, Artificial Sequence
  Description of Artificial Sequence: Synthetic oligonucleotide
ccugcaaagucgacccugc

SEQ ID NO: 1065000 - RNA, 19 nt, Artificial Sequence
  Description of Artificial Sequence: Synthetic oligonucleotide
guugcgcuuaggagcuggg

SEQ ID NO: 1065001 - RNA, 19 nt, Artificial Sequence
  Description of Artificial Sequence: Synthetic oligonucleotide
gaacacggugucagggcac

SEQ ID NO: 1065002 - RNA, 19 nt, Artificial Sequence
  Description of Artificial Sequence: Synthetic oligonucleotide
augggccguauaggugucc

SEQ ID NO: 1065003 - RNA, 19 nt, Artificial Sequence
  Description of Artificial Sequence: Synthetic oligonucleotide
gaaaaccggaccccauuau

SEQ ID NO: 1065004 - RNA, 19 nt, Artificial Sequence
  Description of Artificial Sequence: Synthetic oligonucleotide
ugcgcuccauuucccacuu

SEQ ID NO: 1065005 - RNA, 19 nt, Artificial Sequence
  Description of Artificial Sequence: Synthetic oligonucleotide
cuccgaggagacguagagc

SEQ ID NO: 1065006 - RNA, 19 nt, Artificial Sequence
  Description of Artificial Sequence: Synthetic oligonucleotide
cacagcucugcagcucucc

SEQ ID NO: 1065007 - RNA, 19 nt, Artificial Sequence
  Description of Artificial Sequence: Synthetic oligonucleotide
ugggcuaagcacugcccuu

SEQ ID NO: 1065008 - RNA, 19 nt, Artificial Sequence
  Description of Artificial Sequence: Synthetic oligonucleotide
gccgcuggaggcaagggag

SEQ ID NO: 1065009 - RNA, 19 nt, Artificial Sequence
  Description of Artificial Sequence: Synthetic oligonucleotide
uguuguaggccaggcucuc

SEQ ID NO: 1065010 - RNA, 19 nt, Artificial Sequence
  Description of Artificial Sequence: Synthetic oligonucleotide
agccaccguggaauggugg

SEQ ID NO: 1065011 - RNA, 19 nt, Artificial Sequence
  Description of Artificial Sequence: Synthetic oligonucleotide
gaagaacaauccagaggaa

SEQ ID NO: 1065012 - RNA, 19 nt, Artificial Sequence
  Description of Artificial Sequence: Synthetic oligonucleotide
caacaugcucgcaugaguu

SEQ ID NO: 1065013 - RNA, 19 nt, Artificial Sequence
  Description of Artificial Sequence: Synthetic oligonucleotide
ggcuaagcacugcccuugg

SEQ ID NO: 1065014 - RNA, 19 nt, Artificial Sequence
  Description of Artificial Sequence: Synthetic oligonucleotide
cuggacguccuggaacaug

SEQ ID NO: 1065015 - RNA, 19 nt, Artificial Sequence
  Description of Artificial Sequence: Synthetic oligonucleotide
ucuguacgaugucgcugau

SEQ ID NO: 1065016 - RNA, 19 nt, Artificial Sequence
  Description of Artificial Sequence: Synthetic oligonucleotide
ccuucagggcgcuccauac

SEQ ID NO: 1065017 - RNA, 19 nt, Artificial Sequence
  Description of Artificial Sequence: Synthetic oligonucleotide
gcaauacuccaaaugccca

SEQ ID NO: 1065018 - RNA, 19 nt, Artificial Sequence
  Description of Artificial Sequence: Synthetic oligonucleotide
ggcuguagaacagccgcug

SEQ ID NO: 1065019 - RNA, 19 nt, Artificial Sequence
  Description of Artificial Sequence: Synthetic oligonucleotide
cacgccguagaugguuggc

SEQ ID NO: 1065020 - RNA, 19 nt, Artificial Sequence
  Description of Artificial Sequence: Synthetic oligonucleotide
ggugcgcuccauuucccac

SEQ ID NO: 1065021 - RNA, 19 nt, Artificial Sequence
  Description of Artificial Sequence: Synthetic oligonucleotide
caccuucguacaccucccc

SEQ ID NO: 1065022 - RNA, 19 nt, Artificial Sequence
  Description of Artificial Sequence: Synthetic oligonucleotide
cugcuaccucuguacgaug

SEQ ID NO: 1065023 - RNA, 19 nt, Artificial Sequence
  Description of Artificial Sequence: Synthetic oligonucleotide
cacaguggugaacuauuua

SEQ ID NO: 1065024 - RNA, 19 nt, Artificial Sequence
  Description of Artificial Sequence: Synthetic oligonucleotide
gccguagaugguuggcuug

SEQ ID NO: 1065025 - RNA, 19 nt, Artificial Sequence
  Description of Artificial Sequence: Synthetic oligonucleotide
gaacuaacucagccagagu

SEQ ID NO: 1065026 - RNA, 19 nt, Artificial Sequence
  Description of Artificial Sequence: Synthetic oligonucleotide
ggguaguggagcgugguga

SEQ ID NO: 1065027 - RNA, 19 nt, Artificial Sequence
  Description of Artificial Sequence: Synthetic oligonucleotide
cuggggccgugcagcaugc

SEQ ID NO: 1065028 - RNA, 19 nt, Artificial Sequence
  Description of Artificial Sequence: Synthetic oligonucleotide
ccuuccuagcugucugugc

SEQ ID NO: 1065029 - RNA, 19 nt, Artificial Sequence
  Description of Artificial Sequence: Synthetic oligonucleotide
agggcgcuccauacgguag

SEQ ID NO: 1065030 - RNA, 19 nt, Artificial Sequence
  Description of Artificial Sequence: Synthetic oligonucleotide
gcucaagugagccuuccua

SEQ ID NO: 1065031 - RNA, 19 nt, Artificial Sequence
  Description of Artificial Sequence: Synthetic oligonucleotide
uugcgcuuaggagcugggu

SEQ ID NO: 1065032 - RNA, 19 nt, Artificial Sequence
  Description of Artificial Sequence: Synthetic oligonucleotide
gguggugaacuaacucagc

SEQ ID NO: 1065033 - RNA, 19 nt, Artificial Sequence
  Description of Artificial Sequence: Synthetic oligonucleotide
acgccguagaugguuggcu

SEQ ID NO: 1065034 - RNA, 19 nt, Artificial Sequence
  Description of Artificial Sequence: Synthetic oligonucleotide
caugggccguauagguguc

SEQ ID NO: 1065035 - RNA, 19 nt, Artificial Sequence
  Description of Artificial Sequence: Synthetic oligonucleotide
uccgugccccgcuucccca

SEQ ID NO: 1065036 - RNA, 19 nt, Artificial Sequence
  Description of Artificial Sequence: Synthetic oligonucleotide
ucaaccugcuuaggccaaa

SEQ ID NO: 1065037 - RNA, 19 nt, Artificial Sequence
  Description of Artificial Sequence: Synthetic oligonucleotide
cgguaccuugugaacacgg

SEQ ID NO: 1065038 - RNA, 19 nt, Artificial Sequence
  Description of Artificial Sequence: Synthetic oligonucleotide
gcgcgguccacuugauggg

SEQ ID NO: 1065039 - RNA, 19 nt, Artificial Sequence
  Description of Artificial Sequence: Synthetic oligonucleotide
augccgaccgugugccaga

SEQ ID NO: 1065040 - RNA, 19 nt, Artificial Sequence
  Description of Artificial Sequence: Synthetic oligonucleotide
cacacaccuucguacaccu

SEQ ID NO: 1065041 - RNA, 19 nt, Artificial Sequence
  Description of Artificial Sequence: Synthetic oligonucleotide
uccggcagguccuggucuu

SEQ ID NO: 1065042 - RNA, 19 nt, Artificial Sequence
  Description of Artificial Sequence: Synthetic oligonucleotide
acgaugucgcugaucuccu

SEQ ID NO: 1065043 - RNA, 19 nt, Artificial Sequence
  Description of Artificial Sequence: Synthetic oligonucleotide
gguuaagcagcagcucuga

SEQ ID NO: 1065044 - RNA, 19 nt, Artificial Sequence
  Description of Artificial Sequence: Synthetic oligonucleotide
gccaacaugcucgcaugag

SEQ ID NO: 1065045 - RNA, 19 nt, Artificial Sequence
  Description of Artificial Sequence: Synthetic oligonucleotide
cuucguacaccuccccaua

SEQ ID NO: 1065046 - RNA, 19 nt, Artificial Sequence
  Description of Artificial Sequence: Synthetic oligonucleotide
gacguccuggaacaugguu

SEQ ID NO: 1065047 - RNA, 19 nt, Artificial Sequence
  Description of Artificial Sequence: Synthetic oligonucleotide
cagccaccguggaauggug

SEQ ID NO: 1065048 - RNA, 19 nt, Artificial Sequence
  Description of Artificial Sequence: Synthetic oligonucleotide
gggcuaagcacugcccuug

SEQ ID NO: 1065049 - RNA, 19 nt, Artificial Sequence
  Description of Artificial Sequence: Synthetic oligonucleotide
gugaugucggugcgcucca

SEQ ID NO: 1065050 - RNA, 19 nt, Artificial Sequence
  Description of Artificial Sequence: Synthetic oligonucleotide
cugugacaggucaauuccu

SEQ ID NO: 1065051 - RNA, 19 nt, Artificial Sequence
  Description of Artificial Sequence: Synthetic oligonucleotide
ccagucgguaccuugugaa

SEQ ID NO: 1065052 - RNA, 19 nt, Artificial Sequence
  Description of Artificial Sequence: Synthetic oligonucleotide
ggauugugcuaugaggacu

SEQ ID NO: 1065053 - RNA, 19 nt, Artificial Sequence
  Description of Artificial Sequence: Synthetic oligonucleotide
gccugcaaagucgacccug

SEQ ID NO: 1065054 - RNA, 19 nt, Artificial Sequence
  Description of Artificial Sequence: Synthetic oligonucleotide
cuguacgaugucgcugauc

SEQ ID NO: 1065055 - RNA, 19 nt, Artificial Sequence
  Description of Artificial Sequence: Synthetic oligonucleotide
ggggccgugcagcaugcug

SEQ ID NO: 1065056 - RNA, 19 nt, Artificial Sequence
  Description of Artificial Sequence: Synthetic oligonucleotide
cgaggagacguagagcuug

SEQ ID NO: 1065057 - RNA, 19 nt, Artificial Sequence
  Description of Artificial Sequence: Synthetic oligonucleotide
ugccgaccgugugccagag

SEQ ID NO: 1065058 - RNA, 19 nt, Artificial Sequence
  Description of Artificial Sequence: Synthetic oligonucleotide
accguggaaugguggugaa

SEQ ID NO: 1065059 - RNA, 19 nt, Artificial Sequence
  Description of Artificial Sequence: Synthetic oligonucleotide
guacgaugucgcugaucuc

SEQ ID NO: 1065060 - RNA, 19 nt, Artificial Sequence
  Description of Artificial Sequence: Synthetic oligonucleotide
gcuaccucuguacgauguc

SEQ ID NO: 1065061 - RNA, 19 nt, Artificial Sequence
  Description of Artificial Sequence: Synthetic oligonucleotide
gccguauagguguccccug

SEQ ID NO: 1065062 - RNA, 19 nt, Artificial Sequence
  Description of Artificial Sequence: Synthetic oligonucleotide
aucaaccugcuuaggccaa

SEQ ID NO: 1065063 - RNA, 19 nt, Artificial Sequence
  Description of Artificial Sequence: Synthetic oligonucleotide
ggccgugcagcaugcugcc

SEQ ID NO: 1065064 - RNA, 19 nt, Artificial Sequence
  Description of Artificial Sequence: Synthetic oligonucleotide
ccuagugguugcuccuuuc

SEQ ID NO: 1065065 - RNA, 19 nt, Artificial Sequence
  Description of Artificial Sequence: Synthetic oligonucleotide
acacaccuucguacaccuc

SEQ ID NO: 1065066 - RNA, 19 nt, Artificial Sequence
  Description of Artificial Sequence: Synthetic oligonucleotide
cagcaugcugccagcagcu

SEQ ID NO: 1065067 - RNA, 19 nt, Artificial Sequence
  Description of Artificial Sequence: Synthetic oligonucleotide
ugccuagugguugcuccuu

SEQ ID NO: 1065068 - RNA, 19 nt, Artificial Sequence
  Description of Artificial Sequence: Synthetic oligonucleotide
auugugcuaugaggacuau

SEQ ID NO: 1065069 - RNA, 19 nt, Artificial Sequence
  Description of Artificial Sequence: Synthetic oligonucleotide
ucucgggcgcgguccacuu

SEQ ID NO: 1065070 - RNA, 19 nt, Artificial Sequence
  Description of Artificial Sequence: Synthetic oligonucleotide
gugcgcuccauuucccacu

SEQ ID NO: 1065071 - RNA, 19 nt, Artificial Sequence
  Description of Artificial Sequence: Synthetic oligonucleotide
uggugaugucggugcgcuc

SEQ ID NO: 1065072 - RNA, 19 nt, Artificial Sequence
  Description of Artificial Sequence: Synthetic oligonucleotide
gaacagccgcuggaggcaa

SEQ ID NO: 1065073 - RNA, 19 nt, Artificial Sequence
  Description of Artificial Sequence: Synthetic oligonucleotide
ccgcuggaggcaagggagg

SEQ ID NO: 1065074 - RNA, 19 nt, Artificial Sequence
  Description of Artificial Sequence: Synthetic oligonucleotide
gcuggguaguggagcgugg

SEQ ID NO: 1065075 - RNA, 19 nt, Artificial Sequence
  Description of Artificial Sequence: Synthetic oligonucleotide
agcacugcccuuggugguu

SEQ ID NO: 1065076 - RNA, 19 nt, Artificial Sequence
  Description of Artificial Sequence: Synthetic oligonucleotide
cugugccuagugguugcuc

SEQ ID NO: 1065077 - RNA, 19 nt, Artificial Sequence
  Description of Artificial Sequence: Synthetic oligonucleotide
uccucuccgugccccgcuu

SEQ ID NO: 1065078 - RNA, 19 nt, Artificial Sequence
  Description of Artificial Sequence: Synthetic oligonucleotide
uuguugcgcuuaggagcug

SEQ ID NO: 1065079 - RNA, 19 nt, Artificial Sequence
  Description of Artificial Sequence: Synthetic oligonucleotide
agcguggugaugagcccau

SEQ ID NO: 1065080 - RNA, 19 nt, Artificial Sequence
  Description of Artificial Sequence: Synthetic oligonucleotide
gccuggcuaagccugcaaa

SEQ ID NO: 1065081 - RNA, 19 nt, Artificial Sequence
  Description of Artificial Sequence: Synthetic oligonucleotide
gggccguauaggugucccc

SEQ ID NO: 1065082 - RNA, 19 nt, Artificial Sequence
  Description of Artificial Sequence: Synthetic oligonucleotide
ggaggggauugugcuauga

SEQ ID NO: 1065083 - RNA, 19 nt, Artificial Sequence
  Description of Artificial Sequence: Synthetic oligonucleotide
cccucgggcuguagaacag

SEQ ID NO: 1065084 - RNA, 19 nt, Artificial Sequence
  Description of Artificial Sequence: Synthetic oligonucleotide
cuagcugucugugccuagu

SEQ ID NO: 1065085 - RNA, 19 nt, Artificial Sequence
  Description of Artificial Sequence: Synthetic oligonucleotide
ccgcuggcgagugugguac

SEQ ID NO: 1065086 - RNA, 19 nt, Artificial Sequence
  Description of Artificial Sequence: Synthetic oligonucleotide
cgaccgugugccagagugg

SEQ ID NO: 1065087 - RNA, 19 nt, Artificial Sequence
  Description of Artificial Sequence: Synthetic oligonucleotide
cuccauacgguagucuuuu

SEQ ID NO: 1065088 - RNA, 19 nt, Artificial Sequence
  Description of Artificial Sequence: Synthetic oligonucleotide
caggcucucgggcgcgguc

SEQ ID NO: 1065089 - RNA, 19 nt, Artificial Sequence
  Description of Artificial Sequence: Synthetic oligonucleotide
cggaccccauuaucaaggc

SEQ ID NO: 1065090 - RNA, 19 nt, Artificial Sequence
  Description of Artificial Sequence: Synthetic oligonucleotide
acuggacguccuggaacau

SEQ ID NO: 1065091 - RNA, 19 nt, Artificial Sequence
  Description of Artificial Sequence: Synthetic oligonucleotide
gcuggcgagugugguacug

SEQ ID NO: 1065092 - RNA, 19 nt, Artificial Sequence
  Description of Artificial Sequence: Synthetic oligonucleotide
gguaccuugugaacacggu

SEQ ID NO: 1065093 - RNA, 19 nt, Artificial Sequence
  Description of Artificial Sequence: Synthetic oligonucleotide
augcucgcaugaguucaua

SEQ ID NO: 1065094 - RNA, 19 nt, Artificial Sequence
  Description of Artificial Sequence: Synthetic oligonucleotide
ggccguauagguguccccu

SEQ ID NO: 1065095 - RNA, 19 nt, Artificial Sequence
  Description of Artificial Sequence: Synthetic oligonucleotide
gcaugcaauggcugcugcu

SEQ ID NO: 1065096 - RNA, 19 nt, Artificial Sequence
  Description of Artificial Sequence: Synthetic oligonucleotide
caugcucgcaugaguucau

SEQ ID NO: 1065097 - RNA, 19 nt, Artificial Sequence
  Description of Artificial Sequence: Synthetic oligonucleotide
gggcgcgguccacuugaug

SEQ ID NO: 1065098 - RNA, 19 nt, Artificial Sequence
  Description of Artificial Sequence: Synthetic oligonucleotide
caguuucgagcagcaaggu

SEQ ID NO: 1065099 - RNA, 19 nt, Artificial Sequence
  Description of Artificial Sequence: Synthetic oligonucleotide
gguacuccauggcugccuu

SEQ ID NO: 1065100 - RNA, 19 nt, Artificial Sequence
  Description of Artificial Sequence: Synthetic oligonucleotide
gcggcucuccgaggagacg

SEQ ID NO: 1065101 - RNA, 19 nt, Artificial Sequence
  Description of Artificial Sequence: Synthetic oligonucleotide
gucgacccugccccagccu

SEQ ID NO: 1065102 - RNA, 19 nt, Artificial Sequence
  Description of Artificial Sequence: Synthetic oligonucleotide
ggcgcuccauacgguaguc

SEQ ID NO: 1065103 - RNA, 19 nt, Artificial Sequence
  Description of Artificial Sequence: Synthetic oligonucleotide
uggggccgugcagcaugcu

SEQ ID NO: 1065104 - RNA, 19 nt, Artificial Sequence
  Description of Artificial Sequence: Synthetic oligonucleotide
ccacgccugucucuucuca

SEQ ID NO: 1065105 - RNA, 19 nt, Artificial Sequence
  Description of Artificial Sequence: Synthetic oligonucleotide
gggcgcuccauacgguagu

SEQ ID NO: 1065106 - RNA, 19 nt, Artificial Sequence
  Description of Artificial Sequence: Synthetic oligonucleotide
gccgggucagagggauucc

SEQ ID NO: 1065107 - RNA, 19 nt, Artificial Sequence
  Description of Artificial Sequence: Synthetic oligonucleotide
cucccggggcacugggcua

SEQ ID NO: 1065108 - RNA, 19 nt, Artificial Sequence
  Description of Artificial Sequence: Synthetic oligonucleotide
ggacacgccguagaugguu

SEQ ID NO: 1065109 - RNA, 19 nt, Artificial Sequence
  Description of Artificial Sequence: Synthetic oligonucleotide
ccgugccccgcuuccccag

SEQ ID NO: 1065110 - RNA, 19 nt, Artificial Sequence
  Description of Artificial Sequence: Synthetic oligonucleotide
cacugccaacaugcucgca

SEQ ID NO: 1065111 - RNA, 19 nt, Artificial Sequence
  Description of Artificial Sequence: Synthetic oligonucleotide
ccucuccgugccccgcuuc

SEQ ID NO: 1065112 - RNA, 19 nt, Artificial Sequence
  Description of Artificial Sequence: Synthetic oligonucleotide
ccguauagguguccccugu

SEQ ID NO: 1065113 - RNA, 19 nt, Artificial Sequence
  Description of Artificial Sequence: Synthetic oligonucleotide
ggcgagugugguacugccu

SEQ ID NO: 1065114 - RNA, 19 nt, Artificial Sequence
  Description of Artificial Sequence: Synthetic oligonucleotide
gcgcuccauuucccacuug

SEQ ID NO: 1065115 - RNA, 19 nt, Artificial Sequence
  Description of Artificial Sequence: Synthetic oligonucleotide
gcuccauacgguagucuuu

SEQ ID NO: 1065116 - RNA, 19 nt, Artificial Sequence
  Description of Artificial Sequence: Synthetic oligonucleotide
ccgggucagagggauucca

SEQ ID NO: 1065117 - RNA, 19 nt, Artificial Sequence
  Description of Artificial Sequence: Synthetic oligonucleotide
cgugccccgcuuccccagc

SEQ ID NO: 1065118 - RNA, 19 nt, Artificial Sequence
  Description of Artificial Sequence: Synthetic oligonucleotide
ccguagaugguuggcuugu

SEQ ID NO: 1065119 - RNA, 19 nt, Artificial Sequence
  Description of Artificial Sequence: Synthetic oligonucleotide
cgcuccauacgguagucuu

SEQ ID NO: 1065120 - RNA, 19 nt, Artificial Sequence
  Description of Artificial Sequence: Synthetic oligonucleotide
gcucagaaauucagaucuu

SEQ ID NO: 1065121 - RNA, 19 nt, Artificial Sequence
  Description of Artificial Sequence: Synthetic oligonucleotide
gccuagugguugcuccuuu

SEQ ID NO: 1065122 - RNA, 19 nt, Artificial Sequence
  Description of Artificial Sequence: Synthetic oligonucleotide
cacccaacuugugcuucau

SEQ ID NO: 1065123 - RNA, 19 nt, Artificial Sequence
  Description of Artificial Sequence: Synthetic oligonucleotide
ggcucuccgaggagacgua

SEQ ID NO: 1065124 - RNA, 19 nt, Artificial Sequence
  Description of Artificial Sequence: Synthetic oligonucleotide
gccgugcagcaugcugcca

SEQ ID NO: 1065125 - RNA, 19 nt, Artificial Sequence
  Description of Artificial Sequence: Synthetic oligonucleotide
gcgcuccauacgguagucu

SEQ ID NO: 1065126 - RNA, 19 nt, Artificial Sequence
  Description of Artificial Sequence: Synthetic oligonucleotide
gggacacgccguagauggu

SEQ ID NO: 1065127 - RNA, 19 nt, Artificial Sequence
  Description of Artificial Sequence: Synthetic oligonucleotide
cucuggggccgugcagcau

SEQ ID NO: 1065128 - RNA, 19 nt, Artificial Sequence
  Description of Artificial Sequence: Synthetic oligonucleotide
cgccguagaugguuggcuu

SEQ ID NO: 1065129 - RNA, 19 nt, Artificial Sequence
  Description of Artificial Sequence: Synthetic oligonucleotide
gccgaccgugugccagagu

SEQ ID NO: 1065130 - RNA, 19 nt, Artificial Sequence
  Description of Artificial Sequence: Synthetic oligonucleotide
cgcuuaggagcuggguagu

SEQ ID NO: 1065131 - RNA, 19 nt, Artificial Sequence
  Description of Artificial Sequence: Synthetic oligonucleotide
cgcccacgccugucucuuc

SEQ ID NO: 1065132 - RNA, 19 nt, Artificial Sequence
  Description of Artificial Sequence: Synthetic oligonucleotide
cggcagguccuggucuugu

SEQ ID NO: 1065133 - RNA, 19 nt, Artificial Sequence
  Description of Artificial Sequence: Synthetic oligonucleotide
cgcuggcgagugugguacu

SEQ ID NO: 1065134 - RNA, 19 nt, Artificial Sequence
  Description of Artificial Sequence: Synthetic oligonucleotide
gggccgggucagagggauu

SEQ ID NO: 1065135 - RNA, 19 nt, Artificial Sequence
  Description of Artificial Sequence: Synthetic oligonucleotide
auagauuugauccuuaaac

SEQ ID NO: 1065136 - RNA, 19 nt, Artificial Sequence
  Description of Artificial Sequence: Synthetic oligonucleotide
aacauuuugauccauuuug

SEQ ID NO: 1065137 - RNA, 19 nt, Artificial Sequence
  Description of Artificial Sequence: Synthetic oligonucleotide
aagaggauaaagccaaugc

SEQ ID NO: 1065138 - RNA, 19 nt, Artificial Sequence
  Description of Artificial Sequence: Synthetic oligonucleotide
aaaguuuauagccacaccu

SEQ ID NO: 1065139 - RNA, 19 nt, Artificial Sequence
  Description of Artificial Sequence: Synthetic oligonucleotide
uaaaugauagagaacaucu

SEQ ID NO: 1065140 - RNA, 19 nt, Artificial Sequence
  Description of Artificial Sequence: Synthetic oligonucleotide
uuauacagcacuuauaccu

SEQ ID NO: 1065141 - RNA, 19 nt, Artificial Sequence
  Description of Artificial Sequence: Synthetic oligonucleotide
aauacaaccauuucuacau

SEQ ID NO: 1065142 - RNA, 19 nt, Artificial Sequence
  Description of Artificial Sequence: Synthetic oligonucleotide
cuuagcacuaauuaaauac

SEQ ID NO: 1065143 - RNA, 19 nt, Artificial Sequence
  Description of Artificial Sequence: Synthetic oligonucleotide
aaaguuaucaacaauuuca

SEQ ID NO: 1065144 - RNA, 19 nt, Artificial Sequence
  Description of Artificial Sequence: Synthetic oligonucleotide
aauauucucaaagaagcac

SEQ ID NO: 1065145 - RNA, 19 nt, Artificial Sequence
  Description of Artificial Sequence: Synthetic oligonucleotide
acuuguugcacaucaaucc

SEQ ID NO: 1065146 - RNA, 19 nt, Artificial Sequence
  Description of Artificial Sequence: Synthetic oligonucleotide
auauuauuaaaugauagag

SEQ ID NO: 1065147 - RNA, 19 nt, Artificial Sequence
  Description of Artificial Sequence: Synthetic oligonucleotide
aaaaucacuuuuaacggcc

SEQ ID NO: 1065148 - RNA, 19 nt, Artificial Sequence
  Description of Artificial Sequence: Synthetic oligonucleotide
uuucuaaucaggcuaauga

SEQ ID NO: 1065149 - RNA, 19 nt, Artificial Sequence
  Description of Artificial Sequence: Synthetic oligonucleotide
uaguaaaugaauuucuaag

SEQ ID NO: 1065150 - RNA, 19 nt, Artificial Sequence
  Description of Artificial Sequence: Synthetic oligonucleotide
ugugaauauaguuuucacg

SEQ ID NO: 1065151 - RNA, 19 nt, Artificial Sequence
  Description of Artificial Sequence: Synthetic oligonucleotide
aaauaugcuaguuuaacau

SEQ ID NO: 1065152 - RNA, 19 nt, Artificial Sequence
  Description of Artificial Sequence: Synthetic oligonucleotide
uaggucauaguuuauaacc

SEQ ID NO: 1065153 - RNA, 19 nt, Artificial Sequence
  Description of Artificial Sequence: Synthetic oligonucleotide
aauuaaauaaggucagcca

SEQ ID NO: 1065154 - RNA, 19 nt, Artificial Sequence
  Description of Artificial Sequence: Synthetic oligonucleotide
ucauacaagucacauagag

SEQ ID NO: 1065155 - RNA, 19 nt, Artificial Sequence
  Description of Artificial Sequence: Synthetic oligonucleotide
aauaagucaguagugauca

SEQ ID NO: 1065156 - RNA, 19 nt, Artificial Sequence
  Description of Artificial Sequence: Synthetic oligonucleotide
uauuauuaaaugauagaga

SEQ ID NO: 1065157 - RNA, 19 nt, Artificial Sequence
  Description of Artificial Sequence: Synthetic oligonucleotide
aacagucuaacucuaaaga

SEQ ID NO: 1065158 - RNA, 19 nt, Artificial Sequence
  Description of Artificial Sequence: Synthetic oligonucleotide
ugcuaguuuaacauaauug

SEQ ID NO: 1065159 - RNA, 19 nt, Artificial Sequence
  Description of Artificial Sequence: Synthetic oligonucleotide
aggaauaauagcucucugc

SEQ ID NO: 1065160 - RNA, 19 nt, Artificial Sequence
  Description of Artificial Sequence: Synthetic oligonucleotide
aaaucucauagauuugauc

SEQ ID NO: 1065161 - RNA, 19 nt, Artificial Sequence
  Description of Artificial Sequence: Synthetic oligonucleotide
uauauuauuaaaugauaga

SEQ ID NO: 1065162 - RNA, 19 nt, Artificial Sequence
  Description of Artificial Sequence: Synthetic oligonucleotide
ugugugauagucaaugucu

SEQ ID NO: 1065163 - RNA, 19 nt, Artificial Sequence
  Description of Artificial Sequence: Synthetic oligonucleotide
uguacccacaacaauauga

SEQ ID NO: 1065164 - RNA, 19 nt, Artificial Sequence
  Description of Artificial Sequence: Synthetic oligonucleotide
aaagguaucuucuguuuag

SEQ ID NO: 1065165 - RNA, 19 nt, Artificial Sequence
  Description of Artificial Sequence: Synthetic oligonucleotide
aaucccacgagccaauaag

SEQ ID NO: 1065166 - RNA, 19 nt, Artificial Sequence
  Description of Artificial Sequence: Synthetic oligonucleotide
auagccacaccuuuccucc

SEQ ID NO: 1065167 - RNA, 19 nt, Artificial Sequence
  Description of Artificial Sequence: Synthetic oligonucleotide
uuuauagccacaccuuucc

SEQ ID NO: 1065168 - RNA, 19 nt, Artificial Sequence
  Description of Artificial Sequence: Synthetic oligonucleotide
uuugauuccuucaaggguc

SEQ ID NO: 1065169 - RNA, 19 nt, Artificial Sequence
  Description of Artificial Sequence: Synthetic oligonucleotide
uuugcuaucagaaucugua

SEQ ID NO: 1065170 - RNA, 19 nt, Artificial Sequence
  Description of Artificial Sequence: Synthetic oligonucleotide
aaagauuuuacagacccca

SEQ ID NO: 1065171 - RNA, 19 nt, Artificial Sequence
  Description of Artificial Sequence: Synthetic oligonucleotide
uugugauccguuaugagca

SEQ ID NO: 1065172 - RNA, 19 nt, Artificial Sequence
  Description of Artificial Sequence: Synthetic oligonucleotide
guauauuauuaaaugauag

SEQ ID NO: 1065173 - RNA, 19 nt, Artificial Sequence
  Description of Artificial Sequence: Synthetic oligonucleotide
ucuguuuagcauaucaaac

SEQ ID NO: 1065174 - RNA, 19 nt, Artificial Sequence
  Description of Artificial Sequence: Synthetic oligonucleotide
aguuuaacauaauuggcug

SEQ ID NO: 1065175 - RNA, 19 nt, Artificial Sequence
  Description of Artificial Sequence: Synthetic oligonucleotide
uccguuaugagcauugaga

SEQ ID NO: 1065176 - RNA, 19 nt, Artificial Sequence
  Description of Artificial Sequence: Synthetic oligonucleotide
uuaacggccuuucuaauca

SEQ ID NO: 1065177 - RNA, 19 nt, Artificial Sequence
  Description of Artificial Sequence: Synthetic oligonucleotide
cuucuaacacaucaguugg

SEQ ID NO: 1065178 - RNA, 19 nt, Artificial Sequence
  Description of Artificial Sequence: Synthetic oligonucleotide
aaguugcucccauauaauc

SEQ ID NO: 1065179 - RNA, 19 nt, Artificial Sequence
  Description of Artificial Sequence: Synthetic oligonucleotide
ucuaaucaggcuaaugaga

SEQ ID NO: 1065180 - RNA, 19 nt, Artificial Sequence
  Description of Artificial Sequence: Synthetic oligonucleotide
aaugucacgaagaauccuc

SEQ ID NO: 1065181 - RNA, 19 nt, Artificial Sequence
  Description of Artificial Sequence: Synthetic oligonucleotide
uucuaaucaggcuaaugag

SEQ ID NO: 1065182 - RNA, 19 nt, Artificial Sequence
  Description of Artificial Sequence: Synthetic oligonucleotide
uucuacauaacuaguaaau

SEQ ID NO: 1065183 - RNA, 19 nt, Artificial Sequence
  Description of Artificial Sequence: Synthetic oligonucleotide
ucuguuguaauccgcggag

SEQ ID NO: 1065184 - RNA, 19 nt, Artificial Sequence
  Description of Artificial Sequence: Synthetic oligonucleotide
aauuggcugauuuuauaca

SEQ ID NO: 1065185 - RNA, 19 nt, Artificial Sequence
  Description of Artificial Sequence: Synthetic oligonucleotide
caaacuaucucaucccagg

SEQ ID NO: 1065186 - RNA, 19 nt, Artificial Sequence
  Description of Artificial Sequence: Synthetic oligonucleotide
uaguuuucacgauugguag

SEQ ID NO: 1065187 - RNA, 19 nt, Artificial Sequence
  Description of Artificial Sequence: Synthetic oligonucleotide
uaauuggcugauuuuauac

SEQ ID NO: 1065188 - RNA, 19 nt, Artificial Sequence
  Description of Artificial Sequence: Synthetic oligonucleotide
uggaucuuuaauacaagga

SEQ ID NO: 1065189 - RNA, 19 nt, Artificial Sequence
  Description of Artificial Sequence: Synthetic oligonucleotide
uuuauaaccaaggacacuu

SEQ ID NO: 1065190 - RNA, 19 nt, Artificial Sequence
  Description of Artificial Sequence: Synthetic oligonucleotide
ucagaacacggcuugaccc

SEQ ID NO: 1065191 - RNA, 19 nt, Artificial Sequence
  Description of Artificial Sequence: Synthetic oligonucleotide
uucacgauugguagguagg

SEQ ID NO: 1065192 - RNA, 19 nt, Artificial Sequence
  Description of Artificial Sequence: Synthetic oligonucleotide
uaauacaaccauuucuaca

SEQ ID NO: 1065193 - RNA, 19 nt, Artificial Sequence
  Description of Artificial Sequence: Synthetic oligonucleotide
auaccaaacaaaaugcauc

SEQ ID NO: 1065194 - RNA, 19 nt, Artificial Sequence
  Description of Artificial Sequence: Synthetic oligonucleotide
uuuccucccaaaucgaccc

SEQ ID NO: 1065195 - RNA, 19 nt, Artificial Sequence
  Description of Artificial Sequence: Synthetic oligonucleotide
ucccaggaauuaaauaagg

SEQ ID NO: 1065196 - RNA, 19 nt, Artificial Sequence
  Description of Artificial Sequence: Synthetic oligonucleotide
aauucucucaugaugacau

SEQ ID NO: 1065197 - RNA, 19 nt, Artificial Sequence
  Description of Artificial Sequence: Synthetic oligonucleotide
aucagaacacggcuugacc

SEQ ID NO: 1065198 - RNA, 19 nt, Artificial Sequence
  Description of Artificial Sequence: Synthetic oligonucleotide
aauaugcuaguuuaacaua

SEQ ID NO: 1065199 - RNA, 19 nt, Artificial Sequence
  Description of Artificial Sequence: Synthetic oligonucleotide
uugcacaucaaucccacga

SEQ ID NO: 1065200 - RNA, 19 nt, Artificial Sequence
  Description of Artificial Sequence: Synthetic oligonucleotide
uucauuaagacaugugcaa

SEQ ID NO: 1065201 - RNA, 19 nt, Artificial Sequence
  Description of Artificial Sequence: Synthetic oligonucleotide
gucaguagugaucagaaca

SEQ ID NO: 1065202 - RNA, 19 nt, Artificial Sequence
  Description of Artificial Sequence: Synthetic oligonucleotide
gauagucaaugucucauac

SEQ ID NO: 1065203 - RNA, 19 nt, Artificial Sequence
  Description of Artificial Sequence: Synthetic oligonucleotide
ugagcauugagacaagauu

SEQ ID NO: 1065204 - RNA, 19 nt, Artificial Sequence
  Description of Artificial Sequence: Synthetic oligonucleotide
agauuuuacagaccccauc

SEQ ID NO: 1065205 - RNA, 19 nt, Artificial Sequence
  Description of Artificial Sequence: Synthetic oligonucleotide
aaagaagcacaaugcacgu

SEQ ID NO: 1065206 - RNA, 19 nt, Artificial Sequence
  Description of Artificial Sequence: Synthetic oligonucleotide
uuuauacagcacuuauacc

SEQ ID NO: 1065207 - RNA, 19 nt, Artificial Sequence
  Description of Artificial Sequence: Synthetic oligonucleotide
acacaauaaaggcaaauau

SEQ ID NO: 1065208 - RNA, 19 nt, Artificial Sequence
  Description of Artificial Sequence: Synthetic oligonucleotide
acaaugcacguugugaucg

SEQ ID NO: 1065209 - RNA, 19 nt, Artificial Sequence
  Description of Artificial Sequence: Synthetic oligonucleotide
caccuuuccucccaaaucg

SEQ ID NO: 1065210 - RNA, 19 nt, Artificial Sequence
  Description of Artificial Sequence: Synthetic oligonucleotide
agcacuuauaccuuuuagu

SEQ ID NO: 1065211 - RNA, 19 nt, Artificial Sequence
  Description of Artificial Sequence: Synthetic oligonucleotide
aacagcgagcacugcauuc

SEQ ID NO: 1065212 - RNA, 19 nt, Artificial Sequence
  Description of Artificial Sequence: Synthetic oligonucleotide
uguuguaauccgcggagcc

SEQ ID NO: 1065213 - RNA, 19 nt, Artificial Sequence
  Description of Artificial Sequence: Synthetic oligonucleotide
auuucuacauaacuaguaa

SEQ ID NO: 1065214 - RNA, 19 nt, Artificial Sequence
  Description of Artificial Sequence: Synthetic oligonucleotide
ucacacuuagcacuaauua

SEQ ID NO: 1065215 - RNA, 19 nt, Artificial Sequence
  Description of Artificial Sequence: Synthetic oligonucleotide
ugauccuuaaacccucggc

SEQ ID NO: 1065216 - RNA, 19 nt, Artificial Sequence
  Description of Artificial Sequence: Synthetic oligonucleotide
guuaugagcauugagacaa

SEQ ID NO: 1065217 - RNA, 19 nt, Artificial Sequence
  Description of Artificial Sequence: Synthetic oligonucleotide
uccaagagccaaaauuacc

SEQ ID NO: 1065218 - RNA, 19 nt, Artificial Sequence
  Description of Artificial Sequence: Synthetic oligonucleotide
gauccgaaagcccacucag

SEQ ID NO: 1065219 - RNA, 19 nt, Artificial Sequence
  Description of Artificial Sequence: Synthetic oligonucleotide
cacuuauaccuuuuagucc

SEQ ID NO: 1065220 - RNA, 19 nt, Artificial Sequence
  Description of Artificial Sequence: Synthetic oligonucleotide
aauaccaaacaaaaugcau

SEQ ID NO: 1065221 - RNA, 19 nt, Artificial Sequence
  Description of Artificial Sequence: Synthetic oligonucleotide
uuucacgauugguagguag

SEQ ID NO: 1065222 - RNA, 19 nt, Artificial Sequence
  Description of Artificial Sequence: Synthetic oligonucleotide
aguuuauaaccaaggacac

SEQ ID NO: 1065223 - RNA, 19 nt, Artificial Sequence
  Description of Artificial Sequence: Synthetic oligonucleotide
aacaauaugaggagcuuca

SEQ ID NO: 1065224 - RNA, 19 nt, Artificial Sequence
  Description of Artificial Sequence: Synthetic oligonucleotide
aguuuucacgauugguagg

SEQ ID NO: 1065225 - RNA, 19 nt, Artificial Sequence
  Description of Artificial Sequence: Synthetic oligonucleotide
cuuguugcacaucaauccc

SEQ ID NO: 1065226 - RNA, 19 nt, Artificial Sequence
  Description of Artificial Sequence: Synthetic oligonucleotide
uuucuacauaacuaguaaa

SEQ ID NO: 1065227 - RNA, 19 nt, Artificial Sequence
  Description of Artificial Sequence: Synthetic oligonucleotide
gaauaauagcucucugcug

SEQ ID NO: 1065228 - RNA, 19 nt, Artificial Sequence
  Description of Artificial Sequence: Synthetic oligonucleotide
agacaugugcaauauggca

SEQ ID NO: 1065229 - RNA, 19 nt, Artificial Sequence
  Description of Artificial Sequence: Synthetic oligonucleotide
caacagucuaacucuaaag

SEQ ID NO: 1065230 - RNA, 19 nt, Artificial Sequence
  Description of Artificial Sequence: Synthetic oligonucleotide
cuaccuaggauaugauugc

SEQ ID NO: 1065231 - RNA, 19 nt, Artificial Sequence
  Description of Artificial Sequence: Synthetic oligonucleotide
cuucauuaagacaugugca

SEQ ID NO: 1065232 - RNA, 19 nt, Artificial Sequence
  Description of Artificial Sequence: Synthetic oligonucleotide
aaggaauaauagcucucug

SEQ ID NO: 1065233 - RNA, 19 nt, Artificial Sequence
  Description of Artificial Sequence: Synthetic oligonucleotide
auaaccgcuugugugauag

SEQ ID NO: 1065234 - RNA, 19 nt, Artificial Sequence
  Description of Artificial Sequence: Synthetic oligonucleotide
aggacuaaagucgcuuugc

SEQ ID NO: 1065235 - RNA, 19 nt, Artificial Sequence
  Description of Artificial Sequence: Synthetic oligonucleotide
uagugaucagaacacggcu

SEQ ID NO: 1065236 - RNA, 19 nt, Artificial Sequence
  Description of Artificial Sequence: Synthetic oligonucleotide
acuaucucaucccaggaau

SEQ ID NO: 1065237 - RNA, 19 nt, Artificial Sequence
  Description of Artificial Sequence: Synthetic oligonucleotide
uauaguuuucacgauuggu

SEQ ID NO: 1065238 - RNA, 19 nt, Artificial Sequence
  Description of Artificial Sequence: Synthetic oligonucleotide
acaccuuuccucccaaauc

SEQ ID NO: 1065239 - RNA, 19 nt, Artificial Sequence
  Description of Artificial Sequence: Synthetic oligonucleotide
uuuuacagaccccaucuuu

SEQ ID NO: 1065240 - RNA, 19 nt, Artificial Sequence
  Description of Artificial Sequence: Synthetic oligonucleotide
uuuaacauucaaacuucau

SEQ ID NO: 1065241 - RNA, 19 nt, Artificial Sequence
  Description of Artificial Sequence: Synthetic oligonucleotide
ccuaccuaggauaugauug

SEQ ID NO: 1065242 - RNA, 19 nt, Artificial Sequence
  Description of Artificial Sequence: Synthetic oligonucleotide
ucgcuuugcuaucagaauc

SEQ ID NO: 1065243 - RNA, 19 nt, Artificial Sequence
  Description of Artificial Sequence: Synthetic oligonucleotide
accuuuuggaucuuuaaua

SEQ ID NO: 1065244 - RNA, 19 nt, Artificial Sequence
  Description of Artificial Sequence: Synthetic oligonucleotide
uugugugauagucaauguc

SEQ ID NO: 1065245 - RNA, 19 nt, Artificial Sequence
  Description of Artificial Sequence: Synthetic oligonucleotide
ugugaucgccuauucagca

SEQ ID NO: 1065246 - RNA, 19 nt, Artificial Sequence
  Description of Artificial Sequence: Synthetic oligonucleotide
cuuuccucccaaaucgacc

SEQ ID NO: 1065247 - RNA, 19 nt, Artificial Sequence
  Description of Artificial Sequence: Synthetic oligonucleotide
uuuaacggccuuucuaauc

SEQ ID NO: 1065248 - RNA, 19 nt, Artificial Sequence
  Description of Artificial Sequence: Synthetic oligonucleotide
aaugcacguugugaucgcc

SEQ ID NO: 1065249 - RNA, 19 nt, Artificial Sequence
  Description of Artificial Sequence: Synthetic oligonucleotide
aggcuuagcaacagggucc

SEQ ID NO: 1065250 - RNA, 19 nt, Artificial Sequence
  Description of Artificial Sequence: Synthetic oligonucleotide
aacuaucucaucccaggaa

SEQ ID NO: 1065251 - RNA, 19 nt, Artificial Sequence
  Description of Artificial Sequence: Synthetic oligonucleotide
uaggauaugauugcuugcu

SEQ ID NO: 1065252 - RNA, 19 nt, Artificial Sequence
  Description of Artificial Sequence: Synthetic oligonucleotide
aacccuaccuaggauauga

SEQ ID NO: 1065253 - RNA, 19 nt, Artificial Sequence
  Description of Artificial Sequence: Synthetic oligonucleotide
ugaucgccuauucagcaac

SEQ ID NO: 1065254 - RNA, 19 nt, Artificial Sequence
  Description of Artificial Sequence: Synthetic oligonucleotide
aggaauuaaauaaggucag

SEQ ID NO: 1065255 - RNA, 19 nt, Artificial Sequence
  Description of Artificial Sequence: Synthetic oligonucleotide
ugguagguaggucauaguu

SEQ ID NO: 1065256 - RNA, 19 nt, Artificial Sequence
  Description of Artificial Sequence: Synthetic oligonucleotide
uugauccuuaaacccucgg

SEQ ID NO: 1065257 - RNA, 19 nt, Artificial Sequence
  Description of Artificial Sequence: Synthetic oligonucleotide
cuuuuaacggccuuucuaa

SEQ ID NO: 1065258 - RNA, 19 nt, Artificial Sequence
  Description of Artificial Sequence: Synthetic oligonucleotide
aaaugcauccaaauguuuu

SEQ ID NO: 1065259 - RNA, 19 nt, Artificial Sequence
  Description of Artificial Sequence: Synthetic oligonucleotide
uguugcacaucaaucccac

SEQ ID NO: 1065260 - RNA, 19 nt, Artificial Sequence
  Description of Artificial Sequence: Synthetic oligonucleotide
uccuuuaaauucauaucau

SEQ ID NO: 1065261 - RNA, 19 nt, Artificial Sequence
  Description of Artificial Sequence: Synthetic oligonucleotide
uauaccuuuuaguccacaa

SEQ ID NO: 1065262 - RNA, 19 nt, Artificial Sequence
  Description of Artificial Sequence: Synthetic oligonucleotide
uccuuaaacccucggcuca

SEQ ID NO: 1065263 - RNA, 19 nt, Artificial Sequence
  Description of Artificial Sequence: Synthetic oligonucleotide
cagaauucgaauuggaucu

SEQ ID NO: 1065264 - RNA, 19 nt, Artificial Sequence
  Description of Artificial Sequence: Synthetic oligonucleotide
cauaguuuauaaccaagga

SEQ ID NO: 1065265 - RNA, 19 nt, Artificial Sequence
  Description of Artificial Sequence: Synthetic oligonucleotide
guacccacaacaauaugag

SEQ ID NO: 1065266 - RNA, 19 nt, Artificial Sequence
  Description of Artificial Sequence: Synthetic oligonucleotide
ugauccgaaagcccacuca

SEQ ID NO: 1065267 - RNA, 19 nt, Artificial Sequence
  Description of Artificial Sequence: Synthetic oligonucleotide
auucgaauuggaucucuca

SEQ ID NO: 1065268 - RNA, 19 nt, Artificial Sequence
  Description of Artificial Sequence: Synthetic oligonucleotide
uucuaacacaucaguuggc

SEQ ID NO: 1065269 - RNA, 19 nt, Artificial Sequence
  Description of Artificial Sequence: Synthetic oligonucleotide
auagucaaugucucauaca

SEQ ID NO: 1065270 - RNA, 19 nt, Artificial Sequence
  Description of Artificial Sequence: Synthetic oligonucleotide
gaggcuuagcaacaggguc

SEQ ID NO: 1065271 - RNA, 19 nt, Artificial Sequence
  Description of Artificial Sequence: Synthetic oligonucleotide
ugaauauaguuuucacgau

SEQ ID NO: 1065272 - RNA, 19 nt, Artificial Sequence
  Description of Artificial Sequence: Synthetic oligonucleotide
caccaugcagagcagaaac

SEQ ID NO: 1065273 - RNA, 19 nt, Artificial Sequence
  Description of Artificial Sequence: Synthetic oligonucleotide
gcuaaugagaaacacaaua

SEQ ID NO: 1065274 - RNA, 19 nt, Artificial Sequence
  Description of Artificial Sequence: Synthetic oligonucleotide
aguauauuauuaaaugaua

SEQ ID NO: 1065275 - RNA, 19 nt, Artificial Sequence
  Description of Artificial Sequence: Synthetic oligonucleotide
caaaguuuauagccacacc

SEQ ID NO: 1065276 - RNA, 19 nt, Artificial Sequence
  Description of Artificial Sequence: Synthetic oligonucleotide
acaaccugaaugcuuguau

SEQ ID NO: 1065277 - RNA, 19 nt, Artificial Sequence
  Description of Artificial Sequence: Synthetic oligonucleotide
aaacccucggcucaacauu

SEQ ID NO: 1065278 - RNA, 19 nt, Artificial Sequence
  Description of Artificial Sequence: Synthetic oligonucleotide
cacuuguugcacaucaauc

SEQ ID NO: 1065279 - RNA, 19 nt, Artificial Sequence
  Description of Artificial Sequence: Synthetic oligonucleotide
ccaggaauuaaauaagguc

SEQ ID NO: 1065280 - RNA, 19 nt, Artificial Sequence
  Description of Artificial Sequence: Synthetic oligonucleotide
auaugauugcuugcugagg

SEQ ID NO: 1065281 - RNA, 19 nt, Artificial Sequence
  Description of Artificial Sequence: Synthetic oligonucleotide
aguuuauagccacaccuuu

SEQ ID NO: 1065282 - RNA, 19 nt, Artificial Sequence
  Description of Artificial Sequence: Synthetic oligonucleotide
aggcuaaugagaaacacaa

SEQ ID NO: 1065283 - RNA, 19 nt, Artificial Sequence
  Description of Artificial Sequence: Synthetic oligonucleotide
acaucuaauacaaccauuu

SEQ ID NO: 1065284 - RNA, 19 nt, Artificial Sequence
  Description of Artificial Sequence: Synthetic oligonucleotide
uucacacuuagcacuaauu

SEQ ID NO: 1065285 - RNA, 19 nt, Artificial Sequence
  Description of Artificial Sequence: Synthetic oligonucleotide
cauagaugccucgaagaag

SEQ ID NO: 1065286 - RNA, 19 nt, Artificial Sequence
  Description of Artificial Sequence: Synthetic oligonucleotide
auaugaggagcuucagccu

SEQ ID NO: 1065287 - RNA, 19 nt, Artificial Sequence
  Description of Artificial Sequence: Synthetic oligonucleotide
ucgccuauucagcaacagc

SEQ ID NO: 1065288 - RNA, 19 nt, Artificial Sequence
  Description of Artificial Sequence: Synthetic oligonucleotide
acacuuagcacuaauuaaa

SEQ ID NO: 1065289 - RNA, 19 nt, Artificial Sequence
  Description of Artificial Sequence: Synthetic oligonucleotide
caccccaacagucuaacuc

SEQ ID NO: 1065290 - RNA, 19 nt, Artificial Sequence
  Description of Artificial Sequence: Synthetic oligonucleotide
aguugcucccauauaaucu

SEQ ID NO: 1065291 - RNA, 19 nt, Artificial Sequence
  Description of Artificial Sequence: Synthetic oligonucleotide
accaaggacacuuguugca

SEQ ID NO: 1065292 - RNA, 19 nt, Artificial Sequence
  Description of Artificial Sequence: Synthetic oligonucleotide
auccguuaugagcauugag

SEQ ID NO: 1065293 - RNA, 19 nt, Artificial Sequence
  Description of Artificial Sequence: Synthetic oligonucleotide
cgccuauucagcaacagcg

SEQ ID NO: 1065294 - RNA, 19 nt, Artificial Sequence
  Description of Artificial Sequence: Synthetic oligonucleotide
acaugugcaauauggcaau

SEQ ID NO: 1065295 - RNA, 19 nt, Artificial Sequence
  Description of Artificial Sequence: Synthetic oligonucleotide
uuaugagcauugagacaag

SEQ ID NO: 1065296 - RNA, 19 nt, Artificial Sequence
  Description of Artificial Sequence: Synthetic oligonucleotide
uaugcuaguuuaacauaau

SEQ ID NO: 1065297 - RNA, 19 nt, Artificial Sequence
  Description of Artificial Sequence: Synthetic oligonucleotide
agcacaaugcacguuguga

SEQ ID NO: 1065298 - RNA, 19 nt, Artificial Sequence
  Description of Artificial Sequence: Synthetic oligonucleotide
cauuucuacauaacuagua

SEQ ID NO: 1065299 - RNA, 19 nt, Artificial Sequence
  Description of Artificial Sequence: Synthetic oligonucleotide
ucauuaagacaugugcaau

SEQ ID NO: 1065300 - RNA, 19 nt, Artificial Sequence
  Description of Artificial Sequence: Synthetic oligonucleotide
gggguuuaacccuaccuag

SEQ ID NO: 1065301 - RNA, 19 nt, Artificial Sequence
  Description of Artificial Sequence: Synthetic oligonucleotide
accguaagcauagaugccu

SEQ ID NO: 1065302 - RNA, 19 nt, Artificial Sequence
  Description of Artificial Sequence: Synthetic oligonucleotide
aagcacaaugcacguugug

SEQ ID NO: 1065303 - RNA, 19 nt, Artificial Sequence
  Description of Artificial Sequence: Synthetic oligonucleotide
ccuaggauaugauugcuug

SEQ ID NO: 1065304 - RNA, 19 nt, Artificial Sequence
  Description of Artificial Sequence: Synthetic oligonucleotide
aaaggcaaauaugcuaguu

SEQ ID NO: 1065305 - RNA, 19 nt, Artificial Sequence
  Description of Artificial Sequence: Synthetic oligonucleotide
acauuaauauaaaacuguu

SEQ ID NO: 1065306 - RNA, 19 nt, Artificial Sequence
  Description of Artificial Sequence: Synthetic oligonucleotide
agguaucuucuguuuagca

SEQ ID NO: 1065307 - RNA, 19 nt, Artificial Sequence
  Description of Artificial Sequence: Synthetic oligonucleotide
ggaauaauagcucucugcu

SEQ ID NO: 1065308 - RNA, 19 nt, Artificial Sequence
  Description of Artificial Sequence: Synthetic oligonucleotide
aggauaugauugcuugcug

SEQ ID NO: 1065309 - RNA, 19 nt, Artificial Sequence
  Description of Artificial Sequence: Synthetic oligonucleotide
aauccgcggagccaccaga

SEQ ID NO: 1065310 - RNA, 19 nt, Artificial Sequence
  Description of Artificial Sequence: Synthetic oligonucleotide
uuauagccacaccuuuccu

SEQ ID NO: 1065311 - RNA, 19 nt, Artificial Sequence
  Description of Artificial Sequence: Synthetic oligonucleotide
aagucgcuuugcuaucaga

SEQ ID NO: 1065312 - RNA, 19 nt, Artificial Sequence
  Description of Artificial Sequence: Synthetic oligonucleotide
cuuuuggaucuuuaauaca

SEQ ID NO: 1065313 - RNA, 19 nt, Artificial Sequence
  Description of Artificial Sequence: Synthetic oligonucleotide
augauccgaaagcccacuc

SEQ ID NO: 1065314 - RNA, 19 nt, Artificial Sequence
  Description of Artificial Sequence: Synthetic oligonucleotide
cacacuuagcacuaauuaa

SEQ ID NO: 1065315 - RNA, 19 nt, Artificial Sequence
  Description of Artificial Sequence: Synthetic oligonucleotide
uuuuaacggccuuucuaau

SEQ ID NO: 1065316 - RNA, 19 nt, Artificial Sequence
  Description of Artificial Sequence: Synthetic oligonucleotide
aacaucuaauacaaccauu

SEQ ID NO: 1065317 - RNA, 19 nt, Artificial Sequence
  Description of Artificial Sequence: Synthetic oligonucleotide
cucacaagagcucaggacu

SEQ ID NO: 1065318 - RNA, 19 nt, Artificial Sequence
  Description of Artificial Sequence: Synthetic oligonucleotide
cauaacuaguaaaugaauu

SEQ ID NO: 1065319 - RNA, 19 nt, Artificial Sequence
  Description of Artificial Sequence: Synthetic oligonucleotide
cagcacuuauaccuuuuag

SEQ ID NO: 1065320 - RNA, 19 nt, Artificial Sequence
  Description of Artificial Sequence: Synthetic oligonucleotide
uaugagcauugagacaaga

SEQ ID NO: 1065321 - RNA, 19 nt, Artificial Sequence
  Description of Artificial Sequence: Synthetic oligonucleotide
augcuaguuuaacauaauu

SEQ ID NO: 1065322 - RNA, 19 nt, Artificial Sequence
  Description of Artificial Sequence: Synthetic oligonucleotide
aaaucacuuuuaacggccu

SEQ ID NO: 1065323 - RNA, 19 nt, Artificial Sequence
  Description of Artificial Sequence: Synthetic oligonucleotide
ccguuaugagcauugagac

SEQ ID NO: 1065324 - RNA, 19 nt, Artificial Sequence
  Description of Artificial Sequence: Synthetic oligonucleotide
auuggaucucucaugaauu

SEQ ID NO: 1065325 - RNA, 19 nt, Artificial Sequence
  Description of Artificial Sequence: Synthetic oligonucleotide
cuaaagucgcuuugcuauc

SEQ ID NO: 1065326 - RNA, 19 nt, Artificial Sequence
  Description of Artificial Sequence: Synthetic oligonucleotide
agaauucgaauuggaucuc

SEQ ID NO: 1065327 - RNA, 19 nt, Artificial Sequence
  Description of Artificial Sequence: Synthetic oligonucleotide
acguugugaucgccuauuc

SEQ ID NO: 1065328 - RNA, 19 nt, Artificial Sequence
  Description of Artificial Sequence: Synthetic oligonucleotide
uugcgccuuguauugagaa

SEQ ID NO: 1065329 - RNA, 19 nt, Artificial Sequence
  Description of Artificial Sequence: Synthetic oligonucleotide
uaauccgcggagccaccag

SEQ ID NO: 1065330 - RNA, 19 nt, Artificial Sequence
  Description of Artificial Sequence: Synthetic oligonucleotide
ggcauuguggcagaaagca

SEQ ID NO: 1065331 - RNA, 19 nt, Artificial Sequence
  Description of Artificial Sequence: Synthetic oligonucleotide
auaagucaguagugaucag

SEQ ID NO: 1065332 - RNA, 19 nt, Artificial Sequence
  Description of Artificial Sequence: Synthetic oligonucleotide
acauaacuaguaaaugaau

SEQ ID NO: 1065333 - RNA, 19 nt, Artificial Sequence
  Description of Artificial Sequence: Synthetic oligonucleotide
cauugagacaagauucaaa

SEQ ID NO: 1065334 - RNA, 19 nt, Artificial Sequence
  Description of Artificial Sequence: Synthetic oligonucleotide
caggcuaaugagaaacaca

SEQ ID NO: 1065335 - RNA, 19 nt, Artificial Sequence
  Description of Artificial Sequence: Synthetic oligonucleotide
ugggccgccauguucucug

SEQ ID NO: 1065336 - RNA, 19 nt, Artificial Sequence
  Description of Artificial Sequence: Synthetic oligonucleotide
acaauaugaggagcuucag

SEQ ID NO: 1065337 - RNA, 19 nt, Artificial Sequence
  Description of Artificial Sequence: Synthetic oligonucleotide
ucacgauugguagguaggu

SEQ ID NO: 1065338 - RNA, 19 nt, Artificial Sequence
  Description of Artificial Sequence: Synthetic oligonucleotide
uaacggccuuucuaaucag

SEQ ID NO: 1065339 - RNA, 19 nt, Artificial Sequence
  Description of Artificial Sequence: Synthetic oligonucleotide
gguuuaacccuaccuagga

SEQ ID NO: 1065340 - RNA, 19 nt, Artificial Sequence
  Description of Artificial Sequence: Synthetic oligonucleotide
agucgcuuugcuaucagaa

SEQ ID NO: 1065341 - RNA, 19 nt, Artificial Sequence
  Description of Artificial Sequence: Synthetic oligonucleotide
caccuugcgccuuguauug

SEQ ID NO: 1065342 - RNA, 19 nt, Artificial Sequence
  Description of Artificial Sequence: Synthetic oligonucleotide
acaugauccgaaagcccac

SEQ ID NO: 1065343 - RNA, 19 nt, Artificial Sequence
  Description of Artificial Sequence: Synthetic oligonucleotide
gguaggucauaguuuauaa

SEQ ID NO: 1065344 - RNA, 19 nt, Artificial Sequence
  Description of Artificial Sequence: Synthetic oligonucleotide
auuuuacagaccccaucuu

SEQ ID NO: 1065345 - RNA, 19 nt, Artificial Sequence
  Description of Artificial Sequence: Synthetic oligonucleotide
cauacaagucacauagagu

SEQ ID NO: 1065346 - RNA, 19 nt, Artificial Sequence
  Description of Artificial Sequence: Synthetic oligonucleotide
gcgagcacugcauucaaac

SEQ ID NO: 1065347 - RNA, 19 nt, Artificial Sequence
  Description of Artificial Sequence: Synthetic oligonucleotide
aagauuuuacagaccccau

SEQ ID NO: 1065348 - RNA, 19 nt, Artificial Sequence
  Description of Artificial Sequence: Synthetic oligonucleotide
auccgaaagcccacucagc

SEQ ID NO: 1065349 - RNA, 19 nt, Artificial Sequence
  Description of Artificial Sequence: Synthetic oligonucleotide
auacaauaccaaacaaaau

SEQ ID NO: 1065350 - RNA, 19 nt, Artificial Sequence
  Description of Artificial Sequence: Synthetic oligonucleotide
agccaauaagucaguagug

SEQ ID NO: 1065351 - RNA, 19 nt, Artificial Sequence
  Description of Artificial Sequence: Synthetic oligonucleotide
ugcauccaaauguuuucua

SEQ ID NO: 1065352 - RNA, 19 nt, Artificial Sequence
  Description of Artificial Sequence: Synthetic oligonucleotide
cccauauaaucuccaagag

SEQ ID NO: 1065353 - RNA, 19 nt, Artificial Sequence
  Description of Artificial Sequence: Synthetic oligonucleotide
caaugcacguugugaucgc

SEQ ID NO: 1065354 - RNA, 19 nt, Artificial Sequence
  Description of Artificial Sequence: Synthetic oligonucleotide
acggcuugacccugaccgg

SEQ ID NO: 1065355 - RNA, 19 nt, Artificial Sequence
  Description of Artificial Sequence: Synthetic oligonucleotide
ugauugcuugcugaggcuu

SEQ ID NO: 1065356 - RNA, 19 nt, Artificial Sequence
  Description of Artificial Sequence: Synthetic oligonucleotide
ggaauuaaauaaggucagc

SEQ ID NO: 1065357 - RNA, 19 nt, Artificial Sequence
  Description of Artificial Sequence: Synthetic oligonucleotide
ccuauucagcaacagcgag

SEQ ID NO: 1065358 - RNA, 19 nt, Artificial Sequence
  Description of Artificial Sequence: Synthetic oligonucleotide
guuuucacgauugguaggu

SEQ ID NO: 1065359 - RNA, 19 nt, Artificial Sequence
  Description of Artificial Sequence: Synthetic oligonucleotide
ugcgccuuguauugagaaa

SEQ ID NO: 1065360 - RNA, 19 nt, Artificial Sequence
  Description of Artificial Sequence: Synthetic oligonucleotide
ugcacguugugaucgccua

SEQ ID NO: 1065361 - RNA, 19 nt, Artificial Sequence
  Description of Artificial Sequence: Synthetic oligonucleotide
cacgaagaauccucuuguc

SEQ ID NO: 1065362 - RNA, 19 nt, Artificial Sequence
  Description of Artificial Sequence: Synthetic oligonucleotide
aauaaccgcuugugugaua

SEQ ID NO: 1065363 - RNA, 19 nt, Artificial Sequence
  Description of Artificial Sequence: Synthetic oligonucleotide
ggguuuaacccuaccuagg

SEQ ID NO: 1065364 - RNA, 19 nt, Artificial Sequence
  Description of Artificial Sequence: Synthetic oligonucleotide
cucuguuguaauccgcgga

SEQ ID NO: 1065365 - RNA, 19 nt, Artificial Sequence
  Description of Artificial Sequence: Synthetic oligonucleotide
ugcugaggcuuagcaacag

SEQ ID NO: 1065366 - RNA, 19 nt, Artificial Sequence
  Description of Artificial Sequence: Synthetic oligonucleotide
aucgccuauucagcaacag

SEQ ID NO: 1065367 - RNA, 19 nt, Artificial Sequence
  Description of Artificial Sequence: Synthetic oligonucleotide
agaugccucgaagaagaga

SEQ ID NO: 1065368 - RNA, 19 nt, Artificial Sequence
  Description of Artificial Sequence: Synthetic oligonucleotide
ugugauccguuaugagcau

SEQ ID NO: 1065369 - RNA, 19 nt, Artificial Sequence
  Description of Artificial Sequence: Synthetic oligonucleotide
uaacucuaaagaggauaaa

SEQ ID NO: 1065370 - RNA, 19 nt, Artificial Sequence
  Description of Artificial Sequence: Synthetic oligonucleotide
uccggacauuuguuccucc

SEQ ID NO: 1065371 - RNA, 19 nt, Artificial Sequence
  Description of Artificial Sequence: Synthetic oligonucleotide
guuguaauccgcggagcca

SEQ ID NO: 1065372 - RNA, 19 nt, Artificial Sequence
  Description of Artificial Sequence: Synthetic oligonucleotide
guguacccacaacaauaug

SEQ ID NO: 1065373 - RNA, 19 nt, Artificial Sequence
  Description of Artificial Sequence: Synthetic oligonucleotide
ugcucucgaugacaccauc

SEQ ID NO: 1065374 - RNA, 19 nt, Artificial Sequence
  Description of Artificial Sequence: Synthetic oligonucleotide
caaggaauaauagcucucu

SEQ ID NO: 1065375 - RNA, 19 nt, Artificial Sequence
  Description of Artificial Sequence: Synthetic oligonucleotide
gccaauaagucaguaguga

SEQ ID NO: 1065376 - RNA, 19 nt, Artificial Sequence
  Description of Artificial Sequence: Synthetic oligonucleotide
agaacacggcuugacccug

SEQ ID NO: 1065377 - RNA, 19 nt, Artificial Sequence
  Description of Artificial Sequence: Synthetic oligonucleotide
augucacgaagaauccucu

SEQ ID NO: 1065378 - RNA, 19 nt, Artificial Sequence
  Description of Artificial Sequence: Synthetic oligonucleotide
gguaucuucuguuuagcau

SEQ ID NO: 1065379 - RNA, 19 nt, Artificial Sequence
  Description of Artificial Sequence: Synthetic oligonucleotide
caaggacacuuguugcaca

SEQ ID NO: 1065380 - RNA, 19 nt, Artificial Sequence
  Description of Artificial Sequence: Synthetic oligonucleotide
auacccaccccaacagucu

SEQ ID NO: 1065381 - RNA, 19 nt, Artificial Sequence
  Description of Artificial Sequence: Synthetic oligonucleotide
auccgcggagccaccagac

SEQ ID NO: 1065382 - RNA, 19 nt, Artificial Sequence
  Description of Artificial Sequence: Synthetic oligonucleotide
gcauagaugccucgaagaa

SEQ ID NO: 1065383 - RNA, 19 nt, Artificial Sequence
  Description of Artificial Sequence: Synthetic oligonucleotide
caccagaauucgaauugga

SEQ ID NO: 1065384 - RNA, 19 nt, Artificial Sequence
  Description of Artificial Sequence: Synthetic oligonucleotide
accgcuugugugauaguca

SEQ ID NO: 1065385 - RNA, 19 nt, Artificial Sequence
  Description of Artificial Sequence: Synthetic oligonucleotide
gaauucgaauuggaucucu

SEQ ID NO: 1065386 - RNA, 19 nt, Artificial Sequence
  Description of Artificial Sequence: Synthetic oligonucleotide
acccugaccggaauucucu

SEQ ID NO: 1065387 - RNA, 19 nt, Artificial Sequence
  Description of Artificial Sequence: Synthetic oligonucleotide
uaacccuaccuaggauaug

SEQ ID NO: 1065388 - RNA, 19 nt, Artificial Sequence
  Description of Artificial Sequence: Synthetic oligonucleotide
uuccggacauuuguuccuc

SEQ ID NO: 1065389 - RNA, 19 nt, Artificial Sequence
  Description of Artificial Sequence: Synthetic oligonucleotide
cuugcgccuuguauugaga

SEQ ID NO: 1065390 - RNA, 19 nt, Artificial Sequence
  Description of Artificial Sequence: Synthetic oligonucleotide
gugaucgccuauucagcaa

SEQ ID NO: 1065391 - RNA, 19 nt, Artificial Sequence
  Description of Artificial Sequence: Synthetic oligonucleotide
gaucgccuauucagcaaca

SEQ ID NO: 1065392 - RNA, 19 nt, Artificial Sequence
  Description of Artificial Sequence: Synthetic oligonucleotide
cguaagcauagaugccucg

SEQ ID NO: 1065393 - RNA, 19 nt, Artificial Sequence
  Description of Artificial Sequence: Synthetic oligonucleotide
ccuugcgccuuguauugag

SEQ ID NO: 1065394 - RNA, 19 nt, Artificial Sequence
  Description of Artificial Sequence: Synthetic oligonucleotide
caccaucgggguccauucc

SEQ ID NO: 1065395 - RNA, 19 nt, Artificial Sequence
  Description of Artificial Sequence: Synthetic oligonucleotide
acaagagcucaggacuaaa

SEQ ID NO: 1065396 - RNA, 19 nt, Artificial Sequence
  Description of Artificial Sequence: Synthetic oligonucleotide
uaaccgcuugugugauagu

SEQ ID NO: 1065397 - RNA, 19 nt, Artificial Sequence
  Description of Artificial Sequence: Synthetic oligonucleotide
gcgccuuguauugagaaaa

SEQ ID NO: 1065398 - RNA, 19 nt, Artificial Sequence
  Description of Artificial Sequence: Synthetic oligonucleotide
cagaacacggcuugacccu

SEQ ID NO: 1065399 - RNA, 19 nt, Artificial Sequence
  Description of Artificial Sequence: Synthetic oligonucleotide
augcacguugugaucgccu

SEQ ID NO: 1065400 - RNA, 19 nt, Artificial Sequence
  Description of Artificial Sequence: Synthetic oligonucleotide
caaguugcucccauauaau

SEQ ID NO: 1065401 - RNA, 19 nt, Artificial Sequence
  Description of Artificial Sequence: Synthetic oligonucleotide
accuaggauaugauugcuu

SEQ ID NO: 1065402 - RNA, 19 nt, Artificial Sequence
  Description of Artificial Sequence: Synthetic oligonucleotide
aaauuaccuuuuggaucuu

SEQ ID NO: 1065403 - RNA, 19 nt, Artificial Sequence
  Description of Artificial Sequence: Synthetic oligonucleotide
gucgcuuugcuaucagaau

SEQ ID NO: 1065404 - RNA, 19 nt, Artificial Sequence
  Description of Artificial Sequence: Synthetic oligonucleotide
guucacacuuagcacuaau

SEQ ID NO: 1065405 - RNA, 19 nt, Artificial Sequence
  Description of Artificial Sequence: Synthetic oligonucleotide
ccuuuccucacaagagcuc

SEQ ID NO: 1065406 - RNA, 19 nt, Artificial Sequence
  Description of Artificial Sequence: Synthetic oligonucleotide
caaccugaaugcuuguauu

SEQ ID NO: 1065407 - RNA, 19 nt, Artificial Sequence
  Description of Artificial Sequence: Synthetic oligonucleotide
ccaacagucuaacucuaaa

SEQ ID NO: 1065408 - RNA, 19 nt, Artificial Sequence
  Description of Artificial Sequence: Synthetic oligonucleotide
ggacuaaagucgcuuugcu

SEQ ID NO: 1065409 - RNA, 19 nt, Artificial Sequence
  Description of Artificial Sequence: Synthetic oligonucleotide
cugaccggaauucucucau

SEQ ID NO: 1065410 - RNA, 19 nt, Artificial Sequence
  Description of Artificial Sequence: Synthetic oligonucleotide
aguucacacuuagcacuaa

SEQ ID NO: 1065411 - RNA, 19 nt, Artificial Sequence
  Description of Artificial Sequence: Synthetic oligonucleotide
ccguaagcauagaugccuc

SEQ ID NO: 1065412 - RNA, 19 nt, Artificial Sequence
  Description of Artificial Sequence: Synthetic oligonucleotide
caccagacaugauccgaaa

SEQ ID NO: 1065413 - RNA, 19 nt, Artificial Sequence
  Description of Artificial Sequence: Synthetic oligonucleotide
uugauccauuuuggagaaa

SEQ ID NO: 1065414 - RNA, 19 nt, Artificial Sequence
  Description of Artificial Sequence: Synthetic oligonucleotide
cuaucucaucccaggaauu

SEQ ID NO: 1065415 - RNA, 19 nt, Artificial Sequence
  Description of Artificial Sequence: Synthetic oligonucleotide
cucauuccggacauuuguu

SEQ ID NO: 1065416 - RNA, 19 nt, Artificial Sequence
  Description of Artificial Sequence: Synthetic oligonucleotide
ggcuuagcaacagggucca

SEQ ID NO: 1065417 - RNA, 19 nt, Artificial Sequence
  Description of Artificial Sequence: Synthetic oligonucleotide
gccuauucagcaacagcga

SEQ ID NO: 1065418 - RNA, 19 nt, Artificial Sequence
  Description of Artificial Sequence: Synthetic oligonucleotide
caucucauuccggacauuu

SEQ ID NO: 1065419 - RNA, 19 nt, Artificial Sequence
  Description of Artificial Sequence: Synthetic oligonucleotide
acgagccaauaagucagua

SEQ ID NO: 1065420 - RNA, 19 nt, Artificial Sequence
  Description of Artificial Sequence: Synthetic oligonucleotide
gguagguaggucauaguuu

SEQ ID NO: 1065421 - RNA, 19 nt, Artificial Sequence
  Description of Artificial Sequence: Synthetic oligonucleotide
gaacacggcuugacccuga

SEQ ID NO: 1065422 - RNA, 19 nt, Artificial Sequence
  Description of Artificial Sequence: Synthetic oligonucleotide
ccaauaagucaguagugau

SEQ ID NO: 1065423 - RNA, 19 nt, Artificial Sequence
  Description of Artificial Sequence: Synthetic oligonucleotide
cguuaugagcauugagaca

SEQ ID NO: 1065424 - RNA, 19 nt, Artificial Sequence
  Description of Artificial Sequence: Synthetic oligonucleotide
ccuuuuaguccacaaguau

SEQ ID NO: 1065425 - RNA, 19 nt, Artificial Sequence
  Description of Artificial Sequence: Synthetic oligonucleotide
gcauugagacaagauucaa

SEQ ID NO: 1065426 - RNA, 19 nt, Artificial Sequence
  Description of Artificial Sequence: Synthetic oligonucleotide
gccuuucuaaucaggcuaa

SEQ ID NO: 1065427 - RNA, 19 nt, Artificial Sequence
  Description of Artificial Sequence: Synthetic oligonucleotide
cucaggacuaaagucgcuu

SEQ ID NO: 1065428 - RNA, 19 nt, Artificial Sequence
  Description of Artificial Sequence: Synthetic oligonucleotide
accuugcgccuuguauuga

SEQ ID NO: 1065429 - RNA, 19 nt, Artificial Sequence
  Description of Artificial Sequence: Synthetic oligonucleotide
ccgcuugugugauagucaa

SEQ ID NO: 1065430 - RNA, 19 nt, Artificial Sequence
  Description of Artificial Sequence: Synthetic oligonucleotide
caugauccgaaagcccacu

SEQ ID NO: 1065431 - RNA, 19 nt, Artificial Sequence
  Description of Artificial Sequence: Synthetic oligonucleotide
gccuuuccucacaagagcu

SEQ ID NO: 1065432 - RNA, 19 nt, Artificial Sequence
  Description of Artificial Sequence: Synthetic oligonucleotide
acccuaccuaggauaugau

SEQ ID NO: 1065433 - RNA, 19 nt, Artificial Sequence
  Description of Artificial Sequence: Synthetic oligonucleotide
cccugaccggaauucucuc

SEQ ID NO: 1065434 - RNA, 19 nt, Artificial Sequence
  Description of Artificial Sequence: Synthetic oligonucleotide
cguugugaucgccuauuca

SEQ ID NO: 1065435 - RNA, 19 nt, Artificial Sequence
  Description of Artificial Sequence: Synthetic oligonucleotide
aguccaccuugcgccuugu

SEQ ID NO: 1065436 - RNA, 19 nt, Artificial Sequence
  Description of Artificial Sequence: Synthetic oligonucleotide
cacguugugaucgccuauu

SEQ ID NO: 1065437 - RNA, 19 nt, Artificial Sequence
  Description of Artificial Sequence: Synthetic oligonucleotide
cccaacagucuaacucuaa

SEQ ID NO: 1065438 - RNA, 19 nt, Artificial Sequence
  Description of Artificial Sequence: Synthetic oligonucleotide
ggcuaaugagaaacacaau

SEQ ID NO: 1065439 - RNA, 19 nt, Artificial Sequence
  Description of Artificial Sequence: Synthetic oligonucleotide
gcacaaccugaaugcuugu

SEQ ID NO: 1065440 - RNA, 19 nt, Artificial Sequence
  Description of Artificial Sequence: Synthetic oligonucleotide
cccuaccuaggauaugauu

SEQ ID NO: 1065441 - RNA, 19 nt, Artificial Sequence
  Description of Artificial Sequence: Synthetic oligonucleotide
gcacguugugaucgccuau

SEQ ID NO: 1065442 - RNA, 19 nt, Artificial Sequence
  Description of Artificial Sequence: Synthetic oligonucleotide
gcuugacccugaccggaau

SEQ ID NO: 1065443 - RNA, 19 nt, Artificial Sequence
  Description of Artificial Sequence: Synthetic oligonucleotide
ccgccauguucucuguugu

SEQ ID NO: 1065444 - RNA, 19 nt, Artificial Sequence
  Description of Artificial Sequence: Synthetic oligonucleotide
cgauugguagguaggucau

SEQ ID NO: 1065445 - RNA, 19 nt, Artificial Sequence
  Description of Artificial Sequence: Synthetic oligonucleotide
ugacaccaucgggguccau

SEQ ID NO: 1065446 - RNA, 19 nt, Artificial Sequence
  Description of Artificial Sequence: Synthetic oligonucleotide
ccuuucuaaucaggcuaau

SEQ ID NO: 1065447 - RNA, 19 nt, Artificial Sequence
  Description of Artificial Sequence: Synthetic oligonucleotide
cgcuugugugauagucaau

SEQ ID NO: 1065448 - RNA, 19 nt, Artificial Sequence
  Description of Artificial Sequence: Synthetic oligonucleotide
aauauuccucaugagaucc

SEQ ID NO: 1065449 - RNA, 19 nt, Artificial Sequence
  Description of Artificial Sequence: Synthetic oligonucleotide
auauauaagcacuguaccc

SEQ ID NO: 1065450 - RNA, 19 nt, Artificial Sequence
  Description of Artificial Sequence: Synthetic oligonucleotide
aggaugaucaucuuuagca

SEQ ID NO: 1065451 - RNA, 19 nt, Artificial Sequence
  Description of Artificial Sequence: Synthetic oligonucleotide
aaucgauagggguuuuggc

SEQ ID NO: 1065452 - RNA, 19 nt, Artificial Sequence
  Description of Artificial Sequence: Synthetic oligonucleotide
aaauauuccucaugagauc

SEQ ID NO: 1065453 - RNA, 19 nt, Artificial Sequence
  Description of Artificial Sequence: Synthetic oligonucleotide
uguggagacaaucauauau

SEQ ID NO: 1065454 - RNA, 19 nt, Artificial Sequence
  Description of Artificial Sequence: Synthetic oligonucleotide
aaugagacgccaccagggc

SEQ ID NO: 1065455 - RNA, 19 nt, Artificial Sequence
  Description of Artificial Sequence: Synthetic oligonucleotide
agacguuucguucuucacc

SEQ ID NO: 1065456 - RNA, 19 nt, Artificial Sequence
  Description of Artificial Sequence: Synthetic oligonucleotide
gaaacggaugagcaguucg

SEQ ID NO: 1065457 - RNA, 19 nt, Artificial Sequence
  Description of Artificial Sequence: Synthetic oligonucleotide
auagcgaacaccaccaggc

SEQ ID NO: 1065458 - RNA, 19 nt, Artificial Sequence
  Description of Artificial Sequence: Synthetic oligonucleotide
agcggaaugcagcagacac

SEQ ID NO: 1065459 - RNA, 19 nt, Artificial Sequence
  Description of Artificial Sequence: Synthetic oligonucleotide
ucugaugaacagcuggcgg

SEQ ID NO: 1065460 - RNA, 19 nt, Artificial Sequence
  Description of Artificial Sequence: Synthetic oligonucleotide
cuuggugucggccuuaggg

SEQ ID NO: 1065461 - RNA, 19 nt, Artificial Sequence
  Description of Artificial Sequence: Synthetic oligonucleotide
guagaugaggggcagaacc

SEQ ID NO: 1065462 - RNA, 19 nt, Artificial Sequence
  Description of Artificial Sequence: Synthetic oligonucleotide
gauguguuuggccaccccg

SEQ ID NO: 1065463 - RNA, 19 nt, Artificial Sequence
  Description of Artificial Sequence: Synthetic oligonucleotide
cacaccaaagacgauagcg

SEQ ID NO: 1065464 - RNA, 19 nt, Artificial Sequence
  Description of Artificial Sequence: Synthetic oligonucleotide
gauguucugaguucguaug

SEQ ID NO: 1065465 - RNA, 19 nt, Artificial Sequence
  Description of Artificial Sequence: Synthetic oligonucleotide
ugaagaaacggaugagcag

SEQ ID NO: 1065466 - RNA, 19 nt, Artificial Sequence
  Description of Artificial Sequence: Synthetic oligonucleotide
gauagcgaacaccaccagg

SEQ ID NO: 1065467 - RNA, 19 nt, Artificial Sequence
  Description of Artificial Sequence: Synthetic oligonucleotide
gacgauagcgaacaccacc

SEQ ID NO: 1065468 - RNA, 19 nt, Artificial Sequence
  Description of Artificial Sequence: Synthetic oligonucleotide
gaugguacaggaccugucc

SEQ ID NO: 1065469 - RNA, 19 nt, Artificial Sequence
  Description of Artificial Sequence: Synthetic oligonucleotide
aaacggaugagcaguucgc

SEQ ID NO: 1065470 - RNA, 19 nt, Artificial Sequence
  Description of Artificial Sequence: Synthetic oligonucleotide
aacggaugagcaguucgcc

SEQ ID NO: 1065471 - RNA, 19 nt, Artificial Sequence
  Description of Artificial Sequence: Synthetic oligonucleotide
caaugagacgccaccaggg

SEQ ID NO: 1065472 - RNA, 19 nt, Artificial Sequence
  Description of Artificial Sequence: Synthetic oligonucleotide
cuugguucgauccacauaa

SEQ ID NO: 1065473 - RNA, 19 nt, Artificial Sequence
  Description of Artificial Sequence: Synthetic oligonucleotide
gaaucgauagggguuuugg

SEQ ID NO: 1065474 - RNA, 19 nt, Artificial Sequence
  Description of Artificial Sequence: Synthetic oligonucleotide
gacuccuuuucacacgcgg

SEQ ID NO: 1065475 - RNA, 19 nt, Artificial Sequence
  Description of Artificial Sequence: Synthetic oligonucleotide
ugugugcacagucaguagu

SEQ ID NO: 1065476 - RNA, 19 nt, Artificial Sequence
  Description of Artificial Sequence: Synthetic oligonucleotide
uuuagcagacgcagcagca

SEQ ID NO: 1065477 - RNA, 19 nt, Artificial Sequence
  Description of Artificial Sequence: Synthetic oligonucleotide
guagaauaagagcggaaug

SEQ ID NO: 1065478 - RNA, 19 nt, Artificial Sequence
  Description of Artificial Sequence: Synthetic oligonucleotide
auaagagcggaaugcagca

SEQ ID NO: 1065479 - RNA, 19 nt, Artificial Sequence
  Description of Artificial Sequence: Synthetic oligonucleotide
ugaguucguaugaaguaga

SEQ ID NO: 1065480 - RNA, 19 nt, Artificial Sequence
  Description of Artificial Sequence: Synthetic oligonucleotide
uggauucagagacguuucg

SEQ ID NO: 1065481 - RNA, 19 nt, Artificial Sequence
  Description of Artificial Sequence: Synthetic oligonucleotide
gaaggcgucaccuuccaca

SEQ ID NO: 1065482 - RNA, 19 nt, Artificial Sequence
  Description of Artificial Sequence: Synthetic oligonucleotide
gaugcgguagcugugacca

SEQ ID NO: 1065483 - RNA, 19 nt, Artificial Sequence
  Description of Artificial Sequence: Synthetic oligonucleotide
ugcuauucacaugacagac

SEQ ID NO: 1065484 - RNA, 19 nt, Artificial Sequence
  Description of Artificial Sequence: Synthetic oligonucleotide
gaugaucaucuuuagcaga

SEQ ID NO: 1065485 - RNA, 19 nt, Artificial Sequence
  Description of Artificial Sequence: Synthetic oligonucleotide
uuuuggcgggugaagacga

SEQ ID NO: 1065486 - RNA, 19 nt, Artificial Sequence
  Description of Artificial Sequence: Synthetic oligonucleotide
aggggcguaccacauaauc

SEQ ID NO: 1065487 - RNA, 19 nt, Artificial Sequence
  Description of Artificial Sequence: Synthetic oligonucleotide
aggaugaaccggcugaugu

SEQ ID NO: 1065488 - RNA, 19 nt, Artificial Sequence
  Description of Artificial Sequence: Synthetic oligonucleotide
ucugaguucguaugaagua

SEQ ID NO: 1065489 - RNA, 19 nt, Artificial Sequence
  Description of Artificial Sequence: Synthetic oligonucleotide
acagacuccuuuucacacg

SEQ ID NO: 1065490 - RNA, 19 nt, Artificial Sequence
  Description of Artificial Sequence: Synthetic oligonucleotide
aguagaauaagagcggaau

SEQ ID NO: 1065491 - RNA, 19 nt, Artificial Sequence
  Description of Artificial Sequence: Synthetic oligonucleotide
uuggcggugccauccaccg

SEQ ID NO: 1065492 - RNA, 19 nt, Artificial Sequence
  Description of Artificial Sequence: Synthetic oligonucleotide
gaauaagagcggaaugcag

SEQ ID NO: 1065493 - RNA, 19 nt, Artificial Sequence
  Description of Artificial Sequence: Synthetic oligonucleotide
cuuccaaugagacgccacc

SEQ ID NO: 1065494 - RNA, 19 nt, Artificial Sequence
  Description of Artificial Sequence: Synthetic oligonucleotide
cucagauguucugaguucg

SEQ ID NO: 1065495 - RNA, 19 nt, Artificial Sequence
  Description of Artificial Sequence: Synthetic oligonucleotide
ugagacgccaccagggcac

SEQ ID NO: 1065496 - RNA, 19 nt, Artificial Sequence
  Description of Artificial Sequence: Synthetic oligonucleotide
auauaagcacuguacccca

SEQ ID NO: 1065497 - RNA, 19 nt, Artificial Sequence
  Description of Artificial Sequence: Synthetic oligonucleotide
uggaggggaaaauauuccu

SEQ ID NO: 1065498 - RNA, 19 nt, Artificial Sequence
  Description of Artificial Sequence: Synthetic oligonucleotide
agaaccaggagcccgugga

SEQ ID NO: 1065499 - RNA, 19 nt, Artificial Sequence
  Description of Artificial Sequence: Synthetic oligonucleotide
ugguucgauccacauaacu

SEQ ID NO: 1065500 - RNA, 19 nt, Artificial Sequence
  Description of Artificial Sequence: Synthetic oligonucleotide
auggcaagcgugaggaccc

SEQ ID NO: 1065501 - RNA, 19 nt, Artificial Sequence
  Description of Artificial Sequence: Synthetic oligonucleotide
guuuuggcgggugaagacg

SEQ ID NO: 1065502 - RNA, 19 nt, Artificial Sequence
  Description of Artificial Sequence: Synthetic oligonucleotide
cagcacaggacguacuugc

SEQ ID NO: 1065503 - RNA, 19 nt, Artificial Sequence
  Description of Artificial Sequence: Synthetic oligonucleotide
gacguacuugcccagucug

SEQ ID NO: 1065504 - RNA, 19 nt, Artificial Sequence
  Description of Artificial Sequence: Synthetic oligonucleotide
uacaggaccuguccacuag

SEQ ID NO: 1065505 - RNA, 19 nt, Artificial Sequence
  Description of Artificial Sequence: Synthetic oligonucleotide
ggugauggcgcuaacggcg

SEQ ID NO: 1065506 - RNA, 19 nt, Artificial Sequence
  Description of Artificial Sequence: Synthetic oligonucleotide
aacggcgacgcccggcuuc

SEQ ID NO: 1065507 - RNA, 19 nt, Artificial Sequence
  Description of Artificial Sequence: Synthetic oligonucleotide
agcccuaucaccacgccgg

SEQ ID NO: 1065508 - RNA, 19 nt, Artificial Sequence
  Description of Artificial Sequence: Synthetic oligonucleotide
uuugacagggaggcugacg

SEQ ID NO: 1065509 - RNA, 19 nt, Artificial Sequence
  Description of Artificial Sequence: Synthetic oligonucleotide
agcgugaggaccccgccgg

SEQ ID NO: 1065510 - RNA, 19 nt, Artificial Sequence
  Description of Artificial Sequence: Synthetic oligonucleotide
agauguucugaguucguau

SEQ ID NO: 1065511 - RNA, 19 nt, Artificial Sequence
  Description of Artificial Sequence: Synthetic oligonucleotide
gaagaaacggaugagcagu

SEQ ID NO: 1065512 - RNA, 19 nt, Artificial Sequence
  Description of Artificial Sequence: Synthetic oligonucleotide
cagacuccuuuucacacgc

SEQ ID NO: 1065513 - RNA, 19 nt, Artificial Sequence
  Description of Artificial Sequence: Synthetic oligonucleotide
aucaaggagaugucuuuga

SEQ ID NO: 1065514 - RNA, 19 nt, Artificial Sequence
  Description of Artificial Sequence: Synthetic oligonucleotide
uugcccagucugaugaaca

SEQ ID NO: 1065515 - RNA, 19 nt, Artificial Sequence
  Description of Artificial Sequence: Synthetic oligonucleotide
uuucacacgcggcagcguc

SEQ ID NO: 1065516 - RNA, 19 nt, Artificial Sequence
  Description of Artificial Sequence: Synthetic oligonucleotide
ugaucaucuuuagcagacg

SEQ ID NO: 1065517 - RNA, 19 nt, Artificial Sequence
  Description of Artificial Sequence: Synthetic oligonucleotide
aaggcgucaccuuccacau

SEQ ID NO: 1065518 - RNA, 19 nt, Artificial Sequence
  Description of Artificial Sequence: Synthetic oligonucleotide
gacguuucguucuucaccu

SEQ ID NO: 1065519 - RNA, 19 nt, Artificial Sequence
  Description of Artificial Sequence: Synthetic oligonucleotide
accguuggcggugccaucc

SEQ ID NO: 1065520 - RNA, 19 nt, Artificial Sequence
  Description of Artificial Sequence: Synthetic oligonucleotide
uggcggaugucuuccaucu

SEQ ID NO: 1065521 - RNA, 19 nt, Artificial Sequence
  Description of Artificial Sequence: Synthetic oligonucleotide
cuuuucacacgcggcagcg

SEQ ID NO: 1065522 - RNA, 19 nt, Artificial Sequence
  Description of Artificial Sequence: Synthetic oligonucleotide
ucaugauaccccacaggaa

SEQ ID NO: 1065523 - RNA, 19 nt, Artificial Sequence
  Description of Artificial Sequence: Synthetic oligonucleotide
auguucugaguucguauga

SEQ ID NO: 1065524 - RNA, 19 nt, Artificial Sequence
  Description of Artificial Sequence: Synthetic oligonucleotide
caaacccacgccgagcgcg

SEQ ID NO: 1065525 - RNA, 19 nt, Artificial Sequence
  Description of Artificial Sequence: Synthetic oligonucleotide
accaaagacgauagcgaac

SEQ ID NO: 1065526 - RNA, 19 nt, Artificial Sequence
  Description of Artificial Sequence: Synthetic oligonucleotide
cagagcuagaagagguccc

SEQ ID NO: 1065527 - RNA, 19 nt, Artificial Sequence
  Description of Artificial Sequence: Synthetic oligonucleotide
ucgauccacauaacuuuga

SEQ ID NO: 1065528 - RNA, 19 nt, Artificial Sequence
  Description of Artificial Sequence: Synthetic oligonucleotide
ugcccagucugaugaacag

SEQ ID NO: 1065529 - RNA, 19 nt, Artificial Sequence
  Description of Artificial Sequence: Synthetic oligonucleotide
ggcgucaccuuccacauug

SEQ ID NO: 1065530 - RNA, 19 nt, Artificial Sequence
  Description of Artificial Sequence: Synthetic oligonucleotide
auggcgcuaacggcgacgc

SEQ ID NO: 1065531 - RNA, 19 nt, Artificial Sequence
  Description of Artificial Sequence: Synthetic oligonucleotide
acaggggcguaccacauaa

SEQ ID NO: 1065532 - RNA, 19 nt, Artificial Sequence
  Description of Artificial Sequence: Synthetic oligonucleotide
ugguacaggaccuguccac

SEQ ID NO: 1065533 - RNA, 19 nt, Artificial Sequence
  Description of Artificial Sequence: Synthetic oligonucleotide
agcagcucgcccgggaagc

SEQ ID NO: 1065534 - RNA, 19 nt, Artificial Sequence
  Description of Artificial Sequence: Synthetic oligonucleotide
acuuccaaugagacgccac

SEQ ID NO: 1065535 - RNA, 19 nt, Artificial Sequence
  Description of Artificial Sequence: Synthetic oligonucleotide
uguaccccagcaacuucca

SEQ ID NO: 1065536 - RNA, 19 nt, Artificial Sequence
  Description of Artificial Sequence: Synthetic oligonucleotide
aacagcgccgccccaucca

SEQ ID NO: 1065537 - RNA, 19 nt, Artificial Sequence
  Description of Artificial Sequence: Synthetic oligonucleotide
augcccucgaccucaccuc

SEQ ID NO: 1065538 - RNA, 19 nt, Artificial Sequence
  Description of Artificial Sequence: Synthetic oligonucleotide
uccuuuucacacgcggcag

SEQ ID NO: 1065539 - RNA, 19 nt, Artificial Sequence
  Description of Artificial Sequence: Synthetic oligonucleotide
gauggcgcuaacggcgacg

SEQ ID NO: 1065540 - RNA, 19 nt, Artificial Sequence
  Description of Artificial Sequence: Synthetic oligonucleotide
gacgcgagcagcgugguga

SEQ ID NO: 1065541 - RNA, 19 nt, Artificial Sequence
  Description of Artificial Sequence: Synthetic oligonucleotide
acgauagcgaacaccacca

SEQ ID NO: 1065542 - RNA, 19 nt, Artificial Sequence
  Description of Artificial Sequence: Synthetic oligonucleotide
ugauguguuuggccacccc

SEQ ID NO: 1065543 - RNA, 19 nt, Artificial Sequence
  Description of Artificial Sequence: Synthetic oligonucleotide
ugaugguacaggaccuguc

SEQ ID NO: 1065544 - RNA, 19 nt, Artificial Sequence
  Description of Artificial Sequence: Synthetic oligonucleotide
caugauaccccacaggaau

SEQ ID NO: 1065545 - RNA, 19 nt, Artificial Sequence
  Description of Artificial Sequence: Synthetic oligonucleotide
gagacguuucguucuucac

SEQ ID NO: 1065546 - RNA, 19 nt, Artificial Sequence
  Description of Artificial Sequence: Synthetic oligonucleotide
cauguugacgguggcgccg

SEQ ID NO: 1065547 - RNA, 19 nt, Artificial Sequence
  Description of Artificial Sequence: Synthetic oligonucleotide
accagcggcaggaugauca

SEQ ID NO: 1065548 - RNA, 19 nt, Artificial Sequence
  Description of Artificial Sequence: Synthetic oligonucleotide
acauaauccaggagaccag

SEQ ID NO: 1065549 - RNA, 19 nt, Artificial Sequence
  Description of Artificial Sequence: Synthetic oligonucleotide
acggccgccacacacugga

SEQ ID NO: 1065550 - RNA, 19 nt, Artificial Sequence
  Description of Artificial Sequence: Synthetic oligonucleotide
aaguagaauaagagcggaa

SEQ ID NO: 1065551 - RNA, 19 nt, Artificial Sequence
  Description of Artificial Sequence: Synthetic oligonucleotide
agaaacggaugagcaguuc

SEQ ID NO: 1065552 - RNA, 19 nt, Artificial Sequence
  Description of Artificial Sequence: Synthetic oligonucleotide
gccaagaucaaggagaugu

SEQ ID NO: 1065553 - RNA, 19 nt, Artificial Sequence
  Description of Artificial Sequence: Synthetic oligonucleotide
ggcggugccauccaccgcc

SEQ ID NO: 1065554 - RNA, 19 nt, Artificial Sequence
  Description of Artificial Sequence: Synthetic oligonucleotide
acaggaaucgauagggguu

SEQ ID NO: 1065555 - RNA, 19 nt, Artificial Sequence
  Description of Artificial Sequence: Synthetic oligonucleotide
agcuagaagaggucccaaa

SEQ ID NO: 1065556 - RNA, 19 nt, Artificial Sequence
  Description of Artificial Sequence: Synthetic oligonucleotide
aaacccacgccgagcgcgg

SEQ ID NO: 1065557 - RNA, 19 nt, Artificial Sequence
  Description of Artificial Sequence: Synthetic oligonucleotide
ggcgccuccgaucaggcug

SEQ ID NO: 1065558 - RNA, 19 nt, Artificial Sequence
  Description of Artificial Sequence: Synthetic oligonucleotide
ucagagacguuucguucuu

SEQ ID NO: 1065559 - RNA, 19 nt, Artificial Sequence
  Description of Artificial Sequence: Synthetic oligonucleotide
aguucguaugaaguagaau

SEQ ID NO: 1065560 - RNA, 19 nt, Artificial Sequence
  Description of Artificial Sequence: Synthetic oligonucleotide
aacuuccaaugagacgcca

SEQ ID NO: 1065561 - RNA, 19 nt, Artificial Sequence
  Description of Artificial Sequence: Synthetic oligonucleotide
aggaccuguccacuagcca

SEQ ID NO: 1065562 - RNA, 19 nt, Artificial Sequence
  Description of Artificial Sequence: Synthetic oligonucleotide
gaugaaccggcugaugugu

SEQ ID NO: 1065563 - RNA, 19 nt, Artificial Sequence
  Description of Artificial Sequence: Synthetic oligonucleotide
agccacccgcuuucgcgcc

SEQ ID NO: 1065564 - RNA, 19 nt, Artificial Sequence
  Description of Artificial Sequence: Synthetic oligonucleotide
guacuugcccagucugaug

SEQ ID NO: 1065565 - RNA, 19 nt, Artificial Sequence
  Description of Artificial Sequence: Synthetic oligonucleotide
uagggguuuuggcggguga

SEQ ID NO: 1065566 - RNA, 19 nt, Artificial Sequence
  Description of Artificial Sequence: Synthetic oligonucleotide
gacgcccggcuucagcgcc

SEQ ID NO: 1065567 - RNA, 19 nt, Artificial Sequence
  Description of Artificial Sequence: Synthetic oligonucleotide
caaaagccguggccagugg

SEQ ID NO: 1065568 - RNA, 19 nt, Artificial Sequence
  Description of Artificial Sequence: Synthetic oligonucleotide
acgcgagcagcguggugac

SEQ ID NO: 1065569 - RNA, 19 nt, Artificial Sequence
  Description of Artificial Sequence: Synthetic oligonucleotide
gaacagcgccgccccaucc

SEQ ID NO: 1065570 - RNA, 19 nt, Artificial Sequence
  Description of Artificial Sequence: Synthetic oligonucleotide
uugguucgauccacauaac

SEQ ID NO: 1065571 - RNA, 19 nt, Artificial Sequence
  Description of Artificial Sequence: Synthetic oligonucleotide
cagccacccgcuuucgcgc

SEQ ID NO: 1065572 - RNA, 19 nt, Artificial Sequence
  Description of Artificial Sequence: Synthetic oligonucleotide
aagaaacggaugagcaguu

SEQ ID NO: 1065573 - RNA, 19 nt, Artificial Sequence
  Description of Artificial Sequence: Synthetic oligonucleotide
gcuagaagaggucccaaaa

SEQ ID NO: 1065574 - RNA, 19 nt, Artificial Sequence
  Description of Artificial Sequence: Synthetic oligonucleotide
gcgacgcccggcuucagcg

SEQ ID NO: 1065575 - RNA, 19 nt, Artificial Sequence
  Description of Artificial Sequence: Synthetic oligonucleotide
guuggcggugccauccacc

SEQ ID NO: 1065576 - RNA, 19 nt, Artificial Sequence
  Description of Artificial Sequence: Synthetic oligonucleotide
guggcgucaugauacccca

SEQ ID NO: 1065577 - RNA, 19 nt, Artificial Sequence
  Description of Artificial Sequence: Synthetic oligonucleotide
ugaaccggcugauguguuu

SEQ ID NO: 1065578 - RNA, 19 nt, Artificial Sequence
  Description of Artificial Sequence: Synthetic oligonucleotide
uggaugcgguagcugugac

SEQ ID NO: 1065579 - RNA, 19 nt, Artificial Sequence
  Description of Artificial Sequence: Synthetic oligonucleotide
agacgauagcgaacaccac

SEQ ID NO: 1065580 - RNA, 19 nt, Artificial Sequence
  Description of Artificial Sequence: Synthetic oligonucleotide
uuucgcgccuugguccucc

SEQ ID NO: 1065581 - RNA, 19 nt, Artificial Sequence
  Description of Artificial Sequence: Synthetic oligonucleotide
acacgcggcagcguccccg

SEQ ID NO: 1065582 - RNA, 19 nt, Artificial Sequence
  Description of Artificial Sequence: Synthetic oligonucleotide
caguucgcccucaggcccc

SEQ ID NO: 1065583 - RNA, 19 nt, Artificial Sequence
  Description of Artificial Sequence: Synthetic oligonucleotide
ggcgucaugauaccccaca

SEQ ID NO: 1065584 - RNA, 19 nt, Artificial Sequence
  Description of Artificial Sequence: Synthetic oligonucleotide
uuuggcgggugaagacgaa

SEQ ID NO: 1065585 - RNA, 19 nt, Artificial Sequence
  Description of Artificial Sequence: Synthetic oligonucleotide
ccacaggaaucgauagggg

SEQ ID NO: 1065586 - RNA, 19 nt, Artificial Sequence
  Description of Artificial Sequence: Synthetic oligonucleotide
agccgaaggcggccaggcg

SEQ ID NO: 1065587 - RNA, 19 nt, Artificial Sequence
  Description of Artificial Sequence: Synthetic oligonucleotide
gcgucaugauaccccacag

SEQ ID NO: 1065588 - RNA, 19 nt, Artificial Sequence
  Description of Artificial Sequence: Synthetic oligonucleotide
agaggucccaaaagccgug

SEQ ID NO: 1065589 - RNA, 19 nt, Artificial Sequence
  Description of Artificial Sequence: Synthetic oligonucleotide
agguuggcgcgaaggcagc

SEQ ID NO: 1065590 - RNA, 19 nt, Artificial Sequence
  Description of Artificial Sequence: Synthetic oligonucleotide
auagggguuuuggcgggug

SEQ ID NO: 1065591 - RNA, 19 nt, Artificial Sequence
  Description of Artificial Sequence: Synthetic oligonucleotide
gauuggaggggaaaauauu

SEQ ID NO: 1065592 - RNA, 19 nt, Artificial Sequence
  Description of Artificial Sequence: Synthetic oligonucleotide
ucggcgucuugguucgauc

SEQ ID NO: 1065593 - RNA, 19 nt, Artificial Sequence
  Description of Artificial Sequence: Synthetic oligonucleotide
accccgccggcagggaugc

SEQ ID NO: 1065594 - RNA, 19 nt, Artificial Sequence
  Description of Artificial Sequence: Synthetic oligonucleotide
ccuaucaccacgccggcca

SEQ ID NO: 1065595 - RNA, 19 nt, Artificial Sequence
  Description of Artificial Sequence: Synthetic oligonucleotide
ggcuucagcgccaaagcca

SEQ ID NO: 1065596 - RNA, 19 nt, Artificial Sequence
  Description of Artificial Sequence: Synthetic oligonucleotide
acccacgccgagcgcggac

SEQ ID NO: 1065597 - RNA, 19 nt, Artificial Sequence
  Description of Artificial Sequence: Synthetic oligonucleotide
ugauggcgcuaacggcgac

SEQ ID NO: 1065598 - RNA, 19 nt, Artificial Sequence
  Description of Artificial Sequence: Synthetic oligonucleotide
cuaucaccacgccggccac

SEQ ID NO: 1065599 - RNA, 19 nt, Artificial Sequence
  Description of Artificial Sequence: Synthetic oligonucleotide
cccguggauggcauggccc

SEQ ID NO: 1065600 - RNA, 19 nt, Artificial Sequence
  Description of Artificial Sequence: Synthetic oligonucleotide
ccaagaucaaggagauguc

SEQ ID NO: 1065601 - RNA, 19 nt, Artificial Sequence
  Description of Artificial Sequence: Synthetic oligonucleotide
ccuuuucacacgcggcagc

SEQ ID NO: 1065602 - RNA, 19 nt, Artificial Sequence
  Description of Artificial Sequence: Synthetic oligonucleotide
cgcuuucgcgccuuggucc

SEQ ID NO: 1065603 - RNA, 19 nt, Artificial Sequence
  Description of Artificial Sequence: Synthetic oligonucleotide
gaagcaguccggccccgaa

SEQ ID NO: 1065604 - RNA, 19 nt, Artificial Sequence
  Description of Artificial Sequence: Synthetic oligonucleotide
caguggcgucaugauaccc

SEQ ID NO: 1065605 - RNA, 19 nt, Artificial Sequence
  Description of Artificial Sequence: Synthetic oligonucleotide
agacuccuuuucacacgcg

SEQ ID NO: 1065606 - RNA, 19 nt, Artificial Sequence
  Description of Artificial Sequence: Synthetic oligonucleotide
acgccaccagggcacagaa

SEQ ID NO: 1065607 - RNA, 19 nt, Artificial Sequence
  Description of Artificial Sequence: Synthetic oligonucleotide
gccgccacacacuggaaca

SEQ ID NO: 1065608 - RNA, 19 nt, Artificial Sequence
  Description of Artificial Sequence: Synthetic oligonucleotide
auguugacgguggcgccga

SEQ ID NO: 1065609 - RNA, 19 nt, Artificial Sequence
  Description of Artificial Sequence: Synthetic oligonucleotide
ggcgccgaugggcaggaug

SEQ ID NO: 1065610 - RNA, 19 nt, Artificial Sequence
  Description of Artificial Sequence: Synthetic oligonucleotide
uggcgucaugauaccccac

SEQ ID NO: 1065611 - RNA, 19 nt, Artificial Sequence
  Description of Artificial Sequence: Synthetic oligonucleotide
ccuccgaucaggcugcaca

SEQ ID NO: 1065612 - RNA, 19 nt, Artificial Sequence
  Description of Artificial Sequence: Synthetic oligonucleotide
acaccccauucagcugagc

SEQ ID NO: 1065613 - RNA, 19 nt, Artificial Sequence
  Description of Artificial Sequence: Synthetic oligonucleotide
acguacuugcccagucuga

SEQ ID NO: 1065614 - RNA, 19 nt, Artificial Sequence
  Description of Artificial Sequence: Synthetic oligonucleotide
gguucgauccacauaacuu

SEQ ID NO: 1065615 - RNA, 19 nt, Artificial Sequence
  Description of Artificial Sequence: Synthetic oligonucleotide
ggcguaccacauaauccag

SEQ ID NO: 1065616 - RNA, 19 nt, Artificial Sequence
  Description of Artificial Sequence: Synthetic oligonucleotide
ccugcggcgcccacgcugg

SEQ ID NO: 1065617 - RNA, 19 nt, Artificial Sequence
  Description of Artificial Sequence: Synthetic oligonucleotide
augcgguagcugugaccag

SEQ ID NO: 1065618 - RNA, 19 nt, Artificial Sequence
  Description of Artificial Sequence: Synthetic oligonucleotide
guugacgguggcgccgaug

SEQ ID NO: 1065619 - RNA, 19 nt, Artificial Sequence
  Description of Artificial Sequence: Synthetic oligonucleotide
uggcggugccauccaccgc

SEQ ID NO: 1065620 - RNA, 19 nt, Artificial Sequence
  Description of Artificial Sequence: Synthetic oligonucleotide
gacgccaccagggcacaga

SEQ ID NO: 1065621 - RNA, 19 nt, Artificial Sequence
  Description of Artificial Sequence: Synthetic oligonucleotide
ggaaucgauagggguuuug

SEQ ID NO: 1065622 - RNA, 19 nt, Artificial Sequence
  Description of Artificial Sequence: Synthetic oligonucleotide
cagggaugccugcggcgcc

SEQ ID NO: 1065623 - RNA, 19 nt, Artificial Sequence
  Description of Artificial Sequence: Synthetic oligonucleotide
gaugagcaguucgcccuca

SEQ ID NO: 1065624 - RNA, 19 nt, Artificial Sequence
  Description of Artificial Sequence: Synthetic oligonucleotide
cccgaaggcgucaccuucc

SEQ ID NO: 1065625 - RNA, 19 nt, Artificial Sequence
  Description of Artificial Sequence: Synthetic oligonucleotide
gaccccgccggcagggaug

SEQ ID NO: 1065626 - RNA, 19 nt, Artificial Sequence
  Description of Artificial Sequence: Synthetic oligonucleotide
ggugccauccaccgccguc

SEQ ID NO: 1065627 - RNA, 19 nt, Artificial Sequence
  Description of Artificial Sequence: Synthetic oligonucleotide
cuaacggcgacgcccggcu

SEQ ID NO: 1065628 - RNA, 19 nt, Artificial Sequence
  Description of Artificial Sequence: Synthetic oligonucleotide
ccauguugacgguggcgcc

SEQ ID NO: 1065629 - RNA, 19 nt, Artificial Sequence
  Description of Artificial Sequence: Synthetic oligonucleotide
gagcggaaugcagcagaca

SEQ ID NO: 1065630 - RNA, 19 nt, Artificial Sequence
  Description of Artificial Sequence: Synthetic oligonucleotide
cacggccgccacacacugg

SEQ ID NO: 1065631 - RNA, 19 nt, Artificial Sequence
  Description of Artificial Sequence: Synthetic oligonucleotide
gcuucagcgccaaagccaa

SEQ ID NO: 1065632 - RNA, 19 nt, Artificial Sequence
  Description of Artificial Sequence: Synthetic oligonucleotide
ggguuuuggcgggugaaga

SEQ ID NO: 1065633 - RNA, 19 nt, Artificial Sequence
  Description of Artificial Sequence: Synthetic oligonucleotide
uccccggcggguccucggu

SEQ ID NO: 1065634 - RNA, 19 nt, Artificial Sequence
  Description of Artificial Sequence: Synthetic oligonucleotide
gcggaaugcagcagacacc

SEQ ID NO: 1065635 - RNA, 19 nt, Artificial Sequence
  Description of Artificial Sequence: Synthetic oligonucleotide
ucgcgccuugguccucccc

SEQ ID NO: 1065636 - RNA, 19 nt, Artificial Sequence
  Description of Artificial Sequence: Synthetic oligonucleotide
ggaagccgaaggcggccag

SEQ ID NO: 1065637 - RNA, 19 nt, Artificial Sequence
  Description of Artificial Sequence: Synthetic oligonucleotide
cagggcaccguuggcggug

SEQ ID NO: 1065638 - RNA, 19 nt, Artificial Sequence
  Description of Artificial Sequence: Synthetic oligonucleotide
ggcgucuugguucgaucca

SEQ ID NO: 1065639 - RNA, 19 nt, Artificial Sequence
  Description of Artificial Sequence: Synthetic oligonucleotide
gcggacgcgagcagcgugg

SEQ ID NO: 1065640 - RNA, 19 nt, Artificial Sequence
  Description of Artificial Sequence: Synthetic oligonucleotide
ggcgcgaaggcagcggcgc

SEQ ID NO: 1065641 - RNA, 19 nt, Artificial Sequence
  Description of Artificial Sequence: Synthetic oligonucleotide
gguuggcgcgaaggcagcg

SEQ ID NO: 1065642 - RNA, 19 nt, Artificial Sequence
  Description of Artificial Sequence: Synthetic oligonucleotide
gcuucggcaccgcccgccg

SEQ ID NO: 1065643 - RNA, 19 nt, Artificial Sequence
  Description of Artificial Sequence: Synthetic oligonucleotide
cggcgucuugguucgaucc

SEQ ID NO: 1065644 - RNA, 19 nt, Artificial Sequence
  Description of Artificial Sequence: Synthetic oligonucleotide
gcgcuaacggcgacgcccg

SEQ ID NO: 1065645 - RNA, 19 nt, Artificial Sequence
  Description of Artificial Sequence: Synthetic oligonucleotide
cgcgccuugguccuccccg

SEQ ID NO: 1065646 - RNA, 19 nt, Artificial Sequence
  Description of Artificial Sequence: Synthetic oligonucleotide
gaaccaggagcccguggau

SEQ ID NO: 1065647 - RNA, 19 nt, Artificial Sequence
  Description of Artificial Sequence: Synthetic oligonucleotide
cagauguucugaguucgua

SEQ ID NO: 1065648 - RNA, 19 nt, Artificial Sequence
  Description of Artificial Sequence: Synthetic oligonucleotide
guccccggcggguccucgg

SEQ ID NO: 1065649 - RNA, 19 nt, Artificial Sequence
  Description of Artificial Sequence: Synthetic oligonucleotide
uucgcgccuugguccuccc

SEQ ID NO: 1065650 - RNA, 19 nt, Artificial Sequence
  Description of Artificial Sequence: Synthetic oligonucleotide
gucuugguucgauccacau

SEQ ID NO: 1065651 - RNA, 19 nt, Artificial Sequence
  Description of Artificial Sequence: Synthetic oligonucleotide
uggcaagcgugaggacccc

SEQ ID NO: 1065652 - RNA, 19 nt, Artificial Sequence
  Description of Artificial Sequence: Synthetic oligonucleotide
acgccgagcgcggacgcga

SEQ ID NO: 1065653 - RNA, 19 nt, Artificial Sequence
  Description of Artificial Sequence: Synthetic oligonucleotide
gcgccaaagccaaacccac

SEQ ID NO: 1065654 - RNA, 19 nt, Artificial Sequence
  Description of Artificial Sequence: Synthetic oligonucleotide
cagagacguuucguucuuc

SEQ ID NO: 1065655 - RNA, 19 nt, Artificial Sequence
  Description of Artificial Sequence: Synthetic oligonucleotide
acgcuggaugcgguagcug

SEQ ID NO: 1065656 - RNA, 19 nt, Artificial Sequence
  Description of Artificial Sequence: Synthetic oligonucleotide
ggauucagagacguuucgu

SEQ ID NO: 1065657 - RNA, 19 nt, Artificial Sequence
  Description of Artificial Sequence: Synthetic oligonucleotide
gcgccgaugggcaggauga

SEQ ID NO: 1065658 - RNA, 19 nt, Artificial Sequence
  Description of Artificial Sequence: Synthetic oligonucleotide
gcuaacggcgacgcccggc

SEQ ID NO: 1065659 - RNA, 19 nt, Artificial Sequence
  Description of Artificial Sequence: Synthetic oligonucleotide
agcucgcccgggaagccga

SEQ ID NO: 1065660 - RNA, 19 nt, Artificial Sequence
  Description of Artificial Sequence: Synthetic oligonucleotide
gcgucuugguucgauccac

SEQ ID NO: 1065661 - RNA, 19 nt, Artificial Sequence
  Description of Artificial Sequence: Synthetic oligonucleotide
agcagcgccagggcaccgu

SEQ ID NO: 1065662 - RNA, 19 nt, Artificial Sequence
  Description of Artificial Sequence: Synthetic oligonucleotide
ggcgacgcccggcuucagc

SEQ ID NO: 1065663 - RNA, 19 nt, Artificial Sequence
  Description of Artificial Sequence: Synthetic oligonucleotide
uguugacgguggcgccgau

SEQ ID NO: 1065664 - RNA, 19 nt, Artificial Sequence
  Description of Artificial Sequence: Synthetic oligonucleotide
gcuauucacaugacagacu

SEQ ID NO: 1065665 - RNA, 19 nt, Artificial Sequence
  Description of Artificial Sequence: Synthetic oligonucleotide
gguacaggaccuguccacu

SEQ ID NO: 1065666 - RNA, 19 nt, Artificial Sequence
  Description of Artificial Sequence: Synthetic oligonucleotide
acggcgacgcccggcuuca

SEQ ID NO: 1065667 - RNA, 19 nt, Artificial Sequence
  Description of Artificial Sequence: Synthetic oligonucleotide
caggaaucgauagggguuu

SEQ ID NO: 1065668 - RNA, 19 nt, Artificial Sequence
  Description of Artificial Sequence: Synthetic oligonucleotide
gauagggguuuuggcgggu

SEQ ID NO: 1065669 - RNA, 19 nt, Artificial Sequence
  Description of Artificial Sequence: Synthetic oligonucleotide
ggagcccguggauggcaug

SEQ ID NO: 1065670 - RNA, 19 nt, Artificial Sequence
  Description of Artificial Sequence: Synthetic oligonucleotide
cacgccgagcgcggacgcg

SEQ ID NO: 1065671 - RNA, 19 nt, Artificial Sequence
  Description of Artificial Sequence: Synthetic oligonucleotide
cccacgcuggaugcgguag

SEQ ID NO: 1065672 - RNA, 19 nt, Artificial Sequence
  Description of Artificial Sequence: Synthetic oligonucleotide
caccuggaccaggguggcg

SEQ ID NO: 1065673 - RNA, 19 nt, Artificial Sequence
  Description of Artificial Sequence: Synthetic oligonucleotide
gagacgccaccagggcaca

SEQ ID NO: 1065674 - RNA, 19 nt, Artificial Sequence
  Description of Artificial Sequence: Synthetic oligonucleotide
cagcggcaggaugaucauc

SEQ ID NO: 1065675 - RNA, 19 nt, Artificial Sequence
  Description of Artificial Sequence: Synthetic oligonucleotide
ggcggguccucgguacugc

SEQ ID NO: 1065676 - RNA, 19 nt, Artificial Sequence
  Description of Artificial Sequence: Synthetic oligonucleotide
cgauagcgaacaccaccag

SEQ ID NO: 1065677 - RNA, 19 nt, Artificial Sequence
  Description of Artificial Sequence: Synthetic oligonucleotide
gccgaugggcaggaugaac

SEQ ID NO: 1065678 - RNA, 19 nt, Artificial Sequence
  Description of Artificial Sequence: Synthetic oligonucleotide
aggaaucgauagggguuuu

SEQ ID NO: 1065679 - RNA, 19 nt, Artificial Sequence
  Description of Artificial Sequence: Synthetic oligonucleotide
ccccgaaggcgucaccuuc

SEQ ID NO: 1065680 - RNA, 19 nt, Artificial Sequence
  Description of Artificial Sequence: Synthetic oligonucleotide
gcccuaucaccacgccggc

SEQ ID NO: 1065681 - RNA, 19 nt, Artificial Sequence
  Description of Artificial Sequence: Synthetic oligonucleotide
uggcggcgccuccgaucag

SEQ ID NO: 1065682 - RNA, 19 nt, Artificial Sequence
  Description of Artificial Sequence: Synthetic oligonucleotide
cucgcccgggaagccgaag

SEQ ID NO: 1065683 - RNA, 19 nt, Artificial Sequence
  Description of Artificial Sequence: Synthetic oligonucleotide
cccacgccgagcgcggacg

SEQ ID NO: 1065684 - RNA, 19 nt, Artificial Sequence
  Description of Artificial Sequence: Synthetic oligonucleotide
ccgcuuucgcgccuugguc

SEQ ID NO: 1065685 - RNA, 19 nt, Artificial Sequence
  Description of Artificial Sequence: Synthetic oligonucleotide
caccguuggcggugccauc

SEQ ID NO: 1065686 - RNA, 19 nt, Artificial Sequence
  Description of Artificial Sequence: Synthetic oligonucleotide
cacggccgccaccgugagc

SEQ ID NO: 1065687 - RNA, 19 nt, Artificial Sequence
  Description of Artificial Sequence: Synthetic oligonucleotide
gcuuucgcgccuugguccu

SEQ ID NO: 1065688 - RNA, 19 nt, Artificial Sequence
  Description of Artificial Sequence: Synthetic oligonucleotide
caccgcccgccgccgagac

SEQ ID NO: 1065689 - RNA, 19 nt, Artificial Sequence
  Description of Artificial Sequence: Synthetic oligonucleotide
gcgaaggcagcggcgcgcc

SEQ ID NO: 1065690 - RNA, 19 nt, Artificial Sequence
  Description of Artificial Sequence: Synthetic oligonucleotide
ccgccacacacuggaacag

SEQ ID NO: 1065691 - RNA, 19 nt, Artificial Sequence
  Description of Artificial Sequence: Synthetic oligonucleotide
aggcgucaccuuccacauu

SEQ ID NO: 1065692 - RNA, 19 nt, Artificial Sequence
  Description of Artificial Sequence: Synthetic oligonucleotide
ccaagaugauggcaagcgu

SEQ ID NO: 1065693 - RNA, 19 nt, Artificial Sequence
  Description of Artificial Sequence: Synthetic oligonucleotide
cuuucgcgccuugguccuc

SEQ ID NO: 1065694 - RNA, 19 nt, Artificial Sequence
  Description of Artificial Sequence: Synthetic oligonucleotide
ccucaccucccaccuggac

SEQ ID NO: 1065695 - RNA, 19 nt, Artificial Sequence
  Description of Artificial Sequence: Synthetic oligonucleotide
ggacgcgagcagcguggug

SEQ ID NO: 1065696 - RNA, 19 nt, Artificial Sequence
  Description of Artificial Sequence: Synthetic oligonucleotide
gcgcccaggcgcccacgcg

SEQ ID NO: 1065697 - RNA, 19 nt, Artificial Sequence
  Description of Artificial Sequence: Synthetic oligonucleotide
cuucagcgccaaagccaaa

SEQ ID NO: 1065698 - RNA, 19 nt, Artificial Sequence
  Description of Artificial Sequence: Synthetic oligonucleotide
ccgccggcagggaugccug

SEQ ID NO: 1065699 - RNA, 19 nt, Artificial Sequence
  Description of Artificial Sequence: Synthetic oligonucleotide
ggcaccguuggcggugcca

SEQ ID NO: 1065700 - RNA, 19 nt, Artificial Sequence
  Description of Artificial Sequence: Synthetic oligonucleotide
cccuaucaccacgccggcc

SEQ ID NO: 1065701 - RNA, 19 nt, Artificial Sequence
  Description of Artificial Sequence: Synthetic oligonucleotide
gcgugaggaccccgccggc

SEQ ID NO: 1065702 - RNA, 19 nt, Artificial Sequence
  Description of Artificial Sequence: Synthetic oligonucleotide
caccagcggcaggaugauc

SEQ ID NO: 1065703 - RNA, 19 nt, Artificial Sequence
  Description of Artificial Sequence: Synthetic oligonucleotide
ccacgccgagcgcggacgc

SEQ ID NO: 1065704 - RNA, 19 nt, Artificial Sequence
  Description of Artificial Sequence: Synthetic oligonucleotide
cgucuugguucgauccaca

SEQ ID NO: 1065705 - RNA, 19 nt, Artificial Sequence
  Description of Artificial Sequence: Synthetic oligonucleotide
gcggcgccuccgaucaggc

SEQ ID NO: 1065706 - RNA, 19 nt, Artificial Sequence
  Description of Artificial Sequence: Synthetic oligonucleotide
ggaccaugguggcaucauu

SEQ ID NO: 1065707 - RNA, 19 nt, Artificial Sequence
  Description of Artificial Sequence: Synthetic oligonucleotide
ccgaaggcgucaccuucca

SEQ ID NO: 1065708 - RNA, 19 nt, Artificial Sequence
  Description of Artificial Sequence: Synthetic oligonucleotide
caggacguacuugcccagu

SEQ ID NO: 1065709 - RNA, 19 nt, Artificial Sequence
  Description of Artificial Sequence: Synthetic oligonucleotide
cguuggcggugccauccac

SEQ ID NO: 1065710 - RNA, 19 nt, Artificial Sequence
  Description of Artificial Sequence: Synthetic oligonucleotide
cgaaggcgucaccuuccac

SEQ ID NO: 1065711 - RNA, 19 nt, Artificial Sequence
  Description of Artificial Sequence: Synthetic oligonucleotide
cgcuucggcaccgcccgcc

SEQ ID NO: 1065712 - RNA, 19 nt, Artificial Sequence
  Description of Artificial Sequence: Synthetic oligonucleotide
caggggcguaccacauaau

SEQ ID NO: 1065713 - RNA, 19 nt, Artificial Sequence
  Description of Artificial Sequence: Synthetic oligonucleotide
cccgcuuucgcgccuuggu

SEQ ID NO: 1065714 - RNA, 19 nt, Artificial Sequence
  Description of Artificial Sequence: Synthetic oligonucleotide
gggcaccguuggcggugcc

SEQ ID NO: 1065715 - RNA, 19 nt, Artificial Sequence
  Description of Artificial Sequence: Synthetic oligonucleotide
gcccacgcuggaugcggua

SEQ ID NO: 1065716 - RNA, 19 nt, Artificial Sequence
  Description of Artificial Sequence: Synthetic oligonucleotide
gcggguccucgguacugcu

SEQ ID NO: 1065717 - RNA, 19 nt, Artificial Sequence
  Description of Artificial Sequence: Synthetic oligonucleotide
ccguuggcggugccaucca

SEQ ID NO: 1065718 - RNA, 19 nt, Artificial Sequence
  Description of Artificial Sequence: Synthetic oligonucleotide
cgcuaacggcgacgcccgg

SEQ ID NO: 1065719 - RNA, 19 nt, Artificial Sequence
  Description of Artificial Sequence: Synthetic oligonucleotide
gccuccgaucaggcugcac

SEQ ID NO: 1065720 - RNA, 19 nt, Artificial Sequence
  Description of Artificial Sequence: Synthetic oligonucleotide
cgugaggaccccgccggca

SEQ ID NO: 1065721 - RNA, 19 nt, Artificial Sequence
  Description of Artificial Sequence: Synthetic oligonucleotide
ggaccccgccggcagggau

SEQ ID NO: 1065722 - RNA, 19 nt, Artificial Sequence
  Description of Artificial Sequence: Synthetic oligonucleotide
gcggcaggaugaucaucuu

SEQ ID NO: 1065723 - RNA, 19 nt, Artificial Sequence
  Description of Artificial Sequence: Synthetic oligonucleotide
gcgcgcugggguccaggcu

SEQ ID NO: 1065724 - RNA, 19 nt, Artificial Sequence
  Description of Artificial Sequence: Synthetic oligonucleotide
gccccgaaggcgucaccuu

SEQ ID NO: 1065725 - RNA, 19 nt, Artificial Sequence
  Description of Artificial Sequence: Synthetic oligonucleotide
cggcggguccucgguacug

SEQ ID NO: 1065726 - RNA, 19 nt, Artificial Sequence
  Description of Artificial Sequence: Synthetic oligonucleotide
cccgccggcagggaugccu

SEQ ID NO: 1065727 - RNA, 19 nt, Artificial Sequence
  Description of Artificial Sequence: Synthetic oligonucleotide
gcgcgccugcucccaggaa

SEQ ID NO: 1065728 - RNA, 19 nt, Artificial Sequence
  Description of Artificial Sequence: Synthetic oligonucleotide
gcucgcccgggaagccgaa

SEQ ID NO: 1065729 - RNA, 19 nt, Artificial Sequence
  Description of Artificial Sequence: Synthetic oligonucleotide
cccagcgcgcuggggucca

SEQ ID NO: 1065730 - RNA, 19 nt, Artificial Sequence
  Description of Artificial Sequence: Synthetic oligonucleotide
gcucggcgucuugguucga

SEQ ID NO: 1065731 - RNA, 19 nt, Artificial Sequence
  Description of Artificial Sequence: Synthetic oligonucleotide
gggcagcguggcagagcua

SEQ ID NO: 1065732 - RNA, 19 nt, Artificial Sequence
  Description of Artificial Sequence: Synthetic oligonucleotide
cgccgaugggcaggaugaa

SEQ ID NO: 1065733 - RNA, 19 nt, Artificial Sequence
  Description of Artificial Sequence: Synthetic oligonucleotide
cgcccacgcuggaugcggu

SEQ ID NO: 1065734 - RNA, 19 nt, Artificial Sequence
  Description of Artificial Sequence: Synthetic oligonucleotide
ccccgccggcagggaugcc

SEQ ID NO: 1065735 - RNA, 19 nt, Artificial Sequence
  Description of Artificial Sequence: Synthetic oligonucleotide
gcgccgccccauccauguu

SEQ ID NO: 1065736 - RNA, 19 nt, Artificial Sequence
  Description of Artificial Sequence: Synthetic oligonucleotide
cggacgcgagcagcguggu

SEQ ID NO: 1065737 - RNA, 19 nt, Artificial Sequence
  Description of Artificial Sequence: Synthetic oligonucleotide
cggcgacgcccggcuucag

SEQ ID NO: 1065738 - RNA, 19 nt, Artificial Sequence
  Description of Artificial Sequence: Synthetic oligonucleotide
auuucuuccaaauacacac

SEQ ID NO: 1065739 - RNA, 19 nt, Artificial Sequence
  Description of Artificial Sequence: Synthetic oligonucleotide
uuaauuaguucacagaaag

SEQ ID NO: 1065740 - RNA, 19 nt, Artificial Sequence
  Description of Artificial Sequence: Synthetic oligonucleotide
agaguaaugaggaagaucc

SEQ ID NO: 1065741 - RNA, 19 nt, Artificial Sequence
  Description of Artificial Sequence: Synthetic oligonucleotide
aauaaucgagcaaagaugg

SEQ ID NO: 1065742 - RNA, 19 nt, Artificial Sequence
  Description of Artificial Sequence: Synthetic oligonucleotide
uuagcuagaaagcugcugg

SEQ ID NO: 1065743 - RNA, 19 nt, Artificial Sequence
  Description of Artificial Sequence: Synthetic oligonucleotide
aagccaaagagcuguagcc

SEQ ID NO: 1065744 - RNA, 19 nt, Artificial Sequence
  Description of Artificial Sequence: Synthetic oligonucleotide
auuacugaaagccacgauc

SEQ ID NO: 1065745 - RNA, 19 nt, Artificial Sequence
  Description of Artificial Sequence: Synthetic oligonucleotide
gauaaagugaaggacaugc

SEQ ID NO: 1065746 - RNA, 19 nt, Artificial Sequence
  Description of Artificial Sequence: Synthetic oligonucleotide
ucuaccaagggauuugugg

SEQ ID NO: 1065747 - RNA, 19 nt, Artificial Sequence
  Description of Artificial Sequence: Synthetic oligonucleotide
uggcacauaagccaaagag

SEQ ID NO: 1065748 - RNA, 19 nt, Artificial Sequence
  Description of Artificial Sequence: Synthetic oligonucleotide
gaucuugaagcaauaaucg

SEQ ID NO: 1065749 - RNA, 19 nt, Artificial Sequence
  Description of Artificial Sequence: Synthetic oligonucleotide
aaugcgcucagccaggaag

SEQ ID NO: 1065750 - RNA, 19 nt, Artificial Sequence
  Description of Artificial Sequence: Synthetic oligonucleotide
acgagauggauucagaaag

SEQ ID NO: 1065751 - RNA, 19 nt, Artificial Sequence
  Description of Artificial Sequence: Synthetic oligonucleotide
uagaaaaguaucagaagag

SEQ ID NO: 1065752 - RNA, 19 nt, Artificial Sequence
  Description of Artificial Sequence: Synthetic oligonucleotide
agcgguuaaucucagacac

SEQ ID NO: 1065753 - RNA, 19 nt, Artificial Sequence
  Description of Artificial Sequence: Synthetic oligonucleotide
gauuuaaguagauagugca

SEQ ID NO: 1065754 - RNA, 19 nt, Artificial Sequence
  Description of Artificial Sequence: Synthetic oligonucleotide
gauuuaacguuguagaaga

SEQ ID NO: 1065755 - RNA, 19 nt, Artificial Sequence
  Description of Artificial Sequence: Synthetic oligonucleotide
agagauuuaacguuguaga

SEQ ID NO: 1065756 - RNA, 19 nt, Artificial Sequence
  Description of Artificial Sequence: Synthetic oligonucleotide
agaaaaguaucagaagagc

SEQ ID NO: 1065757 - RNA, 19 nt, Artificial Sequence
  Description of Artificial Sequence: Synthetic oligonucleotide
agaguaggggaauaggaac

SEQ ID NO: 1065758 - RNA, 19 nt, Artificial Sequence
  Description of Artificial Sequence: Synthetic oligonucleotide
agucauauucgucaggcuc

SEQ ID NO: 1065759 - RNA, 19 nt, Artificial Sequence
  Description of Artificial Sequence: Synthetic oligonucleotide
uaguuuggcccuuaggugg

SEQ ID NO: 1065760 - RNA, 19 nt, Artificial Sequence
  Description of Artificial Sequence: Synthetic oligonucleotide
ugccaaauuacugaaagcc

SEQ ID NO: 1065761 - RNA, 19 nt, Artificial Sequence
  Description of Artificial Sequence: Synthetic oligonucleotide
cuugaagcaauaaucgagc

SEQ ID NO: 1065762 - RNA, 19 nt, Artificial Sequence
  Description of Artificial Sequence: Synthetic oligonucleotide
ucugauacaaguugcugag

SEQ ID NO: 1065763 - RNA, 19 nt, Artificial Sequence
  Description of Artificial Sequence: Synthetic oligonucleotide
aaaaugaggaaaucaccca

SEQ ID NO: 1065764 - RNA, 19 nt, Artificial Sequence
  Description of Artificial Sequence: Synthetic oligonucleotide
cuugcuuuugugauaaaag

SEQ ID NO: 1065765 - RNA, 19 nt, Artificial Sequence
  Description of Artificial Sequence: Synthetic oligonucleotide
aagucaaacucgcugaagu

SEQ ID NO: 1065766 - RNA, 19 nt, Artificial Sequence
  Description of Artificial Sequence: Synthetic oligonucleotide
acucgaacgagauggauuc

SEQ ID NO: 1065767 - RNA, 19 nt, Artificial Sequence
  Description of Artificial Sequence: Synthetic oligonucleotide
caauaaucgagcaaagaug

SEQ ID NO: 1065768 - RNA, 19 nt, Artificial Sequence
  Description of Artificial Sequence: Synthetic oligonucleotide
ucuccugaggacucgaacg

SEQ ID NO: 1065769 - RNA, 19 nt, Artificial Sequence
  Description of Artificial Sequence: Synthetic oligonucleotide
auccccaagauuuaaguag

SEQ ID NO: 1065770 - RNA, 19 nt, Artificial Sequence
  Description of Artificial Sequence: Synthetic oligonucleotide
agugaaaauggugauaaag

SEQ ID NO: 1065771 - RNA, 19 nt, Artificial Sequence
  Description of Artificial Sequence: Synthetic oligonucleotide
ugagacuacuguuacuccg

SEQ ID NO: 1065772 - RNA, 19 nt, Artificial Sequence
  Description of Artificial Sequence: Synthetic oligonucleotide
guuacuccgagucaucugg

SEQ ID NO: 1065773 - RNA, 19 nt, Artificial Sequence
  Description of Artificial Sequence: Synthetic oligonucleotide
gaggaaaucacccagguua

SEQ ID NO: 1065774 - RNA, 19 nt, Artificial Sequence
  Description of Artificial Sequence: Synthetic oligonucleotide
uuuaaguagauagugcaga

SEQ ID NO: 1065775 - RNA, 19 nt, Artificial Sequence
  Description of Artificial Sequence: Synthetic oligonucleotide
uguugaguugcucacauua

SEQ ID NO: 1065776 - RNA, 19 nt, Artificial Sequence
  Description of Artificial Sequence: Synthetic oligonucleotide
uuuaacguuguagaagaag

SEQ ID NO: 1065777 - RNA, 19 nt, Artificial Sequence
  Description of Artificial Sequence: Synthetic oligonucleotide
agauuuaaguagauagugc

SEQ ID NO: 1065778 - RNA, 19 nt, Artificial Sequence
  Description of Artificial Sequence: Synthetic oligonucleotide
cacagaguagucauauucg

SEQ ID NO: 1065779 - RNA, 19 nt, Artificial Sequence
  Description of Artificial Sequence: Synthetic oligonucleotide
uuaaucuacacacuugcuu

SEQ ID NO: 1065780 - RNA, 19 nt, Artificial Sequence
  Description of Artificial Sequence: Synthetic oligonucleotide
aauaggaacguccauccuu

SEQ ID NO: 1065781 - RNA, 19 nt, Artificial Sequence
  Description of Artificial Sequence: Synthetic oligonucleotide
cuuuaauuaguucacagaa

SEQ ID NO: 1065782 - RNA, 19 nt, Artificial Sequence
  Description of Artificial Sequence: Synthetic oligonucleotide
aggcuuauugauuuucuuc

SEQ ID NO: 1065783 - RNA, 19 nt, Artificial Sequence
  Description of Artificial Sequence: Synthetic oligonucleotide
uaaucgagcaaagauggcc

SEQ ID NO: 1065784 - RNA, 19 nt, Artificial Sequence
  Description of Artificial Sequence: Synthetic oligonucleotide
uuuaauuaguucacagaaa

SEQ ID NO: 1065785 - RNA, 19 nt, Artificial Sequence
  Description of Artificial Sequence: Synthetic oligonucleotide
gagagauuuaacguuguag

SEQ ID NO: 1065786 - RNA, 19 nt, Artificial Sequence
  Description of Artificial Sequence: Synthetic oligonucleotide
uuuugugauaaaaggguuc

SEQ ID NO: 1065787 - RNA, 19 nt, Artificial Sequence
  Description of Artificial Sequence: Synthetic oligonucleotide
uuucaugcgagccaccgcu

SEQ ID NO: 1065788 - RNA, 19 nt, Artificial Sequence
  Description of Artificial Sequence: Synthetic oligonucleotide
uccagaguaaugaggaaga

SEQ ID NO: 1065789 - RNA, 19 nt, Artificial Sequence
  Description of Artificial Sequence: Synthetic oligonucleotide
acgaacagugaccugaucu

SEQ ID NO: 1065790 - RNA, 19 nt, Artificial Sequence
  Description of Artificial Sequence: Synthetic oligonucleotide
aguaguucagcauggagau

SEQ ID NO: 1065791 - RNA, 19 nt, Artificial Sequence
  Description of Artificial Sequence: Synthetic oligonucleotide
uaaucuacacacuugcuuu

SEQ ID NO: 1065792 - RNA, 19 nt, Artificial Sequence
  Description of Artificial Sequence: Synthetic oligonucleotide
aaacuuagcucuaauggcu

SEQ ID NO: 1065793 - RNA, 19 nt, Artificial Sequence
  Description of Artificial Sequence: Synthetic oligonucleotide
agagcuguagccaucuggc

SEQ ID NO: 1065794 - RNA, 19 nt, Artificial Sequence
  Description of Artificial Sequence: Synthetic oligonucleotide
augugauugauguugaguu

SEQ ID NO: 1065795 - RNA, 19 nt, Artificial Sequence
  Description of Artificial Sequence: Synthetic oligonucleotide
ucuugcugugaccggaagg

SEQ ID NO: 1065796 - RNA, 19 nt, Artificial Sequence
  Description of Artificial Sequence: Synthetic oligonucleotide
caugguaaggggacuacgg

SEQ ID NO: 1065797 - RNA, 19 nt, Artificial Sequence
  Description of Artificial Sequence: Synthetic oligonucleotide
caaaagaugugccucuccc

SEQ ID NO: 1065798 - RNA, 19 nt, Artificial Sequence
  Description of Artificial Sequence: Synthetic oligonucleotide
cauauucccaggcuuauug

SEQ ID NO: 1065799 - RNA, 19 nt, Artificial Sequence
  Description of Artificial Sequence: Synthetic oligonucleotide
uaucaagccagucuugauc

SEQ ID NO: 1065800 - RNA, 19 nt, Artificial Sequence
  Description of Artificial Sequence: Synthetic oligonucleotide
uaauuaguucacagaaaga

SEQ ID NO: 1065801 - RNA, 19 nt, Artificial Sequence
  Description of Artificial Sequence: Synthetic oligonucleotide
gaucuguuuggucacugag

SEQ ID NO: 1065802 - RNA, 19 nt, Artificial Sequence
  Description of Artificial Sequence: Synthetic oligonucleotide
auucagaaagacugcacug

SEQ ID NO: 1065803 - RNA, 19 nt, Artificial Sequence
  Description of Artificial Sequence: Synthetic oligonucleotide
ugcgcaaagagaguagggg

SEQ ID NO: 1065804 - RNA, 19 nt, Artificial Sequence
  Description of Artificial Sequence: Synthetic oligonucleotide
agcucuaauggcugugagc

SEQ ID NO: 1065805 - RNA, 19 nt, Artificial Sequence
  Description of Artificial Sequence: Synthetic oligonucleotide
acugucugcgcaaagagag

SEQ ID NO: 1065806 - RNA, 19 nt, Artificial Sequence
  Description of Artificial Sequence: Synthetic oligonucleotide
aggucauuagcuagaaagc

SEQ ID NO: 1065807 - RNA, 19 nt, Artificial Sequence
  Description of Artificial Sequence: Synthetic oligonucleotide
ucugcugacgucuccaaga

SEQ ID NO: 1065808 - RNA, 19 nt, Artificial Sequence
  Description of Artificial Sequence: Synthetic oligonucleotide
guuguagaagaagucaugc

SEQ ID NO: 1065809 - RNA, 19 nt, Artificial Sequence
  Description of Artificial Sequence: Synthetic oligonucleotide
gaguaggggaauaggaacg

SEQ ID NO: 1065810 - RNA, 19 nt, Artificial Sequence
  Description of Artificial Sequence: Synthetic oligonucleotide
acaaaacacaaacucgcca

SEQ ID NO: 1065811 - RNA, 19 nt, Artificial Sequence
  Description of Artificial Sequence: Synthetic oligonucleotide
cuggaggucugcaagagac

SEQ ID NO: 1065812 - RNA, 19 nt, Artificial Sequence
  Description of Artificial Sequence: Synthetic oligonucleotide
aaggggacuacgguuaaag

SEQ ID NO: 1065813 - RNA, 19 nt, Artificial Sequence
  Description of Artificial Sequence: Synthetic oligonucleotide
uucagaaagacugcacugc

SEQ ID NO: 1065814 - RNA, 19 nt, Artificial Sequence
  Description of Artificial Sequence: Synthetic oligonucleotide
gacacuagaggcagcauag

SEQ ID NO: 1065815 - RNA, 19 nt, Artificial Sequence
  Description of Artificial Sequence: Synthetic oligonucleotide
gacucuggaagacggaagc

SEQ ID NO: 1065816 - RNA, 19 nt, Artificial Sequence
  Description of Artificial Sequence: Synthetic oligonucleotide
uuuggaucacuguugucca

SEQ ID NO: 1065817 - RNA, 19 nt, Artificial Sequence
  Description of Artificial Sequence: Synthetic oligonucleotide
agguuuguacccauuuucc

SEQ ID NO: 1065818 - RNA, 19 nt, Artificial Sequence
  Description of Artificial Sequence: Synthetic oligonucleotide
acucgucacaggcaucugc

SEQ ID NO: 1065819 - RNA, 19 nt, Artificial Sequence
  Description of Artificial Sequence: Synthetic oligonucleotide
uugagagcaccccaucuug

SEQ ID NO: 1065820 - RNA, 19 nt, Artificial Sequence
  Description of Artificial Sequence: Synthetic oligonucleotide
acauaagccaaagagcugu

SEQ ID NO: 1065821 - RNA, 19 nt, Artificial Sequence
  Description of Artificial Sequence: Synthetic oligonucleotide
ggagauaaugcgcucagcc

SEQ ID NO: 1065822 - RNA, 19 nt, Artificial Sequence
  Description of Artificial Sequence: Synthetic oligonucleotide
ugugauugauguugaguug

SEQ ID NO: 1065823 - RNA, 19 nt, Artificial Sequence
  Description of Artificial Sequence: Synthetic oligonucleotide
aguugcucacauuauuucu

SEQ ID NO: 1065824 - RNA, 19 nt, Artificial Sequence
  Description of Artificial Sequence: Synthetic oligonucleotide
gagguuuguacccauuuuc

SEQ ID NO: 1065825 - RNA, 19 nt, Artificial Sequence
  Description of Artificial Sequence: Synthetic oligonucleotide
cuugacuuugagagcaccc

SEQ ID NO: 1065826 - RNA, 19 nt, Artificial Sequence
  Description of Artificial Sequence: Synthetic oligonucleotide
ucauccccaagauuuaagu

SEQ ID NO: 1065827 - RNA, 19 nt, Artificial Sequence
  Description of Artificial Sequence: Synthetic oligonucleotide
cucacauuauuucuugcug

SEQ ID NO: 1065828 - RNA, 19 nt, Artificial Sequence
  Description of Artificial Sequence: Synthetic oligonucleotide
ucgaucagcagagagauuu

SEQ ID NO: 1065829 - RNA, 19 nt, Artificial Sequence
  Description of Artificial Sequence: Synthetic oligonucleotide
uccccaagauuuaaguaga

SEQ ID NO: 1065830 - RNA, 19 nt, Artificial Sequence
  Description of Artificial Sequence: Synthetic oligonucleotide
ggaauaggaacguccaucc

SEQ ID NO: 1065831 - RNA, 19 nt, Artificial Sequence
  Description of Artificial Sequence: Synthetic oligonucleotide
aggcuuacaaucugaaggu

SEQ ID NO: 1065832 - RNA, 19 nt, Artificial Sequence
  Description of Artificial Sequence: Synthetic oligonucleotide
ucugcgcaaagagaguagg

SEQ ID NO: 1065833 - RNA, 19 nt, Artificial Sequence
  Description of Artificial Sequence: Synthetic oligonucleotide
aaucgagcaaagauggccu

SEQ ID NO: 1065834 - RNA, 19 nt, Artificial Sequence
  Description of Artificial Sequence: Synthetic oligonucleotide
uuaaguagauagugcagau

SEQ ID NO: 1065835 - RNA, 19 nt, Artificial Sequence
  Description of Artificial Sequence: Synthetic oligonucleotide
ucgucaggcucucugagac

SEQ ID NO: 1065836 - RNA, 19 nt, Artificial Sequence
  Description of Artificial Sequence: Synthetic oligonucleotide
cuaguuuggcccuuaggug

SEQ ID NO: 1065837 - RNA, 19 nt, Artificial Sequence
  Description of Artificial Sequence: Synthetic oligonucleotide
acaaucugaagguucaguu

SEQ ID NO: 1065838 - RNA, 19 nt, Artificial Sequence
  Description of Artificial Sequence: Synthetic oligonucleotide
guaacaaaagaugugccuc

SEQ ID NO: 1065839 - RNA, 19 nt, Artificial Sequence
  Description of Artificial Sequence: Synthetic oligonucleotide
uugccuagaucuccugagg

SEQ ID NO: 1065840 - RNA, 19 nt, Artificial Sequence
  Description of Artificial Sequence: Synthetic oligonucleotide
auuuaaguagauagugcag

SEQ ID NO: 1065841 - RNA, 19 nt, Artificial Sequence
  Description of Artificial Sequence: Synthetic oligonucleotide
uuuccuggaucuugaagca

SEQ ID NO: 1065842 - RNA, 19 nt, Artificial Sequence
  Description of Artificial Sequence: Synthetic oligonucleotide
aacaaaagaugugccucuc

SEQ ID NO: 1065843 - RNA, 19 nt, Artificial Sequence
  Description of Artificial Sequence: Synthetic oligonucleotide
aauuacugaaagccacgau

SEQ ID NO: 1065844 - RNA, 19 nt, Artificial Sequence
  Description of Artificial Sequence: Synthetic oligonucleotide
ugcucaacauugcucauau

SEQ ID NO: 1065845 - RNA, 19 nt, Artificial Sequence
  Description of Artificial Sequence: Synthetic oligonucleotide
uugaagcaauaaucgagca

SEQ ID NO: 1065846 - RNA, 19 nt, Artificial Sequence
  Description of Artificial Sequence: Synthetic oligonucleotide
gaagacggaagcaccacag

SEQ ID NO: 1065847 - RNA, 19 nt, Artificial Sequence
  Description of Artificial Sequence: Synthetic oligonucleotide
acagaguagucauauucgu

SEQ ID NO: 1065848 - RNA, 19 nt, Artificial Sequence
  Description of Artificial Sequence: Synthetic oligonucleotide
ugacucuggaagacggaag

SEQ ID NO: 1065849 - RNA, 19 nt, Artificial Sequence
  Description of Artificial Sequence: Synthetic oligonucleotide
ucaagugguuuccuggauc

SEQ ID NO: 1065850 - RNA, 19 nt, Artificial Sequence
  Description of Artificial Sequence: Synthetic oligonucleotide
aucuccugaggacucgaac

SEQ ID NO: 1065851 - RNA, 19 nt, Artificial Sequence
  Description of Artificial Sequence: Synthetic oligonucleotide
ugcuaguuuggcccuuagg

SEQ ID NO: 1065852 - RNA, 19 nt, Artificial Sequence
  Description of Artificial Sequence: Synthetic oligonucleotide
uggaacagccaucuuugga

SEQ ID NO: 1065853 - RNA, 19 nt, Artificial Sequence
  Description of Artificial Sequence: Synthetic oligonucleotide
ucucgaucagcagagagau

SEQ ID NO: 1065854 - RNA, 19 nt, Artificial Sequence
  Description of Artificial Sequence: Synthetic oligonucleotide
gauaaugcgcucagccagg

SEQ ID NO: 1065855 - RNA, 19 nt, Artificial Sequence
  Description of Artificial Sequence: Synthetic oligonucleotide
cagugacucuggaagacgg

SEQ ID NO: 1065856 - RNA, 19 nt, Artificial Sequence
  Description of Artificial Sequence: Synthetic oligonucleotide
agcagagagauuuaacguu

SEQ ID NO: 1065857 - RNA, 19 nt, Artificial Sequence
  Description of Artificial Sequence: Synthetic oligonucleotide
uggugauaaagugaaggac

SEQ ID NO: 1065858 - RNA, 19 nt, Artificial Sequence
  Description of Artificial Sequence: Synthetic oligonucleotide
uucaaguuuggaucacugu

SEQ ID NO: 1065859 - RNA, 19 nt, Artificial Sequence
  Description of Artificial Sequence: Synthetic oligonucleotide
gcucuaauggcugugagcc

SEQ ID NO: 1065860 - RNA, 19 nt, Artificial Sequence
  Description of Artificial Sequence: Synthetic oligonucleotide
ccuuaaucuacacacuugc

SEQ ID NO: 1065861 - RNA, 19 nt, Artificial Sequence
  Description of Artificial Sequence: Synthetic oligonucleotide
ugaguaaaugccuggcaau

SEQ ID NO: 1065862 - RNA, 19 nt, Artificial Sequence
  Description of Artificial Sequence: Synthetic oligonucleotide
uugcucacauuauuucuug

SEQ ID NO: 1065863 - RNA, 19 nt, Artificial Sequence
  Description of Artificial Sequence: Synthetic oligonucleotide
ggaacguccauccuugggc

SEQ ID NO: 1065864 - RNA, 19 nt, Artificial Sequence
  Description of Artificial Sequence: Synthetic oligonucleotide
uauucgucaggcucucuga

SEQ ID NO: 1065865 - RNA, 19 nt, Artificial Sequence
  Description of Artificial Sequence: Synthetic oligonucleotide
uuacuccgagucaucuggg

SEQ ID NO: 1065866 - RNA, 19 nt, Artificial Sequence
  Description of Artificial Sequence: Synthetic oligonucleotide
auggagauaaugcgcucag

SEQ ID NO: 1065867 - RNA, 19 nt, Artificial Sequence
  Description of Artificial Sequence: Synthetic oligonucleotide
gaguugcucacauuauuuc

SEQ ID NO: 1065868 - RNA, 19 nt, Artificial Sequence
  Description of Artificial Sequence: Synthetic oligonucleotide
ugaucuaccaagggauuug

SEQ ID NO: 1065869 - RNA, 19 nt, Artificial Sequence
  Description of Artificial Sequence: Synthetic oligonucleotide
uuuucaugcgagccaccgc

SEQ ID NO: 1065870 - RNA, 19 nt, Artificial Sequence
  Description of Artificial Sequence: Synthetic oligonucleotide
uaaguagauagugcagaug

SEQ ID NO: 1065871 - RNA, 19 nt, Artificial Sequence
  Description of Artificial Sequence: Synthetic oligonucleotide
gguuuccucaccaauagug

SEQ ID NO: 1065872 - RNA, 19 nt, Artificial Sequence
  Description of Artificial Sequence: Synthetic oligonucleotide
aacuuagcucuaauggcug

SEQ ID NO: 1065873 - RNA, 19 nt, Artificial Sequence
  Description of Artificial Sequence: Synthetic oligonucleotide
ggagcgguuaaucucagac

SEQ ID NO: 1065874 - RNA, 19 nt, Artificial Sequence
  Description of Artificial Sequence: Synthetic oligonucleotide
ccaaauuacugaaagccac

SEQ ID NO: 1065875 - RNA, 19 nt, Artificial Sequence
  Description of Artificial Sequence: Synthetic oligonucleotide
guccagaguaaugaggaag

SEQ ID NO: 1065876 - RNA, 19 nt, Artificial Sequence
  Description of Artificial Sequence: Synthetic oligonucleotide
ucgaacgagauggauucag

SEQ ID NO: 1065877 - RNA, 19 nt, Artificial Sequence
  Description of Artificial Sequence: Synthetic oligonucleotide
gaguucuguguuuggccgg

SEQ ID NO: 1065878 - RNA, 19 nt, Artificial Sequence
  Description of Artificial Sequence: Synthetic oligonucleotide
cacgaucauauucccaggc

SEQ ID NO: 1065879 - RNA, 19 nt, Artificial Sequence
  Description of Artificial Sequence: Synthetic oligonucleotide
agggauuuguggucugauc

SEQ ID NO: 1065880 - RNA, 19 nt, Artificial Sequence
  Description of Artificial Sequence: Synthetic oligonucleotide
aggaacguccauccuuggg

SEQ ID NO: 1065881 - RNA, 19 nt, Artificial Sequence
  Description of Artificial Sequence: Synthetic oligonucleotide
guuuggccggaucuggucc

SEQ ID NO: 1065882 - RNA, 19 nt, Artificial Sequence
  Description of Artificial Sequence: Synthetic oligonucleotide
agauagugcagaugucuga

SEQ ID NO: 1065883 - RNA, 19 nt, Artificial Sequence
  Description of Artificial Sequence: Synthetic oligonucleotide
auuagcuagaaagcugcug

SEQ ID NO: 1065884 - RNA, 19 nt, Artificial Sequence
  Description of Artificial Sequence: Synthetic oligonucleotide
auucgucaggcucucugag

SEQ ID NO: 1065885 - RNA, 19 nt, Artificial Sequence
  Description of Artificial Sequence: Synthetic oligonucleotide
uggaugucuuuaauuaguu

SEQ ID NO: 1065886 - RNA, 19 nt, Artificial Sequence
  Description of Artificial Sequence: Synthetic oligonucleotide
auaggaacguccauccuug

SEQ ID NO: 1065887 - RNA, 19 nt, Artificial Sequence
  Description of Artificial Sequence: Synthetic oligonucleotide
cugccaaauuacugaaagc

SEQ ID NO: 1065888 - RNA, 19 nt, Artificial Sequence
  Description of Artificial Sequence: Synthetic oligonucleotide
agcaccccaucuuggggcc

SEQ ID NO: 1065889 - RNA, 19 nt, Artificial Sequence
  Description of Artificial Sequence: Synthetic oligonucleotide
aggggacuacgguuaaagg

SEQ ID NO: 1065890 - RNA, 19 nt, Artificial Sequence
  Description of Artificial Sequence: Synthetic oligonucleotide
ugauugauguugaguugcu

SEQ ID NO: 1065891 - RNA, 19 nt, Artificial Sequence
  Description of Artificial Sequence: Synthetic oligonucleotide
uagaauacagauggacacu

SEQ ID NO: 1065892 - RNA, 19 nt, Artificial Sequence
  Description of Artificial Sequence: Synthetic oligonucleotide
auaaucgagcaaagauggc

SEQ ID NO: 1065893 - RNA, 19 nt, Artificial Sequence
  Description of Artificial Sequence: Synthetic oligonucleotide
aggaacucgucacaggcau

SEQ ID NO: 1065894 - RNA, 19 nt, Artificial Sequence
  Description of Artificial Sequence: Synthetic oligonucleotide
aguucagaaguagaauaca

SEQ ID NO: 1065895 - RNA, 19 nt, Artificial Sequence
  Description of Artificial Sequence: Synthetic oligonucleotide
uacgguuaaaggaucuguu

SEQ ID NO: 1065896 - RNA, 19 nt, Artificial Sequence
  Description of Artificial Sequence: Synthetic oligonucleotide
ugcagaugucugauacaag

SEQ ID NO: 1065897 - RNA, 19 nt, Artificial Sequence
  Description of Artificial Sequence: Synthetic oligonucleotide
uggaccuguccacagugac

SEQ ID NO: 1065898 - RNA, 19 nt, Artificial Sequence
  Description of Artificial Sequence: Synthetic oligonucleotide
ucaugugauugauguugag

SEQ ID NO: 1065899 - RNA, 19 nt, Artificial Sequence
  Description of Artificial Sequence: Synthetic oligonucleotide
acgaucauauucccaggcu

SEQ ID NO: 1065900 - RNA, 19 nt, Artificial Sequence
  Description of Artificial Sequence: Synthetic oligonucleotide
uccuuggcucuuuggaagc

SEQ ID NO: 1065901 - RNA, 19 nt, Artificial Sequence
  Description of Artificial Sequence: Synthetic oligonucleotide
aucaguggugcacagccau

SEQ ID NO: 1065902 - RNA, 19 nt, Artificial Sequence
  Description of Artificial Sequence: Synthetic oligonucleotide
uuagcucuaauggcuguga

SEQ ID NO: 1065903 - RNA, 19 nt, Artificial Sequence
  Description of Artificial Sequence: Synthetic oligonucleotide
cugagacuacuguuacucc

SEQ ID NO: 1065904 - RNA, 19 nt, Artificial Sequence
  Description of Artificial Sequence: Synthetic oligonucleotide
uuuggaucaugugauugau

SEQ ID NO: 1065905 - RNA, 19 nt, Artificial Sequence
  Description of Artificial Sequence: Synthetic oligonucleotide
aaauggugauaaagugaag

SEQ ID NO: 1065906 - RNA, 19 nt, Artificial Sequence
  Description of Artificial Sequence: Synthetic oligonucleotide
aguaaugaggaagauccuu

SEQ ID NO: 1065907 - RNA, 19 nt, Artificial Sequence
  Description of Artificial Sequence: Synthetic oligonucleotide
cagaguagucauauucguc

SEQ ID NO: 1065908 - RNA, 19 nt, Artificial Sequence
  Description of Artificial Sequence: Synthetic oligonucleotide
gaacguccauccuugggca

SEQ ID NO: 1065909 - RNA, 19 nt, Artificial Sequence
  Description of Artificial Sequence: Synthetic oligonucleotide
auaaaaggguucagcagca

SEQ ID NO: 1065910 - RNA, 19 nt, Artificial Sequence
  Description of Artificial Sequence: Synthetic oligonucleotide
ucaugcgagccaccgcuug

SEQ ID NO: 1065911 - RNA, 19 nt, Artificial Sequence
  Description of Artificial Sequence: Synthetic oligonucleotide
agacuacuguuacuccgag

SEQ ID NO: 1065912 - RNA, 19 nt, Artificial Sequence
  Description of Artificial Sequence: Synthetic oligonucleotide
ugacgucuccaagaugucc

SEQ ID NO: 1065913 - RNA, 19 nt, Artificial Sequence
  Description of Artificial Sequence: Synthetic oligonucleotide
agggaaucugcugacgucu

SEQ ID NO: 1065914 - RNA, 19 nt, Artificial Sequence
  Description of Artificial Sequence: Synthetic oligonucleotide
gagcgguuaaucucagaca

SEQ ID NO: 1065915 - RNA, 19 nt, Artificial Sequence
  Description of Artificial Sequence: Synthetic oligonucleotide
agugcagaugucugauaca

SEQ ID NO: 1065916 - RNA, 19 nt, Artificial Sequence
  Description of Artificial Sequence: Synthetic oligonucleotide
ggggacuacgguuaaagga

SEQ ID NO: 1065917 - RNA, 19 nt, Artificial Sequence
  Description of Artificial Sequence: Synthetic oligonucleotide
ggcacagaaauucuccuca

SEQ ID NO: 1065918 - RNA, 19 nt, Artificial Sequence
  Description of Artificial Sequence: Synthetic oligonucleotide
accugaucuaccaagggau

SEQ ID NO: 1065919 - RNA, 19 nt, Artificial Sequence
  Description of Artificial Sequence: Synthetic oligonucleotide
uggugcacagccauucaua

SEQ ID NO: 1065920 - RNA, 19 nt, Artificial Sequence
  Description of Artificial Sequence: Synthetic oligonucleotide
cugaaagccacgaucauau

SEQ ID NO: 1065921 - RNA, 19 nt, Artificial Sequence
  Description of Artificial Sequence: Synthetic oligonucleotide
agcaauaaucgagcaaaga

SEQ ID NO: 1065922 - RNA, 19 nt, Artificial Sequence
  Description of Artificial Sequence: Synthetic oligonucleotide
cugaguaaaugccuggcaa

SEQ ID NO: 1065923 - RNA, 19 nt, Artificial Sequence
  Description of Artificial Sequence: Synthetic oligonucleotide
auagaggucauuagcuaga

SEQ ID NO: 1065924 - RNA, 19 nt, Artificial Sequence
  Description of Artificial Sequence: Synthetic oligonucleotide
acgguuaaaggaucuguuu

SEQ ID NO: 1065925 - RNA, 19 nt, Artificial Sequence
  Description of Artificial Sequence: Synthetic oligonucleotide
gcugugaccggaaggagcg

SEQ ID NO: 1065926 - RNA, 19 nt, Artificial Sequence
  Description of Artificial Sequence: Synthetic oligonucleotide
gcaauaaucgagcaaagau

SEQ ID NO: 1065927 - RNA, 19 nt, Artificial Sequence
  Description of Artificial Sequence: Synthetic oligonucleotide
uugugauaaaaggguucag

SEQ ID NO: 1065928 - RNA, 19 nt, Artificial Sequence
  Description of Artificial Sequence: Synthetic oligonucleotide
gcuaguuuggcccuuaggu

SEQ ID NO: 1065929 - RNA, 19 nt, Artificial Sequence
  Description of Artificial Sequence: Synthetic oligonucleotide
cucuggaagacggaagcac

SEQ ID NO: 1065930 - RNA, 19 nt, Artificial Sequence
  Description of Artificial Sequence: Synthetic oligonucleotide
aggaaaacuuagcucuaau

SEQ ID NO: 1065931 - RNA, 19 nt, Artificial Sequence
  Description of Artificial Sequence: Synthetic oligonucleotide
gcuuauugauuuucuucag

SEQ ID NO: 1065932 - RNA, 19 nt, Artificial Sequence
  Description of Artificial Sequence: Synthetic oligonucleotide
gcuagaaagcugcuggaac

SEQ ID NO: 1065933 - RNA, 19 nt, Artificial Sequence
  Description of Artificial Sequence: Synthetic oligonucleotide
ugucugcgcaaagagagua

SEQ ID NO: 1065934 - RNA, 19 nt, Artificial Sequence
  Description of Artificial Sequence: Synthetic oligonucleotide
acacacaacggcuggggau

SEQ ID NO: 1065935 - RNA, 19 nt, Artificial Sequence
  Description of Artificial Sequence: Synthetic oligonucleotide
gagaguaggggaauaggaa

SEQ ID NO: 1065936 - RNA, 19 nt, Artificial Sequence
  Description of Artificial Sequence: Synthetic oligonucleotide
guagauagugcagaugucu

SEQ ID NO: 1065937 - RNA, 19 nt, Artificial Sequence
  Description of Artificial Sequence: Synthetic oligonucleotide
uaccaagggauuugugguc

SEQ ID NO: 1065938 - RNA, 19 nt, Artificial Sequence
  Description of Artificial Sequence: Synthetic oligonucleotide
uguuuggccggaucugguc

SEQ ID NO: 1065939 - RNA, 19 nt, Artificial Sequence
  Description of Artificial Sequence: Synthetic oligonucleotide
uucccgccuuucaaguuug

SEQ ID NO: 1065940 - RNA, 19 nt, Artificial Sequence
  Description of Artificial Sequence: Synthetic oligonucleotide
auaaagugaaggacaugcu

SEQ ID NO: 1065941 - RNA, 19 nt, Artificial Sequence
  Description of Artificial Sequence: Synthetic oligonucleotide
uugcucauaucaagccagu

SEQ ID NO: 1065942 - RNA, 19 nt, Artificial Sequence
  Description of Artificial Sequence: Synthetic oligonucleotide
auucccgccuuucaaguuu

SEQ ID NO: 1065943 - RNA, 19 nt, Artificial Sequence
  Description of Artificial Sequence: Synthetic oligonucleotide
uccagggaaucugcugacg

SEQ ID NO: 1065944 - RNA, 19 nt, Artificial Sequence
  Description of Artificial Sequence: Synthetic oligonucleotide
gcagcauagaggucauuag

SEQ ID NO: 1065945 - RNA, 19 nt, Artificial Sequence
  Description of Artificial Sequence: Synthetic oligonucleotide
aucgagcaaagauggccug

SEQ ID NO: 1065946 - RNA, 19 nt, Artificial Sequence
  Description of Artificial Sequence: Synthetic oligonucleotide
auaucaagccagucuugau

SEQ ID NO: 1065947 - RNA, 19 nt, Artificial Sequence
  Description of Artificial Sequence: Synthetic oligonucleotide
ugaggaaaucacccagguu

SEQ ID NO: 1065948 - RNA, 19 nt, Artificial Sequence
  Description of Artificial Sequence: Synthetic oligonucleotide
cacacaacggcuggggaug

SEQ ID NO: 1065949 - RNA, 19 nt, Artificial Sequence
  Description of Artificial Sequence: Synthetic oligonucleotide
aguaggggaauaggaacgu

SEQ ID NO: 1065950 - RNA, 19 nt, Artificial Sequence
  Description of Artificial Sequence: Synthetic oligonucleotide
cuaccaagggauuuguggu

SEQ ID NO: 1065951 - RNA, 19 nt, Artificial Sequence
  Description of Artificial Sequence: Synthetic oligonucleotide
gacucggacugucugcgca

SEQ ID NO: 1065952 - RNA, 19 nt, Artificial Sequence
  Description of Artificial Sequence: Synthetic oligonucleotide
acuacgguuaaaggaucug

SEQ ID NO: 1065953 - RNA, 19 nt, Artificial Sequence
  Description of Artificial Sequence: Synthetic oligonucleotide
aaaggggagcagguuuucu

SEQ ID NO: 1065954 - RNA, 19 nt, Artificial Sequence
  Description of Artificial Sequence: Synthetic oligonucleotide
gcagagagauuuaacguug

SEQ ID NO: 1065955 - RNA, 19 nt, Artificial Sequence
  Description of Artificial Sequence: Synthetic oligonucleotide
ucgagcaaagauggccugc

SEQ ID NO: 1065956 - RNA, 19 nt, Artificial Sequence
  Description of Artificial Sequence: Synthetic oligonucleotide
augcgcucagccaggaagg

SEQ ID NO: 1065957 - RNA, 19 nt, Artificial Sequence
  Description of Artificial Sequence: Synthetic oligonucleotide
ugguuuccucaccaauagu

SEQ ID NO: 1065958 - RNA, 19 nt, Artificial Sequence
  Description of Artificial Sequence: Synthetic oligonucleotide
cuuagcucuaauggcugug

SEQ ID NO: 1065959 - RNA, 19 nt, Artificial Sequence
  Description of Artificial Sequence: Synthetic oligonucleotide
acccagguuaucugcaaaa

SEQ ID NO: 1065960 - RNA, 19 nt, Artificial Sequence
  Description of Artificial Sequence: Synthetic oligonucleotide
ugccauucccgccuuucaa

SEQ ID NO: 1065961 - RNA, 19 nt, Artificial Sequence
  Description of Artificial Sequence: Synthetic oligonucleotide
ugugagcccucauugccua

SEQ ID NO: 1065962 - RNA, 19 nt, Artificial Sequence
  Description of Artificial Sequence: Synthetic oligonucleotide
gguggaccuguccacagug

SEQ ID NO: 1065963 - RNA, 19 nt, Artificial Sequence
  Description of Artificial Sequence: Synthetic oligonucleotide
gguaacaaaagaugugccu

SEQ ID NO: 1065964 - RNA, 19 nt, Artificial Sequence
  Description of Artificial Sequence: Synthetic oligonucleotide
cuccccggcaucucgauca

SEQ ID NO: 1065965 - RNA, 19 nt, Artificial Sequence
  Description of Artificial Sequence: Synthetic oligonucleotide
cuggaugucuuuaauuagu

SEQ ID NO: 1065966 - RNA, 19 nt, Artificial Sequence
  Description of Artificial Sequence: Synthetic oligonucleotide
ugugaccggaaggagcggu

SEQ ID NO: 1065967 - RNA, 19 nt, Artificial Sequence
  Description of Artificial Sequence: Synthetic oligonucleotide
uguccagaguaaugaggaa

SEQ ID NO: 1065968 - RNA, 19 nt, Artificial Sequence
  Description of Artificial Sequence: Synthetic oligonucleotide
aagggauuuguggucugau

SEQ ID NO: 1065969 - RNA, 19 nt, Artificial Sequence
  Description of Artificial Sequence: Synthetic oligonucleotide
gcuucuaacaccucugcua

SEQ ID NO: 1065970 - RNA, 19 nt, Artificial Sequence
  Description of Artificial Sequence: Synthetic oligonucleotide
ugcugacgucuccaagaug

SEQ ID NO: 1065971 - RNA, 19 nt, Artificial Sequence
  Description of Artificial Sequence: Synthetic oligonucleotide
caggaaggggugcacgaac

SEQ ID NO: 1065972 - RNA, 19 nt, Artificial Sequence
  Description of Artificial Sequence: Synthetic oligonucleotide
aucaagugguuuccuggau

SEQ ID NO: 1065973 - RNA, 19 nt, Artificial Sequence
  Description of Artificial Sequence: Synthetic oligonucleotide
agagagauuuaacguugua

SEQ ID NO: 1065974 - RNA, 19 nt, Artificial Sequence
  Description of Artificial Sequence: Synthetic oligonucleotide
acugaaagccacgaucaua

SEQ ID NO: 1065975 - RNA, 19 nt, Artificial Sequence
  Description of Artificial Sequence: Synthetic oligonucleotide
gauuuguggucugauccaa

SEQ ID NO: 1065976 - RNA, 19 nt, Artificial Sequence
  Description of Artificial Sequence: Synthetic oligonucleotide
gccugcucaacauugcuca

SEQ ID NO: 1065977 - RNA, 19 nt, Artificial Sequence
  Description of Artificial Sequence: Synthetic oligonucleotide
ucggacugucugcgcaaag

SEQ ID NO: 1065978 - RNA, 19 nt, Artificial Sequence
  Description of Artificial Sequence: Synthetic oligonucleotide
auaguggccuuaaucuaca

SEQ ID NO: 1065979 - RNA, 19 nt, Artificial Sequence
  Description of Artificial Sequence: Synthetic oligonucleotide
aguggugcacagccauuca

SEQ ID NO: 1065980 - RNA, 19 nt, Artificial Sequence
  Description of Artificial Sequence: Synthetic oligonucleotide
aggggaauaggaacgucca

SEQ ID NO: 1065981 - RNA, 19 nt, Artificial Sequence
  Description of Artificial Sequence: Synthetic oligonucleotide
cauggagauaaugcgcuca

SEQ ID NO: 1065982 - RNA, 19 nt, Artificial Sequence
  Description of Artificial Sequence: Synthetic oligonucleotide
caauaguggccuuaaucua

SEQ ID NO: 1065983 - RNA, 19 nt, Artificial Sequence
  Description of Artificial Sequence: Synthetic oligonucleotide
acuguuacuccgagucauc

SEQ ID NO: 1065984 - RNA, 19 nt, Artificial Sequence
  Description of Artificial Sequence: Synthetic oligonucleotide
caagugguuuccuggaucu

SEQ ID NO: 1065985 - RNA, 19 nt, Artificial Sequence
  Description of Artificial Sequence: Synthetic oligonucleotide
ggaugucuuuaauuaguuc

SEQ ID NO: 1065986 - RNA, 19 nt, Artificial Sequence
  Description of Artificial Sequence: Synthetic oligonucleotide
uagaggucauuagcuagaa

SEQ ID NO: 1065987 - RNA, 19 nt, Artificial Sequence
  Description of Artificial Sequence: Synthetic oligonucleotide
agacugcacugcaaagggg

SEQ ID NO: 1065988 - RNA, 19 nt, Artificial Sequence
  Description of Artificial Sequence: Synthetic oligonucleotide
gauagugcagaugucugau

SEQ ID NO: 1065989 - RNA, 19 nt, Artificial Sequence
  Description of Artificial Sequence: Synthetic oligonucleotide
uggaagacggaagcaccac

SEQ ID NO: 1065990 - RNA, 19 nt, Artificial Sequence
  Description of Artificial Sequence: Synthetic oligonucleotide
gccauucccgccuuucaag

SEQ ID NO: 1065991 - RNA, 19 nt, Artificial Sequence
  Description of Artificial Sequence: Synthetic oligonucleotide
acacaacggcuggggaugc

SEQ ID NO: 1065992 - RNA, 19 nt, Artificial Sequence
  Description of Artificial Sequence: Synthetic oligonucleotide
cagggaaucugcugacguc

SEQ ID NO: 1065993 - RNA, 19 nt, Artificial Sequence
  Description of Artificial Sequence: Synthetic oligonucleotide
cgguuaaaggaucuguuug

SEQ ID NO: 1065994 - RNA, 19 nt, Artificial Sequence
  Description of Artificial Sequence: Synthetic oligonucleotide
ucauauucgucaggcucuc

SEQ ID NO: 1065995 - RNA, 19 nt, Artificial Sequence
  Description of Artificial Sequence: Synthetic oligonucleotide
cagccauucauagaaaagu

SEQ ID NO: 1065996 - RNA, 19 nt, Artificial Sequence
  Description of Artificial Sequence: Synthetic oligonucleotide
ugguggaccuguccacagu

SEQ ID NO: 1065997 - RNA, 19 nt, Artificial Sequence
  Description of Artificial Sequence: Synthetic oligonucleotide
auagugcagaugucugaua

SEQ ID NO: 1065998 - RNA, 19 nt, Artificial Sequence
  Description of Artificial Sequence: Synthetic oligonucleotide
cauccccaagauuuaagua

SEQ ID NO: 1065999 - RNA, 19 nt, Artificial Sequence
  Description of Artificial Sequence: Synthetic oligonucleotide
ugcucauaucaagccaguc

SEQ ID NO: 1066000 - RNA, 19 nt, Artificial Sequence
  Description of Artificial Sequence: Synthetic oligonucleotide
ucaugcugaucaagugguu

SEQ ID NO: 1066001 - RNA, 19 nt, Artificial Sequence
  Description of Artificial Sequence: Synthetic oligonucleotide
aggaaaucacccagguuau

SEQ ID NO: 1066002 - RNA, 19 nt, Artificial Sequence
  Description of Artificial Sequence: Synthetic oligonucleotide
agcuagaaagcugcuggaa

SEQ ID NO: 1066003 - RNA, 19 nt, Artificial Sequence
  Description of Artificial Sequence: Synthetic oligonucleotide
caugugauugauguugagu

SEQ ID NO: 1066004 - RNA, 19 nt, Artificial Sequence
  Description of Artificial Sequence: Synthetic oligonucleotide
caaagauggccugcucaac

SEQ ID NO: 1066005 - RNA, 19 nt, Artificial Sequence
  Description of Artificial Sequence: Synthetic oligonucleotide
gucugcgcaaagagaguag

SEQ ID NO: 1066006 - RNA, 19 nt, Artificial Sequence
  Description of Artificial Sequence: Synthetic oligonucleotide
aggaaggggugcacgaaca

SEQ ID NO: 1066007 - RNA, 19 nt, Artificial Sequence
  Description of Artificial Sequence: Synthetic oligonucleotide
caguggugcacagccauuc

SEQ ID NO: 1066008 - RNA, 19 nt, Artificial Sequence
  Description of Artificial Sequence: Synthetic oligonucleotide
gcgcaaagagaguagggga

SEQ ID NO: 1066009 - RNA, 19 nt, Artificial Sequence
  Description of Artificial Sequence: Synthetic oligonucleotide
gcucauaucaagccagucu

SEQ ID NO: 1066010 - RNA, 19 nt, Artificial Sequence
  Description of Artificial Sequence: Synthetic oligonucleotide
acaacggcuggggaugcca

SEQ ID NO: 1066011 - RNA, 19 nt, Artificial Sequence
  Description of Artificial Sequence: Synthetic oligonucleotide
cuaauggcugugagcccuc

SEQ ID NO: 1066012 - RNA, 19 nt, Artificial Sequence
  Description of Artificial Sequence: Synthetic oligonucleotide
ucccgccuuucaaguuugg

SEQ ID NO: 1066013 - RNA, 19 nt, Artificial Sequence
  Description of Artificial Sequence: Synthetic oligonucleotide
gggucagacaucagugugc

SEQ ID NO: 1066014 - RNA, 19 nt, Artificial Sequence
  Description of Artificial Sequence: Synthetic oligonucleotide
cuuugagagcaccccaucu

SEQ ID NO: 1066015 - RNA, 19 nt, Artificial Sequence
  Description of Artificial Sequence: Synthetic oligonucleotide
caagugaggcaucacggcu

SEQ ID NO: 1066016 - RNA, 19 nt, Artificial Sequence
  Description of Artificial Sequence: Synthetic oligonucleotide
guaaugaggaagauccuuu

SEQ ID NO: 1066017 - RNA, 19 nt, Artificial Sequence
  Description of Artificial Sequence: Synthetic oligonucleotide
aagguucaguucagaagua

SEQ ID NO: 1066018 - RNA, 19 nt, Artificial Sequence
  Description of Artificial Sequence: Synthetic oligonucleotide
gaauaggaacguccauccu

SEQ ID NO: 1066019 - RNA, 19 nt, Artificial Sequence
  Description of Artificial Sequence: Synthetic oligonucleotide
caggaacucgucacaggca

SEQ ID NO: 1066020 - RNA, 19 nt, Artificial Sequence
  Description of Artificial Sequence: Synthetic oligonucleotide
uuuggcccuuaggugggga

SEQ ID NO: 1066021 - RNA, 19 nt, Artificial Sequence
  Description of Artificial Sequence: Synthetic oligonucleotide
ggaagacggaagcaccaca

SEQ ID NO: 1066022 - RNA, 19 nt, Artificial Sequence
  Description of Artificial Sequence: Synthetic oligonucleotide
uccccggcaucucgaucag

SEQ ID NO: 1066023 - RNA, 19 nt, Artificial Sequence
  Description of Artificial Sequence: Synthetic oligonucleotide
gccuagaucuccugaggac

SEQ ID NO: 1066024 - RNA, 19 nt, Artificial Sequence
  Description of Artificial Sequence: Synthetic oligonucleotide
uuggcccuuagguggggau

SEQ ID NO: 1066025 - RNA, 19 nt, Artificial Sequence
  Description of Artificial Sequence: Synthetic oligonucleotide
ucuucaggacucggacugu

SEQ ID NO: 1066026 - RNA, 19 nt, Artificial Sequence
  Description of Artificial Sequence: Synthetic oligonucleotide
gccaaccaggugcugcagg

SEQ ID NO: 1066027 - RNA, 19 nt, Artificial Sequence
  Description of Artificial Sequence: Synthetic oligonucleotide
ugaaagccacgaucauauu

SEQ ID NO: 1066028 - RNA, 19 nt, Artificial Sequence
  Description of Artificial Sequence: Synthetic oligonucleotide
ggcugugagcccucauugc

SEQ ID NO: 1066029 - RNA, 19 nt, Artificial Sequence
  Description of Artificial Sequence: Synthetic oligonucleotide
aacggcuggggaugccauu

SEQ ID NO: 1066030 - RNA, 19 nt, Artificial Sequence
  Description of Artificial Sequence: Synthetic oligonucleotide
gcucacauuauuucuugcu

SEQ ID NO: 1066031 - RNA, 19 nt, Artificial Sequence
  Description of Artificial Sequence: Synthetic oligonucleotide
ggacacuagaggcagcaua

SEQ ID NO: 1066032 - RNA, 19 nt, Artificial Sequence
  Description of Artificial Sequence: Synthetic oligonucleotide
uucaugcgagccaccgcuu

SEQ ID NO: 1066033 - RNA, 19 nt, Artificial Sequence
  Description of Artificial Sequence: Synthetic oligonucleotide
gagcaaagauggccugcuc

SEQ ID NO: 1066034 - RNA, 19 nt, Artificial Sequence
  Description of Artificial Sequence: Synthetic oligonucleotide
cguuguagaagaagucaug

SEQ ID NO: 1066035 - RNA, 19 nt, Artificial Sequence
  Description of Artificial Sequence: Synthetic oligonucleotide
auuuaacguuguagaagaa

SEQ ID NO: 1066036 - RNA, 19 nt, Artificial Sequence
  Description of Artificial Sequence: Synthetic oligonucleotide
ccacgaucauauucccagg

SEQ ID NO: 1066037 - RNA, 19 nt, Artificial Sequence
  Description of Artificial Sequence: Synthetic oligonucleotide
gggugcacgaacagugacc

SEQ ID NO: 1066038 - RNA, 19 nt, Artificial Sequence
  Description of Artificial Sequence: Synthetic oligonucleotide
guaaggggacuacgguuaa

SEQ ID NO: 1066039 - RNA, 19 nt, Artificial Sequence
  Description of Artificial Sequence: Synthetic oligonucleotide
ucuccccggcaucucgauc

SEQ ID NO: 1066040 - RNA, 19 nt, Artificial Sequence
  Description of Artificial Sequence: Synthetic oligonucleotide
aucuaccaagggauuugug

SEQ ID NO: 1066041 - RNA, 19 nt, Artificial Sequence
  Description of Artificial Sequence: Synthetic oligonucleotide
acacuagaggcagcauaga

SEQ ID NO: 1066042 - RNA, 19 nt, Artificial Sequence
  Description of Artificial Sequence: Synthetic oligonucleotide
gacuacgguuaaaggaucu

SEQ ID NO: 1066043 - RNA, 19 nt, Artificial Sequence
  Description of Artificial Sequence: Synthetic oligonucleotide
cugcuaguuuggcccuuag

SEQ ID NO: 1066044 - RNA, 19 nt, Artificial Sequence
  Description of Artificial Sequence: Synthetic oligonucleotide
gggacuacgguuaaaggau

SEQ ID NO: 1066045 - RNA, 19 nt, Artificial Sequence
  Description of Artificial Sequence: Synthetic oligonucleotide
ucaagccagucuugaucuu

SEQ ID NO: 1066046 - RNA, 19 nt, Artificial Sequence
  Description of Artificial Sequence: Synthetic oligonucleotide
cuacgguuaaaggaucugu

SEQ ID NO: 1066047 - RNA, 19 nt, Artificial Sequence
  Description of Artificial Sequence: Synthetic oligonucleotide
ugaccggaaggagcgguua

SEQ ID NO: 1066048 - RNA, 19 nt, Artificial Sequence
  Description of Artificial Sequence: Synthetic oligonucleotide
caaaggggagcagguuuuc

SEQ ID NO: 1066049 - RNA, 19 nt, Artificial Sequence
  Description of Artificial Sequence: Synthetic oligonucleotide
ggugcacgaacagugaccu

SEQ ID NO: 1066050 - RNA, 19 nt, Artificial Sequence
  Description of Artificial Sequence: Synthetic oligonucleotide
guaggggaauaggaacguc

SEQ ID NO: 1066051 - RNA, 19 nt, Artificial Sequence
  Description of Artificial Sequence: Synthetic oligonucleotide
ccaugguaaggggacuacg

SEQ ID NO: 1066052 - RNA, 19 nt, Artificial Sequence
  Description of Artificial Sequence: Synthetic oligonucleotide
uaaggggacuacgguuaaa

SEQ ID NO: 1066053 - RNA, 19 nt, Artificial Sequence
  Description of Artificial Sequence: Synthetic oligonucleotide
ggaacuuugguaaucucuu

SEQ ID NO: 1066054 - RNA, 19 nt, Artificial Sequence
  Description of Artificial Sequence: Synthetic oligonucleotide
gaucacuguuguccagagu

SEQ ID NO: 1066055 - RNA, 19 nt, Artificial Sequence
  Description of Artificial Sequence: Synthetic oligonucleotide
cugaggacucgaacgagau

SEQ ID NO: 1066056 - RNA, 19 nt, Artificial Sequence
  Description of Artificial Sequence: Synthetic oligonucleotide
caaagagaguaggggaaua

SEQ ID NO: 1066057 - RNA, 19 nt, Artificial Sequence
  Description of Artificial Sequence: Synthetic oligonucleotide
cccggcaucucgaucagca

SEQ ID NO: 1066058 - RNA, 19 nt, Artificial Sequence
  Description of Artificial Sequence: Synthetic oligonucleotide
cauuagcuagaaagcugcu

SEQ ID NO: 1066059 - RNA, 19 nt, Artificial Sequence
  Description of Artificial Sequence: Synthetic oligonucleotide
gaguaaugaggaagauccu

SEQ ID NO: 1066060 - RNA, 19 nt, Artificial Sequence
  Description of Artificial Sequence: Synthetic oligonucleotide
cacgaacagugaccugauc

SEQ ID NO: 1066061 - RNA, 19 nt, Artificial Sequence
  Description of Artificial Sequence: Synthetic oligonucleotide
guugaguugcucacauuau

SEQ ID NO: 1066062 - RNA, 19 nt, Artificial Sequence
  Description of Artificial Sequence: Synthetic oligonucleotide
uggacacuagaggcagcau

SEQ ID NO: 1066063 - RNA, 19 nt, Artificial Sequence
  Description of Artificial Sequence: Synthetic oligonucleotide
caagggauuuguggucuga

SEQ ID NO: 1066064 - RNA, 19 nt, Artificial Sequence
  Description of Artificial Sequence: Synthetic oligonucleotide
ccugaggacucgaacgaga

SEQ ID NO: 1066065 - RNA, 19 nt, Artificial Sequence
  Description of Artificial Sequence: Synthetic oligonucleotide
caguuuucaccugcaaacu

SEQ ID NO: 1066066 - RNA, 19 nt, Artificial Sequence
  Description of Artificial Sequence: Synthetic oligonucleotide
ucccaggcuuauugauuuu

SEQ ID NO: 1066067 - RNA, 19 nt, Artificial Sequence
  Description of Artificial Sequence: Synthetic oligonucleotide
ggacuacgguuaaaggauc

SEQ ID NO: 1066068 - RNA, 19 nt, Artificial Sequence
  Description of Artificial Sequence: Synthetic oligonucleotide
guggggauucuucauucuu

SEQ ID NO: 1066069 - RNA, 19 nt, Artificial Sequence
  Description of Artificial Sequence: Synthetic oligonucleotide
gacacagaguagucauauu

SEQ ID NO: 1066070 - RNA, 19 nt, Artificial Sequence
  Description of Artificial Sequence: Synthetic oligonucleotide
cacccagguuaucugcaaa

SEQ ID NO: 1066071 - RNA, 19 nt, Artificial Sequence
  Description of Artificial Sequence: Synthetic oligonucleotide
ggucagacaucagugugcu

SEQ ID NO: 1066072 - RNA, 19 nt, Artificial Sequence
  Description of Artificial Sequence: Synthetic oligonucleotide
guggugcacagccauucau

SEQ ID NO: 1066073 - RNA, 19 nt, Artificial Sequence
  Description of Artificial Sequence: Synthetic oligonucleotide
cuccaguuuucaccugcaa

SEQ ID NO: 1066074 - RNA, 19 nt, Artificial Sequence
  Description of Artificial Sequence: Synthetic oligonucleotide
guggaccuguccacaguga

SEQ ID NO: 1066075 - RNA, 19 nt, Artificial Sequence
  Description of Artificial Sequence: Synthetic oligonucleotide
gguuaaucucagacacaga

SEQ ID NO: 1066076 - RNA, 19 nt, Artificial Sequence
  Description of Artificial Sequence: Synthetic oligonucleotide
guccaugguaaggggacua

SEQ ID NO: 1066077 - RNA, 19 nt, Artificial Sequence
  Description of Artificial Sequence: Synthetic oligonucleotide
ccaagggauuuguggucug

SEQ ID NO: 1066078 - RNA, 19 nt, Artificial Sequence
  Description of Artificial Sequence: Synthetic oligonucleotide
ggcuucuaacaccucugcu

SEQ ID NO: 1066079 - RNA, 19 nt, Artificial Sequence
  Description of Artificial Sequence: Synthetic oligonucleotide
cugucugcgcaaagagagu

SEQ ID NO: 1066080 - RNA, 19 nt, Artificial Sequence
  Description of Artificial Sequence: Synthetic oligonucleotide
ccggcaucucgaucagcag

SEQ ID NO: 1066081 - RNA, 19 nt, Artificial Sequence
  Description of Artificial Sequence: Synthetic oligonucleotide
ccuagaucuccugaggacu

SEQ ID NO: 1066082 - RNA, 19 nt, Artificial Sequence
  Description of Artificial Sequence: Synthetic oligonucleotide
cugcugacgucuccaagau

SEQ ID NO: 1066083 - RNA, 19 nt, Artificial Sequence
  Description of Artificial Sequence: Synthetic oligonucleotide
cggcuucuaacaccucugc

SEQ ID NO: 1066084 - RNA, 19 nt, Artificial Sequence
  Description of Artificial Sequence: Synthetic oligonucleotide
cucgaacgagauggauuca

SEQ ID NO: 1066085 - RNA, 19 nt, Artificial Sequence
  Description of Artificial Sequence: Synthetic oligonucleotide
cacuguuguccagaguaau

SEQ ID NO: 1066086 - RNA, 19 nt, Artificial Sequence
  Description of Artificial Sequence: Synthetic oligonucleotide
ccucagcaaaucgccggag

SEQ ID NO: 1066087 - RNA, 19 nt, Artificial Sequence
  Description of Artificial Sequence: Synthetic oligonucleotide
ggaacucgucacaggcauc

SEQ ID NO: 1066088 - RNA, 19 nt, Artificial Sequence
  Description of Artificial Sequence: Synthetic oligonucleotide
ccagggaaucugcugacgu

SEQ ID NO: 1066089 - RNA, 19 nt, Artificial Sequence
  Description of Artificial Sequence: Synthetic oligonucleotide
ccgccuuucaaguuuggau

SEQ ID NO: 1066090 - RNA, 19 nt, Artificial Sequence
  Description of Artificial Sequence: Synthetic oligonucleotide
gcaaagagaguaggggaau

SEQ ID NO: 1066091 - RNA, 19 nt, Artificial Sequence
  Description of Artificial Sequence: Synthetic oligonucleotide
ccuggaucuugaagcaaua

SEQ ID NO: 1066092 - RNA, 19 nt, Artificial Sequence
  Description of Artificial Sequence: Synthetic oligonucleotide
cucggacugucugcgcaaa

SEQ ID NO: 1066093 - RNA, 19 nt, Artificial Sequence
  Description of Artificial Sequence: Synthetic oligonucleotide
ggaccuguccacagugacu

SEQ ID NO: 1066094 - RNA, 19 nt, Artificial Sequence
  Description of Artificial Sequence: Synthetic oligonucleotide
ggggaauaggaacguccau

SEQ ID NO: 1066095 - RNA, 19 nt, Artificial Sequence
  Description of Artificial Sequence: Synthetic oligonucleotide
caacggcuggggaugccau

SEQ ID NO: 1066096 - RNA, 19 nt, Artificial Sequence
  Description of Artificial Sequence: Synthetic oligonucleotide
cggacugucugcgcaaaga

SEQ ID NO: 1066097 - RNA, 19 nt, Artificial Sequence
  Description of Artificial Sequence: Synthetic oligonucleotide
cauauucgucaggcucucu

SEQ ID NO: 1066098 - RNA, 19 nt, Artificial Sequence
  Description of Artificial Sequence: Synthetic oligonucleotide
ggcuuacaaucugaagguu

SEQ ID NO: 1066099 - RNA, 19 nt, Artificial Sequence
  Description of Artificial Sequence: Synthetic oligonucleotide
ccugaucuaccaagggauu

SEQ ID NO: 1066100 - RNA, 19 nt, Artificial Sequence
  Description of Artificial Sequence: Synthetic oligonucleotide
cucuccccggcaucucgau

SEQ ID NO: 1066101 - RNA, 19 nt, Artificial Sequence
  Description of Artificial Sequence: Synthetic oligonucleotide
cggaagcaccacaggguca

SEQ ID NO: 1066102 - RNA, 19 nt, Artificial Sequence
  Description of Artificial Sequence: Synthetic oligonucleotide
gccaucuuuggagguuugu

SEQ ID NO: 1066103 - RNA, 19 nt, Artificial Sequence
  Description of Artificial Sequence: Synthetic oligonucleotide
cccgccuuucaaguuugga

SEQ ID NO: 1066104 - RNA, 19 nt, Artificial Sequence
  Description of Artificial Sequence: Synthetic oligonucleotide
cucgaucagcagagagauu

SEQ ID NO: 1066105 - RNA, 19 nt, Artificial Sequence
  Description of Artificial Sequence: Synthetic oligonucleotide
cgaucagcagagagauuua

SEQ ID NO: 1066106 - RNA, 19 nt, Artificial Sequence
  Description of Artificial Sequence: Synthetic oligonucleotide
ccucugcuaguuuggcccu

SEQ ID NO: 1066107 - RNA, 19 nt, Artificial Sequence
  Description of Artificial Sequence: Synthetic oligonucleotide
cugcaaaggggagcagguu

SEQ ID NO: 1066108 - RNA, 19 nt, Artificial Sequence
  Description of Artificial Sequence: Synthetic oligonucleotide
gcacgaacagugaccugau

SEQ ID NO: 1066109 - RNA, 19 nt, Artificial Sequence
  Description of Artificial Sequence: Synthetic oligonucleotide
ccagaguaaugaggaagau

SEQ ID NO: 1066110 - RNA, 19 nt, Artificial Sequence
  Description of Artificial Sequence: Synthetic oligonucleotide
ccccggcaucucgaucagc

SEQ ID NO: 1066111 - RNA, 19 nt, Artificial Sequence
  Description of Artificial Sequence: Synthetic oligonucleotide
ggucugcaagagacuugau

SEQ ID NO: 1066112 - RNA, 19 nt, Artificial Sequence
  Description of Artificial Sequence: Synthetic oligonucleotide
aucaaaaccagcccgaugc

SEQ ID NO: 1066113 - RNA, 19 nt, Artificial Sequence
  Description of Artificial Sequence: Synthetic oligonucleotide
aaggccauuauguagcacc

SEQ ID NO: 1066114 - RNA, 19 nt, Artificial Sequence
  Description of Artificial Sequence: Synthetic oligonucleotide
aauaucaugugacugagga

SEQ ID NO: 1066115 - RNA, 19 nt, Artificial Sequence
  Description of Artificial Sequence: Synthetic oligonucleotide
acuggcuugacucacaggc

SEQ ID NO: 1066116 - RNA, 19 nt, Artificial Sequence
  Description of Artificial Sequence: Synthetic oligonucleotide
agaaaacugacucuuggcc

SEQ ID NO: 1066117 - RNA, 19 nt, Artificial Sequence
  Description of Artificial Sequence: Synthetic oligonucleotide
uguugugacacucaggaag

SEQ ID NO: 1066118 - RNA, 19 nt, Artificial Sequence
  Description of Artificial Sequence: Synthetic oligonucleotide
aauuauagcaguccuaccu

SEQ ID NO: 1066119 - RNA, 19 nt, Artificial Sequence
  Description of Artificial Sequence: Synthetic oligonucleotide
auuauguagcaccaggggc

SEQ ID NO: 1066120 - RNA, 19 nt, Artificial Sequence
  Description of Artificial Sequence: Synthetic oligonucleotide
uauaaggccauuauguagc

SEQ ID NO: 1066121 - RNA, 19 nt, Artificial Sequence
  Description of Artificial Sequence: Synthetic oligonucleotide
uucuauaacauacuccucc

SEQ ID NO: 1066122 - RNA, 19 nt, Artificial Sequence
  Description of Artificial Sequence: Synthetic oligonucleotide
ugucauaaaugccugcugg

SEQ ID NO: 1066123 - RNA, 19 nt, Artificial Sequence
  Description of Artificial Sequence: Synthetic oligonucleotide
uacaaaucgggcaugaaac

SEQ ID NO: 1066124 - RNA, 19 nt, Artificial Sequence
  Description of Artificial Sequence: Synthetic oligonucleotide
ugagaaaacugacucuugg

SEQ ID NO: 1066125 - RNA, 19 nt, Artificial Sequence
  Description of Artificial Sequence: Synthetic oligonucleotide
aaauuauagcaguccuacc

SEQ ID NO: 1066126 - RNA, 19 nt, Artificial Sequence
  Description of Artificial Sequence: Synthetic oligonucleotide
ucaacaaacucuuuaguac

SEQ ID NO: 1066127 - RNA, 19 nt, Artificial Sequence
  Description of Artificial Sequence: Synthetic oligonucleotide
auuuccggaaagcauauuc

SEQ ID NO: 1066128 - RNA, 19 nt, Artificial Sequence
  Description of Artificial Sequence: Synthetic oligonucleotide
acucuuuaguacuuaaagg

SEQ ID NO: 1066129 - RNA, 19 nt, Artificial Sequence
  Description of Artificial Sequence: Synthetic oligonucleotide
gagaacuugucgcagaugc

SEQ ID NO: 1066130 - RNA, 19 nt, Artificial Sequence
  Description of Artificial Sequence: Synthetic oligonucleotide
uauaacauacuccuccaug

SEQ ID NO: 1066131 - RNA, 19 nt, Artificial Sequence
  Description of Artificial Sequence: Synthetic oligonucleotide
ucuuuaguacuuaaaggug

SEQ ID NO: 1066132 - RNA, 19 nt, Artificial Sequence
  Description of Artificial Sequence: Synthetic oligonucleotide
uagaagaaugagaaaacug

SEQ ID NO: 1066133 - RNA, 19 nt, Artificial Sequence
  Description of Artificial Sequence: Synthetic oligonucleotide
aagcuagcugucuuuaagg

SEQ ID NO: 1066134 - RNA, 19 nt, Artificial Sequence
  Description of Artificial Sequence: Synthetic oligonucleotide
uaggaagcuacaaaucggg

SEQ ID NO: 1066135 - RNA, 19 nt, Artificial Sequence
  Description of Artificial Sequence: Synthetic oligonucleotide
cuuugguucuauaacauac

SEQ ID NO: 1066136 - RNA, 19 nt, Artificial Sequence
  Description of Artificial Sequence: Synthetic oligonucleotide
uaaccugucauaaaggcau

SEQ ID NO: 1066137 - RNA, 19 nt, Artificial Sequence
  Description of Artificial Sequence: Synthetic oligonucleotide
ucgaauuaguucaaggaac

SEQ ID NO: 1066138 - RNA, 19 nt, Artificial Sequence
  Description of Artificial Sequence: Synthetic oligonucleotide
ucucaugcuagauggauag

SEQ ID NO: 1066139 - RNA, 19 nt, Artificial Sequence
  Description of Artificial Sequence: Synthetic oligonucleotide
gaauuugauauguaggcca

SEQ ID NO: 1066140 - RNA, 19 nt, Artificial Sequence
  Description of Artificial Sequence: Synthetic oligonucleotide
gaaauuauagcaguccuac

SEQ ID NO: 1066141 - RNA, 19 nt, Artificial Sequence
  Description of Artificial Sequence: Synthetic oligonucleotide
aucgguagucaauauggcc

SEQ ID NO: 1066142 - RNA, 19 nt, Artificial Sequence
  Description of Artificial Sequence: Synthetic oligonucleotide
uuacaggggacauacagca

SEQ ID NO: 1066143 - RNA, 19 nt, Artificial Sequence
  Description of Artificial Sequence: Synthetic oligonucleotide
aagcgauggccauaucucc

SEQ ID NO: 1066144 - RNA, 19 nt, Artificial Sequence
  Description of Artificial Sequence: Synthetic oligonucleotide
auaaaugccugcugggaac

SEQ ID NO: 1066145 - RNA, 19 nt, Artificial Sequence
  Description of Artificial Sequence: Synthetic oligonucleotide
uaaagcgauggccauaucu

SEQ ID NO: 1066146 - RNA, 19 nt, Artificial Sequence
  Description of Artificial Sequence: Synthetic oligonucleotide
auuauagcaguccuaccuc

SEQ ID NO: 1066147 - RNA, 19 nt, Artificial Sequence
  Description of Artificial Sequence: Synthetic oligonucleotide
uuagauauaccuuguugug

SEQ ID NO: 1066148 - RNA, 19 nt, Artificial Sequence
  Description of Artificial Sequence: Synthetic oligonucleotide
uaggccaucacauaaccug

SEQ ID NO: 1066149 - RNA, 19 nt, Artificial Sequence
  Description of Artificial Sequence: Synthetic oligonucleotide
agauugaacacuuggguca

SEQ ID NO: 1066150 - RNA, 19 nt, Artificial Sequence
  Description of Artificial Sequence: Synthetic oligonucleotide
ucgguagucaauauggccu

SEQ ID NO: 1066151 - RNA, 19 nt, Artificial Sequence
  Description of Artificial Sequence: Synthetic oligonucleotide
aaagcgauggccauaucuc

SEQ ID NO: 1066152 - RNA, 19 nt, Artificial Sequence
  Description of Artificial Sequence: Synthetic oligonucleotide
uucugugguagccacauca

SEQ ID NO: 1066153 - RNA, 19 nt, Artificial Sequence
  Description of Artificial Sequence: Synthetic oligonucleotide
ugauauguaggccaugaaa

SEQ ID NO: 1066154 - RNA, 19 nt, Artificial Sequence
  Description of Artificial Sequence: Synthetic oligonucleotide
agugucaaugauaagauca

SEQ ID NO: 1066155 - RNA, 19 nt, Artificial Sequence
  Description of Artificial Sequence: Synthetic oligonucleotide
uuauuaacucaaauugacu

SEQ ID NO: 1066156 - RNA, 19 nt, Artificial Sequence
  Description of Artificial Sequence: Synthetic oligonucleotide
augcuagauggauagcugc

SEQ ID NO: 1066157 - RNA, 19 nt, Artificial Sequence
  Description of Artificial Sequence: Synthetic oligonucleotide
ugugguagccacaucaacu

SEQ ID NO: 1066158 - RNA, 19 nt, Artificial Sequence
  Description of Artificial Sequence: Synthetic oligonucleotide
auaagaucaauaucaugug

SEQ ID NO: 1066159 - RNA, 19 nt, Artificial Sequence
  Description of Artificial Sequence: Synthetic oligonucleotide
agcuagcugucuuuaaggc

SEQ ID NO: 1066160 - RNA, 19 nt, Artificial Sequence
  Description of Artificial Sequence: Synthetic oligonucleotide
aauuaguucaaggaacagu

SEQ ID NO: 1066161 - RNA, 19 nt, Artificial Sequence
  Description of Artificial Sequence: Synthetic oligonucleotide
cuauaaggccauuauguag

SEQ ID NO: 1066162 - RNA, 19 nt, Artificial Sequence
  Description of Artificial Sequence: Synthetic oligonucleotide
ugcucaacaaacucuuuag

SEQ ID NO: 1066163 - RNA, 19 nt, Artificial Sequence
  Description of Artificial Sequence: Synthetic oligonucleotide
aaggccaguaaagcgaugg

SEQ ID NO: 1066164 - RNA, 19 nt, Artificial Sequence
  Description of Artificial Sequence: Synthetic oligonucleotide
acgacgguacguuacaggg

SEQ ID NO: 1066165 - RNA, 19 nt, Artificial Sequence
  Description of Artificial Sequence: Synthetic oligonucleotide
ucacagaccugcuuugugg

SEQ ID NO: 1066166 - RNA, 19 nt, Artificial Sequence
  Description of Artificial Sequence: Synthetic oligonucleotide
aucaauaucaugugacuga

SEQ ID NO: 1066167 - RNA, 19 nt, Artificial Sequence
  Description of Artificial Sequence: Synthetic oligonucleotide
cuuguugugacacucagga

SEQ ID NO: 1066168 - RNA, 19 nt, Artificial Sequence
  Description of Artificial Sequence: Synthetic oligonucleotide
aaauaagaauuuucucccu

SEQ ID NO: 1066169 - RNA, 19 nt, Artificial Sequence
  Description of Artificial Sequence: Synthetic oligonucleotide
uguacauccaccacaggaa

SEQ ID NO: 1066170 - RNA, 19 nt, Artificial Sequence
  Description of Artificial Sequence: Synthetic oligonucleotide
ugguucuauaacauacucc

SEQ ID NO: 1066171 - RNA, 19 nt, Artificial Sequence
  Description of Artificial Sequence: Synthetic oligonucleotide
aacacuugggucaaauaag

SEQ ID NO: 1066172 - RNA, 19 nt, Artificial Sequence
  Description of Artificial Sequence: Synthetic oligonucleotide
uaggguuuugcuauauggc

SEQ ID NO: 1066173 - RNA, 19 nt, Artificial Sequence
  Description of Artificial Sequence: Synthetic oligonucleotide
aacgacgguacguuacagg

SEQ ID NO: 1066174 - RNA, 19 nt, Artificial Sequence
  Description of Artificial Sequence: Synthetic oligonucleotide
acaggggacauacagcauc

SEQ ID NO: 1066175 - RNA, 19 nt, Artificial Sequence
  Description of Artificial Sequence: Synthetic oligonucleotide
uuuaguacuuaaaggugac

SEQ ID NO: 1066176 - RNA, 19 nt, Artificial Sequence
  Description of Artificial Sequence: Synthetic oligonucleotide
uuuaugcuccauuucuaag

SEQ ID NO: 1066177 - RNA, 19 nt, Artificial Sequence
  Description of Artificial Sequence: Synthetic oligonucleotide
ugguucagcaaacucuucc

SEQ ID NO: 1066178 - RNA, 19 nt, Artificial Sequence
  Description of Artificial Sequence: Synthetic oligonucleotide
cauuauguagcaccagggg

SEQ ID NO: 1066179 - RNA, 19 nt, Artificial Sequence
  Description of Artificial Sequence: Synthetic oligonucleotide
augaaauuauagcaguccu

SEQ ID NO: 1066180 - RNA, 19 nt, Artificial Sequence
  Description of Artificial Sequence: Synthetic oligonucleotide
auauaccuuguugugacac

SEQ ID NO: 1066181 - RNA, 19 nt, Artificial Sequence
  Description of Artificial Sequence: Synthetic oligonucleotide
ugccgguugaaguugaagc

SEQ ID NO: 1066182 - RNA, 19 nt, Artificial Sequence
  Description of Artificial Sequence: Synthetic oligonucleotide
agacuuugguucuauaaca

SEQ ID NO: 1066183 - RNA, 19 nt, Artificial Sequence
  Description of Artificial Sequence: Synthetic oligonucleotide
uaguacuuaaaggugaccu

SEQ ID NO: 1066184 - RNA, 19 nt, Artificial Sequence
  Description of Artificial Sequence: Synthetic oligonucleotide
ucuauaacauacuccucca

SEQ ID NO: 1066185 - RNA, 19 nt, Artificial Sequence
  Description of Artificial Sequence: Synthetic oligonucleotide
uuugauauguaggccauga

SEQ ID NO: 1066186 - RNA, 19 nt, Artificial Sequence
  Description of Artificial Sequence: Synthetic oligonucleotide
ugcguagaaguucugguac

SEQ ID NO: 1066187 - RNA, 19 nt, Artificial Sequence
  Description of Artificial Sequence: Synthetic oligonucleotide
aauauggccucucaugcua

SEQ ID NO: 1066188 - RNA, 19 nt, Artificial Sequence
  Description of Artificial Sequence: Synthetic oligonucleotide
uuugguucuauaacauacu

SEQ ID NO: 1066189 - RNA, 19 nt, Artificial Sequence
  Description of Artificial Sequence: Synthetic oligonucleotide
ucaauaucaugugacugag

SEQ ID NO: 1066190 - RNA, 19 nt, Artificial Sequence
  Description of Artificial Sequence: Synthetic oligonucleotide
ucuaagccacuuuugugag

SEQ ID NO: 1066191 - RNA, 19 nt, Artificial Sequence
  Description of Artificial Sequence: Synthetic oligonucleotide
aauaggguuuugcuauaug

SEQ ID NO: 1066192 - RNA, 19 nt, Artificial Sequence
  Description of Artificial Sequence: Synthetic oligonucleotide
caaacaugagccacuacac

SEQ ID NO: 1066193 - RNA, 19 nt, Artificial Sequence
  Description of Artificial Sequence: Synthetic oligonucleotide
uaguucaaggaacaguguc

SEQ ID NO: 1066194 - RNA, 19 nt, Artificial Sequence
  Description of Artificial Sequence: Synthetic oligonucleotide
ucacuuuguacauccacca

SEQ ID NO: 1066195 - RNA, 19 nt, Artificial Sequence
  Description of Artificial Sequence: Synthetic oligonucleotide
uaguagguuauuaacucaa

SEQ ID NO: 1066196 - RNA, 19 nt, Artificial Sequence
  Description of Artificial Sequence: Synthetic oligonucleotide
ucuuccuauccccaagccc

SEQ ID NO: 1066197 - RNA, 19 nt, Artificial Sequence
  Description of Artificial Sequence: Synthetic oligonucleotide
agugaagguucccaagguc

SEQ ID NO: 1066198 - RNA, 19 nt, Artificial Sequence
  Description of Artificial Sequence: Synthetic oligonucleotide
aacagaacggguccuggca

SEQ ID NO: 1066199 - RNA, 19 nt, Artificial Sequence
  Description of Artificial Sequence: Synthetic oligonucleotide
cuagcugucuuuaaggcca

SEQ ID NO: 1066200 - RNA, 19 nt, Artificial Sequence
  Description of Artificial Sequence: Synthetic oligonucleotide
uaggccgagaacuugucgc

SEQ ID NO: 1066201 - RNA, 19 nt, Artificial Sequence
  Description of Artificial Sequence: Synthetic oligonucleotide
ucuccuacuauuagcuucu

SEQ ID NO: 1066202 - RNA, 19 nt, Artificial Sequence
  Description of Artificial Sequence: Synthetic oligonucleotide
gaagaaugagaaaacugac

SEQ ID NO: 1066203 - RNA, 19 nt, Artificial Sequence
  Description of Artificial Sequence: Synthetic oligonucleotide
gucauaaaugccugcuggg

SEQ ID NO: 1066204 - RNA, 19 nt, Artificial Sequence
  Description of Artificial Sequence: Synthetic oligonucleotide
agaucaauaucaugugacu

SEQ ID NO: 1066205 - RNA, 19 nt, Artificial Sequence
  Description of Artificial Sequence: Synthetic oligonucleotide
acgggcucgaauuaguuca

SEQ ID NO: 1066206 - RNA, 19 nt, Artificial Sequence
  Description of Artificial Sequence: Synthetic oligonucleotide
uacguuacaggggacauac

SEQ ID NO: 1066207 - RNA, 19 nt, Artificial Sequence
  Description of Artificial Sequence: Synthetic oligonucleotide
uugguucuauaacauacuc

SEQ ID NO: 1066208 - RNA, 19 nt, Artificial Sequence
  Description of Artificial Sequence: Synthetic oligonucleotide
aggguuuugcuauauggcu

SEQ ID NO: 1066209 - RNA, 19 nt, Artificial Sequence
  Description of Artificial Sequence: Synthetic oligonucleotide
ugugggcuuuagaagaaug

SEQ ID NO: 1066210 - RNA, 19 nt, Artificial Sequence
  Description of Artificial Sequence: Synthetic oligonucleotide
cuuagauauaccuuguugu

SEQ ID NO: 1066211 - RNA, 19 nt, Artificial Sequence
  Description of Artificial Sequence: Synthetic oligonucleotide
guucaaggaacaguguccg

SEQ ID NO: 1066212 - RNA, 19 nt, Artificial Sequence
  Description of Artificial Sequence: Synthetic oligonucleotide
guacuuaaaggugaccuag

SEQ ID NO: 1066213 - RNA, 19 nt, Artificial Sequence
  Description of Artificial Sequence: Synthetic oligonucleotide
ucuauaaggccauuaugua

SEQ ID NO: 1066214 - RNA, 19 nt, Artificial Sequence
  Description of Artificial Sequence: Synthetic oligonucleotide
uugccacuuagauauaccu

SEQ ID NO: 1066215 - RNA, 19 nt, Artificial Sequence
  Description of Artificial Sequence: Synthetic oligonucleotide
cucuuuaguacuuaaaggu

SEQ ID NO: 1066216 - RNA, 19 nt, Artificial Sequence
  Description of Artificial Sequence: Synthetic oligonucleotide
cuuguaacguuccucgaug

SEQ ID NO: 1066217 - RNA, 19 nt, Artificial Sequence
  Description of Artificial Sequence: Synthetic oligonucleotide
ugggcuuuagaagaaugag

SEQ ID NO: 1066218 - RNA, 19 nt, Artificial Sequence
  Description of Artificial Sequence: Synthetic oligonucleotide
cuuccuauccccaagccca

SEQ ID NO: 1066219 - RNA, 19 nt, Artificial Sequence
  Description of Artificial Sequence: Synthetic oligonucleotide
ugaaauuauagcaguccua

SEQ ID NO: 1066220 - RNA, 19 nt, Artificial Sequence
  Description of Artificial Sequence: Synthetic oligonucleotide
gaccuaguagguuauuaac

SEQ ID NO: 1066221 - RNA, 19 nt, Artificial Sequence
  Description of Artificial Sequence: Synthetic oligonucleotide
ucucucuccuacuauuagc

SEQ ID NO: 1066222 - RNA, 19 nt, Artificial Sequence
  Description of Artificial Sequence: Synthetic oligonucleotide
guaggaagcuacaaaucgg

SEQ ID NO: 1066223 - RNA, 19 nt, Artificial Sequence
  Description of Artificial Sequence: Synthetic oligonucleotide
agcccgaugcaguccaucc

SEQ ID NO: 1066224 - RNA, 19 nt, Artificial Sequence
  Description of Artificial Sequence: Synthetic oligonucleotide
auauuuggugucauaaaug

SEQ ID NO: 1066225 - RNA, 19 nt, Artificial Sequence
  Description of Artificial Sequence: Synthetic oligonucleotide
ugugcguagaaguucuggu

SEQ ID NO: 1066226 - RNA, 19 nt, Artificial Sequence
  Description of Artificial Sequence: Synthetic oligonucleotide
uauagcaguccuaccucag

SEQ ID NO: 1066227 - RNA, 19 nt, Artificial Sequence
  Description of Artificial Sequence: Synthetic oligonucleotide
ggacauacagcaucgguag

SEQ ID NO: 1066228 - RNA, 19 nt, Artificial Sequence
  Description of Artificial Sequence: Synthetic oligonucleotide
acauacagcaucgguaguc

SEQ ID NO: 1066229 - RNA, 19 nt, Artificial Sequence
  Description of Artificial Sequence: Synthetic oligonucleotide
ucugucuuaaggcugucuu

SEQ ID NO: 1066230 - RNA, 19 nt, Artificial Sequence
  Description of Artificial Sequence: Synthetic oligonucleotide
uaaaggugaccuaguaggu

SEQ ID NO: 1066231 - RNA, 19 nt, Artificial Sequence
  Description of Artificial Sequence: Synthetic oligonucleotide
gcaucgguagucaauaugg

SEQ ID NO: 1066232 - RNA, 19 nt, Artificial Sequence
  Description of Artificial Sequence: Synthetic oligonucleotide
aaaucgggcaugaaacucu

SEQ ID NO: 1066233 - RNA, 19 nt, Artificial Sequence
  Description of Artificial Sequence: Synthetic oligonucleotide
gacgguacguuacagggga

SEQ ID NO: 1066234 - RNA, 19 nt, Artificial Sequence
  Description of Artificial Sequence: Synthetic oligonucleotide
agauggauagcugcagaac

SEQ ID NO: 1066235 - RNA, 19 nt, Artificial Sequence
  Description of Artificial Sequence: Synthetic oligonucleotide
uagauauaccuuguuguga

SEQ ID NO: 1066236 - RNA, 19 nt, Artificial Sequence
  Description of Artificial Sequence: Synthetic oligonucleotide
cucuccuacuauuagcuuc

SEQ ID NO: 1066237 - RNA, 19 nt, Artificial Sequence
  Description of Artificial Sequence: Synthetic oligonucleotide
cuauuagcuucucuccuag

SEQ ID NO: 1066238 - RNA, 19 nt, Artificial Sequence
  Description of Artificial Sequence: Synthetic oligonucleotide
uucccgcucacauuuccgg

SEQ ID NO: 1066239 - RNA, 19 nt, Artificial Sequence
  Description of Artificial Sequence: Synthetic oligonucleotide
ugcuagauggauagcugca

SEQ ID NO: 1066240 - RNA, 19 nt, Artificial Sequence
  Description of Artificial Sequence: Synthetic oligonucleotide
gauauguaggccaugaaau

SEQ ID NO: 1066241 - RNA, 19 nt, Artificial Sequence
  Description of Artificial Sequence: Synthetic oligonucleotide
uaacguuccucgaugcacu

SEQ ID NO: 1066242 - RNA, 19 nt, Artificial Sequence
  Description of Artificial Sequence: Synthetic oligonucleotide
ugaccuaguagguuauuaa

SEQ ID NO: 1066243 - RNA, 19 nt, Artificial Sequence
  Description of Artificial Sequence: Synthetic oligonucleotide
ugacuuggaauuugauaug

SEQ ID NO: 1066244 - RNA, 19 nt, Artificial Sequence
  Description of Artificial Sequence: Synthetic oligonucleotide
guugaaguugaagccaugc

SEQ ID NO: 1066245 - RNA, 19 nt, Artificial Sequence
  Description of Artificial Sequence: Synthetic oligonucleotide
uaagggguacaguuuugcc

SEQ ID NO: 1066246 - RNA, 19 nt, Artificial Sequence
  Description of Artificial Sequence: Synthetic oligonucleotide
uuaguucaaggaacagugu

SEQ ID NO: 1066247 - RNA, 19 nt, Artificial Sequence
  Description of Artificial Sequence: Synthetic oligonucleotide
auaggccgagaacuugucg

SEQ ID NO: 1066248 - RNA, 19 nt, Artificial Sequence
  Description of Artificial Sequence: Synthetic oligonucleotide
gauggauagcugcagaacu

SEQ ID NO: 1066249 - RNA, 19 nt, Artificial Sequence
  Description of Artificial Sequence: Synthetic oligonucleotide
uauguaggccaugaaauua

SEQ ID NO: 1066250 - RNA, 19 nt, Artificial Sequence
  Description of Artificial Sequence: Synthetic oligonucleotide
uuguaacguuccucgaugc

SEQ ID NO: 1066251 - RNA, 19 nt, Artificial Sequence
  Description of Artificial Sequence: Synthetic oligonucleotide
ucauaaaugccugcuggga

SEQ ID NO: 1066252 - RNA, 19 nt, Artificial Sequence
  Description of Artificial Sequence: Synthetic oligonucleotide
cacagaccugcuuuguggg

SEQ ID NO: 1066253 - RNA, 19 nt, Artificial Sequence
  Description of Artificial Sequence: Synthetic oligonucleotide
gacacacggccuuguaacg

SEQ ID NO: 1066254 - RNA, 19 nt, Artificial Sequence
  Description of Artificial Sequence: Synthetic oligonucleotide
ccuacuauuagcuucucuc

SEQ ID NO: 1066255 - RNA, 19 nt, Artificial Sequence
  Description of Artificial Sequence: Synthetic oligonucleotide
agcaucgguagucaauaug

SEQ ID NO: 1066256 - RNA, 19 nt, Artificial Sequence
  Description of Artificial Sequence: Synthetic oligonucleotide
aaacaucucucuccuacua

SEQ ID NO: 1066257 - RNA, 19 nt, Artificial Sequence
  Description of Artificial Sequence: Synthetic oligonucleotide
uuuguccuuacgucgccgc

SEQ ID NO: 1066258 - RNA, 19 nt, Artificial Sequence
  Description of Artificial Sequence: Synthetic oligonucleotide
uguaacguuccucgaugca

SEQ ID NO: 1066259 - RNA, 19 nt, Artificial Sequence
  Description of Artificial Sequence: Synthetic oligonucleotide
uccggaaagcauauucuaa

SEQ ID NO: 1066260 - RNA, 19 nt, Artificial Sequence
  Description of Artificial Sequence: Synthetic oligonucleotide
caugcuagauggauagcug

SEQ ID NO: 1066261 - RNA, 19 nt, Artificial Sequence
  Description of Artificial Sequence: Synthetic oligonucleotide
cuuaugguaggggauuccc

SEQ ID NO: 1066262 - RNA, 19 nt, Artificial Sequence
  Description of Artificial Sequence: Synthetic oligonucleotide
uuaugguaggggauucccu

SEQ ID NO: 1066263 - RNA, 19 nt, Artificial Sequence
  Description of Artificial Sequence: Synthetic oligonucleotide
ggccuuguaacguuccucg

SEQ ID NO: 1066264 - RNA, 19 nt, Artificial Sequence
  Description of Artificial Sequence: Synthetic oligonucleotide
acagaacggguccuggcag

SEQ ID NO: 1066265 - RNA, 19 nt, Artificial Sequence
  Description of Artificial Sequence: Synthetic oligonucleotide
uguaagggguacaguuuug

SEQ ID NO: 1066266 - RNA, 19 nt, Artificial Sequence
  Description of Artificial Sequence: Synthetic oligonucleotide
aauuugauauguaggccau

SEQ ID NO: 1066267 - RNA, 19 nt, Artificial Sequence
  Description of Artificial Sequence: Synthetic oligonucleotide
ucuaaguaggaagcuacaa

SEQ ID NO: 1066268 - RNA, 19 nt, Artificial Sequence
  Description of Artificial Sequence: Synthetic oligonucleotide
uagauggauagcugcagaa

SEQ ID NO: 1066269 - RNA, 19 nt, Artificial Sequence
  Description of Artificial Sequence: Synthetic oligonucleotide
cuuacgucgccgccgacgc

SEQ ID NO: 1066270 - RNA, 19 nt, Artificial Sequence
  Description of Artificial Sequence: Synthetic oligonucleotide
aucacauaaccugucauaa

SEQ ID NO: 1066271 - RNA, 19 nt, Artificial Sequence
  Description of Artificial Sequence: Synthetic oligonucleotide
uagggugagauugaacacu

SEQ ID NO: 1066272 - RNA, 19 nt, Artificial Sequence
  Description of Artificial Sequence: Synthetic oligonucleotide
aagcauauucuaaguagga

SEQ ID NO: 1066273 - RNA, 19 nt, Artificial Sequence
  Description of Artificial Sequence: Synthetic oligonucleotide
uuuugccacuuagauauac

SEQ ID NO: 1066274 - RNA, 19 nt, Artificial Sequence
  Description of Artificial Sequence: Synthetic oligonucleotide
uagucaauauggccucuca

SEQ ID NO: 1066275 - RNA, 19 nt, Artificial Sequence
  Description of Artificial Sequence: Synthetic oligonucleotide
uugucguugcccuuauggu

SEQ ID NO: 1066276 - RNA, 19 nt, Artificial Sequence
  Description of Artificial Sequence: Synthetic oligonucleotide
accuuguugugacacucag

SEQ ID NO: 1066277 - RNA, 19 nt, Artificial Sequence
  Description of Artificial Sequence: Synthetic oligonucleotide
uacuuaaaggugaccuagu

SEQ ID NO: 1066278 - RNA, 19 nt, Artificial Sequence
  Description of Artificial Sequence: Synthetic oligonucleotide
gucuauaaggccauuaugu

SEQ ID NO: 1066279 - RNA, 19 nt, Artificial Sequence
  Description of Artificial Sequence: Synthetic oligonucleotide
ugugagaacgacgguacgu

SEQ ID NO: 1066280 - RNA, 19 nt, Artificial Sequence
  Description of Artificial Sequence: Synthetic oligonucleotide
cucgaauuaguucaaggaa

SEQ ID NO: 1066281 - RNA, 19 nt, Artificial Sequence
  Description of Artificial Sequence: Synthetic oligonucleotide
gaagcuacaaaucgggcau

SEQ ID NO: 1066282 - RNA, 19 nt, Artificial Sequence
  Description of Artificial Sequence: Synthetic oligonucleotide
uauaccuuguugugacacu

SEQ ID NO: 1066283 - RNA, 19 nt, Artificial Sequence
  Description of Artificial Sequence: Synthetic oligonucleotide
acauaggccaucacauaac

SEQ ID NO: 1066284 - RNA, 19 nt, Artificial Sequence
  Description of Artificial Sequence: Synthetic oligonucleotide
uuaguacuuaaaggugacc

SEQ ID NO: 1066285 - RNA, 19 nt, Artificial Sequence
  Description of Artificial Sequence: Synthetic oligonucleotide
uguccuuacgucgccgccg

SEQ ID NO: 1066286 - RNA, 19 nt, Artificial Sequence
  Description of Artificial Sequence: Synthetic oligonucleotide
aguacucacugucucugca

SEQ ID NO: 1066287 - RNA, 19 nt, Artificial Sequence
  Description of Artificial Sequence: Synthetic oligonucleotide
aggccaguaaagcgauggc

SEQ ID NO: 1066288 - RNA, 19 nt, Artificial Sequence
  Description of Artificial Sequence: Synthetic oligonucleotide
auauguaggccaugaaauu

SEQ ID NO: 1066289 - RNA, 19 nt, Artificial Sequence
  Description of Artificial Sequence: Synthetic oligonucleotide
cuaguagguuauuaacuca

SEQ ID NO: 1066290 - RNA, 19 nt, Artificial Sequence
  Description of Artificial Sequence: Synthetic oligonucleotide
uguugcuuuaugcuccauu

SEQ ID NO: 1066291 - RNA, 19 nt, Artificial Sequence
  Description of Artificial Sequence: Synthetic oligonucleotide
ugucguugcccuuauggua

SEQ ID NO: 1066292 - RNA, 19 nt, Artificial Sequence
  Description of Artificial Sequence: Synthetic oligonucleotide
accuaguagguuauuaacu

SEQ ID NO: 1066293 - RNA, 19 nt, Artificial Sequence
  Description of Artificial Sequence: Synthetic oligonucleotide
caauaucaugugacugagg

SEQ ID NO: 1066294 - RNA, 19 nt, Artificial Sequence
  Description of Artificial Sequence: Synthetic oligonucleotide
gaaguugaagccaugcugu

SEQ ID NO: 1066295 - RNA, 19 nt, Artificial Sequence
  Description of Artificial Sequence: Synthetic oligonucleotide
aguaaagcgauggccauau

SEQ ID NO: 1066296 - RNA, 19 nt, Artificial Sequence
  Description of Artificial Sequence: Synthetic oligonucleotide
caucgguagucaauauggc

SEQ ID NO: 1066297 - RNA, 19 nt, Artificial Sequence
  Description of Artificial Sequence: Synthetic oligonucleotide
ugccgguggugugagaacg

SEQ ID NO: 1066298 - RNA, 19 nt, Artificial Sequence
  Description of Artificial Sequence: Synthetic oligonucleotide
ggcucgaauuaguucaagg

SEQ ID NO: 1066299 - RNA, 19 nt, Artificial Sequence
  Description of Artificial Sequence: Synthetic oligonucleotide
gaacagaacggguccuggc

SEQ ID NO: 1066300 - RNA, 19 nt, Artificial Sequence
  Description of Artificial Sequence: Synthetic oligonucleotide
aguacuuaaaggugaccua

SEQ ID NO: 1066301 - RNA, 19 nt, Artificial Sequence
  Description of Artificial Sequence: Synthetic oligonucleotide
cuaaguaggaagcuacaaa

SEQ ID NO: 1066302 - RNA, 19 nt, Artificial Sequence
  Description of Artificial Sequence: Synthetic oligonucleotide
cagggacagaacagaacgg

SEQ ID NO: 1066303 - RNA, 19 nt, Artificial Sequence
  Description of Artificial Sequence: Synthetic oligonucleotide
aggucuauaaggccauuau

SEQ ID NO: 1066304 - RNA, 19 nt, Artificial Sequence
  Description of Artificial Sequence: Synthetic oligonucleotide
ccuaguagguuauuaacuc

SEQ ID NO: 1066305 - RNA, 19 nt, Artificial Sequence
  Description of Artificial Sequence: Synthetic oligonucleotide
guaacguuccucgaugcac

SEQ ID NO: 1066306 - RNA, 19 nt, Artificial Sequence
  Description of Artificial Sequence: Synthetic oligonucleotide
guaggggauucccugagca

SEQ ID NO: 1066307 - RNA, 19 nt, Artificial Sequence
  Description of Artificial Sequence: Synthetic oligonucleotide
aggaagcuacaaaucgggc

SEQ ID NO: 1066308 - RNA, 19 nt, Artificial Sequence
  Description of Artificial Sequence: Synthetic oligonucleotide
uuaucuggcugcugcuuga

SEQ ID NO: 1066309 - RNA, 19 nt, Artificial Sequence
  Description of Artificial Sequence: Synthetic oligonucleotide
auaaccugucauaaaggca

SEQ ID NO: 1066310 - RNA, 19 nt, Artificial Sequence
  Description of Artificial Sequence: Synthetic oligonucleotide
guagggugagauugaacac

SEQ ID NO: 1066311 - RNA, 19 nt, Artificial Sequence
  Description of Artificial Sequence: Synthetic oligonucleotide
uugggucaaauaagaauuu

SEQ ID NO: 1066312 - RNA, 19 nt, Artificial Sequence
  Description of Artificial Sequence: Synthetic oligonucleotide
uguccguacugacuggcuc

SEQ ID NO: 1066313 - RNA, 19 nt, Artificial Sequence
  Description of Artificial Sequence: Synthetic oligonucleotide
aacaguguccguacugacu

SEQ ID NO: 1066314 - RNA, 19 nt, Artificial Sequence
  Description of Artificial Sequence: Synthetic oligonucleotide
uuccggaaagcauauucua

SEQ ID NO: 1066315 - RNA, 19 nt, Artificial Sequence
  Description of Artificial Sequence: Synthetic oligonucleotide
guaagggguacaguuuugc

SEQ ID NO: 1066316 - RNA, 19 nt, Artificial Sequence
  Description of Artificial Sequence: Synthetic oligonucleotide
uaaaugccugcugggaaca

SEQ ID NO: 1066317 - RNA, 19 nt, Artificial Sequence
  Description of Artificial Sequence: Synthetic oligonucleotide
cuacaaaucgggcaugaaa

SEQ ID NO: 1066318 - RNA, 19 nt, Artificial Sequence
  Description of Artificial Sequence: Synthetic oligonucleotide
ggucuauaaggccauuaug

SEQ ID NO: 1066319 - RNA, 19 nt, Artificial Sequence
  Description of Artificial Sequence: Synthetic oligonucleotide
cacauuuccggaaagcaua

SEQ ID NO: 1066320 - RNA, 19 nt, Artificial Sequence
  Description of Artificial Sequence: Synthetic oligonucleotide
ugugacacucaggaagcca

SEQ ID NO: 1066321 - RNA, 19 nt, Artificial Sequence
  Description of Artificial Sequence: Synthetic oligonucleotide
auaaggccauuauguagca

SEQ ID NO: 1066322 - RNA, 19 nt, Artificial Sequence
  Description of Artificial Sequence: Synthetic oligonucleotide
uccuagagggcaccagcca

SEQ ID NO: 1066323 - RNA, 19 nt, Artificial Sequence
  Description of Artificial Sequence: Synthetic oligonucleotide
uugauauguaggccaugaa

SEQ ID NO: 1066324 - RNA, 19 nt, Artificial Sequence
  Description of Artificial Sequence: Synthetic oligonucleotide
aaauaggguuuugcuauau

SEQ ID NO: 1066325 - RNA, 19 nt, Artificial Sequence
  Description of Artificial Sequence: Synthetic oligonucleotide
uccuacuauuagcuucucu

SEQ ID NO: 1066326 - RNA, 19 nt, Artificial Sequence
  Description of Artificial Sequence: Synthetic oligonucleotide
caaaucgggcaugaaacuc

SEQ ID NO: 1066327 - RNA, 19 nt, Artificial Sequence
  Description of Artificial Sequence: Synthetic oligonucleotide
gcucgaauuaguucaagga

SEQ ID NO: 1066328 - RNA, 19 nt, Artificial Sequence
  Description of Artificial Sequence: Synthetic oligonucleotide
agucaauauggccucucau

SEQ ID NO: 1066329 - RNA, 19 nt, Artificial Sequence
  Description of Artificial Sequence: Synthetic oligonucleotide
acacuugggucaaauaaga

SEQ ID NO: 1066330 - RNA, 19 nt, Artificial Sequence
  Description of Artificial Sequence: Synthetic oligonucleotide
ugcagcauauuugguguca

SEQ ID NO: 1066331 - RNA, 19 nt, Artificial Sequence
  Description of Artificial Sequence: Synthetic oligonucleotide
ccggaaagcauauucuaag

SEQ ID NO: 1066332 - RNA, 19 nt, Artificial Sequence
  Description of Artificial Sequence: Synthetic oligonucleotide
uuguccuuacgucgccgcc

SEQ ID NO: 1066333 - RNA, 19 nt, Artificial Sequence
  Description of Artificial Sequence: Synthetic oligonucleotide
cugagcauacugccgguug

SEQ ID NO: 1066334 - RNA, 19 nt, Artificial Sequence
  Description of Artificial Sequence: Synthetic oligonucleotide
ucgaugcacugguucagca

SEQ ID NO: 1066335 - RNA, 19 nt, Artificial Sequence
  Description of Artificial Sequence: Synthetic oligonucleotide
agcauauucuaaguaggaa

SEQ ID NO: 1066336 - RNA, 19 nt, Artificial Sequence
  Description of Artificial Sequence: Synthetic oligonucleotide
aaucgggcaugaaacucug

SEQ ID NO: 1066337 - RNA, 19 nt, Artificial Sequence
  Description of Artificial Sequence: Synthetic oligonucleotide
gauauaccuuguugugaca

SEQ ID NO: 1066338 - RNA, 19 nt, Artificial Sequence
  Description of Artificial Sequence: Synthetic oligonucleotide
cauaaaugccugcugggaa

SEQ ID NO: 1066339 - RNA, 19 nt, Artificial Sequence
  Description of Artificial Sequence: Synthetic oligonucleotide
uggugucauaaaugccugc

SEQ ID NO: 1066340 - RNA, 19 nt, Artificial Sequence
  Description of Artificial Sequence: Synthetic oligonucleotide
aguugucacuuuguacauc

SEQ ID NO: 1066341 - RNA, 19 nt, Artificial Sequence
  Description of Artificial Sequence: Synthetic oligonucleotide
augacacacggccuuguaa

SEQ ID NO: 1066342 - RNA, 19 nt, Artificial Sequence
  Description of Artificial Sequence: Synthetic oligonucleotide
gacgggcucgaauuaguuc

SEQ ID NO: 1066343 - RNA, 19 nt, Artificial Sequence
  Description of Artificial Sequence: Synthetic oligonucleotide
uugaacacuugggucaaau

SEQ ID NO: 1066344 - RNA, 19 nt, Artificial Sequence
  Description of Artificial Sequence: Synthetic oligonucleotide
uguaggccaugaaauuaua

SEQ ID NO: 1066345 - RNA, 19 nt, Artificial Sequence
  Description of Artificial Sequence: Synthetic oligonucleotide
uaccucagccuucggguac

SEQ ID NO: 1066346 - RNA, 19 nt, Artificial Sequence
  Description of Artificial Sequence: Synthetic oligonucleotide
cucguauuacaaacuccuc

SEQ ID NO: 1066347 - RNA, 19 nt, Artificial Sequence
  Description of Artificial Sequence: Synthetic oligonucleotide
gccgguugaaguugaagcc

SEQ ID NO: 1066348 - RNA, 19 nt, Artificial Sequence
  Description of Artificial Sequence: Synthetic oligonucleotide
acagcaucgguagucaaua

SEQ ID NO: 1066349 - RNA, 19 nt, Artificial Sequence
  Description of Artificial Sequence: Synthetic oligonucleotide
uggcucagucccacauagg

SEQ ID NO: 1066350 - RNA, 19 nt, Artificial Sequence
  Description of Artificial Sequence: Synthetic oligonucleotide
gugugagaacgacgguacg

SEQ ID NO: 1066351 - RNA, 19 nt, Artificial Sequence
  Description of Artificial Sequence: Synthetic oligonucleotide
agcaaagcccucuuccguu

SEQ ID NO: 1066352 - RNA, 19 nt, Artificial Sequence
  Description of Artificial Sequence: Synthetic oligonucleotide
cuagauggauagcugcaga

SEQ ID NO: 1066353 - RNA, 19 nt, Artificial Sequence
  Description of Artificial Sequence: Synthetic oligonucleotide
gaugccgguggugugagaa

SEQ ID NO: 1066354 - RNA, 19 nt, Artificial Sequence
  Description of Artificial Sequence: Synthetic oligonucleotide
cucucuccuacuauuagcu

SEQ ID NO: 1066355 - RNA, 19 nt, Artificial Sequence
  Description of Artificial Sequence: Synthetic oligonucleotide
cacuuuguacauccaccac

SEQ ID NO: 1066356 - RNA, 19 nt, Artificial Sequence
  Description of Artificial Sequence: Synthetic oligonucleotide
cugugguagccacaucaac

SEQ ID NO: 1066357 - RNA, 19 nt, Artificial Sequence
  Description of Artificial Sequence: Synthetic oligonucleotide
gaacgacgguacguuacag

SEQ ID NO: 1066358 - RNA, 19 nt, Artificial Sequence
  Description of Artificial Sequence: Synthetic oligonucleotide
ugcccuuaugguaggggau

SEQ ID NO: 1066359 - RNA, 19 nt, Artificial Sequence
  Description of Artificial Sequence: Synthetic oligonucleotide
uacugccgguugaaguuga

SEQ ID NO: 1066360 - RNA, 19 nt, Artificial Sequence
  Description of Artificial Sequence: Synthetic oligonucleotide
acugguucagcaaacucuu

SEQ ID NO: 1066361 - RNA, 19 nt, Artificial Sequence
  Description of Artificial Sequence: Synthetic oligonucleotide
aagcuacaaaucgggcaug

SEQ ID NO: 1066362 - RNA, 19 nt, Artificial Sequence
  Description of Artificial Sequence: Synthetic oligonucleotide
auuugauauguaggccaug

SEQ ID NO: 1066363 - RNA, 19 nt, Artificial Sequence
  Description of Artificial Sequence: Synthetic oligonucleotide
gacaaacaugagccacuac

SEQ ID NO: 1066364 - RNA, 19 nt, Artificial Sequence
  Description of Artificial Sequence: Synthetic oligonucleotide
aggguuaggacuggcuuga

SEQ ID NO: 1066365 - RNA, 19 nt, Artificial Sequence
  Description of Artificial Sequence: Synthetic oligonucleotide
augcacaguagggugagau

SEQ ID NO: 1066366 - RNA, 19 nt, Artificial Sequence
  Description of Artificial Sequence: Synthetic oligonucleotide
uaaggccaguaaagcgaug

SEQ ID NO: 1066367 - RNA, 19 nt, Artificial Sequence
  Description of Artificial Sequence: Synthetic oligonucleotide
uucaaggaacaguguccgu

SEQ ID NO: 1066368 - RNA, 19 nt, Artificial Sequence
  Description of Artificial Sequence: Synthetic oligonucleotide
cauaggccgagaacuuguc

SEQ ID NO: 1066369 - RNA, 19 nt, Artificial Sequence
  Description of Artificial Sequence: Synthetic oligonucleotide
cacggccuuguaacguucc

SEQ ID NO: 1066370 - RNA, 19 nt, Artificial Sequence
  Description of Artificial Sequence: Synthetic oligonucleotide
gauugaacacuugggucaa

SEQ ID NO: 1066371 - RNA, 19 nt, Artificial Sequence
  Description of Artificial Sequence: Synthetic oligonucleotide
ugucgcagaugccgguggu

SEQ ID NO: 1066372 - RNA, 19 nt, Artificial Sequence
  Description of Artificial Sequence: Synthetic oligonucleotide
ucccgcucacauuuccgga

SEQ ID NO: 1066373 - RNA, 19 nt, Artificial Sequence
  Description of Artificial Sequence: Synthetic oligonucleotide
gugggcuuuagaagaauga

SEQ ID NO: 1066374 - RNA, 19 nt, Artificial Sequence
  Description of Artificial Sequence: Synthetic oligonucleotide
acaaagcuagcugucuuua

SEQ ID NO: 1066375 - RNA, 19 nt, Artificial Sequence
  Description of Artificial Sequence: Synthetic oligonucleotide
auauggccucucaugcuag

SEQ ID NO: 1066376 - RNA, 19 nt, Artificial Sequence
  Description of Artificial Sequence: Synthetic oligonucleotide
agccaaggucuggaacugc

SEQ ID NO: 1066377 - RNA, 19 nt, Artificial Sequence
  Description of Artificial Sequence: Synthetic oligonucleotide
augcacugguucagcaaac

SEQ ID NO: 1066378 - RNA, 19 nt, Artificial Sequence
  Description of Artificial Sequence: Synthetic oligonucleotide
ugcacaguagggugagauu

SEQ ID NO: 1066379 - RNA, 19 nt, Artificial Sequence
  Description of Artificial Sequence: Synthetic oligonucleotide
ggucucaggcaagugugcg

SEQ ID NO: 1066380 - RNA, 19 nt, Artificial Sequence
  Description of Artificial Sequence: Synthetic oligonucleotide
ggauucccugagcauacug

SEQ ID NO: 1066381 - RNA, 19 nt, Artificial Sequence
  Description of Artificial Sequence: Synthetic oligonucleotide
gcugacuuggaauuugaua

SEQ ID NO: 1066382 - RNA, 19 nt, Artificial Sequence
  Description of Artificial Sequence: Synthetic oligonucleotide
ccaugaaauuauagcaguc

SEQ ID NO: 1066383 - RNA, 19 nt, Artificial Sequence
  Description of Artificial Sequence: Synthetic oligonucleotide
ccugcuuugugggagggcc

SEQ ID NO: 1066384 - RNA, 19 nt, Artificial Sequence
  Description of Artificial Sequence: Synthetic oligonucleotide
ucucuccuacuauuagcuu

SEQ ID NO: 1066385 - RNA, 19 nt, Artificial Sequence
  Description of Artificial Sequence: Synthetic oligonucleotide
gcuagauggauagcugcag

SEQ ID NO: 1066386 - RNA, 19 nt, Artificial Sequence
  Description of Artificial Sequence: Synthetic oligonucleotide
cugcucaacaaacucuuua

SEQ ID NO: 1066387 - RNA, 19 nt, Artificial Sequence
  Description of Artificial Sequence: Synthetic oligonucleotide
acuguaagggguacaguuu

SEQ ID NO: 1066388 - RNA, 19 nt, Artificial Sequence
  Description of Artificial Sequence: Synthetic oligonucleotide
agcuacaaaucgggcauga

SEQ ID NO: 1066389 - RNA, 19 nt, Artificial Sequence
  Description of Artificial Sequence: Synthetic oligonucleotide
ggccaguaaagcgauggcc

SEQ ID NO: 1066390 - RNA, 19 nt, Artificial Sequence
  Description of Artificial Sequence: Synthetic oligonucleotide
uaggggauucccugagcau

SEQ ID NO: 1066391 - RNA, 19 nt, Artificial Sequence
  Description of Artificial Sequence: Synthetic oligonucleotide
ccuuguugugacacucagg

SEQ ID NO: 1066392 - RNA, 19 nt, Artificial Sequence
  Description of Artificial Sequence: Synthetic oligonucleotide
aguagguuauuaacucaaa

SEQ ID NO: 1066393 - RNA, 19 nt, Artificial Sequence
  Description of Artificial Sequence: Synthetic oligonucleotide
gucuuaaggcugucuucac

SEQ ID NO: 1066394 - RNA, 19 nt, Artificial Sequence
  Description of Artificial Sequence: Synthetic oligonucleotide
caguguccguacugacugg

SEQ ID NO: 1066395 - RNA, 19 nt, Artificial Sequence
  Description of Artificial Sequence: Synthetic oligonucleotide
uccguacugacuggcucug

SEQ ID NO: 1066396 - RNA, 19 nt, Artificial Sequence
  Description of Artificial Sequence: Synthetic oligonucleotide
guucagcaaacucuuccua

SEQ ID NO: 1066397 - RNA, 19 nt, Artificial Sequence
  Description of Artificial Sequence: Synthetic oligonucleotide
acacacggccuuguaacgu

SEQ ID NO: 1066398 - RNA, 19 nt, Artificial Sequence
  Description of Artificial Sequence: Synthetic oligonucleotide
gggcaccagccauaggccg

SEQ ID NO: 1066399 - RNA, 19 nt, Artificial Sequence
  Description of Artificial Sequence: Synthetic oligonucleotide
aggccaucacauaaccugu

SEQ ID NO: 1066400 - RNA, 19 nt, Artificial Sequence
  Description of Artificial Sequence: Synthetic oligonucleotide
acauuuccggaaagcauau

SEQ ID NO: 1066401 - RNA, 19 nt, Artificial Sequence
  Description of Artificial Sequence: Synthetic oligonucleotide
caggaacucguauuacaaa

SEQ ID NO: 1066402 - RNA, 19 nt, Artificial Sequence
  Description of Artificial Sequence: Synthetic oligonucleotide
guucuauaacauacuccuc

SEQ ID NO: 1066403 - RNA, 19 nt, Artificial Sequence
  Description of Artificial Sequence: Synthetic oligonucleotide
cacccucugucacucuuug

SEQ ID NO: 1066404 - RNA, 19 nt, Artificial Sequence
  Description of Artificial Sequence: Synthetic oligonucleotide
uaaggccauuauguagcac

SEQ ID NO: 1066405 - RNA, 19 nt, Artificial Sequence
  Description of Artificial Sequence: Synthetic oligonucleotide
gugcguagaaguucuggua

SEQ ID NO: 1066406 - RNA, 19 nt, Artificial Sequence
  Description of Artificial Sequence: Synthetic oligonucleotide
ucucccuuaucuggcugcu

SEQ ID NO: 1066407 - RNA, 19 nt, Artificial Sequence
  Description of Artificial Sequence: Synthetic oligonucleotide
cucaugcuagauggauagc

SEQ ID NO: 1066408 - RNA, 19 nt, Artificial Sequence
  Description of Artificial Sequence: Synthetic oligonucleotide
cucucaugcuagauggaua

SEQ ID NO: 1066409 - RNA, 19 nt, Artificial Sequence
  Description of Artificial Sequence: Synthetic oligonucleotide
guagucaauauggccucuc

SEQ ID NO: 1066410 - RNA, 19 nt, Artificial Sequence
  Description of Artificial Sequence: Synthetic oligonucleotide
gggcuuuagaagaaugaga

SEQ ID NO: 1066411 - RNA, 19 nt, Artificial Sequence
  Description of Artificial Sequence: Synthetic oligonucleotide
acguuccucgaugcacugg

SEQ ID NO: 1066412 - RNA, 19 nt, Artificial Sequence
  Description of Artificial Sequence: Synthetic oligonucleotide
agccuucggguacugggau

SEQ ID NO: 1066413 - RNA, 19 nt, Artificial Sequence
  Description of Artificial Sequence: Synthetic oligonucleotide
cacuugggucaaauaagaa

SEQ ID NO: 1066414 - RNA, 19 nt, Artificial Sequence
  Description of Artificial Sequence: Synthetic oligonucleotide
agggugagauugaacacuu

SEQ ID NO: 1066415 - RNA, 19 nt, Artificial Sequence
  Description of Artificial Sequence: Synthetic oligonucleotide
cagccauaggccgagaacu

SEQ ID NO: 1066416 - RNA, 19 nt, Artificial Sequence
  Description of Artificial Sequence: Synthetic oligonucleotide
cuauccccaagcccacuca

SEQ ID NO: 1066417 - RNA, 19 nt, Artificial Sequence
  Description of Artificial Sequence: Synthetic oligonucleotide
gggacauacagcaucggua

SEQ ID NO: 1066418 - RNA, 19 nt, Artificial Sequence
  Description of Artificial Sequence: Synthetic oligonucleotide
acacggccuuguaacguuc

SEQ ID NO: 1066419 - RNA, 19 nt, Artificial Sequence
  Description of Artificial Sequence: Synthetic oligonucleotide
gugaccuaguagguuauua

SEQ ID NO: 1066420 - RNA, 19 nt, Artificial Sequence
  Description of Artificial Sequence: Synthetic oligonucleotide
caguccuaccucagccuuc

SEQ ID NO: 1066421 - RNA, 19 nt, Artificial Sequence
  Description of Artificial Sequence: Synthetic oligonucleotide
gcucagucccacauaggcc

SEQ ID NO: 1066422 - RNA, 19 nt, Artificial Sequence
  Description of Artificial Sequence: Synthetic oligonucleotide
cugacucuuggccacugua

SEQ ID NO: 1066423 - RNA, 19 nt, Artificial Sequence
  Description of Artificial Sequence: Synthetic oligonucleotide
cagccuucggguacuggga

SEQ ID NO: 1066424 - RNA, 19 nt, Artificial Sequence
  Description of Artificial Sequence: Synthetic oligonucleotide
guccguacugacuggcucu

SEQ ID NO: 1066425 - RNA, 19 nt, Artificial Sequence
  Description of Artificial Sequence: Synthetic oligonucleotide
ccuuacgucgccgccgacg

SEQ ID NO: 1066426 - RNA, 19 nt, Artificial Sequence
  Description of Artificial Sequence: Synthetic oligonucleotide
guccuuacgucgccgccga

SEQ ID NO: 1066427 - RNA, 19 nt, Artificial Sequence
  Description of Artificial Sequence: Synthetic oligonucleotide
cucagccuucggguacugg

SEQ ID NO: 1066428 - RNA, 19 nt, Artificial Sequence
  Description of Artificial Sequence: Synthetic oligonucleotide
gcguagaaguucugguaca

SEQ ID NO: 1066429 - RNA, 19 nt, Artificial Sequence
  Description of Artificial Sequence: Synthetic oligonucleotide
acgguacguuacaggggac

SEQ ID NO: 1066430 - RNA, 19 nt, Artificial Sequence
  Description of Artificial Sequence: Synthetic oligonucleotide
gucgcagaugccgguggug

SEQ ID NO: 1066431 - RNA, 19 nt, Artificial Sequence
  Description of Artificial Sequence: Synthetic oligonucleotide
ggggauucccugagcauac

SEQ ID NO: 1066432 - RNA, 19 nt, Artificial Sequence
  Description of Artificial Sequence: Synthetic oligonucleotide
gcucaacaaacucuuuagu

SEQ ID NO: 1066433 - RNA, 19 nt, Artificial Sequence
  Description of Artificial Sequence: Synthetic oligonucleotide
gucacucuuugcuccauuu

SEQ ID NO: 1066434 - RNA, 19 nt, Artificial Sequence
  Description of Artificial Sequence: Synthetic oligonucleotide
cuauaacauacuccuccau

SEQ ID NO: 1066435 - RNA, 19 nt, Artificial Sequence
  Description of Artificial Sequence: Synthetic oligonucleotide
cgacgguacguuacagggg

SEQ ID NO: 1066436 - RNA, 19 nt, Artificial Sequence
  Description of Artificial Sequence: Synthetic oligonucleotide
accucagccuucggguacu

SEQ ID NO: 1066437 - RNA, 19 nt, Artificial Sequence
  Description of Artificial Sequence: Synthetic oligonucleotide
agugugcguagaaguucug

SEQ ID NO: 1066438 - RNA, 19 nt, Artificial Sequence
  Description of Artificial Sequence: Synthetic oligonucleotide
gccauaggccgagaacuug

SEQ ID NO: 1066439 - RNA, 19 nt, Artificial Sequence
  Description of Artificial Sequence: Synthetic oligonucleotide
guaaagcgauggccauauc

SEQ ID NO: 1066440 - RNA, 19 nt, Artificial Sequence
  Description of Artificial Sequence: Synthetic oligonucleotide
ccuaccucagccuucgggu

SEQ ID NO: 1066441 - RNA, 19 nt, Artificial Sequence
  Description of Artificial Sequence: Synthetic oligonucleotide
ccuuaugguaggggauucc

SEQ ID NO: 1066442 - RNA, 19 nt, Artificial Sequence
  Description of Artificial Sequence: Synthetic oligonucleotide
gugagaacgacgguacguu

SEQ ID NO: 1066443 - RNA, 19 nt, Artificial Sequence
  Description of Artificial Sequence: Synthetic oligonucleotide
aggugaccuaguagguuau

SEQ ID NO: 1066444 - RNA, 19 nt, Artificial Sequence
  Description of Artificial Sequence: Synthetic oligonucleotide
ggggacauacagcaucggu

SEQ ID NO: 1066445 - RNA, 19 nt, Artificial Sequence
  Description of Artificial Sequence: Synthetic oligonucleotide
cgguggugugagaacgacg

SEQ ID NO: 1066446 - RNA, 19 nt, Artificial Sequence
  Description of Artificial Sequence: Synthetic oligonucleotide
caugacacacggccuugua

SEQ ID NO: 1066447 - RNA, 19 nt, Artificial Sequence
  Description of Artificial Sequence: Synthetic oligonucleotide
cgguagucaauauggccuc

SEQ ID NO: 1066448 - RNA, 19 nt, Artificial Sequence
  Description of Artificial Sequence: Synthetic oligonucleotide
cuaggccuagggccaggca

SEQ ID NO: 1066449 - RNA, 19 nt, Artificial Sequence
  Description of Artificial Sequence: Synthetic oligonucleotide
gccaaggucuggaacugca

SEQ ID NO: 1066450 - RNA, 19 nt, Artificial Sequence
  Description of Artificial Sequence: Synthetic oligonucleotide
cugcaaggaccugcucaac

SEQ ID NO: 1066451 - RNA, 19 nt, Artificial Sequence
  Description of Artificial Sequence: Synthetic oligonucleotide
auugaacacuugggucaaa

SEQ ID NO: 1066452 - RNA, 19 nt, Artificial Sequence
  Description of Artificial Sequence: Synthetic oligonucleotide
uccuuacgucgccgccgac

SEQ ID NO: 1066453 - RNA, 19 nt, Artificial Sequence
  Description of Artificial Sequence: Synthetic oligonucleotide
agccauaggccgagaacuu

SEQ ID NO: 1066454 - RNA, 19 nt, Artificial Sequence
  Description of Artificial Sequence: Synthetic oligonucleotide
ccuucggguacugggauga

SEQ ID NO: 1066455 - RNA, 19 nt, Artificial Sequence
  Description of Artificial Sequence: Synthetic oligonucleotide
agaugccgguggugugaga

SEQ ID NO: 1066456 - RNA, 19 nt, Artificial Sequence
  Description of Artificial Sequence: Synthetic oligonucleotide
acggguccuggcagcauga

SEQ ID NO: 1066457 - RNA, 19 nt, Artificial Sequence
  Description of Artificial Sequence: Synthetic oligonucleotide
gccgacgggcucgaauuag

SEQ ID NO: 1066458 - RNA, 19 nt, Artificial Sequence
  Description of Artificial Sequence: Synthetic oligonucleotide
uuguugcuuuaugcuccau

SEQ ID NO: 1066459 - RNA, 19 nt, Artificial Sequence
  Description of Artificial Sequence: Synthetic oligonucleotide
gcagaugccggugguguga

SEQ ID NO: 1066460 - RNA, 19 nt, Artificial Sequence
  Description of Artificial Sequence: Synthetic oligonucleotide
ccgguugaaguugaagcca

SEQ ID NO: 1066461 - RNA, 19 nt, Artificial Sequence
  Description of Artificial Sequence: Synthetic oligonucleotide
gggcucgaauuaguucaag

SEQ ID NO: 1066462 - RNA, 19 nt, Artificial Sequence
  Description of Artificial Sequence: Synthetic oligonucleotide
cguuuguccuuacgucgcc

SEQ ID NO: 1066463 - RNA, 19 nt, Artificial Sequence
  Description of Artificial Sequence: Synthetic oligonucleotide
cuucggguacugggaugac

SEQ ID NO: 1066464 - RNA, 19 nt, Artificial Sequence
  Description of Artificial Sequence: Synthetic oligonucleotide
guacguuacaggggacaua

SEQ ID NO: 1066465 - RNA, 19 nt, Artificial Sequence
  Description of Artificial Sequence: Synthetic oligonucleotide
cacuuagauauaccuuguu

SEQ ID NO: 1066466 - RNA, 19 nt, Artificial Sequence
  Description of Artificial Sequence: Synthetic oligonucleotide
caguaaagcgauggccaua

SEQ ID NO: 1066467 - RNA, 19 nt, Artificial Sequence
  Description of Artificial Sequence: Synthetic oligonucleotide
cacagccacaaagcuagcu

SEQ ID NO: 1066468 - RNA, 19 nt, Artificial Sequence
  Description of Artificial Sequence: Synthetic oligonucleotide
gggugagauugaacacuug

SEQ ID NO: 1066469 - RNA, 19 nt, Artificial Sequence
  Description of Artificial Sequence: Synthetic oligonucleotide
cuccuacuauuagcuucuc

SEQ ID NO: 1066470 - RNA, 19 nt, Artificial Sequence
  Description of Artificial Sequence: Synthetic oligonucleotide
ccgccgacgccgcuugucc

SEQ ID NO: 1066471 - RNA, 19 nt, Artificial Sequence
  Description of Artificial Sequence: Synthetic oligonucleotide
ccauaggccgagaacuugu

SEQ ID NO: 1066472 - RNA, 19 nt, Artificial Sequence
  Description of Artificial Sequence: Synthetic oligonucleotide
gguacguuacaggggacau

SEQ ID NO: 1066473 - RNA, 19 nt, Artificial Sequence
  Description of Artificial Sequence: Synthetic oligonucleotide
acguuacaggggacauaca

SEQ ID NO: 1066474 - RNA, 19 nt, Artificial Sequence
  Description of Artificial Sequence: Synthetic oligonucleotide
cugccccaagccagcuuca

SEQ ID NO: 1066475 - RNA, 19 nt, Artificial Sequence
  Description of Artificial Sequence: Synthetic oligonucleotide
cacacggccuuguaacguu

SEQ ID NO: 1066476 - RNA, 19 nt, Artificial Sequence
  Description of Artificial Sequence: Synthetic oligonucleotide
cagucccacauaggccauc

SEQ ID NO: 1066477 - RNA, 19 nt, Artificial Sequence
  Description of Artificial Sequence: Synthetic oligonucleotide
ugaggacacugagguccua

SEQ ID NO: 1066478 - RNA, 19 nt, Artificial Sequence
  Description of Artificial Sequence: Synthetic oligonucleotide
cccuuaugguaggggauuc

SEQ ID NO: 1066479 - RNA, 19 nt, Artificial Sequence
  Description of Artificial Sequence: Synthetic oligonucleotide
gggcaagauguggggugcc

SEQ ID NO: 1066480 - RNA, 19 nt, Artificial Sequence
  Description of Artificial Sequence: Synthetic oligonucleotide
cccgcucacauuuccggaa

SEQ ID NO: 1066481 - RNA, 19 nt, Artificial Sequence
  Description of Artificial Sequence: Synthetic oligonucleotide
ccgguggugugagaacgac

SEQ ID NO: 1066482 - RNA, 19 nt, Artificial Sequence
  Description of Artificial Sequence: Synthetic oligonucleotide
gcuacaaaucgggcaugaa

SEQ ID NO: 1066483 - RNA, 19 nt, Artificial Sequence
  Description of Artificial Sequence: Synthetic oligonucleotide
gggccgacgggcucgaauu

SEQ ID NO: 1066484 - RNA, 19 nt, Artificial Sequence
  Description of Artificial Sequence: Synthetic oligonucleotide
gguagucaauauggccucu

SEQ ID NO: 1066485 - RNA, 19 nt, Artificial Sequence
  Description of Artificial Sequence: Synthetic oligonucleotide
ccgaugcaguccaucccca

SEQ ID NO: 1066486 - RNA, 19 nt, Artificial Sequence
  Description of Artificial Sequence: Synthetic oligonucleotide
cgaugcacugguucagcaa

SEQ ID NO: 1066487 - RNA, 19 nt, Artificial Sequence
  Description of Artificial Sequence: Synthetic oligonucleotide
cagcaucgguagucaauau

SEQ ID NO: 1066488 - RNA, 19 nt, Artificial Sequence
  Description of Artificial Sequence: Synthetic oligonucleotide
ccaguaaagcgauggccau

SEQ ID NO: 1066489 - RNA, 19 nt, Artificial Sequence
  Description of Artificial Sequence: Synthetic oligonucleotide
ccguacugacuggcucugg

SEQ ID NO: 1066490 - RNA, 19 nt, Artificial Sequence
  Description of Artificial Sequence: Synthetic oligonucleotide
cccaggcacaggguuagga

SEQ ID NO: 1066491 - RNA, 19 nt, Artificial Sequence
  Description of Artificial Sequence: Synthetic oligonucleotide
gccaaacaucucucuccua

SEQ ID NO: 1066492 - RNA, 19 nt, Artificial Sequence
  Description of Artificial Sequence: Synthetic oligonucleotide
ccgcucacauuuccggaaa

SEQ ID NO: 1066493 - RNA, 19 nt, Artificial Sequence
  Description of Artificial Sequence: Synthetic oligonucleotide
cgguacguuacaggggaca

SEQ ID NO: 1066494 - RNA, 19 nt, Artificial Sequence
  Description of Artificial Sequence: Synthetic oligonucleotide
ggcuugacucacaggcagu

SEQ ID NO: 1066495 - RNA, 19 nt, Artificial Sequence
  Description of Artificial Sequence: Synthetic oligonucleotide
ggccgacgggcucgaauua

SEQ ID NO: 1066496 - RNA, 19 nt, Artificial Sequence
  Description of Artificial Sequence: Synthetic oligonucleotide
cauuuccggaaagcauauu

SEQ ID NO: 1066497 - RNA, 19 nt, Artificial Sequence
  Description of Artificial Sequence: Synthetic oligonucleotide
ggcugacuuggaauuugau

SEQ ID NO: 1066498 - RNA, 19 nt, Artificial Sequence
  Description of Artificial Sequence: Synthetic oligonucleotide
gcccuuaugguaggggauu

SEQ ID NO: 1066499 - RNA, 19 nt, Artificial Sequence
  Description of Artificial Sequence: Synthetic oligonucleotide
ggggccgacgggcucgaau

SEQ ID NO: 1066500 - RNA, 19 nt, Artificial Sequence
  Description of Artificial Sequence: Synthetic oligonucleotide
ccgacgggcucgaauuagu

SEQ ID NO: 1066501 - RNA, 19 nt, Artificial Sequence
  Description of Artificial Sequence: Synthetic oligonucleotide
gcacagacuuugguucuau

SEQ ID NO: 1066502 - RNA, 19 nt, Artificial Sequence
  Description of Artificial Sequence: Synthetic oligonucleotide
cugcccgcugcuucccauu

SEQ ID NO: 1066503 - RNA, 19 nt, Artificial Sequence
  Description of Artificial Sequence: Synthetic oligonucleotide
cgggcucgaauuaguucaa

SEQ ID NO: 1066504 - RNA, 19 nt, Artificial Sequence
  Description of Artificial Sequence: Synthetic oligonucleotide
ggugaccuaguagguuauu

SEQ ID NO: 1066505 - RNA, 19 nt, Artificial Sequence
  Description of Artificial Sequence: Synthetic oligonucleotide
caggggccgacgggcucga

SEQ ID NO: 1066506 - RNA, 19 nt, Artificial Sequence
  Description of Artificial Sequence: Synthetic oligonucleotide
gccccaagccagcuucauu

SEQ ID NO: 1066507 - RNA, 19 nt, Artificial Sequence
  Description of Artificial Sequence: Synthetic oligonucleotide
cgacgggcucgaauuaguu

SEQ ID NO: 1066508 - RNA, 19 nt, Artificial Sequence
  Description of Artificial Sequence: Synthetic oligonucleotide
aggggccgacgggcucgaa

SEQ ID NO: 1066509 - RNA, 19 nt, Artificial Sequence
  Description of Artificial Sequence: Synthetic oligonucleotide
cgccgacgccgcuuguccu

SEQ ID NO: 1066510 - RNA, 19 nt, Artificial Sequence
  Description of Artificial Sequence: Synthetic oligonucleotide
aaugugaucauccuuuacc

SEQ ID NO: 1066511 - RNA, 19 nt, Artificial Sequence
  Description of Artificial Sequence: Synthetic oligonucleotide
aaguguugaauuucuagac

SEQ ID NO: 1066512 - RNA, 19 nt, Artificial Sequence
  Description of Artificial Sequence: Synthetic oligonucleotide
gaaugagacacauuggucc

SEQ ID NO: 1066513 - RNA, 19 nt, Artificial Sequence
  Description of Artificial Sequence: Synthetic oligonucleotide
  modified_base (2)..(2): a, c, u, g, unknown or other
gngucaagaaccaagaugc

SEQ ID NO: 1066514 - RNA, 19 nt, Artificial Sequence
  Description of Artificial Sequence: Synthetic oligonucleotide
cagacuacgacuaaugggg

SEQ ID NO: 1066515 - RNA, 19 nt, Artificial Sequence
  Description of Artificial Sequence: Synthetic oligonucleotide
auuucuagacaauuaauug

SEQ ID NO: 1066516 - RNA, 19 nt, Artificial Sequence
  Description of Artificial Sequence: Synthetic oligonucleotide
aauuaauugucacuuggga

SEQ ID NO: 1066517 - RNA, 19 nt, Artificial Sequence
  Description of Artificial Sequence: Synthetic oligonucleotide
uauaacuaauucuucaagu

SEQ ID NO: 1066518 - RNA, 19 nt, Artificial Sequence
  Description of Artificial Sequence: Synthetic oligonucleotide
  modified_base (9)..(9): a, c, u, g, unknown or other
auugaccanacaugaaggc

SEQ ID NO: 1066519 - RNA, 19 nt, Artificial Sequence
  Description of Artificial Sequence: Synthetic oligonucleotide
gcaacguaaacuuagaacc

SEQ ID NO: 1066520 - RNA, 19 nt, Artificial Sequence
  Description of Artificial Sequence: Synthetic oligonucleotide
aguguaguggcuugggagc

SEQ ID NO: 1066521 - RNA, 19 nt, Artificial Sequence
  Description of Artificial Sequence: Synthetic oligonucleotide
uuaauugucacuugggaau

SEQ ID NO: 1066522 - RNA, 19 nt, Artificial Sequence
  Description of Artificial Sequence: Synthetic oligonucleotide
uuuccaugcagacuagagg

SEQ ID NO: 1066523 - RNA, 19 nt, Artificial Sequence
  Description of Artificial Sequence: Synthetic oligonucleotide
uuagaaccaagccuugagg

SEQ ID NO: 1066524 - RNA, 19 nt, Artificial Sequence
  Description of Artificial Sequence: Synthetic oligonucleotide
ugaauuucuagacaauuaa

SEQ ID NO: 1066525 - RNA, 19 nt, Artificial Sequence
  Description of Artificial Sequence: Synthetic oligonucleotide
ucuaaugugaucauccuuu

SEQ ID NO: 1066526 - RNA, 19 nt, Artificial Sequence
  Description of Artificial Sequence: Synthetic oligonucleotide
uaauuccaaacucuaaugu

SEQ ID NO: 1066527 - RNA, 19 nt, Artificial Sequence
  Description of Artificial Sequence: Synthetic oligonucleotide
aaaccaggcgccucgcugc

SEQ ID NO: 1066528 - RNA, 19 nt, Artificial Sequence
  Description of Artificial Sequence: Synthetic oligonucleotide
aggauguuguuccacaggg

SEQ ID NO: 1066529 - RNA, 19 nt, Artificial Sequence
  Description of Artificial Sequence: Synthetic oligonucleotide
ggaccaauaauucuuagcc

SEQ ID NO: 1066530 - RNA, 19 nt, Artificial Sequence
  Description of Artificial Sequence: Synthetic oligonucleotide
uuuuaaagcccaacugugc

SEQ ID NO: 1066531 - RNA, 19 nt, Artificial Sequence
  Description of Artificial Sequence: Synthetic oligonucleotide
uuccaugcagacuagaggu

SEQ ID NO: 1066532 - RNA, 19 nt, Artificial Sequence
  Description of Artificial Sequence: Synthetic oligonucleotide
auguauguacccuggggcc

SEQ ID NO: 1066533 - RNA, 19 nt, Artificial Sequence
  Description of Artificial Sequence: Synthetic oligonucleotide
ugcuccaugggauugacca

SEQ ID NO: 1066534 - RNA, 19 nt, Artificial Sequence
  Description of Artificial Sequence: Synthetic oligonucleotide
auuucgacuaucugugggg

SEQ ID NO: 1066535 - RNA, 19 nt, Artificial Sequence
  Description of Artificial Sequence: Synthetic oligonucleotide
agggcagucauuuguaggg

SEQ ID NO: 1066536 - RNA, 19 nt, Artificial Sequence
  Description of Artificial Sequence: Synthetic oligonucleotide
  modified_base (4)..(4): a, c, u, g, unknown or other
agcnguuuuggccugccac

SEQ ID NO: 1066537 - RNA, 19 nt, Artificial Sequence
  Description of Artificial Sequence: Synthetic oligonucleotide
  modified_base (7)..(7): a, c, u, g, unknown or other
ugaccanacaugaaggcau

SEQ ID NO: 1066538 - RNA, 19 nt, Artificial Sequence
  Description of Artificial Sequence: Synthetic oligonucleotide
uaacuaauucuucaaguaa

SEQ ID NO: 1066539 - RNA, 19 nt, Artificial Sequence
  Description of Artificial Sequence: Synthetic oligonucleotide
caauuaauugucacuuggg

SEQ ID NO: 1066540 - RNA, 19 nt, Artificial Sequence
  Description of Artificial Sequence: Synthetic oligonucleotide
uaauucuucaaguaaggua

SEQ ID NO: 1066541 - RNA, 19 nt, Artificial Sequence
  Description of Artificial Sequence: Synthetic oligonucleotide
aagagcuuaaggcuuugug

SEQ ID NO: 1066542 - RNA, 19 nt, Artificial Sequence
  Description of Artificial Sequence: Synthetic oligonucleotide
aaugagacacauugguccu

SEQ ID NO: 1066543 - RNA, 19 nt, Artificial Sequence
  Description of Artificial Sequence: Synthetic oligonucleotide
guaagggaaucacaguacg

SEQ ID NO: 1066544 - RNA, 19 nt, Artificial Sequence
  Description of Artificial Sequence: Synthetic oligonucleotide
agggcaguaguuuaguuug

SEQ ID NO: 1066545 - RNA, 19 nt, Artificial Sequence
  Description of Artificial Sequence: Synthetic oligonucleotide
auuaauugucacuugggaa

SEQ ID NO: 1066546 - RNA, 19 nt, Artificial Sequence
  Description of Artificial Sequence: Synthetic oligonucleotide
cuauaacuaauucuucaag

SEQ ID NO: 1066547 - RNA, 19 nt, Artificial Sequence
  Description of Artificial Sequence: Synthetic oligonucleotide
uaauccacuguuugcauca

SEQ ID NO: 1066548 - RNA, 19 nt, Artificial Sequence
  Description of Artificial Sequence: Synthetic oligonucleotide
ugugcaacagaagacaggu

SEQ ID NO: 1066549 - RNA, 19 nt, Artificial Sequence
  Description of Artificial Sequence: Synthetic oligonucleotide
agagcuuaaggcuuugugu

SEQ ID NO: 1066550 - RNA, 19 nt, Artificial Sequence
  Description of Artificial Sequence: Synthetic oligonucleotide
cauggaauggcaucgcaag

SEQ ID NO: 1066551 - RNA, 19 nt, Artificial Sequence
  Description of Artificial Sequence: Synthetic oligonucleotide
auaacuaauucuucaagua

SEQ ID NO: 1066552 - RNA, 19 nt, Artificial Sequence
  Description of Artificial Sequence: Synthetic oligonucleotide
aaaaccaggcgccucgcug

SEQ ID NO: 1066553 - RNA, 19 nt, Artificial Sequence
  Description of Artificial Sequence: Synthetic oligonucleotide
aaacuuagaaccaagccuu

SEQ ID NO: 1066554 - RNA, 19 nt, Artificial Sequence
  Description of Artificial Sequence: Synthetic oligonucleotide
uuggaaguagugaccauug

SEQ ID NO: 1066555 - RNA, 19 nt, Artificial Sequence
  Description of Artificial Sequence: Synthetic oligonucleotide
  modified_base (2)..(2): a, c, u, g, unknown or other
anacaugaaggcauuggug

SEQ ID NO: 1066556 - RNA, 19 nt, Artificial Sequence
  Description of Artificial Sequence: Synthetic oligonucleotide
uaaacugaagggcugcgaa

SEQ ID NO: 1066557 - RNA, 19 nt, Artificial Sequence
  Description of Artificial Sequence: Synthetic oligonucleotide
uacagcgguaccaugcuca

SEQ ID NO: 1066558 - RNA, 19 nt, Artificial Sequence
  Description of Artificial Sequence: Synthetic oligonucleotide
uggaccaauaauucuuagc

SEQ ID NO: 1066559 - RNA, 19 nt, Artificial Sequence
  Description of Artificial Sequence: Synthetic oligonucleotide
aguguugaauuucuagaca

SEQ ID NO: 1066560 - RNA, 19 nt, Artificial Sequence
  Description of Artificial Sequence: Synthetic oligonucleotide
augugaucauccuuuaccu

SEQ ID NO: 1066561 - RNA, 19 nt, Artificial Sequence
  Description of Artificial Sequence: Synthetic oligonucleotide
uacaguguggaccaauaau

SEQ ID NO: 1066562 - RNA, 19 nt, Artificial Sequence
  Description of Artificial Sequence: Synthetic oligonucleotide
uggaagaugcucuaagaau

SEQ ID NO: 1066563 - RNA, 19 nt, Artificial Sequence
  Description of Artificial Sequence: Synthetic oligonucleotide
  modified_base (3)..(3): a, c, u, g, unknown or other
ggngucaagaaccaagaug

SEQ ID NO: 1066564 - RNA, 19 nt, Artificial Sequence
  Description of Artificial Sequence: Synthetic oligonucleotide
gucauuuguaggguaaggg

SEQ ID NO: 1066565 - RNA, 19 nt, Artificial Sequence
  Description of Artificial Sequence: Synthetic oligonucleotide
ucuuagccaguguagagaa

SEQ ID NO: 1066566 - RNA, 19 nt, Artificial Sequence
  Description of Artificial Sequence: Synthetic oligonucleotide
  modified_base (10)..(10): a, c, u, g, unknown or other
gcaucaagcnguuuuggcc

SEQ ID NO: 1066567 - RNA, 19 nt, Artificial Sequence
  Description of Artificial Sequence: Synthetic oligonucleotide
aaguagugaccauugggau

SEQ ID NO: 1066568 - RNA, 19 nt, Artificial Sequence
  Description of Artificial Sequence: Synthetic oligonucleotide
acucauacaaaaugcuccu

SEQ ID NO: 1066569 - RNA, 19 nt, Artificial Sequence
  Description of Artificial Sequence: Synthetic oligonucleotide
uacaguggcaacccuauua

SEQ ID NO: 1066570 - RNA, 19 nt, Artificial Sequence
  Description of Artificial Sequence: Synthetic oligonucleotide
aagggcaguaguuuaguuu

SEQ ID NO: 1066571 - RNA, 19 nt, Artificial Sequence
  Description of Artificial Sequence: Synthetic oligonucleotide
aguuccuguggguaggcag

SEQ ID NO: 1066572 - RNA, 19 nt, Artificial Sequence
  Description of Artificial Sequence: Synthetic oligonucleotide
  modified_base (8)..(8): a, c, u, g, unknown or other
uugaccanacaugaaggca

SEQ ID NO: 1066573 - RNA, 19 nt, Artificial Sequence
  Description of Artificial Sequence: Synthetic oligonucleotide
gagaaugccagauggccac

SEQ ID NO: 1066574 - RNA, 19 nt, Artificial Sequence
  Description of Artificial Sequence: Synthetic oligonucleotide
auuccaaacucuaauguga

SEQ ID NO: 1066575 - RNA, 19 nt, Artificial Sequence
  Description of Artificial Sequence: Synthetic oligonucleotide
ggaagaugcucuaagaaug

SEQ ID NO: 1066576 - RNA, 19 nt, Artificial Sequence
  Description of Artificial Sequence: Synthetic oligonucleotide
  modified_base (11)..(11): a, c, u, g, unknown or other
ugcaucaagcnguuuuggc

SEQ ID NO: 1066577 - RNA, 19 nt, Artificial Sequence
  Description of Artificial Sequence: Synthetic oligonucleotide
aagaugcucuaagaauggg

SEQ ID NO: 1066578 - RNA, 19 nt, Artificial Sequence
  Description of Artificial Sequence: Synthetic oligonucleotide
aguguggaccaauaauucu

SEQ ID NO: 1066579 - RNA, 19 nt, Artificial Sequence
  Description of Artificial Sequence: Synthetic oligonucleotide
guuccaaguaacuggcuug

SEQ ID NO: 1066580 - RNA, 19 nt, Artificial Sequence
  Description of Artificial Sequence: Synthetic oligonucleotide
cuugagaaugccagauggc

SEQ ID NO: 1066581 - RNA, 19 nt, Artificial Sequence
  Description of Artificial Sequence: Synthetic oligonucleotide
cacaaaaccaggcgccucg

SEQ ID NO: 1066582 - RNA, 19 nt, Artificial Sequence
  Description of Artificial Sequence: Synthetic oligonucleotide
agacaauuaauugucacuu

SEQ ID NO: 1066583 - RNA, 19 nt, Artificial Sequence
  Description of Artificial Sequence: Synthetic oligonucleotide
cauugaugagcagacuacg

SEQ ID NO: 1066584 - RNA, 19 nt, Artificial Sequence
  Description of Artificial Sequence: Synthetic oligonucleotide
gcagacuacgacuaauggg

SEQ ID NO: 1066585 - RNA, 19 nt, Artificial Sequence
  Description of Artificial Sequence: Synthetic oligonucleotide
gguaugaagauuucgacua

SEQ ID NO: 1066586 - RNA, 19 nt, Artificial Sequence
  Description of Artificial Sequence: Synthetic oligonucleotide
  modified_base (2)..(2): a, c, u, g, unknown or other
cncuagagaugccuguggg

SEQ ID NO: 1066587 - RNA, 19 nt, Artificial Sequence
  Description of Artificial Sequence: Synthetic oligonucleotide
gcuauugggaguugguagg

SEQ ID NO: 1066588 - RNA, 19 nt, Artificial Sequence
  Description of Artificial Sequence: Synthetic oligonucleotide
uucuuagccaguguagaga

SEQ ID NO: 1066589 - RNA, 19 nt, Artificial Sequence
  Description of Artificial Sequence: Synthetic oligonucleotide
uaagggaaucacaguacgu

SEQ ID NO: 1066590 - RNA, 19 nt, Artificial Sequence
  Description of Artificial Sequence: Synthetic oligonucleotide
uaggccguugacagguggg

SEQ ID NO: 1066591 - RNA, 19 nt, Artificial Sequence
  Description of Artificial Sequence: Synthetic oligonucleotide
  modified_base (9)..(9): a, c, u, g, unknown or other
ggaaggggngucaagaacc

SEQ ID NO: 1066592 - RNA, 19 nt, Artificial Sequence
  Description of Artificial Sequence: Synthetic oligonucleotide
auuaaacugaagggcugcg

SEQ ID NO: 1066593 - RNA, 19 nt, Artificial Sequence
  Description of Artificial Sequence: Synthetic oligonucleotide
cagguaauccacuguuugc

SEQ ID NO: 1066594 - RNA, 19 nt, Artificial Sequence
  Description of Artificial Sequence: Synthetic oligonucleotide
uucagauggaaggacugug

SEQ ID NO: 1066595 - RNA, 19 nt, Artificial Sequence
  Description of Artificial Sequence: Synthetic oligonucleotide
cauuaaacugaagggcugc

SEQ ID NO: 1066596 - RNA, 19 nt, Artificial Sequence
  Description of Artificial Sequence: Synthetic oligonucleotide
ugggucgacacccgggugc

SEQ ID NO: 1066597 - RNA, 19 nt, Artificial Sequence
  Description of Artificial Sequence: Synthetic oligonucleotide
caauaauucuuagccagug

SEQ ID NO: 1066598 - RNA, 19 nt, Artificial Sequence
  Description of Artificial Sequence: Synthetic oligonucleotide
  modified_base (18)..(18): a, c, u, g, unknown or other
cauuucucuggaaggggng

SEQ ID NO: 1066599 - RNA, 19 nt, Artificial Sequence
  Description of Artificial Sequence: Synthetic oligonucleotide
gaccaauaauucuuagcca

SEQ ID NO: 1066600 - RNA, 19 nt, Artificial Sequence
  Description of Artificial Sequence: Synthetic oligonucleotide
uguggaccaauaauucuua

SEQ ID NO: 1066601 - RNA, 19 nt, Artificial Sequence
  Description of Artificial Sequence: Synthetic oligonucleotide
gaugaguguaguggcuugg

SEQ ID NO: 1066602 - RNA, 19 nt, Artificial Sequence
  Description of Artificial Sequence: Synthetic oligonucleotide
aaacugaagggcugcgaaa

SEQ ID NO: 1066603 - RNA, 19 nt, Artificial Sequence
  Description of Artificial Sequence: Synthetic oligonucleotide
uggcuugggagcaacguaa

SEQ ID NO: 1066604 - RNA, 19 nt, Artificial Sequence
  Description of Artificial Sequence: Synthetic oligonucleotide
aacguaaacuuagaaccaa

SEQ ID NO: 1066605 - RNA, 19 nt, Artificial Sequence
  Description of Artificial Sequence: Synthetic oligonucleotide
cugcgaaauguauguaccc

SEQ ID NO: 1066606 - RNA, 19 nt, Artificial Sequence
  Description of Artificial Sequence: Synthetic oligonucleotide
uggaauggcaucgcaaggu

SEQ ID NO: 1066607 - RNA, 19 nt, Artificial Sequence
  Description of Artificial Sequence: Synthetic oligonucleotide
acuacgacuaauggggcug

SEQ ID NO: 1066608 - RNA, 19 nt, Artificial Sequence
  Description of Artificial Sequence: Synthetic oligonucleotide
ugcgaaauguauguacccu

SEQ ID NO: 1066609 - RNA, 19 nt, Artificial Sequence
  Description of Artificial Sequence: Synthetic oligonucleotide
uaccuauaacuaauucuuc

SEQ ID NO: 1066610 - RNA, 19 nt, Artificial Sequence
  Description of Artificial Sequence: Synthetic oligonucleotide
cuuaaggaggaggggaggc

SEQ ID NO: 1066611 - RNA, 19 nt, Artificial Sequence
  Description of Artificial Sequence: Synthetic oligonucleotide
agguaauccacuguuugca

SEQ ID NO: 1066612 - RNA, 19 nt, Artificial Sequence
  Description of Artificial Sequence: Synthetic oligonucleotide
aguacguuuuccaugcaga

SEQ ID NO: 1066613 - RNA, 19 nt, Artificial Sequence
  Description of Artificial Sequence: Synthetic oligonucleotide
gaugccugcccucgucugg

SEQ ID NO: 1066614 - RNA, 19 nt, Artificial Sequence
  Description of Artificial Sequence: Synthetic oligonucleotide
agugaccauugggauaggc

SEQ ID NO: 1066615 - RNA, 19 nt, Artificial Sequence
  Description of Artificial Sequence: Synthetic oligonucleotide
acuaauggggcugggguug

SEQ ID NO: 1066616 - RNA, 19 nt, Artificial Sequence
  Description of Artificial Sequence: Synthetic oligonucleotide
auccccacucagguaaucc

SEQ ID NO: 1066617 - RNA, 19 nt, Artificial Sequence
  Description of Artificial Sequence: Synthetic oligonucleotide
uugacagguggggaugggg

SEQ ID NO: 1066618 - RNA, 19 nt, Artificial Sequence
  Description of Artificial Sequence: Synthetic oligonucleotide
aagggcugcgaaauguaug

SEQ ID NO: 1066619 - RNA, 19 nt, Artificial Sequence
  Description of Artificial Sequence: Synthetic oligonucleotide
aguagugaccauugggaua

SEQ ID NO: 1066620 - RNA, 19 nt, Artificial Sequence
  Description of Artificial Sequence: Synthetic oligonucleotide
ucuucaaguaagguaguuu

SEQ ID NO: 1066621 - RNA, 19 nt, Artificial Sequence
  Description of Artificial Sequence: Synthetic oligonucleotide
guuccuguggguaggcagg

SEQ ID NO: 1066622 - RNA, 19 nt, Artificial Sequence
  Description of Artificial Sequence: Synthetic oligonucleotide
ugucgcuauugggaguugg

SEQ ID NO: 1066623 - RNA, 19 nt, Artificial Sequence
  Description of Artificial Sequence: Synthetic oligonucleotide
  modified_base (6)..(6): a, c, u, g, unknown or other
aggggngucaagaaccaag

SEQ ID NO: 1066624 - RNA, 19 nt, Artificial Sequence
  Description of Artificial Sequence: Synthetic oligonucleotide
uuucgacuaucugugggga

SEQ ID NO: 1066625 - RNA, 19 nt, Artificial Sequence
  Description of Artificial Sequence: Synthetic oligonucleotide
gaauggcaucgcaaggucc

SEQ ID NO: 1066626 - RNA, 19 nt, Artificial Sequence
  Description of Artificial Sequence: Synthetic oligonucleotide
aagcccaacugugcaacag

SEQ ID NO: 1066627 - RNA, 19 nt, Artificial Sequence
  Description of Artificial Sequence: Synthetic oligonucleotide
acuaucuguggggaucggg

SEQ ID NO: 1066628 - RNA, 19 nt, Artificial Sequence
  Description of Artificial Sequence: Synthetic oligonucleotide
agacuacgacuaauggggc

SEQ ID NO: 1066629 - RNA, 19 nt, Artificial Sequence
  Description of Artificial Sequence: Synthetic oligonucleotide
guaauccacuguuugcauc

SEQ ID NO: 1066630 - RNA, 19 nt, Artificial Sequence
  Description of Artificial Sequence: Synthetic oligonucleotide
gugaccauugggauaggcc

SEQ ID NO: 1066631 - RNA, 19 nt, Artificial Sequence
  Description of Artificial Sequence: Synthetic oligonucleotide
gagcagacuacgacuaaug

SEQ ID NO: 1066632 - RNA, 19 nt, Artificial Sequence
  Description of Artificial Sequence: Synthetic oligonucleotide
ugaagggcugcgaaaugua

SEQ ID NO: 1066633 - RNA, 19 nt, Artificial Sequence
  Description of Artificial Sequence: Synthetic oligonucleotide
ugcucuaagaaugggcaau

SEQ ID NO: 1066634 - RNA, 19 nt, Artificial Sequence
  Description of Artificial Sequence: Synthetic oligonucleotide
aaguuacagagaaguguug

SEQ ID NO: 1066635 - RNA, 19 nt, Artificial Sequence
  Description of Artificial Sequence: Synthetic oligonucleotide
guaggccguugacaggugg

SEQ ID NO: 1066636 - RNA, 19 nt, Artificial Sequence
  Description of Artificial Sequence: Synthetic oligonucleotide
uuuguaggguaagggaauc

SEQ ID NO: 1066637 - RNA, 19 nt, Artificial Sequence
  Description of Artificial Sequence: Synthetic oligonucleotide
acauugguccuggaacagg

SEQ ID NO: 1066638 - RNA, 19 nt, Artificial Sequence
  Description of Artificial Sequence: Synthetic oligonucleotide
aagcaggccugcuggaaau

SEQ ID NO: 1066639 - RNA, 19 nt, Artificial Sequence
  Description of Artificial Sequence: Synthetic oligonucleotide
aucuguuguaggugggcca

SEQ ID NO: 1066640 - RNA, 19 nt, Artificial Sequence
  Description of Artificial Sequence: Synthetic oligonucleotide
gaugagcagacuacgacua

SEQ ID NO: 1066641 - RNA, 19 nt, Artificial Sequence
  Description of Artificial Sequence: Synthetic oligonucleotide
guuacagagaaguguugaa

SEQ ID NO: 1066642 - RNA, 19 nt, Artificial Sequence
  Description of Artificial Sequence: Synthetic oligonucleotide
ucgacuaucuguggggauc

SEQ ID NO: 1066643 - RNA, 19 nt, Artificial Sequence
  Description of Artificial Sequence: Synthetic oligonucleotide
ugugaucauccuuuaccua

SEQ ID NO: 1066644 - RNA, 19 nt, Artificial Sequence
  Description of Artificial Sequence: Synthetic oligonucleotide
  modified_base (9)..(9): a, c, u, g, unknown or other
caucaagcnguuuuggccu

SEQ ID NO: 1066645 - RNA, 19 nt, Artificial Sequence
  Description of Artificial Sequence: Synthetic oligonucleotide
aauugucacuugggaauga

SEQ ID NO: 1066646 - RNA, 19 nt, Artificial Sequence
  Description of Artificial Sequence: Synthetic oligonucleotide
gggccacucauacaaaaug

SEQ ID NO: 1066647 - RNA, 19 nt, Artificial Sequence
  Description of Artificial Sequence: Synthetic oligonucleotide
guuuccuuacaguggcaac

SEQ ID NO: 1066648 - RNA, 19 nt, Artificial Sequence
  Description of Artificial Sequence: Synthetic oligonucleotide
agggaaucacaguacguuu

SEQ ID NO: 1066649 - RNA, 19 nt, Artificial Sequence
  Description of Artificial Sequence: Synthetic oligonucleotide
guggaccaauaauucuuag

SEQ ID NO: 1066650 - RNA, 19 nt, Artificial Sequence
  Description of Artificial Sequence: Synthetic oligonucleotide
  modified_base (4)..(4): a, c, u, g, unknown or other
ccanacaugaaggcauugg

SEQ ID NO: 1066651 - RNA, 19 nt, Artificial Sequence
  Description of Artificial Sequence: Synthetic oligonucleotide
aacuuagaaccaagccuug

SEQ ID NO: 1066652 - RNA, 19 nt, Artificial Sequence
  Description of Artificial Sequence: Synthetic oligonucleotide
auugaugagcagacuacga

SEQ ID NO: 1066653 - RNA, 19 nt, Artificial Sequence
  Description of Artificial Sequence: Synthetic oligonucleotide
  modified_base (15)..(15): a, c, u, g, unknown or other
caugggauugaccanacau

SEQ ID NO: 1066654 - RNA, 19 nt, Artificial Sequence
  Description of Artificial Sequence: Synthetic oligonucleotide
acguaaacuuagaaccaag

SEQ ID NO: 1066655 - RNA, 19 nt, Artificial Sequence
  Description of Artificial Sequence: Synthetic oligonucleotide
agaguuccuguggguaggc

SEQ ID NO: 1066656 - RNA, 19 nt, Artificial Sequence
  Description of Artificial Sequence: Synthetic oligonucleotide
  modified_base (8)..(8): a, c, u, g, unknown or other
aucaagcnguuuuggccug

SEQ ID NO: 1066657 - RNA, 19 nt, Artificial Sequence
  Description of Artificial Sequence: Synthetic oligonucleotide
gcgaaauguauguacccug

SEQ ID NO: 1066658 - RNA, 19 nt, Artificial Sequence
  Description of Artificial Sequence: Synthetic oligonucleotide
uguacccuggggccacuca

SEQ ID NO: 1066659 - RNA, 19 nt, Artificial Sequence
  Description of Artificial Sequence: Synthetic oligonucleotide
  modified_base (3)..(3): a, c, u, g, unknown or other
canacaugaaggcauuggu

SEQ ID NO: 1066660 - RNA, 19 nt, Artificial Sequence
  Description of Artificial Sequence: Synthetic oligonucleotide
ggcugcgaaauguauguac

SEQ ID NO: 1066661 - RNA, 19 nt, Artificial Sequence
  Description of Artificial Sequence: Synthetic oligonucleotide
guggggacgcugugggucg

SEQ ID NO: 1066662 - RNA, 19 nt, Artificial Sequence
  Description of Artificial Sequence: Synthetic oligonucleotide
ugagcagacuacgacuaau

SEQ ID NO: 1066663 - RNA, 19 nt, Artificial Sequence
  Description of Artificial Sequence: Synthetic oligonucleotide
gguaggauguuguuccaca

SEQ ID NO: 1066664 - RNA, 19 nt, Artificial Sequence
  Description of Artificial Sequence: Synthetic oligonucleotide
gcugcgaaauguauguacc

SEQ ID NO: 1066665 - RNA, 19 nt, Artificial Sequence
  Description of Artificial Sequence: Synthetic oligonucleotide
uggggccacucauacaaaa

SEQ ID NO: 1066666 - RNA, 19 nt, Artificial Sequence
  Description of Artificial Sequence: Synthetic oligonucleotide
agccccucuacagcgguac

SEQ ID NO: 1066667 - RNA, 19 nt, Artificial Sequence
  Description of Artificial Sequence: Synthetic oligonucleotide
acgacuaauggggcugggg

SEQ ID NO: 1066668 - RNA, 19 nt, Artificial Sequence
  Description of Artificial Sequence: Synthetic oligonucleotide
  modified_base (3)..(3): a, c, u, g, unknown or other
gcncuagagaugccugugg

SEQ ID NO: 1066669 - RNA, 19 nt, Artificial Sequence
  Description of Artificial Sequence: Synthetic oligonucleotide
uuguaggguaagggaauca

SEQ ID NO: 1066670 - RNA, 19 nt, Artificial Sequence
  Description of Artificial Sequence: Synthetic oligonucleotide
  modified_base (7)..(7): a, c, u, g, unknown or other
ucaagcnguuuuggccugc

SEQ ID NO: 1066671 - RNA, 19 nt, Artificial Sequence
  Description of Artificial Sequence: Synthetic oligonucleotide
  modified_base (5)..(5): a, c, u, g, unknown or other
aagcnguuuuggccugcca

SEQ ID NO: 1066672 - RNA, 19 nt, Artificial Sequence
  Description of Artificial Sequence: Synthetic oligonucleotide
ggguaagggaaucacagua

SEQ ID NO: 1066673 - RNA, 19 nt, Artificial Sequence
  Description of Artificial Sequence: Synthetic oligonucleotide
cuugggagcaacguaaacu

SEQ ID NO: 1066674 - RNA, 19 nt, Artificial Sequence
  Description of Artificial Sequence: Synthetic oligonucleotide
agucgaggggugcaccugu

SEQ ID NO: 1066675 - RNA, 19 nt, Artificial Sequence
  Description of Artificial Sequence: Synthetic oligonucleotide
ggcgaucuggcccucacac

SEQ ID NO: 1066676 - RNA, 19 nt, Artificial Sequence
  Description of Artificial Sequence: Synthetic oligonucleotide
ggaaucacaguacguuuuc

SEQ ID NO: 1066677 - RNA, 19 nt, Artificial Sequence
  Description of Artificial Sequence: Synthetic oligonucleotide
acuuagaaccaagccuuga

SEQ ID NO: 1066678 - RNA, 19 nt, Artificial Sequence
  Description of Artificial Sequence: Synthetic oligonucleotide
accgaaguugagggcaguc

SEQ ID NO: 1066679 - RNA, 19 nt, Artificial Sequence
  Description of Artificial Sequence: Synthetic oligonucleotide
cuacgacuaauggggcugg

SEQ ID NO: 1066680 - RNA, 19 nt, Artificial Sequence
  Description of Artificial Sequence: Synthetic oligonucleotide
  modified_base (8)..(8): a, c, u, g, unknown or other
gaaggggngucaagaacca

SEQ ID NO: 1066681 - RNA, 19 nt, Artificial Sequence
  Description of Artificial Sequence: Synthetic oligonucleotide
cagucauuuguaggguaag

SEQ ID NO: 1066682 - RNA, 19 nt, Artificial Sequence
  Description of Artificial Sequence: Synthetic oligonucleotide
  modified_base (5)..(5): a, c, u, g, unknown or other
accanacaugaaggcauug

SEQ ID NO: 1066683 - RNA, 19 nt, Artificial Sequence
  Description of Artificial Sequence: Synthetic oligonucleotide
caugcucauuugguagagg

SEQ ID NO: 1066684 - RNA, 19 nt, Artificial Sequence
  Description of Artificial Sequence: Synthetic oligonucleotide
gucgcuggguagccagugg

SEQ ID NO: 1066685 - RNA, 19 nt, Artificial Sequence
  Description of Artificial Sequence: Synthetic oligonucleotide
aggccguugacaggugggg

SEQ ID NO: 1066686 - RNA, 19 nt, Artificial Sequence
  Description of Artificial Sequence: Synthetic oligonucleotide
aaggacugugccaggcaga

SEQ ID NO: 1066687 - RNA, 19 nt, Artificial Sequence
  Description of Artificial Sequence: Synthetic oligonucleotide
uucgacuaucuguggggau

SEQ ID NO: 1066688 - RNA, 19 nt, Artificial Sequence
  Description of Artificial Sequence: Synthetic oligonucleotide
  modified_base (2)..(2): a, c, u, g, unknown or other
cnguuuuggccugccacug

SEQ ID NO: 1066689 - RNA, 19 nt, Artificial Sequence
  Description of Artificial Sequence: Synthetic oligonucleotide
uugaggucgcuggguagcc

SEQ ID NO: 1066690 - RNA, 19 nt, Artificial Sequence
  Description of Artificial Sequence: Synthetic oligonucleotide
ggcaagaggggcccuuucc

SEQ ID NO: 1066691 - RNA, 19 nt, Artificial Sequence
  Description of Artificial Sequence: Synthetic oligonucleotide
acgaugcugcucagguccc

SEQ ID NO: 1066692 - RNA, 19 nt, Artificial Sequence
  Description of Artificial Sequence: Synthetic oligonucleotide
cuaaugugaucauccuuua

SEQ ID NO: 1066693 - RNA, 19 nt, Artificial Sequence
  Description of Artificial Sequence: Synthetic oligonucleotide
  modified_base (7)..(7): a, c, u, g, unknown or other
aaggggngucaagaaccaa

SEQ ID NO: 1066694 - RNA, 19 nt, Artificial Sequence
  Description of Artificial Sequence: Synthetic oligonucleotide
acuuacaguguggaccaau

SEQ ID NO: 1066695 - RNA, 19 nt, Artificial Sequence
  Description of Artificial Sequence: Synthetic oligonucleotide
uacgacuaauggggcuggg

SEQ ID NO: 1066696 - RNA, 19 nt, Artificial Sequence
  Description of Artificial Sequence: Synthetic oligonucleotide
ucgcuauugggaguuggua

SEQ ID NO: 1066697 - RNA, 19 nt, Artificial Sequence
  Description of Artificial Sequence: Synthetic oligonucleotide
ugugcuccaugggauugac

SEQ ID NO: 1066698 - RNA, 19 nt, Artificial Sequence
  Description of Artificial Sequence: Synthetic oligonucleotide
gacuacgacuaauggggcu

SEQ ID NO: 1066699 - RNA, 19 nt, Artificial Sequence
  Description of Artificial Sequence: Synthetic oligonucleotide
aguucccgcucgguagugg

SEQ ID NO: 1066700 - RNA, 19 nt, Artificial Sequence
  Description of Artificial Sequence: Synthetic oligonucleotide
cccucacacacugagguag

SEQ ID NO: 1066701 - RNA, 19 nt, Artificial Sequence
  Description of Artificial Sequence: Synthetic oligonucleotide
cuaauucuucaaguaaggu

SEQ ID NO: 1066702 - RNA, 19 nt, Artificial Sequence
  Description of Artificial Sequence: Synthetic oligonucleotide
ggcaucgcaagguccugag

SEQ ID NO: 1066703 - RNA, 19 nt, Artificial Sequence
  Description of Artificial Sequence: Synthetic oligonucleotide
  modified_base (6)..(6): a, c, u, g, unknown or other
caagcnguuuuggccugcc

SEQ ID NO: 1066704 - RNA, 19 nt, Artificial Sequence
  Description of Artificial Sequence: Synthetic oligonucleotide
gucgacacccgggugcuug

SEQ ID NO: 1066705 - RNA, 19 nt, Artificial Sequence
  Description of Artificial Sequence: Synthetic oligonucleotide
ucgacacccgggugcuugc

SEQ ID NO: 1066706 - RNA, 19 nt, Artificial Sequence
  Description of Artificial Sequence: Synthetic oligonucleotide
gcagggauaagggcaguag

SEQ ID NO: 1066707 - RNA, 19 nt, Artificial Sequence
  Description of Artificial Sequence: Synthetic oligonucleotide
  modified_base (11)..(11): a, c, u, g, unknown or other
cuggaaggggngucaagaa

SEQ ID NO: 1066708 - RNA, 19 nt, Artificial Sequence
  Description of Artificial Sequence: Synthetic oligonucleotide
agcugucgcuauugggagu

SEQ ID NO: 1066709 - RNA, 19 nt, Artificial Sequence
  Description of Artificial Sequence: Synthetic oligonucleotide
acagcgguaccaugcucau

SEQ ID NO: 1066710 - RNA, 19 nt, Artificial Sequence
  Description of Artificial Sequence: Synthetic oligonucleotide
uggcgaucuggcccucaca

SEQ ID NO: 1066711 - RNA, 19 nt, Artificial Sequence
  Description of Artificial Sequence: Synthetic oligonucleotide
  modified_base (4)..(4): a, c, u, g, unknown or other
ggcncuagagaugccugug

SEQ ID NO: 1066712 - RNA, 19 nt, Artificial Sequence
  Description of Artificial Sequence: Synthetic oligonucleotide
uggcaaggaugaguguagu

SEQ ID NO: 1066713 - RNA, 19 nt, Artificial Sequence
  Description of Artificial Sequence: Synthetic oligonucleotide
cuauugggaguugguagga

SEQ ID NO: 1066714 - RNA, 19 nt, Artificial Sequence
  Description of Artificial Sequence: Synthetic oligonucleotide
ggguuggaaguagugacca

SEQ ID NO: 1066715 - RNA, 19 nt, Artificial Sequence
  Description of Artificial Sequence: Synthetic oligonucleotide
cuacagcgguaccaugcuc

SEQ ID NO: 1066716 - RNA, 19 nt, Artificial Sequence
  Description of Artificial Sequence: Synthetic oligonucleotide
guauguacccuggggccac

SEQ ID NO: 1066717 - RNA, 19 nt, Artificial Sequence
  Description of Artificial Sequence: Synthetic oligonucleotide
cucgcugcacaucuguugu

SEQ ID NO: 1066718 - RNA, 19 nt, Artificial Sequence
  Description of Artificial Sequence: Synthetic oligonucleotide
  modified_base (5)..(5): a, c, u, g, unknown or other
ggggngucaagaaccaaga

SEQ ID NO: 1066719 - RNA, 19 nt, Artificial Sequence
  Description of Artificial Sequence: Synthetic oligonucleotide
aaauccccacucagguaau

SEQ ID NO: 1066720 - RNA, 19 nt, Artificial Sequence
  Description of Artificial Sequence: Synthetic oligonucleotide
gggaguugguaggauguug

SEQ ID NO: 1066721 - RNA, 19 nt, Artificial Sequence
  Description of Artificial Sequence: Synthetic oligonucleotide
gacuaauggggcugggguu

SEQ ID NO: 1066722 - RNA, 19 nt, Artificial Sequence
  Description of Artificial Sequence: Synthetic oligonucleotide
gcccacaaaaccaggcgcc

SEQ ID NO: 1066723 - RNA, 19 nt, Artificial Sequence
  Description of Artificial Sequence: Synthetic oligonucleotide
gcucggugggccuugcuca

SEQ ID NO: 1066724 - RNA, 19 nt, Artificial Sequence
  Description of Artificial Sequence: Synthetic oligonucleotide
aggggcccuuuccaaugug

SEQ ID NO: 1066725 - RNA, 19 nt, Artificial Sequence
  Description of Artificial Sequence: Synthetic oligonucleotide
guaugaagauuucgacuau

SEQ ID NO: 1066726 - RNA, 19 nt, Artificial Sequence
  Description of Artificial Sequence: Synthetic oligonucleotide
uguggccgcaugggugugc

SEQ ID NO: 1066727 - RNA, 19 nt, Artificial Sequence
  Description of Artificial Sequence: Synthetic oligonucleotide
gugcacgaugcugcucagg

SEQ ID NO: 1066728 - RNA, 19 nt, Artificial Sequence
  Description of Artificial Sequence: Synthetic oligonucleotide
agacuagaggugggaguga

SEQ ID NO: 1066729 - RNA, 19 nt, Artificial Sequence
  Description of Artificial Sequence: Synthetic oligonucleotide
ugaggucgcuggguagcca

SEQ ID NO: 1066730 - RNA, 19 nt, Artificial Sequence
  Description of Artificial Sequence: Synthetic oligonucleotide
agaaugccagauggccacu

SEQ ID NO: 1066731 - RNA, 19 nt, Artificial Sequence
  Description of Artificial Sequence: Synthetic oligonucleotide
gccuugcccacaaaaccag

SEQ ID NO: 1066732 - RNA, 19 nt, Artificial Sequence
  Description of Artificial Sequence: Synthetic oligonucleotide
  modified_base (3)..(3): a, c, u, g, unknown or other
gcnguuuuggccugccacu

SEQ ID NO: 1066733 - RNA, 19 nt, Artificial Sequence
  Description of Artificial Sequence: Synthetic oligonucleotide
cugaagggcugcgaaaugu

SEQ ID NO: 1066734 - RNA, 19 nt, Artificial Sequence
  Description of Artificial Sequence: Synthetic oligonucleotide
ggcauugguguggggacgc

SEQ ID NO: 1066735 - RNA, 19 nt, Artificial Sequence
  Description of Artificial Sequence: Synthetic oligonucleotide
gagacacauugguccugga

SEQ ID NO: 1066736 - RNA, 19 nt, Artificial Sequence
  Description of Artificial Sequence: Synthetic oligonucleotide
gcuugggagcaacguaaac

SEQ ID NO: 1066737 - RNA, 19 nt, Artificial Sequence
  Description of Artificial Sequence: Synthetic oligonucleotide
uagugaccauugggauagg

SEQ ID NO: 1066738 - RNA, 19 nt, Artificial Sequence
  Description of Artificial Sequence: Synthetic oligonucleotide
gugggucgacacccgggug

SEQ ID NO: 1066739 - RNA, 19 nt, Artificial Sequence
  Description of Artificial Sequence: Synthetic oligonucleotide
gggcaguaguuuaguuugg

SEQ ID NO: 1066740 - RNA, 19 nt, Artificial Sequence
  Description of Artificial Sequence: Synthetic oligonucleotide
cucuaaugugaucauccuu

SEQ ID NO: 1066741 - RNA, 19 nt, Artificial Sequence
  Description of Artificial Sequence: Synthetic oligonucleotide
ggcucggugggccuugcuc

SEQ ID NO: 1066742 - RNA, 19 nt, Artificial Sequence
  Description of Artificial Sequence: Synthetic oligonucleotide
  modified_base (6)..(6): a, c, u, g, unknown or other
ggggcncuagagaugccug

SEQ ID NO: 1066743 - RNA, 19 nt, Artificial Sequence
  Description of Artificial Sequence: Synthetic oligonucleotide
cucgucuggcaaaacuggu

SEQ ID NO: 1066744 - RNA, 19 nt, Artificial Sequence
  Description of Artificial Sequence: Synthetic oligonucleotide
gcagucauuuguaggguaa

SEQ ID NO: 1066745 - RNA, 19 nt, Artificial Sequence
  Description of Artificial Sequence: Synthetic oligonucleotide
ggcagucauuuguagggua

SEQ ID NO: 1066746 - RNA, 19 nt, Artificial Sequence
  Description of Artificial Sequence: Synthetic oligonucleotide
gagaccccgagcugucgcu

SEQ ID NO: 1066747 - RNA, 19 nt, Artificial Sequence
  Description of Artificial Sequence: Synthetic oligonucleotide
gguaauccacuguuugcau

SEQ ID NO: 1066748 - RNA, 19 nt, Artificial Sequence
  Description of Artificial Sequence: Synthetic oligonucleotide
  modified_base (15)..(15): a, c, u, g, unknown or other
uguuugcaucaagcnguuu

SEQ ID NO: 1066749 - RNA, 19 nt, Artificial Sequence
  Description of Artificial Sequence: Synthetic oligonucleotide
cuucagauggaaggacugu

SEQ ID NO: 1066750 - RNA, 19 nt, Artificial Sequence
  Description of Artificial Sequence: Synthetic oligonucleotide
ggucggcuucuccagggga

SEQ ID NO: 1066751 - RNA, 19 nt, Artificial Sequence
  Description of Artificial Sequence: Synthetic oligonucleotide
ccauggaauggcaucgcaa

SEQ ID NO: 1066752 - RNA, 19 nt, Artificial Sequence
  Description of Artificial Sequence: Synthetic oligonucleotide
gaggggcccuuuccaaugu

SEQ ID NO: 1066753 - RNA, 19 nt, Artificial Sequence
  Description of Artificial Sequence: Synthetic oligonucleotide
ccgggugcuugcauugaug

SEQ ID NO: 1066754 - RNA, 19 nt, Artificial Sequence
  Description of Artificial Sequence: Synthetic oligonucleotide
ggucgcuggguagccagug

SEQ ID NO: 1066755 - RNA, 19 nt, Artificial Sequence
  Description of Artificial Sequence: Synthetic oligonucleotide
ccaauaauucuuagccagu

SEQ ID NO: 1066756 - RNA, 19 nt, Artificial Sequence
  Description of Artificial Sequence: Synthetic oligonucleotide
  modified_base (6)..(6): a, c, u, g, unknown or other
gaccanacaugaaggcauu

SEQ ID NO: 1066757 - RNA, 19 nt, Artificial Sequence
  Description of Artificial Sequence: Synthetic oligonucleotide
cguuuuccaugcagacuag

SEQ ID NO: 1066758 - RNA, 19 nt, Artificial Sequence
  Description of Artificial Sequence: Synthetic oligonucleotide
gucgcuauugggaguuggu

SEQ ID NO: 1066759 - RNA, 19 nt, Artificial Sequence
  Description of Artificial Sequence: Synthetic oligonucleotide
cguugacagguggggaugg

SEQ ID NO: 1066760 - RNA, 19 nt, Artificial Sequence
  Description of Artificial Sequence: Synthetic oligonucleotide
gcgguaccaugcucauuug

SEQ ID NO: 1066761 - RNA, 19 nt, Artificial Sequence
  Description of Artificial Sequence: Synthetic oligonucleotide
cucggugggccuugcucaa

SEQ ID NO: 1066762 - RNA, 19 nt, Artificial Sequence
  Description of Artificial Sequence: Synthetic oligonucleotide
  modified_base (4)..(4): a, c, u, g, unknown or other
gggngucaagaaccaagau

SEQ ID NO: 1066763 - RNA, 19 nt, Artificial Sequence
  Description of Artificial Sequence: Synthetic oligonucleotide
cugucgcuauugggaguug

SEQ ID NO: 1066764 - RNA, 19 nt, Artificial Sequence
  Description of Artificial Sequence: Synthetic oligonucleotide
ccguugacagguggggaug

SEQ ID NO: 1066765 - RNA, 19 nt, Artificial Sequence
  Description of Artificial Sequence: Synthetic oligonucleotide
gcaucgcaagguccugaga

SEQ ID NO: 1066766 - RNA, 19 nt, Artificial Sequence
  Description of Artificial Sequence: Synthetic oligonucleotide
  modified_base (5)..(5): a, c, u, g, unknown or other
gggcncuagagaugccugu

SEQ ID NO: 1066767 - RNA, 19 nt, Artificial Sequence
  Description of Artificial Sequence: Synthetic oligonucleotide
caaaaccaggcgccucgcu

SEQ ID NO: 1066768 - RNA, 19 nt, Artificial Sequence
  Description of Artificial Sequence: Synthetic oligonucleotide
gggaaucacaguacguuuu

SEQ ID NO: 1066769 - RNA, 19 nt, Artificial Sequence
  Description of Artificial Sequence: Synthetic oligonucleotide
  modified_base (16)..(16): a, c, u, g, unknown or other
ccaugggauugaccanaca

SEQ ID NO: 1066770 - RNA, 19 nt, Artificial Sequence
  Description of Artificial Sequence: Synthetic oligonucleotide
acccgggugcuugcauuga

SEQ ID NO: 1066771 - RNA, 19 nt, Artificial Sequence
  Description of Artificial Sequence: Synthetic oligonucleotide
agaccccgagcugucgcua

SEQ ID NO: 1066772 - RNA, 19 nt, Artificial Sequence
  Description of Artificial Sequence: Synthetic oligonucleotide
uggggacgcugugggucga

SEQ ID NO: 1066773 - RNA, 19 nt, Artificial Sequence
  Description of Artificial Sequence: Synthetic oligonucleotide
ugcccucgucuggcaaaac

SEQ ID NO: 1066774 - RNA, 19 nt, Artificial Sequence
  Description of Artificial Sequence: Synthetic oligonucleotide
gguaggccguugacaggug

SEQ ID NO: 1066775 - RNA, 19 nt, Artificial Sequence
  Description of Artificial Sequence: Synthetic oligonucleotide
aggucgcuggguagccagu

SEQ ID NO: 1066776 - RNA, 19 nt, Artificial Sequence
  Description of Artificial Sequence: Synthetic oligonucleotide
gcccucgucuggcaaaacu

SEQ ID NO: 1066777 - RNA, 19 nt, Artificial Sequence
  Description of Artificial Sequence: Synthetic oligonucleotide
gagccgccgcacagucgag

SEQ ID NO: 1066778 - RNA, 19 nt, Artificial Sequence
  Description of Artificial Sequence: Synthetic oligonucleotide
gccguugacagguggggau

SEQ ID NO: 1066779 - RNA, 19 nt, Artificial Sequence
  Description of Artificial Sequence: Synthetic oligonucleotide
gaccccgagcugucgcuau

SEQ ID NO: 1066780 - RNA, 19 nt, Artificial Sequence
  Description of Artificial Sequence: Synthetic oligonucleotide
cgacuaauggggcuggggu

SEQ ID NO: 1066781 - RNA, 19 nt, Artificial Sequence
  Description of Artificial Sequence: Synthetic oligonucleotide
cugcccucgucuggcaaaa

SEQ ID NO: 1066782 - RNA, 19 nt, Artificial Sequence
  Description of Artificial Sequence: Synthetic oligonucleotide
cuguggccgcaugggugug

SEQ ID NO: 1066783 - RNA, 19 nt, Artificial Sequence
  Description of Artificial Sequence: Synthetic oligonucleotide
gccccucuacagcgguacc

SEQ ID NO: 1066784 - RNA, 19 nt, Artificial Sequence
  Description of Artificial Sequence: Synthetic oligonucleotide
gcugucgcuauugggaguu

SEQ ID NO: 1066785 - RNA, 19 nt, Artificial Sequence
  Description of Artificial Sequence: Synthetic oligonucleotide
uggccgcaugggugugcuc

SEQ ID NO: 1066786 - RNA, 19 nt, Artificial Sequence
  Description of Artificial Sequence: Synthetic oligonucleotide
ccugcccucgucuggcaaa

SEQ ID NO: 1066787 - RNA, 19 nt, Artificial Sequence
  Description of Artificial Sequence: Synthetic oligonucleotide
gggcagucauuuguagggu

SEQ ID NO: 1066788 - RNA, 19 nt, Artificial Sequence
  Description of Artificial Sequence: Synthetic oligonucleotide
ccccucuacagcgguacca

SEQ ID NO: 1066789 - RNA, 19 nt, Artificial Sequence
  Description of Artificial Sequence: Synthetic oligonucleotide
gguugaucuggugcacgau

SEQ ID NO: 1066790 - RNA, 19 nt, Artificial Sequence
  Description of Artificial Sequence: Synthetic oligonucleotide
gggacgcugugggucgaca

SEQ ID NO: 1066791 - RNA, 19 nt, Artificial Sequence
  Description of Artificial Sequence: Synthetic oligonucleotide
ccgcacagucgaggggugc

SEQ ID NO: 1066792 - RNA, 19 nt, Artificial Sequence
  Description of Artificial Sequence: Synthetic oligonucleotide
ggugggccuugcucaacau

SEQ ID NO: 1066793 - RNA, 19 nt, Artificial Sequence
  Description of Artificial Sequence: Synthetic oligonucleotide
ccaguucccgcucgguagu

SEQ ID NO: 1066794 - RNA, 19 nt, Artificial Sequence
  Description of Artificial Sequence: Synthetic oligonucleotide
ccgcucgguagugggcccc

SEQ ID NO: 1066795 - RNA, 19 nt, Artificial Sequence
  Description of Artificial Sequence: Synthetic oligonucleotide
ccaagccuugagguaugaa

SEQ ID NO: 1066796 - RNA, 19 nt, Artificial Sequence
  Description of Artificial Sequence: Synthetic oligonucleotide
cccacaaaaccaggcgccu

SEQ ID NO: 1066797 - RNA, 19 nt, Artificial Sequence
  Description of Artificial Sequence: Synthetic oligonucleotide
caggcgccucgcugcacau

SEQ ID NO: 1066798 - RNA, 19 nt, Artificial Sequence
  Description of Artificial Sequence: Synthetic oligonucleotide
gcauugguguggggacgcu

SEQ ID NO: 1066799 - RNA, 19 nt, Artificial Sequence
  Description of Artificial Sequence: Synthetic oligonucleotide
cccgggugcuugcauugau

SEQ ID NO: 1066800 - RNA, 19 nt, Artificial Sequence
  Description of Artificial Sequence: Synthetic oligonucleotide
cagcgguaccaugcucauu

SEQ ID NO: 1066801 - RNA, 19 nt, Artificial Sequence
  Description of Artificial Sequence: Synthetic oligonucleotide
ggucgacacccgggugcuu

SEQ ID NO: 1066802 - RNA, 19 nt, Artificial Sequence
  Description of Artificial Sequence: Synthetic oligonucleotide
ccgcaugggugugcuccau

SEQ ID NO: 1066803 - RNA, 19 nt, Artificial Sequence
  Description of Artificial Sequence: Synthetic oligonucleotide
  modified_base (1)..(1): a, c, u, g, unknown or other
nguuuuggccugccacugg

SEQ ID NO: 1066804 - RNA, 19 nt, Artificial Sequence
  Description of Artificial Sequence: Synthetic oligonucleotide
uggagauuggaaaagaccg

SEQ ID NO: 1066805 - RNA, 19 nt, Artificial Sequence
  Description of Artificial Sequence: Synthetic oligonucleotide
ucuauaaaccugcaagcgg

SEQ ID NO: 1066806 - RNA, 19 nt, Artificial Sequence
  Description of Artificial Sequence: Synthetic oligonucleotide
aaauuugaggucuuugcug

SEQ ID NO: 1066807 - RNA, 19 nt, Artificial Sequence
  Description of Artificial Sequence: Synthetic oligonucleotide
ugaagacaaaauucggucg

SEQ ID NO: 1066808 - RNA, 19 nt, Artificial Sequence
  Description of Artificial Sequence: Synthetic oligonucleotide
acaaaauucggucgauucc

SEQ ID NO: 1066809 - RNA, 19 nt, Artificial Sequence
  Description of Artificial Sequence: Synthetic oligonucleotide
cuauaaaccugcaagcggg

SEQ ID NO: 1066810 - RNA, 19 nt, Artificial Sequence
  Description of Artificial Sequence: Synthetic oligonucleotide
uaaguaaacuauuuuauuu

SEQ ID NO: 1066811 - RNA, 19 nt, Artificial Sequence
  Description of Artificial Sequence: Synthetic oligonucleotide
aaguaaacuauuuuauuua

SEQ ID NO: 1066812 - RNA, 19 nt, Artificial Sequence
  Description of Artificial Sequence: Synthetic oligonucleotide
uuggagauuggaaaagacc

SEQ ID NO: 1066813 - RNA, 19 nt, Artificial Sequence
  Description of Artificial Sequence: Synthetic oligonucleotide
ugucuauaaaccugcaagc

SEQ ID NO: 1066814 - RNA, 19 nt, Artificial Sequence
  Description of Artificial Sequence: Synthetic oligonucleotide
aaguuaaaggacuccuaag

SEQ ID NO: 1066815 - RNA, 19 nt, Artificial Sequence
  Description of Artificial Sequence: Synthetic oligonucleotide
uguccuuaugccaacgacc

SEQ ID NO: 1066816 - RNA, 19 nt, Artificial Sequence
  Description of Artificial Sequence: Synthetic oligonucleotide
aauucggucgauuccaaau

SEQ ID NO: 1066817 - RNA, 19 nt, Artificial Sequence
  Description of Artificial Sequence: Synthetic oligonucleotide
agaucucucagaguguugc

SEQ ID NO: 1066818 - RNA, 19 nt, Artificial Sequence
  Description of Artificial Sequence: Synthetic oligonucleotide
uuacaaaccguaaguaaac

SEQ ID NO: 1066819 - RNA, 19 nt, Artificial Sequence
  Description of Artificial Sequence: Synthetic oligonucleotide
aguuccgucaaacacuuca

SEQ ID NO: 1066820 - RNA, 19 nt, Artificial Sequence
  Description of Artificial Sequence: Synthetic oligonucleotide
uccgucaaacacuucacag

SEQ ID NO: 1066821 - RNA, 19 nt, Artificial Sequence
  Description of Artificial Sequence: Synthetic oligonucleotide
gaugaccguaguuuggugc

SEQ ID NO: 1066822 - RNA, 19 nt, Artificial Sequence
  Description of Artificial Sequence: Synthetic oligonucleotide
ucgggucaaacucugaaga

SEQ ID NO: 1066823 - RNA, 19 nt, Artificial Sequence
  Description of Artificial Sequence: Synthetic oligonucleotide
cuuggguuggagcuuaagg

SEQ ID NO: 1066824 - RNA, 19 nt, Artificial Sequence
  Description of Artificial Sequence: Synthetic oligonucleotide
aaggcuuuucgcuggcuuc

SEQ ID NO: 1066825 - RNA, 19 nt, Artificial Sequence
  Description of Artificial Sequence: Synthetic oligonucleotide
uauaaaccugcaagcgggg

SEQ ID NO: 1066826 - RNA, 19 nt, Artificial Sequence
  Description of Artificial Sequence: Synthetic oligonucleotide
agcagggcgcccuagugcc

SEQ ID NO: 1066827 - RNA, 19 nt, Artificial Sequence
  Description of Artificial Sequence: Synthetic oligonucleotide
ucgcuaaugggcucuagag

SEQ ID NO: 1066828 - RNA, 19 nt, Artificial Sequence
  Description of Artificial Sequence: Synthetic oligonucleotide
acgcccaccgguuagcagc

SEQ ID NO: 1066829 - RNA, 19 nt, Artificial Sequence
  Description of Artificial Sequence: Synthetic oligonucleotide
ucugcuuucgguucuccgc

SEQ ID NO: 1066830 - RNA, 19 nt, Artificial Sequence
  Description of Artificial Sequence: Synthetic oligonucleotide
uuggaaaagaccgcucggg

SEQ ID NO: 1066831 - RNA, 19 nt, Artificial Sequence
  Description of Artificial Sequence: Synthetic oligonucleotide
aacaguuccgucaaacacu

SEQ ID NO: 1066832 - RNA, 19 nt, Artificial Sequence
  Description of Artificial Sequence: Synthetic oligonucleotide
gucuauaaaccugcaagcg

SEQ ID NO: 1066833 - RNA, 19 nt, Artificial Sequence
  Description of Artificial Sequence: Synthetic oligonucleotide
aacggcugggacuucucuc

SEQ ID NO: 1066834 - RNA, 19 nt, Artificial Sequence
  Description of Artificial Sequence: Synthetic oligonucleotide
uagguccugucuauaaacc

SEQ ID NO: 1066835 - RNA, 19 nt, Artificial Sequence
  Description of Artificial Sequence: Synthetic oligonucleotide
cuagguccugucuauaaac

SEQ ID NO: 1066836 - RNA, 19 nt, Artificial Sequence
  Description of Artificial Sequence: Synthetic oligonucleotide
cuugaugaccguaguuugg

SEQ ID NO: 1066837 - RNA, 19 nt, Artificial Sequence
  Description of Artificial Sequence: Synthetic oligonucleotide
guugccgcuacccaggcug

SEQ ID NO: 1066838 - RNA, 19 nt, Artificial Sequence
  Description of Artificial Sequence: Synthetic oligonucleotide
uccaguucgcccucggcgg

SEQ ID NO: 1066839 - RNA, 19 nt, Artificial Sequence
  Description of Artificial Sequence: Synthetic oligonucleotide
gcuaaugggcucuagagac

SEQ ID NO: 1066840 - RNA, 19 nt, Artificial Sequence
  Description of Artificial Sequence: Synthetic oligonucleotide
uucgggucaaacucugaag

SEQ ID NO: 1066841 - RNA, 19 nt, Artificial Sequence
  Description of Artificial Sequence: Synthetic oligonucleotide
uuagagugucgccacuuca

SEQ ID NO: 1066842 - RNA, 19 nt, Artificial Sequence
  Description of Artificial Sequence: Synthetic oligonucleotide
agcauagggaccuggaaau

SEQ ID NO: 1066843 - RNA, 19 nt, Artificial Sequence
  Description of Artificial Sequence: Synthetic oligonucleotide
uucgucacauacuucugga

SEQ ID NO: 1066844 - RNA, 19 nt, Artificial Sequence
  Description of Artificial Sequence: Synthetic oligonucleotide
gagcuuaaggggcugagga

SEQ ID NO: 1066845 - RNA, 19 nt, Artificial Sequence
  Description of Artificial Sequence: Synthetic oligonucleotide
acaguugaauucuuucccu

SEQ ID NO: 1066846 - RNA, 19 nt, Artificial Sequence
  Description of Artificial Sequence: Synthetic oligonucleotide
gacgcgaagaacuguccag

SEQ ID NO: 1066847 - RNA, 19 nt, Artificial Sequence
  Description of Artificial Sequence: Synthetic oligonucleotide
ucggugagucccagcaucg

SEQ ID NO: 1066848 - RNA, 19 nt, Artificial Sequence
  Description of Artificial Sequence: Synthetic oligonucleotide
ucuccgcccgcacugaagc

SEQ ID NO: 1066849 - RNA, 19 nt, Artificial Sequence
  Description of Artificial Sequence: Synthetic oligonucleotide
gacuccuaagugcagcgug

SEQ ID NO: 1066850 - RNA, 19 nt, Artificial Sequence
  Description of Artificial Sequence: Synthetic oligonucleotide
ugcagcguguccuuaugcc

SEQ ID NO: 1066851 - RNA, 19 nt, Artificial Sequence
  Description of Artificial Sequence: Synthetic oligonucleotide
cuaaugggcucuagagacg

SEQ ID NO: 1066852 - RNA, 19 nt, Artificial Sequence
  Description of Artificial Sequence: Synthetic oligonucleotide
uccuuuggagauuggaaaa

SEQ ID NO: 1066853 - RNA, 19 nt, Artificial Sequence
  Description of Artificial Sequence: Synthetic oligonucleotide
uccgcuacuccggagaagc

SEQ ID NO: 1066854 - RNA, 19 nt, Artificial Sequence
  Description of Artificial Sequence: Synthetic oligonucleotide
uaugccaacgaccccuggu

SEQ ID NO: 1066855 - RNA, 19 nt, Artificial Sequence
  Description of Artificial Sequence: Synthetic oligonucleotide
uaguuuggugcagggaccg

SEQ ID NO: 1066856 - RNA, 19 nt, Artificial Sequence
  Description of Artificial Sequence: Synthetic oligonucleotide
augucugcggcaugguguc

SEQ ID NO: 1066857 - RNA, 19 nt, Artificial Sequence
  Description of Artificial Sequence: Synthetic oligonucleotide
accgcucgggaccaugagc

SEQ ID NO: 1066858 - RNA, 19 nt, Artificial Sequence
  Description of Artificial Sequence: Synthetic oligonucleotide
gucgccacuucauucugcg

SEQ ID NO: 1066859 - RNA, 19 nt, Artificial Sequence
  Description of Artificial Sequence: Synthetic oligonucleotide
auagcagacgccucgcuaa

SEQ ID NO: 1066860 - RNA, 19 nt, Artificial Sequence
  Description of Artificial Sequence: Synthetic oligonucleotide
guccuuaugccaacgaccc

SEQ ID NO: 1066861 - RNA, 19 nt, Artificial Sequence
  Description of Artificial Sequence: Synthetic oligonucleotide
ucggucgauuccaaauuug

SEQ ID NO: 1066862 - RNA, 19 nt, Artificial Sequence
  Description of Artificial Sequence: Synthetic oligonucleotide
augaccguaguuuggugca

SEQ ID NO: 1066863 - RNA, 19 nt, Artificial Sequence
  Description of Artificial Sequence: Synthetic oligonucleotide
agagacgcgaagaacuguc

SEQ ID NO: 1066864 - RNA, 19 nt, Artificial Sequence
  Description of Artificial Sequence: Synthetic oligonucleotide
guagccgggugcuggagcg

SEQ ID NO: 1066865 - RNA, 19 nt, Artificial Sequence
  Description of Artificial Sequence: Synthetic oligonucleotide
gaugagggcgcccgcggcg

SEQ ID NO: 1066866 - RNA, 19 nt, Artificial Sequence
  Description of Artificial Sequence: Synthetic oligonucleotide
gaagacaggggcccggcac

SEQ ID NO: 1066867 - RNA, 19 nt, Artificial Sequence
  Description of Artificial Sequence: Synthetic oligonucleotide
acaaaccguaaguaaacua

SEQ ID NO: 1066868 - RNA, 19 nt, Artificial Sequence
  Description of Artificial Sequence: Synthetic oligonucleotide
auaggcagccgagagcggg

SEQ ID NO: 1066869 - RNA, 19 nt, Artificial Sequence
  Description of Artificial Sequence: Synthetic oligonucleotide
caaaauucggucgauucca

SEQ ID NO: 1066870 - RNA, 19 nt, Artificial Sequence
  Description of Artificial Sequence: Synthetic oligonucleotide
gcagggaccgcucaguucc

SEQ ID NO: 1066871 - RNA, 19 nt, Artificial Sequence
  Description of Artificial Sequence: Synthetic oligonucleotide
ggugauaggcagccgagag

SEQ ID NO: 1066872 - RNA, 19 nt, Artificial Sequence
  Description of Artificial Sequence: Synthetic oligonucleotide
uugaugaccguaguuuggu

SEQ ID NO: 1066873 - RNA, 19 nt, Artificial Sequence
  Description of Artificial Sequence: Synthetic oligonucleotide
gauguuggugauaggcagc

SEQ ID NO: 1066874 - RNA, 19 nt, Artificial Sequence
  Description of Artificial Sequence: Synthetic oligonucleotide
guugcugcgggagauguug

SEQ ID NO: 1066875 - RNA, 19 nt, Artificial Sequence
  Description of Artificial Sequence: Synthetic oligonucleotide
uagagugucgccacuucau

SEQ ID NO: 1066876 - RNA, 19 nt, Artificial Sequence
  Description of Artificial Sequence: Synthetic oligonucleotide
aaauucggucgauuccaaa

SEQ ID NO: 1066877 - RNA, 19 nt, Artificial Sequence
  Description of Artificial Sequence: Synthetic oligonucleotide
ugcuucgguagggagaaca

SEQ ID NO: 1066878 - RNA, 19 nt, Artificial Sequence
  Description of Artificial Sequence: Synthetic oligonucleotide
cugcuuucgguucuccgcc

SEQ ID NO: 1066879 - RNA, 19 nt, Artificial Sequence
  Description of Artificial Sequence: Synthetic oligonucleotide
agcgaggugagaucucuca

SEQ ID NO: 1066880 - RNA, 19 nt, Artificial Sequence
  Description of Artificial Sequence: Synthetic oligonucleotide
caaaccguaaguaaacuau

SEQ ID NO: 1066881 - RNA, 19 nt, Artificial Sequence
  Description of Artificial Sequence: Synthetic oligonucleotide
uccuaagugcagcgugucc

SEQ ID NO: 1066882 - RNA, 19 nt, Artificial Sequence
  Description of Artificial Sequence: Synthetic oligonucleotide
auucggucgauuccaaauu

SEQ ID NO: 1066883 - RNA, 19 nt, Artificial Sequence
  Description of Artificial Sequence: Synthetic oligonucleotide
uucggucgauuccaaauuu

SEQ ID NO: 1066884 - RNA, 19 nt, Artificial Sequence
  Description of Artificial Sequence: Synthetic oligonucleotide
uuaugccaacgaccccugg

SEQ ID NO: 1066885 - RNA, 19 nt, Artificial Sequence
  Description of Artificial Sequence: Synthetic oligonucleotide
aaaccguaaguaaacuauu

SEQ ID NO: 1066886 - RNA, 19 nt, Artificial Sequence
  Description of Artificial Sequence: Synthetic oligonucleotide
cuuucugucuggcuucguc

SEQ ID NO: 1066887 - RNA, 19 nt, Artificial Sequence
  Description of Artificial Sequence: Synthetic oligonucleotide
ugaugaccguaguuuggug

SEQ ID NO: 1066888 - RNA, 19 nt, Artificial Sequence
  Description of Artificial Sequence: Synthetic oligonucleotide
agacgcgaagaacugucca

SEQ ID NO: 1066889 - RNA, 19 nt, Artificial Sequence
  Description of Artificial Sequence: Synthetic oligonucleotide
gcagacgccucgcuaaugg

SEQ ID NO: 1066890 - RNA, 19 nt, Artificial Sequence
  Description of Artificial Sequence: Synthetic oligonucleotide
accggggugggacguagcg

SEQ ID NO: 1066891 - RNA, 19 nt, Artificial Sequence
  Description of Artificial Sequence: Synthetic oligonucleotide
cuugaaaggcggcgcggcg

SEQ ID NO: 1066892 - RNA, 19 nt, Artificial Sequence
  Description of Artificial Sequence: Synthetic oligonucleotide
gugauaggcagccgagagc

SEQ ID NO: 1066893 - RNA, 19 nt, Artificial Sequence
  Description of Artificial Sequence: Synthetic oligonucleotide
agauuggaaaagaccgcuc

SEQ ID NO: 1066894 - RNA, 19 nt, Artificial Sequence
  Description of Artificial Sequence: Synthetic oligonucleotide
aaccguaaguaaacuauuu

SEQ ID NO: 1066895 - RNA, 19 nt, Artificial Sequence
  Description of Artificial Sequence: Synthetic oligonucleotide
ugucgccacuucauucugc

SEQ ID NO: 1066896 - RNA, 19 nt, Artificial Sequence
  Description of Artificial Sequence: Synthetic oligonucleotide
ugagaucucucagaguguu

SEQ ID NO: 1066897 - RNA, 19 nt, Artificial Sequence
  Description of Artificial Sequence: Synthetic oligonucleotide
guguccuuaugccaacgac

SEQ ID NO: 1066898 - RNA, 19 nt, Artificial Sequence
  Description of Artificial Sequence: Synthetic oligonucleotide
uccgcccgcacugaagccg

SEQ ID NO: 1066899 - RNA, 19 nt, Artificial Sequence
  Description of Artificial Sequence: Synthetic oligonucleotide
ucgcccucggaacggcugg

SEQ ID NO: 1066900 - RNA, 19 nt, Artificial Sequence
  Description of Artificial Sequence: Synthetic oligonucleotide
gaggcgugcgggugcacgg

SEQ ID NO: 1066901 - RNA, 19 nt, Artificial Sequence
  Description of Artificial Sequence: Synthetic oligonucleotide
agcguguccuuaugccaac

SEQ ID NO: 1066902 - RNA, 19 nt, Artificial Sequence
  Description of Artificial Sequence: Synthetic oligonucleotide
ucucucagaguguugccuu

SEQ ID NO: 1066903 - RNA, 19 nt, Artificial Sequence
  Description of Artificial Sequence: Synthetic oligonucleotide
guaugucugcggcauggug

SEQ ID NO: 1066904 - RNA, 19 nt, Artificial Sequence
  Description of Artificial Sequence: Synthetic oligonucleotide
gugcacggagcccaagugc

SEQ ID NO: 1066905 - RNA, 19 nt, Artificial Sequence
  Description of Artificial Sequence: Synthetic oligonucleotide
gcgaagaacuguccagucg

SEQ ID NO: 1066906 - RNA, 19 nt, Artificial Sequence
  Description of Artificial Sequence: Synthetic oligonucleotide
uucuccgcccgcacugaag

SEQ ID NO: 1066907 - RNA, 19 nt, Artificial Sequence
  Description of Artificial Sequence: Synthetic oligonucleotide
cuuagagugucgccacuuc

SEQ ID NO: 1066908 - RNA, 19 nt, Artificial Sequence
  Description of Artificial Sequence: Synthetic oligonucleotide
ggcggagccgcuauggugg

SEQ ID NO: 1066909 - RNA, 19 nt, Artificial Sequence
  Description of Artificial Sequence: Synthetic oligonucleotide
cuuaugccaacgaccccug

SEQ ID NO: 1066910 - RNA, 19 nt, Artificial Sequence
  Description of Artificial Sequence: Synthetic oligonucleotide
uagcagcgaggugagaucu

SEQ ID NO: 1066911 - RNA, 19 nt, Artificial Sequence
  Description of Artificial Sequence: Synthetic oligonucleotide
cuccuuagagugucgccac

SEQ ID NO: 1066912 - RNA, 19 nt, Artificial Sequence
  Description of Artificial Sequence: Synthetic oligonucleotide
gaccguaguuuggugcagg

SEQ ID NO: 1066913 - RNA, 19 nt, Artificial Sequence
  Description of Artificial Sequence: Synthetic oligonucleotide
uugaaaggcggcgcggcga

SEQ ID NO: 1066914 - RNA, 19 nt, Artificial Sequence
  Description of Artificial Sequence: Synthetic oligonucleotide
aaaccugcaagcggggcuu

SEQ ID NO: 1066915 - RNA, 19 nt, Artificial Sequence
  Description of Artificial Sequence: Synthetic oligonucleotide
ccgcucgggaccaugagcg

SEQ ID NO: 1066916 - RNA, 19 nt, Artificial Sequence
  Description of Artificial Sequence: Synthetic oligonucleotide
ugggacguagcggggaucu

SEQ ID NO: 1066917 - RNA, 19 nt, Artificial Sequence
  Description of Artificial Sequence: Synthetic oligonucleotide
ggugcaccccugcaggacg

SEQ ID NO: 1066918 - RNA, 19 nt, Artificial Sequence
  Description of Artificial Sequence: Synthetic oligonucleotide
gugccaccgagagaggagg

SEQ ID NO: 1066919 - RNA, 19 nt, Artificial Sequence
  Description of Artificial Sequence: Synthetic oligonucleotide
aaaauucggucgauuccaa

SEQ ID NO: 1066920 - RNA, 19 nt, Artificial Sequence
  Description of Artificial Sequence: Synthetic oligonucleotide
gugagucccagcaucgcug

SEQ ID NO: 1066921 - RNA, 19 nt, Artificial Sequence
  Description of Artificial Sequence: Synthetic oligonucleotide
gcuguuggcacuacccgcg

SEQ ID NO: 1066922 - RNA, 19 nt, Artificial Sequence
  Description of Artificial Sequence: Synthetic oligonucleotide
cucuagagacgcgaagaac

SEQ ID NO: 1066923 - RNA, 19 nt, Artificial Sequence
  Description of Artificial Sequence: Synthetic oligonucleotide
cagacgccucgcuaauggg

SEQ ID NO: 1066924 - RNA, 19 nt, Artificial Sequence
  Description of Artificial Sequence: Synthetic oligonucleotide
ccaccagucccucugcugg

SEQ ID NO: 1066925 - RNA, 19 nt, Artificial Sequence
  Description of Artificial Sequence: Synthetic oligonucleotide
gagacgcgaagaacugucc

SEQ ID NO: 1066926 - RNA, 19 nt, Artificial Sequence
  Description of Artificial Sequence: Synthetic oligonucleotide
cuccggagaagccgggaag

SEQ ID NO: 1066927 - RNA, 19 nt, Artificial Sequence
  Description of Artificial Sequence: Synthetic oligonucleotide
ucgccacuucauucugcgg

SEQ ID NO: 1066928 - RNA, 19 nt, Artificial Sequence
  Description of Artificial Sequence: Synthetic oligonucleotide
uagugccaccgagagagga

SEQ ID NO: 1066929 - RNA, 19 nt, Artificial Sequence
  Description of Artificial Sequence: Synthetic oligonucleotide
aguccguucugugucgcug

SEQ ID NO: 1066930 - RNA, 19 nt, Artificial Sequence
  Description of Artificial Sequence: Synthetic oligonucleotide
acuuucgggucaaacucug

SEQ ID NO: 1066931 - RNA, 19 nt, Artificial Sequence
  Description of Artificial Sequence: Synthetic oligonucleotide
uagagacgcgaagaacugu

SEQ ID NO: 1066932 - RNA, 19 nt, Artificial Sequence
  Description of Artificial Sequence: Synthetic oligonucleotide
cagcagggcgcccuagugc

SEQ ID NO: 1066933 - RNA, 19 nt, Artificial Sequence
  Description of Artificial Sequence: Synthetic oligonucleotide
aacgaccccuggugcucgg

SEQ ID NO: 1066934 - RNA, 19 nt, Artificial Sequence
  Description of Artificial Sequence: Synthetic oligonucleotide
aguuuggugcagggaccgc

SEQ ID NO: 1066935 - RNA, 19 nt, Artificial Sequence
  Description of Artificial Sequence: Synthetic oligonucleotide
uccuuagagugucgccacu

SEQ ID NO: 1066936 - RNA, 19 nt, Artificial Sequence
  Description of Artificial Sequence: Synthetic oligonucleotide
uucccuagguccugucuau

SEQ ID NO: 1066937 - RNA, 19 nt, Artificial Sequence
  Description of Artificial Sequence: Synthetic oligonucleotide
agagugucgccacuucauu

SEQ ID NO: 1066938 - RNA, 19 nt, Artificial Sequence
  Description of Artificial Sequence: Synthetic oligonucleotide
cacggagcccaagugcgcg

SEQ ID NO: 1066939 - RNA, 19 nt, Artificial Sequence
  Description of Artificial Sequence: Synthetic oligonucleotide
gcaucggugagucccagca

SEQ ID NO: 1066940 - RNA, 19 nt, Artificial Sequence
  Description of Artificial Sequence: Synthetic oligonucleotide
uguaugucugcggcauggu

SEQ ID NO: 1066941 - RNA, 19 nt, Artificial Sequence
  Description of Artificial Sequence: Synthetic oligonucleotide
cuuucgguucuccgcccgc

SEQ ID NO: 1066942 - RNA, 19 nt, Artificial Sequence
  Description of Artificial Sequence: Synthetic oligonucleotide
ugcgccuccuuagaguguc

SEQ ID NO: 1066943 - RNA, 19 nt, Artificial Sequence
  Description of Artificial Sequence: Synthetic oligonucleotide
ggacguagcggggaucugg

SEQ ID NO: 1066944 - RNA, 19 nt, Artificial Sequence
  Description of Artificial Sequence: Synthetic oligonucleotide
cugaaggcuuuucgcuggc

SEQ ID NO: 1066945 - RNA, 19 nt, Artificial Sequence
  Description of Artificial Sequence: Synthetic oligonucleotide
aggacgcccaccgguuagc

SEQ ID NO: 1066946 - RNA, 19 nt, Artificial Sequence
  Description of Artificial Sequence: Synthetic oligonucleotide
ugaccguaguuuggugcag

SEQ ID NO: 1066947 - RNA, 19 nt, Artificial Sequence
  Description of Artificial Sequence: Synthetic oligonucleotide
guuagcagcgaggugagau

SEQ ID NO: 1066948 - RNA, 19 nt, Artificial Sequence
  Description of Artificial Sequence: Synthetic oligonucleotide
uggugauaggcagccgaga

SEQ ID NO: 1066949 - RNA, 19 nt, Artificial Sequence
  Description of Artificial Sequence: Synthetic oligonucleotide
acggagcccaagugcgcgg

SEQ ID NO: 1066950 - RNA, 19 nt, Artificial Sequence
  Description of Artificial Sequence: Synthetic oligonucleotide
cucgcuaaugggcucuaga

SEQ ID NO: 1066951 - RNA, 19 nt, Artificial Sequence
  Description of Artificial Sequence: Synthetic oligonucleotide
acuacccgcgcccgcguug

SEQ ID NO: 1066952 - RNA, 19 nt, Artificial Sequence
  Description of Artificial Sequence: Synthetic oligonucleotide
uuucgguucuccgcccgca

SEQ ID NO: 1066953 - RNA, 19 nt, Artificial Sequence
  Description of Artificial Sequence: Synthetic oligonucleotide
agcccaagugcgcggugag

SEQ ID NO: 1066954 - RNA, 19 nt, Artificial Sequence
  Description of Artificial Sequence: Synthetic oligonucleotide
ucaguccguucugugucgc

SEQ ID NO: 1066955 - RNA, 19 nt, Artificial Sequence
  Description of Artificial Sequence: Synthetic oligonucleotide
gacgcccaccgguuagcag

SEQ ID NO: 1066956 - RNA, 19 nt, Artificial Sequence
  Description of Artificial Sequence: Synthetic oligonucleotide
uucgguucuccgcccgcac

SEQ ID NO: 1066957 - RNA, 19 nt, Artificial Sequence
  Description of Artificial Sequence: Synthetic oligonucleotide
gagaggcggugucccagcc

SEQ ID NO: 1066958 - RNA, 19 nt, Artificial Sequence
  Description of Artificial Sequence: Synthetic oligonucleotide
cuacuccggagaagccggg

SEQ ID NO: 1066959 - RNA, 19 nt, Artificial Sequence
  Description of Artificial Sequence: Synthetic oligonucleotide
aggugagaucucucagagu

SEQ ID NO: 1066960 - RNA, 19 nt, Artificial Sequence
  Description of Artificial Sequence: Synthetic oligonucleotide
caccgagagaggaggcgag

SEQ ID NO: 1066961 - RNA, 19 nt, Artificial Sequence
  Description of Artificial Sequence: Synthetic oligonucleotide
acuccuaagugcagcgugu

SEQ ID NO: 1066962 - RNA, 19 nt, Artificial Sequence
  Description of Artificial Sequence: Synthetic oligonucleotide
gagaucucucagaguguug

SEQ ID NO: 1066963 - RNA, 19 nt, Artificial Sequence
  Description of Artificial Sequence: Synthetic oligonucleotide
guugguuguugcugcggga

SEQ ID NO: 1066964 - RNA, 19 nt, Artificial Sequence
  Description of Artificial Sequence: Synthetic oligonucleotide
uuaaggggcugaggauagc

SEQ ID NO: 1066965 - RNA, 19 nt, Artificial Sequence
  Description of Artificial Sequence: Synthetic oligonucleotide
cccaagugcgcggugaggg

SEQ ID NO: 1066966 - RNA, 19 nt, Artificial Sequence
  Description of Artificial Sequence: Synthetic oligonucleotide
gaccgcucgggaccaugag

SEQ ID NO: 1066967 - RNA, 19 nt, Artificial Sequence
  Description of Artificial Sequence: Synthetic oligonucleotide
accgagagaggaggcgagg

SEQ ID NO: 1066968 - RNA, 19 nt, Artificial Sequence
  Description of Artificial Sequence: Synthetic oligonucleotide
cacagcauagggaccugga

SEQ ID NO: 1066969 - RNA, 19 nt, Artificial Sequence
  Description of Artificial Sequence: Synthetic oligonucleotide
gcccuagugccaccgagag

SEQ ID NO: 1066970 - RNA, 19 nt, Artificial Sequence
  Description of Artificial Sequence: Synthetic oligonucleotide
gcggaggccuugaugaccg

SEQ ID NO: 1066971 - RNA, 19 nt, Artificial Sequence
  Description of Artificial Sequence: Synthetic oligonucleotide
caggacgcccaccgguuag

SEQ ID NO: 1066972 - RNA, 19 nt, Artificial Sequence
  Description of Artificial Sequence: Synthetic oligonucleotide
gaaccacaccuucaccugu

SEQ ID NO: 1066973 - RNA, 19 nt, Artificial Sequence
  Description of Artificial Sequence: Synthetic oligonucleotide
gcgaggugagaucucucag

SEQ ID NO: 1066974 - RNA, 19 nt, Artificial Sequence
  Description of Artificial Sequence: Synthetic oligonucleotide
uggugcgcggggagcagcu

SEQ ID NO: 1066975 - RNA, 19 nt, Artificial Sequence
  Description of Artificial Sequence: Synthetic oligonucleotide
cccgcacugaagccgaggg

SEQ ID NO: 1066976 - RNA, 19 nt, Artificial Sequence
  Description of Artificial Sequence: Synthetic oligonucleotide
caguugaauucuuucccua

SEQ ID NO: 1066977 - RNA, 19 nt, Artificial Sequence
  Description of Artificial Sequence: Synthetic oligonucleotide
gcuuucgguucuccgcccg

SEQ ID NO: 1066978 - RNA, 19 nt, Artificial Sequence
  Description of Artificial Sequence: Synthetic oligonucleotide
uagcagacgccucgcuaau

SEQ ID NO: 1066979 - RNA, 19 nt, Artificial Sequence
  Description of Artificial Sequence: Synthetic oligonucleotide
accgguuagcagcgaggug

SEQ ID NO: 1066980 - RNA, 19 nt, Artificial Sequence
  Description of Artificial Sequence: Synthetic oligonucleotide
guuggagcuuaaggggcug

SEQ ID NO: 1066981 - RNA, 19 nt, Artificial Sequence
  Description of Artificial Sequence: Synthetic oligonucleotide
gguagccgggugcuggagc

SEQ ID NO: 1066982 - RNA, 19 nt, Artificial Sequence
  Description of Artificial Sequence: Synthetic oligonucleotide
gacuuucgggucaaacucu

SEQ ID NO: 1066983 - RNA, 19 nt, Artificial Sequence
  Description of Artificial Sequence: Synthetic oligonucleotide
ggaggcgguagccgggugc

SEQ ID NO: 1066984 - RNA, 19 nt, Artificial Sequence
  Description of Artificial Sequence: Synthetic oligonucleotide
acgccucgcuaaugggcuc

SEQ ID NO: 1066985 - RNA, 19 nt, Artificial Sequence
  Description of Artificial Sequence: Synthetic oligonucleotide
caacgaccccuggugcucg

SEQ ID NO: 1066986 - RNA, 19 nt, Artificial Sequence
  Description of Artificial Sequence: Synthetic oligonucleotide
gcagcguguccuuaugcca

SEQ ID NO: 1066987 - RNA, 19 nt, Artificial Sequence
  Description of Artificial Sequence: Synthetic oligonucleotide
gccgggacuucugaaggcg

SEQ ID NO: 1066988 - RNA, 19 nt, Artificial Sequence
  Description of Artificial Sequence: Synthetic oligonucleotide
gcgucccugaagccggugg

SEQ ID NO: 1066989 - RNA, 19 nt, Artificial Sequence
  Description of Artificial Sequence: Synthetic oligonucleotide
cuuucgggucaaacucuga

SEQ ID NO: 1066990 - RNA, 19 nt, Artificial Sequence
  Description of Artificial Sequence: Synthetic oligonucleotide
ccgguuagcagcgagguga

SEQ ID NO: 1066991 - RNA, 19 nt, Artificial Sequence
  Description of Artificial Sequence: Synthetic oligonucleotide
uacuccggagaagccggga

SEQ ID NO: 1066992 - RNA, 19 nt, Artificial Sequence
  Description of Artificial Sequence: Synthetic oligonucleotide
ccaccgguuagcagcgagg

SEQ ID NO: 1066993 - RNA, 19 nt, Artificial Sequence
  Description of Artificial Sequence: Synthetic oligonucleotide
ggcgguagccgggugcugg

SEQ ID NO: 1066994 - RNA, 19 nt, Artificial Sequence
  Description of Artificial Sequence: Synthetic oligonucleotide
acguagcggggaucuggug

SEQ ID NO: 1066995 - RNA, 19 nt, Artificial Sequence
  Description of Artificial Sequence: Synthetic oligonucleotide
gcuugaaaggcggcgcggc

SEQ ID NO: 1066996 - RNA, 19 nt, Artificial Sequence
  Description of Artificial Sequence: Synthetic oligonucleotide
gcuuaaggggcugaggaua

SEQ ID NO: 1066997 - RNA, 19 nt, Artificial Sequence
  Description of Artificial Sequence: Synthetic oligonucleotide
ggagaggcggugucccagc

SEQ ID NO: 1066998 - RNA, 19 nt, Artificial Sequence
  Description of Artificial Sequence: Synthetic oligonucleotide
gaacggcugggacuucucu

SEQ ID NO: 1066999 - RNA, 19 nt, Artificial Sequence
  Description of Artificial Sequence: Synthetic oligonucleotide
ggcuugaaaggcggcgcgg

SEQ ID NO: 1067000 - RNA, 19 nt, Artificial Sequence
  Description of Artificial Sequence: Synthetic oligonucleotide
caagcccggucugcuuucg

SEQ ID NO: 1067001 - RNA, 19 nt, Artificial Sequence
  Description of Artificial Sequence: Synthetic oligonucleotide
cuccgcccgcacugaagcc

SEQ ID NO: 1067002 - RNA, 19 nt, Artificial Sequence
  Description of Artificial Sequence: Synthetic oligonucleotide
gagcccaagugcgcgguga

SEQ ID NO: 1067003 - RNA, 19 nt, Artificial Sequence
  Description of Artificial Sequence: Synthetic oligonucleotide
agcagcgaggugagaucuc

SEQ ID NO: 1067004 - RNA, 19 nt, Artificial Sequence
  Description of Artificial Sequence: Synthetic oligonucleotide
agcagacgccucgcuaaug

SEQ ID NO: 1067005 - RNA, 19 nt, Artificial Sequence
  Description of Artificial Sequence: Synthetic oligonucleotide
gcuacccaggcugcuggcg

SEQ ID NO: 1067006 - RNA, 19 nt, Artificial Sequence
  Description of Artificial Sequence: Synthetic oligonucleotide
uuguuggggcugcguuggu

SEQ ID NO: 1067007 - RNA, 19 nt, Artificial Sequence
  Description of Artificial Sequence: Synthetic oligonucleotide
gacagccgcugaggaaagc

SEQ ID NO: 1067008 - RNA, 19 nt, Artificial Sequence
  Description of Artificial Sequence: Synthetic oligonucleotide
gcugcuucgguagggagaa

SEQ ID NO: 1067009 - RNA, 19 nt, Artificial Sequence
  Description of Artificial Sequence: Synthetic oligonucleotide
gcgacuguuguuggggcug

SEQ ID NO: 1067010 - RNA, 19 nt, Artificial Sequence
  Description of Artificial Sequence: Synthetic oligonucleotide
gcggcgagcgcgcuccccg

SEQ ID NO: 1067011 - RNA, 19 nt, Artificial Sequence
  Description of Artificial Sequence: Synthetic oligonucleotide
agcgacgaggcgggcgcgg

SEQ ID NO: 1067012 - RNA, 19 nt, Artificial Sequence
  Description of Artificial Sequence: Synthetic oligonucleotide
ggcggaggccuugaugacc

SEQ ID NO: 1067013 - RNA, 19 nt, Artificial Sequence
  Description of Artificial Sequence: Synthetic oligonucleotide
cagggaccgcucaguuccc

SEQ ID NO: 1067014 - RNA, 19 nt, Artificial Sequence
  Description of Artificial Sequence: Synthetic oligonucleotide
agcccgcccgagguggagg

SEQ ID NO: 1067015 - RNA, 19 nt, Artificial Sequence
  Description of Artificial Sequence: Synthetic oligonucleotide
cagcgaggugagaucucuc

SEQ ID NO: 1067016 - RNA, 19 nt, Artificial Sequence
  Description of Artificial Sequence: Synthetic oligonucleotide
ugccgccaaggcuguuggc

SEQ ID NO: 1067017 - RNA, 19 nt, Artificial Sequence
  Description of Artificial Sequence: Synthetic oligonucleotide
ccaagugcgcggugagggc

SEQ ID NO: 1067018 - RNA, 19 nt, Artificial Sequence
  Description of Artificial Sequence: Synthetic oligonucleotide
cacccgcgucccugaagcc

SEQ ID NO: 1067019 - RNA, 19 nt, Artificial Sequence
  Description of Artificial Sequence: Synthetic oligonucleotide
gacguagcggggaucuggu

SEQ ID NO: 1067020 - RNA, 19 nt, Artificial Sequence
  Description of Artificial Sequence: Synthetic oligonucleotide
cuggugcgcggggagcagc

SEQ ID NO: 1067021 - RNA, 19 nt, Artificial Sequence
  Description of Artificial Sequence: Synthetic oligonucleotide
ccgcuacccaggcugcugg

SEQ ID NO: 1067022 - RNA, 19 nt, Artificial Sequence
  Description of Artificial Sequence: Synthetic oligonucleotide
ccgggacuucugaaggcgc

SEQ ID NO: 1067023 - RNA, 19 nt, Artificial Sequence
  Description of Artificial Sequence: Synthetic oligonucleotide
ggugagucccagcaucgcu

SEQ ID NO: 1067024 - RNA, 19 nt, Artificial Sequence
  Description of Artificial Sequence: Synthetic oligonucleotide
cgggcgcuccuccugaagg

SEQ ID NO: 1067025 - RNA, 19 nt, Artificial Sequence
  Description of Artificial Sequence: Synthetic oligonucleotide
ccgagagcggggacagccg

SEQ ID NO: 1067026 - RNA, 19 nt, Artificial Sequence
  Description of Artificial Sequence: Synthetic oligonucleotide
cuccgcuacuccggagaag

SEQ ID NO: 1067027 - RNA, 19 nt, Artificial Sequence
  Description of Artificial Sequence: Synthetic oligonucleotide
gcgcccuagugccaccgag

SEQ ID NO: 1067028 - RNA, 19 nt, Artificial Sequence
  Description of Artificial Sequence: Synthetic oligonucleotide
gugcaccccugcaggacgc

SEQ ID NO: 1067029 - RNA, 19 nt, Artificial Sequence
  Description of Artificial Sequence: Synthetic oligonucleotide
gccgccaaggcuguuggca

SEQ ID NO: 1067030 - RNA, 19 nt, Artificial Sequence
  Description of Artificial Sequence: Synthetic oligonucleotide
caggugcaccccugcagga

SEQ ID NO: 1067031 - RNA, 19 nt, Artificial Sequence
  Description of Artificial Sequence: Synthetic oligonucleotide
ccgccaaggcuguuggcac

SEQ ID NO: 1067032 - RNA, 19 nt, Artificial Sequence
  Description of Artificial Sequence: Synthetic oligonucleotide
ggcccggucgccucccgcc

SEQ ID NO: 1067033 - RNA, 19 nt, Artificial Sequence
  Description of Artificial Sequence: Synthetic oligonucleotide
gagcgacgaggcgggcgcg

SEQ ID NO: 1067034 - RNA, 19 nt, Artificial Sequence
  Description of Artificial Sequence: Synthetic oligonucleotide
cgugcgggugcacggagcc

SEQ ID NO: 1067035 - RNA, 19 nt, Artificial Sequence
  Description of Artificial Sequence: Synthetic oligonucleotide
caccggggugggacguagc

SEQ ID NO: 1067036 - RNA, 19 nt, Artificial Sequence
  Description of Artificial Sequence: Synthetic oligonucleotide
cggucgauuccaaauuuga

SEQ ID NO: 1067037 - RNA, 19 nt, Artificial Sequence
  Description of Artificial Sequence: Synthetic oligonucleotide
ccaugagcgcuuccucuug

SEQ ID NO: 1067038 - RNA, 19 nt, Artificial Sequence
  Description of Artificial Sequence: Synthetic oligonucleotide
gcccuuccuuuggagauug

SEQ ID NO: 1067039 - RNA, 19 nt, Artificial Sequence
  Description of Artificial Sequence: Synthetic oligonucleotide
gcggggacagccgcugagg

SEQ ID NO: 1067040 - RNA, 19 nt, Artificial Sequence
  Description of Artificial Sequence: Synthetic oligonucleotide
ucccuagguccugucuaua

SEQ ID NO: 1067041 - RNA, 19 nt, Artificial Sequence
  Description of Artificial Sequence: Synthetic oligonucleotide
gggaccacccgcgucccug

SEQ ID NO: 1067042 - RNA, 19 nt, Artificial Sequence
  Description of Artificial Sequence: Synthetic oligonucleotide
ccuuaugccaacgaccccu

SEQ ID NO: 1067043 - RNA, 19 nt, Artificial Sequence
  Description of Artificial Sequence: Synthetic oligonucleotide
ccgucaaacacuucacagu

SEQ ID NO: 1067044 - RNA, 19 nt, Artificial Sequence
  Description of Artificial Sequence: Synthetic oligonucleotide
cuaagugcagcguguccuu

SEQ ID NO: 1067045 - RNA, 19 nt, Artificial Sequence
  Description of Artificial Sequence: Synthetic oligonucleotide
ccaguucgcccucggcggg

SEQ ID NO: 1067046 - RNA, 19 nt, Artificial Sequence
  Description of Artificial Sequence: Synthetic oligonucleotide
ccugcaagcggggcuuggg

SEQ ID NO: 1067047 - RNA, 19 nt, Artificial Sequence
  Description of Artificial Sequence: Synthetic oligonucleotide
caguucgcccucggcgggc

SEQ ID NO: 1067048 - RNA, 19 nt, Artificial Sequence
  Description of Artificial Sequence: Synthetic oligonucleotide
gcguguccuuaugccaacg

SEQ ID NO: 1067049 - RNA, 19 nt, Artificial Sequence
  Description of Artificial Sequence: Synthetic oligonucleotide
gugcaucggugagucccag

SEQ ID NO: 1067050 - RNA, 19 nt, Artificial Sequence
  Description of Artificial Sequence: Synthetic oligonucleotide
ccgcguugccgcuacccag

SEQ ID NO: 1067051 - RNA, 19 nt, Artificial Sequence
  Description of Artificial Sequence: Synthetic oligonucleotide
gaggcgguagccgggugcu

SEQ ID NO: 1067052 - RNA, 19 nt, Artificial Sequence
  Description of Artificial Sequence: Synthetic oligonucleotide
ccuagguccugucuauaaa

SEQ ID NO: 1067053 - RNA, 19 nt, Artificial Sequence
  Description of Artificial Sequence: Synthetic oligonucleotide
gccuugaugaccguaguuu

SEQ ID NO: 1067054 - RNA, 19 nt, Artificial Sequence
  Description of Artificial Sequence: Synthetic oligonucleotide
agccaagcccggucugcuu

SEQ ID NO: 1067055 - RNA, 19 nt, Artificial Sequence
  Description of Artificial Sequence: Synthetic oligonucleotide
ccuaagugcagcguguccu

SEQ ID NO: 1067056 - RNA, 19 nt, Artificial Sequence
  Description of Artificial Sequence: Synthetic oligonucleotide
cgcuaaugggcucuagaga

SEQ ID NO: 1067057 - RNA, 19 nt, Artificial Sequence
  Description of Artificial Sequence: Synthetic oligonucleotide
gcggagccgcuaugguggg

SEQ ID NO: 1067058 - RNA, 19 nt, Artificial Sequence
  Description of Artificial Sequence: Synthetic oligonucleotide
ccaccaccggggugggacg

SEQ ID NO: 1067059 - RNA, 19 nt, Artificial Sequence
  Description of Artificial Sequence: Synthetic oligonucleotide
caccgguuagcagcgaggu

SEQ ID NO: 1067060 - RNA, 19 nt, Artificial Sequence
  Description of Artificial Sequence: Synthetic oligonucleotide
uagccgggugcuggagcga

SEQ ID NO: 1067061 - RNA, 19 nt, Artificial Sequence
  Description of Artificial Sequence: Synthetic oligonucleotide
gugcucggaggaacaguuc

SEQ ID NO: 1067062 - RNA, 19 nt, Artificial Sequence
  Description of Artificial Sequence: Synthetic oligonucleotide
gcgagcgcgcuccccgcgg

SEQ ID NO: 1067063 - RNA, 19 nt, Artificial Sequence
  Description of Artificial Sequence: Synthetic oligonucleotide
cgguuagcagcgaggugag

SEQ ID NO: 1067064 - RNA, 19 nt, Artificial Sequence
  Description of Artificial Sequence: Synthetic oligonucleotide
guucuccgcccgcacugaa

SEQ ID NO: 1067065 - RNA, 19 nt, Artificial Sequence
  Description of Artificial Sequence: Synthetic oligonucleotide
gucugcggcaugguguccu

SEQ ID NO: 1067066 - RNA, 19 nt, Artificial Sequence
  Description of Artificial Sequence: Synthetic oligonucleotide
ccgcacugaagccgagggc

SEQ ID NO: 1067067 - RNA, 19 nt, Artificial Sequence
  Description of Artificial Sequence: Synthetic oligonucleotide
agggaccgcucaguucccu

SEQ ID NO: 1067068 - RNA, 19 nt, Artificial Sequence
  Description of Artificial Sequence: Synthetic oligonucleotide
gggaccaugagcgcuuccu

SEQ ID NO: 1067069 - RNA, 19 nt, Artificial Sequence
  Description of Artificial Sequence: Synthetic oligonucleotide
cgcgaagaacuguccaguc

SEQ ID NO: 1067070 - RNA, 19 nt, Artificial Sequence
  Description of Artificial Sequence: Synthetic oligonucleotide
ggagcccaagugcgcggug

SEQ ID NO: 1067071 - RNA, 19 nt, Artificial Sequence
  Description of Artificial Sequence: Synthetic oligonucleotide
cccuagguccugucuauaa

SEQ ID NO: 1067072 - RNA, 19 nt, Artificial Sequence
  Description of Artificial Sequence: Synthetic oligonucleotide
gguuggagcuuaaggggcu

SEQ ID NO: 1067073 - RNA, 19 nt, Artificial Sequence
  Description of Artificial Sequence: Synthetic oligonucleotide
gcuccccgcggggaggagg

SEQ ID NO: 1067074 - RNA, 19 nt, Artificial Sequence
  Description of Artificial Sequence: Synthetic oligonucleotide
uacccgcgcccgcguugcc

SEQ ID NO: 1067075 - RNA, 19 nt, Artificial Sequence
  Description of Artificial Sequence: Synthetic oligonucleotide
ccaacgaccccuggugcuc

SEQ ID NO: 1067076 - RNA, 19 nt, Artificial Sequence
  Description of Artificial Sequence: Synthetic oligonucleotide
uggggcugcguugguuguu

SEQ ID NO: 1067077 - RNA, 19 nt, Artificial Sequence
  Description of Artificial Sequence: Synthetic oligonucleotide
gcccaagugcgcggugagg

SEQ ID NO: 1067078 - RNA, 19 nt, Artificial Sequence
  Description of Artificial Sequence: Synthetic oligonucleotide
gcguugccgcuacccaggc

SEQ ID NO: 1067079 - RNA, 19 nt, Artificial Sequence
  Description of Artificial Sequence: Synthetic oligonucleotide
ccggggugggacguagcgg

SEQ ID NO: 1067080 - RNA, 19 nt, Artificial Sequence
  Description of Artificial Sequence: Synthetic oligonucleotide
ccaagcccggucugcuuuc

SEQ ID NO: 1067081 - RNA, 19 nt, Artificial Sequence
  Description of Artificial Sequence: Synthetic oligonucleotide
gugcgggugcacggagccc

SEQ ID NO: 1067082 - RNA, 19 nt, Artificial Sequence
  Description of Artificial Sequence: Synthetic oligonucleotide
gugggacguagcggggauc

SEQ ID NO: 1067083 - RNA, 19 nt, Artificial Sequence
  Description of Artificial Sequence: Synthetic oligonucleotide
gcuccgcuacuccggagaa

SEQ ID NO: 1067084 - RNA, 19 nt, Artificial Sequence
  Description of Artificial Sequence: Synthetic oligonucleotide
ccgcuacuccggagaagcc

SEQ ID NO: 1067085 - RNA, 19 nt, Artificial Sequence
  Description of Artificial Sequence: Synthetic oligonucleotide
gggugcacggagcccaagu

SEQ ID NO: 1067086 - RNA, 19 nt, Artificial Sequence
  Description of Artificial Sequence: Synthetic oligonucleotide
guucgcccucggcgggcgc

SEQ ID NO: 1067087 - RNA, 19 nt, Artificial Sequence
  Description of Artificial Sequence: Synthetic oligonucleotide
gagagcggggacagccgcu

SEQ ID NO: 1067088 - RNA, 19 nt, Artificial Sequence
  Description of Artificial Sequence: Synthetic oligonucleotide
ccaccgagagaggaggcga

SEQ ID NO: 1067089 - RNA, 19 nt, Artificial Sequence
  Description of Artificial Sequence: Synthetic oligonucleotide
gcccgcguugccgcuaccc

SEQ ID NO: 1067090 - RNA, 19 nt, Artificial Sequence
  Description of Artificial Sequence: Synthetic oligonucleotide
acgaccccuggugcucgga

SEQ ID NO: 1067091 - RNA, 19 nt, Artificial Sequence
  Description of Artificial Sequence: Synthetic oligonucleotide
gccugcgccuccuuagagu

SEQ ID NO: 1067092 - RNA, 19 nt, Artificial Sequence
  Description of Artificial Sequence: Synthetic oligonucleotide
gaccacccgcgucccugaa

SEQ ID NO: 1067093 - RNA, 19 nt, Artificial Sequence
  Description of Artificial Sequence: Synthetic oligonucleotide
gguucuccgcccgcacuga

SEQ ID NO: 1067094 - RNA, 19 nt, Artificial Sequence
  Description of Artificial Sequence: Synthetic oligonucleotide
caucggugagucccagcau

SEQ ID NO: 1067095 - RNA, 19 nt, Artificial Sequence
  Description of Artificial Sequence: Synthetic oligonucleotide
gcggggcuugggcaggcuc

SEQ ID NO: 1067096 - RNA, 19 nt, Artificial Sequence
  Description of Artificial Sequence: Synthetic oligonucleotide
ggugggacguagcggggau

SEQ ID NO: 1067097 - RNA, 19 nt, Artificial Sequence
  Description of Artificial Sequence: Synthetic oligonucleotide
cggggagaggcgguguccc

SEQ ID NO: 1067098 - RNA, 19 nt, Artificial Sequence
  Description of Artificial Sequence: Synthetic oligonucleotide
cgaccccuggugcucggag

SEQ ID NO: 1067099 - RNA, 19 nt, Artificial Sequence
  Description of Artificial Sequence: Synthetic oligonucleotide
ccgcucgcacugccgcugg

SEQ ID NO: 1067100 - RNA, 19 nt, Artificial Sequence
  Description of Artificial Sequence: Synthetic oligonucleotide
aggcgguagccgggugcug

SEQ ID NO: 1067101 - RNA, 19 nt, Artificial Sequence
  Description of Artificial Sequence: Synthetic oligonucleotide
gcgguagccgggugcugga

SEQ ID NO: 1067102 - RNA, 19 nt, Artificial Sequence
  Description of Artificial Sequence: Synthetic oligonucleotide
ucggaacggcugggacuuc

SEQ ID NO: 1067103 - RNA, 19 nt, Artificial Sequence
  Description of Artificial Sequence: Synthetic oligonucleotide
ggacgcccaccgguuagca

SEQ ID NO: 1067104 - RNA, 19 nt, Artificial Sequence
  Description of Artificial Sequence: Synthetic oligonucleotide
cgccuccuuagagugucgc

SEQ ID NO: 1067105 - RNA, 19 nt, Artificial Sequence
  Description of Artificial Sequence: Synthetic oligonucleotide
cugcuucgguagggagaac

SEQ ID NO: 1067106 - RNA, 19 nt, Artificial Sequence
  Description of Artificial Sequence: Synthetic oligonucleotide
gccaagcccggucugcuuu

SEQ ID NO: 1067107 - RNA, 19 nt, Artificial Sequence
  Description of Artificial Sequence: Synthetic oligonucleotide
gcgccugcgccuccuuaga

SEQ ID NO: 1067108 - RNA, 19 nt, Artificial Sequence
  Description of Artificial Sequence: Synthetic oligonucleotide
gccgggugcuggagcgacg

SEQ ID NO: 1067109 - RNA, 19 nt, Artificial Sequence
  Description of Artificial Sequence: Synthetic oligonucleotide
cgcucgggaccaugagcgc

SEQ ID NO: 1067110 - RNA, 19 nt, Artificial Sequence
  Description of Artificial Sequence: Synthetic oligonucleotide
caccugugcaucggugagu

SEQ ID NO: 1067111 - RNA, 19 nt, Artificial Sequence
  Description of Artificial Sequence: Synthetic oligonucleotide
gggacguagcggggaucug

SEQ ID NO: 1067112 - RNA, 19 nt, Artificial Sequence
  Description of Artificial Sequence: Synthetic oligonucleotide
ccucgcuaaugggcucuag

SEQ ID NO: 1067113 - RNA, 19 nt, Artificial Sequence
  Description of Artificial Sequence: Synthetic oligonucleotide
gcgccuccuuagagugucg

SEQ ID NO: 1067114 - RNA, 19 nt, Artificial Sequence
  Description of Artificial Sequence: Synthetic oligonucleotide
ggacuccuaagugcagcgu

SEQ ID NO: 1067115 - RNA, 19 nt, Artificial Sequence
  Description of Artificial Sequence: Synthetic oligonucleotide
cugcgccuccuuagagugu

SEQ ID NO: 1067116 - RNA, 19 nt, Artificial Sequence
  Description of Artificial Sequence: Synthetic oligonucleotide
gcgacgaggcgggcgcggc

SEQ ID NO: 1067117 - RNA, 19 nt, Artificial Sequence
  Description of Artificial Sequence: Synthetic oligonucleotide
ggcgcccuagugccaccga

SEQ ID NO: 1067118 - RNA, 19 nt, Artificial Sequence
  Description of Artificial Sequence: Synthetic oligonucleotide
cgagcgcgcuccccgcggg

SEQ ID NO: 1067119 - RNA, 19 nt, Artificial Sequence
  Description of Artificial Sequence: Synthetic oligonucleotide
cgcccuagugccaccgaga

SEQ ID NO: 1067120 - RNA, 19 nt, Artificial Sequence
  Description of Artificial Sequence: Synthetic oligonucleotide
gccucgcccucggaacggc

SEQ ID NO: 1067121 - RNA, 19 nt, Artificial Sequence
  Description of Artificial Sequence: Synthetic oligonucleotide
ccgggugcuggagcgacga

SEQ ID NO: 1067122 - RNA, 19 nt, Artificial Sequence
  Description of Artificial Sequence: Synthetic oligonucleotide
ccgcccgcacugaagccga

SEQ ID NO: 1067123 - RNA, 19 nt, Artificial Sequence
  Description of Artificial Sequence: Synthetic oligonucleotide
cccuagugccaccgagaga

SEQ ID NO: 1067124 - RNA, 19 nt, Artificial Sequence
  Description of Artificial Sequence: Synthetic oligonucleotide
caccgcucgcacugccgcu

SEQ ID NO: 1067125 - RNA, 19 nt, Artificial Sequence
  Description of Artificial Sequence: Synthetic oligonucleotide
ggggcggagccgcuauggu

SEQ ID NO: 1067126 - RNA, 19 nt, Artificial Sequence
  Description of Artificial Sequence: Synthetic oligonucleotide
cucggcgggcgcuccuccu

SEQ ID NO: 1067127 - RNA, 19 nt, Artificial Sequence
  Description of Artificial Sequence: Synthetic oligonucleotide
cggggacagccgcugagga

SEQ ID NO: 1067128 - RNA, 19 nt, Artificial Sequence
  Description of Artificial Sequence: Synthetic oligonucleotide
gcggcaugguguccuuggu

SEQ ID NO: 1067129 - RNA, 19 nt, Artificial Sequence
  Description of Artificial Sequence: Synthetic oligonucleotide
gcccggucgccucccgcca

SEQ ID NO: 1067130 - RNA, 19 nt, Artificial Sequence
  Description of Artificial Sequence: Synthetic oligonucleotide
gggcgcccgcggcggaggc

SEQ ID NO: 1067131 - RNA, 19 nt, Artificial Sequence
  Description of Artificial Sequence: Synthetic oligonucleotide
cccggucgccucccgccac

SEQ ID NO: 1067132 - RNA, 19 nt, Artificial Sequence
  Description of Artificial Sequence: Synthetic oligonucleotide
caccaccggggugggacgu

SEQ ID NO: 1067133 - RNA, 19 nt, Artificial Sequence
  Description of Artificial Sequence: Synthetic oligonucleotide
ggagcccgcccgaggugga

SEQ ID NO: 1067134 - RNA, 19 nt, Artificial Sequence
  Description of Artificial Sequence: Synthetic oligonucleotide
gcgcggugagggcggcgga

SEQ ID NO: 1067135 - RNA, 19 nt, Artificial Sequence
  Description of Artificial Sequence: Synthetic oligonucleotide
cggagccgcuauggugggg

SEQ ID NO: 1067136 - RNA, 19 nt, Artificial Sequence
  Description of Artificial Sequence: Synthetic oligonucleotide
gccucgcuaaugggcucua

SEQ ID NO: 1067137 - RNA, 19 nt, Artificial Sequence
  Description of Artificial Sequence: Synthetic oligonucleotide
cgcccgcacugaagccgag

SEQ ID NO: 1067138 - RNA, 19 nt, Artificial Sequence
  Description of Artificial Sequence: Synthetic oligonucleotide
gcgcggcgagcgcgcuccc

SEQ ID NO: 1067139 - RNA, 19 nt, Artificial Sequence
  Description of Artificial Sequence: Synthetic oligonucleotide
cggcgggcgcuccuccuga

SEQ ID NO: 1067140 - RNA, 19 nt, Artificial Sequence
  Description of Artificial Sequence: Synthetic oligonucleotide
gcgggugcacggagcccaa

SEQ ID NO: 1067141 - RNA, 19 nt, Artificial Sequence
  Description of Artificial Sequence: Synthetic oligonucleotide
cgcgucccugaagccggug

SEQ ID NO: 1067142 - RNA, 19 nt, Artificial Sequence
  Description of Artificial Sequence: Synthetic oligonucleotide
cggaacggcugggacuucu

SEQ ID NO: 1067143 - RNA, 19 nt, Artificial Sequence
  Description of Artificial Sequence: Synthetic oligonucleotide
gcccaccgguuagcagcga

SEQ ID NO: 1067144 - RNA, 19 nt, Artificial Sequence
  Description of Artificial Sequence: Synthetic oligonucleotide
cguugccgcuacccaggcu

SEQ ID NO: 1067145 - RNA, 19 nt, Artificial Sequence
  Description of Artificial Sequence: Synthetic oligonucleotide
cgcccgcguugccgcuacc

SEQ ID NO: 1067146 - RNA, 19 nt, Artificial Sequence
  Description of Artificial Sequence: Synthetic oligonucleotide
cggagcccaagugcgcggu

SEQ ID NO: 1067147 - RNA, 19 nt, Artificial Sequence
  Description of Artificial Sequence: Synthetic oligonucleotide
gcgcggccucgcuccgcua

SEQ ID NO: 1067148 - RNA, 19 nt, Artificial Sequence
  Description of Artificial Sequence: Synthetic oligonucleotide
gcggcgcggcgagcgcgcu

SEQ ID NO: 1067149 - RNA, 19 nt, Artificial Sequence
  Description of Artificial Sequence: Synthetic oligonucleotide
aauagagcggaucaucagc

SEQ ID NO: 1067150 - RNA, 19 nt, Artificial Sequence
  Description of Artificial Sequence: Synthetic oligonucleotide
uuaagugaacugcagaugg

SEQ ID NO: 1067151 - RNA, 19 nt, Artificial Sequence
  Description of Artificial Sequence: Synthetic oligonucleotide
ucaaucuugagcaaggggc

SEQ ID NO: 1067152 - RNA, 19 nt, Artificial Sequence
  Description of Artificial Sequence: Synthetic oligonucleotide
ucgauugugacaaagucag

SEQ ID NO: 1067153 - RNA, 19 nt, Artificial Sequence
  Description of Artificial Sequence: Synthetic oligonucleotide
uuuaacacaaucacaggcc

SEQ ID NO: 1067154 - RNA, 19 nt, Artificial Sequence
  Description of Artificial Sequence: Synthetic oligonucleotide
aaccuugagagcaaucucc

SEQ ID NO: 1067155 - RNA, 19 nt, Artificial Sequence
  Description of Artificial Sequence: Synthetic oligonucleotide
aucuaggucagccuugagc

SEQ ID NO: 1067156 - RNA, 19 nt, Artificial Sequence
  Description of Artificial Sequence: Synthetic oligonucleotide
gaggucauaaugcacgcgg

SEQ ID NO: 1067157 - RNA, 19 nt, Artificial Sequence
  Description of Artificial Sequence: Synthetic oligonucleotide
uuaacacaaucacaggccc

SEQ ID NO: 1067158 - RNA, 19 nt, Artificial Sequence
  Description of Artificial Sequence: Synthetic oligonucleotide
gauaugucggauaaggaug

SEQ ID NO: 1067159 - RNA, 19 nt, Artificial Sequence
  Description of Artificial Sequence: Synthetic oligonucleotide
aaagguacggaagcacucc

SEQ ID NO: 1067160 - RNA, 19 nt, Artificial Sequence
  Description of Artificial Sequence: Synthetic oligonucleotide
ugagccauaguuucuugcg

SEQ ID NO: 1067161 - RNA, 19 nt, Artificial Sequence
  Description of Artificial Sequence: Synthetic oligonucleotide
uugagcaaggggcagcugg

SEQ ID NO: 1067162 - RNA, 19 nt, Artificial Sequence
  Description of Artificial Sequence: Synthetic oligonucleotide
ucagcgugaaacauguggc

SEQ ID NO: 1067163 - RNA, 19 nt, Artificial Sequence
  Description of Artificial Sequence: Synthetic oligonucleotide
aaagacggaacaccaacca

SEQ ID NO: 1067164 - RNA, 19 nt, Artificial Sequence
  Description of Artificial Sequence: Synthetic oligonucleotide
cuauaguucaccagggcag

SEQ ID NO: 1067165 - RNA, 19 nt, Artificial Sequence
  Description of Artificial Sequence: Synthetic oligonucleotide
aagacggaacaccaaccac

SEQ ID NO: 1067166 - RNA, 19 nt, Artificial Sequence
  Description of Artificial Sequence: Synthetic oligonucleotide
aaaagggucgguugagcag

SEQ ID NO: 1067167 - RNA, 19 nt, Artificial Sequence
  Description of Artificial Sequence: Synthetic oligonucleotide
ucaauagagcggaucauca

SEQ ID NO: 1067168 - RNA, 19 nt, Artificial Sequence
  Description of Artificial Sequence: Synthetic oligonucleotide
cugcuuauaggcaggaagg

SEQ ID NO: 1067169 - RNA, 19 nt, Artificial Sequence
  Description of Artificial Sequence: Synthetic oligonucleotide
aagguacggaagcacuccc

SEQ ID NO: 1067170 - RNA, 19 nt, Artificial Sequence
  Description of Artificial Sequence: Synthetic oligonucleotide
guaacucugggucagagca

SEQ ID NO: 1067171 - RNA, 19 nt, Artificial Sequence
  Description of Artificial Sequence: Synthetic oligonucleotide
ucgaagugcguauuugagg

SEQ ID NO: 1067172 - RNA, 19 nt, Artificial Sequence
  Description of Artificial Sequence: Synthetic oligonucleotide
gagacagucagcgugaaac

SEQ ID NO: 1067173 - RNA, 19 nt, Artificial Sequence
  Description of Artificial Sequence: Synthetic oligonucleotide
cacacagaauuccauauag

SEQ ID NO: 1067174 - RNA, 19 nt, Artificial Sequence
  Description of Artificial Sequence: Synthetic oligonucleotide
caaaguacaccauaugcuc

SEQ ID NO: 1067175 - RNA, 19 nt, Artificial Sequence
  Description of Artificial Sequence: Synthetic oligonucleotide
ugccgagcgaucuugagcc

SEQ ID NO: 1067176 - RNA, 19 nt, Artificial Sequence
  Description of Artificial Sequence: Synthetic oligonucleotide
cagaauuccauauagcgga

SEQ ID NO: 1067177 - RNA, 19 nt, Artificial Sequence
  Description of Artificial Sequence: Synthetic oligonucleotide
aaguacaccauaugcucug

SEQ ID NO: 1067178 - RNA, 19 nt, Artificial Sequence
  Description of Artificial Sequence: Synthetic oligonucleotide
agggauaugucggauaagg

SEQ ID NO: 1067179 - RNA, 19 nt, Artificial Sequence
  Description of Artificial Sequence: Synthetic oligonucleotide
ucauaaugcacgcggugag

SEQ ID NO: 1067180 - RNA, 19 nt, Artificial Sequence
  Description of Artificial Sequence: Synthetic oligonucleotide
cugagaaagguacggaagc

SEQ ID NO: 1067181 - RNA, 19 nt, Artificial Sequence
  Description of Artificial Sequence: Synthetic oligonucleotide
uguagacguggacacaagc

SEQ ID NO: 1067182 - RNA, 19 nt, Artificial Sequence
  Description of Artificial Sequence: Synthetic oligonucleotide
acaccauaugcucuguguc

SEQ ID NO: 1067183 - RNA, 19 nt, Artificial Sequence
  Description of Artificial Sequence: Synthetic oligonucleotide
ucgccaagcacauucacac

SEQ ID NO: 1067184 - RNA, 19 nt, Artificial Sequence
  Description of Artificial Sequence: Synthetic oligonucleotide
ggcaaaguacaccauaugc

SEQ ID NO: 1067185 - RNA, 19 nt, Artificial Sequence
  Description of Artificial Sequence: Synthetic oligonucleotide
ucccgguagagauucagag

SEQ ID NO: 1067186 - RNA, 19 nt, Artificial Sequence
  Description of Artificial Sequence: Synthetic oligonucleotide
auagcguccccgaaguucc

SEQ ID NO: 1067187 - RNA, 19 nt, Artificial Sequence
  Description of Artificial Sequence: Synthetic oligonucleotide
uaggccuuaagugaacugc

SEQ ID NO: 1067188 - RNA, 19 nt, Artificial Sequence
  Description of Artificial Sequence: Synthetic oligonucleotide
caaagacggaacaccaacc

SEQ ID NO: 1067189 - RNA, 19 nt, Artificial Sequence
  Description of Artificial Sequence: Synthetic oligonucleotide
uggcuauaguucaccaggg

SEQ ID NO: 1067190 - RNA, 19 nt, Artificial Sequence
  Description of Artificial Sequence: Synthetic oligonucleotide
auaaugcacgcggugaggg

SEQ ID NO: 1067191 - RNA, 19 nt, Artificial Sequence
  Description of Artificial Sequence: Synthetic oligonucleotide
aaguggucgauugugacaa

SEQ ID NO: 1067192 - RNA, 19 nt, Artificial Sequence
  Description of Artificial Sequence: Synthetic oligonucleotide
agggccggucaauagagcg

SEQ ID NO: 1067193 - RNA, 19 nt, Artificial Sequence
  Description of Artificial Sequence: Synthetic oligonucleotide
acaagcucgguggugaccg

SEQ ID NO: 1067194 - RNA, 19 nt, Artificial Sequence
  Description of Artificial Sequence: Synthetic oligonucleotide
auagcggauggccuggcuc

SEQ ID NO: 1067195 - RNA, 19 nt, Artificial Sequence
  Description of Artificial Sequence: Synthetic oligonucleotide
ugaagggccggucaauaga

SEQ ID NO: 1067196 - RNA, 19 nt, Artificial Sequence
  Description of Artificial Sequence: Synthetic oligonucleotide
aagccuggccugcuuauag

SEQ ID NO: 1067197 - RNA, 19 nt, Artificial Sequence
  Description of Artificial Sequence: Synthetic oligonucleotide
uggagcauuuguccugagg

SEQ ID NO: 1067198 - RNA, 19 nt, Artificial Sequence
  Description of Artificial Sequence: Synthetic oligonucleotide
agcaaucuccucaaguaac

SEQ ID NO: 1067199 - RNA, 19 nt, Artificial Sequence
  Description of Artificial Sequence: Synthetic oligonucleotide
uuccgcuguagaaacucgg

SEQ ID NO: 1067200 - RNA, 19 nt, Artificial Sequence
  Description of Artificial Sequence: Synthetic oligonucleotide
aagugcguauuugagguca

SEQ ID NO: 1067201 - RNA, 19 nt, Artificial Sequence
  Description of Artificial Sequence: Synthetic oligonucleotide
uacggaagcacucccgugu

SEQ ID NO: 1067202 - RNA, 19 nt, Artificial Sequence
  Description of Artificial Sequence: Synthetic oligonucleotide
agugguacgucaccacccg

SEQ ID NO: 1067203 - RNA, 19 nt, Artificial Sequence
  Description of Artificial Sequence: Synthetic oligonucleotide
aaagggucgguugagcaga

SEQ ID NO: 1067204 - RNA, 19 nt, Artificial Sequence
  Description of Artificial Sequence: Synthetic oligonucleotide
uaagugaacugcagauggc

SEQ ID NO: 1067205 - RNA, 19 nt, Artificial Sequence
  Description of Artificial Sequence: Synthetic oligonucleotide
aaccccaaagacggaacac

SEQ ID NO: 1067206 - RNA, 19 nt, Artificial Sequence
  Description of Artificial Sequence: Synthetic oligonucleotide
uguaucccgguagagauuc

SEQ ID NO: 1067207 - RNA, 19 nt, Artificial Sequence
  Description of Artificial Sequence: Synthetic oligonucleotide
accccaaagacggaacacc

SEQ ID NO: 1067208 - RNA, 19 nt, Artificial Sequence
  Description of Artificial Sequence: Synthetic oligonucleotide
cugccgagcauccagucgg

SEQ ID NO: 1067209 - RNA, 19 nt, Artificial Sequence
  Description of Artificial Sequence: Synthetic oligonucleotide
gggucugguagcuacaucc

SEQ ID NO: 1067210 - RNA, 19 nt, Artificial Sequence
  Description of Artificial Sequence: Synthetic oligonucleotide
ugaaguggucgauugugac

SEQ ID NO: 1067211 - RNA, 19 nt, Artificial Sequence
  Description of Artificial Sequence: Synthetic oligonucleotide
cuuuggccuucccagagcc

SEQ ID NO: 1067212 - RNA, 19 nt, Artificial Sequence
  Description of Artificial Sequence: Synthetic oligonucleotide
aguauggccuucucaggag

SEQ ID NO: 1067213 - RNA, 19 nt, Artificial Sequence
  Description of Artificial Sequence: Synthetic oligonucleotide
ccaggcaucuacuagcugg

SEQ ID NO: 1067214 - RNA, 19 nt, Artificial Sequence
  Description of Artificial Sequence: Synthetic oligonucleotide
acaguauggccuucucagg

SEQ ID NO: 1067215 - RNA, 19 nt, Artificial Sequence
  Description of Artificial Sequence: Synthetic oligonucleotide
agcacucccguguaucccg

SEQ ID NO: 1067216 - RNA, 19 nt, Artificial Sequence
  Description of Artificial Sequence: Synthetic oligonucleotide
ucaaugaagggccggucaa

SEQ ID NO: 1067217 - RNA, 19 nt, Artificial Sequence
  Description of Artificial Sequence: Synthetic oligonucleotide
cacaucuaccugcagggcc

SEQ ID NO: 1067218 - RNA, 19 nt, Artificial Sequence
  Description of Artificial Sequence: Synthetic oligonucleotide
auuccauauagcggauggc

SEQ ID NO: 1067219 - RNA, 19 nt, Artificial Sequence
  Description of Artificial Sequence: Synthetic oligonucleotide
cuuaagugaacugcagaug

SEQ ID NO: 1067220 - RNA, 19 nt, Artificial Sequence
  Description of Artificial Sequence: Synthetic oligonucleotide
agauucagagcaucugggu

SEQ ID NO: 1067221 - RNA, 19 nt, Artificial Sequence
  Description of Artificial Sequence: Synthetic oligonucleotide
uuuggugggaggaggcgca

SEQ ID NO: 1067222 - RNA, 19 nt, Artificial Sequence
  Description of Artificial Sequence: Synthetic oligonucleotide
ugccauagcguccccgaag

SEQ ID NO: 1067223 - RNA, 19 nt, Artificial Sequence
  Description of Artificial Sequence: Synthetic oligonucleotide
caauagagcggaucaucag

SEQ ID NO: 1067224 - RNA, 19 nt, Artificial Sequence
  Description of Artificial Sequence: Synthetic oligonucleotide
uggucgauugugacaaagu

SEQ ID NO: 1067225 - RNA, 19 nt, Artificial Sequence
  Description of Artificial Sequence: Synthetic oligonucleotide
cuaagguagagcuccguca

SEQ ID NO: 1067226 - RNA, 19 nt, Artificial Sequence
  Description of Artificial Sequence: Synthetic oligonucleotide
ugagcaaggggcagcuggc

SEQ ID NO: 1067227 - RNA, 19 nt, Artificial Sequence
  Description of Artificial Sequence: Synthetic oligonucleotide
aagccggcuaagguagagc

SEQ ID NO: 1067228 - RNA, 19 nt, Artificial Sequence
  Description of Artificial Sequence: Synthetic oligonucleotide
aaucuugagcaaggggcag

SEQ ID NO: 1067229 - RNA, 19 nt, Artificial Sequence
  Description of Artificial Sequence: Synthetic oligonucleotide
ucuacuagcuggcgaggga

SEQ ID NO: 1067230 - RNA, 19 nt, Artificial Sequence
  Description of Artificial Sequence: Synthetic oligonucleotide
gagccauaguuucuugcgc

SEQ ID NO: 1067231 - RNA, 19 nt, Artificial Sequence
  Description of Artificial Sequence: Synthetic oligonucleotide
gguuguaggccuuaaguga

SEQ ID NO: 1067232 - RNA, 19 nt, Artificial Sequence
  Description of Artificial Sequence: Synthetic oligonucleotide
gacggaacaccaaccacag

SEQ ID NO: 1067233 - RNA, 19 nt, Artificial Sequence
  Description of Artificial Sequence: Synthetic oligonucleotide
auacgcugggcacuggcug

SEQ ID NO: 1067234 - RNA, 19 nt, Artificial Sequence
  Description of Artificial Sequence: Synthetic oligonucleotide
ggagaauuuguagaagagc

SEQ ID NO: 1067235 - RNA, 19 nt, Artificial Sequence
  Description of Artificial Sequence: Synthetic oligonucleotide
ugcuuauaggcaggaaggc

SEQ ID NO: 1067236 - RNA, 19 nt, Artificial Sequence
  Description of Artificial Sequence: Synthetic oligonucleotide
gggucgguugagcagaggg

SEQ ID NO: 1067237 - RNA, 19 nt, Artificial Sequence
  Description of Artificial Sequence: Synthetic oligonucleotide
ucuuggauguggugguugu

SEQ ID NO: 1067238 - RNA, 19 nt, Artificial Sequence
  Description of Artificial Sequence: Synthetic oligonucleotide
ugcguauuugaggucauaa

SEQ ID NO: 1067239 - RNA, 19 nt, Artificial Sequence
  Description of Artificial Sequence: Synthetic oligonucleotide
aggaggcgcagccccaagc

SEQ ID NO: 1067240 - RNA, 19 nt, Artificial Sequence
  Description of Artificial Sequence: Synthetic oligonucleotide
gcuggcgagggauaugucg

SEQ ID NO: 1067241 - RNA, 19 nt, Artificial Sequence
  Description of Artificial Sequence: Synthetic oligonucleotide
agccggcuaagguagagcu

SEQ ID NO: 1067242 - RNA, 19 nt, Artificial Sequence
  Description of Artificial Sequence: Synthetic oligonucleotide
gcaucuacuagcuggcgag

SEQ ID NO: 1067243 - RNA, 19 nt, Artificial Sequence
  Description of Artificial Sequence: Synthetic oligonucleotide
ucacacagaauuccauaua

SEQ ID NO: 1067244 - RNA, 19 nt, Artificial Sequence
  Description of Artificial Sequence: Synthetic oligonucleotide
ugaggucauaaugcacgcg

SEQ ID NO: 1067245 - RNA, 19 nt, Artificial Sequence
  Description of Artificial Sequence: Synthetic oligonucleotide
ccuggguacgcucaguugg

SEQ ID NO: 1067246 - RNA, 19 nt, Artificial Sequence
  Description of Artificial Sequence: Synthetic oligonucleotide
ccugcuuauaggcaggaag

SEQ ID NO: 1067247 - RNA, 19 nt, Artificial Sequence
  Description of Artificial Sequence: Synthetic oligonucleotide
gcucaguuggcuucaagcc

SEQ ID NO: 1067248 - RNA, 19 nt, Artificial Sequence
  Description of Artificial Sequence: Synthetic oligonucleotide
accaagccggcuaagguag

SEQ ID NO: 1067249 - RNA, 19 nt, Artificial Sequence
  Description of Artificial Sequence: Synthetic oligonucleotide
agacggaacaccaaccaca

SEQ ID NO: 1067250 - RNA, 19 nt, Artificial Sequence
  Description of Artificial Sequence: Synthetic oligonucleotide
auagagcggaucaucagcu

SEQ ID NO: 1067251 - RNA, 19 nt, Artificial Sequence
  Description of Artificial Sequence: Synthetic oligonucleotide
gaccgugcucagcacagag

SEQ ID NO: 1067252 - RNA, 19 nt, Artificial Sequence
  Description of Artificial Sequence: Synthetic oligonucleotide
uuguagacguggacacaag

SEQ ID NO: 1067253 - RNA, 19 nt, Artificial Sequence
  Description of Artificial Sequence: Synthetic oligonucleotide
uagcggauggccuggcuca

SEQ ID NO: 1067254 - RNA, 19 nt, Artificial Sequence
  Description of Artificial Sequence: Synthetic oligonucleotide
agaaagguacggaagcacu

SEQ ID NO: 1067255 - RNA, 19 nt, Artificial Sequence
  Description of Artificial Sequence: Synthetic oligonucleotide
agacagucagcgugaaaca

SEQ ID NO: 1067256 - RNA, 19 nt, Artificial Sequence
  Description of Artificial Sequence: Synthetic oligonucleotide
ccucaaguaacucuggguc

SEQ ID NO: 1067257 - RNA, 19 nt, Artificial Sequence
  Description of Artificial Sequence: Synthetic oligonucleotide
uguccugagguuccacagu

SEQ ID NO: 1067258 - RNA, 19 nt, Artificial Sequence
  Description of Artificial Sequence: Synthetic oligonucleotide
gaaagguacggaagcacuc

SEQ ID NO: 1067259 - RNA, 19 nt, Artificial Sequence
  Description of Artificial Sequence: Synthetic oligonucleotide
aucuacuagcuggcgaggg

SEQ ID NO: 1067260 - RNA, 19 nt, Artificial Sequence
  Description of Artificial Sequence: Synthetic oligonucleotide
caguacacacacucagcag

SEQ ID NO: 1067261 - RNA, 19 nt, Artificial Sequence
  Description of Artificial Sequence: Synthetic oligonucleotide
gcgagcagcucauggaucg

SEQ ID NO: 1067262 - RNA, 19 nt, Artificial Sequence
  Description of Artificial Sequence: Synthetic oligonucleotide
cauaaugcacgcggugagg

SEQ ID NO: 1067263 - RNA, 19 nt, Artificial Sequence
  Description of Artificial Sequence: Synthetic oligonucleotide
gucgaagugcguauuugag

SEQ ID NO: 1067264 - RNA, 19 nt, Artificial Sequence
  Description of Artificial Sequence: Synthetic oligonucleotide
uguaggccuuaagugaacu

SEQ ID NO: 1067265 - RNA, 19 nt, Artificial Sequence
  Description of Artificial Sequence: Synthetic oligonucleotide
gacguggacacaagcucgg

SEQ ID NO: 1067266 - RNA, 19 nt, Artificial Sequence
  Description of Artificial Sequence: Synthetic oligonucleotide
cauagcguccccgaaguuc

SEQ ID NO: 1067267 - RNA, 19 nt, Artificial Sequence
  Description of Artificial Sequence: Synthetic oligonucleotide
ugcccaucucaauccaggc

SEQ ID NO: 1067268 - RNA, 19 nt, Artificial Sequence
  Description of Artificial Sequence: Synthetic oligonucleotide
ggucgauugugacaaaguc

SEQ ID NO: 1067269 - RNA, 19 nt, Artificial Sequence
  Description of Artificial Sequence: Synthetic oligonucleotide
uccgucagccaagugguca

SEQ ID NO: 1067270 - RNA, 19 nt, Artificial Sequence
  Description of Artificial Sequence: Synthetic oligonucleotide
agguggagcauuuguccug

SEQ ID NO: 1067271 - RNA, 19 nt, Artificial Sequence
  Description of Artificial Sequence: Synthetic oligonucleotide
acuccuugugccgagggcu

SEQ ID NO: 1067272 - RNA, 19 nt, Artificial Sequence
  Description of Artificial Sequence: Synthetic oligonucleotide
uaaugcacgcggugagggc

SEQ ID NO: 1067273 - RNA, 19 nt, Artificial Sequence
  Description of Artificial Sequence: Synthetic oligonucleotide
ggagcauuuguccugaggu

SEQ ID NO: 1067274 - RNA, 19 nt, Artificial Sequence
  Description of Artificial Sequence: Synthetic oligonucleotide
ugcucggucucgccaagca

SEQ ID NO: 1067275 - RNA, 19 nt, Artificial Sequence
  Description of Artificial Sequence: Synthetic oligonucleotide
gucaauagagcggaucauc

SEQ ID NO: 1067276 - RNA, 19 nt, Artificial Sequence
  Description of Artificial Sequence: Synthetic oligonucleotide
guggugaccgugcucagca

SEQ ID NO: 1067277 - RNA, 19 nt, Artificial Sequence
  Description of Artificial Sequence: Synthetic oligonucleotide
gucauaaugcacgcgguga

SEQ ID NO: 1067278 - RNA, 19 nt, Artificial Sequence
  Description of Artificial Sequence: Synthetic oligonucleotide
uagcuggcgagggauaugu

SEQ ID NO: 1067279 - RNA, 19 nt, Artificial Sequence
  Description of Artificial Sequence: Synthetic oligonucleotide
gagagcaaucuccucaagu

SEQ ID NO: 1067280 - RNA, 19 nt, Artificial Sequence
  Description of Artificial Sequence: Synthetic oligonucleotide
cucggucucgccaagcaca

SEQ ID NO: 1067281 - RNA, 19 nt, Artificial Sequence
  Description of Artificial Sequence: Synthetic oligonucleotide
agccuggccugcuuauagg

SEQ ID NO: 1067282 - RNA, 19 nt, Artificial Sequence
  Description of Artificial Sequence: Synthetic oligonucleotide
ugccucgccacccuggcua

SEQ ID NO: 1067283 - RNA, 19 nt, Artificial Sequence
  Description of Artificial Sequence: Synthetic oligonucleotide
gagucgaagugcguauuug

SEQ ID NO: 1067284 - RNA, 19 nt, Artificial Sequence
  Description of Artificial Sequence: Synthetic oligonucleotide
ccaaagacggaacaccaac

SEQ ID NO: 1067285 - RNA, 19 nt, Artificial Sequence
  Description of Artificial Sequence: Synthetic oligonucleotide
acagucagcgugaaacaug

SEQ ID NO: 1067286 - RNA, 19 nt, Artificial Sequence
  Description of Artificial Sequence: Synthetic oligonucleotide
agcgugaaacauguggcca

SEQ ID NO: 1067287 - RNA, 19 nt, Artificial Sequence
  Description of Artificial Sequence: Synthetic oligonucleotide
guagaaacucggccagcgc

SEQ ID NO: 1067288 - RNA, 19 nt, Artificial Sequence
  Description of Artificial Sequence: Synthetic oligonucleotide
gugccgagcgaucuugagc

SEQ ID NO: 1067289 - RNA, 19 nt, Artificial Sequence
  Description of Artificial Sequence: Synthetic oligonucleotide
ugguacgucaccacccguu

SEQ ID NO: 1067290 - RNA, 19 nt, Artificial Sequence
  Description of Artificial Sequence: Synthetic oligonucleotide
guggucgauugugacaaag

SEQ ID NO: 1067291 - RNA, 19 nt, Artificial Sequence
  Description of Artificial Sequence: Synthetic oligonucleotide
uuguaggccuuaagugaac

SEQ ID NO: 1067292 - RNA, 19 nt, Artificial Sequence
  Description of Artificial Sequence: Synthetic oligonucleotide
uaugucggauaaggauggg

SEQ ID NO: 1067293 - RNA, 19 nt, Artificial Sequence
  Description of Artificial Sequence: Synthetic oligonucleotide
aacagguaaaagggucggu

SEQ ID NO: 1067294 - RNA, 19 nt, Artificial Sequence
  Description of Artificial Sequence: Synthetic oligonucleotide
acagguaaaagggucgguu

SEQ ID NO: 1067295 - RNA, 19 nt, Artificial Sequence
  Description of Artificial Sequence: Synthetic oligonucleotide
caguauggccuucucagga

SEQ ID NO: 1067296 - RNA, 19 nt, Artificial Sequence
  Description of Artificial Sequence: Synthetic oligonucleotide
cucccguguaucccgguag

SEQ ID NO: 1067297 - RNA, 19 nt, Artificial Sequence
  Description of Artificial Sequence: Synthetic oligonucleotide
cuuguagacguggacacaa

SEQ ID NO: 1067298 - RNA, 19 nt, Artificial Sequence
  Description of Artificial Sequence: Synthetic oligonucleotide
ucccguguaucccgguaga

SEQ ID NO: 1067299 - RNA, 19 nt, Artificial Sequence
  Description of Artificial Sequence: Synthetic oligonucleotide
uggccccgggcauacagug

SEQ ID NO: 1067300 - RNA, 19 nt, Artificial Sequence
  Description of Artificial Sequence: Synthetic oligonucleotide
gaagugcguauuugagguc

SEQ ID NO: 1067301 - RNA, 19 nt, Artificial Sequence
  Description of Artificial Sequence: Synthetic oligonucleotide
auaguucaccagggcaggg

SEQ ID NO: 1067302 - RNA, 19 nt, Artificial Sequence
  Description of Artificial Sequence: Synthetic oligonucleotide
ggucauaaugcacgcggug

SEQ ID NO: 1067303 - RNA, 19 nt, Artificial Sequence
  Description of Artificial Sequence: Synthetic oligonucleotide
agcuacaucccugcccguc

SEQ ID NO: 1067304 - RNA, 19 nt, Artificial Sequence
  Description of Artificial Sequence: Synthetic oligonucleotide
ggauaugucggauaaggau

SEQ ID NO: 1067305 - RNA, 19 nt, Artificial Sequence
  Description of Artificial Sequence: Synthetic oligonucleotide
agggucugguagcuacauc

SEQ ID NO: 1067306 - RNA, 19 nt, Artificial Sequence
  Description of Artificial Sequence: Synthetic oligonucleotide
ucaccacccguucguaguc

SEQ ID NO: 1067307 - RNA, 19 nt, Artificial Sequence
  Description of Artificial Sequence: Synthetic oligonucleotide
gguacgcucaguuggcuuc

SEQ ID NO: 1067308 - RNA, 19 nt, Artificial Sequence
  Description of Artificial Sequence: Synthetic oligonucleotide
agaaacucggccagcgccu

SEQ ID NO: 1067309 - RNA, 19 nt, Artificial Sequence
  Description of Artificial Sequence: Synthetic oligonucleotide
ucgugcuggcagugguacg

SEQ ID NO: 1067310 - RNA, 19 nt, Artificial Sequence
  Description of Artificial Sequence: Synthetic oligonucleotide
cucgccaagcacauucaca

SEQ ID NO: 1067311 - RNA, 19 nt, Artificial Sequence
  Description of Artificial Sequence: Synthetic oligonucleotide
ucucgccggauacgcuggg

SEQ ID NO: 1067312 - RNA, 19 nt, Artificial Sequence
  Description of Artificial Sequence: Synthetic oligonucleotide
gugaccgugcucagcacag

SEQ ID NO: 1067313 - RNA, 19 nt, Artificial Sequence
  Description of Artificial Sequence: Synthetic oligonucleotide
guacaccauaugcucugug

SEQ ID NO: 1067314 - RNA, 19 nt, Artificial Sequence
  Description of Artificial Sequence: Synthetic oligonucleotide
ucuugccgggccuccaaaa

SEQ ID NO: 1067315 - RNA, 19 nt, Artificial Sequence
  Description of Artificial Sequence: Synthetic oligonucleotide
ccggcuaagguagagcucc

SEQ ID NO: 1067316 - RNA, 19 nt, Artificial Sequence
  Description of Artificial Sequence: Synthetic oligonucleotide
caucuacuagcuggcgagg

SEQ ID NO: 1067317 - RNA, 19 nt, Artificial Sequence
  Description of Artificial Sequence: Synthetic oligonucleotide
cugugccucgccacccugg

SEQ ID NO: 1067318 - RNA, 19 nt, Artificial Sequence
  Description of Artificial Sequence: Synthetic oligonucleotide
caggucucgccggauacgc

SEQ ID NO: 1067319 - RNA, 19 nt, Artificial Sequence
  Description of Artificial Sequence: Synthetic oligonucleotide
ugugaauggccugcucggu

SEQ ID NO: 1067320 - RNA, 19 nt, Artificial Sequence
  Description of Artificial Sequence: Synthetic oligonucleotide
ggucucgccggauacgcug

SEQ ID NO: 1067321 - RNA, 19 nt, Artificial Sequence
  Description of Artificial Sequence: Synthetic oligonucleotide
guacggaagcacucccgug

SEQ ID NO: 1067322 - RNA, 19 nt, Artificial Sequence
  Description of Artificial Sequence: Synthetic oligonucleotide
agguacggaagcacucccg

SEQ ID NO: 1067323 - RNA, 19 nt, Artificial Sequence
  Description of Artificial Sequence: Synthetic oligonucleotide
ccauauagcggauggccug

SEQ ID NO: 1067324 - RNA, 19 nt, Artificial Sequence
  Description of Artificial Sequence: Synthetic oligonucleotide
cucgugcuggcagugguac

SEQ ID NO: 1067325 - RNA, 19 nt, Artificial Sequence
  Description of Artificial Sequence: Synthetic oligonucleotide
cauacagugacagcaggua

SEQ ID NO: 1067326 - RNA, 19 nt, Artificial Sequence
  Description of Artificial Sequence: Synthetic oligonucleotide
uggcagugguacgucacca

SEQ ID NO: 1067327 - RNA, 19 nt, Artificial Sequence
  Description of Artificial Sequence: Synthetic oligonucleotide
acggcaaaguacaccauau

SEQ ID NO: 1067328 - RNA, 19 nt, Artificial Sequence
  Description of Artificial Sequence: Synthetic oligonucleotide
gagcgaucuugagccauag

SEQ ID NO: 1067329 - RNA, 19 nt, Artificial Sequence
  Description of Artificial Sequence: Synthetic oligonucleotide
ucggucucgccaagcacau

SEQ ID NO: 1067330 - RNA, 19 nt, Artificial Sequence
  Description of Artificial Sequence: Synthetic oligonucleotide
cgcucaguuggcuucaagc

SEQ ID NO: 1067331 - RNA, 19 nt, Artificial Sequence
  Description of Artificial Sequence: Synthetic oligonucleotide
cagucagcgugaaacaugu

SEQ ID NO: 1067332 - RNA, 19 nt, Artificial Sequence
  Description of Artificial Sequence: Synthetic oligonucleotide
gccauaguuucuugcgcag

SEQ ID NO: 1067333 - RNA, 19 nt, Artificial Sequence
  Description of Artificial Sequence: Synthetic oligonucleotide
agcaaccccaaagacggaa

SEQ ID NO: 1067334 - RNA, 19 nt, Artificial Sequence
  Description of Artificial Sequence: Synthetic oligonucleotide
gucgguugagcagagggaa

SEQ ID NO: 1067335 - RNA, 19 nt, Artificial Sequence
  Description of Artificial Sequence: Synthetic oligonucleotide
gggcuacugagaaagguac

SEQ ID NO: 1067336 - RNA, 19 nt, Artificial Sequence
  Description of Artificial Sequence: Synthetic oligonucleotide
uagagcggaucaucagcuc

SEQ ID NO: 1067337 - RNA, 19 nt, Artificial Sequence
  Description of Artificial Sequence: Synthetic oligonucleotide
gcuaagguagagcuccguc

SEQ ID NO: 1067338 - RNA, 19 nt, Artificial Sequence
  Description of Artificial Sequence: Synthetic oligonucleotide
aggccuuaagugaacugca

SEQ ID NO: 1067339 - RNA, 19 nt, Artificial Sequence
  Description of Artificial Sequence: Synthetic oligonucleotide
gguagagauucagagcauc

SEQ ID NO: 1067340 - RNA, 19 nt, Artificial Sequence
  Description of Artificial Sequence: Synthetic oligonucleotide
aaacucggccagcgccucu

SEQ ID NO: 1067341 - RNA, 19 nt, Artificial Sequence
  Description of Artificial Sequence: Synthetic oligonucleotide
gcuacaucccugcccgucc

SEQ ID NO: 1067342 - RNA, 19 nt, Artificial Sequence
  Description of Artificial Sequence: Synthetic oligonucleotide
ggauacgcugggcacuggc

SEQ ID NO: 1067343 - RNA, 19 nt, Artificial Sequence
  Description of Artificial Sequence: Synthetic oligonucleotide
uggcgagggauaugucgga

SEQ ID NO: 1067344 - RNA, 19 nt, Artificial Sequence
  Description of Artificial Sequence: Synthetic oligonucleotide
cucgccacccuggcuauag

SEQ ID NO: 1067345 - RNA, 19 nt, Artificial Sequence
  Description of Artificial Sequence: Synthetic oligonucleotide
cccgguagagauucagagc

SEQ ID NO: 1067346 - RNA, 19 nt, Artificial Sequence
  Description of Artificial Sequence: Synthetic oligonucleotide
accacgugccgagcgaucu

SEQ ID NO: 1067347 - RNA, 19 nt, Artificial Sequence
  Description of Artificial Sequence: Synthetic oligonucleotide
gggacagcccuccuacagc

SEQ ID NO: 1067348 - RNA, 19 nt, Artificial Sequence
  Description of Artificial Sequence: Synthetic oligonucleotide
uaguugugaauggccugcu

SEQ ID NO: 1067349 - RNA, 19 nt, Artificial Sequence
  Description of Artificial Sequence: Synthetic oligonucleotide
gccuuaagugaacugcaga

SEQ ID NO: 1067350 - RNA, 19 nt, Artificial Sequence
  Description of Artificial Sequence: Synthetic oligonucleotide
acgguggcgggcaaguaca

SEQ ID NO: 1067351 - RNA, 19 nt, Artificial Sequence
  Description of Artificial Sequence: Synthetic oligonucleotide
caagccggcuaagguagag

SEQ ID NO: 1067352 - RNA, 19 nt, Artificial Sequence
  Description of Artificial Sequence: Synthetic oligonucleotide
cagagccuuuggugggagg

SEQ ID NO: 1067353 - RNA, 19 nt, Artificial Sequence
  Description of Artificial Sequence: Synthetic oligonucleotide
ggcaucuacuagcuggcga

SEQ ID NO: 1067354 - RNA, 19 nt, Artificial Sequence
  Description of Artificial Sequence: Synthetic oligonucleotide
gcgugaaacauguggccac

SEQ ID NO: 1067355 - RNA, 19 nt, Artificial Sequence
  Description of Artificial Sequence: Synthetic oligonucleotide
gcgaucuugagccauaguu

SEQ ID NO: 1067356 - RNA, 19 nt, Artificial Sequence
  Description of Artificial Sequence: Synthetic oligonucleotide
aagggucgguugagcagag

SEQ ID NO: 1067357 - RNA, 19 nt, Artificial Sequence
  Description of Artificial Sequence: Synthetic oligonucleotide
gcagguaguugugaauggc

SEQ ID NO: 1067358 - RNA, 19 nt, Artificial Sequence
  Description of Artificial Sequence: Synthetic oligonucleotide
gguacgucaccacccguuc

SEQ ID NO: 1067359 - RNA, 19 nt, Artificial Sequence
  Description of Artificial Sequence: Synthetic oligonucleotide
auccagucggcugcccauc

SEQ ID NO: 1067360 - RNA, 19 nt, Artificial Sequence
  Description of Artificial Sequence: Synthetic oligonucleotide
agcgaucuugagccauagu

SEQ ID NO: 1067361 - RNA, 19 nt, Artificial Sequence
  Description of Artificial Sequence: Synthetic oligonucleotide
caccaagccggcuaaggua

SEQ ID NO: 1067362 - RNA, 19 nt, Artificial Sequence
  Description of Artificial Sequence: Synthetic oligonucleotide
cagucggcugcccaucuca

SEQ ID NO: 1067363 - RNA, 19 nt, Artificial Sequence
  Description of Artificial Sequence: Synthetic oligonucleotide
ugcugugccucgccacccu

SEQ ID NO: 1067364 - RNA, 19 nt, Artificial Sequence
  Description of Artificial Sequence: Synthetic oligonucleotide
acgcucaguuggcuucaag

SEQ ID NO: 1067365 - RNA, 19 nt, Artificial Sequence
  Description of Artificial Sequence: Synthetic oligonucleotide
aggcaucuacuagcuggcg

SEQ ID NO: 1067366 - RNA, 19 nt, Artificial Sequence
  Description of Artificial Sequence: Synthetic oligonucleotide
gaauggccugcucggucuc

SEQ ID NO: 1067367 - RNA, 19 nt, Artificial Sequence
  Description of Artificial Sequence: Synthetic oligonucleotide
uccccaugacuggcgagca

SEQ ID NO: 1067368 - RNA, 19 nt, Artificial Sequence
  Description of Artificial Sequence: Synthetic oligonucleotide
ggucugguagcuacauccc

SEQ ID NO: 1067369 - RNA, 19 nt, Artificial Sequence
  Description of Artificial Sequence: Synthetic oligonucleotide
ggugaccgugcucagcaca

SEQ ID NO: 1067370 - RNA, 19 nt, Artificial Sequence
  Description of Artificial Sequence: Synthetic oligonucleotide
agagcuccgucagccaagu

SEQ ID NO: 1067371 - RNA, 19 nt, Artificial Sequence
  Description of Artificial Sequence: Synthetic oligonucleotide
cacagagucgaagugcgua

SEQ ID NO: 1067372 - RNA, 19 nt, Artificial Sequence
  Description of Artificial Sequence: Synthetic oligonucleotide
ggcgggcaaguacagccag

SEQ ID NO: 1067373 - RNA, 19 nt, Artificial Sequence
  Description of Artificial Sequence: Synthetic oligonucleotide
agccacuccuugugccgag

SEQ ID NO: 1067374 - RNA, 19 nt, Artificial Sequence
  Description of Artificial Sequence: Synthetic oligonucleotide
ccguucguaguccugcaug

SEQ ID NO: 1067375 - RNA, 19 nt, Artificial Sequence
  Description of Artificial Sequence: Synthetic oligonucleotide
gccaguuuccgcuguagaa

SEQ ID NO: 1067376 - RNA, 19 nt, Artificial Sequence
  Description of Artificial Sequence: Synthetic oligonucleotide
acggaagcacucccgugua

SEQ ID NO: 1067377 - RNA, 19 nt, Artificial Sequence
  Description of Artificial Sequence: Synthetic oligonucleotide
ggcagcacguccucaaucu

SEQ ID NO: 1067378 - RNA, 19 nt, Artificial Sequence
  Description of Artificial Sequence: Synthetic oligonucleotide
cauaugcucugugucccca

SEQ ID NO: 1067379 - RNA, 19 nt, Artificial Sequence
  Description of Artificial Sequence: Synthetic oligonucleotide
cacgcggugagggcuggcc

SEQ ID NO: 1067380 - RNA, 19 nt, Artificial Sequence
  Description of Artificial Sequence: Synthetic oligonucleotide
acucccguguaucccggua

SEQ ID NO: 1067381 - RNA, 19 nt, Artificial Sequence
  Description of Artificial Sequence: Synthetic oligonucleotide
gaaacucggccagcgccuc

SEQ ID NO: 1067382 - RNA, 19 nt, Artificial Sequence
  Description of Artificial Sequence: Synthetic oligonucleotide
ccuuaagugaacugcagau

SEQ ID NO: 1067383 - RNA, 19 nt, Artificial Sequence
  Description of Artificial Sequence: Synthetic oligonucleotide
gggccggucaauagagcgg

SEQ ID NO: 1067384 - RNA, 19 nt, Artificial Sequence
  Description of Artificial Sequence: Synthetic oligonucleotide
uggguacgcucaguuggcu

SEQ ID NO: 1067385 - RNA, 19 nt, Artificial Sequence
  Description of Artificial Sequence: Synthetic oligonucleotide
aucccgguagagauucaga

SEQ ID NO: 1067386 - RNA, 19 nt, Artificial Sequence
  Description of Artificial Sequence: Synthetic oligonucleotide
gacagucagcgugaaacau

SEQ ID NO: 1067387 - RNA, 19 nt, Artificial Sequence
  Description of Artificial Sequence: Synthetic oligonucleotide
gagcauuuguccugagguu

SEQ ID NO: 1067388 - RNA, 19 nt, Artificial Sequence
  Description of Artificial Sequence: Synthetic oligonucleotide
acccguucguaguccugca

SEQ ID NO: 1067389 - RNA, 19 nt, Artificial Sequence
  Description of Artificial Sequence: Synthetic oligonucleotide
cgaagugcguauuugaggu

SEQ ID NO: 1067390 - RNA, 19 nt, Artificial Sequence
  Description of Artificial Sequence: Synthetic oligonucleotide
cuagcuggcgagggauaug

SEQ ID NO: 1067391 - RNA, 19 nt, Artificial Sequence
  Description of Artificial Sequence: Synthetic oligonucleotide
gguacggaagcacucccgu

SEQ ID NO: 1067392 - RNA, 19 nt, Artificial Sequence
  Description of Artificial Sequence: Synthetic oligonucleotide
ugcacgcggugagggcugg

SEQ ID NO: 1067393 - RNA, 19 nt, Artificial Sequence
  Description of Artificial Sequence: Synthetic oligonucleotide
acggaacaccaaccacagu

SEQ ID NO: 1067394 - RNA, 19 nt, Artificial Sequence
  Description of Artificial Sequence: Synthetic oligonucleotide
ccgucagccaaguggucag

SEQ ID NO: 1067395 - RNA, 19 nt, Artificial Sequence
  Description of Artificial Sequence: Synthetic oligonucleotide
gucugguagcuacaucccu

SEQ ID NO: 1067396 - RNA, 19 nt, Artificial Sequence
  Description of Artificial Sequence: Synthetic oligonucleotide
gccccgggcauacagugac

SEQ ID NO: 1067397 - RNA, 19 nt, Artificial Sequence
  Description of Artificial Sequence: Synthetic oligonucleotide
gggauaugucggauaagga

SEQ ID NO: 1067398 - RNA, 19 nt, Artificial Sequence
  Description of Artificial Sequence: Synthetic oligonucleotide
gaucgaggcccugcuggca

SEQ ID NO: 1067399 - RNA, 19 nt, Artificial Sequence
  Description of Artificial Sequence: Synthetic oligonucleotide
gagccacuccuugugccga

SEQ ID NO: 1067400 - RNA, 19 nt, Artificial Sequence
  Description of Artificial Sequence: Synthetic oligonucleotide
ugaccgugcucagcacaga

SEQ ID NO: 1067401 - RNA, 19 nt, Artificial Sequence
  Description of Artificial Sequence: Synthetic oligonucleotide
caccacccguucguagucc

SEQ ID NO: 1067402 - RNA, 19 nt, Artificial Sequence
  Description of Artificial Sequence: Synthetic oligonucleotide
cuacaucccugcccgucca

SEQ ID NO: 1067403 - RNA, 19 nt, Artificial Sequence
  Description of Artificial Sequence: Synthetic oligonucleotide
cgcuguagaaacucggcca

SEQ ID NO: 1067404 - RNA, 19 nt, Artificial Sequence
  Description of Artificial Sequence: Synthetic oligonucleotide
uccuugugccgagggcuac

SEQ ID NO: 1067405 - RNA, 19 nt, Artificial Sequence
  Description of Artificial Sequence: Synthetic oligonucleotide
cacccaaggggacagcccu

SEQ ID NO: 1067406 - RNA, 19 nt, Artificial Sequence
  Description of Artificial Sequence: Synthetic oligonucleotide
caucuaccugcagggccag

SEQ ID NO: 1067407 - RNA, 19 nt, Artificial Sequence
  Description of Artificial Sequence: Synthetic oligonucleotide
cggucaauagagcggauca

SEQ ID NO: 1067408 - RNA, 19 nt, Artificial Sequence
  Description of Artificial Sequence: Synthetic oligonucleotide
gcccaucucaauccaggca

SEQ ID NO: 1067409 - RNA, 19 nt, Artificial Sequence
  Description of Artificial Sequence: Synthetic oligonucleotide
aguggucgauugugacaaa

SEQ ID NO: 1067410 - RNA, 19 nt, Artificial Sequence
  Description of Artificial Sequence: Synthetic oligonucleotide
ucgccacccuggcuauagu

SEQ ID NO: 1067411 - RNA, 19 nt, Artificial Sequence
  Description of Artificial Sequence: Synthetic oligonucleotide
ccuuuggugggaggaggcg

SEQ ID NO: 1067412 - RNA, 19 nt, Artificial Sequence
  Description of Artificial Sequence: Synthetic oligonucleotide
guacgcucaguuggcuuca

SEQ ID NO: 1067413 - RNA, 19 nt, Artificial Sequence
  Description of Artificial Sequence: Synthetic oligonucleotide
agcguccccgaaguuccug

SEQ ID NO: 1067414 - RNA, 19 nt, Artificial Sequence
  Description of Artificial Sequence: Synthetic oligonucleotide
ccccaaagacggaacacca

SEQ ID NO: 1067415 - RNA, 19 nt, Artificial Sequence
  Description of Artificial Sequence: Synthetic oligonucleotide
gcaggucucgccggauacg

SEQ ID NO: 1067416 - RNA, 19 nt, Artificial Sequence
  Description of Artificial Sequence: Synthetic oligonucleotide
gcaaccccaaagacggaac

SEQ ID NO: 1067417 - RNA, 19 nt, Artificial Sequence
  Description of Artificial Sequence: Synthetic oligonucleotide
ggccggucaauagagcgga

SEQ ID NO: 1067418 - RNA, 19 nt, Artificial Sequence
  Description of Artificial Sequence: Synthetic oligonucleotide
uggugguuguaggccuuaa

SEQ ID NO: 1067419 - RNA, 19 nt, Artificial Sequence
  Description of Artificial Sequence: Synthetic oligonucleotide
gccuggguacgcucaguug

SEQ ID NO: 1067420 - RNA, 19 nt, Artificial Sequence
  Description of Artificial Sequence: Synthetic oligonucleotide
agggucgguugagcagagg

SEQ ID NO: 1067421 - RNA, 19 nt, Artificial Sequence
  Description of Artificial Sequence: Synthetic oligonucleotide
ggucgguugagcagaggga

SEQ ID NO: 1067422 - RNA, 19 nt, Artificial Sequence
  Description of Artificial Sequence: Synthetic oligonucleotide
cucgccggauacgcugggc

SEQ ID NO: 1067423 - RNA, 19 nt, Artificial Sequence
  Description of Artificial Sequence: Synthetic oligonucleotide
agugcguauuugaggucau

SEQ ID NO: 1067424 - RNA, 19 nt, Artificial Sequence
  Description of Artificial Sequence: Synthetic oligonucleotide
cagccccaagcuugcgcug

SEQ ID NO: 1067425 - RNA, 19 nt, Artificial Sequence
  Description of Artificial Sequence: Synthetic oligonucleotide
gccauagcguccccgaagu

SEQ ID NO: 1067426 - RNA, 19 nt, Artificial Sequence
  Description of Artificial Sequence: Synthetic oligonucleotide
gcucggucucgccaagcac

SEQ ID NO: 1067427 - RNA, 19 nt, Artificial Sequence
  Description of Artificial Sequence: Synthetic oligonucleotide
agcuggcgagggauauguc

SEQ ID NO: 1067428 - RNA, 19 nt, Artificial Sequence
  Description of Artificial Sequence: Synthetic oligonucleotide
caccacgugccgagcgauc

SEQ ID NO: 1067429 - RNA, 19 nt, Artificial Sequence
  Description of Artificial Sequence: Synthetic oligonucleotide
cuacuagcuggcgagggau

SEQ ID NO: 1067430 - RNA, 19 nt, Artificial Sequence
  Description of Artificial Sequence: Synthetic oligonucleotide
cguucguaguccugcauga

SEQ ID NO: 1067431 - RNA, 19 nt, Artificial Sequence
  Description of Artificial Sequence: Synthetic oligonucleotide
gagcuccgucagccaagug

SEQ ID NO: 1067432 - RNA, 19 nt, Artificial Sequence
  Description of Artificial Sequence: Synthetic oligonucleotide
augcacgcggugagggcug

SEQ ID NO: 1067433 - RNA, 19 nt, Artificial Sequence
  Description of Artificial Sequence: Synthetic oligonucleotide
cuccgucagccaagugguc

SEQ ID NO: 1067434 - RNA, 19 nt, Artificial Sequence
  Description of Artificial Sequence: Synthetic oligonucleotide
gcaaucuccucaaguaacu

SEQ ID NO: 1067435 - RNA, 19 nt, Artificial Sequence
  Description of Artificial Sequence: Synthetic oligonucleotide
cugcucggucucgccaagc

SEQ ID NO: 1067436 - RNA, 19 nt, Artificial Sequence
  Description of Artificial Sequence: Synthetic oligonucleotide
acguggacacaagcucggu

SEQ ID NO: 1067437 - RNA, 19 nt, Artificial Sequence
  Description of Artificial Sequence: Synthetic oligonucleotide
agucagcgugaaacaugug

SEQ ID NO: 1067438 - RNA, 19 nt, Artificial Sequence
  Description of Artificial Sequence: Synthetic oligonucleotide
cgagggauaugucggauaa

SEQ ID NO: 1067439 - RNA, 19 nt, Artificial Sequence
  Description of Artificial Sequence: Synthetic oligonucleotide
caaguaacucugggucaga

SEQ ID NO: 1067440 - RNA, 19 nt, Artificial Sequence
  Description of Artificial Sequence: Synthetic oligonucleotide
ggaggcgcagccccaagcu

SEQ ID NO: 1067441 - RNA, 19 nt, Artificial Sequence
  Description of Artificial Sequence: Synthetic oligonucleotide
cuccuugugccgagggcua

SEQ ID NO: 1067442 - RNA, 19 nt, Artificial Sequence
  Description of Artificial Sequence: Synthetic oligonucleotide
aggagacagucagcgugaa

SEQ ID NO: 1067443 - RNA, 19 nt, Artificial Sequence
  Description of Artificial Sequence: Synthetic oligonucleotide
gcuccgucagccaaguggu

SEQ ID NO: 1067444 - RNA, 19 nt, Artificial Sequence
  Description of Artificial Sequence: Synthetic oligonucleotide
aggccucgugcuggcagug

SEQ ID NO: 1067445 - RNA, 19 nt, Artificial Sequence
  Description of Artificial Sequence: Synthetic oligonucleotide
gagggucugguagcuacau

SEQ ID NO: 1067446 - RNA, 19 nt, Artificial Sequence
  Description of Artificial Sequence: Synthetic oligonucleotide
uggcuggccccgggcauac

SEQ ID NO: 1067447 - RNA, 19 nt, Artificial Sequence
  Description of Artificial Sequence: Synthetic oligonucleotide
cguguaucccgguagagau

SEQ ID NO: 1067448 - RNA, 19 nt, Artificial Sequence
  Description of Artificial Sequence: Synthetic oligonucleotide
gcugugccucgccacccug

SEQ ID NO: 1067449 - RNA, 19 nt, Artificial Sequence
  Description of Artificial Sequence: Synthetic oligonucleotide
ccaacaccuuguagacgug

SEQ ID NO: 1067450 - RNA, 19 nt, Artificial Sequence
  Description of Artificial Sequence: Synthetic oligonucleotide
cauccagucggcugcccau

SEQ ID NO: 1067451 - RNA, 19 nt, Artificial Sequence
  Description of Artificial Sequence: Synthetic oligonucleotide
uacgcucaguuggcuucaa

SEQ ID NO: 1067452 - RNA, 19 nt, Artificial Sequence
  Description of Artificial Sequence: Synthetic oligonucleotide
gcacucccguguaucccgg

SEQ ID NO: 1067453 - RNA, 19 nt, Artificial Sequence
  Description of Artificial Sequence: Synthetic oligonucleotide
cgucaccacccguucguag

SEQ ID NO: 1067454 - RNA, 19 nt, Artificial Sequence
  Description of Artificial Sequence: Synthetic oligonucleotide
cuuggauguggugguugua

SEQ ID NO: 1067455 - RNA, 19 nt, Artificial Sequence
  Description of Artificial Sequence: Synthetic oligonucleotide
cgcggugagggcuggcccc

SEQ ID NO: 1067456 - RNA, 19 nt, Artificial Sequence
  Description of Artificial Sequence: Synthetic oligonucleotide
ggagacagucagcgugaaa

SEQ ID NO: 1067457 - RNA, 19 nt, Artificial Sequence
  Description of Artificial Sequence: Synthetic oligonucleotide
cgugccgagcgaucuugag

SEQ ID NO: 1067458 - RNA, 19 nt, Artificial Sequence
  Description of Artificial Sequence: Synthetic oligonucleotide
aggucucgccggauacgcu

SEQ ID NO: 1067459 - RNA, 19 nt, Artificial Sequence
  Description of Artificial Sequence: Synthetic oligonucleotide
acgugccgagcgaucuuga

SEQ ID NO: 1067460 - RNA, 19 nt, Artificial Sequence
  Description of Artificial Sequence: Synthetic oligonucleotide
cccaaagacggaacaccaa

SEQ ID NO: 1067461 - RNA, 19 nt, Artificial Sequence
  Description of Artificial Sequence: Synthetic oligonucleotide
ggucacgguggcgggcaag

SEQ ID NO: 1067462 - RNA, 19 nt, Artificial Sequence
  Description of Artificial Sequence: Synthetic oligonucleotide
ggagggucugguagcuaca

SEQ ID NO: 1067463 - RNA, 19 nt, Artificial Sequence
  Description of Artificial Sequence: Synthetic oligonucleotide
cccuggcuauaguucacca

SEQ ID NO: 1067464 - RNA, 19 nt, Artificial Sequence
  Description of Artificial Sequence: Synthetic oligonucleotide
ggccucgugcuggcagugg

SEQ ID NO: 1067465 - RNA, 19 nt, Artificial Sequence
  Description of Artificial Sequence: Synthetic oligonucleotide
gaggcgcagccccaagcuu

SEQ ID NO: 1067466 - RNA, 19 nt, Artificial Sequence
  Description of Artificial Sequence: Synthetic oligonucleotide
gugguacgucaccacccgu

SEQ ID NO: 1067467 - RNA, 19 nt, Artificial Sequence
  Description of Artificial Sequence: Synthetic oligonucleotide
cccguguaucccgguagag

SEQ ID NO: 1067468 - RNA, 19 nt, Artificial Sequence
  Description of Artificial Sequence: Synthetic oligonucleotide
ccggauacgcugggcacug

SEQ ID NO: 1067469 - RNA, 19 nt, Artificial Sequence
  Description of Artificial Sequence: Synthetic oligonucleotide
acgucaccacccguucgua

SEQ ID NO: 1067470 - RNA, 19 nt, Artificial Sequence
  Description of Artificial Sequence: Synthetic oligonucleotide
cagcaaccccaaagacgga

SEQ ID NO: 1067471 - RNA, 19 nt, Artificial Sequence
  Description of Artificial Sequence: Synthetic oligonucleotide
ccguguaucccgguagaga

SEQ ID NO: 1067472 - RNA, 19 nt, Artificial Sequence
  Description of Artificial Sequence: Synthetic oligonucleotide
ggucaauagagcggaucau

SEQ ID NO: 1067473 - RNA, 19 nt, Artificial Sequence
  Description of Artificial Sequence: Synthetic oligonucleotide
cuggccccgggcauacagu

SEQ ID NO: 1067474 - RNA, 19 nt, Artificial Sequence
  Description of Artificial Sequence: Synthetic oligonucleotide
gugcguauuugaggucaua

SEQ ID NO: 1067475 - RNA, 19 nt, Artificial Sequence
  Description of Artificial Sequence: Synthetic oligonucleotide
caagccuggccugcuuaua

SEQ ID NO: 1067476 - RNA, 19 nt, Artificial Sequence
  Description of Artificial Sequence: Synthetic oligonucleotide
cgccggauacgcugggcac

SEQ ID NO: 1067477 - RNA, 19 nt, Artificial Sequence
  Description of Artificial Sequence: Synthetic oligonucleotide
gucggcugcccaucucaau

SEQ ID NO: 1067478 - RNA, 19 nt, Artificial Sequence
  Description of Artificial Sequence: Synthetic oligonucleotide
cccguccacccaaggggac

SEQ ID NO: 1067479 - RNA, 19 nt, Artificial Sequence
  Description of Artificial Sequence: Synthetic oligonucleotide
gccggcuaagguagagcuc

SEQ ID NO: 1067480 - RNA, 19 nt, Artificial Sequence
  Description of Artificial Sequence: Synthetic oligonucleotide
gccucgugcuggcaguggu

SEQ ID NO: 1067481 - RNA, 19 nt, Artificial Sequence
  Description of Artificial Sequence: Synthetic oligonucleotide
ggguacgcucaguuggcuu

SEQ ID NO: 1067482 - RNA, 19 nt, Artificial Sequence
  Description of Artificial Sequence: Synthetic oligonucleotide
cagagucgaagugcguauu

SEQ ID NO: 1067483 - RNA, 19 nt, Artificial Sequence
  Description of Artificial Sequence: Synthetic oligonucleotide
ggcuucaagccagccaguu

SEQ ID NO: 1067484 - RNA, 19 nt, Artificial Sequence
  Description of Artificial Sequence: Synthetic oligonucleotide
caagcucgguggugaccgu

SEQ ID NO: 1067485 - RNA, 19 nt, Artificial Sequence
  Description of Artificial Sequence: Synthetic oligonucleotide
ggcuaagguagagcuccgu

SEQ ID NO: 1067486 - RNA, 19 nt, Artificial Sequence
  Description of Artificial Sequence: Synthetic oligonucleotide
ccaagccggcuaagguaga

SEQ ID NO: 1067487 - RNA, 19 nt, Artificial Sequence
  Description of Artificial Sequence: Synthetic oligonucleotide
gccggauacgcugggcacu

SEQ ID NO: 1067488 - RNA, 19 nt, Artificial Sequence
  Description of Artificial Sequence: Synthetic oligonucleotide
gugccucgccacccuggcu

SEQ ID NO: 1067489 - RNA, 19 nt, Artificial Sequence
  Description of Artificial Sequence: Synthetic oligonucleotide
cacucccguguaucccggu

SEQ ID NO: 1067490 - RNA, 19 nt, Artificial Sequence
  Description of Artificial Sequence: Synthetic oligonucleotide
ggccccgggcauacaguga

SEQ ID NO: 1067491 - RNA, 19 nt, Artificial Sequence
  Description of Artificial Sequence: Synthetic oligonucleotide
ggcgagggauaugucggau

SEQ ID NO: 1067492 - RNA, 19 nt, Artificial Sequence
  Description of Artificial Sequence: Synthetic oligonucleotide
ccguccacccaaggggaca

SEQ ID NO: 1067493 - RNA, 19 nt, Artificial Sequence
  Description of Artificial Sequence: Synthetic oligonucleotide
gcgcagccccaagcuugcg

SEQ ID NO: 1067494 - RNA, 19 nt, Artificial Sequence
  Description of Artificial Sequence: Synthetic oligonucleotide
cgagcgaucuugagccaua

SEQ ID NO: 1067495 - RNA, 19 nt, Artificial Sequence
  Description of Artificial Sequence: Synthetic oligonucleotide
gcacagagucgaagugcgu

SEQ ID NO: 1067496 - RNA, 19 nt, Artificial Sequence
  Description of Artificial Sequence: Synthetic oligonucleotide
cggauacgcugggcacugg

SEQ ID NO: 1067497 - RNA, 19 nt, Artificial Sequence
  Description of Artificial Sequence: Synthetic oligonucleotide
gcacgcggugagggcuggc

SEQ ID NO: 1067498 - RNA, 19 nt, Artificial Sequence
  Description of Artificial Sequence: Synthetic oligonucleotide
cccguucguaguccugcau

SEQ ID NO: 1067499 - RNA, 19 nt, Artificial Sequence
  Description of Artificial Sequence: Synthetic oligonucleotide
ccauagcguccccgaaguu

SEQ ID NO: 1067500 - RNA, 19 nt, Artificial Sequence
  Description of Artificial Sequence: Synthetic oligonucleotide
gccggucaauagagcggau

SEQ ID NO: 1067501 - RNA, 19 nt, Artificial Sequence
  Description of Artificial Sequence: Synthetic oligonucleotide
cggaagcacucccguguau

SEQ ID NO: 1067502 - RNA, 19 nt, Artificial Sequence
  Description of Artificial Sequence: Synthetic oligonucleotide
cggucucgccaagcacauu

SEQ ID NO: 1067503 - RNA, 19 nt, Artificial Sequence
  Description of Artificial Sequence: Synthetic oligonucleotide
aaaugcaucacacugcugc

SEQ ID NO: 1067504 - RNA, 19 nt, Artificial Sequence
  Description of Artificial Sequence: Synthetic oligonucleotide
aaagacaucaugcuggccc

SEQ ID NO: 1067505 - RNA, 19 nt, Artificial Sequence
  Description of Artificial Sequence: Synthetic oligonucleotide
ucuaugaacauugaguccg

SEQ ID NO: 1067506 - RNA, 19 nt, Artificial Sequence
  Description of Artificial Sequence: Synthetic oligonucleotide
aauugagccgaacaucagc

SEQ ID NO: 1067507 - RNA, 19 nt, Artificial Sequence
  Description of Artificial Sequence: Synthetic oligonucleotide
aacuuaguuacaguaauac

SEQ ID NO: 1067508 - RNA, 19 nt, Artificial Sequence
  Description of Artificial Sequence: Synthetic oligonucleotide
aauugaauguuacugguga

SEQ ID NO: 1067509 - RNA, 19 nt, Artificial Sequence
  Description of Artificial Sequence: Synthetic oligonucleotide
aacauugaguccgaggugc

SEQ ID NO: 1067510 - RNA, 19 nt, Artificial Sequence
  Description of Artificial Sequence: Synthetic oligonucleotide
uuauccaugacguucagga

SEQ ID NO: 1067511 - RNA, 19 nt, Artificial Sequence
  Description of Artificial Sequence: Synthetic oligonucleotide
ugaacauugaguccgaggu

SEQ ID NO: 1067512 - RNA, 19 nt, Artificial Sequence
  Description of Artificial Sequence: Synthetic oligonucleotide
aaagugagggcccaagauc

SEQ ID NO: 1067513 - RNA, 19 nt, Artificial Sequence
  Description of Artificial Sequence: Synthetic oligonucleotide
uuagucuucgacuucauga

SEQ ID NO: 1067514 - RNA, 19 nt, Artificial Sequence
  Description of Artificial Sequence: Synthetic oligonucleotide
uuaccuaacauguagcuga

SEQ ID NO: 1067515 - RNA, 19 nt, Artificial Sequence
  Description of Artificial Sequence: Synthetic oligonucleotide
uuucuaugaacauugaguc

SEQ ID NO: 1067516 - RNA, 19 nt, Artificial Sequence
  Description of Artificial Sequence: Synthetic oligonucleotide
aauaugaagacaguaaaau

SEQ ID NO: 1067517 - RNA, 19 nt, Artificial Sequence
  Description of Artificial Sequence: Synthetic oligonucleotide
uucaugagcucacaggagg

SEQ ID NO: 1067518 - RNA, 19 nt, Artificial Sequence
  Description of Artificial Sequence: Synthetic oligonucleotide
aacaaacaaaauugagccg

SEQ ID NO: 1067519 - RNA, 19 nt, Artificial Sequence
  Description of Artificial Sequence: Synthetic oligonucleotide
acuuaguuacaguaauacc

SEQ ID NO: 1067520 - RNA, 19 nt, Artificial Sequence
  Description of Artificial Sequence: Synthetic oligonucleotide
aggaaauaucuccaaagac

SEQ ID NO: 1067521 - RNA, 19 nt, Artificial Sequence
  Description of Artificial Sequence: Synthetic oligonucleotide
aagugagggcccaagaucc

SEQ ID NO: 1067522 - RNA, 19 nt, Artificial Sequence
  Description of Artificial Sequence: Synthetic oligonucleotide
acuacuuuucuccugaacu

SEQ ID NO: 1067523 - RNA, 19 nt, Artificial Sequence
  Description of Artificial Sequence: Synthetic oligonucleotide
agggauacaauauacaaaa

SEQ ID NO: 1067524 - RNA, 19 nt, Artificial Sequence
  Description of Artificial Sequence: Synthetic oligonucleotide
uguaaagcgccuuggaaag

SEQ ID NO: 1067525 - RNA, 19 nt, Artificial Sequence
  Description of Artificial Sequence: Synthetic oligonucleotide
agguuguucaaauaugaag

SEQ ID NO: 1067526 - RNA, 19 nt, Artificial Sequence
  Description of Artificial Sequence: Synthetic oligonucleotide
uggaaauauaagaaugugu

SEQ ID NO: 1067527 - RNA, 19 nt, Artificial Sequence
  Description of Artificial Sequence: Synthetic oligonucleotide
guuacuggugacaauaagg

SEQ ID NO: 1067528 - RNA, 19 nt, Artificial Sequence
  Description of Artificial Sequence: Synthetic oligonucleotide
aaggcuuagguguuaagca

SEQ ID NO: 1067529 - RNA, 19 nt, Artificial Sequence
  Description of Artificial Sequence: Synthetic oligonucleotide
auauaagaaccacaagaag

SEQ ID NO: 1067530 - RNA, 19 nt, Artificial Sequence
  Description of Artificial Sequence: Synthetic oligonucleotide
acgaguaucccacacuuuc

SEQ ID NO: 1067531 - RNA, 19 nt, Artificial Sequence
  Description of Artificial Sequence: Synthetic oligonucleotide
agggugcucaaacaugucc

SEQ ID NO: 1067532 - RNA, 19 nt, Artificial Sequence
  Description of Artificial Sequence: Synthetic oligonucleotide
ucuugcucagcaaaggacu

SEQ ID NO: 1067533 - RNA, 19 nt, Artificial Sequence
  Description of Artificial Sequence: Synthetic oligonucleotide
cuuaguuacaguaauaccu

SEQ ID NO: 1067534 - RNA, 19 nt, Artificial Sequence
  Description of Artificial Sequence: Synthetic oligonucleotide
aaauuggggucuuggcugg

SEQ ID NO: 1067535 - RNA, 19 nt, Artificial Sequence
  Description of Artificial Sequence: Synthetic oligonucleotide
accacaagaagaaaacccc

SEQ ID NO: 1067536 - RNA, 19 nt, Artificial Sequence
  Description of Artificial Sequence: Synthetic oligonucleotide
uugguuuccaggcaagagc

SEQ ID NO: 1067537 - RNA, 19 nt, Artificial Sequence
  Description of Artificial Sequence: Synthetic oligonucleotide
aacaggaacguuauuuuag

SEQ ID NO: 1067538 - RNA, 19 nt, Artificial Sequence
  Description of Artificial Sequence: Synthetic oligonucleotide
uguaggaacaggaacguua

SEQ ID NO: 1067539 - RNA, 19 nt, Artificial Sequence
  Description of Artificial Sequence: Synthetic oligonucleotide
aauguuacuggugacaaua

SEQ ID NO: 1067540 - RNA, 19 nt, Artificial Sequence
  Description of Artificial Sequence: Synthetic oligonucleotide
uuuuaccuaacauguagcu

SEQ ID NO: 1067541 - RNA, 19 nt, Artificial Sequence
  Description of Artificial Sequence: Synthetic oligonucleotide
auaacuuaguuacaguaau

SEQ ID NO: 1067542 - RNA, 19 nt, Artificial Sequence
  Description of Artificial Sequence: Synthetic oligonucleotide
auugauaagaaccgucaca

SEQ ID NO: 1067543 - RNA, 19 nt, Artificial Sequence
  Description of Artificial Sequence: Synthetic oligonucleotide
acguuauuuuagaaaaugc

SEQ ID NO: 1067544 - RNA, 19 nt, Artificial Sequence
  Description of Artificial Sequence: Synthetic oligonucleotide
auuguggaaauauaagaau

SEQ ID NO: 1067545 - RNA, 19 nt, Artificial Sequence
  Description of Artificial Sequence: Synthetic oligonucleotide
auacaaaagagucuaggaa

SEQ ID NO: 1067546 - RNA, 19 nt, Artificial Sequence
  Description of Artificial Sequence: Synthetic oligonucleotide
aggacuuucaugugcaucu

SEQ ID NO: 1067547 - RNA, 19 nt, Artificial Sequence
  Description of Artificial Sequence: Synthetic oligonucleotide
uuauuuugguaccucuuac

SEQ ID NO: 1067548 - RNA, 19 nt, Artificial Sequence
  Description of Artificial Sequence: Synthetic oligonucleotide
uagucuucgacuucaugag

SEQ ID NO: 1067549 - RNA, 19 nt, Artificial Sequence
  Description of Artificial Sequence: Synthetic oligonucleotide
uagguguuaagcaaguuuu

SEQ ID NO: 1067550 - RNA, 19 nt, Artificial Sequence
  Description of Artificial Sequence: Synthetic oligonucleotide
guacuguucagacaggcug

SEQ ID NO: 1067551 - RNA, 19 nt, Artificial Sequence
  Description of Artificial Sequence: Synthetic oligonucleotide
uaacauguagcugacaguc

SEQ ID NO: 1067552 - RNA, 19 nt, Artificial Sequence
  Description of Artificial Sequence: Synthetic oligonucleotide
acaacaugcuguaaagcgc

SEQ ID NO: 1067553 - RNA, 19 nt, Artificial Sequence
  Description of Artificial Sequence: Synthetic oligonucleotide
aauaacuuaguuacaguaa

SEQ ID NO: 1067554 - RNA, 19 nt, Artificial Sequence
  Description of Artificial Sequence: Synthetic oligonucleotide
uuagguguuaagcaaguuu

SEQ ID NO: 1067555 - RNA, 19 nt, Artificial Sequence
  Description of Artificial Sequence: Synthetic oligonucleotide
ugacaauaagggcagcaug

SEQ ID NO: 1067556 - RNA, 19 nt, Artificial Sequence
  Description of Artificial Sequence: Synthetic oligonucleotide
uguuaagcaaguuuugauu

SEQ ID NO: 1067557 - RNA, 19 nt, Artificial Sequence
  Description of Artificial Sequence: Synthetic oligonucleotide
uugauaagaaccgucacau

SEQ ID NO: 1067558 - RNA, 19 nt, Artificial Sequence
  Description of Artificial Sequence: Synthetic oligonucleotide
aaaagagucuaggaaagaa

SEQ ID NO: 1067559 - RNA, 19 nt, Artificial Sequence
  Description of Artificial Sequence: Synthetic oligonucleotide
caacaugcuguaaagcgcc

SEQ ID NO: 1067560 - RNA, 19 nt, Artificial Sequence
  Description of Artificial Sequence: Synthetic oligonucleotide
aaaccccggucccauaagg

SEQ ID NO: 1067561 - RNA, 19 nt, Artificial Sequence
  Description of Artificial Sequence: Synthetic oligonucleotide
augaacauugaguccgagg

SEQ ID NO: 1067562 - RNA, 19 nt, Artificial Sequence
  Description of Artificial Sequence: Synthetic oligonucleotide
cacaagaagaaaaccccgg

SEQ ID NO: 1067563 - RNA, 19 nt, Artificial Sequence
  Description of Artificial Sequence: Synthetic oligonucleotide
uauugauaagaaccgucac

SEQ ID NO: 1067564 - RNA, 19 nt, Artificial Sequence
  Description of Artificial Sequence: Synthetic oligonucleotide
aacuuaggacgccccaagg

SEQ ID NO: 1067565 - RNA, 19 nt, Artificial Sequence
  Description of Artificial Sequence: Synthetic oligonucleotide
ugguuuccaggcaagagcu

SEQ ID NO: 1067566 - RNA, 19 nt, Artificial Sequence
  Description of Artificial Sequence: Synthetic oligonucleotide
aaugacacagggucuggga

SEQ ID NO: 1067567 - RNA, 19 nt, Artificial Sequence
  Description of Artificial Sequence: Synthetic oligonucleotide
uauuuuguaggaacaggaa

SEQ ID NO: 1067568 - RNA, 19 nt, Artificial Sequence
  Description of Artificial Sequence: Synthetic oligonucleotide
uaccucuuacuccaaagga

SEQ ID NO: 1067569 - RNA, 19 nt, Artificial Sequence
  Description of Artificial Sequence: Synthetic oligonucleotide
ugaaggaaggaaauaucuc

SEQ ID NO: 1067570 - RNA, 19 nt, Artificial Sequence
  Description of Artificial Sequence: Synthetic oligonucleotide
ugugcaucuuuccccagag

SEQ ID NO: 1067571 - RNA, 19 nt, Artificial Sequence
  Description of Artificial Sequence: Synthetic oligonucleotide
agggauauauaagaaccac

SEQ ID NO: 1067572 - RNA, 19 nt, Artificial Sequence
  Description of Artificial Sequence: Synthetic oligonucleotide
uauuucacagacaggggaa

SEQ ID NO: 1067573 - RNA, 19 nt, Artificial Sequence
  Description of Artificial Sequence: Synthetic oligonucleotide
agaaccgucacauuauuuu

SEQ ID NO: 1067574 - RNA, 19 nt, Artificial Sequence
  Description of Artificial Sequence: Synthetic oligonucleotide
agccugucaggucagagag

SEQ ID NO: 1067575 - RNA, 19 nt, Artificial Sequence
  Description of Artificial Sequence: Synthetic oligonucleotide
gacguucaggaccucaucc

SEQ ID NO: 1067576 - RNA, 19 nt, Artificial Sequence
  Description of Artificial Sequence: Synthetic oligonucleotide
ucuuugccgaugugaaugg

SEQ ID NO: 1067577 - RNA, 19 nt, Artificial Sequence
  Description of Artificial Sequence: Synthetic oligonucleotide
guaccucuuacuccaaagg

SEQ ID NO: 1067578 - RNA, 19 nt, Artificial Sequence
  Description of Artificial Sequence: Synthetic oligonucleotide
agucauuauguccagggaa

SEQ ID NO: 1067579 - RNA, 19 nt, Artificial Sequence
  Description of Artificial Sequence: Synthetic oligonucleotide
uauuuugguaccucuuacu

SEQ ID NO: 1067580 - RNA, 19 nt, Artificial Sequence
  Description of Artificial Sequence: Synthetic oligonucleotide
uucuaugaacauugagucc

SEQ ID NO: 1067581 - RNA, 19 nt, Artificial Sequence
  Description of Artificial Sequence: Synthetic oligonucleotide
aagacccauugacccagcc

SEQ ID NO: 1067582 - RNA, 19 nt, Artificial Sequence
  Description of Artificial Sequence: Synthetic oligonucleotide
ggaagaagucauuaugucc

SEQ ID NO: 1067583 - RNA, 19 nt, Artificial Sequence
  Description of Artificial Sequence: Synthetic oligonucleotide
agucuucgacuucaugagc

SEQ ID NO: 1067584 - RNA, 19 nt, Artificial Sequence
  Description of Artificial Sequence: Synthetic oligonucleotide
aaauaugaagacaguaaaa

SEQ ID NO: 1067585 - RNA, 19 nt, Artificial Sequence
  Description of Artificial Sequence: Synthetic oligonucleotide
uucaaauaugaagacagua

SEQ ID NO: 1067586 - RNA, 19 nt, Artificial Sequence
  Description of Artificial Sequence: Synthetic oligonucleotide
cuauugauaagaaccguca

SEQ ID NO: 1067587 - RNA, 19 nt, Artificial Sequence
  Description of Artificial Sequence: Synthetic oligonucleotide
ggaacguuauuuuagaaaa

SEQ ID NO: 1067588 - RNA, 19 nt, Artificial Sequence
  Description of Artificial Sequence: Synthetic oligonucleotide
aguaauaccuugcuuguuu

SEQ ID NO: 1067589 - RNA, 19 nt, Artificial Sequence
  Description of Artificial Sequence: Synthetic oligonucleotide
aacauguccuccgcaggcc

SEQ ID NO: 1067590 - RNA, 19 nt, Artificial Sequence
  Description of Artificial Sequence: Synthetic oligonucleotide
aacagacuacuuuucuccu

SEQ ID NO: 1067591 - RNA, 19 nt, Artificial Sequence
  Description of Artificial Sequence: Synthetic oligonucleotide
aaggacuuucaugugcauc

SEQ ID NO: 1067592 - RNA, 19 nt, Artificial Sequence
  Description of Artificial Sequence: Synthetic oligonucleotide
uccuccaaugguagggagg

SEQ ID NO: 1067593 - RNA, 19 nt, Artificial Sequence
  Description of Artificial Sequence: Synthetic oligonucleotide
uuuaccuaacauguagcug

SEQ ID NO: 1067594 - RNA, 19 nt, Artificial Sequence
  Description of Artificial Sequence: Synthetic oligonucleotide
gguuguucaaauaugaaga

SEQ ID NO: 1067595 - RNA, 19 nt, Artificial Sequence
  Description of Artificial Sequence: Synthetic oligonucleotide
aggaacguuauuuuagaaa

SEQ ID NO: 1067596 - RNA, 19 nt, Artificial Sequence
  Description of Artificial Sequence: Synthetic oligonucleotide
guauuucacagacagggga

SEQ ID NO: 1067597 - RNA, 19 nt, Artificial Sequence
  Description of Artificial Sequence: Synthetic oligonucleotide
uccaugacguucaggaccu

SEQ ID NO: 1067598 - RNA, 19 nt, Artificial Sequence
  Description of Artificial Sequence: Synthetic oligonucleotide
aagucauuauguccaggga

SEQ ID NO: 1067599 - RNA, 19 nt, Artificial Sequence
  Description of Artificial Sequence: Synthetic oligonucleotide
uuauuguuuucaacauugu

SEQ ID NO: 1067600 - RNA, 19 nt, Artificial Sequence
  Description of Artificial Sequence: Synthetic oligonucleotide
cuuaggacgccccaaggac

SEQ ID NO: 1067601 - RNA, 19 nt, Artificial Sequence
  Description of Artificial Sequence: Synthetic oligonucleotide
aaaggcccuauugauaaga

SEQ ID NO: 1067602 - RNA, 19 nt, Artificial Sequence
  Description of Artificial Sequence: Synthetic oligonucleotide
ggcccuauugauaagaacc

SEQ ID NO: 1067603 - RNA, 19 nt, Artificial Sequence
  Description of Artificial Sequence: Synthetic oligonucleotide
gacugaucauaucagggga

SEQ ID NO: 1067604 - RNA, 19 nt, Artificial Sequence
  Description of Artificial Sequence: Synthetic oligonucleotide
gcuauggugagcccaaggg

SEQ ID NO: 1067605 - RNA, 19 nt, Artificial Sequence
  Description of Artificial Sequence: Synthetic oligonucleotide
ugcuauggugagcccaagg

SEQ ID NO: 1067606 - RNA, 19 nt, Artificial Sequence
  Description of Artificial Sequence: Synthetic oligonucleotide
caucuuuccccagagcugg

SEQ ID NO: 1067607 - RNA, 19 nt, Artificial Sequence
  Description of Artificial Sequence: Synthetic oligonucleotide
guuucuaugaacauugagu

SEQ ID NO: 1067608 - RNA, 19 nt, Artificial Sequence
  Description of Artificial Sequence: Synthetic oligonucleotide
uuaagcaaguuuugauuuc

SEQ ID NO: 1067609 - RNA, 19 nt, Artificial Sequence
  Description of Artificial Sequence: Synthetic oligonucleotide
ggaaagacgaccuucugca

SEQ ID NO: 1067610 - RNA, 19 nt, Artificial Sequence
  Description of Artificial Sequence: Synthetic oligonucleotide
uaagcaaguuuugauuucu

SEQ ID NO: 1067611 - RNA, 19 nt, Artificial Sequence
  Description of Artificial Sequence: Synthetic oligonucleotide
gauuuagucuucgacuuca

SEQ ID NO: 1067612 - RNA, 19 nt, Artificial Sequence
  Description of Artificial Sequence: Synthetic oligonucleotide
caagggauacaauauacaa

SEQ ID NO: 1067613 - RNA, 19 nt, Artificial Sequence
  Description of Artificial Sequence: Synthetic oligonucleotide
ggaaauauaagaaugugua

SEQ ID NO: 1067614 - RNA, 19 nt, Artificial Sequence
  Description of Artificial Sequence: Synthetic oligonucleotide
acaggaacguuauuuuaga

SEQ ID NO: 1067615 - RNA, 19 nt, Artificial Sequence
  Description of Artificial Sequence: Synthetic oligonucleotide
gaauugaauguuacuggug

SEQ ID NO: 1067616 - RNA, 19 nt, Artificial Sequence
  Description of Artificial Sequence: Synthetic oligonucleotide
aaaaccccggucccauaag

SEQ ID NO: 1067617 - RNA, 19 nt, Artificial Sequence
  Description of Artificial Sequence: Synthetic oligonucleotide
aaaaggcccuauugauaag

SEQ ID NO: 1067618 - RNA, 19 nt, Artificial Sequence
  Description of Artificial Sequence: Synthetic oligonucleotide
uccaggcaagagcucauag

SEQ ID NO: 1067619 - RNA, 19 nt, Artificial Sequence
  Description of Artificial Sequence: Synthetic oligonucleotide
aagggauacaauauacaaa

SEQ ID NO: 1067620 - RNA, 19 nt, Artificial Sequence
  Description of Artificial Sequence: Synthetic oligonucleotide
uagcugacagucaaacuuc

SEQ ID NO: 1067621 - RNA, 19 nt, Artificial Sequence
  Description of Artificial Sequence: Synthetic oligonucleotide
ugcuuauuuugguaccucu

SEQ ID NO: 1067622 - RNA, 19 nt, Artificial Sequence
  Description of Artificial Sequence: Synthetic oligonucleotide
uuugcaaacagggcacggc

SEQ ID NO: 1067623 - RNA, 19 nt, Artificial Sequence
  Description of Artificial Sequence: Synthetic oligonucleotide
agcugguuacaucauccag

SEQ ID NO: 1067624 - RNA, 19 nt, Artificial Sequence
  Description of Artificial Sequence: Synthetic oligonucleotide
uaguuacaguaauaccuug

SEQ ID NO: 1067625 - RNA, 19 nt, Artificial Sequence
  Description of Artificial Sequence: Synthetic oligonucleotide
acuuaggacgccccaagga

SEQ ID NO: 1067626 - RNA, 19 nt, Artificial Sequence
  Description of Artificial Sequence: Synthetic oligonucleotide
accuucugcacgaguaucc

SEQ ID NO: 1067627 - RNA, 19 nt, Artificial Sequence
  Description of Artificial Sequence: Synthetic oligonucleotide
ugagccgaacaucagcaau

SEQ ID NO: 1067628 - RNA, 19 nt, Artificial Sequence
  Description of Artificial Sequence: Synthetic oligonucleotide
ugccuggcggcaaacaaac

SEQ ID NO: 1067629 - RNA, 19 nt, Artificial Sequence
  Description of Artificial Sequence: Synthetic oligonucleotide
gcauuguggaaauauaaga

SEQ ID NO: 1067630 - RNA, 19 nt, Artificial Sequence
  Description of Artificial Sequence: Synthetic oligonucleotide
uucuugguuuccaggcaag

SEQ ID NO: 1067631 - RNA, 19 nt, Artificial Sequence
  Description of Artificial Sequence: Synthetic oligonucleotide
aaagcgccuuggaaagacc

SEQ ID NO: 1067632 - RNA, 19 nt, Artificial Sequence
  Description of Artificial Sequence: Synthetic oligonucleotide
uuuuauccaugacguucag

SEQ ID NO: 1067633 - RNA, 19 nt, Artificial Sequence
  Description of Artificial Sequence: Synthetic oligonucleotide
auugagccgaacaucagca

SEQ ID NO: 1067634 - RNA, 19 nt, Artificial Sequence
  Description of Artificial Sequence: Synthetic oligonucleotide
uaacuuaguuacaguaaua

SEQ ID NO: 1067635 - RNA, 19 nt, Artificial Sequence
  Description of Artificial Sequence: Synthetic oligonucleotide
gucauuauguccagggaac

SEQ ID NO: 1067636 - RNA, 19 nt, Artificial Sequence
  Description of Artificial Sequence: Synthetic oligonucleotide
aggcccuauugauaagaac

SEQ ID NO: 1067637 - RNA, 19 nt, Artificial Sequence
  Description of Artificial Sequence: Synthetic oligonucleotide
ucacaacaugcuguaaagc

SEQ ID NO: 1067638 - RNA, 19 nt, Artificial Sequence
  Description of Artificial Sequence: Synthetic oligonucleotide
acgggcgucggccaggguc

SEQ ID NO: 1067639 - RNA, 19 nt, Artificial Sequence
  Description of Artificial Sequence: Synthetic oligonucleotide
uggcggcaaacaaacaaac

SEQ ID NO: 1067640 - RNA, 19 nt, Artificial Sequence
  Description of Artificial Sequence: Synthetic oligonucleotide
cuguaaagcgccuuggaaa

SEQ ID NO: 1067641 - RNA, 19 nt, Artificial Sequence
  Description of Artificial Sequence: Synthetic oligonucleotide
uaaagcgccuuggaaagac

SEQ ID NO: 1067642 - RNA, 19 nt, Artificial Sequence
  Description of Artificial Sequence: Synthetic oligonucleotide
agccgaacaucagcaaugc

SEQ ID NO: 1067643 - RNA, 19 nt, Artificial Sequence
  Description of Artificial Sequence: Synthetic oligonucleotide
aggaacaggaacguuauuu

SEQ ID NO: 1067644 - RNA, 19 nt, Artificial Sequence
  Description of Artificial Sequence: Synthetic oligonucleotide
cauaagguuguucaaauau

SEQ ID NO: 1067645 - RNA, 19 nt, Artificial Sequence
  Description of Artificial Sequence: Synthetic oligonucleotide
agagcugacuccagguuac

SEQ ID NO: 1067646 - RNA, 19 nt, Artificial Sequence
  Description of Artificial Sequence: Synthetic oligonucleotide
guaaauuggggucuuggcu

SEQ ID NO: 1067647 - RNA, 19 nt, Artificial Sequence
  Description of Artificial Sequence: Synthetic oligonucleotide
agagucuaggaaagaaaag

SEQ ID NO: 1067648 - RNA, 19 nt, Artificial Sequence
  Description of Artificial Sequence: Synthetic oligonucleotide
ugauuuagucuucgacuuc

SEQ ID NO: 1067649 - RNA, 19 nt, Artificial Sequence
  Description of Artificial Sequence: Synthetic oligonucleotide
aguugugguuuguugaguu

SEQ ID NO: 1067650 - RNA, 19 nt, Artificial Sequence
  Description of Artificial Sequence: Synthetic oligonucleotide
ugaucauaucaggggacag

SEQ ID NO: 1067651 - RNA, 19 nt, Artificial Sequence
  Description of Artificial Sequence: Synthetic oligonucleotide
acagacuacuuuucuccug

SEQ ID NO: 1067652 - RNA, 19 nt, Artificial Sequence
  Description of Artificial Sequence: Synthetic oligonucleotide
ugcacgaguaucccacacu

SEQ ID NO: 1067653 - RNA, 19 nt, Artificial Sequence
  Description of Artificial Sequence: Synthetic oligonucleotide
guagcugacagucaaacuu

SEQ ID NO: 1067654 - RNA, 19 nt, Artificial Sequence
  Description of Artificial Sequence: Synthetic oligonucleotide
gguaccucuuacuccaaag

SEQ ID NO: 1067655 - RNA, 19 nt, Artificial Sequence
  Description of Artificial Sequence: Synthetic oligonucleotide
aauguguauuucacagaca

SEQ ID NO: 1067656 - RNA, 19 nt, Artificial Sequence
  Description of Artificial Sequence: Synthetic oligonucleotide
aucauaucaggggacagaa

SEQ ID NO: 1067657 - RNA, 19 nt, Artificial Sequence
  Description of Artificial Sequence: Synthetic oligonucleotide
gggaggacugaucauauca

SEQ ID NO: 1067658 - RNA, 19 nt, Artificial Sequence
  Description of Artificial Sequence: Synthetic oligonucleotide
gagccgaacaucagcaaug

SEQ ID NO: 1067659 - RNA, 19 nt, Artificial Sequence
  Description of Artificial Sequence: Synthetic oligonucleotide
ucugcuuauuuugguaccu

SEQ ID NO: 1067660 - RNA, 19 nt, Artificial Sequence
  Description of Artificial Sequence: Synthetic oligonucleotide
gggaaagacgaccuucugc

SEQ ID NO: 1067661 - RNA, 19 nt, Artificial Sequence
  Description of Artificial Sequence: Synthetic oligonucleotide
gagcccaagggauacaaua

SEQ ID NO: 1067662 - RNA, 19 nt, Artificial Sequence
  Description of Artificial Sequence: Synthetic oligonucleotide
auugaguccgaggugcugu

SEQ ID NO: 1067663 - RNA, 19 nt, Artificial Sequence
  Description of Artificial Sequence: Synthetic oligonucleotide
caacuuaggacgccccaag

SEQ ID NO: 1067664 - RNA, 19 nt, Artificial Sequence
  Description of Artificial Sequence: Synthetic oligonucleotide
ucccucaguuuauauuucu

SEQ ID NO: 1067665 - RNA, 19 nt, Artificial Sequence
  Description of Artificial Sequence: Synthetic oligonucleotide
uaagaaccgucacauuauu

SEQ ID NO: 1067666 - RNA, 19 nt, Artificial Sequence
  Description of Artificial Sequence: Synthetic oligonucleotide
auaagaaccgucacauuau

SEQ ID NO: 1067667 - RNA, 19 nt, Artificial Sequence
  Description of Artificial Sequence: Synthetic oligonucleotide
ugagggcccaagauccagc

SEQ ID NO: 1067668 - RNA, 19 nt, Artificial Sequence
  Description of Artificial Sequence: Synthetic oligonucleotide
acguucaggaccucaucca

SEQ ID NO: 1067669 - RNA, 19 nt, Artificial Sequence
  Description of Artificial Sequence: Synthetic oligonucleotide
aggcuuagguguuaagcaa

SEQ ID NO: 1067670 - RNA, 19 nt, Artificial Sequence
  Description of Artificial Sequence: Synthetic oligonucleotide
aaaggacuuucaugugcau

SEQ ID NO: 1067671 - RNA, 19 nt, Artificial Sequence
  Description of Artificial Sequence: Synthetic oligonucleotide
uugugguuuguugaguuuu

SEQ ID NO: 1067672 - RNA, 19 nt, Artificial Sequence
  Description of Artificial Sequence: Synthetic oligonucleotide
uaugaacauugaguccgag

SEQ ID NO: 1067673 - RNA, 19 nt, Artificial Sequence
  Description of Artificial Sequence: Synthetic oligonucleotide
auaucaggggacagaaugu

SEQ ID NO: 1067674 - RNA, 19 nt, Artificial Sequence
  Description of Artificial Sequence: Synthetic oligonucleotide
gaaagacgaccuucugcac

SEQ ID NO: 1067675 - RNA, 19 nt, Artificial Sequence
  Description of Artificial Sequence: Synthetic oligonucleotide
ucggaguacuguucagaca

SEQ ID NO: 1067676 - RNA, 19 nt, Artificial Sequence
  Description of Artificial Sequence: Synthetic oligonucleotide
uaccuaacauguagcugac

SEQ ID NO: 1067677 - RNA, 19 nt, Artificial Sequence
  Description of Artificial Sequence: Synthetic oligonucleotide
ccucauccaaaagugaggg

SEQ ID NO: 1067678 - RNA, 19 nt, Artificial Sequence
  Description of Artificial Sequence: Synthetic oligonucleotide
ucccauaagguuguucaaa

SEQ ID NO: 1067679 - RNA, 19 nt, Artificial Sequence
  Description of Artificial Sequence: Synthetic oligonucleotide
cagggauauauaagaacca

SEQ ID NO: 1067680 - RNA, 19 nt, Artificial Sequence
  Description of Artificial Sequence: Synthetic oligonucleotide
uggaccgucccguucucca

SEQ ID NO: 1067681 - RNA, 19 nt, Artificial Sequence
  Description of Artificial Sequence: Synthetic oligonucleotide
agauccagcugcaaugaga

SEQ ID NO: 1067682 - RNA, 19 nt, Artificial Sequence
  Description of Artificial Sequence: Synthetic oligonucleotide
gaaccacuggagccccacg

SEQ ID NO: 1067683 - RNA, 19 nt, Artificial Sequence
  Description of Artificial Sequence: Synthetic oligonucleotide
cccaagggauacaauauac

SEQ ID NO: 1067684 - RNA, 19 nt, Artificial Sequence
  Description of Artificial Sequence: Synthetic oligonucleotide
ucuuuccaucaguuguggu

SEQ ID NO: 1067685 - RNA, 19 nt, Artificial Sequence
  Description of Artificial Sequence: Synthetic oligonucleotide
agagagggaguccucugau

SEQ ID NO: 1067686 - RNA, 19 nt, Artificial Sequence
  Description of Artificial Sequence: Synthetic oligonucleotide
augugcaucuuuccccaga

SEQ ID NO: 1067687 - RNA, 19 nt, Artificial Sequence
  Description of Artificial Sequence: Synthetic oligonucleotide
augucccucaguuuauauu

SEQ ID NO: 1067688 - RNA, 19 nt, Artificial Sequence
  Description of Artificial Sequence: Synthetic oligonucleotide
agggaggacugaucauauc

SEQ ID NO: 1067689 - RNA, 19 nt, Artificial Sequence
  Description of Artificial Sequence: Synthetic oligonucleotide
uggcaacuuaggacgcccc

SEQ ID NO: 1067690 - RNA, 19 nt, Artificial Sequence
  Description of Artificial Sequence: Synthetic oligonucleotide
agggucgccucccgagggc

SEQ ID NO: 1067691 - RNA, 19 nt, Artificial Sequence
  Description of Artificial Sequence: Synthetic oligonucleotide
ugacguucaggaccucauc

SEQ ID NO: 1067692 - RNA, 19 nt, Artificial Sequence
  Description of Artificial Sequence: Synthetic oligonucleotide
augugaauggugugacgaa

SEQ ID NO: 1067693 - RNA, 19 nt, Artificial Sequence
  Description of Artificial Sequence: Synthetic oligonucleotide
ucugcacgaguaucccaca

SEQ ID NO: 1067694 - RNA, 19 nt, Artificial Sequence
  Description of Artificial Sequence: Synthetic oligonucleotide
ucauaucaggggacagaau

SEQ ID NO: 1067695 - RNA, 19 nt, Artificial Sequence
  Description of Artificial Sequence: Synthetic oligonucleotide
aaguggcucugaaaugaca

SEQ ID NO: 1067696 - RNA, 19 nt, Artificial Sequence
  Description of Artificial Sequence: Synthetic oligonucleotide
aagggaggacugaucauau

SEQ ID NO: 1067697 - RNA, 19 nt, Artificial Sequence
  Description of Artificial Sequence: Synthetic oligonucleotide
accucuuacuccaaaggaa

SEQ ID NO: 1067698 - RNA, 19 nt, Artificial Sequence
  Description of Artificial Sequence: Synthetic oligonucleotide
gaggcagggugcucaaaca

SEQ ID NO: 1067699 - RNA, 19 nt, Artificial Sequence
  Description of Artificial Sequence: Synthetic oligonucleotide
ggcuuagguguuaagcaag

SEQ ID NO: 1067700 - RNA, 19 nt, Artificial Sequence
  Description of Artificial Sequence: Synthetic oligonucleotide
agucggaguacuguucaga

SEQ ID NO: 1067701 - RNA, 19 nt, Artificial Sequence
  Description of Artificial Sequence: Synthetic oligonucleotide
gagguaucucccuggugga

SEQ ID NO: 1067702 - RNA, 19 nt, Artificial Sequence
  Description of Artificial Sequence: Synthetic oligonucleotide
aguacuguucagacaggcu

SEQ ID NO: 1067703 - RNA, 19 nt, Artificial Sequence
  Description of Artificial Sequence: Synthetic oligonucleotide
caauaagggcagcaugaga

SEQ ID NO: 1067704 - RNA, 19 nt, Artificial Sequence
  Description of Artificial Sequence: Synthetic oligonucleotide
aagaaccgucacauuauuu

SEQ ID NO: 1067705 - RNA, 19 nt, Artificial Sequence
  Description of Artificial Sequence: Synthetic oligonucleotide
auuucacagacaggggaaa

SEQ ID NO: 1067706 - RNA, 19 nt, Artificial Sequence
  Description of Artificial Sequence: Synthetic oligonucleotide
agguguuaagcaaguuuug

SEQ ID NO: 1067707 - RNA, 19 nt, Artificial Sequence
  Description of Artificial Sequence: Synthetic oligonucleotide
aaacagggcacggcgguua

SEQ ID NO: 1067708 - RNA, 19 nt, Artificial Sequence
  Description of Artificial Sequence: Synthetic oligonucleotide
ugguaccucuuacuccaaa

SEQ ID NO: 1067709 - RNA, 19 nt, Artificial Sequence
  Description of Artificial Sequence: Synthetic oligonucleotide
cuuuccaucaguugugguu

SEQ ID NO: 1067710 - RNA, 19 nt, Artificial Sequence
  Description of Artificial Sequence: Synthetic oligonucleotide
aaggcccuauugauaagaa

SEQ ID NO: 1067711 - RNA, 19 nt, Artificial Sequence
  Description of Artificial Sequence: Synthetic oligonucleotide
cauugacccagcccucuuc

SEQ ID NO: 1067712 - RNA, 19 nt, Artificial Sequence
  Description of Artificial Sequence: Synthetic oligonucleotide
agguaucucccugguggac

SEQ ID NO: 1067713 - RNA, 19 nt, Artificial Sequence
  Description of Artificial Sequence: Synthetic oligonucleotide
cagacaggggaaagacgac

SEQ ID NO: 1067714 - RNA, 19 nt, Artificial Sequence
  Description of Artificial Sequence: Synthetic oligonucleotide
ucgacuucaugagcucaca

SEQ ID NO: 1067715 - RNA, 19 nt, Artificial Sequence
  Description of Artificial Sequence: Synthetic oligonucleotide
aggggaaagacgaccuucu

SEQ ID NO: 1067716 - RNA, 19 nt, Artificial Sequence
  Description of Artificial Sequence: Synthetic oligonucleotide
ggaaagacccauugaccca

SEQ ID NO: 1067717 - RNA, 19 nt, Artificial Sequence
  Description of Artificial Sequence: Synthetic oligonucleotide
aaccccggucccauaaggu

SEQ ID NO: 1067718 - RNA, 19 nt, Artificial Sequence
  Description of Artificial Sequence: Synthetic oligonucleotide
acuccagguuacuuauuuu

SEQ ID NO: 1067719 - RNA, 19 nt, Artificial Sequence
  Description of Artificial Sequence: Synthetic oligonucleotide
uagcggaggcuccucacuu

SEQ ID NO: 1067720 - RNA, 19 nt, Artificial Sequence
  Description of Artificial Sequence: Synthetic oligonucleotide
cugacucacucccucucuc

SEQ ID NO: 1067721 - RNA, 19 nt, Artificial Sequence
  Description of Artificial Sequence: Synthetic oligonucleotide
cagggucgccucccgaggg

SEQ ID NO: 1067722 - RNA, 19 nt, Artificial Sequence
  Description of Artificial Sequence: Synthetic oligonucleotide
cuaugaacauugaguccga

SEQ ID NO: 1067723 - RNA, 19 nt, Artificial Sequence
  Description of Artificial Sequence: Synthetic oligonucleotide
cuaacauguagcugacagu

SEQ ID NO: 1067724 - RNA, 19 nt, Artificial Sequence
  Description of Artificial Sequence: Synthetic oligonucleotide
acgagguaucucccuggug

SEQ ID NO: 1067725 - RNA, 19 nt, Artificial Sequence
  Description of Artificial Sequence: Synthetic oligonucleotide
uccucacuucugccccggg

SEQ ID NO: 1067726 - RNA, 19 nt, Artificial Sequence
  Description of Artificial Sequence: Synthetic oligonucleotide
gucuucgacuucaugagcu

SEQ ID NO: 1067727 - RNA, 19 nt, Artificial Sequence
  Description of Artificial Sequence: Synthetic oligonucleotide
cugcacgaguaucccacac

SEQ ID NO: 1067728 - RNA, 19 nt, Artificial Sequence
  Description of Artificial Sequence: Synthetic oligonucleotide
agcccaagggauacaauau

SEQ ID NO: 1067729 - RNA, 19 nt, Artificial Sequence
  Description of Artificial Sequence: Synthetic oligonucleotide
cugggauccuccaauggua

SEQ ID NO: 1067730 - RNA, 19 nt, Artificial Sequence
  Description of Artificial Sequence: Synthetic oligonucleotide
gaccgucccguucuccaac

SEQ ID NO: 1067731 - RNA, 19 nt, Artificial Sequence
  Description of Artificial Sequence: Synthetic oligonucleotide
caugugcaucuuuccccag

SEQ ID NO: 1067732 - RNA, 19 nt, Artificial Sequence
  Description of Artificial Sequence: Synthetic oligonucleotide
ggaggucuugcucagcaaa

SEQ ID NO: 1067733 - RNA, 19 nt, Artificial Sequence
  Description of Artificial Sequence: Synthetic oligonucleotide
gaccuucugcacgaguauc

SEQ ID NO: 1067734 - RNA, 19 nt, Artificial Sequence
  Description of Artificial Sequence: Synthetic oligonucleotide
cuuccacagcaccaagaca

SEQ ID NO: 1067735 - RNA, 19 nt, Artificial Sequence
  Description of Artificial Sequence: Synthetic oligonucleotide
gacaggggaaagacgaccu

SEQ ID NO: 1067736 - RNA, 19 nt, Artificial Sequence
  Description of Artificial Sequence: Synthetic oligonucleotide
cagucggaguacuguucag

SEQ ID NO: 1067737 - RNA, 19 nt, Artificial Sequence
  Description of Artificial Sequence: Synthetic oligonucleotide
ggugacaauaagggcagca

SEQ ID NO: 1067738 - RNA, 19 nt, Artificial Sequence
  Description of Artificial Sequence: Synthetic oligonucleotide
caagggaggacugaucaua

SEQ ID NO: 1067739 - RNA, 19 nt, Artificial Sequence
  Description of Artificial Sequence: Synthetic oligonucleotide
caggaacguuauuuuagaa

SEQ ID NO: 1067740 - RNA, 19 nt, Artificial Sequence
  Description of Artificial Sequence: Synthetic oligonucleotide
ccaagggauacaauauaca

SEQ ID NO: 1067741 - RNA, 19 nt, Artificial Sequence
  Description of Artificial Sequence: Synthetic oligonucleotide
guugcuauggugagcccaa

SEQ ID NO: 1067742 - RNA, 19 nt, Artificial Sequence
  Description of Artificial Sequence: Synthetic oligonucleotide
uggagccccacgagguauc

SEQ ID NO: 1067743 - RNA, 19 nt, Artificial Sequence
  Description of Artificial Sequence: Synthetic oligonucleotide
cagagagggaguccucuga

SEQ ID NO: 1067744 - RNA, 19 nt, Artificial Sequence
  Description of Artificial Sequence: Synthetic oligonucleotide
cuucgacuucaugagcuca

SEQ ID NO: 1067745 - RNA, 19 nt, Artificial Sequence
  Description of Artificial Sequence: Synthetic oligonucleotide
cagcaaugccugcugaaaa

SEQ ID NO: 1067746 - RNA, 19 nt, Artificial Sequence
  Description of Artificial Sequence: Synthetic oligonucleotide
gggacagaaugucccucag

SEQ ID NO: 1067747 - RNA, 19 nt, Artificial Sequence
  Description of Artificial Sequence: Synthetic oligonucleotide
uccaucaguugugguuugu

SEQ ID NO: 1067748 - RNA, 19 nt, Artificial Sequence
  Description of Artificial Sequence: Synthetic oligonucleotide
augacguucaggaccucau

SEQ ID NO: 1067749 - RNA, 19 nt, Artificial Sequence
  Description of Artificial Sequence: Synthetic oligonucleotide
cugcuuauuuugguaccuc

SEQ ID NO: 1067750 - RNA, 19 nt, Artificial Sequence
  Description of Artificial Sequence: Synthetic oligonucleotide
cauugaguccgaggugcug

SEQ ID NO: 1067751 - RNA, 19 nt, Artificial Sequence
  Description of Artificial Sequence: Synthetic oligonucleotide
caugacguucaggaccuca

SEQ ID NO: 1067752 - RNA, 19 nt, Artificial Sequence
  Description of Artificial Sequence: Synthetic oligonucleotide
caucagcaaugccugcuga

SEQ ID NO: 1067753 - RNA, 19 nt, Artificial Sequence
  Description of Artificial Sequence: Synthetic oligonucleotide
cccaagggaggacugauca

SEQ ID NO: 1067754 - RNA, 19 nt, Artificial Sequence
  Description of Artificial Sequence: Synthetic oligonucleotide
ggaacaggaacguuauuuu

SEQ ID NO: 1067755 - RNA, 19 nt, Artificial Sequence
  Description of Artificial Sequence: Synthetic oligonucleotide
cugacuccagguuacuuau

SEQ ID NO: 1067756 - RNA, 19 nt, Artificial Sequence
  Description of Artificial Sequence: Synthetic oligonucleotide
ccacgagguaucucccugg

SEQ ID NO: 1067757 - RNA, 19 nt, Artificial Sequence
  Description of Artificial Sequence: Synthetic oligonucleotide
ggcagggugcucaaacaug

SEQ ID NO: 1067758 - RNA, 19 nt, Artificial Sequence
  Description of Artificial Sequence: Synthetic oligonucleotide
agcaguagcggaggcuccu

SEQ ID NO: 1067759 - RNA, 19 nt, Artificial Sequence
  Description of Artificial Sequence: Synthetic oligonucleotide
cuuuccccagagcugguua

SEQ ID NO: 1067760 - RNA, 19 nt, Artificial Sequence
  Description of Artificial Sequence: Synthetic oligonucleotide
guccgaggugcuguuggcc

SEQ ID NO: 1067761 - RNA, 19 nt, Artificial Sequence
  Description of Artificial Sequence: Synthetic oligonucleotide
auuggggucuuggcuggca

SEQ ID NO: 1067762 - RNA, 19 nt, Artificial Sequence
  Description of Artificial Sequence: Synthetic oligonucleotide
uuguaggaacaggaacguu

SEQ ID NO: 1067763 - RNA, 19 nt, Artificial Sequence
  Description of Artificial Sequence: Synthetic oligonucleotide
guccuccgcaggccagucg

SEQ ID NO: 1067764 - RNA, 19 nt, Artificial Sequence
  Description of Artificial Sequence: Synthetic oligonucleotide
acuggcccgagugugcuuu

SEQ ID NO: 1067765 - RNA, 19 nt, Artificial Sequence
  Description of Artificial Sequence: Synthetic oligonucleotide
cagggugcucaaacauguc

SEQ ID NO: 1067766 - RNA, 19 nt, Artificial Sequence
  Description of Artificial Sequence: Synthetic oligonucleotide
ccccggucccauaagguug

SEQ ID NO: 1067767 - RNA, 19 nt, Artificial Sequence
  Description of Artificial Sequence: Synthetic oligonucleotide
ccguucuccaacagacuac

SEQ ID NO: 1067768 - RNA, 19 nt, Artificial Sequence
  Description of Artificial Sequence: Synthetic oligonucleotide
cuuggcuggcauuguggaa

SEQ ID NO: 1067769 - RNA, 19 nt, Artificial Sequence
  Description of Artificial Sequence: Synthetic oligonucleotide
agaaaaccccggucccaua

SEQ ID NO: 1067770 - RNA, 19 nt, Artificial Sequence
  Description of Artificial Sequence: Synthetic oligonucleotide
acauugaguccgaggugcu

SEQ ID NO: 1067771 - RNA, 19 nt, Artificial Sequence
  Description of Artificial Sequence: Synthetic oligonucleotide
cugguggaccgucccguuc

SEQ ID NO: 1067772 - RNA, 19 nt, Artificial Sequence
  Description of Artificial Sequence: Synthetic oligonucleotide
guaaagcgccuuggaaaga

SEQ ID NO: 1067773 - RNA, 19 nt, Artificial Sequence
  Description of Artificial Sequence: Synthetic oligonucleotide
agcgccuuggaaagaccca

SEQ ID NO: 1067774 - RNA, 19 nt, Artificial Sequence
  Description of Artificial Sequence: Synthetic oligonucleotide
ggucugggaggucuugcuc

SEQ ID NO: 1067775 - RNA, 19 nt, Artificial Sequence
  Description of Artificial Sequence: Synthetic oligonucleotide
uucagacagccuggauuuc

SEQ ID NO: 1067776 - RNA, 19 nt, Artificial Sequence
  Description of Artificial Sequence: Synthetic oligonucleotide
ccuucugcacgaguauccc

SEQ ID NO: 1067777 - RNA, 19 nt, Artificial Sequence
  Description of Artificial Sequence: Synthetic oligonucleotide
ccagucggaguacuguuca

SEQ ID NO: 1067778 - RNA, 19 nt, Artificial Sequence
  Description of Artificial Sequence: Synthetic oligonucleotide
accuaacauguagcugaca

SEQ ID NO: 1067779 - RNA, 19 nt, Artificial Sequence
  Description of Artificial Sequence: Synthetic oligonucleotide
augagagcagggagccugu

SEQ ID NO: 1067780 - RNA, 19 nt, Artificial Sequence
  Description of Artificial Sequence: Synthetic oligonucleotide
agugagggcccaagaucca

SEQ ID NO: 1067781 - RNA, 19 nt, Artificial Sequence
  Description of Artificial Sequence: Synthetic oligonucleotide
guugugguuuguugaguuu

SEQ ID NO: 1067782 - RNA, 19 nt, Artificial Sequence
  Description of Artificial Sequence: Synthetic oligonucleotide
gacgaccuucugcacgagu

SEQ ID NO: 1067783 - RNA, 19 nt, Artificial Sequence
  Description of Artificial Sequence: Synthetic oligonucleotide
gacgccccaaggacuccug

SEQ ID NO: 1067784 - RNA, 19 nt, Artificial Sequence
  Description of Artificial Sequence: Synthetic oligonucleotide
gccgaacaucagcaaugcc

SEQ ID NO: 1067785 - RNA, 19 nt, Artificial Sequence
  Description of Artificial Sequence: Synthetic oligonucleotide
caguagcggaggcuccuca

SEQ ID NO: 1067786 - RNA, 19 nt, Artificial Sequence
  Description of Artificial Sequence: Synthetic oligonucleotide
ccagggucgccucccgagg

SEQ ID NO: 1067787 - RNA, 19 nt, Artificial Sequence
  Description of Artificial Sequence: Synthetic oligonucleotide
cgggcgucggccagggucg

SEQ ID NO: 1067788 - RNA, 19 nt, Artificial Sequence
  Description of Artificial Sequence: Synthetic oligonucleotide
cccucuuugccgaugugaa

SEQ ID NO: 1067789 - RNA, 19 nt, Artificial Sequence
  Description of Artificial Sequence: Synthetic oligonucleotide
gggucgccucccgagggcg

SEQ ID NO: 1067790 - RNA, 19 nt, Artificial Sequence
  Description of Artificial Sequence: Synthetic oligonucleotide
agacgaccuucugcacgag

SEQ ID NO: 1067791 - RNA, 19 nt, Artificial Sequence
  Description of Artificial Sequence: Synthetic oligonucleotide
gcacgaguaucccacacuu

SEQ ID NO: 1067792 - RNA, 19 nt, Artificial Sequence
  Description of Artificial Sequence: Synthetic oligonucleotide
gcccucuuugccgauguga

SEQ ID NO: 1067793 - RNA, 19 nt, Artificial Sequence
  Description of Artificial Sequence: Synthetic oligonucleotide
guggaccgucccguucucc

SEQ ID NO: 1067794 - RNA, 19 nt, Artificial Sequence
  Description of Artificial Sequence: Synthetic oligonucleotide
ggacuccugcuuggaauug

SEQ ID NO: 1067795 - RNA, 19 nt, Artificial Sequence
  Description of Artificial Sequence: Synthetic oligonucleotide
cccguucuccaacagacua

SEQ ID NO: 1067796 - RNA, 19 nt, Artificial Sequence
  Description of Artificial Sequence: Synthetic oligonucleotide
ccauaagguuguucaaaua

SEQ ID NO: 1067797 - RNA, 19 nt, Artificial Sequence
  Description of Artificial Sequence: Synthetic oligonucleotide
cgaguaucccacacuuuca

SEQ ID NO: 1067798 - RNA, 19 nt, Artificial Sequence
  Description of Artificial Sequence: Synthetic oligonucleotide
gcuuagguguuaagcaagu

SEQ ID NO: 1067799 - RNA, 19 nt, Artificial Sequence
  Description of Artificial Sequence: Synthetic oligonucleotide
cacgagguaucucccuggu

SEQ ID NO: 1067800 - RNA, 19 nt, Artificial Sequence
  Description of Artificial Sequence: Synthetic oligonucleotide
ggauuucugccuggcggca

SEQ ID NO: 1067801 - RNA, 19 nt, Artificial Sequence
  Description of Artificial Sequence: Synthetic oligonucleotide
gccagucggaguacuguuc

SEQ ID NO: 1067802 - RNA, 19 nt, Artificial Sequence
  Description of Artificial Sequence: Synthetic oligonucleotide
ggacgggcgucggccaggg

SEQ ID NO: 1067803 - RNA, 19 nt, Artificial Sequence
  Description of Artificial Sequence: Synthetic oligonucleotide
gguuuccaggcaagagcuc

SEQ ID NO: 1067804 - RNA, 19 nt, Artificial Sequence
  Description of Artificial Sequence: Synthetic oligonucleotide
ggcccggaagaagucauua

SEQ ID NO: 1067805 - RNA, 19 nt, Artificial Sequence
  Description of Artificial Sequence: Synthetic oligonucleotide
gggaggucuugcucagcaa

SEQ ID NO: 1067806 - RNA, 19 nt, Artificial Sequence
  Description of Artificial Sequence: Synthetic oligonucleotide
ccggggacgggcgucggcc

SEQ ID NO: 1067807 - RNA, 19 nt, Artificial Sequence
  Description of Artificial Sequence: Synthetic oligonucleotide
ggguguuucuaugaacauu

SEQ ID NO: 1067808 - RNA, 19 nt, Artificial Sequence
  Description of Artificial Sequence: Synthetic oligonucleotide
ggaccgucccguucuccaa

SEQ ID NO: 1067809 - RNA, 19 nt, Artificial Sequence
  Description of Artificial Sequence: Synthetic oligonucleotide
gucgccucccgagggcgca

SEQ ID NO: 1067810 - RNA, 19 nt, Artificial Sequence
  Description of Artificial Sequence: Synthetic oligonucleotide
gguggaccgucccguucuc

SEQ ID NO: 1067811 - RNA, 19 nt, Artificial Sequence
  Description of Artificial Sequence: Synthetic oligonucleotide
cacgaguaucccacacuuu

SEQ ID NO: 1067812 - RNA, 19 nt, Artificial Sequence
  Description of Artificial Sequence: Synthetic oligonucleotide
cuuugccgaugugaauggu

SEQ ID NO: 1067813 - RNA, 19 nt, Artificial Sequence
  Description of Artificial Sequence: Synthetic oligonucleotide
cccaagauccagcugcaau

SEQ ID NO: 1067814 - RNA, 19 nt, Artificial Sequence
  Description of Artificial Sequence: Synthetic oligonucleotide
ggcccaagauccagcugca

SEQ ID NO: 1067815 - RNA, 19 nt, Artificial Sequence
  Description of Artificial Sequence: Synthetic oligonucleotide
cuccaaugguagggaggga

SEQ ID NO: 1067816 - RNA, 19 nt, Artificial Sequence
  Description of Artificial Sequence: Synthetic oligonucleotide
cuggagccccacgagguau

SEQ ID NO: 1067817 - RNA, 19 nt, Artificial Sequence
  Description of Artificial Sequence: Synthetic oligonucleotide
ccgucccguucuccaacag

SEQ ID NO: 1067818 - RNA, 19 nt, Artificial Sequence
  Description of Artificial Sequence: Synthetic oligonucleotide
ggccagucggaguacuguu

SEQ ID NO: 1067819 - RNA, 19 nt, Artificial Sequence
  Description of Artificial Sequence: Synthetic oligonucleotide
gcugagccuuggcaacuua

SEQ ID NO: 1067820 - RNA, 19 nt, Artificial Sequence
  Description of Artificial Sequence: Synthetic oligonucleotide
gcaguagcggaggcuccuc

SEQ ID NO: 1067821 - RNA, 19 nt, Artificial Sequence
  Description of Artificial Sequence: Synthetic oligonucleotide
caguaauaccuugcuuguu

SEQ ID NO: 1067822 - RNA, 19 nt, Artificial Sequence
  Description of Artificial Sequence: Synthetic oligonucleotide
ggucgccucccgagggcgc

SEQ ID NO: 1067823 - RNA, 19 nt, Artificial Sequence
  Description of Artificial Sequence: Synthetic oligonucleotide
gcccggaagaagucauuau

SEQ ID NO: 1067824 - RNA, 19 nt, Artificial Sequence
  Description of Artificial Sequence: Synthetic oligonucleotide
caaugagagcagggagccu

SEQ ID NO: 1067825 - RNA, 19 nt, Artificial Sequence
  Description of Artificial Sequence: Synthetic oligonucleotide
gccccggggacgggcgucg

SEQ ID NO: 1067826 - RNA, 19 nt, Artificial Sequence
  Description of Artificial Sequence: Synthetic oligonucleotide
cccggucccauaagguugu

SEQ ID NO: 1067827 - RNA, 19 nt, Artificial Sequence
  Description of Artificial Sequence: Synthetic oligonucleotide
gcgccuuggaaagacccau

SEQ ID NO: 1067828 - RNA, 19 nt, Artificial Sequence
  Description of Artificial Sequence: Synthetic oligonucleotide
caaacagggcacggcgguu

SEQ ID NO: 1067829 - RNA, 19 nt, Artificial Sequence
  Description of Artificial Sequence: Synthetic oligonucleotide
ggacgccccaaggacuccu

SEQ ID NO: 1067830 - RNA, 19 nt, Artificial Sequence
  Description of Artificial Sequence: Synthetic oligonucleotide
gccuggcggcaaacaaaca

SEQ ID NO: 1067831 - RNA, 19 nt, Artificial Sequence
  Description of Artificial Sequence: Synthetic oligonucleotide
ggagccccacgagguaucu

SEQ ID NO: 1067832 - RNA, 19 nt, Artificial Sequence
  Description of Artificial Sequence: Synthetic oligonucleotide
gggaguccucugauuuagu

SEQ ID NO: 1067833 - RNA, 19 nt, Artificial Sequence
  Description of Artificial Sequence: Synthetic oligonucleotide
ggcgucggccagggucgcc

SEQ ID NO: 1067834 - RNA, 19 nt, Artificial Sequence
  Description of Artificial Sequence: Synthetic oligonucleotide
gcccaagauccagcugcaa

SEQ ID NO: 1067835 - RNA, 19 nt, Artificial Sequence
  Description of Artificial Sequence: Synthetic oligonucleotide
ccaucaguugugguuuguu

SEQ ID NO: 1067836 - RNA, 19 nt, Artificial Sequence
  Description of Artificial Sequence: Synthetic oligonucleotide
gacgggcgucggccagggu

SEQ ID NO: 1067837 - RNA, 19 nt, Artificial Sequence
  Description of Artificial Sequence: Synthetic oligonucleotide
gggcgucggccagggucgc

SEQ ID NO: 1067838 - RNA, 19 nt, Artificial Sequence
  Description of Artificial Sequence: Synthetic oligonucleotide
ccccacgagguaucucccu

SEQ ID NO: 1067839 - RNA, 19 nt, Artificial Sequence
  Description of Artificial Sequence: Synthetic oligonucleotide
cgaccuucugcacgaguau

SEQ ID NO: 1067840 - RNA, 19 nt, Artificial Sequence
  Description of Artificial Sequence: Synthetic oligonucleotide
cuggcccgagugugcuuuu

SEQ ID NO: 1067841 - RNA, 19 nt, Artificial Sequence
  Description of Artificial Sequence: Synthetic oligonucleotide
ccaugacguucaggaccuc

SEQ ID NO: 1067842 - RNA, 19 nt, Artificial Sequence
  Description of Artificial Sequence: Synthetic oligonucleotide
ccauugacccagcccucuu

SEQ ID NO: 1067843 - RNA, 19 nt, Artificial Sequence
  Description of Artificial Sequence: Synthetic oligonucleotide
ccccggggacgggcgucgg

SEQ ID NO: 1067844 - RNA, 19 nt, Artificial Sequence
  Description of Artificial Sequence: Synthetic oligonucleotide
ccggucccauaagguuguu

SEQ ID NO: 1067845 - RNA, 19 nt, Artificial Sequence
  Description of Artificial Sequence: Synthetic oligonucleotide
aaucauaugguuuaagaac

SEQ ID NO: 1067846 - RNA, 19 nt, Artificial Sequence
  Description of Artificial Sequence: Synthetic oligonucleotide
aaucauguugcccagaaac

SEQ ID NO: 1067847 - RNA, 19 nt, Artificial Sequence
  Description of Artificial Sequence: Synthetic oligonucleotide
uuagguuccgugaagaggg

SEQ ID NO: 1067848 - RNA, 19 nt, Artificial Sequence
  Description of Artificial Sequence: Synthetic oligonucleotide
aaauuagcaauuuugcucu

SEQ ID NO: 1067849 - RNA, 19 nt, Artificial Sequence
  Description of Artificial Sequence: Synthetic oligonucleotide
agaaaaucugagcauaagc

SEQ ID NO: 1067850 - RNA, 19 nt, Artificial Sequence
  Description of Artificial Sequence: Synthetic oligonucleotide
aauaucccuacaaacagcc

SEQ ID NO: 1067851 - RNA, 19 nt, Artificial Sequence
  Description of Artificial Sequence: Synthetic oligonucleotide
ucugauaagcacaccaucg

SEQ ID NO: 1067852 - RNA, 19 nt, Artificial Sequence
  Description of Artificial Sequence: Synthetic oligonucleotide
ucaacaugcagucagaauc

SEQ ID NO: 1067853 - RNA, 19 nt, Artificial Sequence
  Description of Artificial Sequence: Synthetic oligonucleotide
acuaauaagauccucagaa

SEQ ID NO: 1067854 - RNA, 19 nt, Artificial Sequence
  Description of Artificial Sequence: Synthetic oligonucleotide
acuacucagagacaaagac

SEQ ID NO: 1067855 - RNA, 19 nt, Artificial Sequence
  Description of Artificial Sequence: Synthetic oligonucleotide
aucuguuguagguacaacc

SEQ ID NO: 1067856 - RNA, 19 nt, Artificial Sequence
  Description of Artificial Sequence: Synthetic oligonucleotide
auggaugcagaucaugucc

SEQ ID NO: 1067857 - RNA, 19 nt, Artificial Sequence
  Description of Artificial Sequence: Synthetic oligonucleotide
agauuaauuuccuagguga

SEQ ID NO: 1067858 - RNA, 19 nt, Artificial Sequence
  Description of Artificial Sequence: Synthetic oligonucleotide
acuaaugaauaauacaaga

SEQ ID NO: 1067859 - RNA, 19 nt, Artificial Sequence
  Description of Artificial Sequence: Synthetic oligonucleotide
auaagcacaccaucgauuc

SEQ ID NO: 1067860 - RNA, 19 nt, Artificial Sequence
  Description of Artificial Sequence: Synthetic oligonucleotide
uaaauauugagagauuuca

SEQ ID NO: 1067861 - RNA, 19 nt, Artificial Sequence
  Description of Artificial Sequence: Synthetic oligonucleotide
agaagugcgaauaaacacc

SEQ ID NO: 1067862 - RNA, 19 nt, Artificial Sequence
  Description of Artificial Sequence: Synthetic oligonucleotide
uuaauuuccuaggugacag

SEQ ID NO: 1067863 - RNA, 19 nt, Artificial Sequence
  Description of Artificial Sequence: Synthetic oligonucleotide
uaacuuaagagauucucca

SEQ ID NO: 1067864 - RNA, 19 nt, Artificial Sequence
  Description of Artificial Sequence: Synthetic oligonucleotide
uaaaugggaguuaagugga

SEQ ID NO: 1067865 - RNA, 19 nt, Artificial Sequence
  Description of Artificial Sequence: Synthetic oligonucleotide
uguuuacacaucuuagugc

SEQ ID NO: 1067866 - RNA, 19 nt, Artificial Sequence
  Description of Artificial Sequence: Synthetic oligonucleotide
aguaaucuaacacuacuca

SEQ ID NO: 1067867 - RNA, 19 nt, Artificial Sequence
  Description of Artificial Sequence: Synthetic oligonucleotide
auacuagcuucucacaaac

SEQ ID NO: 1067868 - RNA, 19 nt, Artificial Sequence
  Description of Artificial Sequence: Synthetic oligonucleotide
ugguacaugucauauuuag

SEQ ID NO: 1067869 - RNA, 19 nt, Artificial Sequence
  Description of Artificial Sequence: Synthetic oligonucleotide
uccuauggacgucacaagg

SEQ ID NO: 1067870 - RNA, 19 nt, Artificial Sequence
  Description of Artificial Sequence: Synthetic oligonucleotide
aaauacuagcuucucacaa

SEQ ID NO: 1067871 - RNA, 19 nt, Artificial Sequence
  Description of Artificial Sequence: Synthetic oligonucleotide
uugguaaauauugagagau

SEQ ID NO: 1067872 - RNA, 19 nt, Artificial Sequence
  Description of Artificial Sequence: Synthetic oligonucleotide
uagugcaucaguagcauug

SEQ ID NO: 1067873 - RNA, 19 nt, Artificial Sequence
  Description of Artificial Sequence: Synthetic oligonucleotide
ugcuuugugaguccgcagg

SEQ ID NO: 1067874 - RNA, 19 nt, Artificial Sequence
  Description of Artificial Sequence: Synthetic oligonucleotide
aaguaaucuaacacuacuc

SEQ ID NO: 1067875 - RNA, 19 nt, Artificial Sequence
  Description of Artificial Sequence: Synthetic oligonucleotide
acaaacagccaagaugucc

SEQ ID NO: 1067876 - RNA, 19 nt, Artificial Sequence
  Description of Artificial Sequence: Synthetic oligonucleotide
uuauaaucuguuguauagg

SEQ ID NO: 1067877 - RNA, 19 nt, Artificial Sequence
  Description of Artificial Sequence: Synthetic oligonucleotide
ucucgcaacauguaggucu

SEQ ID NO: 1067878 - RNA, 19 nt, Artificial Sequence
  Description of Artificial Sequence: Synthetic oligonucleotide
ucauucauucugauaagca

SEQ ID NO: 1067879 - RNA, 19 nt, Artificial Sequence
  Description of Artificial Sequence: Synthetic oligonucleotide
aguggaaccugccuguaac

SEQ ID NO: 1067880 - RNA, 19 nt, Artificial Sequence
  Description of Artificial Sequence: Synthetic oligonucleotide
auccuuagaacguugucuc

SEQ ID NO: 1067881 - RNA, 19 nt, Artificial Sequence
  Description of Artificial Sequence: Synthetic oligonucleotide
aacuaaugaauaauacaag

SEQ ID NO: 1067882 - RNA, 19 nt, Artificial Sequence
  Description of Artificial Sequence: Synthetic oligonucleotide
ucuuagugcaucaguagca

SEQ ID NO: 1067883 - RNA, 19 nt, Artificial Sequence
  Description of Artificial Sequence: Synthetic oligonucleotide
aaggcaucgggacucagug

SEQ ID NO: 1067884 - RNA, 19 nt, Artificial Sequence
  Description of Artificial Sequence: Synthetic oligonucleotide
caugguaaagccuuguguc

SEQ ID NO: 1067885 - RNA, 19 nt, Artificial Sequence
  Description of Artificial Sequence: Synthetic oligonucleotide
ucucucgugauguauauuc

SEQ ID NO: 1067886 - RNA, 19 nt, Artificial Sequence
  Description of Artificial Sequence: Synthetic oligonucleotide
uuguccguuaccaucccgg

SEQ ID NO: 1067887 - RNA, 19 nt, Artificial Sequence
  Description of Artificial Sequence: Synthetic oligonucleotide
cucgugauguauauucucg

SEQ ID NO: 1067888 - RNA, 19 nt, Artificial Sequence
  Description of Artificial Sequence: Synthetic oligonucleotide
uccguuaccaucccggccc

SEQ ID NO: 1067889 - RNA, 19 nt, Artificial Sequence
  Description of Artificial Sequence: Synthetic oligonucleotide
guuaaguggaaccugccug

SEQ ID NO: 1067890 - RNA, 19 nt, Artificial Sequence
  Description of Artificial Sequence: Synthetic oligonucleotide
ucuauaugaucuguuguag

SEQ ID NO: 1067891 - RNA, 19 nt, Artificial Sequence
  Description of Artificial Sequence: Synthetic oligonucleotide
gcgaauaaacaccagaaag

SEQ ID NO: 1067892 - RNA, 19 nt, Artificial Sequence
  Description of Artificial Sequence: Synthetic oligonucleotide
aaugggaguuaaguggaac

SEQ ID NO: 1067893 - RNA, 19 nt, Artificial Sequence
  Description of Artificial Sequence: Synthetic oligonucleotide
aauacuagcuucucacaaa

SEQ ID NO: 1067894 - RNA, 19 nt, Artificial Sequence
  Description of Artificial Sequence: Synthetic oligonucleotide
guagguacaaccuuuaacu

SEQ ID NO: 1067895 - RNA, 19 nt, Artificial Sequence
  Description of Artificial Sequence: Synthetic oligonucleotide
ucaugguaaagccuugugu

SEQ ID NO: 1067896 - RNA, 19 nt, Artificial Sequence
  Description of Artificial Sequence: Synthetic oligonucleotide
cuaauaagauccucagaag

SEQ ID NO: 1067897 - RNA, 19 nt, Artificial Sequence
  Description of Artificial Sequence: Synthetic oligonucleotide
acacuaauaagauccucag

SEQ ID NO: 1067898 - RNA, 19 nt, Artificial Sequence
  Description of Artificial Sequence: Synthetic oligonucleotide
cagaagugcgaauaaacac

SEQ ID NO: 1067899 - RNA, 19 nt, Artificial Sequence
  Description of Artificial Sequence: Synthetic oligonucleotide
uggaacgugcauuaaauua

SEQ ID NO: 1067900 - RNA, 19 nt, Artificial Sequence
  Description of Artificial Sequence: Synthetic oligonucleotide
aauuuagccucuucacagu

SEQ ID NO: 1067901 - RNA, 19 nt, Artificial Sequence
  Description of Artificial Sequence: Synthetic oligonucleotide
aauuuccuaggugacaggu

SEQ ID NO: 1067902 - RNA, 19 nt, Artificial Sequence
  Description of Artificial Sequence: Synthetic oligonucleotide
aaggcauuacucuaauuuu

SEQ ID NO: 1067903 - RNA, 19 nt, Artificial Sequence
  Description of Artificial Sequence: Synthetic oligonucleotide
agugcgaauaaacaccaga

SEQ ID NO: 1067904 - RNA, 19 nt, Artificial Sequence
  Description of Artificial Sequence: Synthetic oligonucleotide
acggagaguaggcuguacc

SEQ ID NO: 1067905 - RNA, 19 nt, Artificial Sequence
  Description of Artificial Sequence: Synthetic oligonucleotide
aagccguggagcaucaugg

SEQ ID NO: 1067906 - RNA, 19 nt, Artificial Sequence
  Description of Artificial Sequence: Synthetic oligonucleotide
aucauaugguuuaagaacu

SEQ ID NO: 1067907 - RNA, 19 nt, Artificial Sequence
  Description of Artificial Sequence: Synthetic oligonucleotide
ggaaauacuagcuucucac

SEQ ID NO: 1067908 - RNA, 19 nt, Artificial Sequence
  Description of Artificial Sequence: Synthetic oligonucleotide
uuaaguggaaccugccugu

SEQ ID NO: 1067909 - RNA, 19 nt, Artificial Sequence
  Description of Artificial Sequence: Synthetic oligonucleotide
aguccgcagggcuagaauc

SEQ ID NO: 1067910 - RNA, 19 nt, Artificial Sequence
  Description of Artificial Sequence: Synthetic oligonucleotide
uuaaggccacagaaaaucu

SEQ ID NO: 1067911 - RNA, 19 nt, Artificial Sequence
  Description of Artificial Sequence: Synthetic oligonucleotide
aagauccucagaagcacac

SEQ ID NO: 1067912 - RNA, 19 nt, Artificial Sequence
  Description of Artificial Sequence: Synthetic oligonucleotide
cugagcauaagcaaggaaa

SEQ ID NO: 1067913 - RNA, 19 nt, Artificial Sequence
  Description of Artificial Sequence: Synthetic oligonucleotide
aagcacacucauccuuccc

SEQ ID NO: 1067914 - RNA, 19 nt, Artificial Sequence
  Description of Artificial Sequence: Synthetic oligonucleotide
ucuguaucuauaugaucug

SEQ ID NO: 1067915 - RNA, 19 nt, Artificial Sequence
  Description of Artificial Sequence: Synthetic oligonucleotide
uggaaauacuagcuucuca

SEQ ID NO: 1067916 - RNA, 19 nt, Artificial Sequence
  Description of Artificial Sequence: Synthetic oligonucleotide
ccuugauugguaaauauug

SEQ ID NO: 1067917 - RNA, 19 nt, Artificial Sequence
  Description of Artificial Sequence: Synthetic oligonucleotide
uaugguuuaagaacuucuu

SEQ ID NO: 1067918 - RNA, 19 nt, Artificial Sequence
  Description of Artificial Sequence: Synthetic oligonucleotide
uagaacguugucuccaaac

SEQ ID NO: 1067919 - RNA, 19 nt, Artificial Sequence
  Description of Artificial Sequence: Synthetic oligonucleotide
gauucuccaaguaacguuc

SEQ ID NO: 1067920 - RNA, 19 nt, Artificial Sequence
  Description of Artificial Sequence: Synthetic oligonucleotide
accggaacacacuaauaag

SEQ ID NO: 1067921 - RNA, 19 nt, Artificial Sequence
  Description of Artificial Sequence: Synthetic oligonucleotide
uuguauagguccaaucaua

SEQ ID NO: 1067922 - RNA, 19 nt, Artificial Sequence
  Description of Artificial Sequence: Synthetic oligonucleotide
agcauaauuccuuauuauu

SEQ ID NO: 1067923 - RNA, 19 nt, Artificial Sequence
  Description of Artificial Sequence: Synthetic oligonucleotide
cucuaauuuucacacucag

SEQ ID NO: 1067924 - RNA, 19 nt, Artificial Sequence
  Description of Artificial Sequence: Synthetic oligonucleotide
ucauguugcccagaaacug

SEQ ID NO: 1067925 - RNA, 19 nt, Artificial Sequence
  Description of Artificial Sequence: Synthetic oligonucleotide
uucugauaagcacaccauc

SEQ ID NO: 1067926 - RNA, 19 nt, Artificial Sequence
  Description of Artificial Sequence: Synthetic oligonucleotide
ucauuucagggagggaugg

SEQ ID NO: 1067927 - RNA, 19 nt, Artificial Sequence
  Description of Artificial Sequence: Synthetic oligonucleotide
uguaucuauaugaucuguu

SEQ ID NO: 1067928 - RNA, 19 nt, Artificial Sequence
  Description of Artificial Sequence: Synthetic oligonucleotide
uuaagagauucuccaagua

SEQ ID NO: 1067929 - RNA, 19 nt, Artificial Sequence
  Description of Artificial Sequence: Synthetic oligonucleotide
caucuuagugcaucaguag

SEQ ID NO: 1067930 - RNA, 19 nt, Artificial Sequence
  Description of Artificial Sequence: Synthetic oligonucleotide
gcauaugcaauucaucagc

SEQ ID NO: 1067931 - RNA, 19 nt, Artificial Sequence
  Description of Artificial Sequence: Synthetic oligonucleotide
aaguaacguuccuuuauaa

SEQ ID NO: 1067932 - RNA, 19 nt, Artificial Sequence
  Description of Artificial Sequence: Synthetic oligonucleotide
uacaugucauauuuagaaa

SEQ ID NO: 1067933 - RNA, 19 nt, Artificial Sequence
  Description of Artificial Sequence: Synthetic oligonucleotide
uuaaucuguucucuggcuu

SEQ ID NO: 1067934 - RNA, 19 nt, Artificial Sequence
  Description of Artificial Sequence: Synthetic oligonucleotide
uagcaauuuugcucucucg

SEQ ID NO: 1067935 - RNA, 19 nt, Artificial Sequence
  Description of Artificial Sequence: Synthetic oligonucleotide
ugcgaauaaacaccagaaa

SEQ ID NO: 1067936 - RNA, 19 nt, Artificial Sequence
  Description of Artificial Sequence: Synthetic oligonucleotide
uuuugcucucucgugaugu

SEQ ID NO: 1067937 - RNA, 19 nt, Artificial Sequence
  Description of Artificial Sequence: Synthetic oligonucleotide
ucgugauguauauucucgc

SEQ ID NO: 1067938 - RNA, 19 nt, Artificial Sequence
  Description of Artificial Sequence: Synthetic oligonucleotide
cacacuaauaagauccuca

SEQ ID NO: 1067939 - RNA, 19 nt, Artificial Sequence
  Description of Artificial Sequence: Synthetic oligonucleotide
uuuguccguuaccaucccg

SEQ ID NO: 1067940 - RNA, 19 nt, Artificial Sequence
  Description of Artificial Sequence: Synthetic oligonucleotide
aguuaaguggaaccugccu

SEQ ID NO: 1067941 - RNA, 19 nt, Artificial Sequence
  Description of Artificial Sequence: Synthetic oligonucleotide
ggaacgugcauuaaauuag

SEQ ID NO: 1067942 - RNA, 19 nt, Artificial Sequence
  Description of Artificial Sequence: Synthetic oligonucleotide
ugauaagcacaccaucgau

SEQ ID NO: 1067943 - RNA, 19 nt, Artificial Sequence
  Description of Artificial Sequence: Synthetic oligonucleotide
gauuaauuuccuaggugac

SEQ ID NO: 1067944 - RNA, 19 nt, Artificial Sequence
  Description of Artificial Sequence: Synthetic oligonucleotide
caaucauaugguuuaagaa

SEQ ID NO: 1067945 - RNA, 19 nt, Artificial Sequence
  Description of Artificial Sequence: Synthetic oligonucleotide
ucauuagguuccgugaaga

SEQ ID NO: 1067946 - RNA, 19 nt, Artificial Sequence
  Description of Artificial Sequence: Synthetic oligonucleotide
agaagacgaugcuucauga

SEQ ID NO: 1067947 - RNA, 19 nt, Artificial Sequence
  Description of Artificial Sequence: Synthetic oligonucleotide
auaugguuuaagaacuucu

SEQ ID NO: 1067948 - RNA, 19 nt, Artificial Sequence
  Description of Artificial Sequence: Synthetic oligonucleotide
aaaccgcaauagcagaaaa

SEQ ID NO: 1067949 - RNA, 19 nt, Artificial Sequence
  Description of Artificial Sequence: Synthetic oligonucleotide
uccuugauugguaaauauu

SEQ ID NO: 1067950 - RNA, 19 nt, Artificial Sequence
  Description of Artificial Sequence: Synthetic oligonucleotide
acgugcauuaaauuagcaa

SEQ ID NO: 1067951 - RNA, 19 nt, Artificial Sequence
  Description of Artificial Sequence: Synthetic oligonucleotide
cagucagaauccuauggac

SEQ ID NO: 1067952 - RNA, 19 nt, Artificial Sequence
  Description of Artificial Sequence: Synthetic oligonucleotide
agauucuccaaguaacguu

SEQ ID NO: 1067953 - RNA, 19 nt, Artificial Sequence
  Description of Artificial Sequence: Synthetic oligonucleotide
gauggaugcagaucauguc

SEQ ID NO: 1067954 - RNA, 19 nt, Artificial Sequence
  Description of Artificial Sequence: Synthetic oligonucleotide
cucuacacggagaguaggc

SEQ ID NO: 1067955 - RNA, 19 nt, Artificial Sequence
  Description of Artificial Sequence: Synthetic oligonucleotide
aggcauuacucuaauuuuc

SEQ ID NO: 1067956 - RNA, 19 nt, Artificial Sequence
  Description of Artificial Sequence: Synthetic oligonucleotide
gaguguucacccuccgucc

SEQ ID NO: 1067957 - RNA, 19 nt, Artificial Sequence
  Description of Artificial Sequence: Synthetic oligonucleotide
auuaauuuccuaggugaca

SEQ ID NO: 1067958 - RNA, 19 nt, Artificial Sequence
  Description of Artificial Sequence: Synthetic oligonucleotide
cuaccuuaagcaucccuug

SEQ ID NO: 1067959 - RNA, 19 nt, Artificial Sequence
  Description of Artificial Sequence: Synthetic oligonucleotide
caucgggacucagugaugg

SEQ ID NO: 1067960 - RNA, 19 nt, Artificial Sequence
  Description of Artificial Sequence: Synthetic oligonucleotide
gaacgugcauuaaauuagc

SEQ ID NO: 1067961 - RNA, 19 nt, Artificial Sequence
  Description of Artificial Sequence: Synthetic oligonucleotide
cauuagguuccgugaagag

SEQ ID NO: 1067962 - RNA, 19 nt, Artificial Sequence
  Description of Artificial Sequence: Synthetic oligonucleotide
ucucgugauguauauucuc

SEQ ID NO: 1067963 - RNA, 19 nt, Artificial Sequence
  Description of Artificial Sequence: Synthetic oligonucleotide
gaccacucggagcaagugc

SEQ ID NO: 1067964 - RNA, 19 nt, Artificial Sequence
  Description of Artificial Sequence: Synthetic oligonucleotide
gaaccugccuguaacacuc

SEQ ID NO: 1067965 - RNA, 19 nt, Artificial Sequence
  Description of Artificial Sequence: Synthetic oligonucleotide
guaaauauugagagauuuc

SEQ ID NO: 1067966 - RNA, 19 nt, Artificial Sequence
  Description of Artificial Sequence: Synthetic oligonucleotide
gucauucauucugauaagc

SEQ ID NO: 1067967 - RNA, 19 nt, Artificial Sequence
  Description of Artificial Sequence: Synthetic oligonucleotide
acauucuauuccgagggug

SEQ ID NO: 1067968 - RNA, 19 nt, Artificial Sequence
  Description of Artificial Sequence: Synthetic oligonucleotide
agguacaaccuuuaacuua

SEQ ID NO: 1067969 - RNA, 19 nt, Artificial Sequence
  Description of Artificial Sequence: Synthetic oligonucleotide
gagaguaggcuguaccaca

SEQ ID NO: 1067970 - RNA, 19 nt, Artificial Sequence
  Description of Artificial Sequence: Synthetic oligonucleotide
cacagagcggcccucuccg

SEQ ID NO: 1067971 - RNA, 19 nt, Artificial Sequence
  Description of Artificial Sequence: Synthetic oligonucleotide
guuccgugaagagggaagg

SEQ ID NO: 1067972 - RNA, 19 nt, Artificial Sequence
  Description of Artificial Sequence: Synthetic oligonucleotide
ugcauuaaauuagcaauuu

SEQ ID NO: 1067973 - RNA, 19 nt, Artificial Sequence
  Description of Artificial Sequence: Synthetic oligonucleotide
uggauccuuagaacguugu

SEQ ID NO: 1067974 - RNA, 19 nt, Artificial Sequence
  Description of Artificial Sequence: Synthetic oligonucleotide
gacuucaugaugugggucu

SEQ ID NO: 1067975 - RNA, 19 nt, Artificial Sequence
  Description of Artificial Sequence: Synthetic oligonucleotide
gaaucaacucuuucuggaa

SEQ ID NO: 1067976 - RNA, 19 nt, Artificial Sequence
  Description of Artificial Sequence: Synthetic oligonucleotide
agggugugcuuugugaguc

SEQ ID NO: 1067977 - RNA, 19 nt, Artificial Sequence
  Description of Artificial Sequence: Synthetic oligonucleotide
uggacgucacaaggcaucg

SEQ ID NO: 1067978 - RNA, 19 nt, Artificial Sequence
  Description of Artificial Sequence: Synthetic oligonucleotide
ugggaguuaaguggaaccu

SEQ ID NO: 1067979 - RNA, 19 nt, Artificial Sequence
  Description of Artificial Sequence: Synthetic oligonucleotide
ccucuuacaaaagacaaug

SEQ ID NO: 1067980 - RNA, 19 nt, Artificial Sequence
  Description of Artificial Sequence: Synthetic oligonucleotide
cuaggugacaggucacaac

SEQ ID NO: 1067981 - RNA, 19 nt, Artificial Sequence
  Description of Artificial Sequence: Synthetic oligonucleotide
aacacacuaauaagauccu

SEQ ID NO: 1067982 - RNA, 19 nt, Artificial Sequence
  Description of Artificial Sequence: Synthetic oligonucleotide
cuugguaguuguuuacaca

SEQ ID NO: 1067983 - RNA, 19 nt, Artificial Sequence
  Description of Artificial Sequence: Synthetic oligonucleotide
ucuugucagccucauggua

SEQ ID NO: 1067984 - RNA, 19 nt, Artificial Sequence
  Description of Artificial Sequence: Synthetic oligonucleotide
gauccuuagaacguugucu

SEQ ID NO: 1067985 - RNA, 19 nt, Artificial Sequence
  Description of Artificial Sequence: Synthetic oligonucleotide
cuugugucauucauucuga

SEQ ID NO: 1067986 - RNA, 19 nt, Artificial Sequence
  Description of Artificial Sequence: Synthetic oligonucleotide
uuggaguguucacccuccg

SEQ ID NO: 1067987 - RNA, 19 nt, Artificial Sequence
  Description of Artificial Sequence: Synthetic oligonucleotide
uccuuagaacguugucucc

SEQ ID NO: 1067988 - RNA, 19 nt, Artificial Sequence
  Description of Artificial Sequence: Synthetic oligonucleotide
agagcggcccucuccgaac

SEQ ID NO: 1067989 - RNA, 19 nt, Artificial Sequence
  Description of Artificial Sequence: Synthetic oligonucleotide
gcacaagcuaccuuaagca

SEQ ID NO: 1067990 - RNA, 19 nt, Artificial Sequence
  Description of Artificial Sequence: Synthetic oligonucleotide
ucuacacggagaguaggcu

SEQ ID NO: 1067991 - RNA, 19 nt, Artificial Sequence
  Description of Artificial Sequence: Synthetic oligonucleotide
uuggcauuccucaccggaa

SEQ ID NO: 1067992 - RNA, 19 nt, Artificial Sequence
  Description of Artificial Sequence: Synthetic oligonucleotide
gugauguauauucucgcaa

SEQ ID NO: 1067993 - RNA, 19 nt, Artificial Sequence
  Description of Artificial Sequence: Synthetic oligonucleotide
cuauggacgucacaaggca

SEQ ID NO: 1067994 - RNA, 19 nt, Artificial Sequence
  Description of Artificial Sequence: Synthetic oligonucleotide
guauauucucgcaacaugu

SEQ ID NO: 1067995 - RNA, 19 nt, Artificial Sequence
  Description of Artificial Sequence: Synthetic oligonucleotide
uguccguuaccaucccggc

SEQ ID NO: 1067996 - RNA, 19 nt, Artificial Sequence
  Description of Artificial Sequence: Synthetic oligonucleotide
acacacuaauaagauccuc

SEQ ID NO: 1067997 - RNA, 19 nt, Artificial Sequence
  Description of Artificial Sequence: Synthetic oligonucleotide
ucauaugguuuaagaacuu

SEQ ID NO: 1067998 - RNA, 19 nt, Artificial Sequence
  Description of Artificial Sequence: Synthetic oligonucleotide
cuguuguauagguccaauc

SEQ ID NO: 1067999 - RNA, 19 nt, Artificial Sequence
  Description of Artificial Sequence: Synthetic oligonucleotide
auccgcagacuucaugaug

SEQ ID NO: 1068000 - RNA, 19 nt, Artificial Sequence
  Description of Artificial Sequence: Synthetic oligonucleotide
aggcccgaaggagaagucc

SEQ ID NO: 1068001 - RNA, 19 nt, Artificial Sequence
  Description of Artificial Sequence: Synthetic oligonucleotide
uccucaccggaacacacua

SEQ ID NO: 1068002 - RNA, 19 nt, Artificial Sequence
  Description of Artificial Sequence: Synthetic oligonucleotide
ccuauggacgucacaaggc

SEQ ID NO: 1068003 - RNA, 19 nt, Artificial Sequence
  Description of Artificial Sequence: Synthetic oligonucleotide
gagggaagguggaacgugc

SEQ ID NO: 1068004 - RNA, 19 nt, Artificial Sequence
  Description of Artificial Sequence: Synthetic oligonucleotide
caccggaacacacuaauaa

SEQ ID NO: 1068005 - RNA, 19 nt, Artificial Sequence
  Description of Artificial Sequence: Synthetic oligonucleotide
ggaguguucacccuccguc

SEQ ID NO: 1068006 - RNA, 19 nt, Artificial Sequence
  Description of Artificial Sequence: Synthetic oligonucleotide
uggccaacacauucccuug

SEQ ID NO: 1068007 - RNA, 19 nt, Artificial Sequence
  Description of Artificial Sequence: Synthetic oligonucleotide
ugguaguuguuuacacauc

SEQ ID NO: 1068008 - RNA, 19 nt, Artificial Sequence
  Description of Artificial Sequence: Synthetic oligonucleotide
accaucgauucucaagaaa

SEQ ID NO: 1068009 - RNA, 19 nt, Artificial Sequence
  Description of Artificial Sequence: Synthetic oligonucleotide
ggaguuaaguggaaccugc

SEQ ID NO: 1068010 - RNA, 19 nt, Artificial Sequence
  Description of Artificial Sequence: Synthetic oligonucleotide
aacgugcauuaaauuagca

SEQ ID NO: 1068011 - RNA, 19 nt, Artificial Sequence
  Description of Artificial Sequence: Synthetic oligonucleotide
acaucuuagugcaucagua

SEQ ID NO: 1068012 - RNA, 19 nt, Artificial Sequence
  Description of Artificial Sequence: Synthetic oligonucleotide
ugguaaauauugagagauu

SEQ ID NO: 1068013 - RNA, 19 nt, Artificial Sequence
  Description of Artificial Sequence: Synthetic oligonucleotide
ggcggcagcggucacagag

SEQ ID NO: 1068014 - RNA, 19 nt, Artificial Sequence
  Description of Artificial Sequence: Synthetic oligonucleotide
uggaaggcauuacucuaau

SEQ ID NO: 1068015 - RNA, 19 nt, Artificial Sequence
  Description of Artificial Sequence: Synthetic oligonucleotide
ugcucucucgugauguaua

SEQ ID NO: 1068016 - RNA, 19 nt, Artificial Sequence
  Description of Artificial Sequence: Synthetic oligonucleotide
auguauauucucgcaacau

SEQ ID NO: 1068017 - RNA, 19 nt, Artificial Sequence
  Description of Artificial Sequence: Synthetic oligonucleotide
agcuaccuuaagcaucccu

SEQ ID NO: 1068018 - RNA, 19 nt, Artificial Sequence
  Description of Artificial Sequence: Synthetic oligonucleotide
uuagaacguugucuccaaa

SEQ ID NO: 1068019 - RNA, 19 nt, Artificial Sequence
  Description of Artificial Sequence: Synthetic oligonucleotide
augauggaugcagaucaug

SEQ ID NO: 1068020 - RNA, 19 nt, Artificial Sequence
  Description of Artificial Sequence: Synthetic oligonucleotide
aucauuucagggagggaug

SEQ ID NO: 1068021 - RNA, 19 nt, Artificial Sequence
  Description of Artificial Sequence: Synthetic oligonucleotide
gaguuaaguggaaccugcc

SEQ ID NO: 1068022 - RNA, 19 nt, Artificial Sequence
  Description of Artificial Sequence: Synthetic oligonucleotide
agcggucacagagcggccc

SEQ ID NO: 1068023 - RNA, 19 nt, Artificial Sequence
  Description of Artificial Sequence: Synthetic oligonucleotide
aguguucacccuccguccu

SEQ ID NO: 1068024 - RNA, 19 nt, Artificial Sequence
  Description of Artificial Sequence: Synthetic oligonucleotide
gcuuugugaguccgcaggg

SEQ ID NO: 1068025 - RNA, 19 nt, Artificial Sequence
  Description of Artificial Sequence: Synthetic oligonucleotide
ccaaucauaugguuuaaga

SEQ ID NO: 1068026 - RNA, 19 nt, Artificial Sequence
  Description of Artificial Sequence: Synthetic oligonucleotide
guuguauagguccaaucau

SEQ ID NO: 1068027 - RNA, 19 nt, Artificial Sequence
  Description of Artificial Sequence: Synthetic oligonucleotide
agagggaagguggaacgug

SEQ ID NO: 1068028 - RNA, 19 nt, Artificial Sequence
  Description of Artificial Sequence: Synthetic oligonucleotide
cauacacaucacugcugag

SEQ ID NO: 1068029 - RNA, 19 nt, Artificial Sequence
  Description of Artificial Sequence: Synthetic oligonucleotide
gugcgaauaaacaccagaa

SEQ ID NO: 1068030 - RNA, 19 nt, Artificial Sequence
  Description of Artificial Sequence: Synthetic oligonucleotide
ucuguuguauagguccaau

SEQ ID NO: 1068031 - RNA, 19 nt, Artificial Sequence
  Description of Artificial Sequence: Synthetic oligonucleotide
cuuugugaguccgcagggc

SEQ ID NO: 1068032 - RNA, 19 nt, Artificial Sequence
  Description of Artificial Sequence: Synthetic oligonucleotide
agggcuagaaucaacucuu

SEQ ID NO: 1068033 - RNA, 19 nt, Artificial Sequence
  Description of Artificial Sequence: Synthetic oligonucleotide
agguggaacgugcauuaaa

SEQ ID NO: 1068034 - RNA, 19 nt, Artificial Sequence
  Description of Artificial Sequence: Synthetic oligonucleotide
acucuaauuuucacacuca

SEQ ID NO: 1068035 - RNA, 19 nt, Artificial Sequence
  Description of Artificial Sequence: Synthetic oligonucleotide
uggaguguucacccuccgu

SEQ ID NO: 1068036 - RNA, 19 nt, Artificial Sequence
  Description of Artificial Sequence: Synthetic oligonucleotide
ccaucgauucucaagaaaa

SEQ ID NO: 1068037 - RNA, 19 nt, Artificial Sequence
  Description of Artificial Sequence: Synthetic oligonucleotide
auucuauuccgagggugug

SEQ ID NO: 1068038 - RNA, 19 nt, Artificial Sequence
  Description of Artificial Sequence: Synthetic oligonucleotide
ucaccggaacacacuaaua

SEQ ID NO: 1068039 - RNA, 19 nt, Artificial Sequence
  Description of Artificial Sequence: Synthetic oligonucleotide
ucgggacucagugauggaa

SEQ ID NO: 1068040 - RNA, 19 nt, Artificial Sequence
  Description of Artificial Sequence: Synthetic oligonucleotide
uuaccaucccggccccgcc

SEQ ID NO: 1068041 - RNA, 19 nt, Artificial Sequence
  Description of Artificial Sequence: Synthetic oligonucleotide
ucuccgaacgcggcucccg

SEQ ID NO: 1068042 - RNA, 19 nt, Artificial Sequence
  Description of Artificial Sequence: Synthetic oligonucleotide
auguaggucuugucagccu

SEQ ID NO: 1068043 - RNA, 19 nt, Artificial Sequence
  Description of Artificial Sequence: Synthetic oligonucleotide
agaauccuauggacgucac

SEQ ID NO: 1068044 - RNA, 19 nt, Artificial Sequence
  Description of Artificial Sequence: Synthetic oligonucleotide
uccgagggugugcuuugug

SEQ ID NO: 1068045 - RNA, 19 nt, Artificial Sequence
  Description of Artificial Sequence: Synthetic oligonucleotide
cacuacucagagacaaaga

SEQ ID NO: 1068046 - RNA, 19 nt, Artificial Sequence
  Description of Artificial Sequence: Synthetic oligonucleotide
aagugcgaauaaacaccag

SEQ ID NO: 1068047 - RNA, 19 nt, Artificial Sequence
  Description of Artificial Sequence: Synthetic oligonucleotide
gaacguugucuccaaacau

SEQ ID NO: 1068048 - RNA, 19 nt, Artificial Sequence
  Description of Artificial Sequence: Synthetic oligonucleotide
gguuccgugaagagggaag

SEQ ID NO: 1068049 - RNA, 19 nt, Artificial Sequence
  Description of Artificial Sequence: Synthetic oligonucleotide
uuagugcaucaguagcauu

SEQ ID NO: 1068050 - RNA, 19 nt, Artificial Sequence
  Description of Artificial Sequence: Synthetic oligonucleotide
cacuaauaagauccucaga

SEQ ID NO: 1068051 - RNA, 19 nt, Artificial Sequence
  Description of Artificial Sequence: Synthetic oligonucleotide
aaggcccgaaggagaaguc

SEQ ID NO: 1068052 - RNA, 19 nt, Artificial Sequence
  Description of Artificial Sequence: Synthetic oligonucleotide
aucccuugguaguuguuua

SEQ ID NO: 1068053 - RNA, 19 nt, Artificial Sequence
  Description of Artificial Sequence: Synthetic oligonucleotide
cauucuauuccgagggugu

SEQ ID NO: 1068054 - RNA, 19 nt, Artificial Sequence
  Description of Artificial Sequence: Synthetic oligonucleotide
uagguccaaucauaugguu

SEQ ID NO: 1068055 - RNA, 19 nt, Artificial Sequence
  Description of Artificial Sequence: Synthetic oligonucleotide
uguucacccuccguccuac

SEQ ID NO: 1068056 - RNA, 19 nt, Artificial Sequence
  Description of Artificial Sequence: Synthetic oligonucleotide
ucccuacaaacagccaaga

SEQ ID NO: 1068057 - RNA, 19 nt, Artificial Sequence
  Description of Artificial Sequence: Synthetic oligonucleotide
uccguccuacuuuccugcc

SEQ ID NO: 1068058 - RNA, 19 nt, Artificial Sequence
  Description of Artificial Sequence: Synthetic oligonucleotide
ccuugguaguuguuuacac

SEQ ID NO: 1068059 - RNA, 19 nt, Artificial Sequence
  Description of Artificial Sequence: Synthetic oligonucleotide
ccggaacacacuaauaaga

SEQ ID NO: 1068060 - RNA, 19 nt, Artificial Sequence
  Description of Artificial Sequence: Synthetic oligonucleotide
uucagggagggauggcaua

SEQ ID NO: 1068061 - RNA, 19 nt, Artificial Sequence
  Description of Artificial Sequence: Synthetic oligonucleotide
ucagaauccuauggacguc

SEQ ID NO: 1068062 - RNA, 19 nt, Artificial Sequence
  Description of Artificial Sequence: Synthetic oligonucleotide
guccguuaccaucccggcc

SEQ ID NO: 1068063 - RNA, 19 nt, Artificial Sequence
  Description of Artificial Sequence: Synthetic oligonucleotide
ggcauuacucuaauuuuca

SEQ ID NO: 1068064 - RNA, 19 nt, Artificial Sequence
  Description of Artificial Sequence: Synthetic oligonucleotide
guuaccaucccggccccgc

SEQ ID NO: 1068065 - RNA, 19 nt, Artificial Sequence
  Description of Artificial Sequence: Synthetic oligonucleotide
gcauuacucuaauuuucac

SEQ ID NO: 1068066 - RNA, 19 nt, Artificial Sequence
  Description of Artificial Sequence: Synthetic oligonucleotide
gguaaauauugagagauuu

SEQ ID NO: 1068067 - RNA, 19 nt, Artificial Sequence
  Description of Artificial Sequence: Synthetic oligonucleotide
agguccaaucauaugguuu

SEQ ID NO: 1068068 - RNA, 19 nt, Artificial Sequence
  Description of Artificial Sequence: Synthetic oligonucleotide
cacucggagcaagugccgg

SEQ ID NO: 1068069 - RNA, 19 nt, Artificial Sequence
  Description of Artificial Sequence: Synthetic oligonucleotide
uagguuccgugaagaggga

SEQ ID NO: 1068070 - RNA, 19 nt, Artificial Sequence
  Description of Artificial Sequence: Synthetic oligonucleotide
cagaauccuauggacguca

SEQ ID NO: 1068071 - RNA, 19 nt, Artificial Sequence
  Description of Artificial Sequence: Synthetic oligonucleotide
cuuggccgccgucagcuuc

SEQ ID NO: 1068072 - RNA, 19 nt, Artificial Sequence
  Description of Artificial Sequence: Synthetic oligonucleotide
cuccgaacgcggcucccgg

SEQ ID NO: 1068073 - RNA, 19 nt, Artificial Sequence
  Description of Artificial Sequence: Synthetic oligonucleotide
cacccuccguccuacuuuc

SEQ ID NO: 1068074 - RNA, 19 nt, Artificial Sequence
  Description of Artificial Sequence: Synthetic oligonucleotide
ucccggguuuguccguuac

SEQ ID NO: 1068075 - RNA, 19 nt, Artificial Sequence
  Description of Artificial Sequence: Synthetic oligonucleotide
ugugggucuuggccgccgu

SEQ ID NO: 1068076 - RNA, 19 nt, Artificial Sequence
  Description of Artificial Sequence: Synthetic oligonucleotide
ggcuagaaucaacucuuuc

SEQ ID NO: 1068077 - RNA, 19 nt, Artificial Sequence
  Description of Artificial Sequence: Synthetic oligonucleotide
cacaucuuagugcaucagu

SEQ ID NO: 1068078 - RNA, 19 nt, Artificial Sequence
  Description of Artificial Sequence: Synthetic oligonucleotide
gggaguuaaguggaaccug

SEQ ID NO: 1068079 - RNA, 19 nt, Artificial Sequence
  Description of Artificial Sequence: Synthetic oligonucleotide
caaggaaauuaauucucau

SEQ ID NO: 1068080 - RNA, 19 nt, Artificial Sequence
  Description of Artificial Sequence: Synthetic oligonucleotide
gcucuacacggagaguagg

SEQ ID NO: 1068081 - RNA, 19 nt, Artificial Sequence
  Description of Artificial Sequence: Synthetic oligonucleotide
agaguaggcuguaccacau

SEQ ID NO: 1068082 - RNA, 19 nt, Artificial Sequence
  Description of Artificial Sequence: Synthetic oligonucleotide
cgugcauuaaauuagcaau

SEQ ID NO: 1068083 - RNA, 19 nt, Artificial Sequence
  Description of Artificial Sequence: Synthetic oligonucleotide
gucacaaggcaucgggacu

SEQ ID NO: 1068084 - RNA, 19 nt, Artificial Sequence
  Description of Artificial Sequence: Synthetic oligonucleotide
ggauccuuagaacguuguc

SEQ ID NO: 1068085 - RNA, 19 nt, Artificial Sequence
  Description of Artificial Sequence: Synthetic oligonucleotide
uugcucucucgugauguau

SEQ ID NO: 1068086 - RNA, 19 nt, Artificial Sequence
  Description of Artificial Sequence: Synthetic oligonucleotide
auaucccuacaaacagcca

SEQ ID NO: 1068087 - RNA, 19 nt, Artificial Sequence
  Description of Artificial Sequence: Synthetic oligonucleotide
ccgccgucagcuuccaagg

SEQ ID NO: 1068088 - RNA, 19 nt, Artificial Sequence
  Description of Artificial Sequence: Synthetic oligonucleotide
guccgcagggcuagaauca

SEQ ID NO: 1068089 - RNA, 19 nt, Artificial Sequence
  Description of Artificial Sequence: Synthetic oligonucleotide
cuccuugauugguaaauau

SEQ ID NO: 1068090 - RNA, 19 nt, Artificial Sequence
  Description of Artificial Sequence: Synthetic oligonucleotide
aucgggacucagugaugga

SEQ ID NO: 1068091 - RNA, 19 nt, Artificial Sequence
  Description of Artificial Sequence: Synthetic oligonucleotide
cacaagcuaccuuaagcau

SEQ ID NO: 1068092 - RNA, 19 nt, Artificial Sequence
  Description of Artificial Sequence: Synthetic oligonucleotide
cucaccggaacacacuaau

SEQ ID NO: 1068093 - RNA, 19 nt, Artificial Sequence
  Description of Artificial Sequence: Synthetic oligonucleotide
gugcauuaaauuagcaauu

SEQ ID NO: 1068094 - RNA, 19 nt, Artificial Sequence
  Description of Artificial Sequence: Synthetic oligonucleotide
gaccgcaggaccacucgga

SEQ ID NO: 1068095 - RNA, 19 nt, Artificial Sequence
  Description of Artificial Sequence: Synthetic oligonucleotide
cucucgugauguauauucu

SEQ ID NO: 1068096 - RNA, 19 nt, Artificial Sequence
  Description of Artificial Sequence: Synthetic oligonucleotide
acgucacaaggcaucggga

SEQ ID NO: 1068097 - RNA, 19 nt, Artificial Sequence
  Description of Artificial Sequence: Synthetic oligonucleotide
guacaucaacaugcaguca

SEQ ID NO: 1068098 - RNA, 19 nt, Artificial Sequence
  Description of Artificial Sequence: Synthetic oligonucleotide
uaggucuugucagccucau

SEQ ID NO: 1068099 - RNA, 19 nt, Artificial Sequence
  Description of Artificial Sequence: Synthetic oligonucleotide
caggaccacucggagcaag

SEQ ID NO: 1068100 - RNA, 19 nt, Artificial Sequence
  Description of Artificial Sequence: Synthetic oligonucleotide
gguggaacgugcauuaaau

SEQ ID NO: 1068101 - RNA, 19 nt, Artificial Sequence
  Description of Artificial Sequence: Synthetic oligonucleotide
caaucauguugcccagaaa

SEQ ID NO: 1068102 - RNA, 19 nt, Artificial Sequence
  Description of Artificial Sequence: Synthetic oligonucleotide
cuuagugcaucaguagcau

SEQ ID NO: 1068103 - RNA, 19 nt, Artificial Sequence
  Description of Artificial Sequence: Synthetic oligonucleotide
cguccuacuuuccugccac

SEQ ID NO: 1068104 - RNA, 19 nt, Artificial Sequence
  Description of Artificial Sequence: Synthetic oligonucleotide
ccuuagaacguugucucca

SEQ ID NO: 1068105 - RNA, 19 nt, Artificial Sequence
  Description of Artificial Sequence: Synthetic oligonucleotide
cuguaucuauaugaucugu

SEQ ID NO: 1068106 - RNA, 19 nt, Artificial Sequence
  Description of Artificial Sequence: Synthetic oligonucleotide
ccuccguccuacuuuccug

SEQ ID NO: 1068107 - RNA, 19 nt, Artificial Sequence
  Description of Artificial Sequence: Synthetic oligonucleotide
guggaacgugcauuaaauu

SEQ ID NO: 1068108 - RNA, 19 nt, Artificial Sequence
  Description of Artificial Sequence: Synthetic oligonucleotide
caaggcccgaaggagaagu

SEQ ID NO: 1068109 - RNA, 19 nt, Artificial Sequence
  Description of Artificial Sequence: Synthetic oligonucleotide
cgugauguauauucucgca

SEQ ID NO: 1068110 - RNA, 19 nt, Artificial Sequence
  Description of Artificial Sequence: Synthetic oligonucleotide
gcggcucccggguuugucc

SEQ ID NO: 1068111 - RNA, 19 nt, Artificial Sequence
  Description of Artificial Sequence: Synthetic oligonucleotide
caccaucgauucucaagaa

SEQ ID NO: 1068112 - RNA, 19 nt, Artificial Sequence
  Description of Artificial Sequence: Synthetic oligonucleotide
agguuccgugaagagggaa

SEQ ID NO: 1068113 - RNA, 19 nt, Artificial Sequence
  Description of Artificial Sequence: Synthetic oligonucleotide
ucgcaacauguaggucuug

SEQ ID NO: 1068114 - RNA, 19 nt, Artificial Sequence
  Description of Artificial Sequence: Synthetic oligonucleotide
ccucagaagcacacucauc

SEQ ID NO: 1068115 - RNA, 19 nt, Artificial Sequence
  Description of Artificial Sequence: Synthetic oligonucleotide
uuccgagggugugcuuugu

SEQ ID NO: 1068116 - RNA, 19 nt, Artificial Sequence
  Description of Artificial Sequence: Synthetic oligonucleotide
guagaagacgaugcuucau

SEQ ID NO: 1068117 - RNA, 19 nt, Artificial Sequence
  Description of Artificial Sequence: Synthetic oligonucleotide
ggacgucacaaggcaucgg

SEQ ID NO: 1068118 - RNA, 19 nt, Artificial Sequence
  Description of Artificial Sequence: Synthetic oligonucleotide
cuguuguagguacaaccuu

SEQ ID NO: 1068119 - RNA, 19 nt, Artificial Sequence
  Description of Artificial Sequence: Synthetic oligonucleotide
ccgagggugugcuuuguga

SEQ ID NO: 1068120 - RNA, 19 nt, Artificial Sequence
  Description of Artificial Sequence: Synthetic oligonucleotide
ccaacacauucccuuggca

SEQ ID NO: 1068121 - RNA, 19 nt, Artificial Sequence
  Description of Artificial Sequence: Synthetic oligonucleotide
guccaaucauaugguuuaa

SEQ ID NO: 1068122 - RNA, 19 nt, Artificial Sequence
  Description of Artificial Sequence: Synthetic oligonucleotide
ccggguuuguccguuacca

SEQ ID NO: 1068123 - RNA, 19 nt, Artificial Sequence
  Description of Artificial Sequence: Synthetic oligonucleotide
cucuccgaacgcggcuccc

SEQ ID NO: 1068124 - RNA, 19 nt, Artificial Sequence
  Description of Artificial Sequence: Synthetic oligonucleotide
cucgcaacauguaggucuu

SEQ ID NO: 1068125 - RNA, 19 nt, Artificial Sequence
  Description of Artificial Sequence: Synthetic oligonucleotide
ccaaguaacguuccuuuau

SEQ ID NO: 1068126 - RNA, 19 nt, Artificial Sequence
  Description of Artificial Sequence: Synthetic oligonucleotide
gggagggauggcauaugca

SEQ ID NO: 1068127 - RNA, 19 nt, Artificial Sequence
  Description of Artificial Sequence: Synthetic oligonucleotide
cagagcggcccucuccgaa

SEQ ID NO: 1068128 - RNA, 19 nt, Artificial Sequence
  Description of Artificial Sequence: Synthetic oligonucleotide
guggaccgcaggaccacuc

SEQ ID NO: 1068129 - RNA, 19 nt, Artificial Sequence
  Description of Artificial Sequence: Synthetic oligonucleotide
cacacucaggcuggaaacu

SEQ ID NO: 1068130 - RNA, 19 nt, Artificial Sequence
  Description of Artificial Sequence: Synthetic oligonucleotide
gcggcccucuccgaacgcg

SEQ ID NO: 1068131 - RNA, 19 nt, Artificial Sequence
  Description of Artificial Sequence: Synthetic oligonucleotide
cccggguuuguccguuacc

SEQ ID NO: 1068132 - RNA, 19 nt, Artificial Sequence
  Description of Artificial Sequence: Synthetic oligonucleotide
gaguaggcuguaccacauu

SEQ ID NO: 1068133 - RNA, 19 nt, Artificial Sequence
  Description of Artificial Sequence: Synthetic oligonucleotide
gccucaugguaaagccuug

SEQ ID NO: 1068134 - RNA, 19 nt, Artificial Sequence
  Description of Artificial Sequence: Synthetic oligonucleotide
gcccgaaggagaaguccug

SEQ ID NO: 1068135 - RNA, 19 nt, Artificial Sequence
  Description of Artificial Sequence: Synthetic oligonucleotide
acacggagaguaggcugua

SEQ ID NO: 1068136 - RNA, 19 nt, Artificial Sequence
  Description of Artificial Sequence: Synthetic oligonucleotide
cggcucccggguuuguccg

SEQ ID NO: 1068137 - RNA, 19 nt, Artificial Sequence
  Description of Artificial Sequence: Synthetic oligonucleotide
gcaucgggacucagugaug

SEQ ID NO: 1068138 - RNA, 19 nt, Artificial Sequence
  Description of Artificial Sequence: Synthetic oligonucleotide
ggcccgaaggagaaguccu

SEQ ID NO: 1068139 - RNA, 19 nt, Artificial Sequence
  Description of Artificial Sequence: Synthetic oligonucleotide
gcucucucgugauguauau

SEQ ID NO: 1068140 - RNA, 19 nt, Artificial Sequence
  Description of Artificial Sequence: Synthetic oligonucleotide
ccguuaccaucccggcccc

SEQ ID NO: 1068141 - RNA, 19 nt, Artificial Sequence
  Description of Artificial Sequence: Synthetic oligonucleotide
ggcccucuccgaacgcggc

SEQ ID NO: 1068142 - RNA, 19 nt, Artificial Sequence
  Description of Artificial Sequence: Synthetic oligonucleotide
cccucuccgaacgcggcuc

SEQ ID NO: 1068143 - RNA, 19 nt, Artificial Sequence
  Description of Artificial Sequence: Synthetic oligonucleotide
ccguccuacuuuccugcca

SEQ ID NO: 1068144 - RNA, 19 nt, Artificial Sequence
  Description of Artificial Sequence: Synthetic oligonucleotide
cgccgucagcuuccaaggc

SEQ ID NO: 1068145 - RNA, 19 nt, Artificial Sequence
  Description of Artificial Sequence: Synthetic oligonucleotide
cucccggguuuguccguua

SEQ ID NO: 1068146 - RNA, 19 nt, Artificial Sequence
  Description of Artificial Sequence: Synthetic oligonucleotide
gcggucacagagcggcccu

SEQ ID NO: 1068147 - RNA, 19 nt, Artificial Sequence
  Description of Artificial Sequence: Synthetic oligonucleotide
cccuacaaacagccaagau

SEQ ID NO: 1068148 - RNA, 19 nt, Artificial Sequence
  Description of Artificial Sequence: Synthetic oligonucleotide
cucucucgugauguauauu

SEQ ID NO: 1068149 - RNA, 19 nt, Artificial Sequence
  Description of Artificial Sequence: Synthetic oligonucleotide
cccuccguccuacuuuccu

SEQ ID NO: 1068150 - RNA, 19 nt, Artificial Sequence
  Description of Artificial Sequence: Synthetic oligonucleotide
ccucaugguaaagccuugu

SEQ ID NO: 1068151 - RNA, 19 nt, Artificial Sequence
  Description of Artificial Sequence: Synthetic oligonucleotide
gguggaccgcaggaccacu

SEQ ID NO: 1068152 - RNA, 19 nt, Artificial Sequence
  Description of Artificial Sequence: Synthetic oligonucleotide
cguuaccaucccggccccg

SEQ ID NO: 1068153 - RNA, 19 nt, Artificial Sequence
  Description of Artificial Sequence: Synthetic oligonucleotide
gcccucuccgaacgcggcu

SEQ ID NO: 1068154 - RNA, 19 nt, Artificial Sequence
  Description of Artificial Sequence: Synthetic oligonucleotide
ccgaacgcggcucccgggu

SEQ ID NO: 1068155 - RNA, 19 nt, Artificial Sequence
  Description of Artificial Sequence: Synthetic oligonucleotide
gggcuagaaucaacucuuu

SEQ ID NO: 1068156 - RNA, 19 nt, Artificial Sequence
  Description of Artificial Sequence: Synthetic oligonucleotide
gcucccggguuuguccguu

SEQ ID NO: 1068157 - RNA, 19 nt, Artificial Sequence
  Description of Artificial Sequence: Synthetic oligonucleotide
ggccgccgucagcuuccaa

SEQ ID NO: 1068158 - RNA, 19 nt, Artificial Sequence
  Description of Artificial Sequence: Synthetic oligonucleotide
cgaacgcggcucccggguu

SEQ ID NO: 1068159 - RNA, 19 nt, Artificial Sequence
  Description of Artificial Sequence: Synthetic oligonucleotide
aaaauugauacccaacucu

SEQ ID NO: 1068160 - RNA, 19 nt, Artificial Sequence
  Description of Artificial Sequence: Synthetic oligonucleotide
ucauuugugaggaaaagag

SEQ ID NO: 1068161 - RNA, 19 nt, Artificial Sequence
  Description of Artificial Sequence: Synthetic oligonucleotide
aagacaauacccuaggaca

SEQ ID NO: 1068162 - RNA, 19 nt, Artificial Sequence
  Description of Artificial Sequence: Synthetic oligonucleotide
aauacccuaggacacuugc

SEQ ID NO: 1068163 - RNA, 19 nt, Artificial Sequence
  Description of Artificial Sequence: Synthetic oligonucleotide
agaacuaagcaucaugugg

SEQ ID NO: 1068164 - RNA, 19 nt, Artificial Sequence
  Description of Artificial Sequence: Synthetic oligonucleotide
aauacugaaauugugaaau

SEQ ID NO: 1068165 - RNA, 19 nt, Artificial Sequence
  Description of Artificial Sequence: Synthetic oligonucleotide
caaaagacggaaaucaggg

SEQ ID NO: 1068166 - RNA, 19 nt, Artificial Sequence
  Description of Artificial Sequence: Synthetic oligonucleotide
aaagacggaaaucagggca

SEQ ID NO: 1068167 - RNA, 19 nt, Artificial Sequence
  Description of Artificial Sequence: Synthetic oligonucleotide
aaggguaugccacuaaaag

SEQ ID NO: 1068168 - RNA, 19 nt, Artificial Sequence
  Description of Artificial Sequence: Synthetic oligonucleotide
ucaugagacaauuuauagg

SEQ ID NO: 1068169 - RNA, 19 nt, Artificial Sequence
  Description of Artificial Sequence: Synthetic oligonucleotide
aaaagacggaaaucagggc

SEQ ID NO: 1068170 - RNA, 19 nt, Artificial Sequence
  Description of Artificial Sequence: Synthetic oligonucleotide
auaacugcaauacugaaau

SEQ ID NO: 1068171 - RNA, 19 nt, Artificial Sequence
  Description of Artificial Sequence: Synthetic oligonucleotide
cauccaauugcacugaucc

SEQ ID NO: 1068172 - RNA, 19 nt, Artificial Sequence
  Description of Artificial Sequence: Synthetic oligonucleotide
aagaagacaauacccuagg

SEQ ID NO: 1068173 - RNA, 19 nt, Artificial Sequence
  Description of Artificial Sequence: Synthetic oligonucleotide
ugagacaccagucauacuc

SEQ ID NO: 1068174 - RNA, 19 nt, Artificial Sequence
  Description of Artificial Sequence: Synthetic oligonucleotide
uuccuaaacauccaauugc

SEQ ID NO: 1068175 - RNA, 19 nt, Artificial Sequence
  Description of Artificial Sequence: Synthetic oligonucleotide
acauugauaacugcaauac

SEQ ID NO: 1068176 - RNA, 19 nt, Artificial Sequence
  Description of Artificial Sequence: Synthetic oligonucleotide
uuuaaguuaucaaagccau

SEQ ID NO: 1068177 - RNA, 19 nt, Artificial Sequence
  Description of Artificial Sequence: Synthetic oligonucleotide
caugagacaauuuauagga

SEQ ID NO: 1068178 - RNA, 19 nt, Artificial Sequence
  Description of Artificial Sequence: Synthetic oligonucleotide
ugucuggagggacaaaucg

SEQ ID NO: 1068179 - RNA, 19 nt, Artificial Sequence
  Description of Artificial Sequence: Synthetic oligonucleotide
gacaaaucggccuugcugc

SEQ ID NO: 1068180 - RNA, 19 nt, Artificial Sequence
  Description of Artificial Sequence: Synthetic oligonucleotide
gauuuugccagccaguaac

SEQ ID NO: 1068181 - RNA, 19 nt, Artificial Sequence
  Description of Artificial Sequence: Synthetic oligonucleotide
aaauucacuauacauugau

SEQ ID NO: 1068182 - RNA, 19 nt, Artificial Sequence
  Description of Artificial Sequence: Synthetic oligonucleotide
ucuuagcuguauaagaaca

SEQ ID NO: 1068183 - RNA, 19 nt, Artificial Sequence
  Description of Artificial Sequence: Synthetic oligonucleotide
auagacauagccaaacugg

SEQ ID NO: 1068184 - RNA, 19 nt, Artificial Sequence
  Description of Artificial Sequence: Synthetic oligonucleotide
ugcacuuaacuuaaggaca

SEQ ID NO: 1068185 - RNA, 19 nt, Artificial Sequence
  Description of Artificial Sequence: Synthetic oligonucleotide
aucauaauaucauuuguga

SEQ ID NO: 1068186 - RNA, 19 nt, Artificial Sequence
  Description of Artificial Sequence: Synthetic oligonucleotide
aaggauaggccugaguugg

SEQ ID NO: 1068187 - RNA, 19 nt, Artificial Sequence
  Description of Artificial Sequence: Synthetic oligonucleotide
aaagacuccauacaauaaa

SEQ ID NO: 1068188 - RNA, 19 nt, Artificial Sequence
  Description of Artificial Sequence: Synthetic oligonucleotide
agaacaguaguuuaguaaa

SEQ ID NO: 1068189 - RNA, 19 nt, Artificial Sequence
  Description of Artificial Sequence: Synthetic oligonucleotide
gaagacaauacccuaggac

SEQ ID NO: 1068190 - RNA, 19 nt, Artificial Sequence
  Description of Artificial Sequence: Synthetic oligonucleotide
aaacgcaaggcagaacacc

SEQ ID NO: 1068191 - RNA, 19 nt, Artificial Sequence
  Description of Artificial Sequence: Synthetic oligonucleotide
aguaguugacacuaacguc

SEQ ID NO: 1068192 - RNA, 19 nt, Artificial Sequence
  Description of Artificial Sequence: Synthetic oligonucleotide
uugauaacugcaauacuga

SEQ ID NO: 1068193 - RNA, 19 nt, Artificial Sequence
  Description of Artificial Sequence: Synthetic oligonucleotide
ugucaaauauuugaagugc

SEQ ID NO: 1068194 - RNA, 19 nt, Artificial Sequence
  Description of Artificial Sequence: Synthetic oligonucleotide
uuccuaauucaccagaaaa

SEQ ID NO: 1068195 - RNA, 19 nt, Artificial Sequence
  Description of Artificial Sequence: Synthetic oligonucleotide
ugccacacaaccaaaugag

SEQ ID NO: 1068196 - RNA, 19 nt, Artificial Sequence
  Description of Artificial Sequence: Synthetic oligonucleotide
aauugucgcagugagaaga

SEQ ID NO: 1068197 - RNA, 19 nt, Artificial Sequence
  Description of Artificial Sequence: Synthetic oligonucleotide
augucaaauauuugaagug

SEQ ID NO: 1068198 - RNA, 19 nt, Artificial Sequence
  Description of Artificial Sequence: Synthetic oligonucleotide
uugcaaacgaucaaacgcu

SEQ ID NO: 1068199 - RNA, 19 nt, Artificial Sequence
  Description of Artificial Sequence: Synthetic oligonucleotide
auagucauaggacugcuga

SEQ ID NO: 1068200 - RNA, 19 nt, Artificial Sequence
  Description of Artificial Sequence: Synthetic oligonucleotide
uuuacuguaacuggguugu

SEQ ID NO: 1068201 - RNA, 19 nt, Artificial Sequence
  Description of Artificial Sequence: Synthetic oligonucleotide
auaauaucauuugugagga

SEQ ID NO: 1068202 - RNA, 19 nt, Artificial Sequence
  Description of Artificial Sequence: Synthetic oligonucleotide
acgaacaaaaggcucaucu

SEQ ID NO: 1068203 - RNA, 19 nt, Artificial Sequence
  Description of Artificial Sequence: Synthetic oligonucleotide
uucuaauaaaggaggcucc

SEQ ID NO: 1068204 - RNA, 19 nt, Artificial Sequence
  Description of Artificial Sequence: Synthetic oligonucleotide
auugauacccaacucuucu

SEQ ID NO: 1068205 - RNA, 19 nt, Artificial Sequence
  Description of Artificial Sequence: Synthetic oligonucleotide
aucaaagccauugcaaacg

SEQ ID NO: 1068206 - RNA, 19 nt, Artificial Sequence
  Description of Artificial Sequence: Synthetic oligonucleotide
uguaggguccuccacuucc

SEQ ID NO: 1068207 - RNA, 19 nt, Artificial Sequence
  Description of Artificial Sequence: Synthetic oligonucleotide
ugguccaauuuuaagaguc

SEQ ID NO: 1068208 - RNA, 19 nt, Artificial Sequence
  Description of Artificial Sequence: Synthetic oligonucleotide
uuuaaucaggauucaaaau

SEQ ID NO: 1068209 - RNA, 19 nt, Artificial Sequence
  Description of Artificial Sequence: Synthetic oligonucleotide
cuguauaagaacaaacaca

SEQ ID NO: 1068210 - RNA, 19 nt, Artificial Sequence
  Description of Artificial Sequence: Synthetic oligonucleotide
uguccuguacaaacgaaca

SEQ ID NO: 1068211 - RNA, 19 nt, Artificial Sequence
  Description of Artificial Sequence: Synthetic oligonucleotide
cuaagcaucauguggccag

SEQ ID NO: 1068212 - RNA, 19 nt, Artificial Sequence
  Description of Artificial Sequence: Synthetic oligonucleotide
cauugcaaacgaucaaacg

SEQ ID NO: 1068213 - RNA, 19 nt, Artificial Sequence
  Description of Artificial Sequence: Synthetic oligonucleotide
aagacuccauacaauaaag

SEQ ID NO: 1068214 - RNA, 19 nt, Artificial Sequence
  Description of Artificial Sequence: Synthetic oligonucleotide
uccauaguauggcugaggu

SEQ ID NO: 1068215 - RNA, 19 nt, Artificial Sequence
  Description of Artificial Sequence: Synthetic oligonucleotide
gaucaaacgcuccugcggc

SEQ ID NO: 1068216 - RNA, 19 nt, Artificial Sequence
  Description of Artificial Sequence: Synthetic oligonucleotide
guucaaaagacggaaauca

SEQ ID NO: 1068217 - RNA, 19 nt, Artificial Sequence
  Description of Artificial Sequence: Synthetic oligonucleotide
uguucagcuguccuguaca

SEQ ID NO: 1068218 - RNA, 19 nt, Artificial Sequence
  Description of Artificial Sequence: Synthetic oligonucleotide
auguggcccacugauaucc

SEQ ID NO: 1068219 - RNA, 19 nt, Artificial Sequence
  Description of Artificial Sequence: Synthetic oligonucleotide
cuccauacaauaaagcaca

SEQ ID NO: 1068220 - RNA, 19 nt, Artificial Sequence
  Description of Artificial Sequence: Synthetic oligonucleotide
uacccuaggacacuugcca

SEQ ID NO: 1068221 - RNA, 19 nt, Artificial Sequence
  Description of Artificial Sequence: Synthetic oligonucleotide
ucggucucguucauaaugc

SEQ ID NO: 1068222 - RNA, 19 nt, Artificial Sequence
  Description of Artificial Sequence: Synthetic oligonucleotide
gugcacuuaacuuaaggac

SEQ ID NO: 1068223 - RNA, 19 nt, Artificial Sequence
  Description of Artificial Sequence: Synthetic oligonucleotide
acccuaaugaaaacaagac

SEQ ID NO: 1068224 - RNA, 19 nt, Artificial Sequence
  Description of Artificial Sequence: Synthetic oligonucleotide
aaaucggccuugcugcgag

SEQ ID NO: 1068225 - RNA, 19 nt, Artificial Sequence
  Description of Artificial Sequence: Synthetic oligonucleotide
cuucuaauaaaggaggcuc

SEQ ID NO: 1068226 - RNA, 19 nt, Artificial Sequence
  Description of Artificial Sequence: Synthetic oligonucleotide
aacgucuaaacagcuguuc

SEQ ID NO: 1068227 - RNA, 19 nt, Artificial Sequence
  Description of Artificial Sequence: Synthetic oligonucleotide
aguucaaaagacggaaauc

SEQ ID NO: 1068228 - RNA, 19 nt, Artificial Sequence
  Description of Artificial Sequence: Synthetic oligonucleotide
uccaauuuuaagagucgca

SEQ ID NO: 1068229 - RNA, 19 nt, Artificial Sequence
  Description of Artificial Sequence: Synthetic oligonucleotide
gagaacaguaguuuaguaa

SEQ ID NO: 1068230 - RNA, 19 nt, Artificial Sequence
  Description of Artificial Sequence: Synthetic oligonucleotide
aaagauuaucagcugugua

SEQ ID NO: 1068231 - RNA, 19 nt, Artificial Sequence
  Description of Artificial Sequence: Synthetic oligonucleotide
uuguuugguagaaaccgcu

SEQ ID NO: 1068232 - RNA, 19 nt, Artificial Sequence
  Description of Artificial Sequence: Synthetic oligonucleotide
agaguaguugacacuaacg

SEQ ID NO: 1068233 - RNA, 19 nt, Artificial Sequence
  Description of Artificial Sequence: Synthetic oligonucleotide
ugagacugcucgucgaugc

SEQ ID NO: 1068234 - RNA, 19 nt, Artificial Sequence
  Description of Artificial Sequence: Synthetic oligonucleotide
acaaacgaacaaaaggcuc

SEQ ID NO: 1068235 - RNA, 19 nt, Artificial Sequence
  Description of Artificial Sequence: Synthetic oligonucleotide
guagaaaccgcuguuuaag

SEQ ID NO: 1068236 - RNA, 19 nt, Artificial Sequence
  Description of Artificial Sequence: Synthetic oligonucleotide
aaagcugucuccauaguau

SEQ ID NO: 1068237 - RNA, 19 nt, Artificial Sequence
  Description of Artificial Sequence: Synthetic oligonucleotide
auaggccugaguuggcugg

SEQ ID NO: 1068238 - RNA, 19 nt, Artificial Sequence
  Description of Artificial Sequence: Synthetic oligonucleotide
cacgcuacugguaaucggc

SEQ ID NO: 1068239 - RNA, 19 nt, Artificial Sequence
  Description of Artificial Sequence: Synthetic oligonucleotide
uacaccagccaauaauugu

SEQ ID NO: 1068240 - RNA, 19 nt, Artificial Sequence
  Description of Artificial Sequence: Synthetic oligonucleotide
uguuugguagaaaccgcug

SEQ ID NO: 1068241 - RNA, 19 nt, Artificial Sequence
  Description of Artificial Sequence: Synthetic oligonucleotide
ucguucauaaugcugccau

SEQ ID NO: 1068242 - RNA, 19 nt, Artificial Sequence
  Description of Artificial Sequence: Synthetic oligonucleotide
uaagugauuucuucuuccu

SEQ ID NO: 1068243 - RNA, 19 nt, Artificial Sequence
  Description of Artificial Sequence: Synthetic oligonucleotide
aggguaugccacuaaaagu

SEQ ID NO: 1068244 - RNA, 19 nt, Artificial Sequence
  Description of Artificial Sequence: Synthetic oligonucleotide
gaguaguugacacuaacgu

SEQ ID NO: 1068245 - RNA, 19 nt, Artificial Sequence
  Description of Artificial Sequence: Synthetic oligonucleotide
caaaauugauacccaacuc

SEQ ID NO: 1068246 - RNA, 19 nt, Artificial Sequence
  Description of Artificial Sequence: Synthetic oligonucleotide
ugauacccaacucuucuaa

SEQ ID NO: 1068247 - RNA, 19 nt, Artificial Sequence
  Description of Artificial Sequence: Synthetic oligonucleotide
uugcacugaucccauagac

SEQ ID NO: 1068248 - RNA, 19 nt, Artificial Sequence
  Description of Artificial Sequence: Synthetic oligonucleotide
uaguugaaggauaggccug

SEQ ID NO: 1068249 - RNA, 19 nt, Artificial Sequence
  Description of Artificial Sequence: Synthetic oligonucleotide
aaauugauacccaacucuu

SEQ ID NO: 1068250 - RNA, 19 nt, Artificial Sequence
  Description of Artificial Sequence: Synthetic oligonucleotide
caacucuucuaauaaagga

SEQ ID NO: 1068251 - RNA, 19 nt, Artificial Sequence
  Description of Artificial Sequence: Synthetic oligonucleotide
accagccaauaauugucgc

SEQ ID NO: 1068252 - RNA, 19 nt, Artificial Sequence
  Description of Artificial Sequence: Synthetic oligonucleotide
acaaccaaaugagacacca

SEQ ID NO: 1068253 - RNA, 19 nt, Artificial Sequence
  Description of Artificial Sequence: Synthetic oligonucleotide
gcugcgaguagucauagcc

SEQ ID NO: 1068254 - RNA, 19 nt, Artificial Sequence
  Description of Artificial Sequence: Synthetic oligonucleotide
cccacugauauccacaucc

SEQ ID NO: 1068255 - RNA, 19 nt, Artificial Sequence
  Description of Artificial Sequence: Synthetic oligonucleotide
gaaaccgcuguuuaaguua

SEQ ID NO: 1068256 - RNA, 19 nt, Artificial Sequence
  Description of Artificial Sequence: Synthetic oligonucleotide
acaccagccaauaauuguc

SEQ ID NO: 1068257 - RNA, 19 nt, Artificial Sequence
  Description of Artificial Sequence: Synthetic oligonucleotide
ucaucugccaggugacucc

SEQ ID NO: 1068258 - RNA, 19 nt, Artificial Sequence
  Description of Artificial Sequence: Synthetic oligonucleotide
ucgucgaugcuguaacuug

SEQ ID NO: 1068259 - RNA, 19 nt, Artificial Sequence
  Description of Artificial Sequence: Synthetic oligonucleotide
gucauagccagcauacugc

SEQ ID NO: 1068260 - RNA, 19 nt, Artificial Sequence
  Description of Artificial Sequence: Synthetic oligonucleotide
agauuaucagcuguguagu

SEQ ID NO: 1068261 - RNA, 19 nt, Artificial Sequence
  Description of Artificial Sequence: Synthetic oligonucleotide
ugauaacugcaauacugaa

SEQ ID NO: 1068262 - RNA, 19 nt, Artificial Sequence
  Description of Artificial Sequence: Synthetic oligonucleotide
aaucaguucaaaagacgga

SEQ ID NO: 1068263 - RNA, 19 nt, Artificial Sequence
  Description of Artificial Sequence: Synthetic oligonucleotide
cuaaacauccaauugcacu

SEQ ID NO: 1068264 - RNA, 19 nt, Artificial Sequence
  Description of Artificial Sequence: Synthetic oligonucleotide
aacgcaaggcagaacacca

SEQ ID NO: 1068265 - RNA, 19 nt, Artificial Sequence
  Description of Artificial Sequence: Synthetic oligonucleotide
acagagaacaguaguuuag

SEQ ID NO: 1068266 - RNA, 19 nt, Artificial Sequence
  Description of Artificial Sequence: Synthetic oligonucleotide
ucaguucaaaagacggaaa

SEQ ID NO: 1068267 - RNA, 19 nt, Artificial Sequence
  Description of Artificial Sequence: Synthetic oligonucleotide
acgucuaaacagcuguuca

SEQ ID NO: 1068268 - RNA, 19 nt, Artificial Sequence
  Description of Artificial Sequence: Synthetic oligonucleotide
uuuccuaauucaccagaaa

SEQ ID NO: 1068269 - RNA, 19 nt, Artificial Sequence
  Description of Artificial Sequence: Synthetic oligonucleotide
ugcucgucgaugcuguaac

SEQ ID NO: 1068270 - RNA, 19 nt, Artificial Sequence
  Description of Artificial Sequence: Synthetic oligonucleotide
aucaguucaaaagacggaa

SEQ ID NO: 1068271 - RNA, 19 nt, Artificial Sequence
  Description of Artificial Sequence: Synthetic oligonucleotide
ugagaagaauuccuaccau

SEQ ID NO: 1068272 - RNA, 19 nt, Artificial Sequence
  Description of Artificial Sequence: Synthetic oligonucleotide
guaguugacacuaacgucu

SEQ ID NO: 1068273 - RNA, 19 nt, Artificial Sequence
  Description of Artificial Sequence: Synthetic oligonucleotide
cagccaauaauugucgcag

SEQ ID NO: 1068274 - RNA, 19 nt, Artificial Sequence
  Description of Artificial Sequence: Synthetic oligonucleotide
cacagagcggucaucugcc

SEQ ID NO: 1068275 - RNA, 19 nt, Artificial Sequence
  Description of Artificial Sequence: Synthetic oligonucleotide
auacauugauaacugcaau

SEQ ID NO: 1068276 - RNA, 19 nt, Artificial Sequence
  Description of Artificial Sequence: Synthetic oligonucleotide
caccagccaauaauugucg

SEQ ID NO: 1068277 - RNA, 19 nt, Artificial Sequence
  Description of Artificial Sequence: Synthetic oligonucleotide
ucuuuacuguaacuggguu

SEQ ID NO: 1068278 - RNA, 19 nt, Artificial Sequence
  Description of Artificial Sequence: Synthetic oligonucleotide
aucauuugugaggaaaaga

SEQ ID NO: 1068279 - RNA, 19 nt, Artificial Sequence
  Description of Artificial Sequence: Synthetic oligonucleotide
ugugaauguggcccacuga

SEQ ID NO: 1068280 - RNA, 19 nt, Artificial Sequence
  Description of Artificial Sequence: Synthetic oligonucleotide
uagaaaccgcuguuuaagu

SEQ ID NO: 1068281 - RNA, 19 nt, Artificial Sequence
  Description of Artificial Sequence: Synthetic oligonucleotide
acugcaauacugaaauugu

SEQ ID NO: 1068282 - RNA, 19 nt, Artificial Sequence
  Description of Artificial Sequence: Synthetic oligonucleotide
gucauaggacugcugagac

SEQ ID NO: 1068283 - RNA, 19 nt, Artificial Sequence
  Description of Artificial Sequence: Synthetic oligonucleotide
ggacaaaucggccuugcug

SEQ ID NO: 1068284 - RNA, 19 nt, Artificial Sequence
  Description of Artificial Sequence: Synthetic oligonucleotide
ugguaaucggcaugagcug

SEQ ID NO: 1068285 - RNA, 19 nt, Artificial Sequence
  Description of Artificial Sequence: Synthetic oligonucleotide
caucauguggccaguccag

SEQ ID NO: 1068286 - RNA, 19 nt, Artificial Sequence
  Description of Artificial Sequence: Synthetic oligonucleotide
cugcaauacugaaauugug

SEQ ID NO: 1068287 - RNA, 19 nt, Artificial Sequence
  Description of Artificial Sequence: Synthetic oligonucleotide
uccacgcuacugguaaucg

SEQ ID NO: 1068288 - RNA, 19 nt, Artificial Sequence
  Description of Artificial Sequence: Synthetic oligonucleotide
uguuguccauccauggcua

SEQ ID NO: 1068289 - RNA, 19 nt, Artificial Sequence
  Description of Artificial Sequence: Synthetic oligonucleotide
cuaacgucuaaacagcugu

SEQ ID NO: 1068290 - RNA, 19 nt, Artificial Sequence
  Description of Artificial Sequence: Synthetic oligonucleotide
cagaacuaagcaucaugug

SEQ ID NO: 1068291 - RNA, 19 nt, Artificial Sequence
  Description of Artificial Sequence: Synthetic oligonucleotide
auacccaacucuucuaaua

SEQ ID NO: 1068292 - RNA, 19 nt, Artificial Sequence
  Description of Artificial Sequence: Synthetic oligonucleotide
agaagacaauacccuagga

SEQ ID NO: 1068293 - RNA, 19 nt, Artificial Sequence
  Description of Artificial Sequence: Synthetic oligonucleotide
cacuaaaaguuguugucca

SEQ ID NO: 1068294 - RNA, 19 nt, Artificial Sequence
  Description of Artificial Sequence: Synthetic oligonucleotide
auacccuaggacacuugcc

SEQ ID NO: 1068295 - RNA, 19 nt, Artificial Sequence
  Description of Artificial Sequence: Synthetic oligonucleotide
gucuggagggacaaaucgg

SEQ ID NO: 1068296 - RNA, 19 nt, Artificial Sequence
  Description of Artificial Sequence: Synthetic oligonucleotide
uugccagaugugaucaaaa

SEQ ID NO: 1068297 - RNA, 19 nt, Artificial Sequence
  Description of Artificial Sequence: Synthetic oligonucleotide
ugcaaacgaucaaacgcuc

SEQ ID NO: 1068298 - RNA, 19 nt, Artificial Sequence
  Description of Artificial Sequence: Synthetic oligonucleotide
gaauguggcccacugauau

SEQ ID NO: 1068299 - RNA, 19 nt, Artificial Sequence
  Description of Artificial Sequence: Synthetic oligonucleotide
uugaaggauaggccugagu

SEQ ID NO: 1068300 - RNA, 19 nt, Artificial Sequence
  Description of Artificial Sequence: Synthetic oligonucleotide
gacuccacacaauguucag

SEQ ID NO: 1068301 - RNA, 19 nt, Artificial Sequence
  Description of Artificial Sequence: Synthetic oligonucleotide
acaaggguaugccacuaaa

SEQ ID NO: 1068302 - RNA, 19 nt, Artificial Sequence
  Description of Artificial Sequence: Synthetic oligonucleotide
uuugccagaugugaucaaa

SEQ ID NO: 1068303 - RNA, 19 nt, Artificial Sequence
  Description of Artificial Sequence: Synthetic oligonucleotide
gucuccauaguauggcuga

SEQ ID NO: 1068304 - RNA, 19 nt, Artificial Sequence
  Description of Artificial Sequence: Synthetic oligonucleotide
acggaaaucagggcaaaga

SEQ ID NO: 1068305 - RNA, 19 nt, Artificial Sequence
  Description of Artificial Sequence: Synthetic oligonucleotide
aacgaacaaaaggcucauc

SEQ ID NO: 1068306 - RNA, 19 nt, Artificial Sequence
  Description of Artificial Sequence: Synthetic oligonucleotide
acuaaaaguuguuguccau

SEQ ID NO: 1068307 - RNA, 19 nt, Artificial Sequence
  Description of Artificial Sequence: Synthetic oligonucleotide
aagacggaaaucagggcaa

SEQ ID NO: 1068308 - RNA, 19 nt, Artificial Sequence
  Description of Artificial Sequence: Synthetic oligonucleotide
gucggugugggccagaacu

SEQ ID NO: 1068309 - RNA, 19 nt, Artificial Sequence
  Description of Artificial Sequence: Synthetic oligonucleotide
agaaaccgcuguuuaaguu

SEQ ID NO: 1068310 - RNA, 19 nt, Artificial Sequence
  Description of Artificial Sequence: Synthetic oligonucleotide
aaacuugacagcagaguua

SEQ ID NO: 1068311 - RNA, 19 nt, Artificial Sequence
  Description of Artificial Sequence: Synthetic oligonucleotide
cacacaauguucagcuguc

SEQ ID NO: 1068312 - RNA, 19 nt, Artificial Sequence
  Description of Artificial Sequence: Synthetic oligonucleotide
guccaauuuuaagagucgc

SEQ ID NO: 1068313 - RNA, 19 nt, Artificial Sequence
  Description of Artificial Sequence: Synthetic oligonucleotide
cuuagcuguauaagaacaa

SEQ ID NO: 1068314 - RNA, 19 nt, Artificial Sequence
  Description of Artificial Sequence: Synthetic oligonucleotide
aaaccgcuguuuaaguuau

SEQ ID NO: 1068315 - RNA, 19 nt, Artificial Sequence
  Description of Artificial Sequence: Synthetic oligonucleotide
aggucggucucguucauaa

SEQ ID NO: 1068316 - RNA, 19 nt, Artificial Sequence
  Description of Artificial Sequence: Synthetic oligonucleotide
caacaagacuuguuucuuc

SEQ ID NO: 1068317 - RNA, 19 nt, Artificial Sequence
  Description of Artificial Sequence: Synthetic oligonucleotide
accgcuguuuaaguuauca

SEQ ID NO: 1068318 - RNA, 19 nt, Artificial Sequence
  Description of Artificial Sequence: Synthetic oligonucleotide
agaguuaauugggaaaauu

SEQ ID NO: 1068319 - RNA, 19 nt, Artificial Sequence
  Description of Artificial Sequence: Synthetic oligonucleotide
cugcaacaagacuuguuuc

SEQ ID NO: 1068320 - RNA, 19 nt, Artificial Sequence
  Description of Artificial Sequence: Synthetic oligonucleotide
caaacgcaaggcagaacac

SEQ ID NO: 1068321 - RNA, 19 nt, Artificial Sequence
  Description of Artificial Sequence: Synthetic oligonucleotide
aaaugagacaccagucaua

SEQ ID NO: 1068322 - RNA, 19 nt, Artificial Sequence
  Description of Artificial Sequence: Synthetic oligonucleotide
uaaggacagagugaguauu

SEQ ID NO: 1068323 - RNA, 19 nt, Artificial Sequence
  Description of Artificial Sequence: Synthetic oligonucleotide
ggaucaggaaagaaacugc

SEQ ID NO: 1068324 - RNA, 19 nt, Artificial Sequence
  Description of Artificial Sequence: Synthetic oligonucleotide
cuuaacuuaaggacagagu

SEQ ID NO: 1068325 - RNA, 19 nt, Artificial Sequence
  Description of Artificial Sequence: Synthetic oligonucleotide
uccauacaauaaagcacaa

SEQ ID NO: 1068326 - RNA, 19 nt, Artificial Sequence
  Description of Artificial Sequence: Synthetic oligonucleotide
aaucggcaugagcugcacu

SEQ ID NO: 1068327 - RNA, 19 nt, Artificial Sequence
  Description of Artificial Sequence: Synthetic oligonucleotide
agcuuuacuucagugcacu

SEQ ID NO: 1068328 - RNA, 19 nt, Artificial Sequence
  Description of Artificial Sequence: Synthetic oligonucleotide
acuaacgucuaaacagcug

SEQ ID NO: 1068329 - RNA, 19 nt, Artificial Sequence
  Description of Artificial Sequence: Synthetic oligonucleotide
guaguugguuucccaguug

SEQ ID NO: 1068330 - RNA, 19 nt, Artificial Sequence
  Description of Artificial Sequence: Synthetic oligonucleotide
aaucugcccuguguauguc

SEQ ID NO: 1068331 - RNA, 19 nt, Artificial Sequence
  Description of Artificial Sequence: Synthetic oligonucleotide
gucgcagugagaagaauuc

SEQ ID NO: 1068332 - RNA, 19 nt, Artificial Sequence
  Description of Artificial Sequence: Synthetic oligonucleotide
ccaaacgcaaggcagaaca

SEQ ID NO: 1068333 - RNA, 19 nt, Artificial Sequence
  Description of Artificial Sequence: Synthetic oligonucleotide
caaauucacuauacauuga

SEQ ID NO: 1068334 - RNA, 19 nt, Artificial Sequence
  Description of Artificial Sequence: Synthetic oligonucleotide
cuaauaaaggaggcuccuc

SEQ ID NO: 1068335 - RNA, 19 nt, Artificial Sequence
  Description of Artificial Sequence: Synthetic oligonucleotide
ccacuaaaaguuguugucc

SEQ ID NO: 1068336 - RNA, 19 nt, Artificial Sequence
  Description of Artificial Sequence: Synthetic oligonucleotide
cugcugagacugcucgucg

SEQ ID NO: 1068337 - RNA, 19 nt, Artificial Sequence
  Description of Artificial Sequence: Synthetic oligonucleotide
gcuacugguaaucggcaug

SEQ ID NO: 1068338 - RNA, 19 nt, Artificial Sequence
  Description of Artificial Sequence: Synthetic oligonucleotide
cuccauaguauggcugagg

SEQ ID NO: 1068339 - RNA, 19 nt, Artificial Sequence
  Description of Artificial Sequence: Synthetic oligonucleotide
gguaaucggcaugagcugc

SEQ ID NO: 1068340 - RNA, 19 nt, Artificial Sequence
  Description of Artificial Sequence: Synthetic oligonucleotide
guuugguagaaaccgcugu

SEQ ID NO: 1068341 - RNA, 19 nt, Artificial Sequence
  Description of Artificial Sequence: Synthetic oligonucleotide
aucaggauucaaaaucaaa

SEQ ID NO: 1068342 - RNA, 19 nt, Artificial Sequence
  Description of Artificial Sequence: Synthetic oligonucleotide
gugccugcaucaugucugg

SEQ ID NO: 1068343 - RNA, 19 nt, Artificial Sequence
  Description of Artificial Sequence: Synthetic oligonucleotide
uugcugcgaguagucauag

SEQ ID NO: 1068344 - RNA, 19 nt, Artificial Sequence
  Description of Artificial Sequence: Synthetic oligonucleotide
aaacgcuccugcggcggcg

SEQ ID NO: 1068345 - RNA, 19 nt, Artificial Sequence
  Description of Artificial Sequence: Synthetic oligonucleotide
ucgaugcuguaacuuguuu

SEQ ID NO: 1068346 - RNA, 19 nt, Artificial Sequence
  Description of Artificial Sequence: Synthetic oligonucleotide
aagagucgcagguccuuuu

SEQ ID NO: 1068347 - RNA, 19 nt, Artificial Sequence
  Description of Artificial Sequence: Synthetic oligonucleotide
aaggacagagugaguauuu

SEQ ID NO: 1068348 - RNA, 19 nt, Artificial Sequence
  Description of Artificial Sequence: Synthetic oligonucleotide
cagccaguaacagcguggc

SEQ ID NO: 1068349 - RNA, 19 nt, Artificial Sequence
  Description of Artificial Sequence: Synthetic oligonucleotide
uccuaccauuccuuguaaa

SEQ ID NO: 1068350 - RNA, 19 nt, Artificial Sequence
  Description of Artificial Sequence: Synthetic oligonucleotide
aguaguuugcugguccaau

SEQ ID NO: 1068351 - RNA, 19 nt, Artificial Sequence
  Description of Artificial Sequence: Synthetic oligonucleotide
acuaagcaucauguggcca

SEQ ID NO: 1068352 - RNA, 19 nt, Artificial Sequence
  Description of Artificial Sequence: Synthetic oligonucleotide
cuuccugggucgguguggg

SEQ ID NO: 1068353 - RNA, 19 nt, Artificial Sequence
  Description of Artificial Sequence: Synthetic oligonucleotide
gacggaaaucagggcaaag

SEQ ID NO: 1068354 - RNA, 19 nt, Artificial Sequence
  Description of Artificial Sequence: Synthetic oligonucleotide
cauuccuaaacauccaauu

SEQ ID NO: 1068355 - RNA, 19 nt, Artificial Sequence
  Description of Artificial Sequence: Synthetic oligonucleotide
ccagccaguaacagcgugg

SEQ ID NO: 1068356 - RNA, 19 nt, Artificial Sequence
  Description of Artificial Sequence: Synthetic oligonucleotide
ucccauagacauagccaaa

SEQ ID NO: 1068357 - RNA, 19 nt, Artificial Sequence
  Description of Artificial Sequence: Synthetic oligonucleotide
cuacugguaaucggcauga

SEQ ID NO: 1068358 - RNA, 19 nt, Artificial Sequence
  Description of Artificial Sequence: Synthetic oligonucleotide
cagcuuuacuucagugcac

SEQ ID NO: 1068359 - RNA, 19 nt, Artificial Sequence
  Description of Artificial Sequence: Synthetic oligonucleotide
gccaguaacagcguggcuc

SEQ ID NO: 1068360 - RNA, 19 nt, Artificial Sequence
  Description of Artificial Sequence: Synthetic oligonucleotide
ucggugugggccagaacua

SEQ ID NO: 1068361 - RNA, 19 nt, Artificial Sequence
  Description of Artificial Sequence: Synthetic oligonucleotide
caauacccuaggacacuug

SEQ ID NO: 1068362 - RNA, 19 nt, Artificial Sequence
  Description of Artificial Sequence: Synthetic oligonucleotide
cugaguuggcugguaaauc

SEQ ID NO: 1068363 - RNA, 19 nt, Artificial Sequence
  Description of Artificial Sequence: Synthetic oligonucleotide
gcaaggcagaacaccacgg

SEQ ID NO: 1068364 - RNA, 19 nt, Artificial Sequence
  Description of Artificial Sequence: Synthetic oligonucleotide
gccaaacuggauuuugcca

SEQ ID NO: 1068365 - RNA, 19 nt, Artificial Sequence
  Description of Artificial Sequence: Synthetic oligonucleotide
gguaugccacuaaaaguug

SEQ ID NO: 1068366 - RNA, 19 nt, Artificial Sequence
  Description of Artificial Sequence: Synthetic oligonucleotide
uuccacgcuacugguaauc

SEQ ID NO: 1068367 - RNA, 19 nt, Artificial Sequence
  Description of Artificial Sequence: Synthetic oligonucleotide
agccauugcaaacgaucaa

SEQ ID NO: 1068368 - RNA, 19 nt, Artificial Sequence
  Description of Artificial Sequence: Synthetic oligonucleotide
guaugucugcugugccugc

SEQ ID NO: 1068369 - RNA, 19 nt, Artificial Sequence
  Description of Artificial Sequence: Synthetic oligonucleotide
gcagaguuaauugggaaaa

SEQ ID NO: 1068370 - RNA, 19 nt, Artificial Sequence
  Description of Artificial Sequence: Synthetic oligonucleotide
guccuguacaaacgaacaa

SEQ ID NO: 1068371 - RNA, 19 nt, Artificial Sequence
  Description of Artificial Sequence: Synthetic oligonucleotide
cuugcugcgaguagucaua

SEQ ID NO: 1068372 - RNA, 19 nt, Artificial Sequence
  Description of Artificial Sequence: Synthetic oligonucleotide
cuguaacuuguuugguaga

SEQ ID NO: 1068373 - RNA, 19 nt, Artificial Sequence
  Description of Artificial Sequence: Synthetic oligonucleotide
gucaucugccaggugacuc

SEQ ID NO: 1068374 - RNA, 19 nt, Artificial Sequence
  Description of Artificial Sequence: Synthetic oligonucleotide
ccuaaacauccaauugcac

SEQ ID NO: 1068375 - RNA, 19 nt, Artificial Sequence
  Description of Artificial Sequence: Synthetic oligonucleotide
ggaucaugggaagaagaca

SEQ ID NO: 1068376 - RNA, 19 nt, Artificial Sequence
  Description of Artificial Sequence: Synthetic oligonucleotide
aggauaggccugaguuggc

SEQ ID NO: 1068377 - RNA, 19 nt, Artificial Sequence
  Description of Artificial Sequence: Synthetic oligonucleotide
acaauacccuaggacacuu

SEQ ID NO: 1068378 - RNA, 19 nt, Artificial Sequence
  Description of Artificial Sequence: Synthetic oligonucleotide
ugcugcgaguagucauagc

SEQ ID NO: 1068379 - RNA, 19 nt, Artificial Sequence
  Description of Artificial Sequence: Synthetic oligonucleotide
caguucaaaagacggaaau

SEQ ID NO: 1068380 - RNA, 19 nt, Artificial Sequence
  Description of Artificial Sequence: Synthetic oligonucleotide
gcuuccacgcuacugguaa

SEQ ID NO: 1068381 - RNA, 19 nt, Artificial Sequence
  Description of Artificial Sequence: Synthetic oligonucleotide
acgcaaggcagaacaccac

SEQ ID NO: 1068382 - RNA, 19 nt, Artificial Sequence
  Description of Artificial Sequence: Synthetic oligonucleotide
ccagaacuaagcaucaugu

SEQ ID NO: 1068383 - RNA, 19 nt, Artificial Sequence
  Description of Artificial Sequence: Synthetic oligonucleotide
uaaucggcaugagcugcac

SEQ ID NO: 1068384 - RNA, 19 nt, Artificial Sequence
  Description of Artificial Sequence: Synthetic oligonucleotide
caaacgcuccugcggcggc

SEQ ID NO: 1068385 - RNA, 19 nt, Artificial Sequence
  Description of Artificial Sequence: Synthetic oligonucleotide
ugcuuccacgcuacuggua

SEQ ID NO: 1068386 - RNA, 19 nt, Artificial Sequence
  Description of Artificial Sequence: Synthetic oligonucleotide
uaagagucgcagguccuuu

SEQ ID NO: 1068387 - RNA, 19 nt, Artificial Sequence
  Description of Artificial Sequence: Synthetic oligonucleotide
uccaaacgcaaggcagaac

SEQ ID NO: 1068388 - RNA, 19 nt, Artificial Sequence
  Description of Artificial Sequence: Synthetic oligonucleotide
aaucggccuugcugcgagu

SEQ ID NO: 1068389 - RNA, 19 nt, Artificial Sequence
  Description of Artificial Sequence: Synthetic oligonucleotide
cagaacaccacgggcccug

SEQ ID NO: 1068390 - RNA, 19 nt, Artificial Sequence
  Description of Artificial Sequence: Synthetic oligonucleotide
guaaucggcaugagcugca

SEQ ID NO: 1068391 - RNA, 19 nt, Artificial Sequence
  Description of Artificial Sequence: Synthetic oligonucleotide
aguugacacuaacgucuaa

SEQ ID NO: 1068392 - RNA, 19 nt, Artificial Sequence
  Description of Artificial Sequence: Synthetic oligonucleotide
cugagacugcucgucgaug

SEQ ID NO: 1068393 - RNA, 19 nt, Artificial Sequence
  Description of Artificial Sequence: Synthetic oligonucleotide
caauguucagcuguccugu

SEQ ID NO: 1068394 - RNA, 19 nt, Artificial Sequence
  Description of Artificial Sequence: Synthetic oligonucleotide
gagggacaaaucggccuug

SEQ ID NO: 1068395 - RNA, 19 nt, Artificial Sequence
  Description of Artificial Sequence: Synthetic oligonucleotide
gccaguccagaguaguuga

SEQ ID NO: 1068396 - RNA, 19 nt, Artificial Sequence
  Description of Artificial Sequence: Synthetic oligonucleotide
uggccaguccagaguaguu

SEQ ID NO: 1068397 - RNA, 19 nt, Artificial Sequence
  Description of Artificial Sequence: Synthetic oligonucleotide
cgucuaaacagcuguucac

SEQ ID NO: 1068398 - RNA, 19 nt, Artificial Sequence
  Description of Artificial Sequence: Synthetic oligonucleotide
aaccgcuguuuaaguuauc

SEQ ID NO: 1068399 - RNA, 19 nt, Artificial Sequence
  Description of Artificial Sequence: Synthetic oligonucleotide
ggccaguccagaguaguug

SEQ ID NO: 1068400 - RNA, 19 nt, Artificial Sequence
  Description of Artificial Sequence: Synthetic oligonucleotide
ggaaaucagggcaaagacu

SEQ ID NO: 1068401 - RNA, 19 nt, Artificial Sequence
  Description of Artificial Sequence: Synthetic oligonucleotide
cgcuguuuaaguuaucaaa

SEQ ID NO: 1068402 - RNA, 19 nt, Artificial Sequence
  Description of Artificial Sequence: Synthetic oligonucleotide
ccacgcuacugguaaucgg

SEQ ID NO: 1068403 - RNA, 19 nt, Artificial Sequence
  Description of Artificial Sequence: Synthetic oligonucleotide
cagcguggcuccaaacgca

SEQ ID NO: 1068404 - RNA, 19 nt, Artificial Sequence
  Description of Artificial Sequence: Synthetic oligonucleotide
guaugccacuaaaaguugu

SEQ ID NO: 1068405 - RNA, 19 nt, Artificial Sequence
  Description of Artificial Sequence: Synthetic oligonucleotide
ccagccaauaauugucgca

SEQ ID NO: 1068406 - RNA, 19 nt, Artificial Sequence
  Description of Artificial Sequence: Synthetic oligonucleotide
acgcuacugguaaucggca

SEQ ID NO: 1068407 - RNA, 19 nt, Artificial Sequence
  Description of Artificial Sequence: Synthetic oligonucleotide
cagagaacaguaguuuagu

SEQ ID NO: 1068408 - RNA, 19 nt, Artificial Sequence
  Description of Artificial Sequence: Synthetic oligonucleotide
agccaguaacagcguggcu

SEQ ID NO: 1068409 - RNA, 19 nt, Artificial Sequence
  Description of Artificial Sequence: Synthetic oligonucleotide
cucguucauaaugcugcca

SEQ ID NO: 1068410 - RNA, 19 nt, Artificial Sequence
  Description of Artificial Sequence: Synthetic oligonucleotide
gacugcucgucgaugcugu

SEQ ID NO: 1068411 - RNA, 19 nt, Artificial Sequence
  Description of Artificial Sequence: Synthetic oligonucleotide
gugggccagaacuaagcau

SEQ ID NO: 1068412 - RNA, 19 nt, Artificial Sequence
  Description of Artificial Sequence: Synthetic oligonucleotide
agacggaaaucagggcaaa

SEQ ID NO: 1068413 - RNA, 19 nt, Artificial Sequence
  Description of Artificial Sequence: Synthetic oligonucleotide
caccagucauacucauuaa

SEQ ID NO: 1068414 - RNA, 19 nt, Artificial Sequence
  Description of Artificial Sequence: Synthetic oligonucleotide
auaguauggcugaggugua

SEQ ID NO: 1068415 - RNA, 19 nt, Artificial Sequence
  Description of Artificial Sequence: Synthetic oligonucleotide
ugcggcggcggcggcggcg

SEQ ID NO: 1068416 - RNA, 19 nt, Artificial Sequence
  Description of Artificial Sequence: Synthetic oligonucleotide
caaaucggccuugcugcga

SEQ ID NO: 1068417 - RNA, 19 nt, Artificial Sequence
  Description of Artificial Sequence: Synthetic oligonucleotide
guauggcugagguguaguu

SEQ ID NO: 1068418 - RNA, 19 nt, Artificial Sequence
  Description of Artificial Sequence: Synthetic oligonucleotide
ccaguccagaguaguugac

SEQ ID NO: 1068419 - RNA, 19 nt, Artificial Sequence
  Description of Artificial Sequence: Synthetic oligonucleotide
cuccaaacgcaaggcagaa

SEQ ID NO: 1068420 - RNA, 19 nt, Artificial Sequence
  Description of Artificial Sequence: Synthetic oligonucleotide
cacuuaacuuaaggacaga

SEQ ID NO: 1068421 - RNA, 19 nt, Artificial Sequence
  Description of Artificial Sequence: Synthetic oligonucleotide
uuacuguaacuggguuguu

SEQ ID NO: 1068422 - RNA, 19 nt, Artificial Sequence
  Description of Artificial Sequence: Synthetic oligonucleotide
cguucauaaugcugccauc

SEQ ID NO: 1068423 - RNA, 19 nt, Artificial Sequence
  Description of Artificial Sequence: Synthetic oligonucleotide
ccaccagacaggcugugaa

SEQ ID NO: 1068424 - RNA, 19 nt, Artificial Sequence
  Description of Artificial Sequence: Synthetic oligonucleotide
cugcucgucgaugcuguaa

SEQ ID NO: 1068425 - RNA, 19 nt, Artificial Sequence
  Description of Artificial Sequence: Synthetic oligonucleotide
acgggcccugccaggucgg

SEQ ID NO: 1068426 - RNA, 19 nt, Artificial Sequence
  Description of Artificial Sequence: Synthetic oligonucleotide
ccagacaaaucaguucaaa

SEQ ID NO: 1068427 - RNA, 19 nt, Artificial Sequence
  Description of Artificial Sequence: Synthetic oligonucleotide
gguuucccaguugguaaaa

SEQ ID NO: 1068428 - RNA, 19 nt, Artificial Sequence
  Description of Artificial Sequence: Synthetic oligonucleotide
ccgcuguuuaaguuaucaa

SEQ ID NO: 1068429 - RNA, 19 nt, Artificial Sequence
  Description of Artificial Sequence: Synthetic oligonucleotide
cugggucggugugggccag

SEQ ID NO: 1068430 - RNA, 19 nt, Artificial Sequence
  Description of Artificial Sequence: Synthetic oligonucleotide
cagaguuaauugggaaaau

SEQ ID NO: 1068431 - RNA, 19 nt, Artificial Sequence
  Description of Artificial Sequence: Synthetic oligonucleotide
acuugacagcagaguuaau

SEQ ID NO: 1068432 - RNA, 19 nt, Artificial Sequence
  Description of Artificial Sequence: Synthetic oligonucleotide
cuggguuguuuuggagaaa

SEQ ID NO: 1068433 - RNA, 19 nt, Artificial Sequence
  Description of Artificial Sequence: Synthetic oligonucleotide
gucgaugcuguaacuuguu

SEQ ID NO: 1068434 - RNA, 19 nt, Artificial Sequence
  Description of Artificial Sequence: Synthetic oligonucleotide
gggacaaaucggccuugcu

SEQ ID NO: 1068435 - RNA, 19 nt, Artificial Sequence
  Description of Artificial Sequence: Synthetic oligonucleotide
cuuccacgcuacugguaau

SEQ ID NO: 1068436 - RNA, 19 nt, Artificial Sequence
  Description of Artificial Sequence: Synthetic oligonucleotide
cccagacaaaucaguucaa

SEQ ID NO: 1068437 - RNA, 19 nt, Artificial Sequence
  Description of Artificial Sequence: Synthetic oligonucleotide
gccuugcugcgaguaguca

SEQ ID NO: 1068438 - RNA, 19 nt, Artificial Sequence
  Description of Artificial Sequence: Synthetic oligonucleotide
cgucgaugcuguaacuugu

SEQ ID NO: 1068439 - RNA, 19 nt, Artificial Sequence
  Description of Artificial Sequence: Synthetic oligonucleotide
gcucgucgaugcuguaacu

SEQ ID NO: 1068440 - RNA, 19 nt, Artificial Sequence
  Description of Artificial Sequence: Synthetic oligonucleotide
gcggcggcggcggcggcgg

SEQ ID NO: 1068441 - RNA, 19 nt, Artificial Sequence
  Description of Artificial Sequence: Synthetic oligonucleotide
ggucggucucguucauaau

SEQ ID NO: 1068442 - RNA, 19 nt, Artificial Sequence
  Description of Artificial Sequence: Synthetic oligonucleotide
gcagcaccguaaguguuuu

SEQ ID NO: 1068443 - RNA, 19 nt, Artificial Sequence
  Description of Artificial Sequence: Synthetic oligonucleotide
cugcggcggcggcggcggc

SEQ ID NO: 1068444 - RNA, 19 nt, Artificial Sequence
  Description of Artificial Sequence: Synthetic oligonucleotide
gcggcggcggcggcggcug

SEQ ID NO: 1068445 - RNA, 19 nt, Artificial Sequence
  Description of Artificial Sequence: Synthetic oligonucleotide
gcagaacaccacgggcccu

SEQ ID NO: 1068446 - RNA, 19 nt, Artificial Sequence
  Description of Artificial Sequence: Synthetic oligonucleotide
cgcuacugguaaucggcau

SEQ ID NO: 1068447 - RNA, 19 nt, Artificial Sequence
  Description of Artificial Sequence: Synthetic oligonucleotide
cggccuugcugcgaguagu

SEQ ID NO: 1068448 - RNA, 19 nt, Artificial Sequence
  Description of Artificial Sequence: Synthetic oligonucleotide
ggcggcggcggcggcggcu

SEQ ID NO: 1068449 - RNA, 19 nt, Artificial Sequence
  Description of Artificial Sequence: Synthetic oligonucleotide
cggcggcggcggcggcggc

SEQ ID NO: 1068450 - RNA, 19 nt, Artificial Sequence
  Description of Artificial Sequence: Synthetic oligonucleotide
auaaauacagaacacugcc

SEQ ID NO: 1068451 - RNA, 19 nt, Artificial Sequence
  Description of Artificial Sequence: Synthetic oligonucleotide
aguacguccaaauuggucg

SEQ ID NO: 1068452 - RNA, 19 nt, Artificial Sequence
  Description of Artificial Sequence: Synthetic oligonucleotide
uuguuuaagguucagcuca

SEQ ID NO: 1068453 - RNA, 19 nt, Artificial Sequence
  Description of Artificial Sequence: Synthetic oligonucleotide
uguucugugaaugacaggc

SEQ ID NO: 1068454 - RNA, 19 nt, Artificial Sequence
  Description of Artificial Sequence: Synthetic oligonucleotide
ugugaaagcugucaauggg

SEQ ID NO: 1068455 - RNA, 19 nt, Artificial Sequence
  Description of Artificial Sequence: Synthetic oligonucleotide
aaugcgaugggacugagua

SEQ ID NO: 1068456 - RNA, 19 nt, Artificial Sequence
  Description of Artificial Sequence: Synthetic oligonucleotide
ucuaucagaagcuggacca

SEQ ID NO: 1068457 - RNA, 19 nt, Artificial Sequence
  Description of Artificial Sequence: Synthetic oligonucleotide
aaauuggucggcgugauug

SEQ ID NO: 1068458 - RNA, 19 nt, Artificial Sequence
  Description of Artificial Sequence: Synthetic oligonucleotide
agaaacuguggcuggacgc

SEQ ID NO: 1068459 - RNA, 19 nt, Artificial Sequence
  Description of Artificial Sequence: Synthetic oligonucleotide
cugaguacacaccacaacg

SEQ ID NO: 1068460 - RNA, 19 nt, Artificial Sequence
  Description of Artificial Sequence: Synthetic oligonucleotide
cagauugcaaggcugagcg

SEQ ID NO: 1068461 - RNA, 19 nt, Artificial Sequence
  Description of Artificial Sequence: Synthetic oligonucleotide
agagacaccugacuguggc

SEQ ID NO: 1068462 - RNA, 19 nt, Artificial Sequence
  Description of Artificial Sequence: Synthetic oligonucleotide
agccauucagacuggaagc

SEQ ID NO: 1068463 - RNA, 19 nt, Artificial Sequence
  Description of Artificial Sequence: Synthetic oligonucleotide
aggaaccacaaucuuacac

SEQ ID NO: 1068464 - RNA, 19 nt, Artificial Sequence
  Description of Artificial Sequence: Synthetic oligonucleotide
uuaagguucagcucagucu

SEQ ID NO: 1068465 - RNA, 19 nt, Artificial Sequence
  Description of Artificial Sequence: Synthetic oligonucleotide
aauacucaaaacuggguuu

SEQ ID NO: 1068466 - RNA, 19 nt, Artificial Sequence
  Description of Artificial Sequence: Synthetic oligonucleotide
uguuggacaaagaugacuu

SEQ ID NO: 1068467 - RNA, 19 nt, Artificial Sequence
  Description of Artificial Sequence: Synthetic oligonucleotide
ucuuggacggugcugacug

SEQ ID NO: 1068468 - RNA, 19 nt, Artificial Sequence
  Description of Artificial Sequence: Synthetic oligonucleotide
aaugaucugagaaugccca

SEQ ID NO: 1068469 - RNA, 19 nt, Artificial Sequence
  Description of Artificial Sequence: Synthetic oligonucleotide
aaacugagucauuucauau

SEQ ID NO: 1068470 - RNA, 19 nt, Artificial Sequence
  Description of Artificial Sequence: Synthetic oligonucleotide
cugagauucacccaguguc

SEQ ID NO: 1068471 - RNA, 19 nt, Artificial Sequence
  Description of Artificial Sequence: Synthetic oligonucleotide
gaaggaaccacaaucuuac

SEQ ID NO: 1068472 - RNA, 19 nt, Artificial Sequence
  Description of Artificial Sequence: Synthetic oligonucleotide
aaugggcaccguuugagcu

SEQ ID NO: 1068473 - RNA, 19 nt, Artificial Sequence
  Description of Artificial Sequence: Synthetic oligonucleotide
uuugguuguaucgaggaac

SEQ ID NO: 1068474 - RNA, 19 nt, Artificial Sequence
  Description of Artificial Sequence: Synthetic oligonucleotide
aauuggucggcgugauugg

SEQ ID NO: 1068475 - RNA, 19 nt, Artificial Sequence
  Description of Artificial Sequence: Synthetic oligonucleotide
gaugggacugaguacacac

SEQ ID NO: 1068476 - RNA, 19 nt, Artificial Sequence
  Description of Artificial Sequence: Synthetic oligonucleotide
uggcaguacguccaaauug

SEQ ID NO: 1068477 - RNA, 19 nt, Artificial Sequence
  Description of Artificial Sequence: Synthetic oligonucleotide
ugaaagcugucaaugggca

SEQ ID NO: 1068478 - RNA, 19 nt, Artificial Sequence
  Description of Artificial Sequence: Synthetic oligonucleotide
cuuaaugaucugagaaugc

SEQ ID NO: 1068479 - RNA, 19 nt, Artificial Sequence
  Description of Artificial Sequence: Synthetic oligonucleotide
uuuacuuggcuccauucaa

SEQ ID NO: 1068480 - RNA, 19 nt, Artificial Sequence
  Description of Artificial Sequence: Synthetic oligonucleotide
uuuaagguucagcucaguc

SEQ ID NO: 1068481 - RNA, 19 nt, Artificial Sequence
  Description of Artificial Sequence: Synthetic oligonucleotide
uguaucgaggaacugcagu

SEQ ID NO: 1068482 - RNA, 19 nt, Artificial Sequence
  Description of Artificial Sequence: Synthetic oligonucleotide
agccuuacuggguaggcac

SEQ ID NO: 1068483 - RNA, 19 nt, Artificial Sequence
  Description of Artificial Sequence: Synthetic oligonucleotide
guuuaggugggcuacuccc

SEQ ID NO: 1068484 - RNA, 19 nt, Artificial Sequence
  Description of Artificial Sequence: Synthetic oligonucleotide
ugaguacacaccacaacga

SEQ ID NO: 1068485 - RNA, 19 nt, Artificial Sequence
  Description of Artificial Sequence: Synthetic oligonucleotide
guggaugagaaacuguggc

SEQ ID NO: 1068486 - RNA, 19 nt, Artificial Sequence
  Description of Artificial Sequence: Synthetic oligonucleotide
acaccagacaaugcgaugg

SEQ ID NO: 1068487 - RNA, 19 nt, Artificial Sequence
  Description of Artificial Sequence: Synthetic oligonucleotide
acuugcuagaguuuucuga

SEQ ID NO: 1068488 - RNA, 19 nt, Artificial Sequence
  Description of Artificial Sequence: Synthetic oligonucleotide
aguacugagggagucacag

SEQ ID NO: 1068489 - RNA, 19 nt, Artificial Sequence
  Description of Artificial Sequence: Synthetic oligonucleotide
uagaguuuucugauuugcc

SEQ ID NO: 1068490 - RNA, 19 nt, Artificial Sequence
  Description of Artificial Sequence: Synthetic oligonucleotide
uugguugcacgugugaucc

SEQ ID NO: 1068491 - RNA, 19 nt, Artificial Sequence
  Description of Artificial Sequence: Synthetic oligonucleotide
ugaaggaaccacaaucuua

SEQ ID NO: 1068492 - RNA, 19 nt, Artificial Sequence
  Description of Artificial Sequence: Synthetic oligonucleotide
ugguaauugggguucguca

SEQ ID NO: 1068493 - RNA, 19 nt, Artificial Sequence
  Description of Artificial Sequence: Synthetic oligonucleotide
gaggaauuguuuuguuuag

SEQ ID NO: 1068494 - RNA, 19 nt, Artificial Sequence
  Description of Artificial Sequence: Synthetic oligonucleotide
uguuuagcuuucuucccag

SEQ ID NO: 1068495 - RNA, 19 nt, Artificial Sequence
  Description of Artificial Sequence: Synthetic oligonucleotide
gaaacuguggcuggacgcg

SEQ ID NO: 1068496 - RNA, 19 nt, Artificial Sequence
  Description of Artificial Sequence: Synthetic oligonucleotide
acgaccgacugccugcucc

SEQ ID NO: 1068497 - RNA, 19 nt, Artificial Sequence
  Description of Artificial Sequence: Synthetic oligonucleotide
uguuggaucuguucuguga

SEQ ID NO: 1068498 - RNA, 19 nt, Artificial Sequence
  Description of Artificial Sequence: Synthetic oligonucleotide
ugcuccauuguguggacag

SEQ ID NO: 1068499 - RNA, 19 nt, Artificial Sequence
  Description of Artificial Sequence: Synthetic oligonucleotide
ucgucauuaucccauuccu

SEQ ID NO: 1068500 - RNA, 19 nt, Artificial Sequence
  Description of Artificial Sequence: Synthetic oligonucleotide
uguuuaagguucagcucag

SEQ ID NO: 1068501 - RNA, 19 nt, Artificial Sequence
  Description of Artificial Sequence: Synthetic oligonucleotide
uugguuguaucgaggaacu

SEQ ID NO: 1068502 - RNA, 19 nt, Artificial Sequence
  Description of Artificial Sequence: Synthetic oligonucleotide
cugacuguggcacaugcac

SEQ ID NO: 1068503 - RNA, 19 nt, Artificial Sequence
  Description of Artificial Sequence: Synthetic oligonucleotide
cugugaaagcugucaaugg

SEQ ID NO: 1068504 - RNA, 19 nt, Artificial Sequence
  Description of Artificial Sequence: Synthetic oligonucleotide
cagccauucagacuggaag

SEQ ID NO: 1068505 - RNA, 19 nt, Artificial Sequence
  Description of Artificial Sequence: Synthetic oligonucleotide
ugucaaugggcaccguuug

SEQ ID NO: 1068506 - RNA, 19 nt, Artificial Sequence
  Description of Artificial Sequence: Synthetic oligonucleotide
uguuggaccugaugguuag

SEQ ID NO: 1068507 - RNA, 19 nt, Artificial Sequence
  Description of Artificial Sequence: Synthetic oligonucleotide
aacugagucauuucauauu

SEQ ID NO: 1068508 - RNA, 19 nt, Artificial Sequence
  Description of Artificial Sequence: Synthetic oligonucleotide
aaacucacuacugggagaa

SEQ ID NO: 1068509 - RNA, 19 nt, Artificial Sequence
  Description of Artificial Sequence: Synthetic oligonucleotide
ugagucauuucauauucua

SEQ ID NO: 1068510 - RNA, 19 nt, Artificial Sequence
  Description of Artificial Sequence: Synthetic oligonucleotide
cucuaucagaagcuggacc

SEQ ID NO: 1068511 - RNA, 19 nt, Artificial Sequence
  Description of Artificial Sequence: Synthetic oligonucleotide
cuuguuuaagguucagcuc

SEQ ID NO: 1068512 - RNA, 19 nt, Artificial Sequence
  Description of Artificial Sequence: Synthetic oligonucleotide
uuggacaaagaugacuucu

SEQ ID NO: 1068513 - RNA, 19 nt, Artificial Sequence
  Description of Artificial Sequence: Synthetic oligonucleotide
acaugucccugccaggccg

SEQ ID NO: 1068514 - RNA, 19 nt, Artificial Sequence
  Description of Artificial Sequence: Synthetic oligonucleotide
uaacaacuuaaugaucuga

SEQ ID NO: 1068515 - RNA, 19 nt, Artificial Sequence
  Description of Artificial Sequence: Synthetic oligonucleotide
accacuuugacaugucccu

SEQ ID NO: 1068516 - RNA, 19 nt, Artificial Sequence
  Description of Artificial Sequence: Synthetic oligonucleotide
gaaggcaugagcuggccca

SEQ ID NO: 1068517 - RNA, 19 nt, Artificial Sequence
  Description of Artificial Sequence: Synthetic oligonucleotide
gaugguuagugacugcauc

SEQ ID NO: 1068518 - RNA, 19 nt, Artificial Sequence
  Description of Artificial Sequence: Synthetic oligonucleotide
auuggggucagcgccgugc

SEQ ID NO: 1068519 - RNA, 19 nt, Artificial Sequence
  Description of Artificial Sequence: Synthetic oligonucleotide
gagucauuucauauucuag

SEQ ID NO: 1068520 - RNA, 19 nt, Artificial Sequence
  Description of Artificial Sequence: Synthetic oligonucleotide
agggaaccccuccagcacc

SEQ ID NO: 1068521 - RNA, 19 nt, Artificial Sequence
  Description of Artificial Sequence: Synthetic oligonucleotide
acaacuuaaugaucugaga

SEQ ID NO: 1068522 - RNA, 19 nt, Artificial Sequence
  Description of Artificial Sequence: Synthetic oligonucleotide
uguuuaggugggcuacucc

SEQ ID NO: 1068523 - RNA, 19 nt, Artificial Sequence
  Description of Artificial Sequence: Synthetic oligonucleotide
caugagcuggcccauuggg

SEQ ID NO: 1068524 - RNA, 19 nt, Artificial Sequence
  Description of Artificial Sequence: Synthetic oligonucleotide
guaggcacaugacaguaug

SEQ ID NO: 1068525 - RNA, 19 nt, Artificial Sequence
  Description of Artificial Sequence: Synthetic oligonucleotide
acgacagaaaacaauaaau

SEQ ID NO: 1068526 - RNA, 19 nt, Artificial Sequence
  Description of Artificial Sequence: Synthetic oligonucleotide
agcgccgugcuccagcaac

SEQ ID NO: 1068527 - RNA, 19 nt, Artificial Sequence
  Description of Artificial Sequence: Synthetic oligonucleotide
uucuaacaacuuaaugauc

SEQ ID NO: 1068528 - RNA, 19 nt, Artificial Sequence
  Description of Artificial Sequence: Synthetic oligonucleotide
uuggucggcgugauugggg

SEQ ID NO: 1068529 - RNA, 19 nt, Artificial Sequence
  Description of Artificial Sequence: Synthetic oligonucleotide
acucucacaaggguguuuc

SEQ ID NO: 1068530 - RNA, 19 nt, Artificial Sequence
  Description of Artificial Sequence: Synthetic oligonucleotide
gucaggaaacaguacugag

SEQ ID NO: 1068531 - RNA, 19 nt, Artificial Sequence
  Description of Artificial Sequence: Synthetic oligonucleotide
ugccguccugagaugaagg

SEQ ID NO: 1068532 - RNA, 19 nt, Artificial Sequence
  Description of Artificial Sequence: Synthetic oligonucleotide
gaguacacaccacaacgac

SEQ ID NO: 1068533 - RNA, 19 nt, Artificial Sequence
  Description of Artificial Sequence: Synthetic oligonucleotide
cuuuugucaaacugaguca

SEQ ID NO: 1068534 - RNA, 19 nt, Artificial Sequence
  Description of Artificial Sequence: Synthetic oligonucleotide
agggaauuguuggacaaag

SEQ ID NO: 1068535 - RNA, 19 nt, Artificial Sequence
  Description of Artificial Sequence: Synthetic oligonucleotide
uuggcugugaggaauuguu

SEQ ID NO: 1068536 - RNA, 19 nt, Artificial Sequence
  Description of Artificial Sequence: Synthetic oligonucleotide
cagggcuuguuuaagguuc

SEQ ID NO: 1068537 - RNA, 19 nt, Artificial Sequence
  Description of Artificial Sequence: Synthetic oligonucleotide
cucucauggcaguacgucc

SEQ ID NO: 1068538 - RNA, 19 nt, Artificial Sequence
  Description of Artificial Sequence: Synthetic oligonucleotide
ugggguucgucauuauccc

SEQ ID NO: 1068539 - RNA, 19 nt, Artificial Sequence
  Description of Artificial Sequence: Synthetic oligonucleotide
cacaugucccuccugggcc

SEQ ID NO: 1068540 - RNA, 19 nt, Artificial Sequence
  Description of Artificial Sequence: Synthetic oligonucleotide
guacguccaaauuggucgg

SEQ ID NO: 1068541 - RNA, 19 nt, Artificial Sequence
  Description of Artificial Sequence: Synthetic oligonucleotide
cacuuugacaugucccugc

SEQ ID NO: 1068542 - RNA, 19 nt, Artificial Sequence
  Description of Artificial Sequence: Synthetic oligonucleotide
uuauucagugugguggaga

SEQ ID NO: 1068543 - RNA, 19 nt, Artificial Sequence
  Description of Artificial Sequence: Synthetic oligonucleotide
aggcacaugacaguauguc

SEQ ID NO: 1068544 - RNA, 19 nt, Artificial Sequence
  Description of Artificial Sequence: Synthetic oligonucleotide
aauuauggcuguguccuaa

SEQ ID NO: 1068545 - RNA, 19 nt, Artificial Sequence
  Description of Artificial Sequence: Synthetic oligonucleotide
agauugcaaggcugagcgc

SEQ ID NO: 1068546 - RNA, 19 nt, Artificial Sequence
  Description of Artificial Sequence: Synthetic oligonucleotide
ucccagacuuagcaacagg

SEQ ID NO: 1068547 - RNA, 19 nt, Artificial Sequence
  Description of Artificial Sequence: Synthetic oligonucleotide
ugucaggaaacaguacuga

SEQ ID NO: 1068548 - RNA, 19 nt, Artificial Sequence
  Description of Artificial Sequence: Synthetic oligonucleotide
ggcaguacguccaaauugg

SEQ ID NO: 1068549 - RNA, 19 nt, Artificial Sequence
  Description of Artificial Sequence: Synthetic oligonucleotide
uggcaggcaauaagcaccc

SEQ ID NO: 1068550 - RNA, 19 nt, Artificial Sequence
  Description of Artificial Sequence: Synthetic oligonucleotide
gcacgugugauccaccacg

SEQ ID NO: 1068551 - RNA, 19 nt, Artificial Sequence
  Description of Artificial Sequence: Synthetic oligonucleotide
uuacuuggcuccauucaaa

SEQ ID NO: 1068552 - RNA, 19 nt, Artificial Sequence
  Description of Artificial Sequence: Synthetic oligonucleotide
acucucauggcaguacguc

SEQ ID NO: 1068553 - RNA, 19 nt, Artificial Sequence
  Description of Artificial Sequence: Synthetic oligonucleotide
ucagacuggaagcaccgua

SEQ ID NO: 1068554 - RNA, 19 nt, Artificial Sequence
  Description of Artificial Sequence: Synthetic oligonucleotide
auucagacuggaagcaccg

SEQ ID NO: 1068555 - RNA, 19 nt, Artificial Sequence
  Description of Artificial Sequence: Synthetic oligonucleotide
ugacaggcugugaaagcug

SEQ ID NO: 1068556 - RNA, 19 nt, Artificial Sequence
  Description of Artificial Sequence: Synthetic oligonucleotide
cacagaaggggaaacucuc

SEQ ID NO: 1068557 - RNA, 19 nt, Artificial Sequence
  Description of Artificial Sequence: Synthetic oligonucleotide
cucgcuccugcacuguucg

SEQ ID NO: 1068558 - RNA, 19 nt, Artificial Sequence
  Description of Artificial Sequence: Synthetic oligonucleotide
auaagcacccguaccaucu

SEQ ID NO: 1068559 - RNA, 19 nt, Artificial Sequence
  Description of Artificial Sequence: Synthetic oligonucleotide
guuguaucgaggaacugca

SEQ ID NO: 1068560 - RNA, 19 nt, Artificial Sequence
  Description of Artificial Sequence: Synthetic oligonucleotide
ugcaaguccccuccaccag

SEQ ID NO: 1068561 - RNA, 19 nt, Artificial Sequence
  Description of Artificial Sequence: Synthetic oligonucleotide
gguuguaucgaggaacugc

SEQ ID NO: 1068562 - RNA, 19 nt, Artificial Sequence
  Description of Artificial Sequence: Synthetic oligonucleotide
acaugucccuccugggccg

SEQ ID NO: 1068563 - RNA, 19 nt, Artificial Sequence
  Description of Artificial Sequence: Synthetic oligonucleotide
agcgagugcuguuggaucu

SEQ ID NO: 1068564 - RNA, 19 nt, Artificial Sequence
  Description of Artificial Sequence: Synthetic oligonucleotide
ugcacuguucgagggacag

SEQ ID NO: 1068565 - RNA, 19 nt, Artificial Sequence
  Description of Artificial Sequence: Synthetic oligonucleotide
uccaaauuggucggcguga

SEQ ID NO: 1068566 - RNA, 19 nt, Artificial Sequence
  Description of Artificial Sequence: Synthetic oligonucleotide
uuguaucgaggaacugcag

SEQ ID NO: 1068567 - RNA, 19 nt, Artificial Sequence
  Description of Artificial Sequence: Synthetic oligonucleotide
cauuaucccauuccucuuc

SEQ ID NO: 1068568 - RNA, 19 nt, Artificial Sequence
  Description of Artificial Sequence: Synthetic oligonucleotide
cuugguugcacgugugauc

SEQ ID NO: 1068569 - RNA, 19 nt, Artificial Sequence
  Description of Artificial Sequence: Synthetic oligonucleotide
uuuauucagugugguggag

SEQ ID NO: 1068570 - RNA, 19 nt, Artificial Sequence
  Description of Artificial Sequence: Synthetic oligonucleotide
caggccgcagauugcaagg

SEQ ID NO: 1068571 - RNA, 19 nt, Artificial Sequence
  Description of Artificial Sequence: Synthetic oligonucleotide
cuccauuguguggacaggg

SEQ ID NO: 1068572 - RNA, 19 nt, Artificial Sequence
  Description of Artificial Sequence: Synthetic oligonucleotide
cacgugugauccaccacgg

SEQ ID NO: 1068573 - RNA, 19 nt, Artificial Sequence
  Description of Artificial Sequence: Synthetic oligonucleotide
cuaaggacuggguugugga

SEQ ID NO: 1068574 - RNA, 19 nt, Artificial Sequence
  Description of Artificial Sequence: Synthetic oligonucleotide
augguaauugggguucguc

SEQ ID NO: 1068575 - RNA, 19 nt, Artificial Sequence
  Description of Artificial Sequence: Synthetic oligonucleotide
aaucuuacacugagauuca

SEQ ID NO: 1068576 - RNA, 19 nt, Artificial Sequence
  Description of Artificial Sequence: Synthetic oligonucleotide
guuacgcugagaagggcag

SEQ ID NO: 1068577 - RNA, 19 nt, Artificial Sequence
  Description of Artificial Sequence: Synthetic oligonucleotide
accgacugccugcuccugc

SEQ ID NO: 1068578 - RNA, 19 nt, Artificial Sequence
  Description of Artificial Sequence: Synthetic oligonucleotide
gaaacucucacaagggugu

SEQ ID NO: 1068579 - RNA, 19 nt, Artificial Sequence
  Description of Artificial Sequence: Synthetic oligonucleotide
ggaaacucucacaagggug

SEQ ID NO: 1068580 - RNA, 19 nt, Artificial Sequence
  Description of Artificial Sequence: Synthetic oligonucleotide
agacaaugcgaugggacug

SEQ ID NO: 1068581 - RNA, 19 nt, Artificial Sequence
  Description of Artificial Sequence: Synthetic oligonucleotide
uguguccuaaggacugggu

SEQ ID NO: 1068582 - RNA, 19 nt, Artificial Sequence
  Description of Artificial Sequence: Synthetic oligonucleotide
caaugggcaccguuugagc

SEQ ID NO: 1068583 - RNA, 19 nt, Artificial Sequence
  Description of Artificial Sequence: Synthetic oligonucleotide
gacuugcuagaguuuucug

SEQ ID NO: 1068584 - RNA, 19 nt, Artificial Sequence
  Description of Artificial Sequence: Synthetic oligonucleotide
ugcuucucggcagcgagug

SEQ ID NO: 1068585 - RNA, 19 nt, Artificial Sequence
  Description of Artificial Sequence: Synthetic oligonucleotide
ccucuuuugucaaacugag

SEQ ID NO: 1068586 - RNA, 19 nt, Artificial Sequence
  Description of Artificial Sequence: Synthetic oligonucleotide
cacaagaaccaggaacacc

SEQ ID NO: 1068587 - RNA, 19 nt, Artificial Sequence
  Description of Artificial Sequence: Synthetic oligonucleotide
aaguccccuccaccaguac

SEQ ID NO: 1068588 - RNA, 19 nt, Artificial Sequence
  Description of Artificial Sequence: Synthetic oligonucleotide
gugugauccaccacggcgc

SEQ ID NO: 1068589 - RNA, 19 nt, Artificial Sequence
  Description of Artificial Sequence: Synthetic oligonucleotide
uugcacgugugauccacca

SEQ ID NO: 1068590 - RNA, 19 nt, Artificial Sequence
  Description of Artificial Sequence: Synthetic oligonucleotide
acacaagaaccaggaacac

SEQ ID NO: 1068591 - RNA, 19 nt, Artificial Sequence
  Description of Artificial Sequence: Synthetic oligonucleotide
gguuugguuguaucgagga

SEQ ID NO: 1068592 - RNA, 19 nt, Artificial Sequence
  Description of Artificial Sequence: Synthetic oligonucleotide
aacacugccuuugcagaga

SEQ ID NO: 1068593 - RNA, 19 nt, Artificial Sequence
  Description of Artificial Sequence: Synthetic oligonucleotide
ugaugguuagugacugcau

SEQ ID NO: 1068594 - RNA, 19 nt, Artificial Sequence
  Description of Artificial Sequence: Synthetic oligonucleotide
acaccacaacgacagaaaa

SEQ ID NO: 1068595 - RNA, 19 nt, Artificial Sequence
  Description of Artificial Sequence: Synthetic oligonucleotide
ggaccugaugguuagugac

SEQ ID NO: 1068596 - RNA, 19 nt, Artificial Sequence
  Description of Artificial Sequence: Synthetic oligonucleotide
ugacccagacuugcuagag

SEQ ID NO: 1068597 - RNA, 19 nt, Artificial Sequence
  Description of Artificial Sequence: Synthetic oligonucleotide
acaaucuuacacugagauu

SEQ ID NO: 1068598 - RNA, 19 nt, Artificial Sequence
  Description of Artificial Sequence: Synthetic oligonucleotide
caacagguccucuuuuguc

SEQ ID NO: 1068599 - RNA, 19 nt, Artificial Sequence
  Description of Artificial Sequence: Synthetic oligonucleotide
caguacguccaaauugguc

SEQ ID NO: 1068600 - RNA, 19 nt, Artificial Sequence
  Description of Artificial Sequence: Synthetic oligonucleotide
cacaaucuuacacugagau

SEQ ID NO: 1068601 - RNA, 19 nt, Artificial Sequence
  Description of Artificial Sequence: Synthetic oligonucleotide
augggcaccguuugagcug

SEQ ID NO: 1068602 - RNA, 19 nt, Artificial Sequence
  Description of Artificial Sequence: Synthetic oligonucleotide
gacucugauggagagcuga

SEQ ID NO: 1068603 - RNA, 19 nt, Artificial Sequence
  Description of Artificial Sequence: Synthetic oligonucleotide
agacuugcuagaguuuucu

SEQ ID NO: 1068604 - RNA, 19 nt, Artificial Sequence
  Description of Artificial Sequence: Synthetic oligonucleotide
acgugugauccaccacggc

SEQ ID NO: 1068605 - RNA, 19 nt, Artificial Sequence
  Description of Artificial Sequence: Synthetic oligonucleotide
cagaugguaauugggguuc

SEQ ID NO: 1068606 - RNA, 19 nt, Artificial Sequence
  Description of Artificial Sequence: Synthetic oligonucleotide
uaauugggguucgucauua

SEQ ID NO: 1068607 - RNA, 19 nt, Artificial Sequence
  Description of Artificial Sequence: Synthetic oligonucleotide
caugcucuaucagaagcug

SEQ ID NO: 1068608 - RNA, 19 nt, Artificial Sequence
  Description of Artificial Sequence: Synthetic oligonucleotide
uuugcuccccgcucugcug

SEQ ID NO: 1068609 - RNA, 19 nt, Artificial Sequence
  Description of Artificial Sequence: Synthetic oligonucleotide
acuucugccgguccacagu

SEQ ID NO: 1068610 - RNA, 19 nt, Artificial Sequence
  Description of Artificial Sequence: Synthetic oligonucleotide
uacuggguaggcacaugac

SEQ ID NO: 1068611 - RNA, 19 nt, Artificial Sequence
  Description of Artificial Sequence: Synthetic oligonucleotide
aucuuacacugagauucac

SEQ ID NO: 1068612 - RNA, 19 nt, Artificial Sequence
  Description of Artificial Sequence: Synthetic oligonucleotide
uaucagaagcuggaccacu

SEQ ID NO: 1068613 - RNA, 19 nt, Artificial Sequence
  Description of Artificial Sequence: Synthetic oligonucleotide
ugucuguuuaggugggcua

SEQ ID NO: 1068614 - RNA, 19 nt, Artificial Sequence
  Description of Artificial Sequence: Synthetic oligonucleotide
ggcuguggcgccuugguug

SEQ ID NO: 1068615 - RNA, 19 nt, Artificial Sequence
  Description of Artificial Sequence: Synthetic oligonucleotide
uguggcacaugcacauuua

SEQ ID NO: 1068616 - RNA, 19 nt, Artificial Sequence
  Description of Artificial Sequence: Synthetic oligonucleotide
ucagggcuuguuuaagguu

SEQ ID NO: 1068617 - RNA, 19 nt, Artificial Sequence
  Description of Artificial Sequence: Synthetic oligonucleotide
gagacugcgucagcauggg

SEQ ID NO: 1068618 - RNA, 19 nt, Artificial Sequence
  Description of Artificial Sequence: Synthetic oligonucleotide
ggagacugcgucagcaugg

SEQ ID NO: 1068619 - RNA, 19 nt, Artificial Sequence
  Description of Artificial Sequence: Synthetic oligonucleotide
uuuggcugugaggaauugu

SEQ ID NO: 1068620 - RNA, 19 nt, Artificial Sequence
  Description of Artificial Sequence: Synthetic oligonucleotide
acaaggguguuucuuucuu

SEQ ID NO: 1068621 - RNA, 19 nt, Artificial Sequence
  Description of Artificial Sequence: Synthetic oligonucleotide
ugccuccuuuauuugauuu

SEQ ID NO: 1068622 - RNA, 19 nt, Artificial Sequence
  Description of Artificial Sequence: Synthetic oligonucleotide
uggguaggcacaugacagu

SEQ ID NO: 1068623 - RNA, 19 nt, Artificial Sequence
  Description of Artificial Sequence: Synthetic oligonucleotide
agauucacccagugucugu

SEQ ID NO: 1068624 - RNA, 19 nt, Artificial Sequence
  Description of Artificial Sequence: Synthetic oligonucleotide
uccugggccgcgaugcaga

SEQ ID NO: 1068625 - RNA, 19 nt, Artificial Sequence
  Description of Artificial Sequence: Synthetic oligonucleotide
cuucuuuugcuccccgcuc

SEQ ID NO: 1068626 - RNA, 19 nt, Artificial Sequence
  Description of Artificial Sequence: Synthetic oligonucleotide
agaagcuggaccacuuuga

SEQ ID NO: 1068627 - RNA, 19 nt, Artificial Sequence
  Description of Artificial Sequence: Synthetic oligonucleotide
auuggucggcgugauuggg

SEQ ID NO: 1068628 - RNA, 19 nt, Artificial Sequence
  Description of Artificial Sequence: Synthetic oligonucleotide
ugcaucuuggacggugcug

SEQ ID NO: 1068629 - RNA, 19 nt, Artificial Sequence
  Description of Artificial Sequence: Synthetic oligonucleotide
uguugacuucaaacuuggu

SEQ ID NO: 1068630 - RNA, 19 nt, Artificial Sequence
  Description of Artificial Sequence: Synthetic oligonucleotide
agaugguaauugggguucg

SEQ ID NO: 1068631 - RNA, 19 nt, Artificial Sequence
  Description of Artificial Sequence: Synthetic oligonucleotide
gugauuggggucagcgccg

SEQ ID NO: 1068632 - RNA, 19 nt, Artificial Sequence
  Description of Artificial Sequence: Synthetic oligonucleotide
acguccaaauuggucggcg

SEQ ID NO: 1068633 - RNA, 19 nt, Artificial Sequence
  Description of Artificial Sequence: Synthetic oligonucleotide
cgugugauccaccacggcg

SEQ ID NO: 1068634 - RNA, 19 nt, Artificial Sequence
  Description of Artificial Sequence: Synthetic oligonucleotide
uccaccacggcgccaugcu

SEQ ID NO: 1068635 - RNA, 19 nt, Artificial Sequence
  Description of Artificial Sequence: Synthetic oligonucleotide
uugguuuuacuuggcucca

SEQ ID NO: 1068636 - RNA, 19 nt, Artificial Sequence
  Description of Artificial Sequence: Synthetic oligonucleotide
aauugggguucgucauuau

SEQ ID NO: 1068637 - RNA, 19 nt, Artificial Sequence
  Description of Artificial Sequence: Synthetic oligonucleotide
guuggacaaagaugacuuc

SEQ ID NO: 1068638 - RNA, 19 nt, Artificial Sequence
  Description of Artificial Sequence: Synthetic oligonucleotide
cugaugguuagugacugca

SEQ ID NO: 1068639 - RNA, 19 nt, Artificial Sequence
  Description of Artificial Sequence: Synthetic oligonucleotide
auggcaguacguccaaauu

SEQ ID NO: 1068640 - RNA, 19 nt, Artificial Sequence
  Description of Artificial Sequence: Synthetic oligonucleotide
ggcgugauuggggucagcg

SEQ ID NO: 1068641 - RNA, 19 nt, Artificial Sequence
  Description of Artificial Sequence: Synthetic oligonucleotide
ucggcagcgagugcuguug

SEQ ID NO: 1068642 - RNA, 19 nt, Artificial Sequence
  Description of Artificial Sequence: Synthetic oligonucleotide
ugcacgugugauccaccac

SEQ ID NO: 1068643 - RNA, 19 nt, Artificial Sequence
  Description of Artificial Sequence: Synthetic oligonucleotide
ugagaagggcagccuuacu

SEQ ID NO: 1068644 - RNA, 19 nt, Artificial Sequence
  Description of Artificial Sequence: Synthetic oligonucleotide
aaccacaaucuuacacuga

SEQ ID NO: 1068645 - RNA, 19 nt, Artificial Sequence
  Description of Artificial Sequence: Synthetic oligonucleotide
aggccgcagauugcaaggc

SEQ ID NO: 1068646 - RNA, 19 nt, Artificial Sequence
  Description of Artificial Sequence: Synthetic oligonucleotide
agcaacaccugcaccacgu

SEQ ID NO: 1068647 - RNA, 19 nt, Artificial Sequence
  Description of Artificial Sequence: Synthetic oligonucleotide
gucuguuuaggugggcuac

SEQ ID NO: 1068648 - RNA, 19 nt, Artificial Sequence
  Description of Artificial Sequence: Synthetic oligonucleotide
uaagcacccguaccaucuc

SEQ ID NO: 1068649 - RNA, 19 nt, Artificial Sequence
  Description of Artificial Sequence: Synthetic oligonucleotide
ugauccaccacggcgccau

SEQ ID NO: 1068650 - RNA, 19 nt, Artificial Sequence
  Description of Artificial Sequence: Synthetic oligonucleotide
cacugagauucacccagug

SEQ ID NO: 1068651 - RNA, 19 nt, Artificial Sequence
  Description of Artificial Sequence: Synthetic oligonucleotide
ggggacacgaccgacugcc

SEQ ID NO: 1068652 - RNA, 19 nt, Artificial Sequence
  Description of Artificial Sequence: Synthetic oligonucleotide
caacgacagaaaacaauaa

SEQ ID NO: 1068653 - RNA, 19 nt, Artificial Sequence
  Description of Artificial Sequence: Synthetic oligonucleotide
ucucacaaggguguuucuu

SEQ ID NO: 1068654 - RNA, 19 nt, Artificial Sequence
  Description of Artificial Sequence: Synthetic oligonucleotide
acaugcacauuuaccaaau

SEQ ID NO: 1068655 - RNA, 19 nt, Artificial Sequence
  Description of Artificial Sequence: Synthetic oligonucleotide
aggaaacaguacugaggga

SEQ ID NO: 1068656 - RNA, 19 nt, Artificial Sequence
  Description of Artificial Sequence: Synthetic oligonucleotide
gacaaugcgaugggacuga

SEQ ID NO: 1068657 - RNA, 19 nt, Artificial Sequence
  Description of Artificial Sequence: Synthetic oligonucleotide
acucaaaacuggguuuggu

SEQ ID NO: 1068658 - RNA, 19 nt, Artificial Sequence
  Description of Artificial Sequence: Synthetic oligonucleotide
cacaccacaacgacagaaa

SEQ ID NO: 1068659 - RNA, 19 nt, Artificial Sequence
  Description of Artificial Sequence: Synthetic oligonucleotide
cguccugagaugaaggaac

SEQ ID NO: 1068660 - RNA, 19 nt, Artificial Sequence
  Description of Artificial Sequence: Synthetic oligonucleotide
caggaaagacgugcagugc

SEQ ID NO: 1068661 - RNA, 19 nt, Artificial Sequence
  Description of Artificial Sequence: Synthetic oligonucleotide
cuaucagaagcuggaccac

SEQ ID NO: 1068662 - RNA, 19 nt, Artificial Sequence
  Description of Artificial Sequence: Synthetic oligonucleotide
cacaugacccugccagcag

SEQ ID NO: 1068663 - RNA, 19 nt, Artificial Sequence
  Description of Artificial Sequence: Synthetic oligonucleotide
uccugagaugaaggaacca

SEQ ID NO: 1068664 - RNA, 19 nt, Artificial Sequence
  Description of Artificial Sequence: Synthetic oligonucleotide
gaucugagaaugcccauuu

SEQ ID NO: 1068665 - RNA, 19 nt, Artificial Sequence
  Description of Artificial Sequence: Synthetic oligonucleotide
guaucgaggaacugcaguu

SEQ ID NO: 1068666 - RNA, 19 nt, Artificial Sequence
  Description of Artificial Sequence: Synthetic oligonucleotide
guaugucaggaaacaguac

SEQ ID NO: 1068667 - RNA, 19 nt, Artificial Sequence
  Description of Artificial Sequence: Synthetic oligonucleotide
caugucccugccaggccgc

SEQ ID NO: 1068668 - RNA, 19 nt, Artificial Sequence
  Description of Artificial Sequence: Synthetic oligonucleotide
uuacgcugagaagggcagc

SEQ ID NO: 1068669 - RNA, 19 nt, Artificial Sequence
  Description of Artificial Sequence: Synthetic oligonucleotide
agacugcgucagcaugggg

SEQ ID NO: 1068670 - RNA, 19 nt, Artificial Sequence
  Description of Artificial Sequence: Synthetic oligonucleotide
gacugaguacacaccacaa

SEQ ID NO: 1068671 - RNA, 19 nt, Artificial Sequence
  Description of Artificial Sequence: Synthetic oligonucleotide
cagcgagugcuguuggauc

SEQ ID NO: 1068672 - RNA, 19 nt, Artificial Sequence
  Description of Artificial Sequence: Synthetic oligonucleotide
guucgucauuaucccauuc

SEQ ID NO: 1068673 - RNA, 19 nt, Artificial Sequence
  Description of Artificial Sequence: Synthetic oligonucleotide
gaacaccugguugcucugc

SEQ ID NO: 1068674 - RNA, 19 nt, Artificial Sequence
  Description of Artificial Sequence: Synthetic oligonucleotide
guuugguuguaucgaggaa

SEQ ID NO: 1068675 - RNA, 19 nt, Artificial Sequence
  Description of Artificial Sequence: Synthetic oligonucleotide
gaaacaguacugagggagu

SEQ ID NO: 1068676 - RNA, 19 nt, Artificial Sequence
  Description of Artificial Sequence: Synthetic oligonucleotide
gacuuagcaacagguccuc

SEQ ID NO: 1068677 - RNA, 19 nt, Artificial Sequence
  Description of Artificial Sequence: Synthetic oligonucleotide
ugggcaccguuugagcugu

SEQ ID NO: 1068678 - RNA, 19 nt, Artificial Sequence
  Description of Artificial Sequence: Synthetic oligonucleotide
gggguuacgcugagaaggg

SEQ ID NO: 1068679 - RNA, 19 nt, Artificial Sequence
  Description of Artificial Sequence: Synthetic oligonucleotide
uucugccgguccacaguug

SEQ ID NO: 1068680 - RNA, 19 nt, Artificial Sequence
  Description of Artificial Sequence: Synthetic oligonucleotide
cuuguaguugaagcuggga

SEQ ID NO: 1068681 - RNA, 19 nt, Artificial Sequence
  Description of Artificial Sequence: Synthetic oligonucleotide
gguuacgcugagaagggca

SEQ ID NO: 1068682 - RNA, 19 nt, Artificial Sequence
  Description of Artificial Sequence: Synthetic oligonucleotide
ggaacaccagacaaugcga

SEQ ID NO: 1068683 - RNA, 19 nt, Artificial Sequence
  Description of Artificial Sequence: Synthetic oligonucleotide
cugaugcccucgcuccugc

SEQ ID NO: 1068684 - RNA, 19 nt, Artificial Sequence
  Description of Artificial Sequence: Synthetic oligonucleotide
gucaaugggcaccguuuga

SEQ ID NO: 1068685 - RNA, 19 nt, Artificial Sequence
  Description of Artificial Sequence: Synthetic oligonucleotide
gcaccguuugagcuguggc

SEQ ID NO: 1068686 - RNA, 19 nt, Artificial Sequence
  Description of Artificial Sequence: Synthetic oligonucleotide
ugguuguaucgaggaacug

SEQ ID NO: 1068687 - RNA, 19 nt, Artificial Sequence
  Description of Artificial Sequence: Synthetic oligonucleotide
ggcaugagcuggcccauug

SEQ ID NO: 1068688 - RNA, 19 nt, Artificial Sequence
  Description of Artificial Sequence: Synthetic oligonucleotide
ggagcuuuucagggaauug

SEQ ID NO: 1068689 - RNA, 19 nt, Artificial Sequence
  Description of Artificial Sequence: Synthetic oligonucleotide
ggcuuguuuaagguucagc

SEQ ID NO: 1068690 - RNA, 19 nt, Artificial Sequence
  Description of Artificial Sequence: Synthetic oligonucleotide
accaggaacaccagacaau

SEQ ID NO: 1068691 - RNA, 19 nt, Artificial Sequence
  Description of Artificial Sequence: Synthetic oligonucleotide
guggcgccuugguugcacg

SEQ ID NO: 1068692 - RNA, 19 nt, Artificial Sequence
  Description of Artificial Sequence: Synthetic oligonucleotide
gucggcgugauugggguca

SEQ ID NO: 1068693 - RNA, 19 nt, Artificial Sequence
  Description of Artificial Sequence: Synthetic oligonucleotide
aacucucacaaggguguuu

SEQ ID NO: 1068694 - RNA, 19 nt, Artificial Sequence
  Description of Artificial Sequence: Synthetic oligonucleotide
ccacucucauggcaguacg

SEQ ID NO: 1068695 - RNA, 19 nt, Artificial Sequence
  Description of Artificial Sequence: Synthetic oligonucleotide
aaacucucacaaggguguu

SEQ ID NO: 1068696 - RNA, 19 nt, Artificial Sequence
  Description of Artificial Sequence: Synthetic oligonucleotide
guugcacgugugauccacc

SEQ ID NO: 1068697 - RNA, 19 nt, Artificial Sequence
  Description of Artificial Sequence: Synthetic oligonucleotide
cuuacuggguaggcacaug

SEQ ID NO: 1068698 - RNA, 19 nt, Artificial Sequence
  Description of Artificial Sequence: Synthetic oligonucleotide
aaggcaugagcuggcccau

SEQ ID NO: 1068699 - RNA, 19 nt, Artificial Sequence
  Description of Artificial Sequence: Synthetic oligonucleotide
acggcgccaugcucuauca

SEQ ID NO: 1068700 - RNA, 19 nt, Artificial Sequence
  Description of Artificial Sequence: Synthetic oligonucleotide
gcuguggcgccuugguugc

SEQ ID NO: 1068701 - RNA, 19 nt, Artificial Sequence
  Description of Artificial Sequence: Synthetic oligonucleotide
gcagauugcaaggcugagc

SEQ ID NO: 1068702 - RNA, 19 nt, Artificial Sequence
  Description of Artificial Sequence: Synthetic oligonucleotide
ccuaaggacuggguugugg

SEQ ID NO: 1068703 - RNA, 19 nt, Artificial Sequence
  Description of Artificial Sequence: Synthetic oligonucleotide
cacggcgccaugcucuauc

SEQ ID NO: 1068704 - RNA, 19 nt, Artificial Sequence
  Description of Artificial Sequence: Synthetic oligonucleotide
cugccguccugagaugaag

SEQ ID NO: 1068705 - RNA, 19 nt, Artificial Sequence
  Description of Artificial Sequence: Synthetic oligonucleotide
cuguuuaggugggcuacuc

SEQ ID NO: 1068706 - RNA, 19 nt, Artificial Sequence
  Description of Artificial Sequence: Synthetic oligonucleotide
cugacccagacuugcuaga

SEQ ID NO: 1068707 - RNA, 19 nt, Artificial Sequence
  Description of Artificial Sequence: Synthetic oligonucleotide
gguugcacgugugauccac

SEQ ID NO: 1068708 - RNA, 19 nt, Artificial Sequence
  Description of Artificial Sequence: Synthetic oligonucleotide
ugauuggggucagcgccgu

SEQ ID NO: 1068709 - RNA, 19 nt, Artificial Sequence
  Description of Artificial Sequence: Synthetic oligonucleotide
cuuugacaugucccugcca

SEQ ID NO: 1068710 - RNA, 19 nt, Artificial Sequence
  Description of Artificial Sequence: Synthetic oligonucleotide
ggggagcagccauucagac

SEQ ID NO: 1068711 - RNA, 19 nt, Artificial Sequence
  Description of Artificial Sequence: Synthetic oligonucleotide
gaccugaugguuagugacu

SEQ ID NO: 1068712 - RNA, 19 nt, Artificial Sequence
  Description of Artificial Sequence: Synthetic oligonucleotide
ggaacaccugguugcucug

SEQ ID NO: 1068713 - RNA, 19 nt, Artificial Sequence
  Description of Artificial Sequence: Synthetic oligonucleotide
agcacccguaccaucucca

SEQ ID NO: 1068714 - RNA, 19 nt, Artificial Sequence
  Description of Artificial Sequence: Synthetic oligonucleotide
gacuggaagcaccguauuu

SEQ ID NO: 1068715 - RNA, 19 nt, Artificial Sequence
  Description of Artificial Sequence: Synthetic oligonucleotide
ugguugcacgugugaucca

SEQ ID NO: 1068716 - RNA, 19 nt, Artificial Sequence
  Description of Artificial Sequence: Synthetic oligonucleotide
gcacaugcacauuuaccaa

SEQ ID NO: 1068717 - RNA, 19 nt, Artificial Sequence
  Description of Artificial Sequence: Synthetic oligonucleotide
gauuggggucagcgccgug

SEQ ID NO: 1068718 - RNA, 19 nt, Artificial Sequence
  Description of Artificial Sequence: Synthetic oligonucleotide
gcgugauuggggucagcgc

SEQ ID NO: 1068719 - RNA, 19 nt, Artificial Sequence
  Description of Artificial Sequence: Synthetic oligonucleotide
guguccuaaggacuggguu

SEQ ID NO: 1068720 - RNA, 19 nt, Artificial Sequence
  Description of Artificial Sequence: Synthetic oligonucleotide
gggaaacucucacaagggu

SEQ ID NO: 1068721 - RNA, 19 nt, Artificial Sequence
  Description of Artificial Sequence: Synthetic oligonucleotide
gccgcagauugcaaggcug

SEQ ID NO: 1068722 - RNA, 19 nt, Artificial Sequence
  Description of Artificial Sequence: Synthetic oligonucleotide
acaccugacuguggcacau

SEQ ID NO: 1068723 - RNA, 19 nt, Artificial Sequence
  Description of Artificial Sequence: Synthetic oligonucleotide
ggcaccguuugagcugugg

SEQ ID NO: 1068724 - RNA, 19 nt, Artificial Sequence
  Description of Artificial Sequence: Synthetic oligonucleotide
gauucacccagugucuguu

SEQ ID NO: 1068725 - RNA, 19 nt, Artificial Sequence
  Description of Artificial Sequence: Synthetic oligonucleotide
ugguuuuacuuggcuccau

SEQ ID NO: 1068726 - RNA, 19 nt, Artificial Sequence
  Description of Artificial Sequence: Synthetic oligonucleotide
ggaaggggagcagccauuc

SEQ ID NO: 1068727 - RNA, 19 nt, Artificial Sequence
  Description of Artificial Sequence: Synthetic oligonucleotide
guaauugggguucgucauu

SEQ ID NO: 1068728 - RNA, 19 nt, Artificial Sequence
  Description of Artificial Sequence: Synthetic oligonucleotide
acucugauggagagcugaa

SEQ ID NO: 1068729 - RNA, 19 nt, Artificial Sequence
  Description of Artificial Sequence: Synthetic oligonucleotide
cugguggaugagaaacugu

SEQ ID NO: 1068730 - RNA, 19 nt, Artificial Sequence
  Description of Artificial Sequence: Synthetic oligonucleotide
ucucggcagcgagugcugu

SEQ ID NO: 1068731 - RNA, 19 nt, Artificial Sequence
  Description of Artificial Sequence: Synthetic oligonucleotide
cugcaccacguccacaugu

SEQ ID NO: 1068732 - RNA, 19 nt, Artificial Sequence
  Description of Artificial Sequence: Synthetic oligonucleotide
cacccguaccaucuccaca

SEQ ID NO: 1068733 - RNA, 19 nt, Artificial Sequence
  Description of Artificial Sequence: Synthetic oligonucleotide
ucggcgugauuggggucag

SEQ ID NO: 1068734 - RNA, 19 nt, Artificial Sequence
  Description of Artificial Sequence: Synthetic oligonucleotide
caaguccccuccaccagua

SEQ ID NO: 1068735 - RNA, 19 nt, Artificial Sequence
  Description of Artificial Sequence: Synthetic oligonucleotide
cccagacuuagcaacaggu

SEQ ID NO: 1068736 - RNA, 19 nt, Artificial Sequence
  Description of Artificial Sequence: Synthetic oligonucleotide
acacgaccgacugccugcu

SEQ ID NO: 1068737 - RNA, 19 nt, Artificial Sequence
  Description of Artificial Sequence: Synthetic oligonucleotide
gcaggcaauaagcacccgu

SEQ ID NO: 1068738 - RNA, 19 nt, Artificial Sequence
  Description of Artificial Sequence: Synthetic oligonucleotide
gccguccugagaugaagga

SEQ ID NO: 1068739 - RNA, 19 nt, Artificial Sequence
  Description of Artificial Sequence: Synthetic oligonucleotide
acuguucgagggacagaga

SEQ ID NO: 1068740 - RNA, 19 nt, Artificial Sequence
  Description of Artificial Sequence: Synthetic oligonucleotide
cugggagaauuauggcugu

SEQ ID NO: 1068741 - RNA, 19 nt, Artificial Sequence
  Description of Artificial Sequence: Synthetic oligonucleotide
cugauuugccuccuuuauu

SEQ ID NO: 1068742 - RNA, 19 nt, Artificial Sequence
  Description of Artificial Sequence: Synthetic oligonucleotide
gcaacagguccucuuuugu

SEQ ID NO: 1068743 - RNA, 19 nt, Artificial Sequence
  Description of Artificial Sequence: Synthetic oligonucleotide
gggguucgucauuauccca

SEQ ID NO: 1068744 - RNA, 19 nt, Artificial Sequence
  Description of Artificial Sequence: Synthetic oligonucleotide
gggacugaguacacaccac

SEQ ID NO: 1068745 - RNA, 19 nt, Artificial Sequence
  Description of Artificial Sequence: Synthetic oligonucleotide
ggcugcaaguccccuccac

SEQ ID NO: 1068746 - RNA, 19 nt, Artificial Sequence
  Description of Artificial Sequence: Synthetic oligonucleotide
gaugguaauugggguucgu

SEQ ID NO: 1068747 - RNA, 19 nt, Artificial Sequence
  Description of Artificial Sequence: Synthetic oligonucleotide
accacggcgccaugcucua

SEQ ID NO: 1068748 - RNA, 19 nt, Artificial Sequence
  Description of Artificial Sequence: Synthetic oligonucleotide
aggcugcaaguccccucca

SEQ ID NO: 1068749 - RNA, 19 nt, Artificial Sequence
  Description of Artificial Sequence: Synthetic oligonucleotide
cugcacuguucgagggaca

SEQ ID NO: 1068750 - RNA, 19 nt, Artificial Sequence
  Description of Artificial Sequence: Synthetic oligonucleotide
cugggccgcgaugcagagg

SEQ ID NO: 1068751 - RNA, 19 nt, Artificial Sequence
  Description of Artificial Sequence: Synthetic oligonucleotide
ggcgccuugguugcacgug

SEQ ID NO: 1068752 - RNA, 19 nt, Artificial Sequence
  Description of Artificial Sequence: Synthetic oligonucleotide
gcacccguaccaucuccac

SEQ ID NO: 1068753 - RNA, 19 nt, Artificial Sequence
  Description of Artificial Sequence: Synthetic oligonucleotide
cagccuuacuggguaggca

SEQ ID NO: 1068754 - RNA, 19 nt, Artificial Sequence
  Description of Artificial Sequence: Synthetic oligonucleotide
ggguuacgcugagaagggc

SEQ ID NO: 1068755 - RNA, 19 nt, Artificial Sequence
  Description of Artificial Sequence: Synthetic oligonucleotide
cacucucauggcaguacgu

SEQ ID NO: 1068756 - RNA, 19 nt, Artificial Sequence
  Description of Artificial Sequence: Synthetic oligonucleotide
caauaagcacccguaccau

SEQ ID NO: 1068757 - RNA, 19 nt, Artificial Sequence
  Description of Artificial Sequence: Synthetic oligonucleotide
ccacuuugacaugucccug

SEQ ID NO: 1068758 - RNA, 19 nt, Artificial Sequence
  Description of Artificial Sequence: Synthetic oligonucleotide
gguuuuacuuggcuccauu

SEQ ID NO: 1068759 - RNA, 19 nt, Artificial Sequence
  Description of Artificial Sequence: Synthetic oligonucleotide
guuuaagguucagcucagu

SEQ ID NO: 1068760 - RNA, 19 nt, Artificial Sequence
  Description of Artificial Sequence: Synthetic oligonucleotide
ggcuacucccagacuuagc

SEQ ID NO: 1068761 - RNA, 19 nt, Artificial Sequence
  Description of Artificial Sequence: Synthetic oligonucleotide
ggguucgucauuaucccau

SEQ ID NO: 1068762 - RNA, 19 nt, Artificial Sequence
  Description of Artificial Sequence: Synthetic oligonucleotide
ccgcagauugcaaggcuga

SEQ ID NO: 1068763 - RNA, 19 nt, Artificial Sequence
  Description of Artificial Sequence: Synthetic oligonucleotide
gguccucuuuugucaaacu

SEQ ID NO: 1068764 - RNA, 19 nt, Artificial Sequence
  Description of Artificial Sequence: Synthetic oligonucleotide
caccugacuguggcacaug

SEQ ID NO: 1068765 - RNA, 19 nt, Artificial Sequence
  Description of Artificial Sequence: Synthetic oligonucleotide
caaugcgaugggacugagu

SEQ ID NO: 1068766 - RNA, 19 nt, Artificial Sequence
  Description of Artificial Sequence: Synthetic oligonucleotide
gcuucucggcagcgagugc

SEQ ID NO: 1068767 - RNA, 19 nt, Artificial Sequence
  Description of Artificial Sequence: Synthetic oligonucleotide
gggcuuguuuaagguucag

SEQ ID NO: 1068768 - RNA, 19 nt, Artificial Sequence
  Description of Artificial Sequence: Synthetic oligonucleotide
ggcagcgagugcuguugga

SEQ ID NO: 1068769 - RNA, 19 nt, Artificial Sequence
  Description of Artificial Sequence: Synthetic oligonucleotide
ggcaggcaauaagcacccg

SEQ ID NO: 1068770 - RNA, 19 nt, Artificial Sequence
  Description of Artificial Sequence: Synthetic oligonucleotide
gccgcgaugcagagggcug

SEQ ID NO: 1068771 - RNA, 19 nt, Artificial Sequence
  Description of Artificial Sequence: Synthetic oligonucleotide
ugacugcaucuuggacggu

SEQ ID NO: 1068772 - RNA, 19 nt, Artificial Sequence
  Description of Artificial Sequence: Synthetic oligonucleotide
gcccucaauuuggagcuuc

SEQ ID NO: 1068773 - RNA, 19 nt, Artificial Sequence
  Description of Artificial Sequence: Synthetic oligonucleotide
gcccauugggcaggccccg

SEQ ID NO: 1068774 - RNA, 19 nt, Artificial Sequence
  Description of Artificial Sequence: Synthetic oligonucleotide
ccugggccgcgaugcagag

SEQ ID NO: 1068775 - RNA, 19 nt, Artificial Sequence
  Description of Artificial Sequence: Synthetic oligonucleotide
cccucaauuuggagcuuca

SEQ ID NO: 1068776 - RNA, 19 nt, Artificial Sequence
  Description of Artificial Sequence: Synthetic oligonucleotide
cucucacaaggguguuucu

SEQ ID NO: 1068777 - RNA, 19 nt, Artificial Sequence
  Description of Artificial Sequence: Synthetic oligonucleotide
gccuccuuuauuugauuuu

SEQ ID NO: 1068778 - RNA, 19 nt, Artificial Sequence
  Description of Artificial Sequence: Synthetic oligonucleotide
cugcuucucggcagcgagu

SEQ ID NO: 1068779 - RNA, 19 nt, Artificial Sequence
  Description of Artificial Sequence: Synthetic oligonucleotide
cuuggacggugcugacugu

SEQ ID NO: 1068780 - RNA, 19 nt, Artificial Sequence
  Description of Artificial Sequence: Synthetic oligonucleotide
cugcaucuuggacggugcu

SEQ ID NO: 1068781 - RNA, 19 nt, Artificial Sequence
  Description of Artificial Sequence: Synthetic oligonucleotide
cacgaccgacugccugcuc

SEQ ID NO: 1068782 - RNA, 19 nt, Artificial Sequence
  Description of Artificial Sequence: Synthetic oligonucleotide
ggccgcagauugcaaggcu

SEQ ID NO: 1068783 - RNA, 19 nt, Artificial Sequence
  Description of Artificial Sequence: Synthetic oligonucleotide
cgcagauugcaaggcugag

SEQ ID NO: 1068784 - RNA, 19 nt, Artificial Sequence
  Description of Artificial Sequence: Synthetic oligonucleotide
gcagcgagugcuguuggau

SEQ ID NO: 1068785 - RNA, 19 nt, Artificial Sequence
  Description of Artificial Sequence: Synthetic oligonucleotide
cggcagcgagugcuguugg

SEQ ID NO: 1068786 - RNA, 19 nt, Artificial Sequence
  Description of Artificial Sequence: Synthetic oligonucleotide
ccguccugagaugaaggaa

SEQ ID NO: 1068787 - RNA, 19 nt, Artificial Sequence
  Description of Artificial Sequence: Synthetic oligonucleotide
ccaccacggcgccaugcuc

SEQ ID NO: 1068788 - RNA, 19 nt, Artificial Sequence
  Description of Artificial Sequence: Synthetic oligonucleotide
ggcuggacgcggcugccgu

SEQ ID NO: 1068789 - RNA, 19 nt, Artificial Sequence
  Description of Artificial Sequence: Synthetic oligonucleotide
aggcaugagcuggcccauu

SEQ ID NO: 1068790 - RNA, 19 nt, Artificial Sequence
  Description of Artificial Sequence: Synthetic oligonucleotide
gcaguacguccaaauuggu

SEQ ID NO: 1068791 - RNA, 19 nt, Artificial Sequence
  Description of Artificial Sequence: Synthetic oligonucleotide
ggccgcgaugcagagggcu

SEQ ID NO: 1068792 - RNA, 19 nt, Artificial Sequence
  Description of Artificial Sequence: Synthetic oligonucleotide
gagugcuguuggaucuguu

SEQ ID NO: 1068793 - RNA, 19 nt, Artificial Sequence
  Description of Artificial Sequence: Synthetic oligonucleotide
cucggcagcgagugcuguu

SEQ ID NO: 1068794 - RNA, 19 nt, Artificial Sequence
  Description of Artificial Sequence: Synthetic oligonucleotide
ccuugguugcacgugugau

SEQ ID NO: 1068795 - RNA, 19 nt, Artificial Sequence
  Description of Artificial Sequence: Synthetic oligonucleotide
ccguuugagcuguggcugu

SEQ ID NO: 1068796 - RNA, 19 nt, Artificial Sequence
  Description of Artificial Sequence: Synthetic oligonucleotide
gcuccccgcucugcuggug

SEQ ID NO: 1068797 - RNA, 19 nt, Artificial Sequence
  Description of Artificial Sequence: Synthetic oligonucleotide
cgaugggacugaguacaca

SEQ ID NO: 1068798 - RNA, 19 nt, Artificial Sequence
  Description of Artificial Sequence: Synthetic oligonucleotide
ccuuacuggguaggcacau

SEQ ID NO: 1068799 - RNA, 19 nt, Artificial Sequence
  Description of Artificial Sequence: Synthetic oligonucleotide
cuguggcgccuugguugca

SEQ ID NO: 1068800 - RNA, 19 nt, Artificial Sequence
  Description of Artificial Sequence: Synthetic oligonucleotide
gggacacgaccgacugccu

SEQ ID NO: 1068801 - RNA, 19 nt, Artificial Sequence
  Description of Artificial Sequence: Synthetic oligonucleotide
gggcaccguuugagcugug

SEQ ID NO: 1068802 - RNA, 19 nt, Artificial Sequence
  Description of Artificial Sequence: Synthetic oligonucleotide
ccgcgaugcagagggcugu

SEQ ID NO: 1068803 - RNA, 19 nt, Artificial Sequence
  Description of Artificial Sequence: Synthetic oligonucleotide
cgagugcuguuggaucugu

SEQ ID NO: 1068804 - RNA, 19 nt, Artificial Sequence
  Description of Artificial Sequence: Synthetic oligonucleotide
cggcgugauuggggucagc

SEQ ID NO: 1068805 - RNA, 19 nt, Artificial Sequence
  Description of Artificial Sequence: Synthetic oligonucleotide
ccacggcgccaugcucuau

SEQ ID NO: 1068806 - RNA, 19 nt, Artificial Sequence
  Description of Artificial Sequence: Synthetic oligonucleotide
aaaugaaucaacucagugc

SEQ ID NO: 1068807 - RNA, 19 nt, Artificial Sequence
  Description of Artificial Sequence: Synthetic oligonucleotide
aaucuuaauaaucauacuc

SEQ ID NO: 1068808 - RNA, 19 nt, Artificial Sequence
  Description of Artificial Sequence: Synthetic oligonucleotide
uuaugaaugacaaaggaca

SEQ ID NO: 1068809 - RNA, 19 nt, Artificial Sequence
  Description of Artificial Sequence: Synthetic oligonucleotide
aaaccuuugaucaugagcg

SEQ ID NO: 1068810 - RNA, 19 nt, Artificial Sequence
  Description of Artificial Sequence: Synthetic oligonucleotide
uauguaaucuuaauaauca

SEQ ID NO: 1068811 - RNA, 19 nt, Artificial Sequence
  Description of Artificial Sequence: Synthetic oligonucleotide
ucuauuaacuaaaucuccg

SEQ ID NO: 1068812 - RNA, 19 nt, Artificial Sequence
  Description of Artificial Sequence: Synthetic oligonucleotide
uuaauagcgaauuugacaa

SEQ ID NO: 1068813 - RNA, 19 nt, Artificial Sequence
  Description of Artificial Sequence: Synthetic oligonucleotide
uuaaaugugugcaucaggc

SEQ ID NO: 1068814 - RNA, 19 nt, Artificial Sequence
  Description of Artificial Sequence: Synthetic oligonucleotide
agauuuaaugaccaccagc

SEQ ID NO: 1068815 - RNA, 19 nt, Artificial Sequence
  Description of Artificial Sequence: Synthetic oligonucleotide
uuaaaaucaaccccuggcc

SEQ ID NO: 1068816 - RNA, 19 nt, Artificial Sequence
  Description of Artificial Sequence: Synthetic oligonucleotide
aguucuaacaauuuagaca

SEQ ID NO: 1068817 - RNA, 19 nt, Artificial Sequence
  Description of Artificial Sequence: Synthetic oligonucleotide
aacuucaauaacgcgaggc

SEQ ID NO: 1068818 - RNA, 19 nt, Artificial Sequence
  Description of Artificial Sequence: Synthetic oligonucleotide
uagaacuucaauaacgcga

SEQ ID NO: 1068819 - RNA, 19 nt, Artificial Sequence
  Description of Artificial Sequence: Synthetic oligonucleotide
aauuuagacaucaauauau

SEQ ID NO: 1068820 - RNA, 19 nt, Artificial Sequence
  Description of Artificial Sequence: Synthetic oligonucleotide
auaaucauacucccugugc

SEQ ID NO: 1068821 - RNA, 19 nt, Artificial Sequence
  Description of Artificial Sequence: Synthetic oligonucleotide
aguauaagauuuaaugacc

SEQ ID NO: 1068822 - RNA, 19 nt, Artificial Sequence
  Description of Artificial Sequence: Synthetic oligonucleotide
agacaaaucaguaaucccc

SEQ ID NO: 1068823 - RNA, 19 nt, Artificial Sequence
  Description of Artificial Sequence: Synthetic oligonucleotide
aauaacgcgaggcuuguca

SEQ ID NO: 1068824 - RNA, 19 nt, Artificial Sequence
  Description of Artificial Sequence: Synthetic oligonucleotide
auuaugaaugacaaaggac

SEQ ID NO: 1068825 - RNA, 19 nt, Artificial Sequence
  Description of Artificial Sequence: Synthetic oligonucleotide
acaauuuagacaucaauau

SEQ ID NO: 1068826 - RNA, 19 nt, Artificial Sequence
  Description of Artificial Sequence: Synthetic oligonucleotide
aacauguugucacacucag

SEQ ID NO: 1068827 - RNA, 19 nt, Artificial Sequence
  Description of Artificial Sequence: Synthetic oligonucleotide
aaucauacucccugugcac

SEQ ID NO: 1068828 - RNA, 19 nt, Artificial Sequence
  Description of Artificial Sequence: Synthetic oligonucleotide
uccuaguuggacaaguugc

SEQ ID NO: 1068829 - RNA, 19 nt, Artificial Sequence
  Description of Artificial Sequence: Synthetic oligonucleotide
aaaccuggaaggcacuacg

SEQ ID NO: 1068830 - RNA, 19 nt, Artificial Sequence
  Description of Artificial Sequence: Synthetic oligonucleotide
aucgcgaaaaccuuugauc

SEQ ID NO: 1068831 - RNA, 19 nt, Artificial Sequence
  Description of Artificial Sequence: Synthetic oligonucleotide
ugagaguguccuaaaaugc

SEQ ID NO: 1068832 - RNA, 19 nt, Artificial Sequence
  Description of Artificial Sequence: Synthetic oligonucleotide
uuugguuaacaccagcaca

SEQ ID NO: 1068833 - RNA, 19 nt, Artificial Sequence
  Description of Artificial Sequence: Synthetic oligonucleotide
aauuaauagcgaauuugac

SEQ ID NO: 1068834 - RNA, 19 nt, Artificial Sequence
  Description of Artificial Sequence: Synthetic oligonucleotide
uuuagacaucaauauauug

SEQ ID NO: 1068835 - RNA, 19 nt, Artificial Sequence
  Description of Artificial Sequence: Synthetic oligonucleotide
agagacgucauuaacagag

SEQ ID NO: 1068836 - RNA, 19 nt, Artificial Sequence
  Description of Artificial Sequence: Synthetic oligonucleotide
gaauuugacaaugaaucag

SEQ ID NO: 1068837 - RNA, 19 nt, Artificial Sequence
  Description of Artificial Sequence: Synthetic oligonucleotide
ucuaacaauuuagacauca

SEQ ID NO: 1068838 - RNA, 19 nt, Artificial Sequence
  Description of Artificial Sequence: Synthetic oligonucleotide
uuaugaauucguuuugcug

SEQ ID NO: 1068839 - RNA, 19 nt, Artificial Sequence
  Description of Artificial Sequence: Synthetic oligonucleotide
aacgaagucccuuuuauuu

SEQ ID NO: 1068840 - RNA, 19 nt, Artificial Sequence
  Description of Artificial Sequence: Synthetic oligonucleotide
uaaucauacucccugugca

SEQ ID NO: 1068841 - RNA, 19 nt, Artificial Sequence
  Description of Artificial Sequence: Synthetic oligonucleotide
uguaaucuuaauaaucaua

SEQ ID NO: 1068842 - RNA, 19 nt, Artificial Sequence
  Description of Artificial Sequence: Synthetic oligonucleotide
ucuuaaaaucaaccccugg

SEQ ID NO: 1068843 - RNA, 19 nt, Artificial Sequence
  Description of Artificial Sequence: Synthetic oligonucleotide
uucaauaacgcgaggcuug

SEQ ID NO: 1068844 - RNA, 19 nt, Artificial Sequence
  Description of Artificial Sequence: Synthetic oligonucleotide
aaggguuugguuaacacca

SEQ ID NO: 1068845 - RNA, 19 nt, Artificial Sequence
  Description of Artificial Sequence: Synthetic oligonucleotide
uccuaaaaugccaaagccu

SEQ ID NO: 1068846 - RNA, 19 nt, Artificial Sequence
  Description of Artificial Sequence: Synthetic oligonucleotide
aguagcaucaacauguugu

SEQ ID NO: 1068847 - RNA, 19 nt, Artificial Sequence
  Description of Artificial Sequence: Synthetic oligonucleotide
aaugaaucaguaagaguuc

SEQ ID NO: 1068848 - RNA, 19 nt, Artificial Sequence
  Description of Artificial Sequence: Synthetic oligonucleotide
accgaugauaauccaaggg

SEQ ID NO: 1068849 - RNA, 19 nt, Artificial Sequence
  Description of Artificial Sequence: Synthetic oligonucleotide
aauuugacaaugaaucagu

SEQ ID NO: 1068850 - RNA, 19 nt, Artificial Sequence
  Description of Artificial Sequence: Synthetic oligonucleotide
ucgcgaaaaccuuugauca

SEQ ID NO: 1068851 - RNA, 19 nt, Artificial Sequence
  Description of Artificial Sequence: Synthetic oligonucleotide
aacaauccacgcuugguga

SEQ ID NO: 1068852 - RNA, 19 nt, Artificial Sequence
  Description of Artificial Sequence: Synthetic oligonucleotide
aaccccaccgaugauaauc

SEQ ID NO: 1068853 - RNA, 19 nt, Artificial Sequence
  Description of Artificial Sequence: Synthetic oligonucleotide
uccauauguaaucuuaaua

SEQ ID NO: 1068854 - RNA, 19 nt, Artificial Sequence
  Description of Artificial Sequence: Synthetic oligonucleotide
guucuaacaauuuagacau

SEQ ID NO: 1068855 - RNA, 19 nt, Artificial Sequence
  Description of Artificial Sequence: Synthetic oligonucleotide
ucugccaauccuuagugga

SEQ ID NO: 1068856 - RNA, 19 nt, Artificial Sequence
  Description of Artificial Sequence: Synthetic oligonucleotide
acuucgaagauuugaucuc

SEQ ID NO: 1068857 - RNA, 19 nt, Artificial Sequence
  Description of Artificial Sequence: Synthetic oligonucleotide
uagauguaagaaauuuucu

SEQ ID NO: 1068858 - RNA, 19 nt, Artificial Sequence
  Description of Artificial Sequence: Synthetic oligonucleotide
auuaacuaaaucuccggaa

SEQ ID NO: 1068859 - RNA, 19 nt, Artificial Sequence
  Description of Artificial Sequence: Synthetic oligonucleotide
auuucuccggauuauccag

SEQ ID NO: 1068860 - RNA, 19 nt, Artificial Sequence
  Description of Artificial Sequence: Synthetic oligonucleotide
auuuaaugaccaccagcac

SEQ ID NO: 1068861 - RNA, 19 nt, Artificial Sequence
  Description of Artificial Sequence: Synthetic oligonucleotide
aaucuccggaaauuuucag

SEQ ID NO: 1068862 - RNA, 19 nt, Artificial Sequence
  Description of Artificial Sequence: Synthetic oligonucleotide
agcgguguuaccuucucuc

SEQ ID NO: 1068863 - RNA, 19 nt, Artificial Sequence
  Description of Artificial Sequence: Synthetic oligonucleotide
caaugauucgggcuguccg

SEQ ID NO: 1068864 - RNA, 19 nt, Artificial Sequence
  Description of Artificial Sequence: Synthetic oligonucleotide
guagaacuucaauaacgcg

SEQ ID NO: 1068865 - RNA, 19 nt, Artificial Sequence
  Description of Artificial Sequence: Synthetic oligonucleotide
agaacuucaauaacgcgag

SEQ ID NO: 1068866 - RNA, 19 nt, Artificial Sequence
  Description of Artificial Sequence: Synthetic oligonucleotide
caaugaaucaguaagaguu

SEQ ID NO: 1068867 - RNA, 19 nt, Artificial Sequence
  Description of Artificial Sequence: Synthetic oligonucleotide
auacuucgaagauuugauc

SEQ ID NO: 1068868 - RNA, 19 nt, Artificial Sequence
  Description of Artificial Sequence: Synthetic oligonucleotide
auaauccaaggguugacca

SEQ ID NO: 1068869 - RNA, 19 nt, Artificial Sequence
  Description of Artificial Sequence: Synthetic oligonucleotide
gaauucguuuugcugacac

SEQ ID NO: 1068870 - RNA, 19 nt, Artificial Sequence
  Description of Artificial Sequence: Synthetic oligonucleotide
ucguuuugcugacacacca

SEQ ID NO: 1068871 - RNA, 19 nt, Artificial Sequence
  Description of Artificial Sequence: Synthetic oligonucleotide
agauuaugaaugacaaagg

SEQ ID NO: 1068872 - RNA, 19 nt, Artificial Sequence
  Description of Artificial Sequence: Synthetic oligonucleotide
ugggcauuaaaugugugca

SEQ ID NO: 1068873 - RNA, 19 nt, Artificial Sequence
  Description of Artificial Sequence: Synthetic oligonucleotide
uauaagauuuaaugaccac

SEQ ID NO: 1068874 - RNA, 19 nt, Artificial Sequence
  Description of Artificial Sequence: Synthetic oligonucleotide
uuccugauaggccaacucu

SEQ ID NO: 1068875 - RNA, 19 nt, Artificial Sequence
  Description of Artificial Sequence: Synthetic oligonucleotide
ucucugccaauccuuagug

SEQ ID NO: 1068876 - RNA, 19 nt, Artificial Sequence
  Description of Artificial Sequence: Synthetic oligonucleotide
aacaaaagcgggccgccug

SEQ ID NO: 1068877 - RNA, 19 nt, Artificial Sequence
  Description of Artificial Sequence: Synthetic oligonucleotide
acuucaauaacgcgaggcu

SEQ ID NO: 1068878 - RNA, 19 nt, Artificial Sequence
  Description of Artificial Sequence: Synthetic oligonucleotide
aauccacgcuuggugaccc

SEQ ID NO: 1068879 - RNA, 19 nt, Artificial Sequence
  Description of Artificial Sequence: Synthetic oligonucleotide
ucuccggaaauuuucagua

SEQ ID NO: 1068880 - RNA, 19 nt, Artificial Sequence
  Description of Artificial Sequence: Synthetic oligonucleotide
uuaguggaguuagaggaag

SEQ ID NO: 1068881 - RNA, 19 nt, Artificial Sequence
  Description of Artificial Sequence: Synthetic oligonucleotide
aaggguugaccacugucug

SEQ ID NO: 1068882 - RNA, 19 nt, Artificial Sequence
  Description of Artificial Sequence: Synthetic oligonucleotide
ugugauauccguggcugcg

SEQ ID NO: 1068883 - RNA, 19 nt, Artificial Sequence
  Description of Artificial Sequence: Synthetic oligonucleotide
ugcgugggcauuaaaugug

SEQ ID NO: 1068884 - RNA, 19 nt, Artificial Sequence
  Description of Artificial Sequence: Synthetic oligonucleotide
ugugcacaaaugaaucaac

SEQ ID NO: 1068885 - RNA, 19 nt, Artificial Sequence
  Description of Artificial Sequence: Synthetic oligonucleotide
gauaauccaaggguugacc

SEQ ID NO: 1068886 - RNA, 19 nt, Artificial Sequence
  Description of Artificial Sequence: Synthetic oligonucleotide
acaaugaaucaguaagagu

SEQ ID NO: 1068887 - RNA, 19 nt, Artificial Sequence
  Description of Artificial Sequence: Synthetic oligonucleotide
aaaugccaaagccugugau

SEQ ID NO: 1068888 - RNA, 19 nt, Artificial Sequence
  Description of Artificial Sequence: Synthetic oligonucleotide
aaucaacucagugcaaaga

SEQ ID NO: 1068889 - RNA, 19 nt, Artificial Sequence
  Description of Artificial Sequence: Synthetic oligonucleotide
aauccaaggguugaccacu

SEQ ID NO: 1068890 - RNA, 19 nt, Artificial Sequence
  Description of Artificial Sequence: Synthetic oligonucleotide
augacgcaggaguccaucc

SEQ ID NO: 1068891 - RNA, 19 nt, Artificial Sequence
  Description of Artificial Sequence: Synthetic oligonucleotide
gagaguguccuaaaaugcc

SEQ ID NO: 1068892 - RNA, 19 nt, Artificial Sequence
  Description of Artificial Sequence: Synthetic oligonucleotide
agcggauguuccuuggagg

SEQ ID NO: 1068893 - RNA, 19 nt, Artificial Sequence
  Description of Artificial Sequence: Synthetic oligonucleotide
acaauccacgcuuggugac

SEQ ID NO: 1068894 - RNA, 19 nt, Artificial Sequence
  Description of Artificial Sequence: Synthetic oligonucleotide
ucgaacggccgguaguugg

SEQ ID NO: 1068895 - RNA, 19 nt, Artificial Sequence
  Description of Artificial Sequence: Synthetic oligonucleotide
gcgaauuugacaaugaauc

SEQ ID NO: 1068896 - RNA, 19 nt, Artificial Sequence
  Description of Artificial Sequence: Synthetic oligonucleotide
uggcguagaggucacugag

SEQ ID NO: 1068897 - RNA, 19 nt, Artificial Sequence
  Description of Artificial Sequence: Synthetic oligonucleotide
ucgggcauuaugaauucgu

SEQ ID NO: 1068898 - RNA, 19 nt, Artificial Sequence
  Description of Artificial Sequence: Synthetic oligonucleotide
auauauugguccaaacucu

SEQ ID NO: 1068899 - RNA, 19 nt, Artificial Sequence
  Description of Artificial Sequence: Synthetic oligonucleotide
guccagaauaggaaaagag

SEQ ID NO: 1068900 - RNA, 19 nt, Artificial Sequence
  Description of Artificial Sequence: Synthetic oligonucleotide
uauuuagauguaagaaauu

SEQ ID NO: 1068901 - RNA, 19 nt, Artificial Sequence
  Description of Artificial Sequence: Synthetic oligonucleotide
guuugguuaacaccagcac

SEQ ID NO: 1068902 - RNA, 19 nt, Artificial Sequence
  Description of Artificial Sequence: Synthetic oligonucleotide
uuucuccggauuauccagc

SEQ ID NO: 1068903 - RNA, 19 nt, Artificial Sequence
  Description of Artificial Sequence: Synthetic oligonucleotide
aaaagcgggccgccuguuc

SEQ ID NO: 1068904 - RNA, 19 nt, Artificial Sequence
  Description of Artificial Sequence: Synthetic oligonucleotide
gugggcauuaaaugugugc

SEQ ID NO: 1068905 - RNA, 19 nt, Artificial Sequence
  Description of Artificial Sequence: Synthetic oligonucleotide
ugguccaaacucuaauuuc

SEQ ID NO: 1068906 - RNA, 19 nt, Artificial Sequence
  Description of Artificial Sequence: Synthetic oligonucleotide
uccggaaauuuucaguaua

SEQ ID NO: 1068907 - RNA, 19 nt, Artificial Sequence
  Description of Artificial Sequence: Synthetic oligonucleotide
cuccggauuauccagccac

SEQ ID NO: 1068908 - RNA, 19 nt, Artificial Sequence
  Description of Artificial Sequence: Synthetic oligonucleotide
acaaugccaacaauccacg

SEQ ID NO: 1068909 - RNA, 19 nt, Artificial Sequence
  Description of Artificial Sequence: Synthetic oligonucleotide
aacgcgaggcuugucaaug

SEQ ID NO: 1068910 - RNA, 19 nt, Artificial Sequence
  Description of Artificial Sequence: Synthetic oligonucleotide
aucuccggaaauuuucagu

SEQ ID NO: 1068911 - RNA, 19 nt, Artificial Sequence
  Description of Artificial Sequence: Synthetic oligonucleotide
ucgaagauuugaucucuga

SEQ ID NO: 1068912 - RNA, 19 nt, Artificial Sequence
  Description of Artificial Sequence: Synthetic oligonucleotide
aagucccuuuuauuuauuu

SEQ ID NO: 1068913 - RNA, 19 nt, Artificial Sequence
  Description of Artificial Sequence: Synthetic oligonucleotide
aucaugagcgguguuaccu

SEQ ID NO: 1068914 - RNA, 19 nt, Artificial Sequence
  Description of Artificial Sequence: Synthetic oligonucleotide
ugaacauagcuuccugaua

SEQ ID NO: 1068915 - RNA, 19 nt, Artificial Sequence
  Description of Artificial Sequence: Synthetic oligonucleotide
aagagacgucauuaacaga

SEQ ID NO: 1068916 - RNA, 19 nt, Artificial Sequence
  Description of Artificial Sequence: Synthetic oligonucleotide
uucgaagauuugaucucug

SEQ ID NO: 1068917 - RNA, 19 nt, Artificial Sequence
  Description of Artificial Sequence: Synthetic oligonucleotide
guagcaucaacauguuguc

SEQ ID NO: 1068918 - RNA, 19 nt, Artificial Sequence
  Description of Artificial Sequence: Synthetic oligonucleotide
auguaaucuuaauaaucau

SEQ ID NO: 1068919 - RNA, 19 nt, Artificial Sequence
  Description of Artificial Sequence: Synthetic oligonucleotide
uucagcggauguuccuugg

SEQ ID NO: 1068920 - RNA, 19 nt, Artificial Sequence
  Description of Artificial Sequence: Synthetic oligonucleotide
ccuuaguggaguuagagga

SEQ ID NO: 1068921 - RNA, 19 nt, Artificial Sequence
  Description of Artificial Sequence: Synthetic oligonucleotide
augccaacaauccacgcuu

SEQ ID NO: 1068922 - RNA, 19 nt, Artificial Sequence
  Description of Artificial Sequence: Synthetic oligonucleotide
uucuccggauuauccagcc

SEQ ID NO: 1068923 - RNA, 19 nt, Artificial Sequence
  Description of Artificial Sequence: Synthetic oligonucleotide
uccugauaggccaacucua

SEQ ID NO: 1068924 - RNA, 19 nt, Artificial Sequence
  Description of Artificial Sequence: Synthetic oligonucleotide
uuucagcggauguuccuug

SEQ ID NO: 1068925 - RNA, 19 nt, Artificial Sequence
  Description of Artificial Sequence: Synthetic oligonucleotide
accccaccgaugauaaucc

SEQ ID NO: 1068926 - RNA, 19 nt, Artificial Sequence
  Description of Artificial Sequence: Synthetic oligonucleotide
uagcgaauuugacaaugaa

SEQ ID NO: 1068927 - RNA, 19 nt, Artificial Sequence
  Description of Artificial Sequence: Synthetic oligonucleotide
agcacaucuccuaccaccg

SEQ ID NO: 1068928 - RNA, 19 nt, Artificial Sequence
  Description of Artificial Sequence: Synthetic oligonucleotide
ugaacaaaagcgggccgcc

SEQ ID NO: 1068929 - RNA, 19 nt, Artificial Sequence
  Description of Artificial Sequence: Synthetic oligonucleotide
gauuauccagccacuggug

SEQ ID NO: 1068930 - RNA, 19 nt, Artificial Sequence
  Description of Artificial Sequence: Synthetic oligonucleotide
cugaacaaaagcgggccgc

SEQ ID NO: 1068931 - RNA, 19 nt, Artificial Sequence
  Description of Artificial Sequence: Synthetic oligonucleotide
gaacuucaauaacgcgagg

SEQ ID NO: 1068932 - RNA, 19 nt, Artificial Sequence
  Description of Artificial Sequence: Synthetic oligonucleotide
uuggccgcaaccuggguuc

SEQ ID NO: 1068933 - RNA, 19 nt, Artificial Sequence
  Description of Artificial Sequence: Synthetic oligonucleotide
cucugccaauccuuagugg

SEQ ID NO: 1068934 - RNA, 19 nt, Artificial Sequence
  Description of Artificial Sequence: Synthetic oligonucleotide
augaaucaguaagaguucu

SEQ ID NO: 1068935 - RNA, 19 nt, Artificial Sequence
  Description of Artificial Sequence: Synthetic oligonucleotide
ugccggagaagcucgucag

SEQ ID NO: 1068936 - RNA, 19 nt, Artificial Sequence
  Description of Artificial Sequence: Synthetic oligonucleotide
ucgucagccgccagcucgg

SEQ ID NO: 1068937 - RNA, 19 nt, Artificial Sequence
  Description of Artificial Sequence: Synthetic oligonucleotide
uugaucaugagcgguguua

SEQ ID NO: 1068938 - RNA, 19 nt, Artificial Sequence
  Description of Artificial Sequence: Synthetic oligonucleotide
aagaggugguuugucagaa

SEQ ID NO: 1068939 - RNA, 19 nt, Artificial Sequence
  Description of Artificial Sequence: Synthetic oligonucleotide
agcgacaggccgccgugcc

SEQ ID NO: 1068940 - RNA, 19 nt, Artificial Sequence
  Description of Artificial Sequence: Synthetic oligonucleotide
cugccaauccuuaguggag

SEQ ID NO: 1068941 - RNA, 19 nt, Artificial Sequence
  Description of Artificial Sequence: Synthetic oligonucleotide
ugcucaauucuuguccaga

SEQ ID NO: 1068942 - RNA, 19 nt, Artificial Sequence
  Description of Artificial Sequence: Synthetic oligonucleotide
ggaagagacgucauuaaca

SEQ ID NO: 1068943 - RNA, 19 nt, Artificial Sequence
  Description of Artificial Sequence: Synthetic oligonucleotide
uaguggaguuagaggaaga

SEQ ID NO: 1068944 - RNA, 19 nt, Artificial Sequence
  Description of Artificial Sequence: Synthetic oligonucleotide
gcugcgugggcauuaaaug

SEQ ID NO: 1068945 - RNA, 19 nt, Artificial Sequence
  Description of Artificial Sequence: Synthetic oligonucleotide
agcgaauuugacaaugaau

SEQ ID NO: 1068946 - RNA, 19 nt, Artificial Sequence
  Description of Artificial Sequence: Synthetic oligonucleotide
uacucccugugcacaaaug

SEQ ID NO: 1068947 - RNA, 19 nt, Artificial Sequence
  Description of Artificial Sequence: Synthetic oligonucleotide
uuuccuaacgaagucccuu

SEQ ID NO: 1068948 - RNA, 19 nt, Artificial Sequence
  Description of Artificial Sequence: Synthetic oligonucleotide
accuggaaggcacuacgca

SEQ ID NO: 1068949 - RNA, 19 nt, Artificial Sequence
  Description of Artificial Sequence: Synthetic oligonucleotide
auaacgcgaggcuugucaa

SEQ ID NO: 1068950 - RNA, 19 nt, Artificial Sequence
  Description of Artificial Sequence: Synthetic oligonucleotide
uugcucaauucuuguccag

SEQ ID NO: 1068951 - RNA, 19 nt, Artificial Sequence
  Description of Artificial Sequence: Synthetic oligonucleotide
acaaaagcgggccgccugu

SEQ ID NO: 1068952 - RNA, 19 nt, Artificial Sequence
  Description of Artificial Sequence: Synthetic oligonucleotide
caauuuagacaucaauaua

SEQ ID NO: 1068953 - RNA, 19 nt, Artificial Sequence
  Description of Artificial Sequence: Synthetic oligonucleotide
uccgguuucccuucuccac

SEQ ID NO: 1068954 - RNA, 19 nt, Artificial Sequence
  Description of Artificial Sequence: Synthetic oligonucleotide
augaaugacaaaggacacu

SEQ ID NO: 1068955 - RNA, 19 nt, Artificial Sequence
  Description of Artificial Sequence: Synthetic oligonucleotide
uaucgggcauuaugaauuc

SEQ ID NO: 1068956 - RNA, 19 nt, Artificial Sequence
  Description of Artificial Sequence: Synthetic oligonucleotide
cuaccaccgcgcuaucggg

SEQ ID NO: 1068957 - RNA, 19 nt, Artificial Sequence
  Description of Artificial Sequence: Synthetic oligonucleotide
ucagcggauguuccuugga

SEQ ID NO: 1068958 - RNA, 19 nt, Artificial Sequence
  Description of Artificial Sequence: Synthetic oligonucleotide
uaccucuucucuggaaacc

SEQ ID NO: 1068959 - RNA, 19 nt, Artificial Sequence
  Description of Artificial Sequence: Synthetic oligonucleotide
acgaagucccuuuuauuua

SEQ ID NO: 1068960 - RNA, 19 nt, Artificial Sequence
  Description of Artificial Sequence: Synthetic oligonucleotide
cuuccugauaggccaacuc

SEQ ID NO: 1068961 - RNA, 19 nt, Artificial Sequence
  Description of Artificial Sequence: Synthetic oligonucleotide
gacgcaggaguccauccca

SEQ ID NO: 1068962 - RNA, 19 nt, Artificial Sequence
  Description of Artificial Sequence: Synthetic oligonucleotide
cauacuucgaagauuugau

SEQ ID NO: 1068963 - RNA, 19 nt, Artificial Sequence
  Description of Artificial Sequence: Synthetic oligonucleotide
cuaucgggcauuaugaauu

SEQ ID NO: 1068964 - RNA, 19 nt, Artificial Sequence
  Description of Artificial Sequence: Synthetic oligonucleotide
uccggauuauccagccacu

SEQ ID NO: 1068965 - RNA, 19 nt, Artificial Sequence
  Description of Artificial Sequence: Synthetic oligonucleotide
ugcgccccaucauguaggg

SEQ ID NO: 1068966 - RNA, 19 nt, Artificial Sequence
  Description of Artificial Sequence: Synthetic oligonucleotide
uaacgaagucccuuuuauu

SEQ ID NO: 1068967 - RNA, 19 nt, Artificial Sequence
  Description of Artificial Sequence: Synthetic oligonucleotide
ucaauaacgcgaggcuugu

SEQ ID NO: 1068968 - RNA, 19 nt, Artificial Sequence
  Description of Artificial Sequence: Synthetic oligonucleotide
uuccuaacgaagucccuuu

SEQ ID NO: 1068969 - RNA, 19 nt, Artificial Sequence
  Description of Artificial Sequence: Synthetic oligonucleotide
uuggcagauuaugaaugac

SEQ ID NO: 1068970 - RNA, 19 nt, Artificial Sequence
  Description of Artificial Sequence: Synthetic oligonucleotide
uaauagcgaauuugacaau

SEQ ID NO: 1068971 - RNA, 19 nt, Artificial Sequence
  Description of Artificial Sequence: Synthetic oligonucleotide
aaagcgcccacuggcuuug

SEQ ID NO: 1068972 - RNA, 19 nt, Artificial Sequence
  Description of Artificial Sequence: Synthetic oligonucleotide
cagcggauguuccuuggag

SEQ ID NO: 1068973 - RNA, 19 nt, Artificial Sequence
  Description of Artificial Sequence: Synthetic oligonucleotide
uccauacuucgaagauuug

SEQ ID NO: 1068974 - RNA, 19 nt, Artificial Sequence
  Description of Artificial Sequence: Synthetic oligonucleotide
uaccaccgcgcuaucgggc

SEQ ID NO: 1068975 - RNA, 19 nt, Artificial Sequence
  Description of Artificial Sequence: Synthetic oligonucleotide
ugccaacaauccacgcuug

SEQ ID NO: 1068976 - RNA, 19 nt, Artificial Sequence
  Description of Artificial Sequence: Synthetic oligonucleotide
ucuguuuagaguggccaua

SEQ ID NO: 1068977 - RNA, 19 nt, Artificial Sequence
  Description of Artificial Sequence: Synthetic oligonucleotide
augccggagaagcucguca

SEQ ID NO: 1068978 - RNA, 19 nt, Artificial Sequence
  Description of Artificial Sequence: Synthetic oligonucleotide
ugccaauccuuaguggagu

SEQ ID NO: 1068979 - RNA, 19 nt, Artificial Sequence
  Description of Artificial Sequence: Synthetic oligonucleotide
ugaguagcaucaacauguu

SEQ ID NO: 1068980 - RNA, 19 nt, Artificial Sequence
  Description of Artificial Sequence: Synthetic oligonucleotide
aguguccuaaaaugccaaa

SEQ ID NO: 1068981 - RNA, 19 nt, Artificial Sequence
  Description of Artificial Sequence: Synthetic oligonucleotide
uguucucuuggcagacaaa

SEQ ID NO: 1068982 - RNA, 19 nt, Artificial Sequence
  Description of Artificial Sequence: Synthetic oligonucleotide
auggcguagaggucacuga

SEQ ID NO: 1068983 - RNA, 19 nt, Artificial Sequence
  Description of Artificial Sequence: Synthetic oligonucleotide
cuuaguggaguuagaggaa

SEQ ID NO: 1068984 - RNA, 19 nt, Artificial Sequence
  Description of Artificial Sequence: Synthetic oligonucleotide
aucccaaugcucagcgagg

SEQ ID NO: 1068985 - RNA, 19 nt, Artificial Sequence
  Description of Artificial Sequence: Synthetic oligonucleotide
caugagcgguguuaccuuc

SEQ ID NO: 1068986 - RNA, 19 nt, Artificial Sequence
  Description of Artificial Sequence: Synthetic oligonucleotide
ggcuugucaaugauucggg

SEQ ID NO: 1068987 - RNA, 19 nt, Artificial Sequence
  Description of Artificial Sequence: Synthetic oligonucleotide
gguuugguuaacaccagca

SEQ ID NO: 1068988 - RNA, 19 nt, Artificial Sequence
  Description of Artificial Sequence: Synthetic oligonucleotide
accuuugaucaugagcggu

SEQ ID NO: 1068989 - RNA, 19 nt, Artificial Sequence
  Description of Artificial Sequence: Synthetic oligonucleotide
uucuaacaauuuagacauc

SEQ ID NO: 1068990 - RNA, 19 nt, Artificial Sequence
  Description of Artificial Sequence: Synthetic oligonucleotide
uggccauauugaacauagc

SEQ ID NO: 1068991 - RNA, 19 nt, Artificial Sequence
  Description of Artificial Sequence: Synthetic oligonucleotide
uccuaccaccgcgcuaucg

SEQ ID NO: 1068992 - RNA, 19 nt, Artificial Sequence
  Description of Artificial Sequence: Synthetic oligonucleotide
agcaucgcgaaaaccuuug

SEQ ID NO: 1068993 - RNA, 19 nt, Artificial Sequence
  Description of Artificial Sequence: Synthetic oligonucleotide
uuugaucaugagcgguguu

SEQ ID NO: 1068994 - RNA, 19 nt, Artificial Sequence
  Description of Artificial Sequence: Synthetic oligonucleotide
ggcagauuaugaaugacaa

SEQ ID NO: 1068995 - RNA, 19 nt, Artificial Sequence
  Description of Artificial Sequence: Synthetic oligonucleotide
caguucuguuuagaguggc

SEQ ID NO: 1068996 - RNA, 19 nt, Artificial Sequence
  Description of Artificial Sequence: Synthetic oligonucleotide
ggucuuaaaaucaaccccu

SEQ ID NO: 1068997 - RNA, 19 nt, Artificial Sequence
  Description of Artificial Sequence: Synthetic oligonucleotide
ucggcagcaucgcgaaaac

SEQ ID NO: 1068998 - RNA, 19 nt, Artificial Sequence
  Description of Artificial Sequence: Synthetic oligonucleotide
ggaguuugagcagagucuc

SEQ ID NO: 1068999 - RNA, 19 nt, Artificial Sequence
  Description of Artificial Sequence: Synthetic oligonucleotide
aggguugaccacugucugu

SEQ ID NO: 1069000 - RNA, 19 nt, Artificial Sequence
  Description of Artificial Sequence: Synthetic oligonucleotide
augugugcaucaggccagc

SEQ ID NO: 1069001 - RNA, 19 nt, Artificial Sequence
  Description of Artificial Sequence: Synthetic oligonucleotide
aucgggcauuaugaauucg

SEQ ID NO: 1069002 - RNA, 19 nt, Artificial Sequence
  Description of Artificial Sequence: Synthetic oligonucleotide
gggucuggggcucgaacgg

SEQ ID NO: 1069003 - RNA, 19 nt, Artificial Sequence
  Description of Artificial Sequence: Synthetic oligonucleotide
gcgguguuaccuucucucg

SEQ ID NO: 1069004 - RNA, 19 nt, Artificial Sequence
  Description of Artificial Sequence: Synthetic oligonucleotide
cuccauacuucgaagauuu

SEQ ID NO: 1069005 - RNA, 19 nt, Artificial Sequence
  Description of Artificial Sequence: Synthetic oligonucleotide
gcgaaaaccuuugaucaug

SEQ ID NO: 1069006 - RNA, 19 nt, Artificial Sequence
  Description of Artificial Sequence: Synthetic oligonucleotide
accaccgcgcuaucgggca

SEQ ID NO: 1069007 - RNA, 19 nt, Artificial Sequence
  Description of Artificial Sequence: Synthetic oligonucleotide
uccucggcagcaucgcgaa

SEQ ID NO: 1069008 - RNA, 19 nt, Artificial Sequence
  Description of Artificial Sequence: Synthetic oligonucleotide
cuaacgaagucccuuuuau

SEQ ID NO: 1069009 - RNA, 19 nt, Artificial Sequence
  Description of Artificial Sequence: Synthetic oligonucleotide
auuugacaaugaaucagua

SEQ ID NO: 1069010 - RNA, 19 nt, Artificial Sequence
  Description of Artificial Sequence: Synthetic oligonucleotide
cuacgcagggagccuuugc

SEQ ID NO: 1069011 - RNA, 19 nt, Artificial Sequence
  Description of Artificial Sequence: Synthetic oligonucleotide
aguggcaaccccaccgaug

SEQ ID NO: 1069012 - RNA, 19 nt, Artificial Sequence
  Description of Artificial Sequence: Synthetic oligonucleotide
cugugcacaaaugaaucaa

SEQ ID NO: 1069013 - RNA, 19 nt, Artificial Sequence
  Description of Artificial Sequence: Synthetic oligonucleotide
uccuaacgaagucccuuuu

SEQ ID NO: 1069014 - RNA, 19 nt, Artificial Sequence
  Description of Artificial Sequence: Synthetic oligonucleotide
uggguuccuaaggguuugg

SEQ ID NO: 1069015 - RNA, 19 nt, Artificial Sequence
  Description of Artificial Sequence: Synthetic oligonucleotide
gaguguccuaaaaugccaa

SEQ ID NO: 1069016 - RNA, 19 nt, Artificial Sequence
  Description of Artificial Sequence: Synthetic oligonucleotide
uauccguggcugcgugggc

SEQ ID NO: 1069017 - RNA, 19 nt, Artificial Sequence
  Description of Artificial Sequence: Synthetic oligonucleotide
uaacgcgaggcuugucaau

SEQ ID NO: 1069018 - RNA, 19 nt, Artificial Sequence
  Description of Artificial Sequence: Synthetic oligonucleotide
gaagcucgucagccgccag

SEQ ID NO: 1069019 - RNA, 19 nt, Artificial Sequence
  Description of Artificial Sequence: Synthetic oligonucleotide
auauugguccaaacucuaa

SEQ ID NO: 1069020 - RNA, 19 nt, Artificial Sequence
  Description of Artificial Sequence: Synthetic oligonucleotide
gcggauguuccuuggagga

SEQ ID NO: 1069021 - RNA, 19 nt, Artificial Sequence
  Description of Artificial Sequence: Synthetic oligonucleotide
gaacggccgguaguuggag

SEQ ID NO: 1069022 - RNA, 19 nt, Artificial Sequence
  Description of Artificial Sequence: Synthetic oligonucleotide
cugcgugggcauuaaaugu

SEQ ID NO: 1069023 - RNA, 19 nt, Artificial Sequence
  Description of Artificial Sequence: Synthetic oligonucleotide
acgcagggagccuuugcaa

SEQ ID NO: 1069024 - RNA, 19 nt, Artificial Sequence
  Description of Artificial Sequence: Synthetic oligonucleotide
cuaaaucuccggaaauuuu

SEQ ID NO: 1069025 - RNA, 19 nt, Artificial Sequence
  Description of Artificial Sequence: Synthetic oligonucleotide
cuggguuccuaaggguuug

SEQ ID NO: 1069026 - RNA, 19 nt, Artificial Sequence
  Description of Artificial Sequence: Synthetic oligonucleotide
agaagcucgucagccgcca

SEQ ID NO: 1069027 - RNA, 19 nt, Artificial Sequence
  Description of Artificial Sequence: Synthetic oligonucleotide
cuccucggcagcaucgcga

SEQ ID NO: 1069028 - RNA, 19 nt, Artificial Sequence
  Description of Artificial Sequence: Synthetic oligonucleotide
ucagcccuucaugccggag

SEQ ID NO: 1069029 - RNA, 19 nt, Artificial Sequence
  Description of Artificial Sequence: Synthetic oligonucleotide
ccgaugauaauccaagggu

SEQ ID NO: 1069030 - RNA, 19 nt, Artificial Sequence
  Description of Artificial Sequence: Synthetic oligonucleotide
ggguugaccacugucuguc

SEQ ID NO: 1069031 - RNA, 19 nt, Artificial Sequence
  Description of Artificial Sequence: Synthetic oligonucleotide
acgcgaggcuugucaauga

SEQ ID NO: 1069032 - RNA, 19 nt, Artificial Sequence
  Description of Artificial Sequence: Synthetic oligonucleotide
cuuuccuaguuggacaagu

SEQ ID NO: 1069033 - RNA, 19 nt, Artificial Sequence
  Description of Artificial Sequence: Synthetic oligonucleotide
ccgagguagaacuucaaua

SEQ ID NO: 1069034 - RNA, 19 nt, Artificial Sequence
  Description of Artificial Sequence: Synthetic oligonucleotide
cuucgaagauuugaucucu

SEQ ID NO: 1069035 - RNA, 19 nt, Artificial Sequence
  Description of Artificial Sequence: Synthetic oligonucleotide
caguaagaguucuaacaau

SEQ ID NO: 1069036 - RNA, 19 nt, Artificial Sequence
  Description of Artificial Sequence: Synthetic oligonucleotide
uccacgcuuggugacccuc

SEQ ID NO: 1069037 - RNA, 19 nt, Artificial Sequence
  Description of Artificial Sequence: Synthetic oligonucleotide
gcgucagucccuccaggag

SEQ ID NO: 1069038 - RNA, 19 nt, Artificial Sequence
  Description of Artificial Sequence: Synthetic oligonucleotide
acuacgcagggagccuuug

SEQ ID NO: 1069039 - RNA, 19 nt, Artificial Sequence
  Description of Artificial Sequence: Synthetic oligonucleotide
auccguggcugcgugggca

SEQ ID NO: 1069040 - RNA, 19 nt, Artificial Sequence
  Description of Artificial Sequence: Synthetic oligonucleotide
cuccccgagguagaacuuc

SEQ ID NO: 1069041 - RNA, 19 nt, Artificial Sequence
  Description of Artificial Sequence: Synthetic oligonucleotide
ccaaugcucagcgagggca

SEQ ID NO: 1069042 - RNA, 19 nt, Artificial Sequence
  Description of Artificial Sequence: Synthetic oligonucleotide
aggcuaugcgccccaucau

SEQ ID NO: 1069043 - RNA, 19 nt, Artificial Sequence
  Description of Artificial Sequence: Synthetic oligonucleotide
augagcgguguuaccuucu

SEQ ID NO: 1069044 - RNA, 19 nt, Artificial Sequence
  Description of Artificial Sequence: Synthetic oligonucleotide
uccguggcugcgugggcau

SEQ ID NO: 1069045 - RNA, 19 nt, Artificial Sequence
  Description of Artificial Sequence: Synthetic oligonucleotide
aagcgcccacuggcuuugc

SEQ ID NO: 1069046 - RNA, 19 nt, Artificial Sequence
  Description of Artificial Sequence: Synthetic oligonucleotide
agacccgaggcgagcgggg

SEQ ID NO: 1069047 - RNA, 19 nt, Artificial Sequence
  Description of Artificial Sequence: Synthetic oligonucleotide
cgcgcuaucgggcauuaug

SEQ ID NO: 1069048 - RNA, 19 nt, Artificial Sequence
  Description of Artificial Sequence: Synthetic oligonucleotide
ccggaaauuuucaguauaa

SEQ ID NO: 1069049 - RNA, 19 nt, Artificial Sequence
  Description of Artificial Sequence: Synthetic oligonucleotide
gcgcuaucgggcauuauga

SEQ ID NO: 1069050 - RNA, 19 nt, Artificial Sequence
  Description of Artificial Sequence: Synthetic oligonucleotide
aucuccuaccaccgcgcua

SEQ ID NO: 1069051 - RNA, 19 nt, Artificial Sequence
  Description of Artificial Sequence: Synthetic oligonucleotide
cugucaccgccgugccucc

SEQ ID NO: 1069052 - RNA, 19 nt, Artificial Sequence
  Description of Artificial Sequence: Synthetic oligonucleotide
ggcuccccgagguagaacu

SEQ ID NO: 1069053 - RNA, 19 nt, Artificial Sequence
  Description of Artificial Sequence: Synthetic oligonucleotide
caucgcgaaaaccuuugau

SEQ ID NO: 1069054 - RNA, 19 nt, Artificial Sequence
  Description of Artificial Sequence: Synthetic oligonucleotide
cuuugaucaugagcggugu

SEQ ID NO: 1069055 - RNA, 19 nt, Artificial Sequence
  Description of Artificial Sequence: Synthetic oligonucleotide
gccauauugaacauagcuu

SEQ ID NO: 1069056 - RNA, 19 nt, Artificial Sequence
  Description of Artificial Sequence: Synthetic oligonucleotide
cacgcuuggugacccucuc

SEQ ID NO: 1069057 - RNA, 19 nt, Artificial Sequence
  Description of Artificial Sequence: Synthetic oligonucleotide
uggggcucgaacggccggu

SEQ ID NO: 1069058 - RNA, 19 nt, Artificial Sequence
  Description of Artificial Sequence: Synthetic oligonucleotide
cuucaauaacgcgaggcuu

SEQ ID NO: 1069059 - RNA, 19 nt, Artificial Sequence
  Description of Artificial Sequence: Synthetic oligonucleotide
gggaccuugcagccucagc

SEQ ID NO: 1069060 - RNA, 19 nt, Artificial Sequence
  Description of Artificial Sequence: Synthetic oligonucleotide
gucagccgccagcucgggc

SEQ ID NO: 1069061 - RNA, 19 nt, Artificial Sequence
  Description of Artificial Sequence: Synthetic oligonucleotide
gcuaucgggcauuaugaau

SEQ ID NO: 1069062 - RNA, 19 nt, Artificial Sequence
  Description of Artificial Sequence: Synthetic oligonucleotide
cguuuugcugacacaccac

SEQ ID NO: 1069063 - RNA, 19 nt, Artificial Sequence
  Description of Artificial Sequence: Synthetic oligonucleotide
ggggaaugacgcaggaguc

SEQ ID NO: 1069064 - RNA, 19 nt, Artificial Sequence
  Description of Artificial Sequence: Synthetic oligonucleotide
cagagguuucagcggaugu

SEQ ID NO: 1069065 - RNA, 19 nt, Artificial Sequence
  Description of Artificial Sequence: Synthetic oligonucleotide
cucgaacggccgguaguug

SEQ ID NO: 1069066 - RNA, 19 nt, Artificial Sequence
  Description of Artificial Sequence: Synthetic oligonucleotide
cgguguuaccuucucucgc

SEQ ID NO: 1069067 - RNA, 19 nt, Artificial Sequence
  Description of Artificial Sequence: Synthetic oligonucleotide
gggccgccuguucucuugg

SEQ ID NO: 1069068 - RNA, 19 nt, Artificial Sequence
  Description of Artificial Sequence: Synthetic oligonucleotide
cuaugcgccccaucaugua

SEQ ID NO: 1069069 - RNA, 19 nt, Artificial Sequence
  Description of Artificial Sequence: Synthetic oligonucleotide
guuucagcggauguuccuu

SEQ ID NO: 1069070 - RNA, 19 nt, Artificial Sequence
  Description of Artificial Sequence: Synthetic oligonucleotide
gaacaaaagcgggccgccu

SEQ ID NO: 1069071 - RNA, 19 nt, Artificial Sequence
  Description of Artificial Sequence: Synthetic oligonucleotide
gagcgguguuaccuucucu

SEQ ID NO: 1069072 - RNA, 19 nt, Artificial Sequence
  Description of Artificial Sequence: Synthetic oligonucleotide
caauaacgcgaggcuuguc

SEQ ID NO: 1069073 - RNA, 19 nt, Artificial Sequence
  Description of Artificial Sequence: Synthetic oligonucleotide
gguuccuaaggguuugguu

SEQ ID NO: 1069074 - RNA, 19 nt, Artificial Sequence
  Description of Artificial Sequence: Synthetic oligonucleotide
gccgcgucagucccuccag

SEQ ID NO: 1069075 - RNA, 19 nt, Artificial Sequence
  Description of Artificial Sequence: Synthetic oligonucleotide
uggcugcgugggcauuaaa

SEQ ID NO: 1069076 - RNA, 19 nt, Artificial Sequence
  Description of Artificial Sequence: Synthetic oligonucleotide
auccacgcuuggugacccu

SEQ ID NO: 1069077 - RNA, 19 nt, Artificial Sequence
  Description of Artificial Sequence: Synthetic oligonucleotide
cccgaccagacccgaggcg

SEQ ID NO: 1069078 - RNA, 19 nt, Artificial Sequence
  Description of Artificial Sequence: Synthetic oligonucleotide
cuccggaaauuuucaguau

SEQ ID NO: 1069079 - RNA, 19 nt, Artificial Sequence
  Description of Artificial Sequence: Synthetic oligonucleotide
gcaucgcgaaaaccuuuga

SEQ ID NO: 1069080 - RNA, 19 nt, Artificial Sequence
  Description of Artificial Sequence: Synthetic oligonucleotide
uggcaaccccaccgaugau

SEQ ID NO: 1069081 - RNA, 19 nt, Artificial Sequence
  Description of Artificial Sequence: Synthetic oligonucleotide
ggcaaccccaccgaugaua

SEQ ID NO: 1069082 - RNA, 19 nt, Artificial Sequence
  Description of Artificial Sequence: Synthetic oligonucleotide
cccaccgaugauaauccaa

SEQ ID NO: 1069083 - RNA, 19 nt, Artificial Sequence
  Description of Artificial Sequence: Synthetic oligonucleotide
ugucaccgccgugccuccc

SEQ ID NO: 1069084 - RNA, 19 nt, Artificial Sequence
  Description of Artificial Sequence: Synthetic oligonucleotide
gccgccuguucucuuggca

SEQ ID NO: 1069085 - RNA, 19 nt, Artificial Sequence
  Description of Artificial Sequence: Synthetic oligonucleotide
cagccgccagcucgggcug

SEQ ID NO: 1069086 - RNA, 19 nt, Artificial Sequence
  Description of Artificial Sequence: Synthetic oligonucleotide
ccggauuauccagccacug

SEQ ID NO: 1069087 - RNA, 19 nt, Artificial Sequence
  Description of Artificial Sequence: Synthetic oligonucleotide
cauacucccugugcacaaa

SEQ ID NO: 1069088 - RNA, 19 nt, Artificial Sequence
  Description of Artificial Sequence: Synthetic oligonucleotide
ccuaacgaagucccuuuua

SEQ ID NO: 1069089 - RNA, 19 nt, Artificial Sequence
  Description of Artificial Sequence: Synthetic oligonucleotide
cagcgacaggccgccgugc

SEQ ID NO: 1069090 - RNA, 19 nt, Artificial Sequence
  Description of Artificial Sequence: Synthetic oligonucleotide
caaagcgcccacuggcuuu

SEQ ID NO: 1069091 - RNA, 19 nt, Artificial Sequence
  Description of Artificial Sequence: Synthetic oligonucleotide
ccuaaggguuugguuaaca

SEQ ID NO: 1069092 - RNA, 19 nt, Artificial Sequence
  Description of Artificial Sequence: Synthetic oligonucleotide
ccccgaccagacccgaggc

SEQ ID NO: 1069093 - RNA, 19 nt, Artificial Sequence
  Description of Artificial Sequence: Synthetic oligonucleotide
ccagcgacaggccgccgug

SEQ ID NO: 1069094 - RNA, 19 nt, Artificial Sequence
  Description of Artificial Sequence: Synthetic oligonucleotide
agcgggccgccuguucucu

SEQ ID NO: 1069095 - RNA, 19 nt, Artificial Sequence
  Description of Artificial Sequence: Synthetic oligonucleotide
cgaugauaauccaaggguu

SEQ ID NO: 1069096 - RNA, 19 nt, Artificial Sequence
  Description of Artificial Sequence: Synthetic oligonucleotide
ccuuuccuaguuggacaag

SEQ ID NO: 1069097 - RNA, 19 nt, Artificial Sequence
  Description of Artificial Sequence: Synthetic oligonucleotide
ggcugcgugggcauuaaau

SEQ ID NO: 1069098 - RNA, 19 nt, Artificial Sequence
  Description of Artificial Sequence: Synthetic oligonucleotide
ggugacccucuccauacuu

SEQ ID NO: 1069099 - RNA, 19 nt, Artificial Sequence
  Description of Artificial Sequence: Synthetic oligonucleotide
gucaccgccgugccucccu

SEQ ID NO: 1069100 - RNA, 19 nt, Artificial Sequence
  Description of Artificial Sequence: Synthetic oligonucleotide
caucuccuaccaccgcgcu

SEQ ID NO: 1069101 - RNA, 19 nt, Artificial Sequence
  Description of Artificial Sequence: Synthetic oligonucleotide
gcgccgucucuuccugacc

SEQ ID NO: 1069102 - RNA, 19 nt, Artificial Sequence
  Description of Artificial Sequence: Synthetic oligonucleotide
gcgcgggccgcgucagucc

SEQ ID NO: 1069103 - RNA, 19 nt, Artificial Sequence
  Description of Artificial Sequence: Synthetic oligonucleotide
cgugccucccuccucggca

SEQ ID NO: 1069104 - RNA, 19 nt, Artificial Sequence
  Description of Artificial Sequence: Synthetic oligonucleotide
cuccuaccaccgcgcuauc

SEQ ID NO: 1069105 - RNA, 19 nt, Artificial Sequence
  Description of Artificial Sequence: Synthetic oligonucleotide
cgaagucccuuuuauuuau

SEQ ID NO: 1069106 - RNA, 19 nt, Artificial Sequence
  Description of Artificial Sequence: Synthetic oligonucleotide
accgcgcuaucgggcauua

SEQ ID NO: 1069107 - RNA, 19 nt, Artificial Sequence
  Description of Artificial Sequence: Synthetic oligonucleotide
cgaacggccgguaguugga

SEQ ID NO: 1069108 - RNA, 19 nt, Artificial Sequence
  Description of Artificial Sequence: Synthetic oligonucleotide
guggcugcgugggcauuaa

SEQ ID NO: 1069109 - RNA, 19 nt, Artificial Sequence
  Description of Artificial Sequence: Synthetic oligonucleotide
gcgugggcauuaaaugugu

SEQ ID NO: 1069110 - RNA, 19 nt, Artificial Sequence
  Description of Artificial Sequence: Synthetic oligonucleotide
gcucagcgagggcagggcu

SEQ ID NO: 1069111 - RNA, 19 nt, Artificial Sequence
  Description of Artificial Sequence: Synthetic oligonucleotide
gccggccuaguggccaggc

SEQ ID NO: 1069112 - RNA, 19 nt, Artificial Sequence
  Description of Artificial Sequence: Synthetic oligonucleotide
cgcuaucgggcauuaugaa

SEQ ID NO: 1069113 - RNA, 19 nt, Artificial Sequence
  Description of Artificial Sequence: Synthetic oligonucleotide
cgcgggccgcgucaguccc

SEQ ID NO: 1069114 - RNA, 19 nt, Artificial Sequence
  Description of Artificial Sequence: Synthetic oligonucleotide
ggguuccuaaggguuuggu

SEQ ID NO: 1069115 - RNA, 19 nt, Artificial Sequence
  Description of Artificial Sequence: Synthetic oligonucleotide
caguggcaaccccaccgau

SEQ ID NO: 1069116 - RNA, 19 nt, Artificial Sequence
  Description of Artificial Sequence: Synthetic oligonucleotide
ggcacuacgcagggagccu

SEQ ID NO: 1069117 - RNA, 19 nt, Artificial Sequence
  Description of Artificial Sequence: Synthetic oligonucleotide
cccgagguagaacuucaau

SEQ ID NO: 1069118 - RNA, 19 nt, Artificial Sequence
  Description of Artificial Sequence: Synthetic oligonucleotide
cagcgagggcagggcugag

SEQ ID NO: 1069119 - RNA, 19 nt, Artificial Sequence
  Description of Artificial Sequence: Synthetic oligonucleotide
cacuacgcagggagccuuu

SEQ ID NO: 1069120 - RNA, 19 nt, Artificial Sequence
  Description of Artificial Sequence: Synthetic oligonucleotide
agccgccagcucgggcuga

SEQ ID NO: 1069121 - RNA, 19 nt, Artificial Sequence
  Description of Artificial Sequence: Synthetic oligonucleotide
ccccaccgaugauaaucca

SEQ ID NO: 1069122 - RNA, 19 nt, Artificial Sequence
  Description of Artificial Sequence: Synthetic oligonucleotide
ggccggccuaguggccagg

SEQ ID NO: 1069123 - RNA, 19 nt, Artificial Sequence
  Description of Artificial Sequence: Synthetic oligonucleotide
gccgcaaccuggguuccua

SEQ ID NO: 1069124 - RNA, 19 nt, Artificial Sequence
  Description of Artificial Sequence: Synthetic oligonucleotide
gccgguaguuggagaagcu

SEQ ID NO: 1069125 - RNA, 19 nt, Artificial Sequence
  Description of Artificial Sequence: Synthetic oligonucleotide
ccacgcuuggugacccucu

SEQ ID NO: 1069126 - RNA, 19 nt, Artificial Sequence
  Description of Artificial Sequence: Synthetic oligonucleotide
cggccgguaguuggagaag

SEQ ID NO: 1069127 - RNA, 19 nt, Artificial Sequence
  Description of Artificial Sequence: Synthetic oligonucleotide
caaccccaccgaugauaau

SEQ ID NO: 1069128 - RNA, 19 nt, Artificial Sequence
  Description of Artificial Sequence: Synthetic oligonucleotide
caaaagcgggccgccuguu

SEQ ID NO: 1069129 - RNA, 19 nt, Artificial Sequence
  Description of Artificial Sequence: Synthetic oligonucleotide
cgcgaaaaccuuugaucau

SEQ ID NO: 1069130 - RNA, 19 nt, Artificial Sequence
  Description of Artificial Sequence: Synthetic oligonucleotide
ccgugccucaggggaauga

SEQ ID NO: 1069131 - RNA, 19 nt, Artificial Sequence
  Description of Artificial Sequence: Synthetic oligonucleotide
gggccgcgucagucccucc

SEQ ID NO: 1069132 - RNA, 19 nt, Artificial Sequence
  Description of Artificial Sequence: Synthetic oligonucleotide
ccgcaaccuggguuccuaa

SEQ ID NO: 1069133 - RNA, 19 nt, Artificial Sequence
  Description of Artificial Sequence: Synthetic oligonucleotide
gcacuacgcagggagccuu

SEQ ID NO: 1069134 - RNA, 19 nt, Artificial Sequence
  Description of Artificial Sequence: Synthetic oligonucleotide
cgucagccgccagcucggg

SEQ ID NO: 1069135 - RNA, 19 nt, Artificial Sequence
  Description of Artificial Sequence: Synthetic oligonucleotide
ccaggaguuugagcagagu

SEQ ID NO: 1069136 - RNA, 19 nt, Artificial Sequence
  Description of Artificial Sequence: Synthetic oligonucleotide
gcgccccaucauguaggga

SEQ ID NO: 1069137 - RNA, 19 nt, Artificial Sequence
  Description of Artificial Sequence: Synthetic oligonucleotide
cacaggcuaugcgccccau

SEQ ID NO: 1069138 - RNA, 19 nt, Artificial Sequence
  Description of Artificial Sequence: Synthetic oligonucleotide
ccgccagcucgggcugaag

SEQ ID NO: 1069139 - RNA, 19 nt, Artificial Sequence
  Description of Artificial Sequence: Synthetic oligonucleotide
cgcgaggcuugucaaugau

SEQ ID NO: 1069140 - RNA, 19 nt, Artificial Sequence
  Description of Artificial Sequence: Synthetic oligonucleotide
gccgccagcucgggcugaa

SEQ ID NO: 1069141 - RNA, 19 nt, Artificial Sequence
  Description of Artificial Sequence: Synthetic oligonucleotide
ccucggcagcaucgcgaaa

SEQ ID NO: 1069142 - RNA, 19 nt, Artificial Sequence
  Description of Artificial Sequence: Synthetic oligonucleotide
gcuccccgagguagaacuu

SEQ ID NO: 1069143 - RNA, 19 nt, Artificial Sequence
  Description of Artificial Sequence: Synthetic oligonucleotide
ccauggcguagaggucacu

SEQ ID NO: 1069144 - RNA, 19 nt, Artificial Sequence
  Description of Artificial Sequence: Synthetic oligonucleotide
ccaccgcgcuaucgggcau

SEQ ID NO: 1069145 - RNA, 19 nt, Artificial Sequence
  Description of Artificial Sequence: Synthetic oligonucleotide
gcgggccgcgucagucccu

SEQ ID NO: 1069146 - RNA, 19 nt, Artificial Sequence
  Description of Artificial Sequence: Synthetic oligonucleotide
ccgcgcuaucgggcauuau

SEQ ID NO: 1069147 - RNA, 19 nt, Artificial Sequence
  Description of Artificial Sequence: Synthetic oligonucleotide
cuauggauaaccuugaggg

SEQ ID NO: 1069148 - RNA, 19 nt, Artificial Sequence
  Description of Artificial Sequence: Synthetic oligonucleotide
auuuauucgguuccuaccc

SEQ ID NO: 1069149 - RNA, 19 nt, Artificial Sequence
  Description of Artificial Sequence: Synthetic oligonucleotide
aucuaaaguucauauaaac

SEQ ID NO: 1069150 - RNA, 19 nt, Artificial Sequence
  Description of Artificial Sequence: Synthetic oligonucleotide
ucuaaaguucauauaaaca

SEQ ID NO: 1069151 - RNA, 19 nt, Artificial Sequence
  Description of Artificial Sequence: Synthetic oligonucleotide
aguaacacuccucauugcg

SEQ ID NO: 1069152 - RNA, 19 nt, Artificial Sequence
  Description of Artificial Sequence: Synthetic oligonucleotide
acaaggugcaugcaggcgc

SEQ ID NO: 1069153 - RNA, 19 nt, Artificial Sequence
  Description of Artificial Sequence: Synthetic oligonucleotide
ugaaaucuaaaguucauau

SEQ ID NO: 1069154 - RNA, 19 nt, Artificial Sequence
  Description of Artificial Sequence: Synthetic oligonucleotide
gacaacuucauugucaggc

SEQ ID NO: 1069155 - RNA, 19 nt, Artificial Sequence
  Description of Artificial Sequence: Synthetic oligonucleotide
guagucgacaacuucauug

SEQ ID NO: 1069156 - RNA, 19 nt, Artificial Sequence
  Description of Artificial Sequence: Synthetic oligonucleotide
ugugacucgggucagcucc

SEQ ID NO: 1069157 - RNA, 19 nt, Artificial Sequence
  Description of Artificial Sequence: Synthetic oligonucleotide
agcagguacucccugagac

SEQ ID NO: 1069158 - RNA, 19 nt, Artificial Sequence
  Description of Artificial Sequence: Synthetic oligonucleotide
gaugacaaggugcaugcag

SEQ ID NO: 1069159 - RNA, 19 nt, Artificial Sequence
  Description of Artificial Sequence: Synthetic oligonucleotide
uguccgauaaggauggugu

SEQ ID NO: 1069160 - RNA, 19 nt, Artificial Sequence
  Description of Artificial Sequence: Synthetic oligonucleotide
auaaggauggugucagcac

SEQ ID NO: 1069161 - RNA, 19 nt, Artificial Sequence
  Description of Artificial Sequence: Synthetic oligonucleotide
uauacugggucucccagcc

SEQ ID NO: 1069162 - RNA, 19 nt, Artificial Sequence
  Description of Artificial Sequence: Synthetic oligonucleotide
aauucugcaggaggagucc

SEQ ID NO: 1069163 - RNA, 19 nt, Artificial Sequence
  Description of Artificial Sequence: Synthetic oligonucleotide
ugggacacaacccugcggc

SEQ ID NO: 1069164 - RNA, 19 nt, Artificial Sequence
  Description of Artificial Sequence: Synthetic oligonucleotide
ucgacaacuucauugucag

SEQ ID NO: 1069165 - RNA, 19 nt, Artificial Sequence
  Description of Artificial Sequence: Synthetic oligonucleotide
gaccugacagcccacagag

SEQ ID NO: 1069166 - RNA, 19 nt, Artificial Sequence
  Description of Artificial Sequence: Synthetic oligonucleotide
cauuuauucgguuccuacc

SEQ ID NO: 1069167 - RNA, 19 nt, Artificial Sequence
  Description of Artificial Sequence: Synthetic oligonucleotide
ucuagguucuccuuccggc

SEQ ID NO: 1069168 - RNA, 19 nt, Artificial Sequence
  Description of Artificial Sequence: Synthetic oligonucleotide
auauacugggucucccagc

SEQ ID NO: 1069169 - RNA, 19 nt, Artificial Sequence
  Description of Artificial Sequence: Synthetic oligonucleotide
aguguaggacaucucacag

SEQ ID NO: 1069170 - RNA, 19 nt, Artificial Sequence
  Description of Artificial Sequence: Synthetic oligonucleotide
agacaacccgucucaaacc

SEQ ID NO: 1069171 - RNA, 19 nt, Artificial Sequence
  Description of Artificial Sequence: Synthetic oligonucleotide
uuccagaugacaaggugca

SEQ ID NO: 1069172 - RNA, 19 nt, Artificial Sequence
  Description of Artificial Sequence: Synthetic oligonucleotide
aacggcaccagggauggac

SEQ ID NO: 1069173 - RNA, 19 nt, Artificial Sequence
  Description of Artificial Sequence: Synthetic oligonucleotide
ugaggaggacacaagguac

SEQ ID NO: 1069174 - RNA, 19 nt, Artificial Sequence
  Description of Artificial Sequence: Synthetic oligonucleotide
cacaaagccuucuagguuc

SEQ ID NO: 1069175 - RNA, 19 nt, Artificial Sequence
  Description of Artificial Sequence: Synthetic oligonucleotide
uguuguguuuuauuacaca

SEQ ID NO: 1069176 - RNA, 19 nt, Artificial Sequence
  Description of Artificial Sequence: Synthetic oligonucleotide
ucuaccaccgugcuaugga

SEQ ID NO: 1069177 - RNA, 19 nt, Artificial Sequence
  Description of Artificial Sequence: Synthetic oligonucleotide
uauucgguuccuacccacg

SEQ ID NO: 1069178 - RNA, 19 nt, Artificial Sequence
  Description of Artificial Sequence: Synthetic oligonucleotide
ucuguugaggggcugugca

SEQ ID NO: 1069179 - RNA, 19 nt, Artificial Sequence
  Description of Artificial Sequence: Synthetic oligonucleotide
acucguguccacaaggucg

SEQ ID NO: 1069180 - RNA, 19 nt, Artificial Sequence
  Description of Artificial Sequence: Synthetic oligonucleotide
uauggauaaccuugagggc

SEQ ID NO: 1069181 - RNA, 19 nt, Artificial Sequence
  Description of Artificial Sequence: Synthetic oligonucleotide
uugguaugguuaguggugg

SEQ ID NO: 1069182 - RNA, 19 nt, Artificial Sequence
  Description of Artificial Sequence: Synthetic oligonucleotide
agaaccugguguuguaguc

SEQ ID NO: 1069183 - RNA, 19 nt, Artificial Sequence
  Description of Artificial Sequence: Synthetic oligonucleotide
uaugguuagugguggcagg

SEQ ID NO: 1069184 - RNA, 19 nt, Artificial Sequence
  Description of Artificial Sequence: Synthetic oligonucleotide
guagggcagacccaggcgg

SEQ ID NO: 1069185 - RNA, 19 nt, Artificial Sequence
  Description of Artificial Sequence: Synthetic oligonucleotide
ugggaugaguucuggaagc

SEQ ID NO: 1069186 - RNA, 19 nt, Artificial Sequence
  Description of Artificial Sequence: Synthetic oligonucleotide
uagucgacaacuucauugu

SEQ ID NO: 1069187 - RNA, 19 nt, Artificial Sequence
  Description of Artificial Sequence: Synthetic oligonucleotide
uacacgaccugcauaucug

SEQ ID NO: 1069188 - RNA, 19 nt, Artificial Sequence
  Description of Artificial Sequence: Synthetic oligonucleotide
cuuccggccauccugcacg

SEQ ID NO: 1069189 - RNA, 19 nt, Artificial Sequence
  Description of Artificial Sequence: Synthetic oligonucleotide
gaucccaacggcaccaggg

SEQ ID NO: 1069190 - RNA, 19 nt, Artificial Sequence
  Description of Artificial Sequence: Synthetic oligonucleotide
uuuauucgguuccuaccca

SEQ ID NO: 1069191 - RNA, 19 nt, Artificial Sequence
  Description of Artificial Sequence: Synthetic oligonucleotide
agucaagggcggaagacgc

SEQ ID NO: 1069192 - RNA, 19 nt, Artificial Sequence
  Description of Artificial Sequence: Synthetic oligonucleotide
auucgguuccuacccacgg

SEQ ID NO: 1069193 - RNA, 19 nt, Artificial Sequence
  Description of Artificial Sequence: Synthetic oligonucleotide
uguuguagucgacaacuuc

SEQ ID NO: 1069194 - RNA, 19 nt, Artificial Sequence
  Description of Artificial Sequence: Synthetic oligonucleotide
acaaggaggugugucaggg

SEQ ID NO: 1069195 - RNA, 19 nt, Artificial Sequence
  Description of Artificial Sequence: Synthetic oligonucleotide
gcuauggauaaccuugagg

SEQ ID NO: 1069196 - RNA, 19 nt, Artificial Sequence
  Description of Artificial Sequence: Synthetic oligonucleotide
auauaaacauuuauucggu

SEQ ID NO: 1069197 - RNA, 19 nt, Artificial Sequence
  Description of Artificial Sequence: Synthetic oligonucleotide
gauaaggauggugucagca

SEQ ID NO: 1069198 - RNA, 19 nt, Artificial Sequence
  Description of Artificial Sequence: Synthetic oligonucleotide
ugucgccugcauuauauac

SEQ ID NO: 1069199 - RNA, 19 nt, Artificial Sequence
  Description of Artificial Sequence: Synthetic oligonucleotide
gaaccugguguuguagucg

SEQ ID NO: 1069200 - RNA, 19 nt, Artificial Sequence
  Description of Artificial Sequence: Synthetic oligonucleotide
guuguagucgacaacuuca

SEQ ID NO: 1069201 - RNA, 19 nt, Artificial Sequence
  Description of Artificial Sequence: Synthetic oligonucleotide
cauauacugggucucccag

SEQ ID NO: 1069202 - RNA, 19 nt, Artificial Sequence
  Description of Artificial Sequence: Synthetic oligonucleotide
augacaaggugcaugcagg

SEQ ID NO: 1069203 - RNA, 19 nt, Artificial Sequence
  Description of Artificial Sequence: Synthetic oligonucleotide
aaucuaaaguucauauaaa

SEQ ID NO: 1069204 - RNA, 19 nt, Artificial Sequence
  Description of Artificial Sequence: Synthetic oligonucleotide
cucguguccacaaggucgg

SEQ ID NO: 1069205 - RNA, 19 nt, Artificial Sequence
  Description of Artificial Sequence: Synthetic oligonucleotide
gacaaaggugucguacacg

SEQ ID NO: 1069206 - RNA, 19 nt, Artificial Sequence
  Description of Artificial Sequence: Synthetic oligonucleotide
acugacgugucuaccaccg

SEQ ID NO: 1069207 - RNA, 19 nt, Artificial Sequence
  Description of Artificial Sequence: Synthetic oligonucleotide
agcaagacggccugcacgu

SEQ ID NO: 1069208 - RNA, 19 nt, Artificial Sequence
  Description of Artificial Sequence: Synthetic oligonucleotide
guugguaugguuaguggug

SEQ ID NO: 1069209 - RNA, 19 nt, Artificial Sequence
  Description of Artificial Sequence: Synthetic oligonucleotide
acucgguuccgccgcagcc

SEQ ID NO: 1069210 - RNA, 19 nt, Artificial Sequence
  Description of Artificial Sequence: Synthetic oligonucleotide
ucggccaugagguuccgca

SEQ ID NO: 1069211 - RNA, 19 nt, Artificial Sequence
  Description of Artificial Sequence: Synthetic oligonucleotide
ugacaaggugcaugcaggc

SEQ ID NO: 1069212 - RNA, 19 nt, Artificial Sequence
  Description of Artificial Sequence: Synthetic oligonucleotide
ucucaaaccaugagggcuu

SEQ ID NO: 1069213 - RNA, 19 nt, Artificial Sequence
  Description of Artificial Sequence: Synthetic oligonucleotide
cuagguucuccuuccggcc

SEQ ID NO: 1069214 - RNA, 19 nt, Artificial Sequence
  Description of Artificial Sequence: Synthetic oligonucleotide
uuauucgguuccuacccac

SEQ ID NO: 1069215 - RNA, 19 nt, Artificial Sequence
  Description of Artificial Sequence: Synthetic oligonucleotide
aagacggccugcacguccc

SEQ ID NO: 1069216 - RNA, 19 nt, Artificial Sequence
  Description of Artificial Sequence: Synthetic oligonucleotide
gaggccgagggcaucaggg

SEQ ID NO: 1069217 - RNA, 19 nt, Artificial Sequence
  Description of Artificial Sequence: Synthetic oligonucleotide
acagucaagggcggaagac

SEQ ID NO: 1069218 - RNA, 19 nt, Artificial Sequence
  Description of Artificial Sequence: Synthetic oligonucleotide
aucgcuuggucuuggcauc

SEQ ID NO: 1069219 - RNA, 19 nt, Artificial Sequence
  Description of Artificial Sequence: Synthetic oligonucleotide
auaaccuugagggccagca

SEQ ID NO: 1069220 - RNA, 19 nt, Artificial Sequence
  Description of Artificial Sequence: Synthetic oligonucleotide
ccgucucaaaccaugaggg

SEQ ID NO: 1069221 - RNA, 19 nt, Artificial Sequence
  Description of Artificial Sequence: Synthetic oligonucleotide
uauaaacauuuauucgguu

SEQ ID NO: 1069222 - RNA, 19 nt, Artificial Sequence
  Description of Artificial Sequence: Synthetic oligonucleotide
agcacugacgugucuacca

SEQ ID NO: 1069223 - RNA, 19 nt, Artificial Sequence
  Description of Artificial Sequence: Synthetic oligonucleotide
aggucagcagguuuaauua

SEQ ID NO: 1069224 - RNA, 19 nt, Artificial Sequence
  Description of Artificial Sequence: Synthetic oligonucleotide
cagguacucccugagacgg

SEQ ID NO: 1069225 - RNA, 19 nt, Artificial Sequence
  Description of Artificial Sequence: Synthetic oligonucleotide
acaaggucggccucuguca

SEQ ID NO: 1069226 - RNA, 19 nt, Artificial Sequence
  Description of Artificial Sequence: Synthetic oligonucleotide
agcacauauacugggucuc

SEQ ID NO: 1069227 - RNA, 19 nt, Artificial Sequence
  Description of Artificial Sequence: Synthetic oligonucleotide
caccucgugggacacaacc

SEQ ID NO: 1069228 - RNA, 19 nt, Artificial Sequence
  Description of Artificial Sequence: Synthetic oligonucleotide
gacaacccgucucaaacca

SEQ ID NO: 1069229 - RNA, 19 nt, Artificial Sequence
  Description of Artificial Sequence: Synthetic oligonucleotide
ucgccugcauuauauacaa

SEQ ID NO: 1069230 - RNA, 19 nt, Artificial Sequence
  Description of Artificial Sequence: Synthetic oligonucleotide
guugggaugaguucuggaa

SEQ ID NO: 1069231 - RNA, 19 nt, Artificial Sequence
  Description of Artificial Sequence: Synthetic oligonucleotide
ugagggcuuguccugucgc

SEQ ID NO: 1069232 - RNA, 19 nt, Artificial Sequence
  Description of Artificial Sequence: Synthetic oligonucleotide
guaugguuagugguggcag

SEQ ID NO: 1069233 - RNA, 19 nt, Artificial Sequence
  Description of Artificial Sequence: Synthetic oligonucleotide
ugcuauggauaaccuugag

SEQ ID NO: 1069234 - RNA, 19 nt, Artificial Sequence
  Description of Artificial Sequence: Synthetic oligonucleotide
agucgacaacuucauuguc

SEQ ID NO: 1069235 - RNA, 19 nt, Artificial Sequence
  Description of Artificial Sequence: Synthetic oligonucleotide
cacggagagaggcagcagc

SEQ ID NO: 1069236 - RNA, 19 nt, Artificial Sequence
  Description of Artificial Sequence: Synthetic oligonucleotide
uccgauaaggaugguguca

SEQ ID NO: 1069237 - RNA, 19 nt, Artificial Sequence
  Description of Artificial Sequence: Synthetic oligonucleotide
uggugaguugggaugaguu

SEQ ID NO: 1069238 - RNA, 19 nt, Artificial Sequence
  Description of Artificial Sequence: Synthetic oligonucleotide
aggugugucaggguccuac

SEQ ID NO: 1069239 - RNA, 19 nt, Artificial Sequence
  Description of Artificial Sequence: Synthetic oligonucleotide
cugagacggcuguacaggg

SEQ ID NO: 1069240 - RNA, 19 nt, Artificial Sequence
  Description of Artificial Sequence: Synthetic oligonucleotide
aggucggccucugucaccc

SEQ ID NO: 1069241 - RNA, 19 nt, Artificial Sequence
  Description of Artificial Sequence: Synthetic oligonucleotide
uuguagucgacaacuucau

SEQ ID NO: 1069242 - RNA, 19 nt, Artificial Sequence
  Description of Artificial Sequence: Synthetic oligonucleotide
cagcaagacggccugcacg

SEQ ID NO: 1069243 - RNA, 19 nt, Artificial Sequence
  Description of Artificial Sequence: Synthetic oligonucleotide
agccacucgguuccgccgc

SEQ ID NO: 1069244 - RNA, 19 nt, Artificial Sequence
  Description of Artificial Sequence: Synthetic oligonucleotide
gacaaggugcaugcaggcg

SEQ ID NO: 1069245 - RNA, 19 nt, Artificial Sequence
  Description of Artificial Sequence: Synthetic oligonucleotide
aguuugaaaagaggccgag

SEQ ID NO: 1069246 - RNA, 19 nt, Artificial Sequence
  Description of Artificial Sequence: Synthetic oligonucleotide
acgaccugcauaucugugu

SEQ ID NO: 1069247 - RNA, 19 nt, Artificial Sequence
  Description of Artificial Sequence: Synthetic oligonucleotide
guaacacuccucauugcgc

SEQ ID NO: 1069248 - RNA, 19 nt, Artificial Sequence
  Description of Artificial Sequence: Synthetic oligonucleotide
uguugcuuggcgaccugac

SEQ ID NO: 1069249 - RNA, 19 nt, Artificial Sequence
  Description of Artificial Sequence: Synthetic oligonucleotide
ugagacggcuguacagggc

SEQ ID NO: 1069250 - RNA, 19 nt, Artificial Sequence
  Description of Artificial Sequence: Synthetic oligonucleotide
cagucaagggcggaagacg

SEQ ID NO: 1069251 - RNA, 19 nt, Artificial Sequence
  Description of Artificial Sequence: Synthetic oligonucleotide
caacccgucucaaaccaug

SEQ ID NO: 1069252 - RNA, 19 nt, Artificial Sequence
  Description of Artificial Sequence: Synthetic oligonucleotide
gacgugucuaccaccgugc

SEQ ID NO: 1069253 - RNA, 19 nt, Artificial Sequence
  Description of Artificial Sequence: Synthetic oligonucleotide
cuugacccuggccacuggg

SEQ ID NO: 1069254 - RNA, 19 nt, Artificial Sequence
  Description of Artificial Sequence: Synthetic oligonucleotide
cuccucauugcgcacgcag

SEQ ID NO: 1069255 - RNA, 19 nt, Artificial Sequence
  Description of Artificial Sequence: Synthetic oligonucleotide
ugucuuggaugaucugucu

SEQ ID NO: 1069256 - RNA, 19 nt, Artificial Sequence
  Description of Artificial Sequence: Synthetic oligonucleotide
accaccgugcuauggauaa

SEQ ID NO: 1069257 - RNA, 19 nt, Artificial Sequence
  Description of Artificial Sequence: Synthetic oligonucleotide
cacccuacaaggcagggca

SEQ ID NO: 1069258 - RNA, 19 nt, Artificial Sequence
  Description of Artificial Sequence: Synthetic oligonucleotide
caagacggccugcacgucc

SEQ ID NO: 1069259 - RNA, 19 nt, Artificial Sequence
  Description of Artificial Sequence: Synthetic oligonucleotide
gguuuuggcugccaauuug

SEQ ID NO: 1069260 - RNA, 19 nt, Artificial Sequence
  Description of Artificial Sequence: Synthetic oligonucleotide
aacagcacugacgugucua

SEQ ID NO: 1069261 - RNA, 19 nt, Artificial Sequence
  Description of Artificial Sequence: Synthetic oligonucleotide
acgucccgcagugugacac

SEQ ID NO: 1069262 - RNA, 19 nt, Artificial Sequence
  Description of Artificial Sequence: Synthetic oligonucleotide
caccgugcuauggauaacc

SEQ ID NO: 1069263 - RNA, 19 nt, Artificial Sequence
  Description of Artificial Sequence: Synthetic oligonucleotide
ccauauguaguguaggaca

SEQ ID NO: 1069264 - RNA, 19 nt, Artificial Sequence
  Description of Artificial Sequence: Synthetic oligonucleotide
guccuggugaguugggaug

SEQ ID NO: 1069265 - RNA, 19 nt, Artificial Sequence
  Description of Artificial Sequence: Synthetic oligonucleotide
ugugacacucguguccaca

SEQ ID NO: 1069266 - RNA, 19 nt, Artificial Sequence
  Description of Artificial Sequence: Synthetic oligonucleotide
aggccauauguaguguagg

SEQ ID NO: 1069267 - RNA, 19 nt, Artificial Sequence
  Description of Artificial Sequence: Synthetic oligonucleotide
uucgguuccuacccacgga

SEQ ID NO: 1069268 - RNA, 19 nt, Artificial Sequence
  Description of Artificial Sequence: Synthetic oligonucleotide
guaguguaggacaucucac

SEQ ID NO: 1069269 - RNA, 19 nt, Artificial Sequence
  Description of Artificial Sequence: Synthetic oligonucleotide
uccccagugguaguaacac

SEQ ID NO: 1069270 - RNA, 19 nt, Artificial Sequence
  Description of Artificial Sequence: Synthetic oligonucleotide
ugugaagaugacggcgccc

SEQ ID NO: 1069271 - RNA, 19 nt, Artificial Sequence
  Description of Artificial Sequence: Synthetic oligonucleotide
augaaaucuaaaguucaua

SEQ ID NO: 1069272 - RNA, 19 nt, Artificial Sequence
  Description of Artificial Sequence: Synthetic oligonucleotide
ggcguggggaaucuucugg

SEQ ID NO: 1069273 - RNA, 19 nt, Artificial Sequence
  Description of Artificial Sequence: Synthetic oligonucleotide
gucgacaacuucauuguca

SEQ ID NO: 1069274 - RNA, 19 nt, Artificial Sequence
  Description of Artificial Sequence: Synthetic oligonucleotide
cccgucucaaaccaugagg

SEQ ID NO: 1069275 - RNA, 19 nt, Artificial Sequence
  Description of Artificial Sequence: Synthetic oligonucleotide
cacaaggucggccucuguc

SEQ ID NO: 1069276 - RNA, 19 nt, Artificial Sequence
  Description of Artificial Sequence: Synthetic oligonucleotide
ggauguaggaagggguugg

SEQ ID NO: 1069277 - RNA, 19 nt, Artificial Sequence
  Description of Artificial Sequence: Synthetic oligonucleotide
gggguagccauucuccuug

SEQ ID NO: 1069278 - RNA, 19 nt, Artificial Sequence
  Description of Artificial Sequence: Synthetic oligonucleotide
acacuccucauugcgcacg

SEQ ID NO: 1069279 - RNA, 19 nt, Artificial Sequence
  Description of Artificial Sequence: Synthetic oligonucleotide
agcgcuuguagggcagacc

SEQ ID NO: 1069280 - RNA, 19 nt, Artificial Sequence
  Description of Artificial Sequence: Synthetic oligonucleotide
cacauugucuuggaugauc

SEQ ID NO: 1069281 - RNA, 19 nt, Artificial Sequence
  Description of Artificial Sequence: Synthetic oligonucleotide
uuagugguggcagguggga

SEQ ID NO: 1069282 - RNA, 19 nt, Artificial Sequence
  Description of Artificial Sequence: Synthetic oligonucleotide
caacccugcggccacuggc

SEQ ID NO: 1069283 - RNA, 19 nt, Artificial Sequence
  Description of Artificial Sequence: Synthetic oligonucleotide
gcgcuuguagggcagaccc

SEQ ID NO: 1069284 - RNA, 19 nt, Artificial Sequence
  Description of Artificial Sequence: Synthetic oligonucleotide
gacacaacccugcggccac

SEQ ID NO: 1069285 - RNA, 19 nt, Artificial Sequence
  Description of Artificial Sequence: Synthetic oligonucleotide
gauggaccccucuguugag

SEQ ID NO: 1069286 - RNA, 19 nt, Artificial Sequence
  Description of Artificial Sequence: Synthetic oligonucleotide
gugggacacaacccugcgg

SEQ ID NO: 1069287 - RNA, 19 nt, Artificial Sequence
  Description of Artificial Sequence: Synthetic oligonucleotide
gaagacgccggcgugggga

SEQ ID NO: 1069288 - RNA, 19 nt, Artificial Sequence
  Description of Artificial Sequence: Synthetic oligonucleotide
agggucaucgcuuggucuu

SEQ ID NO: 1069289 - RNA, 19 nt, Artificial Sequence
  Description of Artificial Sequence: Synthetic oligonucleotide
ugcacgucccgcaguguga

SEQ ID NO: 1069290 - RNA, 19 nt, Artificial Sequence
  Description of Artificial Sequence: Synthetic oligonucleotide
cugcacguguugcuuggcg

SEQ ID NO: 1069291 - RNA, 19 nt, Artificial Sequence
  Description of Artificial Sequence: Synthetic oligonucleotide
acacgaccugcauaucugu

SEQ ID NO: 1069292 - RNA, 19 nt, Artificial Sequence
  Description of Artificial Sequence: Synthetic oligonucleotide
uacagggcguucccucuca

SEQ ID NO: 1069293 - RNA, 19 nt, Artificial Sequence
  Description of Artificial Sequence: Synthetic oligonucleotide
cuguugaggggcugugcag

SEQ ID NO: 1069294 - RNA, 19 nt, Artificial Sequence
  Description of Artificial Sequence: Synthetic oligonucleotide
cccagugguaguaacacuc

SEQ ID NO: 1069295 - RNA, 19 nt, Artificial Sequence
  Description of Artificial Sequence: Synthetic oligonucleotide
aucccaacggcaccaggga

SEQ ID NO: 1069296 - RNA, 19 nt, Artificial Sequence
  Description of Artificial Sequence: Synthetic oligonucleotide
cacugacgugucuaccacc

SEQ ID NO: 1069297 - RNA, 19 nt, Artificial Sequence
  Description of Artificial Sequence: Synthetic oligonucleotide
gcagguacucccugagacg

SEQ ID NO: 1069298 - RNA, 19 nt, Artificial Sequence
  Description of Artificial Sequence: Synthetic oligonucleotide
ugguaugguuagugguggc

SEQ ID NO: 1069299 - RNA, 19 nt, Artificial Sequence
  Description of Artificial Sequence: Synthetic oligonucleotide
uguagucgacaacuucauu

SEQ ID NO: 1069300 - RNA, 19 nt, Artificial Sequence
  Description of Artificial Sequence: Synthetic oligonucleotide
gcuggggcggcucagugag

SEQ ID NO: 1069301 - RNA, 19 nt, Artificial Sequence
  Description of Artificial Sequence: Synthetic oligonucleotide
ucccgcagugugacacucg

SEQ ID NO: 1069302 - RNA, 19 nt, Artificial Sequence
  Description of Artificial Sequence: Synthetic oligonucleotide
aggugggagggucaucgcu

SEQ ID NO: 1069303 - RNA, 19 nt, Artificial Sequence
  Description of Artificial Sequence: Synthetic oligonucleotide
acccgucucaaaccaugag

SEQ ID NO: 1069304 - RNA, 19 nt, Artificial Sequence
  Description of Artificial Sequence: Synthetic oligonucleotide
caggguccuaccugguccc

SEQ ID NO: 1069305 - RNA, 19 nt, Artificial Sequence
  Description of Artificial Sequence: Synthetic oligonucleotide
gaagauggcccagaggccu

SEQ ID NO: 1069306 - RNA, 19 nt, Artificial Sequence
  Description of Artificial Sequence: Synthetic oligonucleotide
acggcaccagggauggacc

SEQ ID NO: 1069307 - RNA, 19 nt, Artificial Sequence
  Description of Artificial Sequence: Synthetic oligonucleotide
ucccugagacggcuguaca

SEQ ID NO: 1069308 - RNA, 19 nt, Artificial Sequence
  Description of Artificial Sequence: Synthetic oligonucleotide
agguuggggaguccuggug

SEQ ID NO: 1069309 - RNA, 19 nt, Artificial Sequence
  Description of Artificial Sequence: Synthetic oligonucleotide
guagucggccaugagguuc

SEQ ID NO: 1069310 - RNA, 19 nt, Artificial Sequence
  Description of Artificial Sequence: Synthetic oligonucleotide
cacgcagcggccugaggag

SEQ ID NO: 1069311 - RNA, 19 nt, Artificial Sequence
  Description of Artificial Sequence: Synthetic oligonucleotide
cacagcgacagcaaauucu

SEQ ID NO: 1069312 - RNA, 19 nt, Artificial Sequence
  Description of Artificial Sequence: Synthetic oligonucleotide
cugagugagcagguacucc

SEQ ID NO: 1069313 - RNA, 19 nt, Artificial Sequence
  Description of Artificial Sequence: Synthetic oligonucleotide
cuuggcgaccugacagccc

SEQ ID NO: 1069314 - RNA, 19 nt, Artificial Sequence
  Description of Artificial Sequence: Synthetic oligonucleotide
cucauugcgcacgcagcgg

SEQ ID NO: 1069315 - RNA, 19 nt, Artificial Sequence
  Description of Artificial Sequence: Synthetic oligonucleotide
caguuugaaaagaggccga

SEQ ID NO: 1069316 - RNA, 19 nt, Artificial Sequence
  Description of Artificial Sequence: Synthetic oligonucleotide
augguuagugguggcaggu

SEQ ID NO: 1069317 - RNA, 19 nt, Artificial Sequence
  Description of Artificial Sequence: Synthetic oligonucleotide
cucgugggacacaacccug

SEQ ID NO: 1069318 - RNA, 19 nt, Artificial Sequence
  Description of Artificial Sequence: Synthetic oligonucleotide
cacgacugugacucggguc

SEQ ID NO: 1069319 - RNA, 19 nt, Artificial Sequence
  Description of Artificial Sequence: Synthetic oligonucleotide
acaacccugcggccacugg

SEQ ID NO: 1069320 - RNA, 19 nt, Artificial Sequence
  Description of Artificial Sequence: Synthetic oligonucleotide
ucaccccugagaaccuggu

SEQ ID NO: 1069321 - RNA, 19 nt, Artificial Sequence
  Description of Artificial Sequence: Synthetic oligonucleotide
caaggucggccucugucac

SEQ ID NO: 1069322 - RNA, 19 nt, Artificial Sequence
  Description of Artificial Sequence: Synthetic oligonucleotide
gucucaaaccaugagggcu

SEQ ID NO: 1069323 - RNA, 19 nt, Artificial Sequence
  Description of Artificial Sequence: Synthetic oligonucleotide
cauauguaguguaggacau

SEQ ID NO: 1069324 - RNA, 19 nt, Artificial Sequence
  Description of Artificial Sequence: Synthetic oligonucleotide
caaaggugucguacacgac

SEQ ID NO: 1069325 - RNA, 19 nt, Artificial Sequence
  Description of Artificial Sequence: Synthetic oligonucleotide
cauugcgcacgcagcggcc

SEQ ID NO: 1069326 - RNA, 19 nt, Artificial Sequence
  Description of Artificial Sequence: Synthetic oligonucleotide
guacacgaccugcauaucu

SEQ ID NO: 1069327 - RNA, 19 nt, Artificial Sequence
  Description of Artificial Sequence: Synthetic oligonucleotide
gacucgggucagcuccagg

SEQ ID NO: 1069328 - RNA, 19 nt, Artificial Sequence
  Description of Artificial Sequence: Synthetic oligonucleotide
guguccgauaaggauggug

SEQ ID NO: 1069329 - RNA, 19 nt, Artificial Sequence
  Description of Artificial Sequence: Synthetic oligonucleotide
caagggcggaagacgccgg

SEQ ID NO: 1069330 - RNA, 19 nt, Artificial Sequence
  Description of Artificial Sequence: Synthetic oligonucleotide
uggcauccucacuggagcu

SEQ ID NO: 1069331 - RNA, 19 nt, Artificial Sequence
  Description of Artificial Sequence: Synthetic oligonucleotide
uguccacgacugugacucg

SEQ ID NO: 1069332 - RNA, 19 nt, Artificial Sequence
  Description of Artificial Sequence: Synthetic oligonucleotide
aacccgucucaaaccauga

SEQ ID NO: 1069333 - RNA, 19 nt, Artificial Sequence
  Description of Artificial Sequence: Synthetic oligonucleotide
cacgguguuggggaccagg

SEQ ID NO: 1069334 - RNA, 19 nt, Artificial Sequence
  Description of Artificial Sequence: Synthetic oligonucleotide
aacccugcggccacuggcu

SEQ ID NO: 1069335 - RNA, 19 nt, Artificial Sequence
  Description of Artificial Sequence: Synthetic oligonucleotide
cagccacucgguuccgccg

SEQ ID NO: 1069336 - RNA, 19 nt, Artificial Sequence
  Description of Artificial Sequence: Synthetic oligonucleotide
ccugagacggcuguacagg

SEQ ID NO: 1069337 - RNA, 19 nt, Artificial Sequence
  Description of Artificial Sequence: Synthetic oligonucleotide
ggugucguacacgaccugc

SEQ ID NO: 1069338 - RNA, 19 nt, Artificial Sequence
  Description of Artificial Sequence: Synthetic oligonucleotide
aagacgccggcguggggaa

SEQ ID NO: 1069339 - RNA, 19 nt, Artificial Sequence
  Description of Artificial Sequence: Synthetic oligonucleotide
agcggccugaggaggacac

SEQ ID NO: 1069340 - RNA, 19 nt, Artificial Sequence
  Description of Artificial Sequence: Synthetic oligonucleotide
uaccaccgugcuauggaua

SEQ ID NO: 1069341 - RNA, 19 nt, Artificial Sequence
  Description of Artificial Sequence: Synthetic oligonucleotide
cacuccucauugcgcacgc

SEQ ID NO: 1069342 - RNA, 19 nt, Artificial Sequence
  Description of Artificial Sequence: Synthetic oligonucleotide
gguugguaugguuaguggu

SEQ ID NO: 1069343 - RNA, 19 nt, Artificial Sequence
  Description of Artificial Sequence: Synthetic oligonucleotide
auguaguguaggacaucuc

SEQ ID NO: 1069344 - RNA, 19 nt, Artificial Sequence
  Description of Artificial Sequence: Synthetic oligonucleotide
ggccauauguaguguagga

SEQ ID NO: 1069345 - RNA, 19 nt, Artificial Sequence
  Description of Artificial Sequence: Synthetic oligonucleotide
cagcgacagcaaauucugc

SEQ ID NO: 1069346 - RNA, 19 nt, Artificial Sequence
  Description of Artificial Sequence: Synthetic oligonucleotide
ccgauaaggauggugucag

SEQ ID NO: 1069347 - RNA, 19 nt, Artificial Sequence
  Description of Artificial Sequence: Synthetic oligonucleotide
gugacacucguguccacaa

SEQ ID NO: 1069348 - RNA, 19 nt, Artificial Sequence
  Description of Artificial Sequence: Synthetic oligonucleotide
guccgauaaggaugguguc

SEQ ID NO: 1069349 - RNA, 19 nt, Artificial Sequence
  Description of Artificial Sequence: Synthetic oligonucleotide
ccgacugcagcugagcagc

SEQ ID NO: 1069350 - RNA, 19 nt, Artificial Sequence
  Description of Artificial Sequence: Synthetic oligonucleotide
uccuacccacggagagagg

SEQ ID NO: 1069351 - RNA, 19 nt, Artificial Sequence
  Description of Artificial Sequence: Synthetic oligonucleotide
ggugugucaggguccuacc

SEQ ID NO: 1069352 - RNA, 19 nt, Artificial Sequence
  Description of Artificial Sequence: Synthetic oligonucleotide
acgugucuaccaccgugcu

SEQ ID NO: 1069353 - RNA, 19 nt, Artificial Sequence
  Description of Artificial Sequence: Synthetic oligonucleotide
uggggcggcucagugagaa

SEQ ID NO: 1069354 - RNA, 19 nt, Artificial Sequence
  Description of Artificial Sequence: Synthetic oligonucleotide
gccccucagcuucuuaagg

SEQ ID NO: 1069355 - RNA, 19 nt, Artificial Sequence
  Description of Artificial Sequence: Synthetic oligonucleotide
guucuggaagccacccuac

SEQ ID NO: 1069356 - RNA, 19 nt, Artificial Sequence
  Description of Artificial Sequence: Synthetic oligonucleotide
gccauauguaguguaggac

SEQ ID NO: 1069357 - RNA, 19 nt, Artificial Sequence
  Description of Artificial Sequence: Synthetic oligonucleotide
gggauggaccccucuguug

SEQ ID NO: 1069358 - RNA, 19 nt, Artificial Sequence
  Description of Artificial Sequence: Synthetic oligonucleotide
cagccguccccagugguag

SEQ ID NO: 1069359 - RNA, 19 nt, Artificial Sequence
  Description of Artificial Sequence: Synthetic oligonucleotide
gagggucaucgcuuggucu

SEQ ID NO: 1069360 - RNA, 19 nt, Artificial Sequence
  Description of Artificial Sequence: Synthetic oligonucleotide
cagggcguucccucucagc

SEQ ID NO: 1069361 - RNA, 19 nt, Artificial Sequence
  Description of Artificial Sequence: Synthetic oligonucleotide
agguacucccugagacggc

SEQ ID NO: 1069362 - RNA, 19 nt, Artificial Sequence
  Description of Artificial Sequence: Synthetic oligonucleotide
gcacgcagcggccugagga

SEQ ID NO: 1069363 - RNA, 19 nt, Artificial Sequence
  Description of Artificial Sequence: Synthetic oligonucleotide
gggaacagcacugacgugu

SEQ ID NO: 1069364 - RNA, 19 nt, Artificial Sequence
  Description of Artificial Sequence: Synthetic oligonucleotide
acagggcguucccucucag

SEQ ID NO: 1069365 - RNA, 19 nt, Artificial Sequence
  Description of Artificial Sequence: Synthetic oligonucleotide
agggcggaagacgccggcg

SEQ ID NO: 1069366 - RNA, 19 nt, Artificial Sequence
  Description of Artificial Sequence: Synthetic oligonucleotide
cugugccacagcgacagca

SEQ ID NO: 1069367 - RNA, 19 nt, Artificial Sequence
  Description of Artificial Sequence: Synthetic oligonucleotide
ccaacggcaccagggaugg

SEQ ID NO: 1069368 - RNA, 19 nt, Artificial Sequence
  Description of Artificial Sequence: Synthetic oligonucleotide
gaggaggacacaagguacu

SEQ ID NO: 1069369 - RNA, 19 nt, Artificial Sequence
  Description of Artificial Sequence: Synthetic oligonucleotide
gguaugguuagugguggca

SEQ ID NO: 1069370 - RNA, 19 nt, Artificial Sequence
  Description of Artificial Sequence: Synthetic oligonucleotide
caagguacucugugccaca

SEQ ID NO: 1069371 - RNA, 19 nt, Artificial Sequence
  Description of Artificial Sequence: Synthetic oligonucleotide
cuacccacggagagaggca

SEQ ID NO: 1069372 - RNA, 19 nt, Artificial Sequence
  Description of Artificial Sequence: Synthetic oligonucleotide
cacagagccgacugcagcu

SEQ ID NO: 1069373 - RNA, 19 nt, Artificial Sequence
  Description of Artificial Sequence: Synthetic oligonucleotide
gucguacacgaccugcaua

SEQ ID NO: 1069374 - RNA, 19 nt, Artificial Sequence
  Description of Artificial Sequence: Synthetic oligonucleotide
aggugucguacacgaccug

SEQ ID NO: 1069375 - RNA, 19 nt, Artificial Sequence
  Description of Artificial Sequence: Synthetic oligonucleotide
gucaagggcggaagacgcc

SEQ ID NO: 1069376 - RNA, 19 nt, Artificial Sequence
  Description of Artificial Sequence: Synthetic oligonucleotide
ggaagccacccuacaaggc

SEQ ID NO: 1069377 - RNA, 19 nt, Artificial Sequence
  Description of Artificial Sequence: Synthetic oligonucleotide
cacucgguuccgccgcagc

SEQ ID NO: 1069378 - RNA, 19 nt, Artificial Sequence
  Description of Artificial Sequence: Synthetic oligonucleotide
aggguccuaccuggucccc

SEQ ID NO: 1069379 - RNA, 19 nt, Artificial Sequence
  Description of Artificial Sequence: Synthetic oligonucleotide
acgcagcggccugaggagg

SEQ ID NO: 1069380 - RNA, 19 nt, Artificial Sequence
  Description of Artificial Sequence: Synthetic oligonucleotide
agccacccuacaaggcagg

SEQ ID NO: 1069381 - RNA, 19 nt, Artificial Sequence
  Description of Artificial Sequence: Synthetic oligonucleotide
accgugcuauggauaaccu

SEQ ID NO: 1069382 - RNA, 19 nt, Artificial Sequence
  Description of Artificial Sequence: Synthetic oligonucleotide
agacggccugcacgucccg

SEQ ID NO: 1069383 - RNA, 19 nt, Artificial Sequence
  Description of Artificial Sequence: Synthetic oligonucleotide
uccugucgccugcauuaua

SEQ ID NO: 1069384 - RNA, 19 nt, Artificial Sequence
  Description of Artificial Sequence: Synthetic oligonucleotide
cugugacucgggucagcuc

SEQ ID NO: 1069385 - RNA, 19 nt, Artificial Sequence
  Description of Artificial Sequence: Synthetic oligonucleotide
gcacugacgugucuaccac

SEQ ID NO: 1069386 - RNA, 19 nt, Artificial Sequence
  Description of Artificial Sequence: Synthetic oligonucleotide
caccccugagaaccuggug

SEQ ID NO: 1069387 - RNA, 19 nt, Artificial Sequence
  Description of Artificial Sequence: Synthetic oligonucleotide
gcacauauacugggucucc

SEQ ID NO: 1069388 - RNA, 19 nt, Artificial Sequence
  Description of Artificial Sequence: Synthetic oligonucleotide
gccgcagccguccccagug

SEQ ID NO: 1069389 - RNA, 19 nt, Artificial Sequence
  Description of Artificial Sequence: Synthetic oligonucleotide
agccuucuagguucuccuu

SEQ ID NO: 1069390 - RNA, 19 nt, Artificial Sequence
  Description of Artificial Sequence: Synthetic oligonucleotide
ccgggaggcgcacagucag

SEQ ID NO: 1069391 - RNA, 19 nt, Artificial Sequence
  Description of Artificial Sequence: Synthetic oligonucleotide
aagcugguuuuggcugcca

SEQ ID NO: 1069392 - RNA, 19 nt, Artificial Sequence
  Description of Artificial Sequence: Synthetic oligonucleotide
cucacagucaagggcggaa

SEQ ID NO: 1069393 - RNA, 19 nt, Artificial Sequence
  Description of Artificial Sequence: Synthetic oligonucleotide
agguuccgcagggagcgcu

SEQ ID NO: 1069394 - RNA, 19 nt, Artificial Sequence
  Description of Artificial Sequence: Synthetic oligonucleotide
uccuuccggccauccugca

SEQ ID NO: 1069395 - RNA, 19 nt, Artificial Sequence
  Description of Artificial Sequence: Synthetic oligonucleotide
aggcggugugggaacagca

SEQ ID NO: 1069396 - RNA, 19 nt, Artificial Sequence
  Description of Artificial Sequence: Synthetic oligonucleotide
gcuuggcgaccugacagcc

SEQ ID NO: 1069397 - RNA, 19 nt, Artificial Sequence
  Description of Artificial Sequence: Synthetic oligonucleotide
ggucaucgcuuggucuugg

SEQ ID NO: 1069398 - RNA, 19 nt, Artificial Sequence
  Description of Artificial Sequence: Synthetic oligonucleotide
ugcaggcgcuggcauccuc

SEQ ID NO: 1069399 - RNA, 19 nt, Artificial Sequence
  Description of Artificial Sequence: Synthetic oligonucleotide
aggcuguguccgauaagga

SEQ ID NO: 1069400 - RNA, 19 nt, Artificial Sequence
  Description of Artificial Sequence: Synthetic oligonucleotide
acccuacaaggcagggcag

SEQ ID NO: 1069401 - RNA, 19 nt, Artificial Sequence
  Description of Artificial Sequence: Synthetic oligonucleotide
gacgccggcguggggaauc

SEQ ID NO: 1069402 - RNA, 19 nt, Artificial Sequence
  Description of Artificial Sequence: Synthetic oligonucleotide
gcgaccugacagcccacag

SEQ ID NO: 1069403 - RNA, 19 nt, Artificial Sequence
  Description of Artificial Sequence: Synthetic oligonucleotide
ggaacagcacugacguguc

SEQ ID NO: 1069404 - RNA, 19 nt, Artificial Sequence
  Description of Artificial Sequence: Synthetic oligonucleotide
cugagaaccugguguugua

SEQ ID NO: 1069405 - RNA, 19 nt, Artificial Sequence
  Description of Artificial Sequence: Synthetic oligonucleotide
agucagcuguuguguuuua

SEQ ID NO: 1069406 - RNA, 19 nt, Artificial Sequence
  Description of Artificial Sequence: Synthetic oligonucleotide
augaucugucugagguagu

SEQ ID NO: 1069407 - RNA, 19 nt, Artificial Sequence
  Description of Artificial Sequence: Synthetic oligonucleotide
ggacacaacccugcggcca

SEQ ID NO: 1069408 - RNA, 19 nt, Artificial Sequence
  Description of Artificial Sequence: Synthetic oligonucleotide
ggcuguguccgauaaggau

SEQ ID NO: 1069409 - RNA, 19 nt, Artificial Sequence
  Description of Artificial Sequence: Synthetic oligonucleotide
ccagaccuguagcccaagc

SEQ ID NO: 1069410 - RNA, 19 nt, Artificial Sequence
  Description of Artificial Sequence: Synthetic oligonucleotide
ccuacaaggcagggcagac

SEQ ID NO: 1069411 - RNA, 19 nt, Artificial Sequence
  Description of Artificial Sequence: Synthetic oligonucleotide
acaacccgucucaaaccau

SEQ ID NO: 1069412 - RNA, 19 nt, Artificial Sequence
  Description of Artificial Sequence: Synthetic oligonucleotide
cacaacccugcggccacug

SEQ ID NO: 1069413 - RNA, 19 nt, Artificial Sequence
  Description of Artificial Sequence: Synthetic oligonucleotide
ggaggaguccuugggcuuc

SEQ ID NO: 1069414 - RNA, 19 nt, Artificial Sequence
  Description of Artificial Sequence: Synthetic oligonucleotide
gugccacagcgacagcaaa

SEQ ID NO: 1069415 - RNA, 19 nt, Artificial Sequence
  Description of Artificial Sequence: Synthetic oligonucleotide
guacucccugagacggcug

SEQ ID NO: 1069416 - RNA, 19 nt, Artificial Sequence
  Description of Artificial Sequence: Synthetic oligonucleotide
cagagccgacugcagcuga

SEQ ID NO: 1069417 - RNA, 19 nt, Artificial Sequence
  Description of Artificial Sequence: Synthetic oligonucleotide
gagugagcagguacucccu

SEQ ID NO: 1069418 - RNA, 19 nt, Artificial Sequence
  Description of Artificial Sequence: Synthetic oligonucleotide
ggaagacgccggcgugggg

SEQ ID NO: 1069419 - RNA, 19 nt, Artificial Sequence
  Description of Artificial Sequence: Synthetic oligonucleotide
ggcggugugggaacagcac

SEQ ID NO: 1069420 - RNA, 19 nt, Artificial Sequence
  Description of Artificial Sequence: Synthetic oligonucleotide
ggucucagccccagcucag

SEQ ID NO: 1069421 - RNA, 19 nt, Artificial Sequence
  Description of Artificial Sequence: Synthetic oligonucleotide
cagggauggaccccucugu

SEQ ID NO: 1069422 - RNA, 19 nt, Artificial Sequence
  Description of Artificial Sequence: Synthetic oligonucleotide
gguuggucucagccccagc

SEQ ID NO: 1069423 - RNA, 19 nt, Artificial Sequence
  Description of Artificial Sequence: Synthetic oligonucleotide
ucguguccacaaggucggc

SEQ ID NO: 1069424 - RNA, 19 nt, Artificial Sequence
  Description of Artificial Sequence: Synthetic oligonucleotide
cuaccaccgugcuauggau

SEQ ID NO: 1069425 - RNA, 19 nt, Artificial Sequence
  Description of Artificial Sequence: Synthetic oligonucleotide
gugugacacucguguccac

SEQ ID NO: 1069426 - RNA, 19 nt, Artificial Sequence
  Description of Artificial Sequence: Synthetic oligonucleotide
gccacccuacaaggcaggg

SEQ ID NO: 1069427 - RNA, 19 nt, Artificial Sequence
  Description of Artificial Sequence: Synthetic oligonucleotide
uggcgaccugacagcccac

SEQ ID NO: 1069428 - RNA, 19 nt, Artificial Sequence
  Description of Artificial Sequence: Synthetic oligonucleotide
gucccgcagugugacacuc

SEQ ID NO: 1069429 - RNA, 19 nt, Artificial Sequence
  Description of Artificial Sequence: Synthetic oligonucleotide
cugucgccugcauuauaua

SEQ ID NO: 1069430 - RNA, 19 nt, Artificial Sequence
  Description of Artificial Sequence: Synthetic oligonucleotide
gcaugcaggcgcuggcauc

SEQ ID NO: 1069431 - RNA, 19 nt, Artificial Sequence
  Description of Artificial Sequence: Synthetic oligonucleotide
gguccuaccugguccccaa

SEQ ID NO: 1069432 - RNA, 19 nt, Artificial Sequence
  Description of Artificial Sequence: Synthetic oligonucleotide
agccguccccagugguagu

SEQ ID NO: 1069433 - RNA, 19 nt, Artificial Sequence
  Description of Artificial Sequence: Synthetic oligonucleotide
agacggcuguacagggcgu

SEQ ID NO: 1069434 - RNA, 19 nt, Artificial Sequence
  Description of Artificial Sequence: Synthetic oligonucleotide
agucggccaugagguuccg

SEQ ID NO: 1069435 - RNA, 19 nt, Artificial Sequence
  Description of Artificial Sequence: Synthetic oligonucleotide
cgcagugugacacucgugu

SEQ ID NO: 1069436 - RNA, 19 nt, Artificial Sequence
  Description of Artificial Sequence: Synthetic oligonucleotide
gugacucgggucagcucca

SEQ ID NO: 1069437 - RNA, 19 nt, Artificial Sequence
  Description of Artificial Sequence: Synthetic oligonucleotide
gggucaucgcuuggucuug

SEQ ID NO: 1069438 - RNA, 19 nt, Artificial Sequence
  Description of Artificial Sequence: Synthetic oligonucleotide
ccacccuacaaggcagggc

SEQ ID NO: 1069439 - RNA, 19 nt, Artificial Sequence
  Description of Artificial Sequence: Synthetic oligonucleotide
gcggugugggaacagcacu

SEQ ID NO: 1069440 - RNA, 19 nt, Artificial Sequence
  Description of Artificial Sequence: Synthetic oligonucleotide
gguacucccugagacggcu

SEQ ID NO: 1069441 - RNA, 19 nt, Artificial Sequence
  Description of Artificial Sequence: Synthetic oligonucleotide
gcccgggaggcgcacaguc

SEQ ID NO: 1069442 - RNA, 19 nt, Artificial Sequence
  Description of Artificial Sequence: Synthetic oligonucleotide
ccugucgccugcauuauau

SEQ ID NO: 1069443 - RNA, 19 nt, Artificial Sequence
  Description of Artificial Sequence: Synthetic oligonucleotide
ccaggcuguguccgauaag

SEQ ID NO: 1069444 - RNA, 19 nt, Artificial Sequence
  Description of Artificial Sequence: Synthetic oligonucleotide
acuccucauugcgcacgca

SEQ ID NO: 1069445 - RNA, 19 nt, Artificial Sequence
  Description of Artificial Sequence: Synthetic oligonucleotide
gucggccaugagguuccgc

SEQ ID NO: 1069446 - RNA, 19 nt, Artificial Sequence
  Description of Artificial Sequence: Synthetic oligonucleotide
gcaggcgcuggcauccuca

SEQ ID NO: 1069447 - RNA, 19 nt, Artificial Sequence
  Description of Artificial Sequence: Synthetic oligonucleotide
gcguggggaaucuucuggu

SEQ ID NO: 1069448 - RNA, 19 nt, Artificial Sequence
  Description of Artificial Sequence: Synthetic oligonucleotide
accccucuguugaggggcu

SEQ ID NO: 1069449 - RNA, 19 nt, Artificial Sequence
  Description of Artificial Sequence: Synthetic oligonucleotide
cauccacauugucuuggau

SEQ ID NO: 1069450 - RNA, 19 nt, Artificial Sequence
  Description of Artificial Sequence: Synthetic oligonucleotide
gccggcguggggaaucuuc

SEQ ID NO: 1069451 - RNA, 19 nt, Artificial Sequence
  Description of Artificial Sequence: Synthetic oligonucleotide
caccagggauggaccccuc

SEQ ID NO: 1069452 - RNA, 19 nt, Artificial Sequence
  Description of Artificial Sequence: Synthetic oligonucleotide
ggcgcacagucagcuguug

SEQ ID NO: 1069453 - RNA, 19 nt, Artificial Sequence
  Description of Artificial Sequence: Synthetic oligonucleotide
guguuguagucgacaacuu

SEQ ID NO: 1069454 - RNA, 19 nt, Artificial Sequence
  Description of Artificial Sequence: Synthetic oligonucleotide
cugucaccccugagaaccu

SEQ ID NO: 1069455 - RNA, 19 nt, Artificial Sequence
  Description of Artificial Sequence: Synthetic oligonucleotide
cguccccagugguaguaac

SEQ ID NO: 1069456 - RNA, 19 nt, Artificial Sequence
  Description of Artificial Sequence: Synthetic oligonucleotide
gaggaguccuugggcuucu

SEQ ID NO: 1069457 - RNA, 19 nt, Artificial Sequence
  Description of Artificial Sequence: Synthetic oligonucleotide
ggugggagggucaucgcuu

SEQ ID NO: 1069458 - RNA, 19 nt, Artificial Sequence
  Description of Artificial Sequence: Synthetic oligonucleotide
ggcgaccugacagcccaca

SEQ ID NO: 1069459 - RNA, 19 nt, Artificial Sequence
  Description of Artificial Sequence: Synthetic oligonucleotide
cuggugaguugggaugagu

SEQ ID NO: 1069460 - RNA, 19 nt, Artificial Sequence
  Description of Artificial Sequence: Synthetic oligonucleotide
acgccggcguggggaaucu

SEQ ID NO: 1069461 - RNA, 19 nt, Artificial Sequence
  Description of Artificial Sequence: Synthetic oligonucleotide
ccuggugaguugggaugag

SEQ ID NO: 1069462 - RNA, 19 nt, Artificial Sequence
  Description of Artificial Sequence: Synthetic oligonucleotide
cccacggagagaggcagca

SEQ ID NO: 1069463 - RNA, 19 nt, Artificial Sequence
  Description of Artificial Sequence: Synthetic oligonucleotide
cacgucccgcagugugaca

SEQ ID NO: 1069464 - RNA, 19 nt, Artificial Sequence
  Description of Artificial Sequence: Synthetic oligonucleotide
ccgcagugugacacucgug

SEQ ID NO: 1069465 - RNA, 19 nt, Artificial Sequence
  Description of Artificial Sequence: Synthetic oligonucleotide
cccugagaaccugguguug

SEQ ID NO: 1069466 - RNA, 19 nt, Artificial Sequence
  Description of Artificial Sequence: Synthetic oligonucleotide
augcaggcgcuggcauccu

SEQ ID NO: 1069467 - RNA, 19 nt, Artificial Sequence
  Description of Artificial Sequence: Synthetic oligonucleotide
gacggcuguacagggcguu

SEQ ID NO: 1069468 - RNA, 19 nt, Artificial Sequence
  Description of Artificial Sequence: Synthetic oligonucleotide
cugacgugucuaccaccgu

SEQ ID NO: 1069469 - RNA, 19 nt, Artificial Sequence
  Description of Artificial Sequence: Synthetic oligonucleotide
ggagcgcuuguagggcaga

SEQ ID NO: 1069470 - RNA, 19 nt, Artificial Sequence
  Description of Artificial Sequence: Synthetic oligonucleotide
cccuacaaggcagggcaga

SEQ ID NO: 1069471 - RNA, 19 nt, Artificial Sequence
  Description of Artificial Sequence: Synthetic oligonucleotide
cagcggccugaggaggaca

SEQ ID NO: 1069472 - RNA, 19 nt, Artificial Sequence
  Description of Artificial Sequence: Synthetic oligonucleotide
cuggggcggcucagugaga

SEQ ID NO: 1069473 - RNA, 19 nt, Artificial Sequence
  Description of Artificial Sequence: Synthetic oligonucleotide
cgggaggcgcacagucagc

SEQ ID NO: 1069474 - RNA, 19 nt, Artificial Sequence
  Description of Artificial Sequence: Synthetic oligonucleotide
cccgggaggcgcacaguca

SEQ ID NO: 1069475 - RNA, 19 nt, Artificial Sequence
  Description of Artificial Sequence: Synthetic oligonucleotide
cccgcagugugacacucgu

SEQ ID NO: 1069476 - RNA, 19 nt, Artificial Sequence
  Description of Artificial Sequence: Synthetic oligonucleotide
gcagccguccccaguggua

SEQ ID NO: 1069477 - RNA, 19 nt, Artificial Sequence
  Description of Artificial Sequence: Synthetic oligonucleotide
gccacucgguuccgccgca

SEQ ID NO: 1069478 - RNA, 19 nt, Artificial Sequence
  Description of Artificial Sequence: Synthetic oligonucleotide
ccaccucgugggacacaac

SEQ ID NO: 1069479 - RNA, 19 nt, Artificial Sequence
  Description of Artificial Sequence: Synthetic oligonucleotide
gcaagacggccugcacguc

SEQ ID NO: 1069480 - RNA, 19 nt, Artificial Sequence
  Description of Artificial Sequence: Synthetic oligonucleotide
ccggcguggggaaucuucu

SEQ ID NO: 1069481 - RNA, 19 nt, Artificial Sequence
  Description of Artificial Sequence: Synthetic oligonucleotide
agacgccggcguggggaau

SEQ ID NO: 1069482 - RNA, 19 nt, Artificial Sequence
  Description of Artificial Sequence: Synthetic oligonucleotide
guccugucgccugcauuau

SEQ ID NO: 1069483 - RNA, 19 nt, Artificial Sequence
  Description of Artificial Sequence: Synthetic oligonucleotide
cuccacccgugggcugcug

SEQ ID NO: 1069484 - RNA, 19 nt, Artificial Sequence
  Description of Artificial Sequence: Synthetic oligonucleotide
cguacacgaccugcauauc

SEQ ID NO: 1069485 - RNA, 19 nt, Artificial Sequence
  Description of Artificial Sequence: Synthetic oligonucleotide
ccacucgguuccgccgcag

SEQ ID NO: 1069486 - RNA, 19 nt, Artificial Sequence
  Description of Artificial Sequence: Synthetic oligonucleotide
cgcagcggccugaggagga

SEQ ID NO: 1069487 - RNA, 19 nt, Artificial Sequence
  Description of Artificial Sequence: Synthetic oligonucleotide
cccaagcccgggaggcgca

SEQ ID NO: 1069488 - RNA, 19 nt, Artificial Sequence
  Description of Artificial Sequence: Synthetic oligonucleotide
gccguccccagugguagua

SEQ ID NO: 1069489 - RNA, 19 nt, Artificial Sequence
  Description of Artificial Sequence: Synthetic oligonucleotide
ccccugagaaccugguguu

SEQ ID NO: 1069490 - RNA, 19 nt, Artificial Sequence
  Description of Artificial Sequence: Synthetic oligonucleotide
ccccagugguaguaacacu

SEQ ID NO: 1069491 - RNA, 19 nt, Artificial Sequence
  Description of Artificial Sequence: Synthetic oligonucleotide
ccacgacugugacucgggu

SEQ ID NO: 1069492 - RNA, 19 nt, Artificial Sequence
  Description of Artificial Sequence: Synthetic oligonucleotide
gcggccugaggaggacaca

SEQ ID NO: 1069493 - RNA, 19 nt, Artificial Sequence
  Description of Artificial Sequence: Synthetic oligonucleotide
gcacgguguuggggaccag

SEQ ID NO: 1069494 - RNA, 19 nt, Artificial Sequence
  Description of Artificial Sequence: Synthetic oligonucleotide
gcaucagggccgagggcau

SEQ ID NO: 1069495 - RNA, 19 nt, Artificial Sequence
  Description of Artificial Sequence: Synthetic oligonucleotide
cccaggcggugugggaaca

SEQ ID NO: 1069496 - RNA, 19 nt, Artificial Sequence
  Description of Artificial Sequence: Synthetic oligonucleotide
gggucagcuccaggccaua

SEQ ID NO: 1069497 - RNA, 19 nt, Artificial Sequence
  Description of Artificial Sequence: Synthetic oligonucleotide
ccguccccagugguaguaa

SEQ ID NO: 1069498 - RNA, 19 nt, Artificial Sequence
  Description of Artificial Sequence: Synthetic oligonucleotide
cgucccgcagugugacacu

SEQ ID NO: 1069499 - RNA, 19 nt, Artificial Sequence
  Description of Artificial Sequence: Synthetic oligonucleotide
ccacauugucuuggaugau

SEQ ID NO: 1069500 - RNA, 19 nt, Artificial Sequence
  Description of Artificial Sequence: Synthetic oligonucleotide
cgcagccguccccaguggu

SEQ ID NO: 1069501 - RNA, 19 nt, Artificial Sequence
  Description of Artificial Sequence: Synthetic oligonucleotide
cgccggcguggggaaucuu

SEQ ID NO: 1069502 - RNA, 19 nt, Artificial Sequence
  Description of Artificial Sequence: Synthetic oligonucleotide
aaucucaucguccucaggg

SEQ ID NO: 1069503 - RNA, 19 nt, Artificial Sequence
  Description of Artificial Sequence: Synthetic oligonucleotide
ucaaauauacagcugcugg

SEQ ID NO: 1069504 - RNA, 19 nt, Artificial Sequence
  Description of Artificial Sequence: Synthetic oligonucleotide
aucauggcgacucagauuc

SEQ ID NO: 1069505 - RNA, 19 nt, Artificial Sequence
  Description of Artificial Sequence: Synthetic oligonucleotide
auaaauaagaauugaugag

SEQ ID NO: 1069506 - RNA, 19 nt, Artificial Sequence
  Description of Artificial Sequence: Synthetic oligonucleotide
aacggaaauaaauaggagu

SEQ ID NO: 1069507 - RNA, 19 nt, Artificial Sequence
  Description of Artificial Sequence: Synthetic oligonucleotide
acauuugcaggcuagugcc

SEQ ID NO: 1069508 - RNA, 19 nt, Artificial Sequence
  Description of Artificial Sequence: Synthetic oligonucleotide
uuggauuuguugaagaucu

SEQ ID NO: 1069509 - RNA, 19 nt, Artificial Sequence
  Description of Artificial Sequence: Synthetic oligonucleotide
aagaaucugggcaucagcc

SEQ ID NO: 1069510 - RNA, 19 nt, Artificial Sequence
  Description of Artificial Sequence: Synthetic oligonucleotide
aaaguguuggccaacacag

SEQ ID NO: 1069511 - RNA, 19 nt, Artificial Sequence
  Description of Artificial Sequence: Synthetic oligonucleotide
uaaagugcaaggacaaucc

SEQ ID NO: 1069512 - RNA, 19 nt, Artificial Sequence
  Description of Artificial Sequence: Synthetic oligonucleotide
ucuaguuuggccuggaacu

SEQ ID NO: 1069513 - RNA, 19 nt, Artificial Sequence
  Description of Artificial Sequence: Synthetic oligonucleotide
ugaauaaacucaaaauuau

SEQ ID NO: 1069514 - RNA, 19 nt, Artificial Sequence
  Description of Artificial Sequence: Synthetic oligonucleotide
auuucuacucccuggacuc

SEQ ID NO: 1069515 - RNA, 19 nt, Artificial Sequence
  Description of Artificial Sequence: Synthetic oligonucleotide
acagguaaagugcaaggac

SEQ ID NO: 1069516 - RNA, 19 nt, Artificial Sequence
  Description of Artificial Sequence: Synthetic oligonucleotide
aagcauaucauggcgacuc

SEQ ID NO: 1069517 - RNA, 19 nt, Artificial Sequence
  Description of Artificial Sequence: Synthetic oligonucleotide
cucaugaccaccauuucgg

SEQ ID NO: 1069518 - RNA, 19 nt, Artificial Sequence
  Description of Artificial Sequence: Synthetic oligonucleotide
uucucuacaggaaugauuu

SEQ ID NO: 1069519 - RNA, 19 nt, Artificial Sequence
  Description of Artificial Sequence: Synthetic oligonucleotide
agacaacggaaauaaauag

SEQ ID NO: 1069520 - RNA, 19 nt, Artificial Sequence
  Description of Artificial Sequence: Synthetic oligonucleotide
gaaguuguggauguauucg

SEQ ID NO: 1069521 - RNA, 19 nt, Artificial Sequence
  Description of Artificial Sequence: Synthetic oligonucleotide
aguuucuuggauuuguuga

SEQ ID NO: 1069522 - RNA, 19 nt, Artificial Sequence
  Description of Artificial Sequence: Synthetic oligonucleotide
aagaauugaugaguccugc

SEQ ID NO: 1069523 - RNA, 19 nt, Artificial Sequence
  Description of Artificial Sequence: Synthetic oligonucleotide
gaacagguaaagugcaagg

SEQ ID NO: 1069524 - RNA, 19 nt, Artificial Sequence
  Description of Artificial Sequence: Synthetic oligonucleotide
  modified_base (8)..(8): a, c, u, g, unknown or other
uaaacccngugccaggagg

SEQ ID NO: 1069525 - RNA, 19 nt, Artificial Sequence
  Description of Artificial Sequence: Synthetic oligonucleotide
gacaacggaaauaaauagg

SEQ ID NO: 1069526 - RNA, 19 nt, Artificial Sequence
  Description of Artificial Sequence: Synthetic oligonucleotide
gguauaaccaggcugcagg

SEQ ID NO: 1069527 - RNA, 19 nt, Artificial Sequence
  Description of Artificial Sequence: Synthetic oligonucleotide
agaauugaugaguccugcc

SEQ ID NO: 1069528 - RNA, 19 nt, Artificial Sequence
  Description of Artificial Sequence: Synthetic oligonucleotide
aggcuagugcccuaggggc

SEQ ID NO: 1069529 - RNA, 19 nt, Artificial Sequence
  Description of Artificial Sequence: Synthetic oligonucleotide
uccaccgucagcuucaagu

SEQ ID NO: 1069530 - RNA, 19 nt, Artificial Sequence
  Description of Artificial Sequence: Synthetic oligonucleotide
guauucguguucuaguuug

SEQ ID NO: 1069531 - RNA, 19 nt, Artificial Sequence
  Description of Artificial Sequence: Synthetic oligonucleotide
aagucaagagacaaaauaa

SEQ ID NO: 1069532 - RNA, 19 nt, Artificial Sequence
  Description of Artificial Sequence: Synthetic oligonucleotide
aaaauuaucuuggaauuuu

SEQ ID NO: 1069533 - RNA, 19 nt, Artificial Sequence
  Description of Artificial Sequence: Synthetic oligonucleotide
  modified_base (19)..(19): a, c, u, g, unknown or other
uuugggguggguaaacccn

SEQ ID NO: 1069534 - RNA, 19 nt, Artificial Sequence
  Description of Artificial Sequence: Synthetic oligonucleotide
acggaaauaaauaggagug

SEQ ID NO: 1069535 - RNA, 19 nt, Artificial Sequence
  Description of Artificial Sequence: Synthetic oligonucleotide
caugcaagcauaucauggc

SEQ ID NO: 1069536 - RNA, 19 nt, Artificial Sequence
  Description of Artificial Sequence: Synthetic oligonucleotide
uucuaguuuggccuggaac

SEQ ID NO: 1069537 - RNA, 19 nt, Artificial Sequence
  Description of Artificial Sequence: Synthetic oligonucleotide
acaacggaaauaaauagga

SEQ ID NO: 1069538 - RNA, 19 nt, Artificial Sequence
  Description of Artificial Sequence: Synthetic oligonucleotide
uaguuugcgucaaagaauu

SEQ ID NO: 1069539 - RNA, 19 nt, Artificial Sequence
  Description of Artificial Sequence: Synthetic oligonucleotide
ucguguucuaguuuggccu

SEQ ID NO: 1069540 - RNA, 19 nt, Artificial Sequence
  Description of Artificial Sequence: Synthetic oligonucleotide
aaguuguggauguauucgu

SEQ ID NO: 1069541 - RNA, 19 nt, Artificial Sequence
  Description of Artificial Sequence: Synthetic oligonucleotide
auuuugucgacaccccauc

SEQ ID NO: 1069542 - RNA, 19 nt, Artificial Sequence
  Description of Artificial Sequence: Synthetic oligonucleotide
agcuguucgaucuugguau

SEQ ID NO: 1069543 - RNA, 19 nt, Artificial Sequence
  Description of Artificial Sequence: Synthetic oligonucleotide
cacagcauagagacaacgg

SEQ ID NO: 1069544 - RNA, 19 nt, Artificial Sequence
  Description of Artificial Sequence: Synthetic oligonucleotide
ggaaauaaauaggaguggg

SEQ ID NO: 1069545 - RNA, 19 nt, Artificial Sequence
  Description of Artificial Sequence: Synthetic oligonucleotide
ucauaguuugcgucaaaga

SEQ ID NO: 1069546 - RNA, 19 nt, Artificial Sequence
  Description of Artificial Sequence: Synthetic oligonucleotide
cccucaacuaccaagagag

SEQ ID NO: 1069547 - RNA, 19 nt, Artificial Sequence
  Description of Artificial Sequence: Synthetic oligonucleotide
ugcaaaucccuccucggug

SEQ ID NO: 1069548 - RNA, 19 nt, Artificial Sequence
  Description of Artificial Sequence: Synthetic oligonucleotide
gaucuugguauaguugagg

SEQ ID NO: 1069549 - RNA, 19 nt, Artificial Sequence
  Description of Artificial Sequence: Synthetic oligonucleotide
cuuucacuaauuucucuac

SEQ ID NO: 1069550 - RNA, 19 nt, Artificial Sequence
  Description of Artificial Sequence: Synthetic oligonucleotide
gagucauugacccaugcaa

SEQ ID NO: 1069551 - RNA, 19 nt, Artificial Sequence
  Description of Artificial Sequence: Synthetic oligonucleotide
uauucguguucuaguuugg

SEQ ID NO: 1069552 - RNA, 19 nt, Artificial Sequence
  Description of Artificial Sequence: Synthetic oligonucleotide
  modified_base (14)..(14): a, c, u, g, unknown or other
gguggguaaacccngugcc

SEQ ID NO: 1069553 - RNA, 19 nt, Artificial Sequence
  Description of Artificial Sequence: Synthetic oligonucleotide
acgcaauuugcugaaauag

SEQ ID NO: 1069554 - RNA, 19 nt, Artificial Sequence
  Description of Artificial Sequence: Synthetic oligonucleotide
ugcaagcauaucauggcga

SEQ ID NO: 1069555 - RNA, 19 nt, Artificial Sequence
  Description of Artificial Sequence: Synthetic oligonucleotide
aagugcaaggacaauccag

SEQ ID NO: 1069556 - RNA, 19 nt, Artificial Sequence
  Description of Artificial Sequence: Synthetic oligonucleotide
aggguuguaauccuuucca

SEQ ID NO: 1069557 - RNA, 19 nt, Artificial Sequence
  Description of Artificial Sequence: Synthetic oligonucleotide
cauaguuugcgucaaagaa

SEQ ID NO: 1069558 - RNA, 19 nt, Artificial Sequence
  Description of Artificial Sequence: Synthetic oligonucleotide
aggacaauccaguaaguaa

SEQ ID NO: 1069559 - RNA, 19 nt, Artificial Sequence
  Description of Artificial Sequence: Synthetic oligonucleotide
ugucaaauauacagcugcu

SEQ ID NO: 1069560 - RNA, 19 nt, Artificial Sequence
  Description of Artificial Sequence: Synthetic oligonucleotide
aaagugcaaggacaaucca

SEQ ID NO: 1069561 - RNA, 19 nt, Artificial Sequence
  Description of Artificial Sequence: Synthetic oligonucleotide
uggugcuacguccuggccc

SEQ ID NO: 1069562 - RNA, 19 nt, Artificial Sequence
  Description of Artificial Sequence: Synthetic oligonucleotide
ugauuuugucgacacccca

SEQ ID NO: 1069563 - RNA, 19 nt, Artificial Sequence
  Description of Artificial Sequence: Synthetic oligonucleotide
aaugccaaugaugccugag

SEQ ID NO: 1069564 - RNA, 19 nt, Artificial Sequence
  Description of Artificial Sequence: Synthetic oligonucleotide
accauuucgggcugauggg

SEQ ID NO: 1069565 - RNA, 19 nt, Artificial Sequence
  Description of Artificial Sequence: Synthetic oligonucleotide
ucaugaccaccauuucggg

SEQ ID NO: 1069566 - RNA, 19 nt, Artificial Sequence
  Description of Artificial Sequence: Synthetic oligonucleotide
cucgguggcauagagaaug

SEQ ID NO: 1069567 - RNA, 19 nt, Artificial Sequence
  Description of Artificial Sequence: Synthetic oligonucleotide
caacggaaauaaauaggag

SEQ ID NO: 1069568 - RNA, 19 nt, Artificial Sequence
  Description of Artificial Sequence: Synthetic oligonucleotide
uuguugaagaucugaucac

SEQ ID NO: 1069569 - RNA, 19 nt, Artificial Sequence
  Description of Artificial Sequence: Synthetic oligonucleotide
augucacgcaauuugcuga

SEQ ID NO: 1069570 - RNA, 19 nt, Artificial Sequence
  Description of Artificial Sequence: Synthetic oligonucleotide
cugugugguauaaccaggc

SEQ ID NO: 1069571 - RNA, 19 nt, Artificial Sequence
  Description of Artificial Sequence: Synthetic oligonucleotide
ucuuggaauuuuccuuuca

SEQ ID NO: 1069572 - RNA, 19 nt, Artificial Sequence
  Description of Artificial Sequence: Synthetic oligonucleotide
ccaugcaagcauaucaugg

SEQ ID NO: 1069573 - RNA, 19 nt, Artificial Sequence
  Description of Artificial Sequence: Synthetic oligonucleotide
ugacuuugucaaauauaca

SEQ ID NO: 1069574 - RNA, 19 nt, Artificial Sequence
  Description of Artificial Sequence: Synthetic oligonucleotide
auaucauggcgacucagau

SEQ ID NO: 1069575 - RNA, 19 nt, Artificial Sequence
  Description of Artificial Sequence: Synthetic oligonucleotide
gcuuucauguuccuggcag

SEQ ID NO: 1069576 - RNA, 19 nt, Artificial Sequence
  Description of Artificial Sequence: Synthetic oligonucleotide
auauaccaaugacuuuguc

SEQ ID NO: 1069577 - RNA, 19 nt, Artificial Sequence
  Description of Artificial Sequence: Synthetic oligonucleotide
acaaccagggaagagcaug

SEQ ID NO: 1069578 - RNA, 19 nt, Artificial Sequence
  Description of Artificial Sequence: Synthetic oligonucleotide
gagacaacggaaauaaaua

SEQ ID NO: 1069579 - RNA, 19 nt, Artificial Sequence
  Description of Artificial Sequence: Synthetic oligonucleotide
ucugcggaacugcugugcc

SEQ ID NO: 1069580 - RNA, 19 nt, Artificial Sequence
  Description of Artificial Sequence: Synthetic oligonucleotide
cagguaaagugcaaggaca

SEQ ID NO: 1069581 - RNA, 19 nt, Artificial Sequence
  Description of Artificial Sequence: Synthetic oligonucleotide
gauguauucguguucuagu

SEQ ID NO: 1069582 - RNA, 19 nt, Artificial Sequence
  Description of Artificial Sequence: Synthetic oligonucleotide
ugcgucaaagaauuucuua

SEQ ID NO: 1069583 - RNA, 19 nt, Artificial Sequence
  Description of Artificial Sequence: Synthetic oligonucleotide
uguauucguguucuaguuu

SEQ ID NO: 1069584 - RNA, 19 nt, Artificial Sequence
  Description of Artificial Sequence: Synthetic oligonucleotide
uuuugucgacaccccaucu

SEQ ID NO: 1069585 - RNA, 19 nt, Artificial Sequence
  Description of Artificial Sequence: Synthetic oligonucleotide
acacagcauagagacaacg

SEQ ID NO: 1069586 - RNA, 19 nt, Artificial Sequence
  Description of Artificial Sequence: Synthetic oligonucleotide
ucagauucucacuggucac

SEQ ID NO: 1069587 - RNA, 19 nt, Artificial Sequence
  Description of Artificial Sequence: Synthetic oligonucleotide
aagaucugaucaccugggu

SEQ ID NO: 1069588 - RNA, 19 nt, Artificial Sequence
  Description of Artificial Sequence: Synthetic oligonucleotide
gaucagcucgaugucacgc

SEQ ID NO: 1069589 - RNA, 19 nt, Artificial Sequence
  Description of Artificial Sequence: Synthetic oligonucleotide
ucacgcaauuugcugaaau

SEQ ID NO: 1069590 - RNA, 19 nt, Artificial Sequence
  Description of Artificial Sequence: Synthetic oligonucleotide
  modified_base (7)..(7): a, c, u, g, unknown or other
aaacccngugccaggaggu

SEQ ID NO: 1069591 - RNA, 19 nt, Artificial Sequence
  Description of Artificial Sequence: Synthetic oligonucleotide
gaacacauuugcaggcuag

SEQ ID NO: 1069592 - RNA, 19 nt, Artificial Sequence
  Description of Artificial Sequence: Synthetic oligonucleotide
caugaccaccauuucgggc

SEQ ID NO: 1069593 - RNA, 19 nt, Artificial Sequence
  Description of Artificial Sequence: Synthetic oligonucleotide
gguauaguugaggugcagg

SEQ ID NO: 1069594 - RNA, 19 nt, Artificial Sequence
  Description of Artificial Sequence: Synthetic oligonucleotide
ggauagggagccuuggggc

SEQ ID NO: 1069595 - RNA, 19 nt, Artificial Sequence
  Description of Artificial Sequence: Synthetic oligonucleotide
gauagggagccuuggggca

SEQ ID NO: 1069596 - RNA, 19 nt, Artificial Sequence
  Description of Artificial Sequence: Synthetic oligonucleotide
uacguccuggcccugccgc

SEQ ID NO: 1069597 - RNA, 19 nt, Artificial Sequence
  Description of Artificial Sequence: Synthetic oligonucleotide
gaacagagcuguucgaucu

SEQ ID NO: 1069598 - RNA, 19 nt, Artificial Sequence
  Description of Artificial Sequence: Synthetic oligonucleotide
uauaaccaggcugcaggag

SEQ ID NO: 1069599 - RNA, 19 nt, Artificial Sequence
  Description of Artificial Sequence: Synthetic oligonucleotide
ucaagaaucugggcaucag

SEQ ID NO: 1069600 - RNA, 19 nt, Artificial Sequence
  Description of Artificial Sequence: Synthetic oligonucleotide
uuugucgacaccccaucuu

SEQ ID NO: 1069601 - RNA, 19 nt, Artificial Sequence
  Description of Artificial Sequence: Synthetic oligonucleotide
agucaagagacaaaauaaa

SEQ ID NO: 1069602 - RNA, 19 nt, Artificial Sequence
  Description of Artificial Sequence: Synthetic oligonucleotide
cagaucagcucgaugucac

SEQ ID NO: 1069603 - RNA, 19 nt, Artificial Sequence
  Description of Artificial Sequence: Synthetic oligonucleotide
gcaaaucccuccucggugg

SEQ ID NO: 1069604 - RNA, 19 nt, Artificial Sequence
  Description of Artificial Sequence: Synthetic oligonucleotide
agaucagcucgaugucacg

SEQ ID NO: 1069605 - RNA, 19 nt, Artificial Sequence
  Description of Artificial Sequence: Synthetic oligonucleotide
agauucucacuggucacag

SEQ ID NO: 1069606 - RNA, 19 nt, Artificial Sequence
  Description of Artificial Sequence: Synthetic oligonucleotide
agaucugaucaccuggguu

SEQ ID NO: 1069607 - RNA, 19 nt, Artificial Sequence
  Description of Artificial Sequence: Synthetic oligonucleotide
ucgacaccccaucuucuug

SEQ ID NO: 1069608 - RNA, 19 nt, Artificial Sequence
  Description of Artificial Sequence: Synthetic oligonucleotide
ccaagagagaagucaagag

SEQ ID NO: 1069609 - RNA, 19 nt, Artificial Sequence
  Description of Artificial Sequence: Synthetic oligonucleotide
aggacugcugcccucagua

SEQ ID NO: 1069610 - RNA, 19 nt, Artificial Sequence
  Description of Artificial Sequence: Synthetic oligonucleotide
agccacguugcugagucgg

SEQ ID NO: 1069611 - RNA, 19 nt, Artificial Sequence
  Description of Artificial Sequence: Synthetic oligonucleotide
ggccagugccacuugaggg

SEQ ID NO: 1069612 - RNA, 19 nt, Artificial Sequence
  Description of Artificial Sequence: Synthetic oligonucleotide
gaguggggaguggacaggg

SEQ ID NO: 1069613 - RNA, 19 nt, Artificial Sequence
  Description of Artificial Sequence: Synthetic oligonucleotide
ugucacgcaauuugcugaa

SEQ ID NO: 1069614 - RNA, 19 nt, Artificial Sequence
  Description of Artificial Sequence: Synthetic oligonucleotide
agaggcacccuggaaagug

SEQ ID NO: 1069615 - RNA, 19 nt, Artificial Sequence
  Description of Artificial Sequence: Synthetic oligonucleotide
gcggucuccggcuucaacg

SEQ ID NO: 1069616 - RNA, 19 nt, Artificial Sequence
  Description of Artificial Sequence: Synthetic oligonucleotide
ggggacagacagaaaaugg

SEQ ID NO: 1069617 - RNA, 19 nt, Artificial Sequence
  Description of Artificial Sequence: Synthetic oligonucleotide
cuaccaagagagaagucaa

SEQ ID NO: 1069618 - RNA, 19 nt, Artificial Sequence
  Description of Artificial Sequence: Synthetic oligonucleotide
ucccuggacucacagcacu

SEQ ID NO: 1069619 - RNA, 19 nt, Artificial Sequence
  Description of Artificial Sequence: Synthetic oligonucleotide
cauuugcaggcuagugccc

SEQ ID NO: 1069620 - RNA, 19 nt, Artificial Sequence
  Description of Artificial Sequence: Synthetic oligonucleotide
cucaacuaccaagagagaa

SEQ ID NO: 1069621 - RNA, 19 nt, Artificial Sequence
  Description of Artificial Sequence: Synthetic oligonucleotide
ucgguggcauagagaaugc

SEQ ID NO: 1069622 - RNA, 19 nt, Artificial Sequence
  Description of Artificial Sequence: Synthetic oligonucleotide
agaaugccaaugaugccug

SEQ ID NO: 1069623 - RNA, 19 nt, Artificial Sequence
  Description of Artificial Sequence: Synthetic oligonucleotide
ggucugcauauucuugggg

SEQ ID NO: 1069624 - RNA, 19 nt, Artificial Sequence
  Description of Artificial Sequence: Synthetic oligonucleotide
agcauagagacaacggaaa

SEQ ID NO: 1069625 - RNA, 19 nt, Artificial Sequence
  Description of Artificial Sequence: Synthetic oligonucleotide
acguccucugcggaacugc

SEQ ID NO: 1069626 - RNA, 19 nt, Artificial Sequence
  Description of Artificial Sequence: Synthetic oligonucleotide
cuuuugggguggguaaacc

SEQ ID NO: 1069627 - RNA, 19 nt, Artificial Sequence
  Description of Artificial Sequence: Synthetic oligonucleotide
ugguauaaccaggcugcag

SEQ ID NO: 1069628 - RNA, 19 nt, Artificial Sequence
  Description of Artificial Sequence: Synthetic oligonucleotide
ucggccagaggucugcaua

SEQ ID NO: 1069629 - RNA, 19 nt, Artificial Sequence
  Description of Artificial Sequence: Synthetic oligonucleotide
guauaaccaggcugcagga

SEQ ID NO: 1069630 - RNA, 19 nt, Artificial Sequence
  Description of Artificial Sequence: Synthetic oligonucleotide
ucgcuuucauguuccuggc

SEQ ID NO: 1069631 - RNA, 19 nt, Artificial Sequence
  Description of Artificial Sequence: Synthetic oligonucleotide
  modified_base (9)..(9): a, c, u, g, unknown or other
guaaacccngugccaggag

SEQ ID NO: 1069632 - RNA, 19 nt, Artificial Sequence
  Description of Artificial Sequence: Synthetic oligonucleotide
agcuguccccucaacuacc

SEQ ID NO: 1069633 - RNA, 19 nt, Artificial Sequence
  Description of Artificial Sequence: Synthetic oligonucleotide
uugacccaugcaagcauau

SEQ ID NO: 1069634 - RNA, 19 nt, Artificial Sequence
  Description of Artificial Sequence: Synthetic oligonucleotide
ucuuuugggguggguaaac

SEQ ID NO: 1069635 - RNA, 19 nt, Artificial Sequence
  Description of Artificial Sequence: Synthetic oligonucleotide
uggcgacucagauucucac

SEQ ID NO: 1069636 - RNA, 19 nt, Artificial Sequence
  Description of Artificial Sequence: Synthetic oligonucleotide
ggacaauccaguaaguaaa

SEQ ID NO: 1069637 - RNA, 19 nt, Artificial Sequence
  Description of Artificial Sequence: Synthetic oligonucleotide
  modified_base (6)..(6): a, c, u, g, unknown or other
aacccngugccaggagguc

SEQ ID NO: 1069638 - RNA, 19 nt, Artificial Sequence
  Description of Artificial Sequence: Synthetic oligonucleotide
ucuacucccuggacucaca

SEQ ID NO: 1069639 - RNA, 19 nt, Artificial Sequence
  Description of Artificial Sequence: Synthetic oligonucleotide
guuccuggcagaucagcuc

SEQ ID NO: 1069640 - RNA, 19 nt, Artificial Sequence
  Description of Artificial Sequence: Synthetic oligonucleotide
ugcauauucuuggggccug

SEQ ID NO: 1069641 - RNA, 19 nt, Artificial Sequence
  Description of Artificial Sequence: Synthetic oligonucleotide
cuacucccuggacucacag

SEQ ID NO: 1069642 - RNA, 19 nt, Artificial Sequence
  Description of Artificial Sequence: Synthetic oligonucleotide
ggagccacguugcugaguc

SEQ ID NO: 1069643 - RNA, 19 nt, Artificial Sequence
  Description of Artificial Sequence: Synthetic oligonucleotide
uacucccuggacucacagc

SEQ ID NO: 1069644 - RNA, 19 nt, Artificial Sequence
  Description of Artificial Sequence: Synthetic oligonucleotide
gcaagcauaucauggcgac

SEQ ID NO: 1069645 - RNA, 19 nt, Artificial Sequence
  Description of Artificial Sequence: Synthetic oligonucleotide
acguugcugagucggccag

SEQ ID NO: 1069646 - RNA, 19 nt, Artificial Sequence
  Description of Artificial Sequence: Synthetic oligonucleotide
gaggggacgggcggcaggg

SEQ ID NO: 1069647 - RNA, 19 nt, Artificial Sequence
  Description of Artificial Sequence: Synthetic oligonucleotide
agguaaagugcaaggacaa

SEQ ID NO: 1069648 - RNA, 19 nt, Artificial Sequence
  Description of Artificial Sequence: Synthetic oligonucleotide
gaauuggcaguaggcugcc

SEQ ID NO: 1069649 - RNA, 19 nt, Artificial Sequence
  Description of Artificial Sequence: Synthetic oligonucleotide
guggcauagagaaugccaa

SEQ ID NO: 1069650 - RNA, 19 nt, Artificial Sequence
  Description of Artificial Sequence: Synthetic oligonucleotide
aagaacagguaaagugcaa

SEQ ID NO: 1069651 - RNA, 19 nt, Artificial Sequence
  Description of Artificial Sequence: Synthetic oligonucleotide
agcucgaugucacgcaauu

SEQ ID NO: 1069652 - RNA, 19 nt, Artificial Sequence
  Description of Artificial Sequence: Synthetic oligonucleotide
  modified_base (15)..(15): a, c, u, g, unknown or other
ggguggguaaacccngugc

SEQ ID NO: 1069653 - RNA, 19 nt, Artificial Sequence
  Description of Artificial Sequence: Synthetic oligonucleotide
ugguauaguugaggugcag

SEQ ID NO: 1069654 - RNA, 19 nt, Artificial Sequence
  Description of Artificial Sequence: Synthetic oligonucleotide
auagggagccuuggggcag

SEQ ID NO: 1069655 - RNA, 19 nt, Artificial Sequence
  Description of Artificial Sequence: Synthetic oligonucleotide
caugaauuggcaguaggcu

SEQ ID NO: 1069656 - RNA, 19 nt, Artificial Sequence
  Description of Artificial Sequence: Synthetic oligonucleotide
ggaggucauuucuacuccc

SEQ ID NO: 1069657 - RNA, 19 nt, Artificial Sequence
  Description of Artificial Sequence: Synthetic oligonucleotide
ggcuguuuucgcuuucaug

SEQ ID NO: 1069658 - RNA, 19 nt, Artificial Sequence
  Description of Artificial Sequence: Synthetic oligonucleotide
agcauaucauggcgacuca

SEQ ID NO: 1069659 - RNA, 19 nt, Artificial Sequence
  Description of Artificial Sequence: Synthetic oligonucleotide
agugcccuaggggcaaagg

SEQ ID NO: 1069660 - RNA, 19 nt, Artificial Sequence
  Description of Artificial Sequence: Synthetic oligonucleotide
uuccucagguguacacaac

SEQ ID NO: 1069661 - RNA, 19 nt, Artificial Sequence
  Description of Artificial Sequence: Synthetic oligonucleotide
uggcauagagaaugccaau

SEQ ID NO: 1069662 - RNA, 19 nt, Artificial Sequence
  Description of Artificial Sequence: Synthetic oligonucleotide
gagugcgcgaggcggcucc

SEQ ID NO: 1069663 - RNA, 19 nt, Artificial Sequence
  Description of Artificial Sequence: Synthetic oligonucleotide
gacucacagcacugccucc

SEQ ID NO: 1069664 - RNA, 19 nt, Artificial Sequence
  Description of Artificial Sequence: Synthetic oligonucleotide
ugagucggccagaggucug

SEQ ID NO: 1069665 - RNA, 19 nt, Artificial Sequence
  Description of Artificial Sequence: Synthetic oligonucleotide
ugccaggaggucauuucua

SEQ ID NO: 1069666 - RNA, 19 nt, Artificial Sequence
  Description of Artificial Sequence: Synthetic oligonucleotide
uucuacucccuggacucac

SEQ ID NO: 1069667 - RNA, 19 nt, Artificial Sequence
  Description of Artificial Sequence: Synthetic oligonucleotide
cucugcggaacugcugugc

SEQ ID NO: 1069668 - RNA, 19 nt, Artificial Sequence
  Description of Artificial Sequence: Synthetic oligonucleotide
  modified_base (11)..(11): a, c, u, g, unknown or other
ggguaaacccngugccagg

SEQ ID NO: 1069669 - RNA, 19 nt, Artificial Sequence
  Description of Artificial Sequence: Synthetic oligonucleotide
gaugcaggguggagccacg

SEQ ID NO: 1069670 - RNA, 19 nt, Artificial Sequence
  Description of Artificial Sequence: Synthetic oligonucleotide
auuucucuacaggaaugau

SEQ ID NO: 1069671 - RNA, 19 nt, Artificial Sequence
  Description of Artificial Sequence: Synthetic oligonucleotide
gaguggauagggagccuug

SEQ ID NO: 1069672 - RNA, 19 nt, Artificial Sequence
  Description of Artificial Sequence: Synthetic oligonucleotide
gcccuaggggcaaaggugg

SEQ ID NO: 1069673 - RNA, 19 nt, Artificial Sequence
  Description of Artificial Sequence: Synthetic oligonucleotide
uuucuacucccuggacuca

SEQ ID NO: 1069674 - RNA, 19 nt, Artificial Sequence
  Description of Artificial Sequence: Synthetic oligonucleotide
gccaaugaugccugagaug

SEQ ID NO: 1069675 - RNA, 19 nt, Artificial Sequence
  Description of Artificial Sequence: Synthetic oligonucleotide
  modified_base (10)..(10): a, c, u, g, unknown or other
gguaaacccngugccagga

SEQ ID NO: 1069676 - RNA, 19 nt, Artificial Sequence
  Description of Artificial Sequence: Synthetic oligonucleotide
agguggugcuacguccugg

SEQ ID NO: 1069677 - RNA, 19 nt, Artificial Sequence
  Description of Artificial Sequence: Synthetic oligonucleotide
gcuagagggaaggggagcc

SEQ ID NO: 1069678 - RNA, 19 nt, Artificial Sequence
  Description of Artificial Sequence: Synthetic oligonucleotide
ggagucauugacccaugca

SEQ ID NO: 1069679 - RNA, 19 nt, Artificial Sequence
  Description of Artificial Sequence: Synthetic oligonucleotide
aaaucccuccucgguggca

SEQ ID NO: 1069680 - RNA, 19 nt, Artificial Sequence
  Description of Artificial Sequence: Synthetic oligonucleotide
cacgcaauuugcugaaaua

SEQ ID NO: 1069681 - RNA, 19 nt, Artificial Sequence
  Description of Artificial Sequence: Synthetic oligonucleotide
cauccucucaccugcccca

SEQ ID NO: 1069682 - RNA, 19 nt, Artificial Sequence
  Description of Artificial Sequence: Synthetic oligonucleotide
aggugcagggagucauuga

SEQ ID NO: 1069683 - RNA, 19 nt, Artificial Sequence
  Description of Artificial Sequence: Synthetic oligonucleotide
gugcagggagucauugacc

SEQ ID NO: 1069684 - RNA, 19 nt, Artificial Sequence
  Description of Artificial Sequence: Synthetic oligonucleotide
ugcgcgaggcggcuccggc

SEQ ID NO: 1069685 - RNA, 19 nt, Artificial Sequence
  Description of Artificial Sequence: Synthetic oligonucleotide
cugccgcgccagcagaggg

SEQ ID NO: 1069686 - RNA, 19 nt, Artificial Sequence
  Description of Artificial Sequence: Synthetic oligonucleotide
cauggcgacucagauucuc

SEQ ID NO: 1069687 - RNA, 19 nt, Artificial Sequence
  Description of Artificial Sequence: Synthetic oligonucleotide
gggacgcugcggcagaggc

SEQ ID NO: 1069688 - RNA, 19 nt, Artificial Sequence
  Description of Artificial Sequence: Synthetic oligonucleotide
auaccccagagugcgcgag

SEQ ID NO: 1069689 - RNA, 19 nt, Artificial Sequence
  Description of Artificial Sequence: Synthetic oligonucleotide
cuacguccuggcccugccg

SEQ ID NO: 1069690 - RNA, 19 nt, Artificial Sequence
  Description of Artificial Sequence: Synthetic oligonucleotide
gagccacguugcugagucg

SEQ ID NO: 1069691 - RNA, 19 nt, Artificial Sequence
  Description of Artificial Sequence: Synthetic oligonucleotide
gagucggccagaggucugc

SEQ ID NO: 1069692 - RNA, 19 nt, Artificial Sequence
  Description of Artificial Sequence: Synthetic oligonucleotide
acagucagucaggacugcu

SEQ ID NO: 1069693 - RNA, 19 nt, Artificial Sequence
  Description of Artificial Sequence: Synthetic oligonucleotide
  modified_base (16)..(16): a, c, u, g, unknown or other
gggguggguaaacccngug

SEQ ID NO: 1069694 - RNA, 19 nt, Artificial Sequence
  Description of Artificial Sequence: Synthetic oligonucleotide
gguuaggagguggugcuac

SEQ ID NO: 1069695 - RNA, 19 nt, Artificial Sequence
  Description of Artificial Sequence: Synthetic oligonucleotide
uuugcaggcuagugcccua

SEQ ID NO: 1069696 - RNA, 19 nt, Artificial Sequence
  Description of Artificial Sequence: Synthetic oligonucleotide
ugcccucaguacucguccu

SEQ ID NO: 1069697 - RNA, 19 nt, Artificial Sequence
  Description of Artificial Sequence: Synthetic oligonucleotide
auugacccaugcaagcaua

SEQ ID NO: 1069698 - RNA, 19 nt, Artificial Sequence
  Description of Artificial Sequence: Synthetic oligonucleotide
ugacccaugcaagcauauc

SEQ ID NO: 1069699 - RNA, 19 nt, Artificial Sequence
  Description of Artificial Sequence: Synthetic oligonucleotide
ucauggcgacucagauucu

SEQ ID NO: 1069700 - RNA, 19 nt, Artificial Sequence
  Description of Artificial Sequence: Synthetic oligonucleotide
  modified_base (13)..(13): a, c, u, g, unknown or other
guggguaaacccngugcca

SEQ ID NO: 1069701 - RNA, 19 nt, Artificial Sequence
  Description of Artificial Sequence: Synthetic oligonucleotide
cucaagaaucugggcauca

SEQ ID NO: 1069702 - RNA, 19 nt, Artificial Sequence
  Description of Artificial Sequence: Synthetic oligonucleotide
gucuccggcuucaacgcac

SEQ ID NO: 1069703 - RNA, 19 nt, Artificial Sequence
  Description of Artificial Sequence: Synthetic oligonucleotide
cagauucucacuggucaca

SEQ ID NO: 1069704 - RNA, 19 nt, Artificial Sequence
  Description of Artificial Sequence: Synthetic oligonucleotide
  modified_base (5)..(5): a, c, u, g, unknown or other
acccngugccaggagguca

SEQ ID NO: 1069705 - RNA, 19 nt, Artificial Sequence
  Description of Artificial Sequence: Synthetic oligonucleotide
ccauaccccagagugcgcg

SEQ ID NO: 1069706 - RNA, 19 nt, Artificial Sequence
  Description of Artificial Sequence: Synthetic oligonucleotide
gggagucauugacccaugc

SEQ ID NO: 1069707 - RNA, 19 nt, Artificial Sequence
  Description of Artificial Sequence: Synthetic oligonucleotide
gagccuuggggcagugcug

SEQ ID NO: 1069708 - RNA, 19 nt, Artificial Sequence
  Description of Artificial Sequence: Synthetic oligonucleotide
gacaccccaucuucuugaa

SEQ ID NO: 1069709 - RNA, 19 nt, Artificial Sequence
  Description of Artificial Sequence: Synthetic oligonucleotide
ugcaggguggagccacguu

SEQ ID NO: 1069710 - RNA, 19 nt, Artificial Sequence
  Description of Artificial Sequence: Synthetic oligonucleotide
caaccagggaagagcaugu

SEQ ID NO: 1069711 - RNA, 19 nt, Artificial Sequence
  Description of Artificial Sequence: Synthetic oligonucleotide
ggcggaggguccuagcaga

SEQ ID NO: 1069712 - RNA, 19 nt, Artificial Sequence
  Description of Artificial Sequence: Synthetic oligonucleotide
gggauucuuccggaggaug

SEQ ID NO: 1069713 - RNA, 19 nt, Artificial Sequence
  Description of Artificial Sequence: Synthetic oligonucleotide
uagugcccuaggggcaaag

SEQ ID NO: 1069714 - RNA, 19 nt, Artificial Sequence
  Description of Artificial Sequence: Synthetic oligonucleotide
gguccuagcagaggccgcc

SEQ ID NO: 1069715 - RNA, 19 nt, Artificial Sequence
  Description of Artificial Sequence: Synthetic oligonucleotide
gggcggaggguccuagcag

SEQ ID NO: 1069716 - RNA, 19 nt, Artificial Sequence
  Description of Artificial Sequence: Synthetic oligonucleotide
ggugcuacguccuggcccu

SEQ ID NO: 1069717 - RNA, 19 nt, Artificial Sequence
  Description of Artificial Sequence: Synthetic oligonucleotide
gaaguccccugggccagug

SEQ ID NO: 1069718 - RNA, 19 nt, Artificial Sequence
  Description of Artificial Sequence: Synthetic oligonucleotide
ggcgacaggggaggggacg

SEQ ID NO: 1069719 - RNA, 19 nt, Artificial Sequence
  Description of Artificial Sequence: Synthetic oligonucleotide
cguguucuaguuuggccug

SEQ ID NO: 1069720 - RNA, 19 nt, Artificial Sequence
  Description of Artificial Sequence: Synthetic oligonucleotide
aggguggagccacguugcu

SEQ ID NO: 1069721 - RNA, 19 nt, Artificial Sequence
  Description of Artificial Sequence: Synthetic oligonucleotide
guucuaguuuggccuggaa

SEQ ID NO: 1069722 - RNA, 19 nt, Artificial Sequence
  Description of Artificial Sequence: Synthetic oligonucleotide
ccaagcccugcugucagcc

SEQ ID NO: 1069723 - RNA, 19 nt, Artificial Sequence
  Description of Artificial Sequence: Synthetic oligonucleotide
agagugcgcgaggcggcuc

SEQ ID NO: 1069724 - RNA, 19 nt, Artificial Sequence
  Description of Artificial Sequence: Synthetic oligonucleotide
cauaccccagagugcgcga

SEQ ID NO: 1069725 - RNA, 19 nt, Artificial Sequence
  Description of Artificial Sequence: Synthetic oligonucleotide
caaggacaauccaguaagu

SEQ ID NO: 1069726 - RNA, 19 nt, Artificial Sequence
  Description of Artificial Sequence: Synthetic oligonucleotide
auccaccgucagcuucaag

SEQ ID NO: 1069727 - RNA, 19 nt, Artificial Sequence
  Description of Artificial Sequence: Synthetic oligonucleotide
gggacgggcggcagggacg

SEQ ID NO: 1069728 - RNA, 19 nt, Artificial Sequence
  Description of Artificial Sequence: Synthetic oligonucleotide
accuggguuaggagguggu

SEQ ID NO: 1069729 - RNA, 19 nt, Artificial Sequence
  Description of Artificial Sequence: Synthetic oligonucleotide
cugccccaaccucccuggg

SEQ ID NO: 1069730 - RNA, 19 nt, Artificial Sequence
  Description of Artificial Sequence: Synthetic oligonucleotide
agugcgcgaggcggcuccg

SEQ ID NO: 1069731 - RNA, 19 nt, Artificial Sequence
  Description of Artificial Sequence: Synthetic oligonucleotide
gcauagagacaacggaaau

SEQ ID NO: 1069732 - RNA, 19 nt, Artificial Sequence
  Description of Artificial Sequence: Synthetic oligonucleotide
cuagagggaaggggagcca

SEQ ID NO: 1069733 - RNA, 19 nt, Artificial Sequence
  Description of Artificial Sequence: Synthetic oligonucleotide
cagaggguuguaauccuuu

SEQ ID NO: 1069734 - RNA, 19 nt, Artificial Sequence
  Description of Artificial Sequence: Synthetic oligonucleotide
uagggagccuuggggcagu

SEQ ID NO: 1069735 - RNA, 19 nt, Artificial Sequence
  Description of Artificial Sequence: Synthetic oligonucleotide
cucacacuagcuguccccu

SEQ ID NO: 1069736 - RNA, 19 nt, Artificial Sequence
  Description of Artificial Sequence: Synthetic oligonucleotide
gacggccauaccccagagu

SEQ ID NO: 1069737 - RNA, 19 nt, Artificial Sequence
  Description of Artificial Sequence: Synthetic oligonucleotide
gcccucaguacucguccug

SEQ ID NO: 1069738 - RNA, 19 nt, Artificial Sequence
  Description of Artificial Sequence: Synthetic oligonucleotide
augcaggguggagccacgu

SEQ ID NO: 1069739 - RNA, 19 nt, Artificial Sequence
  Description of Artificial Sequence: Synthetic oligonucleotide
ggacgggcggcagggacgc

SEQ ID NO: 1069740 - RNA, 19 nt, Artificial Sequence
  Description of Artificial Sequence: Synthetic oligonucleotide
cagauguggaguacacauu

SEQ ID NO: 1069741 - RNA, 19 nt, Artificial Sequence
  Description of Artificial Sequence: Synthetic oligonucleotide
accaccauuucgggcugau

SEQ ID NO: 1069742 - RNA, 19 nt, Artificial Sequence
  Description of Artificial Sequence: Synthetic oligonucleotide
ggcgacucagauucucacu

SEQ ID NO: 1069743 - RNA, 19 nt, Artificial Sequence
  Description of Artificial Sequence: Synthetic oligonucleotide
aguuugcgucaaagaauuu

SEQ ID NO: 1069744 - RNA, 19 nt, Artificial Sequence
  Description of Artificial Sequence: Synthetic oligonucleotide
aggcgacaggggaggggac

SEQ ID NO: 1069745 - RNA, 19 nt, Artificial Sequence
  Description of Artificial Sequence: Synthetic oligonucleotide
ccacguugcugagucggcc

SEQ ID NO: 1069746 - RNA, 19 nt, Artificial Sequence
  Description of Artificial Sequence: Synthetic oligonucleotide
gccugagaugacagggcug

SEQ ID NO: 1069747 - RNA, 19 nt, Artificial Sequence
  Description of Artificial Sequence: Synthetic oligonucleotide
ccagaggucugcauauucu

SEQ ID NO: 1069748 - RNA, 19 nt, Artificial Sequence
  Description of Artificial Sequence: Synthetic oligonucleotide
gcgcgaggcggcuccggcg

SEQ ID NO: 1069749 - RNA, 19 nt, Artificial Sequence
  Description of Artificial Sequence: Synthetic oligonucleotide
gcuccggcggaggcgacag

SEQ ID NO: 1069750 - RNA, 19 nt, Artificial Sequence
  Description of Artificial Sequence: Synthetic oligonucleotide
gucgacaccccaucuucuu

SEQ ID NO: 1069751 - RNA, 19 nt, Artificial Sequence
  Description of Artificial Sequence: Synthetic oligonucleotide
agucggccagaggucugca

SEQ ID NO: 1069752 - RNA, 19 nt, Artificial Sequence
  Description of Artificial Sequence: Synthetic oligonucleotide
ggaguggacagggguccug

SEQ ID NO: 1069753 - RNA, 19 nt, Artificial Sequence
  Description of Artificial Sequence: Synthetic oligonucleotide
ggucuccggcuucaacgca

SEQ ID NO: 1069754 - RNA, 19 nt, Artificial Sequence
  Description of Artificial Sequence: Synthetic oligonucleotide
cuaguuuggccuggaacuu

SEQ ID NO: 1069755 - RNA, 19 nt, Artificial Sequence
  Description of Artificial Sequence: Synthetic oligonucleotide
caagcauaucauggcgacu

SEQ ID NO: 1069756 - RNA, 19 nt, Artificial Sequence
  Description of Artificial Sequence: Synthetic oligonucleotide
caaccucccuggggugggc

SEQ ID NO: 1069757 - RNA, 19 nt, Artificial Sequence
  Description of Artificial Sequence: Synthetic oligonucleotide
cuccggcggaggcgacagg

SEQ ID NO: 1069758 - RNA, 19 nt, Artificial Sequence
  Description of Artificial Sequence: Synthetic oligonucleotide
cggccauaccccagagugc

SEQ ID NO: 1069759 - RNA, 19 nt, Artificial Sequence
  Description of Artificial Sequence: Synthetic oligonucleotide
gucacgcaauuugcugaaa

SEQ ID NO: 1069760 - RNA, 19 nt, Artificial Sequence
  Description of Artificial Sequence: Synthetic oligonucleotide
gugcgcgaggcggcuccgg

SEQ ID NO: 1069761 - RNA, 19 nt, Artificial Sequence
  Description of Artificial Sequence: Synthetic oligonucleotide
gccacguugcugagucggc

SEQ ID NO: 1069762 - RNA, 19 nt, Artificial Sequence
  Description of Artificial Sequence: Synthetic oligonucleotide
ccucaacuaccaagagaga

SEQ ID NO: 1069763 - RNA, 19 nt, Artificial Sequence
  Description of Artificial Sequence: Synthetic oligonucleotide
ggaguggauagggagccuu

SEQ ID NO: 1069764 - RNA, 19 nt, Artificial Sequence
  Description of Artificial Sequence: Synthetic oligonucleotide
cagcucgaugucacgcaau

SEQ ID NO: 1069765 - RNA, 19 nt, Artificial Sequence
  Description of Artificial Sequence: Synthetic oligonucleotide
gucggccagaggucugcau

SEQ ID NO: 1069766 - RNA, 19 nt, Artificial Sequence
  Description of Artificial Sequence: Synthetic oligonucleotide
ccaccauuucgggcugaug

SEQ ID NO: 1069767 - RNA, 19 nt, Artificial Sequence
  Description of Artificial Sequence: Synthetic oligonucleotide
aggggacgggcggcaggga

SEQ ID NO: 1069768 - RNA, 19 nt, Artificial Sequence
  Description of Artificial Sequence: Synthetic oligonucleotide
cuagugcccuaggggcaaa

SEQ ID NO: 1069769 - RNA, 19 nt, Artificial Sequence
  Description of Artificial Sequence: Synthetic oligonucleotide
uccggggcggaggguccua

SEQ ID NO: 1069770 - RNA, 19 nt, Artificial Sequence
  Description of Artificial Sequence: Synthetic oligonucleotide
ggacguccucugcggaacu

SEQ ID NO: 1069771 - RNA, 19 nt, Artificial Sequence
  Description of Artificial Sequence: Synthetic oligonucleotide
gcccugccgcgccagcaga

SEQ ID NO: 1069772 - RNA, 19 nt, Artificial Sequence
  Description of Artificial Sequence: Synthetic oligonucleotide
  modified_base (4)..(4): a, c, u, g, unknown or other
cccngugccaggaggucau

SEQ ID NO: 1069773 - RNA, 19 nt, Artificial Sequence
  Description of Artificial Sequence: Synthetic oligonucleotide
gugcuacguccuggcccug

SEQ ID NO: 1069774 - RNA, 19 nt, Artificial Sequence
  Description of Artificial Sequence: Synthetic oligonucleotide
  modified_base (2)..(2): a, c, u, g, unknown or other
cngugccaggaggucauuu

SEQ ID NO: 1069775 - RNA, 19 nt, Artificial Sequence
  Description of Artificial Sequence: Synthetic oligonucleotide
gugccacuugagggaccca

SEQ ID NO: 1069776 - RNA, 19 nt, Artificial Sequence
  Description of Artificial Sequence: Synthetic oligonucleotide
ggguuaggagguggugcua

SEQ ID NO: 1069777 - RNA, 19 nt, Artificial Sequence
  Description of Artificial Sequence: Synthetic oligonucleotide
cgcggucuccggcuucaac

SEQ ID NO: 1069778 - RNA, 19 nt, Artificial Sequence
  Description of Artificial Sequence: Synthetic oligonucleotide
gccacuugagggacccagu

SEQ ID NO: 1069779 - RNA, 19 nt, Artificial Sequence
  Description of Artificial Sequence: Synthetic oligonucleotide
ggcugucaggggagcaggu

SEQ ID NO: 1069780 - RNA, 19 nt, Artificial Sequence
  Description of Artificial Sequence: Synthetic oligonucleotide
ccggggcggaggguccuag

SEQ ID NO: 1069781 - RNA, 19 nt, Artificial Sequence
  Description of Artificial Sequence: Synthetic oligonucleotide
gcucgaugucacgcaauuu

SEQ ID NO: 1069782 - RNA, 19 nt, Artificial Sequence
  Description of Artificial Sequence: Synthetic oligonucleotide
ccgcgccagcagaggguug

SEQ ID NO: 1069783 - RNA, 19 nt, Artificial Sequence
  Description of Artificial Sequence: Synthetic oligonucleotide
gggaguggacagggguccu

SEQ ID NO: 1069784 - RNA, 19 nt, Artificial Sequence
  Description of Artificial Sequence: Synthetic oligonucleotide
cugagaugacagggcuguu

SEQ ID NO: 1069785 - RNA, 19 nt, Artificial Sequence
  Description of Artificial Sequence: Synthetic oligonucleotide
cuccggggcggaggguccu

SEQ ID NO: 1069786 - RNA, 19 nt, Artificial Sequence
  Description of Artificial Sequence: Synthetic oligonucleotide
ggccagaggucugcauauu

SEQ ID NO: 1069787 - RNA, 19 nt, Artificial Sequence
  Description of Artificial Sequence: Synthetic oligonucleotide
gcgccagcagaggguugua

SEQ ID NO: 1069788 - RNA, 19 nt, Artificial Sequence
  Description of Artificial Sequence: Synthetic oligonucleotide
  modified_base (3)..(3): a, c, u, g, unknown or other
ccngugccaggaggucauu

SEQ ID NO: 1069789 - RNA, 19 nt, Artificial Sequence
  Description of Artificial Sequence: Synthetic oligonucleotide
aaggcuacaauuaaggagc

SEQ ID NO: 1069790 - RNA, 19 nt, Artificial Sequence
  Description of Artificial Sequence: Synthetic oligonucleotide
aauuauaucucauuauucu

SEQ ID NO: 1069791 - RNA, 19 nt, Artificial Sequence
  Description of Artificial Sequence: Synthetic oligonucleotide
aaaggcuacaauuaaggag

SEQ ID NO: 1069792 - RNA, 19 nt, Artificial Sequence
  Description of Artificial Sequence: Synthetic oligonucleotide
aucaaugaaacuuuagagg

SEQ ID NO: 1069793 - RNA, 19 nt, Artificial Sequence
  Description of Artificial Sequence: Synthetic oligonucleotide
aaugcgacauacuucaucu

SEQ ID NO: 1069794 - RNA, 19 nt, Artificial Sequence
  Description of Artificial Sequence: Synthetic oligonucleotide
ucuucaacaacuaugcacu

SEQ ID NO: 1069795 - RNA, 19 nt, Artificial Sequence
  Description of Artificial Sequence: Synthetic oligonucleotide
aagauaguguuaaacaugg

SEQ ID NO: 1069796 - RNA, 19 nt, Artificial Sequence
  Description of Artificial Sequence: Synthetic oligonucleotide
  modified_base (3)..(3): a, c, u, g, unknown or other
  modified_base (14)..(14): a, c, u, g, unknown or other
ugnuccuuauuacnuaaag

SEQ ID NO: 1069797 - RNA, 19 nt, Artificial Sequence
  Description of Artificial Sequence: Synthetic oligonucleotide
uuugcaauauaauuaguug

SEQ ID NO: 1069798 - RNA, 19 nt, Artificial Sequence
  Description of Artificial Sequence: Synthetic oligonucleotide
ugugauguuaacaaucaca

SEQ ID NO: 1069799 - RNA, 19 nt, Artificial Sequence
  Description of Artificial Sequence: Synthetic oligonucleotide
uguaaauuaguguuguaca

SEQ ID NO: 1069800 - RNA, 19 nt, Artificial Sequence
  Description of Artificial Sequence: Synthetic oligonucleotide
  modified_base (7)..(7): a, c, u, g, unknown or other
  modified_base (18)..(18): a, c, u, g, unknown or other
uaaaugnuccuuauuacnu

SEQ ID NO: 1069801 - RNA, 19 nt, Artificial Sequence
  Description of Artificial Sequence: Synthetic oligonucleotide
uagauuacaaugaagcccu

SEQ ID NO: 1069802 - RNA, 19 nt, Artificial Sequence
  Description of Artificial Sequence: Synthetic oligonucleotide
  modified_base (5)..(5): a, c, u, g, unknown or other
uuacnuaaagccagcauug

SEQ ID NO: 1069803 - RNA, 19 nt, Artificial Sequence
  Description of Artificial Sequence: Synthetic oligonucleotide
auugcuacuaaguucagcu

SEQ ID NO: 1069804 - RNA, 19 nt, Artificial Sequence
  Description of Artificial Sequence: Synthetic oligonucleotide
uuuccgaacuuucauauca

SEQ ID NO: 1069805 - RNA, 19 nt, Artificial Sequence
  Description of Artificial Sequence: Synthetic oligonucleotide
caucaaugaaacuuuagag

SEQ ID NO: 1069806 - RNA, 19 nt, Artificial Sequence
  Description of Artificial Sequence: Synthetic oligonucleotide
auagauuacaaucaguuuu

SEQ ID NO: 1069807 - RNA, 19 nt, Artificial Sequence
  Description of Artificial Sequence: Synthetic oligonucleotide
uuauaucucauuauucugu

SEQ ID NO: 1069808 - RNA, 19 nt, Artificial Sequence
  Description of Artificial Sequence: Synthetic oligonucleotide
aaaugcgacauacuucauc

SEQ ID NO: 1069809 - RNA, 19 nt, Artificial Sequence
  Description of Artificial Sequence: Synthetic oligonucleotide
ugauauucaugcuuuauac

SEQ ID NO: 1069810 - RNA, 19 nt, Artificial Sequence
  Description of Artificial Sequence: Synthetic oligonucleotide
  modified_base (5)..(5): a, c, u, g, unknown or other
  modified_base (16)..(16): a, c, u, g, unknown or other
aaugnuccuuauuacnuaa

SEQ ID NO: 1069811 - RNA, 19 nt, Artificial Sequence
  Description of Artificial Sequence: Synthetic oligonucleotide
uuagaggcuacauuuaugu

SEQ ID NO: 1069812 - RNA, 19 nt, Artificial Sequence
  Description of Artificial Sequence: Synthetic oligonucleotide
ugaugaucuacacagggga

SEQ ID NO: 1069813 - RNA, 19 nt, Artificial Sequence
  Description of Artificial Sequence: Synthetic oligonucleotide
gaugacaagacaaauuccc

SEQ ID NO: 1069814 - RNA, 19 nt, Artificial Sequence
  Description of Artificial Sequence: Synthetic oligonucleotide
auaucauagaaaaugcgac

SEQ ID NO: 1069815 - RNA, 19 nt, Artificial Sequence
  Description of Artificial Sequence: Synthetic oligonucleotide
uuuacaugucaccucauga

SEQ ID NO: 1069816 - RNA, 19 nt, Artificial Sequence
  Description of Artificial Sequence: Synthetic oligonucleotide
uucuucaacaacuaugcac

SEQ ID NO: 1069817 - RNA, 19 nt, Artificial Sequence
  Description of Artificial Sequence: Synthetic oligonucleotide
uauagugaaagauaguguu

SEQ ID NO: 1069818 - RNA, 19 nt, Artificial Sequence
  Description of Artificial Sequence: Synthetic oligonucleotide
uugcaauauaauuaguugu

SEQ ID NO: 1069819 - RNA, 19 nt, Artificial Sequence
  Description of Artificial Sequence: Synthetic oligonucleotide
agaaaauuauaucucauua

SEQ ID NO: 1069820 - RNA, 19 nt, Artificial Sequence
  Description of Artificial Sequence: Synthetic oligonucleotide
  modified_base (6)..(6): a, c, u, g, unknown or other
auuacnuaaagccagcauu

SEQ ID NO: 1069821 - RNA, 19 nt, Artificial Sequence
  Description of Artificial Sequence: Synthetic oligonucleotide
auaccaugauuucuaagac

SEQ ID NO: 1069822 - RNA, 19 nt, Artificial Sequence
  Description of Artificial Sequence: Synthetic oligonucleotide
auaguguuaaacauggaag

SEQ ID NO: 1069823 - RNA, 19 nt, Artificial Sequence
  Description of Artificial Sequence: Synthetic oligonucleotide
  modified_base (9)..(9): a, c, u, g, unknown or other
ucuaaaugnuccuuauuac

SEQ ID NO: 1069824 - RNA, 19 nt, Artificial Sequence
  Description of Artificial Sequence: Synthetic oligonucleotide
uuagucuuacugcuguuag

SEQ ID NO: 1069825 - RNA, 19 nt, Artificial Sequence
  Description of Artificial Sequence: Synthetic oligonucleotide
auuaguguuguacacauua

SEQ ID NO: 1069826 - RNA, 19 nt, Artificial Sequence
  Description of Artificial Sequence: Synthetic oligonucleotide
cuaauuugcaauauaauua

SEQ ID NO: 1069827 - RNA, 19 nt, Artificial Sequence
  Description of Artificial Sequence: Synthetic oligonucleotide
gauaguguuaaacauggaa

SEQ ID NO: 1069828 - RNA, 19 nt, Artificial Sequence
  Description of Artificial Sequence: Synthetic oligonucleotide
agcaauacuaguccgguug

SEQ ID NO: 1069829 - RNA, 19 nt, Artificial Sequence
  Description of Artificial Sequence: Synthetic oligonucleotide
ucuacauuggucaguguca

SEQ ID NO: 1069830 - RNA, 19 nt, Artificial Sequence
  Description of Artificial Sequence: Synthetic oligonucleotide
uguacuauuuugugaacug

SEQ ID NO: 1069831 - RNA, 19 nt, Artificial Sequence
  Description of Artificial Sequence: Synthetic oligonucleotide
aaaauaggcauuuggccaa

SEQ ID NO: 1069832 - RNA, 19 nt, Artificial Sequence
  Description of Artificial Sequence: Synthetic oligonucleotide
  modified_base (11)..(11): a, c, u, g, unknown or other
uccuuauuacnuaaagcca

SEQ ID NO: 1069833 - RNA, 19 nt, Artificial Sequence
  Description of Artificial Sequence: Synthetic oligonucleotide
uucgagcuugcauagauca

SEQ ID NO: 1069834 - RNA, 19 nt, Artificial Sequence
  Description of Artificial Sequence: Synthetic oligonucleotide
acauggaagcuucaauucg

SEQ ID NO: 1069835 - RNA, 19 nt, Artificial Sequence
  Description of Artificial Sequence: Synthetic oligonucleotide
auugccuuguacuauuuug

SEQ ID NO: 1069836 - RNA, 19 nt, Artificial Sequence
  Description of Artificial Sequence: Synthetic oligonucleotide
uugcuuuauggauauagug

SEQ ID NO: 1069837 - RNA, 19 nt, Artificial Sequence
  Description of Artificial Sequence: Synthetic oligonucleotide
ugcgacauacuucaucugc

SEQ ID NO: 1069838 - RNA, 19 nt, Artificial Sequence
  Description of Artificial Sequence: Synthetic oligonucleotide
uaucauagaaaaugcgaca

SEQ ID NO: 1069839 - RNA, 19 nt, Artificial Sequence
  Description of Artificial Sequence: Synthetic oligonucleotide
aaccugaacuccugaggcc

SEQ ID NO: 1069840 - RNA, 19 nt, Artificial Sequence
  Description of Artificial Sequence: Synthetic oligonucleotide
uucuacauccugcuggacc

SEQ ID NO: 1069841 - RNA, 19 nt, Artificial Sequence
  Description of Artificial Sequence: Synthetic oligonucleotide
ugcuguuaguguaaauuag

SEQ ID NO: 1069842 - RNA, 19 nt, Artificial Sequence
  Description of Artificial Sequence: Synthetic oligonucleotide
uuucagcaauacuaguccg

SEQ ID NO: 1069843 - RNA, 19 nt, Artificial Sequence
  Description of Artificial Sequence: Synthetic oligonucleotide
uagauuacaaucaguuuuc

SEQ ID NO: 1069844 - RNA, 19 nt, Artificial Sequence
  Description of Artificial Sequence: Synthetic oligonucleotide
  modified_base (9)..(9): a, c, u, g, unknown or other
cuuauuacnuaaagccagc

SEQ ID NO: 1069845 - RNA, 19 nt, Artificial Sequence
  Description of Artificial Sequence: Synthetic oligonucleotide
aagauuagaguucgcuuca

SEQ ID NO: 1069846 - RNA, 19 nt, Artificial Sequence
  Description of Artificial Sequence: Synthetic oligonucleotide
  modified_base (10)..(10): a, c, u, g, unknown or other
ccuuauuacnuaaagccag

SEQ ID NO: 1069847 - RNA, 19 nt, Artificial Sequence
  Description of Artificial Sequence: Synthetic oligonucleotide
cauuuauguagaguggugg

SEQ ID NO: 1069848 - RNA, 19 nt, Artificial Sequence
  Description of Artificial Sequence: Synthetic oligonucleotide
  modified_base (2)..(2): a, c, u, g, unknown or other
  modified_base (13)..(13): a, c, u, g, unknown or other
gnuccuuauuacnuaaagc

SEQ ID NO: 1069849 - RNA, 19 nt, Artificial Sequence
  Description of Artificial Sequence: Synthetic oligonucleotide
  modified_base (7)..(7): a, c, u, g, unknown or other
uauuacnuaaagccagcau

SEQ ID NO: 1069850 - RNA, 19 nt, Artificial Sequence
  Description of Artificial Sequence: Synthetic oligonucleotide
aauuaaagauugacagcac

SEQ ID NO: 1069851 - RNA, 19 nt, Artificial Sequence
  Description of Artificial Sequence: Synthetic oligonucleotide
ugcaauauaauuaguuguu

SEQ ID NO: 1069852 - RNA, 19 nt, Artificial Sequence
  Description of Artificial Sequence: Synthetic oligonucleotide
uuagcgaagauuagaguuc

SEQ ID NO: 1069853 - RNA, 19 nt, Artificial Sequence
  Description of Artificial Sequence: Synthetic oligonucleotide
guaaauuaguguuguacac

SEQ ID NO: 1069854 - RNA, 19 nt, Artificial Sequence
  Description of Artificial Sequence: Synthetic oligonucleotide
ucaccucaugaaaauaggc

SEQ ID NO: 1069855 - RNA, 19 nt, Artificial Sequence
  Description of Artificial Sequence: Synthetic oligonucleotide
uuugcuuuauggauauagu

SEQ ID NO: 1069856 - RNA, 19 nt, Artificial Sequence
  Description of Artificial Sequence: Synthetic oligonucleotide
uucaauucguggcacuggc

SEQ ID NO: 1069857 - RNA, 19 nt, Artificial Sequence
  Description of Artificial Sequence: Synthetic oligonucleotide
aaugcuugaaaggaucggu

SEQ ID NO: 1069858 - RNA, 19 nt, Artificial Sequence
  Description of Artificial Sequence: Synthetic oligonucleotide
agugucaugccugugaugu

SEQ ID NO: 1069859 - RNA, 19 nt, Artificial Sequence
  Description of Artificial Sequence: Synthetic oligonucleotide
aaaggaucgguuaugguau

SEQ ID NO: 1069860 - RNA, 19 nt, Artificial Sequence
  Description of Artificial Sequence: Synthetic oligonucleotide
aagcucgcaucguacaaag

SEQ ID NO: 1069861 - RNA, 19 nt, Artificial Sequence
  Description of Artificial Sequence: Synthetic oligonucleotide
accguaagcaguuucccag

SEQ ID NO: 1069862 - RNA, 19 nt, Artificial Sequence
  Description of Artificial Sequence: Synthetic oligonucleotide
  modified_base (8)..(8): a, c, u, g, unknown or other
  modified_base (19)..(19): a, c, u, g, unknown or other
cuaaaugnuccuuauuacn

SEQ ID NO: 1069863 - RNA, 19 nt, Artificial Sequence
  Description of Artificial Sequence: Synthetic oligonucleotide
auugacagcacccuggcuu

SEQ ID NO: 1069864 - RNA, 19 nt, Artificial Sequence
  Description of Artificial Sequence: Synthetic oligonucleotide
gguagcaagacccggagag

SEQ ID NO: 1069865 - RNA, 19 nt, Artificial Sequence
  Description of Artificial Sequence: Synthetic oligonucleotide
auuagaguucgcuucacau

SEQ ID NO: 1069866 - RNA, 19 nt, Artificial Sequence
  Description of Artificial Sequence: Synthetic oligonucleotide
ugguaaacugcuguagggg

SEQ ID NO: 1069867 - RNA, 19 nt, Artificial Sequence
  Description of Artificial Sequence: Synthetic oligonucleotide
  modified_base (6)..(6): a, c, u, g, unknown or other
  modified_base (17)..(17): a, c, u, g, unknown or other
aaaugnuccuuauuacnua

SEQ ID NO: 1069868 - RNA, 19 nt, Artificial Sequence
  Description of Artificial Sequence: Synthetic oligonucleotide
acucuaaaagaugacaaga

SEQ ID NO: 1069869 - RNA, 19 nt, Artificial Sequence
  Description of Artificial Sequence: Synthetic oligonucleotide
agaugacaagacaaauucc

SEQ ID NO: 1069870 - RNA, 19 nt, Artificial Sequence
  Description of Artificial Sequence: Synthetic oligonucleotide
uuauuaauauacugcuuua

SEQ ID NO: 1069871 - RNA, 19 nt, Artificial Sequence
  Description of Artificial Sequence: Synthetic oligonucleotide
agucuuacugcuguuagug

SEQ ID NO: 1069872 - RNA, 19 nt, Artificial Sequence
  Description of Artificial Sequence: Synthetic oligonucleotide
gcucgcaucguacaaagcg

SEQ ID NO: 1069873 - RNA, 19 nt, Artificial Sequence
  Description of Artificial Sequence: Synthetic oligonucleotide
acuaguccgguugagaucu

SEQ ID NO: 1069874 - RNA, 19 nt, Artificial Sequence
  Description of Artificial Sequence: Synthetic oligonucleotide
  modified_base (15)..(15): a, c, u, g, unknown or other
aguguuucuaaaugnuccu

SEQ ID NO: 1069875 - RNA, 19 nt, Artificial Sequence
  Description of Artificial Sequence: Synthetic oligonucleotide
auaccuugaaauuucuuuu

SEQ ID NO: 1069876 - RNA, 19 nt, Artificial Sequence
  Description of Artificial Sequence: Synthetic oligonucleotide
ugaucuacacaggggaucc

SEQ ID NO: 1069877 - RNA, 19 nt, Artificial Sequence
  Description of Artificial Sequence: Synthetic oligonucleotide
uagcaagacccggagagcg

SEQ ID NO: 1069878 - RNA, 19 nt, Artificial Sequence
  Description of Artificial Sequence: Synthetic oligonucleotide
uaaagauugacagcacccu

SEQ ID NO: 1069879 - RNA, 19 nt, Artificial Sequence
  Description of Artificial Sequence: Synthetic oligonucleotide
uagcgaagauuagaguucg

SEQ ID NO: 1069880 - RNA, 19 nt, Artificial Sequence
  Description of Artificial Sequence: Synthetic oligonucleotide
aauacuaguccgguugaga

SEQ ID NO: 1069881 - RNA, 19 nt, Artificial Sequence
  Description of Artificial Sequence: Synthetic oligonucleotide
auuccccucagugagaucu

SEQ ID NO: 1069882 - RNA, 19 nt, Artificial Sequence
  Description of Artificial Sequence: Synthetic oligonucleotide
auucuaagcagacacgcuu

SEQ ID NO: 1069883 - RNA, 19 nt, Artificial Sequence
  Description of Artificial Sequence: Synthetic oligonucleotide
cuacaauuaaggagccacc

SEQ ID NO: 1069884 - RNA, 19 nt, Artificial Sequence
  Description of Artificial Sequence: Synthetic oligonucleotide
uaccaugauuucuaagaca

SEQ ID NO: 1069885 - RNA, 19 nt, Artificial Sequence
  Description of Artificial Sequence: Synthetic oligonucleotide
ucaaagcucgcaucguaca

SEQ ID NO: 1069886 - RNA, 19 nt, Artificial Sequence
  Description of Artificial Sequence: Synthetic oligonucleotide
auacuaguccgguugagau

SEQ ID NO: 1069887 - RNA, 19 nt, Artificial Sequence
  Description of Artificial Sequence: Synthetic oligonucleotide
caauucguggcacuggcug

SEQ ID NO: 1069888 - RNA, 19 nt, Artificial Sequence
  Description of Artificial Sequence: Synthetic oligonucleotide
  modified_base (3)..(3): a, c, u, g, unknown or other
acnuaaagccagcauugcu

SEQ ID NO: 1069889 - RNA, 19 nt, Artificial Sequence
  Description of Artificial Sequence: Synthetic oligonucleotide
ucuuacugcuguuagugua

SEQ ID NO: 1069890 - RNA, 19 nt, Artificial Sequence
  Description of Artificial Sequence: Synthetic oligonucleotide
gaucgguuaugguaucacc

SEQ ID NO: 1069891 - RNA, 19 nt, Artificial Sequence
  Description of Artificial Sequence: Synthetic oligonucleotide
uucacauugccuuguacua

SEQ ID NO: 1069892 - RNA, 19 nt, Artificial Sequence
  Description of Artificial Sequence: Synthetic oligonucleotide
auuuccgaacuuucauauc

SEQ ID NO: 1069893 - RNA, 19 nt, Artificial Sequence
  Description of Artificial Sequence: Synthetic oligonucleotide
uccuccgcgagguagcaag

SEQ ID NO: 1069894 - RNA, 19 nt, Artificial Sequence
  Description of Artificial Sequence: Synthetic oligonucleotide
aguguuguacacauuauaa

SEQ ID NO: 1069895 - RNA, 19 nt, Artificial Sequence
  Description of Artificial Sequence: Synthetic oligonucleotide
uauaucucauuauucuguu

SEQ ID NO: 1069896 - RNA, 19 nt, Artificial Sequence
  Description of Artificial Sequence: Synthetic oligonucleotide
ugugaacuguguuauuaaa

SEQ ID NO: 1069897 - RNA, 19 nt, Artificial Sequence
  Description of Artificial Sequence: Synthetic oligonucleotide
uccggugaggagcauuucc

SEQ ID NO: 1069898 - RNA, 19 nt, Artificial Sequence
  Description of Artificial Sequence: Synthetic oligonucleotide
  modified_base (8)..(8): a, c, u, g, unknown or other
uuauuacnuaaagccagca

SEQ ID NO: 1069899 - RNA, 19 nt, Artificial Sequence
  Description of Artificial Sequence: Synthetic oligonucleotide
uucuaagcagacacgcuuc

SEQ ID NO: 1069900 - RNA, 19 nt, Artificial Sequence
  Description of Artificial Sequence: Synthetic oligonucleotide
aucauagaaaaugcgacau

SEQ ID NO: 1069901 - RNA, 19 nt, Artificial Sequence
  Description of Artificial Sequence: Synthetic oligonucleotide
aggcggaugcgacagcucg

SEQ ID NO: 1069902 - RNA, 19 nt, Artificial Sequence
  Description of Artificial Sequence: Synthetic oligonucleotide
acaaagcguagcgacaauc

SEQ ID NO: 1069903 - RNA, 19 nt, Artificial Sequence
  Description of Artificial Sequence: Synthetic oligonucleotide
ugagaucuggccuaauauu

SEQ ID NO: 1069904 - RNA, 19 nt, Artificial Sequence
  Description of Artificial Sequence: Synthetic oligonucleotide
  modified_base (2)..(2): a, c, u, g, unknown or other
cnuaaagccagcauugcua

SEQ ID NO: 1069905 - RNA, 19 nt, Artificial Sequence
  Description of Artificial Sequence: Synthetic oligonucleotide
gagagcgaacgcaaggcgg

SEQ ID NO: 1069906 - RNA, 19 nt, Artificial Sequence
  Description of Artificial Sequence: Synthetic oligonucleotide
aaacguacuccacacucuu

SEQ ID NO: 1069907 - RNA, 19 nt, Artificial Sequence
  Description of Artificial Sequence: Synthetic oligonucleotide
aauccugggcuuaacaaaa

SEQ ID NO: 1069908 - RNA, 19 nt, Artificial Sequence
  Description of Artificial Sequence: Synthetic oligonucleotide
uuaguguuguacacauuau

SEQ ID NO: 1069909 - RNA, 19 nt, Artificial Sequence
  Description of Artificial Sequence: Synthetic oligonucleotide
ucucacugcagggacagug

SEQ ID NO: 1069910 - RNA, 19 nt, Artificial Sequence
  Description of Artificial Sequence: Synthetic oligonucleotide
cugagguuagcgaagauua

SEQ ID NO: 1069911 - RNA, 19 nt, Artificial Sequence
  Description of Artificial Sequence: Synthetic oligonucleotide
auauagugaaagauagugu

SEQ ID NO: 1069912 - RNA, 19 nt, Artificial Sequence
  Description of Artificial Sequence: Synthetic oligonucleotide
guuagcgaagauuagaguu

SEQ ID NO: 1069913 - RNA, 19 nt, Artificial Sequence
  Description of Artificial Sequence: Synthetic oligonucleotide
gcagacacgcuucugaagc

SEQ ID NO: 1069914 - RNA, 19 nt, Artificial Sequence
  Description of Artificial Sequence: Synthetic oligonucleotide
  modified_base (4)..(4): a, c, u, g, unknown or other
uacnuaaagccagcauugc

SEQ ID NO: 1069915 - RNA, 19 nt, Artificial Sequence
  Description of Artificial Sequence: Synthetic oligonucleotide
auuauucuguuuaagucaa

SEQ ID NO: 1069916 - RNA, 19 nt, Artificial Sequence
  Description of Artificial Sequence: Synthetic oligonucleotide
cuuuacaugucaccucaug

SEQ ID NO: 1069917 - RNA, 19 nt, Artificial Sequence
  Description of Artificial Sequence: Synthetic oligonucleotide
ucaugcuuuauaccuugaa

SEQ ID NO: 1069918 - RNA, 19 nt, Artificial Sequence
  Description of Artificial Sequence: Synthetic oligonucleotide
ugugaauucuaagcagaca

SEQ ID NO: 1069919 - RNA, 19 nt, Artificial Sequence
  Description of Artificial Sequence: Synthetic oligonucleotide
aauuugcaauauaauuagu

SEQ ID NO: 1069920 - RNA, 19 nt, Artificial Sequence
  Description of Artificial Sequence: Synthetic oligonucleotide
aaagcguagcgacaaucuu

SEQ ID NO: 1069921 - RNA, 19 nt, Artificial Sequence
  Description of Artificial Sequence: Synthetic oligonucleotide
guuugcauccuaccaggcc

SEQ ID NO: 1069922 - RNA, 19 nt, Artificial Sequence
  Description of Artificial Sequence: Synthetic oligonucleotide
uaguuguuacaagacuuug

SEQ ID NO: 1069923 - RNA, 19 nt, Artificial Sequence
  Description of Artificial Sequence: Synthetic oligonucleotide
uccugaggauauaccauga

SEQ ID NO: 1069924 - RNA, 19 nt, Artificial Sequence
  Description of Artificial Sequence: Synthetic oligonucleotide
caccucaugaaaauaggca

SEQ ID NO: 1069925 - RNA, 19 nt, Artificial Sequence
  Description of Artificial Sequence: Synthetic oligonucleotide
ucagugucaugccugugau

SEQ ID NO: 1069926 - RNA, 19 nt, Artificial Sequence
  Description of Artificial Sequence: Synthetic oligonucleotide
aaauuccccucagugagau

SEQ ID NO: 1069927 - RNA, 19 nt, Artificial Sequence
  Description of Artificial Sequence: Synthetic oligonucleotide
uugcuacuaaguucagcug

SEQ ID NO: 1069928 - RNA, 19 nt, Artificial Sequence
  Description of Artificial Sequence: Synthetic oligonucleotide
ugcuugaaaggaucgguua

SEQ ID NO: 1069929 - RNA, 19 nt, Artificial Sequence
  Description of Artificial Sequence: Synthetic oligonucleotide
gcuacaauuaaggagccac

SEQ ID NO: 1069930 - RNA, 19 nt, Artificial Sequence
  Description of Artificial Sequence: Synthetic oligonucleotide
aggauauaccaugauuucu

SEQ ID NO: 1069931 - RNA, 19 nt, Artificial Sequence
  Description of Artificial Sequence: Synthetic oligonucleotide
gugaggagcauuuccgaac

SEQ ID NO: 1069932 - RNA, 19 nt, Artificial Sequence
  Description of Artificial Sequence: Synthetic oligonucleotide
gaguucgcuucacauugcc

SEQ ID NO: 1069933 - RNA, 19 nt, Artificial Sequence
  Description of Artificial Sequence: Synthetic oligonucleotide
ccgaacuuucauaucauag

SEQ ID NO: 1069934 - RNA, 19 nt, Artificial Sequence
  Description of Artificial Sequence: Synthetic oligonucleotide
uccgcgagguagcaagacc

SEQ ID NO: 1069935 - RNA, 19 nt, Artificial Sequence
  Description of Artificial Sequence: Synthetic oligonucleotide
auccuucgagcuugcauag

SEQ ID NO: 1069936 - RNA, 19 nt, Artificial Sequence
  Description of Artificial Sequence: Synthetic oligonucleotide
gauuagaguucgcuucaca

SEQ ID NO: 1069937 - RNA, 19 nt, Artificial Sequence
  Description of Artificial Sequence: Synthetic oligonucleotide
cuugaaaggaucgguuaug

SEQ ID NO: 1069938 - RNA, 19 nt, Artificial Sequence
  Description of Artificial Sequence: Synthetic oligonucleotide
uucacacacagcugguaaa

SEQ ID NO: 1069939 - RNA, 19 nt, Artificial Sequence
  Description of Artificial Sequence: Synthetic oligonucleotide
uuauaccuugaaauuucuu

SEQ ID NO: 1069940 - RNA, 19 nt, Artificial Sequence
  Description of Artificial Sequence: Synthetic oligonucleotide
caugcuuuauaccuugaaa

SEQ ID NO: 1069941 - RNA, 19 nt, Artificial Sequence
  Description of Artificial Sequence: Synthetic oligonucleotide
ucuacacaggggauccuuc

SEQ ID NO: 1069942 - RNA, 19 nt, Artificial Sequence
  Description of Artificial Sequence: Synthetic oligonucleotide
accagaugcagcaggguuc

SEQ ID NO: 1069943 - RNA, 19 nt, Artificial Sequence
  Description of Artificial Sequence: Synthetic oligonucleotide
gguaucaccaacaucucca

SEQ ID NO: 1069944 - RNA, 19 nt, Artificial Sequence
  Description of Artificial Sequence: Synthetic oligonucleotide
gcgacaaucuuucucagga

SEQ ID NO: 1069945 - RNA, 19 nt, Artificial Sequence
  Description of Artificial Sequence: Synthetic oligonucleotide
gagguuagcgaagauuaga

SEQ ID NO: 1069946 - RNA, 19 nt, Artificial Sequence
  Description of Artificial Sequence: Synthetic oligonucleotide
aguuguuacaagacuuuga

SEQ ID NO: 1069947 - RNA, 19 nt, Artificial Sequence
  Description of Artificial Sequence: Synthetic oligonucleotide
agacccggagagcgaacgc

SEQ ID NO: 1069948 - RNA, 19 nt, Artificial Sequence
  Description of Artificial Sequence: Synthetic oligonucleotide
aaagcucgcaucguacaaa

SEQ ID NO: 1069949 - RNA, 19 nt, Artificial Sequence
  Description of Artificial Sequence: Synthetic oligonucleotide
gagagcuaggagacuggcg

SEQ ID NO: 1069950 - RNA, 19 nt, Artificial Sequence
  Description of Artificial Sequence: Synthetic oligonucleotide
agccgagggagccucucac

SEQ ID NO: 1069951 - RNA, 19 nt, Artificial Sequence
  Description of Artificial Sequence: Synthetic oligonucleotide
guacuccacacucuucuac

SEQ ID NO: 1069952 - RNA, 19 nt, Artificial Sequence
  Description of Artificial Sequence: Synthetic oligonucleotide
ucaccguaagcaguuuccc

SEQ ID NO: 1069953 - RNA, 19 nt, Artificial Sequence
  Description of Artificial Sequence: Synthetic oligonucleotide
gucaccguaagcaguuucc

SEQ ID NO: 1069954 - RNA, 19 nt, Artificial Sequence
  Description of Artificial Sequence: Synthetic oligonucleotide
agauuagaguucgcuucac

SEQ ID NO: 1069955 - RNA, 19 nt, Artificial Sequence
  Description of Artificial Sequence: Synthetic oligonucleotide
acauuuauguagaguggug

SEQ ID NO: 1069956 - RNA, 19 nt, Artificial Sequence
  Description of Artificial Sequence: Synthetic oligonucleotide
gaggcgccuguucuggugc

SEQ ID NO: 1069957 - RNA, 19 nt, Artificial Sequence
  Description of Artificial Sequence: Synthetic oligonucleotide
ggagagcgaacgcaaggcg

SEQ ID NO: 1069958 - RNA, 19 nt, Artificial Sequence
  Description of Artificial Sequence: Synthetic oligonucleotide
uagucuuacugcuguuagu

SEQ ID NO: 1069959 - RNA, 19 nt, Artificial Sequence
  Description of Artificial Sequence: Synthetic oligonucleotide
guuuacucuaaaagaugac

SEQ ID NO: 1069960 - RNA, 19 nt, Artificial Sequence
  Description of Artificial Sequence: Synthetic oligonucleotide
cauugcuacuaaguucagc

SEQ ID NO: 1069961 - RNA, 19 nt, Artificial Sequence
  Description of Artificial Sequence: Synthetic oligonucleotide
ugucaugccugugauguua

SEQ ID NO: 1069962 - RNA, 19 nt, Artificial Sequence
  Description of Artificial Sequence: Synthetic oligonucleotide
uucgccgcggcggacuugg

SEQ ID NO: 1069963 - RNA, 19 nt, Artificial Sequence
  Description of Artificial Sequence: Synthetic oligonucleotide
uacuaguccgguugagauc

SEQ ID NO: 1069964 - RNA, 19 nt, Artificial Sequence
  Description of Artificial Sequence: Synthetic oligonucleotide
agugaaagauaguguuaaa

SEQ ID NO: 1069965 - RNA, 19 nt, Artificial Sequence
  Description of Artificial Sequence: Synthetic oligonucleotide
uugacagcacccuggcuua

SEQ ID NO: 1069966 - RNA, 19 nt, Artificial Sequence
  Description of Artificial Sequence: Synthetic oligonucleotide
gagcuaggagacuggcggc

SEQ ID NO: 1069967 - RNA, 19 nt, Artificial Sequence
  Description of Artificial Sequence: Synthetic oligonucleotide
gaaacuuuagaggcuacau

SEQ ID NO: 1069968 - RNA, 19 nt, Artificial Sequence
  Description of Artificial Sequence: Synthetic oligonucleotide
agacuggcggcaaagucug

SEQ ID NO: 1069969 - RNA, 19 nt, Artificial Sequence
  Description of Artificial Sequence: Synthetic oligonucleotide
cccuggcuuauuaauauac

SEQ ID NO: 1069970 - RNA, 19 nt, Artificial Sequence
  Description of Artificial Sequence: Synthetic oligonucleotide
cauuuccgaacuuucauau

SEQ ID NO: 1069971 - RNA, 19 nt, Artificial Sequence
  Description of Artificial Sequence: Synthetic oligonucleotide
agacacgcuucugaagcag

SEQ ID NO: 1069972 - RNA, 19 nt, Artificial Sequence
  Description of Artificial Sequence: Synthetic oligonucleotide
auagugaaagauaguguua

SEQ ID NO: 1069973 - RNA, 19 nt, Artificial Sequence
  Description of Artificial Sequence: Synthetic oligonucleotide
agauuacaaucaguuuucu

SEQ ID NO: 1069974 - RNA, 19 nt, Artificial Sequence
  Description of Artificial Sequence: Synthetic oligonucleotide
gugugaauucuaagcagac

SEQ ID NO: 1069975 - RNA, 19 nt, Artificial Sequence
  Description of Artificial Sequence: Synthetic oligonucleotide
  modified_base (12)..(12): a, c, u, g, unknown or other
guuucuaaaugnuccuuau

SEQ ID NO: 1069976 - RNA, 19 nt, Artificial Sequence
  Description of Artificial Sequence: Synthetic oligonucleotide
agaggcgccuguucuggug

SEQ ID NO: 1069977 - RNA, 19 nt, Artificial Sequence
  Description of Artificial Sequence: Synthetic oligonucleotide
gagacuggcggcaaagucu

SEQ ID NO: 1069978 - RNA, 19 nt, Artificial Sequence
  Description of Artificial Sequence: Synthetic oligonucleotide
aagcccuaauuugcaauau

SEQ ID NO: 1069979 - RNA, 19 nt, Artificial Sequence
  Description of Artificial Sequence: Synthetic oligonucleotide
caaagcguagcgacaaucu

SEQ ID NO: 1069980 - RNA, 19 nt, Artificial Sequence
  Description of Artificial Sequence: Synthetic oligonucleotide
uccaaguguucagcagucc

SEQ ID NO: 1069981 - RNA, 19 nt, Artificial Sequence
  Description of Artificial Sequence: Synthetic oligonucleotide
guuaugguaucaccaacau

SEQ ID NO: 1069982 - RNA, 19 nt, Artificial Sequence
  Description of Artificial Sequence: Synthetic oligonucleotide
ccggugaggagcauuuccg

SEQ ID NO: 1069983 - RNA, 19 nt, Artificial Sequence
  Description of Artificial Sequence: Synthetic oligonucleotide
ccgcgagguagcaagaccc

SEQ ID NO: 1069984 - RNA, 19 nt, Artificial Sequence
  Description of Artificial Sequence: Synthetic oligonucleotide
gugagaucuggccuaauau

SEQ ID NO: 1069985 - RNA, 19 nt, Artificial Sequence
  Description of Artificial Sequence: Synthetic oligonucleotide
gguucugaaggagaaauua

SEQ ID NO: 1069986 - RNA, 19 nt, Artificial Sequence
  Description of Artificial Sequence: Synthetic oligonucleotide
gcgaacgcaaggcggaugc

SEQ ID NO: 1069987 - RNA, 19 nt, Artificial Sequence
  Description of Artificial Sequence: Synthetic oligonucleotide
agagcgaacgcaaggcgga

SEQ ID NO: 1069988 - RNA, 19 nt, Artificial Sequence
  Description of Artificial Sequence: Synthetic oligonucleotide
ucgagcuugcauagaucau

SEQ ID NO: 1069989 - RNA, 19 nt, Artificial Sequence
  Description of Artificial Sequence: Synthetic oligonucleotide
aggccauguucgccgcggc

SEQ ID NO: 1069990 - RNA, 19 nt, Artificial Sequence
  Description of Artificial Sequence: Synthetic oligonucleotide
augcgacauacuucaucug

SEQ ID NO: 1069991 - RNA, 19 nt, Artificial Sequence
  Description of Artificial Sequence: Synthetic oligonucleotide
cuacacaggggauccuuca

SEQ ID NO: 1069992 - RNA, 19 nt, Artificial Sequence
  Description of Artificial Sequence: Synthetic oligonucleotide
caauacuaguccgguugag

SEQ ID NO: 1069993 - RNA, 19 nt, Artificial Sequence
  Description of Artificial Sequence: Synthetic oligonucleotide
aaauaggcauuuggccaau

SEQ ID NO: 1069994 - RNA, 19 nt, Artificial Sequence
  Description of Artificial Sequence: Synthetic oligonucleotide
guagcaagacccggagagc

SEQ ID NO: 1069995 - RNA, 19 nt, Artificial Sequence
  Description of Artificial Sequence: Synthetic oligonucleotide
aaggcggaugcgacagcuc

SEQ ID NO: 1069996 - RNA, 19 nt, Artificial Sequence
  Description of Artificial Sequence: Synthetic oligonucleotide
agccagcauugcuacuaag

SEQ ID NO: 1069997 - RNA, 19 nt, Artificial Sequence
  Description of Artificial Sequence: Synthetic oligonucleotide
cucaggaagcauucccaca

SEQ ID NO: 1069998 - RNA, 19 nt, Artificial Sequence
  Description of Artificial Sequence: Synthetic oligonucleotide
gcuguuugugcaucucuac

SEQ ID NO: 1069999 - RNA, 19 nt, Artificial Sequence
  Description of Artificial Sequence: Synthetic oligonucleotide
caaugaaacuuuagaggcu

SEQ ID NO: 1070000 - RNA, 19 nt, Artificial Sequence
  Description of Artificial Sequence: Synthetic oligonucleotide
gaaacguacuccacacucu

SEQ ID NO: 1070001 - RNA, 19 nt, Artificial Sequence
  Description of Artificial Sequence: Synthetic oligonucleotide
agcgaagauuagaguucgc

SEQ ID NO: 1070002 - RNA, 19 nt, Artificial Sequence
  Description of Artificial Sequence: Synthetic oligonucleotide
cauagauuacaaucaguuu

SEQ ID NO: 1070003 - RNA, 19 nt, Artificial Sequence
  Description of Artificial Sequence: Synthetic oligonucleotide
agcucgcaucguacaaagc

SEQ ID NO: 1070004 - RNA, 19 nt, Artificial Sequence
  Description of Artificial Sequence: Synthetic oligonucleotide
cauccuaccaggccccaga

SEQ ID NO: 1070005 - RNA, 19 nt, Artificial Sequence
  Description of Artificial Sequence: Synthetic oligonucleotide
caaauuccccucagugaga

SEQ ID NO: 1070006 - RNA, 19 nt, Artificial Sequence
  Description of Artificial Sequence: Synthetic oligonucleotide
ggagacuggcggcaaaguc

SEQ ID NO: 1070007 - RNA, 19 nt, Artificial Sequence
  Description of Artificial Sequence: Synthetic oligonucleotide
caaagcucgcaucguacaa

SEQ ID NO: 1070008 - RNA, 19 nt, Artificial Sequence
  Description of Artificial Sequence: Synthetic oligonucleotide
cucgcaucguacaaagcgu

SEQ ID NO: 1070009 - RNA, 19 nt, Artificial Sequence
  Description of Artificial Sequence: Synthetic oligonucleotide
aaaaugcgacauacuucau

SEQ ID NO: 1070010 - RNA, 19 nt, Artificial Sequence
  Description of Artificial Sequence: Synthetic oligonucleotide
ggagcauuuccgaacuuuc

SEQ ID NO: 1070011 - RNA, 19 nt, Artificial Sequence
  Description of Artificial Sequence: Synthetic oligonucleotide
agcuaggagacuggcggca

SEQ ID NO: 1070012 - RNA, 19 nt, Artificial Sequence
  Description of Artificial Sequence: Synthetic oligonucleotide
gcaauacuaguccgguuga

SEQ ID NO: 1070013 - RNA, 19 nt, Artificial Sequence
  Description of Artificial Sequence: Synthetic oligonucleotide
aguucgcuucacauugccu

SEQ ID NO: 1070014 - RNA, 19 nt, Artificial Sequence
  Description of Artificial Sequence: Synthetic oligonucleotide
guacuauuuugugaacugu

SEQ ID NO: 1070015 - RNA, 19 nt, Artificial Sequence
  Description of Artificial Sequence: Synthetic oligonucleotide
gacccggagagcgaacgca

SEQ ID NO: 1070016 - RNA, 19 nt, Artificial Sequence
  Description of Artificial Sequence: Synthetic oligonucleotide
  modified_base (4)..(4): a, c, u, g, unknown or other
  modified_base (15)..(15): a, c, u, g, unknown or other
augnuccuuauuacnuaaa

SEQ ID NO: 1070017 - RNA, 19 nt, Artificial Sequence
  Description of Artificial Sequence: Synthetic oligonucleotide
caccguaagcaguuuccca

SEQ ID NO: 1070018 - RNA, 19 nt, Artificial Sequence
  Description of Artificial Sequence: Synthetic oligonucleotide
cagugucaugccugugaug

SEQ ID NO: 1070019 - RNA, 19 nt, Artificial Sequence
  Description of Artificial Sequence: Synthetic oligonucleotide
gcccuaauuugcaauauaa

SEQ ID NO: 1070020 - RNA, 19 nt, Artificial Sequence
  Description of Artificial Sequence: Synthetic oligonucleotide
cugaggauauaccaugauu

SEQ ID NO: 1070021 - RNA, 19 nt, Artificial Sequence
  Description of Artificial Sequence: Synthetic oligonucleotide
gcggacuuggagaggagag

SEQ ID NO: 1070022 - RNA, 19 nt, Artificial Sequence
  Description of Artificial Sequence: Synthetic oligonucleotide
ucuuccggugaggagcauu

SEQ ID NO: 1070023 - RNA, 19 nt, Artificial Sequence
  Description of Artificial Sequence: Synthetic oligonucleotide
agauaguguuaaacaugga

SEQ ID NO: 1070024 - RNA, 19 nt, Artificial Sequence
  Description of Artificial Sequence: Synthetic oligonucleotide
aauaggcauuuggccaaua

SEQ ID NO: 1070025 - RNA, 19 nt, Artificial Sequence
  Description of Artificial Sequence: Synthetic oligonucleotide
guuugugcaucucuacauu

SEQ ID NO: 1070026 - RNA, 19 nt, Artificial Sequence
  Description of Artificial Sequence: Synthetic oligonucleotide
ccggagagcgaacgcaagg

SEQ ID NO: 1070027 - RNA, 19 nt, Artificial Sequence
  Description of Artificial Sequence: Synthetic oligonucleotide
acccuggcuuauuaauaua

SEQ ID NO: 1070028 - RNA, 19 nt, Artificial Sequence
  Description of Artificial Sequence: Synthetic oligonucleotide
gaugaucuacacaggggau

SEQ ID NO: 1070029 - RNA, 19 nt, Artificial Sequence
  Description of Artificial Sequence: Synthetic oligonucleotide
auucguggcacuggcugau

SEQ ID NO: 1070030 - RNA, 19 nt, Artificial Sequence
  Description of Artificial Sequence: Synthetic oligonucleotide
acgcaaggcggaugcgaca

SEQ ID NO: 1070031 - RNA, 19 nt, Artificial Sequence
  Description of Artificial Sequence: Synthetic oligonucleotide
cuugauauucaugcuuuau

SEQ ID NO: 1070032 - RNA, 19 nt, Artificial Sequence
  Description of Artificial Sequence: Synthetic oligonucleotide
aggagacuggcggcaaagu

SEQ ID NO: 1070033 - RNA, 19 nt, Artificial Sequence
  Description of Artificial Sequence: Synthetic oligonucleotide
agcgaacgcaaggcggaug

SEQ ID NO: 1070034 - RNA, 19 nt, Artificial Sequence
  Description of Artificial Sequence: Synthetic oligonucleotide
gguuagcgaagauuagagu

SEQ ID NO: 1070035 - RNA, 19 nt, Artificial Sequence
  Description of Artificial Sequence: Synthetic oligonucleotide
gauugacagcacccuggcu

SEQ ID NO: 1070036 - RNA, 19 nt, Artificial Sequence
  Description of Artificial Sequence: Synthetic oligonucleotide
gcuguuaguguaaauuagu

SEQ ID NO: 1070037 - RNA, 19 nt, Artificial Sequence
  Description of Artificial Sequence: Synthetic oligonucleotide
gguuugcauccuaccaggc

SEQ ID NO: 1070038 - RNA, 19 nt, Artificial Sequence
  Description of Artificial Sequence: Synthetic oligonucleotide
cacccuggcuuauuaauau

SEQ ID NO: 1070039 - RNA, 19 nt, Artificial Sequence
  Description of Artificial Sequence: Synthetic oligonucleotide
ggccauguucgccgcggcg

SEQ ID NO: 1070040 - RNA, 19 nt, Artificial Sequence
  Description of Artificial Sequence: Synthetic oligonucleotide
uucguggcacuggcugaug

SEQ ID NO: 1070041 - RNA, 19 nt, Artificial Sequence
  Description of Artificial Sequence: Synthetic oligonucleotide
gcgacauacuucaucugca

SEQ ID NO: 1070042 - RNA, 19 nt, Artificial Sequence
  Description of Artificial Sequence: Synthetic oligonucleotide
auguucgccgcggcggacu

SEQ ID NO: 1070043 - RNA, 19 nt, Artificial Sequence
  Description of Artificial Sequence: Synthetic oligonucleotide
gcgagguagcaagacccgg

SEQ ID NO: 1070044 - RNA, 19 nt, Artificial Sequence
  Description of Artificial Sequence: Synthetic oligonucleotide
uguucgccgcggcggacuu

SEQ ID NO: 1070045 - RNA, 19 nt, Artificial Sequence
  Description of Artificial Sequence: Synthetic oligonucleotide
gcuugaaaggaucgguuau

SEQ ID NO: 1070046 - RNA, 19 nt, Artificial Sequence
  Description of Artificial Sequence: Synthetic oligonucleotide
cuccgcgagguagcaagac

SEQ ID NO: 1070047 - RNA, 19 nt, Artificial Sequence
  Description of Artificial Sequence: Synthetic oligonucleotide
auguagaguggugguguuu

SEQ ID NO: 1070048 - RNA, 19 nt, Artificial Sequence
  Description of Artificial Sequence: Synthetic oligonucleotide
agcaagacccggagagcga

SEQ ID NO: 1070049 - RNA, 19 nt, Artificial Sequence
  Description of Artificial Sequence: Synthetic oligonucleotide
cugcaaccugaacuccuga

SEQ ID NO: 1070050 - RNA, 19 nt, Artificial Sequence
  Description of Artificial Sequence: Synthetic oligonucleotide
gucaugccugugauguuaa

SEQ ID NO: 1070051 - RNA, 19 nt, Artificial Sequence
  Description of Artificial Sequence: Synthetic oligonucleotide
cuuccggugaggagcauuu

SEQ ID NO: 1070052 - RNA, 19 nt, Artificial Sequence
  Description of Artificial Sequence: Synthetic oligonucleotide
gcgaagauuagaguucgcu

SEQ ID NO: 1070053 - RNA, 19 nt, Artificial Sequence
  Description of Artificial Sequence: Synthetic oligonucleotide
acauugccuuguacuauuu

SEQ ID NO: 1070054 - RNA, 19 nt, Artificial Sequence
  Description of Artificial Sequence: Synthetic oligonucleotide
cggagagcgaacgcaaggc

SEQ ID NO: 1070055 - RNA, 19 nt, Artificial Sequence
  Description of Artificial Sequence: Synthetic oligonucleotide
gacuuggagaggagagcua

SEQ ID NO: 1070056 - RNA, 19 nt, Artificial Sequence
  Description of Artificial Sequence: Synthetic oligonucleotide
gccagcauugcuacuaagu

SEQ ID NO: 1070057 - RNA, 19 nt, Artificial Sequence
  Description of Artificial Sequence: Synthetic oligonucleotide
cgcgagguagcaagacccg

SEQ ID NO: 1070058 - RNA, 19 nt, Artificial Sequence
  Description of Artificial Sequence: Synthetic oligonucleotide
cgguuaugguaucaccaac

SEQ ID NO: 1070059 - RNA, 19 nt, Artificial Sequence
  Description of Artificial Sequence: Synthetic oligonucleotide
ggcuacauuuauguagagu

SEQ ID NO: 1070060 - RNA, 19 nt, Artificial Sequence
  Description of Artificial Sequence: Synthetic oligonucleotide
uuccggugaggagcauuuc

SEQ ID NO: 1070061 - RNA, 19 nt, Artificial Sequence
  Description of Artificial Sequence: Synthetic oligonucleotide
ggugguguuugcacacauc

SEQ ID NO: 1070062 - RNA, 19 nt, Artificial Sequence
  Description of Artificial Sequence: Synthetic oligonucleotide
acccggagagcgaacgcaa

SEQ ID NO: 1070063 - RNA, 19 nt, Artificial Sequence
  Description of Artificial Sequence: Synthetic oligonucleotide
cgcaaggcggaugcgacag

SEQ ID NO: 1070064 - RNA, 19 nt, Artificial Sequence
  Description of Artificial Sequence: Synthetic oligonucleotide
ccuggcuuauuaauauacu

SEQ ID NO: 1070065 - RNA, 19 nt, Artificial Sequence
  Description of Artificial Sequence: Synthetic oligonucleotide
gugcagcguccuccgcgag

SEQ ID NO: 1070066 - RNA, 19 nt, Artificial Sequence
  Description of Artificial Sequence: Synthetic oligonucleotide
cauguucgccgcggcggac

SEQ ID NO: 1070067 - RNA, 19 nt, Artificial Sequence
  Description of Artificial Sequence: Synthetic oligonucleotide
ggcggacuuggagaggaga

SEQ ID NO: 1070068 - RNA, 19 nt, Artificial Sequence
  Description of Artificial Sequence: Synthetic oligonucleotide
cccuaauuugcaauauaau

SEQ ID NO: 1070069 - RNA, 19 nt, Artificial Sequence
  Description of Artificial Sequence: Synthetic oligonucleotide
gcaagacccggagagcgaa

SEQ ID NO: 1070070 - RNA, 19 nt, Artificial Sequence
  Description of Artificial Sequence: Synthetic oligonucleotide
gcggcggacuuggagagga

SEQ ID NO: 1070071 - RNA, 19 nt, Artificial Sequence
  Description of Artificial Sequence: Synthetic oligonucleotide
cgagguagcaagacccgga

SEQ ID NO: 1070072 - RNA, 19 nt, Artificial Sequence
  Description of Artificial Sequence: Synthetic oligonucleotide
agauuacaaugaagcccua

SEQ ID NO: 1070073 - RNA, 19 nt, Artificial Sequence
  Description of Artificial Sequence: Synthetic oligonucleotide
gaagacugccuggcuuagu

SEQ ID NO: 1070074 - RNA, 19 nt, Artificial Sequence
  Description of Artificial Sequence: Synthetic oligonucleotide
gaucuacacaggggauccu

SEQ ID NO: 1070075 - RNA, 19 nt, Artificial Sequence
  Description of Artificial Sequence: Synthetic oligonucleotide
ccucaugaaaauaggcauu

SEQ ID NO: 1070076 - RNA, 19 nt, Artificial Sequence
  Description of Artificial Sequence: Synthetic oligonucleotide
gcaguccccugugaguguc

SEQ ID NO: 1070077 - RNA, 19 nt, Artificial Sequence
  Description of Artificial Sequence: Synthetic oligonucleotide
caguccccugugaguguca

SEQ ID NO: 1070078 - RNA, 19 nt, Artificial Sequence
  Description of Artificial Sequence: Synthetic oligonucleotide
gcguccuccgcgagguagc

SEQ ID NO: 1070079 - RNA, 19 nt, Artificial Sequence
  Description of Artificial Sequence: Synthetic oligonucleotide
gcuacuaaguucagcuguu

SEQ ID NO: 1070080 - RNA, 19 nt, Artificial Sequence
  Description of Artificial Sequence: Synthetic oligonucleotide
cagcaauacuaguccgguu

SEQ ID NO: 1070081 - RNA, 19 nt, Artificial Sequence
  Description of Artificial Sequence: Synthetic oligonucleotide
guucgccgcggcggacuug

SEQ ID NO: 1070082 - RNA, 19 nt, Artificial Sequence
  Description of Artificial Sequence: Synthetic oligonucleotide
ggcgccuguucuggugccc

SEQ ID NO: 1070083 - RNA, 19 nt, Artificial Sequence
  Description of Artificial Sequence: Synthetic oligonucleotide
ggcggaugcgacagcucga

SEQ ID NO: 1070084 - RNA, 19 nt, Artificial Sequence
  Description of Artificial Sequence: Synthetic oligonucleotide
cggugaggagcauuuccga

SEQ ID NO: 1070085 - RNA, 19 nt, Artificial Sequence
  Description of Artificial Sequence: Synthetic oligonucleotide
ccauguucgccgcggcgga

SEQ ID NO: 1070086 - RNA, 19 nt, Artificial Sequence
  Description of Artificial Sequence: Synthetic oligonucleotide
cgacaaucuuucucaggaa

SEQ ID NO: 1070087 - RNA, 19 nt, Artificial Sequence
  Description of Artificial Sequence: Synthetic oligonucleotide
ucgccgcggcggacuugga

SEQ ID NO: 1070088 - RNA, 19 nt, Artificial Sequence
  Description of Artificial Sequence: Synthetic oligonucleotide
gugucaugccugugauguu

SEQ ID NO: 1070089 - RNA, 19 nt, Artificial Sequence
  Description of Artificial Sequence: Synthetic oligonucleotide
cgaacgcaaggcggaugcg

SEQ ID NO: 1070090 - RNA, 19 nt, Artificial Sequence
  Description of Artificial Sequence: Synthetic oligonucleotide
gccucucacugcagggaca

SEQ ID NO: 1070091 - RNA, 19 nt, Artificial Sequence
  Description of Artificial Sequence: Synthetic oligonucleotide
gagcgaacgcaaggcggau

SEQ ID NO: 1070092 - RNA, 19 nt, Artificial Sequence
  Description of Artificial Sequence: Synthetic oligonucleotide
ccuccgcgagguagcaaga

SEQ ID NO: 1070093 - RNA, 19 nt, Artificial Sequence
  Description of Artificial Sequence: Synthetic oligonucleotide
cgccgcggcggacuuggag

SEQ ID NO: 1070094 - RNA, 19 nt, Artificial Sequence
  Description of Artificial Sequence: Synthetic oligonucleotide
cggcggacuuggagaggag

SEQ ID NO: 1070095 - RNA, 19 nt, Artificial Sequence
  Description of Artificial Sequence: Synthetic oligonucleotide
cuaguccgguugagaucuu

SEQ ID NO: 1070096 - RNA, 19 nt, Artificial Sequence
  Description of Artificial Sequence: Synthetic oligonucleotide
cucucacugcagggacagu

SEQ ID NO: 1070097 - RNA, 19 nt, Artificial Sequence
  Description of Artificial Sequence: Synthetic oligonucleotide
cgcggcggacuuggagagg

SEQ ID NO: 1070098 - RNA, 19 nt, Artificial Sequence
  Description of Artificial Sequence: Synthetic oligonucleotide
  modified_base (1)..(1): a, c, u, g, unknown or other
  modified_base (12)..(12): a, c, u, g, unknown or other
nuccuuauuacnuaaagcc

SEQ ID NO: 1070099 - RNA, 19 nt, Artificial Sequence
  Description of Artificial Sequence: Synthetic oligonucleotide
  modified_base (1)..(1): a, c, u, g, unknown or other
nuaaagccagcauugcuac

SEQ ID NO: 1070100 - RNA, 19 nt, Artificial Sequence
  Description of Artificial Sequence: Synthetic oligonucleotide
uaaacaaugacccaguccg

SEQ ID NO: 1070101 - RNA, 19 nt, Artificial Sequence
  Description of Artificial Sequence: Synthetic oligonucleotide
aauagcuuuaaaguaaggc

SEQ ID NO: 1070102 - RNA, 19 nt, Artificial Sequence
  Description of Artificial Sequence: Synthetic oligonucleotide
agaucuuaaacaaugaccc

SEQ ID NO: 1070103 - RNA, 19 nt, Artificial Sequence
  Description of Artificial Sequence: Synthetic oligonucleotide
auagucaucacuucuacac

SEQ ID NO: 1070104 - RNA, 19 nt, Artificial Sequence
  Description of Artificial Sequence: Synthetic oligonucleotide
auauauugcacuuccauuc

SEQ ID NO: 1070105 - RNA, 19 nt, Artificial Sequence
  Description of Artificial Sequence: Synthetic oligonucleotide
uugaacuagaauaagaaaa

SEQ ID NO: 1070106 - RNA, 19 nt, Artificial Sequence
  Description of Artificial Sequence: Synthetic oligonucleotide
uuagggaaaauccaguccc

SEQ ID NO: 1070107 - RNA, 19 nt, Artificial Sequence
  Description of Artificial Sequence: Synthetic oligonucleotide
acauggacguuccagaacc

SEQ ID NO: 1070108 - RNA, 19 nt, Artificial Sequence
  Description of Artificial Sequence: Synthetic oligonucleotide
gaaauccucauuucaagcg

SEQ ID NO: 1070109 - RNA, 19 nt, Artificial Sequence
  Description of Artificial Sequence: Synthetic oligonucleotide
uuuagagauuuauugauca

SEQ ID NO: 1070110 - RNA, 19 nt, Artificial Sequence
  Description of Artificial Sequence: Synthetic oligonucleotide
aaagcaaucagcugucuug

SEQ ID NO: 1070111 - RNA, 19 nt, Artificial Sequence
  Description of Artificial Sequence: Synthetic oligonucleotide
ugaauguacaugcaaccgg

SEQ ID NO: 1070112 - RNA, 19 nt, Artificial Sequence
  Description of Artificial Sequence: Synthetic oligonucleotide
uauugaacuagaauaagaa

SEQ ID NO: 1070113 - RNA, 19 nt, Artificial Sequence
  Description of Artificial Sequence: Synthetic oligonucleotide
auagcuuuaaaguaaggca

SEQ ID NO: 1070114 - RNA, 19 nt, Artificial Sequence
  Description of Artificial Sequence: Synthetic oligonucleotide
uuagucuaaagcaaucagc

SEQ ID NO: 1070115 - RNA, 19 nt, Artificial Sequence
  Description of Artificial Sequence: Synthetic oligonucleotide
uuuagucuaaagcaaucag

SEQ ID NO: 1070116 - RNA, 19 nt, Artificial Sequence
  Description of Artificial Sequence: Synthetic oligonucleotide
aguucuaagguaccuaggg

SEQ ID NO: 1070117 - RNA, 19 nt, Artificial Sequence
  Description of Artificial Sequence: Synthetic oligonucleotide
ucuguauagaccauguuuc

SEQ ID NO: 1070118 - RNA, 19 nt, Artificial Sequence
  Description of Artificial Sequence: Synthetic oligonucleotide
auuugaacacaacugugac

SEQ ID NO: 1070119 - RNA, 19 nt, Artificial Sequence
  Description of Artificial Sequence: Synthetic oligonucleotide
cagaucuuaaacaaugacc

SEQ ID NO: 1070120 - RNA, 19 nt, Artificial Sequence
  Description of Artificial Sequence: Synthetic oligonucleotide
uagucuaaagcaaucagcu

SEQ ID NO: 1070121 - RNA, 19 nt, Artificial Sequence
  Description of Artificial Sequence: Synthetic oligonucleotide
aguccguuuguuuucaugg

SEQ ID NO: 1070122 - RNA, 19 nt, Artificial Sequence
  Description of Artificial Sequence: Synthetic oligonucleotide
uacaucagaguguuggugg

SEQ ID NO: 1070123 - RNA, 19 nt, Artificial Sequence
  Description of Artificial Sequence: Synthetic oligonucleotide
agauuuacuugcuuguagg

SEQ ID NO: 1070124 - RNA, 19 nt, Artificial Sequence
  Description of Artificial Sequence: Synthetic oligonucleotide
accaauggaauuuacaccu

SEQ ID NO: 1070125 - RNA, 19 nt, Artificial Sequence
  Description of Artificial Sequence: Synthetic oligonucleotide
acucuaagggcuuaucuac

SEQ ID NO: 1070126 - RNA, 19 nt, Artificial Sequence
  Description of Artificial Sequence: Synthetic oligonucleotide
uguacaugcaaccggcggg

SEQ ID NO: 1070127 - RNA, 19 nt, Artificial Sequence
  Description of Artificial Sequence: Synthetic oligonucleotide
uaacaauaaacccucauuu

SEQ ID NO: 1070128 - RNA, 19 nt, Artificial Sequence
  Description of Artificial Sequence: Synthetic oligonucleotide
aucagauuguuuuagaaaa

SEQ ID NO: 1070129 - RNA, 19 nt, Artificial Sequence
  Description of Artificial Sequence: Synthetic oligonucleotide
uccagaaccccacugagcc

SEQ ID NO: 1070130 - RNA, 19 nt, Artificial Sequence
  Description of Artificial Sequence: Synthetic oligonucleotide
uuuccaguuaucaaugaac

SEQ ID NO: 1070131 - RNA, 19 nt, Artificial Sequence
  Description of Artificial Sequence: Synthetic oligonucleotide
uuggcuuaugaucacacug

SEQ ID NO: 1070132 - RNA, 19 nt, Artificial Sequence
  Description of Artificial Sequence: Synthetic oligonucleotide
cagaaaguagaguaguugc

SEQ ID NO: 1070133 - RNA, 19 nt, Artificial Sequence
  Description of Artificial Sequence: Synthetic oligonucleotide
cauggcuauaacaauaaac

SEQ ID NO: 1070134 - RNA, 19 nt, Artificial Sequence
  Description of Artificial Sequence: Synthetic oligonucleotide
uuccaguuaucaaugaaca

SEQ ID NO: 1070135 - RNA, 19 nt, Artificial Sequence
  Description of Artificial Sequence: Synthetic oligonucleotide
uguuucuauauauugcacu

SEQ ID NO: 1070136 - RNA, 19 nt, Artificial Sequence
  Description of Artificial Sequence: Synthetic oligonucleotide
auauagucaucacuucuac

SEQ ID NO: 1070137 - RNA, 19 nt, Artificial Sequence
  Description of Artificial Sequence: Synthetic oligonucleotide
augaacaguccagaaaucc

SEQ ID NO: 1070138 - RNA, 19 nt, Artificial Sequence
  Description of Artificial Sequence: Synthetic oligonucleotide
ugacaagguaauaaguaca

SEQ ID NO: 1070139 - RNA, 19 nt, Artificial Sequence
  Description of Artificial Sequence: Synthetic oligonucleotide
uucuaagguaccuagggac

SEQ ID NO: 1070140 - RNA, 19 nt, Artificial Sequence
  Description of Artificial Sequence: Synthetic oligonucleotide
accuauaguaaccaguucu

SEQ ID NO: 1070141 - RNA, 19 nt, Artificial Sequence
  Description of Artificial Sequence: Synthetic oligonucleotide
aaguccaacaccagaacac

SEQ ID NO: 1070142 - RNA, 19 nt, Artificial Sequence
  Description of Artificial Sequence: Synthetic oligonucleotide
ugcaaaaggacauccacac

SEQ ID NO: 1070143 - RNA, 19 nt, Artificial Sequence
  Description of Artificial Sequence: Synthetic oligonucleotide
auuuacaccuauaguaacc

SEQ ID NO: 1070144 - RNA, 19 nt, Artificial Sequence
  Description of Artificial Sequence: Synthetic oligonucleotide
uagauuuacuugcuuguag

SEQ ID NO: 1070145 - RNA, 19 nt, Artificial Sequence
  Description of Artificial Sequence: Synthetic oligonucleotide
uagcuuuaaaguaaggcaa

SEQ ID NO: 1070146 - RNA, 19 nt, Artificial Sequence
  Description of Artificial Sequence: Synthetic oligonucleotide
uugaacacaacugugacau

SEQ ID NO: 1070147 - RNA, 19 nt, Artificial Sequence
  Description of Artificial Sequence: Synthetic oligonucleotide
uuuaacaggacuguggcaa

SEQ ID NO: 1070148 - RNA, 19 nt, Artificial Sequence
  Description of Artificial Sequence: Synthetic oligonucleotide
acagacuggacauuucagg

SEQ ID NO: 1070149 - RNA, 19 nt, Artificial Sequence
  Description of Artificial Sequence: Synthetic oligonucleotide
aaaccaaggaacaguaauc

SEQ ID NO: 1070150 - RNA, 19 nt, Artificial Sequence
  Description of Artificial Sequence: Synthetic oligonucleotide
acuucuccguuauagcccc

SEQ ID NO: 1070151 - RNA, 19 nt, Artificial Sequence
  Description of Artificial Sequence: Synthetic oligonucleotide
agugaaaguaaacgggcuc

SEQ ID NO: 1070152 - RNA, 19 nt, Artificial Sequence
  Description of Artificial Sequence: Synthetic oligonucleotide
aacuagaauaagaaaacgu

SEQ ID NO: 1070153 - RNA, 19 nt, Artificial Sequence
  Description of Artificial Sequence: Synthetic oligonucleotide
cugcccauaaauaaaggag

SEQ ID NO: 1070154 - RNA, 19 nt, Artificial Sequence
  Description of Artificial Sequence: Synthetic oligonucleotide
uauauugcacuuccauucc

SEQ ID NO: 1070155 - RNA, 19 nt, Artificial Sequence
  Description of Artificial Sequence: Synthetic oligonucleotide
gacuccaccagucagugug

SEQ ID NO: 1070156 - RNA, 19 nt, Artificial Sequence
  Description of Artificial Sequence: Synthetic oligonucleotide
ucuaagguaccuagggacc

SEQ ID NO: 1070157 - RNA, 19 nt, Artificial Sequence
  Description of Artificial Sequence: Synthetic oligonucleotide
ugccuaacgaguacaacag

SEQ ID NO: 1070158 - RNA, 19 nt, Artificial Sequence
  Description of Artificial Sequence: Synthetic oligonucleotide
uaucuacagucauugauca

SEQ ID NO: 1070159 - RNA, 19 nt, Artificial Sequence
  Description of Artificial Sequence: Synthetic oligonucleotide
agcaauuacugccacuuag

SEQ ID NO: 1070160 - RNA, 19 nt, Artificial Sequence
  Description of Artificial Sequence: Synthetic oligonucleotide
cuguguuaguccaaggugc

SEQ ID NO: 1070161 - RNA, 19 nt, Artificial Sequence
  Description of Artificial Sequence: Synthetic oligonucleotide
acaauaaacccucauuuaa

SEQ ID NO: 1070162 - RNA, 19 nt, Artificial Sequence
  Description of Artificial Sequence: Synthetic oligonucleotide
aucacuucuccguuauagc

SEQ ID NO: 1070163 - RNA, 19 nt, Artificial Sequence
  Description of Artificial Sequence: Synthetic oligonucleotide
uccacacuauuuaacagga

SEQ ID NO: 1070164 - RNA, 19 nt, Artificial Sequence
  Description of Artificial Sequence: Synthetic oligonucleotide
uauauagucaucacuucua

SEQ ID NO: 1070165 - RNA, 19 nt, Artificial Sequence
  Description of Artificial Sequence: Synthetic oligonucleotide
guagcagggagcuucaccc

SEQ ID NO: 1070166 - RNA, 19 nt, Artificial Sequence
  Description of Artificial Sequence: Synthetic oligonucleotide
uugcaaaucucacaaacua

SEQ ID NO: 1070167 - RNA, 19 nt, Artificial Sequence
  Description of Artificial Sequence: Synthetic oligonucleotide
aaugcuggugacccuuagg

SEQ ID NO: 1070168 - RNA, 19 nt, Artificial Sequence
  Description of Artificial Sequence: Synthetic oligonucleotide
cucuaacaaaccaaggaac

SEQ ID NO: 1070169 - RNA, 19 nt, Artificial Sequence
  Description of Artificial Sequence: Synthetic oligonucleotide
uggcuauaacaauaaaccc

SEQ ID NO: 1070170 - RNA, 19 nt, Artificial Sequence
  Description of Artificial Sequence: Synthetic oligonucleotide
ucacaaacuagaaggguga

SEQ ID NO: 1070171 - RNA, 19 nt, Artificial Sequence
  Description of Artificial Sequence: Synthetic oligonucleotide
agucccauuuacucuaagg

SEQ ID NO: 1070172 - RNA, 19 nt, Artificial Sequence
  Description of Artificial Sequence: Synthetic oligonucleotide
uugaucagguaaccaaucc

SEQ ID NO: 1070173 - RNA, 19 nt, Artificial Sequence
  Description of Artificial Sequence: Synthetic oligonucleotide
agaaaacugccucggacuc

SEQ ID NO: 1070174 - RNA, 19 nt, Artificial Sequence
  Description of Artificial Sequence: Synthetic oligonucleotide
gaccaauggaauuuacacc

SEQ ID NO: 1070175 - RNA, 19 nt, Artificial Sequence
  Description of Artificial Sequence: Synthetic oligonucleotide
gauagguacagaaaguaga

SEQ ID NO: 1070176 - RNA, 19 nt, Artificial Sequence
  Description of Artificial Sequence: Synthetic oligonucleotide
aacaauaaacccucauuua

SEQ ID NO: 1070177 - RNA, 19 nt, Artificial Sequence
  Description of Artificial Sequence: Synthetic oligonucleotide
uuuuagucuaaagcaauca

SEQ ID NO: 1070178 - RNA, 19 nt, Artificial Sequence
  Description of Artificial Sequence: Synthetic oligonucleotide
cuuagggaaaauccagucc

SEQ ID NO: 1070179 - RNA, 19 nt, Artificial Sequence
  Description of Artificial Sequence: Synthetic oligonucleotide
gaguaguugcuauauaguc

SEQ ID NO: 1070180 - RNA, 19 nt, Artificial Sequence
  Description of Artificial Sequence: Synthetic oligonucleotide
acucuaacaaaccaaggaa

SEQ ID NO: 1070181 - RNA, 19 nt, Artificial Sequence
  Description of Artificial Sequence: Synthetic oligonucleotide
aaguaaacgggcucuggca

SEQ ID NO: 1070182 - RNA, 19 nt, Artificial Sequence
  Description of Artificial Sequence: Synthetic oligonucleotide
auauugcacuuccauuccc

SEQ ID NO: 1070183 - RNA, 19 nt, Artificial Sequence
  Description of Artificial Sequence: Synthetic oligonucleotide
uggaauuuacaccuauagu

SEQ ID NO: 1070184 - RNA, 19 nt, Artificial Sequence
  Description of Artificial Sequence: Synthetic oligonucleotide
uauaacaauaaacccucau

SEQ ID NO: 1070185 - RNA, 19 nt, Artificial Sequence
  Description of Artificial Sequence: Synthetic oligonucleotide
uucgggagagguuugcuag

SEQ ID NO: 1070186 - RNA, 19 nt, Artificial Sequence
  Description of Artificial Sequence: Synthetic oligonucleotide
uuacucuaagggcuuaucu

SEQ ID NO: 1070187 - RNA, 19 nt, Artificial Sequence
  Description of Artificial Sequence: Synthetic oligonucleotide
aaugcauggcuauaacaau

SEQ ID NO: 1070188 - RNA, 19 nt, Artificial Sequence
  Description of Artificial Sequence: Synthetic oligonucleotide
augccuaacgaguacaaca

SEQ ID NO: 1070189 - RNA, 19 nt, Artificial Sequence
  Description of Artificial Sequence: Synthetic oligonucleotide
uuuacaccuauaguaacca

SEQ ID NO: 1070190 - RNA, 19 nt, Artificial Sequence
  Description of Artificial Sequence: Synthetic oligonucleotide
gaucacauggcaugcacac

SEQ ID NO: 1070191 - RNA, 19 nt, Artificial Sequence
  Description of Artificial Sequence: Synthetic oligonucleotide
uuaacccucaaguccaaca

SEQ ID NO: 1070192 - RNA, 19 nt, Artificial Sequence
  Description of Artificial Sequence: Synthetic oligonucleotide
caauaaacccucauuuaac

SEQ ID NO: 1070193 - RNA, 19 nt, Artificial Sequence
  Description of Artificial Sequence: Synthetic oligonucleotide
aaccaaggaacaguaaucu

SEQ ID NO: 1070194 - RNA, 19 nt, Artificial Sequence
  Description of Artificial Sequence: Synthetic oligonucleotide
augaauguacaugcaaccg

SEQ ID NO: 1070195 - RNA, 19 nt, Artificial Sequence
  Description of Artificial Sequence: Synthetic oligonucleotide
gaauguacaugcaaccggc

SEQ ID NO: 1070196 - RNA, 19 nt, Artificial Sequence
  Description of Artificial Sequence: Synthetic oligonucleotide
uugcuauauagucaucacu

SEQ ID NO: 1070197 - RNA, 19 nt, Artificial Sequence
  Description of Artificial Sequence: Synthetic oligonucleotide
ucuaaagcaaucagcuguc

SEQ ID NO: 1070198 - RNA, 19 nt, Artificial Sequence
  Description of Artificial Sequence: Synthetic oligonucleotide
uuugaacacaacugugaca

SEQ ID NO: 1070199 - RNA, 19 nt, Artificial Sequence
  Description of Artificial Sequence: Synthetic oligonucleotide
auguacaugcaaccggcgg

SEQ ID NO: 1070200 - RNA, 19 nt, Artificial Sequence
  Description of Artificial Sequence: Synthetic oligonucleotide
cagauuguuuuagaaaacc

SEQ ID NO: 1070201 - RNA, 19 nt, Artificial Sequence
  Description of Artificial Sequence: Synthetic oligonucleotide
auuucaagcguucgaugag

SEQ ID NO: 1070202 - RNA, 19 nt, Artificial Sequence
  Description of Artificial Sequence: Synthetic oligonucleotide
uguguauggccucgcaacc

SEQ ID NO: 1070203 - RNA, 19 nt, Artificial Sequence
  Description of Artificial Sequence: Synthetic oligonucleotide
uauugcacuuccauuccca

SEQ ID NO: 1070204 - RNA, 19 nt, Artificial Sequence
  Description of Artificial Sequence: Synthetic oligonucleotide
aagauagguacagaaagua

SEQ ID NO: 1070205 - RNA, 19 nt, Artificial Sequence
  Description of Artificial Sequence: Synthetic oligonucleotide
auagguacagaaaguagag

SEQ ID NO: 1070206 - RNA, 19 nt, Artificial Sequence
  Description of Artificial Sequence: Synthetic oligonucleotide
aguaaccaguucuugaaau

SEQ ID NO: 1070207 - RNA, 19 nt, Artificial Sequence
  Description of Artificial Sequence: Synthetic oligonucleotide
uccuguguuaguccaaggu

SEQ ID NO: 1070208 - RNA, 19 nt, Artificial Sequence
  Description of Artificial Sequence: Synthetic oligonucleotide
aggacuguggcaaauagcu

SEQ ID NO: 1070209 - RNA, 19 nt, Artificial Sequence
  Description of Artificial Sequence: Synthetic oligonucleotide
cacgacuccuccaugaaug

SEQ ID NO: 1070210 - RNA, 19 nt, Artificial Sequence
  Description of Artificial Sequence: Synthetic oligonucleotide
aguugcuauauagucauca

SEQ ID NO: 1070211 - RNA, 19 nt, Artificial Sequence
  Description of Artificial Sequence: Synthetic oligonucleotide
uuacuugcuuguaggaaac

SEQ ID NO: 1070212 - RNA, 19 nt, Artificial Sequence
  Description of Artificial Sequence: Synthetic oligonucleotide
uuggcauaauuuuagucua

SEQ ID NO: 1070213 - RNA, 19 nt, Artificial Sequence
  Description of Artificial Sequence: Synthetic oligonucleotide
uaauaaguacagacuggac

SEQ ID NO: 1070214 - RNA, 19 nt, Artificial Sequence
  Description of Artificial Sequence: Synthetic oligonucleotide
uguguuaguccaaggugca

SEQ ID NO: 1070215 - RNA, 19 nt, Artificial Sequence
  Description of Artificial Sequence: Synthetic oligonucleotide
cauuucaagcguucgauga

SEQ ID NO: 1070216 - RNA, 19 nt, Artificial Sequence
  Description of Artificial Sequence: Synthetic oligonucleotide
gguaccuagggaccaaugg

SEQ ID NO: 1070217 - RNA, 19 nt, Artificial Sequence
  Description of Artificial Sequence: Synthetic oligonucleotide
cuguguauggccucgcaac

SEQ ID NO: 1070218 - RNA, 19 nt, Artificial Sequence
  Description of Artificial Sequence: Synthetic oligonucleotide
uaucaaugaacaguccaga

SEQ ID NO: 1070219 - RNA, 19 nt, Artificial Sequence
  Description of Artificial Sequence: Synthetic oligonucleotide
gucuaaagcaaucagcugu

SEQ ID NO: 1070220 - RNA, 19 nt, Artificial Sequence
  Description of Artificial Sequence: Synthetic oligonucleotide
guaauaaguacagacugga

SEQ ID NO: 1070221 - RNA, 19 nt, Artificial Sequence
  Description of Artificial Sequence: Synthetic oligonucleotide
uguauggccucgcaaccug

SEQ ID NO: 1070222 - RNA, 19 nt, Artificial Sequence
  Description of Artificial Sequence: Synthetic oligonucleotide
uaccuagggaccaauggaa

SEQ ID NO: 1070223 - RNA, 19 nt, Artificial Sequence
  Description of Artificial Sequence: Synthetic oligonucleotide
aauguacaugcaaccggcg

SEQ ID NO: 1070224 - RNA, 19 nt, Artificial Sequence
  Description of Artificial Sequence: Synthetic oligonucleotide
aucccugaugccuaacgag

SEQ ID NO: 1070225 - RNA, 19 nt, Artificial Sequence
  Description of Artificial Sequence: Synthetic oligonucleotide
uaaacgggcucuggcaugg

SEQ ID NO: 1070226 - RNA, 19 nt, Artificial Sequence
  Description of Artificial Sequence: Synthetic oligonucleotide
cauggcaugcacaccagac

SEQ ID NO: 1070227 - RNA, 19 nt, Artificial Sequence
  Description of Artificial Sequence: Synthetic oligonucleotide
aaagcuguccugaucacau

SEQ ID NO: 1070228 - RNA, 19 nt, Artificial Sequence
  Description of Artificial Sequence: Synthetic oligonucleotide
uacucuaagggcuuaucua

SEQ ID NO: 1070229 - RNA, 19 nt, Artificial Sequence
  Description of Artificial Sequence: Synthetic oligonucleotide
uauggccucgcaaccugcg

SEQ ID NO: 1070230 - RNA, 19 nt, Artificial Sequence
  Description of Artificial Sequence: Synthetic oligonucleotide
aguaguugcuauauaguca

SEQ ID NO: 1070231 - RNA, 19 nt, Artificial Sequence
  Description of Artificial Sequence: Synthetic oligonucleotide
ucccugaugccuaacgagu

SEQ ID NO: 1070232 - RNA, 19 nt, Artificial Sequence
  Description of Artificial Sequence: Synthetic oligonucleotide
gguaauaaguacagacugg

SEQ ID NO: 1070233 - RNA, 19 nt, Artificial Sequence
  Description of Artificial Sequence: Synthetic oligonucleotide
auugaucagguaaccaauc

SEQ ID NO: 1070234 - RNA, 19 nt, Artificial Sequence
  Description of Artificial Sequence: Synthetic oligonucleotide
uugugcuacaucagagugu

SEQ ID NO: 1070235 - RNA, 19 nt, Artificial Sequence
  Description of Artificial Sequence: Synthetic oligonucleotide
cacucuaacaaaccaagga

SEQ ID NO: 1070236 - RNA, 19 nt, Artificial Sequence
  Description of Artificial Sequence: Synthetic oligonucleotide
acuucuacacaaucuguau

SEQ ID NO: 1070237 - RNA, 19 nt, Artificial Sequence
  Description of Artificial Sequence: Synthetic oligonucleotide
agucaucacuucuacacaa

SEQ ID NO: 1070238 - RNA, 19 nt, Artificial Sequence
  Description of Artificial Sequence: Synthetic oligonucleotide
uuacaccuauaguaaccag

SEQ ID NO: 1070239 - RNA, 19 nt, Artificial Sequence
  Description of Artificial Sequence: Synthetic oligonucleotide
guugcuauauagucaucac

SEQ ID NO: 1070240 - RNA, 19 nt, Artificial Sequence
  Description of Artificial Sequence: Synthetic oligonucleotide
agucuaaagcaaucagcug

SEQ ID NO: 1070241 - RNA, 19 nt, Artificial Sequence
  Description of Artificial Sequence: Synthetic oligonucleotide
agauagguacagaaaguag

SEQ ID NO: 1070242 - RNA, 19 nt, Artificial Sequence
  Description of Artificial Sequence: Synthetic oligonucleotide
aguaaacgggcucuggcau

SEQ ID NO: 1070243 - RNA, 19 nt, Artificial Sequence
  Description of Artificial Sequence: Synthetic oligonucleotide
ugcagaagcuguguucggg

SEQ ID NO: 1070244 - RNA, 19 nt, Artificial Sequence
  Description of Artificial Sequence: Synthetic oligonucleotide
acuauuuaacaggacugug

SEQ ID NO: 1070245 - RNA, 19 nt, Artificial Sequence
  Description of Artificial Sequence: Synthetic oligonucleotide
auguuucuauauauugcac

SEQ ID NO: 1070246 - RNA, 19 nt, Artificial Sequence
  Description of Artificial Sequence: Synthetic oligonucleotide
ggagagguuugcuagguug

SEQ ID NO: 1070247 - RNA, 19 nt, Artificial Sequence
  Description of Artificial Sequence: Synthetic oligonucleotide
uggccucgcaaccugcggg

SEQ ID NO: 1070248 - RNA, 19 nt, Artificial Sequence
  Description of Artificial Sequence: Synthetic oligonucleotide
agcagggagcuucacccac

SEQ ID NO: 1070249 - RNA, 19 nt, Artificial Sequence
  Description of Artificial Sequence: Synthetic oligonucleotide
ucuuuguagcacacucuac

SEQ ID NO: 1070250 - RNA, 19 nt, Artificial Sequence
  Description of Artificial Sequence: Synthetic oligonucleotide
ccauguuucuauauauugc

SEQ ID NO: 1070251 - RNA, 19 nt, Artificial Sequence
  Description of Artificial Sequence: Synthetic oligonucleotide
uggacguuccagaacccca

SEQ ID NO: 1070252 - RNA, 19 nt, Artificial Sequence
  Description of Artificial Sequence: Synthetic oligonucleotide
uccucauuucaagcguucg

SEQ ID NO: 1070253 - RNA, 19 nt, Artificial Sequence
  Description of Artificial Sequence: Synthetic oligonucleotide
ccaaggaacaguaaucuuc

SEQ ID NO: 1070254 - RNA, 19 nt, Artificial Sequence
  Description of Artificial Sequence: Synthetic oligonucleotide
agcaaucagcugucuugcc

SEQ ID NO: 1070255 - RNA, 19 nt, Artificial Sequence
  Description of Artificial Sequence: Synthetic oligonucleotide
auuuaacaggacuguggca

SEQ ID NO: 1070256 - RNA, 19 nt, Artificial Sequence
  Description of Artificial Sequence: Synthetic oligonucleotide
gcuauaacaauaaacccuc

SEQ ID NO: 1070257 - RNA, 19 nt, Artificial Sequence
  Description of Artificial Sequence: Synthetic oligonucleotide
aucaaugaacaguccagaa

SEQ ID NO: 1070258 - RNA, 19 nt, Artificial Sequence
  Description of Artificial Sequence: Synthetic oligonucleotide
uguggcaaauagcuuuaaa

SEQ ID NO: 1070259 - RNA, 19 nt, Artificial Sequence
  Description of Artificial Sequence: Synthetic oligonucleotide
caccagacugcaaaaggac

SEQ ID NO: 1070260 - RNA, 19 nt, Artificial Sequence
  Description of Artificial Sequence: Synthetic oligonucleotide
ggguagauuuacuugcuug

SEQ ID NO: 1070261 - RNA, 19 nt, Artificial Sequence
  Description of Artificial Sequence: Synthetic oligonucleotide
uccagucccauuuacucua

SEQ ID NO: 1070262 - RNA, 19 nt, Artificial Sequence
  Description of Artificial Sequence: Synthetic oligonucleotide
uugcccaagauagguacag

SEQ ID NO: 1070263 - RNA, 19 nt, Artificial Sequence
  Description of Artificial Sequence: Synthetic oligonucleotide
auggacguuccagaacccc

SEQ ID NO: 1070264 - RNA, 19 nt, Artificial Sequence
  Description of Artificial Sequence: Synthetic oligonucleotide
gcauaauuuuagucuaaag

SEQ ID NO: 1070265 - RNA, 19 nt, Artificial Sequence
  Description of Artificial Sequence: Synthetic oligonucleotide
ucucacaaacuagaagggu

SEQ ID NO: 1070266 - RNA, 19 nt, Artificial Sequence
  Description of Artificial Sequence: Synthetic oligonucleotide
guaccuagggaccaaugga

SEQ ID NO: 1070267 - RNA, 19 nt, Artificial Sequence
  Description of Artificial Sequence: Synthetic oligonucleotide
aaugacccaguccguuugu

SEQ ID NO: 1070268 - RNA, 19 nt, Artificial Sequence
  Description of Artificial Sequence: Synthetic oligonucleotide
uuucaagcguucgaugagu

SEQ ID NO: 1070269 - RNA, 19 nt, Artificial Sequence
  Description of Artificial Sequence: Synthetic oligonucleotide
uuucuauauauugcacuuc

SEQ ID NO: 1070270 - RNA, 19 nt, Artificial Sequence
  Description of Artificial Sequence: Synthetic oligonucleotide
aaaaggacauccacacuau

SEQ ID NO: 1070271 - RNA, 19 nt, Artificial Sequence
  Description of Artificial Sequence: Synthetic oligonucleotide
acagcaauuacugccacuu

SEQ ID NO: 1070272 - RNA, 19 nt, Artificial Sequence
  Description of Artificial Sequence: Synthetic oligonucleotide
aacgaguacaacagcaauu

SEQ ID NO: 1070273 - RNA, 19 nt, Artificial Sequence
  Description of Artificial Sequence: Synthetic oligonucleotide
aggaaaccaggggaggugg

SEQ ID NO: 1070274 - RNA, 19 nt, Artificial Sequence
  Description of Artificial Sequence: Synthetic oligonucleotide
cacugcccauaaauaaagg

SEQ ID NO: 1070275 - RNA, 19 nt, Artificial Sequence
  Description of Artificial Sequence: Synthetic oligonucleotide
agaguaguugcuauauagu

SEQ ID NO: 1070276 - RNA, 19 nt, Artificial Sequence
  Description of Artificial Sequence: Synthetic oligonucleotide
gaguucuaagguaccuagg

SEQ ID NO: 1070277 - RNA, 19 nt, Artificial Sequence
  Description of Artificial Sequence: Synthetic oligonucleotide
gaagauggccggcagaccu

SEQ ID NO: 1070278 - RNA, 19 nt, Artificial Sequence
  Description of Artificial Sequence: Synthetic oligonucleotide
cuagguuggggaaggccgc

SEQ ID NO: 1070279 - RNA, 19 nt, Artificial Sequence
  Description of Artificial Sequence: Synthetic oligonucleotide
aggcuagguaccaccagcc

SEQ ID NO: 1070280 - RNA, 19 nt, Artificial Sequence
  Description of Artificial Sequence: Synthetic oligonucleotide
ucgggagagguuugcuagg

SEQ ID NO: 1070281 - RNA, 19 nt, Artificial Sequence
  Description of Artificial Sequence: Synthetic oligonucleotide
gcuagguuggggaaggccg

SEQ ID NO: 1070282 - RNA, 19 nt, Artificial Sequence
  Description of Artificial Sequence: Synthetic oligonucleotide
ugaugccuaacgaguacaa

SEQ ID NO: 1070283 - RNA, 19 nt, Artificial Sequence
  Description of Artificial Sequence: Synthetic oligonucleotide
uggcaugguagcagggagc

SEQ ID NO: 1070284 - RNA, 19 nt, Artificial Sequence
  Description of Artificial Sequence: Synthetic oligonucleotide
agaaaguagaguaguugcu

SEQ ID NO: 1070285 - RNA, 19 nt, Artificial Sequence
  Description of Artificial Sequence: Synthetic oligonucleotide
gaaaguagaguaguugcua

SEQ ID NO: 1070286 - RNA, 19 nt, Artificial Sequence
  Description of Artificial Sequence: Synthetic oligonucleotide
aucacauggcaugcacacc

SEQ ID NO: 1070287 - RNA, 19 nt, Artificial Sequence
  Description of Artificial Sequence: Synthetic oligonucleotide
aaccaggggagguggaaaa

SEQ ID NO: 1070288 - RNA, 19 nt, Artificial Sequence
  Description of Artificial Sequence: Synthetic oligonucleotide
uauagaccauguuucuaua

SEQ ID NO: 1070289 - RNA, 19 nt, Artificial Sequence
  Description of Artificial Sequence: Synthetic oligonucleotide
ggcuuaucuacagucauug

SEQ ID NO: 1070290 - RNA, 19 nt, Artificial Sequence
  Description of Artificial Sequence: Synthetic oligonucleotide
gacuggacauuucagggua

SEQ ID NO: 1070291 - RNA, 19 nt, Artificial Sequence
  Description of Artificial Sequence: Synthetic oligonucleotide
uggccuuuucucagaaaac

SEQ ID NO: 1070292 - RNA, 19 nt, Artificial Sequence
  Description of Artificial Sequence: Synthetic oligonucleotide
auccagucccauuuacucu

SEQ ID NO: 1070293 - RNA, 19 nt, Artificial Sequence
  Description of Artificial Sequence: Synthetic oligonucleotide
gagguuugcuagguugggg

SEQ ID NO: 1070294 - RNA, 19 nt, Artificial Sequence
  Description of Artificial Sequence: Synthetic oligonucleotide
uuccuguguuaguccaagg

SEQ ID NO: 1070295 - RNA, 19 nt, Artificial Sequence
  Description of Artificial Sequence: Synthetic oligonucleotide
cuggcaugguagcagggag

SEQ ID NO: 1070296 - RNA, 19 nt, Artificial Sequence
  Description of Artificial Sequence: Synthetic oligonucleotide
guucuaagguaccuaggga

SEQ ID NO: 1070297 - RNA, 19 nt, Artificial Sequence
  Description of Artificial Sequence: Synthetic oligonucleotide
gaaguuggcuuaugaucac

SEQ ID NO: 1070298 - RNA, 19 nt, Artificial Sequence
  Description of Artificial Sequence: Synthetic oligonucleotide
gaguuccuguguuagucca

SEQ ID NO: 1070299 - RNA, 19 nt, Artificial Sequence
  Description of Artificial Sequence: Synthetic oligonucleotide
guauagaccauguuucuau

SEQ ID NO: 1070300 - RNA, 19 nt, Artificial Sequence
  Description of Artificial Sequence: Synthetic oligonucleotide
uguucacgacuccuccaug

SEQ ID NO: 1070301 - RNA, 19 nt, Artificial Sequence
  Description of Artificial Sequence: Synthetic oligonucleotide
uguauagaccauguuucua

SEQ ID NO: 1070302 - RNA, 19 nt, Artificial Sequence
  Description of Artificial Sequence: Synthetic oligonucleotide
aucuacagucauugaucag

SEQ ID NO: 1070303 - RNA, 19 nt, Artificial Sequence
  Description of Artificial Sequence: Synthetic oligonucleotide
gcuagguaccaccagccag

SEQ ID NO: 1070304 - RNA, 19 nt, Artificial Sequence
  Description of Artificial Sequence: Synthetic oligonucleotide
agcuccaaagagaaggccu

SEQ ID NO: 1070305 - RNA, 19 nt, Artificial Sequence
  Description of Artificial Sequence: Synthetic oligonucleotide
cuauauagucaucacuucu

SEQ ID NO: 1070306 - RNA, 19 nt, Artificial Sequence
  Description of Artificial Sequence: Synthetic oligonucleotide
aacaaugacccaguccguu

SEQ ID NO: 1070307 - RNA, 19 nt, Artificial Sequence
  Description of Artificial Sequence: Synthetic oligonucleotide
ggugucugcacucucccug

SEQ ID NO: 1070308 - RNA, 19 nt, Artificial Sequence
  Description of Artificial Sequence: Synthetic oligonucleotide
guucacgacuccuccauga

SEQ ID NO: 1070309 - RNA, 19 nt, Artificial Sequence
  Description of Artificial Sequence: Synthetic oligonucleotide
acccaguccguuuguuuuc

SEQ ID NO: 1070310 - RNA, 19 nt, Artificial Sequence
  Description of Artificial Sequence: Synthetic oligonucleotide
uuuacucuaagggcuuauc

SEQ ID NO: 1070311 - RNA, 19 nt, Artificial Sequence
  Description of Artificial Sequence: Synthetic oligonucleotide
uggcauaauuuuagucuaa

SEQ ID NO: 1070312 - RNA, 19 nt, Artificial Sequence
  Description of Artificial Sequence: Synthetic oligonucleotide
uucacgacuccuccaugaa

SEQ ID NO: 1070313 - RNA, 19 nt, Artificial Sequence
  Description of Artificial Sequence: Synthetic oligonucleotide
acaccagacugcaaaagga

SEQ ID NO: 1070314 - RNA, 19 nt, Artificial Sequence
  Description of Artificial Sequence: Synthetic oligonucleotide
guuugcuagguuggggaag

SEQ ID NO: 1070315 - RNA, 19 nt, Artificial Sequence
  Description of Artificial Sequence: Synthetic oligonucleotide
guaaacgggcucuggcaug

SEQ ID NO: 1070316 - RNA, 19 nt, Artificial Sequence
  Description of Artificial Sequence: Synthetic oligonucleotide
acuguguauggccucgcaa

SEQ ID NO: 1070317 - RNA, 19 nt, Artificial Sequence
  Description of Artificial Sequence: Synthetic oligonucleotide
aaguuggcuuaugaucaca

SEQ ID NO: 1070318 - RNA, 19 nt, Artificial Sequence
  Description of Artificial Sequence: Synthetic oligonucleotide
accaauccucuuuguagca

SEQ ID NO: 1070319 - RNA, 19 nt, Artificial Sequence
  Description of Artificial Sequence: Synthetic oligonucleotide
ggauguucacgacuccucc

SEQ ID NO: 1070320 - RNA, 19 nt, Artificial Sequence
  Description of Artificial Sequence: Synthetic oligonucleotide
caaccggcgggugugacag

SEQ ID NO: 1070321 - RNA, 19 nt, Artificial Sequence
  Description of Artificial Sequence: Synthetic oligonucleotide
uucaagcguucgaugaguu

SEQ ID NO: 1070322 - RNA, 19 nt, Artificial Sequence
  Description of Artificial Sequence: Synthetic oligonucleotide
acaaacuagaagggugacu

SEQ ID NO: 1070323 - RNA, 19 nt, Artificial Sequence
  Description of Artificial Sequence: Synthetic oligonucleotide
gccacucuaacaaaccaag

SEQ ID NO: 1070324 - RNA, 19 nt, Artificial Sequence
  Description of Artificial Sequence: Synthetic oligonucleotide
aagauggccggcagaccuc

SEQ ID NO: 1070325 - RNA, 19 nt, Artificial Sequence
  Description of Artificial Sequence: Synthetic oligonucleotide
ucacgacuccuccaugaau

SEQ ID NO: 1070326 - RNA, 19 nt, Artificial Sequence
  Description of Artificial Sequence: Synthetic oligonucleotide
gaugccaucgggauuccaa

SEQ ID NO: 1070327 - RNA, 19 nt, Artificial Sequence
  Description of Artificial Sequence: Synthetic oligonucleotide
auagccuuucccacgccag

SEQ ID NO: 1070328 - RNA, 19 nt, Artificial Sequence
  Description of Artificial Sequence: Synthetic oligonucleotide
gguagcagggagcuucacc

SEQ ID NO: 1070329 - RNA, 19 nt, Artificial Sequence
  Description of Artificial Sequence: Synthetic oligonucleotide
ccagaucuuaaacaaugac

SEQ ID NO: 1070330 - RNA, 19 nt, Artificial Sequence
  Description of Artificial Sequence: Synthetic oligonucleotide
gaugccuaacgaguacaac

SEQ ID NO: 1070331 - RNA, 19 nt, Artificial Sequence
  Description of Artificial Sequence: Synthetic oligonucleotide
auggccucgcaaccugcgg

SEQ ID NO: 1070332 - RNA, 19 nt, Artificial Sequence
  Description of Artificial Sequence: Synthetic oligonucleotide
caguccguuuguuuucaug

SEQ ID NO: 1070333 - RNA, 19 nt, Artificial Sequence
  Description of Artificial Sequence: Synthetic oligonucleotide
acaaugacccaguccguuu

SEQ ID NO: 1070334 - RNA, 19 nt, Artificial Sequence
  Description of Artificial Sequence: Synthetic oligonucleotide
acuaggcggggccuuaaaa

SEQ ID NO: 1070335 - RNA, 19 nt, Artificial Sequence
  Description of Artificial Sequence: Synthetic oligonucleotide
gguagauuuacuugcuugu

SEQ ID NO: 1070336 - RNA, 19 nt, Artificial Sequence
  Description of Artificial Sequence: Synthetic oligonucleotide
ggcuauaacaauaaacccu

SEQ ID NO: 1070337 - RNA, 19 nt, Artificial Sequence
  Description of Artificial Sequence: Synthetic oligonucleotide
agcuguguucgggagaggu

SEQ ID NO: 1070338 - RNA, 19 nt, Artificial Sequence
  Description of Artificial Sequence: Synthetic oligonucleotide
cagaaaacugccucggacu

SEQ ID NO: 1070339 - RNA, 19 nt, Artificial Sequence
  Description of Artificial Sequence: Synthetic oligonucleotide
cugccucggacucagccug

SEQ ID NO: 1070340 - RNA, 19 nt, Artificial Sequence
  Description of Artificial Sequence: Synthetic oligonucleotide
cacuucuacacaaucugua

SEQ ID NO: 1070341 - RNA, 19 nt, Artificial Sequence
  Description of Artificial Sequence: Synthetic oligonucleotide
gcuauauagucaucacuuc

SEQ ID NO: 1070342 - RNA, 19 nt, Artificial Sequence
  Description of Artificial Sequence: Synthetic oligonucleotide
ugccaucgggauuccaagu

SEQ ID NO: 1070343 - RNA, 19 nt, Artificial Sequence
  Description of Artificial Sequence: Synthetic oligonucleotide
caugcaaccggcgggugug

SEQ ID NO: 1070344 - RNA, 19 nt, Artificial Sequence
  Description of Artificial Sequence: Synthetic oligonucleotide
aaacaaugacccaguccgu

SEQ ID NO: 1070345 - RNA, 19 nt, Artificial Sequence
  Description of Artificial Sequence: Synthetic oligonucleotide
uucccacgccaggagaugc

SEQ ID NO: 1070346 - RNA, 19 nt, Artificial Sequence
  Description of Artificial Sequence: Synthetic oligonucleotide
gagucucuuuaaauuuaac

SEQ ID NO: 1070347 - RNA, 19 nt, Artificial Sequence
  Description of Artificial Sequence: Synthetic oligonucleotide
acaugcaaccggcgggugu

SEQ ID NO: 1070348 - RNA, 19 nt, Artificial Sequence
  Description of Artificial Sequence: Synthetic oligonucleotide
uuuaacccucaaguccaac

SEQ ID NO: 1070349 - RNA, 19 nt, Artificial Sequence
  Description of Artificial Sequence: Synthetic oligonucleotide
ccuuagggaaaauccaguc

SEQ ID NO: 1070350 - RNA, 19 nt, Artificial Sequence
  Description of Artificial Sequence: Synthetic oligonucleotide
uacuugcuuguaggaaacc

SEQ ID NO: 1070351 - RNA, 19 nt, Artificial Sequence
  Description of Artificial Sequence: Synthetic oligonucleotide
gcuuuaaaguaaggcaagc

SEQ ID NO: 1070352 - RNA, 19 nt, Artificial Sequence
  Description of Artificial Sequence: Synthetic oligonucleotide
uagguuggggaaggccgcg

SEQ ID NO: 1070353 - RNA, 19 nt, Artificial Sequence
  Description of Artificial Sequence: Synthetic oligonucleotide
ccuuggcauaauuuuaguc

SEQ ID NO: 1070354 - RNA, 19 nt, Artificial Sequence
  Description of Artificial Sequence: Synthetic oligonucleotide
auuucaggguagauuuacu

SEQ ID NO: 1070355 - RNA, 19 nt, Artificial Sequence
  Description of Artificial Sequence: Synthetic oligonucleotide
accaaggaacaguaaucuu

SEQ ID NO: 1070356 - RNA, 19 nt, Artificial Sequence
  Description of Artificial Sequence: Synthetic oligonucleotide
gaaggccgcgagcagcuuc

SEQ ID NO: 1070357 - RNA, 19 nt, Artificial Sequence
  Description of Artificial Sequence: Synthetic oligonucleotide
caggcaucauagccuuucc

SEQ ID NO: 1070358 - RNA, 19 nt, Artificial Sequence
  Description of Artificial Sequence: Synthetic oligonucleotide
ugaaaauccuuggcauaau

SEQ ID NO: 1070359 - RNA, 19 nt, Artificial Sequence
  Description of Artificial Sequence: Synthetic oligonucleotide
aacacaacugugacaucuu

SEQ ID NO: 1070360 - RNA, 19 nt, Artificial Sequence
  Description of Artificial Sequence: Synthetic oligonucleotide
gccaucgggauuccaagug

SEQ ID NO: 1070361 - RNA, 19 nt, Artificial Sequence
  Description of Artificial Sequence: Synthetic oligonucleotide
ccacucuaacaaaccaagg

SEQ ID NO: 1070362 - RNA, 19 nt, Artificial Sequence
  Description of Artificial Sequence: Synthetic oligonucleotide
cauagccuuucccacgcca

SEQ ID NO: 1070363 - RNA, 19 nt, Artificial Sequence
  Description of Artificial Sequence: Synthetic oligonucleotide
gugaaaguaaacgggcucu

SEQ ID NO: 1070364 - RNA, 19 nt, Artificial Sequence
  Description of Artificial Sequence: Synthetic oligonucleotide
cuaagguaccuagggacca

SEQ ID NO: 1070365 - RNA, 19 nt, Artificial Sequence
  Description of Artificial Sequence: Synthetic oligonucleotide
uuucccacgccaggagaug

SEQ ID NO: 1070366 - RNA, 19 nt, Artificial Sequence
  Description of Artificial Sequence: Synthetic oligonucleotide
ucccacgccaggagaugcc

SEQ ID NO: 1070367 - RNA, 19 nt, Artificial Sequence
  Description of Artificial Sequence: Synthetic oligonucleotide
cacaaacuagaagggugac

SEQ ID NO: 1070368 - RNA, 19 nt, Artificial Sequence
  Description of Artificial Sequence: Synthetic oligonucleotide
gugacccuuagggaaaauc

SEQ ID NO: 1070369 - RNA, 19 nt, Artificial Sequence
  Description of Artificial Sequence: Synthetic oligonucleotide
aaggccgcgagcagcuucu

SEQ ID NO: 1070370 - RNA, 19 nt, Artificial Sequence
  Description of Artificial Sequence: Synthetic oligonucleotide
aagcguucgaugaguuccu

SEQ ID NO: 1070371 - RNA, 19 nt, Artificial Sequence
  Description of Artificial Sequence: Synthetic oligonucleotide
aaccggcgggugugacagc

SEQ ID NO: 1070372 - RNA, 19 nt, Artificial Sequence
  Description of Artificial Sequence: Synthetic oligonucleotide
guagcacacucuacacugc

SEQ ID NO: 1070373 - RNA, 19 nt, Artificial Sequence
  Description of Artificial Sequence: Synthetic oligonucleotide
gaaaacugccucggacuca

SEQ ID NO: 1070374 - RNA, 19 nt, Artificial Sequence
  Description of Artificial Sequence: Synthetic oligonucleotide
ccggcagaccucaaagagg

SEQ ID NO: 1070375 - RNA, 19 nt, Artificial Sequence
  Description of Artificial Sequence: Synthetic oligonucleotide
gccgcgagcagcuucuccc

SEQ ID NO: 1070376 - RNA, 19 nt, Artificial Sequence
  Description of Artificial Sequence: Synthetic oligonucleotide
guccguuuguuuucaugga

SEQ ID NO: 1070377 - RNA, 19 nt, Artificial Sequence
  Description of Artificial Sequence: Synthetic oligonucleotide
gcugguuagagagaaacua

SEQ ID NO: 1070378 - RNA, 19 nt, Artificial Sequence
  Description of Artificial Sequence: Synthetic oligonucleotide
agggaccaauggaauuuac

SEQ ID NO: 1070379 - RNA, 19 nt, Artificial Sequence
  Description of Artificial Sequence: Synthetic oligonucleotide
auuuacucuaagggcuuau

SEQ ID NO: 1070380 - RNA, 19 nt, Artificial Sequence
  Description of Artificial Sequence: Synthetic oligonucleotide
cacugacaagguaauaagu

SEQ ID NO: 1070381 - RNA, 19 nt, Artificial Sequence
  Description of Artificial Sequence: Synthetic oligonucleotide
aggguagauuuacuugcuu

SEQ ID NO: 1070382 - RNA, 19 nt, Artificial Sequence
  Description of Artificial Sequence: Synthetic oligonucleotide
cuacagucauugaucaggu

SEQ ID NO: 1070383 - RNA, 19 nt, Artificial Sequence
  Description of Artificial Sequence: Synthetic oligonucleotide
cagcuccaaagagaaggcc

SEQ ID NO: 1070384 - RNA, 19 nt, Artificial Sequence
  Description of Artificial Sequence: Synthetic oligonucleotide
caccuauaguaaccaguuc

SEQ ID NO: 1070385 - RNA, 19 nt, Artificial Sequence
  Description of Artificial Sequence: Synthetic oligonucleotide
uaguugcuauauagucauc

SEQ ID NO: 1070386 - RNA, 19 nt, Artificial Sequence
  Description of Artificial Sequence: Synthetic oligonucleotide
ccagccagaucuuaaacaa

SEQ ID NO: 1070387 - RNA, 19 nt, Artificial Sequence
  Description of Artificial Sequence: Synthetic oligonucleotide
aacgggcucuggcauggua

SEQ ID NO: 1070388 - RNA, 19 nt, Artificial Sequence
  Description of Artificial Sequence: Synthetic oligonucleotide
aagguaccuagggaccaau

SEQ ID NO: 1070389 - RNA, 19 nt, Artificial Sequence
  Description of Artificial Sequence: Synthetic oligonucleotide
cugcgggaagagccaagcc

SEQ ID NO: 1070390 - RNA, 19 nt, Artificial Sequence
  Description of Artificial Sequence: Synthetic oligonucleotide
cugaugccuaacgaguaca

SEQ ID NO: 1070391 - RNA, 19 nt, Artificial Sequence
  Description of Artificial Sequence: Synthetic oligonucleotide
ccaucgggauuccaagugc

SEQ ID NO: 1070392 - RNA, 19 nt, Artificial Sequence
  Description of Artificial Sequence: Synthetic oligonucleotide
cacucuacacugcccauaa

SEQ ID NO: 1070393 - RNA, 19 nt, Artificial Sequence
  Description of Artificial Sequence: Synthetic oligonucleotide
guagaguaguugcuauaua

SEQ ID NO: 1070394 - RNA, 19 nt, Artificial Sequence
  Description of Artificial Sequence: Synthetic oligonucleotide
guguuaguccaaggugcag

SEQ ID NO: 1070395 - RNA, 19 nt, Artificial Sequence
  Description of Artificial Sequence: Synthetic oligonucleotide
cccauuuacucuaagggcu

SEQ ID NO: 1070396 - RNA, 19 nt, Artificial Sequence
  Description of Artificial Sequence: Synthetic oligonucleotide
uaagguaccuagggaccaa

SEQ ID NO: 1070397 - RNA, 19 nt, Artificial Sequence
  Description of Artificial Sequence: Synthetic oligonucleotide
cccucauuuaacccucaag

SEQ ID NO: 1070398 - RNA, 19 nt, Artificial Sequence
  Description of Artificial Sequence: Synthetic oligonucleotide
uagggaccaauggaauuua

SEQ ID NO: 1070399 - RNA, 19 nt, Artificial Sequence
  Description of Artificial Sequence: Synthetic oligonucleotide
uuggugggagggccacucu

SEQ ID NO: 1070400 - RNA, 19 nt, Artificial Sequence
  Description of Artificial Sequence: Synthetic oligonucleotide
ggaggugucugcacucucc

SEQ ID NO: 1070401 - RNA, 19 nt, Artificial Sequence
  Description of Artificial Sequence: Synthetic oligonucleotide
agaaccccacugagccugc

SEQ ID NO: 1070402 - RNA, 19 nt, Artificial Sequence
  Description of Artificial Sequence: Synthetic oligonucleotide
guucgggagagguuugcua

SEQ ID NO: 1070403 - RNA, 19 nt, Artificial Sequence
  Description of Artificial Sequence: Synthetic oligonucleotide
ugcagacuaggcggggccu

SEQ ID NO: 1070404 - RNA, 19 nt, Artificial Sequence
  Description of Artificial Sequence: Synthetic oligonucleotide
ugcccaagauagguacaga

SEQ ID NO: 1070405 - RNA, 19 nt, Artificial Sequence
  Description of Artificial Sequence: Synthetic oligonucleotide
cuguauagaccauguuucu

SEQ ID NO: 1070406 - RNA, 19 nt, Artificial Sequence
  Description of Artificial Sequence: Synthetic oligonucleotide
guuggcuuaugaucacacu

SEQ ID NO: 1070407 - RNA, 19 nt, Artificial Sequence
  Description of Artificial Sequence: Synthetic oligonucleotide
agauggccggcagaccuca

SEQ ID NO: 1070408 - RNA, 19 nt, Artificial Sequence
  Description of Artificial Sequence: Synthetic oligonucleotide
cuggugacccuuagggaaa

SEQ ID NO: 1070409 - RNA, 19 nt, Artificial Sequence
  Description of Artificial Sequence: Synthetic oligonucleotide
cacuauuuaacaggacugu

SEQ ID NO: 1070410 - RNA, 19 nt, Artificial Sequence
  Description of Artificial Sequence: Synthetic oligonucleotide
guauggccucgcaaccugc

SEQ ID NO: 1070411 - RNA, 19 nt, Artificial Sequence
  Description of Artificial Sequence: Synthetic oligonucleotide
cucauuucaagcguucgau

SEQ ID NO: 1070412 - RNA, 19 nt, Artificial Sequence
  Description of Artificial Sequence: Synthetic oligonucleotide
gcccauaaauaaaggaguc

SEQ ID NO: 1070413 - RNA, 19 nt, Artificial Sequence
  Description of Artificial Sequence: Synthetic oligonucleotide
caaccugcgggaagagcca

SEQ ID NO: 1070414 - RNA, 19 nt, Artificial Sequence
  Description of Artificial Sequence: Synthetic oligonucleotide
uacaugcaaccggcgggug

SEQ ID NO: 1070415 - RNA, 19 nt, Artificial Sequence
  Description of Artificial Sequence: Synthetic oligonucleotide
caucgggauuccaagugcu

SEQ ID NO: 1070416 - RNA, 19 nt, Artificial Sequence
  Description of Artificial Sequence: Synthetic oligonucleotide
gggaccaauggaauuuaca

SEQ ID NO: 1070417 - RNA, 19 nt, Artificial Sequence
  Description of Artificial Sequence: Synthetic oligonucleotide
ggcauaauuuuagucuaaa

SEQ ID NO: 1070418 - RNA, 19 nt, Artificial Sequence
  Description of Artificial Sequence: Synthetic oligonucleotide
accggcgggugugacagcu

SEQ ID NO: 1070419 - RNA, 19 nt, Artificial Sequence
  Description of Artificial Sequence: Synthetic oligonucleotide
aaccugcgggaagagccaa

SEQ ID NO: 1070420 - RNA, 19 nt, Artificial Sequence
  Description of Artificial Sequence: Synthetic oligonucleotide
acccucauuuaacccucaa

SEQ ID NO: 1070421 - RNA, 19 nt, Artificial Sequence
  Description of Artificial Sequence: Synthetic oligonucleotide
aacccucauuuaacccuca

SEQ ID NO: 1070422 - RNA, 19 nt, Artificial Sequence
  Description of Artificial Sequence: Synthetic oligonucleotide
gguuugcuagguuggggaa

SEQ ID NO: 1070423 - RNA, 19 nt, Artificial Sequence
  Description of Artificial Sequence: Synthetic oligonucleotide
gcaggcaucauagccuuuc

SEQ ID NO: 1070424 - RNA, 19 nt, Artificial Sequence
  Description of Artificial Sequence: Synthetic oligonucleotide
cuagggaccaauggaauuu

SEQ ID NO: 1070425 - RNA, 19 nt, Artificial Sequence
  Description of Artificial Sequence: Synthetic oligonucleotide
gcuuaucuacagucauuga

SEQ ID NO: 1070426 - RNA, 19 nt, Artificial Sequence
  Description of Artificial Sequence: Synthetic oligonucleotide
gcuuuaccaagaaguuggc

SEQ ID NO: 1070427 - RNA, 19 nt, Artificial Sequence
  Description of Artificial Sequence: Synthetic oligonucleotide
cagguaaccaauccucuuu

SEQ ID NO: 1070428 - RNA, 19 nt, Artificial Sequence
  Description of Artificial Sequence: Synthetic oligonucleotide
uggugacccuuagggaaaa

SEQ ID NO: 1070429 - RNA, 19 nt, Artificial Sequence
  Description of Artificial Sequence: Synthetic oligonucleotide
ggacguuccagaaccccac

SEQ ID NO: 1070430 - RNA, 19 nt, Artificial Sequence
  Description of Artificial Sequence: Synthetic oligonucleotide
acucuacacugcccauaaa

SEQ ID NO: 1070431 - RNA, 19 nt, Artificial Sequence
  Description of Artificial Sequence: Synthetic oligonucleotide
ucgcaaccugcgggaagag

SEQ ID NO: 1070432 - RNA, 19 nt, Artificial Sequence
  Description of Artificial Sequence: Synthetic oligonucleotide
ugccucggacucagccugu

SEQ ID NO: 1070433 - RNA, 19 nt, Artificial Sequence
  Description of Artificial Sequence: Synthetic oligonucleotide
ucccgggaggugucugcac

SEQ ID NO: 1070434 - RNA, 19 nt, Artificial Sequence
  Description of Artificial Sequence: Synthetic oligonucleotide
ggauuccaagugcugguua

SEQ ID NO: 1070435 - RNA, 19 nt, Artificial Sequence
  Description of Artificial Sequence: Synthetic oligonucleotide
caggguagauuuacuugcu

SEQ ID NO: 1070436 - RNA, 19 nt, Artificial Sequence
  Description of Artificial Sequence: Synthetic oligonucleotide
guacaugcaaccggcgggu

SEQ ID NO: 1070437 - RNA, 19 nt, Artificial Sequence
  Description of Artificial Sequence: Synthetic oligonucleotide
gacuaggcggggccuuaaa

SEQ ID NO: 1070438 - RNA, 19 nt, Artificial Sequence
  Description of Artificial Sequence: Synthetic oligonucleotide
agcguucgaugaguuccug

SEQ ID NO: 1070439 - RNA, 19 nt, Artificial Sequence
  Description of Artificial Sequence: Synthetic oligonucleotide
ccacacuauuuaacaggac

SEQ ID NO: 1070440 - RNA, 19 nt, Artificial Sequence
  Description of Artificial Sequence: Synthetic oligonucleotide
gcaauuacugccacuuagu

SEQ ID NO: 1070441 - RNA, 19 nt, Artificial Sequence
  Description of Artificial Sequence: Synthetic oligonucleotide
gacguuccagaaccccacu

SEQ ID NO: 1070442 - RNA, 19 nt, Artificial Sequence
  Description of Artificial Sequence: Synthetic oligonucleotide
cacuguguauggccucgca

SEQ ID NO: 1070443 - RNA, 19 nt, Artificial Sequence
  Description of Artificial Sequence: Synthetic oligonucleotide
ggcuagguaccaccagcca

SEQ ID NO: 1070444 - RNA, 19 nt, Artificial Sequence
  Description of Artificial Sequence: Synthetic oligonucleotide
ugcaaccggcgggugugac

SEQ ID NO: 1070445 - RNA, 19 nt, Artificial Sequence
  Description of Artificial Sequence: Synthetic oligonucleotide
agugucccgggaggugucu

SEQ ID NO: 1070446 - RNA, 19 nt, Artificial Sequence
  Description of Artificial Sequence: Synthetic oligonucleotide
cuguguucgggagagguuu

SEQ ID NO: 1070447 - RNA, 19 nt, Artificial Sequence
  Description of Artificial Sequence: Synthetic oligonucleotide
ggccacucuaacaaaccaa

SEQ ID NO: 1070448 - RNA, 19 nt, Artificial Sequence
  Description of Artificial Sequence: Synthetic oligonucleotide
cagugucccgggagguguc

SEQ ID NO: 1070449 - RNA, 19 nt, Artificial Sequence
  Description of Artificial Sequence: Synthetic oligonucleotide
ggcaagcacuguguauggc

SEQ ID NO: 1070450 - RNA, 19 nt, Artificial Sequence
  Description of Artificial Sequence: Synthetic oligonucleotide
cauuuacucuaagggcuua

SEQ ID NO: 1070451 - RNA, 19 nt, Artificial Sequence
  Description of Artificial Sequence: Synthetic oligonucleotide
gcauggcuauaacaauaaa

SEQ ID NO: 1070452 - RNA, 19 nt, Artificial Sequence
  Description of Artificial Sequence: Synthetic oligonucleotide
gggaagagccaagccuggc

SEQ ID NO: 1070453 - RNA, 19 nt, Artificial Sequence
  Description of Artificial Sequence: Synthetic oligonucleotide
agugcugguuagagagaaa

SEQ ID NO: 1070454 - RNA, 19 nt, Artificial Sequence
  Description of Artificial Sequence: Synthetic oligonucleotide
ugguagcagggagcuucac

SEQ ID NO: 1070455 - RNA, 19 nt, Artificial Sequence
  Description of Artificial Sequence: Synthetic oligonucleotide
gcuuaugaucacacugaaa

SEQ ID NO: 1070456 - RNA, 19 nt, Artificial Sequence
  Description of Artificial Sequence: Synthetic oligonucleotide
ccuauaguaaccaguucuu

SEQ ID NO: 1070457 - RNA, 19 nt, Artificial Sequence
  Description of Artificial Sequence: Synthetic oligonucleotide
agguuggggaaggccgcga

SEQ ID NO: 1070458 - RNA, 19 nt, Artificial Sequence
  Description of Artificial Sequence: Synthetic oligonucleotide
ggccucgcaaccugcggga

SEQ ID NO: 1070459 - RNA, 19 nt, Artificial Sequence
  Description of Artificial Sequence: Synthetic oligonucleotide
guguauggccucgcaaccu

SEQ ID NO: 1070460 - RNA, 19 nt, Artificial Sequence
  Description of Artificial Sequence: Synthetic oligonucleotide
cuaaagcaaucagcugucu

SEQ ID NO: 1070461 - RNA, 19 nt, Artificial Sequence
  Description of Artificial Sequence: Synthetic oligonucleotide
ccuuucccacgccaggaga

SEQ ID NO: 1070462 - RNA, 19 nt, Artificial Sequence
  Description of Artificial Sequence: Synthetic oligonucleotide
gcaaccggcgggugugaca

SEQ ID NO: 1070463 - RNA, 19 nt, Artificial Sequence
  Description of Artificial Sequence: Synthetic oligonucleotide
agacuaggcggggccuuaa

SEQ ID NO: 1070464 - RNA, 19 nt, Artificial Sequence
  Description of Artificial Sequence: Synthetic oligonucleotide
cagcaggcaucauagccuu

SEQ ID NO: 1070465 - RNA, 19 nt, Artificial Sequence
  Description of Artificial Sequence: Synthetic oligonucleotide
ccucggacucagccugugc

SEQ ID NO: 1070466 - RNA, 19 nt, Artificial Sequence
  Description of Artificial Sequence: Synthetic oligonucleotide
cccuuagggaaaauccagu

SEQ ID NO: 1070467 - RNA, 19 nt, Artificial Sequence
  Description of Artificial Sequence: Synthetic oligonucleotide
cggcgggugugacagcugc

SEQ ID NO: 1070468 - RNA, 19 nt, Artificial Sequence
  Description of Artificial Sequence: Synthetic oligonucleotide
augcaaccggcggguguga

SEQ ID NO: 1070469 - RNA, 19 nt, Artificial Sequence
  Description of Artificial Sequence: Synthetic oligonucleotide
ggaaaccaggggaggugga

SEQ ID NO: 1070470 - RNA, 19 nt, Artificial Sequence
  Description of Artificial Sequence: Synthetic oligonucleotide
cccauaaauaaaggagucu

SEQ ID NO: 1070471 - RNA, 19 nt, Artificial Sequence
  Description of Artificial Sequence: Synthetic oligonucleotide
gcagacuccaccagucagu

SEQ ID NO: 1070472 - RNA, 19 nt, Artificial Sequence
  Description of Artificial Sequence: Synthetic oligonucleotide
gugacuacacauggacguu

SEQ ID NO: 1070473 - RNA, 19 nt, Artificial Sequence
  Description of Artificial Sequence: Synthetic oligonucleotide
cccugaugccuaacgagua

SEQ ID NO: 1070474 - RNA, 19 nt, Artificial Sequence
  Description of Artificial Sequence: Synthetic oligonucleotide
gcacuguguauggccucgc

SEQ ID NO: 1070475 - RNA, 19 nt, Artificial Sequence
  Description of Artificial Sequence: Synthetic oligonucleotide
gcguucgaugaguuccugu

SEQ ID NO: 1070476 - RNA, 19 nt, Artificial Sequence
  Description of Artificial Sequence: Synthetic oligonucleotide
ccuagggaccaauggaauu

SEQ ID NO: 1070477 - RNA, 19 nt, Artificial Sequence
  Description of Artificial Sequence: Synthetic oligonucleotide
ccauuuacucuaagggcuu

SEQ ID NO: 1070478 - RNA, 19 nt, Artificial Sequence
  Description of Artificial Sequence: Synthetic oligonucleotide
ccgcgagcagcuucuccca

SEQ ID NO: 1070479 - RNA, 19 nt, Artificial Sequence
  Description of Artificial Sequence: Synthetic oligonucleotide
ggcgggugugacagcugca

SEQ ID NO: 1070480 - RNA, 19 nt, Artificial Sequence
  Description of Artificial Sequence: Synthetic oligonucleotide
cccugcagacuccaccagu

SEQ ID NO: 1070481 - RNA, 19 nt, Artificial Sequence
  Description of Artificial Sequence: Synthetic oligonucleotide
cccgggaggugucugcacu

SEQ ID NO: 1070482 - RNA, 19 nt, Artificial Sequence
  Description of Artificial Sequence: Synthetic oligonucleotide
cuccaccagucaguguguu

SEQ ID NO: 1070483 - RNA, 19 nt, Artificial Sequence
  Description of Artificial Sequence: Synthetic oligonucleotide
gccucgcaaccugcgggaa

SEQ ID NO: 1070484 - RNA, 19 nt, Artificial Sequence
  Description of Artificial Sequence: Synthetic oligonucleotide
ggugacccuuagggaaaau

SEQ ID NO: 1070485 - RNA, 19 nt, Artificial Sequence
  Description of Artificial Sequence: Synthetic oligonucleotide
ggaaggccgcgagcagcuu

SEQ ID NO: 1070486 - RNA, 19 nt, Artificial Sequence
  Description of Artificial Sequence: Synthetic oligonucleotide
aauaggacuguccagagag

SEQ ID NO: 1070487 - RNA, 19 nt, Artificial Sequence
  Description of Artificial Sequence: Synthetic oligonucleotide
aacagucacauuuaaaggg

SEQ ID NO: 1070488 - RNA, 19 nt, Artificial Sequence
  Description of Artificial Sequence: Synthetic oligonucleotide
aaugaauguagacuaaacu

SEQ ID NO: 1070489 - RNA, 19 nt, Artificial Sequence
  Description of Artificial Sequence: Synthetic oligonucleotide
aaucucuuagaacagugag

SEQ ID NO: 1070490 - RNA, 19 nt, Artificial Sequence
  Description of Artificial Sequence: Synthetic oligonucleotide
aagauaaccacaagugucc

SEQ ID NO: 1070491 - RNA, 19 nt, Artificial Sequence
  Description of Artificial Sequence: Synthetic oligonucleotide
ucuuagaacagugagagca

SEQ ID NO: 1070492 - RNA, 19 nt, Artificial Sequence
  Description of Artificial Sequence: Synthetic oligonucleotide
ucuaaaggcauccaaaauc

SEQ ID NO: 1070493 - RNA, 19 nt, Artificial Sequence
  Description of Artificial Sequence: Synthetic oligonucleotide
ucucuuagaacagugagag

SEQ ID NO: 1070494 - RNA, 19 nt, Artificial Sequence
  Description of Artificial Sequence: Synthetic oligonucleotide
uuaacuuauagugaggaga

SEQ ID NO: 1070495 - RNA, 19 nt, Artificial Sequence
  Description of Artificial Sequence: Synthetic oligonucleotide
agaacgaugcccugcaggc

SEQ ID NO: 1070496 - RNA, 19 nt, Artificial Sequence
  Description of Artificial Sequence: Synthetic oligonucleotide
ucaaagucacaccuguagg

SEQ ID NO: 1070497 - RNA, 19 nt, Artificial Sequence
  Description of Artificial Sequence: Synthetic oligonucleotide
uguagacuaaacuaaacau

SEQ ID NO: 1070498 - RNA, 19 nt, Artificial Sequence
  Description of Artificial Sequence: Synthetic oligonucleotide
guucucgaagcuuacaccg

SEQ ID NO: 1070499 - RNA, 19 nt, Artificial Sequence
  Description of Artificial Sequence: Synthetic oligonucleotide
aacgaggguguccugacgg

SEQ ID NO: 1070500 - RNA, 19 nt, Artificial Sequence
  Description of Artificial Sequence: Synthetic oligonucleotide
auacauguaggauuucuuc

SEQ ID NO: 1070501 - RNA, 19 nt, Artificial Sequence
  Description of Artificial Sequence: Synthetic oligonucleotide
auagugauucacaugauuc

SEQ ID NO: 1070502 - RNA, 19 nt, Artificial Sequence
  Description of Artificial Sequence: Synthetic oligonucleotide
uaacuuauagugaggagac

SEQ ID NO: 1070503 - RNA, 19 nt, Artificial Sequence
  Description of Artificial Sequence: Synthetic oligonucleotide
aauguagacuaaacuaaac

SEQ ID NO: 1070504 - RNA, 19 nt, Artificial Sequence
  Description of Artificial Sequence: Synthetic oligonucleotide
aguucucgaagcuuacacc

SEQ ID NO: 1070505 - RNA, 19 nt, Artificial Sequence
  Description of Artificial Sequence: Synthetic oligonucleotide
augaauguagacuaaacua

SEQ ID NO: 1070506 - RNA, 19 nt, Artificial Sequence
  Description of Artificial Sequence: Synthetic oligonucleotide
aaaacgaggguguccugac

SEQ ID NO: 1070507 - RNA, 19 nt, Artificial Sequence
  Description of Artificial Sequence: Synthetic oligonucleotide
aaaccugguaacauuuccc

SEQ ID NO: 1070508 - RNA, 19 nt, Artificial Sequence
  Description of Artificial Sequence: Synthetic oligonucleotide
cuuguaccgaaaacgaggg

SEQ ID NO: 1070509 - RNA, 19 nt, Artificial Sequence
  Description of Artificial Sequence: Synthetic oligonucleotide
auagugaggagacagcucu

SEQ ID NO: 1070510 - RNA, 19 nt, Artificial Sequence
  Description of Artificial Sequence: Synthetic oligonucleotide
agaacauacauguaggauu

SEQ ID NO: 1070511 - RNA, 19 nt, Artificial Sequence
  Description of Artificial Sequence: Synthetic oligonucleotide
uguaccgaaaacgagggug

SEQ ID NO: 1070512 - RNA, 19 nt, Artificial Sequence
  Description of Artificial Sequence: Synthetic oligonucleotide
aacuguagucacaacaguc

SEQ ID NO: 1070513 - RNA, 19 nt, Artificial Sequence
  Description of Artificial Sequence: Synthetic oligonucleotide
uauauuaaaccugguaaca

SEQ ID NO: 1070514 - RNA, 19 nt, Artificial Sequence
  Description of Artificial Sequence: Synthetic oligonucleotide
agagcuaagagaucgggca

SEQ ID NO: 1070515 - RNA, 19 nt, Artificial Sequence
  Description of Artificial Sequence: Synthetic oligonucleotide
ucucauagcgaacuagcug

SEQ ID NO: 1070516 - RNA, 19 nt, Artificial Sequence
  Description of Artificial Sequence: Synthetic oligonucleotide
uguuucuagaacgaugccc

SEQ ID NO: 1070517 - RNA, 19 nt, Artificial Sequence
  Description of Artificial Sequence: Synthetic oligonucleotide
cuuugcaaggcuugcaacc

SEQ ID NO: 1070518 - RNA, 19 nt, Artificial Sequence
  Description of Artificial Sequence: Synthetic oligonucleotide
gaaaugaucagggauguca

SEQ ID NO: 1070519 - RNA, 19 nt, Artificial Sequence
  Description of Artificial Sequence: Synthetic oligonucleotide
uucccauagacacaggaaa

SEQ ID NO: 1070520 - RNA, 19 nt, Artificial Sequence
  Description of Artificial Sequence: Synthetic oligonucleotide
uggaauguaaaaggaaacc

SEQ ID NO: 1070521 - RNA, 19 nt, Artificial Sequence
  Description of Artificial Sequence: Synthetic oligonucleotide
ccuaaaacaggaaugaaug

SEQ ID NO: 1070522 - RNA, 19 nt, Artificial Sequence
  Description of Artificial Sequence: Synthetic oligonucleotide
uagugauucacaugauucc

SEQ ID NO: 1070523 - RNA, 19 nt, Artificial Sequence
  Description of Artificial Sequence: Synthetic oligonucleotide
aagccgagauggcuguucc

SEQ ID NO: 1070524 - RNA, 19 nt, Artificial Sequence
  Description of Artificial Sequence: Synthetic oligonucleotide
ugagaagccgagauggcug

SEQ ID NO: 1070525 - RNA, 19 nt, Artificial Sequence
  Description of Artificial Sequence: Synthetic oligonucleotide
aaccugguaacauuucccu

SEQ ID NO: 1070526 - RNA, 19 nt, Artificial Sequence
  Description of Artificial Sequence: Synthetic oligonucleotide
agugauucacaugauuccg

SEQ ID NO: 1070527 - RNA, 19 nt, Artificial Sequence
  Description of Artificial Sequence: Synthetic oligonucleotide
agagcaaaagccacacucc

SEQ ID NO: 1070528 - RNA, 19 nt, Artificial Sequence
  Description of Artificial Sequence: Synthetic oligonucleotide
cuugguauucacagcacag

SEQ ID NO: 1070529 - RNA, 19 nt, Artificial Sequence
  Description of Artificial Sequence: Synthetic oligonucleotide
cuugauagagcuaagagau

SEQ ID NO: 1070530 - RNA, 19 nt, Artificial Sequence
  Description of Artificial Sequence: Synthetic oligonucleotide
ucuagaacgaugcccugca

SEQ ID NO: 1070531 - RNA, 19 nt, Artificial Sequence
  Description of Artificial Sequence: Synthetic oligonucleotide
gaggauaguucagagacug

SEQ ID NO: 1070532 - RNA, 19 nt, Artificial Sequence
  Description of Artificial Sequence: Synthetic oligonucleotide
uacagguacagccuuucca

SEQ ID NO: 1070533 - RNA, 19 nt, Artificial Sequence
  Description of Artificial Sequence: Synthetic oligonucleotide
augagaacauacauguagg

SEQ ID NO: 1070534 - RNA, 19 nt, Artificial Sequence
  Description of Artificial Sequence: Synthetic oligonucleotide
ugccgauagaaccacucag

SEQ ID NO: 1070535 - RNA, 19 nt, Artificial Sequence
  Description of Artificial Sequence: Synthetic oligonucleotide
cuugcgaaggugcacagug

SEQ ID NO: 1070536 - RNA, 19 nt, Artificial Sequence
  Description of Artificial Sequence: Synthetic oligonucleotide
ugcuuaacuuauagugagg

SEQ ID NO: 1070537 - RNA, 19 nt, Artificial Sequence
  Description of Artificial Sequence: Synthetic oligonucleotide
cagacaugacauuuguacc

SEQ ID NO: 1070538 - RNA, 19 nt, Artificial Sequence
  Description of Artificial Sequence: Synthetic oligonucleotide
agcccaagugcuuuauuac

SEQ ID NO: 1070539 - RNA, 19 nt, Artificial Sequence
  Description of Artificial Sequence: Synthetic oligonucleotide
uuauagugaggagacagcu

SEQ ID NO: 1070540 - RNA, 19 nt, Artificial Sequence
  Description of Artificial Sequence: Synthetic oligonucleotide
acucucauagcgaacuagc

SEQ ID NO: 1070541 - RNA, 19 nt, Artificial Sequence
  Description of Artificial Sequence: Synthetic oligonucleotide
cauacauacacagugucuc

SEQ ID NO: 1070542 - RNA, 19 nt, Artificial Sequence
  Description of Artificial Sequence: Synthetic oligonucleotide
agauagcacauaguagacc

SEQ ID NO: 1070543 - RNA, 19 nt, Artificial Sequence
  Description of Artificial Sequence: Synthetic oligonucleotide
gaaagcgcaugugauuucg

SEQ ID NO: 1070544 - RNA, 19 nt, Artificial Sequence
  Description of Artificial Sequence: Synthetic oligonucleotide
ucuagcaugccaagggagu

SEQ ID NO: 1070545 - RNA, 19 nt, Artificial Sequence
  Description of Artificial Sequence: Synthetic oligonucleotide
ucaauaggacuguccagag

SEQ ID NO: 1070546 - RNA, 19 nt, Artificial Sequence
  Description of Artificial Sequence: Synthetic oligonucleotide
aggucaauaggacugucca

SEQ ID NO: 1070547 - RNA, 19 nt, Artificial Sequence
  Description of Artificial Sequence: Synthetic oligonucleotide
aaguagacauggcggauga

SEQ ID NO: 1070548 - RNA, 19 nt, Artificial Sequence
  Description of Artificial Sequence: Synthetic oligonucleotide
ucgcauguagccaucuuca

SEQ ID NO: 1070549 - RNA, 19 nt, Artificial Sequence
  Description of Artificial Sequence: Synthetic oligonucleotide
ucucucuugaggauaguuc

SEQ ID NO: 1070550 - RNA, 19 nt, Artificial Sequence
  Description of Artificial Sequence: Synthetic oligonucleotide
cuugaaaguacagguacag

SEQ ID NO: 1070551 - RNA, 19 nt, Artificial Sequence
  Description of Artificial Sequence: Synthetic oligonucleotide
auaaccacaagugucccug

SEQ ID NO: 1070552 - RNA, 19 nt, Artificial Sequence
  Description of Artificial Sequence: Synthetic oligonucleotide
uggcccuaaaacaggaaug

SEQ ID NO: 1070553 - RNA, 19 nt, Artificial Sequence
  Description of Artificial Sequence: Synthetic oligonucleotide
uagagcuaagagaucgggc

SEQ ID NO: 1070554 - RNA, 19 nt, Artificial Sequence
  Description of Artificial Sequence: Synthetic oligonucleotide
aaagggccgguccucacug

SEQ ID NO: 1070555 - RNA, 19 nt, Artificial Sequence
  Description of Artificial Sequence: Synthetic oligonucleotide
acauuuguaccuuggcucu

SEQ ID NO: 1070556 - RNA, 19 nt, Artificial Sequence
  Description of Artificial Sequence: Synthetic oligonucleotide
uauuaaaccugguaacauu

SEQ ID NO: 1070557 - RNA, 19 nt, Artificial Sequence
  Description of Artificial Sequence: Synthetic oligonucleotide
uguagucacaacagucaca

SEQ ID NO: 1070558 - RNA, 19 nt, Artificial Sequence
  Description of Artificial Sequence: Synthetic oligonucleotide
uggcggaugaggucaauag

SEQ ID NO: 1070559 - RNA, 19 nt, Artificial Sequence
  Description of Artificial Sequence: Synthetic oligonucleotide
acuaaacuaaacauuuacu

SEQ ID NO: 1070560 - RNA, 19 nt, Artificial Sequence
  Description of Artificial Sequence: Synthetic oligonucleotide
ccuuguaccgaaaacgagg

SEQ ID NO: 1070561 - RNA, 19 nt, Artificial Sequence
  Description of Artificial Sequence: Synthetic oligonucleotide
uucacaugauuccgcaugu

SEQ ID NO: 1070562 - RNA, 19 nt, Artificial Sequence
  Description of Artificial Sequence: Synthetic oligonucleotide
uuugcaaggcuugcaaccc

SEQ ID NO: 1070563 - RNA, 19 nt, Artificial Sequence
  Description of Artificial Sequence: Synthetic oligonucleotide
uccuuguaccgaaaacgag

SEQ ID NO: 1070564 - RNA, 19 nt, Artificial Sequence
  Description of Artificial Sequence: Synthetic oligonucleotide
gggaguauauuaaaccugg

SEQ ID NO: 1070565 - RNA, 19 nt, Artificial Sequence
  Description of Artificial Sequence: Synthetic oligonucleotide
ucucuugaggauaguucag

SEQ ID NO: 1070566 - RNA, 19 nt, Artificial Sequence
  Description of Artificial Sequence: Synthetic oligonucleotide
aaacgaggguguccugacg

SEQ ID NO: 1070567 - RNA, 19 nt, Artificial Sequence
  Description of Artificial Sequence: Synthetic oligonucleotide
ugucuagcaugccaaggga

SEQ ID NO: 1070568 - RNA, 19 nt, Artificial Sequence
  Description of Artificial Sequence: Synthetic oligonucleotide
uguagucgcauguagccau

SEQ ID NO: 1070569 - RNA, 19 nt, Artificial Sequence
  Description of Artificial Sequence: Synthetic oligonucleotide
agugagagcacuggaguuc

SEQ ID NO: 1070570 - RNA, 19 nt, Artificial Sequence
  Description of Artificial Sequence: Synthetic oligonucleotide
agcgcaugugauuucggag

SEQ ID NO: 1070571 - RNA, 19 nt, Artificial Sequence
  Description of Artificial Sequence: Synthetic oligonucleotide
cuuagaacagugagagcac

SEQ ID NO: 1070572 - RNA, 19 nt, Artificial Sequence
  Description of Artificial Sequence: Synthetic oligonucleotide
aggaaucacguuccggcuc

SEQ ID NO: 1070573 - RNA, 19 nt, Artificial Sequence
  Description of Artificial Sequence: Synthetic oligonucleotide
cucucuugaggauaguuca

SEQ ID NO: 1070574 - RNA, 19 nt, Artificial Sequence
  Description of Artificial Sequence: Synthetic oligonucleotide
auuucggagggaggaaggc

SEQ ID NO: 1070575 - RNA, 19 nt, Artificial Sequence
  Description of Artificial Sequence: Synthetic oligonucleotide
gaguauauuaaaccuggua

SEQ ID NO: 1070576 - RNA, 19 nt, Artificial Sequence
  Description of Artificial Sequence: Synthetic oligonucleotide
ugucgaaagcgcaugugau

SEQ ID NO: 1070577 - RNA, 19 nt, Artificial Sequence
  Description of Artificial Sequence: Synthetic oligonucleotide
aagcgcaugugauuucgga

SEQ ID NO: 1070578 - RNA, 19 nt, Artificial Sequence
  Description of Artificial Sequence: Synthetic oligonucleotide
ugcacuuugcggugauggg

SEQ ID NO: 1070579 - RNA, 19 nt, Artificial Sequence
  Description of Artificial Sequence: Synthetic oligonucleotide
ugggguuguccugagaagc

SEQ ID NO: 1070580 - RNA, 19 nt, Artificial Sequence
  Description of Artificial Sequence: Synthetic oligonucleotide
agcgaacuagcuguagucg

SEQ ID NO: 1070581 - RNA, 19 nt, Artificial Sequence
  Description of Artificial Sequence: Synthetic oligonucleotide
aggauugucgaagguacuc

SEQ ID NO: 1070582 - RNA, 19 nt, Artificial Sequence
  Description of Artificial Sequence: Synthetic oligonucleotide
ucucgaagcuuacaccggu

SEQ ID NO: 1070583 - RNA, 19 nt, Artificial Sequence
  Description of Artificial Sequence: Synthetic oligonucleotide
cucauagcgaacuagcugu

SEQ ID NO: 1070584 - RNA, 19 nt, Artificial Sequence
  Description of Artificial Sequence: Synthetic oligonucleotide
gcuccuuguaccgaaaacg

SEQ ID NO: 1070585 - RNA, 19 nt, Artificial Sequence
  Description of Artificial Sequence: Synthetic oligonucleotide
aacuggugcuucuugcgaa

SEQ ID NO: 1070586 - RNA, 19 nt, Artificial Sequence
  Description of Artificial Sequence: Synthetic oligonucleotide
ugugugagcuccacacucu

SEQ ID NO: 1070587 - RNA, 19 nt, Artificial Sequence
  Description of Artificial Sequence: Synthetic oligonucleotide
aguagaccauuucucgcug

SEQ ID NO: 1070588 - RNA, 19 nt, Artificial Sequence
  Description of Artificial Sequence: Synthetic oligonucleotide
auauuaaaccugguaacau

SEQ ID NO: 1070589 - RNA, 19 nt, Artificial Sequence
  Description of Artificial Sequence: Synthetic oligonucleotide
auggcccuaaaacaggaau

SEQ ID NO: 1070590 - RNA, 19 nt, Artificial Sequence
  Description of Artificial Sequence: Synthetic oligonucleotide
gauugucgaagguacucuc

SEQ ID NO: 1070591 - RNA, 19 nt, Artificial Sequence
  Description of Artificial Sequence: Synthetic oligonucleotide
uuuaacagcccaagugcuu

SEQ ID NO: 1070592 - RNA, 19 nt, Artificial Sequence
  Description of Artificial Sequence: Synthetic oligonucleotide
gcuguagucgcauguagcc

SEQ ID NO: 1070593 - RNA, 19 nt, Artificial Sequence
  Description of Artificial Sequence: Synthetic oligonucleotide
ucccauagacacaggaaau

SEQ ID NO: 1070594 - RNA, 19 nt, Artificial Sequence
  Description of Artificial Sequence: Synthetic oligonucleotide
uucuagaacgaugcccugc

SEQ ID NO: 1070595 - RNA, 19 nt, Artificial Sequence
  Description of Artificial Sequence: Synthetic oligonucleotide
uagcgaacuagcuguaguc

SEQ ID NO: 1070596 - RNA, 19 nt, Artificial Sequence
  Description of Artificial Sequence: Synthetic oligonucleotide
ucgaaagcgcaugugauuu

SEQ ID NO: 1070597 - RNA, 19 nt, Artificial Sequence
  Description of Artificial Sequence: Synthetic oligonucleotide
gucaugucacacaaagggc

SEQ ID NO: 1070598 - RNA, 19 nt, Artificial Sequence
  Description of Artificial Sequence: Synthetic oligonucleotide
uuuguaccuuggcucugag

SEQ ID NO: 1070599 - RNA, 19 nt, Artificial Sequence
  Description of Artificial Sequence: Synthetic oligonucleotide
agggaguauauuaaaccug

SEQ ID NO: 1070600 - RNA, 19 nt, Artificial Sequence
  Description of Artificial Sequence: Synthetic oligonucleotide
uuagaacagugagagcacu

SEQ ID NO: 1070601 - RNA, 19 nt, Artificial Sequence
  Description of Artificial Sequence: Synthetic oligonucleotide
acgaggguguccugacggc

SEQ ID NO: 1070602 - RNA, 19 nt, Artificial Sequence
  Description of Artificial Sequence: Synthetic oligonucleotide
cccucuaaugagaacauac

SEQ ID NO: 1070603 - RNA, 19 nt, Artificial Sequence
  Description of Artificial Sequence: Synthetic oligonucleotide
uuaacagcccaagugcuuu

SEQ ID NO: 1070604 - RNA, 19 nt, Artificial Sequence
  Description of Artificial Sequence: Synthetic oligonucleotide
gaggucaauaggacugucc

SEQ ID NO: 1070605 - RNA, 19 nt, Artificial Sequence
  Description of Artificial Sequence: Synthetic oligonucleotide
cagcaccacuucuaaaggc

SEQ ID NO: 1070606 - RNA, 19 nt, Artificial Sequence
  Description of Artificial Sequence: Synthetic oligonucleotide
cacguuccggcucuggaag

SEQ ID NO: 1070607 - RNA, 19 nt, Artificial Sequence
  Description of Artificial Sequence: Synthetic oligonucleotide
aaagcgcaugugauuucgg

SEQ ID NO: 1070608 - RNA, 19 nt, Artificial Sequence
  Description of Artificial Sequence: Synthetic oligonucleotide
augaaucccugagucacag

SEQ ID NO: 1070609 - RNA, 19 nt, Artificial Sequence
  Description of Artificial Sequence: Synthetic oligonucleotide
gagguuguugccacgugug

SEQ ID NO: 1070610 - RNA, 19 nt, Artificial Sequence
  Description of Artificial Sequence: Synthetic oligonucleotide
ugaccauauggauggcaga

SEQ ID NO: 1070611 - RNA, 19 nt, Artificial Sequence
  Description of Artificial Sequence: Synthetic oligonucleotide
uuccggaggucaaucagau

SEQ ID NO: 1070612 - RNA, 19 nt, Artificial Sequence
  Description of Artificial Sequence: Synthetic oligonucleotide
ucgggcacugaaacugcag

SEQ ID NO: 1070613 - RNA, 19 nt, Artificial Sequence
  Description of Artificial Sequence: Synthetic oligonucleotide
ugaaucccugagucacagg

SEQ ID NO: 1070614 - RNA, 19 nt, Artificial Sequence
  Description of Artificial Sequence: Synthetic oligonucleotide
cuugaggauaguucagaga

SEQ ID NO: 1070615 - RNA, 19 nt, Artificial Sequence
  Description of Artificial Sequence: Synthetic oligonucleotide
aagcuuacaccgguccuug

SEQ ID NO: 1070616 - RNA, 19 nt, Artificial Sequence
  Description of Artificial Sequence: Synthetic oligonucleotide
gugucgaaagcgcauguga

SEQ ID NO: 1070617 - RNA, 19 nt, Artificial Sequence
  Description of Artificial Sequence: Synthetic oligonucleotide
uguggucacgcaacagccu

SEQ ID NO: 1070618 - RNA, 19 nt, Artificial Sequence
  Description of Artificial Sequence: Synthetic oligonucleotide
gucgcauguagccaucuuc

SEQ ID NO: 1070619 - RNA, 19 nt, Artificial Sequence
  Description of Artificial Sequence: Synthetic oligonucleotide
guuucuagaacgaugcccu

SEQ ID NO: 1070620 - RNA, 19 nt, Artificial Sequence
  Description of Artificial Sequence: Synthetic oligonucleotide
gagcuaagagaucgggcac

SEQ ID NO: 1070621 - RNA, 19 nt, Artificial Sequence
  Description of Artificial Sequence: Synthetic oligonucleotide
uccgcauguggucacgcaa

SEQ ID NO: 1070622 - RNA, 19 nt, Artificial Sequence
  Description of Artificial Sequence: Synthetic oligonucleotide
cacgugugaagcauuuguc

SEQ ID NO: 1070623 - RNA, 19 nt, Artificial Sequence
  Description of Artificial Sequence: Synthetic oligonucleotide
gcaacagccucucuguggc

SEQ ID NO: 1070624 - RNA, 19 nt, Artificial Sequence
  Description of Artificial Sequence: Synthetic oligonucleotide
aggaaaugaucagggaugu

SEQ ID NO: 1070625 - RNA, 19 nt, Artificial Sequence
  Description of Artificial Sequence: Synthetic oligonucleotide
auuucucgcuggccuuggc

SEQ ID NO: 1070626 - RNA, 19 nt, Artificial Sequence
  Description of Artificial Sequence: Synthetic oligonucleotide
aaucacguuccggcucugg

SEQ ID NO: 1070627 - RNA, 19 nt, Artificial Sequence
  Description of Artificial Sequence: Synthetic oligonucleotide
gaacuggugcuucuugcga

SEQ ID NO: 1070628 - RNA, 19 nt, Artificial Sequence
  Description of Artificial Sequence: Synthetic oligonucleotide
agcaccacuucuaaaggca

SEQ ID NO: 1070629 - RNA, 19 nt, Artificial Sequence
  Description of Artificial Sequence: Synthetic oligonucleotide
ugggccaauggcccuaaaa

SEQ ID NO: 1070630 - RNA, 19 nt, Artificial Sequence
  Description of Artificial Sequence: Synthetic oligonucleotide
uucuugcgaaggugcacag

SEQ ID NO: 1070631 - RNA, 19 nt, Artificial Sequence
  Description of Artificial Sequence: Synthetic oligonucleotide
uuucuagaacgaugcccug

SEQ ID NO: 1070632 - RNA, 19 nt, Artificial Sequence
  Description of Artificial Sequence: Synthetic oligonucleotide
cuaccugccuggcucaaac

SEQ ID NO: 1070633 - RNA, 19 nt, Artificial Sequence
  Description of Artificial Sequence: Synthetic oligonucleotide
aaugaaucccugagucaca

SEQ ID NO: 1070634 - RNA, 19 nt, Artificial Sequence
  Description of Artificial Sequence: Synthetic oligonucleotide
ggcggaugaggucaauagg

SEQ ID NO: 1070635 - RNA, 19 nt, Artificial Sequence
  Description of Artificial Sequence: Synthetic oligonucleotide
gucuagcaugccaagggag

SEQ ID NO: 1070636 - RNA, 19 nt, Artificial Sequence
  Description of Artificial Sequence: Synthetic oligonucleotide
uucuugcaacuguagucac

SEQ ID NO: 1070637 - RNA, 19 nt, Artificial Sequence
  Description of Artificial Sequence: Synthetic oligonucleotide
uucccucuaaugagaacau

SEQ ID NO: 1070638 - RNA, 19 nt, Artificial Sequence
  Description of Artificial Sequence: Synthetic oligonucleotide
cacauaguagaccauuucu

SEQ ID NO: 1070639 - RNA, 19 nt, Artificial Sequence
  Description of Artificial Sequence: Synthetic oligonucleotide
ucgaagguacucucacagu

SEQ ID NO: 1070640 - RNA, 19 nt, Artificial Sequence
  Description of Artificial Sequence: Synthetic oligonucleotide
cauuuauagugauucacau

SEQ ID NO: 1070641 - RNA, 19 nt, Artificial Sequence
  Description of Artificial Sequence: Synthetic oligonucleotide
auccuaucccugaagauaa

SEQ ID NO: 1070642 - RNA, 19 nt, Artificial Sequence
  Description of Artificial Sequence: Synthetic oligonucleotide
gugguagcaguggaaguag

SEQ ID NO: 1070643 - RNA, 19 nt, Artificial Sequence
  Description of Artificial Sequence: Synthetic oligonucleotide
uguugccacgugugaagca

SEQ ID NO: 1070644 - RNA, 19 nt, Artificial Sequence
  Description of Artificial Sequence: Synthetic oligonucleotide
uugcgaaggugcacaguga

SEQ ID NO: 1070645 - RNA, 19 nt, Artificial Sequence
  Description of Artificial Sequence: Synthetic oligonucleotide
ucacguuccggcucuggaa

SEQ ID NO: 1070646 - RNA, 19 nt, Artificial Sequence
  Description of Artificial Sequence: Synthetic oligonucleotide
augauuccgcaugugguca

SEQ ID NO: 1070647 - RNA, 19 nt, Artificial Sequence
  Description of Artificial Sequence: Synthetic oligonucleotide
gcuuaacuuauagugagga

SEQ ID NO: 1070648 - RNA, 19 nt, Artificial Sequence
  Description of Artificial Sequence: Synthetic oligonucleotide
ccaauggcccuaaaacagg

SEQ ID NO: 1070649 - RNA, 19 nt, Artificial Sequence
  Description of Artificial Sequence: Synthetic oligonucleotide
aucacguuccggcucugga

SEQ ID NO: 1070650 - RNA, 19 nt, Artificial Sequence
  Description of Artificial Sequence: Synthetic oligonucleotide
cucuuagaacagugagagc

SEQ ID NO: 1070651 - RNA, 19 nt, Artificial Sequence
  Description of Artificial Sequence: Synthetic oligonucleotide
cacucucauagcgaacuag

SEQ ID NO: 1070652 - RNA, 19 nt, Artificial Sequence
  Description of Artificial Sequence: Synthetic oligonucleotide
aacaacugucauacauaca

SEQ ID NO: 1070653 - RNA, 19 nt, Artificial Sequence
  Description of Artificial Sequence: Synthetic oligonucleotide
ggucaauaggacuguccag

SEQ ID NO: 1070654 - RNA, 19 nt, Artificial Sequence
  Description of Artificial Sequence: Synthetic oligonucleotide
caauggcccuaaaacagga

SEQ ID NO: 1070655 - RNA, 19 nt, Artificial Sequence
  Description of Artificial Sequence: Synthetic oligonucleotide
cuuccggaggucaaucaga

SEQ ID NO: 1070656 - RNA, 19 nt, Artificial Sequence
  Description of Artificial Sequence: Synthetic oligonucleotide
agcuugguauucacagcac

SEQ ID NO: 1070657 - RNA, 19 nt, Artificial Sequence
  Description of Artificial Sequence: Synthetic oligonucleotide
uuguaccgaaaacgagggu

SEQ ID NO: 1070658 - RNA, 19 nt, Artificial Sequence
  Description of Artificial Sequence: Synthetic oligonucleotide
gaucgggcacugaaacugc

SEQ ID NO: 1070659 - RNA, 19 nt, Artificial Sequence
  Description of Artificial Sequence: Synthetic oligonucleotide
gguacagccuuuccacgcc

SEQ ID NO: 1070660 - RNA, 19 nt, Artificial Sequence
  Description of Artificial Sequence: Synthetic oligonucleotide
guagacuaaacuaaacauu

SEQ ID NO: 1070661 - RNA, 19 nt, Artificial Sequence
  Description of Artificial Sequence: Synthetic oligonucleotide
cucucauaaggaacagcca

SEQ ID NO: 1070662 - RNA, 19 nt, Artificial Sequence
  Description of Artificial Sequence: Synthetic oligonucleotide
auccacgugccgauagaac

SEQ ID NO: 1070663 - RNA, 19 nt, Artificial Sequence
  Description of Artificial Sequence: Synthetic oligonucleotide
ugauuccgcauguggucac

SEQ ID NO: 1070664 - RNA, 19 nt, Artificial Sequence
  Description of Artificial Sequence: Synthetic oligonucleotide
ucauagcgaacuagcugua

SEQ ID NO: 1070665 - RNA, 19 nt, Artificial Sequence
  Description of Artificial Sequence: Synthetic oligonucleotide
cauagcgaacuagcuguag

SEQ ID NO: 1070666 - RNA, 19 nt, Artificial Sequence
  Description of Artificial Sequence: Synthetic oligonucleotide
gcgaacuagcuguagucgc

SEQ ID NO: 1070667 - RNA, 19 nt, Artificial Sequence
  Description of Artificial Sequence: Synthetic oligonucleotide
gagcaaaagccacacuccu

SEQ ID NO: 1070668 - RNA, 19 nt, Artificial Sequence
  Description of Artificial Sequence: Synthetic oligonucleotide
acucaggauugucgaaggu

SEQ ID NO: 1070669 - RNA, 19 nt, Artificial Sequence
  Description of Artificial Sequence: Synthetic oligonucleotide
cuucuugcgaaggugcaca

SEQ ID NO: 1070670 - RNA, 19 nt, Artificial Sequence
  Description of Artificial Sequence: Synthetic oligonucleotide
agagagcaaaagccacacu

SEQ ID NO: 1070671 - RNA, 19 nt, Artificial Sequence
  Description of Artificial Sequence: Synthetic oligonucleotide
ugacggccacuugaacugg

SEQ ID NO: 1070672 - RNA, 19 nt, Artificial Sequence
  Description of Artificial Sequence: Synthetic oligonucleotide
aggaaaccuugagagaaau

SEQ ID NO: 1070673 - RNA, 19 nt, Artificial Sequence
  Description of Artificial Sequence: Synthetic oligonucleotide
uggucacgcaacagccucu

SEQ ID NO: 1070674 - RNA, 19 nt, Artificial Sequence
  Description of Artificial Sequence: Synthetic oligonucleotide
gagaacauacauguaggau

SEQ ID NO: 1070675 - RNA, 19 nt, Artificial Sequence
  Description of Artificial Sequence: Synthetic oligonucleotide
caccgguccuugaaaguac

SEQ ID NO: 1070676 - RNA, 19 nt, Artificial Sequence
  Description of Artificial Sequence: Synthetic oligonucleotide
caguggaaguagacauggc

SEQ ID NO: 1070677 - RNA, 19 nt, Artificial Sequence
  Description of Artificial Sequence: Synthetic oligonucleotide
gauaaccacaagugucccu

SEQ ID NO: 1070678 - RNA, 19 nt, Artificial Sequence
  Description of Artificial Sequence: Synthetic oligonucleotide
cucauaaggaacagccacu

SEQ ID NO: 1070679 - RNA, 19 nt, Artificial Sequence
  Description of Artificial Sequence: Synthetic oligonucleotide
gaagccgagauggcuguuc

SEQ ID NO: 1070680 - RNA, 19 nt, Artificial Sequence
  Description of Artificial Sequence: Synthetic oligonucleotide
cuagaacgaugcccugcag

SEQ ID NO: 1070681 - RNA, 19 nt, Artificial Sequence
  Description of Artificial Sequence: Synthetic oligonucleotide
aauggcccuaaaacaggaa

SEQ ID NO: 1070682 - RNA, 19 nt, Artificial Sequence
  Description of Artificial Sequence: Synthetic oligonucleotide
cuugagagaaauggcaccu

SEQ ID NO: 1070683 - RNA, 19 nt, Artificial Sequence
  Description of Artificial Sequence: Synthetic oligonucleotide
uuccgcauguggucacgca

SEQ ID NO: 1070684 - RNA, 19 nt, Artificial Sequence
  Description of Artificial Sequence: Synthetic oligonucleotide
cucgaagcuuacaccgguc

SEQ ID NO: 1070685 - RNA, 19 nt, Artificial Sequence
  Description of Artificial Sequence: Synthetic oligonucleotide
acaccgguccuugaaagua

SEQ ID NO: 1070686 - RNA, 19 nt, Artificial Sequence
  Description of Artificial Sequence: Synthetic oligonucleotide
gugccgauagaaccacuca

SEQ ID NO: 1070687 - RNA, 19 nt, Artificial Sequence
  Description of Artificial Sequence: Synthetic oligonucleotide
cauuucucgcuggccuugg

SEQ ID NO: 1070688 - RNA, 19 nt, Artificial Sequence
  Description of Artificial Sequence: Synthetic oligonucleotide
ccuaucccugaagauaacc

SEQ ID NO: 1070689 - RNA, 19 nt, Artificial Sequence
  Description of Artificial Sequence: Synthetic oligonucleotide
uccugacggccacuugaac

SEQ ID NO: 1070690 - RNA, 19 nt, Artificial Sequence
  Description of Artificial Sequence: Synthetic oligonucleotide
uccuaucccugaagauaac

SEQ ID NO: 1070691 - RNA, 19 nt, Artificial Sequence
  Description of Artificial Sequence: Synthetic oligonucleotide
gcuugguauucacagcaca

SEQ ID NO: 1070692 - RNA, 19 nt, Artificial Sequence
  Description of Artificial Sequence: Synthetic oligonucleotide
agccucaaaccaucuggau

SEQ ID NO: 1070693 - RNA, 19 nt, Artificial Sequence
  Description of Artificial Sequence: Synthetic oligonucleotide
gucacaacagucacauuua

SEQ ID NO: 1070694 - RNA, 19 nt, Artificial Sequence
  Description of Artificial Sequence: Synthetic oligonucleotide
ccucuaaugagaacauaca

SEQ ID NO: 1070695 - RNA, 19 nt, Artificial Sequence
  Description of Artificial Sequence: Synthetic oligonucleotide
gagcacuggaguucucgaa

SEQ ID NO: 1070696 - RNA, 19 nt, Artificial Sequence
  Description of Artificial Sequence: Synthetic oligonucleotide
ggcacugaaacugcaguuc

SEQ ID NO: 1070697 - RNA, 19 nt, Artificial Sequence
  Description of Artificial Sequence: Synthetic oligonucleotide
agguacucucacaguguuc

SEQ ID NO: 1070698 - RNA, 19 nt, Artificial Sequence
  Description of Artificial Sequence: Synthetic oligonucleotide
ggcccuaaaacaggaauga

SEQ ID NO: 1070699 - RNA, 19 nt, Artificial Sequence
  Description of Artificial Sequence: Synthetic oligonucleotide
ucuugcgaaggugcacagu

SEQ ID NO: 1070700 - RNA, 19 nt, Artificial Sequence
  Description of Artificial Sequence: Synthetic oligonucleotide
ugguaacauuucccucuaa

SEQ ID NO: 1070701 - RNA, 19 nt, Artificial Sequence
  Description of Artificial Sequence: Synthetic oligonucleotide
caauaggacuguccagaga

SEQ ID NO: 1070702 - RNA, 19 nt, Artificial Sequence
  Description of Artificial Sequence: Synthetic oligonucleotide
acgcaacagccucucugug

SEQ ID NO: 1070703 - RNA, 19 nt, Artificial Sequence
  Description of Artificial Sequence: Synthetic oligonucleotide
gagaucgggcacugaaacu

SEQ ID NO: 1070704 - RNA, 19 nt, Artificial Sequence
  Description of Artificial Sequence: Synthetic oligonucleotide
cacacucucauagcgaacu

SEQ ID NO: 1070705 - RNA, 19 nt, Artificial Sequence
  Description of Artificial Sequence: Synthetic oligonucleotide
ugaggucaauaggacuguc

SEQ ID NO: 1070706 - RNA, 19 nt, Artificial Sequence
  Description of Artificial Sequence: Synthetic oligonucleotide
ggauaguucagagacuggu

SEQ ID NO: 1070707 - RNA, 19 nt, Artificial Sequence
  Description of Artificial Sequence: Synthetic oligonucleotide
cauuuguaccuuggcucug

SEQ ID NO: 1070708 - RNA, 19 nt, Artificial Sequence
  Description of Artificial Sequence: Synthetic oligonucleotide
aaguacagguacagccuuu

SEQ ID NO: 1070709 - RNA, 19 nt, Artificial Sequence
  Description of Artificial Sequence: Synthetic oligonucleotide
uagucgcauguagccaucu

SEQ ID NO: 1070710 - RNA, 19 nt, Artificial Sequence
  Description of Artificial Sequence: Synthetic oligonucleotide
cagugcuacuccuggaucu

SEQ ID NO: 1070711 - RNA, 19 nt, Artificial Sequence
  Description of Artificial Sequence: Synthetic oligonucleotide
uagcaugccaagggaguau

SEQ ID NO: 1070712 - RNA, 19 nt, Artificial Sequence
  Description of Artificial Sequence: Synthetic oligonucleotide
guaccgaaaacgagggugu

SEQ ID NO: 1070713 - RNA, 19 nt, Artificial Sequence
  Description of Artificial Sequence: Synthetic oligonucleotide
cacgugccgauagaaccac

SEQ ID NO: 1070714 - RNA, 19 nt, Artificial Sequence
  Description of Artificial Sequence: Synthetic oligonucleotide
acguuccggcucuggaagu

SEQ ID NO: 1070715 - RNA, 19 nt, Artificial Sequence
  Description of Artificial Sequence: Synthetic oligonucleotide
ggacuugauagagcuaaga

SEQ ID NO: 1070716 - RNA, 19 nt, Artificial Sequence
  Description of Artificial Sequence: Synthetic oligonucleotide
gugucccuggaauguaaaa

SEQ ID NO: 1070717 - RNA, 19 nt, Artificial Sequence
  Description of Artificial Sequence: Synthetic oligonucleotide
cuguagucgcauguagcca

SEQ ID NO: 1070718 - RNA, 19 nt, Artificial Sequence
  Description of Artificial Sequence: Synthetic oligonucleotide
agucgcauguagccaucuu

SEQ ID NO: 1070719 - RNA, 19 nt, Artificial Sequence
  Description of Artificial Sequence: Synthetic oligonucleotide
agugucccuggaauguaaa

SEQ ID NO: 1070720 - RNA, 19 nt, Artificial Sequence
  Description of Artificial Sequence: Synthetic oligonucleotide
gaagcuuacaccgguccuu

SEQ ID NO: 1070721 - RNA, 19 nt, Artificial Sequence
  Description of Artificial Sequence: Synthetic oligonucleotide
guaccuuggcucugagucu

SEQ ID NO: 1070722 - RNA, 19 nt, Artificial Sequence
  Description of Artificial Sequence: Synthetic oligonucleotide
cuggggcuucagauagcac

SEQ ID NO: 1070723 - RNA, 19 nt, Artificial Sequence
  Description of Artificial Sequence: Synthetic oligonucleotide
ucccucuaaugagaacaua

SEQ ID NO: 1070724 - RNA, 19 nt, Artificial Sequence
  Description of Artificial Sequence: Synthetic oligonucleotide
agcuuacaccgguccuuga

SEQ ID NO: 1070725 - RNA, 19 nt, Artificial Sequence
  Description of Artificial Sequence: Synthetic oligonucleotide
accgguccuugaaaguaca

SEQ ID NO: 1070726 - RNA, 19 nt, Artificial Sequence
  Description of Artificial Sequence: Synthetic oligonucleotide
gcuuacaccgguccuugaa

SEQ ID NO: 1070727 - RNA, 19 nt, Artificial Sequence
  Description of Artificial Sequence: Synthetic oligonucleotide
ccgcauguggucacgcaac

SEQ ID NO: 1070728 - RNA, 19 nt, Artificial Sequence
  Description of Artificial Sequence: Synthetic oligonucleotide
gucgaaagcgcaugugauu

SEQ ID NO: 1070729 - RNA, 19 nt, Artificial Sequence
  Description of Artificial Sequence: Synthetic oligonucleotide
gguuguugccacgugugaa

SEQ ID NO: 1070730 - RNA, 19 nt, Artificial Sequence
  Description of Artificial Sequence: Synthetic oligonucleotide
cauccacgugccgauagaa

SEQ ID NO: 1070731 - RNA, 19 nt, Artificial Sequence
  Description of Artificial Sequence: Synthetic oligonucleotide
caucaucccugggccaaug

SEQ ID NO: 1070732 - RNA, 19 nt, Artificial Sequence
  Description of Artificial Sequence: Synthetic oligonucleotide
ccauauggauggcagaacu

SEQ ID NO: 1070733 - RNA, 19 nt, Artificial Sequence
  Description of Artificial Sequence: Synthetic oligonucleotide
ccuuuccacgccacacagc

SEQ ID NO: 1070734 - RNA, 19 nt, Artificial Sequence
  Description of Artificial Sequence: Synthetic oligonucleotide
caggaaucacguuccggcu

SEQ ID NO: 1070735 - RNA, 19 nt, Artificial Sequence
  Description of Artificial Sequence: Synthetic oligonucleotide
cgugccgauagaaccacuc

SEQ ID NO: 1070736 - RNA, 19 nt, Artificial Sequence
  Description of Artificial Sequence: Synthetic oligonucleotide
cugagaagccgagauggcu

SEQ ID NO: 1070737 - RNA, 19 nt, Artificial Sequence
  Description of Artificial Sequence: Synthetic oligonucleotide
caugcuccuuguaccgaaa

SEQ ID NO: 1070738 - RNA, 19 nt, Artificial Sequence
  Description of Artificial Sequence: Synthetic oligonucleotide
gaaucacguuccggcucug

SEQ ID NO: 1070739 - RNA, 19 nt, Artificial Sequence
  Description of Artificial Sequence: Synthetic oligonucleotide
gguuguccugagaagccga

SEQ ID NO: 1070740 - RNA, 19 nt, Artificial Sequence
  Description of Artificial Sequence: Synthetic oligonucleotide
guagucgcauguagccauc

SEQ ID NO: 1070741 - RNA, 19 nt, Artificial Sequence
  Description of Artificial Sequence: Synthetic oligonucleotide
aucgggcacugaaacugca

SEQ ID NO: 1070742 - RNA, 19 nt, Artificial Sequence
  Description of Artificial Sequence: Synthetic oligonucleotide
ccugacggccacuugaacu

SEQ ID NO: 1070743 - RNA, 19 nt, Artificial Sequence
  Description of Artificial Sequence: Synthetic oligonucleotide
gggacuugauagagcuaag

SEQ ID NO: 1070744 - RNA, 19 nt, Artificial Sequence
  Description of Artificial Sequence: Synthetic oligonucleotide
gcggugaugggacuugaua

SEQ ID NO: 1070745 - RNA, 19 nt, Artificial Sequence
  Description of Artificial Sequence: Synthetic oligonucleotide
ggauugucgaagguacucu

SEQ ID NO: 1070746 - RNA, 19 nt, Artificial Sequence
  Description of Artificial Sequence: Synthetic oligonucleotide
ccacgugccgauagaacca

SEQ ID NO: 1070747 - RNA, 19 nt, Artificial Sequence
  Description of Artificial Sequence: Synthetic oligonucleotide
ggaguucucgaagcuuaca

SEQ ID NO: 1070748 - RNA, 19 nt, Artificial Sequence
  Description of Artificial Sequence: Synthetic oligonucleotide
gccgguccucacugugucg

SEQ ID NO: 1070749 - RNA, 19 nt, Artificial Sequence
  Description of Artificial Sequence: Synthetic oligonucleotide
gaacgaugcccugcaggcu

SEQ ID NO: 1070750 - RNA, 19 nt, Artificial Sequence
  Description of Artificial Sequence: Synthetic oligonucleotide
caggauugucgaagguacu

SEQ ID NO: 1070751 - RNA, 19 nt, Artificial Sequence
  Description of Artificial Sequence: Synthetic oligonucleotide
cgcauccacgugccgauag

SEQ ID NO: 1070752 - RNA, 19 nt, Artificial Sequence
  Description of Artificial Sequence: Synthetic oligonucleotide
ccacacucucauagcgaac

SEQ ID NO: 1070753 - RNA, 19 nt, Artificial Sequence
  Description of Artificial Sequence: Synthetic oligonucleotide
cugugucgaaagcgcaugu

SEQ ID NO: 1070754 - RNA, 19 nt, Artificial Sequence
  Description of Artificial Sequence: Synthetic oligonucleotide
cggccacuugaacuggugc

SEQ ID NO: 1070755 - RNA, 19 nt, Artificial Sequence
  Description of Artificial Sequence: Synthetic oligonucleotide
ggaaaugaucagggauguc

SEQ ID NO: 1070756 - RNA, 19 nt, Artificial Sequence
  Description of Artificial Sequence: Synthetic oligonucleotide
agccucucuguggcaaaau

SEQ ID NO: 1070757 - RNA, 19 nt, Artificial Sequence
  Description of Artificial Sequence: Synthetic oligonucleotide
ggucacgcaacagccucuc

SEQ ID NO: 1070758 - RNA, 19 nt, Artificial Sequence
  Description of Artificial Sequence: Synthetic oligonucleotide
gucacacaaagggcauuua

SEQ ID NO: 1070759 - RNA, 19 nt, Artificial Sequence
  Description of Artificial Sequence: Synthetic oligonucleotide
ccgagauggcuguucccuc

SEQ ID NO: 1070760 - RNA, 19 nt, Artificial Sequence
  Description of Artificial Sequence: Synthetic oligonucleotide
cuuccucaaguggguccuc

SEQ ID NO: 1070761 - RNA, 19 nt, Artificial Sequence
  Description of Artificial Sequence: Synthetic oligonucleotide
gccgagauggcuguucccu

SEQ ID NO: 1070762 - RNA, 19 nt, Artificial Sequence
  Description of Artificial Sequence: Synthetic oligonucleotide
cucucacaguguucccaua

SEQ ID NO: 1070763 - RNA, 19 nt, Artificial Sequence
  Description of Artificial Sequence: Synthetic oligonucleotide
gcccucccagcacuguuuc

SEQ ID NO: 1070764 - RNA, 19 nt, Artificial Sequence
  Description of Artificial Sequence: Synthetic oligonucleotide
ccgaaaacgaggguguccu

SEQ ID NO: 1070765 - RNA, 19 nt, Artificial Sequence
  Description of Artificial Sequence: Synthetic oligonucleotide
cgaaagcgcaugugauuuc

SEQ ID NO: 1070766 - RNA, 19 nt, Artificial Sequence
  Description of Artificial Sequence: Synthetic oligonucleotide
acgugccgauagaaccacu

SEQ ID NO: 1070767 - RNA, 19 nt, Artificial Sequence
  Description of Artificial Sequence: Synthetic oligonucleotide
gcccuaaaacaggaaugaa

SEQ ID NO: 1070768 - RNA, 19 nt, Artificial Sequence
  Description of Artificial Sequence: Synthetic oligonucleotide
cuuugcggugaugggacuu

SEQ ID NO: 1070769 - RNA, 19 nt, Artificial Sequence
  Description of Artificial Sequence: Synthetic oligonucleotide
ccgguccucacugugucga

SEQ ID NO: 1070770 - RNA, 19 nt, Artificial Sequence
  Description of Artificial Sequence: Synthetic oligonucleotide
cgaaaacgaggguguccug

SEQ ID NO: 1070771 - RNA, 19 nt, Artificial Sequence
  Description of Artificial Sequence: Synthetic oligonucleotide
gucacgcaacagccucucu

SEQ ID NO: 1070772 - RNA, 19 nt, Artificial Sequence
  Description of Artificial Sequence: Synthetic oligonucleotide
cagccucucuguggcaaaa

SEQ ID NO: 1070773 - RNA, 19 nt, Artificial Sequence
  Description of Artificial Sequence: Synthetic oligonucleotide
gccuucauucagugcuacu

SEQ ID NO: 1070774 - RNA, 19 nt, Artificial Sequence
  Description of Artificial Sequence: Synthetic oligonucleotide
cguuccggcucuggaaguc

SEQ ID NO: 1070775 - RNA, 19 nt, Artificial Sequence
  Description of Artificial Sequence: Synthetic oligonucleotide
gcuaccugccuggcucaaa

SEQ ID NO: 1070776 - RNA, 19 nt, Artificial Sequence
  Description of Artificial Sequence: Synthetic oligonucleotide
ccacaugguuguccuugcu

SEQ ID NO: 1070777 - RNA, 19 nt, Artificial Sequence
  Description of Artificial Sequence: Synthetic oligonucleotide
cauggcggaugaggucaau

SEQ ID NO: 1070778 - RNA, 19 nt, Artificial Sequence
  Description of Artificial Sequence: Synthetic oligonucleotide
gcgcauccacgugccgaua

SEQ ID NO: 1070779 - RNA, 19 nt, Artificial Sequence
  Description of Artificial Sequence: Synthetic oligonucleotide
aauaagguuaguugcaucc

SEQ ID NO: 1070780 - RNA, 19 nt, Artificial Sequence
  Description of Artificial Sequence: Synthetic oligonucleotide
aaugacaaguuguuucugc

SEQ ID NO: 1070781 - RNA, 19 nt, Artificial Sequence
  Description of Artificial Sequence: Synthetic oligonucleotide
auauaguuguaauaucucc

SEQ ID NO: 1070782 - RNA, 19 nt, Artificial Sequence
  Description of Artificial Sequence: Synthetic oligonucleotide
uauaguuguaauaucuccg

SEQ ID NO: 1070783 - RNA, 19 nt, Artificial Sequence
  Description of Artificial Sequence: Synthetic oligonucleotide
uguaauaucuccgaaaggc

SEQ ID NO: 1070784 - RNA, 19 nt, Artificial Sequence
  Description of Artificial Sequence: Synthetic oligonucleotide
aaacuaacuggcuaaaugu

SEQ ID NO: 1070785 - RNA, 19 nt, Artificial Sequence
  Description of Artificial Sequence: Synthetic oligonucleotide
uaugcuaauggccacaaug

SEQ ID NO: 1070786 - RNA, 19 nt, Artificial Sequence
  Description of Artificial Sequence: Synthetic oligonucleotide
uauaacucgaauuccuugg

SEQ ID NO: 1070787 - RNA, 19 nt, Artificial Sequence
  Description of Artificial Sequence: Synthetic oligonucleotide
uggagagucaguaauaaug

SEQ ID NO: 1070788 - RNA, 19 nt, Artificial Sequence
  Description of Artificial Sequence: Synthetic oligonucleotide
aguguugugauacaacagg

SEQ ID NO: 1070789 - RNA, 19 nt, Artificial Sequence
  Description of Artificial Sequence: Synthetic oligonucleotide
aguaccaaggagcagaaag

SEQ ID NO: 1070790 - RNA, 19 nt, Artificial Sequence
  Description of Artificial Sequence: Synthetic oligonucleotide
acaugauuauaguucaagc

SEQ ID NO: 1070791 - RNA, 19 nt, Artificial Sequence
  Description of Artificial Sequence: Synthetic oligonucleotide
uuuauugcuuagcucaggg

SEQ ID NO: 1070792 - RNA, 19 nt, Artificial Sequence
  Description of Artificial Sequence: Synthetic oligonucleotide
aguaauaauggauuuguug

SEQ ID NO: 1070793 - RNA, 19 nt, Artificial Sequence
  Description of Artificial Sequence: Synthetic oligonucleotide
cuuagcagggccaugaugc

SEQ ID NO: 1070794 - RNA, 19 nt, Artificial Sequence
  Description of Artificial Sequence: Synthetic oligonucleotide
agaacauuaaacuuguuaa

SEQ ID NO: 1070795 - RNA, 19 nt, Artificial Sequence
  Description of Artificial Sequence: Synthetic oligonucleotide
auaaguuguauuuagaguu

SEQ ID NO: 1070796 - RNA, 19 nt, Artificial Sequence
  Description of Artificial Sequence: Synthetic oligonucleotide
gauguaucaauuaaaauuc

SEQ ID NO: 1070797 - RNA, 19 nt, Artificial Sequence
  Description of Artificial Sequence: Synthetic oligonucleotide
ugguguauagacaugagac

SEQ ID NO: 1070798 - RNA, 19 nt, Artificial Sequence
  Description of Artificial Sequence: Synthetic oligonucleotide
auaauggauuuguugaugg

SEQ ID NO: 1070799 - RNA, 19 nt, Artificial Sequence
  Description of Artificial Sequence: Synthetic oligonucleotide
aaauuuaagaggcucuacu

SEQ ID NO: 1070800 - RNA, 19 nt, Artificial Sequence
  Description of Artificial Sequence: Synthetic oligonucleotide
augauuauaguucaagcug

SEQ ID NO: 1070801 - RNA, 19 nt, Artificial Sequence
  Description of Artificial Sequence: Synthetic oligonucleotide
uccuuuauugcuuagcuca

SEQ ID NO: 1070802 - RNA, 19 nt, Artificial Sequence
  Description of Artificial Sequence: Synthetic oligonucleotide
uaagaugcucacauaauag

SEQ ID NO: 1070803 - RNA, 19 nt, Artificial Sequence
  Description of Artificial Sequence: Synthetic oligonucleotide
gaaccgucaaauuuaagag

SEQ ID NO: 1070804 - RNA, 19 nt, Artificial Sequence
  Description of Artificial Sequence: Synthetic oligonucleotide
uuugagugguaucacaaag

SEQ ID NO: 1070805 - RNA, 19 nt, Artificial Sequence
  Description of Artificial Sequence: Synthetic oligonucleotide
uaucaauuaaaauuccucu

SEQ ID NO: 1070806 - RNA, 19 nt, Artificial Sequence
  Description of Artificial Sequence: Synthetic oligonucleotide
ucaauuaaaauuccucugu

SEQ ID NO: 1070807 - RNA, 19 nt, Artificial Sequence
  Description of Artificial Sequence: Synthetic oligonucleotide
guauaaguuguauuuagag

SEQ ID NO: 1070808 - RNA, 19 nt, Artificial Sequence
  Description of Artificial Sequence: Synthetic oligonucleotide
agaaccgucaaauuuaaga

SEQ ID NO: 1070809 - RNA, 19 nt, Artificial Sequence
  Description of Artificial Sequence: Synthetic oligonucleotide
gagauaaggaaguuuuccg

SEQ ID NO: 1070810 - RNA, 19 nt, Artificial Sequence
  Description of Artificial Sequence: Synthetic oligonucleotide
acucgaauuccuuggaacc

SEQ ID NO: 1070811 - RNA, 19 nt, Artificial Sequence
  Description of Artificial Sequence: Synthetic oligonucleotide
aaccgucaaauuuaagagg

SEQ ID NO: 1070812 - RNA, 19 nt, Artificial Sequence
  Description of Artificial Sequence: Synthetic oligonucleotide
uccaccuugaaacuuagca

SEQ ID NO: 1070813 - RNA, 19 nt, Artificial Sequence
  Description of Artificial Sequence: Synthetic oligonucleotide
aaaaugugacuucuucuag

SEQ ID NO: 1070814 - RNA, 19 nt, Artificial Sequence
  Description of Artificial Sequence: Synthetic oligonucleotide
aauauaguuguaauaucuc

SEQ ID NO: 1070815 - RNA, 19 nt, Artificial Sequence
  Description of Artificial Sequence: Synthetic oligonucleotide
acguauucuccccauaggc

SEQ ID NO: 1070816 - RNA, 19 nt, Artificial Sequence
  Description of Artificial Sequence: Synthetic oligonucleotide
ucaacaugauuauaguuca

SEQ ID NO: 1070817 - RNA, 19 nt, Artificial Sequence
  Description of Artificial Sequence: Synthetic oligonucleotide
gauauuaggauuugaugac

SEQ ID NO: 1070818 - RNA, 19 nt, Artificial Sequence
  Description of Artificial Sequence: Synthetic oligonucleotide
uauugcuuagcucagggaa

SEQ ID NO: 1070819 - RNA, 19 nt, Artificial Sequence
  Description of Artificial Sequence: Synthetic oligonucleotide
gagaauaggacucaucuga

SEQ ID NO: 1070820 - RNA, 19 nt, Artificial Sequence
  Description of Artificial Sequence: Synthetic oligonucleotide
aaugugacuucuucuagcu

SEQ ID NO: 1070821 - RNA, 19 nt, Artificial Sequence
  Description of Artificial Sequence: Synthetic oligonucleotide
aucaaauucugguauaacu

SEQ ID NO: 1070822 - RNA, 19 nt, Artificial Sequence
  Description of Artificial Sequence: Synthetic oligonucleotide
accgucaaauuuaagaggc

SEQ ID NO: 1070823 - RNA, 19 nt, Artificial Sequence
  Description of Artificial Sequence: Synthetic oligonucleotide
ugauacaacagguucaauc

SEQ ID NO: 1070824 - RNA, 19 nt, Artificial Sequence
  Description of Artificial Sequence: Synthetic oligonucleotide
uagaaggucuuucugaccu

SEQ ID NO: 1070825 - RNA, 19 nt, Artificial Sequence
  Description of Artificial Sequence: Synthetic oligonucleotide
uguguuaaagaauguauaa

SEQ ID NO: 1070826 - RNA, 19 nt, Artificial Sequence
  Description of Artificial Sequence: Synthetic oligonucleotide
uaauagaugccaguauucg

SEQ ID NO: 1070827 - RNA, 19 nt, Artificial Sequence
  Description of Artificial Sequence: Synthetic oligonucleotide
aagaugcucacauaauaga

SEQ ID NO: 1070828 - RNA, 19 nt, Artificial Sequence
  Description of Artificial Sequence: Synthetic oligonucleotide
uggauauuaggauuugaug

SEQ ID NO: 1070829 - RNA, 19 nt, Artificial Sequence
  Description of Artificial Sequence: Synthetic oligonucleotide
acuuguuaaaagccauggc

SEQ ID NO: 1070830 - RNA, 19 nt, Artificial Sequence
  Description of Artificial Sequence: Synthetic oligonucleotide
uguaucaauuaaaauuccu

SEQ ID NO: 1070831 - RNA, 19 nt, Artificial Sequence
  Description of Artificial Sequence: Synthetic oligonucleotide
ugagugguaucacaaagcu

SEQ ID NO: 1070832 - RNA, 19 nt, Artificial Sequence
  Description of Artificial Sequence: Synthetic oligonucleotide
uuaagaugcucacauaaua

SEQ ID NO: 1070833 - RNA, 19 nt, Artificial Sequence
  Description of Artificial Sequence: Synthetic oligonucleotide
cuaaaccucguaaugcucc

SEQ ID NO: 1070834 - RNA, 19 nt, Artificial Sequence
  Description of Artificial Sequence: Synthetic oligonucleotide
uguauuuagaguuggguuu

SEQ ID NO: 1070835 - RNA, 19 nt, Artificial Sequence
  Description of Artificial Sequence: Synthetic oligonucleotide
uauuaggauuugaugacca

SEQ ID NO: 1070836 - RNA, 19 nt, Artificial Sequence
  Description of Artificial Sequence: Synthetic oligonucleotide
aauaauggauuuguugaug

SEQ ID NO: 1070837 - RNA, 19 nt, Artificial Sequence
  Description of Artificial Sequence: Synthetic oligonucleotide
uuugaugaccaacacugga

SEQ ID NO: 1070838 - RNA, 19 nt, Artificial Sequence
  Description of Artificial Sequence: Synthetic oligonucleotide
aauagaugccaguauucga

SEQ ID NO: 1070839 - RNA, 19 nt, Artificial Sequence
  Description of Artificial Sequence: Synthetic oligonucleotide
uguauaaguuguauuuaga

SEQ ID NO: 1070840 - RNA, 19 nt, Artificial Sequence
  Description of Artificial Sequence: Synthetic oligonucleotide
aauugacaccugaaguugc

SEQ ID NO: 1070841 - RNA, 19 nt, Artificial Sequence
  Description of Artificial Sequence: Synthetic oligonucleotide
uauuugagugguaucacaa

SEQ ID NO: 1070842 - RNA, 19 nt, Artificial Sequence
  Description of Artificial Sequence: Synthetic oligonucleotide
aauaucuccgaaaggcuuc

SEQ ID NO: 1070843 - RNA, 19 nt, Artificial Sequence
  Description of Artificial Sequence: Synthetic oligonucleotide
uccggggacaccuucacgg

SEQ ID NO: 1070844 - RNA, 19 nt, Artificial Sequence
  Description of Artificial Sequence: Synthetic oligonucleotide
cuugccaaacaauggagcc

SEQ ID NO: 1070845 - RNA, 19 nt, Artificial Sequence
  Description of Artificial Sequence: Synthetic oligonucleotide
uccacuaugugccagugaa

SEQ ID NO: 1070846 - RNA, 19 nt, Artificial Sequence
  Description of Artificial Sequence: Synthetic oligonucleotide
uguaauauuugagugguau

SEQ ID NO: 1070847 - RNA, 19 nt, Artificial Sequence
  Description of Artificial Sequence: Synthetic oligonucleotide
gugaagaacauuaaacuug

SEQ ID NO: 1070848 - RNA, 19 nt, Artificial Sequence
  Description of Artificial Sequence: Synthetic oligonucleotide
uuguaauaucuccgaaagg

SEQ ID NO: 1070849 - RNA, 19 nt, Artificial Sequence
  Description of Artificial Sequence: Synthetic oligonucleotide
auuuaagaggcucuacugu

SEQ ID NO: 1070850 - RNA, 19 nt, Artificial Sequence
  Description of Artificial Sequence: Synthetic oligonucleotide
gaaccgggcauauucaagc

SEQ ID NO: 1070851 - RNA, 19 nt, Artificial Sequence
  Description of Artificial Sequence: Synthetic oligonucleotide
aacuaacuggcuaaauguc

SEQ ID NO: 1070852 - RNA, 19 nt, Artificial Sequence
  Description of Artificial Sequence: Synthetic oligonucleotide
ucucuaaaccucguaaugc

SEQ ID NO: 1070853 - RNA, 19 nt, Artificial Sequence
  Description of Artificial Sequence: Synthetic oligonucleotide
agugguaucacaaagcuuu

SEQ ID NO: 1070854 - RNA, 19 nt, Artificial Sequence
  Description of Artificial Sequence: Synthetic oligonucleotide
agugaagaacauuaaacuu

SEQ ID NO: 1070855 - RNA, 19 nt, Artificial Sequence
  Description of Artificial Sequence: Synthetic oligonucleotide
gaauaggacucaucugagg

SEQ ID NO: 1070856 - RNA, 19 nt, Artificial Sequence
  Description of Artificial Sequence: Synthetic oligonucleotide
auaauagaugccaguauuc

SEQ ID NO: 1070857 - RNA, 19 nt, Artificial Sequence
  Description of Artificial Sequence: Synthetic oligonucleotide
uugguguauagacaugaga

SEQ ID NO: 1070858 - RNA, 19 nt, Artificial Sequence
  Description of Artificial Sequence: Synthetic oligonucleotide
auuuggacaucucuuggug

SEQ ID NO: 1070859 - RNA, 19 nt, Artificial Sequence
  Description of Artificial Sequence: Synthetic oligonucleotide
ggcuaaaugucucuaaacc

SEQ ID NO: 1070860 - RNA, 19 nt, Artificial Sequence
  Description of Artificial Sequence: Synthetic oligonucleotide
uagcuaaugaugucuaagu

SEQ ID NO: 1070861 - RNA, 19 nt, Artificial Sequence
  Description of Artificial Sequence: Synthetic oligonucleotide
cuuggaaccgggcauauuc

SEQ ID NO: 1070862 - RNA, 19 nt, Artificial Sequence
  Description of Artificial Sequence: Synthetic oligonucleotide
auagaugccaguauucgag

SEQ ID NO: 1070863 - RNA, 19 nt, Artificial Sequence
  Description of Artificial Sequence: Synthetic oligonucleotide
ucucuugguguauagacau

SEQ ID NO: 1070864 - RNA, 19 nt, Artificial Sequence
  Description of Artificial Sequence: Synthetic oligonucleotide
aggauuugaugaccaacac

SEQ ID NO: 1070865 - RNA, 19 nt, Artificial Sequence
  Description of Artificial Sequence: Synthetic oligonucleotide
augaccaacacuggaaauc

SEQ ID NO: 1070866 - RNA, 19 nt, Artificial Sequence
  Description of Artificial Sequence: Synthetic oligonucleotide
ucacagaaccgucaaauuu

SEQ ID NO: 1070867 - RNA, 19 nt, Artificial Sequence
  Description of Artificial Sequence: Synthetic oligonucleotide
cuaauggccacaaugucca

SEQ ID NO: 1070868 - RNA, 19 nt, Artificial Sequence
  Description of Artificial Sequence: Synthetic oligonucleotide
uuuuccggggcgauguuca

SEQ ID NO: 1070869 - RNA, 19 nt, Artificial Sequence
  Description of Artificial Sequence: Synthetic oligonucleotide
auagaaagauuccagucuu

SEQ ID NO: 1070870 - RNA, 19 nt, Artificial Sequence
  Description of Artificial Sequence: Synthetic oligonucleotide
uugcccguagcuaaugaug

SEQ ID NO: 1070871 - RNA, 19 nt, Artificial Sequence
  Description of Artificial Sequence: Synthetic oligonucleotide
uugaaacuuagcagggcca

SEQ ID NO: 1070872 - RNA, 19 nt, Artificial Sequence
  Description of Artificial Sequence: Synthetic oligonucleotide
guguuaaagaauguauaag

SEQ ID NO: 1070873 - RNA, 19 nt, Artificial Sequence
  Description of Artificial Sequence: Synthetic oligonucleotide
auguaucaauuaaaauucc

SEQ ID NO: 1070874 - RNA, 19 nt, Artificial Sequence
  Description of Artificial Sequence: Synthetic oligonucleotide
uacucugauaaggaaaaga

SEQ ID NO: 1070875 - RNA, 19 nt, Artificial Sequence
  Description of Artificial Sequence: Synthetic oligonucleotide
ggagagucaguaauaaugg

SEQ ID NO: 1070876 - RNA, 19 nt, Artificial Sequence
  Description of Artificial Sequence: Synthetic oligonucleotide
cuaacugagcuccaccuug

SEQ ID NO: 1070877 - RNA, 19 nt, Artificial Sequence
  Description of Artificial Sequence: Synthetic oligonucleotide
uaauaauggauuuguugau

SEQ ID NO: 1070878 - RNA, 19 nt, Artificial Sequence
  Description of Artificial Sequence: Synthetic oligonucleotide
ugguaaacuaacuggcuaa

SEQ ID NO: 1070879 - RNA, 19 nt, Artificial Sequence
  Description of Artificial Sequence: Synthetic oligonucleotide
aagguuaguugcauccacg

SEQ ID NO: 1070880 - RNA, 19 nt, Artificial Sequence
  Description of Artificial Sequence: Synthetic oligonucleotide
gcuaaugaugucuaaguac

SEQ ID NO: 1070881 - RNA, 19 nt, Artificial Sequence
  Description of Artificial Sequence: Synthetic oligonucleotide
ugugcagcuauuccacggc

SEQ ID NO: 1070882 - RNA, 19 nt, Artificial Sequence
  Description of Artificial Sequence: Synthetic oligonucleotide
ucuguuagccuugaggaaa

SEQ ID NO: 1070883 - RNA, 19 nt, Artificial Sequence
  Description of Artificial Sequence: Synthetic oligonucleotide
agagaauaggacucaucug

SEQ ID NO: 1070884 - RNA, 19 nt, Artificial Sequence
  Description of Artificial Sequence: Synthetic oligonucleotide
ugauaaggaaaagacuggu

SEQ ID NO: 1070885 - RNA, 19 nt, Artificial Sequence
  Description of Artificial Sequence: Synthetic oligonucleotide
guagcuaaugaugucuaag

SEQ ID NO: 1070886 - RNA, 19 nt, Artificial Sequence
  Description of Artificial Sequence: Synthetic oligonucleotide
uguauagacaugagacaaa

SEQ ID NO: 1070887 - RNA, 19 nt, Artificial Sequence
  Description of Artificial Sequence: Synthetic oligonucleotide
guggaauucggaccguggg

SEQ ID NO: 1070888 - RNA, 19 nt, Artificial Sequence
  Description of Artificial Sequence: Synthetic oligonucleotide
ggaaaucuacuucaucucc

SEQ ID NO: 1070889 - RNA, 19 nt, Artificial Sequence
  Description of Artificial Sequence: Synthetic oligonucleotide
uugcccgaggccauaaucu

SEQ ID NO: 1070890 - RNA, 19 nt, Artificial Sequence
  Description of Artificial Sequence: Synthetic oligonucleotide
cuaaguaccaaggagcaga

SEQ ID NO: 1070891 - RNA, 19 nt, Artificial Sequence
  Description of Artificial Sequence: Synthetic oligonucleotide
uggguuuauagguccaacu

SEQ ID NO: 1070892 - RNA, 19 nt, Artificial Sequence
  Description of Artificial Sequence: Synthetic oligonucleotide
aaaccuuggagagucagua

SEQ ID NO: 1070893 - RNA, 19 nt, Artificial Sequence
  Description of Artificial Sequence: Synthetic oligonucleotide
ucgaauuccuuggaaccgg

SEQ ID NO: 1070894 - RNA, 19 nt, Artificial Sequence
  Description of Artificial Sequence: Synthetic oligonucleotide
ugcccguagcuaaugaugu

SEQ ID NO: 1070895 - RNA, 19 nt, Artificial Sequence
  Description of Artificial Sequence: Synthetic oligonucleotide
uccccaaacucuguuagcc

SEQ ID NO: 1070896 - RNA, 19 nt, Artificial Sequence
  Description of Artificial Sequence: Synthetic oligonucleotide
uucugguauaacucgaauu

SEQ ID NO: 1070897 - RNA, 19 nt, Artificial Sequence
  Description of Artificial Sequence: Synthetic oligonucleotide
aagcucuacuuuaucauca

SEQ ID NO: 1070898 - RNA, 19 nt, Artificial Sequence
  Description of Artificial Sequence: Synthetic oligonucleotide
auaagagucuugguaaacu

SEQ ID NO: 1070899 - RNA, 19 nt, Artificial Sequence
  Description of Artificial Sequence: Synthetic oligonucleotide
gucucuaaaccucguaaug

SEQ ID NO: 1070900 - RNA, 19 nt, Artificial Sequence
  Description of Artificial Sequence: Synthetic oligonucleotide
gaacgcgguacucugauaa

SEQ ID NO: 1070901 - RNA, 19 nt, Artificial Sequence
  Description of Artificial Sequence: Synthetic oligonucleotide
uggauguaucaauuaaaau

SEQ ID NO: 1070902 - RNA, 19 nt, Artificial Sequence
  Description of Artificial Sequence: Synthetic oligonucleotide
uagccuugaggaaagccac

SEQ ID NO: 1070903 - RNA, 19 nt, Artificial Sequence
  Description of Artificial Sequence: Synthetic oligonucleotide
ugucucuaaaccucguaau

SEQ ID NO: 1070904 - RNA, 19 nt, Artificial Sequence
  Description of Artificial Sequence: Synthetic oligonucleotide
aaugucucuaaaccucgua

SEQ ID NO: 1070905 - RNA, 19 nt, Artificial Sequence
  Description of Artificial Sequence: Synthetic oligonucleotide
uggaauucggaccguggga

SEQ ID NO: 1070906 - RNA, 19 nt, Artificial Sequence
  Description of Artificial Sequence: Synthetic oligonucleotide
uaaaccucguaaugcuccc

SEQ ID NO: 1070907 - RNA, 19 nt, Artificial Sequence
  Description of Artificial Sequence: Synthetic oligonucleotide
uuauugcuuagcucaggga

SEQ ID NO: 1070908 - RNA, 19 nt, Artificial Sequence
  Description of Artificial Sequence: Synthetic oligonucleotide
caugauuauaguucaagcu

SEQ ID NO: 1070909 - RNA, 19 nt, Artificial Sequence
  Description of Artificial Sequence: Synthetic oligonucleotide
augucucuaaaccucguaa

SEQ ID NO: 1070910 - RNA, 19 nt, Artificial Sequence
  Description of Artificial Sequence: Synthetic oligonucleotide
guaauauuugagugguauc

SEQ ID NO: 1070911 - RNA, 19 nt, Artificial Sequence
  Description of Artificial Sequence: Synthetic oligonucleotide
uucacgggcagguaguguc

SEQ ID NO: 1070912 - RNA, 19 nt, Artificial Sequence
  Description of Artificial Sequence: Synthetic oligonucleotide
cucguaaugcuccccaaac

SEQ ID NO: 1070913 - RNA, 19 nt, Artificial Sequence
  Description of Artificial Sequence: Synthetic oligonucleotide
guuaguugcauccacguau

SEQ ID NO: 1070914 - RNA, 19 nt, Artificial Sequence
  Description of Artificial Sequence: Synthetic oligonucleotide
agacuggucguccacuaug

SEQ ID NO: 1070915 - RNA, 19 nt, Artificial Sequence
  Description of Artificial Sequence: Synthetic oligonucleotide
aacgcgguacucugauaag

SEQ ID NO: 1070916 - RNA, 19 nt, Artificial Sequence
  Description of Artificial Sequence: Synthetic oligonucleotide
auaacucgaauuccuugga

SEQ ID NO: 1070917 - RNA, 19 nt, Artificial Sequence
  Description of Artificial Sequence: Synthetic oligonucleotide
ucguaaugcuccccaaacu

SEQ ID NO: 1070918 - RNA, 19 nt, Artificial Sequence
  Description of Artificial Sequence: Synthetic oligonucleotide
ggagauaaggaaguuuucc

SEQ ID NO: 1070919 - RNA, 19 nt, Artificial Sequence
  Description of Artificial Sequence: Synthetic oligonucleotide
ucgaguguugugauacaac

SEQ ID NO: 1070920 - RNA, 19 nt, Artificial Sequence
  Description of Artificial Sequence: Synthetic oligonucleotide
ccauaaucuuggaauaagg

SEQ ID NO: 1070921 - RNA, 19 nt, Artificial Sequence
  Description of Artificial Sequence: Synthetic oligonucleotide
agguuaguugcauccacgu

SEQ ID NO: 1070922 - RNA, 19 nt, Artificial Sequence
  Description of Artificial Sequence: Synthetic oligonucleotide
uccggggcgauguucagca

SEQ ID NO: 1070923 - RNA, 19 nt, Artificial Sequence
  Description of Artificial Sequence: Synthetic oligonucleotide
cucgaauuccuuggaaccg

SEQ ID NO: 1070924 - RNA, 19 nt, Artificial Sequence
  Description of Artificial Sequence: Synthetic oligonucleotide
uuggaaccgggcauauuca

SEQ ID NO: 1070925 - RNA, 19 nt, Artificial Sequence
  Description of Artificial Sequence: Synthetic oligonucleotide
aguauucgaguguugugau

SEQ ID NO: 1070926 - RNA, 19 nt, Artificial Sequence
  Description of Artificial Sequence: Synthetic oligonucleotide
ggguaauugacaccugaag

SEQ ID NO: 1070927 - RNA, 19 nt, Artificial Sequence
  Description of Artificial Sequence: Synthetic oligonucleotide
ucuuggaauaagguuaguu

SEQ ID NO: 1070928 - RNA, 19 nt, Artificial Sequence
  Description of Artificial Sequence: Synthetic oligonucleotide
acuaacuggcuaaaugucu

SEQ ID NO: 1070929 - RNA, 19 nt, Artificial Sequence
  Description of Artificial Sequence: Synthetic oligonucleotide
aaguagagaauaggacuca

SEQ ID NO: 1070930 - RNA, 19 nt, Artificial Sequence
  Description of Artificial Sequence: Synthetic oligonucleotide
agcuucgccaaauaauuuu

SEQ ID NO: 1070931 - RNA, 19 nt, Artificial Sequence
  Description of Artificial Sequence: Synthetic oligonucleotide
cagugaagaacauuaaacu

SEQ ID NO: 1070932 - RNA, 19 nt, Artificial Sequence
  Description of Artificial Sequence: Synthetic oligonucleotide
aaccgggcauauucaagca

SEQ ID NO: 1070933 - RNA, 19 nt, Artificial Sequence
  Description of Artificial Sequence: Synthetic oligonucleotide
ugcauccacguauucuccc

SEQ ID NO: 1070934 - RNA, 19 nt, Artificial Sequence
  Description of Artificial Sequence: Synthetic oligonucleotide
ucgccaaauaauuuucauu

SEQ ID NO: 1070935 - RNA, 19 nt, Artificial Sequence
  Description of Artificial Sequence: Synthetic oligonucleotide
guguauagacaugagacaa

SEQ ID NO: 1070936 - RNA, 19 nt, Artificial Sequence
  Description of Artificial Sequence: Synthetic oligonucleotide
uaacucgaauuccuuggaa

SEQ ID NO: 1070937 - RNA, 19 nt, Artificial Sequence
  Description of Artificial Sequence: Synthetic oligonucleotide
cacguauucuccccauagg

SEQ ID NO: 1070938 - RNA, 19 nt, Artificial Sequence
  Description of Artificial Sequence: Synthetic oligonucleotide
ugcagcuauuccacggcug

SEQ ID NO: 1070939 - RNA, 19 nt, Artificial Sequence
  Description of Artificial Sequence: Synthetic oligonucleotide
uugcauccacguauucucc

SEQ ID NO: 1070940 - RNA, 19 nt, Artificial Sequence
  Description of Artificial Sequence: Synthetic oligonucleotide
agaauaggacucaucugag

SEQ ID NO: 1070941 - RNA, 19 nt, Artificial Sequence
  Description of Artificial Sequence: Synthetic oligonucleotide
guaauugacaccugaaguu

SEQ ID NO: 1070942 - RNA, 19 nt, Artificial Sequence
  Description of Artificial Sequence: Synthetic oligonucleotide
uuuaugcuaauggccacaa

SEQ ID NO: 1070943 - RNA, 19 nt, Artificial Sequence
  Description of Artificial Sequence: Synthetic oligonucleotide
uuagcucagggaacgcggu

SEQ ID NO: 1070944 - RNA, 19 nt, Artificial Sequence
  Description of Artificial Sequence: Synthetic oligonucleotide
gguaauugacaccugaagu

SEQ ID NO: 1070945 - RNA, 19 nt, Artificial Sequence
  Description of Artificial Sequence: Synthetic oligonucleotide
ugcucacauaauagaugcc

SEQ ID NO: 1070946 - RNA, 19 nt, Artificial Sequence
  Description of Artificial Sequence: Synthetic oligonucleotide
ucuugcccguagcuaauga

SEQ ID NO: 1070947 - RNA, 19 nt, Artificial Sequence
  Description of Artificial Sequence: Synthetic oligonucleotide
uccgccguggaauucggac

SEQ ID NO: 1070948 - RNA, 19 nt, Artificial Sequence
  Description of Artificial Sequence: Synthetic oligonucleotide
aauucugguauaacucgaa

SEQ ID NO: 1070949 - RNA, 19 nt, Artificial Sequence
  Description of Artificial Sequence: Synthetic oligonucleotide
aguugcauccacguauucu

SEQ ID NO: 1070950 - RNA, 19 nt, Artificial Sequence
  Description of Artificial Sequence: Synthetic oligonucleotide
accucuugccaaacaaugg

SEQ ID NO: 1070951 - RNA, 19 nt, Artificial Sequence
  Description of Artificial Sequence: Synthetic oligonucleotide
uauuccacggcugaccauu

SEQ ID NO: 1070952 - RNA, 19 nt, Artificial Sequence
  Description of Artificial Sequence: Synthetic oligonucleotide
uuuauagguccaacucuuu

SEQ ID NO: 1070953 - RNA, 19 nt, Artificial Sequence
  Description of Artificial Sequence: Synthetic oligonucleotide
cagggguaucaaauucugg

SEQ ID NO: 1070954 - RNA, 19 nt, Artificial Sequence
  Description of Artificial Sequence: Synthetic oligonucleotide
ucuaacugagcuccaccuu

SEQ ID NO: 1070955 - RNA, 19 nt, Artificial Sequence
  Description of Artificial Sequence: Synthetic oligonucleotide
uggucccugcacaaguaga

SEQ ID NO: 1070956 - RNA, 19 nt, Artificial Sequence
  Description of Artificial Sequence: Synthetic oligonucleotide
auuaggauuugaugaccaa

SEQ ID NO: 1070957 - RNA, 19 nt, Artificial Sequence
  Description of Artificial Sequence: Synthetic oligonucleotide
gguguauagacaugagaca

SEQ ID NO: 1070958 - RNA, 19 nt, Artificial Sequence
  Description of Artificial Sequence: Synthetic oligonucleotide
ugaaacuuagcagggccau

SEQ ID NO: 1070959 - RNA, 19 nt, Artificial Sequence
  Description of Artificial Sequence: Synthetic oligonucleotide
ucuucuagcuucgccaaau

SEQ ID NO: 1070960 - RNA, 19 nt, Artificial Sequence
  Description of Artificial Sequence: Synthetic oligonucleotide
aauucggaccgugggagau

SEQ ID NO: 1070961 - RNA, 19 nt, Artificial Sequence
  Description of Artificial Sequence: Synthetic oligonucleotide
ggaauucggaccgugggag

SEQ ID NO: 1070962 - RNA, 19 nt, Artificial Sequence
  Description of Artificial Sequence: Synthetic oligonucleotide
ggguuuauagguccaacuc

SEQ ID NO: 1070963 - RNA, 19 nt, Artificial Sequence
  Description of Artificial Sequence: Synthetic oligonucleotide
aaccuuggagagucaguaa

SEQ ID NO: 1070964 - RNA, 19 nt, Artificial Sequence
  Description of Artificial Sequence: Synthetic oligonucleotide
caguauucgaguguuguga

SEQ ID NO: 1070965 - RNA, 19 nt, Artificial Sequence
  Description of Artificial Sequence: Synthetic oligonucleotide
ugacaaguuguuucugcuu

SEQ ID NO: 1070966 - RNA, 19 nt, Artificial Sequence
  Description of Artificial Sequence: Synthetic oligonucleotide
gaccgugggagauaaggaa

SEQ ID NO: 1070967 - RNA, 19 nt, Artificial Sequence
  Description of Artificial Sequence: Synthetic oligonucleotide
uucgaguguugugauacaa

SEQ ID NO: 1070968 - RNA, 19 nt, Artificial Sequence
  Description of Artificial Sequence: Synthetic oligonucleotide
cauaauagaugccaguauu

SEQ ID NO: 1070969 - RNA, 19 nt, Artificial Sequence
  Description of Artificial Sequence: Synthetic oligonucleotide
uuggagagucaguaauaau

SEQ ID NO: 1070970 - RNA, 19 nt, Artificial Sequence
  Description of Artificial Sequence: Synthetic oligonucleotide
uggauuuguugauggugaa

SEQ ID NO: 1070971 - RNA, 19 nt, Artificial Sequence
  Description of Artificial Sequence: Synthetic oligonucleotide
agcggugucucaccagucu

SEQ ID NO: 1070972 - RNA, 19 nt, Artificial Sequence
  Description of Artificial Sequence: Synthetic oligonucleotide
gcuaaaugucucuaaaccu

SEQ ID NO: 1070973 - RNA, 19 nt, Artificial Sequence
  Description of Artificial Sequence: Synthetic oligonucleotide
gaaaucuacuucaucuccu

SEQ ID NO: 1070974 - RNA, 19 nt, Artificial Sequence
  Description of Artificial Sequence: Synthetic oligonucleotide
aaaugucucuaaaccucgu

SEQ ID NO: 1070975 - RNA, 19 nt, Artificial Sequence
  Description of Artificial Sequence: Synthetic oligonucleotide
cuucgccaaauaauuuuca

SEQ ID NO: 1070976 - RNA, 19 nt, Artificial Sequence
  Description of Artificial Sequence: Synthetic oligonucleotide
cuagcuucgccaaauaauu

SEQ ID NO: 1070977 - RNA, 19 nt, Artificial Sequence
  Description of Artificial Sequence: Synthetic oligonucleotide
ggauguaauaauauccaaa

SEQ ID NO: 1070978 - RNA, 19 nt, Artificial Sequence
  Description of Artificial Sequence: Synthetic oligonucleotide
uuccagucuugcccguagc

SEQ ID NO: 1070979 - RNA, 19 nt, Artificial Sequence
  Description of Artificial Sequence: Synthetic oligonucleotide
uggaaccgggcauauucaa

SEQ ID NO: 1070980 - RNA, 19 nt, Artificial Sequence
  Description of Artificial Sequence: Synthetic oligonucleotide
uuggguuuauagguccaac

SEQ ID NO: 1070981 - RNA, 19 nt, Artificial Sequence
  Description of Artificial Sequence: Synthetic oligonucleotide
gguuuauagguccaacucu

SEQ ID NO: 1070982 - RNA, 19 nt, Artificial Sequence
  Description of Artificial Sequence: Synthetic oligonucleotide
gcucacauaauagaugcca

SEQ ID NO: 1070983 - RNA, 19 nt, Artificial Sequence
  Description of Artificial Sequence: Synthetic oligonucleotide
ggccccauaagagucuugg

SEQ ID NO: 1070984 - RNA, 19 nt, Artificial Sequence
  Description of Artificial Sequence: Synthetic oligonucleotide
ccauuuggacaucucuugg

SEQ ID NO: 1070985 - RNA, 19 nt, Artificial Sequence
  Description of Artificial Sequence: Synthetic oligonucleotide
acaaauaguuuuacaugau

SEQ ID NO: 1070986 - RNA, 19 nt, Artificial Sequence
  Description of Artificial Sequence: Synthetic oligonucleotide
cagggaacgcgguacucug

SEQ ID NO: 1070987 - RNA, 19 nt, Artificial Sequence
  Description of Artificial Sequence: Synthetic oligonucleotide
cuuggagagucaguaauaa

SEQ ID NO: 1070988 - RNA, 19 nt, Artificial Sequence
  Description of Artificial Sequence: Synthetic oligonucleotide
ucacgggcagguagugucu

SEQ ID NO: 1070989 - RNA, 19 nt, Artificial Sequence
  Description of Artificial Sequence: Synthetic oligonucleotide
uuguaauauuugaguggua

SEQ ID NO: 1070990 - RNA, 19 nt, Artificial Sequence
  Description of Artificial Sequence: Synthetic oligonucleotide
ugcagcggugucucaccag

SEQ ID NO: 1070991 - RNA, 19 nt, Artificial Sequence
  Description of Artificial Sequence: Synthetic oligonucleotide
ucuucacgggcagguagug

SEQ ID NO: 1070992 - RNA, 19 nt, Artificial Sequence
  Description of Artificial Sequence: Synthetic oligonucleotide
gaauucggaccgugggaga

SEQ ID NO: 1070993 - RNA, 19 nt, Artificial Sequence
  Description of Artificial Sequence: Synthetic oligonucleotide
aguagagaauaggacucau

SEQ ID NO: 1070994 - RNA, 19 nt, Artificial Sequence
  Description of Artificial Sequence: Synthetic oligonucleotide
guauuuagaguuggguuua

SEQ ID NO: 1070995 - RNA, 19 nt, Artificial Sequence
  Description of Artificial Sequence: Synthetic oligonucleotide
auugacaccugaaguugcu

SEQ ID NO: 1070996 - RNA, 19 nt, Artificial Sequence
  Description of Artificial Sequence: Synthetic oligonucleotide
ggauuuguugauggugaag

SEQ ID NO: 1070997 - RNA, 19 nt, Artificial Sequence
  Description of Artificial Sequence: Synthetic oligonucleotide
uuaugcuaauggccacaau

SEQ ID NO: 1070998 - RNA, 19 nt, Artificial Sequence
  Description of Artificial Sequence: Synthetic oligonucleotide
cuuuaugcuaauggccaca

SEQ ID NO: 1070999 - RNA, 19 nt, Artificial Sequence
  Description of Artificial Sequence: Synthetic oligonucleotide
cuggcuaaaugucucuaaa

SEQ ID NO: 1071000 - RNA, 19 nt, Artificial Sequence
  Description of Artificial Sequence: Synthetic oligonucleotide
guagagaauaggacucauc

SEQ ID NO: 1071001 - RNA, 19 nt, Artificial Sequence
  Description of Artificial Sequence: Synthetic oligonucleotide
guaauaucuccgaaaggcu

SEQ ID NO: 1071002 - RNA, 19 nt, Artificial Sequence
  Description of Artificial Sequence: Synthetic oligonucleotide
cccauaagagucuugguaa

SEQ ID NO: 1071003 - RNA, 19 nt, Artificial Sequence
  Description of Artificial Sequence: Synthetic oligonucleotide
caacagguucaaucaauaa

SEQ ID NO: 1071004 - RNA, 19 nt, Artificial Sequence
  Description of Artificial Sequence: Synthetic oligonucleotide
cagaaccgucaaauuuaag

SEQ ID NO: 1071005 - RNA, 19 nt, Artificial Sequence
  Description of Artificial Sequence: Synthetic oligonucleotide
ccacguauucuccccauag

SEQ ID NO: 1071006 - RNA, 19 nt, Artificial Sequence
  Description of Artificial Sequence: Synthetic oligonucleotide
uucggaccgugggagauaa

SEQ ID NO: 1071007 - RNA, 19 nt, Artificial Sequence
  Description of Artificial Sequence: Synthetic oligonucleotide
guacucugauaaggaaaag

SEQ ID NO: 1071008 - RNA, 19 nt, Artificial Sequence
  Description of Artificial Sequence: Synthetic oligonucleotide
ugcaaaccuuggagaguca

SEQ ID NO: 1071009 - RNA, 19 nt, Artificial Sequence
  Description of Artificial Sequence: Synthetic oligonucleotide
gauuauaguucaagcugcu

SEQ ID NO: 1071010 - RNA, 19 nt, Artificial Sequence
  Description of Artificial Sequence: Synthetic oligonucleotide
cuccgaaaggcuuccugca

SEQ ID NO: 1071011 - RNA, 19 nt, Artificial Sequence
  Description of Artificial Sequence: Synthetic oligonucleotide
acgggcagguagugucugg

SEQ ID NO: 1071012 - RNA, 19 nt, Artificial Sequence
  Description of Artificial Sequence: Synthetic oligonucleotide
uaguugcauccacguauuc

SEQ ID NO: 1071013 - RNA, 19 nt, Artificial Sequence
  Description of Artificial Sequence: Synthetic oligonucleotide
cagucuuuuaaaguucuua

SEQ ID NO: 1071014 - RNA, 19 nt, Artificial Sequence
  Description of Artificial Sequence: Synthetic oligonucleotide
uccacguauucuccccaua

SEQ ID NO: 1071015 - RNA, 19 nt, Artificial Sequence
  Description of Artificial Sequence: Synthetic oligonucleotide
gcaaaccuuggagagucag

SEQ ID NO: 1071016 - RNA, 19 nt, Artificial Sequence
  Description of Artificial Sequence: Synthetic oligonucleotide
uguuagccuugaggaaagc

SEQ ID NO: 1071017 - RNA, 19 nt, Artificial Sequence
  Description of Artificial Sequence: Synthetic oligonucleotide
ggauuugaugaccaacacu

SEQ ID NO: 1071018 - RNA, 19 nt, Artificial Sequence
  Description of Artificial Sequence: Synthetic oligonucleotide
augagacaaagaauagcuu

SEQ ID NO: 1071019 - RNA, 19 nt, Artificial Sequence
  Description of Artificial Sequence: Synthetic oligonucleotide
ccagggguaucaaauucug

SEQ ID NO: 1071020 - RNA, 19 nt, Artificial Sequence
  Description of Artificial Sequence: Synthetic oligonucleotide
uauuuagaguuggguuuau

SEQ ID NO: 1071021 - RNA, 19 nt, Artificial Sequence
  Description of Artificial Sequence: Synthetic oligonucleotide
aggaaguuuuccggggcga

SEQ ID NO: 1071022 - RNA, 19 nt, Artificial Sequence
  Description of Artificial Sequence: Synthetic oligonucleotide
guaaugcuccccaaacucu

SEQ ID NO: 1071023 - RNA, 19 nt, Artificial Sequence
  Description of Artificial Sequence: Synthetic oligonucleotide
gcagguagugucuggaugu

SEQ ID NO: 1071024 - RNA, 19 nt, Artificial Sequence
  Description of Artificial Sequence: Synthetic oligonucleotide
ccaguauucgaguguugug

SEQ ID NO: 1071025 - RNA, 19 nt, Artificial Sequence
  Description of Artificial Sequence: Synthetic oligonucleotide
ucucaccaacagcgcuugc

SEQ ID NO: 1071026 - RNA, 19 nt, Artificial Sequence
  Description of Artificial Sequence: Synthetic oligonucleotide
gcuucgccaaauaauuuuc

SEQ ID NO: 1071027 - RNA, 19 nt, Artificial Sequence
  Description of Artificial Sequence: Synthetic oligonucleotide
ugcuuagcucagggaacgc

SEQ ID NO: 1071028 - RNA, 19 nt, Artificial Sequence
  Description of Artificial Sequence: Synthetic oligonucleotide
auuccacggcugaccauuc

SEQ ID NO: 1071029 - RNA, 19 nt, Artificial Sequence
  Description of Artificial Sequence: Synthetic oligonucleotide
auccacguauucuccccau

SEQ ID NO: 1071030 - RNA, 19 nt, Artificial Sequence
  Description of Artificial Sequence: Synthetic oligonucleotide
cugaccauucugcagcggu

SEQ ID NO: 1071031 - RNA, 19 nt, Artificial Sequence
  Description of Artificial Sequence: Synthetic oligonucleotide
gacaaagaauagcuuccuu

SEQ ID NO: 1071032 - RNA, 19 nt, Artificial Sequence
  Description of Artificial Sequence: Synthetic oligonucleotide
guauucgaguguugugaua

SEQ ID NO: 1071033 - RNA, 19 nt, Artificial Sequence
  Description of Artificial Sequence: Synthetic oligonucleotide
auuuagaguuggguuuaua

SEQ ID NO: 1071034 - RNA, 19 nt, Artificial Sequence
  Description of Artificial Sequence: Synthetic oligonucleotide
cggaccgugggagauaagg

SEQ ID NO: 1071035 - RNA, 19 nt, Artificial Sequence
  Description of Artificial Sequence: Synthetic oligonucleotide
gaggcucuacuguguagua

SEQ ID NO: 1071036 - RNA, 19 nt, Artificial Sequence
  Description of Artificial Sequence: Synthetic oligonucleotide
cguggaauucggaccgugg

SEQ ID NO: 1071037 - RNA, 19 nt, Artificial Sequence
  Description of Artificial Sequence: Synthetic oligonucleotide
gguaaacuaacuggcuaaa

SEQ ID NO: 1071038 - RNA, 19 nt, Artificial Sequence
  Description of Artificial Sequence: Synthetic oligonucleotide
ggguccgccguggaauucg

SEQ ID NO: 1071039 - RNA, 19 nt, Artificial Sequence
  Description of Artificial Sequence: Synthetic oligonucleotide
cacugcugauuucauugaa

SEQ ID NO: 1071040 - RNA, 19 nt, Artificial Sequence
  Description of Artificial Sequence: Synthetic oligonucleotide
accucguaaugcuccccaa

SEQ ID NO: 1071041 - RNA, 19 nt, Artificial Sequence
  Description of Artificial Sequence: Synthetic oligonucleotide
ccgccguggaauucggacc

SEQ ID NO: 1071042 - RNA, 19 nt, Artificial Sequence
  Description of Artificial Sequence: Synthetic oligonucleotide
gcggugucucaccagucug

SEQ ID NO: 1071043 - RNA, 19 nt, Artificial Sequence
  Description of Artificial Sequence: Synthetic oligonucleotide
gucuugcccguagcuaaug

SEQ ID NO: 1071044 - RNA, 19 nt, Artificial Sequence
  Description of Artificial Sequence: Synthetic oligonucleotide
cgccguggaauucggaccg

SEQ ID NO: 1071045 - RNA, 19 nt, Artificial Sequence
  Description of Artificial Sequence: Synthetic oligonucleotide
cauggaguuagaaggucuu

SEQ ID NO: 1071046 - RNA, 19 nt, Artificial Sequence
  Description of Artificial Sequence: Synthetic oligonucleotide
cguauucuccccauaggca

SEQ ID NO: 1071047 - RNA, 19 nt, Artificial Sequence
  Description of Artificial Sequence: Synthetic oligonucleotide
aggcucuacuguguaguau

SEQ ID NO: 1071048 - RNA, 19 nt, Artificial Sequence
  Description of Artificial Sequence: Synthetic oligonucleotide
guccacuaugugccaguga

SEQ ID NO: 1071049 - RNA, 19 nt, Artificial Sequence
  Description of Artificial Sequence: Synthetic oligonucleotide
gguuaguugcauccacgua

SEQ ID NO: 1071050 - RNA, 19 nt, Artificial Sequence
  Description of Artificial Sequence: Synthetic oligonucleotide
uccuuggaaccgggcauau

SEQ ID NO: 1071051 - RNA, 19 nt, Artificial Sequence
  Description of Artificial Sequence: Synthetic oligonucleotide
cuugcccguagcuaaugau

SEQ ID NO: 1071052 - RNA, 19 nt, Artificial Sequence
  Description of Artificial Sequence: Synthetic oligonucleotide
ucggaccgugggagauaag

SEQ ID NO: 1071053 - RNA, 19 nt, Artificial Sequence
  Description of Artificial Sequence: Synthetic oligonucleotide
ccccauaagagucuuggua

SEQ ID NO: 1071054 - RNA, 19 nt, Artificial Sequence
  Description of Artificial Sequence: Synthetic oligonucleotide
caacagcgcuugcccgagg

SEQ ID NO: 1071055 - RNA, 19 nt, Artificial Sequence
  Description of Artificial Sequence: Synthetic oligonucleotide
cagcggugucucaccaguc

SEQ ID NO: 1071056 - RNA, 19 nt, Artificial Sequence
  Description of Artificial Sequence: Synthetic oligonucleotide
cacgggcagguagugucug

SEQ ID NO: 1071057 - RNA, 19 nt, Artificial Sequence
  Description of Artificial Sequence: Synthetic oligonucleotide
ccauaagagucuugguaaa

SEQ ID NO: 1071058 - RNA, 19 nt, Artificial Sequence
  Description of Artificial Sequence: Synthetic oligonucleotide
gcgguacucugauaaggaa

SEQ ID NO: 1071059 - RNA, 19 nt, Artificial Sequence
  Description of Artificial Sequence: Synthetic oligonucleotide
gugcagcuauuccacggcu

SEQ ID NO: 1071060 - RNA, 19 nt, Artificial Sequence
  Description of Artificial Sequence: Synthetic oligonucleotide
cggugucucaccagucugc

SEQ ID NO: 1071061 - RNA, 19 nt, Artificial Sequence
  Description of Artificial Sequence: Synthetic oligonucleotide
caguaauaauggauuuguu

SEQ ID NO: 1071062 - RNA, 19 nt, Artificial Sequence
  Description of Artificial Sequence: Synthetic oligonucleotide
cugcagcggugucucacca

SEQ ID NO: 1071063 - RNA, 19 nt, Artificial Sequence
  Description of Artificial Sequence: Synthetic oligonucleotide
cgguacucugauaaggaaa

SEQ ID NO: 1071064 - RNA, 19 nt, Artificial Sequence
  Description of Artificial Sequence: Synthetic oligonucleotide
gagugguaucacaaagcuu

SEQ ID NO: 1071065 - RNA, 19 nt, Artificial Sequence
  Description of Artificial Sequence: Synthetic oligonucleotide
gucuucacgggcagguagu

SEQ ID NO: 1071066 - RNA, 19 nt, Artificial Sequence
  Description of Artificial Sequence: Synthetic oligonucleotide
agggaacgcgguacucuga

SEQ ID NO: 1071067 - RNA, 19 nt, Artificial Sequence
  Description of Artificial Sequence: Synthetic oligonucleotide
cacuggaaaucuacuucau

SEQ ID NO: 1071068 - RNA, 19 nt, Artificial Sequence
  Description of Artificial Sequence: Synthetic oligonucleotide
auucggaccgugggagaua

SEQ ID NO: 1071069 - RNA, 19 nt, Artificial Sequence
  Description of Artificial Sequence: Synthetic oligonucleotide
gguccgccguggaauucgg

SEQ ID NO: 1071070 - RNA, 19 nt, Artificial Sequence
  Description of Artificial Sequence: Synthetic oligonucleotide
cgcgguacucugauaagga

SEQ ID NO: 1071071 - RNA, 19 nt, Artificial Sequence
  Description of Artificial Sequence: Synthetic oligonucleotide
ggccaugaugccucuugua

SEQ ID NO: 1071072 - RNA, 19 nt, Artificial Sequence
  Description of Artificial Sequence: Synthetic oligonucleotide
gggaacgcgguacucugau

SEQ ID NO: 1071073 - RNA, 19 nt, Artificial Sequence
  Description of Artificial Sequence: Synthetic oligonucleotide
ccguagcuaaugaugucua

SEQ ID NO: 1071074 - RNA, 19 nt, Artificial Sequence
  Description of Artificial Sequence: Synthetic oligonucleotide
cccguagcuaaugaugucu

SEQ ID NO: 1071075 - RNA, 19 nt, Artificial Sequence
  Description of Artificial Sequence: Synthetic oligonucleotide
ccucguaaugcuccccaaa

SEQ ID NO: 1071076 - RNA, 19 nt, Artificial Sequence
  Description of Artificial Sequence: Synthetic oligonucleotide
ggacaucucuugguguaua

SEQ ID NO: 1071077 - RNA, 19 nt, Artificial Sequence
  Description of Artificial Sequence: Synthetic oligonucleotide
aggccccauaagagucuug

SEQ ID NO: 1071078 - RNA, 19 nt, Artificial Sequence
  Description of Artificial Sequence: Synthetic oligonucleotide
cuauuccacggcugaccau

SEQ ID NO: 1071079 - RNA, 19 nt, Artificial Sequence
  Description of Artificial Sequence: Synthetic oligonucleotide
ggaacgcgguacucugaua

SEQ ID NO: 1071080 - RNA, 19 nt, Artificial Sequence
  Description of Artificial Sequence: Synthetic oligonucleotide
gugguaucacaaagcuuuu

SEQ ID NO: 1071081 - RNA, 19 nt, Artificial Sequence
  Description of Artificial Sequence: Synthetic oligonucleotide
ccccaagacuguguauguc

SEQ ID NO: 1071082 - RNA, 19 nt, Artificial Sequence
  Description of Artificial Sequence: Synthetic oligonucleotide
gcgagcaggagggguccgc

SEQ ID NO: 1071083 - RNA, 19 nt, Artificial Sequence
  Description of Artificial Sequence: Synthetic oligonucleotide
cgagcaggagggguccgcc

SEQ ID NO: 1071084 - RNA, 19 nt, Artificial Sequence
  Description of Artificial Sequence: Synthetic oligonucleotide
ggaaguuuuccggggcgau

SEQ ID NO: 1071085 - RNA, 19 nt, Artificial Sequence
  Description of Artificial Sequence: Synthetic oligonucleotide
ccggggacaccuucacgga

SEQ ID NO: 1071086 - RNA, 19 nt, Artificial Sequence
  Description of Artificial Sequence: Synthetic oligonucleotide
ccgucaaauuuaagaggcu

SEQ ID NO: 1071087 - RNA, 19 nt, Artificial Sequence
  Description of Artificial Sequence: Synthetic oligonucleotide
gccccauaagagucuuggu

SEQ ID NO: 1071088 - RNA, 19 nt, Artificial Sequence
  Description of Artificial Sequence: Synthetic oligonucleotide
cccugcacaaguagagaau

SEQ ID NO: 1071089 - RNA, 19 nt, Artificial Sequence
  Description of Artificial Sequence: Synthetic oligonucleotide
guccgccguggaauucgga

SEQ ID NO: 1071090 - RNA, 19 nt, Artificial Sequence
  Description of Artificial Sequence: Synthetic oligonucleotide
gggcagguagugucuggau

SEQ ID NO: 1071091 - RNA, 19 nt, Artificial Sequence
  Description of Artificial Sequence: Synthetic oligonucleotide
ccggcugaagcucuacuuu

SEQ ID NO: 1071092 - RNA, 19 nt, Artificial Sequence
  Description of Artificial Sequence: Synthetic oligonucleotide
gcucuacuguguaguauuu

SEQ ID NO: 1071093 - RNA, 19 nt, Artificial Sequence
  Description of Artificial Sequence: Synthetic oligonucleotide
guguccggcugaagcucua

SEQ ID NO: 1071094 - RNA, 19 nt, Artificial Sequence
  Description of Artificial Sequence: Synthetic oligonucleotide
ccgaggccauaaucuugga

SEQ ID NO: 1071095 - RNA, 19 nt, Artificial Sequence
  Description of Artificial Sequence: Synthetic oligonucleotide
gggguccgccguggaauuc

SEQ ID NO: 1071096 - RNA, 19 nt, Artificial Sequence
  Description of Artificial Sequence: Synthetic oligonucleotide
gccaaacaauggagccuuu

SEQ ID NO: 1071097 - RNA, 19 nt, Artificial Sequence
  Description of Artificial Sequence: Synthetic oligonucleotide
auaucaaauacuuaggacc

SEQ ID NO: 1071098 - RNA, 19 nt, Artificial Sequence
  Description of Artificial Sequence: Synthetic oligonucleotide
aauacuuaggaccaaaggu

SEQ ID NO: 1071099 - RNA, 19 nt, Artificial Sequence
  Description of Artificial Sequence: Synthetic oligonucleotide
aauacuuucucauggaggu

SEQ ID NO: 1071100 - RNA, 19 nt, Artificial Sequence
  Description of Artificial Sequence: Synthetic oligonucleotide
uuaagaaugugaacuaagg

SEQ ID NO: 1071101 - RNA, 19 nt, Artificial Sequence
  Description of Artificial Sequence: Synthetic oligonucleotide
auucauuacucuuucgucc

SEQ ID NO: 1071102 - RNA, 19 nt, Artificial Sequence
  Description of Artificial Sequence: Synthetic oligonucleotide
aaucauaugaugcuugaug

SEQ ID NO: 1071103 - RNA, 19 nt, Artificial Sequence
  Description of Artificial Sequence: Synthetic oligonucleotide
uggacuuagagcaacauug

SEQ ID NO: 1071104 - RNA, 19 nt, Artificial Sequence
  Description of Artificial Sequence: Synthetic oligonucleotide
aagaacucgggcuuugacc

SEQ ID NO: 1071105 - RNA, 19 nt, Artificial Sequence
  Description of Artificial Sequence: Synthetic oligonucleotide
aguaggauaauucuaccac

SEQ ID NO: 1071106 - RNA, 19 nt, Artificial Sequence
  Description of Artificial Sequence: Synthetic oligonucleotide
guuacuucgauguuaauug

SEQ ID NO: 1071107 - RNA, 19 nt, Artificial Sequence
  Description of Artificial Sequence: Synthetic oligonucleotide
aguaguggaagccauuccc

SEQ ID NO: 1071108 - RNA, 19 nt, Artificial Sequence
  Description of Artificial Sequence: Synthetic oligonucleotide
uacucuuucguccaggaag

SEQ ID NO: 1071109 - RNA, 19 nt, Artificial Sequence
  Description of Artificial Sequence: Synthetic oligonucleotide
ucauuuaucagacuggaau

SEQ ID NO: 1071110 - RNA, 19 nt, Artificial Sequence
  Description of Artificial Sequence: Synthetic oligonucleotide
aagggauucgcugaggagc

SEQ ID NO: 1071111 - RNA, 19 nt, Artificial Sequence
  Description of Artificial Sequence: Synthetic oligonucleotide
aaacuuacuauucucuuga

SEQ ID NO: 1071112 - RNA, 19 nt, Artificial Sequence
  Description of Artificial Sequence: Synthetic oligonucleotide
ucaccuauuauauaaauua

SEQ ID NO: 1071113 - RNA, 19 nt, Artificial Sequence
  Description of Artificial Sequence: Synthetic oligonucleotide
aauacuuaaggaucaguga

SEQ ID NO: 1071114 - RNA, 19 nt, Artificial Sequence
  Description of Artificial Sequence: Synthetic oligonucleotide
aauuucuccaaaccgccuc

SEQ ID NO: 1071115 - RNA, 19 nt, Artificial Sequence
  Description of Artificial Sequence: Synthetic oligonucleotide
aacagauuguaccaaccuc

SEQ ID NO: 1071116 - RNA, 19 nt, Artificial Sequence
  Description of Artificial Sequence: Synthetic oligonucleotide
cuuagagcaacauugauga

SEQ ID NO: 1071117 - RNA, 19 nt, Artificial Sequence
  Description of Artificial Sequence: Synthetic oligonucleotide
aaauacuuaaggaucagug

SEQ ID NO: 1071118 - RNA, 19 nt, Artificial Sequence
  Description of Artificial Sequence: Synthetic oligonucleotide
ucggaaaguauucagaaaa

SEQ ID NO: 1071119 - RNA, 19 nt, Artificial Sequence
  Description of Artificial Sequence: Synthetic oligonucleotide
uugucaacugaauagcuag

SEQ ID NO: 1071120 - RNA, 19 nt, Artificial Sequence
  Description of Artificial Sequence: Synthetic oligonucleotide
agaagaucgggugugaggc

SEQ ID NO: 1071121 - RNA, 19 nt, Artificial Sequence
  Description of Artificial Sequence: Synthetic oligonucleotide
cauugaugaacucagucgg

SEQ ID NO: 1071122 - RNA, 19 nt, Artificial Sequence
  Description of Artificial Sequence: Synthetic oligonucleotide
auuacaagcagaguccacc

SEQ ID NO: 1071123 - RNA, 19 nt, Artificial Sequence
  Description of Artificial Sequence: Synthetic oligonucleotide
ucuaucaguacucaguauc

SEQ ID NO: 1071124 - RNA, 19 nt, Artificial Sequence
  Description of Artificial Sequence: Synthetic oligonucleotide
accuauugcuuuuaugagc

SEQ ID NO: 1071125 - RNA, 19 nt, Artificial Sequence
  Description of Artificial Sequence: Synthetic oligonucleotide
aauuaagacgauugcccuc

SEQ ID NO: 1071126 - RNA, 19 nt, Artificial Sequence
  Description of Artificial Sequence: Synthetic oligonucleotide
auccuuacgugcuaaauuc

SEQ ID NO: 1071127 - RNA, 19 nt, Artificial Sequence
  Description of Artificial Sequence: Synthetic oligonucleotide
uuucuuaacuccauaggug

SEQ ID NO: 1071128 - RNA, 19 nt, Artificial Sequence
  Description of Artificial Sequence: Synthetic oligonucleotide
ugcuuaaaccguaauuggg

SEQ ID NO: 1071129 - RNA, 19 nt, Artificial Sequence
  Description of Artificial Sequence: Synthetic oligonucleotide
acagauuguaccaaccucc
